United States Patent Application Publication US 2007/0042381 A1 - sequence listing, part 78

SEQ ID NO: 3563005 - RNA, 11 nt, Human
uugagauuucu

SEQ ID NO: 3563006 - RNA, 21 nt, Human
uugagcacaaaaccuguccua

SEQ ID NO: 3563007 - RNA, 14 nt, Human
uugagcagaauuca

SEQ ID NO: 3563008 - RNA, 18 nt, Human
uugagcagggauccuggu

SEQ ID NO: 3563009 - RNA, 12 nt, Human
uugagcagggcu

SEQ ID NO: 3563010 - RNA, 16 nt, Human
uugagcagggcucagc

SEQ ID NO: 3563011 - RNA, 21 nt, Human
uugagcaguggccuacaaauc

SEQ ID NO: 3563012 - RNA, 19 nt, Human
uugagcaguggcuggucca

SEQ ID NO: 3563013 - RNA, 21 nt, Human
uugagcaugacagccugcagc

SEQ ID NO: 3563014 - RNA, 17 nt, Human
uugagccaggccugggu

SEQ ID NO: 3563015 - RNA, 22 nt, Human
uugagccaggccugggucugug

SEQ ID NO: 3563016 - RNA, 18 nt, Human
uugagccccaaguccuga

SEQ ID NO: 3563017 - RNA, 19 nt, Human
uugagccccaaguccugaa

SEQ ID NO: 3563018 - RNA, 13 nt, Human
uugagcccuggcu

SEQ ID NO: 3563019 - RNA, 15 nt, Human
uugagcccuggcugu

SEQ ID NO: 3563020 - RNA, 15 nt, Human
uugagccugucaaga

SEQ ID NO: 3563021 - RNA, 14 nt, Human
uugagccuugaacu

SEQ ID NO: 3563022 - RNA, 15 nt, Human
uugagccuugaacuu

SEQ ID NO: 3563023 - RNA, 20 nt, Human
uugagcgugaaucuguaucu

SEQ ID NO: 3563024 - RNA, 14 nt, Human
uugagcuaugacuu

SEQ ID NO: 3563025 - RNA, 15 nt, Human
uugagcuaugacuua

SEQ ID NO: 3563026 - RNA, 18 nt, Human
uugagcucucucauuguc

SEQ ID NO: 3563027 - RNA, 19 nt, Human
uugagcucugcagcccagg

SEQ ID NO: 3563028 - RNA, 11 nt, Human
uugagcugccu

SEQ ID NO: 3563029 - RNA, 13 nt, Human
uugagcugccuuc

SEQ ID NO: 3563030 - RNA, 21 nt, Human
uugagcugcuuuuuuugaaac

SEQ ID NO: 3563031 - RNA, 13 nt, Human
uugagcuggccuc

SEQ ID NO: 3563032 - RNA, 12 nt, Human
uugagcuguuuu

SEQ ID NO: 3563033 - RNA, 15 nt, Human
uugagcuuaaucuuu

SEQ ID NO: 3563034 - RNA, 23 nt, Human
uugaggaaagcaagaaucagaga

SEQ ID NO: 3563035 - RNA, 15 nt, Human
uugaggaacuguaca

SEQ ID NO: 3563036 - RNA, 14 nt, Human
uugaggacacugau

SEQ ID NO: 3563037 - RNA, 17 nt, Human
uugaggacuauggaaau

SEQ ID NO: 3563038 - RNA, 13 nt, Human
uugaggacuucuu

SEQ ID NO: 3563039 - RNA, 18 nt, Human
uugaggagcauguuuugu

SEQ ID NO: 3563040 - RNA, 15 nt, Human
uugaggaguuuccua

SEQ ID NO: 3563041 - RNA, 22 nt, Human
uugaggauauauuuucacuuug

SEQ ID NO: 3563042 - RNA, 17 nt, Human
uugaggauuuugaguau

SEQ ID NO: 3563043 - RNA, 13 nt, Human
uugaggcuuugug

SEQ ID NO: 3563044 - RNA, 22 nt, Human
uugagggacaaauuuaaaacaa

SEQ ID NO: 3563045 - RNA, 14 nt, Human
uugagggcugcagu

SEQ ID NO: 3563046 - RNA, 13 nt, Human
uugaggguaggag

SEQ ID NO: 3563047 - RNA, 16 nt, Human
uugaggguugggcugg

SEQ ID NO: 3563048 - RNA, 23 nt, Human
uugagguagaccaggauuucuaa

SEQ ID NO: 3563049 - RNA, 21 nt, Human
uugagguaggagaauugcuug

SEQ ID NO: 3563050 - RNA, 15 nt, Human
uugaggucucagccc

SEQ ID NO: 3563051 - RNA, 16 nt, Human
uugaggucuguucuuu

SEQ ID NO: 3563052 - RNA, 19 nt, Human
uugaggucuuuugacaugu

SEQ ID NO: 3563053 - RNA, 22 nt, Human
uugagguggcacuuuuucauuu

SEQ ID NO: 3563054 - RNA, 21 nt, Human
uugagguggucugaauguucu

SEQ ID NO: 3563055 - RNA, 12 nt, Human
uugaguaauggu

SEQ ID NO: 3563056 - RNA, 16 nt, Human
uugaguaaugguguag

SEQ ID NO: 3563057 - RNA, 20 nt, Human
uugaguagacacauuuaagg

SEQ ID NO: 3563058 - RNA, 15 nt, Human
uugaguauuguuuaa

SEQ ID NO: 3563059 - RNA, 22 nt, Human
uugaguauuguuuaaaauguaa

SEQ ID NO: 3563060 - RNA, 11 nt, Human
uugagucucuu

SEQ ID NO: 3563061 - RNA, 21 nt, Human
uugagucuuuuuuuuuuaagu

SEQ ID NO: 3563062 - RNA, 20 nt, Human
uugagugaagcugggagaac

SEQ ID NO: 3563063 - RNA, 21 nt, Human
uugagugcugucuccauguuu

SEQ ID NO: 3563064 - RNA, 22 nt, Human
uugaguggggggaacgcccacu

SEQ ID NO: 3563065 - RNA, 15 nt, Human
uugaguguaugagua

SEQ ID NO: 3563066 - RNA, 12 nt, Human
uugagugugugu

SEQ ID NO: 3563067 - RNA, 17 nt, Human
uugaguguuuuaagaua

SEQ ID NO: 3563068 - RNA, 16 nt, Human
uugaguuuuauuuauu

SEQ ID NO: 3563069 - RNA, 20 nt, Human
uugaguuuuauuuauuuuau

SEQ ID NO: 3563070 - RNA, 14 nt, Human
uugaguuuucagug

SEQ ID NO: 3563071 - RNA, 18 nt, Human
uugaguuuugacugcuug

SEQ ID NO: 3563072 - RNA, 12 nt, Human
uugaguuuuguu

SEQ ID NO: 3563073 - RNA, 17 nt, Human
uugauaaagauuuuuua

SEQ ID NO: 3563074 - RNA, 13 nt, Human
uugauaaaguuuc

SEQ ID NO: 3563075 - RNA, 13 nt, Human
uugauaaauagug

SEQ ID NO: 3563076 - RNA, 19 nt, Human
uugauaaauuccacuggac

SEQ ID NO: 3563077 - RNA, 21 nt, Human
uugauaaauuccacuggacuu

SEQ ID NO: 3563078 - RNA, 22 nt, Human
uugauaacaaugacacuagaaa

SEQ ID NO: 3563079 - RNA, 14 nt, Human
uugauaacagcacu

SEQ ID NO: 3563080 - RNA, 19 nt, Human
uugauaacagcacugacua

SEQ ID NO: 3563081 - RNA, 14 nt, Human
uugauaacuuugcu

SEQ ID NO: 3563082 - RNA, 22 nt, Human
uugauaagggacugauguuugu

SEQ ID NO: 3563083 - RNA, 11 nt, Human
uugauaauaaa

SEQ ID NO: 3563084 - RNA, 13 nt, Human
uugauaaugauaa

SEQ ID NO: 3563085 - RNA, 13 nt, Human
uugauaauguuaa

SEQ ID NO: 3563086 - RNA, 15 nt, Human
uugauaauguuaaau

SEQ ID NO: 3563087 - RNA, 20 nt, Human
uugauaauguuaaauuugua

SEQ ID NO: 3563088 - RNA, 23 nt, Human
uugauaauugcauucaucuugug

SEQ ID NO: 3563089 - RNA, 13 nt, Human
uugauacauaaua

SEQ ID NO: 3563090 - RNA, 15 nt, Human
uugauacucuuucua

SEQ ID NO: 3563091 - RNA, 16 nt, Human
uugauacuuguucaaa

SEQ ID NO: 3563092 - RNA, 13 nt, Human
uugauacuuguuu

SEQ ID NO: 3563093 - RNA, 18 nt, Human
uugauagcacagacccug

SEQ ID NO: 3563094 - RNA, 20 nt, Human
uugauagcacagacccugcc

SEQ ID NO: 3563095 - RNA, 18 nt, Human
uugauagcugucccaucu

SEQ ID NO: 3563096 - RNA, 19 nt, Human
uugauagggaacuggggaa

SEQ ID NO: 3563097 - RNA, 21 nt, Human
uugauauaauuuccauagugu

SEQ ID NO: 3563098 - RNA, 19 nt, Human
uugauauaccaaauuaaaa

SEQ ID NO: 3563099 - RNA, 21 nt, Human
uugauauacuuuuuucuuauu

SEQ ID NO: 3563100 - RNA, 22 nt, Human
uugauauagaacagugcuugcc

SEQ ID NO: 3563101 - RNA, 23 nt, Human
uugauauauauuauaaauauaua

SEQ ID NO: 3563102 - RNA, 15 nt, Human
uugauaucacagucu

SEQ ID NO: 3563103 - RNA, 23 nt, Human
uugauauccucuuugagugaagc

SEQ ID NO: 3563104 - RNA, 13 nt, Human
uugauaugaaaaa

SEQ ID NO: 3563105 - RNA, 16 nt, Human
uugauaugaguauaca

SEQ ID NO: 3563106 - RNA, 21 nt, Human
uugauauguuuuauuucauug

SEQ ID NO: 3563107 - RNA, 18 nt, Human
uugauauucuaagaaaua

SEQ ID NO: 3563108 - RNA, 22 nt, Human
uugauauucuaagaaauaucug

SEQ ID NO: 3563109 - RNA, 23 nt, Human
uugauauucuaagaaauaucugu

SEQ ID NO: 3563110 - RNA, 13 nt, Human
uugcugcuagaac

SEQ ID NO: 3563111 - RNA, 14 nt, Human
uugcugcuagaacu

SEQ ID NO: 3563112 - RNA, 15 nt, Human
uugcugcuagaacuu

SEQ ID NO: 3563113 - RNA, 17 nt, Human
uugcugcuagaacuuuu

SEQ ID NO: 3563114 - RNA, 21 nt, Human
uugcugcuccuuagcugccaa

SEQ ID NO: 3563115 - RNA, 12 nt, Human
uugcugcucuuc

SEQ ID NO: 3563116 - RNA, 17 nt, Human
uugcugcugauuuaaac

SEQ ID NO: 3563117 - RNA, 16 nt, Human
uugcugcuucucccag

SEQ ID NO: 3563118 - RNA, 14 nt, Human
uugcugcuugaggc

SEQ ID NO: 3563119 - RNA, 21 nt, Human
uugcuggaauaaguucaaauu

SEQ ID NO: 3563120 - RNA, 13 nt, Human
uugcuggccccag

SEQ ID NO: 3563121 - RNA, 17 nt, Human
uugcuggccccagcccu

SEQ ID NO: 3563122 - RNA, 15 nt, Human
uugcugggagcugaa

SEQ ID NO: 3563123 - RNA, 21 nt, Human
uugcugggagcugaaaaauca

SEQ ID NO: 3563124 - RNA, 23 nt, Human
uugcuggggacggggggccccag

SEQ ID NO: 3563125 - RNA, 16 nt, Human
uugcugguaaaaugaa

SEQ ID NO: 3563126 - RNA, 23 nt, Human
uugcugguaaaaugaagaauuua

SEQ ID NO: 3563127 - RNA, 23 nt, Human
uugcuguaccagcccagauguuu

SEQ ID NO: 3563128 - RNA, 16 nt, Human
uugcugucccuuuucc

SEQ ID NO: 3563129 - RNA, 11 nt, Human
uugcuguccua

SEQ ID NO: 3563130 - RNA, 14 nt, Human
uugcugucugcagc

SEQ ID NO: 3563131 - RNA, 20 nt, Human
uugcugugaauuagcucacu

SEQ ID NO: 3563132 - RNA, 19 nt, Human
uugcugugacagugauggc

SEQ ID NO: 3563133 - RNA, 18 nt, Human
uugcugugaggcuguccu

SEQ ID NO: 3563134 - RNA, 19 nt, Human
uugcugugccucccaaaau

SEQ ID NO: 3563135 - RNA, 13 nt, Human
uugcugugggaac

SEQ ID NO: 3563136 - RNA, 15 nt, Human
uugcugugggaacga

SEQ ID NO: 3563137 - RNA, 15 nt, Human
uugcuguguuuaauu

SEQ ID NO: 3563138 - RNA, 22 nt, Human
uugcuguuaugucuguuuaaga

SEQ ID NO: 3563139 - RNA, 15 nt, Human
uugcuguugaaagca

SEQ ID NO: 3563140 - RNA, 17 nt, Human
uugcuguugaaagcaaa

SEQ ID NO: 3563141 - RNA, 21 nt, Human
uugcuguugaaagcaaaaaug

SEQ ID NO: 3563142 - RNA, 23 nt, Human
uugcuguugaaagcaaaaaugcu

SEQ ID NO: 3563143 - RNA, 12 nt, Human
uugcuguugaca

SEQ ID NO: 3563144 - RNA, 19 nt, Human
uugcuguuguuucuaaaca

SEQ ID NO: 3563145 - RNA, 22 nt, Human
uugcuguuuuccucccuucugc

SEQ ID NO: 3563146 - RNA, 21 nt, Human
uugcuguuuuguucugugguu

SEQ ID NO: 3563147 - RNA, 13 nt, Human
uugcuuaaaugug

SEQ ID NO: 3563148 - RNA, 14 nt, Human
uugcuuaaauuucu

SEQ ID NO: 3563149 - RNA, 14 nt, Human
uugcuuacaauuuu

SEQ ID NO: 3563150 - RNA, 14 nt, Human
uugcuuaccucuca

SEQ ID NO: 3563151 - RNA, 24 nt, Human
uugcuuaggauguuuuucaugaaa

SEQ ID NO: 3563152 - RNA, 19 nt, Human
uugcuuaucaacuuccuaa

SEQ ID NO: 3563153 - RNA, 15 nt, Human
uugcuuauuguucca

SEQ ID NO: 3563154 - RNA, 16 nt, Human
uugcuuauuuaauaaa

SEQ ID NO: 3563155 - RNA, 20 nt, Human
uugcuuauuuauuguauucu

SEQ ID NO: 3563156 - RNA, 14 nt, Human
uugcuuccuccucc

SEQ ID NO: 3563157 - RNA, 15 nt, Human
uugcuuccuccuccc

SEQ ID NO: 3563158 - RNA, 15 nt, Human
uugcuucugggaagg

SEQ ID NO: 3563159 - RNA, 19 nt, Human
uugcuucugggaagggguu

SEQ ID NO: 3563160 - RNA, 18 nt, Human
uugcuucuuacugauaau

SEQ ID NO: 3563161 - RNA, 13 nt, Human
uugcuucuucuga

SEQ ID NO: 3563162 - RNA, 21 nt, Human
uugcuucuugugaaggccaug

SEQ ID NO: 3563163 - RNA, 13 nt, Human
uugcuugaacaca

SEQ ID NO: 3563164 - RNA, 15 nt, Human
uugcuugaacacagu

SEQ ID NO: 3563165 - RNA, 17 nt, Human
uugcuugaacacaguau

SEQ ID NO: 3563166 - RNA, 21 nt, Human
uugcuugaagcaaacaguuga

SEQ ID NO: 3563167 - RNA, 16 nt, Human
uugcuugagcccagga

SEQ ID NO: 3563168 - RNA, 18 nt, Human
uugcuugagcccaggagu

SEQ ID NO: 3563169 - RNA, 11 nt, Human
uugcuugccuc

SEQ ID NO: 3563170 - RNA, 16 nt, Human
uugcuugccugauaua

SEQ ID NO: 3563171 - RNA, 19 nt, Human
uugcuugccugcagggcca

SEQ ID NO: 3563172 - RNA, 14 nt, Human
uugcuuggcugcuu

SEQ ID NO: 3563173 - RNA, 14 nt, Human
uugcuugggaaggg

SEQ ID NO: 3563174 - RNA, 15 nt, Human
uugcuugggaagggg

SEQ ID NO: 3563175 - RNA, 13 nt, Human
uugcuuguuacau

SEQ ID NO: 3563176 - RNA, 14 nt, Human
uugcuuuaauauaa

SEQ ID NO: 3563177 - RNA, 17 nt, Human
uugcuuuaauauaaaug

SEQ ID NO: 3563178 - RNA, 21 nt, Human
uugcuuuaauauaaaugcaaa

SEQ ID NO: 3563179 - RNA, 22 nt, Human
uugcuuuaauauaaaugcaaau

SEQ ID NO: 3563180 - RNA, 23 nt, Human
uugcuuuaauauaaaugcaaaua

SEQ ID NO: 3563181 - RNA, 21 nt, Human
uugcuuuaauuccaugaaugu

SEQ ID NO: 3563182 - RNA, 16 nt, Human
uugcuuuaauuguuaa

SEQ ID NO: 3563183 - RNA, 18 nt, Human
uugcuuuaauuguuaaga

SEQ ID NO: 3563184 - RNA, 12 nt, Human
uugcuuuaauuu

SEQ ID NO: 3563185 - RNA, 15 nt, Human
uugcuuuacugucaa

SEQ ID NO: 3563186 - RNA, 16 nt, Human
uugcuuuacugucaaa

SEQ ID NO: 3563187 - RNA, 15 nt, Human
uugcuuucugaaauu

SEQ ID NO: 3563188 - RNA, 22 nt, Human
uugcuuugaagcaguuguguca

SEQ ID NO: 3563189 - RNA, 17 nt, Human
uugcuuuggaaguuuua

SEQ ID NO: 3563190 - RNA, 13 nt, Human
uugcuuuguaugc

SEQ ID NO: 3563191 - RNA, 16 nt, Human
uugcuuuguaugcacu

SEQ ID NO: 3563192 - RNA, 20 nt, Human
uugcuuuguauuguauauua

SEQ ID NO: 3563193 - RNA, 20 nt, Human
uugcuuugugauuuuuguaa

SEQ ID NO: 3563194 - RNA, 12 nt, Human
uugcuuuuaauu

SEQ ID NO: 3563195 - RNA, 15 nt, Human
uugcuuuuauuuuga

SEQ ID NO: 3563196 - RNA, 18 nt, Human
uugcuuuucaugcaaacu

SEQ ID NO: 3563197 - RNA, 15 nt, Human
uugcuuuucccucuu

SEQ ID NO: 3563198 - RNA, 14 nt, Human
uugcuuuugagaga

SEQ ID NO: 3563199 - RNA, 13 nt, Human
uugcuuuugcuuc

SEQ ID NO: 3563200 - RNA, 13 nt, Human
uugcuuuugugaa

SEQ ID NO: 3563201 - RNA, 12 nt, Human
uugcuuuugugc

SEQ ID NO: 3563202 - RNA, 15 nt, Human
uugcuuuuuuaaaua

SEQ ID NO: 3563203 - RNA, 13 nt, Human
uugcuuuuuugua

SEQ ID NO: 3563204 - RNA, 14 nt, Human
uuggaaaagaauac

SEQ ID NO: 3563205 - RNA, 15 nt, Human
uuggaaaaugcauug

SEQ ID NO: 3563206 - RNA, 17 nt, Human
uuggaaacacuaaaugu

SEQ ID NO: 3563207 - RNA, 14 nt, Human
uuggaaacuaauaa

SEQ ID NO: 3563208 - RNA, 22 nt, Human
uuggaaacuaauaaaauauuuu

SEQ ID NO: 3563209 - RNA, 17 nt, Human
uuggaaagaguaggaag

SEQ ID NO: 3563210 - RNA, 13 nt, Human
uuggaaagcaggu

SEQ ID NO: 3563211 - RNA, 12 nt, Human
uuggaaagucag

SEQ ID NO: 3563212 - RNA, 14 nt, Human
uuggaaauacugua

SEQ ID NO: 3563213 - RNA, 23 nt, Human
uuggaaauagaaauuuccagaga

SEQ ID NO: 3563214 - RNA, 18 nt, Human
uuggaaaucaaauguaaa

SEQ ID NO: 3563215 - RNA, 19 nt, Human
uuggaaauccuaguuuccu

SEQ ID NO: 3563216 - RNA, 12 nt, Human
uuggaaaucuuu

SEQ ID NO: 3563217 - RNA, 18 nt, Human
uuggaaauuccuguacug

SEQ ID NO: 3563218 - RNA, 16 nt, Human
uuggaaauuuagcauu

SEQ ID NO: 3563219 - RNA, 13 nt, Human
uuggaacagaaug

SEQ ID NO: 3563220 - RNA, 14 nt, Human
uuggaacagaaugu

SEQ ID NO: 3563221 - RNA, 22 nt, Human
uuggaacauuggaauguucuca

SEQ ID NO: 3563222 - RNA, 14 nt, Human
uuggaaccuuguuu

SEQ ID NO: 3563223 - RNA, 17 nt, Human
uuggaacugaagggggc

SEQ ID NO: 3563224 - RNA, 22 nt, Human
uuggaacuugccugccuuucca

SEQ ID NO: 3563225 - RNA, 19 nt, Human
uuggaagaaaaaaaucuuc

SEQ ID NO: 3563226 - RNA, 16 nt, Human
uuggaagaaaaaaucu

SEQ ID NO: 3563227 - RNA, 16 nt, Human
uuggaagagcagcacc

SEQ ID NO: 3563228 - RNA, 19 nt, Human
uuggaagauccugugagga

SEQ ID NO: 3563229 - RNA, 19 nt, Human
uuggaagauuuucagucua

SEQ ID NO: 3563230 - RNA, 19 nt, Human
uuggaagcagguuaaaugu

SEQ ID NO: 3563231 - RNA, 22 nt, Human
uuggaagcuagcuccccuccuc

SEQ ID NO: 3563232 - RNA, 21 nt, Human
uuggaaggagacacagauguu

SEQ ID NO: 3563233 - RNA, 15 nt, Human
uuggaaguacaugaa

SEQ ID NO: 3563234 - RNA, 13 nt, Human
uuggaaguuucau

SEQ ID NO: 3563235 - RNA, 16 nt, Human
uuggaauauuaaaaaa

SEQ ID NO: 3563236 - RNA, 23 nt, Human
uuggaauauuguccauuguccaa

SEQ ID NO: 3563237 - RNA, 21 nt, Human
uuggaaucuagaagaaaugaa

SEQ ID NO: 3563238 - RNA, 22 nt, Human
uuggaaucuagaagaaaugaaa

SEQ ID NO: 3563239 - RNA, 21 nt, Human
uuggaaugcacucagacugua

SEQ ID NO: 3563240 - RNA, 21 nt, Human
uuggaauucuguucauuuguu

SEQ ID NO: 3563241 - RNA, 13 nt, Human
uuggaauuuacca

SEQ ID NO: 3563242 - RNA, 21 nt, Human
uuggaauuuguaaccucagcu

SEQ ID NO: 3563243 - RNA, 18 nt, Human
uuggacaaaauggaauac

SEQ ID NO: 3563244 - RNA, 20 nt, Human
uuggacaaaucacauauuuu

SEQ ID NO: 3563245 - RNA, 15 nt, Human
uuggacaaaugugaa

SEQ ID NO: 3563246 - RNA, 17 nt, Human
uuggacaaaugugaaga

SEQ ID NO: 3563247 - RNA, 19 nt, Human
uuggacaaaugugaagaug

SEQ ID NO: 3563248 - RNA, 15 nt, Human
uuggacacacacagc

SEQ ID NO: 3563249 - RNA, 19 nt, Human
uuggacaccuuuagguucu

SEQ ID NO: 3563250 - RNA, 14 nt, Human
uuggacacgcucag

SEQ ID NO: 3563251 - RNA, 16 nt, Human
uuggacagaagcagcu

SEQ ID NO: 3563252 - RNA, 13 nt, Human
uuggacagcaaaa

SEQ ID NO: 3563253 - RNA, 14 nt, Human
uuggacagcaaaac

SEQ ID NO: 3563254 - RNA, 23 nt, Human
uuggacagcaaaaccauugcuuc

SEQ ID NO: 3563255 - RNA, 21 nt, Human
uuggacauaacugacuuaguu

SEQ ID NO: 3563256 - RNA, 16 nt, Human
uuggacauagauauuu

SEQ ID NO: 3563257 - RNA, 17 nt, Human
uuggacauagauauuuu

SEQ ID NO: 3563258 - RNA, 20 nt, Human
uuggacauuuuaugucuuuc

SEQ ID NO: 3563259 - RNA, 19 nt, Human
uuggacccaaggaaaacug

SEQ ID NO: 3563260 - RNA, 15 nt, Human
uuggacccugaggcc

SEQ ID NO: 3563261 - RNA, 19 nt, Human
uuguuucuuucucugagga

SEQ ID NO: 3563262 - RNA, 13 nt, Human
uuguuucuuugug

SEQ ID NO: 3563263 - RNA, 13 nt, Human
uuguuucuuuuaa

SEQ ID NO: 3563264 - RNA, 13 nt, Human
uuguuugccagga

SEQ ID NO: 3563265 - RNA, 15 nt, Human
uuguuugccauacuu

SEQ ID NO: 3563266 - RNA, 16 nt, Human
uuguuugccauacuuu

SEQ ID NO: 3563267 - RNA, 21 nt, Human
uuguuuggaccaaaaaccagu

SEQ ID NO: 3563268 - RNA, 23 nt, Human
uuguuuggaucaaaaucuguaga

SEQ ID NO: 3563269 - RNA, 16 nt, Human
uuguuuggauguaauu

SEQ ID NO: 3563270 - RNA, 17 nt, Human
uuguuuggcaaggaaag

SEQ ID NO: 3563271 - RNA, 17 nt, Human
uuguuuggggcaggagu

SEQ ID NO: 3563272 - RNA, 16 nt, Human
uuguuugguauuguau

SEQ ID NO: 3563273 - RNA, 13 nt, Human
uuguuugguuaua

SEQ ID NO: 3563274 - RNA, 21 nt, Human
uuguuugguuauagugcaaua

SEQ ID NO: 3563275 - RNA, 19 nt, Human
uuguuuguauguauaauuc

SEQ ID NO: 3563276 - RNA, 22 nt, Human
uuguuuguauguauaauucaaa

SEQ ID NO: 3563277 - RNA, 13 nt, Human
uuguuuguuuagu

SEQ ID NO: 3563278 - RNA, 12 nt, Human
uuguuuguuuca

SEQ ID NO: 3563279 - RNA, 14 nt, Human
uuguuuuaaaacug

SEQ ID NO: 3563280 - RNA, 20 nt, Human
uuguuuuaaaauuaaagcua

SEQ ID NO: 3563281 - RNA, 16 nt, Human
uuguuuuaaggaagaa

SEQ ID NO: 3563282 - RNA, 14 nt, Human
uuguuuuaaucuga

SEQ ID NO: 3563283 - RNA, 12 nt, Human
uuguuuuacaau

SEQ ID NO: 3563284 - RNA, 18 nt, Human
uuguuuucugacuaauua

SEQ ID NO: 3563285 - RNA, 18 nt, Human
uuguuuucuucuguaugu

SEQ ID NO: 3563286 - RNA, 15 nt, Human
uuguuuugcacuuuu

SEQ ID NO: 3563287 - RNA, 14 nt, Human
uuguuuugcuuuuu

SEQ ID NO: 3563288 - RNA, 15 nt, Human
uuguuuugcuuuuuc

SEQ ID NO: 3563289 - RNA, 14 nt, Human
uuguuuuggaugcc

SEQ ID NO: 3563290 - RNA, 13 nt, Human
uuguuuuguauug

SEQ ID NO: 3563291 - RNA, 21 nt, Human
uuguuuuguugcacugaaguu

SEQ ID NO: 3563292 - RNA, 14 nt, Human
uuguuuuuaaacug

SEQ ID NO: 3563293 - RNA, 16 nt, Human
uuguuuuuaaacugua

SEQ ID NO: 3563294 - RNA, 19 nt, Human
uuguuuuuaaguuugcacu

SEQ ID NO: 3563295 - RNA, 13 nt, Human
uuguuuuucauuc

SEQ ID NO: 3563296 - RNA, 13 nt, Human
uuguuuuucucac

SEQ ID NO: 3563297 - RNA, 15 nt, Human
uuguuuuuguauauu

SEQ ID NO: 3563298 - RNA, 12 nt, Human
uuguuuuuuauc

SEQ ID NO: 3563299 - RNA, 17 nt, Human
uuguuuuuucaaaauag

SEQ ID NO: 3563300 - RNA, 16 nt, Human
uuguuuuuugaagugu

SEQ ID NO: 3563301 - RNA, 12 nt, Human
uuguuuuuugag

SEQ ID NO: 3563302 - RNA, 22 nt, Human
uuuaaaaaaaauccuucuaauc

SEQ ID NO: 3563303 - RNA, 13 nt, Human
uuuaaaaaaagaa

SEQ ID NO: 3563304 - RNA, 19 nt, Human
uuuaaaaaaauaaaacauu

SEQ ID NO: 3563305 - RNA, 18 nt, Human
uuuaaaaaaauuccaagu

SEQ ID NO: 3563306 - RNA, 18 nt, Human
uuuaaaaaaauuuaagug

SEQ ID NO: 3563307 - RNA, 23 nt, Human
uuuaaaaaaccacauggcacaga

SEQ ID NO: 3563308 - RNA, 14 nt, Human
uuuaaaaaacuaaa

SEQ ID NO: 3563309 - RNA, 14 nt, Human
uuuaaaaaagcuua

SEQ ID NO: 3563310 - RNA, 17 nt, Human
uuuaaaaaagcuuaaaa

SEQ ID NO: 3563311 - RNA, 13 nt, Human
uuuaaaaaaguuu

SEQ ID NO: 3563312 - RNA, 18 nt, Human
uuuaaaaaaguuuaaaau

SEQ ID NO: 3563313 - RNA, 19 nt, Human
uuuaaaaaauauuuauuaa

SEQ ID NO: 3563314 - RNA, 16 nt, Human
uuuaaaaaauggucac

SEQ ID NO: 3563315 - RNA, 21 nt, Human
uuuaaaaaauuaaucugggcc

SEQ ID NO: 3563316 - RNA, 18 nt, Human
uuuaaaaacauagaaaaa

SEQ ID NO: 3563317 - RNA, 23 nt, Human
uuuaaaaacuauuuaacuugagc

SEQ ID NO: 3563318 - RNA, 13 nt, Human
uuuaaaaacugga

SEQ ID NO: 3563319 - RNA, 21 nt, Human
uuuaaaaagaaacaagaugcu

SEQ ID NO: 3563320 - RNA, 19 nt, Human
uuuaaaaagggaagaaacu

SEQ ID NO: 3563321 - RNA, 13 nt, Human
uuuaaaaaguauu

SEQ ID NO: 3563322 - RNA, 11 nt, Human
uuuaaaaauaa

SEQ ID NO: 3563323 - RNA, 22 nt, Human
uuuaaaaauaagucaacaguaa

SEQ ID NO: 3563324 - RNA, 23 nt, Human
uuuaaaaauacagauagauauau

SEQ ID NO: 3563325 - RNA, 16 nt, Human
uuuaaaaauagaaaca

SEQ ID NO: 3563326 - RNA, 19 nt, Human
uuuaaaaaucauaaacugu

SEQ ID NO: 3563327 - RNA, 14 nt, Human
uuuaaaaaugaaau

SEQ ID NO: 3563328 - RNA, 22 nt, Human
uuuaaaaaugguaucaaaauua

SEQ ID NO: 3563329 - RNA, 14 nt, Human
uuuaaaaaugucuu

SEQ ID NO: 3563330 - RNA, 15 nt, Human
uuuaaaaauuguuau

SEQ ID NO: 3563331 - RNA, 15 nt, Human
uuuaaaacaagaaag

SEQ ID NO: 3563332 - RNA, 20 nt, Human
uuuaaaacaagaaaguuucc

SEQ ID NO: 3563333 - RNA, 21 nt, Human
uuuaaaacaagaaaguuuccc

SEQ ID NO: 3563334 - RNA, 16 nt, Human
uuuaaaacauguaaua

SEQ ID NO: 3563335 - RNA, 16 nt, Human
uuuaaaacuacuuagc

SEQ ID NO: 3563336 - RNA, 20 nt, Human
uuuaaaacuaguuagauuca

SEQ ID NO: 3563337 - RNA, 16 nt, Human
uuuaaaagaaauuuau

SEQ ID NO: 3563338 - RNA, 14 nt, Human
uuuaaaagaaugau

SEQ ID NO: 3563339 - RNA, 21 nt, Human
uuuaaaagagagagagagaaa

SEQ ID NO: 3563340 - RNA, 20 nt, Human
uuuaaaagauaaauauuaua

SEQ ID NO: 3563341 - RNA, 13 nt, Human
uuuaaaagaugcu

SEQ ID NO: 3563342 - RNA, 14 nt, Human
uuuaaaagcauuuu

SEQ ID NO: 3563343 - RNA, 15 nt, Human
uuuaaaagcauuuuu

SEQ ID NO: 3563344 - RNA, 20 nt, Human
uuuaaaagcccuuuccaaag

SEQ ID NO: 3563345 - RNA, 13 nt, Human
uuuaaaagccugc

SEQ ID NO: 3563346 - RNA, 20 nt, Human
uuuaaaagguauuuugaaua

SEQ ID NO: 3563347 - RNA, 23 nt, Human
uuuaaaagugccauuaacaaaug

SEQ ID NO: 3563348 - RNA, 15 nt, Human
uuuaaaauaaaauga

SEQ ID NO: 3563349 - RNA, 19 nt, Human
uuuaaaauaaaaugaaaau

SEQ ID NO: 3563350 - RNA, 13 nt, Human
uuuaaaauaaacu

SEQ ID NO: 3563351 - RNA, 12 nt, Human
uuuaaaauacug

SEQ ID NO: 3563352 - RNA, 22 nt, Human
uuuaaaauagaaauuuuguaag

SEQ ID NO: 3563353 - RNA, 12 nt, Human
uuuaaaauagca

SEQ ID NO: 3563354 - RNA, 20 nt, Human
uuuaaaauagcguucuugua

SEQ ID NO: 3563355 - RNA, 13 nt, Human
uuuaaaaucacua

SEQ ID NO: 3563356 - RNA, 19 nt, Human
uuuaaaaucacuaacauua

SEQ ID NO: 3563357 - RNA, 20 nt, Human
uuuaaaaucuccuaaaugcu

SEQ ID NO: 3563358 - RNA, 16 nt, Human
uuuaaaaucuuauuaa

SEQ ID NO: 3563359 - RNA, 21 nt, Human
uuuaaaaucuuauuaaaguuu

SEQ ID NO: 3563360 - RNA, 22 nt, Human
uuuaaaaucuuauuaaaguuuc

SEQ ID NO: 3563361 - RNA, 14 nt, Human
uuuaaaaugauuag

SEQ ID NO: 3563362 - RNA, 17 nt, Human
uuuaaaauguaaagcca

SEQ ID NO: 3563363 - RNA, 18 nt, Human
uuuaaaauguaaagccau

SEQ ID NO: 3563364 - RNA, 13 nt, Human
uuuaaaauguaca

SEQ ID NO: 3563365 - RNA, 20 nt, Human
uuuaaaauguacauguauua

SEQ ID NO: 3563366 - RNA, 12 nt, Human
uuuaaaauguau

SEQ ID NO: 3563367 - RNA, 20 nt, Human
uuuaaaauguauaaguugag

SEQ ID NO: 3563368 - RNA, 12 nt, Human
uuuaaaauuugu

SEQ ID NO: 3563369 - RNA, 16 nt, Human
uuuaaaauuuguucuu

SEQ ID NO: 3563370 - RNA, 17 nt, Human
uuuaaaauuuuguaugu

SEQ ID NO: 3563371 - RNA, 18 nt, Human
uuuaaaauuuuuuuagaa

SEQ ID NO: 3563372 - RNA, 19 nt, Human
uuuaaaauuuuuuuagaaa

SEQ ID NO: 3563373 - RNA, 17 nt, Human
uuuaaacaaacauugug

SEQ ID NO: 3563374 - RNA, 14 nt, Human
uuuaaacaaauuca

SEQ ID NO: 3563375 - RNA, 15 nt, Human
uuuaaacaaguauuu

SEQ ID NO: 3563376 - RNA, 23 nt, Human
uuuaaacagauguccaucagaug

SEQ ID NO: 3563377 - RNA, 21 nt, Human
uuuaaacaggcccagcauugc

SEQ ID NO: 3563378 - RNA, 12 nt, Human
uuuaaacauauc

SEQ ID NO: 3563379 - RNA, 20 nt, Human
uuuaaacaugguuacaauca

SEQ ID NO: 3563380 - RNA, 16 nt, Human
uuuaaacauuaaaaau

SEQ ID NO: 3563381 - RNA, 15 nt, Human
uuuaaacauuaauag

SEQ ID NO: 3563382 - RNA, 19 nt, Human
uuuaaacauuaauagcagc

SEQ ID NO: 3563383 - RNA, 15 nt, Human
uuuaaacccauuuua

SEQ ID NO: 3563384 - RNA, 15 nt, Human
uuuaaacuacauuag

SEQ ID NO: 3563385 - RNA, 21 nt, Human
uuuaaacuagaugaccucauu

SEQ ID NO: 3563386 - RNA, 15 nt, Human
uuuaaacuauaagca

SEQ ID NO: 3563387 - RNA, 15 nt, Human
uuuaaacuguacagu

SEQ ID NO: 3563388 - RNA, 16 nt, Human
uuuaaacuguacagug

SEQ ID NO: 3563389 - RNA, 15 nt, Human
uuuaaacugucgugu

SEQ ID NO: 3563390 - RNA, 21 nt, Human
uuuaaacuguguacauaacug

SEQ ID NO: 3563391 - RNA, 11 nt, Human
uuuaaacuuuc

SEQ ID NO: 3563392 - RNA, 20 nt, Human
uuuaaagaaaaaaaugucaa

SEQ ID NO: 3563393 - RNA, 19 nt, Human
uuuaaagaaaaaaauugaa

SEQ ID NO: 3563394 - RNA, 17 nt, Human
uuuaaagaaaagaugaa

SEQ ID NO: 3563395 - RNA, 21 nt, Human
uuuaaagaaaagaugaaaggc

SEQ ID NO: 3563396 - RNA, 14 nt, Human
uuuaaagaaagugu

SEQ ID NO: 3563397 - RNA, 18 nt, Human
uuuaaagaagaaacgucu

SEQ ID NO: 3563398 - RNA, 18 nt, Human
uuuaaagaauaugacuuu

SEQ ID NO: 3563399 - RNA, 16 nt, Human
uuuaaugugaacuugu

SEQ ID NO: 3563400 - RNA, 21 nt, Human
uuuaaugugaacuuguagcug

SEQ ID NO: 3563401 - RNA, 21 nt, Human
uuuaaugugaugauguaauug

SEQ ID NO: 3563402 - RNA, 22 nt, Human
uuuaaugugaugauguaauuga

SEQ ID NO: 3563403 - RNA, 15 nt, Human
uuuaaugugcugugu

SEQ ID NO: 3563404 - RNA, 19 nt, Human
uuuaaugugcuguguaaag

SEQ ID NO: 3563405 - RNA, 21 nt, Human
uuuaaugugcuguguaaaguu

SEQ ID NO: 3563406 - RNA, 18 nt, Human
uuuaauguugaacaaaau

SEQ ID NO: 3563407 - RNA, 20 nt, Human
uuuaauuaaaaacuaguagu

SEQ ID NO: 3563408 - RNA, 20 nt, Human
uuuaauuaaaugcucaucug

SEQ ID NO: 3563409 - RNA, 22 nt, Human
uuuaauuaaucaugaaugugua

SEQ ID NO: 3563410 - RNA, 17 nt, Human
uuuaauuaaugaaauau

SEQ ID NO: 3563411 - RNA, 14 nt, Human
uuuaauuaauuggg

SEQ ID NO: 3563412 - RNA, 20 nt, Human
uuuaauuagugcuaagugug

SEQ ID NO: 3563413 - RNA, 21 nt, Human
uuuaauuagugcuaaguguga

SEQ ID NO: 3563414 - RNA, 13 nt, Human
uuuaauuauuguu

SEQ ID NO: 3563415 - RNA, 12 nt, Human
uuuaauucaguu

SEQ ID NO: 3563416 - RNA, 23 nt, Human
uuuaauucaucccaacugucuuu

SEQ ID NO: 3563417 - RNA, 14 nt, Human
uuuaauucauguuu

SEQ ID NO: 3563418 - RNA, 11 nt, Human
uuuaauuccau

SEQ ID NO: 3563419 - RNA, 17 nt, Human
uuuaauuccaugaaugu

SEQ ID NO: 3563420 - RNA, 21 nt, Human
uuuaauugaaagaauguaaag

SEQ ID NO: 3563421 - RNA, 19 nt, Human
uuuaauuguaaacuguacu

SEQ ID NO: 3563422 - RNA, 13 nt, Human
uuuaauuguauuu

SEQ ID NO: 3563423 - RNA, 20 nt, Human
uuuaauuguccaguuugucu

SEQ ID NO: 3563424 - RNA, 16 nt, Human
uuuaauuguuguuucu

SEQ ID NO: 3563425 - RNA, 18 nt, Human
uuuaauuguuguuucuuu

SEQ ID NO: 3563426 - RNA, 23 nt, Human
uuuaauuguuguuucuuucuagu

SEQ ID NO: 3563427 - RNA, 13 nt, Human
uuuaauuuaaagc

SEQ ID NO: 3563428 - RNA, 18 nt, Human
uuuaauuuaguaaaccaa

SEQ ID NO: 3563429 - RNA, 18 nt, Human
uuuaauuuaguaaauguu

SEQ ID NO: 3563430 - RNA, 16 nt, Human
uuuaauuuaugaguuu

SEQ ID NO: 3563431 - RNA, 14 nt, Human
uuuaauuuauguaa

SEQ ID NO: 3563432 - RNA, 21 nt, Human
uuuaauuuauuaauugcuuug

SEQ ID NO: 3563433 - RNA, 22 nt, Human
uuuaauuuauuaauugcuuuga

SEQ ID NO: 3563434 - RNA, 13 nt, Human
uuuaauuucaagc

SEQ ID NO: 3563435 - RNA, 22 nt, Human
uuuaauuugaagguagaauguu

SEQ ID NO: 3563436 - RNA, 21 nt, Human
uuuaauuugauaucacagucu

SEQ ID NO: 3563437 - RNA, 18 nt, Human
uuuaauuugaugaaagcu

SEQ ID NO: 3563438 - RNA, 22 nt, Human
uuuaauuugaugaaagcugauu

SEQ ID NO: 3563439 - RNA, 17 nt, Human
uuuaauuuuggaauuuu

SEQ ID NO: 3563440 - RNA, 15 nt, Human
uuuaauuuuguauuu

SEQ ID NO: 3563441 - RNA, 17 nt, Human
uuuaauuuuuaaaugca

SEQ ID NO: 3563442 - RNA, 17 nt, Human
uuuaauuuuuuaaauaa

SEQ ID NO: 3563443 - RNA, 13 nt, Human
uuuacaaaaagac

SEQ ID NO: 3563444 - RNA, 17 nt, Human
uuuacaaacaaaagcau

SEQ ID NO: 3563445 - RNA, 13 nt, Human
uuuacaaacugaa

SEQ ID NO: 3563446 - RNA, 14 nt, Human
uuuacaaacugaag

SEQ ID NO: 3563447 - RNA, 21 nt, Human
uuuacaagaaaaaaugaauuu

SEQ ID NO: 3563448 - RNA, 21 nt, Human
uuuacaagaaguuuauucuca

SEQ ID NO: 3563449 - RNA, 15 nt, Human
uuuacaaguguauau

SEQ ID NO: 3563450 - RNA, 19 nt, Human
uuuacaauguaauuauuua

SEQ ID NO: 3563451 - RNA, 15 nt, Human
uuuacaauguauuaa

SEQ ID NO: 3563452 - RNA, 23 nt, Human
uuuacaauuguaaaacugaggca

SEQ ID NO: 3563453 - RNA, 19 nt, Human
uuuacaauuuuuuaucaug

SEQ ID NO: 3563454 - RNA, 18 nt, Human
uuuacacaauagaauuau

SEQ ID NO: 3563455 - RNA, 14 nt, Human
uuuacacaauucuu

SEQ ID NO: 3563456 - RNA, 15 nt, Human
uuuacacaauucuua

SEQ ID NO: 3563457 - RNA, 21 nt, Human
uuuacacacgugcaauuuguu

SEQ ID NO: 3563458 - RNA, 12 nt, Human
uuuacacagaaa

SEQ ID NO: 3563459 - RNA, 14 nt, Human
uuuacacagaaaca

SEQ ID NO: 3563460 - RNA, 20 nt, Human
uuuacacagaaacacugccu

SEQ ID NO: 3563461 - RNA, 21 nt, Human
uuuacaccaguuccuuucaau

SEQ ID NO: 3563462 - RNA, 15 nt, Human
uuuacacgcuuuugu

SEQ ID NO: 3563463 - RNA, 17 nt, Human
uuuacacgcuuuuguga

SEQ ID NO: 3563464 - RNA, 15 nt, Human
uuuacacuuuugaga

SEQ ID NO: 3563465 - RNA, 11 nt, Human
uuuacagaaaa

SEQ ID NO: 3563466 - RNA, 16 nt, Human
uuuacagaaaaaucuu

SEQ ID NO: 3563467 - RNA, 13 nt, Human
uuuacagaaaugg

SEQ ID NO: 3563468 - RNA, 14 nt, Human
uuuacagaauugcu

SEQ ID NO: 3563469 - RNA, 20 nt, Human
uuuacagccucacuugaaug

SEQ ID NO: 3563470 - RNA, 22 nt, Human
uuuacagcucugacuuuacacu

SEQ ID NO: 3563471 - RNA, 13 nt, Human
uuuacagcugccu

SEQ ID NO: 3563472 - RNA, 15 nt, Human
uuuacagcugccugc

SEQ ID NO: 3563473 - RNA, 16 nt, Human
uuuacagcugccugca

SEQ ID NO: 3563474 - RNA, 16 nt, Human
uuuacagcuuuacaca

SEQ ID NO: 3563475 - RNA, 20 nt, Human
uuuacagcuuucaugauuag

SEQ ID NO: 3563476 - RNA, 18 nt, Human
uuuacagggagccuccug

SEQ ID NO: 3563477 - RNA, 20 nt, Human
uuuacagggagccuccugcc

SEQ ID NO: 3563478 - RNA, 22 nt, Human
uuuacaguaucuacuugcaugu

SEQ ID NO: 3563479 - RNA, 17 nt, Human
uuuacagugaagaaagc

SEQ ID NO: 3563480 - RNA, 16 nt, Human
uuuauaaguucacaaa

SEQ ID NO: 3563481 - RNA, 18 nt, Human
uuuauaaguucacaaaau

SEQ ID NO: 3563482 - RNA, 19 nt, Human
uuuauaauaaaaauauauu

SEQ ID NO: 3563483 - RNA, 18 nt, Human
uuuauaauagcaacuuuu

SEQ ID NO: 3563484 - RNA, 19 nt, Human
uuuauaauucaguauguuu

SEQ ID NO: 3563485 - RNA, 20 nt, Human
uuuauaauucucauuaaaag

SEQ ID NO: 3563486 - RNA, 15 nt, Human
uuuauaauuuuaaga

SEQ ID NO: 3563487 - RNA, 22 nt, Human
uuuauaauuuuaagauuccuuu

SEQ ID NO: 3563488 - RNA, 16 nt, Human
uuuauaauuuucugaa

SEQ ID NO: 3563489 - RNA, 15 nt, Human
uuuauacaaauuaga

SEQ ID NO: 3563490 - RNA, 16 nt, Human
uuuauacaacagugcu

SEQ ID NO: 3563491 - RNA, 17 nt, Human
uuuauacaacagugcua

SEQ ID NO: 3563492 - RNA, 23 nt, Human
uuuauacaacagugcuaaaaaug

SEQ ID NO: 3563493 - RNA, 12 nt, Human
uuuauacacaua

SEQ ID NO: 3563494 - RNA, 15 nt, Human
uuuauacaggggaau

SEQ ID NO: 3563495 - RNA, 17 nt, Human
uuuauacaggggaauau

SEQ ID NO: 3563496 - RNA, 13 nt, Human
uuuauacauuagu

SEQ ID NO: 3563497 - RNA, 22 nt, Human
uuuauaccucaauuuucacugu

SEQ ID NO: 3563498 - RNA, 15 nt, Human
uuuauacguguagcu

SEQ ID NO: 3563499 - RNA, 19 nt, Human
uuuauacuccaguguacau

SEQ ID NO: 3563500 - RNA, 16 nt, Human
uuuauacugaaggaaa

SEQ ID NO: 3563501 - RNA, 20 nt, Human
uuuauacugauuaugucuuu

SEQ ID NO: 3563502 - RNA, 13 nt, Human
uuuauacuguaua

SEQ ID NO: 3563503 - RNA, 18 nt, Human
uuuauagcaacaacaauu

SEQ ID NO: 3563504 - RNA, 18 nt, Human
uuuauaggugagaaaaaa

SEQ ID NO: 3563505 - RNA, 18 nt, Human
uuuauagugcacaaaaug

SEQ ID NO: 3563506 - RNA, 16 nt, Human
uuuauaguuaaucuau

SEQ ID NO: 3563507 - RNA, 15 nt, Human
uuuauaguuuauaca

SEQ ID NO: 3563508 - RNA, 19 nt, Human
uuuauaguuuguacaugca

SEQ ID NO: 3563509 - RNA, 15 nt, Human
uuuauauaauaaagu

SEQ ID NO: 3563510 - RNA, 21 nt, Human
uuuauauaauaaaguauucca

SEQ ID NO: 3563511 - RNA, 19 nt, Human
uuuauauaauuauguuauu

SEQ ID NO: 3563512 - RNA, 22 nt, Human
uuuauauagcaagacauuauau

SEQ ID NO: 3563513 - RNA, 19 nt, Human
uuuauauagcuugaaacau

SEQ ID NO: 3563514 - RNA, 14 nt, Human
uuuauauaugaaaa

SEQ ID NO: 3563515 - RNA, 16 nt, Human
uuuauauauuuauaac

SEQ ID NO: 3563516 - RNA, 13 nt, Human
uuuauauccauuu

SEQ ID NO: 3563517 - RNA, 21 nt, Human
uuuauaucuccuuuguauucu

SEQ ID NO: 3563518 - RNA, 14 nt, Human
uuuauaucuggaau

SEQ ID NO: 3563519 - RNA, 23 nt, Human
uuuauaucuggaaugagccuguu

SEQ ID NO: 3563520 - RNA, 14 nt, Human
uuuauaucuuggca

SEQ ID NO: 3563521 - RNA, 14 nt, Human
uuuauaugaagaaa

SEQ ID NO: 3563522 - RNA, 21 nt, Human
uuuauaugaagaaaaucacuu

SEQ ID NO: 3563523 - RNA, 17 nt, Human
uuuauaugaagauaagu

SEQ ID NO: 3563524 - RNA, 19 nt, Human
uuuauaugaagauaagugu

SEQ ID NO: 3563525 - RNA, 23 nt, Human
uuuauauggaugauucagaaauu

SEQ ID NO: 3563526 - RNA, 18 nt, Human
uuuauauggggaauauau

SEQ ID NO: 3563527 - RNA, 13 nt, Human
uuuauauguacau

SEQ ID NO: 3563528 - RNA, 20 nt, Human
uuuauauguauguguuuaga

SEQ ID NO: 3563529 - RNA, 13 nt, Human
uuuauauguugua

SEQ ID NO: 3563530 - RNA, 21 nt, Human
uuuauauuaguugcuuuguua

SEQ ID NO: 3563531 - RNA, 14 nt, Human
uuuauauuguaaau

SEQ ID NO: 3563532 - RNA, 16 nt, Human
uuuauauuguaaauau

SEQ ID NO: 3563533 - RNA, 19 nt, Human
uuuauauuguaaauauugu

SEQ ID NO: 3563534 - RNA, 14 nt, Human
uuuauauuuaaaug

SEQ ID NO: 3563535 - RNA, 13 nt, Human
uuuauauuuacua

SEQ ID NO: 3563536 - RNA, 21 nt, Human
uuuauauuuauugacucuuga

SEQ ID NO: 3563537 - RNA, 15 nt, Human
uuuauauuucaagua

SEQ ID NO: 3563538 - RNA, 14 nt, Human
uuuauauuuccuuu

SEQ ID NO: 3563539 - RNA, 20 nt, Human
uuuauauuuccuuuauguga

SEQ ID NO: 3563540 - RNA, 16 nt, Human
uuuaucacauguaugu

SEQ ID NO: 3563541 - RNA, 19 nt, Human
uuuaucacauguauguuuu

SEQ ID NO: 3563542 - RNA, 22 nt, Human
uuuaucacauguauguuuuggu

SEQ ID NO: 3563543 - RNA, 12 nt, Human
uuucauaacuua

SEQ ID NO: 3563544 - RNA, 15 nt, Human
uuucauaagauauuu

SEQ ID NO: 3563545 - RNA, 18 nt, Human
uuucauaagauauuuuau

SEQ ID NO: 3563546 - RNA, 17 nt, Human
uuucauaaguauuucaa

SEQ ID NO: 3563547 - RNA, 14 nt, Human
uuucauacacuuau

SEQ ID NO: 3563548 - RNA, 16 nt, Human
uuucauacauuuucua

SEQ ID NO: 3563549 - RNA, 16 nt, Human
uuucauacucuagauu

SEQ ID NO: 3563550 - RNA, 22 nt, Human
uuucauacucuagauuuuguuu

SEQ ID NO: 3563551 - RNA, 20 nt, Human
uuucauagcuaagaaauaaa

SEQ ID NO: 3563552 - RNA, 19 nt, Human
uuucauaggaagacacauu

SEQ ID NO: 3563553 - RNA, 17 nt, Human
uuucauaggucugaaau

SEQ ID NO: 3563554 - RNA, 14 nt, Human
uuucauaguucaga

SEQ ID NO: 3563555 - RNA, 23 nt, Human
uuucauauaggaauagaaacaug

SEQ ID NO: 3563556 - RNA, 15 nt, Human
uuucauaucauuucu

SEQ ID NO: 3563557 - RNA, 15 nt, Human
uuucauauguugcuc

SEQ ID NO: 3563558 - RNA, 13 nt, Human
uuucauauucuuu

SEQ ID NO: 3563559 - RNA, 15 nt, Human
uuucauauugugcca

SEQ ID NO: 3563560 - RNA, 18 nt, Human
uuucauauuuuaauuuca

SEQ ID NO: 3563561 - RNA, 17 nt, Human
uuucauauuuuucaaaa

SEQ ID NO: 3563562 - RNA, 18 nt, Human
uuucauauuuuucaaaau

SEQ ID NO: 3563563 - RNA, 19 nt, Human
uuucaucaaucauuguaca

SEQ ID NO: 3563564 - RNA, 16 nt, Human
uuucccuacccucuag

SEQ ID NO: 3563565 - RNA, 17 nt, Human
uuucccuacugaagccc

SEQ ID NO: 3563566 - RNA, 19 nt, Human
uuucccucacccccuccca

SEQ ID NO: 3563567 - RNA, 13 nt, Human
uuucccuccuugg

SEQ ID NO: 3563568 - RNA, 14 nt, Human
uuucccucgcuggg

SEQ ID NO: 3563569 - RNA, 16 nt, Human
uuucccugccucucau

SEQ ID NO: 3563570 - RNA, 16 nt, Human
uuugaauaccauuaaa

SEQ ID NO: 3563571 - RNA, 19 nt, Human
uuugaauauaaacacuaua

SEQ ID NO: 3563572 - RNA, 13 nt, Human
uuugaauaugaaa

SEQ ID NO: 3563573 - RNA, 19 nt, Human
uuugaauauguaguaucua

SEQ ID NO: 3563574 - RNA, 19 nt, Human
uuugaauccucucucugug

SEQ ID NO: 3563575 - RNA, 16 nt, Human
uuugaaucucauaauu

SEQ ID NO: 3563576 - RNA, 19 nt, Human
uuugaaucucauaauuuau

SEQ ID NO: 3563577 - RNA, 21 nt, Human
uuugaaucucauaauuuauac

SEQ ID NO: 3563578 - RNA, 21 nt, Human
uuugaaucuugucucaaugcu

SEQ ID NO: 3563579 - RNA, 21 nt, Human
uuugaaugaaaaauuuaagca

SEQ ID NO: 3563580 - RNA, 23 nt, Human
uuugaaugaaaaauuuaagcauu

SEQ ID NO: 3563581 - RNA, 14 nt, Human
uuugaaugacaaag

SEQ ID NO: 3563582 - RNA, 16 nt, Human
uuugaaugcuuccuga

SEQ ID NO: 3563583 - RNA, 17 nt, Human
uuugaauguguuucaca

SEQ ID NO: 3563584 - RNA, 22 nt, Human
uuugaauguuaaauaaauugua

SEQ ID NO: 3563585 - RNA, 23 nt, Human
uuugaauguuaagaauugaccau

SEQ ID NO: 3563586 - RNA, 13 nt, Human
uuugaauguuaau

SEQ ID NO: 3563587 - RNA, 19 nt, Human
uuugaauuaaaacuucuua

SEQ ID NO: 3563588 - RNA, 22 nt, Human
uuugaauuauccacaugaaaau

SEQ ID NO: 3563589 - RNA, 16 nt, Human
uuugaauuguuuucuu

SEQ ID NO: 3563590 - RNA, 17 nt, Human
uuugaauuuucauuuua

SEQ ID NO: 3563591 - RNA, 16 nt, Human
uuugaauuuucugugu

SEQ ID NO: 3563592 - RNA, 11 nt, Human
uuugcagcuuu

SEQ ID NO: 3563593 - RNA, 22 nt, Human
uuugcaggguccucuucugggc

SEQ ID NO: 3563594 - RNA, 16 nt, Human
uuugcaggucuuuaaa

SEQ ID NO: 3563595 - RNA, 22 nt, Human
uuugcagguggccaaguuccuc

SEQ ID NO: 3563596 - RNA, 14 nt, Human
uuugcagguugcuu

SEQ ID NO: 3563597 - RNA, 9 nt, Human
uuugcagua

SEQ ID NO: 3563598 - RNA, 17 nt, Human
uuugcaguaacuguuuu

SEQ ID NO: 3563599 - RNA, 17 nt, Human
uuugcauaacaauuccu

SEQ ID NO: 3563600 - RNA, 23 nt, Human
uuugcauaacguauaaaagccug

SEQ ID NO: 3563601 - RNA, 20 nt, Human
uuugcauauugcauacuauu

SEQ ID NO: 3563602 - RNA, 14 nt, Human
uuugcaucucagua

SEQ ID NO: 3563603 - RNA, 15 nt, Human
uuugcaucugaaaau

SEQ ID NO: 3563604 - RNA, 21 nt, Human
uuugcauggaauuuguaaguu

SEQ ID NO: 3563605 - RNA, 22 nt, Human
uuugcauggcacuugcaucugu

SEQ ID NO: 3563606 - RNA, 17 nt, Human
uuugcauguuauguuua

SEQ ID NO: 3563607 - RNA, 15 nt, Human
uuugcauuaaauuac

SEQ ID NO: 3563608 - RNA, 16 nt, Human
uuugcauuaaauuaca

SEQ ID NO: 3563609 - RNA, 17 nt, Human
uuugcauuaaauucaca

SEQ ID NO: 3563610 - RNA, 21 nt, Human
uuugcauuaaauucacaaacu

SEQ ID NO: 3563611 - RNA, 22 nt, Human
uuugcauuaaauucacaaacuu

SEQ ID NO: 3563612 - RNA, 13 nt, Human
uuugcauugucug

SEQ ID NO: 3563613 - RNA, 17 nt, Human
uuugcauuuaaaacaga

SEQ ID NO: 3563614 - RNA, 13 nt, Human
uuugcauuuaaga

SEQ ID NO: 3563615 - RNA, 21 nt, Human
uuugcauuuaagaauugccag

SEQ ID NO: 3563616 - RNA, 22 nt, Human
uuugccaagggcauaaauuauu

SEQ ID NO: 3563617 - RNA, 20 nt, Human
uuugccaauuugcacauuaa

SEQ ID NO: 3563618 - RNA, 16 nt, Human
uuugccacagcuuuug

SEQ ID NO: 3563619 - RNA, 13 nt, Human
uuugccagcugcu

SEQ ID NO: 3563620 - RNA, 16 nt, Human
uuugccagcugcugcu

SEQ ID NO: 3563621 - RNA, 22 nt, Human
uuugccauagaguacacugccu

SEQ ID NO: 3563622 - RNA, 20 nt, Human
uuugccaugggcuucacugu

SEQ ID NO: 3563623 - RNA, 20 nt, Human
uuuugaacuaauaaaagcau

SEQ ID NO: 3563624 - RNA, 13 nt, Human
uuuugaaggcaaa

SEQ ID NO: 3563625 - RNA, 13 nt, Human
uuuugaagggagg

SEQ ID NO: 3563626 - RNA, 11 nt, Human
uuuugaagugu

SEQ ID NO: 3563627 - RNA, 11 nt, Human
uuuugaaguuu

SEQ ID NO: 3563628 - RNA, 18 nt, Human
uuuugaaguuuacauuuu

SEQ ID NO: 3563629 - RNA, 14 nt, Human
uuuugaauuguuac

SEQ ID NO: 3563630 - RNA, 22 nt, Human
uuuugacagaauauguuucaaa

SEQ ID NO: 3563631 - RNA, 18 nt, Human
uuuugaccuguggugcaa

SEQ ID NO: 3563632 - RNA, 13 nt, Human
uuuugacugcuug

SEQ ID NO: 3563633 - RNA, 15 nt, Human
uuuugacuuaaugug

SEQ ID NO: 3563634 - RNA, 15 nt, Human
uuuugagacagucuu

SEQ ID NO: 3563635 - RNA, 13 nt, Human
uuuugagcacuuu

SEQ ID NO: 3563636 - RNA, 21 nt, Human
uuuugagcuacuggauucuua

SEQ ID NO: 3563637 - RNA, 21 nt, Human
uuuugagcugaaaugcugcau

SEQ ID NO: 3563638 - RNA, 15 nt, Human
uuuugaggagcccca

SEQ ID NO: 3563639 - RNA, 18 nt, Human
uuuugaggcaaaagaagg

SEQ ID NO: 3563640 - RNA, 16 nt, Human
uuuugaggcuucuguu

SEQ ID NO: 3563641 - RNA, 14 nt, Human
uuuugaggcuuuca

SEQ ID NO: 3563642 - RNA, 21 nt, Human
uuuugaguacggcuauagccu

SEQ ID NO: 3563643 - RNA, 16 nt, Human
uuuugaguagauauua

SEQ ID NO: 3563644 - RNA, 18 nt, Human
uuuugaguggaugauguu

SEQ ID NO: 3563645 - RNA, 18 nt, Human
uuuugagugugugugugc

SEQ ID NO: 3563646 - RNA, 22 nt, Human
uuuugauaaaguaguaaaaauu

SEQ ID NO: 3563647 - RNA, 15 nt, Human
uuuugauagcuuuau

SEQ ID NO: 3563648 - RNA, 16 nt, Human
uuuugauaugaguaua

SEQ ID NO: 3563649 - RNA, 14 nt, Human
uuuugaucucacau

SEQ ID NO: 3563650 - RNA, 13 nt, Human
uuuugaucuucaa

SEQ ID NO: 3563651 - RNA, 23 nt, Human
uuuugaugaacaaaauuuccuaa

SEQ ID NO: 3563652 - RNA, 20 nt, Human
uuuugaugacuggcauuuua

SEQ ID NO: 3563653 - RNA, 20 nt, Human
uuuugaugcagcauuugaua

SEQ ID NO: 3563654 - RNA, 21 nt, Human
uuuugaugcagcauuugauaa

SEQ ID NO: 3563655 - RNA, 15 nt, Human
uuuugauguuugugg

SEQ ID NO: 3563656 - RNA, 15 nt, Human
uuuugauuauuguau

SEQ ID NO: 3563657 - RNA, 12 nt, Human
uuuugauugaag

SEQ ID NO: 3563658 - RNA, 20 nt, Human
uuuugauuuaauguuuucag

SEQ ID NO: 3563659 - RNA, 13 nt, Human
uuuugcaaaauuu

SEQ ID NO: 3563660 - RNA, 13 nt, Human
uuuugcaaagaaa

SEQ ID NO: 3563661 - RNA, 18 nt, Human
uuuugcaagguaaaauuu

SEQ ID NO: 3563662 - RNA, 22 nt, Human
uuuugcaagugaagguuuacaa

SEQ ID NO: 3563663 - RNA, 17 nt, Human
uuuugcaauaaugcagu

SEQ ID NO: 3563664 - RNA, 20 nt, Human
uuuugcacauguuuccucua

SEQ ID NO: 3563665 - RNA, 18 nt, Human
uuuugcaccccaugcugu

SEQ ID NO: 3563666 - RNA, 19 nt, Human
uuuugcaccccaugcuguu

SEQ ID NO: 3563667 - RNA, 17 nt, Human
uuuugcaccccucccau

SEQ ID NO: 3563668 - RNA, 12 nt, Human
uuuugcacuuuu

SEQ ID NO: 3563669 - RNA, 9 nt, Human
uuuugcagu

SEQ ID NO: 3563670 - RNA, 18 nt, Human
uuuugcaucauuguuuua

SEQ ID NO: 3563671 - RNA, 12 nt, Human
uuuugcaugaaa

SEQ ID NO: 3563672 - RNA, 13 nt, Human
uuuugcauucaaa

SEQ ID NO: 3563673 - RNA, 19 nt, Human
uuuugcauuugaauaaagc

SEQ ID NO: 3563674 - RNA, 16 nt, Human
uuuugccaauuugcac

SEQ ID NO: 3563675 - RNA, 17 nt, Human
uuuugcccauuuugaau

SEQ ID NO: 3563676 - RNA, 19 nt, Human
uuuugcccauuuugaauca

SEQ ID NO: 3563677 - RNA, 23 nt, Human
uuuugccuaauacauuaaagcag

SEQ ID NO: 3563678 - RNA, 22 nt, Human
uuuugcuaaguaaaucucuucu

SEQ ID NO: 3563679 - RNA, 22 nt, Human
uuuugcucuaaaauauuuauga

SEQ ID NO: 3563680 - RNA, 22 nt, Human
uuuugcuguaauguuaauauug

SEQ ID NO: 3563681 - RNA, 14 nt, Human
uuuugcuguagaag

SEQ ID NO: 3563682 - RNA, 13 nt, Human
uuuugcuuccccu

SEQ ID NO: 3563683 - RNA, 22 nt, Human
uuuugcuugaagcaaacaguug

SEQ ID NO: 3563684 - RNA, 11 nt, Human
uuuugcuuuug

SEQ ID NO: 3563685 - RNA, 17 nt, Human
uuuugcuuuuucugacu

SEQ ID NO: 3563686 - RNA, 22 nt, Human
uuuuggaaaacgauuuaauuua

SEQ ID NO: 3563687 - RNA, 14 nt, Human
uuuuggaaagucag

SEQ ID NO: 3563688 - RNA, 17 nt, Human
uuuuggaaucuagaaga

SEQ ID NO: 3563689 - RNA, 14 nt, Human
uuuuggacuuuguu

SEQ ID NO: 3563690 - RNA, 16 nt, Human
uuuuggaguguuaugu

SEQ ID NO: 3563691 - RNA, 20 nt, Human
uuuuggauugacaguaacuu

SEQ ID NO: 3563692 - RNA, 16 nt, Human
uuuuggauuggacaaa

SEQ ID NO: 3563693 - RNA, 11 nt, Human
uuuuggcaccu

SEQ ID NO: 3563694 - RNA, 22 nt, Human
uuuuggcacuugccauuccaaa

SEQ ID NO: 3563695 - RNA, 15 nt, Human
uuuuggccuggaguu

SEQ ID NO: 3563696 - RNA, 17 nt, Human
uuuuggcgaaucucaaa

SEQ ID NO: 3563697 - RNA, 17 nt, Human
uuuuggcgcuauuacaa

SEQ ID NO: 3563698 - RNA, 17 nt, Human
uuuugggacaauuguuu

SEQ ID NO: 3563699 - RNA, 23 nt, Human
uuuuggggggccccccuccuugc

SEQ ID NO: 3563700 - RNA, 18 nt, Human
uuuugggggugggucugg

SEQ ID NO: 3563701 - RNA, 18 nt, Human
uuuugggggugugagugu

SEQ ID NO: 3563702 - RNA, 14 nt, Human
uuuuggguagcugc

SEQ ID NO: 3563703 - RNA, 14 nt, Human
uuuugguacaaaaa

SEQ ID NO: 3563704 - RNA, 16 nt, Human
uuuugguacaaaaaua

SEQ ID NO: 3563705 - RNA, 16 nt, Human
uuuugguagauuaaau

SEQ ID NO: 3563706 - RNA, 17 nt, Human
uuuugguauuacacugu

SEQ ID NO: 3563707 - RNA, 16 nt, Human
uuuugguauuugaaac

SEQ ID NO: 3563708 - RNA, 18 nt, Human
uuuuggucuggagggaag

SEQ ID NO: 3563709 - RNA, 14 nt, Human
uuuugguggaugua

SEQ ID NO: 3563710 - RNA, 17 nt, Human
uuuugguggauguaaau

SEQ ID NO: 3563711 - RNA, 21 nt, Human
uuuugguuaagcuuugacacu

SEQ ID NO: 3563712 - RNA, 22 nt, Human
uuuugguuaagcuuugacacug

SEQ ID NO: 3563713 - RNA, 14 nt, Human
uuuugguuaaguug

SEQ ID NO: 3563714 - RNA, 22 nt, Human
uuuugguucauuuucagauuca

SEQ ID NO: 3563715 - RNA, 12 nt, Human
uuuugguuguau

SEQ ID NO: 3563716 - RNA, 22 nt, Human
uuuugguugucaauauuaaaua

SEQ ID NO: 3563717 - RNA, 16 nt, Human
uuuugguuguccucaa

SEQ ID NO: 3563718 - RNA, 12 nt, Human
uuuuguaaaaga

SEQ ID NO: 3563719 - RNA, 16 nt, Human
uuuuguaaacauuuau

SEQ ID NO: 3563720 - RNA, 21 nt, Human
uuuuguaaacgacaagaauaa

SEQ ID NO: 3563721 - RNA, 18 nt, Human
uuuuguaaacucaaaaua

SEQ ID NO: 3563722 - RNA, 21 nt, Human
uuuuguaaacuggaauuaaaa

SEQ ID NO: 3563723 - RNA, 11 nt, Human
uuuuguaaaga

SEQ ID NO: 3563724 - RNA, 17 nt, Human
uuuuguaaagaaaaaua

SEQ ID NO: 3563725 - RNA, 18 nt, Human
uuuuguaaagaaaaauau

SEQ ID NO: 3563726 - RNA, 15 nt, Human
uuuuguaaagaugcc

SEQ ID NO: 3563727 - RNA, 14 nt, Human
uuuuguaaagauuu

SEQ ID NO: 3563728 - RNA, 20 nt, Human
uuuuguaaagauuucuguuc

SEQ ID NO: 3563729 - RNA, 16 nt, Human
uuuuguaaaggugaaa

SEQ ID NO: 3563730 - RNA, 13 nt, Human
uuuuguaaauuaa

SEQ ID NO: 3563731 - RNA, 19 nt, Human
uuuuguaaguugaagcaaa

SEQ ID NO: 3563732 - RNA, 19 nt, Human
uuuuguaauaauaaagaau

SEQ ID NO: 3563733 - RNA, 17 nt, Human
uuuuguaauuauuguga

SEQ ID NO: 3563734 - RNA, 18 nt, Human
uuuuguacaucuggcuua

SEQ ID NO: 3563735 - RNA, 13 nt, Human
uuuuguaccagug

SEQ ID NO: 3563736 - RNA, 14 nt, Human
uuuuguagaugaaa

SEQ ID NO: 3563737 - RNA, 18 nt, Human
uuuuguagcacugacaga

SEQ ID NO: 3563738 - RNA, 16 nt, Human
uuuuguagguacuuuu

SEQ ID NO: 3563739 - RNA, 15 nt, Human
uuuuguauacaaaua

SEQ ID NO: 3563740 - RNA, 13 nt, Human
uuuuguauacauc

SEQ ID NO: 3563741 - RNA, 19 nt, Human
uuuuguauacauccugggu

SEQ ID NO: 3563742 - RNA, 17 nt, Human
uuuuguauaguaaagug

SEQ ID NO: 3563743 - RNA, 18 nt, Human
uuuuguauaguaaaguga

SEQ ID NO: 3563744 - RNA, 20 nt, Human
uuuuguauaguuaacacacu

SEQ ID NO: 3563745 - RNA, 23 nt, Human
uuuuguauaguuguggacauuua

SEQ ID NO: 3563746 - RNA, 14 nt, Human
uuuuguaucuacau

SEQ ID NO: 3563747 - RNA, 14 nt, Human
uuuuguaugugugu

SEQ ID NO: 3563748 - RNA, 14 nt, Human
aaguuaaagggaag

SEQ ID NO: 3563749 - RNA, 14 nt, Human
aaguuaaauuuuau

SEQ ID NO: 3563750 - RNA, 11 nt, Human
aaguuaagaau

SEQ ID NO: 3563751 - RNA, 23 nt, Human
aaguuaagaauguucuuauguug

SEQ ID NO: 3563752 - RNA, 19 nt, Human
aaguuaagagaaacuuuau

SEQ ID NO: 3563753 - RNA, 22 nt, Human
aaguuaagagaaacuuuauaca

SEQ ID NO: 3563754 - RNA, 21 nt, Human
aaguuaaugcuuaagagggaa

SEQ ID NO: 3563755 - RNA, 15 nt, Human
aaguuaauuuaaagu

SEQ ID NO: 3563756 - RNA, 17 nt, Human
aaguuaauuuaaaguug

SEQ ID NO: 3563757 - RNA, 23 nt, Human
aaguuacacagaaaugcugcugg

SEQ ID NO: 3563758 - RNA, 17 nt, Human
aaguuacacauuuuuca

SEQ ID NO: 3563759 - RNA, 18 nt, Human
aaguuacuagguaacuuc

SEQ ID NO: 3563760 - RNA, 20 nt, Human
aaguuacuagguaacuucau

SEQ ID NO: 3563761 - RNA, 21 nt, Human
aaguuacuagguaacuucaua

SEQ ID NO: 3563762 - RNA, 12 nt, Human
aaguuacugaau

SEQ ID NO: 3563763 - RNA, 15 nt, Human
aaguuacugaaugca

SEQ ID NO: 3563764 - RNA, 22 nt, Human
aaguuacuucacuuuaauucuc

SEQ ID NO: 3563765 - RNA, 14 nt, Human
aaguuagaauuccu

SEQ ID NO: 3563766 - RNA, 22 nt, Human
aaguuagaauuccuucagggug

SEQ ID NO: 3563767 - RNA, 22 nt, Human
aaguuagagaacuaaacuaguu

SEQ ID NO: 3563768 - RNA, 16 nt, Human
aaguuagccuuuaucu

SEQ ID NO: 3563769 - RNA, 17 nt, Human
aaguuagccuuuaucua

SEQ ID NO: 3563770 - RNA, 13 nt, Human
aaguuagcucagg

SEQ ID NO: 3563771 - RNA, 21 nt, Human
aaguuagcugagcgugguggc

SEQ ID NO: 3563772 - RNA, 15 nt, Human
aaguuaguaggauau

SEQ ID NO: 3563773 - RNA, 16 nt, Human
aaguuaguaucuuuug

SEQ ID NO: 3563774 - RNA, 23 nt, Human
aaguuaguuuguauauauuauua

SEQ ID NO: 3563775 - RNA, 18 nt, Human
aaguuauaaaucaauguc

SEQ ID NO: 3563776 - RNA, 16 nt, Human
aaguuauaguauaucu

SEQ ID NO: 3563777 - RNA, 21 nt, Human
aaguuauauaaagagaaaauu

SEQ ID NO: 3563778 - RNA, 22 nt, Human
aaguuauauaaagagaaaauug

SEQ ID NO: 3563779 - RNA, 23 nt, Human
aaguuauauagguuuuguuugcu

SEQ ID NO: 3563780 - RNA, 14 nt, Human
aaguuauauuucag

SEQ ID NO: 3563781 - RNA, 13 nt, Human
aaguuaucuuuga

SEQ ID NO: 3563782 - RNA, 14 nt, Human
aaguuaucuuugaa

SEQ ID NO: 3563783 - RNA, 15 nt, Human
aaguuaucuuugaau

SEQ ID NO: 3563784 - RNA, 22 nt, Human
aaguuaucuuugaauauguagu

SEQ ID NO: 3563785 - RNA, 20 nt, Human
aaguuaugggaauaccugug

SEQ ID NO: 3563786 - RNA, 14 nt, Human
aaguuauguguaug

SEQ ID NO: 3563787 - RNA, 16 nt, Human
aaguuauuaaaauugu

SEQ ID NO: 3563788 - RNA, 15 nt, Human
aaguuauuaacuuua

SEQ ID NO: 3563789 - RNA, 18 nt, Human
aaguuauuaauuucuuca

SEQ ID NO: 3563790 - RNA, 20 nt, Human
aaguuauuagugguuuauca

SEQ ID NO: 3563791 - RNA, 20 nt, Human
aaguuauugauaaguucaua

SEQ ID NO: 3563792 - RNA, 16 nt, Human
aaguuauuuaaaucug

SEQ ID NO: 3563793 - RNA, 14 nt, Human
aaguuauuuauuuu

SEQ ID NO: 3563794 - RNA, 15 nt, Human
aaguuauuucccuuu

SEQ ID NO: 3563795 - RNA, 15 nt, Human
aaguuauuucuuguu

SEQ ID NO: 3563796 - RNA, 14 nt, Human
aaguuauuuucuac

SEQ ID NO: 3563797 - RNA, 21 nt, Human
aaguuauuuucuacagugguu

SEQ ID NO: 3563798 - RNA, 19 nt, Human
aaguuauuuuuaauuuggu

SEQ ID NO: 3563799 - RNA, 11 nt, Human
aaguucaagga

SEQ ID NO: 3563800 - RNA, 15 nt, Human
aaguucaaggaccaa

SEQ ID NO: 3563801 - RNA, 15 nt, Human
aaguucaccauuaaa

SEQ ID NO: 3563802 - RNA, 16 nt, Human
aaguucagaguuuucu

SEQ ID NO: 3563803 - RNA, 17 nt, Human
aaguucagaguuuucug

SEQ ID NO: 3563804 - RNA, 16 nt, Human
aaguucagccacccug

SEQ ID NO: 3563805 - RNA, 20 nt, Human
aaguucauaacagugccauu

SEQ ID NO: 3563806 - RNA, 17 nt, Human
aaguucaugcuuuguuc

SEQ ID NO: 3563807 - RNA, 14 nt, Human
aaguuccaagucca

SEQ ID NO: 3563808 - RNA, 19 nt, Human
aaguuccaguguucucucu

SEQ ID NO: 3563809 - RNA, 13 nt, Human
aaguucccaguug

SEQ ID NO: 3563810 - RNA, 20 nt, Human
aaguucccuacuuccuguga

SEQ ID NO: 3563811 - RNA, 14 nt, Human
aaguuccucuagug

SEQ ID NO: 3563812 - RNA, 15 nt, Human
aaguucuaagauucu

SEQ ID NO: 3563813 - RNA, 16 nt, Human
aaguucuaagauucua

SEQ ID NO: 3563814 - RNA, 18 nt, Human
aaguucuaagauucuaau

SEQ ID NO: 3563815 - RNA, 17 nt, Human
aaguucuaagauucuga

SEQ ID NO: 3563816 - RNA, 17 nt, Human
aaguucuagagaagagg

SEQ ID NO: 3563817 - RNA, 16 nt, Human
aaguucucaaugugaa

SEQ ID NO: 3563818 - RNA, 13 nt, Human
aaguucucauugu

SEQ ID NO: 3563819 - RNA, 16 nt, Human
aaguucugccucugau

SEQ ID NO: 3563820 - RNA, 13 nt, Human
aaguucugcuuuc

SEQ ID NO: 3563821 - RNA, 19 nt, Human
aaguucugcuuucucccca

SEQ ID NO: 3563822 - RNA, 12 nt, Human
aaguucugugua

SEQ ID NO: 3563823 - RNA, 15 nt, Human
aaguucuguguuuaa

SEQ ID NO: 3563824 - RNA, 18 nt, Human
aaguucuuagauaucuuu

SEQ ID NO: 3563825 - RNA, 20 nt, Human
aaguucuuaugaggagggga

SEQ ID NO: 3563826 - RNA, 22 nt, Human
aaguucuuaugaggaggggagg

SEQ ID NO: 3563827 - RNA, 15 nt, Human
aaguucuuugauucu

SEQ ID NO: 3563828 - RNA, 21 nt, Human
aaguugaauggccugccuuga

SEQ ID NO: 3563829 - RNA, 12 nt, Human
aaguugaauuuu

SEQ ID NO: 3563830 - RNA, 20 nt, Human
aaguugacucugcucuugca

SEQ ID NO: 3563831 - RNA, 21 nt, Human
aaguugacucugcucuugcau

SEQ ID NO: 3563832 - RNA, 21 nt, Human
aaguugacuuauaguacauga

SEQ ID NO: 3563833 - RNA, 18 nt, Human
aaguugagcuaugacuua

SEQ ID NO: 3563834 - RNA, 21 nt, Human
aaguugauauagaacagugcu

SEQ ID NO: 3563835 - RNA, 15 nt, Human
aaguugaucucccca

SEQ ID NO: 3563836 - RNA, 18 nt, Human
aaguugauggugaugaaa

SEQ ID NO: 3563837 - RNA, 20 nt, Human
aaguugcacugauauuuuac

SEQ ID NO: 3563838 - RNA, 22 nt, Human
aaguugcagauguuagauauuu

SEQ ID NO: 3563839 - RNA, 19 nt, Human
aaguugcagcuguuuuguu

SEQ ID NO: 3563840 - RNA, 18 nt, Human
aaguugccuaaauccauu

SEQ ID NO: 3563841 - RNA, 12 nt, Human
aaguugcugcuu

SEQ ID NO: 3563842 - RNA, 14 nt, Human
aaguugcuggaaag

SEQ ID NO: 3563843 - RNA, 19 nt, Human
aaguuggaaacacuaaaug

SEQ ID NO: 3563844 - RNA, 14 nt, Human
aaguuggacuaaau

SEQ ID NO: 3563845 - RNA, 13 nt, Human
aaguuggacuggg

SEQ ID NO: 3563846 - RNA, 23 nt, Human
aaguuggaguuuuguuuccucug

SEQ ID NO: 3563847 - RNA, 11 nt, Human
aaguuggcuuc

SEQ ID NO: 3563848 - RNA, 20 nt, Human
aaguugguauuaauaaaaag

SEQ ID NO: 3563849 - RNA, 16 nt, Human
aaguugguuggauaag

SEQ ID NO: 3563850 - RNA, 18 nt, Human
aaguuguaacuuauauug

SEQ ID NO: 3563851 - RNA, 12 nt, Human
aaguuguacaug

SEQ ID NO: 3563852 - RNA, 14 nt, Human
aaguuguacuuuaa

SEQ ID NO: 3563853 - RNA, 20 nt, Human
aaguuguacuuuaaaaauuu

SEQ ID NO: 3563854 - RNA, 20 nt, Human
aaguugugccuuuuauagcu

SEQ ID NO: 3563855 - RNA, 18 nt, Human
aaguuguggauuucaguu

SEQ ID NO: 3563856 - RNA, 17 nt, Human
aaguuguuaacuaaauu

SEQ ID NO: 3563857 - RNA, 15 nt, Human
aaguuguuucauuga

SEQ ID NO: 3563858 - RNA, 19 nt, Human
aaguuuaaaacaguauuua

SEQ ID NO: 3563859 - RNA, 14 nt, Human
aaguuuaaaaugua

SEQ ID NO: 3563860 - RNA, 15 nt, Human
aaguuuaaaauguau

SEQ ID NO: 3563861 - RNA, 17 nt, Human
aaguuuaaaauguauaa

SEQ ID NO: 3563862 - RNA, 19 nt, Human
aaguuuaaauauuaagcau

SEQ ID NO: 3563863 - RNA, 23 nt, Human
aaguuuaaggaauaugggagaaa

SEQ ID NO: 3563864 - RNA, 17 nt, Human
aaguuuaauauuaaagc

SEQ ID NO: 3563865 - RNA, 20 nt, Human
aaguuuaauauuaaagccau

SEQ ID NO: 3563866 - RNA, 20 nt, Human
aaguuuaauggugccuucau

SEQ ID NO: 3563867 - RNA, 14 nt, Human
aaguuuaauugacu

SEQ ID NO: 3563868 - RNA, 19 nt, Human
aaguuuacauuguaaauag

SEQ ID NO: 3563869 - RNA, 13 nt, Human
aaguuuacauuuu

SEQ ID NO: 3563870 - RNA, 16 nt, Human
aaguuuacauuuuuau

SEQ ID NO: 3563871 - RNA, 23 nt, Human
aaguuuacauuuuuauuuaugaa

SEQ ID NO: 3563872 - RNA, 17 nt, Human
aaguuuagauuuuaauc

SEQ ID NO: 3563873 - RNA, 21 nt, Human
aaguuuagccccugaaagcca

SEQ ID NO: 3563874 - RNA, 23 nt, Human
aaguuuauaagaggaugaaguga

SEQ ID NO: 3563875 - RNA, 16 nt, Human
aaguuuaugucuaaag

SEQ ID NO: 3563876 - RNA, 15 nt, Human
aaguuucaaaaaucu

SEQ ID NO: 3563877 - RNA, 17 nt, Human
aaguuucaaaaaucuga

SEQ ID NO: 3563878 - RNA, 22 nt, Human
aaguuucaaacuuacuauuuug

SEQ ID NO: 3563879 - RNA, 16 nt, Human
aaguuucaaugugauu

SEQ ID NO: 3563880 - RNA, 18 nt, Human
aaguuucagaguauauug

SEQ ID NO: 3563881 - RNA, 19 nt, Human
aaguuucaggauacaugug

SEQ ID NO: 3563882 - RNA, 19 nt, Human
aaguuucaggugacaugug

SEQ ID NO: 3563883 - RNA, 21 nt, Human
aaguuucaggugacaugugaa

SEQ ID NO: 3563884 - RNA, 19 nt, Human
aaguuucaguauuagaugc

SEQ ID NO: 3563885 - RNA, 13 nt, Human
aaguuucauuuau

SEQ ID NO: 3563886 - RNA, 15 nt, Human
aaguuuccaagcaaa

SEQ ID NO: 3563887 - RNA, 16 nt, Human
aaguuuccaagcaaau

SEQ ID NO: 3563888 - RNA, 19 nt, Human
aaguuuccaagcaaauguu

SEQ ID NO: 3563889 - RNA, 12 nt, Human
aaguuuccauau

SEQ ID NO: 3563890 - RNA, 18 nt, Human
aaguuuccauauguuaua

SEQ ID NO: 3563891 - RNA, 12 nt, Human
aaguuucccuuc

SEQ ID NO: 3563892 - RNA, 19 nt, Human
aaguuuccuuccagcccag

SEQ ID NO: 3563893 - RNA, 17 nt, Human
aaguuuccuuggcuggu

SEQ ID NO: 3563894 - RNA, 13 nt, Human
aaguuucucagcu

SEQ ID NO: 3563895 - RNA, 16 nt, Human
aaguuucucagcuccc

SEQ ID NO: 3563896 - RNA, 22 nt, Human
aaguuucuuugaaaauaguuau

SEQ ID NO: 3563897 - RNA, 18 nt, Human
aaguuugaaaagcaauau

SEQ ID NO: 3563898 - RNA, 17 nt, Human
aauaguguguucugauu

SEQ ID NO: 3563899 - RNA, 22 nt, Human
aauaguguguucugauuagaaa

SEQ ID NO: 3563900 - RNA, 15 nt, Human
aauaguguuaaucaa

SEQ ID NO: 3563901 - RNA, 16 nt, Human
aauaguguuaaucaau

SEQ ID NO: 3563902 - RNA, 21 nt, Human
aauaguuaagacaugauuucc

SEQ ID NO: 3563903 - RNA, 13 nt, Human
aauaguuaauaua

SEQ ID NO: 3563904 - RNA, 22 nt, Human
aauaguugaaccuauuucucuu

SEQ ID NO: 3563905 - RNA, 18 nt, Human
aauaguugagccagcaga

SEQ ID NO: 3563906 - RNA, 21 nt, Human
aauaguuguccauauuuucac

SEQ ID NO: 3563907 - RNA, 23 nt, Human
aauaguuuauaaaugugaacuua

SEQ ID NO: 3563908 - RNA, 17 nt, Human
aauaguuuauuuuaaaa

SEQ ID NO: 3563909 - RNA, 14 nt, Human
aauaguuugucuau

SEQ ID NO: 3563910 - RNA, 17 nt, Human
aauaguuugucuauuuu

SEQ ID NO: 3563911 - RNA, 23 nt, Human
aauaguuugucuauuuuaaaaua

SEQ ID NO: 3563912 - RNA, 20 nt, Human
aauaguuuuauuaauaaaca

SEQ ID NO: 3563913 - RNA, 21 nt, Human
aauaguuuuauuaauaaacau

SEQ ID NO: 3563914 - RNA, 14 nt, Human
aauauaaaacugcg

SEQ ID NO: 3563915 - RNA, 18 nt, Human
aauauaaaacugcguuaa

SEQ ID NO: 3563916 - RNA, 14 nt, Human
aauauaaaaggcaa

SEQ ID NO: 3563917 - RNA, 12 nt, Human
aauauaaaauua

SEQ ID NO: 3563918 - RNA, 14 nt, Human
aauauaaacaaaga

SEQ ID NO: 3563919 - RNA, 14 nt, Human
aauauaaacacuau

SEQ ID NO: 3563920 - RNA, 21 nt, Human
aauauaaagcaucuaaacuuu

SEQ ID NO: 3563921 - RNA, 15 nt, Human
aauauaaaguuuuau

SEQ ID NO: 3563922 - RNA, 22 nt, Human
aauauaaaguuuuauauauuau

SEQ ID NO: 3563923 - RNA, 12 nt, Human
aauauaaaugca

SEQ ID NO: 3563924 - RNA, 15 nt, Human
aauauaaaugcaaau

SEQ ID NO: 3563925 - RNA, 17 nt, Human
aauauaaaugcaaauaa

SEQ ID NO: 3563926 - RNA, 18 nt, Human
aauauaaaugcaaauaac

SEQ ID NO: 3563927 - RNA, 19 nt, Human
aauauaaauguuaagaaaa

SEQ ID NO: 3563928 - RNA, 13 nt, Human
aauauaacaugaa

SEQ ID NO: 3563929 - RNA, 18 nt, Human
aauauaacaugaaaugau

SEQ ID NO: 3563930 - RNA, 21 nt, Human
aauauaaccaauguuuaaaaa

SEQ ID NO: 3563931 - RNA, 13 nt, Human
aauauaagaauaa

SEQ ID NO: 3563932 - RNA, 18 nt, Human
aauauaaggaaagcaaua

SEQ ID NO: 3563933 - RNA, 19 nt, Human
aauauaaggaaagcaauaa

SEQ ID NO: 3563934 - RNA, 14 nt, Human
aauauaaguaaagu

SEQ ID NO: 3563935 - RNA, 16 nt, Human
aauauaaguuucuuug

SEQ ID NO: 3563936 - RNA, 17 nt, Human
aauauaauacacaaaau

SEQ ID NO: 3563937 - RNA, 13 nt, Human
aauauaauauugu

SEQ ID NO: 3563938 - RNA, 15 nt, Human
aauauaauuguuuua

SEQ ID NO: 3563939 - RNA, 23 nt, Human
aauauacaugaagaauagaaaca

SEQ ID NO: 3563940 - RNA, 19 nt, Human
aauauaccccuuaguguuu

SEQ ID NO: 3563941 - RNA, 12 nt, Human
aauauacuguaa

SEQ ID NO: 3563942 - RNA, 13 nt, Human
aauauacuguaaa

SEQ ID NO: 3563943 - RNA, 17 nt, Human
aauauacuguaaagaaa

SEQ ID NO: 3563944 - RNA, 23 nt, Human
aauauacuuguggacuaaaagau

SEQ ID NO: 3563945 - RNA, 21 nt, Human
aauauagaaaaaaacauucua

SEQ ID NO: 3563946 - RNA, 22 nt, Human
aauauagaaaaaaacauucuau

SEQ ID NO: 3563947 - RNA, 13 nt, Human
aauauagaaacac

SEQ ID NO: 3563948 - RNA, 22 nt, Human
aauauagaaacacgaacuuuag

SEQ ID NO: 3563949 - RNA, 17 nt, Human
aauauagauuaaaucau

SEQ ID NO: 3563950 - RNA, 15 nt, Human
aauauagauuagaaa

SEQ ID NO: 3563951 - RNA, 18 nt, Human
aauauagauuagaaaaau

SEQ ID NO: 3563952 - RNA, 20 nt, Human
aauauaggaacuuaaauaau

SEQ ID NO: 3563953 - RNA, 13 nt, Human
aauauaggucucu

SEQ ID NO: 3563954 - RNA, 15 nt, Human
aauauaguuccuaag

SEQ ID NO: 3563955 - RNA, 20 nt, Human
aauauaguuccuaagaagcu

SEQ ID NO: 3563956 - RNA, 16 nt, Human
aauauauaaaaauaua

SEQ ID NO: 3563957 - RNA, 11 nt, Human
aauauauaaau

SEQ ID NO: 3563958 - RNA, 13 nt, Human
aauauauaaauau

SEQ ID NO: 3563959 - RNA, 17 nt, Human
aauauauaaauauauau

SEQ ID NO: 3563960 - RNA, 13 nt, Human
aauauauauaaag

SEQ ID NO: 3563961 - RNA, 15 nt, Human
aauauauauaaauaa

SEQ ID NO: 3563962 - RNA, 13 nt, Human
aauauauauacau

SEQ ID NO: 3563963 - RNA, 13 nt, Human
aauauauauauau

SEQ ID NO: 3563964 - RNA, 14 nt, Human
aauauauauauccu

SEQ ID NO: 3563965 - RNA, 18 nt, Human
aauauauauguugauuuc

SEQ ID NO: 3563966 - RNA, 19 nt, Human
aauauauauuauacuugua

SEQ ID NO: 3563967 - RNA, 14 nt, Human
aauauauauucugg

SEQ ID NO: 3563968 - RNA, 14 nt, Human
aauauaucucuauu

SEQ ID NO: 3563969 - RNA, 21 nt, Human
aauauaucuuauaaaguggaa

SEQ ID NO: 3563970 - RNA, 20 nt, Human
aauauaugccuuguauaaua

SEQ ID NO: 3563971 - RNA, 21 nt, Human
aauauaugccuuguauaauau

SEQ ID NO: 3563972 - RNA, 14 nt, Human
aauauauggcagag

SEQ ID NO: 3563973 - RNA, 13 nt, Human
aauauauggcauu

SEQ ID NO: 3563974 - RNA, 14 nt, Human
aauauauggcauuu

SEQ ID NO: 3563975 - RNA, 17 nt, Human
aauauauggcauuugca

SEQ ID NO: 3563976 - RNA, 14 nt, Human
aauauauguauaua

SEQ ID NO: 3563977 - RNA, 16 nt, Human
aauauauguauauaca

SEQ ID NO: 3563978 - RNA, 12 nt, Human
aauauauguauu

SEQ ID NO: 3563979 - RNA, 21 nt, Human
aauauauguauuauuuauaau

SEQ ID NO: 3563980 - RNA, 13 nt, Human
aauauauuauaau

SEQ ID NO: 3563981 - RNA, 16 nt, Human
aauauauuauaaucuu

SEQ ID NO: 3563982 - RNA, 13 nt, Human
aauauauuauuac

SEQ ID NO: 3563983 - RNA, 21 nt, Human
aauauauuauuacuuguaaau

SEQ ID NO: 3563984 - RNA, 13 nt, Human
aauauauugaacu

SEQ ID NO: 3563985 - RNA, 23 nt, Human
aauauauugaacuuuuguacuga

SEQ ID NO: 3563986 - RNA, 21 nt, Human
aauauauugcugcugguaauu

SEQ ID NO: 3563987 - RNA, 16 nt, Human
aauauauuuaaaaaua

SEQ ID NO: 3563988 - RNA, 15 nt, Human
aauauauuuaaaggg

SEQ ID NO: 3563989 - RNA, 20 nt, Human
aauauauuuaagauaauuau

SEQ ID NO: 3563990 - RNA, 19 nt, Human
aauauauuuguguauuuaa

SEQ ID NO: 3563991 - RNA, 21 nt, Human
aauauauuuguguauuuaaca

SEQ ID NO: 3563992 - RNA, 24 nt, Human
aauauauuuguguauuuaacaggg

SEQ ID NO: 3563993 - RNA, 15 nt, Human
aauauauuuuaagac

SEQ ID NO: 3563994 - RNA, 16 nt, Human
aauauauuuuaccaua

SEQ ID NO: 3563995 - RNA, 21 nt, Human
aauauauuuucuguuuucuuu

SEQ ID NO: 3563996 - RNA, 14 nt, Human
aauauauuuuguau

SEQ ID NO: 3563997 - RNA, 18 nt, Human
aauauauuuuguaugcaa

SEQ ID NO: 3563998 - RNA, 19 nt, Human
aauauauuuuguuuacaaa

SEQ ID NO: 3563999 - RNA, 15 nt, Human
aauauauuuuuagac

SEQ ID NO: 3564000 - RNA, 20 nt, Human
aauauauuuuuauauuuagu

SEQ ID NO: 3564001 - RNA, 20 nt, Human
aauaucaaaugcaguauauu

SEQ ID NO: 3564002 - RNA, 21 nt, Human
aauaucaaauuaauuguguga

SEQ ID NO: 3564003 - RNA, 13 nt, Human
aauaucacucauu

SEQ ID NO: 3564004 - RNA, 12 nt, Human
aauaucacuugu

SEQ ID NO: 3564005 - RNA, 20 nt, Human
aauaucagcaagucucuuua

SEQ ID NO: 3564006 - RNA, 19 nt, Human
aauaucaguagaaacucua

SEQ ID NO: 3564007 - RNA, 16 nt, Human
aauaucaucaguauug

SEQ ID NO: 3564008 - RNA, 18 nt, Human
aauaucaucaguauugaa

SEQ ID NO: 3564009 - RNA, 15 nt, Human
aauaucauucagcaa

SEQ ID NO: 3564010 - RNA, 21 nt, Human
aauauccaggucaacagaaug

SEQ ID NO: 3564011 - RNA, 22 nt, Human
aauauccaggucaacagaauga

SEQ ID NO: 3564012 - RNA, 22 nt, Human
aauaucccagaaaaaguaacuc

SEQ ID NO: 3564013 - RNA, 23 nt, Human
aauaucccuccuguugggagagg

SEQ ID NO: 3564014 - RNA, 20 nt, Human
aauaucccuuggacauuuua

SEQ ID NO: 3564015 - RNA, 14 nt, Human
aauauccuaaacau

SEQ ID NO: 3564016 - RNA, 12 nt, Human
aauauccuaaua

SEQ ID NO: 3564017 - RNA, 13 nt, Human
aauauccuaauaa

SEQ ID NO: 3564018 - RNA, 14 nt, Human
aauauccuaauaaa

SEQ ID NO: 3564019 - RNA, 15 nt, Human
aauauccuaauaaaa

SEQ ID NO: 3564020 - RNA, 14 nt, Human
aaguccacagugga

SEQ ID NO: 3564021 - RNA, 19 nt, Human
aaguccacaguggaaccag

SEQ ID NO: 3564022 - RNA, 21 nt, Human
aaguccagguccugguggggc

SEQ ID NO: 3564023 - RNA, 19 nt, Human
aaguccaggucgggcucag

SEQ ID NO: 3564024 - RNA, 21 nt, Human
aaguccaggucgggcucagcu

SEQ ID NO: 3564025 - RNA, 20 nt, Human
aaguccaguguuucuuuuuu

SEQ ID NO: 3564026 - RNA, 14 nt, Human
aaguccccaggccc

SEQ ID NO: 3564027 - RNA, 18 nt, Human
aaguccccaggccccagg

SEQ ID NO: 3564028 - RNA, 17 nt, Human
aagucccugucaccucu

SEQ ID NO: 3564029 - RNA, 22 nt, Human
aagucccuguuuucugagcccg

SEQ ID NO: 3564030 - RNA, 19 nt, Human
aaguccgcagaagcccuga

SEQ ID NO: 3564031 - RNA, 14 nt, Human
aaguccucccugac

SEQ ID NO: 3564032 - RNA, 18 nt, Human
aaguccucuuuucugaga

SEQ ID NO: 3564033 - RNA, 22 nt, Human
aaguccugaagaggcgggccag

SEQ ID NO: 3564034 - RNA, 23 nt, Human
aaguccugaagaggcgggccagc

SEQ ID NO: 3564035 - RNA, 17 nt, Human
aaguccuggcuucaggc

SEQ ID NO: 3564036 - RNA, 18 nt, Human
aaguccuuugagcuccug

SEQ ID NO: 3564037 - RNA, 20 nt, Human
aaguccuuugagcuccuggg

SEQ ID NO: 3564038 - RNA, 16 nt, Human
aaguccuuuuguaaag

SEQ ID NO: 3564039 - RNA, 17 nt, Human
aaguccuuuuguaaagu

SEQ ID NO: 3564040 - RNA, 21 nt, Human
aaguccuuuuuuuccaucuuu

SEQ ID NO: 3564041 - RNA, 15 nt, Human
aagucguugugaggg

SEQ ID NO: 3564042 - RNA, 15 nt, Human
aagucguuuuccaaa

SEQ ID NO: 3564043 - RNA, 13 nt, Human
aagucuaaaguuu

SEQ ID NO: 3564044 - RNA, 14 nt, Human
aagucuaaaguuua

SEQ ID NO: 3564045 - RNA, 19 nt, Human
aagucuaaaguuuacagua

SEQ ID NO: 3564046 - RNA, 20 nt, Human
aagucuaccaaccuguucaa

SEQ ID NO: 3564047 - RNA, 22 nt, Human
aagucuaggagcugggaggaaa

SEQ ID NO: 3564048 - RNA, 22 nt, Human
aagucuaucuaaugacaugccu

SEQ ID NO: 3564049 - RNA, 17 nt, Human
aagucuaugaugcuguu

SEQ ID NO: 3564050 - RNA, 12 nt, Human
aagucucagcua

SEQ ID NO: 3564051 - RNA, 13 nt, Human
aagucuccagccc

SEQ ID NO: 3564052 - RNA, 18 nt, Human
aagucucuauuuaaauuc

SEQ ID NO: 3564053 - RNA, 21 nt, Human
aagucucucauucuaggccuc

SEQ ID NO: 3564054 - RNA, 16 nt, Human
aagucucugcuggccc

SEQ ID NO: 3564055 - RNA, 19 nt, Human
aagucucuggaauuugaaa

SEQ ID NO: 3564056 - RNA, 18 nt, Human
aagucucuuuucuuuaga

SEQ ID NO: 3564057 - RNA, 12 nt, Human
aagucugaauca

SEQ ID NO: 3564058 - RNA, 21 nt, Human
aagucugcaacuuuaagcagc

SEQ ID NO: 3564059 - RNA, 22 nt, Human
aagucugucuuuccugaaccau

SEQ ID NO: 3564060 - RNA, 22 nt, Human
aagucugugccuggagcuccug

SEQ ID NO: 3564061 - RNA, 23 nt, Human
aagucugugccuggagcuccugg

SEQ ID NO: 3564062 - RNA, 22 nt, Human
aagucugugugaugaacuuucu

SEQ ID NO: 3564063 - RNA, 13 nt, Human
aagucuguuuuau

SEQ ID NO: 3564064 - RNA, 15 nt, Human
aagucuguuuuauga

SEQ ID NO: 3564065 - RNA, 16 nt, Human
aagucuguuuuaugac

SEQ ID NO: 3564066 - RNA, 17 nt, Human
aagucuuaaaauaacuu

SEQ ID NO: 3564067 - RNA, 18 nt, Human
aagucuuaaaauaacuua

SEQ ID NO: 3564068 - RNA, 16 nt, Human
aagucuuagauguaua

SEQ ID NO: 3564069 - RNA, 22 nt, Human
aagucuucaagggcugcuucaa

SEQ ID NO: 3564070 - RNA, 18 nt, Human
aagucuucccugaucaag

SEQ ID NO: 3564071 - RNA, 22 nt, Human
aagucuucccugaucaagucac

SEQ ID NO: 3564072 - RNA, 13 nt, Human
aagucuugcugug

SEQ ID NO: 3564073 - RNA, 9 nt, Human
aagucuugu

SEQ ID NO: 3564074 - RNA, 11 nt, Human
aagucuuguau

SEQ ID NO: 3564075 - RNA, 14 nt, Human
aagucuugugacua

SEQ ID NO: 3564076 - RNA, 16 nt, Human
aagucuuucaagaaug

SEQ ID NO: 3564077 - RNA, 16 nt, Human
aagucuuucacauuua

SEQ ID NO: 3564078 - RNA, 16 nt, Human
aagucuuucucuuucc

SEQ ID NO: 3564079 - RNA, 20 nt, Human
aagucuuuuaaaaaguauug

SEQ ID NO: 3564080 - RNA, 15 nt, Human
aagugaaaaacauga

SEQ ID NO: 3564081 - RNA, 21 nt, Human
aagugaaaaaggaggaagaga

SEQ ID NO: 3564082 - RNA, 12 nt, Human
aagugaaaacuu

SEQ ID NO: 3564083 - RNA, 14 nt, Human
aagugaaaauauag

SEQ ID NO: 3564084 - RNA, 14 nt, Human
aagugaaaaugguc

SEQ ID NO: 3564085 - RNA, 17 nt, Human
aagugaaauggauacua

SEQ ID NO: 3564086 - RNA, 11 nt, Human
aagugaaauuu

SEQ ID NO: 3564087 - RNA, 20 nt, Human
aaugaaaagucguuuuccaa

SEQ ID NO: 3564088 - RNA, 14 nt, Human
aaugaaaauaagaa

SEQ ID NO: 3564089 - RNA, 13 nt, Human
aaugaaaauugua

SEQ ID NO: 3564090 - RNA, 17 nt, Human
aaugaaacaccuucucu

SEQ ID NO: 3564091 - RNA, 19 nt, Human
aaugaaacacucaguuguu

SEQ ID NO: 3564092 - RNA, 18 nt, Human
aaugaaacccccacacac

SEQ ID NO: 3564093 - RNA, 20 nt, Human
aaugaaacuagaaagcagag

SEQ ID NO: 3564094 - RNA, 16 nt, Human
aaugaaagaaaauuga

SEQ ID NO: 3564095 - RNA, 20 nt, Human
aaugaaagacuguacaaagu

SEQ ID NO: 3564096 - RNA, 19 nt, Human
aaugaaagaguaaaggaaa

SEQ ID NO: 3564097 - RNA, 12 nt, Human
aaugaaagauua

SEQ ID NO: 3564098 - RNA, 21 nt, Human
aaugaaauaauguacaucugg

SEQ ID NO: 3564099 - RNA, 19 nt, Human
aaugaaauaggagggaaac

SEQ ID NO: 3564100 - RNA, 14 nt, Human
aaugaaauguaugu

SEQ ID NO: 3564101 - RNA, 23 nt, Human
aaugaaauuacuacaaaauuuga

SEQ ID NO: 3564102 - RNA, 13 nt, Human
aaugaaauuuaaa

SEQ ID NO: 3564103 - RNA, 16 nt, Human
aaugaaauuuaaacau

SEQ ID NO: 3564104 - RNA, 17 nt, Human
aaugaaauuuaaacauu

SEQ ID NO: 3564105 - RNA, 17 nt, Human
aaugaacaaaauuauuu

SEQ ID NO: 3564106 - RNA, 16 nt, Human
aaugaacaaagaccaa

SEQ ID NO: 3564107 - RNA, 18 nt, Human
aaugaacaagagaagcau

SEQ ID NO: 3564108 - RNA, 15 nt, Human
aaugaacaagcauuc

SEQ ID NO: 3564109 - RNA, 15 nt, Human
aaugaacacucuuuu

SEQ ID NO: 3564110 - RNA, 18 nt, Human
aaugaacacucuuuugcu

SEQ ID NO: 3564111 - RNA, 12 nt, Human
aaugaacagaac

SEQ ID NO: 3564112 - RNA, 14 nt, Human
aaugaacagaacau

SEQ ID NO: 3564113 - RNA, 15 nt, Human
aaugaacagaacaua

SEQ ID NO: 3564114 - RNA, 13 nt, Human
aaugaacauucca

SEQ ID NO: 3564115 - RNA, 16 nt, Human
aaugaaccacaucuug

SEQ ID NO: 3564116 - RNA, 23 nt, Human
aaugaaccacaucuugcucugcu

SEQ ID NO: 3564117 - RNA, 14 nt, Human
aaugaacugaaguu

SEQ ID NO: 3564118 - RNA, 15 nt, Human
aaugaacugaaguuu

SEQ ID NO: 3564119 - RNA, 20 nt, Human
aaugaagagcuguugauggg

SEQ ID NO: 3564120 - RNA, 21 nt, Human
aaugaagauaccaucagcaaa

SEQ ID NO: 3564121 - RNA, 12 nt, Human
aaugaagauacu

SEQ ID NO: 3564122 - RNA, 23 nt, Human
aaugaagcaaaugucaugcugcc

SEQ ID NO: 3564123 - RNA, 13 nt, Human
aaugaagccagcu

SEQ ID NO: 3564124 - RNA, 22 nt, Human
aaugaagccauaugaacagcug

SEQ ID NO: 3564125 - RNA, 12 nt, Human
aaugaagcuugu

SEQ ID NO: 3564126 - RNA, 17 nt, Human
aaugaagcuuguguauc

SEQ ID NO: 3564127 - RNA, 22 nt, Human
aaugaaggaaauaaaaaagucu

SEQ ID NO: 3564128 - RNA, 23 nt, Human
aaugaaggaaauaaaaaagucuc

SEQ ID NO: 3564129 - RNA, 21 nt, Human
aaugaaguaacuugucuuaaa

SEQ ID NO: 3564130 - RNA, 16 nt, Human
aaugaaguauuucuca

SEQ ID NO: 3564131 - RNA, 23 nt, Human
aaugaagucucugaagugaaacu

SEQ ID NO: 3564132 - RNA, 14 nt, Human
aaugaaguugaaaa

SEQ ID NO: 3564133 - RNA, 14 nt, Human
aaugaaguuuauac

SEQ ID NO: 3564134 - RNA, 13 nt, Human
aaugaaguuugaa

SEQ ID NO: 3564135 - RNA, 14 nt, Human
aaugaaguuugaau

SEQ ID NO: 3564136 - RNA, 15 nt, Human
aaugaaguuugaaug

SEQ ID NO: 3564137 - RNA, 21 nt, Human
aaugaaguuugaauguuaaau

SEQ ID NO: 3564138 - RNA, 14 nt, Human
aaugaauaucuauu

SEQ ID NO: 3564139 - RNA, 15 nt, Human
aaugaauauugaagu

SEQ ID NO: 3564140 - RNA, 14 nt, Human
aaugaaugaaacau

SEQ ID NO: 3564141 - RNA, 15 nt, Human
aaugaaugaaugaau

SEQ ID NO: 3564142 - RNA, 19 nt, Human
aaugaaugaggucugggcu

SEQ ID NO: 3564143 - RNA, 19 nt, Human
aaugaauggacucaaacug

SEQ ID NO: 3564144 - RNA, 22 nt, Human
aaugaauggcuaagcaaaaugu

SEQ ID NO: 3564145 - RNA, 13 nt, Human
aaugaaugucacu

SEQ ID NO: 3564146 - RNA, 17 nt, Human
aauguuuaugagccaga

SEQ ID NO: 3564147 - RNA, 15 nt, Human
aauguuuauuccuug

SEQ ID NO: 3564148 - RNA, 16 nt, Human
aauguuuauuccuuga

SEQ ID NO: 3564149 - RNA, 15 nt, Human
aauguuucauuugca

SEQ ID NO: 3564150 - RNA, 12 nt, Human
aauguuucuauc

SEQ ID NO: 3564151 - RNA, 22 nt, Human
aauguuucuucuagguucuaaa

SEQ ID NO: 3564152 - RNA, 17 nt, Human
aauguuucuuuuguuug

SEQ ID NO: 3564153 - RNA, 22 nt, Human
aauguuugaggagcauguuuug

SEQ ID NO: 3564154 - RNA, 14 nt, Human
aauguuugcauaua

SEQ ID NO: 3564155 - RNA, 23 nt, Human
aauguuugggcagaagggagaag

SEQ ID NO: 3564156 - RNA, 22 nt, Human
aauguuugucucaguuggaaau

SEQ ID NO: 3564157 - RNA, 18 nt, Human
aauguuuguuaaaaauaa

SEQ ID NO: 3564158 - RNA, 14 nt, Human
aauguuuuaaaugu

SEQ ID NO: 3564159 - RNA, 15 nt, Human
aauguuuuaaaugua

SEQ ID NO: 3564160 - RNA, 17 nt, Human
aauguuuuaaauguaca

SEQ ID NO: 3564161 - RNA, 13 nt, Human
aauguuuuaaauu

SEQ ID NO: 3564162 - RNA, 19 nt, Human
aauguuuucuuugcaaagu

SEQ ID NO: 3564163 - RNA, 22 nt, Human
aauguuuucuuugcaaaguauu

SEQ ID NO: 3564164 - RNA, 14 nt, Human
aauguuuugcuuuu

SEQ ID NO: 3564165 - RNA, 13 nt, Human
aauguuuuguaaa

SEQ ID NO: 3564166 - RNA, 21 nt, Human
aauguuuuguaaacuuugaaa

SEQ ID NO: 3564167 - RNA, 22 nt, Human
aauguuuuguaaacuuugaaau

SEQ ID NO: 3564168 - RNA, 16 nt, Human
aauguuuuuaaauaua

SEQ ID NO: 3564169 - RNA, 22 nt, Human
aauguuuuuaauaaaagaaaau

SEQ ID NO: 3564170 - RNA, 14 nt, Human
aauguuuuucuaaa

SEQ ID NO: 3564171 - RNA, 15 nt, Human
aauguuuuucugcca

SEQ ID NO: 3564172 - RNA, 21 nt, Human
aauguuuuucugccagggagc

SEQ ID NO: 3564173 - RNA, 19 nt, Human
aauguuuuuucauguguuu

SEQ ID NO: 3564174 - RNA, 15 nt, Human
aauguuuuuugccac

SEQ ID NO: 3564175 - RNA, 22 nt, Human
aauguuuuuuuuuaaagacuuu

SEQ ID NO: 3564176 - RNA, 18 nt, Human
aauuaaaaaaaaauugua

SEQ ID NO: 3564177 - RNA, 15 nt, Human
aauuaaaaaagauaa

SEQ ID NO: 3564178 - RNA, 16 nt, Human
aauuaaaaaagauaaa

SEQ ID NO: 3564179 - RNA, 17 nt, Human
aauuaaaaacuaguagu

SEQ ID NO: 3564180 - RNA, 12 nt, Human
aauuaaaaagau

SEQ ID NO: 3564181 - RNA, 16 nt, Human
aauuaaaaagauucuu

SEQ ID NO: 3564182 - RNA, 19 nt, Human
aauuaaaaagauucuuuuu

SEQ ID NO: 3564183 - RNA, 12 nt, Human
aauuaaaacaau

SEQ ID NO: 3564184 - RNA, 14 nt, Human
aauuaaaacaaugu

SEQ ID NO: 3564185 - RNA, 18 nt, Human
aauuaaaacacaacaucu

SEQ ID NO: 3564186 - RNA, 10 nt, Human
aauuaaaacu

SEQ ID NO: 3564187 - RNA, 19 nt, Human
aauuaaaacuauucaugcu

SEQ ID NO: 3564188 - RNA, 16 nt, Human
aauuaaaagcaaauca

SEQ ID NO: 3564189 - RNA, 13 nt, Human
aauuaaaauggau

SEQ ID NO: 3564190 - RNA, 21 nt, Human
aauuaaaauggaugccuugaa

SEQ ID NO: 3564191 - RNA, 14 nt, Human
aauuaaacggauua

SEQ ID NO: 3564192 - RNA, 17 nt, Human
aauuaaacggauuauuu

SEQ ID NO: 3564193 - RNA, 21 nt, Human
aauuaaacggauuauuuuuuc

SEQ ID NO: 3564194 - RNA, 14 nt, Human
aauuaaacuuuuaa

SEQ ID NO: 3564195 - RNA, 14 nt, Human
aauuaaagaaaaua

SEQ ID NO: 3564196 - RNA, 17 nt, Human
aauuaaagaaaauaaaa

SEQ ID NO: 3564197 - RNA, 20 nt, Human
aauuaaaguguccauugaca

SEQ ID NO: 3564198 - RNA, 21 nt, Human
aauuaaaguguccauugacau

SEQ ID NO: 3564199 - RNA, 14 nt, Human
aauuaacauauaau

SEQ ID NO: 3564200 - RNA, 15 nt, Human
aauuaacauauaaua

SEQ ID NO: 3564201 - RNA, 18 nt, Human
aauuaacauguuaaacca

SEQ ID NO: 3564202 - RNA, 20 nt, Human
aauuaacauguuaaaccaug

SEQ ID NO: 3564203 - RNA, 17 nt, Human
aauuaaccaaaaaaguu

SEQ ID NO: 3564204 - RNA, 15 nt, Human
aauuaaccuggugcu

SEQ ID NO: 3564205 - RNA, 16 nt, Human
aauuaaccuggugcug

SEQ ID NO: 3564206 - RNA, 17 nt, Human
aauuaacuuacuuccaa

SEQ ID NO: 3564207 - RNA, 11 nt, Human
aauuaacuuga

SEQ ID NO: 3564208 - RNA, 11 nt, Human
aauuaacuuuu

SEQ ID NO: 3564209 - RNA, 20 nt, Human
aauuaagaaaggauaaaguu

SEQ ID NO: 3564210 - RNA, 21 nt, Human
aauuaagaaaggauaaaguug

SEQ ID NO: 3564211 - RNA, 15 nt, Human
aauuaagaagaaaau

SEQ ID NO: 3564212 - RNA, 16 nt, Human
aauuaagaaggcaaaa

SEQ ID NO: 3564213 - RNA, 23 nt, Human
aauuaagaaggcaaaaauguaaa

SEQ ID NO: 3564214 - RNA, 21 nt, Human
aauuaagaauauguuuccuug

SEQ ID NO: 3564215 - RNA, 23 nt, Human
aauuaagcaaauguuaaaaguuu

SEQ ID NO: 3564216 - RNA, 22 nt, Human
aauuaagcccuaagguccuaag

SEQ ID NO: 3564217 - RNA, 22 nt, Human
aauuaaggauuuuaugcuuuaa

SEQ ID NO: 3564218 - RNA, 15 nt, Human
aauuaagguguuuga

SEQ ID NO: 3564219 - RNA, 17 nt, Human
aauuaagguguuugaaa

SEQ ID NO: 3564220 - RNA, 18 nt, Human
aauuaagguguuugaaaa

SEQ ID NO: 3564221 - RNA, 16 nt, Human
aauuaaguacuaugua

SEQ ID NO: 3564222 - RNA, 17 nt, Human
aauuaaguacuauguau

SEQ ID NO: 3564223 - RNA, 14 nt, Human
aauuaaguaucuga

SEQ ID NO: 3564224 - RNA, 22 nt, Human
aauuaaguccuacuuuuaaaga

SEQ ID NO: 3564225 - RNA, 14 nt, Human
aauuaaguuaucuu

SEQ ID NO: 3564226 - RNA, 14 nt, Human
aauuaauagcuuuu

SEQ ID NO: 3564227 - RNA, 19 nt, Human
aauuaauaucccuacaugu

SEQ ID NO: 3564228 - RNA, 21 nt, Human
aauuaauaucccuacauguau

SEQ ID NO: 3564229 - RNA, 13 nt, Human
aauuaauaucuuu

SEQ ID NO: 3564230 - RNA, 22 nt, Human
aauuaaucugggccagaauuuc

SEQ ID NO: 3564231 - RNA, 21 nt, Human
aauuaaugucaguauuucaac

SEQ ID NO: 3564232 - RNA, 23 nt, Human
aauuaauuccuguuugucuacau

SEQ ID NO: 3564233 - RNA, 17 nt, Human
aauuaauuccuucagca

SEQ ID NO: 3564234 - RNA, 22 nt, Human
aauuaauugugugaacuuggaa

SEQ ID NO: 3564235 - RNA, 12 nt, Human
aauuaauuucag

SEQ ID NO: 3564236 - RNA, 21 nt, Human
aauuaauuugauuaacaaaua

SEQ ID NO: 3564237 - RNA, 13 nt, Human
aauuaauuuggag

SEQ ID NO: 3564238 - RNA, 18 nt, Human
aauuaauuuuuuuauugu

SEQ ID NO: 3564239 - RNA, 18 nt, Human
aauuacaacggagucaaa

SEQ ID NO: 3564240 - RNA, 14 nt, Human
aauuacaacuaagu

SEQ ID NO: 3564241 - RNA, 23 nt, Human
aauuacaauugucauuuauaaaa

SEQ ID NO: 3564242 - RNA, 19 nt, Human
aauuacaguccaaaauacu

SEQ ID NO: 3564243 - RNA, 11 nt, Human
aauuacaguuu

SEQ ID NO: 3564244 - RNA, 17 nt, Human
aauuacauuuguaauuu

SEQ ID NO: 3564245 - RNA, 18 nt, Human
aauuacauuuguaauuua

SEQ ID NO: 3564246 - RNA, 19 nt, Human
aauuacauuuguaauuuaa

SEQ ID NO: 3564247 - RNA, 14 nt, Human
aauuacauuuguau

SEQ ID NO: 3564248 - RNA, 15 nt, Human
aauuaccaaccuguu

SEQ ID NO: 3564249 - RNA, 16 nt, Human
aauuaccagaaagaua

SEQ ID NO: 3564250 - RNA, 23 nt, Human
aauuaccaguaaaguguaacaua

SEQ ID NO: 3564251 - RNA, 15 nt, Human
aauuacgauaaggaa

SEQ ID NO: 3564252 - RNA, 13 nt, Human
aauuacuaacuuc

SEQ ID NO: 3564253 - RNA, 13 nt, Human
aauuacuaauuuu

SEQ ID NO: 3564254 - RNA, 15 nt, Human
aauuacuaauuuuac

SEQ ID NO: 3564255 - RNA, 15 nt, Human
aauuacuacaaaauu

SEQ ID NO: 3564256 - RNA, 16 nt, Human
aauuacuacaaaauuu

SEQ ID NO: 3564257 - RNA, 17 nt, Human
aauuacuauagcaaagu

SEQ ID NO: 3564258 - RNA, 13 nt, Human
aauuacucaggaa

SEQ ID NO: 3564259 - RNA, 13 nt, Human
aauuacuuaguau

SEQ ID NO: 3564260 - RNA, 22 nt, Human
aauuacuuaucauccacauugu

SEQ ID NO: 3564261 - RNA, 23 nt, Human
aauuacuuuuuuccaauuuuaga

SEQ ID NO: 3564262 - RNA, 20 nt, Human
aauuagaaaaaaauuacuaa

SEQ ID NO: 3564263 - RNA, 13 nt, Human
aagugaagacugg

SEQ ID NO: 3564264 - RNA, 10 nt, Human
aagugaaggu

SEQ ID NO: 3564265 - RNA, 14 nt, Human
aagugaagugauac

SEQ ID NO: 3564266 - RNA, 15 nt, Human
aagugaauaaaaauu

SEQ ID NO: 3564267 - RNA, 16 nt, Human
aagugaauaaaaauua

SEQ ID NO: 3564268 - RNA, 12 nt, Human
aagugaauaaac

SEQ ID NO: 3564269 - RNA, 15 nt, Human
aagugaauaaacuuc

SEQ ID NO: 3564270 - RNA, 20 nt, Human
aagugaauaaacuucagcac

SEQ ID NO: 3564271 - RNA, 16 nt, Human
aagugaaugaaagauu

SEQ ID NO: 3564272 - RNA, 14 nt, Human
aagugaauugaagu

SEQ ID NO: 3564273 - RNA, 16 nt, Human
aagugaauuugaauga

SEQ ID NO: 3564274 - RNA, 19 nt, Human
aagugaauuugaaugaaaa

SEQ ID NO: 3564275 - RNA, 15 nt, Human
aagugaauuugccug

SEQ ID NO: 3564276 - RNA, 22 nt, Human
aagugacagggaagcuacaggu

SEQ ID NO: 3564277 - RNA, 18 nt, Human
aagugaccaucauuucac

SEQ ID NO: 3564278 - RNA, 20 nt, Human
aagugaccgcaccucacacu

SEQ ID NO: 3564279 - RNA, 19 nt, Human
aagugacuguucaagagca

SEQ ID NO: 3564280 - RNA, 14 nt, Human
aagugacuucacag

SEQ ID NO: 3564281 - RNA, 17 nt, Human
aagugagagagacaaga

SEQ ID NO: 3564282 - RNA, 14 nt, Human
aagugagagcuggg

SEQ ID NO: 3564283 - RNA, 18 nt, Human
aagugaggccacugaaga

SEQ ID NO: 3564284 - RNA, 21 nt, Human
aagugaggccacugaagagga

SEQ ID NO: 3564285 - RNA, 19 nt, Human
aagugagggcucacucagc

SEQ ID NO: 3564286 - RNA, 18 nt, Human
aagugaguguuucuauga

SEQ ID NO: 3564287 - RNA, 23 nt, Human
aagugauccucccaccucagccu

SEQ ID NO: 3564288 - RNA, 13 nt, Human
aagugaugacaua

SEQ ID NO: 3564289 - RNA, 18 nt, Human
aagugaugggcuuucucu

SEQ ID NO: 3564290 - RNA, 21 nt, Human
aagugauuaaacgugcagacu

SEQ ID NO: 3564291 - RNA, 17 nt, Human
aagugauucucaugccu

SEQ ID NO: 3564292 - RNA, 20 nt, Human
aagugauucucaugccucag

SEQ ID NO: 3564293 - RNA, 21 nt, Human
aagugauucucaugccucagc

SEQ ID NO: 3564294 - RNA, 15 nt, Human
aagugauucuccugc

SEQ ID NO: 3564295 - RNA, 18 nt, Human
aagugauuguaugaauuu

SEQ ID NO: 3564296 - RNA, 18 nt, Human
aagugcaagauggggagu

SEQ ID NO: 3564297 - RNA, 20 nt, Human
aagugcacacagaaauauau

SEQ ID NO: 3564298 - RNA, 23 nt, Human
aagugcacacagaaauauauaua

SEQ ID NO: 3564299 - RNA, 16 nt, Human
aagugcacuuucuaau

SEQ ID NO: 3564300 - RNA, 13 nt, Human
aagugcaggcugg

SEQ ID NO: 3564301 - RNA, 14 nt, Human
aagugcaguucuua

SEQ ID NO: 3564302 - RNA, 14 nt, Human
aagugcauuucuga

SEQ ID NO: 3564303 - RNA, 14 nt, Human
aagugcauuuuugu

SEQ ID NO: 3564304 - RNA, 21 nt, Human
aagugccacucauuccuguag

SEQ ID NO: 3564305 - RNA, 23 nt, Human
aagugccacugcccgagcuggug

SEQ ID NO: 3564306 - RNA, 21 nt, Human
aagugccagucuugugucugc

SEQ ID NO: 3564307 - RNA, 16 nt, Human
aagugccauuaacaaa

SEQ ID NO: 3564308 - RNA, 17 nt, Human
aagugccauuaacaaau

SEQ ID NO: 3564309 - RNA, 12 nt, Human
aagugccccugc

SEQ ID NO: 3564310 - RNA, 13 nt, Human
aagugccccugcu

SEQ ID NO: 3564311 - RNA, 22 nt, Human
aagugccccugcugccucccca

SEQ ID NO: 3564312 - RNA, 12 nt, Human
aagugcccucca

SEQ ID NO: 3564313 - RNA, 13 nt, Human
aagugcccucucc

SEQ ID NO: 3564314 - RNA, 23 nt, Human
aagugcccucucccacccucuuc

SEQ ID NO: 3564315 - RNA, 19 nt, Human
aagugccgcaaauuguacc

SEQ ID NO: 3564316 - RNA, 21 nt, Human
aagugccucaagaggaaugaa

SEQ ID NO: 3564317 - RNA, 23 nt, Human
aagugccucacauuuuuuucuac

SEQ ID NO: 3564318 - RNA, 22 nt, Human
aagugcguccacgagcuguuua

SEQ ID NO: 3564319 - RNA, 16 nt, Human
aagugcgugccgugug

SEQ ID NO: 3564320 - RNA, 15 nt, Human
aagugcguguguaga

SEQ ID NO: 3564321 - RNA, 16 nt, Human
aagugcguguguagag

SEQ ID NO: 3564322 - RNA, 22 nt, Human
aagugcguguguagaguuaaga

SEQ ID NO: 3564323 - RNA, 23 nt, Human
aagugcguguguagaguuaagaa

SEQ ID NO: 3564324 - RNA, 16 nt, Human
aauuagaaaauauucu

SEQ ID NO: 3564325 - RNA, 18 nt, Human
aauuagaacccuugcaca

SEQ ID NO: 3564326 - RNA, 14 nt, Human
aauuagaagacauu

SEQ ID NO: 3564327 - RNA, 15 nt, Human
aauuagaagacauuu

SEQ ID NO: 3564328 - RNA, 17 nt, Human
aauuagacacuuuggaa

SEQ ID NO: 3564329 - RNA, 15 nt, Human
aauuagacugugauu

SEQ ID NO: 3564330 - RNA, 20 nt, Human
aauuagacugugauucagaa

SEQ ID NO: 3564331 - RNA, 16 nt, Human
aauuagauccauuaau

SEQ ID NO: 3564332 - RNA, 14 nt, Human
aauuagaugcaugu

SEQ ID NO: 3564333 - RNA, 21 nt, Human
aauuagauuuuaaaacuucau

SEQ ID NO: 3564334 - RNA, 20 nt, Human
aauuagccuaagauauacuu

SEQ ID NO: 3564335 - RNA, 22 nt, Human
aauuagccuaagauauacuugu

SEQ ID NO: 3564336 - RNA, 22 nt, Human
aauuagcuuauguuaacugaca

SEQ ID NO: 3564337 - RNA, 22 nt, Human
aauuaggaaguguaacagcuga

SEQ ID NO: 3564338 - RNA, 19 nt, Human
aauuaggaggcucaacaau

SEQ ID NO: 3564339 - RNA, 20 nt, Human
aauuaggcaaggcuauguga

SEQ ID NO: 3564340 - RNA, 21 nt, Human
aauuaggcccccaucauccuc

SEQ ID NO: 3564341 - RNA, 19 nt, Human
aauuaggcuguaacuacuu

SEQ ID NO: 3564342 - RNA, 22 nt, Human
aauuaggcuguaacuacuuuau

SEQ ID NO: 3564343 - RNA, 19 nt, Human
aauuagggcucuaauuucc

SEQ ID NO: 3564344 - RNA, 20 nt, Human
aauuagggcucuaauuuccu

SEQ ID NO: 3564345 - RNA, 20 nt, Human
aauuagggguugcuaagaag

SEQ ID NO: 3564346 - RNA, 17 nt, Human
aauuaggguacauuuau

SEQ ID NO: 3564347 - RNA, 19 nt, Human
aauuaggguacauuuauaa

SEQ ID NO: 3564348 - RNA, 15 nt, Human
aauuagguugaaaca

SEQ ID NO: 3564349 - RNA, 22 nt, Human
aauuagguugaaacauaucucu

SEQ ID NO: 3564350 - RNA, 14 nt, Human
aauuccaugaaugu

SEQ ID NO: 3564351 - RNA, 22 nt, Human
aauucccuaucuuuuaguuuua

SEQ ID NO: 3564352 - RNA, 23 nt, Human
aauucccucucucugacucucaa

SEQ ID NO: 3564353 - RNA, 13 nt, Human
aauucccuggacc

SEQ ID NO: 3564354 - RNA, 13 nt, Human
aauuccuaacuuu

SEQ ID NO: 3564355 - RNA, 10 nt, Human
aauuccuaca

SEQ ID NO: 3564356 - RNA, 18 nt, Human
aauuccuacagcacuacu

SEQ ID NO: 3564357 - RNA, 16 nt, Human
aauuccuauugugauu

SEQ ID NO: 3564358 - RNA, 20 nt, Human
aauuccuauugugauuugac

SEQ ID NO: 3564359 - RNA, 22 nt, Human
aauuccuauugugauuugacug

SEQ ID NO: 3564360 - RNA, 21 nt, Human
aauuccucucacuaaacuuua

SEQ ID NO: 3564361 - RNA, 11 nt, Human
aauuccugggc

SEQ ID NO: 3564362 - RNA, 21 nt, Human
aauuccuguagcaucuucugg

SEQ ID NO: 3564363 - RNA, 21 nt, Human
aauuccuguuuuuauuauuaa

SEQ ID NO: 3564364 - RNA, 12 nt, Human
aauucuaaaaug

SEQ ID NO: 3564365 - RNA, 20 nt, Human
aauucuaaauaaaauauaau

SEQ ID NO: 3564366 - RNA, 17 nt, Human
aauucuaacccagguau

SEQ ID NO: 3564367 - RNA, 14 nt, Human
aauucuaacuuuuu

SEQ ID NO: 3564368 - RNA, 23 nt, Human
aauucuaggcaucccaggggacc

SEQ ID NO: 3564369 - RNA, 22 nt, Human
aauucuaucuuuuguuuccuuu

SEQ ID NO: 3564370 - RNA, 17 nt, Human
acaaaugggcgcccccc

SEQ ID NO: 3564371 - RNA, 17 nt, Human
acaaauguaaacauuuu

SEQ ID NO: 3564372 - RNA, 14 nt, Human
acaaaugucuauca

SEQ ID NO: 3564373 - RNA, 15 nt, Human
acaaaugugaagaug

SEQ ID NO: 3564374 - RNA, 16 nt, Human
acaaaugugaagaugc

SEQ ID NO: 3564375 - RNA, 18 nt, Human
acaaaugugaagaugcau

SEQ ID NO: 3564376 - RNA, 13 nt, Human
acaaauguuuugc

SEQ ID NO: 3564377 - RNA, 20 nt, Human
acaaauuagguuuuguacaa

SEQ ID NO: 3564378 - RNA, 22 nt, Human
acaaauuauguuacaucuguuu

SEQ ID NO: 3564379 - RNA, 12 nt, Human
acaaauucuguu

SEQ ID NO: 3564380 - RNA, 15 nt, Human
acaaauuuaaaacaa

SEQ ID NO: 3564381 - RNA, 19 nt, Human
acaaauuuacagagacaga

SEQ ID NO: 3564382 - RNA, 16 nt, Human
acaaauuuuuauuucu

SEQ ID NO: 3564383 - RNA, 14 nt, Human
acaaauuuuucugu

SEQ ID NO: 3564384 - RNA, 16 nt, Human
acaaauuuuucugugg

SEQ ID NO: 3564385 - RNA, 17 nt, Human
acaacaaaaagcuuccc

SEQ ID NO: 3564386 - RNA, 14 nt, Human
acaacacuguagua

SEQ ID NO: 3564387 - RNA, 13 nt, Human
acaacagauugga

SEQ ID NO: 3564388 - RNA, 23 nt, Human
acaacagauuggauuuuauguug

SEQ ID NO: 3564389 - RNA, 14 nt, Human
acaacagauuugug

SEQ ID NO: 3564390 - RNA, 18 nt, Human
acaacagauuugugaacu

SEQ ID NO: 3564391 - RNA, 22 nt, Human
acaacagcucgauccaaauugu

SEQ ID NO: 3564392 - RNA, 18 nt, Human
acaacagucuucauuuuu

SEQ ID NO: 3564393 - RNA, 17 nt, Human
acaacagugcuaaaaau

SEQ ID NO: 3564394 - RNA, 23 nt, Human
acaacaguuacauaauucacucu

SEQ ID NO: 3564395 - RNA, 16 nt, Human
acaacauccaaguggc

SEQ ID NO: 3564396 - RNA, 16 nt, Human
acaacauccauguccu

SEQ ID NO: 3564397 - RNA, 21 nt, Human
acaacaugaggccacuggaga

SEQ ID NO: 3564398 - RNA, 22 nt, Human
acaacauguauaauauuuuuaa

SEQ ID NO: 3564399 - RNA, 19 nt, Human
acaacauguuuaauaaaua

SEQ ID NO: 3564400 - RNA, 19 nt, Human
acaacauguuuccagcauu

SEQ ID NO: 3564401 - RNA, 17 nt, Human
acaacauuuacaacuca

SEQ ID NO: 3564402 - RNA, 15 nt, Human
acaacauuuugagaa

SEQ ID NO: 3564403 - RNA, 18 nt, Human
acaacauuuugagaacaa

SEQ ID NO: 3564404 - RNA, 21 nt, Human
acaaccaauuuacacugccau

SEQ ID NO: 3564405 - RNA, 21 nt, Human
acaaccaccuaaucaggcuga

SEQ ID NO: 3564406 - RNA, 16 nt, Human
acaaccauauuuagca

SEQ ID NO: 3564407 - RNA, 14 nt, Human
acaaccaugucauu

SEQ ID NO: 3564408 - RNA, 13 nt, Human
acaaccauuaaag

SEQ ID NO: 3564409 - RNA, 14 nt, Human
acaaccauuccaga

SEQ ID NO: 3564410 - RNA, 17 nt, Human
acaacccuguuuuauac

SEQ ID NO: 3564411 - RNA, 18 nt, Human
acaaccucccucuuguuu

SEQ ID NO: 3564412 - RNA, 18 nt, Human
acaaccuucuguggcuca

SEQ ID NO: 3564413 - RNA, 22 nt, Human
acaacgagccuuuucacccuuc

SEQ ID NO: 3564414 - RNA, 22 nt, Human
acaacgugcaacugacacuccc

SEQ ID NO: 3564415 - RNA, 13 nt, Human
acaacgugcauug

SEQ ID NO: 3564416 - RNA, 18 nt, Human
acaacgugcucuuuguuu

SEQ ID NO: 3564417 - RNA, 15 nt, Human
acaacuacagaaaaa

SEQ ID NO: 3564418 - RNA, 19 nt, Human
acaacuacagaaaaaccag

SEQ ID NO: 3564419 - RNA, 18 nt, Human
acaacuauccugacuucu

SEQ ID NO: 3564420 - RNA, 17 nt, Human
acaacuauggaucagaa

SEQ ID NO: 3564421 - RNA, 13 nt, Human
acaacuauuuuca

SEQ ID NO: 3564422 - RNA, 20 nt, Human
acaacuauuuucagauguga

SEQ ID NO: 3564423 - RNA, 19 nt, Human
acaacugaguccuuaaaca

SEQ ID NO: 3564424 - RNA, 21 nt, Human
acaacugccucgaaacacaga

SEQ ID NO: 3564425 - RNA, 19 nt, Human
acaacuggcaggcaggcuc

SEQ ID NO: 3564426 - RNA, 17 nt, Human
acaacugucuaacuuua

SEQ ID NO: 3564427 - RNA, 13 nt, Human
acaacugugacug

SEQ ID NO: 3564428 - RNA, 16 nt, Human
acaacuuaaaaagucu

SEQ ID NO: 3564429 - RNA, 13 nt, Human
acaacuuaaguug

SEQ ID NO: 3564430 - RNA, 17 nt, Human
acaacuucaagugcaug

SEQ ID NO: 3564431 - RNA, 22 nt, Human
acaacuuucacuauaaugugaa

SEQ ID NO: 3564432 - RNA, 20 nt, Human
acaacuuuuaaccaaacaau

SEQ ID NO: 3564433 - RNA, 12 nt, Human
acaagaaaacau

SEQ ID NO: 3564434 - RNA, 12 nt, Human
acaagaaaggag

SEQ ID NO: 3564435 - RNA, 19 nt, Human
acaagaaagggccaggaga

SEQ ID NO: 3564436 - RNA, 17 nt, Human
acaagaaauaauagaaa

SEQ ID NO: 3564437 - RNA, 15 nt, Human
acaagaaaucccugu

SEQ ID NO: 3564438 - RNA, 23 nt, Human
acaagaaaucccuguuuaauauu

SEQ ID NO: 3564439 - RNA, 22 nt, Human
acaagaaaugaaagcagggacu

SEQ ID NO: 3564440 - RNA, 19 nt, Human
acaagaacacacacauaua

SEQ ID NO: 3564441 - RNA, 13 nt, Human
acaagaagaccag

SEQ ID NO: 3564442 - RNA, 13 nt, Human
acaagaagaugaa

SEQ ID NO: 3564443 - RNA, 22 nt, Human
acaagaauacuacuuaugaaau

SEQ ID NO: 3564444 - RNA, 23 nt, Human
acaagaaugaagguuuuuguaaa

SEQ ID NO: 3564445 - RNA, 13 nt, Human
acaagacacagug

SEQ ID NO: 3564446 - RNA, 15 nt, Human
acaagacagaagcug

SEQ ID NO: 3564447 - RNA, 19 nt, Human
acaagaccaccacuucgaa

SEQ ID NO: 3564448 - RNA, 20 nt, Human
acaagacuuuccccauacuc

SEQ ID NO: 3564449 - RNA, 16 nt, Human
acaagagcgaaacucc

SEQ ID NO: 3564450 - RNA, 12 nt, Human
acaagagugauu

SEQ ID NO: 3564451 - RNA, 15 nt, Human
acaagauauuguaca

SEQ ID NO: 3564452 - RNA, 22 nt, Human
acaagauauuguacauaaaaga

SEQ ID NO: 3564453 - RNA, 13 nt, Human
acaagaucuuuca

SEQ ID NO: 3564454 - RNA, 14 nt, Human
acaagaucuuucag

SEQ ID NO: 3564455 - RNA, 15 nt, Human
acaagaucuuucagg

SEQ ID NO: 3564456 - RNA, 21 nt, Human
acaagauucccagagacagga

SEQ ID NO: 3564457 - RNA, 17 nt, Human
acaagauugguguuuuu

SEQ ID NO: 3564458 - RNA, 19 nt, Human
acaagauugguguuuuuuu

SEQ ID NO: 3564459 - RNA, 23 nt, Human
acaagauugguguuuuuuucuau

SEQ ID NO: 3564460 - RNA, 14 nt, Human
acaagauuuagaaa

SEQ ID NO: 3564461 - RNA, 18 nt, Human
acaagauuuccuugugca

SEQ ID NO: 3564462 - RNA, 22 nt, Human
acaagauuuuuuaauuguuuaa

SEQ ID NO: 3564463 - RNA, 15 nt, Human
acaagcaaacccaga

SEQ ID NO: 3564464 - RNA, 16 nt, Human
acaagcaaacccagac

SEQ ID NO: 3564465 - RNA, 13 nt, Human
acaagcaagcucc

SEQ ID NO: 3564466 - RNA, 15 nt, Human
acaagcaagcuccca

SEQ ID NO: 3564467 - RNA, 16 nt, Human
acaagcaaguucugag

SEQ ID NO: 3564468 - RNA, 11 nt, Human
acaagcagagg

SEQ ID NO: 3564469 - RNA, 20 nt, Human
acaagcagagugcacagcug

SEQ ID NO: 3564470 - RNA, 15 nt, Human
acaagcauauaaaau

SEQ ID NO: 3564471 - RNA, 19 nt, Human
acaagcauauaaaauggca

SEQ ID NO: 3564472 - RNA, 23 nt, Human
acaagcauggucccacaucccug

SEQ ID NO: 3564473 - RNA, 13 nt, Human
acaagccacagaa

SEQ ID NO: 3564474 - RNA, 18 nt, Human
acaagccacagaagccag

SEQ ID NO: 3564475 - RNA, 13 nt, Human
acaagccagcugg

SEQ ID NO: 3564476 - RNA, 15 nt, Human
acaagccagggugug

SEQ ID NO: 3564477 - RNA, 13 nt, Human
acaagcccacagc

SEQ ID NO: 3564478 - RNA, 15 nt, Human
acaagcccacagcac

SEQ ID NO: 3564479 - RNA, 16 nt, Human
acaagcccacagcaca

SEQ ID NO: 3564480 - RNA, 14 nt, Human
acaagccccaggca

SEQ ID NO: 3564481 - RNA, 17 nt, Human
acaagccccaggcaggc

SEQ ID NO: 3564482 - RNA, 14 nt, Human
acaagcccccccuu

SEQ ID NO: 3564483 - RNA, 22 nt, Human
acaagccugagggaaaggccag

SEQ ID NO: 3564484 - RNA, 23 nt, Human
acaagccugagggaaaggccagc

SEQ ID NO: 3564485 - RNA, 18 nt, Human
acaagcgugagccacugc

SEQ ID NO: 3564486 - RNA, 22 nt, Human
acaagcuaaaauuagaugaacu

SEQ ID NO: 3564487 - RNA, 13 nt, Human
acaagcuccaagc

SEQ ID NO: 3564488 - RNA, 16 nt, Human
acaagcuccaagcucc

SEQ ID NO: 3564489 - RNA, 18 nt, Human
acaagcuccauuuaaaca

SEQ ID NO: 3564490 - RNA, 13 nt, Human
acaagcugcaccc

SEQ ID NO: 3564491 - RNA, 23 nt, Human
acaagcugcacccucaggcaggu

SEQ ID NO: 3564492 - RNA, 16 nt, Human
acaagcuggaagcaca

SEQ ID NO: 3564493 - RNA, 18 nt, Human
acaagcuggaagcacaug

SEQ ID NO: 3564494 - RNA, 13 nt, Human
acaagcuggcuua

SEQ ID NO: 3564495 - RNA, 19 nt, Human
acaagcuucaguaaguuau

SEQ ID NO: 3564496 - RNA, 13 nt, Human
acaagcuucugag

SEQ ID NO: 3564497 - RNA, 15 nt, Human
acaagcuucugagac

SEQ ID NO: 3564498 - RNA, 22 nt, Human
acaaggaaauacccuucuuuua

SEQ ID NO: 3564499 - RNA, 14 nt, Human
acaaggaagaaauu

SEQ ID NO: 3564500 - RNA, 14 nt, Human
acaaggacacgcgc

SEQ ID NO: 3564501 - RNA, 21 nt, Human
acaaggacagccccuccucca

SEQ ID NO: 3564502 - RNA, 22 nt, Human
acaaggacagccccuccuccau

SEQ ID NO: 3564503 - RNA, 19 nt, Human
acaaggacuaggguccugg

SEQ ID NO: 3564504 - RNA, 16 nt, Human
acaaggauugaaaauu

SEQ ID NO: 3564505 - RNA, 14 nt, Human
acaaggcaaggcug

SEQ ID NO: 3564506 - RNA, 16 nt, Human
acaaggcaaggcuguc

SEQ ID NO: 3564507 - RNA, 16 nt, Human
acaaggcagcaaggcc

SEQ ID NO: 3564508 - RNA, 17 nt, Human
acaaggcauucaagugu

SEQ ID NO: 3564509 - RNA, 18 nt, Human
acaaggccaucugggcuc

SEQ ID NO: 3564510 - RNA, 20 nt, Human
acacaggcaacugaggcaga

SEQ ID NO: 3564511 - RNA, 12 nt, Human
acacaggcagcu

SEQ ID NO: 3564512 - RNA, 16 nt, Human
acacaggccacccugu

SEQ ID NO: 3564513 - RNA, 24 nt, Human
acacaggcccggcuccaggcuccu

SEQ ID NO: 3564514 - RNA, 12 nt, Human
acacaggcuggc

SEQ ID NO: 3564515 - RNA, 15 nt, Human
acacagggacuugaa

SEQ ID NO: 3564516 - RNA, 21 nt, Human
acacaggggaggugauagcau

SEQ ID NO: 3564517 - RNA, 22 nt, Human
acacaggggcuugacuuuuuca

SEQ ID NO: 3564518 - RNA, 14 nt, Human
acacaggucuuucc

SEQ ID NO: 3564519 - RNA, 16 nt, Human
acacaggucuuuccua

SEQ ID NO: 3564520 - RNA, 17 nt, Human
acacagguggugucacu

SEQ ID NO: 3564521 - RNA, 19 nt, Human
acacagguggugucacugu

SEQ ID NO: 3564522 - RNA, 20 nt, Human
acacagguggugucacuguc

SEQ ID NO: 3564523 - RNA, 19 nt, Human
acacaguaccauuuaaugg

SEQ ID NO: 3564524 - RNA, 18 nt, Human
acacaguauuacuucugc

SEQ ID NO: 3564525 - RNA, 12 nt, Human
acacaguauuuu

SEQ ID NO: 3564526 - RNA, 15 nt, Human
acacagucaaaauaa

SEQ ID NO: 3564527 - RNA, 19 nt, Human
acacagucaaaauaauucu

SEQ ID NO: 3564528 - RNA, 16 nt, Human
acacagucugcaagau

SEQ ID NO: 3564529 - RNA, 13 nt, Human
acacagugagucg

SEQ ID NO: 3564530 - RNA, 16 nt, Human
acacagugccuucaau

SEQ ID NO: 3564531 - RNA, 22 nt, Human
acacagugcugaccagacagcc

SEQ ID NO: 3564532 - RNA, 20 nt, Human
acacagugggugguggaucu

SEQ ID NO: 3564533 - RNA, 20 nt, Human
acacagugugaauaaagugc

SEQ ID NO: 3564534 - RNA, 15 nt, Human
acacaguugcuguca

SEQ ID NO: 3564535 - RNA, 22 nt, Human
acacaguugcugucauaagaau

SEQ ID NO: 3564536 - RNA, 23 nt, Human
acacaguuuugaccuaacauacc

SEQ ID NO: 3564537 - RNA, 17 nt, Human
acacauaauuaaagugu

SEQ ID NO: 3564538 - RNA, 20 nt, Human
acacauaauuaaagugucca

SEQ ID NO: 3564539 - RNA, 13 nt, Human
acacauacaguuu

SEQ ID NO: 3564540 - RNA, 22 nt, Human
acacauagauuaauggcacuga

SEQ ID NO: 3564541 - RNA, 22 nt, Human
acacauagauucaccuguaaaa

SEQ ID NO: 3564542 - RNA, 23 nt, Human
acacauauaaauugucuuaaugg

SEQ ID NO: 3564543 - RNA, 23 nt, Human
acacauauaccuauaaugugugu

SEQ ID NO: 3564544 - RNA, 15 nt, Human
acacaucagcuugcc

SEQ ID NO: 3564545 - RNA, 16 nt, Human
acacaucaucuguaag

SEQ ID NO: 3564546 - RNA, 17 nt, Human
acacauccagacaucau

SEQ ID NO: 3564547 - RNA, 20 nt, Human
acacauccagacaucaugaa

SEQ ID NO: 3564548 - RNA, 17 nt, Human
acacaucccuaaugugu

SEQ ID NO: 3564549 - RNA, 16 nt, Human
acacauccgccuuuug

SEQ ID NO: 3564550 - RNA, 12 nt, Human
acacaucuccuc

SEQ ID NO: 3564551 - RNA, 18 nt, Human
acacaugcaaggucauuu

SEQ ID NO: 3564552 - RNA, 20 nt, Human
acacaugcaaggucauuuuu

SEQ ID NO: 3564553 - RNA, 15 nt, Human
acacaugcacacaca

SEQ ID NO: 3564554 - RNA, 16 nt, Human
acacaugcauacacac

SEQ ID NO: 3564555 - RNA, 16 nt, Human
acacaugcuaggaugc

SEQ ID NO: 3564556 - RNA, 18 nt, Human
acacaugcugaacaucac

SEQ ID NO: 3564557 - RNA, 21 nt, Human
acacaugcuucccuuuccuga

SEQ ID NO: 3564558 - RNA, 23 nt, Human
acacaugcuucccuuuccugagu

SEQ ID NO: 3564559 - RNA, 15 nt, Human
acacauuaagcaaau

SEQ ID NO: 3564560 - RNA, 22 nt, Human
acacauuacaaaguuaaaauug

SEQ ID NO: 3564561 - RNA, 23 nt, Human
acacauuagauuuuauuuuacua

SEQ ID NO: 3564562 - RNA, 16 nt, Human
acacauuaggaaaagu

SEQ ID NO: 3564563 - RNA, 13 nt, Human
acacauuaucuuc

SEQ ID NO: 3564564 - RNA, 15 nt, Human
acacauuaucuucug

SEQ ID NO: 3564565 - RNA, 22 nt, Human
acacauuguuauuuucagugau

SEQ ID NO: 3564566 - RNA, 17 nt, Human
acacauuugcuuuuugu

SEQ ID NO: 3564567 - RNA, 11 nt, Human
acacauuugua

SEQ ID NO: 3564568 - RNA, 15 nt, Human
acacauuuguacaga

SEQ ID NO: 3564569 - RNA, 13 nt, Human
acacauuuuauuu

SEQ ID NO: 3564570 - RNA, 18 nt, Human
acacauuuuuuaaaugca

SEQ ID NO: 3564571 - RNA, 13 nt, Human
acacauuuuuuug

SEQ ID NO: 3564572 - RNA, 17 nt, Human
acaccaacauaaaaaug

SEQ ID NO: 3564573 - RNA, 16 nt, Human
acaccaagaugucugu

SEQ ID NO: 3564574 - RNA, 18 nt, Human
acaccaagcacagcagcc

SEQ ID NO: 3564575 - RNA, 19 nt, Human
acaccaagcacagcagccu

SEQ ID NO: 3564576 - RNA, 13 nt, Human
acaccaagcagca

SEQ ID NO: 3564577 - RNA, 16 nt, Human
acaccaagcugugcca

SEQ ID NO: 3564578 - RNA, 18 nt, Human
acaccaagcugugccacc

SEQ ID NO: 3564579 - RNA, 21 nt, Human
acaccaagcugugccacccug

SEQ ID NO: 3564580 - RNA, 15 nt, Human
acaccaauauucaua

SEQ ID NO: 3564581 - RNA, 23 nt, Human
acaccaaucuuacuuuguaaauu

SEQ ID NO: 3564582 - RNA, 15 nt, Human
acaccacagacacac

SEQ ID NO: 3564583 - RNA, 15 nt, Human
acaccacuacauucu

SEQ ID NO: 3564584 - RNA, 13 nt, Human
acaccacucuggc

SEQ ID NO: 3564585 - RNA, 14 nt, Human
acaccagacagaca

SEQ ID NO: 3564586 - RNA, 13 nt, Human
acaccagagcaga

SEQ ID NO: 3564587 - RNA, 17 nt, Human
acaccagagcagaugca

SEQ ID NO: 3564588 - RNA, 18 nt, Human
acaccagagcagaugcag

SEQ ID NO: 3564589 - RNA, 22 nt, Human
acaccagagcagaugcagagag

SEQ ID NO: 3564590 - RNA, 13 nt, Human
acaccagagccca

SEQ ID NO: 3564591 - RNA, 16 nt, Human
acaccagcauuccuuu

SEQ ID NO: 3564592 - RNA, 12 nt, Human
acaccagccagg

SEQ ID NO: 3564593 - RNA, 14 nt, Human
acaccagccaggcu

SEQ ID NO: 3564594 - RNA, 22 nt, Human
acaccagccccugccccagccc

SEQ ID NO: 3564595 - RNA, 14 nt, Human
acaccaggcugugg

SEQ ID NO: 3564596 - RNA, 22 nt, Human
acaccauaagcuacugccaucc

SEQ ID NO: 3564597 - RNA, 23 nt, Human
acaccauaagcuacugccauccu

SEQ ID NO: 3564598 - RNA, 17 nt, Human
acaccauagguagaaug

SEQ ID NO: 3564599 - RNA, 19 nt, Human
acaccaucgcuggccccuu

SEQ ID NO: 3564600 - RNA, 14 nt, Human
acaccaucuuuugu

SEQ ID NO: 3564601 - RNA, 23 nt, Human
acaccauguuugagcucagaccc

SEQ ID NO: 3564602 - RNA, 15 nt, Human
acaccauuaccaaaa

SEQ ID NO: 3564603 - RNA, 21 nt, Human
acaccauuaccaaaauaauaa

SEQ ID NO: 3564604 - RNA, 21 nt, Human
acaccauuaugugcgcugaua

SEQ ID NO: 3564605 - RNA, 13 nt, Human
acacccacaggca

SEQ ID NO: 3564606 - RNA, 17 nt, Human
acacccaccguccgccc

SEQ ID NO: 3564607 - RNA, 17 nt, Human
acacccacucagcuccg

SEQ ID NO: 3564608 - RNA, 12 nt, Human
acacccagcccc

SEQ ID NO: 3564609 - RNA, 12 nt, Human
acacccagccuc

SEQ ID NO: 3564610 - RNA, 14 nt, Human
acacccaugaaaga

SEQ ID NO: 3564611 - RNA, 13 nt, Human
acaccccaccugc

SEQ ID NO: 3564612 - RNA, 21 nt, Human
acaccccaccugcgcuucacu

SEQ ID NO: 3564613 - RNA, 21 nt, Human
acaccccagacgaugucuuca

SEQ ID NO: 3564614 - RNA, 21 nt, Human
acaccccucaguugugcagcu

SEQ ID NO: 3564615 - RNA, 17 nt, Human
acaccccuuauccagga

SEQ ID NO: 3564616 - RNA, 20 nt, Human
acaccccuuauccaggacuc

SEQ ID NO: 3564617 - RNA, 21 nt, Human
acacccgugagcgccugugca

SEQ ID NO: 3564618 - RNA, 13 nt, Human
acacccucacacu

SEQ ID NO: 3564619 - RNA, 16 nt, Human
acacccucacacuggg

SEQ ID NO: 3564620 - RNA, 19 nt, Human
acacccucacucugccagg

SEQ ID NO: 3564621 - RNA, 14 nt, Human
acacccuccagaga

SEQ ID NO: 3564622 - RNA, 13 nt, Human
acacccucccccg

SEQ ID NO: 3564623 - RNA, 14 nt, Human
acacccucccccgc

SEQ ID NO: 3564624 - RNA, 19 nt, Human
acacccucccccgccacuc

SEQ ID NO: 3564625 - RNA, 17 nt, Human
acacccucucccaggac

SEQ ID NO: 3564626 - RNA, 20 nt, Human
acacccugcaaggcccacag

SEQ ID NO: 3564627 - RNA, 22 nt, Human
acacccuguacuguucuguguc

SEQ ID NO: 3564628 - RNA, 12 nt, Human
acacccugugau

SEQ ID NO: 3564629 - RNA, 15 nt, Human
acacccuuagaaaau

SEQ ID NO: 3564630 - RNA, 11 nt, Human
acacccuuccu

SEQ ID NO: 3564631 - RNA, 16 nt, Human
acacccuuggacuuga

SEQ ID NO: 3564632 - RNA, 15 nt, Human
acaccgagggcgacc

SEQ ID NO: 3564633 - RNA, 22 nt, Human
acaccgccacauggcuuccucc

SEQ ID NO: 3564634 - RNA, 16 nt, Human
acaccgggcacucaga

SEQ ID NO: 3564635 - RNA, 14 nt, Human
acaccgggccugga

SEQ ID NO: 3564636 - RNA, 19 nt, Human
acaccguguaaaccaaagc

SEQ ID NO: 3564637 - RNA, 19 nt, Human
acaccuaaauaaccaaucu

SEQ ID NO: 3564638 - RNA, 21 nt, Human
acaccuacucuaucagagaaa

SEQ ID NO: 3564639 - RNA, 22 nt, Human
acaccuagccagcugucaaggg

SEQ ID NO: 3564640 - RNA, 22 nt, Human
acaccuagcuuuauucuucaga

SEQ ID NO: 3564641 - RNA, 18 nt, Human
acaccuauuaucccagcu

SEQ ID NO: 3564642 - RNA, 20 nt, Human
acaccuauuaucccagcugc

SEQ ID NO: 3564643 - RNA, 22 nt, Human
acaccuauuaucccagcugccu

SEQ ID NO: 3564644 - RNA, 15 nt, Human
acaccuauuuuagac

SEQ ID NO: 3564645 - RNA, 20 nt, Human
acaccucaacuaaauccaaa

SEQ ID NO: 3564646 - RNA, 17 nt, Human
acaccucacucugcuac

SEQ ID NO: 3564647 - RNA, 18 nt, Human
acaccucacucugcuacc

SEQ ID NO: 3564648 - RNA, 10 nt, Human
acaccucaga

SEQ ID NO: 3564649 - RNA, 20 nt, Human
acaccuccacaguucagugg

SEQ ID NO: 3564650 - RNA, 20 nt, Human
acaccucccacccccuguau

SEQ ID NO: 3564651 - RNA, 14 nt, Human
acaccuccucccac

SEQ ID NO: 3564652 - RNA, 15 nt, Human
acaccuccucccacu

SEQ ID NO: 3564653 - RNA, 20 nt, Human
acaccuccucccacugccca

SEQ ID NO: 3564654 - RNA, 11 nt, Human
acaccuccucu

SEQ ID NO: 3564655 - RNA, 18 nt, Human
acaccuccucucacuccc

SEQ ID NO: 3564656 - RNA, 18 nt, Human
acaccucguuagggaaga

SEQ ID NO: 3564657 - RNA, 14 nt, Human
acaccugaugugua

SEQ ID NO: 3564658 - RNA, 19 nt, Human
acaccugcaccucccccca

SEQ ID NO: 3564659 - RNA, 24 nt, Human
acaccugcaccuccccccacugca

SEQ ID NO: 3564660 - RNA, 19 nt, Human
accccaaagagccuggaga

SEQ ID NO: 3564661 - RNA, 15 nt, Human
accccaaagcuuucc

SEQ ID NO: 3564662 - RNA, 13 nt, Human
accccaaccugcu

SEQ ID NO: 3564663 - RNA, 16 nt, Human
accccaacgcacagga

SEQ ID NO: 3564664 - RNA, 15 nt, Human
accccaagacuccca

SEQ ID NO: 3564665 - RNA, 18 nt, Human
accccaagccagcccggc

SEQ ID NO: 3564666 - RNA, 13 nt, Human
accccaauccucc

SEQ ID NO: 3564667 - RNA, 20 nt, Human
accccacaccaggccguccu

SEQ ID NO: 3564668 - RNA, 21 nt, Human
accccacacuuguuccagcuc

SEQ ID NO: 3564669 - RNA, 18 nt, Human
accccacccacuucugca

SEQ ID NO: 3564670 - RNA, 13 nt, Human
accccacccucag

SEQ ID NO: 3564671 - RNA, 14 nt, Human
accccacccucagc

SEQ ID NO: 3564672 - RNA, 15 nt, Human
accccacccucccug

SEQ ID NO: 3564673 - RNA, 20 nt, Human
accccacccucccuggagug

SEQ ID NO: 3564674 - RNA, 19 nt, Human
accccacccuuccccuccu

SEQ ID NO: 3564675 - RNA, 15 nt, Human
accccacccuugccc

SEQ ID NO: 3564676 - RNA, 18 nt, Human
accccacccuugcccacc

SEQ ID NO: 3564677 - RNA, 20 nt, Human
accccacccuugcccacccc

SEQ ID NO: 3564678 - RNA, 13 nt, Human
accccaccugcag

SEQ ID NO: 3564679 - RNA, 16 nt, Human
accccacgccuuaucc

SEQ ID NO: 3564680 - RNA, 18 nt, Human
accccagacgaugucuuc

SEQ ID NO: 3564681 - RNA, 16 nt, Human
accccagagccacaca

SEQ ID NO: 3564682 - RNA, 14 nt, Human
accccagcucccua

SEQ ID NO: 3564683 - RNA, 17 nt, Human
accccagcucccuagga

SEQ ID NO: 3564684 - RNA, 23 nt, Human
accccagcucccuaggagaccaa

SEQ ID NO: 3564685 - RNA, 10 nt, Human
accccagcug

SEQ ID NO: 3564686 - RNA, 12 nt, Human
accccagcuggg

SEQ ID NO: 3564687 - RNA, 14 nt, Human
accccagcugggag

SEQ ID NO: 3564688 - RNA, 19 nt, Human
accccagcuggggccaggc

SEQ ID NO: 3564689 - RNA, 18 nt, Human
accccagcugugagccuu

SEQ ID NO: 3564690 - RNA, 20 nt, Human
accccaggacgccacucauu

SEQ ID NO: 3564691 - RNA, 16 nt, Human
accccaggcccacuca

SEQ ID NO: 3564692 - RNA, 23 nt, Human
accccaggcuggacaugcugacu

SEQ ID NO: 3564693 - RNA, 11 nt, Human
accccagggca

SEQ ID NO: 3564694 - RNA, 12 nt, Human
accccagggcac

SEQ ID NO: 3564695 - RNA, 18 nt, Human
accccagggcacaggagc

SEQ ID NO: 3564696 - RNA, 16 nt, Human
accccagggcagccag

SEQ ID NO: 3564697 - RNA, 14 nt, Human
accccagggccuga

SEQ ID NO: 3564698 - RNA, 22 nt, Human
accccagggcuguaacugccag

SEQ ID NO: 3564699 - RNA, 16 nt, Human
accccaguucugcucc

SEQ ID NO: 3564700 - RNA, 17 nt, Human
accccaguucugcuccu

SEQ ID NO: 3564701 - RNA, 20 nt, Human
accccaguucugcuccucuc

SEQ ID NO: 3564702 - RNA, 22 nt, Human
accccaguucugcuccucucca

SEQ ID NO: 3564703 - RNA, 15 nt, Human
accccaguuuuuuga

SEQ ID NO: 3564704 - RNA, 23 nt, Human
accccaucaccuacucacacagg

SEQ ID NO: 3564705 - RNA, 15 nt, Human
accccaucaucccuu

SEQ ID NO: 3564706 - RNA, 15 nt, Human
accccaucgccaacu

SEQ ID NO: 3564707 - RNA, 18 nt, Human
accccaucucuacaaaaa

SEQ ID NO: 3564708 - RNA, 16 nt, Human
accccaucugcccagg

SEQ ID NO: 3564709 - RNA, 18 nt, Human
accccaucugugaauaag

SEQ ID NO: 3564710 - RNA, 23 nt, Human
accccaugaccuuauccuuccuc

SEQ ID NO: 3564711 - RNA, 12 nt, Human
accccaugcugu

SEQ ID NO: 3564712 - RNA, 16 nt, Human
accccaugcuguugau

SEQ ID NO: 3564713 - RNA, 19 nt, Human
accccauggcugcacaguu

SEQ ID NO: 3564714 - RNA, 14 nt, Human
accccauucccgca

SEQ ID NO: 3564715 - RNA, 15 nt, Human
accccauuucucucc

SEQ ID NO: 3564716 - RNA, 13 nt, Human
acccccacacaca

SEQ ID NO: 3564717 - RNA, 12 nt, Human
acccccacccaa

SEQ ID NO: 3564718 - RNA, 19 nt, Human
acccccacccccagcucaa

SEQ ID NO: 3564719 - RNA, 13 nt, Human
acccccaccccuu

SEQ ID NO: 3564720 - RNA, 16 nt, Human
acccccagcaacccuc

SEQ ID NO: 3564721 - RNA, 18 nt, Human
acccccagcacccgggcu

SEQ ID NO: 3564722 - RNA, 21 nt, Human
acccccagcacccgggcucag

SEQ ID NO: 3564723 - RNA, 22 nt, Human
acccccagcacccgggcucagg

SEQ ID NO: 3564724 - RNA, 14 nt, Human
acccccagccccga

SEQ ID NO: 3564725 - RNA, 22 nt, Human
acccccagccccgacuccagcc

SEQ ID NO: 3564726 - RNA, 17 nt, Human
acccccagccugggccu

SEQ ID NO: 3564727 - RNA, 12 nt, Human
acccccagcucc

SEQ ID NO: 3564728 - RNA, 22 nt, Human
acccccagcuuugcccaacacc

SEQ ID NO: 3564729 - RNA, 12 nt, Human
acccccaggaca

SEQ ID NO: 3564730 - RNA, 15 nt, Human
acccccaggaccaga

SEQ ID NO: 3564731 - RNA, 21 nt, Human
acccccaggccucagucuccc

SEQ ID NO: 3564732 - RNA, 16 nt, Human
acccccauucuguccu

SEQ ID NO: 3564733 - RNA, 19 nt, Human
accccccaaccccugagga

SEQ ID NO: 3564734 - RNA, 20 nt, Human
accccccaaccccugaggaa

SEQ ID NO: 3564735 - RNA, 16 nt, Human
accccccacucugugc

SEQ ID NO: 3564736 - RNA, 19 nt, Human
accccccacucugugccug

SEQ ID NO: 3564737 - RNA, 18 nt, Human
accccccagaaccugucc

SEQ ID NO: 3564738 - RNA, 19 nt, Human
accccccagaaccuguccu

SEQ ID NO: 3564739 - RNA, 13 nt, Human
accccccagcacu

SEQ ID NO: 3564740 - RNA, 14 nt, Human
accccccagcacug

SEQ ID NO: 3564741 - RNA, 17 nt, Human
accccccagcacugagg

SEQ ID NO: 3564742 - RNA, 19 nt, Human
accccccagcacugaggaa

SEQ ID NO: 3564743 - RNA, 12 nt, Human
accccccucauu

SEQ ID NO: 3564744 - RNA, 11 nt, Human
accccccucug

SEQ ID NO: 3564745 - RNA, 14 nt, Human
accccccuguucua

SEQ ID NO: 3564746 - RNA, 21 nt, Human
accccccuuucacaggcagcc

SEQ ID NO: 3564747 - RNA, 13 nt, Human
acccccgcccagg

SEQ ID NO: 3564748 - RNA, 19 nt, Human
acccccgcccaggcuggcc

SEQ ID NO: 3564749 - RNA, 21 nt, Human
acccccgcccaggcuggccag

SEQ ID NO: 3564750 - RNA, 23 nt, Human
acccccgcccaggcuggccagcc

SEQ ID NO: 3564751 - RNA, 13 nt, Human
acccccgcccccu

SEQ ID NO: 3564752 - RNA, 21 nt, Human
acccccgcccccugcccuccc

SEQ ID NO: 3564753 - RNA, 15 nt, Human
acccccgcuggagga

SEQ ID NO: 3564754 - RNA, 15 nt, Human
acccccggcagcagc

SEQ ID NO: 3564755 - RNA, 17 nt, Human
acccccgucaagaguga

SEQ ID NO: 3564756 - RNA, 15 nt, Human
acccccucccuggcc

SEQ ID NO: 3564757 - RNA, 22 nt, Human
acccccucccuggccuguucug

SEQ ID NO: 3564758 - RNA, 16 nt, Human
acccccuccucucugc

SEQ ID NO: 3564759 - RNA, 13 nt, Human
acccccuccugcu

SEQ ID NO: 3564760 - RNA, 16 nt, Human
acccccuccugcugca

SEQ ID NO: 3564761 - RNA, 15 nt, Human
acccccuccuucaga

SEQ ID NO: 3564762 - RNA, 17 nt, Human
acccccuccuucagaca

SEQ ID NO: 3564763 - RNA, 16 nt, Human
acccccucgcuuggac

SEQ ID NO: 3564764 - RNA, 20 nt, Human
acccccucuucugagcacag

SEQ ID NO: 3564765 - RNA, 23 nt, Human
acccccugagauccccugagccc

SEQ ID NO: 3564766 - RNA, 18 nt, Human
acccccugcaaagcccag

SEQ ID NO: 3564767 - RNA, 22 nt, Human
acccccugcaaagcccagcuug

SEQ ID NO: 3564768 - RNA, 14 nt, Human
acccccugcccugc

SEQ ID NO: 3564769 - RNA, 12 nt, Human
acccccuggaga

SEQ ID NO: 3564770 - RNA, 13 nt, Human
acccccuucucug

SEQ ID NO: 3564771 - RNA, 18 nt, Human
acccccuucucugcccau

SEQ ID NO: 3564772 - RNA, 18 nt, Human
acccccuucucugcucca

SEQ ID NO: 3564773 - RNA, 19 nt, Human
acccccuucucugcuccac

SEQ ID NO: 3564774 - RNA, 17 nt, Human
acccccuucugggcauc

SEQ ID NO: 3564775 - RNA, 14 nt, Human
accccgagcccuac

SEQ ID NO: 3564776 - RNA, 17 nt, Human
accccgaggcccugcau

SEQ ID NO: 3564777 - RNA, 15 nt, Human
accccgagggcugag

SEQ ID NO: 3564778 - RNA, 17 nt, Human
accccgauguggaccuc

SEQ ID NO: 3564779 - RNA, 19 nt, Human
accccgccugcccucaugg

SEQ ID NO: 3564780 - RNA, 14 nt, Human
accccgcucugcau

SEQ ID NO: 3564781 - RNA, 15 nt, Human
accccggcaggcccu

SEQ ID NO: 3564782 - RNA, 16 nt, Human
accccggcaggcccug

SEQ ID NO: 3564783 - RNA, 19 nt, Human
accccggcaggcccugcag

SEQ ID NO: 3564784 - RNA, 22 nt, Human
accccggccggccacccaggag

SEQ ID NO: 3564785 - RNA, 21 nt, Human
accccggggugcccacaggcc

SEQ ID NO: 3564786 - RNA, 19 nt, Human
accccgguggcggccccag

SEQ ID NO: 3564787 - RNA, 14 nt, Human
accccgucaacaaa

SEQ ID NO: 3564788 - RNA, 23 nt, Human
accccgucugggguucagccccu

SEQ ID NO: 3564789 - RNA, 21 nt, Human
accccuaaaagaaacccugca

SEQ ID NO: 3564790 - RNA, 13 nt, Human
accccuaccccug

SEQ ID NO: 3564791 - RNA, 20 nt, Human
accccuaguucccucugcuc

SEQ ID NO: 3564792 - RNA, 13 nt, Human
accugcucugcug

SEQ ID NO: 3564793 - RNA, 14 nt, Human
accugcugagcucu

SEQ ID NO: 3564794 - RNA, 16 nt, Human
accugcugagcucuga

SEQ ID NO: 3564795 - RNA, 18 nt, Human
accugcugagcucugaga

SEQ ID NO: 3564796 - RNA, 20 nt, Human
accugcugagcucugagagg

SEQ ID NO: 3564797 - RNA, 14 nt, Human
accugcugcuucuc

SEQ ID NO: 3564798 - RNA, 14 nt, Human
accugcuggccccu

SEQ ID NO: 3564799 - RNA, 16 nt, Human
accugcuggccccuca

SEQ ID NO: 3564800 - RNA, 21 nt, Human
accugcuggccccucaccugg

SEQ ID NO: 3564801 - RNA, 21 nt, Human
accugcugucuggguggcuca

SEQ ID NO: 3564802 - RNA, 21 nt, Human
accugcuucaugcucagcccu

SEQ ID NO: 3564803 - RNA, 14 nt, Human
accugcuucucugc

SEQ ID NO: 3564804 - RNA, 17 nt, Human
accugcuuuuugaaaug

SEQ ID NO: 3564805 - RNA, 21 nt, Human
accugcuuuuugaaaugaaau

SEQ ID NO: 3564806 - RNA, 17 nt, Human
accuggaaaaauuccag

SEQ ID NO: 3564807 - RNA, 19 nt, Human
accuggaaaaauuccagaa

SEQ ID NO: 3564808 - RNA, 18 nt, Human
accuggaagcauuuguuu

SEQ ID NO: 3564809 - RNA, 18 nt, Human
accuggaaggcccagcac

SEQ ID NO: 3564810 - RNA, 14 nt, Human
accuggacacaggc

SEQ ID NO: 3564811 - RNA, 15 nt, Human
accuggaccccugca

SEQ ID NO: 3564812 - RNA, 21 nt, Human
accuggaccccugcauuggaa

SEQ ID NO: 3564813 - RNA, 20 nt, Human
accuggagagccagaaccug

SEQ ID NO: 3564814 - RNA, 22 nt, Human
accuggagagccagaaccugga

SEQ ID NO: 3564815 - RNA, 21 nt, Human
accuggagagcuagaaccuag

SEQ ID NO: 3564816 - RNA, 22 nt, Human
accuggagagcuagaaccugga

SEQ ID NO: 3564817 - RNA, 16 nt, Human
accuggagggaagagu

SEQ ID NO: 3564818 - RNA, 22 nt, Human
accuggagggcuagaaccugga

SEQ ID NO: 3564819 - RNA, 14 nt, Human
accuggaggggcua

SEQ ID NO: 3564820 - RNA, 16 nt, Human
accuggaguuccugaa

SEQ ID NO: 3564821 - RNA, 19 nt, Human
accuggauggggcaggcca

SEQ ID NO: 3564822 - RNA, 22 nt, Human
accuggauugugccuaaugugu

SEQ ID NO: 3564823 - RNA, 18 nt, Human
accuggcacugcugugcu

SEQ ID NO: 3564824 - RNA, 14 nt, Human
accuggcagcucug

SEQ ID NO: 3564825 - RNA, 21 nt, Human
accuggcaucgcaccauucug

SEQ ID NO: 3564826 - RNA, 21 nt, Human
accuggcaucuaauucugauu

SEQ ID NO: 3564827 - RNA, 13 nt, Human
accuggccaccug

SEQ ID NO: 3564828 - RNA, 16 nt, Human
accuggccaccugagg

SEQ ID NO: 3564829 - RNA, 18 nt, Human
accuggcccaucagggua

SEQ ID NO: 3564830 - RNA, 18 nt, Human
accuggcccugcuuccug

SEQ ID NO: 3564831 - RNA, 15 nt, Human
accuggcccuggggc

SEQ ID NO: 3564832 - RNA, 18 nt, Human
accuggcccuggggccug

SEQ ID NO: 3564833 - RNA, 20 nt, Human
accuggccgcggagccugca

SEQ ID NO: 3564834 - RNA, 22 nt, Human
accuggccgcguuuagaccaag

SEQ ID NO: 3564835 - RNA, 12 nt, Human
accuggccucug

SEQ ID NO: 3564836 - RNA, 13 nt, Human
accuggccucugc

SEQ ID NO: 3564837 - RNA, 14 nt, Human
accuggccucugca

SEQ ID NO: 3564838 - RNA, 17 nt, Human
accuggccucugcacuc

SEQ ID NO: 3564839 - RNA, 15 nt, Human
accuggccugucugu

SEQ ID NO: 3564840 - RNA, 11 nt, Human
accuggccuuc

SEQ ID NO: 3564841 - RNA, 14 nt, Human
accuggcucugugg

SEQ ID NO: 3564842 - RNA, 23 nt, Human
accuggcucuguggcgagccauu

SEQ ID NO: 3564843 - RNA, 19 nt, Human
accuggcugagccuggcug

SEQ ID NO: 3564844 - RNA, 23 nt, Human
accuggcugaggcgccacccuuc

SEQ ID NO: 3564845 - RNA, 23 nt, Human
accuggcugagguuccucugccu

SEQ ID NO: 3564846 - RNA, 17 nt, Human
accuggcuuauuuaaua

SEQ ID NO: 3564847 - RNA, 21 nt, Human
accuggcuuuuuauuguauuu

SEQ ID NO: 3564848 - RNA, 13 nt, Human
accugggaagggg

SEQ ID NO: 3564849 - RNA, 22 nt, Human
accugggagaaaucuggcuucu

SEQ ID NO: 3564850 - RNA, 18 nt, Human
accugggauucaggaaug

SEQ ID NO: 3564851 - RNA, 17 nt, Human
accugggcaagcuggcg

SEQ ID NO: 3564852 - RNA, 13 nt, Human
accugggcaccug

SEQ ID NO: 3564853 - RNA, 13 nt, Human
accugggcccugg

SEQ ID NO: 3564854 - RNA, 24 nt, Human
accuggggagugggacagagucug

SEQ ID NO: 3564855 - RNA, 19 nt, Human
accuggggcacaguccagg

SEQ ID NO: 3564856 - RNA, 21 nt, Human
accuggggcacaguccaggaa

SEQ ID NO: 3564857 - RNA, 20 nt, Human
accuggggcugcugugaagc

SEQ ID NO: 3564858 - RNA, 22 nt, Human
accuggggggcaguggugugga

SEQ ID NO: 3564859 - RNA, 21 nt, Human
accugggguugucagcucuca

SEQ ID NO: 3564860 - RNA, 23 nt, Human
accuggguccaaauaaaaacuaa

SEQ ID NO: 3564861 - RNA, 15 nt, Human
accuggguccuuuuc

SEQ ID NO: 3564862 - RNA, 20 nt, Human
accuggguugcagacaggaa

SEQ ID NO: 3564863 - RNA, 19 nt, Human
accugguacccuccuggcu

SEQ ID NO: 3564864 - RNA, 17 nt, Human
accugguacucccucuc

SEQ ID NO: 3564865 - RNA, 16 nt, Human
accugguccacagggc

SEQ ID NO: 3564866 - RNA, 16 nt, Human
accuggugcugccucu

SEQ ID NO: 3564867 - RNA, 22 nt, Human
accugguuaaacaaaccagaau

SEQ ID NO: 3564868 - RNA, 22 nt, Human
accugguuccggaauccugucc

SEQ ID NO: 3564869 - RNA, 11 nt, Human
accuguaaaac

SEQ ID NO: 3564870 - RNA, 15 nt, Human
accuguaaaacuuua

SEQ ID NO: 3564871 - RNA, 18 nt, Human
accuguaaauuauuuuaa

SEQ ID NO: 3564872 - RNA, 14 nt, Human
accuguaacuuuuu

SEQ ID NO: 3564873 - RNA, 13 nt, Human
accuguaauaaau

SEQ ID NO: 3564874 - RNA, 16 nt, Human
accuguaauaaauaug

SEQ ID NO: 3564875 - RNA, 17 nt, Human
accuguaauaaauauga

SEQ ID NO: 3564876 - RNA, 15 nt, Human
accuguaaucccagc

SEQ ID NO: 3564877 - RNA, 19 nt, Human
accuguaaucccagcacuu

SEQ ID NO: 3564878 - RNA, 19 nt, Human
accuguaaucccagcuacu

SEQ ID NO: 3564879 - RNA, 20 nt, Human
accuguaaucccagcuacuu

SEQ ID NO: 3564880 - RNA, 12 nt, Human
accuguacucag

SEQ ID NO: 3564881 - RNA, 16 nt, Human
accuguagucccagcu

SEQ ID NO: 3564882 - RNA, 21 nt, Human
accuguauaaguggaggcacu

SEQ ID NO: 3564883 - RNA, 23 nt, Human
accuguaugucaauaaacaacag

SEQ ID NO: 3564884 - RNA, 17 nt, Human
accuguaugucuccagu

SEQ ID NO: 3564885 - RNA, 21 nt, Human
accuguauuuaaaaauagaaa

SEQ ID NO: 3564886 - RNA, 12 nt, Human
accugucaauac

SEQ ID NO: 3564887 - RNA, 14 nt, Human
accugucaauacua

SEQ ID NO: 3564888 - RNA, 22 nt, Human
accugucaaugauacagucccu

SEQ ID NO: 3564889 - RNA, 15 nt, Human
accugucacauugca

SEQ ID NO: 3564890 - RNA, 17 nt, Human
accugucacauugcauu

SEQ ID NO: 3564891 - RNA, 18 nt, Human
accugucaugccccccuc

SEQ ID NO: 3564892 - RNA, 20 nt, Human
accuguccccacccuccacu

SEQ ID NO: 3564893 - RNA, 14 nt, Human
accuguccuccugg

SEQ ID NO: 3564894 - RNA, 14 nt, Human
accuguccuugcac

SEQ ID NO: 3564895 - RNA, 12 nt, Human
accugucgccca

SEQ ID NO: 3564896 - RNA, 15 nt, Human
accugucgcccagug

SEQ ID NO: 3564897 - RNA, 16 nt, Human
accugucuccacugug

SEQ ID NO: 3564898 - RNA, 17 nt, Human
accugucuccuggcggu

SEQ ID NO: 3564899 - RNA, 12 nt, Human
accugucugucu

SEQ ID NO: 3564900 - RNA, 19 nt, Human
accugucuugccuuuuuca

SEQ ID NO: 3564901 - RNA, 17 nt, Human
accugucuuuugggagu

SEQ ID NO: 3564902 - RNA, 17 nt, Human
accugugaagcugaaaa

SEQ ID NO: 3564903 - RNA, 13 nt, Human
accugugaccagc

SEQ ID NO: 3564904 - RNA, 19 nt, Human
accugugaccagcacuguc

SEQ ID NO: 3564905 - RNA, 19 nt, Human
accugugaguuuaaagcaa

SEQ ID NO: 3564906 - RNA, 15 nt, Human
accugugccucggcu

SEQ ID NO: 3564907 - RNA, 16 nt, Human
accugugccucggcuu

SEQ ID NO: 3564908 - RNA, 19 nt, Human
accugugcuucgggcccuu

SEQ ID NO: 3564909 - RNA, 13 nt, Human
accuguggauauu

SEQ ID NO: 3564910 - RNA, 14 nt, Human
accuguggauauuu

SEQ ID NO: 3564911 - RNA, 21 nt, Human
accuguggggauuucucccag

SEQ ID NO: 3564912 - RNA, 22 nt, Human
accuguggggauuucucccagc

SEQ ID NO: 3564913 - RNA, 23 nt, Human
accuguggggauuucucccagcu

SEQ ID NO: 3564914 - RNA, 16 nt, Human
accuguggugcaaaag

SEQ ID NO: 3564915 - RNA, 22 nt, Human
accugugucugcgaaguccuau

SEQ ID NO: 3564916 - RNA, 13 nt, Human
accugugugcuug

SEQ ID NO: 3564917 - RNA, 17 nt, Human
accuguuaaaauuauac

SEQ ID NO: 3564918 - RNA, 15 nt, Human
accuguugcuguguu

SEQ ID NO: 3564919 - RNA, 15 nt, Human
accuguugcuuacaa

SEQ ID NO: 3564920 - RNA, 18 nt, Human
accuguugcuuacaauuu

SEQ ID NO: 3564921 - RNA, 19 nt, Human
accuguugcuuacaauuuu

SEQ ID NO: 3564922 - RNA, 20 nt, Human
accuguugcuuacaauuuuu

SEQ ID NO: 3564923 - RNA, 14 nt, Human
accuguuuaaauau

SEQ ID NO: 3564924 - RNA, 23 nt, Human
accuguuuaaauugcucacaguu

SEQ ID NO: 3564925 - RNA, 19 nt, Human
accuguuuuuaagcuguuu

SEQ ID NO: 3564926 - RNA, 17 nt, Human
accuguuuuuuuuucau

SEQ ID NO: 3564927 - RNA, 12 nt, Human
accuuaaaauuu

SEQ ID NO: 3564928 - RNA, 17 nt, Human
accuuaaaauuugaaac

SEQ ID NO: 3564929 - RNA, 22 nt, Human
accuuaaguaagcaacagcaua

SEQ ID NO: 3564930 - RNA, 14 nt, Human
accuuaauauuucu

SEQ ID NO: 3564931 - RNA, 14 nt, Human
accuuaccccuggc

SEQ ID NO: 3564932 - RNA, 17 nt, Human
accuuacgaucaggcac

SEQ ID NO: 3564933 - RNA, 20 nt, Human
accuuacgaucaggcacagg

SEQ ID NO: 3564934 - RNA, 20 nt, Human
accuuagacagucccugcca

SEQ ID NO: 3564935 - RNA, 20 nt, Human
accuuagaccaccaagccuu

SEQ ID NO: 3564936 - RNA, 13 nt, Human
accuuagcucccu

SEQ ID NO: 3564937 - RNA, 23 nt, Human
accuuagcucccucccgcacccc

SEQ ID NO: 3564938 - RNA, 23 nt, Human
accuuaggaauaaucuccuguua

SEQ ID NO: 3564939 - RNA, 13 nt, Human
accuuaggcaggg

SEQ ID NO: 3564940 - RNA, 17 nt, Human
accuuaggccuuccucu

SEQ ID NO: 3564941 - RNA, 19 nt, Human
acagcugaguuaugaugua

SEQ ID NO: 3564942 - RNA, 19 nt, Human
acagcugcaauucccugga

SEQ ID NO: 3564943 - RNA, 16 nt, Human
acagcugccugcagua

SEQ ID NO: 3564944 - RNA, 21 nt, Human
acagcugcuccuagagggagg

SEQ ID NO: 3564945 - RNA, 11 nt, Human
acagcugcugg

SEQ ID NO: 3564946 - RNA, 15 nt, Human
acagcugcuuucugu

SEQ ID NO: 3564947 - RNA, 17 nt, Human
acagcuggacccugacc

SEQ ID NO: 3564948 - RNA, 15 nt, Human
acagcuggagcucuc

SEQ ID NO: 3564949 - RNA, 13 nt, Human
acagcuggccucc

SEQ ID NO: 3564950 - RNA, 13 nt, Human
acagcugggcugu

SEQ ID NO: 3564951 - RNA, 16 nt, Human
acagcuggggugcagg

SEQ ID NO: 3564952 - RNA, 16 nt, Human
acagcuggguggcacu

SEQ ID NO: 3564953 - RNA, 17 nt, Human
acagcuggugcccugcu

SEQ ID NO: 3564954 - RNA, 19 nt, Human
acagcugguguagcuacag

SEQ ID NO: 3564955 - RNA, 20 nt, Human
acagcugguguagcuacaga

SEQ ID NO: 3564956 - RNA, 15 nt, Human
acagcugucccuguc

SEQ ID NO: 3564957 - RNA, 16 nt, Human
acagcugucccuguca

SEQ ID NO: 3564958 - RNA, 12 nt, Human
acagcugugccu

SEQ ID NO: 3564959 - RNA, 23 nt, Human
acagcuguggugagguugggcag

SEQ ID NO: 3564960 - RNA, 12 nt, Human
acagcuguguua

SEQ ID NO: 3564961 - RNA, 15 nt, Human
acagcuguugacucu

SEQ ID NO: 3564962 - RNA, 15 nt, Human
acagcuguuuaagau

SEQ ID NO: 3564963 - RNA, 17 nt, Human
acagcuuagauuucaua

SEQ ID NO: 3564964 - RNA, 18 nt, Human
acagcuuagauuucauag

SEQ ID NO: 3564965 - RNA, 20 nt, Human
acagcuucagguuaucgaaa

SEQ ID NO: 3564966 - RNA, 22 nt, Human
acagcuuccuguccccaucugu

SEQ ID NO: 3564967 - RNA, 18 nt, Human
acagcuuccuuuccugug

SEQ ID NO: 3564968 - RNA, 21 nt, Human
acagcuugaccgugaggccag

SEQ ID NO: 3564969 - RNA, 22 nt, Human
acagcuugaccgugaggccaga

SEQ ID NO: 3564970 - RNA, 19 nt, Human
acagcuugaccugaggcug

SEQ ID NO: 3564971 - RNA, 21 nt, Human
acagcuugagccgggccccug

SEQ ID NO: 3564972 - RNA, 17 nt, Human
acagcuuguaggggagg

SEQ ID NO: 3564973 - RNA, 15 nt, Human
acagcuuguauuuug

SEQ ID NO: 3564974 - RNA, 16 nt, Human
acagcuuguuuuggac

SEQ ID NO: 3564975 - RNA, 23 nt, Human
acagcuuguuuuggacuuuguua

SEQ ID NO: 3564976 - RNA, 17 nt, Human
acagcuuuaucaccaga

SEQ ID NO: 3564977 - RNA, 17 nt, Human
acagcuuucugaccuuc

SEQ ID NO: 3564978 - RNA, 19 nt, Human
acagcuuucugaccuucag

SEQ ID NO: 3564979 - RNA, 11 nt, Human
acagcuuugcu

SEQ ID NO: 3564980 - RNA, 20 nt, Human
acagcuuugugacuguauau

SEQ ID NO: 3564981 - RNA, 21 nt, Human
acagcuuugugacuguauaua

SEQ ID NO: 3564982 - RNA, 13 nt, Human
acagcuuuugcaa

SEQ ID NO: 3564983 - RNA, 15 nt, Human
acagcuuuugcaacu

SEQ ID NO: 3564984 - RNA, 21 nt, Human
acagcuuuugcaacuuaauac

SEQ ID NO: 3564985 - RNA, 14 nt, Human
acaggaaaaaaacu

SEQ ID NO: 3564986 - RNA, 17 nt, Human
acaggaaaaaaacuuuu

SEQ ID NO: 3564987 - RNA, 19 nt, Human
acaggaaacuccugugacc

SEQ ID NO: 3564988 - RNA, 10 nt, Human
acaggaagau

SEQ ID NO: 3564989 - RNA, 17 nt, Human
acaggaagaucuuaaau

SEQ ID NO: 3564990 - RNA, 22 nt, Human
acaggaagaucuuaaauuuugu

SEQ ID NO: 3564991 - RNA, 15 nt, Human
acaggaauuuuaaaa

SEQ ID NO: 3564992 - RNA, 16 nt, Human
acaggacacagucaga

SEQ ID NO: 3564993 - RNA, 20 nt, Human
acaggacagcauggugcaug

SEQ ID NO: 3564994 - RNA, 22 nt, Human
acaggacagugcuucagccuga

SEQ ID NO: 3564995 - RNA, 22 nt, Human
acaggacaugcgguagccagca

SEQ ID NO: 3564996 - RNA, 19 nt, Human
acaggaccccagcucugcg

SEQ ID NO: 3564997 - RNA, 19 nt, Human
acaggacuaacacucagaa

SEQ ID NO: 3564998 - RNA, 14 nt, Human
acaggacucugccu

SEQ ID NO: 3564999 - RNA, 16 nt, Human
acaggacugauucugg

SEQ ID NO: 3565000 - RNA, 14 nt, Human
acaggagacacugu

SEQ ID NO: 3565001 - RNA, 14 nt, Human
acaggagaccuggc

SEQ ID NO: 3565002 - RNA, 19 nt, Human
acaggagagaaaggggaug

SEQ ID NO: 3565003 - RNA, 14 nt, Human
acaggagaugcugu

SEQ ID NO: 3565004 - RNA, 23 nt, Human
acaggagcuaccuguguggacag

SEQ ID NO: 3565005 - RNA, 13 nt, Human
acaggagcuggga

SEQ ID NO: 3565006 - RNA, 15 nt, Human
acaggaggacaauuc

SEQ ID NO: 3565007 - RNA, 22 nt, Human
acaggaggacaauucaugaacu

SEQ ID NO: 3565008 - RNA, 13 nt, Human
acaggaggcaggc

SEQ ID NO: 3565009 - RNA, 19 nt, Human
acaggagggcggccuccuu

SEQ ID NO: 3565010 - RNA, 17 nt, Human
acaggaguguccucuuc

SEQ ID NO: 3565011 - RNA, 23 nt, Human
acaggaguguccucuucccucuc

SEQ ID NO: 3565012 - RNA, 20 nt, Human
acaggauagauaacucuuug

SEQ ID NO: 3565013 - RNA, 15 nt, Human
acaggaucagucuga

SEQ ID NO: 3565014 - RNA, 19 nt, Human
acaggaucaguuaacuauu

SEQ ID NO: 3565015 - RNA, 22 nt, Human
acaggauccuauucucaccagg

SEQ ID NO: 3565016 - RNA, 21 nt, Human
acaggaugaugacuauggaaa

SEQ ID NO: 3565017 - RNA, 19 nt, Human
acaggaugggggcuggccu

SEQ ID NO: 3565018 - RNA, 17 nt, Human
acaggauggucucugcc

SEQ ID NO: 3565019 - RNA, 18 nt, Human
acaggauguguuugcuuu

SEQ ID NO: 3565020 - RNA, 15 nt, Human
acaggauuagacagu

SEQ ID NO: 3565021 - RNA, 15 nt, Human
acaggauuauuuuga

SEQ ID NO: 3565022 - RNA, 22 nt, Human
acaggcaacugaggcagacagc

SEQ ID NO: 3565023 - RNA, 12 nt, Human
acaggcaagcac

SEQ ID NO: 3565024 - RNA, 18 nt, Human
acaggcaagcaccuccug

SEQ ID NO: 3565025 - RNA, 19 nt, Human
acaggcaagcaccuccugc

SEQ ID NO: 3565026 - RNA, 20 nt, Human
acaggcaagcaccuccugcc

SEQ ID NO: 3565027 - RNA, 15 nt, Human
acaggcaaugcuggc

SEQ ID NO: 3565028 - RNA, 18 nt, Human
acaggcaaugcuggcugu

SEQ ID NO: 3565029 - RNA, 19 nt, Human
acaggcaaugcuggcuguu

SEQ ID NO: 3565030 - RNA, 14 nt, Human
acacagaugaaaca

SEQ ID NO: 3565031 - RNA, 16 nt, Human
acacagaugaaacaca

SEQ ID NO: 3565032 - RNA, 16 nt, Human
acacagauguucgguu

SEQ ID NO: 3565033 - RNA, 14 nt, Human
acacagcagcaguu

SEQ ID NO: 3565034 - RNA, 15 nt, Human
acacagcauguguau

SEQ ID NO: 3565035 - RNA, 20 nt, Human
acacagcauuguauauguga

SEQ ID NO: 3565036 - RNA, 14 nt, Human
acacagcauuucaa

SEQ ID NO: 3565037 - RNA, 13 nt, Human
acacagccacaca

SEQ ID NO: 3565038 - RNA, 19 nt, Human
acacagccgauucaccuga

SEQ ID NO: 3565039 - RNA, 23 nt, Human
acacagccgauucaccugagcag

SEQ ID NO: 3565040 - RNA, 23 nt, Human
acacagcuacucuccccacgagg

SEQ ID NO: 3565041 - RNA, 14 nt, Human
acacagcucuucuc

SEQ ID NO: 3565042 - RNA, 21 nt, Human
acacagcucuucuccaggcug

SEQ ID NO: 3565043 - RNA, 22 nt, Human
acacagcucuucuccaggcugu

SEQ ID NO: 3565044 - RNA, 22 nt, Human
acacagcugagagacuuuuaau

SEQ ID NO: 3565045 - RNA, 16 nt, Human
acacagcugggcugug

SEQ ID NO: 3565046 - RNA, 11 nt, Human
acacagcuguu

SEQ ID NO: 3565047 - RNA, 22 nt, Human
acacagcuuuaucaccagagag

SEQ ID NO: 3565048 - RNA, 17 nt, Human
acacaggacccccuucc

SEQ ID NO: 3565049 - RNA, 18 nt, Human
acacaggacccccuuccc

SEQ ID NO: 3565050 - RNA, 20 nt, Human
acacaggacccccuuccccu

SEQ ID NO: 3565051 - RNA, 20 nt, Human
acacaggauagauaacucuu

SEQ ID NO: 3565052 - RNA, 23 nt, Human
acacaggauagauaacucuuugg

SEQ ID NO: 3565053 - RNA, 21 nt, Human
acccauuaaggggaagaauga

SEQ ID NO: 3565054 - RNA, 22 nt, Human
acccauuagcagucccuccaca

SEQ ID NO: 3565055 - RNA, 13 nt, Human
acccauucagaga

SEQ ID NO: 3565056 - RNA, 14 nt, Human
acccauuuguucau

SEQ ID NO: 3565057 - RNA, 20 nt, Human
acccauuuugagugacucga

SEQ ID NO: 3565058 - RNA, 18 nt, Human
accccaaacaccuuccag

SEQ ID NO: 3565059 - RNA, 20 nt, Human
accccaaacaccuuccagcu

SEQ ID NO: 3565060 - RNA, 23 nt, Human
accccaaacaccuuccagcuccu

SEQ ID NO: 3565061 - RNA, 18 nt, Human
acccuggcacccagggug

SEQ ID NO: 3565062 - RNA, 23 nt, Human
acccuggcacuauaauguaagcu

SEQ ID NO: 3565063 - RNA, 18 nt, Human
acccuggccgaguccaag

SEQ ID NO: 3565064 - RNA, 16 nt, Human
acccuggccugagaag

SEQ ID NO: 3565065 - RNA, 23 nt, Human
acccugggaccuaggggcgccgc

SEQ ID NO: 3565066 - RNA, 16 nt, Human
acccugggagacagac

SEQ ID NO: 3565067 - RNA, 20 nt, Human
acccugggcccugggcugga

SEQ ID NO: 3565068 - RNA, 15 nt, Human
acccugggccuggca

SEQ ID NO: 3565069 - RNA, 20 nt, Human
acccugggcucugggagcag

SEQ ID NO: 3565070 - RNA, 18 nt, Human
acccuggggccugacugc

SEQ ID NO: 3565071 - RNA, 22 nt, Human
acccuggggccugacugcucag

SEQ ID NO: 3565072 - RNA, 22 nt, Human
acccuggggccuggaccugccu

SEQ ID NO: 3565073 - RNA, 22 nt, Human
acccuggggcuggcuuuucugu

SEQ ID NO: 3565074 - RNA, 16 nt, Human
acccuggugccuggcu

SEQ ID NO: 3565075 - RNA, 17 nt, Human
acccuggugguugcugu

SEQ ID NO: 3565076 - RNA, 14 nt, Human
acccugguugugug

SEQ ID NO: 3565077 - RNA, 18 nt, Human
acccuguauaucagggua

SEQ ID NO: 3565078 - RNA, 16 nt, Human
acccugucaaacauua

SEQ ID NO: 3565079 - RNA, 14 nt, Human
acccugucccccag

SEQ ID NO: 3565080 - RNA, 21 nt, Human
acccugucccccagcucuggu

SEQ ID NO: 3565081 - RNA, 22 nt, Human
acccugucccccagcucuggug

SEQ ID NO: 3565082 - RNA, 11 nt, Human
acccuguccuc

SEQ ID NO: 3565083 - RNA, 13 nt, Human
acccugucugccc

SEQ ID NO: 3565084 - RNA, 17 nt, Human
acccugugauggggccc

SEQ ID NO: 3565085 - RNA, 20 nt, Human
acccugugauggggcccugc

SEQ ID NO: 3565086 - RNA, 21 nt, Human
acccugugauggggcccugcc

SEQ ID NO: 3565087 - RNA, 22 nt, Human
acccugugauggggcccugccu

SEQ ID NO: 3565088 - RNA, 23 nt, Human
acccugugcugguguccugacca

SEQ ID NO: 3565089 - RNA, 17 nt, Human
acccuguggcccuggcu

SEQ ID NO: 3565090 - RNA, 21 nt, Human
acccugugguuuccaaggagc

SEQ ID NO: 3565091 - RNA, 20 nt, Human
acccuguguauacagcccug

SEQ ID NO: 3565092 - RNA, 17 nt, Human
acccuguuaccauuuug

SEQ ID NO: 3565093 - RNA, 21 nt, Human
acccuguuccugcugcugucu

SEQ ID NO: 3565094 - RNA, 15 nt, Human
acccuguuccuggag

SEQ ID NO: 3565095 - RNA, 16 nt, Human
acccuguuuuauacug

SEQ ID NO: 3565096 - RNA, 17 nt, Human
acccuguuuugagcccu

SEQ ID NO: 3565097 - RNA, 18 nt, Human
acccuguuuugagcccug

SEQ ID NO: 3565098 - RNA, 21 nt, Human
acccuuaaacaguugcacagc

SEQ ID NO: 3565099 - RNA, 18 nt, Human
acccuuaacccaaggagc

SEQ ID NO: 3565100 - RNA, 19 nt, Human
acccuuacagccucugacu

SEQ ID NO: 3565101 - RNA, 16 nt, Human
acccuuagaauccacg

SEQ ID NO: 3565102 - RNA, 14 nt, Human
acccuuauaaaauc

SEQ ID NO: 3565103 - RNA, 15 nt, Human
acccuuauugcuguc

SEQ ID NO: 3565104 - RNA, 21 nt, Human
acccuuauugcuguccuggag

SEQ ID NO: 3565105 - RNA, 21 nt, Human
acccuucacauacccuccccc

SEQ ID NO: 3565106 - RNA, 17 nt, Human
acccuucaucuuccugu

SEQ ID NO: 3565107 - RNA, 16 nt, Human
acccuuccagacauac

SEQ ID NO: 3565108 - RNA, 23 nt, Human
acccuuccaucugauuccagcac

SEQ ID NO: 3565109 - RNA, 20 nt, Human
acccuucccaaucagcacug

SEQ ID NO: 3565110 - RNA, 22 nt, Human
acccuucccugcacuaaagcca

SEQ ID NO: 3565111 - RNA, 13 nt, Human
acccuuccuaagu

SEQ ID NO: 3565112 - RNA, 19 nt, Human
acccuuccucaccacuucc

SEQ ID NO: 3565113 - RNA, 18 nt, Human
acccuuccugagcuuuau

SEQ ID NO: 3565114 - RNA, 15 nt, Human
acccuucucccacuc

SEQ ID NO: 3565115 - RNA, 21 nt, Human
acccuucuccucuuguaaaua

SEQ ID NO: 3565116 - RNA, 13 nt, Human
acccuucugugcc

SEQ ID NO: 3565117 - RNA, 18 nt, Human
acccuucugugcccagcu

SEQ ID NO: 3565118 - RNA, 14 nt, Human
acccuucuucaugu

SEQ ID NO: 3565119 - RNA, 18 nt, Human
acccuucuuuccucuucc

SEQ ID NO: 3565120 - RNA, 20 nt, Human
acccuucuuuccucuucccc

SEQ ID NO: 3565121 - RNA, 14 nt, Human
acccuucuuuucuc

SEQ ID NO: 3565122 - RNA, 20 nt, Human
acccuucuuuucucaugugu

SEQ ID NO: 3565123 - RNA, 16 nt, Human
acccuugaaaagacau

SEQ ID NO: 3565124 - RNA, 23 nt, Human
acccuugaauguagcagccccgg

SEQ ID NO: 3565125 - RNA, 13 nt, Human
acccuugagcccu

SEQ ID NO: 3565126 - RNA, 13 nt, Human
acccuuggacuug

SEQ ID NO: 3565127 - RNA, 14 nt, Human
acccuuggagcucu

SEQ ID NO: 3565128 - RNA, 18 nt, Human
acccuuggagcucugagu

SEQ ID NO: 3565129 - RNA, 11 nt, Human
acccuuggccu

SEQ ID NO: 3565130 - RNA, 18 nt, Human
acccuugggccagaagua

SEQ ID NO: 3565131 - RNA, 20 nt, Human
acccuugggccagaaguacc

SEQ ID NO: 3565132 - RNA, 17 nt, Human
acccuuguggucccacc

SEQ ID NO: 3565133 - RNA, 13 nt, Human
acccuuguuccag

SEQ ID NO: 3565134 - RNA, 20 nt, Human
acccuuuagccaaacccuug

SEQ ID NO: 3565135 - RNA, 14 nt, Human
acccuuuccuuccu

SEQ ID NO: 3565136 - RNA, 18 nt, Human
acccuuuccuuccuuccc

SEQ ID NO: 3565137 - RNA, 21 nt, Human
acccuuuccuuccuucccugg

SEQ ID NO: 3565138 - RNA, 22 nt, Human
acccuuuccuuccuucccuggc

SEQ ID NO: 3565139 - RNA, 17 nt, Human
acccuuucuugacaaaa

SEQ ID NO: 3565140 - RNA, 21 nt, Human
acccuuucuugacaaaaccua

SEQ ID NO: 3565141 - RNA, 12 nt, Human
acccuuuggggg

SEQ ID NO: 3565142 - RNA, 23 nt, Human
acccuuugugugcucuccauucu

SEQ ID NO: 3565143 - RNA, 14 nt, Human
acccuuuguuucuu

SEQ ID NO: 3565144 - RNA, 17 nt, Human
acccuuuucaugauuuu

SEQ ID NO: 3565145 - RNA, 15 nt, Human
accgaaaacguggcu

SEQ ID NO: 3565146 - RNA, 17 nt, Human
accgaaaacguggcugc

SEQ ID NO: 3565147 - RNA, 19 nt, Human
accgaaaacguggcugcuu

SEQ ID NO: 3565148 - RNA, 12 nt, Human
accgaaacagcg

SEQ ID NO: 3565149 - RNA, 12 nt, Human
accgaagcccag

SEQ ID NO: 3565150 - RNA, 20 nt, Human
accgaaguggacuggccccu

SEQ ID NO: 3565151 - RNA, 12 nt, Human
accgaauauuga

SEQ ID NO: 3565152 - RNA, 16 nt, Human
accgaaugugucuuua

SEQ ID NO: 3565153 - RNA, 11 nt, Human
accgacaagca

SEQ ID NO: 3565154 - RNA, 15 nt, Human
accgacaggcccugg

SEQ ID NO: 3565155 - RNA, 23 nt, Human
accgaccugguuuuuaaauagag

SEQ ID NO: 3565156 - RNA, 16 nt, Human
accgacgcgucuccug

SEQ ID NO: 3565157 - RNA, 18 nt, Human
accgagaagguuuauccc

SEQ ID NO: 3565158 - RNA, 17 nt, Human
accgagaguagccgaga

SEQ ID NO: 3565159 - RNA, 19 nt, Human
accgagcaaagaucaaaau

SEQ ID NO: 3565160 - RNA, 15 nt, Human
accgaggagggagag

SEQ ID NO: 3565161 - RNA, 17 nt, Human
accgagucucuucucca

SEQ ID NO: 3565162 - RNA, 20 nt, Human
accgagucucuucuccacug

SEQ ID NO: 3565163 - RNA, 21 nt, Human
accgagugaaccuaccuucau

SEQ ID NO: 3565164 - RNA, 22 nt, Human
accgcagucgucgcacagucuc

SEQ ID NO: 3565165 - RNA, 17 nt, Human
accgccaaggcuggggg

SEQ ID NO: 3565166 - RNA, 17 nt, Human
accgccacauggcuucc

SEQ ID NO: 3565167 - RNA, 12 nt, Human
accgccagcucu

SEQ ID NO: 3565168 - RNA, 15 nt, Human
accgccuaguuuacu

SEQ ID NO: 3565169 - RNA, 16 nt, Human
accgccuccuacagcc

SEQ ID NO: 3565170 - RNA, 13 nt, Human
accgccucuuccc

SEQ ID NO: 3565171 - RNA, 17 nt, Human
accgccuugcccagccu

SEQ ID NO: 3565172 - RNA, 18 nt, Human
accgcgggugugggaaag

SEQ ID NO: 3565173 - RNA, 16 nt, Human
accgcguaaugcgcca

SEQ ID NO: 3565174 - RNA, 15 nt, Human
accgcgucuggugac

SEQ ID NO: 3565175 - RNA, 19 nt, Human
accgcguuguaaaauauag

SEQ ID NO: 3565176 - RNA, 15 nt, Human
accgcuaaaagaaac

SEQ ID NO: 3565177 - RNA, 20 nt, Human
accgcuacaccacucuggca

SEQ ID NO: 3565178 - RNA, 21 nt, Human
accgcuacaccacucuggcag

SEQ ID NO: 3565179 - RNA, 17 nt, Human
accgcucaccuagagcc

SEQ ID NO: 3565180 - RNA, 13 nt, Human
accgcuccccagc

SEQ ID NO: 3565181 - RNA, 15 nt, Human
accgcuccccagccc

SEQ ID NO: 3565182 - RNA, 20 nt, Human
accgcuccccagcccagggu

SEQ ID NO: 3565183 - RNA, 21 nt, Human
accgcugccuaaguggcugcu

SEQ ID NO: 3565184 - RNA, 19 nt, Human
accgcuucccuccugcccg

SEQ ID NO: 3565185 - RNA, 22 nt, Human
accgcuuccggcuccugugcuu

SEQ ID NO: 3565186 - RNA, 15 nt, Human
accgcuucugccuuu

SEQ ID NO: 3565187 - RNA, 18 nt, Human
accuuaggccuuccucuc

SEQ ID NO: 3565188 - RNA, 20 nt, Human
accuuaguguuucugugcau

SEQ ID NO: 3565189 - RNA, 18 nt, Human
accuuauaguuacugugu

SEQ ID NO: 3565190 - RNA, 19 nt, Human
accuuauaguuacugugua

SEQ ID NO: 3565191 - RNA, 18 nt, Human
accuuaugagaaacugca

SEQ ID NO: 3565192 - RNA, 14 nt, Human
accuuauuguaccu

SEQ ID NO: 3565193 - RNA, 13 nt, Human
accuucaaagcug

SEQ ID NO: 3565194 - RNA, 13 nt, Human
accuucaauaaag

SEQ ID NO: 3565195 - RNA, 14 nt, Human
accuucaauaaagu

SEQ ID NO: 3565196 - RNA, 19 nt, Human
accuucaauaaaguaucua

SEQ ID NO: 3565197 - RNA, 14 nt, Human
accuucacucuaag

SEQ ID NO: 3565198 - RNA, 14 nt, Human
accuucagaauaag

SEQ ID NO: 3565199 - RNA, 16 nt, Human
accuucagauccuacc

SEQ ID NO: 3565200 - RNA, 12 nt, Human
accuucagcuca

SEQ ID NO: 3565201 - RNA, 19 nt, Human
accuucaguuuuuguguuu

SEQ ID NO: 3565202 - RNA, 21 nt, Human
accuucauuucaggagggauu

SEQ ID NO: 3565203 - RNA, 14 nt, Human
accuucauuucaug

SEQ ID NO: 3565204 - RNA, 15 nt, Human
accuuccaagagccu

SEQ ID NO: 3565205 - RNA, 14 nt, Human
accuuccacccagu

SEQ ID NO: 3565206 - RNA, 13 nt, Human
accuuccagcucc

SEQ ID NO: 3565207 - RNA, 14 nt, Human
accuuccaggaccc

SEQ ID NO: 3565208 - RNA, 15 nt, Human
accuuccaggacccc

SEQ ID NO: 3565209 - RNA, 19 nt, Human
accuuccauggcucuuuuu

SEQ ID NO: 3565210 - RNA, 19 nt, Human
accuucccaaacgccuccc

SEQ ID NO: 3565211 - RNA, 21 nt, Human
accuucccaaacgccuccccu

SEQ ID NO: 3565212 - RNA, 17 nt, Human
accuucccagcucuccc

SEQ ID NO: 3565213 - RNA, 18 nt, Human
accuucccagcucucccu

SEQ ID NO: 3565214 - RNA, 12 nt, Human
accuuccucacu

SEQ ID NO: 3565215 - RNA, 13 nt, Human
accuuccucgcag

SEQ ID NO: 3565216 - RNA, 16 nt, Human
accuuccucuggggcu

SEQ ID NO: 3565217 - RNA, 12 nt, Human
accuuccugcug

SEQ ID NO: 3565218 - RNA, 15 nt, Human
accuuccuuccuguu

SEQ ID NO: 3565219 - RNA, 21 nt, Human
accuuccuuuuacuuuucuuc

SEQ ID NO: 3565220 - RNA, 15 nt, Human
accuucuagaauuau

SEQ ID NO: 3565221 - RNA, 23 nt, Human
accuucucacauggaaugagggu

SEQ ID NO: 3565222 - RNA, 14 nt, Human
accuucuccuucac

SEQ ID NO: 3565223 - RNA, 22 nt, Human
accuucuccuucaccuuugucc

SEQ ID NO: 3565224 - RNA, 23 nt, Human
accuucucuauggggcauccucu

SEQ ID NO: 3565225 - RNA, 12 nt, Human
accuucucugga

SEQ ID NO: 3565226 - RNA, 23 nt, Human
accuucucuggagccaaguccag

SEQ ID NO: 3565227 - RNA, 15 nt, Human
accuucugaguacag

SEQ ID NO: 3565228 - RNA, 11 nt, Human
accuucuguag

SEQ ID NO: 3565229 - RNA, 18 nt, Human
accuucuucaggcugccu

SEQ ID NO: 3565230 - RNA, 16 nt, Human
accuucuucuccuaca

SEQ ID NO: 3565231 - RNA, 22 nt, Human
accuugaaaaaaaacaguggau

SEQ ID NO: 3565232 - RNA, 19 nt, Human
accuugaaaacuuuaugcu

SEQ ID NO: 3565233 - RNA, 18 nt, Human
accuugaacuccugggcu

SEQ ID NO: 3565234 - RNA, 17 nt, Human
accuugaccuuuguaca

SEQ ID NO: 3565235 - RNA, 19 nt, Human
accuugaccuuuguacagc

SEQ ID NO: 3565236 - RNA, 14 nt, Human
accuugacuugauu

SEQ ID NO: 3565237 - RNA, 15 nt, Human
accuugagacagcuu

SEQ ID NO: 3565238 - RNA, 22 nt, Human
accuugaggaggggcagguaaa

SEQ ID NO: 3565239 - RNA, 22 nt, Human
accuugcacacaucaucuguaa

SEQ ID NO: 3565240 - RNA, 19 nt, Human
accuugcaucucauugcuc

SEQ ID NO: 3565241 - RNA, 20 nt, Human
accuugccccaacccuucuu

SEQ ID NO: 3565242 - RNA, 15 nt, Human
accuugccugguaca

SEQ ID NO: 3565243 - RNA, 23 nt, Human
accuugcugcaagcacagcccuu

SEQ ID NO: 3565244 - RNA, 15 nt, Human
accuugcuuuugcuu

SEQ ID NO: 3565245 - RNA, 18 nt, Human
accuugcuuuugcuucua

SEQ ID NO: 3565246 - RNA, 22 nt, Human
accuuggcaccagacacccagg

SEQ ID NO: 3565247 - RNA, 13 nt, Human
accuuggccuggg

SEQ ID NO: 3565248 - RNA, 12 nt, Human
accuuggcucaa

SEQ ID NO: 3565249 - RNA, 12 nt, Human
accuuggcugca

SEQ ID NO: 3565250 - RNA, 12 nt, Human
accuuggcuugg

SEQ ID NO: 3565251 - RNA, 20 nt, Human
accuuggcuuggcccuggca

SEQ ID NO: 3565252 - RNA, 17 nt, Human
accuuggggcuugacuu

SEQ ID NO: 3565253 - RNA, 13 nt, Human
accuuguaaaaga

SEQ ID NO: 3565254 - RNA, 15 nt, Human
accuuguaauguaac

SEQ ID NO: 3565255 - RNA, 16 nt, Human
accuuguaauguaacu

SEQ ID NO: 3565256 - RNA, 12 nt, Human
accuuguauaaa

SEQ ID NO: 3565257 - RNA, 14 nt, Human
accuugugaucaug

SEQ ID NO: 3565258 - RNA, 17 nt, Human
accuugugccuggcuca

SEQ ID NO: 3565259 - RNA, 13 nt, Human
accuuuaagaaaa

SEQ ID NO: 3565260 - RNA, 22 nt, Human
accuuuaaucagguccugcuca

SEQ ID NO: 3565261 - RNA, 14 nt, Human
accuuuacuuuaga

SEQ ID NO: 3565262 - RNA, 21 nt, Human
accuuuauuccuucauuucau

SEQ ID NO: 3565263 - RNA, 23 nt, Human
accuuuauuccuucauuucaucu

SEQ ID NO: 3565264 - RNA, 12 nt, Human
accuuuauucug

SEQ ID NO: 3565265 - RNA, 13 nt, Human
accuuuauucugg

SEQ ID NO: 3565266 - RNA, 13 nt, Human
accuuuauucuuu

SEQ ID NO: 3565267 - RNA, 14 nt, Human
accuuuauugugau

SEQ ID NO: 3565268 - RNA, 16 nt, Human
accuuuauugugaucu

SEQ ID NO: 3565269 - RNA, 18 nt, Human
accuuuauugugaucuau

SEQ ID NO: 3565270 - RNA, 23 nt, Human
accuuucagauaacuguuauuua

SEQ ID NO: 3565271 - RNA, 19 nt, Human
accuuucauaaucuuugcu

SEQ ID NO: 3565272 - RNA, 21 nt, Human
accuuucauaaucuuugcuuu

SEQ ID NO: 3565273 - RNA, 18 nt, Human
accuuuccaccacagcca

SEQ ID NO: 3565274 - RNA, 15 nt, Human
accuuucccuaaaga

SEQ ID NO: 3565275 - RNA, 22 nt, Human
accuuucccucacccccuccca

SEQ ID NO: 3565276 - RNA, 11 nt, Human
accuuucuagu

SEQ ID NO: 3565277 - RNA, 16 nt, Human
accuuucuccuuugua

SEQ ID NO: 3565278 - RNA, 20 nt, Human
accuuucuucaccaaaucuu

SEQ ID NO: 3565279 - RNA, 22 nt, Human
accuuuguacagcccagaggcc

SEQ ID NO: 3565280 - RNA, 22 nt, Human
accuuuguagcacucaggcucu

SEQ ID NO: 3565281 - RNA, 23 nt, Human
accuuuguauucucuccuguacc

SEQ ID NO: 3565282 - RNA, 17 nt, Human
accuuugugcccuauca

SEQ ID NO: 3565283 - RNA, 16 nt, Human
accuuuguguauuuuu

SEQ ID NO: 3565284 - RNA, 21 nt, Human
accuuuuaaaguguuucagcu

SEQ ID NO: 3565285 - RNA, 22 nt, Human
accuuuuaaaguguuucagcua

SEQ ID NO: 3565286 - RNA, 21 nt, Human
accuuuuaauuaaugaaauau

SEQ ID NO: 3565287 - RNA, 15 nt, Human
accuuuuaccagcuu

SEQ ID NO: 3565288 - RNA, 19 nt, Human
accuuuuaccagcuuuuaa

SEQ ID NO: 3565289 - RNA, 20 nt, Human
accuuuuacugguugcaugg

SEQ ID NO: 3565290 - RNA, 13 nt, Human
accuuuuauuaua

SEQ ID NO: 3565291 - RNA, 16 nt, Human
accuuuucaggaaaau

SEQ ID NO: 3565292 - RNA, 17 nt, Human
accuuuugaggagcccc

SEQ ID NO: 3565293 - RNA, 13 nt, Human
accuuuuggggga

SEQ ID NO: 3565294 - RNA, 17 nt, Human
accuuuugggggagggc

SEQ ID NO: 3565295 - RNA, 15 nt, Human
accuuuuuuaagauu

SEQ ID NO: 3565296 - RNA, 16 nt, Human
accuuuuuuauacaua

SEQ ID NO: 3565297 - RNA, 19 nt, Human
accuuuuuuauacauaaac

SEQ ID NO: 3565298 - RNA, 20 nt, Human
accuuuuuuauacauaaaca

SEQ ID NO: 3565299 - RNA, 21 nt, Human
accuuuuuuauacauaaacaa

SEQ ID NO: 3565300 - RNA, 22 nt, Human
accuuuuuuauacauaaacaag

SEQ ID NO: 3565301 - RNA, 20 nt, Human
accuuuuuuguuuuuucaaa

SEQ ID NO: 3565302 - RNA, 14 nt, Human
acgaaacaaagaca

SEQ ID NO: 3565303 - RNA, 19 nt, Human
acgaaacacaaaccacaac

SEQ ID NO: 3565304 - RNA, 14 nt, Human
acgaaacugcucua

SEQ ID NO: 3565305 - RNA, 21 nt, Human
acgaaacuuguuauugugaau

SEQ ID NO: 3565306 - RNA, 21 nt, Human
acgaaauaauuguuguucugu

SEQ ID NO: 3565307 - RNA, 16 nt, Human
acgaaauguuauuuuu

SEQ ID NO: 3565308 - RNA, 23 nt, Human
acgaaauguuauuuuuuaauuau

SEQ ID NO: 3565309 - RNA, 12 nt, Human
acgaacaaaaca

SEQ ID NO: 3565310 - RNA, 14 nt, Human
acgaacccaccugc

SEQ ID NO: 3565311 - RNA, 17 nt, Human
acgaagaagagccacag

SEQ ID NO: 3565312 - RNA, 20 nt, Human
acgaagaguauuuuugacag

SEQ ID NO: 3565313 - RNA, 13 nt, Human
acgaaggagccca

SEQ ID NO: 3565314 - RNA, 15 nt, Human
acgaauagacaucaa

SEQ ID NO: 3565315 - RNA, 21 nt, Human
acgaaugaaaauaacugaauu

SEQ ID NO: 3565316 - RNA, 19 nt, Human
acgacaaggaaaggcaaau

SEQ ID NO: 3565317 - RNA, 20 nt, Human
acgacaauagcuuuacccuc

SEQ ID NO: 3565318 - RNA, 14 nt, Human
acgacacacuuuga

SEQ ID NO: 3565319 - RNA, 13 nt, Human
acgacacugcagc

SEQ ID NO: 3565320 - RNA, 22 nt, Human
acgacaguacuuucaaugaaca

SEQ ID NO: 3565321 - RNA, 17 nt, Human
acgaccacagggucugc

SEQ ID NO: 3565322 - RNA, 16 nt, Human
acgaccagggccgagg

SEQ ID NO: 3565323 - RNA, 21 nt, Human
acgaccggggccagcaccacu

SEQ ID NO: 3565324 - RNA, 21 nt, Human
acgaccuaggcaguaggccgg

SEQ ID NO: 3565325 - RNA, 14 nt, Human
acgacgcccucucc

SEQ ID NO: 3565326 - RNA, 15 nt, Human
acgacugcccggcag

SEQ ID NO: 3565327 - RNA, 14 nt, Human
acgagaaaacaaua

SEQ ID NO: 3565328 - RNA, 20 nt, Human
acgagaggggaagaguguac

SEQ ID NO: 3565329 - RNA, 18 nt, Human
acgagagguaugccugua

SEQ ID NO: 3565330 - RNA, 17 nt, Human
acgagauaaugugaacu

SEQ ID NO: 3565331 - RNA, 19 nt, Human
acgagaucaagagaucaag

SEQ ID NO: 3565332 - RNA, 19 nt, Human
acgagcaggcuacugucag

SEQ ID NO: 3565333 - RNA, 20 nt, Human
acgagcaggcuacugucagc

SEQ ID NO: 3565334 - RNA, 16 nt, Human
acgagcaggcuucuuc

SEQ ID NO: 3565335 - RNA, 13 nt, Human
acgagccuuuuca

SEQ ID NO: 3565336 - RNA, 11 nt, Human
acgaggcccuc

SEQ ID NO: 3565337 - RNA, 13 nt, Human
acgaggcccucgg

SEQ ID NO: 3565338 - RNA, 13 nt, Human
acuaucugcuuuu

SEQ ID NO: 3565339 - RNA, 20 nt, Human
acuaucugugcguagaaguu

SEQ ID NO: 3565340 - RNA, 13 nt, Human
acuaucuucaucu

SEQ ID NO: 3565341 - RNA, 16 nt, Human
acuaucuuggugaauu

SEQ ID NO: 3565342 - RNA, 18 nt, Human
acuaucuuucagcuccag

SEQ ID NO: 3565343 - RNA, 15 nt, Human
acuaugaaaccuuuu

SEQ ID NO: 3565344 - RNA, 18 nt, Human
acuaugaacuacaaagcu

SEQ ID NO: 3565345 - RNA, 22 nt, Human
acuaugaaucuauuauacugua

SEQ ID NO: 3565346 - RNA, 24 nt, Human
acuaugcauggugccccaggacca

SEQ ID NO: 3565347 - RNA, 15 nt, Human
acuaugcuuuccuuc

SEQ ID NO: 3565348 - RNA, 23 nt, Human
acuauggagugcaccaaagagaa

SEQ ID NO: 3565349 - RNA, 16 nt, Human
acuaugggaugagaaa

SEQ ID NO: 3565350 - RNA, 14 nt, Human
acuauggugccaau

SEQ ID NO: 3565351 - RNA, 20 nt, Human
acuauggugccaauggaacc

SEQ ID NO: 3565352 - RNA, 18 nt, Human
acuauguaaaaauaaccu

SEQ ID NO: 3565353 - RNA, 15 nt, Human
acuauguacaauauu

SEQ ID NO: 3565354 - RNA, 14 nt, Human
acuauguguuuuuc

SEQ ID NO: 3565355 - RNA, 18 nt, Human
acuauguugcccaggcag

SEQ ID NO: 3565356 - RNA, 20 nt, Human
acuauguuuuuguucaguuu

SEQ ID NO: 3565357 - RNA, 21 nt, Human
acuauuaaacaugcuguacau

SEQ ID NO: 3565358 - RNA, 14 nt, Human
acuauuaagaggca

SEQ ID NO: 3565359 - RNA, 19 nt, Human
acuauuaaggauguagcuu

SEQ ID NO: 3565360 - RNA, 11 nt, Human
acuauuauuau

SEQ ID NO: 3565361 - RNA, 13 nt, Human
acuauucaaacag

SEQ ID NO: 3565362 - RNA, 14 nt, Human
acuauucaaacagu

SEQ ID NO: 3565363 - RNA, 13 nt, Human
acuauucaaguau

SEQ ID NO: 3565364 - RNA, 15 nt, Human
acuauucaguugugu

SEQ ID NO: 3565365 - RNA, 18 nt, Human
acuauucgaaugaaaaga

SEQ ID NO: 3565366 - RNA, 19 nt, Human
acuauucgaaugaaaagac

SEQ ID NO: 3565367 - RNA, 22 nt, Human
acuauucugauuacacaaaaca

SEQ ID NO: 3565368 - RNA, 17 nt, Human
acuauucuguaucuuuc

SEQ ID NO: 3565369 - RNA, 17 nt, Human
acuauugacaucagcau

SEQ ID NO: 3565370 - RNA, 21 nt, Human
acuauuggaaucugauauacu

SEQ ID NO: 3565371 - RNA, 16 nt, Human
acuauuguuagucucu

SEQ ID NO: 3565372 - RNA, 14 nt, Human
acuauuuaaacuua

SEQ ID NO: 3565373 - RNA, 15 nt, Human
acuauuuaacuugag

SEQ ID NO: 3565374 - RNA, 22 nt, Human
acuauuuaacuugagcuuuaaa

SEQ ID NO: 3565375 - RNA, 14 nt, Human
acuauuuaagaugu

SEQ ID NO: 3565376 - RNA, 15 nt, Human
acuauuuaucugugu

SEQ ID NO: 3565377 - RNA, 22 nt, Human
acuauuucccuugaaauuuuaa

SEQ ID NO: 3565378 - RNA, 12 nt, Human
acuauuuccuuu

SEQ ID NO: 3565379 - RNA, 22 nt, Human
acuauuucuacacagugggaac

SEQ ID NO: 3565380 - RNA, 21 nt, Human
acuauuucuuauauaugugaa

SEQ ID NO: 3565381 - RNA, 14 nt, Human
acuauuuuaugcaa

SEQ ID NO: 3565382 - RNA, 12 nt, Human
acuauuuucaga

SEQ ID NO: 3565383 - RNA, 13 nt, Human
acuauuuucagaa

SEQ ID NO: 3565384 - RNA, 16 nt, Human
acuauuuucagaaucu

SEQ ID NO: 3565385 - RNA, 18 nt, Human
acuauuuuuacugccacu

SEQ ID NO: 3565386 - RNA, 16 nt, Human
acuauuuuuauuuuua

SEQ ID NO: 3565387 - RNA, 14 nt, Human
acuauuuuucagaa

SEQ ID NO: 3565388 - RNA, 17 nt, Human
acucaaaauauuuguac

SEQ ID NO: 3565389 - RNA, 19 nt, Human
acucaaagcaaaagugcug

SEQ ID NO: 3565390 - RNA, 20 nt, Human
acucaaaguuaaccuaccug

SEQ ID NO: 3565391 - RNA, 22 nt, Human
acucaaaguuucagagaccauu

SEQ ID NO: 3565392 - RNA, 15 nt, Human
acucaaauacacauu

SEQ ID NO: 3565393 - RNA, 16 nt, Human
acucaaauacacauuu

SEQ ID NO: 3565394 - RNA, 21 nt, Human
acucaaauaugaguacaaaug

SEQ ID NO: 3565395 - RNA, 18 nt, Human
acucaaaucuuaagaaau

SEQ ID NO: 3565396 - RNA, 14 nt, Human
acucaaaugaguaa

SEQ ID NO: 3565397 - RNA, 20 nt, Human
acucaaauggggccagaucc

SEQ ID NO: 3565398 - RNA, 18 nt, Human
acucaaauguucuaaguu

SEQ ID NO: 3565399 - RNA, 22 nt, Human
acucaacaaaacccaugcauuu

SEQ ID NO: 3565400 - RNA, 20 nt, Human
acucaacauguuacugacca

SEQ ID NO: 3565401 - RNA, 21 nt, Human
acucaacauguuacugaccag

SEQ ID NO: 3565402 - RNA, 15 nt, Human
acucaagaagcaggc

SEQ ID NO: 3565403 - RNA, 17 nt, Human
acucaagaagugaagaa

SEQ ID NO: 3565404 - RNA, 14 nt, Human
acucaagaggcuga

SEQ ID NO: 3565405 - RNA, 17 nt, Human
acucaagaggcugaggc

SEQ ID NO: 3565406 - RNA, 18 nt, Human
acucaagaggcugaggca

SEQ ID NO: 3565407 - RNA, 16 nt, Human
acucaagccaagcagc

SEQ ID NO: 3565408 - RNA, 18 nt, Human
acucaagcggguggcucu

SEQ ID NO: 3565409 - RNA, 21 nt, Human
acucaaggauaccuucuuauu

SEQ ID NO: 3565410 - RNA, 18 nt, Human
acucaaggcggugcuuga

SEQ ID NO: 3565411 - RNA, 15 nt, Human
acucaaguagcauuu

SEQ ID NO: 3565412 - RNA, 15 nt, Human
acucaaguucaagga

SEQ ID NO: 3565413 - RNA, 12 nt, Human
acucaauauuuu

SEQ ID NO: 3565414 - RNA, 14 nt, Human
acucaaugagcucu

SEQ ID NO: 3565415 - RNA, 18 nt, Human
acucaaugcuuuauuugu

SEQ ID NO: 3565416 - RNA, 24 nt, Human
acucaauggaguaugucugaugga

SEQ ID NO: 3565417 - RNA, 16 nt, Human
acucaauggauuugau

SEQ ID NO: 3565418 - RNA, 15 nt, Human
acucaauugauaaac

SEQ ID NO: 3565419 - RNA, 12 nt, Human
acucaauuuuaa

SEQ ID NO: 3565420 - RNA, 15 nt, Human
acucaauuuuaacaa

SEQ ID NO: 3565421 - RNA, 21 nt, Human
acucacaaccugaaccuagga

SEQ ID NO: 3565422 - RNA, 16 nt, Human
acucacaagaagacca

SEQ ID NO: 3565423 - RNA, 14 nt, Human
acucacacaggacc

SEQ ID NO: 3565424 - RNA, 13 nt, Human
acucacacaggca

SEQ ID NO: 3565425 - RNA, 14 nt, Human
acucacacaggcau

SEQ ID NO: 3565426 - RNA, 20 nt, Human
acucacacaggcauuuccug

SEQ ID NO: 3565427 - RNA, 23 nt, Human
acucacacaggcauuuccugggu

SEQ ID NO: 3565428 - RNA, 18 nt, Human
acucacaccacuagccuc

SEQ ID NO: 3565429 - RNA, 18 nt, Human
acucacagaccuggagcc

SEQ ID NO: 3565430 - RNA, 23 nt, Human
acucacagaccuggagccccugg

SEQ ID NO: 3565431 - RNA, 17 nt, Human
acucacagagacacagg

SEQ ID NO: 3565432 - RNA, 18 nt, Human
acucacagagucaaggcc

SEQ ID NO: 3565433 - RNA, 16 nt, Human
acucacaugcuggaca

SEQ ID NO: 3565434 - RNA, 19 nt, Human
acucacauuuauucugcuc

SEQ ID NO: 3565435 - RNA, 21 nt, Human
acucacauuuauucugcucac

SEQ ID NO: 3565436 - RNA, 13 nt, Human
acucaccacugcc

SEQ ID NO: 3565437 - RNA, 22 nt, Human
acucaccagccccacugccagc

SEQ ID NO: 3565438 - RNA, 17 nt, Human
acucaccaguguccccu

SEQ ID NO: 3565439 - RNA, 15 nt, Human
acucaccauguaaaa

SEQ ID NO: 3565440 - RNA, 17 nt, Human
acucaccgaagccacuu

SEQ ID NO: 3565441 - RNA, 17 nt, Human
acucaccuaauguuuau

SEQ ID NO: 3565442 - RNA, 20 nt, Human
acucaccuaauguuuaugag

SEQ ID NO: 3565443 - RNA, 20 nt, Human
acucaccucccccaucucuu

SEQ ID NO: 3565444 - RNA, 13 nt, Human
acucaccucugcc

SEQ ID NO: 3565445 - RNA, 22 nt, Human
acucacuaggcccccacuugcc

SEQ ID NO: 3565446 - RNA, 14 nt, Human
acucacuccugaga

SEQ ID NO: 3565447 - RNA, 20 nt, Human
acucacuccugagaccccug

SEQ ID NO: 3565448 - RNA, 22 nt, Human
acucacuccugagaccccuggc

SEQ ID NO: 3565449 - RNA, 15 nt, Human
acucacucugggcug

SEQ ID NO: 3565450 - RNA, 16 nt, Human
acucacucugggcugu

SEQ ID NO: 3565451 - RNA, 16 nt, Human
acucacugaagccugc

SEQ ID NO: 3565452 - RNA, 15 nt, Human
acucacugcucaaga

SEQ ID NO: 3565453 - RNA, 18 nt, Human
acucacuggcagccccag

SEQ ID NO: 3565454 - RNA, 20 nt, Human
acucacuggcagccccagca

SEQ ID NO: 3565455 - RNA, 21 nt, Human
acucacuggcagccccagcac

SEQ ID NO: 3565456 - RNA, 23 nt, Human
acucacuggggaacguucucuuu

SEQ ID NO: 3565457 - RNA, 18 nt, Human
acucacugugaucaauau

SEQ ID NO: 3565458 - RNA, 15 nt, Human
acucacuuuucccac

SEQ ID NO: 3565459 - RNA, 16 nt, Human
acucacuuuucccacu

SEQ ID NO: 3565460 - RNA, 15 nt, Human
acucagaaacaucag

SEQ ID NO: 3565461 - RNA, 14 nt, Human
acucagaaagccaa

SEQ ID NO: 3565462 - RNA, 14 nt, Human
acucagaaauuuuu

SEQ ID NO: 3565463 - RNA, 22 nt, Human
acucagaacugucggaggaaag

SEQ ID NO: 3565464 - RNA, 23 nt, Human
acucagaacugucggaggaaaga

SEQ ID NO: 3565465 - RNA, 15 nt, Human
acucagaagacacug

SEQ ID NO: 3565466 - RNA, 12 nt, Human
acucagaagccu

SEQ ID NO: 3565467 - RNA, 15 nt, Human
acucagaagccugag

SEQ ID NO: 3565468 - RNA, 16 nt, Human
acucagaagccugagg

SEQ ID NO: 3565469 - RNA, 15 nt, Human
acucagaagccuggg

SEQ ID NO: 3565470 - RNA, 16 nt, Human
acucagaagccugggg

SEQ ID NO: 3565471 - RNA, 17 nt, Human
acucagaagccuggggg

SEQ ID NO: 3565472 - RNA, 22 nt, Human
acucagaagccugggggccugg

SEQ ID NO: 3565473 - RNA, 21 nt, Human
acucagaauucucuaguuuga

SEQ ID NO: 3565474 - RNA, 22 nt, Human
acucagagaaaaaugcucccca

SEQ ID NO: 3565475 - RNA, 14 nt, Human
acucagagacaugc

SEQ ID NO: 3565476 - RNA, 19 nt, Human
acucagagcagucugugac

SEQ ID NO: 3565477 - RNA, 20 nt, Human
acucagaucacuacugcagu

SEQ ID NO: 3565478 - RNA, 17 nt, Human
acucagauccagggaca

SEQ ID NO: 3565479 - RNA, 16 nt, Human
acucagauccuccuca

SEQ ID NO: 3565480 - RNA, 23 nt, Human
acucagauggaaccgcaggaagc

SEQ ID NO: 3565481 - RNA, 17 nt, Human
acucagcaccacucaag

SEQ ID NO: 3565482 - RNA, 17 nt, Human
acucagcacuuggcccu

SEQ ID NO: 3565483 - RNA, 15 nt, Human
acucagcagaauggu

SEQ ID NO: 3565484 - RNA, 20 nt, Human
acucagccaaccuuacuuac

SEQ ID NO: 3565485 - RNA, 17 nt, Human
acucagccaagcacagu

SEQ ID NO: 3565486 - RNA, 17 nt, Human
acucagccccuaggagu

SEQ ID NO: 3565487 - RNA, 11 nt, Human
acucagcccug

SEQ ID NO: 3565488 - RNA, 15 nt, Human
acucagccugcugcc

SEQ ID NO: 3565489 - RNA, 18 nt, Human
acucagccugcugcccag

SEQ ID NO: 3565490 - RNA, 23 nt, Human
acucagccuucagacagagagga

SEQ ID NO: 3565491 - RNA, 15 nt, Human
acucagcuccccaga

SEQ ID NO: 3565492 - RNA, 19 nt, Human
acucagcuccccagagucc

SEQ ID NO: 3565493 - RNA, 14 nt, Human
acucagcuguccug

SEQ ID NO: 3565494 - RNA, 18 nt, Human
acucagcugucuguggcu

SEQ ID NO: 3565495 - RNA, 17 nt, Human
acucagcuuccuaccca

SEQ ID NO: 3565496 - RNA, 16 nt, Human
acucaggacuccagcc

SEQ ID NO: 3565497 - RNA, 16 nt, Human
acucaggaggcugagg

SEQ ID NO: 3565498 - RNA, 18 nt, Human
acucaggaggcugaggca

SEQ ID NO: 3565499 - RNA, 20 nt, Human
acucaggaggcugaggcaga

SEQ ID NO: 3565500 - RNA, 17 nt, Human
acucaggaggcugaggg

SEQ ID NO: 3565501 - RNA, 18 nt, Human
acucaggauccagucccu

SEQ ID NO: 3565502 - RNA, 15 nt, Human
acucaggaugcccag

SEQ ID NO: 3565503 - RNA, 23 nt, Human
acucaggcccccaccuggcucac

SEQ ID NO: 3565504 - RNA, 23 nt, Human
acucaggcgggacagugcugcag

SEQ ID NO: 3565505 - RNA, 14 nt, Human
acucaggcucucca

SEQ ID NO: 3565506 - RNA, 15 nt, Human
acucaggcuuucacu

SEQ ID NO: 3565507 - RNA, 21 nt, Human
acucagggcagcgccaggcug

SEQ ID NO: 3565508 - RNA, 15 nt, Human
acucagggccccagc

SEQ ID NO: 3565509 - RNA, 17 nt, Human
acucagggcuccuccca

SEQ ID NO: 3565510 - RNA, 19 nt, Human
acucagggcuccucccagc

SEQ ID NO: 3565511 - RNA, 22 nt, Human
acucagguuguaguaaagaaau

SEQ ID NO: 3565512 - RNA, 17 nt, Human
acucagucucucuucuc

SEQ ID NO: 3565513 - RNA, 23 nt, Human
acucaguuuauguuguacaaugu

SEQ ID NO: 3565514 - RNA, 13 nt, Human
acucaguuuguca

SEQ ID NO: 3565515 - RNA, 14 nt, Human
acucaguuugucag

SEQ ID NO: 3565516 - RNA, 15 nt, Human
acucaguuugucaga

SEQ ID NO: 3565517 - RNA, 22 nt, Human
acucaguuuuaacuagaauuua

SEQ ID NO: 3565518 - RNA, 15 nt, Human
acucauaaugugaag

SEQ ID NO: 3565519 - RNA, 15 nt, Human
acucauacaucuggc

SEQ ID NO: 3565520 - RNA, 23 nt, Human
acucauauaauuauauguuguaa

SEQ ID NO: 3565521 - RNA, 13 nt, Human
acucauauuacug

SEQ ID NO: 3565522 - RNA, 12 nt, Human
acucaucauaaa

SEQ ID NO: 3565523 - RNA, 16 nt, Human
acucaucauaaaauaa

SEQ ID NO: 3565524 - RNA, 18 nt, Human
acucaucuagguaaauua

SEQ ID NO: 3565525 - RNA, 16 nt, Human
acucaucugaaauguu

SEQ ID NO: 3565526 - RNA, 12 nt, Human
acucaucuuagg

SEQ ID NO: 3565527 - RNA, 22 nt, Human
acucaucuuagugccugagagu

SEQ ID NO: 3565528 - RNA, 21 nt, Human
acucaucuuucauuaaaggcu

SEQ ID NO: 3565529 - RNA, 18 nt, Human
acucaucuuucccuccuu

SEQ ID NO: 3565530 - RNA, 16 nt, Human
acucaugcauuguccu

SEQ ID NO: 3565531 - RNA, 12 nt, Human
acucaugcugaa

SEQ ID NO: 3565532 - RNA, 15 nt, Human
acucaugugacucuu

SEQ ID NO: 3565533 - RNA, 18 nt, Human
acucaugugacucuuucc

SEQ ID NO: 3565534 - RNA, 19 nt, Human
acucaugugacucuuucca

SEQ ID NO: 3565535 - RNA, 11 nt, Human
acucaugugua

SEQ ID NO: 3565536 - RNA, 14 nt, Human
acucauguuaauug

SEQ ID NO: 3565537 - RNA, 12 nt, Human
acucauuaauua

SEQ ID NO: 3565538 - RNA, 21 nt, Human
acucauuagacuggaacuuga

SEQ ID NO: 3565539 - RNA, 13 nt, Human
acucauucauuag

SEQ ID NO: 3565540 - RNA, 16 nt, Human
acucauucauuaguca

SEQ ID NO: 3565541 - RNA, 15 nt, Human
acucauuccagaucc

SEQ ID NO: 3565542 - RNA, 19 nt, Human
acucauucugaaggagccc

SEQ ID NO: 3565543 - RNA, 16 nt, Human
acucauugaaauguca

SEQ ID NO: 3565544 - RNA, 18 nt, Human
acucauugcugagccucu

SEQ ID NO: 3565545 - RNA, 22 nt, Human
acucauugcugagccucugcuc

SEQ ID NO: 3565546 - RNA, 20 nt, Human
acucauuuaaaguauuuuau

SEQ ID NO: 3565547 - RNA, 20 nt, Human
acucauuuuaaaaaauggaa

SEQ ID NO: 3565548 - RNA, 16 nt, Human
acucauuuucuauaac

SEQ ID NO: 3565549 - RNA, 22 nt, Human
acuccaaacagaccccuguuca

SEQ ID NO: 3565550 - RNA, 14 nt, Human
acuccaaagaaaug

SEQ ID NO: 3565551 - RNA, 15 nt, Human
acuccaaagaaaugu

SEQ ID NO: 3565552 - RNA, 15 nt, Human
acuccaacauccacu

SEQ ID NO: 3565553 - RNA, 18 nt, Human
acuccaacauccacucuc

SEQ ID NO: 3565554 - RNA, 15 nt, Human
acuccaaccuaaccu

SEQ ID NO: 3565555 - RNA, 21 nt, Human
acuccaaccuaaccugugucu

SEQ ID NO: 3565556 - RNA, 20 nt, Human
acuccaacucccuuaaaaua

SEQ ID NO: 3565557 - RNA, 17 nt, Human
acuccaagaacaauugu

SEQ ID NO: 3565558 - RNA, 19 nt, Human
acuccaagauauggacaca

SEQ ID NO: 3565559 - RNA, 18 nt, Human
acuccaagcccagcccau

SEQ ID NO: 3565560 - RNA, 17 nt, Human
acuccaauuaaggauuu

SEQ ID NO: 3565561 - RNA, 13 nt, Human
acuccacacugca

SEQ ID NO: 3565562 - RNA, 17 nt, Human
acuccacaucugccuua

SEQ ID NO: 3565563 - RNA, 20 nt, Human
acuccaccaacccaucagaa

SEQ ID NO: 3565564 - RNA, 14 nt, Human
acuccaccacccaa

SEQ ID NO: 3565565 - RNA, 16 nt, Human
acuccacccuccaccu

SEQ ID NO: 3565566 - RNA, 14 nt, Human
acuccagaaaguga

SEQ ID NO: 3565567 - RNA, 20 nt, Human
acuccagaaaugucccuuuc

SEQ ID NO: 3565568 - RNA, 15 nt, Human
acuccagaucugcac

SEQ ID NO: 3565569 - RNA, 12 nt, Human
acuccagccagc

SEQ ID NO: 3565570 - RNA, 16 nt, Human
acuccagccagcgccu

SEQ ID NO: 3565571 - RNA, 17 nt, Human
acuccagccagcgccuc

SEQ ID NO: 3565572 - RNA, 19 nt, Human
acuccagccagcgccuccc

SEQ ID NO: 3565573 - RNA, 22 nt, Human
acuccagccagcgccucccucc

SEQ ID NO: 3565574 - RNA, 23 nt, Human
acuccagccagcgccucccucca

SEQ ID NO: 3565575 - RNA, 13 nt, Human
acuccagccugag

SEQ ID NO: 3565576 - RNA, 21 nt, Human
acuccagccugggcaacacag

SEQ ID NO: 3565577 - RNA, 20 nt, Human
acuccagcuggguuggaaaa

SEQ ID NO: 3565578 - RNA, 14 nt, Human
acuccaggagagga

SEQ ID NO: 3565579 - RNA, 17 nt, Human
acuccaggcagcagaca

SEQ ID NO: 3565580 - RNA, 14 nt, Human
acuccaggcccaag

SEQ ID NO: 3565581 - RNA, 18 nt, Human
acuccaggcccuccucuc

SEQ ID NO: 3565582 - RNA, 19 nt, Human
acuccaggcccuccucucc

SEQ ID NO: 3565583 - RNA, 14 nt, Human
acuccagugccagc

SEQ ID NO: 3565584 - RNA, 15 nt, Human
acuccagugccagca

SEQ ID NO: 3565585 - RNA, 10 nt, Human
acuccagugg

SEQ ID NO: 3565586 - RNA, 19 nt, Human
acuccaucucaaaaaauaa

SEQ ID NO: 3565587 - RNA, 19 nt, Human
acuccaucugguagaaggg

SEQ ID NO: 3565588 - RNA, 14 nt, Human
acuccauguuggcu

SEQ ID NO: 3565589 - RNA, 14 nt, Human
acuccauucccaac

SEQ ID NO: 3565590 - RNA, 22 nt, Human
acuccauucccaacuagacauu

SEQ ID NO: 3565591 - RNA, 15 nt, Human
acucccaaagagcug

SEQ ID NO: 3565592 - RNA, 16 nt, Human
acucccaaagagcugc

SEQ ID NO: 3565593 - RNA, 14 nt, Human
acucccaagaacag

SEQ ID NO: 3565594 - RNA, 19 nt, Human
acucccaagaacagcaggc

SEQ ID NO: 3565595 - RNA, 23 nt, Human
acucccaaguaugggguucaaga

SEQ ID NO: 3565596 - RNA, 19 nt, Human
acucccacccagucucugc

SEQ ID NO: 3565597 - RNA, 14 nt, Human
acucccaccugaca

SEQ ID NO: 3565598 - RNA, 15 nt, Human
acucccaugaagccu

SEQ ID NO: 3565599 - RNA, 16 nt, Human
acucccaugaagccuu

SEQ ID NO: 3565600 - RNA, 17 nt, Human
acucccaugaagccuuu

SEQ ID NO: 3565601 - RNA, 18 nt, Human
acucccaugaagccuuuu

SEQ ID NO: 3565602 - RNA, 17 nt, Human
acucccaugagggagau

SEQ ID NO: 3565603 - RNA, 15 nt, Human
acuccccaaccccca

SEQ ID NO: 3565604 - RNA, 19 nt, Human
acuccccagccugggccca

SEQ ID NO: 3565605 - RNA, 12 nt, Human
acuccccaggcc

SEQ ID NO: 3565606 - RNA, 16 nt, Human
acuccccgaagucuuu

SEQ ID NO: 3565607 - RNA, 17 nt, Human
acuccccgaagucuuuu

SEQ ID NO: 3565608 - RNA, 19 nt, Human
acuccccgccguacaguuc

SEQ ID NO: 3565609 - RNA, 11 nt, Human
acuccccucca

SEQ ID NO: 3565610 - RNA, 12 nt, Human
acuccccuccuu

SEQ ID NO: 3565611 - RNA, 16 nt, Human
acuccccugcacugga

SEQ ID NO: 3565612 - RNA, 17 nt, Human
acuccccugcugggugu

SEQ ID NO: 3565613 - RNA, 21 nt, Human
acuccccuguuucaaucacug

SEQ ID NO: 3565614 - RNA, 18 nt, Human
acucccggcacuccaugc

SEQ ID NO: 3565615 - RNA, 15 nt, Human
acucccucacaagug

SEQ ID NO: 3565616 - RNA, 13 nt, Human
acucccuccagca

SEQ ID NO: 3565617 - RNA, 14 nt, Human
acucccuccagcac

SEQ ID NO: 3565618 - RNA, 18 nt, Human
acucccuccuaaccuaga

SEQ ID NO: 3565619 - RNA, 16 nt, Human
acucccuccucaccuc

SEQ ID NO: 3565620 - RNA, 17 nt, Human
acucccugcagaugcca

SEQ ID NO: 3565621 - RNA, 17 nt, Human
acucccuggcucucaga

SEQ ID NO: 3565622 - RNA, 13 nt, Human
acucccuucccau

SEQ ID NO: 3565623 - RNA, 21 nt, Human
acucccuucccaugacccagg

SEQ ID NO: 3565624 - RNA, 15 nt, Human
acucccuucuaccug

SEQ ID NO: 3565625 - RNA, 17 nt, Human
acucccuucuaccugcc

SEQ ID NO: 3565626 - RNA, 21 nt, Human
acucccuucuaccugccacuc

SEQ ID NO: 3565627 - RNA, 13 nt, Human
acucccuucuccu

SEQ ID NO: 3565628 - RNA, 17 nt, Human
acucccuugcuggcccc

SEQ ID NO: 3565629 - RNA, 18 nt, Human
acucccuugcuggcccca

SEQ ID NO: 3565630 - RNA, 23 nt, Human
acucccuugcuggccccagcccu

SEQ ID NO: 3565631 - RNA, 12 nt, Human
acucccuuucaa

SEQ ID NO: 3565632 - RNA, 18 nt, Human
acuccgagugaacugguc

SEQ ID NO: 3565633 - RNA, 12 nt, Human
acuccgccccca

SEQ ID NO: 3565634 - RNA, 15 nt, Human
acuccgcccccagcc

SEQ ID NO: 3565635 - RNA, 18 nt, Human
acuccgcccccagccuau

SEQ ID NO: 3565636 - RNA, 23 nt, Human
acuccggagugagaagcuuugcc

SEQ ID NO: 3565637 - RNA, 16 nt, Human
acuccggcccuccaga

SEQ ID NO: 3565638 - RNA, 15 nt, Human
acuccggcccuccua

SEQ ID NO: 3565639 - RNA, 17 nt, Human
agccccucccaccacag

SEQ ID NO: 3565640 - RNA, 23 nt, Human
agccccucccaccacagcaggug

SEQ ID NO: 3565641 - RNA, 18 nt, Human
agccccucccccaucucc

SEQ ID NO: 3565642 - RNA, 11 nt, Human
agccccuccuc

SEQ ID NO: 3565643 - RNA, 13 nt, Human
agccccuccucca

SEQ ID NO: 3565644 - RNA, 20 nt, Human
agccccuccuccagccccug

SEQ ID NO: 3565645 - RNA, 21 nt, Human
agccccuccuccagccccugu

SEQ ID NO: 3565646 - RNA, 21 nt, Human
agccccuccucugccaccucc

SEQ ID NO: 3565647 - RNA, 22 nt, Human
agccccucuggucgcuccugcc

SEQ ID NO: 3565648 - RNA, 16 nt, Human
agccccucuugccccc

SEQ ID NO: 3565649 - RNA, 20 nt, Human
agccccucuugccccccacc

SEQ ID NO: 3565650 - RNA, 23 nt, Human
agccccucuugccccccacccca

SEQ ID NO: 3565651 - RNA, 23 nt, Human
agccccucuuggagaagucucag

SEQ ID NO: 3565652 - RNA, 16 nt, Human
agccccugaaagccau

SEQ ID NO: 3565653 - RNA, 16 nt, Human
agccccugccccagcc

SEQ ID NO: 3565654 - RNA, 14 nt, Human
agccccugccccuc

SEQ ID NO: 3565655 - RNA, 18 nt, Human
agccccugccccucaugc

SEQ ID NO: 3565656 - RNA, 16 nt, Human
agccccugccccuccu

SEQ ID NO: 3565657 - RNA, 13 nt, Human
agccccuggggcc

SEQ ID NO: 3565658 - RNA, 17 nt, Human
agccccuggggccuaga

SEQ ID NO: 3565659 - RNA, 22 nt, Human
agccccuggggccuagacucug

SEQ ID NO: 3565660 - RNA, 21 nt, Human
agccccugggguggccaccag

SEQ ID NO: 3565661 - RNA, 12 nt, Human
agccccugggug

SEQ ID NO: 3565662 - RNA, 17 nt, Human
agccgagagccugcucc

SEQ ID NO: 3565663 - RNA, 21 nt, Human
agccgagauagccaaggccaa

SEQ ID NO: 3565664 - RNA, 14 nt, Human
agccgagcaggagg

SEQ ID NO: 3565665 - RNA, 17 nt, Human
agccgagccgggccugg

SEQ ID NO: 3565666 - RNA, 23 nt, Human
agccgagcucguguauccugggg

SEQ ID NO: 3565667 - RNA, 19 nt, Human
agccgauaucagaauuugu

SEQ ID NO: 3565668 - RNA, 18 nt, Human
agccgcagccucccucug

SEQ ID NO: 3565669 - RNA, 13 nt, Human
agccgccacaucc

SEQ ID NO: 3565670 - RNA, 18 nt, Human
agccgccaguacuuguca

SEQ ID NO: 3565671 - RNA, 17 nt, Human
agccgccauugccacca

SEQ ID NO: 3565672 - RNA, 19 nt, Human
agccgccauugccaccagg

SEQ ID NO: 3565673 - RNA, 15 nt, Human
agccgcccaaggccu

SEQ ID NO: 3565674 - RNA, 15 nt, Human
agccgccuuccuuga

SEQ ID NO: 3565675 - RNA, 13 nt, Human
agccgcuccagag

SEQ ID NO: 3565676 - RNA, 15 nt, Human
agccgcucuccugcc

SEQ ID NO: 3565677 - RNA, 12 nt, Human
agccgcugcccg

SEQ ID NO: 3565678 - RNA, 21 nt, Human
agccggagccuccagcugccc

SEQ ID NO: 3565679 - RNA, 19 nt, Human
agccggagugacagaguaa

SEQ ID NO: 3565680 - RNA, 14 nt, Human
agccggcacagggu

SEQ ID NO: 3565681 - RNA, 16 nt, Human
agccggcacagggucu

SEQ ID NO: 3565682 - RNA, 18 nt, Human
agccggccucucuggccu

SEQ ID NO: 3565683 - RNA, 14 nt, Human
agccgggagccuga

SEQ ID NO: 3565684 - RNA, 22 nt, Human
agccgggcgugguggcaggcac

SEQ ID NO: 3565685 - RNA, 15 nt, Human
agccggggccugccu

SEQ ID NO: 3565686 - RNA, 19 nt, Human
agccggggccugccuagca

SEQ ID NO: 3565687 - RNA, 13 nt, Human
agccggggccuua

SEQ ID NO: 3565688 - RNA, 16 nt, Human
agccgggguggggugg

SEQ ID NO: 3565689 - RNA, 23 nt, Human
agccggggugggguggcugcagc

SEQ ID NO: 3565690 - RNA, 22 nt, Human
agccgggucugccucuucuggg

SEQ ID NO: 3565691 - RNA, 18 nt, Human
agccgguaacuguccugu

SEQ ID NO: 3565692 - RNA, 20 nt, Human
agccgguaacuguccugucc

SEQ ID NO: 3565693 - RNA, 21 nt, Human
agccgguaacuguccuguccu

SEQ ID NO: 3565694 - RNA, 21 nt, Human
agccgguuccugucccugcgc

SEQ ID NO: 3565695 - RNA, 16 nt, Human
agccgucagccaaaug

SEQ ID NO: 3565696 - RNA, 12 nt, Human
agccguccuggc

SEQ ID NO: 3565697 - RNA, 17 nt, Human
agccgugaacugugcau

SEQ ID NO: 3565698 - RNA, 22 nt, Human
agccguggcuucccgcucagcc

SEQ ID NO: 3565699 - RNA, 16 nt, Human
agccuaaaaauaaagc

SEQ ID NO: 3565700 - RNA, 18 nt, Human
agccuaagaugaagagga

SEQ ID NO: 3565701 - RNA, 18 nt, Human
agccuaaggcuccuguuu

SEQ ID NO: 3565702 - RNA, 19 nt, Human
agccuaaggcuccuguuuu

SEQ ID NO: 3565703 - RNA, 15 nt, Human
agccuaauacaacau

SEQ ID NO: 3565704 - RNA, 12 nt, Human
agccuaaucaca

SEQ ID NO: 3565705 - RNA, 16 nt, Human
agccuacagaugaacu

SEQ ID NO: 3565706 - RNA, 13 nt, Human
agccuacaggccu

SEQ ID NO: 3565707 - RNA, 21 nt, Human
agccuacuagggaccugggga

SEQ ID NO: 3565708 - RNA, 17 nt, Human
agccuagaagagcuucu

SEQ ID NO: 3565709 - RNA, 19 nt, Human
agccuagaagagcuucuga

SEQ ID NO: 3565710 - RNA, 18 nt, Human
agccuagaagcugguggc

SEQ ID NO: 3565711 - RNA, 19 nt, Human
agccuagccgaccucagcc

SEQ ID NO: 3565712 - RNA, 18 nt, Human
agccuaggaccacucagc

SEQ ID NO: 3565713 - RNA, 19 nt, Human
agccuaggaccacucagcc

SEQ ID NO: 3565714 - RNA, 21 nt, Human
agccuaggaccacucagcccc

SEQ ID NO: 3565715 - RNA, 22 nt, Human
agccuaggaccacucagccccu

SEQ ID NO: 3565716 - RNA, 17 nt, Human
agccuaggugacagagu

SEQ ID NO: 3565717 - RNA, 14 nt, Human
agccuagugaaggc

SEQ ID NO: 3565718 - RNA, 14 nt, Human
agccuaguucaucc

SEQ ID NO: 3565719 - RNA, 15 nt, Human
agccuaguucaucca

SEQ ID NO: 3565720 - RNA, 17 nt, Human
agccuaguucauccaau

SEQ ID NO: 3565721 - RNA, 20 nt, Human
agccuaguucauccaauccu

SEQ ID NO: 3565722 - RNA, 19 nt, Human
agccuaguuuuuaauagcu

SEQ ID NO: 3565723 - RNA, 17 nt, Human
agccuaucaaagaccuu

SEQ ID NO: 3565724 - RNA, 11 nt, Human
agccuauggca

SEQ ID NO: 3565725 - RNA, 18 nt, Human
agccucaaaacaaaggcc

SEQ ID NO: 3565726 - RNA, 20 nt, Human
agccucaaauccaggacccu

SEQ ID NO: 3565727 - RNA, 22 nt, Human
agccucaaauccaggacccugc

SEQ ID NO: 3565728 - RNA, 18 nt, Human
agccucaaccuccugggc

SEQ ID NO: 3565729 - RNA, 19 nt, Human
agccucaaccuccugggcu

SEQ ID NO: 3565730 - RNA, 22 nt, Human
agccucaagguuuuagguucua

SEQ ID NO: 3565731 - RNA, 23 nt, Human
agccucaagguuuuagguucuaa

SEQ ID NO: 3565732 - RNA, 18 nt, Human
agccucacagcagugaga

SEQ ID NO: 3565733 - RNA, 17 nt, Human
agccucacugauauauu

SEQ ID NO: 3565734 - RNA, 23 nt, Human
agccucacuggggcagacaauaa

SEQ ID NO: 3565735 - RNA, 22 nt, Human
agccucacuuggucugccaggc

SEQ ID NO: 3565736 - RNA, 22 nt, Human
agccucacuuuuaaugaacaaa

SEQ ID NO: 3565737 - RNA, 14 nt, Human
agccucagacugga

SEQ ID NO: 3565738 - RNA, 23 nt, Human
agccucagagacaucagcccuug

SEQ ID NO: 3565739 - RNA, 18 nt, Human
agccucagauuccuuccc

SEQ ID NO: 3565740 - RNA, 23 nt, Human
agccucagauuccuucccaugga

SEQ ID NO: 3565741 - RNA, 15 nt, Human
agccucagcauccug

SEQ ID NO: 3565742 - RNA, 22 nt, Human
agccucagcccccugcuucagu

SEQ ID NO: 3565743 - RNA, 22 nt, Human
agccucagcgcggcccucccga

SEQ ID NO: 3565744 - RNA, 19 nt, Human
agccucaggacugggagcc

SEQ ID NO: 3565745 - RNA, 23 nt, Human
agccucaggacugggagccccca

SEQ ID NO: 3565746 - RNA, 19 nt, Human
agccucaguccuccccuca

SEQ ID NO: 3565747 - RNA, 20 nt, Human
agccucaguccuccccucac

SEQ ID NO: 3565748 - RNA, 16 nt, Human
agccucagucucccuc

SEQ ID NO: 3565749 - RNA, 19 nt, Human
agccucagucucccucccu

SEQ ID NO: 3565750 - RNA, 20 nt, Human
agccucagucucccucccuu

SEQ ID NO: 3565751 - RNA, 21 nt, Human
agccucagugacccuggcucc

SEQ ID NO: 3565752 - RNA, 15 nt, Human
agccucauauuuaaa

SEQ ID NO: 3565753 - RNA, 18 nt, Human
agccucauccgaggcagg

SEQ ID NO: 3565754 - RNA, 15 nt, Human
agccucauguccacu

SEQ ID NO: 3565755 - RNA, 14 nt, Human
agccuccaauuuuu

SEQ ID NO: 3565756 - RNA, 12 nt, Human
agccuccacagc

SEQ ID NO: 3565757 - RNA, 22 nt, Human
agccuccacagcgagggcagcu

SEQ ID NO: 3565758 - RNA, 14 nt, Human
agccuccagccucu

SEQ ID NO: 3565759 - RNA, 17 nt, Human
agccuccauuuaguucu

SEQ ID NO: 3565760 - RNA, 16 nt, Human
agccucccaaagugcu

SEQ ID NO: 3565761 - RNA, 18 nt, Human
agccucccaaagugcugg

SEQ ID NO: 3565762 - RNA, 20 nt, Human
agccucccaaagugcuggga

SEQ ID NO: 3565763 - RNA, 19 nt, Human
agccucccaaggagaacaa

SEQ ID NO: 3565764 - RNA, 14 nt, Human
agccucccacagug

SEQ ID NO: 3565765 - RNA, 18 nt, Human
agccucccgaauagcugg

SEQ ID NO: 3565766 - RNA, 18 nt, Human
agccucccgaguagcugg

SEQ ID NO: 3565767 - RNA, 13 nt, Human
agccucccucuga

SEQ ID NO: 3565768 - RNA, 14 nt, Human
agccucccucugac

SEQ ID NO: 3565769 - RNA, 15 nt, Human
agccucccucugacc

SEQ ID NO: 3565770 - RNA, 16 nt, Human
agccuccgagagggag

SEQ ID NO: 3565771 - RNA, 13 nt, Human
agccuccggaagc

SEQ ID NO: 3565772 - RNA, 14 nt, Human
agccuccuccagcc

SEQ ID NO: 3565773 - RNA, 12 nt, Human
agccuccucugg

SEQ ID NO: 3565774 - RNA, 13 nt, Human
agccuccucugga

SEQ ID NO: 3565775 - RNA, 14 nt, Human
agccuccucuggac

SEQ ID NO: 3565776 - RNA, 20 nt, Human
agccuccucugucugcccuu

SEQ ID NO: 3565777 - RNA, 19 nt, Human
agccuccugaccugaggcu

SEQ ID NO: 3565778 - RNA, 20 nt, Human
agccuccugaguagcuggga

SEQ ID NO: 3565779 - RNA, 14 nt, Human
agccuccugcccag

SEQ ID NO: 3565780 - RNA, 15 nt, Human
agccuccugcccagu

SEQ ID NO: 3565781 - RNA, 14 nt, Human
agccuccugcccuu

SEQ ID NO: 3565782 - RNA, 17 nt, Human
agccuccugcugccaca

SEQ ID NO: 3565783 - RNA, 15 nt, Human
agccucgaacuccug

SEQ ID NO: 3565784 - RNA, 19 nt, Human
agccucgaacuccugggcu

SEQ ID NO: 3565785 - RNA, 21 nt, Human
agccucgaacuccugggcuca

SEQ ID NO: 3565786 - RNA, 22 nt, Human
agccucgaggugccuucuucag

SEQ ID NO: 3565787 - RNA, 23 nt, Human
agccucgcaacccgugccaaguc

SEQ ID NO: 3565788 - RNA, 15 nt, Human
agccucgccccuggc

SEQ ID NO: 3565789 - RNA, 13 nt, Human
agccucgcucugu

SEQ ID NO: 3565790 - RNA, 16 nt, Human
agccucgucuucauua

SEQ ID NO: 3565791 - RNA, 16 nt, Human
agccucguuggaagag

SEQ ID NO: 3565792 - RNA, 20 nt, Human
agccucuagggaccccuccu

SEQ ID NO: 3565793 - RNA, 22 nt, Human
agccucuauccuacaaggccua

SEQ ID NO: 3565794 - RNA, 16 nt, Human
agccucuccacucaug

SEQ ID NO: 3565795 - RNA, 23 nt, Human
agccucuccaggcaccaucuccc

SEQ ID NO: 3565796 - RNA, 16 nt, Human
agccucuccccagguc

SEQ ID NO: 3565797 - RNA, 20 nt, Human
agccucuccccugccugccc

SEQ ID NO: 3565798 - RNA, 15 nt, Human
agccucucucccagu

SEQ ID NO: 3565799 - RNA, 21 nt, Human
agccucucuuccuaucccauc

SEQ ID NO: 3565800 - RNA, 16 nt, Human
caccguuaucgguguc

SEQ ID NO: 3565801 - RNA, 15 nt, Human
caccguucugugcac

SEQ ID NO: 3565802 - RNA, 17 nt, Human
caccuaaagaaaaacaa

SEQ ID NO: 3565803 - RNA, 14 nt, Human
caccuaaagcagcc

SEQ ID NO: 3565804 - RNA, 23 nt, Human
caccuaaauaaccaaucuacaau

SEQ ID NO: 3565805 - RNA, 19 nt, Human
caccuaaucaggcugaggu

SEQ ID NO: 3565806 - RNA, 22 nt, Human
caccuaauccaggcagauccag

SEQ ID NO: 3565807 - RNA, 15 nt, Human
caccuaauuaauuuc

SEQ ID NO: 3565808 - RNA, 21 nt, Human
caccuaauucgaugaaggcug

SEQ ID NO: 3565809 - RNA, 17 nt, Human
caccuacaauacaucug

SEQ ID NO: 3565810 - RNA, 16 nt, Human
caccuacaguguacag

SEQ ID NO: 3565811 - RNA, 20 nt, Human
caccuacaguguacagucuu

SEQ ID NO: 3565812 - RNA, 18 nt, Human
caccuaccacucacauga

SEQ ID NO: 3565813 - RNA, 22 nt, Human
caccuaccaucagggacaggau

SEQ ID NO: 3565814 - RNA, 19 nt, Human
caccuaccuucaaagcuga

SEQ ID NO: 3565815 - RNA, 22 nt, Human
caccuacuuuucuuuccucaga

SEQ ID NO: 3565816 - RNA, 14 nt, Human
caccuagagccaga

SEQ ID NO: 3565817 - RNA, 16 nt, Human
caccuagagccagacc

SEQ ID NO: 3565818 - RNA, 12 nt, Human
caccuagccagc

SEQ ID NO: 3565819 - RNA, 15 nt, Human
caccuagccagcugu

SEQ ID NO: 3565820 - RNA, 19 nt, Human
caccuagcugaauguuuuu

SEQ ID NO: 3565821 - RNA, 16 nt, Human
caccuagcuuuauucu

SEQ ID NO: 3565822 - RNA, 24 nt, Human
caccuaggaagccucagauuccuu

SEQ ID NO: 3565823 - RNA, 16 nt, Human
caccuaggccacuccu

SEQ ID NO: 3565824 - RNA, 17 nt, Human
caccuaggcuagggugg

SEQ ID NO: 3565825 - RNA, 19 nt, Human
caccuaguggcuguccagu

SEQ ID NO: 3565826 - RNA, 21 nt, Human
caccuaguggcuguccagugc

SEQ ID NO: 3565827 - RNA, 20 nt, Human
caccuaucucgugggagagc

SEQ ID NO: 3565828 - RNA, 20 nt, Human
caccuaugucauuucauuuc

SEQ ID NO: 3565829 - RNA, 23 nt, Human
caccuaugucauuucauuuccua

SEQ ID NO: 3565830 - RNA, 21 nt, Human
caccuaugugccaacuguugu

SEQ ID NO: 3565831 - RNA, 17 nt, Human
caccuauuaucccagcu

SEQ ID NO: 3565832 - RNA, 19 nt, Human
caccuauuaucccagcugc

SEQ ID NO: 3565833 - RNA, 21 nt, Human
caccuauuaucccagcugccu

SEQ ID NO: 3565834 - RNA, 14 nt, Human
caccuauuucaaaa

SEQ ID NO: 3565835 - RNA, 13 nt, Human
caccuauuuccau

SEQ ID NO: 3565836 - RNA, 12 nt, Human
caccuauuuuag

SEQ ID NO: 3565837 - RNA, 14 nt, Human
caccucacacuccu

SEQ ID NO: 3565838 - RNA, 14 nt, Human
caccucaccccacu

SEQ ID NO: 3565839 - RNA, 18 nt, Human
caccucaccccguuacag

SEQ ID NO: 3565840 - RNA, 13 nt, Human
caccucacucagc

SEQ ID NO: 3565841 - RNA, 15 nt, Human
caccucacucagcac

SEQ ID NO: 3565842 - RNA, 19 nt, Human
caccucacucagcaccacu

SEQ ID NO: 3565843 - RNA, 20 nt, Human
caccucagagacauacaccu

SEQ ID NO: 3565844 - RNA, 15 nt, Human
caccucagagccccg

SEQ ID NO: 3565845 - RNA, 19 nt, Human
caccucagaggcuguucuu

SEQ ID NO: 3565846 - RNA, 19 nt, Human
caccucagaguauggagcu

SEQ ID NO: 3565847 - RNA, 22 nt, Human
caccucagaguauggagcucag

SEQ ID NO: 3565848 - RNA, 18 nt, Human
caccucagauggcagcuu

SEQ ID NO: 3565849 - RNA, 21 nt, Human
caccucagauggcagcuuuua

SEQ ID NO: 3565850 - RNA, 13 nt, Human
caccucagccucc

SEQ ID NO: 3565851 - RNA, 17 nt, Human
caccucagccugcacag

SEQ ID NO: 3565852 - RNA, 11 nt, Human
caccucaguuc

SEQ ID NO: 3565853 - RNA, 23 nt, Human
caccucaguucccuuggccucag

SEQ ID NO: 3565854 - RNA, 17 nt, Human
caccucaugcccacccc

SEQ ID NO: 3565855 - RNA, 20 nt, Human
caccucaugcccacccccug

SEQ ID NO: 3565856 - RNA, 22 nt, Human
caccucaugcccacccccugcc

SEQ ID NO: 3565857 - RNA, 13 nt, Human
caccuccacaguu

SEQ ID NO: 3565858 - RNA, 17 nt, Human
caccuccacauccucca

SEQ ID NO: 3565859 - RNA, 17 nt, Human
caccuccagcccgggag

SEQ ID NO: 3565860 - RNA, 20 nt, Human
caccuccagcccgggagccu

SEQ ID NO: 3565861 - RNA, 22 nt, Human
caccuccagcccgggagccuag

SEQ ID NO: 3565862 - RNA, 15 nt, Human
caccuccaggccugu

SEQ ID NO: 3565863 - RNA, 13 nt, Human
caccuccaguccc

SEQ ID NO: 3565864 - RNA, 21 nt, Human
caccuccauuaaagucugaau

SEQ ID NO: 3565865 - RNA, 15 nt, Human
caccucccagccccu

SEQ ID NO: 3565866 - RNA, 16 nt, Human
caccucccagccccug

SEQ ID NO: 3565867 - RNA, 12 nt, Human
caccucccagga

SEQ ID NO: 3565868 - RNA, 14 nt, Human
caccuccccacgcc

SEQ ID NO: 3565869 - RNA, 21 nt, Human
caccuccccacgcccuccccu

SEQ ID NO: 3565870 - RNA, 14 nt, Human
caccuccccagcau

SEQ ID NO: 3565871 - RNA, 15 nt, Human
caccuccccaggccg

SEQ ID NO: 3565872 - RNA, 21 nt, Human
caccucccccaucucuucugg

SEQ ID NO: 3565873 - RNA, 23 nt, Human
caccuccccccacaagugcccuc

SEQ ID NO: 3565874 - RNA, 16 nt, Human
caccuccccccacugc

SEQ ID NO: 3565875 - RNA, 18 nt, Human
caccuccccccacugcag

SEQ ID NO: 3565876 - RNA, 21 nt, Human
caccuccccccacugcaggcc

SEQ ID NO: 3565877 - RNA, 23 nt, Human
caccuccccccacugcaggcccc

SEQ ID NO: 3565878 - RNA, 14 nt, Human
caccuccccuaucc

SEQ ID NO: 3565879 - RNA, 18 nt, Human
caccuccccuauccaccc

SEQ ID NO: 3565880 - RNA, 15 nt, Human
caccuccccuccuug

SEQ ID NO: 3565881 - RNA, 17 nt, Human
caccuccccuugccagc

SEQ ID NO: 3565882 - RNA, 14 nt, Human
caccuccccuuggg

SEQ ID NO: 3565883 - RNA, 20 nt, Human
caccucccuauacugcuugg

SEQ ID NO: 3565884 - RNA, 10 nt, Human
caccucccuc

SEQ ID NO: 3565885 - RNA, 19 nt, Human
caccucccucaaccucauc

SEQ ID NO: 3565886 - RNA, 21 nt, Human
caccucccucaaccucauccu

SEQ ID NO: 3565887 - RNA, 12 nt, Human
caccucccuccc

SEQ ID NO: 3565888 - RNA, 14 nt, Human
caccucccugaccc

SEQ ID NO: 3565889 - RNA, 23 nt, Human
caccucccugcccaggccggcca

SEQ ID NO: 3565890 - RNA, 13 nt, Human
caccucccugccu

SEQ ID NO: 3565891 - RNA, 14 nt, Human
caccucccugccuc

SEQ ID NO: 3565892 - RNA, 17 nt, Human
caccuccuaaaaggccc

SEQ ID NO: 3565893 - RNA, 19 nt, Human
caccuccuaaaaggcccag

SEQ ID NO: 3565894 - RNA, 20 nt, Human
caccuccuaaaaggcccaga

SEQ ID NO: 3565895 - RNA, 15 nt, Human
caccuccugccucag

SEQ ID NO: 3565896 - RNA, 14 nt, Human
caccuccuucaauu

SEQ ID NO: 3565897 - RNA, 12 nt, Human
caccuccuucuc

SEQ ID NO: 3565898 - RNA, 19 nt, Human
caccucgcagguucaagca

SEQ ID NO: 3565899 - RNA, 17 nt, Human
caccucuaacagcacca

SEQ ID NO: 3565900 - RNA, 20 nt, Human
caccucuaacagcaccaaau

SEQ ID NO: 3565901 - RNA, 21 nt, Human
caccucuacccaaacccuagg

SEQ ID NO: 3565902 - RNA, 22 nt, Human
caccucuagguccccauacucc

SEQ ID NO: 3565903 - RNA, 21 nt, Human
caccucucaauauucaauaaa

SEQ ID NO: 3565904 - RNA, 11 nt, Human
caccucuccaa

SEQ ID NO: 3565905 - RNA, 12 nt, Human
caccucuccaag

SEQ ID NO: 3565906 - RNA, 16 nt, Human
caccucuccaagggcu

SEQ ID NO: 3565907 - RNA, 18 nt, Human
caccucuccaagggcuuc

SEQ ID NO: 3565908 - RNA, 13 nt, Human
caccucucccuca

SEQ ID NO: 3565909 - RNA, 19 nt, Human
caccucucccugacccugu

SEQ ID NO: 3565910 - RNA, 17 nt, Human
caccucucccuuggauu

SEQ ID NO: 3565911 - RNA, 15 nt, Human
caccucucucacucc

SEQ ID NO: 3565912 - RNA, 18 nt, Human
caccucugcggaccccag

SEQ ID NO: 3565913 - RNA, 18 nt, Human
caccucuggacuggcuag

SEQ ID NO: 3565914 - RNA, 18 nt, Human
caccucuuaugcacaccu

SEQ ID NO: 3565915 - RNA, 14 nt, Human
caccucuucacccc

SEQ ID NO: 3565916 - RNA, 13 nt, Human
caccucuuccgac

SEQ ID NO: 3565917 - RNA, 17 nt, Human
caccucuuccuggccgg

SEQ ID NO: 3565918 - RNA, 13 nt, Human
caccugaacugaa

SEQ ID NO: 3565919 - RNA, 15 nt, Human
caccugaagacucau

SEQ ID NO: 3565920 - RNA, 17 nt, Human
caccugacacaccaggc

SEQ ID NO: 3565921 - RNA, 11 nt, Human
caccugacagc

SEQ ID NO: 3565922 - RNA, 18 nt, Human
caccugacagccccuccc

SEQ ID NO: 3565923 - RNA, 19 nt, Human
caccugacagccccucccu

SEQ ID NO: 3565924 - RNA, 20 nt, Human
caccugacucugaaaucuga

SEQ ID NO: 3565925 - RNA, 16 nt, Human
caccugagcuuuggac

SEQ ID NO: 3565926 - RNA, 19 nt, Human
caccugaggugggcccagg

SEQ ID NO: 3565927 - RNA, 15 nt, Human
caccugaguuccuga

SEQ ID NO: 3565928 - RNA, 18 nt, Human
caccugauucaacuaaaa

SEQ ID NO: 3565929 - RNA, 15 nt, Human
caccugcaccucccc

SEQ ID NO: 3565930 - RNA, 19 nt, Human
caccugcaccuccccccac

SEQ ID NO: 3565931 - RNA, 22 nt, Human
caccugcaccuccccccacugc

SEQ ID NO: 3565932 - RNA, 11 nt, Human
caccugcagcu

SEQ ID NO: 3565933 - RNA, 16 nt, Human
caccugcagcucccuc

SEQ ID NO: 3565934 - RNA, 17 nt, Human
caccugcaucuggggcc

SEQ ID NO: 3565935 - RNA, 15 nt, Human
caccugccacccugg

SEQ ID NO: 3565936 - RNA, 23 nt, Human
caccugccacuaggcugggugcc

SEQ ID NO: 3565937 - RNA, 14 nt, Human
caccugccagccug

SEQ ID NO: 3565938 - RNA, 20 nt, Human
caccugccagccuggcuucu

SEQ ID NO: 3565939 - RNA, 22 nt, Human
caccugccagccuggcuucugg

SEQ ID NO: 3565940 - RNA, 17 nt, Human
caccugccagggacaga

SEQ ID NO: 3565941 - RNA, 18 nt, Human
caccugcccaucacaggg

SEQ ID NO: 3565942 - RNA, 15 nt, Human
caccugccccaacuc

SEQ ID NO: 3565943 - RNA, 21 nt, Human
caccugcccccugguggacag

SEQ ID NO: 3565944 - RNA, 20 nt, Human
caccugcccccuucucccac

SEQ ID NO: 3565945 - RNA, 15 nt, Human
cacgcccccacuggu

SEQ ID NO: 3565946 - RNA, 16 nt, Human
cacgcccguccugccu

SEQ ID NO: 3565947 - RNA, 20 nt, Human
cacgcccguccugccugugg

SEQ ID NO: 3565948 - RNA, 24 nt, Human
cacgcccuccccuccccugcugca

SEQ ID NO: 3565949 - RNA, 18 nt, Human
cacgccuaugaucccagc

SEQ ID NO: 3565950 - RNA, 22 nt, Human
cacgccuaugaucccagcacuu

SEQ ID NO: 3565951 - RNA, 23 nt, Human
cacgccugcaaacgcugccugcc

SEQ ID NO: 3565952 - RNA, 16 nt, Human
cacgccuguaauccca

SEQ ID NO: 3565953 - RNA, 21 nt, Human
cacgccuguaaucccagcagu

SEQ ID NO: 3565954 - RNA, 16 nt, Human
cacgccuuccccucag

SEQ ID NO: 3565955 - RNA, 19 nt, Human
cacgcgccccccucccaga

SEQ ID NO: 3565956 - RNA, 20 nt, Human
cacgcgccccccucccagag

SEQ ID NO: 3565957 - RNA, 22 nt, Human
cacgcgcgcacacacacacaua

SEQ ID NO: 3565958 - RNA, 17 nt, Human
cacgcgcgcgcacacac

SEQ ID NO: 3565959 - RNA, 16 nt, Human
cacgcgugcacacacc

SEQ ID NO: 3565960 - RNA, 21 nt, Human
cacgcgugcacacaccagagc

SEQ ID NO: 3565961 - RNA, 22 nt, Human
cacgcuaaucccgauucacccu

SEQ ID NO: 3565962 - RNA, 16 nt, Human
cacgcuagggcuggcu

SEQ ID NO: 3565963 - RNA, 15 nt, Human
cacgcuccccgccug

SEQ ID NO: 3565964 - RNA, 18 nt, Human
cacgcuccccgccuguuc

SEQ ID NO: 3565965 - RNA, 14 nt, Human
cacgcuccuuccuc

SEQ ID NO: 3565966 - RNA, 17 nt, Human
cacgcugcucugcccca

SEQ ID NO: 3565967 - RNA, 21 nt, Human
cacgcugcucugccccagcuu

SEQ ID NO: 3565968 - RNA, 15 nt, Human
cacgcuggagugcag

SEQ ID NO: 3565969 - RNA, 16 nt, Human
cacgcuggagugcagu

SEQ ID NO: 3565970 - RNA, 19 nt, Human
cacgcuggggaagaauuua

SEQ ID NO: 3565971 - RNA, 14 nt, Human
cacgcugucuccag

SEQ ID NO: 3565972 - RNA, 16 nt, Human
cacgcugucuccagac

SEQ ID NO: 3565973 - RNA, 17 nt, Human
cacgcugucuccagacc

SEQ ID NO: 3565974 - RNA, 18 nt, Human
cacgcugugggcaggugg

SEQ ID NO: 3565975 - RNA, 22 nt, Human
cacgcugugggcaggugggagc

SEQ ID NO: 3565976 - RNA, 20 nt, Human
cacgcuucuucuuuugagca

SEQ ID NO: 3565977 - RNA, 22 nt, Human
cacgcuugacaggacagcaugg

SEQ ID NO: 3565978 - RNA, 13 nt, Human
cacgcuuuuguga

SEQ ID NO: 3565979 - RNA, 15 nt, Human
cacggacaauaaacc

SEQ ID NO: 3565980 - RNA, 21 nt, Human
cacggaccaaagggagucugc

SEQ ID NO: 3565981 - RNA, 17 nt, Human
cacggacguuuccauca

SEQ ID NO: 3565982 - RNA, 21 nt, Human
cacggagccacuccucugacu

SEQ ID NO: 3565983 - RNA, 19 nt, Human
cacggaggaugaugccagu

SEQ ID NO: 3565984 - RNA, 23 nt, Human
cacggaggcauccuacccuuuuc

SEQ ID NO: 3565985 - RNA, 19 nt, Human
cacggaucacgauguaaau

SEQ ID NO: 3565986 - RNA, 21 nt, Human
cacggcaccugggcccugggg

SEQ ID NO: 3565987 - RNA, 22 nt, Human
cacggcaccugggcccuggggc

SEQ ID NO: 3565988 - RNA, 20 nt, Human
cacggcagccacagcuuggg

SEQ ID NO: 3565989 - RNA, 20 nt, Human
cacggcaggacaacgaggaa

SEQ ID NO: 3565990 - RNA, 16 nt, Human
cacggccacacagcug

SEQ ID NO: 3565991 - RNA, 18 nt, Human
cacggccacacagcugcc

SEQ ID NO: 3565992 - RNA, 19 nt, Human
cacggccacacagcugccg

SEQ ID NO: 3565993 - RNA, 13 nt, Human
cacggccaggcca

SEQ ID NO: 3565994 - RNA, 16 nt, Human
cacggccaggccagag

SEQ ID NO: 3565995 - RNA, 21 nt, Human
cacggccccgaagggccccca

SEQ ID NO: 3565996 - RNA, 21 nt, Human
cacggcucuguccccagccug

SEQ ID NO: 3565997 - RNA, 16 nt, Human
cacggcugcgcacugu

SEQ ID NO: 3565998 - RNA, 12 nt, Human
cacgggcagccu

SEQ ID NO: 3565999 - RNA, 24 nt, Human
cacgggccuguccacaggcuucug

SEQ ID NO: 3566000 - RNA, 22 nt, Human
cacggguggggaaaggaggugg

SEQ ID NO: 3566001 - RNA, 15 nt, Human
cacgggugguccccg

SEQ ID NO: 3566002 - RNA, 14 nt, Human
cacgguagugccug

SEQ ID NO: 3566003 - RNA, 17 nt, Human
cacgguauuuauagaga

SEQ ID NO: 3566004 - RNA, 21 nt, Human
cacggucgccaccuggcauuc

SEQ ID NO: 3566005 - RNA, 20 nt, Human
cacggugaauggcuuuguau

SEQ ID NO: 3566006 - RNA, 16 nt, Human
cacgguggcucacgcc

SEQ ID NO: 3566007 - RNA, 14 nt, Human
cacggugggccuug

SEQ ID NO: 3566008 - RNA, 21 nt, Human
cacgguuucgaagucauuaaa

SEQ ID NO: 3566009 - RNA, 23 nt, Human
cacgguuucgaagucauuaaacu

SEQ ID NO: 3566010 - RNA, 23 nt, Human
cacguagcccccaggcugcugga

SEQ ID NO: 3566011 - RNA, 15 nt, Human
cacguauuccccuuc

SEQ ID NO: 3566012 - RNA, 20 nt, Human
cacgucaaaugcauacaagu

SEQ ID NO: 3566013 - RNA, 14 nt, Human
cacgucaugggagg

SEQ ID NO: 3566014 - RNA, 17 nt, Human
cacgucauguuucuuca

SEQ ID NO: 3566015 - RNA, 16 nt, Human
cacguccagaauuuuu

SEQ ID NO: 3566016 - RNA, 16 nt, Human
cacgucccccuggggc

SEQ ID NO: 3566017 - RNA, 17 nt, Human
cacgucccccuggggcu

SEQ ID NO: 3566018 - RNA, 18 nt, Human
cacgucuguaaucccagc

SEQ ID NO: 3566019 - RNA, 14 nt, Human
cacgucugucuuca

SEQ ID NO: 3566020 - RNA, 18 nt, Human
cacgucuuccuucugccu

SEQ ID NO: 3566021 - RNA, 17 nt, Human
cacgugacacaaacaca

SEQ ID NO: 3566022 - RNA, 21 nt, Human
cacgugagaaucccuggcaaa

SEQ ID NO: 3566023 - RNA, 21 nt, Human
cacgugcgcugggcacuuccc

SEQ ID NO: 3566024 - RNA, 19 nt, Human
cacgugcuacccccaugcu

SEQ ID NO: 3566025 - RNA, 20 nt, Human
cacguggaggaaugcucccc

SEQ ID NO: 3566026 - RNA, 18 nt, Human
cacguggaggagcagugc

SEQ ID NO: 3566027 - RNA, 20 nt, Human
cacguggaggagcagugcag

SEQ ID NO: 3566028 - RNA, 21 nt, Human
cacguggaggagcagugcagg

SEQ ID NO: 3566029 - RNA, 19 nt, Human
cacguggcauguggccugu

SEQ ID NO: 3566030 - RNA, 12 nt, Human
cacguggccucu

SEQ ID NO: 3566031 - RNA, 20 nt, Human
cacguggccucuugagcagu

SEQ ID NO: 3566032 - RNA, 23 nt, Human
cacguggccucuugagcaguggc

SEQ ID NO: 3566033 - RNA, 21 nt, Human
cacguggcuucugaugaaucu

SEQ ID NO: 3566034 - RNA, 16 nt, Human
cacgugggcucauaug

SEQ ID NO: 3566035 - RNA, 17 nt, Human
cacgugggcuccccucu

SEQ ID NO: 3566036 - RNA, 18 nt, Human
cacgugggcuccccucuu

SEQ ID NO: 3566037 - RNA, 21 nt, Human
cacgugggcuccccucuuccu

SEQ ID NO: 3566038 - RNA, 16 nt, Human
cacgugguccuaaucu

SEQ ID NO: 3566039 - RNA, 13 nt, Human
cacguguacuggc

SEQ ID NO: 3566040 - RNA, 17 nt, Human
cacguguacuggcuccu

SEQ ID NO: 3566041 - RNA, 18 nt, Human
cacguguacuggcuccuc

SEQ ID NO: 3566042 - RNA, 15 nt, Human
cacguguccuguagu

SEQ ID NO: 3566043 - RNA, 16 nt, Human
cacguguccuguaguu

SEQ ID NO: 3566044 - RNA, 19 nt, Human
cacguguggccuguucuuc

SEQ ID NO: 3566045 - RNA, 18 nt, Human
cacguguguuuuucuauu

SEQ ID NO: 3566046 - RNA, 19 nt, Human
cacguuagaggaaaaauau

SEQ ID NO: 3566047 - RNA, 13 nt, Human
cacguuauggugu

SEQ ID NO: 3566048 - RNA, 13 nt, Human
cacguucaccccu

SEQ ID NO: 3566049 - RNA, 15 nt, Human
cacguucucucugcc

SEQ ID NO: 3566050 - RNA, 13 nt, Human
cacguucuuuccc

SEQ ID NO: 3566051 - RNA, 17 nt, Human
cacguuggggugauuua

SEQ ID NO: 3566052 - RNA, 20 nt, Human
cacguuggggugauuuaauc

SEQ ID NO: 3566053 - RNA, 22 nt, Human
cacguuuuaaggacugacugag

SEQ ID NO: 3566054 - RNA, 14 nt, Human
cacuaaaauuuuag

SEQ ID NO: 3566055 - RNA, 13 nt, Human
cacuaaacaaaga

SEQ ID NO: 3566056 - RNA, 17 nt, Human
cacuaaacagacuauuu

SEQ ID NO: 3566057 - RNA, 22 nt, Human
cacuaaacuuuacccaaaaacu

SEQ ID NO: 3566058 - RNA, 16 nt, Human
cacuaaagcaugaaau

SEQ ID NO: 3566059 - RNA, 16 nt, Human
cacuaaagccagccug

SEQ ID NO: 3566060 - RNA, 15 nt, Human
cacuaaaucagagac

SEQ ID NO: 3566061 - RNA, 19 nt, Human
cacuaaauguuaaagaugu

SEQ ID NO: 3566062 - RNA, 23 nt, Human
cacuaaccaagcugaguuuccua

SEQ ID NO: 3566063 - RNA, 15 nt, Human
cacuaaccacgcugg

SEQ ID NO: 3566064 - RNA, 18 nt, Human
cacuaaccacgcuggacc

SEQ ID NO: 3566065 - RNA, 20 nt, Human
cacuaacuagagcagcccug

SEQ ID NO: 3566066 - RNA, 15 nt, Human
cacuaacucaccagc

SEQ ID NO: 3566067 - RNA, 19 nt, Human
cacuaacucaccagcccca

SEQ ID NO: 3566068 - RNA, 17 nt, Human
cacuaagcagaggaggg

SEQ ID NO: 3566069 - RNA, 20 nt, Human
cacuaagcagaggaggggcc

SEQ ID NO: 3566070 - RNA, 13 nt, Human
cacuaaggggccc

SEQ ID NO: 3566071 - RNA, 22 nt, Human
cacuaagucucuuuuuuacaaa

SEQ ID NO: 3566072 - RNA, 14 nt, Human
cacuaaguuauagu

SEQ ID NO: 3566073 - RNA, 17 nt, Human
cacuaaguuauaguaua

SEQ ID NO: 3566074 - RNA, 15 nt, Human
cacuaauacaccagg

SEQ ID NO: 3566075 - RNA, 11 nt, Human
cacuaauucau

SEQ ID NO: 3566076 - RNA, 22 nt, Human
cacuaauucauuaaucugccuc

SEQ ID NO: 3566077 - RNA, 23 nt, Human
cacuaauugguacuuuuaaaaac

SEQ ID NO: 3566078 - RNA, 15 nt, Human
cacuaauuuuuguau

SEQ ID NO: 3566079 - RNA, 12 nt, Human
cacuacacccag

SEQ ID NO: 3566080 - RNA, 16 nt, Human
cacuacacccagcaau

SEQ ID NO: 3566081 - RNA, 21 nt, Human
cacuacacccagcaauagaga

SEQ ID NO: 3566082 - RNA, 16 nt, Human
cacuacaccuugccuu

SEQ ID NO: 3566083 - RNA, 18 nt, Human
cacuacacuccagccuga

SEQ ID NO: 3566084 - RNA, 18 nt, Human
cacuacaguauuacucuu

SEQ ID NO: 3566085 - RNA, 19 nt, Human
cacuacaugugguuuauag

SEQ ID NO: 3566086 - RNA, 13 nt, Human
cacuacauucugu

SEQ ID NO: 3566087 - RNA, 17 nt, Human
cacuacauucuguuaau

SEQ ID NO: 3566088 - RNA, 14 nt, Human
cacugaugggcaac

SEQ ID NO: 3566089 - RNA, 18 nt, Human
cacugaugggcaaccccc

SEQ ID NO: 3566090 - RNA, 22 nt, Human
cacugauuauaguacugacaga

SEQ ID NO: 3566091 - RNA, 13 nt, Human
cacugauuucaca

SEQ ID NO: 3566092 - RNA, 15 nt, Human
cacugauuuccccuu

SEQ ID NO: 3566093 - RNA, 23 nt, Human
cacugauuuccccuuuugcauuc

SEQ ID NO: 3566094 - RNA, 20 nt, Human
cacugcaaaccgccaccucc

SEQ ID NO: 3566095 - RNA, 15 nt, Human
cacugcaacaggaac

SEQ ID NO: 3566096 - RNA, 16 nt, Human
cacugcaaccuccgcc

SEQ ID NO: 3566097 - RNA, 14 nt, Human
cacugcaaccucug

SEQ ID NO: 3566098 - RNA, 16 nt, Human
cacugcaacuucugcc

SEQ ID NO: 3566099 - RNA, 15 nt, Human
cacugcaagagccuu

SEQ ID NO: 3566100 - RNA, 20 nt, Human
cacugcaaucuccaccuccc

SEQ ID NO: 3566101 - RNA, 20 nt, Human
cacugcaauuggcaccgaag

SEQ ID NO: 3566102 - RNA, 23 nt, Human
cacugcacaauaacuccucccag

SEQ ID NO: 3566103 - RNA, 13 nt, Human
cacugcacagagc

SEQ ID NO: 3566104 - RNA, 15 nt, Human
cacugcacagagcuc

SEQ ID NO: 3566105 - RNA, 21 nt, Human
cacugcacagagcucuccagc

SEQ ID NO: 3566106 - RNA, 21 nt, Human
cacugcacagugcaucucagc

SEQ ID NO: 3566107 - RNA, 23 nt, Human
cacugcacagugcaucucagccc

SEQ ID NO: 3566108 - RNA, 13 nt, Human
cacugcacccccu

SEQ ID NO: 3566109 - RNA, 19 nt, Human
cacugcacccccuccugcu

SEQ ID NO: 3566110 - RNA, 21 nt, Human
cacugcacccccuccugcugc

SEQ ID NO: 3566111 - RNA, 22 nt, Human
cacugcacccccuccugcugca

SEQ ID NO: 3566112 - RNA, 17 nt, Human
cacugcaccccgucuca

SEQ ID NO: 3566113 - RNA, 15 nt, Human
cacugcaccgggcca

SEQ ID NO: 3566114 - RNA, 18 nt, Human
cacugcaccgggccacag

SEQ ID NO: 3566115 - RNA, 19 nt, Human
cacugcacuauagccuagg

SEQ ID NO: 3566116 - RNA, 21 nt, Human
cacugcacucaaccuuaagac

SEQ ID NO: 3566117 - RNA, 19 nt, Human
cacugcacuccagccuggg

SEQ ID NO: 3566118 - RNA, 20 nt, Human
cacugcacuccagccugggu

SEQ ID NO: 3566119 - RNA, 17 nt, Human
cacugcagaaacccuga

SEQ ID NO: 3566120 - RNA, 18 nt, Human
cacugcagccccacccag

SEQ ID NO: 3566121 - RNA, 20 nt, Human
cacugcagccucaaccuccu

SEQ ID NO: 3566122 - RNA, 21 nt, Human
cacugcagccucaaccuccug

SEQ ID NO: 3566123 - RNA, 21 nt, Human
cacugcagccuccgcuucccu

SEQ ID NO: 3566124 - RNA, 12 nt, Human
cacugcaggcac

SEQ ID NO: 3566125 - RNA, 18 nt, Human
cacugcauccuccgccuc

SEQ ID NO: 3566126 - RNA, 14 nt, Human
cacugccacuuugc

SEQ ID NO: 3566127 - RNA, 19 nt, Human
cacugccacuuugcacauu

SEQ ID NO: 3566128 - RNA, 14 nt, Human
cacugccagcagca

SEQ ID NO: 3566129 - RNA, 16 nt, Human
cacugccagcagcagc

SEQ ID NO: 3566130 - RNA, 18 nt, Human
cacugccagcauuucccu

SEQ ID NO: 3566131 - RNA, 14 nt, Human
cacugccaggaggg

SEQ ID NO: 3566132 - RNA, 16 nt, Human
cacugccaggccagcc

SEQ ID NO: 3566133 - RNA, 17 nt, Human
cacugccaggccagccu

SEQ ID NO: 3566134 - RNA, 19 nt, Human
cacugccaggccagccucc

SEQ ID NO: 3566135 - RNA, 16 nt, Human
cacugccauaaaacau

SEQ ID NO: 3566136 - RNA, 14 nt, Human
cacugccauauacu

SEQ ID NO: 3566137 - RNA, 20 nt, Human
cacugccaucuuaguuugga

SEQ ID NO: 3566138 - RNA, 17 nt, Human
cacugccaugcagggcc

SEQ ID NO: 3566139 - RNA, 19 nt, Human
cacugccauggaggcacac

SEQ ID NO: 3566140 - RNA, 13 nt, Human
cacugcccacugg

SEQ ID NO: 3566141 - RNA, 17 nt, Human
cacugcccauggacagg

SEQ ID NO: 3566142 - RNA, 17 nt, Human
cacugcccccugcugcc

SEQ ID NO: 3566143 - RNA, 17 nt, Human
cacugcccucuguucag

SEQ ID NO: 3566144 - RNA, 16 nt, Human
cacugccucucccugg

SEQ ID NO: 3566145 - RNA, 14 nt, Human
cacugccucugccu

SEQ ID NO: 3566146 - RNA, 15 nt, Human
cacugccucugccuu

SEQ ID NO: 3566147 - RNA, 16 nt, Human
cacugccucugccuua

SEQ ID NO: 3566148 - RNA, 16 nt, Human
cacugccucuuccucc

SEQ ID NO: 3566149 - RNA, 13 nt, Human
cacugccugcaga

SEQ ID NO: 3566150 - RNA, 15 nt, Human
cacugccugcccacc

SEQ ID NO: 3566151 - RNA, 15 nt, Human
cacugccugccuuaa

SEQ ID NO: 3566152 - RNA, 19 nt, Human
cacugccugcucccauccu

SEQ ID NO: 3566153 - RNA, 11 nt, Human
cacugccuggg

SEQ ID NO: 3566154 - RNA, 13 nt, Human
cacugccugggcu

SEQ ID NO: 3566155 - RNA, 16 nt, Human
cacugccuguauacuu

SEQ ID NO: 3566156 - RNA, 23 nt, Human
cacugccuguauacuuuaguaug

SEQ ID NO: 3566157 - RNA, 20 nt, Human
cacugccuucgauacaccgg

SEQ ID NO: 3566158 - RNA, 23 nt, Human
cacugccuucgcuucuugccucu

SEQ ID NO: 3566159 - RNA, 12 nt, Human
cacugccuuuga

SEQ ID NO: 3566160 - RNA, 20 nt, Human
cacugcgaagacccucuugc

SEQ ID NO: 3566161 - RNA, 21 nt, Human
cacugcgaagacccucuugcc

SEQ ID NO: 3566162 - RNA, 17 nt, Human
cacugcgccacugcucc

SEQ ID NO: 3566163 - RNA, 20 nt, Human
cacugcuaggcgagugccag

SEQ ID NO: 3566164 - RNA, 22 nt, Human
cacugcuaggcgagugccagga

SEQ ID NO: 3566165 - RNA, 12 nt, Human
cacugcucuggu

SEQ ID NO: 3566166 - RNA, 16 nt, Human
cacugcugcaaggccu

SEQ ID NO: 3566167 - RNA, 14 nt, Human
cacugcuggcugcc

SEQ ID NO: 3566168 - RNA, 18 nt, Human
cacugcuggguggcccau

SEQ ID NO: 3566169 - RNA, 23 nt, Human
cacugcuggguggcccauccccc

SEQ ID NO: 3566170 - RNA, 17 nt, Human
cacugcugugcugugcc

SEQ ID NO: 3566171 - RNA, 21 nt, Human
cacugcuguuauauuucauca

SEQ ID NO: 3566172 - RNA, 14 nt, Human
cacugcuuccagug

SEQ ID NO: 3566173 - RNA, 20 nt, Human
cacugcuuccagugaggcuc

SEQ ID NO: 3566174 - RNA, 21 nt, Human
cacugcuuccagugaggcucu

SEQ ID NO: 3566175 - RNA, 17 nt, Human
cacugcuuccauuuaau

SEQ ID NO: 3566176 - RNA, 13 nt, Human
cacugcuugagga

SEQ ID NO: 3566177 - RNA, 14 nt, Human
cacugcuugaggaa

SEQ ID NO: 3566178 - RNA, 18 nt, Human
cacugcuugaugaagcaa

SEQ ID NO: 3566179 - RNA, 21 nt, Human
cacugcuuuucccuuugugag

SEQ ID NO: 3566180 - RNA, 13 nt, Human
cacugcuuuuggc

SEQ ID NO: 3566181 - RNA, 17 nt, Human
cacugcuuuuggccugg

SEQ ID NO: 3566182 - RNA, 21 nt, Human
cacugcuuuuggucuguguga

SEQ ID NO: 3566183 - RNA, 15 nt, Human
cacuggaaaggggag

SEQ ID NO: 3566184 - RNA, 16 nt, Human
cacuggaaaggggaga

SEQ ID NO: 3566185 - RNA, 19 nt, Human
cacuggaacucagugugac

SEQ ID NO: 3566186 - RNA, 16 nt, Human
cacuggaccacugggc

SEQ ID NO: 3566187 - RNA, 18 nt, Human
cacuggacucaccucccc

SEQ ID NO: 3566188 - RNA, 16 nt, Human
cacuggacuccggccc

SEQ ID NO: 3566189 - RNA, 19 nt, Human
cacuggagacgcauaugag

SEQ ID NO: 3566190 - RNA, 14 nt, Human
cacuggagcccagg

SEQ ID NO: 3566191 - RNA, 16 nt, Human
cacuggaggagagaag

SEQ ID NO: 3566192 - RNA, 22 nt, Human
cacuggaggagagaagaaugag

SEQ ID NO: 3566193 - RNA, 22 nt, Human
cacuggaguggcucgccaggcc

SEQ ID NO: 3566194 - RNA, 19 nt, Human
cacuggaugcaaagaaaau

SEQ ID NO: 3566195 - RNA, 19 nt, Human
cacuggcaaacagggccuc

SEQ ID NO: 3566196 - RNA, 21 nt, Human
cacuggcaaacagggccucug

SEQ ID NO: 3566197 - RNA, 16 nt, Human
cacuggcaaugaaaaa

SEQ ID NO: 3566198 - RNA, 18 nt, Human
cacuggcagacuguguaa

SEQ ID NO: 3566199 - RNA, 14 nt, Human
cacuggcagcccca

SEQ ID NO: 3566200 - RNA, 15 nt, Human
cacuggcagccccag

SEQ ID NO: 3566201 - RNA, 18 nt, Human
cacuggcauugucccugu

SEQ ID NO: 3566202 - RNA, 17 nt, Human
cacuggccacaguuguu

SEQ ID NO: 3566203 - RNA, 18 nt, Human
cacuggccaccaggcugg

SEQ ID NO: 3566204 - RNA, 24 nt, Human
cacuggccccucaaaucguccagc

SEQ ID NO: 3566205 - RNA, 16 nt, Human
cacuggcuaaagauaa

SEQ ID NO: 3566206 - RNA, 13 nt, Human
cacuggcucaccc

SEQ ID NO: 3566207 - RNA, 18 nt, Human
cacuggcucacccagucc

SEQ ID NO: 3566208 - RNA, 19 nt, Human
cacuggcucuccaagugcc

SEQ ID NO: 3566209 - RNA, 14 nt, Human
cacuggcucuccug

SEQ ID NO: 3566210 - RNA, 17 nt, Human
cacuggcugccuccacu

SEQ ID NO: 3566211 - RNA, 19 nt, Human
cacuggcugccuccacucc

SEQ ID NO: 3566212 - RNA, 14 nt, Human
cacuggcugugggc

SEQ ID NO: 3566213 - RNA, 21 nt, Human
cacuggcugugggcucccuuc

SEQ ID NO: 3566214 - RNA, 17 nt, Human
cacugggacuugcaaaa

SEQ ID NO: 3566215 - RNA, 18 nt, Human
cacugggagaaaugaaaa

SEQ ID NO: 3566216 - RNA, 21 nt, Human
cacugggaggccagugagcca

SEQ ID NO: 3566217 - RNA, 20 nt, Human
cacugggaugagccgcugug

SEQ ID NO: 3566218 - RNA, 22 nt, Human
cacugggaugagccgcugugag

SEQ ID NO: 3566219 - RNA, 13 nt, Human
cacugggcuucua

SEQ ID NO: 3566220 - RNA, 18 nt, Human
cacuggggacuuggccuc

SEQ ID NO: 3566221 - RNA, 19 nt, Human
cacuggggacuuggccucu

SEQ ID NO: 3566222 - RNA, 21 nt, Human
cacuggggacuuggccucucu

SEQ ID NO: 3566223 - RNA, 18 nt, Human
cacuggggauugggcccc

SEQ ID NO: 3566224 - RNA, 14 nt, Human
cacuggggccuaca

SEQ ID NO: 3566225 - RNA, 15 nt, Human
cacuggggcucagag

SEQ ID NO: 3566226 - RNA, 20 nt, Human
cacuggggcucagagccggg

SEQ ID NO: 3566227 - RNA, 18 nt, Human
cacugggggaggggacau

SEQ ID NO: 3566228 - RNA, 21 nt, Human
cacugggggaggggacauuga

SEQ ID NO: 3566229 - RNA, 18 nt, Human
cacuggggugccgccugc

SEQ ID NO: 3566230 - RNA, 14 nt, Human
cacugggugguggc

SEQ ID NO: 3566231 - RNA, 20 nt, Human
cacugggugguggccugguc

SEQ ID NO: 3566232 - RNA, 15 nt, Human
cagcagccccacacc

SEQ ID NO: 3566233 - RNA, 13 nt, Human
cagcagcccccag

SEQ ID NO: 3566234 - RNA, 23 nt, Human
cagcagcccccagcucccaccuc

SEQ ID NO: 3566235 - RNA, 16 nt, Human
cagcagccccugcaca

SEQ ID NO: 3566236 - RNA, 23 nt, Human
cagcagccccugcacaaagcccu

SEQ ID NO: 3566237 - RNA, 20 nt, Human
cagcagcccuaaggaucucu

SEQ ID NO: 3566238 - RNA, 12 nt, Human
cagcagcccucc

SEQ ID NO: 3566239 - RNA, 13 nt, Human
cagcagcccuccu

SEQ ID NO: 3566240 - RNA, 19 nt, Human
cagcagcccuccucacccc

SEQ ID NO: 3566241 - RNA, 21 nt, Human
cagcagccucgccccuggcag

SEQ ID NO: 3566242 - RNA, 22 nt, Human
cagcagccucgccccuggcaga

SEQ ID NO: 3566243 - RNA, 23 nt, Human
cagcagccucugaaguuggacag

SEQ ID NO: 3566244 - RNA, 12 nt, Human
cagcagccugcu

SEQ ID NO: 3566245 - RNA, 15 nt, Human
cagcagccugcuucc

SEQ ID NO: 3566246 - RNA, 21 nt, Human
cagcagccugcuucccaccuc

SEQ ID NO: 3566247 - RNA, 22 nt, Human
cagcagccugcuucccaccucc

SEQ ID NO: 3566248 - RNA, 12 nt, Human
cagcagccugga

SEQ ID NO: 3566249 - RNA, 18 nt, Human
cagcagccuggacccugu

SEQ ID NO: 3566250 - RNA, 16 nt, Human
cagcagcgguggccuc

SEQ ID NO: 3566251 - RNA, 14 nt, Human
cagcagcucaggca

SEQ ID NO: 3566252 - RNA, 21 nt, Human
cagcagcuuauaaugggcucu

SEQ ID NO: 3566253 - RNA, 14 nt, Human
cagcaggacugucc

SEQ ID NO: 3566254 - RNA, 19 nt, Human
cagcaggagggacagucuc

SEQ ID NO: 3566255 - RNA, 11 nt, Human
cagcaggcagc

SEQ ID NO: 3566256 - RNA, 19 nt, Human
cagcaggcagccuuggcgg

SEQ ID NO: 3566257 - RNA, 20 nt, Human
cagcaggcucucaggccagc

SEQ ID NO: 3566258 - RNA, 22 nt, Human
cagcaggcucucaggccagcug

SEQ ID NO: 3566259 - RNA, 19 nt, Human
cagcaggcugccagugccu

SEQ ID NO: 3566260 - RNA, 20 nt, Human
cagcaggcugccagugccug

SEQ ID NO: 3566261 - RNA, 24 nt, Human
cagcagggaaaaugcagcagggau

SEQ ID NO: 3566262 - RNA, 18 nt, Human
cagcagggagggcuucug

SEQ ID NO: 3566263 - RNA, 11 nt, Human
cagcagggcag

SEQ ID NO: 3566264 - RNA, 15 nt, Human
cagcagggcaguagc

SEQ ID NO: 3566265 - RNA, 14 nt, Human
cagcagggccucaa

SEQ ID NO: 3566266 - RNA, 17 nt, Human
cagcagggccucaaagu

SEQ ID NO: 3566267 - RNA, 19 nt, Human
cagcagggcuacccugagc

SEQ ID NO: 3566268 - RNA, 17 nt, Human
cagcagggcugcuguga

SEQ ID NO: 3566269 - RNA, 20 nt, Human
cagcagggucuuuucaucug

SEQ ID NO: 3566270 - RNA, 22 nt, Human
cagcagggucuuuucaucuggg

SEQ ID NO: 3566271 - RNA, 19 nt, Human
cagcagguagccugcuggu

SEQ ID NO: 3566272 - RNA, 15 nt, Human
cagcaggugcugcua

SEQ ID NO: 3566273 - RNA, 23 nt, Human
cagcaggugcugcuacccucccu

SEQ ID NO: 3566274 - RNA, 15 nt, Human
cagcaguacaauaaa

SEQ ID NO: 3566275 - RNA, 19 nt, Human
cagcaguaccuauaaagua

SEQ ID NO: 3566276 - RNA, 16 nt, Human
cagcagucucugccuu

SEQ ID NO: 3566277 - RNA, 17 nt, Human
cagcagucuuaugcuuc

SEQ ID NO: 3566278 - RNA, 19 nt, Human
cagcagucuuaugcuucca

SEQ ID NO: 3566279 - RNA, 20 nt, Human
cagcagucuuaugcuuccag

SEQ ID NO: 3566280 - RNA, 22 nt, Human
cagcagucuuaugcuuccagaa

SEQ ID NO: 3566281 - RNA, 22 nt, Human
cagcagugaaaacaagugcugg

SEQ ID NO: 3566282 - RNA, 14 nt, Human
cagcagugagacug

SEQ ID NO: 3566283 - RNA, 20 nt, Human
cagcagugugaggccagggc

SEQ ID NO: 3566284 - RNA, 14 nt, Human
cagcaguguucccc

SEQ ID NO: 3566285 - RNA, 23 nt, Human
cagcaguguuccccaucuggguc

SEQ ID NO: 3566286 - RNA, 18 nt, Human
cagcaguucagagcugcc

SEQ ID NO: 3566287 - RNA, 19 nt, Human
cagcaguucagagcugccc

SEQ ID NO: 3566288 - RNA, 20 nt, Human
cagcaguucagagcugcccu

SEQ ID NO: 3566289 - RNA, 21 nt, Human
cagcaguucagagcugcccuc

SEQ ID NO: 3566290 - RNA, 20 nt, Human
cagcaguugaaaagacucca

SEQ ID NO: 3566291 - RNA, 23 nt, Human
cagcaguugaaugacaacagaag

SEQ ID NO: 3566292 - RNA, 17 nt, Human
cagcaguugcugguaaa

SEQ ID NO: 3566293 - RNA, 18 nt, Human
cagcauaaaggccuuuuu

SEQ ID NO: 3566294 - RNA, 22 nt, Human
cagcauaacaagguccaagaua

SEQ ID NO: 3566295 - RNA, 17 nt, Human
cagcauaagggagcgua

SEQ ID NO: 3566296 - RNA, 19 nt, Human
cagcauaccuuuauuguga

SEQ ID NO: 3566297 - RNA, 18 nt, Human
cagcauauucaggaagcu

SEQ ID NO: 3566298 - RNA, 22 nt, Human
cagcauauuuguauaguugcuu

SEQ ID NO: 3566299 - RNA, 17 nt, Human
cagcaucaccugccugu

SEQ ID NO: 3566300 - RNA, 19 nt, Human
cagcaucaccugccuguua

SEQ ID NO: 3566301 - RNA, 14 nt, Human
cagcaucacucccc

SEQ ID NO: 3566302 - RNA, 17 nt, Human
cagcaucacuccccaag

SEQ ID NO: 3566303 - RNA, 13 nt, Human
cagcaucaggguu

SEQ ID NO: 3566304 - RNA, 23 nt, Human
cagcaucaggguuaagaagacuu

SEQ ID NO: 3566305 - RNA, 19 nt, Human
cagcaucauuuugcauuca

SEQ ID NO: 3566306 - RNA, 20 nt, Human
cagcauccgcaggugcuggu

SEQ ID NO: 3566307 - RNA, 15 nt, Human
cagcauccuggcacc

SEQ ID NO: 3566308 - RNA, 20 nt, Human
cagcauccuggcacccggcc

SEQ ID NO: 3566309 - RNA, 22 nt, Human
cagcauccuuaaguaucagaaa

SEQ ID NO: 3566310 - RNA, 19 nt, Human
cagcaucgcacucuggcag

SEQ ID NO: 3566311 - RNA, 21 nt, Human
cagcaucggacaagaccccca

SEQ ID NO: 3566312 - RNA, 23 nt, Human
cagcaucucccucacugaaacca

SEQ ID NO: 3566313 - RNA, 21 nt, Human
cagcaucucuaccuucucccc

SEQ ID NO: 3566314 - RNA, 14 nt, Human
cagcaucugggccu

SEQ ID NO: 3566315 - RNA, 13 nt, Human
cagcaucuucuca

SEQ ID NO: 3566316 - RNA, 14 nt, Human
cagcaucuucuggu

SEQ ID NO: 3566317 - RNA, 15 nt, Human
cagcaucuucugguu

SEQ ID NO: 3566318 - RNA, 16 nt, Human
cagcaugaaaaugugu

SEQ ID NO: 3566319 - RNA, 21 nt, Human
cagcaugaccugugaccagca

SEQ ID NO: 3566320 - RNA, 17 nt, Human
cagcaugaggaacuagc

SEQ ID NO: 3566321 - RNA, 18 nt, Human
cagcauggcacucccucc

SEQ ID NO: 3566322 - RNA, 19 nt, Human
cagcauggcacucccucca

SEQ ID NO: 3566323 - RNA, 21 nt, Human
cagcauggcacucccuccagc

SEQ ID NO: 3566324 - RNA, 22 nt, Human
cagcauggcacucccuccagca

SEQ ID NO: 3566325 - RNA, 20 nt, Human
cagcaugggcccaggaaugc

SEQ ID NO: 3566326 - RNA, 23 nt, Human
cagcauggucccugccuuaggcc

SEQ ID NO: 3566327 - RNA, 20 nt, Human
cagcauguacggauuuucag

SEQ ID NO: 3566328 - RNA, 16 nt, Human
cagcaugugcccuccu

SEQ ID NO: 3566329 - RNA, 22 nt, Human
cagcauguguauuuccagugca

SEQ ID NO: 3566330 - RNA, 20 nt, Human
cagcauguguuaaucuuaau

SEQ ID NO: 3566331 - RNA, 23 nt, Human
cagcauguguuaaucuuaaugua

SEQ ID NO: 3566332 - RNA, 18 nt, Human
cagcauuacaaauugcuu

SEQ ID NO: 3566333 - RNA, 19 nt, Human
cagcauuaccucuuuggaa

SEQ ID NO: 3566334 - RNA, 16 nt, Human
cagcauuccagccccu

SEQ ID NO: 3566335 - RNA, 19 nt, Human
cagcauucucaggcaccag

SEQ ID NO: 3566336 - RNA, 20 nt, Human
cagcauucucaggcaccagu

SEQ ID NO: 3566337 - RNA, 21 nt, Human
cagcauucuugucacaauaaa

SEQ ID NO: 3566338 - RNA, 17 nt, Human
cagcauugauauuugug

SEQ ID NO: 3566339 - RNA, 20 nt, Human
cagcauugauauuugugcau

SEQ ID NO: 3566340 - RNA, 19 nt, Human
cagcauugcuggacucuga

SEQ ID NO: 3566341 - RNA, 14 nt, Human
cagcauugcugguu

SEQ ID NO: 3566342 - RNA, 16 nt, Human
cagcauuguauaugug

SEQ ID NO: 3566343 - RNA, 23 nt, Human
cagcauuuccacaccaagcagca

SEQ ID NO: 3566344 - RNA, 14 nt, Human
cagcauuugaucug

SEQ ID NO: 3566345 - RNA, 13 nt, Human
cagcauuuuccuc

SEQ ID NO: 3566346 - RNA, 15 nt, Human
cagcauuuuccucug

SEQ ID NO: 3566347 - RNA, 16 nt, Human
cagccaaacacacaga

SEQ ID NO: 3566348 - RNA, 18 nt, Human
cagccaaacacacagaag

SEQ ID NO: 3566349 - RNA, 17 nt, Human
cagccaaacccaugagg

SEQ ID NO: 3566350 - RNA, 15 nt, Human
cagccaaacccuguc

SEQ ID NO: 3566351 - RNA, 17 nt, Human
cagccaaacccugucug

SEQ ID NO: 3566352 - RNA, 13 nt, Human
cagccaacagcua

SEQ ID NO: 3566353 - RNA, 15 nt, Human
cagccaacagcuaca

SEQ ID NO: 3566354 - RNA, 19 nt, Human
cagccaacagcuacaacag

SEQ ID NO: 3566355 - RNA, 22 nt, Human
cagccaacagguggcaggacca

SEQ ID NO: 3566356 - RNA, 15 nt, Human
cagccaaccccugug

SEQ ID NO: 3566357 - RNA, 20 nt, Human
cagccaaccuuacuuacagc

SEQ ID NO: 3566358 - RNA, 21 nt, Human
cagccaacgaguaauuuauug

SEQ ID NO: 3566359 - RNA, 22 nt, Human
cagccaagauuuuccucuugug

SEQ ID NO: 3566360 - RNA, 23 nt, Human
cagccaagauuuuccucuuguga

SEQ ID NO: 3566361 - RNA, 14 nt, Human
cagccaagcacagu

SEQ ID NO: 3566362 - RNA, 16 nt, Human
cagccaagcacagugg

SEQ ID NO: 3566363 - RNA, 14 nt, Human
cagccaagcucugc

SEQ ID NO: 3566364 - RNA, 11 nt, Human
cagccaagcuu

SEQ ID NO: 3566365 - RNA, 13 nt, Human
cagccaagcuugu

SEQ ID NO: 3566366 - RNA, 20 nt, Human
cagccaagggaugaaagaga

SEQ ID NO: 3566367 - RNA, 18 nt, Human
cagccaauuauguuaaac

SEQ ID NO: 3566368 - RNA, 9 nt, Human
cagccacac

SEQ ID NO: 3566369 - RNA, 16 nt, Human
cagccacacacacaga

SEQ ID NO: 3566370 - RNA, 21 nt, Human
cagccacacacacagaaaaua

SEQ ID NO: 3566371 - RNA, 23 nt, Human
cagccacacacacagaaaauaua

SEQ ID NO: 3566372 - RNA, 15 nt, Human
cagccacaugggaaa

SEQ ID NO: 3566373 - RNA, 14 nt, Human
cagccacauuccug

SEQ ID NO: 3566374 - RNA, 19 nt, Human
cagccacauuccugaugcu

SEQ ID NO: 3566375 - RNA, 13 nt, Human
cagccgggcccug

SEQ ID NO: 3566376 - RNA, 16 nt, Human
cagccggggccugccu

SEQ ID NO: 3566377 - RNA, 17 nt, Human
cagccggggcgaguggc

SEQ ID NO: 3566378 - RNA, 20 nt, Human
cagccggggcgaguggcacg

SEQ ID NO: 3566379 - RNA, 15 nt, Human
cagccgguaccuggg

SEQ ID NO: 3566380 - RNA, 18 nt, Human
cagccgucaccccugccu

SEQ ID NO: 3566381 - RNA, 19 nt, Human
cagccgugaugcucaggcu

SEQ ID NO: 3566382 - RNA, 21 nt, Human
cagccguguaaccauggaccc

SEQ ID NO: 3566383 - RNA, 14 nt, Human
cagccuaagagacu

SEQ ID NO: 3566384 - RNA, 16 nt, Human
cagccuaagaugaaga

SEQ ID NO: 3566385 - RNA, 14 nt, Human
cagccuacaggccu

SEQ ID NO: 3566386 - RNA, 12 nt, Human
cagccuacaguu

SEQ ID NO: 3566387 - RNA, 16 nt, Human
cagccuacucuccuug

SEQ ID NO: 3566388 - RNA, 17 nt, Human
cagccuagcacagcagc

SEQ ID NO: 3566389 - RNA, 15 nt, Human
cagccuagccgaccu

SEQ ID NO: 3566390 - RNA, 17 nt, Human
cagccuagccgaccuca

SEQ ID NO: 3566391 - RNA, 16 nt, Human
cagccuaguugaucag

SEQ ID NO: 3566392 - RNA, 19 nt, Human
cagccuaugagcauccuga

SEQ ID NO: 3566393 - RNA, 21 nt, Human
cagccuaugagcauccugagc

SEQ ID NO: 3566394 - RNA, 22 nt, Human
cagccuaugagcauccugagcc

SEQ ID NO: 3566395 - RNA, 17 nt, Human
cagccucaaauccagga

SEQ ID NO: 3566396 - RNA, 21 nt, Human
cagccucaaauccaggacccu

SEQ ID NO: 3566397 - RNA, 18 nt, Human
cagccucaaccuccuggg

SEQ ID NO: 3566398 - RNA, 13 nt, Human
cagccucacagaa

SEQ ID NO: 3566399 - RNA, 21 nt, Human
cagccucacuuggucugccag

SEQ ID NO: 3566400 - RNA, 22 nt, Human
cagccucacuuggucugccagg

SEQ ID NO: 3566401 - RNA, 23 nt, Human
cagccucacuuggucugccaggc

SEQ ID NO: 3566402 - RNA, 17 nt, Human
cagccucagcgcggccc

SEQ ID NO: 3566403 - RNA, 18 nt, Human
cagccucaggacugggag

SEQ ID NO: 3566404 - RNA, 21 nt, Human
cagccucaguccuccccucac

SEQ ID NO: 3566405 - RNA, 20 nt, Human
cagccuccaacacaaggcuc

SEQ ID NO: 3566406 - RNA, 12 nt, Human
cagccuccagcc

SEQ ID NO: 3566407 - RNA, 14 nt, Human
cagccuccagccug

SEQ ID NO: 3566408 - RNA, 15 nt, Human
cagccuccagccugc

SEQ ID NO: 3566409 - RNA, 15 nt, Human
cagccuccaugcugc

SEQ ID NO: 3566410 - RNA, 14 nt, Human
cagccucccaaagu

SEQ ID NO: 3566411 - RNA, 21 nt, Human
cagccucccaaagugcugaga

SEQ ID NO: 3566412 - RNA, 21 nt, Human
cagccucccaaagugcuggga

SEQ ID NO: 3566413 - RNA, 13 nt, Human
cagccucccacag

SEQ ID NO: 3566414 - RNA, 15 nt, Human
cagccucccacagug

SEQ ID NO: 3566415 - RNA, 14 nt, Human
cagccucccacccc

SEQ ID NO: 3566416 - RNA, 16 nt, Human
cagccucccauccagg

SEQ ID NO: 3566417 - RNA, 18 nt, Human
cagccucccauccagggc

SEQ ID NO: 3566418 - RNA, 23 nt, Human
cagccucccccuguccccucuau

SEQ ID NO: 3566419 - RNA, 17 nt, Human
cagccuccccugccagg

SEQ ID NO: 3566420 - RNA, 20 nt, Human
cagccuccccugccagggca

SEQ ID NO: 3566421 - RNA, 20 nt, Human
cagccucccgaguagcuggg

SEQ ID NO: 3566422 - RNA, 22 nt, Human
cagccucccgaguagcugggac

SEQ ID NO: 3566423 - RNA, 23 nt, Human
cagccucccgaguagcugggacu

SEQ ID NO: 3566424 - RNA, 22 nt, Human
cagccucccucugaccugcagg

SEQ ID NO: 3566425 - RNA, 12 nt, Human
cagccucccuga

SEQ ID NO: 3566426 - RNA, 17 nt, Human
cagccucccugaagccu

SEQ ID NO: 3566427 - RNA, 18 nt, Human
cagccuccguauuucaga

SEQ ID NO: 3566428 - RNA, 19 nt, Human
cagccuccguauuucagac

SEQ ID NO: 3566429 - RNA, 22 nt, Human
cagccuccucuggacggcaggc

SEQ ID NO: 3566430 - RNA, 23 nt, Human
cagccuccucugucugcccuuca

SEQ ID NO: 3566431 - RNA, 20 nt, Human
cagccuccugaguagcugga

SEQ ID NO: 3566432 - RNA, 17 nt, Human
cagccucgaacuccugg

SEQ ID NO: 3566433 - RNA, 18 nt, Human
cagccucgaacuccuggg

SEQ ID NO: 3566434 - RNA, 18 nt, Human
cagccucguuggaagagg

SEQ ID NO: 3566435 - RNA, 23 nt, Human
cagccucguuggaagaggaacag

SEQ ID NO: 3566436 - RNA, 19 nt, Human
cagccucucagugcccucc

SEQ ID NO: 3566437 - RNA, 23 nt, Human
cagccucuccaggcaccaucucc

SEQ ID NO: 3566438 - RNA, 14 nt, Human
cagccucuccccag

SEQ ID NO: 3566439 - RNA, 19 nt, Human
cagccucuccccaggucca

SEQ ID NO: 3566440 - RNA, 23 nt, Human
cagccucuccccagguccagcuc

SEQ ID NO: 3566441 - RNA, 17 nt, Human
cagccucuccccugauu

SEQ ID NO: 3566442 - RNA, 16 nt, Human
cagccucucucccagu

SEQ ID NO: 3566443 - RNA, 18 nt, Human
cagccucucucccagucu

SEQ ID NO: 3566444 - RNA, 14 nt, Human
cagccucucuuccu

SEQ ID NO: 3566445 - RNA, 23 nt, Human
cagccucucuuccuaucccaucc

SEQ ID NO: 3566446 - RNA, 15 nt, Human
cagccucugaccccu

SEQ ID NO: 3566447 - RNA, 17 nt, Human
cagccucugaccccucc

SEQ ID NO: 3566448 - RNA, 23 nt, Human
cagccucugacuuaagcugccuc

SEQ ID NO: 3566449 - RNA, 21 nt, Human
cagccucugagccccugggac

SEQ ID NO: 3566450 - RNA, 21 nt, Human
cagccucugggcccacauccg

SEQ ID NO: 3566451 - RNA, 18 nt, Human
cagccucuuggccccaga

SEQ ID NO: 3566452 - RNA, 16 nt, Human
cagccucuuucccuuc

SEQ ID NO: 3566453 - RNA, 17 nt, Human
cagccucuuucuguccc

SEQ ID NO: 3566454 - RNA, 18 nt, Human
cagccugaacagaagcuc

SEQ ID NO: 3566455 - RNA, 22 nt, Human
cagccugaaccccagggcugua

SEQ ID NO: 3566456 - RNA, 20 nt, Human
cagccugagcaacucuugau

SEQ ID NO: 3566457 - RNA, 21 nt, Human
cagccugagcaacucuugauu

SEQ ID NO: 3566458 - RNA, 23 nt, Human
cagccugagcgacagugagacuc

SEQ ID NO: 3566459 - RNA, 15 nt, Human
cagccugaggcugag

SEQ ID NO: 3566460 - RNA, 12 nt, Human
cagccugcagga

SEQ ID NO: 3566461 - RNA, 20 nt, Human
cagccugcaguuaauuagca

SEQ ID NO: 3566462 - RNA, 11 nt, Human
cagccugccac

SEQ ID NO: 3566463 - RNA, 23 nt, Human
cagccugcccaagcccaggccac

SEQ ID NO: 3566464 - RNA, 12 nt, Human
cagccugccugg

SEQ ID NO: 3566465 - RNA, 14 nt, Human
cagccugccuggag

SEQ ID NO: 3566466 - RNA, 19 nt, Human
cagccugccuggcaggcug

SEQ ID NO: 3566467 - RNA, 18 nt, Human
cagccugccuugcccacu

SEQ ID NO: 3566468 - RNA, 15 nt, Human
cagccugcgccugcu

SEQ ID NO: 3566469 - RNA, 18 nt, Human
cagccugcgccugcugca

SEQ ID NO: 3566470 - RNA, 18 nt, Human
cagccugcguggcugacc

SEQ ID NO: 3566471 - RNA, 21 nt, Human
cagccugcguggcugaccccc

SEQ ID NO: 3566472 - RNA, 13 nt, Human
cagccugcuagcu

SEQ ID NO: 3566473 - RNA, 16 nt, Human
cagccugcuagcuagc

SEQ ID NO: 3566474 - RNA, 22 nt, Human
cagccugcuagcuagcucaacu

SEQ ID NO: 3566475 - RNA, 20 nt, Human
cagccugcuccagcuguuca

SEQ ID NO: 3566476 - RNA, 23 nt, Human
cagccugcucuagugggacagcc

SEQ ID NO: 3566477 - RNA, 19 nt, Human
cagccuggaaaccugucug

SEQ ID NO: 3566478 - RNA, 16 nt, Human
cagccuggacauagag

SEQ ID NO: 3566479 - RNA, 13 nt, Human
cagccuggacccc

SEQ ID NO: 3566480 - RNA, 11 nt, Human
cagccuggaug

SEQ ID NO: 3566481 - RNA, 15 nt, Human
cagccuggaugccau

SEQ ID NO: 3566482 - RNA, 17 nt, Human
cagccuggaugccaucc

SEQ ID NO: 3566483 - RNA, 20 nt, Human
cagccuggcacagggcagug

SEQ ID NO: 3566484 - RNA, 21 nt, Human
cagccuggccacgcagccagg

SEQ ID NO: 3566485 - RNA, 13 nt, Human
cagccuggccaga

SEQ ID NO: 3566486 - RNA, 17 nt, Human
cagccuggccagacaca

SEQ ID NO: 3566487 - RNA, 13 nt, Human
cagccuggcccag

SEQ ID NO: 3566488 - RNA, 13 nt, Human
cagccuggccucc

SEQ ID NO: 3566489 - RNA, 17 nt, Human
cagccuggccuccugcc

SEQ ID NO: 3566490 - RNA, 20 nt, Human
cagccuggccuccugccucu

SEQ ID NO: 3566491 - RNA, 21 nt, Human
cagccuggccuccugccucua

SEQ ID NO: 3566492 - RNA, 13 nt, Human
cagccuggcuccc

SEQ ID NO: 3566493 - RNA, 17 nt, Human
cagccuggcuccccugg

SEQ ID NO: 3566494 - RNA, 19 nt, Human
cagccuggcuccccugggg

SEQ ID NO: 3566495 - RNA, 14 nt, Human
cagccuggcuucug

SEQ ID NO: 3566496 - RNA, 19 nt, Human
cagccuggcuucuggagcc

SEQ ID NO: 3566497 - RNA, 12 nt, Human
cagccugggaaa

SEQ ID NO: 3566498 - RNA, 20 nt, Human
cagccugggauaggggcaga

SEQ ID NO: 3566499 - RNA, 18 nt, Human
cagccugggcaacaaagu

SEQ ID NO: 3566500 - RNA, 19 nt, Human
cagccugggcaacagagca

SEQ ID NO: 3566501 - RNA, 16 nt, Human
cagccugggcaaugug

SEQ ID NO: 3566502 - RNA, 20 nt, Human
cagccugggcagcauagcaa

SEQ ID NO: 3566503 - RNA, 18 nt, Human
cagccugggcagccaggc

SEQ ID NO: 3566504 - RNA, 19 nt, Human
cagccugggcagccaggcu

SEQ ID NO: 3566505 - RNA, 20 nt, Human
cagccugggcagccaggcug

SEQ ID NO: 3566506 - RNA, 11 nt, Human
cagccugggcc

SEQ ID NO: 3566507 - RNA, 14 nt, Human
cagccugggcccau

SEQ ID NO: 3566508 - RNA, 15 nt, Human
cagccugggccccag

SEQ ID NO: 3566509 - RNA, 14 nt, Human
cagccugggcgcug

SEQ ID NO: 3566510 - RNA, 20 nt, Human
cagccugggcgcugguccuu

SEQ ID NO: 3566511 - RNA, 16 nt, Human
cagccuggggccuggc

SEQ ID NO: 3566512 - RNA, 19 nt, Human
cagccugguccaugcaggg

SEQ ID NO: 3566513 - RNA, 14 nt, Human
cagccuggucgccu

SEQ ID NO: 3566514 - RNA, 22 nt, Human
cagccugucagauccaggagcu

SEQ ID NO: 3566515 - RNA, 23 nt, Human
cagccugucagauccaggagcuc

SEQ ID NO: 3566516 - RNA, 19 nt, Human
cagccugucccauggacac

SEQ ID NO: 3566517 - RNA, 22 nt, Human
cagccugucccauggacacucc

SEQ ID NO: 3566518 - RNA, 12 nt, Human
cagccuguccug

SEQ ID NO: 3566519 - RNA, 21 nt, Human
cagguggaggugucaggcugc

SEQ ID NO: 3566520 - RNA, 22 nt, Human
cagguggaucuauuucauguuu

SEQ ID NO: 3566521 - RNA, 15 nt, Human
cagguggcaggacca

SEQ ID NO: 3566522 - RNA, 20 nt, Human
cagguggcaggaccaggacu

SEQ ID NO: 3566523 - RNA, 21 nt, Human
cagguggcaggaccaggacua

SEQ ID NO: 3566524 - RNA, 19 nt, Human
cagguggccaaguuccucu

SEQ ID NO: 3566525 - RNA, 19 nt, Human
cagguggccagccuggauc

SEQ ID NO: 3566526 - RNA, 13 nt, Human
cagguggccaugc

SEQ ID NO: 3566527 - RNA, 22 nt, Human
cagguggcucugaggugccugu

SEQ ID NO: 3566528 - RNA, 19 nt, Human
cagguggcugacccagucc

SEQ ID NO: 3566529 - RNA, 21 nt, Human
caggugggcguggucacugcu

SEQ ID NO: 3566530 - RNA, 16 nt, Human
caggugggcuucccag

SEQ ID NO: 3566531 - RNA, 23 nt, Human
caggugggcuucccaguggcugc

SEQ ID NO: 3566532 - RNA, 19 nt, Human
cagguggggagacugggcu

SEQ ID NO: 3566533 - RNA, 22 nt, Human
cagguggggagacugggcugag

SEQ ID NO: 3566534 - RNA, 23 nt, Human
cagguggggagucagggaccccu

SEQ ID NO: 3566535 - RNA, 16 nt, Human
cagguggggcagcuug

SEQ ID NO: 3566536 - RNA, 19 nt, Human
cagguggggucacucuggc

SEQ ID NO: 3566537 - RNA, 20 nt, Human
cagguggggucacucuggca

SEQ ID NO: 3566538 - RNA, 23 nt, Human
cagguggggucacucuggcagcu

SEQ ID NO: 3566539 - RNA, 22 nt, Human
cagguggggugaggcagugggu

SEQ ID NO: 3566540 - RNA, 16 nt, Human
caggugggugucugcg

SEQ ID NO: 3566541 - RNA, 16 nt, Human
caggugguccugagac

SEQ ID NO: 3566542 - RNA, 22 nt, Human
caggugguggcacugagccccc

SEQ ID NO: 3566543 - RNA, 21 nt, Human
caggugguggcugcaaggugg

SEQ ID NO: 3566544 - RNA, 20 nt, Human
cagguggugucacugucccu

SEQ ID NO: 3566545 - RNA, 19 nt, Human
cagguggugucgggcccuu

SEQ ID NO: 3566546 - RNA, 20 nt, Human
caggugguuauggagagggu

SEQ ID NO: 3566547 - RNA, 16 nt, Human
caggugucagccauug

SEQ ID NO: 3566548 - RNA, 16 nt, Human
cagguguccccagccc

SEQ ID NO: 3566549 - RNA, 11 nt, Human
caggugucccu

SEQ ID NO: 3566550 - RNA, 14 nt, Human
caggugucccugca

SEQ ID NO: 3566551 - RNA, 18 nt, Human
caggugucccugcacuug

SEQ ID NO: 3566552 - RNA, 18 nt, Human
caggugucugcccccucu

SEQ ID NO: 3566553 - RNA, 22 nt, Human
caggugugaaccaccacaccca

SEQ ID NO: 3566554 - RNA, 18 nt, Human
caggugugagccaccacg

SEQ ID NO: 3566555 - RNA, 23 nt, Human
caggugugagccaccacgcccgg

SEQ ID NO: 3566556 - RNA, 16 nt, Human
caggugugagggcagu

SEQ ID NO: 3566557 - RNA, 20 nt, Human
caggugugagggcagugcaa

SEQ ID NO: 3566558 - RNA, 22 nt, Human
caggugugguggcucacaccug

SEQ ID NO: 3566559 - RNA, 21 nt, Human
cagguguguccaccugggcau

SEQ ID NO: 3566560 - RNA, 22 nt, Human
cagguguuacuguaauuccuca

SEQ ID NO: 3566561 - RNA, 20 nt, Human
cagguguucuacacucaucu

SEQ ID NO: 3566562 - RNA, 13 nt, Human
cagguguugccaa

SEQ ID NO: 3566563 - RNA, 14 nt, Human
cagguguuuuucca

SEQ ID NO: 3566564 - RNA, 20 nt, Human
cagguuaaauguuuuguaaa

SEQ ID NO: 3566565 - RNA, 14 nt, Human
cagguuaagaaaau

SEQ ID NO: 3566566 - RNA, 13 nt, Human
cagguuacaacag

SEQ ID NO: 3566567 - RNA, 15 nt, Human
cagguuacaacagau

SEQ ID NO: 3566568 - RNA, 16 nt, Human
cagguuacaacagauu

SEQ ID NO: 3566569 - RNA, 23 nt, Human
cagguuaggcaguauaaagaaua

SEQ ID NO: 3566570 - RNA, 15 nt, Human
cagguuauaacagug

SEQ ID NO: 3566571 - RNA, 20 nt, Human
cagguuaucgaaauaacaau

SEQ ID NO: 3566572 - RNA, 24 nt, Human
cagguuaucgaaauaacaauguua

SEQ ID NO: 3566573 - RNA, 21 nt, Human
cagguuauugcaauaaaguau

SEQ ID NO: 3566574 - RNA, 16 nt, Human
cagguuauuuuaguuu

SEQ ID NO: 3566575 - RNA, 13 nt, Human
cagguucagcuug

SEQ ID NO: 3566576 - RNA, 15 nt, Human
cagguuccacagagg

SEQ ID NO: 3566577 - RNA, 15 nt, Human
cagguucccaagcuc

SEQ ID NO: 3566578 - RNA, 14 nt, Human
cagguucccacuua

SEQ ID NO: 3566579 - RNA, 16 nt, Human
cagguucccucccaga

SEQ ID NO: 3566580 - RNA, 15 nt, Human
cagguucugccugcu

SEQ ID NO: 3566581 - RNA, 21 nt, Human
cagguucugguuagcucagcc

SEQ ID NO: 3566582 - RNA, 20 nt, Human
cagguucuucuuccugaagc

SEQ ID NO: 3566583 - RNA, 14 nt, Human
cagguugaacccaa

SEQ ID NO: 3566584 - RNA, 22 nt, Human
cagguugaagaccuaaccaggg

SEQ ID NO: 3566585 - RNA, 11 nt, Human
cagguugacag

SEQ ID NO: 3566586 - RNA, 20 nt, Human
cagguugaggggcuccugga

SEQ ID NO: 3566587 - RNA, 13 nt, Human
cagguugauaaau

SEQ ID NO: 3566588 - RNA, 18 nt, Human
cagguugcugguugcugu

SEQ ID NO: 3566589 - RNA, 21 nt, Human
cagguugcugguugcugugug

SEQ ID NO: 3566590 - RNA, 15 nt, Human
cagguugcuuugccc

SEQ ID NO: 3566591 - RNA, 15 nt, Human
cagguuggaagagaa

SEQ ID NO: 3566592 - RNA, 18 nt, Human
cagguuggaagagaauca

SEQ ID NO: 3566593 - RNA, 20 nt, Human
cagguuggaagagaaucacc

SEQ ID NO: 3566594 - RNA, 22 nt, Human
cagguugggaaugaggcuugcu

SEQ ID NO: 3566595 - RNA, 13 nt, Human
cagguugggccau

SEQ ID NO: 3566596 - RNA, 13 nt, Human
cagguuguuggug

SEQ ID NO: 3566597 - RNA, 15 nt, Human
cagguuuaacauuug

SEQ ID NO: 3566598 - RNA, 16 nt, Human
cagguuuaacauuugc

SEQ ID NO: 3566599 - RNA, 16 nt, Human
cagguuuaagcuguua

SEQ ID NO: 3566600 - RNA, 20 nt, Human
cagguuucuggucucuaggc

SEQ ID NO: 3566601 - RNA, 13 nt, Human
cagguuuguuaca

SEQ ID NO: 3566602 - RNA, 19 nt, Human
cagguuuucacauaaaugc

SEQ ID NO: 3566603 - RNA, 16 nt, Human
cagguuuuccugaaga

SEQ ID NO: 3566604 - RNA, 14 nt, Human
cagguuuugcacuc

SEQ ID NO: 3566605 - RNA, 15 nt, Human
cagguuuuguaaaga

SEQ ID NO: 3566606 - RNA, 13 nt, Human
cagguuuuucaau

SEQ ID NO: 3566607 - RNA, 17 nt, Human
cagguuuuucaauuaaa

SEQ ID NO: 3566608 - RNA, 18 nt, Human
cagguuuuucaauuaaac

SEQ ID NO: 3566609 - RNA, 21 nt, Human
cagguuuuucaauuaaacgga

SEQ ID NO: 3566610 - RNA, 11 nt, Human
cagguuuuucc

SEQ ID NO: 3566611 - RNA, 19 nt, Human
caguaaaaaaaaaaaaugg

SEQ ID NO: 3566612 - RNA, 20 nt, Human
caguaaaaaaugguguuuua

SEQ ID NO: 3566613 - RNA, 11 nt, Human
caguaaaauug

SEQ ID NO: 3566614 - RNA, 16 nt, Human
caguaaaauugccaua

SEQ ID NO: 3566615 - RNA, 20 nt, Human
caguaaaauugccauauugc

SEQ ID NO: 3566616 - RNA, 21 nt, Human
caguaaacacuguguauuguu

SEQ ID NO: 3566617 - RNA, 16 nt, Human
caguaaaccacugaaa

SEQ ID NO: 3566618 - RNA, 18 nt, Human
caguaaaccacugaaaaa

SEQ ID NO: 3566619 - RNA, 15 nt, Human
caguaaagagaaacu

SEQ ID NO: 3566620 - RNA, 16 nt, Human
caguaaagagaaacuu

SEQ ID NO: 3566621 - RNA, 15 nt, Human
caguaaagcacuugc

SEQ ID NO: 3566622 - RNA, 16 nt, Human
caguaaauaaauuguu

SEQ ID NO: 3566623 - RNA, 24 nt, Human
caguaaauaaauuguuugaccaug

SEQ ID NO: 3566624 - RNA, 16 nt, Human
caguaaauaacuggaa

SEQ ID NO: 3566625 - RNA, 23 nt, Human
caguaaauaacuggaaaacagaa

SEQ ID NO: 3566626 - RNA, 12 nt, Human
caguaaaucuuu

SEQ ID NO: 3566627 - RNA, 15 nt, Human
caguaaaugggggug

SEQ ID NO: 3566628 - RNA, 18 nt, Human
caguaaaugggggugcau

SEQ ID NO: 3566629 - RNA, 21 nt, Human
caguaaaugggggugcauuug

SEQ ID NO: 3566630 - RNA, 14 nt, Human
caguaaauuugcua

SEQ ID NO: 3566631 - RNA, 15 nt, Human
caguaaauuugcuag

SEQ ID NO: 3566632 - RNA, 13 nt, Human
caguaacauagcu

SEQ ID NO: 3566633 - RNA, 21 nt, Human
caguaacccccuuaaauuuaa

SEQ ID NO: 3566634 - RNA, 14 nt, Human
caguaacucaucug

SEQ ID NO: 3566635 - RNA, 14 nt, Human
caguaacuugguua

SEQ ID NO: 3566636 - RNA, 16 nt, Human
caguaacuugguuaua

SEQ ID NO: 3566637 - RNA, 18 nt, Human
caguaacuugguuauaca

SEQ ID NO: 3566638 - RNA, 19 nt, Human
caguaacuugguuauacau

SEQ ID NO: 3566639 - RNA, 18 nt, Human
caguaacuuuauguguaa

SEQ ID NO: 3566640 - RNA, 15 nt, Human
caguaagggaaauag

SEQ ID NO: 3566641 - RNA, 18 nt, Human
caguaaguaucuggagga

SEQ ID NO: 3566642 - RNA, 21 nt, Human
caguaaguguuagagggaaca

SEQ ID NO: 3566643 - RNA, 17 nt, Human
caguaauaaaacaucuu

SEQ ID NO: 3566644 - RNA, 17 nt, Human
caguaauaaaugaaugu

SEQ ID NO: 3566645 - RNA, 23 nt, Human
caguaauaagaauggaaaagaga

SEQ ID NO: 3566646 - RNA, 13 nt, Human
caguaauauuuau

SEQ ID NO: 3566647 - RNA, 17 nt, Human
caguaauccuguaggaa

SEQ ID NO: 3566648 - RNA, 21 nt, Human
caguaauccuguaggaaggua

SEQ ID NO: 3566649 - RNA, 13 nt, Human
caguaauguuauu

SEQ ID NO: 3566650 - RNA, 16 nt, Human
caguaauugugaaaau

SEQ ID NO: 3566651 - RNA, 18 nt, Human
caguaauuguguuuacau

SEQ ID NO: 3566652 - RNA, 15 nt, Human
caguaauuuucggau

SEQ ID NO: 3566653 - RNA, 13 nt, Human
caguacaggcagc

SEQ ID NO: 3566654 - RNA, 14 nt, Human
caguacaggcagca

SEQ ID NO: 3566655 - RNA, 20 nt, Human
caguacaggcagcacagaga

SEQ ID NO: 3566656 - RNA, 19 nt, Human
caguacauucucaguuuuu

SEQ ID NO: 3566657 - RNA, 15 nt, Human
caguacauuuaaauu

SEQ ID NO: 3566658 - RNA, 20 nt, Human
caguacauuuaaauuuuuug

SEQ ID NO: 3566659 - RNA, 22 nt, Human
caguacauuuaaauuuuuuggc

SEQ ID NO: 3566660 - RNA, 13 nt, Human
caguacccaccug

SEQ ID NO: 3566661 - RNA, 16 nt, Human
caguacccaccugagc

SEQ ID NO: 3566662 - RNA, 17 nt, Human
caguacccaccugagcu

SEQ ID NO: 3566663 - RNA, 19 nt, Human
caguggggcucucugaguc

SEQ ID NO: 3566664 - RNA, 20 nt, Human
cagugggguuucgcagccug

SEQ ID NO: 3566665 - RNA, 21 nt, Human
cagugggguuucgcagccuga

SEQ ID NO: 3566666 - RNA, 22 nt, Human
cagugggguuucgcagccugag

SEQ ID NO: 3566667 - RNA, 16 nt, Human
caguggguaaaauuag

SEQ ID NO: 3566668 - RNA, 15 nt, Human
cagugggucccacuu

SEQ ID NO: 3566669 - RNA, 13 nt, Human
cagugggugcccc

SEQ ID NO: 3566670 - RNA, 17 nt, Human
cagugguaagcucuggc

SEQ ID NO: 3566671 - RNA, 20 nt, Human
cagugguaagcucuggcuuu

SEQ ID NO: 3566672 - RNA, 19 nt, Human
cagugguccauggaaugcu

SEQ ID NO: 3566673 - RNA, 23 nt, Human
caguggugaagaaaacuccuuua

SEQ ID NO: 3566674 - RNA, 21 nt, Human
caguggugcgaucuggguuca

SEQ ID NO: 3566675 - RNA, 12 nt, Human
cagugguggcag

SEQ ID NO: 3566676 - RNA, 16 nt, Human
cagugguggcagggcc

SEQ ID NO: 3566677 - RNA, 20 nt, Human
caguggugguuuucuguucu

SEQ ID NO: 3566678 - RNA, 21 nt, Human
caguggugguuuucuguucuu

SEQ ID NO: 3566679 - RNA, 22 nt, Human
cagugguucuacaaucuauuua

SEQ ID NO: 3566680 - RNA, 18 nt, Human
cagugguuugagacacug

SEQ ID NO: 3566681 - RNA, 20 nt, Human
cagugguuuuauacugaagg

SEQ ID NO: 3566682 - RNA, 21 nt, Human
cagugguuuuauacugaagga

SEQ ID NO: 3566683 - RNA, 19 nt, Human
caguguaaucccccaggag

SEQ ID NO: 3566684 - RNA, 12 nt, Human
caguguaauuuc

SEQ ID NO: 3566685 - RNA, 17 nt, Human
caguguaauuucuuugc

SEQ ID NO: 3566686 - RNA, 20 nt, Human
caguguaauuucuuugccug

SEQ ID NO: 3566687 - RNA, 12 nt, Human
caguguacaguc

SEQ ID NO: 3566688 - RNA, 17 nt, Human
caguguacagucuugua

SEQ ID NO: 3566689 - RNA, 19 nt, Human
caguguacauaguguaaug

SEQ ID NO: 3566690 - RNA, 16 nt, Human
caguguacauggaaua

SEQ ID NO: 3566691 - RNA, 20 nt, Human
caguguacccccgcccaggc

SEQ ID NO: 3566692 - RNA, 21 nt, Human
caguguacccccgcccaggcu

SEQ ID NO: 3566693 - RNA, 23 nt, Human
caguguacccccgcccaggcugg

SEQ ID NO: 3566694 - RNA, 20 nt, Human
caguguagauuuuauagugu

SEQ ID NO: 3566695 - RNA, 17 nt, Human
caguguaguuaauuuau

SEQ ID NO: 3566696 - RNA, 18 nt, Human
caguguauguagaagcau

SEQ ID NO: 3566697 - RNA, 16 nt, Human
caguguauuucaguuc

SEQ ID NO: 3566698 - RNA, 20 nt, Human
cagugucaaauaaacacugu

SEQ ID NO: 3566699 - RNA, 21 nt, Human
cagugucaaauaaacacugug

SEQ ID NO: 3566700 - RNA, 19 nt, Human
cagugucaaguugugcuug

SEQ ID NO: 3566701 - RNA, 16 nt, Human
cagugucaggcacugg

SEQ ID NO: 3566702 - RNA, 22 nt, Human
cagugucauuucucauccacau

SEQ ID NO: 3566703 - RNA, 13 nt, Human
cagugucauuugc

SEQ ID NO: 3566704 - RNA, 17 nt, Human
caguguccccuccacug

SEQ ID NO: 3566705 - RNA, 19 nt, Human
caguguccccuccacuguc

SEQ ID NO: 3566706 - RNA, 12 nt, Human
caguguccuccc

SEQ ID NO: 3566707 - RNA, 18 nt, Human
caguguccucuugcucaa

SEQ ID NO: 3566708 - RNA, 19 nt, Human
caguguccucuugcucaaa

SEQ ID NO: 3566709 - RNA, 18 nt, Human
caguguccugagcucagc

SEQ ID NO: 3566710 - RNA, 19 nt, Human
cagugucuauaaaagaaac

SEQ ID NO: 3566711 - RNA, 15 nt, Human
cagugucucacagcc

SEQ ID NO: 3566712 - RNA, 11 nt, Human
cagugucugcu

SEQ ID NO: 3566713 - RNA, 15 nt, Human
cagugucugggcuga

SEQ ID NO: 3566714 - RNA, 19 nt, Human
cagugucuguaaaagagcc

SEQ ID NO: 3566715 - RNA, 23 nt, Human
cagugucuguguuuugaaagaau

SEQ ID NO: 3566716 - RNA, 18 nt, Human
cagugucuuccauaaugu

SEQ ID NO: 3566717 - RNA, 16 nt, Human
cagugucuuccugugg

SEQ ID NO: 3566718 - RNA, 18 nt, Human
cagugucuuucuuuggug

SEQ ID NO: 3566719 - RNA, 22 nt, Human
cagugucuuucuuuggugccuu

SEQ ID NO: 3566720 - RNA, 21 nt, Human
cagugucuuuuuuuguauagu

SEQ ID NO: 3566721 - RNA, 23 nt, Human
cagugugaaguacaauaauucau

SEQ ID NO: 3566722 - RNA, 14 nt, Human
cagugugaaguuag

SEQ ID NO: 3566723 - RNA, 15 nt, Human
cagugugaaguuaga

SEQ ID NO: 3566724 - RNA, 20 nt, Human
cagugugaaguuagaauucc

SEQ ID NO: 3566725 - RNA, 18 nt, Human
cagugugaauaaagugcu

SEQ ID NO: 3566726 - RNA, 12 nt, Human
cagugugacuga

SEQ ID NO: 3566727 - RNA, 18 nt, Human
cagugugaggccagggca

SEQ ID NO: 3566728 - RNA, 19 nt, Human
cagugugagggaaagagcu

SEQ ID NO: 3566729 - RNA, 14 nt, Human
cagugugcaaggca

SEQ ID NO: 3566730 - RNA, 18 nt, Human
cagugugcaaggcagccg

SEQ ID NO: 3566731 - RNA, 18 nt, Human
cagugugcacgaguggga

SEQ ID NO: 3566732 - RNA, 19 nt, Human
cagugugcacuaaggggcc

SEQ ID NO: 3566733 - RNA, 13 nt, Human
cagugugcccccc

SEQ ID NO: 3566734 - RNA, 17 nt, Human
cagugugccccccaucc

SEQ ID NO: 3566735 - RNA, 19 nt, Human
cagugugccccccauccug

SEQ ID NO: 3566736 - RNA, 22 nt, Human
cagugugccccccauccuggcc

SEQ ID NO: 3566737 - RNA, 14 nt, Human
cagugugcugaugg

SEQ ID NO: 3566738 - RNA, 21 nt, Human
cagugugggaaugcggcaaga

SEQ ID NO: 3566739 - RNA, 23 nt, Human
cagugugggaaugcggcaagaag

SEQ ID NO: 3566740 - RNA, 13 nt, Human
cagugugucuccu

SEQ ID NO: 3566741 - RNA, 16 nt, Human
cagugugucuccugca

SEQ ID NO: 3566742 - RNA, 21 nt, Human
caguguguggcuuucagagcc

SEQ ID NO: 3566743 - RNA, 14 nt, Human
caguguuagcuuag

SEQ ID NO: 3566744 - RNA, 18 nt, Human
caguguuaggccuggcac

SEQ ID NO: 3566745 - RNA, 20 nt, Human
caguguuaggccuggcacag

SEQ ID NO: 3566746 - RNA, 22 nt, Human
caguguuaggccuggcacagug

SEQ ID NO: 3566747 - RNA, 19 nt, Human
caguguuagggaagggccu

SEQ ID NO: 3566748 - RNA, 19 nt, Human
caguguuccccaucugggu

SEQ ID NO: 3566749 - RNA, 16 nt, Human
caguguucgcuuggcu

SEQ ID NO: 3566750 - RNA, 18 nt, Human
caguguugagccuuuucc

SEQ ID NO: 3566751 - RNA, 14 nt, Human
caguguugucacca

SEQ ID NO: 3566752 - RNA, 22 nt, Human
caguguuguggauuuaacagaa

SEQ ID NO: 3566753 - RNA, 18 nt, Human
caguguuguuuguaaaua

SEQ ID NO: 3566754 - RNA, 20 nt, Human
caguguuguuuguaaauaag

SEQ ID NO: 3566755 - RNA, 21 nt, Human
caguguuguuuguaaauaaga

SEQ ID NO: 3566756 - RNA, 22 nt, Human
caguguuguuuguaaauaagag

SEQ ID NO: 3566757 - RNA, 18 nt, Human
caguguuuauccuuucau

SEQ ID NO: 3566758 - RNA, 18 nt, Human
caguguuucccauaauuu

SEQ ID NO: 3566759 - RNA, 14 nt, Human
caguguuucugggg

SEQ ID NO: 3566760 - RNA, 20 nt, Human
caguguuuuaaacucuccua

SEQ ID NO: 3566761 - RNA, 17 nt, Human
caguguuuuaaauucug

SEQ ID NO: 3566762 - RNA, 16 nt, Human
caguguuuuaggagca

SEQ ID NO: 3566763 - RNA, 20 nt, Human
caguguuuuaggagcaugag

SEQ ID NO: 3566764 - RNA, 15 nt, Human
caguguuuuuguaaa

SEQ ID NO: 3566765 - RNA, 19 nt, Human
caguguuuuuguaaagugu

SEQ ID NO: 3566766 - RNA, 21 nt, Human
caguguuuuuguaaagugugg

SEQ ID NO: 3566767 - RNA, 15 nt, Human
caguuaaaaaaaauu

SEQ ID NO: 3566768 - RNA, 19 nt, Human
caguuaacuuuaagacuga

SEQ ID NO: 3566769 - RNA, 20 nt, Human
caguuaacuuucagaagaga

SEQ ID NO: 3566770 - RNA, 16 nt, Human
caguuaagaaaaaaau

SEQ ID NO: 3566771 - RNA, 17 nt, Human
caguuaagaaaaaaaua

SEQ ID NO: 3566772 - RNA, 18 nt, Human
caguuaagaaaaaaauaa

SEQ ID NO: 3566773 - RNA, 19 nt, Human
caguuaagaaaaaaauaau

SEQ ID NO: 3566774 - RNA, 21 nt, Human
caguuaagaaaaaaauaauuu

SEQ ID NO: 3566775 - RNA, 15 nt, Human
caguuaagaaauuuc

SEQ ID NO: 3566776 - RNA, 20 nt, Human
caguuaaggaccguggcccu

SEQ ID NO: 3566777 - RNA, 12 nt, Human
caguuaaucuug

SEQ ID NO: 3566778 - RNA, 15 nt, Human
caguuaauuagcauu

SEQ ID NO: 3566779 - RNA, 21 nt, Human
caguuaauuagcauucuggca

SEQ ID NO: 3566780 - RNA, 14 nt, Human
caguuacaaauuau

SEQ ID NO: 3566781 - RNA, 18 nt, Human
caguuacaaauuauaaug

SEQ ID NO: 3566782 - RNA, 22 nt, Human
caguuacaugcauacuucaaaa

SEQ ID NO: 3566783 - RNA, 19 nt, Human
caguuacuaagaagaaaau

SEQ ID NO: 3566784 - RNA, 14 nt, Human
caguuacucagaau

SEQ ID NO: 3566785 - RNA, 13 nt, Human
caguuacucagcc

SEQ ID NO: 3566786 - RNA, 15 nt, Human
caguuacucagcccu

SEQ ID NO: 3566787 - RNA, 17 nt, Human
caguuacucagcccugg

SEQ ID NO: 3566788 - RNA, 19 nt, Human
caguuacucagcccugggc

SEQ ID NO: 3566789 - RNA, 23 nt, Human
caguuacuuuccaauucuccuuu

SEQ ID NO: 3566790 - RNA, 13 nt, Human
caguuagacuagu

SEQ ID NO: 3566791 - RNA, 18 nt, Human
caguuagagaugccuccc

SEQ ID NO: 3566792 - RNA, 15 nt, Human
caguuauauuuugca

SEQ ID NO: 3566793 - RNA, 13 nt, Human
caguuauggcuau

SEQ ID NO: 3566794 - RNA, 19 nt, Human
caguuauggcuauaggugc

SEQ ID NO: 3566795 - RNA, 16 nt, Human
caguuauguucaguca

SEQ ID NO: 3566796 - RNA, 18 nt, Human
caguuauuacauguaauu

SEQ ID NO: 3566797 - RNA, 21 nt, Human
caguuauuauauuuacaaaug

SEQ ID NO: 3566798 - RNA, 17 nt, Human
caguuauucauucugug

SEQ ID NO: 3566799 - RNA, 20 nt, Human
caguuauugucccuggcuuc

SEQ ID NO: 3566800 - RNA, 15 nt, Human
caguucaaagcagga

SEQ ID NO: 3566801 - RNA, 13 nt, Human
caguucaaaguca

SEQ ID NO: 3566802 - RNA, 22 nt, Human
caguucaaagucaugauguuuu

SEQ ID NO: 3566803 - RNA, 14 nt, Human
caguucaagaaagc

SEQ ID NO: 3566804 - RNA, 13 nt, Human
caguucacacccu

SEQ ID NO: 3566805 - RNA, 14 nt, Human
caguucacacccug

SEQ ID NO: 3566806 - RNA, 14 nt, Human
cauggcccugggcg

SEQ ID NO: 3566807 - RNA, 14 nt, Human
cauggcccugugcu

SEQ ID NO: 3566808 - RNA, 17 nt, Human
cauggccggcuuucagg

SEQ ID NO: 3566809 - RNA, 19 nt, Human
cauggccggcuuucaggag

SEQ ID NO: 3566810 - RNA, 20 nt, Human
cauggccugcaaacugggaa

SEQ ID NO: 3566811 - RNA, 19 nt, Human
cauggccuuugcuugaaag

SEQ ID NO: 3566812 - RNA, 22 nt, Human
cauggcguagagggugcugccc

SEQ ID NO: 3566813 - RNA, 19 nt, Human
cauggcgugucccucucgg

SEQ ID NO: 3566814 - RNA, 16 nt, Human
cauggcuaagcuuuau

SEQ ID NO: 3566815 - RNA, 19 nt, Human
cauggcuaaggcaccagcc

SEQ ID NO: 3566816 - RNA, 18 nt, Human
cauggcuacuugcuuuga

SEQ ID NO: 3566817 - RNA, 12 nt, Human
cauggcuaucug

SEQ ID NO: 3566818 - RNA, 14 nt, Human
cauggcuauuuuau

SEQ ID NO: 3566819 - RNA, 15 nt, Human
cauggcucacugcag

SEQ ID NO: 3566820 - RNA, 16 nt, Human
cauggcucacugcagc

SEQ ID NO: 3566821 - RNA, 17 nt, Human
cauggcuccagaaaugu

SEQ ID NO: 3566822 - RNA, 13 nt, Human
cauggcuccaguc

SEQ ID NO: 3566823 - RNA, 14 nt, Human
cauggcuccagucu

SEQ ID NO: 3566824 - RNA, 17 nt, Human
cauggcuccggccucug

SEQ ID NO: 3566825 - RNA, 20 nt, Human
cauggcugagcugcccacag

SEQ ID NO: 3566826 - RNA, 16 nt, Human
cauggcugcacaguug

SEQ ID NO: 3566827 - RNA, 14 nt, Human
cauggcugugagga

SEQ ID NO: 3566828 - RNA, 17 nt, Human
cauggcuguguuugcag

SEQ ID NO: 3566829 - RNA, 15 nt, Human
cauggcuuaauguuu

SEQ ID NO: 3566830 - RNA, 15 nt, Human
cauggcuuccuccuc

SEQ ID NO: 3566831 - RNA, 18 nt, Human
cauggcuuucagaaaacg

SEQ ID NO: 3566832 - RNA, 21 nt, Human
caugggaaaggaggcaugccu

SEQ ID NO: 3566833 - RNA, 21 nt, Human
caugggaaaguauucucuuuu

SEQ ID NO: 3566834 - RNA, 20 nt, Human
caugggaagacgaggcccuc

SEQ ID NO: 3566835 - RNA, 17 nt, Human
caugggaaugaauguca

SEQ ID NO: 3566836 - RNA, 22 nt, Human
caugggaaugaaugucagugug

SEQ ID NO: 3566837 - RNA, 16 nt, Human
caugggacagggagga

SEQ ID NO: 3566838 - RNA, 17 nt, Human
caugggacagggaggac

SEQ ID NO: 3566839 - RNA, 18 nt, Human
caugggacagggaggacg

SEQ ID NO: 3566840 - RNA, 23 nt, Human
caugggacagggaggacgcucuc

SEQ ID NO: 3566841 - RNA, 20 nt, Human
caugggagcaguccaugcau

SEQ ID NO: 3566842 - RNA, 22 nt, Human
caugggagccgggucugccucu

SEQ ID NO: 3566843 - RNA, 14 nt, Human
caugggagggagcu

SEQ ID NO: 3566844 - RNA, 22 nt, Human
caugggagggggcuugaagcca

SEQ ID NO: 3566845 - RNA, 18 nt, Human
caugggauaaaugccauc

SEQ ID NO: 3566846 - RNA, 23 nt, Human
caugggauaaaugccaucaauaa

SEQ ID NO: 3566847 - RNA, 16 nt, Human
caugggauacaaccuc

SEQ ID NO: 3566848 - RNA, 13 nt, Human
caugggcacugcu

SEQ ID NO: 3566849 - RNA, 18 nt, Human
caugggcacugcugggug

SEQ ID NO: 3566850 - RNA, 17 nt, Human
caugggcagagcccaag

SEQ ID NO: 3566851 - RNA, 14 nt, Human
caugggccaccacg

SEQ ID NO: 3566852 - RNA, 14 nt, Human
caugggccagcccc

SEQ ID NO: 3566853 - RNA, 15 nt, Human
caugggccagccccu

SEQ ID NO: 3566854 - RNA, 21 nt, Human
caugggccagccccuccaucu

SEQ ID NO: 3566855 - RNA, 20 nt, Human
caugggccccaggggaacac

SEQ ID NO: 3566856 - RNA, 21 nt, Human
caugggcuucacuguauaaau

SEQ ID NO: 3566857 - RNA, 15 nt, Human
cauggggaaaaaaau

SEQ ID NO: 3566858 - RNA, 12 nt, Human
cauggggaggag

SEQ ID NO: 3566859 - RNA, 19 nt, Human
cauggggaggaggaggguc

SEQ ID NO: 3566860 - RNA, 17 nt, Human
cauggggcugggcagcu

SEQ ID NO: 3566861 - RNA, 17 nt, Human
caugggggagggggcag

SEQ ID NO: 3566862 - RNA, 13 nt, Human
caugggggcaggg

SEQ ID NO: 3566863 - RNA, 20 nt, Human
cauggggggagcacccugag

SEQ ID NO: 3566864 - RNA, 16 nt, Human
cauggggucucucaca

SEQ ID NO: 3566865 - RNA, 19 nt, Human
cauggggugaugcugggcu

SEQ ID NO: 3566866 - RNA, 15 nt, Human
cauggggugggccuc

SEQ ID NO: 3566867 - RNA, 17 nt, Human
cauggggugggccucug

SEQ ID NO: 3566868 - RNA, 18 nt, Human
cauggggugggccucugg

SEQ ID NO: 3566869 - RNA, 19 nt, Human
cauggguagcuucugaccu

SEQ ID NO: 3566870 - RNA, 23 nt, Human
cauggguagcuucugaccucagc

SEQ ID NO: 3566871 - RNA, 20 nt, Human
cauggguauaguucaugucu

SEQ ID NO: 3566872 - RNA, 21 nt, Human
caugggucgcccaugagagcg

SEQ ID NO: 3566873 - RNA, 14 nt, Human
caugguaccagccc

SEQ ID NO: 3566874 - RNA, 17 nt, Human
caugguaccagcccugg

SEQ ID NO: 3566875 - RNA, 20 nt, Human
caugguagagaaucucuccc

SEQ ID NO: 3566876 - RNA, 14 nt, Human
caugguauuugaga

SEQ ID NO: 3566877 - RNA, 16 nt, Human
cauggucagcccuagg

SEQ ID NO: 3566878 - RNA, 19 nt, Human
cauggucagcccuagggug

SEQ ID NO: 3566879 - RNA, 15 nt, Human
cauggucccacaucc

SEQ ID NO: 3566880 - RNA, 23 nt, Human
cauggucccacaucccugggccu

SEQ ID NO: 3566881 - RNA, 15 nt, Human
caugguccccauggc

SEQ ID NO: 3566882 - RNA, 16 nt, Human
cauggucggaaaacau

SEQ ID NO: 3566883 - RNA, 19 nt, Human
cauggugcaguugacagca

SEQ ID NO: 3566884 - RNA, 22 nt, Human
cauggugccccaggaccagcuc

SEQ ID NO: 3566885 - RNA, 22 nt, Human
cauggugccugagaggcaggca

SEQ ID NO: 3566886 - RNA, 17 nt, Human
cauggugcuaggaagag

SEQ ID NO: 3566887 - RNA, 19 nt, Human
cauggugcuuguuaaugcu

SEQ ID NO: 3566888 - RNA, 16 nt, Human
caugguggacccagcg

SEQ ID NO: 3566889 - RNA, 22 nt, Human
caugguggacccagcgggcagg

SEQ ID NO: 3566890 - RNA, 23 nt, Human
caugguggcaccagcgaagggag

SEQ ID NO: 3566891 - RNA, 20 nt, Human
caugguggcaugcaccugca

SEQ ID NO: 3566892 - RNA, 17 nt, Human
caugguggcgcaagccu

SEQ ID NO: 3566893 - RNA, 20 nt, Human
caugguggggucuccucagg

SEQ ID NO: 3566894 - RNA, 18 nt, Human
caugguguaauaagacau

SEQ ID NO: 3566895 - RNA, 22 nt, Human
caugguguaauaagacauaacg

SEQ ID NO: 3566896 - RNA, 16 nt, Human
caugguguccagacag

SEQ ID NO: 3566897 - RNA, 15 nt, Human
caugguguguuacac

SEQ ID NO: 3566898 - RNA, 16 nt, Human
caugguguucuccugc

SEQ ID NO: 3566899 - RNA, 19 nt, Human
caugguguucuccugcugc

SEQ ID NO: 3566900 - RNA, 21 nt, Human
caugguuacaaucauugcuga

SEQ ID NO: 3566901 - RNA, 17 nt, Human
caugguuaccaugucuu

SEQ ID NO: 3566902 - RNA, 18 nt, Human
caugguuaccaugucuuu

SEQ ID NO: 3566903 - RNA, 19 nt, Human
caugguuaccaugucuuuc

SEQ ID NO: 3566904 - RNA, 14 nt, Human
caugguugagaaau

SEQ ID NO: 3566905 - RNA, 18 nt, Human
caugguuuaaaagaaaaa

SEQ ID NO: 3566906 - RNA, 22 nt, Human
caugguuuaaaagaaaaaauga

SEQ ID NO: 3566907 - RNA, 16 nt, Human
caugguuucagcacua

SEQ ID NO: 3566908 - RNA, 20 nt, Human
caugguuuugugccaucugu

SEQ ID NO: 3566909 - RNA, 24 nt, Human
caugguuuugugccaucuguagcu

SEQ ID NO: 3566910 - RNA, 12 nt, Human
cauguaaaacaa

SEQ ID NO: 3566911 - RNA, 16 nt, Human
cauguaaaacaaaaaa

SEQ ID NO: 3566912 - RNA, 14 nt, Human
cauguaaaagccua

SEQ ID NO: 3566913 - RNA, 16 nt, Human
cauguaaaagcggaaa

SEQ ID NO: 3566914 - RNA, 20 nt, Human
cauguaaagcaguauuaaaa

SEQ ID NO: 3566915 - RNA, 15 nt, Human
cauguaaauguaaac

SEQ ID NO: 3566916 - RNA, 16 nt, Human
cauguaaauguaaacu

SEQ ID NO: 3566917 - RNA, 16 nt, Human
cauguaaauuuuguau

SEQ ID NO: 3566918 - RNA, 14 nt, Human
cauguaacaauguu

SEQ ID NO: 3566919 - RNA, 14 nt, Human
cauguaacagaaag

SEQ ID NO: 3566920 - RNA, 22 nt, Human
cauguaaccggcauguuuccag

SEQ ID NO: 3566921 - RNA, 19 nt, Human
cauguaacugccuagaaac

SEQ ID NO: 3566922 - RNA, 17 nt, Human
cauguaagcugaaaaua

SEQ ID NO: 3566923 - RNA, 14 nt, Human
cauguaauccucaa

SEQ ID NO: 3566924 - RNA, 21 nt, Human
cauguaaugguaucuuaaagu

SEQ ID NO: 3566925 - RNA, 23 nt, Human
cauguaauguuaauguuauauca

SEQ ID NO: 3566926 - RNA, 18 nt, Human
cauguaauuuguguaaau

SEQ ID NO: 3566927 - RNA, 15 nt, Human
cauguacaaaaccau

SEQ ID NO: 3566928 - RNA, 14 nt, Human
cauguacagacaga

SEQ ID NO: 3566929 - RNA, 16 nt, Human
cauguacagacagaga

SEQ ID NO: 3566930 - RNA, 10 nt, Human
cauguacagu

SEQ ID NO: 3566931 - RNA, 11 nt, Human
cauguacagug

SEQ ID NO: 3566932 - RNA, 20 nt, Human
cauguacaguguucuguuua

SEQ ID NO: 3566933 - RNA, 21 nt, Human
cauguacaguguucuguuuaa

SEQ ID NO: 3566934 - RNA, 14 nt, Human
cauguaccuccccu

SEQ ID NO: 3566935 - RNA, 18 nt, Human
cauguaccuccccugccu

SEQ ID NO: 3566936 - RNA, 14 nt, Human
cauguacuaucuua

SEQ ID NO: 3566937 - RNA, 20 nt, Human
cauguagaaaauuuguuauu

SEQ ID NO: 3566938 - RNA, 13 nt, Human
cauguagaagcug

SEQ ID NO: 3566939 - RNA, 19 nt, Human
cauguagagaaaagcacac

SEQ ID NO: 3566940 - RNA, 14 nt, Human
cauguagcaggacu

SEQ ID NO: 3566941 - RNA, 17 nt, Human
cauguagcccccuggcc

SEQ ID NO: 3566942 - RNA, 16 nt, Human
cauguaggacccugca

SEQ ID NO: 3566943 - RNA, 17 nt, Human
cauguaguaacacuaau

SEQ ID NO: 3566944 - RNA, 21 nt, Human
cauguaguaacacuaauauau

SEQ ID NO: 3566945 - RNA, 16 nt, Human
cauguaguaucaaaua

SEQ ID NO: 3566946 - RNA, 21 nt, Human
cauguaguaucaaauauuaga

SEQ ID NO: 3566947 - RNA, 14 nt, Human
cauguauaaaugaa

SEQ ID NO: 3566948 - RNA, 18 nt, Human
cauguauaaaugaaguuu

SEQ ID NO: 3566949 - RNA, 23 nt, Human
cauguauaaaugaaguuuauaca

SEQ ID NO: 3566950 - RNA, 19 nt, Human
cauucucaguuuuucuuaa

SEQ ID NO: 3566951 - RNA, 19 nt, Human
cauucucauaauuccuaca

SEQ ID NO: 3566952 - RNA, 21 nt, Human
cauucucauaauuccuacagc

SEQ ID NO: 3566953 - RNA, 15 nt, Human
cauucucaucugcac

SEQ ID NO: 3566954 - RNA, 22 nt, Human
cauucucauuggaaauuuagca

SEQ ID NO: 3566955 - RNA, 15 nt, Human
cauucuccacagcaa

SEQ ID NO: 3566956 - RNA, 17 nt, Human
cauucuccacagcaacc

SEQ ID NO: 3566957 - RNA, 18 nt, Human
cauucuccacagcaaccc

SEQ ID NO: 3566958 - RNA, 16 nt, Human
cauucuccaccugcca

SEQ ID NO: 3566959 - RNA, 21 nt, Human
cauucuccaccugccagggac

SEQ ID NO: 3566960 - RNA, 11 nt, Human
cauucuccugc

SEQ ID NO: 3566961 - RNA, 20 nt, Human
cauucuccuuagcuucuggc

SEQ ID NO: 3566962 - RNA, 20 nt, Human
cauucuccuuguguuacuaa

SEQ ID NO: 3566963 - RNA, 17 nt, Human
cauucucgcuucccuga

SEQ ID NO: 3566964 - RNA, 19 nt, Human
cauucucgugagucauuua

SEQ ID NO: 3566965 - RNA, 23 nt, Human
cauucucgugagucauuuaaaug

SEQ ID NO: 3566966 - RNA, 22 nt, Human
cauucucuccauuucacuggcu

SEQ ID NO: 3566967 - RNA, 18 nt, Human
cauucucucuccugucca

SEQ ID NO: 3566968 - RNA, 13 nt, Human
cauucugaaugcu

SEQ ID NO: 3566969 - RNA, 16 nt, Human
cauucugaaugcuucu

SEQ ID NO: 3566970 - RNA, 21 nt, Human
cauucugacucgguuucucca

SEQ ID NO: 3566971 - RNA, 15 nt, Human
cauucugaugagcaa

SEQ ID NO: 3566972 - RNA, 23 nt, Human
cauucugauucgaaugacacugu

SEQ ID NO: 3566973 - RNA, 17 nt, Human
cauucugcaaguauacu

SEQ ID NO: 3566974 - RNA, 18 nt, Human
cauucugcauugcuagau

SEQ ID NO: 3566975 - RNA, 22 nt, Human
cauucugccgcccccuccugaa

SEQ ID NO: 3566976 - RNA, 23 nt, Human
cauucugccgcccccuccugaac

SEQ ID NO: 3566977 - RNA, 12 nt, Human
cauucugccugc

SEQ ID NO: 3566978 - RNA, 13 nt, Human
cauucugccugcc

SEQ ID NO: 3566979 - RNA, 18 nt, Human
cauucugccugcccaggc

SEQ ID NO: 3566980 - RNA, 16 nt, Human
cauucugcuccuuccc

SEQ ID NO: 3566981 - RNA, 12 nt, Human
cauucuggaagu

SEQ ID NO: 3566982 - RNA, 16 nt, Human
cauucuggaccucugg

SEQ ID NO: 3566983 - RNA, 17 nt, Human
cauucuggaccucuggg

SEQ ID NO: 3566984 - RNA, 23 nt, Human
cauucuggucaagggcugucauu

SEQ ID NO: 3566985 - RNA, 22 nt, Human
cauucugucgccuuagcauguu

SEQ ID NO: 3566986 - RNA, 12 nt, Human
cauucuuacuua

SEQ ID NO: 3566987 - RNA, 23 nt, Human
cauucuuacuuacuaaaauauau

SEQ ID NO: 3566988 - RNA, 15 nt, Human
cauucuuagccugug

SEQ ID NO: 3566989 - RNA, 22 nt, Human
cauucuuagccuguggcaguaa

SEQ ID NO: 3566990 - RNA, 21 nt, Human
cauucuuauuucaugaaaauu

SEQ ID NO: 3566991 - RNA, 13 nt, Human
cauucuucaagau

SEQ ID NO: 3566992 - RNA, 22 nt, Human
cauucuucugaucacugaaaua

SEQ ID NO: 3566993 - RNA, 17 nt, Human
cauucuugguuggcugg

SEQ ID NO: 3566994 - RNA, 19 nt, Human
cauucuuguaaggcuuuga

SEQ ID NO: 3566995 - RNA, 19 nt, Human
cauucuugucacaauaaau

SEQ ID NO: 3566996 - RNA, 12 nt, Human
cauucuuuccca

SEQ ID NO: 3566997 - RNA, 13 nt, Human
cauucuuugcuug

SEQ ID NO: 3566998 - RNA, 15 nt, Human
cauucuuugcuugaa

SEQ ID NO: 3566999 - RNA, 15 nt, Human
cauucuuuuguaauu

SEQ ID NO: 3567000 - RNA, 18 nt, Human
cauucuuuuguaauuuaa

SEQ ID NO: 3567001 - RNA, 16 nt, Human
cauucuuuuuuucuug

SEQ ID NO: 3567002 - RNA, 17 nt, Human
cauucuuuuuuucuugg

SEQ ID NO: 3567003 - RNA, 18 nt, Human
cauucuuuuuuucuuggc

SEQ ID NO: 3567004 - RNA, 17 nt, Human
cauugaaaaauguccac

SEQ ID NO: 3567005 - RNA, 22 nt, Human
cauugaaaucuaggaaaauuau

SEQ ID NO: 3567006 - RNA, 20 nt, Human
cauugaaaugagcaccucca

SEQ ID NO: 3567007 - RNA, 11 nt, Human
cauugaaaugu

SEQ ID NO: 3567008 - RNA, 14 nt, Human
cauugaacagcaaa

SEQ ID NO: 3567009 - RNA, 15 nt, Human
cauugaacucugaga

SEQ ID NO: 3567010 - RNA, 14 nt, Human
cauugaagagagag

SEQ ID NO: 3567011 - RNA, 14 nt, Human
cauugaaggccugg

SEQ ID NO: 3567012 - RNA, 14 nt, Human
cauugaauuagaaa

SEQ ID NO: 3567013 - RNA, 23 nt, Human
cauugaauucuugguugaggaaa

SEQ ID NO: 3567014 - RNA, 13 nt, Human
cauugacaaaucu

SEQ ID NO: 3567015 - RNA, 16 nt, Human
cauugacaagaacuga

SEQ ID NO: 3567016 - RNA, 14 nt, Human
cauugacagauuga

SEQ ID NO: 3567017 - RNA, 15 nt, Human
cauugacauguacag

SEQ ID NO: 3567018 - RNA, 19 nt, Human
cauugacauguacagagaa

SEQ ID NO: 3567019 - RNA, 19 nt, Human
cauugaccaagaacugcau

SEQ ID NO: 3567020 - RNA, 15 nt, Human
cauugaccugaggcc

SEQ ID NO: 3567021 - RNA, 18 nt, Human
cauugaccugaggcccuu

SEQ ID NO: 3567022 - RNA, 23 nt, Human
cauugacgauuccuucucugaac

SEQ ID NO: 3567023 - RNA, 18 nt, Human
cauugacuaucaaacuga

SEQ ID NO: 3567024 - RNA, 22 nt, Human
cauugacugguuuacaggcccu

SEQ ID NO: 3567025 - RNA, 20 nt, Human
cauugacuuucaguaaacau

SEQ ID NO: 3567026 - RNA, 18 nt, Human
cauugagaguuuugucuu

SEQ ID NO: 3567027 - RNA, 9 nt, Human
cauugagua

SEQ ID NO: 3567028 - RNA, 15 nt, Human
cauugaguaauauag

SEQ ID NO: 3567029 - RNA, 13 nt, Human
cauugaguagaca

SEQ ID NO: 3567030 - RNA, 23 nt, Human
cauugaguagacacauuuaagga

SEQ ID NO: 3567031 - RNA, 15 nt, Human
cauugaguauuguuu

SEQ ID NO: 3567032 - RNA, 18 nt, Human
cauugaguauuguuuaaa

SEQ ID NO: 3567033 - RNA, 22 nt, Human
cauugaguauuguuuaaaaugu

SEQ ID NO: 3567034 - RNA, 18 nt, Human
cauugaguugguuacuuc

SEQ ID NO: 3567035 - RNA, 19 nt, Human
cauugauaugaaaaauaug

SEQ ID NO: 3567036 - RNA, 19 nt, Human
cauugauauuugugcauuu

SEQ ID NO: 3567037 - RNA, 12 nt, Human
cauugaugcuga

SEQ ID NO: 3567038 - RNA, 15 nt, Human
cauugauucagccug

SEQ ID NO: 3567039 - RNA, 16 nt, Human
cauugauugucagcua

SEQ ID NO: 3567040 - RNA, 14 nt, Human
cauugauuuccugu

SEQ ID NO: 3567041 - RNA, 13 nt, Human
cauugcaauagaa

SEQ ID NO: 3567042 - RNA, 15 nt, Human
cauugcaauagaaau

SEQ ID NO: 3567043 - RNA, 16 nt, Human
cauugcacccagccca

SEQ ID NO: 3567044 - RNA, 18 nt, Human
cauugcacuccagccugg

SEQ ID NO: 3567045 - RNA, 16 nt, Human
cauugcagaauaaugu

SEQ ID NO: 3567046 - RNA, 18 nt, Human
cauugcagucugcuucug

SEQ ID NO: 3567047 - RNA, 12 nt, Human
cauugcaguuua

SEQ ID NO: 3567048 - RNA, 16 nt, Human
cauugcaucaaagcau

SEQ ID NO: 3567049 - RNA, 22 nt, Human
cauugcaucaccucuguaauuu

SEQ ID NO: 3567050 - RNA, 15 nt, Human
cauugccaaaaagga

SEQ ID NO: 3567051 - RNA, 15 nt, Human
cauugccaagggcuu

SEQ ID NO: 3567052 - RNA, 16 nt, Human
cauugccaccaggaga

SEQ ID NO: 3567053 - RNA, 14 nt, Human
cauugcccagucuu

SEQ ID NO: 3567054 - RNA, 17 nt, Human
cauugcccagucuuuca

SEQ ID NO: 3567055 - RNA, 22 nt, Human
cauugccccaaauggauuccug

SEQ ID NO: 3567056 - RNA, 13 nt, Human
cauugccuauuuc

SEQ ID NO: 3567057 - RNA, 23 nt, Human
cauugccugauuuguuccuucug

SEQ ID NO: 3567058 - RNA, 11 nt, Human
cauugccuggc

SEQ ID NO: 3567059 - RNA, 13 nt, Human
cauugccuuuucu

SEQ ID NO: 3567060 - RNA, 14 nt, Human
cauugcggacagcc

SEQ ID NO: 3567061 - RNA, 15 nt, Human
cauugcggacagcca

SEQ ID NO: 3567062 - RNA, 21 nt, Human
cauugcggacagccacggcca

SEQ ID NO: 3567063 - RNA, 15 nt, Human
cauugcuaagaugcu

SEQ ID NO: 3567064 - RNA, 16 nt, Human
cauugcuaagaugcuc

SEQ ID NO: 3567065 - RNA, 16 nt, Human
cauugcugaaaauggu

SEQ ID NO: 3567066 - RNA, 13 nt, Human
cauugcugcuccu

SEQ ID NO: 3567067 - RNA, 18 nt, Human
cauugcugcuccuuagcu

SEQ ID NO: 3567068 - RNA, 20 nt, Human
cauugcugcuccuuagcugc

SEQ ID NO: 3567069 - RNA, 20 nt, Human
cauugcuggucuuguaagag

SEQ ID NO: 3567070 - RNA, 14 nt, Human
cauugcuguaggau

SEQ ID NO: 3567071 - RNA, 22 nt, Human
cauugcuguuaugucuguuuaa

SEQ ID NO: 3567072 - RNA, 19 nt, Human
cauugcuguuguccaacua

SEQ ID NO: 3567073 - RNA, 17 nt, Human
cauugcuuacacggaug

SEQ ID NO: 3567074 - RNA, 11 nt, Human
cauugcuucac

SEQ ID NO: 3567075 - RNA, 15 nt, Human
cauugcuucacaacc

SEQ ID NO: 3567076 - RNA, 20 nt, Human
cauugcuucacaacccaucu

SEQ ID NO: 3567077 - RNA, 17 nt, Human
cauugcuucacuaccca

SEQ ID NO: 3567078 - RNA, 15 nt, Human
cauugcuucuucuga

SEQ ID NO: 3567079 - RNA, 19 nt, Human
cauugcuuucguguaaauu

SEQ ID NO: 3567080 - RNA, 14 nt, Human
cauugcuuucugaa

SEQ ID NO: 3567081 - RNA, 15 nt, Human
cauugcuuucugaaa

SEQ ID NO: 3567082 - RNA, 16 nt, Human
cauugcuuugaagcag

SEQ ID NO: 3567083 - RNA, 22 nt, Human
cauugcuuugaagcaguugugu

SEQ ID NO: 3567084 - RNA, 19 nt, Human
cauugcuuuuauuuugaaa

SEQ ID NO: 3567085 - RNA, 20 nt, Human
cauugcuuuuauuuugaaaa

SEQ ID NO: 3567086 - RNA, 14 nt, Human
cauuggaaauuuca

SEQ ID NO: 3567087 - RNA, 15 nt, Human
cauuggaacuggagg

SEQ ID NO: 3567088 - RNA, 19 nt, Human
cauuggaagagcagcaccu

SEQ ID NO: 3567089 - RNA, 21 nt, Human
cauuggaagcagguuaaaugu

SEQ ID NO: 3567090 - RNA, 18 nt, Human
cauuggacccacaugagg

SEQ ID NO: 3567091 - RNA, 16 nt, Human
cauuggacccuuccau

SEQ ID NO: 3567092 - RNA, 20 nt, Human
cauuggcagcaggugcugcu

SEQ ID NO: 3567093 - RNA, 23 nt, Human
cauuggcagcaggugcugcuacc

SEQ ID NO: 3567094 - RNA, 24 nt, Human
cauuggcagcaggugcugcuaccc

SEQ ID NO: 3567095 - RNA, 14 nt, Human
aucuguaugauucu

SEQ ID NO: 3567096 - RNA, 15 nt, Human
aucuguaugauucua

SEQ ID NO: 3567097 - RNA, 19 nt, Human
aucuguaugauucuaugga

SEQ ID NO: 3567098 - RNA, 15 nt, Human
aucuguauuuaauuu

SEQ ID NO: 3567099 - RNA, 16 nt, Human
aucugucaaaacacug

SEQ ID NO: 3567100 - RNA, 17 nt, Human
aucugucacaccagcca

SEQ ID NO: 3567101 - RNA, 12 nt, Human
aucugucaguuc

SEQ ID NO: 3567102 - RNA, 21 nt, Human
aucuguccaaaggaggcuggc

SEQ ID NO: 3567103 - RNA, 14 nt, Human
aucuguccucagcc

SEQ ID NO: 3567104 - RNA, 15 nt, Human
aucuguccucagccu

SEQ ID NO: 3567105 - RNA, 17 nt, Human
aucuguccucagccuug

SEQ ID NO: 3567106 - RNA, 21 nt, Human
aucuguccucagccuugccag

SEQ ID NO: 3567107 - RNA, 13 nt, Human
aucugucuaaaga

SEQ ID NO: 3567108 - RNA, 14 nt, Human
aucugucuggaggg

SEQ ID NO: 3567109 - RNA, 15 nt, Human
aucugucuggagggg

SEQ ID NO: 3567110 - RNA, 22 nt, Human
aucugucuggaggggagcucug

SEQ ID NO: 3567111 - RNA, 19 nt, Human
aucugucuguggcaaaagu

SEQ ID NO: 3567112 - RNA, 22 nt, Human
aucugucuguggcaaaaguuua

SEQ ID NO: 3567113 - RNA, 12 nt, Human
aucugucuugua

SEQ ID NO: 3567114 - RNA, 11 nt, Human
aucugucuuuc

SEQ ID NO: 3567115 - RNA, 17 nt, Human
aucugugaaaggaaaga

SEQ ID NO: 3567116 - RNA, 13 nt, Human
aucugugaacuug

SEQ ID NO: 3567117 - RNA, 17 nt, Human
aucugugaacuugaaau

SEQ ID NO: 3567118 - RNA, 17 nt, Human
aucugugaauucagauu

SEQ ID NO: 3567119 - RNA, 21 nt, Human
aucugugaggggcucucucau

SEQ ID NO: 3567120 - RNA, 19 nt, Human
aucugugaugacauucccu

SEQ ID NO: 3567121 - RNA, 12 nt, Human
aucugugaugau

SEQ ID NO: 3567122 - RNA, 14 nt, Human
aucugugcccagag

SEQ ID NO: 3567123 - RNA, 17 nt, Human
aucugugcgugaaacac

SEQ ID NO: 3567124 - RNA, 19 nt, Human
aucugugcgugaaacacac

SEQ ID NO: 3567125 - RNA, 19 nt, Human
aucugugcucaggacucag

SEQ ID NO: 3567126 - RNA, 17 nt, Human
aucugugcuuuccagcu

SEQ ID NO: 3567127 - RNA, 18 nt, Human
aucugugcuuuccagcuc

SEQ ID NO: 3567128 - RNA, 19 nt, Human
aucugugggcauggucaaa

SEQ ID NO: 3567129 - RNA, 17 nt, Human
aucuguguacaaagaaa

SEQ ID NO: 3567130 - RNA, 22 nt, Human
aucuguguacaaagaaauaaca

SEQ ID NO: 3567131 - RNA, 21 nt, Human
aucuguguauauuauuuggca

SEQ ID NO: 3567132 - RNA, 17 nt, Human
aucuguuagaugcuacu

SEQ ID NO: 3567133 - RNA, 19 nt, Human
aucuguuagaugcuacuaa

SEQ ID NO: 3567134 - RNA, 15 nt, Human
aucuguuagggccuu

SEQ ID NO: 3567135 - RNA, 16 nt, Human
aucuguuagggccuug

SEQ ID NO: 3567136 - RNA, 17 nt, Human
aucuguuagggccuugg

SEQ ID NO: 3567137 - RNA, 16 nt, Human
aucuguucuaacaugu

SEQ ID NO: 3567138 - RNA, 15 nt, Human
aucuguuguuuuguu

SEQ ID NO: 3567139 - RNA, 14 nt, Human
aucuguuuaaagca

SEQ ID NO: 3567140 - RNA, 22 nt, Human
aucuguuuaaagcauauagaga

SEQ ID NO: 3567141 - RNA, 24 nt, Human
aucuguuuaaagcauauagagaug

SEQ ID NO: 3567142 - RNA, 15 nt, Human
aucuguuuacagugu

SEQ ID NO: 3567143 - RNA, 16 nt, Human
aucuguuuauuuacaa

SEQ ID NO: 3567144 - RNA, 22 nt, Human
aucuguuuuaaauuuauuucaa

SEQ ID NO: 3567145 - RNA, 14 nt, Human
aucuguuuuacugc

SEQ ID NO: 3567146 - RNA, 17 nt, Human
aucuguuuuacugcuuu

SEQ ID NO: 3567147 - RNA, 18 nt, Human
aucuguuuuacugcuuuu

SEQ ID NO: 3567148 - RNA, 17 nt, Human
aucuguuuugaaggcaa

SEQ ID NO: 3567149 - RNA, 19 nt, Human
aucuuaaaccuuaagauac

SEQ ID NO: 3567150 - RNA, 21 nt, Human
aucuuaaagaaacagcuuuca

SEQ ID NO: 3567151 - RNA, 13 nt, Human
aucuuaacucuuu

SEQ ID NO: 3567152 - RNA, 16 nt, Human
aucuuaaggggcagcu

SEQ ID NO: 3567153 - RNA, 15 nt, Human
aucuuaauacuguua

SEQ ID NO: 3567154 - RNA, 18 nt, Human
aucuuaauacuguuauuc

SEQ ID NO: 3567155 - RNA, 14 nt, Human
aucuuaauauauuu

SEQ ID NO: 3567156 - RNA, 22 nt, Human
aucuuaaucuguuuauuuacaa

SEQ ID NO: 3567157 - RNA, 14 nt, Human
aucuuaauguauau

SEQ ID NO: 3567158 - RNA, 20 nt, Human
aucuuaauguaucaaacugu

SEQ ID NO: 3567159 - RNA, 14 nt, Human
aucuuaauguuccu

SEQ ID NO: 3567160 - RNA, 18 nt, Human
aucuuacaaaguguauuu

SEQ ID NO: 3567161 - RNA, 17 nt, Human
aucuuacaauauugauu

SEQ ID NO: 3567162 - RNA, 14 nt, Human
aucuuacugaaggu

SEQ ID NO: 3567163 - RNA, 12 nt, Human
aucuuacuuugu

SEQ ID NO: 3567164 - RNA, 14 nt, Human
aucuuacuuuguaa

SEQ ID NO: 3567165 - RNA, 17 nt, Human
aucuuacuuuguaaauu

SEQ ID NO: 3567166 - RNA, 22 nt, Human
aucuuacuuuguaaauucugau

SEQ ID NO: 3567167 - RNA, 18 nt, Human
aucuuagauguuucacac

SEQ ID NO: 3567168 - RNA, 23 nt, Human
aucuuagauucucugugucuaag

SEQ ID NO: 3567169 - RNA, 19 nt, Human
aucuuagcauagcuuauua

SEQ ID NO: 3567170 - RNA, 18 nt, Human
aucuuagggugaaccacu

SEQ ID NO: 3567171 - RNA, 16 nt, Human
aucuuaguauuugcau

SEQ ID NO: 3567172 - RNA, 21 nt, Human
aucuuagugccugagaguauu

SEQ ID NO: 3567173 - RNA, 14 nt, Human
aucuuaguguauga

SEQ ID NO: 3567174 - RNA, 15 nt, Human
aucuuaguguaugau

SEQ ID NO: 3567175 - RNA, 22 nt, Human
aucuuaguuuggauucuuaugu

SEQ ID NO: 3567176 - RNA, 16 nt, Human
aucuuauaauuguucu

SEQ ID NO: 3567177 - RNA, 22 nt, Human
aucuuauaauuuaaaauaugcu

SEQ ID NO: 3567178 - RNA, 17 nt, Human
aucuuauacuguacaau

SEQ ID NO: 3567179 - RNA, 19 nt, Human
aucuuauacuguacaauaa

SEQ ID NO: 3567180 - RNA, 21 nt, Human
aucuuauagcacuuugaaaua

SEQ ID NO: 3567181 - RNA, 15 nt, Human
aucuuauaugggaaa

SEQ ID NO: 3567182 - RNA, 22 nt, Human
aucuuauaugggaaaccaugua

SEQ ID NO: 3567183 - RNA, 18 nt, Human
aucuuaucucagauauuu

SEQ ID NO: 3567184 - RNA, 15 nt, Human
aucuuauuaaaguuu

SEQ ID NO: 3567185 - RNA, 16 nt, Human
aucuuauuaaaguuuc

SEQ ID NO: 3567186 - RNA, 18 nt, Human
aucuuauuaaaguuucaa

SEQ ID NO: 3567187 - RNA, 22 nt, Human
aucuuauuaaaguuucaaaaau

SEQ ID NO: 3567188 - RNA, 22 nt, Human
aucuuauuagggagaaaauuca

SEQ ID NO: 3567189 - RNA, 13 nt, Human
aucuuauucacau

SEQ ID NO: 3567190 - RNA, 17 nt, Human
aucuuauuuuucuaaac

SEQ ID NO: 3567191 - RNA, 22 nt, Human
aucuucaaaaguaaugccucug

SEQ ID NO: 3567192 - RNA, 15 nt, Human
aucuucaaagccuuc

SEQ ID NO: 3567193 - RNA, 15 nt, Human
aucuucaaagcuuga

SEQ ID NO: 3567194 - RNA, 12 nt, Human
aucuucaacaaa

SEQ ID NO: 3567195 - RNA, 14 nt, Human
aucuucaauccuug

SEQ ID NO: 3567196 - RNA, 15 nt, Human
aucuucaauggcuuu

SEQ ID NO: 3567197 - RNA, 19 nt, Human
aucuucacauaguucucca

SEQ ID NO: 3567198 - RNA, 13 nt, Human
aucuucacuucua

SEQ ID NO: 3567199 - RNA, 18 nt, Human
aucuucagagcagggguc

SEQ ID NO: 3567200 - RNA, 14 nt, Human
aucuucaguugucu

SEQ ID NO: 3567201 - RNA, 19 nt, Human
aucuucaguugucucugau

SEQ ID NO: 3567202 - RNA, 20 nt, Human
aucuucaguuuuaucuuuaa

SEQ ID NO: 3567203 - RNA, 15 nt, Human
aucuucauuaccaau

SEQ ID NO: 3567204 - RNA, 22 nt, Human
aucuuccaauuuaguuguugua

SEQ ID NO: 3567205 - RNA, 19 nt, Human
aucuuccagaagugugauu

SEQ ID NO: 3567206 - RNA, 18 nt, Human
aucuuccaggugggguga

SEQ ID NO: 3567207 - RNA, 16 nt, Human
aucuuccauauuugga

SEQ ID NO: 3567208 - RNA, 19 nt, Human
aucuuccauauuuggaaga

SEQ ID NO: 3567209 - RNA, 20 nt, Human
aucuuccuggucgaaaguua

SEQ ID NO: 3567210 - RNA, 23 nt, Human
aucuuccuggucgaaaguuagua

SEQ ID NO: 3567211 - RNA, 14 nt, Human
aucuuccugugucc

SEQ ID NO: 3567212 - RNA, 15 nt, Human
aucuucgggaccagg

SEQ ID NO: 3567213 - RNA, 14 nt, Human
aucuucgucuucac

SEQ ID NO: 3567214 - RNA, 15 nt, Human
aucuucgucuucacu

SEQ ID NO: 3567215 - RNA, 22 nt, Human
aucuucgucuucacucuuaggc

SEQ ID NO: 3567216 - RNA, 21 nt, Human
aucuucuauauguuuaaaagu

SEQ ID NO: 3567217 - RNA, 13 nt, Human
aucuucucagcuc

SEQ ID NO: 3567218 - RNA, 15 nt, Human
aucuucucagcuccc

SEQ ID NO: 3567219 - RNA, 15 nt, Human
aucuucuccaggaug

SEQ ID NO: 3567220 - RNA, 15 nt, Human
aucuucuccaucugg

SEQ ID NO: 3567221 - RNA, 19 nt, Human
aucuucuccaucuggcagg

SEQ ID NO: 3567222 - RNA, 22 nt, Human
aucuucuccaucuggcagggug

SEQ ID NO: 3567223 - RNA, 22 nt, Human
aucuucugaacuuggcgcugcc

SEQ ID NO: 3567224 - RNA, 23 nt, Human
aucuucugaacuuggcgcugccc

SEQ ID NO: 3567225 - RNA, 21 nt, Human
aucuucugccuuagucucagu

SEQ ID NO: 3567226 - RNA, 20 nt, Human
aucuucuggagucuccagug

SEQ ID NO: 3567227 - RNA, 17 nt, Human
aucuucuuuauaauucu

SEQ ID NO: 3567228 - RNA, 21 nt, Human
aucuucuuugcagccugggug

SEQ ID NO: 3567229 - RNA, 17 nt, Human
aucuugaaaugaaagua

SEQ ID NO: 3567230 - RNA, 22 nt, Human
aucuugaaauuaagaaggcaaa

SEQ ID NO: 3567231 - RNA, 17 nt, Human
aucuugaagacuuuucu

SEQ ID NO: 3567232 - RNA, 12 nt, Human
aucuugaaggaa

SEQ ID NO: 3567233 - RNA, 15 nt, Human
aucuugaagggccca

SEQ ID NO: 3567234 - RNA, 21 nt, Human
aucuugaauacucugcccucu

SEQ ID NO: 3567235 - RNA, 14 nt, Human
aucuugacagagcc

SEQ ID NO: 3567236 - RNA, 19 nt, Human
aucuugaccaagcaggaag

SEQ ID NO: 3567237 - RNA, 22 nt, Human
aucuugagcaaguuccuucugg

SEQ ID NO: 3567238 - RNA, 19 nt, Human
aucuugaguauaagaaaug

SEQ ID NO: 3567239 - RNA, 21 nt, Human
aucuugauaccaccuauauag

SEQ ID NO: 3567240 - RNA, 16 nt, Human
augaauuccuagaauu

SEQ ID NO: 3567241 - RNA, 13 nt, Human
augaauugcauuu

SEQ ID NO: 3567242 - RNA, 12 nt, Human
augaauuguaaa

SEQ ID NO: 3567243 - RNA, 14 nt, Human
augaauuuaaauau

SEQ ID NO: 3567244 - RNA, 16 nt, Human
augaauuuaaauauaa

SEQ ID NO: 3567245 - RNA, 23 nt, Human
augaauuuaaauauaauucugua

SEQ ID NO: 3567246 - RNA, 21 nt, Human
augaauuuggagacucugugg

SEQ ID NO: 3567247 - RNA, 14 nt, Human
augaauuuuaaagu

SEQ ID NO: 3567248 - RNA, 17 nt, Human
augaauuuuaaaguaug

SEQ ID NO: 3567249 - RNA, 22 nt, Human
augaauuuuaaaguaugcauua

SEQ ID NO: 3567250 - RNA, 16 nt, Human
augaauuuuaaggguu

SEQ ID NO: 3567251 - RNA, 21 nt, Human
augaauuuuuuucaucuucuc

SEQ ID NO: 3567252 - RNA, 23 nt, Human
augaauuuuuuucaucuucucug

SEQ ID NO: 3567253 - RNA, 17 nt, Human
augacaaaaaauguuuu

SEQ ID NO: 3567254 - RNA, 23 nt, Human
augacaaaaauucaacucagacu

SEQ ID NO: 3567255 - RNA, 17 nt, Human
augacaaauaaguggaa

SEQ ID NO: 3567256 - RNA, 16 nt, Human
augacaaauguuucua

SEQ ID NO: 3567257 - RNA, 15 nt, Human
augacaacuuugcca

SEQ ID NO: 3567258 - RNA, 14 nt, Human
augacaagauggua

SEQ ID NO: 3567259 - RNA, 13 nt, Human
augacaagcauuu

SEQ ID NO: 3567260 - RNA, 20 nt, Human
augacaagccccaggcaggc

SEQ ID NO: 3567261 - RNA, 15 nt, Human
augacaaucaugugu

SEQ ID NO: 3567262 - RNA, 18 nt, Human
augacaaucauguguguu

SEQ ID NO: 3567263 - RNA, 19 nt, Human
augacaauuuuuuccacuu

SEQ ID NO: 3567264 - RNA, 20 nt, Human
augacaccaucuuuuauucu

SEQ ID NO: 3567265 - RNA, 23 nt, Human
augacaccaucuuuuauucuuuu

SEQ ID NO: 3567266 - RNA, 18 nt, Human
augacacgaauauugcug

SEQ ID NO: 3567267 - RNA, 20 nt, Human
augacacgaauauugcugau

SEQ ID NO: 3567268 - RNA, 21 nt, Human
augacacuagaaaacuugacu

SEQ ID NO: 3567269 - RNA, 19 nt, Human
augacacucguauaagcau

SEQ ID NO: 3567270 - RNA, 15 nt, Human
augacacugaaaugc

SEQ ID NO: 3567271 - RNA, 12 nt, Human
augacacugacc

SEQ ID NO: 3567272 - RNA, 22 nt, Human
augacacuuguccccaaauccg

SEQ ID NO: 3567273 - RNA, 14 nt, Human
augacagaaaauau

SEQ ID NO: 3567274 - RNA, 23 nt, Human
augacagaaaauauguauuaaca

SEQ ID NO: 3567275 - RNA, 13 nt, Human
augacagagccag

SEQ ID NO: 3567276 - RNA, 18 nt, Human
augacagccucuauccua

SEQ ID NO: 3567277 - RNA, 19 nt, Human
augacagcugucccuguca

SEQ ID NO: 3567278 - RNA, 22 nt, Human
augacaguuauacugucgguuu

SEQ ID NO: 3567279 - RNA, 19 nt, Human
augacauaaaaacaacuuu

SEQ ID NO: 3567280 - RNA, 13 nt, Human
augacauauuuuu

SEQ ID NO: 3567281 - RNA, 18 nt, Human
augacaucaccacaguuu

SEQ ID NO: 3567282 - RNA, 20 nt, Human
augacaucacuuguacaaaa

SEQ ID NO: 3567283 - RNA, 18 nt, Human
augacaucucaggggcca

SEQ ID NO: 3567284 - RNA, 19 nt, Human
augacaucuuuuuaaagcu

SEQ ID NO: 3567285 - RNA, 22 nt, Human
augacaugaauuuuagcuuuug

SEQ ID NO: 3567286 - RNA, 15 nt, Human
augacaugcacugac

SEQ ID NO: 3567287 - RNA, 17 nt, Human
augacauguuauauauu

SEQ ID NO: 3567288 - RNA, 17 nt, Human
augacauucaugccugg

SEQ ID NO: 3567289 - RNA, 19 nt, Human
augacauugacuauuuuug

SEQ ID NO: 3567290 - RNA, 14 nt, Human
augacauugcuaag

SEQ ID NO: 3567291 - RNA, 20 nt, Human
augacauugcuaagaugcuc

SEQ ID NO: 3567292 - RNA, 21 nt, Human
augacauuuuuuuuaacuacu

SEQ ID NO: 3567293 - RNA, 15 nt, Human
augaccaaaguccuu

SEQ ID NO: 3567294 - RNA, 13 nt, Human
augaccaauuuua

SEQ ID NO: 3567295 - RNA, 14 nt, Human
augaccagcaaaua

SEQ ID NO: 3567296 - RNA, 19 nt, Human
augaccaguaauugugaaa

SEQ ID NO: 3567297 - RNA, 13 nt, Human
augacccaccccu

SEQ ID NO: 3567298 - RNA, 12 nt, Human
augacccaggcu

SEQ ID NO: 3567299 - RNA, 13 nt, Human
augacccccccag

SEQ ID NO: 3567300 - RNA, 22 nt, Human
augaccucaccauuuuuguucu

SEQ ID NO: 3567301 - RNA, 14 nt, Human
augaccuggauaac

SEQ ID NO: 3567302 - RNA, 15 nt, Human
augacggaagaacau

SEQ ID NO: 3567303 - RNA, 19 nt, Human
augacggaagaacauagaa

SEQ ID NO: 3567304 - RNA, 17 nt, Human
augacgguauuaugcuu

SEQ ID NO: 3567305 - RNA, 16 nt, Human
augacuaaaaauauua

SEQ ID NO: 3567306 - RNA, 11 nt, Human
augacuaaaga

SEQ ID NO: 3567307 - RNA, 13 nt, Human
augacuaaagaga

SEQ ID NO: 3567308 - RNA, 18 nt, Human
augacuaaagagagaaug

SEQ ID NO: 3567309 - RNA, 21 nt, Human
augacuaaagagagaauguag

SEQ ID NO: 3567310 - RNA, 23 nt, Human
augacuaaagagagaauguagau

SEQ ID NO: 3567311 - RNA, 13 nt, Human
augacuaauuagg

SEQ ID NO: 3567312 - RNA, 23 nt, Human
augacuaauuaggguacauuuau

SEQ ID NO: 3567313 - RNA, 16 nt, Human
augacuaauucuugca

SEQ ID NO: 3567314 - RNA, 23 nt, Human
augacuacuuagcauccuaagaa

SEQ ID NO: 3567315 - RNA, 15 nt, Human
augacuagaggcagg

SEQ ID NO: 3567316 - RNA, 17 nt, Human
augacuauauaauuuau

SEQ ID NO: 3567317 - RNA, 22 nt, Human
augacuauauaauuuauuucca

SEQ ID NO: 3567318 - RNA, 22 nt, Human
augacuaugcguggcuggaacc

SEQ ID NO: 3567319 - RNA, 18 nt, Human
augacuauucaguggcua

SEQ ID NO: 3567320 - RNA, 15 nt, Human
augacucaagauucc

SEQ ID NO: 3567321 - RNA, 22 nt, Human
augacucaagauucccaggagu

SEQ ID NO: 3567322 - RNA, 17 nt, Human
augacucacaugaugca

SEQ ID NO: 3567323 - RNA, 16 nt, Human
augacuccagaauuuc

SEQ ID NO: 3567324 - RNA, 17 nt, Human
augacuccagaauuucc

SEQ ID NO: 3567325 - RNA, 22 nt, Human
augacucccuuaaaauagaaau

SEQ ID NO: 3567326 - RNA, 16 nt, Human
augacucggggguggg

SEQ ID NO: 3567327 - RNA, 18 nt, Human
augacucuucccucaaau

SEQ ID NO: 3567328 - RNA, 14 nt, Human
augacucuuuauug

SEQ ID NO: 3567329 - RNA, 21 nt, Human
augacugccaagacugcugug

SEQ ID NO: 3567330 - RNA, 23 nt, Human
augacugcuccccagcccuggcu

SEQ ID NO: 3567331 - RNA, 22 nt, Human
augacugcuugcccuaagcaga

SEQ ID NO: 3567332 - RNA, 12 nt, Human
augacuggaauu

SEQ ID NO: 3567333 - RNA, 17 nt, Human
augacuggaauuuuuau

SEQ ID NO: 3567334 - RNA, 22 nt, Human
augacuggaauuuuuauuaugc

SEQ ID NO: 3567335 - RNA, 20 nt, Human
augacuggcauuuuauagac

SEQ ID NO: 3567336 - RNA, 17 nt, Human
augacuguagaauuugu

SEQ ID NO: 3567337 - RNA, 22 nt, Human
augacugugcuacugucuuugg

SEQ ID NO: 3567338 - RNA, 22 nt, Human
augacuuaagcacacuugacau

SEQ ID NO: 3567339 - RNA, 14 nt, Human
augacuuacuguac

SEQ ID NO: 3567340 - RNA, 22 nt, Human
augacuuccccaauaucuugcu

SEQ ID NO: 3567341 - RNA, 18 nt, Human
augacuugggcaccccca

SEQ ID NO: 3567342 - RNA, 20 nt, Human
augacuugggcacccccagc

SEQ ID NO: 3567343 - RNA, 23 nt, Human
augacuugggcacccccagccug

SEQ ID NO: 3567344 - RNA, 13 nt, Human
augacuuuauugc

SEQ ID NO: 3567345 - RNA, 20 nt, Human
augacuuucuuuuuguagcu

SEQ ID NO: 3567346 - RNA, 12 nt, Human
augacuuuggac

SEQ ID NO: 3567347 - RNA, 13 nt, Human
augacuuuuuaua

SEQ ID NO: 3567348 - RNA, 14 nt, Human
augacuuuuugaaa

SEQ ID NO: 3567349 - RNA, 22 nt, Human
augagaaacuggcaaagcagaa

SEQ ID NO: 3567350 - RNA, 20 nt, Human
augagaaacuuaaauguuau

SEQ ID NO: 3567351 - RNA, 21 nt, Human
augagaaagguugaagcacca

SEQ ID NO: 3567352 - RNA, 22 nt, Human
augagaaagguugaagcaccaa

SEQ ID NO: 3567353 - RNA, 12 nt, Human
augagaaaugua

SEQ ID NO: 3567354 - RNA, 15 nt, Human
augagaacaaagcug

SEQ ID NO: 3567355 - RNA, 20 nt, Human
augagaacaaagcuguuaaa

SEQ ID NO: 3567356 - RNA, 22 nt, Human
augagaacaaagcuguuaaacu

SEQ ID NO: 3567357 - RNA, 23 nt, Human
augagaacagacuggccugagga

SEQ ID NO: 3567358 - RNA, 21 nt, Human
augagaacauguugguauuua

SEQ ID NO: 3567359 - RNA, 14 nt, Human
augagaacucugag

SEQ ID NO: 3567360 - RNA, 21 nt, Human
augagaagaaaauggaaccag

SEQ ID NO: 3567361 - RNA, 18 nt, Human
augagaagagggccugug

SEQ ID NO: 3567362 - RNA, 21 nt, Human
augagaagagggccuguggga

SEQ ID NO: 3567363 - RNA, 18 nt, Human
augagaaggaauuugagu

SEQ ID NO: 3567364 - RNA, 15 nt, Human
augagaaggcagcca

SEQ ID NO: 3567365 - RNA, 23 nt, Human
augagaaucuacccccagaucca

SEQ ID NO: 3567366 - RNA, 16 nt, Human
augagaauucagcugc

SEQ ID NO: 3567367 - RNA, 21 nt, Human
augagaauuugagugcucuga

SEQ ID NO: 3567368 - RNA, 15 nt, Human
augagacaaacaugc

SEQ ID NO: 3567369 - RNA, 20 nt, Human
augagacaggaccuaggaua

SEQ ID NO: 3567370 - RNA, 21 nt, Human
augagacccauuccuauuucu

SEQ ID NO: 3567371 - RNA, 16 nt, Human
augagacucagugcag

SEQ ID NO: 3567372 - RNA, 18 nt, Human
augagacucuagggucca

SEQ ID NO: 3567373 - RNA, 16 nt, Human
augagacugaacugug

SEQ ID NO: 3567374 - RNA, 14 nt, Human
augagacuugccuu

SEQ ID NO: 3567375 - RNA, 23 nt, Human
augagagacacacugaagaagca

SEQ ID NO: 3567376 - RNA, 13 nt, Human
augagagcccaga

SEQ ID NO: 3567377 - RNA, 16 nt, Human
augagagcccagaggu

SEQ ID NO: 3567378 - RNA, 22 nt, Human
augagagcccagagguaacaga

SEQ ID NO: 3567379 - RNA, 12 nt, Human
augagaggaaau

SEQ ID NO: 3567380 - RNA, 13 nt, Human
augagaggaaauc

SEQ ID NO: 3567381 - RNA, 19 nt, Human
augagagggcaguguuucc

SEQ ID NO: 3567382 - RNA, 13 nt, Human
augagagucacuu

SEQ ID NO: 3567383 - RNA, 17 nt, Human
augagaguuuuggaugc

SEQ ID NO: 3567384 - RNA, 11 nt, Human
augugaucuca

SEQ ID NO: 3567385 - RNA, 17 nt, Human
augugaucugucuugua

SEQ ID NO: 3567386 - RNA, 18 nt, Human
augugaucugucuuguaa

SEQ ID NO: 3567387 - RNA, 20 nt, Human
augugaucugucuuguaaua

SEQ ID NO: 3567388 - RNA, 16 nt, Human
augugaugagaggaaa

SEQ ID NO: 3567389 - RNA, 17 nt, Human
augugaugagaggaaau

SEQ ID NO: 3567390 - RNA, 14 nt, Human
augugaugauguaa

SEQ ID NO: 3567391 - RNA, 21 nt, Human
augugaugauguaauugacgg

SEQ ID NO: 3567392 - RNA, 16 nt, Human
augugauguucuaagg

SEQ ID NO: 3567393 - RNA, 23 nt, Human
augugauuccuuugaagaggaaa

SEQ ID NO: 3567394 - RNA, 15 nt, Human
augugauucuaaugu

SEQ ID NO: 3567395 - RNA, 14 nt, Human
augugauuguggaa

SEQ ID NO: 3567396 - RNA, 17 nt, Human
augugauuuaauagugu

SEQ ID NO: 3567397 - RNA, 15 nt, Human
augugauuuuucuga

SEQ ID NO: 3567398 - RNA, 17 nt, Human
augugcaaaaauuuuug

SEQ ID NO: 3567399 - RNA, 13 nt, Human
augugcaaaacag

SEQ ID NO: 3567400 - RNA, 20 nt, Human
augugcaagcgacgacagau

SEQ ID NO: 3567401 - RNA, 15 nt, Human
augugcaaguuuauc

SEQ ID NO: 3567402 - RNA, 18 nt, Human
augugcaauagaagguga

SEQ ID NO: 3567403 - RNA, 22 nt, Human
augugcacugucacuuugcucu

SEQ ID NO: 3567404 - RNA, 18 nt, Human
augugcagcagauuggaa

SEQ ID NO: 3567405 - RNA, 21 nt, Human
augugcagcagauuggaagga

SEQ ID NO: 3567406 - RNA, 17 nt, Human
augugcagguuuguuac

SEQ ID NO: 3567407 - RNA, 16 nt, Human
augugcauaguuucuu

SEQ ID NO: 3567408 - RNA, 18 nt, Human
augugcauaguuucuuua

SEQ ID NO: 3567409 - RNA, 17 nt, Human
augugcauucuccagcc

SEQ ID NO: 3567410 - RNA, 19 nt, Human
augugcauucuuuuaaaag

SEQ ID NO: 3567411 - RNA, 20 nt, Human
augugcauucuuuuaaaaga

SEQ ID NO: 3567412 - RNA, 22 nt, Human
augugccagguuuuuggucuga

SEQ ID NO: 3567413 - RNA, 19 nt, Human
augugcccaguuaaucuug

SEQ ID NO: 3567414 - RNA, 22 nt, Human
augugccccuucgcagcugaag

SEQ ID NO: 3567415 - RNA, 17 nt, Human
augugccgaaugugcag

SEQ ID NO: 3567416 - RNA, 21 nt, Human
augugccguguuauuguauua

SEQ ID NO: 3567417 - RNA, 20 nt, Human
augugccuauugcuagagcu

SEQ ID NO: 3567418 - RNA, 22 nt, Human
augugccugcaccaggagacag

SEQ ID NO: 3567419 - RNA, 15 nt, Human
augugccugcuucag

SEQ ID NO: 3567420 - RNA, 23 nt, Human
augugccugcuucagccucccac

SEQ ID NO: 3567421 - RNA, 17 nt, Human
augugccuuauguugaa

SEQ ID NO: 3567422 - RNA, 15 nt, Human
augugcgugugugca

SEQ ID NO: 3567423 - RNA, 14 nt, Human
augugcuacugauu

SEQ ID NO: 3567424 - RNA, 19 nt, Human
augugcuaguaauuggaaa

SEQ ID NO: 3567425 - RNA, 17 nt, Human
augugcucaucagaaac

SEQ ID NO: 3567426 - RNA, 12 nt, Human
augugcugauca

SEQ ID NO: 3567427 - RNA, 18 nt, Human
augugcugcgugccugug

SEQ ID NO: 3567428 - RNA, 19 nt, Human
augugcugcuuugauauau

SEQ ID NO: 3567429 - RNA, 15 nt, Human
augugcuguaauuua

SEQ ID NO: 3567430 - RNA, 18 nt, Human
augugcugugaccauuua

SEQ ID NO: 3567431 - RNA, 14 nt, Human
augugcuuugagaa

SEQ ID NO: 3567432 - RNA, 13 nt, Human
augugcuuuucuc

SEQ ID NO: 3567433 - RNA, 16 nt, Human
auguggaaagugaauu

SEQ ID NO: 3567434 - RNA, 19 nt, Human
auguggaaagugaauuuga

SEQ ID NO: 3567435 - RNA, 16 nt, Human
auguggaacugcugcc

SEQ ID NO: 3567436 - RNA, 18 nt, Human
auguggaacugcugccac

SEQ ID NO: 3567437 - RNA, 21 nt, Human
auguggaagaaaaugguuuau

SEQ ID NO: 3567438 - RNA, 13 nt, Human
auguggaagugug

SEQ ID NO: 3567439 - RNA, 23 nt, Human
auguggaagugugggucugugug

SEQ ID NO: 3567440 - RNA, 13 nt, Human
auguggagccagg

SEQ ID NO: 3567441 - RNA, 15 nt, Human
auguggagccaggcg

SEQ ID NO: 3567442 - RNA, 19 nt, Human
auguggagucagccucgca

SEQ ID NO: 3567443 - RNA, 24 nt, Human
auguggaguucaucuugaauugua

SEQ ID NO: 3567444 - RNA, 16 nt, Human
auguggcauuugugau

SEQ ID NO: 3567445 - RNA, 15 nt, Human
auguggcccuggccu

SEQ ID NO: 3567446 - RNA, 14 nt, Human
auguggcguggaga

SEQ ID NO: 3567447 - RNA, 13 nt, Human
auguggcuccucc

SEQ ID NO: 3567448 - RNA, 17 nt, Human
auguggcugcagcagcg

SEQ ID NO: 3567449 - RNA, 13 nt, Human
auguggcugcccc

SEQ ID NO: 3567450 - RNA, 20 nt, Human
auguggcuggaagauccugc

SEQ ID NO: 3567451 - RNA, 22 nt, Human
auguggcuguaucuuguuuuuc

SEQ ID NO: 3567452 - RNA, 16 nt, Human
auguggcuugagaaau

SEQ ID NO: 3567453 - RNA, 15 nt, Human
augugggaagaaaca

SEQ ID NO: 3567454 - RNA, 20 nt, Human
augugggauuaugggucaca

SEQ ID NO: 3567455 - RNA, 22 nt, Human
augugggauuaugggucacagg

SEQ ID NO: 3567456 - RNA, 11 nt, Human
augugggcagc

SEQ ID NO: 3567457 - RNA, 12 nt, Human
augugggcagcu

SEQ ID NO: 3567458 - RNA, 16 nt, Human
augugggggucugugu

SEQ ID NO: 3567459 - RNA, 21 nt, Human
augugggguccccaucauccc

SEQ ID NO: 3567460 - RNA, 17 nt, Human
augugggucuuccaggg

SEQ ID NO: 3567461 - RNA, 16 nt, Human
auguggguugccuggu

SEQ ID NO: 3567462 - RNA, 17 nt, Human
auguggucacagcugua

SEQ ID NO: 3567463 - RNA, 19 nt, Human
auguggucacagcuguaua

SEQ ID NO: 3567464 - RNA, 22 nt, Human
auguggucacagcuguauagcu

SEQ ID NO: 3567465 - RNA, 15 nt, Human
auguggucucaggau

SEQ ID NO: 3567466 - RNA, 13 nt, Human
auguggugaugau

SEQ ID NO: 3567467 - RNA, 18 nt, Human
augugguggcacaggccc

SEQ ID NO: 3567468 - RNA, 18 nt, Human
augugguuauuucucuga

SEQ ID NO: 3567469 - RNA, 13 nt, Human
augugguuuauag

SEQ ID NO: 3567470 - RNA, 17 nt, Human
augugguuugguuccuc

SEQ ID NO: 3567471 - RNA, 16 nt, Human
augugguuuuagauuu

SEQ ID NO: 3567472 - RNA, 17 nt, Human
auguguaagacaaaaag

SEQ ID NO: 3567473 - RNA, 15 nt, Human
auguguaaggugaac

SEQ ID NO: 3567474 - RNA, 14 nt, Human
auguguaaguauuc

SEQ ID NO: 3567475 - RNA, 22 nt, Human
auguguaauaaauauguuucac

SEQ ID NO: 3567476 - RNA, 17 nt, Human
auguguaaucaauaaac

SEQ ID NO: 3567477 - RNA, 22 nt, Human
auguguaaucaauaaacgauuu

SEQ ID NO: 3567478 - RNA, 16 nt, Human
auguguacauggcaga

SEQ ID NO: 3567479 - RNA, 15 nt, Human
auguguagccuaugu

SEQ ID NO: 3567480 - RNA, 15 nt, Human
auguguauaaacaag

SEQ ID NO: 3567481 - RNA, 13 nt, Human
auguguauaaauu

SEQ ID NO: 3567482 - RNA, 15 nt, Human
auguguauauauaca

SEQ ID NO: 3567483 - RNA, 15 nt, Human
auguguaugcacagu

SEQ ID NO: 3567484 - RNA, 16 nt, Human
auguguccaucccagc

SEQ ID NO: 3567485 - RNA, 11 nt, Human
augugucccag

SEQ ID NO: 3567486 - RNA, 12 nt, Human
augugucccaga

SEQ ID NO: 3567487 - RNA, 20 nt, Human
augugucccgaauccacagu

SEQ ID NO: 3567488 - RNA, 17 nt, Human
auguguccucagggagc

SEQ ID NO: 3567489 - RNA, 18 nt, Human
auguguccucagggagca

SEQ ID NO: 3567490 - RNA, 14 nt, Human
auguguccugacac

SEQ ID NO: 3567491 - RNA, 13 nt, Human
auguguccugguu

SEQ ID NO: 3567492 - RNA, 16 nt, Human
augugucuguauuuca

SEQ ID NO: 3567493 - RNA, 18 nt, Human
augugucuguauuucaug

SEQ ID NO: 3567494 - RNA, 13 nt, Human
augugugagugug

SEQ ID NO: 3567495 - RNA, 16 nt, Human
augugugagugugugc

SEQ ID NO: 3567496 - RNA, 17 nt, Human
augugugcaugugugua

SEQ ID NO: 3567497 - RNA, 18 nt, Human
augugugcauguguguau

SEQ ID NO: 3567498 - RNA, 11 nt, Human
augugugccau

SEQ ID NO: 3567499 - RNA, 19 nt, Human
augugugguggccucagcu

SEQ ID NO: 3567500 - RNA, 19 nt, Human
auguguguagacaaauauu

SEQ ID NO: 3567501 - RNA, 13 nt, Human
auguguguauaag

SEQ ID NO: 3567502 - RNA, 14 nt, Human
auguguguauauau

SEQ ID NO: 3567503 - RNA, 15 nt, Human
auguguguauauaug

SEQ ID NO: 3567504 - RNA, 18 nt, Human
auguguguauauaugugu

SEQ ID NO: 3567505 - RNA, 14 nt, Human
auguguguauaugu

SEQ ID NO: 3567506 - RNA, 16 nt, Human
auguguguauguguau

SEQ ID NO: 3567507 - RNA, 16 nt, Human
auguguguaugugugu

SEQ ID NO: 3567508 - RNA, 22 nt, Human
auguguguccacgacugucucc

SEQ ID NO: 3567509 - RNA, 23 nt, Human
auguguguccacgacugucucca

SEQ ID NO: 3567510 - RNA, 13 nt, Human
augugugugaugu

SEQ ID NO: 3567511 - RNA, 15 nt, Human
augugugugcucagg

SEQ ID NO: 3567512 - RNA, 15 nt, Human
auguguguguauguu

SEQ ID NO: 3567513 - RNA, 12 nt, Human
augugugugugc

SEQ ID NO: 3567514 - RNA, 18 nt, Human
auguguguguguugugug

SEQ ID NO: 3567515 - RNA, 22 nt, Human
auguguguguguuguguguggg

SEQ ID NO: 3567516 - RNA, 17 nt, Human
auguguguugauacugu

SEQ ID NO: 3567517 - RNA, 15 nt, Human
auguguguuuaaaua

SEQ ID NO: 3567518 - RNA, 16 nt, Human
auguguguuuaaauaa

SEQ ID NO: 3567519 - RNA, 17 nt, Human
auguguguuuaaauaaa

SEQ ID NO: 3567520 - RNA, 23 nt, Human
auguguguuuuaaaaugagaaau

SEQ ID NO: 3567521 - RNA, 14 nt, Human
auguguguuuuuuc

SEQ ID NO: 3567522 - RNA, 22 nt, Human
auguguuaaucuuaauguauau

SEQ ID NO: 3567523 - RNA, 20 nt, Human
auguguucucggagugugua

SEQ ID NO: 3567524 - RNA, 19 nt, Human
auguguugccacuuuccaa

SEQ ID NO: 3567525 - RNA, 11 nt, Human
auguguuuaga

SEQ ID NO: 3567526 - RNA, 16 nt, Human
auguguuuagaauuga

SEQ ID NO: 3567527 - RNA, 14 nt, Human
auguguuucaaacu

SEQ ID NO: 3567528 - RNA, 20 nt, Human
auguguuucacaguuugaaa

SEQ ID NO: 3567529 - RNA, 15 nt, Human
auguguuugaacuuc

SEQ ID NO: 3567530 - RNA, 14 nt, Human
auuaaaacugaauu

SEQ ID NO: 3567531 - RNA, 21 nt, Human
auuaaaacuucuuaaauaucu

SEQ ID NO: 3567532 - RNA, 23 nt, Human
auuaaaagaaaauaaaaaaaaga

SEQ ID NO: 3567533 - RNA, 23 nt, Human
auuaaaagaugucucugcaaacc

SEQ ID NO: 3567534 - RNA, 19 nt, Human
auuaaaauaaauaaaugca

SEQ ID NO: 3567535 - RNA, 14 nt, Human
auuaaaauaugcac

SEQ ID NO: 3567536 - RNA, 18 nt, Human
auuaaaauaugcacuaag

SEQ ID NO: 3567537 - RNA, 22 nt, Human
auuaaaauauggcuauaaauau

SEQ ID NO: 3567538 - RNA, 13 nt, Human
auuaaaauauuuc

SEQ ID NO: 3567539 - RNA, 17 nt, Human
auuaaaauauuucaggu

SEQ ID NO: 3567540 - RNA, 12 nt, Human
auuaaaaucuua

SEQ ID NO: 3567541 - RNA, 13 nt, Human
auuaaaaucuuaa

SEQ ID NO: 3567542 - RNA, 13 nt, Human
auuaaaaugaaua

SEQ ID NO: 3567543 - RNA, 19 nt, Human
auuaaaauucugaauuuug

SEQ ID NO: 3567544 - RNA, 11 nt, Human
auuaaacaauu

SEQ ID NO: 3567545 - RNA, 18 nt, Human
auuaaacagauuuuuaca

SEQ ID NO: 3567546 - RNA, 16 nt, Human
auuaaacauaaaacaa

SEQ ID NO: 3567547 - RNA, 22 nt, Human
auuaaaccaucucccuggugcu

SEQ ID NO: 3567548 - RNA, 12 nt, Human
auuaaaccuguc

SEQ ID NO: 3567549 - RNA, 17 nt, Human
auuaaacggauuauuuu

SEQ ID NO: 3567550 - RNA, 21 nt, Human
auuaaacggauuauuuuuuca

SEQ ID NO: 3567551 - RNA, 22 nt, Human
auuaaacggauuauuuuuucag

SEQ ID NO: 3567552 - RNA, 23 nt, Human
auuaaacggauuauuuuuucaga

SEQ ID NO: 3567553 - RNA, 18 nt, Human
auuaaacguaugcaugug

SEQ ID NO: 3567554 - RNA, 16 nt, Human
auuaaacuuaaucuaa

SEQ ID NO: 3567555 - RNA, 17 nt, Human
auuaaacuuaaucuaaa

SEQ ID NO: 3567556 - RNA, 19 nt, Human
auuaaacuuaaucuaaaug

SEQ ID NO: 3567557 - RNA, 14 nt, Human
auuaaacuuaugaa

SEQ ID NO: 3567558 - RNA, 16 nt, Human
auuaaacuuaugaaug

SEQ ID NO: 3567559 - RNA, 17 nt, Human
auuaaacuuaugaaugu

SEQ ID NO: 3567560 - RNA, 17 nt, Human
auuaaagaaaaaaaugu

SEQ ID NO: 3567561 - RNA, 19 nt, Human
auuaaagaaaaaaauguau

SEQ ID NO: 3567562 - RNA, 21 nt, Human
auuaaagaaaaaaauguauuu

SEQ ID NO: 3567563 - RNA, 16 nt, Human
auuaaagaaauaauuu

SEQ ID NO: 3567564 - RNA, 19 nt, Human
auuaaagaaauaauuuuau

SEQ ID NO: 3567565 - RNA, 14 nt, Human
auuaaagaagaccu

SEQ ID NO: 3567566 - RNA, 15 nt, Human
auuaaagaagaccug

SEQ ID NO: 3567567 - RNA, 20 nt, Human
auuaaagcauuuacuuugaa

SEQ ID NO: 3567568 - RNA, 15 nt, Human
auuaaagcauuuaga

SEQ ID NO: 3567569 - RNA, 14 nt, Human
auuaaaggaauaaa

SEQ ID NO: 3567570 - RNA, 16 nt, Human
auuaaagucagaaguu

SEQ ID NO: 3567571 - RNA, 19 nt, Human
auuaaagucagaaguuuua

SEQ ID NO: 3567572 - RNA, 14 nt, Human
auuaaagucugaau

SEQ ID NO: 3567573 - RNA, 19 nt, Human
auuaaagugcuaagguucu

SEQ ID NO: 3567574 - RNA, 20 nt, Human
auuaaagugcuaagguucua

SEQ ID NO: 3567575 - RNA, 19 nt, Human
auuaaaguguccauugaca

SEQ ID NO: 3567576 - RNA, 12 nt, Human
auuaaaguuuca

SEQ ID NO: 3567577 - RNA, 23 nt, Human
auuaaaguuucaaaaaucugaag

SEQ ID NO: 3567578 - RNA, 23 nt, Human
auuaaaguuugcuuguuucuugg

SEQ ID NO: 3567579 - RNA, 13 nt, Human
auuaaauaaauuu

SEQ ID NO: 3567580 - RNA, 12 nt, Human
auuaaauacaga

SEQ ID NO: 3567581 - RNA, 17 nt, Human
auuaaauacagacacua

SEQ ID NO: 3567582 - RNA, 20 nt, Human
auuaaauacagacacuaagu

SEQ ID NO: 3567583 - RNA, 15 nt, Human
auuaaaucauacucc

SEQ ID NO: 3567584 - RNA, 18 nt, Human
auuaaaugaauauuuuga

SEQ ID NO: 3567585 - RNA, 24 nt, Human
auuaaauguagcuucagucauuaa

SEQ ID NO: 3567586 - RNA, 18 nt, Human
auuaaauuacauuuguaa

SEQ ID NO: 3567587 - RNA, 11 nt, Human
auuaaauuaug

SEQ ID NO: 3567588 - RNA, 16 nt, Human
auuaaauucacaaacu

SEQ ID NO: 3567589 - RNA, 18 nt, Human
auuaaauucuugcaaagu

SEQ ID NO: 3567590 - RNA, 17 nt, Human
auuaaauuggaaagcag

SEQ ID NO: 3567591 - RNA, 14 nt, Human
auuaaauuuuuccu

SEQ ID NO: 3567592 - RNA, 15 nt, Human
auuaaauuuuuuugu

SEQ ID NO: 3567593 - RNA, 20 nt, Human
auuaaauuuuuuuguaugaa

SEQ ID NO: 3567594 - RNA, 20 nt, Human
auuaaauuuuuuuuacauuu

SEQ ID NO: 3567595 - RNA, 13 nt, Human
auuaacaaauaug

SEQ ID NO: 3567596 - RNA, 21 nt, Human
auuaacaaauaugcuaauuug

SEQ ID NO: 3567597 - RNA, 14 nt, Human
auuaacaaauuaug

SEQ ID NO: 3567598 - RNA, 18 nt, Human
auuaacaauuaauugucu

SEQ ID NO: 3567599 - RNA, 16 nt, Human
auuaacaguuuuccau

SEQ ID NO: 3567600 - RNA, 18 nt, Human
auuaacaguuuuccauga

SEQ ID NO: 3567601 - RNA, 22 nt, Human
auuaacaguuuuccaugaaaac

SEQ ID NO: 3567602 - RNA, 21 nt, Human
auuaacaugaauauuuagugu

SEQ ID NO: 3567603 - RNA, 17 nt, Human
auuaacauguuaaacca

SEQ ID NO: 3567604 - RNA, 19 nt, Human
auuaacauugggaaaucuu

SEQ ID NO: 3567605 - RNA, 11 nt, Human
auuaaccuaga

SEQ ID NO: 3567606 - RNA, 14 nt, Human
auuaaccucugcac

SEQ ID NO: 3567607 - RNA, 18 nt, Human
auuaacuggguaaugaaa

SEQ ID NO: 3567608 - RNA, 15 nt, Human
auuaacuuagcaugu

SEQ ID NO: 3567609 - RNA, 14 nt, Human
auuaacuuauuuag

SEQ ID NO: 3567610 - RNA, 18 nt, Human
auuaacuuauuuagagau

SEQ ID NO: 3567611 - RNA, 20 nt, Human
auuaacuuggaugaguuuug

SEQ ID NO: 3567612 - RNA, 19 nt, Human
auuaacuuuuauaaacuuu

SEQ ID NO: 3567613 - RNA, 20 nt, Human
auuaacuuuuauaaacuuua

SEQ ID NO: 3567614 - RNA, 12 nt, Human
auuaagaaaauc

SEQ ID NO: 3567615 - RNA, 16 nt, Human
auuaagaaaaucauau

SEQ ID NO: 3567616 - RNA, 13 nt, Human
auuaagaaagacu

SEQ ID NO: 3567617 - RNA, 23 nt, Human
auuaagaaaggaagcauuguaaa

SEQ ID NO: 3567618 - RNA, 11 nt, Human
auuaagaaaua

SEQ ID NO: 3567619 - RNA, 20 nt, Human
auuaagaacacuuuuaauaa

SEQ ID NO: 3567620 - RNA, 21 nt, Human
auuaagaauauguuuccuugu

SEQ ID NO: 3567621 - RNA, 16 nt, Human
auuaagaaugaucuga

SEQ ID NO: 3567622 - RNA, 13 nt, Human
auuaagaauguug

SEQ ID NO: 3567623 - RNA, 21 nt, Human
auuaagacaauagcacuuaaa

SEQ ID NO: 3567624 - RNA, 14 nt, Human
auuaagauacaaau

SEQ ID NO: 3567625 - RNA, 24 nt, Human
auuaagauggauucucagauauuu

SEQ ID NO: 3567626 - RNA, 18 nt, Human
auuaagauuauaauuguu

SEQ ID NO: 3567627 - RNA, 15 nt, Human
auuaagauuauuuua

SEQ ID NO: 3567628 - RNA, 20 nt, Human
auuaagauugaggccugccc

SEQ ID NO: 3567629 - RNA, 16 nt, Human
auuaagauuuccaagu

SEQ ID NO: 3567630 - RNA, 14 nt, Human
auuaagcaaauguu

SEQ ID NO: 3567631 - RNA, 21 nt, Human
auuaagcauauauuuuuauau

SEQ ID NO: 3567632 - RNA, 18 nt, Human
auuaagcaucacaaauga

SEQ ID NO: 3567633 - RNA, 17 nt, Human
auuaagccacuuaaaau

SEQ ID NO: 3567634 - RNA, 20 nt, Human
auuaagccacuuaaaauguu

SEQ ID NO: 3567635 - RNA, 18 nt, Human
auuaagcccacaguauau

SEQ ID NO: 3567636 - RNA, 19 nt, Human
auuaagcccacaguauauu

SEQ ID NO: 3567637 - RNA, 22 nt, Human
auuaagcuguuccuguucagua

SEQ ID NO: 3567638 - RNA, 17 nt, Human
auuaagcuuuuuggaau

SEQ ID NO: 3567639 - RNA, 15 nt, Human
auuaaggauuuuaug

SEQ ID NO: 3567640 - RNA, 20 nt, Human
auuaaggauuuuaugcuuua

SEQ ID NO: 3567641 - RNA, 19 nt, Human
auuaaggcaacugaacaaa

SEQ ID NO: 3567642 - RNA, 21 nt, Human
auuaaggcaacugaacaaaaa

SEQ ID NO: 3567643 - RNA, 15 nt, Human
auuaaggggaagaau

SEQ ID NO: 3567644 - RNA, 19 nt, Human
auuaaggggaagaaugaaa

SEQ ID NO: 3567645 - RNA, 15 nt, Human
auuaaggucucucuu

SEQ ID NO: 3567646 - RNA, 19 nt, Human
auuaaggucucucuuugga

SEQ ID NO: 3567647 - RNA, 17 nt, Human
auuaagguguuugaaaa

SEQ ID NO: 3567648 - RNA, 15 nt, Human
auuaaguaaacuaau

SEQ ID NO: 3567649 - RNA, 18 nt, Human
auuaaguaaucaauaaag

SEQ ID NO: 3567650 - RNA, 13 nt, Human
auuaaguaaugau

SEQ ID NO: 3567651 - RNA, 14 nt, Human
auuaaguacuaugu

SEQ ID NO: 3567652 - RNA, 18 nt, Human
auuaaguacuauguauca

SEQ ID NO: 3567653 - RNA, 14 nt, Human
auuaaguuguuaau

SEQ ID NO: 3567654 - RNA, 19 nt, Human
auuaaguuguuaauaaaag

SEQ ID NO: 3567655 - RNA, 19 nt, Human
auuaauaaaaaauggaaag

SEQ ID NO: 3567656 - RNA, 12 nt, Human
auuaauaaaaag

SEQ ID NO: 3567657 - RNA, 13 nt, Human
auuaauacuaaaa

SEQ ID NO: 3567658 - RNA, 17 nt, Human
auuaauagcagccuuuc

SEQ ID NO: 3567659 - RNA, 13 nt, Human
auuaauagcuuuu

SEQ ID NO: 3567660 - RNA, 18 nt, Human
auuaauagcuuuuauugu

SEQ ID NO: 3567661 - RNA, 23 nt, Human
auuaauagcuuuuauuguauaaa

SEQ ID NO: 3567662 - RNA, 20 nt, Human
auuaauaguaauuuguaaag

SEQ ID NO: 3567663 - RNA, 16 nt, Human
auuaauauauguauua

SEQ ID NO: 3567664 - RNA, 14 nt, Human
auuaauauauuaaa

SEQ ID NO: 3567665 - RNA, 15 nt, Human
auuaauauauuucca

SEQ ID NO: 3567666 - RNA, 18 nt, Human
auuaauauuaauuuucua

SEQ ID NO: 3567667 - RNA, 23 nt, Human
auuaauauucaggguaaauagga

SEQ ID NO: 3567668 - RNA, 12 nt, Human
auuaauauucau

SEQ ID NO: 3567669 - RNA, 12 nt, Human
auuaauauuugu

SEQ ID NO: 3567670 - RNA, 17 nt, Human
auuaauauuuguuuagu

SEQ ID NO: 3567671 - RNA, 14 nt, Human
auuaauauuuuaau

SEQ ID NO: 3567672 - RNA, 22 nt, Human
auuaaucacccuaccaacuuua

SEQ ID NO: 3567673 - RNA, 16 nt, Human
auuaaucacuauuguu

SEQ ID NO: 3567674 - RNA, 15 nt, Human
auuaaucacugugua

SEQ ID NO: 3567675 - RNA, 17 nt, Human
auuuaaacauuaaaaau

SEQ ID NO: 3567676 - RNA, 14 nt, Human
auuuaaacccauuu

SEQ ID NO: 3567677 - RNA, 15 nt, Human
auuuaaacccauuuu

SEQ ID NO: 3567678 - RNA, 17 nt, Human
auuuaaacccauuuuag

SEQ ID NO: 3567679 - RNA, 19 nt, Human
auuuaaaccgcuaaaagaa

SEQ ID NO: 3567680 - RNA, 21 nt, Human
auuuaaaccgcuaaaagaaac

SEQ ID NO: 3567681 - RNA, 23 nt, Human
auuuaaaccgcuaaaagaaacuu

SEQ ID NO: 3567682 - RNA, 12 nt, Human
auuuaaacuaua

SEQ ID NO: 3567683 - RNA, 17 nt, Human
auuuaaacuaucuugug

SEQ ID NO: 3567684 - RNA, 18 nt, Human
auuuaaagaaaaaaaugu

SEQ ID NO: 3567685 - RNA, 18 nt, Human
auuuaaagaaauauguau

SEQ ID NO: 3567686 - RNA, 11 nt, Human
auuuaaagcag

SEQ ID NO: 3567687 - RNA, 16 nt, Human
auuuaaagcagguucu

SEQ ID NO: 3567688 - RNA, 20 nt, Human
auuuaaagcagguucuuguu

SEQ ID NO: 3567689 - RNA, 12 nt, Human
auuuaaagcauu

SEQ ID NO: 3567690 - RNA, 18 nt, Human
auuuaaagcauugcuguu

SEQ ID NO: 3567691 - RNA, 21 nt, Human
auuuaaaggcccuaucuguuu

SEQ ID NO: 3567692 - RNA, 20 nt, Human
auuuaaaggguguacuuaua

SEQ ID NO: 3567693 - RNA, 13 nt, Human
auuuaaauauaau

SEQ ID NO: 3567694 - RNA, 19 nt, Human
auuuaaauauaauucugua

SEQ ID NO: 3567695 - RNA, 17 nt, Human
auuuaaaugucuaaugu

SEQ ID NO: 3567696 - RNA, 16 nt, Human
auuuaaauguguacaa

SEQ ID NO: 3567697 - RNA, 21 nt, Human
auuuaaauuacaauuuuaucu

SEQ ID NO: 3567698 - RNA, 15 nt, Human
auuuaaauuuaaaga

SEQ ID NO: 3567699 - RNA, 16 nt, Human
auuuaacaaaaagugc

SEQ ID NO: 3567700 - RNA, 15 nt, Human
auuuaacaaugcgaa

SEQ ID NO: 3567701 - RNA, 15 nt, Human
auuuaacagaaaugu

SEQ ID NO: 3567702 - RNA, 18 nt, Human
auuuaacagaaauuguau

SEQ ID NO: 3567703 - RNA, 22 nt, Human
auuuaacagcugaauuaucuau

SEQ ID NO: 3567704 - RNA, 13 nt, Human
auuuaacaugcaa

SEQ ID NO: 3567705 - RNA, 22 nt, Human
auuuaacaugcaacccgaaggu

SEQ ID NO: 3567706 - RNA, 16 nt, Human
auuuaacauuauuuau

SEQ ID NO: 3567707 - RNA, 20 nt, Human
auuuaacauuauuuauaugg

SEQ ID NO: 3567708 - RNA, 19 nt, Human
auuuaacccauuugucucu

SEQ ID NO: 3567709 - RNA, 19 nt, Human
auuuaaccccccuguacac

SEQ ID NO: 3567710 - RNA, 21 nt, Human
auuuaacuacccuuaauuacu

SEQ ID NO: 3567711 - RNA, 22 nt, Human
auuuaacuacccuuaauuacuu

SEQ ID NO: 3567712 - RNA, 12 nt, Human
auuuaacuucug

SEQ ID NO: 3567713 - RNA, 17 nt, Human
auuuaacuuuuaguaaa

SEQ ID NO: 3567714 - RNA, 20 nt, Human
auuuaagaaaauacaauaaa

SEQ ID NO: 3567715 - RNA, 16 nt, Human
auuuaagagacaguca

SEQ ID NO: 3567716 - RNA, 19 nt, Human
auuuaagagcaguccauuu

SEQ ID NO: 3567717 - RNA, 15 nt, Human
auuuaagcaaauacu

SEQ ID NO: 3567718 - RNA, 17 nt, Human
auuuaagcaaauacuua

SEQ ID NO: 3567719 - RNA, 18 nt, Human
auuuaagcacaaacuuua

SEQ ID NO: 3567720 - RNA, 11 nt, Human
auuuaagcauu

SEQ ID NO: 3567721 - RNA, 13 nt, Human
auuuaagcauugu

SEQ ID NO: 3567722 - RNA, 14 nt, Human
auuuaagcauuguu

SEQ ID NO: 3567723 - RNA, 15 nt, Human
auuuaagccuaaaga

SEQ ID NO: 3567724 - RNA, 16 nt, Human
auuuaagccuaaagau

SEQ ID NO: 3567725 - RNA, 17 nt, Human
auuuaagccucauauuu

SEQ ID NO: 3567726 - RNA, 19 nt, Human
auuuaagccucauauuuaa

SEQ ID NO: 3567727 - RNA, 21 nt, Human
auuuaagccucauauuuaaag

SEQ ID NO: 3567728 - RNA, 18 nt, Human
auuuaagcuuaugucaga

SEQ ID NO: 3567729 - RNA, 13 nt, Human
auuuaagggaaaa

SEQ ID NO: 3567730 - RNA, 20 nt, Human
auuuaaggucuguuugcugu

SEQ ID NO: 3567731 - RNA, 21 nt, Human
auuuaagugcguguguagagu

SEQ ID NO: 3567732 - RNA, 22 nt, Human
auuuaagugcguguguagaguu

SEQ ID NO: 3567733 - RNA, 19 nt, Human
auuuaaguucauauuccau

SEQ ID NO: 3567734 - RNA, 12 nt, Human
auuuaaguuuug

SEQ ID NO: 3567735 - RNA, 22 nt, Human
auuuaauaaaauaauucuaaag

SEQ ID NO: 3567736 - RNA, 12 nt, Human
auuuaauaacau

SEQ ID NO: 3567737 - RNA, 13 nt, Human
auuuaauaacaua

SEQ ID NO: 3567738 - RNA, 17 nt, Human
auuuaauaacauuaccu

SEQ ID NO: 3567739 - RNA, 23 nt, Human
auuuaauaacauuaccuuacugu

SEQ ID NO: 3567740 - RNA, 18 nt, Human
auuuaauaauauacuugu

SEQ ID NO: 3567741 - RNA, 19 nt, Human
auuuaauaauauacuugug

SEQ ID NO: 3567742 - RNA, 15 nt, Human
auuuaauacagcagu

SEQ ID NO: 3567743 - RNA, 18 nt, Human
auuuaauagcaaagaauu

SEQ ID NO: 3567744 - RNA, 20 nt, Human
auuuaauagcaaagaauuga

SEQ ID NO: 3567745 - RNA, 15 nt, Human
auuuaauaguguuaa

SEQ ID NO: 3567746 - RNA, 17 nt, Human
auuuaauaguguuaauc

SEQ ID NO: 3567747 - RNA, 18 nt, Human
auuuaauaguguuaauca

SEQ ID NO: 3567748 - RNA, 22 nt, Human
auuuaauaguguuaaucaauuu

SEQ ID NO: 3567749 - RNA, 17 nt, Human
auuuaauauagcuauuu

SEQ ID NO: 3567750 - RNA, 16 nt, Human
auuuaauauuacagau

SEQ ID NO: 3567751 - RNA, 20 nt, Human
auuuaauccaguuauaagaa

SEQ ID NO: 3567752 - RNA, 23 nt, Human
auuuaauccaguuauaagaagaa

SEQ ID NO: 3567753 - RNA, 17 nt, Human
auuuaaucuuuuaugau

SEQ ID NO: 3567754 - RNA, 16 nt, Human
auuuaaugaaagacug

SEQ ID NO: 3567755 - RNA, 20 nt, Human
auuuaaugaaagacuguaca

SEQ ID NO: 3567756 - RNA, 22 nt, Human
auuuaaugauaaguaaaugcua

SEQ ID NO: 3567757 - RNA, 20 nt, Human
auuuaaugcauuaaaccugu

SEQ ID NO: 3567758 - RNA, 13 nt, Human
auuuaaugcugcc

SEQ ID NO: 3567759 - RNA, 14 nt, Human
auuuaaugcugccu

SEQ ID NO: 3567760 - RNA, 23 nt, Human
auuuaauggaaguguauuuauuu

SEQ ID NO: 3567761 - RNA, 21 nt, Human
auuuaauggccggcuggaaau

SEQ ID NO: 3567762 - RNA, 16 nt, Human
auuuaauguagccaug

SEQ ID NO: 3567763 - RNA, 14 nt, Human
auuuaaugugaguu

SEQ ID NO: 3567764 - RNA, 21 nt, Human
auuuaauuaggaaaaaaacua

SEQ ID NO: 3567765 - RNA, 16 nt, Human
auuuaauuagugcuaa

SEQ ID NO: 3567766 - RNA, 21 nt, Human
auuuaauuagugcuaagugug

SEQ ID NO: 3567767 - RNA, 22 nt, Human
auuuaauuagugcuaaguguga

SEQ ID NO: 3567768 - RNA, 12 nt, Human
auuuaauuauua

SEQ ID NO: 3567769 - RNA, 13 nt, Human
auuuaauuauuaa

SEQ ID NO: 3567770 - RNA, 15 nt, Human
auuuaauuauuaacu

SEQ ID NO: 3567771 - RNA, 19 nt, Human
auuuaauugggcacuauuu

SEQ ID NO: 3567772 - RNA, 13 nt, Human
auuuaauuguaaa

SEQ ID NO: 3567773 - RNA, 18 nt, Human
auuuaauuguaaacugua

SEQ ID NO: 3567774 - RNA, 15 nt, Human
auuuaauuuagugau

SEQ ID NO: 3567775 - RNA, 18 nt, Human
auuuaauuugaaauaugg

SEQ ID NO: 3567776 - RNA, 13 nt, Human
auuuaauuugaag

SEQ ID NO: 3567777 - RNA, 22 nt, Human
auuuaauuugccaaaauaaugu

SEQ ID NO: 3567778 - RNA, 19 nt, Human
auuuaauuuugacacuaua

SEQ ID NO: 3567779 - RNA, 20 nt, Human
auuuaauuuugacacugaaa

SEQ ID NO: 3567780 - RNA, 23 nt, Human
auuuacaaaaauauaaaauauga

SEQ ID NO: 3567781 - RNA, 14 nt, Human
auuuacaaacugaa

SEQ ID NO: 3567782 - RNA, 15 nt, Human
auuuacaaacugaag

SEQ ID NO: 3567783 - RNA, 13 nt, Human
auuuacaaagugu

SEQ ID NO: 3567784 - RNA, 17 nt, Human
auuuacaaaguguguau

SEQ ID NO: 3567785 - RNA, 21 nt, Human
auuuacaagggaagauuuaug

SEQ ID NO: 3567786 - RNA, 16 nt, Human
auuuacaauguauuaa

SEQ ID NO: 3567787 - RNA, 19 nt, Human
auuuacagaugaauguauu

SEQ ID NO: 3567788 - RNA, 23 nt, Human
auuuacagccagugggagauguu

SEQ ID NO: 3567789 - RNA, 21 nt, Human
auuuacagccucacuugaaug

SEQ ID NO: 3567790 - RNA, 15 nt, Human
auuuacaggaacuuc

SEQ ID NO: 3567791 - RNA, 20 nt, Human
auuuacagugaaaauguaag

SEQ ID NO: 3567792 - RNA, 15 nt, Human
auuuacaguuucaaa

SEQ ID NO: 3567793 - RNA, 24 nt, Human
auuuacaguuucaaaaacuguauu

SEQ ID NO: 3567794 - RNA, 14 nt, Human
auuuacauaugaaa

SEQ ID NO: 3567795 - RNA, 21 nt, Human
auuuacauaugaaauuuaaua

SEQ ID NO: 3567796 - RNA, 18 nt, Human
auuuacaugaauugcauu

SEQ ID NO: 3567797 - RNA, 20 nt, Human
auuuacaugaauugcauuuu

SEQ ID NO: 3567798 - RNA, 16 nt, Human
auuuacauguauuauu

SEQ ID NO: 3567799 - RNA, 19 nt, Human
auuuacauguauuauuuca

SEQ ID NO: 3567800 - RNA, 18 nt, Human
auuuaccacagcagcuga

SEQ ID NO: 3567801 - RNA, 12 nt, Human
auuuaccucagc

SEQ ID NO: 3567802 - RNA, 21 nt, Human
auuuaccugcaggcugagcca

SEQ ID NO: 3567803 - RNA, 16 nt, Human
auuuaccuuuuugaaa

SEQ ID NO: 3567804 - RNA, 16 nt, Human
auuuacuaaaauggac

SEQ ID NO: 3567805 - RNA, 14 nt, Human
auuuacuaaacaua

SEQ ID NO: 3567806 - RNA, 15 nt, Human
auuuacuaaacauau

SEQ ID NO: 3567807 - RNA, 18 nt, Human
auuuacuaccuuaucacu

SEQ ID NO: 3567808 - RNA, 16 nt, Human
auuuacucuaaaaacu

SEQ ID NO: 3567809 - RNA, 17 nt, Human
auuuacucuaaaaacug

SEQ ID NO: 3567810 - RNA, 21 nt, Human
auuuacugagcuucucuguga

SEQ ID NO: 3567811 - RNA, 15 nt, Human
auuuacugugucuuu

SEQ ID NO: 3567812 - RNA, 12 nt, Human
auuuacuguuuu

SEQ ID NO: 3567813 - RNA, 17 nt, Human
auuuacuucuuauacau

SEQ ID NO: 3567814 - RNA, 12 nt, Human
auuuacuuguuu

SEQ ID NO: 3567815 - RNA, 13 nt, Human
auuuagaaaaaag

SEQ ID NO: 3567816 - RNA, 20 nt, Human
auuuagaaaaagaacaugca

SEQ ID NO: 3567817 - RNA, 17 nt, Human
auuuagaaaacuuuaaa

SEQ ID NO: 3567818 - RNA, 18 nt, Human
auuuagaaaacuuuaaag

SEQ ID NO: 3567819 - RNA, 21 nt, Human
auuuagaaaagugaauugaag

SEQ ID NO: 3567820 - RNA, 16 nt, Human
auuugagcauaucagu

SEQ ID NO: 3567821 - RNA, 16 nt, Human
auuugaggaguguuaa

SEQ ID NO: 3567822 - RNA, 13 nt, Human
auuugaggucaag

SEQ ID NO: 3567823 - RNA, 18 nt, Human
auuugagugauuauuugu

SEQ ID NO: 3567824 - RNA, 14 nt, Human
auuugagugcucug

SEQ ID NO: 3567825 - RNA, 12 nt, Human
auuugauaauga

SEQ ID NO: 3567826 - RNA, 20 nt, Human
auuugauaaugauaaaacac

SEQ ID NO: 3567827 - RNA, 15 nt, Human
auuugauacuuauau

SEQ ID NO: 3567828 - RNA, 22 nt, Human
auuugauacuuauauuuucgua

SEQ ID NO: 3567829 - RNA, 20 nt, Human
auuugauaguauugugcaua

SEQ ID NO: 3567830 - RNA, 15 nt, Human
auuugauaucacagu

SEQ ID NO: 3567831 - RNA, 18 nt, Human
auuugauaugugaacagu

SEQ ID NO: 3567832 - RNA, 19 nt, Human
auuugauaugugaacaguu

SEQ ID NO: 3567833 - RNA, 17 nt, Human
auuugaucguuccaguu

SEQ ID NO: 3567834 - RNA, 19 nt, Human
auuugaugcuggagagguu

SEQ ID NO: 3567835 - RNA, 16 nt, Human
auuugaugcuguuuga

SEQ ID NO: 3567836 - RNA, 20 nt, Human
auuugauguggugaaaagca

SEQ ID NO: 3567837 - RNA, 20 nt, Human
auuugauguuuacaggugga

SEQ ID NO: 3567838 - RNA, 17 nt, Human
auuugauuaacaaauau

SEQ ID NO: 3567839 - RNA, 16 nt, Human
auuugauucaaaauau

SEQ ID NO: 3567840 - RNA, 23 nt, Human
auuugauucuguguguuuucaua

SEQ ID NO: 3567841 - RNA, 13 nt, Human
auuugauugauuu

SEQ ID NO: 3567842 - RNA, 16 nt, Human
auuugauugauuugaa

SEQ ID NO: 3567843 - RNA, 22 nt, Human
auuugauuuauuaacuuaauaa

SEQ ID NO: 3567844 - RNA, 16 nt, Human
auuugauuuguacaga

SEQ ID NO: 3567845 - RNA, 19 nt, Human
auuugauuuuuauuauuaa

SEQ ID NO: 3567846 - RNA, 16 nt, Human
auuugcaaaguacugu

SEQ ID NO: 3567847 - RNA, 18 nt, Human
auuugcaaaguacuguaa

SEQ ID NO: 3567848 - RNA, 15 nt, Human
auuugcaacauuuac

SEQ ID NO: 3567849 - RNA, 18 nt, Human
auuugcacaaaaagauac

SEQ ID NO: 3567850 - RNA, 14 nt, Human
auuugcaggguccu

SEQ ID NO: 3567851 - RNA, 9 nt, Human
auuugcagu

SEQ ID NO: 3567852 - RNA, 17 nt, Human
auuugcauauguaugac

SEQ ID NO: 3567853 - RNA, 21 nt, Human
auuugcaucugaaauaggaaa

SEQ ID NO: 3567854 - RNA, 13 nt, Human
auuugcauuuguu

SEQ ID NO: 3567855 - RNA, 21 nt, Human
auuugcauuuguuuauguaau

SEQ ID NO: 3567856 - RNA, 16 nt, Human
auuugccaauaauaau

SEQ ID NO: 3567857 - RNA, 24 nt, Human
auuugccaugggcuucacuguaua

SEQ ID NO: 3567858 - RNA, 20 nt, Human
auuugcccauuuacacuuuu

SEQ ID NO: 3567859 - RNA, 15 nt, Human
auuugcccuccuccu

SEQ ID NO: 3567860 - RNA, 16 nt, Human
auuugcccugggaaac

SEQ ID NO: 3567861 - RNA, 22 nt, Human
auuugccuguaacaagccagau

SEQ ID NO: 3567862 - RNA, 23 nt, Human
auuugccuugcagaacugccauu

SEQ ID NO: 3567863 - RNA, 23 nt, Human
auuugccuuuaaaaaaaaaaguu

SEQ ID NO: 3567864 - RNA, 18 nt, Human
auuugcgcacaacuuaaa

SEQ ID NO: 3567865 - RNA, 14 nt, Human
auuugcuaauuuuu

SEQ ID NO: 3567866 - RNA, 16 nt, Human
auuugcuacuguacau

SEQ ID NO: 3567867 - RNA, 17 nt, Human
auuugcuacuguuguaa

SEQ ID NO: 3567868 - RNA, 21 nt, Human
auuugcuagcaguaaaagaug

SEQ ID NO: 3567869 - RNA, 13 nt, Human
auuugcuccuuuc

SEQ ID NO: 3567870 - RNA, 21 nt, Human
auuugcugacaaccauuaaag

SEQ ID NO: 3567871 - RNA, 15 nt, Human
auuugcugccaaaug

SEQ ID NO: 3567872 - RNA, 20 nt, Human
auuugcugccaaaugcguau

SEQ ID NO: 3567873 - RNA, 18 nt, Human
auuugcugggcaguuuuu

SEQ ID NO: 3567874 - RNA, 23 nt, Human
auuugcugggcuuuuuuuuucuc

SEQ ID NO: 3567875 - RNA, 13 nt, Human
auuugcuuuggaa

SEQ ID NO: 3567876 - RNA, 15 nt, Human
auuugcuuuggaagu

SEQ ID NO: 3567877 - RNA, 18 nt, Human
auuugcuuuuucaccaga

SEQ ID NO: 3567878 - RNA, 15 nt, Human
auuuggaaacuaaua

SEQ ID NO: 3567879 - RNA, 20 nt, Human
auuuggaaacuaauaaaaua

SEQ ID NO: 3567880 - RNA, 22 nt, Human
auuuggaaacuaauaaaauauu

SEQ ID NO: 3567881 - RNA, 14 nt, Human
auuuggaaauccua

SEQ ID NO: 3567882 - RNA, 12 nt, Human
auuuggaaaucu

SEQ ID NO: 3567883 - RNA, 13 nt, Human
auuuggaaaucuu

SEQ ID NO: 3567884 - RNA, 17 nt, Human
auuuggaaaucuuuaaa

SEQ ID NO: 3567885 - RNA, 21 nt, Human
auuuggaauaaaaauuccaga

SEQ ID NO: 3567886 - RNA, 14 nt, Human
auuuggaauacuuu

SEQ ID NO: 3567887 - RNA, 11 nt, Human
auuuggaauag

SEQ ID NO: 3567888 - RNA, 16 nt, Human
auuuggagagaaauau

SEQ ID NO: 3567889 - RNA, 21 nt, Human
auuuggaggaaaaaaagcaug

SEQ ID NO: 3567890 - RNA, 17 nt, Human
auuuggagggccugggc

SEQ ID NO: 3567891 - RNA, 15 nt, Human
auuuggauccugugu

SEQ ID NO: 3567892 - RNA, 15 nt, Human
auuuggcaguuuggu

SEQ ID NO: 3567893 - RNA, 16 nt, Human
auuuggcaguuuggua

SEQ ID NO: 3567894 - RNA, 15 nt, Human
auuuggcgugacccg

SEQ ID NO: 3567895 - RNA, 14 nt, Human
auuuggcuuaaaua

SEQ ID NO: 3567896 - RNA, 15 nt, Human
auuuggcuuaaauau

SEQ ID NO: 3567897 - RNA, 17 nt, Human
auuuggcuuaaauauag

SEQ ID NO: 3567898 - RNA, 14 nt, Human
auuugggaagugaa

SEQ ID NO: 3567899 - RNA, 17 nt, Human
auuugggagacauguga

SEQ ID NO: 3567900 - RNA, 21 nt, Human
auuugggagggaaaagggaag

SEQ ID NO: 3567901 - RNA, 23 nt, Human
auuugggccugcuccagaccuga

SEQ ID NO: 3567902 - RNA, 23 nt, Human
auuuggggaaaccuagagaagau

SEQ ID NO: 3567903 - RNA, 16 nt, Human
auuuggggcuuauuuu

SEQ ID NO: 3567904 - RNA, 16 nt, Human
auuuggguaaaucaug

SEQ ID NO: 3567905 - RNA, 15 nt, Human
auuuggguccaggag

SEQ ID NO: 3567906 - RNA, 17 nt, Human
auuuggguccaggagga

SEQ ID NO: 3567907 - RNA, 14 nt, Human
auuugggugggagu

SEQ ID NO: 3567908 - RNA, 17 nt, Human
auuuggguuacuauuuc

SEQ ID NO: 3567909 - RNA, 18 nt, Human
auuugguaauguuuuuaa

SEQ ID NO: 3567910 - RNA, 16 nt, Human
auuugguucauuaauu

SEQ ID NO: 3567911 - RNA, 15 nt, Human
auuugguucuaauag

SEQ ID NO: 3567912 - RNA, 15 nt, Human
auuugguuuucacau

SEQ ID NO: 3567913 - RNA, 16 nt, Human
auuuguaaaaugacaa

SEQ ID NO: 3567914 - RNA, 13 nt, Human
auuuguaaaguug

SEQ ID NO: 3567915 - RNA, 12 nt, Human
auuuguaaaucu

SEQ ID NO: 3567916 - RNA, 13 nt, Human
auuuguaaaugcu

SEQ ID NO: 3567917 - RNA, 14 nt, Human
auuuguaaauuuag

SEQ ID NO: 3567918 - RNA, 16 nt, Human
auuuguaaauuuagug

SEQ ID NO: 3567919 - RNA, 17 nt, Human
auuuguaaauuuagugu

SEQ ID NO: 3567920 - RNA, 20 nt, Human
auuuguaaauuuaguguuuu

SEQ ID NO: 3567921 - RNA, 19 nt, Human
auuuguaaauuuaugugau

SEQ ID NO: 3567922 - RNA, 23 nt, Human
auuuguaacccacugagaggaca

SEQ ID NO: 3567923 - RNA, 20 nt, Human
auuuguaaccucagcucugg

SEQ ID NO: 3567924 - RNA, 13 nt, Human
auuuguaagauau

SEQ ID NO: 3567925 - RNA, 18 nt, Human
auuuguaagauauuugca

SEQ ID NO: 3567926 - RNA, 23 nt, Human
auuuguaaguuuaugucuaaaga

SEQ ID NO: 3567927 - RNA, 14 nt, Human
auuuguaaguuuca

SEQ ID NO: 3567928 - RNA, 18 nt, Human
auuuguaaguuucaggug

SEQ ID NO: 3567929 - RNA, 17 nt, Human
auuuguaauagauguuu

SEQ ID NO: 3567930 - RNA, 20 nt, Human
auuuguaauugcuuacauuu

SEQ ID NO: 3567931 - RNA, 13 nt, Human
auuuguacaaaaa

SEQ ID NO: 3567932 - RNA, 13 nt, Human
auuuguacaguuc

SEQ ID NO: 3567933 - RNA, 15 nt, Human
auuuguacaguucag

SEQ ID NO: 3567934 - RNA, 16 nt, Human
auuuguaccauuucag

SEQ ID NO: 3567935 - RNA, 17 nt, Human
auuuguacuauuuaacu

SEQ ID NO: 3567936 - RNA, 21 nt, Human
auuuguacuguuuaauguucu

SEQ ID NO: 3567937 - RNA, 20 nt, Human
auuuguagaaggguuauauu

SEQ ID NO: 3567938 - RNA, 22 nt, Human
auuuguaggggaacucauuugg

SEQ ID NO: 3567939 - RNA, 16 nt, Human
auuuguaggguuucua

SEQ ID NO: 3567940 - RNA, 14 nt, Human
auuuguauaaaaua

SEQ ID NO: 3567941 - RNA, 19 nt, Human
auuuguauaaaauaauuuu

SEQ ID NO: 3567942 - RNA, 18 nt, Human
auuuguauauauacauaa

SEQ ID NO: 3567943 - RNA, 22 nt, Human
auuuguauauuacacauuugua

SEQ ID NO: 3567944 - RNA, 21 nt, Human
auuuguaucucugaagcaugu

SEQ ID NO: 3567945 - RNA, 22 nt, Human
auuuguaucucugaagcauguu

SEQ ID NO: 3567946 - RNA, 21 nt, Human
auuuguaucugaaggagauuu

SEQ ID NO: 3567947 - RNA, 15 nt, Human
auuuguaugauauuu

SEQ ID NO: 3567948 - RNA, 18 nt, Human
auuuguaugucaaagcuu

SEQ ID NO: 3567949 - RNA, 18 nt, Human
auuuguauuuugugugac

SEQ ID NO: 3567950 - RNA, 23 nt, Human
auuuguauuuugugugaccaacu

SEQ ID NO: 3567951 - RNA, 17 nt, Human
auuuguauuuuuuugca

SEQ ID NO: 3567952 - RNA, 14 nt, Human
auuugucaaauugu

SEQ ID NO: 3567953 - RNA, 13 nt, Human
auuugucaacaaa

SEQ ID NO: 3567954 - RNA, 13 nt, Human
auuugucccaagu

SEQ ID NO: 3567955 - RNA, 14 nt, Human
auuugucccaagug

SEQ ID NO: 3567956 - RNA, 18 nt, Human
auuugucccaagugccaa

SEQ ID NO: 3567957 - RNA, 15 nt, Human
auuugucuggccuuu

SEQ ID NO: 3567958 - RNA, 23 nt, Human
auuugugaaaugauggugaaagu

SEQ ID NO: 3567959 - RNA, 18 nt, Human
auuugugaagguggaaau

SEQ ID NO: 3567960 - RNA, 23 nt, Human
auuugugaagguggaaauaaacu

SEQ ID NO: 3567961 - RNA, 14 nt, Human
auuugugacaaaaa

SEQ ID NO: 3567962 - RNA, 11 nt, Human
auuugugacua

SEQ ID NO: 3567963 - RNA, 22 nt, Human
auuugugacuaauuguauaaca

SEQ ID NO: 3567964 - RNA, 14 nt, Human
auuugugagacugu

SEQ ID NO: 3567965 - RNA, 21 nt, Human
caaccguggcccuuccuggac

SEQ ID NO: 3567966 - RNA, 18 nt, Human
caaccguuggaaacauaa

SEQ ID NO: 3567967 - RNA, 18 nt, Human
caaccuaaccccuuuccu

SEQ ID NO: 3567968 - RNA, 15 nt, Human
caaccuauuuugaag

SEQ ID NO: 3567969 - RNA, 14 nt, Human
caaccucagggcuc

SEQ ID NO: 3567970 - RNA, 15 nt, Human
caaccucaguaauuu

SEQ ID NO: 3567971 - RNA, 17 nt, Human
caaccucccucuuguuu

SEQ ID NO: 3567972 - RNA, 20 nt, Human
caaccuccgcauccgggguu

SEQ ID NO: 3567973 - RNA, 14 nt, Human
caaccuccugggcu

SEQ ID NO: 3567974 - RNA, 16 nt, Human
caaccuccuguggaac

SEQ ID NO: 3567975 - RNA, 23 nt, Human
caaccuccuguggaacccagcag

SEQ ID NO: 3567976 - RNA, 16 nt, Human
caaccucgcuccaacu

SEQ ID NO: 3567977 - RNA, 20 nt, Human
caaccucgcuccaacuccaa

SEQ ID NO: 3567978 - RNA, 19 nt, Human
caaccucuagaauuuuaag

SEQ ID NO: 3567979 - RNA, 13 nt, Human
caaccucuggagc

SEQ ID NO: 3567980 - RNA, 20 nt, Human
caaccucuuccuccugacac

SEQ ID NO: 3567981 - RNA, 16 nt, Human
caaccucuucuggcuc

SEQ ID NO: 3567982 - RNA, 13 nt, Human
caaccucuuggcc

SEQ ID NO: 3567983 - RNA, 16 nt, Human
caaccugauuguaaac

SEQ ID NO: 3567984 - RNA, 21 nt, Human
caaccugauugugucucuugg

SEQ ID NO: 3567985 - RNA, 17 nt, Human
caaccugcaaagaucug

SEQ ID NO: 3567986 - RNA, 21 nt, Human
caaccugccugacauuuggag

SEQ ID NO: 3567987 - RNA, 17 nt, Human
caaccugcucuccucuu

SEQ ID NO: 3567988 - RNA, 12 nt, Human
caaccuguaaau

SEQ ID NO: 3567989 - RNA, 16 nt, Human
caaccuguaauaaaua

SEQ ID NO: 3567990 - RNA, 18 nt, Human
caaccuguaauaaauaug

SEQ ID NO: 3567991 - RNA, 19 nt, Human
caaccuguaauaaauauga

SEQ ID NO: 3567992 - RNA, 22 nt, Human
caaccuguuaccuacuuugacu

SEQ ID NO: 3567993 - RNA, 23 nt, Human
caaccuguuaccuacuuugacuu

SEQ ID NO: 3567994 - RNA, 14 nt, Human
caaccuuacuuaca

SEQ ID NO: 3567995 - RNA, 13 nt, Human
caaccuucauuua

SEQ ID NO: 3567996 - RNA, 16 nt, Human
caaccuucuguggcuc

SEQ ID NO: 3567997 - RNA, 17 nt, Human
caaccuucuguggcuca

SEQ ID NO: 3567998 - RNA, 16 nt, Human
caaccuugagacagcu

SEQ ID NO: 3567999 - RNA, 15 nt, Human
caaccuuggcuuggc

SEQ ID NO: 3568000 - RNA, 13 nt, Human
caaccuuguuuau

SEQ ID NO: 3568001 - RNA, 21 nt, Human
caaccuuguuuauuaaauugc

SEQ ID NO: 3568002 - RNA, 16 nt, Human
caaccuuuauucuuuu

SEQ ID NO: 3568003 - RNA, 21 nt, Human
caaccuuucaccuuuguguau

SEQ ID NO: 3568004 - RNA, 18 nt, Human
caacgaaaagcacaucca

SEQ ID NO: 3568005 - RNA, 22 nt, Human
caacgaaaagcacauccaggca

SEQ ID NO: 3568006 - RNA, 13 nt, Human
caacgaagaaaaa

SEQ ID NO: 3568007 - RNA, 13 nt, Human
caacgaggaagcc

SEQ ID NO: 3568008 - RNA, 19 nt, Human
caacgaucacaaaugacuu

SEQ ID NO: 3568009 - RNA, 13 nt, Human
caacgcagcccug

SEQ ID NO: 3568010 - RNA, 15 nt, Human
caacgcagcccugcu

SEQ ID NO: 3568011 - RNA, 14 nt, Human
caacgcuauuccag

SEQ ID NO: 3568012 - RNA, 21 nt, Human
caacgcuuaaaggugucuucc

SEQ ID NO: 3568013 - RNA, 22 nt, Human
caacgcuuaaaggugucuuccu

SEQ ID NO: 3568014 - RNA, 23 nt, Human
caacgcuuguagaacucacucug

SEQ ID NO: 3568015 - RNA, 21 nt, Human
caacggagagcgccugccccu

SEQ ID NO: 3568016 - RNA, 19 nt, Human
caacggcccugcagccagc

SEQ ID NO: 3568017 - RNA, 13 nt, Human
caacgugcaacug

SEQ ID NO: 3568018 - RNA, 20 nt, Human
caacgugcucuuuguuuugu

SEQ ID NO: 3568019 - RNA, 16 nt, Human
caacguuacucagggc

SEQ ID NO: 3568020 - RNA, 17 nt, Human
caacguuacucagggcu

SEQ ID NO: 3568021 - RNA, 15 nt, Human
caacuacagucuaaa

SEQ ID NO: 3568022 - RNA, 21 nt, Human
caacuacccaaaacaagccug

SEQ ID NO: 3568023 - RNA, 22 nt, Human
caacuacccaaaacaagccugg

SEQ ID NO: 3568024 - RNA, 20 nt, Human
caacuacccccagcugugcu

SEQ ID NO: 3568025 - RNA, 21 nt, Human
caacuaccugagcuaaauaaa

SEQ ID NO: 3568026 - RNA, 15 nt, Human
caacuaggaucagaa

SEQ ID NO: 3568027 - RNA, 16 nt, Human
caacuaguuuuguuua

SEQ ID NO: 3568028 - RNA, 19 nt, Human
caacuauaagcccacuguu

SEQ ID NO: 3568029 - RNA, 17 nt, Human
caacuaugauuuggaaa

SEQ ID NO: 3568030 - RNA, 17 nt, Human
caacuauggaucagaau

SEQ ID NO: 3568031 - RNA, 13 nt, Human
caacuauggccug

SEQ ID NO: 3568032 - RNA, 14 nt, Human
caacuauggccugu

SEQ ID NO: 3568033 - RNA, 22 nt, Human
caacuauuuauugacucugggu

SEQ ID NO: 3568034 - RNA, 21 nt, Human
caacuauuuucagaugugaac

SEQ ID NO: 3568035 - RNA, 17 nt, Human
caacucaccccagcccc

SEQ ID NO: 3568036 - RNA, 23 nt, Human
caacucacuccuuuuaaagaaaa

SEQ ID NO: 3568037 - RNA, 14 nt, Human
caacucauauuuuc

SEQ ID NO: 3568038 - RNA, 17 nt, Human
caacuccaacauccacu

SEQ ID NO: 3568039 - RNA, 23 nt, Human
caacuccaccagauagcagaggg

SEQ ID NO: 3568040 - RNA, 12 nt, Human
caacuccagaaa

SEQ ID NO: 3568041 - RNA, 17 nt, Human
caacuccaguacuggag

SEQ ID NO: 3568042 - RNA, 19 nt, Human
caacuccaguacuggagcu

SEQ ID NO: 3568043 - RNA, 20 nt, Human
caacuccaguacuggagcuu

SEQ ID NO: 3568044 - RNA, 20 nt, Human
caacuccuaguucuagaaaa

SEQ ID NO: 3568045 - RNA, 23 nt, Human
caacuccuaguucuagaaaaaca

SEQ ID NO: 3568046 - RNA, 19 nt, Human
caacuccucgacaucacug

SEQ ID NO: 3568047 - RNA, 14 nt, Human
caacuccuggaagc

SEQ ID NO: 3568048 - RNA, 16 nt, Human
caacucguauagcaug

SEQ ID NO: 3568049 - RNA, 23 nt, Human
caacucuaaagugcuaauaauaa

SEQ ID NO: 3568050 - RNA, 22 nt, Human
caacucugcugaggguccagaa

SEQ ID NO: 3568051 - RNA, 18 nt, Human
caacucuucccugaacuu

SEQ ID NO: 3568052 - RNA, 18 nt, Human
caacucuugauuauccau

SEQ ID NO: 3568053 - RNA, 17 nt, Human
caacucuugcaggucuc

SEQ ID NO: 3568054 - RNA, 13 nt, Human
caacucuuugaga

SEQ ID NO: 3568055 - RNA, 13 nt, Human
caacugaaaagac

SEQ ID NO: 3568056 - RNA, 14 nt, Human
caacugaaaagacu

SEQ ID NO: 3568057 - RNA, 21 nt, Human
caacugaaggcuaaaaagcaa

SEQ ID NO: 3568058 - RNA, 18 nt, Human
caacugaaugaggucagc

SEQ ID NO: 3568059 - RNA, 14 nt, Human
caacugacacagga

SEQ ID NO: 3568060 - RNA, 15 nt, Human
caacugacacaggaa

SEQ ID NO: 3568061 - RNA, 22 nt, Human
caacugacacucccacccaguc

SEQ ID NO: 3568062 - RNA, 19 nt, Human
caacugaccagccuccaug

SEQ ID NO: 3568063 - RNA, 13 nt, Human
caacugaggcaga

SEQ ID NO: 3568064 - RNA, 14 nt, Human
caacugaggcagac

SEQ ID NO: 3568065 - RNA, 20 nt, Human
caacugaggcagacagcagc

SEQ ID NO: 3568066 - RNA, 15 nt, Human
caacugaucuguuau

SEQ ID NO: 3568067 - RNA, 23 nt, Human
caacugcaauaacuucugaccuu

SEQ ID NO: 3568068 - RNA, 15 nt, Human
caacugcuaaucuac

SEQ ID NO: 3568069 - RNA, 14 nt, Human
caacugcucccacc

SEQ ID NO: 3568070 - RNA, 18 nt, Human
caacugcucuuuuauacu

SEQ ID NO: 3568071 - RNA, 19 nt, Human
caacuggacauugucugcg

SEQ ID NO: 3568072 - RNA, 18 nt, Human
caacuggcccuauuuaga

SEQ ID NO: 3568073 - RNA, 23 nt, Human
caacuggcccuauuuagaugaua

SEQ ID NO: 3568074 - RNA, 23 nt, Human
caacuggcccucuucuuacuuga

SEQ ID NO: 3568075 - RNA, 22 nt, Human
caacuggccggucugcaaguca

SEQ ID NO: 3568076 - RNA, 18 nt, Human
caacugucuuauuuaaug

SEQ ID NO: 3568077 - RNA, 15 nt, Human
caacugucuuccuca

SEQ ID NO: 3568078 - RNA, 16 nt, Human
caacugucuuccucaa

SEQ ID NO: 3568079 - RNA, 12 nt, Human
caacuguguugu

SEQ ID NO: 3568080 - RNA, 14 nt, Human
caacuguguuguau

SEQ ID NO: 3568081 - RNA, 17 nt, Human
caacuguguuguauuaa

SEQ ID NO: 3568082 - RNA, 19 nt, Human
caacuguguuguauuaaca

SEQ ID NO: 3568083 - RNA, 19 nt, Human
caacuguuguaacuaggcu

SEQ ID NO: 3568084 - RNA, 14 nt, Human
caacuuaacauggg

SEQ ID NO: 3568085 - RNA, 15 nt, Human
caacuuaauaaaaac

SEQ ID NO: 3568086 - RNA, 14 nt, Human
caacuuacaaaaac

SEQ ID NO: 3568087 - RNA, 17 nt, Human
caacuuacauaugucuu

SEQ ID NO: 3568088 - RNA, 18 nt, Human
caacuucaagugcaugcu

SEQ ID NO: 3568089 - RNA, 15 nt, Human
caacuucaucuggaa

SEQ ID NO: 3568090 - RNA, 19 nt, Human
caacuucucuugcuuucua

SEQ ID NO: 3568091 - RNA, 14 nt, Human
caacuucuggcucc

SEQ ID NO: 3568092 - RNA, 18 nt, Human
caacuucuucagagcuga

SEQ ID NO: 3568093 - RNA, 24 nt, Human
caacuugaaauuauaucugugguc

SEQ ID NO: 3568094 - RNA, 19 nt, Human
caacuugaacuucaccugc

SEQ ID NO: 3568095 - RNA, 16 nt, Human
caacuugagauguaug

SEQ ID NO: 3568096 - RNA, 15 nt, Human
caacuugcaaaauca

SEQ ID NO: 3568097 - RNA, 20 nt, Human
caacuugcaaaaucaguuuu

SEQ ID NO: 3568098 - RNA, 12 nt, Human
caacuugccuuu

SEQ ID NO: 3568099 - RNA, 19 nt, Human
caacuugccuuugaagagu

SEQ ID NO: 3568100 - RNA, 22 nt, Human
caacuuguaaauacaccaccuc

SEQ ID NO: 3568101 - RNA, 16 nt, Human
caacuuguaaaugugg

SEQ ID NO: 3568102 - RNA, 18 nt, Human
caacuuguauccaggccu

SEQ ID NO: 3568103 - RNA, 23 nt, Human
caacuuguauuaaagacagaggc

SEQ ID NO: 3568104 - RNA, 22 nt, Human
caacuugucuuuuucuggacug

SEQ ID NO: 3568105 - RNA, 19 nt, Human
caacuuuagcagaaucaaa

SEQ ID NO: 3568106 - RNA, 21 nt, Human
caacuuuguggaugucuuccu

SEQ ID NO: 3568107 - RNA, 14 nt, Human
caacuuuuguguaa

SEQ ID NO: 3568108 - RNA, 17 nt, Human
caacuuuuuauugccuu

SEQ ID NO: 3568109 - RNA, 19 nt, Human
caaggcugaccaagagaga

SEQ ID NO: 3568110 - RNA, 23 nt, Human
caaggcugaccaagagagaaaga

SEQ ID NO: 3568111 - RNA, 19 nt, Human
caaggcugaugcaggauuu

SEQ ID NO: 3568112 - RNA, 18 nt, Human
caaggcugggggaagaag

SEQ ID NO: 3568113 - RNA, 21 nt, Human
caaggcugucaauuacaggaa

SEQ ID NO: 3568114 - RNA, 18 nt, Human
caaggcuguugcaugggc

SEQ ID NO: 3568115 - RNA, 19 nt, Human
caaggcuuagacccucaug

SEQ ID NO: 3568116 - RNA, 20 nt, Human
caaggcuugcugcagauacu

SEQ ID NO: 3568117 - RNA, 15 nt, Human
caagggaaaagucuc

SEQ ID NO: 3568118 - RNA, 16 nt, Human
caagggaaaagucucu

SEQ ID NO: 3568119 - RNA, 14 nt, Human
caagggaaaggggu

SEQ ID NO: 3568120 - RNA, 15 nt, Human
caagggaaccugugu

SEQ ID NO: 3568121 - RNA, 17 nt, Human
caagggaucugguccua

SEQ ID NO: 3568122 - RNA, 14 nt, Human
caagggauuugagg

SEQ ID NO: 3568123 - RNA, 18 nt, Human
caagggcagcuuugcuca

SEQ ID NO: 3568124 - RNA, 22 nt, Human
caagggcagggggccccuuugc

SEQ ID NO: 3568125 - RNA, 23 nt, Human
caagggcagggggccccuuugcu

SEQ ID NO: 3568126 - RNA, 14 nt, Human
caagggcaguggag

SEQ ID NO: 3568127 - RNA, 16 nt, Human
caagggcaguggaggu

SEQ ID NO: 3568128 - RNA, 16 nt, Human
caagggcauaaaguaa

SEQ ID NO: 3568129 - RNA, 18 nt, Human
caagggcauaaauuauug

SEQ ID NO: 3568130 - RNA, 12 nt, Human
caagggccucuu

SEQ ID NO: 3568131 - RNA, 19 nt, Human
caagggccuggccugagcu

SEQ ID NO: 3568132 - RNA, 23 nt, Human
caagggcuucugcacccuccacc

SEQ ID NO: 3568133 - RNA, 13 nt, Human
caagggcuuuccu

SEQ ID NO: 3568134 - RNA, 18 nt, Human
caagggcuuuccugugcc

SEQ ID NO: 3568135 - RNA, 18 nt, Human
caaggggaaucagaacuc

SEQ ID NO: 3568136 - RNA, 19 nt, Human
caaggggagucaccuuccc

SEQ ID NO: 3568137 - RNA, 20 nt, Human
caaggggagucaccuucccu

SEQ ID NO: 3568138 - RNA, 23 nt, Human
caaggggagucaccuucccuugc

SEQ ID NO: 3568139 - RNA, 21 nt, Human
caagggggaugacaugugacu

SEQ ID NO: 3568140 - RNA, 20 nt, Human
caagggguccccuccaggag

SEQ ID NO: 3568141 - RNA, 14 nt, Human
caaggggugccugg

SEQ ID NO: 3568142 - RNA, 17 nt, Human
caagggguuucuguuuc

SEQ ID NO: 3568143 - RNA, 18 nt, Human
caaggguagggugggccu

SEQ ID NO: 3568144 - RNA, 23 nt, Human
caaggguauccaaguuggacugg

SEQ ID NO: 3568145 - RNA, 16 nt, Human
caaggguggcauccca

SEQ ID NO: 3568146 - RNA, 17 nt, Human
caaggguuaaggccuga

SEQ ID NO: 3568147 - RNA, 16 nt, Human
caagguaaaauucuaa

SEQ ID NO: 3568148 - RNA, 16 nt, Human
caagguaacuguacug

SEQ ID NO: 3568149 - RNA, 22 nt, Human
caagguaacuguacugggccau

SEQ ID NO: 3568150 - RNA, 15 nt, Human
caagguaccauccua

SEQ ID NO: 3568151 - RNA, 18 nt, Human
caagguagaaugaccuug

SEQ ID NO: 3568152 - RNA, 23 nt, Human
caagguagcccuggccagaggcu

SEQ ID NO: 3568153 - RNA, 14 nt, Human
caagguauaauaaa

SEQ ID NO: 3568154 - RNA, 19 nt, Human
caagguauaauaaaauuau

SEQ ID NO: 3568155 - RNA, 20 nt, Human
caaggucacuguuuccuggg

SEQ ID NO: 3568156 - RNA, 17 nt, Human
caaggucauggccacac

SEQ ID NO: 3568157 - RNA, 20 nt, Human
caaggucauggccacacugu

SEQ ID NO: 3568158 - RNA, 20 nt, Human
caaggucauuuuuuuuaaga

SEQ ID NO: 3568159 - RNA, 20 nt, Human
caagguccucugucagucac

SEQ ID NO: 3568160 - RNA, 22 nt, Human
caagguccucugucagucacag

SEQ ID NO: 3568161 - RNA, 16 nt, Human
caaggucgguaaguug

SEQ ID NO: 3568162 - RNA, 21 nt, Human
caaggucuagguggagguggg

SEQ ID NO: 3568163 - RNA, 20 nt, Human
caaggucugagccacagcag

SEQ ID NO: 3568164 - RNA, 21 nt, Human
caaggucugagccacagcagc

SEQ ID NO: 3568165 - RNA, 13 nt, Human
caaggucugcuuu

SEQ ID NO: 3568166 - RNA, 13 nt, Human
caaggucuuuaaa

SEQ ID NO: 3568167 - RNA, 14 nt, Human
caaggugacagaag

SEQ ID NO: 3568168 - RNA, 20 nt, Human
caaggugacagaaggaccag

SEQ ID NO: 3568169 - RNA, 14 nt, Human
caaggugcaggcag

SEQ ID NO: 3568170 - RNA, 19 nt, Human
caaggugcaggcaggcugg

SEQ ID NO: 3568171 - RNA, 13 nt, Human
caaggugcucaca

SEQ ID NO: 3568172 - RNA, 23 nt, Human
caaggugcuguugucauugcuuu

SEQ ID NO: 3568173 - RNA, 13 nt, Human
caagguggagugg

SEQ ID NO: 3568174 - RNA, 18 nt, Human
caagguggaguggaugcc

SEQ ID NO: 3568175 - RNA, 23 nt, Human
caaggugggaggauugcuugagc

SEQ ID NO: 3568176 - RNA, 21 nt, Human
caaggugggcugagcccuggc

SEQ ID NO: 3568177 - RNA, 22 nt, Human
caagguggggggaucacaaggu

SEQ ID NO: 3568178 - RNA, 20 nt, Human
caagguggucugcucgggcc

SEQ ID NO: 3568179 - RNA, 17 nt, Human
caagguggugugaucuu

SEQ ID NO: 3568180 - RNA, 18 nt, Human
caagguggugugaucuua

SEQ ID NO: 3568181 - RNA, 17 nt, Human
caaggugucauuuaugu

SEQ ID NO: 3568182 - RNA, 16 nt, Human
caagguguccuacaga

SEQ ID NO: 3568183 - RNA, 18 nt, Human
caagguguccuacagaaa

SEQ ID NO: 3568184 - RNA, 17 nt, Human
caaggugugccccgugg

SEQ ID NO: 3568185 - RNA, 22 nt, Human
caagguuauaauuuuuuuuaaa

SEQ ID NO: 3568186 - RNA, 18 nt, Human
caagguucaacuuauuaa

SEQ ID NO: 3568187 - RNA, 14 nt, Human
caagguuccacaga

SEQ ID NO: 3568188 - RNA, 15 nt, Human
caagguuccacagag

SEQ ID NO: 3568189 - RNA, 18 nt, Human
caagguuccacagaguaa

SEQ ID NO: 3568190 - RNA, 15 nt, Human
caagguucccucuga

SEQ ID NO: 3568191 - RNA, 19 nt, Human
caagguucccucugagaau

SEQ ID NO: 3568192 - RNA, 16 nt, Human
caagguucccuugugg

SEQ ID NO: 3568193 - RNA, 17 nt, Human
caagguuuaaagagucu

SEQ ID NO: 3568194 - RNA, 15 nt, Human
caagguuuaaguuau

SEQ ID NO: 3568195 - RNA, 20 nt, Human
caagguuuaggcugguggcc

SEQ ID NO: 3568196 - RNA, 19 nt, Human
caagguuuuauaaggcuga

SEQ ID NO: 3568197 - RNA, 15 nt, Human
caaguaaaaaggcua

SEQ ID NO: 3568198 - RNA, 13 nt, Human
caaguaaacauuc

SEQ ID NO: 3568199 - RNA, 17 nt, Human
caaguaacaaaaauaaa

SEQ ID NO: 3568200 - RNA, 22 nt, Human
caaguaagagacucagccugca

SEQ ID NO: 3568201 - RNA, 17 nt, Human
caaguaagaggcuggag

SEQ ID NO: 3568202 - RNA, 23 nt, Human
caaguaauauaauggaagagaaa

SEQ ID NO: 3568203 - RNA, 23 nt, Human
caaguaauucugcugucucagcc

SEQ ID NO: 3568204 - RNA, 24 nt, Human
caaguacaaccacacccacacuca

SEQ ID NO: 3568205 - RNA, 13 nt, Human
caaguacugcugu

SEQ ID NO: 3568206 - RNA, 22 nt, Human
caaguagauaggaagaaagaag

SEQ ID NO: 3568207 - RNA, 18 nt, Human
caaguagaugccugaacu

SEQ ID NO: 3568208 - RNA, 18 nt, Human
caaguaguucuguauuug

SEQ ID NO: 3568209 - RNA, 15 nt, Human
caaguauagaaaauc

SEQ ID NO: 3568210 - RNA, 22 nt, Human
caaguaugugggcagauuuuca

SEQ ID NO: 3568211 - RNA, 24 nt, Human
caaguauuacuaaauugaccuuua

SEQ ID NO: 3568212 - RNA, 20 nt, Human
caaguauuagggguaauaua

SEQ ID NO: 3568213 - RNA, 22 nt, Human
caaguauuauaaacaagaauga

SEQ ID NO: 3568214 - RNA, 22 nt, Human
caaguauuauaccuuuuuuaga

SEQ ID NO: 3568215 - RNA, 22 nt, Human
caaguauuugggaagugaagac

SEQ ID NO: 3568216 - RNA, 20 nt, Human
caaguauuuguuaauuuaga

SEQ ID NO: 3568217 - RNA, 15 nt, Human
caaguauuuuuaauu

SEQ ID NO: 3568218 - RNA, 15 nt, Human
caagucaaauuaaua

SEQ ID NO: 3568219 - RNA, 19 nt, Human
caagucaaccaauguagaa

SEQ ID NO: 3568220 - RNA, 13 nt, Human
caagucaagugaa

SEQ ID NO: 3568221 - RNA, 23 nt, Human
caagucaagugaaaaaggaggaa

SEQ ID NO: 3568222 - RNA, 14 nt, Human
caagucagaggaug

SEQ ID NO: 3568223 - RNA, 19 nt, Human
caagucagaggauggccag

SEQ ID NO: 3568224 - RNA, 22 nt, Human
caagucaguaggacuccuuauu

SEQ ID NO: 3568225 - RNA, 13 nt, Human
caagucaguuucu

SEQ ID NO: 3568226 - RNA, 20 nt, Human
caagucauagccauaaauga

SEQ ID NO: 3568227 - RNA, 14 nt, Human
caagucauggcugu

SEQ ID NO: 3568228 - RNA, 16 nt, Human
caagucaugugcauuu

SEQ ID NO: 3568229 - RNA, 14 nt, Human
caaguccaagcaua

SEQ ID NO: 3568230 - RNA, 18 nt, Human
caaguccaauaagacacu

SEQ ID NO: 3568231 - RNA, 15 nt, Human
caaguccagguccug

SEQ ID NO: 3568232 - RNA, 16 nt, Human
caaguccagguccugg

SEQ ID NO: 3568233 - RNA, 14 nt, Human
caagucccagcgcg

SEQ ID NO: 3568234 - RNA, 18 nt, Human
caagucccugacucucug

SEQ ID NO: 3568235 - RNA, 20 nt, Human
caagucccuguaauuguugu

SEQ ID NO: 3568236 - RNA, 16 nt, Human
caaguccgcagaagcc

SEQ ID NO: 3568237 - RNA, 15 nt, Human
caaguccugaagagg

SEQ ID NO: 3568238 - RNA, 15 nt, Human
caaguccugugaauu

SEQ ID NO: 3568239 - RNA, 18 nt, Human
caaguccuuaccucuucc

SEQ ID NO: 3568240 - RNA, 20 nt, Human
caagucuaugaugcuguugc

SEQ ID NO: 3568241 - RNA, 16 nt, Human
caagucucaguggcuu

SEQ ID NO: 3568242 - RNA, 23 nt, Human
caagucucaguggcuucaucugu

SEQ ID NO: 3568243 - RNA, 18 nt, Human
caagucucugcuggccca

SEQ ID NO: 3568244 - RNA, 19 nt, Human
caagucucugcuggcccag

SEQ ID NO: 3568245 - RNA, 12 nt, Human
caagucugcagg

SEQ ID NO: 3568246 - RNA, 17 nt, Human
caagucugcaggugcac

SEQ ID NO: 3568247 - RNA, 17 nt, Human
caagucugugccuggag

SEQ ID NO: 3568248 - RNA, 20 nt, Human
caagucuuuaggucuuugua

SEQ ID NO: 3568249 - RNA, 21 nt, Human
caagucuuuaggucuuuguaa

SEQ ID NO: 3568250 - RNA, 23 nt, Human
caagucuuucucuuucccugguc

SEQ ID NO: 3568251 - RNA, 19 nt, Human
caagugaaaaaggaggaag

SEQ ID NO: 3568252 - RNA, 18 nt, Human
aggccccgaggacccaga

SEQ ID NO: 3568253 - RNA, 19 nt, Human
aggccccgaggacccagac

SEQ ID NO: 3568254 - RNA, 23 nt, Human
aggccccgaggacccagacccag

SEQ ID NO: 3568255 - RNA, 15 nt, Human
aggccccgcuugucc

SEQ ID NO: 3568256 - RNA, 12 nt, Human
aggccccugcca

SEQ ID NO: 3568257 - RNA, 13 nt, Human
aggccccugccac

SEQ ID NO: 3568258 - RNA, 18 nt, Human
aggccccugccacccugg

SEQ ID NO: 3568259 - RNA, 17 nt, Human
aggccccuggacaagca

SEQ ID NO: 3568260 - RNA, 14 nt, Human
aggccccuggagcc

SEQ ID NO: 3568261 - RNA, 14 nt, Human
aggccccuggccca

SEQ ID NO: 3568262 - RNA, 19 nt, Human
aggccccuucucucccugc

SEQ ID NO: 3568263 - RNA, 15 nt, Human
aggcccgagcagcug

SEQ ID NO: 3568264 - RNA, 22 nt, Human
aggcccgagcagcugagcaggg

SEQ ID NO: 3568265 - RNA, 19 nt, Human
aggcccgcaugcggcccag

SEQ ID NO: 3568266 - RNA, 15 nt, Human
aggcccggcuccagg

SEQ ID NO: 3568267 - RNA, 18 nt, Human
aggcccggcuccaggcuc

SEQ ID NO: 3568268 - RNA, 15 nt, Human
aggcccgucugucca

SEQ ID NO: 3568269 - RNA, 16 nt, Human
aggcccgucuguccau

SEQ ID NO: 3568270 - RNA, 23 nt, Human
aggcccucaagucuuucucuuuc

SEQ ID NO: 3568271 - RNA, 17 nt, Human
aggcccuccacaccugc

SEQ ID NO: 3568272 - RNA, 19 nt, Human
aggcccuccacaccugcgg

SEQ ID NO: 3568273 - RNA, 21 nt, Human
aggcccuccacaccugcggcc

SEQ ID NO: 3568274 - RNA, 23 nt, Human
aggcccuccucucccauccuuga

SEQ ID NO: 3568275 - RNA, 15 nt, Human
aggcccuccugugcu

SEQ ID NO: 3568276 - RNA, 21 nt, Human
aggcccuccugugcuggggga

SEQ ID NO: 3568277 - RNA, 15 nt, Human
aggcccucgcugcca

SEQ ID NO: 3568278 - RNA, 17 nt, Human
aggcccucgcugccagc

SEQ ID NO: 3568279 - RNA, 22 nt, Human
aggcccucgcugccagcucugu

SEQ ID NO: 3568280 - RNA, 15 nt, Human
aggcccucgggccca

SEQ ID NO: 3568281 - RNA, 13 nt, Human
aggcccucugccc

SEQ ID NO: 3568282 - RNA, 14 nt, Human
aggcccucugccca

SEQ ID NO: 3568283 - RNA, 22 nt, Human
aggcccucugcccacucccugc

SEQ ID NO: 3568284 - RNA, 23 nt, Human
aggcccucugcccacucccugca

SEQ ID NO: 3568285 - RNA, 18 nt, Human
aggcccugcacuguccug

SEQ ID NO: 3568286 - RNA, 19 nt, Human
aggcccugcacuguccugc

SEQ ID NO: 3568287 - RNA, 23 nt, Human
aggcccugcacuguccugcucca

SEQ ID NO: 3568288 - RNA, 24 nt, Human
aggcccugcacuguccugcuccac

SEQ ID NO: 3568289 - RNA, 12 nt, Human
aggcccugcagu

SEQ ID NO: 3568290 - RNA, 13 nt, Human
aggcccugcagug

SEQ ID NO: 3568291 - RNA, 11 nt, Human
aggcccugcau

SEQ ID NO: 3568292 - RNA, 17 nt, Human
aggcccugcuccugcag

SEQ ID NO: 3568293 - RNA, 21 nt, Human
aggcccuggccuccccugcca

SEQ ID NO: 3568294 - RNA, 22 nt, Human
aggcccuggccuccccugccac

SEQ ID NO: 3568295 - RNA, 23 nt, Human
aggcccuggccuccccugccacc

SEQ ID NO: 3568296 - RNA, 13 nt, Human
aggcccuuccucu

SEQ ID NO: 3568297 - RNA, 15 nt, Human
aggcccuuccucucc

SEQ ID NO: 3568298 - RNA, 17 nt, Human
aggcccuuccucuccac

SEQ ID NO: 3568299 - RNA, 22 nt, Human
aggcccuuccucuccacugccu

SEQ ID NO: 3568300 - RNA, 12 nt, Human
aggcccuucucu

SEQ ID NO: 3568301 - RNA, 24 nt, Human
aggcccuuugaagccucagcuacc

SEQ ID NO: 3568302 - RNA, 16 nt, Human
aggcccuuugcugucc

SEQ ID NO: 3568303 - RNA, 23 nt, Human
aggccgaagcuaacagggaaggc

SEQ ID NO: 3568304 - RNA, 14 nt, Human
aggccgaagcucug

SEQ ID NO: 3568305 - RNA, 17 nt, Human
aggccgaagcucuggcu

SEQ ID NO: 3568306 - RNA, 15 nt, Human
aggccgagaagcaag

SEQ ID NO: 3568307 - RNA, 17 nt, Human
aggccgagaagccagug

SEQ ID NO: 3568308 - RNA, 19 nt, Human
aggccgaggccaugugcau

SEQ ID NO: 3568309 - RNA, 16 nt, Human
aggccgaggcgggugg

SEQ ID NO: 3568310 - RNA, 16 nt, Human
aggccgcagcucuugc

SEQ ID NO: 3568311 - RNA, 22 nt, Human
aggccgcagcucuugcccuucc

SEQ ID NO: 3568312 - RNA, 19 nt, Human
aggccgccccagccucuga

SEQ ID NO: 3568313 - RNA, 17 nt, Human
aggccgcuagaggccug

SEQ ID NO: 3568314 - RNA, 17 nt, Human
aggccgcuguucaccca

SEQ ID NO: 3568315 - RNA, 16 nt, Human
aggccggcagccccag

SEQ ID NO: 3568316 - RNA, 23 nt, Human
aggccggcagccccagccugcua

SEQ ID NO: 3568317 - RNA, 19 nt, Human
aggccggcuugccacaccc

SEQ ID NO: 3568318 - RNA, 20 nt, Human
aggccggcuugccacacccc

SEQ ID NO: 3568319 - RNA, 14 nt, Human
aggccgggcagagc

SEQ ID NO: 3568320 - RNA, 15 nt, Human
aggccgggccuguac

SEQ ID NO: 3568321 - RNA, 17 nt, Human
aggccgggccuguacag

SEQ ID NO: 3568322 - RNA, 20 nt, Human
aggccgggccuguacagucu

SEQ ID NO: 3568323 - RNA, 16 nt, Human
aggccguccucccggg

SEQ ID NO: 3568324 - RNA, 20 nt, Human
aggccgugacgucugggugg

SEQ ID NO: 3568325 - RNA, 20 nt, Human
aggccguggcugcuguggga

SEQ ID NO: 3568326 - RNA, 21 nt, Human
aggccguugccgcugauguuu

SEQ ID NO: 3568327 - RNA, 19 nt, Human
aggccuaaucucauaccuc

SEQ ID NO: 3568328 - RNA, 22 nt, Human
aggccuaauucuaugccugucu

SEQ ID NO: 3568329 - RNA, 21 nt, Human
aggccuagacucugucuaccu

SEQ ID NO: 3568330 - RNA, 21 nt, Human
aggccuaggaggguccucuga

SEQ ID NO: 3568331 - RNA, 17 nt, Human
aggccuaguccugcgaa

SEQ ID NO: 3568332 - RNA, 16 nt, Human
aggccuauaaccccag

SEQ ID NO: 3568333 - RNA, 22 nt, Human
aggccuauaaugaagcuuuaua

SEQ ID NO: 3568334 - RNA, 14 nt, Human
aggccuauuucauc

SEQ ID NO: 3568335 - RNA, 21 nt, Human
aggccuauuucaucacaagaa

SEQ ID NO: 3568336 - RNA, 18 nt, Human
aggccucaccucuaccca

SEQ ID NO: 3568337 - RNA, 19 nt, Human
aggccucaccucuacccaa

SEQ ID NO: 3568338 - RNA, 18 nt, Human
aggccucagggcuccuug

SEQ ID NO: 3568339 - RNA, 23 nt, Human
aggccucaguggacuuuccaccc

SEQ ID NO: 3568340 - RNA, 17 nt, Human
aggccuccagcucagca

SEQ ID NO: 3568341 - RNA, 15 nt, Human
aggccucccuagcca

SEQ ID NO: 3568342 - RNA, 14 nt, Human
aggccucccugcca

SEQ ID NO: 3568343 - RNA, 23 nt, Human
aggccuccuggcugucugaggcu

SEQ ID NO: 3568344 - RNA, 20 nt, Human
aggccucgaaaaccaucaca

SEQ ID NO: 3568345 - RNA, 21 nt, Human
aggccucucauuccagaggaa

SEQ ID NO: 3568346 - RNA, 16 nt, Human
aggccucuguguccuu

SEQ ID NO: 3568347 - RNA, 23 nt, Human
aggccucuuggaccucugcucug

SEQ ID NO: 3568348 - RNA, 17 nt, Human
aggccucuuggagaccu

SEQ ID NO: 3568349 - RNA, 17 nt, Human
aggccugaaagaggcug

SEQ ID NO: 3568350 - RNA, 18 nt, Human
aggccugaaauccugguu

SEQ ID NO: 3568351 - RNA, 13 nt, Human
aggccugaagcca

SEQ ID NO: 3568352 - RNA, 19 nt, Human
aggccugaagccagcugcc

SEQ ID NO: 3568353 - RNA, 19 nt, Human
aggccugaaucaugagccu

SEQ ID NO: 3568354 - RNA, 20 nt, Human
aggccugaaucaugagccug

SEQ ID NO: 3568355 - RNA, 23 nt, Human
aggccugaauccaaaagaaaaac

SEQ ID NO: 3568356 - RNA, 17 nt, Human
aggccugacugccaagc

SEQ ID NO: 3568357 - RNA, 18 nt, Human
aggccugacugccaagcc

SEQ ID NO: 3568358 - RNA, 22 nt, Human
aggccugacugccaagccaugg

SEQ ID NO: 3568359 - RNA, 17 nt, Human
aggccugagauuucauc

SEQ ID NO: 3568360 - RNA, 20 nt, Human
aggccugaggaugagcugga

SEQ ID NO: 3568361 - RNA, 16 nt, Human
aggccugaucugccca

SEQ ID NO: 3568362 - RNA, 18 nt, Human
aggccugcagccuggagc

SEQ ID NO: 3568363 - RNA, 16 nt, Human
aggccugcccucaggg

SEQ ID NO: 3568364 - RNA, 17 nt, Human
aggccugcccucaggga

SEQ ID NO: 3568365 - RNA, 22 nt, Human
aggccugcccucagggaucuug

SEQ ID NO: 3568366 - RNA, 13 nt, Human
aggccugccuguu

SEQ ID NO: 3568367 - RNA, 17 nt, Human
aggccugcgacccuggg

SEQ ID NO: 3568368 - RNA, 20 nt, Human
aggccugcgacccugggggc

SEQ ID NO: 3568369 - RNA, 23 nt, Human
aggccugcucccuguagggucca

SEQ ID NO: 3568370 - RNA, 13 nt, Human
aggccuggcacag

SEQ ID NO: 3568371 - RNA, 14 nt, Human
aggccuggcacagu

SEQ ID NO: 3568372 - RNA, 21 nt, Human
aggccuggcauggcaccuguc

SEQ ID NO: 3568373 - RNA, 11 nt, Human
aggccuggcca

SEQ ID NO: 3568374 - RNA, 15 nt, Human
aggccuggccagaug

SEQ ID NO: 3568375 - RNA, 16 nt, Human
aggccuggccagaugc

SEQ ID NO: 3568376 - RNA, 13 nt, Human
aggccugggcagu

SEQ ID NO: 3568377 - RNA, 14 nt, Human
aggccugggcagug

SEQ ID NO: 3568378 - RNA, 15 nt, Human
aggccugggcagugg

SEQ ID NO: 3568379 - RNA, 17 nt, Human
aggccugggggcaggga

SEQ ID NO: 3568380 - RNA, 11 nt, Human
aggccuggggu

SEQ ID NO: 3568381 - RNA, 21 nt, Human
aggccugggucugugucucuu

SEQ ID NO: 3568382 - RNA, 17 nt, Human
aggccugggugcuggcu

SEQ ID NO: 3568383 - RNA, 23 nt, Human
aggccugggugcuggcugcccag

SEQ ID NO: 3568384 - RNA, 23 nt, Human
aggccuggguggaucggccuccu

SEQ ID NO: 3568385 - RNA, 22 nt, Human
aggccugucccuggccaucucu

SEQ ID NO: 3568386 - RNA, 13 nt, Human
aggccugucugug

SEQ ID NO: 3568387 - RNA, 20 nt, Human
aggccuguguagcugugacc

SEQ ID NO: 3568388 - RNA, 23 nt, Human
aggccugugugugaaaggaagcu

SEQ ID NO: 3568389 - RNA, 16 nt, Human
aggccuguuuggccuc

SEQ ID NO: 3568390 - RNA, 20 nt, Human
aggccuuaucauucauucuu

SEQ ID NO: 3568391 - RNA, 21 nt, Human
aggccuucaggguucagcagu

SEQ ID NO: 3568392 - RNA, 20 nt, Human
aggccuuccagcugcugucu

SEQ ID NO: 3568393 - RNA, 15 nt, Human
aggccuuccucucuc

SEQ ID NO: 3568394 - RNA, 21 nt, Human
aggccuucuugugaucuugcu

SEQ ID NO: 3568395 - RNA, 20 nt, Human
aggccuugcggcuccucagg

SEQ ID NO: 3568396 - RNA, 22 nt, Human
aggccuugcggcuccucaggga

SEQ ID NO: 3568397 - RNA, 17 nt, Human
aggccuugggcucugcu

SEQ ID NO: 3568398 - RNA, 15 nt, Human
aggccuuuaaaauuu

SEQ ID NO: 3568399 - RNA, 14 nt, Human
aggccuuuaaccau

SEQ ID NO: 3568400 - RNA, 18 nt, Human
aggccuuucccuaagcca

SEQ ID NO: 3568401 - RNA, 20 nt, Human
aggccuuucccuaagccagc

SEQ ID NO: 3568402 - RNA, 22 nt, Human
aggcgaggaggccguugccgcu

SEQ ID NO: 3568403 - RNA, 15 nt, Human
aggcgagugccagga

SEQ ID NO: 3568404 - RNA, 24 nt, Human
aggcgagugccaggacuccccagg

SEQ ID NO: 3568405 - RNA, 23 nt, Human
aggcgauccaccugucucagccu

SEQ ID NO: 3568406 - RNA, 20 nt, Human
aggcgcaagggaggcccagc

SEQ ID NO: 3568407 - RNA, 21 nt, Human
aggcgcacugugacccccagc

SEQ ID NO: 3568408 - RNA, 21 nt, Human
aggcgccccaacccguggagg

SEQ ID NO: 3568409 - RNA, 13 nt, Human
aggcgcuaacuug

SEQ ID NO: 3568410 - RNA, 15 nt, Human
aggcgcuaacuugcu

SEQ ID NO: 3568411 - RNA, 15 nt, Human
aggcggacguuccag

SEQ ID NO: 3568412 - RNA, 12 nt, Human
aggcggccccuc

SEQ ID NO: 3568413 - RNA, 14 nt, Human
aggcggccccuccc

SEQ ID NO: 3568414 - RNA, 21 nt, Human
aggcggccuuuguugcucagc

SEQ ID NO: 3568415 - RNA, 14 nt, Human
aggcgggaggaggu

SEQ ID NO: 3568416 - RNA, 14 nt, Human
aggcgggaguggag

SEQ ID NO: 3568417 - RNA, 17 nt, Human
aggcgggccagccaggc

SEQ ID NO: 3568418 - RNA, 23 nt, Human
aggcgggccagccaggcgggcuc

SEQ ID NO: 3568419 - RNA, 18 nt, Human
aggcggggcuugccuucu

SEQ ID NO: 3568420 - RNA, 17 nt, Human
aggcgggggcugcccuu

SEQ ID NO: 3568421 - RNA, 19 nt, Human
aggcgucccgcaccugucu

SEQ ID NO: 3568422 - RNA, 21 nt, Human
aggcgugagccaccgugccug

SEQ ID NO: 3568423 - RNA, 14 nt, Human
aggcgugaggaugg

SEQ ID NO: 3568424 - RNA, 18 nt, Human
aggcguggagcugccuga

SEQ ID NO: 3568425 - RNA, 17 nt, Human
aggcguugcuuucacuc

SEQ ID NO: 3568426 - RNA, 15 nt, Human
aggcuaaaaagcaac

SEQ ID NO: 3568427 - RNA, 15 nt, Human
aggcuaaaauguuuu

SEQ ID NO: 3568428 - RNA, 16 nt, Human
aggcuaaaauguuuuc

SEQ ID NO: 3568429 - RNA, 17 nt, Human
aggcuaaaauguuuuca

SEQ ID NO: 3568430 - RNA, 14 nt, Human
aggcuaagcugccg

SEQ ID NO: 3568431 - RNA, 15 nt, Human
aggcuaaggcgugga

SEQ ID NO: 3568432 - RNA, 17 nt, Human
aggcuaaguugggaucu

SEQ ID NO: 3568433 - RNA, 22 nt, Human
aggcuaauguuggcagaugcag

SEQ ID NO: 3568434 - RNA, 22 nt, Human
aggcuaauuuuuuuguauuuua

SEQ ID NO: 3568435 - RNA, 23 nt, Human
aggcuacaauuuucucccaggaa

SEQ ID NO: 3568436 - RNA, 13 nt, Human
aggcuacagagaa

SEQ ID NO: 3568437 - RNA, 15 nt, Human
aggcuacagagaagc

SEQ ID NO: 3568438 - RNA, 20 nt, Human
aggcuacagagaagccuuca

SEQ ID NO: 3568439 - RNA, 15 nt, Human
aggcuaccuuuguau

SEQ ID NO: 3568440 - RNA, 17 nt, Human
aggcuacuucggggcug

SEQ ID NO: 3568441 - RNA, 17 nt, Human
aggcuagcuggagccug

SEQ ID NO: 3568442 - RNA, 18 nt, Human
aggcuagcuggagccugg

SEQ ID NO: 3568443 - RNA, 21 nt, Human
aggcuaggggguuggaggugg

SEQ ID NO: 3568444 - RNA, 14 nt, Human
aggcuagggugggg

SEQ ID NO: 3568445 - RNA, 23 nt, Human
aggcuauacuugucuuguucacc

SEQ ID NO: 3568446 - RNA, 16 nt, Human
aggcuaugagugggau

SEQ ID NO: 3568447 - RNA, 15 nt, Human
aggcuauuaaaaaag

SEQ ID NO: 3568448 - RNA, 21 nt, Human
aggcuauuguccccuaaacca

SEQ ID NO: 3568449 - RNA, 11 nt, Human
aggcuauuugu

SEQ ID NO: 3568450 - RNA, 21 nt, Human
aggcuauuuguaaaucugcca

SEQ ID NO: 3568451 - RNA, 23 nt, Human
aggcucaaacaaugacaaagcag

SEQ ID NO: 3568452 - RNA, 14 nt, Human
aggcucaaauuuug

SEQ ID NO: 3568453 - RNA, 19 nt, Human
aggcucaacaauaaaacau

SEQ ID NO: 3568454 - RNA, 14 nt, Human
aggcucacugccag

SEQ ID NO: 3568455 - RNA, 21 nt, Human
aggcucacugccaggccagcc

SEQ ID NO: 3568456 - RNA, 22 nt, Human
aggcucacugccaggccagccu

SEQ ID NO: 3568457 - RNA, 23 nt, Human
aggcucacugccaggccagccuc

SEQ ID NO: 3568458 - RNA, 11 nt, Human
aggcucagaga

SEQ ID NO: 3568459 - RNA, 14 nt, Human
aggcucagagaugu

SEQ ID NO: 3568460 - RNA, 20 nt, Human
aggcucagaggguguccugc

SEQ ID NO: 3568461 - RNA, 18 nt, Human
aggcucagcggcgaccgc

SEQ ID NO: 3568462 - RNA, 16 nt, Human
aggcucaggucccugg

SEQ ID NO: 3568463 - RNA, 16 nt, Human
aggcucagucucagga

SEQ ID NO: 3568464 - RNA, 18 nt, Human
aggcucagucucaggagc

SEQ ID NO: 3568465 - RNA, 17 nt, Human
aggcuccacuuggucug

SEQ ID NO: 3568466 - RNA, 21 nt, Human
aggcuccacuuggucugugag

SEQ ID NO: 3568467 - RNA, 13 nt, Human
aggcuccagaggg

SEQ ID NO: 3568468 - RNA, 14 nt, Human
aggcuccagagggc

SEQ ID NO: 3568469 - RNA, 15 nt, Human
aggcuccagagggca

SEQ ID NO: 3568470 - RNA, 16 nt, Human
aggcuccaggagcagc

SEQ ID NO: 3568471 - RNA, 17 nt, Human
aggcuccaggagcagcc

SEQ ID NO: 3568472 - RNA, 20 nt, Human
aggcucccgaggggaagggg

SEQ ID NO: 3568473 - RNA, 13 nt, Human
aggcuccgcccuu

SEQ ID NO: 3568474 - RNA, 20 nt, Human
aggcuccugccaccacgccc

SEQ ID NO: 3568475 - RNA, 21 nt, Human
aggcuccugccaguguggaac

SEQ ID NO: 3568476 - RNA, 12 nt, Human
aggcucgagcau

SEQ ID NO: 3568477 - RNA, 15 nt, Human
aggcucgagcaugcc

SEQ ID NO: 3568478 - RNA, 18 nt, Human
aggcucgagcaugccugg

SEQ ID NO: 3568479 - RNA, 19 nt, Human
aggcucgagcaugccugga

SEQ ID NO: 3568480 - RNA, 15 nt, Human
aggcucgauuuugua

SEQ ID NO: 3568481 - RNA, 17 nt, Human
aggcucgauuuuguauc

SEQ ID NO: 3568482 - RNA, 19 nt, Human
aggcucgauuuuguaucug

SEQ ID NO: 3568483 - RNA, 18 nt, Human
aggcucgccuucccuccu

SEQ ID NO: 3568484 - RNA, 17 nt, Human
aggcucggccugccccc

SEQ ID NO: 3568485 - RNA, 18 nt, Human
aggcucguggacugagug

SEQ ID NO: 3568486 - RNA, 23 nt, Human
aggcucuaaccacacagccuaca

SEQ ID NO: 3568487 - RNA, 20 nt, Human
aggcucuaugagucuagaug

SEQ ID NO: 3568488 - RNA, 16 nt, Human
aggcucucaggccagc

SEQ ID NO: 3568489 - RNA, 18 nt, Human
aggcucucuuugcccagu

SEQ ID NO: 3568490 - RNA, 21 nt, Human
aggcucugagagucuagauuc

SEQ ID NO: 3568491 - RNA, 22 nt, Human
aggcucugagagucuagauucu

SEQ ID NO: 3568492 - RNA, 17 nt, Human
aggcucugcacagaugg

SEQ ID NO: 3568493 - RNA, 11 nt, Human
aggcucugccc

SEQ ID NO: 3568494 - RNA, 12 nt, Human
aggcucugcccu

SEQ ID NO: 3568495 - RNA, 14 nt, Human
aggcucugcccugc

SEQ ID NO: 3568496 - RNA, 14 nt, Human
aggcucugcccuug

SEQ ID NO: 3568497 - RNA, 15 nt, Human
aggcucugcccuugg

SEQ ID NO: 3568498 - RNA, 16 nt, Human
aggcucugcccuuggu

SEQ ID NO: 3568499 - RNA, 14 nt, Human
aggcucugccuucg

SEQ ID NO: 3568500 - RNA, 22 nt, Human
aggcucugccuucgaggucaga

SEQ ID NO: 3568501 - RNA, 16 nt, Human
aggcucugcuucucca

SEQ ID NO: 3568502 - RNA, 22 nt, Human
aggcucugcuucuccaaggaaa

SEQ ID NO: 3568503 - RNA, 14 nt, Human
aggcucuggagccc

SEQ ID NO: 3568504 - RNA, 21 nt, Human
aggcucugugcugacccuccu

SEQ ID NO: 3568505 - RNA, 17 nt, Human
aggcucuguuccacaua

SEQ ID NO: 3568506 - RNA, 16 nt, Human
aggcucuguuuaugcu

SEQ ID NO: 3568507 - RNA, 23 nt, Human
aggcucuuuggggucagccaggg

SEQ ID NO: 3568508 - RNA, 14 nt, Human
aggcugaaaacaau

SEQ ID NO: 3568509 - RNA, 20 nt, Human
aggcugaacuuguuuucugg

SEQ ID NO: 3568510 - RNA, 15 nt, Human
aggcugaccaagaga

SEQ ID NO: 3568511 - RNA, 17 nt, Human
aggcugaccaagagaga

SEQ ID NO: 3568512 - RNA, 20 nt, Human
aggcugaccaagagagaaag

SEQ ID NO: 3568513 - RNA, 13 nt, Human
aggcugaccacag

SEQ ID NO: 3568514 - RNA, 22 nt, Human
aggcugaccuugaacuccuggg

SEQ ID NO: 3568515 - RNA, 16 nt, Human
aggcugacgugugagg

SEQ ID NO: 3568516 - RNA, 15 nt, Human
aggcugagacaggag

SEQ ID NO: 3568517 - RNA, 18 nt, Human
aggcugagacaggagaau

SEQ ID NO: 3568518 - RNA, 18 nt, Human
aggcugagacagugaauu

SEQ ID NO: 3568519 - RNA, 11 nt, Human
aggcugagcca

SEQ ID NO: 3568520 - RNA, 18 nt, Human
aggcugaggaaaggccag

SEQ ID NO: 3568521 - RNA, 20 nt, Human
aggcugaggaaaggccagcu

SEQ ID NO: 3568522 - RNA, 22 nt, Human
aggcugaggaaaggccagcugg

SEQ ID NO: 3568523 - RNA, 15 nt, Human
aggcugaggcagaag

SEQ ID NO: 3568524 - RNA, 17 nt, Human
aggcugaggcagaagaa

SEQ ID NO: 3568525 - RNA, 15 nt, Human
aggcugaggcaggag

SEQ ID NO: 3568526 - RNA, 16 nt, Human
aggcugaggcaggaga

SEQ ID NO: 3568527 - RNA, 18 nt, Human
aggcugaggcaggagacu

SEQ ID NO: 3568528 - RNA, 17 nt, Human
aggcugaggcaggagga

SEQ ID NO: 3568529 - RNA, 15 nt, Human
aggcugaggccugga

SEQ ID NO: 3568530 - RNA, 16 nt, Human
aggcugaggccuggac

SEQ ID NO: 3568531 - RNA, 16 nt, Human
aggcugaggcgggugg

SEQ ID NO: 3568532 - RNA, 16 nt, Human
aggcugaggcuggcac

SEQ ID NO: 3568533 - RNA, 19 nt, Human
aggcugagguugcgccacu

SEQ ID NO: 3568534 - RNA, 14 nt, Human
aggcugagugcagg

SEQ ID NO: 3568535 - RNA, 15 nt, Human
aggcugagugcaggc

SEQ ID NO: 3568536 - RNA, 23 nt, Human
aggcugagugcaggcccacccug

SEQ ID NO: 3568537 - RNA, 24 nt, Human
aggcugagugcaggcccacccugc

SEQ ID NO: 3568538 - RNA, 15 nt, Human
aggcugauuucuagg

SEQ ID NO: 3568539 - RNA, 20 nt, Human
aggcugcagaaggccaagaa

SEQ ID NO: 3568540 - RNA, 14 nt, Human
aggcugcagcugga

SEQ ID NO: 3568541 - RNA, 21 nt, Human
aggcugcagucagucaugaug

SEQ ID NO: 3568542 - RNA, 13 nt, Human
aggcugcauagaa

SEQ ID NO: 3568543 - RNA, 21 nt, Human
aggcugcauugaaaagagcug

SEQ ID NO: 3568544 - RNA, 11 nt, Human
aggcugccagu

SEQ ID NO: 3568545 - RNA, 13 nt, Human
aggcugccagugc

SEQ ID NO: 3568546 - RNA, 19 nt, Human
aggcugccagugccugggu

SEQ ID NO: 3568547 - RNA, 12 nt, Human
aggcugcccccg

SEQ ID NO: 3568548 - RNA, 14 nt, Human
aggcugcccuccug

SEQ ID NO: 3568549 - RNA, 16 nt, Human
aggcugccguccccua

SEQ ID NO: 3568550 - RNA, 22 nt, Human
aggcugccguccccuagagucc

SEQ ID NO: 3568551 - RNA, 16 nt, Human
aggcugccucccaaca

SEQ ID NO: 3568552 - RNA, 19 nt, Human
aggcugccugagcaccucc

SEQ ID NO: 3568553 - RNA, 16 nt, Human
aggcugcgucuggagg

SEQ ID NO: 3568554 - RNA, 22 nt, Human
aggcugcucggggugcacagga

SEQ ID NO: 3568555 - RNA, 23 nt, Human
aggcugcucuugaacuccugacc

SEQ ID NO: 3568556 - RNA, 15 nt, Human
aggcugcuggcgccu

SEQ ID NO: 3568557 - RNA, 20 nt, Human
aggcugcuggcgccucugca

SEQ ID NO: 3568558 - RNA, 21 nt, Human
aggcugcuggcgccucugcaa

SEQ ID NO: 3568559 - RNA, 22 nt, Human
aggcugcuguacugaaguaaaa

SEQ ID NO: 3568560 - RNA, 14 nt, Human
aggcugcuuagaau

SEQ ID NO: 3568561 - RNA, 13 nt, Human
aggcugcuuggga

SEQ ID NO: 3568562 - RNA, 19 nt, Human
aggcugcuuuccaaagcca

SEQ ID NO: 3568563 - RNA, 22 nt, Human
aggcuggaagauagcugugacu

SEQ ID NO: 3568564 - RNA, 16 nt, Human
aggcuggaaggaggaa

SEQ ID NO: 3568565 - RNA, 18 nt, Human
aggcuggaaggaggaaga

SEQ ID NO: 3568566 - RNA, 14 nt, Human
aggcuggacuccag

SEQ ID NO: 3568567 - RNA, 13 nt, Human
aggcuggagaagc

SEQ ID NO: 3568568 - RNA, 14 nt, Human
aggcuggagcuggc

SEQ ID NO: 3568569 - RNA, 20 nt, Human
aggcuggagugcaguggcgu

SEQ ID NO: 3568570 - RNA, 14 nt, Human
aggcuggcacagga

SEQ ID NO: 3568571 - RNA, 16 nt, Human
aggcuggcacaggaca

SEQ ID NO: 3568572 - RNA, 12 nt, Human
aggcuggcauga

SEQ ID NO: 3568573 - RNA, 13 nt, Human
aggcuggccagcc

SEQ ID NO: 3568574 - RNA, 17 nt, Human
aggcuggccagccccac

SEQ ID NO: 3568575 - RNA, 14 nt, Human
aggcuggccagccg

SEQ ID NO: 3568576 - RNA, 16 nt, Human
aggcuggccagccgcu

SEQ ID NO: 3568577 - RNA, 14 nt, Human
aggcuggcccugcc

SEQ ID NO: 3568578 - RNA, 17 nt, Human
aggcuggcgagagucug

SEQ ID NO: 3568579 - RNA, 22 nt, Human
aggcuggcgagagucuggcccu

SEQ ID NO: 3568580 - RNA, 14 nt, Human
aggcuggcgcagcc

SEQ ID NO: 3568581 - RNA, 13 nt, Human
aggcuggcgugca

SEQ ID NO: 3568582 - RNA, 15 nt, Human
aggcuggcuggggcc

SEQ ID NO: 3568583 - RNA, 22 nt, Human
aggcugggaauggaggggcaga

SEQ ID NO: 3568584 - RNA, 17 nt, Human
aggcugggaccacguga

SEQ ID NO: 3568585 - RNA, 21 nt, Human
aggcugggagagccuuccagg

SEQ ID NO: 3568586 - RNA, 12 nt, Human
aggcugggccau

SEQ ID NO: 3568587 - RNA, 20 nt, Human
aggcugggcccagaggcaca

SEQ ID NO: 3568588 - RNA, 21 nt, Human
aggcugggcccagaggcacag

SEQ ID NO: 3568589 - RNA, 14 nt, Human
aggcugggcucccu

SEQ ID NO: 3568590 - RNA, 21 nt, Human
aggcugggcucccuucccacc

SEQ ID NO: 3568591 - RNA, 23 nt, Human
aggcugggcucccuucccaccuc

SEQ ID NO: 3568592 - RNA, 21 nt, Human
aggcuggggcugaccuuccuc

SEQ ID NO: 3568593 - RNA, 19 nt, Human
aggcugggggagagccgug

SEQ ID NO: 3568594 - RNA, 14 nt, Human
aggcugggucgccc

SEQ ID NO: 3568595 - RNA, 18 nt, Human
aggcugggucgcccugga

SEQ ID NO: 3568596 - RNA, 20 nt, Human
aggcugggucgcccuggacu

SEQ ID NO: 3568597 - RNA, 21 nt, Human
aggcugggucgcccuggacug

SEQ ID NO: 3568598 - RNA, 14 nt, Human
aggcugggugccca

SEQ ID NO: 3568599 - RNA, 16 nt, Human
aggcugggugcccaca

SEQ ID NO: 3568600 - RNA, 22 nt, Human
aggcuggucucaaacuccugac

SEQ ID NO: 3568601 - RNA, 20 nt, Human
aggcuggugcuguggccagg

SEQ ID NO: 3568602 - RNA, 17 nt, Human
aggcugguggcccagga

SEQ ID NO: 3568603 - RNA, 21 nt, Human
aggcugguuuuggcaucucug

SEQ ID NO: 3568604 - RNA, 15 nt, Human
aggcuguaacuacuu

SEQ ID NO: 3568605 - RNA, 23 nt, Human
aggcuguaucccaugagccucag

SEQ ID NO: 3568606 - RNA, 16 nt, Human
aggcuguauucagcaa

SEQ ID NO: 3568607 - RNA, 19 nt, Human
aggcugucaauuacaggaa

SEQ ID NO: 3568608 - RNA, 16 nt, Human
aggcugucuguuguau

SEQ ID NO: 3568609 - RNA, 18 nt, Human
aggcugugcagcgcagcu

SEQ ID NO: 3568610 - RNA, 13 nt, Human
aggcugugcuccc

SEQ ID NO: 3568611 - RNA, 17 nt, Human
aggcugugcugcccuga

SEQ ID NO: 3568612 - RNA, 22 nt, Human
aggcugugcugcccugaagaau

SEQ ID NO: 3568613 - RNA, 19 nt, Human
aggcuguggugagggaaga

SEQ ID NO: 3568614 - RNA, 22 nt, Human
aggcugugucccucuucucuuc

SEQ ID NO: 3568615 - RNA, 18 nt, Human
aggcuguguuuggcuuuc

SEQ ID NO: 3568616 - RNA, 16 nt, Human
aggcuguucugcacug

SEQ ID NO: 3568617 - RNA, 19 nt, Human
aggcuguucugcacugaaa

SEQ ID NO: 3568618 - RNA, 16 nt, Human
aggcuguuuuugggug

SEQ ID NO: 3568619 - RNA, 14 nt, Human
aggcuuaaaaacug

SEQ ID NO: 3568620 - RNA, 17 nt, Human
aggcuuaauaaaaauga

SEQ ID NO: 3568621 - RNA, 19 nt, Human
aggcuuaauaaaaaugaca

SEQ ID NO: 3568622 - RNA, 20 nt, Human
aggcuuaauaaaaaugacag

SEQ ID NO: 3568623 - RNA, 18 nt, Human
aggcuuaauaccugggug

SEQ ID NO: 3568624 - RNA, 24 nt, Human
aggcuuagacccucaugcugccaa

SEQ ID NO: 3568625 - RNA, 15 nt, Human
aggcuuagcuuugcu

SEQ ID NO: 3568626 - RNA, 23 nt, Human
aggcuuagggacaggaccccagc

SEQ ID NO: 3568627 - RNA, 19 nt, Human
aggcuuagugauguaauua

SEQ ID NO: 3568628 - RNA, 17 nt, Human
aggcuuauauucaacca

SEQ ID NO: 3568629 - RNA, 18 nt, Human
aggcuucaauuuauugca

SEQ ID NO: 3568630 - RNA, 12 nt, Human
aggcuucacccu

SEQ ID NO: 3568631 - RNA, 14 nt, Human
aggcuuccagagag

SEQ ID NO: 3568632 - RNA, 21 nt, Human
aggcuuccugcaauuuucuaa

SEQ ID NO: 3568633 - RNA, 20 nt, Human
aggcuuccugcguccuccuc

SEQ ID NO: 3568634 - RNA, 19 nt, Human
aggcuuccuucauuuccuc

SEQ ID NO: 3568635 - RNA, 13 nt, Human
aggcuuccuuggc

SEQ ID NO: 3568636 - RNA, 14 nt, Human
aggcuucuccgcca

SEQ ID NO: 3568637 - RNA, 18 nt, Human
aggcuucuccgccagccu

SEQ ID NO: 3568638 - RNA, 22 nt, Human
aggcuucuccgccagccuccuc

SEQ ID NO: 3568639 - RNA, 23 nt, Human
aggcuucuccgccagccuccucu

SEQ ID NO: 3568640 - RNA, 14 nt, Human
aggcuucucucuca

SEQ ID NO: 3568641 - RNA, 16 nt, Human
aggcuucucucucacc

SEQ ID NO: 3568642 - RNA, 18 nt, Human
aggcuucucucucaccag

SEQ ID NO: 3568643 - RNA, 18 nt, Human
aggcuucugcuggggccu

SEQ ID NO: 3568644 - RNA, 22 nt, Human
aggcuucuucagaucagugcuu

SEQ ID NO: 3568645 - RNA, 19 nt, Human
aggcuugcugagaggggcu

SEQ ID NO: 3568646 - RNA, 22 nt, Human
aggcuugggaccgccagauggg

SEQ ID NO: 3568647 - RNA, 12 nt, Human
aggcuuucagcu

SEQ ID NO: 3568648 - RNA, 20 nt, Human
aggcuuugugauagugacau

SEQ ID NO: 3568649 - RNA, 16 nt, Human
aggcuuuguguuguaa

SEQ ID NO: 3568650 - RNA, 18 nt, Human
aggcuuuuuuaucaugug

SEQ ID NO: 3568651 - RNA, 13 nt, Human
agggaaaaauaua

SEQ ID NO: 3568652 - RNA, 14 nt, Human
agggaaaaauauau

SEQ ID NO: 3568653 - RNA, 15 nt, Human
agggaaaacauucca

SEQ ID NO: 3568654 - RNA, 18 nt, Human
agggaaaacauuccaucc

SEQ ID NO: 3568655 - RNA, 14 nt, Human
agggaaaagggaag

SEQ ID NO: 3568656 - RNA, 20 nt, Human
agggaaaauaggcaggaagc

SEQ ID NO: 3568657 - RNA, 22 nt, Human
agggaaacuaagauucuuuuaa

SEQ ID NO: 3568658 - RNA, 23 nt, Human
agggaaacugccagcaacgcagg

SEQ ID NO: 3568659 - RNA, 23 nt, Human
agggaaagaaaguugcacggcug

SEQ ID NO: 3568660 - RNA, 16 nt, Human
agggaaagcauuuaaa

SEQ ID NO: 3568661 - RNA, 13 nt, Human
agggaaagcccau

SEQ ID NO: 3568662 - RNA, 22 nt, Human
agggaaagcccauaugcuacca

SEQ ID NO: 3568663 - RNA, 18 nt, Human
agggaaaggauauuuucu

SEQ ID NO: 3568664 - RNA, 13 nt, Human
agggaaaggccag

SEQ ID NO: 3568665 - RNA, 19 nt, Human
agggaaaggggugcuuuua

SEQ ID NO: 3568666 - RNA, 15 nt, Human
agggaaaguuuuuuu

SEQ ID NO: 3568667 - RNA, 23 nt, Human
agggaaauagcuaauaauguuaa

SEQ ID NO: 3568668 - RNA, 15 nt, Human
agggaaauaucauuu

SEQ ID NO: 3568669 - RNA, 16 nt, Human
agggaaaugaucaguu

SEQ ID NO: 3568670 - RNA, 13 nt, Human
agggaaauguuuu

SEQ ID NO: 3568671 - RNA, 17 nt, Human
agggaaauguuuuguaa

SEQ ID NO: 3568672 - RNA, 18 nt, Human
agggaaauguuuuguaaa

SEQ ID NO: 3568673 - RNA, 13 nt, Human
agggaaauuucag

SEQ ID NO: 3568674 - RNA, 21 nt, Human
agggaacaauuuggcaauuuu

SEQ ID NO: 3568675 - RNA, 18 nt, Human
agggaacagacaggagaa

SEQ ID NO: 3568676 - RNA, 22 nt, Human
agggaaccguuauuauaauugu

SEQ ID NO: 3568677 - RNA, 15 nt, Human
agggaacucuggggu

SEQ ID NO: 3568678 - RNA, 12 nt, Human
agggaagaaacu

SEQ ID NO: 3568679 - RNA, 15 nt, Human
agggaagagaaagug

SEQ ID NO: 3568680 - RNA, 14 nt, Human
agggaagagacagc

SEQ ID NO: 3568681 - RNA, 13 nt, Human
agggaagagugga

SEQ ID NO: 3568682 - RNA, 16 nt, Human
agggaagaucuaacau

SEQ ID NO: 3568683 - RNA, 12 nt, Human
agggaagcccag

SEQ ID NO: 3568684 - RNA, 24 nt, Human
agggaagcccagcuccagggccag

SEQ ID NO: 3568685 - RNA, 16 nt, Human
agggaagccugaaaaa

SEQ ID NO: 3568686 - RNA, 15 nt, Human
agggaaggacagaaa

SEQ ID NO: 3568687 - RNA, 19 nt, Human
agggaaggaggagccuguc

SEQ ID NO: 3568688 - RNA, 22 nt, Human
agggaaggaucccaugagcucc

SEQ ID NO: 3568689 - RNA, 12 nt, Human
agggaaggcagg

SEQ ID NO: 3568690 - RNA, 18 nt, Human
agggaaggcaggcagggc

SEQ ID NO: 3568691 - RNA, 20 nt, Human
agggaaggcaggcagggcuc

SEQ ID NO: 3568692 - RNA, 17 nt, Human
agggaaggccaccugca

SEQ ID NO: 3568693 - RNA, 16 nt, Human
agggaaggccugacuu

SEQ ID NO: 3568694 - RNA, 13 nt, Human
agggaagggagcc

SEQ ID NO: 3568695 - RNA, 15 nt, Human
agggaagggagccaa

SEQ ID NO: 3568696 - RNA, 19 nt, Human
agggaagggagccaaggga

SEQ ID NO: 3568697 - RNA, 14 nt, Human
agggaagggccugc

SEQ ID NO: 3568698 - RNA, 19 nt, Human
agggaaggggggucagaag

SEQ ID NO: 3568699 - RNA, 16 nt, Human
agggaaguaacaguaa

SEQ ID NO: 3568700 - RNA, 15 nt, Human
agggaaguaguccuu

SEQ ID NO: 3568701 - RNA, 15 nt, Human
agggaaguccccagg

SEQ ID NO: 3568702 - RNA, 20 nt, Human
agggaaguugcuggaaagag

SEQ ID NO: 3568703 - RNA, 15 nt, Human
agggaaucacaucuu

SEQ ID NO: 3568704 - RNA, 16 nt, Human
agggaauccaagccuc

SEQ ID NO: 3568705 - RNA, 18 nt, Human
agggaauccccgaaggug

SEQ ID NO: 3568706 - RNA, 15 nt, Human
agggaauccugaccu

SEQ ID NO: 3568707 - RNA, 22 nt, Human
agggaaucuaauauccccaaau

SEQ ID NO: 3568708 - RNA, 21 nt, Human
agggaaugaaggugucagaau

SEQ ID NO: 3568709 - RNA, 23 nt, Human
agggaaugagacaggaccuagga

SEQ ID NO: 3568710 - RNA, 14 nt, Human
agggaaugccugag

SEQ ID NO: 3568711 - RNA, 22 nt, Human
agggaaugccugagugccuggc

SEQ ID NO: 3568712 - RNA, 13 nt, Human
agggaaugugaaa

SEQ ID NO: 3568713 - RNA, 14 nt, Human
agggaaugugaaau

SEQ ID NO: 3568714 - RNA, 14 nt, Human
agggaauucucuug

SEQ ID NO: 3568715 - RNA, 16 nt, Human
agggaauugcagagua

SEQ ID NO: 3568716 - RNA, 15 nt, Human
agggaauuucaggaa

SEQ ID NO: 3568717 - RNA, 21 nt, Human
agggaauuucuucaacucccu

SEQ ID NO: 3568718 - RNA, 13 nt, Human
agggacaaaacuu

SEQ ID NO: 3568719 - RNA, 13 nt, Human
agggacaaagagg

SEQ ID NO: 3568720 - RNA, 19 nt, Human
agggacaaguggacucagg

SEQ ID NO: 3568721 - RNA, 22 nt, Human
agggacaaguggacucagggca

SEQ ID NO: 3568722 - RNA, 17 nt, Human
agggacacacagccuag

SEQ ID NO: 3568723 - RNA, 18 nt, Human
agggacacacagccuagc

SEQ ID NO: 3568724 - RNA, 19 nt, Human
agggacacacagccuagca

SEQ ID NO: 3568725 - RNA, 20 nt, Human
agggacacgggcagccuggc

SEQ ID NO: 3568726 - RNA, 23 nt, Human
agggacacgggcagccuggcucc

SEQ ID NO: 3568727 - RNA, 16 nt, Human
agggacagaggcccca

SEQ ID NO: 3568728 - RNA, 21 nt, Human
agggacagaggccccagccuc

SEQ ID NO: 3568729 - RNA, 20 nt, Human
agggacagaggggguggccu

SEQ ID NO: 3568730 - RNA, 13 nt, Human
agggacauauuca

SEQ ID NO: 3568731 - RNA, 14 nt, Human
agggacaugcuuag

SEQ ID NO: 3568732 - RNA, 19 nt, Human
agggacaugcuuagcaguc

SEQ ID NO: 3568733 - RNA, 14 nt, Human
agggacauguggaa

SEQ ID NO: 3568734 - RNA, 16 nt, Human
agggaccaacugggcc

SEQ ID NO: 3568735 - RNA, 17 nt, Human
agggaccaacugggccc

SEQ ID NO: 3568736 - RNA, 19 nt, Human
agggaccaaggaccccuca

SEQ ID NO: 3568737 - RNA, 11 nt, Human
agggaccagaa

SEQ ID NO: 3568738 - RNA, 15 nt, Human
agggaccagccaaga

SEQ ID NO: 3568739 - RNA, 20 nt, Human
agggaccagccaagagggcu

SEQ ID NO: 3568740 - RNA, 15 nt, Human
agggaccccuccucc

SEQ ID NO: 3568741 - RNA, 15 nt, Human
agggaccccugcccu

SEQ ID NO: 3568742 - RNA, 23 nt, Human
agggaccccugcccuugucccac

SEQ ID NO: 3568743 - RNA, 16 nt, Human
agggacccuuuggggg

SEQ ID NO: 3568744 - RNA, 14 nt, Human
agggaccggcggac

SEQ ID NO: 3568745 - RNA, 15 nt, Human
agggaccucucccag

SEQ ID NO: 3568746 - RNA, 12 nt, Human
agggaccugggg

SEQ ID NO: 3568747 - RNA, 15 nt, Human
agggacgccuggggg

SEQ ID NO: 3568748 - RNA, 18 nt, Human
agggacgccugggggugc

SEQ ID NO: 3568749 - RNA, 17 nt, Human
agggacgcuuugucugu

SEQ ID NO: 3568750 - RNA, 19 nt, Human
agggacuacccauagacau

SEQ ID NO: 3568751 - RNA, 22 nt, Human
agggacuacccauagacaugaa

SEQ ID NO: 3568752 - RNA, 17 nt, Human
agggacuaggagcacug

SEQ ID NO: 3568753 - RNA, 18 nt, Human
agggacucaucuuucccu

SEQ ID NO: 3568754 - RNA, 14 nt, Human
agggacugagaaau

SEQ ID NO: 3568755 - RNA, 17 nt, Human
agggacugagaaauuua

SEQ ID NO: 3568756 - RNA, 16 nt, Human
agggacuugaaguugu

SEQ ID NO: 3568757 - RNA, 19 nt, Human
agggacuuggaagcuccgc

SEQ ID NO: 3568758 - RNA, 16 nt, Human
agggagaagaaaggug

SEQ ID NO: 3568759 - RNA, 21 nt, Human
agggagaccuggacacaggcc

SEQ ID NO: 3568760 - RNA, 21 nt, Human
agggagacuggguaggaaaga

SEQ ID NO: 3568761 - RNA, 13 nt, Human
agggagagaagau

SEQ ID NO: 3568762 - RNA, 14 nt, Human
agggagagaagaua

SEQ ID NO: 3568763 - RNA, 11 nt, Human
agggagagaga

SEQ ID NO: 3568764 - RNA, 13 nt, Human
agggagagagaga

SEQ ID NO: 3568765 - RNA, 14 nt, Human
agggagagcccagg

SEQ ID NO: 3568766 - RNA, 13 nt, Human
agggagaggagug

SEQ ID NO: 3568767 - RNA, 12 nt, Human
agggagaggccg

SEQ ID NO: 3568768 - RNA, 14 nt, Human
agggagagggaggu

SEQ ID NO: 3568769 - RNA, 21 nt, Human
agggagcaaguccuucccuuu

SEQ ID NO: 3568770 - RNA, 22 nt, Human
agggagcacaacccccagcucc

SEQ ID NO: 3568771 - RNA, 14 nt, Human
agggagcagacagg

SEQ ID NO: 3568772 - RNA, 17 nt, Human
agggagcagacaggagg

SEQ ID NO: 3568773 - RNA, 23 nt, Human
agggagcagagaaggccaggggc

SEQ ID NO: 3568774 - RNA, 17 nt, Human
agggagcauagaaggca

SEQ ID NO: 3568775 - RNA, 19 nt, Human
agggagcauagaaggcagg

SEQ ID NO: 3568776 - RNA, 18 nt, Human
agggagcaucagugcccu

SEQ ID NO: 3568777 - RNA, 14 nt, Human
agggagcauggcug

SEQ ID NO: 3568778 - RNA, 13 nt, Human
agggagccaaggg

SEQ ID NO: 3568779 - RNA, 11 nt, Human
agggagccucc

SEQ ID NO: 3568780 - RNA, 14 nt, Human
agggagccuccugc

SEQ ID NO: 3568781 - RNA, 14 nt, Human
agggagccuggccc

SEQ ID NO: 3568782 - RNA, 18 nt, Human
agggagccuuugguucug

SEQ ID NO: 3568783 - RNA, 17 nt, Human
agggagcggaaagcagc

SEQ ID NO: 3568784 - RNA, 15 nt, Human
agggagcugcagggg

SEQ ID NO: 3568785 - RNA, 13 nt, Human
agggagcugggac

SEQ ID NO: 3568786 - RNA, 15 nt, Human
agggagcugggcccg

SEQ ID NO: 3568787 - RNA, 19 nt, Human
agggaggaaaguuucuuug

SEQ ID NO: 3568788 - RNA, 15 nt, Human
agggaggaagaagcu

SEQ ID NO: 3568789 - RNA, 18 nt, Human
agggaggaccacaggugu

SEQ ID NO: 3568790 - RNA, 22 nt, Human
agggaggaccagggcagggcca

SEQ ID NO: 3568791 - RNA, 13 nt, Human
agggaggaccugg

SEQ ID NO: 3568792 - RNA, 22 nt, Human
agggaggacgcucucuggccuu

SEQ ID NO: 3568793 - RNA, 16 nt, Human
agggaggaggccaccu

SEQ ID NO: 3568794 - RNA, 20 nt, Human
agggaggaggccaccucucc

SEQ ID NO: 3568795 - RNA, 14 nt, Human
agggaggcaagccc

SEQ ID NO: 3568796 - RNA, 14 nt, Human
agggaggccgaagc

SEQ ID NO: 3568797 - RNA, 20 nt, Human
agggaggcgggggcugcccu

SEQ ID NO: 3568798 - RNA, 12 nt, Human
agggagggcaga

SEQ ID NO: 3568799 - RNA, 18 nt, Human
agggagggcagagcuggu

SEQ ID NO: 3568800 - RNA, 15 nt, Human
agggagggccugggc

SEQ ID NO: 3568801 - RNA, 18 nt, Human
agggagggcucugaggcg

SEQ ID NO: 3568802 - RNA, 18 nt, Human
agggaggggccggcccug

SEQ ID NO: 3568803 - RNA, 19 nt, Human
agggaggggccggcccugu

SEQ ID NO: 3568804 - RNA, 15 nt, Human
agggaggggccuagg

SEQ ID NO: 3568805 - RNA, 19 nt, Human
agggaggggccuaggccuc

SEQ ID NO: 3568806 - RNA, 20 nt, Human
agggaggggccuaggccuca

SEQ ID NO: 3568807 - RNA, 18 nt, Human
agggaggucaggcccugg

SEQ ID NO: 3568808 - RNA, 22 nt, Human
agggaggucaggcccuggaacu

SEQ ID NO: 3568809 - RNA, 21 nt, Human
agggagguggggaugagaaga

SEQ ID NO: 3568810 - RNA, 20 nt, Human
agggagguguuuaaagagag

SEQ ID NO: 3568811 - RNA, 15 nt, Human
agggaguccccuccc

SEQ ID NO: 3568812 - RNA, 18 nt, Human
agggagucugccagggcc

SEQ ID NO: 3568813 - RNA, 15 nt, Human
agggagugcuggcuc

SEQ ID NO: 3568814 - RNA, 17 nt, Human
agggaguguucccuauc

SEQ ID NO: 3568815 - RNA, 20 nt, Human
agggauaaagaaaaaaauac

SEQ ID NO: 3568816 - RNA, 16 nt, Human
agggauacaugcucuu

SEQ ID NO: 3568817 - RNA, 16 nt, Human
agggauagaggggggc

SEQ ID NO: 3568818 - RNA, 19 nt, Human
agggauaguacuaagcauu

SEQ ID NO: 3568819 - RNA, 14 nt, Human
agggaucacagggc

SEQ ID NO: 3568820 - RNA, 22 nt, Human
agggaucccucaucugucccuc

SEQ ID NO: 3568821 - RNA, 20 nt, Human
agggaucuugcauucccagu

SEQ ID NO: 3568822 - RNA, 19 nt, Human
agggaugagcauggagcug

SEQ ID NO: 3568823 - RNA, 14 nt, Human
agggaugaggcaac

SEQ ID NO: 3568824 - RNA, 23 nt, Human
agggaugaggugcugggagggau

SEQ ID NO: 3568825 - RNA, 18 nt, Human
agggaugaugccacacca

SEQ ID NO: 3568826 - RNA, 18 nt, Human
agggaugcaggcuccccu

SEQ ID NO: 3568827 - RNA, 20 nt, Human
agggaugcaggcuccccuga

SEQ ID NO: 3568828 - RNA, 15 nt, Human
agggaugcccuggag

SEQ ID NO: 3568829 - RNA, 16 nt, Human
agggaugcugccugag

SEQ ID NO: 3568830 - RNA, 17 nt, Human
agggaugcugccugagu

SEQ ID NO: 3568831 - RNA, 18 nt, Human
agggaugcugccugaguc

SEQ ID NO: 3568832 - RNA, 16 nt, Human
agggauggacaucuug

SEQ ID NO: 3568833 - RNA, 18 nt, Human
agggauggacugaugcuu

SEQ ID NO: 3568834 - RNA, 16 nt, Human
agggauggaggaagaa

SEQ ID NO: 3568835 - RNA, 13 nt, Human
agggauggcgggu

SEQ ID NO: 3568836 - RNA, 18 nt, Human
agggauggcggguggggg

SEQ ID NO: 3568837 - RNA, 16 nt, Human
agggaugggccuggca

SEQ ID NO: 3568838 - RNA, 17 nt, Human
agggaugggccuggcau

SEQ ID NO: 3568839 - RNA, 22 nt, Human
agggaugggccuggcauucuug

SEQ ID NO: 3568840 - RNA, 13 nt, Human
agggauggugccc

SEQ ID NO: 3568841 - RNA, 22 nt, Human
agggaugugaauugccugcaga

SEQ ID NO: 3568842 - RNA, 19 nt, Human
agggauuaaccucugcacu

SEQ ID NO: 3568843 - RNA, 19 nt, Human
agggauuacccaagcaaaa

SEQ ID NO: 3568844 - RNA, 15 nt, Human
agggauuagggagag

SEQ ID NO: 3568845 - RNA, 18 nt, Human
agggauucacaucugcau

SEQ ID NO: 3568846 - RNA, 19 nt, Human
agggauucaggcugcuugg

SEQ ID NO: 3568847 - RNA, 16 nt, Human
agggauucucacaaua

SEQ ID NO: 3568848 - RNA, 20 nt, Human
agggauucugguuccagggu

SEQ ID NO: 3568849 - RNA, 14 nt, Human
agggauugauuuua

SEQ ID NO: 3568850 - RNA, 14 nt, Human
agggauuucuuagg

SEQ ID NO: 3568851 - RNA, 13 nt, Human
agggauuucuuug

SEQ ID NO: 3568852 - RNA, 22 nt, Human
agggauuuucagcccucagaau

SEQ ID NO: 3568853 - RNA, 14 nt, Human
agggcaaagccagg

SEQ ID NO: 3568854 - RNA, 21 nt, Human
agggcaaagccaggucccucu

SEQ ID NO: 3568855 - RNA, 22 nt, Human
agggcaacaauacaugcugcua

SEQ ID NO: 3568856 - RNA, 13 nt, Human
agggcaagggcca

SEQ ID NO: 3568857 - RNA, 20 nt, Human
agggcaaggguuaaggccug

SEQ ID NO: 3568858 - RNA, 22 nt, Human
agggcaauuaauuccuucagca

SEQ ID NO: 3568859 - RNA, 17 nt, Human
agggcaauuggaacaaa

SEQ ID NO: 3568860 - RNA, 22 nt, Human
agggcacagaaaauggaagaca

SEQ ID NO: 3568861 - RNA, 13 nt, Human
agggcacaggagc

SEQ ID NO: 3568862 - RNA, 19 nt, Human
agggcacaggagcuaccug

SEQ ID NO: 3568863 - RNA, 22 nt, Human
agggcacaggagcuaccugugu

SEQ ID NO: 3568864 - RNA, 23 nt, Human
agggcacaggagcuaccugugug

SEQ ID NO: 3568865 - RNA, 21 nt, Human
agggcacauuccuugccugca

SEQ ID NO: 3568866 - RNA, 21 nt, Human
agggcacccuguggcccuggc

SEQ ID NO: 3568867 - RNA, 16 nt, Human
agggcacugcugcugc

SEQ ID NO: 3568868 - RNA, 13 nt, Human
agggcacuggagc

SEQ ID NO: 3568869 - RNA, 15 nt, Human
agggcagaacacuaa

SEQ ID NO: 3568870 - RNA, 14 nt, Human
agggcagaaugaau

SEQ ID NO: 3568871 - RNA, 15 nt, Human
agggcagagccggga

SEQ ID NO: 3568872 - RNA, 14 nt, Human
agggcagagcuggu

SEQ ID NO: 3568873 - RNA, 15 nt, Human
agggcagcagaaggg

SEQ ID NO: 3568874 - RNA, 21 nt, Human
agggcagcagaaggggguggu

SEQ ID NO: 3568875 - RNA, 12 nt, Human
agggcagcagcc

SEQ ID NO: 3568876 - RNA, 13 nt, Human
agggcagcagcca

SEQ ID NO: 3568877 - RNA, 15 nt, Human
agggcagcagccagc

SEQ ID NO: 3568878 - RNA, 16 nt, Human
agggcagcagccagcc

SEQ ID NO: 3568879 - RNA, 20 nt, Human
agggcagcagccagcccugc

SEQ ID NO: 3568880 - RNA, 21 nt, Human
agggcagcagccagcccugcc

SEQ ID NO: 3568881 - RNA, 22 nt, Human
agggcagcagccagcccugccu

SEQ ID NO: 3568882 - RNA, 21 nt, Human
agggcagccagggagagccca

SEQ ID NO: 3568883 - RNA, 13 nt, Human
agggcagccccac

SEQ ID NO: 3568884 - RNA, 18 nt, Human
agggcagccugccuggag

SEQ ID NO: 3568885 - RNA, 16 nt, Human
agggcagcgccaggcu

SEQ ID NO: 3568886 - RNA, 13 nt, Human
agggcagcugcua

SEQ ID NO: 3568887 - RNA, 14 nt, Human
agggcagcugggcc

SEQ ID NO: 3568888 - RNA, 16 nt, Human
agggcagcugggccca

SEQ ID NO: 3568889 - RNA, 13 nt, Human
agggcagcuugcc

SEQ ID NO: 3568890 - RNA, 18 nt, Human
agggcagcuugccccggc

SEQ ID NO: 3568891 - RNA, 16 nt, Human
agggcagcuuugcuca

SEQ ID NO: 3568892 - RNA, 12 nt, Human
agggcaggacca

SEQ ID NO: 3568893 - RNA, 17 nt, Human
agggcaggaccagccca

SEQ ID NO: 3568894 - RNA, 17 nt, Human
agggcagggacaggaua

SEQ ID NO: 3568895 - RNA, 18 nt, Human
agggcagggacagggccg

SEQ ID NO: 3568896 - RNA, 17 nt, Human
agggcagggccccaggc

SEQ ID NO: 3568897 - RNA, 16 nt, Human
agggcagggggccccu

SEQ ID NO: 3568898 - RNA, 11 nt, Human
agggcaggugg

SEQ ID NO: 3568899 - RNA, 20 nt, Human
agggcagucgauagagcugu

SEQ ID NO: 3568900 - RNA, 16 nt, Human
agggcagugcaaggag

SEQ ID NO: 3568901 - RNA, 21 nt, Human
agggcagugcuagugagcugg

SEQ ID NO: 3568902 - RNA, 17 nt, Human
agggcaguguuuccuuu

SEQ ID NO: 3568903 - RNA, 16 nt, Human
agggcaguucgcagcc

SEQ ID NO: 3568904 - RNA, 17 nt, Human
agggcaguucgcagcca

SEQ ID NO: 3568905 - RNA, 21 nt, Human
agggcaguucgcagccacccu

SEQ ID NO: 3568906 - RNA, 15 nt, Human
agggcauaaaacagc

SEQ ID NO: 3568907 - RNA, 15 nt, Human
agggcaucuccagga

SEQ ID NO: 3568908 - RNA, 16 nt, Human
agggcaucuccaggaa

SEQ ID NO: 3568909 - RNA, 16 nt, Human
agggcaucuccugugc

SEQ ID NO: 3568910 - RNA, 21 nt, Human
agggcaucuccugugcauggg

SEQ ID NO: 3568911 - RNA, 16 nt, Human
agggcaucucugggcu

SEQ ID NO: 3568912 - RNA, 18 nt, Human
agggcaucucugggcugg

SEQ ID NO: 3568913 - RNA, 22 nt, Human
agggcaugccccggccaccucu

SEQ ID NO: 3568914 - RNA, 15 nt, Human
agggcaugccuugug

SEQ ID NO: 3568915 - RNA, 16 nt, Human
agggcaugccuugugc

SEQ ID NO: 3568916 - RNA, 17 nt, Human
agggcaugcgcacaagg

SEQ ID NO: 3568917 - RNA, 16 nt, Human
agggcauucaaauggg

SEQ ID NO: 3568918 - RNA, 22 nt, Human
agggcauuugagaaaugcauau

SEQ ID NO: 3568919 - RNA, 19 nt, Human
agggccaaacgcugagcca

SEQ ID NO: 3568920 - RNA, 23 nt, Human
agggccaaacgcugagccaccug

SEQ ID NO: 3568921 - RNA, 23 nt, Human
agggccaaagaaccaaagaagaa

SEQ ID NO: 3568922 - RNA, 15 nt, Human
agggccaacccuucu

SEQ ID NO: 3568923 - RNA, 16 nt, Human
agggccaacccuucuc

SEQ ID NO: 3568924 - RNA, 23 nt, Human
agggccaacuugagggcccagag

SEQ ID NO: 3568925 - RNA, 16 nt, Human
agggccaagucccacc

SEQ ID NO: 3568926 - RNA, 16 nt, Human
agggccaauccccagc

SEQ ID NO: 3568927 - RNA, 17 nt, Human
agggccacgcuccagcu

SEQ ID NO: 3568928 - RNA, 20 nt, Human
agggccacgcuccagcugcc

SEQ ID NO: 3568929 - RNA, 15 nt, Human
agggccacucugccu

SEQ ID NO: 3568930 - RNA, 12 nt, Human
agggccagagcc

SEQ ID NO: 3568931 - RNA, 13 nt, Human
agggccagagcca

SEQ ID NO: 3568932 - RNA, 15 nt, Human
agggccaggagaugg

SEQ ID NO: 3568933 - RNA, 19 nt, Human
agggccagggcccugcaga

SEQ ID NO: 3568934 - RNA, 21 nt, Human
agggccaggggucucccugga

SEQ ID NO: 3568935 - RNA, 16 nt, Human
agggccaguccugccu

SEQ ID NO: 3568936 - RNA, 18 nt, Human
agggccaguccugccugg

SEQ ID NO: 3568937 - RNA, 19 nt, Human
agggccaguccugccuggc

SEQ ID NO: 3568938 - RNA, 23 nt, Human
agggccaguccugccuggccagg

SEQ ID NO: 3568939 - RNA, 15 nt, Human
agggccagucugggc

SEQ ID NO: 3568940 - RNA, 15 nt, Human
agggccaguggggcc

SEQ ID NO: 3568941 - RNA, 22 nt, Human
agggccaugcugaggccugggc

SEQ ID NO: 3568942 - RNA, 14 nt, Human
agggccauggcuca

SEQ ID NO: 3568943 - RNA, 16 nt, Human
agggccauggcucagg

SEQ ID NO: 3568944 - RNA, 11 nt, Human
agggcccagag

SEQ ID NO: 3568945 - RNA, 14 nt, Human
agggcccagagagg

SEQ ID NO: 3568946 - RNA, 12 nt, Human
agggcccagagc

SEQ ID NO: 3568947 - RNA, 17 nt, Human
agggcccagagcaggaa

SEQ ID NO: 3568948 - RNA, 13 nt, Human
agggcccagagcc

SEQ ID NO: 3568949 - RNA, 12 nt, Human
agggcccaggag

SEQ ID NO: 3568950 - RNA, 15 nt, Human
agggcccaggcaggc

SEQ ID NO: 3568951 - RNA, 16 nt, Human
agggcccaugggaggg

SEQ ID NO: 3568952 - RNA, 19 nt, Human
agggcccaugggagggagc

SEQ ID NO: 3568953 - RNA, 18 nt, Human
agggccccagaaggcagg

SEQ ID NO: 3568954 - RNA, 12 nt, Human
agggccccagca

SEQ ID NO: 3568955 - RNA, 13 nt, Human
agggccccucucc

SEQ ID NO: 3568956 - RNA, 18 nt, Human
agggccccucuccccagg

SEQ ID NO: 3568957 - RNA, 13 nt, Human
agggccccucugc

SEQ ID NO: 3568958 - RNA, 18 nt, Human
agggccccucugcccagc

SEQ ID NO: 3568959 - RNA, 13 nt, Human
agggcccugcaga

SEQ ID NO: 3568960 - RNA, 12 nt, Human
agggcccuggag

SEQ ID NO: 3568961 - RNA, 23 nt, Human
agggccgccagggagaccuggac

SEQ ID NO: 3568962 - RNA, 19 nt, Human
agggccgcccgggcccaga

SEQ ID NO: 3568963 - RNA, 20 nt, Human
agggccgggcagaggggcag

SEQ ID NO: 3568964 - RNA, 19 nt, Human
agggccggggaacuggcca

SEQ ID NO: 3568965 - RNA, 22 nt, Human
agggccggggaacuggccaagc

SEQ ID NO: 3568966 - RNA, 16 nt, Human
agggccguaccccacc

SEQ ID NO: 3568967 - RNA, 15 nt, Human
agggccuagcugcua

SEQ ID NO: 3568968 - RNA, 18 nt, Human
agggccuagcugcuacaa

SEQ ID NO: 3568969 - RNA, 21 nt, Human
agggccuagcugcuacaaaga

SEQ ID NO: 3568970 - RNA, 15 nt, Human
agggccugagccugg

SEQ ID NO: 3568971 - RNA, 18 nt, Human
agggccugagccuggcca

SEQ ID NO: 3568972 - RNA, 14 nt, Human
agggccugcaaggg

SEQ ID NO: 3568973 - RNA, 17 nt, Human
agggccugccuggcccc

SEQ ID NO: 3568974 - RNA, 12 nt, Human
agggccugcugg

SEQ ID NO: 3568975 - RNA, 14 nt, Human
agggccugcuggag

SEQ ID NO: 3568976 - RNA, 17 nt, Human
agggccugcuggaggcc

SEQ ID NO: 3568977 - RNA, 19 nt, Human
agggccuggaagacagaga

SEQ ID NO: 3568978 - RNA, 14 nt, Human
agggccuggcccau

SEQ ID NO: 3568979 - RNA, 13 nt, Human
agggccugggccu

SEQ ID NO: 3568980 - RNA, 17 nt, Human
agggccugggccuggcu

SEQ ID NO: 3568981 - RNA, 21 nt, Human
agggccugggccuggcucccu

SEQ ID NO: 3568982 - RNA, 17 nt, Human
agggccuggggccugag

SEQ ID NO: 3568983 - RNA, 18 nt, Human
agggccuggggccugaga

SEQ ID NO: 3568984 - RNA, 20 nt, Human
agggccuggggccugagaga

SEQ ID NO: 3568985 - RNA, 12 nt, Human
agggccugguug

SEQ ID NO: 3568986 - RNA, 12 nt, Human
agggccuguggg

SEQ ID NO: 3568987 - RNA, 18 nt, Human
agggccuuaaaagccauc

SEQ ID NO: 3568988 - RNA, 16 nt, Human
agggccuugcccagag

SEQ ID NO: 3568989 - RNA, 18 nt, Human
agggccuugcccagagau

SEQ ID NO: 3568990 - RNA, 19 nt, Human
agggccuugcccagagaug

SEQ ID NO: 3568991 - RNA, 20 nt, Human
agggcgaacgacaauagcuu

SEQ ID NO: 3568992 - RNA, 13 nt, Human
agggcgagacucc

SEQ ID NO: 3568993 - RNA, 19 nt, Human
agggcgagacucugucuca

SEQ ID NO: 3568994 - RNA, 23 nt, Human
agggcgaggggaggguggcaggu

SEQ ID NO: 3568995 - RNA, 13 nt, Human
agggcgcaggccg

SEQ ID NO: 3568996 - RNA, 23 nt, Human
agggcggcaggggccuggagauc

SEQ ID NO: 3568997 - RNA, 17 nt, Human
agggcggccuccuucug

SEQ ID NO: 3568998 - RNA, 19 nt, Human
agggcgggaggauguucug

SEQ ID NO: 3568999 - RNA, 23 nt, Human
agggcggggugucugucuuccuu

SEQ ID NO: 3569000 - RNA, 15 nt, Human
agggcgugacucacc

SEQ ID NO: 3569001 - RNA, 17 nt, Human
agggcgugacucaccca

SEQ ID NO: 3569002 - RNA, 19 nt, Human
agggcgugacucacccaag

SEQ ID NO: 3569003 - RNA, 13 nt, Human
agggcguggaggg

SEQ ID NO: 3569004 - RNA, 14 nt, Human
agggcgugggagcg

SEQ ID NO: 3569005 - RNA, 20 nt, Human
agggcguucuuaggcugcug

SEQ ID NO: 3569006 - RNA, 14 nt, Human
agggcuaagagcua

SEQ ID NO: 3569007 - RNA, 22 nt, Human
agggcuaagagcuagcgcugcc

SEQ ID NO: 3569008 - RNA, 22 nt, Human
agggcuacccugagcugaggca

SEQ ID NO: 3569009 - RNA, 23 nt, Human
agggcuacccugagcugaggcag

SEQ ID NO: 3569010 - RNA, 22 nt, Human
agggcuagaaccuggaagggcu

SEQ ID NO: 3569011 - RNA, 18 nt, Human
agggcuagaaccuggagg

SEQ ID NO: 3569012 - RNA, 16 nt, Human
agggcuaggaauauag

SEQ ID NO: 3569013 - RNA, 21 nt, Human
agggcuaggaauauagauuaa

SEQ ID NO: 3569014 - RNA, 14 nt, Human
agggcucagccugg

SEQ ID NO: 3569015 - RNA, 23 nt, Human
agggcucaggauuucgugggucu

SEQ ID NO: 3569016 - RNA, 24 nt, Human
agggcucaggauuucgugggucug

SEQ ID NO: 3569017 - RNA, 15 nt, Human
agggcuccagccccu

SEQ ID NO: 3569018 - RNA, 23 nt, Human
agggcuccagccccucuuggaga

SEQ ID NO: 3569019 - RNA, 17 nt, Human
agggcuccucccagcuu

SEQ ID NO: 3569020 - RNA, 12 nt, Human
agggcuccugcc

SEQ ID NO: 3569021 - RNA, 19 nt, Human
agggcuccuugugggccug

SEQ ID NO: 3569022 - RNA, 20 nt, Human
agggcuccuugugggccugg

SEQ ID NO: 3569023 - RNA, 23 nt, Human
agggcucuaaaaaaagccccaaa

SEQ ID NO: 3569024 - RNA, 12 nt, Human
agggcucuccug

SEQ ID NO: 3569025 - RNA, 14 nt, Human
agggcucuccuggc

SEQ ID NO: 3569026 - RNA, 14 nt, Human
agggcucugaggcg

SEQ ID NO: 3569027 - RNA, 16 nt, Human
agggcucugaggcgcc

SEQ ID NO: 3569028 - RNA, 16 nt, Human
agggcucugccccagu

SEQ ID NO: 3569029 - RNA, 18 nt, Human
agggcucugugcugacau

SEQ ID NO: 3569030 - RNA, 16 nt, Human
agggcugaccugccuc

SEQ ID NO: 3569031 - RNA, 17 nt, Human
agggcugagccuggucc

SEQ ID NO: 3569032 - RNA, 17 nt, Human
agggcugagcucucugu

SEQ ID NO: 3569033 - RNA, 11 nt, Human
agggcugcagu

SEQ ID NO: 3569034 - RNA, 13 nt, Human
agggcugccacca

SEQ ID NO: 3569035 - RNA, 16 nt, Human
agggcugcccugagaa

SEQ ID NO: 3569036 - RNA, 23 nt, Human
agggcugcccugagaagcugcuc

SEQ ID NO: 3569037 - RNA, 12 nt, Human
agggcugcuggg

SEQ ID NO: 3569038 - RNA, 20 nt, Human
agggcugcugggggcaacug

SEQ ID NO: 3569039 - RNA, 22 nt, Human
agggcuggaccuauguccuaag

SEQ ID NO: 3569040 - RNA, 14 nt, Human
agggcuggacugag

SEQ ID NO: 3569041 - RNA, 15 nt, Human
agggcuggacugagg

SEQ ID NO: 3569042 - RNA, 17 nt, Human
agggcuggacugaggcc

SEQ ID NO: 3569043 - RNA, 18 nt, Human
agggcuggaggcccaggc

SEQ ID NO: 3569044 - RNA, 14 nt, Human
agggcuggcccagc

SEQ ID NO: 3569045 - RNA, 15 nt, Human
agggcuggcccagcc

SEQ ID NO: 3569046 - RNA, 16 nt, Human
agggcuggcccagccc

SEQ ID NO: 3569047 - RNA, 18 nt, Human
agggcuggccccagggca

SEQ ID NO: 3569048 - RNA, 22 nt, Human
agggcuggccccagggcacccu

SEQ ID NO: 3569049 - RNA, 20 nt, Human
agggcuggcuggccucaccc

SEQ ID NO: 3569050 - RNA, 16 nt, Human
agggcugggaaacacu

SEQ ID NO: 3569051 - RNA, 18 nt, Human
agggcugggaggaaggac

SEQ ID NO: 3569052 - RNA, 16 nt, Human
agggcuggucucugcu

SEQ ID NO: 3569053 - RNA, 20 nt, Human
agggcuguaacugccaggcu

SEQ ID NO: 3569054 - RNA, 18 nt, Human
agggcugucaucugugca

SEQ ID NO: 3569055 - RNA, 15 nt, Human
agggcugucauugca

SEQ ID NO: 3569056 - RNA, 23 nt, Human
agggcugugcuugaaggcccugc

SEQ ID NO: 3569057 - RNA, 18 nt, Human
agggcuuaccuguacacu

SEQ ID NO: 3569058 - RNA, 23 nt, Human
agggcuuaccuguacacugacuu

SEQ ID NO: 3569059 - RNA, 20 nt, Human
agggcuuccucuagaagcca

SEQ ID NO: 3569060 - RNA, 21 nt, Human
agggcuuccucuagaagccaa

SEQ ID NO: 3569061 - RNA, 22 nt, Human
agggcuuccucuagaagccaag

SEQ ID NO: 3569062 - RNA, 16 nt, Human
agggcuucugcacccu

SEQ ID NO: 3569063 - RNA, 14 nt, Human
agggcuugugaaca

SEQ ID NO: 3569064 - RNA, 14 nt, Human
agggcuuuaaaauu

SEQ ID NO: 3569065 - RNA, 18 nt, Human
agggcuuuaaaauucucu

SEQ ID NO: 3569066 - RNA, 19 nt, Human
agggcuuuaaaauucucuu

SEQ ID NO: 3569067 - RNA, 20 nt, Human
agggcuuuaaaauucucuuc

SEQ ID NO: 3569068 - RNA, 14 nt, Human
agggcuuuucaaaa

SEQ ID NO: 3569069 - RNA, 15 nt, Human
aggggaaaacuguua

SEQ ID NO: 3569070 - RNA, 23 nt, Human
aggggaaaccaguguagccuugc

SEQ ID NO: 3569071 - RNA, 14 nt, Human
aggggaaccugcca

SEQ ID NO: 3569072 - RNA, 15 nt, Human
aggggaagaaugaaa

SEQ ID NO: 3569073 - RNA, 22 nt, Human
aggggaagaguguacugggggu

SEQ ID NO: 3569074 - RNA, 15 nt, Human
aggggaagcugcagc

SEQ ID NO: 3569075 - RNA, 20 nt, Human
aggggaagcugcagcuuggg

SEQ ID NO: 3569076 - RNA, 17 nt, Human
aggggaauaauagaaga

SEQ ID NO: 3569077 - RNA, 15 nt, Human
aggggaaucagaacu

SEQ ID NO: 3569078 - RNA, 13 nt, Human
aggggaauguuug

SEQ ID NO: 3569079 - RNA, 23 nt, Human
aggggacacuucccucuguuucu

SEQ ID NO: 3569080 - RNA, 14 nt, Human
aggggacaggccuc

SEQ ID NO: 3569081 - RNA, 21 nt, Human
aggggacaggccucaccucua

SEQ ID NO: 3569082 - RNA, 14 nt, Human
aggggaccaggagu

SEQ ID NO: 3569083 - RNA, 20 nt, Human
aggggaccaggagugggugg

SEQ ID NO: 3569084 - RNA, 22 nt, Human
aggggaccaggagugggugggg

SEQ ID NO: 3569085 - RNA, 13 nt, Human
aggggacugccac

SEQ ID NO: 3569086 - RNA, 15 nt, Human
aggggacugccaccu

SEQ ID NO: 3569087 - RNA, 16 nt, Human
aggggacugccaccuc

SEQ ID NO: 3569088 - RNA, 14 nt, Human
aggggagacagagc

SEQ ID NO: 3569089 - RNA, 16 nt, Human
aggggagagccugcug

SEQ ID NO: 3569090 - RNA, 17 nt, Human
aggggagagggucugga

SEQ ID NO: 3569091 - RNA, 20 nt, Human
aggggagcagaggggcagag

SEQ ID NO: 3569092 - RNA, 22 nt, Human
aggggagcagaggggcagaggc

SEQ ID NO: 3569093 - RNA, 18 nt, Human
aggggagcaugggaagug

SEQ ID NO: 3569094 - RNA, 16 nt, Human
aggggagccaggaggg

SEQ ID NO: 3569095 - RNA, 24 nt, Human
aggggagcccacuguccugggccu

SEQ ID NO: 3569096 - RNA, 16 nt, Human
aggggagcucugucug

SEQ ID NO: 3569097 - RNA, 14 nt, Human
aggggaggagggcg

SEQ ID NO: 3569098 - RNA, 13 nt, Human
aggggaggcagcc

SEQ ID NO: 3569099 - RNA, 17 nt, Human
aggggaggcaucagugu

SEQ ID NO: 3569100 - RNA, 12 nt, Human
aggggaggccaa

SEQ ID NO: 3569101 - RNA, 12 nt, Human
aggggaguagag

SEQ ID NO: 3569102 - RNA, 18 nt, Human
aggggagucaccuucccu

SEQ ID NO: 3569103 - RNA, 16 nt, Human
aggggauagagagaga

SEQ ID NO: 3569104 - RNA, 14 nt, Human
aggggauauuuaag

SEQ ID NO: 3569105 - RNA, 21 nt, Human
aggggauauuuaagguagcuu

SEQ ID NO: 3569106 - RNA, 19 nt, Human
aggggauggaauucuuccu

SEQ ID NO: 3569107 - RNA, 17 nt, Human
aggggaugguagaccuu

SEQ ID NO: 3569108 - RNA, 17 nt, Human
aggggauugaagcccuc

SEQ ID NO: 3569109 - RNA, 14 nt, Human
aggggcagagccag

SEQ ID NO: 3569110 - RNA, 17 nt, Human
aggggcagagccaggaa

SEQ ID NO: 3569111 - RNA, 14 nt, Human
aggggcagccugcc

SEQ ID NO: 3569112 - RNA, 15 nt, Human
aggggcagcuucuau

SEQ ID NO: 3569113 - RNA, 17 nt, Human
aggggcaggagcucaga

SEQ ID NO: 3569114 - RNA, 19 nt, Human
aggggcaggagcucagaug

SEQ ID NO: 3569115 - RNA, 20 nt, Human
aggggcaggagcucagauga

SEQ ID NO: 3569116 - RNA, 13 nt, Human
aggggcaggagga

SEQ ID NO: 3569117 - RNA, 18 nt, Human
aggggcaggaggaagggg

SEQ ID NO: 3569118 - RNA, 16 nt, Human
aggggcaggcacagca

SEQ ID NO: 3569119 - RNA, 13 nt, Human
aggggcaggcuga

SEQ ID NO: 3569120 - RNA, 15 nt, Human
aggggcaucugcccc

SEQ ID NO: 3569121 - RNA, 20 nt, Human
aggggcaucugccccucccc

SEQ ID NO: 3569122 - RNA, 13 nt, Human
aggggcaugggaa

SEQ ID NO: 3569123 - RNA, 19 nt, Human
aggggcauguauuggccug

SEQ ID NO: 3569124 - RNA, 22 nt, Human
aggggcauguauuggccuggag

SEQ ID NO: 3569125 - RNA, 19 nt, Human
aggggccaauucguucucu

SEQ ID NO: 3569126 - RNA, 13 nt, Human
aggggccagaaga

SEQ ID NO: 3569127 - RNA, 19 nt, Human
aggggccagacccugccca

SEQ ID NO: 3569128 - RNA, 12 nt, Human
aggggccagagg

SEQ ID NO: 3569129 - RNA, 16 nt, Human
aggggccauuuggcau

SEQ ID NO: 3569130 - RNA, 17 nt, Human
aggggcccaaggcggcc

SEQ ID NO: 3569131 - RNA, 21 nt, Human
aggggccccccugcccugugg

SEQ ID NO: 3569132 - RNA, 20 nt, Human
aggggccccguguccugccu

SEQ ID NO: 3569133 - RNA, 16 nt, Human
aggggccccuccagcu

SEQ ID NO: 3569134 - RNA, 13 nt, Human
aggggccccugcu

SEQ ID NO: 3569135 - RNA, 21 nt, Human
aggggcccgagcagaagcagg

SEQ ID NO: 3569136 - RNA, 16 nt, Human
aggggcccgcuugccu

SEQ ID NO: 3569137 - RNA, 17 nt, Human
aggggcccggccagcca

SEQ ID NO: 3569138 - RNA, 21 nt, Human
aggggcccggccagccauguc

SEQ ID NO: 3569139 - RNA, 23 nt, Human
aggggcccggccagccaugucug

SEQ ID NO: 3569140 - RNA, 13 nt, Human
aggggcccuugga

SEQ ID NO: 3569141 - RNA, 18 nt, Human
aggggccgaugcccagag

SEQ ID NO: 3569142 - RNA, 15 nt, Human
aggggccgcugccac

SEQ ID NO: 3569143 - RNA, 17 nt, Human
aggggccgcugccaccc

SEQ ID NO: 3569144 - RNA, 22 nt, Human
aggggccgcugccacccaccuc

SEQ ID NO: 3569145 - RNA, 13 nt, Human
aggggccggcccu

SEQ ID NO: 3569146 - RNA, 17 nt, Human
aggggccggcccugugu

SEQ ID NO: 3569147 - RNA, 16 nt, Human
aggggccuaggccuca

SEQ ID NO: 3569148 - RNA, 16 nt, Human
aggggccuccaugggc

SEQ ID NO: 3569149 - RNA, 20 nt, Human
aggggccucuuaugggcugg

SEQ ID NO: 3569150 - RNA, 15 nt, Human
aggggccugccaccu

SEQ ID NO: 3569151 - RNA, 22 nt, Human
aggggccuggagauccuccugc

SEQ ID NO: 3569152 - RNA, 18 nt, Human
aggggccuggcagccgug

SEQ ID NO: 3569153 - RNA, 21 nt, Human
aggggccuuagggcacugggc

SEQ ID NO: 3569154 - RNA, 15 nt, Human
aggggcgcuggccca

SEQ ID NO: 3569155 - RNA, 18 nt, Human
aggggcggcaggagggag

SEQ ID NO: 3569156 - RNA, 17 nt, Human
aggggcgggaauauugu

SEQ ID NO: 3569157 - RNA, 22 nt, Human
aggggcgucuguucccccuuca

SEQ ID NO: 3569158 - RNA, 17 nt, Human
aggggcguguggcucac

SEQ ID NO: 3569159 - RNA, 18 nt, Human
aggggcuacaagagggaa

SEQ ID NO: 3569160 - RNA, 18 nt, Human
aggggcuccaugccagcc

SEQ ID NO: 3569161 - RNA, 14 nt, Human
aggggcucccuccg

SEQ ID NO: 3569162 - RNA, 15 nt, Human
aggggcucccuccgc

SEQ ID NO: 3569163 - RNA, 17 nt, Human
aggggcucucagcucag

SEQ ID NO: 3569164 - RNA, 13 nt, Human
aggggcugacacu

SEQ ID NO: 3569165 - RNA, 12 nt, Human
aggggcugcccg

SEQ ID NO: 3569166 - RNA, 13 nt, Human
aggggcugcccgc

SEQ ID NO: 3569167 - RNA, 16 nt, Human
aggggcugcccgcucc

SEQ ID NO: 3569168 - RNA, 16 nt, Human
aggggcugcuuccucc

SEQ ID NO: 3569169 - RNA, 16 nt, Human
aggggcuggcuucagg

SEQ ID NO: 3569170 - RNA, 13 nt, Human
aggggcugggaac

SEQ ID NO: 3569171 - RNA, 14 nt, Human
aggggcugggaaca

SEQ ID NO: 3569172 - RNA, 10 nt, Human
aggggcuggu

SEQ ID NO: 3569173 - RNA, 14 nt, Human
aggggcuuccuggu

SEQ ID NO: 3569174 - RNA, 16 nt, Human
aggggcuuccuggugc

SEQ ID NO: 3569175 - RNA, 23 nt, Human
aggggcuugacuuuuucaacuuc

SEQ ID NO: 3569176 - RNA, 14 nt, Human
aggggcuuucugga

SEQ ID NO: 3569177 - RNA, 16 nt, Human
aggggcuuucuggaga

SEQ ID NO: 3569178 - RNA, 17 nt, Human
aggggcuuucuggagag

SEQ ID NO: 3569179 - RNA, 19 nt, Human
agggggaaaaagugucaac

SEQ ID NO: 3569180 - RNA, 15 nt, Human
agggggaaggcaggg

SEQ ID NO: 3569181 - RNA, 20 nt, Human
agggggacugcugcugccug

SEQ ID NO: 3569182 - RNA, 21 nt, Human
agggggacugcugcugccugg

SEQ ID NO: 3569183 - RNA, 22 nt, Human
agggggagccccuucugcucag

SEQ ID NO: 3569184 - RNA, 20 nt, Human
agggggaggggguuacaaac

SEQ ID NO: 3569185 - RNA, 17 nt, Human
agggggauaugaaugga

SEQ ID NO: 3569186 - RNA, 19 nt, Human
agggggccaccuccccagg

SEQ ID NO: 3569187 - RNA, 20 nt, Human
agggggcgccugugguucug

SEQ ID NO: 3569188 - RNA, 16 nt, Human
agggggcuaagacuuc

SEQ ID NO: 3569189 - RNA, 14 nt, Human
agggggcuggagga

SEQ ID NO: 3569190 - RNA, 19 nt, Human
agggggcuugaagccaaag

SEQ ID NO: 3569191 - RNA, 18 nt, Human
agggggcuuucuggggcc

SEQ ID NO: 3569192 - RNA, 13 nt, Human
aggggggagggaa

SEQ ID NO: 3569193 - RNA, 12 nt, Human
aggggggagggg

SEQ ID NO: 3569194 - RNA, 18 nt, Human
agggggggcuacauuaua

SEQ ID NO: 3569195 - RNA, 16 nt, Human
agggggggcucccugg

SEQ ID NO: 3569196 - RNA, 20 nt, Human
agggggguugcaguggagag

SEQ ID NO: 3569197 - RNA, 17 nt, Human
agggggucguggagagc

SEQ ID NO: 3569198 - RNA, 18 nt, Human
agggggucguggagagcu

SEQ ID NO: 3569199 - RNA, 19 nt, Human
agggggucguggagagcua

SEQ ID NO: 3569200 - RNA, 11 nt, Human
agggggucugg

SEQ ID NO: 3569201 - RNA, 15 nt, Human
aggggguggccuccc

SEQ ID NO: 3569202 - RNA, 19 nt, Human
aggggguuacaaacugcaa

SEQ ID NO: 3569203 - RNA, 20 nt, Human
aggggguuacaaacugcaau

SEQ ID NO: 3569204 - RNA, 16 nt, Human
agggguaccacugaau

SEQ ID NO: 3569205 - RNA, 19 nt, Human
agggguaccacugaaucug

SEQ ID NO: 3569206 - RNA, 19 nt, Human
agggguaggcagagccuuu

SEQ ID NO: 3569207 - RNA, 15 nt, Human
agggguaggggcugg

SEQ ID NO: 3569208 - RNA, 21 nt, Human
agggguaucauguauggugau

SEQ ID NO: 3569209 - RNA, 20 nt, Human
agggguccccuccaggagua

SEQ ID NO: 3569210 - RNA, 17 nt, Human
aggggucucccuggagu

SEQ ID NO: 3569211 - RNA, 17 nt, Human
aggggucucccuggcuc

SEQ ID NO: 3569212 - RNA, 19 nt, Human
aggggucucccuggcuccc

SEQ ID NO: 3569213 - RNA, 22 nt, Human
aggggucuugcaaaauuccuga

SEQ ID NO: 3569214 - RNA, 14 nt, Human
aggggugacacaga

SEQ ID NO: 3569215 - RNA, 18 nt, Human
aggggugacacagacuca

SEQ ID NO: 3569216 - RNA, 16 nt, Human
aggggugcccccuccu

SEQ ID NO: 3569217 - RNA, 17 nt, Human
aggggugcccccuccuc

SEQ ID NO: 3569218 - RNA, 21 nt, Human
agggguggaggagagccuggu

SEQ ID NO: 3569219 - RNA, 20 nt, Human
aggggugggacacccuguga

SEQ ID NO: 3569220 - RNA, 22 nt, Human
aggggugggacacccugugaug

SEQ ID NO: 3569221 - RNA, 20 nt, Human
agggguggguuccucuuccc

SEQ ID NO: 3569222 - RNA, 24 nt, Human
aggggugucuugggcagagcuggc

SEQ ID NO: 3569223 - RNA, 20 nt, Human
agggguucccuugagggcug

SEQ ID NO: 3569224 - RNA, 15 nt, Human
agggguucgagacca

SEQ ID NO: 3569225 - RNA, 20 nt, Human
agggguugccacaggccucc

SEQ ID NO: 3569226 - RNA, 21 nt, Human
agggguugccacaggccuccc

SEQ ID NO: 3569227 - RNA, 21 nt, Human
agggguuggggugacagucau

SEQ ID NO: 3569228 - RNA, 23 nt, Human
agggguugguugagguggaagcc

SEQ ID NO: 3569229 - RNA, 19 nt, Human
agggguuugccauuugaua

SEQ ID NO: 3569230 - RNA, 17 nt, Human
agggguuuggucuggga

SEQ ID NO: 3569231 - RNA, 13 nt, Human
aggguaaacaaua

SEQ ID NO: 3569232 - RNA, 14 nt, Human
aggguaaacaauau

SEQ ID NO: 3569233 - RNA, 11 nt, Human
aggguaaauca

SEQ ID NO: 3569234 - RNA, 14 nt, Human
aggguaaauuauuc

SEQ ID NO: 3569235 - RNA, 17 nt, Human
aggguaaauuauucagu

SEQ ID NO: 3569236 - RNA, 15 nt, Human
aggguaaggcugugg

SEQ ID NO: 3569237 - RNA, 12 nt, Human
aggguaaguauu

SEQ ID NO: 3569238 - RNA, 22 nt, Human
aggguaauaaccagacacaaac

SEQ ID NO: 3569239 - RNA, 15 nt, Human
aggguacagcugggc

SEQ ID NO: 3569240 - RNA, 12 nt, Human
aggguacaugug

SEQ ID NO: 3569241 - RNA, 15 nt, Human
aggguagcagguacc

SEQ ID NO: 3569242 - RNA, 14 nt, Human
aggguagcccgccu

SEQ ID NO: 3569243 - RNA, 18 nt, Human
aggguaggcagccugaga

SEQ ID NO: 3569244 - RNA, 15 nt, Human
aggguaggcaggauu

SEQ ID NO: 3569245 - RNA, 16 nt, Human
aggguaggcaggauug

SEQ ID NO: 3569246 - RNA, 17 nt, Human
aggguagucugguuucu

SEQ ID NO: 3569247 - RNA, 18 nt, Human
aggguaucaggugcugcc

SEQ ID NO: 3569248 - RNA, 15 nt, Human
aggguaugaagagug

SEQ ID NO: 3569249 - RNA, 16 nt, Human
aggguaugaagagugu

SEQ ID NO: 3569250 - RNA, 19 nt, Human
agggucagacgccugagga

SEQ ID NO: 3569251 - RNA, 21 nt, Human
agggucagaggaccuguauuu

SEQ ID NO: 3569252 - RNA, 18 nt, Human
agggucagccagggccug

SEQ ID NO: 3569253 - RNA, 19 nt, Human
agggucagccagggccugc

SEQ ID NO: 3569254 - RNA, 18 nt, Human
agggucaggagaggggca

SEQ ID NO: 3569255 - RNA, 16 nt, Human
agggucauguuugcag

SEQ ID NO: 3569256 - RNA, 19 nt, Human
aggguccagaaggagacag

SEQ ID NO: 3569257 - RNA, 12 nt, Human
agggucccaagc

SEQ ID NO: 3569258 - RNA, 18 nt, Human
agggucccaagcugggcc

SEQ ID NO: 3569259 - RNA, 14 nt, Human
agggucccucugug

SEQ ID NO: 3569260 - RNA, 18 nt, Human
agggucccucuguguauu

SEQ ID NO: 3569261 - RNA, 20 nt, Human
agggucccucuguguauuug

SEQ ID NO: 3569262 - RNA, 11 nt, Human
agggucccugg

SEQ ID NO: 3569263 - RNA, 14 nt, Human
agggucccuggugg

SEQ ID NO: 3569264 - RNA, 16 nt, Human
agggucccugguggca

SEQ ID NO: 3569265 - RNA, 17 nt, Human
aggguccugcagccugc

SEQ ID NO: 3569266 - RNA, 13 nt, Human
aggguccugggag

SEQ ID NO: 3569267 - RNA, 22 nt, Human
agucuccuuugcacugagggcc

SEQ ID NO: 3569268 - RNA, 19 nt, Human
agucucgcucuguugccca

SEQ ID NO: 3569269 - RNA, 16 nt, Human
agucucuagguucuga

SEQ ID NO: 3569270 - RNA, 23 nt, Human
agucucuagguucugagcucugg

SEQ ID NO: 3569271 - RNA, 19 nt, Human
agucucuaucauuaaaguu

SEQ ID NO: 3569272 - RNA, 19 nt, Human
agucucucucucucucucc

SEQ ID NO: 3569273 - RNA, 22 nt, Human
agucucucuggggccacacaga

SEQ ID NO: 3569274 - RNA, 15 nt, Human
agucucucuuacccu

SEQ ID NO: 3569275 - RNA, 19 nt, Human
agucucucuuacccuucug

SEQ ID NO: 3569276 - RNA, 14 nt, Human
agucucucuucucu

SEQ ID NO: 3569277 - RNA, 15 nt, Human
agucucucuucucuc

SEQ ID NO: 3569278 - RNA, 18 nt, Human
agucucucuucucuccag

SEQ ID NO: 3569279 - RNA, 23 nt, Human
agucucucuucucuccagcugac

SEQ ID NO: 3569280 - RNA, 16 nt, Human
agucucugagcaguga

SEQ ID NO: 3569281 - RNA, 21 nt, Human
agucucuggggcaggcugcuu

SEQ ID NO: 3569282 - RNA, 12 nt, Human
agucucuucaga

SEQ ID NO: 3569283 - RNA, 15 nt, Human
agucucuucuccacu

SEQ ID NO: 3569284 - RNA, 16 nt, Human
agucucuucuccacug

SEQ ID NO: 3569285 - RNA, 17 nt, Human
agucucuucuccacugg

SEQ ID NO: 3569286 - RNA, 16 nt, Human
agucucuugauucaua

SEQ ID NO: 3569287 - RNA, 22 nt, Human
agucucuuuucuuuagagcauu

SEQ ID NO: 3569288 - RNA, 23 nt, Human
agucucuuuuuuuggcccaggcc

SEQ ID NO: 3569289 - RNA, 14 nt, Human
agucugaagcagau

SEQ ID NO: 3569290 - RNA, 13 nt, Human
agucugaaggcug

SEQ ID NO: 3569291 - RNA, 16 nt, Human
agucugaaugcugcca

SEQ ID NO: 3569292 - RNA, 18 nt, Human
agucugagggcuuguagu

SEQ ID NO: 3569293 - RNA, 15 nt, Human
agucugagguccuga

SEQ ID NO: 3569294 - RNA, 19 nt, Human
agucugagguccugagcac

SEQ ID NO: 3569295 - RNA, 16 nt, Human
agucugaguaaaaucu

SEQ ID NO: 3569296 - RNA, 18 nt, Human
agucugaucgugacgcug

SEQ ID NO: 3569297 - RNA, 20 nt, Human
agucugaucgugacgcugaa

SEQ ID NO: 3569298 - RNA, 22 nt, Human
agucugaucgugacgcugaaua

SEQ ID NO: 3569299 - RNA, 23 nt, Human
agucugaucgugacgcugaauaa

SEQ ID NO: 3569300 - RNA, 19 nt, Human
agucugaugauuucuugaa

SEQ ID NO: 3569301 - RNA, 11 nt, Human
agucugauuua

SEQ ID NO: 3569302 - RNA, 12 nt, Human
agucugauuuaa

SEQ ID NO: 3569303 - RNA, 13 nt, Human
agucugcaaaaug

SEQ ID NO: 3569304 - RNA, 23 nt, Human
agucugcaacuuuaagcagcucu

SEQ ID NO: 3569305 - RNA, 15 nt, Human
agucugcaagauucu

SEQ ID NO: 3569306 - RNA, 12 nt, Human
agucugcauaua

SEQ ID NO: 3569307 - RNA, 11 nt, Human
agucugccagg

SEQ ID NO: 3569308 - RNA, 13 nt, Human
agucugccagggc

SEQ ID NO: 3569309 - RNA, 22 nt, Human
agucugccagggccccucuccc

SEQ ID NO: 3569310 - RNA, 18 nt, Human
agucugcugcccuccauc

SEQ ID NO: 3569311 - RNA, 14 nt, Human
agucugcuucugca

SEQ ID NO: 3569312 - RNA, 22 nt, Human
agucuggaggggcauggccagc

SEQ ID NO: 3569313 - RNA, 16 nt, Human
agucuggagugggcag

SEQ ID NO: 3569314 - RNA, 18 nt, Human
agucuggagugggcagag

SEQ ID NO: 3569315 - RNA, 15 nt, Human
agucuggaucuggga

SEQ ID NO: 3569316 - RNA, 22 nt, Human
agucuggcagacuuucuucucu

SEQ ID NO: 3569317 - RNA, 13 nt, Human
agucuggcccuag

SEQ ID NO: 3569318 - RNA, 18 nt, Human
agucuggcccuuccuuuu

SEQ ID NO: 3569319 - RNA, 14 nt, Human
agucugggacacaa

SEQ ID NO: 3569320 - RNA, 17 nt, Human
agucuggugggaggacg

SEQ ID NO: 3569321 - RNA, 22 nt, Human
agucuguacuaaacaguaagau

SEQ ID NO: 3569322 - RNA, 21 nt, Human
agucuguaucaaacccacgau

SEQ ID NO: 3569323 - RNA, 23 nt, Human
agucugucaugaacauguuccug

SEQ ID NO: 3569324 - RNA, 13 nt, Human
agucuguccugug

SEQ ID NO: 3569325 - RNA, 16 nt, Human
agucuguccugugacg

SEQ ID NO: 3569326 - RNA, 13 nt, Human
agucuguccuuga

SEQ ID NO: 3569327 - RNA, 17 nt, Human
agucugucucaaaagaa

SEQ ID NO: 3569328 - RNA, 15 nt, Human
agucugucuucugua

SEQ ID NO: 3569329 - RNA, 16 nt, Human
agucugucuucuguau

SEQ ID NO: 3569330 - RNA, 21 nt, Human
agucugucuuuccugaaccau

SEQ ID NO: 3569331 - RNA, 18 nt, Human
agucugugagauucauuc

SEQ ID NO: 3569332 - RNA, 14 nt, Human
agucugugccugga

SEQ ID NO: 3569333 - RNA, 17 nt, Human
agucugugccuggagcu

SEQ ID NO: 3569334 - RNA, 23 nt, Human
agucugugccuggagcuccuggg

SEQ ID NO: 3569335 - RNA, 17 nt, Human
agucuguggaucagaga

SEQ ID NO: 3569336 - RNA, 12 nt, Human
agucugugugaa

SEQ ID NO: 3569337 - RNA, 21 nt, Human
agucugugugcugugguuccu

SEQ ID NO: 3569338 - RNA, 23 nt, Human
agucugugugcugugguuccugg

SEQ ID NO: 3569339 - RNA, 17 nt, Human
agucuguuuacugcaag

SEQ ID NO: 3569340 - RNA, 22 nt, Human
agucuuacauaaaccauuuuug

SEQ ID NO: 3569341 - RNA, 16 nt, Human
agucuuacuacagaaa

SEQ ID NO: 3569342 - RNA, 13 nt, Human
agucuuagaucau

SEQ ID NO: 3569343 - RNA, 18 nt, Human
agucuuagaucauaguuu

SEQ ID NO: 3569344 - RNA, 16 nt, Human
agucuuagauguauau

SEQ ID NO: 3569345 - RNA, 23 nt, Human
agucuuagauguauauauuuccu

SEQ ID NO: 3569346 - RNA, 22 nt, Human
agucuuagggauuuauuuucaa

SEQ ID NO: 3569347 - RNA, 16 nt, Human
agucuuaugcuuccag

SEQ ID NO: 3569348 - RNA, 22 nt, Human
agucuucaacauaacccacuug

SEQ ID NO: 3569349 - RNA, 16 nt, Human
agucuucacucucuga

SEQ ID NO: 3569350 - RNA, 16 nt, Human
agucuucaugaaaugc

SEQ ID NO: 3569351 - RNA, 18 nt, Human
agucuucaugaaaugcua

SEQ ID NO: 3569352 - RNA, 15 nt, Human
agucuuccaccugga

SEQ ID NO: 3569353 - RNA, 15 nt, Human
agucuuccauuugca

SEQ ID NO: 3569354 - RNA, 16 nt, Human
agucuuccauuugcaa

SEQ ID NO: 3569355 - RNA, 17 nt, Human
agucuuccauuugcaag

SEQ ID NO: 3569356 - RNA, 19 nt, Human
agucuuccauuugcaaggg

SEQ ID NO: 3569357 - RNA, 17 nt, Human
agucuucccuagggcug

SEQ ID NO: 3569358 - RNA, 20 nt, Human
agucuucccuagggcugggu

SEQ ID NO: 3569359 - RNA, 12 nt, Human
agucuuccugac

SEQ ID NO: 3569360 - RNA, 19 nt, Human
agucuuccugacacuuuaa

SEQ ID NO: 3569361 - RNA, 13 nt, Human
agucuucucauag

SEQ ID NO: 3569362 - RNA, 21 nt, Human
agucuucucauagcauuaacu

SEQ ID NO: 3569363 - RNA, 19 nt, Human
agucuucugacaaacugug

SEQ ID NO: 3569364 - RNA, 17 nt, Human
agucuugacgaguguga

SEQ ID NO: 3569365 - RNA, 19 nt, Human
agucuugcagugauuaagg

SEQ ID NO: 3569366 - RNA, 21 nt, Human
agucuugccuauauuuuccug

SEQ ID NO: 3569367 - RNA, 16 nt, Human
agucuugcuguggucu

SEQ ID NO: 3569368 - RNA, 16 nt, Human
agucuuggaagcuguu

SEQ ID NO: 3569369 - RNA, 22 nt, Human
agucuuggaagcuguuuggaaa

SEQ ID NO: 3569370 - RNA, 17 nt, Human
agucuuggggcaggaug

SEQ ID NO: 3569371 - RNA, 22 nt, Human
agucuuguauuaaguuguuaau

SEQ ID NO: 3569372 - RNA, 17 nt, Human
agucuugucucagauuu

SEQ ID NO: 3569373 - RNA, 19 nt, Human
agucuugucucagauuuua

SEQ ID NO: 3569374 - RNA, 17 nt, Human
agucuuuaaaggcccag

SEQ ID NO: 3569375 - RNA, 23 nt, Human
agucuuuaaaggcccagccccua

SEQ ID NO: 3569376 - RNA, 20 nt, Human
agucuuuacagcugagcaca

SEQ ID NO: 3569377 - RNA, 19 nt, Human
agucuuuaggucuuuguaa

SEQ ID NO: 3569378 - RNA, 15 nt, Human
agucuuucauggcug

SEQ ID NO: 3569379 - RNA, 20 nt, Human
agucuuucaugugugccaag

SEQ ID NO: 3569380 - RNA, 14 nt, Human
agucuuucucuuuc

SEQ ID NO: 3569381 - RNA, 17 nt, Human
agucuuucucuuucccu

SEQ ID NO: 3569382 - RNA, 19 nt, Human
agucuuucucuuucccugg

SEQ ID NO: 3569383 - RNA, 16 nt, Human
agucuuugguucuaag

SEQ ID NO: 3569384 - RNA, 17 nt, Human
agucuuugguucuaagg

SEQ ID NO: 3569385 - RNA, 11 nt, Human
agucuuuuaaa

SEQ ID NO: 3569386 - RNA, 18 nt, Human
agucuuuuuuuuuuaagu

SEQ ID NO: 3569387 - RNA, 20 nt, Human
agugaaaaauguuaggacau

SEQ ID NO: 3569388 - RNA, 12 nt, Human
agugaaaacaag

SEQ ID NO: 3569389 - RNA, 16 nt, Human
agugaaaacuuuguag

SEQ ID NO: 3569390 - RNA, 18 nt, Human
agugaaacaucauagaaa

SEQ ID NO: 3569391 - RNA, 21 nt, Human
agugaaaccuuuagggcagcu

SEQ ID NO: 3569392 - RNA, 12 nt, Human
agugaaacuuuu

SEQ ID NO: 3569393 - RNA, 22 nt, Human
agugaaagaggcagcuugaaac

SEQ ID NO: 3569394 - RNA, 14 nt, Human
agugaaagcaucac

SEQ ID NO: 3569395 - RNA, 16 nt, Human
agugaaagcuagagau

SEQ ID NO: 3569396 - RNA, 13 nt, Human
agugaaauaaugu

SEQ ID NO: 3569397 - RNA, 16 nt, Human
agugaaauaaugugua

SEQ ID NO: 3569398 - RNA, 20 nt, Human
agugaaauuucuagccugca

SEQ ID NO: 3569399 - RNA, 20 nt, Human
agugaacaaauuuacagaga

SEQ ID NO: 3569400 - RNA, 23 nt, Human
agugaacaaauuuacagagacag

SEQ ID NO: 3569401 - RNA, 18 nt, Human
agugaacauuuggguaaa

SEQ ID NO: 3569402 - RNA, 13 nt, Human
agugaaccaaaga

SEQ ID NO: 3569403 - RNA, 15 nt, Human
agugaaccaaagaga

SEQ ID NO: 3569404 - RNA, 15 nt, Human
agugaaccuguauaa

SEQ ID NO: 3569405 - RNA, 19 nt, Human
agugaacuauuucuacaca

SEQ ID NO: 3569406 - RNA, 20 nt, Human
agugaacuugggccacugug

SEQ ID NO: 3569407 - RNA, 19 nt, Human
agugaagaaaagugaaugc

SEQ ID NO: 3569408 - RNA, 23 nt, Human
agugaagaaaagugaaugcucaa

SEQ ID NO: 3569409 - RNA, 14 nt, Human
agugaagaauacuu

SEQ ID NO: 3569410 - RNA, 14 nt, Human
agugaagacaauga

SEQ ID NO: 3569411 - RNA, 18 nt, Human
agugcagcugauuuuaac

SEQ ID NO: 3569412 - RNA, 17 nt, Human
agugcaggcccacccug

SEQ ID NO: 3569413 - RNA, 12 nt, Human
agugcaggcugg

SEQ ID NO: 3569414 - RNA, 13 nt, Human
agugcaggcuggc

SEQ ID NO: 3569415 - RNA, 15 nt, Human
agugcaggcuggcac

SEQ ID NO: 3569416 - RNA, 16 nt, Human
agugcaggcuggccag

SEQ ID NO: 3569417 - RNA, 17 nt, Human
agugcaggcuggccagc

SEQ ID NO: 3569418 - RNA, 18 nt, Human
agugcaggcuggccagcc

SEQ ID NO: 3569419 - RNA, 19 nt, Human
agugcaggcuggccagccg

SEQ ID NO: 3569420 - RNA, 16 nt, Human
agugcaguccugauca

SEQ ID NO: 3569421 - RNA, 22 nt, Human
agugcaguccugaucagagccg

SEQ ID NO: 3569422 - RNA, 21 nt, Human
agugcaguggcacaaucuugg

SEQ ID NO: 3569423 - RNA, 22 nt, Human
agugcaguggcgaaaucccugc

SEQ ID NO: 3569424 - RNA, 15 nt, Human
agugcaguuauuugc

SEQ ID NO: 3569425 - RNA, 15 nt, Human
agugcauccaaaggu

SEQ ID NO: 3569426 - RNA, 16 nt, Human
agugcaucucagccca

SEQ ID NO: 3569427 - RNA, 14 nt, Human
agugcaucuggaga

SEQ ID NO: 3569428 - RNA, 21 nt, Human
agugcaucuggagagaacagg

SEQ ID NO: 3569429 - RNA, 15 nt, Human
agugcaugcucucug

SEQ ID NO: 3569430 - RNA, 16 nt, Human
agugcaugcucucugc

SEQ ID NO: 3569431 - RNA, 16 nt, Human
agugcauuguuucugu

SEQ ID NO: 3569432 - RNA, 20 nt, Human
agugcauuguuucugugggc

SEQ ID NO: 3569433 - RNA, 12 nt, Human
agugcauuucug

SEQ ID NO: 3569434 - RNA, 15 nt, Human
agugcauuuucccag

SEQ ID NO: 3569435 - RNA, 17 nt, Human
agugcauuuuuguaaau

SEQ ID NO: 3569436 - RNA, 13 nt, Human
agugccaaagaaa

SEQ ID NO: 3569437 - RNA, 21 nt, Human
agugccaaagaagcagaccau

SEQ ID NO: 3569438 - RNA, 19 nt, Human
agugccacucauuccugua

SEQ ID NO: 3569439 - RNA, 14 nt, Human
agugccacuuaaug

SEQ ID NO: 3569440 - RNA, 16 nt, Human
agugccacuuaaugua

SEQ ID NO: 3569441 - RNA, 18 nt, Human
agugccacuuaauguaug

SEQ ID NO: 3569442 - RNA, 21 nt, Human
agugccacuuaauguauguua

SEQ ID NO: 3569443 - RNA, 20 nt, Human
agugccagaauuuuaggaac

SEQ ID NO: 3569444 - RNA, 15 nt, Human
agugccagagguggg

SEQ ID NO: 3569445 - RNA, 19 nt, Human
agugccagaggugggcagg

SEQ ID NO: 3569446 - RNA, 19 nt, Human
agugccaggacuccccagg

SEQ ID NO: 3569447 - RNA, 23 nt, Human
agugccaguauuuuaaaauagcg

SEQ ID NO: 3569448 - RNA, 15 nt, Human
agugccauugucuuu

SEQ ID NO: 3569449 - RNA, 21 nt, Human
agugccauugucuuuauauga

SEQ ID NO: 3569450 - RNA, 20 nt, Human
agugcccaccaacaucccau

SEQ ID NO: 3569451 - RNA, 18 nt, Human
agugcccacccugggaga

SEQ ID NO: 3569452 - RNA, 14 nt, Human
agugccccaccugc

SEQ ID NO: 3569453 - RNA, 20 nt, Human
agugccccauucuuuuguaa

SEQ ID NO: 3569454 - RNA, 20 nt, Human
agugccccugcugccucccc

SEQ ID NO: 3569455 - RNA, 12 nt, Human
agugcccuccag

SEQ ID NO: 3569456 - RNA, 17 nt, Human
agugcccuccagccccg

SEQ ID NO: 3569457 - RNA, 19 nt, Human
agugccgccgccucgccca

SEQ ID NO: 3569458 - RNA, 22 nt, Human
agugccgccgccucgcccaccg

SEQ ID NO: 3569459 - RNA, 23 nt, Human
agugccgccgccucgcccaccgc

SEQ ID NO: 3569460 - RNA, 16 nt, Human
agugccgcucuugggg

SEQ ID NO: 3569461 - RNA, 18 nt, Human
agugccgcucuuggggac

SEQ ID NO: 3569462 - RNA, 17 nt, Human
agugccguaacaacugu

SEQ ID NO: 3569463 - RNA, 19 nt, Human
agugccucucccugcugcu

SEQ ID NO: 3569464 - RNA, 22 nt, Human
agugccucucccugcugcuccu

SEQ ID NO: 3569465 - RNA, 14 nt, Human
agugccucuggucu

SEQ ID NO: 3569466 - RNA, 13 nt, Human
agugccugggaau

SEQ ID NO: 3569467 - RNA, 22 nt, Human
agugccugggaauguauuauuc

SEQ ID NO: 3569468 - RNA, 21 nt, Human
agugccuguaaucacagcuac

SEQ ID NO: 3569469 - RNA, 20 nt, Human
agugccuuaauaguagggua

SEQ ID NO: 3569470 - RNA, 17 nt, Human
agugccuuacacaaugg

SEQ ID NO: 3569471 - RNA, 17 nt, Human
agugccuuaccuccugc

SEQ ID NO: 3569472 - RNA, 19 nt, Human
agugccuuaccuccugccc

SEQ ID NO: 3569473 - RNA, 23 nt, Human
agugccuuaccuccugcccagga

SEQ ID NO: 3569474 - RNA, 19 nt, Human
agugccuuauggaacacuc

SEQ ID NO: 3569475 - RNA, 20 nt, Human
agugccuuauggaacacucu

SEQ ID NO: 3569476 - RNA, 21 nt, Human
agugccuuauggaacacucug

SEQ ID NO: 3569477 - RNA, 22 nt, Human
agugccuuauggaacacucuga

SEQ ID NO: 3569478 - RNA, 20 nt, Human
agugccuucaauaaauggua

SEQ ID NO: 3569479 - RNA, 19 nt, Human
agugccuuccuguuuuuca

SEQ ID NO: 3569480 - RNA, 16 nt, Human
agugccuucuaaaggu

SEQ ID NO: 3569481 - RNA, 18 nt, Human
agugccuucuguggggac

SEQ ID NO: 3569482 - RNA, 20 nt, Human
agugccuuuugcagaagagg

SEQ ID NO: 3569483 - RNA, 19 nt, Human
agugcgguuuacucacugc

SEQ ID NO: 3569484 - RNA, 14 nt, Human
agugcgugcucagu

SEQ ID NO: 3569485 - RNA, 20 nt, Human
agugcuaaaaaugggacuuc

SEQ ID NO: 3569486 - RNA, 23 nt, Human
agugcuaacaugaagaccuuuuu

SEQ ID NO: 3569487 - RNA, 21 nt, Human
agugcuaagguucuaaggccu

SEQ ID NO: 3569488 - RNA, 17 nt, Human
agugcuaagugugaacu

SEQ ID NO: 3569489 - RNA, 19 nt, Human
agugcuaagugugaacugg

SEQ ID NO: 3569490 - RNA, 22 nt, Human
agugcuacacaccuaacuuaug

SEQ ID NO: 3569491 - RNA, 14 nt, Human
agugcuacauaaau

SEQ ID NO: 3569492 - RNA, 17 nt, Human
agugcuacauaaauugg

SEQ ID NO: 3569493 - RNA, 16 nt, Human
agugcuauauauauaa

SEQ ID NO: 3569494 - RNA, 17 nt, Human
agugcuauauauauaaa

SEQ ID NO: 3569495 - RNA, 23 nt, Human
agugcuauauauauaaauauuug

SEQ ID NO: 3569496 - RNA, 23 nt, Human
agugcuauuacgaaguucaagau

SEQ ID NO: 3569497 - RNA, 14 nt, Human
agugcuauugcaga

SEQ ID NO: 3569498 - RNA, 14 nt, Human
agugcucaaggcca

SEQ ID NO: 3569499 - RNA, 20 nt, Human
agugcuccauaguuuggcau

SEQ ID NO: 3569500 - RNA, 15 nt, Human
agugcucgcuguugc

SEQ ID NO: 3569501 - RNA, 19 nt, Human
agugcucgcuguugcugaa

SEQ ID NO: 3569502 - RNA, 22 nt, Human
agugcucgcuguugcugaauag

SEQ ID NO: 3569503 - RNA, 23 nt, Human
agugcucgcuguugcugaauagg

SEQ ID NO: 3569504 - RNA, 12 nt, Human
agugcucgcuuu

SEQ ID NO: 3569505 - RNA, 15 nt, Human
agugcugaacagugg

SEQ ID NO: 3569506 - RNA, 21 nt, Human
agugcugaagcuuauuaaugc

SEQ ID NO: 3569507 - RNA, 22 nt, Human
agugcugaagcuuauuaaugcu

SEQ ID NO: 3569508 - RNA, 15 nt, Human
agugcugaauuuccc

SEQ ID NO: 3569509 - RNA, 12 nt, Human
agugcugagacc

SEQ ID NO: 3569510 - RNA, 20 nt, Human
agugcugagauuacaggcau

SEQ ID NO: 3569511 - RNA, 17 nt, Human
agugcugcagcucccug

SEQ ID NO: 3569512 - RNA, 21 nt, Human
agugcugcagggcuuuaaaau

SEQ ID NO: 3569513 - RNA, 22 nt, Human
agugcugcauuuaaaagauaca

SEQ ID NO: 3569514 - RNA, 17 nt, Human
agugcugccugucccca

SEQ ID NO: 3569515 - RNA, 13 nt, Human
agugcuggcucac

SEQ ID NO: 3569516 - RNA, 15 nt, Human
agugcuggcucacag

SEQ ID NO: 3569517 - RNA, 16 nt, Human
agugcuggcucacagu

SEQ ID NO: 3569518 - RNA, 19 nt, Human
agugcuggcucacaguaca

SEQ ID NO: 3569519 - RNA, 21 nt, Human
agugcuggcucacaguacagc

SEQ ID NO: 3569520 - RNA, 21 nt, Human
agugcugggauggaggggagu

SEQ ID NO: 3569521 - RNA, 17 nt, Human
agugcugggauuacagg

SEQ ID NO: 3569522 - RNA, 22 nt, Human
agugcugggauuacaggcauga

SEQ ID NO: 3569523 - RNA, 19 nt, Human
agugcugggauuacaggcu

SEQ ID NO: 3569524 - RNA, 16 nt, Human
agugcuguauaaaauc

SEQ ID NO: 3569525 - RNA, 20 nt, Human
agugcuguccaugcuucuca

SEQ ID NO: 3569526 - RNA, 22 nt, Human
agugcuguccaugcuucucauc

SEQ ID NO: 3569527 - RNA, 22 nt, Human
agugcugucugaucugugcuuu

SEQ ID NO: 3569528 - RNA, 23 nt, Human
agugcugucuuaaacuaaaugug

SEQ ID NO: 3569529 - RNA, 17 nt, Human
agugcugugcugugcua

SEQ ID NO: 3569530 - RNA, 20 nt, Human
agugcuguggccugggcaag

SEQ ID NO: 3569531 - RNA, 20 nt, Human
agugcuguuuauuaaucuua

SEQ ID NO: 3569532 - RNA, 22 nt, Human
agugcuguuuauuaaucuuagu

SEQ ID NO: 3569533 - RNA, 22 nt, Human
agugcuguuuuguuauauaauu

SEQ ID NO: 3569534 - RNA, 23 nt, Human
agugcuguuuuguuauauaauuu

SEQ ID NO: 3569535 - RNA, 19 nt, Human
agugcuuaaaaaucauuga

SEQ ID NO: 3569536 - RNA, 16 nt, Human
agugcuucagccugag

SEQ ID NO: 3569537 - RNA, 18 nt, Human
agugcuucagccugaggc

SEQ ID NO: 3569538 - RNA, 21 nt, Human
agugcuucuuaaagaguucuu

SEQ ID NO: 3569539 - RNA, 15 nt, Human
agugcuugccacaga

SEQ ID NO: 3569540 - RNA, 16 nt, Human
agugcuuggcccagga

SEQ ID NO: 3569541 - RNA, 19 nt, Human
agugcuuggcccaggaguu

SEQ ID NO: 3569542 - RNA, 20 nt, Human
agugcuuggcccaggaguuu

SEQ ID NO: 3569543 - RNA, 14 nt, Human
agugcuuguguaau

SEQ ID NO: 3569544 - RNA, 19 nt, Human
agugcuuuccuuuuuuaaa

SEQ ID NO: 3569545 - RNA, 16 nt, Human
agugcuuuucuguuua

SEQ ID NO: 3569546 - RNA, 11 nt, Human
aguggaaaaau

SEQ ID NO: 3569547 - RNA, 22 nt, Human
aguggaaauucaggugaaaaug

SEQ ID NO: 3569548 - RNA, 16 nt, Human
aguggaacgaaaauga

SEQ ID NO: 3569549 - RNA, 16 nt, Human
aguggaagaagaaaac

SEQ ID NO: 3569550 - RNA, 17 nt, Human
aguggaagaagagggag

SEQ ID NO: 3569551 - RNA, 17 nt, Human
aguggaagaagcagaug

SEQ ID NO: 3569552 - RNA, 15 nt, Human
aguggaaggaaagau

SEQ ID NO: 3569553 - RNA, 20 nt, Human
aguggaauaguauccuccag

SEQ ID NO: 3569554 - RNA, 23 nt, Human
aguguacauggaauaacauguaa

SEQ ID NO: 3569555 - RNA, 20 nt, Human
aguguacccccgcccaggcu

SEQ ID NO: 3569556 - RNA, 17 nt, Human
aguguaccuguguacau

SEQ ID NO: 3569557 - RNA, 15 nt, Human
aguguagaaccuaau

SEQ ID NO: 3569558 - RNA, 12 nt, Human
aguguagaagca

SEQ ID NO: 3569559 - RNA, 16 nt, Human
aguguagaagcauucc

SEQ ID NO: 3569560 - RNA, 20 nt, Human
aguguagauuccauuuacug

SEQ ID NO: 3569561 - RNA, 19 nt, Human
aguguagauuuguuuugug

SEQ ID NO: 3569562 - RNA, 18 nt, Human
aguguagcccacacuuga

SEQ ID NO: 3569563 - RNA, 21 nt, Human
aguguagcccacacuugagag

SEQ ID NO: 3569564 - RNA, 21 nt, Human
aguguagccccaagaaggcug

SEQ ID NO: 3569565 - RNA, 22 nt, Human
aguguagccccaagaaggcugg

SEQ ID NO: 3569566 - RNA, 14 nt, Human
aguguaggcagaca

SEQ ID NO: 3569567 - RNA, 22 nt, Human
aguguaggcagacacagggacu

SEQ ID NO: 3569568 - RNA, 22 nt, Human
aguguaggcuuuacuuagcuua

SEQ ID NO: 3569569 - RNA, 17 nt, Human
aguguaguuuacagaaa

SEQ ID NO: 3569570 - RNA, 14 nt, Human
aguguauaucagaa

SEQ ID NO: 3569571 - RNA, 17 nt, Human
aguguaucaaaaugcuc

SEQ ID NO: 3569572 - RNA, 16 nt, Human
aguguauggaaauaaa

SEQ ID NO: 3569573 - RNA, 22 nt, Human
aguguauggaaauaaauguauc

SEQ ID NO: 3569574 - RNA, 17 nt, Human
aguguauguagaagcau

SEQ ID NO: 3569575 - RNA, 13 nt, Human
aguguaugucuug

SEQ ID NO: 3569576 - RNA, 13 nt, Human
aguguauuucagu

SEQ ID NO: 3569577 - RNA, 14 nt, Human
aguguauuucaguu

SEQ ID NO: 3569578 - RNA, 15 nt, Human
aguguauuucaguuc

SEQ ID NO: 3569579 - RNA, 22 nt, Human
aguguauuuuauaaaauuaaag

SEQ ID NO: 3569580 - RNA, 16 nt, Human
aguguauuuugaaauu

SEQ ID NO: 3569581 - RNA, 18 nt, Human
aguguauuuuuuuacuaa

SEQ ID NO: 3569582 - RNA, 17 nt, Human
agugucaaauaaacacu

SEQ ID NO: 3569583 - RNA, 20 nt, Human
agugucaaauaaacacugug

SEQ ID NO: 3569584 - RNA, 13 nt, Human
agugucaaccaga

SEQ ID NO: 3569585 - RNA, 15 nt, Human
agugucaaccagaca

SEQ ID NO: 3569586 - RNA, 16 nt, Human
agugucaaccagacag

SEQ ID NO: 3569587 - RNA, 22 nt, Human
agugucaaguugugcuuguuua

SEQ ID NO: 3569588 - RNA, 19 nt, Human
agugucaaugcagccccca

SEQ ID NO: 3569589 - RNA, 21 nt, Human
agugucacuuaccuagauuua

SEQ ID NO: 3569590 - RNA, 19 nt, Human
agugucauuuaugaaaaga

SEQ ID NO: 3569591 - RNA, 18 nt, Human
agugucauuucucaucca

SEQ ID NO: 3569592 - RNA, 20 nt, Human
agugucauuucucauccaca

SEQ ID NO: 3569593 - RNA, 14 nt, Human
aguguccaaagcag

SEQ ID NO: 3569594 - RNA, 20 nt, Human
aguguccaaagcagggucug

SEQ ID NO: 3569595 - RNA, 20 nt, Human
aguguccauugacauguaca

SEQ ID NO: 3569596 - RNA, 18 nt, Human
aguguccauuuugugaag

SEQ ID NO: 3569597 - RNA, 19 nt, Human
aguguccauuuugugaagc

SEQ ID NO: 3569598 - RNA, 21 nt, Human
aguguccauuuugugaagccc

SEQ ID NO: 3569599 - RNA, 23 nt, Human
aguguccauuuugugaagcccug

SEQ ID NO: 3569600 - RNA, 22 nt, Human
agugucccccagguuccgaaga

SEQ ID NO: 3569601 - RNA, 19 nt, Human
aguguccccuccacuguca

SEQ ID NO: 3569602 - RNA, 16 nt, Human
aguguccgagaacuaa

SEQ ID NO: 3569603 - RNA, 16 nt, Human
aguguccuaugcaaua

SEQ ID NO: 3569604 - RNA, 21 nt, Human
aguguccuccccucaaggaca

SEQ ID NO: 3569605 - RNA, 18 nt, Human
aguguccugagccccagg

SEQ ID NO: 3569606 - RNA, 17 nt, Human
aguguccugagcucagc

SEQ ID NO: 3569607 - RNA, 20 nt, Human
aguguccugagcucagcgug

SEQ ID NO: 3569608 - RNA, 22 nt, Human
aguguccuuggcaggcugauuu

SEQ ID NO: 3569609 - RNA, 17 nt, Human
agugucuauaaaagaaa

SEQ ID NO: 3569610 - RNA, 22 nt, Human
agugucucggagggauuccccu

SEQ ID NO: 3569611 - RNA, 21 nt, Human
agugucuggaucaguaaaauu

SEQ ID NO: 3569612 - RNA, 16 nt, Human
agugucuggcacacag

SEQ ID NO: 3569613 - RNA, 12 nt, Human
agugucuggcug

SEQ ID NO: 3569614 - RNA, 19 nt, Human
agugucugggcugacuggg

SEQ ID NO: 3569615 - RNA, 22 nt, Human
agugucugucccgggguccugu

SEQ ID NO: 3569616 - RNA, 13 nt, Human
agugucugugugc

SEQ ID NO: 3569617 - RNA, 19 nt, Human
agugucuucacggcaggac

SEQ ID NO: 3569618 - RNA, 15 nt, Human
agugucuuccauaau

SEQ ID NO: 3569619 - RNA, 16 nt, Human
agugucuuuccacucc

SEQ ID NO: 3569620 - RNA, 21 nt, Human
agugucuuucuuuggugccuu

SEQ ID NO: 3569621 - RNA, 15 nt, Human
agugucuuuuuuugu

SEQ ID NO: 3569622 - RNA, 19 nt, Human
agugucuuuuuuuguauag

SEQ ID NO: 3569623 - RNA, 22 nt, Human
agugucuuuuuuuguauaguua

SEQ ID NO: 3569624 - RNA, 15 nt, Human
agugugaaauagaca

SEQ ID NO: 3569625 - RNA, 14 nt, Human
agugugaaauauau

SEQ ID NO: 3569626 - RNA, 23 nt, Human
agugugaacuggacccuguugcu

SEQ ID NO: 3569627 - RNA, 18 nt, Human
agugugaaguuagaauuc

SEQ ID NO: 3569628 - RNA, 13 nt, Human
agugugaauacug

SEQ ID NO: 3569629 - RNA, 14 nt, Human
agugugaauacugc

SEQ ID NO: 3569630 - RNA, 21 nt, Human
agugugaauauaaaugugugu

SEQ ID NO: 3569631 - RNA, 20 nt, Human
agugugaauugcaaaaccca

SEQ ID NO: 3569632 - RNA, 11 nt, Human
agugugacagg

SEQ ID NO: 3569633 - RNA, 14 nt, Human
agugugacagggcc

SEQ ID NO: 3569634 - RNA, 22 nt, Human
agugugacagggccaguggggc

SEQ ID NO: 3569635 - RNA, 18 nt, Human
agugugaggccagggcag

SEQ ID NO: 3569636 - RNA, 19 nt, Human
agugugaguaagagcuggu

SEQ ID NO: 3569637 - RNA, 22 nt, Human
agugugauugggaauaaauaug

SEQ ID NO: 3569638 - RNA, 23 nt, Human
agugugauugggaauaaauaugc

SEQ ID NO: 3569639 - RNA, 12 nt, Human
agugugcaaaau

SEQ ID NO: 3569640 - RNA, 13 nt, Human
agugugcaaggca

SEQ ID NO: 3569641 - RNA, 21 nt, Human
agugugcaguucuaguuugca

SEQ ID NO: 3569642 - RNA, 16 nt, Human
agugugcauauuguac

SEQ ID NO: 3569643 - RNA, 19 nt, Human
agugugcauggaggcccuc

SEQ ID NO: 3569644 - RNA, 14 nt, Human
agugugccuucucu

SEQ ID NO: 3569645 - RNA, 18 nt, Human
agugugcuuuaugcugaa

SEQ ID NO: 3569646 - RNA, 17 nt, Human
aguguggaaauuaagaa

SEQ ID NO: 3569647 - RNA, 16 nt, Human
aguguggcaguuuggc

SEQ ID NO: 3569648 - RNA, 21 nt, Human
aguguggcuccccucuauuua

SEQ ID NO: 3569649 - RNA, 14 nt, Human
agugugggaggcuc

SEQ ID NO: 3569650 - RNA, 16 nt, Human
agugugggaggcuccu

SEQ ID NO: 3569651 - RNA, 21 nt, Human
agugugguagggacuuaaaaa

SEQ ID NO: 3569652 - RNA, 17 nt, Human
aguguggucccaacagg

SEQ ID NO: 3569653 - RNA, 17 nt, Human
agugugguguuuccugg

SEQ ID NO: 3569654 - RNA, 21 nt, Human
agugugguuucuuuuugaauc

SEQ ID NO: 3569655 - RNA, 11 nt, Human
aguguguaaag

SEQ ID NO: 3569656 - RNA, 22 nt, Human
aguguguauuaaaaaaaacaaa

SEQ ID NO: 3569657 - RNA, 23 nt, Human
aguguguauuaaaaaaaacaaaa

SEQ ID NO: 3569658 - RNA, 15 nt, Human
aguguguauuguucc

SEQ ID NO: 3569659 - RNA, 16 nt, Human
aguguguauuguuccc

SEQ ID NO: 3569660 - RNA, 14 nt, Human
agugugucuaaauu

SEQ ID NO: 3569661 - RNA, 14 nt, Human
agugugucuccugc

SEQ ID NO: 3569662 - RNA, 15 nt, Human
agugugucuccugca

SEQ ID NO: 3569663 - RNA, 14 nt, Human
agugugugacauuc

SEQ ID NO: 3569664 - RNA, 21 nt, Human
agugugugauuuuuugcauuc

SEQ ID NO: 3569665 - RNA, 17 nt, Human
agugugugcaaguaugu

SEQ ID NO: 3569666 - RNA, 19 nt, Human
agugugugcacaugugugc

SEQ ID NO: 3569667 - RNA, 19 nt, Human
agugugugcauaauagcua

SEQ ID NO: 3569668 - RNA, 14 nt, Human
agugugugcaugug

SEQ ID NO: 3569669 - RNA, 18 nt, Human
agugugugcaugugugug

SEQ ID NO: 3569670 - RNA, 23 nt, Human
agugugugcaugugugugcucag

SEQ ID NO: 3569671 - RNA, 14 nt, Human
agugugugucuuuc

SEQ ID NO: 3569672 - RNA, 18 nt, Human
agugugugugugcaugug

SEQ ID NO: 3569673 - RNA, 17 nt, Human
aguguguucugauuaga

SEQ ID NO: 3569674 - RNA, 20 nt, Human
aguguguucugauuagaaau

SEQ ID NO: 3569675 - RNA, 21 nt, Human
aguguguucugauuagaaaug

SEQ ID NO: 3569676 - RNA, 22 nt, Human
aguguguuguugcuuuaggcuc

SEQ ID NO: 3569677 - RNA, 15 nt, Human
aguguuaaaugugau

SEQ ID NO: 3569678 - RNA, 16 nt, Human
aguguuaauacuaguu

SEQ ID NO: 3569679 - RNA, 23 nt, Human
aguguuagccuuuuuuccccaga

SEQ ID NO: 3569680 - RNA, 17 nt, Human
aguguuaggccuggcac

SEQ ID NO: 3569681 - RNA, 15 nt, Human
aguguuagggaaggg

SEQ ID NO: 3569682 - RNA, 14 nt, Human
aguguuauaugaac

SEQ ID NO: 3569683 - RNA, 22 nt, Human
aguguuauuaguguaugcuuug

SEQ ID NO: 3569684 - RNA, 15 nt, Human
aguguucagaaaaaa

SEQ ID NO: 3569685 - RNA, 16 nt, Human
aguguugaaaauguuc

SEQ ID NO: 3569686 - RNA, 21 nt, Human
aguguugaaacggaugauuuc

SEQ ID NO: 3569687 - RNA, 13 nt, Human
aguguugccuaag

SEQ ID NO: 3569688 - RNA, 16 nt, Human
aguguuggagaagaac

SEQ ID NO: 3569689 - RNA, 18 nt, Human
aguguuguuuguaaauaa

SEQ ID NO: 3569690 - RNA, 20 nt, Human
aguguuguuuguaaauaaga

SEQ ID NO: 3569691 - RNA, 21 nt, Human
aguguuguuuguaaauaagag

SEQ ID NO: 3569692 - RNA, 14 nt, Human
aguguuuaaaacuu

SEQ ID NO: 3569693 - RNA, 16 nt, Human
aguguuuauccuuuca

SEQ ID NO: 3569694 - RNA, 20 nt, Human
aguguuuauccuuucauaua

SEQ ID NO: 3569695 - RNA, 13 nt, Human
aguguuuaugugc

SEQ ID NO: 3569696 - RNA, 16 nt, Human
aguguuuaugugcuau

SEQ ID NO: 3569697 - RNA, 15 nt, Human
aguguuuauuuuuca

SEQ ID NO: 3569698 - RNA, 19 nt, Human
auacaguaagcugcucuau

SEQ ID NO: 3569699 - RNA, 15 nt, Human
auacaguacaggcag

SEQ ID NO: 3569700 - RNA, 15 nt, Human
auacaguacaguggu

SEQ ID NO: 3569701 - RNA, 17 nt, Human
auacagucccuaaagaa

SEQ ID NO: 3569702 - RNA, 18 nt, Human
auacagucccuaaagaaa

SEQ ID NO: 3569703 - RNA, 22 nt, Human
auacagucccuaaagaaaaaaa

SEQ ID NO: 3569704 - RNA, 20 nt, Human
auacagucuuccauuugcaa

SEQ ID NO: 3569705 - RNA, 14 nt, Human
auacaguguuauuu

SEQ ID NO: 3569706 - RNA, 20 nt, Human
auacaguuacucagaauucu

SEQ ID NO: 3569707 - RNA, 17 nt, Human
auacaguuauaaaauua

SEQ ID NO: 3569708 - RNA, 22 nt, Human
auacaguuugucacaugaaaca

SEQ ID NO: 3569709 - RNA, 12 nt, Human
auacaguuuuau

SEQ ID NO: 3569710 - RNA, 15 nt, Human
auacaguuuuaugcu

SEQ ID NO: 3569711 - RNA, 18 nt, Human
auacaguuuuaugcucuu

SEQ ID NO: 3569712 - RNA, 22 nt, Human
auacauaacaggguaaauuauu

SEQ ID NO: 3569713 - RNA, 19 nt, Human
auacauaacuaaauuugau

SEQ ID NO: 3569714 - RNA, 21 nt, Human
auacauaacuaaauuugauac

SEQ ID NO: 3569715 - RNA, 22 nt, Human
auacauaaugggccacugaaau

SEQ ID NO: 3569716 - RNA, 13 nt, Human
auacauacacaua

SEQ ID NO: 3569717 - RNA, 16 nt, Human
auacauacacauauau

SEQ ID NO: 3569718 - RNA, 17 nt, Human
auacauacacauauaua

SEQ ID NO: 3569719 - RNA, 23 nt, Human
auacauacaccagcauuccuuuu

SEQ ID NO: 3569720 - RNA, 22 nt, Human
auacauacacuuguauaaaugu

SEQ ID NO: 3569721 - RNA, 12 nt, Human
auacauacagaa

SEQ ID NO: 3569722 - RNA, 21 nt, Human
auacauacggucagguuuaac

SEQ ID NO: 3569723 - RNA, 18 nt, Human
auacauacuuacaugugu

SEQ ID NO: 3569724 - RNA, 23 nt, Human
auacauauauguauauauaugca

SEQ ID NO: 3569725 - RNA, 13 nt, Human
auacauaucuuua

SEQ ID NO: 3569726 - RNA, 21 nt, Human
auacauaucuuuauuaaucac

SEQ ID NO: 3569727 - RNA, 22 nt, Human
auacauaugaguguggaagccg

SEQ ID NO: 3569728 - RNA, 22 nt, Human
auacauauguagacuauauaca

SEQ ID NO: 3569729 - RNA, 23 nt, Human
auacauauguagacuauauacau

SEQ ID NO: 3569730 - RNA, 21 nt, Human
auacauauuuuauagaacuuc

SEQ ID NO: 3569731 - RNA, 20 nt, Human
auacaucccuuaccugggaa

SEQ ID NO: 3569732 - RNA, 16 nt, Human
auacaugcaaaaagaa

SEQ ID NO: 3569733 - RNA, 18 nt, Human
auacaugcuaagagaagu

SEQ ID NO: 3569734 - RNA, 24 nt, Human
auacauggguagcuucugaccuca

SEQ ID NO: 3569735 - RNA, 22 nt, Human
auacaugguagccaguugaauu

SEQ ID NO: 3569736 - RNA, 20 nt, Human
auacaugguugugaccugag

SEQ ID NO: 3569737 - RNA, 23 nt, Human
auacaugucacauuuagcugugc

SEQ ID NO: 3569738 - RNA, 19 nt, Human
auacaugugauacauuuuu

SEQ ID NO: 3569739 - RNA, 21 nt, Human
auacaugugccgaaugugcag

SEQ ID NO: 3569740 - RNA, 17 nt, Human
auacauguguguauaua

SEQ ID NO: 3569741 - RNA, 19 nt, Human
auacauguguguauauaug

SEQ ID NO: 3569742 - RNA, 21 nt, Human
auacauguguguauauaugug

SEQ ID NO: 3569743 - RNA, 14 nt, Human
auacauguuuaugu

SEQ ID NO: 3569744 - RNA, 12 nt, Human
auacauuaaagc

SEQ ID NO: 3569745 - RNA, 13 nt, Human
auacauuaaagca

SEQ ID NO: 3569746 - RNA, 15 nt, Human
auacauuaaagcagu

SEQ ID NO: 3569747 - RNA, 16 nt, Human
auacauuaguaaaugu

SEQ ID NO: 3569748 - RNA, 22 nt, Human
auacauuaguaaaugucuuugu

SEQ ID NO: 3569749 - RNA, 20 nt, Human
auacauucuucaagauccca

SEQ ID NO: 3569750 - RNA, 12 nt, Human
auacauucuuuu

SEQ ID NO: 3569751 - RNA, 21 nt, Human
auacauugucucuaaauugug

SEQ ID NO: 3569752 - RNA, 17 nt, Human
auacauuuaugaauuaa

SEQ ID NO: 3569753 - RNA, 21 nt, Human
auacauuuguauguugugaag

SEQ ID NO: 3569754 - RNA, 16 nt, Human
auacauuuuuuaagcu

SEQ ID NO: 3569755 - RNA, 20 nt, Human
auacauuuuuuaagcuucag

SEQ ID NO: 3569756 - RNA, 19 nt, Human
auaccaaaauuauuucaga

SEQ ID NO: 3569757 - RNA, 17 nt, Human
auaccaagcauguggau

SEQ ID NO: 3569758 - RNA, 14 nt, Human
auaccaaguauuua

SEQ ID NO: 3569759 - RNA, 15 nt, Human
auaccaauaaaguga

SEQ ID NO: 3569760 - RNA, 21 nt, Human
auaccaauaaagugacccugc

SEQ ID NO: 3569761 - RNA, 13 nt, Human
auaccacaucaaa

SEQ ID NO: 3569762 - RNA, 17 nt, Human
auaccacucuguaauug

SEQ ID NO: 3569763 - RNA, 19 nt, Human
auaccacucuguaauugca

SEQ ID NO: 3569764 - RNA, 16 nt, Human
auaccagacugcaggu

SEQ ID NO: 3569765 - RNA, 22 nt, Human
auaccagcgaggaggcuccaga

SEQ ID NO: 3569766 - RNA, 18 nt, Human
auaccagcuuagauuuua

SEQ ID NO: 3569767 - RNA, 19 nt, Human
auaccagugaaccaaagag

SEQ ID NO: 3569768 - RNA, 19 nt, Human
auaccauggugaauuaauc

SEQ ID NO: 3569769 - RNA, 23 nt, Human
auaccauuauauguucccccugu

SEQ ID NO: 3569770 - RNA, 15 nt, Human
auaccauugacacau

SEQ ID NO: 3569771 - RNA, 18 nt, Human
auaccauuuaguaagaau

SEQ ID NO: 3569772 - RNA, 17 nt, Human
auaccauuuccucagcu

SEQ ID NO: 3569773 - RNA, 13 nt, Human
auacccacccaga

SEQ ID NO: 3569774 - RNA, 13 nt, Human
auacccaccccca

SEQ ID NO: 3569775 - RNA, 20 nt, Human
auacccccugcaaagcccag

SEQ ID NO: 3569776 - RNA, 18 nt, Human
auaccccuuacaaaugaa

SEQ ID NO: 3569777 - RNA, 12 nt, Human
auacccuccccc

SEQ ID NO: 3569778 - RNA, 15 nt, Human
auacccugaccuggc

SEQ ID NO: 3569779 - RNA, 12 nt, Human
auacccugcccu

SEQ ID NO: 3569780 - RNA, 15 nt, Human
auacccuucuuuuau

SEQ ID NO: 3569781 - RNA, 14 nt, Human
auaccuaaaacaua

SEQ ID NO: 3569782 - RNA, 13 nt, Human
auaccuaaaagag

SEQ ID NO: 3569783 - RNA, 21 nt, Human
auaccuaagaaguacauuguu

SEQ ID NO: 3569784 - RNA, 21 nt, Human
auaccuacauguauuuguuug

SEQ ID NO: 3569785 - RNA, 15 nt, Human
auaccucaaccuaug

SEQ ID NO: 3569786 - RNA, 20 nt, Human
auaccucaauuuucacugug

SEQ ID NO: 3569787 - RNA, 22 nt, Human
auaccucauguuuaugaaaaua

SEQ ID NO: 3569788 - RNA, 15 nt, Human
auaccuccaacccug

SEQ ID NO: 3569789 - RNA, 17 nt, Human
auaccuccaacccugcc

SEQ ID NO: 3569790 - RNA, 18 nt, Human
auaccucuaauaguauaa

SEQ ID NO: 3569791 - RNA, 19 nt, Human
auaccucuaauaguauaaa

SEQ ID NO: 3569792 - RNA, 20 nt, Human
auaccucuaauaguauaaac

SEQ ID NO: 3569793 - RNA, 13 nt, Human
auaccucugacca

SEQ ID NO: 3569794 - RNA, 14 nt, Human
auaccucugaccaa

SEQ ID NO: 3569795 - RNA, 12 nt, Human
auaccucugugu

SEQ ID NO: 3569796 - RNA, 14 nt, Human
auaccucugugugc

SEQ ID NO: 3569797 - RNA, 16 nt, Human
auaccucugugugcuc

SEQ ID NO: 3569798 - RNA, 16 nt, Human
auaccucuuagcugag

SEQ ID NO: 3569799 - RNA, 16 nt, Human
auaccucuuugaaaga

SEQ ID NO: 3569800 - RNA, 20 nt, Human
auaccugauuuuuuuuccuu

SEQ ID NO: 3569801 - RNA, 13 nt, Human
auaccuguccccc

SEQ ID NO: 3569802 - RNA, 17 nt, Human
auaccugucccccugac

SEQ ID NO: 3569803 - RNA, 21 nt, Human
auaccuguguuucuugccuca

SEQ ID NO: 3569804 - RNA, 22 nt, Human
auaccuguguuucuugccucau

SEQ ID NO: 3569805 - RNA, 12 nt, Human
auaccuguugcu

SEQ ID NO: 3569806 - RNA, 18 nt, Human
auaccuuaaaauuugaaa

SEQ ID NO: 3569807 - RNA, 22 nt, Human
auaccuuaaaauuugaaacauu

SEQ ID NO: 3569808 - RNA, 18 nt, Human
auaccuuagugcaguuau

SEQ ID NO: 3569809 - RNA, 18 nt, Human
auaccuuauauaugcacu

SEQ ID NO: 3569810 - RNA, 18 nt, Human
auaccuuucacagcuuuu

SEQ ID NO: 3569811 - RNA, 22 nt, Human
auaccuuucacagcuuuuauca

SEQ ID NO: 3569812 - RNA, 15 nt, Human
auaccuuugccuugg

SEQ ID NO: 3569813 - RNA, 14 nt, Human
auaccuuuuuuaga

SEQ ID NO: 3569814 - RNA, 14 nt, Human
auacgaaauaauug

SEQ ID NO: 3569815 - RNA, 15 nt, Human
auacgaaauaauugu

SEQ ID NO: 3569816 - RNA, 18 nt, Human
auacgaaauaauuguugu

SEQ ID NO: 3569817 - RNA, 11 nt, Human
auacgaacaaa

SEQ ID NO: 3569818 - RNA, 16 nt, Human
auacgagagcagaggu

SEQ ID NO: 3569819 - RNA, 19 nt, Human
auacgagagcagaggucuc

SEQ ID NO: 3569820 - RNA, 17 nt, Human
auacgauuuaagguauu

SEQ ID NO: 3569821 - RNA, 16 nt, Human
auacgcacuacaugug

SEQ ID NO: 3569822 - RNA, 24 nt, Human
auacgcuuuucuuuguuauaccau

SEQ ID NO: 3569823 - RNA, 22 nt, Human
auacggucagguuuaacauuug

SEQ ID NO: 3569824 - RNA, 15 nt, Human
auacgguggggguag

SEQ ID NO: 3569825 - RNA, 14 nt, Human
auacguacacauuu

SEQ ID NO: 3569826 - RNA, 15 nt, Human
auacguacacauuuu

SEQ ID NO: 3569827 - RNA, 16 nt, Human
auacguacacauuuua

SEQ ID NO: 3569828 - RNA, 13 nt, Human
auacuaaaaauca

SEQ ID NO: 3569829 - RNA, 21 nt, Human
auacuaaaaguucuucuccaa

SEQ ID NO: 3569830 - RNA, 13 nt, Human
auacuaaccagca

SEQ ID NO: 3569831 - RNA, 19 nt, Human
auacuaaccagcagaaaug

SEQ ID NO: 3569832 - RNA, 15 nt, Human
auacuaacuuauuua

SEQ ID NO: 3569833 - RNA, 14 nt, Human
auacuaagaaaaga

SEQ ID NO: 3569834 - RNA, 20 nt, Human
auacuaagauguucacugug

SEQ ID NO: 3569835 - RNA, 21 nt, Human
auacuaagcauugaauggcua

SEQ ID NO: 3569836 - RNA, 18 nt, Human
auacuaauaaacuaauaa

SEQ ID NO: 3569837 - RNA, 22 nt, Human
auacuaauaaacuaauaauugc

SEQ ID NO: 3569838 - RNA, 21 nt, Human
auacuaaugaaaacagaaugu

SEQ ID NO: 3569839 - RNA, 15 nt, Human
auacuacaguuuguu

SEQ ID NO: 3569840 - RNA, 14 nt, Human
auacuacaucuuua

SEQ ID NO: 3569841 - RNA, 17 nt, Human
auacuaccuugaaaaua

SEQ ID NO: 3569842 - RNA, 13 nt, Human
auagcucuggggu

SEQ ID NO: 3569843 - RNA, 22 nt, Human
auagcucuggggugggcaguuu

SEQ ID NO: 3569844 - RNA, 17 nt, Human
auagcugagauuccugg

SEQ ID NO: 3569845 - RNA, 22 nt, Human
auagcuggucuuauuuguaaag

SEQ ID NO: 3569846 - RNA, 15 nt, Human
auagcuguaaacuuc

SEQ ID NO: 3569847 - RNA, 23 nt, Human
auagcuguacaaauauaagaaua

SEQ ID NO: 3569848 - RNA, 13 nt, Human
auagcuguauuga

SEQ ID NO: 3569849 - RNA, 12 nt, Human
auagcugugacu

SEQ ID NO: 3569850 - RNA, 19 nt, Human
auagcugugauuuuuggua

SEQ ID NO: 3569851 - RNA, 22 nt, Human
auagcugugauuuuugguauuu

SEQ ID NO: 3569852 - RNA, 22 nt, Human
auagcuuacaagccagcuggag

SEQ ID NO: 3569853 - RNA, 21 nt, Human
auagcuucaccccaaucccag

SEQ ID NO: 3569854 - RNA, 14 nt, Human
auagcuugaaacau

SEQ ID NO: 3569855 - RNA, 15 nt, Human
auagcuuuauuucuu

SEQ ID NO: 3569856 - RNA, 23 nt, Human
auagcuuuauuuuuuaaguauuu

SEQ ID NO: 3569857 - RNA, 17 nt, Human
auagcuuuuauuguaua

SEQ ID NO: 3569858 - RNA, 15 nt, Human
auaggaacauaugaa

SEQ ID NO: 3569859 - RNA, 18 nt, Human
auaggaacauaugaaaau

SEQ ID NO: 3569860 - RNA, 15 nt, Human
auaggaaggucauuu

SEQ ID NO: 3569861 - RNA, 21 nt, Human
auaggaaguuagccuuuaucu

SEQ ID NO: 3569862 - RNA, 23 nt, Human
auaggaaguuagccuuuaucuac

SEQ ID NO: 3569863 - RNA, 21 nt, Human
auaggaaucauucagaaaugu

SEQ ID NO: 3569864 - RNA, 13 nt, Human
auaggaauucauc

SEQ ID NO: 3569865 - RNA, 22 nt, Human
auaggaauugacccacaagaaa

SEQ ID NO: 3569866 - RNA, 20 nt, Human
auaggaccuuuccaccacag

SEQ ID NO: 3569867 - RNA, 23 nt, Human
auaggaccuuuccaccacagcca

SEQ ID NO: 3569868 - RNA, 22 nt, Human
auaggacucaaaguuucagaga

SEQ ID NO: 3569869 - RNA, 14 nt, Human
auaggagaggauga

SEQ ID NO: 3569870 - RNA, 23 nt, Human
auaggagaggaugagagcccaga

SEQ ID NO: 3569871 - RNA, 15 nt, Human
auaggagccugcugg

SEQ ID NO: 3569872 - RNA, 21 nt, Human
auaggaguggugauuugaaaa

SEQ ID NO: 3569873 - RNA, 16 nt, Human
auaggauuuauuuaaa

SEQ ID NO: 3569874 - RNA, 19 nt, Human
auaggcaccuuuuacugug

SEQ ID NO: 3569875 - RNA, 17 nt, Human
auaggcacuuuaaaaca

SEQ ID NO: 3569876 - RNA, 12 nt, Human
auaggccagccg

SEQ ID NO: 3569877 - RNA, 14 nt, Human
auaggcccacacac

SEQ ID NO: 3569878 - RNA, 22 nt, Human
auaggccugcuuugucuccucu

SEQ ID NO: 3569879 - RNA, 15 nt, Human
auaggccuucuugug

SEQ ID NO: 3569880 - RNA, 21 nt, Human
auaggcgaucacaacgugcau

SEQ ID NO: 3569881 - RNA, 19 nt, Human
auaggcggggcuugccuuc

SEQ ID NO: 3569882 - RNA, 20 nt, Human
auaggcuauuuucuaaagac

SEQ ID NO: 3569883 - RNA, 19 nt, Human
auaggcucugcacagaugg

SEQ ID NO: 3569884 - RNA, 14 nt, Human
auaggcuggagaag

SEQ ID NO: 3569885 - RNA, 22 nt, Human
auagggaaaauucuaacccagg

SEQ ID NO: 3569886 - RNA, 21 nt, Human
auagggcaauuaauuccuuca

SEQ ID NO: 3569887 - RNA, 22 nt, Human
auagggccuggucccugggagg

SEQ ID NO: 3569888 - RNA, 17 nt, Human
auagggcugagcucucu

SEQ ID NO: 3569889 - RNA, 21 nt, Human
auagggcugggcaaggaaaaa

SEQ ID NO: 3569890 - RNA, 21 nt, Human
auagggucucuucagguucuu

SEQ ID NO: 3569891 - RNA, 23 nt, Human
auagguaaucaaugaauauugaa

SEQ ID NO: 3569892 - RNA, 20 nt, Human
auagguagaauguaaagcuu

SEQ ID NO: 3569893 - RNA, 20 nt, Human
auaggucacuggcucuccaa

SEQ ID NO: 3569894 - RNA, 16 nt, Human
auagguccuuuagaaa

SEQ ID NO: 3569895 - RNA, 14 nt, Human
auaggucucuucuc

SEQ ID NO: 3569896 - RNA, 20 nt, Human
auaggucucuucucccagaa

SEQ ID NO: 3569897 - RNA, 14 nt, Human
auaggucugaaauu

SEQ ID NO: 3569898 - RNA, 22 nt, Human
auagguguccagcauugcugga

SEQ ID NO: 3569899 - RNA, 17 nt, Human
auagguuagauauagag

SEQ ID NO: 3569900 - RNA, 22 nt, Human
auagguucuucuuguucugaga

SEQ ID NO: 3569901 - RNA, 13 nt, Human
auagguugagcaa

SEQ ID NO: 3569902 - RNA, 22 nt, Human
auagguugagcaauuucccccu

SEQ ID NO: 3569903 - RNA, 14 nt, Human
auaguaaaagaaau

SEQ ID NO: 3569904 - RNA, 16 nt, Human
auaguaaccuggguaa

SEQ ID NO: 3569905 - RNA, 16 nt, Human
auaguaacugacauga

SEQ ID NO: 3569906 - RNA, 19 nt, Human
auaguaacuucuuauggaa

SEQ ID NO: 3569907 - RNA, 14 nt, Human
auaguaauucucag

SEQ ID NO: 3569908 - RNA, 20 nt, Human
auaguacaugauaaaugaua

SEQ ID NO: 3569909 - RNA, 14 nt, Human
auaguaccauuuau

SEQ ID NO: 3569910 - RNA, 15 nt, Human
auaguacuaagcauu

SEQ ID NO: 3569911 - RNA, 16 nt, Human
auaguacuaagcauuu

SEQ ID NO: 3569912 - RNA, 23 nt, Human
auaguagaacgcuaucugggaag

SEQ ID NO: 3569913 - RNA, 21 nt, Human
auaguagagugauauggagca

SEQ ID NO: 3569914 - RNA, 13 nt, Human
auaguaguaugau

SEQ ID NO: 3569915 - RNA, 20 nt, Human
auaguauauuaaaaauggua

SEQ ID NO: 3569916 - RNA, 17 nt, Human
auaguauccuccagguu

SEQ ID NO: 3569917 - RNA, 15 nt, Human
auaguaugguggcug

SEQ ID NO: 3569918 - RNA, 21 nt, Human
auaguauuugagaguucuaaa

SEQ ID NO: 3569919 - RNA, 22 nt, Human
auaguauuugauucaaaauauu

SEQ ID NO: 3569920 - RNA, 20 nt, Human
auagucaaagagaguuuuua

SEQ ID NO: 3569921 - RNA, 17 nt, Human
auagucaaauuguguga

SEQ ID NO: 3569922 - RNA, 22 nt, Human
auagucaagaaaaauuauugua

SEQ ID NO: 3569923 - RNA, 19 nt, Human
auagucaauguuucuuuua

SEQ ID NO: 3569924 - RNA, 14 nt, Human
auagucacaagagc

SEQ ID NO: 3569925 - RNA, 15 nt, Human
auagucaccuuuuaa

SEQ ID NO: 3569926 - RNA, 22 nt, Human
auagucauguaagcugaaaaua

SEQ ID NO: 3569927 - RNA, 18 nt, Human
auagucuaagacuauaua

SEQ ID NO: 3569928 - RNA, 21 nt, Human
auagucuaagacuauauauau

SEQ ID NO: 3569929 - RNA, 23 nt, Human
auagucuaagacuauauauauaa

SEQ ID NO: 3569930 - RNA, 20 nt, Human
auagucuagauggcuccucu

SEQ ID NO: 3569931 - RNA, 14 nt, Human
auagucuaguguag

SEQ ID NO: 3569932 - RNA, 14 nt, Human
auagucuuuugcuu

SEQ ID NO: 3569933 - RNA, 18 nt, Human
auagucuuuuucaguucc

SEQ ID NO: 3569934 - RNA, 20 nt, Human
auagugaucaagaagacuuu

SEQ ID NO: 3569935 - RNA, 20 nt, Human
auagugauguaaucuugaau

SEQ ID NO: 3569936 - RNA, 15 nt, Human
auagugcaacuauga

SEQ ID NO: 3569937 - RNA, 15 nt, Human
auagugcaauauauu

SEQ ID NO: 3569938 - RNA, 21 nt, Human
auagugcuaacaugaagaccu

SEQ ID NO: 3569939 - RNA, 17 nt, Human
auaguggcuuaaaacaa

SEQ ID NO: 3569940 - RNA, 21 nt, Human
auagugguguuuuaaagagaa

SEQ ID NO: 3569941 - RNA, 15 nt, Human
auaguguaggcuuua

SEQ ID NO: 3569942 - RNA, 20 nt, Human
auaguguccuaugcaauaaa

SEQ ID NO: 3569943 - RNA, 22 nt, Human
auagugugaaauauauuacuua

SEQ ID NO: 3569944 - RNA, 23 nt, Human
auaguguggaaauuaagaagaaa

SEQ ID NO: 3569945 - RNA, 17 nt, Human
auaguguguucugauua

SEQ ID NO: 3569946 - RNA, 19 nt, Human
auaguguguucugauuaga

SEQ ID NO: 3569947 - RNA, 23 nt, Human
auaguguguucugauuagaaaug

SEQ ID NO: 3569948 - RNA, 16 nt, Human
auaguguuaaucaauu

SEQ ID NO: 3569949 - RNA, 22 nt, Human
auaguguucugcaaaaauauuu

SEQ ID NO: 3569950 - RNA, 14 nt, Human
auaguuaacacacu

SEQ ID NO: 3569951 - RNA, 22 nt, Human
auaguuaacauaguaaguucag

SEQ ID NO: 3569952 - RNA, 18 nt, Human
auaguucagaauuuagug

SEQ ID NO: 3569953 - RNA, 20 nt, Human
auaguucccaggugauauuu

SEQ ID NO: 3569954 - RNA, 16 nt, Human
auaguuccuaagaagc

SEQ ID NO: 3569955 - RNA, 14 nt, Human
auaguucuagacau

SEQ ID NO: 3569956 - RNA, 19 nt, Human
auaguucugagcugccagu

SEQ ID NO: 3569957 - RNA, 14 nt, Human
auaguucugcaggu

SEQ ID NO: 3569958 - RNA, 21 nt, Human
auaguugaauuagugaguaua

SEQ ID NO: 3569959 - RNA, 18 nt, Human
auaguugagccagcagac

SEQ ID NO: 3569960 - RNA, 21 nt, Human
auaguugagccagcagacauu

SEQ ID NO: 3569961 - RNA, 15 nt, Human
auaguugcuuuugaa

SEQ ID NO: 3569962 - RNA, 18 nt, Human
auaguuguagacaaagua

SEQ ID NO: 3569963 - RNA, 22 nt, Human
auaguugucaguauuauucuac

SEQ ID NO: 3569964 - RNA, 19 nt, Human
auaguuuauuuuaaaacaa

SEQ ID NO: 3569965 - RNA, 19 nt, Human
auaguuucugaggcuuuau

SEQ ID NO: 3569966 - RNA, 18 nt, Human
auaguuucuuuauuuugu

SEQ ID NO: 3569967 - RNA, 18 nt, Human
auaguuuggauauguaaa

SEQ ID NO: 3569968 - RNA, 13 nt, Human
auaguuuguacau

SEQ ID NO: 3569969 - RNA, 15 nt, Human
auaguuuguacaugc

SEQ ID NO: 3569970 - RNA, 15 nt, Human
auaguuugucuauuu

SEQ ID NO: 3569971 - RNA, 16 nt, Human
auaguuugucuauuuu

SEQ ID NO: 3569972 - RNA, 17 nt, Human
auaguuugucuauuuua

SEQ ID NO: 3569973 - RNA, 12 nt, Human
auaguuuguuau

SEQ ID NO: 3569974 - RNA, 23 nt, Human
auaguuuuacuuuuaaacugugu

SEQ ID NO: 3569975 - RNA, 16 nt, Human
auaguuuuauuuauau

SEQ ID NO: 3569976 - RNA, 22 nt, Human
auaguuuugaugacuggcauuu

SEQ ID NO: 3569977 - RNA, 18 nt, Human
auaguuuuuaagguuauu

SEQ ID NO: 3569978 - RNA, 14 nt, Human
auauaaaaaacuuu

SEQ ID NO: 3569979 - RNA, 20 nt, Human
auauaaaaagaaaagauaaa

SEQ ID NO: 3569980 - RNA, 15 nt, Human
auauaaaaauggcuu

SEQ ID NO: 3569981 - RNA, 17 nt, Human
auauaaaacuguacuuc

SEQ ID NO: 3569982 - RNA, 14 nt, Human
auauaaaauaaugc

SEQ ID NO: 3569983 - RNA, 21 nt, Human
auauaaaauaguuguccauau

SEQ ID NO: 3569984 - RNA, 14 nt, Human
auaucuccuuugua

SEQ ID NO: 3569985 - RNA, 13 nt, Human
auaucucuauuug

SEQ ID NO: 3569986 - RNA, 16 nt, Human
auaucucuauuugaga

SEQ ID NO: 3569987 - RNA, 17 nt, Human
auaucugaaaacuggaa

SEQ ID NO: 3569988 - RNA, 17 nt, Human
auaucugaaaauguaug

SEQ ID NO: 3569989 - RNA, 15 nt, Human
auaucugaaauguga

SEQ ID NO: 3569990 - RNA, 15 nt, Human
auaucugaggaauuc

SEQ ID NO: 3569991 - RNA, 16 nt, Human
auaucugaggaauucu

SEQ ID NO: 3569992 - RNA, 19 nt, Human
auaucugaggaauucugua

SEQ ID NO: 3569993 - RNA, 22 nt, Human
auaucugaggaauucuguauag

SEQ ID NO: 3569994 - RNA, 23 nt, Human
auaucugaggaauucuguauaga

SEQ ID NO: 3569995 - RNA, 14 nt, Human
auaucugauuguug

SEQ ID NO: 3569996 - RNA, 12 nt, Human
auaucugcaaaa

SEQ ID NO: 3569997 - RNA, 14 nt, Human
auaucugccuuuau

SEQ ID NO: 3569998 - RNA, 18 nt, Human
auaucugcuguccagaca

SEQ ID NO: 3569999 - RNA, 13 nt, Human
auaucugcuucag

SEQ ID NO: 3570000 - RNA, 13 nt, Human
auaucuggccucu

SEQ ID NO: 3570001 - RNA, 15 nt, Human
auaucuguauguauu

SEQ ID NO: 3570002 - RNA, 21 nt, Human
auaucuguauguauuagugau

SEQ ID NO: 3570003 - RNA, 12 nt, Human
auaucugugaaa

SEQ ID NO: 3570004 - RNA, 19 nt, Human
auaucuguuagaugcuacu

SEQ ID NO: 3570005 - RNA, 20 nt, Human
auaucuguuagaugcuacua

SEQ ID NO: 3570006 - RNA, 17 nt, Human
auaucuuaauauauuuc

SEQ ID NO: 3570007 - RNA, 16 nt, Human
auaucuucauuucuaa

SEQ ID NO: 3570008 - RNA, 19 nt, Human
auaucuucugauuuguccc

SEQ ID NO: 3570009 - RNA, 15 nt, Human
auaucuuggcaggua

SEQ ID NO: 3570010 - RNA, 13 nt, Human
auaucuuuauuaa

SEQ ID NO: 3570011 - RNA, 22 nt, Human
auaucuuugugauaauuuaaga

SEQ ID NO: 3570012 - RNA, 21 nt, Human
auaucuuuuauguuugaauau

SEQ ID NO: 3570013 - RNA, 14 nt, Human
auaucuuuuuauug

SEQ ID NO: 3570014 - RNA, 13 nt, Human
auaugaaaacuau

SEQ ID NO: 3570015 - RNA, 20 nt, Human
auaugaaagucuuauuaaaa

SEQ ID NO: 3570016 - RNA, 14 nt, Human
auaugaaauuuaau

SEQ ID NO: 3570017 - RNA, 19 nt, Human
auaugaacauacaaaugca

SEQ ID NO: 3570018 - RNA, 14 nt, Human
auaugaagacauaa

SEQ ID NO: 3570019 - RNA, 17 nt, Human
auaugaagcucaccugu

SEQ ID NO: 3570020 - RNA, 21 nt, Human
auaugaagcucaccuguugcu

SEQ ID NO: 3570021 - RNA, 23 nt, Human
auaugaaguaucuaaaaguguca

SEQ ID NO: 3570022 - RNA, 19 nt, Human
auaugaaguuacuuucuua

SEQ ID NO: 3570023 - RNA, 16 nt, Human
auaugacaaauguuuc

SEQ ID NO: 3570024 - RNA, 15 nt, Human
auaugacagcugucc

SEQ ID NO: 3570025 - RNA, 15 nt, Human
auaugacuuuuuaua

SEQ ID NO: 3570026 - RNA, 15 nt, Human
auaugaguacaaaug

SEQ ID NO: 3570027 - RNA, 13 nt, Human
auaugaguauaca

SEQ ID NO: 3570028 - RNA, 21 nt, Human
auaugaguauacaauauauaa

SEQ ID NO: 3570029 - RNA, 22 nt, Human
auaugaguauacaauauauaaa

SEQ ID NO: 3570030 - RNA, 15 nt, Human
auaugaucugucugu

SEQ ID NO: 3570031 - RNA, 13 nt, Human
auaugaucuguuu

SEQ ID NO: 3570032 - RNA, 15 nt, Human
auaugauguuaaaaa

SEQ ID NO: 3570033 - RNA, 12 nt, Human
auaugauucaaa

SEQ ID NO: 3570034 - RNA, 15 nt, Human
auaugauuggcaaua

SEQ ID NO: 3570035 - RNA, 13 nt, Human
auaugauuuaaaa

SEQ ID NO: 3570036 - RNA, 23 nt, Human
auaugauuucacuagaaaagcug

SEQ ID NO: 3570037 - RNA, 16 nt, Human
auaugauuuuauuuga

SEQ ID NO: 3570038 - RNA, 17 nt, Human
auaugauuuuuuaaaag

SEQ ID NO: 3570039 - RNA, 22 nt, Human
auaugcaaacauaacaaaauca

SEQ ID NO: 3570040 - RNA, 13 nt, Human
auaugcaaagcac

SEQ ID NO: 3570041 - RNA, 16 nt, Human
auaugcaaagcacuga

SEQ ID NO: 3570042 - RNA, 14 nt, Human
auaugcaacauugu

SEQ ID NO: 3570043 - RNA, 15 nt, Human
auaugcacaauagca

SEQ ID NO: 3570044 - RNA, 13 nt, Human
auaugcacacauu

SEQ ID NO: 3570045 - RNA, 14 nt, Human
auaugcacacauuu

SEQ ID NO: 3570046 - RNA, 19 nt, Human
auaugcaccuugugucugu

SEQ ID NO: 3570047 - RNA, 16 nt, Human
auaugcacuauguaua

SEQ ID NO: 3570048 - RNA, 20 nt, Human
auaugcaguaaaagaaagaa

SEQ ID NO: 3570049 - RNA, 16 nt, Human
auaugcaguuuuccuu

SEQ ID NO: 3570050 - RNA, 15 nt, Human
auaugcauauauaua

SEQ ID NO: 3570051 - RNA, 14 nt, Human
auaugcauauuugu

SEQ ID NO: 3570052 - RNA, 15 nt, Human
auaugcuaauuuggg

SEQ ID NO: 3570053 - RNA, 17 nt, Human
auaugcuaauuugggga

SEQ ID NO: 3570054 - RNA, 16 nt, Human
auaugcuaccaccagc

SEQ ID NO: 3570055 - RNA, 15 nt, Human
auaugcugcaacaaa

SEQ ID NO: 3570056 - RNA, 12 nt, Human
auaugcugcuca

SEQ ID NO: 3570057 - RNA, 19 nt, Human
auaugcuuauacacuuaca

SEQ ID NO: 3570058 - RNA, 23 nt, Human
auaugcuucuguuuuauaauuuu

SEQ ID NO: 3570059 - RNA, 20 nt, Human
auaugcuuuauuaauguuuu

SEQ ID NO: 3570060 - RNA, 14 nt, Human
auauggaagaaagu

SEQ ID NO: 3570061 - RNA, 16 nt, Human
auauggaagaaaguaa

SEQ ID NO: 3570062 - RNA, 22 nt, Human
auauggacaaaacaagaaagac

SEQ ID NO: 3570063 - RNA, 15 nt, Human
auauggacacuuaau

SEQ ID NO: 3570064 - RNA, 18 nt, Human
auauggacucaguuuucu

SEQ ID NO: 3570065 - RNA, 16 nt, Human
auauggacucugcaca

SEQ ID NO: 3570066 - RNA, 18 nt, Human
auauggagaauugcugaa

SEQ ID NO: 3570067 - RNA, 21 nt, Human
auauggagaauugcugaaggg

SEQ ID NO: 3570068 - RNA, 18 nt, Human
auauggauauuagucaua

SEQ ID NO: 3570069 - RNA, 12 nt, Human
auauggauguua

SEQ ID NO: 3570070 - RNA, 14 nt, Human
auauggauguuacu

SEQ ID NO: 3570071 - RNA, 22 nt, Human
auauggauguuacucucuugca

SEQ ID NO: 3570072 - RNA, 13 nt, Human
auauggcaagaaa

SEQ ID NO: 3570073 - RNA, 12 nt, Human
auauggcagaag

SEQ ID NO: 3570074 - RNA, 17 nt, Human
auauggcagaagacacc

SEQ ID NO: 3570075 - RNA, 20 nt, Human
auauggcagaguuguaaaua

SEQ ID NO: 3570076 - RNA, 22 nt, Human
auauggcagaguuguaaauaua

SEQ ID NO: 3570077 - RNA, 15 nt, Human
auauggcauuugcag

SEQ ID NO: 3570078 - RNA, 15 nt, Human
auauggccucaagau

SEQ ID NO: 3570079 - RNA, 16 nt, Human
auauggccucaagauc

SEQ ID NO: 3570080 - RNA, 23 nt, Human
auaugggaacacuggcagacugu

SEQ ID NO: 3570081 - RNA, 17 nt, Human
auaugggacauuuuuga

SEQ ID NO: 3570082 - RNA, 20 nt, Human
auauggggaugguaguuuuu

SEQ ID NO: 3570083 - RNA, 16 nt, Human
auauggguaguauuuu

SEQ ID NO: 3570084 - RNA, 23 nt, Human
auauggguuagauguugccaugu

SEQ ID NO: 3570085 - RNA, 18 nt, Human
auaugguauauauacaua

SEQ ID NO: 3570086 - RNA, 19 nt, Human
auaugguauauauacauau

SEQ ID NO: 3570087 - RNA, 13 nt, Human
auauggucuaaug

SEQ ID NO: 3570088 - RNA, 21 nt, Human
auauggugguaauaagggaaa

SEQ ID NO: 3570089 - RNA, 13 nt, Human
auauguaaaacau

SEQ ID NO: 3570090 - RNA, 14 nt, Human
auauguaaaacauu

SEQ ID NO: 3570091 - RNA, 16 nt, Human
auauguaaaacauuua

SEQ ID NO: 3570092 - RNA, 24 nt, Human
auauguaaaacauuuauuuugaca

SEQ ID NO: 3570093 - RNA, 14 nt, Human
auauguaaaauaaa

SEQ ID NO: 3570094 - RNA, 14 nt, Human
auauguaagggaaa

SEQ ID NO: 3570095 - RNA, 14 nt, Human
auauguacaguuau

SEQ ID NO: 3570096 - RNA, 13 nt, Human
auauguacauuuc

SEQ ID NO: 3570097 - RNA, 17 nt, Human
auauguacccucugaaa

SEQ ID NO: 3570098 - RNA, 19 nt, Human
auauguacccucugaaaua

SEQ ID NO: 3570099 - RNA, 20 nt, Human
auauguacccucugaaauac

SEQ ID NO: 3570100 - RNA, 21 nt, Human
auauguacccucugaaauaca

SEQ ID NO: 3570101 - RNA, 20 nt, Human
auauguacuugucaaagaag

SEQ ID NO: 3570102 - RNA, 17 nt, Human
auauguagacuauauac

SEQ ID NO: 3570103 - RNA, 23 nt, Human
auauguagacuauauacaugugu

SEQ ID NO: 3570104 - RNA, 20 nt, Human
auauguagauguaugcacac

SEQ ID NO: 3570105 - RNA, 17 nt, Human
auauguagcagaaaggc

SEQ ID NO: 3570106 - RNA, 17 nt, Human
auauguaggugucugca

SEQ ID NO: 3570107 - RNA, 18 nt, Human
auauguaguauaaagaaa

SEQ ID NO: 3570108 - RNA, 15 nt, Human
auauguaguaucuau

SEQ ID NO: 3570109 - RNA, 23 nt, Human
auauguauauuuuuuuaauuuaa

SEQ ID NO: 3570110 - RNA, 22 nt, Human
auauguauccaguacauuuaau

SEQ ID NO: 3570111 - RNA, 17 nt, Human
auauguauggguagggu

SEQ ID NO: 3570112 - RNA, 14 nt, Human
auauguaugguuuu

SEQ ID NO: 3570113 - RNA, 14 nt, Human
auauguauuaauaa

SEQ ID NO: 3570114 - RNA, 16 nt, Human
auauguauuaauauuc

SEQ ID NO: 3570115 - RNA, 18 nt, Human
auauguauuauuuauaau

SEQ ID NO: 3570116 - RNA, 21 nt, Human
auauguauucuguaaaagaaa

SEQ ID NO: 3570117 - RNA, 14 nt, Human
auauguauucuuuu

SEQ ID NO: 3570118 - RNA, 18 nt, Human
auauguauuuuauguaug

SEQ ID NO: 3570119 - RNA, 14 nt, Human
auaugucagugcug

SEQ ID NO: 3570120 - RNA, 19 nt, Human
auaugugaacauuuaucaa

SEQ ID NO: 3570121 - RNA, 18 nt, Human
auaugugaacgcccagag

SEQ ID NO: 3570122 - RNA, 22 nt, Human
auaugugaaggaccuucacucu

SEQ ID NO: 3570123 - RNA, 20 nt, Human
auaugugagugccuuuugca

SEQ ID NO: 3570124 - RNA, 21 nt, Human
auaugugaucugucuuguaau

SEQ ID NO: 3570125 - RNA, 12 nt, Human
auaugugauuuu

SEQ ID NO: 3570126 - RNA, 20 nt, Human
auauguggaguucaucuuga

SEQ ID NO: 3570127 - RNA, 16 nt, Human
auauguguauauauac

SEQ ID NO: 3570128 - RNA, 19 nt, Human
auauguguauauauacaua

SEQ ID NO: 3570129 - RNA, 22 nt, Human
auauguguauauauacauacac

SEQ ID NO: 3570130 - RNA, 14 nt, Human
agccagauuucacu

SEQ ID NO: 3570131 - RNA, 20 nt, Human
agccagauuucacucuccuu

SEQ ID NO: 3570132 - RNA, 22 nt, Human
agccagauuucacucuccuugg

SEQ ID NO: 3570133 - RNA, 18 nt, Human
agccagauuuuuuaaaau

SEQ ID NO: 3570134 - RNA, 23 nt, Human
agccagauuuuuuaaaauuuaua

SEQ ID NO: 3570135 - RNA, 16 nt, Human
agccagcaccggacca

SEQ ID NO: 3570136 - RNA, 24 nt, Human
agccagcaccggaccagccuggcc

SEQ ID NO: 3570137 - RNA, 16 nt, Human
agccagcagacauugu

SEQ ID NO: 3570138 - RNA, 17 nt, Human
agccagcagacauuguc

SEQ ID NO: 3570139 - RNA, 18 nt, Human
agccagcagcagcccaag

SEQ ID NO: 3570140 - RNA, 11 nt, Human
agccagcagcc

SEQ ID NO: 3570141 - RNA, 14 nt, Human
agccagcaguucag

SEQ ID NO: 3570142 - RNA, 19 nt, Human
agccagcaguucagagcug

SEQ ID NO: 3570143 - RNA, 23 nt, Human
agccagccaaacacacagaaggg

SEQ ID NO: 3570144 - RNA, 24 nt, Human
agccagccaagcuuuaaauuaugu

SEQ ID NO: 3570145 - RNA, 11 nt, Human
agccagccacu

SEQ ID NO: 3570146 - RNA, 16 nt, Human
agccagccccucuucc

SEQ ID NO: 3570147 - RNA, 17 nt, Human
agccagccccucuuccc

SEQ ID NO: 3570148 - RNA, 20 nt, Human
agccagcccucccuguccuc

SEQ ID NO: 3570149 - RNA, 13 nt, Human
agccagcccugcc

SEQ ID NO: 3570150 - RNA, 14 nt, Human
agccagcccugccu

SEQ ID NO: 3570151 - RNA, 15 nt, Human
agccagcccugccug

SEQ ID NO: 3570152 - RNA, 16 nt, Human
agccagcccugccugg

SEQ ID NO: 3570153 - RNA, 23 nt, Human
agccagcccugccuggaggaccu

SEQ ID NO: 3570154 - RNA, 16 nt, Human
agccagccggggcgag

SEQ ID NO: 3570155 - RNA, 10 nt, Human
agccagccuc

SEQ ID NO: 3570156 - RNA, 11 nt, Human
agccagccuga

SEQ ID NO: 3570157 - RNA, 15 nt, Human
agccagccuggcugg

SEQ ID NO: 3570158 - RNA, 12 nt, Human
agccagccuggu

SEQ ID NO: 3570159 - RNA, 13 nt, Human
agccagccugguc

SEQ ID NO: 3570160 - RNA, 14 nt, Human
agccagcgccuccc

SEQ ID NO: 3570161 - RNA, 17 nt, Human
agccagcgccucccucc

SEQ ID NO: 3570162 - RNA, 18 nt, Human
agccagcgccucccucca

SEQ ID NO: 3570163 - RNA, 19 nt, Human
agccagcgccucccuccac

SEQ ID NO: 3570164 - RNA, 15 nt, Human
agccagcucauuuca

SEQ ID NO: 3570165 - RNA, 15 nt, Human
agccagcucccucua

SEQ ID NO: 3570166 - RNA, 13 nt, Human
agccagcucucag

SEQ ID NO: 3570167 - RNA, 16 nt, Human
agccagcucucagcca

SEQ ID NO: 3570168 - RNA, 19 nt, Human
agccagcugcagcugggcu

SEQ ID NO: 3570169 - RNA, 14 nt, Human
agccagcugccccc

SEQ ID NO: 3570170 - RNA, 14 nt, Human
agccagcugcccua

SEQ ID NO: 3570171 - RNA, 12 nt, Human
agccagcugccu

SEQ ID NO: 3570172 - RNA, 16 nt, Human
agccagcugcucccca

SEQ ID NO: 3570173 - RNA, 18 nt, Human
agccagcuuucccugccu

SEQ ID NO: 3570174 - RNA, 16 nt, Human
agcccagcugggucag

SEQ ID NO: 3570175 - RNA, 17 nt, Human
agcccagcugggucagg

SEQ ID NO: 3570176 - RNA, 19 nt, Human
agcccagcugggucaggca

SEQ ID NO: 3570177 - RNA, 24 nt, Human
agcccaggaauuugaagcugcagu

SEQ ID NO: 3570178 - RNA, 12 nt, Human
agcccaggagcc

SEQ ID NO: 3570179 - RNA, 15 nt, Human
agcccaggagcccau

SEQ ID NO: 3570180 - RNA, 15 nt, Human
agcccaggagccuca

SEQ ID NO: 3570181 - RNA, 14 nt, Human
agcccaggagcucc

SEQ ID NO: 3570182 - RNA, 22 nt, Human
agcccaggagucccacuccaag

SEQ ID NO: 3570183 - RNA, 19 nt, Human
agcccaggaguuugaggcu

SEQ ID NO: 3570184 - RNA, 15 nt, Human
agcccaggccaggac

SEQ ID NO: 3570185 - RNA, 22 nt, Human
agcccaggccgggguggagcau

SEQ ID NO: 3570186 - RNA, 18 nt, Human
agcccaggccuccagcuc

SEQ ID NO: 3570187 - RNA, 19 nt, Human
agcccaggccuccagcuca

SEQ ID NO: 3570188 - RNA, 22 nt, Human
agcccaggccuccagcucagca

SEQ ID NO: 3570189 - RNA, 14 nt, Human
agcccaggccuccu

SEQ ID NO: 3570190 - RNA, 19 nt, Human
agcccaggccuccuacagc

SEQ ID NO: 3570191 - RNA, 20 nt, Human
agcccaggcuggagugcaau

SEQ ID NO: 3570192 - RNA, 20 nt, Human
agcccagggagcggaaagca

SEQ ID NO: 3570193 - RNA, 21 nt, Human
agcccagggagcggaaagcag

SEQ ID NO: 3570194 - RNA, 23 nt, Human
agcccagggagcggaaagcagcu

SEQ ID NO: 3570195 - RNA, 19 nt, Human
agcccagggcaucuugcug

SEQ ID NO: 3570196 - RNA, 22 nt, Human
agcccagggcaucuugcuggcu

SEQ ID NO: 3570197 - RNA, 23 nt, Human
agcccagggcuccugcacuuacu

SEQ ID NO: 3570198 - RNA, 23 nt, Human
agcccaggguucccccagcccug

SEQ ID NO: 3570199 - RNA, 18 nt, Human
agcccagugcacugaaag

SEQ ID NO: 3570200 - RNA, 20 nt, Human
agcccauccauuaggccagc

SEQ ID NO: 3570201 - RNA, 23 nt, Human
agcccauccauuaggccagcaac

SEQ ID NO: 3570202 - RNA, 13 nt, Human
agcccaucccugc

SEQ ID NO: 3570203 - RNA, 18 nt, Human
agcccauccuucccuuug

SEQ ID NO: 3570204 - RNA, 18 nt, Human
agcccaucgccacaaacu

SEQ ID NO: 3570205 - RNA, 15 nt, Human
agcccaucucggagc

SEQ ID NO: 3570206 - RNA, 17 nt, Human
agcccaucuugccucca

SEQ ID NO: 3570207 - RNA, 19 nt, Human
agcccaucuugccuccaug

SEQ ID NO: 3570208 - RNA, 19 nt, Human
agcccauggcccucccagu

SEQ ID NO: 3570209 - RNA, 19 nt, Human
agcccauguggcuaaaaaa

SEQ ID NO: 3570210 - RNA, 20 nt, Human
agcccauguucugcccccag

SEQ ID NO: 3570211 - RNA, 23 nt, Human
agcccauucauuccauucuggaa

SEQ ID NO: 3570212 - RNA, 15 nt, Human
agcccauucucucuc

SEQ ID NO: 3570213 - RNA, 21 nt, Human
agcccauucucucuccugucc

SEQ ID NO: 3570214 - RNA, 22 nt, Human
agcccauucucucuccugucca

SEQ ID NO: 3570215 - RNA, 16 nt, Human
agcccauuucuccaga

SEQ ID NO: 3570216 - RNA, 17 nt, Human
agcccauuucuccagaa

SEQ ID NO: 3570217 - RNA, 21 nt, Human
agcccauuucuccagaaccca

SEQ ID NO: 3570218 - RNA, 17 nt, Human
agccccaaaacucuccu

SEQ ID NO: 3570219 - RNA, 20 nt, Human
agccccaaaacucuccucug

SEQ ID NO: 3570220 - RNA, 17 nt, Human
agccccaagaaggcugg

SEQ ID NO: 3570221 - RNA, 22 nt, Human
agccccacaccagggccagccu

SEQ ID NO: 3570222 - RNA, 15 nt, Human
agccccacacggagg

SEQ ID NO: 3570223 - RNA, 17 nt, Human
agccccacauguccagc

SEQ ID NO: 3570224 - RNA, 12 nt, Human
agccccacccag

SEQ ID NO: 3570225 - RNA, 16 nt, Human
agccccacccaggagg

SEQ ID NO: 3570226 - RNA, 14 nt, Human
agccccacccaggc

SEQ ID NO: 3570227 - RNA, 14 nt, Human
agccccaccccagg

SEQ ID NO: 3570228 - RNA, 16 nt, Human
agccccacccuggccu

SEQ ID NO: 3570229 - RNA, 13 nt, Human
agccccacuccuc

SEQ ID NO: 3570230 - RNA, 18 nt, Human
agccccacugccagcagc

SEQ ID NO: 3570231 - RNA, 15 nt, Human
agccccacugcccuu

SEQ ID NO: 3570232 - RNA, 14 nt, Human
agccccagcccagc

SEQ ID NO: 3570233 - RNA, 12 nt, Human
agccccagcccc

SEQ ID NO: 3570234 - RNA, 12 nt, Human
agccccagccug

SEQ ID NO: 3570235 - RNA, 13 nt, Human
agccccagccugc

SEQ ID NO: 3570236 - RNA, 18 nt, Human
agccccaggccucugugu

SEQ ID NO: 3570237 - RNA, 18 nt, Human
agccccagggucuucccu

SEQ ID NO: 3570238 - RNA, 20 nt, Human
agccccagggucuucccuac

SEQ ID NO: 3570239 - RNA, 22 nt, Human
agccccagggucuucccuaccu

SEQ ID NO: 3570240 - RNA, 13 nt, Human
agccccagugcca

SEQ ID NO: 3570241 - RNA, 20 nt, Human
agccccagugccaagcacag

SEQ ID NO: 3570242 - RNA, 14 nt, Human
agccccagugccca

SEQ ID NO: 3570243 - RNA, 15 nt, Human
agccccagugcccac

SEQ ID NO: 3570244 - RNA, 11 nt, Human
agccccauccu

SEQ ID NO: 3570245 - RNA, 12 nt, Human
agccccaucugu

SEQ ID NO: 3570246 - RNA, 15 nt, Human
agccccaucugugca

SEQ ID NO: 3570247 - RNA, 14 nt, Human
agccccaugcugga

SEQ ID NO: 3570248 - RNA, 13 nt, Human
agccccauuccug

SEQ ID NO: 3570249 - RNA, 16 nt, Human
agccccauucugccug

SEQ ID NO: 3570250 - RNA, 17 nt, Human
agccccauucugccugc

SEQ ID NO: 3570251 - RNA, 20 nt, Human
agccccauucugccugccca

SEQ ID NO: 3570252 - RNA, 22 nt, Human
agccccauucugccugcccagg

SEQ ID NO: 3570253 - RNA, 16 nt, Human
agcccccacagugcug

SEQ ID NO: 3570254 - RNA, 19 nt, Human
agcccccacagugcugucu

SEQ ID NO: 3570255 - RNA, 13 nt, Human
agcccccacccug

SEQ ID NO: 3570256 - RNA, 18 nt, Human
agcccccacccuguuccu

SEQ ID NO: 3570257 - RNA, 19 nt, Human
agcccccacccuguuccug

SEQ ID NO: 3570258 - RNA, 12 nt, Human
agcccccagagc

SEQ ID NO: 3570259 - RNA, 18 nt, Human
agcccccagagcccaggc

SEQ ID NO: 3570260 - RNA, 16 nt, Human
agcccccagcuuccag

SEQ ID NO: 3570261 - RNA, 21 nt, Human
agcccccaggaagcccaggag

SEQ ID NO: 3570262 - RNA, 13 nt, Human
agcccccccuucc

SEQ ID NO: 3570263 - RNA, 20 nt, Human
agcccccuccuggugccacc

SEQ ID NO: 3570264 - RNA, 16 nt, Human
agcccccuccuugucu

SEQ ID NO: 3570265 - RNA, 21 nt, Human
agcccccugaccacucagaga

SEQ ID NO: 3570266 - RNA, 14 nt, Human
agcccccugcuuca

SEQ ID NO: 3570267 - RNA, 15 nt, Human
agcccccuggccucu

SEQ ID NO: 3570268 - RNA, 22 nt, Human
agcccccuggucuuugagcucc

SEQ ID NO: 3570269 - RNA, 18 nt, Human
agcccccuuugggcccag

SEQ ID NO: 3570270 - RNA, 19 nt, Human
agcccccuuugggcccagg

SEQ ID NO: 3570271 - RNA, 17 nt, Human
agccccgacuccagcca

SEQ ID NO: 3570272 - RNA, 20 nt, Human
agccccgacuccagccagcg

SEQ ID NO: 3570273 - RNA, 21 nt, Human
agccccgacuccagccagcgc

SEQ ID NO: 3570274 - RNA, 14 nt, Human
agccccgcagaccu

SEQ ID NO: 3570275 - RNA, 16 nt, Human
agccccgcagaccucc

SEQ ID NO: 3570276 - RNA, 19 nt, Human
agccccgcagaccucccca

SEQ ID NO: 3570277 - RNA, 20 nt, Human
agccccgcccucuuccugac

SEQ ID NO: 3570278 - RNA, 22 nt, Human
agccccgcccucuuccugacga

SEQ ID NO: 3570279 - RNA, 15 nt, Human
agccccgcgccuccu

SEQ ID NO: 3570280 - RNA, 17 nt, Human
agccccgguggcugggc

SEQ ID NO: 3570281 - RNA, 22 nt, Human
agccccuaagucaacuuagcau

SEQ ID NO: 3570282 - RNA, 17 nt, Human
agccccuacugcuguga

SEQ ID NO: 3570283 - RNA, 14 nt, Human
agccccuagcccag

SEQ ID NO: 3570284 - RNA, 15 nt, Human
agccccuagcccagg

SEQ ID NO: 3570285 - RNA, 19 nt, Human
agccccuagcccaggagag

SEQ ID NO: 3570286 - RNA, 23 nt, Human
agccccuagcccaggagagagaa

SEQ ID NO: 3570287 - RNA, 13 nt, Human
agccccucccacc

SEQ ID NO: 3570288 - RNA, 14 nt, Human
agccccucccacca

SEQ ID NO: 3570289 - RNA, 17 nt, Human
agccucuguuuugauau

SEQ ID NO: 3570290 - RNA, 20 nt, Human
agccucuucugccaagagag

SEQ ID NO: 3570291 - RNA, 21 nt, Human
agccucuuucccuuccaguuu

SEQ ID NO: 3570292 - RNA, 22 nt, Human
agccugaaauagugguucuugg

SEQ ID NO: 3570293 - RNA, 18 nt, Human
agccugaaccccagggcu

SEQ ID NO: 3570294 - RNA, 17 nt, Human
agccugacaacauuucu

SEQ ID NO: 3570295 - RNA, 18 nt, Human
agccugacagccagaacu

SEQ ID NO: 3570296 - RNA, 18 nt, Human
agccugacccucaucuuu

SEQ ID NO: 3570297 - RNA, 16 nt, Human
agccugaccuuccuuc

SEQ ID NO: 3570298 - RNA, 21 nt, Human
agccugaccuuccuuccuguu

SEQ ID NO: 3570299 - RNA, 18 nt, Human
agccugagcgacagugag

SEQ ID NO: 3570300 - RNA, 11 nt, Human
agccugaggcu

SEQ ID NO: 3570301 - RNA, 19 nt, Human
agccugagggaaaggccag

SEQ ID NO: 3570302 - RNA, 20 nt, Human
agccugagggaaaggccagc

SEQ ID NO: 3570303 - RNA, 17 nt, Human
agccugagucagggccc

SEQ ID NO: 3570304 - RNA, 15 nt, Human
agccugagucuccug

SEQ ID NO: 3570305 - RNA, 16 nt, Human
agccugagucuccugu

SEQ ID NO: 3570306 - RNA, 17 nt, Human
agccugagucuccugug

SEQ ID NO: 3570307 - RNA, 18 nt, Human
agccugaucaccugcccu

SEQ ID NO: 3570308 - RNA, 19 nt, Human
agccugaucaccugcccug

SEQ ID NO: 3570309 - RNA, 18 nt, Human
agccugaucucuuccugu

SEQ ID NO: 3570310 - RNA, 19 nt, Human
agccugaugagauuuuuaa

SEQ ID NO: 3570311 - RNA, 14 nt, Human
agccugauuaaaga

SEQ ID NO: 3570312 - RNA, 16 nt, Human
agccugcacggugaau

SEQ ID NO: 3570313 - RNA, 17 nt, Human
agccugcacuuugaugu

SEQ ID NO: 3570314 - RNA, 23 nt, Human
agccugcacuuugaugucaugug

SEQ ID NO: 3570315 - RNA, 14 nt, Human
agccugcagcagga

SEQ ID NO: 3570316 - RNA, 19 nt, Human
agccugcagggaagcccca

SEQ ID NO: 3570317 - RNA, 19 nt, Human
agccugcaggguggugcug

SEQ ID NO: 3570318 - RNA, 22 nt, Human
agccugcaggguggugcuggga

SEQ ID NO: 3570319 - RNA, 23 nt, Human
agccugcaggguggugcugggac

SEQ ID NO: 3570320 - RNA, 15 nt, Human
agccugcaggugcug

SEQ ID NO: 3570321 - RNA, 23 nt, Human
agccugcaguuauuaacacuaac

SEQ ID NO: 3570322 - RNA, 21 nt, Human
agccugcaucccaggaugcug

SEQ ID NO: 3570323 - RNA, 15 nt, Human
agccugcauugagcu

SEQ ID NO: 3570324 - RNA, 22 nt, Human
agccugcauugagcuugcaugc

SEQ ID NO: 3570325 - RNA, 19 nt, Human
agccugccccagcgcugac

SEQ ID NO: 3570326 - RNA, 12 nt, Human
agccugcccucc

SEQ ID NO: 3570327 - RNA, 23 nt, Human
agccugcccuugucugagaugcu

SEQ ID NO: 3570328 - RNA, 14 nt, Human
agccugccuggagc

SEQ ID NO: 3570329 - RNA, 21 nt, Human
agccugcgccaccgcccagag

SEQ ID NO: 3570330 - RNA, 17 nt, Human
agccugcgccugcugca

SEQ ID NO: 3570331 - RNA, 18 nt, Human
agccugcguggcugaccc

SEQ ID NO: 3570332 - RNA, 21 nt, Human
agccugcguugguccagagcg

SEQ ID NO: 3570333 - RNA, 13 nt, Human
agccugcuagcua

SEQ ID NO: 3570334 - RNA, 18 nt, Human
agccugcuagcuagcuca

SEQ ID NO: 3570335 - RNA, 14 nt, Human
agccugcuccagcu

SEQ ID NO: 3570336 - RNA, 11 nt, Human
agccugcuccc

SEQ ID NO: 3570337 - RNA, 14 nt, Human
agccugcuccccca

SEQ ID NO: 3570338 - RNA, 21 nt, Human
agccugcucccccacccccuc

SEQ ID NO: 3570339 - RNA, 23 nt, Human
agccugcucccccacccccuccc

SEQ ID NO: 3570340 - RNA, 13 nt, Human
agccugcugccca

SEQ ID NO: 3570341 - RNA, 12 nt, Human
agccugcuggaa

SEQ ID NO: 3570342 - RNA, 23 nt, Human
agccugcuggucacagccuccuc

SEQ ID NO: 3570343 - RNA, 19 nt, Human
agccugcuucccaccuccc

SEQ ID NO: 3570344 - RNA, 16 nt, Human
agccuggacccccagc

SEQ ID NO: 3570345 - RNA, 17 nt, Human
agccuggacccccagcu

SEQ ID NO: 3570346 - RNA, 22 nt, Human
agccuggaccucugacagcagc

SEQ ID NO: 3570347 - RNA, 11 nt, Human
agccuggagaa

SEQ ID NO: 3570348 - RNA, 14 nt, Human
agccuggagaagcu

SEQ ID NO: 3570349 - RNA, 18 nt, Human
agccuggagcccuggaga

SEQ ID NO: 3570350 - RNA, 23 nt, Human
agccuggaggccgggugcucagg

SEQ ID NO: 3570351 - RNA, 11 nt, Human
agccuggaugc

SEQ ID NO: 3570352 - RNA, 17 nt, Human
agccuggcacagggcag

SEQ ID NO: 3570353 - RNA, 18 nt, Human
agccuggcacagggcagu

SEQ ID NO: 3570354 - RNA, 20 nt, Human
agccuggccaacauggcgaa

SEQ ID NO: 3570355 - RNA, 14 nt, Human
agccuggccagaca

SEQ ID NO: 3570356 - RNA, 15 nt, Human
agccuggccagacac

SEQ ID NO: 3570357 - RNA, 17 nt, Human
agccuggccccaugguc

SEQ ID NO: 3570358 - RNA, 11 nt, Human
agccuggcucc

SEQ ID NO: 3570359 - RNA, 22 nt, Human
agccuggcucccacaggcagcu

SEQ ID NO: 3570360 - RNA, 23 nt, Human
agccuggcucccacaggcagcuu

SEQ ID NO: 3570361 - RNA, 19 nt, Human
agccuggcucccaggacac

SEQ ID NO: 3570362 - RNA, 12 nt, Human
agccuggcucuu

SEQ ID NO: 3570363 - RNA, 17 nt, Human
agccuggcugcccauca

SEQ ID NO: 3570364 - RNA, 18 nt, Human
agccuggcuucaaauugu

SEQ ID NO: 3570365 - RNA, 19 nt, Human
agccuggcuucuggagccc

SEQ ID NO: 3570366 - RNA, 23 nt, Human
agccuggcuucuggagcccuugg

SEQ ID NO: 3570367 - RNA, 19 nt, Human
agccugggaaagccccugc

SEQ ID NO: 3570368 - RNA, 15 nt, Human
agccugggaaauaag

SEQ ID NO: 3570369 - RNA, 21 nt, Human
agccugggaaauaagcccccu

SEQ ID NO: 3570370 - RNA, 22 nt, Human
agccugggaggcacagcaaacu

SEQ ID NO: 3570371 - RNA, 12 nt, Human
agccugggaggu

SEQ ID NO: 3570372 - RNA, 17 nt, Human
agccugggcaacagagc

SEQ ID NO: 3570373 - RNA, 18 nt, Human
agccugggcaaugugaua

SEQ ID NO: 3570374 - RNA, 17 nt, Human
agccugggcagccaggc

SEQ ID NO: 3570375 - RNA, 11 nt, Human
agccugggccc

SEQ ID NO: 3570376 - RNA, 19 nt, Human
agccugggccuauggagag

SEQ ID NO: 3570377 - RNA, 24 nt, Human
agccugggccuauggagagcccug

SEQ ID NO: 3570378 - RNA, 15 nt, Human
agccuggggccuggc

SEQ ID NO: 3570379 - RNA, 19 nt, Human
agccuggggccuggcaggg

SEQ ID NO: 3570380 - RNA, 13 nt, Human
agccuggggcucu

SEQ ID NO: 3570381 - RNA, 22 nt, Human
agccuggggcucuaacgccuga

SEQ ID NO: 3570382 - RNA, 23 nt, Human
agccuggggcucuaacgccugag

SEQ ID NO: 3570383 - RNA, 20 nt, Human
agccugggggccuggcuggc

SEQ ID NO: 3570384 - RNA, 22 nt, Human
agccugggggccuggcuggcug

SEQ ID NO: 3570385 - RNA, 22 nt, Human
agccuggguguaaaaccuggag

SEQ ID NO: 3570386 - RNA, 16 nt, Human
agccuggucagcccaa

SEQ ID NO: 3570387 - RNA, 14 nt, Human
agccuggugggccu

SEQ ID NO: 3570388 - RNA, 16 nt, Human
agccuggugggccucc

SEQ ID NO: 3570389 - RNA, 22 nt, Human
agccuggugggccuccucuguc

SEQ ID NO: 3570390 - RNA, 18 nt, Human
agccugguuuagccugga

SEQ ID NO: 3570391 - RNA, 15 nt, Human
agccuguaaucccag

SEQ ID NO: 3570392 - RNA, 16 nt, Human
agccuguaucuugggg

SEQ ID NO: 3570393 - RNA, 21 nt, Human
agccugucauccuuggucuuu

SEQ ID NO: 3570394 - RNA, 14 nt, Human
agccuguccugccu

SEQ ID NO: 3570395 - RNA, 16 nt, Human
agccuguccugccugu

SEQ ID NO: 3570396 - RNA, 17 nt, Human
agccuguccugccugug

SEQ ID NO: 3570397 - RNA, 24 nt, Human
agccuguccugccuguggccauga

SEQ ID NO: 3570398 - RNA, 14 nt, Human
agccuguccugggc

SEQ ID NO: 3570399 - RNA, 17 nt, Human
agccuguccugggcugg

SEQ ID NO: 3570400 - RNA, 13 nt, Human
agccuguccuguc

SEQ ID NO: 3570401 - RNA, 18 nt, Human
agccuguccugucaucau

SEQ ID NO: 3570402 - RNA, 20 nt, Human
agccugugaacccaggacaa

SEQ ID NO: 3570403 - RNA, 20 nt, Human
agccugugcaaaaaaauuaa

SEQ ID NO: 3570404 - RNA, 18 nt, Human
agccugugccucugggac

SEQ ID NO: 3570405 - RNA, 19 nt, Human
agccugugccucugggacu

SEQ ID NO: 3570406 - RNA, 16 nt, Human
agccuguggaugauca

SEQ ID NO: 3570407 - RNA, 14 nt, Human
agccuguggcaucu

SEQ ID NO: 3570408 - RNA, 21 nt, Human
agccuguggcaucuuugccuu

SEQ ID NO: 3570409 - RNA, 13 nt, Human
agccuguggccuu

SEQ ID NO: 3570410 - RNA, 16 nt, Human
agccuguggcugugga

SEQ ID NO: 3570411 - RNA, 16 nt, Human
agccuguguaacagcu

SEQ ID NO: 3570412 - RNA, 17 nt, Human
agccuguguaacagcuc

SEQ ID NO: 3570413 - RNA, 16 nt, Human
agacguaugcuuauuu

SEQ ID NO: 3570414 - RNA, 18 nt, Human
agacguaugcuuauuuua

SEQ ID NO: 3570415 - RNA, 19 nt, Human
agacguaugcuuauuuuaa

SEQ ID NO: 3570416 - RNA, 14 nt, Human
agacgucccuccac

SEQ ID NO: 3570417 - RNA, 20 nt, Human
agacguggaaccucugucuc

SEQ ID NO: 3570418 - RNA, 21 nt, Human
agacguuuauaaacagaaaug

SEQ ID NO: 3570419 - RNA, 22 nt, Human
agacuaagaucgguuaacaaau

SEQ ID NO: 3570420 - RNA, 23 nt, Human
agacuaagcccugucgagacacu

SEQ ID NO: 3570421 - RNA, 19 nt, Human
agacuagaauucuagugcu

SEQ ID NO: 3570422 - RNA, 20 nt, Human
agacuagaauucuagugcug

SEQ ID NO: 3570423 - RNA, 12 nt, Human
agacuagagaaa

SEQ ID NO: 3570424 - RNA, 15 nt, Human
agacuagagaaaccg

SEQ ID NO: 3570425 - RNA, 16 nt, Human
agacuagauggaccug

SEQ ID NO: 3570426 - RNA, 12 nt, Human
agacuagaugua

SEQ ID NO: 3570427 - RNA, 19 nt, Human
agacuagauguaguauuuu

SEQ ID NO: 3570428 - RNA, 23 nt, Human
agacuagauguaguauuuuuugu

SEQ ID NO: 3570429 - RNA, 22 nt, Human
agacuaguuuuuauuccuugug

SEQ ID NO: 3570430 - RNA, 15 nt, Human
agacuauauacaugu

SEQ ID NO: 3570431 - RNA, 17 nt, Human
agacuauauacaugugu

SEQ ID NO: 3570432 - RNA, 15 nt, Human
agacuaucuaaaugu

SEQ ID NO: 3570433 - RNA, 20 nt, Human
agacuauggagccuggcaca

SEQ ID NO: 3570434 - RNA, 16 nt, Human
agacuauucaaacagu

SEQ ID NO: 3570435 - RNA, 16 nt, Human
agacuauugacaucag

SEQ ID NO: 3570436 - RNA, 20 nt, Human
agacuauugacaucagcauc

SEQ ID NO: 3570437 - RNA, 19 nt, Human
agacuauuuaaacuuauaa

SEQ ID NO: 3570438 - RNA, 14 nt, Human
agacuauuugcuua

SEQ ID NO: 3570439 - RNA, 16 nt, Human
agacucaaauguucua

SEQ ID NO: 3570440 - RNA, 21 nt, Human
agacucaagguucccagagau

SEQ ID NO: 3570441 - RNA, 16 nt, Human
agacucacaggaagga

SEQ ID NO: 3570442 - RNA, 22 nt, Human
agacucacaggaaggaggagcc

SEQ ID NO: 3570443 - RNA, 18 nt, Human
agacucaccucugccuca

SEQ ID NO: 3570444 - RNA, 19 nt, Human
agacucaccucugccucaa

SEQ ID NO: 3570445 - RNA, 17 nt, Human
agacucagagcucucuc

SEQ ID NO: 3570446 - RNA, 13 nt, Human
agacucagccugc

SEQ ID NO: 3570447 - RNA, 17 nt, Human
agacucagccugcaguu

SEQ ID NO: 3570448 - RNA, 13 nt, Human
agacucagcucug

SEQ ID NO: 3570449 - RNA, 23 nt, Human
agacucaggccaagaaacgucuu

SEQ ID NO: 3570450 - RNA, 16 nt, Human
agacucagggccccag

SEQ ID NO: 3570451 - RNA, 20 nt, Human
agacucagggccccagcacu

SEQ ID NO: 3570452 - RNA, 21 nt, Human
agacucaguuugucagacuuu

SEQ ID NO: 3570453 - RNA, 18 nt, Human
agacucauacagaaggug

SEQ ID NO: 3570454 - RNA, 19 nt, Human
agacucauccugaacagca

SEQ ID NO: 3570455 - RNA, 21 nt, Human
agacucauccugaacagcaug

SEQ ID NO: 3570456 - RNA, 16 nt, Human
agacucaucuuacugu

SEQ ID NO: 3570457 - RNA, 17 nt, Human
agacucaucuuacugua

SEQ ID NO: 3570458 - RNA, 13 nt, Human
agacuccaaagaa

SEQ ID NO: 3570459 - RNA, 19 nt, Human
agacuccaaagaaauguaa

SEQ ID NO: 3570460 - RNA, 12 nt, Human
agacuccaccaa

SEQ ID NO: 3570461 - RNA, 16 nt, Human
agacuccaccaagccu

SEQ ID NO: 3570462 - RNA, 22 nt, Human
agacuccagaaaugucccuuuc

SEQ ID NO: 3570463 - RNA, 18 nt, Human
agacuccagaccugaggc

SEQ ID NO: 3570464 - RNA, 17 nt, Human
agacucccaugaagccu

SEQ ID NO: 3570465 - RNA, 22 nt, Human
agacuccuagcuguccuuuuuc

SEQ ID NO: 3570466 - RNA, 14 nt, Human
agacuccuccucca

SEQ ID NO: 3570467 - RNA, 23 nt, Human
agacuccuccuccaaaggccccc

SEQ ID NO: 3570468 - RNA, 22 nt, Human
agacuccugaggacagcugucc

SEQ ID NO: 3570469 - RNA, 16 nt, Human
agacuccugcaggcag

SEQ ID NO: 3570470 - RNA, 18 nt, Human
agacuccugcaggcagcc

SEQ ID NO: 3570471 - RNA, 15 nt, Human
agacuccugcccugu

SEQ ID NO: 3570472 - RNA, 20 nt, Human
agacucgauucauauugaau

SEQ ID NO: 3570473 - RNA, 23 nt, Human
agacucgauucauauugaauaua

SEQ ID NO: 3570474 - RNA, 18 nt, Human
agacucgcgacaaugcaa

SEQ ID NO: 3570475 - RNA, 18 nt, Human
agacucggaaucuauuuu

SEQ ID NO: 3570476 - RNA, 14 nt, Human
agacucggggugcu

SEQ ID NO: 3570477 - RNA, 16 nt, Human
agacucuaagaaagaa

SEQ ID NO: 3570478 - RNA, 19 nt, Human
agacucuacagaggccaug

SEQ ID NO: 3570479 - RNA, 19 nt, Human
agacucuagaguccaaggu

SEQ ID NO: 3570480 - RNA, 20 nt, Human
agacucuagaguccaagguu

SEQ ID NO: 3570481 - RNA, 15 nt, Human
agacucuagggucca

SEQ ID NO: 3570482 - RNA, 15 nt, Human
agacucuaguauuua

SEQ ID NO: 3570483 - RNA, 11 nt, Human
agacucucagc

SEQ ID NO: 3570484 - RNA, 18 nt, Human
agacucucagcccagaag

SEQ ID NO: 3570485 - RNA, 20 nt, Human
agacucucagcccagaagaa

SEQ ID NO: 3570486 - RNA, 19 nt, Human
agacucucgcaucuuccca

SEQ ID NO: 3570487 - RNA, 20 nt, Human
agacucugaaaucucagaau

SEQ ID NO: 3570488 - RNA, 19 nt, Human
agacucuggucuucuuugg

SEQ ID NO: 3570489 - RNA, 17 nt, Human
agacucuguaacaucac

SEQ ID NO: 3570490 - RNA, 18 nt, Human
agacucugucuaaaaaac

SEQ ID NO: 3570491 - RNA, 15 nt, Human
agacucuuugcauau

SEQ ID NO: 3570492 - RNA, 18 nt, Human
agacucuuuuccuucccu

SEQ ID NO: 3570493 - RNA, 21 nt, Human
agacucuuuuuguaccuggug

SEQ ID NO: 3570494 - RNA, 17 nt, Human
agacugaacauguacac

SEQ ID NO: 3570495 - RNA, 16 nt, Human
agacugaacuguguga

SEQ ID NO: 3570496 - RNA, 22 nt, Human
agacugaauagauaugaaagcu

SEQ ID NO: 3570497 - RNA, 17 nt, Human
agacugaggacaaagug

SEQ ID NO: 3570498 - RNA, 14 nt, Human
agacugaucaggac

SEQ ID NO: 3570499 - RNA, 17 nt, Human
agacugaucaggaccuc

SEQ ID NO: 3570500 - RNA, 11 nt, Human
agacugaucuc

SEQ ID NO: 3570501 - RNA, 23 nt, Human
agagucuaaagauggaguuucua

SEQ ID NO: 3570502 - RNA, 15 nt, Human
agagucuagauucaa

SEQ ID NO: 3570503 - RNA, 22 nt, Human
agagucuagauucaaagguucu

SEQ ID NO: 3570504 - RNA, 15 nt, Human
agagucuagauucuc

SEQ ID NO: 3570505 - RNA, 22 nt, Human
agagucucacuguugcccaggc

SEQ ID NO: 3570506 - RNA, 15 nt, Human
agagucuccauuuaa

SEQ ID NO: 3570507 - RNA, 13 nt, Human
agagucucccagg

SEQ ID NO: 3570508 - RNA, 16 nt, Human
agagucugaaccuauu

SEQ ID NO: 3570509 - RNA, 12 nt, Human
agagucugaggg

SEQ ID NO: 3570510 - RNA, 14 nt, Human
agagucuugcagug

SEQ ID NO: 3570511 - RNA, 14 nt, Human
agagugaacaaauu

SEQ ID NO: 3570512 - RNA, 14 nt, Human
agagugaagggaag

SEQ ID NO: 3570513 - RNA, 22 nt, Human
agagugaagggaagagacagcc

SEQ ID NO: 3570514 - RNA, 19 nt, Human
agagugacuaguacaaauu

SEQ ID NO: 3570515 - RNA, 16 nt, Human
agagugacuccaagaa

SEQ ID NO: 3570516 - RNA, 19 nt, Human
agagugagacucugucuca

SEQ ID NO: 3570517 - RNA, 14 nt, Human
agagugagagggca

SEQ ID NO: 3570518 - RNA, 18 nt, Human
agagugagggccugaggu

SEQ ID NO: 3570519 - RNA, 17 nt, Human
agagugauaauacaagu

SEQ ID NO: 3570520 - RNA, 16 nt, Human
agagugauugcagcuu

SEQ ID NO: 3570521 - RNA, 18 nt, Human
agagugauugcagcuuua

SEQ ID NO: 3570522 - RNA, 21 nt, Human
agagugcaagccccugcucca

SEQ ID NO: 3570523 - RNA, 15 nt, Human
agagugcacagcugu

SEQ ID NO: 3570524 - RNA, 18 nt, Human
agagugcauugugagggu

SEQ ID NO: 3570525 - RNA, 20 nt, Human
agagugccaacuucuuucau

SEQ ID NO: 3570526 - RNA, 12 nt, Human
agagugcccaga

SEQ ID NO: 3570527 - RNA, 13 nt, Human
agagugcccagaa

SEQ ID NO: 3570528 - RNA, 18 nt, Human
agagugccccaccugcca

SEQ ID NO: 3570529 - RNA, 19 nt, Human
agagugccccaccugccac

SEQ ID NO: 3570530 - RNA, 21 nt, Human
agagugcgccgagucugucuc

SEQ ID NO: 3570531 - RNA, 12 nt, Human
agaguggccugg

SEQ ID NO: 3570532 - RNA, 13 nt, Human
agaguggccuggc

SEQ ID NO: 3570533 - RNA, 15 nt, Human
agaguggccuggcca

SEQ ID NO: 3570534 - RNA, 19 nt, Human
agaguggccuggccaggag

SEQ ID NO: 3570535 - RNA, 14 nt, Human
agaguggcuccucc

SEQ ID NO: 3570536 - RNA, 19 nt, Human
agagugggguagguuggga

SEQ ID NO: 3570537 - RNA, 16 nt, Human
agaguggguuucacaa

SEQ ID NO: 3570538 - RNA, 21 nt, Human
agaguggugggggaaggcugu

SEQ ID NO: 3570539 - RNA, 16 nt, Human
agaguguagaagcauu

SEQ ID NO: 3570540 - RNA, 17 nt, Human
agagugucaaccagaca

SEQ ID NO: 3570541 - RNA, 18 nt, Human
agagugucaaccagacag

SEQ ID NO: 3570542 - RNA, 19 nt, Human
agagugucaaccagacaga

SEQ ID NO: 3570543 - RNA, 21 nt, Human
agagugucaaccagacagagg

SEQ ID NO: 3570544 - RNA, 22 nt, Human
agagugucaaccagacagaggg

SEQ ID NO: 3570545 - RNA, 21 nt, Human
agagugucucagggugcagag

SEQ ID NO: 3570546 - RNA, 14 nt, Human
agagugucuuucca

SEQ ID NO: 3570547 - RNA, 20 nt, Human
agagugugauguauguguaa

SEQ ID NO: 3570548 - RNA, 11 nt, Human
agagugugugu

SEQ ID NO: 3570549 - RNA, 14 nt, Human
agaguguugaaacg

SEQ ID NO: 3570550 - RNA, 22 nt, Human
agaguuaacaaugauauaugga

SEQ ID NO: 3570551 - RNA, 16 nt, Human
agaguuaagaagcugu

SEQ ID NO: 3570552 - RNA, 16 nt, Human
agaguuacaguucugu

SEQ ID NO: 3570553 - RNA, 17 nt, Human
agaguuagacuguuggg

SEQ ID NO: 3570554 - RNA, 18 nt, Human
agaguuagguuuaacaua

SEQ ID NO: 3570555 - RNA, 18 nt, Human
agaguucaagaaauaagu

SEQ ID NO: 3570556 - RNA, 21 nt, Human
agaguucaagaaauaaguuuu

SEQ ID NO: 3570557 - RNA, 18 nt, Human
agaguucaauggcugcug

SEQ ID NO: 3570558 - RNA, 13 nt, Human
agaguucaguaag

SEQ ID NO: 3570559 - RNA, 16 nt, Human
agaguuccugcggagu

SEQ ID NO: 3570560 - RNA, 21 nt, Human
agaguucuuuuugaaguauuu

SEQ ID NO: 3570561 - RNA, 13 nt, Human
agaguugaaccua

SEQ ID NO: 3570562 - RNA, 15 nt, Human
agaguugaagacaga

SEQ ID NO: 3570563 - RNA, 17 nt, Human
agaguugauacuacagu

SEQ ID NO: 3570564 - RNA, 15 nt, Human
agaguuggccauauu

SEQ ID NO: 3570565 - RNA, 19 nt, Human
agaguugugcacauggcuu

SEQ ID NO: 3570566 - RNA, 14 nt, Human
agaguuuaacacaa

SEQ ID NO: 3570567 - RNA, 15 nt, Human
agaguuuaacacaag

SEQ ID NO: 3570568 - RNA, 14 nt, Human
agaguuucuguuug

SEQ ID NO: 3570569 - RNA, 15 nt, Human
agaguuucuguuuga

SEQ ID NO: 3570570 - RNA, 18 nt, Human
agaguuucuguuugauuc

SEQ ID NO: 3570571 - RNA, 13 nt, Human
agaguuugaagga

SEQ ID NO: 3570572 - RNA, 19 nt, Human
agaguuugaaggaggugag

SEQ ID NO: 3570573 - RNA, 22 nt, Human
agaguuugaugaggcccuccac

SEQ ID NO: 3570574 - RNA, 13 nt, Human
agaguuuuggaug

SEQ ID NO: 3570575 - RNA, 18 nt, Human
agaguuuuggaugcagug

SEQ ID NO: 3570576 - RNA, 19 nt, Human
agaguuuuggaugcagugc

SEQ ID NO: 3570577 - RNA, 20 nt, Human
agaguuuugucauucagagu

SEQ ID NO: 3570578 - RNA, 17 nt, Human
agaguuuuuaauagaac

SEQ ID NO: 3570579 - RNA, 18 nt, Human
agauaaaaaaacagcuuu

SEQ ID NO: 3570580 - RNA, 21 nt, Human
agauaaaauuauagaugggaa

SEQ ID NO: 3570581 - RNA, 14 nt, Human
agauaaacauuauu

SEQ ID NO: 3570582 - RNA, 13 nt, Human
agauaaacucaga

SEQ ID NO: 3570583 - RNA, 17 nt, Human
agauaaagaccagaaau

SEQ ID NO: 3570584 - RNA, 16 nt, Human
agauaaagaugaucua

SEQ ID NO: 3570585 - RNA, 13 nt, Human
agauaaagauugu

SEQ ID NO: 3570586 - RNA, 16 nt, Human
agauaaagauugugug

SEQ ID NO: 3570587 - RNA, 17 nt, Human
agauaaagauuucuuga

SEQ ID NO: 3570588 - RNA, 18 nt, Human
agauaaagauuucuugag

SEQ ID NO: 3570589 - RNA, 17 nt, Human
agauaaagguucaugca

SEQ ID NO: 3570590 - RNA, 14 nt, Human
agauaaauauuaua

SEQ ID NO: 3570591 - RNA, 21 nt, Human
agauaacaagaucuuucagga

SEQ ID NO: 3570592 - RNA, 15 nt, Human
agauaacauuugugu

SEQ ID NO: 3570593 - RNA, 21 nt, Human
agauaaccagcuguaacacag

SEQ ID NO: 3570594 - RNA, 15 nt, Human
agauaacucuuugga

SEQ ID NO: 3570595 - RNA, 22 nt, Human
agauaacucuuuggauagcaug

SEQ ID NO: 3570596 - RNA, 15 nt, Human
agauaacugaaaauu

SEQ ID NO: 3570597 - RNA, 22 nt, Human
agauaacugaaaauuauuuaaa

SEQ ID NO: 3570598 - RNA, 19 nt, Human
agauaacuguuauuuauaa

SEQ ID NO: 3570599 - RNA, 22 nt, Human
agauaagaaugcugguuuuccu

SEQ ID NO: 3570600 - RNA, 15 nt, Human
agauaaguggccuug

SEQ ID NO: 3570601 - RNA, 14 nt, Human
agauaaguuggaaa

SEQ ID NO: 3570602 - RNA, 13 nt, Human
agauaauaguuua

SEQ ID NO: 3570603 - RNA, 18 nt, Human
agauaauauuaaggaaga

SEQ ID NO: 3570604 - RNA, 22 nt, Human
agauaauauuaaggaagacaau

SEQ ID NO: 3570605 - RNA, 16 nt, Human
agauaaucuagaacac

SEQ ID NO: 3570606 - RNA, 21 nt, Human
agauaauguuagagguuuuaa

SEQ ID NO: 3570607 - RNA, 22 nt, Human
agauaauuaaaaagaugguugc

SEQ ID NO: 3570608 - RNA, 14 nt, Human
agauaauucacugu

SEQ ID NO: 3570609 - RNA, 17 nt, Human
agauaauuguugaaauu

SEQ ID NO: 3570610 - RNA, 18 nt, Human
agauaauuguugaaauuu

SEQ ID NO: 3570611 - RNA, 22 nt, Human
agauaauuguugaaauuuugca

SEQ ID NO: 3570612 - RNA, 15 nt, Human
agauaauuucagggu

SEQ ID NO: 3570613 - RNA, 16 nt, Human
agauacaauguauuua

SEQ ID NO: 3570614 - RNA, 20 nt, Human
agauacagaacucuuucaaa

SEQ ID NO: 3570615 - RNA, 16 nt, Human
agauacauacagaauu

SEQ ID NO: 3570616 - RNA, 18 nt, Human
agauacauaugagugugg

SEQ ID NO: 3570617 - RNA, 20 nt, Human
agauacaucacugcuugaug

SEQ ID NO: 3570618 - RNA, 23 nt, Human
agauacauuuguauguugugaag

SEQ ID NO: 3570619 - RNA, 21 nt, Human
agauaccagcgaggaggcucc

SEQ ID NO: 3570620 - RNA, 20 nt, Human
agauaccaucagcaaagaau

SEQ ID NO: 3570621 - RNA, 22 nt, Human
agauaccaucagcaaagaauuu

SEQ ID NO: 3570622 - RNA, 23 nt, Human
agauacccuacgcuguccagaaa

SEQ ID NO: 3570623 - RNA, 13 nt, Human
agauaccucaccc

SEQ ID NO: 3570624 - RNA, 14 nt, Human
agauaccuccaacc

SEQ ID NO: 3570625 - RNA, 19 nt, Human
agauaccuccaacccugcc

SEQ ID NO: 3570626 - RNA, 20 nt, Human
agauaccuccaacccugccg

SEQ ID NO: 3570627 - RNA, 11 nt, Human
agauacuuugu

SEQ ID NO: 3570628 - RNA, 19 nt, Human
agauacuuuuucuuuugua

SEQ ID NO: 3570629 - RNA, 21 nt, Human
agauacuuuuucuuuuguaag

SEQ ID NO: 3570630 - RNA, 11 nt, Human
agauagaaaua

SEQ ID NO: 3570631 - RNA, 22 nt, Human
agauagaaauaaauagcuauau

SEQ ID NO: 3570632 - RNA, 13 nt, Human
agauagaagaaaa

SEQ ID NO: 3570633 - RNA, 17 nt, Human
agauagaagaaaaaaga

SEQ ID NO: 3570634 - RNA, 14 nt, Human
agauagagagcuau

SEQ ID NO: 3570635 - RNA, 22 nt, Human
agauagagaguuguuguguaca

SEQ ID NO: 3570636 - RNA, 16 nt, Human
agauagauuuggaaua

SEQ ID NO: 3570637 - RNA, 17 nt, Human
agauagauuuggaauag

SEQ ID NO: 3570638 - RNA, 18 nt, Human
agauagcauugugaacug

SEQ ID NO: 3570639 - RNA, 15 nt, Human
agauagccaaggcca

SEQ ID NO: 3570640 - RNA, 19 nt, Human
agauagcccuguccuggug

SEQ ID NO: 3570641 - RNA, 20 nt, Human
agauagcccuguccuggugg

SEQ ID NO: 3570642 - RNA, 15 nt, Human
agauagccuguggcc

SEQ ID NO: 3570643 - RNA, 13 nt, Human
agauagcugcaug

SEQ ID NO: 3570644 - RNA, 16 nt, Human
agauagcugugacuuc

SEQ ID NO: 3570645 - RNA, 21 nt, Human
agauaggaaggucauuuccau

SEQ ID NO: 3570646 - RNA, 15 nt, Human
agauagggaaaaggg

SEQ ID NO: 3570647 - RNA, 18 nt, Human
agauagggcugggcaagg

SEQ ID NO: 3570648 - RNA, 23 nt, Human
agauagggcugggcaaggaaaaa

SEQ ID NO: 3570649 - RNA, 15 nt, Human
agauagguaaauacc

SEQ ID NO: 3570650 - RNA, 11 nt, Human
agauaguuuau

SEQ ID NO: 3570651 - RNA, 13 nt, Human
agauaguuuucau

SEQ ID NO: 3570652 - RNA, 17 nt, Human
agauauaaauggcuggu

SEQ ID NO: 3570653 - RNA, 13 nt, Human
agauauaagugcu

SEQ ID NO: 3570654 - RNA, 15 nt, Human
agauauaagugcugu

SEQ ID NO: 3570655 - RNA, 22 nt, Human
agauauaagugcuguauaaaau

SEQ ID NO: 3570656 - RNA, 23 nt, Human
agauauaagugcuguauaaaauc

SEQ ID NO: 3570657 - RNA, 21 nt, Human
agauauaaugaacaaaauuau

SEQ ID NO: 3570658 - RNA, 20 nt, Human
agauauaucugaaaacugga

SEQ ID NO: 3570659 - RNA, 21 nt, Human
agauauaucugaaaacuggaa

SEQ ID NO: 3570660 - RNA, 14 nt, Human
agauauaugccuuc

SEQ ID NO: 3570661 - RNA, 17 nt, Human
agauauauuuucuuucu

SEQ ID NO: 3570662 - RNA, 15 nt, Human
agauaucucaaugaa

SEQ ID NO: 3570663 - RNA, 17 nt, Human
agauaucuuuuuauuga

SEQ ID NO: 3570664 - RNA, 24 nt, Human
agauaucuuuuuauugaugugcaa

SEQ ID NO: 3570665 - RNA, 20 nt, Human
agauauggagaauugcugaa

SEQ ID NO: 3570666 - RNA, 17 nt, Human
agauauggcagcgaaag

SEQ ID NO: 3570667 - RNA, 14 nt, Human
agauauguauucuu

SEQ ID NO: 3570668 - RNA, 11 nt, Human
agauauuaaug

SEQ ID NO: 3570669 - RNA, 17 nt, Human
agauauuaaugcccaga

SEQ ID NO: 3570670 - RNA, 13 nt, Human
agauauuacuuua

SEQ ID NO: 3570671 - RNA, 14 nt, Human
agauauuacuuuau

SEQ ID NO: 3570672 - RNA, 16 nt, Human
agauauuacuuuauca

SEQ ID NO: 3570673 - RNA, 13 nt, Human
agauauucugcuc

SEQ ID NO: 3570674 - RNA, 14 nt, Human
agauauuguacaua

SEQ ID NO: 3570675 - RNA, 15 nt, Human
agauauuguacauaa

SEQ ID NO: 3570676 - RNA, 16 nt, Human
agauauuguacauaaa

SEQ ID NO: 3570677 - RNA, 18 nt, Human
agauauuguacauaaaag

SEQ ID NO: 3570678 - RNA, 19 nt, Human
agauauuguacauaaaaga

SEQ ID NO: 3570679 - RNA, 23 nt, Human
agauauuuaaguauaaaauacaa

SEQ ID NO: 3570680 - RNA, 23 nt, Human
agauauuuauuguuuauuuauca

SEQ ID NO: 3570681 - RNA, 19 nt, Human
agauauuuggcuuaaauau

SEQ ID NO: 3570682 - RNA, 21 nt, Human
agauauuuggcuuaaauauag

SEQ ID NO: 3570683 - RNA, 17 nt, Human
agauauuuugggcaugu

SEQ ID NO: 3570684 - RNA, 17 nt, Human
agauauuuuuaucuuua

SEQ ID NO: 3570685 - RNA, 19 nt, Human
agauauuuuuaucuuuaua

SEQ ID NO: 3570686 - RNA, 21 nt, Human
agauauuuuuaucuuuauaug

SEQ ID NO: 3570687 - RNA, 19 nt, Human
agauauuuuuucagaaaua

SEQ ID NO: 3570688 - RNA, 21 nt, Human
agauauuuuuucagaaauaug

SEQ ID NO: 3570689 - RNA, 14 nt, Human
agaucaaaaaggcu

SEQ ID NO: 3570690 - RNA, 15 nt, Human
agaucaaaaaggcuu

SEQ ID NO: 3570691 - RNA, 19 nt, Human
agaucaaaaaggcuuauaa

SEQ ID NO: 3570692 - RNA, 12 nt, Human
agaucaaaauaa

SEQ ID NO: 3570693 - RNA, 17 nt, Human
agaucaaaauaaaaagu

SEQ ID NO: 3570694 - RNA, 16 nt, Human
agaucaaauacuuuaa

SEQ ID NO: 3570695 - RNA, 20 nt, Human
agaucaaauacuuuaaagga

SEQ ID NO: 3570696 - RNA, 23 nt, Human
agaucaaauuucacgucgucuuc

SEQ ID NO: 3570697 - RNA, 15 nt, Human
agaucaagagaucaa

SEQ ID NO: 3570698 - RNA, 18 nt, Human
agaucaagcugugagaca

SEQ ID NO: 3570699 - RNA, 21 nt, Human
agaucaauuuguaauugcuua

SEQ ID NO: 3570700 - RNA, 14 nt, Human
agaucaccagcccg

SEQ ID NO: 3570701 - RNA, 15 nt, Human
agaucaccagcccgg

SEQ ID NO: 3570702 - RNA, 16 nt, Human
agaucaccagcccggc

SEQ ID NO: 3570703 - RNA, 21 nt, Human
agaucaccagcccggccugcu

SEQ ID NO: 3570704 - RNA, 13 nt, Human
agaucacgagguc

SEQ ID NO: 3570705 - RNA, 15 nt, Human
agaucacgccacugc

SEQ ID NO: 3570706 - RNA, 21 nt, Human
agaucacgcuccccgccuguu

SEQ ID NO: 3570707 - RNA, 14 nt, Human
agaucacuacugca

SEQ ID NO: 3570708 - RNA, 18 nt, Human
agaucacugaauuuauaa

SEQ ID NO: 3570709 - RNA, 15 nt, Human
agaucacuguuuaga

SEQ ID NO: 3570710 - RNA, 19 nt, Human
agaucacuguuuagauuug

SEQ ID NO: 3570711 - RNA, 18 nt, Human
agaucacuuucucaguuu

SEQ ID NO: 3570712 - RNA, 23 nt, Human
agaucagaugcuccaagauucua

SEQ ID NO: 3570713 - RNA, 19 nt, Human
agaucaggaagagaaggag

SEQ ID NO: 3570714 - RNA, 15 nt, Human
agaucaguaaagaac

SEQ ID NO: 3570715 - RNA, 15 nt, Human
agaucaguguaccau

SEQ ID NO: 3570716 - RNA, 20 nt, Human
agaucauagauuucugauuu

SEQ ID NO: 3570717 - RNA, 14 nt, Human
agaucauaguuuua

SEQ ID NO: 3570718 - RNA, 19 nt, Human
agaucauaguuuuauuuau

SEQ ID NO: 3570719 - RNA, 23 nt, Human
agaucauaguuuuauuuauauuu

SEQ ID NO: 3570720 - RNA, 14 nt, Human
agaucaugcauaga

SEQ ID NO: 3570721 - RNA, 18 nt, Human
agauccaaaagaagcccc

SEQ ID NO: 3570722 - RNA, 21 nt, Human
agauccaaaagaagcccccag

SEQ ID NO: 3570723 - RNA, 13 nt, Human
agauccaaagacu

SEQ ID NO: 3570724 - RNA, 17 nt, Human
agauccacacacagagg

SEQ ID NO: 3570725 - RNA, 16 nt, Human
agauccaggagcucca

SEQ ID NO: 3570726 - RNA, 19 nt, Human
agauccagggacagaggcc

SEQ ID NO: 3570727 - RNA, 22 nt, Human
agauccauuuuuuauauuucaa

SEQ ID NO: 3570728 - RNA, 10 nt, Human
agaucccaaa

SEQ ID NO: 3570729 - RNA, 18 nt, Human
agaucccaacacugccag

SEQ ID NO: 3570730 - RNA, 19 nt, Human
agaucccaacacugccagc

SEQ ID NO: 3570731 - RNA, 20 nt, Human
agaucccaacacugccagca

SEQ ID NO: 3570732 - RNA, 23 nt, Human
agaucccauggguuguguguuua

SEQ ID NO: 3570733 - RNA, 18 nt, Human
agauccccaagccuggca

SEQ ID NO: 3570734 - RNA, 13 nt, Human
agaucccccagaa

SEQ ID NO: 3570735 - RNA, 11 nt, Human
agauccccuca

SEQ ID NO: 3570736 - RNA, 15 nt, Human
agauccccucaggac

SEQ ID NO: 3570737 - RNA, 19 nt, Human
agaucccgccucuucuucu

SEQ ID NO: 3570738 - RNA, 16 nt, Human
agauccuaaaacaaaa

SEQ ID NO: 3570739 - RNA, 16 nt, Human
agauccuagauccuaa

SEQ ID NO: 3570740 - RNA, 14 nt, Human
agauccuggaaauc

SEQ ID NO: 3570741 - RNA, 17 nt, Human
agaucgagaccauccug

SEQ ID NO: 3570742 - RNA, 15 nt, Human
agaucgcccccaccu

SEQ ID NO: 3570743 - RNA, 18 nt, Human
agaucggggccagaggca

SEQ ID NO: 3570744 - RNA, 21 nt, Human
agaucgugccguuacucucca

SEQ ID NO: 3570745 - RNA, 19 nt, Human
agaucgugcuacugcacuc

SEQ ID NO: 3570746 - RNA, 17 nt, Human
agaucguuaguaucuaa

SEQ ID NO: 3570747 - RNA, 16 nt, Human
agaucguucucugccu

SEQ ID NO: 3570748 - RNA, 20 nt, Human
agaucuaagccuuuccauaa

SEQ ID NO: 3570749 - RNA, 11 nt, Human
agaucuacaug

SEQ ID NO: 3570750 - RNA, 14 nt, Human
agaucuacaugaau

SEQ ID NO: 3570751 - RNA, 14 nt, Human
agaucuauaaagcg

SEQ ID NO: 3570752 - RNA, 13 nt, Human
agaucuccaaagc

SEQ ID NO: 3570753 - RNA, 15 nt, Human
agaucuccaaagcuu

SEQ ID NO: 3570754 - RNA, 12 nt, Human
agaucuccagcg

SEQ ID NO: 3570755 - RNA, 14 nt, Human
agaucuccuggcaa

SEQ ID NO: 3570756 - RNA, 16 nt, Human
agaucucgguuugcca

SEQ ID NO: 3570757 - RNA, 16 nt, Human
agaucucugcagggcc

SEQ ID NO: 3570758 - RNA, 17 nt, Human
agaucucugcagggccg

SEQ ID NO: 3570759 - RNA, 23 nt, Human
agaucucugcuuuggaaaucaca

SEQ ID NO: 3570760 - RNA, 21 nt, Human
agaucugacaugauuccuucc

SEQ ID NO: 3570761 - RNA, 14 nt, Human
agaucugcaccgcc

SEQ ID NO: 3570762 - RNA, 18 nt, Human
agaucugccuaaggacuu

SEQ ID NO: 3570763 - RNA, 19 nt, Human
agcacuuucauugccagug

SEQ ID NO: 3570764 - RNA, 17 nt, Human
agcacuuugaaauaccu

SEQ ID NO: 3570765 - RNA, 21 nt, Human
agcacuuugaaauaccucaug

SEQ ID NO: 3570766 - RNA, 20 nt, Human
agcacuuugggaggccaagg

SEQ ID NO: 3570767 - RNA, 23 nt, Human
agcacuuugggaggccaaggugg

SEQ ID NO: 3570768 - RNA, 21 nt, Human
agcacuuugggaggccgaggc

SEQ ID NO: 3570769 - RNA, 21 nt, Human
agcacuuugggaggcugaggc

SEQ ID NO: 3570770 - RNA, 13 nt, Human
agcacuuuucaaa

SEQ ID NO: 3570771 - RNA, 21 nt, Human
agcagaaaacccuugggccag

SEQ ID NO: 3570772 - RNA, 18 nt, Human
agcagaaaauaaaggaag

SEQ ID NO: 3570773 - RNA, 19 nt, Human
agcagaaaauacagcugga

SEQ ID NO: 3570774 - RNA, 18 nt, Human
agcagaaagcugugaaca

SEQ ID NO: 3570775 - RNA, 18 nt, Human
agcagaaaggcacgucca

SEQ ID NO: 3570776 - RNA, 19 nt, Human
agcagaaagugccuuucag

SEQ ID NO: 3570777 - RNA, 13 nt, Human
agcagaaauacau

SEQ ID NO: 3570778 - RNA, 20 nt, Human
agcagaacagugauuaccag

SEQ ID NO: 3570779 - RNA, 16 nt, Human
agcagaaccuuaaaca

SEQ ID NO: 3570780 - RNA, 14 nt, Human
agcagaacugaacc

SEQ ID NO: 3570781 - RNA, 14 nt, Human
agcagaagaaagga

SEQ ID NO: 3570782 - RNA, 13 nt, Human
agcagaagcagca

SEQ ID NO: 3570783 - RNA, 14 nt, Human
agcagaaggaaaca

SEQ ID NO: 3570784 - RNA, 16 nt, Human
agcagaaguggagcug

SEQ ID NO: 3570785 - RNA, 14 nt, Human
agcagaauaaagca

SEQ ID NO: 3570786 - RNA, 15 nt, Human
agcagaauaaagcaa

SEQ ID NO: 3570787 - RNA, 16 nt, Human
agcagaauaaagcaau

SEQ ID NO: 3570788 - RNA, 18 nt, Human
agcagaauugaccgacag

SEQ ID NO: 3570789 - RNA, 19 nt, Human
agcagaauuggaaaagacu

SEQ ID NO: 3570790 - RNA, 17 nt, Human
agcagacacccuuggag

SEQ ID NO: 3570791 - RNA, 16 nt, Human
agcagacagagccagg

SEQ ID NO: 3570792 - RNA, 17 nt, Human
agcagacagagccagga

SEQ ID NO: 3570793 - RNA, 18 nt, Human
agcagacagagccaggag

SEQ ID NO: 3570794 - RNA, 19 nt, Human
agcagacagagccaggaga

SEQ ID NO: 3570795 - RNA, 21 nt, Human
agcagacaguguuuucuggga

SEQ ID NO: 3570796 - RNA, 23 nt, Human
agcagacauugucagcaaauuaa

SEQ ID NO: 3570797 - RNA, 23 nt, Human
agcagacuacagcuggggugcag

SEQ ID NO: 3570798 - RNA, 16 nt, Human
agcagacucagcucug

SEQ ID NO: 3570799 - RNA, 19 nt, Human
agcagacucagcucugaca

SEQ ID NO: 3570800 - RNA, 20 nt, Human
agcagacucagcucugacau

SEQ ID NO: 3570801 - RNA, 19 nt, Human
agcagacugaucaggaccu

SEQ ID NO: 3570802 - RNA, 20 nt, Human
agcagagaauauaacaugaa

SEQ ID NO: 3570803 - RNA, 24 nt, Human
agcagagaauauaacaugaaauga

SEQ ID NO: 3570804 - RNA, 17 nt, Human
agcagagaccaucccug

SEQ ID NO: 3570805 - RNA, 18 nt, Human
agcagagaccaucccuga

SEQ ID NO: 3570806 - RNA, 17 nt, Human
agcagagcaagucugca

SEQ ID NO: 3570807 - RNA, 20 nt, Human
agcagagcaccuuagacagu

SEQ ID NO: 3570808 - RNA, 14 nt, Human
agcagagcaggggc

SEQ ID NO: 3570809 - RNA, 22 nt, Human
agcagagcugauggagaaggaa

SEQ ID NO: 3570810 - RNA, 20 nt, Human
agcagaggauaauuagcauc

SEQ ID NO: 3570811 - RNA, 13 nt, Human
agcagaggcacug

SEQ ID NO: 3570812 - RNA, 17 nt, Human
agcagaggcuggccuca

SEQ ID NO: 3570813 - RNA, 23 nt, Human
agcagagguggccagagcuggga

SEQ ID NO: 3570814 - RNA, 23 nt, Human
agcagagugcacagcuguccacu

SEQ ID NO: 3570815 - RNA, 23 nt, Human
agcagaguuuucauuaaauccuu

SEQ ID NO: 3570816 - RNA, 20 nt, Human
agcagauacauaugagugug

SEQ ID NO: 3570817 - RNA, 19 nt, Human
agcagauaccucacccugc

SEQ ID NO: 3570818 - RNA, 13 nt, Human
agcagaugcaaag

SEQ ID NO: 3570819 - RNA, 14 nt, Human
agcagaugcaaaga

SEQ ID NO: 3570820 - RNA, 17 nt, Human
agcagaugcaaagaggc

SEQ ID NO: 3570821 - RNA, 19 nt, Human
agcagaugcaaugacucag

SEQ ID NO: 3570822 - RNA, 12 nt, Human
agcagaugcaga

SEQ ID NO: 3570823 - RNA, 13 nt, Human
agcagaugcagag

SEQ ID NO: 3570824 - RNA, 16 nt, Human
agcagaugcagagagc

SEQ ID NO: 3570825 - RNA, 14 nt, Human
agcagauuggaagg

SEQ ID NO: 3570826 - RNA, 15 nt, Human
agcagauuggaagga

SEQ ID NO: 3570827 - RNA, 19 nt, Human
agcagauuggaaggagaca

SEQ ID NO: 3570828 - RNA, 21 nt, Human
agcagauuggaaggagacaca

SEQ ID NO: 3570829 - RNA, 20 nt, Human
agcagauuggagaaacccuu

SEQ ID NO: 3570830 - RNA, 22 nt, Human
agcagauuuuaauuuugaauaa

SEQ ID NO: 3570831 - RNA, 20 nt, Human
agcagauuuuaggaaaugaa

SEQ ID NO: 3570832 - RNA, 20 nt, Human
agcagcaaaaauauaaaaua

SEQ ID NO: 3570833 - RNA, 16 nt, Human
agcagcaacacaaugu

SEQ ID NO: 3570834 - RNA, 13 nt, Human
agcagcaagaaaa

SEQ ID NO: 3570835 - RNA, 16 nt, Human
agcagcaagaaaaaaa

SEQ ID NO: 3570836 - RNA, 23 nt, Human
agcagcaagaaaaaaaaaugcca

SEQ ID NO: 3570837 - RNA, 13 nt, Human
agcagcacccauc

SEQ ID NO: 3570838 - RNA, 18 nt, Human
agcagcaccguucugugc

SEQ ID NO: 3570839 - RNA, 20 nt, Human
agcagcaccguucugugcac

SEQ ID NO: 3570840 - RNA, 14 nt, Human
agcagcaccuccuc

SEQ ID NO: 3570841 - RNA, 21 nt, Human
agcagcaccuccucagccuga

SEQ ID NO: 3570842 - RNA, 17 nt, Human
agcagcaccugcccuac

SEQ ID NO: 3570843 - RNA, 14 nt, Human
agcagcagcccaag

SEQ ID NO: 3570844 - RNA, 13 nt, Human
agcagcagcccug

SEQ ID NO: 3570845 - RNA, 15 nt, Human
agcagcaggaggggg

SEQ ID NO: 3570846 - RNA, 17 nt, Human
agcagcaggagggggga

SEQ ID NO: 3570847 - RNA, 13 nt, Human
agcagcagguagc

SEQ ID NO: 3570848 - RNA, 15 nt, Human
agcagcaucuucugg

SEQ ID NO: 3570849 - RNA, 13 nt, Human
agcagcauuuuua

SEQ ID NO: 3570850 - RNA, 20 nt, Human
agcagcauuuuuauuucaga

SEQ ID NO: 3570851 - RNA, 11 nt, Human
agcagccagcc

SEQ ID NO: 3570852 - RNA, 12 nt, Human
agcagccagccc

SEQ ID NO: 3570853 - RNA, 18 nt, Human
agcagccagcccugccug

SEQ ID NO: 3570854 - RNA, 19 nt, Human
agcagccagcccugccugg

SEQ ID NO: 3570855 - RNA, 20 nt, Human
agcagccagcccugccugga

SEQ ID NO: 3570856 - RNA, 13 nt, Human
agcagccagcucu

SEQ ID NO: 3570857 - RNA, 13 nt, Human
agaucuggcaugu

SEQ ID NO: 3570858 - RNA, 15 nt, Human
agaucugguuuugcu

SEQ ID NO: 3570859 - RNA, 18 nt, Human
agaucugguuuugcuauu

SEQ ID NO: 3570860 - RNA, 23 nt, Human
agaucuguccucagccuugccag

SEQ ID NO: 3570861 - RNA, 12 nt, Human
agaucugugccc

SEQ ID NO: 3570862 - RNA, 22 nt, Human
agaucuguuuugugguuuggaa

SEQ ID NO: 3570863 - RNA, 23 nt, Human
agaucuuagguauagaggacccu

SEQ ID NO: 3570864 - RNA, 19 nt, Human
agaucuucaaacagaauaa

SEQ ID NO: 3570865 - RNA, 14 nt, Human
agaucuuucagaaa

SEQ ID NO: 3570866 - RNA, 21 nt, Human
agaucuuucagaaauauaaca

SEQ ID NO: 3570867 - RNA, 16 nt, Human
agaucuuuuauuuugc

SEQ ID NO: 3570868 - RNA, 18 nt, Human
agaucuuuuauuuugcca

SEQ ID NO: 3570869 - RNA, 22 nt, Human
agaugaaaaagcauguacagug

SEQ ID NO: 3570870 - RNA, 15 nt, Human
agaugaaagagcagu

SEQ ID NO: 3570871 - RNA, 19 nt, Human
agaugaacucuuagaaaug

SEQ ID NO: 3570872 - RNA, 18 nt, Human
agaugaagcaaacacauu

SEQ ID NO: 3570873 - RNA, 16 nt, Human
agaugaaggagaggca

SEQ ID NO: 3570874 - RNA, 14 nt, Human
agaugaaguuuuau

SEQ ID NO: 3570875 - RNA, 17 nt, Human
agaugaauguccugaaa

SEQ ID NO: 3570876 - RNA, 17 nt, Human
agaugacaaccuccauu

SEQ ID NO: 3570877 - RNA, 18 nt, Human
agaugacaucugucuagg

SEQ ID NO: 3570878 - RNA, 23 nt, Human
agaugacauugacuauuuuuguu

SEQ ID NO: 3570879 - RNA, 21 nt, Human
agaugacauugcuaagaugcu

SEQ ID NO: 3570880 - RNA, 20 nt, Human
agaugaccacuuuuuagaaa

SEQ ID NO: 3570881 - RNA, 16 nt, Human
agaugaccauaaccac

SEQ ID NO: 3570882 - RNA, 11 nt, Human
agaugagaaca

SEQ ID NO: 3570883 - RNA, 15 nt, Human
agaugagaacaaagc

SEQ ID NO: 3570884 - RNA, 19 nt, Human
agaugagaauucagcugcc

SEQ ID NO: 3570885 - RNA, 20 nt, Human
agaugagaauucagcugccc

SEQ ID NO: 3570886 - RNA, 15 nt, Human
agaugagauuggcau

SEQ ID NO: 3570887 - RNA, 19 nt, Human
agaugagcacuucuaaguu

SEQ ID NO: 3570888 - RNA, 16 nt, Human
agaugaggccagacca

SEQ ID NO: 3570889 - RNA, 21 nt, Human
agaugagggaugggccuggca

SEQ ID NO: 3570890 - RNA, 22 nt, Human
agaugagggaugggccuggcau

SEQ ID NO: 3570891 - RNA, 21 nt, Human
agaugaggucaguuguguuuu

SEQ ID NO: 3570892 - RNA, 17 nt, Human
agaugaguuaucuaaga

SEQ ID NO: 3570893 - RNA, 14 nt, Human
agaugauaaagaga

SEQ ID NO: 3570894 - RNA, 16 nt, Human
agaugaucuacucaga

SEQ ID NO: 3570895 - RNA, 23 nt, Human
agaugaugaaaauauuuaaaggc

SEQ ID NO: 3570896 - RNA, 14 nt, Human
agaugaugagaauu

SEQ ID NO: 3570897 - RNA, 22 nt, Human
agaugauuaaauaagauucuaa

SEQ ID NO: 3570898 - RNA, 12 nt, Human
agaugauucugg

SEQ ID NO: 3570899 - RNA, 18 nt, Human
agaugauuuccccccucc

SEQ ID NO: 3570900 - RNA, 14 nt, Human
agaugauuugcaau

SEQ ID NO: 3570901 - RNA, 16 nt, Human
agaugcaaagaggcaa

SEQ ID NO: 3570902 - RNA, 18 nt, Human
agaugcaaagaggcaaga

SEQ ID NO: 3570903 - RNA, 16 nt, Human
agaugcaagaaggagg

SEQ ID NO: 3570904 - RNA, 15 nt, Human
agaugcaaggaccag

SEQ ID NO: 3570905 - RNA, 20 nt, Human
agaugcaaggaccaggacuc

SEQ ID NO: 3570906 - RNA, 13 nt, Human
agaugcacaugag

SEQ ID NO: 3570907 - RNA, 16 nt, Human
agaugcacaugagcug

SEQ ID NO: 3570908 - RNA, 15 nt, Human
agaugcaccagcccu

SEQ ID NO: 3570909 - RNA, 13 nt, Human
agaugcagagagc

SEQ ID NO: 3570910 - RNA, 20 nt, Human
agaugcagagagccauuuug

SEQ ID NO: 3570911 - RNA, 19 nt, Human
agaugcagcaaaaugugaa

SEQ ID NO: 3570912 - RNA, 17 nt, Human
agaugcaguucugaaga

SEQ ID NO: 3570913 - RNA, 15 nt, Human
agaugcauuguaguu

SEQ ID NO: 3570914 - RNA, 19 nt, Human
agaugcauuuggguccagg

SEQ ID NO: 3570915 - RNA, 21 nt, Human
agaugcauuuggguccaggag

SEQ ID NO: 3570916 - RNA, 23 nt, Human
agaugcauuuggguccaggagga

SEQ ID NO: 3570917 - RNA, 17 nt, Human
agaugccacccuagcca

SEQ ID NO: 3570918 - RNA, 13 nt, Human
agaugccagagca

SEQ ID NO: 3570919 - RNA, 16 nt, Human
agaugccauucauaga

SEQ ID NO: 3570920 - RNA, 11 nt, Human
agaugcccuga

SEQ ID NO: 3570921 - RNA, 13 nt, Human
agaugccuccacc

SEQ ID NO: 3570922 - RNA, 21 nt, Human
agaugccuccaccccccagaa

SEQ ID NO: 3570923 - RNA, 16 nt, Human
agaugccuccaccgcu

SEQ ID NO: 3570924 - RNA, 13 nt, Human
agaugccucccug

SEQ ID NO: 3570925 - RNA, 21 nt, Human
agaugccucccugacccugca

SEQ ID NO: 3570926 - RNA, 15 nt, Human
agaugccugaagcca

SEQ ID NO: 3570927 - RNA, 11 nt, Human
agaugccuggg

SEQ ID NO: 3570928 - RNA, 22 nt, Human
agaugccuuuuuuguaguuuuu

SEQ ID NO: 3570929 - RNA, 22 nt, Human
agaugcgagcgcuaucuucaca

SEQ ID NO: 3570930 - RNA, 20 nt, Human
agaugcgcagccccaucugu

SEQ ID NO: 3570931 - RNA, 19 nt, Human
agaugcuagcacaugcccu

SEQ ID NO: 3570932 - RNA, 21 nt, Human
agaugcucagguacagagaag

SEQ ID NO: 3570933 - RNA, 21 nt, Human
agaugcuccaagauucuagau

SEQ ID NO: 3570934 - RNA, 17 nt, Human
agaugcucuaucuugcu

SEQ ID NO: 3570935 - RNA, 21 nt, Human
agaugcucuaucuugcucugu

SEQ ID NO: 3570936 - RNA, 23 nt, Human
agaugcucuaucuugcucuguaa

SEQ ID NO: 3570937 - RNA, 16 nt, Human
agaugcugaaaauguc

SEQ ID NO: 3570938 - RNA, 22 nt, Human
agaugcugaaacaggagagaaa

SEQ ID NO: 3570939 - RNA, 20 nt, Human
agaugcugacuguacuccuc

SEQ ID NO: 3570940 - RNA, 22 nt, Human
agaugcugacuguacuccuccc

SEQ ID NO: 3570941 - RNA, 16 nt, Human
agaugcugauguucag

SEQ ID NO: 3570942 - RNA, 17 nt, Human
agaugcuggagaagaga

SEQ ID NO: 3570943 - RNA, 21 nt, Human
agaugcuggagaagagaggag

SEQ ID NO: 3570944 - RNA, 14 nt, Human
agaugcuggcccag

SEQ ID NO: 3570945 - RNA, 17 nt, Human
agaugcuggcuugggca

SEQ ID NO: 3570946 - RNA, 13 nt, Human
agaugcuggguug

SEQ ID NO: 3570947 - RNA, 23 nt, Human
agaugcuggguuggugcacagug

SEQ ID NO: 3570948 - RNA, 19 nt, Human
agaugcuuuccuaaaucag

SEQ ID NO: 3570949 - RNA, 18 nt, Human
agaugcuuuuaacagagu

SEQ ID NO: 3570950 - RNA, 17 nt, Human
agaugcuuuuugaucua

SEQ ID NO: 3570951 - RNA, 20 nt, Human
agauggaaaaaccaccccca

SEQ ID NO: 3570952 - RNA, 18 nt, Human
agauggaaaauucauuuu

SEQ ID NO: 3570953 - RNA, 10 nt, Human
agauggaaag

SEQ ID NO: 3570954 - RNA, 18 nt, Human
agauggaaccgcaggaag

SEQ ID NO: 3570955 - RNA, 13 nt, Human
agauggaaugcug

SEQ ID NO: 3570956 - RNA, 16 nt, Human
agauggaggaggaggc

SEQ ID NO: 3570957 - RNA, 13 nt, Human
agauggagucccu

SEQ ID NO: 3570958 - RNA, 14 nt, Human
agauggaguuucua

SEQ ID NO: 3570959 - RNA, 16 nt, Human
agauggauucucagau

SEQ ID NO: 3570960 - RNA, 20 nt, Human
agauggauucucagauauuu

SEQ ID NO: 3570961 - RNA, 23 nt, Human
agauggauucuccacucaguugc

SEQ ID NO: 3570962 - RNA, 15 nt, Human
agauggauuugccug

SEQ ID NO: 3570963 - RNA, 16 nt, Human
agauggcacagggcau

SEQ ID NO: 3570964 - RNA, 23 nt, Human
agauggcacagggcaugaaauga

SEQ ID NO: 3570965 - RNA, 14 nt, Human
agauggcacuuuga

SEQ ID NO: 3570966 - RNA, 12 nt, Human
agauggcagcuu

SEQ ID NO: 3570967 - RNA, 13 nt, Human
agauggcagcuuu

SEQ ID NO: 3570968 - RNA, 20 nt, Human
agauggcaucaaaaaagaua

SEQ ID NO: 3570969 - RNA, 21 nt, Human
agauggcccggaugcugcuuc

SEQ ID NO: 3570970 - RNA, 22 nt, Human
agauggccucuuacuaauguaa

SEQ ID NO: 3570971 - RNA, 20 nt, Human
agauggcgagcauccuggcc

SEQ ID NO: 3570972 - RNA, 23 nt, Human
agauggcucccaggggcucccuc

SEQ ID NO: 3570973 - RNA, 21 nt, Human
agauggcuggaagggguccag

SEQ ID NO: 3570974 - RNA, 17 nt, Human
agauggcugugccucug

SEQ ID NO: 3570975 - RNA, 18 nt, Human
agauggcugugccucugc

SEQ ID NO: 3570976 - RNA, 17 nt, Human
agaugggaaugaagcuu

SEQ ID NO: 3570977 - RNA, 18 nt, Human
agaugggagcuccucucc

SEQ ID NO: 3570978 - RNA, 23 nt, Human
agaugggagcuccucuccuggag

SEQ ID NO: 3570979 - RNA, 16 nt, Human
agaugggaugcuugcc

SEQ ID NO: 3570980 - RNA, 18 nt, Human
agaugggcaucuuuugua

SEQ ID NO: 3570981 - RNA, 21 nt, Human
agaugggcaucuuuuguauua

SEQ ID NO: 3570982 - RNA, 22 nt, Human
agaugggcaucuuuuguauuaa

SEQ ID NO: 3570983 - RNA, 18 nt, Human
agaugggcuuguuuucuu

SEQ ID NO: 3570984 - RNA, 19 nt, Human
agauggggaccagcagccc

SEQ ID NO: 3570985 - RNA, 19 nt, Human
agauggggauaaaaugacu

SEQ ID NO: 3570986 - RNA, 16 nt, Human
agaugggggcaagaag

SEQ ID NO: 3570987 - RNA, 15 nt, Human
agaugggggccucuu

SEQ ID NO: 3570988 - RNA, 18 nt, Human
agauggggucuguaaaau

SEQ ID NO: 3570989 - RNA, 21 nt, Human
agaugggugaaggcuggcaug

SEQ ID NO: 3570990 - RNA, 20 nt, Human
agaugggugcuuggaggaag

SEQ ID NO: 3570991 - RNA, 22 nt, Human
agauggguggaucacuugaggu

SEQ ID NO: 3570992 - RNA, 19 nt, Human
agaugguauauuugguacu

SEQ ID NO: 3570993 - RNA, 19 nt, Human
agauggucacgcaccuggg

SEQ ID NO: 3570994 - RNA, 22 nt, Human
agauggucauauuuaaacagaa

SEQ ID NO: 3570995 - RNA, 14 nt, Human
agaugguggcagua

SEQ ID NO: 3570996 - RNA, 18 nt, Human
agaugguuaaacauuuuc

SEQ ID NO: 3570997 - RNA, 14 nt, Human
agaugguuacacug

SEQ ID NO: 3570998 - RNA, 19 nt, Human
agaugguuacacuguuaga

SEQ ID NO: 3570999 - RNA, 18 nt, Human
agaugguuugagccugag

SEQ ID NO: 3571000 - RNA, 13 nt, Human
agacaauuugaua

SEQ ID NO: 3571001 - RNA, 15 nt, Human
agacacaacaacucc

SEQ ID NO: 3571002 - RNA, 14 nt, Human
agacacaagccuuc

SEQ ID NO: 3571003 - RNA, 22 nt, Human
agacacacacacgcacgcacac

SEQ ID NO: 3571004 - RNA, 15 nt, Human
agacacacaugaagu

SEQ ID NO: 3571005 - RNA, 13 nt, Human
agacacaccugag

SEQ ID NO: 3571006 - RNA, 17 nt, Human
agacacacgcacacaca

SEQ ID NO: 3571007 - RNA, 20 nt, Human
agacacacuaucauaguuaa

SEQ ID NO: 3571008 - RNA, 17 nt, Human
agacacacugaagaagc

SEQ ID NO: 3571009 - RNA, 18 nt, Human
agacacagcgucccuagc

SEQ ID NO: 3571010 - RNA, 20 nt, Human
agacacaggcccggcuccag

SEQ ID NO: 3571011 - RNA, 19 nt, Human
agacacagggacuugaagu

SEQ ID NO: 3571012 - RNA, 22 nt, Human
agacacagggacuugaaguugu

SEQ ID NO: 3571013 - RNA, 21 nt, Human
agacacauacaugucacauuu

SEQ ID NO: 3571014 - RNA, 14 nt, Human
agacacauaugagg

SEQ ID NO: 3571015 - RNA, 17 nt, Human
agacacauccagcaauu

SEQ ID NO: 3571016 - RNA, 13 nt, Human
agacacaugaagg

SEQ ID NO: 3571017 - RNA, 19 nt, Human
agacacaugaagguaaaua

SEQ ID NO: 3571018 - RNA, 21 nt, Human
agacacauguccaagaagccc

SEQ ID NO: 3571019 - RNA, 17 nt, Human
agacacauuuuuuagga

SEQ ID NO: 3571020 - RNA, 13 nt, Human
agacaccaaaguu

SEQ ID NO: 3571021 - RNA, 14 nt, Human
agacaccaaaguuc

SEQ ID NO: 3571022 - RNA, 20 nt, Human
agacaccagagcagaugcag

SEQ ID NO: 3571023 - RNA, 12 nt, Human
agacacccagga

SEQ ID NO: 3571024 - RNA, 16 nt, Human
agacacccaggacuua

SEQ ID NO: 3571025 - RNA, 18 nt, Human
agacacccuaauguggca

SEQ ID NO: 3571026 - RNA, 15 nt, Human
agacacccuggcagc

SEQ ID NO: 3571027 - RNA, 18 nt, Human
agacacccuuggagcucu

SEQ ID NO: 3571028 - RNA, 12 nt, Human
agacaccuucau

SEQ ID NO: 3571029 - RNA, 22 nt, Human
agacaccuugacagggcacacc

SEQ ID NO: 3571030 - RNA, 13 nt, Human
agacacgcacggc

SEQ ID NO: 3571031 - RNA, 15 nt, Human
agacacgcacggcag

SEQ ID NO: 3571032 - RNA, 18 nt, Human
agacacgccuuccccuca

SEQ ID NO: 3571033 - RNA, 18 nt, Human
agacacggaucugagaau

SEQ ID NO: 3571034 - RNA, 22 nt, Human
agacacuaacgacuucagggca

SEQ ID NO: 3571035 - RNA, 15 nt, Human
agacacuaaguuaua

SEQ ID NO: 3571036 - RNA, 22 nt, Human
agacacuccccgaagucuuuug

SEQ ID NO: 3571037 - RNA, 23 nt, Human
agacacuccccgaagucuuuugu

SEQ ID NO: 3571038 - RNA, 12 nt, Human
agacacucugcu

SEQ ID NO: 3571039 - RNA, 18 nt, Human
agacacucugcucugccc

SEQ ID NO: 3571040 - RNA, 21 nt, Human
agacacugaaauauacacaca

SEQ ID NO: 3571041 - RNA, 16 nt, Human
agacacugccugggcu

SEQ ID NO: 3571042 - RNA, 13 nt, Human
agacacuggcccc

SEQ ID NO: 3571043 - RNA, 18 nt, Human
agacacugguuuacacuu

SEQ ID NO: 3571044 - RNA, 14 nt, Human
agacacuguugaua

SEQ ID NO: 3571045 - RNA, 17 nt, Human
agacacuguugauaaaa

SEQ ID NO: 3571046 - RNA, 18 nt, Human
agacacuguugauaaaaa

SEQ ID NO: 3571047 - RNA, 19 nt, Human
agacacuguuuacaagaaa

SEQ ID NO: 3571048 - RNA, 13 nt, Human
agacacuugccuu

SEQ ID NO: 3571049 - RNA, 15 nt, Human
agacacuugccuucu

SEQ ID NO: 3571050 - RNA, 22 nt, Human
agacacuuuuucuuuacaaaca

SEQ ID NO: 3571051 - RNA, 18 nt, Human
agacagaacaccuaugca

SEQ ID NO: 3571052 - RNA, 19 nt, Human
agacagaaccacagggcua

SEQ ID NO: 3571053 - RNA, 17 nt, Human
agacagaaccccuacau

SEQ ID NO: 3571054 - RNA, 15 nt, Human
agacagaagaaacaa

SEQ ID NO: 3571055 - RNA, 16 nt, Human
agacagaagaaacaag

SEQ ID NO: 3571056 - RNA, 14 nt, Human
agacagaauguauc

SEQ ID NO: 3571057 - RNA, 19 nt, Human
agacagaauguaucuguga

SEQ ID NO: 3571058 - RNA, 21 nt, Human
agacagaauguaucugugaag

SEQ ID NO: 3571059 - RNA, 21 nt, Human
agacagagaauaugucugcuc

SEQ ID NO: 3571060 - RNA, 23 nt, Human
agacagagaauaugucugcuccu

SEQ ID NO: 3571061 - RNA, 19 nt, Human
agacagagacccucugcca

SEQ ID NO: 3571062 - RNA, 19 nt, Human
agacagagaccuccugccu

SEQ ID NO: 3571063 - RNA, 20 nt, Human
agacagagcaaccccuggac

SEQ ID NO: 3571064 - RNA, 21 nt, Human
agacagagcugguugggaaga

SEQ ID NO: 3571065 - RNA, 17 nt, Human
agacagagggucacagu

SEQ ID NO: 3571066 - RNA, 21 nt, Human
agacagagucucacuguugcc

SEQ ID NO: 3571067 - RNA, 14 nt, Human
agacagaugcccca

SEQ ID NO: 3571068 - RNA, 14 nt, Human
agacagcagcucag

SEQ ID NO: 3571069 - RNA, 18 nt, Human
agacagcaggcagcgcca

SEQ ID NO: 3571070 - RNA, 20 nt, Human
agacagcauuuguguguuac

SEQ ID NO: 3571071 - RNA, 18 nt, Human
agacagccaaaggcuggc

SEQ ID NO: 3571072 - RNA, 19 nt, Human
agacagccaaaggcuggcg

SEQ ID NO: 3571073 - RNA, 17 nt, Human
agacagcccaggauacu

SEQ ID NO: 3571074 - RNA, 22 nt, Human
agacagcccaggauacuggcac

SEQ ID NO: 3571075 - RNA, 13 nt, Human
agacagccccaga

SEQ ID NO: 3571076 - RNA, 14 nt, Human
agacagcccgggcu

SEQ ID NO: 3571077 - RNA, 20 nt, Human
agacagcccgggcucugccu

SEQ ID NO: 3571078 - RNA, 22 nt, Human
agacagcccgggcucugccucc

SEQ ID NO: 3571079 - RNA, 18 nt, Human
agacagcucccucugccu

SEQ ID NO: 3571080 - RNA, 12 nt, Human
agacagcucuua

SEQ ID NO: 3571081 - RNA, 12 nt, Human
agacagcugccu

SEQ ID NO: 3571082 - RNA, 13 nt, Human
agacagcugccug

SEQ ID NO: 3571083 - RNA, 14 nt, Human
agacaggaaaggga

SEQ ID NO: 3571084 - RNA, 16 nt, Human
agacaggaccagggau

SEQ ID NO: 3571085 - RNA, 18 nt, Human
agacaggcccaagagaug

SEQ ID NO: 3571086 - RNA, 22 nt, Human
agacaggcuggaagauagcugu

SEQ ID NO: 3571087 - RNA, 21 nt, Human
agacagggaauuaggccccca

SEQ ID NO: 3571088 - RNA, 22 nt, Human
agacagggaauuaggcccccau

SEQ ID NO: 3571089 - RNA, 17 nt, Human
agacaggguccugcuau

SEQ ID NO: 3571090 - RNA, 19 nt, Human
agacaggguuucaccaugu

SEQ ID NO: 3571091 - RNA, 22 nt, Human
agacaggguuuggcugugucua

SEQ ID NO: 3571092 - RNA, 15 nt, Human
agacaguauauuuau

SEQ ID NO: 3571093 - RNA, 17 nt, Human
agacaguauauuuauag

SEQ ID NO: 3571094 - RNA, 12 nt, Human
agacaguaugag

SEQ ID NO: 3571095 - RNA, 22 nt, Human
agacaguaugagucaaugugca

SEQ ID NO: 3571096 - RNA, 12 nt, Human
agacagucccug

SEQ ID NO: 3571097 - RNA, 19 nt, Human
agacagucccugccaaugg

SEQ ID NO: 3571098 - RNA, 12 nt, Human
agacagucuugc

SEQ ID NO: 3571099 - RNA, 14 nt, Human
agacagugaauuug

SEQ ID NO: 3571100 - RNA, 13 nt, Human
agacagugauauu

SEQ ID NO: 3571101 - RNA, 15 nt, Human
agacagugaucucca

SEQ ID NO: 3571102 - RNA, 21 nt, Human
agacagugaucuccauauguu

SEQ ID NO: 3571103 - RNA, 15 nt, Human
agacagugcacauga

SEQ ID NO: 3571104 - RNA, 17 nt, Human
agacagugcacaugaac

SEQ ID NO: 3571105 - RNA, 22 nt, Human
agacagugccuauacugccucu

SEQ ID NO: 3571106 - RNA, 15 nt, Human
agacagugggaaaua

SEQ ID NO: 3571107 - RNA, 15 nt, Human
agacaguuucuuagc

SEQ ID NO: 3571108 - RNA, 14 nt, Human
agacaguuuguaaa

SEQ ID NO: 3571109 - RNA, 19 nt, Human
agacaguuuguaaauguua

SEQ ID NO: 3571110 - RNA, 20 nt, Human
agacaguuuugagaacguaa

SEQ ID NO: 3571111 - RNA, 11 nt, Human
agacauaaagc

SEQ ID NO: 3571112 - RNA, 12 nt, Human
agacauaaagcc

SEQ ID NO: 3571113 - RNA, 13 nt, Human
agacauaaagcca

SEQ ID NO: 3571114 - RNA, 15 nt, Human
agacauaaaggaaaa

SEQ ID NO: 3571115 - RNA, 14 nt, Human
agacauaacguuuu

SEQ ID NO: 3571116 - RNA, 19 nt, Human
agacauacuaaccagcaga

SEQ ID NO: 3571117 - RNA, 22 nt, Human
agacauacuccuuccaucaaau

SEQ ID NO: 3571118 - RNA, 17 nt, Human
agacauacuugaagggc

SEQ ID NO: 3571119 - RNA, 14 nt, Human
agacauagaauuaa

SEQ ID NO: 3571120 - RNA, 16 nt, Human
agacauagcauccaag

SEQ ID NO: 3571121 - RNA, 22 nt, Human
agacauagcauccaaguggcau

SEQ ID NO: 3571122 - RNA, 16 nt, Human
agacauauuuaacugg

SEQ ID NO: 3571123 - RNA, 14 nt, Human
agacauauuuacaa

SEQ ID NO: 3571124 - RNA, 17 nt, Human
agacaucaacagauaaa

SEQ ID NO: 3571125 - RNA, 17 nt, Human
agacaucaagcacagaa

SEQ ID NO: 3571126 - RNA, 20 nt, Human
agacaucaagcacagaagga

SEQ ID NO: 3571127 - RNA, 19 nt, Human
agacauccauaaagaagca

SEQ ID NO: 3571128 - RNA, 17 nt, Human
agacauccauguuugua

SEQ ID NO: 3571129 - RNA, 18 nt, Human
agacauccauguuuguaa

SEQ ID NO: 3571130 - RNA, 13 nt, Human
agacaugaagcca

SEQ ID NO: 3571131 - RNA, 20 nt, Human
agacaugagugcgugcucag

SEQ ID NO: 3571132 - RNA, 15 nt, Human
agacaugcagagauu

SEQ ID NO: 3571133 - RNA, 23 nt, Human
acuguuaccugaucaaugacaga

SEQ ID NO: 3571134 - RNA, 14 nt, Human
acuguuagaacacu

SEQ ID NO: 3571135 - RNA, 13 nt, Human
acuguuagcacug

SEQ ID NO: 3571136 - RNA, 20 nt, Human
acuguuagcuuuuuaaaaca

SEQ ID NO: 3571137 - RNA, 21 nt, Human
acuguuagcuuuuuaaaacau

SEQ ID NO: 3571138 - RNA, 14 nt, Human
acuguuaucauuuu

SEQ ID NO: 3571139 - RNA, 19 nt, Human
acuguuaugaaauaaagaa

SEQ ID NO: 3571140 - RNA, 13 nt, Human
acuguuauucuuu

SEQ ID NO: 3571141 - RNA, 15 nt, Human
acuguuauucuuugc

SEQ ID NO: 3571142 - RNA, 16 nt, Human
acuguuauucuuugca

SEQ ID NO: 3571143 - RNA, 18 nt, Human
acuguuauucuuugcacu

SEQ ID NO: 3571144 - RNA, 19 nt, Human
acuguuauuuucagcauga

SEQ ID NO: 3571145 - RNA, 13 nt, Human
acuguucaagagc

SEQ ID NO: 3571146 - RNA, 15 nt, Human
acuguucaagagcac

SEQ ID NO: 3571147 - RNA, 16 nt, Human
acuguucacucacucu

SEQ ID NO: 3571148 - RNA, 22 nt, Human
acuguucagcuguccucccucc

SEQ ID NO: 3571149 - RNA, 17 nt, Human
acuguucagcuuuuauu

SEQ ID NO: 3571150 - RNA, 17 nt, Human
acuguucuaaagcucug

SEQ ID NO: 3571151 - RNA, 21 nt, Human
acuguucuaaagcucugacau

SEQ ID NO: 3571152 - RNA, 17 nt, Human
acuguucucugcccucc

SEQ ID NO: 3571153 - RNA, 21 nt, Human
acuguucucugcccuccaaga

SEQ ID NO: 3571154 - RNA, 18 nt, Human
acuguucucuucuugaac

SEQ ID NO: 3571155 - RNA, 15 nt, Human
acuguucugugucuu

SEQ ID NO: 3571156 - RNA, 19 nt, Human
acuguucuuagcucaauga

SEQ ID NO: 3571157 - RNA, 18 nt, Human
acuguucuucauuuuauu

SEQ ID NO: 3571158 - RNA, 23 nt, Human
acuguugaaaauuauuuuaaaca

SEQ ID NO: 3571159 - RNA, 14 nt, Human
acuguugauaauuc

SEQ ID NO: 3571160 - RNA, 18 nt, Human
acuguugauaauucuuau

SEQ ID NO: 3571161 - RNA, 19 nt, Human
acuguugauaauucuuauu

SEQ ID NO: 3571162 - RNA, 17 nt, Human
acuguugauguaucuga

SEQ ID NO: 3571163 - RNA, 11 nt, Human
acuguugcacg

SEQ ID NO: 3571164 - RNA, 14 nt, Human
acuguugcacgugu

SEQ ID NO: 3571165 - RNA, 18 nt, Human
acuguugcccaggcuggc

SEQ ID NO: 3571166 - RNA, 21 nt, Human
acuguugcucaaaucuauuca

SEQ ID NO: 3571167 - RNA, 14 nt, Human
acuguuguaagaau

SEQ ID NO: 3571168 - RNA, 19 nt, Human
acuguuguauaaauuuauu

SEQ ID NO: 3571169 - RNA, 17 nt, Human
acuguuguuaucuguuu

SEQ ID NO: 3571170 - RNA, 16 nt, Human
acuguuuaagacacuu

SEQ ID NO: 3571171 - RNA, 20 nt, Human
acuguuuaauguucugugau

SEQ ID NO: 3571172 - RNA, 14 nt, Human
acuguuuagaugaa

SEQ ID NO: 3571173 - RNA, 19 nt, Human
acuguuuauacacugugua

SEQ ID NO: 3571174 - RNA, 17 nt, Human
acuguuuauauguguug

SEQ ID NO: 3571175 - RNA, 14 nt, Human
acuguuuauuacuu

SEQ ID NO: 3571176 - RNA, 18 nt, Human
acuguuucaaacuuuacu

SEQ ID NO: 3571177 - RNA, 15 nt, Human
acuguuucucugcug

SEQ ID NO: 3571178 - RNA, 19 nt, Human
acuguuucucuugagcugg

SEQ ID NO: 3571179 - RNA, 22 nt, Human
acuguuucucuugagcuggccu

SEQ ID NO: 3571180 - RNA, 16 nt, Human
acuguuucugucagga

SEQ ID NO: 3571181 - RNA, 14 nt, Human
acuguuucuuuaaa

SEQ ID NO: 3571182 - RNA, 23 nt, Human
acuguuugagguuuuuaagccuu

SEQ ID NO: 3571183 - RNA, 22 nt, Human
acuguuugauauaccaaauuaa

SEQ ID NO: 3571184 - RNA, 21 nt, Human
acuguuugucuucuccccagg

SEQ ID NO: 3571185 - RNA, 22 nt, Human
acuguuuguuccagaaucugua

SEQ ID NO: 3571186 - RNA, 24 nt, Human
acuguuuuaauuuauacuggcaug

SEQ ID NO: 3571187 - RNA, 14 nt, Human
acuguuuuaucugg

SEQ ID NO: 3571188 - RNA, 24 nt, Human
acuguuuucuaguguaucaaaaug

SEQ ID NO: 3571189 - RNA, 23 nt, Human
acuguuuucucucggcuccccau

SEQ ID NO: 3571190 - RNA, 12 nt, Human
acuguuuuuacc

SEQ ID NO: 3571191 - RNA, 14 nt, Human
acuguuuuuaccca

SEQ ID NO: 3571192 - RNA, 21 nt, Human
acuguuuuuacccauaucccc

SEQ ID NO: 3571193 - RNA, 21 nt, Human
acuguuuuuccauaguuuuga

SEQ ID NO: 3571194 - RNA, 19 nt, Human
acuguuuuuuccugagcuu

SEQ ID NO: 3571195 - RNA, 14 nt, Human
acuuaaaaaaauga

SEQ ID NO: 3571196 - RNA, 15 nt, Human
acuuaaaaaaaugac

SEQ ID NO: 3571197 - RNA, 23 nt, Human
acuuaaaaaacuuguaaaugcug

SEQ ID NO: 3571198 - RNA, 14 nt, Human
acuuaaaaaauguc

SEQ ID NO: 3571199 - RNA, 13 nt, Human
acuuaaaaagucu

SEQ ID NO: 3571200 - RNA, 14 nt, Human
acuuaaaaauguaa

SEQ ID NO: 3571201 - RNA, 19 nt, Human
acuuaaaaauguaaauauu

SEQ ID NO: 3571202 - RNA, 14 nt, Human
acuuaaaacacguu

SEQ ID NO: 3571203 - RNA, 18 nt, Human
acuuaaaacacguuuuaa

SEQ ID NO: 3571204 - RNA, 15 nt, Human
acuuaaagaaguauu

SEQ ID NO: 3571205 - RNA, 17 nt, Human
acuuaaaggcuguggua

SEQ ID NO: 3571206 - RNA, 19 nt, Human
acuuaaagggcccaaugaa

SEQ ID NO: 3571207 - RNA, 19 nt, Human
acuuaaauaaaugucauua

SEQ ID NO: 3571208 - RNA, 15 nt, Human
acuuaaauaauguga

SEQ ID NO: 3571209 - RNA, 16 nt, Human
acuuaaauaaugugaa

SEQ ID NO: 3571210 - RNA, 18 nt, Human
acuuaaauaaugugaaac

SEQ ID NO: 3571211 - RNA, 18 nt, Human
acuuaaauaucaaucauu

SEQ ID NO: 3571212 - RNA, 15 nt, Human
acuuaaauuccucaa

SEQ ID NO: 3571213 - RNA, 11 nt, Human
acuuaacaaac

SEQ ID NO: 3571214 - RNA, 20 nt, Human
acuuaacauagccaaaaugu

SEQ ID NO: 3571215 - RNA, 15 nt, Human
acuuaacauuccuaa

SEQ ID NO: 3571216 - RNA, 21 nt, Human
acuuaacauuccuaaaaugcu

SEQ ID NO: 3571217 - RNA, 18 nt, Human
acuuaaccgcaucagaag

SEQ ID NO: 3571218 - RNA, 16 nt, Human
acuuaaccggaguucg

SEQ ID NO: 3571219 - RNA, 15 nt, Human
acuuaacggcuccag

SEQ ID NO: 3571220 - RNA, 12 nt, Human
acuuaacuguuu

SEQ ID NO: 3571221 - RNA, 11 nt, Human
acuuaagacuu

SEQ ID NO: 3571222 - RNA, 13 nt, Human
acuuaagagaaua

SEQ ID NO: 3571223 - RNA, 14 nt, Human
acuuaagagaauau

SEQ ID NO: 3571224 - RNA, 19 nt, Human
acuuaagagaauauuuuaa

SEQ ID NO: 3571225 - RNA, 14 nt, Human
acuuaagcaaaaga

SEQ ID NO: 3571226 - RNA, 16 nt, Human
acuuaagcaaaagaaa

SEQ ID NO: 3571227 - RNA, 20 nt, Human
acuuaagcaucuggcucuaa

SEQ ID NO: 3571228 - RNA, 21 nt, Human
acuuaagcaucuggcucuaau

SEQ ID NO: 3571229 - RNA, 16 nt, Human
acuuaaggcauuuguu

SEQ ID NO: 3571230 - RNA, 13 nt, Human
acuuaauaacugu

SEQ ID NO: 3571231 - RNA, 17 nt, Human
acuuaauaacuguguac

SEQ ID NO: 3571232 - RNA, 15 nt, Human
acuuaauaaucaaga

SEQ ID NO: 3571233 - RNA, 23 nt, Human
acuuaauaaucaagagccuuaaa

SEQ ID NO: 3571234 - RNA, 17 nt, Human
acuuaauaauguguaca

SEQ ID NO: 3571235 - RNA, 14 nt, Human
acuuaauagaaaca

SEQ ID NO: 3571236 - RNA, 17 nt, Human
acuuaaucuaaauggaa

SEQ ID NO: 3571237 - RNA, 22 nt, Human
acuuaaucuaaauggaaccacu

SEQ ID NO: 3571238 - RNA, 13 nt, Human
acuuaauguaugu

SEQ ID NO: 3571239 - RNA, 14 nt, Human
acuuaauucuguuc

SEQ ID NO: 3571240 - RNA, 14 nt, Human
acuuaauugcuaca

SEQ ID NO: 3571241 - RNA, 16 nt, Human
agaaaaauauguacca

SEQ ID NO: 3571242 - RNA, 14 nt, Human
agaaaaaucauguu

SEQ ID NO: 3571243 - RNA, 23 nt, Human
agaaaaaucuugugcuagaauac

SEQ ID NO: 3571244 - RNA, 17 nt, Human
agaaaaaugagccuggc

SEQ ID NO: 3571245 - RNA, 21 nt, Human
agaaaacaaaaccaaaaguua

SEQ ID NO: 3571246 - RNA, 13 nt, Human
agaaaacaaaacu

SEQ ID NO: 3571247 - RNA, 21 nt, Human
agaaaacaaaacugcauuuca

SEQ ID NO: 3571248 - RNA, 13 nt, Human
agaaaacaaaauu

SEQ ID NO: 3571249 - RNA, 22 nt, Human
agaaaacaagcaaguucugaga

SEQ ID NO: 3571250 - RNA, 14 nt, Human
agaaaacaauggaa

SEQ ID NO: 3571251 - RNA, 18 nt, Human
agaaaacacuguuaucau

SEQ ID NO: 3571252 - RNA, 17 nt, Human
agaaaacacuuguaagu

SEQ ID NO: 3571253 - RNA, 19 nt, Human
agaaaacagaaaaaaaaca

SEQ ID NO: 3571254 - RNA, 20 nt, Human
agaaaacaggcacugcccug

SEQ ID NO: 3571255 - RNA, 20 nt, Human
agaaaacaugcagaacaaau

SEQ ID NO: 3571256 - RNA, 13 nt, Human
agaaaacauguuu

SEQ ID NO: 3571257 - RNA, 13 nt, Human
agaaaacauuguu

SEQ ID NO: 3571258 - RNA, 22 nt, Human
agaaaaccaaacaaaaauguua

SEQ ID NO: 3571259 - RNA, 13 nt, Human
agaaaaccacccc

SEQ ID NO: 3571260 - RNA, 15 nt, Human
agaaaaccaccccuu

SEQ ID NO: 3571261 - RNA, 16 nt, Human
agaaaaccagcucagc

SEQ ID NO: 3571262 - RNA, 14 nt, Human
agaaaacccacccc

SEQ ID NO: 3571263 - RNA, 19 nt, Human
agaaaacccuugggccaga

SEQ ID NO: 3571264 - RNA, 20 nt, Human
agaaaacccuugggccagaa

SEQ ID NO: 3571265 - RNA, 15 nt, Human
agaaaacugaaaauc

SEQ ID NO: 3571266 - RNA, 13 nt, Human
agaaaacugugau

SEQ ID NO: 3571267 - RNA, 16 nt, Human
agaaaacugugauuuc

SEQ ID NO: 3571268 - RNA, 22 nt, Human
agaaaacuugaauucauagaaa

SEQ ID NO: 3571269 - RNA, 21 nt, Human
agaaaacuuguauuaugugug

SEQ ID NO: 3571270 - RNA, 12 nt, Human
agaaaacuuugu

SEQ ID NO: 3571271 - RNA, 14 nt, Human
agaaaacuuuguua

SEQ ID NO: 3571272 - RNA, 13 nt, Human
agaaaagaaaaaa

SEQ ID NO: 3571273 - RNA, 17 nt, Human
agaaaagaaaaaaaaag

SEQ ID NO: 3571274 - RNA, 20 nt, Human
agaaaagaacguauuuuaaa

SEQ ID NO: 3571275 - RNA, 21 nt, Human
agaaaagaaucccuguucauu

SEQ ID NO: 3571276 - RNA, 9 nt, Human
agaaaagag

SEQ ID NO: 3571277 - RNA, 13 nt, Human
agaaaagagaaga

SEQ ID NO: 3571278 - RNA, 16 nt, Human
agaaaagagaagaaga

SEQ ID NO: 3571279 - RNA, 15 nt, Human
agaaaagauaaagau

SEQ ID NO: 3571280 - RNA, 13 nt, Human
agaaaagaugcac

SEQ ID NO: 3571281 - RNA, 18 nt, Human
agaaaagauuuuaaucaa

SEQ ID NO: 3571282 - RNA, 16 nt, Human
agaaaagcaccugccg

SEQ ID NO: 3571283 - RNA, 14 nt, Human
agaaaagcuuugaa

SEQ ID NO: 3571284 - RNA, 18 nt, Human
agaaaaggaaaagaaaaa

SEQ ID NO: 3571285 - RNA, 16 nt, Human
agaaaaggugauaaaa

SEQ ID NO: 3571286 - RNA, 15 nt, Human
agaaaaguagacaau

SEQ ID NO: 3571287 - RNA, 13 nt, Human
agaaaaguauuuu

SEQ ID NO: 3571288 - RNA, 16 nt, Human
agaaaaguauuuugaa

SEQ ID NO: 3571289 - RNA, 12 nt, Human
agaaaagugaau

SEQ ID NO: 3571290 - RNA, 15 nt, Human
agaaaagugaauuga

SEQ ID NO: 3571291 - RNA, 11 nt, Human
agaaaaguuau

SEQ ID NO: 3571292 - RNA, 18 nt, Human
agaaaaguugaauuuuac

SEQ ID NO: 3571293 - RNA, 15 nt, Human
agaaaaguuuauaaa

SEQ ID NO: 3571294 - RNA, 17 nt, Human
agaaaauaaaaaaaaga

SEQ ID NO: 3571295 - RNA, 19 nt, Human
agaaaauaaaaaaaagaaa

SEQ ID NO: 3571296 - RNA, 14 nt, Human
agaaaauaaaaagu

SEQ ID NO: 3571297 - RNA, 16 nt, Human
agaaaauaaaaaguua

SEQ ID NO: 3571298 - RNA, 13 nt, Human
agaaaauaaaauu

SEQ ID NO: 3571299 - RNA, 16 nt, Human
agaaaauaaagacaac

SEQ ID NO: 3571300 - RNA, 22 nt, Human
agaaaauaaggcacccaucugu

SEQ ID NO: 3571301 - RNA, 17 nt, Human
agaaaauaaucauucuu

SEQ ID NO: 3571302 - RNA, 15 nt, Human
agaaaauaccaagga

SEQ ID NO: 3571303 - RNA, 17 nt, Human
agaaaauacuuaaaugu

SEQ ID NO: 3571304 - RNA, 12 nt, Human
agaaaauauacu

SEQ ID NO: 3571305 - RNA, 14 nt, Human
agaaaauauucucu

SEQ ID NO: 3571306 - RNA, 16 nt, Human
agaaaauauuuugucu

SEQ ID NO: 3571307 - RNA, 22 nt, Human
agaaaauauuuugucuaaaaug

SEQ ID NO: 3571308 - RNA, 16 nt, Human
agaaaaucaggcuggc

SEQ ID NO: 3571309 - RNA, 19 nt, Human
agaaaaucauauugcuucu

SEQ ID NO: 3571310 - RNA, 19 nt, Human
agaaaaucaucaagaaggg

SEQ ID NO: 3571311 - RNA, 19 nt, Human
agaaaauggaaccaggcuu

SEQ ID NO: 3571312 - RNA, 20 nt, Human
agaaaauggaaccaggcuug

SEQ ID NO: 3571313 - RNA, 15 nt, Human
agaaaauggacacug

SEQ ID NO: 3571314 - RNA, 20 nt, Human
agaaaauggacguguuauga

SEQ ID NO: 3571315 - RNA, 23 nt, Human
agaaaauggacguguuaugacuc

SEQ ID NO: 3571316 - RNA, 20 nt, Human
agaaaaugguuuauuuugua

SEQ ID NO: 3571317 - RNA, 14 nt, Human
agaaaauguucugu

SEQ ID NO: 3571318 - RNA, 18 nt, Human
agaaaauguucuguuugc

SEQ ID NO: 3571319 - RNA, 19 nt, Human
agaaaauuccuauaaggaa

SEQ ID NO: 3571320 - RNA, 13 nt, Human
agaaaauugaauu

SEQ ID NO: 3571321 - RNA, 13 nt, Human
agaaacaaacauc

SEQ ID NO: 3571322 - RNA, 12 nt, Human
agaaacaaaccc

SEQ ID NO: 3571323 - RNA, 13 nt, Human
agaaacaaacuuu

SEQ ID NO: 3571324 - RNA, 14 nt, Human
agaaacaacacugu

SEQ ID NO: 3571325 - RNA, 18 nt, Human
agaaacaagguuuucagu

SEQ ID NO: 3571326 - RNA, 14 nt, Human
agaaacaaugaaug

SEQ ID NO: 3571327 - RNA, 13 nt, Human
agaaacaauuucu

SEQ ID NO: 3571328 - RNA, 14 nt, Human
agaaacaauuucug

SEQ ID NO: 3571329 - RNA, 15 nt, Human
agaaacacacugagg

SEQ ID NO: 3571330 - RNA, 19 nt, Human
agaaacacacugaggcagg

SEQ ID NO: 3571331 - RNA, 17 nt, Human
agaaacaggguguuguc

SEQ ID NO: 3571332 - RNA, 22 nt, Human
agaaacauaaauaaaaugacca

SEQ ID NO: 3571333 - RNA, 14 nt, Human
agaaacaucaguua

SEQ ID NO: 3571334 - RNA, 12 nt, Human
acuguguaaacu

SEQ ID NO: 3571335 - RNA, 13 nt, Human
acuguguaacugc

SEQ ID NO: 3571336 - RNA, 21 nt, Human
acuguguaagggccagaaaua

SEQ ID NO: 3571337 - RNA, 15 nt, Human
acuguguaauauaaa

SEQ ID NO: 3571338 - RNA, 21 nt, Human
acuguguaauauaaaagaucu

SEQ ID NO: 3571339 - RNA, 22 nt, Human
acuguguaauauaaaagaucuu

SEQ ID NO: 3571340 - RNA, 13 nt, Human
acuguguaauuag

SEQ ID NO: 3571341 - RNA, 12 nt, Human
acuguguacaua

SEQ ID NO: 3571342 - RNA, 14 nt, Human
acuguguacauaau

SEQ ID NO: 3571343 - RNA, 13 nt, Human
acuguguauauuu

SEQ ID NO: 3571344 - RNA, 15 nt, Human
acuguguauauuuga

SEQ ID NO: 3571345 - RNA, 16 nt, Human
acuguguauauuugau

SEQ ID NO: 3571346 - RNA, 16 nt, Human
acuguguauuccaaga

SEQ ID NO: 3571347 - RNA, 18 nt, Human
acugugucauaaacagau

SEQ ID NO: 3571348 - RNA, 16 nt, Human
acuguguccuggugcu

SEQ ID NO: 3571349 - RNA, 19 nt, Human
acugugugcagacucaaua

SEQ ID NO: 3571350 - RNA, 15 nt, Human
acugugugcucagga

SEQ ID NO: 3571351 - RNA, 13 nt, Human
acuguguggaacu

SEQ ID NO: 3571352 - RNA, 14 nt, Human
acugugugugcccu

SEQ ID NO: 3571353 - RNA, 17 nt, Human
acugugugugcccucug

SEQ ID NO: 3571354 - RNA, 14 nt, Human
acuguguguugcca

SEQ ID NO: 3571355 - RNA, 20 nt, Human
acuguguguugccacaggac

SEQ ID NO: 3571356 - RNA, 16 nt, Human
acuguguuaugcaaaa

SEQ ID NO: 3571357 - RNA, 21 nt, Human
acuguguuaugcaaaagcaag

SEQ ID NO: 3571358 - RNA, 14 nt, Human
acuguguucauuag

SEQ ID NO: 3571359 - RNA, 21 nt, Human
acuguguuguaccaaaauuca

SEQ ID NO: 3571360 - RNA, 15 nt, Human
acuguguuguauuaa

SEQ ID NO: 3571361 - RNA, 20 nt, Human
acuguguuguauuaacaaaa

SEQ ID NO: 3571362 - RNA, 14 nt, Human
acuguguuucaagu

SEQ ID NO: 3571363 - RNA, 18 nt, Human
acuguguuucaaguucaa

SEQ ID NO: 3571364 - RNA, 18 nt, Human
acuguguuuuauaaaaua

SEQ ID NO: 3571365 - RNA, 19 nt, Human
acuguguuuuauaaaauag

SEQ ID NO: 3571366 - RNA, 17 nt, Human
acuguuaauaguucagg

SEQ ID NO: 3571367 - RNA, 19 nt, Human
acuguuaccauuggaaauu

SEQ ID NO: 3571368 - RNA, 22 nt, Human
acuguuaccauuggaaauuuca

SEQ ID NO: 3571369 - RNA, 21 nt, Human
acuguuaccugaucaaugaca

SEQ ID NO: 3571370 - RNA, 19 nt, Human
acuuagcuuaucaauuugu

SEQ ID NO: 3571371 - RNA, 21 nt, Human
acuuagcuuaucaauuuguca

SEQ ID NO: 3571372 - RNA, 18 nt, Human
acuuaggcccuagcggca

SEQ ID NO: 3571373 - RNA, 16 nt, Human
acuuagggcaccaggg

SEQ ID NO: 3571374 - RNA, 17 nt, Human
acuuaggguuuggagcu

SEQ ID NO: 3571375 - RNA, 20 nt, Human
acuuaguacaaaguuucaau

SEQ ID NO: 3571376 - RNA, 17 nt, Human
acuuaguauauuuucuu

SEQ ID NO: 3571377 - RNA, 20 nt, Human
acuuaguauugcaaagucag

SEQ ID NO: 3571378 - RNA, 18 nt, Human
acuuagugacaaaauaga

SEQ ID NO: 3571379 - RNA, 15 nt, Human
acuuaguuugugaau

SEQ ID NO: 3571380 - RNA, 17 nt, Human
acuuaguuuugcauagu

SEQ ID NO: 3571381 - RNA, 20 nt, Human
acuuauaaaucauauugaug

SEQ ID NO: 3571382 - RNA, 14 nt, Human
acuuauagccucug

SEQ ID NO: 3571383 - RNA, 15 nt, Human
acuuauagccucugu

SEQ ID NO: 3571384 - RNA, 14 nt, Human
acuuauaguacaug

SEQ ID NO: 3571385 - RNA, 18 nt, Human
acuuauaguacaugauaa

SEQ ID NO: 3571386 - RNA, 16 nt, Human
acuuauauuaauagua

SEQ ID NO: 3571387 - RNA, 22 nt, Human
acuuauauuaauaguaauuugu

SEQ ID NO: 3571388 - RNA, 16 nt, Human
acuuauauugaagaca

SEQ ID NO: 3571389 - RNA, 18 nt, Human
acuuauauuguaagaaau

SEQ ID NO: 3571390 - RNA, 21 nt, Human
acuuauauuguaagaaauacu

SEQ ID NO: 3571391 - RNA, 15 nt, Human
acuuauauuucccua

SEQ ID NO: 3571392 - RNA, 15 nt, Human
acuuauauuuucgua

SEQ ID NO: 3571393 - RNA, 21 nt, Human
acuuauauuuucguaugaaaa

SEQ ID NO: 3571394 - RNA, 19 nt, Human
acuuaucauccacauuguu

SEQ ID NO: 3571395 - RNA, 15 nt, Human
acuuaucccucucca

SEQ ID NO: 3571396 - RNA, 17 nt, Human
acuuaucccugcccauu

SEQ ID NO: 3571397 - RNA, 16 nt, Human
acuuaucugaucagaa

SEQ ID NO: 3571398 - RNA, 20 nt, Human
acuuaugaaugauuugcaua

SEQ ID NO: 3571399 - RNA, 17 nt, Human
acuuaugaauguuuccg

SEQ ID NO: 3571400 - RNA, 23 nt, Human
acuuaugaccucuuccuuuagga

SEQ ID NO: 3571401 - RNA, 15 nt, Human
acuuauguagauauu

SEQ ID NO: 3571402 - RNA, 23 nt, Human
acuuauguuacugguguccagcu

SEQ ID NO: 3571403 - RNA, 15 nt, Human
acuuauguuuuuaaa

SEQ ID NO: 3571404 - RNA, 11 nt, Human
acuuauuaaau

SEQ ID NO: 3571405 - RNA, 13 nt, Human
acuuauuacaauu

SEQ ID NO: 3571406 - RNA, 16 nt, Human
acuuauuacugcuaag

SEQ ID NO: 3571407 - RNA, 19 nt, Human
acuuauuacugcuaaguau

SEQ ID NO: 3571408 - RNA, 17 nt, Human
acuuauucaaagagaaa

SEQ ID NO: 3571409 - RNA, 15 nt, Human
acuuauugaauauau

SEQ ID NO: 3571410 - RNA, 17 nt, Human
acuuauugaauauauga

SEQ ID NO: 3571411 - RNA, 15 nt, Human
acuuauugaccauuu

SEQ ID NO: 3571412 - RNA, 18 nt, Human
acuuauugcugauuuuaa

SEQ ID NO: 3571413 - RNA, 20 nt, Human
acuuauugcugauuuuaaug

SEQ ID NO: 3571414 - RNA, 15 nt, Human
acuuauugcuuugaa

SEQ ID NO: 3571415 - RNA, 20 nt, Human
acuuauuguagcauccugga

SEQ ID NO: 3571416 - RNA, 19 nt, Human
acuuauuguggauaacaaa

SEQ ID NO: 3571417 - RNA, 13 nt, Human
acuuauuuaaaua

SEQ ID NO: 3571418 - RNA, 13 nt, Human
acuuauuuaaugc

SEQ ID NO: 3571419 - RNA, 22 nt, Human
acuuauuugagugauuauuugu

SEQ ID NO: 3571420 - RNA, 17 nt, Human
acuuauuuuaaaauauu

SEQ ID NO: 3571421 - RNA, 14 nt, Human
acuuauuuuugaca

SEQ ID NO: 3571422 - RNA, 16 nt, Human
acuuauuuuugacagu

SEQ ID NO: 3571423 - RNA, 15 nt, Human
acuuauuuuuuucug

SEQ ID NO: 3571424 - RNA, 16 nt, Human
acuuauuuuuuucuga

SEQ ID NO: 3571425 - RNA, 18 nt, Human
acuuauuuuuuucugauu

SEQ ID NO: 3571426 - RNA, 17 nt, Human
acuucaaaaguauuuuc

SEQ ID NO: 3571427 - RNA, 19 nt, Human
acuucaaaaguauuuuccu

SEQ ID NO: 3571428 - RNA, 21 nt, Human
acuucaaaaguauuuuccugu

SEQ ID NO: 3571429 - RNA, 16 nt, Human
acuucaaaauauugag

SEQ ID NO: 3571430 - RNA, 21 nt, Human
acuucaaacuacuuugcugcu

SEQ ID NO: 3571431 - RNA, 20 nt, Human
acuucaaauccuugaagauu

SEQ ID NO: 3571432 - RNA, 16 nt, Human
acuucaaguuaaagug

SEQ ID NO: 3571433 - RNA, 17 nt, Human
acuucacacacaggcaa

SEQ ID NO: 3571434 - RNA, 13 nt, Human
acuucacacugca

SEQ ID NO: 3571435 - RNA, 16 nt, Human
acuucacagagugugc

SEQ ID NO: 3571436 - RNA, 18 nt, Human
acuucacagagugugcug

SEQ ID NO: 3571437 - RNA, 19 nt, Human
acuucacauauugauuucc

SEQ ID NO: 3571438 - RNA, 21 nt, Human
acuucacugucaggaagaaau

SEQ ID NO: 3571439 - RNA, 17 nt, Human
acuucacugugcuguug

SEQ ID NO: 3571440 - RNA, 20 nt, Human
acuucacugugcuguuguua

SEQ ID NO: 3571441 - RNA, 21 nt, Human
acuucacugugcuguuguuau

SEQ ID NO: 3571442 - RNA, 15 nt, Human
acuucagaauuccau

SEQ ID NO: 3571443 - RNA, 21 nt, Human
acuucagacauagaauuaaca

SEQ ID NO: 3571444 - RNA, 12 nt, Human
acuucagcaaga

SEQ ID NO: 3571445 - RNA, 17 nt, Human
acuucagcaagagagaa

SEQ ID NO: 3571446 - RNA, 17 nt, Human
acuucagcgguuuauau

SEQ ID NO: 3571447 - RNA, 18 nt, Human
acuucagcgguuuauaua

SEQ ID NO: 3571448 - RNA, 14 nt, Human
acuucagcucuguu

SEQ ID NO: 3571449 - RNA, 17 nt, Human
acuucaggcucuucucc

SEQ ID NO: 3571450 - RNA, 17 nt, Human
acuucagggcagauuuu

SEQ ID NO: 3571451 - RNA, 15 nt, Human
acuucaggggcugcc

SEQ ID NO: 3571452 - RNA, 16 nt, Human
acuucaggggcugccc

SEQ ID NO: 3571453 - RNA, 17 nt, Human
acuucaggggcugcccg

SEQ ID NO: 3571454 - RNA, 19 nt, Human
acuucaggggcugcccgcu

SEQ ID NO: 3571455 - RNA, 22 nt, Human
acuucaggggcugcccgcuccc

SEQ ID NO: 3571456 - RNA, 21 nt, Human
acuucaguauguugucaaaga

SEQ ID NO: 3571457 - RNA, 15 nt, Human
acuucaguuaucuug

SEQ ID NO: 3571458 - RNA, 17 nt, Human
acuucauagauuuccuu

SEQ ID NO: 3571459 - RNA, 22 nt, Human
acuucauauugcugagagaaau

SEQ ID NO: 3571460 - RNA, 16 nt, Human
acuucaucuggaaguu

SEQ ID NO: 3571461 - RNA, 19 nt, Human
acuucaucuucucagcucc

SEQ ID NO: 3571462 - RNA, 22 nt, Human
acuucauggccuuugauaaaug

SEQ ID NO: 3571463 - RNA, 16 nt, Human
acuucauguaaagugu

SEQ ID NO: 3571464 - RNA, 22 nt, Human
acuucauguaauuuuauuuuaa

SEQ ID NO: 3571465 - RNA, 17 nt, Human
acuucauucugcagggu

SEQ ID NO: 3571466 - RNA, 17 nt, Human
acuucauugaaaauaua

SEQ ID NO: 3571467 - RNA, 23 nt, Human
cgggaaaagcagcccuuggccag

SEQ ID NO: 3571468 - RNA, 20 nt, Human
cgggaaaaggagaggaaacu

SEQ ID NO: 3571469 - RNA, 20 nt, Human
cgggaaccucacucuugcca

SEQ ID NO: 3571470 - RNA, 18 nt, Human
cgggaaccuccccagccu

SEQ ID NO: 3571471 - RNA, 20 nt, Human
cgggaaccuccccagccugc

SEQ ID NO: 3571472 - RNA, 18 nt, Human
cgggaagagaggaguuca

SEQ ID NO: 3571473 - RNA, 19 nt, Human
cgggaagagaggaguucaa

SEQ ID NO: 3571474 - RNA, 23 nt, Human
cgggaagagaggaguucaaugau

SEQ ID NO: 3571475 - RNA, 24 nt, Human
cgggaagagaggaguucaaugauc

SEQ ID NO: 3571476 - RNA, 12 nt, Human
cgggaagcggag

SEQ ID NO: 3571477 - RNA, 12 nt, Human
cgggaaggaggg

SEQ ID NO: 3571478 - RNA, 23 nt, Human
cgggaaggaggguuagggagggg

SEQ ID NO: 3571479 - RNA, 20 nt, Human
cgggaagggggcugggacau

SEQ ID NO: 3571480 - RNA, 17 nt, Human
cgggaaggucaccagca

SEQ ID NO: 3571481 - RNA, 15 nt, Human
cgggaauauuguuuc

SEQ ID NO: 3571482 - RNA, 18 nt, Human
cgggacagugcugcagcu

SEQ ID NO: 3571483 - RNA, 19 nt, Human
cgggacaucacaggguggg

SEQ ID NO: 3571484 - RNA, 21 nt, Human
cgggacaucacagggugggcc

SEQ ID NO: 3571485 - RNA, 17 nt, Human
cgggaccacccugagcc

SEQ ID NO: 3571486 - RNA, 18 nt, Human
cgggaccccgagccuggc

SEQ ID NO: 3571487 - RNA, 13 nt, Human
cgggaccuguggc

SEQ ID NO: 3571488 - RNA, 21 nt, Human
cgggacgagacccuacaggag

SEQ ID NO: 3571489 - RNA, 21 nt, Human
cgggacucacuggcagcccca

SEQ ID NO: 3571490 - RNA, 23 nt, Human
cgggacucacuggcagccccagc

SEQ ID NO: 3571491 - RNA, 16 nt, Human
cgggagaaucauguga

SEQ ID NO: 3571492 - RNA, 12 nt, Human
cgggagacagca

SEQ ID NO: 3571493 - RNA, 14 nt, Human
cgggagcagugucu

SEQ ID NO: 3571494 - RNA, 15 nt, Human
cgggagcagugucuu

SEQ ID NO: 3571495 - RNA, 17 nt, Human
cgggagccucccugccu

SEQ ID NO: 3571496 - RNA, 17 nt, Human
cgggagccugacccuca

SEQ ID NO: 3571497 - RNA, 16 nt, Human
cgggagcucaggaacc

SEQ ID NO: 3571498 - RNA, 21 nt, Human
cgggaggauguucugggacac

SEQ ID NO: 3571499 - RNA, 23 nt, Human
cgggaggauguucugggacacag

SEQ ID NO: 3571500 - RNA, 22 nt, Human
cgggaggcagagguugcagugu

SEQ ID NO: 3571501 - RNA, 14 nt, Human
cgggaggcagaguu

SEQ ID NO: 3571502 - RNA, 16 nt, Human
cgggaggcagaguuug

SEQ ID NO: 3571503 - RNA, 16 nt, Human
cgggaggcugagacag

SEQ ID NO: 3571504 - RNA, 19 nt, Human
cgggaggcugagacaggag

SEQ ID NO: 3571505 - RNA, 19 nt, Human
cgggaggggcccgcuugcc

SEQ ID NO: 3571506 - RNA, 16 nt, Human
cgggaggucgaggcag

SEQ ID NO: 3571507 - RNA, 17 nt, Human
cgggaggucgaggcagg

SEQ ID NO: 3571508 - RNA, 16 nt, Human
cgggaguuggagaccc

SEQ ID NO: 3571509 - RNA, 22 nt, Human
cgggcaaaugccagggcccgca

SEQ ID NO: 3571510 - RNA, 15 nt, Human
cgggcacaccuccuc

SEQ ID NO: 3571511 - RNA, 18 nt, Human
cgggcagagggcuggagg

SEQ ID NO: 3571512 - RNA, 12 nt, Human
cgggcagcacag

SEQ ID NO: 3571513 - RNA, 13 nt, Human
cgggcagccuggc

SEQ ID NO: 3571514 - RNA, 15 nt, Human
cgggcagggcuccca

SEQ ID NO: 3571515 - RNA, 23 nt, Human
cgggcaggggagggucagccagg

SEQ ID NO: 3571516 - RNA, 21 nt, Human
cgggcaggguguggggccaug

SEQ ID NO: 3571517 - RNA, 18 nt, Human
cgggccaaggaccugaga

SEQ ID NO: 3571518 - RNA, 14 nt, Human
cgggccaaggacug

SEQ ID NO: 3571519 - RNA, 19 nt, Human
cgggccacagagaaaguac

SEQ ID NO: 3571520 - RNA, 19 nt, Human
cgggccacuccuuccugcc

SEQ ID NO: 3571521 - RNA, 21 nt, Human
cgggccacuccuuccugcccc

SEQ ID NO: 3571522 - RNA, 16 nt, Human
cgggccagccaggcgg

SEQ ID NO: 3571523 - RNA, 17 nt, Human
cgggccagccaggcggg

SEQ ID NO: 3571524 - RNA, 17 nt, Human
cgggccagggcugcccc

SEQ ID NO: 3571525 - RNA, 18 nt, Human
cgggccagggcugccccu

SEQ ID NO: 3571526 - RNA, 11 nt, Human
cgggcccaccu

SEQ ID NO: 3571527 - RNA, 13 nt, Human
cgggcccaccugg

SEQ ID NO: 3571528 - RNA, 17 nt, Human
cgggcccaccuggccac

SEQ ID NO: 3571529 - RNA, 20 nt, Human
cgggcccaccuggccaccug

SEQ ID NO: 3571530 - RNA, 18 nt, Human
cgggcccagcccccacag

SEQ ID NO: 3571531 - RNA, 15 nt, Human
cgggccccaccugca

SEQ ID NO: 3571532 - RNA, 11 nt, Human
cgggcccuccc

SEQ ID NO: 3571533 - RNA, 20 nt, Human
cgggcccuucuugcugcccu

SEQ ID NO: 3571534 - RNA, 19 nt, Human
cgggccgacggagccggga

SEQ ID NO: 3571535 - RNA, 18 nt, Human
cgggccuguacagucugu

SEQ ID NO: 3571536 - RNA, 16 nt, Human
cgggccuguccacagg

SEQ ID NO: 3571537 - RNA, 20 nt, Human
cgggccuugucgcagcgcag

SEQ ID NO: 3571538 - RNA, 15 nt, Human
cgggcgcacugccuc

SEQ ID NO: 3571539 - RNA, 22 nt, Human
cgggcgcacugccucucacagc

SEQ ID NO: 3571540 - RNA, 23 nt, Human
cgggcgccuguagucccagccac

SEQ ID NO: 3571541 - RNA, 20 nt, Human
cgggcgcgaucccacacagg

SEQ ID NO: 3571542 - RNA, 14 nt, Human
cgggcgcgguggcu

SEQ ID NO: 3571543 - RNA, 15 nt, Human
cgggcucagcaaaag

SEQ ID NO: 3571544 - RNA, 16 nt, Human
cgggcuccugugcccu

SEQ ID NO: 3571545 - RNA, 15 nt, Human
cgggcugagggccug

SEQ ID NO: 3571546 - RNA, 19 nt, Human
cgggcugagggccugcugg

SEQ ID NO: 3571547 - RNA, 13 nt, Human
cgggcugccuggg

SEQ ID NO: 3571548 - RNA, 15 nt, Human
cgggcugccugggcu

SEQ ID NO: 3571549 - RNA, 16 nt, Human
cgggcuggccugugcc

SEQ ID NO: 3571550 - RNA, 14 nt, Human
cggggaagccagac

SEQ ID NO: 3571551 - RNA, 22 nt, Human
cggggaggagagagcagcuucu

SEQ ID NO: 3571552 - RNA, 18 nt, Human
cggggaguuucuuuccug

SEQ ID NO: 3571553 - RNA, 19 nt, Human
cggggaguuucuuuccugc

SEQ ID NO: 3571554 - RNA, 23 nt, Human
cggggcacccgccggaugcgcag

SEQ ID NO: 3571555 - RNA, 20 nt, Human
cggggcagcagcagcccugc

SEQ ID NO: 3571556 - RNA, 13 nt, Human
cggggcagccccc

SEQ ID NO: 3571557 - RNA, 19 nt, Human
cggggcagcugccagagaa

SEQ ID NO: 3571558 - RNA, 14 nt, Human
cggggcagggcagc

SEQ ID NO: 3571559 - RNA, 15 nt, Human
cggggcaucuggccu

SEQ ID NO: 3571560 - RNA, 19 nt, Human
cggggcaugcuggggcaag

SEQ ID NO: 3571561 - RNA, 20 nt, Human
cggggcccagggcaagcucc

SEQ ID NO: 3571562 - RNA, 14 nt, Human
cggggccccagggc

SEQ ID NO: 3571563 - RNA, 15 nt, Human
cggggccccagggcu

SEQ ID NO: 3571564 - RNA, 17 nt, Human
cggggccgacauugucu

SEQ ID NO: 3571565 - RNA, 16 nt, Human
cggggccugccuagca

SEQ ID NO: 3571566 - RNA, 22 nt, Human
cggggccuggcgggaugggcca

SEQ ID NO: 3571567 - RNA, 22 nt, Human
cggggccuuaucgggcuccagc

SEQ ID NO: 3571568 - RNA, 19 nt, Human
cggggcugucggcgcugcc

SEQ ID NO: 3571569 - RNA, 15 nt, Human
cggggcuugccuucu

SEQ ID NO: 3571570 - RNA, 19 nt, Human
cgggggaggguaggcagga

SEQ ID NO: 3571571 - RNA, 12 nt, Human
cgggggcagcug

SEQ ID NO: 3571572 - RNA, 22 nt, Human
cgggggcagugcucacccacac

SEQ ID NO: 3571573 - RNA, 14 nt, Human
cgggggcucaagcu

SEQ ID NO: 3571574 - RNA, 16 nt, Human
cgggggcugaggggca

SEQ ID NO: 3571575 - RNA, 13 nt, Human
cgggggcuggccu

SEQ ID NO: 3571576 - RNA, 15 nt, Human
cgggggcuggccuag

SEQ ID NO: 3571577 - RNA, 15 nt, Human
cggggggacagcucc

SEQ ID NO: 3571578 - RNA, 12 nt, Human
cggggggaggga

SEQ ID NO: 3571579 - RNA, 20 nt, Human
cggggggccccagucagccu

SEQ ID NO: 3571580 - RNA, 22 nt, Human
cggggggccccagucagccucu

SEQ ID NO: 3571581 - RNA, 23 nt, Human
cggggggccccagucagccucuc

SEQ ID NO: 3571582 - RNA, 17 nt, Human
cggggguggcggcggcc

SEQ ID NO: 3571583 - RNA, 14 nt, Human
cgggguaugaagag

SEQ ID NO: 3571584 - RNA, 19 nt, Human
cgggguggugggaaccaug

SEQ ID NO: 3571585 - RNA, 18 nt, Human
cgggucgggggcaggugc

SEQ ID NO: 3571586 - RNA, 13 nt, Human
cgggucugcuccc

SEQ ID NO: 3571587 - RNA, 12 nt, Human
cgggucuuccua

SEQ ID NO: 3571588 - RNA, 22 nt, Human
cgggugcagacaaucuucuguu

SEQ ID NO: 3571589 - RNA, 19 nt, Human
cggguggaucaccugaggu

SEQ ID NO: 3571590 - RNA, 19 nt, Human
cgggugggcggcacagccu

SEQ ID NO: 3571591 - RNA, 16 nt, Human
cggguggggcuugggg

SEQ ID NO: 3571592 - RNA, 23 nt, Human
cggguggggguggaauaaaauac

SEQ ID NO: 3571593 - RNA, 14 nt, Human
cgggugguccccgu

SEQ ID NO: 3571594 - RNA, 17 nt, Human
cggguugugugucuguu

SEQ ID NO: 3571595 - RNA, 15 nt, Human
cggguuucucugugg

SEQ ID NO: 3571596 - RNA, 21 nt, Human
cggguuuuauuguuuaaaauc

SEQ ID NO: 3571597 - RNA, 14 nt, Human
cgguaacuguccug

SEQ ID NO: 3571598 - RNA, 15 nt, Human
cgguaacuguccugu

SEQ ID NO: 3571599 - RNA, 18 nt, Human
cgguaacuguccuguccu

SEQ ID NO: 3571600 - RNA, 18 nt, Human
cgguaggcgaccaccgcc

SEQ ID NO: 3571601 - RNA, 15 nt, Human
cgguagggaggcagc

SEQ ID NO: 3571602 - RNA, 17 nt, Human
cgguagggaggcagccu

SEQ ID NO: 3571603 - RNA, 22 nt, Human
cgguauccccccaucuugcuuc

SEQ ID NO: 3571604 - RNA, 17 nt, Human
cgguauuaugcuucuug

SEQ ID NO: 3571605 - RNA, 14 nt, Human
cggucagguuuaac

SEQ ID NO: 3571606 - RNA, 18 nt, Human
cgguccaagccugcaacu

SEQ ID NO: 3571607 - RNA, 15 nt, Human
cgguccacccaggag

SEQ ID NO: 3571608 - RNA, 13 nt, Human
cgguccagcuggc

SEQ ID NO: 3571609 - RNA, 13 nt, Human
cggucccaccccu

SEQ ID NO: 3571610 - RNA, 13 nt, Human
cgguccuggugcc

SEQ ID NO: 3571611 - RNA, 17 nt, Human
cggucggggcaucuggc

SEQ ID NO: 3571612 - RNA, 18 nt, Human
cucauuaugccacuuccu

SEQ ID NO: 3571613 - RNA, 21 nt, Human
cucauuauuuauguccaggug

SEQ ID NO: 3571614 - RNA, 14 nt, Human
cucauucaguauua

SEQ ID NO: 3571615 - RNA, 21 nt, Human
cucauucauuuuauauugaaa

SEQ ID NO: 3571616 - RNA, 15 nt, Human
cucauuccagaggaa

SEQ ID NO: 3571617 - RNA, 17 nt, Human
cucauuccagaggaagg

SEQ ID NO: 3571618 - RNA, 13 nt, Human
cucauuccccagg

SEQ ID NO: 3571619 - RNA, 13 nt, Human
cucauuccccggg

SEQ ID NO: 3571620 - RNA, 14 nt, Human
cucauuccccgggg

SEQ ID NO: 3571621 - RNA, 18 nt, Human
cucauucccuccccagaa

SEQ ID NO: 3571622 - RNA, 21 nt, Human
cucauucccucgucuuuccca

SEQ ID NO: 3571623 - RNA, 12 nt, Human
cucauuccugaa

SEQ ID NO: 3571624 - RNA, 18 nt, Human
cucauuccugccugucuc

SEQ ID NO: 3571625 - RNA, 14 nt, Human
cucauucuaaugau

SEQ ID NO: 3571626 - RNA, 18 nt, Human
cucauucuaaugauggcc

SEQ ID NO: 3571627 - RNA, 18 nt, Human
cucauucuccuuguguua

SEQ ID NO: 3571628 - RNA, 14 nt, Human
cucauucuucugua

SEQ ID NO: 3571629 - RNA, 17 nt, Human
cucauugaauuauaaaa

SEQ ID NO: 3571630 - RNA, 15 nt, Human
cucauugaccugagg

SEQ ID NO: 3571631 - RNA, 17 nt, Human
cucauugaccugaggcc

SEQ ID NO: 3571632 - RNA, 19 nt, Human
cucauugaccugaggcccu

SEQ ID NO: 3571633 - RNA, 14 nt, Human
cucauugacuuuua

SEQ ID NO: 3571634 - RNA, 21 nt, Human
cucauugacuuuuauaaagca

SEQ ID NO: 3571635 - RNA, 21 nt, Human
cucauugcucugaauauguca

SEQ ID NO: 3571636 - RNA, 15 nt, Human
cucauugcugagccu

SEQ ID NO: 3571637 - RNA, 18 nt, Human
cucauugcugagccucug

SEQ ID NO: 3571638 - RNA, 19 nt, Human
cucauugcugagccucugc

SEQ ID NO: 3571639 - RNA, 22 nt, Human
cucauugcuucacaacccaucu

SEQ ID NO: 3571640 - RNA, 22 nt, Human
cucauuggaaauuuagcauugu

SEQ ID NO: 3571641 - RNA, 18 nt, Human
cucauuggacccuuccau

SEQ ID NO: 3571642 - RNA, 22 nt, Human
cucauuuaauccucccuuccuc

SEQ ID NO: 3571643 - RNA, 16 nt, Human
cucauuuagccugucc

SEQ ID NO: 3571644 - RNA, 14 nt, Human
cucauuucaccccu

SEQ ID NO: 3571645 - RNA, 16 nt, Human
cucauuucaucucauu

SEQ ID NO: 3571646 - RNA, 18 nt, Human
cucauuucaucucauuua

SEQ ID NO: 3571647 - RNA, 21 nt, Human
cucauuuuaaugauuguuuaa

SEQ ID NO: 3571648 - RNA, 15 nt, Human
cucauuuuaauguaa

SEQ ID NO: 3571649 - RNA, 18 nt, Human
cucauuuuaggcaaauau

SEQ ID NO: 3571650 - RNA, 22 nt, Human
cucauuuuuccguaaaaaugau

SEQ ID NO: 3571651 - RNA, 23 nt, Human
cucauuuuuuuuuuuguuucuga

SEQ ID NO: 3571652 - RNA, 20 nt, Human
cuccaaaaaucugccugggu

SEQ ID NO: 3571653 - RNA, 21 nt, Human
cuccaaaaaucugccuggguu

SEQ ID NO: 3571654 - RNA, 16 nt, Human
cuccaaaauaaaacuu

SEQ ID NO: 3571655 - RNA, 14 nt, Human
cuccaaaaugugcc

SEQ ID NO: 3571656 - RNA, 22 nt, Human
cuccaaaauguuggucauuuua

SEQ ID NO: 3571657 - RNA, 21 nt, Human
cuccaaacugacucuuaagaa

SEQ ID NO: 3571658 - RNA, 12 nt, Human
cuccaaagaaau

SEQ ID NO: 3571659 - RNA, 13 nt, Human
cuccaaagaaaug

SEQ ID NO: 3571660 - RNA, 22 nt, Human
cuccaaaggaagucuaggagcu

SEQ ID NO: 3571661 - RNA, 12 nt, Human
cuccaaaugcug

SEQ ID NO: 3571662 - RNA, 23 nt, Human
cuccaacacaaggcuccaagacc

SEQ ID NO: 3571663 - RNA, 18 nt, Human
cuccaacaccaagcacag

SEQ ID NO: 3571664 - RNA, 20 nt, Human
cuccaacagaacuaaauguu

SEQ ID NO: 3571665 - RNA, 22 nt, Human
cuccaacagaacuaaauguucu

SEQ ID NO: 3571666 - RNA, 19 nt, Human
cuccaacaucacagcccag

SEQ ID NO: 3571667 - RNA, 22 nt, Human
cuccaaccccccagcacugagg

SEQ ID NO: 3571668 - RNA, 19 nt, Human
cuccaaccccucgcccagu

SEQ ID NO: 3571669 - RNA, 20 nt, Human
cuccaaccccucgcccaguc

SEQ ID NO: 3571670 - RNA, 23 nt, Human
cuccaaccccucgcccaguccca

SEQ ID NO: 3571671 - RNA, 14 nt, Human
cuccaacccugccg

SEQ ID NO: 3571672 - RNA, 15 nt, Human
cuccaacccugccgu

SEQ ID NO: 3571673 - RNA, 22 nt, Human
cuccaaccuaaccugugucugc

SEQ ID NO: 3571674 - RNA, 21 nt, Human
cuccaaccugcaaagaucugu

SEQ ID NO: 3571675 - RNA, 14 nt, Human
cuccaaccuggaca

SEQ ID NO: 3571676 - RNA, 18 nt, Human
cuccaaccuggggggcag

SEQ ID NO: 3571677 - RNA, 21 nt, Human
cuccaagaccuguugguucca

SEQ ID NO: 3571678 - RNA, 15 nt, Human
cuccaagaccuucuc

SEQ ID NO: 3571679 - RNA, 21 nt, Human
cuccaagaccuucuccuucac

SEQ ID NO: 3571680 - RNA, 14 nt, Human
cuccaagagcuaca

SEQ ID NO: 3571681 - RNA, 16 nt, Human
cuccaagauucuagau

SEQ ID NO: 3571682 - RNA, 19 nt, Human
cuccaagcagcuuagaguu

SEQ ID NO: 3571683 - RNA, 24 nt, Human
cuccaagcaggacauggacaagga

SEQ ID NO: 3571684 - RNA, 18 nt, Human
cuccaagcuccaucucca

SEQ ID NO: 3571685 - RNA, 16 nt, Human
cuccaagcucccaggc

SEQ ID NO: 3571686 - RNA, 17 nt, Human
cuccaagcucccaggca

SEQ ID NO: 3571687 - RNA, 20 nt, Human
cuccaaggacagaaggcucc

SEQ ID NO: 3571688 - RNA, 21 nt, Human
cuccaaggaggggcuguaaaa

SEQ ID NO: 3571689 - RNA, 14 nt, Human
cuccaaggccaggc

SEQ ID NO: 3571690 - RNA, 19 nt, Human
cuccaaggccaggccuugg

SEQ ID NO: 3571691 - RNA, 15 nt, Human
cuccaaggugggguc

SEQ ID NO: 3571692 - RNA, 15 nt, Human
cuccaagugccagag

SEQ ID NO: 3571693 - RNA, 19 nt, Human
cuccaagugccagaggugg

SEQ ID NO: 3571694 - RNA, 20 nt, Human
cuccaagugccagagguggg

SEQ ID NO: 3571695 - RNA, 16 nt, Human
cuccaauaucagugcu

SEQ ID NO: 3571696 - RNA, 14 nt, Human
cuccaauccugccc

SEQ ID NO: 3571697 - RNA, 20 nt, Human
cuccaaugucugcugaggag

SEQ ID NO: 3571698 - RNA, 20 nt, Human
cuccaauuaaggauuuuaug

SEQ ID NO: 3571699 - RNA, 20 nt, Human
cuccacacagugcucaaggc

SEQ ID NO: 3571700 - RNA, 18 nt, Human
cuccacaccauucagguc

SEQ ID NO: 3571701 - RNA, 20 nt, Human
cuccacaccauucaggucuu

SEQ ID NO: 3571702 - RNA, 13 nt, Human
cuccacaccugcg

SEQ ID NO: 3571703 - RNA, 15 nt, Human
cuccacaccugcggc

SEQ ID NO: 3571704 - RNA, 19 nt, Human
cuccacagcaaccccaggc

SEQ ID NO: 3571705 - RNA, 15 nt, Human
cuccacagccgcagc

SEQ ID NO: 3571706 - RNA, 20 nt, Human
cuccacagcgagggcagcug

SEQ ID NO: 3571707 - RNA, 22 nt, Human
cuccacagcgagggcagcugcu

SEQ ID NO: 3571708 - RNA, 15 nt, Human
cuccacaguucagug

SEQ ID NO: 3571709 - RNA, 13 nt, Human
cuccacauccucc

SEQ ID NO: 3571710 - RNA, 14 nt, Human
cuccacauccucca

SEQ ID NO: 3571711 - RNA, 15 nt, Human
cuccacauccuccac

SEQ ID NO: 3571712 - RNA, 15 nt, Human
cuccacaucugccuu

SEQ ID NO: 3571713 - RNA, 13 nt, Human
cuccaccaaccca

SEQ ID NO: 3571714 - RNA, 20 nt, Human
cuccaccaacccaucagaag

SEQ ID NO: 3571715 - RNA, 13 nt, Human
cuccaccacaucc

SEQ ID NO: 3571716 - RNA, 13 nt, Human
cuccaccacccaa

SEQ ID NO: 3571717 - RNA, 14 nt, Human
cuccaccacccaaa

SEQ ID NO: 3571718 - RNA, 20 nt, Human
cuccaccagcaucaccugcc

SEQ ID NO: 3571719 - RNA, 14 nt, Human
cuccacccauccua

SEQ ID NO: 3571720 - RNA, 21 nt, Human
cuccacccauccuaucagccu

SEQ ID NO: 3571721 - RNA, 11 nt, Human
cuccaccccag

SEQ ID NO: 3571722 - RNA, 17 nt, Human
cuccaccccagccccca

SEQ ID NO: 3571723 - RNA, 12 nt, Human
cuccaccccagg

SEQ ID NO: 3571724 - RNA, 15 nt, Human
cuccacccccagcug

SEQ ID NO: 3571725 - RNA, 22 nt, Human
cuccacccccagcugcuugugu

SEQ ID NO: 3571726 - RNA, 16 nt, Human
cuccaccccccagaac

SEQ ID NO: 3571727 - RNA, 16 nt, Human
cuccacccuccaccuu

SEQ ID NO: 3571728 - RNA, 14 nt, Human
cuccacccucccag

SEQ ID NO: 3571729 - RNA, 18 nt, Human
cuccacccucccagaccu

SEQ ID NO: 3571730 - RNA, 19 nt, Human
cuccacccucugagcuuug

SEQ ID NO: 3571731 - RNA, 11 nt, Human
cuccacccugc

SEQ ID NO: 3571732 - RNA, 14 nt, Human
cuccacccuggccg

SEQ ID NO: 3571733 - RNA, 14 nt, Human
cuccacccuguccc

SEQ ID NO: 3571734 - RNA, 17 nt, Human
cuccacccuguccccca

SEQ ID NO: 3571735 - RNA, 18 nt, Human
cuccacccugucccccag

SEQ ID NO: 3571736 - RNA, 20 nt, Human
cuccacccugucccccagcu

SEQ ID NO: 3571737 - RNA, 22 nt, Human
cuccacccugucccccagcucu

SEQ ID NO: 3571738 - RNA, 15 nt, Human
cuccacccuuggccu

SEQ ID NO: 3571739 - RNA, 16 nt, Human
cuccacccuuggccug

SEQ ID NO: 3571740 - RNA, 17 nt, Human
cuccacccuuggccugu

SEQ ID NO: 3571741 - RNA, 16 nt, Human
cuccaccgcagaagga

SEQ ID NO: 3571742 - RNA, 16 nt, Human
cuccaccgcugccuaa

SEQ ID NO: 3571743 - RNA, 20 nt, Human
cuccaccuaguggcugucca

SEQ ID NO: 3571744 - RNA, 22 nt, Human
cuccaccuaguggcuguccagu

SEQ ID NO: 3571745 - RNA, 12 nt, Human
cuccaccucagc

SEQ ID NO: 3571746 - RNA, 17 nt, Human
cuccaccucagccuugg

SEQ ID NO: 3571747 - RNA, 16 nt, Human
cuccaccucccugcaa

SEQ ID NO: 3571748 - RNA, 14 nt, Human
cuccaccuccuggg

SEQ ID NO: 3571749 - RNA, 22 nt, Human
cuccaccucuucaccccccacu

SEQ ID NO: 3571750 - RNA, 17 nt, Human
cuccaccuugcagcucu

SEQ ID NO: 3571751 - RNA, 18 nt, Human
cuccacgauccugccacc

SEQ ID NO: 3571752 - RNA, 18 nt, Human
cuccacguucaccccucc

SEQ ID NO: 3571753 - RNA, 15 nt, Human
cuccacguucugcuc

SEQ ID NO: 3571754 - RNA, 16 nt, Human
cuccacguucugcuca

SEQ ID NO: 3571755 - RNA, 18 nt, Human
cuccacucagcuguccug

SEQ ID NO: 3571756 - RNA, 21 nt, Human
cuccacucagcuguccugcag

SEQ ID NO: 3571757 - RNA, 18 nt, Human
cuccaggugcacaagcuc

SEQ ID NO: 3571758 - RNA, 19 nt, Human
cuccaggugcacaagcucc

SEQ ID NO: 3571759 - RNA, 23 nt, Human
cuccaggugcacaagcuccaagc

SEQ ID NO: 3571760 - RNA, 13 nt, Human
cuccaggugcaga

SEQ ID NO: 3571761 - RNA, 17 nt, Human
cuccagguggcucugag

SEQ ID NO: 3571762 - RNA, 12 nt, Human
cuccagguuuuu

SEQ ID NO: 3571763 - RNA, 13 nt, Human
cuccagguuuuuc

SEQ ID NO: 3571764 - RNA, 22 nt, Human
cuccagguuuuucaauuaaacg

SEQ ID NO: 3571765 - RNA, 23 nt, Human
cuccagguuuuucaauuaaacgg

SEQ ID NO: 3571766 - RNA, 20 nt, Human
cuccaguauucuugucaaaa

SEQ ID NO: 3571767 - RNA, 15 nt, Human
cuccagucaggaggc

SEQ ID NO: 3571768 - RNA, 18 nt, Human
cuccagucccccuauccu

SEQ ID NO: 3571769 - RNA, 20 nt, Human
cuccaguccugcucucuacc

SEQ ID NO: 3571770 - RNA, 19 nt, Human
cuccagucugaucugugaa

SEQ ID NO: 3571771 - RNA, 13 nt, Human
cuccagugaaacu

SEQ ID NO: 3571772 - RNA, 21 nt, Human
cuccagugagacagcucugca

SEQ ID NO: 3571773 - RNA, 18 nt, Human
cuccagugccagcaauga

SEQ ID NO: 3571774 - RNA, 19 nt, Human
cuccaguggaagaagaaaa

SEQ ID NO: 3571775 - RNA, 23 nt, Human
cuccaguggggcaagauuuuccu

SEQ ID NO: 3571776 - RNA, 16 nt, Human
cuccagugguugcugu

SEQ ID NO: 3571777 - RNA, 16 nt, Human
cuccaguuugcaccug

SEQ ID NO: 3571778 - RNA, 15 nt, Human
cuccauaaacagacu

SEQ ID NO: 3571779 - RNA, 14 nt, Human
cuccauacucagga

SEQ ID NO: 3571780 - RNA, 15 nt, Human
cuccaucacccucuu

SEQ ID NO: 3571781 - RNA, 20 nt, Human
cuccauccacaugggagccg

SEQ ID NO: 3571782 - RNA, 13 nt, Human
cuccaucccucua

SEQ ID NO: 3571783 - RNA, 11 nt, Human
cuccaucccug

SEQ ID NO: 3571784 - RNA, 12 nt, Human
cuccaucccugg

SEQ ID NO: 3571785 - RNA, 24 nt, Human
cuccaucccuggcccccucccugg

SEQ ID NO: 3571786 - RNA, 20 nt, Human
cuccauccuauccacugggc

SEQ ID NO: 3571787 - RNA, 13 nt, Human
cuccauccugagg

SEQ ID NO: 3571788 - RNA, 14 nt, Human
cuccauccugaggc

SEQ ID NO: 3571789 - RNA, 20 nt, Human
cuccauccugaggcuccacu

SEQ ID NO: 3571790 - RNA, 23 nt, Human
cuccauccugaggcuccacuugg

SEQ ID NO: 3571791 - RNA, 9 nt, Human
cuccaucuc

SEQ ID NO: 3571792 - RNA, 18 nt, Human
cuccaucuccaagaaugc

SEQ ID NO: 3571793 - RNA, 21 nt, Human
cuccaucuccaagaaugcuga

SEQ ID NO: 3571794 - RNA, 13 nt, Human
cuccaucuccacu

SEQ ID NO: 3571795 - RNA, 15 nt, Human
cuccaucucucuggc

SEQ ID NO: 3571796 - RNA, 17 nt, Human
cuccaucucucuggccc

SEQ ID NO: 3571797 - RNA, 16 nt, Human
cuccaucuggcagggu

SEQ ID NO: 3571798 - RNA, 19 nt, Human
cuccaucuucagcuucuuc

SEQ ID NO: 3571799 - RNA, 17 nt, Human
cuccaugaguuuuuucu

SEQ ID NO: 3571800 - RNA, 19 nt, Human
cuccaugcuccucacugcc

SEQ ID NO: 3571801 - RNA, 20 nt, Human
cuccaugcuccucacugccc

SEQ ID NO: 3571802 - RNA, 19 nt, Human
cuccauggcccugccaugc

SEQ ID NO: 3571803 - RNA, 15 nt, Human
cuccauggcuuccuc

SEQ ID NO: 3571804 - RNA, 12 nt, Human
cuccauggugcc

SEQ ID NO: 3571805 - RNA, 15 nt, Human
cuccauggugccucu

SEQ ID NO: 3571806 - RNA, 18 nt, Human
cuccauggugccucugga

SEQ ID NO: 3571807 - RNA, 13 nt, Human
cuccaugucucug

SEQ ID NO: 3571808 - RNA, 22 nt, Human
cuccaugucucugagcauuaga

SEQ ID NO: 3571809 - RNA, 13 nt, Human
cuccaugugggcu

SEQ ID NO: 3571810 - RNA, 24 nt, Human
cuccauucccguggaacguuuuuc

SEQ ID NO: 3571811 - RNA, 17 nt, Human
cuccauucuauuuuaga

SEQ ID NO: 3571812 - RNA, 14 nt, Human
cuccauucugcucc

SEQ ID NO: 3571813 - RNA, 16 nt, Human
cuccauucugcuccuu

SEQ ID NO: 3571814 - RNA, 17 nt, Human
cuccauucugcuccuuc

SEQ ID NO: 3571815 - RNA, 23 nt, Human
cuccauugguccuuuuuuuuucu

SEQ ID NO: 3571816 - RNA, 16 nt, Human
cuccauuucacuggcu

SEQ ID NO: 3571817 - RNA, 13 nt, Human
cuccauuugcucu

SEQ ID NO: 3571818 - RNA, 15 nt, Human
cuccauuugcucuuc

SEQ ID NO: 3571819 - RNA, 22 nt, Human
cuccauuuuggugucuuucucu

SEQ ID NO: 3571820 - RNA, 22 nt, Human
cucccaaaaguaucgggggcug

SEQ ID NO: 3571821 - RNA, 16 nt, Human
cucccaaagugcuggg

SEQ ID NO: 3571822 - RNA, 17 nt, Human
cucccaaagugcuggga

SEQ ID NO: 3571823 - RNA, 14 nt, Human
cucccaacaguggg

SEQ ID NO: 3571824 - RNA, 20 nt, Human
cucccaagcuaucuaaaguu

SEQ ID NO: 3571825 - RNA, 21 nt, Human
cucccaaggcugcgucuggag

SEQ ID NO: 3571826 - RNA, 19 nt, Human
cucccaaggggccugagca

SEQ ID NO: 3571827 - RNA, 16 nt, Human
cucccaaguggugccu

SEQ ID NO: 3571828 - RNA, 17 nt, Human
cucccaaguggugccua

SEQ ID NO: 3571829 - RNA, 13 nt, Human
cucccaauucauc

SEQ ID NO: 3571830 - RNA, 15 nt, Human
cucccacaaaggaga

SEQ ID NO: 3571831 - RNA, 18 nt, Human
cucccacacccaaagcug

SEQ ID NO: 3571832 - RNA, 22 nt, Human
cucccacacccaaagcugagcc

SEQ ID NO: 3571833 - RNA, 15 nt, Human
cucccacagagacaa

SEQ ID NO: 3571834 - RNA, 18 nt, Human
cucccacagcgcuggccg

SEQ ID NO: 3571835 - RNA, 14 nt, Human
cucccacaggcagc

SEQ ID NO: 3571836 - RNA, 15 nt, Human
cucccacaggcagcu

SEQ ID NO: 3571837 - RNA, 16 nt, Human
cucccacaggcagcuu

SEQ ID NO: 3571838 - RNA, 21 nt, Human
cucccacagucccaucugcuu

SEQ ID NO: 3571839 - RNA, 11 nt, Human
cucccacagug

SEQ ID NO: 3571840 - RNA, 12 nt, Human
cucccacaguga

SEQ ID NO: 3571841 - RNA, 20 nt, Human
cucccacagugacucgggcu

SEQ ID NO: 3571842 - RNA, 13 nt, Human
cucccaccacagc

SEQ ID NO: 3571843 - RNA, 17 nt, Human
cucccacccaccgccac

SEQ ID NO: 3571844 - RNA, 21 nt, Human
cucccacccagucucugcucc

SEQ ID NO: 3571845 - RNA, 13 nt, Human
cucccacccccag

SEQ ID NO: 3571846 - RNA, 22 nt, Human
cucccacccccuucucugcucc

SEQ ID NO: 3571847 - RNA, 17 nt, Human
cucccacccgaugcugc

SEQ ID NO: 3571848 - RNA, 16 nt, Human
cucccacccucuuccu

SEQ ID NO: 3571849 - RNA, 12 nt, Human
cucccacccugu

SEQ ID NO: 3571850 - RNA, 18 nt, Human
cucccaccuagcagcacc

SEQ ID NO: 3571851 - RNA, 16 nt, Human
cucccaccucagccuc

SEQ ID NO: 3571852 - RNA, 13 nt, Human
cucccaccuccug

SEQ ID NO: 3571853 - RNA, 14 nt, Human
cucccaccuccuga

SEQ ID NO: 3571854 - RNA, 21 nt, Human
cucccaccuccugacacccuu

SEQ ID NO: 3571855 - RNA, 13 nt, Human
cucccaccucugu

SEQ ID NO: 3571856 - RNA, 18 nt, Human
cucccaccucugugaccu

SEQ ID NO: 3571857 - RNA, 19 nt, Human
cucccaccucugugaccuc

SEQ ID NO: 3571858 - RNA, 20 nt, Human
cucccaccucugugaccuca

SEQ ID NO: 3571859 - RNA, 14 nt, Human
cucccaccugacac

SEQ ID NO: 3571860 - RNA, 15 nt, Human
cucccaccugacaca

SEQ ID NO: 3571861 - RNA, 14 nt, Human
cucccaccuggcuc

SEQ ID NO: 3571862 - RNA, 15 nt, Human
cucccaccuggcucu

SEQ ID NO: 3571863 - RNA, 22 nt, Human
cucccaccuggcucuguggcga

SEQ ID NO: 3571864 - RNA, 13 nt, Human
cucccacgggacc

SEQ ID NO: 3571865 - RNA, 15 nt, Human
cucccacgugggaga

SEQ ID NO: 3571866 - RNA, 14 nt, Human
cucccacugaguuu

SEQ ID NO: 3571867 - RNA, 13 nt, Human
cucccacuuggcc

SEQ ID NO: 3571868 - RNA, 17 nt, Human
cucccagaaucccagcc

SEQ ID NO: 3571869 - RNA, 18 nt, Human
cucccagagcaccugcug

SEQ ID NO: 3571870 - RNA, 20 nt, Human
cucccagagcaccugcuguc

SEQ ID NO: 3571871 - RNA, 22 nt, Human
cucccagagcugguggacccag

SEQ ID NO: 3571872 - RNA, 23 nt, Human
cucccagaggagccaccaguucu

SEQ ID NO: 3571873 - RNA, 14 nt, Human
cucccagaggucca

SEQ ID NO: 3571874 - RNA, 22 nt, Human
cucccagagguccagcccaucu

SEQ ID NO: 3571875 - RNA, 13 nt, Human
cucccagccaggc

SEQ ID NO: 3571876 - RNA, 14 nt, Human
cucccagccaggcc

SEQ ID NO: 3571877 - RNA, 18 nt, Human
cucccagcccuauggaug

SEQ ID NO: 3571878 - RNA, 21 nt, Human
cucccagcccuauggaugugg

SEQ ID NO: 3571879 - RNA, 14 nt, Human
cucccagccucagc

SEQ ID NO: 3571880 - RNA, 18 nt, Human
cucccagcuccaccccgc

SEQ ID NO: 3571881 - RNA, 15 nt, Human
cucccagcucuagac

SEQ ID NO: 3571882 - RNA, 11 nt, Human
cucccagcuga

SEQ ID NO: 3571883 - RNA, 18 nt, Human
cucccagcugacaguccu

SEQ ID NO: 3571884 - RNA, 20 nt, Human
cucccagcuuguaggagcug

SEQ ID NO: 3571885 - RNA, 16 nt, Human
cucccaggaagcccag

SEQ ID NO: 3571886 - RNA, 21 nt, Human
cucccaggaagcccaggagcc

SEQ ID NO: 3571887 - RNA, 11 nt, Human
cucccaggaca

SEQ ID NO: 3571888 - RNA, 21 nt, Human
cucccaggaccacaggcucag

SEQ ID NO: 3571889 - RNA, 17 nt, Human
cucccaggcaaggcugu

SEQ ID NO: 3571890 - RNA, 18 nt, Human
cucccaggcaaggcugug

SEQ ID NO: 3571891 - RNA, 17 nt, Human
cucccaggcacugucuu

SEQ ID NO: 3571892 - RNA, 22 nt, Human
cucccaggcauuccccaggagg

SEQ ID NO: 3571893 - RNA, 17 nt, Human
cucccaggccaggcucc

SEQ ID NO: 3571894 - RNA, 12 nt, Human
cucccaggcccc

SEQ ID NO: 3571895 - RNA, 12 nt, Human
cucccagggcca

SEQ ID NO: 3571896 - RNA, 23 nt, Human
cucccagggccagggcccugcag

SEQ ID NO: 3571897 - RNA, 20 nt, Human
cucccagggccaugaacuuu

SEQ ID NO: 3571898 - RNA, 12 nt, Human
cucccagggcua

SEQ ID NO: 3571899 - RNA, 17 nt, Human
cucccaggggcucccuc

SEQ ID NO: 3571900 - RNA, 21 nt, Human
cucccaggggcucccuccgcc

SEQ ID NO: 3571901 - RNA, 19 nt, Human
cucccaggggucucccugg

SEQ ID NO: 3571902 - RNA, 20 nt, Human
cucccaggggucucccuggc

SEQ ID NO: 3571903 - RNA, 13 nt, Human
cucugaugcagcu

SEQ ID NO: 3571904 - RNA, 22 nt, Human
cucugaugguucuucaccuccu

SEQ ID NO: 3571905 - RNA, 18 nt, Human
cucugauguaaaugaagu

SEQ ID NO: 3571906 - RNA, 18 nt, Human
cucugauuugcaaaaaaa

SEQ ID NO: 3571907 - RNA, 17 nt, Human
cucugcaaucuucucag

SEQ ID NO: 3571908 - RNA, 17 nt, Human
cucugcaaugggcacug

SEQ ID NO: 3571909 - RNA, 23 nt, Human
cucugcaaugggcacugggauga

SEQ ID NO: 3571910 - RNA, 19 nt, Human
cucugcaauuccccucugc

SEQ ID NO: 3571911 - RNA, 21 nt, Human
cucugcaauuccccucugcug

SEQ ID NO: 3571912 - RNA, 17 nt, Human
cucugcacaagcugcac

SEQ ID NO: 3571913 - RNA, 18 nt, Human
cucugcacaagcugcacc

SEQ ID NO: 3571914 - RNA, 21 nt, Human
cucugcacaagcugcacccuc

SEQ ID NO: 3571915 - RNA, 22 nt, Human
cucugcacacccuccagagaca

SEQ ID NO: 3571916 - RNA, 15 nt, Human
cucugcacagaugga

SEQ ID NO: 3571917 - RNA, 14 nt, Human
cucugcacaugucu

SEQ ID NO: 3571918 - RNA, 16 nt, Human
cucugcacaugucuug

SEQ ID NO: 3571919 - RNA, 15 nt, Human
cucugcaccccucug

SEQ ID NO: 3571920 - RNA, 18 nt, Human
cucugcaccguacugugg

SEQ ID NO: 3571921 - RNA, 13 nt, Human
cucugcacuacuc

SEQ ID NO: 3571922 - RNA, 22 nt, Human
cucugcacuacuccucugcagu

SEQ ID NO: 3571923 - RNA, 18 nt, Human
cucugcacuacugacaug

SEQ ID NO: 3571924 - RNA, 16 nt, Human
cucugcagacugcuag

SEQ ID NO: 3571925 - RNA, 22 nt, Human
cucugcagacuucccagcuagg

SEQ ID NO: 3571926 - RNA, 19 nt, Human
cucugcagcaauaaagcag

SEQ ID NO: 3571927 - RNA, 15 nt, Human
cucugcagccagccc

SEQ ID NO: 3571928 - RNA, 18 nt, Human
cucugcagccagcccagc

SEQ ID NO: 3571929 - RNA, 19 nt, Human
cucugcagccagcccagcc

SEQ ID NO: 3571930 - RNA, 14 nt, Human
cucugcagcugacc

SEQ ID NO: 3571931 - RNA, 16 nt, Human
cucugcagcugaccuc

SEQ ID NO: 3571932 - RNA, 13 nt, Human
cucugcagcugcc

SEQ ID NO: 3571933 - RNA, 14 nt, Human
cucugcagcugccg

SEQ ID NO: 3571934 - RNA, 15 nt, Human
cucugcaggucccua

SEQ ID NO: 3571935 - RNA, 20 nt, Human
cucugcaggucccuaauaaa

SEQ ID NO: 3571936 - RNA, 22 nt, Human
cucugcagucucuauaccaaua

SEQ ID NO: 3571937 - RNA, 13 nt, Human
cucugcagugccu

SEQ ID NO: 3571938 - RNA, 15 nt, Human
cucugcagugccuug

SEQ ID NO: 3571939 - RNA, 14 nt, Human
cucugcaucccagc

SEQ ID NO: 3571940 - RNA, 18 nt, Human
cucugcaucccagcaccu

SEQ ID NO: 3571941 - RNA, 20 nt, Human
cucugcaucccagcaccugc

SEQ ID NO: 3571942 - RNA, 23 nt, Human
cucugcaucccagcaccugccuc

SEQ ID NO: 3571943 - RNA, 17 nt, Human
cucugcauccucuggag

SEQ ID NO: 3571944 - RNA, 20 nt, Human
cucugcauccucuggagcca

SEQ ID NO: 3571945 - RNA, 19 nt, Human
cucugcaucuacucccaag

SEQ ID NO: 3571946 - RNA, 13 nt, Human
cucugcaucugac

SEQ ID NO: 3571947 - RNA, 17 nt, Human
cucugcaugcggcccag

SEQ ID NO: 3571948 - RNA, 22 nt, Human
cucugcaugcggcccagcccgg

SEQ ID NO: 3571949 - RNA, 14 nt, Human
cucugcauuugucu

SEQ ID NO: 3571950 - RNA, 22 nt, Human
cucugcauuugucuauucucca

SEQ ID NO: 3571951 - RNA, 16 nt, Human
cucugcauuuuucugc

SEQ ID NO: 3571952 - RNA, 14 nt, Human
cucugccaaaggau

SEQ ID NO: 3571953 - RNA, 21 nt, Human
cucugccaaaggaugugauau

SEQ ID NO: 3571954 - RNA, 15 nt, Human
cucugccacacucug

SEQ ID NO: 3571955 - RNA, 17 nt, Human
cucugccacacucugac

SEQ ID NO: 3571956 - RNA, 17 nt, Human
cucugccaccagagacc

SEQ ID NO: 3571957 - RNA, 18 nt, Human
cucugccaccagagaccg

SEQ ID NO: 3571958 - RNA, 22 nt, Human
cucugccacccuaccuguucag

SEQ ID NO: 3571959 - RNA, 12 nt, Human
cucugccaccuc

SEQ ID NO: 3571960 - RNA, 14 nt, Human
cucugccaccuccc

SEQ ID NO: 3571961 - RNA, 23 nt, Human
cucugccagaagauccccucagg

SEQ ID NO: 3571962 - RNA, 14 nt, Human
cucugccagccaca

SEQ ID NO: 3571963 - RNA, 13 nt, Human
cucugccagggca

SEQ ID NO: 3571964 - RNA, 15 nt, Human
cucugccagggcagu

SEQ ID NO: 3571965 - RNA, 22 nt, Human
cucugccagggcagugcuagug

SEQ ID NO: 3571966 - RNA, 18 nt, Human
cucugccaguccuguccu

SEQ ID NO: 3571967 - RNA, 20 nt, Human
cucugccaugaacuggaggc

SEQ ID NO: 3571968 - RNA, 14 nt, Human
cucugcccaacccu

SEQ ID NO: 3571969 - RNA, 20 nt, Human
cucugcccaacccuucccuc

SEQ ID NO: 3571970 - RNA, 13 nt, Human
cucugcccacucc

SEQ ID NO: 3571971 - RNA, 15 nt, Human
cucugcccacucccu

SEQ ID NO: 3571972 - RNA, 18 nt, Human
cucugcccacucccugca

SEQ ID NO: 3571973 - RNA, 14 nt, Human
cucugcccagagcu

SEQ ID NO: 3571974 - RNA, 16 nt, Human
cucugcccagagcugg

SEQ ID NO: 3571975 - RNA, 19 nt, Human
cucugcccaggcacugcua

SEQ ID NO: 3571976 - RNA, 19 nt, Human
cucugcccauuccccagcc

SEQ ID NO: 3571977 - RNA, 20 nt, Human
cucugccccagaggccucuc

SEQ ID NO: 3571978 - RNA, 22 nt, Human
cucugccccagaggccucucuc

SEQ ID NO: 3571979 - RNA, 18 nt, Human
cucugccccagccagcgc

SEQ ID NO: 3571980 - RNA, 15 nt, Human
cucugccccagcuug

SEQ ID NO: 3571981 - RNA, 21 nt, Human
cucugccccagcuugggcaga

SEQ ID NO: 3571982 - RNA, 12 nt, Human
cucugccccagu

SEQ ID NO: 3571983 - RNA, 15 nt, Human
cucugccccauccuc

SEQ ID NO: 3571984 - RNA, 21 nt, Human
cucugccccauccuccagcag

SEQ ID NO: 3571985 - RNA, 24 nt, Human
cucugccccauccuccagcaggga

SEQ ID NO: 3571986 - RNA, 15 nt, Human
cucugcccuccaaga

SEQ ID NO: 3571987 - RNA, 16 nt, Human
cucugcccucuagagc

SEQ ID NO: 3571988 - RNA, 11 nt, Human
cucugcccugc

SEQ ID NO: 3571989 - RNA, 17 nt, Human
cucugcccugcccuagc

SEQ ID NO: 3571990 - RNA, 14 nt, Human
cucugcccugugua

SEQ ID NO: 3571991 - RNA, 19 nt, Human
cucugccgcuaccucccuc

SEQ ID NO: 3571992 - RNA, 18 nt, Human
cucugccgucucuggagc

SEQ ID NO: 3571993 - RNA, 21 nt, Human
cucugccucccaucacccgcu

SEQ ID NO: 3571994 - RNA, 21 nt, Human
cucugccucccucacccugag

SEQ ID NO: 3571995 - RNA, 15 nt, Human
cucugccuccucuuc

SEQ ID NO: 3571996 - RNA, 16 nt, Human
cucugccuccucuuca

SEQ ID NO: 3571997 - RNA, 10 nt, Human
cucugccuga

SEQ ID NO: 3571998 - RNA, 13 nt, Human
cucugccugcccc

SEQ ID NO: 3571999 - RNA, 19 nt, Human
cucugccugugagccaguc

SEQ ID NO: 3572000 - RNA, 20 nt, Human
cucugccugugagccagucu

SEQ ID NO: 3572001 - RNA, 23 nt, Human
cucugccuuugcaccacgggaca

SEQ ID NO: 3572002 - RNA, 18 nt, Human
cucugccuuugcucuggu

SEQ ID NO: 3572003 - RNA, 22 nt, Human
cucugcgugcagggacaaagag

SEQ ID NO: 3572004 - RNA, 21 nt, Human
cucugcucaccgcccaucagg

SEQ ID NO: 3572005 - RNA, 12 nt, Human
cucugcuccacc

SEQ ID NO: 3572006 - RNA, 15 nt, Human
cucugcuccaccaca

SEQ ID NO: 3572007 - RNA, 16 nt, Human
cucugcuccaccacau

SEQ ID NO: 3572008 - RNA, 14 nt, Human
cucugcuccaccuu

SEQ ID NO: 3572009 - RNA, 18 nt, Human
cucugcuccaccuuucag

SEQ ID NO: 3572010 - RNA, 16 nt, Human
cucugcucccccuuuu

SEQ ID NO: 3572011 - RNA, 14 nt, Human
cucugcuccuggag

SEQ ID NO: 3572012 - RNA, 17 nt, Human
cucugcucgcccuccuu

SEQ ID NO: 3572013 - RNA, 17 nt, Human
cucugcucgccuuagca

SEQ ID NO: 3572014 - RNA, 12 nt, Human
cucugcucugau

SEQ ID NO: 3572015 - RNA, 11 nt, Human
cucugcucugc

SEQ ID NO: 3572016 - RNA, 12 nt, Human
cucugcucugcc

SEQ ID NO: 3572017 - RNA, 15 nt, Human
cucugcucugcccuu

SEQ ID NO: 3572018 - RNA, 16 nt, Human
cucugcugaagacuug

SEQ ID NO: 3572019 - RNA, 14 nt, Human
cucugcugacagac

SEQ ID NO: 3572020 - RNA, 16 nt, Human
cucugcugacagacac

SEQ ID NO: 3572021 - RNA, 17 nt, Human
cucugcugacagacaca

SEQ ID NO: 3572022 - RNA, 19 nt, Human
cucugcugacagacacagg

SEQ ID NO: 3572023 - RNA, 22 nt, Human
cucugcugacagacacaggccc

SEQ ID NO: 3572024 - RNA, 16 nt, Human
cucugcugaccugcug

SEQ ID NO: 3572025 - RNA, 13 nt, Human
cucugcugagggu

SEQ ID NO: 3572026 - RNA, 22 nt, Human
cucugcugccugcccgcacagc

SEQ ID NO: 3572027 - RNA, 14 nt, Human
cucugcuggcccag

SEQ ID NO: 3572028 - RNA, 15 nt, Human
cucugcuggccgggc

SEQ ID NO: 3572029 - RNA, 22 nt, Human
cucugcuggccgggcacagcug

SEQ ID NO: 3572030 - RNA, 13 nt, Human
cucugcuggccug

SEQ ID NO: 3572031 - RNA, 16 nt, Human
cucugcuggccuggcc

SEQ ID NO: 3572032 - RNA, 13 nt, Human
cucugcugucuaa

SEQ ID NO: 3572033 - RNA, 12 nt, Human
cucugcuuccca

SEQ ID NO: 3572034 - RNA, 13 nt, Human
cucugcuucccag

SEQ ID NO: 3572035 - RNA, 14 nt, Human
cucugcuucucacg

SEQ ID NO: 3572036 - RNA, 17 nt, Human
cucugcuucucucaccu

SEQ ID NO: 3572037 - RNA, 13 nt, Human
cucugcuucucug

SEQ ID NO: 3572038 - RNA, 16 nt, Human
cucugcuucucugacu

SEQ ID NO: 3572039 - RNA, 19 nt, Human
cucugcuugacaacaucug

SEQ ID NO: 3572040 - RNA, 20 nt, Human
cucugcuugccgaaacugga

SEQ ID NO: 3572041 - RNA, 13 nt, Human
cucugcuuugaaa

SEQ ID NO: 3572042 - RNA, 20 nt, Human
cucuggaaaaugugacccag

SEQ ID NO: 3572043 - RNA, 22 nt, Human
cucuggaaaggggggagcuggg

SEQ ID NO: 3572044 - RNA, 19 nt, Human
cucuggaagcccuggagac

SEQ ID NO: 3572045 - RNA, 14 nt, Human
cucuggaauuugaa

SEQ ID NO: 3572046 - RNA, 18 nt, Human
cucuggacagccccaccc

SEQ ID NO: 3572047 - RNA, 14 nt, Human
cucuggacaggcau

SEQ ID NO: 3572048 - RNA, 22 nt, Human
cucuggacaggcauguucucug

SEQ ID NO: 3572049 - RNA, 22 nt, Human
cucugugcccacccuccacucu

SEQ ID NO: 3572050 - RNA, 15 nt, Human
cucugugccucccuc

SEQ ID NO: 3572051 - RNA, 16 nt, Human
cucugugccuucuuuu

SEQ ID NO: 3572052 - RNA, 20 nt, Human
cucugugcugacccuccugu

SEQ ID NO: 3572053 - RNA, 15 nt, Human
cucugugcuggccag

SEQ ID NO: 3572054 - RNA, 23 nt, Human
cucugugcuuugacucaccuguu

SEQ ID NO: 3572055 - RNA, 19 nt, Human
cucuguggcauugaaauga

SEQ ID NO: 3572056 - RNA, 13 nt, Human
cucugugggcugc

SEQ ID NO: 3572057 - RNA, 16 nt, Human
cucugugggcugcacu

SEQ ID NO: 3572058 - RNA, 17 nt, Human
cucugugggcugcacuc

SEQ ID NO: 3572059 - RNA, 17 nt, Human
cucugugggcuggcagu

SEQ ID NO: 3572060 - RNA, 17 nt, Human
cucugugucacuggcug

SEQ ID NO: 3572061 - RNA, 20 nt, Human
cucugugucacuggcugccu

SEQ ID NO: 3572062 - RNA, 23 nt, Human
cucugugucacuggcugccucca

SEQ ID NO: 3572063 - RNA, 20 nt, Human
cucugugucagguggggcag

SEQ ID NO: 3572064 - RNA, 22 nt, Human
cucugugucagguggggcagcu

SEQ ID NO: 3572065 - RNA, 23 nt, Human
cucugugucuaagauucuagauc

SEQ ID NO: 3572066 - RNA, 14 nt, Human
cucugugucugagu

SEQ ID NO: 3572067 - RNA, 20 nt, Human
cucuguuaauaaucucacau

SEQ ID NO: 3572068 - RNA, 22 nt, Human
cucuguucaaagcugccugucc

SEQ ID NO: 3572069 - RNA, 14 nt, Human
cucuguucaguaac

SEQ ID NO: 3572070 - RNA, 14 nt, Human
cucuguucagugua

SEQ ID NO: 3572071 - RNA, 15 nt, Human
cucuguucauuccuc

SEQ ID NO: 3572072 - RNA, 17 nt, Human
cucuguucauuccucca

SEQ ID NO: 3572073 - RNA, 15 nt, Human
cucuguuccaugucu

SEQ ID NO: 3572074 - RNA, 14 nt, Human
cucuguuccccuag

SEQ ID NO: 3572075 - RNA, 23 nt, Human
cucuguuccccuaguaagugccu

SEQ ID NO: 3572076 - RNA, 22 nt, Human
cucuguuccuucacauccugug

SEQ ID NO: 3572077 - RNA, 15 nt, Human
cucuguuccuucccu

SEQ ID NO: 3572078 - RNA, 15 nt, Human
cucuguucuuccuca

SEQ ID NO: 3572079 - RNA, 20 nt, Human
cucuguucuuccucagccag

SEQ ID NO: 3572080 - RNA, 21 nt, Human
cucuguucuuccucagccagc

SEQ ID NO: 3572081 - RNA, 22 nt, Human
cucuguucuuccucagccagcc

SEQ ID NO: 3572082 - RNA, 20 nt, Human
cucuguugcaagugcaauaa

SEQ ID NO: 3572083 - RNA, 22 nt, Human
cucuguugcccaggcuggagug

SEQ ID NO: 3572084 - RNA, 20 nt, Human
cucuguuguccuccccuugg

SEQ ID NO: 3572085 - RNA, 22 nt, Human
cucuguuguguucguucuuguu

SEQ ID NO: 3572086 - RNA, 16 nt, Human
cucuguuuguggggug

SEQ ID NO: 3572087 - RNA, 23 nt, Human
cucuguuuuacaaguuggaguca

SEQ ID NO: 3572088 - RNA, 20 nt, Human
cucuuaaaagaggaaaauga

SEQ ID NO: 3572089 - RNA, 20 nt, Human
cucuuaaagaaaacccaccc

SEQ ID NO: 3572090 - RNA, 18 nt, Human
cucuuaaaguuggaauuu

SEQ ID NO: 3572091 - RNA, 22 nt, Human
cucuuaaaguuggaauuuacca

SEQ ID NO: 3572092 - RNA, 19 nt, Human
cucuuaagaagacugcauu

SEQ ID NO: 3572093 - RNA, 12 nt, Human
cucuuaagccau

SEQ ID NO: 3572094 - RNA, 22 nt, Human
cucuuaagcuuccgccgucuca

SEQ ID NO: 3572095 - RNA, 22 nt, Human
cucuuaaguuucucagcuccca

SEQ ID NO: 3572096 - RNA, 12 nt, Human
cucuuaauugcc

SEQ ID NO: 3572097 - RNA, 17 nt, Human
cucuuaauuguucauuu

SEQ ID NO: 3572098 - RNA, 22 nt, Human
cucuuacccuucugugcccagc

SEQ ID NO: 3572099 - RNA, 22 nt, Human
cucuuacgaauauuuucaguaa

SEQ ID NO: 3572100 - RNA, 20 nt, Human
cucuuacgcccaacccuucc

SEQ ID NO: 3572101 - RNA, 15 nt, Human
cucuuacucuuuccu

SEQ ID NO: 3572102 - RNA, 16 nt, Human
cucuuacugcaaaugu

SEQ ID NO: 3572103 - RNA, 13 nt, Human
cucuuagaaaaac

SEQ ID NO: 3572104 - RNA, 15 nt, Human
cucuuagaaaaacca

SEQ ID NO: 3572105 - RNA, 16 nt, Human
cucuuagaaaugaagg

SEQ ID NO: 3572106 - RNA, 20 nt, Human
cucuuagaugcaguucugaa

SEQ ID NO: 3572107 - RNA, 21 nt, Human
cucuuagaugcaguucugaag

SEQ ID NO: 3572108 - RNA, 22 nt, Human
cucuuagaugcaguucugaaga

SEQ ID NO: 3572109 - RNA, 19 nt, Human
cucuuagcagcuuccagau

SEQ ID NO: 3572110 - RNA, 21 nt, Human
cucuuagcauuuuaauuagau

SEQ ID NO: 3572111 - RNA, 17 nt, Human
cucuuagcuccccucca

SEQ ID NO: 3572112 - RNA, 18 nt, Human
cucuuagcuccccuccaa

SEQ ID NO: 3572113 - RNA, 13 nt, Human
cucuuagcugagu

SEQ ID NO: 3572114 - RNA, 18 nt, Human
cucuuagucuagguccuu

SEQ ID NO: 3572115 - RNA, 16 nt, Human
cucuuauagaauauuu

SEQ ID NO: 3572116 - RNA, 17 nt, Human
cucuuauagaauauuua

SEQ ID NO: 3572117 - RNA, 18 nt, Human
cucuuauagaauauuuau

SEQ ID NO: 3572118 - RNA, 21 nt, Human
cucuuauagaauauuuauuac

SEQ ID NO: 3572119 - RNA, 15 nt, Human
cucuuauaucuauau

SEQ ID NO: 3572120 - RNA, 17 nt, Human
cucuuaugcacaccucc

SEQ ID NO: 3572121 - RNA, 13 nt, Human
cucuuaugcugua

SEQ ID NO: 3572122 - RNA, 21 nt, Human
cucuuauggauguccccagca

SEQ ID NO: 3572123 - RNA, 14 nt, Human
cucuuaugggcugg

SEQ ID NO: 3572124 - RNA, 15 nt, Human
cucuuaugggcuggg

SEQ ID NO: 3572125 - RNA, 17 nt, Human
cucuuauguaccucuuu

SEQ ID NO: 3572126 - RNA, 20 nt, Human
cucuuauugcccacgcugga

SEQ ID NO: 3572127 - RNA, 22 nt, Human
cucuuauugccucacuucaggu

SEQ ID NO: 3572128 - RNA, 17 nt, Human
cucuucaaauuagaaga

SEQ ID NO: 3572129 - RNA, 18 nt, Human
cucuucaccccccacuca

SEQ ID NO: 3572130 - RNA, 16 nt, Human
cucuucaccccggcag

SEQ ID NO: 3572131 - RNA, 18 nt, Human
cucuucaccccggcaggc

SEQ ID NO: 3572132 - RNA, 19 nt, Human
cucuucaccccggcaggcc

SEQ ID NO: 3572133 - RNA, 21 nt, Human
cucuucaccccggcaggcccu

SEQ ID NO: 3572134 - RNA, 23 nt, Human
cucuucaccccggcaggcccugc

SEQ ID NO: 3572135 - RNA, 18 nt, Human
cucuucacucuucaaaug

SEQ ID NO: 3572136 - RNA, 21 nt, Human
cucuucagaaagugugcuuua

SEQ ID NO: 3572137 - RNA, 17 nt, Human
cucuucagaggcccucg

SEQ ID NO: 3572138 - RNA, 20 nt, Human
cucuucagaugccacuucua

SEQ ID NO: 3572139 - RNA, 13 nt, Human
cucuucagcacaa

SEQ ID NO: 3572140 - RNA, 19 nt, Human
cucuucaggccucccucuc

SEQ ID NO: 3572141 - RNA, 22 nt, Human
cucuucagguucuuagugucac

SEQ ID NO: 3572142 - RNA, 23 nt, Human
cucuucaguuaagccuuuggaaa

SEQ ID NO: 3572143 - RNA, 15 nt, Human
cucuucauaauucua

SEQ ID NO: 3572144 - RNA, 18 nt, Human
cucuucauuauucucugc

SEQ ID NO: 3572145 - RNA, 14 nt, Human
cucuuccaggcagc

SEQ ID NO: 3572146 - RNA, 22 nt, Human
cucuuccaggcugggagagccu

SEQ ID NO: 3572147 - RNA, 23 nt, Human
cucuuccaggcugggagagccuu

SEQ ID NO: 3572148 - RNA, 19 nt, Human
cucuuccagucuuccugac

SEQ ID NO: 3572149 - RNA, 22 nt, Human
cucuuccagucuuccugacacu

SEQ ID NO: 3572150 - RNA, 14 nt, Human
cucuuccaugcugu

SEQ ID NO: 3572151 - RNA, 12 nt, Human
cucuuccccaga

SEQ ID NO: 3572152 - RNA, 12 nt, Human
cucuuccccucu

SEQ ID NO: 3572153 - RNA, 15 nt, Human
cucuucccucagucc

SEQ ID NO: 3572154 - RNA, 14 nt, Human
cucuucccucuucc

SEQ ID NO: 3572155 - RNA, 20 nt, Human
cucuucccugaacuuccugc

SEQ ID NO: 3572156 - RNA, 17 nt, Human
cucuucccuuuccccag

SEQ ID NO: 3572157 - RNA, 21 nt, Human
cucuucccuuuccccagcauc

SEQ ID NO: 3572158 - RNA, 23 nt, Human
cucuuccgaaaaauccucuuccu

SEQ ID NO: 3572159 - RNA, 18 nt, Human
cucuuccgacucuuucug

SEQ ID NO: 3572160 - RNA, 20 nt, Human
cucuuccgugacgucacugg

SEQ ID NO: 3572161 - RNA, 12 nt, Human
cucuuccuaccc

SEQ ID NO: 3572162 - RNA, 19 nt, Human
cucuuccuacccaaccacu

SEQ ID NO: 3572163 - RNA, 17 nt, Human
cucuuccuacccugccu

SEQ ID NO: 3572164 - RNA, 18 nt, Human
cucuuccuacuggucucu

SEQ ID NO: 3572165 - RNA, 20 nt, Human
cucuuccuacuggucucucu

SEQ ID NO: 3572166 - RNA, 19 nt, Human
cucuuccuaucccauccca

SEQ ID NO: 3572167 - RNA, 12 nt, Human
cucuuccugccc

SEQ ID NO: 3572168 - RNA, 19 nt, Human
cucuuccugccccucuuuc

SEQ ID NO: 3572169 - RNA, 21 nt, Human
cucuuccugccccucuuucuc

SEQ ID NO: 3572170 - RNA, 10 nt, Human
cucuuccugu

SEQ ID NO: 3572171 - RNA, 13 nt, Human
cucuuccugugau

SEQ ID NO: 3572172 - RNA, 17 nt, Human
cucuuccugugauccac

SEQ ID NO: 3572173 - RNA, 18 nt, Human
cucuuccuugcuguguca

SEQ ID NO: 3572174 - RNA, 13 nt, Human
cucuuccuuucuu

SEQ ID NO: 3572175 - RNA, 23 nt, Human
cucuucgcgcccgccccugcagc

SEQ ID NO: 3572176 - RNA, 13 nt, Human
cucuucggcccuc

SEQ ID NO: 3572177 - RNA, 16 nt, Human
cucuucggcccucaga

SEQ ID NO: 3572178 - RNA, 20 nt, Human
cucuucguuucagugucaaa

SEQ ID NO: 3572179 - RNA, 18 nt, Human
cucuucuacucacuuuuc

SEQ ID NO: 3572180 - RNA, 15 nt, Human
cucuucucagccacu

SEQ ID NO: 3572181 - RNA, 14 nt, Human
cucuucucccagaa

SEQ ID NO: 3572182 - RNA, 15 nt, Human
cucuucucccagaau

SEQ ID NO: 3572183 - RNA, 13 nt, Human
cucuucuccccag

SEQ ID NO: 3572184 - RNA, 14 nt, Human
cucuucuccccaga

SEQ ID NO: 3572185 - RNA, 16 nt, Human
cucuucuccccuucca

SEQ ID NO: 3572186 - RNA, 20 nt, Human
cucuucuccccuuccauuuc

SEQ ID NO: 3572187 - RNA, 13 nt, Human
cucuucuccuuuc

SEQ ID NO: 3572188 - RNA, 19 nt, Human
cucuucucuccagcugacu

SEQ ID NO: 3572189 - RNA, 14 nt, Human
cucuucucucugcu

SEQ ID NO: 3572190 - RNA, 19 nt, Human
cucuucucucugcucugac

SEQ ID NO: 3572191 - RNA, 16 nt, Human
cucuucucuuccugua

SEQ ID NO: 3572192 - RNA, 18 nt, Human
cucuuuuccccuuuccug

SEQ ID NO: 3572193 - RNA, 20 nt, Human
cucuuuuccccuuuccuguc

SEQ ID NO: 3572194 - RNA, 21 nt, Human
cucuuuuccccuuuccugucc

SEQ ID NO: 3572195 - RNA, 22 nt, Human
cucuuuuccuuugguccuucaa

SEQ ID NO: 3572196 - RNA, 12 nt, Human
cucuuuucucug

SEQ ID NO: 3572197 - RNA, 13 nt, Human
cucuuuucucuuu

SEQ ID NO: 3572198 - RNA, 10 nt, Human
cucuuuucuu

SEQ ID NO: 3572199 - RNA, 16 nt, Human
cucuuuucuuacuccu

SEQ ID NO: 3572200 - RNA, 18 nt, Human
cucuuuucuuacuccucc

SEQ ID NO: 3572201 - RNA, 20 nt, Human
cucuuuucuuacuccuccuc

SEQ ID NO: 3572202 - RNA, 15 nt, Human
cucuuuuguaaauua

SEQ ID NO: 3572203 - RNA, 18 nt, Human
cucuuuuguuaaauaaua

SEQ ID NO: 3572204 - RNA, 13 nt, Human
cucuuuuguuguu

SEQ ID NO: 3572205 - RNA, 17 nt, Human
cucuuuuguuguuucuu

SEQ ID NO: 3572206 - RNA, 11 nt, Human
cucuuuuuaag

SEQ ID NO: 3572207 - RNA, 19 nt, Human
cucuuuuuguaccugguga

SEQ ID NO: 3572208 - RNA, 17 nt, Human
cucuuuuuuguuuguuu

SEQ ID NO: 3572209 - RNA, 21 nt, Human
cucuuuuuuguuuguuucuuu

SEQ ID NO: 3572210 - RNA, 13 nt, Human
cucuuuuuuuccu

SEQ ID NO: 3572211 - RNA, 19 nt, Human
cucuuuuuuuggcccaggc

SEQ ID NO: 3572212 - RNA, 15 nt, Human
cugaaaaaaaaccug

SEQ ID NO: 3572213 - RNA, 18 nt, Human
cugaaaaaaaguuuacaa

SEQ ID NO: 3572214 - RNA, 21 nt, Human
cugaaaaaacaccuagcuuua

SEQ ID NO: 3572215 - RNA, 12 nt, Human
cugaaaaaucac

SEQ ID NO: 3572216 - RNA, 22 nt, Human
cugaaaacaauggaguauucuc

SEQ ID NO: 3572217 - RNA, 18 nt, Human
cugaaaaccaucuggccu

SEQ ID NO: 3572218 - RNA, 14 nt, Human
cugaaaaccucucc

SEQ ID NO: 3572219 - RNA, 17 nt, Human
cugaaaaccucuccuca

SEQ ID NO: 3572220 - RNA, 13 nt, Human
cugaaaacuggaa

SEQ ID NO: 3572221 - RNA, 19 nt, Human
cugaaaacuggaauaagaa

SEQ ID NO: 3572222 - RNA, 23 nt, Human
cugaaaacuggaauaagaagcaa

SEQ ID NO: 3572223 - RNA, 13 nt, Human
cugaaaagaaaua

SEQ ID NO: 3572224 - RNA, 17 nt, Human
cugaaaagaaauaauaa

SEQ ID NO: 3572225 - RNA, 19 nt, Human
cugaaaagacucaguguuc

SEQ ID NO: 3572226 - RNA, 20 nt, Human
cugaaaauauauaagcucag

SEQ ID NO: 3572227 - RNA, 17 nt, Human
cugaaaauauuguuuua

SEQ ID NO: 3572228 - RNA, 20 nt, Human
cugaaaauauuguuuuacaa

SEQ ID NO: 3572229 - RNA, 20 nt, Human
cugaaaaucgaguuuuuccu

SEQ ID NO: 3572230 - RNA, 18 nt, Human
cugaaaaugguauuuucc

SEQ ID NO: 3572231 - RNA, 16 nt, Human
cugaaaauguaugugu

SEQ ID NO: 3572232 - RNA, 17 nt, Human
cugaaaauguccuugug

SEQ ID NO: 3572233 - RNA, 13 nt, Human
cugaaaaugugcu

SEQ ID NO: 3572234 - RNA, 21 nt, Human
cugaaaauguuguuaugcuau

SEQ ID NO: 3572235 - RNA, 17 nt, Human
cugaaaauuauuuaaac

SEQ ID NO: 3572236 - RNA, 15 nt, Human
cugaaaauugccuuu

SEQ ID NO: 3572237 - RNA, 15 nt, Human
cugaaacaacuugga

SEQ ID NO: 3572238 - RNA, 13 nt, Human
cugaaacagcugc

SEQ ID NO: 3572239 - RNA, 20 nt, Human
cugaaacagcugccuuagcu

SEQ ID NO: 3572240 - RNA, 23 nt, Human
cugaaacagcugccuuagcuuca

SEQ ID NO: 3572241 - RNA, 14 nt, Human
cugaaacaggagag

SEQ ID NO: 3572242 - RNA, 18 nt, Human
cugaaaccuuuaagaaaa

SEQ ID NO: 3572243 - RNA, 12 nt, Human
cugaaacuauau

SEQ ID NO: 3572244 - RNA, 14 nt, Human
cugaaagaaacagu

SEQ ID NO: 3572245 - RNA, 15 nt, Human
cugaaagaaacaguu

SEQ ID NO: 3572246 - RNA, 16 nt, Human
cugaaagaaacaguua

SEQ ID NO: 3572247 - RNA, 19 nt, Human
cugaaagaaacaguuaacu

SEQ ID NO: 3572248 - RNA, 21 nt, Human
cugaaagaaacaguuaacuuu

SEQ ID NO: 3572249 - RNA, 13 nt, Human
cugaaagaggaau

SEQ ID NO: 3572250 - RNA, 17 nt, Human
cugaaagaggaaugaag

SEQ ID NO: 3572251 - RNA, 17 nt, Human
cugaaagagucuuucuu

SEQ ID NO: 3572252 - RNA, 21 nt, Human
cugaaagccacguuccuuacu

SEQ ID NO: 3572253 - RNA, 23 nt, Human
cugaaagccagcugccgaccaga

SEQ ID NO: 3572254 - RNA, 15 nt, Human
cugaaagcccugagc

SEQ ID NO: 3572255 - RNA, 18 nt, Human
cugaaagcugguggcaga

SEQ ID NO: 3572256 - RNA, 17 nt, Human
cugaaaggaaagugcuu

SEQ ID NO: 3572257 - RNA, 22 nt, Human
cugaaaggcaguagucauuuuc

SEQ ID NO: 3572258 - RNA, 17 nt, Human
cugaaagguagacuuuu

SEQ ID NO: 3572259 - RNA, 16 nt, Human
cugaaaguagggggcu

SEQ ID NO: 3572260 - RNA, 23 nt, Human
cugaaagugaaaguccagaaacu

SEQ ID NO: 3572261 - RNA, 12 nt, Human
cugaaagugaug

SEQ ID NO: 3572262 - RNA, 12 nt, Human
cugaaagugugu

SEQ ID NO: 3572263 - RNA, 22 nt, Human
cugaaaguguuuccuucauuuc

SEQ ID NO: 3572264 - RNA, 17 nt, Human
cugaaaguuacccacug

SEQ ID NO: 3572265 - RNA, 14 nt, Human
cugaaaguuguaca

SEQ ID NO: 3572266 - RNA, 18 nt, Human
cugaaaguuuuguaaaag

SEQ ID NO: 3572267 - RNA, 17 nt, Human
cugaaauaacauggccu

SEQ ID NO: 3572268 - RNA, 16 nt, Human
cugaaauaaggaauga

SEQ ID NO: 3572269 - RNA, 13 nt, Human
cugaaauccuggu

SEQ ID NO: 3572270 - RNA, 16 nt, Human
cugaaauccugguucc

SEQ ID NO: 3572271 - RNA, 19 nt, Human
cugaaaucucagaauuccu

SEQ ID NO: 3572272 - RNA, 14 nt, Human
cugaaaucuccuuu

SEQ ID NO: 3572273 - RNA, 22 nt, Human
cugaaaugaaacaaauaaucac

SEQ ID NO: 3572274 - RNA, 21 nt, Human
cugaaaugccuuacuuuguau

SEQ ID NO: 3572275 - RNA, 19 nt, Human
cugaaaugucaguucugau

SEQ ID NO: 3572276 - RNA, 13 nt, Human
cugaaaugugugu

SEQ ID NO: 3572277 - RNA, 17 nt, Human
cugaaauuccaaagucu

SEQ ID NO: 3572278 - RNA, 14 nt, Human
cugaaauucuccug

SEQ ID NO: 3572279 - RNA, 17 nt, Human
cugaaauucuccuggag

SEQ ID NO: 3572280 - RNA, 19 nt, Human
cugaaauucuccuggaggu

SEQ ID NO: 3572281 - RNA, 23 nt, Human
cugaaauuuccugggagcuuuug

SEQ ID NO: 3572282 - RNA, 22 nt, Human
cugaaauuuuagaaauauucac

SEQ ID NO: 3572283 - RNA, 16 nt, Human
cugaacaaaaaauaaa

SEQ ID NO: 3572284 - RNA, 12 nt, Human
cugaacaagaau

SEQ ID NO: 3572285 - RNA, 21 nt, Human
cugaacaauaggcuguuccca

SEQ ID NO: 3572286 - RNA, 14 nt, Human
cugaacacaggcag

SEQ ID NO: 3572287 - RNA, 18 nt, Human
cugaacacaggcagcuuu

SEQ ID NO: 3572288 - RNA, 13 nt, Human
cugaacacauuuc

SEQ ID NO: 3572289 - RNA, 18 nt, Human
cugaacaccauugaaggc

SEQ ID NO: 3572290 - RNA, 18 nt, Human
cugaacacuccaauuaag

SEQ ID NO: 3572291 - RNA, 20 nt, Human
cugaacacuuauugcuuuga

SEQ ID NO: 3572292 - RNA, 14 nt, Human
cugaacagccaaau

SEQ ID NO: 3572293 - RNA, 12 nt, Human
cugaacagcugg

SEQ ID NO: 3572294 - RNA, 13 nt, Human
cugaacagcuggu

SEQ ID NO: 3572295 - RNA, 16 nt, Human
cugaacagcuggugua

SEQ ID NO: 3572296 - RNA, 20 nt, Human
cugaacauccuuccuuccca

SEQ ID NO: 3572297 - RNA, 19 nt, Human
cugaacaucugaguccugg

SEQ ID NO: 3572298 - RNA, 17 nt, Human
cugaaccacuuguagau

SEQ ID NO: 3572299 - RNA, 13 nt, Human
cugaacccugugc

SEQ ID NO: 3572300 - RNA, 14 nt, Human
cugaacccugugcu

SEQ ID NO: 3572301 - RNA, 23 nt, Human
cugaacccugugcugguguccug

SEQ ID NO: 3572302 - RNA, 20 nt, Human
cugaaccggcuuuaccaaac

SEQ ID NO: 3572303 - RNA, 20 nt, Human
cugaaccugggaaagagauu

SEQ ID NO: 3572304 - RNA, 21 nt, Human
cugaaccuggguaacuaggga

SEQ ID NO: 3572305 - RNA, 13 nt, Human
cugaaccugucuu

SEQ ID NO: 3572306 - RNA, 14 nt, Human
cugaaccuuccauc

SEQ ID NO: 3572307 - RNA, 19 nt, Human
cugaacgauccuucaaagu

SEQ ID NO: 3572308 - RNA, 20 nt, Human
cugaacgauccuucaaaguc

SEQ ID NO: 3572309 - RNA, 13 nt, Human
cugaacggggaga

SEQ ID NO: 3572310 - RNA, 22 nt, Human
cugaacuaauaaaucuguugcc

SEQ ID NO: 3572311 - RNA, 13 nt, Human
cugaacucacuuu

SEQ ID NO: 3572312 - RNA, 21 nt, Human
cugaacuccugccauagucuu

SEQ ID NO: 3572313 - RNA, 20 nt, Human
cugaacucgcuucucuguga

SEQ ID NO: 3572314 - RNA, 19 nt, Human
cugaacugauggguuucuc

SEQ ID NO: 3572315 - RNA, 20 nt, Human
cugaacuguguguaauuguu

SEQ ID NO: 3572316 - RNA, 21 nt, Human
cugaacuguuaagaaaucugu

SEQ ID NO: 3572317 - RNA, 16 nt, Human
cugaacuucagagcau

SEQ ID NO: 3572318 - RNA, 13 nt, Human
cugaacuucagcu

SEQ ID NO: 3572319 - RNA, 21 nt, Human
cugaacuuggcgcugccccug

SEQ ID NO: 3572320 - RNA, 18 nt, Human
cugaacuuugaagacccg

SEQ ID NO: 3572321 - RNA, 12 nt, Human
cugaacuuugcu

SEQ ID NO: 3572322 - RNA, 14 nt, Human
cugaacuuugcuga

SEQ ID NO: 3572323 - RNA, 21 nt, Human
cugaacuuugcugagccugua

SEQ ID NO: 3572324 - RNA, 14 nt, Human
cugaacuuuggaga

SEQ ID NO: 3572325 - RNA, 13 nt, Human
cugaagaaagugu

SEQ ID NO: 3572326 - RNA, 14 nt, Human
cugaagaacuauuu

SEQ ID NO: 3572327 - RNA, 15 nt, Human
cugaagaauuaagau

SEQ ID NO: 3572328 - RNA, 13 nt, Human
cugaagaauugaa

SEQ ID NO: 3572329 - RNA, 23 nt, Human
cugaagacgccgucuccauggca

SEQ ID NO: 3572330 - RNA, 19 nt, Human
cugaagacucauucuucug

SEQ ID NO: 3572331 - RNA, 14 nt, Human
cugaagacugagga

SEQ ID NO: 3572332 - RNA, 11 nt, Human
cugaagaggag

SEQ ID NO: 3572333 - RNA, 14 nt, Human
cugaagaggaggag

SEQ ID NO: 3572334 - RNA, 19 nt, Human
cugaagaggcgggccagcc

SEQ ID NO: 3572335 - RNA, 23 nt, Human
cugaagaggcgggccagccaggc

SEQ ID NO: 3572336 - RNA, 14 nt, Human
cugaagaguccucu

SEQ ID NO: 3572337 - RNA, 14 nt, Human
cugaagauagaaga

SEQ ID NO: 3572338 - RNA, 14 nt, Human
cugacacguccacc

SEQ ID NO: 3572339 - RNA, 21 nt, Human
cugacacugcggggcuuggcu

SEQ ID NO: 3572340 - RNA, 16 nt, Human
cugacacuucaaggug

SEQ ID NO: 3572341 - RNA, 13 nt, Human
cugacagaaacca

SEQ ID NO: 3572342 - RNA, 14 nt, Human
cugacagacacagg

SEQ ID NO: 3572343 - RNA, 17 nt, Human
cugacagacacaggccc

SEQ ID NO: 3572344 - RNA, 19 nt, Human
cugacagacacaggcccgg

SEQ ID NO: 3572345 - RNA, 15 nt, Human
cugacagauuuccau

SEQ ID NO: 3572346 - RNA, 16 nt, Human
cugacagcagcaucuc

SEQ ID NO: 3572347 - RNA, 17 nt, Human
cugacagcagcaucucu

SEQ ID NO: 3572348 - RNA, 15 nt, Human
cugacagccagaacu

SEQ ID NO: 3572349 - RNA, 17 nt, Human
cugacagccucccaccc

SEQ ID NO: 3572350 - RNA, 20 nt, Human
cugacagccucccaccccca

SEQ ID NO: 3572351 - RNA, 13 nt, Human
cugacagcugcuc

SEQ ID NO: 3572352 - RNA, 17 nt, Human
cugacagcugcuccuag

SEQ ID NO: 3572353 - RNA, 23 nt, Human
cugacagcugcuccuagagggag

SEQ ID NO: 3572354 - RNA, 11 nt, Human
cugacaggcaa

SEQ ID NO: 3572355 - RNA, 17 nt, Human
cugacaggcaaugcugg

SEQ ID NO: 3572356 - RNA, 18 nt, Human
cugacaggcaaugcuggc

SEQ ID NO: 3572357 - RNA, 23 nt, Human
cugacaggcagccuggacauaga

SEQ ID NO: 3572358 - RNA, 19 nt, Human
cugacaguccucuccaccu

SEQ ID NO: 3572359 - RNA, 15 nt, Human
cugacagucuugugc

SEQ ID NO: 3572360 - RNA, 19 nt, Human
cugacaguuuacagacgcu

SEQ ID NO: 3572361 - RNA, 14 nt, Human
cugacaguuuuucu

SEQ ID NO: 3572362 - RNA, 16 nt, Human
cugacauaucuacacu

SEQ ID NO: 3572363 - RNA, 15 nt, Human
cugacaucaaaaaag

SEQ ID NO: 3572364 - RNA, 18 nt, Human
cugacaucacagcagccu

SEQ ID NO: 3572365 - RNA, 14 nt, Human
cugacauccccacu

SEQ ID NO: 3572366 - RNA, 15 nt, Human
cugacaucucugcaa

SEQ ID NO: 3572367 - RNA, 16 nt, Human
cugacaucucugcaau

SEQ ID NO: 3572368 - RNA, 16 nt, Human
cugacaucuggaaucu

SEQ ID NO: 3572369 - RNA, 16 nt, Human
cugacaucuguguuuc

SEQ ID NO: 3572370 - RNA, 14 nt, Human
cugacauggcucug

SEQ ID NO: 3572371 - RNA, 14 nt, Human
cugacauguggggc

SEQ ID NO: 3572372 - RNA, 19 nt, Human
cugacauguggggccaggu

SEQ ID NO: 3572373 - RNA, 21 nt, Human
cugacauuaacaguuuuccau

SEQ ID NO: 3572374 - RNA, 23 nt, Human
cugacauucaccugccccaacuc

SEQ ID NO: 3572375 - RNA, 16 nt, Human
cugacauuccuugcug

SEQ ID NO: 3572376 - RNA, 17 nt, Human
cugacauugccaaaaag

SEQ ID NO: 3572377 - RNA, 20 nt, Human
cugacauugccaaaaaggau

SEQ ID NO: 3572378 - RNA, 15 nt, Human
cugacauuggagccu

SEQ ID NO: 3572379 - RNA, 21 nt, Human
cugacauuguuggccaaagcc

SEQ ID NO: 3572380 - RNA, 14 nt, Human
cugacauuucuucu

SEQ ID NO: 3572381 - RNA, 21 nt, Human
cugacauuuucuuucaugggc

SEQ ID NO: 3572382 - RNA, 17 nt, Human
cugaccaagagagaaag

SEQ ID NO: 3572383 - RNA, 14 nt, Human
cugaccaaguuucu

SEQ ID NO: 3572384 - RNA, 17 nt, Human
cugaccaauugugcugc

SEQ ID NO: 3572385 - RNA, 18 nt, Human
cugaccaauugugcugcc

SEQ ID NO: 3572386 - RNA, 19 nt, Human
cugaccaauugugcugcca

SEQ ID NO: 3572387 - RNA, 20 nt, Human
cugaccaauugugcugccau

SEQ ID NO: 3572388 - RNA, 13 nt, Human
cugaccacacuuc

SEQ ID NO: 3572389 - RNA, 21 nt, Human
cugaccacacuuccuguccag

SEQ ID NO: 3572390 - RNA, 12 nt, Human
cugaccacagca

SEQ ID NO: 3572391 - RNA, 15 nt, Human
cugaccacagcacag

SEQ ID NO: 3572392 - RNA, 18 nt, Human
cugaccacagcacagcca

SEQ ID NO: 3572393 - RNA, 12 nt, Human
cugaccacccuc

SEQ ID NO: 3572394 - RNA, 14 nt, Human
cugaccacccuccc

SEQ ID NO: 3572395 - RNA, 22 nt, Human
cugaccaccuuuguuucucccc

SEQ ID NO: 3572396 - RNA, 22 nt, Human
cugaccacgcuuucuagcuguu

SEQ ID NO: 3572397 - RNA, 15 nt, Human
cugaccacucagaga

SEQ ID NO: 3572398 - RNA, 23 nt, Human
cugaccacucagagacaugcaga

SEQ ID NO: 3572399 - RNA, 13 nt, Human
cugaccagcagcg

SEQ ID NO: 3572400 - RNA, 14 nt, Human
cugaccagcagcgc

SEQ ID NO: 3572401 - RNA, 22 nt, Human
cugaccagcagcgccuuuccca

SEQ ID NO: 3572402 - RNA, 23 nt, Human
cugaccagccgugagcauguuug

SEQ ID NO: 3572403 - RNA, 21 nt, Human
cugaccagccuccaugcugcc

SEQ ID NO: 3572404 - RNA, 23 nt, Human
cugaccagccuccaugcugccuc

SEQ ID NO: 3572405 - RNA, 20 nt, Human
cugaccagcucccccucccu

SEQ ID NO: 3572406 - RNA, 16 nt, Human
cugaccagcugcuccg

SEQ ID NO: 3572407 - RNA, 23 nt, Human
cugaccaguuuaaccugaugcag

SEQ ID NO: 3572408 - RNA, 15 nt, Human
cugaccauccacucu

SEQ ID NO: 3572409 - RNA, 21 nt, Human
cugaccaugcucaucugcugg

SEQ ID NO: 3572410 - RNA, 14 nt, Human
cugacccacugcuu

SEQ ID NO: 3572411 - RNA, 15 nt, Human
cugacccagccuguu

SEQ ID NO: 3572412 - RNA, 16 nt, Human
cugacccaggccgcag

SEQ ID NO: 3572413 - RNA, 13 nt, Human
cugacccaguccc

SEQ ID NO: 3572414 - RNA, 14 nt, Human
cugacccagucccu

SEQ ID NO: 3572415 - RNA, 13 nt, Human
cugacccaugcug

SEQ ID NO: 3572416 - RNA, 19 nt, Human
cugacccaugcugcccugu

SEQ ID NO: 3572417 - RNA, 20 nt, Human
cugaccccaaagagccugga

SEQ ID NO: 3572418 - RNA, 23 nt, Human
cugaccccaaagagccuggagaa

SEQ ID NO: 3572419 - RNA, 15 nt, Human
cugaccccaucaccu

SEQ ID NO: 3572420 - RNA, 20 nt, Human
cugaccccccucaggacccu

SEQ ID NO: 3572421 - RNA, 20 nt, Human
cugaccccgguggcggcccc

SEQ ID NO: 3572422 - RNA, 14 nt, Human
cugaccccuccuca

SEQ ID NO: 3572423 - RNA, 15 nt, Human
cugaccccuccucac

SEQ ID NO: 3572424 - RNA, 16 nt, Human
cugaccccuccucacu

SEQ ID NO: 3572425 - RNA, 20 nt, Human
cugaccccuccucacuggcc

SEQ ID NO: 3572426 - RNA, 13 nt, Human
cugaccccugcuc

SEQ ID NO: 3572427 - RNA, 13 nt, Human
cugacccuccugu

SEQ ID NO: 3572428 - RNA, 19 nt, Human
cugacccugcuucaaauau

SEQ ID NO: 3572429 - RNA, 20 nt, Human
cugacccuggggcuggcuuu

SEQ ID NO: 3572430 - RNA, 12 nt, Human
cugacccuguau

SEQ ID NO: 3572431 - RNA, 19 nt, Human
cugacccuguauauagccc

SEQ ID NO: 3572432 - RNA, 20 nt, Human
cugacccuguauauagccca

SEQ ID NO: 3572433 - RNA, 22 nt, Human
cugacccuguauauagcccagc

SEQ ID NO: 3572434 - RNA, 13 nt, Human
cugacccugugga

SEQ ID NO: 3572435 - RNA, 13 nt, Human
cugaccgugggcg

SEQ ID NO: 3572436 - RNA, 12 nt, Human
cugaccucaaau

SEQ ID NO: 3572437 - RNA, 13 nt, Human
cugaccucccagc

SEQ ID NO: 3572438 - RNA, 18 nt, Human
cugaccucccagcccuau

SEQ ID NO: 3572439 - RNA, 23 nt, Human
cugaccucccagcccuauggaug

SEQ ID NO: 3572440 - RNA, 21 nt, Human
cugaccucccccuccuuccca

SEQ ID NO: 3572441 - RNA, 20 nt, Human
cugaccucccucuaauuuau

SEQ ID NO: 3572442 - RNA, 14 nt, Human
cugaccuccgccau

SEQ ID NO: 3572443 - RNA, 17 nt, Human
cugaccuccgccaucca

SEQ ID NO: 3572444 - RNA, 16 nt, Human
cugaccucuugcuguc

SEQ ID NO: 3572445 - RNA, 17 nt, Human
cugaccucuugcugucu

SEQ ID NO: 3572446 - RNA, 19 nt, Human
cugaccucuugcugucucu

SEQ ID NO: 3572447 - RNA, 12 nt, Human
cugaccugcagg

SEQ ID NO: 3572448 - RNA, 22 nt, Human
cugaccugccucucacacacau

SEQ ID NO: 3572449 - RNA, 15 nt, Human
cugaccugcugaccu

SEQ ID NO: 3572450 - RNA, 20 nt, Human
cugaccuggcccccucagug

SEQ ID NO: 3572451 - RNA, 18 nt, Human
cugaccugucaugccccc

SEQ ID NO: 3572452 - RNA, 20 nt, Human
cugaccugucaugccccccu

SEQ ID NO: 3572453 - RNA, 20 nt, Human
cugaccugugagcccagcug

SEQ ID NO: 3572454 - RNA, 14 nt, Human
cugaccuucagcuc

SEQ ID NO: 3572455 - RNA, 15 nt, Human
cugaccuucagcuca

SEQ ID NO: 3572456 - RNA, 21 nt, Human
cugaccuuccucgcagagagg

SEQ ID NO: 3572457 - RNA, 15 nt, Human
cugaccuuccuuccu

SEQ ID NO: 3572458 - RNA, 16 nt, Human
cugaccuugaugagcu

SEQ ID NO: 3572459 - RNA, 14 nt, Human
cugaccuuggagag

SEQ ID NO: 3572460 - RNA, 18 nt, Human
cugaccuuugucaucuuu

SEQ ID NO: 3572461 - RNA, 21 nt, Human
cugacgaacuuccauggcccu

SEQ ID NO: 3572462 - RNA, 15 nt, Human
cugacgaggcugggc

SEQ ID NO: 3572463 - RNA, 20 nt, Human
cugacgaggcugggccaagc

SEQ ID NO: 3572464 - RNA, 21 nt, Human
cugacgcaaaaccacuuuccu

SEQ ID NO: 3572465 - RNA, 21 nt, Human
cugacggaagccaacuuggcu

SEQ ID NO: 3572466 - RNA, 15 nt, Human
cugacggccagggag

SEQ ID NO: 3572467 - RNA, 21 nt, Human
cugacggccagggagaagcuc

SEQ ID NO: 3572468 - RNA, 15 nt, Human
cugacggcccugcaa

SEQ ID NO: 3572469 - RNA, 16 nt, Human
cugacggcccugcaau

SEQ ID NO: 3572470 - RNA, 18 nt, Human
cugacguagcugcaaagg

SEQ ID NO: 3572471 - RNA, 13 nt, Human
cugacguccaccu

SEQ ID NO: 3572472 - RNA, 14 nt, Human
cugacgugccuuuu

SEQ ID NO: 3572473 - RNA, 17 nt, Human
cugacgugccuuuugca

SEQ ID NO: 3572474 - RNA, 22 nt, Human
cugacgugccuuuugcaccccu

SEQ ID NO: 3572475 - RNA, 15 nt, Human
cugacuaaacuuuuu

SEQ ID NO: 3572476 - RNA, 22 nt, Human
cugacuaaacuuuuuuucugua

SEQ ID NO: 3572477 - RNA, 18 nt, Human
cugacuaaauuuggggac

SEQ ID NO: 3572478 - RNA, 14 nt, Human
cugacuacagggcc

SEQ ID NO: 3572479 - RNA, 22 nt, Human
cugacuacugggcaaagagugu

SEQ ID NO: 3572480 - RNA, 18 nt, Human
cugacuagugaggaaaga

SEQ ID NO: 3572481 - RNA, 23 nt, Human
cugacuauuauguuguuagagaa

SEQ ID NO: 3572482 - RNA, 21 nt, Human
cugacuauucuugauguaaaa

SEQ ID NO: 3572483 - RNA, 22 nt, Human
cugccuggagacuuagggcacc

SEQ ID NO: 3572484 - RNA, 12 nt, Human
cugccuggagcc

SEQ ID NO: 3572485 - RNA, 21 nt, Human
cugccuggagccccacugccc

SEQ ID NO: 3572486 - RNA, 16 nt, Human
cugccuggaggaccug

SEQ ID NO: 3572487 - RNA, 22 nt, Human
cugccuggaggaccugagccug

SEQ ID NO: 3572488 - RNA, 23 nt, Human
cugccuggaggaccugagccugc

SEQ ID NO: 3572489 - RNA, 15 nt, Human
cugccuggcccccaa

SEQ ID NO: 3572490 - RNA, 22 nt, Human
cugccuggcccccaaccucagg

SEQ ID NO: 3572491 - RNA, 17 nt, Human
cugccuggccggccagc

SEQ ID NO: 3572492 - RNA, 22 nt, Human
cugccuggccggccagccagcc

SEQ ID NO: 3572493 - RNA, 23 nt, Human
cugccugggaucccucauccuca

SEQ ID NO: 3572494 - RNA, 11 nt, Human
cugccugggcu

SEQ ID NO: 3572495 - RNA, 15 nt, Human
cugccugggcuguug

SEQ ID NO: 3572496 - RNA, 21 nt, Human
cugccugggcuguuggcacuc

SEQ ID NO: 3572497 - RNA, 20 nt, Human
cugccugguauauccaaaag

SEQ ID NO: 3572498 - RNA, 16 nt, Human
cugccuggucuccugc

SEQ ID NO: 3572499 - RNA, 19 nt, Human
cugccuggucuccugcccc

SEQ ID NO: 3572500 - RNA, 20 nt, Human
cugccuggugcccagcacau

SEQ ID NO: 3572501 - RNA, 15 nt, Human
cugccuguaguuagg

SEQ ID NO: 3572502 - RNA, 21 nt, Human
cugccuguaguuaggaaauaa

SEQ ID NO: 3572503 - RNA, 19 nt, Human
cugccuguauacuuuagua

SEQ ID NO: 3572504 - RNA, 20 nt, Human
cugccuguauacuuuaguau

SEQ ID NO: 3572505 - RNA, 21 nt, Human
cugccugucccuaccccaugg

SEQ ID NO: 3572506 - RNA, 19 nt, Human
cugccugucccucucaggc

SEQ ID NO: 3572507 - RNA, 14 nt, Human
cugccugucugccc

SEQ ID NO: 3572508 - RNA, 15 nt, Human
cugccugucugcccc

SEQ ID NO: 3572509 - RNA, 15 nt, Human
cugccugucugucuc

SEQ ID NO: 3572510 - RNA, 13 nt, Human
cugccuguggagu

SEQ ID NO: 3572511 - RNA, 21 nt, Human
cugccuguggccaugacccug

SEQ ID NO: 3572512 - RNA, 22 nt, Human
cugccuguggcgccgucuccag

SEQ ID NO: 3572513 - RNA, 22 nt, Human
cugccuguuaggagaagcugca

SEQ ID NO: 3572514 - RNA, 18 nt, Human
cugccuguuauaacucug

SEQ ID NO: 3572515 - RNA, 17 nt, Human
cugccuguucagcucca

SEQ ID NO: 3572516 - RNA, 14 nt, Human
cugccuguugggcc

SEQ ID NO: 3572517 - RNA, 16 nt, Human
cugccuguugggccag

SEQ ID NO: 3572518 - RNA, 21 nt, Human
cugccuguugggccaggagcc

SEQ ID NO: 3572519 - RNA, 18 nt, Human
cugccuuaaaaccaaaga

SEQ ID NO: 3572520 - RNA, 19 nt, Human
cugccuuagagccaggcac

SEQ ID NO: 3572521 - RNA, 15 nt, Human
cugccuuagaggagc

SEQ ID NO: 3572522 - RNA, 16 nt, Human
cugccuuagaggagcc

SEQ ID NO: 3572523 - RNA, 17 nt, Human
cugccuuaggccuaccu

SEQ ID NO: 3572524 - RNA, 19 nt, Human
cugccuuauucagggaagg

SEQ ID NO: 3572525 - RNA, 15 nt, Human
cugccuucccuagcu

SEQ ID NO: 3572526 - RNA, 16 nt, Human
cugccuucccuagcuu

SEQ ID NO: 3572527 - RNA, 17 nt, Human
cugccuucccuagcuuu

SEQ ID NO: 3572528 - RNA, 18 nt, Human
cugccuuccuccugggcc

SEQ ID NO: 3572529 - RNA, 21 nt, Human
cugccuuccuccugggcccuc

SEQ ID NO: 3572530 - RNA, 12 nt, Human
cugccuuccuug

SEQ ID NO: 3572531 - RNA, 13 nt, Human
cugccuuccuugc

SEQ ID NO: 3572532 - RNA, 14 nt, Human
cugccuuccuugcu

SEQ ID NO: 3572533 - RNA, 14 nt, Human
cugccuucgcuucu

SEQ ID NO: 3572534 - RNA, 21 nt, Human
cugccuucguuaacuguguau

SEQ ID NO: 3572535 - RNA, 22 nt, Human
cugccuucugacggcccugcaa

SEQ ID NO: 3572536 - RNA, 14 nt, Human
cugccuucuggccu

SEQ ID NO: 3572537 - RNA, 21 nt, Human
cugccuucuguccugguguca

SEQ ID NO: 3572538 - RNA, 19 nt, Human
cugccuucuucggaaagaa

SEQ ID NO: 3572539 - RNA, 24 nt, Human
cugccuucuucggggaacuccugg

SEQ ID NO: 3572540 - RNA, 15 nt, Human
cugccuucuucuuuu

SEQ ID NO: 3572541 - RNA, 16 nt, Human
cugccuugaagccacu

SEQ ID NO: 3572542 - RNA, 22 nt, Human
cugccuugaagccacugaagcu

SEQ ID NO: 3572543 - RNA, 22 nt, Human
cugccuugcccacuccugcucu

SEQ ID NO: 3572544 - RNA, 14 nt, Human
cugccuuggcucag

SEQ ID NO: 3572545 - RNA, 15 nt, Human
cugccuuggcucaga

SEQ ID NO: 3572546 - RNA, 22 nt, Human
cugccuuggcucagacauguuu

SEQ ID NO: 3572547 - RNA, 22 nt, Human
cugccuuggggucagguugaca

SEQ ID NO: 3572548 - RNA, 17 nt, Human
cugccuuuagaaaauau

SEQ ID NO: 3572549 - RNA, 20 nt, Human
cugccuuuagucgcugagga

SEQ ID NO: 3572550 - RNA, 14 nt, Human
cugccuuugccagg

SEQ ID NO: 3572551 - RNA, 17 nt, Human
cugccuuugccagguga

SEQ ID NO: 3572552 - RNA, 16 nt, Human
cugccuuugccuccag

SEQ ID NO: 3572553 - RNA, 21 nt, Human
cugccuuuggcacucugacuu

SEQ ID NO: 3572554 - RNA, 18 nt, Human
cugccuuuggcagaguuc

SEQ ID NO: 3572555 - RNA, 17 nt, Human
cugccuuugggagcagg

SEQ ID NO: 3572556 - RNA, 19 nt, Human
cugccuuuuaguuccugug

SEQ ID NO: 3572557 - RNA, 21 nt, Human
cugcgaagacccucuugccca

SEQ ID NO: 3572558 - RNA, 17 nt, Human
cugcgaaggggcccugg

SEQ ID NO: 3572559 - RNA, 18 nt, Human
cugcgaaggggcccuggu

SEQ ID NO: 3572560 - RNA, 19 nt, Human
cugcgaaggggcccugguc

SEQ ID NO: 3572561 - RNA, 19 nt, Human
cugcgaccacaagaaggau

SEQ ID NO: 3572562 - RNA, 15 nt, Human
cugcgagggcagcgg

SEQ ID NO: 3572563 - RNA, 12 nt, Human
cugcgcacugug

SEQ ID NO: 3572564 - RNA, 13 nt, Human
cugcgccacugcu

SEQ ID NO: 3572565 - RNA, 20 nt, Human
cugcgccaguccugcuaccu

SEQ ID NO: 3572566 - RNA, 18 nt, Human
cugcgcccaccccgcucu

SEQ ID NO: 3572567 - RNA, 18 nt, Human
cugcgcccaguccuucca

SEQ ID NO: 3572568 - RNA, 23 nt, Human
cugcgcccaguccuuccaccucg

SEQ ID NO: 3572569 - RNA, 13 nt, Human
cugcgcccuuccc

SEQ ID NO: 3572570 - RNA, 13 nt, Human
cugcgccucaggc

SEQ ID NO: 3572571 - RNA, 13 nt, Human
cugcgccugcugc

SEQ ID NO: 3572572 - RNA, 23 nt, Human
cugcgccugcugcaugcccucuc

SEQ ID NO: 3572573 - RNA, 13 nt, Human
cugcgccuuuccu

SEQ ID NO: 3572574 - RNA, 17 nt, Human
cugcgcuuuauuuucuu

SEQ ID NO: 3572575 - RNA, 14 nt, Human
cugcggaaaaggaa

SEQ ID NO: 3572576 - RNA, 23 nt, Human
cugcggaccccagcugugagccu

SEQ ID NO: 3572577 - RNA, 17 nt, Human
cugcggagcaagaggag

SEQ ID NO: 3572578 - RNA, 16 nt, Human
cugcggccccuccccc

SEQ ID NO: 3572579 - RNA, 19 nt, Human
cugcggcugcugugugccu

SEQ ID NO: 3572580 - RNA, 20 nt, Human
cugcgggaugguccuggggc

SEQ ID NO: 3572581 - RNA, 21 nt, Human
cugcgggggcagugcucaccc

SEQ ID NO: 3572582 - RNA, 22 nt, Human
cugcgggucacaggagggaggg

SEQ ID NO: 3572583 - RNA, 16 nt, Human
cugcggucaaggccag

SEQ ID NO: 3572584 - RNA, 16 nt, Human
cugcgguccacccagg

SEQ ID NO: 3572585 - RNA, 20 nt, Human
cugcgguccacccaggagcc

SEQ ID NO: 3572586 - RNA, 18 nt, Human
cugcggugcuaucucccc

SEQ ID NO: 3572587 - RNA, 20 nt, Human
cugcggugcuaucuccccca

SEQ ID NO: 3572588 - RNA, 21 nt, Human
cugcggugcuaucucccccag

SEQ ID NO: 3572589 - RNA, 23 nt, Human
cugcggugcuaucucccccagcc

SEQ ID NO: 3572590 - RNA, 22 nt, Human
cugcgguuuguuggaucuucaa

SEQ ID NO: 3572591 - RNA, 13 nt, Human
cugcguccuccuc

SEQ ID NO: 3572592 - RNA, 18 nt, Human
cugcguccuccucaccuc

SEQ ID NO: 3572593 - RNA, 17 nt, Human
cugcgucgguccuggug

SEQ ID NO: 3572594 - RNA, 18 nt, Human
cugcgucuggaggggccc

SEQ ID NO: 3572595 - RNA, 22 nt, Human
cugcgucuggaggggccccugc

SEQ ID NO: 3572596 - RNA, 20 nt, Human
cugcgugcagggacaaagag

SEQ ID NO: 3572597 - RNA, 18 nt, Human
cugcguucuugugacaga

SEQ ID NO: 3572598 - RNA, 17 nt, Human
cugcguugguccagagc

SEQ ID NO: 3572599 - RNA, 23 nt, Human
cugcuaaauaaaauuuguugcau

SEQ ID NO: 3572600 - RNA, 19 nt, Human
cugcuaaaucuccuauuuu

SEQ ID NO: 3572601 - RNA, 14 nt, Human
cugcuaacaaguca

SEQ ID NO: 3572602 - RNA, 21 nt, Human
cugcuaacuuggagccccagu

SEQ ID NO: 3572603 - RNA, 19 nt, Human
cugcuaaguauuucccagc

SEQ ID NO: 3572604 - RNA, 23 nt, Human
cugcuaauauuuuccuccugagu

SEQ ID NO: 3572605 - RNA, 17 nt, Human
cugcuacaaagaagaca

SEQ ID NO: 3572606 - RNA, 22 nt, Human
cugcuacaaagaagacauguuu

SEQ ID NO: 3572607 - RNA, 20 nt, Human
cugcuacaccuauuauccca

SEQ ID NO: 3572608 - RNA, 17 nt, Human
cugcuacccucccugcu

SEQ ID NO: 3572609 - RNA, 13 nt, Human
cugcuaccucacu

SEQ ID NO: 3572610 - RNA, 17 nt, Human
cugcuaccucacugggg

SEQ ID NO: 3572611 - RNA, 14 nt, Human
cugcuaccuugccc

SEQ ID NO: 3572612 - RNA, 17 nt, Human
cugcuaccuugccccaa

SEQ ID NO: 3572613 - RNA, 18 nt, Human
cugcuaccuuucaaagcu

SEQ ID NO: 3572614 - RNA, 19 nt, Human
cugcuaccuuucaaagcuu

SEQ ID NO: 3572615 - RNA, 20 nt, Human
cugcuaccuuucaaagcuug

SEQ ID NO: 3572616 - RNA, 17 nt, Human
cugcuacucuguuccuu

SEQ ID NO: 3572617 - RNA, 17 nt, Human
cugcuacugccaaccuc

SEQ ID NO: 3572618 - RNA, 18 nt, Human
cugcuacuguaauuuuau

SEQ ID NO: 3572619 - RNA, 13 nt, Human
cugcuacuuauau

SEQ ID NO: 3572620 - RNA, 15 nt, Human
cugcuagaacuuuuu

SEQ ID NO: 3572621 - RNA, 20 nt, Human
cugcuagaacuuuuuuaaau

SEQ ID NO: 3572622 - RNA, 23 nt, Human
cugcuagaacuuuuuuaaauaaa

SEQ ID NO: 3572623 - RNA, 16 nt, Human
cugcuagcaaauggca

SEQ ID NO: 3572624 - RNA, 14 nt, Human
cugcuagcacuugg

SEQ ID NO: 3572625 - RNA, 21 nt, Human
cugcuagcacuuggagccaag

SEQ ID NO: 3572626 - RNA, 20 nt, Human
cugcugagauacauacagaa

SEQ ID NO: 3572627 - RNA, 17 nt, Human
cugcugagauccuggac

SEQ ID NO: 3572628 - RNA, 13 nt, Human
cugcugagccgca

SEQ ID NO: 3572629 - RNA, 15 nt, Human
cugcugagccgcaga

SEQ ID NO: 3572630 - RNA, 18 nt, Human
cugcugagccgcagagaa

SEQ ID NO: 3572631 - RNA, 13 nt, Human
cugcugagcucug

SEQ ID NO: 3572632 - RNA, 14 nt, Human
cugcugagggucca

SEQ ID NO: 3572633 - RNA, 16 nt, Human
cugcugaggguccaga

SEQ ID NO: 3572634 - RNA, 23 nt, Human
cugcugagucccaggcugagccu

SEQ ID NO: 3572635 - RNA, 17 nt, Human
cugcugagucuguucug

SEQ ID NO: 3572636 - RNA, 14 nt, Human
cugcugauauuuuc

SEQ ID NO: 3572637 - RNA, 19 nt, Human
cugcugauauuuucucuag

SEQ ID NO: 3572638 - RNA, 14 nt, Human
cugcugaugcucau

SEQ ID NO: 3572639 - RNA, 15 nt, Human
cugcugaugcucaug

SEQ ID NO: 3572640 - RNA, 16 nt, Human
cugcugaugcucaugg

SEQ ID NO: 3572641 - RNA, 17 nt, Human
cugcugaugcucauggu

SEQ ID NO: 3572642 - RNA, 16 nt, Human
cugcugauuuaaacac

SEQ ID NO: 3572643 - RNA, 13 nt, Human
cugcugcaaggcc

SEQ ID NO: 3572644 - RNA, 19 nt, Human
cugcugcaccaacccagcc

SEQ ID NO: 3572645 - RNA, 18 nt, Human
cugcugcagaggggcagg

SEQ ID NO: 3572646 - RNA, 23 nt, Human
cugcugcagaggggcaggcccug

SEQ ID NO: 3572647 - RNA, 11 nt, Human
cugcugcaggg

SEQ ID NO: 3572648 - RNA, 12 nt, Human
cugcugcagggg

SEQ ID NO: 3572649 - RNA, 14 nt, Human
cugcugcaggggcu

SEQ ID NO: 3572650 - RNA, 17 nt, Human
cugcugcaggggcucug

SEQ ID NO: 3572651 - RNA, 18 nt, Human
cugcugcaggggcucugg

SEQ ID NO: 3572652 - RNA, 13 nt, Human
cugcugcaguugc

SEQ ID NO: 3572653 - RNA, 20 nt, Human
cugcugcauuugugucaucu

SEQ ID NO: 3572654 - RNA, 11 nt, Human
cugcugccacu

SEQ ID NO: 3572655 - RNA, 21 nt, Human
cugcugccaugaacugucaag

SEQ ID NO: 3572656 - RNA, 22 nt, Human
cugcugccauggcgugucccuc

SEQ ID NO: 3572657 - RNA, 16 nt, Human
cugcugccccaaagga

SEQ ID NO: 3572658 - RNA, 18 nt, Human
cugcugccccaaaggaag

SEQ ID NO: 3572659 - RNA, 14 nt, Human
cugcugccccugca

SEQ ID NO: 3572660 - RNA, 14 nt, Human
cugcugccgccucc

SEQ ID NO: 3572661 - RNA, 17 nt, Human
cugcugccgccucccag

SEQ ID NO: 3572662 - RNA, 20 nt, Human
cugcugccgccucccagccu

SEQ ID NO: 3572663 - RNA, 21 nt, Human
cugcugccgccucccagccug

SEQ ID NO: 3572664 - RNA, 15 nt, Human
cugcugccucccucu

SEQ ID NO: 3572665 - RNA, 12 nt, Human
cugcugccucuu

SEQ ID NO: 3572666 - RNA, 21 nt, Human
cugcugcgcccuuaccuuccc

SEQ ID NO: 3572667 - RNA, 21 nt, Human
cugcugcuaaucuucagggca

SEQ ID NO: 3572668 - RNA, 12 nt, Human
cugcugcucccu

SEQ ID NO: 3572669 - RNA, 15 nt, Human
cugcugcucccucag

SEQ ID NO: 3572670 - RNA, 16 nt, Human
cugcugcugagaaccu

SEQ ID NO: 3572671 - RNA, 15 nt, Human
cugcugcugccugcc

SEQ ID NO: 3572672 - RNA, 14 nt, Human
cugcugcugccugg

SEQ ID NO: 3572673 - RNA, 15 nt, Human
cugcugcuggcuggu

SEQ ID NO: 3572674 - RNA, 12 nt, Human
cugcugcugggc

SEQ ID NO: 3572675 - RNA, 16 nt, Human
cugcugcugggcucag

SEQ ID NO: 3572676 - RNA, 15 nt, Human
cugcugcugucaccu

SEQ ID NO: 3572677 - RNA, 17 nt, Human
cugcugcuucauguuug

SEQ ID NO: 3572678 - RNA, 20 nt, Human
cugcuggacaguaucacugu

SEQ ID NO: 3572679 - RNA, 18 nt, Human
cugcuggagaggccccag

SEQ ID NO: 3572680 - RNA, 19 nt, Human
cugcuggagaggccccagc

SEQ ID NO: 3572681 - RNA, 14 nt, Human
cugcuggaggccuc

SEQ ID NO: 3572682 - RNA, 15 nt, Human
cugcuggaggccuca

SEQ ID NO: 3572683 - RNA, 17 nt, Human
cugcuggaggccucagg

SEQ ID NO: 3572684 - RNA, 19 nt, Human
cugcuggaucucccagggc

SEQ ID NO: 3572685 - RNA, 20 nt, Human
cugcuggaucucccagggcu

SEQ ID NO: 3572686 - RNA, 21 nt, Human
cugcuggcacauuuccccaga

SEQ ID NO: 3572687 - RNA, 17 nt, Human
cugcuggccccucaccu

SEQ ID NO: 3572688 - RNA, 20 nt, Human
cugcuggccgccucaccccc

SEQ ID NO: 3572689 - RNA, 16 nt, Human
cugcuggccggagcaa

SEQ ID NO: 3572690 - RNA, 18 nt, Human
cugcuggccgggcacagc

SEQ ID NO: 3572691 - RNA, 14 nt, Human
cugcuggccucugc

SEQ ID NO: 3572692 - RNA, 16 nt, Human
cugcuggccucugcga

SEQ ID NO: 3572693 - RNA, 21 nt, Human
cugcuggccucugcgaguggu

SEQ ID NO: 3572694 - RNA, 12 nt, Human
cugcuggccugg

SEQ ID NO: 3572695 - RNA, 13 nt, Human
cugcuggccuggc

SEQ ID NO: 3572696 - RNA, 16 nt, Human
cugcuggcgccucugc

SEQ ID NO: 3572697 - RNA, 18 nt, Human
cugcuggcgccucugcaa

SEQ ID NO: 3572698 - RNA, 13 nt, Human
cugcuggcugccu

SEQ ID NO: 3572699 - RNA, 15 nt, Human
cugcuggcugccuua

SEQ ID NO: 3572700 - RNA, 22 nt, Human
cugcugggagguuaaaaagaaa

SEQ ID NO: 3572701 - RNA, 23 nt, Human
cugcugggauggugggcuucagg

SEQ ID NO: 3572702 - RNA, 20 nt, Human
cugcugggcuccacuuggcu

SEQ ID NO: 3572703 - RNA, 15 nt, Human
cugcugggcucucca

SEQ ID NO: 3572704 - RNA, 17 nt, Human
cugcugggcucuccacc

SEQ ID NO: 3572705 - RNA, 19 nt, Human
cugcugggcucuccaccuc

SEQ ID NO: 3572706 - RNA, 21 nt, Human
cugcugggcucuccaccucag

SEQ ID NO: 3572707 - RNA, 15 nt, Human
cugcugggcuggggc

SEQ ID NO: 3572708 - RNA, 19 nt, Human
cugcugggcuggggccuga

SEQ ID NO: 3572709 - RNA, 21 nt, Human
cugcugggcuggggccugaug

SEQ ID NO: 3572710 - RNA, 15 nt, Human
cugcuggggaagaca

SEQ ID NO: 3572711 - RNA, 22 nt, Human
cugcuggggaagacaguggccc

SEQ ID NO: 3572712 - RNA, 21 nt, Human
cugcuggggauccccgccugg

SEQ ID NO: 3572713 - RNA, 18 nt, Human
cugcuggggccugggaca

SEQ ID NO: 3572714 - RNA, 19 nt, Human
cugcuggggccugggacaa

SEQ ID NO: 3572715 - RNA, 22 nt, Human
cugcuggggccugggacaacug

SEQ ID NO: 3572716 - RNA, 18 nt, Human
cugcugggggcaacuggc

SEQ ID NO: 3572717 - RNA, 15 nt, Human
cugcuggguggccca

SEQ ID NO: 3572718 - RNA, 18 nt, Human
cugcuggguggcccaucc

SEQ ID NO: 3572719 - RNA, 19 nt, Human
cugcuggguggcccauccc

SEQ ID NO: 3572720 - RNA, 14 nt, Human
cugcuggguguggc

SEQ ID NO: 3572721 - RNA, 17 nt, Human
cugcuggguguggcgca

SEQ ID NO: 3572722 - RNA, 22 nt, Human
cugcugguaauuuguaucugaa

SEQ ID NO: 3572723 - RNA, 15 nt, Human
cugcuggucacagcc

SEQ ID NO: 3572724 - RNA, 16 nt, Human
cugcuggucacagccu

SEQ ID NO: 3572725 - RNA, 17 nt, Human
cugcuggucacagccuc

SEQ ID NO: 3572726 - RNA, 20 nt, Human
cugcuggucacagccuccuc

SEQ ID NO: 3572727 - RNA, 17 nt, Human
cugcuggucacuucuuc

SEQ ID NO: 3572728 - RNA, 20 nt, Human
cugcuggucacuucuucugu

SEQ ID NO: 3572729 - RNA, 17 nt, Human
cugcugguccgugggac

SEQ ID NO: 3572730 - RNA, 14 nt, Human
cugcuggucuucaa

SEQ ID NO: 3572731 - RNA, 15 nt, Human
cugcuggugcacagc

SEQ ID NO: 3572732 - RNA, 23 nt, Human
cugcuggugggcuugucauagcc

SEQ ID NO: 3572733 - RNA, 13 nt, Human
cugcugguucagg

SEQ ID NO: 3572734 - RNA, 15 nt, Human
cugcugguucagggu

SEQ ID NO: 3572735 - RNA, 22 nt, Human
cugcuguaaauuuggcuucugu

SEQ ID NO: 3572736 - RNA, 12 nt, Human
cugcuguacuga

SEQ ID NO: 3572737 - RNA, 20 nt, Human
cugcugucaccucucccacg

SEQ ID NO: 3572738 - RNA, 22 nt, Human
cugcugucauugcuucuucuga

SEQ ID NO: 3572739 - RNA, 16 nt, Human
cugcuguccagacagc

SEQ ID NO: 3572740 - RNA, 16 nt, Human
cugcugucugggugcu

SEQ ID NO: 3572741 - RNA, 21 nt, Human
cugcugucugggugcuacugg

SEQ ID NO: 3572742 - RNA, 19 nt, Human
cugcugucuggguggcuca

SEQ ID NO: 3572743 - RNA, 14 nt, Human
cugcugucuucugg

SEQ ID NO: 3572744 - RNA, 12 nt, Human
cugcugucuugu

SEQ ID NO: 3572745 - RNA, 19 nt, Human
cugcugucuuuucuuugcc

SEQ ID NO: 3572746 - RNA, 19 nt, Human
cugcugugaagcuggaacu

SEQ ID NO: 3572747 - RNA, 23 nt, Human
cugcugugaauuuguguaaggau

SEQ ID NO: 3572748 - RNA, 17 nt, Human
cugcuguggccaggagg

SEQ ID NO: 3572749 - RNA, 22 nt, Human
cugcugugggcacaggucaggc

SEQ ID NO: 3572750 - RNA, 21 nt, Human
cugcuguuccagugguaagcu

SEQ ID NO: 3572751 - RNA, 20 nt, Human
cugcuuacaauucccugcug

SEQ ID NO: 3572752 - RNA, 23 nt, Human
cugcuuaccagauaaugcuacuu

SEQ ID NO: 3572753 - RNA, 21 nt, Human
cugcuuaccuacuuucuucag

SEQ ID NO: 3572754 - RNA, 12 nt, Human
cugcuuagcuug

SEQ ID NO: 3572755 - RNA, 15 nt, Human
cugcuuaggagagac

SEQ ID NO: 3572756 - RNA, 23 nt, Human
cugcuuaguaucucaucaacaaa

SEQ ID NO: 3572757 - RNA, 14 nt, Human
cugcuucaaauauu

SEQ ID NO: 3572758 - RNA, 13 nt, Human
cugcuucaaggau

SEQ ID NO: 3572759 - RNA, 16 nt, Human
cugcuucaaggauccu

SEQ ID NO: 3572760 - RNA, 20 nt, Human
cugcuucaaggauccugagc

SEQ ID NO: 3572761 - RNA, 23 nt, Human
cugcuucaaggauccugagccag

SEQ ID NO: 3572762 - RNA, 19 nt, Human
cugcuucaaggcuuccacu

SEQ ID NO: 3572763 - RNA, 15 nt, Human
cugcuucagccuccc

SEQ ID NO: 3572764 - RNA, 15 nt, Human
cugcuucaugacauu

SEQ ID NO: 3572765 - RNA, 15 nt, Human
cugcuuccagugagg

SEQ ID NO: 3572766 - RNA, 16 nt, Human
cugcuuccagugaggc

SEQ ID NO: 3572767 - RNA, 18 nt, Human
cugcuuccagugaggcuc

SEQ ID NO: 3572768 - RNA, 20 nt, Human
cugcuuccagugaggcucug

SEQ ID NO: 3572769 - RNA, 14 nt, Human
cugcuuccagugua

SEQ ID NO: 3572770 - RNA, 11 nt, Human
cugcuucccac

SEQ ID NO: 3572771 - RNA, 18 nt, Human
cuggaagugacuuuggcu

SEQ ID NO: 3572772 - RNA, 23 nt, Human
cuggaaguuauuuauuuuuuaau

SEQ ID NO: 3572773 - RNA, 18 nt, Human
cuggaauacaugaaauau

SEQ ID NO: 3572774 - RNA, 20 nt, Human
cuggaaucagcucaggacug

SEQ ID NO: 3572775 - RNA, 21 nt, Human
cuggaaucauuguccagagcu

SEQ ID NO: 3572776 - RNA, 17 nt, Human
cuggaaucuggagacca

SEQ ID NO: 3572777 - RNA, 19 nt, Human
cuggaaucuggagagcuag

SEQ ID NO: 3572778 - RNA, 14 nt, Human
cuggaauguaauca

SEQ ID NO: 3572779 - RNA, 17 nt, Human
cuggaauugccagcuga

SEQ ID NO: 3572780 - RNA, 18 nt, Human
cuggaauugccagcugac

SEQ ID NO: 3572781 - RNA, 23 nt, Human
cuggaauuguggcuauccugauu

SEQ ID NO: 3572782 - RNA, 22 nt, Human
cuggaauuugcaagucauggcu

SEQ ID NO: 3572783 - RNA, 13 nt, Human
cuggacaaagaau

SEQ ID NO: 3572784 - RNA, 23 nt, Human
cuggacaagccaacuuguaaaua

SEQ ID NO: 3572785 - RNA, 21 nt, Human
cuggacagaggggacucuggg

SEQ ID NO: 3572786 - RNA, 13 nt, Human
cuggacagcccca

SEQ ID NO: 3572787 - RNA, 16 nt, Human
cuggacagccccaccc

SEQ ID NO: 3572788 - RNA, 18 nt, Human
cuggacagccccacccug

SEQ ID NO: 3572789 - RNA, 19 nt, Human
cuggacagccccacccugg

SEQ ID NO: 3572790 - RNA, 13 nt, Human
cuggacagcugug

SEQ ID NO: 3572791 - RNA, 14 nt, Human
cuggacagcugugc

SEQ ID NO: 3572792 - RNA, 17 nt, Human
cuggacaggcauguucu

SEQ ID NO: 3572793 - RNA, 14 nt, Human
cuggacaggccagg

SEQ ID NO: 3572794 - RNA, 13 nt, Human
cuggacaggcucu

SEQ ID NO: 3572795 - RNA, 15 nt, Human
cuggacaggcucugc

SEQ ID NO: 3572796 - RNA, 14 nt, Human
cuggacaggucugg

SEQ ID NO: 3572797 - RNA, 18 nt, Human
cuggacaggucugggaga

SEQ ID NO: 3572798 - RNA, 18 nt, Human
cuggacaguaucccacau

SEQ ID NO: 3572799 - RNA, 23 nt, Human
cuggacagucacugccacuuugc

SEQ ID NO: 3572800 - RNA, 19 nt, Human
cuggacagucagcucuuca

SEQ ID NO: 3572801 - RNA, 18 nt, Human
cuggacauaacauuuuca

SEQ ID NO: 3572802 - RNA, 23 nt, Human
cuggacaugaagauucuuuccca

SEQ ID NO: 3572803 - RNA, 15 nt, Human
cuggacaugcugacu

SEQ ID NO: 3572804 - RNA, 18 nt, Human
cuggacauucagaacacc

SEQ ID NO: 3572805 - RNA, 18 nt, Human
cuggacauuugccuugcu

SEQ ID NO: 3572806 - RNA, 15 nt, Human
cuggaccaaagcuga

SEQ ID NO: 3572807 - RNA, 15 nt, Human
cuggaccacugggca

SEQ ID NO: 3572808 - RNA, 17 nt, Human
cuggacccagccaggcc

SEQ ID NO: 3572809 - RNA, 19 nt, Human
cuggacccagccaggccca

SEQ ID NO: 3572810 - RNA, 12 nt, Human
cuggaccccagc

SEQ ID NO: 3572811 - RNA, 17 nt, Human
cuggaccccaucuguga

SEQ ID NO: 3572812 - RNA, 14 nt, Human
cuggacccccagcu

SEQ ID NO: 3572813 - RNA, 23 nt, Human
cuggaccccccuuucacaggcag

SEQ ID NO: 3572814 - RNA, 13 nt, Human
cuggaccccugca

SEQ ID NO: 3572815 - RNA, 14 nt, Human
cuggaccccugcau

SEQ ID NO: 3572816 - RNA, 18 nt, Human
cuggaccccugcauugga

SEQ ID NO: 3572817 - RNA, 23 nt, Human
cuggacccguucaugggggaggg

SEQ ID NO: 3572818 - RNA, 14 nt, Human
cuggacccuguugc

SEQ ID NO: 3572819 - RNA, 17 nt, Human
cuggacccuguugcuaa

SEQ ID NO: 3572820 - RNA, 13 nt, Human
cuggaccucacca

SEQ ID NO: 3572821 - RNA, 20 nt, Human
cuggaccuugaacuggguac

SEQ ID NO: 3572822 - RNA, 21 nt, Human
cuggaccuugaacuggguacu

SEQ ID NO: 3572823 - RNA, 19 nt, Human
cuggacggcauuccugcuu

SEQ ID NO: 3572824 - RNA, 15 nt, Human
cuggacuauagcugu

SEQ ID NO: 3572825 - RNA, 20 nt, Human
cuggacucaggaugcccagg

SEQ ID NO: 3572826 - RNA, 18 nt, Human
cuggacuccagaucugca

SEQ ID NO: 3572827 - RNA, 21 nt, Human
cuggacuccagaucugcaccg

SEQ ID NO: 3572828 - RNA, 23 nt, Human
cuggacuccagaucugcaccgcc

SEQ ID NO: 3572829 - RNA, 13 nt, Human
cuggacuccggcc

SEQ ID NO: 3572830 - RNA, 18 nt, Human
cuggacuccggcccuccu

SEQ ID NO: 3572831 - RNA, 19 nt, Human
cuggacuccucuguccagg

SEQ ID NO: 3572832 - RNA, 23 nt, Human
cuggacucuaaagucuguugauu

SEQ ID NO: 3572833 - RNA, 16 nt, Human
cuggacugacagcaug

SEQ ID NO: 3572834 - RNA, 17 nt, Human
cuggacugacagcaugu

SEQ ID NO: 3572835 - RNA, 21 nt, Human
cuggacugacagcaugugccc

SEQ ID NO: 3572836 - RNA, 21 nt, Human
cuggacugaccugguccacag

SEQ ID NO: 3572837 - RNA, 21 nt, Human
cuggacuggcuagaguccuca

SEQ ID NO: 3572838 - RNA, 21 nt, Human
cuggacugguggccccugccu

SEQ ID NO: 3572839 - RNA, 19 nt, Human
cuggacugugugcucagga

SEQ ID NO: 3572840 - RNA, 23 nt, Human
cuggacuucuaccugcccucaag

SEQ ID NO: 3572841 - RNA, 13 nt, Human
cuggacuuggagg

SEQ ID NO: 3572842 - RNA, 19 nt, Human
cuggacuuggccccugcca

SEQ ID NO: 3572843 - RNA, 13 nt, Human
cuggacuuuccug

SEQ ID NO: 3572844 - RNA, 16 nt, Human
cuggacuuuccugcaa

SEQ ID NO: 3572845 - RNA, 18 nt, Human
cuggagaagcucacccaa

SEQ ID NO: 3572846 - RNA, 20 nt, Human
cuggagaagcucccaggaac

SEQ ID NO: 3572847 - RNA, 22 nt, Human
cuggagaagcucccaggaacaa

SEQ ID NO: 3572848 - RNA, 22 nt, Human
cuggagaagucuuagacuugaa

SEQ ID NO: 3572849 - RNA, 15 nt, Human
cuggagacagcccca

SEQ ID NO: 3572850 - RNA, 19 nt, Human
cuggagacagccccagagc

SEQ ID NO: 3572851 - RNA, 21 nt, Human
cuggagacagccccagagcag

SEQ ID NO: 3572852 - RNA, 22 nt, Human
cuggagacagccccagagcagg

SEQ ID NO: 3572853 - RNA, 23 nt, Human
cuggagacagccccagagcaggg

SEQ ID NO: 3572854 - RNA, 19 nt, Human
cuggagaccaccagggcau

SEQ ID NO: 3572855 - RNA, 17 nt, Human
cuggagaccagggagcc

SEQ ID NO: 3572856 - RNA, 20 nt, Human
cuggagacccaccccaccug

SEQ ID NO: 3572857 - RNA, 21 nt, Human
cuggagacccaccccaccugc

SEQ ID NO: 3572858 - RNA, 19 nt, Human
cuggagaccccaccagccu

SEQ ID NO: 3572859 - RNA, 21 nt, Human
cuggagacguggaaccucugu

SEQ ID NO: 3572860 - RNA, 22 nt, Human
cuggagacugugugugcccucu

SEQ ID NO: 3572861 - RNA, 15 nt, Human
cuggagacuuagggc

SEQ ID NO: 3572862 - RNA, 19 nt, Human
cuggagagccagaaccugg

SEQ ID NO: 3572863 - RNA, 17 nt, Human
cuggagagcccagaguc

SEQ ID NO: 3572864 - RNA, 13 nt, Human
cuggagagcuaga

SEQ ID NO: 3572865 - RNA, 23 nt, Human
cuggagagcuagaaccuggaggg

SEQ ID NO: 3572866 - RNA, 18 nt, Human
cuggagaggagcccugcc

SEQ ID NO: 3572867 - RNA, 21 nt, Human
cuggagaggagcccugccucu

SEQ ID NO: 3572868 - RNA, 23 nt, Human
cuggagaggagcccugccucucc

SEQ ID NO: 3572869 - RNA, 21 nt, Human
cuggagagguuauaggucacu

SEQ ID NO: 3572870 - RNA, 16 nt, Human
cuggagagucucacuc

SEQ ID NO: 3572871 - RNA, 23 nt, Human
cuggagaguucaauggcugcuga

SEQ ID NO: 3572872 - RNA, 22 nt, Human
cuggagauacugguggaaguuc

SEQ ID NO: 3572873 - RNA, 20 nt, Human
cuggagauccuccugcagac

SEQ ID NO: 3572874 - RNA, 19 nt, Human
cuggagcaaucacagauga

SEQ ID NO: 3572875 - RNA, 16 nt, Human
cuggagcacaaagacc

SEQ ID NO: 3572876 - RNA, 22 nt, Human
cuggagcacaaagacccuggcu

SEQ ID NO: 3572877 - RNA, 23 nt, Human
cuggagcacaaagacccuggcuu

SEQ ID NO: 3572878 - RNA, 22 nt, Human
cuggagcacaauaaauggcugu

SEQ ID NO: 3572879 - RNA, 14 nt, Human
cuggagcaccaggc

SEQ ID NO: 3572880 - RNA, 23 nt, Human
cuggagcaccaggcacgaaccca

SEQ ID NO: 3572881 - RNA, 20 nt, Human
cuggagcacugggcucccgg

SEQ ID NO: 3572882 - RNA, 15 nt, Human
cuggagcagaccacc

SEQ ID NO: 3572883 - RNA, 22 nt, Human
cuggagcagaccaccccgccug

SEQ ID NO: 3572884 - RNA, 17 nt, Human
cuggagcaucugacuca

SEQ ID NO: 3572885 - RNA, 23 nt, Human
cuggagcaucugacucacaagaa

SEQ ID NO: 3572886 - RNA, 14 nt, Human
cuggagcauuucuc

SEQ ID NO: 3572887 - RNA, 15 nt, Human
cuggagccaagucca

SEQ ID NO: 3572888 - RNA, 17 nt, Human
cuggagccaaguccaga

SEQ ID NO: 3572889 - RNA, 14 nt, Human
cuggagccaccugu

SEQ ID NO: 3572890 - RNA, 15 nt, Human
cuggagccaccuguc

SEQ ID NO: 3572891 - RNA, 16 nt, Human
cuggagccaccugucc

SEQ ID NO: 3572892 - RNA, 19 nt, Human
cuggagccaccugucccac

SEQ ID NO: 3572893 - RNA, 13 nt, Human
cuggagcccacug

SEQ ID NO: 3572894 - RNA, 12 nt, Human
cuggagcccagg

SEQ ID NO: 3572895 - RNA, 13 nt, Human
cuggagcccaggg

SEQ ID NO: 3572896 - RNA, 14 nt, Human
cuggagcccaggga

SEQ ID NO: 3572897 - RNA, 23 nt, Human
cuggagccccacugcccuucuca

SEQ ID NO: 3572898 - RNA, 12 nt, Human
cuggagccccug

SEQ ID NO: 3572899 - RNA, 16 nt, Human
cuggagccccugggug

SEQ ID NO: 3572900 - RNA, 14 nt, Human
cuggagcccuaacc

SEQ ID NO: 3572901 - RNA, 23 nt, Human
cuggagccuccacugccucugga

SEQ ID NO: 3572902 - RNA, 19 nt, Human
cuggagccugagucagggc

SEQ ID NO: 3572903 - RNA, 12 nt, Human
cuggagccugug

SEQ ID NO: 3572904 - RNA, 22 nt, Human
cuggagccuguguaacagcucc

SEQ ID NO: 3572905 - RNA, 24 nt, Human
cuggagccuguguaacagcuccuu

SEQ ID NO: 3572906 - RNA, 16 nt, Human
cuggagcuagaauuug

SEQ ID NO: 3572907 - RNA, 15 nt, Human
cuggagcuccuggga

SEQ ID NO: 3572908 - RNA, 16 nt, Human
cuggagcucugcccau

SEQ ID NO: 3572909 - RNA, 17 nt, Human
cuggaggaaagggagga

SEQ ID NO: 3572910 - RNA, 20 nt, Human
cuggaggaaagggaggagug

SEQ ID NO: 3572911 - RNA, 15 nt, Human
cuggaggaccugagc

SEQ ID NO: 3572912 - RNA, 21 nt, Human
cuggaggaccugagccugccg

SEQ ID NO: 3572913 - RNA, 21 nt, Human
cuggaggacuagaaccuggag

SEQ ID NO: 3572914 - RNA, 18 nt, Human
cuggcaggcaggcuccca

SEQ ID NO: 3572915 - RNA, 21 nt, Human
cuggcaggcaggggcccugca

SEQ ID NO: 3572916 - RNA, 18 nt, Human
cuggcaggucaaccucgc

SEQ ID NO: 3572917 - RNA, 16 nt, Human
cuggcaguccguggga

SEQ ID NO: 3572918 - RNA, 22 nt, Human
cuggcaucgcaccauucugacu

SEQ ID NO: 3572919 - RNA, 18 nt, Human
cuggcaucugacacaaaa

SEQ ID NO: 3572920 - RNA, 14 nt, Human
cuggcaucuuugcu

SEQ ID NO: 3572921 - RNA, 18 nt, Human
cuggcaugcuaaagccuu

SEQ ID NO: 3572922 - RNA, 19 nt, Human
cuggcauggcaccugucgc

SEQ ID NO: 3572923 - RNA, 16 nt, Human
cuggcaugggaaugaa

SEQ ID NO: 3572924 - RNA, 22 nt, Human
cuggcaugggaaugaaugucag

SEQ ID NO: 3572925 - RNA, 18 nt, Human
cuggcauuagaauuauuu

SEQ ID NO: 3572926 - RNA, 16 nt, Human
cuggcauugucccugu

SEQ ID NO: 3572927 - RNA, 16 nt, Human
cuggccaaauagcaaa

SEQ ID NO: 3572928 - RNA, 18 nt, Human
cuggccaaauagcaaaga

SEQ ID NO: 3572929 - RNA, 13 nt, Human
cuggccaagcuga

SEQ ID NO: 3572930 - RNA, 14 nt, Human
cuggccaagcugag

SEQ ID NO: 3572931 - RNA, 16 nt, Human
cuggccaagcugaggu

SEQ ID NO: 3572932 - RNA, 14 nt, Human
cuggccaccacccc

SEQ ID NO: 3572933 - RNA, 13 nt, Human
cuggccaccaggc

SEQ ID NO: 3572934 - RNA, 15 nt, Human
cuggccaccaggcug

SEQ ID NO: 3572935 - RNA, 18 nt, Human
cuggccaccaggcuggcg

SEQ ID NO: 3572936 - RNA, 20 nt, Human
cuggccaccaggcuggcgca

SEQ ID NO: 3572937 - RNA, 23 nt, Human
cuggccaccaggcuggcgcagcc

SEQ ID NO: 3572938 - RNA, 11 nt, Human
cuggccaccug

SEQ ID NO: 3572939 - RNA, 16 nt, Human
cuggccaccugaggug

SEQ ID NO: 3572940 - RNA, 21 nt, Human
cuggccaccugaggugggccc

SEQ ID NO: 3572941 - RNA, 15 nt, Human
cuggccacgcagcca

SEQ ID NO: 3572942 - RNA, 12 nt, Human
cuggccacugca

SEQ ID NO: 3572943 - RNA, 15 nt, Human
cuggccacugcacag

SEQ ID NO: 3572944 - RNA, 18 nt, Human
cuggccacugcacagagc

SEQ ID NO: 3572945 - RNA, 22 nt, Human
cuggccacugcacagagcucuc

SEQ ID NO: 3572946 - RNA, 17 nt, Human
cuggccacugcucccua

SEQ ID NO: 3572947 - RNA, 15 nt, Human
cuggccagacacagg

SEQ ID NO: 3572948 - RNA, 20 nt, Human
cuggccagaugcaccagccc

SEQ ID NO: 3572949 - RNA, 22 nt, Human
cuggccagaugcaccagcccuu

SEQ ID NO: 3572950 - RNA, 17 nt, Human
cuggccagccccacagc

SEQ ID NO: 3572951 - RNA, 19 nt, Human
cuggccagccccacagccc

SEQ ID NO: 3572952 - RNA, 20 nt, Human
cuggccagccccacagccca

SEQ ID NO: 3572953 - RNA, 14 nt, Human
cuggccagccgcuc

SEQ ID NO: 3572954 - RNA, 12 nt, Human
cuggccagccug

SEQ ID NO: 3572955 - RNA, 23 nt, Human
cuggccagccuggggccuggcag

SEQ ID NO: 3572956 - RNA, 20 nt, Human
cuggccagcgagcgcccagc

SEQ ID NO: 3572957 - RNA, 14 nt, Human
cuggccaggagcag

SEQ ID NO: 3572958 - RNA, 15 nt, Human
cuggccaggagcucu

SEQ ID NO: 3572959 - RNA, 17 nt, Human
cuggccagggccacgcu

SEQ ID NO: 3572960 - RNA, 20 nt, Human
cuggccagggccacgcucca

SEQ ID NO: 3572961 - RNA, 15 nt, Human
cuggccagggccugg

SEQ ID NO: 3572962 - RNA, 18 nt, Human
cuggccaguccacccugc

SEQ ID NO: 3572963 - RNA, 18 nt, Human
cuggccaguccaggcugc

SEQ ID NO: 3572964 - RNA, 21 nt, Human
cuggccaguggcuggaucugu

SEQ ID NO: 3572965 - RNA, 13 nt, Human
cuggccaguguuu

SEQ ID NO: 3572966 - RNA, 20 nt, Human
cuggccaguguuuaaaacuu

SEQ ID NO: 3572967 - RNA, 18 nt, Human
cuggccaucccacaagug

SEQ ID NO: 3572968 - RNA, 23 nt, Human
cuggccaucccucguggucccca

SEQ ID NO: 3572969 - RNA, 19 nt, Human
cuggccauggagaaagcug

SEQ ID NO: 3572970 - RNA, 21 nt, Human
cuggccauggagaaagcugac

SEQ ID NO: 3572971 - RNA, 13 nt, Human
cuggccauggccu

SEQ ID NO: 3572972 - RNA, 13 nt, Human
cuggcccaccagg

SEQ ID NO: 3572973 - RNA, 14 nt, Human
cuggcccaccaggg

SEQ ID NO: 3572974 - RNA, 14 nt, Human
cuggcccaccccac

SEQ ID NO: 3572975 - RNA, 13 nt, Human
cuggcccacugca

SEQ ID NO: 3572976 - RNA, 15 nt, Human
cuggcccacugcauc

SEQ ID NO: 3572977 - RNA, 17 nt, Human
cuggcccagccaaaccc

SEQ ID NO: 3572978 - RNA, 23 nt, Human
cuggcccagccaaacccugucug

SEQ ID NO: 3572979 - RNA, 16 nt, Human
cuggcccagcccugcu

SEQ ID NO: 3572980 - RNA, 18 nt, Human
cuggcccagccggccucu

SEQ ID NO: 3572981 - RNA, 22 nt, Human
cuggcccagccggccucucugg

SEQ ID NO: 3572982 - RNA, 13 nt, Human
cuggcccagccuu

SEQ ID NO: 3572983 - RNA, 19 nt, Human
cuggcccagcggccccucc

SEQ ID NO: 3572984 - RNA, 12 nt, Human
cuggcccagcuc

SEQ ID NO: 3572985 - RNA, 13 nt, Human
cuggcccagcucc

SEQ ID NO: 3572986 - RNA, 14 nt, Human
cuggcccagcuccc

SEQ ID NO: 3572987 - RNA, 12 nt, Human
cuggcccagggc

SEQ ID NO: 3572988 - RNA, 18 nt, Human
cuggcccagggcaucugg

SEQ ID NO: 3572989 - RNA, 15 nt, Human
cuggcccagggccca

SEQ ID NO: 3572990 - RNA, 16 nt, Human
cuggcccagggcccag

SEQ ID NO: 3572991 - RNA, 17 nt, Human
cuggcccagggcccaga

SEQ ID NO: 3572992 - RNA, 18 nt, Human
cuggcccagggcccagag

SEQ ID NO: 3572993 - RNA, 23 nt, Human
cuggcccagggcccagagcccag

SEQ ID NO: 3572994 - RNA, 23 nt, Human
cuggcccauagaaacaugacacu

SEQ ID NO: 3572995 - RNA, 13 nt, Human
cuggcccaucagg

SEQ ID NO: 3572996 - RNA, 14 nt, Human
cuggccccagcccu

SEQ ID NO: 3572997 - RNA, 13 nt, Human
cuggccccaggac

SEQ ID NO: 3572998 - RNA, 21 nt, Human
cuggccccaugucucucagaa

SEQ ID NO: 3572999 - RNA, 17 nt, Human
cuggcccccaaccucag

SEQ ID NO: 3573000 - RNA, 18 nt, Human
cuggcccccaaccucagg

SEQ ID NO: 3573001 - RNA, 14 nt, Human
cuggcccccacaug

SEQ ID NO: 3573002 - RNA, 15 nt, Human
cuggcccccacaugg

SEQ ID NO: 3573003 - RNA, 15 nt, Human
cuggcccccacuggc

SEQ ID NO: 3573004 - RNA, 22 nt, Human
cuggcccccacuggcugugggc

SEQ ID NO: 3573005 - RNA, 22 nt, Human
cuggccccccugguccccuccu

SEQ ID NO: 3573006 - RNA, 12 nt, Human
cuggccccgccg

SEQ ID NO: 3573007 - RNA, 20 nt, Human
cuggccccggaucagagcag

SEQ ID NO: 3573008 - RNA, 24 nt, Human
cuggccccggaucagagcaggacc

SEQ ID NO: 3573009 - RNA, 18 nt, Human
cuggccccuagaaucagc

SEQ ID NO: 3573010 - RNA, 12 nt, Human
cuggccccucac

SEQ ID NO: 3573011 - RNA, 21 nt, Human
cuggccccucagggucccugg

SEQ ID NO: 3573012 - RNA, 15 nt, Human
cuggccccucgccug

SEQ ID NO: 3573013 - RNA, 14 nt, Human
cuggccccucuccc

SEQ ID NO: 3573014 - RNA, 13 nt, Human
cuggccccugggu

SEQ ID NO: 3573015 - RNA, 14 nt, Human
cuggccccuggguc

SEQ ID NO: 3573016 - RNA, 21 nt, Human
cuggcccgucauguuccucaa

SEQ ID NO: 3573017 - RNA, 22 nt, Human
cuggcccgucauguuccucaaa

SEQ ID NO: 3573018 - RNA, 15 nt, Human
cuggcccgugacaga

SEQ ID NO: 3573019 - RNA, 23 nt, Human
cuggcccgugacagacuccugag

SEQ ID NO: 3573020 - RNA, 14 nt, Human
cuggcccuauuuag

SEQ ID NO: 3573021 - RNA, 17 nt, Human
cuggcccucaaggccuc

SEQ ID NO: 3573022 - RNA, 23 nt, Human
cuggcccucaccccugcccuggg

SEQ ID NO: 3573023 - RNA, 15 nt, Human
cuggcccucucugaa

SEQ ID NO: 3573024 - RNA, 16 nt, Human
cuggcccucucugaag

SEQ ID NO: 3573025 - RNA, 21 nt, Human
cuggcccucucugaaggaggc

SEQ ID NO: 3573026 - RNA, 13 nt, Human
cuggcccucugug

SEQ ID NO: 3573027 - RNA, 13 nt, Human
cuggcccucuucu

SEQ ID NO: 3573028 - RNA, 11 nt, Human
cuggcccugcc

SEQ ID NO: 3573029 - RNA, 14 nt, Human
cuggcccugcccug

SEQ ID NO: 3573030 - RNA, 15 nt, Human
cuggcccugcccuga

SEQ ID NO: 3573031 - RNA, 12 nt, Human
cuggcccugccu

SEQ ID NO: 3573032 - RNA, 22 nt, Human
cuggcccugcuuccugcuugcc

SEQ ID NO: 3573033 - RNA, 14 nt, Human
cuggcccuggggcc

SEQ ID NO: 3573034 - RNA, 17 nt, Human
cuggcccuggggccugu

SEQ ID NO: 3573035 - RNA, 19 nt, Human
cuggcccuggggccuguac

SEQ ID NO: 3573036 - RNA, 19 nt, Human
cuggccgaggguccuggcu

SEQ ID NO: 3573037 - RNA, 16 nt, Human
cuggccgaguccaagc

SEQ ID NO: 3573038 - RNA, 18 nt, Human
cuggccgaguccaagcug

SEQ ID NO: 3573039 - RNA, 20 nt, Human
cuggccgcgcuccgggcuuu

SEQ ID NO: 3573040 - RNA, 18 nt, Human
cuggccggcaaccccagu

SEQ ID NO: 3573041 - RNA, 13 nt, Human
cuggccgggaccc

SEQ ID NO: 3573042 - RNA, 16 nt, Human
cuggccgggagccuga

SEQ ID NO: 3573043 - RNA, 14 nt, Human
cuggccgggcacag

SEQ ID NO: 3573044 - RNA, 16 nt, Human
cuggccggucugcaag

SEQ ID NO: 3573045 - RNA, 17 nt, Human
cuggccggucugcaagu

SEQ ID NO: 3573046 - RNA, 21 nt, Human
cuggccggucugcaagucaga

SEQ ID NO: 3573047 - RNA, 19 nt, Human
cuggccgucacuugugggg

SEQ ID NO: 3573048 - RNA, 20 nt, Human
cuggccuagaccagcagaca

SEQ ID NO: 3573049 - RNA, 12 nt, Human
cuggccuagucc

SEQ ID NO: 3573050 - RNA, 23 nt, Human
cuggccuagucccuuccacaccc

SEQ ID NO: 3573051 - RNA, 19 nt, Human
cuggccuauccgcugccag

SEQ ID NO: 3573052 - RNA, 22 nt, Human
cuggccucaagugauucuccug

SEQ ID NO: 3573053 - RNA, 20 nt, Human
cuggccuccaggcccgucug

SEQ ID NO: 3573054 - RNA, 16 nt, Human
cuggccuccccugcca

SEQ ID NO: 3573055 - RNA, 17 nt, Human
cuggccuccccugccac

SEQ ID NO: 3573056 - RNA, 21 nt, Human
cuggccuccccugccaccagg

SEQ ID NO: 3573057 - RNA, 20 nt, Human
cuggccuccggcgucagccu

SEQ ID NO: 3573058 - RNA, 16 nt, Human
cuggccuccugccucu

SEQ ID NO: 3573059 - RNA, 12 nt, Human
cuuaagagaaau

SEQ ID NO: 3573060 - RNA, 13 nt, Human
cuuaagagaauau

SEQ ID NO: 3573061 - RNA, 14 nt, Human
cuuaagagaauauu

SEQ ID NO: 3573062 - RNA, 17 nt, Human
cuuaagagaugccucau

SEQ ID NO: 3573063 - RNA, 14 nt, Human
cuuaagcaaaagaa

SEQ ID NO: 3573064 - RNA, 17 nt, Human
cuuaagcaaaagaaaaa

SEQ ID NO: 3573065 - RNA, 12 nt, Human
cuuaagcaaagg

SEQ ID NO: 3573066 - RNA, 19 nt, Human
cuuaagccacugccucucc

SEQ ID NO: 3573067 - RNA, 20 nt, Human
cuuaagccacugccucuccc

SEQ ID NO: 3573068 - RNA, 22 nt, Human
cuuaagccaucuugguaaauuu

SEQ ID NO: 3573069 - RNA, 23 nt, Human
cuuaagccaucuugguaaauuuc

SEQ ID NO: 3573070 - RNA, 19 nt, Human
cuuaagcccagugcacuga

SEQ ID NO: 3573071 - RNA, 22 nt, Human
cuuaagcccagugcacugaaag

SEQ ID NO: 3573072 - RNA, 16 nt, Human
cuuaagcccuggcccc

SEQ ID NO: 3573073 - RNA, 22 nt, Human
cuuaagcuuuggacccaaggaa

SEQ ID NO: 3573074 - RNA, 20 nt, Human
cuuaaggacaaaaaugaacu

SEQ ID NO: 3573075 - RNA, 23 nt, Human
cuuaaggacaaagugccaaagaa

SEQ ID NO: 3573076 - RNA, 21 nt, Human
cuuaaggauggagccagcucu

SEQ ID NO: 3573077 - RNA, 20 nt, Human
cuuaaggauugugauauuuu

SEQ ID NO: 3573078 - RNA, 16 nt, Human
cuuaaggcacucuguu

SEQ ID NO: 3573079 - RNA, 20 nt, Human
cuuaagggguaucauguaug

SEQ ID NO: 3573080 - RNA, 15 nt, Human
cuuaaggugaggccu

SEQ ID NO: 3573081 - RNA, 14 nt, Human
cuuaagguguagcc

SEQ ID NO: 3573082 - RNA, 21 nt, Human
cuuaagguguagccacaccag

SEQ ID NO: 3573083 - RNA, 20 nt, Human
cuuaaguauaucauguaaag

SEQ ID NO: 3573084 - RNA, 17 nt, Human
cuuaagucagaacagca

SEQ ID NO: 3573085 - RNA, 19 nt, Human
cuuaagugaggaaaucaaa

SEQ ID NO: 3573086 - RNA, 20 nt, Human
cuuaagugaggaaaucaaag

SEQ ID NO: 3573087 - RNA, 20 nt, Human
cuuaaguuagccuccaccac

SEQ ID NO: 3573088 - RNA, 16 nt, Human
cuuaaguuuauacucu

SEQ ID NO: 3573089 - RNA, 15 nt, Human
cuuaaguuucucagc

SEQ ID NO: 3573090 - RNA, 20 nt, Human
cuuaaguuucucagcuccca

SEQ ID NO: 3573091 - RNA, 20 nt, Human
cuuaauaaaaacuuacacuc

SEQ ID NO: 3573092 - RNA, 16 nt, Human
cuuaauaaaaaugaca

SEQ ID NO: 3573093 - RNA, 20 nt, Human
cuuaauaaauuguguuuccu

SEQ ID NO: 3573094 - RNA, 20 nt, Human
cuuaauaaucaagagccuua

SEQ ID NO: 3573095 - RNA, 17 nt, Human
cuuaauacacacaguua

SEQ ID NO: 3573096 - RNA, 16 nt, Human
cuuaauacuaccuuga

SEQ ID NO: 3573097 - RNA, 16 nt, Human
cuuaauaguauuuaug

SEQ ID NO: 3573098 - RNA, 13 nt, Human
cuuaauauaaauu

SEQ ID NO: 3573099 - RNA, 14 nt, Human
cuuaauauaaauuc

SEQ ID NO: 3573100 - RNA, 21 nt, Human
cuuaauauaaauucacuuuca

SEQ ID NO: 3573101 - RNA, 19 nt, Human
cuuaauauauagcauuuau

SEQ ID NO: 3573102 - RNA, 19 nt, Human
cuuaauauauauauccaga

SEQ ID NO: 3573103 - RNA, 14 nt, Human
cuuaauauauuuga

SEQ ID NO: 3573104 - RNA, 23 nt, Human
cuuaauaugcugcaacaaaaugu

SEQ ID NO: 3573105 - RNA, 14 nt, Human
cuuaauauguuaac

SEQ ID NO: 3573106 - RNA, 14 nt, Human
cuuaauauucugga

SEQ ID NO: 3573107 - RNA, 14 nt, Human
cuuaauauuuuuac

SEQ ID NO: 3573108 - RNA, 12 nt, Human
cuuaaucauuuu

SEQ ID NO: 3573109 - RNA, 14 nt, Human
cuuaaucauuuuca

SEQ ID NO: 3573110 - RNA, 19 nt, Human
cuuaaucuuuucacaaaua

SEQ ID NO: 3573111 - RNA, 12 nt, Human
cuuaaugaaguu

SEQ ID NO: 3573112 - RNA, 17 nt, Human
cuuaaugaaguuugaau

SEQ ID NO: 3573113 - RNA, 21 nt, Human
cuuaaugaaguuugaauguua

SEQ ID NO: 3573114 - RNA, 22 nt, Human
cuuaaugaaguuugaauguuaa

SEQ ID NO: 3573115 - RNA, 23 nt, Human
cuuaaugagacuuuaaaagcauu

SEQ ID NO: 3573116 - RNA, 20 nt, Human
cuuaaugagcaauaucugcu

SEQ ID NO: 3573117 - RNA, 19 nt, Human
cuuaauggaagguuggauc

SEQ ID NO: 3573118 - RNA, 19 nt, Human
cuuaauggaugaaaucaua

SEQ ID NO: 3573119 - RNA, 18 nt, Human
cuuaauguaucaaacugu

SEQ ID NO: 3573120 - RNA, 20 nt, Human
cuuaaugugauuacugcucu

SEQ ID NO: 3573121 - RNA, 20 nt, Human
cuuaauguucugaauaauuu

SEQ ID NO: 3573122 - RNA, 22 nt, Human
cuuaauguucugaauaauuucu

SEQ ID NO: 3573123 - RNA, 12 nt, Human
cuuaauguuuau

SEQ ID NO: 3573124 - RNA, 16 nt, Human
cuuaauguuuauuccu

SEQ ID NO: 3573125 - RNA, 16 nt, Human
cuuaauuaaaagaaua

SEQ ID NO: 3573126 - RNA, 21 nt, Human
cuuaauuaaguaaacuaauga

SEQ ID NO: 3573127 - RNA, 14 nt, Human
cuuaauuacuuaaa

SEQ ID NO: 3573128 - RNA, 10 nt, Human
cuuaauuauu

SEQ ID NO: 3573129 - RNA, 11 nt, Human
cuuaauuauua

SEQ ID NO: 3573130 - RNA, 17 nt, Human
cuuaauuauuauaaaaa

SEQ ID NO: 3573131 - RNA, 12 nt, Human
cuuaauucuguu

SEQ ID NO: 3573132 - RNA, 18 nt, Human
cuuaauugaugcaaauaa

SEQ ID NO: 3573133 - RNA, 16 nt, Human
cuuaauugccaccucu

SEQ ID NO: 3573134 - RNA, 23 nt, Human
cuuaauuguucauuuugagcuga

SEQ ID NO: 3573135 - RNA, 14 nt, Human
cuuaauuuccuuuu

SEQ ID NO: 3573136 - RNA, 22 nt, Human
cuuaauuuccuuuuugacacug

SEQ ID NO: 3573137 - RNA, 13 nt, Human
cuuaauuuggaaa

SEQ ID NO: 3573138 - RNA, 19 nt, Human
cuuaauuuggaaacuaaua

SEQ ID NO: 3573139 - RNA, 23 nt, Human
cuuaauuuggaaacuaauaaaau

SEQ ID NO: 3573140 - RNA, 14 nt, Human
cuuaauuuucagua

SEQ ID NO: 3573141 - RNA, 16 nt, Human
cuuaauuuugguugua

SEQ ID NO: 3573142 - RNA, 19 nt, Human
cuuaauuuugguuguauuc

SEQ ID NO: 3573143 - RNA, 20 nt, Human
cuuaauuuugguuguauucu

SEQ ID NO: 3573144 - RNA, 21 nt, Human
cuuaauuuugguuguauucuu

SEQ ID NO: 3573145 - RNA, 20 nt, Human
cuuaauuuuuuuuucauaga

SEQ ID NO: 3573146 - RNA, 16 nt, Human
cuuacaaaugauugcu

SEQ ID NO: 3573147 - RNA, 21 nt, Human
cuuacaaaugauugcuuuuaa

SEQ ID NO: 3573148 - RNA, 17 nt, Human
cuuacaagccagcugga

SEQ ID NO: 3573149 - RNA, 18 nt, Human
cuuacaagccuaagaauc

SEQ ID NO: 3573150 - RNA, 15 nt, Human
cuuacaauauugauu

SEQ ID NO: 3573151 - RNA, 17 nt, Human
cuuacaaucgcaaauca

SEQ ID NO: 3573152 - RNA, 20 nt, Human
cuuacaauuuuuuuaauuuu

SEQ ID NO: 3573153 - RNA, 21 nt, Human
cuuacaauuuuuuuaauuuug

SEQ ID NO: 3573154 - RNA, 18 nt, Human
cuuacacaaaggggauca

SEQ ID NO: 3573155 - RNA, 21 nt, Human
cuuacacaaaucuauuuaauu

SEQ ID NO: 3573156 - RNA, 13 nt, Human
cuuacacacaaaa

SEQ ID NO: 3573157 - RNA, 17 nt, Human
cuuacacauacaguuuu

SEQ ID NO: 3573158 - RNA, 19 nt, Human
cuuacacaucucagacccu

SEQ ID NO: 3573159 - RNA, 18 nt, Human
cuuacacaucuuccacag

SEQ ID NO: 3573160 - RNA, 23 nt, Human
cuuacacugccuguauacuuuag

SEQ ID NO: 3573161 - RNA, 23 nt, Human
cuuacagauaggccuucuuguga

SEQ ID NO: 3573162 - RNA, 23 nt, Human
cuuacagcauaagggagcguaga

SEQ ID NO: 3573163 - RNA, 22 nt, Human
cuuacagcuggguggcacugcc

SEQ ID NO: 3573164 - RNA, 23 nt, Human
cuuacagcuggguggcacugcca

SEQ ID NO: 3573165 - RNA, 22 nt, Human
cuuacauaguuuuaaacucauu

SEQ ID NO: 3573166 - RNA, 18 nt, Human
cuuacaugcauuacugca

SEQ ID NO: 3573167 - RNA, 20 nt, Human
cuuacauuagcaguuugcuu

SEQ ID NO: 3573168 - RNA, 12 nt, Human
cuuacauucucu

SEQ ID NO: 3573169 - RNA, 22 nt, Human
cuuacauuuacaaacugaagag

SEQ ID NO: 3573170 - RNA, 12 nt, Human
cuuacauuuccu

SEQ ID NO: 3573171 - RNA, 13 nt, Human
cuuacauuuccug

SEQ ID NO: 3573172 - RNA, 17 nt, Human
cuuacauuuuuacaaua

SEQ ID NO: 3573173 - RNA, 16 nt, Human
cuuaccaacuuucugu

SEQ ID NO: 3573174 - RNA, 21 nt, Human
cuuaccagauaaugcuacuuu

SEQ ID NO: 3573175 - RNA, 16 nt, Human
cuuaccagcagagcac

SEQ ID NO: 3573176 - RNA, 13 nt, Human
cuuaccaggaagc

SEQ ID NO: 3573177 - RNA, 20 nt, Human
cuuaccaggcaccaaaagaa

SEQ ID NO: 3573178 - RNA, 15 nt, Human
cuuaccauaugugcu

SEQ ID NO: 3573179 - RNA, 23 nt, Human
cuuaccauuugcuacuguacaua

SEQ ID NO: 3573180 - RNA, 22 nt, Human
cuuacccaaacuguucaagaaa

SEQ ID NO: 3573181 - RNA, 16 nt, Human
cuuacccaauuuccca

SEQ ID NO: 3573182 - RNA, 22 nt, Human
cuuaccccuggcuguuuggacu

SEQ ID NO: 3573183 - RNA, 17 nt, Human
cuuacccucauguucuu

SEQ ID NO: 3573184 - RNA, 13 nt, Human
cuuacccuuagaa

SEQ ID NO: 3573185 - RNA, 13 nt, Human
cuuacccuucugu

SEQ ID NO: 3573186 - RNA, 17 nt, Human
cuuacccuucugugccc

SEQ ID NO: 3573187 - RNA, 14 nt, Human
cuuaccgacaagca

SEQ ID NO: 3573188 - RNA, 20 nt, Human
cuuaccgugagcgacaaaga

SEQ ID NO: 3573189 - RNA, 18 nt, Human
cuuaccuaaacagauaua

SEQ ID NO: 3573190 - RNA, 18 nt, Human
cuuaccuagugaaacuuu

SEQ ID NO: 3573191 - RNA, 14 nt, Human
cuuaccuccugccc

SEQ ID NO: 3573192 - RNA, 18 nt, Human
cuuaccuccugcccagga

SEQ ID NO: 3573193 - RNA, 19 nt, Human
cuuaccuccugcccaggag

SEQ ID NO: 3573194 - RNA, 21 nt, Human
cuuaccucggugccuuccucu

SEQ ID NO: 3573195 - RNA, 13 nt, Human
cuuaccugacaca

SEQ ID NO: 3573196 - RNA, 20 nt, Human
cuuaccugaccucuugcugu

SEQ ID NO: 3573197 - RNA, 21 nt, Human
cuuaccuggcccaucagggua

SEQ ID NO: 3573198 - RNA, 19 nt, Human
cuuaccugggcauucuugu

SEQ ID NO: 3573199 - RNA, 15 nt, Human
cuuaccuguacacug

SEQ ID NO: 3573200 - RNA, 17 nt, Human
cuuaccuguacacugac

SEQ ID NO: 3573201 - RNA, 15 nt, Human
cuuaccuucaauaaa

SEQ ID NO: 3573202 - RNA, 16 nt, Human
cuuaccuucaauaaag

SEQ ID NO: 3573203 - RNA, 14 nt, Human
cuuauaauuuaaaa

SEQ ID NO: 3573204 - RNA, 14 nt, Human
cuuauacccaugaa

SEQ ID NO: 3573205 - RNA, 16 nt, Human
cuuauacgaaauaauu

SEQ ID NO: 3573206 - RNA, 21 nt, Human
cuuauacgaaauaauuguugu

SEQ ID NO: 3573207 - RNA, 15 nt, Human
cuuauacuguacaau

SEQ ID NO: 3573208 - RNA, 16 nt, Human
cuuauacuguacaaua

SEQ ID NO: 3573209 - RNA, 15 nt, Human
cuuauagaauauuua

SEQ ID NO: 3573210 - RNA, 20 nt, Human
cuuauagaauauuuauuacc

SEQ ID NO: 3573211 - RNA, 17 nt, Human
cuuauaguacaugauaa

SEQ ID NO: 3573212 - RNA, 21 nt, Human
cuuauaguuacuguguaauua

SEQ ID NO: 3573213 - RNA, 16 nt, Human
cuuauaguucuaggca

SEQ ID NO: 3573214 - RNA, 17 nt, Human
cuuauaguuugggcuuc

SEQ ID NO: 3573215 - RNA, 19 nt, Human
cuuauauagcagcaaaaau

SEQ ID NO: 3573216 - RNA, 18 nt, Human
cuuauauaguuuacuauu

SEQ ID NO: 3573217 - RNA, 19 nt, Human
cuuauauaguuuacuauuu

SEQ ID NO: 3573218 - RNA, 17 nt, Human
cuuauauaugcacuuaa

SEQ ID NO: 3573219 - RNA, 22 nt, Human
cuuauauaugcacuuaauuugu

SEQ ID NO: 3573220 - RNA, 17 nt, Human
cuuauaucuauauuuua

SEQ ID NO: 3573221 - RNA, 21 nt, Human
cuuauauuaauaguaauuugu

SEQ ID NO: 3573222 - RNA, 21 nt, Human
cuuauauuaauauuccucagu

SEQ ID NO: 3573223 - RNA, 23 nt, Human
cuuauauugaagacaauuugaua

SEQ ID NO: 3573224 - RNA, 17 nt, Human
cuuauauuguaagaaau

SEQ ID NO: 3573225 - RNA, 16 nt, Human
cuuauauuguucacuu

SEQ ID NO: 3573226 - RNA, 23 nt, Human
cuuauauuucccuaaaauacauu

SEQ ID NO: 3573227 - RNA, 19 nt, Human
cuuauauuuucguaugaaa

SEQ ID NO: 3573228 - RNA, 21 nt, Human
cuuauauuuucguaugaaaau

SEQ ID NO: 3573229 - RNA, 19 nt, Human
cuuaucaaaguagcaaaug

SEQ ID NO: 3573230 - RNA, 11 nt, Human
cuuaucaagug

SEQ ID NO: 3573231 - RNA, 22 nt, Human
cuuaucaauuugucauuuugaa

SEQ ID NO: 3573232 - RNA, 23 nt, Human
cuuaucacaaaaaagaaaaugaa

SEQ ID NO: 3573233 - RNA, 23 nt, Human
cuuaucaccacaguaaguuccua

SEQ ID NO: 3573234 - RNA, 19 nt, Human
cuuaucaccagcugccucu

SEQ ID NO: 3573235 - RNA, 22 nt, Human
cuuaucaccagcugccucuucu

SEQ ID NO: 3573236 - RNA, 15 nt, Human
cuuauccaggacucu

SEQ ID NO: 3573237 - RNA, 12 nt, Human
cuuaucccucuc

SEQ ID NO: 3573238 - RNA, 16 nt, Human
cuuaucccuucuuuuu

SEQ ID NO: 3573239 - RNA, 17 nt, Human
cuuaucccuucuuuuuc

SEQ ID NO: 3573240 - RNA, 17 nt, Human
cuuauccucccuguaac

SEQ ID NO: 3573241 - RNA, 18 nt, Human
cuuauccucccuguaacu

SEQ ID NO: 3573242 - RNA, 18 nt, Human
cuuauccucugaucucca

SEQ ID NO: 3573243 - RNA, 22 nt, Human
cuuauccucugaucuccauggc

SEQ ID NO: 3573244 - RNA, 13 nt, Human
cuuauccugcauu

SEQ ID NO: 3573245 - RNA, 14 nt, Human
cuuauccugcauug

SEQ ID NO: 3573246 - RNA, 19 nt, Human
cuuauccuucaucuuuuaa

SEQ ID NO: 3573247 - RNA, 18 nt, Human
cuuauccuuccucuccuu

SEQ ID NO: 3573248 - RNA, 16 nt, Human
cuuaucgggcuccagc

SEQ ID NO: 3573249 - RNA, 20 nt, Human
cuuaucuagcugcauaucuu

SEQ ID NO: 3573250 - RNA, 19 nt, Human
cuuaucucagauauuugca

SEQ ID NO: 3573251 - RNA, 13 nt, Human
cuuaucuccaaga

SEQ ID NO: 3573252 - RNA, 14 nt, Human
cuuaucuccaagac

SEQ ID NO: 3573253 - RNA, 18 nt, Human
cuuaucuccacaaccucu

SEQ ID NO: 3573254 - RNA, 21 nt, Human
cuuaucucuuuuauauuugua

SEQ ID NO: 3573255 - RNA, 22 nt, Human
cuuaucugagcugagccaggcu

SEQ ID NO: 3573256 - RNA, 22 nt, Human
cuuaucugaucagaacaaaugu

SEQ ID NO: 3573257 - RNA, 17 nt, Human
cuuaucugugcgugaaa

SEQ ID NO: 3573258 - RNA, 21 nt, Human
cuuaucugugcgugaaacaca

SEQ ID NO: 3573259 - RNA, 16 nt, Human
cuuaucuuacaaagug

SEQ ID NO: 3573260 - RNA, 17 nt, Human
cuuaucuuacaaagugu

SEQ ID NO: 3573261 - RNA, 14 nt, Human
cuuaucuuaugcca

SEQ ID NO: 3573262 - RNA, 12 nt, Human
cuuaugaauguu

SEQ ID NO: 3573263 - RNA, 14 nt, Human
cuuaugaauguuuc

SEQ ID NO: 3573264 - RNA, 17 nt, Human
cuuaugaauguuuccgg

SEQ ID NO: 3573265 - RNA, 21 nt, Human
cuuaugacaucacuuguacaa

SEQ ID NO: 3573266 - RNA, 13 nt, Human
cuuaugagaaacu

SEQ ID NO: 3573267 - RNA, 13 nt, Human
cuuaugagauggg

SEQ ID NO: 3573268 - RNA, 20 nt, Human
cuuaugaggguccucuacuu

SEQ ID NO: 3573269 - RNA, 15 nt, Human
cuuaugauugcagau

SEQ ID NO: 3573270 - RNA, 15 nt, Human
cuuaugcaaaaugga

SEQ ID NO: 3573271 - RNA, 16 nt, Human
cuuaugcaaaauggaa

SEQ ID NO: 3573272 - RNA, 23 nt, Human
cuuaugccacccccgcuggagga

SEQ ID NO: 3573273 - RNA, 22 nt, Human
cuuaugccacgggaaguuuaga

SEQ ID NO: 3573274 - RNA, 21 nt, Human
cuuaugccauguuaauuucau

SEQ ID NO: 3573275 - RNA, 18 nt, Human
cuuaugcgguuaauuuug

SEQ ID NO: 3573276 - RNA, 19 nt, Human
cuuaugcucuuaauugcca

SEQ ID NO: 3573277 - RNA, 14 nt, Human
cuuaugcuuaaauu

SEQ ID NO: 3573278 - RNA, 14 nt, Human
cuuaugcuuccaga

SEQ ID NO: 3573279 - RNA, 15 nt, Human
cuuaugcuuccagaa

SEQ ID NO: 3573280 - RNA, 16 nt, Human
cuuaugcuuccagaaa

SEQ ID NO: 3573281 - RNA, 17 nt, Human
cuuauggaacacucuga

SEQ ID NO: 3573282 - RNA, 16 nt, Human
cuuauggaauugauuu

SEQ ID NO: 3573283 - RNA, 23 nt, Human
cuuauggaauugauuugcauuga

SEQ ID NO: 3573284 - RNA, 14 nt, Human
cuuauggauguccc

SEQ ID NO: 3573285 - RNA, 21 nt, Human
cuuauggauguccccagcaga

SEQ ID NO: 3573286 - RNA, 21 nt, Human
cuuaugggcuggguucuaccc

SEQ ID NO: 3573287 - RNA, 23 nt, Human
cuuaugggcuggguucuacccag

SEQ ID NO: 3573288 - RNA, 19 nt, Human
cuuaugguaccagaugcag

SEQ ID NO: 3573289 - RNA, 16 nt, Human
cuuauguagauauuug

SEQ ID NO: 3573290 - RNA, 23 nt, Human
cuuaugugacauuaacaaauaaa

SEQ ID NO: 3573291 - RNA, 18 nt, Human
cuuauguugaaaaaauuu

SEQ ID NO: 3573292 - RNA, 18 nt, Human
cuuauuaaaacacuucau

SEQ ID NO: 3573293 - RNA, 18 nt, Human
cuuauuaaaguucuguaa

SEQ ID NO: 3573294 - RNA, 14 nt, Human
cuuauuaaaguuuc

SEQ ID NO: 3573295 - RNA, 15 nt, Human
cuuauuaaaguuuca

SEQ ID NO: 3573296 - RNA, 19 nt, Human
cuuauuaaaguuucaaaaa

SEQ ID NO: 3573297 - RNA, 23 nt, Human
cuuauuaaaguuucaaaaaucug

SEQ ID NO: 3573298 - RNA, 15 nt, Human
cuuauuaaugcuaag

SEQ ID NO: 3573299 - RNA, 16 nt, Human
cuuauuaaugcuaagg

SEQ ID NO: 3573300 - RNA, 15 nt, Human
cuuauuauugaagga

SEQ ID NO: 3573301 - RNA, 14 nt, Human
cuuauuauuuuuga

SEQ ID NO: 3573302 - RNA, 16 nt, Human
cuuauuauuuuugaga

SEQ ID NO: 3573303 - RNA, 16 nt, Human
cuuauucaaagagaaa

SEQ ID NO: 3573304 - RNA, 16 nt, Human
cuuauucauuuucucu

SEQ ID NO: 3573305 - RNA, 18 nt, Human
cuuauucauuuucucuaa

SEQ ID NO: 3573306 - RNA, 19 nt, Human
cuuauuccaugacugcuug

SEQ ID NO: 3573307 - RNA, 14 nt, Human
cuuauucccuuccu

SEQ ID NO: 3573308 - RNA, 14 nt, Human
cuuauucuguagau

SEQ ID NO: 3573309 - RNA, 12 nt, Human
cuuauugcaaaa

SEQ ID NO: 3573310 - RNA, 12 nt, Human
cuuauugcccac

SEQ ID NO: 3573311 - RNA, 18 nt, Human
cuuauuguaaauuuuaga

SEQ ID NO: 3573312 - RNA, 14 nt, Human
cuuauuguaccucu

SEQ ID NO: 3573313 - RNA, 20 nt, Human
cuuauuguagcauccuggaa

SEQ ID NO: 3573314 - RNA, 13 nt, Human
cuuauuguuccaa

SEQ ID NO: 3573315 - RNA, 14 nt, Human
cuuauuguuccaag

SEQ ID NO: 3573316 - RNA, 22 nt, Human
cuuauuguuccaagacauuguc

SEQ ID NO: 3573317 - RNA, 13 nt, Human
cuuauuuaaauag

SEQ ID NO: 3573318 - RNA, 15 nt, Human
cuuauuuaaucuuuu

SEQ ID NO: 3573319 - RNA, 18 nt, Human
cuuauuuaaugaaagacu

SEQ ID NO: 3573320 - RNA, 23 nt, Human
cuuauuuagauucacuuaacaaa

SEQ ID NO: 3573321 - RNA, 22 nt, Human
cuuauuuaugaaaguauuaaaa

SEQ ID NO: 3573322 - RNA, 16 nt, Human
cuuauuuauuguauuc

SEQ ID NO: 3573323 - RNA, 15 nt, Human
cuuauuucauuucuu

SEQ ID NO: 3573324 - RNA, 12 nt, Human
cuuauuugagug

SEQ ID NO: 3573325 - RNA, 17 nt, Human
cuuauuugcuucauugu

SEQ ID NO: 3573326 - RNA, 16 nt, Human
cuuauuuuaaugugau

SEQ ID NO: 3573327 - RNA, 17 nt, Human
cuuauuuuaaugugaug

SEQ ID NO: 3573328 - RNA, 14 nt, Human
cuuauuuucucugu

SEQ ID NO: 3573329 - RNA, 15 nt, Human
cuuauuuucucugug

SEQ ID NO: 3573330 - RNA, 14 nt, Human
cuuauuuuuuccca

SEQ ID NO: 3573331 - RNA, 16 nt, Human
cuuauuuuuuucugau

SEQ ID NO: 3573332 - RNA, 17 nt, Human
cuuauuuuuuucugauu

SEQ ID NO: 3573333 - RNA, 19 nt, Human
cuuauuuuuuucugauugu

SEQ ID NO: 3573334 - RNA, 15 nt, Human
cuucaaaaguaaugc

SEQ ID NO: 3573335 - RNA, 17 nt, Human
cuucaaaaguaaugccu

SEQ ID NO: 3573336 - RNA, 21 nt, Human
cuucaaaaguuuguuugcuua

SEQ ID NO: 3573337 - RNA, 14 nt, Human
cuucaaaauauuga

SEQ ID NO: 3573338 - RNA, 11 nt, Human
cuucaaacuac

SEQ ID NO: 3573339 - RNA, 21 nt, Human
cuucaaacuaggggacaaagc

SEQ ID NO: 3573340 - RNA, 13 nt, Human
cuucaaagccuuc

SEQ ID NO: 3573341 - RNA, 15 nt, Human
cuucaaagccuucuc

SEQ ID NO: 3573342 - RNA, 14 nt, Human
cuucaaauccaucc

SEQ ID NO: 3573343 - RNA, 16 nt, Human
cuucaaauccauccag

SEQ ID NO: 3573344 - RNA, 13 nt, Human
cuucaaaugccug

SEQ ID NO: 3573345 - RNA, 17 nt, Human
cuucaaauugucuuuug

SEQ ID NO: 3573346 - RNA, 21 nt, Human
cuucaaauuuuuuaaaagaga

SEQ ID NO: 3573347 - RNA, 16 nt, Human
cuucaacagcucccca

SEQ ID NO: 3573348 - RNA, 22 nt, Human
cuuggcccagggggcuuccuga

SEQ ID NO: 3573349 - RNA, 23 nt, Human
cuuggcccagggggcuuccugag

SEQ ID NO: 3573350 - RNA, 18 nt, Human
cuuggcccgcacagagcu

SEQ ID NO: 3573351 - RNA, 14 nt, Human
cuuggcccuuuccu

SEQ ID NO: 3573352 - RNA, 20 nt, Human
cuuggccuagcccacccugc

SEQ ID NO: 3573353 - RNA, 23 nt, Human
cuuggccucagaauucacaaaau

SEQ ID NO: 3573354 - RNA, 12 nt, Human
cuuggccugcug

SEQ ID NO: 3573355 - RNA, 13 nt, Human
cuuggccugcugu

SEQ ID NO: 3573356 - RNA, 13 nt, Human
cuuggccuggagc

SEQ ID NO: 3573357 - RNA, 23 nt, Human
cuuggccugucucauccccaggg

SEQ ID NO: 3573358 - RNA, 16 nt, Human
cuuggccuugggcuuc

SEQ ID NO: 3573359 - RNA, 14 nt, Human
cuuggcggcagcag

SEQ ID NO: 3573360 - RNA, 19 nt, Human
cuuggcggcagcagccauc

SEQ ID NO: 3573361 - RNA, 14 nt, Human
cuuggcguggagcc

SEQ ID NO: 3573362 - RNA, 18 nt, Human
cuuggcguggagccaggg

SEQ ID NO: 3573363 - RNA, 23 nt, Human
cuuggcucaaguccucuuuucug

SEQ ID NO: 3573364 - RNA, 24 nt, Human
cuuggcucacugcaacuucugccu

SEQ ID NO: 3573365 - RNA, 14 nt, Human
cuuggcuccaugcu

SEQ ID NO: 3573366 - RNA, 19 nt, Human
cuuggcucgaaucucugug

SEQ ID NO: 3573367 - RNA, 20 nt, Human
cuuggcucgaaucucugugc

SEQ ID NO: 3573368 - RNA, 15 nt, Human
cuuggcugcagggag

SEQ ID NO: 3573369 - RNA, 16 nt, Human
cuuggcuggugcaccu

SEQ ID NO: 3573370 - RNA, 22 nt, Human
cuuggcuguagaaggagacaga

SEQ ID NO: 3573371 - RNA, 12 nt, Human
cuuggcugugag

SEQ ID NO: 3573372 - RNA, 20 nt, Human
cuuggcuguuggcagugagu

SEQ ID NO: 3573373 - RNA, 24 nt, Human
cuuggcuuaccugaccucuugcug

SEQ ID NO: 3573374 - RNA, 20 nt, Human
cuuggcuucaggggaguccc

SEQ ID NO: 3573375 - RNA, 18 nt, Human
cuuggcuuccuuucuugg

SEQ ID NO: 3573376 - RNA, 23 nt, Human
cuuggcuucucauacguccacca

SEQ ID NO: 3573377 - RNA, 14 nt, Human
cuuggcuucuucuu

SEQ ID NO: 3573378 - RNA, 16 nt, Human
cuuggcuuggcccugg

SEQ ID NO: 3573379 - RNA, 15 nt, Human
cuuggcuuucauguu

SEQ ID NO: 3573380 - RNA, 22 nt, Human
cuugggaaaggugguguuucug

SEQ ID NO: 3573381 - RNA, 11 nt, Human
cuugggaaaua

SEQ ID NO: 3573382 - RNA, 18 nt, Human
cuugggaagacuccuagc

SEQ ID NO: 3573383 - RNA, 22 nt, Human
cuugggaagcugaggcgggaga

SEQ ID NO: 3573384 - RNA, 20 nt, Human
cuugggacuaaaugcccugc

SEQ ID NO: 3573385 - RNA, 18 nt, Human
cuugggagagccccuggg

SEQ ID NO: 3573386 - RNA, 14 nt, Human
cuugggaggaagca

SEQ ID NO: 3573387 - RNA, 15 nt, Human
cuugggaggaagcag

SEQ ID NO: 3573388 - RNA, 19 nt, Human
cuugggaggaagcagaaua

SEQ ID NO: 3573389 - RNA, 22 nt, Human
cuugggaggaagcagaauaaag

SEQ ID NO: 3573390 - RNA, 14 nt, Human
cuugggaggcccca

SEQ ID NO: 3573391 - RNA, 16 nt, Human
cuugggaggcuucccc

SEQ ID NO: 3573392 - RNA, 20 nt, Human
cuugggaugaugccucauga

SEQ ID NO: 3573393 - RNA, 17 nt, Human
cuugggauuugcugugu

SEQ ID NO: 3573394 - RNA, 22 nt, Human
cuugggcaauauucucuguaca

SEQ ID NO: 3573395 - RNA, 14 nt, Human
cuugggcagagcug

SEQ ID NO: 3573396 - RNA, 19 nt, Human
cuugggcagagcuggcucu

SEQ ID NO: 3573397 - RNA, 20 nt, Human
cuugggcagagcuggcucug

SEQ ID NO: 3573398 - RNA, 23 nt, Human
cuugggcagagcuggcucugagc

SEQ ID NO: 3573399 - RNA, 14 nt, Human
cuugggcagaucuc

SEQ ID NO: 3573400 - RNA, 19 nt, Human
cuugggccaaauccgcucu

SEQ ID NO: 3573401 - RNA, 14 nt, Human
cuugggccacugug

SEQ ID NO: 3573402 - RNA, 18 nt, Human
cuugggccacugugaaga

SEQ ID NO: 3573403 - RNA, 20 nt, Human
cuugggccacugugaagaga

SEQ ID NO: 3573404 - RNA, 14 nt, Human
cuugggcccagcug

SEQ ID NO: 3573405 - RNA, 20 nt, Human
cuugggcccagcugggcucu

SEQ ID NO: 3573406 - RNA, 13 nt, Human
cuugggcccuccu

SEQ ID NO: 3573407 - RNA, 14 nt, Human
cuugggcccuccug

SEQ ID NO: 3573408 - RNA, 19 nt, Human
cuugggcccuuugagugca

SEQ ID NO: 3573409 - RNA, 18 nt, Human
cuugggccgagccugccu

SEQ ID NO: 3573410 - RNA, 20 nt, Human
cuugggcgccgugcugggca

SEQ ID NO: 3573411 - RNA, 21 nt, Human
cuugggcgccgugcugggcag

SEQ ID NO: 3573412 - RNA, 22 nt, Human
cuugggcggcugagagccccag

SEQ ID NO: 3573413 - RNA, 21 nt, Human
cuugggcuauuuggacucagg

SEQ ID NO: 3573414 - RNA, 23 nt, Human
cuugggcucagggaccauggcuu

SEQ ID NO: 3573415 - RNA, 17 nt, Human
cuugggcucugaugaaa

SEQ ID NO: 3573416 - RNA, 18 nt, Human
cuugggcucugcugaguc

SEQ ID NO: 3573417 - RNA, 23 nt, Human
cuugggcuuccauuugugugugu

SEQ ID NO: 3573418 - RNA, 21 nt, Human
cuuggggaccagagcugccac

SEQ ID NO: 3573419 - RNA, 19 nt, Human
cuuggggaguuaagaccug

SEQ ID NO: 3573420 - RNA, 21 nt, Human
cuuggggaguuaagaccuggc

SEQ ID NO: 3573421 - RNA, 14 nt, Human
cuuggggcaggcag

SEQ ID NO: 3573422 - RNA, 23 nt, Human
cuuggggccaccaaagcugccca

SEQ ID NO: 3573423 - RNA, 13 nt, Human
cuuggggccaucg

SEQ ID NO: 3573424 - RNA, 16 nt, Human
cuuggggcugaugcag

SEQ ID NO: 3573425 - RNA, 18 nt, Human
cuuggggcugaugcaguu

SEQ ID NO: 3573426 - RNA, 21 nt, Human
cuugggggacagggcuggccc

SEQ ID NO: 3573427 - RNA, 23 nt, Human
cuugggggacagggcuggcccag

SEQ ID NO: 3573428 - RNA, 15 nt, Human
cuugggggcucagca

SEQ ID NO: 3573429 - RNA, 20 nt, Human
cuugggggcucagcaaggcc

SEQ ID NO: 3573430 - RNA, 19 nt, Human
cuugggggcucccagggca

SEQ ID NO: 3573431 - RNA, 23 nt, Human
cuugggggguuuuuacuccagug

SEQ ID NO: 3573432 - RNA, 22 nt, Human
cuuggguagaguuuacagcucu

SEQ ID NO: 3573433 - RNA, 22 nt, Human
cuuggguguaacaggucuccuc

SEQ ID NO: 3573434 - RNA, 15 nt, Human
cuuggguuagaccua

SEQ ID NO: 3573435 - RNA, 19 nt, Human
cuuggguuagaccuacagg

SEQ ID NO: 3573436 - RNA, 22 nt, Human
cuuggguuagaccuacaggggg

SEQ ID NO: 3573437 - RNA, 23 nt, Human
cuuggguucaagugauucuccug

SEQ ID NO: 3573438 - RNA, 22 nt, Human
cuugguagaagcccuucuaccu

SEQ ID NO: 3573439 - RNA, 16 nt, Human
cuugguauuuggauau

SEQ ID NO: 3573440 - RNA, 23 nt, Human
cuugguauuuuucagagauuuau

SEQ ID NO: 3573441 - RNA, 14 nt, Human
cuuggucaccagcu

SEQ ID NO: 3573442 - RNA, 14 nt, Human
cuugguccugcugc

SEQ ID NO: 3573443 - RNA, 17 nt, Human
cuugguccugcugcagu

SEQ ID NO: 3573444 - RNA, 18 nt, Human
cuugguccugcugcaguu

SEQ ID NO: 3573445 - RNA, 20 nt, Human
cuugguccugcugcaguugc

SEQ ID NO: 3573446 - RNA, 22 nt, Human
cuugguccugcugcaguugcca

SEQ ID NO: 3573447 - RNA, 23 nt, Human
cuuggucucagugucaaugcagc

SEQ ID NO: 3573448 - RNA, 20 nt, Human
cuuggucugauuucaggaua

SEQ ID NO: 3573449 - RNA, 14 nt, Human
cuuggucugugaga

SEQ ID NO: 3573450 - RNA, 16 nt, Human
cuuggucugugagaug

SEQ ID NO: 3573451 - RNA, 19 nt, Human
cuuggucugugagaugcua

SEQ ID NO: 3573452 - RNA, 15 nt, Human
cuuggucuucccagg

SEQ ID NO: 3573453 - RNA, 16 nt, Human
cuuggucuucccaggc

SEQ ID NO: 3573454 - RNA, 22 nt, Human
cuuggugaauuuuuuuuuccua

SEQ ID NO: 3573455 - RNA, 16 nt, Human
cuugguggcuuauggg

SEQ ID NO: 3573456 - RNA, 18 nt, Human
cuugguguaauuugaaga

SEQ ID NO: 3573457 - RNA, 15 nt, Human
cuugguguccaccug

SEQ ID NO: 3573458 - RNA, 13 nt, Human
cuugguuauacau

SEQ ID NO: 3573459 - RNA, 13 nt, Human
cuugguuauauuu

SEQ ID NO: 3573460 - RNA, 17 nt, Human
cuugguuccagccugcc

SEQ ID NO: 3573461 - RNA, 19 nt, Human
cuugguuccagccugccac

SEQ ID NO: 3573462 - RNA, 20 nt, Human
cuugguuccagccugccacu

SEQ ID NO: 3573463 - RNA, 20 nt, Human
cuugguucccauuugcuccu

SEQ ID NO: 3573464 - RNA, 18 nt, Human
cuugguuccuggggcauc

SEQ ID NO: 3573465 - RNA, 19 nt, Human
cuugguuccuggggcaucc

SEQ ID NO: 3573466 - RNA, 16 nt, Human
cuugguucugugaaca

SEQ ID NO: 3573467 - RNA, 22 nt, Human
cuugguucuugaggggaccagg

SEQ ID NO: 3573468 - RNA, 15 nt, Human
cuugguugaggaaac

SEQ ID NO: 3573469 - RNA, 19 nt, Human
cuugguuucucucuacagu

SEQ ID NO: 3573470 - RNA, 20 nt, Human
cuugguuucucucuacagug

SEQ ID NO: 3573471 - RNA, 15 nt, Human
cuugguuugccuucc

SEQ ID NO: 3573472 - RNA, 14 nt, Human
cuugguuuuauggu

SEQ ID NO: 3573473 - RNA, 23 nt, Human
cuugguuuuuacugcucugagaa

SEQ ID NO: 3573474 - RNA, 13 nt, Human
cuuguaaauacac

SEQ ID NO: 3573475 - RNA, 12 nt, Human
cuuguaaauacc

SEQ ID NO: 3573476 - RNA, 19 nt, Human
cuuguaaauaccaggauuu

SEQ ID NO: 3573477 - RNA, 12 nt, Human
cuuguaaauaua

SEQ ID NO: 3573478 - RNA, 17 nt, Human
cuuguaaauauaaagac

SEQ ID NO: 3573479 - RNA, 14 nt, Human
cuuguaacuaaaau

SEQ ID NO: 3573480 - RNA, 16 nt, Human
cuuguaacuaaaauaa

SEQ ID NO: 3573481 - RNA, 17 nt, Human
cuuguaacuccaccaac

SEQ ID NO: 3573482 - RNA, 16 nt, Human
cuuguaagauuuugaa

SEQ ID NO: 3573483 - RNA, 18 nt, Human
cuuguaauauuuuguauu

SEQ ID NO: 3573484 - RNA, 20 nt, Human
cuuguaaugauauagccaga

SEQ ID NO: 3573485 - RNA, 20 nt, Human
cuuguaauguaacugcucuu

SEQ ID NO: 3573486 - RNA, 18 nt, Human
cuuguaauuauggaguca

SEQ ID NO: 3573487 - RNA, 15 nt, Human
cuuguaauucuaaau

SEQ ID NO: 3573488 - RNA, 21 nt, Human
cuuguaauuuaaacaggccca

SEQ ID NO: 3573489 - RNA, 23 nt, Human
cuuguaauuuaaacaggcccagc

SEQ ID NO: 3573490 - RNA, 16 nt, Human
cuuguaauuuuuauuu

SEQ ID NO: 3573491 - RNA, 22 nt, Human
cuuguuuaccuuucucucucua

SEQ ID NO: 3573492 - RNA, 21 nt, Human
cuuguuuaucagauacaucac

SEQ ID NO: 3573493 - RNA, 14 nt, Human
cuuguuuaucagca

SEQ ID NO: 3573494 - RNA, 13 nt, Human
cuuguuucagagu

SEQ ID NO: 3573495 - RNA, 14 nt, Human
cuuguuucucaacu

SEQ ID NO: 3573496 - RNA, 19 nt, Human
cuuguuugcucaccugggg

SEQ ID NO: 3573497 - RNA, 18 nt, Human
cuuguuuggggcaggagu

SEQ ID NO: 3573498 - RNA, 19 nt, Human
cuuguuuggggcaggagua

SEQ ID NO: 3573499 - RNA, 13 nt, Human
cuuguuuuauaaa

SEQ ID NO: 3573500 - RNA, 11 nt, Human
cuuguuuucca

SEQ ID NO: 3573501 - RNA, 18 nt, Human
cuuguuuucuugccaaug

SEQ ID NO: 3573502 - RNA, 15 nt, Human
cuuguuuugcuuccc

SEQ ID NO: 3573503 - RNA, 14 nt, Human
cuuguuuuggacag

SEQ ID NO: 3573504 - RNA, 14 nt, Human
cuuguuuuggacuu

SEQ ID NO: 3573505 - RNA, 17 nt, Human
cuuguuuuggauggcuu

SEQ ID NO: 3573506 - RNA, 16 nt, Human
cuuguuuuguuugucu

SEQ ID NO: 3573507 - RNA, 16 nt, Human
cuuguuuuuaaguuug

SEQ ID NO: 3573508 - RNA, 15 nt, Human
cuuguuuuuauaaua

SEQ ID NO: 3573509 - RNA, 18 nt, Human
cuuguuuuuauuaauuua

SEQ ID NO: 3573510 - RNA, 22 nt, Human
cuuguuuuuguaaagaaaaaua

SEQ ID NO: 3573511 - RNA, 17 nt, Human
cuuguuuuuguuuuugu

SEQ ID NO: 3573512 - RNA, 16 nt, Human
cuuuaaaaaaaauccu

SEQ ID NO: 3573513 - RNA, 23 nt, Human
cuuuaaaaaagaaaagugcauau

SEQ ID NO: 3573514 - RNA, 19 nt, Human
cuuuaaaaacuauuuaacu

SEQ ID NO: 3573515 - RNA, 21 nt, Human
cuuuaaaaagggaagaaacug

SEQ ID NO: 3573516 - RNA, 15 nt, Human
cuuuaaaacaaaaca

SEQ ID NO: 3573517 - RNA, 16 nt, Human
cuuuaaaagaaugacu

SEQ ID NO: 3573518 - RNA, 15 nt, Human
cuuuaaaagagagag

SEQ ID NO: 3573519 - RNA, 22 nt, Human
cuuuaaaagagagagagagaaa

SEQ ID NO: 3573520 - RNA, 15 nt, Human
cuuuaaaagcauuuu

SEQ ID NO: 3573521 - RNA, 22 nt, Human
cuuuaaaagcauuuuuuaaccu

SEQ ID NO: 3573522 - RNA, 16 nt, Human
cuuuaaaaggaaagaa

SEQ ID NO: 3573523 - RNA, 19 nt, Human
cuuuaaaauguaaagccau

SEQ ID NO: 3573524 - RNA, 17 nt, Human
cuuuaaaauuacaacua

SEQ ID NO: 3573525 - RNA, 19 nt, Human
cuuuaaaauuacaacuaag

SEQ ID NO: 3573526 - RNA, 22 nt, Human
cuuuaaaccuguagaaucaauu

SEQ ID NO: 3573527 - RNA, 23 nt, Human
cuuuaaaccuguuuuuuuuucau

SEQ ID NO: 3573528 - RNA, 19 nt, Human
cuuuaaacucagggacaga

SEQ ID NO: 3573529 - RNA, 10 nt, Human
cuuuaaagaa

SEQ ID NO: 3573530 - RNA, 14 nt, Human
cuuuaaaggaaaaa

SEQ ID NO: 3573531 - RNA, 19 nt, Human
cuuuaaaggaaaaaauguu

SEQ ID NO: 3573532 - RNA, 18 nt, Human
cuuuaaagggauggcaag

SEQ ID NO: 3573533 - RNA, 19 nt, Human
cuuuaaagggccugccugg

SEQ ID NO: 3573534 - RNA, 23 nt, Human
cuuuaaagugacuaauggcauga

SEQ ID NO: 3573535 - RNA, 19 nt, Human
cuuuaaaguguaauaauau

SEQ ID NO: 3573536 - RNA, 17 nt, Human
cuuuaaauaauuuaacu

SEQ ID NO: 3573537 - RNA, 13 nt, Human
cuuuaaauagaua

SEQ ID NO: 3573538 - RNA, 19 nt, Human
cuuuaaauagauacaaaug

SEQ ID NO: 3573539 - RNA, 13 nt, Human
cuuuaaaugaaua

SEQ ID NO: 3573540 - RNA, 14 nt, Human
cuuuaaaugcugcu

SEQ ID NO: 3573541 - RNA, 15 nt, Human
cuuuaaauguuuuau

SEQ ID NO: 3573542 - RNA, 22 nt, Human
cuuuaaauguuuuauaaguuca

SEQ ID NO: 3573543 - RNA, 19 nt, Human
cuuuaacaacauguuucca

SEQ ID NO: 3573544 - RNA, 12 nt, Human
cuuuaacaugcc

SEQ ID NO: 3573545 - RNA, 18 nt, Human
cuuuaaccagucugaagu

SEQ ID NO: 3573546 - RNA, 18 nt, Human
cuuuaacuuaguuuugca

SEQ ID NO: 3573547 - RNA, 14 nt, Human
cuuuaagacauacu

SEQ ID NO: 3573548 - RNA, 23 nt, Human
cuuuaagacauacuccuuccauc

SEQ ID NO: 3573549 - RNA, 15 nt, Human
cuuuaagacugagca

SEQ ID NO: 3573550 - RNA, 15 nt, Human
cuuuaagcagagaag

SEQ ID NO: 3573551 - RNA, 17 nt, Human
cuuuaagccuucaaaac

SEQ ID NO: 3573552 - RNA, 17 nt, Human
cuuuaagggcaugccuu

SEQ ID NO: 3573553 - RNA, 20 nt, Human
cuuuaaggggaggaaccaga

SEQ ID NO: 3573554 - RNA, 12 nt, Human
cuuuaauauaaa

SEQ ID NO: 3573555 - RNA, 18 nt, Human
cuuuaauauaaaugcaaa

SEQ ID NO: 3573556 - RNA, 20 nt, Human
cuuuaauauaaaugcaaaua

SEQ ID NO: 3573557 - RNA, 19 nt, Human
cuuuaaucagguccugcuc

SEQ ID NO: 3573558 - RNA, 14 nt, Human
cuuuaaucuucagu

SEQ ID NO: 3573559 - RNA, 21 nt, Human
cuuuaaucuucaguuuuaucu

SEQ ID NO: 3573560 - RNA, 22 nt, Human
cuuuaaucuucaguuuuaucuu

SEQ ID NO: 3573561 - RNA, 22 nt, Human
cuuuaaugauaugcuuguaacu

SEQ ID NO: 3573562 - RNA, 13 nt, Human
cuuuaaugcaucu

SEQ ID NO: 3573563 - RNA, 23 nt, Human
cuuuaaugucacaggcaggucca

SEQ ID NO: 3573564 - RNA, 21 nt, Human
cuuuaauguuuuuugccacag

SEQ ID NO: 3573565 - RNA, 23 nt, Human
cuuuaauuccaugaauguuccug

SEQ ID NO: 3573566 - RNA, 18 nt, Human
cuuuaauucuguaucugu

SEQ ID NO: 3573567 - RNA, 21 nt, Human
cuuuaauuucugucagaaugc

SEQ ID NO: 3573568 - RNA, 14 nt, Human
cuuuaauuuuggaa

SEQ ID NO: 3573569 - RNA, 17 nt, Human
cuuuacaugacacagcu

SEQ ID NO: 3573570 - RNA, 17 nt, Human
cuuuacaugcaauuuau

SEQ ID NO: 3573571 - RNA, 19 nt, Human
cuuuacaugcaauuuauua

SEQ ID NO: 3573572 - RNA, 20 nt, Human
cuuuacaugggguuuucaau

SEQ ID NO: 3573573 - RNA, 18 nt, Human
cuuuaccaaacagcaaac

SEQ ID NO: 3573574 - RNA, 16 nt, Human
cuuuaccaaagaugaa

SEQ ID NO: 3573575 - RNA, 19 nt, Human
cuuuaccaaagaugaauga

SEQ ID NO: 3573576 - RNA, 14 nt, Human
cuuuaccaugcuca

SEQ ID NO: 3573577 - RNA, 17 nt, Human
cuuuacccaccuagaac

SEQ ID NO: 3573578 - RNA, 19 nt, Human
cuuuacccaccuagaacac

SEQ ID NO: 3573579 - RNA, 20 nt, Human
cuuuacccuugagcccuccc

SEQ ID NO: 3573580 - RNA, 16 nt, Human
cuuuaccucucuguca

SEQ ID NO: 3573581 - RNA, 16 nt, Human
cuuuaccugagaccag

SEQ ID NO: 3573582 - RNA, 17 nt, Human
cuuuaccugugaagugu

SEQ ID NO: 3573583 - RNA, 20 nt, Human
cuuuaccuuuuuuauacaua

SEQ ID NO: 3573584 - RNA, 16 nt, Human
cuuuacgcccaucuca

SEQ ID NO: 3573585 - RNA, 21 nt, Human
cuuuacguguuuaaaaaaaag

SEQ ID NO: 3573586 - RNA, 18 nt, Human
cuuuacuccucacacuua

SEQ ID NO: 3573587 - RNA, 16 nt, Human
cuuuacugacccuggg

SEQ ID NO: 3573588 - RNA, 14 nt, Human
cuuuacuuagcuua

SEQ ID NO: 3573589 - RNA, 16 nt, Human
cuuuacuugucuuucu

SEQ ID NO: 3573590 - RNA, 18 nt, Human
cuuuacuugucuuucugg

SEQ ID NO: 3573591 - RNA, 13 nt, Human
cuuuacuuucccu

SEQ ID NO: 3573592 - RNA, 14 nt, Human
cuuuacuuucccuu

SEQ ID NO: 3573593 - RNA, 17 nt, Human
cuuuacuuucccuugcu

SEQ ID NO: 3573594 - RNA, 19 nt, Human
cuuuacuuucccuugcuuu

SEQ ID NO: 3573595 - RNA, 12 nt, Human
cuuuagaaaaua

SEQ ID NO: 3573596 - RNA, 13 nt, Human
cuuuagaaaauau

SEQ ID NO: 3573597 - RNA, 18 nt, Human
cuuuagaaaauauaagua

SEQ ID NO: 3573598 - RNA, 20 nt, Human
cuuuagaaagguuuugagca

SEQ ID NO: 3573599 - RNA, 22 nt, Human
cuuuagaaauaaaccuuaauau

SEQ ID NO: 3573600 - RNA, 16 nt, Human
cuuuagaauaugccuu

SEQ ID NO: 3573601 - RNA, 21 nt, Human
cuuuagaaucccagcccccug

SEQ ID NO: 3573602 - RNA, 17 nt, Human
cuuuagaauguuuuccu

SEQ ID NO: 3573603 - RNA, 21 nt, Human
cuuuagaauguuuuccuucua

SEQ ID NO: 3573604 - RNA, 12 nt, Human
cuuuagacuuga

SEQ ID NO: 3573605 - RNA, 13 nt, Human
cuuuagacuugaa

SEQ ID NO: 3573606 - RNA, 21 nt, Human
cuuuagacuugaaaagagaca

SEQ ID NO: 3573607 - RNA, 17 nt, Human
cuuuagagcauugccau

SEQ ID NO: 3573608 - RNA, 20 nt, Human
cuuuagauagcagccuggcu

SEQ ID NO: 3573609 - RNA, 23 nt, Human
cuuuagauagcagccuggcuccc

SEQ ID NO: 3573610 - RNA, 16 nt, Human
cuuuagaucucugaag

SEQ ID NO: 3573611 - RNA, 12 nt, Human
cuuuagaugcug

SEQ ID NO: 3573612 - RNA, 17 nt, Human
cuuuagaugcugaugau

SEQ ID NO: 3573613 - RNA, 16 nt, Human
cuuuagcaaagaacuc

SEQ ID NO: 3573614 - RNA, 19 nt, Human
cuuuagcacguuuaaaguu

SEQ ID NO: 3573615 - RNA, 15 nt, Human
cuuuagccaaacccu

SEQ ID NO: 3573616 - RNA, 14 nt, Human
cuuuagcgcccagu

SEQ ID NO: 3573617 - RNA, 22 nt, Human
cuuuagcgcucaauaggaccag

SEQ ID NO: 3573618 - RNA, 15 nt, Human
cuuuagcuuucugag

SEQ ID NO: 3573619 - RNA, 22 nt, Human
cuuuaggagauuuauuuuuugg

SEQ ID NO: 3573620 - RNA, 21 nt, Human
cuuuagggacucaauuucucc

SEQ ID NO: 3573621 - RNA, 22 nt, Human
cuuuagguuuuuuuaaugauau

SEQ ID NO: 3573622 - RNA, 22 nt, Human
cuuuaguaccugaaaaguaacu

SEQ ID NO: 3573623 - RNA, 15 nt, Human
cuuuagucugcaaaa

SEQ ID NO: 3573624 - RNA, 14 nt, Human
cuuuaguggcuuca

SEQ ID NO: 3573625 - RNA, 17 nt, Human
cuuuagugguggccauu

SEQ ID NO: 3573626 - RNA, 14 nt, Human
cuuuaguuuuuggu

SEQ ID NO: 3573627 - RNA, 15 nt, Human
cuuuaguuuuuguga

SEQ ID NO: 3573628 - RNA, 13 nt, Human
cuuuauaaacuuu

SEQ ID NO: 3573629 - RNA, 11 nt, Human
cuuuauaaaua

SEQ ID NO: 3573630 - RNA, 17 nt, Human
cuuuauaaauccaguga

SEQ ID NO: 3573631 - RNA, 18 nt, Human
cuuuauaacuaacauguc

SEQ ID NO: 3573632 - RNA, 12 nt, Human
cuuuauaagaaa

SEQ ID NO: 3573633 - RNA, 19 nt, Human
cuuuauaagaaagccugag

SEQ ID NO: 3573634 - RNA, 19 nt, Human
cuuuauaauucuacuuuga

SEQ ID NO: 3573635 - RNA, 17 nt, Human
cuuuauacaacagugcu

SEQ ID NO: 3573636 - RNA, 15 nt, Human
cuuucccaaaggcau

SEQ ID NO: 3573637 - RNA, 21 nt, Human
cuuucccaacacuucagacug

SEQ ID NO: 3573638 - RNA, 22 nt, Human
cuuucccaacacuucagacugc

SEQ ID NO: 3573639 - RNA, 19 nt, Human
cuuucccaccgcccucccu

SEQ ID NO: 3573640 - RNA, 20 nt, Human
cuuucccagugagucucugg

SEQ ID NO: 3573641 - RNA, 21 nt, Human
cuuuccccagcaucacucccc

SEQ ID NO: 3573642 - RNA, 14 nt, Human
cuuuccccagccca

SEQ ID NO: 3573643 - RNA, 15 nt, Human
cuuuccccagcccag

SEQ ID NO: 3573644 - RNA, 16 nt, Human
cuuuccccagcccagg

SEQ ID NO: 3573645 - RNA, 17 nt, Human
cuuuccccauacucugu

SEQ ID NO: 3573646 - RNA, 13 nt, Human
cuuuccccauucc

SEQ ID NO: 3573647 - RNA, 19 nt, Human
cuuucccccaccagcuaag

SEQ ID NO: 3573648 - RNA, 14 nt, Human
cuuuccccuguggg

SEQ ID NO: 3573649 - RNA, 15 nt, Human
cuuuccccugugggg

SEQ ID NO: 3573650 - RNA, 17 nt, Human
cuuucccgggcugucca

SEQ ID NO: 3573651 - RNA, 17 nt, Human
cuuucccuaagccagcu

SEQ ID NO: 3573652 - RNA, 18 nt, Human
cuuucccuaagccagcug

SEQ ID NO: 3573653 - RNA, 14 nt, Human
cuuucccucacccc

SEQ ID NO: 3573654 - RNA, 16 nt, Human
cuuucccucacccccu

SEQ ID NO: 3573655 - RNA, 13 nt, Human
cuuucccuccacu

SEQ ID NO: 3573656 - RNA, 14 nt, Human
cuuucccucccuuc

SEQ ID NO: 3573657 - RNA, 18 nt, Human
cuuucccuccuuggugau

SEQ ID NO: 3573658 - RNA, 14 nt, Human
cuuucccuuccagu

SEQ ID NO: 3573659 - RNA, 16 nt, Human
cuuucccuuccucuuc

SEQ ID NO: 3573660 - RNA, 23 nt, Human
cuuucccuugcuuuucccucuuu

SEQ ID NO: 3573661 - RNA, 21 nt, Human
cuuucccuuguagcuccuccc

SEQ ID NO: 3573662 - RNA, 15 nt, Human
cuuuccuaaauguuu

SEQ ID NO: 3573663 - RNA, 21 nt, Human
cuuuccucaggcaaggucugg

SEQ ID NO: 3573664 - RNA, 13 nt, Human
cuuuccuccuucc

SEQ ID NO: 3573665 - RNA, 16 nt, Human
cuuuccuccuuccaug

SEQ ID NO: 3573666 - RNA, 13 nt, Human
cuuuccucgccug

SEQ ID NO: 3573667 - RNA, 13 nt, Human
cuuuccucuuccc

SEQ ID NO: 3573668 - RNA, 19 nt, Human
cuuuccucuuccccuugcc

SEQ ID NO: 3573669 - RNA, 15 nt, Human
cuuuccugaauccaa

SEQ ID NO: 3573670 - RNA, 12 nt, Human
cuuuccugaggc

SEQ ID NO: 3573671 - RNA, 13 nt, Human
cuuuccugaggcu

SEQ ID NO: 3573672 - RNA, 17 nt, Human
cuuuccugaggcugggc

SEQ ID NO: 3573673 - RNA, 22 nt, Human
cuuuccugaugguacaggaaag

SEQ ID NO: 3573674 - RNA, 12 nt, Human
cuuuccugcccc

SEQ ID NO: 3573675 - RNA, 18 nt, Human
cuuuccugccccaggccu

SEQ ID NO: 3573676 - RNA, 20 nt, Human
cuuuccuggacacucagacc

SEQ ID NO: 3573677 - RNA, 16 nt, Human
cuuuccuggaugucug

SEQ ID NO: 3573678 - RNA, 23 nt, Human
cuuuccuggaugucugaacuuug

SEQ ID NO: 3573679 - RNA, 20 nt, Human
cuuuccuguagccuucugua

SEQ ID NO: 3573680 - RNA, 10 nt, Human
cuuuccuguc

SEQ ID NO: 3573681 - RNA, 13 nt, Human
cuuuccuguccca

SEQ ID NO: 3573682 - RNA, 21 nt, Human
cuuuccuguguguacucuguc

SEQ ID NO: 3573683 - RNA, 18 nt, Human
cuuuccuguucagcauuc

SEQ ID NO: 3573684 - RNA, 15 nt, Human
cuuuccuuccauccc

SEQ ID NO: 3573685 - RNA, 11 nt, Human
cuuuccuuccu

SEQ ID NO: 3573686 - RNA, 17 nt, Human
cuuuccuugaguaguuu

SEQ ID NO: 3573687 - RNA, 16 nt, Human
cuuuccuuggcuccca

SEQ ID NO: 3573688 - RNA, 17 nt, Human
cuuuccuuguggcagag

SEQ ID NO: 3573689 - RNA, 18 nt, Human
cuuuccuuguggcagagg

SEQ ID NO: 3573690 - RNA, 20 nt, Human
cuuuccuuuccccagcccag

SEQ ID NO: 3573691 - RNA, 21 nt, Human
cuuuccuuuccccagcccagg

SEQ ID NO: 3573692 - RNA, 17 nt, Human
cuuuccuuuuuuaaaaa

SEQ ID NO: 3573693 - RNA, 15 nt, Human
cuuucgcacagcagu

SEQ ID NO: 3573694 - RNA, 14 nt, Human
cuuucgggccaugu

SEQ ID NO: 3573695 - RNA, 22 nt, Human
cuuucggggagaggcugaggac

SEQ ID NO: 3573696 - RNA, 19 nt, Human
cuuucguccacagcuuccu

SEQ ID NO: 3573697 - RNA, 15 nt, Human
cuuucuaauguuucu

SEQ ID NO: 3573698 - RNA, 18 nt, Human
cuuucuacaaugugaacu

SEQ ID NO: 3573699 - RNA, 19 nt, Human
cuuucuacaguauuaugua

SEQ ID NO: 3573700 - RNA, 23 nt, Human
cuuucuacaguauuauguacucu

SEQ ID NO: 3573701 - RNA, 15 nt, Human
cuuucuacuuccaag

SEQ ID NO: 3573702 - RNA, 22 nt, Human
cuuucuagaaagagaaacaguu

SEQ ID NO: 3573703 - RNA, 16 nt, Human
cuuucuagccagagga

SEQ ID NO: 3573704 - RNA, 16 nt, Human
cuuucuaguggucuuu

SEQ ID NO: 3573705 - RNA, 20 nt, Human
cuuucuaguggucuuuguaa

SEQ ID NO: 3573706 - RNA, 22 nt, Human
cuuucuaguggucuuuguaaga

SEQ ID NO: 3573707 - RNA, 14 nt, Human
cuuucuaguugaaa

SEQ ID NO: 3573708 - RNA, 14 nt, Human
cuuucuauaauuuu

SEQ ID NO: 3573709 - RNA, 18 nt, Human
cuuucuauaauuuuacaa

SEQ ID NO: 3573710 - RNA, 12 nt, Human
cuuucuaucauu

SEQ ID NO: 3573711 - RNA, 16 nt, Human
cuuucuauugaaaaau

SEQ ID NO: 3573712 - RNA, 16 nt, Human
cuuucuauuguacaga

SEQ ID NO: 3573713 - RNA, 18 nt, Human
cuuucuauuugacuugug

SEQ ID NO: 3573714 - RNA, 18 nt, Human
cuuucucaaagaaauauu

SEQ ID NO: 3573715 - RNA, 20 nt, Human
cuuucucagccucugaauau

SEQ ID NO: 3573716 - RNA, 14 nt, Human
cuuucuccaaaguu

SEQ ID NO: 3573717 - RNA, 15 nt, Human
cuuucuccaaaguua

SEQ ID NO: 3573718 - RNA, 15 nt, Human
cuuucuccagccagc

SEQ ID NO: 3573719 - RNA, 18 nt, Human
cuuucucccacugaguuu

SEQ ID NO: 3573720 - RNA, 13 nt, Human
cuuucucccaggc

SEQ ID NO: 3573721 - RNA, 21 nt, Human
cuuucucccaggccaggcucc

SEQ ID NO: 3573722 - RNA, 20 nt, Human
cuuucuccccgcuaaggaag

SEQ ID NO: 3573723 - RNA, 19 nt, Human
cuuucuccccugcccccag

SEQ ID NO: 3573724 - RNA, 22 nt, Human
cuuucuccuguuuauucccauc

SEQ ID NO: 3573725 - RNA, 23 nt, Human
cuuucuccuuagucuucucauag

SEQ ID NO: 3573726 - RNA, 16 nt, Human
cuuucucuaauaauaa

SEQ ID NO: 3573727 - RNA, 20 nt, Human
cuuucucuaauaauaaauag

SEQ ID NO: 3573728 - RNA, 18 nt, Human
cuuucucuccccaacccc

SEQ ID NO: 3573729 - RNA, 15 nt, Human
cuuucucucuucccu

SEQ ID NO: 3573730 - RNA, 12 nt, Human
cuuucucugagg

SEQ ID NO: 3573731 - RNA, 16 nt, Human
cuuucucugccaguga

SEQ ID NO: 3573732 - RNA, 21 nt, Human
cuuucucuucauauucagcuu

SEQ ID NO: 3573733 - RNA, 15 nt, Human
cuuucucuucucugu

SEQ ID NO: 3573734 - RNA, 16 nt, Human
cuuucucuuucccugg

SEQ ID NO: 3573735 - RNA, 15 nt, Human
cuuucucuuucuucc

SEQ ID NO: 3573736 - RNA, 18 nt, Human
cuuucucuuucuuccuuu

SEQ ID NO: 3573737 - RNA, 15 nt, Human
cuuucugaacagcug

SEQ ID NO: 3573738 - RNA, 18 nt, Human
cuuucugaacagcuggug

SEQ ID NO: 3573739 - RNA, 19 nt, Human
cuuucugaacagcuggugu

SEQ ID NO: 3573740 - RNA, 17 nt, Human
cuuucugaauugcacau

SEQ ID NO: 3573741 - RNA, 21 nt, Human
cuuucugagcaagaggauuuu

SEQ ID NO: 3573742 - RNA, 17 nt, Human
cuuucugagcacacuuu

SEQ ID NO: 3573743 - RNA, 20 nt, Human
cuuucugagcacacuuuagu

SEQ ID NO: 3573744 - RNA, 21 nt, Human
cuuucugagcacacuuuagug

SEQ ID NO: 3573745 - RNA, 16 nt, Human
cuuucugagugccuuc

SEQ ID NO: 3573746 - RNA, 21 nt, Human
cuuucugauaacuagauggug

SEQ ID NO: 3573747 - RNA, 16 nt, Human
cuuucugaucaaggcc

SEQ ID NO: 3573748 - RNA, 16 nt, Human
cuuucugcacacaaau

SEQ ID NO: 3573749 - RNA, 15 nt, Human
cuuucugcaguuuuu

SEQ ID NO: 3573750 - RNA, 18 nt, Human
cuuucugccgaccccuag

SEQ ID NO: 3573751 - RNA, 16 nt, Human
cuuucugcucagcuuc

SEQ ID NO: 3573752 - RNA, 14 nt, Human
cuuucugggccaag

SEQ ID NO: 3573753 - RNA, 20 nt, Human
cuuucuggggccuaauaaaa

SEQ ID NO: 3573754 - RNA, 17 nt, Human
cuuucugggguuuuucu

SEQ ID NO: 3573755 - RNA, 19 nt, Human
cuuucugggguuuuucugu

SEQ ID NO: 3573756 - RNA, 20 nt, Human
cuuucugggguuuuucuguu

SEQ ID NO: 3573757 - RNA, 17 nt, Human
cuuucuguaccauuuau

SEQ ID NO: 3573758 - RNA, 19 nt, Human
cuuucuguauauacuuuuu

SEQ ID NO: 3573759 - RNA, 14 nt, Human
cuuucugucucucu

SEQ ID NO: 3573760 - RNA, 22 nt, Human
cuuucugugcccuacucauugg

SEQ ID NO: 3573761 - RNA, 13 nt, Human
cuuucuguguuua

SEQ ID NO: 3573762 - RNA, 14 nt, Human
cuuucuguuccaaa

SEQ ID NO: 3573763 - RNA, 13 nt, Human
cuuucuuagaaau

SEQ ID NO: 3573764 - RNA, 14 nt, Human
cuuucuuagaaauu

SEQ ID NO: 3573765 - RNA, 20 nt, Human
cuuucuuccggccccucccc

SEQ ID NO: 3573766 - RNA, 12 nt, Human
cuuucuuccuca

SEQ ID NO: 3573767 - RNA, 17 nt, Human
cuuucuuccucauuccc

SEQ ID NO: 3573768 - RNA, 12 nt, Human
cuuucuuccuuu

SEQ ID NO: 3573769 - RNA, 15 nt, Human
cuuucuucuauuuua

SEQ ID NO: 3573770 - RNA, 16 nt, Human
cuuucuugcucccuuc

SEQ ID NO: 3573771 - RNA, 19 nt, Human
cuuucuugcucccuucagc

SEQ ID NO: 3573772 - RNA, 13 nt, Human
cuuucuuggccag

SEQ ID NO: 3573773 - RNA, 21 nt, Human
cuuucuugguucauaaaugaa

SEQ ID NO: 3573774 - RNA, 18 nt, Human
cuuucuuuaccugagacc

SEQ ID NO: 3573775 - RNA, 17 nt, Human
cuuucuuucuuagaaau

SEQ ID NO: 3573776 - RNA, 13 nt, Human
cuuucuuucuuua

SEQ ID NO: 3573777 - RNA, 16 nt, Human
cuuucuuucuuucuuu

SEQ ID NO: 3573778 - RNA, 20 nt, Human
cuuucuuugggaauauuuga

SEQ ID NO: 3573779 - RNA, 23 nt, Human
cuuucuuugggaauauuugaauc

SEQ ID NO: 3573780 - RNA, 18 nt, Human
cuuucuuuggugccuuuc

SEQ ID NO: 3573781 - RNA, 20 nt, Human
cuuucuuuggugccuuuccu

SEQ ID NO: 3573782 - RNA, 15 nt, Human
cuuuggcccagggug

SEQ ID NO: 3573783 - RNA, 13 nt, Human
cuuuggcuccccu

SEQ ID NO: 3573784 - RNA, 13 nt, Human
cuuuggcucugga

SEQ ID NO: 3573785 - RNA, 15 nt, Human
cuuuggcucuggaga

SEQ ID NO: 3573786 - RNA, 16 nt, Human
cuuuggcuuaauucca

SEQ ID NO: 3573787 - RNA, 21 nt, Human
cuuuggcuuauaauucuuuca

SEQ ID NO: 3573788 - RNA, 14 nt, Human
cuuugggaagccuu

SEQ ID NO: 3573789 - RNA, 23 nt, Human
cuuugggaauauuugaaucuugu

SEQ ID NO: 3573790 - RNA, 22 nt, Human
cuuugggagaaaacgucuugcu

SEQ ID NO: 3573791 - RNA, 23 nt, Human
cuuugggaggccaaggugggagg

SEQ ID NO: 3573792 - RNA, 18 nt, Human
cuuugggaggcugaggcg

SEQ ID NO: 3573793 - RNA, 20 nt, Human
cuuugggauuuaauuuccag

SEQ ID NO: 3573794 - RNA, 21 nt, Human
cuuugggccagacaugccaca

SEQ ID NO: 3573795 - RNA, 15 nt, Human
cuuugggcccaggga

SEQ ID NO: 3573796 - RNA, 22 nt, Human
cuuugggcccagggacaccagc

SEQ ID NO: 3573797 - RNA, 23 nt, Human
cuuugggcccagggacaccagcc

SEQ ID NO: 3573798 - RNA, 13 nt, Human
cuuugggcccugc

SEQ ID NO: 3573799 - RNA, 17 nt, Human
cuuugggccuggcuccc

SEQ ID NO: 3573800 - RNA, 15 nt, Human
cuuugggcugcccug

SEQ ID NO: 3573801 - RNA, 20 nt, Human
cuuugggcugcccuggugcu

SEQ ID NO: 3573802 - RNA, 21 nt, Human
cuuugggcugcccuggugcug

SEQ ID NO: 3573803 - RNA, 16 nt, Human
cuuugggcuugggccu

SEQ ID NO: 3573804 - RNA, 20 nt, Human
cuuuggggcuuuuacaccag

SEQ ID NO: 3573805 - RNA, 17 nt, Human
cuuuggggucuacacug

SEQ ID NO: 3573806 - RNA, 22 nt, Human
cuuuggggucuacacugcaauc

SEQ ID NO: 3573807 - RNA, 18 nt, Human
cuuuggguaccuauuuuc

SEQ ID NO: 3573808 - RNA, 14 nt, Human
cuuugggugcuguu

SEQ ID NO: 3573809 - RNA, 20 nt, Human
cuuugguaccagauaacuuu

SEQ ID NO: 3573810 - RNA, 16 nt, Human
cuuugguacuaauaau

SEQ ID NO: 3573811 - RNA, 14 nt, Human
cuuugguagaaaag

SEQ ID NO: 3573812 - RNA, 16 nt, Human
cuuuggucuacacugu

SEQ ID NO: 3573813 - RNA, 16 nt, Human
cuuuggucucuugcuu

SEQ ID NO: 3573814 - RNA, 15 nt, Human
cuuuggugaacauug

SEQ ID NO: 3573815 - RNA, 15 nt, Human
cuuuggugccuuucc

SEQ ID NO: 3573816 - RNA, 18 nt, Human
cuuuggugccuuuccugu

SEQ ID NO: 3573817 - RNA, 20 nt, Human
cuuuggugccuuuccuguuc

SEQ ID NO: 3573818 - RNA, 21 nt, Human
cuuuggugcgggcacaauaaa

SEQ ID NO: 3573819 - RNA, 17 nt, Human
cuuugguggagauaaag

SEQ ID NO: 3573820 - RNA, 14 nt, Human
cuuugguggcuuug

SEQ ID NO: 3573821 - RNA, 18 nt, Human
cuuugguggcuuugcauu

SEQ ID NO: 3573822 - RNA, 17 nt, Human
cuuugguuauuuuacuu

SEQ ID NO: 3573823 - RNA, 23 nt, Human
cuuugguuauuuuacuuuuugga

SEQ ID NO: 3573824 - RNA, 13 nt, Human
cuuugguucuaag

SEQ ID NO: 3573825 - RNA, 12 nt, Human
cuuuguaaauuc

SEQ ID NO: 3573826 - RNA, 15 nt, Human
cuuuguaaauucuga

SEQ ID NO: 3573827 - RNA, 16 nt, Human
cuuuguaaauucugau

SEQ ID NO: 3573828 - RNA, 18 nt, Human
cuuuguaagaacuaaaga

SEQ ID NO: 3573829 - RNA, 18 nt, Human
cuuuguaagaguguagaa

SEQ ID NO: 3573830 - RNA, 21 nt, Human
cuuuguaaguaaacugcccug

SEQ ID NO: 3573831 - RNA, 22 nt, Human
cuuuguaaguaaacugcccugu

SEQ ID NO: 3573832 - RNA, 19 nt, Human
cuuuguaaucguuaugugu

SEQ ID NO: 3573833 - RNA, 14 nt, Human
cuuuguaaugaaaa

SEQ ID NO: 3573834 - RNA, 16 nt, Human
cuuuguaaugaaaacc

SEQ ID NO: 3573835 - RNA, 17 nt, Human
cuuuguaaugucaccac

SEQ ID NO: 3573836 - RNA, 22 nt, Human
cuuuguaaugucaccaccuucc

SEQ ID NO: 3573837 - RNA, 13 nt, Human
cuuuguaccaaaa

SEQ ID NO: 3573838 - RNA, 14 nt, Human
cuuuguacuuugug

SEQ ID NO: 3573839 - RNA, 18 nt, Human
cuuuguagcacucaggcu

SEQ ID NO: 3573840 - RNA, 21 nt, Human
cuuuguagcacucaggcucuc

SEQ ID NO: 3573841 - RNA, 17 nt, Human
cuuuguauacaaguacu

SEQ ID NO: 3573842 - RNA, 20 nt, Human
cuuuguauacuuuaaauaau

SEQ ID NO: 3573843 - RNA, 20 nt, Human
cuuuguauagaaccucuuug

SEQ ID NO: 3573844 - RNA, 15 nt, Human
cuuuguauaguuaug

SEQ ID NO: 3573845 - RNA, 19 nt, Human
cuuuguauaguuauguaaa

SEQ ID NO: 3573846 - RNA, 21 nt, Human
cuuuguauaguuauguaaaua

SEQ ID NO: 3573847 - RNA, 10 nt, Human
cuuuguauau

SEQ ID NO: 3573848 - RNA, 12 nt, Human
cuuuguauauua

SEQ ID NO: 3573849 - RNA, 14 nt, Human
cuuuguauauuaca

SEQ ID NO: 3573850 - RNA, 18 nt, Human
cuuuguaucauucaucuu

SEQ ID NO: 3573851 - RNA, 12 nt, Human
cuuuguaugcac

SEQ ID NO: 3573852 - RNA, 19 nt, Human
cuuuguauucugucuucau

SEQ ID NO: 3573853 - RNA, 15 nt, Human
cuuuguauuguccua

SEQ ID NO: 3573854 - RNA, 13 nt, Human
cuuuguauuuuga

SEQ ID NO: 3573855 - RNA, 16 nt, Human
cuuugucccacagcuu

SEQ ID NO: 3573856 - RNA, 14 nt, Human
cuuugucccauuuc

SEQ ID NO: 3573857 - RNA, 14 nt, Human
cuuuguccccaccg

SEQ ID NO: 3573858 - RNA, 22 nt, Human
cuuuguccccaccgcagacagg

SEQ ID NO: 3573859 - RNA, 15 nt, Human
cuuugucccggggcu

SEQ ID NO: 3573860 - RNA, 15 nt, Human
cuuuguccuccugcu

SEQ ID NO: 3573861 - RNA, 17 nt, Human
cuuuguccuuuuuguua

SEQ ID NO: 3573862 - RNA, 15 nt, Human
cuuugucuaaaacaa

SEQ ID NO: 3573863 - RNA, 19 nt, Human
cuuugucuaagaaacauug

SEQ ID NO: 3573864 - RNA, 20 nt, Human
cuuugucuaagaaacauugg

SEQ ID NO: 3573865 - RNA, 15 nt, Human
cuuugugacuguaua

SEQ ID NO: 3573866 - RNA, 15 nt, Human
cuuugugauaauuua

SEQ ID NO: 3573867 - RNA, 17 nt, Human
cuuugugauaauuuaag

SEQ ID NO: 3573868 - RNA, 18 nt, Human
cuuugugauaauuuaaga

SEQ ID NO: 3573869 - RNA, 14 nt, Human
cuuugugauuuuug

SEQ ID NO: 3573870 - RNA, 18 nt, Human
cuuugugcacauuuauuu

SEQ ID NO: 3573871 - RNA, 18 nt, Human
cuuugugcccuaucaccc

SEQ ID NO: 3573872 - RNA, 20 nt, Human
cuuugugcugggguuaucug

SEQ ID NO: 3573873 - RNA, 13 nt, Human
cuuugugcugugg

SEQ ID NO: 3573874 - RNA, 17 nt, Human
cuuuguggaugucuucc

SEQ ID NO: 3573875 - RNA, 14 nt, Human
cuuuguggcacugg

SEQ ID NO: 3573876 - RNA, 18 nt, Human
cuuuguggccaaggagcu

SEQ ID NO: 3573877 - RNA, 13 nt, Human
cuuuguggcuucc

SEQ ID NO: 3573878 - RNA, 12 nt, Human
cuuuguggggcu

SEQ ID NO: 3573879 - RNA, 16 nt, Human
cuuuguggggcuuggc

SEQ ID NO: 3573880 - RNA, 18 nt, Human
cuuuguguagcuuugcuc

SEQ ID NO: 3573881 - RNA, 20 nt, Human
cuuuguguugggagggauua

SEQ ID NO: 3573882 - RNA, 23 nt, Human
cuuuguguuucuauugacuucaa

SEQ ID NO: 3573883 - RNA, 14 nt, Human
cuuuguuaaaaaaa

SEQ ID NO: 3573884 - RNA, 19 nt, Human
cuuuguuaccuuaaaacua

SEQ ID NO: 3573885 - RNA, 20 nt, Human
cuuuguuaccuuaaaacuag

SEQ ID NO: 3573886 - RNA, 20 nt, Human
cuuuguuauuuuuguuucuu

SEQ ID NO: 3573887 - RNA, 22 nt, Human
cuuuguuauuuuuguuucuucc

SEQ ID NO: 3573888 - RNA, 15 nt, Human
cuuuguucagccugc

SEQ ID NO: 3573889 - RNA, 14 nt, Human
cuuuguucccggcu

SEQ ID NO: 3573890 - RNA, 14 nt, Human
cuuuguucucagcu

SEQ ID NO: 3573891 - RNA, 15 nt, Human
cuuuguucuggcucu

SEQ ID NO: 3573892 - RNA, 21 nt, Human
cuuuguucuggcucuuccagg

SEQ ID NO: 3573893 - RNA, 20 nt, Human
cuuuguucuuuaggagauuu

SEQ ID NO: 3573894 - RNA, 16 nt, Human
cuuuguugaaagaaag

SEQ ID NO: 3573895 - RNA, 20 nt, Human
cuuuguugcaagaugugaau

SEQ ID NO: 3573896 - RNA, 15 nt, Human
cuuuguugcacugaa

SEQ ID NO: 3573897 - RNA, 15 nt, Human
cuuuguuggagucaa

SEQ ID NO: 3573898 - RNA, 17 nt, Human
cuuuguuucaaccaagu

SEQ ID NO: 3573899 - RNA, 17 nt, Human
cuuuguuucguggggag

SEQ ID NO: 3573900 - RNA, 14 nt, Human
cuuuguuucucccc

SEQ ID NO: 3573901 - RNA, 21 nt, Human
cuuuguuuggauguaauuuag

SEQ ID NO: 3573902 - RNA, 13 nt, Human
cuuuguuuguucu

SEQ ID NO: 3573903 - RNA, 20 nt, Human
cuuuguuuguugucagcuga

SEQ ID NO: 3573904 - RNA, 17 nt, Human
cuuuguuuucugacuaa

SEQ ID NO: 3573905 - RNA, 23 nt, Human
cuuuguuuugcacacuuugccau

SEQ ID NO: 3573906 - RNA, 11 nt, Human
cuuuguuuugu

SEQ ID NO: 3573907 - RNA, 14 nt, Human
cuuuguuuuguguc

SEQ ID NO: 3573908 - RNA, 17 nt, Human
cuuuguuuugugucucu

SEQ ID NO: 3573909 - RNA, 16 nt, Human
cuuuguuuuuaaauga

SEQ ID NO: 3573910 - RNA, 18 nt, Human
cuuuguuuuuaugaagaa

SEQ ID NO: 3573911 - RNA, 14 nt, Human
cuuuguuuuuauuu

SEQ ID NO: 3573912 - RNA, 14 nt, Human
cuuuuaaaaaguau

SEQ ID NO: 3573913 - RNA, 20 nt, Human
cuuuuaaaccucaccuuugu

SEQ ID NO: 3573914 - RNA, 20 nt, Human
cuuuuaaaguguuacuuuuu

SEQ ID NO: 3573915 - RNA, 18 nt, Human
cuuuuaaauccuguugaa

SEQ ID NO: 3573916 - RNA, 19 nt, Human
cuuuuaacaccugaugugu

SEQ ID NO: 3573917 - RNA, 23 nt, Human
cuuuuaacaccugauguguacau

SEQ ID NO: 3573918 - RNA, 22 nt, Human
cuuuuaacagagucugaaccua

SEQ ID NO: 3573919 - RNA, 10 nt, Human
cuuuuaacau

SEQ ID NO: 3573920 - RNA, 12 nt, Human
cuuuuaacauuu

SEQ ID NO: 3573921 - RNA, 15 nt, Human
cuuuuaacauuuugu

SEQ ID NO: 3573922 - RNA, 20 nt, Human
cuuuuaacauuuuguucuua

SEQ ID NO: 3573923 - RNA, 16 nt, Human
cuuuuaaccaucugau

SEQ ID NO: 3573924 - RNA, 18 nt, Human
cuuuuaaccaucugauau

SEQ ID NO: 3573925 - RNA, 20 nt, Human
cuuuuaacuccucaauucca

SEQ ID NO: 3573926 - RNA, 21 nt, Human
cuuuuaacuccucaauuccaa

SEQ ID NO: 3573927 - RNA, 15 nt, Human
gaaccucugucucau

SEQ ID NO: 3573928 - RNA, 13 nt, Human
gaaccucuucccc

SEQ ID NO: 3573929 - RNA, 14 nt, Human
gaaccucuucccca

SEQ ID NO: 3573930 - RNA, 18 nt, Human
gaaccugaagaacuauuu

SEQ ID NO: 3573931 - RNA, 11 nt, Human
gaaccugaccc

SEQ ID NO: 3573932 - RNA, 12 nt, Human
gaaccugacccc

SEQ ID NO: 3573933 - RNA, 17 nt, Human
gaaccuggaccaaagcu

SEQ ID NO: 3573934 - RNA, 15 nt, Human
gaaccuggagagcua

SEQ ID NO: 3573935 - RNA, 15 nt, Human
gaaccuggagggcua

SEQ ID NO: 3573936 - RNA, 16 nt, Human
gaaccuggagggcuag

SEQ ID NO: 3573937 - RNA, 13 nt, Human
gaaccuggagggg

SEQ ID NO: 3573938 - RNA, 16 nt, Human
gaaccuggaggggcua

SEQ ID NO: 3573939 - RNA, 12 nt, Human
gaaccuguccuu

SEQ ID NO: 3573940 - RNA, 19 nt, Human
gaaccugugagcugcacca

SEQ ID NO: 3573941 - RNA, 12 nt, Human
gaaccugugagu

SEQ ID NO: 3573942 - RNA, 22 nt, Human
gaaccugugaguaaauauugag

SEQ ID NO: 3573943 - RNA, 15 nt, Human
gaaccuuccuuccug

SEQ ID NO: 3573944 - RNA, 18 nt, Human
gaaccuucuggccuccca

SEQ ID NO: 3573945 - RNA, 13 nt, Human
gaaccuugcuguc

SEQ ID NO: 3573946 - RNA, 17 nt, Human
gaaccuuggccugggcc

SEQ ID NO: 3573947 - RNA, 14 nt, Human
gaaccuugugccug

SEQ ID NO: 3573948 - RNA, 18 nt, Human
gaaccuugugccuggcuc

SEQ ID NO: 3573949 - RNA, 13 nt, Human
gaaccuuguuauu

SEQ ID NO: 3573950 - RNA, 16 nt, Human
gaacgaaaaugaaagc

SEQ ID NO: 3573951 - RNA, 21 nt, Human
gaacgaaccuuggccugggcc

SEQ ID NO: 3573952 - RNA, 22 nt, Human
gaacgaaccuuggccugggccg

SEQ ID NO: 3573953 - RNA, 21 nt, Human
gaacgacaauagcuuuacccu

SEQ ID NO: 3573954 - RNA, 12 nt, Human
gaacgcagcccu

SEQ ID NO: 3573955 - RNA, 16 nt, Human
gaacgcagcccuagag

SEQ ID NO: 3573956 - RNA, 16 nt, Human
gaacgcguugaaauug

SEQ ID NO: 3573957 - RNA, 23 nt, Human
gaacggacgagauaaugugaacu

SEQ ID NO: 3573958 - RNA, 22 nt, Human
gaacggagccccaggccucugu

SEQ ID NO: 3573959 - RNA, 17 nt, Human
gaacgguaaauuucugu

SEQ ID NO: 3573960 - RNA, 23 nt, Human
gaacguagucggcacagccuggu

SEQ ID NO: 3573961 - RNA, 14 nt, Human
gaacgugacugccc

SEQ ID NO: 3573962 - RNA, 16 nt, Human
gaacguggcucugcug

SEQ ID NO: 3573963 - RNA, 21 nt, Human
gaacguuugguucaaaugugu

SEQ ID NO: 3573964 - RNA, 16 nt, Human
gaacguuuucuaauug

SEQ ID NO: 3573965 - RNA, 18 nt, Human
gaacguuuucuaauugcu

SEQ ID NO: 3573966 - RNA, 15 nt, Human
gaacguuuuuccugu

SEQ ID NO: 3573967 - RNA, 13 nt, Human
gaacuaaacuagu

SEQ ID NO: 3573968 - RNA, 18 nt, Human
gaacuaaacuuucacacc

SEQ ID NO: 3573969 - RNA, 12 nt, Human
gaacuaaagaag

SEQ ID NO: 3573970 - RNA, 13 nt, Human
gaacuaacacgug

SEQ ID NO: 3573971 - RNA, 17 nt, Human
gaacuaagaaacuuuug

SEQ ID NO: 3573972 - RNA, 16 nt, Human
gaacuaauaaauacau

SEQ ID NO: 3573973 - RNA, 17 nt, Human
gaacuaauaaauacaua

SEQ ID NO: 3573974 - RNA, 20 nt, Human
gaacuaccuugguuccccca

SEQ ID NO: 3573975 - RNA, 22 nt, Human
gaacuacgcuugcucauuuuuu

SEQ ID NO: 3573976 - RNA, 22 nt, Human
gaacuagcauauaauucuauau

SEQ ID NO: 3573977 - RNA, 16 nt, Human
gaacuagggaagcuca

SEQ ID NO: 3573978 - RNA, 17 nt, Human
gaacuagugguggcucu

SEQ ID NO: 3573979 - RNA, 22 nt, Human
gaacuauuggagggugggagag

SEQ ID NO: 3573980 - RNA, 19 nt, Human
gaacucaaacuucuggcuc

SEQ ID NO: 3573981 - RNA, 20 nt, Human
gaacucaaauggggccagau

SEQ ID NO: 3573982 - RNA, 16 nt, Human
gaacucaacuuugaca

SEQ ID NO: 3573983 - RNA, 17 nt, Human
gaacucacucugggcug

SEQ ID NO: 3573984 - RNA, 14 nt, Human
gaacucagauccag

SEQ ID NO: 3573985 - RNA, 15 nt, Human
gaacucagccaagca

SEQ ID NO: 3573986 - RNA, 16 nt, Human
gaacucagcugucugu

SEQ ID NO: 3573987 - RNA, 16 nt, Human
gaacucauuccugccu

SEQ ID NO: 3573988 - RNA, 14 nt, Human
gaacucccaagaac

SEQ ID NO: 3573989 - RNA, 11 nt, Human
gaacucccagc

SEQ ID NO: 3573990 - RNA, 14 nt, Human
gaacucccuuucaa

SEQ ID NO: 3573991 - RNA, 16 nt, Human
gaacucccuuucaaca

SEQ ID NO: 3573992 - RNA, 13 nt, Human
gaacuccugaccu

SEQ ID NO: 3573993 - RNA, 14 nt, Human
gaacuccugaccuu

SEQ ID NO: 3573994 - RNA, 22 nt, Human
gaacuccuugauuuuagccuuc

SEQ ID NO: 3573995 - RNA, 12 nt, Human
gaacuccuuggc

SEQ ID NO: 3573996 - RNA, 20 nt, Human
gaacucugaacuuuggagag

SEQ ID NO: 3573997 - RNA, 20 nt, Human
gaacucugacaacagacuuc

SEQ ID NO: 3573998 - RNA, 13 nt, Human
gaacucugacaag

SEQ ID NO: 3573999 - RNA, 19 nt, Human
gaacucuggcuuccaggua

SEQ ID NO: 3574000 - RNA, 13 nt, Human
gaacucuggcuuu

SEQ ID NO: 3574001 - RNA, 18 nt, Human
gaacucugggcugccaug

SEQ ID NO: 3574002 - RNA, 18 nt, Human
gaacucugguggcacagg

SEQ ID NO: 3574003 - RNA, 18 nt, Human
gaacucuuagaaaugaag

SEQ ID NO: 3574004 - RNA, 14 nt, Human
gaacucuucucauu

SEQ ID NO: 3574005 - RNA, 17 nt, Human
gaacucuucucauuacu

SEQ ID NO: 3574006 - RNA, 15 nt, Human
gaacugaaaacauaa

SEQ ID NO: 3574007 - RNA, 19 nt, Human
gaacugaaaagagagcaga

SEQ ID NO: 3574008 - RNA, 14 nt, Human
gaacugaaaucaua

SEQ ID NO: 3574009 - RNA, 12 nt, Human
gaacugaacuca

SEQ ID NO: 3574010 - RNA, 18 nt, Human
gaacugacauuaaaauaa

SEQ ID NO: 3574011 - RNA, 14 nt, Human
gaacugagcuugga

SEQ ID NO: 3574012 - RNA, 19 nt, Human
gaacugauaguuacuguug

SEQ ID NO: 3574013 - RNA, 21 nt, Human
gaacugauucacaucucauuu

SEQ ID NO: 3574014 - RNA, 17 nt, Human
gaacugcacaugaagaa

SEQ ID NO: 3574015 - RNA, 17 nt, Human
gaacugcagaccugucc

SEQ ID NO: 3574016 - RNA, 19 nt, Human
gaacugcagcaaucuuuga

SEQ ID NO: 3574017 - RNA, 20 nt, Human
gaacugcagcaaucuuugaa

SEQ ID NO: 3574018 - RNA, 12 nt, Human
gaacugcaggcc

SEQ ID NO: 3574019 - RNA, 14 nt, Human
gaacugcaggcccu

SEQ ID NO: 3574020 - RNA, 23 nt, Human
gaacugcaggcccuggccucccc

SEQ ID NO: 3574021 - RNA, 17 nt, Human
gaacugcagucacugca

SEQ ID NO: 3574022 - RNA, 15 nt, Human
gaacugcaugcugcu

SEQ ID NO: 3574023 - RNA, 14 nt, Human
gaacugcauggacc

SEQ ID NO: 3574024 - RNA, 13 nt, Human
gaacugcugccac

SEQ ID NO: 3574025 - RNA, 17 nt, Human
gaacugcugggcuuggc

SEQ ID NO: 3574026 - RNA, 18 nt, Human
gaacuggacccuguugcu

SEQ ID NO: 3574027 - RNA, 23 nt, Human
gaacuggacccuguugcuaagcc

SEQ ID NO: 3574028 - RNA, 17 nt, Human
gaacuggagccaugggc

SEQ ID NO: 3574029 - RNA, 11 nt, Human
gaacuggaggc

SEQ ID NO: 3574030 - RNA, 11 nt, Human
gaacuggcugc

SEQ ID NO: 3574031 - RNA, 12 nt, Human
gaacuggcugca

SEQ ID NO: 3574032 - RNA, 22 nt, Human
gaacuggguacuuguggacaca

SEQ ID NO: 3574033 - RNA, 14 nt, Human
gaacuggucuuccu

SEQ ID NO: 3574034 - RNA, 15 nt, Human
gaacuguccagagag

SEQ ID NO: 3574035 - RNA, 18 nt, Human
gaacugucggaggaaaga

SEQ ID NO: 3574036 - RNA, 18 nt, Human
gaacugugcauagugcug

SEQ ID NO: 3574037 - RNA, 14 nt, Human
gaacuguguguaau

SEQ ID NO: 3574038 - RNA, 18 nt, Human
gaacuguguguaauuguu

SEQ ID NO: 3574039 - RNA, 15 nt, Human
gaacuguuguauaaa

SEQ ID NO: 3574040 - RNA, 16 nt, Human
gaacuguuguauaaau

SEQ ID NO: 3574041 - RNA, 18 nt, Human
gaacuuaaggcauuuguu

SEQ ID NO: 3574042 - RNA, 15 nt, Human
gaacuuacuauucau

SEQ ID NO: 3574043 - RNA, 21 nt, Human
gaacuuacuauucauuaaaug

SEQ ID NO: 3574044 - RNA, 18 nt, Human
gaacuuacuugcauacca

SEQ ID NO: 3574045 - RNA, 16 nt, Human
gaacuuagauuuuaca

SEQ ID NO: 3574046 - RNA, 17 nt, Human
gaacuuagauuuuacau

SEQ ID NO: 3574047 - RNA, 19 nt, Human
gaacuuagauuuuacauga

SEQ ID NO: 3574048 - RNA, 20 nt, Human
gaacuuagauuuuacaugaa

SEQ ID NO: 3574049 - RNA, 22 nt, Human
gaacuuagccauuuuucaaagc

SEQ ID NO: 3574050 - RNA, 20 nt, Human
gaacuuauccuaaaacaaau

SEQ ID NO: 3574051 - RNA, 15 nt, Human
gaacuuauucuguag

SEQ ID NO: 3574052 - RNA, 15 nt, Human
gaacuucaccugcaa

SEQ ID NO: 3574053 - RNA, 14 nt, Human
gaacuucagaaaga

SEQ ID NO: 3574054 - RNA, 13 nt, Human
gaacuucauggau

SEQ ID NO: 3574055 - RNA, 22 nt, Human
gaacuuccagauccuggaaauc

SEQ ID NO: 3574056 - RNA, 23 nt, Human
gaacuuccagguguuacuguaau

SEQ ID NO: 3574057 - RNA, 14 nt, Human
gaacuucuaauaua

SEQ ID NO: 3574058 - RNA, 16 nt, Human
gaacuucuccguccuc

SEQ ID NO: 3574059 - RNA, 19 nt, Human
gaacuucuccguccucgau

SEQ ID NO: 3574060 - RNA, 12 nt, Human
gaacuugaaauu

SEQ ID NO: 3574061 - RNA, 22 nt, Human
gaacuugaaauuugaauuuugu

SEQ ID NO: 3574062 - RNA, 16 nt, Human
gaacuugaagccugcu

SEQ ID NO: 3574063 - RNA, 21 nt, Human
gaacuugaagccugcuccuuc

SEQ ID NO: 3574064 - RNA, 22 nt, Human
gaacuugaagccugcuccuucc

SEQ ID NO: 3574065 - RNA, 13 nt, Human
gaacuugaggaca

SEQ ID NO: 3574066 - RNA, 15 nt, Human
gaacuugaggacaca

SEQ ID NO: 3574067 - RNA, 17 nt, Human
gaacuugaggacacaug

SEQ ID NO: 3574068 - RNA, 21 nt, Human
gaacuugcagcugauguugga

SEQ ID NO: 3574069 - RNA, 15 nt, Human
gaacuugcauuguga

SEQ ID NO: 3574070 - RNA, 17 nt, Human
gaacuugccugccuuuc

SEQ ID NO: 3574071 - RNA, 22 nt, Human
gaacuugccugccuuuccaucc

SEQ ID NO: 3574072 - RNA, 12 nt, Human
gaacuugcugcc

SEQ ID NO: 3574073 - RNA, 22 nt, Human
gaacuugcugcugagugcacca

SEQ ID NO: 3574074 - RNA, 22 nt, Human
gaagagucuugguuucucucua

SEQ ID NO: 3574075 - RNA, 13 nt, Human
gaagagugaaaua

SEQ ID NO: 3574076 - RNA, 16 nt, Human
gaagagugagagggca

SEQ ID NO: 3574077 - RNA, 15 nt, Human
gaagaguguacuggg

SEQ ID NO: 3574078 - RNA, 14 nt, Human
gaagagugugugug

SEQ ID NO: 3574079 - RNA, 21 nt, Human
gaagaguugccccgucucugu

SEQ ID NO: 3574080 - RNA, 14 nt, Human
gaagaguugugcac

SEQ ID NO: 3574081 - RNA, 14 nt, Human
gaagauaaguugga

SEQ ID NO: 3574082 - RNA, 19 nt, Human
gaagauaauuguugaaauu

SEQ ID NO: 3574083 - RNA, 12 nt, Human
gaagauacuuug

SEQ ID NO: 3574084 - RNA, 13 nt, Human
gaagauagaagaa

SEQ ID NO: 3574085 - RNA, 16 nt, Human
gaagauagcugugacu

SEQ ID NO: 3574086 - RNA, 22 nt, Human
gaagauauaacuauugcccagg

SEQ ID NO: 3574087 - RNA, 15 nt, Human
gaagauauacaugaa

SEQ ID NO: 3574088 - RNA, 17 nt, Human
gaagaucacgcuccccg

SEQ ID NO: 3574089 - RNA, 21 nt, Human
gaagaucauauacgugaaaau

SEQ ID NO: 3574090 - RNA, 14 nt, Human
gaagaucccccaga

SEQ ID NO: 3574091 - RNA, 22 nt, Human
gaagauccugcggguggggcuu

SEQ ID NO: 3574092 - RNA, 21 nt, Human
gaagaucucacucugcccccc

SEQ ID NO: 3574093 - RNA, 14 nt, Human
gaagaugcagcuca

SEQ ID NO: 3574094 - RNA, 23 nt, Human
gaagauguugaagaauacaguua

SEQ ID NO: 3574095 - RNA, 18 nt, Human
gaagauguugagaaaccu

SEQ ID NO: 3574096 - RNA, 22 nt, Human
gaagauguuuaacuuaaucaau

SEQ ID NO: 3574097 - RNA, 15 nt, Human
gaagauguuucaaaa

SEQ ID NO: 3574098 - RNA, 19 nt, Human
gaagauuauauauauuuuu

SEQ ID NO: 3574099 - RNA, 17 nt, Human
gaagauucuauguuaau

SEQ ID NO: 3574100 - RNA, 22 nt, Human
gaagauucuucccauucuccau

SEQ ID NO: 3574101 - RNA, 13 nt, Human
gaagauugugaau

SEQ ID NO: 3574102 - RNA, 16 nt, Human
gaagauuguuuaucua

SEQ ID NO: 3574103 - RNA, 22 nt, Human
gaagauuugaugcuggagaggu

SEQ ID NO: 3574104 - RNA, 14 nt, Human
gaagcaaaauuuuu

SEQ ID NO: 3574105 - RNA, 16 nt, Human
gaagcaaagcaccagc

SEQ ID NO: 3574106 - RNA, 17 nt, Human
gaagcaaaucgaaugaa

SEQ ID NO: 3574107 - RNA, 16 nt, Human
gaagcaacagaaaaaa

SEQ ID NO: 3574108 - RNA, 22 nt, Human
gaagcaagaggcaagcugaaau

SEQ ID NO: 3574109 - RNA, 23 nt, Human
gaagcaagaggcaagcugaaauu

SEQ ID NO: 3574110 - RNA, 18 nt, Human
gaagcaaggaagauauac

SEQ ID NO: 3574111 - RNA, 20 nt, Human
gaagcaaggaagauauacau

SEQ ID NO: 3574112 - RNA, 19 nt, Human
gaagcaauaaagaagagug

SEQ ID NO: 3574113 - RNA, 23 nt, Human
gaagcacacucuggucuuggaau

SEQ ID NO: 3574114 - RNA, 14 nt, Human
gaagcacagcuuca

SEQ ID NO: 3574115 - RNA, 20 nt, Human
gaagcacaugcaccuaccca

SEQ ID NO: 3574116 - RNA, 15 nt, Human
gaagcacaugccucu

SEQ ID NO: 3574117 - RNA, 17 nt, Human
gaagcacaugccucucu

SEQ ID NO: 3574118 - RNA, 21 nt, Human
gaagcacaugccucucucagg

SEQ ID NO: 3574119 - RNA, 14 nt, Human
gaagcacauguuua

SEQ ID NO: 3574120 - RNA, 20 nt, Human
gaagcacccauuaugcgcug

SEQ ID NO: 3574121 - RNA, 19 nt, Human
gaagcacgugguaaaacac

SEQ ID NO: 3574122 - RNA, 20 nt, Human
gaagcacuacaccuugccuu

SEQ ID NO: 3574123 - RNA, 21 nt, Human
gaagcacuacaccuugccuug

SEQ ID NO: 3574124 - RNA, 23 nt, Human
gaagcacuuugggauucuuucca

SEQ ID NO: 3574125 - RNA, 19 nt, Human
gaagcagaauaaagcaauu

SEQ ID NO: 3574126 - RNA, 20 nt, Human
gaagcagaauaaagcaauuu

SEQ ID NO: 3574127 - RNA, 21 nt, Human
gaagcagaauaaagcaauuuu

SEQ ID NO: 3574128 - RNA, 12 nt, Human
gaagcagagugg

SEQ ID NO: 3574129 - RNA, 20 nt, Human
gaagcagaugcaaagaggca

SEQ ID NO: 3574130 - RNA, 18 nt, Human
gaagcaggcuacacugac

SEQ ID NO: 3574131 - RNA, 17 nt, Human
gaagcaggguuucuuuu

SEQ ID NO: 3574132 - RNA, 19 nt, Human
gaagcaggugugagggcag

SEQ ID NO: 3574133 - RNA, 16 nt, Human
gaagcagguuaaaugu

SEQ ID NO: 3574134 - RNA, 18 nt, Human
gaagcagguugaggggcu

SEQ ID NO: 3574135 - RNA, 16 nt, Human
gaagcagugagccgca

SEQ ID NO: 3574136 - RNA, 15 nt, Human
gaagcagugcccagg

SEQ ID NO: 3574137 - RNA, 17 nt, Human
gaagcagugccuuccau

SEQ ID NO: 3574138 - RNA, 19 nt, Human
gaagcagugccuuccauaa

SEQ ID NO: 3574139 - RNA, 14 nt, Human
gaagcauccaggca

SEQ ID NO: 3574140 - RNA, 22 nt, Human
gaagcaucuuccagaaguguga

SEQ ID NO: 3574141 - RNA, 12 nt, Human
gaagcauguuuc

SEQ ID NO: 3574142 - RNA, 13 nt, Human
gaagcauguuuca

SEQ ID NO: 3574143 - RNA, 19 nt, Human
gaagcauguuucauguuuu

SEQ ID NO: 3574144 - RNA, 18 nt, Human
gaagcauuaacuucucug

SEQ ID NO: 3574145 - RNA, 21 nt, Human
gaagcauuaacuucucuggaa

SEQ ID NO: 3574146 - RNA, 15 nt, Human
gaagcauucagagag

SEQ ID NO: 3574147 - RNA, 17 nt, Human
gaagcauucagagagca

SEQ ID NO: 3574148 - RNA, 15 nt, Human
gaagcauuccuucuu

SEQ ID NO: 3574149 - RNA, 18 nt, Human
gaagcauuccuucuuuga

SEQ ID NO: 3574150 - RNA, 22 nt, Human
gaagcauuccuucuuugauaau

SEQ ID NO: 3574151 - RNA, 21 nt, Human
gaagcauucucauuggaaauu

SEQ ID NO: 3574152 - RNA, 15 nt, Human
gaagcauucucccca

SEQ ID NO: 3574153 - RNA, 13 nt, Human
gaagcauuguaaa

SEQ ID NO: 3574154 - RNA, 14 nt, Human
gaagcauuuguauu

SEQ ID NO: 3574155 - RNA, 18 nt, Human
gaagccaaaccucuguga

SEQ ID NO: 3574156 - RNA, 16 nt, Human
gaagccaaauuuauca

SEQ ID NO: 3574157 - RNA, 17 nt, Human
gaagccaacuuggcuuu

SEQ ID NO: 3574158 - RNA, 18 nt, Human
gaagccaacuuggcuuuc

SEQ ID NO: 3574159 - RNA, 21 nt, Human
gaagccaagggaaaggggugc

SEQ ID NO: 3574160 - RNA, 21 nt, Human
gaagccaaguggggugcuggg

SEQ ID NO: 3574161 - RNA, 22 nt, Human
gaagccaaguggggugcuggga

SEQ ID NO: 3574162 - RNA, 18 nt, Human
gaagccaauucagacagg

SEQ ID NO: 3574163 - RNA, 17 nt, Human
gaagccacagcccaggc

SEQ ID NO: 3574164 - RNA, 17 nt, Human
gaagccacccucccagc

SEQ ID NO: 3574165 - RNA, 22 nt, Human
gaagccacuuucuacaggccag

SEQ ID NO: 3574166 - RNA, 21 nt, Human
gaagccagcaggcucucaggc

SEQ ID NO: 3574167 - RNA, 22 nt, Human
gaagccagcaggcucucaggcc

SEQ ID NO: 3574168 - RNA, 12 nt, Human
gaagccagcugc

SEQ ID NO: 3574169 - RNA, 23 nt, Human
gaagccagcugccuaggauucac

SEQ ID NO: 3574170 - RNA, 22 nt, Human
gaagccagcuuguuuacaugcu

SEQ ID NO: 3574171 - RNA, 21 nt, Human
gaagccaggaauuucccagga

SEQ ID NO: 3574172 - RNA, 23 nt, Human
gaagccaggaauuucccaggacc

SEQ ID NO: 3574173 - RNA, 12 nt, Human
gaagccaggagc

SEQ ID NO: 3574174 - RNA, 14 nt, Human
gaagccaggagcaa

SEQ ID NO: 3574175 - RNA, 18 nt, Human
gaagccaggagcaaaugu

SEQ ID NO: 3574176 - RNA, 22 nt, Human
gaagccaggagcaaauguuucu

SEQ ID NO: 3574177 - RNA, 15 nt, Human
gaagccaucuuucuu

SEQ ID NO: 3574178 - RNA, 12 nt, Human
gaagcccagaau

SEQ ID NO: 3574179 - RNA, 14 nt, Human
gaagcccagagggu

SEQ ID NO: 3574180 - RNA, 12 nt, Human
gaagcccagcuc

SEQ ID NO: 3574181 - RNA, 13 nt, Human
gaagcccagcucc

SEQ ID NO: 3574182 - RNA, 14 nt, Human
gaagcccagcucca

SEQ ID NO: 3574183 - RNA, 16 nt, Human
gaagcccagcuccagg

SEQ ID NO: 3574184 - RNA, 17 nt, Human
gaagcccagcuccaggg

SEQ ID NO: 3574185 - RNA, 20 nt, Human
gaagcccagcuccagggcca

SEQ ID NO: 3574186 - RNA, 16 nt, Human
gaagcccaggaaaggc

SEQ ID NO: 3574187 - RNA, 19 nt, Human
gaagcccauccugaccagc

SEQ ID NO: 3574188 - RNA, 17 nt, Human
gaagccccacaugucca

SEQ ID NO: 3574189 - RNA, 20 nt, Human
gaagcccccaccgugggcag

SEQ ID NO: 3574190 - RNA, 14 nt, Human
gaagcccccagcua

SEQ ID NO: 3574191 - RNA, 22 nt, Human
gaagcccccagcuaagaaccug

SEQ ID NO: 3574192 - RNA, 14 nt, Human
gaagccccuucccc

SEQ ID NO: 3574193 - RNA, 17 nt, Human
gaagccccuuccccaug

SEQ ID NO: 3574194 - RNA, 19 nt, Human
gaagcccggcuccugguca

SEQ ID NO: 3574195 - RNA, 11 nt, Human
gaagcccuguu

SEQ ID NO: 3574196 - RNA, 13 nt, Human
gaagccgacucug

SEQ ID NO: 3574197 - RNA, 15 nt, Human
gaagccgacucuggc

SEQ ID NO: 3574198 - RNA, 16 nt, Human
gaagccgccaggaccg

SEQ ID NO: 3574199 - RNA, 14 nt, Human
gaagccgcugcugg

SEQ ID NO: 3574200 - RNA, 18 nt, Human
gaagccgcuggggccagu

SEQ ID NO: 3574201 - RNA, 18 nt, Human
gaagccggcggcccaagc

SEQ ID NO: 3574202 - RNA, 20 nt, Human
gaagccggcggcccaagccc

SEQ ID NO: 3574203 - RNA, 16 nt, Human
gaagccgggaacagac

SEQ ID NO: 3574204 - RNA, 16 nt, Human
gaagccgugcccugcc

SEQ ID NO: 3574205 - RNA, 14 nt, Human
gaagccuauuguaa

SEQ ID NO: 3574206 - RNA, 16 nt, Human
gaagccugggggccug

SEQ ID NO: 3574207 - RNA, 17 nt, Human
gaagccugggggccugg

SEQ ID NO: 3574208 - RNA, 22 nt, Human
gaagccuguaacacuccucugc

SEQ ID NO: 3574209 - RNA, 22 nt, Human
gaagccuguuuuguuggaaggu

SEQ ID NO: 3574210 - RNA, 14 nt, Human
gaagccuuagccag

SEQ ID NO: 3574211 - RNA, 19 nt, Human
gaagccuucaagcucugag

SEQ ID NO: 3574212 - RNA, 22 nt, Human
gaagccuucaagcucugaggga

SEQ ID NO: 3574213 - RNA, 10 nt, Human
gaagccuucc

SEQ ID NO: 3574214 - RNA, 21 nt, Human
gaagccuuggggcugaugcag

SEQ ID NO: 3574215 - RNA, 19 nt, Human
gaagccuuuacugacccug

SEQ ID NO: 3574216 - RNA, 22 nt, Human
gaagcgcgccacucgcuucccc

SEQ ID NO: 3574217 - RNA, 14 nt, Human
gaagcggauuucca

SEQ ID NO: 3574218 - RNA, 16 nt, Human
gaaggcuucucucugu

SEQ ID NO: 3574219 - RNA, 15 nt, Human
gaaggcuugggauuu

SEQ ID NO: 3574220 - RNA, 20 nt, Human
gaaggcuugggauuugcugu

SEQ ID NO: 3574221 - RNA, 21 nt, Human
gaaggcuugggauuugcugug

SEQ ID NO: 3574222 - RNA, 19 nt, Human
gaaggcuuguugugcuuuu

SEQ ID NO: 3574223 - RNA, 15 nt, Human
gaagggaagagacag

SEQ ID NO: 3574224 - RNA, 20 nt, Human
gaagggaccaaggcaaggca

SEQ ID NO: 3574225 - RNA, 17 nt, Human
gaagggaccuugaaggg

SEQ ID NO: 3574226 - RNA, 14 nt, Human
gaagggagccaagg

SEQ ID NO: 3574227 - RNA, 16 nt, Human
gaagggaggggcugug

SEQ ID NO: 3574228 - RNA, 10 nt, Human
gaagggaggu

SEQ ID NO: 3574229 - RNA, 13 nt, Human
gaagggagguggc

SEQ ID NO: 3574230 - RNA, 13 nt, Human
gaagggcaaguuu

SEQ ID NO: 3574231 - RNA, 19 nt, Human
gaagggcagggcugaggcc

SEQ ID NO: 3574232 - RNA, 18 nt, Human
gaagggcaucaugcaucu

SEQ ID NO: 3574233 - RNA, 19 nt, Human
gaagggcauccuucugccu

SEQ ID NO: 3574234 - RNA, 13 nt, Human
gaagggccagagc

SEQ ID NO: 3574235 - RNA, 11 nt, Human
gaagggccagu

SEQ ID NO: 3574236 - RNA, 14 nt, Human
gaagggccaguccu

SEQ ID NO: 3574237 - RNA, 19 nt, Human
gaagggcuagaaccuggag

SEQ ID NO: 3574238 - RNA, 22 nt, Human
gaagggcuagaaccuggagagc

SEQ ID NO: 3574239 - RNA, 13 nt, Human
gaagggcugcaug

SEQ ID NO: 3574240 - RNA, 19 nt, Human
gaaggggaagcacucgugu

SEQ ID NO: 3574241 - RNA, 18 nt, Human
gaaggggacccccgcccc

SEQ ID NO: 3574242 - RNA, 20 nt, Human
gaaggggacccccgcccccu

SEQ ID NO: 3574243 - RNA, 19 nt, Human
gaaggggacugccaccucc

SEQ ID NO: 3574244 - RNA, 22 nt, Human
gaaggggagauaaggguaucug

SEQ ID NO: 3574245 - RNA, 22 nt, Human
gaaggggaggaccucugggcuu

SEQ ID NO: 3574246 - RNA, 23 nt, Human
gaaggggcaaauucuuuugaauu

SEQ ID NO: 3574247 - RNA, 17 nt, Human
gaaggggccagaggcuc

SEQ ID NO: 3574248 - RNA, 12 nt, Human
gaaggggcugga

SEQ ID NO: 3574249 - RNA, 16 nt, Human
gaagggggauaugaau

SEQ ID NO: 3574250 - RNA, 19 nt, Human
gaagggggcaucuggccuu

SEQ ID NO: 3574251 - RNA, 14 nt, Human
gaagggggcggccu

SEQ ID NO: 3574252 - RNA, 15 nt, Human
gaagggggcugggac

SEQ ID NO: 3574253 - RNA, 18 nt, Human
gaagggggguugcagugg

SEQ ID NO: 3574254 - RNA, 18 nt, Human
gaaggggguccacccagc

SEQ ID NO: 3574255 - RNA, 13 nt, Human
gaaggguaaacaa

SEQ ID NO: 3574256 - RNA, 21 nt, Human
gaaggguccuucccucucccc

SEQ ID NO: 3574257 - RNA, 16 nt, Human
gaaggguuucucuauu

SEQ ID NO: 3574258 - RNA, 17 nt, Human
gaagguaaauaaaaaga

SEQ ID NO: 3574259 - RNA, 22 nt, Human
gaagguaaauaaaaagaaaggc

SEQ ID NO: 3574260 - RNA, 13 nt, Human
gaagguacuguau

SEQ ID NO: 3574261 - RNA, 15 nt, Human
gaagguagaauguuu

SEQ ID NO: 3574262 - RNA, 17 nt, Human
gaagguagaauguuuuc

SEQ ID NO: 3574263 - RNA, 20 nt, Human
gaagguagaauguuuucaaa

SEQ ID NO: 3574264 - RNA, 19 nt, Human
gaagguagcauucuuugga

SEQ ID NO: 3574265 - RNA, 14 nt, Human
gaaggucaccagca

SEQ ID NO: 3574266 - RNA, 17 nt, Human
gaaggucaccugagccc

SEQ ID NO: 3574267 - RNA, 14 nt, Human
gaaggucauuucca

SEQ ID NO: 3574268 - RNA, 16 nt, Human
gaagguccugcuauua

SEQ ID NO: 3574269 - RNA, 15 nt, Human
gaaggucggaggcuu

SEQ ID NO: 3574270 - RNA, 15 nt, Human
gaaggucucauucuu

SEQ ID NO: 3574271 - RNA, 15 nt, Human
gaaggucuugauuug

SEQ ID NO: 3574272 - RNA, 23 nt, Human
gaaggucuugauuuguuuuagaa

SEQ ID NO: 3574273 - RNA, 14 nt, Human
gaaggugacagcag

SEQ ID NO: 3574274 - RNA, 19 nt, Human
gaaggugauguugccaucc

SEQ ID NO: 3574275 - RNA, 16 nt, Human
gaaggugauuuauucu

SEQ ID NO: 3574276 - RNA, 21 nt, Human
gaaggugcugacggccaggga

SEQ ID NO: 3574277 - RNA, 19 nt, Human
gaaggugcuggagguggga

SEQ ID NO: 3574278 - RNA, 21 nt, Human
gaaggugcuggaggugggagc

SEQ ID NO: 3574279 - RNA, 23 nt, Human
gaagguggaccuuuuaaaguguu

SEQ ID NO: 3574280 - RNA, 23 nt, Human
gaagguggggguuggcuggguac

SEQ ID NO: 3574281 - RNA, 20 nt, Human
gaagguuaucagugcuuccc

SEQ ID NO: 3574282 - RNA, 13 nt, Human
gaagguugaagag

SEQ ID NO: 3574283 - RNA, 20 nt, Human
gaagguuugguguguggaga

SEQ ID NO: 3574284 - RNA, 19 nt, Human
gaagguuuuuguaaagauu

SEQ ID NO: 3574285 - RNA, 14 nt, Human
gaaguaaacugcag

SEQ ID NO: 3574286 - RNA, 13 nt, Human
gaaguaaacuuuu

SEQ ID NO: 3574287 - RNA, 15 nt, Human
gaaguaaagccauua

SEQ ID NO: 3574288 - RNA, 19 nt, Human
gaaguaaagccauuaaaug

SEQ ID NO: 3574289 - RNA, 15 nt, Human
gaaguaaagccucaa

SEQ ID NO: 3574290 - RNA, 19 nt, Human
gaaguaaccauuugcacug

SEQ ID NO: 3574291 - RNA, 15 nt, Human
gaaguaacuacaguu

SEQ ID NO: 3574292 - RNA, 16 nt, Human
gaaguaacuugucuua

SEQ ID NO: 3574293 - RNA, 21 nt, Human
gaaguacccguucacauuuuu

SEQ ID NO: 3574294 - RNA, 21 nt, Human
gaaguacguuauuguugacuu

SEQ ID NO: 3574295 - RNA, 20 nt, Human
gaaguagaaacaaaauacaa

SEQ ID NO: 3574296 - RNA, 13 nt, Human
gaaguagaaaggg

SEQ ID NO: 3574297 - RNA, 16 nt, Human
gaaguagcacaggcug

SEQ ID NO: 3574298 - RNA, 18 nt, Human
gaaguagcacaggcugag

SEQ ID NO: 3574299 - RNA, 18 nt, Human
gaaguagcuugcucccug

SEQ ID NO: 3574300 - RNA, 19 nt, Human
gaaguagcuugcucccugu

SEQ ID NO: 3574301 - RNA, 14 nt, Human
gaaguagcuuugca

SEQ ID NO: 3574302 - RNA, 16 nt, Human
gaaguaggggaagaau

SEQ ID NO: 3574303 - RNA, 14 nt, Human
gaaguaguccuugg

SEQ ID NO: 3574304 - RNA, 16 nt, Human
gaaguaguuaucaugu

SEQ ID NO: 3574305 - RNA, 20 nt, Human
gaaguaguucuguuuggugu

SEQ ID NO: 3574306 - RNA, 19 nt, Human
gaaguaguuuguauaacuu

SEQ ID NO: 3574307 - RNA, 14 nt, Human
gaaguauccuucag

SEQ ID NO: 3574308 - RNA, 17 nt, Human
gaaguaucuaaaagugu

SEQ ID NO: 3574309 - RNA, 19 nt, Human
gaaguaucuaaaaguguca

SEQ ID NO: 3574310 - RNA, 21 nt, Human
gaaguauguauauuaaaaaag

SEQ ID NO: 3574311 - RNA, 19 nt, Human
gaaguauuuugcuggaaua

SEQ ID NO: 3574312 - RNA, 15 nt, Human
gaaguauuuuuagaa

SEQ ID NO: 3574313 - RNA, 20 nt, Human
gaagucaagcccagccacgu

SEQ ID NO: 3574314 - RNA, 16 nt, Human
gaagucacagggcagu

SEQ ID NO: 3574315 - RNA, 20 nt, Human
gaagucacagggcaguaccu

SEQ ID NO: 3574316 - RNA, 22 nt, Human
gaagucaccuuguguguuccaa

SEQ ID NO: 3574317 - RNA, 18 nt, Human
gaagucauaccaaugaaa

SEQ ID NO: 3574318 - RNA, 15 nt, Human
gaagucaugaagccc

SEQ ID NO: 3574319 - RNA, 21 nt, Human
gaagucaugcuccccugugcc

SEQ ID NO: 3574320 - RNA, 17 nt, Human
gaagucauuaaacuggu

SEQ ID NO: 3574321 - RNA, 22 nt, Human
gaaguccaagcauuuagaugua

SEQ ID NO: 3574322 - RNA, 23 nt, Human
gaaguccccaggccccaggaagc

SEQ ID NO: 3574323 - RNA, 22 nt, Human
gaagucguccuuacuccugugg

SEQ ID NO: 3574324 - RNA, 23 nt, Human
gaagucguccuuacuccuguggg

SEQ ID NO: 3574325 - RNA, 18 nt, Human
gaagucgucuuaacucac

SEQ ID NO: 3574326 - RNA, 18 nt, Human
gaagucucuagguucuga

SEQ ID NO: 3574327 - RNA, 21 nt, Human
gaagucucugaagugaaacug

SEQ ID NO: 3574328 - RNA, 15 nt, Human
gaagucuucaugaaa

SEQ ID NO: 3574329 - RNA, 13 nt, Human
gaagucuucuauu

SEQ ID NO: 3574330 - RNA, 16 nt, Human
gaagucuuuguacaga

SEQ ID NO: 3574331 - RNA, 20 nt, Human
gaagucuuuguacagacaac

SEQ ID NO: 3574332 - RNA, 14 nt, Human
gaagugaaacugcu

SEQ ID NO: 3574333 - RNA, 15 nt, Human
gaagugaaugcuggg

SEQ ID NO: 3574334 - RNA, 16 nt, Human
gaagugaaugcuggga

SEQ ID NO: 3574335 - RNA, 18 nt, Human
gaagugacagggaagcua

SEQ ID NO: 3574336 - RNA, 13 nt, Human
gaagugacuuugg

SEQ ID NO: 3574337 - RNA, 20 nt, Human
gaagugacuuuggcugcaug

SEQ ID NO: 3574338 - RNA, 21 nt, Human
gaagugacuuuggcugcaugc

SEQ ID NO: 3574339 - RNA, 16 nt, Human
gaagugagcacagccu

SEQ ID NO: 3574340 - RNA, 16 nt, Human
gaagugaggaagccag

SEQ ID NO: 3574341 - RNA, 14 nt, Human
gaagugaggcauug

SEQ ID NO: 3574342 - RNA, 16 nt, Human
gaagugcauuucugaa

SEQ ID NO: 3574343 - RNA, 23 nt, Human
gaagugcauuucugaauagaaau

SEQ ID NO: 3574344 - RNA, 16 nt, Human
gaagugcccuuccugc

SEQ ID NO: 3574345 - RNA, 22 nt, Human
gaagugcgggguaggggaagaa

SEQ ID NO: 3574346 - RNA, 19 nt, Human
gaagugcuccccucugaaa

SEQ ID NO: 3574347 - RNA, 13 nt, Human
gaagugcuuggaa

SEQ ID NO: 3574348 - RNA, 19 nt, Human
gaagugcuuggaacauacu

SEQ ID NO: 3574349 - RNA, 22 nt, Human
gaaguggaccaggacaggacca

SEQ ID NO: 3574350 - RNA, 18 nt, Human
gaaguggacuggccccug

SEQ ID NO: 3574351 - RNA, 19 nt, Human
gaagugggccaggacaggc

SEQ ID NO: 3574352 - RNA, 21 nt, Human
gaagugggccaggacaggccc

SEQ ID NO: 3574353 - RNA, 18 nt, Human
gaagugguaggaaagccu

SEQ ID NO: 3574354 - RNA, 14 nt, Human
gaaguguaacagcu

SEQ ID NO: 3574355 - RNA, 17 nt, Human
gaaguguaacagcugag

SEQ ID NO: 3574356 - RNA, 17 nt, Human
gaaguguaggcagacac

SEQ ID NO: 3574357 - RNA, 14 nt, Human
gaaguguauaauau

SEQ ID NO: 3574358 - RNA, 17 nt, Human
gaaguguauaauauaaa

SEQ ID NO: 3574359 - RNA, 21 nt, Human
gaaguguauaauauaaaaaau

SEQ ID NO: 3574360 - RNA, 14 nt, Human
gaagugucauguuu

SEQ ID NO: 3574361 - RNA, 20 nt, Human
gaagugugccuucucucucc

SEQ ID NO: 3574362 - RNA, 12 nt, Human
gaauauugagca

SEQ ID NO: 3574363 - RNA, 13 nt, Human
gaauauugccaau

SEQ ID NO: 3574364 - RNA, 11 nt, Human
gaauauugcug

SEQ ID NO: 3574365 - RNA, 13 nt, Human
gaauauugcugau

SEQ ID NO: 3574366 - RNA, 15 nt, Human
gaauauugcugaugg

SEQ ID NO: 3574367 - RNA, 23 nt, Human
gaauauugcugauggugcaauga

SEQ ID NO: 3574368 - RNA, 13 nt, Human
gaauauuguccau

SEQ ID NO: 3574369 - RNA, 12 nt, Human
gaauauuguguu

SEQ ID NO: 3574370 - RNA, 18 nt, Human
gaauauuuauuaccucug

SEQ ID NO: 3574371 - RNA, 21 nt, Human
gaauauuuauuaccucugaua

SEQ ID NO: 3574372 - RNA, 10 nt, Human
gaauauuuga

SEQ ID NO: 3574373 - RNA, 13 nt, Human
gaauauuugaauc

SEQ ID NO: 3574374 - RNA, 20 nt, Human
gaauauuugucgauauuucc

SEQ ID NO: 3574375 - RNA, 16 nt, Human
gaauauuuuaacuucc

SEQ ID NO: 3574376 - RNA, 20 nt, Human
gaauauuuuauucaagguaa

SEQ ID NO: 3574377 - RNA, 21 nt, Human
gaauauuuucaguaauguuau

SEQ ID NO: 3574378 - RNA, 16 nt, Human
gaaucaaagacaugga

SEQ ID NO: 3574379 - RNA, 17 nt, Human
gaaucaaagacauggaa

SEQ ID NO: 3574380 - RNA, 17 nt, Human
gaaucaaagcaaugcau

SEQ ID NO: 3574381 - RNA, 18 nt, Human
gaaucaaagcaaugcauu

SEQ ID NO: 3574382 - RNA, 22 nt, Human
gaaucaaagcaguuaacuuuaa

SEQ ID NO: 3574383 - RNA, 17 nt, Human
gaaucaacagggcagca

SEQ ID NO: 3574384 - RNA, 15 nt, Human
gaaucaagagcugcc

SEQ ID NO: 3574385 - RNA, 16 nt, Human
gaaucaagagcugccc

SEQ ID NO: 3574386 - RNA, 16 nt, Human
gaaucaagggucaggc

SEQ ID NO: 3574387 - RNA, 11 nt, Human
gaaucacaggc

SEQ ID NO: 3574388 - RNA, 14 nt, Human
gaaucacaggcugg

SEQ ID NO: 3574389 - RNA, 15 nt, Human
gaaucacaggcuggg

SEQ ID NO: 3574390 - RNA, 18 nt, Human
gaaucacaggcugggcug

SEQ ID NO: 3574391 - RNA, 20 nt, Human
gaaucaccuaauuaauuuca

SEQ ID NO: 3574392 - RNA, 23 nt, Human
gaaucaccuaauuaauuucagua

SEQ ID NO: 3574393 - RNA, 18 nt, Human
gaaucacucuuguggaug

SEQ ID NO: 3574394 - RNA, 17 nt, Human
gaaucacuguuuuuaga

SEQ ID NO: 3574395 - RNA, 23 nt, Human
gaaucacuguuuuuagacaccuu

SEQ ID NO: 3574396 - RNA, 13 nt, Human
gaaucagaacuca

SEQ ID NO: 3574397 - RNA, 18 nt, Human
gaaucagacccuacccca

SEQ ID NO: 3574398 - RNA, 23 nt, Human
gaaucagacccuaccccaccacg

SEQ ID NO: 3574399 - RNA, 19 nt, Human
gaaucagacuucacacugc

SEQ ID NO: 3574400 - RNA, 16 nt, Human
gaaucagaguagaaau

SEQ ID NO: 3574401 - RNA, 19 nt, Human
gaaucagaucauuucaaaa

SEQ ID NO: 3574402 - RNA, 23 nt, Human
gaaucaggaauauuuuccaaaga

SEQ ID NO: 3574403 - RNA, 19 nt, Human
gaaucaguauaaacaaagu

SEQ ID NO: 3574404 - RNA, 18 nt, Human
gaaucaguccuagaaugu

SEQ ID NO: 3574405 - RNA, 20 nt, Human
gaaucaguccuagaauguuu

SEQ ID NO: 3574406 - RNA, 19 nt, Human
gaaucaguuuccaauuauu

SEQ ID NO: 3574407 - RNA, 17 nt, Human
gaaucaucaggacccug

SEQ ID NO: 3574408 - RNA, 19 nt, Human
gaaucaugugaacccggga

SEQ ID NO: 3574409 - RNA, 21 nt, Human
gaaucaugugcgucaguccaa

SEQ ID NO: 3574410 - RNA, 13 nt, Human
gaaucauguuucu

SEQ ID NO: 3574411 - RNA, 14 nt, Human
gaaucauguuucuu

SEQ ID NO: 3574412 - RNA, 17 nt, Human
gaaucauguuucuuuga

SEQ ID NO: 3574413 - RNA, 17 nt, Human
gaaucauuauuuauuaa

SEQ ID NO: 3574414 - RNA, 20 nt, Human
gaaucauuguauguggucau

SEQ ID NO: 3574415 - RNA, 19 nt, Human
gaaucauuguccagagcug

SEQ ID NO: 3574416 - RNA, 14 nt, Human
gaauccaagccucc

SEQ ID NO: 3574417 - RNA, 15 nt, Human
gaauccaagccucca

SEQ ID NO: 3574418 - RNA, 16 nt, Human
gaauccaagcucccug

SEQ ID NO: 3574419 - RNA, 16 nt, Human
gaauccacauuucuaa

SEQ ID NO: 3574420 - RNA, 14 nt, Human
gaauccaugcuugg

SEQ ID NO: 3574421 - RNA, 15 nt, Human
gaaucccagccggcc

SEQ ID NO: 3574422 - RNA, 14 nt, Human
gaaucccccuugcc

SEQ ID NO: 3574423 - RNA, 18 nt, Human
gaaucccccuugccaccc

SEQ ID NO: 3574424 - RNA, 14 nt, Human
gaauccgcccaucu

SEQ ID NO: 3574425 - RNA, 20 nt, Human
gaauccuaggcuccacccca

SEQ ID NO: 3574426 - RNA, 22 nt, Human
gaauccuauauagaaugcugca

SEQ ID NO: 3574427 - RNA, 17 nt, Human
gaauccuggcagcccag

SEQ ID NO: 3574428 - RNA, 19 nt, Human
gaauccuuuggugccaacu

SEQ ID NO: 3574429 - RNA, 16 nt, Human
gaaucgaggaaccaga

SEQ ID NO: 3574430 - RNA, 21 nt, Human
gaaucgaugggggaugcuuca

SEQ ID NO: 3574431 - RNA, 22 nt, Human
gaaucgaugggggaugcuucau

SEQ ID NO: 3574432 - RNA, 15 nt, Human
gaaucggaaucucug

SEQ ID NO: 3574433 - RNA, 22 nt, Human
gaaucuacccccagauccaagc

SEQ ID NO: 3574434 - RNA, 15 nt, Human
gaaucuagaagaaau

SEQ ID NO: 3574435 - RNA, 18 nt, Human
gaaucuagaagaaaugaa

SEQ ID NO: 3574436 - RNA, 20 nt, Human
gaaucuagaagaaaugaaau

SEQ ID NO: 3574437 - RNA, 18 nt, Human
gaaucuagccagugaaca

SEQ ID NO: 3574438 - RNA, 12 nt, Human
gaaucuaugcca

SEQ ID NO: 3574439 - RNA, 21 nt, Human
gaaucuauuauacuguauuaa

SEQ ID NO: 3574440 - RNA, 19 nt, Human
gaaucuauuuaucuucauu

SEQ ID NO: 3574441 - RNA, 12 nt, Human
gaaucuauuuuc

SEQ ID NO: 3574442 - RNA, 18 nt, Human
gaaucuauuuucuaugua

SEQ ID NO: 3574443 - RNA, 23 nt, Human
gaaucuauuuucuauguacuagu

SEQ ID NO: 3574444 - RNA, 15 nt, Human
gaaucucaaaauuag

SEQ ID NO: 3574445 - RNA, 17 nt, Human
gaaucucaacaugucuc

SEQ ID NO: 3574446 - RNA, 17 nt, Human
gaaucucccacuccagc

SEQ ID NO: 3574447 - RNA, 18 nt, Human
gaaucucugaauuugaga

SEQ ID NO: 3574448 - RNA, 13 nt, Human
gaaucucugugcc

SEQ ID NO: 3574449 - RNA, 13 nt, Human
gaaucugaaugua

SEQ ID NO: 3574450 - RNA, 23 nt, Human
gaaucugagagaugcuguagaca

SEQ ID NO: 3574451 - RNA, 15 nt, Human
gaaucugcucacuuu

SEQ ID NO: 3574452 - RNA, 19 nt, Human
gaaucugugggucugggag

SEQ ID NO: 3574453 - RNA, 21 nt, Human
gaaucuuaagguguagccaca

SEQ ID NO: 3574454 - RNA, 22 nt, Human
gaaucuuaagguguagccacac

SEQ ID NO: 3574455 - RNA, 20 nt, Human
gaaucuugguuugccuucca

SEQ ID NO: 3574456 - RNA, 23 nt, Human
gaaucuugguuugccuuccagaa

SEQ ID NO: 3574457 - RNA, 13 nt, Human
gaaucuugucuca

SEQ ID NO: 3574458 - RNA, 16 nt, Human
gaaucuuguuuugaaa

SEQ ID NO: 3574459 - RNA, 18 nt, Human
gaaucuuuaauuaaaacc

SEQ ID NO: 3574460 - RNA, 22 nt, Human
gaaucuuuagagaaguauacau

SEQ ID NO: 3574461 - RNA, 17 nt, Human
gaaucuuuauugagaaa

SEQ ID NO: 3574462 - RNA, 14 nt, Human
gaaucuuuguuaag

SEQ ID NO: 3574463 - RNA, 23 nt, Human
gaaucuuuuucagaaacagugag

SEQ ID NO: 3574464 - RNA, 15 nt, Human
gaaugaaaaaacagu

SEQ ID NO: 3574465 - RNA, 13 nt, Human
gaaugaaaaauga

SEQ ID NO: 3574466 - RNA, 21 nt, Human
gaaugaaaaaugaaagaugau

SEQ ID NO: 3574467 - RNA, 22 nt, Human
gaaugaaaaaugaaagaugauu

SEQ ID NO: 3574468 - RNA, 22 nt, Human
gaaugaaaaauuuaagcauugu

SEQ ID NO: 3574469 - RNA, 15 nt, Human
gaaugaaaacucauu

SEQ ID NO: 3574470 - RNA, 20 nt, Human
gaaugaaaagacaagaaaau

SEQ ID NO: 3574471 - RNA, 14 nt, Human
gaaugaaaccccca

SEQ ID NO: 3574472 - RNA, 20 nt, Human
gaaugaaacccccacacaca

SEQ ID NO: 3574473 - RNA, 21 nt, Human
gaaugaaacccccacacacac

SEQ ID NO: 3574474 - RNA, 22 nt, Human
gaaugaaagaguaaaggaaaug

SEQ ID NO: 3574475 - RNA, 14 nt, Human
gaaugaaagcuccu

SEQ ID NO: 3574476 - RNA, 15 nt, Human
gaaugaaauacuguu

SEQ ID NO: 3574477 - RNA, 16 nt, Human
gaaugaacaaagacca

SEQ ID NO: 3574478 - RNA, 13 nt, Human
gaaugaacaaauu

SEQ ID NO: 3574479 - RNA, 13 nt, Human
gaaugaacaaccu

SEQ ID NO: 3574480 - RNA, 21 nt, Human
gaaugaagauacugaaauaaa

SEQ ID NO: 3574481 - RNA, 16 nt, Human
gaaugaagcaguauuu

SEQ ID NO: 3574482 - RNA, 16 nt, Human
gaaugaagcuugugua

SEQ ID NO: 3574483 - RNA, 14 nt, Human
gaaugaagguuuuu

SEQ ID NO: 3574484 - RNA, 21 nt, Human
gaaugaagguuuuuguaaaga

SEQ ID NO: 3574485 - RNA, 14 nt, Human
gaaugaauggcuaa

SEQ ID NO: 3574486 - RNA, 14 nt, Human
gaaugaaugucagu

SEQ ID NO: 3574487 - RNA, 16 nt, Human
gaaugacaacagaagc

SEQ ID NO: 3574488 - RNA, 12 nt, Human
gaaugacacugu

SEQ ID NO: 3574489 - RNA, 18 nt, Human
gaaugaccuuguaaugua

SEQ ID NO: 3574490 - RNA, 19 nt, Human
gaaugaccuuguaauguaa

SEQ ID NO: 3574491 - RNA, 20 nt, Human
gaaugacuuccccaauaucu

SEQ ID NO: 3574492 - RNA, 23 nt, Human
gaaugagagacacacugaagaag

SEQ ID NO: 3574493 - RNA, 20 nt, Human
gaaugagauuaauuccuuuc

SEQ ID NO: 3574494 - RNA, 20 nt, Human
gaaugagccuacgcugaaga

SEQ ID NO: 3574495 - RNA, 22 nt, Human
gaaugagccuacgcugaagaug

SEQ ID NO: 3574496 - RNA, 14 nt, Human
gaaugaggaaaauu

SEQ ID NO: 3574497 - RNA, 13 nt, Human
gaaugaggaggaa

SEQ ID NO: 3574498 - RNA, 14 nt, Human
gaaugaggaggaag

SEQ ID NO: 3574499 - RNA, 14 nt, Human
gaaugaggcuugcu

SEQ ID NO: 3574500 - RNA, 19 nt, Human
gaaugaggguuugagagag

SEQ ID NO: 3574501 - RNA, 17 nt, Human
gaaugaggucccaggca

SEQ ID NO: 3574502 - RNA, 15 nt, Human
gaaugaggucugggc

SEQ ID NO: 3574503 - RNA, 15 nt, Human
gaaugauaugcauuu

SEQ ID NO: 3574504 - RNA, 16 nt, Human
gaaugaucucuucuuu

SEQ ID NO: 3574505 - RNA, 17 nt, Human
gaaugaucucuucuuuu

SEQ ID NO: 3574506 - RNA, 16 nt, Human
gaaugaucugauugac

SEQ ID NO: 3574507 - RNA, 18 nt, Human
gacuccaggcccaaggcu

SEQ ID NO: 3574508 - RNA, 19 nt, Human
gacuccaggcccaaggcuc

SEQ ID NO: 3574509 - RNA, 21 nt, Human
gacuccaucucucauccucca

SEQ ID NO: 3574510 - RNA, 17 nt, Human
gacucccaaagagcugc

SEQ ID NO: 3574511 - RNA, 18 nt, Human
gacucccaaagagcugcc

SEQ ID NO: 3574512 - RNA, 19 nt, Human
gacucccaaagagcugccu

SEQ ID NO: 3574513 - RNA, 22 nt, Human
gacucccaaguuuccauagcaa

SEQ ID NO: 3574514 - RNA, 15 nt, Human
gacucccaugaagcc

SEQ ID NO: 3574515 - RNA, 16 nt, Human
gacuccccaggccagg

SEQ ID NO: 3574516 - RNA, 18 nt, Human
gacuccccaggccaggcc

SEQ ID NO: 3574517 - RNA, 19 nt, Human
gacucccuccucaccucug

SEQ ID NO: 3574518 - RNA, 23 nt, Human
gacucccuccucaccucuggacu

SEQ ID NO: 3574519 - RNA, 15 nt, Human
gacuccgcuggaggu

SEQ ID NO: 3574520 - RNA, 15 nt, Human
gacuccggcugugcu

SEQ ID NO: 3574521 - RNA, 16 nt, Human
gacuccggcugugcug

SEQ ID NO: 3574522 - RNA, 21 nt, Human
gacuccggcugugcugggaga

SEQ ID NO: 3574523 - RNA, 23 nt, Human
gacuccggguuugagauggacac

SEQ ID NO: 3574524 - RNA, 16 nt, Human
gacuccguuggccacu

SEQ ID NO: 3574525 - RNA, 16 nt, Human
gacuccuaccugcccu

SEQ ID NO: 3574526 - RNA, 14 nt, Human
gacuccuagcuguc

SEQ ID NO: 3574527 - RNA, 13 nt, Human
gacuccuccccac

SEQ ID NO: 3574528 - RNA, 17 nt, Human
gacuccucggccuggcu

SEQ ID NO: 3574529 - RNA, 14 nt, Human
gacuccugcaggca

SEQ ID NO: 3574530 - RNA, 22 nt, Human
gacuccuggucugaaaauguug

SEQ ID NO: 3574531 - RNA, 22 nt, Human
gacuccuguggagaugacuugg

SEQ ID NO: 3574532 - RNA, 19 nt, Human
gacucggggugcuuccuug

SEQ ID NO: 3574533 - RNA, 15 nt, Human
gacucuaaagaccaa

SEQ ID NO: 3574534 - RNA, 15 nt, Human
gacucuaaagucugu

SEQ ID NO: 3574535 - RNA, 23 nt, Human
gacucuaaauucuuuauuucugu

SEQ ID NO: 3574536 - RNA, 16 nt, Human
gacucuacacugugaa

SEQ ID NO: 3574537 - RNA, 21 nt, Human
gacucuacagaggccaugggc

SEQ ID NO: 3574538 - RNA, 16 nt, Human
gacucuagaguccaag

SEQ ID NO: 3574539 - RNA, 18 nt, Human
gacucuaguacugugaau

SEQ ID NO: 3574540 - RNA, 14 nt, Human
gacucuaguauuua

SEQ ID NO: 3574541 - RNA, 14 nt, Human
gacucucaaaucuu

SEQ ID NO: 3574542 - RNA, 14 nt, Human
gacucucagucucu

SEQ ID NO: 3574543 - RNA, 18 nt, Human
gacucucagucucugagc

SEQ ID NO: 3574544 - RNA, 20 nt, Human
gacucucagucucugagcag

SEQ ID NO: 3574545 - RNA, 14 nt, Human
gacucucugugacc

SEQ ID NO: 3574546 - RNA, 14 nt, Human
gacucugaaaucug

SEQ ID NO: 3574547 - RNA, 18 nt, Human
gacucugaaaucugaaga

SEQ ID NO: 3574548 - RNA, 18 nt, Human
gacucugaagccucuggg

SEQ ID NO: 3574549 - RNA, 23 nt, Human
gacucugaccucuuggccacaga

SEQ ID NO: 3574550 - RNA, 19 nt, Human
gacucugaggcucuuucug

SEQ ID NO: 3574551 - RNA, 20 nt, Human
gacucugcacaugucuugua

SEQ ID NO: 3574552 - RNA, 18 nt, Human
gacucugcagccucagag

SEQ ID NO: 3574553 - RNA, 22 nt, Human
gacucugcaucccagcaccugc

SEQ ID NO: 3574554 - RNA, 18 nt, Human
gacucugcccccugcugg

SEQ ID NO: 3574555 - RNA, 19 nt, Human
gacucugcccccugcuggc

SEQ ID NO: 3574556 - RNA, 21 nt, Human
gacucugcccccugcuggcuc

SEQ ID NO: 3574557 - RNA, 20 nt, Human
gacucuggacuuucucuaau

SEQ ID NO: 3574558 - RNA, 13 nt, Human
gacucuggcccug

SEQ ID NO: 3574559 - RNA, 16 nt, Human
gacucuggcuuggccu

SEQ ID NO: 3574560 - RNA, 17 nt, Human
gacucuggcuuggccua

SEQ ID NO: 3574561 - RNA, 21 nt, Human
gacucugggcuauggacacag

SEQ ID NO: 3574562 - RNA, 22 nt, Human
gacucugggcuauggacacagg

SEQ ID NO: 3574563 - RNA, 13 nt, Human
gacucuggguccu

SEQ ID NO: 3574564 - RNA, 14 nt, Human
gacucuggguccuu

SEQ ID NO: 3574565 - RNA, 19 nt, Human
gacucuggguccuuccuga

SEQ ID NO: 3574566 - RNA, 18 nt, Human
gacucuggugccuccaga

SEQ ID NO: 3574567 - RNA, 24 nt, Human
gacucuguccugaaggccugaggu

SEQ ID NO: 3574568 - RNA, 19 nt, Human
gacucugucuaccuggucu

SEQ ID NO: 3574569 - RNA, 19 nt, Human
gacucugucucaaaaaaac

SEQ ID NO: 3574570 - RNA, 17 nt, Human
gacucugugcuggccag

SEQ ID NO: 3574571 - RNA, 17 nt, Human
gacucuguggggccuug

SEQ ID NO: 3574572 - RNA, 18 nt, Human
gacucuguggggccuugg

SEQ ID NO: 3574573 - RNA, 18 nt, Human
gacucuuaagaagacugc

SEQ ID NO: 3574574 - RNA, 16 nt, Human
gacucuugaguuguuu

SEQ ID NO: 3574575 - RNA, 12 nt, Human
gacucuugcucu

SEQ ID NO: 3574576 - RNA, 16 nt, Human
gacucuuucugagugc

SEQ ID NO: 3574577 - RNA, 18 nt, Human
gacucuuugguggcuuug

SEQ ID NO: 3574578 - RNA, 20 nt, Human
gacucuuugguggcuuugca

SEQ ID NO: 3574579 - RNA, 17 nt, Human
gacucuuuuccuucccu

SEQ ID NO: 3574580 - RNA, 20 nt, Human
gacucuuuuuagggccaggc

SEQ ID NO: 3574581 - RNA, 21 nt, Human
gacucuuuuuguaccugguga

SEQ ID NO: 3574582 - RNA, 18 nt, Human
gacugaaaaccucuccuc

SEQ ID NO: 3574583 - RNA, 20 nt, Human
gacugaaaauauauaagcuc

SEQ ID NO: 3574584 - RNA, 18 nt, Human
gacugaauuguccccagu

SEQ ID NO: 3574585 - RNA, 16 nt, Human
gacugaauuucuuuug

SEQ ID NO: 3574586 - RNA, 21 nt, Human
gacugacaguuuacagacgcu

SEQ ID NO: 3574587 - RNA, 22 nt, Human
gacugaccaauauuguacaguu

SEQ ID NO: 3574588 - RNA, 19 nt, Human
gacugaccuugaugagcug

SEQ ID NO: 3574589 - RNA, 14 nt, Human
gacugacugaggca

SEQ ID NO: 3574590 - RNA, 14 nt, Human
gacugagccagucc

SEQ ID NO: 3574591 - RNA, 23 nt, Human
gacugagccuggcccauagaaac

SEQ ID NO: 3574592 - RNA, 13 nt, Human
gacugaggccuga

SEQ ID NO: 3574593 - RNA, 14 nt, Human
gacugaggccugag

SEQ ID NO: 3574594 - RNA, 19 nt, Human
gacugaguaagaaaugcug

SEQ ID NO: 3574595 - RNA, 21 nt, Human
gacugaguacguugugcauuu

SEQ ID NO: 3574596 - RNA, 22 nt, Human
gacugaguccucguagccaucu

SEQ ID NO: 3574597 - RNA, 13 nt, Human
gacugagucuccc

SEQ ID NO: 3574598 - RNA, 15 nt, Human
gacugagugggaagc

SEQ ID NO: 3574599 - RNA, 14 nt, Human
gacugaugucuccu

SEQ ID NO: 3574600 - RNA, 16 nt, Human
gacugaugucuccuaa

SEQ ID NO: 3574601 - RNA, 18 nt, Human
gacugaugucuccuaagc

SEQ ID NO: 3574602 - RNA, 23 nt, Human
gacugauguuaggcugggcccag

SEQ ID NO: 3574603 - RNA, 16 nt, Human
gacugcacccaggagg

SEQ ID NO: 3574604 - RNA, 21 nt, Human
gacugcauguaccauuugcau

SEQ ID NO: 3574605 - RNA, 13 nt, Human
gacugccaagcca

SEQ ID NO: 3574606 - RNA, 17 nt, Human
gacugccauauuaaauu

SEQ ID NO: 3574607 - RNA, 18 nt, Human
gacugccccaacuccugg

SEQ ID NO: 3574608 - RNA, 19 nt, Human
gacugccccgugcagacug

SEQ ID NO: 3574609 - RNA, 20 nt, Human
gacugccccgugcagacugg

SEQ ID NO: 3574610 - RNA, 22 nt, Human
gacugcgggaugguccuggggc

SEQ ID NO: 3574611 - RNA, 15 nt, Human
gacugcguucugcaa

SEQ ID NO: 3574612 - RNA, 16 nt, Human
gacugcguucugcaag

SEQ ID NO: 3574613 - RNA, 16 nt, Human
gacugcuaguguucug

SEQ ID NO: 3574614 - RNA, 17 nt, Human
gacugcuaguguucugu

SEQ ID NO: 3574615 - RNA, 19 nt, Human
gacugcuccccagcccugg

SEQ ID NO: 3574616 - RNA, 20 nt, Human
gacugcuccccagcccuggc

SEQ ID NO: 3574617 - RNA, 16 nt, Human
gacugcuccugagccc

SEQ ID NO: 3574618 - RNA, 17 nt, Human
gacugcuccugagcccc

SEQ ID NO: 3574619 - RNA, 14 nt, Human
gacugcugcugccu

SEQ ID NO: 3574620 - RNA, 19 nt, Human
gacugcugcugccuggcca

SEQ ID NO: 3574621 - RNA, 21 nt, Human
gacugcugcugccuggccacu

SEQ ID NO: 3574622 - RNA, 12 nt, Human
gacugcugggac

SEQ ID NO: 3574623 - RNA, 19 nt, Human
gacugcugggacuggccag

SEQ ID NO: 3574624 - RNA, 19 nt, Human
gacugcuguggccaggagg

SEQ ID NO: 3574625 - RNA, 18 nt, Human
gacugcuugcccuaagca

SEQ ID NO: 3574626 - RNA, 22 nt, Human
gacugcuugcccuaagcagaaa

SEQ ID NO: 3574627 - RNA, 23 nt, Human
gacugcuugcccuaagcagaaag

SEQ ID NO: 3574628 - RNA, 21 nt, Human
gacugcuuuggaccuaaaugg

SEQ ID NO: 3574629 - RNA, 15 nt, Human
gacuggaaccaggga

SEQ ID NO: 3574630 - RNA, 15 nt, Human
gacuggaagcacagc

SEQ ID NO: 3574631 - RNA, 18 nt, Human
gacuggaagcacagcuuc

SEQ ID NO: 3574632 - RNA, 22 nt, Human
gacuggaauuuuuauuaugcau

SEQ ID NO: 3574633 - RNA, 17 nt, Human
gacuggaccugguggcu

SEQ ID NO: 3574634 - RNA, 23 nt, Human
gacuggagacaaugcagaugcca

SEQ ID NO: 3574635 - RNA, 14 nt, Human
gacuggagcaucug

SEQ ID NO: 3574636 - RNA, 22 nt, Human
gacuggaggccccuggagccag

SEQ ID NO: 3574637 - RNA, 22 nt, Human
gacuggauacugcccggggcag

SEQ ID NO: 3574638 - RNA, 14 nt, Human
gacuggcacaguuu

SEQ ID NO: 3574639 - RNA, 23 nt, Human
gacuggcauacuauguggaugug

SEQ ID NO: 3574640 - RNA, 22 nt, Human
gacuggccccugggucagucug

SEQ ID NO: 3574641 - RNA, 21 nt, Human
gacuggcuagaguccucacuc

SEQ ID NO: 3574642 - RNA, 23 nt, Human
gacuggcuagaguccucacuccc

SEQ ID NO: 3574643 - RNA, 21 nt, Human
gacuggcuuugucccacagcu

SEQ ID NO: 3574644 - RNA, 23 nt, Human
gacugggaagauaggcucugcac

SEQ ID NO: 3574645 - RNA, 22 nt, Human
gacugggagcccccagccuguc

SEQ ID NO: 3574646 - RNA, 23 nt, Human
gacugggagccgcagcagcuccc

SEQ ID NO: 3574647 - RNA, 15 nt, Human
gacugggagggccca

SEQ ID NO: 3574648 - RNA, 13 nt, Human
gacugggagguag

SEQ ID NO: 3574649 - RNA, 15 nt, Human
gacugggcugaggga

SEQ ID NO: 3574650 - RNA, 21 nt, Human
gacuuugcugauuuccccucu

SEQ ID NO: 3574651 - RNA, 15 nt, Human
gacuuugcuucccau

SEQ ID NO: 3574652 - RNA, 12 nt, Human
gacuuugcuugc

SEQ ID NO: 3574653 - RNA, 15 nt, Human
gacuuugcuugcuuu

SEQ ID NO: 3574654 - RNA, 17 nt, Human
gacuuugcuugcuuuga

SEQ ID NO: 3574655 - RNA, 15 nt, Human
gacuuuggaagcagg

SEQ ID NO: 3574656 - RNA, 18 nt, Human
gacuuugggauaggaaaa

SEQ ID NO: 3574657 - RNA, 15 nt, Human
gacuuuguagauccu

SEQ ID NO: 3574658 - RNA, 16 nt, Human
gacuuuguauacuuua

SEQ ID NO: 3574659 - RNA, 18 nt, Human
gacuuuguauacuuuaaa

SEQ ID NO: 3574660 - RNA, 12 nt, Human
gacuuuguuaca

SEQ ID NO: 3574661 - RNA, 22 nt, Human
gacuuuguuaguuucuccaagc

SEQ ID NO: 3574662 - RNA, 18 nt, Human
gacuuuuauuuccaguga

SEQ ID NO: 3574663 - RNA, 19 nt, Human
gacuuuucgaccaauucaa

SEQ ID NO: 3574664 - RNA, 13 nt, Human
gacuuuucuguaa

SEQ ID NO: 3574665 - RNA, 22 nt, Human
gacuuuucuuaacaaccuggcc

SEQ ID NO: 3574666 - RNA, 13 nt, Human
gacuuuugcuuua

SEQ ID NO: 3574667 - RNA, 17 nt, Human
gacuuuugcuuuaauuc

SEQ ID NO: 3574668 - RNA, 21 nt, Human
gacuuuuugguggauguaaau

SEQ ID NO: 3574669 - RNA, 13 nt, Human
gacuuuuuuugua

SEQ ID NO: 3574670 - RNA, 17 nt, Human
gacuuuuuuuguaugug

SEQ ID NO: 3574671 - RNA, 13 nt, Human
gagaaaaaaacaa

SEQ ID NO: 3574672 - RNA, 10 nt, Human
gagaaaaaga

SEQ ID NO: 3574673 - RNA, 15 nt, Human
gagaaaaagaaaugc

SEQ ID NO: 3574674 - RNA, 17 nt, Human
gagaaaaagcuccuguc

SEQ ID NO: 3574675 - RNA, 20 nt, Human
gagaaaacaucucaucaugu

SEQ ID NO: 3574676 - RNA, 12 nt, Human
gagaaaagaaaa

SEQ ID NO: 3574677 - RNA, 19 nt, Human
gagaaaaggaaaagaaaaa

SEQ ID NO: 3574678 - RNA, 17 nt, Human
gagaaaauaaaaaguua

SEQ ID NO: 3574679 - RNA, 11 nt, Human
gagaaaauaua

SEQ ID NO: 3574680 - RNA, 18 nt, Human
gagaaaauauauguauuu

SEQ ID NO: 3574681 - RNA, 19 nt, Human
gagaaaauauauguauuuu

SEQ ID NO: 3574682 - RNA, 15 nt, Human
gagaaaaucaucaag

SEQ ID NO: 3574683 - RNA, 12 nt, Human
gagaaaauugaa

SEQ ID NO: 3574684 - RNA, 13 nt, Human
gagaaaauugaaa

SEQ ID NO: 3574685 - RNA, 14 nt, Human
gagaaaauugaauu

SEQ ID NO: 3574686 - RNA, 19 nt, Human
gagaaaauugaauuuaaca

SEQ ID NO: 3574687 - RNA, 15 nt, Human
gagaaacaaacuuuu

SEQ ID NO: 3574688 - RNA, 14 nt, Human
gagaaacacuugaa

SEQ ID NO: 3574689 - RNA, 18 nt, Human
gagaaacaguugguaacu

SEQ ID NO: 3574690 - RNA, 19 nt, Human
gagaaacaguugguaacuu

SEQ ID NO: 3574691 - RNA, 13 nt, Human
gagaaaccagcuu

SEQ ID NO: 3574692 - RNA, 21 nt, Human
gagaaaccagcuuccuucaga

SEQ ID NO: 3574693 - RNA, 16 nt, Human
gagaaaccuguaucuu

SEQ ID NO: 3574694 - RNA, 21 nt, Human
gagaaaccuguaucuuucuau

SEQ ID NO: 3574695 - RNA, 21 nt, Human
gagaaaccuuauuguaccucu

SEQ ID NO: 3574696 - RNA, 18 nt, Human
gagaaacuggcaaagcag

SEQ ID NO: 3574697 - RNA, 11 nt, Human
gagaaacuucc

SEQ ID NO: 3574698 - RNA, 15 nt, Human
gagaaacuuuauaca

SEQ ID NO: 3574699 - RNA, 17 nt, Human
gagaaacuuuauacauu

SEQ ID NO: 3574700 - RNA, 13 nt, Human
gagaaagaagaga

SEQ ID NO: 3574701 - RNA, 13 nt, Human
gagaaagacuauu

SEQ ID NO: 3574702 - RNA, 15 nt, Human
gagaaagacuauuca

SEQ ID NO: 3574703 - RNA, 15 nt, Human
gagaaagccaggcag

SEQ ID NO: 3574704 - RNA, 15 nt, Human
gagaaagcugacuug

SEQ ID NO: 3574705 - RNA, 19 nt, Human
gagaaaggccugcacacaa

SEQ ID NO: 3574706 - RNA, 16 nt, Human
gagaaagguugaagca

SEQ ID NO: 3574707 - RNA, 20 nt, Human
gagaaagugauuucuagaaa

SEQ ID NO: 3574708 - RNA, 18 nt, Human
gagaaagugugagcaaac

SEQ ID NO: 3574709 - RNA, 14 nt, Human
gagaaauacaaaaa

SEQ ID NO: 3574710 - RNA, 14 nt, Human
gagaaauauuuuaa

SEQ ID NO: 3574711 - RNA, 11 nt, Human
gagaaaugaaa

SEQ ID NO: 3574712 - RNA, 13 nt, Human
gagaaaugaaaac

SEQ ID NO: 3574713 - RNA, 14 nt, Human
gagaaaugagcuug

SEQ ID NO: 3574714 - RNA, 12 nt, Human
gagaaaugcaua

SEQ ID NO: 3574715 - RNA, 23 nt, Human
gagaaauguaaugcgauuuuauu

SEQ ID NO: 3574716 - RNA, 23 nt, Human
gagaaauuucugugaaaccugug

SEQ ID NO: 3574717 - RNA, 15 nt, Human
gagaacaaagcuguu

SEQ ID NO: 3574718 - RNA, 17 nt, Human
gagaacagauaaagauu

SEQ ID NO: 3574719 - RNA, 16 nt, Human
gagaacccaguuuccc

SEQ ID NO: 3574720 - RNA, 19 nt, Human
gagaaccuaacuguaucuu

SEQ ID NO: 3574721 - RNA, 12 nt, Human
gagaaccuggcc

SEQ ID NO: 3574722 - RNA, 15 nt, Human
gagaaccuggccuuc

SEQ ID NO: 3574723 - RNA, 23 nt, Human
gagaaccuggguugcagacagga

SEQ ID NO: 3574724 - RNA, 15 nt, Human
gagaacgcagcccua

SEQ ID NO: 3574725 - RNA, 22 nt, Human
gagaacuagugguggcucugag

SEQ ID NO: 3574726 - RNA, 13 nt, Human
gagaacuccugac

SEQ ID NO: 3574727 - RNA, 11 nt, Human
gagaacugaaa

SEQ ID NO: 3574728 - RNA, 16 nt, Human
gagaacugaaaagaga

SEQ ID NO: 3574729 - RNA, 18 nt, Human
gagaacugcauauguuuc

SEQ ID NO: 3574730 - RNA, 15 nt, Human
gagaacuguggccgu

SEQ ID NO: 3574731 - RNA, 21 nt, Human
gagaacuuaaguggcuaaaga

SEQ ID NO: 3574732 - RNA, 23 nt, Human
gagaacuuccagauccuggaaau

SEQ ID NO: 3574733 - RNA, 16 nt, Human
gagaacuugcugccuc

SEQ ID NO: 3574734 - RNA, 15 nt, Human
gagaacuuucauuuu

SEQ ID NO: 3574735 - RNA, 13 nt, Human
gagaagaacugaa

SEQ ID NO: 3574736 - RNA, 14 nt, Human
gagaagaacugaaa

SEQ ID NO: 3574737 - RNA, 9 nt, Human
gagaagaag

SEQ ID NO: 3574738 - RNA, 20 nt, Human
gagaagaauuuucagacccc

SEQ ID NO: 3574739 - RNA, 11 nt, Human
gagaagagccc

SEQ ID NO: 3574740 - RNA, 15 nt, Human
gagaagagggccugu

SEQ ID NO: 3574741 - RNA, 22 nt, Human
gagaagauaauuguugaaauuu

SEQ ID NO: 3574742 - RNA, 22 nt, Human
gagaagcaaguaaaaaggcuaa

SEQ ID NO: 3574743 - RNA, 18 nt, Human
gagaagcauucucauugg

SEQ ID NO: 3574744 - RNA, 17 nt, Human
gagaagccacaggccug

SEQ ID NO: 3574745 - RNA, 18 nt, Human
gagaagccacaggccuga

SEQ ID NO: 3574746 - RNA, 22 nt, Human
gagaagccacaggccugagauu

SEQ ID NO: 3574747 - RNA, 22 nt, Human
gagaagccagcuuuccucauca

SEQ ID NO: 3574748 - RNA, 22 nt, Human
gagaagccaucaccucagaugg

SEQ ID NO: 3574749 - RNA, 11 nt, Human
gagaagccauu

SEQ ID NO: 3574750 - RNA, 15 nt, Human
gagaagcccguguga

SEQ ID NO: 3574751 - RNA, 16 nt, Human
gagaagcccgugugag

SEQ ID NO: 3574752 - RNA, 13 nt, Human
gagaagccuucaa

SEQ ID NO: 3574753 - RNA, 21 nt, Human
gagaagccuucaagcucugag

SEQ ID NO: 3574754 - RNA, 18 nt, Human
gagaagccuucagcucca

SEQ ID NO: 3574755 - RNA, 13 nt, Human
gagaagcggcugg

SEQ ID NO: 3574756 - RNA, 17 nt, Human
gagaagcucagcugcau

SEQ ID NO: 3574757 - RNA, 17 nt, Human
gagaagcucccaggaac

SEQ ID NO: 3574758 - RNA, 19 nt, Human
gagaagcugcuccaggccu

SEQ ID NO: 3574759 - RNA, 17 nt, Human
gagaagcuuugcccucc

SEQ ID NO: 3574760 - RNA, 21 nt, Human
gagaagcuuuugaauaaaaac

SEQ ID NO: 3574761 - RNA, 20 nt, Human
gagaaggacccggaggggcc

SEQ ID NO: 3574762 - RNA, 22 nt, Human
gagaaggacccggaggggccug

SEQ ID NO: 3574763 - RNA, 12 nt, Human
gagaaggagaga

SEQ ID NO: 3574764 - RNA, 14 nt, Human
gagaaggagagaaa

SEQ ID NO: 3574765 - RNA, 11 nt, Human
gagaaggagcc

SEQ ID NO: 3574766 - RNA, 17 nt, Human
gagaaggggaagcacuc

SEQ ID NO: 3574767 - RNA, 19 nt, Human
gagaagggggucaaagcaa

SEQ ID NO: 3574768 - RNA, 16 nt, Human
gagaaggggugugcau

SEQ ID NO: 3574769 - RNA, 13 nt, Human
gagaagguuuauu

SEQ ID NO: 3574770 - RNA, 16 nt, Human
gagaagguuuauuguu

SEQ ID NO: 3574771 - RNA, 17 nt, Human
gagaagguuuauuguua

SEQ ID NO: 3574772 - RNA, 15 nt, Human
gagaagucacagggc

SEQ ID NO: 3574773 - RNA, 13 nt, Human
gagaagucucagc

SEQ ID NO: 3574774 - RNA, 18 nt, Human
gagaagucuuucaagaau

SEQ ID NO: 3574775 - RNA, 17 nt, Human
gagaagugugccuucuc

SEQ ID NO: 3574776 - RNA, 16 nt, Human
gagaaguuguaaagua

SEQ ID NO: 3574777 - RNA, 21 nt, Human
gagaaguuucuggcccuggcu

SEQ ID NO: 3574778 - RNA, 18 nt, Human
gagaauaggcagccccca

SEQ ID NO: 3574779 - RNA, 19 nt, Human
gagaauauuuuaaguauug

SEQ ID NO: 3574780 - RNA, 14 nt, Human
gagaaucacaggcu

SEQ ID NO: 3574781 - RNA, 21 nt, Human
gagaaucauacuuagcaaagu

SEQ ID NO: 3574782 - RNA, 14 nt, Human
gagaaucaucagga

SEQ ID NO: 3574783 - RNA, 15 nt, Human
gagaaucauguuucu

SEQ ID NO: 3574784 - RNA, 20 nt, Human
gagaaucauguuucuuugau

SEQ ID NO: 3574785 - RNA, 21 nt, Human
gagaaucuacccccagaucca

SEQ ID NO: 3574786 - RNA, 22 nt, Human
gagaaucuauauuuaacaagau

SEQ ID NO: 3574787 - RNA, 17 nt, Human
gagaaucucaacauguc

SEQ ID NO: 3574788 - RNA, 19 nt, Human
gagaaucuuuauugagaaa

SEQ ID NO: 3574789 - RNA, 23 nt, Human
gagaaugaaagggcccagagagg

SEQ ID NO: 3574790 - RNA, 13 nt, Human
gagaaugaacaaa

SEQ ID NO: 3574791 - RNA, 17 nt, Human
gagaaugagggccaaga

SEQ ID NO: 3574792 - RNA, 22 nt, Human
gagaauggaaaccacaacuuuu

SEQ ID NO: 3574793 - RNA, 23 nt, Human
gagaauggcccaguccucuccca

SEQ ID NO: 3574794 - RNA, 21 nt, Human
gagaauggugugaacccggga

SEQ ID NO: 3574795 - RNA, 16 nt, Human
gagaauguaagaacua

SEQ ID NO: 3574796 - RNA, 20 nt, Human
gagagacuuguuuuggaugc

SEQ ID NO: 3574797 - RNA, 12 nt, Human
gagagagaaagc

SEQ ID NO: 3574798 - RNA, 10 nt, Human
gagagagaga

SEQ ID NO: 3574799 - RNA, 15 nt, Human
gagagagagagagaa

SEQ ID NO: 3574800 - RNA, 14 nt, Human
gagagagagagagg

SEQ ID NO: 3574801 - RNA, 14 nt, Human
gagagagagaggac

SEQ ID NO: 3574802 - RNA, 13 nt, Human
gagagagagaggu

SEQ ID NO: 3574803 - RNA, 12 nt, Human
gagagagaggac

SEQ ID NO: 3574804 - RNA, 18 nt, Human
gagagaggcaauggcucc

SEQ ID NO: 3574805 - RNA, 13 nt, Human
gagagaggcagag

SEQ ID NO: 3574806 - RNA, 13 nt, Human
gagagaggccauu

SEQ ID NO: 3574807 - RNA, 16 nt, Human
gagagaguugaaccua

SEQ ID NO: 3574808 - RNA, 21 nt, Human
gagagaguuguuuuaauaacu

SEQ ID NO: 3574809 - RNA, 14 nt, Human
gagagauacucugg

SEQ ID NO: 3574810 - RNA, 14 nt, Human
gagagaucaaagau

SEQ ID NO: 3574811 - RNA, 16 nt, Human
gagagaucugcuguca

SEQ ID NO: 3574812 - RNA, 13 nt, Human
gagagaugugugu

SEQ ID NO: 3574813 - RNA, 15 nt, Human
gagagauucugugau

SEQ ID NO: 3574814 - RNA, 20 nt, Human
gagagcaacucugagaucua

SEQ ID NO: 3574815 - RNA, 17 nt, Human
gagagcagagaauauaa

SEQ ID NO: 3574816 - RNA, 21 nt, Human
gagagcagcuuuaaacucagg

SEQ ID NO: 3574817 - RNA, 23 nt, Human
gagagcagcuuuaaacucaggga

SEQ ID NO: 3574818 - RNA, 13 nt, Human
gagagcaggcugg

SEQ ID NO: 3574819 - RNA, 21 nt, Human
gagagcaggcuggcagcucuc

SEQ ID NO: 3574820 - RNA, 13 nt, Human
gagagcagugcuu

SEQ ID NO: 3574821 - RNA, 16 nt, Human
gagagcauaauuuaaa

SEQ ID NO: 3574822 - RNA, 18 nt, Human
gagagcaucggccuaggg

SEQ ID NO: 3574823 - RNA, 15 nt, Human
gagagccagagaagu

SEQ ID NO: 3574824 - RNA, 17 nt, Human
gagagccauuuugugaa

SEQ ID NO: 3574825 - RNA, 10 nt, Human
gagagcccag

SEQ ID NO: 3574826 - RNA, 14 nt, Human
gagagccccagcug

SEQ ID NO: 3574827 - RNA, 17 nt, Human
gagagccccuggggccu

SEQ ID NO: 3574828 - RNA, 15 nt, Human
gagagcccgggagcu

SEQ ID NO: 3574829 - RNA, 18 nt, Human
gagagcccuagaaagcug

SEQ ID NO: 3574830 - RNA, 13 nt, Human
gagagcccuggga

SEQ ID NO: 3574831 - RNA, 17 nt, Human
gagagccguggucccug

SEQ ID NO: 3574832 - RNA, 17 nt, Human
gagagccugcuccccca

SEQ ID NO: 3574833 - RNA, 14 nt, Human
gagagccugcugca

SEQ ID NO: 3574834 - RNA, 13 nt, Human
gagagccugcugg

SEQ ID NO: 3574835 - RNA, 13 nt, Human
gagagccuggugc

SEQ ID NO: 3574836 - RNA, 20 nt, Human
gagagcuagaacccggcagg

SEQ ID NO: 3574837 - RNA, 13 nt, Human
gagagcuaggagc

SEQ ID NO: 3574838 - RNA, 19 nt, Human
gagagcuaggagcaaagcc

SEQ ID NO: 3574839 - RNA, 16 nt, Human
gagagcuggagccugg

SEQ ID NO: 3574840 - RNA, 21 nt, Human
gagagcuggagccuggugccc

SEQ ID NO: 3574841 - RNA, 13 nt, Human
gagagcuggugcc

SEQ ID NO: 3574842 - RNA, 17 nt, Human
gagagcuggugcccgga

SEQ ID NO: 3574843 - RNA, 15 nt, Human
gagaggacagcuuga

SEQ ID NO: 3574844 - RNA, 18 nt, Human
gagaggacagcuugagcc

SEQ ID NO: 3574845 - RNA, 15 nt, Human
gagaggagaaacaca

SEQ ID NO: 3574846 - RNA, 17 nt, Human
gagaggagacggagggg

SEQ ID NO: 3574847 - RNA, 12 nt, Human
gagaggagagag

SEQ ID NO: 3574848 - RNA, 16 nt, Human
gagaggagagccagag

SEQ ID NO: 3574849 - RNA, 13 nt, Human
gagaggagccaga

SEQ ID NO: 3574850 - RNA, 19 nt, Human
gagaggagccagacagacc

SEQ ID NO: 3574851 - RNA, 17 nt, Human
gagaggaggcagcagga

SEQ ID NO: 3574852 - RNA, 12 nt, Human
gagaggaugaau

SEQ ID NO: 3574853 - RNA, 14 nt, Human
gagaggaugaaugu

SEQ ID NO: 3574854 - RNA, 14 nt, Human
gagaggaugagagc

SEQ ID NO: 3574855 - RNA, 18 nt, Human
gagaggaugagagcccag

SEQ ID NO: 3574856 - RNA, 19 nt, Human
gagaggaugagagcccaga

SEQ ID NO: 3574857 - RNA, 14 nt, Human
gagaggaugugcaa

SEQ ID NO: 3574858 - RNA, 17 nt, Human
gagaggccaaaggcugg

SEQ ID NO: 3574859 - RNA, 14 nt, Human
gagaggccaggugc

SEQ ID NO: 3574860 - RNA, 23 nt, Human
gagaggcccucuggaguggccac

SEQ ID NO: 3574861 - RNA, 24 nt, Human
gagaggcccuggaucagcguggcc

SEQ ID NO: 3574862 - RNA, 13 nt, Human
gagaggccgggac

SEQ ID NO: 3574863 - RNA, 15 nt, Human
gagaggccuuuugga

SEQ ID NO: 3574864 - RNA, 12 nt, Human
gagagggagacc

SEQ ID NO: 3574865 - RNA, 14 nt, Human
gagagggagagaga

SEQ ID NO: 3574866 - RNA, 23 nt, Human
gagagggaggucacuggaaaggg

SEQ ID NO: 3574867 - RNA, 15 nt, Human
gagagggcgcaggcc

SEQ ID NO: 3574868 - RNA, 16 nt, Human
gagagggcgcaggccg

SEQ ID NO: 3574869 - RNA, 13 nt, Human
gagaggggaacag

SEQ ID NO: 3574870 - RNA, 22 nt, Human
gagaggggaagaguguacuggg

SEQ ID NO: 3574871 - RNA, 17 nt, Human
gagaggggaagggccag

SEQ ID NO: 3574872 - RNA, 20 nt, Human
gagaggggccgaugcccaga

SEQ ID NO: 3574873 - RNA, 21 nt, Human
gagaggggccgaugcccagag

SEQ ID NO: 3574874 - RNA, 19 nt, Human
gagagggggcuggugggug

SEQ ID NO: 3574875 - RNA, 13 nt, Human
gagagggugacaa

SEQ ID NO: 3574876 - RNA, 21 nt, Human
gagagggugggagugggccca

SEQ ID NO: 3574877 - RNA, 17 nt, Human
gagaggucuuuuuuaaa

SEQ ID NO: 3574878 - RNA, 22 nt, Human
gagaggugggccagucugugga

SEQ ID NO: 3574879 - RNA, 16 nt, Human
gagagguuaaggugca

SEQ ID NO: 3574880 - RNA, 19 nt, Human
gagagguuauaggucacuc

SEQ ID NO: 3574881 - RNA, 20 nt, Human
gagagguuugcagucccaag

SEQ ID NO: 3574882 - RNA, 17 nt, Human
gagaguaaugaggcuug

SEQ ID NO: 3574883 - RNA, 18 nt, Human
gagaguagccgagagccu

SEQ ID NO: 3574884 - RNA, 21 nt, Human
gagaguagccgagagccugcu

SEQ ID NO: 3574885 - RNA, 17 nt, Human
gagagucauauuuugau

SEQ ID NO: 3574886 - RNA, 21 nt, Human
gagagucccacugccucaggu

SEQ ID NO: 3574887 - RNA, 18 nt, Human
gagagucccagagcagga

SEQ ID NO: 3574888 - RNA, 19 nt, Human
gagagucccagagcaggag

SEQ ID NO: 3574889 - RNA, 15 nt, Human
gagaguccucuggau

SEQ ID NO: 3574890 - RNA, 23 nt, Human
gagagucuagcacucauuuucua

SEQ ID NO: 3574891 - RNA, 15 nt, Human
gagagucucccaggg

SEQ ID NO: 3574892 - RNA, 13 nt, Human
gagagucuggccc

SEQ ID NO: 3574893 - RNA, 15 nt, Human
gagagucuugcagug

SEQ ID NO: 3574894 - RNA, 15 nt, Human
gagagugaacaaauu

SEQ ID NO: 3574895 - RNA, 21 nt, Human
gagaguggcuccucccggugc

SEQ ID NO: 3574896 - RNA, 15 nt, Human
gagaguggggguggg

SEQ ID NO: 3574897 - RNA, 22 nt, Human
gagagugucaaccagacagagg

SEQ ID NO: 3574898 - RNA, 23 nt, Human
gagagugucaaccagacagaggg

SEQ ID NO: 3574899 - RNA, 20 nt, Human
gagaguucaauggcugcuga

SEQ ID NO: 3574900 - RNA, 14 nt, Human
gagaguuuuggaug

SEQ ID NO: 3574901 - RNA, 15 nt, Human
gagauaaaucuagua

SEQ ID NO: 3574902 - RNA, 17 nt, Human
gagauacagaauuuuau

SEQ ID NO: 3574903 - RNA, 14 nt, Human
gagauacuggugga

SEQ ID NO: 3574904 - RNA, 23 nt, Human
gagauacuuuuucuuuuguaagu

SEQ ID NO: 3574905 - RNA, 23 nt, Human
gagauagcauugugaacugacag

SEQ ID NO: 3574906 - RNA, 14 nt, Human
gagauagccaaggc

SEQ ID NO: 3574907 - RNA, 19 nt, Human
gagauagccaaggccaaag

SEQ ID NO: 3574908 - RNA, 21 nt, Human
gagauagccaaggccaaagga

SEQ ID NO: 3574909 - RNA, 17 nt, Human
gagauaguuuucaucca

SEQ ID NO: 3574910 - RNA, 15 nt, Human
gagauauauuuuuaa

SEQ ID NO: 3574911 - RNA, 21 nt, Human
gagauaucugagggaggaggc

SEQ ID NO: 3574912 - RNA, 22 nt, Human
gagauaucugagggaggaggcc

SEQ ID NO: 3574913 - RNA, 18 nt, Human
gagauauuaaugcccaga

SEQ ID NO: 3574914 - RNA, 16 nt, Human
gagauauugugaggac

SEQ ID NO: 3574915 - RNA, 17 nt, Human
gagauauuuuaaaauga

SEQ ID NO: 3574916 - RNA, 20 nt, Human
gagaucaaagaugaaaagua

SEQ ID NO: 3574917 - RNA, 21 nt, Human
gagaucaccaguguguggcuu

SEQ ID NO: 3574918 - RNA, 12 nt, Human
gagaucagaaaa

SEQ ID NO: 3574919 - RNA, 16 nt, Human
gagaucagccugggca

SEQ ID NO: 3574920 - RNA, 20 nt, Human
gagaucaggaagagaaggag

SEQ ID NO: 3574921 - RNA, 18 nt, Human
gagaucaggcucugccuc

SEQ ID NO: 3574922 - RNA, 16 nt, Human
gagaucauccuuucca

SEQ ID NO: 3574923 - RNA, 20 nt, Human
gagaucauccuuuccagcau

SEQ ID NO: 3574924 - RNA, 21 nt, Human
gagauccaaaagaagccccca

SEQ ID NO: 3574925 - RNA, 20 nt, Human
gagaucccaacacugccagc

SEQ ID NO: 3574926 - RNA, 13 nt, Human
gagauccuccugc

SEQ ID NO: 3574927 - RNA, 23 nt, Human
gagauccuccugcagaccacgcc

SEQ ID NO: 3574928 - RNA, 23 nt, Human
gagauccuuguguuuaucagaaa

SEQ ID NO: 3574929 - RNA, 14 nt, Human
gagaucgagaccau

SEQ ID NO: 3574930 - RNA, 18 nt, Human
gagaucgagaccauccug

SEQ ID NO: 3574931 - RNA, 17 nt, Human
gagaucgugccacugca

SEQ ID NO: 3574932 - RNA, 20 nt, Human
gagaucgugccacugcacuc

SEQ ID NO: 3574933 - RNA, 21 nt, Human
gagaucgugccguuacucucc

SEQ ID NO: 3574934 - RNA, 21 nt, Human
gagaugaaaucuuacagcugg

SEQ ID NO: 3574935 - RNA, 21 nt, Human
gagaugaagagugagagggca

SEQ ID NO: 3574936 - RNA, 15 nt, Human
gagaugaagcaaaca

SEQ ID NO: 3574937 - RNA, 18 nt, Human
gagaugaagcaaacacau

SEQ ID NO: 3574938 - RNA, 20 nt, Human
gagaugaagcaaacacauua

SEQ ID NO: 3574939 - RNA, 13 nt, Human
gagaugacugagu

SEQ ID NO: 3574940 - RNA, 16 nt, Human
gagaugaggaguaaaa

SEQ ID NO: 3574941 - RNA, 19 nt, Human
gagaugaggaguaaaauuc

SEQ ID NO: 3574942 - RNA, 22 nt, Human
gagcaucaugccucugaggcca

SEQ ID NO: 3574943 - RNA, 24 nt, Human
gagcaucaugccucugaggccagc

SEQ ID NO: 3574944 - RNA, 15 nt, Human
gagcauccugagccc

SEQ ID NO: 3574945 - RNA, 18 nt, Human
gagcauggaacacuucga

SEQ ID NO: 3574946 - RNA, 15 nt, Human
gagcauggagcuggc

SEQ ID NO: 3574947 - RNA, 17 nt, Human
gagcauggagcuggccg

SEQ ID NO: 3574948 - RNA, 14 nt, Human
gagcauggcuguga

SEQ ID NO: 3574949 - RNA, 16 nt, Human
gagcauggcugugagg

SEQ ID NO: 3574950 - RNA, 17 nt, Human
gagcaugggccuggcca

SEQ ID NO: 3574951 - RNA, 21 nt, Human
gagcauggggauaaaggagaa

SEQ ID NO: 3574952 - RNA, 22 nt, Human
gagcauggggauaaaggagaag

SEQ ID NO: 3574953 - RNA, 14 nt, Human
gagcauuacaggca

SEQ ID NO: 3574954 - RNA, 15 nt, Human
gagcauuagauuucu

SEQ ID NO: 3574955 - RNA, 21 nt, Human
gagcauuagauuucucauuug

SEQ ID NO: 3574956 - RNA, 17 nt, Human
gagcauuuagggcaagg

SEQ ID NO: 3574957 - RNA, 20 nt, Human
gagcauuucucaucaguagu

SEQ ID NO: 3574958 - RNA, 20 nt, Human
gagcauuuugauaccagaag

SEQ ID NO: 3574959 - RNA, 20 nt, Human
gagccaacagaagcuuccau

SEQ ID NO: 3574960 - RNA, 14 nt, Human
gagccaagggaugg

SEQ ID NO: 3574961 - RNA, 15 nt, Human
gagccaagggaugga

SEQ ID NO: 3574962 - RNA, 22 nt, Human
gagccaagggauggacaucuug

SEQ ID NO: 3574963 - RNA, 18 nt, Human
gagccaaggggcuucagg

SEQ ID NO: 3574964 - RNA, 14 nt, Human
gagccaaguccaga

SEQ ID NO: 3574965 - RNA, 19 nt, Human
gagccaauuuaaagaaaac

SEQ ID NO: 3574966 - RNA, 14 nt, Human
gagccacagcagca

SEQ ID NO: 3574967 - RNA, 17 nt, Human
gagccacagcagcauuu

SEQ ID NO: 3574968 - RNA, 20 nt, Human
gagccacagcagcauuuuua

SEQ ID NO: 3574969 - RNA, 19 nt, Human
gagccaccacaccuggcua

SEQ ID NO: 3574970 - RNA, 23 nt, Human
gagccaccacaccuggcuaauuu

SEQ ID NO: 3574971 - RNA, 14 nt, Human
gagccaccaugccc

SEQ ID NO: 3574972 - RNA, 18 nt, Human
gagccaccgcgcccagcc

SEQ ID NO: 3574973 - RNA, 13 nt, Human
gagccaccugucc

SEQ ID NO: 3574974 - RNA, 20 nt, Human
gagccacugcaccgggccac

SEQ ID NO: 3574975 - RNA, 14 nt, Human
gagccagacagacc

SEQ ID NO: 3574976 - RNA, 23 nt, Human
gagccagacucuggucuucuuug

SEQ ID NO: 3574977 - RNA, 13 nt, Human
gagccagauuuca

SEQ ID NO: 3574978 - RNA, 13 nt, Human
gagccagcccucc

SEQ ID NO: 3574979 - RNA, 19 nt, Human
gagccagcccucccugucc

SEQ ID NO: 3574980 - RNA, 19 nt, Human
gagccagccgagcaggagg

SEQ ID NO: 3574981 - RNA, 15 nt, Human
gagccagccugcucc

SEQ ID NO: 3574982 - RNA, 18 nt, Human
gagccagcuaaggggugg

SEQ ID NO: 3574983 - RNA, 20 nt, Human
gagccagcuuggggccacca

SEQ ID NO: 3574984 - RNA, 12 nt, Human
gagccaggccug

SEQ ID NO: 3574985 - RNA, 21 nt, Human
gagccaggccugggucugugu

SEQ ID NO: 3574986 - RNA, 21 nt, Human
gagccaggcuagcuggagccu

SEQ ID NO: 3574987 - RNA, 17 nt, Human
gagccagggucuccaga

SEQ ID NO: 3574988 - RNA, 22 nt, Human
gagccagggucuccagaaagcc

SEQ ID NO: 3574989 - RNA, 19 nt, Human
gagccagguaaugagggac

SEQ ID NO: 3574990 - RNA, 19 nt, Human
gagccaguucaguaccugg

SEQ ID NO: 3574991 - RNA, 19 nt, Human
gagccauauaaguuugaag

SEQ ID NO: 3574992 - RNA, 17 nt, Human
gagccaugcgcccccuc

SEQ ID NO: 3574993 - RNA, 22 nt, Human
gagccauggaccacgcaggaag

SEQ ID NO: 3574994 - RNA, 18 nt, Human
gagccaugggcacaaagg

SEQ ID NO: 3574995 - RNA, 22 nt, Human
gagccaugucuucucccuggaa

SEQ ID NO: 3574996 - RNA, 14 nt, Human
gagcccaagggaau

SEQ ID NO: 3574997 - RNA, 16 nt, Human
gagcccacaaagccuu

SEQ ID NO: 3574998 - RNA, 15 nt, Human
gagcccaccuuggcu

SEQ ID NO: 3574999 - RNA, 20 nt, Human
gagcccacgacacugcagcc

SEQ ID NO: 3575000 - RNA, 18 nt, Human
gagcccacgcccccacug

SEQ ID NO: 3575001 - RNA, 21 nt, Human
gagcccacggcuaagaggcug

SEQ ID NO: 3575002 - RNA, 23 nt, Human
gagcccacggcuaagaggcugcu

SEQ ID NO: 3575003 - RNA, 19 nt, Human
gagcccacugcccaccccc

SEQ ID NO: 3575004 - RNA, 19 nt, Human
gagcccacuguccugggcc

SEQ ID NO: 3575005 - RNA, 13 nt, Human
gagcccacugugc

SEQ ID NO: 3575006 - RNA, 14 nt, Human
gagcccagagaaca

SEQ ID NO: 3575007 - RNA, 22 nt, Human
gagcccagaggagggcagcaga

SEQ ID NO: 3575008 - RNA, 21 nt, Human
gagcccagagguaacagaaca

SEQ ID NO: 3575009 - RNA, 22 nt, Human
gagcccagagguaacagaacag

SEQ ID NO: 3575010 - RNA, 20 nt, Human
gagcccagauugugccacug

SEQ ID NO: 3575011 - RNA, 15 nt, Human
gagcccagcccuccc

SEQ ID NO: 3575012 - RNA, 13 nt, Human
gagcccagcucca

SEQ ID NO: 3575013 - RNA, 12 nt, Human
gagcccagcucu

SEQ ID NO: 3575014 - RNA, 21 nt, Human
gagcccagcucugaaaccagu

SEQ ID NO: 3575015 - RNA, 21 nt, Human
gagcccagcugggucaggcag

SEQ ID NO: 3575016 - RNA, 22 nt, Human
gagcccagcugggucaggcagg

SEQ ID NO: 3575017 - RNA, 21 nt, Human
gagcccaggagucccacucca

SEQ ID NO: 3575018 - RNA, 17 nt, Human
gagcccaggccaggacu

SEQ ID NO: 3575019 - RNA, 13 nt, Human
gagcccaggccuc

SEQ ID NO: 3575020 - RNA, 14 nt, Human
gagcccaggccucc

SEQ ID NO: 3575021 - RNA, 21 nt, Human
gagcccaggcucggccugccc

SEQ ID NO: 3575022 - RNA, 22 nt, Human
gagcccaggcucggccugcccc

SEQ ID NO: 3575023 - RNA, 13 nt, Human
gagcccauacuca

SEQ ID NO: 3575024 - RNA, 20 nt, Human
gagcccauguucugccccca

SEQ ID NO: 3575025 - RNA, 22 nt, Human
gagcccauguucugcccccagc

SEQ ID NO: 3575026 - RNA, 18 nt, Human
gagcccauuuggagggcc

SEQ ID NO: 3575027 - RNA, 17 nt, Human
gagccccaaguccugaa

SEQ ID NO: 3575028 - RNA, 21 nt, Human
gagccccaaguccugaagagg

SEQ ID NO: 3575029 - RNA, 14 nt, Human
gagccccacagccc

SEQ ID NO: 3575030 - RNA, 18 nt, Human
gagccccacucucagagg

SEQ ID NO: 3575031 - RNA, 19 nt, Human
gagccccagcccccuuugg

SEQ ID NO: 3575032 - RNA, 16 nt, Human
gagccccagcuacccu

SEQ ID NO: 3575033 - RNA, 14 nt, Human
gagccccagcugac

SEQ ID NO: 3575034 - RNA, 16 nt, Human
gagccccaggccucug

SEQ ID NO: 3575035 - RNA, 18 nt, Human
gagccccaggccucugug

SEQ ID NO: 3575036 - RNA, 23 nt, Human
gagccccagggagagggggcugg

SEQ ID NO: 3575037 - RNA, 24 nt, Human
gagccccagggucuucccuaccuc

SEQ ID NO: 3575038 - RNA, 19 nt, Human
gagccccaucuucacccag

SEQ ID NO: 3575039 - RNA, 15 nt, Human
gagcccccacccugu

SEQ ID NO: 3575040 - RNA, 20 nt, Human
gagcccccagcuuccagcag

SEQ ID NO: 3575041 - RNA, 13 nt, Human
gagccccgaggcc

SEQ ID NO: 3575042 - RNA, 13 nt, Human
gagccccgcagac

SEQ ID NO: 3575043 - RNA, 23 nt, Human
gagccccgcagaccuccccagcc

SEQ ID NO: 3575044 - RNA, 19 nt, Human
gagccccgcccucuuccug

SEQ ID NO: 3575045 - RNA, 15 nt, Human
gagccccuaccccac

SEQ ID NO: 3575046 - RNA, 17 nt, Human
gagccccuccuccagcc

SEQ ID NO: 3575047 - RNA, 12 nt, Human
gagccccugggu

SEQ ID NO: 3575048 - RNA, 19 nt, Human
gagccccuggguggguggu

SEQ ID NO: 3575049 - RNA, 22 nt, Human
gagccccugucuagagagggag

SEQ ID NO: 3575050 - RNA, 20 nt, Human
gagcccgaggaggugucuca

SEQ ID NO: 3575051 - RNA, 22 nt, Human
gagcccgaggaggugucucagg

SEQ ID NO: 3575052 - RNA, 15 nt, Human
gagcccgggcugccu

SEQ ID NO: 3575053 - RNA, 17 nt, Human
gagcccgggcugccugg

SEQ ID NO: 3575054 - RNA, 19 nt, Human
gagcccgggcugccugggc

SEQ ID NO: 3575055 - RNA, 20 nt, Human
gagcccgggcugccugggcu

SEQ ID NO: 3575056 - RNA, 22 nt, Human
gagcccgggcugccugggcugu

SEQ ID NO: 3575057 - RNA, 20 nt, Human
gagcccuaaccccuuccaga

SEQ ID NO: 3575058 - RNA, 22 nt, Human
gagcccuacucccugcagaugc

SEQ ID NO: 3575059 - RNA, 13 nt, Human
gagcccucagaac

SEQ ID NO: 3575060 - RNA, 12 nt, Human
gagcccucccca

SEQ ID NO: 3575061 - RNA, 22 nt, Human
gagcccugccucuccgccccug

SEQ ID NO: 3575062 - RNA, 13 nt, Human
gagcccuggcagg

SEQ ID NO: 3575063 - RNA, 22 nt, Human
gagcccugggaggcucuggagc

SEQ ID NO: 3575064 - RNA, 21 nt, Human
gagcccuguggaugagcccuc

SEQ ID NO: 3575065 - RNA, 21 nt, Human
gagcccuucuauacccaccca

SEQ ID NO: 3575066 - RNA, 23 nt, Human
gagcccuucuauacccacccaga

SEQ ID NO: 3575067 - RNA, 15 nt, Human
gagcccuugccuccc

SEQ ID NO: 3575068 - RNA, 19 nt, Human
gagccgagaucacgccacu

SEQ ID NO: 3575069 - RNA, 21 nt, Human
gagccgagaucacgccacugc

SEQ ID NO: 3575070 - RNA, 22 nt, Human
gagccgauuguccuaucuccag

SEQ ID NO: 3575071 - RNA, 21 nt, Human
gagccgcaucuucuccaucug

SEQ ID NO: 3575072 - RNA, 22 nt, Human
gagccgcaucuucuccaucugg

SEQ ID NO: 3575073 - RNA, 19 nt, Human
gagccgcuggcagaaggga

SEQ ID NO: 3575074 - RNA, 12 nt, Human
gagccggagccu

SEQ ID NO: 3575075 - RNA, 16 nt, Human
gagccggagccuccag

SEQ ID NO: 3575076 - RNA, 23 nt, Human
gagccggccccaggcucguggac

SEQ ID NO: 3575077 - RNA, 18 nt, Human
gagccggggaguuucuuu

SEQ ID NO: 3575078 - RNA, 20 nt, Human
gagccgggucugccucuucu

SEQ ID NO: 3575079 - RNA, 19 nt, Human
gagccggguguccccaaca

SEQ ID NO: 3575080 - RNA, 17 nt, Human
gagccgguaacuguccu

SEQ ID NO: 3575081 - RNA, 19 nt, Human
gagccgguaacuguccugu

SEQ ID NO: 3575082 - RNA, 17 nt, Human
gagccgugaacugugca

SEQ ID NO: 3575083 - RNA, 18 nt, Human
gagccgugaacugugcau

SEQ ID NO: 3575084 - RNA, 14 nt, Human
gauaaauauuugac

SEQ ID NO: 3575085 - RNA, 16 nt, Human
gauaaauauuugacuu

SEQ ID NO: 3575086 - RNA, 14 nt, Human
gauaaaucauuuua

SEQ ID NO: 3575087 - RNA, 20 nt, Human
gauaaaugauucaaaaaguc

SEQ ID NO: 3575088 - RNA, 16 nt, Human
gauaaauuauuuccag

SEQ ID NO: 3575089 - RNA, 12 nt, Human
gauaacaaagau

SEQ ID NO: 3575090 - RNA, 17 nt, Human
gauaacaaagauaucuu

SEQ ID NO: 3575091 - RNA, 16 nt, Human
gauaacaaccuggaga

SEQ ID NO: 3575092 - RNA, 22 nt, Human
gauaacaauguuuuaacaagaa

SEQ ID NO: 3575093 - RNA, 13 nt, Human
gauaacagcacug

SEQ ID NO: 3575094 - RNA, 17 nt, Human
gauaaccauagcauagg

SEQ ID NO: 3575095 - RNA, 16 nt, Human
gauaaccuugaaaaaa

SEQ ID NO: 3575096 - RNA, 19 nt, Human
gauaacuagauggugcuga

SEQ ID NO: 3575097 - RNA, 20 nt, Human
gauaacugaaaauuauuuaa

SEQ ID NO: 3575098 - RNA, 21 nt, Human
gauaacugcaauuuuaauuga

SEQ ID NO: 3575099 - RNA, 21 nt, Human
gauaacuuagguggcaagcug

SEQ ID NO: 3575100 - RNA, 12 nt, Human
gauaagaaaacc

SEQ ID NO: 3575101 - RNA, 20 nt, Human
gauaagcaguuaugugaccu

SEQ ID NO: 3575102 - RNA, 12 nt, Human
gauaaggaagaa

SEQ ID NO: 3575103 - RNA, 13 nt, Human
gauaaggaagaaa

SEQ ID NO: 3575104 - RNA, 21 nt, Human
gauaaggaagaaacagaagag

SEQ ID NO: 3575105 - RNA, 17 nt, Human
gauaaggaauuauagac

SEQ ID NO: 3575106 - RNA, 14 nt, Human
gauaaggacaugau

SEQ ID NO: 3575107 - RNA, 19 nt, Human
gauaaggacgggaccauuu

SEQ ID NO: 3575108 - RNA, 14 nt, Human
gauaagggaaaaga

SEQ ID NO: 3575109 - RNA, 18 nt, Human
gauaagggacugauguuu

SEQ ID NO: 3575110 - RNA, 16 nt, Human
gauaaguguauuuuuc

SEQ ID NO: 3575111 - RNA, 16 nt, Human
gauaaguucauacauu

SEQ ID NO: 3575112 - RNA, 19 nt, Human
gauaaguuggaaacacuaa

SEQ ID NO: 3575113 - RNA, 12 nt, Human
gauaauaauggg

SEQ ID NO: 3575114 - RNA, 23 nt, Human
gauaauacaccacuacauucugu

SEQ ID NO: 3575115 - RNA, 22 nt, Human
gauaauaguuuuuucuuuuaac

SEQ ID NO: 3575116 - RNA, 23 nt, Human
gauaauaucuuugugauaauuua

SEQ ID NO: 3575117 - RNA, 17 nt, Human
gauaauaugagaaucag

SEQ ID NO: 3575118 - RNA, 21 nt, Human
gauaaucaacugggcugaaca

SEQ ID NO: 3575119 - RNA, 14 nt, Human
gauaaucagccucu

SEQ ID NO: 3575120 - RNA, 16 nt, Human
gauaaucucagugcuu

SEQ ID NO: 3575121 - RNA, 19 nt, Human
gauaaucucagugcuuucc

SEQ ID NO: 3575122 - RNA, 14 nt, Human
gauaaugaacagaa

SEQ ID NO: 3575123 - RNA, 19 nt, Human
gauaaugcuguugccucau

SEQ ID NO: 3575124 - RNA, 21 nt, Human
gauaauguccaacuaaaaaca

SEQ ID NO: 3575125 - RNA, 13 nt, Human
gauaauguuaaau

SEQ ID NO: 3575126 - RNA, 14 nt, Human
gauaauguuaaauu

SEQ ID NO: 3575127 - RNA, 19 nt, Human
gauaauguuaaauuuguaa

SEQ ID NO: 3575128 - RNA, 14 nt, Human
gauaauuauaauau

SEQ ID NO: 3575129 - RNA, 13 nt, Human
gauaauuccagug

SEQ ID NO: 3575130 - RNA, 18 nt, Human
gauaauugcauucaucuu

SEQ ID NO: 3575131 - RNA, 16 nt, Human
gauaauugcuauuuau

SEQ ID NO: 3575132 - RNA, 22 nt, Human
gauaauugcuauuuauuuuuac

SEQ ID NO: 3575133 - RNA, 16 nt, Human
gauaauuguugaaauu

SEQ ID NO: 3575134 - RNA, 12 nt, Human
gauaauuuaaga

SEQ ID NO: 3575135 - RNA, 18 nt, Human
gauaauuuuaaauucucu

SEQ ID NO: 3575136 - RNA, 17 nt, Human
gauaauuuugcauaaaa

SEQ ID NO: 3575137 - RNA, 19 nt, Human
gauacaaccucccucuugu

SEQ ID NO: 3575138 - RNA, 12 nt, Human
gauacaauaaau

SEQ ID NO: 3575139 - RNA, 15 nt, Human
gauacaaucagcugc

SEQ ID NO: 3575140 - RNA, 11 nt, Human
gauacagaaaa

SEQ ID NO: 3575141 - RNA, 23 nt, Human
gauacagcaguagacauuuuaac

SEQ ID NO: 3575142 - RNA, 16 nt, Human
gauacaguuacucaga

SEQ ID NO: 3575143 - RNA, 11 nt, Human
gauacauaaaa

SEQ ID NO: 3575144 - RNA, 20 nt, Human
gauacauaacuaaauuugau

SEQ ID NO: 3575145 - RNA, 23 nt, Human
gauacauaacuaaauuugauacu

SEQ ID NO: 3575146 - RNA, 20 nt, Human
gauacauaugaguguggaag

SEQ ID NO: 3575147 - RNA, 20 nt, Human
gauacauccaaagcagacag

SEQ ID NO: 3575148 - RNA, 15 nt, Human
gauaccagcgaggag

SEQ ID NO: 3575149 - RNA, 13 nt, Human
gauaccagcugga

SEQ ID NO: 3575150 - RNA, 20 nt, Human
gauaccagguugaaagaccu

SEQ ID NO: 3575151 - RNA, 13 nt, Human
gauaccccccucu

SEQ ID NO: 3575152 - RNA, 21 nt, Human
gauaccccccucugucuugug

SEQ ID NO: 3575153 - RNA, 18 nt, Human
gauaccuccaacccugcc

SEQ ID NO: 3575154 - RNA, 14 nt, Human
gauaccuuaaaauu

SEQ ID NO: 3575155 - RNA, 17 nt, Human
gauaccuuaaaauuuga

SEQ ID NO: 3575156 - RNA, 13 nt, Human
gauacgacuuuau

SEQ ID NO: 3575157 - RNA, 16 nt, Human
gauacuacaguuuguu

SEQ ID NO: 3575158 - RNA, 13 nt, Human
gauacuacaucuu

SEQ ID NO: 3575159 - RNA, 13 nt, Human
gauacucugucag

SEQ ID NO: 3575160 - RNA, 12 nt, Human
gauacugaaaua

SEQ ID NO: 3575161 - RNA, 18 nt, Human
gauacugcagggccagga

SEQ ID NO: 3575162 - RNA, 21 nt, Human
gauacugcagggccaggacug

SEQ ID NO: 3575163 - RNA, 17 nt, Human
gauacugcgacuuucug

SEQ ID NO: 3575164 - RNA, 23 nt, Human
gauacugcuacuguaauuuuaua

SEQ ID NO: 3575165 - RNA, 16 nt, Human
gauacuggaaguuuug

SEQ ID NO: 3575166 - RNA, 19 nt, Human
gauacuggaaguuuugcau

SEQ ID NO: 3575167 - RNA, 16 nt, Human
gauacuggauuguacu

SEQ ID NO: 3575168 - RNA, 20 nt, Human
gauacuggcaaagcagaaaa

SEQ ID NO: 3575169 - RNA, 13 nt, Human
gauacuggcacag

SEQ ID NO: 3575170 - RNA, 16 nt, Human
gauacuguaacacuuu

SEQ ID NO: 3575171 - RNA, 17 nt, Human
gauacuguaucaugaca

SEQ ID NO: 3575172 - RNA, 15 nt, Human
gauacuguugcacgu

SEQ ID NO: 3575173 - RNA, 19 nt, Human
gauacuguugcacgugugu

SEQ ID NO: 3575174 - RNA, 21 nt, Human
gauacuguugcacguguguuu

SEQ ID NO: 3575175 - RNA, 20 nt, Human
gauacuuaagugcugcaauu

SEQ ID NO: 3575176 - RNA, 19 nt, Human
gauacuuauauuuucguau

SEQ ID NO: 3575177 - RNA, 16 nt, Human
gauacuuauuuaaaua

SEQ ID NO: 3575178 - RNA, 18 nt, Human
gauacuucauuuaaaaaa

SEQ ID NO: 3575179 - RNA, 19 nt, Human
gauacuucccacaccacaa

SEQ ID NO: 3575180 - RNA, 19 nt, Human
gauacuucgacacuguucu

SEQ ID NO: 3575181 - RNA, 23 nt, Human
gauacuucgacacuguucuuagc

SEQ ID NO: 3575182 - RNA, 16 nt, Human
gauacuugaaaauuaa

SEQ ID NO: 3575183 - RNA, 23 nt, Human
gauacuuggauuuaguuucagua

SEQ ID NO: 3575184 - RNA, 15 nt, Human
gauacuuguuuucaa

SEQ ID NO: 3575185 - RNA, 13 nt, Human
gauacuuuacaug

SEQ ID NO: 3575186 - RNA, 16 nt, Human
gauacuuuguauuguc

SEQ ID NO: 3575187 - RNA, 23 nt, Human
gauacuuuuucuuuuguaagugc

SEQ ID NO: 3575188 - RNA, 14 nt, Human
gauagaaauaaaua

SEQ ID NO: 3575189 - RNA, 19 nt, Human
gauagaaaugccaagcacu

SEQ ID NO: 3575190 - RNA, 16 nt, Human
gauagaagaacugcaa

SEQ ID NO: 3575191 - RNA, 14 nt, Human
gauagaagauguuu

SEQ ID NO: 3575192 - RNA, 12 nt, Human
gauagaaugaca

SEQ ID NO: 3575193 - RNA, 21 nt, Human
gauagacacauaugaggggga

SEQ ID NO: 3575194 - RNA, 21 nt, Human
gauagacgaguugauuuccuc

SEQ ID NO: 3575195 - RNA, 20 nt, Human
gauagaguaaaaagaaaaca

SEQ ID NO: 3575196 - RNA, 18 nt, Human
gauagauaacucuuugga

SEQ ID NO: 3575197 - RNA, 20 nt, Human
gauagaugcuggcccagggc

SEQ ID NO: 3575198 - RNA, 15 nt, Human
gauagauuugaccuc

SEQ ID NO: 3575199 - RNA, 20 nt, Human
gauagcacagacccugcccu

SEQ ID NO: 3575200 - RNA, 21 nt, Human
gauagcacagacccugcccug

SEQ ID NO: 3575201 - RNA, 19 nt, Human
gauagcacugagcaaagca

SEQ ID NO: 3575202 - RNA, 13 nt, Human
gauagcagggcau

SEQ ID NO: 3575203 - RNA, 15 nt, Human
gauagcauuguaagc

SEQ ID NO: 3575204 - RNA, 15 nt, Human
gauagcauugugaac

SEQ ID NO: 3575205 - RNA, 22 nt, Human
gauagcauuuuugauuuaugca

SEQ ID NO: 3575206 - RNA, 15 nt, Human
gauagcccuguccug

SEQ ID NO: 3575207 - RNA, 17 nt, Human
gauagcccuguccuggu

SEQ ID NO: 3575208 - RNA, 17 nt, Human
gauagcgggaaaaggag

SEQ ID NO: 3575209 - RNA, 18 nt, Human
gauagcuaacauuuuaaa

SEQ ID NO: 3575210 - RNA, 22 nt, Human
gauagcuaacauuuuaaauaaa

SEQ ID NO: 3575211 - RNA, 19 nt, Human
gauagcuaacuguaaauca

SEQ ID NO: 3575212 - RNA, 20 nt, Human
gauagcuaacuguaaaucau

SEQ ID NO: 3575213 - RNA, 13 nt, Human
gauagcugcaugu

SEQ ID NO: 3575214 - RNA, 19 nt, Human
gauagcugcauguggcuuu

SEQ ID NO: 3575215 - RNA, 19 nt, Human
gauaggaaaaaugaguaau

SEQ ID NO: 3575216 - RNA, 19 nt, Human
gauaggaagaaagaagaca

SEQ ID NO: 3575217 - RNA, 21 nt, Human
gauaggaaggucauuuccaug

SEQ ID NO: 3575218 - RNA, 18 nt, Human
gauaggaaugugaaagca

SEQ ID NO: 3575219 - RNA, 17 nt, Human
gauaggagccugcuggu

SEQ ID NO: 3575220 - RNA, 13 nt, Human
gauaggcucugca

SEQ ID NO: 3575221 - RNA, 13 nt, Human
gauaguaagcaua

SEQ ID NO: 3575222 - RNA, 16 nt, Human
gauaguauugugcaua

SEQ ID NO: 3575223 - RNA, 23 nt, Human
gauagugggcaccccacugcaau

SEQ ID NO: 3575224 - RNA, 12 nt, Human
gauaguuacugu

SEQ ID NO: 3575225 - RNA, 14 nt, Human
gauaguuuucuccu

SEQ ID NO: 3575226 - RNA, 18 nt, Human
gauauaaaagacugacca

SEQ ID NO: 3575227 - RNA, 21 nt, Human
gauauaaaugcaauauuaaug

SEQ ID NO: 3575228 - RNA, 15 nt, Human
gauauaaauggcugg

SEQ ID NO: 3575229 - RNA, 21 nt, Human
gauccaagcuggucccacuca

SEQ ID NO: 3575230 - RNA, 22 nt, Human
gauccaauguuagagacuuuuu

SEQ ID NO: 3575231 - RNA, 15 nt, Human
gauccacacacagag

SEQ ID NO: 3575232 - RNA, 19 nt, Human
gauccacacacagaggaag

SEQ ID NO: 3575233 - RNA, 16 nt, Human
gauccacccaacccua

SEQ ID NO: 3575234 - RNA, 17 nt, Human
gauccacccaacccuau

SEQ ID NO: 3575235 - RNA, 21 nt, Human
gauccacccgccucagccucc

SEQ ID NO: 3575236 - RNA, 14 nt, Human
gauccaccugucuc

SEQ ID NO: 3575237 - RNA, 18 nt, Human
gauccaccugucucagcc

SEQ ID NO: 3575238 - RNA, 18 nt, Human
gauccacucgccucagcc

SEQ ID NO: 3575239 - RNA, 19 nt, Human
gauccacuggcuggacaaa

SEQ ID NO: 3575240 - RNA, 18 nt, Human
gauccagcagauuauuca

SEQ ID NO: 3575241 - RNA, 12 nt, Human
gauccagccugg

SEQ ID NO: 3575242 - RNA, 19 nt, Human
gauccaggagcuccagugu

SEQ ID NO: 3575243 - RNA, 23 nt, Human
gauccaggagcuccaguguccug

SEQ ID NO: 3575244 - RNA, 15 nt, Human
gauccagggacagag

SEQ ID NO: 3575245 - RNA, 16 nt, Human
gauccagggacugaag

SEQ ID NO: 3575246 - RNA, 20 nt, Human
gauccagggaggcugguccu

SEQ ID NO: 3575247 - RNA, 12 nt, Human
gauccaguuuug

SEQ ID NO: 3575248 - RNA, 17 nt, Human
gauccaguuuuguuugg

SEQ ID NO: 3575249 - RNA, 22 nt, Human
gauccaguuuuguuuggaccaa

SEQ ID NO: 3575250 - RNA, 22 nt, Human
gauccaugaguuugcccugguu

SEQ ID NO: 3575251 - RNA, 14 nt, Human
gauccauguaacug

SEQ ID NO: 3575252 - RNA, 19 nt, Human
gauccauguagcaggacug

SEQ ID NO: 3575253 - RNA, 17 nt, Human
gauccauuuccauugcu

SEQ ID NO: 3575254 - RNA, 23 nt, Human
gauccauuuccauugcuuauuau

SEQ ID NO: 3575255 - RNA, 17 nt, Human
gaucccaacacugccag

SEQ ID NO: 3575256 - RNA, 19 nt, Human
gaucccaacacugccagca

SEQ ID NO: 3575257 - RNA, 22 nt, Human
gaucccaccccauuuucugugg

SEQ ID NO: 3575258 - RNA, 19 nt, Human
gaucccagcucacgucaca

SEQ ID NO: 3575259 - RNA, 24 nt, Human
gaucccaucuugauaagaccacca

SEQ ID NO: 3575260 - RNA, 14 nt, Human
gauccccaagugug

SEQ ID NO: 3575261 - RNA, 17 nt, Human
gauccccacgccacagc

SEQ ID NO: 3575262 - RNA, 19 nt, Human
gauccccacgccacagccc

SEQ ID NO: 3575263 - RNA, 17 nt, Human
gauccccgccuggccag

SEQ ID NO: 3575264 - RNA, 19 nt, Human
gauccccgccuggccagga

SEQ ID NO: 3575265 - RNA, 21 nt, Human
gauccccgccuggccaggagc

SEQ ID NO: 3575266 - RNA, 22 nt, Human
gauccccgccuggccaggagca

SEQ ID NO: 3575267 - RNA, 17 nt, Human
gauccccucaggacugc

SEQ ID NO: 3575268 - RNA, 16 nt, Human
gaucccguuuucccca

SEQ ID NO: 3575269 - RNA, 14 nt, Human
gaucccucaucugu

SEQ ID NO: 3575270 - RNA, 21 nt, Human
gaucccucccccccaugcacu

SEQ ID NO: 3575271 - RNA, 23 nt, Human
gaucccucuacagagcuucccug

SEQ ID NO: 3575272 - RNA, 14 nt, Human
gaucccucucugga

SEQ ID NO: 3575273 - RNA, 21 nt, Human
gaucccuguguugucucuaga

SEQ ID NO: 3575274 - RNA, 14 nt, Human
gauccgacugcuuu

SEQ ID NO: 3575275 - RNA, 20 nt, Human
gauccuaacugaagagacag

SEQ ID NO: 3575276 - RNA, 19 nt, Human
gauccuaagcaucuaaguu

SEQ ID NO: 3575277 - RNA, 18 nt, Human
gauccuaggcauuugcug

SEQ ID NO: 3575278 - RNA, 18 nt, Human
gauccuaguuccaccauc

SEQ ID NO: 3575279 - RNA, 11 nt, Human
gauccuccagg

SEQ ID NO: 3575280 - RNA, 19 nt, Human
gauccucccaccucagccu

SEQ ID NO: 3575281 - RNA, 21 nt, Human
gauccucccaccucagccucc

SEQ ID NO: 3575282 - RNA, 15 nt, Human
gauccuccccuggac

SEQ ID NO: 3575283 - RNA, 18 nt, Human
gauccuccccuggacucc

SEQ ID NO: 3575284 - RNA, 22 nt, Human
gauccuccugcagaccacgccc

SEQ ID NO: 3575285 - RNA, 15 nt, Human
gauccucucaccuca

SEQ ID NO: 3575286 - RNA, 16 nt, Human
gauccucucaccucag

SEQ ID NO: 3575287 - RNA, 12 nt, Human
gauccugagcca

SEQ ID NO: 3575288 - RNA, 14 nt, Human
gauccugagccaga

SEQ ID NO: 3575289 - RNA, 18 nt, Human
gauccugcacugacucug

SEQ ID NO: 3575290 - RNA, 18 nt, Human
gauccugccacccuguag

SEQ ID NO: 3575291 - RNA, 15 nt, Human
gauccuggaggccca

SEQ ID NO: 3575292 - RNA, 19 nt, Human
gauccugggggccuggguu

SEQ ID NO: 3575293 - RNA, 22 nt, Human
gauccuggguacugaaagccuu

SEQ ID NO: 3575294 - RNA, 12 nt, Human
gauccugugaag

SEQ ID NO: 3575295 - RNA, 22 nt, Human
gauccugugaggagccccaucu

SEQ ID NO: 3575296 - RNA, 20 nt, Human
gauccuguguggagagggaa

SEQ ID NO: 3575297 - RNA, 16 nt, Human
gauccuucaaagucuc

SEQ ID NO: 3575298 - RNA, 23 nt, Human
gauccuucaaagucucaaugaaa

SEQ ID NO: 3575299 - RNA, 13 nt, Human
gauccuucacauu

SEQ ID NO: 3575300 - RNA, 12 nt, Human
gauccuuccucc

SEQ ID NO: 3575301 - RNA, 14 nt, Human
gauccuuuuauguu

SEQ ID NO: 3575302 - RNA, 17 nt, Human
gauccuuuuggagucag

SEQ ID NO: 3575303 - RNA, 20 nt, Human
gaucgcaagagccauguaga

SEQ ID NO: 3575304 - RNA, 15 nt, Human
gaucgcaucauugca

SEQ ID NO: 3575305 - RNA, 14 nt, Human
gaucgcccccaccu

SEQ ID NO: 3575306 - RNA, 13 nt, Human
gaucgccuucccc

SEQ ID NO: 3575307 - RNA, 17 nt, Human
gaucgcgccacugcacu

SEQ ID NO: 3575308 - RNA, 22 nt, Human
gaucggaggcuugucagagcug

SEQ ID NO: 3575309 - RNA, 20 nt, Human
gaucgugcuggcgcuguugg

SEQ ID NO: 3575310 - RNA, 14 nt, Human
gaucuaaauaaaau

SEQ ID NO: 3575311 - RNA, 18 nt, Human
gaucuaagccuuuccaua

SEQ ID NO: 3575312 - RNA, 14 nt, Human
gaucuaaggcuguu

SEQ ID NO: 3575313 - RNA, 14 nt, Human
gaucuaccuggagg

SEQ ID NO: 3575314 - RNA, 20 nt, Human
gaucuagaauguguuuucug

SEQ ID NO: 3575315 - RNA, 22 nt, Human
gaucuagaauguguuuucugaa

SEQ ID NO: 3575316 - RNA, 15 nt, Human
gaucuaggagaggag

SEQ ID NO: 3575317 - RNA, 21 nt, Human
gaucuaggagaggagaaccag

SEQ ID NO: 3575318 - RNA, 16 nt, Human
gaucucaccaggcagc

SEQ ID NO: 3575319 - RNA, 19 nt, Human
gaucucaccaggcagccuc

SEQ ID NO: 3575320 - RNA, 12 nt, Human
gaucucagcuca

SEQ ID NO: 3575321 - RNA, 21 nt, Human
gaucucagcuuugagaagccu

SEQ ID NO: 3575322 - RNA, 20 nt, Human
gaucucagggaagcccagcu

SEQ ID NO: 3575323 - RNA, 14 nt, Human
gaucucaggggcug

SEQ ID NO: 3575324 - RNA, 23 nt, Human
gaucucagugguuaagauuccua

SEQ ID NO: 3575325 - RNA, 20 nt, Human
gaucucauucaguauuaaag

SEQ ID NO: 3575326 - RNA, 16 nt, Human
gaucuccaaggaccag

SEQ ID NO: 3575327 - RNA, 13 nt, Human
gaucucccagggc

SEQ ID NO: 3575328 - RNA, 15 nt, Human
gaucucccugccgcc

SEQ ID NO: 3575329 - RNA, 20 nt, Human
gaucucccugccgccucaau

SEQ ID NO: 3575330 - RNA, 17 nt, Human
gaucucccuuuccuaua

SEQ ID NO: 3575331 - RNA, 13 nt, Human
gaucuccugaccu

SEQ ID NO: 3575332 - RNA, 16 nt, Human
gaucucggcucagugc

SEQ ID NO: 3575333 - RNA, 12 nt, Human
gaucucucagga

SEQ ID NO: 3575334 - RNA, 13 nt, Human
gaucucucaggag

SEQ ID NO: 3575335 - RNA, 16 nt, Human
gaucucucaggagcac

SEQ ID NO: 3575336 - RNA, 18 nt, Human
gaucucucaggagcacag

SEQ ID NO: 3575337 - RNA, 14 nt, Human
gaucucugaagcca

SEQ ID NO: 3575338 - RNA, 22 nt, Human
gaucucugggauuuaugcucau

SEQ ID NO: 3575339 - RNA, 12 nt, Human
gaucucuuccug

SEQ ID NO: 3575340 - RNA, 19 nt, Human
gaucucuugagccugggag

SEQ ID NO: 3575341 - RNA, 15 nt, Human
gaucugagaaucuuu

SEQ ID NO: 3575342 - RNA, 13 nt, Human
gaucugagggaga

SEQ ID NO: 3575343 - RNA, 16 nt, Human
gaucugauugaccgug

SEQ ID NO: 3575344 - RNA, 18 nt, Human
gaucugcccaucgugaag

SEQ ID NO: 3575345 - RNA, 19 nt, Human
gaucugcccaucgugaaga

SEQ ID NO: 3575346 - RNA, 14 nt, Human
gaucugccccuccc

SEQ ID NO: 3575347 - RNA, 12 nt, Human
gaucugccuaag

SEQ ID NO: 3575348 - RNA, 17 nt, Human
gaucugcggaucucagc

SEQ ID NO: 3575349 - RNA, 21 nt, Human
gaucugcggaucucagcuuug

SEQ ID NO: 3575350 - RNA, 16 nt, Human
gaucugcugcagagca

SEQ ID NO: 3575351 - RNA, 20 nt, Human
gaucuggaacccagacucag

SEQ ID NO: 3575352 - RNA, 12 nt, Human
gaucuggaaccu

SEQ ID NO: 3575353 - RNA, 16 nt, Human
gaucuggaaccucagc

SEQ ID NO: 3575354 - RNA, 19 nt, Human
gaucuggaaccucagccug

SEQ ID NO: 3575355 - RNA, 20 nt, Human
gaucuggaaccucagccugg

SEQ ID NO: 3575356 - RNA, 23 nt, Human
gaucuggaaccucagccuggcca

SEQ ID NO: 3575357 - RNA, 17 nt, Human
gaucugggaacucccaa

SEQ ID NO: 3575358 - RNA, 19 nt, Human
gaucugggaacucccaaga

SEQ ID NO: 3575359 - RNA, 22 nt, Human
gaucugguggucagcccuagga

SEQ ID NO: 3575360 - RNA, 18 nt, Human
gaucugguuuugcuauua

SEQ ID NO: 3575361 - RNA, 18 nt, Human
gaucugucacaccagcca

SEQ ID NO: 3575362 - RNA, 15 nt, Human
gaucuguccucagcc

SEQ ID NO: 3575363 - RNA, 16 nt, Human
gaucuguccucagccu

SEQ ID NO: 3575364 - RNA, 18 nt, Human
gaucuguccucagccuug

SEQ ID NO: 3575365 - RNA, 14 nt, Human
gaucugucuuguaa

SEQ ID NO: 3575366 - RNA, 19 nt, Human
gaucugugcccagagaugg

SEQ ID NO: 3575367 - RNA, 14 nt, Human
gaucugugccccau

SEQ ID NO: 3575368 - RNA, 23 nt, Human
gaucugugcuuuccagcucaccc

SEQ ID NO: 3575369 - RNA, 14 nt, Human
gaucuguugcaaac

SEQ ID NO: 3575370 - RNA, 20 nt, Human
gaucuguuguguacguggag

SEQ ID NO: 3575371 - RNA, 18 nt, Human
gaucuguuuugaaggcaa

SEQ ID NO: 3575372 - RNA, 23 nt, Human
gaucuguuuuuaaaaaucauaaa

SEQ ID NO: 3575373 - RNA, 19 nt, Human
gaucuuaaauuuugugaua

SEQ ID NO: 3575374 - RNA, 16 nt, Human
gaucuuauuuuucuaa

SEQ ID NO: 3575375 - RNA, 16 nt, Human
gaucuucaauggcuuu

SEQ ID NO: 3575376 - RNA, 14 nt, Human
gaucuucugaaaug

SEQ ID NO: 3575377 - RNA, 22 nt, Human
gaucuucuguggguuucuaaag

SEQ ID NO: 3575378 - RNA, 23 nt, Human
gaucuugaauguggucucaggau

SEQ ID NO: 3575379 - RNA, 19 nt, Human
gaucuugagcaaguuccuu

SEQ ID NO: 3575380 - RNA, 23 nt, Human
gaucuugaguauaagaaaugcau

SEQ ID NO: 3575381 - RNA, 20 nt, Human
gaucuugcucuaucucacag

SEQ ID NO: 3575382 - RNA, 19 nt, Human
gaucuuggcuuacugcagc

SEQ ID NO: 3575383 - RNA, 14 nt, Human
gaucuuuaaaauac

SEQ ID NO: 3575384 - RNA, 19 nt, Human
gaucuuucacccacagaaa

SEQ ID NO: 3575385 - RNA, 20 nt, Human
gaucuuucacccacagaaag

SEQ ID NO: 3575386 - RNA, 23 nt, Human
gaucuuucacccacagaaagaga

SEQ ID NO: 3575387 - RNA, 18 nt, Human
gaucuuucuuuccuuucu

SEQ ID NO: 3575388 - RNA, 11 nt, Human
gaucuuugugg

SEQ ID NO: 3575389 - RNA, 13 nt, Human
gaucuuuuaaagu

SEQ ID NO: 3575390 - RNA, 14 nt, Human
gaucuuuuauuuug

SEQ ID NO: 3575391 - RNA, 16 nt, Human
gaucuuuucaaguuaa

SEQ ID NO: 3575392 - RNA, 18 nt, Human
gaucuuuuguucccaucc

SEQ ID NO: 3575393 - RNA, 17 nt, Human
gaugaaaagcuuuguuu

SEQ ID NO: 3575394 - RNA, 15 nt, Human
gaugaaaauaaagaa

SEQ ID NO: 3575395 - RNA, 16 nt, Human
gaugaaaauaaagaau

SEQ ID NO: 3575396 - RNA, 16 nt, Human
gaugaaaauauuuaaa

SEQ ID NO: 3575397 - RNA, 17 nt, Human
gaugaaaauauuuaaag

SEQ ID NO: 3575398 - RNA, 22 nt, Human
gaugaaacuaaagcaauagaaa

SEQ ID NO: 3575399 - RNA, 17 nt, Human
gaugaaauuccauuugu

SEQ ID NO: 3575400 - RNA, 20 nt, Human
gaugaaccagccggggccuu

SEQ ID NO: 3575401 - RNA, 23 nt, Human
gaugaacccaggacgcuucugaa

SEQ ID NO: 3575402 - RNA, 17 nt, Human
gaugaacuuauucugua

SEQ ID NO: 3575403 - RNA, 19 nt, Human
gaugaagcaaacacauuaa

SEQ ID NO: 3575404 - RNA, 20 nt, Human
gaugaagcaaggaagauaua

SEQ ID NO: 3575405 - RNA, 16 nt, Human
gaugaagggcccgaga

SEQ ID NO: 3575406 - RNA, 15 nt, Human
gaugaaggucuguuu

SEQ ID NO: 3575407 - RNA, 17 nt, Human
gaugaaguuaucuggcu

SEQ ID NO: 3575408 - RNA, 19 nt, Human
gaugaaguuaucuggcuuc

SEQ ID NO: 3575409 - RNA, 14 nt, Human
gaugaauacauuuu

SEQ ID NO: 3575410 - RNA, 21 nt, Human
gaugaauagaaguuuuaaauu

SEQ ID NO: 3575411 - RNA, 15 nt, Human
gaugaaugccgugga

SEQ ID NO: 3575412 - RNA, 13 nt, Human
gaugaauguaugu

SEQ ID NO: 3575413 - RNA, 14 nt, Human
gaugaauguaugug

SEQ ID NO: 3575414 - RNA, 20 nt, Human
gaugacaacuggaauaguuu

SEQ ID NO: 3575415 - RNA, 16 nt, Human
gaugacaauaaagcuu

SEQ ID NO: 3575416 - RNA, 18 nt, Human
gaugacaugugacuccua

SEQ ID NO: 3575417 - RNA, 16 nt, Human
gaugacauugcuaaga

SEQ ID NO: 3575418 - RNA, 18 nt, Human
gaugacauugcuaagaug

SEQ ID NO: 3575419 - RNA, 18 nt, Human
gaugaccaauuuuaacuu

SEQ ID NO: 3575420 - RNA, 18 nt, Human
gaugaccagaacaagguu

SEQ ID NO: 3575421 - RNA, 16 nt, Human
gaugaccccuccccua

SEQ ID NO: 3575422 - RNA, 14 nt, Human
gaugaccccugccc

SEQ ID NO: 3575423 - RNA, 23 nt, Human
gaugacccugcgaaggggcccug

SEQ ID NO: 3575424 - RNA, 15 nt, Human
gaugacccuuuucau

SEQ ID NO: 3575425 - RNA, 15 nt, Human
gaugaccuggauaac

SEQ ID NO: 3575426 - RNA, 20 nt, Human
gaugaccuugaaugaugcca

SEQ ID NO: 3575427 - RNA, 21 nt, Human
gaugacgacgacaacgaugau

SEQ ID NO: 3575428 - RNA, 12 nt, Human
gaugacuaaaau

SEQ ID NO: 3575429 - RNA, 15 nt, Human
gaugacuaaaauauu

SEQ ID NO: 3575430 - RNA, 16 nt, Human
gaugacuagaggcagg

SEQ ID NO: 3575431 - RNA, 13 nt, Human
gaugacucaagau

SEQ ID NO: 3575432 - RNA, 14 nt, Human
gaugacucaagauu

SEQ ID NO: 3575433 - RNA, 21 nt, Human
gaugacucaagauucccagga

SEQ ID NO: 3575434 - RNA, 12 nt, Human
gaugacugaguc

SEQ ID NO: 3575435 - RNA, 13 nt, Human
gaugacuggaauu

SEQ ID NO: 3575436 - RNA, 22 nt, Human
gaugacuggaauuuuuauuaug

SEQ ID NO: 3575437 - RNA, 14 nt, Human
gaugacuggcauuu

SEQ ID NO: 3575438 - RNA, 18 nt, Human
gaugacuggcauuuuaua

SEQ ID NO: 3575439 - RNA, 20 nt, Human
gaugacuggcauuuuauaga

SEQ ID NO: 3575440 - RNA, 15 nt, Human
gaugacuguguugua

SEQ ID NO: 3575441 - RNA, 15 nt, Human
gaugagaacaaagcu

SEQ ID NO: 3575442 - RNA, 20 nt, Human
gaugagaauucagcugcccc

SEQ ID NO: 3575443 - RNA, 22 nt, Human
gaugagaauuucuaaaaagauu

SEQ ID NO: 3575444 - RNA, 23 nt, Human
gaugagacuuccaaaccugacag

SEQ ID NO: 3575445 - RNA, 14 nt, Human
gaugagagcccaga

SEQ ID NO: 3575446 - RNA, 17 nt, Human
gaugagagcccagaggu

SEQ ID NO: 3575447 - RNA, 21 nt, Human
gaugagagcccagagguaaca

SEQ ID NO: 3575448 - RNA, 16 nt, Human
gaugagaggaaaucac

SEQ ID NO: 3575449 - RNA, 21 nt, Human
gaugagcauuuagggcaagga

SEQ ID NO: 3575450 - RNA, 19 nt, Human
gaugagcccucagaacccu

SEQ ID NO: 3575451 - RNA, 22 nt, Human
gaugagcccucagaacccuugg

SEQ ID NO: 3575452 - RNA, 13 nt, Human
gaugagcucccac

SEQ ID NO: 3575453 - RNA, 18 nt, Human
gaugagcucccacaagcc

SEQ ID NO: 3575454 - RNA, 20 nt, Human
gaugagcuggaaggagugag

SEQ ID NO: 3575455 - RNA, 13 nt, Human
gaugaggcaaccc

SEQ ID NO: 3575456 - RNA, 13 nt, Human
gaugaggcagagg

SEQ ID NO: 3575457 - RNA, 13 nt, Human
gaugaggccagac

SEQ ID NO: 3575458 - RNA, 19 nt, Human
gaugaggcccuccacaccu

SEQ ID NO: 3575459 - RNA, 21 nt, Human
gaugaggcccuccacaccugc

SEQ ID NO: 3575460 - RNA, 22 nt, Human
gaugaggccgcuagaggccuga

SEQ ID NO: 3575461 - RNA, 12 nt, Human
gaugagggcagc

SEQ ID NO: 3575462 - RNA, 15 nt, Human
gaugagggcagcagc

SEQ ID NO: 3575463 - RNA, 18 nt, Human
gaugagggcagcagccag

SEQ ID NO: 3575464 - RNA, 14 nt, Human
gaugaggggaggaa

SEQ ID NO: 3575465 - RNA, 19 nt, Human
gaugaggucaguuguguuu

SEQ ID NO: 3575466 - RNA, 16 nt, Human
gaugagugagcaugcc

SEQ ID NO: 3575467 - RNA, 18 nt, Human
gaugaguguaacaagaaa

SEQ ID NO: 3575468 - RNA, 20 nt, Human
gaugaguguaacaagaaagg

SEQ ID NO: 3575469 - RNA, 18 nt, Human
gaugauaaauaugguuaa

SEQ ID NO: 3575470 - RNA, 18 nt, Human
gaugauacauccaaagca

SEQ ID NO: 3575471 - RNA, 19 nt, Human
gaugauacuaauaaacuaa

SEQ ID NO: 3575472 - RNA, 19 nt, Human
gaugaucaauccuuuauua

SEQ ID NO: 3575473 - RNA, 20 nt, Human
gaugaucagcuguuugucau

SEQ ID NO: 3575474 - RNA, 20 nt, Human
gaugauccccacgccacagc

SEQ ID NO: 3575475 - RNA, 21 nt, Human
gaugauccccacgccacagcc

SEQ ID NO: 3575476 - RNA, 16 nt, Human
gaugauccggauuuaa

SEQ ID NO: 3575477 - RNA, 21 nt, Human
gaugaucuacucagaaauuuu

SEQ ID NO: 3575478 - RNA, 14 nt, Human
gaugaucuuugcag

SEQ ID NO: 3575479 - RNA, 20 nt, Human
gaugaucuuugcagacaggc

SEQ ID NO: 3575480 - RNA, 23 nt, Human
gaugaugacgacgacaacgauga

SEQ ID NO: 3575481 - RNA, 14 nt, Human
gaugaugacuaugg

SEQ ID NO: 3575482 - RNA, 19 nt, Human
gaugaugccaaccucugga

SEQ ID NO: 3575483 - RNA, 17 nt, Human
gaugaugggaauugugu

SEQ ID NO: 3575484 - RNA, 22 nt, Human
gaugaugguugcaaaagacuaa

SEQ ID NO: 3575485 - RNA, 19 nt, Human
gaugauugaagaaacagcu

SEQ ID NO: 3575486 - RNA, 12 nt, Human
gaugauuucaga

SEQ ID NO: 3575487 - RNA, 14 nt, Human
gaugauuuccaagc

SEQ ID NO: 3575488 - RNA, 13 nt, Human
gaugauuucuaug

SEQ ID NO: 3575489 - RNA, 18 nt, Human
gaugauuuuuugaaaguu

SEQ ID NO: 3575490 - RNA, 19 nt, Human
gaugcaaggaccaggacuc

SEQ ID NO: 3575491 - RNA, 18 nt, Human
gaugcacagagaagcugg

SEQ ID NO: 3575492 - RNA, 15 nt, Human
gaugcacaucccugg

SEQ ID NO: 3575493 - RNA, 16 nt, Human
gaugcaccaccaagcc

SEQ ID NO: 3575494 - RNA, 13 nt, Human
gaugcaccagccc

SEQ ID NO: 3575495 - RNA, 22 nt, Human
gaugcacuucaaauucaaauaa

SEQ ID NO: 3575496 - RNA, 22 nt, Human
gaugcacuuugcuuuaauauaa

SEQ ID NO: 3575497 - RNA, 23 nt, Human
gaugcacuuugcuuuaauauaaa

SEQ ID NO: 3575498 - RNA, 16 nt, Human
gaugcagcauuaugau

SEQ ID NO: 3575499 - RNA, 12 nt, Human
gaugcagcauuu

SEQ ID NO: 3575500 - RNA, 15 nt, Human
gaugcagcauuugau

SEQ ID NO: 3575501 - RNA, 12 nt, Human
gaugcagccuca

SEQ ID NO: 3575502 - RNA, 22 nt, Human
gaugcaggcacuuauuguaaau

SEQ ID NO: 3575503 - RNA, 19 nt, Human
gaugcaggcuccccugagg

SEQ ID NO: 3575504 - RNA, 15 nt, Human
gaugcagggcaguca

SEQ ID NO: 3575505 - RNA, 17 nt, Human
gaugcagucuccucuuu

SEQ ID NO: 3575506 - RNA, 21 nt, Human
gaugcagucuccucuuuaaaa

SEQ ID NO: 3575507 - RNA, 23 nt, Human
gaugcaugugguuugguuccucu

SEQ ID NO: 3575508 - RNA, 20 nt, Human
gaugcauguugauuaaacuc

SEQ ID NO: 3575509 - RNA, 20 nt, Human
gaugcauguuuuccagcucc

SEQ ID NO: 3575510 - RNA, 21 nt, Human
gaugcauguuuuccagcuccu

SEQ ID NO: 3575511 - RNA, 15 nt, Human
gaugcauuaaaagaa

SEQ ID NO: 3575512 - RNA, 15 nt, Human
gaugcauuugggucc

SEQ ID NO: 3575513 - RNA, 16 nt, Human
gaugcauuugggucca

SEQ ID NO: 3575514 - RNA, 18 nt, Human
gaugcauuuggguccagg

SEQ ID NO: 3575515 - RNA, 21 nt, Human
gaugcauuuggguccaggagg

SEQ ID NO: 3575516 - RNA, 22 nt, Human
gaugccaaccucuggagcaaug

SEQ ID NO: 3575517 - RNA, 21 nt, Human
gaugccaagaaguuuaaggaa

SEQ ID NO: 3575518 - RNA, 22 nt, Human
gaugccaauacuagucacccca

SEQ ID NO: 3575519 - RNA, 17 nt, Human
gaugccacacagagugg

SEQ ID NO: 3575520 - RNA, 12 nt, Human
gaugccacccua

SEQ ID NO: 3575521 - RNA, 12 nt, Human
gaugccagccaa

SEQ ID NO: 3575522 - RNA, 11 nt, Human
gaugccaggac

SEQ ID NO: 3575523 - RNA, 18 nt, Human
gaugccaguuacuugcuu

SEQ ID NO: 3575524 - RNA, 18 nt, Human
gaugccaucuguguccug

SEQ ID NO: 3575525 - RNA, 21 nt, Human
gaugccaucuguguccugguu

SEQ ID NO: 3575526 - RNA, 20 nt, Human
gaugccauucuuccuugcaa

SEQ ID NO: 3575527 - RNA, 17 nt, Human
gaugcccacugaggaau

SEQ ID NO: 3575528 - RNA, 11 nt, Human
gaugcccagag

SEQ ID NO: 3575529 - RNA, 22 nt, Human
gaugcccagagggcccaggcag

SEQ ID NO: 3575530 - RNA, 23 nt, Human
gaugcccagagggcccaggcagg

SEQ ID NO: 3575531 - RNA, 20 nt, Human
gaugcccagggccacucugc

SEQ ID NO: 3575532 - RNA, 21 nt, Human
gaugcccagggccacucugcc

SEQ ID NO: 3575533 - RNA, 16 nt, Human
gaugccccagagcugu

SEQ ID NO: 3575534 - RNA, 16 nt, Human
gaugccccgucccccu

SEQ ID NO: 3575535 - RNA, 12 nt, Human
gaugcccugcua

SEQ ID NO: 3575536 - RNA, 19 nt, Human
gaugccucccugacccugc

SEQ ID NO: 3575537 - RNA, 22 nt, Human
gaugccucccugacccugcaga

SEQ ID NO: 3575538 - RNA, 15 nt, Human
gaugccuccuuccuc

SEQ ID NO: 3575539 - RNA, 14 nt, Human
gaugccugaacuug

SEQ ID NO: 3575540 - RNA, 15 nt, Human
gaugccugauugcca

SEQ ID NO: 3575541 - RNA, 21 nt, Human
gaugccuggcgggguggggug

SEQ ID NO: 3575542 - RNA, 15 nt, Human
gaugccugguggcag

SEQ ID NO: 3575543 - RNA, 16 nt, Human
gaugccugguggcagc

SEQ ID NO: 3575544 - RNA, 17 nt, Human
gaugccugguggcagcu

SEQ ID NO: 3575545 - RNA, 22 nt, Human
gaugccuuuuuuguaguuuuuu

SEQ ID NO: 3575546 - RNA, 22 nt, Human
gaugcgagcgcuaucuucacau

SEQ ID NO: 3575547 - RNA, 22 nt, Human
gaugcggccauucaaggggagc

SEQ ID NO: 3575548 - RNA, 20 nt, Human
gaugcgggccagugcuccag

SEQ ID NO: 3575549 - RNA, 22 nt, Human
gaugcgggccagugcuccagcc

SEQ ID NO: 3575550 - RNA, 18 nt, Human
gaugcguuguuacaggaa

SEQ ID NO: 3575551 - RNA, 20 nt, Human
gaugcguuguuacaggaagu

SEQ ID NO: 3575552 - RNA, 15 nt, Human
gaugcuacuaagaaa

SEQ ID NO: 3575553 - RNA, 16 nt, Human
gaugcuagaacucccu

SEQ ID NO: 3575554 - RNA, 20 nt, Human
gaugcuagaacucccuuuca

SEQ ID NO: 3575555 - RNA, 22 nt, Human
gaugcuagaacucccuuucaac

SEQ ID NO: 3575556 - RNA, 18 nt, Human
gaugcuauggucagguua

SEQ ID NO: 3575557 - RNA, 14 nt, Human
gaugcuauuugcaa

SEQ ID NO: 3575558 - RNA, 14 nt, Human
gaugcucacagggc

SEQ ID NO: 3575559 - RNA, 16 nt, Human
gaugcuccaagauucu

SEQ ID NO: 3575560 - RNA, 19 nt, Human
gaugcuccaagauucuaga

SEQ ID NO: 3575561 - RNA, 22 nt, Human
gaugcuccaagauucuagauga

SEQ ID NO: 3575562 - RNA, 17 nt, Human
gaugcuccagccaaccc

SEQ ID NO: 3575563 - RNA, 14 nt, Human
gaugcucuuuccca

SEQ ID NO: 3575564 - RNA, 20 nt, Human
gaugcugaaacaggagagaa

SEQ ID NO: 3575565 - RNA, 20 nt, Human
gaugcugacauucaccugcc

SEQ ID NO: 3575566 - RNA, 13 nt, Human
gaugcugauguuc

SEQ ID NO: 3575567 - RNA, 12 nt, Human
gaugcugccuga

SEQ ID NO: 3575568 - RNA, 22 nt, Human
gaugcugcuuccgguagggagg

SEQ ID NO: 3575569 - RNA, 20 nt, Human
gaugcuggagaagagaggag

SEQ ID NO: 3575570 - RNA, 21 nt, Human
gaugcuggagaagagaggaga

SEQ ID NO: 3575571 - RNA, 18 nt, Human
gaugcuggaugcuccuuc

SEQ ID NO: 3575572 - RNA, 17 nt, Human
gaugcuggaugucugcc

SEQ ID NO: 3575573 - RNA, 15 nt, Human
gaugcuggcccaggg

SEQ ID NO: 3575574 - RNA, 21 nt, Human
gaugcuggcccagggcccaga

SEQ ID NO: 3575575 - RNA, 19 nt, Human
gaugcugggaguucuaaca

SEQ ID NO: 3575576 - RNA, 21 nt, Human
gaugcugggcacuucaucuga

SEQ ID NO: 3575577 - RNA, 12 nt, Human
gaugcugggcug

SEQ ID NO: 3575578 - RNA, 17 nt, Human
gaugcugggcuggcucc

SEQ ID NO: 3575579 - RNA, 14 nt, Human
gaugcugggcuggg

SEQ ID NO: 3575580 - RNA, 15 nt, Human
gaugcugggcugggu

SEQ ID NO: 3575581 - RNA, 20 nt, Human
gaugcugguaauggccaugg

SEQ ID NO: 3575582 - RNA, 20 nt, Human
gaugcuggucauguguuuga

SEQ ID NO: 3575583 - RNA, 19 nt, Human
gaugcuguaacuuaaaaua

SEQ ID NO: 3575584 - RNA, 18 nt, Human
gaugcuguagacaucugu

SEQ ID NO: 3575585 - RNA, 21 nt, Human
gaugcugucuucguacuggga

SEQ ID NO: 3575586 - RNA, 16 nt, Human
gaugcugugcuaugaa

SEQ ID NO: 3575587 - RNA, 17 nt, Human
gaugcuguguauauggu

SEQ ID NO: 3575588 - RNA, 13 nt, Human
gaugcuguuugac

SEQ ID NO: 3575589 - RNA, 20 nt, Human
gaugcuuagagggauuucuu

SEQ ID NO: 3575590 - RNA, 17 nt, Human
gaugcuucuucagagac

SEQ ID NO: 3575591 - RNA, 21 nt, Human
gaugcuucuucagagacuccu

SEQ ID NO: 3575592 - RNA, 21 nt, Human
gaugcuuguaacaagaaaaca

SEQ ID NO: 3575593 - RNA, 22 nt, Human
gauggaaaaaccacccccaaau

SEQ ID NO: 3575594 - RNA, 18 nt, Human
gauggaaaaacugaggcu

SEQ ID NO: 3575595 - RNA, 17 nt, Human
gauggaaaaggaagacu

SEQ ID NO: 3575596 - RNA, 18 nt, Human
gauggaaaaguguccuuc

SEQ ID NO: 3575597 - RNA, 17 nt, Human
gauggaaaauucauuuu

SEQ ID NO: 3575598 - RNA, 17 nt, Human
gauggaaccgcaggaag

SEQ ID NO: 3575599 - RNA, 19 nt, Human
gauggaaccgcaggaagcu

SEQ ID NO: 3575600 - RNA, 21 nt, Human
gauggaaguugcagugagcug

SEQ ID NO: 3575601 - RNA, 13 nt, Human
gauggaauuuuuu

SEQ ID NO: 3575602 - RNA, 23 nt, Human
gauggagacugguccugugugca

SEQ ID NO: 3575603 - RNA, 14 nt, Human
gauggagagagggg

SEQ ID NO: 3575604 - RNA, 16 nt, Human
gauggagagaggggaa

SEQ ID NO: 3575605 - RNA, 20 nt, Human
gauggagccagcucugcauu

SEQ ID NO: 3575606 - RNA, 14 nt, Human
gauggagcccaggc

SEQ ID NO: 3575607 - RNA, 19 nt, Human
gauggagcccaggcgggag

SEQ ID NO: 3575608 - RNA, 16 nt, Human
gauggagcgcaccugc

SEQ ID NO: 3575609 - RNA, 14 nt, Human
gauggaggagaaga

SEQ ID NO: 3575610 - RNA, 19 nt, Human
gauggagguucucucggag

SEQ ID NO: 3575611 - RNA, 18 nt, Human
gauggaguccagggaaga

SEQ ID NO: 3575612 - RNA, 18 nt, Human
gauggaguucuugugcca

SEQ ID NO: 3575613 - RNA, 15 nt, Human
gauggaguuucuaag

SEQ ID NO: 3575614 - RNA, 19 nt, Human
gauggauauauguuuuuga

SEQ ID NO: 3575615 - RNA, 23 nt, Human
gauggaugccaauauuaaaucug

SEQ ID NO: 3575616 - RNA, 15 nt, Human
gauggauuugaagca

SEQ ID NO: 3575617 - RNA, 16 nt, Human
gauggcaacagaucug

SEQ ID NO: 3575618 - RNA, 22 nt, Human
gauggcaacagaucuggaaccu

SEQ ID NO: 3575619 - RNA, 14 nt, Human
gauggcaccagagg

SEQ ID NO: 3575620 - RNA, 13 nt, Human
gauggcaggaugg

SEQ ID NO: 3575621 - RNA, 17 nt, Human
gauggcaggauggccug

SEQ ID NO: 3575622 - RNA, 18 nt, Human
gauggcaggauggccugg

SEQ ID NO: 3575623 - RNA, 13 nt, Human
gauggccagcccc

SEQ ID NO: 3575624 - RNA, 12 nt, Human
gauggccagugu

SEQ ID NO: 3575625 - RNA, 22 nt, Human
gauggcccauucuacuugcucu

SEQ ID NO: 3575626 - RNA, 12 nt, Human
gauggccccagc

SEQ ID NO: 3575627 - RNA, 14 nt, Human
gauggccccagcac

SEQ ID NO: 3575628 - RNA, 15 nt, Human
gauggccccagcaca

SEQ ID NO: 3575629 - RNA, 21 nt, Human
gauggccgcagggcugugcac

SEQ ID NO: 3575630 - RNA, 18 nt, Human
gauggccggagaggaccg

SEQ ID NO: 3575631 - RNA, 13 nt, Human
gauggccugagaa

SEQ ID NO: 3575632 - RNA, 14 nt, Human
gauggccuggccag

SEQ ID NO: 3575633 - RNA, 17 nt, Human
gauggccuuaauuuccu

SEQ ID NO: 3575634 - RNA, 15 nt, Human
gauggcucagagggg

SEQ ID NO: 3575635 - RNA, 18 nt, Human
gauggcucccaggggcuc

SEQ ID NO: 3575636 - RNA, 12 nt, Human
gauggcuccucu

SEQ ID NO: 3575637 - RNA, 19 nt, Human
gauggcuggaaggggucca

SEQ ID NO: 3575638 - RNA, 13 nt, Human
gauggcugugccu

SEQ ID NO: 3575639 - RNA, 18 nt, Human
gauggcugugccucugcc

SEQ ID NO: 3575640 - RNA, 15 nt, Human
gauggcuugucuaua

SEQ ID NO: 3575641 - RNA, 21 nt, Human
gauggcuuugaaugcggccca

SEQ ID NO: 3575642 - RNA, 20 nt, Human
gaugggagggaggcucaggu

SEQ ID NO: 3575643 - RNA, 20 nt, Human
gaugggcauaugugucagug

SEQ ID NO: 3575644 - RNA, 20 nt, Human
gaugggcaugguguucuccu

SEQ ID NO: 3575645 - RNA, 14 nt, Human
gaugggcuuucucu

SEQ ID NO: 3575646 - RNA, 16 nt, Human
gauggggaccagcagc

SEQ ID NO: 3575647 - RNA, 18 nt, Human
gauggggaccagcagccc

SEQ ID NO: 3575648 - RNA, 11 nt, Human
gauggggaggg

SEQ ID NO: 3575649 - RNA, 22 nt, Human
gauggggauaaaaugacuacuu

SEQ ID NO: 3575650 - RNA, 13 nt, Human
gauggggccacag

SEQ ID NO: 3575651 - RNA, 13 nt, Human
gauggggcccugc

SEQ ID NO: 3575652 - RNA, 13 nt, Human
gauggggccucug

SEQ ID NO: 3575653 - RNA, 12 nt, Human
gauggggcuccc

SEQ ID NO: 3575654 - RNA, 19 nt, Human
gauggggcucccgcccgug

SEQ ID NO: 3575655 - RNA, 13 nt, Human
gauggggcugcac

SEQ ID NO: 3575656 - RNA, 19 nt, Human
gaugggggaacucagaucc

SEQ ID NO: 3575657 - RNA, 15 nt, Human
gaugggggaugcuuc

SEQ ID NO: 3575658 - RNA, 23 nt, Human
gauggggucucacaguguugccc

SEQ ID NO: 3575659 - RNA, 21 nt, Human
gaugggucuggcugagcugaa

SEQ ID NO: 3575660 - RNA, 22 nt, Human
gaugggucugguuugcagagcu

SEQ ID NO: 3575661 - RNA, 21 nt, Human
gauggguucuaauuuuggaug

SEQ ID NO: 3575662 - RNA, 18 nt, Human
gauggguuuuaugagaug

SEQ ID NO: 3575663 - RNA, 19 nt, Human
gaugguacgugacccucug

SEQ ID NO: 3575664 - RNA, 14 nt, Human
gauggucagcuccc

SEQ ID NO: 3575665 - RNA, 13 nt, Human
gauggucauccag

SEQ ID NO: 3575666 - RNA, 13 nt, Human
gauggugggaugu

SEQ ID NO: 3575667 - RNA, 17 nt, Human
gauggugggaugugguu

SEQ ID NO: 3575668 - RNA, 21 nt, Human
gauggugucucuucuuuagaa

SEQ ID NO: 3575669 - RNA, 15 nt, Human
gauggugugccuucc

SEQ ID NO: 3575670 - RNA, 17 nt, Human
gauggugugccuuccag

SEQ ID NO: 3575671 - RNA, 17 nt, Human
gaugguguggguguccu

SEQ ID NO: 3575672 - RNA, 17 nt, Human
gaugguuacacuguuag

SEQ ID NO: 3575673 - RNA, 14 nt, Human
gaugguuucuugca

SEQ ID NO: 3575674 - RNA, 16 nt, Human
gaugguuuuaaacuuu

SEQ ID NO: 3575675 - RNA, 18 nt, Human
gauguaaaagacuuuuuu

SEQ ID NO: 3575676 - RNA, 17 nt, Human
gauguaaaaucuuguca

SEQ ID NO: 3575677 - RNA, 20 nt, Human
gauguaaaaucuugucaugu

SEQ ID NO: 3575678 - RNA, 19 nt, Human
gauguaaacagugccugcu

SEQ ID NO: 3575679 - RNA, 23 nt, Human
gauguaaauaaccccauucuuug

SEQ ID NO: 3575680 - RNA, 13 nt, Human
gauguaauacuuc

SEQ ID NO: 3575681 - RNA, 21 nt, Human
gauguaaucucucugcagcug

SEQ ID NO: 3575682 - RNA, 23 nt, Human
gauguaaucucucugcagcugcc

SEQ ID NO: 3575683 - RNA, 11 nt, Human
gauguaauuga

SEQ ID NO: 3575684 - RNA, 23 nt, Human
gauguaauuuaggguacuaaauu

SEQ ID NO: 3575685 - RNA, 17 nt, Human
gauguacaguugggaaa

SEQ ID NO: 3575686 - RNA, 18 nt, Human
gauguacucuaaauacug

SEQ ID NO: 3575687 - RNA, 15 nt, Human
gauguagauuuauuu

SEQ ID NO: 3575688 - RNA, 13 nt, Human
gauguaggaggga

SEQ ID NO: 3575689 - RNA, 17 nt, Human
gauguaggcauucugga

SEQ ID NO: 3575690 - RNA, 21 nt, Human
gauguaggguaaggugccuuc

SEQ ID NO: 3575691 - RNA, 14 nt, Human
gauguauauuccuu

SEQ ID NO: 3575692 - RNA, 21 nt, Human
gauguauauuccuuugaagau

SEQ ID NO: 3575693 - RNA, 20 nt, Human
gauguaucgggaagauuucu

SEQ ID NO: 3575694 - RNA, 22 nt, Human
gauguaucgggaagauuucuaa

SEQ ID NO: 3575695 - RNA, 21 nt, Human
gauguaucugaguugccaaga

SEQ ID NO: 3575696 - RNA, 22 nt, Human
gauguaugaaggcuuuuggucu

SEQ ID NO: 3575697 - RNA, 20 nt, Human
gauguaugaauacagcagca

SEQ ID NO: 3575698 - RNA, 16 nt, Human
gauguauuuugugagu

SEQ ID NO: 3575699 - RNA, 15 nt, Human
gaugucaauuucugu

SEQ ID NO: 3575700 - RNA, 20 nt, Human
gaugucaucagagcuccucu

SEQ ID NO: 3575701 - RNA, 17 nt, Human
gauguccacagaugccu

SEQ ID NO: 3575702 - RNA, 20 nt, Human
gauguccacagaugccucca

SEQ ID NO: 3575703 - RNA, 20 nt, Human
gauguccagaagaauauuca

SEQ ID NO: 3575704 - RNA, 17 nt, Human
gaugucccaacuuguaa

SEQ ID NO: 3575705 - RNA, 13 nt, Human
gauguccccagca

SEQ ID NO: 3575706 - RNA, 19 nt, Human
gaugucccugggccagggu

SEQ ID NO: 3575707 - RNA, 21 nt, Human
gaugucccugggccagggucu

SEQ ID NO: 3575708 - RNA, 22 nt, Human
gaugucccugggccagggucug

SEQ ID NO: 3575709 - RNA, 20 nt, Human
gaugucccuugaugcacaga

SEQ ID NO: 3575710 - RNA, 21 nt, Human
gaugucccuugaugcacagag

SEQ ID NO: 3575711 - RNA, 22 nt, Human
gaugucccuugaugcacagaga

SEQ ID NO: 3575712 - RNA, 21 nt, Human
gaugucugccaauuuuugccu

SEQ ID NO: 3575713 - RNA, 20 nt, Human
gaugucuguuugcugauggu

SEQ ID NO: 3575714 - RNA, 20 nt, Human
gaugucuuauuuuuagaugg

SEQ ID NO: 3575715 - RNA, 22 nt, Human
gaugucuuggaacauuggaaug

SEQ ID NO: 3575716 - RNA, 12 nt, Human
gaugucuuuguu

SEQ ID NO: 3575717 - RNA, 18 nt, Human
gaugucuuuuauagugga

SEQ ID NO: 3575718 - RNA, 16 nt, Human
gaugucuuuuuauuaa

SEQ ID NO: 3575719 - RNA, 14 nt, Human
gaugugaacacauc

SEQ ID NO: 3575720 - RNA, 13 nt, Human
gaugugaagccaa

SEQ ID NO: 3575721 - RNA, 23 nt, Human
gaugugaagccaauucagacagg

SEQ ID NO: 3575722 - RNA, 23 nt, Human
gaugugaauugccugcagagaga

SEQ ID NO: 3575723 - RNA, 19 nt, Human
gaugugaguugcacagcua

SEQ ID NO: 3575724 - RNA, 19 nt, Human
gaugugauauauuccuaaa

SEQ ID NO: 3575725 - RNA, 15 nt, Human
gaugugauuguggaa

SEQ ID NO: 3575726 - RNA, 16 nt, Human
gaugugcaauugauuu

SEQ ID NO: 3575727 - RNA, 14 nt, Human
gaugugcagcagau

SEQ ID NO: 3575728 - RNA, 21 nt, Human
gaugugcagcagauuggaagg

SEQ ID NO: 3575729 - RNA, 23 nt, Human
gaugugcagcagauuggaaggag

SEQ ID NO: 3575730 - RNA, 18 nt, Human
gaugugcagcauuucacu

SEQ ID NO: 3575731 - RNA, 15 nt, Human
gaugugcaugggagc

SEQ ID NO: 3575732 - RNA, 21 nt, Human
gaugugcauuuuugugaaaug

SEQ ID NO: 3575733 - RNA, 19 nt, Human
gaugugccugcuucagccu

SEQ ID NO: 3575734 - RNA, 15 nt, Human
gaugugcugcagugc

SEQ ID NO: 3575735 - RNA, 15 nt, Human
gaugugcugcuuuga

SEQ ID NO: 3575736 - RNA, 14 nt, Human
gaugugcuuaacag

SEQ ID NO: 3575737 - RNA, 19 nt, Human
gaugugcuuguuaacugag

SEQ ID NO: 3575738 - RNA, 23 nt, Human
gauguggaaaagccaagaggcug

SEQ ID NO: 3575739 - RNA, 21 nt, Human
gauguggaacugcugccacug

SEQ ID NO: 3575740 - RNA, 16 nt, Human
gauguggagccaggcg

SEQ ID NO: 3575741 - RNA, 18 nt, Human
gauguggagccaggcgug

SEQ ID NO: 3575742 - RNA, 21 nt, Human
gauguggcuacugacauaucu

SEQ ID NO: 3575743 - RNA, 16 nt, Human
gaugugggggaagacc

SEQ ID NO: 3575744 - RNA, 18 nt, Human
gauguggucacagcugua

SEQ ID NO: 3575745 - RNA, 15 nt, Human
gauguggugccugag

SEQ ID NO: 3575746 - RNA, 17 nt, Human
gauguguaauuuuucug

SEQ ID NO: 3575747 - RNA, 22 nt, Human
gauguguacaucccauguaaca

SEQ ID NO: 3575748 - RNA, 19 nt, Human
gauguguccugacacugca

SEQ ID NO: 3575749 - RNA, 14 nt, Human
gauguguucuuauu

SEQ ID NO: 3575750 - RNA, 14 nt, Human
gauguguugugaua

SEQ ID NO: 3575751 - RNA, 14 nt, Human
gauguguuugcuuu

SEQ ID NO: 3575752 - RNA, 18 nt, Human
gauguuaacacauuuugu

SEQ ID NO: 3575753 - RNA, 21 nt, Human
gauguuauauuuuucuuaaaa

SEQ ID NO: 3575754 - RNA, 20 nt, Human
gauguuauguaaaaggccaa

SEQ ID NO: 3575755 - RNA, 19 nt, Human
gauguucuaaggcucugag

SEQ ID NO: 3575756 - RNA, 20 nt, Human
gauguucuaaggcucugaga

SEQ ID NO: 3575757 - RNA, 19 nt, Human
gauguucuaagucuuucca

SEQ ID NO: 3575758 - RNA, 19 nt, Human
gauguucucuaucauuuaa

SEQ ID NO: 3575759 - RNA, 14 nt, Human
gauguucugggaca

SEQ ID NO: 3575760 - RNA, 16 nt, Human
gauguucugggacaca

SEQ ID NO: 3575761 - RNA, 20 nt, Human
gauguugaagaauacaguua

SEQ ID NO: 3575762 - RNA, 19 nt, Human
gauguugacaucacuggca

SEQ ID NO: 3575763 - RNA, 14 nt, Human
gauguugaugcaau

SEQ ID NO: 3575764 - RNA, 13 nt, Human
gauguugccaugu

SEQ ID NO: 3575765 - RNA, 17 nt, Human
gauguugccauguguuu

SEQ ID NO: 3575766 - RNA, 14 nt, Human
gauguuggcuggga

SEQ ID NO: 3575767 - RNA, 19 nt, Human
gauguuuauucuucuagag

SEQ ID NO: 3575768 - RNA, 12 nt, Human
gauguuuccaga

SEQ ID NO: 3575769 - RNA, 13 nt, Human
gauguuuccagac

SEQ ID NO: 3575770 - RNA, 19 nt, Human
gauguuuccagacuuccuu

SEQ ID NO: 3575771 - RNA, 18 nt, Human
gauguuucuuuuguaugu

SEQ ID NO: 3575772 - RNA, 14 nt, Human
gauguuugcccaaa

SEQ ID NO: 3575773 - RNA, 14 nt, Human
gauguuugugcagu

SEQ ID NO: 3575774 - RNA, 16 nt, Human
gauguuuguggccuca

SEQ ID NO: 3575775 - RNA, 18 nt, Human
gauguuuguggccucaga

SEQ ID NO: 3575776 - RNA, 13 nt, Human
gauguuuuaauuc

SEQ ID NO: 3575777 - RNA, 18 nt, Human
gauguuuuaauuccauga

SEQ ID NO: 3575778 - RNA, 14 nt, Human
gauguuuuauuauu

SEQ ID NO: 3575779 - RNA, 14 nt, Human
gauguuuuccauga

SEQ ID NO: 3575780 - RNA, 15 nt, Human
gauguuuuccaugag

SEQ ID NO: 3575781 - RNA, 15 nt, Human
gauguuuuucuuacc

SEQ ID NO: 3575782 - RNA, 14 nt, Human
gauuaaacuuauga

SEQ ID NO: 3575783 - RNA, 19 nt, Human
gauuaaauacauauggaug

SEQ ID NO: 3575784 - RNA, 20 nt, Human
gauuaaauacauauggaugu

SEQ ID NO: 3575785 - RNA, 20 nt, Human
gauuaaauauagauuagaaa

SEQ ID NO: 3575786 - RNA, 14 nt, Human
gauuaacaaauaug

SEQ ID NO: 3575787 - RNA, 18 nt, Human
gauuaaccacuucagcug

SEQ ID NO: 3575788 - RNA, 14 nt, Human
gauuaaccucugca

SEQ ID NO: 3575789 - RNA, 17 nt, Human
gauuaaccucugcacua

SEQ ID NO: 3575790 - RNA, 13 nt, Human
gauuaagagccau

SEQ ID NO: 3575791 - RNA, 18 nt, Human
gauuaaggucucucuuug

SEQ ID NO: 3575792 - RNA, 17 nt, Human
gauuaaggugaugugau

SEQ ID NO: 3575793 - RNA, 14 nt, Human
gauuaauaugaaaa

SEQ ID NO: 3575794 - RNA, 18 nt, Human
gauuaauaugaaaacuua

SEQ ID NO: 3575795 - RNA, 14 nt, Human
gauuaauggcacug

SEQ ID NO: 3575796 - RNA, 16 nt, Human
gauuaauggcacugau

SEQ ID NO: 3575797 - RNA, 15 nt, Human
gauuaauuaaaugca

SEQ ID NO: 3575798 - RNA, 21 nt, Human
gauuaauuucugccauuucau

SEQ ID NO: 3575799 - RNA, 19 nt, Human
gauuacaaaucagaaguca

SEQ ID NO: 3575800 - RNA, 20 nt, Human
gauuacaaaucagaagucau

SEQ ID NO: 3575801 - RNA, 13 nt, Human
gauuacaagcgug

SEQ ID NO: 3575802 - RNA, 20 nt, Human
gauuacaggcaugagccacu

SEQ ID NO: 3575803 - RNA, 14 nt, Human
gauuacaggcguga

SEQ ID NO: 3575804 - RNA, 20 nt, Human
gauuacaggugugagccacc

SEQ ID NO: 3575805 - RNA, 22 nt, Human
gauuacaggugugagccaccac

SEQ ID NO: 3575806 - RNA, 22 nt, Human
gauucuuccagaugugaugcuu

SEQ ID NO: 3575807 - RNA, 14 nt, Human
gauucuuccaucug

SEQ ID NO: 3575808 - RNA, 12 nt, Human
gauucuucugcu

SEQ ID NO: 3575809 - RNA, 16 nt, Human
gauucuucuguguuua

SEQ ID NO: 3575810 - RNA, 20 nt, Human
gauucuucuguguuuauaaa

SEQ ID NO: 3575811 - RNA, 21 nt, Human
gauucuuguauuuauuacaac

SEQ ID NO: 3575812 - RNA, 15 nt, Human
gauucuuguuuugcu

SEQ ID NO: 3575813 - RNA, 20 nt, Human
gauucuuguuuugcuucccc

SEQ ID NO: 3575814 - RNA, 19 nt, Human
gauucuuuccauuugcauu

SEQ ID NO: 3575815 - RNA, 22 nt, Human
gauucuuuccauuugcauuugu

SEQ ID NO: 3575816 - RNA, 12 nt, Human
gauucuuuccug

SEQ ID NO: 3575817 - RNA, 18 nt, Human
gauucuuuccugaggcug

SEQ ID NO: 3575818 - RNA, 19 nt, Human
gauucuuuuaaauuagaaa

SEQ ID NO: 3575819 - RNA, 20 nt, Human
gauucuuuuaaauuagaaaa

SEQ ID NO: 3575820 - RNA, 20 nt, Human
gauugaaaacuuuucucaga

SEQ ID NO: 3575821 - RNA, 17 nt, Human
gauugaaaauaaugcug

SEQ ID NO: 3575822 - RNA, 15 nt, Human
gauugaaaauucgcc

SEQ ID NO: 3575823 - RNA, 15 nt, Human
gauugaacuccaaga

SEQ ID NO: 3575824 - RNA, 17 nt, Human
gauugaagaaacagcua

SEQ ID NO: 3575825 - RNA, 21 nt, Human
gauugaaguauuuugcuggaa

SEQ ID NO: 3575826 - RNA, 17 nt, Human
gauugacagcuuugcug

SEQ ID NO: 3575827 - RNA, 20 nt, Human
gauugacaguaacuugguua

SEQ ID NO: 3575828 - RNA, 24 nt, Human
gauugaccguguuggucuguacug

SEQ ID NO: 3575829 - RNA, 18 nt, Human
gauugaccugcuccgcug

SEQ ID NO: 3575830 - RNA, 23 nt, Human
gauugaccugcuccgcugcuccu

SEQ ID NO: 3575831 - RNA, 13 nt, Human
gauugagaaggag

SEQ ID NO: 3575832 - RNA, 17 nt, Human
gauugagaaggagagaa

SEQ ID NO: 3575833 - RNA, 17 nt, Human
gauugagcucucugccc

SEQ ID NO: 3575834 - RNA, 16 nt, Human
gauugagucugugcca

SEQ ID NO: 3575835 - RNA, 22 nt, Human
gauugaucggagccuccucucu

SEQ ID NO: 3575836 - RNA, 17 nt, Human
gauugauuaccuaguag

SEQ ID NO: 3575837 - RNA, 20 nt, Human
gauugauuuuaaaauguaca

SEQ ID NO: 3575838 - RNA, 22 nt, Human
gauugcaauuugcacaaguuuu

SEQ ID NO: 3575839 - RNA, 23 nt, Human
gauugcaccacugcacuccagcc

SEQ ID NO: 3575840 - RNA, 13 nt, Human
gauugcagaauug

SEQ ID NO: 3575841 - RNA, 14 nt, Human
gauugccucugaaa

SEQ ID NO: 3575842 - RNA, 20 nt, Human
gauugcgagagauguguguu

SEQ ID NO: 3575843 - RNA, 19 nt, Human
gauugcgguuuacagcuau

SEQ ID NO: 3575844 - RNA, 13 nt, Human
gauugcuaaaugu

SEQ ID NO: 3575845 - RNA, 22 nt, Human
gauugcugccacuuuuuaacua

SEQ ID NO: 3575846 - RNA, 16 nt, Human
gauugcugccccauca

SEQ ID NO: 3575847 - RNA, 20 nt, Human
gauugcugccccaucagugc

SEQ ID NO: 3575848 - RNA, 23 nt, Human
gauugcuguguguugccugggac

SEQ ID NO: 3575849 - RNA, 19 nt, Human
gauugcuugagcccaggag

SEQ ID NO: 3575850 - RNA, 19 nt, Human
gauuggaaggagacacaga

SEQ ID NO: 3575851 - RNA, 23 nt, Human
gauuggacauaacugacuuaguu

SEQ ID NO: 3575852 - RNA, 22 nt, Human
gauuggagauagggaaagaaag

SEQ ID NO: 3575853 - RNA, 15 nt, Human
gauuggauuauucau

SEQ ID NO: 3575854 - RNA, 13 nt, Human
gauuggauuauuu

SEQ ID NO: 3575855 - RNA, 13 nt, Human
gauuggcauggcu

SEQ ID NO: 3575856 - RNA, 23 nt, Human
gauuggccuguagaguugcugag

SEQ ID NO: 3575857 - RNA, 22 nt, Human
gauuggcucacccaagcaaggc

SEQ ID NO: 3575858 - RNA, 16 nt, Human
gauuggcuuguagaau

SEQ ID NO: 3575859 - RNA, 15 nt, Human
gauugggaauaaaua

SEQ ID NO: 3575860 - RNA, 23 nt, Human
gauugggaauaaauaugccucuc

SEQ ID NO: 3575861 - RNA, 20 nt, Human
gauugggcacaucauuucaa

SEQ ID NO: 3575862 - RNA, 20 nt, Human
gauuggggaagacuguggcu

SEQ ID NO: 3575863 - RNA, 15 nt, Human
gauuggggaauuaaa

SEQ ID NO: 3575864 - RNA, 18 nt, Human
gauuggguuaugaauauu

SEQ ID NO: 3575865 - RNA, 17 nt, Human
gauugguguuuuuuucu

SEQ ID NO: 3575866 - RNA, 20 nt, Human
gauugguguuuuuuucuaug

SEQ ID NO: 3575867 - RNA, 21 nt, Human
gauugguuuuaauugaaggaa

SEQ ID NO: 3575868 - RNA, 13 nt, Human
gauuguauugcug

SEQ ID NO: 3575869 - RNA, 20 nt, Human
gauuguauuguugaaaaagu

SEQ ID NO: 3575870 - RNA, 20 nt, Human
gauuguccuuuaaaaaagaa

SEQ ID NO: 3575871 - RNA, 17 nt, Human
gauugugucccauuccc

SEQ ID NO: 3575872 - RNA, 18 nt, Human
gauugugucccauucccc

SEQ ID NO: 3575873 - RNA, 20 nt, Human
gauugugucccauuccccca

SEQ ID NO: 3575874 - RNA, 20 nt, Human
gauugugucucuugguccug

SEQ ID NO: 3575875 - RNA, 21 nt, Human
gauugugugguguuuuggauu

SEQ ID NO: 3575876 - RNA, 14 nt, Human
gauuguuaaaauaa

SEQ ID NO: 3575877 - RNA, 13 nt, Human
gauuguucaucau

SEQ ID NO: 3575878 - RNA, 13 nt, Human
gauuguuguuugc

SEQ ID NO: 3575879 - RNA, 11 nt, Human
gauuguuuaaa

SEQ ID NO: 3575880 - RNA, 18 nt, Human
gauuguuuccucuuccaa

SEQ ID NO: 3575881 - RNA, 18 nt, Human
gauuguuucuauacaaau

SEQ ID NO: 3575882 - RNA, 11 nt, Human
gauuguuugca

SEQ ID NO: 3575883 - RNA, 15 nt, Human
gauuuaaaacaugua

SEQ ID NO: 3575884 - RNA, 15 nt, Human
gauuuaaaagggaag

SEQ ID NO: 3575885 - RNA, 15 nt, Human
gauuuaaacacacag

SEQ ID NO: 3575886 - RNA, 17 nt, Human
gauuuaaacucugaauu

SEQ ID NO: 3575887 - RNA, 17 nt, Human
gauuuaacagaaaugua

SEQ ID NO: 3575888 - RNA, 22 nt, Human
gauuuaagggauggaaaaggaa

SEQ ID NO: 3575889 - RNA, 20 nt, Human
gauuuaaguuacaauguuuu

SEQ ID NO: 3575890 - RNA, 14 nt, Human
gauuuaauaaaaua

SEQ ID NO: 3575891 - RNA, 15 nt, Human
gauuuaauaaaauaa

SEQ ID NO: 3575892 - RNA, 23 nt, Human
gauuuaauaaaauaauucuaaag

SEQ ID NO: 3575893 - RNA, 16 nt, Human
gauuuaauaguguuaa

SEQ ID NO: 3575894 - RNA, 18 nt, Human
gauuuaauaguguuaauc

SEQ ID NO: 3575895 - RNA, 20 nt, Human
gauuuaauaguguuaaucaa

SEQ ID NO: 3575896 - RNA, 22 nt, Human
gauuuaauaguguuaaucaauu

SEQ ID NO: 3575897 - RNA, 21 nt, Human
gauuuaauauaaaguuuuaua

SEQ ID NO: 3575898 - RNA, 14 nt, Human
gauuuaauuuccag

SEQ ID NO: 3575899 - RNA, 16 nt, Human
gauuuaauuugccaaa

SEQ ID NO: 3575900 - RNA, 21 nt, Human
gauuuacagcaaguagauaaa

SEQ ID NO: 3575901 - RNA, 19 nt, Human
gauuuacagccucacuuga

SEQ ID NO: 3575902 - RNA, 16 nt, Human
gauuuacaguuucaaa

SEQ ID NO: 3575903 - RNA, 20 nt, Human
gauuuaccuguuuucgcacc

SEQ ID NO: 3575904 - RNA, 15 nt, Human
gauuuacgcucauug

SEQ ID NO: 3575905 - RNA, 16 nt, Human
gauuuagauaugcaaa

SEQ ID NO: 3575906 - RNA, 20 nt, Human
gauuuaggagaagccaggaa

SEQ ID NO: 3575907 - RNA, 13 nt, Human
gauuuaguagugu

SEQ ID NO: 3575908 - RNA, 18 nt, Human
gauuuaguguaauaagac

SEQ ID NO: 3575909 - RNA, 17 nt, Human
gauuuauaguuuguaca

SEQ ID NO: 3575910 - RNA, 20 nt, Human
gauuuauaguuuguacaugc

SEQ ID NO: 3575911 - RNA, 21 nt, Human
gauuuauaguuuguacaugca

SEQ ID NO: 3575912 - RNA, 16 nt, Human
gauuuauauaaaugua

SEQ ID NO: 3575913 - RNA, 13 nt, Human
gauuuaucaaauc

SEQ ID NO: 3575914 - RNA, 19 nt, Human
gauuuaucacacaaagcag

SEQ ID NO: 3575915 - RNA, 17 nt, Human
gauuuauguuguauaga

SEQ ID NO: 3575916 - RNA, 13 nt, Human
gauuuauuaaaga

SEQ ID NO: 3575917 - RNA, 14 nt, Human
gauuuauuaaagaa

SEQ ID NO: 3575918 - RNA, 15 nt, Human
gauuuauuaaagaaa

SEQ ID NO: 3575919 - RNA, 20 nt, Human
gauuuauuaacuuaauaauc

SEQ ID NO: 3575920 - RNA, 16 nt, Human
gauuuauuugcuucuu

SEQ ID NO: 3575921 - RNA, 14 nt, Human
gauuuauuuuguua

SEQ ID NO: 3575922 - RNA, 17 nt, Human
gauuuauuuuucaguuc

SEQ ID NO: 3575923 - RNA, 20 nt, Human
gauuuauuuuucaguuccaa

SEQ ID NO: 3575924 - RNA, 12 nt, Human
gauuucaagaaa

SEQ ID NO: 3575925 - RNA, 13 nt, Human
gauuucacaaaua

SEQ ID NO: 3575926 - RNA, 15 nt, Human
gauuucacaaauauu

SEQ ID NO: 3575927 - RNA, 21 nt, Human
gauuucagaaagagcaagucu

SEQ ID NO: 3575928 - RNA, 15 nt, Human
gauuucagaagccua

SEQ ID NO: 3575929 - RNA, 16 nt, Human
gauuucauaccucaga

SEQ ID NO: 3575930 - RNA, 15 nt, Human
gauuucauaguucag

SEQ ID NO: 3575931 - RNA, 12 nt, Human
gauuucaucugc

SEQ ID NO: 3575932 - RNA, 16 nt, Human
gauuucaugcuaucuc

SEQ ID NO: 3575933 - RNA, 13 nt, Human
gauuucauguacu

SEQ ID NO: 3575934 - RNA, 16 nt, Human
gauuucauguacugca

SEQ ID NO: 3575935 - RNA, 20 nt, Human
gauuucauguacugcauuau

SEQ ID NO: 3575936 - RNA, 15 nt, Human
gauuuccaaguaaua

SEQ ID NO: 3575937 - RNA, 20 nt, Human
gauuuccaaguaauauaaug

SEQ ID NO: 3575938 - RNA, 22 nt, Human
gauuuccagaaccacacuugaa

SEQ ID NO: 3575939 - RNA, 18 nt, Human
gauuuccagccagggcug

SEQ ID NO: 3575940 - RNA, 19 nt, Human
gauuuccagccagggcugc

SEQ ID NO: 3575941 - RNA, 20 nt, Human
gauuucccauccccuguggg

SEQ ID NO: 3575942 - RNA, 12 nt, Human
gauuuccccucu

SEQ ID NO: 3575943 - RNA, 16 nt, Human
gauuuccccuuuugca

SEQ ID NO: 3575944 - RNA, 22 nt, Human
gauuuccccuuuugcauucucc

SEQ ID NO: 3575945 - RNA, 21 nt, Human
gauuucccguggccccagccu

SEQ ID NO: 3575946 - RNA, 15 nt, Human
gauuucccuucuucu

SEQ ID NO: 3575947 - RNA, 22 nt, Human
gauuucccuucuucugucaucu

SEQ ID NO: 3575948 - RNA, 15 nt, Human
gauuuccguuaaaau

SEQ ID NO: 3575949 - RNA, 18 nt, Human
gauuuccguuaaaauacc

SEQ ID NO: 3575950 - RNA, 19 nt, Human
gcagcuguugucucuucuc

SEQ ID NO: 3575951 - RNA, 20 nt, Human
gcagcuguugucucuucucc

SEQ ID NO: 3575952 - RNA, 17 nt, Human
gcagcuuagggcccugg

SEQ ID NO: 3575953 - RNA, 18 nt, Human
gcagcuuagggcccugga

SEQ ID NO: 3575954 - RNA, 23 nt, Human
gcagcuuauaaugggcucuccgg

SEQ ID NO: 3575955 - RNA, 13 nt, Human
gcagcuucaguug

SEQ ID NO: 3575956 - RNA, 18 nt, Human
gcagcuucugccacuucc

SEQ ID NO: 3575957 - RNA, 20 nt, Human
gcagcuucugccacuuccca

SEQ ID NO: 3575958 - RNA, 17 nt, Human
gcagcuucugcccccug

SEQ ID NO: 3575959 - RNA, 20 nt, Human
gcagcuucugcccccugcag

SEQ ID NO: 3575960 - RNA, 13 nt, Human
gcagcuugccccg

SEQ ID NO: 3575961 - RNA, 21 nt, Human
gcagcuugcguuagaaugagg

SEQ ID NO: 3575962 - RNA, 22 nt, Human
gcagcuugggagagccccuggg

SEQ ID NO: 3575963 - RNA, 17 nt, Human
gcagcuuguagccagcc

SEQ ID NO: 3575964 - RNA, 18 nt, Human
gcagcuuguagccagccg

SEQ ID NO: 3575965 - RNA, 23 nt, Human
gcagcuuguagccagccggggcg

SEQ ID NO: 3575966 - RNA, 21 nt, Human
gcagcuugugugcaaaagcag

SEQ ID NO: 3575967 - RNA, 18 nt, Human
gcagcuuuaaccauuaaa

SEQ ID NO: 3575968 - RNA, 14 nt, Human
gcagcuuucuagaa

SEQ ID NO: 3575969 - RNA, 21 nt, Human
gcaggaaaugaaaaugucuug

SEQ ID NO: 3575970 - RNA, 15 nt, Human
gcaggaacucccagc

SEQ ID NO: 3575971 - RNA, 18 nt, Human
gcaggaagcaacgaaggg

SEQ ID NO: 3575972 - RNA, 13 nt, Human
gcaggaagcugcu

SEQ ID NO: 3575973 - RNA, 23 nt, Human
gcaggaaggacuaugaaaagcua

SEQ ID NO: 3575974 - RNA, 12 nt, Human
gcaggaaggaga

SEQ ID NO: 3575975 - RNA, 17 nt, Human
gcaggaaggagagccug

SEQ ID NO: 3575976 - RNA, 14 nt, Human
gcaggaaggagcug

SEQ ID NO: 3575977 - RNA, 22 nt, Human
gcaggaaggagcugccuggacc

SEQ ID NO: 3575978 - RNA, 13 nt, Human
gcaggaaggccug

SEQ ID NO: 3575979 - RNA, 19 nt, Human
gcaggaauauaugugugcc

SEQ ID NO: 3575980 - RNA, 21 nt, Human
gcaggaauauaugugugccua

SEQ ID NO: 3575981 - RNA, 19 nt, Human
gcaggaaucaaaaauugaa

SEQ ID NO: 3575982 - RNA, 18 nt, Human
gcaggaauugguggcaga

SEQ ID NO: 3575983 - RNA, 18 nt, Human
gcaggacaacgaggaagc

SEQ ID NO: 3575984 - RNA, 14 nt, Human
gcaggacacugcag

SEQ ID NO: 3575985 - RNA, 13 nt, Human
gcaggacaggaaa

SEQ ID NO: 3575986 - RNA, 14 nt, Human
gcaggaccaggacu

SEQ ID NO: 3575987 - RNA, 15 nt, Human
gcaggaccaggacua

SEQ ID NO: 3575988 - RNA, 23 nt, Human
gcaggaccucagaguccaggccc

SEQ ID NO: 3575989 - RNA, 16 nt, Human
gcaggaccucccuucc

SEQ ID NO: 3575990 - RNA, 21 nt, Human
gcaggaccucccuuccgaccc

SEQ ID NO: 3575991 - RNA, 22 nt, Human
gcaggaccucccuuccgacccu

SEQ ID NO: 3575992 - RNA, 19 nt, Human
gcaggacucagcuccccag

SEQ ID NO: 3575993 - RNA, 18 nt, Human
gcaggacuguccccuuga

SEQ ID NO: 3575994 - RNA, 13 nt, Human
gcaggagaggaga

SEQ ID NO: 3575995 - RNA, 23 nt, Human
gcaggagaggagagccagagaag

SEQ ID NO: 3575996 - RNA, 14 nt, Human
gcaggagauugaga

SEQ ID NO: 3575997 - RNA, 17 nt, Human
gcaggagcacacccagc

SEQ ID NO: 3575998 - RNA, 22 nt, Human
gcaggagcaguaucaugaagcc

SEQ ID NO: 3575999 - RNA, 18 nt, Human
gcaggagcucagaugaag

SEQ ID NO: 3576000 - RNA, 14 nt, Human
gcaggaggauugcu

SEQ ID NO: 3576001 - RNA, 17 nt, Human
gcaggaggccaggccgg

SEQ ID NO: 3576002 - RNA, 16 nt, Human
gcaggaggccccuggc

SEQ ID NO: 3576003 - RNA, 15 nt, Human
gcaggagggaggugc

SEQ ID NO: 3576004 - RNA, 14 nt, Human
gcaggaggggggag

SEQ ID NO: 3576005 - RNA, 18 nt, Human
gcaggaggggggagggaa

SEQ ID NO: 3576006 - RNA, 15 nt, Human
gcaggaguagcugag

SEQ ID NO: 3576007 - RNA, 18 nt, Human
gcaggaguggugcagaca

SEQ ID NO: 3576008 - RNA, 19 nt, Human
gcaggaguggugcagacag

SEQ ID NO: 3576009 - RNA, 14 nt, Human
gcaggauugaaaau

SEQ ID NO: 3576010 - RNA, 22 nt, Human
gcaggauugaaaauguccagga

SEQ ID NO: 3576011 - RNA, 20 nt, Human
gcaggauuggggaagagagc

SEQ ID NO: 3576012 - RNA, 12 nt, Human
gcaggcacagca

SEQ ID NO: 3576013 - RNA, 13 nt, Human
gcaggcacagcac

SEQ ID NO: 3576014 - RNA, 15 nt, Human
gcaggcacauggagg

SEQ ID NO: 3576015 - RNA, 12 nt, Human
gcaggcaccugu

SEQ ID NO: 3576016 - RNA, 15 nt, Human
gcaggcaccuuagug

SEQ ID NO: 3576017 - RNA, 18 nt, Human
gcaggcacgggugguccc

SEQ ID NO: 3576018 - RNA, 19 nt, Human
gcaggcacuuauuguaaau

SEQ ID NO: 3576019 - RNA, 13 nt, Human
gcaggcagacacg

SEQ ID NO: 3576020 - RNA, 20 nt, Human
gcaggcagacacggaucuga

SEQ ID NO: 3576021 - RNA, 20 nt, Human
gcaggcagacuacacaggau

SEQ ID NO: 3576022 - RNA, 15 nt, Human
gcaggcagaggccca

SEQ ID NO: 3576023 - RNA, 16 nt, Human
gcaggcagaucaccug

SEQ ID NO: 3576024 - RNA, 18 nt, Human
gcaggcagaucaccugag

SEQ ID NO: 3576025 - RNA, 12 nt, Human
gcaggcagccag

SEQ ID NO: 3576026 - RNA, 18 nt, Human
gcaggcagccaggccaca

SEQ ID NO: 3576027 - RNA, 16 nt, Human
gcaggcagcgccaagc

SEQ ID NO: 3576028 - RNA, 17 nt, Human
gcaggcaggcucccagg

SEQ ID NO: 3576029 - RNA, 12 nt, Human
gcaggcaggcug

SEQ ID NO: 3576030 - RNA, 12 nt, Human
gcaggcagggcu

SEQ ID NO: 3576031 - RNA, 16 nt, Human
gcaggcagggcucucc

SEQ ID NO: 3576032 - RNA, 9 nt, Human
gcaggcagu

SEQ ID NO: 3576033 - RNA, 13 nt, Human
gcaggcauggccc

SEQ ID NO: 3576034 - RNA, 15 nt, Human
gcaggcauggcccug

SEQ ID NO: 3576035 - RNA, 16 nt, Human
gcaggcauggcccugg

SEQ ID NO: 3576036 - RNA, 16 nt, Human
gcaggcauguccugga

SEQ ID NO: 3576037 - RNA, 22 nt, Human
gcaggccaaggucugagccaca

SEQ ID NO: 3576038 - RNA, 20 nt, Human
gcaggccacacuucaaacua

SEQ ID NO: 3576039 - RNA, 23 nt, Human
gcaggccacacuucaaacuacuu

SEQ ID NO: 3576040 - RNA, 15 nt, Human
gcaggccaggccagc

SEQ ID NO: 3576041 - RNA, 14 nt, Human
gcaggcccacccug

SEQ ID NO: 3576042 - RNA, 15 nt, Human
gcaggcccacccugc

SEQ ID NO: 3576043 - RNA, 19 nt, Human
gcaggcccacccugcuugg

SEQ ID NO: 3576044 - RNA, 22 nt, Human
gcaggcccacccugcuuggccc

SEQ ID NO: 3576045 - RNA, 17 nt, Human
gcaggcccaugggaggc

SEQ ID NO: 3576046 - RNA, 18 nt, Human
gcaggcccugcacugucc

SEQ ID NO: 3576047 - RNA, 19 nt, Human
gcaggcccuuugaagccuc

SEQ ID NO: 3576048 - RNA, 18 nt, Human
gcaggccucccugccagu

SEQ ID NO: 3576049 - RNA, 23 nt, Human
gcaggccucgaaaaccaucacau

SEQ ID NO: 3576050 - RNA, 23 nt, Human
gcaggcggugggcacccacccug

SEQ ID NO: 3576051 - RNA, 20 nt, Human
gcaggcuaaggcguggagcu

SEQ ID NO: 3576052 - RNA, 14 nt, Human
gcaggcucacugcc

SEQ ID NO: 3576053 - RNA, 18 nt, Human
gcaggcucacugccaggc

SEQ ID NO: 3576054 - RNA, 19 nt, Human
gcaggcucacugccaggcc

SEQ ID NO: 3576055 - RNA, 21 nt, Human
gcaggcucacugccaggccag

SEQ ID NO: 3576056 - RNA, 23 nt, Human
gcaggcucccagggacaccuggg

SEQ ID NO: 3576057 - RNA, 14 nt, Human
gcaggcuccccuga

SEQ ID NO: 3576058 - RNA, 14 nt, Human
gcaggcucucaggc

SEQ ID NO: 3576059 - RNA, 23 nt, Human
gcaggcucucaggccagcugcuu

SEQ ID NO: 3576060 - RNA, 16 nt, Human
gcaggcugagccacuc

SEQ ID NO: 3576061 - RNA, 17 nt, Human
gcaggcugccagugccu

SEQ ID NO: 3576062 - RNA, 20 nt, Human
gcaggcuggagguaaggccu

SEQ ID NO: 3576063 - RNA, 16 nt, Human
gcaggcuggcaccgcc

SEQ ID NO: 3576064 - RNA, 19 nt, Human
gcaggcuggcaccgccuuc

SEQ ID NO: 3576065 - RNA, 13 nt, Human
gcaggcuggccag

SEQ ID NO: 3576066 - RNA, 15 nt, Human
gcaggcuggccagcc

SEQ ID NO: 3576067 - RNA, 17 nt, Human
gcaggcuggccagccgc

SEQ ID NO: 3576068 - RNA, 22 nt, Human
gcaggcuggccaguccaggcug

SEQ ID NO: 3576069 - RNA, 13 nt, Human
gcaggcuggcccu

SEQ ID NO: 3576070 - RNA, 15 nt, Human
gcaggcuggcccugc

SEQ ID NO: 3576071 - RNA, 17 nt, Human
gcaggcuggcccugccc

SEQ ID NO: 3576072 - RNA, 21 nt, Human
gcaggcuggcccugcccuggu

SEQ ID NO: 3576073 - RNA, 15 nt, Human
gcaggcugggccaug

SEQ ID NO: 3576074 - RNA, 21 nt, Human
gcagggaaaauuauuugcaua

SEQ ID NO: 3576075 - RNA, 17 nt, Human
gcagggaacauggggag

SEQ ID NO: 3576076 - RNA, 14 nt, Human
gcagggaaggccug

SEQ ID NO: 3576077 - RNA, 20 nt, Human
gcagggaaggggaggcagcc

SEQ ID NO: 3576078 - RNA, 21 nt, Human
gcagggaaguguaagaaacac

SEQ ID NO: 3576079 - RNA, 15 nt, Human
gcagggaauuucuau

SEQ ID NO: 3576080 - RNA, 14 nt, Human
gcagggacaaagag

SEQ ID NO: 3576081 - RNA, 15 nt, Human
gcagggacagggccg

SEQ ID NO: 3576082 - RNA, 21 nt, Human
gcagggagcauggcugugagg

SEQ ID NO: 3576083 - RNA, 14 nt, Human
gcagggagggccug

SEQ ID NO: 3576084 - RNA, 22 nt, Human
gcagggagggccugggccccag

SEQ ID NO: 3576085 - RNA, 15 nt, Human
gcagggaggucaggc

SEQ ID NO: 3576086 - RNA, 14 nt, Human
gcagggauccuggu

SEQ ID NO: 3576087 - RNA, 22 nt, Human
gcagggauuaaccucugcacua

SEQ ID NO: 3576088 - RNA, 15 nt, Human
gcagggauugcugcc

SEQ ID NO: 3576089 - RNA, 19 nt, Human
gcagggauugcugccacuu

SEQ ID NO: 3576090 - RNA, 14 nt, Human
gcagggauuugagg

SEQ ID NO: 3576091 - RNA, 22 nt, Human
gcagggcaaaugacaugcacug

SEQ ID NO: 3576092 - RNA, 12 nt, Human
gcagggcacagg

SEQ ID NO: 3576093 - RNA, 16 nt, Human
gcagggcacagggccu

SEQ ID NO: 3576094 - RNA, 19 nt, Human
gcagggcacagggccuggc

SEQ ID NO: 3576095 - RNA, 19 nt, Human
gcaguuagagaugccuccc

SEQ ID NO: 3576096 - RNA, 17 nt, Human
gcaguuagcugaagaau

SEQ ID NO: 3576097 - RNA, 22 nt, Human
gcaguuagcugaagaauugaaa

SEQ ID NO: 3576098 - RNA, 13 nt, Human
gcaguuauauuuu

SEQ ID NO: 3576099 - RNA, 16 nt, Human
gcaguuauauuuugca

SEQ ID NO: 3576100 - RNA, 22 nt, Human
gcaguuaugugaccucacgugc

SEQ ID NO: 3576101 - RNA, 23 nt, Human
gcaguuaugugaccucacgugca

SEQ ID NO: 3576102 - RNA, 13 nt, Human
gcaguucaccugc

SEQ ID NO: 3576103 - RNA, 19 nt, Human
gcaguucagagcugcccuc

SEQ ID NO: 3576104 - RNA, 23 nt, Human
gcaguucagagcugcccucuccu

SEQ ID NO: 3576105 - RNA, 19 nt, Human
gcaguucccacauuaaaga

SEQ ID NO: 3576106 - RNA, 21 nt, Human
gcaguucccacauuaaagaag

SEQ ID NO: 3576107 - RNA, 22 nt, Human
gcaguucccacauuaaagaaga

SEQ ID NO: 3576108 - RNA, 17 nt, Human
gcaguucgacucugugc

SEQ ID NO: 3576109 - RNA, 15 nt, Human
gcaguucgcagccac

SEQ ID NO: 3576110 - RNA, 18 nt, Human
gcaguucgcagccacccu

SEQ ID NO: 3576111 - RNA, 19 nt, Human
gcaguucgcagccacccug

SEQ ID NO: 3576112 - RNA, 23 nt, Human
gcaguucgcagccacccugagga

SEQ ID NO: 3576113 - RNA, 13 nt, Human
gcaguucugaaga

SEQ ID NO: 3576114 - RNA, 14 nt, Human
gcaguucugaagaa

SEQ ID NO: 3576115 - RNA, 19 nt, Human
gcaguugaaaagacuccaa

SEQ ID NO: 3576116 - RNA, 21 nt, Human
gcaguugaaaagacuccaaag

SEQ ID NO: 3576117 - RNA, 15 nt, Human
gcaguugacagcagg

SEQ ID NO: 3576118 - RNA, 21 nt, Human
gcaguugagaaaauuugaaug

SEQ ID NO: 3576119 - RNA, 14 nt, Human
gcaguugccaguca

SEQ ID NO: 3576120 - RNA, 14 nt, Human
gcaguugcccagcc

SEQ ID NO: 3576121 - RNA, 15 nt, Human
gcaguugcccagccu

SEQ ID NO: 3576122 - RNA, 23 nt, Human
gcaguugcugguaaaaugaagaa

SEQ ID NO: 3576123 - RNA, 14 nt, Human
gcaguuggccagag

SEQ ID NO: 3576124 - RNA, 13 nt, Human
gcaguugucucug

SEQ ID NO: 3576125 - RNA, 13 nt, Human
gcaguuguuaagu

SEQ ID NO: 3576126 - RNA, 13 nt, Human
gcaguuuaaagca

SEQ ID NO: 3576127 - RNA, 17 nt, Human
gcaguuucaauaaaguu

SEQ ID NO: 3576128 - RNA, 13 nt, Human
gcaguuugaaauu

SEQ ID NO: 3576129 - RNA, 22 nt, Human
gcaguuugaaauucugaauuug

SEQ ID NO: 3576130 - RNA, 19 nt, Human
gcaguuugaggauuaguuu

SEQ ID NO: 3576131 - RNA, 16 nt, Human
gcaguuugcaaaaaau

SEQ ID NO: 3576132 - RNA, 21 nt, Human
gcaguuugccuggugcagugg

SEQ ID NO: 3576133 - RNA, 17 nt, Human
gcaguuuucaagucaaa

SEQ ID NO: 3576134 - RNA, 22 nt, Human
gcaguuuugacaucagccagcu

SEQ ID NO: 3576135 - RNA, 14 nt, Human
gcaguuuuucugua

SEQ ID NO: 3576136 - RNA, 12 nt, Human
gcaguuuuuuga

SEQ ID NO: 3576137 - RNA, 15 nt, Human
gcauaaaagaugaaa

SEQ ID NO: 3576138 - RNA, 19 nt, Human
gcauaaagcucaaaugaaa

SEQ ID NO: 3576139 - RNA, 18 nt, Human
gcauaacaagguccaaga

SEQ ID NO: 3576140 - RNA, 15 nt, Human
gcauaacauaaaucu

SEQ ID NO: 3576141 - RNA, 14 nt, Human
gcauaaccugucuc

SEQ ID NO: 3576142 - RNA, 17 nt, Human
gcauaacugacaaauca

SEQ ID NO: 3576143 - RNA, 22 nt, Human
gcauaaguccucuagugaaugu

SEQ ID NO: 3576144 - RNA, 11 nt, Human
gcauaauaaau

SEQ ID NO: 3576145 - RNA, 13 nt, Human
gcauacacacaca

SEQ ID NO: 3576146 - RNA, 21 nt, Human
gcauacacacacacacacagc

SEQ ID NO: 3576147 - RNA, 23 nt, Human
gcauacacacacacacacagcca

SEQ ID NO: 3576148 - RNA, 21 nt, Human
gcauacacccccaccuccugc

SEQ ID NO: 3576149 - RNA, 19 nt, Human
gcauacaugcaaaaagaaa

SEQ ID NO: 3576150 - RNA, 15 nt, Human
gcauaccacuuuugu

SEQ ID NO: 3576151 - RNA, 17 nt, Human
gcauaccacuuuuguuc

SEQ ID NO: 3576152 - RNA, 18 nt, Human
gcauaccuccuauggguu

SEQ ID NO: 3576153 - RNA, 19 nt, Human
gcauaccuuucacagcuuu

SEQ ID NO: 3576154 - RNA, 14 nt, Human
gcauacguacacau

SEQ ID NO: 3576155 - RNA, 17 nt, Human
gcauacuauuaaacaug

SEQ ID NO: 3576156 - RNA, 21 nt, Human
gcauacuauuaaacaugcugu

SEQ ID NO: 3576157 - RNA, 19 nt, Human
gcauacuuaccuagugaaa

SEQ ID NO: 3576158 - RNA, 21 nt, Human
gcauacuuaccuagugaaacu

SEQ ID NO: 3576159 - RNA, 14 nt, Human
gcauacuucaaaag

SEQ ID NO: 3576160 - RNA, 16 nt, Human
gcauacuucaaaagua

SEQ ID NO: 3576161 - RNA, 22 nt, Human
gcauacuucaaaaguauuuucc

SEQ ID NO: 3576162 - RNA, 16 nt, Human
gcauacuuuguaaaua

SEQ ID NO: 3576163 - RNA, 13 nt, Human
gcauacuuuuuaa

SEQ ID NO: 3576164 - RNA, 14 nt, Human
gcauagaaggagga

SEQ ID NO: 3576165 - RNA, 23 nt, Human
gcauagaaggaggagagggaaaa

SEQ ID NO: 3576166 - RNA, 14 nt, Human
gcauagaaggcagg

SEQ ID NO: 3576167 - RNA, 15 nt, Human
gcauagaaggcaggu

SEQ ID NO: 3576168 - RNA, 13 nt, Human
gcauagaaguaaa

SEQ ID NO: 3576169 - RNA, 22 nt, Human
gcauagaggcuucuccgccagc

SEQ ID NO: 3576170 - RNA, 18 nt, Human
gcauagauucccugagca

SEQ ID NO: 3576171 - RNA, 14 nt, Human
gcauagcaaacaga

SEQ ID NO: 3576172 - RNA, 22 nt, Human
gcauagcccagacacagaagag

SEQ ID NO: 3576173 - RNA, 18 nt, Human
gcauagcuacguggcacu

SEQ ID NO: 3576174 - RNA, 22 nt, Human
gcauagcuacuaaaaucaguga

SEQ ID NO: 3576175 - RNA, 14 nt, Human
gcauagcucugggg

SEQ ID NO: 3576176 - RNA, 21 nt, Human
gcauaggaguuuggaggaagu

SEQ ID NO: 3576177 - RNA, 20 nt, Human
gcauaguauuccauugugug

SEQ ID NO: 3576178 - RNA, 21 nt, Human
gcauaguauuccauuguguga

SEQ ID NO: 3576179 - RNA, 22 nt, Human
gcauaguauuccauugugugag

SEQ ID NO: 3576180 - RNA, 23 nt, Human
gcauaguauuccauugugugagu

SEQ ID NO: 3576181 - RNA, 12 nt, Human
gcauagugcugg

SEQ ID NO: 3576182 - RNA, 11 nt, Human
gcauaguuccc

SEQ ID NO: 3576183 - RNA, 21 nt, Human
gcauaguuguagacaaaguac

SEQ ID NO: 3576184 - RNA, 12 nt, Human
gcauaguuucuu

SEQ ID NO: 3576185 - RNA, 17 nt, Human
gcauaguuucuuuauuu

SEQ ID NO: 3576186 - RNA, 14 nt, Human
gcauauagagauga

SEQ ID NO: 3576187 - RNA, 19 nt, Human
gcauauaggugauguuugc

SEQ ID NO: 3576188 - RNA, 14 nt, Human
gcauauauauaugu

SEQ ID NO: 3576189 - RNA, 18 nt, Human
gcauauauauaugugugu

SEQ ID NO: 3576190 - RNA, 23 nt, Human
gcauauauuggguuccauucuca

SEQ ID NO: 3576191 - RNA, 15 nt, Human
gcauauauuuuuaua

SEQ ID NO: 3576192 - RNA, 22 nt, Human
gcauaucagucucugagggcuu

SEQ ID NO: 3576193 - RNA, 13 nt, Human
gcauaucauaaug

SEQ ID NO: 3576194 - RNA, 20 nt, Human
gcauaucaugcuuugaaaaa

SEQ ID NO: 3576195 - RNA, 16 nt, Human
gcauauccugagccau

SEQ ID NO: 3576196 - RNA, 14 nt, Human
gcauauccuuuuag

SEQ ID NO: 3576197 - RNA, 12 nt, Human
gcauaucugccu

SEQ ID NO: 3576198 - RNA, 16 nt, Human
gcauaugacaaauguu

SEQ ID NO: 3576199 - RNA, 17 nt, Human
gcauaugacaaauguuu

SEQ ID NO: 3576200 - RNA, 19 nt, Human
gcauaugacaaauguuucu

SEQ ID NO: 3576201 - RNA, 20 nt, Human
gcauaugacaaauguuucua

SEQ ID NO: 3576202 - RNA, 13 nt, Human
gcauaugucuaua

SEQ ID NO: 3576203 - RNA, 21 nt, Human
gcauauguugaauacuuuuua

SEQ ID NO: 3576204 - RNA, 16 nt, Human
gcauauuauaaaggau

SEQ ID NO: 3576205 - RNA, 23 nt, Human
gcauauuauaaaggauaaagaag

SEQ ID NO: 3576206 - RNA, 15 nt, Human
gcauauucaggaagc

SEQ ID NO: 3576207 - RNA, 21 nt, Human
gcauauucuaguaauaaagac

SEQ ID NO: 3576208 - RNA, 17 nt, Human
gcauauuguacacuuuu

SEQ ID NO: 3576209 - RNA, 15 nt, Human
gcauauuguuauuau

SEQ ID NO: 3576210 - RNA, 14 nt, Human
gcauauuuguauag

SEQ ID NO: 3576211 - RNA, 14 nt, Human
gcaucaaaagacaa

SEQ ID NO: 3576212 - RNA, 18 nt, Human
gcaucaagaugugacaug

SEQ ID NO: 3576213 - RNA, 21 nt, Human
gcaucaagaugugacauguuu

SEQ ID NO: 3576214 - RNA, 18 nt, Human
gcaucaaggggucacuua

SEQ ID NO: 3576215 - RNA, 21 nt, Human
gcaucaaggucagcaugagga

SEQ ID NO: 3576216 - RNA, 13 nt, Human
gcaucaauccugu

SEQ ID NO: 3576217 - RNA, 17 nt, Human
gcaucaauccugugugg

SEQ ID NO: 3576218 - RNA, 14 nt, Human
gcaucacagggcag

SEQ ID NO: 3576219 - RNA, 16 nt, Human
gcaucacagggcagag

SEQ ID NO: 3576220 - RNA, 22 nt, Human
gcaucacagggcagagccggga

SEQ ID NO: 3576221 - RNA, 21 nt, Human
gcaucaccuagaaacuuguua

SEQ ID NO: 3576222 - RNA, 13 nt, Human
gcaucaccucagg

SEQ ID NO: 3576223 - RNA, 20 nt, Human
gcaucaccuuaggcagggaa

SEQ ID NO: 3576224 - RNA, 20 nt, Human
gcaucacuccccaaggaaga

SEQ ID NO: 3576225 - RNA, 20 nt, Human
gcaucacuuaaaacacguuu

SEQ ID NO: 3576226 - RNA, 13 nt, Human
gcaucagaaagag

SEQ ID NO: 3576227 - RNA, 17 nt, Human
gcaucagaaagaggcag

SEQ ID NO: 3576228 - RNA, 11 nt, Human
gcaucagaaau

SEQ ID NO: 3576229 - RNA, 13 nt, Human
gcaucagaaaugu

SEQ ID NO: 3576230 - RNA, 22 nt, Human
gcaucagcugcugaaacaacaa

SEQ ID NO: 3576231 - RNA, 13 nt, Human
gcaucaggccagg

SEQ ID NO: 3576232 - RNA, 15 nt, Human
gcaucaggccaggcc

SEQ ID NO: 3576233 - RNA, 18 nt, Human
gcaucagggggaagaagc

SEQ ID NO: 3576234 - RNA, 20 nt, Human
gcaucagggggaagaagcag

SEQ ID NO: 3576235 - RNA, 19 nt, Human
gcaucagucccuauguauu

SEQ ID NO: 3576236 - RNA, 15 nt, Human
gcaucagugcccucc

SEQ ID NO: 3576237 - RNA, 23 nt, Human
gcaucagugcccuccaggauaga

SEQ ID NO: 3576238 - RNA, 15 nt, Human
gcaucaguucuacgg

SEQ ID NO: 3576239 - RNA, 14 nt, Human
gcaucaucuguaga

SEQ ID NO: 3576240 - RNA, 13 nt, Human
gcauggaaaucag

SEQ ID NO: 3576241 - RNA, 17 nt, Human
gcauggaaauuuaaagc

SEQ ID NO: 3576242 - RNA, 19 nt, Human
gcauggaaauuuaaagcag

SEQ ID NO: 3576243 - RNA, 21 nt, Human
gcauggaaggcaagauugugu

SEQ ID NO: 3576244 - RNA, 20 nt, Human
gcauggacauuuagaagaaa

SEQ ID NO: 3576245 - RNA, 18 nt, Human
gcauggaccuaacauucg

SEQ ID NO: 3576246 - RNA, 16 nt, Human
gcauggagacgcauuu

SEQ ID NO: 3576247 - RNA, 16 nt, Human
gcauggaggcccuccu

SEQ ID NO: 3576248 - RNA, 17 nt, Human
gcauggaguguguauug

SEQ ID NO: 3576249 - RNA, 21 nt, Human
gcauggauguuuuagccauug

SEQ ID NO: 3576250 - RNA, 15 nt, Human
gcauggauuucuguc

SEQ ID NO: 3576251 - RNA, 16 nt, Human
gcauggauuucuuuga

SEQ ID NO: 3576252 - RNA, 14 nt, Human
gcauggcaccuguc

SEQ ID NO: 3576253 - RNA, 14 nt, Human
gcauggcacucccu

SEQ ID NO: 3576254 - RNA, 20 nt, Human
gcauggcacucccuccagca

SEQ ID NO: 3576255 - RNA, 21 nt, Human
gcauggcacucccuccagcac

SEQ ID NO: 3576256 - RNA, 14 nt, Human
gcauggcagcaggc

SEQ ID NO: 3576257 - RNA, 18 nt, Human
gcauggcagcaggccugu

SEQ ID NO: 3576258 - RNA, 20 nt, Human
gcauggcagcaggccuguug

SEQ ID NO: 3576259 - RNA, 20 nt, Human
gcauggcagggggcugcugc

SEQ ID NO: 3576260 - RNA, 21 nt, Human
gcauggcagggggcugcugcu

SEQ ID NO: 3576261 - RNA, 18 nt, Human
gcauggcaucaccuccac

SEQ ID NO: 3576262 - RNA, 13 nt, Human
gcauggccaggug

SEQ ID NO: 3576263 - RNA, 16 nt, Human
gcauggcccugggguc

SEQ ID NO: 3576264 - RNA, 23 nt, Human
gcauggcguagagggugcugccc

SEQ ID NO: 3576265 - RNA, 17 nt, Human
gcauggcuccagaaaug

SEQ ID NO: 3576266 - RNA, 19 nt, Human
gcauggcuccagaaauguc

SEQ ID NO: 3576267 - RNA, 22 nt, Human
gcauggcuccagucugcugccc

SEQ ID NO: 3576268 - RNA, 21 nt, Human
gcauggcugccaaugggagcu

SEQ ID NO: 3576269 - RNA, 18 nt, Human
gcaugggaaagccaccuc

SEQ ID NO: 3576270 - RNA, 19 nt, Human
gcaugggaaagccaccucu

SEQ ID NO: 3576271 - RNA, 16 nt, Human
gcaugggaaugaaugu

SEQ ID NO: 3576272 - RNA, 15 nt, Human
gcaugggccagcccc

SEQ ID NO: 3576273 - RNA, 18 nt, Human
gcaugguaccagcccugg

SEQ ID NO: 3576274 - RNA, 19 nt, Human
gcaugguaccagcccuggg

SEQ ID NO: 3576275 - RNA, 22 nt, Human
gcaugguauuugagacauucca

SEQ ID NO: 3576276 - RNA, 23 nt, Human
gcauggucccacaucccugggcc

SEQ ID NO: 3576277 - RNA, 15 nt, Human
gcauggugccccagg

SEQ ID NO: 3576278 - RNA, 16 nt, Human
gcauggugccccagga

SEQ ID NO: 3576279 - RNA, 17 nt, Human
gcauggugccccaggac

SEQ ID NO: 3576280 - RNA, 21 nt, Human
gcauggugccccaggaccagc

SEQ ID NO: 3576281 - RNA, 18 nt, Human
gcauggugcgggcaccug

SEQ ID NO: 3576282 - RNA, 15 nt, Human
gcaugguggcaccag

SEQ ID NO: 3576283 - RNA, 13 nt, Human
gcaugguggcaug

SEQ ID NO: 3576284 - RNA, 16 nt, Human
gcaugguuuggagcug

SEQ ID NO: 3576285 - RNA, 17 nt, Human
gcauguaaauguaaacu

SEQ ID NO: 3576286 - RNA, 21 nt, Human
gcauguaacgcaaguucccag

SEQ ID NO: 3576287 - RNA, 23 nt, Human
gcauguacaguguucuguuuaau

SEQ ID NO: 3576288 - RNA, 18 nt, Human
gcauguaccauuugcaug

SEQ ID NO: 3576289 - RNA, 21 nt, Human
gcauguacggauuuucaguua

SEQ ID NO: 3576290 - RNA, 20 nt, Human
gcauguagaggcuuguuuac

SEQ ID NO: 3576291 - RNA, 16 nt, Human
gcauguauaguugcuu

SEQ ID NO: 3576292 - RNA, 18 nt, Human
gcauguauaguugcuuuu

SEQ ID NO: 3576293 - RNA, 19 nt, Human
gcauguauuggccuggagg

SEQ ID NO: 3576294 - RNA, 23 nt, Human
gcauguauugugucuuuugcaug

SEQ ID NO: 3576295 - RNA, 20 nt, Human
gcaugucaaacaugagaugu

SEQ ID NO: 3576296 - RNA, 16 nt, Human
gcaugucuuauuuaaa

SEQ ID NO: 3576297 - RNA, 17 nt, Human
gcaugucuuuuaaaaug

SEQ ID NO: 3576298 - RNA, 15 nt, Human
gcaugugacucugaa

SEQ ID NO: 3576299 - RNA, 19 nt, Human
gcaugugaucacgccuggc

SEQ ID NO: 3576300 - RNA, 17 nt, Human
gcaugugaugagaggaa

SEQ ID NO: 3576301 - RNA, 18 nt, Human
gcaugugaugagaggaaa

SEQ ID NO: 3576302 - RNA, 19 nt, Human
gcaugugcccuccugaggg

SEQ ID NO: 3576303 - RNA, 17 nt, Human
gcauguggccuguggcc

SEQ ID NO: 3576304 - RNA, 17 nt, Human
gcauguggcuuuuuuaa

SEQ ID NO: 3576305 - RNA, 19 nt, Human
gcaugugguuugguuccuc

SEQ ID NO: 3576306 - RNA, 23 nt, Human
gcaugugguuugguuccucucug

SEQ ID NO: 3576307 - RNA, 12 nt, Human
gcauguguauuu

SEQ ID NO: 3576308 - RNA, 11 nt, Human
gcaugugugua

SEQ ID NO: 3576309 - RNA, 13 nt, Human
gcauguguguaua

SEQ ID NO: 3576310 - RNA, 19 nt, Human
gcauguguuugguucuggg

SEQ ID NO: 3576311 - RNA, 18 nt, Human
gcauguuaccuccuauaa

SEQ ID NO: 3576312 - RNA, 16 nt, Human
gcauguuauguuuaau

SEQ ID NO: 3576313 - RNA, 18 nt, Human
gcauguuauguuuaauaa

SEQ ID NO: 3576314 - RNA, 20 nt, Human
gcauguucacccuuauaguc

SEQ ID NO: 3576315 - RNA, 18 nt, Human
gcauguugagccaggccu

SEQ ID NO: 3576316 - RNA, 22 nt, Human
gcauguuuagacuuuaacauaa

SEQ ID NO: 3576317 - RNA, 12 nt, Human
gcauguuugcug

SEQ ID NO: 3576318 - RNA, 17 nt, Human
gcauguuugugauugac

SEQ ID NO: 3576319 - RNA, 15 nt, Human
gcauguuuuguauac

SEQ ID NO: 3576320 - RNA, 16 nt, Human
gcauguuuuguauaca

SEQ ID NO: 3576321 - RNA, 12 nt, Human
gcauuaaaccug

SEQ ID NO: 3576322 - RNA, 13 nt, Human
gcauuaaaccugu

SEQ ID NO: 3576323 - RNA, 14 nt, Human
gcauuaaaccuguc

SEQ ID NO: 3576324 - RNA, 15 nt, Human
gcauuaaaccugucu

SEQ ID NO: 3576325 - RNA, 22 nt, Human
gcauuaaaccugucuccacugu

SEQ ID NO: 3576326 - RNA, 15 nt, Human
gcauuaaauuacaga

SEQ ID NO: 3576327 - RNA, 18 nt, Human
gcauuaaauucacaaacu

SEQ ID NO: 3576328 - RNA, 14 nt, Human
gcauuaacuaaucu

SEQ ID NO: 3576329 - RNA, 22 nt, Human
gcauuaacuaaucuauuggguu

SEQ ID NO: 3576330 - RNA, 14 nt, Human
gcauuaacuucucu

SEQ ID NO: 3576331 - RNA, 13 nt, Human
gcauuaauguuuc

SEQ ID NO: 3576332 - RNA, 14 nt, Human
gcauuaauguuucu

SEQ ID NO: 3576333 - RNA, 13 nt, Human
gcauuacaggcaa

SEQ ID NO: 3576334 - RNA, 15 nt, Human
gcauuacccccaacc

SEQ ID NO: 3576335 - RNA, 15 nt, Human
gcauuacgugagcca

SEQ ID NO: 3576336 - RNA, 14 nt, Human
gcauuacucuugua

SEQ ID NO: 3576337 - RNA, 20 nt, Human
gcauuagauuucucauuugc

SEQ ID NO: 3576338 - RNA, 21 nt, Human
gcauuagcacagauuuuaauu

SEQ ID NO: 3576339 - RNA, 15 nt, Human
gcauuauaaaaagaa

SEQ ID NO: 3576340 - RNA, 13 nt, Human
gcauuauauuuau

SEQ ID NO: 3576341 - RNA, 22 nt, Human
gcauuaucuagauacuguauca

SEQ ID NO: 3576342 - RNA, 13 nt, Human
gcauuaugcaauu

SEQ ID NO: 3576343 - RNA, 14 nt, Human
gcauuaugcaauua

SEQ ID NO: 3576344 - RNA, 23 nt, Human
gcauuauguccacuguguauaga

SEQ ID NO: 3576345 - RNA, 13 nt, Human
gcauuauucauuu

SEQ ID NO: 3576346 - RNA, 16 nt, Human
gcauuauucauuuagu

SEQ ID NO: 3576347 - RNA, 14 nt, Human
gcauuauucucuuu

SEQ ID NO: 3576348 - RNA, 21 nt, Human
gcauuauucucuuuuaucugu

SEQ ID NO: 3576349 - RNA, 23 nt, Human
gcauuauucucuuuuaucuguuu

SEQ ID NO: 3576350 - RNA, 15 nt, Human
gcauuauugcauuau

SEQ ID NO: 3576351 - RNA, 22 nt, Human
gcauuauuggaauauaauuguu

SEQ ID NO: 3576352 - RNA, 21 nt, Human
gcauuauuugagaagcugcuc

SEQ ID NO: 3576353 - RNA, 19 nt, Human
gcauucaaauguauuacag

SEQ ID NO: 3576354 - RNA, 12 nt, Human
gcauucacccag

SEQ ID NO: 3576355 - RNA, 14 nt, Human
gcauucauuuuuau

SEQ ID NO: 3576356 - RNA, 17 nt, Human
gcauucauuuuuauagc

SEQ ID NO: 3576357 - RNA, 19 nt, Human
gcauucauuuuuauagcaa

SEQ ID NO: 3576358 - RNA, 16 nt, Human
gcauuccagccccucu

SEQ ID NO: 3576359 - RNA, 20 nt, Human
gcauucccagguaggccaag

SEQ ID NO: 3576360 - RNA, 21 nt, Human
gcauucccagguaggccaagg

SEQ ID NO: 3576361 - RNA, 14 nt, Human
gcauuccccaggag

SEQ ID NO: 3576362 - RNA, 20 nt, Human
gcauuccccaggaggccagc

SEQ ID NO: 3576363 - RNA, 15 nt, Human
gcauuccuucuuuga

SEQ ID NO: 3576364 - RNA, 16 nt, Human
gcauucuauugccuuc

SEQ ID NO: 3576365 - RNA, 20 nt, Human
gcauucuauugccuucuuug

SEQ ID NO: 3576366 - RNA, 14 nt, Human
gcauucucauggag

SEQ ID NO: 3576367 - RNA, 23 nt, Human
gcauucucuccauuucacuggcu

SEQ ID NO: 3576368 - RNA, 14 nt, Human
gcauucucucucca

SEQ ID NO: 3576369 - RNA, 14 nt, Human
gcauucucugaaga

SEQ ID NO: 3576370 - RNA, 20 nt, Human
gcauucugccgugugcccuc

SEQ ID NO: 3576371 - RNA, 16 nt, Human
gcauucuggaccucug

SEQ ID NO: 3576372 - RNA, 14 nt, Human
gcauucuucucugu

SEQ ID NO: 3576373 - RNA, 21 nt, Human
gcauucuugguuggcuggccu

SEQ ID NO: 3576374 - RNA, 15 nt, Human
gcauucuuguacagu

SEQ ID NO: 3576375 - RNA, 21 nt, Human
gcauucuugucacaauaaaug

SEQ ID NO: 3576376 - RNA, 22 nt, Human
gcauucuugucacaauaaaugu

SEQ ID NO: 3576377 - RNA, 16 nt, Human
gcauucuuuuaaaaga

SEQ ID NO: 3576378 - RNA, 21 nt, Human
gcauucuuuuaaaagacaaga

SEQ ID NO: 3576379 - RNA, 16 nt, Human
gcauugaaaagagcug

SEQ ID NO: 3576380 - RNA, 23 nt, Human
gcauugaacacaaacuguaaaua

SEQ ID NO: 3576381 - RNA, 22 nt, Human
gcauugaccgcgacuaauuuca

SEQ ID NO: 3576382 - RNA, 23 nt, Human
gcauugacugguuuacaggcccu

SEQ ID NO: 3576383 - RNA, 12 nt, Human
gcauugacuuuc

SEQ ID NO: 3576384 - RNA, 22 nt, Human
gcccgccugccaguccuagcug

SEQ ID NO: 3576385 - RNA, 15 nt, Human
gcccgccugcccacc

SEQ ID NO: 3576386 - RNA, 18 nt, Human
gcccgccugcccaccugc

SEQ ID NO: 3576387 - RNA, 22 nt, Human
gcccgccugcccaccugccugg

SEQ ID NO: 3576388 - RNA, 24 nt, Human
gcccgcgauguggaacugcugcca

SEQ ID NO: 3576389 - RNA, 19 nt, Human
gcccgcuugccucggcucc

SEQ ID NO: 3576390 - RNA, 21 nt, Human
gcccgcuugccucggcuccug

SEQ ID NO: 3576391 - RNA, 19 nt, Human
gcccggacgcccaggaccc

SEQ ID NO: 3576392 - RNA, 21 nt, Human
gcccggagauuggacggccug

SEQ ID NO: 3576393 - RNA, 14 nt, Human
gcccggcgcccucu

SEQ ID NO: 3576394 - RNA, 20 nt, Human
gcccggcgcccucuguccug

SEQ ID NO: 3576395 - RNA, 18 nt, Human
gcccggcgccuggccucc

SEQ ID NO: 3576396 - RNA, 21 nt, Human
gcccggcgccuggccuccagg

SEQ ID NO: 3576397 - RNA, 22 nt, Human
gcccggcgccuggccuccaggc

SEQ ID NO: 3576398 - RNA, 18 nt, Human
gcccggcuaauuuuugua

SEQ ID NO: 3576399 - RNA, 16 nt, Human
gcccggcuccaggcuc

SEQ ID NO: 3576400 - RNA, 20 nt, Human
gcccgggaaggucaccagca

SEQ ID NO: 3576401 - RNA, 17 nt, Human
gcccgggagcucaggaa

SEQ ID NO: 3576402 - RNA, 19 nt, Human
gcccgggagcucaggaacc

SEQ ID NO: 3576403 - RNA, 18 nt, Human
gcccgggcgcggccagcc

SEQ ID NO: 3576404 - RNA, 14 nt, Human
gcccgggcucugcc

SEQ ID NO: 3576405 - RNA, 18 nt, Human
gcccgggcucugccuccc

SEQ ID NO: 3576406 - RNA, 19 nt, Human
gcccgggcucugccuccca

SEQ ID NO: 3576407 - RNA, 14 nt, Human
gcccgggcugccug

SEQ ID NO: 3576408 - RNA, 17 nt, Human
gcccgggcugccugggc

SEQ ID NO: 3576409 - RNA, 18 nt, Human
gcccgggcugccugggcu

SEQ ID NO: 3576410 - RNA, 13 nt, Human
gcccggggcagca

SEQ ID NO: 3576411 - RNA, 18 nt, Human
gcccggggcagcugccag

SEQ ID NO: 3576412 - RNA, 16 nt, Human
gcccgggguggccaca

SEQ ID NO: 3576413 - RNA, 16 nt, Human
gcccggucccaccccu

SEQ ID NO: 3576414 - RNA, 19 nt, Human
gcccggugggggggcagag

SEQ ID NO: 3576415 - RNA, 13 nt, Human
gcccgucucagug

SEQ ID NO: 3576416 - RNA, 16 nt, Human
gcccgucucucuccca

SEQ ID NO: 3576417 - RNA, 19 nt, Human
gcccgucucucucccaugg

SEQ ID NO: 3576418 - RNA, 14 nt, Human
gcccgucuguccau

SEQ ID NO: 3576419 - RNA, 22 nt, Human
gcccgucugugugugaccccuc

SEQ ID NO: 3576420 - RNA, 14 nt, Human
gcccgucuucagcc

SEQ ID NO: 3576421 - RNA, 17 nt, Human
gcccgucuucagccuag

SEQ ID NO: 3576422 - RNA, 20 nt, Human
gcccgugacauccccacccu

SEQ ID NO: 3576423 - RNA, 19 nt, Human
gcccguguacauagugcau

SEQ ID NO: 3576424 - RNA, 18 nt, Human
gcccguguggccccuuca

SEQ ID NO: 3576425 - RNA, 17 nt, Human
gcccguugucucccugg

SEQ ID NO: 3576426 - RNA, 18 nt, Human
gcccguugucucccuggc

SEQ ID NO: 3576427 - RNA, 15 nt, Human
gcccuaaaagcacac

SEQ ID NO: 3576428 - RNA, 12 nt, Human
gcccuaagcaga

SEQ ID NO: 3576429 - RNA, 16 nt, Human
gcccuaagcagaaagu

SEQ ID NO: 3576430 - RNA, 18 nt, Human
gcccuaagcagaaagugc

SEQ ID NO: 3576431 - RNA, 16 nt, Human
gcccuaaguuuguacu

SEQ ID NO: 3576432 - RNA, 17 nt, Human
gcccuaaugcgcaggcu

SEQ ID NO: 3576433 - RNA, 17 nt, Human
gcccuacagagcugugg

SEQ ID NO: 3576434 - RNA, 20 nt, Human
gcccuacagaggucucugcc

SEQ ID NO: 3576435 - RNA, 15 nt, Human
gcccuacagcacccu

SEQ ID NO: 3576436 - RNA, 18 nt, Human
gcccuaccugccccacuu

SEQ ID NO: 3576437 - RNA, 21 nt, Human
gcccuaccugccccacuuguc

SEQ ID NO: 3576438 - RNA, 22 nt, Human
gcccuacucccugcagaugcca

SEQ ID NO: 3576439 - RNA, 17 nt, Human
gcccuagacuggugcua

SEQ ID NO: 3576440 - RNA, 17 nt, Human
gcccuagagcacacugu

SEQ ID NO: 3576441 - RNA, 19 nt, Human
gcccuagagcacacuguag

SEQ ID NO: 3576442 - RNA, 16 nt, Human
gcccuagagccugccu

SEQ ID NO: 3576443 - RNA, 18 nt, Human
gcccuagagccugccugg

SEQ ID NO: 3576444 - RNA, 13 nt, Human
gcccuaugggccu

SEQ ID NO: 3576445 - RNA, 14 nt, Human
gcccuaugggccug

SEQ ID NO: 3576446 - RNA, 17 nt, Human
gcccuauuuuugcaaug

SEQ ID NO: 3576447 - RNA, 16 nt, Human
gcccucaaggccuccc

SEQ ID NO: 3576448 - RNA, 18 nt, Human
gcccucaaggccucccac

SEQ ID NO: 3576449 - RNA, 20 nt, Human
gcccucaaggccucccacag

SEQ ID NO: 3576450 - RNA, 13 nt, Human
gcccucaagggug

SEQ ID NO: 3576451 - RNA, 15 nt, Human
gcccucacccugggg

SEQ ID NO: 3576452 - RNA, 17 nt, Human
gcccucacccuggggcu

SEQ ID NO: 3576453 - RNA, 18 nt, Human
gcccucagaugucccuug

SEQ ID NO: 3576454 - RNA, 19 nt, Human
gcccucaguagucccugca

SEQ ID NO: 3576455 - RNA, 23 nt, Human
gcccucaguagucccugcacagu

SEQ ID NO: 3576456 - RNA, 23 nt, Human
gcccucaucuugaagggcccagg

SEQ ID NO: 3576457 - RNA, 21 nt, Human
gcccucauuacugggccuuag

SEQ ID NO: 3576458 - RNA, 14 nt, Human
gcccuccaaaagca

SEQ ID NO: 3576459 - RNA, 21 nt, Human
gcccuccaagaccuucuccuu

SEQ ID NO: 3576460 - RNA, 23 nt, Human
gcccuccaagaccuucuccuuca

SEQ ID NO: 3576461 - RNA, 15 nt, Human
gcccuccacacccgc

SEQ ID NO: 3576462 - RNA, 15 nt, Human
gcccuccacaccugc

SEQ ID NO: 3576463 - RNA, 17 nt, Human
gcccuccacaucccuga

SEQ ID NO: 3576464 - RNA, 12 nt, Human
gcccuccagagc

SEQ ID NO: 3576465 - RNA, 14 nt, Human
gcccuccagagccc

SEQ ID NO: 3576466 - RNA, 15 nt, Human
gcccuccccagagca

SEQ ID NO: 3576467 - RNA, 16 nt, Human
gcccuccccagagcac

SEQ ID NO: 3576468 - RNA, 17 nt, Human
gcccuccccagagcacu

SEQ ID NO: 3576469 - RNA, 19 nt, Human
gcccuccccagagcacugg

SEQ ID NO: 3576470 - RNA, 17 nt, Human
gcccuccccuccccugc

SEQ ID NO: 3576471 - RNA, 19 nt, Human
gcccuccccuccccugcug

SEQ ID NO: 3576472 - RNA, 20 nt, Human
gcccuccccuccccugcugc

SEQ ID NO: 3576473 - RNA, 21 nt, Human
gcccuccccuccccugcugca

SEQ ID NO: 3576474 - RNA, 22 nt, Human
gcccuccccuccccugcugcag

SEQ ID NO: 3576475 - RNA, 22 nt, Human
gcccuccccuccggacuggugc

SEQ ID NO: 3576476 - RNA, 15 nt, Human
gcccuccccucucug

SEQ ID NO: 3576477 - RNA, 18 nt, Human
gcccuccccucucugcac

SEQ ID NO: 3576478 - RNA, 15 nt, Human
gcccucccugccccu

SEQ ID NO: 3576479 - RNA, 21 nt, Human
gcccucccugccccucccuuc

SEQ ID NO: 3576480 - RNA, 14 nt, Human
gcccucccuguccu

SEQ ID NO: 3576481 - RNA, 19 nt, Human
gcccucccuucucccugga

SEQ ID NO: 3576482 - RNA, 16 nt, Human
gcccuccgccuucaca

SEQ ID NO: 3576483 - RNA, 13 nt, Human
gcccuccucaccc

SEQ ID NO: 3576484 - RNA, 14 nt, Human
gcccuccucacccc

SEQ ID NO: 3576485 - RNA, 21 nt, Human
gcccuccucaccccgucuggg

SEQ ID NO: 3576486 - RNA, 18 nt, Human
gcccuccucccucccagc

SEQ ID NO: 3576487 - RNA, 23 nt, Human
gcccuccugaaacuuacacacaa

SEQ ID NO: 3576488 - RNA, 17 nt, Human
gcccuccugugcucagc

SEQ ID NO: 3576489 - RNA, 20 nt, Human
gcccuccugugcucagcccu

SEQ ID NO: 3576490 - RNA, 18 nt, Human
gcccuccugugcuggggg

SEQ ID NO: 3576491 - RNA, 10 nt, Human
gcccuccuuc

SEQ ID NO: 3576492 - RNA, 17 nt, Human
gcccuccuuccuaaauu

SEQ ID NO: 3576493 - RNA, 18 nt, Human
gcccuccuuucugugccc

SEQ ID NO: 3576494 - RNA, 21 nt, Human
gcccucgcacggccccgaagg

SEQ ID NO: 3576495 - RNA, 15 nt, Human
gcccucgcugccagc

SEQ ID NO: 3576496 - RNA, 15 nt, Human
gcccucgcugcuucu

SEQ ID NO: 3576497 - RNA, 17 nt, Human
gcccucgggcccagccc

SEQ ID NO: 3576498 - RNA, 20 nt, Human
gcccucgggcccagccccca

SEQ ID NO: 3576499 - RNA, 19 nt, Human
gcccucguggccagcccgg

SEQ ID NO: 3576500 - RNA, 23 nt, Human
gcccucgugguggaaacuuuucu

SEQ ID NO: 3576501 - RNA, 20 nt, Human
gcccucuccccaccccuacc

SEQ ID NO: 3576502 - RNA, 23 nt, Human
gcccucuccccaccccuaccccu

SEQ ID NO: 3576503 - RNA, 15 nt, Human
gcccucuccccugcc

SEQ ID NO: 3576504 - RNA, 24 nt, Human
gcccucucccucuaggcucugccu

SEQ ID NO: 3576505 - RNA, 19 nt, Human
gcccucuccugggcagcug

SEQ ID NO: 3576506 - RNA, 21 nt, Human
gcccucuccugggcagcugcc

SEQ ID NO: 3576507 - RNA, 16 nt, Human
gcccucuccuuuguuc

SEQ ID NO: 3576508 - RNA, 13 nt, Human
gcccucugcccac

SEQ ID NO: 3576509 - RNA, 19 nt, Human
gcccucuggaguggccacu

SEQ ID NO: 3576510 - RNA, 14 nt, Human
gcccucugggcucu

SEQ ID NO: 3576511 - RNA, 17 nt, Human
gcccucugggcucugag

SEQ ID NO: 3576512 - RNA, 18 nt, Human
gcccucugggcucugagu

SEQ ID NO: 3576513 - RNA, 11 nt, Human
gcccucuucca

SEQ ID NO: 3576514 - RNA, 13 nt, Human
gcccucuuccuga

SEQ ID NO: 3576515 - RNA, 16 nt, Human
gcccucuuccugacga

SEQ ID NO: 3576516 - RNA, 12 nt, Human
gcccucuucucg

SEQ ID NO: 3576517 - RNA, 14 nt, Human
gcccucuucuuacu

SEQ ID NO: 3576518 - RNA, 17 nt, Human
gcccugacccuguggaa

SEQ ID NO: 3576519 - RNA, 17 nt, Human
gcccugaccucccagcc

SEQ ID NO: 3576520 - RNA, 19 nt, Human
gcccugaccucccagcccu

SEQ ID NO: 3576521 - RNA, 19 nt, Human
gcccugagccagggucucc

SEQ ID NO: 3576522 - RNA, 22 nt, Human
gcccugagccagggucuccaga

SEQ ID NO: 3576523 - RNA, 22 nt, Human
gcccugagcucgguggacccag

SEQ ID NO: 3576524 - RNA, 14 nt, Human
gcccugagcuuucu

SEQ ID NO: 3576525 - RNA, 17 nt, Human
gcccugaggacagaugc

SEQ ID NO: 3576526 - RNA, 21 nt, Human
gcccugaggacagaugccucc

SEQ ID NO: 3576527 - RNA, 20 nt, Human
gcccugaggccuagacucug

SEQ ID NO: 3576528 - RNA, 12 nt, Human
gcccuuccaugu

SEQ ID NO: 3576529 - RNA, 16 nt, Human
gcccuucccacuggag

SEQ ID NO: 3576530 - RNA, 13 nt, Human
gcccuucccuguc

SEQ ID NO: 3576531 - RNA, 17 nt, Human
gcccuucccugucccuc

SEQ ID NO: 3576532 - RNA, 18 nt, Human
gcccuucccugucccucu

SEQ ID NO: 3576533 - RNA, 18 nt, Human
gcccuuccuccuccacca

SEQ ID NO: 3576534 - RNA, 12 nt, Human
gcccuuccucuc

SEQ ID NO: 3576535 - RNA, 14 nt, Human
gcccuuccucucca

SEQ ID NO: 3576536 - RNA, 18 nt, Human
gcccuuccucuccacugc

SEQ ID NO: 3576537 - RNA, 22 nt, Human
gcccuuccucuccacugccuuc

SEQ ID NO: 3576538 - RNA, 14 nt, Human
gcccuuccucugcu

SEQ ID NO: 3576539 - RNA, 15 nt, Human
gcccuuccucugcuc

SEQ ID NO: 3576540 - RNA, 23 nt, Human
gcccuuccuggacagcugugccu

SEQ ID NO: 3576541 - RNA, 20 nt, Human
gcccuucuauacccacccag

SEQ ID NO: 3576542 - RNA, 13 nt, Human
gcccuucucucca

SEQ ID NO: 3576543 - RNA, 19 nt, Human
gcccuucucuccagccccu

SEQ ID NO: 3576544 - RNA, 16 nt, Human
gcccuucuugcugccc

SEQ ID NO: 3576545 - RNA, 19 nt, Human
gcccuucuuuccacagaag

SEQ ID NO: 3576546 - RNA, 16 nt, Human
gcccuucuuucuaccc

SEQ ID NO: 3576547 - RNA, 22 nt, Human
gcccuugagcuccccaaaaacc

SEQ ID NO: 3576548 - RNA, 14 nt, Human
gcccuugagggaga

SEQ ID NO: 3576549 - RNA, 19 nt, Human
gcccuugcaguucagcacc

SEQ ID NO: 3576550 - RNA, 22 nt, Human
gcccuugcaguucagcaccacc

SEQ ID NO: 3576551 - RNA, 15 nt, Human
gcccuugcccugacc

SEQ ID NO: 3576552 - RNA, 12 nt, Human
gcccuuggccag

SEQ ID NO: 3576553 - RNA, 12 nt, Human
gcccuugggcca

SEQ ID NO: 3576554 - RNA, 14 nt, Human
gcccuugggccacc

SEQ ID NO: 3576555 - RNA, 22 nt, Human
gcccuuggggguccuccuccag

SEQ ID NO: 3576556 - RNA, 12 nt, Human
gcccuuguccca

SEQ ID NO: 3576557 - RNA, 13 nt, Human
gcccuugucugag

SEQ ID NO: 3576558 - RNA, 23 nt, Human
gcccuuguuuggggcaggaguag

SEQ ID NO: 3576559 - RNA, 23 nt, Human
gcccuuuacuugucuuucugggg

SEQ ID NO: 3576560 - RNA, 14 nt, Human
gcccuuuccucagg

SEQ ID NO: 3576561 - RNA, 17 nt, Human
gcccuuugaagccucag

SEQ ID NO: 3576562 - RNA, 18 nt, Human
gcccuuugaagccucagc

SEQ ID NO: 3576563 - RNA, 19 nt, Human
gcccuuugaagccucagcu

SEQ ID NO: 3576564 - RNA, 18 nt, Human
gcccuuuguccuccugcu

SEQ ID NO: 3576565 - RNA, 22 nt, Human
gcccuuuguccuccugcugcca

SEQ ID NO: 3576566 - RNA, 18 nt, Human
gcccuuuuucaauaacug

SEQ ID NO: 3576567 - RNA, 22 nt, Human
gcccuuuuuucugccuccuuua

SEQ ID NO: 3576568 - RNA, 19 nt, Human
gccgaaccaggagcugcuc

SEQ ID NO: 3576569 - RNA, 19 nt, Human
gccgaagaaggguccuucc

SEQ ID NO: 3576570 - RNA, 14 nt, Human
gccgaagcuaacag

SEQ ID NO: 3576571 - RNA, 15 nt, Human
gccgaagcuaacagg

SEQ ID NO: 3576572 - RNA, 14 nt, Human
gccgaagcucuggc

SEQ ID NO: 3576573 - RNA, 19 nt, Human
gccgaagcucuggcugaac

SEQ ID NO: 3576574 - RNA, 12 nt, Human
gccgacacuguu

SEQ ID NO: 3576575 - RNA, 16 nt, Human
gccgacauugucuccc

SEQ ID NO: 3576576 - RNA, 20 nt, Human
gccgacccccucucccugca

SEQ ID NO: 3576577 - RNA, 24 nt, Human
gccgacccccucucccugcauggc

SEQ ID NO: 3576578 - RNA, 22 nt, Human
gccgaccgaggcuggagcuggc

SEQ ID NO: 3576579 - RNA, 11 nt, Human
gccgaccucag

SEQ ID NO: 3576580 - RNA, 21 nt, Human
gccgaccucguccucccccug

SEQ ID NO: 3576581 - RNA, 13 nt, Human
gccgacuccuggg

SEQ ID NO: 3576582 - RNA, 17 nt, Human
gccgagagccugcuccc

SEQ ID NO: 3576583 - RNA, 16 nt, Human
gccgagaucacgccac

SEQ ID NO: 3576584 - RNA, 17 nt, Human
gccgagauugcaccacu

SEQ ID NO: 3576585 - RNA, 19 nt, Human
gccgagcaaccguggcccu

SEQ ID NO: 3576586 - RNA, 21 nt, Human
gccgagcccuugcccaugcug

SEQ ID NO: 3576587 - RNA, 20 nt, Human
gccgagccgggccuggggcu

SEQ ID NO: 3576588 - RNA, 15 nt, Human
gccgaggacuuugau

SEQ ID NO: 3576589 - RNA, 16 nt, Human
gccgaggguccuggcu

SEQ ID NO: 3576590 - RNA, 18 nt, Human
gccgaggguccuggcucc

SEQ ID NO: 3576591 - RNA, 14 nt, Human
gccgagucugucuc

SEQ ID NO: 3576592 - RNA, 21 nt, Human
gccgaguggauagaugcccug

SEQ ID NO: 3576593 - RNA, 14 nt, Human
gccgauagagggac

SEQ ID NO: 3576594 - RNA, 21 nt, Human
gccgcaaaccacacuggacuc

SEQ ID NO: 3576595 - RNA, 22 nt, Human
gccgcaaaccacacuggacucc

SEQ ID NO: 3576596 - RNA, 22 nt, Human
gccgcaaauuguaccuuuuuug

SEQ ID NO: 3576597 - RNA, 17 nt, Human
gccgcaagucugcagcc

SEQ ID NO: 3576598 - RNA, 23 nt, Human
gccgcaccccagagugugggaag

SEQ ID NO: 3576599 - RNA, 12 nt, Human
gccgcagagcug

SEQ ID NO: 3576600 - RNA, 19 nt, Human
gccgcagcccugcagaggg

SEQ ID NO: 3576601 - RNA, 18 nt, Human
gccgcagccucccucuga

SEQ ID NO: 3576602 - RNA, 15 nt, Human
gccgcagcucuugcc

SEQ ID NO: 3576603 - RNA, 17 nt, Human
gccgcaucuucuccauc

SEQ ID NO: 3576604 - RNA, 20 nt, Human
gccgccaguacuugucauau

SEQ ID NO: 3576605 - RNA, 13 nt, Human
gccgcccaaggcc

SEQ ID NO: 3576606 - RNA, 14 nt, Human
gccgcccaaggccc

SEQ ID NO: 3576607 - RNA, 15 nt, Human
gccgccccacccaga

SEQ ID NO: 3576608 - RNA, 19 nt, Human
gccgccccagccucugagc

SEQ ID NO: 3576609 - RNA, 15 nt, Human
gccgcccccuccuga

SEQ ID NO: 3576610 - RNA, 23 nt, Human
gccgcccccugccccccagccuc

SEQ ID NO: 3576611 - RNA, 11 nt, Human
gccgcccugua

SEQ ID NO: 3576612 - RNA, 15 nt, Human
gccgccgccucgccc

SEQ ID NO: 3576613 - RNA, 20 nt, Human
gccgccgcuagguagagucu

SEQ ID NO: 3576614 - RNA, 22 nt, Human
gccgccuccgggacccccagga

SEQ ID NO: 3576615 - RNA, 13 nt, Human
gccgccucgccca

SEQ ID NO: 3576616 - RNA, 15 nt, Human
gccgccucgcccacc

SEQ ID NO: 3576617 - RNA, 18 nt, Human
gccgccugcacuccucag

SEQ ID NO: 3576618 - RNA, 22 nt, Human
gccgccugcacuccucagggca

SEQ ID NO: 3576619 - RNA, 19 nt, Human
gccgccugcgggcugcccc

SEQ ID NO: 3576620 - RNA, 17 nt, Human
gccgcgucgcccuccca

SEQ ID NO: 3576621 - RNA, 20 nt, Human
gccgcguuuagaccaaggaa

SEQ ID NO: 3576622 - RNA, 13 nt, Human
gccgcuagaggcc

SEQ ID NO: 3576623 - RNA, 16 nt, Human
gccgcuagaggccuga

SEQ ID NO: 3576624 - RNA, 18 nt, Human
gccgcuagaugggcaugg

SEQ ID NO: 3576625 - RNA, 13 nt, Human
gccgcuagguaga

SEQ ID NO: 3576626 - RNA, 15 nt, Human
gccgcuccaccagca

SEQ ID NO: 3576627 - RNA, 12 nt, Human
gccgcuccaggg

SEQ ID NO: 3576628 - RNA, 19 nt, Human
gccgcuccugucugccagc

SEQ ID NO: 3576629 - RNA, 22 nt, Human
gccgcuccugucugccagccag

SEQ ID NO: 3576630 - RNA, 23 nt, Human
gccgcuccugucugccagccagc

SEQ ID NO: 3576631 - RNA, 17 nt, Human
gccgcucggaggcccca

SEQ ID NO: 3576632 - RNA, 18 nt, Human
gccgcucggaggccccaa

SEQ ID NO: 3576633 - RNA, 20 nt, Human
gccgcucggaggccccaaag

SEQ ID NO: 3576634 - RNA, 22 nt, Human
gccgcucggaggccccaaagga

SEQ ID NO: 3576635 - RNA, 17 nt, Human
gccgcugagcgaggaga

SEQ ID NO: 3576636 - RNA, 16 nt, Human
gccgcugaguggcagg

SEQ ID NO: 3576637 - RNA, 12 nt, Human
gccgcugccacg

SEQ ID NO: 3576638 - RNA, 19 nt, Human
gccgcugcccggcgcccuc

SEQ ID NO: 3576639 - RNA, 12 nt, Human
gccgcugugagc

SEQ ID NO: 3576640 - RNA, 16 nt, Human
gccgcuuuucuccucu

SEQ ID NO: 3576641 - RNA, 14 nt, Human
gccggagaggaaga

SEQ ID NO: 3576642 - RNA, 15 nt, Human
gccggaucugaggga

SEQ ID NO: 3576643 - RNA, 16 nt, Human
gccggaugugcuuuuc

SEQ ID NO: 3576644 - RNA, 19 nt, Human
gccggcaaccccaguucug

SEQ ID NO: 3576645 - RNA, 19 nt, Human
gccggcaauaaaagcccag

SEQ ID NO: 3576646 - RNA, 21 nt, Human
gccggcacagggucugcucuu

SEQ ID NO: 3576647 - RNA, 16 nt, Human
gccggcagccccagcc

SEQ ID NO: 3576648 - RNA, 19 nt, Human
gccggcagccccagccugc

SEQ ID NO: 3576649 - RNA, 17 nt, Human
gccggccagccagccac

SEQ ID NO: 3576650 - RNA, 15 nt, Human
gccggccagcuggga

SEQ ID NO: 3576651 - RNA, 18 nt, Human
gccggccaggugggcggg

SEQ ID NO: 3576652 - RNA, 12 nt, Human
gccggccucucu

SEQ ID NO: 3576653 - RNA, 13 nt, Human
gccggccucucug

SEQ ID NO: 3576654 - RNA, 14 nt, Human
gccggccucucugg

SEQ ID NO: 3576655 - RNA, 17 nt, Human
gccggcggcccaagccc

SEQ ID NO: 3576656 - RNA, 23 nt, Human
gccggcguggcaaauauaaaacu

SEQ ID NO: 3576657 - RNA, 16 nt, Human
gccggcuuucaggagc

SEQ ID NO: 3576658 - RNA, 20 nt, Human
gccgggaacagacaacagaa

SEQ ID NO: 3576659 - RNA, 20 nt, Human
gccgggaccacccugagccg

SEQ ID NO: 3576660 - RNA, 22 nt, Human
gccgggaccacccugagccggc

SEQ ID NO: 3576661 - RNA, 13 nt, Human
gccgggagccuga

SEQ ID NO: 3576662 - RNA, 19 nt, Human
gccgggagccugacccuca

SEQ ID NO: 3576663 - RNA, 23 nt, Human
gccgggcaugguggcgcaagccu

SEQ ID NO: 3576664 - RNA, 19 nt, Human
gccgggccgaauccccucc

SEQ ID NO: 3576665 - RNA, 15 nt, Human
gccgggccgcagacu

SEQ ID NO: 3576666 - RNA, 14 nt, Human
gccgggcgcggugg

SEQ ID NO: 3576667 - RNA, 21 nt, Human
gccgggcgugguggcaggcac

SEQ ID NO: 3576668 - RNA, 17 nt, Human
gccggggaacuggccaa

SEQ ID NO: 3576669 - RNA, 17 nt, Human
gccggggcgaguggcac

SEQ ID NO: 3576670 - RNA, 21 nt, Human
gccggggcuucugugcaccug

SEQ ID NO: 3576671 - RNA, 20 nt, Human
gccggggugggguggcugca

SEQ ID NO: 3576672 - RNA, 23 nt, Human
gccggggugggguggcugcagcc

SEQ ID NO: 3576673 - RNA, 23 nt, Human
gccugagcaguccuuggccugcu

SEQ ID NO: 3576674 - RNA, 12 nt, Human
gccugagcccag

SEQ ID NO: 3576675 - RNA, 14 nt, Human
gccugagcccaggg

SEQ ID NO: 3576676 - RNA, 14 nt, Human
gccugagccuggcc

SEQ ID NO: 3576677 - RNA, 17 nt, Human
gccugagccuggccagc

SEQ ID NO: 3576678 - RNA, 17 nt, Human
gccugagcgacagugag

SEQ ID NO: 3576679 - RNA, 23 nt, Human
gccugagcucacucggcacccug

SEQ ID NO: 3576680 - RNA, 18 nt, Human
gccugaggaugagcugga

SEQ ID NO: 3576681 - RNA, 20 nt, Human
gccugaggaugagcuggaag

SEQ ID NO: 3576682 - RNA, 13 nt, Human
gccugaggcuccu

SEQ ID NO: 3576683 - RNA, 14 nt, Human
gccugagggaaagg

SEQ ID NO: 3576684 - RNA, 15 nt, Human
gccugagggaaaggc

SEQ ID NO: 3576685 - RNA, 17 nt, Human
gccugagggaaaggcca

SEQ ID NO: 3576686 - RNA, 20 nt, Human
gccugagggccccucugccc

SEQ ID NO: 3576687 - RNA, 13 nt, Human
gccugaggggcag

SEQ ID NO: 3576688 - RNA, 20 nt, Human
gccugaggggcagccugccu

SEQ ID NO: 3576689 - RNA, 21 nt, Human
gccugaggucaggaguucaag

SEQ ID NO: 3576690 - RNA, 17 nt, Human
gccugaggucucgcuga

SEQ ID NO: 3576691 - RNA, 13 nt, Human
gccugagucaccu

SEQ ID NO: 3576692 - RNA, 15 nt, Human
gccugauauaaaugc

SEQ ID NO: 3576693 - RNA, 16 nt, Human
gccugaucagaccacg

SEQ ID NO: 3576694 - RNA, 21 nt, Human
gccugauccagccucuccccu

SEQ ID NO: 3576695 - RNA, 15 nt, Human
gccugaucucuuccu

SEQ ID NO: 3576696 - RNA, 23 nt, Human
gccugaucugcccaucgugaaga

SEQ ID NO: 3576697 - RNA, 21 nt, Human
gccugaugacaauaaagcuug

SEQ ID NO: 3576698 - RNA, 19 nt, Human
gccugaugaccaauuuuaa

SEQ ID NO: 3576699 - RNA, 19 nt, Human
gccugaugcucccuccccu

SEQ ID NO: 3576700 - RNA, 13 nt, Human
gccugauggaccu

SEQ ID NO: 3576701 - RNA, 13 nt, Human
gccugcaaacugg

SEQ ID NO: 3576702 - RNA, 23 nt, Human
gccugcaaacugggaaccccuuu

SEQ ID NO: 3576703 - RNA, 15 nt, Human
gccugcaauuucaua

SEQ ID NO: 3576704 - RNA, 18 nt, Human
gccugcaauuucauaugc

SEQ ID NO: 3576705 - RNA, 13 nt, Human
gccugcacacaag

SEQ ID NO: 3576706 - RNA, 21 nt, Human
gccugcaccaggagacagaca

SEQ ID NO: 3576707 - RNA, 21 nt, Human
gccugcacuugggggcucagc

SEQ ID NO: 3576708 - RNA, 16 nt, Human
gccugcagacucacug

SEQ ID NO: 3576709 - RNA, 11 nt, Human
gccugcagaga

SEQ ID NO: 3576710 - RNA, 14 nt, Human
gccugcagagagaa

SEQ ID NO: 3576711 - RNA, 16 nt, Human
gccugcagagagaagc

SEQ ID NO: 3576712 - RNA, 13 nt, Human
gccugcagcagga

SEQ ID NO: 3576713 - RNA, 10 nt, Human
gccugcagcc

SEQ ID NO: 3576714 - RNA, 22 nt, Human
gccugcaggaccugccuguagc

SEQ ID NO: 3576715 - RNA, 15 nt, Human
gccugcagggaagcc

SEQ ID NO: 3576716 - RNA, 22 nt, Human
gccugcagggaagccccacaug

SEQ ID NO: 3576717 - RNA, 21 nt, Human
gccugcagggccauggcucag

SEQ ID NO: 3576718 - RNA, 21 nt, Human
gccugcaggguggugcuggga

SEQ ID NO: 3576719 - RNA, 23 nt, Human
gccugcaggguggugcugggacu

SEQ ID NO: 3576720 - RNA, 24 nt, Human
gccugcaggguggugcugggacug

SEQ ID NO: 3576721 - RNA, 16 nt, Human
gccugcaggugcugcu

SEQ ID NO: 3576722 - RNA, 17 nt, Human
gccugcaguccuggaag

SEQ ID NO: 3576723 - RNA, 22 nt, Human
gccugcauccauucuccugagg

SEQ ID NO: 3576724 - RNA, 21 nt, Human
gccugcaugcuggguucugca

SEQ ID NO: 3576725 - RNA, 16 nt, Human
gccugcauguaaacac

SEQ ID NO: 3576726 - RNA, 14 nt, Human
gccugcauuuccuc

SEQ ID NO: 3576727 - RNA, 19 nt, Human
gccugcauuuccucgcagc

SEQ ID NO: 3576728 - RNA, 13 nt, Human
gccugccaccucc

SEQ ID NO: 3576729 - RNA, 13 nt, Human
gccugccaccugg

SEQ ID NO: 3576730 - RNA, 14 nt, Human
gccugccaccugga

SEQ ID NO: 3576731 - RNA, 16 nt, Human
gccugccaccuggacc

SEQ ID NO: 3576732 - RNA, 22 nt, Human
gccugccaccuggaccccugca

SEQ ID NO: 3576733 - RNA, 23 nt, Human
gccugccacucaggcccaaagcc

SEQ ID NO: 3576734 - RNA, 14 nt, Human
gccugccaguccua

SEQ ID NO: 3576735 - RNA, 18 nt, Human
gccugccaguccuagcug

SEQ ID NO: 3576736 - RNA, 10 nt, Human
gccugccaug

SEQ ID NO: 3576737 - RNA, 15 nt, Human
gccugccauguaccu

SEQ ID NO: 3576738 - RNA, 21 nt, Human
gccugcccaagcccaggccac

SEQ ID NO: 3576739 - RNA, 16 nt, Human
gccugcccaccugccu

SEQ ID NO: 3576740 - RNA, 17 nt, Human
gccugcccaccugccug

SEQ ID NO: 3576741 - RNA, 18 nt, Human
gccugcccaccugccugg

SEQ ID NO: 3576742 - RNA, 11 nt, Human
gccugcccagg

SEQ ID NO: 3576743 - RNA, 20 nt, Human
gccugcccaggccccugcca

SEQ ID NO: 3576744 - RNA, 21 nt, Human
gccugccccuacccuggacuu

SEQ ID NO: 3576745 - RNA, 18 nt, Human
gccugccccucccagaac

SEQ ID NO: 3576746 - RNA, 17 nt, Human
gccugcccgcacagcag

SEQ ID NO: 3576747 - RNA, 20 nt, Human
gccugcccgcacagcagccu

SEQ ID NO: 3576748 - RNA, 21 nt, Human
gccugcccguaaacacgccug

SEQ ID NO: 3576749 - RNA, 19 nt, Human
gccugcccugucaggaggc

SEQ ID NO: 3576750 - RNA, 13 nt, Human
gccugcccuuguc

SEQ ID NO: 3576751 - RNA, 20 nt, Human
gccugccgagcaaccguggc

SEQ ID NO: 3576752 - RNA, 16 nt, Human
gccugccgguaaacac

SEQ ID NO: 3576753 - RNA, 16 nt, Human
gccugccuccagggcu

SEQ ID NO: 3576754 - RNA, 17 nt, Human
gccugccuccagggcug

SEQ ID NO: 3576755 - RNA, 13 nt, Human
gccugccucccac

SEQ ID NO: 3576756 - RNA, 12 nt, Human
gccugccuggag

SEQ ID NO: 3576757 - RNA, 22 nt, Human
gccugccugucugucucuccau

SEQ ID NO: 3576758 - RNA, 17 nt, Human
gccugccuguucccauu

SEQ ID NO: 3576759 - RNA, 21 nt, Human
gccugccuuaagugaggaaau

SEQ ID NO: 3576760 - RNA, 14 nt, Human
gccugccuuuccau

SEQ ID NO: 3576761 - RNA, 15 nt, Human
gccugcgacccuggg

SEQ ID NO: 3576762 - RNA, 13 nt, Human
gccugcgccugcu

SEQ ID NO: 3576763 - RNA, 16 nt, Human
gccugcgccugcugca

SEQ ID NO: 3576764 - RNA, 16 nt, Human
gccugcguggcugacc

SEQ ID NO: 3576765 - RNA, 22 nt, Human
gccugcguggcugaccccccuc

SEQ ID NO: 3576766 - RNA, 23 nt, Human
gccugcuaauuccccagauugca

SEQ ID NO: 3576767 - RNA, 12 nt, Human
gccugcuccaga

SEQ ID NO: 3576768 - RNA, 15 nt, Human
gccugcuccagcugu

SEQ ID NO: 3576769 - RNA, 16 nt, Human
gccugcuccagcuguu

SEQ ID NO: 3576770 - RNA, 18 nt, Human
gccugcuccagcuguuca

SEQ ID NO: 3576771 - RNA, 11 nt, Human
gccugcucccc

SEQ ID NO: 3576772 - RNA, 16 nt, Human
gccugcucccccaccc

SEQ ID NO: 3576773 - RNA, 17 nt, Human
gccugcucccccacccc

SEQ ID NO: 3576774 - RNA, 13 nt, Human
gccugcuccuucc

SEQ ID NO: 3576775 - RNA, 14 nt, Human
gccugcuccuuccc

SEQ ID NO: 3576776 - RNA, 19 nt, Human
gccugcucuagugggacag

SEQ ID NO: 3576777 - RNA, 10 nt, Human
gccugcugca

SEQ ID NO: 3576778 - RNA, 14 nt, Human
gccugcugcaugcc

SEQ ID NO: 3576779 - RNA, 18 nt, Human
gccugcugcauggggugg

SEQ ID NO: 3576780 - RNA, 18 nt, Human
gccugcugcccaggcugu

SEQ ID NO: 3576781 - RNA, 19 nt, Human
gccugcugcugagaaccug

SEQ ID NO: 3576782 - RNA, 20 nt, Human
gccugcugcugagaaccugg

SEQ ID NO: 3576783 - RNA, 23 nt, Human
gccugcugcugagaaccuggccu

SEQ ID NO: 3576784 - RNA, 15 nt, Human
gccugcuggaggccu

SEQ ID NO: 3576785 - RNA, 17 nt, Human
gccugcuggaggccuca

SEQ ID NO: 3576786 - RNA, 18 nt, Human
gccugcuggaggccucag

SEQ ID NO: 3576787 - RNA, 13 nt, Human
gccugcuggcacc

SEQ ID NO: 3576788 - RNA, 16 nt, Human
gccugcuggcacccac

SEQ ID NO: 3576789 - RNA, 17 nt, Human
gccugcuggcacccacc

SEQ ID NO: 3576790 - RNA, 22 nt, Human
gccugcuggcucccuuacuuua

SEQ ID NO: 3576791 - RNA, 17 nt, Human
gccugcugggcucucca

SEQ ID NO: 3576792 - RNA, 18 nt, Human
gccugcugggcucuccac

SEQ ID NO: 3576793 - RNA, 24 nt, Human
gccugcugggcucuccaccucagc

SEQ ID NO: 3576794 - RNA, 13 nt, Human
gccugcuucccac

SEQ ID NO: 3576795 - RNA, 21 nt, Human
gccugcuucccaccucccugc

SEQ ID NO: 3576796 - RNA, 22 nt, Human
gccugcuuuagaauguuuuccu

SEQ ID NO: 3576797 - RNA, 17 nt, Human
gccugcuuugucuccuc

SEQ ID NO: 3576798 - RNA, 21 nt, Human
gccugcuuuucacugcugcaa

SEQ ID NO: 3576799 - RNA, 22 nt, Human
gccugcuuuuuauggccuguga

SEQ ID NO: 3576800 - RNA, 16 nt, Human
gccugcuuuuuggaaa

SEQ ID NO: 3576801 - RNA, 18 nt, Human
gccuggaaaccugucuga

SEQ ID NO: 3576802 - RNA, 21 nt, Human
gccuggacaguaucccacauc

SEQ ID NO: 3576803 - RNA, 22 nt, Human
gccuggacaguaucccacaucc

SEQ ID NO: 3576804 - RNA, 16 nt, Human
gccuggaccagccucu

SEQ ID NO: 3576805 - RNA, 17 nt, Human
gccuggaccagccucuc

SEQ ID NO: 3576806 - RNA, 13 nt, Human
gccuggaccccca

SEQ ID NO: 3576807 - RNA, 14 nt, Human
gccuggacccugug

SEQ ID NO: 3576808 - RNA, 18 nt, Human
gccuggaccucugacagc

SEQ ID NO: 3576809 - RNA, 18 nt, Human
gccuggaccugccuccug

SEQ ID NO: 3576810 - RNA, 19 nt, Human
gccuggaccugccuccugc

SEQ ID NO: 3576811 - RNA, 14 nt, Human
gccuggacuuuccu

SEQ ID NO: 3576812 - RNA, 15 nt, Human
gccuggacuuuccug

SEQ ID NO: 3576813 - RNA, 18 nt, Human
gccuggacuuuccugcaa

SEQ ID NO: 3576814 - RNA, 13 nt, Human
gccuggagaagcu

SEQ ID NO: 3576815 - RNA, 19 nt, Human
gccuggagacuuagggcac

SEQ ID NO: 3576816 - RNA, 21 nt, Human
gccuggagaugacuugaggcc

SEQ ID NO: 3576817 - RNA, 11 nt, Human
gccuggagccc

SEQ ID NO: 3576818 - RNA, 15 nt, Human
gcucugcccagagcu

SEQ ID NO: 3576819 - RNA, 21 nt, Human
gcucugcccauccugccccug

SEQ ID NO: 3576820 - RNA, 20 nt, Human
gcucugccccagaggccucu

SEQ ID NO: 3576821 - RNA, 20 nt, Human
gcucugccccagcucuggcu

SEQ ID NO: 3576822 - RNA, 22 nt, Human
gcucugccccagcuugggcaga

SEQ ID NO: 3576823 - RNA, 11 nt, Human
gcucugcccuu

SEQ ID NO: 3576824 - RNA, 18 nt, Human
gcucugcccuuguucccu

SEQ ID NO: 3576825 - RNA, 21 nt, Human
gcucugcccuuguucccuagg

SEQ ID NO: 3576826 - RNA, 18 nt, Human
gcucugccgucucuggag

SEQ ID NO: 3576827 - RNA, 11 nt, Human
gcucugccucc

SEQ ID NO: 3576828 - RNA, 14 nt, Human
gcucugccucccau

SEQ ID NO: 3576829 - RNA, 17 nt, Human
gcucugcgugucaccug

SEQ ID NO: 3576830 - RNA, 22 nt, Human
gcucugcgugucaccugugcuu

SEQ ID NO: 3576831 - RNA, 22 nt, Human
gcucugcuccccuaaagccuca

SEQ ID NO: 3576832 - RNA, 14 nt, Human
gcucugcuccucuc

SEQ ID NO: 3576833 - RNA, 19 nt, Human
gcucugcuccucuccccag

SEQ ID NO: 3576834 - RNA, 13 nt, Human
gcucugcucgccu

SEQ ID NO: 3576835 - RNA, 13 nt, Human
gcucugcugacag

SEQ ID NO: 3576836 - RNA, 18 nt, Human
gcucugcugacagacaca

SEQ ID NO: 3576837 - RNA, 20 nt, Human
gcucugcugacagacacagg

SEQ ID NO: 3576838 - RNA, 22 nt, Human
gcucugcugaugacccccccag

SEQ ID NO: 3576839 - RNA, 13 nt, Human
gcucugcuugccg

SEQ ID NO: 3576840 - RNA, 15 nt, Human
gcucuggaagagagg

SEQ ID NO: 3576841 - RNA, 22 nt, Human
gcucuggacagccccacccugg

SEQ ID NO: 3576842 - RNA, 15 nt, Human
gcucuggacaggcau

SEQ ID NO: 3576843 - RNA, 16 nt, Human
gcucuggacaggcaug

SEQ ID NO: 3576844 - RNA, 22 nt, Human
gcucuggacaggcauguucucu

SEQ ID NO: 3576845 - RNA, 22 nt, Human
gcucuggaccaacccuguuucc

SEQ ID NO: 3576846 - RNA, 16 nt, Human
gcucuggaccagccug

SEQ ID NO: 3576847 - RNA, 16 nt, Human
gcucuggacucuaaag

SEQ ID NO: 3576848 - RNA, 14 nt, Human
gcucuggagacagc

SEQ ID NO: 3576849 - RNA, 18 nt, Human
gcucuggagacagcccca

SEQ ID NO: 3576850 - RNA, 20 nt, Human
gcucuggagacagccccaga

SEQ ID NO: 3576851 - RNA, 13 nt, Human
gcucuggagagaa

SEQ ID NO: 3576852 - RNA, 14 nt, Human
gcucuggagagaaa

SEQ ID NO: 3576853 - RNA, 17 nt, Human
gcucuggagccaccugu

SEQ ID NO: 3576854 - RNA, 23 nt, Human
gcucuggagccaccugucccacc

SEQ ID NO: 3576855 - RNA, 17 nt, Human
gcucuggagcccacugu

SEQ ID NO: 3576856 - RNA, 23 nt, Human
gcucuggagcccacuguacuugc

SEQ ID NO: 3576857 - RNA, 15 nt, Human
gcucuggaggggagg

SEQ ID NO: 3576858 - RNA, 16 nt, Human
gcucuggaggggaggg

SEQ ID NO: 3576859 - RNA, 15 nt, Human
gcucuggcucacaga

SEQ ID NO: 3576860 - RNA, 19 nt, Human
gcucuggcugaacccugug

SEQ ID NO: 3576861 - RNA, 20 nt, Human
gcucuggcugaacccugugc

SEQ ID NO: 3576862 - RNA, 20 nt, Human
gcucugggccauucuccaca

SEQ ID NO: 3576863 - RNA, 16 nt, Human
gcucugguccauagag

SEQ ID NO: 3576864 - RNA, 20 nt, Human
gcucuggugacaccagccuu

SEQ ID NO: 3576865 - RNA, 19 nt, Human
gcucuggugauaaggacau

SEQ ID NO: 3576866 - RNA, 19 nt, Human
gcucugguuguuucuguuc

SEQ ID NO: 3576867 - RNA, 18 nt, Human
gcucuguaaucucguuuc

SEQ ID NO: 3576868 - RNA, 18 nt, Human
gcucuguaucaggaccca

SEQ ID NO: 3576869 - RNA, 19 nt, Human
gcucuguaucaggacccag

SEQ ID NO: 3576870 - RNA, 22 nt, Human
gcucuguaucaggacccagagg

SEQ ID NO: 3576871 - RNA, 23 nt, Human
gcucuguaucaggacccagagga

SEQ ID NO: 3576872 - RNA, 14 nt, Human
gcucugucccccug

SEQ ID NO: 3576873 - RNA, 13 nt, Human
gcucugucuacuu

SEQ ID NO: 3576874 - RNA, 11 nt, Human
gcucugugcug

SEQ ID NO: 3576875 - RNA, 22 nt, Human
gcucugugcugacccuccuguu

SEQ ID NO: 3576876 - RNA, 14 nt, Human
gcucuguucuuccu

SEQ ID NO: 3576877 - RNA, 15 nt, Human
gcucuguugcccagg

SEQ ID NO: 3576878 - RNA, 23 nt, Human
gcucuguugcccaggcuggagug

SEQ ID NO: 3576879 - RNA, 14 nt, Human
gcucuuacucuuuc

SEQ ID NO: 3576880 - RNA, 23 nt, Human
gcucuuagcaaaaacauguaugu

SEQ ID NO: 3576881 - RNA, 14 nt, Human
gcucuuauuucauc

SEQ ID NO: 3576882 - RNA, 12 nt, Human
gcucuucaggcc

SEQ ID NO: 3576883 - RNA, 17 nt, Human
gcucuucauaauucuaa

SEQ ID NO: 3576884 - RNA, 19 nt, Human
gcucuucauaauucuaaga

SEQ ID NO: 3576885 - RNA, 18 nt, Human
gcucuucaucccauucca

SEQ ID NO: 3576886 - RNA, 12 nt, Human
gcucuuccaggc

SEQ ID NO: 3576887 - RNA, 19 nt, Human
gcucuuccaggcugggaga

SEQ ID NO: 3576888 - RNA, 20 nt, Human
gcucuuccgaaaaccaggcc

SEQ ID NO: 3576889 - RNA, 19 nt, Human
gcucuuccuaucccucucc

SEQ ID NO: 3576890 - RNA, 14 nt, Human
gcucuucucauuuc

SEQ ID NO: 3576891 - RNA, 12 nt, Human
gcucuucuccag

SEQ ID NO: 3576892 - RNA, 14 nt, Human
gcucuucuccaggc

SEQ ID NO: 3576893 - RNA, 23 nt, Human
gcucuucuccuuucacaaccuuc

SEQ ID NO: 3576894 - RNA, 21 nt, Human
gcucuucugacuacugggcaa

SEQ ID NO: 3576895 - RNA, 16 nt, Human
gcucuugaacuccuga

SEQ ID NO: 3576896 - RNA, 21 nt, Human
gcucuugaacuccugaccuca

SEQ ID NO: 3576897 - RNA, 19 nt, Human
gcucuugauaccccccucu

SEQ ID NO: 3576898 - RNA, 14 nt, Human
gcucuugaugccug

SEQ ID NO: 3576899 - RNA, 15 nt, Human
gcucuugcagagaag

SEQ ID NO: 3576900 - RNA, 22 nt, Human
gcucuugcccuucccugucccu

SEQ ID NO: 3576901 - RNA, 23 nt, Human
gcucuugcccuucccugucccuc

SEQ ID NO: 3576902 - RNA, 18 nt, Human
gcucuuggcuggacccag

SEQ ID NO: 3576903 - RNA, 23 nt, Human
gcucuuggcuggacccagccagg

SEQ ID NO: 3576904 - RNA, 17 nt, Human
gcucuugugaggaaagu

SEQ ID NO: 3576905 - RNA, 19 nt, Human
gcucuugugaggaaaguca

SEQ ID NO: 3576906 - RNA, 22 nt, Human
gcucuugugguacacacagauu

SEQ ID NO: 3576907 - RNA, 22 nt, Human
gcucuuguuuuuauuaauuuau

SEQ ID NO: 3576908 - RNA, 13 nt, Human
gcucuuucagggg

SEQ ID NO: 3576909 - RNA, 20 nt, Human
gcucuuucccacccagccug

SEQ ID NO: 3576910 - RNA, 15 nt, Human
gcucuuuccuugcuc

SEQ ID NO: 3576911 - RNA, 13 nt, Human
gcucuuucugggc

SEQ ID NO: 3576912 - RNA, 14 nt, Human
gcucuuucugggcc

SEQ ID NO: 3576913 - RNA, 10 nt, Human
gcucuuucuu

SEQ ID NO: 3576914 - RNA, 21 nt, Human
gcucuuucuucuuccacacau

SEQ ID NO: 3576915 - RNA, 21 nt, Human
gcucuuuggggucagccaggg

SEQ ID NO: 3576916 - RNA, 23 nt, Human
gcucuuuggggucagccagggcc

SEQ ID NO: 3576917 - RNA, 21 nt, Human
gcucuuuguuuugugucucuu

SEQ ID NO: 3576918 - RNA, 15 nt, Human
gcucuuuucacagcu

SEQ ID NO: 3576919 - RNA, 17 nt, Human
gcucuuuuuuacucauu

SEQ ID NO: 3576920 - RNA, 23 nt, Human
gcucuuuuuuacucauugaaaug

SEQ ID NO: 3576921 - RNA, 20 nt, Human
gcucuuuuuuguuuguuucu

SEQ ID NO: 3576922 - RNA, 14 nt, Human
gcugaaaaaaaauu

SEQ ID NO: 3576923 - RNA, 12 nt, Human
gcugaaaacaau

SEQ ID NO: 3576924 - RNA, 19 nt, Human
gcugaaaaccaucuggccu

SEQ ID NO: 3576925 - RNA, 16 nt, Human
gcugaaacaacaaaua

SEQ ID NO: 3576926 - RNA, 18 nt, Human
gcugaaacaggagagaaa

SEQ ID NO: 3576927 - RNA, 23 nt, Human
gcugaaagaacauggacuuguau

SEQ ID NO: 3576928 - RNA, 14 nt, Human
gcugaaauucuccu

SEQ ID NO: 3576929 - RNA, 15 nt, Human
gcugaaauucuccug

SEQ ID NO: 3576930 - RNA, 19 nt, Human
gcugaaauugaaaaguuau

SEQ ID NO: 3576931 - RNA, 22 nt, Human
gcugaacaguggaggaagaggg

SEQ ID NO: 3576932 - RNA, 12 nt, Human
gcugaacaucac

SEQ ID NO: 3576933 - RNA, 22 nt, Human
gcugaacccauuuugagugacu

SEQ ID NO: 3576934 - RNA, 13 nt, Human
gcugaacccugug

SEQ ID NO: 3576935 - RNA, 17 nt, Human
gcugaacggggagaaaa

SEQ ID NO: 3576936 - RNA, 20 nt, Human
gcugaacuuguuuucuggga

SEQ ID NO: 3576937 - RNA, 18 nt, Human
gcugaagauggcauccug

SEQ ID NO: 3576938 - RNA, 19 nt, Human
gcugaagccgccaggaccg

SEQ ID NO: 3576939 - RNA, 16 nt, Human
gcugaagcugccugcu

SEQ ID NO: 3576940 - RNA, 23 nt, Human
gcugaaggacugugacaggcagc

SEQ ID NO: 3576941 - RNA, 18 nt, Human
gcugaauaaaugucuuuu

SEQ ID NO: 3576942 - RNA, 14 nt, Human
gcugaaugccuccu

SEQ ID NO: 3576943 - RNA, 17 nt, Human
gcugaaugguuuucaaa

SEQ ID NO: 3576944 - RNA, 17 nt, Human
gcugaauguugggacug

SEQ ID NO: 3576945 - RNA, 23 nt, Human
gcugaauguugggacugcuaaau

SEQ ID NO: 3576946 - RNA, 15 nt, Human
gcugaauguuuuucu

SEQ ID NO: 3576947 - RNA, 17 nt, Human
gcugaauuucccucucu

SEQ ID NO: 3576948 - RNA, 14 nt, Human
gcugaauuuucaca

SEQ ID NO: 3576949 - RNA, 19 nt, Human
gcugacaaccaccgcuccc

SEQ ID NO: 3576950 - RNA, 21 nt, Human
gcugacaaccaccgcucccca

SEQ ID NO: 3576951 - RNA, 23 nt, Human
gcugacaaccaccgcuccccagc

SEQ ID NO: 3576952 - RNA, 19 nt, Human
gcugacaaccauuaaaguc

SEQ ID NO: 3576953 - RNA, 20 nt, Human
gcugacaaccauuaaaguca

SEQ ID NO: 3576954 - RNA, 20 nt, Human
gcugacacaaaccugccugg

SEQ ID NO: 3576955 - RNA, 19 nt, Human
gcugacacguccaccccag

SEQ ID NO: 3576956 - RNA, 17 nt, Human
gcugacagacacaggcc

SEQ ID NO: 3576957 - RNA, 18 nt, Human
gcugacagacacaggccc

SEQ ID NO: 3576958 - RNA, 20 nt, Human
gcugacagacacaggcccgg

SEQ ID NO: 3576959 - RNA, 13 nt, Human
gcugacagcugcu

SEQ ID NO: 3576960 - RNA, 14 nt, Human
gcugacagcugcuc

SEQ ID NO: 3576961 - RNA, 17 nt, Human
gcugacagcugcuccua

SEQ ID NO: 3576962 - RNA, 15 nt, Human
gcugcuccaggccug

SEQ ID NO: 3576963 - RNA, 12 nt, Human
gcugcuccagug

SEQ ID NO: 3576964 - RNA, 17 nt, Human
gcugcuccagugcagga

SEQ ID NO: 3576965 - RNA, 10 nt, Human
gcugcuccca

SEQ ID NO: 3576966 - RNA, 22 nt, Human
gcugcucccaccuggcucugug

SEQ ID NO: 3576967 - RNA, 19 nt, Human
gcugcuccccagcagcgga

SEQ ID NO: 3576968 - RNA, 15 nt, Human
gcugcucccucagac

SEQ ID NO: 3576969 - RNA, 13 nt, Human
gcugcucccuggc

SEQ ID NO: 3576970 - RNA, 18 nt, Human
gcugcuccuagagggagg

SEQ ID NO: 3576971 - RNA, 22 nt, Human
gcugcuccuaggacccgucucc

SEQ ID NO: 3576972 - RNA, 12 nt, Human
gcugcuccucca

SEQ ID NO: 3576973 - RNA, 18 nt, Human
gcugcuccuccagggcca

SEQ ID NO: 3576974 - RNA, 17 nt, Human
gcugcuccuuagcugcc

SEQ ID NO: 3576975 - RNA, 15 nt, Human
gcugcuccuuggcuu

SEQ ID NO: 3576976 - RNA, 22 nt, Human
gcugcucggggugcacaggagg

SEQ ID NO: 3576977 - RNA, 12 nt, Human
gcugcucugccc

SEQ ID NO: 3576978 - RNA, 16 nt, Human
gcugcucugcccagag

SEQ ID NO: 3576979 - RNA, 18 nt, Human
gcugcucugcccagagcu

SEQ ID NO: 3576980 - RNA, 21 nt, Human
gcugcucugcccagagcuggg

SEQ ID NO: 3576981 - RNA, 17 nt, Human
gcugcucugccccagcu

SEQ ID NO: 3576982 - RNA, 15 nt, Human
gcugcucuuggcugg

SEQ ID NO: 3576983 - RNA, 13 nt, Human
gcugcugaagcug

SEQ ID NO: 3576984 - RNA, 20 nt, Human
gcugcugaagcugccugcuu

SEQ ID NO: 3576985 - RNA, 15 nt, Human
gcugcugaaggcuca

SEQ ID NO: 3576986 - RNA, 22 nt, Human
gcugcugaccaauugugcugcc

SEQ ID NO: 3576987 - RNA, 19 nt, Human
gcugcugaccuccacagcu

SEQ ID NO: 3576988 - RNA, 16 nt, Human
gcugcugacugauguu

SEQ ID NO: 3576989 - RNA, 13 nt, Human
gcugcugagaacc

SEQ ID NO: 3576990 - RNA, 18 nt, Human
gcugcugagaaccuggcc

SEQ ID NO: 3576991 - RNA, 20 nt, Human
gcugcugagauccuggacug

SEQ ID NO: 3576992 - RNA, 12 nt, Human
gcugcugagccg

SEQ ID NO: 3576993 - RNA, 16 nt, Human
gcugcugagccgcaga

SEQ ID NO: 3576994 - RNA, 18 nt, Human
gcugcugagccgcagaga

SEQ ID NO: 3576995 - RNA, 14 nt, Human
gcugcugccccugc

SEQ ID NO: 3576996 - RNA, 15 nt, Human
gcugcugccccugca

SEQ ID NO: 3576997 - RNA, 23 nt, Human
gcugcugccccugcacagcaggc

SEQ ID NO: 3576998 - RNA, 13 nt, Human
gcugcugcccugc

SEQ ID NO: 3576999 - RNA, 18 nt, Human
gcugcugccuggccacug

SEQ ID NO: 3577000 - RNA, 15 nt, Human
gcugcugcugcgccc

SEQ ID NO: 3577001 - RNA, 14 nt, Human
gcugcugcugcugc

SEQ ID NO: 3577002 - RNA, 18 nt, Human
gcugcuggaucacagcug

SEQ ID NO: 3577003 - RNA, 11 nt, Human
gcugcuggcca

SEQ ID NO: 3577004 - RNA, 21 nt, Human
gcugcuggccaaauagcaaag

SEQ ID NO: 3577005 - RNA, 17 nt, Human
gcugcuggcgccucugc

SEQ ID NO: 3577006 - RNA, 21 nt, Human
gcugcugggggcaacuggcca

SEQ ID NO: 3577007 - RNA, 15 nt, Human
gcugcuggugcacag

SEQ ID NO: 3577008 - RNA, 16 nt, Human
gcugcuguacugaagu

SEQ ID NO: 3577009 - RNA, 22 nt, Human
gcugcugucccucccccuuguc

SEQ ID NO: 3577010 - RNA, 23 nt, Human
gcugcugucccucccccuugucc

SEQ ID NO: 3577011 - RNA, 21 nt, Human
gcugcugugugcuuuuuuugu

SEQ ID NO: 3577012 - RNA, 22 nt, Human
gcugcugugugcuuuuuuugug

SEQ ID NO: 3577013 - RNA, 20 nt, Human
gcugcuuagaauccaaacuu

SEQ ID NO: 3577014 - RNA, 13 nt, Human
gcugcuucaagga

SEQ ID NO: 3577015 - RNA, 22 nt, Human
gcugcuucaaggauccugagcc

SEQ ID NO: 3577016 - RNA, 23 nt, Human
gcugcuucaaggauccugagcca

SEQ ID NO: 3577017 - RNA, 14 nt, Human
gcugcuucccucug

SEQ ID NO: 3577018 - RNA, 22 nt, Human
gcugcuucccucugccuguccc

SEQ ID NO: 3577019 - RNA, 18 nt, Human
gcugcuucucccaggcaa

SEQ ID NO: 3577020 - RNA, 21 nt, Human
gcugcuucucccaggcaaggc

SEQ ID NO: 3577021 - RNA, 23 nt, Human
gcugcuucucccaggcaaggcug

SEQ ID NO: 3577022 - RNA, 21 nt, Human
gcugcuucuuaaccccaguaa

SEQ ID NO: 3577023 - RNA, 16 nt, Human
gcugcuugggcuucau

SEQ ID NO: 3577024 - RNA, 22 nt, Human
gcugcuugggcuucauccuccu

SEQ ID NO: 3577025 - RNA, 18 nt, Human
gcugcuuuccccuguggg

SEQ ID NO: 3577026 - RNA, 19 nt, Human
gcugcuuuguuaccuuaaa

SEQ ID NO: 3577027 - RNA, 22 nt, Human
gcugcuuuguuaccuuaaaacu

SEQ ID NO: 3577028 - RNA, 19 nt, Human
gcugcuuuuauaucuguau

SEQ ID NO: 3577029 - RNA, 22 nt, Human
gcugcuuuucccuaagccaagg

SEQ ID NO: 3577030 - RNA, 19 nt, Human
gcugcuuuucuuuucuaac

SEQ ID NO: 3577031 - RNA, 19 nt, Human
gcugcuuuuugagguggca

SEQ ID NO: 3577032 - RNA, 14 nt, Human
gcugcuuuuuuuga

SEQ ID NO: 3577033 - RNA, 15 nt, Human
gcuggaaaagggucu

SEQ ID NO: 3577034 - RNA, 22 nt, Human
gcuggaaaagggucuugggaaa

SEQ ID NO: 3577035 - RNA, 21 nt, Human
gcuggaacagauucacacugu

SEQ ID NO: 3577036 - RNA, 21 nt, Human
gcuggaagacgcaagggccug

SEQ ID NO: 3577037 - RNA, 23 nt, Human
gcuggaagacgcaagggccugau

SEQ ID NO: 3577038 - RNA, 18 nt, Human
gcuggaagauagcuguga

SEQ ID NO: 3577039 - RNA, 17 nt, Human
gcuggaagauccugcgg

SEQ ID NO: 3577040 - RNA, 14 nt, Human
gcuggacagagggg

SEQ ID NO: 3577041 - RNA, 21 nt, Human
gcuggacagaggggacucugg

SEQ ID NO: 3577042 - RNA, 12 nt, Human
gcuggacccagc

SEQ ID NO: 3577043 - RNA, 14 nt, Human
gcuggacccugacc

SEQ ID NO: 3577044 - RNA, 15 nt, Human
gcuggacccugacca

SEQ ID NO: 3577045 - RNA, 16 nt, Human
gcuggacggcauuccu

SEQ ID NO: 3577046 - RNA, 21 nt, Human
gcuggacuccagaucugcacc

SEQ ID NO: 3577047 - RNA, 16 nt, Human
gcuggacucugcaucc

SEQ ID NO: 3577048 - RNA, 14 nt, Human
gcuggacugaggcc

SEQ ID NO: 3577049 - RNA, 23 nt, Human
gcuggacuggaggccccuggagc

SEQ ID NO: 3577050 - RNA, 12 nt, Human
gcuggacuggcu

SEQ ID NO: 3577051 - RNA, 14 nt, Human
gcuggacuggcugu

SEQ ID NO: 3577052 - RNA, 21 nt, Human
gcuggacuucuaccugcccuc

SEQ ID NO: 3577053 - RNA, 12 nt, Human
gcuggagaagag

SEQ ID NO: 3577054 - RNA, 16 nt, Human
gcuggagaagcucacc

SEQ ID NO: 3577055 - RNA, 16 nt, Human
gcuggagaggagcccu

SEQ ID NO: 3577056 - RNA, 21 nt, Human
gcuggagaggagcccugccuc

SEQ ID NO: 3577057 - RNA, 22 nt, Human
gcuggagauacuuggucacagc

SEQ ID NO: 3577058 - RNA, 15 nt, Human
gcuggagauguuuua

SEQ ID NO: 3577059 - RNA, 14 nt, Human
gcuggagcacuggg

SEQ ID NO: 3577060 - RNA, 15 nt, Human
gcuggagcacugggc

SEQ ID NO: 3577061 - RNA, 16 nt, Human
gcuggagcacugggcu

SEQ ID NO: 3577062 - RNA, 18 nt, Human
gcuggagcacugggcucc

SEQ ID NO: 3577063 - RNA, 21 nt, Human
gcuggagccuagaacaggccu

SEQ ID NO: 3577064 - RNA, 13 nt, Human
gcuggagccugag

SEQ ID NO: 3577065 - RNA, 19 nt, Human
gcuggagccugagucaggg

SEQ ID NO: 3577066 - RNA, 21 nt, Human
gcuggagccuguguaacagcu

SEQ ID NO: 3577067 - RNA, 21 nt, Human
gcuggaggacuagaaccugga

SEQ ID NO: 3577068 - RNA, 16 nt, Human
gcuggaggagcccagg

SEQ ID NO: 3577069 - RNA, 22 nt, Human
gcuggaggagcccaggccagga

SEQ ID NO: 3577070 - RNA, 17 nt, Human
gcuggaggaugugggca

SEQ ID NO: 3577071 - RNA, 19 nt, Human
gcuggaggaugugggcagc

SEQ ID NO: 3577072 - RNA, 22 nt, Human
gcuggaggcaggggcuuccugg

SEQ ID NO: 3577073 - RNA, 23 nt, Human
gcuggaggcaggggcuuccuggu

SEQ ID NO: 3577074 - RNA, 16 nt, Human
gcuggaggcccaggcu

SEQ ID NO: 3577075 - RNA, 16 nt, Human
gcuggagguggggccu

SEQ ID NO: 3577076 - RNA, 23 nt, Human
gcuggagguggggcgaggcaggc

SEQ ID NO: 3577077 - RNA, 12 nt, Human
gcuggagugagg

SEQ ID NO: 3577078 - RNA, 15 nt, Human
gcuggagugcaguga

SEQ ID NO: 3577079 - RNA, 15 nt, Human
gcuggagugugaggg

SEQ ID NO: 3577080 - RNA, 15 nt, Human
gcuggaguugucacu

SEQ ID NO: 3577081 - RNA, 16 nt, Human
gcuggaguuucaugua

SEQ ID NO: 3577082 - RNA, 16 nt, Human
gcuggauauuuuacua

SEQ ID NO: 3577083 - RNA, 19 nt, Human
gcuggaucacagcugcuuu

SEQ ID NO: 3577084 - RNA, 13 nt, Human
gcuggaucuguga

SEQ ID NO: 3577085 - RNA, 20 nt, Human
gcuggaugagaauuugagug

SEQ ID NO: 3577086 - RNA, 14 nt, Human
gcuggaugagcucc

SEQ ID NO: 3577087 - RNA, 15 nt, Human
gcuggaugagcuccc

SEQ ID NO: 3577088 - RNA, 22 nt, Human
gcuggaugucugccaauuuuug

SEQ ID NO: 3577089 - RNA, 22 nt, Human
gcuggauuggguuaugaauauu

SEQ ID NO: 3577090 - RNA, 21 nt, Human
gcuggcaacacagaggcagcc

SEQ ID NO: 3577091 - RNA, 23 nt, Human
gcuggcacauuuccccagaccug

SEQ ID NO: 3577092 - RNA, 21 nt, Human
gcuggcacccaccguggagga

SEQ ID NO: 3577093 - RNA, 23 nt, Human
gcuggcacccaccguggaggagg

SEQ ID NO: 3577094 - RNA, 23 nt, Human
gcuggcagcucuccagucaggag

SEQ ID NO: 3577095 - RNA, 18 nt, Human
gcuggccagccccacagc

SEQ ID NO: 3577096 - RNA, 21 nt, Human
gcuggccagccccacagccca

SEQ ID NO: 3577097 - RNA, 14 nt, Human
gcuggccagccgcu

SEQ ID NO: 3577098 - RNA, 12 nt, Human
gcuggccagccu

SEQ ID NO: 3577099 - RNA, 14 nt, Human
gcuggccagccugg

SEQ ID NO: 3577100 - RNA, 16 nt, Human
gcuggccagccugggg

SEQ ID NO: 3577101 - RNA, 23 nt, Human
gcuggccagccuggggccuggca

SEQ ID NO: 3577102 - RNA, 15 nt, Human
gcuggccaguccagg

SEQ ID NO: 3577103 - RNA, 16 nt, Human
gcuggccaguccaggc

SEQ ID NO: 3577104 - RNA, 23 nt, Human
gcuggccaucugguuaggauggc

SEQ ID NO: 3577105 - RNA, 20 nt, Human
gcuggccauggagaaagcug

SEQ ID NO: 3577106 - RNA, 16 nt, Human
ggacuggccccugggu

SEQ ID NO: 3577107 - RNA, 23 nt, Human
ggacugggagcccccagccuguc

SEQ ID NO: 3577108 - RNA, 11 nt, Human
ggacugggagg

SEQ ID NO: 3577109 - RNA, 23 nt, Human
ggacugggccacuucuggguggg

SEQ ID NO: 3577110 - RNA, 17 nt, Human
ggacuggggauguggga

SEQ ID NO: 3577111 - RNA, 20 nt, Human
ggacuggguugcguccugac

SEQ ID NO: 3577112 - RNA, 21 nt, Human
ggacuggguuuggaccccagc

SEQ ID NO: 3577113 - RNA, 14 nt, Human
ggacuggugcccuc

SEQ ID NO: 3577114 - RNA, 22 nt, Human
ggacuguacacacuuuauuuac

SEQ ID NO: 3577115 - RNA, 15 nt, Human
ggacuguauuuguga

SEQ ID NO: 3577116 - RNA, 15 nt, Human
ggacugucauagaaa

SEQ ID NO: 3577117 - RNA, 19 nt, Human
ggacugugacaggcagcag

SEQ ID NO: 3577118 - RNA, 15 nt, Human
ggacugugugcucag

SEQ ID NO: 3577119 - RNA, 20 nt, Human
ggacuguuuuuuccugagcu

SEQ ID NO: 3577120 - RNA, 15 nt, Human
ggacuuaacggcucc

SEQ ID NO: 3577121 - RNA, 22 nt, Human
ggacuuagaaaaccagcucagc

SEQ ID NO: 3577122 - RNA, 12 nt, Human
ggacuuaggaag

SEQ ID NO: 3577123 - RNA, 11 nt, Human
ggacuuccugu

SEQ ID NO: 3577124 - RNA, 18 nt, Human
ggacuuccuguccagcuc

SEQ ID NO: 3577125 - RNA, 15 nt, Human
ggacuuccuugcucu

SEQ ID NO: 3577126 - RNA, 17 nt, Human
ggacuucuaccugcccu

SEQ ID NO: 3577127 - RNA, 22 nt, Human
ggacuucugggguaaguggucu

SEQ ID NO: 3577128 - RNA, 11 nt, Human
ggacuucuuuu

SEQ ID NO: 3577129 - RNA, 17 nt, Human
ggacuucuuuucacauu

SEQ ID NO: 3577130 - RNA, 23 nt, Human
ggacuugaaagcauccaugugug

SEQ ID NO: 3577131 - RNA, 12 nt, Human
ggacuugaaguu

SEQ ID NO: 3577132 - RNA, 15 nt, Human
ggacuuggccucucu

SEQ ID NO: 3577133 - RNA, 17 nt, Human
ggacuuggccucucucu

SEQ ID NO: 3577134 - RNA, 12 nt, Human
ggacuugugucu

SEQ ID NO: 3577135 - RNA, 16 nt, Human
ggacuugugucucugu

SEQ ID NO: 3577136 - RNA, 20 nt, Human
ggacuuuccuaaauguuuaa

SEQ ID NO: 3577137 - RNA, 17 nt, Human
ggacuuucucuaauaau

SEQ ID NO: 3577138 - RNA, 23 nt, Human
ggacuuucuuuucgccguggcug

SEQ ID NO: 3577139 - RNA, 16 nt, Human
ggacuuugcagccggc

SEQ ID NO: 3577140 - RNA, 9 nt, Human
ggacuuugu

SEQ ID NO: 3577141 - RNA, 20 nt, Human
ggacuuuguauacuuuaaau

SEQ ID NO: 3577142 - RNA, 20 nt, Human
ggagaaaaaaagcauguguc

SEQ ID NO: 3577143 - RNA, 12 nt, Human
ggagaaaaacaa

SEQ ID NO: 3577144 - RNA, 22 nt, Human
ggagaaaaggaaaagaaaaaaa

SEQ ID NO: 3577145 - RNA, 18 nt, Human
ggagaaaaucaucaagaa

SEQ ID NO: 3577146 - RNA, 14 nt, Human
ggagaaacagagac

SEQ ID NO: 3577147 - RNA, 24 nt, Human
ggagaaagcuugguucugugaaca

SEQ ID NO: 3577148 - RNA, 16 nt, Human
ggagaaaggaagggcu

SEQ ID NO: 3577149 - RNA, 11 nt, Human
ggagaaaguac

SEQ ID NO: 3577150 - RNA, 22 nt, Human
ggagaaaucuggcuucuggcca

SEQ ID NO: 3577151 - RNA, 20 nt, Human
ggagaaaugcauccauuccu

SEQ ID NO: 3577152 - RNA, 23 nt, Human
ggagaacaucuuugacacucugc

SEQ ID NO: 3577153 - RNA, 23 nt, Human
ggagaacaugaaucaaaagugcc

SEQ ID NO: 3577154 - RNA, 17 nt, Human
ggagaaccuugugccug

SEQ ID NO: 3577155 - RNA, 22 nt, Human
ggagaacuagaaccuggagggc

SEQ ID NO: 3577156 - RNA, 11 nt, Human
ggagaagaacu

SEQ ID NO: 3577157 - RNA, 14 nt, Human
ggagaagaacugaa

SEQ ID NO: 3577158 - RNA, 22 nt, Human
ggagaagaauuuucagacccca

SEQ ID NO: 3577159 - RNA, 22 nt, Human
ggagaagagaggagaggagaga

SEQ ID NO: 3577160 - RNA, 13 nt, Human
ggagaagccagga

SEQ ID NO: 3577161 - RNA, 18 nt, Human
ggagaagcggcuggcagc

SEQ ID NO: 3577162 - RNA, 14 nt, Human
ggagaagcugcagg

SEQ ID NO: 3577163 - RNA, 22 nt, Human
ggagaaggaaggagacucaccu

SEQ ID NO: 3577164 - RNA, 20 nt, Human
ggagaaggaucuagaaugug

SEQ ID NO: 3577165 - RNA, 17 nt, Human
ggagaagggaaguugaa

SEQ ID NO: 3577166 - RNA, 21 nt, Human
ggagaagggauggaggucaca

SEQ ID NO: 3577167 - RNA, 21 nt, Human
ggagaagucuuucaagaauga

SEQ ID NO: 3577168 - RNA, 18 nt, Human
ggagaagugacauugcau

SEQ ID NO: 3577169 - RNA, 18 nt, Human
ggagaaucacaggcuggg

SEQ ID NO: 3577170 - RNA, 19 nt, Human
ggagaaucacaggcugggc

SEQ ID NO: 3577171 - RNA, 19 nt, Human
ggagaaucacuugaacccg

SEQ ID NO: 3577172 - RNA, 22 nt, Human
ggagaaucaucaggacccugga

SEQ ID NO: 3577173 - RNA, 19 nt, Human
ggagaaucaugugaacccg

SEQ ID NO: 3577174 - RNA, 20 nt, Human
ggagaaucauguuucuuuga

SEQ ID NO: 3577175 - RNA, 19 nt, Human
ggagaaucgcuccugcagc

SEQ ID NO: 3577176 - RNA, 22 nt, Human
ggagaauggugugaacccggga

SEQ ID NO: 3577177 - RNA, 15 nt, Human
ggagacaagaaaucc

SEQ ID NO: 3577178 - RNA, 19 nt, Human
ggagacaaugcagaugcca

SEQ ID NO: 3577179 - RNA, 9 nt, Human
ggagacaga

SEQ ID NO: 3577180 - RNA, 18 nt, Human
ggagacagcaucaggguu

SEQ ID NO: 3577181 - RNA, 17 nt, Human
ggagacagccccagagc

SEQ ID NO: 3577182 - RNA, 22 nt, Human
ggagacauaaccacugcuucca

SEQ ID NO: 3577183 - RNA, 15 nt, Human
ggagacaugugacau

SEQ ID NO: 3577184 - RNA, 20 nt, Human
ggagacauuccugggcacag

SEQ ID NO: 3577185 - RNA, 13 nt, Human
ggagacccugcaa

SEQ ID NO: 3577186 - RNA, 20 nt, Human
ggagaccgggguauccuggg

SEQ ID NO: 3577187 - RNA, 17 nt, Human
ggagaccucagaaguaa

SEQ ID NO: 3577188 - RNA, 19 nt, Human
ggagacgguuuccagggag

SEQ ID NO: 3577189 - RNA, 22 nt, Human
ggagacguacguaucagcggcc

SEQ ID NO: 3577190 - RNA, 14 nt, Human
ggagacuagauugc

SEQ ID NO: 3577191 - RNA, 22 nt, Human
ggagacuagauuuaugaauaca

SEQ ID NO: 3577192 - RNA, 18 nt, Human
ggagacucaccucugccu

SEQ ID NO: 3577193 - RNA, 21 nt, Human
ggagacugcuccugagccccc

SEQ ID NO: 3577194 - RNA, 19 nt, Human
ggagacugcuucccauccu

SEQ ID NO: 3577195 - RNA, 23 nt, Human
ggagacugcuucccauccuaccc

SEQ ID NO: 3577196 - RNA, 17 nt, Human
ggagacugggcugaggg

SEQ ID NO: 3577197 - RNA, 20 nt, Human
ggagacugggcugagggagc

SEQ ID NO: 3577198 - RNA, 23 nt, Human
ggagacugggcugagggagccug

SEQ ID NO: 3577199 - RNA, 19 nt, Human
ggagacugugugugcccuc

SEQ ID NO: 3577200 - RNA, 21 nt, Human
ggagacugugugugcccucug

SEQ ID NO: 3577201 - RNA, 12 nt, Human
ggagagaaaaaa

SEQ ID NO: 3577202 - RNA, 14 nt, Human
ggagagaaaauaua

SEQ ID NO: 3577203 - RNA, 16 nt, Human
ggagagaaagugggug

SEQ ID NO: 3577204 - RNA, 18 nt, Human
ggagagaaggggaggagg

SEQ ID NO: 3577205 - RNA, 21 nt, Human
ggagagaaggggaggagggcg

SEQ ID NO: 3577206 - RNA, 14 nt, Human
ggagagacacagcg

SEQ ID NO: 3577207 - RNA, 12 nt, Human
ggagagacagcu

SEQ ID NO: 3577208 - RNA, 11 nt, Human
ggagagaccuc

SEQ ID NO: 3577209 - RNA, 17 nt, Human
ggagagacucccaugaa

SEQ ID NO: 3577210 - RNA, 18 nt, Human
ggagagacucccaugaag

SEQ ID NO: 3577211 - RNA, 21 nt, Human
ggagagacucccaugaagccu

SEQ ID NO: 3577212 - RNA, 22 nt, Human
ggagagacucccaugaagccuu

SEQ ID NO: 3577213 - RNA, 12 nt, Human
ggagagacuugu

SEQ ID NO: 3577214 - RNA, 14 nt, Human
ggagagagaaagcc

SEQ ID NO: 3577215 - RNA, 22 nt, Human
ggagagagcagcuucugccacu

SEQ ID NO: 3577216 - RNA, 16 nt, Human
ggagagaggcagagag

SEQ ID NO: 3577217 - RNA, 20 nt, Human
ggagagaguugaaccuaaac

SEQ ID NO: 3577218 - RNA, 13 nt, Human
ggagagcaggcug

SEQ ID NO: 3577219 - RNA, 16 nt, Human
ggagagcaggcuggca

SEQ ID NO: 3577220 - RNA, 18 nt, Human
ggagagcaucggccuagg

SEQ ID NO: 3577221 - RNA, 13 nt, Human
ggagagccagaga

SEQ ID NO: 3577222 - RNA, 15 nt, Human
ggagagccagagaag

SEQ ID NO: 3577223 - RNA, 16 nt, Human
ggagagccagagaagu

SEQ ID NO: 3577224 - RNA, 21 nt, Human
ggagagccagagaagugacag

SEQ ID NO: 3577225 - RNA, 21 nt, Human
ggagagccagcccucccuguc

SEQ ID NO: 3577226 - RNA, 21 nt, Human
ggagagccagcuaaggggugg

SEQ ID NO: 3577227 - RNA, 11 nt, Human
ggagagcccag

SEQ ID NO: 3577228 - RNA, 12 nt, Human
ggagagcccagc

SEQ ID NO: 3577229 - RNA, 13 nt, Human
ggagagcccagga

SEQ ID NO: 3577230 - RNA, 20 nt, Human
ggagagcccaggagcucccc

SEQ ID NO: 3577231 - RNA, 17 nt, Human
ggagagccuuccagggg

SEQ ID NO: 3577232 - RNA, 18 nt, Human
ggagagccuuccaggggu

SEQ ID NO: 3577233 - RNA, 16 nt, Human
ggagagcgccugcccc

SEQ ID NO: 3577234 - RNA, 22 nt, Human
ggagagcuagaacccggcaggc

SEQ ID NO: 3577235 - RNA, 19 nt, Human
ggagagcuagaaccuggag

SEQ ID NO: 3577236 - RNA, 20 nt, Human
ggagagcuagaaccuggaga

SEQ ID NO: 3577237 - RNA, 15 nt, Human
ggagagcuaggagca

SEQ ID NO: 3577238 - RNA, 17 nt, Human
ggagagcuggagccugg

SEQ ID NO: 3577239 - RNA, 12 nt, Human
ggagaggaaaga

SEQ ID NO: 3577240 - RNA, 15 nt, Human
ggagaggaagagaca

SEQ ID NO: 3577241 - RNA, 12 nt, Human
ggagaggagagc

SEQ ID NO: 3577242 - RNA, 13 nt, Human
ggagaggagagcc

SEQ ID NO: 3577243 - RNA, 16 nt, Human
ggagaggagcccugcc

SEQ ID NO: 3577244 - RNA, 16 nt, Human
ggagaggcagagugcc

SEQ ID NO: 3577245 - RNA, 13 nt, Human
ggagaggccauga

SEQ ID NO: 3577246 - RNA, 23 nt, Human
ggagagggaaacgugcccucugu

SEQ ID NO: 3577247 - RNA, 14 nt, Human
ggagagggaugagg

SEQ ID NO: 3577248 - RNA, 15 nt, Human
ggagaggggcacagg

SEQ ID NO: 3577249 - RNA, 18 nt, Human
ggagagggggcugguggg

SEQ ID NO: 3577250 - RNA, 19 nt, Human
ggagcggccgccugcgggc

SEQ ID NO: 3577251 - RNA, 20 nt, Human
ggagcggccggccagccccu

SEQ ID NO: 3577252 - RNA, 18 nt, Human
ggagcgggucugcuccca

SEQ ID NO: 3577253 - RNA, 17 nt, Human
ggagcuaacacuggccc

SEQ ID NO: 3577254 - RNA, 18 nt, Human
ggagcuaacacuggcccc

SEQ ID NO: 3577255 - RNA, 12 nt, Human
ggagcuaaggcu

SEQ ID NO: 3577256 - RNA, 19 nt, Human
ggagcuaccuguguggaca

SEQ ID NO: 3577257 - RNA, 23 nt, Human
ggagcuaccuguguggacaggac

SEQ ID NO: 3577258 - RNA, 14 nt, Human
ggagcucagagagg

SEQ ID NO: 3577259 - RNA, 19 nt, Human
ggagcuccucuccuggagg

SEQ ID NO: 3577260 - RNA, 21 nt, Human
ggagcuccucuccuggaggau

SEQ ID NO: 3577261 - RNA, 12 nt, Human
ggagcuccuggg

SEQ ID NO: 3577262 - RNA, 20 nt, Human
ggagcucuucaggccucccu

SEQ ID NO: 3577263 - RNA, 12 nt, Human
ggagcugagaau

SEQ ID NO: 3577264 - RNA, 20 nt, Human
ggagcugagaauagaaggaa

SEQ ID NO: 3577265 - RNA, 15 nt, Human
ggagcugccccucuc

SEQ ID NO: 3577266 - RNA, 13 nt, Human
ggagcugccugga

SEQ ID NO: 3577267 - RNA, 15 nt, Human
ggagcugccuggacc

SEQ ID NO: 3577268 - RNA, 22 nt, Human
ggagcugccuguucagcuccag

SEQ ID NO: 3577269 - RNA, 18 nt, Human
ggagcugccuuggcucag

SEQ ID NO: 3577270 - RNA, 21 nt, Human
ggagcugccuuggcucagaca

SEQ ID NO: 3577271 - RNA, 24 nt, Human
ggagcugcucacuaccuccucagg

SEQ ID NO: 3577272 - RNA, 12 nt, Human
ggagcuggcccc

SEQ ID NO: 3577273 - RNA, 20 nt, Human
ggagcuggcuccagccugga

SEQ ID NO: 3577274 - RNA, 13 nt, Human
ggagcugggccug

SEQ ID NO: 3577275 - RNA, 18 nt, Human
ggagcuguaaaccagaga

SEQ ID NO: 3577276 - RNA, 18 nt, Human
ggagcugucaccaaggaa

SEQ ID NO: 3577277 - RNA, 19 nt, Human
ggagcugucaccaaggaaa

SEQ ID NO: 3577278 - RNA, 17 nt, Human
ggagcuuaagccacugc

SEQ ID NO: 3577279 - RNA, 15 nt, Human
ggagcuuaccuccca

SEQ ID NO: 3577280 - RNA, 18 nt, Human
ggagcuuaccucccaccu

SEQ ID NO: 3577281 - RNA, 17 nt, Human
ggagcuucucuuuaacu

SEQ ID NO: 3577282 - RNA, 23 nt, Human
ggagcuucugggguccccagggc

SEQ ID NO: 3577283 - RNA, 16 nt, Human
ggagcuuugacucagg

SEQ ID NO: 3577284 - RNA, 22 nt, Human
ggaggaaaaccaagccguggcu

SEQ ID NO: 3577285 - RNA, 13 nt, Human
ggaggaaagacaa

SEQ ID NO: 3577286 - RNA, 18 nt, Human
ggaggaacacugcacucu

SEQ ID NO: 3577287 - RNA, 22 nt, Human
ggaggaacagggaagggggagc

SEQ ID NO: 3577288 - RNA, 20 nt, Human
ggaggaaccgaaaggccaaa

SEQ ID NO: 3577289 - RNA, 20 nt, Human
ggaggaaccgagggggcugc

SEQ ID NO: 3577290 - RNA, 11 nt, Human
ggaggaagcag

SEQ ID NO: 3577291 - RNA, 12 nt, Human
ggaggaagcaga

SEQ ID NO: 3577292 - RNA, 20 nt, Human
ggaggaagcagaauaaagca

SEQ ID NO: 3577293 - RNA, 19 nt, Human
ggaggaagcagguugaggg

SEQ ID NO: 3577294 - RNA, 18 nt, Human
ggaggaaggaggacccag

SEQ ID NO: 3577295 - RNA, 21 nt, Human
ggaggaaggcuuacacccaca

SEQ ID NO: 3577296 - RNA, 20 nt, Human
ggaggaaucgaggaaccaga

SEQ ID NO: 3577297 - RNA, 22 nt, Human
ggaggaaucgaggaaccagagc

SEQ ID NO: 3577298 - RNA, 15 nt, Human
ggaggaaugcucccc

SEQ ID NO: 3577299 - RNA, 17 nt, Human
ggaggaccacaggugug

SEQ ID NO: 3577300 - RNA, 20 nt, Human
ggaggaccacaggugugagc

SEQ ID NO: 3577301 - RNA, 12 nt, Human
ggaggaccaggg

SEQ ID NO: 3577302 - RNA, 13 nt, Human
ggaggacccagga

SEQ ID NO: 3577303 - RNA, 14 nt, Human
ggaggacccaggac

SEQ ID NO: 3577304 - RNA, 15 nt, Human
ggaggaccucugggc

SEQ ID NO: 3577305 - RNA, 19 nt, Human
ggaggacuagaaccuggag

SEQ ID NO: 3577306 - RNA, 22 nt, Human
ggaggacuagaaccuggagggc

SEQ ID NO: 3577307 - RNA, 21 nt, Human
ggaggacugccccgugcagac

SEQ ID NO: 3577308 - RNA, 13 nt, Human
ggaggagaaugag

SEQ ID NO: 3577309 - RNA, 22 nt, Human
ggaggagagacacuggugggga

SEQ ID NO: 3577310 - RNA, 15 nt, Human
ggaggagagccuggu

SEQ ID NO: 3577311 - RNA, 15 nt, Human
ggaggagcuucuggg

SEQ ID NO: 3577312 - RNA, 17 nt, Human
ggaggagcuugggggau

SEQ ID NO: 3577313 - RNA, 22 nt, Human
ggaggagcuuuguuuugggggu

SEQ ID NO: 3577314 - RNA, 15 nt, Human
ggaggaggaaauccc

SEQ ID NO: 3577315 - RNA, 15 nt, Human
ggaggaggaaggcaa

SEQ ID NO: 3577316 - RNA, 14 nt, Human
ggaggaggaggcaa

SEQ ID NO: 3577317 - RNA, 12 nt, Human
ggaggaggaggg

SEQ ID NO: 3577318 - RNA, 13 nt, Human
ggaggaggagggu

SEQ ID NO: 3577319 - RNA, 14 nt, Human
ggaggaggccaccu

SEQ ID NO: 3577320 - RNA, 15 nt, Human
ggaggaggccaccuc

SEQ ID NO: 3577321 - RNA, 19 nt, Human
ggaggaggccaccucucca

SEQ ID NO: 3577322 - RNA, 13 nt, Human
ggaggagggagag

SEQ ID NO: 3577323 - RNA, 15 nt, Human
ggaggaggguugugc

SEQ ID NO: 3577324 - RNA, 20 nt, Human
ggaggaucacuggagcccag

SEQ ID NO: 3577325 - RNA, 13 nt, Human
ggaggaugggcuc

SEQ ID NO: 3577326 - RNA, 16 nt, Human
ggaggaugugggcagc

SEQ ID NO: 3577327 - RNA, 15 nt, Human
ggaggauguucuggg

SEQ ID NO: 3577328 - RNA, 21 nt, Human
ggaggauguucugggacacag

SEQ ID NO: 3577329 - RNA, 17 nt, Human
ggaggauucuaugaggc

SEQ ID NO: 3577330 - RNA, 22 nt, Human
ggaggauugcuugagcccagga

SEQ ID NO: 3577331 - RNA, 14 nt, Human
ggaggcagagaaga

SEQ ID NO: 3577332 - RNA, 20 nt, Human
ggaggcagagguugcaguga

SEQ ID NO: 3577333 - RNA, 21 nt, Human
ggaggcagaguuugccuuccu

SEQ ID NO: 3577334 - RNA, 17 nt, Human
ggaggcagccagggcuu

SEQ ID NO: 3577335 - RNA, 13 nt, Human
ggaggcagccgcc

SEQ ID NO: 3577336 - RNA, 13 nt, Human
ggaggcagggccu

SEQ ID NO: 3577337 - RNA, 21 nt, Human
ggaggcagggccuugcccaga

SEQ ID NO: 3577338 - RNA, 16 nt, Human
ggaggcaucagugucc

SEQ ID NO: 3577339 - RNA, 11 nt, Human
ggaggccaaga

SEQ ID NO: 3577340 - RNA, 22 nt, Human
ggaggccaagaguggccccacc

SEQ ID NO: 3577341 - RNA, 18 nt, Human
ggaggccaaggugggagg

SEQ ID NO: 3577342 - RNA, 20 nt, Human
ggaggccaaggugggaggau

SEQ ID NO: 3577343 - RNA, 20 nt, Human
ggaggccaagugcaggcugg

SEQ ID NO: 3577344 - RNA, 18 nt, Human
ggaggccaccucuccaag

SEQ ID NO: 3577345 - RNA, 11 nt, Human
ggaggccagcc

SEQ ID NO: 3577346 - RNA, 14 nt, Human
ggaggccaggccgg

SEQ ID NO: 3577347 - RNA, 16 nt, Human
ggaggcccaggcuggg

SEQ ID NO: 3577348 - RNA, 20 nt, Human
ggaggcccaggcugggaacu

SEQ ID NO: 3577349 - RNA, 15 nt, Human
ggaggccccaaagga

SEQ ID NO: 3577350 - RNA, 14 nt, Human
ggaggccccacuga

SEQ ID NO: 3577351 - RNA, 18 nt, Human
ggaggccccacugaugcu

SEQ ID NO: 3577352 - RNA, 15 nt, Human
ggaggccccaggggg

SEQ ID NO: 3577353 - RNA, 22 nt, Human
ggaggccccuggcccagcggcc

SEQ ID NO: 3577354 - RNA, 23 nt, Human
ggaggccccuggcccagcggccc

SEQ ID NO: 3577355 - RNA, 23 nt, Human
ggaggcccugugccccuugacaa

SEQ ID NO: 3577356 - RNA, 12 nt, Human
ggaggccgaagc

SEQ ID NO: 3577357 - RNA, 20 nt, Human
ggaggccuaggaggguccuc

SEQ ID NO: 3577358 - RNA, 15 nt, Human
ggaggccucugggcc

SEQ ID NO: 3577359 - RNA, 22 nt, Human
ggaggcgcacuuuccuccuggc

SEQ ID NO: 3577360 - RNA, 20 nt, Human
ggaggcgggggcugcccuug

SEQ ID NO: 3577361 - RNA, 20 nt, Human
ggaggcuaaagcccagagac

SEQ ID NO: 3577362 - RNA, 16 nt, Human
ggaggcuccaggcagc

SEQ ID NO: 3577363 - RNA, 20 nt, Human
ggaggcucccgaggggaagg

SEQ ID NO: 3577364 - RNA, 17 nt, Human
ggaggcugacuccuggu

SEQ ID NO: 3577365 - RNA, 15 nt, Human
ggaggcugagacagg

SEQ ID NO: 3577366 - RNA, 15 nt, Human
ggaggcugagauggg

SEQ ID NO: 3577367 - RNA, 19 nt, Human
ggaggcugagaugggagaa

SEQ ID NO: 3577368 - RNA, 16 nt, Human
ggaggcugaggcagaa

SEQ ID NO: 3577369 - RNA, 15 nt, Human
ggaggcugaggcagg

SEQ ID NO: 3577370 - RNA, 19 nt, Human
ggaggcugaggcaggagga

SEQ ID NO: 3577371 - RNA, 13 nt, Human
ggaggcugccccc

SEQ ID NO: 3577372 - RNA, 17 nt, Human
ggaggcugcccccggcc

SEQ ID NO: 3577373 - RNA, 16 nt, Human
ggaggcugccucccaa

SEQ ID NO: 3577374 - RNA, 10 nt, Human
ggaggcugcg

SEQ ID NO: 3577375 - RNA, 18 nt, Human
ggaggcugcugcugcucu

SEQ ID NO: 3577376 - RNA, 16 nt, Human
ggaggcuugggaccgc

SEQ ID NO: 3577377 - RNA, 16 nt, Human
ggaggcuugucagagc

SEQ ID NO: 3577378 - RNA, 18 nt, Human
ggaggcuugucagagcug

SEQ ID NO: 3577379 - RNA, 19 nt, Human
ggaggcuugucagagcugg

SEQ ID NO: 3577380 - RNA, 19 nt, Human
ggagggaagaguggaggug

SEQ ID NO: 3577381 - RNA, 17 nt, Human
ggagggacaaaggagcc

SEQ ID NO: 3577382 - RNA, 18 nt, Human
ggagggacaaaggagccu

SEQ ID NO: 3577383 - RNA, 22 nt, Human
ggagggacaaaggagccuguga

SEQ ID NO: 3577384 - RNA, 13 nt, Human
ggagggacagucu

SEQ ID NO: 3577385 - RNA, 23 nt, Human
ggagggagaagaaagaaagaagu

SEQ ID NO: 3577386 - RNA, 22 nt, Human
ggagggagagucucccagggag

SEQ ID NO: 3577387 - RNA, 11 nt, Human
ggagggaggcc

SEQ ID NO: 3577388 - RNA, 13 nt, Human
ggagggaggcccc

SEQ ID NO: 3577389 - RNA, 12 nt, Human
ggagggagggcu

SEQ ID NO: 3577390 - RNA, 17 nt, Human
ggagggagggcuccaga

SEQ ID NO: 3577391 - RNA, 21 nt, Human
ggagggcaagggguucccuug

SEQ ID NO: 3577392 - RNA, 10 nt, Human
ggagggcaga

SEQ ID NO: 3577393 - RNA, 16 nt, Human
ggagggcagagcuggu

SEQ ID NO: 3577394 - RNA, 17 nt, Human
ggagggcagagcuggug

SEQ ID NO: 3577395 - RNA, 12 nt, Human
ggauaacaccac

SEQ ID NO: 3577396 - RNA, 21 nt, Human
ggauaagguaccuuucacaua

SEQ ID NO: 3577397 - RNA, 22 nt, Human
ggauacaaccucccucuuguuu

SEQ ID NO: 3577398 - RNA, 21 nt, Human
ggauacgcaucagacagaugg

SEQ ID NO: 3577399 - RNA, 15 nt, Human
ggauacgugucaaug

SEQ ID NO: 3577400 - RNA, 18 nt, Human
ggauacucugucagaugg

SEQ ID NO: 3577401 - RNA, 15 nt, Human
ggauacugcagggcc

SEQ ID NO: 3577402 - RNA, 15 nt, Human
ggauacuggcaaagc

SEQ ID NO: 3577403 - RNA, 18 nt, Human
ggauacuggcacagaggu

SEQ ID NO: 3577404 - RNA, 17 nt, Human
ggauagauaacucuuug

SEQ ID NO: 3577405 - RNA, 13 nt, Human
ggauagaugcugg

SEQ ID NO: 3577406 - RNA, 19 nt, Human
ggauagaugcuggcccagg

SEQ ID NO: 3577407 - RNA, 13 nt, Human
ggauagaugugug

SEQ ID NO: 3577408 - RNA, 20 nt, Human
ggauauaguuuuacuuuuaa

SEQ ID NO: 3577409 - RNA, 22 nt, Human
ggauauccuuaucagagcuaag

SEQ ID NO: 3577410 - RNA, 15 nt, Human
ggauaugaaaaauga

SEQ ID NO: 3577411 - RNA, 13 nt, Human
ggauaugaccagu

SEQ ID NO: 3577412 - RNA, 16 nt, Human
ggauaugcuuaguaau

SEQ ID NO: 3577413 - RNA, 18 nt, Human
ggauauugaauguuaaag

SEQ ID NO: 3577414 - RNA, 11 nt, Human
ggauauuuaag

SEQ ID NO: 3577415 - RNA, 18 nt, Human
ggaucaaguauuacuaaa

SEQ ID NO: 3577416 - RNA, 13 nt, Human
ggaucacagggcc

SEQ ID NO: 3577417 - RNA, 19 nt, Human
ggaucacgacgcugcagag

SEQ ID NO: 3577418 - RNA, 14 nt, Human
ggaucacuggagcc

SEQ ID NO: 3577419 - RNA, 22 nt, Human
ggaucagaaagaguucaguaag

SEQ ID NO: 3577420 - RNA, 12 nt, Human
ggaucagaaagu

SEQ ID NO: 3577421 - RNA, 14 nt, Human
ggaucagaaauaca

SEQ ID NO: 3577422 - RNA, 16 nt, Human
ggaucagaaauacaga

SEQ ID NO: 3577423 - RNA, 17 nt, Human
ggaucagagcaggaccu

SEQ ID NO: 3577424 - RNA, 22 nt, Human
ggaucagagcaggaccucccuu

SEQ ID NO: 3577425 - RNA, 21 nt, Human
ggaucagaucuggggcagcac

SEQ ID NO: 3577426 - RNA, 15 nt, Human
ggaucagcguggccu

SEQ ID NO: 3577427 - RNA, 16 nt, Human
ggaucagcguggccuu

SEQ ID NO: 3577428 - RNA, 19 nt, Human
ggaucagcguggccuuguu

SEQ ID NO: 3577429 - RNA, 13 nt, Human
ggaucagcugagc

SEQ ID NO: 3577430 - RNA, 13 nt, Human
ggaucaggaagcc

SEQ ID NO: 3577431 - RNA, 18 nt, Human
ggaucaggcucccaggag

SEQ ID NO: 3577432 - RNA, 21 nt, Human
ggaucaguuaacuauugcauu

SEQ ID NO: 3577433 - RNA, 21 nt, Human
ggaucaugguguaauaagaca

SEQ ID NO: 3577434 - RNA, 13 nt, Human
ggauccagaaggg

SEQ ID NO: 3577435 - RNA, 13 nt, Human
ggauccagggagg

SEQ ID NO: 3577436 - RNA, 19 nt, Human
ggauccccgccuggccagg

SEQ ID NO: 3577437 - RNA, 13 nt, Human
ggaucccucaucc

SEQ ID NO: 3577438 - RNA, 18 nt, Human
ggaucccucaucuguccc

SEQ ID NO: 3577439 - RNA, 22 nt, Human
ggaucccucaucugucccuccg

SEQ ID NO: 3577440 - RNA, 19 nt, Human
ggauccgacugcuuuggac

SEQ ID NO: 3577441 - RNA, 14 nt, Human
ggauccuauucuca

SEQ ID NO: 3577442 - RNA, 13 nt, Human
ggauccuccaggu

SEQ ID NO: 3577443 - RNA, 14 nt, Human
ggauccuccaggug

SEQ ID NO: 3577444 - RNA, 19 nt, Human
ggauccugagccagauuuc

SEQ ID NO: 3577445 - RNA, 20 nt, Human
ggauccugcacugacucugg

SEQ ID NO: 3577446 - RNA, 23 nt, Human
ggaucggaggcuugucagagcug

SEQ ID NO: 3577447 - RNA, 12 nt, Human
ggaucuaccagc

SEQ ID NO: 3577448 - RNA, 15 nt, Human
ggaucuaccuggagg

SEQ ID NO: 3577449 - RNA, 18 nt, Human
ggaucuauacuugcuuug

SEQ ID NO: 3577450 - RNA, 21 nt, Human
ggaucuauuucauguuuuuga

SEQ ID NO: 3577451 - RNA, 15 nt, Human
ggaucucaccaggca

SEQ ID NO: 3577452 - RNA, 16 nt, Human
ggaucucaccaggcag

SEQ ID NO: 3577453 - RNA, 17 nt, Human
ggaucucagcuuugaga

SEQ ID NO: 3577454 - RNA, 22 nt, Human
ggaucucagcuuugagaagccu

SEQ ID NO: 3577455 - RNA, 13 nt, Human
ggaucuccaagga

SEQ ID NO: 3577456 - RNA, 14 nt, Human
ggaucuccaaggac

SEQ ID NO: 3577457 - RNA, 17 nt, Human
ggaucucccagggcuac

SEQ ID NO: 3577458 - RNA, 18 nt, Human
ggaucucuuaagacagca

SEQ ID NO: 3577459 - RNA, 22 nt, Human
ggaucucuucuuaauguacaua

SEQ ID NO: 3577460 - RNA, 15 nt, Human
ggaucugacugcacg

SEQ ID NO: 3577461 - RNA, 14 nt, Human
ggaucugccccucc

SEQ ID NO: 3577462 - RNA, 15 nt, Human
ggaucugccccuccc

SEQ ID NO: 3577463 - RNA, 17 nt, Human
ggaucugguccuaccca

SEQ ID NO: 3577464 - RNA, 19 nt, Human
ggaucuguauguguucuau

SEQ ID NO: 3577465 - RNA, 16 nt, Human
ggaucuguccaaggaa

SEQ ID NO: 3577466 - RNA, 16 nt, Human
ggaucugugcccagag

SEQ ID NO: 3577467 - RNA, 22 nt, Human
ggaucuucaucugacuaugaca

SEQ ID NO: 3577468 - RNA, 23 nt, Human
ggaucuucaucugacuaugacau

SEQ ID NO: 3577469 - RNA, 15 nt, Human
ggaucuugaaugugg

SEQ ID NO: 3577470 - RNA, 22 nt, Human
ggaucuugaauguggucucagg

SEQ ID NO: 3577471 - RNA, 17 nt, Human
ggaucuugcauucccag

SEQ ID NO: 3577472 - RNA, 14 nt, Human
ggaugaaaaaauaa

SEQ ID NO: 3577473 - RNA, 17 nt, Human
ggaugaaauuuucuaga

SEQ ID NO: 3577474 - RNA, 22 nt, Human
ggaugaaugaggucccaggcag

SEQ ID NO: 3577475 - RNA, 23 nt, Human
ggaugaauguaugugcacuguca

SEQ ID NO: 3577476 - RNA, 21 nt, Human
ggaugacaugcacucagcucu

SEQ ID NO: 3577477 - RNA, 14 nt, Human
ggaugaccagaaca

SEQ ID NO: 3577478 - RNA, 18 nt, Human
ggaugacuagaggcaggg

SEQ ID NO: 3577479 - RNA, 12 nt, Human
ggaugagaaagg

SEQ ID NO: 3577480 - RNA, 22 nt, Human
ggaugagaaagguugaagcacc

SEQ ID NO: 3577481 - RNA, 16 nt, Human
ggaugagagcccagag

SEQ ID NO: 3577482 - RNA, 18 nt, Human
ggaugagagcccagaggu

SEQ ID NO: 3577483 - RNA, 19 nt, Human
ggaugagagcccagaggua

SEQ ID NO: 3577484 - RNA, 22 nt, Human
ggaugagaguuuuggaugcagu

SEQ ID NO: 3577485 - RNA, 17 nt, Human
ggaugagcauggagcug

SEQ ID NO: 3577486 - RNA, 19 nt, Human
ggaugagcauggagcuggc

SEQ ID NO: 3577487 - RNA, 21 nt, Human
ggaugagcucccacaagccug

SEQ ID NO: 3577488 - RNA, 15 nt, Human
ggaugagcuggaagg

SEQ ID NO: 3577489 - RNA, 21 nt, Human
ggaugaggccgcuagaggccu

SEQ ID NO: 3577490 - RNA, 20 nt, Human
ggaugaggugguggagugga

SEQ ID NO: 3577491 - RNA, 23 nt, Human
ggaugaguacccaaaagcucagc

SEQ ID NO: 3577492 - RNA, 23 nt, Human
ggaugaugucuuuuuauuaaaau

SEQ ID NO: 3577493 - RNA, 21 nt, Human
ggaugauucagaaauuggaac

SEQ ID NO: 3577494 - RNA, 14 nt, Human
ggaugauugaagaa

SEQ ID NO: 3577495 - RNA, 15 nt, Human
ggaugauugaagaaa

SEQ ID NO: 3577496 - RNA, 16 nt, Human
ggaugauugaagaaac

SEQ ID NO: 3577497 - RNA, 14 nt, Human
ggaugcagugcucg

SEQ ID NO: 3577498 - RNA, 20 nt, Human
ggaugccacuccucccuccg

SEQ ID NO: 3577499 - RNA, 18 nt, Human
ggaugccugguggcagcu

SEQ ID NO: 3577500 - RNA, 21 nt, Human
ggaugccuuccccugggcccu

SEQ ID NO: 3577501 - RNA, 14 nt, Human
ggaugcugccugag

SEQ ID NO: 3577502 - RNA, 11 nt, Human
ggaugcuucau

SEQ ID NO: 3577503 - RNA, 22 nt, Human
ggauggaccacacagaggcugc

SEQ ID NO: 3577504 - RNA, 16 nt, Human
ggauggagagagggga

SEQ ID NO: 3577505 - RNA, 14 nt, Human
ggauggaggagaag

SEQ ID NO: 3577506 - RNA, 15 nt, Human
ggauggccagugucu

SEQ ID NO: 3577507 - RNA, 22 nt, Human
ggauggccagugucugucccgg

SEQ ID NO: 3577508 - RNA, 14 nt, Human
ggauggccccagca

SEQ ID NO: 3577509 - RNA, 20 nt, Human
ggauggcccuuccuccucca

SEQ ID NO: 3577510 - RNA, 18 nt, Human
ggauggcgggugggggug

SEQ ID NO: 3577511 - RNA, 23 nt, Human
ggauggcggguggggguggaaua

SEQ ID NO: 3577512 - RNA, 12 nt, Human
ggaugggaagga

SEQ ID NO: 3577513 - RNA, 17 nt, Human
ggaugggaaggagggag

SEQ ID NO: 3577514 - RNA, 13 nt, Human
ggaugggccuggc

SEQ ID NO: 3577515 - RNA, 14 nt, Human
ggauggggccacag

SEQ ID NO: 3577516 - RNA, 16 nt, Human
ggauggggcugcaccg

SEQ ID NO: 3577517 - RNA, 17 nt, Human
ggaugggggaacucaga

SEQ ID NO: 3577518 - RNA, 21 nt, Human
ggaugggggaacucagaucca

SEQ ID NO: 3577519 - RNA, 23 nt, Human
ggaugggggaacucagauccagg

SEQ ID NO: 3577520 - RNA, 21 nt, Human
ggaugggguauggauucuaaa

SEQ ID NO: 3577521 - RNA, 20 nt, Human
ggaugguccuggggcucugu

SEQ ID NO: 3577522 - RNA, 22 nt, Human
ggaugguccuggggcucugugc

SEQ ID NO: 3577523 - RNA, 21 nt, Human
ggauggucuuacagcaggcag

SEQ ID NO: 3577524 - RNA, 19 nt, Human
ggauguaaacagugccugc

SEQ ID NO: 3577525 - RNA, 21 nt, Human
ggauguaaacagugccugcug

SEQ ID NO: 3577526 - RNA, 19 nt, Human
ggauguagcuuuucaccuu

SEQ ID NO: 3577527 - RNA, 22 nt, Human
ggauguauccaugggggcaggg

SEQ ID NO: 3577528 - RNA, 16 nt, Human
ggauguauggggaauc

SEQ ID NO: 3577529 - RNA, 16 nt, Human
ggaugucacagggcca

SEQ ID NO: 3577530 - RNA, 23 nt, Human
ggaugucauguccuccaggcugg

SEQ ID NO: 3577531 - RNA, 17 nt, Human
ggauguccacagaugcc

SEQ ID NO: 3577532 - RNA, 16 nt, Human
ggauguccccagcaga

SEQ ID NO: 3577533 - RNA, 12 nt, Human
ggaugucccugg

SEQ ID NO: 3577534 - RNA, 18 nt, Human
ggaugucccugggccagg

SEQ ID NO: 3577535 - RNA, 23 nt, Human
ggauguggcugcagcagcggugg

SEQ ID NO: 3577536 - RNA, 23 nt, Human
ggaugugggagggagcagacagg

SEQ ID NO: 3577537 - RNA, 19 nt, Human
ggauguggguuccacagac

SEQ ID NO: 3577538 - RNA, 17 nt, Human
ggaugugguuuucuuaa

SEQ ID NO: 3577539 - RNA, 20 nt, Human
ggcacagcaacucuaagacu

SEQ ID NO: 3577540 - RNA, 12 nt, Human
ggcacagccugc

SEQ ID NO: 3577541 - RNA, 15 nt, Human
ggcacagccugcacu

SEQ ID NO: 3577542 - RNA, 22 nt, Human
ggcacagcggagucuguccugu

SEQ ID NO: 3577543 - RNA, 13 nt, Human
ggcacaggacuga

SEQ ID NO: 3577544 - RNA, 20 nt, Human
ggcacaggaguguccucuuc

SEQ ID NO: 3577545 - RNA, 14 nt, Human
ggcacaggcagggc

SEQ ID NO: 3577546 - RNA, 16 nt, Human
ggcacaggcagggcag

SEQ ID NO: 3577547 - RNA, 15 nt, Human
ggcacaggcccccuu

SEQ ID NO: 3577548 - RNA, 16 nt, Human
ggcacagggcaugaaa

SEQ ID NO: 3577549 - RNA, 18 nt, Human
ggcacagggccuggccca

SEQ ID NO: 3577550 - RNA, 17 nt, Human
ggcacagggucugcucu

SEQ ID NO: 3577551 - RNA, 19 nt, Human
ggcacagggucugcucuuu

SEQ ID NO: 3577552 - RNA, 22 nt, Human
ggcacaggucaggggugacaca

SEQ ID NO: 3577553 - RNA, 17 nt, Human
ggcacaggucgggcgca

SEQ ID NO: 3577554 - RNA, 15 nt, Human
ggcacaguccaggaa

SEQ ID NO: 3577555 - RNA, 22 nt, Human
ggcacaguccaggaacaagcua

SEQ ID NO: 3577556 - RNA, 19 nt, Human
ggcacagugucugggcuga

SEQ ID NO: 3577557 - RNA, 17 nt, Human
ggcacaucagaaaggaa

SEQ ID NO: 3577558 - RNA, 13 nt, Human
ggcacaucagcac

SEQ ID NO: 3577559 - RNA, 14 nt, Human
ggcacauggaggag

SEQ ID NO: 3577560 - RNA, 13 nt, Human
ggcacauuuuuuu

SEQ ID NO: 3577561 - RNA, 23 nt, Human
ggcacauuuuuuuuuuuaauuuu

SEQ ID NO: 3577562 - RNA, 16 nt, Human
ggcaccaaagaugcag

SEQ ID NO: 3577563 - RNA, 17 nt, Human
ggcaccaaagaugcagc

SEQ ID NO: 3577564 - RNA, 16 nt, Human
ggcaccaaagccacca

SEQ ID NO: 3577565 - RNA, 16 nt, Human
ggcaccaagcccacag

SEQ ID NO: 3577566 - RNA, 16 nt, Human
ggcaccagacacccag

SEQ ID NO: 3577567 - RNA, 14 nt, Human
ggcaccaggaagcc

SEQ ID NO: 3577568 - RNA, 15 nt, Human
ggcaccaggaagccg

SEQ ID NO: 3577569 - RNA, 20 nt, Human
ggcacccacaagugccacug

SEQ ID NO: 3577570 - RNA, 23 nt, Human
ggcacccaccaucaugucuggcu

SEQ ID NO: 3577571 - RNA, 21 nt, Human
ggcacccaccguggaggagga

SEQ ID NO: 3577572 - RNA, 16 nt, Human
ggcacccauccuagag

SEQ ID NO: 3577573 - RNA, 15 nt, Human
ggcacccccagccug

SEQ ID NO: 3577574 - RNA, 16 nt, Human
ggcacccccugcagcu

SEQ ID NO: 3577575 - RNA, 18 nt, Human
ggcacccccugcagcuug

SEQ ID NO: 3577576 - RNA, 19 nt, Human
ggcacccccugcagcuugu

SEQ ID NO: 3577577 - RNA, 20 nt, Human
ggcacccccuggagagaagu

SEQ ID NO: 3577578 - RNA, 16 nt, Human
ggcacccggccccugc

SEQ ID NO: 3577579 - RNA, 20 nt, Human
ggcacccggccccugcuggu

SEQ ID NO: 3577580 - RNA, 12 nt, Human
ggcacccuccca

SEQ ID NO: 3577581 - RNA, 15 nt, Human
ggcacccucuggccg

SEQ ID NO: 3577582 - RNA, 22 nt, Human
ggcaccgaagcccagagggucu

SEQ ID NO: 3577583 - RNA, 21 nt, Human
ggcaccuacacucaccugcac

SEQ ID NO: 3577584 - RNA, 18 nt, Human
ggcaccuauagucccagc

SEQ ID NO: 3577585 - RNA, 22 nt, Human
ggcaccuauagucccagcuacu

SEQ ID NO: 3577586 - RNA, 12 nt, Human
ggcaccucuucc

SEQ ID NO: 3577587 - RNA, 13 nt, Human
ggcaccugggccc

SEQ ID NO: 3577588 - RNA, 17 nt, Human
ggcaccugggcccuggg

SEQ ID NO: 3577589 - RNA, 19 nt, Human
ggcaccugggcccuggggc

SEQ ID NO: 3577590 - RNA, 14 nt, Human
ggcaccuggggagu

SEQ ID NO: 3577591 - RNA, 21 nt, Human
ggcaccugucugcuccagcuc

SEQ ID NO: 3577592 - RNA, 20 nt, Human
ggcacgaacccaccugcuga

SEQ ID NO: 3577593 - RNA, 18 nt, Human
ggcacgcugugggcaggu

SEQ ID NO: 3577594 - RNA, 23 nt, Human
ggcacuaacguugagccccugga

SEQ ID NO: 3577595 - RNA, 21 nt, Human
ggcacuagccuuuggcucugg

SEQ ID NO: 3577596 - RNA, 18 nt, Human
ggcacuauuuauuuacaa

SEQ ID NO: 3577597 - RNA, 18 nt, Human
ggcacucaaugcagccag

SEQ ID NO: 3577598 - RNA, 20 nt, Human
ggcacuccaaccuaaccugu

SEQ ID NO: 3577599 - RNA, 16 nt, Human
ggcacucccuccagca

SEQ ID NO: 3577600 - RNA, 23 nt, Human
ggcacugaagggauaugugaaac

SEQ ID NO: 3577601 - RNA, 21 nt, Human
ggcacugccgccgcuagguag

SEQ ID NO: 3577602 - RNA, 14 nt, Human
ggcacugcuaggcu

SEQ ID NO: 3577603 - RNA, 11 nt, Human
ggcacugcucu

SEQ ID NO: 3577604 - RNA, 20 nt, Human
ggcacugcuggguggcccau

SEQ ID NO: 3577605 - RNA, 21 nt, Human
ggcacugcuggguggcccauc

SEQ ID NO: 3577606 - RNA, 22 nt, Human
ggcacugcuggguggcccaucc

SEQ ID NO: 3577607 - RNA, 16 nt, Human
ggcacugcugugcugu

SEQ ID NO: 3577608 - RNA, 20 nt, Human
ggcacugcuuccagugaggc

SEQ ID NO: 3577609 - RNA, 21 nt, Human
ggcacuggcauugucccugug

SEQ ID NO: 3577610 - RNA, 21 nt, Human
ggcacugggaugagccgcugu

SEQ ID NO: 3577611 - RNA, 21 nt, Human
ggcacugguagguugggacac

SEQ ID NO: 3577612 - RNA, 18 nt, Human
ggcacuguaguucuaaga

SEQ ID NO: 3577613 - RNA, 20 nt, Human
ggcacuguaguucuaagacu

SEQ ID NO: 3577614 - RNA, 18 nt, Human
ggcacuucccugcugccu

SEQ ID NO: 3577615 - RNA, 16 nt, Human
ggcacuugauuccuug

SEQ ID NO: 3577616 - RNA, 17 nt, Human
ggcacuuggcagccuug

SEQ ID NO: 3577617 - RNA, 11 nt, Human
ggcagaaaauu

SEQ ID NO: 3577618 - RNA, 17 nt, Human
ggcagaaagcaaaauua

SEQ ID NO: 3577619 - RNA, 14 nt, Human
ggcagaaagcaaau

SEQ ID NO: 3577620 - RNA, 17 nt, Human
ggcagaaagcagaggcu

SEQ ID NO: 3577621 - RNA, 19 nt, Human
ggcagaaagcagaggcugg

SEQ ID NO: 3577622 - RNA, 20 nt, Human
ggcagaaagguucugcccgg

SEQ ID NO: 3577623 - RNA, 16 nt, Human
ggcagaaaguggccau

SEQ ID NO: 3577624 - RNA, 21 nt, Human
ggcagaacaucgcgaugggaa

SEQ ID NO: 3577625 - RNA, 14 nt, Human
ggcagaacccuggu

SEQ ID NO: 3577626 - RNA, 13 nt, Human
ggcagaacugagc

SEQ ID NO: 3577627 - RNA, 15 nt, Human
ggcagaacugagcuc

SEQ ID NO: 3577628 - RNA, 21 nt, Human
ggcagaacugagcuccucugg

SEQ ID NO: 3577629 - RNA, 19 nt, Human
ggcagaagacaccagagca

SEQ ID NO: 3577630 - RNA, 17 nt, Human
ggcagaaguguuuuuua

SEQ ID NO: 3577631 - RNA, 18 nt, Human
ggcagaauaagaaaacaa

SEQ ID NO: 3577632 - RNA, 19 nt, Human
ggcagaauaaucuuugggu

SEQ ID NO: 3577633 - RNA, 21 nt, Human
ggcagaaugcuagcucugagc

SEQ ID NO: 3577634 - RNA, 23 nt, Human
ggcagaaugcuagcucugagcca

SEQ ID NO: 3577635 - RNA, 15 nt, Human
ggcagacagcagcuc

SEQ ID NO: 3577636 - RNA, 18 nt, Human
ggcagacagcagcucagg

SEQ ID NO: 3577637 - RNA, 16 nt, Human
ggcagacauggugggg

SEQ ID NO: 3577638 - RNA, 20 nt, Human
ggcagacauugugcuagugc

SEQ ID NO: 3577639 - RNA, 18 nt, Human
ggcagagaaagaagagac

SEQ ID NO: 3577640 - RNA, 21 nt, Human
ggcagagaaagaagagacagg

SEQ ID NO: 3577641 - RNA, 14 nt, Human
ggcagagagagaga

SEQ ID NO: 3577642 - RNA, 10 nt, Human
ggcagagagc

SEQ ID NO: 3577643 - RNA, 18 nt, Human
ggcagagaugccucccug

SEQ ID NO: 3577644 - RNA, 23 nt, Human
ggcagagauuggaaugggcagcu

SEQ ID NO: 3577645 - RNA, 16 nt, Human
ggcagagcagagacca

SEQ ID NO: 3577646 - RNA, 14 nt, Human
ggcagagccaggaa

SEQ ID NO: 3577647 - RNA, 16 nt, Human
ggcagagccaggaaga

SEQ ID NO: 3577648 - RNA, 14 nt, Human
ggcagagcugcauc

SEQ ID NO: 3577649 - RNA, 18 nt, Human
ggcagagcugcuccccuc

SEQ ID NO: 3577650 - RNA, 17 nt, Human
ggcagagcuggcucuga

SEQ ID NO: 3577651 - RNA, 19 nt, Human
ggcagagcuggcucugagc

SEQ ID NO: 3577652 - RNA, 15 nt, Human
ggcagagcuggugcg

SEQ ID NO: 3577653 - RNA, 17 nt, Human
ggcagagcuuggacugg

SEQ ID NO: 3577654 - RNA, 17 nt, Human
ggcagaggaaagcaaag

SEQ ID NO: 3577655 - RNA, 18 nt, Human
ggcagaggaugucucaaa

SEQ ID NO: 3577656 - RNA, 16 nt, Human
ggcagaggcccaggcu

SEQ ID NO: 3577657 - RNA, 19 nt, Human
ggcagaggcccaggcugcc

SEQ ID NO: 3577658 - RNA, 22 nt, Human
ggcagaggccugggcugggaaa

SEQ ID NO: 3577659 - RNA, 16 nt, Human
ggcagagggcagaggc

SEQ ID NO: 3577660 - RNA, 20 nt, Human
ggcagagggcagaggcugga

SEQ ID NO: 3577661 - RNA, 22 nt, Human
ggcagagguuguagugagccca

SEQ ID NO: 3577662 - RNA, 13 nt, Human
ggcagaguuacag

SEQ ID NO: 3577663 - RNA, 13 nt, Human
ggcagaguuacuu

SEQ ID NO: 3577664 - RNA, 21 nt, Human
ggcagaguucuauaauguaaa

SEQ ID NO: 3577665 - RNA, 16 nt, Human
ggcagaguuguaaaua

SEQ ID NO: 3577666 - RNA, 21 nt, Human
ggcagaguuuguguguugucu

SEQ ID NO: 3577667 - RNA, 15 nt, Human
ggcagauaaucagcc

SEQ ID NO: 3577668 - RNA, 14 nt, Human
ggcagaucaccuga

SEQ ID NO: 3577669 - RNA, 18 nt, Human
ggcagaucaccugagguc

SEQ ID NO: 3577670 - RNA, 16 nt, Human
ggcagauccaggacua

SEQ ID NO: 3577671 - RNA, 15 nt, Human
ggcagaucugugccc

SEQ ID NO: 3577672 - RNA, 17 nt, Human
ggcagaucugugcccca

SEQ ID NO: 3577673 - RNA, 21 nt, Human
ggcagaugcagcucuuccugg

SEQ ID NO: 3577674 - RNA, 17 nt, Human
ggcagauguaggaggga

SEQ ID NO: 3577675 - RNA, 13 nt, Human
ggcagauugaaaa

SEQ ID NO: 3577676 - RNA, 15 nt, Human
ggcagcaacaauaaa

SEQ ID NO: 3577677 - RNA, 15 nt, Human
ggcagcaauuuaaau

SEQ ID NO: 3577678 - RNA, 22 nt, Human
ggcagcacaaguguaaugaaua

SEQ ID NO: 3577679 - RNA, 17 nt, Human
ggcagcacccuauaaau

SEQ ID NO: 3577680 - RNA, 19 nt, Human
ggcagcacccuauaaauca

SEQ ID NO: 3577681 - RNA, 19 nt, Human
ggcagcaccgccucuuccc

SEQ ID NO: 3577682 - RNA, 13 nt, Human
ggcagcagaaaac

SEQ ID NO: 3577683 - RNA, 20 nt, Human
ggcugcacucugugcccaug

SEQ ID NO: 3577684 - RNA, 21 nt, Human
ggcugcacucugugcccaugg

SEQ ID NO: 3577685 - RNA, 13 nt, Human
ggcugcagcagcg

SEQ ID NO: 3577686 - RNA, 22 nt, Human
ggcugcagcagcgguggccucu

SEQ ID NO: 3577687 - RNA, 21 nt, Human
ggcugcagcauguugcugagg

SEQ ID NO: 3577688 - RNA, 17 nt, Human
ggcugcagccucaggac

SEQ ID NO: 3577689 - RNA, 19 nt, Human
ggcugcagccucaggacug

SEQ ID NO: 3577690 - RNA, 22 nt, Human
ggcugcagccucaggacuggga

SEQ ID NO: 3577691 - RNA, 21 nt, Human
ggcugcagccugcgccaccgc

SEQ ID NO: 3577692 - RNA, 15 nt, Human
ggcugcagcuggaca

SEQ ID NO: 3577693 - RNA, 13 nt, Human
ggcugcagggagu

SEQ ID NO: 3577694 - RNA, 17 nt, Human
ggcugcagggaguccga

SEQ ID NO: 3577695 - RNA, 23 nt, Human
ggcugcaguucgacucugugcug

SEQ ID NO: 3577696 - RNA, 23 nt, Human
ggcugcaucugggauucccacca

SEQ ID NO: 3577697 - RNA, 17 nt, Human
ggcugccaaggccagag

SEQ ID NO: 3577698 - RNA, 14 nt, Human
ggcugccagugccu

SEQ ID NO: 3577699 - RNA, 21 nt, Human
ggcugccaucucaccuccugc

SEQ ID NO: 3577700 - RNA, 22 nt, Human
ggcugccaucucaccuccugcu

SEQ ID NO: 3577701 - RNA, 17 nt, Human
ggcugcccacacacccc

SEQ ID NO: 3577702 - RNA, 19 nt, Human
ggcugcccacacaccccaa

SEQ ID NO: 3577703 - RNA, 19 nt, Human
ggcugcccaucauguggcc

SEQ ID NO: 3577704 - RNA, 19 nt, Human
ggcugccccaaccugcuga

SEQ ID NO: 3577705 - RNA, 20 nt, Human
ggcugcccccggcccccugg

SEQ ID NO: 3577706 - RNA, 18 nt, Human
ggcugccccgccuggagg

SEQ ID NO: 3577707 - RNA, 22 nt, Human
ggcugccccuaaucucuguagg

SEQ ID NO: 3577708 - RNA, 21 nt, Human
ggcugcccgcucccagugucu

SEQ ID NO: 3577709 - RNA, 22 nt, Human
ggcugcccgcucccagugucuu

SEQ ID NO: 3577710 - RNA, 18 nt, Human
ggcugcccuccugugcuc

SEQ ID NO: 3577711 - RNA, 23 nt, Human
ggcugcccuccugugcucagccc

SEQ ID NO: 3577712 - RNA, 13 nt, Human
ggcugcccugcca

SEQ ID NO: 3577713 - RNA, 22 nt, Human
ggcugcccuggaggaaccgaaa

SEQ ID NO: 3577714 - RNA, 14 nt, Human
ggcugcccuggccc

SEQ ID NO: 3577715 - RNA, 15 nt, Human
ggcugcccuggcccu

SEQ ID NO: 3577716 - RNA, 12 nt, Human
ggcugcccuggu

SEQ ID NO: 3577717 - RNA, 15 nt, Human
ggcugcccuggugcu

SEQ ID NO: 3577718 - RNA, 19 nt, Human
ggcugcccuggugcugcca

SEQ ID NO: 3577719 - RNA, 10 nt, Human
ggcugcccuu

SEQ ID NO: 3577720 - RNA, 14 nt, Human
ggcugcccuuucug

SEQ ID NO: 3577721 - RNA, 18 nt, Human
ggcugcccuuucugggca

SEQ ID NO: 3577722 - RNA, 16 nt, Human
ggcugccguggggccg

SEQ ID NO: 3577723 - RNA, 12 nt, Human
ggcugccuccac

SEQ ID NO: 3577724 - RNA, 16 nt, Human
ggcugccuccacuccc

SEQ ID NO: 3577725 - RNA, 17 nt, Human
ggcugccuccacuccca

SEQ ID NO: 3577726 - RNA, 14 nt, Human
ggcugccuggagcc

SEQ ID NO: 3577727 - RNA, 14 nt, Human
ggcugccugggcug

SEQ ID NO: 3577728 - RNA, 16 nt, Human
ggcugccuuagaaccu

SEQ ID NO: 3577729 - RNA, 15 nt, Human
ggcugcgcuuccuau

SEQ ID NO: 3577730 - RNA, 22 nt, Human
ggcugcggaaugaaccacaucu

SEQ ID NO: 3577731 - RNA, 12 nt, Human
ggcugcggcccc

SEQ ID NO: 3577732 - RNA, 18 nt, Human
ggcugcggccccuccccc

SEQ ID NO: 3577733 - RNA, 15 nt, Human
ggcugcucagggcug

SEQ ID NO: 3577734 - RNA, 11 nt, Human
ggcugcuccca

SEQ ID NO: 3577735 - RNA, 18 nt, Human
ggcugcucccaccuggcu

SEQ ID NO: 3577736 - RNA, 19 nt, Human
ggcugcucccaccuggcuc

SEQ ID NO: 3577737 - RNA, 23 nt, Human
ggcugcuccuccagggccacgug

SEQ ID NO: 3577738 - RNA, 23 nt, Human
ggcugcugaaaaccaucuggccu

SEQ ID NO: 3577739 - RNA, 13 nt, Human
ggcugcugaaggc

SEQ ID NO: 3577740 - RNA, 21 nt, Human
ggcugcugaucgccuucccca

SEQ ID NO: 3577741 - RNA, 17 nt, Human
ggcugcugcccccaccc

SEQ ID NO: 3577742 - RNA, 23 nt, Human
ggcugcugcugcucuuggcugga

SEQ ID NO: 3577743 - RNA, 16 nt, Human
ggcugcugcugggcuc

SEQ ID NO: 3577744 - RNA, 20 nt, Human
ggcugcugcugggcucagug

SEQ ID NO: 3577745 - RNA, 13 nt, Human
ggcugcuggagga

SEQ ID NO: 3577746 - RNA, 16 nt, Human
ggcugcuggaggaaaa

SEQ ID NO: 3577747 - RNA, 21 nt, Human
ggcugcuggggccucagacga

SEQ ID NO: 3577748 - RNA, 14 nt, Human
ggcugcugugaagc

SEQ ID NO: 3577749 - RNA, 17 nt, Human
ggcugcugugugccuuc

SEQ ID NO: 3577750 - RNA, 12 nt, Human
ggcugcuucaag

SEQ ID NO: 3577751 - RNA, 15 nt, Human
ggcugcuucaaggau

SEQ ID NO: 3577752 - RNA, 20 nt, Human
ggcugcuucaaggauccuga

SEQ ID NO: 3577753 - RNA, 17 nt, Human
ggcugcuuccuccugga

SEQ ID NO: 3577754 - RNA, 18 nt, Human
ggcugcuuccuccuggaa

SEQ ID NO: 3577755 - RNA, 23 nt, Human
ggcuggaacagauucacacuguc

SEQ ID NO: 3577756 - RNA, 22 nt, Human
ggcuggaagauccugcgggugg

SEQ ID NO: 3577757 - RNA, 16 nt, Human
ggcuggaaggggucca

SEQ ID NO: 3577758 - RNA, 12 nt, Human
ggcuggacccag

SEQ ID NO: 3577759 - RNA, 19 nt, Human
ggcuggacccagccaggcc

SEQ ID NO: 3577760 - RNA, 21 nt, Human
ggcuggacccagccaggccca

SEQ ID NO: 3577761 - RNA, 15 nt, Human
ggcuggacuccagau

SEQ ID NO: 3577762 - RNA, 13 nt, Human
ggcuggacugagg

SEQ ID NO: 3577763 - RNA, 14 nt, Human
ggcuggacuggcug

SEQ ID NO: 3577764 - RNA, 13 nt, Human
ggcuggacuugga

SEQ ID NO: 3577765 - RNA, 18 nt, Human
ggcuggacuuggagguag

SEQ ID NO: 3577766 - RNA, 19 nt, Human
ggcuggagacgggugggcg

SEQ ID NO: 3577767 - RNA, 13 nt, Human
ggcuggagcuggc

SEQ ID NO: 3577768 - RNA, 11 nt, Human
ggcuggaggag

SEQ ID NO: 3577769 - RNA, 14 nt, Human
ggcuggaggagccc

SEQ ID NO: 3577770 - RNA, 17 nt, Human
ggcuggaggagcccagg

SEQ ID NO: 3577771 - RNA, 19 nt, Human
ggcuggaggcagggccuug

SEQ ID NO: 3577772 - RNA, 14 nt, Human
ggcuggaggcccag

SEQ ID NO: 3577773 - RNA, 17 nt, Human
ggcuggaguaaucagau

SEQ ID NO: 3577774 - RNA, 20 nt, Human
ggcuggagugcaguggugca

SEQ ID NO: 3577775 - RNA, 19 nt, Human
ggcuggaguggaguggcgu

SEQ ID NO: 3577776 - RNA, 13 nt, Human
ggcuggaugagcu

SEQ ID NO: 3577777 - RNA, 15 nt, Human
ggcuggauguggugg

SEQ ID NO: 3577778 - RNA, 18 nt, Human
ggcuggaugugguggcau

SEQ ID NO: 3577779 - RNA, 13 nt, Human
ggcuggcacagga

SEQ ID NO: 3577780 - RNA, 15 nt, Human
ggcuggcagcucucc

SEQ ID NO: 3577781 - RNA, 16 nt, Human
ggcuggcagcucucca

SEQ ID NO: 3577782 - RNA, 20 nt, Human
ggcuggcagcucuccaguca

SEQ ID NO: 3577783 - RNA, 14 nt, Human
ggcuggcagguaug

SEQ ID NO: 3577784 - RNA, 17 nt, Human
ggcuggccacugcacag

SEQ ID NO: 3577785 - RNA, 19 nt, Human
ggcuggccacugcacagag

SEQ ID NO: 3577786 - RNA, 13 nt, Human
ggcuggccagccc

SEQ ID NO: 3577787 - RNA, 14 nt, Human
ggcuggccagcccc

SEQ ID NO: 3577788 - RNA, 16 nt, Human
ggcuggccagccgcuc

SEQ ID NO: 3577789 - RNA, 13 nt, Human
ggcuggccaugga

SEQ ID NO: 3577790 - RNA, 18 nt, Human
ggcuggccauggagaaag

SEQ ID NO: 3577791 - RNA, 21 nt, Human
ggcuggcccagcccugcuggc

SEQ ID NO: 3577792 - RNA, 17 nt, Human
ggcuggccccagggcac

SEQ ID NO: 3577793 - RNA, 20 nt, Human
ggcuggccccagggcacccu

SEQ ID NO: 3577794 - RNA, 17 nt, Human
ggcuggcccugcccugg

SEQ ID NO: 3577795 - RNA, 21 nt, Human
ggcuggcgcagccaaggccga

SEQ ID NO: 3577796 - RNA, 17 nt, Human
ggcuggcuaacuggaag

SEQ ID NO: 3577797 - RNA, 22 nt, Human
ggcuggcuccagaugcagggca

SEQ ID NO: 3577798 - RNA, 15 nt, Human
ggcuggcuccccugc

SEQ ID NO: 3577799 - RNA, 16 nt, Human
ggcuggcuccccugca

SEQ ID NO: 3577800 - RNA, 14 nt, Human
ggcuggcugagggc

SEQ ID NO: 3577801 - RNA, 10 nt, Human
ggcuggcugg

SEQ ID NO: 3577802 - RNA, 12 nt, Human
ggcuggcugggg

SEQ ID NO: 3577803 - RNA, 16 nt, Human
ggcuggcuucaggagg

SEQ ID NO: 3577804 - RNA, 23 nt, Human
ggcuggcuuuucuguuuccugua

SEQ ID NO: 3577805 - RNA, 11 nt, Human
ggcugggaaau

SEQ ID NO: 3577806 - RNA, 19 nt, Human
ggcugggaacucaccuggg

SEQ ID NO: 3577807 - RNA, 21 nt, Human
ggcugggaacugcagaccugu

SEQ ID NO: 3577808 - RNA, 23 nt, Human
ggcugggaacugcagaccugucc

SEQ ID NO: 3577809 - RNA, 18 nt, Human
ggcugggacguggcucag

SEQ ID NO: 3577810 - RNA, 14 nt, Human
ggcugggagagccu

SEQ ID NO: 3577811 - RNA, 15 nt, Human
ggcugggagagccuu

SEQ ID NO: 3577812 - RNA, 20 nt, Human
ggcugggagagccuuccagg

SEQ ID NO: 3577813 - RNA, 23 nt, Human
ggcugggaguaguugucuuuccu

SEQ ID NO: 3577814 - RNA, 15 nt, Human
ggcugggaguggugg

SEQ ID NO: 3577815 - RNA, 16 nt, Human
ggcugggaugggccug

SEQ ID NO: 3577816 - RNA, 19 nt, Human
ggcugggcagaggaaagca

SEQ ID NO: 3577817 - RNA, 13 nt, Human
ggcugggcagcug

SEQ ID NO: 3577818 - RNA, 17 nt, Human
ggcugggcucccuuccc

SEQ ID NO: 3577819 - RNA, 21 nt, Human
ggcugggcucccuucccaccu

SEQ ID NO: 3577820 - RNA, 21 nt, Human
ggcuggggaaguccucugggu

SEQ ID NO: 3577821 - RNA, 16 nt, Human
ggcuggggaggaccug

SEQ ID NO: 3577822 - RNA, 23 nt, Human
ggcuggggcagccucugggccca

SEQ ID NO: 3577823 - RNA, 16 nt, Human
ggcugggggaagaagc

SEQ ID NO: 3577824 - RNA, 15 nt, Human
ggcugggggagagcc

SEQ ID NO: 3577825 - RNA, 19 nt, Human
ggcugggggagagccgugg

SEQ ID NO: 3577826 - RNA, 14 nt, Human
ggcugggggcagga

SEQ ID NO: 3577827 - RNA, 17 nt, Human
ggcugggggcaggaggg

SEQ ID NO: 3577828 - RNA, 19 nt, Human
gggaccaggaguggguggg

SEQ ID NO: 3577829 - RNA, 14 nt, Human
gggaccaggcacca

SEQ ID NO: 3577830 - RNA, 18 nt, Human
gggacccaggcaccugca

SEQ ID NO: 3577831 - RNA, 15 nt, Human
gggacccagugcaga

SEQ ID NO: 3577832 - RNA, 15 nt, Human
gggacccaguggcag

SEQ ID NO: 3577833 - RNA, 14 nt, Human
gggacccccgcccc

SEQ ID NO: 3577834 - RNA, 18 nt, Human
gggacccccgcccccugc

SEQ ID NO: 3577835 - RNA, 24 nt, Human
gggacccccgcccccugcccuccc

SEQ ID NO: 3577836 - RNA, 20 nt, Human
gggaccccuggugguucacu

SEQ ID NO: 3577837 - RNA, 24 nt, Human
gggacccuccaaggccaggccuug

SEQ ID NO: 3577838 - RNA, 22 nt, Human
gggaccgcuacaccacucuggc

SEQ ID NO: 3577839 - RNA, 20 nt, Human
gggaccuagggaggcauggu

SEQ ID NO: 3577840 - RNA, 12 nt, Human
gggaccucuccc

SEQ ID NO: 3577841 - RNA, 16 nt, Human
gggaccucucccaggg

SEQ ID NO: 3577842 - RNA, 23 nt, Human
gggaccucucccagggucccugg

SEQ ID NO: 3577843 - RNA, 21 nt, Human
gggaccugguacccuccuggc

SEQ ID NO: 3577844 - RNA, 21 nt, Human
gggacgccugggggugccagg

SEQ ID NO: 3577845 - RNA, 20 nt, Human
gggacgcggccggcggccuc

SEQ ID NO: 3577846 - RNA, 14 nt, Human
gggacguggcucag

SEQ ID NO: 3577847 - RNA, 20 nt, Human
gggacuacccauagacauga

SEQ ID NO: 3577848 - RNA, 18 nt, Human
gggacuagccuggcuugg

SEQ ID NO: 3577849 - RNA, 19 nt, Human
gggacucaaugcacugaca

SEQ ID NO: 3577850 - RNA, 23 nt, Human
gggacucaaugcacugacauugu

SEQ ID NO: 3577851 - RNA, 18 nt, Human
gggacucacuggcagccc

SEQ ID NO: 3577852 - RNA, 16 nt, Human
gggacucagcccugag

SEQ ID NO: 3577853 - RNA, 22 nt, Human
gggacucagccuucagacagag

SEQ ID NO: 3577854 - RNA, 18 nt, Human
gggacuccggcugugcug

SEQ ID NO: 3577855 - RNA, 19 nt, Human
gggacuccggcugugcugg

SEQ ID NO: 3577856 - RNA, 19 nt, Human
gggacucugagcgggaggc

SEQ ID NO: 3577857 - RNA, 21 nt, Human
gggacucugagcgggaggcag

SEQ ID NO: 3577858 - RNA, 22 nt, Human
gggacucugagcgggaggcaga

SEQ ID NO: 3577859 - RNA, 23 nt, Human
gggacucugagcgggaggcagag

SEQ ID NO: 3577860 - RNA, 18 nt, Human
gggacugaaaaccucucc

SEQ ID NO: 3577861 - RNA, 15 nt, Human
gggacugaagccaaa

SEQ ID NO: 3577862 - RNA, 13 nt, Human
gggacugagaaau

SEQ ID NO: 3577863 - RNA, 12 nt, Human
gggacugagaga

SEQ ID NO: 3577864 - RNA, 23 nt, Human
gggacugagagaugcagaaauau

SEQ ID NO: 3577865 - RNA, 19 nt, Human
gggacugagccagucccag

SEQ ID NO: 3577866 - RNA, 21 nt, Human
gggacugaggggaggggagca

SEQ ID NO: 3577867 - RNA, 23 nt, Human
gggacugccagucccccugcccc

SEQ ID NO: 3577868 - RNA, 17 nt, Human
gggacugccucugccac

SEQ ID NO: 3577869 - RNA, 15 nt, Human
gggacugcugcugcc

SEQ ID NO: 3577870 - RNA, 21 nt, Human
gggacugcugcugccuggcca

SEQ ID NO: 3577871 - RNA, 14 nt, Human
gggacugggagggc

SEQ ID NO: 3577872 - RNA, 20 nt, Human
gggacuggggaugugggagg

SEQ ID NO: 3577873 - RNA, 15 nt, Human
gggacugucgcugcu

SEQ ID NO: 3577874 - RNA, 17 nt, Human
gggacugucgcugcuuc

SEQ ID NO: 3577875 - RNA, 21 nt, Human
gggacugucuuucagauacau

SEQ ID NO: 3577876 - RNA, 12 nt, Human
gggacugugugu

SEQ ID NO: 3577877 - RNA, 15 nt, Human
gggacuuccuugcuc

SEQ ID NO: 3577878 - RNA, 19 nt, Human
gggacuuccuugcucuccc

SEQ ID NO: 3577879 - RNA, 14 nt, Human
gggacuucuuuuca

SEQ ID NO: 3577880 - RNA, 15 nt, Human
gggacuuggaagcuc

SEQ ID NO: 3577881 - RNA, 21 nt, Human
gggagaaaaggaaaagaaaaa

SEQ ID NO: 3577882 - RNA, 16 nt, Human
gggagaaauugacaga

SEQ ID NO: 3577883 - RNA, 16 nt, Human
gggagaaccucaggcu

SEQ ID NO: 3577884 - RNA, 22 nt, Human
gggagaagaaaggugaguuuga

SEQ ID NO: 3577885 - RNA, 15 nt, Human
gggagaaucauguga

SEQ ID NO: 3577886 - RNA, 15 nt, Human
gggagacaccucaga

SEQ ID NO: 3577887 - RNA, 17 nt, Human
gggagacaccucagagc

SEQ ID NO: 3577888 - RNA, 21 nt, Human
gggagacgguuuccagggagg

SEQ ID NO: 3577889 - RNA, 15 nt, Human
gggagagccagcucc

SEQ ID NO: 3577890 - RNA, 18 nt, Human
gggagagcccaggagcuc

SEQ ID NO: 3577891 - RNA, 20 nt, Human
gggagagcccaggagcuccc

SEQ ID NO: 3577892 - RNA, 12 nt, Human
gggagagccugc

SEQ ID NO: 3577893 - RNA, 16 nt, Human
gggagagccugcuggc

SEQ ID NO: 3577894 - RNA, 15 nt, Human
gggagagccuuccag

SEQ ID NO: 3577895 - RNA, 19 nt, Human
gggagagccuuccaggggu

SEQ ID NO: 3577896 - RNA, 12 nt, Human
gggagagcugaa

SEQ ID NO: 3577897 - RNA, 13 nt, Human
gggagaggaacuc

SEQ ID NO: 3577898 - RNA, 12 nt, Human
gggagaggcagc

SEQ ID NO: 3577899 - RNA, 15 nt, Human
gggagagggucugga

SEQ ID NO: 3577900 - RNA, 20 nt, Human
gggagagugucaaccagaca

SEQ ID NO: 3577901 - RNA, 21 nt, Human
gggagagugucaaccagacag

SEQ ID NO: 3577902 - RNA, 16 nt, Human
gggagaguuccagagg

SEQ ID NO: 3577903 - RNA, 19 nt, Human
gggagcaaacugcaugccc

SEQ ID NO: 3577904 - RNA, 16 nt, Human
gggagcagacaggagg

SEQ ID NO: 3577905 - RNA, 24 nt, Human
gggagcaggcggugggcacccacc

SEQ ID NO: 3577906 - RNA, 15 nt, Human
gggagcagggagguc

SEQ ID NO: 3577907 - RNA, 13 nt, Human
gggagccaggagg

SEQ ID NO: 3577908 - RNA, 12 nt, Human
gggagccagggc

SEQ ID NO: 3577909 - RNA, 13 nt, Human
gggagccccaggg

SEQ ID NO: 3577910 - RNA, 14 nt, Human
gggagccccagggu

SEQ ID NO: 3577911 - RNA, 16 nt, Human
gggagcccccagccug

SEQ ID NO: 3577912 - RNA, 19 nt, Human
gggagccccuucugcucag

SEQ ID NO: 3577913 - RNA, 23 nt, Human
gggagcccucaggcaccugcacu

SEQ ID NO: 3577914 - RNA, 16 nt, Human
gggagccgcuggcaga

SEQ ID NO: 3577915 - RNA, 21 nt, Human
gggagccucccugccucaggc

SEQ ID NO: 3577916 - RNA, 11 nt, Human
gggagccuccu

SEQ ID NO: 3577917 - RNA, 21 nt, Human
gggagccucgcaacccgugcc

SEQ ID NO: 3577918 - RNA, 18 nt, Human
gggagccuuagccgccca

SEQ ID NO: 3577919 - RNA, 21 nt, Human
gggagccuuugguucuggcca

SEQ ID NO: 3577920 - RNA, 22 nt, Human
gggagcgggucugcucccaagg

SEQ ID NO: 3577921 - RNA, 21 nt, Human
gggagcuccaacucagaaggg

SEQ ID NO: 3577922 - RNA, 23 nt, Human
gggagcuccacucugcuucucug

SEQ ID NO: 3577923 - RNA, 20 nt, Human
gggagcuccucuccuggagg

SEQ ID NO: 3577924 - RNA, 14 nt, Human
gggagcugagaaga

SEQ ID NO: 3577925 - RNA, 12 nt, Human
gggagcugaggc

SEQ ID NO: 3577926 - RNA, 13 nt, Human
gggagcugccugu

SEQ ID NO: 3577927 - RNA, 15 nt, Human
gggagcugcugcccu

SEQ ID NO: 3577928 - RNA, 14 nt, Human
gggagcugggcuuc

SEQ ID NO: 3577929 - RNA, 19 nt, Human
gggagcugguuagaaaugc

SEQ ID NO: 3577930 - RNA, 16 nt, Human
gggaggaaaagaaaag

SEQ ID NO: 3577931 - RNA, 18 nt, Human
gggaggaacacugcacuc

SEQ ID NO: 3577932 - RNA, 12 nt, Human
gggaggaagcag

SEQ ID NO: 3577933 - RNA, 14 nt, Human
gggaggaagcagaa

SEQ ID NO: 3577934 - RNA, 18 nt, Human
gggaggaagcagaauaaa

SEQ ID NO: 3577935 - RNA, 23 nt, Human
gggaggacaaaacuucuugucag

SEQ ID NO: 3577936 - RNA, 12 nt, Human
gggaggacaggc

SEQ ID NO: 3577937 - RNA, 16 nt, Human
gggaggaccuggggca

SEQ ID NO: 3577938 - RNA, 23 nt, Human
gggaggagaagaaaauguucuuc

SEQ ID NO: 3577939 - RNA, 11 nt, Human
gggaggcagcc

SEQ ID NO: 3577940 - RNA, 13 nt, Human
gggaggcagccgg

SEQ ID NO: 3577941 - RNA, 17 nt, Human
gggaggcauggcccugg

SEQ ID NO: 3577942 - RNA, 18 nt, Human
gggaggccccacugggga

SEQ ID NO: 3577943 - RNA, 20 nt, Human
gggaggcggagaguacagug

SEQ ID NO: 3577944 - RNA, 13 nt, Human
gggaggcucaggu

SEQ ID NO: 3577945 - RNA, 15 nt, Human
gggaggcugagacag

SEQ ID NO: 3577946 - RNA, 17 nt, Human
gggaggcugagacagga

SEQ ID NO: 3577947 - RNA, 16 nt, Human
gggaggcugaggcaca

SEQ ID NO: 3577948 - RNA, 14 nt, Human
gggaggcugaggcg

SEQ ID NO: 3577949 - RNA, 18 nt, Human
gggagggagcugagaaga

SEQ ID NO: 3577950 - RNA, 15 nt, Human
gggagggcccacuuc

SEQ ID NO: 3577951 - RNA, 22 nt, Human
gggagggcggcaggggccugga

SEQ ID NO: 3577952 - RNA, 11 nt, Human
gggagggcucc

SEQ ID NO: 3577953 - RNA, 13 nt, Human
gggagggcuccag

SEQ ID NO: 3577954 - RNA, 15 nt, Human
gggagggcuccagac

SEQ ID NO: 3577955 - RNA, 18 nt, Human
gggagggcuccagacaca

SEQ ID NO: 3577956 - RNA, 12 nt, Human
gggagggcucug

SEQ ID NO: 3577957 - RNA, 13 nt, Human
gggagggcugcga

SEQ ID NO: 3577958 - RNA, 14 nt, Human
gggagggcugcgac

SEQ ID NO: 3577959 - RNA, 14 nt, Human
gggaggggcaggcu

SEQ ID NO: 3577960 - RNA, 16 nt, Human
gggaggggcaggcuga

SEQ ID NO: 3577961 - RNA, 17 nt, Human
gggaggggcaggcugac

SEQ ID NO: 3577962 - RNA, 13 nt, Human
gggaggggcccgc

SEQ ID NO: 3577963 - RNA, 17 nt, Human
gggaggggccggcccug

SEQ ID NO: 3577964 - RNA, 18 nt, Human
gggaggggcgcccaccuc

SEQ ID NO: 3577965 - RNA, 18 nt, Human
gggaggggcgcuggccca

SEQ ID NO: 3577966 - RNA, 20 nt, Human
gggaggggcgcuggcccagc

SEQ ID NO: 3577967 - RNA, 15 nt, Human
gggaggggcuccuuu

SEQ ID NO: 3577968 - RNA, 14 nt, Human
gggagggggcagaa

SEQ ID NO: 3577969 - RNA, 19 nt, Human
gggagggguugccacaggc

SEQ ID NO: 3577970 - RNA, 17 nt, Human
gggagggucagccaggg

SEQ ID NO: 3577971 - RNA, 15 nt, Human
gggaggucacuggaa

SEQ ID NO: 3577972 - RNA, 15 nt, Human
gggaggucgaggcag

SEQ ID NO: 3577973 - RNA, 17 nt, Human
gggaggucgaggcagga

SEQ ID NO: 3577974 - RNA, 15 nt, Human
gggaggucgagguag

SEQ ID NO: 3577975 - RNA, 23 nt, Human
gggagguggaagaagggagaaga

SEQ ID NO: 3577976 - RNA, 15 nt, Human
gggaguccaggcaca

SEQ ID NO: 3577977 - RNA, 17 nt, Human
gggaguccaggcacagg

SEQ ID NO: 3577978 - RNA, 16 nt, Human
gggaguccccuccccg

SEQ ID NO: 3577979 - RNA, 17 nt, Human
gggagucugaagcagau

SEQ ID NO: 3577980 - RNA, 17 nt, Human
gggagucugccagggcc

SEQ ID NO: 3577981 - RNA, 23 nt, Human
gggagugacucaagaagugaaga

SEQ ID NO: 3577982 - RNA, 19 nt, Human
gggagugaggcaggugaca

SEQ ID NO: 3577983 - RNA, 21 nt, Human
gggagugaguugauagcacag

SEQ ID NO: 3577984 - RNA, 15 nt, Human
gggagugcuggcuca

SEQ ID NO: 3577985 - RNA, 16 nt, Human
gggagugcuggcucac

SEQ ID NO: 3577986 - RNA, 17 nt, Human
gggaguguacucccagg

SEQ ID NO: 3577987 - RNA, 18 nt, Human
gggaguguacucccaggg

SEQ ID NO: 3577988 - RNA, 21 nt, Human
gggaguuucuuuccugccuuc

SEQ ID NO: 3577989 - RNA, 15 nt, Human
gggauauaggagagg

SEQ ID NO: 3577990 - RNA, 21 nt, Human
gggauaugauuuaaaucagcc

SEQ ID NO: 3577991 - RNA, 12 nt, Human
gggauaugcuua

SEQ ID NO: 3577992 - RNA, 17 nt, Human
gggaucacaggugucag

SEQ ID NO: 3577993 - RNA, 18 nt, Human
gggaucagggguaggaau

SEQ ID NO: 3577994 - RNA, 23 nt, Human
gggauccccgccuggccaggagc

SEQ ID NO: 3577995 - RNA, 20 nt, Human
gggaucccucccccccaugc

SEQ ID NO: 3577996 - RNA, 14 nt, Human
gggaucucaggggc

SEQ ID NO: 3577997 - RNA, 15 nt, Human
gggaucugccccucc

SEQ ID NO: 3577998 - RNA, 17 nt, Human
gggaucugugcccagag

SEQ ID NO: 3577999 - RNA, 18 nt, Human
gggaucuugcauucccag

SEQ ID NO: 3578000 - RNA, 20 nt, Human
gggaugacuaaaauauuuau

SEQ ID NO: 3578001 - RNA, 15 nt, Human
gggaugacugugauu

SEQ ID NO: 3578002 - RNA, 15 nt, Human
gggaugagaguuuug

SEQ ID NO: 3578003 - RNA, 15 nt, Human
gggauggaaaaggaa

SEQ ID NO: 3578004 - RNA, 14 nt, Human
gggauggaggagaa

SEQ ID NO: 3578005 - RNA, 15 nt, Human
gggaugggagccggg

SEQ ID NO: 3578006 - RNA, 13 nt, Human
gggaugggccacc

SEQ ID NO: 3578007 - RNA, 16 nt, Human
gggaugggccaccgcc

SEQ ID NO: 3578008 - RNA, 14 nt, Human
gggaugggccuggc

SEQ ID NO: 3578009 - RNA, 16 nt, Human
gggaugguccuggggc

SEQ ID NO: 3578010 - RNA, 13 nt, Human
gggauggugcccu

SEQ ID NO: 3578011 - RNA, 17 nt, Human
gggaugguggagggcca

SEQ ID NO: 3578012 - RNA, 19 nt, Human
gggauggugggcuucaggg

SEQ ID NO: 3578013 - RNA, 14 nt, Human
gggaugucucucau

SEQ ID NO: 3578014 - RNA, 12 nt, Human
gggauguguccu

SEQ ID NO: 3578015 - RNA, 18 nt, Human
gggauguguccugacacu

SEQ ID NO: 3578016 - RNA, 16 nt, Human
gggauuacaggcuccu

SEQ ID NO: 3578017 - RNA, 21 nt, Human
gggauuacaggcuccugccac

SEQ ID NO: 3578018 - RNA, 15 nt, Human
gggauuacccaagca

SEQ ID NO: 3578019 - RNA, 20 nt, Human
gggauuaugggucacaggaa

SEQ ID NO: 3578020 - RNA, 15 nt, Human
gggauucaggcugcu

SEQ ID NO: 3578021 - RNA, 16 nt, Human
gggauucaggcugcuu

SEQ ID NO: 3578022 - RNA, 13 nt, Human
gggauuccugacc

SEQ ID NO: 3578023 - RNA, 17 nt, Human
gggauuccugacccagg

SEQ ID NO: 3578024 - RNA, 19 nt, Human
gggauuccugacccaggcc

SEQ ID NO: 3578025 - RNA, 15 nt, Human
gggauucuuaaaguu

SEQ ID NO: 3578026 - RNA, 20 nt, Human
gggauucuuaaaguugaauu

SEQ ID NO: 3578027 - RNA, 18 nt, Human
gggauugauuuuaaaaug

SEQ ID NO: 3578028 - RNA, 19 nt, Human
gggauuuguccuuggggac

SEQ ID NO: 3578029 - RNA, 21 nt, Human
gggcaaaaaacucgaggacug

SEQ ID NO: 3578030 - RNA, 18 nt, Human
gggcaaacaccugcugau

SEQ ID NO: 3578031 - RNA, 12 nt, Human
gggcaaagccag

SEQ ID NO: 3578032 - RNA, 13 nt, Human
gggcaaagccagg

SEQ ID NO: 3578033 - RNA, 20 nt, Human
gggcaaagccaggucccucu

SEQ ID NO: 3578034 - RNA, 21 nt, Human
gggcaaaugacaugcacugac

SEQ ID NO: 3578035 - RNA, 22 nt, Human
gggcaaaugacaugcacugacc

SEQ ID NO: 3578036 - RNA, 16 nt, Human
gggcaaauuggagaaa

SEQ ID NO: 3578037 - RNA, 15 nt, Human
gggcaacgaagaaaa

SEQ ID NO: 3578038 - RNA, 17 nt, Human
gggcaacgaagaaaaaa

SEQ ID NO: 3578039 - RNA, 14 nt, Human
gggcaaggaaaaag

SEQ ID NO: 3578040 - RNA, 20 nt, Human
gggcaaggaaaaagaaaaua

SEQ ID NO: 3578041 - RNA, 13 nt, Human
gggcaaggagacc

SEQ ID NO: 3578042 - RNA, 24 nt, Human
gggcaagucccugacucucuguga

SEQ ID NO: 3578043 - RNA, 22 nt, Human
gggcaagucuuuaggucuuugu

SEQ ID NO: 3578044 - RNA, 21 nt, Human
gggcaauauaaccaauguuua

SEQ ID NO: 3578045 - RNA, 16 nt, Human
gggcacaaagggccca

SEQ ID NO: 3578046 - RNA, 13 nt, Human
gggcacacucugc

SEQ ID NO: 3578047 - RNA, 15 nt, Human
gggcacacucugcca

SEQ ID NO: 3578048 - RNA, 15 nt, Human
gggcacagcaucugu

SEQ ID NO: 3578049 - RNA, 13 nt, Human
gggcacaggagcu

SEQ ID NO: 3578050 - RNA, 14 nt, Human
gggcacaggagcua

SEQ ID NO: 3578051 - RNA, 15 nt, Human
gggcacaggagcuac

SEQ ID NO: 3578052 - RNA, 21 nt, Human
gggcacaggagcuaccugugu

SEQ ID NO: 3578053 - RNA, 18 nt, Human
gggcacaggaggcaggca

SEQ ID NO: 3578054 - RNA, 14 nt, Human
gggcacaggccaug

SEQ ID NO: 3578055 - RNA, 16 nt, Human
gggcacaggccaugga

SEQ ID NO: 3578056 - RNA, 14 nt, Human
gggcacagggccug

SEQ ID NO: 3578057 - RNA, 13 nt, Human
gggcacaggucag

SEQ ID NO: 3578058 - RNA, 15 nt, Human
gggcacaguccagga

SEQ ID NO: 3578059 - RNA, 23 nt, Human
gggcacaugcugagucucccaag

SEQ ID NO: 3578060 - RNA, 17 nt, Human
gggcaccaagcccacag

SEQ ID NO: 3578061 - RNA, 18 nt, Human
gggcacccccagccuggg

SEQ ID NO: 3578062 - RNA, 14 nt, Human
gggcaccggggccu

SEQ ID NO: 3578063 - RNA, 17 nt, Human
gggcacgcugugggcag

SEQ ID NO: 3578064 - RNA, 19 nt, Human
gggcacgugguugaguggg

SEQ ID NO: 3578065 - RNA, 17 nt, Human
gggcacugcucucaccu

SEQ ID NO: 3578066 - RNA, 13 nt, Human
gggcacugcuggg

SEQ ID NO: 3578067 - RNA, 21 nt, Human
gggcacugcuggguggcccau

SEQ ID NO: 3578068 - RNA, 14 nt, Human
gggcacuggcccag

SEQ ID NO: 3578069 - RNA, 14 nt, Human
gggcacugggcugu

SEQ ID NO: 3578070 - RNA, 16 nt, Human
gggcacugguggcccg

SEQ ID NO: 3578071 - RNA, 15 nt, Human
gggcacuucacagag

SEQ ID NO: 3578072 - RNA, 16 nt, Human
gggcacuucacagagu

SEQ ID NO: 3578073 - RNA, 17 nt, Human
gggcacuucacagagug

SEQ ID NO: 3578074 - RNA, 18 nt, Human
gggcacuucacagagugu

SEQ ID NO: 3578075 - RNA, 14 nt, Human
gggcagaagggaga

SEQ ID NO: 3578076 - RNA, 14 nt, Human
gggcagagaggcug

SEQ ID NO: 3578077 - RNA, 22 nt, Human
gggcagagcagagaccaucccu

SEQ ID NO: 3578078 - RNA, 23 nt, Human
gggcagagcagagaccaucccug

SEQ ID NO: 3578079 - RNA, 21 nt, Human
gggcagagcccccaggaagcc

SEQ ID NO: 3578080 - RNA, 14 nt, Human
gggcagagccggga

SEQ ID NO: 3578081 - RNA, 17 nt, Human
gggcagagcuggcucug

SEQ ID NO: 3578082 - RNA, 13 nt, Human
gggcagagcuggu

SEQ ID NO: 3578083 - RNA, 15 nt, Human
gggcagaggagaacu

SEQ ID NO: 3578084 - RNA, 21 nt, Human
gggcagaggagaacuugcugc

SEQ ID NO: 3578085 - RNA, 14 nt, Human
gggcagagggcaga

SEQ ID NO: 3578086 - RNA, 14 nt, Human
gggcagagggcugg

SEQ ID NO: 3578087 - RNA, 18 nt, Human
gggcagaucuuggacuca

SEQ ID NO: 3578088 - RNA, 16 nt, Human
gggcagcaauuuaaau

SEQ ID NO: 3578089 - RNA, 17 nt, Human
gggcagcagcagcccug

SEQ ID NO: 3578090 - RNA, 14 nt, Human
gggcagcagggcua

SEQ ID NO: 3578091 - RNA, 11 nt, Human
gggcagccagg

SEQ ID NO: 3578092 - RNA, 16 nt, Human
gggcagccaggcugcc

SEQ ID NO: 3578093 - RNA, 18 nt, Human
gggcagccagggagagcc

SEQ ID NO: 3578094 - RNA, 20 nt, Human
gggcagccagggagagccca

SEQ ID NO: 3578095 - RNA, 13 nt, Human
gggcagccccagg

SEQ ID NO: 3578096 - RNA, 14 nt, Human
gggcagcccuugcu

SEQ ID NO: 3578097 - RNA, 19 nt, Human
gggcagcccuugcuuguug

SEQ ID NO: 3578098 - RNA, 18 nt, Human
gggcagccuggcucccag

SEQ ID NO: 3578099 - RNA, 16 nt, Human
gggcagcgccaggcug

SEQ ID NO: 3578100 - RNA, 20 nt, Human
gggcagcgcccuuccucucc

SEQ ID NO: 3578101 - RNA, 21 nt, Human
gggcagcgcccuuccucucca

SEQ ID NO: 3578102 - RNA, 17 nt, Human
gggcagcuccucugucu

SEQ ID NO: 3578103 - RNA, 22 nt, Human
gggcagcuccucugucucgagc

SEQ ID NO: 3578104 - RNA, 15 nt, Human
gggcagcugcaggac

SEQ ID NO: 3578105 - RNA, 16 nt, Human
gggcagcugccagaga

SEQ ID NO: 3578106 - RNA, 18 nt, Human
gggcagcugccagagaag

SEQ ID NO: 3578107 - RNA, 13 nt, Human
gggcagcugccuc

SEQ ID NO: 3578108 - RNA, 20 nt, Human
gggcagcugccuccccuccu

SEQ ID NO: 3578109 - RNA, 18 nt, Human
gggcagcugggcccaacc

SEQ ID NO: 3578110 - RNA, 19 nt, Human
gggcagcuuagggcccugg

SEQ ID NO: 3578111 - RNA, 19 nt, Human
gggcagcuugccccggccc

SEQ ID NO: 3578112 - RNA, 16 nt, Human
gggcaggaaggagagc

SEQ ID NO: 3578113 - RNA, 13 nt, Human
gggcaggaccagc

SEQ ID NO: 3578114 - RNA, 18 nt, Human
gggcaggaccagcccacg

SEQ ID NO: 3578115 - RNA, 23 nt, Human
gggcaggacucagcuccccagag

SEQ ID NO: 3578116 - RNA, 18 nt, Human
gggcaggagggcccuacc

SEQ ID NO: 3578117 - RNA, 13 nt, Human
gggcaggcacagc

SEQ ID NO: 3578118 - RNA, 15 nt, Human
gggcaggcacagcac

SEQ ID NO: 3578119 - RNA, 13 nt, Human
gguuuuuuuccuu

SEQ ID NO: 3578120 - RNA, 23 nt, Human
guaaaaaaaaaugccuuugagac

SEQ ID NO: 3578121 - RNA, 13 nt, Human
guaaaaaaaccac

SEQ ID NO: 3578122 - RNA, 15 nt, Human
guaaaaacugaaguu

SEQ ID NO: 3578123 - RNA, 11 nt, Human
guaaaaagaaa

SEQ ID NO: 3578124 - RNA, 20 nt, Human
guaaaaauaaaauacuuuga

SEQ ID NO: 3578125 - RNA, 14 nt, Human
guaaaaauaaaauu

SEQ ID NO: 3578126 - RNA, 12 nt, Human
guaaaaauacaa

SEQ ID NO: 3578127 - RNA, 12 nt, Human
guaaaaaugaga

SEQ ID NO: 3578128 - RNA, 16 nt, Human
guaaaaaugagaacau

SEQ ID NO: 3578129 - RNA, 15 nt, Human
guaaaacaaaacaaa

SEQ ID NO: 3578130 - RNA, 11 nt, Human
guaaaacauuu

SEQ ID NO: 3578131 - RNA, 18 nt, Human
guaaaacauuuauuuuga

SEQ ID NO: 3578132 - RNA, 20 nt, Human
guaaaacauuuauuuugaca

SEQ ID NO: 3578133 - RNA, 21 nt, Human
guaaaacgcugucaaaaguug

SEQ ID NO: 3578134 - RNA, 18 nt, Human
guaaaacuuuauuuuaua

SEQ ID NO: 3578135 - RNA, 20 nt, Human
guaaaagaaaucauguccau

SEQ ID NO: 3578136 - RNA, 18 nt, Human
guaaaagaacaguaaaca

SEQ ID NO: 3578137 - RNA, 21 nt, Human
guaaaagacaguguauguaga

SEQ ID NO: 3578138 - RNA, 17 nt, Human
guaaaagauuaaacugc

SEQ ID NO: 3578139 - RNA, 12 nt, Human
guaaaagcaaaa

SEQ ID NO: 3578140 - RNA, 18 nt, Human
guaaaagcaaaaaagaaa

SEQ ID NO: 3578141 - RNA, 19 nt, Human
guaaaagcaaaaaagaaaa

SEQ ID NO: 3578142 - RNA, 22 nt, Human
guaaaaggccaaaccucuguuc

SEQ ID NO: 3578143 - RNA, 14 nt, Human
guaaaauaaaauua

SEQ ID NO: 3578144 - RNA, 15 nt, Human
guaaaauauagcugu

SEQ ID NO: 3578145 - RNA, 18 nt, Human
guaaaauauagcuguaca

SEQ ID NO: 3578146 - RNA, 20 nt, Human
guaaaauauagcuguacaaa

SEQ ID NO: 3578147 - RNA, 15 nt, Human
guaaaauauuuugaa

SEQ ID NO: 3578148 - RNA, 22 nt, Human
guaaaaucuugucauguguaua

SEQ ID NO: 3578149 - RNA, 14 nt, Human
guaaaaugaagaau

SEQ ID NO: 3578150 - RNA, 16 nt, Human
guaaaaugacaaucau

SEQ ID NO: 3578151 - RNA, 15 nt, Human
guaaaauggaggugg

SEQ ID NO: 3578152 - RNA, 14 nt, Human
guaaaauguauuau

SEQ ID NO: 3578153 - RNA, 18 nt, Human
guaaaauguauuuuucua

SEQ ID NO: 3578154 - RNA, 20 nt, Human
guaaaaugugaagugaauga

SEQ ID NO: 3578155 - RNA, 22 nt, Human
guaaaaugugaagugaaugaaa

SEQ ID NO: 3578156 - RNA, 15 nt, Human
guaaaauugccauau

SEQ ID NO: 3578157 - RNA, 18 nt, Human
guaaaauugccauauugc

SEQ ID NO: 3578158 - RNA, 19 nt, Human
guaaaauugccauauugca

SEQ ID NO: 3578159 - RNA, 20 nt, Human
guaaaauugccauauugcac

SEQ ID NO: 3578160 - RNA, 15 nt, Human
guaaaauuguauaga

SEQ ID NO: 3578161 - RNA, 13 nt, Human
guaaaauuuauuu

SEQ ID NO: 3578162 - RNA, 17 nt, Human
guaaacaaaauuuaguu

SEQ ID NO: 3578163 - RNA, 23 nt, Human
guaaacaaaauuuaguuuuuguu

SEQ ID NO: 3578164 - RNA, 20 nt, Human
guaaacaaacuguguaacug

SEQ ID NO: 3578165 - RNA, 19 nt, Human
guaaacacagucaaaauaa

SEQ ID NO: 3578166 - RNA, 13 nt, Human
guaaacacaucua

SEQ ID NO: 3578167 - RNA, 22 nt, Human
guaaacacgccugcaaacgcug

SEQ ID NO: 3578168 - RNA, 15 nt, Human
guaaacacucagcug

SEQ ID NO: 3578169 - RNA, 20 nt, Human
guaaacagauggcacuuuga

SEQ ID NO: 3578170 - RNA, 15 nt, Human
guaaacagugccugc

SEQ ID NO: 3578171 - RNA, 23 nt, Human
guaaacauaauucuuguauauua

SEQ ID NO: 3578172 - RNA, 19 nt, Human
guaaacauaccaacauguu

SEQ ID NO: 3578173 - RNA, 18 nt, Human
guaaaccacugaaaaaau

SEQ ID NO: 3578174 - RNA, 22 nt, Human
guaaaccccuuuaguggcuuca

SEQ ID NO: 3578175 - RNA, 14 nt, Human
guaaaccugucuga

SEQ ID NO: 3578176 - RNA, 13 nt, Human
guaaaccuuuuau

SEQ ID NO: 3578177 - RNA, 21 nt, Human
guaaacguuucaguaauaaaa

SEQ ID NO: 3578178 - RNA, 23 nt, Human
guaaacguuucaguaauaaaaca

SEQ ID NO: 3578179 - RNA, 23 nt, Human
guaaacuaaugaguuucuuuuau

SEQ ID NO: 3578180 - RNA, 15 nt, Human
guaaacuauuuaucu

SEQ ID NO: 3578181 - RNA, 17 nt, Human
guaaacuggaauuaaaa

SEQ ID NO: 3578182 - RNA, 20 nt, Human
guaaacuguguauuccaaga

SEQ ID NO: 3578183 - RNA, 13 nt, Human
guaaacuguuucu

SEQ ID NO: 3578184 - RNA, 17 nt, Human
guaaacuuuaucacuua

SEQ ID NO: 3578185 - RNA, 14 nt, Human
guaaagaaaaauau

SEQ ID NO: 3578186 - RNA, 15 nt, Human
guaaagaaaaauauu

SEQ ID NO: 3578187 - RNA, 16 nt, Human
guaaagaaagagagaa

SEQ ID NO: 3578188 - RNA, 20 nt, Human
guaaagaaagagagaaaaua

SEQ ID NO: 3578189 - RNA, 13 nt, Human
guaaagaaauguc

SEQ ID NO: 3578190 - RNA, 22 nt, Human
guaaagaacugcacaugaagaa

SEQ ID NO: 3578191 - RNA, 17 nt, Human
guaaagaacuuuuucuu

SEQ ID NO: 3578192 - RNA, 13 nt, Human
guaaagaauuauu

SEQ ID NO: 3578193 - RNA, 14 nt, Human
guaaagaauuauuu

SEQ ID NO: 3578194 - RNA, 19 nt, Human
guaaagacuggcuuuuauu

SEQ ID NO: 3578195 - RNA, 18 nt, Human
guaaagacugguuuucug

SEQ ID NO: 3578196 - RNA, 19 nt, Human
guaaagauauuuuuaucuu

SEQ ID NO: 3578197 - RNA, 16 nt, Human
guaaagauuucuguuc

SEQ ID NO: 3578198 - RNA, 19 nt, Human
guaaagcaaccaaaaagaa

SEQ ID NO: 3578199 - RNA, 12 nt, Human
guaaagccaugc

SEQ ID NO: 3578200 - RNA, 20 nt, Human
guaaagcuaaaaugauuuua

SEQ ID NO: 3578201 - RNA, 20 nt, Human
guaaagcuauuuaugggccc

SEQ ID NO: 3578202 - RNA, 23 nt, Human
guaaagcuauuuaugggccccug

SEQ ID NO: 3578203 - RNA, 23 nt, Human
guaaagguuuauuuuucuguuac

SEQ ID NO: 3578204 - RNA, 14 nt, Human
guaaaguacuugua

SEQ ID NO: 3578205 - RNA, 16 nt, Human
guaaaguacuuguagu

SEQ ID NO: 3578206 - RNA, 22 nt, Human
guaaaguauguauuauuuacau

SEQ ID NO: 3578207 - RNA, 15 nt, Human
guaaagucaaggaga

SEQ ID NO: 3578208 - RNA, 23 nt, Human
guaaaguccccagagaaagcgca

SEQ ID NO: 3578209 - RNA, 20 nt, Human
guaaaguccuuuucuugcuu

SEQ ID NO: 3578210 - RNA, 18 nt, Human
guaaaguugguuggauaa

SEQ ID NO: 3578211 - RNA, 14 nt, Human
guaaauaaaccacu

SEQ ID NO: 3578212 - RNA, 13 nt, Human
guaaauaaagccc

SEQ ID NO: 3578213 - RNA, 14 nt, Human
guaaauaaauuguu

SEQ ID NO: 3578214 - RNA, 11 nt, Human
guaaauaagag

SEQ ID NO: 3578215 - RNA, 13 nt, Human
guaaauaagagau

SEQ ID NO: 3578216 - RNA, 16 nt, Human
guaaauaagagauuug

SEQ ID NO: 3578217 - RNA, 16 nt, Human
guaaauaaugcuuuga

SEQ ID NO: 3578218 - RNA, 22 nt, Human
guaaauacaauuuuguuucugu

SEQ ID NO: 3578219 - RNA, 19 nt, Human
guaaauacacaacacacac

SEQ ID NO: 3578220 - RNA, 14 nt, Human
guaaauacagguag

SEQ ID NO: 3578221 - RNA, 16 nt, Human
guaaauacaugcauau

SEQ ID NO: 3578222 - RNA, 11 nt, Human
guaaauauaaa

SEQ ID NO: 3578223 - RNA, 12 nt, Human
guaaauauaaag

SEQ ID NO: 3578224 - RNA, 13 nt, Human
guaaauauaaaga

SEQ ID NO: 3578225 - RNA, 14 nt, Human
guaaauauaaagac

SEQ ID NO: 3578226 - RNA, 23 nt, Human
guaaauauaaagacguuuuauaa

SEQ ID NO: 3578227 - RNA, 19 nt, Human
guaaauauugaggcuuugu

SEQ ID NO: 3578228 - RNA, 11 nt, Human
guaaauauuua

SEQ ID NO: 3578229 - RNA, 17 nt, Human
guaaaucacauccuuau

SEQ ID NO: 3578230 - RNA, 18 nt, Human
guaaaucagauguugaau

SEQ ID NO: 3578231 - RNA, 17 nt, Human
guaaaucaguaagaggu

SEQ ID NO: 3578232 - RNA, 15 nt, Human
guaaaucccauuauu

SEQ ID NO: 3578233 - RNA, 17 nt, Human
guaaaucccauuauuca

SEQ ID NO: 3578234 - RNA, 19 nt, Human
guaaaucccauuauucaaa

SEQ ID NO: 3578235 - RNA, 19 nt, Human
guaaauccugccauuuaaa

SEQ ID NO: 3578236 - RNA, 15 nt, Human
guaaauccuuuuucu

SEQ ID NO: 3578237 - RNA, 22 nt, Human
guaaauccuuuuucuuuauaaa

SEQ ID NO: 3578238 - RNA, 20 nt, Human
guaaaucuaacauuauuacu

SEQ ID NO: 3578239 - RNA, 14 nt, Human
guaaaucugccaca

SEQ ID NO: 3578240 - RNA, 15 nt, Human
guaaaucugccacaa

SEQ ID NO: 3578241 - RNA, 22 nt, Human
guaaauggcuuauccagcuggu

SEQ ID NO: 3578242 - RNA, 17 nt, Human
guaaaugucucacugag

SEQ ID NO: 3578243 - RNA, 12 nt, Human
guaaauguguac

SEQ ID NO: 3578244 - RNA, 20 nt, Human
guaaauguguuggacaaaug

SEQ ID NO: 3578245 - RNA, 16 nt, Human
guaaauguuauuucug

SEQ ID NO: 3578246 - RNA, 11 nt, Human
guaaauguuuc

SEQ ID NO: 3578247 - RNA, 13 nt, Human
guaaauguuucuu

SEQ ID NO: 3578248 - RNA, 20 nt, Human
guaaauuauauuugugcuau

SEQ ID NO: 3578249 - RNA, 14 nt, Human
guaaauuauucagu

SEQ ID NO: 3578250 - RNA, 13 nt, Human
guaaauucugauu

SEQ ID NO: 3578251 - RNA, 19 nt, Human
guaaauugaaucaguauaa

SEQ ID NO: 3578252 - RNA, 19 nt, Human
guaaauuggcauggaaauu

SEQ ID NO: 3578253 - RNA, 23 nt, Human
guaaauuuccccaacagugugaa

SEQ ID NO: 3578254 - RNA, 18 nt, Human
guaaauuuuguaugaaaa

SEQ ID NO: 3578255 - RNA, 15 nt, Human
guaacaagaaaacau

SEQ ID NO: 3578256 - RNA, 16 nt, Human
guaacaagaaaggaga

SEQ ID NO: 3578257 - RNA, 14 nt, Human
guaacaagagugau

SEQ ID NO: 3578258 - RNA, 16 nt, Human
guaacaagccacccca

SEQ ID NO: 3578259 - RNA, 14 nt, Human
guaacaauacaaau

SEQ ID NO: 3578260 - RNA, 21 nt, Human
guaacaauuguguagccuuuu

SEQ ID NO: 3578261 - RNA, 17 nt, Human
guaacacaagccacaga

SEQ ID NO: 3578262 - RNA, 20 nt, Human
guaacacaagccacagaagc

SEQ ID NO: 3578263 - RNA, 22 nt, Human
guaacacagugccuucaauaaa

SEQ ID NO: 3578264 - RNA, 20 nt, Human
guaauuaaguacuauguauc

SEQ ID NO: 3578265 - RNA, 13 nt, Human
guaauuauaucug

SEQ ID NO: 3578266 - RNA, 14 nt, Human
guaauuaugauuug

SEQ ID NO: 3578267 - RNA, 21 nt, Human
guaauuaugcacuaaauauga

SEQ ID NO: 3578268 - RNA, 23 nt, Human
guaauuauuuauguauggugcaa

SEQ ID NO: 3578269 - RNA, 17 nt, Human
guaauuauuuugguacu

SEQ ID NO: 3578270 - RNA, 14 nt, Human
guaauucaagaaaa

SEQ ID NO: 3578271 - RNA, 21 nt, Human
guaauuccucucacuaaacuu

SEQ ID NO: 3578272 - RNA, 14 nt, Human
guaauucuaaauga

SEQ ID NO: 3578273 - RNA, 16 nt, Human
guaauucuuauuccau

SEQ ID NO: 3578274 - RNA, 17 nt, Human
guaauugcuuacauuuu

SEQ ID NO: 3578275 - RNA, 23 nt, Human
guaauugcuuacauuuuuacaau

SEQ ID NO: 3578276 - RNA, 23 nt, Human
guaauuguuguuuguauguauaa

SEQ ID NO: 3578277 - RNA, 21 nt, Human
guaauuuaaaauaauuauaua

SEQ ID NO: 3578278 - RNA, 16 nt, Human
guaauuuaaacaggcc

SEQ ID NO: 3578279 - RNA, 14 nt, Human
guaauuucuuugcc

SEQ ID NO: 3578280 - RNA, 23 nt, Human
guaauuugagagaaauaugaaga

SEQ ID NO: 3578281 - RNA, 18 nt, Human
guaauuuggaucucuucu

SEQ ID NO: 3578282 - RNA, 14 nt, Human
guaauuuguaucug

SEQ ID NO: 3578283 - RNA, 15 nt, Human
guaauuuguaucuga

SEQ ID NO: 3578284 - RNA, 20 nt, Human
guaauuuguguaauaaagug

SEQ ID NO: 3578285 - RNA, 22 nt, Human
guaauuuguguaauaaaguguu

SEQ ID NO: 3578286 - RNA, 20 nt, Human
guaauuuuaugagcugugag

SEQ ID NO: 3578287 - RNA, 14 nt, Human
guaauuuuggauuu

SEQ ID NO: 3578288 - RNA, 20 nt, Human
guaauuuuguguaagaaaua

SEQ ID NO: 3578289 - RNA, 13 nt, Human
guaauuuuucugu

SEQ ID NO: 3578290 - RNA, 15 nt, Human
guaauuuuucuguau

SEQ ID NO: 3578291 - RNA, 21 nt, Human
guaauuuuucuguauagacag

SEQ ID NO: 3578292 - RNA, 22 nt, Human
guacaaaaaauucagugaugug

SEQ ID NO: 3578293 - RNA, 12 nt, Human
guacaaaauaaa

SEQ ID NO: 3578294 - RNA, 21 nt, Human
guacaaaauaaaguuacauug

SEQ ID NO: 3578295 - RNA, 20 nt, Human
guacaaauaaagucccaggu

SEQ ID NO: 3578296 - RNA, 22 nt, Human
guacaaaugccuuaaaauggaa

SEQ ID NO: 3578297 - RNA, 23 nt, Human
guacaaccacacccacacucaga

SEQ ID NO: 3578298 - RNA, 15 nt, Human
guacaagaucucagg

SEQ ID NO: 3578299 - RNA, 17 nt, Human
guacaaguaguucugua

SEQ ID NO: 3578300 - RNA, 11 nt, Human
guacaauaaaa

SEQ ID NO: 3578301 - RNA, 18 nt, Human
guacaauauuuaaaauuu

SEQ ID NO: 3578302 - RNA, 14 nt, Human
guacaauauuuuaa

SEQ ID NO: 3578303 - RNA, 17 nt, Human
guacaauauuuuaagca

SEQ ID NO: 3578304 - RNA, 18 nt, Human
guacaauauuuuaagcau

SEQ ID NO: 3578305 - RNA, 24 nt, Human
guacaauauuuuaagcauuacucu

SEQ ID NO: 3578306 - RNA, 20 nt, Human
guacaaugacuuuauugcau

SEQ ID NO: 3578307 - RNA, 21 nt, Human
guacaaugacuuuauugcauc

SEQ ID NO: 3578308 - RNA, 17 nt, Human
guacaauguguuuuucu

SEQ ID NO: 3578309 - RNA, 21 nt, Human
guacaauugugggcauaaacu

SEQ ID NO: 3578310 - RNA, 14 nt, Human
guacacacuuuauu

SEQ ID NO: 3578311 - RNA, 15 nt, Human
guacacagacuauug

SEQ ID NO: 3578312 - RNA, 14 nt, Human
guacacauaagcca

SEQ ID NO: 3578313 - RNA, 17 nt, Human
guacacccaugaaagaa

SEQ ID NO: 3578314 - RNA, 15 nt, Human
guacaccccaccucu

SEQ ID NO: 3578315 - RNA, 14 nt, Human
guacacguguccug

SEQ ID NO: 3578316 - RNA, 17 nt, Human
guacacguguccuguag

SEQ ID NO: 3578317 - RNA, 13 nt, Human
guacacucugcug

SEQ ID NO: 3578318 - RNA, 19 nt, Human
guacacuguuucaaacuuu

SEQ ID NO: 3578319 - RNA, 20 nt, Human
guacacuguuucaaacuuua

SEQ ID NO: 3578320 - RNA, 12 nt, Human
guacacuuuuuu

SEQ ID NO: 3578321 - RNA, 18 nt, Human
guacagaauuugaauuau

SEQ ID NO: 3578322 - RNA, 15 nt, Human
guacagacagaaaaa

SEQ ID NO: 3578323 - RNA, 16 nt, Human
guacagacuuguugug

SEQ ID NO: 3578324 - RNA, 11 nt, Human
guacagagaag

SEQ ID NO: 3578325 - RNA, 13 nt, Human
guacagagaagcc

SEQ ID NO: 3578326 - RNA, 21 nt, Human
guacagagaagccagcuuguu

SEQ ID NO: 3578327 - RNA, 17 nt, Human
guacagagaagccauca

SEQ ID NO: 3578328 - RNA, 22 nt, Human
guacagagcccacgcccccacu

SEQ ID NO: 3578329 - RNA, 23 nt, Human
guacagcccagaggccaacacug

SEQ ID NO: 3578330 - RNA, 12 nt, Human
guacagcuggcu

SEQ ID NO: 3578331 - RNA, 14 nt, Human
guacagcuggcucu

SEQ ID NO: 3578332 - RNA, 23 nt, Human
guacaguauggggguuguaaauu

SEQ ID NO: 3578333 - RNA, 12 nt, Human
guacagucuguc

SEQ ID NO: 3578334 - RNA, 14 nt, Human
guacagucugucau

SEQ ID NO: 3578335 - RNA, 13 nt, Human
guacagucugucu

SEQ ID NO: 3578336 - RNA, 14 nt, Human
guacagucugucuu

SEQ ID NO: 3578337 - RNA, 19 nt, Human
guacagucugucuucugua

SEQ ID NO: 3578338 - RNA, 20 nt, Human
guacagucugucuucuguau

SEQ ID NO: 3578339 - RNA, 19 nt, Human
guacagucuugcagcagga

SEQ ID NO: 3578340 - RNA, 14 nt, Human
guacagucuuguau

SEQ ID NO: 3578341 - RNA, 16 nt, Human
guacagucuuguauua

SEQ ID NO: 3578342 - RNA, 20 nt, Human
guacaguuaucuaaguuaau

SEQ ID NO: 3578343 - RNA, 14 nt, Human
guacaguucaguuc

SEQ ID NO: 3578344 - RNA, 16 nt, Human
guacaguucuucggga

SEQ ID NO: 3578345 - RNA, 23 nt, Human
guacaguucuucgggaagagagg

SEQ ID NO: 3578346 - RNA, 14 nt, Human
guacaguuugcugu

SEQ ID NO: 3578347 - RNA, 16 nt, Human
guacaguuugcuguac

SEQ ID NO: 3578348 - RNA, 14 nt, Human
guacaguuuuauuu

SEQ ID NO: 3578349 - RNA, 16 nt, Human
guacauaaaagaauuu

SEQ ID NO: 3578350 - RNA, 23 nt, Human
guacauaaauugcauaaagcaua

SEQ ID NO: 3578351 - RNA, 14 nt, Human
guacauaacugaaa

SEQ ID NO: 3578352 - RNA, 15 nt, Human
guacauaauacugaa

SEQ ID NO: 3578353 - RNA, 16 nt, Human
guacauaauacugaac

SEQ ID NO: 3578354 - RNA, 14 nt, Human
guacauagccuaua

SEQ ID NO: 3578355 - RNA, 22 nt, Human
guacauagugcuaacaugaaga

SEQ ID NO: 3578356 - RNA, 17 nt, Human
guacauaguuauuuauu

SEQ ID NO: 3578357 - RNA, 17 nt, Human
guacauauguaaacaua

SEQ ID NO: 3578358 - RNA, 22 nt, Human
guacauauuagcgacaacagau

SEQ ID NO: 3578359 - RNA, 17 nt, Human
guacauauuuguggaau

SEQ ID NO: 3578360 - RNA, 19 nt, Human
guacauauuuguggaauaa

SEQ ID NO: 3578361 - RNA, 20 nt, Human
guacaucuauuuuggauugu

SEQ ID NO: 3578362 - RNA, 14 nt, Human
guacaucuggcuua

SEQ ID NO: 3578363 - RNA, 16 nt, Human
guacaucuggcuuauu

SEQ ID NO: 3578364 - RNA, 18 nt, Human
guacaucuggcuuauuuu

SEQ ID NO: 3578365 - RNA, 19 nt, Human
guacaucuggcuuauuuua

SEQ ID NO: 3578366 - RNA, 23 nt, Human
guacaucuggcuuauuuuaaugu

SEQ ID NO: 3578367 - RNA, 20 nt, Human
guacaugaaauuuuuguaaa

SEQ ID NO: 3578368 - RNA, 12 nt, Human
guacaugggacu

SEQ ID NO: 3578369 - RNA, 22 nt, Human
guacaugggacuaugcuuuucu

SEQ ID NO: 3578370 - RNA, 17 nt, Human
guacauggugcugggag

SEQ ID NO: 3578371 - RNA, 10 nt, Human
guacauguau

SEQ ID NO: 3578372 - RNA, 13 nt, Human
guacauguauuaa

SEQ ID NO: 3578373 - RNA, 16 nt, Human
guacauguauuaaauu

SEQ ID NO: 3578374 - RNA, 20 nt, Human
guacauguguagccugugca

SEQ ID NO: 3578375 - RNA, 13 nt, Human
guacauuuauaau

SEQ ID NO: 3578376 - RNA, 22 nt, Human
guacauuugggaguuuuuauga

SEQ ID NO: 3578377 - RNA, 20 nt, Human
guaccaaaauuuuaaaaaag

SEQ ID NO: 3578378 - RNA, 16 nt, Human
guaccaaaugcuuuaa

SEQ ID NO: 3578379 - RNA, 14 nt, Human
guaccaagaaagga

SEQ ID NO: 3578380 - RNA, 14 nt, Human
guaccaaucauuuu

SEQ ID NO: 3578381 - RNA, 15 nt, Human
guaccaaucauuuua

SEQ ID NO: 3578382 - RNA, 15 nt, Human
guaccaccaaaaaag

SEQ ID NO: 3578383 - RNA, 17 nt, Human
guaccacugaaucugua

SEQ ID NO: 3578384 - RNA, 16 nt, Human
guaccagauaaaauua

SEQ ID NO: 3578385 - RNA, 17 nt, Human
guaccagaugcagcuca

SEQ ID NO: 3578386 - RNA, 16 nt, Human
guaccagcaauaugua

SEQ ID NO: 3578387 - RNA, 22 nt, Human
guaccagcgcucuaaaagcacc

SEQ ID NO: 3578388 - RNA, 23 nt, Human
guaccaggaaaggauuuuauaau

SEQ ID NO: 3578389 - RNA, 21 nt, Human
guaccagguauuauuaucuuu

SEQ ID NO: 3578390 - RNA, 19 nt, Human
guaccaggucuccuccacc

SEQ ID NO: 3578391 - RNA, 15 nt, Human
guaccagugaauuuu

SEQ ID NO: 3578392 - RNA, 16 nt, Human
guaccagugaauuuuu

SEQ ID NO: 3578393 - RNA, 19 nt, Human
guaccagugaauuuuugca

SEQ ID NO: 3578394 - RNA, 22 nt, Human
guaccagugaauuuuugcaaua

SEQ ID NO: 3578395 - RNA, 10 nt, Human
guaccaguua

SEQ ID NO: 3578396 - RNA, 23 nt, Human
guaccaguuaauuuuuccaacua

SEQ ID NO: 3578397 - RNA, 20 nt, Human
guaccauaguaccauuuaua

SEQ ID NO: 3578398 - RNA, 16 nt, Human
guaccauuaaaauaug

SEQ ID NO: 3578399 - RNA, 17 nt, Human
guaccauuaaaauaugc

SEQ ID NO: 3578400 - RNA, 14 nt, Human
guaccauuugcaug

SEQ ID NO: 3578401 - RNA, 13 nt, Human
guaccauuuuaaa

SEQ ID NO: 3578402 - RNA, 19 nt, Human
guacccaccgggccacucc

SEQ ID NO: 3578403 - RNA, 16 nt, Human
guacccaccugagcuu

SEQ ID NO: 3578404 - RNA, 22 nt, Human
guaccccacccucagcaccccu

SEQ ID NO: 3578405 - RNA, 14 nt, Human
guaccccccaaccc

SEQ ID NO: 3578406 - RNA, 13 nt, Human
guacccugggugu

SEQ ID NO: 3578407 - RNA, 15 nt, Human
guaccgcaaugugac

SEQ ID NO: 3578408 - RNA, 17 nt, Human
guaccuagcuggcucug

SEQ ID NO: 3578409 - RNA, 20 nt, Human
guagacgugcacgcacacug

SEQ ID NO: 3578410 - RNA, 23 nt, Human
guagacgugcacgcacacugucu

SEQ ID NO: 3578411 - RNA, 14 nt, Human
guagacuacuguuc

SEQ ID NO: 3578412 - RNA, 15 nt, Human
guagagauggaggag

SEQ ID NO: 3578413 - RNA, 16 nt, Human
guagagauggaggagg

SEQ ID NO: 3578414 - RNA, 14 nt, Human
guagagccagcuug

SEQ ID NO: 3578415 - RNA, 23 nt, Human
guagagcccuguaucaacccaga

SEQ ID NO: 3578416 - RNA, 14 nt, Human
guagaggcuuguuu

SEQ ID NO: 3578417 - RNA, 15 nt, Human
guagagguacacuug

SEQ ID NO: 3578418 - RNA, 17 nt, Human
guagagguacacuugug

SEQ ID NO: 3578419 - RNA, 17 nt, Human
guagaguuaagaagcug

SEQ ID NO: 3578420 - RNA, 19 nt, Human
guagaguugaucaaaauca

SEQ ID NO: 3578421 - RNA, 20 nt, Human
guagaguuugaaggagguga

SEQ ID NO: 3578422 - RNA, 17 nt, Human
guagauacaaucagcug

SEQ ID NO: 3578423 - RNA, 14 nt, Human
guagauagaaauaa

SEQ ID NO: 3578424 - RNA, 21 nt, Human
guagauauccucugcuuaaaa

SEQ ID NO: 3578425 - RNA, 21 nt, Human
guagauauuuggcuuaaauau

SEQ ID NO: 3578426 - RNA, 22 nt, Human
guagaugaaaaagcauguacag

SEQ ID NO: 3578427 - RNA, 15 nt, Human
guagaugcgcagccc

SEQ ID NO: 3578428 - RNA, 21 nt, Human
guagaugggagggaggcucag

SEQ ID NO: 3578429 - RNA, 20 nt, Human
guagauguaugcacacacau

SEQ ID NO: 3578430 - RNA, 18 nt, Human
guagauucagguaauaca

SEQ ID NO: 3578431 - RNA, 22 nt, Human
guagauuccauuuacugcauuc

SEQ ID NO: 3578432 - RNA, 12 nt, Human
guagauuuauuu

SEQ ID NO: 3578433 - RNA, 21 nt, Human
guagauuuauuucaucauauu

SEQ ID NO: 3578434 - RNA, 12 nt, Human
guagauuugauu

SEQ ID NO: 3578435 - RNA, 18 nt, Human
guagcaaacccugucaaa

SEQ ID NO: 3578436 - RNA, 21 nt, Human
guagcaaacccugucaaacau

SEQ ID NO: 3578437 - RNA, 21 nt, Human
guagcaaucagauuuuccugu

SEQ ID NO: 3578438 - RNA, 23 nt, Human
guagcacaaguuauuuaaaucug

SEQ ID NO: 3578439 - RNA, 20 nt, Human
guagcacaggcugagugcag

SEQ ID NO: 3578440 - RNA, 14 nt, Human
guagcacucaggcu

SEQ ID NO: 3578441 - RNA, 17 nt, Human
guagcagaguuaaaucu

SEQ ID NO: 3578442 - RNA, 12 nt, Human
guagcagcugga

SEQ ID NO: 3578443 - RNA, 13 nt, Human
guagcagcuggac

SEQ ID NO: 3578444 - RNA, 15 nt, Human
guagcagggaaaaua

SEQ ID NO: 3578445 - RNA, 15 nt, Human
guagcauuacagugg

SEQ ID NO: 3578446 - RNA, 13 nt, Human
guagcauuuuaaa

SEQ ID NO: 3578447 - RNA, 19 nt, Human
guagccagcacacagggca

SEQ ID NO: 3578448 - RNA, 19 nt, Human
guagccagggggacuagcc

SEQ ID NO: 3578449 - RNA, 23 nt, Human
guagccaggguguggcccugcca

SEQ ID NO: 3578450 - RNA, 18 nt, Human
guagccagguauggcucu

SEQ ID NO: 3578451 - RNA, 20 nt, Human
guagccaggucccccugcag

SEQ ID NO: 3578452 - RNA, 20 nt, Human
guagccaucccaugaacaca

SEQ ID NO: 3578453 - RNA, 23 nt, Human
guagccccaagaaggcuggggcu

SEQ ID NO: 3578454 - RNA, 15 nt, Human
guagccccagugaca

SEQ ID NO: 3578455 - RNA, 19 nt, Human
guagccccagugacagcua

SEQ ID NO: 3578456 - RNA, 18 nt, Human
guagcccccuggccucug

SEQ ID NO: 3578457 - RNA, 20 nt, Human
guagcccgccugccaguccu

SEQ ID NO: 3578458 - RNA, 17 nt, Human
guagcccuggccagagg

SEQ ID NO: 3578459 - RNA, 12 nt, Human
guagccugugca

SEQ ID NO: 3578460 - RNA, 13 nt, Human
guagcguuuuuua

SEQ ID NO: 3578461 - RNA, 13 nt, Human
guagcuacagaga

SEQ ID NO: 3578462 - RNA, 12 nt, Human
guagcuccuccc

SEQ ID NO: 3578463 - RNA, 19 nt, Human
guagcucuuugucagggag

SEQ ID NO: 3578464 - RNA, 11 nt, Human
guagcugagcu

SEQ ID NO: 3578465 - RNA, 13 nt, Human
guagcugagcuca

SEQ ID NO: 3578466 - RNA, 16 nt, Human
guagcugcaaaaauaa

SEQ ID NO: 3578467 - RNA, 21 nt, Human
guagcugggacuacaggcacc

SEQ ID NO: 3578468 - RNA, 18 nt, Human
guagcugggauuacaggc

SEQ ID NO: 3578469 - RNA, 16 nt, Human
guagcugggauuuuaa

SEQ ID NO: 3578470 - RNA, 15 nt, Human
guagcugugaccugc

SEQ ID NO: 3578471 - RNA, 20 nt, Human
guagcugugaccugcugagc

SEQ ID NO: 3578472 - RNA, 22 nt, Human
guagcuuaccugacacaagagg

SEQ ID NO: 3578473 - RNA, 21 nt, Human
guagcuucagucauuaaauua

SEQ ID NO: 3578474 - RNA, 19 nt, Human
guaggaaaaauaaaaacag

SEQ ID NO: 3578475 - RNA, 18 nt, Human
guaggaacgguaaauuuc

SEQ ID NO: 3578476 - RNA, 21 nt, Human
guaggaacgguaaauuucugu

SEQ ID NO: 3578477 - RNA, 17 nt, Human
guaggaagaguagcauu

SEQ ID NO: 3578478 - RNA, 17 nt, Human
guaggaagguacuguau

SEQ ID NO: 3578479 - RNA, 22 nt, Human
guaggaagguacuguaugauca

SEQ ID NO: 3578480 - RNA, 18 nt, Human
guaggaagguuaauguuc

SEQ ID NO: 3578481 - RNA, 21 nt, Human
guaggaauauuauauuuggau

SEQ ID NO: 3578482 - RNA, 22 nt, Human
guaggacuuuggugguuuaaaa

SEQ ID NO: 3578483 - RNA, 19 nt, Human
guaggagacuguuuggaaa

SEQ ID NO: 3578484 - RNA, 17 nt, Human
guaggaggaugggcucg

SEQ ID NO: 3578485 - RNA, 21 nt, Human
guaggagggacugucgcugcu

SEQ ID NO: 3578486 - RNA, 15 nt, Human
guaggaguucuauuu

SEQ ID NO: 3578487 - RNA, 14 nt, Human
guaggauaugccug

SEQ ID NO: 3578488 - RNA, 22 nt, Human
guaggauaugccugcucuuugg

SEQ ID NO: 3578489 - RNA, 17 nt, Human
guaggaucuaaggcugu

SEQ ID NO: 3578490 - RNA, 13 nt, Human
guaggauuacuag

SEQ ID NO: 3578491 - RNA, 14 nt, Human
guaggauuuuuguu

SEQ ID NO: 3578492 - RNA, 13 nt, Human
guaggcagagccu

SEQ ID NO: 3578493 - RNA, 12 nt, Human
guaggccaaggu

SEQ ID NO: 3578494 - RNA, 20 nt, Human
guaggccaagguguccuaca

SEQ ID NO: 3578495 - RNA, 20 nt, Human
guaggccuuuuaacauuuug

SEQ ID NO: 3578496 - RNA, 14 nt, Human
guaggcuacagaga

SEQ ID NO: 3578497 - RNA, 16 nt, Human
guaggcuacagagaag

SEQ ID NO: 3578498 - RNA, 19 nt, Human
guaggcuacagagaagccu

SEQ ID NO: 3578499 - RNA, 21 nt, Human
guaggcuacagagaagccuuc

SEQ ID NO: 3578500 - RNA, 22 nt, Human
guaggcuacagagaagccuuca

SEQ ID NO: 3578501 - RNA, 23 nt, Human
guaggcuccugccaguguggaac

SEQ ID NO: 3578502 - RNA, 13 nt, Human
guagggaggcagc

SEQ ID NO: 3578503 - RNA, 15 nt, Human
guagggaguuguggg

SEQ ID NO: 3578504 - RNA, 21 nt, Human
guagggcugccaccaagguga

SEQ ID NO: 3578505 - RNA, 13 nt, Human
guaggggaagaau

SEQ ID NO: 3578506 - RNA, 22 nt, Human
guaggggagggguugccacagg

SEQ ID NO: 3578507 - RNA, 13 nt, Human
guaggggccccuc

SEQ ID NO: 3578508 - RNA, 15 nt, Human
guaggggcugggaac

SEQ ID NO: 3578509 - RNA, 16 nt, Human
guaggggcugggaaca

SEQ ID NO: 3578510 - RNA, 18 nt, Human
guaggggcuuagaggcau

SEQ ID NO: 3578511 - RNA, 19 nt, Human
guagggggcuggaggagcc

SEQ ID NO: 3578512 - RNA, 20 nt, Human
guagggggcuggaggagccc

SEQ ID NO: 3578513 - RNA, 12 nt, Human
guagggugggag

SEQ ID NO: 3578514 - RNA, 22 nt, Human
guagggugggccuucagggagu

SEQ ID NO: 3578515 - RNA, 14 nt, Human
guagguaaaaugua

SEQ ID NO: 3578516 - RNA, 20 nt, Human
guagguaaaauguauuuuuc

SEQ ID NO: 3578517 - RNA, 13 nt, Human
guagguaagacug

SEQ ID NO: 3578518 - RNA, 23 nt, Human
guagguaucauuuucugcauuua

SEQ ID NO: 3578519 - RNA, 21 nt, Human
guagguuauuaugauuagcuu

SEQ ID NO: 3578520 - RNA, 15 nt, Human
guagguucagccaag

SEQ ID NO: 3578521 - RNA, 16 nt, Human
guagguucagccaagg

SEQ ID NO: 3578522 - RNA, 19 nt, Human
guaguaaaaauuaaaaaaa

SEQ ID NO: 3578523 - RNA, 15 nt, Human
guaguaaaacacaga

SEQ ID NO: 3578524 - RNA, 17 nt, Human
guaguaaaacacagagg

SEQ ID NO: 3578525 - RNA, 15 nt, Human
guaguaauugacaug

SEQ ID NO: 3578526 - RNA, 15 nt, Human
guaguaccaaaauaa

SEQ ID NO: 3578527 - RNA, 16 nt, Human
guaguaccaaaauaaa

SEQ ID NO: 3578528 - RNA, 21 nt, Human
guaguacuccugcaaaauuuu

SEQ ID NO: 3578529 - RNA, 17 nt, Human
guaguagcccuuucugu

SEQ ID NO: 3578530 - RNA, 16 nt, Human
guaguauaaagaaaag

SEQ ID NO: 3578531 - RNA, 14 nt, Human
guaguaucaaauau

SEQ ID NO: 3578532 - RNA, 22 nt, Human
guaguaugauagguuauuuuga

SEQ ID NO: 3578533 - RNA, 20 nt, Human
guaguauuuuuuguauaauu

SEQ ID NO: 3578534 - RNA, 22 nt, Human
guagucagaauuagcugcuucu

SEQ ID NO: 3578535 - RNA, 13 nt, Human
guagucccagcua

SEQ ID NO: 3578536 - RNA, 12 nt, Human
guaguccccaac

SEQ ID NO: 3578537 - RNA, 23 nt, Human
guaguccgugcugacagcugcuc

SEQ ID NO: 3578538 - RNA, 22 nt, Human
guaguccucauaaaaagcaaaa

SEQ ID NO: 3578539 - RNA, 14 nt, Human
guaguccuuggcau

SEQ ID NO: 3578540 - RNA, 16 nt, Human
guagucuaaccaaaug

SEQ ID NO: 3578541 - RNA, 19 nt, Human
guagucucacugcuugaac

SEQ ID NO: 3578542 - RNA, 13 nt, Human
guagucugcucac

SEQ ID NO: 3578543 - RNA, 14 nt, Human
guagugagaagaau

SEQ ID NO: 3578544 - RNA, 15 nt, Human
guagugagaagaaua

SEQ ID NO: 3578545 - RNA, 13 nt, Human
guagugagccgag

SEQ ID NO: 3578546 - RNA, 17 nt, Human
guaguguucagaaaaaa

SEQ ID NO: 3578547 - RNA, 11 nt, Human
guaguuaggaa

SEQ ID NO: 3578548 - RNA, 22 nt, Human
guaguuaggaaauaaaaccuuu

SEQ ID NO: 3578549 - RNA, 16 nt, Human
guaguuaguagcaugu

SEQ ID NO: 3578550 - RNA, 16 nt, Human
guaguuaucauguuag

SEQ ID NO: 3578551 - RNA, 14 nt, Human
guaguuauuuugca

SEQ ID NO: 3578552 - RNA, 13 nt, Human
guaguucccugaa

SEQ ID NO: 3578553 - RNA, 15 nt, Human
guaguuccugcuaca

SEQ ID NO: 3578554 - RNA, 13 nt, Human
guauccuccaggu

SEQ ID NO: 3578555 - RNA, 16 nt, Human
guauccuccagguuuu

SEQ ID NO: 3578556 - RNA, 19 nt, Human
guauccuccagguuuuuca

SEQ ID NO: 3578557 - RNA, 17 nt, Human
guauccugcccaguguu

SEQ ID NO: 3578558 - RNA, 17 nt, Human
guauccuggaacaauau

SEQ ID NO: 3578559 - RNA, 21 nt, Human
guauccuggaacaauauuuua

SEQ ID NO: 3578560 - RNA, 22 nt, Human
guauccuggaacaauauuuuau

SEQ ID NO: 3578561 - RNA, 20 nt, Human
guauccugugacauguaaca

SEQ ID NO: 3578562 - RNA, 15 nt, Human
guaucggcacuguac

SEQ ID NO: 3578563 - RNA, 21 nt, Human
guaucuaagaauaauaaaauc

SEQ ID NO: 3578564 - RNA, 18 nt, Human
guaucuacuuuaauaaau

SEQ ID NO: 3578565 - RNA, 22 nt, Human
guaucuagagcuuaaugcuaca

SEQ ID NO: 3578566 - RNA, 17 nt, Human
guaucuagugcagcuga

SEQ ID NO: 3578567 - RNA, 18 nt, Human
guaucuagugcagcugau

SEQ ID NO: 3578568 - RNA, 13 nt, Human
guaucucacacuc

SEQ ID NO: 3578569 - RNA, 13 nt, Human
guaucucagaaag

SEQ ID NO: 3578570 - RNA, 18 nt, Human
guaucucagaaagugccu

SEQ ID NO: 3578571 - RNA, 13 nt, Human
guaucuccaggau

SEQ ID NO: 3578572 - RNA, 16 nt, Human
guaucuccggcuccca

SEQ ID NO: 3578573 - RNA, 20 nt, Human
guaucuccggcucccagccu

SEQ ID NO: 3578574 - RNA, 12 nt, Human
guaucucuucag

SEQ ID NO: 3578575 - RNA, 13 nt, Human
guaucucuucagu

SEQ ID NO: 3578576 - RNA, 17 nt, Human
guaucucuucagucucu

SEQ ID NO: 3578577 - RNA, 20 nt, Human
guaucucuuucacauuguuu

SEQ ID NO: 3578578 - RNA, 11 nt, Human
guaucugaagg

SEQ ID NO: 3578579 - RNA, 22 nt, Human
guaucugaguugccaagacaaa

SEQ ID NO: 3578580 - RNA, 23 nt, Human
guaucugaguugccaagacaaau

SEQ ID NO: 3578581 - RNA, 16 nt, Human
guaucugcaggcagac

SEQ ID NO: 3578582 - RNA, 18 nt, Human
guaucugcaggcagacac

SEQ ID NO: 3578583 - RNA, 19 nt, Human
guaucugcaggcagacacg

SEQ ID NO: 3578584 - RNA, 14 nt, Human
guaucugggaacug

SEQ ID NO: 3578585 - RNA, 15 nt, Human
guaucugucuuucca

SEQ ID NO: 3578586 - RNA, 15 nt, Human
guaucugugaacuga

SEQ ID NO: 3578587 - RNA, 15 nt, Human
guaucuguucuuuaa

SEQ ID NO: 3578588 - RNA, 17 nt, Human
guaucuuacuuuccucu

SEQ ID NO: 3578589 - RNA, 14 nt, Human
guaucuucauguau

SEQ ID NO: 3578590 - RNA, 17 nt, Human
guaucuuccauauuugg

SEQ ID NO: 3578591 - RNA, 13 nt, Human
guaugaaaacaug

SEQ ID NO: 3578592 - RNA, 17 nt, Human
guaugaaaacauggaac

SEQ ID NO: 3578593 - RNA, 20 nt, Human
guaugaaaaugaguugugaa

SEQ ID NO: 3578594 - RNA, 23 nt, Human
guaugaaauuauauaaguauucu

SEQ ID NO: 3578595 - RNA, 15 nt, Human
guaugaacuugagga

SEQ ID NO: 3578596 - RNA, 23 nt, Human
guaugaacuugaggacacauguc

SEQ ID NO: 3578597 - RNA, 19 nt, Human
guaugaauaaagacaccua

SEQ ID NO: 3578598 - RNA, 19 nt, Human
guaugacgcugauacauaa

SEQ ID NO: 3578599 - RNA, 14 nt, Human
guaugacuaaagag

SEQ ID NO: 3578600 - RNA, 18 nt, Human
guaugacuaaagagagaa

SEQ ID NO: 3578601 - RNA, 20 nt, Human
guaugacuaaagagagaaug

SEQ ID NO: 3578602 - RNA, 13 nt, Human
guaugaggcauuu

SEQ ID NO: 3578603 - RNA, 15 nt, Human
guaugaucaaauguu

SEQ ID NO: 3578604 - RNA, 17 nt, Human
guaugaucaaauguuua

SEQ ID NO: 3578605 - RNA, 22 nt, Human
guaugaucaaauguuuaaucau

SEQ ID NO: 3578606 - RNA, 20 nt, Human
guaugaucacggcucacugc

SEQ ID NO: 3578607 - RNA, 21 nt, Human
guaugaucacggcucacugca

SEQ ID NO: 3578608 - RNA, 13 nt, Human
guaugauguguug

SEQ ID NO: 3578609 - RNA, 16 nt, Human
guaugauguguuguga

SEQ ID NO: 3578610 - RNA, 14 nt, Human
guaugauucccagc

SEQ ID NO: 3578611 - RNA, 19 nt, Human
guaugcaguguagauuuua

SEQ ID NO: 3578612 - RNA, 12 nt, Human
guaugcauguga

SEQ ID NO: 3578613 - RNA, 16 nt, Human
guaugcauuauuaaau

SEQ ID NO: 3578614 - RNA, 22 nt, Human
guaugccuuuaaaucugugaug

SEQ ID NO: 3578615 - RNA, 19 nt, Human
guaugcugaucaucgccag

SEQ ID NO: 3578616 - RNA, 21 nt, Human
guaugcuucauacagggaugg

SEQ ID NO: 3578617 - RNA, 18 nt, Human
guauggacuaucugucug

SEQ ID NO: 3578618 - RNA, 22 nt, Human
guauggcacuggcauugucccu

SEQ ID NO: 3578619 - RNA, 18 nt, Human
guauggcguaaguacaga

SEQ ID NO: 3578620 - RNA, 19 nt, Human
guauggcguaaguacagag

SEQ ID NO: 3578621 - RNA, 20 nt, Human
guauggcguaaguacagaga

SEQ ID NO: 3578622 - RNA, 24 nt, Human
guauggcguaaguacagagaagcc

SEQ ID NO: 3578623 - RNA, 20 nt, Human
guauggcucugcaccccucu

SEQ ID NO: 3578624 - RNA, 17 nt, Human
guauggguuucucccag

SEQ ID NO: 3578625 - RNA, 14 nt, Human
guaugguggcuggg

SEQ ID NO: 3578626 - RNA, 16 nt, Human
guaugguuuuguggau

SEQ ID NO: 3578627 - RNA, 16 nt, Human
guauguaaauagguuu

SEQ ID NO: 3578628 - RNA, 12 nt, Human
guauguaaaugu

SEQ ID NO: 3578629 - RNA, 15 nt, Human
guauguaaaugugca

SEQ ID NO: 3578630 - RNA, 16 nt, Human
guauguaacaauuguu

SEQ ID NO: 3578631 - RNA, 18 nt, Human
guauguacuucaugcugu

SEQ ID NO: 3578632 - RNA, 13 nt, Human
guauguauuauuu

SEQ ID NO: 3578633 - RNA, 22 nt, Human
guaugucaauaaacaacagcug

SEQ ID NO: 3578634 - RNA, 14 nt, Human
guaugucauuuccu

SEQ ID NO: 3578635 - RNA, 22 nt, Human
guaugucugguucucaauucca

SEQ ID NO: 3578636 - RNA, 21 nt, Human
guaugugacaccaaagccacc

SEQ ID NO: 3578637 - RNA, 15 nt, Human
guauguggaagugug

SEQ ID NO: 3578638 - RNA, 16 nt, Human
guauguggaagugugg

SEQ ID NO: 3578639 - RNA, 15 nt, Human
guauguggcaaaaug

SEQ ID NO: 3578640 - RNA, 20 nt, Human
guaugugggauauugaaugu

SEQ ID NO: 3578641 - RNA, 16 nt, Human
guaugugguuuuguaa

SEQ ID NO: 3578642 - RNA, 13 nt, Human
guaugugugaagu

SEQ ID NO: 3578643 - RNA, 15 nt, Human
guauguguguguaug

SEQ ID NO: 3578644 - RNA, 18 nt, Human
guauguguguguaugcua

SEQ ID NO: 3578645 - RNA, 22 nt, Human
guauguguuuagaauugaaggu

SEQ ID NO: 3578646 - RNA, 22 nt, Human
guauguucaacuaggaucagaa

SEQ ID NO: 3578647 - RNA, 18 nt, Human
guauguuguccaauuguu

SEQ ID NO: 3578648 - RNA, 21 nt, Human
guauguuguccaauuguugac

SEQ ID NO: 3578649 - RNA, 21 nt, Human
guauguugugaagauguuugc

SEQ ID NO: 3578650 - RNA, 20 nt, Human
guauguuucucuuugauuau

SEQ ID NO: 3578651 - RNA, 14 nt, Human
guauguuugcacac

SEQ ID NO: 3578652 - RNA, 14 nt, Human
guauguuuuagcau

SEQ ID NO: 3578653 - RNA, 23 nt, Human
guauguuuuuguguauuuguuaa

SEQ ID NO: 3578654 - RNA, 19 nt, Human
guauuaaaaaaaacaaaaa

SEQ ID NO: 3578655 - RNA, 22 nt, Human
guauuaaaaaaaacaaaaagaa

SEQ ID NO: 3578656 - RNA, 12 nt, Human
guauuaaaacau

SEQ ID NO: 3578657 - RNA, 13 nt, Human
guauuaaaacauu

SEQ ID NO: 3578658 - RNA, 15 nt, Human
guauuaaauuacauu

SEQ ID NO: 3578659 - RNA, 16 nt, Human
guauuaagcauauauu

SEQ ID NO: 3578660 - RNA, 19 nt, Human
guauuaagcccacaguaua

SEQ ID NO: 3578661 - RNA, 22 nt, Human
guauuaaguuguuaauaaaagu

SEQ ID NO: 3578662 - RNA, 12 nt, Human
guauuaauaaaa

SEQ ID NO: 3578663 - RNA, 13 nt, Human
guauuaauaaaaa

SEQ ID NO: 3578664 - RNA, 14 nt, Human
guauuaauaaaaag

SEQ ID NO: 3578665 - RNA, 15 nt, Human
guauuaauaaaaaga

SEQ ID NO: 3578666 - RNA, 18 nt, Human
guauuaauaaaaagacaa

SEQ ID NO: 3578667 - RNA, 15 nt, Human
guauuaauaaauaga

SEQ ID NO: 3578668 - RNA, 16 nt, Human
guauuaauacuaaaau

SEQ ID NO: 3578669 - RNA, 23 nt, Human
guauuacacaagaccagugcuua

SEQ ID NO: 3578670 - RNA, 16 nt, Human
guauuacacucuguaa

SEQ ID NO: 3578671 - RNA, 22 nt, Human
guauuacacuguauuuguaucu

SEQ ID NO: 3578672 - RNA, 22 nt, Human
guauuacaguggggaaugaaga

SEQ ID NO: 3578673 - RNA, 12 nt, Human
guauuagauguu

SEQ ID NO: 3578674 - RNA, 21 nt, Human
guauuagauguucucuaucau

SEQ ID NO: 3578675 - RNA, 12 nt, Human
guauuauaaauu

SEQ ID NO: 3578676 - RNA, 20 nt, Human
guauuauacaugugauacau

SEQ ID NO: 3578677 - RNA, 14 nt, Human
guauuauaccuuuu

SEQ ID NO: 3578678 - RNA, 19 nt, Human
guauuauaggccaaacugg

SEQ ID NO: 3578679 - RNA, 20 nt, Human
guauuaucuuguucaggaaa

SEQ ID NO: 3578680 - RNA, 12 nt, Human
guauuaugcuuc

SEQ ID NO: 3578681 - RNA, 14 nt, Human
guauuaugcuucuu

SEQ ID NO: 3578682 - RNA, 21 nt, Human
guauuauguacucuacugaua

SEQ ID NO: 3578683 - RNA, 23 nt, Human
guauuauguccugugagaugugu

SEQ ID NO: 3578684 - RNA, 15 nt, Human
guauuauguguguuu

SEQ ID NO: 3578685 - RNA, 14 nt, Human
guauuauucuacua

SEQ ID NO: 3578686 - RNA, 14 nt, Human
guauuauugcuguu

SEQ ID NO: 3578687 - RNA, 20 nt, Human
guauuauugcuguugcuuga

SEQ ID NO: 3578688 - RNA, 14 nt, Human
guauuauuuuccaa

SEQ ID NO: 3578689 - RNA, 19 nt, Human
guauucaaaaauuaucuau

SEQ ID NO: 3578690 - RNA, 18 nt, Human
guauucaagaaagccagu

SEQ ID NO: 3578691 - RNA, 17 nt, Human
guauucauauuuguacu

SEQ ID NO: 3578692 - RNA, 22 nt, Human
guauucauccaaguuaaaugua

SEQ ID NO: 3578693 - RNA, 19 nt, Human
guauuccagaccugaagaa

SEQ ID NO: 3578694 - RNA, 15 nt, Human
guauuccaguuuguu

SEQ ID NO: 3578695 - RNA, 18 nt, Human
guauuccaguuuguuuau

SEQ ID NO: 3578696 - RNA, 12 nt, Human
guauuccccuuc

SEQ ID NO: 3578697 - RNA, 21 nt, Human
guauucuaaauuuuauaucuu

SEQ ID NO: 3578698 - RNA, 24 nt, Human
guauucuaaauuuuauaucuugua

SEQ ID NO: 3578699 - RNA, 23 nt, Human
gucuugcuauauugcccaggcug

SEQ ID NO: 3578700 - RNA, 22 nt, Human
gucuugcuauggggagaaaaga

SEQ ID NO: 3578701 - RNA, 15 nt, Human
gucuugcuguugaca

SEQ ID NO: 3578702 - RNA, 22 nt, Human
gucuuggaagcuguuuggaaaa

SEQ ID NO: 3578703 - RNA, 22 nt, Human
gucuuggcagcaccugucuccu

SEQ ID NO: 3578704 - RNA, 14 nt, Human
gucuuggccagcca

SEQ ID NO: 3578705 - RNA, 21 nt, Human
gucuugggaaauaugaaugcc

SEQ ID NO: 3578706 - RNA, 19 nt, Human
gucuugggcagagcuggcu

SEQ ID NO: 3578707 - RNA, 22 nt, Human
gucuugggcagagcuggcucug

SEQ ID NO: 3578708 - RNA, 21 nt, Human
gucuugguacuugcugcuauu

SEQ ID NO: 3578709 - RNA, 15 nt, Human
gucuugguauucuua

SEQ ID NO: 3578710 - RNA, 17 nt, Human
gucuugguuccagccug

SEQ ID NO: 3578711 - RNA, 19 nt, Human
gucuugguuccagccugcc

SEQ ID NO: 3578712 - RNA, 16 nt, Human
gucuuguaauauuuug

SEQ ID NO: 3578713 - RNA, 20 nt, Human
gucuugucucagauuuuauu

SEQ ID NO: 3578714 - RNA, 22 nt, Human
gucuugucucagauuuuauuau

SEQ ID NO: 3578715 - RNA, 19 nt, Human
gucuugugacuagugcuga

SEQ ID NO: 3578716 - RNA, 21 nt, Human
gucuugugacuagugcugaag

SEQ ID NO: 3578717 - RNA, 20 nt, Human
gucuuguguuucuuuaguuu

SEQ ID NO: 3578718 - RNA, 16 nt, Human
gucuuguuaauauucu

SEQ ID NO: 3578719 - RNA, 13 nt, Human
gucuuguuagaaa

SEQ ID NO: 3578720 - RNA, 12 nt, Human
gucuuguucugu

SEQ ID NO: 3578721 - RNA, 23 nt, Human
gucuuguucugucacucaggcug

SEQ ID NO: 3578722 - RNA, 20 nt, Human
gucuuguugcggauggaugg

SEQ ID NO: 3578723 - RNA, 22 nt, Human
gucuuguuuuuuuuuuccacuu

SEQ ID NO: 3578724 - RNA, 19 nt, Human
gucuuuaaaaacuguuuua

SEQ ID NO: 3578725 - RNA, 15 nt, Human
gucuuuaaaagagag

SEQ ID NO: 3578726 - RNA, 18 nt, Human
gucuuuaaaggcccagcc

SEQ ID NO: 3578727 - RNA, 15 nt, Human
gucuuuaaaugcugc

SEQ ID NO: 3578728 - RNA, 18 nt, Human
gucuuuacuccucacacu

SEQ ID NO: 3578729 - RNA, 16 nt, Human
gucuuuagauagcccu

SEQ ID NO: 3578730 - RNA, 24 nt, Human
gucuuuagauagcccuguccuggu

SEQ ID NO: 3578731 - RNA, 16 nt, Human
gucuuucacauuuaaa

SEQ ID NO: 3578732 - RNA, 15 nt, Human
gucuuucaguacuuu

SEQ ID NO: 3578733 - RNA, 16 nt, Human
gucuuucaguacuuuu

SEQ ID NO: 3578734 - RNA, 19 nt, Human
gucuuucauggcugcuguu

SEQ ID NO: 3578735 - RNA, 23 nt, Human
gucuuucauggcugcuguugcuu

SEQ ID NO: 3578736 - RNA, 22 nt, Human
gucuuuccaaauuauuucuuaa

SEQ ID NO: 3578737 - RNA, 13 nt, Human
gucuuuccacucu

SEQ ID NO: 3578738 - RNA, 12 nt, Human
gucuuuccuaga

SEQ ID NO: 3578739 - RNA, 16 nt, Human
gucuuuccuggcacua

SEQ ID NO: 3578740 - RNA, 21 nt, Human
gucuuucucuuucccuggucc

SEQ ID NO: 3578741 - RNA, 19 nt, Human
gucuuucugggguuuuucu

SEQ ID NO: 3578742 - RNA, 18 nt, Human
gucuuuggaaaaauguuu

SEQ ID NO: 3578743 - RNA, 14 nt, Human
gucuuuggacccug

SEQ ID NO: 3578744 - RNA, 22 nt, Human
gucuuuggggucuacacugcaa

SEQ ID NO: 3578745 - RNA, 22 nt, Human
gucuuuggguaccuauuuucau

SEQ ID NO: 3578746 - RNA, 15 nt, Human
gucuuuguaagucag

SEQ ID NO: 3578747 - RNA, 18 nt, Human
gucuuuguaaugucacca

SEQ ID NO: 3578748 - RNA, 19 nt, Human
gucuuuguuaaguucuauu

SEQ ID NO: 3578749 - RNA, 14 nt, Human
gucuuuuaaaaagu

SEQ ID NO: 3578750 - RNA, 22 nt, Human
gucuuuuauaguggaaaaacac

SEQ ID NO: 3578751 - RNA, 16 nt, Human
gucuuuucagguuugu

SEQ ID NO: 3578752 - RNA, 11 nt, Human
gucuuuucauc

SEQ ID NO: 3578753 - RNA, 15 nt, Human
gucuuuucuuugcca

SEQ ID NO: 3578754 - RNA, 19 nt, Human
gucuuuucuuugccaucuc

SEQ ID NO: 3578755 - RNA, 19 nt, Human
gucuuuugacauguggaaa

SEQ ID NO: 3578756 - RNA, 14 nt, Human
gucuuuugcuuuug

SEQ ID NO: 3578757 - RNA, 22 nt, Human
gucuuuugcuuuugcccauuuu

SEQ ID NO: 3578758 - RNA, 12 nt, Human
gucuuuuggagg

SEQ ID NO: 3578759 - RNA, 11 nt, Human
gucuuuuugua

SEQ ID NO: 3578760 - RNA, 16 nt, Human
gucuuuuuucacuaca

SEQ ID NO: 3578761 - RNA, 14 nt, Human
gucuuuuuuucugu

SEQ ID NO: 3578762 - RNA, 19 nt, Human
gucuuuuuuucuguuaauu

SEQ ID NO: 3578763 - RNA, 23 nt, Human
gucuuuuuuuggugauucaaaug

SEQ ID NO: 3578764 - RNA, 21 nt, Human
gucuuuuuuuguauuauaaaa

SEQ ID NO: 3578765 - RNA, 18 nt, Human
gugaaaaauguuaggaca

SEQ ID NO: 3578766 - RNA, 12 nt, Human
gugaaaagaaua

SEQ ID NO: 3578767 - RNA, 20 nt, Human
gugaaaagagaggauauguu

SEQ ID NO: 3578768 - RNA, 17 nt, Human
gugaaaaugguccagga

SEQ ID NO: 3578769 - RNA, 16 nt, Human
gugaaaaugugugugu

SEQ ID NO: 3578770 - RNA, 12 nt, Human
gugaaaauuauu

SEQ ID NO: 3578771 - RNA, 15 nt, Human
gugaaaauuauuuug

SEQ ID NO: 3578772 - RNA, 16 nt, Human
gugaaacacaccaggc

SEQ ID NO: 3578773 - RNA, 17 nt, Human
gugaaacacaccaggcu

SEQ ID NO: 3578774 - RNA, 16 nt, Human
gugaaacacagcuguu

SEQ ID NO: 3578775 - RNA, 15 nt, Human
gugaaacauuuucuc

SEQ ID NO: 3578776 - RNA, 20 nt, Human
gugaaaccuuuagggcagcu

SEQ ID NO: 3578777 - RNA, 20 nt, Human
gugaaacucguuaauuugua

SEQ ID NO: 3578778 - RNA, 13 nt, Human
gugaaagaaaaua

SEQ ID NO: 3578779 - RNA, 13 nt, Human
gugaaagaaauca

SEQ ID NO: 3578780 - RNA, 14 nt, Human
gugaaagaaaucau

SEQ ID NO: 3578781 - RNA, 16 nt, Human
gugaaagaaaucaugu

SEQ ID NO: 3578782 - RNA, 17 nt, Human
gugaaagcauauggguu

SEQ ID NO: 3578783 - RNA, 17 nt, Human
gugaaaguacauuugga

SEQ ID NO: 3578784 - RNA, 22 nt, Human
gugaaagugcauuuuuguaaau

SEQ ID NO: 3578785 - RNA, 12 nt, Human
gugaaauaucau

SEQ ID NO: 3578786 - RNA, 13 nt, Human
gugaaaucauuca

SEQ ID NO: 3578787 - RNA, 15 nt, Human
gugaaauggauacua

SEQ ID NO: 3578788 - RNA, 19 nt, Human
gugaaauggauacuacauc

SEQ ID NO: 3578789 - RNA, 20 nt, Human
gugaaauuauucauaauuau

SEQ ID NO: 3578790 - RNA, 22 nt, Human
gugaaauuuacaucauuucuuu

SEQ ID NO: 3578791 - RNA, 13 nt, Human
gugaacacaucag

SEQ ID NO: 3578792 - RNA, 17 nt, Human
gugaacagagagacccu

SEQ ID NO: 3578793 - RNA, 22 nt, Human
gugaaccaaagagacuggagca

SEQ ID NO: 3578794 - RNA, 15 nt, Human
gugaaccaaugcaag

SEQ ID NO: 3578795 - RNA, 13 nt, Human
gugaacccaggac

SEQ ID NO: 3578796 - RNA, 19 nt, Human
gugaacccuggggccugac

SEQ ID NO: 3578797 - RNA, 21 nt, Human
gugaacguccacaugaaaccu

SEQ ID NO: 3578798 - RNA, 19 nt, Human
gugaacuauuucuacacag

SEQ ID NO: 3578799 - RNA, 14 nt, Human
gugaacucagccaa

SEQ ID NO: 3578800 - RNA, 17 nt, Human
gugaacucagccaagca

SEQ ID NO: 3578801 - RNA, 21 nt, Human
gugaacucagccaagcacagu

SEQ ID NO: 3578802 - RNA, 23 nt, Human
gugaacucagccaagcacagugg

SEQ ID NO: 3578803 - RNA, 20 nt, Human
gugaacuggacccuguugcu

SEQ ID NO: 3578804 - RNA, 21 nt, Human
gugaacuggacccuguugcua

SEQ ID NO: 3578805 - RNA, 22 nt, Human
gugaacuggacccuguugcuaa

SEQ ID NO: 3578806 - RNA, 14 nt, Human
gugaacuugaaauu

SEQ ID NO: 3578807 - RNA, 17 nt, Human
gugaacuugggccacug

SEQ ID NO: 3578808 - RNA, 21 nt, Human
gugaacuuggugccuaauguu

SEQ ID NO: 3578809 - RNA, 12 nt, Human
gugaacuuguag

SEQ ID NO: 3578810 - RNA, 23 nt, Human
gugaagacaaugacuuacuguac

SEQ ID NO: 3578811 - RNA, 16 nt, Human
gugaagagcaagagag

SEQ ID NO: 3578812 - RNA, 15 nt, Human
gugaagaggggcagc

SEQ ID NO: 3578813 - RNA, 13 nt, Human
gugaagauacuuu

SEQ ID NO: 3578814 - RNA, 15 nt, Human
gugaagauacuuugu

SEQ ID NO: 3578815 - RNA, 19 nt, Human
gugaagaugcauuguaguu

SEQ ID NO: 3578816 - RNA, 15 nt, Human
gugaagauguuugca

SEQ ID NO: 3578817 - RNA, 18 nt, Human
gugaagcaccaagcucaa

SEQ ID NO: 3578818 - RNA, 12 nt, Human
gugaagcccugu

SEQ ID NO: 3578819 - RNA, 10 nt, Human
gugaagccuu

SEQ ID NO: 3578820 - RNA, 21 nt, Human
gugaaggauuauggaaaaaua

SEQ ID NO: 3578821 - RNA, 22 nt, Human
gugaaggauuauggaaaaauaa

SEQ ID NO: 3578822 - RNA, 12 nt, Human
gugaaggccucg

SEQ ID NO: 3578823 - RNA, 14 nt, Human
gugaaggcuggcau

SEQ ID NO: 3578824 - RNA, 20 nt, Human
gugaagguccugcuauuacu

SEQ ID NO: 3578825 - RNA, 14 nt, Human
gugaagugaagaca

SEQ ID NO: 3578826 - RNA, 18 nt, Human
gugaaguuagaauuccuu

SEQ ID NO: 3578827 - RNA, 12 nt, Human
gugaaguuaggu

SEQ ID NO: 3578828 - RNA, 16 nt, Human
gugaaguuagguucuu

SEQ ID NO: 3578829 - RNA, 15 nt, Human
gugaaguugcugcuu

SEQ ID NO: 3578830 - RNA, 19 nt, Human
gugaaguuuaauugacuua

SEQ ID NO: 3578831 - RNA, 18 nt, Human
gugaaguuuuacugucua

SEQ ID NO: 3578832 - RNA, 13 nt, Human
gugaauaaauguc

SEQ ID NO: 3578833 - RNA, 12 nt, Human
gugaauaauaau

SEQ ID NO: 3578834 - RNA, 23 nt, Human
gugaauaauacaguaucucaggg

SEQ ID NO: 3578835 - RNA, 19 nt, Human
gugaauacugcuacagcaa

SEQ ID NO: 3578836 - RNA, 22 nt, Human
gugaauacugcuugaauaaaca

SEQ ID NO: 3578837 - RNA, 18 nt, Human
gugaauaugccuguaauu

SEQ ID NO: 3578838 - RNA, 13 nt, Human
gugaauauuuuca

SEQ ID NO: 3578839 - RNA, 15 nt, Human
gugaaucagacccua

SEQ ID NO: 3578840 - RNA, 23 nt, Human
gugaaucugcauuuucuggguuc

SEQ ID NO: 3578841 - RNA, 17 nt, Human
gugaaugaaagauuaaa

SEQ ID NO: 3578842 - RNA, 19 nt, Human
gugaaugauucauguuaua

SEQ ID NO: 3578843 - RNA, 14 nt, Human
gugaauggauugga

SEQ ID NO: 3578844 - RNA, 20 nt, Human
gugcaaguaugugagugugu

SEQ ID NO: 3578845 - RNA, 20 nt, Human
gugcaaguugaggacuucuu

SEQ ID NO: 3578846 - RNA, 23 nt, Human
gugcaauaaaucugacccagugc

SEQ ID NO: 3578847 - RNA, 22 nt, Human
gugcaaugaccuuucaauagga

SEQ ID NO: 3578848 - RNA, 22 nt, Human
gugcaauguaaauauuuuaaag

SEQ ID NO: 3578849 - RNA, 15 nt, Human
gugcaauguguauaa

SEQ ID NO: 3578850 - RNA, 23 nt, Human
gugcaauguguauaaacaagaaa

SEQ ID NO: 3578851 - RNA, 22 nt, Human
gugcaauuguaggggugugugu

SEQ ID NO: 3578852 - RNA, 17 nt, Human
gugcaauuuguuugugc

SEQ ID NO: 3578853 - RNA, 18 nt, Human
gugcacaaaacccagacc

SEQ ID NO: 3578854 - RNA, 13 nt, Human
gugcacaaaauga

SEQ ID NO: 3578855 - RNA, 16 nt, Human
gugcacaagcuccaag

SEQ ID NO: 3578856 - RNA, 13 nt, Human
gugcacaaggauu

SEQ ID NO: 3578857 - RNA, 12 nt, Human
gugcacacacca

SEQ ID NO: 3578858 - RNA, 21 nt, Human
gugcacacagaaauauauaua

SEQ ID NO: 3578859 - RNA, 22 nt, Human
gugcacacagaaauauauauac

SEQ ID NO: 3578860 - RNA, 23 nt, Human
gugcacacagaaauauauauaca

SEQ ID NO: 3578861 - RNA, 22 nt, Human
gugcacagacgucccuccacgu

SEQ ID NO: 3578862 - RNA, 11 nt, Human
gugcacagccc

SEQ ID NO: 3578863 - RNA, 11 nt, Human
gugcacagcug

SEQ ID NO: 3578864 - RNA, 12 nt, Human
gugcacaggagg

SEQ ID NO: 3578865 - RNA, 13 nt, Human
gugcacaggaggg

SEQ ID NO: 3578866 - RNA, 21 nt, Human
gugcacaugcacgugugugca

SEQ ID NO: 3578867 - RNA, 23 nt, Human
gugcaccugggacagggagcagc

SEQ ID NO: 3578868 - RNA, 18 nt, Human
gugcaccuguacucagga

SEQ ID NO: 3578869 - RNA, 18 nt, Human
gugcacgcacacugucug

SEQ ID NO: 3578870 - RNA, 18 nt, Human
gugcacgcagauuagcag

SEQ ID NO: 3578871 - RNA, 18 nt, Human
gugcacguggcauguggc

SEQ ID NO: 3578872 - RNA, 12 nt, Human
gugcacguugcu

SEQ ID NO: 3578873 - RNA, 20 nt, Human
gugcacuaauguguaagaca

SEQ ID NO: 3578874 - RNA, 19 nt, Human
gugcacugcccauggacag

SEQ ID NO: 3578875 - RNA, 21 nt, Human
gugcacugcccauggacaggc

SEQ ID NO: 3578876 - RNA, 17 nt, Human
gugcacuggccccaccc

SEQ ID NO: 3578877 - RNA, 15 nt, Human
gugcacugucacuuu

SEQ ID NO: 3578878 - RNA, 17 nt, Human
gugcacuuucuaauguu

SEQ ID NO: 3578879 - RNA, 22 nt, Human
gugcagaacugcagucacugca

SEQ ID NO: 3578880 - RNA, 12 nt, Human
gugcagaaugua

SEQ ID NO: 3578881 - RNA, 20 nt, Human
gugcagaccccuuggccagc

SEQ ID NO: 3578882 - RNA, 14 nt, Human
gugcagacuggagg

SEQ ID NO: 3578883 - RNA, 23 nt, Human
gugcagacuggaggggacgcugg

SEQ ID NO: 3578884 - RNA, 16 nt, Human
gugcagagccuucuca

SEQ ID NO: 3578885 - RNA, 23 nt, Human
gugcagagccuucucagaagcac

SEQ ID NO: 3578886 - RNA, 22 nt, Human
gugcagaggucagacuaagaaa

SEQ ID NO: 3578887 - RNA, 15 nt, Human
gugcagauggagaga

SEQ ID NO: 3578888 - RNA, 18 nt, Human
gugcagcaaccagagcac

SEQ ID NO: 3578889 - RNA, 14 nt, Human
gugcagcagauugg

SEQ ID NO: 3578890 - RNA, 15 nt, Human
gugcagcauaugagg

SEQ ID NO: 3578891 - RNA, 16 nt, Human
gugcagcauuucacuu

SEQ ID NO: 3578892 - RNA, 13 nt, Human
gugcagccagagg

SEQ ID NO: 3578893 - RNA, 19 nt, Human
gugcagcccccacugccuu

SEQ ID NO: 3578894 - RNA, 12 nt, Human
gugcagcugauu

SEQ ID NO: 3578895 - RNA, 23 nt, Human
gugcagcugauuuuaacaauaac

SEQ ID NO: 3578896 - RNA, 15 nt, Human
gugcagcuucugucc

SEQ ID NO: 3578897 - RNA, 17 nt, Human
gugcagcuucuguccug

SEQ ID NO: 3578898 - RNA, 15 nt, Human
gugcaggagcgcucc

SEQ ID NO: 3578899 - RNA, 18 nt, Human
gugcaggcaggcuggccu

SEQ ID NO: 3578900 - RNA, 12 nt, Human
gugcaggcccac

SEQ ID NO: 3578901 - RNA, 13 nt, Human
gugcaggcccacc

SEQ ID NO: 3578902 - RNA, 16 nt, Human
gugcaggcccacccug

SEQ ID NO: 3578903 - RNA, 19 nt, Human
gugcaggcccacccugcuu

SEQ ID NO: 3578904 - RNA, 17 nt, Human
gugcaggcuggccagcc

SEQ ID NO: 3578905 - RNA, 20 nt, Human
gugcagggagggcaguuuuc

SEQ ID NO: 3578906 - RNA, 23 nt, Human
gugcagggccuguaaucccagca

SEQ ID NO: 3578907 - RNA, 15 nt, Human
gugcagguagaccug

SEQ ID NO: 3578908 - RNA, 18 nt, Human
gugcaguaacuugggagu

SEQ ID NO: 3578909 - RNA, 20 nt, Human
gugcaguauagaauaggcac

SEQ ID NO: 3578910 - RNA, 14 nt, Human
gugcagucacugga

SEQ ID NO: 3578911 - RNA, 14 nt, Human
gugcagucugggug

SEQ ID NO: 3578912 - RNA, 24 nt, Human
gugcaguggcaucaucucagcuca

SEQ ID NO: 3578913 - RNA, 19 nt, Human
gugcaguucuaguuugcau

SEQ ID NO: 3578914 - RNA, 13 nt, Human
gugcauaccacuu

SEQ ID NO: 3578915 - RNA, 16 nt, Human
gugcauagugcuggga

SEQ ID NO: 3578916 - RNA, 14 nt, Human
gugcauaguuucuu

SEQ ID NO: 3578917 - RNA, 15 nt, Human
gugcauauuguacac

SEQ ID NO: 3578918 - RNA, 20 nt, Human
gugcauccgggggcagcucu

SEQ ID NO: 3578919 - RNA, 14 nt, Human
gugcaucucagccc

SEQ ID NO: 3578920 - RNA, 22 nt, Human
gugcaugaagguuucugaaaau

SEQ ID NO: 3578921 - RNA, 18 nt, Human
gugcaugaucuugagcaa

SEQ ID NO: 3578922 - RNA, 16 nt, Human
gugcauggaggcccuc

SEQ ID NO: 3578923 - RNA, 14 nt, Human
gugcaugguggcac

SEQ ID NO: 3578924 - RNA, 16 nt, Human
gugcaugguggccaga

SEQ ID NO: 3578925 - RNA, 13 nt, Human
gugcaugugugug

SEQ ID NO: 3578926 - RNA, 14 nt, Human
gugcauuacagaga

SEQ ID NO: 3578927 - RNA, 16 nt, Human
gugcauuacagagagg

SEQ ID NO: 3578928 - RNA, 21 nt, Human
gugcauuagcacagauuuuaa

SEQ ID NO: 3578929 - RNA, 23 nt, Human
gugcauuaucuagauacuguauc

SEQ ID NO: 3578930 - RNA, 14 nt, Human
gugcauucuccagc

SEQ ID NO: 3578931 - RNA, 22 nt, Human
gugcauucuuuuaaaagacaag

SEQ ID NO: 3578932 - RNA, 20 nt, Human
gugcauuggaagaccccacc

SEQ ID NO: 3578933 - RNA, 22 nt, Human
gugcauuguauagauauaauga

SEQ ID NO: 3578934 - RNA, 15 nt, Human
gugcauuguuucugu

SEQ ID NO: 3578935 - RNA, 14 nt, Human
gugcauuucugaau

SEQ ID NO: 3578936 - RNA, 17 nt, Human
gugcauuugaggucugu

SEQ ID NO: 3578937 - RNA, 15 nt, Human
gugcauuuggugguu

SEQ ID NO: 3578938 - RNA, 16 nt, Human
gugcauuuuugugaaa

SEQ ID NO: 3578939 - RNA, 11 nt, Human
gugccaaagaa

SEQ ID NO: 3578940 - RNA, 15 nt, Human
gugccaaaugcucuc

SEQ ID NO: 3578941 - RNA, 20 nt, Human
gugccaacaauccuagugcu

SEQ ID NO: 3578942 - RNA, 15 nt, Human
gugccaacuguggcu

SEQ ID NO: 3578943 - RNA, 16 nt, Human
gugccaacuguggcug

SEQ ID NO: 3578944 - RNA, 14 nt, Human
gugccaagcacagu

SEQ ID NO: 3578945 - RNA, 17 nt, Human
gugccaagcacagugcc

SEQ ID NO: 3578946 - RNA, 14 nt, Human
gugccaagcagagg

SEQ ID NO: 3578947 - RNA, 19 nt, Human
gugccaaguccagguccug

SEQ ID NO: 3578948 - RNA, 20 nt, Human
gugccaaguccagguccugg

SEQ ID NO: 3578949 - RNA, 22 nt, Human
gugccaaguccagguccuggug

SEQ ID NO: 3578950 - RNA, 15 nt, Human
gugccaauauguauu

SEQ ID NO: 3578951 - RNA, 19 nt, Human
gugccacagaguguagcca

SEQ ID NO: 3578952 - RNA, 11 nt, Human
gugccacccug

SEQ ID NO: 3578953 - RNA, 16 nt, Human
gugccacccugggcuc

SEQ ID NO: 3578954 - RNA, 17 nt, Human
gugccacugcccgagcu

SEQ ID NO: 3578955 - RNA, 21 nt, Human
gugccacugcccgagcuggug

SEQ ID NO: 3578956 - RNA, 18 nt, Human
gugccacuuaauguaugu

SEQ ID NO: 3578957 - RNA, 18 nt, Human
gugccagagaacccagcc

SEQ ID NO: 3578958 - RNA, 21 nt, Human
gugccagaggugggcaggugg

SEQ ID NO: 3578959 - RNA, 14 nt, Human
gugccagcaaagcc

SEQ ID NO: 3578960 - RNA, 18 nt, Human
gugccagcaacugaauaa

SEQ ID NO: 3578961 - RNA, 14 nt, Human
gugccagcccagag

SEQ ID NO: 3578962 - RNA, 18 nt, Human
gugccagcccagaggccg

SEQ ID NO: 3578963 - RNA, 18 nt, Human
gugccagccuuccucugc

SEQ ID NO: 3578964 - RNA, 18 nt, Human
gugccaggaaacucuugc

SEQ ID NO: 3578965 - RNA, 17 nt, Human
gugccaggacuccccag

SEQ ID NO: 3578966 - RNA, 20 nt, Human
gugccagguuuucugggugu

SEQ ID NO: 3578967 - RNA, 22 nt, Human
gugccagguuuuuggucugacc

SEQ ID NO: 3578968 - RNA, 16 nt, Human
gugccagucgcgcugc

SEQ ID NO: 3578969 - RNA, 21 nt, Human
gugccagucgcgcugccugug

SEQ ID NO: 3578970 - RNA, 23 nt, Human
gugccauagaguuuaacacaagu

SEQ ID NO: 3578971 - RNA, 22 nt, Human
gugccaucauugcugucugcag

SEQ ID NO: 3578972 - RNA, 11 nt, Human
gugccauggaa

SEQ ID NO: 3578973 - RNA, 19 nt, Human
gugccaugucaaacaaaua

SEQ ID NO: 3578974 - RNA, 14 nt, Human
gugccaugugccag

SEQ ID NO: 3578975 - RNA, 16 nt, Human
gugccaugugccaggu

SEQ ID NO: 3578976 - RNA, 15 nt, Human
gugccauugucuuua

SEQ ID NO: 3578977 - RNA, 23 nt, Human
gugcccaagaauagaugcugacu

SEQ ID NO: 3578978 - RNA, 23 nt, Human
gugcccaaguuguggugcugaca

SEQ ID NO: 3578979 - RNA, 19 nt, Human
gugcccacagcccgcaugc

SEQ ID NO: 3578980 - RNA, 20 nt, Human
gugcccacaggaucagucug

SEQ ID NO: 3578981 - RNA, 13 nt, Human
gugcccacaggcc

SEQ ID NO: 3578982 - RNA, 20 nt, Human
gugcccagaacuucccugau

SEQ ID NO: 3578983 - RNA, 21 nt, Human
gugcccagcuauaccugugcc

SEQ ID NO: 3578984 - RNA, 22 nt, Human
gugcccagcuauaccugugccu

SEQ ID NO: 3578985 - RNA, 23 nt, Human
gugcccagcuauaccugugccuc

SEQ ID NO: 3578986 - RNA, 13 nt, Human
gugcccagcucag

SEQ ID NO: 3578987 - RNA, 17 nt, Human
gugcccaguuaaucuug

SEQ ID NO: 3578988 - RNA, 21 nt, Human
gugcugccacacuucaggcuc

SEQ ID NO: 3578989 - RNA, 13 nt, Human
gugcugcccugcc

SEQ ID NO: 3578990 - RNA, 15 nt, Human
gugcugcccugccca

SEQ ID NO: 3578991 - RNA, 19 nt, Human
gugcugcccugcccaccug

SEQ ID NO: 3578992 - RNA, 20 nt, Human
gugcugcccugcccaccugg

SEQ ID NO: 3578993 - RNA, 19 nt, Human
gugcugcggagcaagagga

SEQ ID NO: 3578994 - RNA, 18 nt, Human
gugcugcuacccucccug

SEQ ID NO: 3578995 - RNA, 13 nt, Human
gugcugcugaaga

SEQ ID NO: 3578996 - RNA, 15 nt, Human
gugcugcugugugcu

SEQ ID NO: 3578997 - RNA, 12 nt, Human
gugcugcuuuga

SEQ ID NO: 3578998 - RNA, 16 nt, Human
gugcuggaggacugag

SEQ ID NO: 3578999 - RNA, 19 nt, Human
gugcuggaggugggagcag

SEQ ID NO: 3579000 - RNA, 21 nt, Human
gugcuggaggugggagcagga

SEQ ID NO: 3579001 - RNA, 17 nt, Human
gugcuggagucuccuga

SEQ ID NO: 3579002 - RNA, 23 nt, Human
gugcuggagucuccugaggacac

SEQ ID NO: 3579003 - RNA, 20 nt, Human
gugcuggauggagcccaggc

SEQ ID NO: 3579004 - RNA, 15 nt, Human
gugcuggccagcgag

SEQ ID NO: 3579005 - RNA, 19 nt, Human
gugcuggcucacaguacag

SEQ ID NO: 3579006 - RNA, 21 nt, Human
gugcuggcucacaguacagca

SEQ ID NO: 3579007 - RNA, 22 nt, Human
gugcuggcucacaguacagcau

SEQ ID NO: 3579008 - RNA, 18 nt, Human
gugcuggcugcccagacc

SEQ ID NO: 3579009 - RNA, 13 nt, Human
gugcugggacuga

SEQ ID NO: 3579010 - RNA, 17 nt, Human
gugcugggagaaauacu

SEQ ID NO: 3579011 - RNA, 12 nt, Human
gugcugggcagc

SEQ ID NO: 3579012 - RNA, 11 nt, Human
gugcugggccc

SEQ ID NO: 3579013 - RNA, 18 nt, Human
gugcugggcggcugugcu

SEQ ID NO: 3579014 - RNA, 23 nt, Human
gugcugggggaaugagcccagag

SEQ ID NO: 3579015 - RNA, 22 nt, Human
gugcugggguuaucugaaguca

SEQ ID NO: 3579016 - RNA, 16 nt, Human
gugcugguguccugac

SEQ ID NO: 3579017 - RNA, 20 nt, Human
gugcugguguccugaccacc

SEQ ID NO: 3579018 - RNA, 13 nt, Human
gugcuguauaaaa

SEQ ID NO: 3579019 - RNA, 18 nt, Human
gugcuguccaugcuucuc

SEQ ID NO: 3579020 - RNA, 18 nt, Human
gugcuguccucagguggc

SEQ ID NO: 3579021 - RNA, 12 nt, Human
gugcugugaaaa

SEQ ID NO: 3579022 - RNA, 13 nt, Human
gugcugugaggga

SEQ ID NO: 3579023 - RNA, 16 nt, Human
gugcugugagggaggg

SEQ ID NO: 3579024 - RNA, 15 nt, Human
gugcuguggccaggg

SEQ ID NO: 3579025 - RNA, 16 nt, Human
gugcuguggccagggu

SEQ ID NO: 3579026 - RNA, 18 nt, Human
gugcuguggccaggguga

SEQ ID NO: 3579027 - RNA, 16 nt, Human
gugcuguggccugggc

SEQ ID NO: 3579028 - RNA, 19 nt, Human
gugcuguggccugggcaag

SEQ ID NO: 3579029 - RNA, 14 nt, Human
gugcuguggggcug

SEQ ID NO: 3579030 - RNA, 12 nt, Human
gugcuguguaaa

SEQ ID NO: 3579031 - RNA, 22 nt, Human
gugcuguguaaaguuagucuac

SEQ ID NO: 3579032 - RNA, 12 nt, Human
gugcugugugcc

SEQ ID NO: 3579033 - RNA, 17 nt, Human
gugcuuaagcagaagca

SEQ ID NO: 3579034 - RNA, 22 nt, Human
gugcuuaagcagaagcauuaac

SEQ ID NO: 3579035 - RNA, 22 nt, Human
gugcuuagcaaaaaauaaugac

SEQ ID NO: 3579036 - RNA, 19 nt, Human
gugcuuauucucaaagcag

SEQ ID NO: 3579037 - RNA, 21 nt, Human
gugcuuauucucaaagcagga

SEQ ID NO: 3579038 - RNA, 22 nt, Human
gugcuucacaguagagccagcu

SEQ ID NO: 3579039 - RNA, 17 nt, Human
gugcuucgggcccuucc

SEQ ID NO: 3579040 - RNA, 20 nt, Human
gugcuucuaguucugccagg

SEQ ID NO: 3579041 - RNA, 17 nt, Human
gugcuucuccccagaau

SEQ ID NO: 3579042 - RNA, 21 nt, Human
gugcuucugccacccugcuga

SEQ ID NO: 3579043 - RNA, 13 nt, Human
gugcuucuuucuu

SEQ ID NO: 3579044 - RNA, 14 nt, Human
gugcuugaaggccc

SEQ ID NO: 3579045 - RNA, 18 nt, Human
gugcuugugaaagagguc

SEQ ID NO: 3579046 - RNA, 17 nt, Human
gugcuuguguaauuuau

SEQ ID NO: 3579047 - RNA, 15 nt, Human
gugcuuuaugcugaa

SEQ ID NO: 3579048 - RNA, 20 nt, Human
gugcuuuccagcucaccccc

SEQ ID NO: 3579049 - RNA, 20 nt, Human
gugcuuuccauucgugaaaa

SEQ ID NO: 3579050 - RNA, 20 nt, Human
gugcuuuccuuuuuuaaaaa

SEQ ID NO: 3579051 - RNA, 13 nt, Human
gugcuuucuauug

SEQ ID NO: 3579052 - RNA, 19 nt, Human
gugcuuucuauuguacaga

SEQ ID NO: 3579053 - RNA, 23 nt, Human
gugcuuucuucucccaauucauc

SEQ ID NO: 3579054 - RNA, 18 nt, Human
gugcuuuuauagaggcua

SEQ ID NO: 3579055 - RNA, 12 nt, Human
guggaaaaauau

SEQ ID NO: 3579056 - RNA, 15 nt, Human
guggaaaaauauuua

SEQ ID NO: 3579057 - RNA, 16 nt, Human
guggaaaacuuaugcu

SEQ ID NO: 3579058 - RNA, 23 nt, Human
guggaaaagccaagaggcugcag

SEQ ID NO: 3579059 - RNA, 23 nt, Human
guggaaagccucugcugccaugg

SEQ ID NO: 3579060 - RNA, 13 nt, Human
guggaaagggugc

SEQ ID NO: 3579061 - RNA, 22 nt, Human
guggaaagggugcugcuucccu

SEQ ID NO: 3579062 - RNA, 19 nt, Human
guggaaagugaauuugaau

SEQ ID NO: 3579063 - RNA, 13 nt, Human
guggaaaguguaa

SEQ ID NO: 3579064 - RNA, 15 nt, Human
guggaaaguguaaag

SEQ ID NO: 3579065 - RNA, 18 nt, Human
guggaaaguguaaagcau

SEQ ID NO: 3579066 - RNA, 21 nt, Human
guggaaaguguaaagcauucc

SEQ ID NO: 3579067 - RNA, 23 nt, Human
guggaaaguguaaagcauuccaa

SEQ ID NO: 3579068 - RNA, 18 nt, Human
guggaaauuaagaagaaa

SEQ ID NO: 3579069 - RNA, 20 nt, Human
guggaaauuaagacuuuaug

SEQ ID NO: 3579070 - RNA, 21 nt, Human
guggaacauaaaaaggacauc

SEQ ID NO: 3579071 - RNA, 21 nt, Human
guggaaccacugacuacuggc

SEQ ID NO: 3579072 - RNA, 13 nt, Human
guggaacccagca

SEQ ID NO: 3579073 - RNA, 17 nt, Human
guggaaccucugucuca

SEQ ID NO: 3579074 - RNA, 20 nt, Human
guggaaccucugucucaucc

SEQ ID NO: 3579075 - RNA, 16 nt, Human
guggaacgaaaaugaa

SEQ ID NO: 3579076 - RNA, 16 nt, Human
guggaacuaauaaaua

SEQ ID NO: 3579077 - RNA, 18 nt, Human
guggaacugcguuaugaa

SEQ ID NO: 3579078 - RNA, 16 nt, Human
guggaacugcugccac

SEQ ID NO: 3579079 - RNA, 20 nt, Human
guggaagaaaaugguuuauu

SEQ ID NO: 3579080 - RNA, 16 nt, Human
guggaagaagagggag

SEQ ID NO: 3579081 - RNA, 15 nt, Human
guggaagaagggaga

SEQ ID NO: 3579082 - RNA, 14 nt, Human
guggaagcccuccu

SEQ ID NO: 3579083 - RNA, 18 nt, Human
guggaagcccuccuucca

SEQ ID NO: 3579084 - RNA, 14 nt, Human
guggaagcuugggg

SEQ ID NO: 3579085 - RNA, 11 nt, Human
guggaaggaaa

SEQ ID NO: 3579086 - RNA, 17 nt, Human
guggaaggcagagaaau

SEQ ID NO: 3579087 - RNA, 20 nt, Human
guggaaggcaucagucccua

SEQ ID NO: 3579088 - RNA, 14 nt, Human
guggaauaaaauac

SEQ ID NO: 3579089 - RNA, 18 nt, Human
guggaauaguauccucca

SEQ ID NO: 3579090 - RNA, 19 nt, Human
guggaauaguauccuccag

SEQ ID NO: 3579091 - RNA, 18 nt, Human
guggaaugagugugcaug

SEQ ID NO: 3579092 - RNA, 20 nt, Human
guggaauguuggauaaggaa

SEQ ID NO: 3579093 - RNA, 15 nt, Human
guggaauuauuuuaa

SEQ ID NO: 3579094 - RNA, 19 nt, Human
guggaauuauuuuaaaaga

SEQ ID NO: 3579095 - RNA, 18 nt, Human
guggaauuucuuguuucu

SEQ ID NO: 3579096 - RNA, 17 nt, Human
guggacacagcucuucu

SEQ ID NO: 3579097 - RNA, 18 nt, Human
guggacacagcucuucuc

SEQ ID NO: 3579098 - RNA, 22 nt, Human
guggacacagcucuucuccagg

SEQ ID NO: 3579099 - RNA, 21 nt, Human
guggacaccaggagucccugg

SEQ ID NO: 3579100 - RNA, 22 nt, Human
guggacaccaggagucccuggu

SEQ ID NO: 3579101 - RNA, 11 nt, Human
guggacaccug

SEQ ID NO: 3579102 - RNA, 14 nt, Human
guggacaccugccc

SEQ ID NO: 3579103 - RNA, 19 nt, Human
guggacaccugcccugccc

SEQ ID NO: 3579104 - RNA, 13 nt, Human
guggacaguccug

SEQ ID NO: 3579105 - RNA, 14 nt, Human
guggacaguccugg

SEQ ID NO: 3579106 - RNA, 18 nt, Human
guggacccugaaaugugu

SEQ ID NO: 3579107 - RNA, 21 nt, Human
guggaccuuaggccuuccucu

SEQ ID NO: 3579108 - RNA, 14 nt, Human
guggaccuuccugc

SEQ ID NO: 3579109 - RNA, 15 nt, Human
guggaccuuccugcc

SEQ ID NO: 3579110 - RNA, 14 nt, Human
guggacuaaaagau

SEQ ID NO: 3579111 - RNA, 23 nt, Human
guggacuaaaagauauaagugcu

SEQ ID NO: 3579112 - RNA, 21 nt, Human
guggacuagaccuccagcugu

SEQ ID NO: 3579113 - RNA, 18 nt, Human
guggacucagaaagccaa

SEQ ID NO: 3579114 - RNA, 21 nt, Human
guggacuccagacucucugug

SEQ ID NO: 3579115 - RNA, 23 nt, Human
guggacucuuugguggcuuugca

SEQ ID NO: 3579116 - RNA, 21 nt, Human
guggacugaccuuguaaaaga

SEQ ID NO: 3579117 - RNA, 17 nt, Human
guggacuggccccuggg

SEQ ID NO: 3579118 - RNA, 14 nt, Human
guggacuguggcac

SEQ ID NO: 3579119 - RNA, 16 nt, Human
guggacuuagaaagca

SEQ ID NO: 3579120 - RNA, 23 nt, Human
guggacuuaggaagguggccuuc

SEQ ID NO: 3579121 - RNA, 16 nt, Human
guggacuugaacuuuc

SEQ ID NO: 3579122 - RNA, 20 nt, Human
guggagaaagcacugaccug

SEQ ID NO: 3579123 - RNA, 24 nt, Human
guggagaagcacacucuggucuug

SEQ ID NO: 3579124 - RNA, 13 nt, Human
guggagaagccau

SEQ ID NO: 3579125 - RNA, 15 nt, Human
guggagaagccauug

SEQ ID NO: 3579126 - RNA, 19 nt, Human
guggagacaaugucugcag

SEQ ID NO: 3579127 - RNA, 22 nt, Human
guggagacaaugucugcagccc

SEQ ID NO: 3579128 - RNA, 11 nt, Human
guggagacugc

SEQ ID NO: 3579129 - RNA, 12 nt, Human
guggagagcugg

SEQ ID NO: 3579130 - RNA, 14 nt, Human
guggagagcuggug

SEQ ID NO: 3579131 - RNA, 12 nt, Human
guggagagggaa

SEQ ID NO: 3579132 - RNA, 19 nt, Human
guggcuagucaagcuccuc

SEQ ID NO: 3579133 - RNA, 23 nt, Human
guggcuagucaagcuccuccucc

SEQ ID NO: 3579134 - RNA, 19 nt, Human
guggcuagucagagagagu

SEQ ID NO: 3579135 - RNA, 15 nt, Human
guggcuauccugauu

SEQ ID NO: 3579136 - RNA, 15 nt, Human
guggcucagccagca

SEQ ID NO: 3579137 - RNA, 19 nt, Human
guggcucaugccuguaauc

SEQ ID NO: 3579138 - RNA, 18 nt, Human
guggcuccuaucuguguu

SEQ ID NO: 3579139 - RNA, 15 nt, Human
guggcuccucccagc

SEQ ID NO: 3579140 - RNA, 20 nt, Human
guggcuccucccggugccca

SEQ ID NO: 3579141 - RNA, 13 nt, Human
guggcuccuuccc

SEQ ID NO: 3579142 - RNA, 18 nt, Human
guggcucgggaggcgaag

SEQ ID NO: 3579143 - RNA, 21 nt, Human
guggcucugaggugccugucc

SEQ ID NO: 3579144 - RNA, 15 nt, Human
guggcugagccccug

SEQ ID NO: 3579145 - RNA, 18 nt, Human
guggcugaggaggccucc

SEQ ID NO: 3579146 - RNA, 15 nt, Human
guggcugcagcagcg

SEQ ID NO: 3579147 - RNA, 15 nt, Human
guggcugcagccuca

SEQ ID NO: 3579148 - RNA, 17 nt, Human
guggcugcagccucagg

SEQ ID NO: 3579149 - RNA, 16 nt, Human
guggcugcccacacac

SEQ ID NO: 3579150 - RNA, 20 nt, Human
guggcugccucauuuagaga

SEQ ID NO: 3579151 - RNA, 16 nt, Human
guggcugccuggagcc

SEQ ID NO: 3579152 - RNA, 13 nt, Human
guggcugcugccc

SEQ ID NO: 3579153 - RNA, 16 nt, Human
guggcugcugcccagg

SEQ ID NO: 3579154 - RNA, 23 nt, Human
guggcugcuucaaggauccugag

SEQ ID NO: 3579155 - RNA, 22 nt, Human
guggcuggaaccacauugaaga

SEQ ID NO: 3579156 - RNA, 17 nt, Human
guggcuggaucugugag

SEQ ID NO: 3579157 - RNA, 13 nt, Human
guggcuggggcau

SEQ ID NO: 3579158 - RNA, 15 nt, Human
guggcugucagcagg

SEQ ID NO: 3579159 - RNA, 19 nt, Human
guggcugucagcaggaagc

SEQ ID NO: 3579160 - RNA, 15 nt, Human
guggcuguccagugc

SEQ ID NO: 3579161 - RNA, 12 nt, Human
guggcugucugg

SEQ ID NO: 3579162 - RNA, 13 nt, Human
guggcugucugga

SEQ ID NO: 3579163 - RNA, 22 nt, Human
guggcuguggaauaggaacgcu

SEQ ID NO: 3579164 - RNA, 21 nt, Human
guggcuguugacgcaccugug

SEQ ID NO: 3579165 - RNA, 16 nt, Human
guggcuucacuccugc

SEQ ID NO: 3579166 - RNA, 20 nt, Human
guggcuucauuagagcaggc

SEQ ID NO: 3579167 - RNA, 21 nt, Human
guggcuucauuagagcaggcg

SEQ ID NO: 3579168 - RNA, 18 nt, Human
guggcuucccgcucagcc

SEQ ID NO: 3579169 - RNA, 13 nt, Human
guggcuucugaug

SEQ ID NO: 3579170 - RNA, 14 nt, Human
guggcuucuuaauc

SEQ ID NO: 3579171 - RNA, 20 nt, Human
guggcuucuuuucuuuguau

SEQ ID NO: 3579172 - RNA, 21 nt, Human
guggcuuuccuuguggcagag

SEQ ID NO: 3579173 - RNA, 16 nt, Human
guggcuuugccaucgu

SEQ ID NO: 3579174 - RNA, 17 nt, Human
gugggaacgugacugcc

SEQ ID NO: 3579175 - RNA, 21 nt, Human
gugggaagaaacaaacccguu

SEQ ID NO: 3579176 - RNA, 15 nt, Human
gugggaaggacuugg

SEQ ID NO: 3579177 - RNA, 13 nt, Human
gugggaaggccag

SEQ ID NO: 3579178 - RNA, 17 nt, Human
gugggaagggcuacacc

SEQ ID NO: 3579179 - RNA, 21 nt, Human
gugggacagcccagagccugg

SEQ ID NO: 3579180 - RNA, 13 nt, Human
gugggaccccagg

SEQ ID NO: 3579181 - RNA, 19 nt, Human
gugggacggugcccaagcc

SEQ ID NO: 3579182 - RNA, 13 nt, Human
gugggagagccca

SEQ ID NO: 3579183 - RNA, 20 nt, Human
gugggagcaaacugcaugcc

SEQ ID NO: 3579184 - RNA, 14 nt, Human
gugggagcaggaga

SEQ ID NO: 3579185 - RNA, 17 nt, Human
gugggagccagggcugu

SEQ ID NO: 3579186 - RNA, 11 nt, Human
gugggagccuc

SEQ ID NO: 3579187 - RNA, 16 nt, Human
gugggagcgugggagg

SEQ ID NO: 3579188 - RNA, 23 nt, Human
gugggaggaucucuugagccugg

SEQ ID NO: 3579189 - RNA, 19 nt, Human
gugggagggagcagacagg

SEQ ID NO: 3579190 - RNA, 13 nt, Human
gugggaggggcag

SEQ ID NO: 3579191 - RNA, 20 nt, Human
gugggaggguaccagcagaa

SEQ ID NO: 3579192 - RNA, 17 nt, Human
gugggaggugagaccac

SEQ ID NO: 3579193 - RNA, 17 nt, Human
gugggagguggaagaag

SEQ ID NO: 3579194 - RNA, 14 nt, Human
gugggaguguguaa

SEQ ID NO: 3579195 - RNA, 17 nt, Human
gugggauaucccuaugc

SEQ ID NO: 3579196 - RNA, 16 nt, Human
gugggaugaaccagcc

SEQ ID NO: 3579197 - RNA, 14 nt, Human
gugggauggaggag

SEQ ID NO: 3579198 - RNA, 20 nt, Human
gugggaugugguuuucuuaa

SEQ ID NO: 3579199 - RNA, 23 nt, Human
gugggauguucagcacugucccu

SEQ ID NO: 3579200 - RNA, 20 nt, Human
gugggauuuccagaaccaca

SEQ ID NO: 3579201 - RNA, 16 nt, Human
gugggcacccacccug

SEQ ID NO: 3579202 - RNA, 23 nt, Human
gugggcacgcugugggcaggugg

SEQ ID NO: 3579203 - RNA, 13 nt, Human
gugggcaggaaaa

SEQ ID NO: 3579204 - RNA, 20 nt, Human
gugggcaggugggagcuuga

SEQ ID NO: 3579205 - RNA, 15 nt, Human
gugggcauucaaaug

SEQ ID NO: 3579206 - RNA, 20 nt, Human
gugggcauugauggggaagg

SEQ ID NO: 3579207 - RNA, 15 nt, Human
gugggccagccccuc

SEQ ID NO: 3579208 - RNA, 14 nt, Human
gugggccagggcug

SEQ ID NO: 3579209 - RNA, 15 nt, Human
gugggccagucugug

SEQ ID NO: 3579210 - RNA, 18 nt, Human
gugggccagucuguggau

SEQ ID NO: 3579211 - RNA, 17 nt, Human
gugggccagugugggaa

SEQ ID NO: 3579212 - RNA, 17 nt, Human
gugggcccaaugcacuu

SEQ ID NO: 3579213 - RNA, 22 nt, Human
gugggcccacccggugggaccc

SEQ ID NO: 3579214 - RNA, 14 nt, Human
gugggcccaggacc

SEQ ID NO: 3579215 - RNA, 15 nt, Human
gugggccuccucugu

SEQ ID NO: 3579216 - RNA, 12 nt, Human
gugggccucugg

SEQ ID NO: 3579217 - RNA, 13 nt, Human
gugggccugggcu

SEQ ID NO: 3579218 - RNA, 17 nt, Human
gugggccugggcuccug

SEQ ID NO: 3579219 - RNA, 21 nt, Human
gugggccugggcuccuggacc

SEQ ID NO: 3579220 - RNA, 15 nt, Human
gugggccuugcuggg

SEQ ID NO: 3579221 - RNA, 19 nt, Human
gugggcgggcagcacagca

SEQ ID NO: 3579222 - RNA, 18 nt, Human
gugggcgugagaccugcc

SEQ ID NO: 3579223 - RNA, 19 nt, Human
gugggcuacaugcuggggu

SEQ ID NO: 3579224 - RNA, 14 nt, Human
gugggcucccugac

SEQ ID NO: 3579225 - RNA, 15 nt, Human
gugggcucccugacu

SEQ ID NO: 3579226 - RNA, 13 nt, Human
gugggcuccuggc

SEQ ID NO: 3579227 - RNA, 13 nt, Human
gugggcugagccc

SEQ ID NO: 3579228 - RNA, 18 nt, Human
gugggcugagcccuggca

SEQ ID NO: 3579229 - RNA, 15 nt, Human
gugggcugcaucugg

SEQ ID NO: 3579230 - RNA, 19 nt, Human
gugggcuggacuucuaccu

SEQ ID NO: 3579231 - RNA, 16 nt, Human
gugggcuucagggcag

SEQ ID NO: 3579232 - RNA, 17 nt, Human
guggggaagugaucuuu

SEQ ID NO: 3579233 - RNA, 18 nt, Human
guggggacccaggcuccg

SEQ ID NO: 3579234 - RNA, 15 nt, Human
guggggaccucaggc

SEQ ID NO: 3579235 - RNA, 18 nt, Human
guggggaccucaggccug

SEQ ID NO: 3579236 - RNA, 22 nt, Human
guggggacguccugccaccugg

SEQ ID NO: 3579237 - RNA, 17 nt, Human
guggggagacugggcug

SEQ ID NO: 3579238 - RNA, 21 nt, Human
guggggagagacgggcccugg

SEQ ID NO: 3579239 - RNA, 16 nt, Human
guggggaggaaauaga

SEQ ID NO: 3579240 - RNA, 11 nt, Human
guggggagggg

SEQ ID NO: 3579241 - RNA, 19 nt, Human
guggggauaggccagccgc

SEQ ID NO: 3579242 - RNA, 14 nt, Human
guggggcagcacag

SEQ ID NO: 3579243 - RNA, 14 nt, Human
guggggccagguca

SEQ ID NO: 3579244 - RNA, 22 nt, Human
guggggccaugccuccucagga

SEQ ID NO: 3579245 - RNA, 14 nt, Human
guggggccugggag

SEQ ID NO: 3579246 - RNA, 13 nt, Human
guggggccuuggu

SEQ ID NO: 3579247 - RNA, 14 nt, Human
guggggcugcuccu

SEQ ID NO: 3579248 - RNA, 16 nt, Human
guggggcugcuccucc

SEQ ID NO: 3579249 - RNA, 20 nt, Human
guggggcugguagcucaggu

SEQ ID NO: 3579250 - RNA, 17 nt, Human
guggggcuuggcgugga

SEQ ID NO: 3579251 - RNA, 15 nt, Human
gugggggaaaaauaa

SEQ ID NO: 3579252 - RNA, 22 nt, Human
gugggggaagagcacagcccuc

SEQ ID NO: 3579253 - RNA, 17 nt, Human
gugggggcagagggcag

SEQ ID NO: 3579254 - RNA, 19 nt, Human
gugggggccaccugccugc

SEQ ID NO: 3579255 - RNA, 15 nt, Human
guggggggcuucaua

SEQ ID NO: 3579256 - RNA, 16 nt, Human
guggggggcuucauac

SEQ ID NO: 3579257 - RNA, 23 nt, Human
gugggggugcagaugagguugcu

SEQ ID NO: 3579258 - RNA, 10 nt, Human
gugggggugg

SEQ ID NO: 3579259 - RNA, 22 nt, Human
guggggguggaauaaaauacua

SEQ ID NO: 3579260 - RNA, 16 nt, Human
guggggguuggcuggg

SEQ ID NO: 3579261 - RNA, 19 nt, Human
guggggguuggcuggguac

SEQ ID NO: 3579262 - RNA, 17 nt, Human
guggggucucccucucc

SEQ ID NO: 3579263 - RNA, 22 nt, Human
guggggucucccucuccugccu

SEQ ID NO: 3579264 - RNA, 17 nt, Human
guggggugaggaccacu

SEQ ID NO: 3579265 - RNA, 19 nt, Human
gugggguggcugcagccuc

SEQ ID NO: 3579266 - RNA, 22 nt, Human
gugggguguguuccaacugccc

SEQ ID NO: 3579267 - RNA, 14 nt, Human
guggguagacacac

SEQ ID NO: 3579268 - RNA, 12 nt, Human
guggguauaaaa

SEQ ID NO: 3579269 - RNA, 13 nt, Human
guggguauaaaag

SEQ ID NO: 3579270 - RNA, 21 nt, Human
gugggucaugaugcucuuucc

SEQ ID NO: 3579271 - RNA, 16 nt, Human
guggguccaggggccc

SEQ ID NO: 3579272 - RNA, 20 nt, Human
guggguccaggggccccucc

SEQ ID NO: 3579273 - RNA, 14 nt, Human
gugggucuggagga

SEQ ID NO: 3579274 - RNA, 17 nt, Human
gugggucuucagggggc

SEQ ID NO: 3579275 - RNA, 18 nt, Human
gugggugaaagaaaucau

SEQ ID NO: 3579276 - RNA, 15 nt, Human
gugggugagaugcug

SEQ ID NO: 3579277 - RNA, 13 nt, Human
gugggugcucaga

SEQ ID NO: 3579278 - RNA, 14 nt, Human
uuuuuuuuguuugu

SEQ ID NO: 3579279 - RNA, 15 nt, Human
uuaaaaaaucuuaau

SEQ ID NO: 3579280 - RNA, 16 nt, Human
uuaaaaaaugaaaaua

SEQ ID NO: 3579281 - RNA, 18 nt, Human
uuaaaaaccgaauaaaug

SEQ ID NO: 3579282 - RNA, 21 nt, Human
uuaaaaaccuguucaagucua

SEQ ID NO: 3579283 - RNA, 22 nt, Human
uuaaaaacuaguaguucucuug

SEQ ID NO: 3579284 - RNA, 16 nt, Human
uuaaaaacuauuuaac

SEQ ID NO: 3579285 - RNA, 18 nt, Human
uuaaaaacugaaaaaucu

SEQ ID NO: 3579286 - RNA, 14 nt, Human
uuaaaaacugagug

SEQ ID NO: 3579287 - RNA, 20 nt, Human
uuaaaaagaaaaguuuauaa

SEQ ID NO: 3579288 - RNA, 20 nt, Human
uuaaaaagaaacaagaugcu

SEQ ID NO: 3579289 - RNA, 18 nt, Human
uuaaaaagauucuuuuuc

SEQ ID NO: 3579290 - RNA, 17 nt, Human
uuaaaaagcccaaccuc

SEQ ID NO: 3579291 - RNA, 15 nt, Human
uuaaaaaggaacugc

SEQ ID NO: 3579292 - RNA, 21 nt, Human
uuaaaaagggaagaaacugcu

SEQ ID NO: 3579293 - RNA, 20 nt, Human
uuaaaaaguaauaaaauuca

SEQ ID NO: 3579294 - RNA, 12 nt, Human
uuaaaaaguauu

SEQ ID NO: 3579295 - RNA, 21 nt, Human
uuaaaaaguauugccaaacau

SEQ ID NO: 3579296 - RNA, 22 nt, Human
uuaaaaaguauugccaaacauu

SEQ ID NO: 3579297 - RNA, 16 nt, Human
uuaaaaagucugcauu

SEQ ID NO: 3579298 - RNA, 22 nt, Human
uuaaaaagucugcauuacauuc

SEQ ID NO: 3579299 - RNA, 16 nt, Human
uuaaaaagucuuuuaa

SEQ ID NO: 3579300 - RNA, 18 nt, Human
uuaaaaaguggaaaaaua

SEQ ID NO: 3579301 - RNA, 17 nt, Human
uuaaaaaguuguucaac

SEQ ID NO: 3579302 - RNA, 15 nt, Human
uuaaaaauaaagcaa

SEQ ID NO: 3579303 - RNA, 21 nt, Human
uuaaaaauaagucaacaguaa

SEQ ID NO: 3579304 - RNA, 20 nt, Human
uuaaaaauaauagagcccca

SEQ ID NO: 3579305 - RNA, 14 nt, Human
uuaaaaauacauau

SEQ ID NO: 3579306 - RNA, 15 nt, Human
uuaaaaauagaaaca

SEQ ID NO: 3579307 - RNA, 15 nt, Human
uuaaaaauauaaaac

SEQ ID NO: 3579308 - RNA, 16 nt, Human
uuaaaaauauaaaacu

SEQ ID NO: 3579309 - RNA, 15 nt, Human
uuaaaaaucaacuuu

SEQ ID NO: 3579310 - RNA, 15 nt, Human
uuaaaaaucucaaau

SEQ ID NO: 3579311 - RNA, 17 nt, Human
uuaaaaaucucaaauuu

SEQ ID NO: 3579312 - RNA, 20 nt, Human
uuaaaaaucucaaauuucua

SEQ ID NO: 3579313 - RNA, 17 nt, Human
uuaaaaauggaacugug

SEQ ID NO: 3579314 - RNA, 13 nt, Human
uuaaaaaugguaa

SEQ ID NO: 3579315 - RNA, 24 nt, Human
uuaaaaaugguaucaaaauuacau

SEQ ID NO: 3579316 - RNA, 18 nt, Human
uuaaaaaugguggcuuca

SEQ ID NO: 3579317 - RNA, 20 nt, Human
uuaaaaaugguuuaaauggu

SEQ ID NO: 3579318 - RNA, 20 nt, Human
uuaaaaauugucuucaugua

SEQ ID NO: 3579319 - RNA, 17 nt, Human
uuaaaacaacacucaca

SEQ ID NO: 3579320 - RNA, 19 nt, Human
uuaaaacaagaaaguuucc

SEQ ID NO: 3579321 - RNA, 12 nt, Human
uuaaaacaaugu

SEQ ID NO: 3579322 - RNA, 20 nt, Human
uuaaaacacauguuuuuaua

SEQ ID NO: 3579323 - RNA, 13 nt, Human
uuaaaacacguuu

SEQ ID NO: 3579324 - RNA, 22 nt, Human
uuaaaacacguuuuaaggacug

SEQ ID NO: 3579325 - RNA, 13 nt, Human
uuaaaacaguauu

SEQ ID NO: 3579326 - RNA, 20 nt, Human
uuaaaacaguauuuauuuug

SEQ ID NO: 3579327 - RNA, 15 nt, Human
uuaaaacauuaaaau

SEQ ID NO: 3579328 - RNA, 14 nt, Human
uuaaaacccaagug

SEQ ID NO: 3579329 - RNA, 18 nt, Human
uuaaaaccugcuuuucaa

SEQ ID NO: 3579330 - RNA, 16 nt, Human
uuaaaacuacuuagca

SEQ ID NO: 3579331 - RNA, 21 nt, Human
uuaaaacuaggcauuuguaaa

SEQ ID NO: 3579332 - RNA, 22 nt, Human
uuaaaacuaguuagauucacuu

SEQ ID NO: 3579333 - RNA, 20 nt, Human
uuaaaacugcaguuuucaga

SEQ ID NO: 3579334 - RNA, 16 nt, Human
uuaaaacuggaccugu

SEQ ID NO: 3579335 - RNA, 14 nt, Human
uuaaaacuuuaauc

SEQ ID NO: 3579336 - RNA, 16 nt, Human
uuaaaagaaaaaauga

SEQ ID NO: 3579337 - RNA, 23 nt, Human
uuaaaagaaaauaaaaaaaagaa

SEQ ID NO: 3579338 - RNA, 21 nt, Human
uuaaaagaaaggguucuguaa

SEQ ID NO: 3579339 - RNA, 22 nt, Human
uuaaaagaaaggguucuguaaa

SEQ ID NO: 3579340 - RNA, 16 nt, Human
uuaaaagaaauuuauu

SEQ ID NO: 3579341 - RNA, 20 nt, Human
uuaaaagaaugggcaguuac

SEQ ID NO: 3579342 - RNA, 16 nt, Human
uuaaaagacaagacuu

SEQ ID NO: 3579343 - RNA, 17 nt, Human
uuaaaagacaagacuuc

SEQ ID NO: 3579344 - RNA, 18 nt, Human
uuaaaagacucauccguc

SEQ ID NO: 3579345 - RNA, 11 nt, Human
uuaaaagagag

SEQ ID NO: 3579346 - RNA, 14 nt, Human
uuaaaagauacagu

SEQ ID NO: 3579347 - RNA, 20 nt, Human
uuaaaagaugcuuuuaacag

SEQ ID NO: 3579348 - RNA, 16 nt, Human
uuaaaagauucauuuu

SEQ ID NO: 3579349 - RNA, 21 nt, Human
uuaaaagcaaaucauuuguuu

SEQ ID NO: 3579350 - RNA, 23 nt, Human
uuaaaagcuaucuucauguaaau

SEQ ID NO: 3579351 - RNA, 17 nt, Human
uuaaaaggauuuuuauc

SEQ ID NO: 3579352 - RNA, 20 nt, Human
uuaaaaggauuuuuaucuuu

SEQ ID NO: 3579353 - RNA, 21 nt, Human
uuaaaagggauuacccaagca

SEQ ID NO: 3579354 - RNA, 15 nt, Human
uuaaaaguaaaagag

SEQ ID NO: 3579355 - RNA, 17 nt, Human
uuaaaaguaaaaugucu

SEQ ID NO: 3579356 - RNA, 12 nt, Human
uuaaaaguaucc

SEQ ID NO: 3579357 - RNA, 17 nt, Human
uuaaaaguugaauuuuu

SEQ ID NO: 3579358 - RNA, 13 nt, Human
uuaaaauaaacuu

SEQ ID NO: 3579359 - RNA, 14 nt, Human
uuaaaauaaauggu

SEQ ID NO: 3579360 - RNA, 15 nt, Human
uuaaaauaacuagug

SEQ ID NO: 3579361 - RNA, 12 nt, Human
uuaaaauaauau

SEQ ID NO: 3579362 - RNA, 17 nt, Human
uuaaaauacaagacugc

SEQ ID NO: 3579363 - RNA, 12 nt, Human
uuaaaauacugu

SEQ ID NO: 3579364 - RNA, 17 nt, Human
uuaaaauacuguagaua

SEQ ID NO: 3579365 - RNA, 20 nt, Human
uuaaaauagaaauuuuguaa

SEQ ID NO: 3579366 - RNA, 19 nt, Human
uuaaaauagcaaaagaaga

SEQ ID NO: 3579367 - RNA, 21 nt, Human
uuaaaauagcaaaagaagaag

SEQ ID NO: 3579368 - RNA, 22 nt, Human
uuaaaauagcaaaagaagaagu

SEQ ID NO: 3579369 - RNA, 23 nt, Human
uuaaaauagcaaaagaagaaguu

SEQ ID NO: 3579370 - RNA, 20 nt, Human
uuaaaauagcguucuuguaa

SEQ ID NO: 3579371 - RNA, 22 nt, Human
uuaaaauagcguucuuguaauu

SEQ ID NO: 3579372 - RNA, 23 nt, Human
uuaaaauagcguucuuguaauuu

SEQ ID NO: 3579373 - RNA, 22 nt, Human
uuaaaauaggggauauuuaagg

SEQ ID NO: 3579374 - RNA, 14 nt, Human
uuaaaauauggcua

SEQ ID NO: 3579375 - RNA, 12 nt, Human
uuaaaauauuuu

SEQ ID NO: 3579376 - RNA, 23 nt, Human
uuaaaaucacuaacauuauauug

SEQ ID NO: 3579377 - RNA, 16 nt, Human
uuaaaaucagcuauuu

SEQ ID NO: 3579378 - RNA, 14 nt, Human
uuaaaaucauuucu

SEQ ID NO: 3579379 - RNA, 22 nt, Human
uuaaaaucauuucugcaucagc

SEQ ID NO: 3579380 - RNA, 19 nt, Human
uuaaaaucuauucuguguu

SEQ ID NO: 3579381 - RNA, 23 nt, Human
uuaaaaucuauucuguguugcau

SEQ ID NO: 3579382 - RNA, 21 nt, Human
uuaaaaucugagggaaauguu

SEQ ID NO: 3579383 - RNA, 22 nt, Human
uuaaaaucugagggaaauguuu

SEQ ID NO: 3579384 - RNA, 19 nt, Human
uuaaaaucuuauuaaaguu

SEQ ID NO: 3579385 - RNA, 18 nt, Human
uuaaaaugcaaaauaaug

SEQ ID NO: 3579386 - RNA, 12 nt, Human
uuaaaaugcaau

SEQ ID NO: 3579387 - RNA, 14 nt, Human
uuaaaauguacaug

SEQ ID NO: 3579388 - RNA, 17 nt, Human
uuaaaauguacauguau

SEQ ID NO: 3579389 - RNA, 17 nt, Human
uuaaaauguaugcaugu

SEQ ID NO: 3579390 - RNA, 23 nt, Human
uuaaaauucucuuccaaccauuu

SEQ ID NO: 3579391 - RNA, 19 nt, Human
uuaaaauuucuuagaaaac

SEQ ID NO: 3579392 - RNA, 12 nt, Human
uuaaaauuuuaa

SEQ ID NO: 3579393 - RNA, 16 nt, Human
uuaaaauuuuguaugu

SEQ ID NO: 3579394 - RNA, 20 nt, Human
uuaaacaaaauagaagcugu

SEQ ID NO: 3579395 - RNA, 17 nt, Human
uuaaacaaaguuucaga

SEQ ID NO: 3579396 - RNA, 23 nt, Human
uuaaacacacagauacacacaca

SEQ ID NO: 3579397 - RNA, 13 nt, Human
uuaaacagaggau

SEQ ID NO: 3579398 - RNA, 22 nt, Human
uuaaacagaugaugagaauuuc

SEQ ID NO: 3579399 - RNA, 12 nt, Human
uuaaacagcagu

SEQ ID NO: 3579400 - RNA, 21 nt, Human
uuaaacagggcaucuccagga

SEQ ID NO: 3579401 - RNA, 19 nt, Human
uuaaacaguauuucauugc

SEQ ID NO: 3579402 - RNA, 18 nt, Human
uuaaacagugagccugaa

SEQ ID NO: 3579403 - RNA, 23 nt, Human
uuaaacagugagccugaauuuug

SEQ ID NO: 3579404 - RNA, 13 nt, Human
uuaaacaguugca

SEQ ID NO: 3579405 - RNA, 21 nt, Human
uuaaacaguugcacagcaucu

SEQ ID NO: 3579406 - RNA, 23 nt, Human
uuaaacaguugcacagcaucuca

SEQ ID NO: 3579407 - RNA, 19 nt, Human
uuaaacaugcuguacauac

SEQ ID NO: 3579408 - RNA, 23 nt, Human
uuaaacaugcuguacauacuuuu

SEQ ID NO: 3579409 - RNA, 13 nt, Human
uuaaacauuaaaa

SEQ ID NO: 3579410 - RNA, 18 nt, Human
uuaaacauuaaaaaugga

SEQ ID NO: 3579411 - RNA, 21 nt, Human
uuaaacauuaaaaauggaacu

SEQ ID NO: 3579412 - RNA, 22 nt, Human
uuaaacauugguucuuguauua

SEQ ID NO: 3579413 - RNA, 21 nt, Human
uuaaaccaguuuagauuucaa

SEQ ID NO: 3579414 - RNA, 19 nt, Human
uuaaaccauaaaaagcuga

SEQ ID NO: 3579415 - RNA, 17 nt, Human
uuaaaccaucucccugg

SEQ ID NO: 3579416 - RNA, 21 nt, Human
uuaaaccaugggauaaaugcc

SEQ ID NO: 3579417 - RNA, 16 nt, Human
uuaaacccauuuuagu

SEQ ID NO: 3579418 - RNA, 20 nt, Human
uuaaacccuggaucaguccu

SEQ ID NO: 3579419 - RNA, 16 nt, Human
uuaaaccgcuaaaaga

SEQ ID NO: 3579420 - RNA, 14 nt, Human
uuaaaccuauacuc

SEQ ID NO: 3579421 - RNA, 22 nt, Human
uuaaaccuguuuuuuuuucauu

SEQ ID NO: 3579422 - RNA, 17 nt, Human
uuaaauuacauuuguaa

SEQ ID NO: 3579423 - RNA, 18 nt, Human
uuaaauuacauuuguaau

SEQ ID NO: 3579424 - RNA, 11 nt, Human
uuaaauuaccu

SEQ ID NO: 3579425 - RNA, 12 nt, Human
uuaaauuauaag

SEQ ID NO: 3579426 - RNA, 16 nt, Human
uuaaauuauguuuuua

SEQ ID NO: 3579427 - RNA, 19 nt, Human
uuaaauucccguuuuguca

SEQ ID NO: 3579428 - RNA, 18 nt, Human
uuaaauucugagacaugu

SEQ ID NO: 3579429 - RNA, 16 nt, Human
uuaaauucuugcaaag

SEQ ID NO: 3579430 - RNA, 20 nt, Human
uuaaauucuuuuuuaaauuu

SEQ ID NO: 3579431 - RNA, 22 nt, Human
uuaaauucuuuuuuaaauuuuc

SEQ ID NO: 3579432 - RNA, 21 nt, Human
uuaaauugcucacaguuauua

SEQ ID NO: 3579433 - RNA, 16 nt, Human
uuaaauugcuguguau

SEQ ID NO: 3579434 - RNA, 22 nt, Human
uuaaauuggguucaugaugcag

SEQ ID NO: 3579435 - RNA, 15 nt, Human
uuaaauuguguuuua

SEQ ID NO: 3579436 - RNA, 18 nt, Human
uuaaauuuaaagauauug

SEQ ID NO: 3579437 - RNA, 15 nt, Human
uuaaauuucuaccgc

SEQ ID NO: 3579438 - RNA, 14 nt, Human
uuaaauuucuuaug

SEQ ID NO: 3579439 - RNA, 18 nt, Human
uuaaauuucuuaugugac

SEQ ID NO: 3579440 - RNA, 21 nt, Human
uuaaauuuguaaguuucaggu

SEQ ID NO: 3579441 - RNA, 15 nt, Human
uuaaauuuuaauuua

SEQ ID NO: 3579442 - RNA, 16 nt, Human
uuaaauuuuaauuuau

SEQ ID NO: 3579443 - RNA, 16 nt, Human
uuaaauuuuacccuuu

SEQ ID NO: 3579444 - RNA, 15 nt, Human
uuaaauuuucuucag

SEQ ID NO: 3579445 - RNA, 16 nt, Human
uuaaauuuuguaauga

SEQ ID NO: 3579446 - RNA, 14 nt, Human
uuaaauuuuguguc

SEQ ID NO: 3579447 - RNA, 18 nt, Human
uuaaauuuuuuguugaca

SEQ ID NO: 3579448 - RNA, 20 nt, Human
uuaaauuuuuuuuacauuuu

SEQ ID NO: 3579449 - RNA, 15 nt, Human
uuaacaaaagcaaga

SEQ ID NO: 3579450 - RNA, 23 nt, Human
uuaacaaacaucacucugcugcu

SEQ ID NO: 3579451 - RNA, 19 nt, Human
uuaacaaacccucguuucu

SEQ ID NO: 3579452 - RNA, 18 nt, Human
uuaacaaauaugcuaauu

SEQ ID NO: 3579453 - RNA, 20 nt, Human
uuaacaaaugcuauuaaagu

SEQ ID NO: 3579454 - RNA, 21 nt, Human
uuaacaacaauaacacugucu

SEQ ID NO: 3579455 - RNA, 14 nt, Human
uuaacaacauguuu

SEQ ID NO: 3579456 - RNA, 16 nt, Human
uuaacaagaagaugaa

SEQ ID NO: 3579457 - RNA, 18 nt, Human
uuaacaauaacuacugug

SEQ ID NO: 3579458 - RNA, 20 nt, Human
uuaacaaugccuauuguaau

SEQ ID NO: 3579459 - RNA, 17 nt, Human
uuaacaauuaggcagac

SEQ ID NO: 3579460 - RNA, 15 nt, Human
uuaacaauuucuguc

SEQ ID NO: 3579461 - RNA, 14 nt, Human
uuaacacacauaaa

SEQ ID NO: 3579462 - RNA, 16 nt, Human
uuaacacacauaaagg

SEQ ID NO: 3579463 - RNA, 14 nt, Human
uuaacacauuuugu

SEQ ID NO: 3579464 - RNA, 22 nt, Human
uuaacacauuuuguauaauugu

SEQ ID NO: 3579465 - RNA, 17 nt, Human
uuaacaccugaugugua

SEQ ID NO: 3579466 - RNA, 12 nt, Human
uuaacagaaaug

SEQ ID NO: 3579467 - RNA, 13 nt, Human
uuaacagaaaugu

SEQ ID NO: 3579468 - RNA, 19 nt, Human
uuaacagaaauguacagca

SEQ ID NO: 3579469 - RNA, 13 nt, Human
uuaacagaaauug

SEQ ID NO: 3579470 - RNA, 17 nt, Human
uuaacagaaauuguaua

SEQ ID NO: 3579471 - RNA, 19 nt, Human
uuaacagagucugaaccua

SEQ ID NO: 3579472 - RNA, 17 nt, Human
uuaacaggcaaacauuu

SEQ ID NO: 3579473 - RNA, 18 nt, Human
uuaacaggcaaacauuuu

SEQ ID NO: 3579474 - RNA, 16 nt, Human
uuaacaguaucucaaa

SEQ ID NO: 3579475 - RNA, 17 nt, Human
uuaacagucauuuaaaa

SEQ ID NO: 3579476 - RNA, 13 nt, Human
uuaacaguuguau

SEQ ID NO: 3579477 - RNA, 13 nt, Human
uuaacaguuuucc

SEQ ID NO: 3579478 - RNA, 14 nt, Human
uuaacauaagcuau

SEQ ID NO: 3579479 - RNA, 16 nt, Human
uuaacauaagcuauuu

SEQ ID NO: 3579480 - RNA, 18 nt, Human
uuaacauaagcuauuuuu

SEQ ID NO: 3579481 - RNA, 21 nt, Human
uuaacauaagcuauuuuucua

SEQ ID NO: 3579482 - RNA, 14 nt, Human
uuaacaucaugaau

SEQ ID NO: 3579483 - RNA, 16 nt, Human
uuaacauggaacucua

SEQ ID NO: 3579484 - RNA, 20 nt, Human
uuaacaugggcucuucacua

SEQ ID NO: 3579485 - RNA, 19 nt, Human
uuaacauguuaaaccaugg

SEQ ID NO: 3579486 - RNA, 11 nt, Human
uuaacauuccu

SEQ ID NO: 3579487 - RNA, 21 nt, Human
uuaacauugaccaagaacugc

SEQ ID NO: 3579488 - RNA, 22 nt, Human
uuaacauugaccaagaacugca

SEQ ID NO: 3579489 - RNA, 14 nt, Human
uuaacauuucaagg

SEQ ID NO: 3579490 - RNA, 14 nt, Human
uuaacauuuuguuc

SEQ ID NO: 3579491 - RNA, 13 nt, Human
uuaaccaaaggug

SEQ ID NO: 3579492 - RNA, 13 nt, Human
uuaaccagaauaa

SEQ ID NO: 3579493 - RNA, 22 nt, Human
uuaaccagaucuagucaaucaa

SEQ ID NO: 3579494 - RNA, 16 nt, Human
uuaaccagucugaagu

SEQ ID NO: 3579495 - RNA, 16 nt, Human
uuaaccauuaaaacug

SEQ ID NO: 3579496 - RNA, 18 nt, Human
uuaaccccauaauuagau

SEQ ID NO: 3579497 - RNA, 17 nt, Human
uuaaccccauguccuca

SEQ ID NO: 3579498 - RNA, 14 nt, Human
uuaaccccccugua

SEQ ID NO: 3579499 - RNA, 17 nt, Human
uuaaccccccuguacac

SEQ ID NO: 3579500 - RNA, 19 nt, Human
uuaaccccgucaacaaauc

SEQ ID NO: 3579501 - RNA, 21 nt, Human
uuaaccgguaagaguuucagu

SEQ ID NO: 3579502 - RNA, 19 nt, Human
uuaaccucagugucauuua

SEQ ID NO: 3579503 - RNA, 15 nt, Human
uuaaccucugcacua

SEQ ID NO: 3579504 - RNA, 13 nt, Human
uuaaccugaugca

SEQ ID NO: 3579505 - RNA, 21 nt, Human
uuaaccuuacuaauuauacua

SEQ ID NO: 3579506 - RNA, 17 nt, Human
uuaacggcuccaggauu

SEQ ID NO: 3579507 - RNA, 19 nt, Human
uuaacggcuccaggauuuu

SEQ ID NO: 3579508 - RNA, 23 nt, Human
uuaacuaaucuauuggguucauu

SEQ ID NO: 3579509 - RNA, 14 nt, Human
uuaacuacauuuau

SEQ ID NO: 3579510 - RNA, 21 nt, Human
uuaacuacccuuaauuacuua

SEQ ID NO: 3579511 - RNA, 18 nt, Human
uuaacuacuauauugauu

SEQ ID NO: 3579512 - RNA, 16 nt, Human
uuaacuagaauuuauu

SEQ ID NO: 3579513 - RNA, 14 nt, Human
uuaacuauguacaa

SEQ ID NO: 3579514 - RNA, 12 nt, Human
uuaacucaauau

SEQ ID NO: 3579515 - RNA, 15 nt, Human
uuaacucauuagacu

SEQ ID NO: 3579516 - RNA, 23 nt, Human
uuaacucccauuaccauguaaug

SEQ ID NO: 3579517 - RNA, 13 nt, Human
uuaacucugucuu

SEQ ID NO: 3579518 - RNA, 16 nt, Human
uuaacugaauaccacu

SEQ ID NO: 3579519 - RNA, 21 nt, Human
uuaacugacaagccaucuuga

SEQ ID NO: 3579520 - RNA, 24 nt, Human
uuaacugcuuccuauaauuuugau

SEQ ID NO: 3579521 - RNA, 20 nt, Human
uuaacuggugcacuuuguaa

SEQ ID NO: 3579522 - RNA, 16 nt, Human
uuaacuuaauaaucaa

SEQ ID NO: 3579523 - RNA, 17 nt, Human
uuaacuuaauaaucaag

SEQ ID NO: 3579524 - RNA, 18 nt, Human
uuaacuuagcuugaagga

SEQ ID NO: 3579525 - RNA, 17 nt, Human
uuaacuuauuuagagau

SEQ ID NO: 3579526 - RNA, 22 nt, Human
uuaacuugaggguaauaaacuu

SEQ ID NO: 3579527 - RNA, 23 nt, Human
uuaacuuuaucacauuauuugca

SEQ ID NO: 3579528 - RNA, 14 nt, Human
uuaacuuuguuuua

SEQ ID NO: 3579529 - RNA, 16 nt, Human
uuaacuuuuauaaacu

SEQ ID NO: 3579530 - RNA, 17 nt, Human
uuaacuuuuauaaacuu

SEQ ID NO: 3579531 - RNA, 22 nt, Human
uuaacuuuuuuucuucuacuuu

SEQ ID NO: 3579532 - RNA, 11 nt, Human
uuaagaaaaaa

SEQ ID NO: 3579533 - RNA, 14 nt, Human
uuaagaaaagagau

SEQ ID NO: 3579534 - RNA, 14 nt, Human
uuaagaaaaguauu

SEQ ID NO: 3579535 - RNA, 15 nt, Human
uuaagaaaaguauuu

SEQ ID NO: 3579536 - RNA, 19 nt, Human
uuaagaaaauacaauaaac

SEQ ID NO: 3579537 - RNA, 11 nt, Human
uuaagaaaauc

SEQ ID NO: 3579538 - RNA, 12 nt, Human
uuaagaaacacu

SEQ ID NO: 3579539 - RNA, 14 nt, Human
uuaagaaacacuga

SEQ ID NO: 3579540 - RNA, 12 nt, Human
uuaagaaauaaa

SEQ ID NO: 3579541 - RNA, 23 nt, Human
uuaagaaauuuugccuuuaaguu

SEQ ID NO: 3579542 - RNA, 19 nt, Human
uuaagaacuaaaauguucu

SEQ ID NO: 3579543 - RNA, 16 nt, Human
uuaagaagcuguugua

SEQ ID NO: 3579544 - RNA, 21 nt, Human
uuaagaagcuguuguacauuu

SEQ ID NO: 3579545 - RNA, 23 nt, Human
uuaagaagcuguuguacauuuau

SEQ ID NO: 3579546 - RNA, 14 nt, Human
uuaagaaugaaaua

SEQ ID NO: 3579547 - RNA, 23 nt, Human
uuaagaaugaguuucuuagacuu

SEQ ID NO: 3579548 - RNA, 16 nt, Human
uuaagaauuucacaag

SEQ ID NO: 3579549 - RNA, 19 nt, Human
uuaagacaagccuggcaac

SEQ ID NO: 3579550 - RNA, 20 nt, Human
uuaagacacugaaaaaucua

SEQ ID NO: 3579551 - RNA, 22 nt, Human
uuaagacacuuccgucacaucc

SEQ ID NO: 3579552 - RNA, 18 nt, Human
uuaagacaugauuuccuu

SEQ ID NO: 3579553 - RNA, 22 nt, Human
uuaagaccuacuguucuaaagc

SEQ ID NO: 3579554 - RNA, 11 nt, Human
uuaagaccugg

SEQ ID NO: 3579555 - RNA, 18 nt, Human
uuaagaccuggcagcucu

SEQ ID NO: 3579556 - RNA, 22 nt, Human
uuaagacgaaacauuuguucua

SEQ ID NO: 3579557 - RNA, 14 nt, Human
uuaagacugauuuu

SEQ ID NO: 3579558 - RNA, 19 nt, Human
uuaagacuuugguuauuuu

SEQ ID NO: 3579559 - RNA, 12 nt, Human
uuaagagaaacu

SEQ ID NO: 3579560 - RNA, 15 nt, Human
uuaagagagaaaucu

SEQ ID NO: 3579561 - RNA, 22 nt, Human
uuaagagagucuauuuacggaa

SEQ ID NO: 3579562 - RNA, 24 nt, Human
uuaagagcaaaucaauucuaguca

SEQ ID NO: 3579563 - RNA, 15 nt, Human
uuaagagcaguccau

SEQ ID NO: 3579564 - RNA, 22 nt, Human
uuaagagccauauaaguuugaa

SEQ ID NO: 3579565 - RNA, 17 nt, Human
uuaagagcuaaccaguu

SEQ ID NO: 3579566 - RNA, 13 nt, Human
uuaagaggcaggg

SEQ ID NO: 3579567 - RNA, 12 nt, Human
uuaauauuuccu

SEQ ID NO: 3579568 - RNA, 20 nt, Human
uuaauauuugcugacagcug

SEQ ID NO: 3579569 - RNA, 12 nt, Human
uuaauauuuguu

SEQ ID NO: 3579570 - RNA, 17 nt, Human
uuaaucacuauuguucc

SEQ ID NO: 3579571 - RNA, 13 nt, Human
uuaaucauauaaa

SEQ ID NO: 3579572 - RNA, 15 nt, Human
uuaaucaucaagaga

SEQ ID NO: 3579573 - RNA, 16 nt, Human
uuaaucaucaagagaa

SEQ ID NO: 3579574 - RNA, 17 nt, Human
uuaaucaucaagagaau

SEQ ID NO: 3579575 - RNA, 15 nt, Human
uuaaucaucuauaaa

SEQ ID NO: 3579576 - RNA, 21 nt, Human
uuaaucaucuauaaagaagaa

SEQ ID NO: 3579577 - RNA, 13 nt, Human
uuaaucauuaggu

SEQ ID NO: 3579578 - RNA, 22 nt, Human
uuaaucauuuugccucuuuucu

SEQ ID NO: 3579579 - RNA, 21 nt, Human
uuaauccguaguuauuuugca

SEQ ID NO: 3579580 - RNA, 21 nt, Human
uuaauccuagcugugugcagu

SEQ ID NO: 3579581 - RNA, 14 nt, Human
uuaauccuucuagu

SEQ ID NO: 3579582 - RNA, 22 nt, Human
uuaauccuuuguuuucugacua

SEQ ID NO: 3579583 - RNA, 15 nt, Human
uuaaucuaaauggaa

SEQ ID NO: 3579584 - RNA, 14 nt, Human
uuaaucuacugcau

SEQ ID NO: 3579585 - RNA, 22 nt, Human
uuaaucuccaccagucauuuuu

SEQ ID NO: 3579586 - RNA, 14 nt, Human
uuaaucucuguuau

SEQ ID NO: 3579587 - RNA, 19 nt, Human
uuaaucucuguuauguacu

SEQ ID NO: 3579588 - RNA, 20 nt, Human
uuaaucucuguuauguacug

SEQ ID NO: 3579589 - RNA, 21 nt, Human
uuaaucucuguuauguacugu

SEQ ID NO: 3579590 - RNA, 18 nt, Human
uuaaucugaaauucuaaa

SEQ ID NO: 3579591 - RNA, 21 nt, Human
uuaaucugggccagaauuuca

SEQ ID NO: 3579592 - RNA, 17 nt, Human
uuaaucuuaauguauau

SEQ ID NO: 3579593 - RNA, 14 nt, Human
uuaaucuuagugua

SEQ ID NO: 3579594 - RNA, 12 nt, Human
uuaaucuuggau

SEQ ID NO: 3579595 - RNA, 13 nt, Human
uuaaucuuuaauu

SEQ ID NO: 3579596 - RNA, 14 nt, Human
uuaaucuuuccuga

SEQ ID NO: 3579597 - RNA, 17 nt, Human
uuaaucuuucuuuaccu

SEQ ID NO: 3579598 - RNA, 21 nt, Human
uuaaucuuucuuuaccugaga

SEQ ID NO: 3579599 - RNA, 23 nt, Human
uuaaucuuucuuuaccugagacc

SEQ ID NO: 3579600 - RNA, 24 nt, Human
uuaaucuuucuuuaccugagacca

SEQ ID NO: 3579601 - RNA, 19 nt, Human
uuaaucuuuucacaaauaa

SEQ ID NO: 3579602 - RNA, 20 nt, Human
uuaaucuuuucuuauuuuug

SEQ ID NO: 3579603 - RNA, 16 nt, Human
uuaaugaaaaggaauc

SEQ ID NO: 3579604 - RNA, 15 nt, Human
uuaaugaaaauguca

SEQ ID NO: 3579605 - RNA, 19 nt, Human
uuaaugaaagacuguacaa

SEQ ID NO: 3579606 - RNA, 23 nt, Human
uuaaugaaagacuguacaaagua

SEQ ID NO: 3579607 - RNA, 22 nt, Human
uuaaugaaauaucuguauuuaa

SEQ ID NO: 3579608 - RNA, 18 nt, Human
uuaaugaagaaaguggaa

SEQ ID NO: 3579609 - RNA, 18 nt, Human
uuaaugaaguuugaaugu

SEQ ID NO: 3579610 - RNA, 22 nt, Human
uuaaugaaguuugaauguuaaa

SEQ ID NO: 3579611 - RNA, 23 nt, Human
uuaaugaaguuugaauguuaaau

SEQ ID NO: 3579612 - RNA, 13 nt, Human
uuaaugaaugcuu

SEQ ID NO: 3579613 - RNA, 15 nt, Human
uuaaugaaugcuuaa

SEQ ID NO: 3579614 - RNA, 14 nt, Human
uuaaugacaauauu

SEQ ID NO: 3579615 - RNA, 23 nt, Human
uuaaugacacuuguccccaaauc

SEQ ID NO: 3579616 - RNA, 18 nt, Human
uuaaugagacuuuaaaag

SEQ ID NO: 3579617 - RNA, 23 nt, Human
uuaaugagacuuuaaaagcauuu

SEQ ID NO: 3579618 - RNA, 16 nt, Human
uuaaugcaauauacug

SEQ ID NO: 3579619 - RNA, 22 nt, Human
uuaaugcaguugcuuacuaaag

SEQ ID NO: 3579620 - RNA, 20 nt, Human
uuaaugcauuaaaccugucu

SEQ ID NO: 3579621 - RNA, 19 nt, Human
uuaaugccauuaucccuga

SEQ ID NO: 3579622 - RNA, 13 nt, Human
uuaaugcccagac

SEQ ID NO: 3579623 - RNA, 23 nt, Human
uuaaugccgauauacucuagaug

SEQ ID NO: 3579624 - RNA, 16 nt, Human
uuaaugccugcuuuuu

SEQ ID NO: 3579625 - RNA, 18 nt, Human
uuaaugccugcuuuuugg

SEQ ID NO: 3579626 - RNA, 20 nt, Human
uuaauggacacuuuucaccu

SEQ ID NO: 3579627 - RNA, 18 nt, Human
uuaauggacuuauuucuu

SEQ ID NO: 3579628 - RNA, 20 nt, Human
uuaauggacuuauuucuuca

SEQ ID NO: 3579629 - RNA, 12 nt, Human
uuaauggaugaa

SEQ ID NO: 3579630 - RNA, 16 nt, Human
uuaauggcugauaauu

SEQ ID NO: 3579631 - RNA, 18 nt, Human
uuaauggcugauaauuuu

SEQ ID NO: 3579632 - RNA, 19 nt, Human
uuaauggggguagcagcug

SEQ ID NO: 3579633 - RNA, 21 nt, Human
uuaauggggguagcagcugga

SEQ ID NO: 3579634 - RNA, 19 nt, Human
uuaauggugccuucauuug

SEQ ID NO: 3579635 - RNA, 20 nt, Human
uuaauggugccuucauuugg

SEQ ID NO: 3579636 - RNA, 15 nt, Human
uuaauguagccaugg

SEQ ID NO: 3579637 - RNA, 15 nt, Human
uuaauguauguuacc

SEQ ID NO: 3579638 - RNA, 17 nt, Human
uuaaugucacaggcagg

SEQ ID NO: 3579639 - RNA, 11 nt, Human
uuaaugugagu

SEQ ID NO: 3579640 - RNA, 20 nt, Human
uuaaugugaugauguaauug

SEQ ID NO: 3579641 - RNA, 19 nt, Human
uuaaugugcuguguaaagu

SEQ ID NO: 3579642 - RNA, 21 nt, Human
uuaaugugcuguguaaaguua

SEQ ID NO: 3579643 - RNA, 13 nt, Human
uuaauguguauua

SEQ ID NO: 3579644 - RNA, 22 nt, Human
uuaauguguugggaaaaaggcc

SEQ ID NO: 3579645 - RNA, 22 nt, Human
uuaauguucugaauaauuucuu

SEQ ID NO: 3579646 - RNA, 14 nt, Human
uuaauguucuguga

SEQ ID NO: 3579647 - RNA, 17 nt, Human
uuaauguugaacaaaau

SEQ ID NO: 3579648 - RNA, 17 nt, Human
uuaauguugauuucuag

SEQ ID NO: 3579649 - RNA, 15 nt, Human
uuaauguuuaaaaca

SEQ ID NO: 3579650 - RNA, 15 nt, Human
uuaauguuuauuccu

SEQ ID NO: 3579651 - RNA, 23 nt, Human
uuaauguuuuaaauguacagaca

SEQ ID NO: 3579652 - RNA, 15 nt, Human
uuaauuaaacauugu

SEQ ID NO: 3579653 - RNA, 20 nt, Human
uuaauuaaauagcuuuugug

SEQ ID NO: 3579654 - RNA, 13 nt, Human
uuaauuaauuuga

SEQ ID NO: 3579655 - RNA, 15 nt, Human
uuaauuagcauucug

SEQ ID NO: 3579656 - RNA, 13 nt, Human
uuaauuagguuaa

SEQ ID NO: 3579657 - RNA, 17 nt, Human
uuaauuagguuaacuau

SEQ ID NO: 3579658 - RNA, 16 nt, Human
uuaauuagugcuaagu

SEQ ID NO: 3579659 - RNA, 21 nt, Human
uuaauuagugcuaagugugaa

SEQ ID NO: 3579660 - RNA, 23 nt, Human
uuaauuauaccauggugaauuaa

SEQ ID NO: 3579661 - RNA, 23 nt, Human
uuaauuauaggagccuuaauuuu

SEQ ID NO: 3579662 - RNA, 15 nt, Human
uuaauuaucuuuucu

SEQ ID NO: 3579663 - RNA, 17 nt, Human
uuaauuauuaacuacau

SEQ ID NO: 3579664 - RNA, 19 nt, Human
uuaauuauuauaaaaauau

SEQ ID NO: 3579665 - RNA, 14 nt, Human
uuaauuauuauuug

SEQ ID NO: 3579666 - RNA, 21 nt, Human
uuaauucagaaccccaacuac

SEQ ID NO: 3579667 - RNA, 17 nt, Human
uuaauuccuucagcacu

SEQ ID NO: 3579668 - RNA, 20 nt, Human
uuaauuccuucagcacuuua

SEQ ID NO: 3579669 - RNA, 17 nt, Human
uuaauucucaugugauc

SEQ ID NO: 3579670 - RNA, 21 nt, Human
uuaauugacuuauuuauauaa

SEQ ID NO: 3579671 - RNA, 19 nt, Human
uuaauugccaccucuaaca

SEQ ID NO: 3579672 - RNA, 18 nt, Human
uuaauuggcagcagauuu

SEQ ID NO: 3579673 - RNA, 19 nt, Human
uuaauuggcagcagauuuu

SEQ ID NO: 3579674 - RNA, 13 nt, Human
uuaauugggcacu

SEQ ID NO: 3579675 - RNA, 22 nt, Human
uuaauugggccagcuuuucaaa

SEQ ID NO: 3579676 - RNA, 12 nt, Human
uuaauuguaaac

SEQ ID NO: 3579677 - RNA, 18 nt, Human
uuaauuguaaacuguacu

SEQ ID NO: 3579678 - RNA, 16 nt, Human
uuaauugugugaacuu

SEQ ID NO: 3579679 - RNA, 19 nt, Human
uuaauuguuguuucuuucu

SEQ ID NO: 3579680 - RNA, 22 nt, Human
uuaauuguuguuucuuucuagu

SEQ ID NO: 3579681 - RNA, 13 nt, Human
uuaauuguuuaaa

SEQ ID NO: 3579682 - RNA, 19 nt, Human
uuaauuguuuugcacuuuu

SEQ ID NO: 3579683 - RNA, 16 nt, Human
uuaauuuaaagcuuac

SEQ ID NO: 3579684 - RNA, 21 nt, Human
uuaauuuaaagcuuacucugu

SEQ ID NO: 3579685 - RNA, 17 nt, Human
uuaauuuaauauuuacu

SEQ ID NO: 3579686 - RNA, 16 nt, Human
uuaauuuaaucuuuuu

SEQ ID NO: 3579687 - RNA, 22 nt, Human
uuaauuuacaaaaauauaaaau

SEQ ID NO: 3579688 - RNA, 15 nt, Human
uuaauuuagaaaacu

SEQ ID NO: 3579689 - RNA, 16 nt, Human
uuaauuuagaaaacuu

SEQ ID NO: 3579690 - RNA, 18 nt, Human
uuaauuuaguaaauguua

SEQ ID NO: 3579691 - RNA, 19 nt, Human
uuaauuuaguaaauguuau

SEQ ID NO: 3579692 - RNA, 16 nt, Human
uuaauuuauccucugu

SEQ ID NO: 3579693 - RNA, 14 nt, Human
uuaauuuaugcaga

SEQ ID NO: 3579694 - RNA, 20 nt, Human
uuaauuucaguccuguaguu

SEQ ID NO: 3579695 - RNA, 23 nt, Human
uuaauuucaguccuguaguuuua

SEQ ID NO: 3579696 - RNA, 11 nt, Human
uuaauuuccuu

SEQ ID NO: 3579697 - RNA, 13 nt, Human
uuaauuuccuuuu

SEQ ID NO: 3579698 - RNA, 19 nt, Human
uuaauuuccuuuuugacac

SEQ ID NO: 3579699 - RNA, 22 nt, Human
uuaauuuccuuuuugacacuga

SEQ ID NO: 3579700 - RNA, 23 nt, Human
uuaauuuccuuuuugacacugaa

SEQ ID NO: 3579701 - RNA, 21 nt, Human
uuaauuucugccauuucaugu

SEQ ID NO: 3579702 - RNA, 18 nt, Human
uuaauuucuucaaaaugu

SEQ ID NO: 3579703 - RNA, 16 nt, Human
uuaauuuggaaacuaa

SEQ ID NO: 3579704 - RNA, 22 nt, Human
uuaauuuggagcacaaaauuca

SEQ ID NO: 3579705 - RNA, 16 nt, Human
uuaauuugguuuucac

SEQ ID NO: 3579706 - RNA, 13 nt, Human
uuaauuuuaaagu

SEQ ID NO: 3579707 - RNA, 18 nt, Human
uuaauuuuaaagugcaaa

SEQ ID NO: 3579708 - RNA, 21 nt, Human
uuaauuuuaguuuuucauuaa

SEQ ID NO: 3579709 - RNA, 20 nt, Human
uuaauuuugacacugaaaua

SEQ ID NO: 3579710 - RNA, 16 nt, Human
uuacuggccuuuuuca

SEQ ID NO: 3579711 - RNA, 14 nt, Human
uuacugggcccuga

SEQ ID NO: 3579712 - RNA, 23 nt, Human
uuacugggccuuagugggccagg

SEQ ID NO: 3579713 - RNA, 23 nt, Human
uuacuggggcuggggaaggaagc

SEQ ID NO: 3579714 - RNA, 20 nt, Human
uuacugguaggaacuugaga

SEQ ID NO: 3579715 - RNA, 17 nt, Human
uuacugguccaaaagau

SEQ ID NO: 3579716 - RNA, 15 nt, Human
uuacuguaaaaugca

SEQ ID NO: 3579717 - RNA, 17 nt, Human
uuacuguaagacauuag

SEQ ID NO: 3579718 - RNA, 14 nt, Human
uuacuguacaugaa

SEQ ID NO: 3579719 - RNA, 17 nt, Human
uuacugucaauaaacag

SEQ ID NO: 3579720 - RNA, 20 nt, Human
uuacuguccuguugauuaau

SEQ ID NO: 3579721 - RNA, 15 nt, Human
uuacugucuuaauua

SEQ ID NO: 3579722 - RNA, 18 nt, Human
uuacugucuuaauuaagu

SEQ ID NO: 3579723 - RNA, 14 nt, Human
uuacugugaaacug

SEQ ID NO: 3579724 - RNA, 17 nt, Human
uuacuguggaggaagga

SEQ ID NO: 3579725 - RNA, 14 nt, Human
uuacuguguuuuau

SEQ ID NO: 3579726 - RNA, 11 nt, Human
uuacuguucuu

SEQ ID NO: 3579727 - RNA, 15 nt, Human
uuacuguucuugcug

SEQ ID NO: 3579728 - RNA, 18 nt, Human
uuacuguucuugcugcua

SEQ ID NO: 3579729 - RNA, 20 nt, Human
uuacuguucuugcugcuaga

SEQ ID NO: 3579730 - RNA, 21 nt, Human
uuacuguucuugcugcuagaa

SEQ ID NO: 3579731 - RNA, 15 nt, Human
uuacuguugugaccu

SEQ ID NO: 3579732 - RNA, 18 nt, Human
uuacuguuuauuucuguu

SEQ ID NO: 3579733 - RNA, 22 nt, Human
uuacuguuugucuucuccccag

SEQ ID NO: 3579734 - RNA, 13 nt, Human
uuacuuaaagauu

SEQ ID NO: 3579735 - RNA, 20 nt, Human
uuacuuaaagauuuaucaaa

SEQ ID NO: 3579736 - RNA, 13 nt, Human
uuacuuagcaugc

SEQ ID NO: 3579737 - RNA, 21 nt, Human
uuacuuagcuuaucaauuugu

SEQ ID NO: 3579738 - RNA, 15 nt, Human
uuacuuccuaucaag

SEQ ID NO: 3579739 - RNA, 18 nt, Human
uuacuucucuauaaaaaa

SEQ ID NO: 3579740 - RNA, 24 nt, Human
uuacuucucuauaaaaaauaugua

SEQ ID NO: 3579741 - RNA, 14 nt, Human
uuacuucuugcccu

SEQ ID NO: 3579742 - RNA, 15 nt, Human
uuacuugauaaggga

SEQ ID NO: 3579743 - RNA, 13 nt, Human
uuacuugcuucuc

SEQ ID NO: 3579744 - RNA, 18 nt, Human
uuacuugcuuuaccuuuu

SEQ ID NO: 3579745 - RNA, 17 nt, Human
uuacuuguaaauauaaa

SEQ ID NO: 3579746 - RNA, 19 nt, Human
uuacuuguaaauauaaaga

SEQ ID NO: 3579747 - RNA, 22 nt, Human
uuacuuguaaauauaaagacgu

SEQ ID NO: 3579748 - RNA, 21 nt, Human
uuacuugucuuucugggguuu

SEQ ID NO: 3579749 - RNA, 23 nt, Human
uuacuuguugccuauaagccaaa

SEQ ID NO: 3579750 - RNA, 22 nt, Human
uuacuuuaacuuaguuuugcau

SEQ ID NO: 3579751 - RNA, 20 nt, Human
uuacuuuaccacccccacac

SEQ ID NO: 3579752 - RNA, 23 nt, Human
uuacuuucccuugcuuuucccuc

SEQ ID NO: 3579753 - RNA, 21 nt, Human
uuacuuuccuuuccccagccc

SEQ ID NO: 3579754 - RNA, 13 nt, Human
uuacuuuguaaau

SEQ ID NO: 3579755 - RNA, 17 nt, Human
uuacuuuguaaauucug

SEQ ID NO: 3579756 - RNA, 19 nt, Human
uuacuuuguaaauucugau

SEQ ID NO: 3579757 - RNA, 20 nt, Human
uuacuuuguaaauucugauu

SEQ ID NO: 3579758 - RNA, 15 nt, Human
uuacuuuguaugaua

SEQ ID NO: 3579759 - RNA, 15 nt, Human
uuacuuuuaaacugu

SEQ ID NO: 3579760 - RNA, 15 nt, Human
uuacuuuuaaauguc

SEQ ID NO: 3579761 - RNA, 19 nt, Human
uuacuuuuccuugcauaca

SEQ ID NO: 3579762 - RNA, 20 nt, Human
uuacuuuuccuugcauacaa

SEQ ID NO: 3579763 - RNA, 16 nt, Human
uuagaaaaaaauuacu

SEQ ID NO: 3579764 - RNA, 20 nt, Human
uuagaaaaagaacaugcagu

SEQ ID NO: 3579765 - RNA, 22 nt, Human
uuagaaaaagaacaugcaguuu

SEQ ID NO: 3579766 - RNA, 13 nt, Human
uuagaaaacuuug

SEQ ID NO: 3579767 - RNA, 16 nt, Human
uuagaaaacuuuguua

SEQ ID NO: 3579768 - RNA, 23 nt, Human
uuagaaaagggaguuuaaaaaug

SEQ ID NO: 3579769 - RNA, 21 nt, Human
uuagaaaaggugauaaaauca

SEQ ID NO: 3579770 - RNA, 12 nt, Human
uuagaaaaugug

SEQ ID NO: 3579771 - RNA, 19 nt, Human
uuagaaacacaacuauauu

SEQ ID NO: 3579772 - RNA, 22 nt, Human
uuagaaacacauaauuaacacu

SEQ ID NO: 3579773 - RNA, 16 nt, Human
uuagaaacauaaauaa

SEQ ID NO: 3579774 - RNA, 17 nt, Human
uuagaaacaugguuuug

SEQ ID NO: 3579775 - RNA, 23 nt, Human
uuagaaacuggaaauacuagauu

SEQ ID NO: 3579776 - RNA, 17 nt, Human
uuagaaagcaacuuauc

SEQ ID NO: 3579777 - RNA, 14 nt, Human
uuagaaagcauuug

SEQ ID NO: 3579778 - RNA, 15 nt, Human
uuagaaagcauuuga

SEQ ID NO: 3579779 - RNA, 11 nt, Human
uuagaaauauu

SEQ ID NO: 3579780 - RNA, 19 nt, Human
uuagaaauauucacaucuu

SEQ ID NO: 3579781 - RNA, 16 nt, Human
uuagaaaugcagaauc

SEQ ID NO: 3579782 - RNA, 17 nt, Human
uuagaaauguaaacugc

SEQ ID NO: 3579783 - RNA, 21 nt, Human
uuagaaauguaaacugccaua

SEQ ID NO: 3579784 - RNA, 16 nt, Human
uuagaacaauuuucuu

SEQ ID NO: 3579785 - RNA, 20 nt, Human
uuagaacacuauuuucagaa

SEQ ID NO: 3579786 - RNA, 15 nt, Human
uuagaacagaaaaca

SEQ ID NO: 3579787 - RNA, 18 nt, Human
uuagaacaggcaagugaa

SEQ ID NO: 3579788 - RNA, 20 nt, Human
uuagaacaggcaagugaaga

SEQ ID NO: 3579789 - RNA, 14 nt, Human
uuagaacagguuuu

SEQ ID NO: 3579790 - RNA, 12 nt, Human
uuagaagaaaga

SEQ ID NO: 3579791 - RNA, 15 nt, Human
uuagaagaagugugu

SEQ ID NO: 3579792 - RNA, 19 nt, Human
uuagaagugcauuucugaa

SEQ ID NO: 3579793 - RNA, 12 nt, Human
uuagaaguguca

SEQ ID NO: 3579794 - RNA, 17 nt, Human
uuagaaucccuguguua

SEQ ID NO: 3579795 - RNA, 20 nt, Human
uuagaaucccuguguuaauu

SEQ ID NO: 3579796 - RNA, 16 nt, Human
uuagaaucuauuuucu

SEQ ID NO: 3579797 - RNA, 17 nt, Human
uuagaaucuauuuucua

SEQ ID NO: 3579798 - RNA, 13 nt, Human
uuagaauuauuua

SEQ ID NO: 3579799 - RNA, 19 nt, Human
uuagacaaauacucaugug

SEQ ID NO: 3579800 - RNA, 11 nt, Human
uuagacagagu

SEQ ID NO: 3579801 - RNA, 15 nt, Human
uuagacagucccugc

SEQ ID NO: 3579802 - RNA, 17 nt, Human
uuagacauguaauuugu

SEQ ID NO: 3579803 - RNA, 12 nt, Human
uuagaccaagga

SEQ ID NO: 3579804 - RNA, 17 nt, Human
uuagaccaccaagccuu

SEQ ID NO: 3579805 - RNA, 19 nt, Human
uuagaccaccaagccuuga

SEQ ID NO: 3579806 - RNA, 17 nt, Human
uuagaccccauacaagu

SEQ ID NO: 3579807 - RNA, 13 nt, Human
uuagacccugggu

SEQ ID NO: 3579808 - RNA, 23 nt, Human
uuagaccuacagggggucuggcu

SEQ ID NO: 3579809 - RNA, 12 nt, Human
uuagaccucagc

SEQ ID NO: 3579810 - RNA, 16 nt, Human
uuagaccucagccugu

SEQ ID NO: 3579811 - RNA, 17 nt, Human
uuagacugccagcucuu

SEQ ID NO: 3579812 - RNA, 12 nt, Human
uuagacugcuuu

SEQ ID NO: 3579813 - RNA, 15 nt, Human
uuagacuggaacuug

SEQ ID NO: 3579814 - RNA, 21 nt, Human
uuagacuggaacuugaacuga

SEQ ID NO: 3579815 - RNA, 17 nt, Human
uuagacuucuguuuuca

SEQ ID NO: 3579816 - RNA, 19 nt, Human
uuagacuugaaaagagaca

SEQ ID NO: 3579817 - RNA, 18 nt, Human
uuagacuuuagaaauaaa

SEQ ID NO: 3579818 - RNA, 22 nt, Human
uuagacuuuuccaauaugugau

SEQ ID NO: 3579819 - RNA, 14 nt, Human
uuagagaacugaaa

SEQ ID NO: 3579820 - RNA, 19 nt, Human
uuagagaacugaaaagaga

SEQ ID NO: 3579821 - RNA, 23 nt, Human
uuagagacaguugggugagaaca

SEQ ID NO: 3579822 - RNA, 19 nt, Human
uuagagagggaccaugugu

SEQ ID NO: 3579823 - RNA, 20 nt, Human
uuagagcaguuucuguccug

SEQ ID NO: 3579824 - RNA, 21 nt, Human
uuagagccaggcacacacugu

SEQ ID NO: 3579825 - RNA, 21 nt, Human
uuagagcugacacaaaccugc

SEQ ID NO: 3579826 - RNA, 22 nt, Human
uuagagcuuuuuuuuuuuaauu

SEQ ID NO: 3579827 - RNA, 12 nt, Human
uuagaggccagc

SEQ ID NO: 3579828 - RNA, 13 nt, Human
uuagagguuuuaa

SEQ ID NO: 3579829 - RNA, 21 nt, Human
uuagagguuuuaaagugauua

SEQ ID NO: 3579830 - RNA, 16 nt, Human
uuagaguuaacaauga

SEQ ID NO: 3579831 - RNA, 14 nt, Human
uuagaguuagacug

SEQ ID NO: 3579832 - RNA, 18 nt, Human
uuagaguuagacuguugg

SEQ ID NO: 3579833 - RNA, 16 nt, Human
uuagaguuucuguuug

SEQ ID NO: 3579834 - RNA, 18 nt, Human
uuagaguuucuguuugau

SEQ ID NO: 3579835 - RNA, 20 nt, Human
uuagauagcccuguccuggu

SEQ ID NO: 3579836 - RNA, 14 nt, Human
uuagauauaacacu

SEQ ID NO: 3579837 - RNA, 17 nt, Human
uuagauauaacacuaug

SEQ ID NO: 3579838 - RNA, 23 nt, Human
uuagauaucuuuuuauugaugug

SEQ ID NO: 3579839 - RNA, 20 nt, Human
uuagauccauuaauuuaaau

SEQ ID NO: 3579840 - RNA, 13 nt, Human
uuagaucuaguuc

SEQ ID NO: 3579841 - RNA, 21 nt, Human
uuagaugcaguucugaagaag

SEQ ID NO: 3579842 - RNA, 16 nt, Human
uuagaugcauauuacu

SEQ ID NO: 3579843 - RNA, 23 nt, Human
uuagauggauucuccacucaguu

SEQ ID NO: 3579844 - RNA, 17 nt, Human
uuagaugguuacacugu

SEQ ID NO: 3579845 - RNA, 20 nt, Human
uuagaugugcugcuuugaua

SEQ ID NO: 3579846 - RNA, 22 nt, Human
uuagauguuccaguaaucuaau

SEQ ID NO: 3579847 - RNA, 22 nt, Human
uuagauguucuaagucuuucca

SEQ ID NO: 3579848 - RNA, 21 nt, Human
uuagauguucucuaucauuua

SEQ ID NO: 3579849 - RNA, 19 nt, Human
uuagauuaagaaauagaca

SEQ ID NO: 3579850 - RNA, 15 nt, Human
uuagauucacuuuga

SEQ ID NO: 3579851 - RNA, 13 nt, Human
uuagauugagaaa

SEQ ID NO: 3579852 - RNA, 19 nt, Human
uuagauuucaagaaaaaau

SEQ ID NO: 3579853 - RNA, 21 nt, Human
uuagauuugccauagaguaca

SEQ ID NO: 3579854 - RNA, 19 nt, Human
uucauucaauauugacauu

SEQ ID NO: 3579855 - RNA, 15 nt, Human
uucauucacuucucu

SEQ ID NO: 3579856 - RNA, 12 nt, Human
uucauucauauu

SEQ ID NO: 3579857 - RNA, 16 nt, Human
uucauuccuaaagaaa

SEQ ID NO: 3579858 - RNA, 13 nt, Human
uucauuccuccag

SEQ ID NO: 3579859 - RNA, 22 nt, Human
uucauuccuucagauuuggcuu

SEQ ID NO: 3579860 - RNA, 23 nt, Human
uucauucucauaauuccuacagc

SEQ ID NO: 3579861 - RNA, 21 nt, Human
uucauucucauugcagaauaa

SEQ ID NO: 3579862 - RNA, 18 nt, Human
uucauucucccuuucacu

SEQ ID NO: 3579863 - RNA, 12 nt, Human
uucauucugcau

SEQ ID NO: 3579864 - RNA, 17 nt, Human
uucauucugugaucauu

SEQ ID NO: 3579865 - RNA, 19 nt, Human
uucauucuugaaagcugug

SEQ ID NO: 3579866 - RNA, 22 nt, Human
uucauugaguugguuacuucau

SEQ ID NO: 3579867 - RNA, 18 nt, Human
uucauugauuuccugugu

SEQ ID NO: 3579868 - RNA, 22 nt, Human
uucauugguacugccuuaaaga

SEQ ID NO: 3579869 - RNA, 14 nt, Human
uucauugucuguga

SEQ ID NO: 3579870 - RNA, 13 nt, Human
uucauuuaaaaug

SEQ ID NO: 3579871 - RNA, 14 nt, Human
uucauuuaaaauga

SEQ ID NO: 3579872 - RNA, 16 nt, Human
uucauuuaaaaugauu

SEQ ID NO: 3579873 - RNA, 20 nt, Human
uucauuuaagggaaagaaaa

SEQ ID NO: 3579874 - RNA, 19 nt, Human
uucauuuaggugaggaagc

SEQ ID NO: 3579875 - RNA, 18 nt, Human
uucauuuaucuauaauuu

SEQ ID NO: 3579876 - RNA, 12 nt, Human
uucauuucacug

SEQ ID NO: 3579877 - RNA, 14 nt, Human
uucauuucauccuu

SEQ ID NO: 3579878 - RNA, 14 nt, Human
uucauuucauguau

SEQ ID NO: 3579879 - RNA, 12 nt, Human
uucauuucauug

SEQ ID NO: 3579880 - RNA, 12 nt, Human
uucauuuccugc

SEQ ID NO: 3579881 - RNA, 13 nt, Human
uucauuuccugcc

SEQ ID NO: 3579882 - RNA, 18 nt, Human
uucauuugagaaguaaac

SEQ ID NO: 3579883 - RNA, 16 nt, Human
uucauuugcuuuggaa

SEQ ID NO: 3579884 - RNA, 19 nt, Human
uucauuuggaaauaagcug

SEQ ID NO: 3579885 - RNA, 18 nt, Human
uucauuuguuauucuuaa

SEQ ID NO: 3579886 - RNA, 22 nt, Human
uucauuuguuuguuuguuuguc

SEQ ID NO: 3579887 - RNA, 16 nt, Human
uucauuuuaaaaaguc

SEQ ID NO: 3579888 - RNA, 13 nt, Human
uucauuuuccaau

SEQ ID NO: 3579889 - RNA, 14 nt, Human
uucauuuucuagau

SEQ ID NO: 3579890 - RNA, 20 nt, Human
uucauuuucuagauacaaua

SEQ ID NO: 3579891 - RNA, 22 nt, Human
uucauuuucuagauacaauaaa

SEQ ID NO: 3579892 - RNA, 20 nt, Human
uucauuuugagcugaaaugc

SEQ ID NO: 3579893 - RNA, 15 nt, Human
uucauuuuuccuaac

SEQ ID NO: 3579894 - RNA, 18 nt, Human
uucauuuuuuuccaggcu

SEQ ID NO: 3579895 - RNA, 13 nt, Human
uuccaaaaaaaua

SEQ ID NO: 3579896 - RNA, 18 nt, Human
uuccaaaaagguugcugu

SEQ ID NO: 3579897 - RNA, 22 nt, Human
uuccaaaaauuacuuaguauug

SEQ ID NO: 3579898 - RNA, 17 nt, Human
uuccaaaaguggccucu

SEQ ID NO: 3579899 - RNA, 16 nt, Human
uuccaaaaucucccau

SEQ ID NO: 3579900 - RNA, 21 nt, Human
uuccaaacaacagaaagucau

SEQ ID NO: 3579901 - RNA, 14 nt, Human
uuccaaacaugguu

SEQ ID NO: 3579902 - RNA, 14 nt, Human
uuccaaacuaauuu

SEQ ID NO: 3579903 - RNA, 15 nt, Human
uuccaaagaauucuu

SEQ ID NO: 3579904 - RNA, 22 nt, Human
uuccaaagcuuuauuaccagug

SEQ ID NO: 3579905 - RNA, 15 nt, Human
uuccaaauaaaauga

SEQ ID NO: 3579906 - RNA, 19 nt, Human
uuccaaauaauaaagucua

SEQ ID NO: 3579907 - RNA, 15 nt, Human
uuccaaauacuaaug

SEQ ID NO: 3579908 - RNA, 14 nt, Human
uuccaaauucaguu

SEQ ID NO: 3579909 - RNA, 15 nt, Human
uuccaaauucaguuu

SEQ ID NO: 3579910 - RNA, 19 nt, Human
uuccaaauucaguuucaua

SEQ ID NO: 3579911 - RNA, 15 nt, Human
uuccaaauucugcuu

SEQ ID NO: 3579912 - RNA, 14 nt, Human
uuccaacaaagggu

SEQ ID NO: 3579913 - RNA, 15 nt, Human
uuccaacaaaggguu

SEQ ID NO: 3579914 - RNA, 22 nt, Human
uuccaacaaaggguuuuaaugu

SEQ ID NO: 3579915 - RNA, 23 nt, Human
uuccaacaaaggguuuuaaugua

SEQ ID NO: 3579916 - RNA, 12 nt, Human
uuccaacaccac

SEQ ID NO: 3579917 - RNA, 19 nt, Human
uuccaacaccacagacaca

SEQ ID NO: 3579918 - RNA, 20 nt, Human
uuccaacaccacagacacac

SEQ ID NO: 3579919 - RNA, 16 nt, Human
uuccaacacugauuuc

SEQ ID NO: 3579920 - RNA, 23 nt, Human
uuccaacagcucaagucuucccu

SEQ ID NO: 3579921 - RNA, 14 nt, Human
uuccaacagugagu

SEQ ID NO: 3579922 - RNA, 22 nt, Human
uuccaacucguauagcaugcau

SEQ ID NO: 3579923 - RNA, 13 nt, Human
uuccaacugcugc

SEQ ID NO: 3579924 - RNA, 23 nt, Human
uuccaagaaagaugaauacauuu

SEQ ID NO: 3579925 - RNA, 22 nt, Human
uuccaagacaguauacaguccu

SEQ ID NO: 3579926 - RNA, 21 nt, Human
uuccaagacaugucuguucua

SEQ ID NO: 3579927 - RNA, 13 nt, Human
uuccaagacauug

SEQ ID NO: 3579928 - RNA, 15 nt, Human
uuccaaggguacuaa

SEQ ID NO: 3579929 - RNA, 16 nt, Human
uuccaagucuuugcua

SEQ ID NO: 3579930 - RNA, 13 nt, Human
uuccaauaaacca

SEQ ID NO: 3579931 - RNA, 15 nt, Human
uuccaauaaacuaug

SEQ ID NO: 3579932 - RNA, 14 nt, Human
uuccaauaugugau

SEQ ID NO: 3579933 - RNA, 23 nt, Human
uuccaauccuggcucuguggcuu

SEQ ID NO: 3579934 - RNA, 21 nt, Human
uuccaauucuaucuuuuguuu

SEQ ID NO: 3579935 - RNA, 21 nt, Human
uuccaauuuucuggaauacau

SEQ ID NO: 3579936 - RNA, 11 nt, Human
uuccacaaaau

SEQ ID NO: 3579937 - RNA, 14 nt, Human
uuccacaaagaaaa

SEQ ID NO: 3579938 - RNA, 21 nt, Human
uuccacaagagcccaggccuc

SEQ ID NO: 3579939 - RNA, 20 nt, Human
uuccacaagauucccagaga

SEQ ID NO: 3579940 - RNA, 21 nt, Human
uuccacaagauucccagagac

SEQ ID NO: 3579941 - RNA, 17 nt, Human
uuccacacagaaugcaa

SEQ ID NO: 3579942 - RNA, 13 nt, Human
uuccacacaugca

SEQ ID NO: 3579943 - RNA, 18 nt, Human
uuccacaccaagcagcaa

SEQ ID NO: 3579944 - RNA, 22 nt, Human
uuccacaccuuuuauugacaca

SEQ ID NO: 3579945 - RNA, 18 nt, Human
uuccacacucaccucuaa

SEQ ID NO: 3579946 - RNA, 13 nt, Human
uuccacagaggac

SEQ ID NO: 3579947 - RNA, 22 nt, Human
uuccacagaggacacagagaag

SEQ ID NO: 3579948 - RNA, 21 nt, Human
uuccacagccugcaagucagu

SEQ ID NO: 3579949 - RNA, 17 nt, Human
uuccacagggucccaca

SEQ ID NO: 3579950 - RNA, 18 nt, Human
uuccacagggucccacag

SEQ ID NO: 3579951 - RNA, 22 nt, Human
uuccacagggucccacagccac

SEQ ID NO: 3579952 - RNA, 16 nt, Human
uuccacaguugccacc

SEQ ID NO: 3579953 - RNA, 21 nt, Human
uuccacaguugccaccaccuc

SEQ ID NO: 3579954 - RNA, 22 nt, Human
uuccacaucuacguuuuuggug

SEQ ID NO: 3579955 - RNA, 15 nt, Human
uuccacaugcucuga

SEQ ID NO: 3579956 - RNA, 16 nt, Human
uuccaccacagccagc

SEQ ID NO: 3579957 - RNA, 18 nt, Human
uuccaccaucaagccacc

SEQ ID NO: 3579958 - RNA, 19 nt, Human
uuccaccaucaagccacca

SEQ ID NO: 3579959 - RNA, 23 nt, Human
uuccacccagugcugaauuuccc

SEQ ID NO: 3579960 - RNA, 14 nt, Human
uuccaccucccucc

SEQ ID NO: 3579961 - RNA, 15 nt, Human
uuccaccugcucugc

SEQ ID NO: 3579962 - RNA, 13 nt, Human
uuccaccuuaaau

SEQ ID NO: 3579963 - RNA, 19 nt, Human
uuccacgcugucuccagac

SEQ ID NO: 3579964 - RNA, 22 nt, Human
uuccacggagccacuccucuga

SEQ ID NO: 3579965 - RNA, 19 nt, Human
uuccacgucccccuggggc

SEQ ID NO: 3579966 - RNA, 14 nt, Human
uuccacuaaaaaua

SEQ ID NO: 3579967 - RNA, 18 nt, Human
uuccacuaaaaauauugu

SEQ ID NO: 3579968 - RNA, 12 nt, Human
uuccacuaaccc

SEQ ID NO: 3579969 - RNA, 17 nt, Human
uuccacuacaccuggcu

SEQ ID NO: 3579970 - RNA, 16 nt, Human
uuccacuccuccuagc

SEQ ID NO: 3579971 - RNA, 19 nt, Human
uuccacucuggauucagcc

SEQ ID NO: 3579972 - RNA, 13 nt, Human
uuccacugagcuc

SEQ ID NO: 3579973 - RNA, 15 nt, Human
uuccacugagcucca

SEQ ID NO: 3579974 - RNA, 16 nt, Human
uuccacugagggcagu

SEQ ID NO: 3579975 - RNA, 15 nt, Human
uuccacugccucugc

SEQ ID NO: 3579976 - RNA, 16 nt, Human
uuccacugccucugcc

SEQ ID NO: 3579977 - RNA, 17 nt, Human
uuccacugccucugccu

SEQ ID NO: 3579978 - RNA, 22 nt, Human
uuccacuggacuugagcuuggc

SEQ ID NO: 3579979 - RNA, 21 nt, Human
uuccacuuagaaauugcauuu

SEQ ID NO: 3579980 - RNA, 17 nt, Human
uuccacuuauagccucu

SEQ ID NO: 3579981 - RNA, 19 nt, Human
uuccacuuauaggaauuga

SEQ ID NO: 3579982 - RNA, 14 nt, Human
uuccacuucuuccu

SEQ ID NO: 3579983 - RNA, 15 nt, Human
uuccacuucuuccuu

SEQ ID NO: 3579984 - RNA, 19 nt, Human
uuccacuucuuccuuucuc

SEQ ID NO: 3579985 - RNA, 17 nt, Human
uuccacuugagugucaa

SEQ ID NO: 3579986 - RNA, 18 nt, Human
uuccacuugauuuugcaa

SEQ ID NO: 3579987 - RNA, 19 nt, Human
uuccacuuggcuacacagg

SEQ ID NO: 3579988 - RNA, 19 nt, Human
uuccagaaugcuguacauc

SEQ ID NO: 3579989 - RNA, 16 nt, Human
uuccagaccugaagaa

SEQ ID NO: 3579990 - RNA, 20 nt, Human
uuccagacuuccuugagaca

SEQ ID NO: 3579991 - RNA, 17 nt, Human
uuccagagaguggcucc

SEQ ID NO: 3579992 - RNA, 18 nt, Human
uuccagagcacugcucca

SEQ ID NO: 3579993 - RNA, 18 nt, Human
uuccagauaaccagcugu

SEQ ID NO: 3579994 - RNA, 18 nt, Human
uuccagaucacugccaca

SEQ ID NO: 3579995 - RNA, 16 nt, Human
uuccagaucuuucaga

SEQ ID NO: 3579996 - RNA, 20 nt, Human
uuccagaucuuucagaaaua

SEQ ID NO: 3579997 - RNA, 20 nt, Human
uuccagaugccuucuccaga

SEQ ID NO: 3579998 - RNA, 14 nt, Human
uuccagauguggau

SEQ ID NO: 3579999 - RNA, 13 nt, Human
uuccugaauccaa

SEQ ID NO: 3580000 - RNA, 22 nt, Human
uuccugaauucuauuugcuggg

SEQ ID NO: 3580001 - RNA, 22 nt, Human
uuccugacacuuuaauuaccaa

SEQ ID NO: 3580002 - RNA, 14 nt, Human
uuccugacccaggc

SEQ ID NO: 3580003 - RNA, 15 nt, Human
uuccugacccaggcc

SEQ ID NO: 3580004 - RNA, 22 nt, Human
uuccugacccaggccgcagcuc

SEQ ID NO: 3580005 - RNA, 11 nt, Human
uuccugagcuu

SEQ ID NO: 3580006 - RNA, 13 nt, Human
uuccugagcuugg

SEQ ID NO: 3580007 - RNA, 21 nt, Human
uuccugaggaagagggacugu

SEQ ID NO: 3580008 - RNA, 21 nt, Human
uuccugaugacccaggcugcc

SEQ ID NO: 3580009 - RNA, 15 nt, Human
uuccugaugcuucuu

SEQ ID NO: 3580010 - RNA, 23 nt, Human
uuccugaugcuucuucagagacu

SEQ ID NO: 3580011 - RNA, 19 nt, Human
uuccugaugguacaggaaa

SEQ ID NO: 3580012 - RNA, 16 nt, Human
uuccugauugguuucu

SEQ ID NO: 3580013 - RNA, 19 nt, Human
uuccugauugguuucucuu

SEQ ID NO: 3580014 - RNA, 20 nt, Human
uuccugcaacucaaggacuu

SEQ ID NO: 3580015 - RNA, 21 nt, Human
uuccugcagcagagccuggaa

SEQ ID NO: 3580016 - RNA, 14 nt, Human
uuccugcagccugg

SEQ ID NO: 3580017 - RNA, 15 nt, Human
uuccugccaccaguc

SEQ ID NO: 3580018 - RNA, 16 nt, Human
uuccugccccaggccu

SEQ ID NO: 3580019 - RNA, 18 nt, Human
uuccugccccucuuucuc

SEQ ID NO: 3580020 - RNA, 19 nt, Human
uuccugcccugcuguuuau

SEQ ID NO: 3580021 - RNA, 13 nt, Human
uuccugcccuggg

SEQ ID NO: 3580022 - RNA, 16 nt, Human
uuccugcccuuccuca

SEQ ID NO: 3580023 - RNA, 18 nt, Human
uuccugcccuuccucagu

SEQ ID NO: 3580024 - RNA, 15 nt, Human
uuccugccuggucuc

SEQ ID NO: 3580025 - RNA, 22 nt, Human
uuccugccuggucuccugcccc

SEQ ID NO: 3580026 - RNA, 20 nt, Human
uuccugcggagugaagaggg

SEQ ID NO: 3580027 - RNA, 16 nt, Human
uuccugcguccuccuc

SEQ ID NO: 3580028 - RNA, 17 nt, Human
uuccugcguccuccuca

SEQ ID NO: 3580029 - RNA, 19 nt, Human
uuccugcguccuccucacc

SEQ ID NO: 3580030 - RNA, 14 nt, Human
uuccugcugcuguc

SEQ ID NO: 3580031 - RNA, 20 nt, Human
uuccugcugcugucugggug

SEQ ID NO: 3580032 - RNA, 15 nt, Human
uuccugcuuuucccc

SEQ ID NO: 3580033 - RNA, 20 nt, Human
uuccuggacagcugugccuc

SEQ ID NO: 3580034 - RNA, 19 nt, Human
uuccuggagagucucacuc

SEQ ID NO: 3580035 - RNA, 14 nt, Human
uuccuggagcccga

SEQ ID NO: 3580036 - RNA, 20 nt, Human
uuccuggagcccgaggcacc

SEQ ID NO: 3580037 - RNA, 20 nt, Human
uuccuggcaauaguguguuc

SEQ ID NO: 3580038 - RNA, 16 nt, Human
uuccugggcacacgcu

SEQ ID NO: 3580039 - RNA, 18 nt, Human
uuccuggggcccaaaugc

SEQ ID NO: 3580040 - RNA, 17 nt, Human
uuccuggguggcuacuc

SEQ ID NO: 3580041 - RNA, 16 nt, Human
uuccugguacccagcc

SEQ ID NO: 3580042 - RNA, 18 nt, Human
uuccugguacccagccau

SEQ ID NO: 3580043 - RNA, 20 nt, Human
uuccuggugccaauuucaag

SEQ ID NO: 3580044 - RNA, 14 nt, Human
uuccuggugcugga

SEQ ID NO: 3580045 - RNA, 15 nt, Human
uuccuguagcaucuu

SEQ ID NO: 3580046 - RNA, 22 nt, Human
uuccuguagccuucuguaggaa

SEQ ID NO: 3580047 - RNA, 16 nt, Human
uuccuguauguugucc

SEQ ID NO: 3580048 - RNA, 21 nt, Human
uuccuguauuuguucccaaga

SEQ ID NO: 3580049 - RNA, 15 nt, Human
uuccuguccagagag

SEQ ID NO: 3580050 - RNA, 15 nt, Human
uuccuguccagcucc

SEQ ID NO: 3580051 - RNA, 22 nt, Human
uuccuguccagcuccaaccugc

SEQ ID NO: 3580052 - RNA, 14 nt, Human
uuccugucccugcg

SEQ ID NO: 3580053 - RNA, 21 nt, Human
uuccuguccucuuucagcucc

SEQ ID NO: 3580054 - RNA, 24 nt, Human
uuccuguccucuuucagcuccuga

SEQ ID NO: 3580055 - RNA, 23 nt, Human
uuccuguccuucucucaccuccu

SEQ ID NO: 3580056 - RNA, 11 nt, Human
uuccugugucc

SEQ ID NO: 3580057 - RNA, 16 nt, Human
uuccuguguccaugug

SEQ ID NO: 3580058 - RNA, 17 nt, Human
uuccuguguguacucug

SEQ ID NO: 3580059 - RNA, 21 nt, Human
uuccuguguguacucugucca

SEQ ID NO: 3580060 - RNA, 21 nt, Human
uuccuguucagcauucuuagc

SEQ ID NO: 3580061 - RNA, 17 nt, Human
uuccuguucccaugaga

SEQ ID NO: 3580062 - RNA, 20 nt, Human
uuccuguucuuaagacguga

SEQ ID NO: 3580063 - RNA, 19 nt, Human
uuccuguuggauuuguuua

SEQ ID NO: 3580064 - RNA, 18 nt, Human
uuccuguuucugaaaaga

SEQ ID NO: 3580065 - RNA, 20 nt, Human
uuccuguuucugaaaagaaa

SEQ ID NO: 3580066 - RNA, 14 nt, Human
uuccuguuuguaca

SEQ ID NO: 3580067 - RNA, 19 nt, Human
uuccuguuuuucacauuuu

SEQ ID NO: 3580068 - RNA, 17 nt, Human
uuccuuaaacugugugg

SEQ ID NO: 3580069 - RNA, 18 nt, Human
uuccuuacagaacuacuu

SEQ ID NO: 3580070 - RNA, 23 nt, Human
uuccuuaccuuuaccccaucccu

SEQ ID NO: 3580071 - RNA, 14 nt, Human
uuccuuagcauugu

SEQ ID NO: 3580072 - RNA, 20 nt, Human
uuccuuagcuuagaccucag

SEQ ID NO: 3580073 - RNA, 22 nt, Human
uuccuuagcuuagaccucagcc

SEQ ID NO: 3580074 - RNA, 22 nt, Human
uuccuuagguuuuuuuccuucu

SEQ ID NO: 3580075 - RNA, 23 nt, Human
uuccuuagguuuuuuuccuucug

SEQ ID NO: 3580076 - RNA, 17 nt, Human
uuccuucacauccugug

SEQ ID NO: 3580077 - RNA, 21 nt, Human
uuccuucagagagcagugcuu

SEQ ID NO: 3580078 - RNA, 19 nt, Human
uuccuucagcacuuuagaa

SEQ ID NO: 3580079 - RNA, 14 nt, Human
uuccuucaggguga

SEQ ID NO: 3580080 - RNA, 23 nt, Human
uuccuucagugccuuauggaaca

SEQ ID NO: 3580081 - RNA, 14 nt, Human
uuccuuccagccca

SEQ ID NO: 3580082 - RNA, 21 nt, Human
uuccuucccacccaucgcugu

SEQ ID NO: 3580083 - RNA, 22 nt, Human
uuccuucccgccagagggcuug

SEQ ID NO: 3580084 - RNA, 13 nt, Human
uuccuucccuggc

SEQ ID NO: 3580085 - RNA, 14 nt, Human
uuccuucccuggcu

SEQ ID NO: 3580086 - RNA, 16 nt, Human
uuccuucccugugccu

SEQ ID NO: 3580087 - RNA, 12 nt, Human
uuccuuccgcuu

SEQ ID NO: 3580088 - RNA, 12 nt, Human
uuccuuccuaaa

SEQ ID NO: 3580089 - RNA, 17 nt, Human
uuccuuccuaaaauaau

SEQ ID NO: 3580090 - RNA, 13 nt, Human
uuccuuccucuga

SEQ ID NO: 3580091 - RNA, 17 nt, Human
uuccuuccucugagccu

SEQ ID NO: 3580092 - RNA, 16 nt, Human
uuccuuccuucccugg

SEQ ID NO: 3580093 - RNA, 16 nt, Human
uuccuucucugaacac

SEQ ID NO: 3580094 - RNA, 13 nt, Human
uuccuucugaagu

SEQ ID NO: 3580095 - RNA, 13 nt, Human
uuccuucuggccu

SEQ ID NO: 3580096 - RNA, 17 nt, Human
uuccuucugugaaagua

SEQ ID NO: 3580097 - RNA, 17 nt, Human
uuccuucuugccuucag

SEQ ID NO: 3580098 - RNA, 13 nt, Human
uuccuucuuugau

SEQ ID NO: 3580099 - RNA, 20 nt, Human
uuccuucuuugcccuuuacu

SEQ ID NO: 3580100 - RNA, 22 nt, Human
uuccuugaccugcauuguaaau

SEQ ID NO: 3580101 - RNA, 19 nt, Human
uuccuugaccuuccucugg

SEQ ID NO: 3580102 - RNA, 20 nt, Human
uuccuugaggggagccagga

SEQ ID NO: 3580103 - RNA, 15 nt, Human
uuccuugauaauguu

SEQ ID NO: 3580104 - RNA, 13 nt, Human
uuccuugaucauu

SEQ ID NO: 3580105 - RNA, 14 nt, Human
uuccuugccagucu

SEQ ID NO: 3580106 - RNA, 15 nt, Human
uuccuugccagucuu

SEQ ID NO: 3580107 - RNA, 13 nt, Human
uuccuugccugca

SEQ ID NO: 3580108 - RNA, 13 nt, Human
uuccuugcucucc

SEQ ID NO: 3580109 - RNA, 18 nt, Human
uuccuugcucugcacccc

SEQ ID NO: 3580110 - RNA, 20 nt, Human
uuccuugcuguccuaggcca

SEQ ID NO: 3580111 - RNA, 15 nt, Human
uuccuuggggcaggc

SEQ ID NO: 3580112 - RNA, 18 nt, Human
uuccuuguagccuuuuga

SEQ ID NO: 3580113 - RNA, 15 nt, Human
uuccuuguauuuaaa

SEQ ID NO: 3580114 - RNA, 18 nt, Human
uuccuuguauuuaaauau

SEQ ID NO: 3580115 - RNA, 16 nt, Human
uuccuugucacuggua

SEQ ID NO: 3580116 - RNA, 13 nt, Human
uuccuuuauaaug

SEQ ID NO: 3580117 - RNA, 19 nt, Human
uuccuuuaugugaauuuuu

SEQ ID NO: 3580118 - RNA, 16 nt, Human
uuccuuucauuuacug

SEQ ID NO: 3580119 - RNA, 14 nt, Human
uuccuuucccaagc

SEQ ID NO: 3580120 - RNA, 18 nt, Human
uuccuuucccuuuagcac

SEQ ID NO: 3580121 - RNA, 23 nt, Human
uuccuuuccuguguguacucugu

SEQ ID NO: 3580122 - RNA, 14 nt, Human
uuccuuuccuuuuc

SEQ ID NO: 3580123 - RNA, 13 nt, Human
uuccuuucucacc

SEQ ID NO: 3580124 - RNA, 12 nt, Human
uuccuuucucag

SEQ ID NO: 3580125 - RNA, 15 nt, Human
uuccuuucucuuucu

SEQ ID NO: 3580126 - RNA, 22 nt, Human
uuccuuucucuuucucucuucc

SEQ ID NO: 3580127 - RNA, 18 nt, Human
uuccuuucuuuucccccu

SEQ ID NO: 3580128 - RNA, 22 nt, Human
uuccuuugaauccucucucugu

SEQ ID NO: 3580129 - RNA, 21 nt, Human
uuccuuuguuuuuuuuuccug

SEQ ID NO: 3580130 - RNA, 12 nt, Human
uuccuuuuaauu

SEQ ID NO: 3580131 - RNA, 18 nt, Human
uuccuuuuacuuuucuuc

SEQ ID NO: 3580132 - RNA, 22 nt, Human
uuccuuuuacuuuucuucuauu

SEQ ID NO: 3580133 - RNA, 16 nt, Human
uuccuuuucacugcug

SEQ ID NO: 3580134 - RNA, 16 nt, Human
uuccuuuucccugcuu

SEQ ID NO: 3580135 - RNA, 17 nt, Human
uuccuuuucccugcuuc

SEQ ID NO: 3580136 - RNA, 21 nt, Human
uuccuuuucuauuccuucugg

SEQ ID NO: 3580137 - RNA, 22 nt, Human
uuccuuuucuuguuuaucagca

SEQ ID NO: 3580138 - RNA, 23 nt, Human
uuccuuuugaaagaaucagucuu

SEQ ID NO: 3580139 - RNA, 23 nt, Human
uuccuuuugaacgccccccccca

SEQ ID NO: 3580140 - RNA, 17 nt, Human
uuccuuuugccgacccc

SEQ ID NO: 3580141 - RNA, 18 nt, Human
uuccuuuuuauuuauaug

SEQ ID NO: 3580142 - RNA, 15 nt, Human
uuccuuuuuuauaca

SEQ ID NO: 3580143 - RNA, 17 nt, Human
uugauguuuguggccuc

SEQ ID NO: 3580144 - RNA, 20 nt, Human
uugauguuuguggccucaga

SEQ ID NO: 3580145 - RNA, 22 nt, Human
uugauguuuguggccucagaau

SEQ ID NO: 3580146 - RNA, 23 nt, Human
uugauguuuuaaggaugcuugua

SEQ ID NO: 3580147 - RNA, 14 nt, Human
uugauuaaagauga

SEQ ID NO: 3580148 - RNA, 15 nt, Human
uugauuaaauucuug

SEQ ID NO: 3580149 - RNA, 20 nt, Human
uugauuaaauucuugcaaag

SEQ ID NO: 3580150 - RNA, 14 nt, Human
uugauuaacaaaua

SEQ ID NO: 3580151 - RNA, 15 nt, Human
uugauuaagauuuua

SEQ ID NO: 3580152 - RNA, 20 nt, Human
uugauuaagauuuuacaaaa

SEQ ID NO: 3580153 - RNA, 11 nt, Human
uugauuaaggc

SEQ ID NO: 3580154 - RNA, 18 nt, Human
uugauuaauccagaauaa

SEQ ID NO: 3580155 - RNA, 14 nt, Human
uugauuacagugca

SEQ ID NO: 3580156 - RNA, 17 nt, Human
uugauuacagugcagug

SEQ ID NO: 3580157 - RNA, 16 nt, Human
uugauuaguuuucuug

SEQ ID NO: 3580158 - RNA, 21 nt, Human
uugauuauccauauugaguca

SEQ ID NO: 3580159 - RNA, 17 nt, Human
uugauuauucaguguca

SEQ ID NO: 3580160 - RNA, 13 nt, Human
uugauuauuugca

SEQ ID NO: 3580161 - RNA, 22 nt, Human
uugauucaaaauauuuaaaaau

SEQ ID NO: 3580162 - RNA, 14 nt, Human
uugauucacauguu

SEQ ID NO: 3580163 - RNA, 18 nt, Human
uugauucacauguuuuca

SEQ ID NO: 3580164 - RNA, 23 nt, Human
uugauucacauguuuucaaaugg

SEQ ID NO: 3580165 - RNA, 13 nt, Human
uugauucacuuca

SEQ ID NO: 3580166 - RNA, 14 nt, Human
uugauucagacagc

SEQ ID NO: 3580167 - RNA, 21 nt, Human
uugauucagacagcugccugg

SEQ ID NO: 3580168 - RNA, 16 nt, Human
uugauucagcucugca

SEQ ID NO: 3580169 - RNA, 20 nt, Human
uugauucuccuuuuaugugu

SEQ ID NO: 3580170 - RNA, 20 nt, Human
uugauucugcaguaaaucuu

SEQ ID NO: 3580171 - RNA, 13 nt, Human
uugauugauuuga

SEQ ID NO: 3580172 - RNA, 15 nt, Human
uugauugcuaaaugu

SEQ ID NO: 3580173 - RNA, 12 nt, Human
uugauugcuuuu

SEQ ID NO: 3580174 - RNA, 19 nt, Human
uugauugggaaaacauuug

SEQ ID NO: 3580175 - RNA, 17 nt, Human
uugauugggcacaucau

SEQ ID NO: 3580176 - RNA, 21 nt, Human
uugauuggugauuagguggug

SEQ ID NO: 3580177 - RNA, 15 nt, Human
uugauugucagcuac

SEQ ID NO: 3580178 - RNA, 18 nt, Human
uugauuuaaacacacaga

SEQ ID NO: 3580179 - RNA, 19 nt, Human
uugauuuaugcauggaaac

SEQ ID NO: 3580180 - RNA, 14 nt, Human
uugauuuauuaacu

SEQ ID NO: 3580181 - RNA, 14 nt, Human
uugauuucaaaguu

SEQ ID NO: 3580182 - RNA, 11 nt, Human
uugauuuccuc

SEQ ID NO: 3580183 - RNA, 17 nt, Human
uugauuucuuuccagag

SEQ ID NO: 3580184 - RNA, 13 nt, Human
uugauuugaagaa

SEQ ID NO: 3580185 - RNA, 18 nt, Human
uugauuugauugggauga

SEQ ID NO: 3580186 - RNA, 13 nt, Human
uugauuugcauug

SEQ ID NO: 3580187 - RNA, 19 nt, Human
uugauuugucacugcuuca

SEQ ID NO: 3580188 - RNA, 20 nt, Human
uugauuuguuuuagaaugau

SEQ ID NO: 3580189 - RNA, 19 nt, Human
uugauuuuaaaauguacau

SEQ ID NO: 3580190 - RNA, 23 nt, Human
uugauuuuacaauugaaaugacu

SEQ ID NO: 3580191 - RNA, 19 nt, Human
uugauuuuccaucuaaaaa

SEQ ID NO: 3580192 - RNA, 14 nt, Human
uugauuuucuggau

SEQ ID NO: 3580193 - RNA, 19 nt, Human
uugcaaaaaauguuuuugg

SEQ ID NO: 3580194 - RNA, 15 nt, Human
uugcaaaaacuacaa

SEQ ID NO: 3580195 - RNA, 13 nt, Human
uugcaaaaaucca

SEQ ID NO: 3580196 - RNA, 17 nt, Human
uugcaaaagacuaauuu

SEQ ID NO: 3580197 - RNA, 11 nt, Human
uugcaaaauuu

SEQ ID NO: 3580198 - RNA, 23 nt, Human
uugcaaaauuuccaguaccuuug

SEQ ID NO: 3580199 - RNA, 15 nt, Human
uugcaaaguacugua

SEQ ID NO: 3580200 - RNA, 13 nt, Human
uugcaaaguguau

SEQ ID NO: 3580201 - RNA, 12 nt, Human
uugcaaauaguc

SEQ ID NO: 3580202 - RNA, 17 nt, Human
uugcaaaucuugaaauu

SEQ ID NO: 3580203 - RNA, 18 nt, Human
uugcaaccaggaacagca

SEQ ID NO: 3580204 - RNA, 12 nt, Human
uugcaacuucau

SEQ ID NO: 3580205 - RNA, 17 nt, Human
uugcaacuuuguauaaa

SEQ ID NO: 3580206 - RNA, 18 nt, Human
uugcaacuuuguauaaaa

SEQ ID NO: 3580207 - RNA, 14 nt, Human
uugcaagaugugaa

SEQ ID NO: 3580208 - RNA, 16 nt, Human
uugcaagaugugaauu

SEQ ID NO: 3580209 - RNA, 20 nt, Human
uugcaagaugugaauuauug

SEQ ID NO: 3580210 - RNA, 22 nt, Human
uugcaagaugugaauuauugac

SEQ ID NO: 3580211 - RNA, 22 nt, Human
uugcaagccagauuuuccugaa

SEQ ID NO: 3580212 - RNA, 14 nt, Human
uugcaagccccucu

SEQ ID NO: 3580213 - RNA, 23 nt, Human
uugcaaggccgcuguucacccac

SEQ ID NO: 3580214 - RNA, 22 nt, Human
uugcaagggaaaagucucuugu

SEQ ID NO: 3580215 - RNA, 22 nt, Human
uugcaagggcggccuuucccac

SEQ ID NO: 3580216 - RNA, 23 nt, Human
uugcaagggcggccuuucccacu

SEQ ID NO: 3580217 - RNA, 18 nt, Human
uugcaagguaaaauuuua

SEQ ID NO: 3580218 - RNA, 15 nt, Human
uugcaagguuccaca

SEQ ID NO: 3580219 - RNA, 16 nt, Human
uugcaagucauggcug

SEQ ID NO: 3580220 - RNA, 16 nt, Human
uugcaauaacagcugc

SEQ ID NO: 3580221 - RNA, 13 nt, Human
uugcaauaauacu

SEQ ID NO: 3580222 - RNA, 14 nt, Human
uugcaauaauacuu

SEQ ID NO: 3580223 - RNA, 20 nt, Human
uugcaauaauacuucucaaa

SEQ ID NO: 3580224 - RNA, 13 nt, Human
uugcaauaaugca

SEQ ID NO: 3580225 - RNA, 17 nt, Human
uugcaauaaugcaguau

SEQ ID NO: 3580226 - RNA, 15 nt, Human
uugcaauaccaagua

SEQ ID NO: 3580227 - RNA, 15 nt, Human
uugcaauaucugaag

SEQ ID NO: 3580228 - RNA, 22 nt, Human
uugcaauaucugaagcccuccc

SEQ ID NO: 3580229 - RNA, 20 nt, Human
uugcaauccacaaucugaca

SEQ ID NO: 3580230 - RNA, 13 nt, Human
uugcaaucuauaa

SEQ ID NO: 3580231 - RNA, 23 nt, Human
uugcacaaaaagauaccuuaaaa

SEQ ID NO: 3580232 - RNA, 14 nt, Human
uugcacaaaauaua

SEQ ID NO: 3580233 - RNA, 15 nt, Human
uugcacaauuauaaa

SEQ ID NO: 3580234 - RNA, 19 nt, Human
uugcacacccacucagcuc

SEQ ID NO: 3580235 - RNA, 20 nt, Human
uugcacacuuugguaccaga

SEQ ID NO: 3580236 - RNA, 17 nt, Human
uugcacagaaguccugu

SEQ ID NO: 3580237 - RNA, 15 nt, Human
uugcacaucuuggcu

SEQ ID NO: 3580238 - RNA, 19 nt, Human
uugcacauggauucaguuu

SEQ ID NO: 3580239 - RNA, 13 nt, Human
uugcacaugucuu

SEQ ID NO: 3580240 - RNA, 16 nt, Human
uugcacauuuugauuu

SEQ ID NO: 3580241 - RNA, 14 nt, Human
uugcaccacugcac

SEQ ID NO: 3580242 - RNA, 12 nt, Human
uugcacccagcc

SEQ ID NO: 3580243 - RNA, 22 nt, Human
uugcaccccucacucuggccuc

SEQ ID NO: 3580244 - RNA, 14 nt, Human
uugcaccccuccca

SEQ ID NO: 3580245 - RNA, 16 nt, Human
uugcacccgccucucc

SEQ ID NO: 3580246 - RNA, 14 nt, Human
uugcaccugcucuc

SEQ ID NO: 3580247 - RNA, 15 nt, Human
uugcaccuuucuagu

SEQ ID NO: 3580248 - RNA, 16 nt, Human
uugcacgacgcccucu

SEQ ID NO: 3580249 - RNA, 18 nt, Human
uugcacgcccauguguga

SEQ ID NO: 3580250 - RNA, 19 nt, Human
uugcacguauuuuaauagc

SEQ ID NO: 3580251 - RNA, 20 nt, Human
uugcacguguguuuuucuau

SEQ ID NO: 3580252 - RNA, 21 nt, Human
uugcacuauugagucuucaug

SEQ ID NO: 3580253 - RNA, 20 nt, Human
uugcacucaaaucuuaagaa

SEQ ID NO: 3580254 - RNA, 16 nt, Human
uugcacuccagccugg

SEQ ID NO: 3580255 - RNA, 17 nt, Human
uugcacucuagccuggg

SEQ ID NO: 3580256 - RNA, 19 nt, Human
uugcacugaaauggaauuc

SEQ ID NO: 3580257 - RNA, 12 nt, Human
uugcacugaggg

SEQ ID NO: 3580258 - RNA, 16 nt, Human
uugcacugagggccac

SEQ ID NO: 3580259 - RNA, 17 nt, Human
uugcacuuuuucuuaau

SEQ ID NO: 3580260 - RNA, 17 nt, Human
uugcagaaaagcaccug

SEQ ID NO: 3580261 - RNA, 18 nt, Human
uugcagaaaagcaccugc

SEQ ID NO: 3580262 - RNA, 19 nt, Human
uugcagaaaauucugugcc

SEQ ID NO: 3580263 - RNA, 15 nt, Human
uugcagaaacauuuu

SEQ ID NO: 3580264 - RNA, 15 nt, Human
uugcagaagagggug

SEQ ID NO: 3580265 - RNA, 16 nt, Human
uugcagaagagggugu

SEQ ID NO: 3580266 - RNA, 21 nt, Human
uugcagaagaggguguguuug

SEQ ID NO: 3580267 - RNA, 20 nt, Human
uugcagaagggggucucuuc

SEQ ID NO: 3580268 - RNA, 19 nt, Human
uugcagaaguucuuagugu

SEQ ID NO: 3580269 - RNA, 11 nt, Human
uugcagacagg

SEQ ID NO: 3580270 - RNA, 15 nt, Human
uugcagacaggaauc

SEQ ID NO: 3580271 - RNA, 18 nt, Human
uugcagacaggaaucuua

SEQ ID NO: 3580272 - RNA, 14 nt, Human
uugcagagacagga

SEQ ID NO: 3580273 - RNA, 14 nt, Human
uugcagaugacaaa

SEQ ID NO: 3580274 - RNA, 18 nt, Human
uugcagauucauuuuucu

SEQ ID NO: 3580275 - RNA, 17 nt, Human
uugcagcacagcugaga

SEQ ID NO: 3580276 - RNA, 18 nt, Human
uugcagcacucacacagg

SEQ ID NO: 3580277 - RNA, 15 nt, Human
uugcagcccuuguga

SEQ ID NO: 3580278 - RNA, 20 nt, Human
uugcagccggcacagggucu

SEQ ID NO: 3580279 - RNA, 22 nt, Human
uugcagccugcucuagugggac

SEQ ID NO: 3580280 - RNA, 18 nt, Human
uugcagcgauuaauaaca

SEQ ID NO: 3580281 - RNA, 18 nt, Human
uugcagcucagaaccaca

SEQ ID NO: 3580282 - RNA, 9 nt, Human
uugcagcug

SEQ ID NO: 3580283 - RNA, 14 nt, Human
uugcagcugggaga

SEQ ID NO: 3580284 - RNA, 12 nt, Human
uugcagcuguuu

SEQ ID NO: 3580285 - RNA, 17 nt, Human
uugcaguagauuuucuu

SEQ ID NO: 3580286 - RNA, 14 nt, Human
uugcagucacucua

SEQ ID NO: 3580287 - RNA, 17 nt, Human
uugcagucaucagaagu

SEQ ID NO: 3580288 - RNA, 17 nt, Human
uugcagucugcuucugc

SEQ ID NO: 3580289 - RNA, 14 nt, Human
uugcuguuuuccuc

SEQ ID NO: 3580290 - RNA, 16 nt, Human
uugcuguuuuccuccc

SEQ ID NO: 3580291 - RNA, 19 nt, Human
uugcuguuuuccucccuuc

SEQ ID NO: 3580292 - RNA, 20 nt, Human
uugcuguuuuccucccuucu

SEQ ID NO: 3580293 - RNA, 18 nt, Human
uugcuuaaaccacuuaaa

SEQ ID NO: 3580294 - RNA, 12 nt, Human
uugcuuaaaugu

SEQ ID NO: 3580295 - RNA, 15 nt, Human
uugcuuaaaugugaa

SEQ ID NO: 3580296 - RNA, 16 nt, Human
uugcuuaaaugugaau

SEQ ID NO: 3580297 - RNA, 17 nt, Human
uugcuuaaaugugaauu

SEQ ID NO: 3580298 - RNA, 23 nt, Human
uugcuuacaauuuuuuuaauuuu

SEQ ID NO: 3580299 - RNA, 20 nt, Human
uugcuuaggaugugugcaug

SEQ ID NO: 3580300 - RNA, 14 nt, Human
uugcuuaguaaaau

SEQ ID NO: 3580301 - RNA, 22 nt, Human
uugcuuagucacuuauuucaua

SEQ ID NO: 3580302 - RNA, 12 nt, Human
uugcuuaugaau

SEQ ID NO: 3580303 - RNA, 18 nt, Human
uugcuuauuguuccaaga

SEQ ID NO: 3580304 - RNA, 22 nt, Human
uugcuucaccauggccuuauga

SEQ ID NO: 3580305 - RNA, 20 nt, Human
uugcuucauaaaugaagcag

SEQ ID NO: 3580306 - RNA, 20 nt, Human
uugcuucaugugucccagaa

SEQ ID NO: 3580307 - RNA, 16 nt, Human
uugcuuccccuuuugc

SEQ ID NO: 3580308 - RNA, 17 nt, Human
uugcuuccccuuuugcc

SEQ ID NO: 3580309 - RNA, 20 nt, Human
uugcuuccccuuuugccaau

SEQ ID NO: 3580310 - RNA, 23 nt, Human
uugcuucccuuuuuuccuuucca

SEQ ID NO: 3580311 - RNA, 17 nt, Human
uugcuuccuccucccca

SEQ ID NO: 3580312 - RNA, 14 nt, Human
uugcuucuguagua

SEQ ID NO: 3580313 - RNA, 21 nt, Human
uugcuucuucccuuaaaauuu

SEQ ID NO: 3580314 - RNA, 23 nt, Human
uugcuucuucccuuaaaauuuau

SEQ ID NO: 3580315 - RNA, 18 nt, Human
uugcuucuugugaaggcc

SEQ ID NO: 3580316 - RNA, 12 nt, Human
uugcuucuuucu

SEQ ID NO: 3580317 - RNA, 15 nt, Human
uugcuugaaagaaaa

SEQ ID NO: 3580318 - RNA, 18 nt, Human
uugcuugaacacaguauu

SEQ ID NO: 3580319 - RNA, 19 nt, Human
uugcuugaacacaguauuu

SEQ ID NO: 3580320 - RNA, 14 nt, Human
uugcuugagcccag

SEQ ID NO: 3580321 - RNA, 16 nt, Human
uugcuugccaaaguac

SEQ ID NO: 3580322 - RNA, 15 nt, Human
uugcuugccucucug

SEQ ID NO: 3580323 - RNA, 18 nt, Human
uugcuuguaccucuggcu

SEQ ID NO: 3580324 - RNA, 19 nt, Human
uugcuuguuauauuaagca

SEQ ID NO: 3580325 - RNA, 21 nt, Human
uugcuuguuauauuaagcaga

SEQ ID NO: 3580326 - RNA, 13 nt, Human
uugcuuguucucu

SEQ ID NO: 3580327 - RNA, 23 nt, Human
uugcuuguugggauuccugaccc

SEQ ID NO: 3580328 - RNA, 24 nt, Human
uugcuuguugggauuccugaccca

SEQ ID NO: 3580329 - RNA, 15 nt, Human
uugcuuuauuccaga

SEQ ID NO: 3580330 - RNA, 13 nt, Human
uugcuuucugaaa

SEQ ID NO: 3580331 - RNA, 14 nt, Human
uugcuuucugaaau

SEQ ID NO: 3580332 - RNA, 20 nt, Human
uugcuuucugcucagcuucu

SEQ ID NO: 3580333 - RNA, 21 nt, Human
uugcuuugaaacuagacuuga

SEQ ID NO: 3580334 - RNA, 15 nt, Human
uugcuuugaagcagu

SEQ ID NO: 3580335 - RNA, 16 nt, Human
uugcuuugaagcaguu

SEQ ID NO: 3580336 - RNA, 21 nt, Human
uugcuuugaaguagcucuuuu

SEQ ID NO: 3580337 - RNA, 19 nt, Human
uugcuuugauuuacagcaa

SEQ ID NO: 3580338 - RNA, 13 nt, Human
uugcuuugcccug

SEQ ID NO: 3580339 - RNA, 22 nt, Human
uugcuuuguaagugaaaaacau

SEQ ID NO: 3580340 - RNA, 15 nt, Human
uugcuuugugauuuu

SEQ ID NO: 3580341 - RNA, 16 nt, Human
uugcuuuguguucuuu

SEQ ID NO: 3580342 - RNA, 23 nt, Human
uugcuuuguuaaaaaaaaaaaga

SEQ ID NO: 3580343 - RNA, 14 nt, Human
uugcuuuuaaaacu

SEQ ID NO: 3580344 - RNA, 13 nt, Human
uugcuuuuaaaau

SEQ ID NO: 3580345 - RNA, 16 nt, Human
uugcuuuucaugcaaa

SEQ ID NO: 3580346 - RNA, 16 nt, Human
uugcuuuucccucuuu

SEQ ID NO: 3580347 - RNA, 18 nt, Human
uugcuuuugaaggaauac

SEQ ID NO: 3580348 - RNA, 21 nt, Human
uugcuuuugaaggaauacaau

SEQ ID NO: 3580349 - RNA, 15 nt, Human
uugcuuuuucaccag

SEQ ID NO: 3580350 - RNA, 13 nt, Human
uugcuuuuucuga

SEQ ID NO: 3580351 - RNA, 15 nt, Human
uugcuuuuugugaua

SEQ ID NO: 3580352 - RNA, 19 nt, Human
uugcuuuuuuguauugguu

SEQ ID NO: 3580353 - RNA, 15 nt, Human
uuggaaaaaauuugu

SEQ ID NO: 3580354 - RNA, 17 nt, Human
uuggaaaaagugaugga

SEQ ID NO: 3580355 - RNA, 21 nt, Human
uuggaaaaauccagaaagaaa

SEQ ID NO: 3580356 - RNA, 14 nt, Human
uuggaaaaauguuu

SEQ ID NO: 3580357 - RNA, 20 nt, Human
uuggaaaacgauuuaauuua

SEQ ID NO: 3580358 - RNA, 19 nt, Human
uuggaaaagaauacagaaa

SEQ ID NO: 3580359 - RNA, 15 nt, Human
uuggaaaauaaauca

SEQ ID NO: 3580360 - RNA, 18 nt, Human
uuggaaacacuaaauguu

SEQ ID NO: 3580361 - RNA, 20 nt, Human
uuggaaacacuaaauguuaa

SEQ ID NO: 3580362 - RNA, 17 nt, Human
uuggaaaccugcccugc

SEQ ID NO: 3580363 - RNA, 20 nt, Human
uuggaaaccugcccugccug

SEQ ID NO: 3580364 - RNA, 15 nt, Human
uuggaaacuaauaaa

SEQ ID NO: 3580365 - RNA, 17 nt, Human
uuggaaacuaauaaaau

SEQ ID NO: 3580366 - RNA, 23 nt, Human
uuggaaagaguaggaagacuuug

SEQ ID NO: 3580367 - RNA, 21 nt, Human
uuggaaagcagguggcaucuc

SEQ ID NO: 3580368 - RNA, 21 nt, Human
uuggaaaggaaugcaaagaug

SEQ ID NO: 3580369 - RNA, 14 nt, Human
uuggaaaggaccag

SEQ ID NO: 3580370 - RNA, 22 nt, Human
uuggaaaguacacucugcuguu

SEQ ID NO: 3580371 - RNA, 13 nt, Human
uuggaaauaaagu

SEQ ID NO: 3580372 - RNA, 21 nt, Human
uuggaaauaaagucagaugga

SEQ ID NO: 3580373 - RNA, 16 nt, Human
uuggaaaucaaaugua

SEQ ID NO: 3580374 - RNA, 19 nt, Human
uuggaaaucaaauguaaag

SEQ ID NO: 3580375 - RNA, 22 nt, Human
uuggaaauccuaguuuccucuc

SEQ ID NO: 3580376 - RNA, 21 nt, Human
uuggaaauggaugcaaaguac

SEQ ID NO: 3580377 - RNA, 22 nt, Human
uuggaaccacggagaucuccuu

SEQ ID NO: 3580378 - RNA, 13 nt, Human
uuggaaccagacu

SEQ ID NO: 3580379 - RNA, 18 nt, Human
uuggaagaaggggcaggu

SEQ ID NO: 3580380 - RNA, 24 nt, Human
uuggaagacuaucuuacuauuuca

SEQ ID NO: 3580381 - RNA, 13 nt, Human
uuggaagagaaag

SEQ ID NO: 3580382 - RNA, 15 nt, Human
uuggaagagaaucac

SEQ ID NO: 3580383 - RNA, 15 nt, Human
uuggaagagcagcac

SEQ ID NO: 3580384 - RNA, 20 nt, Human
uuggaagagcagcaccuccu

SEQ ID NO: 3580385 - RNA, 22 nt, Human
uuggaagagcagcaccuccuca

SEQ ID NO: 3580386 - RNA, 21 nt, Human
uuggaagauccugugaggagc

SEQ ID NO: 3580387 - RNA, 22 nt, Human
uuggaagcacaccaaucuuacu

SEQ ID NO: 3580388 - RNA, 18 nt, Human
uuggaagcuguuuggaaa

SEQ ID NO: 3580389 - RNA, 13 nt, Human
uuggaaggagcag

SEQ ID NO: 3580390 - RNA, 15 nt, Human
uuggaaggagcagaa

SEQ ID NO: 3580391 - RNA, 16 nt, Human
uuggaaguugcauggc

SEQ ID NO: 3580392 - RNA, 18 nt, Human
uuggaaguuuagcucuga

SEQ ID NO: 3580393 - RNA, 21 nt, Human
uuggaaguuuagcucugagaa

SEQ ID NO: 3580394 - RNA, 19 nt, Human
uuggaaguuuguguucugu

SEQ ID NO: 3580395 - RNA, 13 nt, Human
uuggaauacuuuu

SEQ ID NO: 3580396 - RNA, 13 nt, Human
uuggaauauuaaa

SEQ ID NO: 3580397 - RNA, 15 nt, Human
uuggaaucuagaaga

SEQ ID NO: 3580398 - RNA, 17 nt, Human
uuggaaugggcagcuca

SEQ ID NO: 3580399 - RNA, 16 nt, Human
uuggaauuaaaacaau

SEQ ID NO: 3580400 - RNA, 17 nt, Human
uuggaauuaaccuggug

SEQ ID NO: 3580401 - RNA, 23 nt, Human
uuggaauuagaacccuugcacag

SEQ ID NO: 3580402 - RNA, 15 nt, Human
uuggaauugucuuua

SEQ ID NO: 3580403 - RNA, 22 nt, Human
uuggaauuuguaaccucagcuc

SEQ ID NO: 3580404 - RNA, 21 nt, Human
uuggacaaaugugaagaugca

SEQ ID NO: 3580405 - RNA, 22 nt, Human
uuggacaaaugugaagaugcau

SEQ ID NO: 3580406 - RNA, 23 nt, Human
uuggacaaucaugaaauaugcau

SEQ ID NO: 3580407 - RNA, 18 nt, Human
uuggacagcaaaaccauu

SEQ ID NO: 3580408 - RNA, 23 nt, Human
uuggacauguccaugaccagaag

SEQ ID NO: 3580409 - RNA, 15 nt, Human
uuggacauuuuaugu

SEQ ID NO: 3580410 - RNA, 14 nt, Human
uuggaccccagcug

SEQ ID NO: 3580411 - RNA, 18 nt, Human
uuggacccugaggcccag

SEQ ID NO: 3580412 - RNA, 21 nt, Human
uuggacccugaggcccagagg

SEQ ID NO: 3580413 - RNA, 19 nt, Human
uuggaccuaaauggccuca

SEQ ID NO: 3580414 - RNA, 17 nt, Human
uuggaccucugcucuga

SEQ ID NO: 3580415 - RNA, 15 nt, Human
uuggacgcacacagc

SEQ ID NO: 3580416 - RNA, 16 nt, Human
uuggacgcacacagcu

SEQ ID NO: 3580417 - RNA, 23 nt, Human
uuggacuaaaugccuaguuuuua

SEQ ID NO: 3580418 - RNA, 12 nt, Human
uuggacuaugga

SEQ ID NO: 3580419 - RNA, 14 nt, Human
uuggacuccaucuc

SEQ ID NO: 3580420 - RNA, 18 nt, Human
uuggacucuccccucuua

SEQ ID NO: 3580421 - RNA, 17 nt, Human
uuggacucuugcucuuu

SEQ ID NO: 3580422 - RNA, 15 nt, Human
uuggacugacauuua

SEQ ID NO: 3580423 - RNA, 13 nt, Human
uuggacuugagga

SEQ ID NO: 3580424 - RNA, 12 nt, Human
uuggacuuuguu

SEQ ID NO: 3580425 - RNA, 14 nt, Human
uuggacuuuguuac

SEQ ID NO: 3580426 - RNA, 17 nt, Human
uuggagaagaacugaaa

SEQ ID NO: 3580427 - RNA, 22 nt, Human
uuggagaagaacugaaaucaua

SEQ ID NO: 3580428 - RNA, 18 nt, Human
uuggagaagguuaucaaa

SEQ ID NO: 3580429 - RNA, 13 nt, Human
uuggagaauuuag

SEQ ID NO: 3580430 - RNA, 22 nt, Human
uuggagacccgccuggcuaaca

SEQ ID NO: 3580431 - RNA, 13 nt, Human
uuggagacucugu

SEQ ID NO: 3580432 - RNA, 16 nt, Human
uuggagacuuucuuua

SEQ ID NO: 3580433 - RNA, 13 nt, Human
uugguuuuaaaau

SEQ ID NO: 3580434 - RNA, 22 nt, Human
uugguuuuaauugaaggaaaga

SEQ ID NO: 3580435 - RNA, 19 nt, Human
uugguuuuaugaugacgua

SEQ ID NO: 3580436 - RNA, 14 nt, Human
uugguuuucuucuu

SEQ ID NO: 3580437 - RNA, 18 nt, Human
uugguuuuuaaaacccag

SEQ ID NO: 3580438 - RNA, 16 nt, Human
uuguaaaaaaaaaugc

SEQ ID NO: 3580439 - RNA, 20 nt, Human
uuguaaaaacagcauugcuu

SEQ ID NO: 3580440 - RNA, 21 nt, Human
uuguaaaaacagcauugcuuu

SEQ ID NO: 3580441 - RNA, 14 nt, Human
uuguaaaacaggua

SEQ ID NO: 3580442 - RNA, 15 nt, Human
uuguaaaacagguag

SEQ ID NO: 3580443 - RNA, 21 nt, Human
uuguaaaagaacaguaaacau

SEQ ID NO: 3580444 - RNA, 19 nt, Human
uuguaaaagcauuuuguaa

SEQ ID NO: 3580445 - RNA, 20 nt, Human
uuguaaaagcauuuuguaau

SEQ ID NO: 3580446 - RNA, 21 nt, Human
uuguaaaauagcuuguauagu

SEQ ID NO: 3580447 - RNA, 17 nt, Human
uuguaaaaugacaauca

SEQ ID NO: 3580448 - RNA, 20 nt, Human
uuguaaaaugacaaucaugu

SEQ ID NO: 3580449 - RNA, 22 nt, Human
uuguaaaaugacaaucaugugu

SEQ ID NO: 3580450 - RNA, 14 nt, Human
uuguaaacaaacuc

SEQ ID NO: 3580451 - RNA, 18 nt, Human
uuguaaacguuucaguaa

SEQ ID NO: 3580452 - RNA, 14 nt, Human
uuguaaacuguacu

SEQ ID NO: 3580453 - RNA, 15 nt, Human
uuguaaacuuugaaa

SEQ ID NO: 3580454 - RNA, 17 nt, Human
uuguaaagaaaaauauu

SEQ ID NO: 3580455 - RNA, 18 nt, Human
uuguaaagaaauuuacua

SEQ ID NO: 3580456 - RNA, 16 nt, Human
uuguaaaggaauuuaa

SEQ ID NO: 3580457 - RNA, 16 nt, Human
uuguaaagugaagaau

SEQ ID NO: 3580458 - RNA, 22 nt, Human
uuguaaaguguggucccaacag

SEQ ID NO: 3580459 - RNA, 21 nt, Human
uuguaaaguugguuggauaag

SEQ ID NO: 3580460 - RNA, 15 nt, Human
uuguaaauaagagau

SEQ ID NO: 3580461 - RNA, 16 nt, Human
uuguaaauaagagauu

SEQ ID NO: 3580462 - RNA, 14 nt, Human
uuguaaauacacca

SEQ ID NO: 3580463 - RNA, 13 nt, Human
uuguaaauauuua

SEQ ID NO: 3580464 - RNA, 11 nt, Human
uuguaaaugug

SEQ ID NO: 3580465 - RNA, 14 nt, Human
uuguaaaugugcuu

SEQ ID NO: 3580466 - RNA, 12 nt, Human
uuguaaauguua

SEQ ID NO: 3580467 - RNA, 17 nt, Human
uuguaaauguuauuucu

SEQ ID NO: 3580468 - RNA, 15 nt, Human
uuguaaauuaacuuu

SEQ ID NO: 3580469 - RNA, 16 nt, Human
uuguaaauuaacuuuu

SEQ ID NO: 3580470 - RNA, 23 nt, Human
uuguaaauuaacuuuuauaaacu

SEQ ID NO: 3580471 - RNA, 14 nt, Human
uuguaaauuaaucu

SEQ ID NO: 3580472 - RNA, 16 nt, Human
uuguaaauuauauuug

SEQ ID NO: 3580473 - RNA, 20 nt, Human
uuguaaauuauauuugugcu

SEQ ID NO: 3580474 - RNA, 12 nt, Human
uuguaaauuggc

SEQ ID NO: 3580475 - RNA, 13 nt, Human
uuguaaauuggca

SEQ ID NO: 3580476 - RNA, 18 nt, Human
uuguaaauuggcauggaa

SEQ ID NO: 3580477 - RNA, 13 nt, Human
uuguaaauuguca

SEQ ID NO: 3580478 - RNA, 19 nt, Human
uuguaaauuuaugugaugg

SEQ ID NO: 3580479 - RNA, 17 nt, Human
uuguaacaagaaaacau

SEQ ID NO: 3580480 - RNA, 15 nt, Human
uuguaacaagaaaau

SEQ ID NO: 3580481 - RNA, 15 nt, Human
uuguaacagacauug

SEQ ID NO: 3580482 - RNA, 16 nt, Human
uuguaacagacauugu

SEQ ID NO: 3580483 - RNA, 23 nt, Human
uuguaacauccaauaggaaugcu

SEQ ID NO: 3580484 - RNA, 21 nt, Human
uuguaacauucuauuucaacu

SEQ ID NO: 3580485 - RNA, 15 nt, Human
uuguaacguugcugu

SEQ ID NO: 3580486 - RNA, 20 nt, Human
uuguaacguugcugugggaa

SEQ ID NO: 3580487 - RNA, 21 nt, Human
uuguaacguugcugugggaac

SEQ ID NO: 3580488 - RNA, 14 nt, Human
uuguaacuuauauu

SEQ ID NO: 3580489 - RNA, 17 nt, Human
uuguaacuuauauugaa

SEQ ID NO: 3580490 - RNA, 19 nt, Human
uuguaacuuauauugaaga

SEQ ID NO: 3580491 - RNA, 17 nt, Human
uuguaacuuggauguag

SEQ ID NO: 3580492 - RNA, 14 nt, Human
uuguaagaaauacu

SEQ ID NO: 3580493 - RNA, 17 nt, Human
uuguaagaaauacugua

SEQ ID NO: 3580494 - RNA, 21 nt, Human
uuguaagacaaagguuuuccu

SEQ ID NO: 3580495 - RNA, 22 nt, Human
uuguaagacaaagguuuuccuc

SEQ ID NO: 3580496 - RNA, 17 nt, Human
uuguaagagcuauacag

SEQ ID NO: 3580497 - RNA, 21 nt, Human
uuguaagagcuauacaguuuu

SEQ ID NO: 3580498 - RNA, 21 nt, Human
uuguaagaguguagaagcauu

SEQ ID NO: 3580499 - RNA, 13 nt, Human
uuguaagaugcug

SEQ ID NO: 3580500 - RNA, 15 nt, Human
uuguaagauuuugaa

SEQ ID NO: 3580501 - RNA, 16 nt, Human
uuguaagauuuugaaa

SEQ ID NO: 3580502 - RNA, 17 nt, Human
uuguaagauuuugaaaa

SEQ ID NO: 3580503 - RNA, 19 nt, Human
uuguaagauuuugaaaacu

SEQ ID NO: 3580504 - RNA, 16 nt, Human
uuguaagcguauggcu

SEQ ID NO: 3580505 - RNA, 21 nt, Human
uuguaagucaguguugagaug

SEQ ID NO: 3580506 - RNA, 13 nt, Human
uuguaaguuucag

SEQ ID NO: 3580507 - RNA, 18 nt, Human
uuguaaguuucaggugac

SEQ ID NO: 3580508 - RNA, 13 nt, Human
uuguaauaagcaa

SEQ ID NO: 3580509 - RNA, 20 nt, Human
uuguaauaagcaaucaaggu

SEQ ID NO: 3580510 - RNA, 14 nt, Human
uuguaauauguaaa

SEQ ID NO: 3580511 - RNA, 15 nt, Human
uuguaauauguaaau

SEQ ID NO: 3580512 - RNA, 14 nt, Human
uuguaauauuuugu

SEQ ID NO: 3580513 - RNA, 18 nt, Human
uuguaauauuuuguauua

SEQ ID NO: 3580514 - RNA, 14 nt, Human
uuguaauauuuuua

SEQ ID NO: 3580515 - RNA, 20 nt, Human
uuguaaucguuaugugugua

SEQ ID NO: 3580516 - RNA, 22 nt, Human
uuguaaugaauuccuagaauua

SEQ ID NO: 3580517 - RNA, 13 nt, Human
uuguaaugcugca

SEQ ID NO: 3580518 - RNA, 15 nt, Human
uuguaauguaacugc

SEQ ID NO: 3580519 - RNA, 20 nt, Human
uuguaauguaacugcucuug

SEQ ID NO: 3580520 - RNA, 15 nt, Human
uuguaaugucuugag

SEQ ID NO: 3580521 - RNA, 21 nt, Human
uuguaaugugugaaaaagaug

SEQ ID NO: 3580522 - RNA, 21 nt, Human
uuguaauuaauaauagauugu

SEQ ID NO: 3580523 - RNA, 15 nt, Human
uuguaauuaugauuu

SEQ ID NO: 3580524 - RNA, 14 nt, Human
uuguaauuauugug

SEQ ID NO: 3580525 - RNA, 17 nt, Human
uuguaauucuucaguug

SEQ ID NO: 3580526 - RNA, 17 nt, Human
uuguaauugcuuacauu

SEQ ID NO: 3580527 - RNA, 22 nt, Human
uuguaauugcuuuuuuaaauau

SEQ ID NO: 3580528 - RNA, 13 nt, Human
uuguaauuuugaa

SEQ ID NO: 3580529 - RNA, 23 nt, Human
uuguaauuuuuuuaauuuacaaa

SEQ ID NO: 3580530 - RNA, 22 nt, Human
uuguacaaaaaaaaaguuuuau

SEQ ID NO: 3580531 - RNA, 18 nt, Human
uuguacaaaauuaagcaa

SEQ ID NO: 3580532 - RNA, 20 nt, Human
uuguacaaaauuaagcaaau

SEQ ID NO: 3580533 - RNA, 13 nt, Human
uuguacaaaguau

SEQ ID NO: 3580534 - RNA, 14 nt, Human
uuguacaaauaaag

SEQ ID NO: 3580535 - RNA, 23 nt, Human
uuguacaauugaacuuaaauaaa

SEQ ID NO: 3580536 - RNA, 13 nt, Human
uuguacacuuuuu

SEQ ID NO: 3580537 - RNA, 15 nt, Human
uuguacacuuuuuug

SEQ ID NO: 3580538 - RNA, 17 nt, Human
uuguacagaauauuucu

SEQ ID NO: 3580539 - RNA, 16 nt, Human
uuguacagacaacaaa

SEQ ID NO: 3580540 - RNA, 18 nt, Human
uuguacagacaacaaacc

SEQ ID NO: 3580541 - RNA, 13 nt, Human
uuguacagcccag

SEQ ID NO: 3580542 - RNA, 21 nt, Human
uuguacagcguuuuaaaagaa

SEQ ID NO: 3580543 - RNA, 16 nt, Human
uuguacagcuguuuaa

SEQ ID NO: 3580544 - RNA, 16 nt, Human
uuguacaguuugcugu

SEQ ID NO: 3580545 - RNA, 17 nt, Human
uuguacaguuugcugua

SEQ ID NO: 3580546 - RNA, 18 nt, Human
uuguacaguuuguuuaca

SEQ ID NO: 3580547 - RNA, 13 nt, Human
uuguacauaaaca

SEQ ID NO: 3580548 - RNA, 16 nt, Human
uuguacauaguuauuu

SEQ ID NO: 3580549 - RNA, 18 nt, Human
uuguacauauguaaaaua

SEQ ID NO: 3580550 - RNA, 13 nt, Human
uuguacaugaaau

SEQ ID NO: 3580551 - RNA, 20 nt, Human
uuguacauuuaugauuuaau

SEQ ID NO: 3580552 - RNA, 20 nt, Human
uuguacauuugggaguuuuu

SEQ ID NO: 3580553 - RNA, 15 nt, Human
uuguaccaaaauuuu

SEQ ID NO: 3580554 - RNA, 12 nt, Human
uuguaccaguga

SEQ ID NO: 3580555 - RNA, 22 nt, Human
uuguaccagugaauuuuugcaa

SEQ ID NO: 3580556 - RNA, 21 nt, Human
uuguaccccccaaccccugag

SEQ ID NO: 3580557 - RNA, 16 nt, Human
uuguaccgcaauguga

SEQ ID NO: 3580558 - RNA, 13 nt, Human
uuguaccugguga

SEQ ID NO: 3580559 - RNA, 21 nt, Human
uuguacgacgucagauguuua

SEQ ID NO: 3580560 - RNA, 16 nt, Human
uuguacuaaagccaaa

SEQ ID NO: 3580561 - RNA, 19 nt, Human
uuguacuauuuaacugacu

SEQ ID NO: 3580562 - RNA, 14 nt, Human
uuguacugaauuuu

SEQ ID NO: 3580563 - RNA, 12 nt, Human
uuguacuguaaa

SEQ ID NO: 3580564 - RNA, 24 nt, Human
uuguacuguuuaauguucugugau

SEQ ID NO: 3580565 - RNA, 15 nt, Human
uuguacuuuaaaaau

SEQ ID NO: 3580566 - RNA, 19 nt, Human
uuguacuuuaucaugaaug

SEQ ID NO: 3580567 - RNA, 20 nt, Human
uuguacuuucuguuaaaaug

SEQ ID NO: 3580568 - RNA, 22 nt, Human
uuguagaacucacucugggcug

SEQ ID NO: 3580569 - RNA, 22 nt, Human
uuguagaaggguuauauuuuac

SEQ ID NO: 3580570 - RNA, 17 nt, Human
uuguagaagucacauuc

SEQ ID NO: 3580571 - RNA, 22 nt, Human
uuguagaagucacauuccugaa

SEQ ID NO: 3580572 - RNA, 14 nt, Human
uuguagaauuguua

SEQ ID NO: 3580573 - RNA, 16 nt, Human
uuguagaauuguuaua

SEQ ID NO: 3580574 - RNA, 15 nt, Human
uuguagagccagggu

SEQ ID NO: 3580575 - RNA, 20 nt, Human
uuguagauacaaucagcugc

SEQ ID NO: 3580576 - RNA, 12 nt, Human
uuguagauuuga

SEQ ID NO: 3580577 - RNA, 19 nt, Human
uuguagcagauuguuuccu

SEQ ID NO: 3580578 - RNA, 16 nt, Human
uuuccaguauuuuagu

SEQ ID NO: 3580579 - RNA, 17 nt, Human
uuuccaguuccucuuuu

SEQ ID NO: 3580580 - RNA, 21 nt, Human
uuuccauauccauagugacuu

SEQ ID NO: 3580581 - RNA, 18 nt, Human
uuuccauauggauuuucu

SEQ ID NO: 3580582 - RNA, 17 nt, Human
uuuccauauuuuuacaa

SEQ ID NO: 3580583 - RNA, 14 nt, Human
uuuccaucauaauu

SEQ ID NO: 3580584 - RNA, 16 nt, Human
uuuccaucauaauucu

SEQ ID NO: 3580585 - RNA, 23 nt, Human
uuuccaucauuaaauuuuuccuu

SEQ ID NO: 3580586 - RNA, 12 nt, Human
uuuccaucuuua

SEQ ID NO: 3580587 - RNA, 16 nt, Human
uuuccaugaaaacguu

SEQ ID NO: 3580588 - RNA, 18 nt, Human
uuuccaugaguccccugu

SEQ ID NO: 3580589 - RNA, 17 nt, Human
uuuccauguugcugcca

SEQ ID NO: 3580590 - RNA, 13 nt, Human
uuuccauuuuaua

SEQ ID NO: 3580591 - RNA, 10 nt, Human
uuucccaagc

SEQ ID NO: 3580592 - RNA, 12 nt, Human
uuucccaagcug

SEQ ID NO: 3580593 - RNA, 20 nt, Human
uuucccaaugguguuuuucu

SEQ ID NO: 3580594 - RNA, 15 nt, Human
uuucccaauuaggaa

SEQ ID NO: 3580595 - RNA, 21 nt, Human
uuucccaccccaaccugcucu

SEQ ID NO: 3580596 - RNA, 11 nt, Human
uuucccacccu

SEQ ID NO: 3580597 - RNA, 16 nt, Human
uuucccacuccaagcc

SEQ ID NO: 3580598 - RNA, 12 nt, Human
uuucccacugca

SEQ ID NO: 3580599 - RNA, 22 nt, Human
uuucccacugcacccccuccug

SEQ ID NO: 3580600 - RNA, 19 nt, Human
uuucccacuucccacccug

SEQ ID NO: 3580601 - RNA, 23 nt, Human
uuucccacuucccacccugcccc

SEQ ID NO: 3580602 - RNA, 12 nt, Human
uuucccaucugc

SEQ ID NO: 3580603 - RNA, 22 nt, Human
uuucccaucugcaccccuucuc

SEQ ID NO: 3580604 - RNA, 18 nt, Human
uuucccaugauuucaugu

SEQ ID NO: 3580605 - RNA, 21 nt, Human
uuuccccaaagucuuaaaaua

SEQ ID NO: 3580606 - RNA, 15 nt, Human
uuuccccaacagugu

SEQ ID NO: 3580607 - RNA, 18 nt, Human
uuuccccaacagugugaa

SEQ ID NO: 3580608 - RNA, 21 nt, Human
uuuccccaggggaaaaugaag

SEQ ID NO: 3580609 - RNA, 23 nt, Human
uuuccccauuuagguuucugagu

SEQ ID NO: 3580610 - RNA, 18 nt, Human
uuuccccuaucauuuauu

SEQ ID NO: 3580611 - RNA, 13 nt, Human
uuuccccucccug

SEQ ID NO: 3580612 - RNA, 16 nt, Human
uuuccccucccugggu

SEQ ID NO: 3580613 - RNA, 23 nt, Human
uuuccccuguccugauggucagc

SEQ ID NO: 3580614 - RNA, 14 nt, Human
uuuccccuuuugca

SEQ ID NO: 3580615 - RNA, 18 nt, Human
uuucccguggccccagcc

SEQ ID NO: 3580616 - RNA, 19 nt, Human
uuucccguggccccagccu

SEQ ID NO: 3580617 - RNA, 13 nt, Human
uuucccuaaaaua

SEQ ID NO: 3580618 - RNA, 20 nt, Human
uuucccuaagccaagggccu

SEQ ID NO: 3580619 - RNA, 15 nt, Human
uuucccuacucccca

SEQ ID NO: 3580620 - RNA, 15 nt, Human
uuucccucacccccu

SEQ ID NO: 3580621 - RNA, 19 nt, Human
uuucccuccacuccuuccu

SEQ ID NO: 3580622 - RNA, 23 nt, Human
uuucccucccuuccucuuuccau

SEQ ID NO: 3580623 - RNA, 13 nt, Human
uuucccugaaguu

SEQ ID NO: 3580624 - RNA, 21 nt, Human
uuucccugaaguuauguguau

SEQ ID NO: 3580625 - RNA, 14 nt, Human
uuucccugacuccu

SEQ ID NO: 3580626 - RNA, 22 nt, Human
uuucccugcuuaaugaaaagcu

SEQ ID NO: 3580627 - RNA, 14 nt, Human
uuucccuucaucug

SEQ ID NO: 3580628 - RNA, 12 nt, Human
uuucccuuccag

SEQ ID NO: 3580629 - RNA, 16 nt, Human
uuucccuucccuucca

SEQ ID NO: 3580630 - RNA, 15 nt, Human
uuucccuuccucuuc

SEQ ID NO: 3580631 - RNA, 19 nt, Human
uuucccuuccucuucggcc

SEQ ID NO: 3580632 - RNA, 13 nt, Human
uuucccuuugcca

SEQ ID NO: 3580633 - RNA, 15 nt, Human
uuucccuuugccuuc

SEQ ID NO: 3580634 - RNA, 15 nt, Human
uuuccuaaaugcagu

SEQ ID NO: 3580635 - RNA, 13 nt, Human
uuuccuaacaaaa

SEQ ID NO: 3580636 - RNA, 16 nt, Human
uuuccuaacaaaagau

SEQ ID NO: 3580637 - RNA, 17 nt, Human
uuuccuaaggcugcaag

SEQ ID NO: 3580638 - RNA, 21 nt, Human
uuuccuaauaaaguucuguac

SEQ ID NO: 3580639 - RNA, 24 nt, Human
uuuccuaauaaaguucuguacuca

SEQ ID NO: 3580640 - RNA, 20 nt, Human
uuuccuacuuauaaaguaga

SEQ ID NO: 3580641 - RNA, 23 nt, Human
uuuccuagauggcagucacugaa

SEQ ID NO: 3580642 - RNA, 21 nt, Human
uuuccuaguucuguagaaaug

SEQ ID NO: 3580643 - RNA, 17 nt, Human
uuuccuaucauguuaac

SEQ ID NO: 3580644 - RNA, 15 nt, Human
uuuccucaaauguug

SEQ ID NO: 3580645 - RNA, 19 nt, Human
uuuccucagacucuaagaa

SEQ ID NO: 3580646 - RNA, 19 nt, Human
uuuccucagcuuaucucuu

SEQ ID NO: 3580647 - RNA, 12 nt, Human
uuuccucaucug

SEQ ID NO: 3580648 - RNA, 16 nt, Human
uuuccucaucugucca

SEQ ID NO: 3580649 - RNA, 14 nt, Human
uuuccuccccagca

SEQ ID NO: 3580650 - RNA, 13 nt, Human
uuuccucccucag

SEQ ID NO: 3580651 - RNA, 17 nt, Human
uuuccucccuucugcua

SEQ ID NO: 3580652 - RNA, 19 nt, Human
uuuccucccuucugcuacu

SEQ ID NO: 3580653 - RNA, 22 nt, Human
uuuccuccgucaccucagagac

SEQ ID NO: 3580654 - RNA, 14 nt, Human
uuuccuccuuccau

SEQ ID NO: 3580655 - RNA, 15 nt, Human
uuuccuccuuuauca

SEQ ID NO: 3580656 - RNA, 12 nt, Human
uuuccuccuuuc

SEQ ID NO: 3580657 - RNA, 22 nt, Human
uuuccucgcagccucucagugc

SEQ ID NO: 3580658 - RNA, 12 nt, Human
uuuccucuccac

SEQ ID NO: 3580659 - RNA, 17 nt, Human
uuuccucucuauauuuc

SEQ ID NO: 3580660 - RNA, 17 nt, Human
uuuccucugcuuugaaa

SEQ ID NO: 3580661 - RNA, 17 nt, Human
uuuccucuuagaagaau

SEQ ID NO: 3580662 - RNA, 17 nt, Human
uuuccucuuccugccua

SEQ ID NO: 3580663 - RNA, 21 nt, Human
uuuccucuuuggucuacacug

SEQ ID NO: 3580664 - RNA, 15 nt, Human
uuuccugaaaucaag

SEQ ID NO: 3580665 - RNA, 23 nt, Human
uuuccugacagaaggacucaggu

SEQ ID NO: 3580666 - RNA, 13 nt, Human
uuuccugagcuug

SEQ ID NO: 3580667 - RNA, 18 nt, Human
uuuccugagcuuggccag

SEQ ID NO: 3580668 - RNA, 21 nt, Human
uuuccugauaaagcacagcug

SEQ ID NO: 3580669 - RNA, 19 nt, Human
uuuccuggcacugcuucca

SEQ ID NO: 3580670 - RNA, 16 nt, Human
uuuccuggcuacucca

SEQ ID NO: 3580671 - RNA, 16 nt, Human
uuuccuggugccaauu

SEQ ID NO: 3580672 - RNA, 19 nt, Human
uuuccuggugccaauuuca

SEQ ID NO: 3580673 - RNA, 23 nt, Human
uuuccuguaaaaaaaaaaaaguu

SEQ ID NO: 3580674 - RNA, 21 nt, Human
uuuccuguccucuuucagcuc

SEQ ID NO: 3580675 - RNA, 13 nt, Human
uuuccuguucagc

SEQ ID NO: 3580676 - RNA, 16 nt, Human
uuuccuguucagcauu

SEQ ID NO: 3580677 - RNA, 23 nt, Human
uuuccuuaaacuguguggacugu

SEQ ID NO: 3580678 - RNA, 14 nt, Human
uuuccuuauuugcu

SEQ ID NO: 3580679 - RNA, 21 nt, Human
uuuccuucagugccuuaugga

SEQ ID NO: 3580680 - RNA, 21 nt, Human
uuuccuucauucaacccaccu

SEQ ID NO: 3580681 - RNA, 12 nt, Human
uuuccuuccaau

SEQ ID NO: 3580682 - RNA, 21 nt, Human
uuuccuuccaaugucuggaga

SEQ ID NO: 3580683 - RNA, 11 nt, Human
uuuccuucccu

SEQ ID NO: 3580684 - RNA, 15 nt, Human
uuuccuucucaucug

SEQ ID NO: 3580685 - RNA, 14 nt, Human
uuuccuucugaagu

SEQ ID NO: 3580686 - RNA, 16 nt, Human
uuuccuugcauacaaa

SEQ ID NO: 3580687 - RNA, 23 nt, Human
uuuccuuggcucccauucacucu

SEQ ID NO: 3580688 - RNA, 19 nt, Human
uuuccuuggggcaggcagu

SEQ ID NO: 3580689 - RNA, 15 nt, Human
uuuccuugugcaaaa

SEQ ID NO: 3580690 - RNA, 17 nt, Human
uuuccuuuaugugaauu

SEQ ID NO: 3580691 - RNA, 14 nt, Human
uuuccuuucucacc

SEQ ID NO: 3580692 - RNA, 21 nt, Human
uuuccuuugugguuuuaugga

SEQ ID NO: 3580693 - RNA, 19 nt, Human
uuuccuuuuuaauaugcuu

SEQ ID NO: 3580694 - RNA, 17 nt, Human
uuuccuuuuucugauua

SEQ ID NO: 3580695 - RNA, 15 nt, Human
uuuccuuuuuuaaaa

SEQ ID NO: 3580696 - RNA, 22 nt, Human
uuuccuuuuuucccauaagaca

SEQ ID NO: 3580697 - RNA, 19 nt, Human
uuucgagaagcugcucugg

SEQ ID NO: 3580698 - RNA, 22 nt, Human
uuucgauucguuaagagagcaa

SEQ ID NO: 3580699 - RNA, 22 nt, Human
uuucgcaggauucuuccucccu

SEQ ID NO: 3580700 - RNA, 16 nt, Human
uuucgccuuuccucuc

SEQ ID NO: 3580701 - RNA, 23 nt, Human
uuucguccacagcuuccuguccc

SEQ ID NO: 3580702 - RNA, 21 nt, Human
uuucgucuguuuauaaacauu

SEQ ID NO: 3580703 - RNA, 13 nt, Human
uuucguuaacauu

SEQ ID NO: 3580704 - RNA, 15 nt, Human
uuucguuaacauuga

SEQ ID NO: 3580705 - RNA, 14 nt, Human
uuucuaaaaaacag

SEQ ID NO: 3580706 - RNA, 14 nt, Human
uuucuaaaaaguca

SEQ ID NO: 3580707 - RNA, 16 nt, Human
uuucuaaaagcuuuca

SEQ ID NO: 3580708 - RNA, 12 nt, Human
uuucuaaaaucu

SEQ ID NO: 3580709 - RNA, 21 nt, Human
uuucuaaaaucuuauaguucu

SEQ ID NO: 3580710 - RNA, 16 nt, Human
uuucuaaacagagaug

SEQ ID NO: 3580711 - RNA, 14 nt, Human
uuucuaaacuggag

SEQ ID NO: 3580712 - RNA, 17 nt, Human
uuucuaaacuggagacu

SEQ ID NO: 3580713 - RNA, 14 nt, Human
uuucuaaagcugcc

SEQ ID NO: 3580714 - RNA, 14 nt, Human
uuucuaaaggaguu

SEQ ID NO: 3580715 - RNA, 16 nt, Human
uuucuaaaggaguuua

SEQ ID NO: 3580716 - RNA, 18 nt, Human
uuucuaaaggcuaccuuu

SEQ ID NO: 3580717 - RNA, 20 nt, Human
uuucuaaaggcuaccuuugu

SEQ ID NO: 3580718 - RNA, 14 nt, Human
uuucuaaaguaaaa

SEQ ID NO: 3580719 - RNA, 22 nt, Human
uuucuaaccuugaaugcugcca

SEQ ID NO: 3580720 - RNA, 22 nt, Human
uuucuaacuacaaagguuuaaa

SEQ ID NO: 3580721 - RNA, 18 nt, Human
uuucuaacucugauguaa

SEQ ID NO: 3580722 - RNA, 22 nt, Human
uuucuaacucugauguaaauga

SEQ ID NO: 3580723 - RNA, 17 nt, Human
uuugaaagucuguccuu

SEQ ID NO: 3580724 - RNA, 19 nt, Human
uuugaaagugaauaaacuu

SEQ ID NO: 3580725 - RNA, 14 nt, Human
uuugaaauaagcua

SEQ ID NO: 3580726 - RNA, 18 nt, Human
uuugaaauaccucauguu

SEQ ID NO: 3580727 - RNA, 13 nt, Human
uuugaaauauaug

SEQ ID NO: 3580728 - RNA, 21 nt, Human
uuugaaauauauggucuaaug

SEQ ID NO: 3580729 - RNA, 15 nt, Human
uuugaaaucagcaua

SEQ ID NO: 3580730 - RNA, 21 nt, Human
uuugaaaucaguaaacacugu

SEQ ID NO: 3580731 - RNA, 17 nt, Human
uuugaaaugaaauuuaa

SEQ ID NO: 3580732 - RNA, 21 nt, Human
uuugaaaugaggucuguuuaa

SEQ ID NO: 3580733 - RNA, 23 nt, Human
uuugaaaugugguuuuccugaaa

SEQ ID NO: 3580734 - RNA, 16 nt, Human
uuugaaauguguuucu

SEQ ID NO: 3580735 - RNA, 15 nt, Human
uuugaaauuauguga

SEQ ID NO: 3580736 - RNA, 17 nt, Human
uuugaaauuaugugaca

SEQ ID NO: 3580737 - RNA, 13 nt, Human
uuugaaauucuga

SEQ ID NO: 3580738 - RNA, 16 nt, Human
uuugaaauucugaauu

SEQ ID NO: 3580739 - RNA, 18 nt, Human
uuugaaauucugaauuug

SEQ ID NO: 3580740 - RNA, 21 nt, Human
uuugaaauucugaauuugcaa

SEQ ID NO: 3580741 - RNA, 21 nt, Human
uuugaaauugaaccuuugugc

SEQ ID NO: 3580742 - RNA, 21 nt, Human
uuugaaauuguauuacaaauc

SEQ ID NO: 3580743 - RNA, 21 nt, Human
uuugaacaaugaaguugaaaa

SEQ ID NO: 3580744 - RNA, 20 nt, Human
uuugaacacgaaagaaaugu

SEQ ID NO: 3580745 - RNA, 12 nt, Human
uuugaacacugg

SEQ ID NO: 3580746 - RNA, 21 nt, Human
uuugaacuaagaaacuuuugu

SEQ ID NO: 3580747 - RNA, 17 nt, Human
uuugaagaacaugugag

SEQ ID NO: 3580748 - RNA, 17 nt, Human
uuugaagacuucaaaau

SEQ ID NO: 3580749 - RNA, 16 nt, Human
uuugaagcuaauuauu

SEQ ID NO: 3580750 - RNA, 18 nt, Human
uuugaagcuacugugugu

SEQ ID NO: 3580751 - RNA, 11 nt, Human
uuugaagcuga

SEQ ID NO: 3580752 - RNA, 13 nt, Human
uuugaaggaaaca

SEQ ID NO: 3580753 - RNA, 20 nt, Human
uuugaaggaaacaguuaaua

SEQ ID NO: 3580754 - RNA, 12 nt, Human
uuugaaggcaaa

SEQ ID NO: 3580755 - RNA, 13 nt, Human
uuugaaggcaaaa

SEQ ID NO: 3580756 - RNA, 17 nt, Human
uuugaagguuuuaagug

SEQ ID NO: 3580757 - RNA, 16 nt, Human
uuugaaguacaauugu

SEQ ID NO: 3580758 - RNA, 16 nt, Human
uuugaagucuuguaua

SEQ ID NO: 3580759 - RNA, 15 nt, Human
uuugaagugcuguuu

SEQ ID NO: 3580760 - RNA, 16 nt, Human
uuugaaguuagcuuua

SEQ ID NO: 3580761 - RNA, 18 nt, Human
uuugaauaaagaauacuu

SEQ ID NO: 3580762 - RNA, 20 nt, Human
uuugaauaaagaauacuuga

SEQ ID NO: 3580763 - RNA, 22 nt, Human
uuugaauaccauuaaaacugcu

SEQ ID NO: 3580764 - RNA, 14 nt, Human
uuugaauauggaca

SEQ ID NO: 3580765 - RNA, 14 nt, Human
uuugaauauguagu

SEQ ID NO: 3580766 - RNA, 18 nt, Human
uuugaaucacaugaauua

SEQ ID NO: 3580767 - RNA, 17 nt, Human
uuugaauccaugcuugg

SEQ ID NO: 3580768 - RNA, 20 nt, Human
uuugaaucuauuuaucuuca

SEQ ID NO: 3580769 - RNA, 20 nt, Human
uuugaaucucauaauuuaua

SEQ ID NO: 3580770 - RNA, 22 nt, Human
uuugaaucucauaauuuauaca

SEQ ID NO: 3580771 - RNA, 13 nt, Human
uuugaaucuuuaa

SEQ ID NO: 3580772 - RNA, 15 nt, Human
uuugaaucuuuaauu

SEQ ID NO: 3580773 - RNA, 15 nt, Human
uuugaaugaaaaauu

SEQ ID NO: 3580774 - RNA, 22 nt, Human
uuugaaugaaaaauuuaagcau

SEQ ID NO: 3580775 - RNA, 24 nt, Human
uuugaaugaaaaauuuaagcauug

SEQ ID NO: 3580776 - RNA, 17 nt, Human
uuugaaugauuuuucuu

SEQ ID NO: 3580777 - RNA, 22 nt, Human
uuugaaugauuuuucuuuacaa

SEQ ID NO: 3580778 - RNA, 13 nt, Human
uuugaaugcauuu

SEQ ID NO: 3580779 - RNA, 14 nt, Human
uuugaaugcauuuu

SEQ ID NO: 3580780 - RNA, 16 nt, Human
uuugaaugcauuuugu

SEQ ID NO: 3580781 - RNA, 17 nt, Human
uuugaauguaugcuuca

SEQ ID NO: 3580782 - RNA, 16 nt, Human
uuugaauguuaauuuu

SEQ ID NO: 3580783 - RNA, 18 nt, Human
uuugaauuguuuucuuua

SEQ ID NO: 3580784 - RNA, 20 nt, Human
uuugaauuuucauuuuacag

SEQ ID NO: 3580785 - RNA, 12 nt, Human
uuugacacugaa

SEQ ID NO: 3580786 - RNA, 19 nt, Human
uuugacacugaaaguuuug

SEQ ID NO: 3580787 - RNA, 21 nt, Human
uuugacacuuauagauugaaa

SEQ ID NO: 3580788 - RNA, 21 nt, Human
uuugacagaauauguuucaaa

SEQ ID NO: 3580789 - RNA, 22 nt, Human
uuugacagaauauguuucaaac

SEQ ID NO: 3580790 - RNA, 18 nt, Human
uuugacaguguugaaaau

SEQ ID NO: 3580791 - RNA, 19 nt, Human
uuugacaguguugaaaaug

SEQ ID NO: 3580792 - RNA, 13 nt, Human
uuugacaugugga

SEQ ID NO: 3580793 - RNA, 17 nt, Human
uuugaccuccucccugu

SEQ ID NO: 3580794 - RNA, 12 nt, Human
uuugaccucugc

SEQ ID NO: 3580795 - RNA, 13 nt, Human
uuugaccuuuuau

SEQ ID NO: 3580796 - RNA, 13 nt, Human
uuugacgccaucc

SEQ ID NO: 3580797 - RNA, 14 nt, Human
uuugacgccauccc

SEQ ID NO: 3580798 - RNA, 16 nt, Human
uuugacgccaucccag

SEQ ID NO: 3580799 - RNA, 14 nt, Human
uuugacuaauuuua

SEQ ID NO: 3580800 - RNA, 20 nt, Human
uuugacuguuuuuacccaua

SEQ ID NO: 3580801 - RNA, 14 nt, Human
uuugacuuaaugug

SEQ ID NO: 3580802 - RNA, 17 nt, Human
uuugacuugcaugaaga

SEQ ID NO: 3580803 - RNA, 13 nt, Human
uuugacuuuaauu

SEQ ID NO: 3580804 - RNA, 15 nt, Human
uuugacuuucuucug

SEQ ID NO: 3580805 - RNA, 12 nt, Human
uuugacuuuucu

SEQ ID NO: 3580806 - RNA, 15 nt, Human
uuugacuuuucugua

SEQ ID NO: 3580807 - RNA, 16 nt, Human
uuugagaaauuaagua

SEQ ID NO: 3580808 - RNA, 13 nt, Human
uuugagacagagu

SEQ ID NO: 3580809 - RNA, 10 nt, Human
uuugagacgg

SEQ ID NO: 3580810 - RNA, 18 nt, Human
uuugagagagcagccagg

SEQ ID NO: 3580811 - RNA, 22 nt, Human
uuugagauauuaaugcccagac

SEQ ID NO: 3580812 - RNA, 16 nt, Human
uuugagaucagccugg

SEQ ID NO: 3580813 - RNA, 17 nt, Human
uuugagaucagccuggg

SEQ ID NO: 3580814 - RNA, 14 nt, Human
uuugagaucuaaaa

SEQ ID NO: 3580815 - RNA, 18 nt, Human
uuugagauuaagaaugcc

SEQ ID NO: 3580816 - RNA, 15 nt, Human
uuugagcagggcuca

SEQ ID NO: 3580817 - RNA, 16 nt, Human
uuugagcauggguuca

SEQ ID NO: 3580818 - RNA, 15 nt, Human
uuugagcccuuguuu

SEQ ID NO: 3580819 - RNA, 16 nt, Human
uuugagccugggaaau

SEQ ID NO: 3580820 - RNA, 18 nt, Human
uuugagcuacuggauucu

SEQ ID NO: 3580821 - RNA, 14 nt, Human
uuugagcucagccc

SEQ ID NO: 3580822 - RNA, 10 nt, Human
uuugagcucc

SEQ ID NO: 3580823 - RNA, 20 nt, Human
uuugagcucugcagcccagg

SEQ ID NO: 3580824 - RNA, 19 nt, Human
uuugagcugaaaugcugca

SEQ ID NO: 3580825 - RNA, 21 nt, Human
uuugagcugaaaugcugcauu

SEQ ID NO: 3580826 - RNA, 20 nt, Human
uuugaggagcagcuucaguu

SEQ ID NO: 3580827 - RNA, 17 nt, Human
uuugaggagcauguuuu

SEQ ID NO: 3580828 - RNA, 15 nt, Human
uuugaggagugguuu

SEQ ID NO: 3580829 - RNA, 20 nt, Human
uuugaggauauauuuucacu

SEQ ID NO: 3580830 - RNA, 22 nt, Human
uuugaggauauauuuucacuuu

SEQ ID NO: 3580831 - RNA, 14 nt, Human
uuugaggcaaaaga

SEQ ID NO: 3580832 - RNA, 20 nt, Human
uuugaggcucaccagaauua

SEQ ID NO: 3580833 - RNA, 18 nt, Human
uuugagggacugccucug

SEQ ID NO: 3580834 - RNA, 21 nt, Human
uuugagggacugccucugcca

SEQ ID NO: 3580835 - RNA, 16 nt, Human
uuugaggggaaaacac

SEQ ID NO: 3580836 - RNA, 23 nt, Human
uuugaggucaaguaagaagacau

SEQ ID NO: 3580837 - RNA, 22 nt, Human
uuugaggucuguucuuuccaaa

SEQ ID NO: 3580838 - RNA, 22 nt, Human
uuugagucccuuccaggccauc

SEQ ID NO: 3580839 - RNA, 14 nt, Human
uuugagugcucuga

SEQ ID NO: 3580840 - RNA, 21 nt, Human
uuugaguggaugauguuucgu

SEQ ID NO: 3580841 - RNA, 19 nt, Human
uuugaguugauugagaaga

SEQ ID NO: 3580842 - RNA, 19 nt, Human
uuugauaaaguaguaaaaa

SEQ ID NO: 3580843 - RNA, 15 nt, Human
uuugauaaaguuucu

SEQ ID NO: 3580844 - RNA, 12 nt, Human
uuugauaauguu

SEQ ID NO: 3580845 - RNA, 14 nt, Human
uuugauaauguuaa

SEQ ID NO: 3580846 - RNA, 13 nt, Human
uuugauacauaau

SEQ ID NO: 3580847 - RNA, 19 nt, Human
uuugauacauaugugaaua

SEQ ID NO: 3580848 - RNA, 15 nt, Human
uuugauaccccuggg

SEQ ID NO: 3580849 - RNA, 18 nt, Human
uuugauacuaagcauuga

SEQ ID NO: 3580850 - RNA, 15 nt, Human
uuugauacuuauauu

SEQ ID NO: 3580851 - RNA, 19 nt, Human
uuugauagggaacugggga

SEQ ID NO: 3580852 - RNA, 18 nt, Human
uuugauaguauugugcau

SEQ ID NO: 3580853 - RNA, 16 nt, Human
uuugauauaccaaauu

SEQ ID NO: 3580854 - RNA, 22 nt, Human
uuugauauaccaaauuaaaaaa

SEQ ID NO: 3580855 - RNA, 17 nt, Human
uuugauaugugaacagu

SEQ ID NO: 3580856 - RNA, 19 nt, Human
uuugauauuaaaggaguua

SEQ ID NO: 3580857 - RNA, 18 nt, Human
uuugaucagguggggagu

SEQ ID NO: 3580858 - RNA, 18 nt, Human
uuugaucucacauuuuua

SEQ ID NO: 3580859 - RNA, 23 nt, Human
uuugaugacuggcauuuuauaga

SEQ ID NO: 3580860 - RNA, 18 nt, Human
uuugaugaggcccuccac

SEQ ID NO: 3580861 - RNA, 21 nt, Human
uuugaugagguauuuuuuccu

SEQ ID NO: 3580862 - RNA, 20 nt, Human
uuugaugcagcauuugauaa

SEQ ID NO: 3580863 - RNA, 21 nt, Human
uuugaugcagcauuugauaau

SEQ ID NO: 3580864 - RNA, 17 nt, Human
uuugaugcaugucuuuu

SEQ ID NO: 3580865 - RNA, 16 nt, Human
uuugaugccaagaaag

SEQ ID NO: 3580866 - RNA, 23 nt, Human
uuugaugcuacaggauuugaaau

SEQ ID NO: 3580867 - RNA, 19 nt, Human
uuugaugcuggagagguua

SEQ ID NO: 3580868 - RNA, 22 nt, Human
ucagagaugcaccaccaagcca

SEQ ID NO: 3580869 - RNA, 19 nt, Human
ucagagauguccauuuuua

SEQ ID NO: 3580870 - RNA, 17 nt, Human
ucagagaugugcaccca

SEQ ID NO: 3580871 - RNA, 17 nt, Human
ucagagauuuauauaaa

SEQ ID NO: 3580872 - RNA, 18 nt, Human
ucagagauuuauauaaau

SEQ ID NO: 3580873 - RNA, 17 nt, Human
ucagagcagcagugaaa

SEQ ID NO: 3580874 - RNA, 21 nt, Human
ucagagcagcagugaaaacaa

SEQ ID NO: 3580875 - RNA, 13 nt, Human
ucagagcaggacc

SEQ ID NO: 3580876 - RNA, 21 nt, Human
ucagagcaggaccucccuucc

SEQ ID NO: 3580877 - RNA, 16 nt, Human
ucagagcgcacaggga

SEQ ID NO: 3580878 - RNA, 21 nt, Human
ucagagcuaagggugggugcu

SEQ ID NO: 3580879 - RNA, 16 nt, Human
ucagagcuacuugggc

SEQ ID NO: 3580880 - RNA, 12 nt, Human
ucagagcugccc

SEQ ID NO: 3580881 - RNA, 13 nt, Human
ucagagcugcccu

SEQ ID NO: 3580882 - RNA, 16 nt, Human
ucagagcugcccucuc

SEQ ID NO: 3580883 - RNA, 17 nt, Human
ucagagcugcccucucc

SEQ ID NO: 3580884 - RNA, 23 nt, Human
ucagaggacaccuguacuggaga

SEQ ID NO: 3580885 - RNA, 22 nt, Human
ucagaggagagauagccugugg

SEQ ID NO: 3580886 - RNA, 22 nt, Human
ucagaggcccucgcugccagcu

SEQ ID NO: 3580887 - RNA, 14 nt, Human
ucagagguaucuua

SEQ ID NO: 3580888 - RNA, 23 nt, Human
ucagaggugaaagcuauaucaau

SEQ ID NO: 3580889 - RNA, 17 nt, Human
ucagagguggcucugga

SEQ ID NO: 3580890 - RNA, 19 nt, Human
ucagaguaagcugcuuuug

SEQ ID NO: 3580891 - RNA, 13 nt, Human
ucagaguagaaau

SEQ ID NO: 3580892 - RNA, 15 nt, Human
ucagaguauggagcu

SEQ ID NO: 3580893 - RNA, 16 nt, Human
ucagagucagccagga

SEQ ID NO: 3580894 - RNA, 16 nt, Human
ucagaguccaggcccc

SEQ ID NO: 3580895 - RNA, 19 nt, Human
ucagagugacauccaggag

SEQ ID NO: 3580896 - RNA, 21 nt, Human
ucagagugacauccaggagga

SEQ ID NO: 3580897 - RNA, 17 nt, Human
ucagaguggaaugcuuc

SEQ ID NO: 3580898 - RNA, 22 nt, Human
ucagaguucuauacuguaaagc

SEQ ID NO: 3580899 - RNA, 14 nt, Human
ucagaguuuucugg

SEQ ID NO: 3580900 - RNA, 15 nt, Human
ucagaguuuucuggg

SEQ ID NO: 3580901 - RNA, 15 nt, Human
ucagauaacuguuau

SEQ ID NO: 3580902 - RNA, 22 nt, Human
ucagauaagguaaaaugccaug

SEQ ID NO: 3580903 - RNA, 15 nt, Human
ucagauacaucacug

SEQ ID NO: 3580904 - RNA, 20 nt, Human
ucagauacuggauuguacuu

SEQ ID NO: 3580905 - RNA, 17 nt, Human
ucagauauaaaagacug

SEQ ID NO: 3580906 - RNA, 18 nt, Human
ucagauauauuuuucaca

SEQ ID NO: 3580907 - RNA, 23 nt, Human
ucagauauauuuuucacaguuuu

SEQ ID NO: 3580908 - RNA, 22 nt, Human
ucagauaucuuggacaaaucac

SEQ ID NO: 3580909 - RNA, 15 nt, Human
ucagauaugauucaa

SEQ ID NO: 3580910 - RNA, 18 nt, Human
ucagauaugauucaaaug

SEQ ID NO: 3580911 - RNA, 18 nt, Human
ucagauauucugcucuau

SEQ ID NO: 3580912 - RNA, 14 nt, Human
ucagauauuugcac

SEQ ID NO: 3580913 - RNA, 15 nt, Human
ucagauauuugcacc

SEQ ID NO: 3580914 - RNA, 16 nt, Human
ucagaucacuacugca

SEQ ID NO: 3580915 - RNA, 17 nt, Human
ucagaucacuacugcag

SEQ ID NO: 3580916 - RNA, 18 nt, Human
ucagaucacuacugcagu

SEQ ID NO: 3580917 - RNA, 23 nt, Human
ucagaucaguguaccauuugccu

SEQ ID NO: 3580918 - RNA, 13 nt, Human
ucagaucauggca

SEQ ID NO: 3580919 - RNA, 14 nt, Human
ucagauccagggac

SEQ ID NO: 3580920 - RNA, 18 nt, Human
ucagauccuuguuucaaa

SEQ ID NO: 3580921 - RNA, 23 nt, Human
ucagaucugacaugauuccuucc

SEQ ID NO: 3580922 - RNA, 15 nt, Human
ucagaucugccuaag

SEQ ID NO: 3580923 - RNA, 18 nt, Human
ucagaucugccuaaggac

SEQ ID NO: 3580924 - RNA, 14 nt, Human
ucagaucugucuga

SEQ ID NO: 3580925 - RNA, 19 nt, Human
ucagaucuuaauauaaauu

SEQ ID NO: 3580926 - RNA, 21 nt, Human
ucagaucuuaauauaaauuca

SEQ ID NO: 3580927 - RNA, 24 nt, Human
ucagaucuuaauauaaauucacuu

SEQ ID NO: 3580928 - RNA, 16 nt, Human
ucagaucuuucuccuu

SEQ ID NO: 3580929 - RNA, 14 nt, Human
ucagaugagaacaa

SEQ ID NO: 3580930 - RNA, 18 nt, Human
ucagaugauuuccccccu

SEQ ID NO: 3580931 - RNA, 21 nt, Human
ucagaugauuuccccccuccg

SEQ ID NO: 3580932 - RNA, 14 nt, Human
ucagaugcccagag

SEQ ID NO: 3580933 - RNA, 21 nt, Human
ucagaugcccagagggcccag

SEQ ID NO: 3580934 - RNA, 22 nt, Human
ucagaugcccagagggcccagg

SEQ ID NO: 3580935 - RNA, 14 nt, Human
ucagaugcuccaag

SEQ ID NO: 3580936 - RNA, 16 nt, Human
ucagaugcuccaagau

SEQ ID NO: 3580937 - RNA, 18 nt, Human
ucagaugcuccaagauuc

SEQ ID NO: 3580938 - RNA, 19 nt, Human
ucagaugcuccaagauucu

SEQ ID NO: 3580939 - RNA, 20 nt, Human
ucagaugcuccaagauucua

SEQ ID NO: 3580940 - RNA, 21 nt, Human
ucagaugcugugcaaauguua

SEQ ID NO: 3580941 - RNA, 22 nt, Human
ucagaugcuugcggcaaaagga

SEQ ID NO: 3580942 - RNA, 12 nt, Human
ucagauggaaaa

SEQ ID NO: 3580943 - RNA, 20 nt, Human
ucagauggaaaauucauuuu

SEQ ID NO: 3580944 - RNA, 16 nt, Human
ucagauggagcaugaa

SEQ ID NO: 3580945 - RNA, 18 nt, Human
ucagauggcagcuuuuaa

SEQ ID NO: 3580946 - RNA, 20 nt, Human
ucagaugggaggaaagagag

SEQ ID NO: 3580947 - RNA, 16 nt, Human
ucagaugucuucugcc

SEQ ID NO: 3580948 - RNA, 16 nt, Human
ucagauguggagccag

SEQ ID NO: 3580949 - RNA, 18 nt, Human
ucagauguggagccaggc

SEQ ID NO: 3580950 - RNA, 16 nt, Human
ucagauguuaaaauaa

SEQ ID NO: 3580951 - RNA, 17 nt, Human
ucagauguuuaaaacac

SEQ ID NO: 3580952 - RNA, 17 nt, Human
ucagauguuuuggucaa

SEQ ID NO: 3580953 - RNA, 14 nt, Human
ucagauuccuuccc

SEQ ID NO: 3580954 - RNA, 15 nt, Human
ucagauuccuuccca

SEQ ID NO: 3580955 - RNA, 16 nt, Human
ucagauuccuucccau

SEQ ID NO: 3580956 - RNA, 18 nt, Human
ucagauugcaugugacuc

SEQ ID NO: 3580957 - RNA, 19 nt, Human
ucagauugcaugugacucu

SEQ ID NO: 3580958 - RNA, 21 nt, Human
ucagauugcaugugacucuga

SEQ ID NO: 3580959 - RNA, 14 nt, Human
ucagauugcuuuug

SEQ ID NO: 3580960 - RNA, 18 nt, Human
ucagauuucucuuugaaa

SEQ ID NO: 3580961 - RNA, 16 nt, Human
ucagauuucugaggaa

SEQ ID NO: 3580962 - RNA, 16 nt, Human
ucagauuugcacaaaa

SEQ ID NO: 3580963 - RNA, 17 nt, Human
ucagauuugccuuauug

SEQ ID NO: 3580964 - RNA, 19 nt, Human
ucagauuuuauuauguaaa

SEQ ID NO: 3580965 - RNA, 20 nt, Human
ucagauuuuauuauguaaau

SEQ ID NO: 3580966 - RNA, 15 nt, Human
ucagauuuuccugug

SEQ ID NO: 3580967 - RNA, 16 nt, Human
ucagcaaaaagcaaaa

SEQ ID NO: 3580968 - RNA, 19 nt, Human
ucagcaaaaauauuuuaug

SEQ ID NO: 3580969 - RNA, 13 nt, Human
ucagcaaagaaaa

SEQ ID NO: 3580970 - RNA, 21 nt, Human
ucagcaaccuuucaccuuugu

SEQ ID NO: 3580971 - RNA, 16 nt, Human
ucagcaacucgcuuua

SEQ ID NO: 3580972 - RNA, 14 nt, Human
ucagcaagagagaa

SEQ ID NO: 3580973 - RNA, 21 nt, Human
ucagcaagcccuacagagcug

SEQ ID NO: 3580974 - RNA, 12 nt, Human
ucagcaaggcca

SEQ ID NO: 3580975 - RNA, 14 nt, Human
ucagcaaggccacc

SEQ ID NO: 3580976 - RNA, 20 nt, Human
ucagcaaggcgcuaacuugc

SEQ ID NO: 3580977 - RNA, 24 nt, Human
ucagcaaggcgcuaacuugcuuaa

SEQ ID NO: 3580978 - RNA, 19 nt, Human
ucagcaauauuuaaggaga

SEQ ID NO: 3580979 - RNA, 18 nt, Human
ucagcacagauaaaaagu

SEQ ID NO: 3580980 - RNA, 22 nt, Human
ucagcacagauaaaaaguggaa

SEQ ID NO: 3580981 - RNA, 21 nt, Human
ucagcacauaggguucccacg

SEQ ID NO: 3580982 - RNA, 12 nt, Human
ucagcaccaccc

SEQ ID NO: 3580983 - RNA, 13 nt, Human
ucagcaccacccu

SEQ ID NO: 3580984 - RNA, 15 nt, Human
ucagcaccacccuag

SEQ ID NO: 3580985 - RNA, 17 nt, Human
ucagcacccccuucucu

SEQ ID NO: 3580986 - RNA, 14 nt, Human
ucagcaccccuucc

SEQ ID NO: 3580987 - RNA, 17 nt, Human
ucagcaccccuuccaug

SEQ ID NO: 3580988 - RNA, 22 nt, Human
ucagcaccuacaguguacaguc

SEQ ID NO: 3580989 - RNA, 16 nt, Human
ucagcacgauuucugu

SEQ ID NO: 3580990 - RNA, 17 nt, Human
ucagcacgauuucuguu

SEQ ID NO: 3580991 - RNA, 13 nt, Human
ucagcacugaaaa

SEQ ID NO: 3580992 - RNA, 15 nt, Human
ucagcacugaaaaua

SEQ ID NO: 3580993 - RNA, 22 nt, Human
ucagcacugccugcucccaucc

SEQ ID NO: 3580994 - RNA, 12 nt, Human
ucagcacugucc

SEQ ID NO: 3580995 - RNA, 16 nt, Human
ucagcacuuggcccuu

SEQ ID NO: 3580996 - RNA, 15 nt, Human
ucagcacuugucuca

SEQ ID NO: 3580997 - RNA, 18 nt, Human
ucagcacuugucucauuu

SEQ ID NO: 3580998 - RNA, 23 nt, Human
ucagcacuugucucauuuuaaug

SEQ ID NO: 3580999 - RNA, 12 nt, Human
ucagcagagugc

SEQ ID NO: 3581000 - RNA, 12 nt, Human
ucagcagcccuc

SEQ ID NO: 3581001 - RNA, 14 nt, Human
ucagcagcccuccu

SEQ ID NO: 3581002 - RNA, 15 nt, Human
ucagcagcccuccuc

SEQ ID NO: 3581003 - RNA, 16 nt, Human
ucagcagcccuccuca

SEQ ID NO: 3581004 - RNA, 23 nt, Human
ucagcagccgccuuaagcugauc

SEQ ID NO: 3581005 - RNA, 20 nt, Human
ucagcagcgaccaccccugc

SEQ ID NO: 3581006 - RNA, 22 nt, Human
ucagcagcgaccaccccugccu

SEQ ID NO: 3581007 - RNA, 17 nt, Human
ucagcaggaagcaacga

SEQ ID NO: 3581008 - RNA, 13 nt, Human
ucagcaggcagcc

SEQ ID NO: 3581009 - RNA, 17 nt, Human
ucagcagggacuguaaa

SEQ ID NO: 3581010 - RNA, 22 nt, Human
ucagcagggacuguaaacacag

SEQ ID NO: 3581011 - RNA, 20 nt, Human
ucagcaguaccuauaaagua

SEQ ID NO: 3581012 - RNA, 22 nt, Human
ucagcuucugcugggcuggggc

SEQ ID NO: 3581013 - RNA, 23 nt, Human
ucagcuucugcugggcuggggcc

SEQ ID NO: 3581014 - RNA, 22 nt, Human
ucagcuuguaaauagcucaggu

SEQ ID NO: 3581015 - RNA, 15 nt, Human
ucagcuuucagggcc

SEQ ID NO: 3581016 - RNA, 22 nt, Human
ucagcuuugccuuccacgcugu

SEQ ID NO: 3581017 - RNA, 16 nt, Human
ucaggaaaagccucug

SEQ ID NO: 3581018 - RNA, 18 nt, Human
ucaggaaauauauaugug

SEQ ID NO: 3581019 - RNA, 13 nt, Human
ucaggaacacucu

SEQ ID NO: 3581020 - RNA, 20 nt, Human
ucaggaaccucgaguacugu

SEQ ID NO: 3581021 - RNA, 21 nt, Human
ucaggaaccucgaguacugug

SEQ ID NO: 3581022 - RNA, 22 nt, Human
ucaggaaccucgaguacugugg

SEQ ID NO: 3581023 - RNA, 13 nt, Human
ucaggaaccugga

SEQ ID NO: 3581024 - RNA, 16 nt, Human
ucaggaaccuggacca

SEQ ID NO: 3581025 - RNA, 14 nt, Human
ucaggaagcucagg

SEQ ID NO: 3581026 - RNA, 17 nt, Human
ucaggaagcucagggcc

SEQ ID NO: 3581027 - RNA, 16 nt, Human
ucaggaaggaugagca

SEQ ID NO: 3581028 - RNA, 17 nt, Human
ucaggaaggaugagcau

SEQ ID NO: 3581029 - RNA, 20 nt, Human
ucaggaaggaugagcauuua

SEQ ID NO: 3581030 - RNA, 19 nt, Human
ucaggaaucggaauccugu

SEQ ID NO: 3581031 - RNA, 17 nt, Human
ucaggacacaggccugu

SEQ ID NO: 3581032 - RNA, 12 nt, Human
ucaggacacuaa

SEQ ID NO: 3581033 - RNA, 13 nt, Human
ucaggaccaggca

SEQ ID NO: 3581034 - RNA, 19 nt, Human
ucaggacccagaggaaggg

SEQ ID NO: 3581035 - RNA, 22 nt, Human
ucaggacccucgcuggccccca

SEQ ID NO: 3581036 - RNA, 19 nt, Human
ucaggacgagaaugagggu

SEQ ID NO: 3581037 - RNA, 14 nt, Human
ucaggacucagaag

SEQ ID NO: 3581038 - RNA, 13 nt, Human
ucaggacuccagc

SEQ ID NO: 3581039 - RNA, 14 nt, Human
ucaggacuccagcc

SEQ ID NO: 3581040 - RNA, 15 nt, Human
ucaggacugggagcc

SEQ ID NO: 3581041 - RNA, 22 nt, Human
ucaggacugggagcccccagcc

SEQ ID NO: 3581042 - RNA, 16 nt, Human
ucaggacuugaaagaa

SEQ ID NO: 3581043 - RNA, 17 nt, Human
ucaggacuugaaagaaa

SEQ ID NO: 3581044 - RNA, 15 nt, Human
ucaggagaggggcag

SEQ ID NO: 3581045 - RNA, 17 nt, Human
ucaggagaggggcagaa

SEQ ID NO: 3581046 - RNA, 20 nt, Human
ucaggagaggggcagaacag

SEQ ID NO: 3581047 - RNA, 21 nt, Human
ucaggagcagccucagaacaa

SEQ ID NO: 3581048 - RNA, 22 nt, Human
ucaggagcagccucagaacaaa

SEQ ID NO: 3581049 - RNA, 14 nt, Human
ucaggagcccuggg

SEQ ID NO: 3581050 - RNA, 19 nt, Human
ucaggagcccugggaggcu

SEQ ID NO: 3581051 - RNA, 23 nt, Human
ucaggagccgaagcccaggggcc

SEQ ID NO: 3581052 - RNA, 18 nt, Human
ucaggagcuccauacaca

SEQ ID NO: 3581053 - RNA, 13 nt, Human
ucaggaggcaggg

SEQ ID NO: 3581054 - RNA, 12 nt, Human
ucaggaggcuga

SEQ ID NO: 3581055 - RNA, 22 nt, Human
ucaggaggcugaggcagaagaa

SEQ ID NO: 3581056 - RNA, 15 nt, Human
ucaggaggcugaggg

SEQ ID NO: 3581057 - RNA, 20 nt, Human
ucaggagucccaaggaaagc

SEQ ID NO: 3581058 - RNA, 22 nt, Human
ucaggagucucugguagccugc

SEQ ID NO: 3581059 - RNA, 20 nt, Human
ucaggaguuagaggccagcc

SEQ ID NO: 3581060 - RNA, 22 nt, Human
ucaggauauccuuaucagagcu

SEQ ID NO: 3581061 - RNA, 22 nt, Human
ucaggauccaagcuaagcacug

SEQ ID NO: 3581062 - RNA, 15 nt, Human
ucaggauugcgagag

SEQ ID NO: 3581063 - RNA, 20 nt, Human
ucaggauugcgagagaugug

SEQ ID NO: 3581064 - RNA, 21 nt, Human
ucaggauugcgagagaugugu

SEQ ID NO: 3581065 - RNA, 22 nt, Human
ucaggauugcgagagaugugug

SEQ ID NO: 3581066 - RNA, 18 nt, Human
ucaggauuuccucuugaa

SEQ ID NO: 3581067 - RNA, 16 nt, Human
ucaggcaaagaaaaug

SEQ ID NO: 3581068 - RNA, 19 nt, Human
ucaggcaauucuccugccu

SEQ ID NO: 3581069 - RNA, 21 nt, Human
ucaggcacacaaggggcccuu

SEQ ID NO: 3581070 - RNA, 13 nt, Human
ucaggcacacagc

SEQ ID NO: 3581071 - RNA, 14 nt, Human
ucaggcacacagcu

SEQ ID NO: 3581072 - RNA, 15 nt, Human
ucaggcacaggucag

SEQ ID NO: 3581073 - RNA, 18 nt, Human
ucaggcaccagucccugu

SEQ ID NO: 3581074 - RNA, 22 nt, Human
ucaggcacuagccuuuggcucu

SEQ ID NO: 3581075 - RNA, 19 nt, Human
ucaggcacugggcaugagg

SEQ ID NO: 3581076 - RNA, 13 nt, Human
ucaggcagcucaa

SEQ ID NO: 3581077 - RNA, 13 nt, Human
ucaggcaggaagg

SEQ ID NO: 3581078 - RNA, 21 nt, Human
ucaggcaggaagggcaggaag

SEQ ID NO: 3581079 - RNA, 19 nt, Human
ucaggcauaggccugggug

SEQ ID NO: 3581080 - RNA, 17 nt, Human
ucaggcaugaacaugua

SEQ ID NO: 3581081 - RNA, 19 nt, Human
ucaggcaugaacauguacu

SEQ ID NO: 3581082 - RNA, 14 nt, Human
ucaggcaugccugu

SEQ ID NO: 3581083 - RNA, 17 nt, Human
ucaggcaugccugugug

SEQ ID NO: 3581084 - RNA, 20 nt, Human
ucaggccaaacucaccugcc

SEQ ID NO: 3581085 - RNA, 23 nt, Human
ucaggccacauggcuaaagaagg

SEQ ID NO: 3581086 - RNA, 16 nt, Human
ucaggccacggcagcc

SEQ ID NO: 3581087 - RNA, 14 nt, Human
ucaggccagcugcu

SEQ ID NO: 3581088 - RNA, 17 nt, Human
ucaggccaggcccucug

SEQ ID NO: 3581089 - RNA, 21 nt, Human
ucaggccaggcccucugccca

SEQ ID NO: 3581090 - RNA, 17 nt, Human
ucaggccaggugcagug

SEQ ID NO: 3581091 - RNA, 21 nt, Human
ucaggccaucaucaguggagc

SEQ ID NO: 3581092 - RNA, 14 nt, Human
ucaggcccaaagcc

SEQ ID NO: 3581093 - RNA, 21 nt, Human
ucaggcccccaccuggcucac

SEQ ID NO: 3581094 - RNA, 22 nt, Human
ucaggcccccgccuuggccugu

SEQ ID NO: 3581095 - RNA, 11 nt, Human
ucaggcccugg

SEQ ID NO: 3581096 - RNA, 19 nt, Human
ucaggcccuuauuuucaag

SEQ ID NO: 3581097 - RNA, 23 nt, Human
ucaggccggcagccccagccugc

SEQ ID NO: 3581098 - RNA, 18 nt, Human
ucaggccgggcagagcac

SEQ ID NO: 3581099 - RNA, 20 nt, Human
ucaggccgggcagagcacag

SEQ ID NO: 3581100 - RNA, 13 nt, Human
ucaggccugugug

SEQ ID NO: 3581101 - RNA, 21 nt, Human
ucaggcgauccaccugucuca

SEQ ID NO: 3581102 - RNA, 11 nt, Human
ucaggcuccau

SEQ ID NO: 3581103 - RNA, 20 nt, Human
ucaggcuccauuaggauuug

SEQ ID NO: 3581104 - RNA, 13 nt, Human
ucaggcucccagg

SEQ ID NO: 3581105 - RNA, 13 nt, Human
ucaggcuccccag

SEQ ID NO: 3581106 - RNA, 13 nt, Human
ucaggcucugccc

SEQ ID NO: 3581107 - RNA, 21 nt, Human
ucaggcucuucuccuuucaca

SEQ ID NO: 3581108 - RNA, 19 nt, Human
ucaggcugcagcuggacag

SEQ ID NO: 3581109 - RNA, 22 nt, Human
ucaggcugcagcuggacagagg

SEQ ID NO: 3581110 - RNA, 20 nt, Human
ucaggcugccuaagacaugu

SEQ ID NO: 3581111 - RNA, 12 nt, Human
ucaggcugcugg

SEQ ID NO: 3581112 - RNA, 15 nt, Human
ucaggcugcuggagg

SEQ ID NO: 3581113 - RNA, 17 nt, Human
ucaggcugcuggaggaa

SEQ ID NO: 3581114 - RNA, 17 nt, Human
ucaggcugcuggcgccu

SEQ ID NO: 3581115 - RNA, 23 nt, Human
ucaggcuuccuuggcaucacagg

SEQ ID NO: 3581116 - RNA, 13 nt, Human
ucagggaaagcau

SEQ ID NO: 3581117 - RNA, 14 nt, Human
ucagggaagcccag

SEQ ID NO: 3581118 - RNA, 16 nt, Human
ucagggaagcccagcu

SEQ ID NO: 3581119 - RNA, 17 nt, Human
ucagggaagcccagcuc

SEQ ID NO: 3581120 - RNA, 19 nt, Human
ucagggaagcccagcucca

SEQ ID NO: 3581121 - RNA, 20 nt, Human
ucagggaaggaggagccugu

SEQ ID NO: 3581122 - RNA, 23 nt, Human
ucagggaaggaggagccuguccu

SEQ ID NO: 3581123 - RNA, 18 nt, Human
ucagggacagagacaccu

SEQ ID NO: 3581124 - RNA, 14 nt, Human
ucagggacagagcc

SEQ ID NO: 3581125 - RNA, 15 nt, Human
ucagggacagagcca

SEQ ID NO: 3581126 - RNA, 15 nt, Human
ucagggacaggauga

SEQ ID NO: 3581127 - RNA, 14 nt, Human
ucagggaccaagga

SEQ ID NO: 3581128 - RNA, 20 nt, Human
ucagggaccaaggaccccuc

SEQ ID NO: 3581129 - RNA, 23 nt, Human
ucagggacucaucuuucccuccu

SEQ ID NO: 3581130 - RNA, 23 nt, Human
ucagggagcagggaaggccugac

SEQ ID NO: 3581131 - RNA, 17 nt, Human
ucagggagugcuggcuc

SEQ ID NO: 3581132 - RNA, 21 nt, Human
ucagggagugggcuaagcacg

SEQ ID NO: 3581133 - RNA, 19 nt, Human
ucagggaguguucccuauc

SEQ ID NO: 3581134 - RNA, 16 nt, Human
ucagggcaaagccagg

SEQ ID NO: 3581135 - RNA, 18 nt, Human
ucagggcagccugccugg

SEQ ID NO: 3581136 - RNA, 16 nt, Human
ucagggcagggcucug

SEQ ID NO: 3581137 - RNA, 13 nt, Human
ucagggccaggcc

SEQ ID NO: 3581138 - RNA, 18 nt, Human
ucagggccaugcugaggc

SEQ ID NO: 3581139 - RNA, 23 nt, Human
ucagggccaugcugaggccuggg

SEQ ID NO: 3581140 - RNA, 14 nt, Human
ucagggcccagagg

SEQ ID NO: 3581141 - RNA, 17 nt, Human
ucagggcccagaggcug

SEQ ID NO: 3581142 - RNA, 20 nt, Human
ucagggccuggggccugaga

SEQ ID NO: 3581143 - RNA, 23 nt, Human
ucagggccuggggccugagagaa

SEQ ID NO: 3581144 - RNA, 23 nt, Human
ucagggcuaaacgggcauugccu

SEQ ID NO: 3581145 - RNA, 16 nt, Human
ucagggcucccagggg

SEQ ID NO: 3581146 - RNA, 21 nt, Human
ucagggcuccugccuucuguc

SEQ ID NO: 3581147 - RNA, 14 nt, Human
ucagggcuccuggg

SEQ ID NO: 3581148 - RNA, 18 nt, Human
ucagggcuggcuccugau

SEQ ID NO: 3581149 - RNA, 19 nt, Human
ucagggcuggcuccugauc

SEQ ID NO: 3581150 - RNA, 16 nt, Human
ucaggggacucagccc

SEQ ID NO: 3581151 - RNA, 15 nt, Human
ucaggggccagagga

SEQ ID NO: 3581152 - RNA, 16 nt, Human
ucaggggcccuggagc

SEQ ID NO: 3581153 - RNA, 17 nt, Human
ucaggggcugacacuuc

SEQ ID NO: 3581154 - RNA, 13 nt, Human
ucaggggcugccc

SEQ ID NO: 3581155 - RNA, 22 nt, Human
ucaggggcugcccgcucccagu

SEQ ID NO: 3581156 - RNA, 16 nt, Human
ucagugggagaaaaca

SEQ ID NO: 3581157 - RNA, 14 nt, Human
ucaguggggcaguc

SEQ ID NO: 3581158 - RNA, 20 nt, Human
ucaguggggcccauggaugu

SEQ ID NO: 3581159 - RNA, 16 nt, Human
ucaguggggcucucug

SEQ ID NO: 3581160 - RNA, 18 nt, Human
ucaguggggcucucugag

SEQ ID NO: 3581161 - RNA, 23 nt, Human
ucaguggguuaacaucaguuuug

SEQ ID NO: 3581162 - RNA, 18 nt, Human
ucaguguaauuucuuugc

SEQ ID NO: 3581163 - RNA, 19 nt, Human
ucaguguaauuucuuugcc

SEQ ID NO: 3581164 - RNA, 20 nt, Human
ucaguguacauggaauaaca

SEQ ID NO: 3581165 - RNA, 22 nt, Human
ucaguguaccgcgucuacccug

SEQ ID NO: 3581166 - RNA, 17 nt, Human
ucaguguaguuaauuua

SEQ ID NO: 3581167 - RNA, 18 nt, Human
ucaguguaguuaauuuau

SEQ ID NO: 3581168 - RNA, 16 nt, Human
ucaguguauuucaguu

SEQ ID NO: 3581169 - RNA, 15 nt, Human
ucaguguauuuguau

SEQ ID NO: 3581170 - RNA, 22 nt, Human
ucagugucaaauaaacacugug

SEQ ID NO: 3581171 - RNA, 20 nt, Human
ucagugucaaugcagccccc

SEQ ID NO: 3581172 - RNA, 20 nt, Human
ucagugucauuuaugaaaag

SEQ ID NO: 3581173 - RNA, 16 nt, Human
ucaguguccaaagcag

SEQ ID NO: 3581174 - RNA, 13 nt, Human
ucagugucccggg

SEQ ID NO: 3581175 - RNA, 13 nt, Human
ucagugugacuga

SEQ ID NO: 3581176 - RNA, 18 nt, Human
ucagugugacugaucucu

SEQ ID NO: 3581177 - RNA, 14 nt, Human
ucagugugcccccc

SEQ ID NO: 3581178 - RNA, 23 nt, Human
ucaguguuaaaaaauuuuugaaa

SEQ ID NO: 3581179 - RNA, 17 nt, Human
ucaguguuaaaugugau

SEQ ID NO: 3581180 - RNA, 16 nt, Human
ucaguguuaccugugu

SEQ ID NO: 3581181 - RNA, 15 nt, Human
ucaguguugguauau

SEQ ID NO: 3581182 - RNA, 14 nt, Human
ucaguguuuaugug

SEQ ID NO: 3581183 - RNA, 18 nt, Human
ucaguguuuuaaauucug

SEQ ID NO: 3581184 - RNA, 17 nt, Human
ucaguuaagccuuugga

SEQ ID NO: 3581185 - RNA, 17 nt, Human
ucaguuaaguuuuuccc

SEQ ID NO: 3581186 - RNA, 18 nt, Human
ucaguuaaguuuuucccu

SEQ ID NO: 3581187 - RNA, 16 nt, Human
ucaguuacucugaagg

SEQ ID NO: 3581188 - RNA, 21 nt, Human
ucaguuauacaguuauaaaau

SEQ ID NO: 3581189 - RNA, 16 nt, Human
ucaguuauucauucug

SEQ ID NO: 3581190 - RNA, 15 nt, Human
ucaguuauuggugga

SEQ ID NO: 3581191 - RNA, 12 nt, Human
ucaguucaaagu

SEQ ID NO: 3581192 - RNA, 13 nt, Human
ucaguucaaaguc

SEQ ID NO: 3581193 - RNA, 16 nt, Human
ucaguucaaagucaug

SEQ ID NO: 3581194 - RNA, 16 nt, Human
ucaguucccagaauca

SEQ ID NO: 3581195 - RNA, 18 nt, Human
ucaguucccuuggccuca

SEQ ID NO: 3581196 - RNA, 20 nt, Human
ucaguuccgauuucccaggc

SEQ ID NO: 3581197 - RNA, 16 nt, Human
ucaguuccucuuugca

SEQ ID NO: 3581198 - RNA, 18 nt, Human
ucaguuccucuuugcaug

SEQ ID NO: 3581199 - RNA, 20 nt, Human
ucaguuccugcccuuggccu

SEQ ID NO: 3581200 - RNA, 20 nt, Human
ucaguucuagucucucuggg

SEQ ID NO: 3581201 - RNA, 14 nt, Human
ucaguucucuucac

SEQ ID NO: 3581202 - RNA, 19 nt, Human
ucaguucucuugauuuuca

SEQ ID NO: 3581203 - RNA, 13 nt, Human
ucaguucugauau

SEQ ID NO: 3581204 - RNA, 20 nt, Human
ucaguucuugccacuuuuuu

SEQ ID NO: 3581205 - RNA, 17 nt, Human
ucaguugauuuucugga

SEQ ID NO: 3581206 - RNA, 12 nt, Human
ucaguugcagcc

SEQ ID NO: 3581207 - RNA, 20 nt, Human
ucaguugcucaaaaagaaau

SEQ ID NO: 3581208 - RNA, 13 nt, Human
ucaguugcuuguc

SEQ ID NO: 3581209 - RNA, 15 nt, Human
ucaguugguaagcuu

SEQ ID NO: 3581210 - RNA, 16 nt, Human
ucaguugguugugucu

SEQ ID NO: 3581211 - RNA, 18 nt, Human
ucaguugguugugucuuu

SEQ ID NO: 3581212 - RNA, 15 nt, Human
ucaguugugacuaac

SEQ ID NO: 3581213 - RNA, 20 nt, Human
ucaguuguuauuuauugaaa

SEQ ID NO: 3581214 - RNA, 15 nt, Human
ucaguuuaauccuuc

SEQ ID NO: 3581215 - RNA, 20 nt, Human
ucaguuuaauccuucuaguu

SEQ ID NO: 3581216 - RNA, 16 nt, Human
ucaguuuauguuguac

SEQ ID NO: 3581217 - RNA, 19 nt, Human
ucaguuucaauucagugcu

SEQ ID NO: 3581218 - RNA, 19 nt, Human
ucaguuucacagaaaauaa

SEQ ID NO: 3581219 - RNA, 14 nt, Human
ucaguuucauaaaa

SEQ ID NO: 3581220 - RNA, 12 nt, Human
ucaguuugauca

SEQ ID NO: 3581221 - RNA, 19 nt, Human
ucaguuugcuagcagaaau

SEQ ID NO: 3581222 - RNA, 14 nt, Human
ucaguuuguauaga

SEQ ID NO: 3581223 - RNA, 16 nt, Human
ucaguuugugugucuu

SEQ ID NO: 3581224 - RNA, 17 nt, Human
ucaguuugugugucuua

SEQ ID NO: 3581225 - RNA, 15 nt, Human
ucaguuuguuggaaa

SEQ ID NO: 3581226 - RNA, 16 nt, Human
ucaguuuuaucauuuu

SEQ ID NO: 3581227 - RNA, 17 nt, Human
ucaguuuuaucauuuuc

SEQ ID NO: 3581228 - RNA, 12 nt, Human
ucaguuuucauu

SEQ ID NO: 3581229 - RNA, 15 nt, Human
ucaguuuuucuuaau

SEQ ID NO: 3581230 - RNA, 17 nt, Human
ucaguuuuuuguuuuac

SEQ ID NO: 3581231 - RNA, 15 nt, Human
ucaguuuuuuuuuau

SEQ ID NO: 3581232 - RNA, 22 nt, Human
ucauaaaaagccugcaauuuca

SEQ ID NO: 3581233 - RNA, 23 nt, Human
ucauaaaaucaaaacaagugaaa

SEQ ID NO: 3581234 - RNA, 13 nt, Human
ucauaaagugaga

SEQ ID NO: 3581235 - RNA, 23 nt, Human
ucauaaaguuagaaucuauuuuc

SEQ ID NO: 3581236 - RNA, 12 nt, Human
ucauaaaugaag

SEQ ID NO: 3581237 - RNA, 11 nt, Human
ucauaaauuau

SEQ ID NO: 3581238 - RNA, 13 nt, Human
ucauaaauuauuu

SEQ ID NO: 3581239 - RNA, 16 nt, Human
ucauaacugugucauu

SEQ ID NO: 3581240 - RNA, 20 nt, Human
ucauaagccaauuuuucugc

SEQ ID NO: 3581241 - RNA, 16 nt, Human
ucauaagcgaucacuu

SEQ ID NO: 3581242 - RNA, 12 nt, Human
ucauaauggccu

SEQ ID NO: 3581243 - RNA, 12 nt, Human
ucauaaugugaa

SEQ ID NO: 3581244 - RNA, 17 nt, Human
ucauaaugugaaguguu

SEQ ID NO: 3581245 - RNA, 15 nt, Human
ucauaauuauuauuu

SEQ ID NO: 3581246 - RNA, 23 nt, Human
ucauaauuccuacagcacuacug

SEQ ID NO: 3581247 - RNA, 22 nt, Human
ucauacaaggcccaggaggcuu

SEQ ID NO: 3581248 - RNA, 19 nt, Human
ucauacacuaaccaaaucu

SEQ ID NO: 3581249 - RNA, 14 nt, Human
ucauacagagaagu

SEQ ID NO: 3581250 - RNA, 13 nt, Human
ucauacauuguac

SEQ ID NO: 3581251 - RNA, 20 nt, Human
ucauaccaacuuuagcagaa

SEQ ID NO: 3581252 - RNA, 13 nt, Human
ucauacccacccc

SEQ ID NO: 3581253 - RNA, 16 nt, Human
ucauaccuaaguacug

SEQ ID NO: 3581254 - RNA, 17 nt, Human
ucauaccuaaguacugu

SEQ ID NO: 3581255 - RNA, 18 nt, Human
ucauaccuaucaucuuaa

SEQ ID NO: 3581256 - RNA, 14 nt, Human
ucauaccucugacc

SEQ ID NO: 3581257 - RNA, 15 nt, Human
ucauacguccaccau

SEQ ID NO: 3581258 - RNA, 20 nt, Human
ucauacuacugaaacagauu

SEQ ID NO: 3581259 - RNA, 20 nt, Human
ucauacuccuaugcuuuagc

SEQ ID NO: 3581260 - RNA, 17 nt, Human
ucauacucgagucugag

SEQ ID NO: 3581261 - RNA, 15 nt, Human
ucauacuuaaaaauu

SEQ ID NO: 3581262 - RNA, 22 nt, Human
ucauacuugaacguuuucuaau

SEQ ID NO: 3581263 - RNA, 13 nt, Human
ucauagaaaugua

SEQ ID NO: 3581264 - RNA, 22 nt, Human
ucauagaauagcauguuguaga

SEQ ID NO: 3581265 - RNA, 20 nt, Human
ucauagagauuugucuaauu

SEQ ID NO: 3581266 - RNA, 14 nt, Human
ucauagauuucuga

SEQ ID NO: 3581267 - RNA, 14 nt, Human
ucauagcacuuccc

SEQ ID NO: 3581268 - RNA, 21 nt, Human
ucauagcauuaacuaaucuau

SEQ ID NO: 3581269 - RNA, 17 nt, Human
ucauagccauaaaugau

SEQ ID NO: 3581270 - RNA, 20 nt, Human
ucauaggaaaaguacauuua

SEQ ID NO: 3581271 - RNA, 22 nt, Human
ucauaggcaccuuuuacuguga

SEQ ID NO: 3581272 - RNA, 16 nt, Human
ucauagguauuucaaa

SEQ ID NO: 3581273 - RNA, 18 nt, Human
ucauaggucacuggcucu

SEQ ID NO: 3581274 - RNA, 14 nt, Human
ucauaggucugaaa

SEQ ID NO: 3581275 - RNA, 22 nt, Human
ucauaggucugaaauuuuucuu

SEQ ID NO: 3581276 - RNA, 21 nt, Human
ucauagguuaaaaaaaaaagu

SEQ ID NO: 3581277 - RNA, 17 nt, Human
ucauagguugagcaauu

SEQ ID NO: 3581278 - RNA, 14 nt, Human
ucauaguaacuucu

SEQ ID NO: 3581279 - RNA, 20 nt, Human
ucauaguagaacuuuauaaa

SEQ ID NO: 3581280 - RNA, 16 nt, Human
ucauaguaguuuuuac

SEQ ID NO: 3581281 - RNA, 16 nt, Human
ucauaguucagaauuu

SEQ ID NO: 3581282 - RNA, 21 nt, Human
ucauaguucugagcugccagu

SEQ ID NO: 3581283 - RNA, 15 nt, Human
ucauaguuuuauuua

SEQ ID NO: 3581284 - RNA, 18 nt, Human
ucauauaaaguaucauca

SEQ ID NO: 3581285 - RNA, 18 nt, Human
ucauauaagauucauauu

SEQ ID NO: 3581286 - RNA, 17 nt, Human
ucauauaccagcaauau

SEQ ID NO: 3581287 - RNA, 17 nt, Human
ucauauauaauaaauua

SEQ ID NO: 3581288 - RNA, 22 nt, Human
ucauauauaucacccagacaua

SEQ ID NO: 3581289 - RNA, 21 nt, Human
ucauauauuaaacauccacaa

SEQ ID NO: 3581290 - RNA, 21 nt, Human
ucauaucaacuuagucaauaa

SEQ ID NO: 3581291 - RNA, 21 nt, Human
ucauaugaaaggugccaugga

SEQ ID NO: 3581292 - RNA, 15 nt, Human
ucauauggauaaaua

SEQ ID NO: 3581293 - RNA, 21 nt, Human
ucauauguaccauguacauga

SEQ ID NO: 3581294 - RNA, 20 nt, Human
ucauauguagccuucacaca

SEQ ID NO: 3581295 - RNA, 22 nt, Human
ucauauguagccuucacacaga

SEQ ID NO: 3581296 - RNA, 21 nt, Human
ucauaugugaucugucuugua

SEQ ID NO: 3581297 - RNA, 22 nt, Human
ucauaugugaucugucuuguaa

SEQ ID NO: 3581298 - RNA, 13 nt, Human
ucauauguugcuc

SEQ ID NO: 3581299 - RNA, 15 nt, Human
ucauauuaagaauga

SEQ ID NO: 3581300 - RNA, 22 nt, Human
ucauauuaagaaugaucugauu

SEQ ID NO: 3581301 - RNA, 19 nt, Human
ucaucuucaccagaggaau

SEQ ID NO: 3581302 - RNA, 13 nt, Human
ucaucuuccugug

SEQ ID NO: 3581303 - RNA, 15 nt, Human
ucaucuuccuguguc

SEQ ID NO: 3581304 - RNA, 16 nt, Human
ucaucuuccugugucc

SEQ ID NO: 3581305 - RNA, 19 nt, Human
ucaucuuccuguguccuga

SEQ ID NO: 3581306 - RNA, 14 nt, Human
ucaucuucucagcu

SEQ ID NO: 3581307 - RNA, 19 nt, Human
ucaucuugaauuguaagga

SEQ ID NO: 3581308 - RNA, 16 nt, Human
ucaucuugaccaagca

SEQ ID NO: 3581309 - RNA, 21 nt, Human
ucaucuugaccaagcaggaag

SEQ ID NO: 3581310 - RNA, 11 nt, Human
ucaucuugcua

SEQ ID NO: 3581311 - RNA, 22 nt, Human
ucaucuugugaaauggccagga

SEQ ID NO: 3581312 - RNA, 16 nt, Human
ucaucuuucccuccuu

SEQ ID NO: 3581313 - RNA, 17 nt, Human
ucaucuuucccuccuug

SEQ ID NO: 3581314 - RNA, 14 nt, Human
ucaucuuucuucca

SEQ ID NO: 3581315 - RNA, 12 nt, Human
ucaugaaaauac

SEQ ID NO: 3581316 - RNA, 14 nt, Human
ucaugaaaauacca

SEQ ID NO: 3581317 - RNA, 13 nt, Human
ucaugaaagauuc

SEQ ID NO: 3581318 - RNA, 15 nt, Human
ucaugaaagauucaa

SEQ ID NO: 3581319 - RNA, 17 nt, Human
ucaugaaagauucaaug

SEQ ID NO: 3581320 - RNA, 14 nt, Human
ucaugaaauaugca

SEQ ID NO: 3581321 - RNA, 15 nt, Human
ucaugaagccugugg

SEQ ID NO: 3581322 - RNA, 13 nt, Human
ucaugaaugcuuu

SEQ ID NO: 3581323 - RNA, 13 nt, Human
ucaugaauguaaa

SEQ ID NO: 3581324 - RNA, 19 nt, Human
ucaugaauguaaauuugua

SEQ ID NO: 3581325 - RNA, 22 nt, Human
ucaugaauuaguuuuauaugcu

SEQ ID NO: 3581326 - RNA, 20 nt, Human
ucaugaauucuuaugcuuau

SEQ ID NO: 3581327 - RNA, 18 nt, Human
ucaugaauuuuaaaguau

SEQ ID NO: 3581328 - RNA, 14 nt, Human
ucaugaauuuuaca

SEQ ID NO: 3581329 - RNA, 16 nt, Human
ucaugaauuuuacaug

SEQ ID NO: 3581330 - RNA, 19 nt, Human
ucaugacaaagacugagua

SEQ ID NO: 3581331 - RNA, 19 nt, Human
ucaugacauguuauauauu

SEQ ID NO: 3581332 - RNA, 22 nt, Human
ucaugacauuccuaaacuaucu

SEQ ID NO: 3581333 - RNA, 16 nt, Human
ucaugaccagcaaaua

SEQ ID NO: 3581334 - RNA, 16 nt, Human
ucaugagccugcugga

SEQ ID NO: 3581335 - RNA, 19 nt, Human
ucaugagccugcuggaagc

SEQ ID NO: 3581336 - RNA, 16 nt, Human
ucaugagcugagcagg

SEQ ID NO: 3581337 - RNA, 22 nt, Human
ucaugaggagauucugccuuug

SEQ ID NO: 3581338 - RNA, 20 nt, Human
ucaugaggaggggccccccu

SEQ ID NO: 3581339 - RNA, 21 nt, Human
ucaugauaaugaacagaacau

SEQ ID NO: 3581340 - RNA, 13 nt, Human
ucaugauccaacu

SEQ ID NO: 3581341 - RNA, 14 nt, Human
ucaugaucucccug

SEQ ID NO: 3581342 - RNA, 15 nt, Human
ucaugaucucccugc

SEQ ID NO: 3581343 - RNA, 16 nt, Human
ucaugaucucccugcc

SEQ ID NO: 3581344 - RNA, 18 nt, Human
ucaugaucucccugccgc

SEQ ID NO: 3581345 - RNA, 22 nt, Human
ucaugaucucccugccgccuca

SEQ ID NO: 3581346 - RNA, 16 nt, Human
ucaugaugcagucucc

SEQ ID NO: 3581347 - RNA, 19 nt, Human
ucaugaugcagucuccucu

SEQ ID NO: 3581348 - RNA, 23 nt, Human
ucaugaugcagucuccucuuuaa

SEQ ID NO: 3581349 - RNA, 23 nt, Human
ucaugauuagaaauuaccugugg

SEQ ID NO: 3581350 - RNA, 16 nt, Human
ucaugauuuauaaaug

SEQ ID NO: 3581351 - RNA, 22 nt, Human
ucaugauuuuaaguuucucugc

SEQ ID NO: 3581352 - RNA, 11 nt, Human
ucaugcaaaau

SEQ ID NO: 3581353 - RNA, 13 nt, Human
ucaugcaaugaca

SEQ ID NO: 3581354 - RNA, 16 nt, Human
ucaugcacacaauuag

SEQ ID NO: 3581355 - RNA, 21 nt, Human
ucaugcacuuaaagaaguauu

SEQ ID NO: 3581356 - RNA, 23 nt, Human
ucaugcagccgugaucaagggaa

SEQ ID NO: 3581357 - RNA, 15 nt, Human
ucaugcauaaauaug

SEQ ID NO: 3581358 - RNA, 20 nt, Human
ucaugcauaaauaugcagug

SEQ ID NO: 3581359 - RNA, 18 nt, Human
ucaugcauagucccagcu

SEQ ID NO: 3581360 - RNA, 15 nt, Human
ucaugcauggaaauu

SEQ ID NO: 3581361 - RNA, 17 nt, Human
ucaugcaugucaaacau

SEQ ID NO: 3581362 - RNA, 21 nt, Human
ucaugccagcuacuuccuccu

SEQ ID NO: 3581363 - RNA, 18 nt, Human
ucaugcccacccccugcc

SEQ ID NO: 3581364 - RNA, 20 nt, Human
ucaugcccacccccugcccu

SEQ ID NO: 3581365 - RNA, 22 nt, Human
ucaugcccacccccugcccugc

SEQ ID NO: 3581366 - RNA, 15 nt, Human
ucaugcccccuuuca

SEQ ID NO: 3581367 - RNA, 17 nt, Human
ucaugcccggucccacc

SEQ ID NO: 3581368 - RNA, 13 nt, Human
ucaugcccuccuc

SEQ ID NO: 3581369 - RNA, 14 nt, Human
ucaugcccuccucu

SEQ ID NO: 3581370 - RNA, 13 nt, Human
ucaugccucugag

SEQ ID NO: 3581371 - RNA, 15 nt, Human
ucaugccucugaggc

SEQ ID NO: 3581372 - RNA, 15 nt, Human
ucaugccuggcuucg

SEQ ID NO: 3581373 - RNA, 15 nt, Human
ucaugccuguaaucc

SEQ ID NO: 3581374 - RNA, 13 nt, Human
ucaugccuuugua

SEQ ID NO: 3581375 - RNA, 14 nt, Human
ucaugccuuuguaa

SEQ ID NO: 3581376 - RNA, 17 nt, Human
ucaugccuuuguaaguu

SEQ ID NO: 3581377 - RNA, 22 nt, Human
ucaugcuaauuauauaauauuu

SEQ ID NO: 3581378 - RNA, 23 nt, Human
ucaugcuccccugugccagccca

SEQ ID NO: 3581379 - RNA, 11 nt, Human
ucaugcugaaa

SEQ ID NO: 3581380 - RNA, 14 nt, Human
ucaugcugggauuu

SEQ ID NO: 3581381 - RNA, 18 nt, Human
ucaugcuuguguuauaac

SEQ ID NO: 3581382 - RNA, 23 nt, Human
ucaugcuuuaaaguguaauaaua

SEQ ID NO: 3581383 - RNA, 15 nt, Human
ucauggaaauauuau

SEQ ID NO: 3581384 - RNA, 19 nt, Human
ucauggaaauauuaugcaa

SEQ ID NO: 3581385 - RNA, 17 nt, Human
ucauggaacacaaacac

SEQ ID NO: 3581386 - RNA, 18 nt, Human
ucauggaacacaaacaca

SEQ ID NO: 3581387 - RNA, 20 nt, Human
ucauggaacgcguugaaauu

SEQ ID NO: 3581388 - RNA, 17 nt, Human
ucauggacacuuugaaa

SEQ ID NO: 3581389 - RNA, 19 nt, Human
ucauggaccacuguuucuu

SEQ ID NO: 3581390 - RNA, 20 nt, Human
ucauggauuuuccaggacug

SEQ ID NO: 3581391 - RNA, 12 nt, Human
ucauggccacac

SEQ ID NO: 3581392 - RNA, 15 nt, Human
ucauggccacacugu

SEQ ID NO: 3581393 - RNA, 18 nt, Human
ucauggccacacugugac

SEQ ID NO: 3581394 - RNA, 15 nt, Human
ucauggcucacugca

SEQ ID NO: 3581395 - RNA, 18 nt, Human
ucauggcucacugcagcc

SEQ ID NO: 3581396 - RNA, 22 nt, Human
ucauggcugugcccucuugaug

SEQ ID NO: 3581397 - RNA, 20 nt, Human
ucauggggggagcacccuga

SEQ ID NO: 3581398 - RNA, 17 nt, Human
ucauggguuauguguau

SEQ ID NO: 3581399 - RNA, 22 nt, Human
ucaugguagagaccgagccucu

SEQ ID NO: 3581400 - RNA, 18 nt, Human
ucaugguccccauggcau

SEQ ID NO: 3581401 - RNA, 16 nt, Human
ucauggucucagucau

SEQ ID NO: 3581402 - RNA, 19 nt, Human
ucauggugaaaauguacug

SEQ ID NO: 3581403 - RNA, 15 nt, Human
ucauggugaggcuua

SEQ ID NO: 3581404 - RNA, 14 nt, Human
ucaugguguaauaa

SEQ ID NO: 3581405 - RNA, 16 nt, Human
ucaugguguaauaaga

SEQ ID NO: 3581406 - RNA, 19 nt, Human
ucaugguguaauaagacau

SEQ ID NO: 3581407 - RNA, 21 nt, Human
ucaugguguaauaagacauaa

SEQ ID NO: 3581408 - RNA, 17 nt, Human
ucauguaaacugugcac

SEQ ID NO: 3581409 - RNA, 19 nt, Human
ucauguaaagaaaugucuu

SEQ ID NO: 3581410 - RNA, 15 nt, Human
ucauguaaauaaaua

SEQ ID NO: 3581411 - RNA, 17 nt, Human
ucauguaaauuuuguau

SEQ ID NO: 3581412 - RNA, 12 nt, Human
ucauguacauuu

SEQ ID NO: 3581413 - RNA, 19 nt, Human
ucauguacauuuggaacua

SEQ ID NO: 3581414 - RNA, 16 nt, Human
ucauguacugcauuau

SEQ ID NO: 3581415 - RNA, 15 nt, Human
ucauguacuuuuuag

SEQ ID NO: 3581416 - RNA, 22 nt, Human
ucauguacuuuuuaguaauuuc

SEQ ID NO: 3581417 - RNA, 17 nt, Human
ucauguagagaaaagca

SEQ ID NO: 3581418 - RNA, 19 nt, Human
ucauguagagaaaagcaca

SEQ ID NO: 3581419 - RNA, 17 nt, Human
ucauguaguaucaaaua

SEQ ID NO: 3581420 - RNA, 15 nt, Human
ucauguaucaucugg

SEQ ID NO: 3581421 - RNA, 18 nt, Human
ucauguaucaucuggaua

SEQ ID NO: 3581422 - RNA, 19 nt, Human
ucauguaucaucuggauag

SEQ ID NO: 3581423 - RNA, 20 nt, Human
ucauguaucaucuggauagg

SEQ ID NO: 3581424 - RNA, 21 nt, Human
ucauguauguucagaagaaau

SEQ ID NO: 3581425 - RNA, 22 nt, Human
ucauguauguucagaagaaauu

SEQ ID NO: 3581426 - RNA, 13 nt, Human
ucauguauguuuc

SEQ ID NO: 3581427 - RNA, 16 nt, Human
ucauguauguuucucu

SEQ ID NO: 3581428 - RNA, 15 nt, Human
ucauguauuugagca

SEQ ID NO: 3581429 - RNA, 23 nt, Human
ucaugucaaauauuuagauguaa

SEQ ID NO: 3581430 - RNA, 16 nt, Human
ucaugucaacuucugg

SEQ ID NO: 3581431 - RNA, 16 nt, Human
ucauguccugugucag

SEQ ID NO: 3581432 - RNA, 18 nt, Human
ucauguccugugucaguu

SEQ ID NO: 3581433 - RNA, 20 nt, Human
ucauguccugugucaguuua

SEQ ID NO: 3581434 - RNA, 13 nt, Human
ucaugucuggcua

SEQ ID NO: 3581435 - RNA, 16 nt, Human
ucaugucuucucacaa

SEQ ID NO: 3581436 - RNA, 17 nt, Human
ucaugugaccacucugu

SEQ ID NO: 3581437 - RNA, 14 nt, Human
ucaugugacucuuu

SEQ ID NO: 3581438 - RNA, 18 nt, Human
ucaugugacucuuuccaa

SEQ ID NO: 3581439 - RNA, 21 nt, Human
ucaugugcauuauuuuccaga

SEQ ID NO: 3581440 - RNA, 21 nt, Human
ucauguggcuggaagauccug

SEQ ID NO: 3581441 - RNA, 18 nt, Human
ucauguguaaucaauaaa

SEQ ID NO: 3581442 - RNA, 10 nt, Human
ucauguguau

SEQ ID NO: 3581443 - RNA, 15 nt, Human
ucauguguauaaaaa

SEQ ID NO: 3581444 - RNA, 12 nt, Human
ucaugugugucc

SEQ ID NO: 3581445 - RNA, 14 nt, Human
ucauguguucccuu

SEQ ID NO: 3581446 - RNA, 13 nt, Human
uccccucccuggc

SEQ ID NO: 3581447 - RNA, 19 nt, Human
uccccucccuggcucccau

SEQ ID NO: 3581448 - RNA, 18 nt, Human
uccccuccggacuggugc

SEQ ID NO: 3581449 - RNA, 14 nt, Human
uccccuccuccacu

SEQ ID NO: 3581450 - RNA, 16 nt, Human
uccccuccuccacucu

SEQ ID NO: 3581451 - RNA, 14 nt, Human
uccccuccucugcu

SEQ ID NO: 3581452 - RNA, 18 nt, Human
uccccuccuucucccuuu

SEQ ID NO: 3581453 - RNA, 18 nt, Human
uccccuccuugggcacuu

SEQ ID NO: 3581454 - RNA, 16 nt, Human
uccccucggagaagag

SEQ ID NO: 3581455 - RNA, 21 nt, Human
uccccucucuugucagaugcc

SEQ ID NO: 3581456 - RNA, 21 nt, Human
uccccucugaaaguuguacau

SEQ ID NO: 3581457 - RNA, 21 nt, Human
uccccucuuauguaccucuuu

SEQ ID NO: 3581458 - RNA, 17 nt, Human
uccccucuucccuucaa

SEQ ID NO: 3581459 - RNA, 12 nt, Human
uccccugagccc

SEQ ID NO: 3581460 - RNA, 19 nt, Human
uccccugcacuguaaaaug

SEQ ID NO: 3581461 - RNA, 17 nt, Human
uccccugcagcccuggc

SEQ ID NO: 3581462 - RNA, 18 nt, Human
uccccugcaggcugagug

SEQ ID NO: 3581463 - RNA, 13 nt, Human
uccccugccacca

SEQ ID NO: 3581464 - RNA, 17 nt, Human
uccccugccaccaggcc

SEQ ID NO: 3581465 - RNA, 12 nt, Human
uccccugccagg

SEQ ID NO: 3581466 - RNA, 15 nt, Human
uccccugccagggca

SEQ ID NO: 3581467 - RNA, 21 nt, Human
uccccugcccaugcugggagc

SEQ ID NO: 3581468 - RNA, 14 nt, Human
uccccugcccccag

SEQ ID NO: 3581469 - RNA, 17 nt, Human
uccccugcccccaggac

SEQ ID NO: 3581470 - RNA, 18 nt, Human
uccccugcccccaggacu

SEQ ID NO: 3581471 - RNA, 19 nt, Human
uccccugcccccaggacug

SEQ ID NO: 3581472 - RNA, 17 nt, Human
uccccugcccccugcag

SEQ ID NO: 3581473 - RNA, 19 nt, Human
uccccugcccccugcagga

SEQ ID NO: 3581474 - RNA, 21 nt, Human
uccccugcccccugcaggaag

SEQ ID NO: 3581475 - RNA, 15 nt, Human
uccccugccuccauc

SEQ ID NO: 3581476 - RNA, 15 nt, Human
uccccugccuugcug

SEQ ID NO: 3581477 - RNA, 19 nt, Human
uccccuggaagcagugccc

SEQ ID NO: 3581478 - RNA, 23 nt, Human
uccccuggaagcagugcccaggu

SEQ ID NO: 3581479 - RNA, 16 nt, Human
uccccuggacugggag

SEQ ID NO: 3581480 - RNA, 19 nt, Human
uccccuggagggggaaugg

SEQ ID NO: 3581481 - RNA, 14 nt, Human
uccccuggggaccc

SEQ ID NO: 3581482 - RNA, 15 nt, Human
uccccuggggaccca

SEQ ID NO: 3581483 - RNA, 16 nt, Human
uccccuggggugcagg

SEQ ID NO: 3581484 - RNA, 20 nt, Human
uccccugugccagcccagag

SEQ ID NO: 3581485 - RNA, 12 nt, Human
uccccugugggg

SEQ ID NO: 3581486 - RNA, 16 nt, Human
uccccuguuccccucu

SEQ ID NO: 3581487 - RNA, 19 nt, Human
uccccuguuccccucuccc

SEQ ID NO: 3581488 - RNA, 20 nt, Human
uccccuguuuguuucugaaa

SEQ ID NO: 3581489 - RNA, 19 nt, Human
uccccuuaauuaggaugca

SEQ ID NO: 3581490 - RNA, 17 nt, Human
uccccuuacccuuagaa

SEQ ID NO: 3581491 - RNA, 19 nt, Human
uccccuuauccucccugua

SEQ ID NO: 3581492 - RNA, 13 nt, Human
uccccuucacucc

SEQ ID NO: 3581493 - RNA, 13 nt, Human
uccccuuccacug

SEQ ID NO: 3581494 - RNA, 17 nt, Human
uccccuuccacugaggg

SEQ ID NO: 3581495 - RNA, 15 nt, Human
uccccuuccauuucu

SEQ ID NO: 3581496 - RNA, 15 nt, Human
uccccuucccugcaa

SEQ ID NO: 3581497 - RNA, 21 nt, Human
uccccuuccuaauuccacagc

SEQ ID NO: 3581498 - RNA, 19 nt, Human
uccccuucucaucacuccc

SEQ ID NO: 3581499 - RNA, 20 nt, Human
uccccuucuccccugcacug

SEQ ID NO: 3581500 - RNA, 16 nt, Human
uccccuucucucaucu

SEQ ID NO: 3581501 - RNA, 18 nt, Human
uccccuugaacucuucac

SEQ ID NO: 3581502 - RNA, 14 nt, Human
uccccuugagcuga

SEQ ID NO: 3581503 - RNA, 14 nt, Human
uccccuugccagcu

SEQ ID NO: 3581504 - RNA, 20 nt, Human
uccccuugcccagggcucag

SEQ ID NO: 3581505 - RNA, 20 nt, Human
uccccuugcccuugcccuga

SEQ ID NO: 3581506 - RNA, 23 nt, Human
uccccuugccugugccaggugag

SEQ ID NO: 3581507 - RNA, 19 nt, Human
uccccuugggcccacaccu

SEQ ID NO: 3581508 - RNA, 22 nt, Human
uccccuugggcccacaccuccu

SEQ ID NO: 3581509 - RNA, 20 nt, Human
uccccuuuauguacaggaug

SEQ ID NO: 3581510 - RNA, 13 nt, Human
uccccuuuccugu

SEQ ID NO: 3581511 - RNA, 20 nt, Human
uccccuuuucuuuucuaccc

SEQ ID NO: 3581512 - RNA, 18 nt, Human
uccccuuuugcauucucc

SEQ ID NO: 3581513 - RNA, 20 nt, Human
ucccgagcaaagucuaaagu

SEQ ID NO: 3581514 - RNA, 22 nt, Human
ucccgagcaccuccacauccuc

SEQ ID NO: 3581515 - RNA, 16 nt, Human
ucccgaguagcuggga

SEQ ID NO: 3581516 - RNA, 12 nt, Human
ucccgagucugg

SEQ ID NO: 3581517 - RNA, 14 nt, Human
ucccgagucuggga

SEQ ID NO: 3581518 - RNA, 19 nt, Human
ucccgauucacccugucca

SEQ ID NO: 3581519 - RNA, 18 nt, Human
ucccgcccaaaccuuucc

SEQ ID NO: 3581520 - RNA, 15 nt, Human
ucccgccccuucccc

SEQ ID NO: 3581521 - RNA, 15 nt, Human
ucccgccuccaaccc

SEQ ID NO: 3581522 - RNA, 19 nt, Human
ucccgccucuucuucuuca

SEQ ID NO: 3581523 - RNA, 12 nt, Human
ucccgcggugcc

SEQ ID NO: 3581524 - RNA, 14 nt, Human
ucccgcucagcccu

SEQ ID NO: 3581525 - RNA, 15 nt, Human
ucccgcucagcccuc

SEQ ID NO: 3581526 - RNA, 21 nt, Human
ucccggacugcaagcagggcu

SEQ ID NO: 3581527 - RNA, 15 nt, Human
ucccggaggaaaucu

SEQ ID NO: 3581528 - RNA, 21 nt, Human
ucccggagggcccugagcuga

SEQ ID NO: 3581529 - RNA, 17 nt, Human
ucccgggccccacagac

SEQ ID NO: 3581530 - RNA, 21 nt, Human
ucccgggcccguugaggauga

SEQ ID NO: 3581531 - RNA, 14 nt, Human
ucccgggcccuccc

SEQ ID NO: 3581532 - RNA, 21 nt, Human
ucccggggccagcacuuccau

SEQ ID NO: 3581533 - RNA, 17 nt, Human
ucccggguccuuggccc

SEQ ID NO: 3581534 - RNA, 16 nt, Human
ucccgucagggcccaa

SEQ ID NO: 3581535 - RNA, 20 nt, Human
ucccgucagggcccaagucc

SEQ ID NO: 3581536 - RNA, 23 nt, Human
ucccgucagggcccaagucccug

SEQ ID NO: 3581537 - RNA, 22 nt, Human
ucccgugcaaaacaugcuaccu

SEQ ID NO: 3581538 - RNA, 22 nt, Human
ucccguggaacguuuuuccugu

SEQ ID NO: 3581539 - RNA, 12 nt, Human
ucccguggcccc

SEQ ID NO: 3581540 - RNA, 14 nt, Human
ucccguggccccag

SEQ ID NO: 3581541 - RNA, 15 nt, Human
ucccguggccccagc

SEQ ID NO: 3581542 - RNA, 15 nt, Human
ucccguguucuccuu

SEQ ID NO: 3581543 - RNA, 19 nt, Human
ucccguuuuccccaugaca

SEQ ID NO: 3581544 - RNA, 19 nt, Human
ucccuaaaauacauuuaaa

SEQ ID NO: 3581545 - RNA, 20 nt, Human
ucccuaagccaagggccucu

SEQ ID NO: 3581546 - RNA, 16 nt, Human
ucccuaagccagccug

SEQ ID NO: 3581547 - RNA, 14 nt, Human
ucccuaauaaagcu

SEQ ID NO: 3581548 - RNA, 16 nt, Human
ucccuaauaaagcugu

SEQ ID NO: 3581549 - RNA, 13 nt, Human
ucccuacauguau

SEQ ID NO: 3581550 - RNA, 16 nt, Human
ucccuacauuaaacau

SEQ ID NO: 3581551 - RNA, 19 nt, Human
ucccuacccccuaagagcc

SEQ ID NO: 3581552 - RNA, 16 nt, Human
ucccuacccucuagag

SEQ ID NO: 3581553 - RNA, 18 nt, Human
ucccuaccgacccagggu

SEQ ID NO: 3581554 - RNA, 21 nt, Human
ucccuaccgagucucuucucc

SEQ ID NO: 3581555 - RNA, 23 nt, Human
ucccuaccgagucucuucuccac

SEQ ID NO: 3581556 - RNA, 15 nt, Human
ucccuaccucaaccu

SEQ ID NO: 3581557 - RNA, 21 nt, Human
ucccuaccucaaccuguaaau

SEQ ID NO: 3581558 - RNA, 21 nt, Human
ucccuacugaagcccuuguga

SEQ ID NO: 3581559 - RNA, 15 nt, Human
ucccuacuguaauuu

SEQ ID NO: 3581560 - RNA, 15 nt, Human
ucccuacuuccugug

SEQ ID NO: 3581561 - RNA, 18 nt, Human
ucccuagaaacuuccaaa

SEQ ID NO: 3581562 - RNA, 16 nt, Human
ucccuagaucuuucua

SEQ ID NO: 3581563 - RNA, 17 nt, Human
ucccuagcagcccaccc

SEQ ID NO: 3581564 - RNA, 13 nt, Human
ucccuagcaguga

SEQ ID NO: 3581565 - RNA, 20 nt, Human
ucccuagcuuuagacccugg

SEQ ID NO: 3581566 - RNA, 14 nt, Human
ucccuagggcuggg

SEQ ID NO: 3581567 - RNA, 14 nt, Human
ucccuauacugcuu

SEQ ID NO: 3581568 - RNA, 19 nt, Human
ucccuaucuuugccacccu

SEQ ID NO: 3581569 - RNA, 21 nt, Human
ucccuauuuuucucuccuguc

SEQ ID NO: 3581570 - RNA, 20 nt, Human
ucccucaaagcacacgucau

SEQ ID NO: 3581571 - RNA, 18 nt, Human
ucccucaaagcuuccauu

SEQ ID NO: 3581572 - RNA, 18 nt, Human
ucccucaaccucauccuc

SEQ ID NO: 3581573 - RNA, 19 nt, Human
ucccucaaccucauccucu

SEQ ID NO: 3581574 - RNA, 15 nt, Human
ucccucaccuucuga

SEQ ID NO: 3581575 - RNA, 19 nt, Human
ucccucacucgucuccccc

SEQ ID NO: 3581576 - RNA, 21 nt, Human
ucccucacucgucucccccaa

SEQ ID NO: 3581577 - RNA, 14 nt, Human
ucccucagccccuc

SEQ ID NO: 3581578 - RNA, 15 nt, Human
ucccucagccccucu

SEQ ID NO: 3581579 - RNA, 16 nt, Human
ucccucagccccucuu

SEQ ID NO: 3581580 - RNA, 20 nt, Human
ucccucagucuggcccuucc

SEQ ID NO: 3581581 - RNA, 21 nt, Human
ucccucagucuggcccuuccu

SEQ ID NO: 3581582 - RNA, 16 nt, Human
ucccucagugcccuca

SEQ ID NO: 3581583 - RNA, 23 nt, Human
ucccucauuccaccuucccaugc

SEQ ID NO: 3581584 - RNA, 19 nt, Human
ucccucauuucaggagcag

SEQ ID NO: 3581585 - RNA, 23 nt, Human
ucccucauuucaggagcagccuc

SEQ ID NO: 3581586 - RNA, 16 nt, Human
ucccuccaccccagga

SEQ ID NO: 3581587 - RNA, 14 nt, Human
ucccuccaccuacc

SEQ ID NO: 3581588 - RNA, 23 nt, Human
ucccuccaccucccugcaauaaa

SEQ ID NO: 3581589 - RNA, 18 nt, Human
ucccuccacguucacccc

SEQ ID NO: 3581590 - RNA, 12 nt, Human
uccgcuggaggu

SEQ ID NO: 3581591 - RNA, 16 nt, Human
uccgcuucccugguuc

SEQ ID NO: 3581592 - RNA, 16 nt, Human
uccgcuuucuacccag

SEQ ID NO: 3581593 - RNA, 21 nt, Human
uccggaacguagucggcacag

SEQ ID NO: 3581594 - RNA, 18 nt, Human
uccggaaugccacccaca

SEQ ID NO: 3581595 - RNA, 12 nt, Human
uccggacuggug

SEQ ID NO: 3581596 - RNA, 15 nt, Human
uccggagauguagca

SEQ ID NO: 3581597 - RNA, 15 nt, Human
uccggaguagcuggg

SEQ ID NO: 3581598 - RNA, 23 nt, Human
uccggauuggcuuguguguuuca

SEQ ID NO: 3581599 - RNA, 19 nt, Human
uccggcagcuucugccccc

SEQ ID NO: 3581600 - RNA, 19 nt, Human
uccggcauggacaauggac

SEQ ID NO: 3581601 - RNA, 18 nt, Human
uccggcccuccagagccc

SEQ ID NO: 3581602 - RNA, 18 nt, Human
uccggcuaagcaggcgca

SEQ ID NO: 3581603 - RNA, 12 nt, Human
uccggcucccag

SEQ ID NO: 3581604 - RNA, 13 nt, Human
uccggcugugcug

SEQ ID NO: 3581605 - RNA, 19 nt, Human
uccggcugugcugggagaa

SEQ ID NO: 3581606 - RNA, 21 nt, Human
uccgggacguggcaccuccuc

SEQ ID NO: 3581607 - RNA, 22 nt, Human
uccgggggcagcucuggagggg

SEQ ID NO: 3581608 - RNA, 20 nt, Human
uccggguuugagauggacac

SEQ ID NO: 3581609 - RNA, 17 nt, Human
uccggucccugucccag

SEQ ID NO: 3581610 - RNA, 20 nt, Human
uccggucggaucucucuccu

SEQ ID NO: 3581611 - RNA, 15 nt, Human
uccgguguucuaaga

SEQ ID NO: 3581612 - RNA, 19 nt, Human
uccgguugcauacuggacu

SEQ ID NO: 3581613 - RNA, 16 nt, Human
uccgguuuacuuuaac

SEQ ID NO: 3581614 - RNA, 13 nt, Human
uccguaaaaauga

SEQ ID NO: 3581615 - RNA, 15 nt, Human
uccguaaaaaugauu

SEQ ID NO: 3581616 - RNA, 14 nt, Human
uccguaguucccug

SEQ ID NO: 3581617 - RNA, 15 nt, Human
uccguaguucccuga

SEQ ID NO: 3581618 - RNA, 13 nt, Human
uccguauuucaga

SEQ ID NO: 3581619 - RNA, 23 nt, Human
uccgucaaaacagauuguuugca

SEQ ID NO: 3581620 - RNA, 14 nt, Human
uccgucacuaccug

SEQ ID NO: 3581621 - RNA, 14 nt, Human
uccgugcuaaggac

SEQ ID NO: 3581622 - RNA, 15 nt, Human
uccgugcuaaggacu

SEQ ID NO: 3581623 - RNA, 14 nt, Human
uccgugcuuaacca

SEQ ID NO: 3581624 - RNA, 21 nt, Human
uccgugcuuaaccaaagaagc

SEQ ID NO: 3581625 - RNA, 24 nt, Human
uccgugcuuguuugcucaccuggg

SEQ ID NO: 3581626 - RNA, 15 nt, Human
uccguggguugcuaa

SEQ ID NO: 3581627 - RNA, 16 nt, Human
uccgugugggagaccg

SEQ ID NO: 3581628 - RNA, 13 nt, Human
uccguuaaaauac

SEQ ID NO: 3581629 - RNA, 15 nt, Human
uccguuaaaauacca

SEQ ID NO: 3581630 - RNA, 16 nt, Human
uccguucacaugugug

SEQ ID NO: 3581631 - RNA, 22 nt, Human
uccuaaaacaaaagcucaucca

SEQ ID NO: 3581632 - RNA, 16 nt, Human
uccuaaaacaacagau

SEQ ID NO: 3581633 - RNA, 17 nt, Human
uccuaaaacaccuggua

SEQ ID NO: 3581634 - RNA, 13 nt, Human
uccuaaaaggccc

SEQ ID NO: 3581635 - RNA, 16 nt, Human
uccuaaaaggcccaga

SEQ ID NO: 3581636 - RNA, 22 nt, Human
uccuaaaauuauggaaacagau

SEQ ID NO: 3581637 - RNA, 23 nt, Human
uccuaaacugagacaaugccuug

SEQ ID NO: 3581638 - RNA, 17 nt, Human
uccuaaagaacaaagua

SEQ ID NO: 3581639 - RNA, 11 nt, Human
uccuaaauagc

SEQ ID NO: 3581640 - RNA, 19 nt, Human
uccuaaauauauuuuaaga

SEQ ID NO: 3581641 - RNA, 21 nt, Human
uccuaaauauuaugagaugcu

SEQ ID NO: 3581642 - RNA, 19 nt, Human
uccuaaaugcagugaauug

SEQ ID NO: 3581643 - RNA, 17 nt, Human
uccuaacugaagagaca

SEQ ID NO: 3581644 - RNA, 13 nt, Human
uccuaagaaagag

SEQ ID NO: 3581645 - RNA, 20 nt, Human
uccuaagaaagaggagugcu

SEQ ID NO: 3581646 - RNA, 20 nt, Human
uccuaagaaauaugugagau

SEQ ID NO: 3581647 - RNA, 16 nt, Human
uccuaagaagcuucua

SEQ ID NO: 3581648 - RNA, 19 nt, Human
uccuaagaagcuucuaaua

SEQ ID NO: 3581649 - RNA, 19 nt, Human
uccuaagacacaaaugcau

SEQ ID NO: 3581650 - RNA, 16 nt, Human
uccuaagagugcuggg

SEQ ID NO: 3581651 - RNA, 17 nt, Human
uccuaagagugcugggc

SEQ ID NO: 3581652 - RNA, 15 nt, Human
uccuaagcaucuaag

SEQ ID NO: 3581653 - RNA, 16 nt, Human
uccuaagccuguggcu

SEQ ID NO: 3581654 - RNA, 20 nt, Human
uccuaagccuguggcugugg

SEQ ID NO: 3581655 - RNA, 16 nt, Human
uccuaagcuauucagu

SEQ ID NO: 3581656 - RNA, 18 nt, Human
uccuaagcuauucaguaa

SEQ ID NO: 3581657 - RNA, 20 nt, Human
uccuaagggucgaaagcucu

SEQ ID NO: 3581658 - RNA, 21 nt, Human
uccuaaguaucaaguauagaa

SEQ ID NO: 3581659 - RNA, 22 nt, Human
uccuaaguucuuagauaucuuu

SEQ ID NO: 3581660 - RNA, 16 nt, Human
uccuaauaaaaaggug

SEQ ID NO: 3581661 - RNA, 18 nt, Human
uccuaaucacucagagca

SEQ ID NO: 3581662 - RNA, 14 nt, Human
uccuaauggugaug

SEQ ID NO: 3581663 - RNA, 18 nt, Human
uccuaauuaccagucuuu

SEQ ID NO: 3581664 - RNA, 16 nt, Human
uccuaauuccacagcu

SEQ ID NO: 3581665 - RNA, 17 nt, Human
uccuaauuccacagcug

SEQ ID NO: 3581666 - RNA, 18 nt, Human
uccuaauuccacagcugc

SEQ ID NO: 3581667 - RNA, 14 nt, Human
uccuaauuucccuu

SEQ ID NO: 3581668 - RNA, 19 nt, Human
uccuaauuucccuucuugc

SEQ ID NO: 3581669 - RNA, 16 nt, Human
uccuaauuucuccucc

SEQ ID NO: 3581670 - RNA, 22 nt, Human
uccuacaagagcagccuguggc

SEQ ID NO: 3581671 - RNA, 17 nt, Human
uccuacaagauuuagaa

SEQ ID NO: 3581672 - RNA, 18 nt, Human
uccuacaagauuuagaaa

SEQ ID NO: 3581673 - RNA, 18 nt, Human
uccuacacccuuggacuu

SEQ ID NO: 3581674 - RNA, 20 nt, Human
uccuacacccuuggacuuga

SEQ ID NO: 3581675 - RNA, 13 nt, Human
uccuacagaaaaa

SEQ ID NO: 3581676 - RNA, 14 nt, Human
uccuacagaaaaac

SEQ ID NO: 3581677 - RNA, 17 nt, Human
uccuacagaaaaaccuu

SEQ ID NO: 3581678 - RNA, 20 nt, Human
uccuacagaaaaaccuuggg

SEQ ID NO: 3581679 - RNA, 16 nt, Human
uccuacagauagucaa

SEQ ID NO: 3581680 - RNA, 21 nt, Human
uccuacagcacuacugggugu

SEQ ID NO: 3581681 - RNA, 16 nt, Human
uccuacaggcagucuc

SEQ ID NO: 3581682 - RNA, 17 nt, Human
uccuacaggcagucucu

SEQ ID NO: 3581683 - RNA, 20 nt, Human
uccuacauuaauuaucuagu

SEQ ID NO: 3581684 - RNA, 20 nt, Human
uccuaccaauagauucccca

SEQ ID NO: 3581685 - RNA, 14 nt, Human
uccuaccaaugcau

SEQ ID NO: 3581686 - RNA, 16 nt, Human
uccuaccaaugcaugc

SEQ ID NO: 3581687 - RNA, 17 nt, Human
uccuaccaaugcaugca

SEQ ID NO: 3581688 - RNA, 15 nt, Human
uccuacccacaccuc

SEQ ID NO: 3581689 - RNA, 20 nt, Human
uccuacccacaccucugcca

SEQ ID NO: 3581690 - RNA, 21 nt, Human
uccuacccacaccucugccag

SEQ ID NO: 3581691 - RNA, 18 nt, Human
uccuacccacccuccuuu

SEQ ID NO: 3581692 - RNA, 18 nt, Human
uccuaccccaauuccuug

SEQ ID NO: 3581693 - RNA, 13 nt, Human
uccuacccccugu

SEQ ID NO: 3581694 - RNA, 12 nt, Human
uccuaccccucc

SEQ ID NO: 3581695 - RNA, 14 nt, Human
uccuaccccuccca

SEQ ID NO: 3581696 - RNA, 16 nt, Human
uccuaccccucccagc

SEQ ID NO: 3581697 - RNA, 18 nt, Human
uccuaccccucccagcug

SEQ ID NO: 3581698 - RNA, 17 nt, Human
uccuacccucgggccca

SEQ ID NO: 3581699 - RNA, 14 nt, Human
uccuacccuuuucu

SEQ ID NO: 3581700 - RNA, 12 nt, Human
uccuaccucagc

SEQ ID NO: 3581701 - RNA, 20 nt, Human
uccuacgucaaacaugaagu

SEQ ID NO: 3581702 - RNA, 16 nt, Human
uccuacuaggcaaaau

SEQ ID NO: 3581703 - RNA, 12 nt, Human
uccuacuccuga

SEQ ID NO: 3581704 - RNA, 14 nt, Human
uccuacuccugacu

SEQ ID NO: 3581705 - RNA, 13 nt, Human
uccuacucugugu

SEQ ID NO: 3581706 - RNA, 17 nt, Human
uccuacucuucucucug

SEQ ID NO: 3581707 - RNA, 19 nt, Human
uccuacuggucucucuaug

SEQ ID NO: 3581708 - RNA, 18 nt, Human
uccuacuuuuaaagaauu

SEQ ID NO: 3581709 - RNA, 19 nt, Human
uccuagagaacgcagcccu

SEQ ID NO: 3581710 - RNA, 18 nt, Human
uccuagagacagaagcag

SEQ ID NO: 3581711 - RNA, 20 nt, Human
uccuagaggcccuuugcugu

SEQ ID NO: 3581712 - RNA, 17 nt, Human
uccuagagggaggggcc

SEQ ID NO: 3581713 - RNA, 16 nt, Human
uccuagauaaaaagau

SEQ ID NO: 3581714 - RNA, 13 nt, Human
uccuagauccuaa

SEQ ID NO: 3581715 - RNA, 17 nt, Human
uccuagcacacacuuuu

SEQ ID NO: 3581716 - RNA, 18 nt, Human
uccuagcacacacuuuug

SEQ ID NO: 3581717 - RNA, 20 nt, Human
uccuagcacagauggccagc

SEQ ID NO: 3581718 - RNA, 21 nt, Human
uccuagccugugccucuggga

SEQ ID NO: 3581719 - RNA, 16 nt, Human
uccuagccuguuucuu

SEQ ID NO: 3581720 - RNA, 19 nt, Human
uccuagccuguuucuuccu

SEQ ID NO: 3581721 - RNA, 17 nt, Human
uccuagcugcacagggc

SEQ ID NO: 3581722 - RNA, 23 nt, Human
uccuagcuggagaggagcccugc

SEQ ID NO: 3581723 - RNA, 12 nt, Human
uccuagcugugu

SEQ ID NO: 3581724 - RNA, 17 nt, Human
uccuagcugugugaaua

SEQ ID NO: 3581725 - RNA, 20 nt, Human
uccuaggagguaaugaccau

SEQ ID NO: 3581726 - RNA, 19 nt, Human
uccuaggcaggacaugcug

SEQ ID NO: 3581727 - RNA, 23 nt, Human
uccuaggcauucuggaccucugg

SEQ ID NO: 3581728 - RNA, 19 nt, Human
uccuaggcauuugcugaau

SEQ ID NO: 3581729 - RNA, 20 nt, Human
uccuaggcuccaccccaucc

SEQ ID NO: 3581730 - RNA, 23 nt, Human
uccuagggcauuguaucugucuu

SEQ ID NO: 3581731 - RNA, 18 nt, Human
uccuaggggaaugagggg

SEQ ID NO: 3581732 - RNA, 14 nt, Human
uccuaguaagaaga

SEQ ID NO: 3581733 - RNA, 18 nt, Human
uccuagucucccucacag

SEQ ID NO: 3581734 - RNA, 21 nt, Human
uccuaguuaaucaucauuuuu

SEQ ID NO: 3581735 - RNA, 19 nt, Human
ucuaggggucaggcuccau

SEQ ID NO: 3581736 - RNA, 18 nt, Human
ucuaggguuauugcauuu

SEQ ID NO: 3581737 - RNA, 21 nt, Human
ucuaggguugcuggagccuga

SEQ ID NO: 3581738 - RNA, 22 nt, Human
ucuaggguugcuggagccugag

SEQ ID NO: 3581739 - RNA, 21 nt, Human
ucuagguacgaugacaguguu

SEQ ID NO: 3581740 - RNA, 17 nt, Human
ucuagguccccauacuc

SEQ ID NO: 3581741 - RNA, 18 nt, Human
ucuagguggcaaggcugu

SEQ ID NO: 3581742 - RNA, 14 nt, Human
ucuagguucuaaaa

SEQ ID NO: 3581743 - RNA, 17 nt, Human
ucuagguuuaacucaga

SEQ ID NO: 3581744 - RNA, 19 nt, Human
ucuagguuuaacucagauc

SEQ ID NO: 3581745 - RNA, 14 nt, Human
ucuaguacuagaaa

SEQ ID NO: 3581746 - RNA, 15 nt, Human
ucuaguaugaaauua

SEQ ID NO: 3581747 - RNA, 24 nt, Human
ucuaguauuccagaccugaagaau

SEQ ID NO: 3581748 - RNA, 20 nt, Human
ucuagucuccuuugcacuga

SEQ ID NO: 3581749 - RNA, 14 nt, Human
ucuagucucucugg

SEQ ID NO: 3581750 - RNA, 12 nt, Human
ucuagugaugau

SEQ ID NO: 3581751 - RNA, 19 nt, Human
ucuagugcagcugaaauug

SEQ ID NO: 3581752 - RNA, 22 nt, Human
ucuagugcagcugauuuuaaca

SEQ ID NO: 3581753 - RNA, 17 nt, Human
ucuagugcugcugaaga

SEQ ID NO: 3581754 - RNA, 15 nt, Human
ucuagugcugugaaa

SEQ ID NO: 3581755 - RNA, 23 nt, Human
ucuagugcugugaaaaaaaaaau

SEQ ID NO: 3581756 - RNA, 16 nt, Human
ucuaguggucuuugua

SEQ ID NO: 3581757 - RNA, 19 nt, Human
ucuaguggucuuuguaaga

SEQ ID NO: 3581758 - RNA, 12 nt, Human
ucuaguguauca

SEQ ID NO: 3581759 - RNA, 19 nt, Human
ucuaguguaucaaaaugcu

SEQ ID NO: 3581760 - RNA, 16 nt, Human
ucuaguucacucucca

SEQ ID NO: 3581761 - RNA, 16 nt, Human
ucuaguucugccagga

SEQ ID NO: 3581762 - RNA, 13 nt, Human
ucuaguucuuugu

SEQ ID NO: 3581763 - RNA, 19 nt, Human
ucuaguugaggaguuuccu

SEQ ID NO: 3581764 - RNA, 21 nt, Human
ucuaguugccaaaucuggcuc

SEQ ID NO: 3581765 - RNA, 22 nt, Human
ucuaguuguuugauucagacag

SEQ ID NO: 3581766 - RNA, 22 nt, Human
ucuaguuuaauuaaucuguaau

SEQ ID NO: 3581767 - RNA, 13 nt, Human
ucuaguuucucuu

SEQ ID NO: 3581768 - RNA, 21 nt, Human
ucuaguuugauuaaauucuug

SEQ ID NO: 3581769 - RNA, 11 nt, Human
ucuaguuuuca

SEQ ID NO: 3581770 - RNA, 20 nt, Human
ucuaguuuucaguuuguaua

SEQ ID NO: 3581771 - RNA, 22 nt, Human
ucuaguuuuuuacuuuuguuua

SEQ ID NO: 3581772 - RNA, 16 nt, Human
ucuauaaaagaaacac

SEQ ID NO: 3581773 - RNA, 14 nt, Human
ucuauaaaauagau

SEQ ID NO: 3581774 - RNA, 13 nt, Human
ucuauaaacacug

SEQ ID NO: 3581775 - RNA, 14 nt, Human
ucuauaaacacugu

SEQ ID NO: 3581776 - RNA, 17 nt, Human
ucuauaaacacuguuug

SEQ ID NO: 3581777 - RNA, 21 nt, Human
ucuauaaacuauaaccucucc

SEQ ID NO: 3581778 - RNA, 12 nt, Human
ucuauaaagcau

SEQ ID NO: 3581779 - RNA, 14 nt, Human
ucuauaaagcauuu

SEQ ID NO: 3581780 - RNA, 17 nt, Human
ucuauaaagcauuuaac

SEQ ID NO: 3581781 - RNA, 19 nt, Human
ucuauaaagcauuuaaccc

SEQ ID NO: 3581782 - RNA, 13 nt, Human
ucuauaacagaua

SEQ ID NO: 3581783 - RNA, 19 nt, Human
ucuauaaucccagcacuuu

SEQ ID NO: 3581784 - RNA, 21 nt, Human
ucuauaaucccagcacuuugg

SEQ ID NO: 3581785 - RNA, 15 nt, Human
ucuauaauuuuacaa

SEQ ID NO: 3581786 - RNA, 22 nt, Human
ucuauacaaauauaaaucuuaa

SEQ ID NO: 3581787 - RNA, 15 nt, Human
ucuauacaucucucc

SEQ ID NO: 3581788 - RNA, 15 nt, Human
ucuauaccaauaaag

SEQ ID NO: 3581789 - RNA, 18 nt, Human
ucuauaccaauaaaguga

SEQ ID NO: 3581790 - RNA, 16 nt, Human
ucuauacccacccaga

SEQ ID NO: 3581791 - RNA, 14 nt, Human
ucuauagaaagugu

SEQ ID NO: 3581792 - RNA, 21 nt, Human
ucuauagaaaguguucuguua

SEQ ID NO: 3581793 - RNA, 24 nt, Human
ucuauagaaaguguucuguuacaa

SEQ ID NO: 3581794 - RNA, 16 nt, Human
ucuauagacucuagga

SEQ ID NO: 3581795 - RNA, 15 nt, Human
ucuauagcaucacuu

SEQ ID NO: 3581796 - RNA, 20 nt, Human
ucuauagcaucacuuaaaac

SEQ ID NO: 3581797 - RNA, 17 nt, Human
ucuauagccaaaaauag

SEQ ID NO: 3581798 - RNA, 19 nt, Human
ucuauagccaaaaauagcu

SEQ ID NO: 3581799 - RNA, 20 nt, Human
ucuauagccaaaaauagcua

SEQ ID NO: 3581800 - RNA, 12 nt, Human
ucuauaguucua

SEQ ID NO: 3581801 - RNA, 21 nt, Human
ucuauaguugauauguuuuau

SEQ ID NO: 3581802 - RNA, 16 nt, Human
ucuauaguugucagua

SEQ ID NO: 3581803 - RNA, 23 nt, Human
ucuauauaaaauaacuaaaaugu

SEQ ID NO: 3581804 - RNA, 19 nt, Human
ucuauauauaauucuguac

SEQ ID NO: 3581805 - RNA, 20 nt, Human
ucuauauauaauucuguaca

SEQ ID NO: 3581806 - RNA, 14 nt, Human
ucuauauaugugua

SEQ ID NO: 3581807 - RNA, 15 nt, Human
ucuauauauguguau

SEQ ID NO: 3581808 - RNA, 19 nt, Human
ucuauauauguguauguac

SEQ ID NO: 3581809 - RNA, 14 nt, Human
ucuauaugaauuua

SEQ ID NO: 3581810 - RNA, 21 nt, Human
ucuauaugaauuuaaauauaa

SEQ ID NO: 3581811 - RNA, 21 nt, Human
ucuauauguacuugucaaaga

SEQ ID NO: 3581812 - RNA, 14 nt, Human
ucuauauuuucauu

SEQ ID NO: 3581813 - RNA, 22 nt, Human
ucuaucaaccccagacacuggu

SEQ ID NO: 3581814 - RNA, 20 nt, Human
ucuaucaacuuuaaucaagu

SEQ ID NO: 3581815 - RNA, 17 nt, Human
ucuaucaagucaaucau

SEQ ID NO: 3581816 - RNA, 15 nt, Human
ucuaucaauagucaa

SEQ ID NO: 3581817 - RNA, 14 nt, Human
ucuaucauuaaagu

SEQ ID NO: 3581818 - RNA, 14 nt, Human
ucuaucauuuaaua

SEQ ID NO: 3581819 - RNA, 18 nt, Human
ucuaucauuuaauaauau

SEQ ID NO: 3581820 - RNA, 17 nt, Human
ucuaucauuuuuguaca

SEQ ID NO: 3581821 - RNA, 14 nt, Human
ucuaucuaaaugau

SEQ ID NO: 3581822 - RNA, 12 nt, Human
ucuaucuaauga

SEQ ID NO: 3581823 - RNA, 16 nt, Human
ucuaucuaaugacaug

SEQ ID NO: 3581824 - RNA, 14 nt, Human
ucuaucuauuugag

SEQ ID NO: 3581825 - RNA, 16 nt, Human
ucuaucugggccuggg

SEQ ID NO: 3581826 - RNA, 17 nt, Human
ucuaucuuccaaaugca

SEQ ID NO: 3581827 - RNA, 14 nt, Human
ucuaucuuguucca

SEQ ID NO: 3581828 - RNA, 17 nt, Human
ucuaugaaauauuaugu

SEQ ID NO: 3581829 - RNA, 18 nt, Human
ucuaugaaguauauaaug

SEQ ID NO: 3581830 - RNA, 12 nt, Human
ucuaugagaaaa

SEQ ID NO: 3581831 - RNA, 17 nt, Human
ucuaugagaaaagaggc

SEQ ID NO: 3581832 - RNA, 15 nt, Human
ucuaugcauuuucug

SEQ ID NO: 3581833 - RNA, 15 nt, Human
ucuaugccaaagauc

SEQ ID NO: 3581834 - RNA, 18 nt, Human
ucuaugcucauaacugug

SEQ ID NO: 3581835 - RNA, 22 nt, Human
ucuaugcugcuuuuauaucugu

SEQ ID NO: 3581836 - RNA, 21 nt, Human
ucuaugcuguuuguagugaaa

SEQ ID NO: 3581837 - RNA, 18 nt, Human
ucuaugcuuuccaaaccu

SEQ ID NO: 3581838 - RNA, 23 nt, Human
ucuaugcuuuccaaaccuuaucu

SEQ ID NO: 3581839 - RNA, 21 nt, Human
ucuauggacagggcugucucu

SEQ ID NO: 3581840 - RNA, 22 nt, Human
ucuaugguuaugaaagaauaua

SEQ ID NO: 3581841 - RNA, 21 nt, Human
ucuauguacuaguacugugua

SEQ ID NO: 3581842 - RNA, 15 nt, Human
ucuauguaggaaaaa

SEQ ID NO: 3581843 - RNA, 13 nt, Human
ucuauguaucaaa

SEQ ID NO: 3581844 - RNA, 17 nt, Human
ucuaugugcuuguaaaa

SEQ ID NO: 3581845 - RNA, 14 nt, Human
ucuauguuaauauu

SEQ ID NO: 3581846 - RNA, 12 nt, Human
ucuauguuuacu

SEQ ID NO: 3581847 - RNA, 13 nt, Human
ucuauuaaaagac

SEQ ID NO: 3581848 - RNA, 23 nt, Human
ucuauuaaagugcuaagguucua

SEQ ID NO: 3581849 - RNA, 13 nt, Human
ucuauuaauauau

SEQ ID NO: 3581850 - RNA, 20 nt, Human
ucuauuagcuuacugauuaa

SEQ ID NO: 3581851 - RNA, 14 nt, Human
ucuauuauacugua

SEQ ID NO: 3581852 - RNA, 19 nt, Human
ucuauuauacuguauuaag

SEQ ID NO: 3581853 - RNA, 22 nt, Human
ucuauuaugaaugugaagccuu

SEQ ID NO: 3581854 - RNA, 20 nt, Human
ucuauuauggaaaacugugu

SEQ ID NO: 3581855 - RNA, 12 nt, Human
ucuauucagcuu

SEQ ID NO: 3581856 - RNA, 13 nt, Human
ucuauuccagcuc

SEQ ID NO: 3581857 - RNA, 19 nt, Human
ucuauuccagcucauucau

SEQ ID NO: 3581858 - RNA, 20 nt, Human
ucuauuccagcucauucauu

SEQ ID NO: 3581859 - RNA, 17 nt, Human
ucuauucucaaaguuuc

SEQ ID NO: 3581860 - RNA, 13 nt, Human
ucuauucucucca

SEQ ID NO: 3581861 - RNA, 19 nt, Human
ucuauucucuccucagacu

SEQ ID NO: 3581862 - RNA, 12 nt, Human
ucuauucugugu

SEQ ID NO: 3581863 - RNA, 16 nt, Human
ucuauucuuuaacucc

SEQ ID NO: 3581864 - RNA, 13 nt, Human
ucuauugccuucu

SEQ ID NO: 3581865 - RNA, 17 nt, Human
ucuauugcuggcaaaga

SEQ ID NO: 3581866 - RNA, 22 nt, Human
ucuauugcuggcaaagacagaa

SEQ ID NO: 3581867 - RNA, 12 nt, Human
ucuauuggucuc

SEQ ID NO: 3581868 - RNA, 23 nt, Human
ucuauuguuguacacagaaauac

SEQ ID NO: 3581869 - RNA, 16 nt, Human
ucuauuguuuauucuu

SEQ ID NO: 3581870 - RNA, 13 nt, Human
ucuauuuaaauuc

SEQ ID NO: 3581871 - RNA, 14 nt, Human
ucuauuuaaauucu

SEQ ID NO: 3581872 - RNA, 15 nt, Human
ucuauuuaaauucuu

SEQ ID NO: 3581873 - RNA, 18 nt, Human
ucuauuuaaauucuuuuu

SEQ ID NO: 3581874 - RNA, 15 nt, Human
ucuauuuaaguaaaa

SEQ ID NO: 3581875 - RNA, 12 nt, Human
ucuauuuaauau

SEQ ID NO: 3581876 - RNA, 18 nt, Human
ucuauuuaauuaggaaaa

SEQ ID NO: 3581877 - RNA, 20 nt, Human
ucuauuuaauuaggaaaaaa

SEQ ID NO: 3581878 - RNA, 23 nt, Human
ucuauuuaauuuugacacugaaa

SEQ ID NO: 3581879 - RNA, 15 nt, Human
ucuauuuaucuucau

SEQ ID NO: 3581880 - RNA, 22 nt, Human
ucuccauccuuucugccucuca

SEQ ID NO: 3581881 - RNA, 11 nt, Human
ucuccaucucu

SEQ ID NO: 3581882 - RNA, 14 nt, Human
ucuccaucucucug

SEQ ID NO: 3581883 - RNA, 13 nt, Human
ucuccaucuguca

SEQ ID NO: 3581884 - RNA, 17 nt, Human
ucuccauggcaucuucg

SEQ ID NO: 3581885 - RNA, 16 nt, Human
ucuccauggcccugcc

SEQ ID NO: 3581886 - RNA, 17 nt, Human
ucuccauggcccugcca

SEQ ID NO: 3581887 - RNA, 20 nt, Human
ucuccauggcccugccaugc

SEQ ID NO: 3581888 - RNA, 16 nt, Human
ucuccauguuugaugu

SEQ ID NO: 3581889 - RNA, 15 nt, Human
ucuccauucugcucc

SEQ ID NO: 3581890 - RNA, 21 nt, Human
ucuccauucugcuccuucccc

SEQ ID NO: 3581891 - RNA, 19 nt, Human
ucuccauugugccuaaguc

SEQ ID NO: 3581892 - RNA, 19 nt, Human
ucuccauuuaauaauuaua

SEQ ID NO: 3581893 - RNA, 19 nt, Human
ucuccauuuuggugucuuu

SEQ ID NO: 3581894 - RNA, 18 nt, Human
ucucccaaaaaacuacuu

SEQ ID NO: 3581895 - RNA, 18 nt, Human
ucucccaaagugcuggga

SEQ ID NO: 3581896 - RNA, 12 nt, Human
ucucccacacug

SEQ ID NO: 3581897 - RNA, 12 nt, Human
ucucccacccuc

SEQ ID NO: 3581898 - RNA, 14 nt, Human
ucucccacccucuu

SEQ ID NO: 3581899 - RNA, 16 nt, Human
ucucccacgugggaga

SEQ ID NO: 3581900 - RNA, 18 nt, Human
ucucccagaaucccagcc

SEQ ID NO: 3581901 - RNA, 21 nt, Human
ucucccagauaaugugaaaau

SEQ ID NO: 3581902 - RNA, 23 nt, Human
ucucccagauaaugugaaaaugg

SEQ ID NO: 3581903 - RNA, 13 nt, Human
ucucccaggccag

SEQ ID NO: 3581904 - RNA, 14 nt, Human
ucucccaggccagg

SEQ ID NO: 3581905 - RNA, 18 nt, Human
ucucccaggccaggcucc

SEQ ID NO: 3581906 - RNA, 23 nt, Human
ucucccaggccaggcuccuuccu

SEQ ID NO: 3581907 - RNA, 14 nt, Human
ucucccaggcccca

SEQ ID NO: 3581908 - RNA, 17 nt, Human
ucucccaggccccauga

SEQ ID NO: 3581909 - RNA, 18 nt, Human
ucucccaggggcuggcuu

SEQ ID NO: 3581910 - RNA, 23 nt, Human
ucucccaggggcuggcuucagga

SEQ ID NO: 3581911 - RNA, 17 nt, Human
ucucccagguaccagcu

SEQ ID NO: 3581912 - RNA, 15 nt, Human
ucucccagucauuua

SEQ ID NO: 3581913 - RNA, 18 nt, Human
ucucccagucuacccaga

SEQ ID NO: 3581914 - RNA, 20 nt, Human
ucucccagucuacccagaga

SEQ ID NO: 3581915 - RNA, 19 nt, Human
ucucccaucucuuccuuga

SEQ ID NO: 3581916 - RNA, 15 nt, Human
ucucccaucuuaacu

SEQ ID NO: 3581917 - RNA, 18 nt, Human
ucucccauggagccccag

SEQ ID NO: 3581918 - RNA, 17 nt, Human
ucucccauugucccucu

SEQ ID NO: 3581919 - RNA, 19 nt, Human
ucuccccaaugagacuugc

SEQ ID NO: 3581920 - RNA, 23 nt, Human
ucuccccaaugagacuugccuuc

SEQ ID NO: 3581921 - RNA, 10 nt, Human
ucuccccaca

SEQ ID NO: 3581922 - RNA, 14 nt, Human
ucuccccaccccua

SEQ ID NO: 3581923 - RNA, 17 nt, Human
ucuccccaccccuaccc

SEQ ID NO: 3581924 - RNA, 19 nt, Human
ucuccccacgagggcuggc

SEQ ID NO: 3581925 - RNA, 12 nt, Human
ucuccccagaau

SEQ ID NO: 3581926 - RNA, 15 nt, Human
ucuccccagcccaga

SEQ ID NO: 3581927 - RNA, 18 nt, Human
ucuccccagcccagagac

SEQ ID NO: 3581928 - RNA, 15 nt, Human
ucuccccagcuccca

SEQ ID NO: 3581929 - RNA, 12 nt, Human
ucuccccagugu

SEQ ID NO: 3581930 - RNA, 21 nt, Human
ucucccccaacagcuggaccc

SEQ ID NO: 3581931 - RNA, 13 nt, Human
ucucccccacccu

SEQ ID NO: 3581932 - RNA, 20 nt, Human
ucucccccacccuuguucca

SEQ ID NO: 3581933 - RNA, 21 nt, Human
ucucccccacccuuguuccag

SEQ ID NO: 3581934 - RNA, 12 nt, Human
ucucccccagcc

SEQ ID NO: 3581935 - RNA, 15 nt, Human
ucucccccagcccca

SEQ ID NO: 3581936 - RNA, 15 nt, Human
ucuccccccgccugc

SEQ ID NO: 3581937 - RNA, 16 nt, Human
ucuccccgcaguguuu

SEQ ID NO: 3581938 - RNA, 12 nt, Human
ucuccccugccc

SEQ ID NO: 3581939 - RNA, 15 nt, Human
ucuccccugccccca

SEQ ID NO: 3581940 - RNA, 16 nt, Human
ucuccccugcccccag

SEQ ID NO: 3581941 - RNA, 22 nt, Human
ucuccccugcccccaggacugg

SEQ ID NO: 3581942 - RNA, 23 nt, Human
ucuccccugcccccaggacuggg

SEQ ID NO: 3581943 - RNA, 18 nt, Human
ucuccccugcccccugca

SEQ ID NO: 3581944 - RNA, 21 nt, Human
ucuccccugcccccugcagga

SEQ ID NO: 3581945 - RNA, 21 nt, Human
ucuccccuuccauuucugccu

SEQ ID NO: 3581946 - RNA, 15 nt, Human
ucucccgcugcugcu

SEQ ID NO: 3581947 - RNA, 16 nt, Human
ucucccgguucuucca

SEQ ID NO: 3581948 - RNA, 13 nt, Human
ucucccgucaggg

SEQ ID NO: 3581949 - RNA, 20 nt, Human
ucucccuagcuccuccccuu

SEQ ID NO: 3581950 - RNA, 23 nt, Human
ucucccucaacaagggagagacc

SEQ ID NO: 3581951 - RNA, 18 nt, Human
ucucccucagucuggccc

SEQ ID NO: 3581952 - RNA, 12 nt, Human
ucucccuccccu

SEQ ID NO: 3581953 - RNA, 14 nt, Human
ucucccucccuugg

SEQ ID NO: 3581954 - RNA, 21 nt, Human
ucucccuccuccaggaagccu

SEQ ID NO: 3581955 - RNA, 18 nt, Human
ucucccuccucugcccgg

SEQ ID NO: 3581956 - RNA, 19 nt, Human
ucucccucgaacccacacu

SEQ ID NO: 3581957 - RNA, 21 nt, Human
ucucccucuaggcucugccuu

SEQ ID NO: 3581958 - RNA, 23 nt, Human
ucucccucucacugucugagagu

SEQ ID NO: 3581959 - RNA, 15 nt, Human
ucucccucuccugcc

SEQ ID NO: 3581960 - RNA, 21 nt, Human
ucucccucuccugccuacuca

SEQ ID NO: 3581961 - RNA, 12 nt, Human
ucucccucuggc

SEQ ID NO: 3581962 - RNA, 13 nt, Human
ucucccucugguc

SEQ ID NO: 3581963 - RNA, 15 nt, Human
ucucccugacccugu

SEQ ID NO: 3581964 - RNA, 15 nt, Human
ucucccugcauggca

SEQ ID NO: 3581965 - RNA, 14 nt, Human
ucucccugccagag

SEQ ID NO: 3581966 - RNA, 12 nt, Human
ucucccugccgc

SEQ ID NO: 3581967 - RNA, 13 nt, Human
ucucccugccugg

SEQ ID NO: 3581968 - RNA, 14 nt, Human
ucucccugccuggc

SEQ ID NO: 3581969 - RNA, 15 nt, Human
ucucccugccuggcc

SEQ ID NO: 3581970 - RNA, 13 nt, Human
ucucccuggcucc

SEQ ID NO: 3581971 - RNA, 15 nt, Human
ucucccuggcucccu

SEQ ID NO: 3581972 - RNA, 16 nt, Human
ucucccuggugcuuau

SEQ ID NO: 3581973 - RNA, 12 nt, Human
ucucccuuaccc

SEQ ID NO: 3581974 - RNA, 23 nt, Human
ucuccgaccagacaccuugacag

SEQ ID NO: 3581975 - RNA, 17 nt, Human
ucuccgacugcuaggga

SEQ ID NO: 3581976 - RNA, 15 nt, Human
ucuccgccccugagc

SEQ ID NO: 3581977 - RNA, 17 nt, Human
ucuccgccccugagccc

SEQ ID NO: 3581978 - RNA, 14 nt, Human
ucuccggccucucc

SEQ ID NO: 3581979 - RNA, 17 nt, Human
ucuccggccucuccagc

SEQ ID NO: 3581980 - RNA, 21 nt, Human
ucuccggccucuccagccuca

SEQ ID NO: 3581981 - RNA, 15 nt, Human
ucuccggcucccagc

SEQ ID NO: 3581982 - RNA, 16 nt, Human
ucuccggcucccagcc

SEQ ID NO: 3581983 - RNA, 18 nt, Human
ucuccggcucccagccuc

SEQ ID NO: 3581984 - RNA, 19 nt, Human
ucuccggggccauuugcaa

SEQ ID NO: 3581985 - RNA, 22 nt, Human
ucuccguuagcuccuguggccc

SEQ ID NO: 3581986 - RNA, 23 nt, Human
ucuccguuagcuccuguggcccc

SEQ ID NO: 3581987 - RNA, 15 nt, Human
ucuccuacugaggau

SEQ ID NO: 3581988 - RNA, 17 nt, Human
ucuccuagacugacccu

SEQ ID NO: 3581989 - RNA, 15 nt, Human
ucuccuaggcauucu

SEQ ID NO: 3581990 - RNA, 16 nt, Human
ucuccuagggcuaugg

SEQ ID NO: 3581991 - RNA, 16 nt, Human
ucuccuauaaucuguc

SEQ ID NO: 3581992 - RNA, 17 nt, Human
ucuccuauaaucuguca

SEQ ID NO: 3581993 - RNA, 18 nt, Human
ucuccuauaaucugucaa

SEQ ID NO: 3581994 - RNA, 23 nt, Human
ucuccuauauauuucuauuauua

SEQ ID NO: 3581995 - RNA, 15 nt, Human
ucuccuauguguaag

SEQ ID NO: 3581996 - RNA, 19 nt, Human
ucuccuauguguaagguga

SEQ ID NO: 3581997 - RNA, 12 nt, Human
ucuccucacuga

SEQ ID NO: 3581998 - RNA, 18 nt, Human
ucuccucaucucuaacag

SEQ ID NO: 3581999 - RNA, 14 nt, Human
ucuccuccaccgcc

SEQ ID NO: 3582000 - RNA, 15 nt, Human
ucuccuccagaguca

SEQ ID NO: 3582001 - RNA, 15 nt, Human
ucuccuccccacccg

SEQ ID NO: 3582002 - RNA, 23 nt, Human
ucuccucccuuccuuuucccugc

SEQ ID NO: 3582003 - RNA, 16 nt, Human
ucuccucgcaagcugg

SEQ ID NO: 3582004 - RNA, 14 nt, Human
ucuccucggccccc

SEQ ID NO: 3582005 - RNA, 15 nt, Human
ucuccucucucugua

SEQ ID NO: 3582006 - RNA, 12 nt, Human
ucuccucugcug

SEQ ID NO: 3582007 - RNA, 14 nt, Human
ucuccucugcugcu

SEQ ID NO: 3582008 - RNA, 15 nt, Human
ucuccucugcugcug

SEQ ID NO: 3582009 - RNA, 17 nt, Human
ucuccucugcugcuggc

SEQ ID NO: 3582010 - RNA, 18 nt, Human
ucuccucugcugcuggcu

SEQ ID NO: 3582011 - RNA, 22 nt, Human
ucuccucuuaaaaaauaaaaac

SEQ ID NO: 3582012 - RNA, 23 nt, Human
ucuccucuuaaaaaauaaaaacu

SEQ ID NO: 3582013 - RNA, 13 nt, Human
ucuccucuuguaa

SEQ ID NO: 3582014 - RNA, 14 nt, Human
ucuccucuuguaaa

SEQ ID NO: 3582015 - RNA, 13 nt, Human
ucuccucuuuaaa

SEQ ID NO: 3582016 - RNA, 14 nt, Human
ucuccucuuuaaaa

SEQ ID NO: 3582017 - RNA, 19 nt, Human
ucuccucuuuaaaacaaaa

SEQ ID NO: 3582018 - RNA, 17 nt, Human
ucuccucuuuguuuugu

SEQ ID NO: 3582019 - RNA, 22 nt, Human
ucuccugaaaaaagcaguucuu

SEQ ID NO: 3582020 - RNA, 17 nt, Human
ucuccugaaguucagcc

SEQ ID NO: 3582021 - RNA, 16 nt, Human
ucuccugacccagucc

SEQ ID NO: 3582022 - RNA, 13 nt, Human
ucuccugacuggu

SEQ ID NO: 3582023 - RNA, 14 nt, Human
ucuccugagcuagg

SEQ ID NO: 3582024 - RNA, 20 nt, Human
ucuccugaggaucagaaagu

SEQ ID NO: 3582025 - RNA, 12 nt, Human
ucuccugccaca

SEQ ID NO: 3582026 - RNA, 15 nt, Human
ucucuuuaacucagg

SEQ ID NO: 3582027 - RNA, 21 nt, Human
ucucuuuaagggcaugccuug

SEQ ID NO: 3582028 - RNA, 17 nt, Human
ucucuuuaaucuucagu

SEQ ID NO: 3582029 - RNA, 15 nt, Human
ucucuuuacauuuug

SEQ ID NO: 3582030 - RNA, 15 nt, Human
ucucuuucaugaguu

SEQ ID NO: 3582031 - RNA, 17 nt, Human
ucucuuucccugguccc

SEQ ID NO: 3582032 - RNA, 16 nt, Human
ucucuuuccuucuugc

SEQ ID NO: 3582033 - RNA, 19 nt, Human
ucucuuuccuucuugccuu

SEQ ID NO: 3582034 - RNA, 23 nt, Human
ucucuuucuccuuagucuucuca

SEQ ID NO: 3582035 - RNA, 11 nt, Human
ucucuuugccc

SEQ ID NO: 3582036 - RNA, 14 nt, Human
ucucuuugccucaa

SEQ ID NO: 3582037 - RNA, 15 nt, Human
ucucuuuggacucuc

SEQ ID NO: 3582038 - RNA, 21 nt, Human
ucucuuuggacucuccccucu

SEQ ID NO: 3582039 - RNA, 16 nt, Human
ucucuuuguggggcuu

SEQ ID NO: 3582040 - RNA, 20 nt, Human
ucucuuuguggggcuuggcg

SEQ ID NO: 3582041 - RNA, 19 nt, Human
ucucuuuuaucuguuuaaa

SEQ ID NO: 3582042 - RNA, 22 nt, Human
ucucuuuuccccuuuccugucc

SEQ ID NO: 3582043 - RNA, 13 nt, Human
ucucuuuucucuu

SEQ ID NO: 3582044 - RNA, 16 nt, Human
ucucuuuucucuuucu

SEQ ID NO: 3582045 - RNA, 18 nt, Human
ucucuuuucuuuagagca

SEQ ID NO: 3582046 - RNA, 17 nt, Human
ucucuuuugaaacaaua

SEQ ID NO: 3582047 - RNA, 23 nt, Human
ucucuuuugaauccaugcuuggg

SEQ ID NO: 3582048 - RNA, 14 nt, Human
ucucuuuuugacuc

SEQ ID NO: 3582049 - RNA, 13 nt, Human
ucucuuuuuggag

SEQ ID NO: 3582050 - RNA, 20 nt, Human
ucugaaaagugaagacagaa

SEQ ID NO: 3582051 - RNA, 13 nt, Human
ucugaaaauguau

SEQ ID NO: 3582052 - RNA, 13 nt, Human
ucugaaaauguga

SEQ ID NO: 3582053 - RNA, 23 nt, Human
ucugaaaauuccagaaaggauau

SEQ ID NO: 3582054 - RNA, 14 nt, Human
ucugaaaauugaug

SEQ ID NO: 3582055 - RNA, 22 nt, Human
ucugaaaauugaugggauuugg

SEQ ID NO: 3582056 - RNA, 20 nt, Human
ucugaaacacacugaaagcu

SEQ ID NO: 3582057 - RNA, 12 nt, Human
ucugaaacagcu

SEQ ID NO: 3582058 - RNA, 14 nt, Human
ucugaaacagcugc

SEQ ID NO: 3582059 - RNA, 15 nt, Human
ucugaaacagcugcc

SEQ ID NO: 3582060 - RNA, 22 nt, Human
ucugaaacagcugccuuagcuu

SEQ ID NO: 3582061 - RNA, 15 nt, Human
ucugaaaccaguguu

SEQ ID NO: 3582062 - RNA, 20 nt, Human
ucugaaaccaguguuaggga

SEQ ID NO: 3582063 - RNA, 13 nt, Human
ucugaaacuaaug

SEQ ID NO: 3582064 - RNA, 17 nt, Human
ucugaaacuaaugaaag

SEQ ID NO: 3582065 - RNA, 18 nt, Human
ucugaaagagucuuucuu

SEQ ID NO: 3582066 - RNA, 22 nt, Human
ucugaaagagucuuucuucuuc

SEQ ID NO: 3582067 - RNA, 21 nt, Human
ucugaaaguuguacaugaaau

SEQ ID NO: 3582068 - RNA, 18 nt, Human
ucugaaauaggaaacaag

SEQ ID NO: 3582069 - RNA, 14 nt, Human
ucugaaaugugaua

SEQ ID NO: 3582070 - RNA, 14 nt, Human
ucugaaauuuccug

SEQ ID NO: 3582071 - RNA, 15 nt, Human
ucugaaauuuuucuu

SEQ ID NO: 3582072 - RNA, 20 nt, Human
ucugaaauuuuucuucuuga

SEQ ID NO: 3582073 - RNA, 15 nt, Human
ucugaacaauucucu

SEQ ID NO: 3582074 - RNA, 12 nt, Human
ucugaacacauu

SEQ ID NO: 3582075 - RNA, 15 nt, Human
ucugaacagcuggug

SEQ ID NO: 3582076 - RNA, 13 nt, Human
ucugaacuaaagu

SEQ ID NO: 3582077 - RNA, 17 nt, Human
ucugaacucgcuucucu

SEQ ID NO: 3582078 - RNA, 14 nt, Human
ucugaacuucagcu

SEQ ID NO: 3582079 - RNA, 15 nt, Human
ucugaacuucagcua

SEQ ID NO: 3582080 - RNA, 13 nt, Human
ucugaacuuugga

SEQ ID NO: 3582081 - RNA, 15 nt, Human
ucugaacuuugggaa

SEQ ID NO: 3582082 - RNA, 16 nt, Human
ucugaacuuugggaag

SEQ ID NO: 3582083 - RNA, 20 nt, Human
ucugaagcauguuucauguu

SEQ ID NO: 3582084 - RNA, 21 nt, Human
ucugaagcauguuucauguuu

SEQ ID NO: 3582085 - RNA, 16 nt, Human
ucugaagcccucccag

SEQ ID NO: 3582086 - RNA, 18 nt, Human
ucugaagcccucccaggu

SEQ ID NO: 3582087 - RNA, 16 nt, Human
ucugaagccucuggga

SEQ ID NO: 3582088 - RNA, 17 nt, Human
ucugaagcucaacucuc

SEQ ID NO: 3582089 - RNA, 20 nt, Human
ucugaagcuucacucacugu

SEQ ID NO: 3582090 - RNA, 16 nt, Human
ucugaaggacacuucc

SEQ ID NO: 3582091 - RNA, 19 nt, Human
ucugaaggagauuuuccuu

SEQ ID NO: 3582092 - RNA, 18 nt, Human
ucugaaggaggccaccuc

SEQ ID NO: 3582093 - RNA, 23 nt, Human
ucugaaggcgucaacgugcauuu

SEQ ID NO: 3582094 - RNA, 20 nt, Human
ucugaaggguaauuauauag

SEQ ID NO: 3582095 - RNA, 23 nt, Human
ucugaagucacaucacaggacac

SEQ ID NO: 3582096 - RNA, 14 nt, Human
ucugaaguuggaca

SEQ ID NO: 3582097 - RNA, 17 nt, Human
ucugaaguuucauuuau

SEQ ID NO: 3582098 - RNA, 17 nt, Human
ucugaauaaagcaauua

SEQ ID NO: 3582099 - RNA, 17 nt, Human
ucugaauaaaguguaac

SEQ ID NO: 3582100 - RNA, 18 nt, Human
ucugaauaaaguguaaca

SEQ ID NO: 3582101 - RNA, 16 nt, Human
ucugaauaacauuugu

SEQ ID NO: 3582102 - RNA, 15 nt, Human
ucugaauaagcacuu

SEQ ID NO: 3582103 - RNA, 18 nt, Human
ucugaauaagcacuuuuu

SEQ ID NO: 3582104 - RNA, 19 nt, Human
ucugaauaagcacuuuuua

SEQ ID NO: 3582105 - RNA, 17 nt, Human
ucugaaugcuucuaagu

SEQ ID NO: 3582106 - RNA, 19 nt, Human
ucugaaugcuucuaaguaa

SEQ ID NO: 3582107 - RNA, 12 nt, Human
ucugaauguaau

SEQ ID NO: 3582108 - RNA, 21 nt, Human
ucugaauguaauuuguguaau

SEQ ID NO: 3582109 - RNA, 14 nt, Human
ucugaauguucuga

SEQ ID NO: 3582110 - RNA, 21 nt, Human
ucugaauuaauuaauuuggag

SEQ ID NO: 3582111 - RNA, 20 nt, Human
ucugaauuggaaugcacuca

SEQ ID NO: 3582112 - RNA, 17 nt, Human
ucugaauuuaucuuuga

SEQ ID NO: 3582113 - RNA, 19 nt, Human
ucugaauuuaucuuugaua

SEQ ID NO: 3582114 - RNA, 21 nt, Human
ucugaauuuaucuuugauaac

SEQ ID NO: 3582115 - RNA, 16 nt, Human
ucugaauuugcaaagu

SEQ ID NO: 3582116 - RNA, 17 nt, Human
ucugaauuugcccuggg

SEQ ID NO: 3582117 - RNA, 17 nt, Human
ucugaauuuuuaaacaa

SEQ ID NO: 3582118 - RNA, 14 nt, Human
ucugacaaacugug

SEQ ID NO: 3582119 - RNA, 12 nt, Human
ucugacaagggc

SEQ ID NO: 3582120 - RNA, 16 nt, Human
ucugacaagggcugac

SEQ ID NO: 3582121 - RNA, 20 nt, Human
ucugacaagggcugaccugc

SEQ ID NO: 3582122 - RNA, 12 nt, Human
ucugacacacag

SEQ ID NO: 3582123 - RNA, 15 nt, Human
ucugacacacagcuc

SEQ ID NO: 3582124 - RNA, 16 nt, Human
ucugacagaaagcaga

SEQ ID NO: 3582125 - RNA, 19 nt, Human
ucugacauaauccaguaaa

SEQ ID NO: 3582126 - RNA, 19 nt, Human
ucugacaugauuccuuccu

SEQ ID NO: 3582127 - RNA, 22 nt, Human
ucugacaugauuccuuccuguu

SEQ ID NO: 3582128 - RNA, 15 nt, Human
ucugacauuaacagu

SEQ ID NO: 3582129 - RNA, 16 nt, Human
ucugacauuaacaguu

SEQ ID NO: 3582130 - RNA, 18 nt, Human
ucugacauuaacaguuuu

SEQ ID NO: 3582131 - RNA, 21 nt, Human
ucugacauuaacaguuuucca

SEQ ID NO: 3582132 - RNA, 13 nt, Human
ucugaccacacuu

SEQ ID NO: 3582133 - RNA, 23 nt, Human
ucugaccaguuuaaccugaugca

SEQ ID NO: 3582134 - RNA, 13 nt, Human
ucugacccacugc

SEQ ID NO: 3582135 - RNA, 14 nt, Human
ucugacccacugcu

SEQ ID NO: 3582136 - RNA, 14 nt, Human
ucugacccagugag

SEQ ID NO: 3582137 - RNA, 21 nt, Human
ucugacccagugagauuacag

SEQ ID NO: 3582138 - RNA, 19 nt, Human
ucugacccagugcccccac

SEQ ID NO: 3582139 - RNA, 23 nt, Human
ucugacccagugcccccacugac

SEQ ID NO: 3582140 - RNA, 17 nt, Human
ucugacccaugcugccc

SEQ ID NO: 3582141 - RNA, 22 nt, Human
ucugacccaugcugcccuguga

SEQ ID NO: 3582142 - RNA, 23 nt, Human
ucugacccaugcugcccugugag

SEQ ID NO: 3582143 - RNA, 15 nt, Human
ucugaccccuccuca

SEQ ID NO: 3582144 - RNA, 17 nt, Human
ucugaccccuccucacu

SEQ ID NO: 3582145 - RNA, 16 nt, Human
ucugacccucucccca

SEQ ID NO: 3582146 - RNA, 19 nt, Human
ucugaccugcaggccaaga

SEQ ID NO: 3582147 - RNA, 13 nt, Human
ucugacggcccug

SEQ ID NO: 3582148 - RNA, 14 nt, Human
ucugacuacuuugc

SEQ ID NO: 3582149 - RNA, 16 nt, Human
ucugacuaugacauaa

SEQ ID NO: 3582150 - RNA, 13 nt, Human
ucugacucagggc

SEQ ID NO: 3582151 - RNA, 14 nt, Human
ucugacucagggcu

SEQ ID NO: 3582152 - RNA, 20 nt, Human
ucugacucagggcuccuggg

SEQ ID NO: 3582153 - RNA, 13 nt, Human
ucugacuccagug

SEQ ID NO: 3582154 - RNA, 14 nt, Human
ucugacuccagugg

SEQ ID NO: 3582155 - RNA, 18 nt, Human
ucugacucgguuucucca

SEQ ID NO: 3582156 - RNA, 20 nt, Human
ucugacucgguuucuccaaa

SEQ ID NO: 3582157 - RNA, 20 nt, Human
ucugacugcacguggcuucu

SEQ ID NO: 3582158 - RNA, 14 nt, Human
ucugacugugugug

SEQ ID NO: 3582159 - RNA, 23 nt, Human
ucugacuuaagcaaaagaaaaag

SEQ ID NO: 3582160 - RNA, 15 nt, Human
ucugacuucugccug

SEQ ID NO: 3582161 - RNA, 16 nt, Human
ucugacuucugccugg

SEQ ID NO: 3582162 - RNA, 20 nt, Human
ucugacuuucuuuuuugaua

SEQ ID NO: 3582163 - RNA, 22 nt, Human
ucugagaaagacuauucaaaca

SEQ ID NO: 3582164 - RNA, 14 nt, Human
ucugagaagaggag

SEQ ID NO: 3582165 - RNA, 15 nt, Human
ucugagaagaggagc

SEQ ID NO: 3582166 - RNA, 23 nt, Human
ucugagaagaggagcccucaucu

SEQ ID NO: 3582167 - RNA, 24 nt, Human
ucugagaagcucugaagaacucuc

SEQ ID NO: 3582168 - RNA, 23 nt, Human
ucugagaaggggaggaccucugg

SEQ ID NO: 3582169 - RNA, 20 nt, Human
ucugagaagguccuuaauga

SEQ ID NO: 3582170 - RNA, 12 nt, Human
ucugagaaugaa

SEQ ID NO: 3582171 - RNA, 16 nt, Human
ucuuucucuuucccug

SEQ ID NO: 3582172 - RNA, 17 nt, Human
ucuuucucuuucccugg

SEQ ID NO: 3582173 - RNA, 17 nt, Human
ucuuucucuuucuuccu

SEQ ID NO: 3582174 - RNA, 18 nt, Human
ucuuucugagcacacuuu

SEQ ID NO: 3582175 - RNA, 19 nt, Human
ucuuucugagcacacuuua

SEQ ID NO: 3582176 - RNA, 22 nt, Human
ucuuucugagugccuucugugg

SEQ ID NO: 3582177 - RNA, 23 nt, Human
ucuuucugauaacuagauggugc

SEQ ID NO: 3582178 - RNA, 20 nt, Human
ucuuucugcacacaaauauu

SEQ ID NO: 3582179 - RNA, 22 nt, Human
ucuuucugcagaaacagaaagg

SEQ ID NO: 3582180 - RNA, 13 nt, Human
ucuuucugcuuug

SEQ ID NO: 3582181 - RNA, 20 nt, Human
ucuuucuggcuaugcauuug

SEQ ID NO: 3582182 - RNA, 21 nt, Human
ucuuucuggcuaugcauuuga

SEQ ID NO: 3582183 - RNA, 14 nt, Human
ucuuucuguauuga

SEQ ID NO: 3582184 - RNA, 13 nt, Human
ucuuucugucccu

SEQ ID NO: 3582185 - RNA, 13 nt, Human
ucuuucuuccaaa

SEQ ID NO: 3582186 - RNA, 13 nt, Human
ucuuucuuccuuu

SEQ ID NO: 3582187 - RNA, 18 nt, Human
ucuuucuucuuccacaca

SEQ ID NO: 3582188 - RNA, 19 nt, Human
ucuuucuugcucccugacu

SEQ ID NO: 3582189 - RNA, 20 nt, Human
ucuuucuugcucccugacug

SEQ ID NO: 3582190 - RNA, 16 nt, Human
ucuuucuuuaaauguu

SEQ ID NO: 3582191 - RNA, 18 nt, Human
ucuuucuuuaaauguuuu

SEQ ID NO: 3582192 - RNA, 21 nt, Human
ucuuucuuuaccugagaccag

SEQ ID NO: 3582193 - RNA, 13 nt, Human
ucuuucuuuauuu

SEQ ID NO: 3582194 - RNA, 15 nt, Human
ucuuucuuucuuaga

SEQ ID NO: 3582195 - RNA, 11 nt, Human
ucuuucuuuuu

SEQ ID NO: 3582196 - RNA, 16 nt, Human
ucuuugaaacaacuuu

SEQ ID NO: 3582197 - RNA, 19 nt, Human
ucuuugaaacaugcuugug

SEQ ID NO: 3582198 - RNA, 21 nt, Human
ucuuugaaagacuuccaaaga

SEQ ID NO: 3582199 - RNA, 22 nt, Human
ucuuugaagaagguggaccuuu

SEQ ID NO: 3582200 - RNA, 16 nt, Human
ucuuugaauauguagu

SEQ ID NO: 3582201 - RNA, 16 nt, Human
ucuuugaauuuucauu

SEQ ID NO: 3582202 - RNA, 17 nt, Human
ucuuugacacucugcag

SEQ ID NO: 3582203 - RNA, 12 nt, Human
ucuuugagaggg

SEQ ID NO: 3582204 - RNA, 19 nt, Human
ucuuugagggacugccucu

SEQ ID NO: 3582205 - RNA, 21 nt, Human
ucuuugagggacugccucugc

SEQ ID NO: 3582206 - RNA, 22 nt, Human
ucuuugagggacugccucugcc

SEQ ID NO: 3582207 - RNA, 23 nt, Human
ucuuugagugaagcugggagaac

SEQ ID NO: 3582208 - RNA, 16 nt, Human
ucuuugauaacaggga

SEQ ID NO: 3582209 - RNA, 14 nt, Human
ucuuugauaauguu

SEQ ID NO: 3582210 - RNA, 16 nt, Human
ucuuugauaauguuaa

SEQ ID NO: 3582211 - RNA, 17 nt, Human
ucuuugauaauguuaaa

SEQ ID NO: 3582212 - RNA, 13 nt, Human
ucuuugauguguu

SEQ ID NO: 3582213 - RNA, 12 nt, Human
ucuuugauguua

SEQ ID NO: 3582214 - RNA, 15 nt, Human
ucuuugauguuaaca

SEQ ID NO: 3582215 - RNA, 17 nt, Human
ucuuugauguuaacaca

SEQ ID NO: 3582216 - RNA, 17 nt, Human
ucuuugauuauuugcau

SEQ ID NO: 3582217 - RNA, 23 nt, Human
ucuuugauucuccuucagcccuc

SEQ ID NO: 3582218 - RNA, 22 nt, Human
ucuuugauucuccuuuuaugug

SEQ ID NO: 3582219 - RNA, 22 nt, Human
ucuuugcaggaggcccaaccuc

SEQ ID NO: 3582220 - RNA, 14 nt, Human
ucuuugcaguuccc

SEQ ID NO: 3582221 - RNA, 18 nt, Human
ucuuugcaguucccaucu

SEQ ID NO: 3582222 - RNA, 20 nt, Human
ucuuugccacccucaugcug

SEQ ID NO: 3582223 - RNA, 18 nt, Human
ucuuugccaucucugcuc

SEQ ID NO: 3582224 - RNA, 20 nt, Human
ucuuugccaucucugcucca

SEQ ID NO: 3582225 - RNA, 21 nt, Human
ucuuugcccccaaacccccau

SEQ ID NO: 3582226 - RNA, 22 nt, Human
ucuuugcccuuuacuugucuuu

SEQ ID NO: 3582227 - RNA, 20 nt, Human
ucuuugccuugggcugcucc

SEQ ID NO: 3582228 - RNA, 12 nt, Human
ucuuugcugcag

SEQ ID NO: 3582229 - RNA, 14 nt, Human
ucuuugcuguaaga

SEQ ID NO: 3582230 - RNA, 17 nt, Human
ucuuugcuugaacacag

SEQ ID NO: 3582231 - RNA, 21 nt, Human
ucuuugcuugaacacaguauu

SEQ ID NO: 3582232 - RNA, 12 nt, Human
ucuuugcuuugc

SEQ ID NO: 3582233 - RNA, 13 nt, Human
ucuuugcuuugcc

SEQ ID NO: 3582234 - RNA, 16 nt, Human
ucuuuggaaaguacac

SEQ ID NO: 3582235 - RNA, 19 nt, Human
ucuuuggacagaagcagcu

SEQ ID NO: 3582236 - RNA, 17 nt, Human
ucuuuggacccugaggc

SEQ ID NO: 3582237 - RNA, 22 nt, Human
ucuuuggacucuccccucuuau

SEQ ID NO: 3582238 - RNA, 14 nt, Human
ucuuuggaguuaaa

SEQ ID NO: 3582239 - RNA, 14 nt, Human
ucuuuggcuccccu

SEQ ID NO: 3582240 - RNA, 22 nt, Human
ucuuuggcuccccuguaccuuu

SEQ ID NO: 3582241 - RNA, 15 nt, Human
ucuuugggaauauuu

SEQ ID NO: 3582242 - RNA, 18 nt, Human
ucuuuggggucagccagg

SEQ ID NO: 3582243 - RNA, 17 nt, Human
ucuuuggggucuacacu

SEQ ID NO: 3582244 - RNA, 16 nt, Human
ucuuuggggugccccu

SEQ ID NO: 3582245 - RNA, 20 nt, Human
ucuuuggguaccuauuuuca

SEQ ID NO: 3582246 - RNA, 18 nt, Human
ucuuugguccucuugcca

SEQ ID NO: 3582247 - RNA, 18 nt, Human
ucuuuggugccuuuccug

SEQ ID NO: 3582248 - RNA, 22 nt, Human
ucuuuguaagaacuaaagaaga

SEQ ID NO: 3582249 - RNA, 24 nt, Human
ucuuuguaagaguguagaagcauu

SEQ ID NO: 3582250 - RNA, 21 nt, Human
ucuuuguaaguaaacugcccu

SEQ ID NO: 3582251 - RNA, 21 nt, Human
ucuuuguaagucaguguugag

SEQ ID NO: 3582252 - RNA, 17 nt, Human
ucuuuguaccaaaauuu

SEQ ID NO: 3582253 - RNA, 19 nt, Human
ucuuuguaccaaaauuuua

SEQ ID NO: 3582254 - RNA, 15 nt, Human
ucuuugucagggagu

SEQ ID NO: 3582255 - RNA, 15 nt, Human
ucuuugucuaaaaca

SEQ ID NO: 3582256 - RNA, 17 nt, Human
ucuuugucuacaccauu

SEQ ID NO: 3582257 - RNA, 11 nt, Human
ucuuugugaag

SEQ ID NO: 3582258 - RNA, 13 nt, Human
ucuuuguggggcu

SEQ ID NO: 3582259 - RNA, 18 nt, Human
ucuuuguggggcuuggcg

SEQ ID NO: 3582260 - RNA, 15 nt, Human
ucuuuguguagcuuu

SEQ ID NO: 3582261 - RNA, 16 nt, Human
ucuuuguucauagccc

SEQ ID NO: 3582262 - RNA, 22 nt, Human
ucuuuguucucagcucccccug

SEQ ID NO: 3582263 - RNA, 16 nt, Human
ucuuuguuuugugucu

SEQ ID NO: 3582264 - RNA, 18 nt, Human
ucuuuguuuugugucucu

SEQ ID NO: 3582265 - RNA, 20 nt, Human
ucuuuguuuugugucucuua

SEQ ID NO: 3582266 - RNA, 13 nt, Human
ucuuuuaaaaagu

SEQ ID NO: 3582267 - RNA, 17 nt, Human
ucuuuuaaaaaguauug

SEQ ID NO: 3582268 - RNA, 13 nt, Human
ucuuuuaaaagac

SEQ ID NO: 3582269 - RNA, 21 nt, Human
ucuuuuaaaagacaagacuuc

SEQ ID NO: 3582270 - RNA, 11 nt, Human
ucuuuuaaacu

SEQ ID NO: 3582271 - RNA, 12 nt, Human
ucuuuuaaacuc

SEQ ID NO: 3582272 - RNA, 18 nt, Human
ucuuuuaaagacccuccu

SEQ ID NO: 3582273 - RNA, 17 nt, Human
ucuuuuaaauuagaaaa

SEQ ID NO: 3582274 - RNA, 21 nt, Human
ucuuuuaaugaggaccaaugu

SEQ ID NO: 3582275 - RNA, 13 nt, Human
ucuuuuacccugg

SEQ ID NO: 3582276 - RNA, 23 nt, Human
ucuuuuacuuuuuuuaguaaguu

SEQ ID NO: 3582277 - RNA, 20 nt, Human
ucuuuuaguuguaucucuuu

SEQ ID NO: 3582278 - RNA, 16 nt, Human
ucuuuuaguuuuaguu

SEQ ID NO: 3582279 - RNA, 18 nt, Human
ucuuuuaguuuuaguugc

SEQ ID NO: 3582280 - RNA, 22 nt, Human
ucuuuuauaaaaaaaaugaaau

SEQ ID NO: 3582281 - RNA, 14 nt, Human
ucuuuuauaggauu

SEQ ID NO: 3582282 - RNA, 21 nt, Human
ucuuuuauaguggaaaaacac

SEQ ID NO: 3582283 - RNA, 13 nt, Human
ucuuuuauauuug

SEQ ID NO: 3582284 - RNA, 12 nt, Human
ucuuuuaucugu

SEQ ID NO: 3582285 - RNA, 14 nt, Human
ucuuuuaucuguuu

SEQ ID NO: 3582286 - RNA, 12 nt, Human
ucuuuuauucuu

SEQ ID NO: 3582287 - RNA, 13 nt, Human
ucuuuucacaaau

SEQ ID NO: 3582288 - RNA, 16 nt, Human
ucuuuucacauucuua

SEQ ID NO: 3582289 - RNA, 17 nt, Human
ucuuuucacauucuuau

SEQ ID NO: 3582290 - RNA, 18 nt, Human
ucuuuucacauucuuaua

SEQ ID NO: 3582291 - RNA, 22 nt, Human
ucuuuucacauucuuauaaaua

SEQ ID NO: 3582292 - RNA, 20 nt, Human
ucuuuucagaucauggcauc

SEQ ID NO: 3582293 - RNA, 18 nt, Human
ucuuuucaucugggaaag

SEQ ID NO: 3582294 - RNA, 19 nt, Human
ucuuuucaucugggaaaga

SEQ ID NO: 3582295 - RNA, 16 nt, Human
ucuuuucccauuuauc

SEQ ID NO: 3582296 - RNA, 19 nt, Human
ucuuuucccauuuaucuaa

SEQ ID NO: 3582297 - RNA, 18 nt, Human
ucuuuuccccuuuccugu

SEQ ID NO: 3582298 - RNA, 19 nt, Human
ucuuuucuacagcaaauuu

SEQ ID NO: 3582299 - RNA, 12 nt, Human
ucuuuucuaccc

SEQ ID NO: 3582300 - RNA, 15 nt, Human
ucuuuucucaugugu

SEQ ID NO: 3582301 - RNA, 16 nt, Human
ucuuuucucuuuuuag

SEQ ID NO: 3582302 - RNA, 12 nt, Human
ucuuuucugaau

SEQ ID NO: 3582303 - RNA, 23 nt, Human
ucuuuucugcaucaucuguagau

SEQ ID NO: 3582304 - RNA, 18 nt, Human
ucuuuucuuacuccuccu

SEQ ID NO: 3582305 - RNA, 20 nt, Human
ucuuuucuugccucuguccc

SEQ ID NO: 3582306 - RNA, 15 nt, Human
ucuuuucuuggcaaa

SEQ ID NO: 3582307 - RNA, 22 nt, Human
ucuuuucuuggcaaaagccuug

SEQ ID NO: 3582308 - RNA, 12 nt, Human
ucuuuucuuuac

SEQ ID NO: 3582309 - RNA, 21 nt, Human
ucuuuucuuuagagaacugaa

SEQ ID NO: 3582310 - RNA, 23 nt, Human
ucuuuucuuuagagcauugccau

SEQ ID NO: 3582311 - RNA, 14 nt, Human
ucuuuucuuuguau

SEQ ID NO: 3582312 - RNA, 17 nt, Human
ucuuuucuuuguaucau

SEQ ID NO: 3582313 - RNA, 20 nt, Human
ucuuuucuuuguaucauuca

SEQ ID NO: 3582314 - RNA, 12 nt, Human
ucuuuugaagca

SEQ ID NO: 3582315 - RNA, 20 nt, Human
ucuuuugaauccaugcuugg

SEQ ID NO: 3582316 - RNA, 22 nt, Human
ugaaaugaggucagagccugca

SEQ ID NO: 3582317 - RNA, 17 nt, Human
ugaaaugaggucuguuu

SEQ ID NO: 3582318 - RNA, 18 nt, Human
ugaaaugaggucuguuua

SEQ ID NO: 3582319 - RNA, 21 nt, Human
ugaaaugauagauuugaccuc

SEQ ID NO: 3582320 - RNA, 13 nt, Human
ugaaaugcauauu

SEQ ID NO: 3582321 - RNA, 20 nt, Human
ugaaaugcaucagguccuuu

SEQ ID NO: 3582322 - RNA, 17 nt, Human
ugaaaugccugcuuuga

SEQ ID NO: 3582323 - RNA, 18 nt, Human
ugaaaugccuuacuuugu

SEQ ID NO: 3582324 - RNA, 19 nt, Human
ugaaaugccuuacuuugua

SEQ ID NO: 3582325 - RNA, 18 nt, Human
ugaaaugcuaugucauuu

SEQ ID NO: 3582326 - RNA, 22 nt, Human
ugaaaugcuaugucauuucaug

SEQ ID NO: 3582327 - RNA, 17 nt, Human
ugaaaugcucuccuuuc

SEQ ID NO: 3582328 - RNA, 13 nt, Human
ugaaaugcugcau

SEQ ID NO: 3582329 - RNA, 17 nt, Human
ugaaaugcugcauuuua

SEQ ID NO: 3582330 - RNA, 19 nt, Human
ugaaauggauacuacaucu

SEQ ID NO: 3582331 - RNA, 13 nt, Human
ugaaaugucaguu

SEQ ID NO: 3582332 - RNA, 20 nt, Human
ugaaaugugaauuuuuauug

SEQ ID NO: 3582333 - RNA, 12 nt, Human
ugaaaugugugu

SEQ ID NO: 3582334 - RNA, 22 nt, Human
ugaaaugugugugaugugacau

SEQ ID NO: 3582335 - RNA, 15 nt, Human
ugaaauguguuucug

SEQ ID NO: 3582336 - RNA, 19 nt, Human
ugaaauguguuucuguaua

SEQ ID NO: 3582337 - RNA, 12 nt, Human
ugaaauuacccu

SEQ ID NO: 3582338 - RNA, 19 nt, Human
ugaaauuacggguaccuga

SEQ ID NO: 3582339 - RNA, 20 nt, Human
ugaaauuacuacaaaauuug

SEQ ID NO: 3582340 - RNA, 19 nt, Human
ugaaauuacuuaucaucca

SEQ ID NO: 3582341 - RNA, 23 nt, Human
ugaaauuagggcccaauuaauaa

SEQ ID NO: 3582342 - RNA, 15 nt, Human
ugaaauuauaucugu

SEQ ID NO: 3582343 - RNA, 17 nt, Human
ugaaauuauguauguuu

SEQ ID NO: 3582344 - RNA, 21 nt, Human
ugaaauuauguauguuuacau

SEQ ID NO: 3582345 - RNA, 20 nt, Human
ugaaauuaugugacauuuua

SEQ ID NO: 3582346 - RNA, 14 nt, Human
ugaaauucacaaag

SEQ ID NO: 3582347 - RNA, 16 nt, Human
ugaaauuccauuugua

SEQ ID NO: 3582348 - RNA, 14 nt, Human
ugaaauucuccugg

SEQ ID NO: 3582349 - RNA, 14 nt, Human
ugaaauucugaauu

SEQ ID NO: 3582350 - RNA, 19 nt, Human
ugaaauucugaauuugcaa

SEQ ID NO: 3582351 - RNA, 21 nt, Human
ugaaauucugaauuugcaaag

SEQ ID NO: 3582352 - RNA, 17 nt, Human
ugaaauugcauacuuug

SEQ ID NO: 3582353 - RNA, 12 nt, Human
ugaaauuguaaa

SEQ ID NO: 3582354 - RNA, 14 nt, Human
ugaaauuguaauua

SEQ ID NO: 3582355 - RNA, 21 nt, Human
ugaaauuguaauuauaucuga

SEQ ID NO: 3582356 - RNA, 18 nt, Human
ugaaauugugaacucauu

SEQ ID NO: 3582357 - RNA, 23 nt, Human
ugaaauuguuuaaguguuguaaa

SEQ ID NO: 3582358 - RNA, 14 nt, Human
ugaaauuuaaacau

SEQ ID NO: 3582359 - RNA, 22 nt, Human
ugaaauuuaaacauuaaaaaug

SEQ ID NO: 3582360 - RNA, 23 nt, Human
ugaaauuuauacaccaauugauu

SEQ ID NO: 3582361 - RNA, 13 nt, Human
ugaaauuuauuga

SEQ ID NO: 3582362 - RNA, 14 nt, Human
ugaaauuuauuuaa

SEQ ID NO: 3582363 - RNA, 12 nt, Human
ugaaauuucaga

SEQ ID NO: 3582364 - RNA, 19 nt, Human
ugaaauuuccuaauuuauu

SEQ ID NO: 3582365 - RNA, 21 nt, Human
ugaaauuuccugggagcuuuu

SEQ ID NO: 3582366 - RNA, 21 nt, Human
ugaaauuucuagccugcacuu

SEQ ID NO: 3582367 - RNA, 16 nt, Human
ugaaauuugaauuuug

SEQ ID NO: 3582368 - RNA, 14 nt, Human
ugaaauuuuaccaa

SEQ ID NO: 3582369 - RNA, 15 nt, Human
ugaaauuuuaccaag

SEQ ID NO: 3582370 - RNA, 16 nt, Human
ugaaauuuuaccaagu

SEQ ID NO: 3582371 - RNA, 17 nt, Human
ugaaauuuuaccaaguu

SEQ ID NO: 3582372 - RNA, 18 nt, Human
ugaaauuuuagaaauauu

SEQ ID NO: 3582373 - RNA, 17 nt, Human
ugaaauuuuccaauguc

SEQ ID NO: 3582374 - RNA, 18 nt, Human
ugaaauuuuccaaugucu

SEQ ID NO: 3582375 - RNA, 17 nt, Human
ugaaauuuucuagacuu

SEQ ID NO: 3582376 - RNA, 13 nt, Human
ugaaauuuuucau

SEQ ID NO: 3582377 - RNA, 14 nt, Human
ugaaauuuuucaua

SEQ ID NO: 3582378 - RNA, 21 nt, Human
ugaaauuuuucauauuuuaau

SEQ ID NO: 3582379 - RNA, 23 nt, Human
ugaaauuuuuuuucaugcuuuau

SEQ ID NO: 3582380 - RNA, 13 nt, Human
ugaacaaaagggu

SEQ ID NO: 3582381 - RNA, 14 nt, Human
ugaacaaaaucugu

SEQ ID NO: 3582382 - RNA, 18 nt, Human
ugaacaaaaucuguugcc

SEQ ID NO: 3582383 - RNA, 13 nt, Human
ugaacaaaauuau

SEQ ID NO: 3582384 - RNA, 15 nt, Human
ugaacaaagaccaau

SEQ ID NO: 3582385 - RNA, 15 nt, Human
ugaacaaauggccuu

SEQ ID NO: 3582386 - RNA, 13 nt, Human
ugaacaaauuuac

SEQ ID NO: 3582387 - RNA, 18 nt, Human
ugaacaacgagccuuuuc

SEQ ID NO: 3582388 - RNA, 14 nt, Human
ugaacaagaauugg

SEQ ID NO: 3582389 - RNA, 16 nt, Human
ugaacaagagaagcau

SEQ ID NO: 3582390 - RNA, 18 nt, Human
ugaacaagagaagcauuc

SEQ ID NO: 3582391 - RNA, 23 nt, Human
ugaacaagagaagcauucucauu

SEQ ID NO: 3582392 - RNA, 15 nt, Human
ugaacaagucccugu

SEQ ID NO: 3582393 - RNA, 23 nt, Human
ugaacaagugggccauuagccag

SEQ ID NO: 3582394 - RNA, 18 nt, Human
ugaacaaugaaguugaaa

SEQ ID NO: 3582395 - RNA, 23 nt, Human
ugaacaaugaaguugaaaaucau

SEQ ID NO: 3582396 - RNA, 13 nt, Human
ugaacaauucucu

SEQ ID NO: 3582397 - RNA, 18 nt, Human
ugaacacaaacuguaaau

SEQ ID NO: 3582398 - RNA, 19 nt, Human
ugaacacaaacuguaaaua

SEQ ID NO: 3582399 - RNA, 14 nt, Human
ugaacacacugugu

SEQ ID NO: 3582400 - RNA, 13 nt, Human
ugaacacaggcag

SEQ ID NO: 3582401 - RNA, 14 nt, Human
ugaacacaucagcu

SEQ ID NO: 3582402 - RNA, 12 nt, Human
ugaacacauuuc

SEQ ID NO: 3582403 - RNA, 22 nt, Human
ugaacacgaaagaaauguaccu

SEQ ID NO: 3582404 - RNA, 16 nt, Human
ugaacacgaagcuuag

SEQ ID NO: 3582405 - RNA, 14 nt, Human
ugaacacucaugcu

SEQ ID NO: 3582406 - RNA, 22 nt, Human
ugaacacuccaauuaaggauuu

SEQ ID NO: 3582407 - RNA, 23 nt, Human
ugaacacuccaauuaaggauuuu

SEQ ID NO: 3582408 - RNA, 16 nt, Human
ugaacacugggggagg

SEQ ID NO: 3582409 - RNA, 17 nt, Human
ugaacacugggggaggg

SEQ ID NO: 3582410 - RNA, 14 nt, Human
ugaacacuuaaauu

SEQ ID NO: 3582411 - RNA, 17 nt, Human
ugaacacuuaaauuaug

SEQ ID NO: 3582412 - RNA, 13 nt, Human
ugaacacuuauaa

SEQ ID NO: 3582413 - RNA, 20 nt, Human
ugaacagaaaacauucugau

SEQ ID NO: 3582414 - RNA, 20 nt, Human
ugaacagcauggcacucccu

SEQ ID NO: 3582415 - RNA, 15 nt, Human
ugaacagcggcugga

SEQ ID NO: 3582416 - RNA, 14 nt, Human
ugaacagcuggugu

SEQ ID NO: 3582417 - RNA, 15 nt, Human
ugaacagcuggugua

SEQ ID NO: 3582418 - RNA, 23 nt, Human
ugaacagcugguguagcuacaga

SEQ ID NO: 3582419 - RNA, 17 nt, Human
ugaacaguaacauagcu

SEQ ID NO: 3582420 - RNA, 12 nt, Human
ugaacaguggag

SEQ ID NO: 3582421 - RNA, 19 nt, Human
ugaacaguuguguuugaag

SEQ ID NO: 3582422 - RNA, 16 nt, Human
ugaacauacaaaugca

SEQ ID NO: 3582423 - RNA, 20 nt, Human
ugaacauagacuagagaaac

SEQ ID NO: 3582424 - RNA, 18 nt, Human
ugaacauccuuccuuccc

SEQ ID NO: 3582425 - RNA, 20 nt, Human
ugaacauccuuccuucccac

SEQ ID NO: 3582426 - RNA, 20 nt, Human
ugaacaucugaguccuggau

SEQ ID NO: 3582427 - RNA, 11 nt, Human
ugaacauucca

SEQ ID NO: 3582428 - RNA, 22 nt, Human
ugaacauugcauauaacuuaua

SEQ ID NO: 3582429 - RNA, 22 nt, Human
ugaacauuuacuacaguuuuua

SEQ ID NO: 3582430 - RNA, 14 nt, Human
ugaacauuuaucaa

SEQ ID NO: 3582431 - RNA, 14 nt, Human
ugaaccaaaacauu

SEQ ID NO: 3582432 - RNA, 21 nt, Human
ugaaccaaaacauuccguuua

SEQ ID NO: 3582433 - RNA, 22 nt, Human
ugaaccaagaacuuuccaggaa

SEQ ID NO: 3582434 - RNA, 14 nt, Human
ugaaccaaugcaag

SEQ ID NO: 3582435 - RNA, 22 nt, Human
ugaaccaccacacccagcccac

SEQ ID NO: 3582436 - RNA, 16 nt, Human
ugaaccacuucccuca

SEQ ID NO: 3582437 - RNA, 15 nt, Human
ugaaccacuuguaga

SEQ ID NO: 3582438 - RNA, 13 nt, Human
ugaaccauaaaau

SEQ ID NO: 3582439 - RNA, 16 nt, Human
ugaaccauaaauucaa

SEQ ID NO: 3582440 - RNA, 21 nt, Human
ugaaccaucauuauaaacgug

SEQ ID NO: 3582441 - RNA, 20 nt, Human
ugaaccauggugaagugcuu

SEQ ID NO: 3582442 - RNA, 22 nt, Human
ugaacccaggacaagcaugguc

SEQ ID NO: 3582443 - RNA, 20 nt, Human
ugaacccaggacgcuucuga

SEQ ID NO: 3582444 - RNA, 13 nt, Human
ugaacccaggagg

SEQ ID NO: 3582445 - RNA, 14 nt, Human
ugaacccccaugau

SEQ ID NO: 3582446 - RNA, 18 nt, Human
ugaacccgggaggcagag

SEQ ID NO: 3582447 - RNA, 13 nt, Human
ugaacccugugcu

SEQ ID NO: 3582448 - RNA, 19 nt, Human
ugaacccugugcugguguc

SEQ ID NO: 3582449 - RNA, 21 nt, Human
ugaacccuuccugagcuuuau

SEQ ID NO: 3582450 - RNA, 13 nt, Human
ugaacccuugcuu

SEQ ID NO: 3582451 - RNA, 13 nt, Human
ugaacccuuuguu

SEQ ID NO: 3582452 - RNA, 15 nt, Human
ugaaccgaugagaaa

SEQ ID NO: 3582453 - RNA, 20 nt, Human
ugaaccucaccccgaggccc

SEQ ID NO: 3582454 - RNA, 22 nt, Human
ugaaccucaccccgaggcccug

SEQ ID NO: 3582455 - RNA, 17 nt, Human
ugaaccugaugcugacu

SEQ ID NO: 3582456 - RNA, 12 nt, Human
ugaaccuggagg

SEQ ID NO: 3582457 - RNA, 20 nt, Human
ugaaccugugaguaaauauu

SEQ ID NO: 3582458 - RNA, 21 nt, Human
ugaacgauauguagcagaaag

SEQ ID NO: 3582459 - RNA, 14 nt, Human
ugaacggccuugcu

SEQ ID NO: 3582460 - RNA, 17 nt, Human
ugaacguuuucuaauug

SEQ ID NO: 3582461 - RNA, 17 nt, Human
ugaauaccacucuguaa

SEQ ID NO: 3582462 - RNA, 23 nt, Human
ugaauaccauuaaaacugcuuuu

SEQ ID NO: 3582463 - RNA, 14 nt, Human
ugaauaccccaaga

SEQ ID NO: 3582464 - RNA, 13 nt, Human
ugaauacuuugaa

SEQ ID NO: 3582465 - RNA, 16 nt, Human
ugaauacuuugaaugu

SEQ ID NO: 3582466 - RNA, 12 nt, Human
ugaauagaaaug

SEQ ID NO: 3582467 - RNA, 18 nt, Human
ugaauagauaugaaagcu

SEQ ID NO: 3582468 - RNA, 14 nt, Human
ugaauauaaacacu

SEQ ID NO: 3582469 - RNA, 15 nt, Human
ugaauauaaacacua

SEQ ID NO: 3582470 - RNA, 21 nt, Human
ugaauauaauauauuugugua

SEQ ID NO: 3582471 - RNA, 22 nt, Human
ugaauauaccccuuaguguuug

SEQ ID NO: 3582472 - RNA, 15 nt, Human
ugaauauauggcauu

SEQ ID NO: 3582473 - RNA, 18 nt, Human
ugaauauauuauaaucuu

SEQ ID NO: 3582474 - RNA, 13 nt, Human
ugaauauccccuc

SEQ ID NO: 3582475 - RNA, 14 nt, Human
ugaauaucuauuaa

SEQ ID NO: 3582476 - RNA, 14 nt, Human
ugaauaucuuucga

SEQ ID NO: 3582477 - RNA, 20 nt, Human
ugaauaugaacggugagcau

SEQ ID NO: 3582478 - RNA, 13 nt, Human
ugaauaugauuaa

SEQ ID NO: 3582479 - RNA, 14 nt, Human
ugaauaugauuaaa

SEQ ID NO: 3582480 - RNA, 21 nt, Human
ugaauaugauuaaaaauauca

SEQ ID NO: 3582481 - RNA, 21 nt, Human
ugaauaugccuguaauucagu

SEQ ID NO: 3582482 - RNA, 19 nt, Human
ugaauauggacaagaggua

SEQ ID NO: 3582483 - RNA, 15 nt, Human
ugaauauuacuccua

SEQ ID NO: 3582484 - RNA, 13 nt, Human
ugaauauuauucc

SEQ ID NO: 3582485 - RNA, 18 nt, Human
ugaauauugccauuaugc

SEQ ID NO: 3582486 - RNA, 18 nt, Human
ugaauauuuaguguucau

SEQ ID NO: 3582487 - RNA, 20 nt, Human
ugaauauuuauauuucacua

SEQ ID NO: 3582488 - RNA, 21 nt, Human
ugaauauuuguuauguagaua

SEQ ID NO: 3582489 - RNA, 19 nt, Human
ugaauauuuucauuaaaag

SEQ ID NO: 3582490 - RNA, 15 nt, Human
ugaauauuuugauaa

SEQ ID NO: 3582491 - RNA, 16 nt, Human
ugaauauuuugauaau

SEQ ID NO: 3582492 - RNA, 15 nt, Human
ugaaucaaaagugcc

SEQ ID NO: 3582493 - RNA, 13 nt, Human
ugaaucaaagaca

SEQ ID NO: 3582494 - RNA, 16 nt, Human
ugaaucaauaauauau

SEQ ID NO: 3582495 - RNA, 17 nt, Human
ugaaucacguaaagcua

SEQ ID NO: 3582496 - RNA, 23 nt, Human
ugaaucacguaaagcuagaaaug

SEQ ID NO: 3582497 - RNA, 16 nt, Human
ugaaucacuguuuuua

SEQ ID NO: 3582498 - RNA, 21 nt, Human
ugaaucagaauaaccuucaaa

SEQ ID NO: 3582499 - RNA, 16 nt, Human
ugaaucagacccuacc

SEQ ID NO: 3582500 - RNA, 18 nt, Human
ugaaucagacccuacccc

SEQ ID NO: 3582501 - RNA, 19 nt, Human
ugaaucaguauaaacaaag

SEQ ID NO: 3582502 - RNA, 22 nt, Human
ugaaucaguauaaacaaaguua

SEQ ID NO: 3582503 - RNA, 23 nt, Human
ugaaucaguuuccaauuauuuga

SEQ ID NO: 3582504 - RNA, 21 nt, Human
ugaaucauuguauguggucau

SEQ ID NO: 3582505 - RNA, 17 nt, Human
ugaauccaaaagaaaaa

SEQ ID NO: 3582506 - RNA, 21 nt, Human
ugaauccaaaagaaaaacagc

SEQ ID NO: 3582507 - RNA, 21 nt, Human
ugaaucccacgcuucucuuug

SEQ ID NO: 3582508 - RNA, 15 nt, Human
ugaauccuaagggcu

SEQ ID NO: 3582509 - RNA, 16 nt, Human
ugaauccuagggccug

SEQ ID NO: 3582510 - RNA, 16 nt, Human
ugaauccucucucugu

SEQ ID NO: 3582511 - RNA, 21 nt, Human
ugaauccucucucuguguuac

SEQ ID NO: 3582512 - RNA, 20 nt, Human
ugaaucgagauguccauagu

SEQ ID NO: 3582513 - RNA, 12 nt, Human
ugaaucuaugcc

SEQ ID NO: 3582514 - RNA, 14 nt, Human
ugaaucuauuuaag

SEQ ID NO: 3582515 - RNA, 18 nt, Human
ugaaucuauuuaucuuca

SEQ ID NO: 3582516 - RNA, 20 nt, Human
ugaaucucauaauuuauaca

SEQ ID NO: 3582517 - RNA, 22 nt, Human
ugaaucugcauuuucuggguuc

SEQ ID NO: 3582518 - RNA, 12 nt, Human
ugaaucuguaca

SEQ ID NO: 3582519 - RNA, 13 nt, Human
ugaaucuuuaauu

SEQ ID NO: 3582520 - RNA, 18 nt, Human
ugaaugaaaaauuuaagc

SEQ ID NO: 3582521 - RNA, 16 nt, Human
ugaaugaaacccccac

SEQ ID NO: 3582522 - RNA, 19 nt, Human
ugaaugaaacccccacaca

SEQ ID NO: 3582523 - RNA, 22 nt, Human
ugaaugaaacccccacacacac

SEQ ID NO: 3582524 - RNA, 14 nt, Human
ugaaugaaagauua

SEQ ID NO: 3582525 - RNA, 16 nt, Human
ugaaugaaagauuaaa

SEQ ID NO: 3582526 - RNA, 21 nt, Human
ugaaugaaagucuugugacua

SEQ ID NO: 3582527 - RNA, 23 nt, Human
ugaaugaaagucuugugacuagu

SEQ ID NO: 3582528 - RNA, 14 nt, Human
ugaaugaacaaccu

SEQ ID NO: 3582529 - RNA, 11 nt, Human
ugaaugaacac

SEQ ID NO: 3582530 - RNA, 16 nt, Human
ugaaugaaccuucugg

SEQ ID NO: 3582531 - RNA, 15 nt, Human
ugaaugacaacagaa

SEQ ID NO: 3582532 - RNA, 22 nt, Human
ugaaugaggucagcaugucuau

SEQ ID NO: 3582533 - RNA, 23 nt, Human
ugaaugagucuguugugugucau

SEQ ID NO: 3582534 - RNA, 15 nt, Human
ugaaugcauaaaaug

SEQ ID NO: 3582535 - RNA, 13 nt, Human
ugaaugcauuuug

SEQ ID NO: 3582536 - RNA, 22 nt, Human
ugaaugccacugccuucgcuuc

SEQ ID NO: 3582537 - RNA, 13 nt, Human
ugaaugcugccag

SEQ ID NO: 3582538 - RNA, 13 nt, Human
ugaaugcugggac

SEQ ID NO: 3582539 - RNA, 17 nt, Human
ugaaugcuucuaaguaa

SEQ ID NO: 3582540 - RNA, 17 nt, Human
ugaauggauuggauuau

SEQ ID NO: 3582541 - RNA, 23 nt, Human
ugaauggccuucauaucauccac

SEQ ID NO: 3582542 - RNA, 12 nt, Human
ugaauggcuuug

SEQ ID NO: 3582543 - RNA, 15 nt, Human
ugaauggcuuuguau

SEQ ID NO: 3582544 - RNA, 19 nt, Human
ugaauggcuuuguauagaa

SEQ ID NO: 3582545 - RNA, 14 nt, Human
ugaaugggaaaaga

SEQ ID NO: 3582546 - RNA, 20 nt, Human
ugaaugggaucaugaaagua

SEQ ID NO: 3582547 - RNA, 14 nt, Human
ugaaugguccaggg

SEQ ID NO: 3582548 - RNA, 15 nt, Human
ugaaugguccagggu

SEQ ID NO: 3582549 - RNA, 20 nt, Human
ugaaugguguuguaugccuu

SEQ ID NO: 3582550 - RNA, 21 nt, Human
ugaaugguuccaugccugagg

SEQ ID NO: 3582551 - RNA, 23 nt, Human
ugaaugguuccaugccugagggu

SEQ ID NO: 3582552 - RNA, 18 nt, Human
ugaauguaaauuuguacu

SEQ ID NO: 3582553 - RNA, 22 nt, Human
ugaauguaaauuuguacuauuu

SEQ ID NO: 3582554 - RNA, 14 nt, Human
ugaauguaauuugu

SEQ ID NO: 3582555 - RNA, 20 nt, Human
ugaauguaauuuguguaaua

SEQ ID NO: 3582556 - RNA, 15 nt, Human
ugaauguaucaggaa

SEQ ID NO: 3582557 - RNA, 23 nt, Human
ugaauguaugcuucauacaggga

SEQ ID NO: 3582558 - RNA, 13 nt, Human
ugaauguauguaa

SEQ ID NO: 3582559 - RNA, 18 nt, Human
ugaauguaugugcacugu

SEQ ID NO: 3582560 - RNA, 23 nt, Human
ugaauguaugugcacugucacuu

SEQ ID NO: 3582561 - RNA, 17 nt, Human
ugaauguauuuauuugg

SEQ ID NO: 3582562 - RNA, 19 nt, Human
ugaauguauuuauuuggga

SEQ ID NO: 3582563 - RNA, 16 nt, Human
ugaaugucacuucugg

SEQ ID NO: 3582564 - RNA, 23 nt, Human
ugaaugucuuuugaauauuccca

SEQ ID NO: 3582565 - RNA, 14 nt, Human
ugaaugugaagccu

SEQ ID NO: 3582566 - RNA, 21 nt, Human
ugaaugugggcacuggcccag

SEQ ID NO: 3582567 - RNA, 16 nt, Human
ugaauguggucucagg

SEQ ID NO: 3582568 - RNA, 14 nt, Human
ugaaugugucacua

SEQ ID NO: 3582569 - RNA, 12 nt, Human
ugaaugugucag

SEQ ID NO: 3582570 - RNA, 21 nt, Human
ugaauguguuucacaguuuga

SEQ ID NO: 3582571 - RNA, 15 nt, Human
ugaauguuaaauaaa

SEQ ID NO: 3582572 - RNA, 14 nt, Human
ugaauguuauuugu

SEQ ID NO: 3582573 - RNA, 12 nt, Human
ugaauguucuga

SEQ ID NO: 3582574 - RNA, 16 nt, Human
ugaauguucugacauu

SEQ ID NO: 3582575 - RNA, 17 nt, Human
ugaauguucugacauua

SEQ ID NO: 3582576 - RNA, 20 nt, Human
ugaauguucugacauuaaca

SEQ ID NO: 3582577 - RNA, 19 nt, Human
ugaauguuuacacucuuug

SEQ ID NO: 3582578 - RNA, 21 nt, Human
ugaauguuuccaaccuggagu

SEQ ID NO: 3582579 - RNA, 15 nt, Human
ugaauguuuuucuaa

SEQ ID NO: 3582580 - RNA, 16 nt, Human
ugaauguuuuucuaaa

SEQ ID NO: 3582581 - RNA, 14 nt, Human
ugaauuaaaacuuc

SEQ ID NO: 3582582 - RNA, 23 nt, Human
ugaauuaaaauugucccauuugc

SEQ ID NO: 3582583 - RNA, 11 nt, Human
ugaauuaaauu

SEQ ID NO: 3582584 - RNA, 15 nt, Human
ugaauuaaauuuaau

SEQ ID NO: 3582585 - RNA, 23 nt, Human
ugaauuaaucaucuauaaagaag

SEQ ID NO: 3582586 - RNA, 21 nt, Human
ugaauuaaugacagagccagu

SEQ ID NO: 3582587 - RNA, 13 nt, Human
ugaauuacauuug

SEQ ID NO: 3582588 - RNA, 14 nt, Human
ugaauuacauuugu

SEQ ID NO: 3582589 - RNA, 15 nt, Human
ugaauuacauuugua

SEQ ID NO: 3582590 - RNA, 16 nt, Human
ugaauuacauuuguau

SEQ ID NO: 3582591 - RNA, 18 nt, Human
ugaauuacauuuguauaa

SEQ ID NO: 3582592 - RNA, 15 nt, Human
ugaauuacuaacuuc

SEQ ID NO: 3582593 - RNA, 19 nt, Human
ugaauuacuaacuucuaaa

SEQ ID NO: 3582594 - RNA, 21 nt, Human
ugaauuacuaacuucuaaaac

SEQ ID NO: 3582595 - RNA, 14 nt, Human
ugaauuagcucacu

SEQ ID NO: 3582596 - RNA, 20 nt, Human
ugaauuaggcuguaacuacu

SEQ ID NO: 3582597 - RNA, 21 nt, Human
ugaauuaggcuguaacuacuu

SEQ ID NO: 3582598 - RNA, 21 nt, Human
ugaauuaggggacacugucuu

SEQ ID NO: 3582599 - RNA, 15 nt, Human
ugaauuauauguuca

SEQ ID NO: 3582600 - RNA, 17 nt, Human
ugaauuaucagcaaaga

SEQ ID NO: 3582601 - RNA, 21 nt, Human
ugaauuauccacaugaaaaua

SEQ ID NO: 3582602 - RNA, 22 nt, Human
ugaauuauccacaugaaaauaa

SEQ ID NO: 3582603 - RNA, 13 nt, Human
ugaauuaugaaac

SEQ ID NO: 3582604 - RNA, 14 nt, Human
ugaauuauuacagu

SEQ ID NO: 3582605 - RNA, 15 nt, Human
ugaauuauucaauuu

SEQ ID NO: 3582606 - RNA, 13 nt, Human
ugaguguaauguu

SEQ ID NO: 3582607 - RNA, 18 nt, Human
ugaguguaugaguagcca

SEQ ID NO: 3582608 - RNA, 12 nt, Human
ugagugugacag

SEQ ID NO: 3582609 - RNA, 16 nt, Human
ugagugugacagggcc

SEQ ID NO: 3582610 - RNA, 19 nt, Human
ugagugugcggcugugugu

SEQ ID NO: 3582611 - RNA, 15 nt, Human
ugagugugcugcugu

SEQ ID NO: 3582612 - RNA, 15 nt, Human
ugaguguggaagccg

SEQ ID NO: 3582613 - RNA, 18 nt, Human
ugaguguggcuccccucu

SEQ ID NO: 3582614 - RNA, 15 nt, Human
ugaguguuucuauga

SEQ ID NO: 3582615 - RNA, 14 nt, Human
ugaguguuuggggg

SEQ ID NO: 3582616 - RNA, 14 nt, Human
ugaguuaagucuau

SEQ ID NO: 3582617 - RNA, 16 nt, Human
ugaguuacugugcauu

SEQ ID NO: 3582618 - RNA, 17 nt, Human
ugaguuaggaaugagaa

SEQ ID NO: 3582619 - RNA, 17 nt, Human
ugaguuaggcuuucucu

SEQ ID NO: 3582620 - RNA, 12 nt, Human
ugaguuaucaug

SEQ ID NO: 3582621 - RNA, 16 nt, Human
ugaguuaucaugaauu

SEQ ID NO: 3582622 - RNA, 20 nt, Human
ugaguuaucaugaauuuuaa

SEQ ID NO: 3582623 - RNA, 17 nt, Human
ugaguucauacccuguu

SEQ ID NO: 3582624 - RNA, 18 nt, Human
ugaguucauacccuguua

SEQ ID NO: 3582625 - RNA, 14 nt, Human
ugaguuccuagcca

SEQ ID NO: 3582626 - RNA, 15 nt, Human
ugaguucuacauaag

SEQ ID NO: 3582627 - RNA, 18 nt, Human
ugaguucucagggcuccu

SEQ ID NO: 3582628 - RNA, 22 nt, Human
ugaguucucagggcuccugccu

SEQ ID NO: 3582629 - RNA, 15 nt, Human
ugaguucuguguauu

SEQ ID NO: 3582630 - RNA, 17 nt, Human
ugaguucuuccuguaau

SEQ ID NO: 3582631 - RNA, 23 nt, Human
ugaguugauagcacagacccugc

SEQ ID NO: 3582632 - RNA, 16 nt, Human
ugaguugauucagcuc

SEQ ID NO: 3582633 - RNA, 19 nt, Human
ugaguugauucagcucugc

SEQ ID NO: 3582634 - RNA, 22 nt, Human
ugaguuggcuuaccuggcccau

SEQ ID NO: 3582635 - RNA, 16 nt, Human
ugaguuguuguggguu

SEQ ID NO: 3582636 - RNA, 23 nt, Human
ugaguuuaccuuguauacuguag

SEQ ID NO: 3582637 - RNA, 19 nt, Human
ugaguuuaguaaggcugug

SEQ ID NO: 3582638 - RNA, 19 nt, Human
ugaguuucauucuccugcc

SEQ ID NO: 3582639 - RNA, 19 nt, Human
ugaguuuccucaggcugcu

SEQ ID NO: 3582640 - RNA, 13 nt, Human
ugaguuucuuaga

SEQ ID NO: 3582641 - RNA, 22 nt, Human
ugaguuugcccugguuucacug

SEQ ID NO: 3582642 - RNA, 22 nt, Human
ugaguuugggccccagaggcug

SEQ ID NO: 3582643 - RNA, 14 nt, Human
ugaguuuguuucuu

SEQ ID NO: 3582644 - RNA, 18 nt, Human
ugaguuuuauugagaauu

SEQ ID NO: 3582645 - RNA, 23 nt, Human
ugaguuuucaccucgaauuuugu

SEQ ID NO: 3582646 - RNA, 19 nt, Human
ugaguuuuccauggcagga

SEQ ID NO: 3582647 - RNA, 17 nt, Human
ugaguuuucuucuguga

SEQ ID NO: 3582648 - RNA, 19 nt, Human
ugaguuuugggaaguuaaa

SEQ ID NO: 3582649 - RNA, 19 nt, Human
ugaguuuuuacaagaugua

SEQ ID NO: 3582650 - RNA, 14 nt, Human
ugauaaaaaauuuu

SEQ ID NO: 3582651 - RNA, 20 nt, Human
ugauaaaaaauuuuguaauu

SEQ ID NO: 3582652 - RNA, 13 nt, Human
ugauaaaaauacu

SEQ ID NO: 3582653 - RNA, 20 nt, Human
ugauaaaagggcaaaucugc

SEQ ID NO: 3582654 - RNA, 13 nt, Human
ugauaaaaucaua

SEQ ID NO: 3582655 - RNA, 15 nt, Human
ugauaaagagacagu

SEQ ID NO: 3582656 - RNA, 18 nt, Human
ugauaaagauuuuuuaau

SEQ ID NO: 3582657 - RNA, 21 nt, Human
ugauaaaguuucucagauccu

SEQ ID NO: 3582658 - RNA, 19 nt, Human
ugauaaauaguguuauuga

SEQ ID NO: 3582659 - RNA, 15 nt, Human
ugauaaaucagucaa

SEQ ID NO: 3582660 - RNA, 15 nt, Human
ugauaaaucauuuua

SEQ ID NO: 3582661 - RNA, 17 nt, Human
ugauaacaauguuuuaa

SEQ ID NO: 3582662 - RNA, 12 nt, Human
ugauaacagcua

SEQ ID NO: 3582663 - RNA, 23 nt, Human
ugauaacagggauugauuuuaaa

SEQ ID NO: 3582664 - RNA, 21 nt, Human
ugauaacuagauggugcugag

SEQ ID NO: 3582665 - RNA, 21 nt, Human
ugauaacuguuuauauguguu

SEQ ID NO: 3582666 - RNA, 12 nt, Human
ugauaagaaaac

SEQ ID NO: 3582667 - RNA, 17 nt, Human
ugauaagagaaucaaca

SEQ ID NO: 3582668 - RNA, 18 nt, Human
ugauaagagaaucaacau

SEQ ID NO: 3582669 - RNA, 21 nt, Human
ugauaagagggcacacacugu

SEQ ID NO: 3582670 - RNA, 12 nt, Human
ugauaagaucuu

SEQ ID NO: 3582671 - RNA, 15 nt, Human
ugauaagaucuuuua

SEQ ID NO: 3582672 - RNA, 19 nt, Human
ugauaaggacaugaugcuu

SEQ ID NO: 3582673 - RNA, 16 nt, Human
ugauaaggaucagaac

SEQ ID NO: 3582674 - RNA, 20 nt, Human
ugauaaggaucagaacagca

SEQ ID NO: 3582675 - RNA, 19 nt, Human
ugauaagggaaaagauaaa

SEQ ID NO: 3582676 - RNA, 20 nt, Human
ugauaagggaaaagauaaag

SEQ ID NO: 3582677 - RNA, 23 nt, Human
ugauaaguuccuuuccuuuucuu

SEQ ID NO: 3582678 - RNA, 13 nt, Human
ugauaauagaaga

SEQ ID NO: 3582679 - RNA, 15 nt, Human
ugauaauagauucuc

SEQ ID NO: 3582680 - RNA, 14 nt, Human
ugauaaucaacugg

SEQ ID NO: 3582681 - RNA, 18 nt, Human
ugauaaucaacugggcug

SEQ ID NO: 3582682 - RNA, 16 nt, Human
ugauaaugaacagaac

SEQ ID NO: 3582683 - RNA, 18 nt, Human
ugauaaugaugaugacga

SEQ ID NO: 3582684 - RNA, 13 nt, Human
ugauaauguuaaa

SEQ ID NO: 3582685 - RNA, 22 nt, Human
ugauaauguuaaauuuguaagu

SEQ ID NO: 3582686 - RNA, 13 nt, Human
ugauaauuuugcu

SEQ ID NO: 3582687 - RNA, 14 nt, Human
ugauacaaugcugu

SEQ ID NO: 3582688 - RNA, 21 nt, Human
ugauacagaaaaguugaauuu

SEQ ID NO: 3582689 - RNA, 20 nt, Human
ugauacagucaacaagccug

SEQ ID NO: 3582690 - RNA, 14 nt, Human
ugauacauaacuaa

SEQ ID NO: 3582691 - RNA, 16 nt, Human
ugauacauaacuaaau

SEQ ID NO: 3582692 - RNA, 13 nt, Human
ugauacauucaaa

SEQ ID NO: 3582693 - RNA, 16 nt, Human
ugauacauucaaauuu

SEQ ID NO: 3582694 - RNA, 17 nt, Human
ugauaccagaagggaaa

SEQ ID NO: 3582695 - RNA, 15 nt, Human
ugauaccccccucug

SEQ ID NO: 3582696 - RNA, 17 nt, Human
ugauaccccccucuguc

SEQ ID NO: 3582697 - RNA, 19 nt, Human
ugauaccccccucugucuu

SEQ ID NO: 3582698 - RNA, 15 nt, Human
ugauaccccugggga

SEQ ID NO: 3582699 - RNA, 13 nt, Human
ugauacuaauaaa

SEQ ID NO: 3582700 - RNA, 14 nt, Human
ugauacuaauaaac

SEQ ID NO: 3582701 - RNA, 22 nt, Human
ugauacuaauaaacuaauaauu

SEQ ID NO: 3582702 - RNA, 14 nt, Human
ugauacuacaguuu

SEQ ID NO: 3582703 - RNA, 21 nt, Human
ugauacuaucauacuacugaa

SEQ ID NO: 3582704 - RNA, 13 nt, Human
ugauacugauggu

SEQ ID NO: 3582705 - RNA, 13 nt, Human
ugauacuguugca

SEQ ID NO: 3582706 - RNA, 14 nt, Human
ugauacuguugcac

SEQ ID NO: 3582707 - RNA, 14 nt, Human
ugauacuuauauuu

SEQ ID NO: 3582708 - RNA, 14 nt, Human
ugauacuucacuac

SEQ ID NO: 3582709 - RNA, 16 nt, Human
ugauacuucauuuaaa

SEQ ID NO: 3582710 - RNA, 22 nt, Human
ugauacuuguuuucaaaccagu

SEQ ID NO: 3582711 - RNA, 15 nt, Human
ugauacuuuuaagag

SEQ ID NO: 3582712 - RNA, 22 nt, Human
ugauagacacauaugaggggga

SEQ ID NO: 3582713 - RNA, 19 nt, Human
ugauagauuugaccuccuc

SEQ ID NO: 3582714 - RNA, 13 nt, Human
ugauagcaaagcg

SEQ ID NO: 3582715 - RNA, 23 nt, Human
ugauagcaagugaauuuuucucu

SEQ ID NO: 3582716 - RNA, 13 nt, Human
ugauagcacagac

SEQ ID NO: 3582717 - RNA, 22 nt, Human
ugauagcacagacccugcccug

SEQ ID NO: 3582718 - RNA, 14 nt, Human
ugauagcacuuucu

SEQ ID NO: 3582719 - RNA, 15 nt, Human
ugauagcguuggaau

SEQ ID NO: 3582720 - RNA, 20 nt, Human
ugauagcguuggaauuaaaa

SEQ ID NO: 3582721 - RNA, 16 nt, Human
ugauagcuaacauuuu

SEQ ID NO: 3582722 - RNA, 18 nt, Human
ugauagguauaaguggug

SEQ ID NO: 3582723 - RNA, 16 nt, Human
ugauagugguggaguu

SEQ ID NO: 3582724 - RNA, 13 nt, Human
ugauaguuacugu

SEQ ID NO: 3582725 - RNA, 14 nt, Human
ugauaguugaaugu

SEQ ID NO: 3582726 - RNA, 24 nt, Human
ugauaguuguaccgcaaugugacu

SEQ ID NO: 3582727 - RNA, 13 nt, Human
ugauauaaacagc

SEQ ID NO: 3582728 - RNA, 18 nt, Human
ugauauaauuuccauagu

SEQ ID NO: 3582729 - RNA, 22 nt, Human
ugauauacuuuuuucuuauuua

SEQ ID NO: 3582730 - RNA, 16 nt, Human
ugauauagaaguauaa

SEQ ID NO: 3582731 - RNA, 11 nt, Human
ugauauagaau

SEQ ID NO: 3582732 - RNA, 17 nt, Human
ugauauagaauuagcuu

SEQ ID NO: 3582733 - RNA, 22 nt, Human
ugauauauaaguguacauaugu

SEQ ID NO: 3582734 - RNA, 20 nt, Human
ugauauaugagacuuuaugu

SEQ ID NO: 3582735 - RNA, 18 nt, Human
ugauauauguauuaauaa

SEQ ID NO: 3582736 - RNA, 14 nt, Human
ugauauauuuuaca

SEQ ID NO: 3582737 - RNA, 15 nt, Human
ugauauauuuuacaa

SEQ ID NO: 3582738 - RNA, 21 nt, Human
ugauaucaugccccuguacuc

SEQ ID NO: 3582739 - RNA, 14 nt, Human
ugauauccuucuag

SEQ ID NO: 3582740 - RNA, 15 nt, Human
ugauaucuauaaaau

SEQ ID NO: 3582741 - RNA, 23 nt, Human
ugauaucuauaaaauagauauaa

SEQ ID NO: 3582742 - RNA, 15 nt, Human
ugauaugaguauaca

SEQ ID NO: 3582743 - RNA, 16 nt, Human
ugauaugaguauacaa

SEQ ID NO: 3582744 - RNA, 17 nt, Human
ugauaugaguauacaau

SEQ ID NO: 3582745 - RNA, 19 nt, Human
ugauaugauuuaaaacaug

SEQ ID NO: 3582746 - RNA, 16 nt, Human
ugauaugcauuuccug

SEQ ID NO: 3582747 - RNA, 20 nt, Human
ugauauggagcccuguaauu

SEQ ID NO: 3582748 - RNA, 15 nt, Human
ugauauggcagaaga

SEQ ID NO: 3582749 - RNA, 12 nt, Human
ugauaugggucu

SEQ ID NO: 3582750 - RNA, 13 nt, Human
ugauauuaaagga

SEQ ID NO: 3582751 - RNA, 22 nt, Human
ugauauuaauuuaucagauugc

SEQ ID NO: 3582752 - RNA, 22 nt, Human
ugauauucagaauuaugaugga

SEQ ID NO: 3582753 - RNA, 19 nt, Human
ugauauuccauaguauauu

SEQ ID NO: 3582754 - RNA, 15 nt, Human
ugauauucuaagacu

SEQ ID NO: 3582755 - RNA, 17 nt, Human
ugauauucuuuguuaau

SEQ ID NO: 3582756 - RNA, 17 nt, Human
ugauauugugaacauuu

SEQ ID NO: 3582757 - RNA, 12 nt, Human
ugauauuucaga

SEQ ID NO: 3582758 - RNA, 17 nt, Human
ugauauuucuagcuuau

SEQ ID NO: 3582759 - RNA, 12 nt, Human
ugauauuucucu

SEQ ID NO: 3582760 - RNA, 17 nt, Human
ugauauuugugcauuuu

SEQ ID NO: 3582761 - RNA, 17 nt, Human
ugauauuuuuuaucaua

SEQ ID NO: 3582762 - RNA, 18 nt, Human
ugaucaaagccacacucu

SEQ ID NO: 3582763 - RNA, 20 nt, Human
ugaucaaaguccgaggggcg

SEQ ID NO: 3582764 - RNA, 16 nt, Human
ugaucaaauguuuaau

SEQ ID NO: 3582765 - RNA, 16 nt, Human
ugaucaaauucauuuu

SEQ ID NO: 3582766 - RNA, 23 nt, Human
ugaucaaauucauuuuuuucacu

SEQ ID NO: 3582767 - RNA, 18 nt, Human
ugaucaacaucuuuucuu

SEQ ID NO: 3582768 - RNA, 23 nt, Human
ugaucaacaucuuuucuugccuc

SEQ ID NO: 3582769 - RNA, 15 nt, Human
ugaucaacucuucga

SEQ ID NO: 3582770 - RNA, 11 nt, Human
ugaucaaggcc

SEQ ID NO: 3582771 - RNA, 13 nt, Human
ugaucaaggccuu

SEQ ID NO: 3582772 - RNA, 22 nt, Human
ugaucaagggaauguaacugcu

SEQ ID NO: 3582773 - RNA, 13 nt, Human
ugaucaauaaaau

SEQ ID NO: 3582774 - RNA, 21 nt, Human
ugaucaauaaaaugugauuuu

SEQ ID NO: 3582775 - RNA, 16 nt, Human
ugaucaauauuuuuau

SEQ ID NO: 3582776 - RNA, 18 nt, Human
ugaucaaugacagagccu

SEQ ID NO: 3582777 - RNA, 14 nt, Human
ugaucaauuaaaug

SEQ ID NO: 3582778 - RNA, 21 nt, Human
ugaucaauuauaguuucugag

SEQ ID NO: 3582779 - RNA, 13 nt, Human
ugaucacggcuca

SEQ ID NO: 3582780 - RNA, 15 nt, Human
ugaucacggcucacu

SEQ ID NO: 3582781 - RNA, 19 nt, Human
ugaucacggcucacugcag

SEQ ID NO: 3582782 - RNA, 15 nt, Human
ugaucacuagccugu

SEQ ID NO: 3582783 - RNA, 16 nt, Human
ugaucacuagccuguc

SEQ ID NO: 3582784 - RNA, 22 nt, Human
ugaucacuccagguaguuuggg

SEQ ID NO: 3582785 - RNA, 18 nt, Human
ugaucacuggcaaugaaa

SEQ ID NO: 3582786 - RNA, 15 nt, Human
ugaucagaucugaca

SEQ ID NO: 3582787 - RNA, 16 nt, Human
ugaucagccccacccu

SEQ ID NO: 3582788 - RNA, 16 nt, Human
ugaucagcuguuuguc

SEQ ID NO: 3582789 - RNA, 20 nt, Human
ugaucagcuuucaaagcauu

SEQ ID NO: 3582790 - RNA, 15 nt, Human
ugaucaguggacagu

SEQ ID NO: 3582791 - RNA, 12 nt, Human
ugaucaguguug

SEQ ID NO: 3582792 - RNA, 20 nt, Human
ugaucauaaacugacuauca

SEQ ID NO: 3582793 - RNA, 21 nt, Human
ugaucauaagucuaaauaaau

SEQ ID NO: 3582794 - RNA, 19 nt, Human
ugaucauagguauuucaaa

SEQ ID NO: 3582795 - RNA, 23 nt, Human
ugaucaucccaucuaagcugcag

SEQ ID NO: 3582796 - RNA, 18 nt, Human
ugaucaucgccagaggug

SEQ ID NO: 3582797 - RNA, 15 nt, Human
ugaucaugcauuguu

SEQ ID NO: 3582798 - RNA, 14 nt, Human
ugaucauguacuuu

SEQ ID NO: 3582799 - RNA, 19 nt, Human
ugaucauguacuuuuuagu

SEQ ID NO: 3582800 - RNA, 16 nt, Human
ugaucauguuguuaaa

SEQ ID NO: 3582801 - RNA, 16 nt, Human
ugaucauuuucccccc

SEQ ID NO: 3582802 - RNA, 18 nt, Human
ugauccaagcaagacuga

SEQ ID NO: 3582803 - RNA, 21 nt, Human
ugauccaagcuggucccacuc

SEQ ID NO: 3582804 - RNA, 17 nt, Human
ugauccacccaccucag

SEQ ID NO: 3582805 - RNA, 23 nt, Human
ugauccagaaagaaaacuuguau

SEQ ID NO: 3582806 - RNA, 20 nt, Human
ugauccagcagauuauucac

SEQ ID NO: 3582807 - RNA, 22 nt, Human
ugauccagcagauuauucacug

SEQ ID NO: 3582808 - RNA, 18 nt, Human
ugauccagcccugaguuc

SEQ ID NO: 3582809 - RNA, 21 nt, Human
ugauccaugaguuugcccugg

SEQ ID NO: 3582810 - RNA, 13 nt, Human
ugauccauguaac

SEQ ID NO: 3582811 - RNA, 14 nt, Human
ugauccauguaacu

SEQ ID NO: 3582812 - RNA, 15 nt, Human
ugauccauguaacug

SEQ ID NO: 3582813 - RNA, 16 nt, Human
ugauccauuucuaauu

SEQ ID NO: 3582814 - RNA, 19 nt, Human
ugaucccagagagcccgag

SEQ ID NO: 3582815 - RNA, 15 nt, Human
ugaucccauuuuccu

SEQ ID NO: 3582816 - RNA, 18 nt, Human
ugauccccacgccacagc

SEQ ID NO: 3582817 - RNA, 20 nt, Human
ugauccccacgccacagccc

SEQ ID NO: 3582818 - RNA, 17 nt, Human
ugaucccguuuucccca

SEQ ID NO: 3582819 - RNA, 21 nt, Human
ugaucccguuuuccccaugac

SEQ ID NO: 3582820 - RNA, 20 nt, Human
ugaucccuguguugucucua

SEQ ID NO: 3582821 - RNA, 19 nt, Human
ugaucccuugagauaugga

SEQ ID NO: 3582822 - RNA, 16 nt, Human
ugauccuaguuccacc

SEQ ID NO: 3582823 - RNA, 18 nt, Human
ugauccucauauggccca

SEQ ID NO: 3582824 - RNA, 16 nt, Human
ugauccucccaccuca

SEQ ID NO: 3582825 - RNA, 21 nt, Human
ugauccucccaccucagccuc

SEQ ID NO: 3582826 - RNA, 14 nt, Human
ugauccuggaggcc

SEQ ID NO: 3582827 - RNA, 15 nt, Human
ugauccuggaggccc

SEQ ID NO: 3582828 - RNA, 14 nt, Human
ugauccugugaagu

SEQ ID NO: 3582829 - RNA, 20 nt, Human
ugauccuuuuauguuauuua

SEQ ID NO: 3582830 - RNA, 15 nt, Human
ugaucgaaaaaauaa

SEQ ID NO: 3582831 - RNA, 16 nt, Human
ugaucgaaaaaauaau

SEQ ID NO: 3582832 - RNA, 15 nt, Human
ugaucgccuucccca

SEQ ID NO: 3582833 - RNA, 16 nt, Human
ugaucgugacgcugaa

SEQ ID NO: 3582834 - RNA, 15 nt, Human
ugaucuacaugagga

SEQ ID NO: 3582835 - RNA, 21 nt, Human
ugaucuaccuugaauugauau

SEQ ID NO: 3582836 - RNA, 20 nt, Human
ugaucuacuucuguaauugu

SEQ ID NO: 3582837 - RNA, 21 nt, Human
ugaucuacuucuguaauugug

SEQ ID NO: 3582838 - RNA, 17 nt, Human
ugaucuagagccaguua

SEQ ID NO: 3582839 - RNA, 17 nt, Human
ugaucuagguuuaacuc

SEQ ID NO: 3582840 - RNA, 18 nt, Human
ugaucuagguuuaacuca

SEQ ID NO: 3582841 - RNA, 19 nt, Human
ugaucucagcucacugcaa

SEQ ID NO: 3582842 - RNA, 16 nt, Human
ugaucucagggaagcc

SEQ ID NO: 3582843 - RNA, 22 nt, Human
ugaucucauuuaauccucucaa

SEQ ID NO: 3582844 - RNA, 21 nt, Human
ugaucuccauauguuacacua

SEQ ID NO: 3582845 - RNA, 20 nt, Human
ugaucuccauggcuuccucc

SEQ ID NO: 3582846 - RNA, 13 nt, Human
ugaucucccugcc

SEQ ID NO: 3582847 - RNA, 15 nt, Human
ugaucuccguggcuu

SEQ ID NO: 3582848 - RNA, 18 nt, Human
ugaucucgaacuccuaac

SEQ ID NO: 3582849 - RNA, 21 nt, Human
ugaucucggcucacugcaacc

SEQ ID NO: 3582850 - RNA, 15 nt, Human
ugaucucucgugauu

SEQ ID NO: 3582851 - RNA, 16 nt, Human
ugaucugcucagcccu

SEQ ID NO: 3582852 - RNA, 17 nt, Human
ugaucugcucagcccug

SEQ ID NO: 3582853 - RNA, 18 nt, Human
ugaucugcucagcccugg

SEQ ID NO: 3582854 - RNA, 20 nt, Human
ugaucugcucagcccuggag

SEQ ID NO: 3582855 - RNA, 15 nt, Human
ugaucuggaacccag

SEQ ID NO: 3582856 - RNA, 17 nt, Human
ugaucuggaacccagac

SEQ ID NO: 3582857 - RNA, 19 nt, Human
ugaucuggaacccagacuc

SEQ ID NO: 3582858 - RNA, 18 nt, Human
ugaucugggaacucccaa

SEQ ID NO: 3582859 - RNA, 17 nt, Human
ugaucugggucucuaau

SEQ ID NO: 3582860 - RNA, 19 nt, Human
ugaucuguauauacaauaa

SEQ ID NO: 3582861 - RNA, 19 nt, Human
ugaucugucuguggcaaaa

SEQ ID NO: 3582862 - RNA, 13 nt, Human
ugaucugucuugu

SEQ ID NO: 3582863 - RNA, 15 nt, Human
ugaucugucuuguaa

SEQ ID NO: 3582864 - RNA, 19 nt, Human
ugaucugugaauugagcug

SEQ ID NO: 3582865 - RNA, 11 nt, Human
ugaucugugcu

SEQ ID NO: 3582866 - RNA, 12 nt, Human
ugaucugugcuu

SEQ ID NO: 3582867 - RNA, 21 nt, Human
ugaucugugcuuuccagcuca

SEQ ID NO: 3582868 - RNA, 16 nt, Human
ugaucuuaagaggcug

SEQ ID NO: 3582869 - RNA, 16 nt, Human
ugaucuuauuuuucua

SEQ ID NO: 3582870 - RNA, 17 nt, Human
ugaucuuauuuuucuaa

SEQ ID NO: 3582871 - RNA, 22 nt, Human
ugaucuucaacaaauugcccuu

SEQ ID NO: 3582872 - RNA, 16 nt, Human
ugaucuuccucugcua

SEQ ID NO: 3582873 - RNA, 21 nt, Human
ugaucuuggcuuacugcagcc

SEQ ID NO: 3582874 - RNA, 15 nt, Human
ugaugaaaagauuua

SEQ ID NO: 3582875 - RNA, 12 nt, Human
ugaugaaaauaa

SEQ ID NO: 3582876 - RNA, 17 nt, Human
ugaugaaaauaaagaau

SEQ ID NO: 3582877 - RNA, 19 nt, Human
ugaugaaagcugauuacug

SEQ ID NO: 3582878 - RNA, 18 nt, Human
ugaugaaauguaaauacu

SEQ ID NO: 3582879 - RNA, 15 nt, Human
ugaugaacuuucucu

SEQ ID NO: 3582880 - RNA, 12 nt, Human
ugaugaagaagu

SEQ ID NO: 3582881 - RNA, 17 nt, Human
ugaugaagaaguugaua

SEQ ID NO: 3582882 - RNA, 14 nt, Human
ugaugaagaggagu

SEQ ID NO: 3582883 - RNA, 21 nt, Human
ugaugaagccgaccuuagauu

SEQ ID NO: 3582884 - RNA, 17 nt, Human
ugaugaagggaggaggu

SEQ ID NO: 3582885 - RNA, 13 nt, Human
ugaugaaucacug

SEQ ID NO: 3582886 - RNA, 18 nt, Human
ugaugacaaaaaauguuu

SEQ ID NO: 3582887 - RNA, 17 nt, Human
ugaugacaauaaagcuu

SEQ ID NO: 3582888 - RNA, 14 nt, Human
ugaugacagacacu

SEQ ID NO: 3582889 - RNA, 15 nt, Human
ugaugacucaagauu

SEQ ID NO: 3582890 - RNA, 22 nt, Human
ugaugacucaagauucccagga

SEQ ID NO: 3582891 - RNA, 16 nt, Human
ugaugagaauuucuaa

SEQ ID NO: 3582892 - RNA, 16 nt, Human
ugaugagaggaaauca

SEQ ID NO: 3582893 - RNA, 16 nt, Human
ugaugaggcccuccac

SEQ ID NO: 3582894 - RNA, 21 nt, Human
ugaugaggcccuccacaccug

SEQ ID NO: 3582895 - RNA, 17 nt, Human
ugaugaggccucuugga

SEQ ID NO: 3582896 - RNA, 15 nt, Human
ugaugaggggagggg

SEQ ID NO: 3582897 - RNA, 17 nt, Human
ugauuaugaauuacauu

SEQ ID NO: 3582898 - RNA, 15 nt, Human
ugauuaugacuguuu

SEQ ID NO: 3582899 - RNA, 16 nt, Human
ugauuauuacuggcaa

SEQ ID NO: 3582900 - RNA, 16 nt, Human
ugauuauucaguguca

SEQ ID NO: 3582901 - RNA, 18 nt, Human
ugauuauuguauuuauuc

SEQ ID NO: 3582902 - RNA, 16 nt, Human
ugauuauuuauuauuu

SEQ ID NO: 3582903 - RNA, 19 nt, Human
ugauuauuugcauguuaug

SEQ ID NO: 3582904 - RNA, 21 nt, Human
ugauuauuuucauuacaaugg

SEQ ID NO: 3582905 - RNA, 13 nt, Human
ugauuauuuucuu

SEQ ID NO: 3582906 - RNA, 20 nt, Human
ugauuauuuuuuucuguaaa

SEQ ID NO: 3582907 - RNA, 18 nt, Human
ugauuauuuuuuuuuucu

SEQ ID NO: 3582908 - RNA, 14 nt, Human
ugauucaaaauauu

SEQ ID NO: 3582909 - RNA, 19 nt, Human
ugauucaaaauauuuaaaa

SEQ ID NO: 3582910 - RNA, 13 nt, Human
ugauucaaauggg

SEQ ID NO: 3582911 - RNA, 14 nt, Human
ugauucaacuaaaa

SEQ ID NO: 3582912 - RNA, 23 nt, Human
ugauucaacuaaaaaaaaaaaag

SEQ ID NO: 3582913 - RNA, 12 nt, Human
ugauucaagcca

SEQ ID NO: 3582914 - RNA, 23 nt, Human
ugauucaaucuguaaacugugua

SEQ ID NO: 3582915 - RNA, 16 nt, Human
ugauucacauguuuuc

SEQ ID NO: 3582916 - RNA, 24 nt, Human
ugauucaccaaaauagucuucuca

SEQ ID NO: 3582917 - RNA, 22 nt, Human
ugauucacccccaaacagugac

SEQ ID NO: 3582918 - RNA, 13 nt, Human
ugauucacugcau

SEQ ID NO: 3582919 - RNA, 19 nt, Human
ugauucagaaaauguucug

SEQ ID NO: 3582920 - RNA, 20 nt, Human
ugauucagaaaauguucugu

SEQ ID NO: 3582921 - RNA, 14 nt, Human
ugauucagaaauug

SEQ ID NO: 3582922 - RNA, 16 nt, Human
ugauucagaaauugga

SEQ ID NO: 3582923 - RNA, 18 nt, Human
ugauucagacagcugccu

SEQ ID NO: 3582924 - RNA, 18 nt, Human
ugauucaggugcagagga

SEQ ID NO: 3582925 - RNA, 21 nt, Human
ugauucaggugcagaggaagu

SEQ ID NO: 3582926 - RNA, 15 nt, Human
ugauucauaaugacu

SEQ ID NO: 3582927 - RNA, 18 nt, Human
ugauucauaguaacuucu

SEQ ID NO: 3582928 - RNA, 17 nt, Human
ugauucauuuuaacauc

SEQ ID NO: 3582929 - RNA, 22 nt, Human
ugauucauuuuaacaucugaga

SEQ ID NO: 3582930 - RNA, 21 nt, Human
ugauuccacuacaccuggcug

SEQ ID NO: 3582931 - RNA, 23 nt, Human
ugauuccacuacaccuggcugag

SEQ ID NO: 3582932 - RNA, 15 nt, Human
ugauuccacuuuuau

SEQ ID NO: 3582933 - RNA, 15 nt, Human
ugauuccagccauca

SEQ ID NO: 3582934 - RNA, 19 nt, Human
ugauuccagccaucaccuu

SEQ ID NO: 3582935 - RNA, 16 nt, Human
ugauuccauccaccuu

SEQ ID NO: 3582936 - RNA, 16 nt, Human
ugauuccaucuccuug

SEQ ID NO: 3582937 - RNA, 15 nt, Human
ugauucccugauuua

SEQ ID NO: 3582938 - RNA, 20 nt, Human
ugauucccuuguuauucaac

SEQ ID NO: 3582939 - RNA, 23 nt, Human
ugauuccuaagccacuugaaaug

SEQ ID NO: 3582940 - RNA, 19 nt, Human
ugauuccuuccuguucuga

SEQ ID NO: 3582941 - RNA, 15 nt, Human
ugauuccuuuaacaa

SEQ ID NO: 3582942 - RNA, 20 nt, Human
ugauuccuuugaagaggaaa

SEQ ID NO: 3582943 - RNA, 19 nt, Human
ugauucuaaugucuucauu

SEQ ID NO: 3582944 - RNA, 19 nt, Human
ugauucucagggucucugc

SEQ ID NO: 3582945 - RNA, 20 nt, Human
ugauucucagggucucugcu

SEQ ID NO: 3582946 - RNA, 23 nt, Human
ugauucucagggucucugcugcc

SEQ ID NO: 3582947 - RNA, 15 nt, Human
ugauucucaugccuc

SEQ ID NO: 3582948 - RNA, 19 nt, Human
ugauucuccugccucagcc

SEQ ID NO: 3582949 - RNA, 22 nt, Human
ugauucugcaguaaaucuuuua

SEQ ID NO: 3582950 - RNA, 19 nt, Human
ugauucugcuuuuaccaug

SEQ ID NO: 3582951 - RNA, 21 nt, Human
ugauucuucagcaaaaauauu

SEQ ID NO: 3582952 - RNA, 20 nt, Human
ugauucuugaguuuagugau

SEQ ID NO: 3582953 - RNA, 18 nt, Human
ugauucuuuuuaaagugu

SEQ ID NO: 3582954 - RNA, 18 nt, Human
ugauugaagaaacagcua

SEQ ID NO: 3582955 - RNA, 13 nt, Human
ugauugacagcuu

SEQ ID NO: 3582956 - RNA, 16 nt, Human
ugauugaccugcuccg

SEQ ID NO: 3582957 - RNA, 13 nt, Human
ugauugagaaguu

SEQ ID NO: 3582958 - RNA, 20 nt, Human
ugauugagaaguucauuguc

SEQ ID NO: 3582959 - RNA, 14 nt, Human
ugauugauuugaag

SEQ ID NO: 3582960 - RNA, 15 nt, Human
ugauugcacauuguu

SEQ ID NO: 3582961 - RNA, 21 nt, Human
ugauugcagaauuguuuagau

SEQ ID NO: 3582962 - RNA, 14 nt, Human
ugauugcagcuuua

SEQ ID NO: 3582963 - RNA, 22 nt, Human
ugauugccuuuuuauaacuuuu

SEQ ID NO: 3582964 - RNA, 13 nt, Human
ugauugcuaaaug

SEQ ID NO: 3582965 - RNA, 17 nt, Human
ugauugcuuuuaaaauu

SEQ ID NO: 3582966 - RNA, 22 nt, Human
ugauuggaagggcuuuucaaaa

SEQ ID NO: 3582967 - RNA, 23 nt, Human
ugauuggaagggcuuuucaaaau

SEQ ID NO: 3582968 - RNA, 13 nt, Human
ugauuggaggggg

SEQ ID NO: 3582969 - RNA, 14 nt, Human
ugauuggauuauuc

SEQ ID NO: 3582970 - RNA, 16 nt, Human
ugauuggauuauucau

SEQ ID NO: 3582971 - RNA, 16 nt, Human
ugauuggcuuguagaa

SEQ ID NO: 3582972 - RNA, 18 nt, Human
ugauugggaauaaauaug

SEQ ID NO: 3582973 - RNA, 15 nt, Human
ugauugggacagagg

SEQ ID NO: 3582974 - RNA, 17 nt, Human
ugauugggacagagguu

SEQ ID NO: 3582975 - RNA, 21 nt, Human
ugauugggcacaucauuucaa

SEQ ID NO: 3582976 - RNA, 21 nt, Human
ugauuggugcaacccuuaccc

SEQ ID NO: 3582977 - RNA, 17 nt, Human
ugauugguuucucuucu

SEQ ID NO: 3582978 - RNA, 16 nt, Human
ugauugguuuuaauug

SEQ ID NO: 3582979 - RNA, 23 nt, Human
ugauuguaaaauagcuuguauag

SEQ ID NO: 3582980 - RNA, 18 nt, Human
ugauuguaacguugcugu

SEQ ID NO: 3582981 - RNA, 19 nt, Human
ugauuguaacguugcugug

SEQ ID NO: 3582982 - RNA, 20 nt, Human
ugauuguaacguugcugugg

SEQ ID NO: 3582983 - RNA, 21 nt, Human
ugauuguaacguugcuguggg

SEQ ID NO: 3582984 - RNA, 20 nt, Human
ugauuguaguaaucugcauu

SEQ ID NO: 3582985 - RNA, 16 nt, Human
ugauuguauuguugaa

SEQ ID NO: 3582986 - RNA, 18 nt, Human
ugauuguggaauggagau

SEQ ID NO: 3582987 - RNA, 21 nt, Human
ugauuguggaauggagauuca

SEQ ID NO: 3582988 - RNA, 15 nt, Human
ugauuuaaaacaugu

SEQ ID NO: 3582989 - RNA, 20 nt, Human
ugauuuaauaaaauaauucu

SEQ ID NO: 3582990 - RNA, 17 nt, Human
ugauuuaauaguguuaa

SEQ ID NO: 3582991 - RNA, 18 nt, Human
ugauuuaauaguguuaau

SEQ ID NO: 3582992 - RNA, 21 nt, Human
ugauuuaauaguguuaaucaa

SEQ ID NO: 3582993 - RNA, 15 nt, Human
ugauuuaauaugcaa

SEQ ID NO: 3582994 - RNA, 17 nt, Human
ugauuuauaaacagaca

SEQ ID NO: 3582995 - RNA, 23 nt, Human
ugauuuauaaacagacaauaugu

SEQ ID NO: 3582996 - RNA, 16 nt, Human
ugauuuaucacacaaa

SEQ ID NO: 3582997 - RNA, 22 nt, Human
ugauuuaugcauggaaaccuga

SEQ ID NO: 3582998 - RNA, 21 nt, Human
ugauuucaaaguuuuguugua

SEQ ID NO: 3582999 - RNA, 16 nt, Human
ugauuucacaaauauu

SEQ ID NO: 3583000 - RNA, 14 nt, Human
ugauuucacagugu

SEQ ID NO: 3583001 - RNA, 21 nt, Human
ugauuucagcaccuacagugu

SEQ ID NO: 3583002 - RNA, 19 nt, Human
ugauuucaggauacucugu

SEQ ID NO: 3583003 - RNA, 23 nt, Human
ugauuucaggauacucugucaga

SEQ ID NO: 3583004 - RNA, 14 nt, Human
ugauuucaguaagu

SEQ ID NO: 3583005 - RNA, 16 nt, Human
ugauuucaguaagucu

SEQ ID NO: 3583006 - RNA, 19 nt, Human
ugauuucaguaagucucau

SEQ ID NO: 3583007 - RNA, 13 nt, Human
ugauuucauguac

SEQ ID NO: 3583008 - RNA, 15 nt, Human
ugauuucauguacug

SEQ ID NO: 3583009 - RNA, 16 nt, Human
ugauuucauguacugc

SEQ ID NO: 3583010 - RNA, 17 nt, Human
ugauuucauguacugca

SEQ ID NO: 3583011 - RNA, 18 nt, Human
ugauuucauguacugcau

SEQ ID NO: 3583012 - RNA, 13 nt, Human
ugauuucauucaa

SEQ ID NO: 3583013 - RNA, 13 nt, Human
ugauuucauuuca

SEQ ID NO: 3583014 - RNA, 18 nt, Human
ugauuucccguggcccca

SEQ ID NO: 3583015 - RNA, 19 nt, Human
ugauuucccguggccccag

SEQ ID NO: 3583016 - RNA, 20 nt, Human
ugauuucccguggccccagc

SEQ ID NO: 3583017 - RNA, 21 nt, Human
ugauuucccguggccccagcc

SEQ ID NO: 3583018 - RNA, 22 nt, Human
ugauuucccguggccccagccu

SEQ ID NO: 3583019 - RNA, 18 nt, Human
ugauuuccguuaaaauac

SEQ ID NO: 3583020 - RNA, 15 nt, Human
ugauuuccuguguca

SEQ ID NO: 3583021 - RNA, 14 nt, Human
ugauuuccuugaau

SEQ ID NO: 3583022 - RNA, 23 nt, Human
ugauuucuaguuauuuauucugg

SEQ ID NO: 3583023 - RNA, 15 nt, Human
ugauuucuaugcuga

SEQ ID NO: 3583024 - RNA, 20 nt, Human
ugauuucuauucaagguggc

SEQ ID NO: 3583025 - RNA, 17 nt, Human
ugauuucuuguaacauc

SEQ ID NO: 3583026 - RNA, 15 nt, Human
ugauuucuuuccaga

SEQ ID NO: 3583027 - RNA, 16 nt, Human
ugauuucuuuccagag

SEQ ID NO: 3583028 - RNA, 23 nt, Human
ugauuugacuguuuuuacccaua

SEQ ID NO: 3583029 - RNA, 14 nt, Human
ugauuugaguugau

SEQ ID NO: 3583030 - RNA, 12 nt, Human
ugauuugcauug

SEQ ID NO: 3583031 - RNA, 18 nt, Human
ugauuugcauugaacaca

SEQ ID NO: 3583032 - RNA, 21 nt, Human
ugauuugccacugauauucag

SEQ ID NO: 3583033 - RNA, 22 nt, Human
ugauuugccacugauauucaga

SEQ ID NO: 3583034 - RNA, 19 nt, Human
ugauuuggugaccaacugu

SEQ ID NO: 3583035 - RNA, 16 nt, Human
ugauuuguuuuagaau

SEQ ID NO: 3583036 - RNA, 20 nt, Human
ugauuuuaaaauguacaugu

SEQ ID NO: 3583037 - RNA, 13 nt, Human
ugauuuuaacaau

SEQ ID NO: 3583038 - RNA, 17 nt, Human
ugauuuuaacaauaacu

SEQ ID NO: 3583039 - RNA, 18 nt, Human
ugauuuuaacaauaacua

SEQ ID NO: 3583040 - RNA, 13 nt, Human
ugcaagugugugc

SEQ ID NO: 3583041 - RNA, 21 nt, Human
ugcaagugugugcacaugugu

SEQ ID NO: 3583042 - RNA, 18 nt, Human
ugcaagugugugcaugug

SEQ ID NO: 3583043 - RNA, 18 nt, Human
ugcaaguugaggacuucu

SEQ ID NO: 3583044 - RNA, 19 nt, Human
ugcaaguugaggacuucuu

SEQ ID NO: 3583045 - RNA, 19 nt, Human
ugcaauaaaucugacccag

SEQ ID NO: 3583046 - RNA, 21 nt, Human
ugcaauaaaucugacccagug

SEQ ID NO: 3583047 - RNA, 23 nt, Human
ugcaauaaaucugacccagugcc

SEQ ID NO: 3583048 - RNA, 17 nt, Human
ugcaauaacagcugcaa

SEQ ID NO: 3583049 - RNA, 18 nt, Human
ugcaauaacagcugcaau

SEQ ID NO: 3583050 - RNA, 15 nt, Human
ugcaauaacuucuga

SEQ ID NO: 3583051 - RNA, 17 nt, Human
ugcaauaacuucugacc

SEQ ID NO: 3583052 - RNA, 18 nt, Human
ugcaauaaugcaguaugg

SEQ ID NO: 3583053 - RNA, 17 nt, Human
ugcaauacaaguuucau

SEQ ID NO: 3583054 - RNA, 19 nt, Human
ugcaauauaucuaaauuga

SEQ ID NO: 3583055 - RNA, 14 nt, Human
ugcaauauauuuug

SEQ ID NO: 3583056 - RNA, 15 nt, Human
ugcaauauauuuugu

SEQ ID NO: 3583057 - RNA, 16 nt, Human
ugcaauauauuuugua

SEQ ID NO: 3583058 - RNA, 15 nt, Human
ugcaauaucugaagc

SEQ ID NO: 3583059 - RNA, 13 nt, Human
ugcaauaucuucg

SEQ ID NO: 3583060 - RNA, 18 nt, Human
ugcaauauuaaugccuuu

SEQ ID NO: 3583061 - RNA, 16 nt, Human
ugcaauauuuccucau

SEQ ID NO: 3583062 - RNA, 14 nt, Human
ugcaauauuuguaa

SEQ ID NO: 3583063 - RNA, 20 nt, Human
ugcaauauuuguaaggcuug

SEQ ID NO: 3583064 - RNA, 20 nt, Human
ugcaaucauaugugaucugu

SEQ ID NO: 3583065 - RNA, 15 nt, Human
ugcaaucccuuaaua

SEQ ID NO: 3583066 - RNA, 19 nt, Human
ugcaauccugucuuucuga

SEQ ID NO: 3583067 - RNA, 15 nt, Human
ugcaauccuuacaaa

SEQ ID NO: 3583068 - RNA, 16 nt, Human
ugcaauccuuacaaau

SEQ ID NO: 3583069 - RNA, 18 nt, Human
ugcaaucuauaauauuug

SEQ ID NO: 3583070 - RNA, 13 nt, Human
ugcaaugaccuuu

SEQ ID NO: 3583071 - RNA, 16 nt, Human
ugcaaugacucaggac

SEQ ID NO: 3583072 - RNA, 18 nt, Human
ugcaauggcuauauggca

SEQ ID NO: 3583073 - RNA, 18 nt, Human
ugcaaugggauguaugaa

SEQ ID NO: 3583074 - RNA, 24 nt, Human
ugcaauguaucccuucucacagca

SEQ ID NO: 3583075 - RNA, 19 nt, Human
ugcaaugucugagugaacc

SEQ ID NO: 3583076 - RNA, 13 nt, Human
ugcaauguguaua

SEQ ID NO: 3583077 - RNA, 15 nt, Human
ugcaauguguauaaa

SEQ ID NO: 3583078 - RNA, 16 nt, Human
ugcaauguguauaaac

SEQ ID NO: 3583079 - RNA, 21 nt, Human
ugcaauguguauaaacaagaa

SEQ ID NO: 3583080 - RNA, 23 nt, Human
ugcaauuaaacuuccaaagaaag

SEQ ID NO: 3583081 - RNA, 15 nt, Human
ugcaauuaaagugau

SEQ ID NO: 3583082 - RNA, 17 nt, Human
ugcaauuaggauuuuga

SEQ ID NO: 3583083 - RNA, 21 nt, Human
ugcaauucaaaaguuccaaga

SEQ ID NO: 3583084 - RNA, 18 nt, Human
ugcaauuccccucugcug

SEQ ID NO: 3583085 - RNA, 18 nt, Human
ugcaauuuauuaaaauga

SEQ ID NO: 3583086 - RNA, 17 nt, Human
ugcaauuucaagguucu

SEQ ID NO: 3583087 - RNA, 18 nt, Human
ugcaauuucaagguucua

SEQ ID NO: 3583088 - RNA, 19 nt, Human
ugcaauuucaagguucuaa

SEQ ID NO: 3583089 - RNA, 14 nt, Human
ugcaauuucauaug

SEQ ID NO: 3583090 - RNA, 23 nt, Human
ugcaauuugauugacugcccauu

SEQ ID NO: 3583091 - RNA, 17 nt, Human
ugcaauuuguuugugcu

SEQ ID NO: 3583092 - RNA, 20 nt, Human
ugcaauuuguuugugcuucu

SEQ ID NO: 3583093 - RNA, 17 nt, Human
ugcaauuuuaacacaca

SEQ ID NO: 3583094 - RNA, 22 nt, Human
ugcaauuuuucuuucuuuuguu

SEQ ID NO: 3583095 - RNA, 16 nt, Human
ugcacaaacagaggcc

SEQ ID NO: 3583096 - RNA, 17 nt, Human
ugcacaaacagaggccg

SEQ ID NO: 3583097 - RNA, 20 nt, Human
ugcacaaacagaggccgcca

SEQ ID NO: 3583098 - RNA, 15 nt, Human
ugcacaaacucacca

SEQ ID NO: 3583099 - RNA, 21 nt, Human
ugcacaaauauuuauuuucuu

SEQ ID NO: 3583100 - RNA, 17 nt, Human
ugcacaaauucaugugc

SEQ ID NO: 3583101 - RNA, 14 nt, Human
ugcacaagaaugga

SEQ ID NO: 3583102 - RNA, 20 nt, Human
ugcacaagaauggaucacaa

SEQ ID NO: 3583103 - RNA, 14 nt, Human
ugcacaagccaggg

SEQ ID NO: 3583104 - RNA, 15 nt, Human
ugcacaagcuccaag

SEQ ID NO: 3583105 - RNA, 22 nt, Human
ugcacaagcuccaagcucccag

SEQ ID NO: 3583106 - RNA, 23 nt, Human
ugcacaagcuccaagcucccagg

SEQ ID NO: 3583107 - RNA, 15 nt, Human
ugcacaagcugcacc

SEQ ID NO: 3583108 - RNA, 16 nt, Human
ugcacaagcugcaccc

SEQ ID NO: 3583109 - RNA, 18 nt, Human
ugcacaaggauugaaaau

SEQ ID NO: 3583110 - RNA, 20 nt, Human
ugcacaauaaaaauguuuaa

SEQ ID NO: 3583111 - RNA, 19 nt, Human
ugcacaauaacuccuccca

SEQ ID NO: 3583112 - RNA, 19 nt, Human
ugcacaauauugaacuuuu

SEQ ID NO: 3583113 - RNA, 14 nt, Human
ugcacacaaauauu

SEQ ID NO: 3583114 - RNA, 20 nt, Human
ugcacacaagcccacagcac

SEQ ID NO: 3583115 - RNA, 15 nt, Human
ugcacacaauuagau

SEQ ID NO: 3583116 - RNA, 18 nt, Human
ugcacacacacacacaug

SEQ ID NO: 3583117 - RNA, 18 nt, Human
ugcacacacauauauuau

SEQ ID NO: 3583118 - RNA, 15 nt, Human
ugcacacaccagagc

SEQ ID NO: 3583119 - RNA, 16 nt, Human
ugcacacagaaauaua

SEQ ID NO: 3583120 - RNA, 17 nt, Human
ugcacacagaaauauau

SEQ ID NO: 3583121 - RNA, 18 nt, Human
ugcacacagaaauauaua

SEQ ID NO: 3583122 - RNA, 10 nt, Human
ugcacacauu

SEQ ID NO: 3583123 - RNA, 19 nt, Human
ugcacacauuaggcauuga

SEQ ID NO: 3583124 - RNA, 11 nt, Human
ugcacacauuu

SEQ ID NO: 3583125 - RNA, 13 nt, Human
ugcacacauuuuu

SEQ ID NO: 3583126 - RNA, 15 nt, Human
ugcacacauuuuuua

SEQ ID NO: 3583127 - RNA, 20 nt, Human
ugcacacauuuuuuaaaugc

SEQ ID NO: 3583128 - RNA, 16 nt, Human
ugcacacccacucagc

SEQ ID NO: 3583129 - RNA, 19 nt, Human
ugcacaccccacucccaca

SEQ ID NO: 3583130 - RNA, 20 nt, Human
ugcacaccuacuagucacca

SEQ ID NO: 3583131 - RNA, 18 nt, Human
ugcacacucacuggcauc

SEQ ID NO: 3583132 - RNA, 22 nt, Human
ugcacacuuugguaccagauaa

SEQ ID NO: 3583133 - RNA, 16 nt, Human
ugcacagaaguccugu

SEQ ID NO: 3583134 - RNA, 21 nt, Human
ugcacagaaguccuguauguc

SEQ ID NO: 3583135 - RNA, 18 nt, Human
ugcacagagaagcugggg

SEQ ID NO: 3583136 - RNA, 20 nt, Human
ugcacagagcucuccagcuc

SEQ ID NO: 3583137 - RNA, 19 nt, Human
ugcacagauggauuugccu

SEQ ID NO: 3583138 - RNA, 16 nt, Human
ugcacagcacaaauua

SEQ ID NO: 3583139 - RNA, 18 nt, Human
ugcacagcaggcugccag

SEQ ID NO: 3583140 - RNA, 15 nt, Human
ugcacagcaucucag

SEQ ID NO: 3583141 - RNA, 24 nt, Human
ugcacagccccuaagucaacuuag

SEQ ID NO: 3583142 - RNA, 17 nt, Human
ugcacagcguccugucc

SEQ ID NO: 3583143 - RNA, 20 nt, Human
ugcacagcuaacauggaagu

SEQ ID NO: 3583144 - RNA, 10 nt, Human
ugcacagcug

SEQ ID NO: 3583145 - RNA, 18 nt, Human
ugcacaggaugcuggccu

SEQ ID NO: 3583146 - RNA, 12 nt, Human
ugcacaggcaga

SEQ ID NO: 3583147 - RNA, 18 nt, Human
ugcacagggauucucaca

SEQ ID NO: 3583148 - RNA, 19 nt, Human
ugcacagggauucucacaa

SEQ ID NO: 3583149 - RNA, 12 nt, Human
ugcacagggcag

SEQ ID NO: 3583150 - RNA, 15 nt, Human
ugcacagggcagcug

SEQ ID NO: 3583151 - RNA, 20 nt, Human
ugcacagggcagcugggccc

SEQ ID NO: 3583152 - RNA, 23 nt, Human
ugcacaguauuuguaauuaaaag

SEQ ID NO: 3583153 - RNA, 20 nt, Human
ugcacagugacuucugagau

SEQ ID NO: 3583154 - RNA, 13 nt, Human
ugcacagugauuu

SEQ ID NO: 3583155 - RNA, 19 nt, Human
ugcacagugauuuuuuucu

SEQ ID NO: 3583156 - RNA, 17 nt, Human
ugcacagugcaucucag

SEQ ID NO: 3583157 - RNA, 19 nt, Human
ugcacagugcaucucagcc

SEQ ID NO: 3583158 - RNA, 23 nt, Human
ugcacaguuuucuggcuggagcc

SEQ ID NO: 3583159 - RNA, 24 nt, Human
ugcacaguuuucuggcuggagccu

SEQ ID NO: 3583160 - RNA, 18 nt, Human
ugcacauauggacucugc

SEQ ID NO: 3583161 - RNA, 19 nt, Human
ugcacauauggacucugca

SEQ ID NO: 3583162 - RNA, 13 nt, Human
ugcacauccauuc

SEQ ID NO: 3583163 - RNA, 15 nt, Human
ugcacaucucugcuu

SEQ ID NO: 3583164 - RNA, 15 nt, Human
ugcacaucugugucu

SEQ ID NO: 3583165 - RNA, 16 nt, Human
ugcacaucugugucuu

SEQ ID NO: 3583166 - RNA, 17 nt, Human
ugcacaucuguuuugua

SEQ ID NO: 3583167 - RNA, 14 nt, Human
ugcacaugaacuua

SEQ ID NO: 3583168 - RNA, 21 nt, Human
ugcacaugaacuuagauuuua

SEQ ID NO: 3583169 - RNA, 14 nt, Human
ugcacaugaagaaa

SEQ ID NO: 3583170 - RNA, 21 nt, Human
ugcacaugaagaaauacugca

SEQ ID NO: 3583171 - RNA, 15 nt, Human
ugcacaugauuucac

SEQ ID NO: 3583172 - RNA, 18 nt, Human
ugcacaugauuucacaaa

SEQ ID NO: 3583173 - RNA, 23 nt, Human
ugcacaugauuucacaaauauua

SEQ ID NO: 3583174 - RNA, 12 nt, Human
ugcacaugucuu

SEQ ID NO: 3583175 - RNA, 14 nt, Human
ugcacaugucuuaa

SEQ ID NO: 3583176 - RNA, 13 nt, Human
ugcacaugugugc

SEQ ID NO: 3583177 - RNA, 16 nt, Human
ugcacauguuuccucu

SEQ ID NO: 3583178 - RNA, 18 nt, Human
ugcacauuaaaugacucu

SEQ ID NO: 3583179 - RNA, 15 nt, Human
ugcacauucacuuag

SEQ ID NO: 3583180 - RNA, 23 nt, Human
ugcacauucacuuagcagaaccu

SEQ ID NO: 3583181 - RNA, 11 nt, Human
ugcacauuguu

SEQ ID NO: 3583182 - RNA, 12 nt, Human
ugcacauuguuc

SEQ ID NO: 3583183 - RNA, 14 nt, Human
ugcacauuuugauu

SEQ ID NO: 3583184 - RNA, 16 nt, Human
ugcaccaaagagaaug

SEQ ID NO: 3583185 - RNA, 17 nt, Human
ugccuccaggugugcac

SEQ ID NO: 3583186 - RNA, 15 nt, Human
ugccuccauccuagu

SEQ ID NO: 3583187 - RNA, 14 nt, Human
ugccuccauggugc

SEQ ID NO: 3583188 - RNA, 22 nt, Human
ugccuccauggugccucuggag

SEQ ID NO: 3583189 - RNA, 16 nt, Human
ugccucccacuucacu

SEQ ID NO: 3583190 - RNA, 17 nt, Human
ugccucccacuucacug

SEQ ID NO: 3583191 - RNA, 17 nt, Human
ugccucccauucugacc

SEQ ID NO: 3583192 - RNA, 16 nt, Human
ugccuccccaacccug

SEQ ID NO: 3583193 - RNA, 22 nt, Human
ugccuccccaacccugccccug

SEQ ID NO: 3583194 - RNA, 17 nt, Human
ugccuccccauuuccca

SEQ ID NO: 3583195 - RNA, 20 nt, Human
ugccuccccauuucccaucu

SEQ ID NO: 3583196 - RNA, 15 nt, Human
ugccuccccuccucu

SEQ ID NO: 3583197 - RNA, 19 nt, Human
ugccuccccuccucugcuu

SEQ ID NO: 3583198 - RNA, 18 nt, Human
ugccuccccucuccuucc

SEQ ID NO: 3583199 - RNA, 22 nt, Human
ugccucccucacccugagcccc

SEQ ID NO: 3583200 - RNA, 19 nt, Human
ugccucccugacccugcag

SEQ ID NO: 3583201 - RNA, 22 nt, Human
ugccucccuggugagagggccg

SEQ ID NO: 3583202 - RNA, 17 nt, Human
ugccucccuguccaccc

SEQ ID NO: 3583203 - RNA, 19 nt, Human
ugccuccgccucaguaaga

SEQ ID NO: 3583204 - RNA, 19 nt, Human
ugccuccguccccugccca

SEQ ID NO: 3583205 - RNA, 12 nt, Human
ugccuccucagg

SEQ ID NO: 3583206 - RNA, 13 nt, Human
ugccuccucagga

SEQ ID NO: 3583207 - RNA, 12 nt, Human
ugccuccuccuu

SEQ ID NO: 3583208 - RNA, 16 nt, Human
ugccuccucguuccuu

SEQ ID NO: 3583209 - RNA, 22 nt, Human
ugccuccugacacaccugcagc

SEQ ID NO: 3583210 - RNA, 18 nt, Human
ugccuccugccugccccu

SEQ ID NO: 3583211 - RNA, 14 nt, Human
ugccuccugugggg

SEQ ID NO: 3583212 - RNA, 18 nt, Human
ugccuccuguggggaaag

SEQ ID NO: 3583213 - RNA, 14 nt, Human
ugccuccuguguac

SEQ ID NO: 3583214 - RNA, 17 nt, Human
ugccuccuuccaccucc

SEQ ID NO: 3583215 - RNA, 19 nt, Human
ugccuccuuccaccucccu

SEQ ID NO: 3583216 - RNA, 21 nt, Human
ugccucgaaacacagaaaccu

SEQ ID NO: 3583217 - RNA, 18 nt, Human
ugccucgaacuggcugca

SEQ ID NO: 3583218 - RNA, 23 nt, Human
ugccucgacacgugggcuccccu

SEQ ID NO: 3583219 - RNA, 21 nt, Human
ugccucgcuccccacucugcu

SEQ ID NO: 3583220 - RNA, 20 nt, Human
ugccucggccucccaaagug

SEQ ID NO: 3583221 - RNA, 13 nt, Human
ugccucggcuccu

SEQ ID NO: 3583222 - RNA, 14 nt, Human
ugccucggcuccug

SEQ ID NO: 3583223 - RNA, 21 nt, Human
ugccucggcuuuucucagcug

SEQ ID NO: 3583224 - RNA, 16 nt, Human
ugccucuacugggaag

SEQ ID NO: 3583225 - RNA, 19 nt, Human
ugccucucacacacauaga

SEQ ID NO: 3583226 - RNA, 21 nt, Human
ugccucucaucaacugaauga

SEQ ID NO: 3583227 - RNA, 15 nt, Human
ugccucucccucugg

SEQ ID NO: 3583228 - RNA, 18 nt, Human
ugccucucccuggcccuc

SEQ ID NO: 3583229 - RNA, 20 nt, Human
ugccucuccuuuguauauua

SEQ ID NO: 3583230 - RNA, 15 nt, Human
ugccucucuaggacc

SEQ ID NO: 3583231 - RNA, 16 nt, Human
ugccucucucaggcca

SEQ ID NO: 3583232 - RNA, 18 nt, Human
ugccucucugcagguccc

SEQ ID NO: 3583233 - RNA, 14 nt, Human
ugccucugacacac

SEQ ID NO: 3583234 - RNA, 12 nt, Human
ugccucugagag

SEQ ID NO: 3583235 - RNA, 22 nt, Human
ugccucugagagcaucaggccu

SEQ ID NO: 3583236 - RNA, 15 nt, Human
ugccucugaggccag

SEQ ID NO: 3583237 - RNA, 22 nt, Human
ugccucugaggccagccuggcc

SEQ ID NO: 3583238 - RNA, 20 nt, Human
ugccucugauaugggacuga

SEQ ID NO: 3583239 - RNA, 16 nt, Human
ugccucugccacacuc

SEQ ID NO: 3583240 - RNA, 13 nt, Human
ugccucugccucu

SEQ ID NO: 3583241 - RNA, 14 nt, Human
ugccucugccucug

SEQ ID NO: 3583242 - RNA, 18 nt, Human
ugccucugccucugacac

SEQ ID NO: 3583243 - RNA, 12 nt, Human
ugccucugccug

SEQ ID NO: 3583244 - RNA, 13 nt, Human
ugccucugccugu

SEQ ID NO: 3583245 - RNA, 14 nt, Human
ugccucugccuguc

SEQ ID NO: 3583246 - RNA, 17 nt, Human
ugccucuggaggccucu

SEQ ID NO: 3583247 - RNA, 20 nt, Human
ugccucuggcucuacacaua

SEQ ID NO: 3583248 - RNA, 13 nt, Human
ugccucugggacu

SEQ ID NO: 3583249 - RNA, 21 nt, Human
ugccucuguccccuucucuca

SEQ ID NO: 3583250 - RNA, 16 nt, Human
ugccucugucuucugg

SEQ ID NO: 3583251 - RNA, 17 nt, Human
ugccucuuacgguaguu

SEQ ID NO: 3583252 - RNA, 14 nt, Human
ugccucuucauucu

SEQ ID NO: 3583253 - RNA, 23 nt, Human
ugccucuuccagucuuccugaca

SEQ ID NO: 3583254 - RNA, 13 nt, Human
ugccucuuccucc

SEQ ID NO: 3583255 - RNA, 20 nt, Human
ugccucuucugggagggcag

SEQ ID NO: 3583256 - RNA, 21 nt, Human
ugccucuucugggagggcagc

SEQ ID NO: 3583257 - RNA, 13 nt, Human
ugccucuugucuu

SEQ ID NO: 3583258 - RNA, 15 nt, Human
ugccucuuucaucca

SEQ ID NO: 3583259 - RNA, 18 nt, Human
ugccucuuuccuguuguu

SEQ ID NO: 3583260 - RNA, 22 nt, Human
ugccucuuuuaccugcugcuuc

SEQ ID NO: 3583261 - RNA, 14 nt, Human
ugccugaacauccu

SEQ ID NO: 3583262 - RNA, 22 nt, Human
ugccugaacauccuuccuuccc

SEQ ID NO: 3583263 - RNA, 17 nt, Human
ugccugaauaaagagcc

SEQ ID NO: 3583264 - RNA, 13 nt, Human
ugccugagaggca

SEQ ID NO: 3583265 - RNA, 14 nt, Human
ugccugagaggcag

SEQ ID NO: 3583266 - RNA, 20 nt, Human
ugccugagcaccucccagcc

SEQ ID NO: 3583267 - RNA, 22 nt, Human
ugccugagcaccucccagcccc

SEQ ID NO: 3583268 - RNA, 21 nt, Human
ugccugagggccccucugccc

SEQ ID NO: 3583269 - RNA, 18 nt, Human
ugccugaggguggagacu

SEQ ID NO: 3583270 - RNA, 18 nt, Human
ugccugaggucuguacgu

SEQ ID NO: 3583271 - RNA, 20 nt, Human
ugccugagucgugaccugcu

SEQ ID NO: 3583272 - RNA, 14 nt, Human
ugccugauauaaau

SEQ ID NO: 3583273 - RNA, 18 nt, Human
ugccugauccuccaacag

SEQ ID NO: 3583274 - RNA, 19 nt, Human
ugccugauucggcugucuc

SEQ ID NO: 3583275 - RNA, 20 nt, Human
ugccugauucggcugucuca

SEQ ID NO: 3583276 - RNA, 20 nt, Human
ugccugauugccaagcucag

SEQ ID NO: 3583277 - RNA, 14 nt, Human
ugccugcaccagga

SEQ ID NO: 3583278 - RNA, 16 nt, Human
ugccugcaccaggaga

SEQ ID NO: 3583279 - RNA, 16 nt, Human
ugccugcagagagaag

SEQ ID NO: 3583280 - RNA, 20 nt, Human
ugccugcagaggucugugcu

SEQ ID NO: 3583281 - RNA, 15 nt, Human
ugccugcagccccgc

SEQ ID NO: 3583282 - RNA, 13 nt, Human
ugccugcagggcc

SEQ ID NO: 3583283 - RNA, 14 nt, Human
ugccugcagggcca

SEQ ID NO: 3583284 - RNA, 16 nt, Human
ugccugcagggccaug

SEQ ID NO: 3583285 - RNA, 17 nt, Human
ugccugcagggccaugg

SEQ ID NO: 3583286 - RNA, 13 nt, Human
ugccugcauucug

SEQ ID NO: 3583287 - RNA, 15 nt, Human
ugccugccagcugca

SEQ ID NO: 3583288 - RNA, 15 nt, Human
ugccugcccacccgu

SEQ ID NO: 3583289 - RNA, 16 nt, Human
ugccugcccacccgug

SEQ ID NO: 3583290 - RNA, 20 nt, Human
ugccugcccaggccccugcc

SEQ ID NO: 3583291 - RNA, 23 nt, Human
ugccugcccaggccccugccacc

SEQ ID NO: 3583292 - RNA, 20 nt, Human
ugccugccccaaacaaauau

SEQ ID NO: 3583293 - RNA, 13 nt, Human
ugccugcccuggu

SEQ ID NO: 3583294 - RNA, 20 nt, Human
ugccugcccugucaggaggc

SEQ ID NO: 3583295 - RNA, 23 nt, Human
ugccugcccugucaggaggcaga

SEQ ID NO: 3583296 - RNA, 19 nt, Human
ugccugccuuaagugagga

SEQ ID NO: 3583297 - RNA, 18 nt, Human
ugccugcggucaaggcca

SEQ ID NO: 3583298 - RNA, 16 nt, Human
ugccugcgucuuccgc

SEQ ID NO: 3583299 - RNA, 19 nt, Human
ugccugcgucuuccgcccc

SEQ ID NO: 3583300 - RNA, 14 nt, Human
ugccugcucccauc

SEQ ID NO: 3583301 - RNA, 15 nt, Human
ugccugcucccaucc

SEQ ID NO: 3583302 - RNA, 18 nt, Human
ugccugcucccauccugu

SEQ ID NO: 3583303 - RNA, 12 nt, Human
ugccugcucuuu

SEQ ID NO: 3583304 - RNA, 10 nt, Human
ugccugcuga

SEQ ID NO: 3583305 - RNA, 12 nt, Human
ugccugcuucag

SEQ ID NO: 3583306 - RNA, 21 nt, Human
ugccugcuucagccucccaca

SEQ ID NO: 3583307 - RNA, 14 nt, Human
ugccugcuuuagaa

SEQ ID NO: 3583308 - RNA, 14 nt, Human
ugccugcuuugaau

SEQ ID NO: 3583309 - RNA, 19 nt, Human
ugccugcuuuucacugcug

SEQ ID NO: 3583310 - RNA, 16 nt, Human
ugccugcuuuuuggaa

SEQ ID NO: 3583311 - RNA, 19 nt, Human
ugccuggaagagcagcccu

SEQ ID NO: 3583312 - RNA, 11 nt, Human
ugccuggaccc

SEQ ID NO: 3583313 - RNA, 11 nt, Human
ugccuggagcu

SEQ ID NO: 3583314 - RNA, 16 nt, Human
ugccuggagcuccugg

SEQ ID NO: 3583315 - RNA, 15 nt, Human
ugccuggaggaccug

SEQ ID NO: 3583316 - RNA, 20 nt, Human
ugccuggaggaccugagccu

SEQ ID NO: 3583317 - RNA, 14 nt, Human
ugccuggaggccag

SEQ ID NO: 3583318 - RNA, 20 nt, Human
ugccuggauggggcugcacc

SEQ ID NO: 3583319 - RNA, 18 nt, Human
ugccuggccacugcuccc

SEQ ID NO: 3583320 - RNA, 12 nt, Human
ugccuggccagg

SEQ ID NO: 3583321 - RNA, 14 nt, Human
ugccuggccaggca

SEQ ID NO: 3583322 - RNA, 16 nt, Human
ugccuggccaggcaga

SEQ ID NO: 3583323 - RNA, 22 nt, Human
ugccuggccuggcacacaucag

SEQ ID NO: 3583324 - RNA, 18 nt, Human
ugccuggccuuccugucu

SEQ ID NO: 3583325 - RNA, 13 nt, Human
ugccuggcucaga

SEQ ID NO: 3583326 - RNA, 14 nt, Human
ugccugggggaguu

SEQ ID NO: 3583327 - RNA, 21 nt, Human
ugccugggggaguuuuccucu

SEQ ID NO: 3583328 - RNA, 22 nt, Human
ugccuggguuuaaggggagagg

SEQ ID NO: 3583329 - RNA, 23 nt, Human
ugccugguauauccaaaagcuuu

SEQ ID NO: 3583330 - RNA, 18 nt, Human
ugcgacuuucugccugga

SEQ ID NO: 3583331 - RNA, 14 nt, Human
ugcgagagaugugu

SEQ ID NO: 3583332 - RNA, 20 nt, Human
ugcgagugcucauuucagga

SEQ ID NO: 3583333 - RNA, 17 nt, Human
ugcgagugugugcaugu

SEQ ID NO: 3583334 - RNA, 21 nt, Human
ugcgagugugugcaugugugu

SEQ ID NO: 3583335 - RNA, 14 nt, Human
ugcgauagagucuc

SEQ ID NO: 3583336 - RNA, 19 nt, Human
ugcgaucucggcucagugc

SEQ ID NO: 3583337 - RNA, 19 nt, Human
ugcgaucuggguucacugc

SEQ ID NO: 3583338 - RNA, 17 nt, Human
ugcgaucuucagagcag

SEQ ID NO: 3583339 - RNA, 18 nt, Human
ugcgaucuucagagcagg

SEQ ID NO: 3583340 - RNA, 13 nt, Human
ugcgauucuggau

SEQ ID NO: 3583341 - RNA, 23 nt, Human
ugcgauucuggauaaagccacug

SEQ ID NO: 3583342 - RNA, 22 nt, Human
ugcgcacaaggcugaccaagag

SEQ ID NO: 3583343 - RNA, 17 nt, Human
ugcgcagccccaucugu

SEQ ID NO: 3583344 - RNA, 21 nt, Human
ugcgcagccccaucugugcau

SEQ ID NO: 3583345 - RNA, 16 nt, Human
ugcgcaggcuggcccu

SEQ ID NO: 3583346 - RNA, 13 nt, Human
ugcgcauucucau

SEQ ID NO: 3583347 - RNA, 20 nt, Human
ugcgccacuacacuccagcc

SEQ ID NO: 3583348 - RNA, 22 nt, Human
ugcgccacugcuccguggagga

SEQ ID NO: 3583349 - RNA, 13 nt, Human
ugcgcccaccccg

SEQ ID NO: 3583350 - RNA, 18 nt, Human
ugcgcccaguccuuccac

SEQ ID NO: 3583351 - RNA, 23 nt, Human
ugcgcccccuccgcccugccacu

SEQ ID NO: 3583352 - RNA, 15 nt, Human
ugcgcccuuaccuuc

SEQ ID NO: 3583353 - RNA, 24 nt, Human
ugcgccgagucugucucugucaug

SEQ ID NO: 3583354 - RNA, 12 nt, Human
ugcgccugcugc

SEQ ID NO: 3583355 - RNA, 14 nt, Human
ugcgccugugacca

SEQ ID NO: 3583356 - RNA, 20 nt, Human
ugcgcucuagccugggcaac

SEQ ID NO: 3583357 - RNA, 17 nt, Human
ugcgcucucuuugcaac

SEQ ID NO: 3583358 - RNA, 17 nt, Human
ugcgcugacaaccaccg

SEQ ID NO: 3583359 - RNA, 16 nt, Human
ugcgcugggcacuucc

SEQ ID NO: 3583360 - RNA, 20 nt, Human
ugcgcugggcacuucccugc

SEQ ID NO: 3583361 - RNA, 22 nt, Human
ugcggaaagguauuugggaaac

SEQ ID NO: 3583362 - RNA, 14 nt, Human
ugcggaaucagcuu

SEQ ID NO: 3583363 - RNA, 18 nt, Human
ugcggacagccacggcca

SEQ ID NO: 3583364 - RNA, 22 nt, Human
ugcggacagccacggccaggcc

SEQ ID NO: 3583365 - RNA, 18 nt, Human
ugcggaccacccucacug

SEQ ID NO: 3583366 - RNA, 13 nt, Human
ugcggaccccagc

SEQ ID NO: 3583367 - RNA, 23 nt, Human
ugcggaccccagcugugagccuu

SEQ ID NO: 3583368 - RNA, 14 nt, Human
ugcggacgggcugu

SEQ ID NO: 3583369 - RNA, 15 nt, Human
ugcggagcacacugg

SEQ ID NO: 3583370 - RNA, 19 nt, Human
ugcggagucauuuuguguu

SEQ ID NO: 3583371 - RNA, 16 nt, Human
ugcggagugaagaggg

SEQ ID NO: 3583372 - RNA, 14 nt, Human
ugcggaucucugga

SEQ ID NO: 3583373 - RNA, 15 nt, Human
ugcggaucucuggag

SEQ ID NO: 3583374 - RNA, 14 nt, Human
ugcggcagggaaga

SEQ ID NO: 3583375 - RNA, 15 nt, Human
ugcggcccagcccgg

SEQ ID NO: 3583376 - RNA, 16 nt, Human
ugcggcccagcccggc

SEQ ID NO: 3583377 - RNA, 15 nt, Human
ugcggccccuccccc

SEQ ID NO: 3583378 - RNA, 18 nt, Human
ugcggcguacaggcuggc

SEQ ID NO: 3583379 - RNA, 13 nt, Human
ugcggcuccucag

SEQ ID NO: 3583380 - RNA, 15 nt, Human
ugcggcuccucaggg

SEQ ID NO: 3583381 - RNA, 15 nt, Human
ugcggcuggccaugg

SEQ ID NO: 3583382 - RNA, 17 nt, Human
ugcgggaugguccuggg

SEQ ID NO: 3583383 - RNA, 18 nt, Human
ugcgggaugguccugggg

SEQ ID NO: 3583384 - RNA, 17 nt, Human
ugcgggcacaauaaauc

SEQ ID NO: 3583385 - RNA, 15 nt, Human
ugcgggcugggcagc

SEQ ID NO: 3583386 - RNA, 16 nt, Human
ugcgggcugggcagcu

SEQ ID NO: 3583387 - RNA, 14 nt, Human
ugcgggucacagga

SEQ ID NO: 3583388 - RNA, 16 nt, Human
ugcgggugagaguaau

SEQ ID NO: 3583389 - RNA, 15 nt, Human
ugcgguagccagcac

SEQ ID NO: 3583390 - RNA, 17 nt, Human
ugcgguauccgccccca

SEQ ID NO: 3583391 - RNA, 15 nt, Human
ugcgguccacccagg

SEQ ID NO: 3583392 - RNA, 17 nt, Human
ugcgguccacccaggag

SEQ ID NO: 3583393 - RNA, 17 nt, Human
ugcggugcuaucucccc

SEQ ID NO: 3583394 - RNA, 21 nt, Human
ugcggugcuaucucccccagc

SEQ ID NO: 3583395 - RNA, 21 nt, Human
ugcgguggcucacgccuguaa

SEQ ID NO: 3583396 - RNA, 20 nt, Human
ugcgguuauaaaaaaugguu

SEQ ID NO: 3583397 - RNA, 22 nt, Human
ugcgguuauaaaaaaugguuca

SEQ ID NO: 3583398 - RNA, 21 nt, Human
ugcgguuuguuggaucuucaa

SEQ ID NO: 3583399 - RNA, 20 nt, Human
ugcguacguuuccugagaag

SEQ ID NO: 3583400 - RNA, 20 nt, Human
ugcguaugccaccaacuuac

SEQ ID NO: 3583401 - RNA, 14 nt, Human
ugcguccuccucac

SEQ ID NO: 3583402 - RNA, 16 nt, Human
ugcguccuccucaccu

SEQ ID NO: 3583403 - RNA, 21 nt, Human
ugcgucuggaggggccccugc

SEQ ID NO: 3583404 - RNA, 22 nt, Human
ugcgucuggaggggccccugcu

SEQ ID NO: 3583405 - RNA, 22 nt, Human
ugcgucuugguguaauuugaag

SEQ ID NO: 3583406 - RNA, 12 nt, Human
ugcgugaaugua

SEQ ID NO: 3583407 - RNA, 17 nt, Human
ugcgugcccggggcagc

SEQ ID NO: 3583408 - RNA, 17 nt, Human
ugcgugccgugugagug

SEQ ID NO: 3583409 - RNA, 19 nt, Human
ugcgugccgugugagugug

SEQ ID NO: 3583410 - RNA, 23 nt, Human
ugcgugccgugugagugugacag

SEQ ID NO: 3583411 - RNA, 22 nt, Human
ugcguggacucugcacaugucu

SEQ ID NO: 3583412 - RNA, 19 nt, Human
ugcgugguggucccugggu

SEQ ID NO: 3583413 - RNA, 23 nt, Human
ugcgugguguggagugugugucu

SEQ ID NO: 3583414 - RNA, 14 nt, Human
ugcguguguagagu

SEQ ID NO: 3583415 - RNA, 22 nt, Human
ugcguguuuggguuuuuuuccu

SEQ ID NO: 3583416 - RNA, 16 nt, Human
ugcguucugcaagcau

SEQ ID NO: 3583417 - RNA, 17 nt, Human
ugcuaaaaaugggacuu

SEQ ID NO: 3583418 - RNA, 17 nt, Human
ugcuaaaaccugaaauu

SEQ ID NO: 3583419 - RNA, 12 nt, Human
ugcuaaacacug

SEQ ID NO: 3583420 - RNA, 13 nt, Human
ugcuaaacacugc

SEQ ID NO: 3583421 - RNA, 19 nt, Human
ugcuaaaccuuaguacuga

SEQ ID NO: 3583422 - RNA, 21 nt, Human
ugcuaaaccuuaguacugagu

SEQ ID NO: 3583423 - RNA, 22 nt, Human
ugcuaaacguguauguuuuuca

SEQ ID NO: 3583424 - RNA, 17 nt, Human
ugcuaaaggagcaucua

SEQ ID NO: 3583425 - RNA, 16 nt, Human
ugcuaaaucuccuauu

SEQ ID NO: 3583426 - RNA, 11 nt, Human
ugcuaaaugua

SEQ ID NO: 3583427 - RNA, 15 nt, Human
ugcuaaauguaacag

SEQ ID NO: 3583428 - RNA, 20 nt, Human
ugcuaaauguaacagucuga

SEQ ID NO: 3583429 - RNA, 18 nt, Human
ugcuaaauguaagaauca

SEQ ID NO: 3583430 - RNA, 15 nt, Human
ugcuaaaugugaaug

SEQ ID NO: 3583431 - RNA, 21 nt, Human
ugcuaaauuuucaguagggcu

SEQ ID NO: 3583432 - RNA, 22 nt, Human
ugcuaacaaagacaaaagucug

SEQ ID NO: 3583433 - RNA, 21 nt, Human
ugcuaacagcaacacaaagcu

SEQ ID NO: 3583434 - RNA, 17 nt, Human
ugcuaacaugaagaccu

SEQ ID NO: 3583435 - RNA, 23 nt, Human
ugcuaaccacgucugucuucaca

SEQ ID NO: 3583436 - RNA, 18 nt, Human
ugcuaacggugcucaggg

SEQ ID NO: 3583437 - RNA, 19 nt, Human
ugcuaacggugcucagggg

SEQ ID NO: 3583438 - RNA, 22 nt, Human
ugcuaacuagcuuggaaacugg

SEQ ID NO: 3583439 - RNA, 17 nt, Human
ugcuaacuuggagcccc

SEQ ID NO: 3583440 - RNA, 19 nt, Human
ugcuaacuuggagccccag

SEQ ID NO: 3583441 - RNA, 19 nt, Human
ugcuaagaauuuuuuauuu

SEQ ID NO: 3583442 - RNA, 13 nt, Human
ugcuaagaugcuc

SEQ ID NO: 3583443 - RNA, 16 nt, Human
ugcuaagaugcucuau

SEQ ID NO: 3583444 - RNA, 18 nt, Human
ugcuaaggacuuguuaga

SEQ ID NO: 3583445 - RNA, 17 nt, Human
ugcuaagguucuaaggc

SEQ ID NO: 3583446 - RNA, 18 nt, Human
ugcuaaguaaaucucuuc

SEQ ID NO: 3583447 - RNA, 13 nt, Human
ugcuaagugugaa

SEQ ID NO: 3583448 - RNA, 15 nt, Human
ugcuaagugugaacu

SEQ ID NO: 3583449 - RNA, 17 nt, Human
ugcuaagugugaacugg

SEQ ID NO: 3583450 - RNA, 13 nt, Human
ugcuaauauuaaa

SEQ ID NO: 3583451 - RNA, 20 nt, Human
ugcuaaucaaagccaggguc

SEQ ID NO: 3583452 - RNA, 22 nt, Human
ugcuaaucagggaggucauuuu

SEQ ID NO: 3583453 - RNA, 13 nt, Human
ugcuaaucagugu

SEQ ID NO: 3583454 - RNA, 20 nt, Human
ugcuaaucuucuuaugcaau

SEQ ID NO: 3583455 - RNA, 19 nt, Human
ugcuaaucuugugaaaaua

SEQ ID NO: 3583456 - RNA, 21 nt, Human
ugcuaaucuugugaaaauaau

SEQ ID NO: 3583457 - RNA, 12 nt, Human
ugcuaauucuuu

SEQ ID NO: 3583458 - RNA, 22 nt, Human
ugcuaauucuuugcaaaaaucc

SEQ ID NO: 3583459 - RNA, 15 nt, Human
ugcuaauugcuguug

SEQ ID NO: 3583460 - RNA, 16 nt, Human
ugcuaauugcuguuga

SEQ ID NO: 3583461 - RNA, 13 nt, Human
ugcuaauuuguuu

SEQ ID NO: 3583462 - RNA, 19 nt, Human
ugcuaauuuugaaaaacug

SEQ ID NO: 3583463 - RNA, 15 nt, Human
ugcuacaaaaacaca

SEQ ID NO: 3583464 - RNA, 19 nt, Human
ugcuacaaaaacacagcaa

SEQ ID NO: 3583465 - RNA, 20 nt, Human
ugcuacaaaaacacagcaag

SEQ ID NO: 3583466 - RNA, 13 nt, Human
ugcuacaacuuca

SEQ ID NO: 3583467 - RNA, 12 nt, Human
ugcuacaauguc

SEQ ID NO: 3583468 - RNA, 18 nt, Human
ugcuacagaaaagaaacu

SEQ ID NO: 3583469 - RNA, 15 nt, Human
ugcuacaggggccag

SEQ ID NO: 3583470 - RNA, 21 nt, Human
ugcuacaggggccagaagaug

SEQ ID NO: 3583471 - RNA, 18 nt, Human
ugcuacaggguccaacau

SEQ ID NO: 3583472 - RNA, 14 nt, Human
ugcuacauaaauug

SEQ ID NO: 3583473 - RNA, 23 nt, Human
ugcuacaugacgacaaagcugcu

SEQ ID NO: 3583474 - RNA, 18 nt, Human
ugcucauuuaaguuucaa

SEQ ID NO: 3583475 - RNA, 15 nt, Human
ugcuccaagauucua

SEQ ID NO: 3583476 - RNA, 19 nt, Human
ugcuccaagauucuagaug

SEQ ID NO: 3583477 - RNA, 15 nt, Human
ugcuccaccccacuc

SEQ ID NO: 3583478 - RNA, 19 nt, Human
ugcuccacccuuggccugu

SEQ ID NO: 3583479 - RNA, 22 nt, Human
ugcuccaccuuucagcccacgu

SEQ ID NO: 3583480 - RNA, 14 nt, Human
ugcuccagaauuug

SEQ ID NO: 3583481 - RNA, 17 nt, Human
ugcuccagacagggaau

SEQ ID NO: 3583482 - RNA, 21 nt, Human
ugcuccagaccugauccugga

SEQ ID NO: 3583483 - RNA, 17 nt, Human
ugcuccagccaaccccu

SEQ ID NO: 3583484 - RNA, 22 nt, Human
ugcuccagccaaccccugugga

SEQ ID NO: 3583485 - RNA, 19 nt, Human
ugcuccagcuguucagcug

SEQ ID NO: 3583486 - RNA, 12 nt, Human
ugcuccaggcag

SEQ ID NO: 3583487 - RNA, 14 nt, Human
ugcuccaggcaggc

SEQ ID NO: 3583488 - RNA, 16 nt, Human
ugcuccagggagauuu

SEQ ID NO: 3583489 - RNA, 19 nt, Human
ugcuccagggaugauucaa

SEQ ID NO: 3583490 - RNA, 12 nt, Human
ugcucccaccuc

SEQ ID NO: 3583491 - RNA, 14 nt, Human
ugcucccaccuccu

SEQ ID NO: 3583492 - RNA, 15 nt, Human
ugcucccaccuccug

SEQ ID NO: 3583493 - RNA, 23 nt, Human
ugcucccaccuccugacacccuu

SEQ ID NO: 3583494 - RNA, 15 nt, Human
ugcucccaccuggcu

SEQ ID NO: 3583495 - RNA, 17 nt, Human
ugcucccaccuggcucu

SEQ ID NO: 3583496 - RNA, 15 nt, Human
ugcucccagcagccc

SEQ ID NO: 3583497 - RNA, 21 nt, Human
ugcucccagcagcccuaagga

SEQ ID NO: 3583498 - RNA, 11 nt, Human
ugcuccccaca

SEQ ID NO: 3583499 - RNA, 20 nt, Human
ugcuccccacagcgucccug

SEQ ID NO: 3583500 - RNA, 23 nt, Human
ugcuccccacagcgucccuggcg

SEQ ID NO: 3583501 - RNA, 16 nt, Human
ugcuccccagcccugg

SEQ ID NO: 3583502 - RNA, 18 nt, Human
ugcucccccauccucccc

SEQ ID NO: 3583503 - RNA, 21 nt, Human
ugcucccccauccuccccuuc

SEQ ID NO: 3583504 - RNA, 23 nt, Human
ugcucccccauccuccccuuccc

SEQ ID NO: 3583505 - RNA, 16 nt, Human
ugcuccccucccuccu

SEQ ID NO: 3583506 - RNA, 20 nt, Human
ugcucccuaagccagccugg

SEQ ID NO: 3583507 - RNA, 15 nt, Human
ugcucccucacaugu

SEQ ID NO: 3583508 - RNA, 13 nt, Human
ugcucccucagac

SEQ ID NO: 3583509 - RNA, 14 nt, Human
ugcucccucagacu

SEQ ID NO: 3583510 - RNA, 14 nt, Human
ugcucccuccccug

SEQ ID NO: 3583511 - RNA, 15 nt, Human
ugcucccuccccugc

SEQ ID NO: 3583512 - RNA, 17 nt, Human
ugcucccuccccugccc

SEQ ID NO: 3583513 - RNA, 14 nt, Human
ugcucccugaagcc

SEQ ID NO: 3583514 - RNA, 19 nt, Human
ugcucccugaagccagccu

SEQ ID NO: 3583515 - RNA, 20 nt, Human
ugcucccugaagccagccuu

SEQ ID NO: 3583516 - RNA, 12 nt, Human
ugcucccugugu

SEQ ID NO: 3583517 - RNA, 17 nt, Human
ugcucccuguguccacc

SEQ ID NO: 3583518 - RNA, 23 nt, Human
ugcucccuguguccaccuguggg

SEQ ID NO: 3583519 - RNA, 18 nt, Human
ugcuccgaggacccagga

SEQ ID NO: 3583520 - RNA, 18 nt, Human
ugcuccgccuggccuggc

SEQ ID NO: 3583521 - RNA, 13 nt, Human
ugcuccgugccuc

SEQ ID NO: 3583522 - RNA, 16 nt, Human
ugcuccgugccuccac

SEQ ID NO: 3583523 - RNA, 13 nt, Human
ugcuccguggagg

SEQ ID NO: 3583524 - RNA, 20 nt, Human
ugcuccuagagggaggggcc

SEQ ID NO: 3583525 - RNA, 18 nt, Human
ugcuccuaguuugaccuc

SEQ ID NO: 3583526 - RNA, 20 nt, Human
ugcuccuaguuugaccucac

SEQ ID NO: 3583527 - RNA, 13 nt, Human
ugcuccuccaggg

SEQ ID NO: 3583528 - RNA, 16 nt, Human
ugcuccuccagggcca

SEQ ID NO: 3583529 - RNA, 15 nt, Human
ugcuccucccuggcu

SEQ ID NO: 3583530 - RNA, 19 nt, Human
ugcuccucccuggcugccc

SEQ ID NO: 3583531 - RNA, 20 nt, Human
ugcuccucccuggcugcccu

SEQ ID NO: 3583532 - RNA, 22 nt, Human
ugcuccucccuggcugcccugg

SEQ ID NO: 3583533 - RNA, 19 nt, Human
ugcuccuccuuggugccug

SEQ ID NO: 3583534 - RNA, 13 nt, Human
ugcuccucuccag

SEQ ID NO: 3583535 - RNA, 14 nt, Human
ugcuccucucccca

SEQ ID NO: 3583536 - RNA, 17 nt, Human
ugcuccucuccccagca

SEQ ID NO: 3583537 - RNA, 18 nt, Human
ugcuccucuccccagcaa

SEQ ID NO: 3583538 - RNA, 19 nt, Human
ugcuccucuccccagcaag

SEQ ID NO: 3583539 - RNA, 13 nt, Human
ugcuccucuuccc

SEQ ID NO: 3583540 - RNA, 16 nt, Human
ugcuccucuuccccag

SEQ ID NO: 3583541 - RNA, 13 nt, Human
ugcuccugagccc

SEQ ID NO: 3583542 - RNA, 14 nt, Human
ugcuccugagcccc

SEQ ID NO: 3583543 - RNA, 15 nt, Human
ugcuccugcagcaug

SEQ ID NO: 3583544 - RNA, 22 nt, Human
ugcuccugccaggccuucagaa

SEQ ID NO: 3583545 - RNA, 21 nt, Human
ugcuccuggaucucccugaga

SEQ ID NO: 3583546 - RNA, 19 nt, Human
ugcuccuggccuugcugac

SEQ ID NO: 3583547 - RNA, 16 nt, Human
ugcuccuucccuugcu

SEQ ID NO: 3583548 - RNA, 22 nt, Human
ugcuccuuggcuuaccugaccu

SEQ ID NO: 3583549 - RNA, 14 nt, Human
ugcuccuuguuccu

SEQ ID NO: 3583550 - RNA, 17 nt, Human
ugcuccuuguuccuaga

SEQ ID NO: 3583551 - RNA, 17 nt, Human
ugcucgagacacaguga

SEQ ID NO: 3583552 - RNA, 16 nt, Human
ugcucgccccagcagg

SEQ ID NO: 3583553 - RNA, 13 nt, Human
ugcucgcuguugc

SEQ ID NO: 3583554 - RNA, 17 nt, Human
ugcucgcuguugcugaa

SEQ ID NO: 3583555 - RNA, 19 nt, Human
ugcucggagaagagcgcag

SEQ ID NO: 3583556 - RNA, 14 nt, Human
ugcucgggcccagg

SEQ ID NO: 3583557 - RNA, 16 nt, Human
ugcucggggugcacag

SEQ ID NO: 3583558 - RNA, 19 nt, Human
ugcucggggugcacaggag

SEQ ID NO: 3583559 - RNA, 22 nt, Human
ugcucggggugcacaggagggg

SEQ ID NO: 3583560 - RNA, 15 nt, Human
ugcucuaacagcccu

SEQ ID NO: 3583561 - RNA, 17 nt, Human
ugcucuaagcacacgga

SEQ ID NO: 3583562 - RNA, 13 nt, Human
ugcucuaggaaga

SEQ ID NO: 3583563 - RNA, 16 nt, Human
ugcucuagugccuucu

SEQ ID NO: 3583564 - RNA, 16 nt, Human
ugcucuagugggacag

SEQ ID NO: 3583565 - RNA, 18 nt, Human
ugcucuagugggacagcc

SEQ ID NO: 3583566 - RNA, 17 nt, Human
ugcucuaucucacagca

SEQ ID NO: 3583567 - RNA, 16 nt, Human
ugcucuaugcuuucca

SEQ ID NO: 3583568 - RNA, 18 nt, Human
ugcucucaaaccccugac

SEQ ID NO: 3583569 - RNA, 22 nt, Human
ugcucucaccagcugcugcucu

SEQ ID NO: 3583570 - RNA, 20 nt, Human
ugcucuccaagucucagugg

SEQ ID NO: 3583571 - RNA, 21 nt, Human
ugcucuccauucugcuccuuc

SEQ ID NO: 3583572 - RNA, 13 nt, Human
ugcucuccuccac

SEQ ID NO: 3583573 - RNA, 12 nt, Human
ugcucuccucuu

SEQ ID NO: 3583574 - RNA, 14 nt, Human
ugcucuccucuugc

SEQ ID NO: 3583575 - RNA, 16 nt, Human
ugcucuccucuugcca

SEQ ID NO: 3583576 - RNA, 12 nt, Human
ugcucuccuucc

SEQ ID NO: 3583577 - RNA, 17 nt, Human
ugcucuccuuccuggag

SEQ ID NO: 3583578 - RNA, 18 nt, Human
ugcucuccuuccuggagc

SEQ ID NO: 3583579 - RNA, 12 nt, Human
ugcucuccuuuc

SEQ ID NO: 3583580 - RNA, 18 nt, Human
ugcucucuacccagccca

SEQ ID NO: 3583581 - RNA, 19 nt, Human
ugcucucuacccagcccau

SEQ ID NO: 3583582 - RNA, 20 nt, Human
ugcucucuacccagcccauc

SEQ ID NO: 3583583 - RNA, 17 nt, Human
ugcucugaaaucuccuu

SEQ ID NO: 3583584 - RNA, 20 nt, Human
ugcucugagaagaggagccc

SEQ ID NO: 3583585 - RNA, 23 nt, Human
ugcucugagaagaggagcccuca

SEQ ID NO: 3583586 - RNA, 19 nt, Human
ugcucugaucccucuacag

SEQ ID NO: 3583587 - RNA, 17 nt, Human
ugcucugaugcaucaga

SEQ ID NO: 3583588 - RNA, 15 nt, Human
ugcucugcaaaagga

SEQ ID NO: 3583589 - RNA, 16 nt, Human
ugcucugcaggcaccu

SEQ ID NO: 3583590 - RNA, 20 nt, Human
ugcucugcaggcaccuuagu

SEQ ID NO: 3583591 - RNA, 15 nt, Human
ugcucugcccagagc

SEQ ID NO: 3583592 - RNA, 17 nt, Human
ugcucugcccagagcug

SEQ ID NO: 3583593 - RNA, 14 nt, Human
ugcucugcucgccu

SEQ ID NO: 3583594 - RNA, 14 nt, Human
ugcucugcugacag

SEQ ID NO: 3583595 - RNA, 16 nt, Human
ugcucugcugacagac

SEQ ID NO: 3583596 - RNA, 22 nt, Human
ugcucugcugacagacacaggc

SEQ ID NO: 3583597 - RNA, 12 nt, Human
ugcucugcuuca

SEQ ID NO: 3583598 - RNA, 21 nt, Human
ugcucugcuugacaacaucug

SEQ ID NO: 3583599 - RNA, 16 nt, Human
ugcucuggacaggcau

SEQ ID NO: 3583600 - RNA, 17 nt, Human
ugcucuggacaggcaug

SEQ ID NO: 3583601 - RNA, 14 nt, Human
ugcucuggaccugc

SEQ ID NO: 3583602 - RNA, 15 nt, Human
ugcucuggaccugcc

SEQ ID NO: 3583603 - RNA, 21 nt, Human
ugcucugguuguuucuguucc

SEQ ID NO: 3583604 - RNA, 22 nt, Human
ugcucuguaaucucguuucaaa

SEQ ID NO: 3583605 - RNA, 22 nt, Human
ugcucugucuucuuugcccaca

SEQ ID NO: 3583606 - RNA, 21 nt, Human
ugcucuguuaauaaucucaca

SEQ ID NO: 3583607 - RNA, 12 nt, Human
ugcucuuagcug

SEQ ID NO: 3583608 - RNA, 13 nt, Human
ugcucuucugugg

SEQ ID NO: 3583609 - RNA, 22 nt, Human
ugcucuugaacuccugaccuca

SEQ ID NO: 3583610 - RNA, 20 nt, Human
ugcucuugaccuuguagaga

SEQ ID NO: 3583611 - RNA, 20 nt, Human
ugcucuuggcuggacccagc

SEQ ID NO: 3583612 - RNA, 21 nt, Human
ugcucuuggcuggacccagcc

SEQ ID NO: 3583613 - RNA, 15 nt, Human
ugcucuugggcaaua

SEQ ID NO: 3583614 - RNA, 18 nt, Human
ugcucuugggcaauauuc

SEQ ID NO: 3583615 - RNA, 24 nt, Human
ugcucuugggcaauauucucugua

SEQ ID NO: 3583616 - RNA, 19 nt, Human
ugcucuuguagcccaggcu

SEQ ID NO: 3583617 - RNA, 16 nt, Human
ugcucuugucccacgu

SEQ ID NO: 3583618 - RNA, 22 nt, Human
ugcucuugucccacgugucuuc

SEQ ID NO: 3583619 - RNA, 19 nt, Human
ugcuggaacucuugacagc

SEQ ID NO: 3583620 - RNA, 19 nt, Human
ugcuggacaggucugggag

SEQ ID NO: 3583621 - RNA, 14 nt, Human
ugcuggacugucau

SEQ ID NO: 3583622 - RNA, 22 nt, Human
ugcuggagaagagaggagagga

SEQ ID NO: 3583623 - RNA, 20 nt, Human
ugcuggagaggccccagccg

SEQ ID NO: 3583624 - RNA, 14 nt, Human
ugcuggagagguua

SEQ ID NO: 3583625 - RNA, 20 nt, Human
ugcuggagcacugggcuccc

SEQ ID NO: 3583626 - RNA, 19 nt, Human
ugcuggagccacuaacuag

SEQ ID NO: 3583627 - RNA, 14 nt, Human
ugcuggagccugug

SEQ ID NO: 3583628 - RNA, 23 nt, Human
ugcuggagccuguguaacagcuc

SEQ ID NO: 3583629 - RNA, 13 nt, Human
ugcuggaggccuc

SEQ ID NO: 3583630 - RNA, 17 nt, Human
ugcuggaggccucaggu

SEQ ID NO: 3583631 - RNA, 14 nt, Human
ugcuggagguggga

SEQ ID NO: 3583632 - RNA, 22 nt, Human
ugcuggaggugggagcaggaga

SEQ ID NO: 3583633 - RNA, 17 nt, Human
ugcuggauauuuucaaa

SEQ ID NO: 3583634 - RNA, 18 nt, Human
ugcuggauggagcccagg

SEQ ID NO: 3583635 - RNA, 20 nt, Human
ugcuggcacauuuccccaga

SEQ ID NO: 3583636 - RNA, 18 nt, Human
ugcuggccaaauagcaaa

SEQ ID NO: 3583637 - RNA, 14 nt, Human
ugcuggcccagggc

SEQ ID NO: 3583638 - RNA, 20 nt, Human
ugcuggcccagggcccagag

SEQ ID NO: 3583639 - RNA, 22 nt, Human
ugcuggcccagggcccagagcc

SEQ ID NO: 3583640 - RNA, 19 nt, Human
ugcuggccccagcccugcu

SEQ ID NO: 3583641 - RNA, 20 nt, Human
ugcuggccccagcccugcug

SEQ ID NO: 3583642 - RNA, 21 nt, Human
ugcuggccccagcccugcugg

SEQ ID NO: 3583643 - RNA, 23 nt, Human
ugcuggccgcccccagcccccuc

SEQ ID NO: 3583644 - RNA, 19 nt, Human
ugcuggccgggcacagcug

SEQ ID NO: 3583645 - RNA, 15 nt, Human
ugcuggcgccucugc

SEQ ID NO: 3583646 - RNA, 13 nt, Human
ugcuggcugccca

SEQ ID NO: 3583647 - RNA, 15 nt, Human
ugcuggcugccuuag

SEQ ID NO: 3583648 - RNA, 21 nt, Human
ugcuggcuggaagggaggagc

SEQ ID NO: 3583649 - RNA, 22 nt, Human
ugcugggacucagccuucagac

SEQ ID NO: 3583650 - RNA, 23 nt, Human
ugcugggacucagccuucagaca

SEQ ID NO: 3583651 - RNA, 16 nt, Human
ugcugggagcuccacu

SEQ ID NO: 3583652 - RNA, 20 nt, Human
ugcugggagcuccacucugc

SEQ ID NO: 3583653 - RNA, 18 nt, Human
ugcugggagcugaaaaau

SEQ ID NO: 3583654 - RNA, 17 nt, Human
ugcugggaggagggaga

SEQ ID NO: 3583655 - RNA, 19 nt, Human
ugcugggauggugggcuuc

SEQ ID NO: 3583656 - RNA, 19 nt, Human
ugcugggauuacaagcgug

SEQ ID NO: 3583657 - RNA, 20 nt, Human
ugcugggauuacagguguga

SEQ ID NO: 3583658 - RNA, 16 nt, Human
ugcugggauuuccaac

SEQ ID NO: 3583659 - RNA, 19 nt, Human
ugcugggcauuuucccaga

SEQ ID NO: 3583660 - RNA, 18 nt, Human
ugcugggccccugccucu

SEQ ID NO: 3583661 - RNA, 22 nt, Human
ugcugggccccugccucucugc

SEQ ID NO: 3583662 - RNA, 23 nt, Human
ugcugggcucuccaccucagccu

SEQ ID NO: 3583663 - RNA, 10 nt, Human
ugcugggcug

SEQ ID NO: 3583664 - RNA, 11 nt, Human
ugcugggcugg

SEQ ID NO: 3583665 - RNA, 14 nt, Human
ugcugggcuggggc

SEQ ID NO: 3583666 - RNA, 16 nt, Human
ugcugggcugggugcg

SEQ ID NO: 3583667 - RNA, 16 nt, Human
ugcuggggaagacagu

SEQ ID NO: 3583668 - RNA, 23 nt, Human
ugcuggggcaagucccugacucu

SEQ ID NO: 3583669 - RNA, 15 nt, Human
ugcuggggccucaga

SEQ ID NO: 3583670 - RNA, 14 nt, Human
ugcuggggccuggg

SEQ ID NO: 3583671 - RNA, 21 nt, Human
ugcugggggaaugagcccaga

SEQ ID NO: 3583672 - RNA, 19 nt, Human
ugcugggggcaacuggcca

SEQ ID NO: 3583673 - RNA, 15 nt, Human
ugcuggguggcccau

SEQ ID NO: 3583674 - RNA, 16 nt, Human
ugcuggguggcccauc

SEQ ID NO: 3583675 - RNA, 20 nt, Human
ugcuggguggcccauccccc

SEQ ID NO: 3583676 - RNA, 22 nt, Human
ugcuggguggcccauccccccu

SEQ ID NO: 3583677 - RNA, 13 nt, Human
ugcuggguguggc

SEQ ID NO: 3583678 - RNA, 14 nt, Human
ugcuggguuggugc

SEQ ID NO: 3583679 - RNA, 16 nt, Human
ugcugguaaaaugaag

SEQ ID NO: 3583680 - RNA, 17 nt, Human
ugcugguaaaaugaaga

SEQ ID NO: 3583681 - RNA, 20 nt, Human
ugcuggucacagccuccucu

SEQ ID NO: 3583682 - RNA, 14 nt, Human
ugcugguguccuga

SEQ ID NO: 3583683 - RNA, 14 nt, Human
ugcugguugcugug

SEQ ID NO: 3583684 - RNA, 15 nt, Human
ugcugguugcugugu

SEQ ID NO: 3583685 - RNA, 17 nt, Human
ugcugguugcugugugg

SEQ ID NO: 3583686 - RNA, 20 nt, Human
ugcugguuuuccuaaaugca

SEQ ID NO: 3583687 - RNA, 22 nt, Human
ugcugguuuuccuaaaugcagu

SEQ ID NO: 3583688 - RNA, 12 nt, Human
ugcugguuuuuc

SEQ ID NO: 3583689 - RNA, 15 nt, Human
ugcugguuuuucagu

SEQ ID NO: 3583690 - RNA, 20 nt, Human
ugcuguaaagaguugcuuuu

SEQ ID NO: 3583691 - RNA, 19 nt, Human
ugcuguaaauuuggcuucu

SEQ ID NO: 3583692 - RNA, 17 nt, Human
ugcuguaacuuaaaaua

SEQ ID NO: 3583693 - RNA, 18 nt, Human
ugcuguaacuuucugaaa

SEQ ID NO: 3583694 - RNA, 17 nt, Human
ugcuguaagaugucugu

SEQ ID NO: 3583695 - RNA, 23 nt, Human
ugcuguacacauauuugaagggu

SEQ ID NO: 3583696 - RNA, 19 nt, Human
ugcuguacuagagaucugg

SEQ ID NO: 3583697 - RNA, 16 nt, Human
ugcuguagacaucugu

SEQ ID NO: 3583698 - RNA, 15 nt, Human
ugcuguagacauuug

SEQ ID NO: 3583699 - RNA, 23 nt, Human
ugcuguaguguugucuuugauaa

SEQ ID NO: 3583700 - RNA, 21 nt, Human
ugcuguauauuugugauagca

SEQ ID NO: 3583701 - RNA, 21 nt, Human
ugcugucaccucucccacggg

SEQ ID NO: 3583702 - RNA, 24 nt, Human
ugcugucauugcuucuucugaggc

SEQ ID NO: 3583703 - RNA, 19 nt, Human
ugcuguccagacagccugu

SEQ ID NO: 3583704 - RNA, 10 nt, Human
ugcugucccc

SEQ ID NO: 3583705 - RNA, 17 nt, Human
ugcuguccccucuugcc

SEQ ID NO: 3583706 - RNA, 12 nt, Human
ugcugucccucc

SEQ ID NO: 3583707 - RNA, 13 nt, Human
ugcugucccuccc

SEQ ID NO: 3583708 - RNA, 16 nt, Human
ugcugucccuuacgug

SEQ ID NO: 3583709 - RNA, 19 nt, Human
ugcugucccuuacgugagu

SEQ ID NO: 3583710 - RNA, 18 nt, Human
ugcuguccgguggagauc

SEQ ID NO: 3583711 - RNA, 19 nt, Human
ugcuguccucagguggcca

SEQ ID NO: 3583712 - RNA, 16 nt, Human
ugcuguccugaucugu

SEQ ID NO: 3583713 - RNA, 14 nt, Human
ugcugucucugcuc

SEQ ID NO: 3583714 - RNA, 15 nt, Human
ugcugucucugcucg

SEQ ID NO: 3583715 - RNA, 14 nt, Human
ugcugucugcagcc

SEQ ID NO: 3583716 - RNA, 15 nt, Human
ugcugucugggugcu

SEQ ID NO: 3583717 - RNA, 19 nt, Human
ugcugucuggguggcucac

SEQ ID NO: 3583718 - RNA, 14 nt, Human
ugcugucuuaaacu

SEQ ID NO: 3583719 - RNA, 21 nt, Human
ugcugucuuucuugcucccug

SEQ ID NO: 3583720 - RNA, 12 nt, Human
ugcugugaaaaa

SEQ ID NO: 3583721 - RNA, 23 nt, Human
ugcugugaacaagugaacacauu

SEQ ID NO: 3583722 - RNA, 22 nt, Human
ugcugugaacccuggggccuga

SEQ ID NO: 3583723 - RNA, 19 nt, Human
ugcugugaccauuuauaau

SEQ ID NO: 3583724 - RNA, 17 nt, Human
ugcugugaggcuguccu

SEQ ID NO: 3583725 - RNA, 15 nt, Human
ugcugugccucccaa

SEQ ID NO: 3583726 - RNA, 15 nt, Human
ugcuguggccugggc

SEQ ID NO: 3583727 - RNA, 10 nt, Human
ugcuguggga

SEQ ID NO: 3583728 - RNA, 12 nt, Human
ugcugugggaac

SEQ ID NO: 3583729 - RNA, 14 nt, Human
ugcuguggucucuu

SEQ ID NO: 3583730 - RNA, 17 nt, Human
ugcuguggucucuuugu

SEQ ID NO: 3583731 - RNA, 16 nt, Human
ugcugugguuccuggg

SEQ ID NO: 3583732 - RNA, 19 nt, Human
ugcuguguaaugguuacac

SEQ ID NO: 3583733 - RNA, 13 nt, Human
ugcuguguauaug

SEQ ID NO: 3583734 - RNA, 23 nt, Human
ugcuguguauaugguauauauac

SEQ ID NO: 3583735 - RNA, 16 nt, Human
ugcuguguaucugaua

SEQ ID NO: 3583736 - RNA, 15 nt, Human
ugcuguguccaacuc

SEQ ID NO: 3583737 - RNA, 19 nt, Human
ugcuguguccaacuccagu

SEQ ID NO: 3583738 - RNA, 20 nt, Human
ugcuguguccaacuccagua

SEQ ID NO: 3583739 - RNA, 11 nt, Human
ugcugugugcc

SEQ ID NO: 3583740 - RNA, 15 nt, Human
ugcuguguuugagcu

SEQ ID NO: 3583741 - RNA, 18 nt, Human
ugcuguuacaguuuucuu

SEQ ID NO: 3583742 - RNA, 13 nt, Human
ugcuguuacaugc

SEQ ID NO: 3583743 - RNA, 16 nt, Human
ugcuguuaucccugcc

SEQ ID NO: 3583744 - RNA, 19 nt, Human
ugcuguuaugucuguuuaa

SEQ ID NO: 3583745 - RNA, 22 nt, Human
ugcuguucuagcacuucaucug

SEQ ID NO: 3583746 - RNA, 21 nt, Human
ugcuguugaaagcaaaaaugc

SEQ ID NO: 3583747 - RNA, 15 nt, Human
ugcuguugacauauu

SEQ ID NO: 3583748 - RNA, 12 nt, Human
ugcuguugauug

SEQ ID NO: 3583749 - RNA, 15 nt, Human
ugcuguugauugcua

SEQ ID NO: 3583750 - RNA, 17 nt, Human
ugcuguugauugcuaaa

SEQ ID NO: 3583751 - RNA, 20 nt, Human
ugcuguugauugcuaaaugu

SEQ ID NO: 3583752 - RNA, 19 nt, Human
ugcuguugauuucuuucca

SEQ ID NO: 3583753 - RNA, 21 nt, Human
ugcuguugauuucuuuccaga

SEQ ID NO: 3583754 - RNA, 15 nt, Human
ugcuguugcuugaau

SEQ ID NO: 3583755 - RNA, 16 nt, Human
ugcuguuggucaugug

SEQ ID NO: 3583756 - RNA, 23 nt, Human
ugcuguuguuaugaugugcuuaa

SEQ ID NO: 3583757 - RNA, 14 nt, Human
ugcuguuguucucg

SEQ ID NO: 3583758 - RNA, 23 nt, Human
ugcuguuuauuaaucuuagugua

SEQ ID NO: 3583759 - RNA, 13 nt, Human
ugcuguuugacaa

SEQ ID NO: 3583760 - RNA, 19 nt, Human
ugcuguuuuccucccuucu

SEQ ID NO: 3583761 - RNA, 13 nt, Human
ugcuguuuuguua

SEQ ID NO: 3583762 - RNA, 15 nt, Human
ugcuguuuuguucug

SEQ ID NO: 3583763 - RNA, 14 nt, Human
ugcuuaaaauaagc

SEQ ID NO: 3583764 - RNA, 18 nt, Human
uggcccucaaggccuccc

SEQ ID NO: 3583765 - RNA, 14 nt, Human
uggcccucuacccc

SEQ ID NO: 3583766 - RNA, 16 nt, Human
uggcccucuccccugc

SEQ ID NO: 3583767 - RNA, 13 nt, Human
uggcccucuucuu

SEQ ID NO: 3583768 - RNA, 19 nt, Human
uggcccugccaucuuccca

SEQ ID NO: 3583769 - RNA, 13 nt, Human
uggcccugcccug

SEQ ID NO: 3583770 - RNA, 14 nt, Human
uggcccugcccugg

SEQ ID NO: 3583771 - RNA, 15 nt, Human
uggcccuggccugcu

SEQ ID NO: 3583772 - RNA, 16 nt, Human
uggcccuggccugcug

SEQ ID NO: 3583773 - RNA, 18 nt, Human
uggcccuggccugcuggg

SEQ ID NO: 3583774 - RNA, 14 nt, Human
uggcccuggcugcc

SEQ ID NO: 3583775 - RNA, 13 nt, Human
uggcccuggggcc

SEQ ID NO: 3583776 - RNA, 12 nt, Human
uggcccuggggu

SEQ ID NO: 3583777 - RNA, 13 nt, Human
uggcccugucccu

SEQ ID NO: 3583778 - RNA, 19 nt, Human
uggcccugucccucccacc

SEQ ID NO: 3583779 - RNA, 23 nt, Human
uggcccuuacuugcuucucuagc

SEQ ID NO: 3583780 - RNA, 13 nt, Human
uggcccuuccugg

SEQ ID NO: 3583781 - RNA, 16 nt, Human
uggcccuuccuggaca

SEQ ID NO: 3583782 - RNA, 13 nt, Human
uggcccuuuccuu

SEQ ID NO: 3583783 - RNA, 15 nt, Human
uggccgaguccaagc

SEQ ID NO: 3583784 - RNA, 17 nt, Human
uggccgcccccugcccc

SEQ ID NO: 3583785 - RNA, 12 nt, Human
uggccgccucac

SEQ ID NO: 3583786 - RNA, 21 nt, Human
uggccgcgccaaauaaugucu

SEQ ID NO: 3583787 - RNA, 22 nt, Human
uggccgcgccaaauaaugucuc

SEQ ID NO: 3583788 - RNA, 18 nt, Human
uggccgcgcuccgggcuu

SEQ ID NO: 3583789 - RNA, 19 nt, Human
uggccgcguuuagaccaag

SEQ ID NO: 3583790 - RNA, 19 nt, Human
uggccgcugaguggcaggg

SEQ ID NO: 3583791 - RNA, 19 nt, Human
uggccggcaaccccaguuc

SEQ ID NO: 3583792 - RNA, 24 nt, Human
uggccggcaaccccaguucugcuc

SEQ ID NO: 3583793 - RNA, 12 nt, Human
uggccggccagc

SEQ ID NO: 3583794 - RNA, 22 nt, Human
uggccggccagccagccacucu

SEQ ID NO: 3583795 - RNA, 23 nt, Human
uggccggccagccagccacucua

SEQ ID NO: 3583796 - RNA, 17 nt, Human
uggccgggaccccgagc

SEQ ID NO: 3583797 - RNA, 15 nt, Human
uggccgggagccuga

SEQ ID NO: 3583798 - RNA, 23 nt, Human
uggccgggcgcgguggcucacgc

SEQ ID NO: 3583799 - RNA, 17 nt, Human
uggccgggugcgguggc

SEQ ID NO: 3583800 - RNA, 18 nt, Human
uggccgggugcgguggcu

SEQ ID NO: 3583801 - RNA, 15 nt, Human
uggccggucugcaag

SEQ ID NO: 3583802 - RNA, 21 nt, Human
uggccggucugcaagucagag

SEQ ID NO: 3583803 - RNA, 17 nt, Human
uggccgugaaugggugc

SEQ ID NO: 3583804 - RNA, 14 nt, Human
uggccguuaucugg

SEQ ID NO: 3583805 - RNA, 21 nt, Human
uggccguugauguuggcuggg

SEQ ID NO: 3583806 - RNA, 14 nt, Human
uggccguuggccac

SEQ ID NO: 3583807 - RNA, 16 nt, Human
uggccuaaaaaugcaa

SEQ ID NO: 3583808 - RNA, 21 nt, Human
uggccuaaaccucaguuauua

SEQ ID NO: 3583809 - RNA, 23 nt, Human
uggccuaaccugccgagagucca

SEQ ID NO: 3583810 - RNA, 21 nt, Human
uggccuaagaggcugcccucc

SEQ ID NO: 3583811 - RNA, 18 nt, Human
uggccuacaaaucaguaa

SEQ ID NO: 3583812 - RNA, 23 nt, Human
uggccuagcauacguacacauuu

SEQ ID NO: 3583813 - RNA, 17 nt, Human
uggccuagcccacccug

SEQ ID NO: 3583814 - RNA, 20 nt, Human
uggccuagcccacccugcug

SEQ ID NO: 3583815 - RNA, 22 nt, Human
uggccuaggagauaucugaggg

SEQ ID NO: 3583816 - RNA, 19 nt, Human
uggccuauccgcugccagc

SEQ ID NO: 3583817 - RNA, 21 nt, Human
uggccuauccgcugccagccu

SEQ ID NO: 3583818 - RNA, 13 nt, Human
uggccuaugcaca

SEQ ID NO: 3583819 - RNA, 14 nt, Human
uggccuaugcacau

SEQ ID NO: 3583820 - RNA, 15 nt, Human
uggccuaugcacaua

SEQ ID NO: 3583821 - RNA, 17 nt, Human
uggccuauuauauuaaa

SEQ ID NO: 3583822 - RNA, 21 nt, Human
uggccuauuauauuaaaauau

SEQ ID NO: 3583823 - RNA, 13 nt, Human
uggccucaacccu

SEQ ID NO: 3583824 - RNA, 18 nt, Human
uggccucaacccucccuc

SEQ ID NO: 3583825 - RNA, 20 nt, Human
uggccucaacccucccucag

SEQ ID NO: 3583826 - RNA, 15 nt, Human
uggccucacccaccc

SEQ ID NO: 3583827 - RNA, 17 nt, Human
uggccucagaauucaca

SEQ ID NO: 3583828 - RNA, 14 nt, Human
uggccucagacugc

SEQ ID NO: 3583829 - RNA, 17 nt, Human
uggccucagacugcacc

SEQ ID NO: 3583830 - RNA, 20 nt, Human
uggccucagacugcacccag

SEQ ID NO: 3583831 - RNA, 21 nt, Human
uggccucagacugcacccagg

SEQ ID NO: 3583832 - RNA, 14 nt, Human
uggccucagcugcc

SEQ ID NO: 3583833 - RNA, 19 nt, Human
uggccucagcugccucacu

SEQ ID NO: 3583834 - RNA, 19 nt, Human
uggccucauguggcuggaa

SEQ ID NO: 3583835 - RNA, 13 nt, Human
uggccuccaaguc

SEQ ID NO: 3583836 - RNA, 15 nt, Human
uggccuccaggcccg

SEQ ID NO: 3583837 - RNA, 22 nt, Human
uggccuccaggcccgucugucc

SEQ ID NO: 3583838 - RNA, 19 nt, Human
uggccucccaacucacccc

SEQ ID NO: 3583839 - RNA, 22 nt, Human
uggccucccaacucaccccagc

SEQ ID NO: 3583840 - RNA, 18 nt, Human
uggccucccacagacuca

SEQ ID NO: 3583841 - RNA, 13 nt, Human
uggccucccaccc

SEQ ID NO: 3583842 - RNA, 21 nt, Human
uggccucccacccgaugcugc

SEQ ID NO: 3583843 - RNA, 22 nt, Human
uggccucccacccgaugcugcu

SEQ ID NO: 3583844 - RNA, 15 nt, Human
uggccuccccugcca

SEQ ID NO: 3583845 - RNA, 19 nt, Human
uggccuccccugccaccag

SEQ ID NO: 3583846 - RNA, 20 nt, Human
uggccuccccugccaccagg

SEQ ID NO: 3583847 - RNA, 15 nt, Human
uggccuccccugcug

SEQ ID NO: 3583848 - RNA, 16 nt, Human
uggccuccccugcuga

SEQ ID NO: 3583849 - RNA, 21 nt, Human
uggccuccggcgucagccucc

SEQ ID NO: 3583850 - RNA, 15 nt, Human
uggccuccugccucu

SEQ ID NO: 3583851 - RNA, 17 nt, Human
uggccucgccuggccug

SEQ ID NO: 3583852 - RNA, 17 nt, Human
uggccucuaccacaagg

SEQ ID NO: 3583853 - RNA, 21 nt, Human
uggccucuccuuguggccugg

SEQ ID NO: 3583854 - RNA, 18 nt, Human
uggccucugcaaaggaaa

SEQ ID NO: 3583855 - RNA, 15 nt, Human
uggccucugcacucc

SEQ ID NO: 3583856 - RNA, 16 nt, Human
uggccucuggcucuca

SEQ ID NO: 3583857 - RNA, 17 nt, Human
uggccucuugagcagug

SEQ ID NO: 3583858 - RNA, 22 nt, Human
uggccucuugagcaguggcugg

SEQ ID NO: 3583859 - RNA, 23 nt, Human
uggccucuuuucagaucauggca

SEQ ID NO: 3583860 - RNA, 16 nt, Human
uggccugacuccccca

SEQ ID NO: 3583861 - RNA, 17 nt, Human
uggccugacucccccag

SEQ ID NO: 3583862 - RNA, 14 nt, Human
uggccugagaagag

SEQ ID NO: 3583863 - RNA, 15 nt, Human
uggccugagagggga

SEQ ID NO: 3583864 - RNA, 15 nt, Human
uggccugaggagcag

SEQ ID NO: 3583865 - RNA, 15 nt, Human
uggccugcaaacugg

SEQ ID NO: 3583866 - RNA, 21 nt, Human
uggccugcacggugggccuug

SEQ ID NO: 3583867 - RNA, 20 nt, Human
uggccugcuaaggucuugga

SEQ ID NO: 3583868 - RNA, 22 nt, Human
uggccugcugggcucuccaccu

SEQ ID NO: 3583869 - RNA, 11 nt, Human
uggccuggaca

SEQ ID NO: 3583870 - RNA, 15 nt, Human
uggccuggacaguau

SEQ ID NO: 3583871 - RNA, 13 nt, Human
uggccuggacugu

SEQ ID NO: 3583872 - RNA, 21 nt, Human
uggccuggaucuccccacucu

SEQ ID NO: 3583873 - RNA, 16 nt, Human
uggccuggccaggagc

SEQ ID NO: 3583874 - RNA, 18 nt, Human
uggccuggccccucaggg

SEQ ID NO: 3583875 - RNA, 21 nt, Human
uggccuggccccucagggucc

SEQ ID NO: 3583876 - RNA, 14 nt, Human
uggccuggcccugc

SEQ ID NO: 3583877 - RNA, 13 nt, Human
uggccuggccugg

SEQ ID NO: 3583878 - RNA, 15 nt, Human
uggccuggccuggcc

SEQ ID NO: 3583879 - RNA, 17 nt, Human
uggccuggccuggcccu

SEQ ID NO: 3583880 - RNA, 18 nt, Human
uggccuggccuggcccug

SEQ ID NO: 3583881 - RNA, 16 nt, Human
uggccuggcuucuccu

SEQ ID NO: 3583882 - RNA, 11 nt, Human
uggccugggca

SEQ ID NO: 3583883 - RNA, 11 nt, Human
uggccugggcc

SEQ ID NO: 3583884 - RNA, 17 nt, Human
uggccugggccuccuca

SEQ ID NO: 3583885 - RNA, 19 nt, Human
uggccuguagaauagccug

SEQ ID NO: 3583886 - RNA, 23 nt, Human
uggccuguagaauagccuguggc

SEQ ID NO: 3583887 - RNA, 14 nt, Human
uggccugucucauc

SEQ ID NO: 3583888 - RNA, 24 nt, Human
uggccugucucauccccagggguc

SEQ ID NO: 3583889 - RNA, 16 nt, Human
uggccuguggcugucg

SEQ ID NO: 3583890 - RNA, 14 nt, Human
uggccuguguccca

SEQ ID NO: 3583891 - RNA, 20 nt, Human
uggccuguguggccacuucu

SEQ ID NO: 3583892 - RNA, 22 nt, Human
uggccuguguggccacuucugu

SEQ ID NO: 3583893 - RNA, 13 nt, Human
uggccuguucugu

SEQ ID NO: 3583894 - RNA, 16 nt, Human
uggccuuaauuuccuu

SEQ ID NO: 3583895 - RNA, 15 nt, Human
uggccuuaccccugc

SEQ ID NO: 3583896 - RNA, 16 nt, Human
uggccuuaccccugcc

SEQ ID NO: 3583897 - RNA, 15 nt, Human
uggccuuccccagca

SEQ ID NO: 3583898 - RNA, 17 nt, Human
uggccuuccccagccuc

SEQ ID NO: 3583899 - RNA, 21 nt, Human
uggccuuggcuuuucuagccu

SEQ ID NO: 3583900 - RNA, 21 nt, Human
uggccuugggauccaggcccc

SEQ ID NO: 3583901 - RNA, 18 nt, Human
uggccuuguaagacccuu

SEQ ID NO: 3583902 - RNA, 21 nt, Human
uggccuugugguccaaauagg

SEQ ID NO: 3583903 - RNA, 12 nt, Human
uggccuuuauua

SEQ ID NO: 3583904 - RNA, 20 nt, Human
uggccuuuguaagugcagga

SEQ ID NO: 3583905 - RNA, 22 nt, Human
uggccuuuuucauuuaucuaua

SEQ ID NO: 3583906 - RNA, 18 nt, Human
uggcgaaucucaaaauua

SEQ ID NO: 3583907 - RNA, 19 nt, Human
uggcgagccauuuguccca

SEQ ID NO: 3583908 - RNA, 22 nt, Human
uggcgagccauuugucccaagu

SEQ ID NO: 3583909 - RNA, 14 nt, Human
uggcugcuguugcu

SEQ ID NO: 3583910 - RNA, 21 nt, Human
uggcugcuucaaggauccuga

SEQ ID NO: 3583911 - RNA, 21 nt, Human
uggcuggaagauccugcgggu

SEQ ID NO: 3583912 - RNA, 17 nt, Human
uggcuggcccgucaugu

SEQ ID NO: 3583913 - RNA, 22 nt, Human
uggcuggcuaacuggaagcaug

SEQ ID NO: 3583914 - RNA, 13 nt, Human
uggcuggcugagg

SEQ ID NO: 3583915 - RNA, 14 nt, Human
uggcuggcugaggg

SEQ ID NO: 3583916 - RNA, 15 nt, Human
uggcugggaacucac

SEQ ID NO: 3583917 - RNA, 17 nt, Human
uggcugggacugggaac

SEQ ID NO: 3583918 - RNA, 10 nt, Human
uggcugggca

SEQ ID NO: 3583919 - RNA, 20 nt, Human
uggcugggcagagcugcauc

SEQ ID NO: 3583920 - RNA, 16 nt, Human
uggcugggcccagaag

SEQ ID NO: 3583921 - RNA, 14 nt, Human
uggcugggcugcuc

SEQ ID NO: 3583922 - RNA, 21 nt, Human
uggcuggggccuaucagugug

SEQ ID NO: 3583923 - RNA, 16 nt, Human
uggcugggggcaggag

SEQ ID NO: 3583924 - RNA, 15 nt, Human
uggcugggggccuca

SEQ ID NO: 3583925 - RNA, 16 nt, Human
uggcugggggccucag

SEQ ID NO: 3583926 - RNA, 22 nt, Human
uggcugguaagggccaaguccc

SEQ ID NO: 3583927 - RNA, 20 nt, Human
uggcuggugagccggucagg

SEQ ID NO: 3583928 - RNA, 17 nt, Human
uggcuggugugguacag

SEQ ID NO: 3583929 - RNA, 21 nt, Human
uggcuggugugguacagagaa

SEQ ID NO: 3583930 - RNA, 15 nt, Human
uggcugguguuaaca

SEQ ID NO: 3583931 - RNA, 21 nt, Human
uggcugguguuaacagaaggg

SEQ ID NO: 3583932 - RNA, 16 nt, Human
uggcuguaaggcucua

SEQ ID NO: 3583933 - RNA, 21 nt, Human
uggcuguaaggcucuagauca

SEQ ID NO: 3583934 - RNA, 16 nt, Human
uggcuguaaucauuug

SEQ ID NO: 3583935 - RNA, 15 nt, Human
uggcuguacccagga

SEQ ID NO: 3583936 - RNA, 20 nt, Human
uggcuguagaaggagacaga

SEQ ID NO: 3583937 - RNA, 18 nt, Human
uggcugucaaugggaccu

SEQ ID NO: 3583938 - RNA, 12 nt, Human
uggcuguccagu

SEQ ID NO: 3583939 - RNA, 17 nt, Human
uggcuguccagugccca

SEQ ID NO: 3583940 - RNA, 15 nt, Human
uggcugugaggcccc

SEQ ID NO: 3583941 - RNA, 17 nt, Human
uggcugugccucugccu

SEQ ID NO: 3583942 - RNA, 19 nt, Human
uggcugugccucugccugu

SEQ ID NO: 3583943 - RNA, 19 nt, Human
uggcugugcucucaccagc

SEQ ID NO: 3583944 - RNA, 21 nt, Human
uggcuguggagacaaugucug

SEQ ID NO: 3583945 - RNA, 14 nt, Human
uggcugugggcucc

SEQ ID NO: 3583946 - RNA, 15 nt, Human
uggcuguuggcuggg

SEQ ID NO: 3583947 - RNA, 19 nt, Human
uggcuuaaauauaguuccu

SEQ ID NO: 3583948 - RNA, 11 nt, Human
uggcuuaauuc

SEQ ID NO: 3583949 - RNA, 21 nt, Human
uggcuuaccugaccucuugcu

SEQ ID NO: 3583950 - RNA, 13 nt, Human
uggcuuaccuggc

SEQ ID NO: 3583951 - RNA, 17 nt, Human
uggcuuaccuggcccau

SEQ ID NO: 3583952 - RNA, 23 nt, Human
uggcuuacuacaugugggagcuu

SEQ ID NO: 3583953 - RNA, 23 nt, Human
uggcuucacggaagagccuugcg

SEQ ID NO: 3583954 - RNA, 14 nt, Human
uggcuucagcucca

SEQ ID NO: 3583955 - RNA, 16 nt, Human
uggcuucagcuccagc

SEQ ID NO: 3583956 - RNA, 18 nt, Human
uggcuucagcuccagccc

SEQ ID NO: 3583957 - RNA, 18 nt, Human
uggcuucauuagagcagg

SEQ ID NO: 3583958 - RNA, 15 nt, Human
uggcuuccagguauc

SEQ ID NO: 3583959 - RNA, 21 nt, Human
uggcuuccagguaucuccagg

SEQ ID NO: 3583960 - RNA, 14 nt, Human
uggcuucccauccc

SEQ ID NO: 3583961 - RNA, 21 nt, Human
uggcuucccauccccagcgau

SEQ ID NO: 3583962 - RNA, 17 nt, Human
uggcuucccgcucagcc

SEQ ID NO: 3583963 - RNA, 19 nt, Human
uggcuucccgcucagcccu

SEQ ID NO: 3583964 - RNA, 11 nt, Human
uggcuuccucc

SEQ ID NO: 3583965 - RNA, 14 nt, Human
uggcuuccuuucuu

SEQ ID NO: 3583966 - RNA, 16 nt, Human
uggcuuccuuucuugg

SEQ ID NO: 3583967 - RNA, 18 nt, Human
uggcuucggacaaaauau

SEQ ID NO: 3583968 - RNA, 15 nt, Human
uggcuucuggccagg

SEQ ID NO: 3583969 - RNA, 16 nt, Human
uggcuucuggccagga

SEQ ID NO: 3583970 - RNA, 18 nt, Human
uggcuucuggccaggaag

SEQ ID NO: 3583971 - RNA, 19 nt, Human
uggcuucuggccaggaagc

SEQ ID NO: 3583972 - RNA, 21 nt, Human
uggcuucuggccaggaagcuu

SEQ ID NO: 3583973 - RNA, 19 nt, Human
uggcuucuguugucaccuu

SEQ ID NO: 3583974 - RNA, 18 nt, Human
uggcuucuucuuuaggau

SEQ ID NO: 3583975 - RNA, 19 nt, Human
uggcuucuuuucuuuguau

SEQ ID NO: 3583976 - RNA, 20 nt, Human
uggcuugaagccaagucagc

SEQ ID NO: 3583977 - RNA, 15 nt, Human
uggcuugagaaauau

SEQ ID NO: 3583978 - RNA, 17 nt, Human
uggcuugccacagcucu

SEQ ID NO: 3583979 - RNA, 17 nt, Human
uggcuuggccacagcca

SEQ ID NO: 3583980 - RNA, 20 nt, Human
uggcuuggccacagccaggg

SEQ ID NO: 3583981 - RNA, 13 nt, Human
uggcuuggcccug

SEQ ID NO: 3583982 - RNA, 19 nt, Human
uggcuuggcccuggcagcc

SEQ ID NO: 3583983 - RNA, 18 nt, Human
uggcuugggacuaaaugc

SEQ ID NO: 3583984 - RNA, 23 nt, Human
uggcuuggggucaagaaacagcc

SEQ ID NO: 3583985 - RNA, 17 nt, Human
uggcuuguagaauuguu

SEQ ID NO: 3583986 - RNA, 13 nt, Human
uggcuugucuaua

SEQ ID NO: 3583987 - RNA, 16 nt, Human
uggcuuguguguuuca

SEQ ID NO: 3583988 - RNA, 20 nt, Human
uggcuuuaggagcaguggga

SEQ ID NO: 3583989 - RNA, 16 nt, Human
uggcuuuauccucuuu

SEQ ID NO: 3583990 - RNA, 20 nt, Human
uggcuuuauccucuuuagag

SEQ ID NO: 3583991 - RNA, 15 nt, Human
uggcuuucagccucu

SEQ ID NO: 3583992 - RNA, 14 nt, Human
uggcuuucagggag

SEQ ID NO: 3583993 - RNA, 17 nt, Human
uggcuuucauuauuagu

SEQ ID NO: 3583994 - RNA, 17 nt, Human
uggcuuuccuuguggca

SEQ ID NO: 3583995 - RNA, 21 nt, Human
uggcuuuccuuguggcagagg

SEQ ID NO: 3583996 - RNA, 17 nt, Human
uggcuuugcccaaccuc

SEQ ID NO: 3583997 - RNA, 20 nt, Human
uggcuuugcccaaccucagc

SEQ ID NO: 3583998 - RNA, 23 nt, Human
uggcuuugcccaaccucagcaac

SEQ ID NO: 3583999 - RNA, 22 nt, Human
uggcuuuguauagaaccucuuu

SEQ ID NO: 3584000 - RNA, 17 nt, Human
uggcuuugucccacagc

SEQ ID NO: 3584001 - RNA, 11 nt, Human
uggcuuuguuu

SEQ ID NO: 3584002 - RNA, 16 nt, Human
uggcuuuuagacagau

SEQ ID NO: 3584003 - RNA, 21 nt, Human
uggcuuuuauuaaugcacuuu

SEQ ID NO: 3584004 - RNA, 14 nt, Human
uggcuuuucacugc

SEQ ID NO: 3584005 - RNA, 18 nt, Human
uggcuuuucacugcuggc

SEQ ID NO: 3584006 - RNA, 19 nt, Human
uggcuuuucugauccaguu

SEQ ID NO: 3584007 - RNA, 14 nt, Human
uggcuuuucuguuu

SEQ ID NO: 3584008 - RNA, 18 nt, Human
uggcuuuucuguuuccug

SEQ ID NO: 3584009 - RNA, 19 nt, Human
uggcuuuucuguuuccugu

SEQ ID NO: 3584010 - RNA, 14 nt, Human
uggcuuuugugcau

SEQ ID NO: 3584011 - RNA, 19 nt, Human
uggcuuuuuuccuccugug

SEQ ID NO: 3584012 - RNA, 19 nt, Human
ugggaaaaaaaugaaugag

SEQ ID NO: 3584013 - RNA, 16 nt, Human
ugggaaaaauguagga

SEQ ID NO: 3584014 - RNA, 17 nt, Human
ugggaaaaauguaggag

SEQ ID NO: 3584015 - RNA, 14 nt, Human
ugggaaaacauuug

SEQ ID NO: 3584016 - RNA, 23 nt, Human
ugggaaaauaccccaucauucau

SEQ ID NO: 3584017 - RNA, 17 nt, Human
ugggaaacacuccuugc

SEQ ID NO: 3584018 - RNA, 18 nt, Human
ugggaaacacuccuugca

SEQ ID NO: 3584019 - RNA, 15 nt, Human
ugggaaacagaggcu

SEQ ID NO: 3584020 - RNA, 21 nt, Human
ugggaaacuugucacuugcau

SEQ ID NO: 3584021 - RNA, 21 nt, Human
ugggaaagaaggcaaaguccc

SEQ ID NO: 3584022 - RNA, 15 nt, Human
ugggaaagcauaaag

SEQ ID NO: 3584023 - RNA, 15 nt, Human
ugggaaagccaccuc

SEQ ID NO: 3584024 - RNA, 20 nt, Human
ugggaaagccccugccccuc

SEQ ID NO: 3584025 - RNA, 23 nt, Human
ugggaaagcgcggacgugcuggg

SEQ ID NO: 3584026 - RNA, 16 nt, Human
ugggaaaggaguagaa

SEQ ID NO: 3584027 - RNA, 16 nt, Human
ugggaaaguauucugu

SEQ ID NO: 3584028 - RNA, 17 nt, Human
ugggaaauaagagagaa

SEQ ID NO: 3584029 - RNA, 23 nt, Human
ugggaaaugcugauuuaaacuuc

SEQ ID NO: 3584030 - RNA, 20 nt, Human
ugggaacaccauaggucacc

SEQ ID NO: 3584031 - RNA, 20 nt, Human
ugggaaccccuucauccucu

SEQ ID NO: 3584032 - RNA, 15 nt, Human
ugggaaccucccaga

SEQ ID NO: 3584033 - RNA, 20 nt, Human
ugggaacgagaggggaagag

SEQ ID NO: 3584034 - RNA, 16 nt, Human
ugggaacugcagaccu

SEQ ID NO: 3584035 - RNA, 12 nt, Human
ugggaagaaaca

SEQ ID NO: 3584036 - RNA, 14 nt, Human
ugggaagaaacaaa

SEQ ID NO: 3584037 - RNA, 14 nt, Human
ugggaagacaugaa

SEQ ID NO: 3584038 - RNA, 18 nt, Human
ugggaagacgaggcccuc

SEQ ID NO: 3584039 - RNA, 17 nt, Human
ugggaagagcuuagaaa

SEQ ID NO: 3584040 - RNA, 17 nt, Human
ugggaagauaggcucug

SEQ ID NO: 3584041 - RNA, 15 nt, Human
ugggaagcugagggc

SEQ ID NO: 3584042 - RNA, 20 nt, Human
ugggaagcugagggcaaauc

SEQ ID NO: 3584043 - RNA, 15 nt, Human
ugggaaggccagcug

SEQ ID NO: 3584044 - RNA, 22 nt, Human
ugggaaggccucuuggagaccu

SEQ ID NO: 3584045 - RNA, 20 nt, Human
ugggaagggucauagaaagg

SEQ ID NO: 3584046 - RNA, 15 nt, Human
ugggaagugaagacu

SEQ ID NO: 3584047 - RNA, 23 nt, Human
ugggaaguugcauuccuuugucu

SEQ ID NO: 3584048 - RNA, 15 nt, Human
ugggaauaaauaugc

SEQ ID NO: 3584049 - RNA, 20 nt, Human
ugggaauauaauauugucuc

SEQ ID NO: 3584050 - RNA, 20 nt, Human
ugggaauauuugaaucuugu

SEQ ID NO: 3584051 - RNA, 22 nt, Human
ugggaauauuugaaucuugucu

SEQ ID NO: 3584052 - RNA, 13 nt, Human
ugggaaugaagcu

SEQ ID NO: 3584053 - RNA, 13 nt, Human
ugggaugaccagg

SEQ ID NO: 3584054 - RNA, 19 nt, Human
ugggaugagaguuuuggau

SEQ ID NO: 3584055 - RNA, 18 nt, Human
ugggaugauuggaggggg

SEQ ID NO: 3584056 - RNA, 14 nt, Human
ugggaugcuugccu

SEQ ID NO: 3584057 - RNA, 20 nt, Human
ugggaugcuugccuagggcc

SEQ ID NO: 3584058 - RNA, 16 nt, Human
ugggauggugggcuuc

SEQ ID NO: 3584059 - RNA, 19 nt, Human
ugggauguccacagaugcc

SEQ ID NO: 3584060 - RNA, 23 nt, Human
ugggauguggcugcagcagcggu

SEQ ID NO: 3584061 - RNA, 21 nt, Human
ugggauguucagcacuguccc

SEQ ID NO: 3584062 - RNA, 17 nt, Human
ugggauuacaggcguga

SEQ ID NO: 3584063 - RNA, 18 nt, Human
ugggauuacaggcuccug

SEQ ID NO: 3584064 - RNA, 21 nt, Human
ugggauuacagggaugagcca

SEQ ID NO: 3584065 - RNA, 19 nt, Human
ugggauuaugggucacagg

SEQ ID NO: 3584066 - RNA, 21 nt, Human
ugggauuaugggucacaggaa

SEQ ID NO: 3584067 - RNA, 14 nt, Human
ugggauucagagaa

SEQ ID NO: 3584068 - RNA, 23 nt, Human
ugggauucaggaaaaggccuggg

SEQ ID NO: 3584069 - RNA, 22 nt, Human
ugggauuccugacccaggccgc

SEQ ID NO: 3584070 - RNA, 17 nt, Human
ugggauucuacuuuaag

SEQ ID NO: 3584071 - RNA, 22 nt, Human
ugggauucuacuuuaagcacua

SEQ ID NO: 3584072 - RNA, 16 nt, Human
ugggauugagucugug

SEQ ID NO: 3584073 - RNA, 19 nt, Human
ugggauugagucugugcca

SEQ ID NO: 3584074 - RNA, 18 nt, Human
ugggauugggggcuggug

SEQ ID NO: 3584075 - RNA, 17 nt, Human
ugggauuuaauuuccag

SEQ ID NO: 3584076 - RNA, 16 nt, Human
ugggcaaaaaacucga

SEQ ID NO: 3584077 - RNA, 15 nt, Human
ugggcaaaagagugu

SEQ ID NO: 3584078 - RNA, 14 nt, Human
ugggcaacagagca

SEQ ID NO: 3584079 - RNA, 15 nt, Human
ugggcaacagagcaa

SEQ ID NO: 3584080 - RNA, 13 nt, Human
ugggcaaggaaaa

SEQ ID NO: 3584081 - RNA, 18 nt, Human
ugggcaauauaaccaaug

SEQ ID NO: 3584082 - RNA, 15 nt, Human
ugggcaauauagcaa

SEQ ID NO: 3584083 - RNA, 21 nt, Human
ugggcaauauucucuguacau

SEQ ID NO: 3584084 - RNA, 13 nt, Human
ugggcaauuuaga

SEQ ID NO: 3584085 - RNA, 16 nt, Human
ugggcacacgccuccc

SEQ ID NO: 3584086 - RNA, 22 nt, Human
ugggcacacgccucccacuggg

SEQ ID NO: 3584087 - RNA, 20 nt, Human
ugggcacacgcugcucugcc

SEQ ID NO: 3584088 - RNA, 22 nt, Human
ugggcacacgcugcucugcccc

SEQ ID NO: 3584089 - RNA, 13 nt, Human
ugggcacagguca

SEQ ID NO: 3584090 - RNA, 14 nt, Human
ugggcacaguuugg

SEQ ID NO: 3584091 - RNA, 20 nt, Human
ugggcacaucauuucaagaa

SEQ ID NO: 3584092 - RNA, 22 nt, Human
ugggcaccaagagccaauggag

SEQ ID NO: 3584093 - RNA, 16 nt, Human
ugggcaccacaaaaua

SEQ ID NO: 3584094 - RNA, 14 nt, Human
ugggcacccacccu

SEQ ID NO: 3584095 - RNA, 16 nt, Human
ugggcacccacccugg

SEQ ID NO: 3584096 - RNA, 20 nt, Human
ugggcacccacccugggacc

SEQ ID NO: 3584097 - RNA, 16 nt, Human
ugggcacccccagccu

SEQ ID NO: 3584098 - RNA, 19 nt, Human
ugggcacccccagccuggg

SEQ ID NO: 3584099 - RNA, 21 nt, Human
ugggcacccccagccugggcc

SEQ ID NO: 3584100 - RNA, 19 nt, Human
ugggcaccuggggaguggg

SEQ ID NO: 3584101 - RNA, 20 nt, Human
ugggcaccuggggaguggga

SEQ ID NO: 3584102 - RNA, 12 nt, Human
ugggcacugaag

SEQ ID NO: 3584103 - RNA, 18 nt, Human
ugggcacugcucucaccu

SEQ ID NO: 3584104 - RNA, 14 nt, Human
ugggcacugcuggg

SEQ ID NO: 3584105 - RNA, 17 nt, Human
ugggcacugcugggugg

SEQ ID NO: 3584106 - RNA, 21 nt, Human
ugggcacugcuggguggccca

SEQ ID NO: 3584107 - RNA, 23 nt, Human
ugggcacugcuggguggcccauc

SEQ ID NO: 3584108 - RNA, 16 nt, Human
ugggcacuggauuagu

SEQ ID NO: 3584109 - RNA, 15 nt, Human
ugggcacuucccugc

SEQ ID NO: 3584110 - RNA, 17 nt, Human
ugggcacuucccugcug

SEQ ID NO: 3584111 - RNA, 12 nt, Human
ugggcagaagga

SEQ ID NO: 3584112 - RNA, 13 nt, Human
ugggcagaaggaa

SEQ ID NO: 3584113 - RNA, 20 nt, Human
ugggcagaaggaagacuuca

SEQ ID NO: 3584114 - RNA, 16 nt, Human
ugggcagaaggccaag

SEQ ID NO: 3584115 - RNA, 17 nt, Human
ugggcagaaggccaaga

SEQ ID NO: 3584116 - RNA, 15 nt, Human
ugggcagaagggaga

SEQ ID NO: 3584117 - RNA, 17 nt, Human
ugggcagagcagagacc

SEQ ID NO: 3584118 - RNA, 14 nt, Human
ugggcagagcccaa

SEQ ID NO: 3584119 - RNA, 14 nt, Human
ugggcagagcuggc

SEQ ID NO: 3584120 - RNA, 21 nt, Human
ugggcagaucuaccccuuacu

SEQ ID NO: 3584121 - RNA, 18 nt, Human
ugggcagcaauuuaaaug

SEQ ID NO: 3584122 - RNA, 16 nt, Human
ugggcagcauagcaag

SEQ ID NO: 3584123 - RNA, 20 nt, Human
ugggcagcgcccuuccucuc

SEQ ID NO: 3584124 - RNA, 22 nt, Human
ugggcagcuaccauuucccuuu

SEQ ID NO: 3584125 - RNA, 10 nt, Human
ugggcagcuc

SEQ ID NO: 3584126 - RNA, 12 nt, Human
ugggcagcugcc

SEQ ID NO: 3584127 - RNA, 13 nt, Human
ugggcagcugccu

SEQ ID NO: 3584128 - RNA, 14 nt, Human
ugggcagcugccuc

SEQ ID NO: 3584129 - RNA, 18 nt, Human
ugggcagcuuagggcccu

SEQ ID NO: 3584130 - RNA, 23 nt, Human
ugggcaggaagugaagagauccu

SEQ ID NO: 3584131 - RNA, 21 nt, Human
ugggcaggacucagcucccca

SEQ ID NO: 3584132 - RNA, 18 nt, Human
ugggcaggagggaggugc

SEQ ID NO: 3584133 - RNA, 16 nt, Human
ugggcaggugguggca

SEQ ID NO: 3584134 - RNA, 21 nt, Human
ugggcaggugguggcacugag

SEQ ID NO: 3584135 - RNA, 17 nt, Human
ugggcaguuacaugcau

SEQ ID NO: 3584136 - RNA, 18 nt, Human
ugggcaguuuuucuguau

SEQ ID NO: 3584137 - RNA, 22 nt, Human
ugggcaguuuuucuguauuuua

SEQ ID NO: 3584138 - RNA, 15 nt, Human
ugggcaguuuuuuga

SEQ ID NO: 3584139 - RNA, 16 nt, Human
ugggcauagaugcagg

SEQ ID NO: 3584140 - RNA, 15 nt, Human
ugggcaucuguucug

SEQ ID NO: 3584141 - RNA, 13 nt, Human
ugggcaucuuuug

SEQ ID NO: 3584142 - RNA, 23 nt, Human
ugggcaugagggguuccuccccu

SEQ ID NO: 3584143 - RNA, 13 nt, Human
ugggcauggggug

SEQ ID NO: 3584144 - RNA, 15 nt, Human
ugggcaugggguggg

SEQ ID NO: 3584145 - RNA, 21 nt, Human
ugggcauggggugggccucug

SEQ ID NO: 3584146 - RNA, 19 nt, Human
ugggcaugguguucuccug

SEQ ID NO: 3584147 - RNA, 17 nt, Human
ugggcaugugggcuuca

SEQ ID NO: 3584148 - RNA, 14 nt, Human
ugggcauucaaaug

SEQ ID NO: 3584149 - RNA, 14 nt, Human
ugggcauucucucu

SEQ ID NO: 3584150 - RNA, 15 nt, Human
ugggcauugccaugu

SEQ ID NO: 3584151 - RNA, 18 nt, Human
ugggcauugccaugugga

SEQ ID NO: 3584152 - RNA, 12 nt, Human
ugggcauugcuu

SEQ ID NO: 3584153 - RNA, 14 nt, Human
ugggcauugcuuuc

SEQ ID NO: 3584154 - RNA, 15 nt, Human
ugggcauuugugagg

SEQ ID NO: 3584155 - RNA, 21 nt, Human
ugggccaaauccgcucucuuc

SEQ ID NO: 3584156 - RNA, 15 nt, Human
ugggccaagccaggg

SEQ ID NO: 3584157 - RNA, 17 nt, Human
ugggccaccgccuugcc

SEQ ID NO: 3584158 - RNA, 23 nt, Human
ugggccaccgccuugcccagccu

SEQ ID NO: 3584159 - RNA, 18 nt, Human
ugggccagaauuucaaac

SEQ ID NO: 3584160 - RNA, 13 nt, Human
ugggccagacaug

SEQ ID NO: 3584161 - RNA, 13 nt, Human
ugggccagccccu

SEQ ID NO: 3584162 - RNA, 18 nt, Human
ugggccagccccucccac

SEQ ID NO: 3584163 - RNA, 20 nt, Human
ugggccagccccucccacca

SEQ ID NO: 3584164 - RNA, 18 nt, Human
ugggccagcuuuucaaac

SEQ ID NO: 3584165 - RNA, 20 nt, Human
ugggccagggcugcccugag

SEQ ID NO: 3584166 - RNA, 21 nt, Human
ugggccagggcugcccugaga

SEQ ID NO: 3584167 - RNA, 19 nt, Human
ugggccagggucuguguga

SEQ ID NO: 3584168 - RNA, 22 nt, Human
ugggccagggucugugugaaug

SEQ ID NO: 3584169 - RNA, 16 nt, Human
ugggccagucugugga

SEQ ID NO: 3584170 - RNA, 15 nt, Human
ugggccauacuggcc

SEQ ID NO: 3584171 - RNA, 20 nt, Human
ugggccauucuccacagcaa

SEQ ID NO: 3584172 - RNA, 20 nt, Human
ugggcccaaugcacuuuguu

SEQ ID NO: 3584173 - RNA, 20 nt, Human
ugggcccacaccuccuuccc

SEQ ID NO: 3584174 - RNA, 22 nt, Human
ugggcccacccaagcaggaggc

SEQ ID NO: 3584175 - RNA, 12 nt, Human
ugggcccagaag

SEQ ID NO: 3584176 - RNA, 19 nt, Human
ugggcccagaggcacagcc

SEQ ID NO: 3584177 - RNA, 12 nt, Human
ugggcccagcug

SEQ ID NO: 3584178 - RNA, 17 nt, Human
ugggcccagcugggcuc

SEQ ID NO: 3584179 - RNA, 19 nt, Human
ugggcccagcugggcucug

SEQ ID NO: 3584180 - RNA, 10 nt, Human
ugggcccagg

SEQ ID NO: 3584181 - RNA, 15 nt, Human
ugggcccaggaccag

SEQ ID NO: 3584182 - RNA, 22 nt, Human
ugggcccaggaccagcuggggc

SEQ ID NO: 3584183 - RNA, 13 nt, Human
ugggcccaucucc

SEQ ID NO: 3584184 - RNA, 16 nt, Human
ugggcccaucucccug

SEQ ID NO: 3584185 - RNA, 19 nt, Human
ugggcccaucucccugcuu

SEQ ID NO: 3584186 - RNA, 14 nt, Human
ugggccccacccuc

SEQ ID NO: 3584187 - RNA, 16 nt, Human
ugggccccacccucgg

SEQ ID NO: 3584188 - RNA, 15 nt, Human
ugggccccagcccac

SEQ ID NO: 3584189 - RNA, 15 nt, Human
ugggccccagccuuc

SEQ ID NO: 3584190 - RNA, 21 nt, Human
ugggccccaggggaacacugg

SEQ ID NO: 3584191 - RNA, 22 nt, Human
ugggccccaguuguauuuauuu

SEQ ID NO: 3584192 - RNA, 18 nt, Human
ugggccccccagcucagg

SEQ ID NO: 3584193 - RNA, 23 nt, Human
ugggccccucaucugcucagcag

SEQ ID NO: 3584194 - RNA, 19 nt, Human
ugggccccucccuaccuca

SEQ ID NO: 3584195 - RNA, 15 nt, Human
ugggccccuggcacu

SEQ ID NO: 3584196 - RNA, 11 nt, Human
ugggcccuccu

SEQ ID NO: 3584197 - RNA, 18 nt, Human
ugggcccucucugcucug

SEQ ID NO: 3584198 - RNA, 23 nt, Human
uggggagguguucacugaagacg

SEQ ID NO: 3584199 - RNA, 16 nt, Human
uggggagugggacaga

SEQ ID NO: 3584200 - RNA, 16 nt, Human
uggggaguuaagaccu

SEQ ID NO: 3584201 - RNA, 18 nt, Human
uggggaguuaagaccugg

SEQ ID NO: 3584202 - RNA, 21 nt, Human
uggggauaaaaugacuacuua

SEQ ID NO: 3584203 - RNA, 17 nt, Human
uggggauaggccagccg

SEQ ID NO: 3584204 - RNA, 18 nt, Human
uggggauaggccagccgc

SEQ ID NO: 3584205 - RNA, 15 nt, Human
uggggauauaauacu

SEQ ID NO: 3584206 - RNA, 13 nt, Human
uggggauaugcuu

SEQ ID NO: 3584207 - RNA, 21 nt, Human
uggggaucacagagacauucc

SEQ ID NO: 3584208 - RNA, 13 nt, Human
uggggauucagau

SEQ ID NO: 3584209 - RNA, 13 nt, Human
uggggauucuuaa

SEQ ID NO: 3584210 - RNA, 16 nt, Human
uggggauucuuaaagu

SEQ ID NO: 3584211 - RNA, 18 nt, Human
uggggauucuuaaaguug

SEQ ID NO: 3584212 - RNA, 20 nt, Human
uggggauugggccccugcca

SEQ ID NO: 3584213 - RNA, 15 nt, Human
uggggauuucuccca

SEQ ID NO: 3584214 - RNA, 17 nt, Human
uggggauuucucccagc

SEQ ID NO: 3584215 - RNA, 17 nt, Human
uggggcacaguccagga

SEQ ID NO: 3584216 - RNA, 18 nt, Human
uggggcacaguccaggaa

SEQ ID NO: 3584217 - RNA, 15 nt, Human
uggggcagagccucc

SEQ ID NO: 3584218 - RNA, 16 nt, Human
uggggcagaggagaac

SEQ ID NO: 3584219 - RNA, 17 nt, Human
uggggcagaggagaacu

SEQ ID NO: 3584220 - RNA, 14 nt, Human
uggggcagcacaga

SEQ ID NO: 3584221 - RNA, 16 nt, Human
uggggcagcuugaggg

SEQ ID NO: 3584222 - RNA, 22 nt, Human
uggggcaggaggggagugaggc

SEQ ID NO: 3584223 - RNA, 22 nt, Human
uggggcaggaguagcugagcuc

SEQ ID NO: 3584224 - RNA, 18 nt, Human
uggggcaggcugggccau

SEQ ID NO: 3584225 - RNA, 20 nt, Human
uggggcaggcugggccaugu

SEQ ID NO: 3584226 - RNA, 12 nt, Human
uggggcagggag

SEQ ID NO: 3584227 - RNA, 14 nt, Human
uggggcagggagcu

SEQ ID NO: 3584228 - RNA, 21 nt, Human
uggggcagggagcugggcccg

SEQ ID NO: 3584229 - RNA, 14 nt, Human
uggggccacacaga

SEQ ID NO: 3584230 - RNA, 12 nt, Human
uggggccacagc

SEQ ID NO: 3584231 - RNA, 15 nt, Human
uggggccacagccag

SEQ ID NO: 3584232 - RNA, 18 nt, Human
uggggccagauccagccu

SEQ ID NO: 3584233 - RNA, 14 nt, Human
uggggccaugccuc

SEQ ID NO: 3584234 - RNA, 20 nt, Human
uggggccauugcuuaccuug

SEQ ID NO: 3584235 - RNA, 14 nt, Human
uggggcccaaaugc

SEQ ID NO: 3584236 - RNA, 12 nt, Human
uggggcccagug

SEQ ID NO: 3584237 - RNA, 14 nt, Human
uggggcccagugca

SEQ ID NO: 3584238 - RNA, 21 nt, Human
uggggccccuuuuuacucccc

SEQ ID NO: 3584239 - RNA, 12 nt, Human
uggggcccugcc

SEQ ID NO: 3584240 - RNA, 15 nt, Human
uggggcccugccucc

SEQ ID NO: 3584241 - RNA, 18 nt, Human
uggggccuacagcuuuga

SEQ ID NO: 3584242 - RNA, 22 nt, Human
uggggccuagcgaucucuccug

SEQ ID NO: 3584243 - RNA, 19 nt, Human
uggggccuaucagugugcc

SEQ ID NO: 3584244 - RNA, 20 nt, Human
uggggccuaucagugugccc

SEQ ID NO: 3584245 - RNA, 13 nt, Human
uggggccugacug

SEQ ID NO: 3584246 - RNA, 12 nt, Human
uggggccugaga

SEQ ID NO: 3584247 - RNA, 13 nt, Human
uggggccugagag

SEQ ID NO: 3584248 - RNA, 19 nt, Human
uggggccugauggggaggg

SEQ ID NO: 3584249 - RNA, 15 nt, Human
uggggccuggaccug

SEQ ID NO: 3584250 - RNA, 17 nt, Human
uggggccuggaccugcc

SEQ ID NO: 3584251 - RNA, 19 nt, Human
uggggccuggaccugccuc

SEQ ID NO: 3584252 - RNA, 12 nt, Human
uggggccuggca

SEQ ID NO: 3584253 - RNA, 12 nt, Human
uggggccuggga

SEQ ID NO: 3584254 - RNA, 14 nt, Human
uggggccugggagg

SEQ ID NO: 3584255 - RNA, 11 nt, Human
uggggccugua

SEQ ID NO: 3584256 - RNA, 18 nt, Human
uggggccuguacugccug

SEQ ID NO: 3584257 - RNA, 19 nt, Human
uggggccuguacugccugc

SEQ ID NO: 3584258 - RNA, 12 nt, Human
uggggccugugg

SEQ ID NO: 3584259 - RNA, 14 nt, Human
uggggccuguggaa

SEQ ID NO: 3584260 - RNA, 21 nt, Human
uggggccuguggaaugagugu

SEQ ID NO: 3584261 - RNA, 16 nt, Human
uggggcgcgugaggcc

SEQ ID NO: 3584262 - RNA, 19 nt, Human
uggggcgggaaagccagug

SEQ ID NO: 3584263 - RNA, 23 nt, Human
uggggcucccagccaggcccuug

SEQ ID NO: 3584264 - RNA, 15 nt, Human
uggggcucccgccuc

SEQ ID NO: 3584265 - RNA, 22 nt, Human
uggggcuccuucuccaccccag

SEQ ID NO: 3584266 - RNA, 17 nt, Human
uggggcucgccaugccg

SEQ ID NO: 3584267 - RNA, 20 nt, Human
uggggcucuaacgccugagc

SEQ ID NO: 3584268 - RNA, 24 nt, Human
uggggcucuaacgccugagcccag

SEQ ID NO: 3584269 - RNA, 17 nt, Human
uggggcucugugcaggg

SEQ ID NO: 3584270 - RNA, 17 nt, Human
uggggcugaucucaggg

SEQ ID NO: 3584271 - RNA, 20 nt, Human
uggggcugaucucagggaag

SEQ ID NO: 3584272 - RNA, 18 nt, Human
uggggcugggggaugggc

SEQ ID NO: 3584273 - RNA, 21 nt, Human
uggggcugggggaugggccug

SEQ ID NO: 3584274 - RNA, 19 nt, Human
uggggcugguagcucaggu

SEQ ID NO: 3584275 - RNA, 18 nt, Human
uggggcuuggcguggagc

SEQ ID NO: 3584276 - RNA, 15 nt, Human
ugggggaaagcaaag

SEQ ID NO: 3584277 - RNA, 17 nt, Human
ugggggaaagcaaagca

SEQ ID NO: 3584278 - RNA, 21 nt, Human
ugggggaaagcaaagcacaga

SEQ ID NO: 3584279 - RNA, 17 nt, Human
ugggggaaauggugccu

SEQ ID NO: 3584280 - RNA, 18 nt, Human
ugggggaacucagaucca

SEQ ID NO: 3584281 - RNA, 20 nt, Human
ugggggaacucagauccagg

SEQ ID NO: 3584282 - RNA, 23 nt, Human
ugggggaaugagcccagagaaca

SEQ ID NO: 3584283 - RNA, 20 nt, Human
ugggggacagaaagagacuc

SEQ ID NO: 3584284 - RNA, 16 nt, Human
ugggggacagggcugg

SEQ ID NO: 3584285 - RNA, 18 nt, Human
ugggggacagggcuggcc

SEQ ID NO: 3584286 - RNA, 22 nt, Human
ugggggacagggcuggcccagc

SEQ ID NO: 3584287 - RNA, 17 nt, Human
ugggggacguuucucau

SEQ ID NO: 3584288 - RNA, 16 nt, Human
ugggggacuguaaguu

SEQ ID NO: 3584289 - RNA, 13 nt, Human
ugggggagagcag

SEQ ID NO: 3584290 - RNA, 19 nt, Human
ugggggagagcaggcuggc

SEQ ID NO: 3584291 - RNA, 16 nt, Human
ugggggagggcugcga

SEQ ID NO: 3584292 - RNA, 16 nt, Human
ugggggaugggccuga

SEQ ID NO: 3584293 - RNA, 11 nt, Human
ugggggaugua

SEQ ID NO: 3584294 - RNA, 16 nt, Human
ugggggcacaggaggc

SEQ ID NO: 3584295 - RNA, 17 nt, Human
ugggggcagagggcaga

SEQ ID NO: 3584296 - RNA, 22 nt, Human
ugggggcaggagggcccuaccu

SEQ ID NO: 3584297 - RNA, 13 nt, Human
ugggggcagggcu

SEQ ID NO: 3584298 - RNA, 19 nt, Human
ugggggccaccugccugcg

SEQ ID NO: 3584299 - RNA, 13 nt, Human
ugggggccaugag

SEQ ID NO: 3584300 - RNA, 11 nt, Human
ugggggccugg

SEQ ID NO: 3584301 - RNA, 12 nt, Human
ugggggccuggc

SEQ ID NO: 3584302 - RNA, 13 nt, Human
ugggggccuggcu

SEQ ID NO: 3584303 - RNA, 17 nt, Human
ugggggcucagcaaggc

SEQ ID NO: 3584304 - RNA, 17 nt, Human
ugggggcugggcagagg

SEQ ID NO: 3584305 - RNA, 15 nt, Human
ugggggcuggugcca

SEQ ID NO: 3584306 - RNA, 16 nt, Human
ugggggcuggugccag

SEQ ID NO: 3584307 - RNA, 21 nt, Human
uggggggaacgcccacuuccc

SEQ ID NO: 3584308 - RNA, 20 nt, Human
uggggggagcacccugaggg

SEQ ID NO: 3584309 - RNA, 21 nt, Human
uggggggagcacccugagggc

SEQ ID NO: 3584310 - RNA, 20 nt, Human
uggggggaugguaagagaaa

SEQ ID NO: 3584311 - RNA, 15 nt, Human
uggggggccaacacc

SEQ ID NO: 3584312 - RNA, 13 nt, Human
ugggggggcagag

SEQ ID NO: 3584313 - RNA, 13 nt, Human
uggggggguggcc

SEQ ID NO: 3584314 - RNA, 19 nt, Human
uggggggguguuaauuuau

SEQ ID NO: 3584315 - RNA, 18 nt, Human
uggggggugaugagggca

SEQ ID NO: 3584316 - RNA, 19 nt, Human
uggggggugaugagggcag

SEQ ID NO: 3584317 - RNA, 15 nt, Human
uggggguagagcuga

SEQ ID NO: 3584318 - RNA, 18 nt, Human
uggggguagagcugaucc

SEQ ID NO: 3584319 - RNA, 18 nt, Human
ugggggucaggcagccag

SEQ ID NO: 3584320 - RNA, 18 nt, Human
ugggggucuguguguuua

SEQ ID NO: 3584321 - RNA, 13 nt, Human
ugggggugggcca

SEQ ID NO: 3584322 - RNA, 16 nt, Human
ugggggugggccaggc

SEQ ID NO: 3584323 - RNA, 13 nt, Human
uggggguggguca

SEQ ID NO: 3584324 - RNA, 22 nt, Human
uggggguguucagccacugagg

SEQ ID NO: 3584325 - RNA, 12 nt, Human
uggggguugcug

SEQ ID NO: 3584326 - RNA, 18 nt, Human
uggggguuguaaauuggc

SEQ ID NO: 3584327 - RNA, 17 nt, Human
ugggguacccacugcuc

SEQ ID NO: 3584328 - RNA, 18 nt, Human
ugggguacccacugcucu

SEQ ID NO: 3584329 - RNA, 15 nt, Human
ugggguagguuggga

SEQ ID NO: 3584330 - RNA, 15 nt, Human
ugggguaugggagag

SEQ ID NO: 3584331 - RNA, 22 nt, Human
ugggguauuggacauagauauu

SEQ ID NO: 3584332 - RNA, 13 nt, Human
uggggucacucug

SEQ ID NO: 3584333 - RNA, 14 nt, Human
uggggucacucugg

SEQ ID NO: 3584334 - RNA, 19 nt, Human
uggggucacucuggcagcu

SEQ ID NO: 3584335 - RNA, 13 nt, Human
uggggucagccag

SEQ ID NO: 3584336 - RNA, 14 nt, Human
uggggucagccagg

SEQ ID NO: 3584337 - RNA, 18 nt, Human
uggggucagccagggcca

SEQ ID NO: 3584338 - RNA, 21 nt, Human
uggggucagccagggccaggg

SEQ ID NO: 3584339 - RNA, 20 nt, Human
uggggucaggccgggcagag

SEQ ID NO: 3584340 - RNA, 22 nt, Human
uggggucagguugacaggaggu

SEQ ID NO: 3584341 - RNA, 14 nt, Human
ugggguccagggag

SEQ ID NO: 3584342 - RNA, 10 nt, Human
uggggucucu

SEQ ID NO: 3584343 - RNA, 11 nt, Human
uggggugacag

SEQ ID NO: 3584344 - RNA, 16 nt, Human
ugucacucauugcuga

SEQ ID NO: 3584345 - RNA, 23 nt, Human
ugucacucauugcugagccucug

SEQ ID NO: 3584346 - RNA, 19 nt, Human
ugucacugacacaaaggaa

SEQ ID NO: 3584347 - RNA, 16 nt, Human
ugucacugcuuuuggc

SEQ ID NO: 3584348 - RNA, 19 nt, Human
ugucacugcuuuuggccug

SEQ ID NO: 3584349 - RNA, 15 nt, Human
ugucacugugguccu

SEQ ID NO: 3584350 - RNA, 14 nt, Human
ugucacuuacuguu

SEQ ID NO: 3584351 - RNA, 21 nt, Human
ugucacuuacuguuucuguca

SEQ ID NO: 3584352 - RNA, 12 nt, Human
ugucacuucugg

SEQ ID NO: 3584353 - RNA, 15 nt, Human
ugucacuugcauguc

SEQ ID NO: 3584354 - RNA, 14 nt, Human
ugucacuugugcuu

SEQ ID NO: 3584355 - RNA, 16 nt, Human
ugucacuuugcucugg

SEQ ID NO: 3584356 - RNA, 16 nt, Human
ugucacuuuuucugau

SEQ ID NO: 3584357 - RNA, 17 nt, Human
ugucacuuuuugaggca

SEQ ID NO: 3584358 - RNA, 19 nt, Human
ugucacuuuuugaggcaaa

SEQ ID NO: 3584359 - RNA, 14 nt, Human
ugucagacauaaag

SEQ ID NO: 3584360 - RNA, 16 nt, Human
ugucagacauaaagcc

SEQ ID NO: 3584361 - RNA, 17 nt, Human
ugucagacauaaagcca

SEQ ID NO: 3584362 - RNA, 20 nt, Human
ugucagacauaaagccaugu

SEQ ID NO: 3584363 - RNA, 13 nt, Human
ugucagacuggcu

SEQ ID NO: 3584364 - RNA, 14 nt, Human
ugucagagcuggga

SEQ ID NO: 3584365 - RNA, 20 nt, Human
ugucagauauuuuuucagaa

SEQ ID NO: 3584366 - RNA, 16 nt, Human
ugucagaugagaacaa

SEQ ID NO: 3584367 - RNA, 21 nt, Human
ugucagaugagaacaaagcug

SEQ ID NO: 3584368 - RNA, 11 nt, Human
ugucagauucc

SEQ ID NO: 3584369 - RNA, 18 nt, Human
ugucagcaaaaagcaaaa

SEQ ID NO: 3584370 - RNA, 15 nt, Human
ugucagcauagaagu

SEQ ID NO: 3584371 - RNA, 18 nt, Human
ugucagcaucuucucacu

SEQ ID NO: 3584372 - RNA, 20 nt, Human
ugucagccgagccgggccug

SEQ ID NO: 3584373 - RNA, 21 nt, Human
ugucagccgagccgggccugg

SEQ ID NO: 3584374 - RNA, 15 nt, Human
ugucagccgggcccu

SEQ ID NO: 3584375 - RNA, 22 nt, Human
ugucagccgggcccugaguaau

SEQ ID NO: 3584376 - RNA, 21 nt, Human
ugucagcgccuggccuaccca

SEQ ID NO: 3584377 - RNA, 20 nt, Human
ugucagcuaaagaaguuuga

SEQ ID NO: 3584378 - RNA, 20 nt, Human
ugucagcucucaucugaggc

SEQ ID NO: 3584379 - RNA, 19 nt, Human
ugucagcugaaccugggua

SEQ ID NO: 3584380 - RNA, 14 nt, Human
ugucagcugaggcu

SEQ ID NO: 3584381 - RNA, 22 nt, Human
ugucagcugcaagguacucugg

SEQ ID NO: 3584382 - RNA, 16 nt, Human
ugucaggaacagaagg

SEQ ID NO: 3584383 - RNA, 16 nt, Human
ugucaggagugugugu

SEQ ID NO: 3584384 - RNA, 21 nt, Human
ugucaggauugcgagagaugu

SEQ ID NO: 3584385 - RNA, 21 nt, Human
ugucaggccugacggggagga

SEQ ID NO: 3584386 - RNA, 11 nt, Human
ugucaggccuu

SEQ ID NO: 3584387 - RNA, 19 nt, Human
ugucagggcaguacaaugu

SEQ ID NO: 3584388 - RNA, 22 nt, Human
ugucaggggcggggagggugac

SEQ ID NO: 3584389 - RNA, 17 nt, Human
ugucaguacuauucagg

SEQ ID NO: 3584390 - RNA, 23 nt, Human
ugucaguauuucaguguaguuaa

SEQ ID NO: 3584391 - RNA, 15 nt, Human
ugucagucacagcca

SEQ ID NO: 3584392 - RNA, 14 nt, Human
ugucagucacuaaa

SEQ ID NO: 3584393 - RNA, 17 nt, Human
ugucagucugcuuagaa

SEQ ID NO: 3584394 - RNA, 19 nt, Human
ugucagucugcuuagaaau

SEQ ID NO: 3584395 - RNA, 20 nt, Human
ugucagucugcuuagaaaua

SEQ ID NO: 3584396 - RNA, 14 nt, Human
ugucagugcagccc

SEQ ID NO: 3584397 - RNA, 13 nt, Human
ugucagugccgcc

SEQ ID NO: 3584398 - RNA, 18 nt, Human
ugucaguggggcucucug

SEQ ID NO: 3584399 - RNA, 19 nt, Human
ugucaguggggcucucuga

SEQ ID NO: 3584400 - RNA, 15 nt, Human
ugucagugugacuga

SEQ ID NO: 3584401 - RNA, 19 nt, Human
ugucagugugacugaucuc

SEQ ID NO: 3584402 - RNA, 14 nt, Human
ugucaguguuuggu

SEQ ID NO: 3584403 - RNA, 18 nt, Human
ugucauaaacagaugaau

SEQ ID NO: 3584404 - RNA, 22 nt, Human
ugucauaaagugagaaaacugu

SEQ ID NO: 3584405 - RNA, 14 nt, Human
ugucauaagaauga

SEQ ID NO: 3584406 - RNA, 17 nt, Human
ugucauaagaaugaaua

SEQ ID NO: 3584407 - RNA, 16 nt, Human
ugucauagaaauuaca

SEQ ID NO: 3584408 - RNA, 13 nt, Human
ugucauagccagu

SEQ ID NO: 3584409 - RNA, 17 nt, Human
ugucauauacugccaug

SEQ ID NO: 3584410 - RNA, 20 nt, Human
ugucauauauggggggccaa

SEQ ID NO: 3584411 - RNA, 21 nt, Human
ugucauauguaggugucugca

SEQ ID NO: 3584412 - RNA, 15 nt, Human
ugucaucaauugaau

SEQ ID NO: 3584413 - RNA, 13 nt, Human
ugucaucagaacu

SEQ ID NO: 3584414 - RNA, 15 nt, Human
ugucaucagaagaua

SEQ ID NO: 3584415 - RNA, 16 nt, Human
ugucaucagaagauaa

SEQ ID NO: 3584416 - RNA, 19 nt, Human
ugucaucagagcuccucug

SEQ ID NO: 3584417 - RNA, 20 nt, Human
ugucaucagagcuccucugu

SEQ ID NO: 3584418 - RNA, 15 nt, Human
ugucaucagccacca

SEQ ID NO: 3584419 - RNA, 18 nt, Human
ugucaucaucauggccag

SEQ ID NO: 3584420 - RNA, 21 nt, Human
ugucaucaucauggccagcug

SEQ ID NO: 3584421 - RNA, 18 nt, Human
ugucaucauuguauauau

SEQ ID NO: 3584422 - RNA, 22 nt, Human
ugucaucauuguauauaugugu

SEQ ID NO: 3584423 - RNA, 20 nt, Human
ugucauccucaaagaaagug

SEQ ID NO: 3584424 - RNA, 14 nt, Human
ugucauccucacag

SEQ ID NO: 3584425 - RNA, 20 nt, Human
ugucauccuuggucuuugua

SEQ ID NO: 3584426 - RNA, 13 nt, Human
ugucaucucagcu

SEQ ID NO: 3584427 - RNA, 20 nt, Human
ugucaucugaauuugcccug

SEQ ID NO: 3584428 - RNA, 14 nt, Human
ugucaucugagaau

SEQ ID NO: 3584429 - RNA, 16 nt, Human
ugucaucugagaauga

SEQ ID NO: 3584430 - RNA, 12 nt, Human
ugucaugaacau

SEQ ID NO: 3584431 - RNA, 21 nt, Human
ugucaugaauucuuaugcuua

SEQ ID NO: 3584432 - RNA, 17 nt, Human
ugucaugccccccucaa

SEQ ID NO: 3584433 - RNA, 23 nt, Human
ugucaugccccccucaaaccucc

SEQ ID NO: 3584434 - RNA, 13 nt, Human
ugucaugcugccu

SEQ ID NO: 3584435 - RNA, 16 nt, Human
ugucaugcugggauuu

SEQ ID NO: 3584436 - RNA, 17 nt, Human
ugucaugcuucaucauu

SEQ ID NO: 3584437 - RNA, 14 nt, Human
ugucauguguauaa

SEQ ID NO: 3584438 - RNA, 13 nt, Human
ugucauuaaaaua

SEQ ID NO: 3584439 - RNA, 18 nt, Human
ugucauuaaaauaaauaa

SEQ ID NO: 3584440 - RNA, 14 nt, Human
ugucauuaaugugu

SEQ ID NO: 3584441 - RNA, 15 nt, Human
ugucauuaauguguu

SEQ ID NO: 3584442 - RNA, 20 nt, Human
ugucauuagccugaguagaa

SEQ ID NO: 3584443 - RNA, 21 nt, Human
ugucauuagccugaguagaaa

SEQ ID NO: 3584444 - RNA, 22 nt, Human
ugucauucagagucagccagga

SEQ ID NO: 3584445 - RNA, 13 nt, Human
ugucauugcuucu

SEQ ID NO: 3584446 - RNA, 18 nt, Human
ugucauugcuucuucuga

SEQ ID NO: 3584447 - RNA, 23 nt, Human
ugucauuguuauauaaucauuau

SEQ ID NO: 3584448 - RNA, 20 nt, Human
ugucauuuaguucagcaucc

SEQ ID NO: 3584449 - RNA, 16 nt, Human
ugucauuuauauagau

SEQ ID NO: 3584450 - RNA, 18 nt, Human
ugucauuucauguccugu

SEQ ID NO: 3584451 - RNA, 16 nt, Human
ugucauuugagcaggg

SEQ ID NO: 3584452 - RNA, 22 nt, Human
ugucauuugagcagggcucagc

SEQ ID NO: 3584453 - RNA, 19 nt, Human
ugucauuuucauuagcaaa

SEQ ID NO: 3584454 - RNA, 17 nt, Human
ugucauuuugaagcuaa

SEQ ID NO: 3584455 - RNA, 18 nt, Human
ugucauuuugaagcuaau

SEQ ID NO: 3584456 - RNA, 22 nt, Human
ugucauuuugaagcuaauuauu

SEQ ID NO: 3584457 - RNA, 18 nt, Human
ugucauuuuugcaguaga

SEQ ID NO: 3584458 - RNA, 16 nt, Human
uguccaaaaccgccag

SEQ ID NO: 3584459 - RNA, 18 nt, Human
uguccaaaaccgccagcu

SEQ ID NO: 3584460 - RNA, 23 nt, Human
uguccaaaaccgccagcucuguu

SEQ ID NO: 3584461 - RNA, 16 nt, Human
uguccaaaacugccuc

SEQ ID NO: 3584462 - RNA, 21 nt, Human
uguccaaacguccucuuuagu

SEQ ID NO: 3584463 - RNA, 22 nt, Human
uguccaaacugccuaagcccuc

SEQ ID NO: 3584464 - RNA, 21 nt, Human
uguccaaagaggcugccccuc

SEQ ID NO: 3584465 - RNA, 12 nt, Human
uguccaaagcag

SEQ ID NO: 3584466 - RNA, 19 nt, Human
uguccaaagcagggucugg

SEQ ID NO: 3584467 - RNA, 14 nt, Human
uguccaagaagccc

SEQ ID NO: 3584468 - RNA, 17 nt, Human
uguccaagugugugugc

SEQ ID NO: 3584469 - RNA, 18 nt, Human
uguccaagugugugugcg

SEQ ID NO: 3584470 - RNA, 14 nt, Human
uguccaauccuaug

SEQ ID NO: 3584471 - RNA, 18 nt, Human
uguccacaggcuucugag

SEQ ID NO: 3584472 - RNA, 17 nt, Human
uguccacccccgccucc

SEQ ID NO: 3584473 - RNA, 12 nt, Human
uguccaccuggc

SEQ ID NO: 3584474 - RNA, 13 nt, Human
uguccaccuggcc

SEQ ID NO: 3584475 - RNA, 15 nt, Human
uguccaccugugggu

SEQ ID NO: 3584476 - RNA, 18 nt, Human
uguccacgacugucucca

SEQ ID NO: 3584477 - RNA, 15 nt, Human
uguccagaagaauau

SEQ ID NO: 3584478 - RNA, 21 nt, Human
uguccagacagagcccuguga

SEQ ID NO: 3584479 - RNA, 13 nt, Human
uguccagagacaa

SEQ ID NO: 3584480 - RNA, 22 nt, Human
uguccagcaccuugugccuggg

SEQ ID NO: 3584481 - RNA, 15 nt, Human
uguccagcagucacu

SEQ ID NO: 3584482 - RNA, 22 nt, Human
uguccagccugggcagccaggc

SEQ ID NO: 3584483 - RNA, 23 nt, Human
uguccagccugggcagccaggcu

SEQ ID NO: 3584484 - RNA, 14 nt, Human
uguccagcgccuag

SEQ ID NO: 3584485 - RNA, 11 nt, Human
uguccagcucc

SEQ ID NO: 3584486 - RNA, 21 nt, Human
uguccaggcacugcugcccag

SEQ ID NO: 3584487 - RNA, 22 nt, Human
uguccaguaagaucacuguuua

SEQ ID NO: 3584488 - RNA, 15 nt, Human
uguccagugcccauu

SEQ ID NO: 3584489 - RNA, 19 nt, Human
ugucuggacauucagaaca

SEQ ID NO: 3584490 - RNA, 11 nt, Human
ugucuggagac

SEQ ID NO: 3584491 - RNA, 20 nt, Human
ugucuggagaccaccagggc

SEQ ID NO: 3584492 - RNA, 17 nt, Human
ugucuggcacagccugg

SEQ ID NO: 3584493 - RNA, 16 nt, Human
ugucuggcugcagagc

SEQ ID NO: 3584494 - RNA, 11 nt, Human
ugucugggcug

SEQ ID NO: 3584495 - RNA, 21 nt, Human
ugucugggugcuacuggggaa

SEQ ID NO: 3584496 - RNA, 16 nt, Human
ugucugguggccccgu

SEQ ID NO: 3584497 - RNA, 23 nt, Human
ugucugguucucaauuccaacag

SEQ ID NO: 3584498 - RNA, 15 nt, Human
ugucugguuuuaaca

SEQ ID NO: 3584499 - RNA, 18 nt, Human
ugucuguaaaagagccua

SEQ ID NO: 3584500 - RNA, 18 nt, Human
ugucuguaaaucuaacau

SEQ ID NO: 3584501 - RNA, 16 nt, Human
ugucuguagagggccc

SEQ ID NO: 3584502 - RNA, 20 nt, Human
ugucuguagagggcccuggu

SEQ ID NO: 3584503 - RNA, 23 nt, Human
ugucuguagcuccucaacucacc

SEQ ID NO: 3584504 - RNA, 16 nt, Human
ugucugucccgggguc

SEQ ID NO: 3584505 - RNA, 16 nt, Human
ugucugucugucuguc

SEQ ID NO: 3584506 - RNA, 12 nt, Human
ugucugucuucc

SEQ ID NO: 3584507 - RNA, 20 nt, Human
ugucugugacuuuugugaaa

SEQ ID NO: 3584508 - RNA, 21 nt, Human
ugucugugcuagggaaacuuc

SEQ ID NO: 3584509 - RNA, 21 nt, Human
ugucuguucuacauagaugcu

SEQ ID NO: 3584510 - RNA, 19 nt, Human
ugucuguuuguuucaagaa

SEQ ID NO: 3584511 - RNA, 21 nt, Human
ugucuuaaaaccugcuuuuca

SEQ ID NO: 3584512 - RNA, 18 nt, Human
ugucuuaauggaugaaau

SEQ ID NO: 3584513 - RNA, 19 nt, Human
ugucuuaauggaugaaauc

SEQ ID NO: 3584514 - RNA, 14 nt, Human
ugucuuaauuaaaa

SEQ ID NO: 3584515 - RNA, 20 nt, Human
ugucuuaauuaaguaaacua

SEQ ID NO: 3584516 - RNA, 14 nt, Human
ugucuuaauuauua

SEQ ID NO: 3584517 - RNA, 22 nt, Human
ugucuuauauauauuucuuugu

SEQ ID NO: 3584518 - RNA, 16 nt, Human
ugucuuaucuggcccu

SEQ ID NO: 3584519 - RNA, 19 nt, Human
ugucuuauugacaguugug

SEQ ID NO: 3584520 - RNA, 14 nt, Human
ugucuuauuuuuag

SEQ ID NO: 3584521 - RNA, 15 nt, Human
ugucuuauuuuuaga

SEQ ID NO: 3584522 - RNA, 16 nt, Human
ugucuuauuuuuagau

SEQ ID NO: 3584523 - RNA, 23 nt, Human
ugucuuauuuuuagaugguuaca

SEQ ID NO: 3584524 - RNA, 17 nt, Human
ugucuucaacagcuccc

SEQ ID NO: 3584525 - RNA, 13 nt, Human
ugucuucaaggcu

SEQ ID NO: 3584526 - RNA, 19 nt, Human
ugucuucacagcucugugu

SEQ ID NO: 3584527 - RNA, 15 nt, Human
ugucuucauagcaga

SEQ ID NO: 3584528 - RNA, 17 nt, Human
ugucuucauuucauugu

SEQ ID NO: 3584529 - RNA, 14 nt, Human
ugucuuccauaaug

SEQ ID NO: 3584530 - RNA, 16 nt, Human
ugucuuccauaaugua

SEQ ID NO: 3584531 - RNA, 14 nt, Human
ugucuucccagggu

SEQ ID NO: 3584532 - RNA, 11 nt, Human
ugucuuccuca

SEQ ID NO: 3584533 - RNA, 13 nt, Human
ugucuuccugcau

SEQ ID NO: 3584534 - RNA, 18 nt, Human
ugucuuccugcauucacc

SEQ ID NO: 3584535 - RNA, 14 nt, Human
ugucuuccuguggg

SEQ ID NO: 3584536 - RNA, 19 nt, Human
ugucuucggaaaccuuggu

SEQ ID NO: 3584537 - RNA, 22 nt, Human
ugucuucucaggcucugcccug

SEQ ID NO: 3584538 - RNA, 17 nt, Human
ugucuucucccugcaca

SEQ ID NO: 3584539 - RNA, 14 nt, Human
ugucuucucugucu

SEQ ID NO: 3584540 - RNA, 16 nt, Human
ugucuucucugucuca

SEQ ID NO: 3584541 - RNA, 22 nt, Human
ugucuucucugucucagacuuu

SEQ ID NO: 3584542 - RNA, 13 nt, Human
ugucuucugcuuu

SEQ ID NO: 3584543 - RNA, 15 nt, Human
ugucuucugcuuugu

SEQ ID NO: 3584544 - RNA, 13 nt, Human
ugucuucuguaua

SEQ ID NO: 3584545 - RNA, 19 nt, Human
ugucuugagcucuauuaug

SEQ ID NO: 3584546 - RNA, 20 nt, Human
ugucuugcaauggcagccuu

SEQ ID NO: 3584547 - RNA, 19 nt, Human
ugucuugcacuggccuucu

SEQ ID NO: 3584548 - RNA, 22 nt, Human
ugucuugcacuggccuucugau

SEQ ID NO: 3584549 - RNA, 15 nt, Human
ugucuuggacacugu

SEQ ID NO: 3584550 - RNA, 19 nt, Human
ugucuuggcuuucauguua

SEQ ID NO: 3584551 - RNA, 17 nt, Human
ugucuugguacuugcug

SEQ ID NO: 3584552 - RNA, 15 nt, Human
ugucuuguaagcaaa

SEQ ID NO: 3584553 - RNA, 18 nt, Human
ugucuuguaauauuuugu

SEQ ID NO: 3584554 - RNA, 13 nt, Human
ugucuuguacaug

SEQ ID NO: 3584555 - RNA, 15 nt, Human
ugucuuguguuucuu

SEQ ID NO: 3584556 - RNA, 19 nt, Human
ugucuuguuaauauucuuu

SEQ ID NO: 3584557 - RNA, 22 nt, Human
ugucuuuaaaaacuguuuuaga

SEQ ID NO: 3584558 - RNA, 22 nt, Human
ugucuuuaaaaguauccagaga

SEQ ID NO: 3584559 - RNA, 14 nt, Human
ugucuuuaaugcaa

SEQ ID NO: 3584560 - RNA, 15 nt, Human
ugucuuuaauucugu

SEQ ID NO: 3584561 - RNA, 17 nt, Human
ugucuuuagauagcccu

SEQ ID NO: 3584562 - RNA, 18 nt, Human
ugucuuuagauagcccug

SEQ ID NO: 3584563 - RNA, 21 nt, Human
ugucuuuaggcagcagcuuuu

SEQ ID NO: 3584564 - RNA, 19 nt, Human
ugucuuucagauacauggu

SEQ ID NO: 3584565 - RNA, 13 nt, Human
ugucuuuccuaga

SEQ ID NO: 3584566 - RNA, 17 nt, Human
ugucuuucuaagaaauc

SEQ ID NO: 3584567 - RNA, 19 nt, Human
ugucuuucuccaaaguuau

SEQ ID NO: 3584568 - RNA, 14 nt, Human
ugucuuucuuuggu

SEQ ID NO: 3584569 - RNA, 20 nt, Human
ugucuuucuuuggugccuuu

SEQ ID NO: 3584570 - RNA, 21 nt, Human
ugucuuuggaaaaauguuugu

SEQ ID NO: 3584571 - RNA, 17 nt, Human
ugucuuuggacccugag

SEQ ID NO: 3584572 - RNA, 22 nt, Human
ugucuuuuauaguggaaaaaca

SEQ ID NO: 3584573 - RNA, 15 nt, Human
ugucuuuuauauuug

SEQ ID NO: 3584574 - RNA, 17 nt, Human
ugucuuuuaugcagaua

SEQ ID NO: 3584575 - RNA, 19 nt, Human
ugucuuuuaugcagauaga

SEQ ID NO: 3584576 - RNA, 20 nt, Human
ugucuuuuaugcagauagaa

SEQ ID NO: 3584577 - RNA, 20 nt, Human
ugucuuuucccauuuaucua

SEQ ID NO: 3584578 - RNA, 23 nt, Human
ugucuuuucuugcaugaggcuag

SEQ ID NO: 3584579 - RNA, 15 nt, Human
ugucuuuucuuggca

SEQ ID NO: 3584580 - RNA, 13 nt, Human
ugucuuuuggagg

SEQ ID NO: 3584581 - RNA, 21 nt, Human
ugucuuuuuauuaaaauauuu

SEQ ID NO: 3584582 - RNA, 17 nt, Human
ugucuuuuucuggacug

SEQ ID NO: 3584583 - RNA, 20 nt, Human
ugucuuuuucuggacugaag

SEQ ID NO: 3584584 - RNA, 22 nt, Human
ugucuuuuuuuguauaguuaac

SEQ ID NO: 3584585 - RNA, 21 nt, Human
ugucuuuuuuuuaaugugcug

SEQ ID NO: 3584586 - RNA, 13 nt, Human
ugugaaaagaaaa

SEQ ID NO: 3584587 - RNA, 17 nt, Human
ugugaaaagaaaaauga

SEQ ID NO: 3584588 - RNA, 21 nt, Human
ugugaaaagaaaaaugagccu

SEQ ID NO: 3584589 - RNA, 22 nt, Human
ugugaaaaugguccaggagaag

SEQ ID NO: 3584590 - RNA, 15 nt, Human
ugugaaacacagcug

SEQ ID NO: 3584591 - RNA, 17 nt, Human
ugugaaacacagcuguu

SEQ ID NO: 3584592 - RNA, 13 nt, Human
ugugaaacauguu

SEQ ID NO: 3584593 - RNA, 14 nt, Human
ugugaaaccuguga

SEQ ID NO: 3584594 - RNA, 15 nt, Human
ugugaaacuuucauu

SEQ ID NO: 3584595 - RNA, 13 nt, Human
ugugaaaggaaag

SEQ ID NO: 3584596 - RNA, 14 nt, Human
ugugaaaggaaaga

SEQ ID NO: 3584597 - RNA, 18 nt, Human
ugugaaaggaaagaggcu

SEQ ID NO: 3584598 - RNA, 21 nt, Human
ugugaaauaaaacuggcuuug

SEQ ID NO: 3584599 - RNA, 14 nt, Human
ugugaaauguaacu

SEQ ID NO: 3584600 - RNA, 17 nt, Human
ugugaaauuuuucauau

SEQ ID NO: 3584601 - RNA, 15 nt, Human
ugugaacagagagac

SEQ ID NO: 3584602 - RNA, 23 nt, Human
ugugaacagagagacccuugugg

SEQ ID NO: 3584603 - RNA, 15 nt, Human
ugugaacagcggcug

SEQ ID NO: 3584604 - RNA, 20 nt, Human
ugugaacaguuguguuugaa

SEQ ID NO: 3584605 - RNA, 16 nt, Human
ugugaaccaccacacc

SEQ ID NO: 3584606 - RNA, 17 nt, Human
ugugaaccaccacaccc

SEQ ID NO: 3584607 - RNA, 19 nt, Human
ugugaaccaccacacccag

SEQ ID NO: 3584608 - RNA, 21 nt, Human
ugugaaccaccacacccagcc

SEQ ID NO: 3584609 - RNA, 22 nt, Human
ugugaaccaccacacccagccc

SEQ ID NO: 3584610 - RNA, 15 nt, Human
ugugaacccaggaca

SEQ ID NO: 3584611 - RNA, 21 nt, Human
ugugaaccccacgaaggagcc

SEQ ID NO: 3584612 - RNA, 17 nt, Human
ugugaaccgaggggcuc

SEQ ID NO: 3584613 - RNA, 20 nt, Human
ugugaacuaaacuuucacac

SEQ ID NO: 3584614 - RNA, 14 nt, Human
ugugaacuauguuu

SEQ ID NO: 3584615 - RNA, 15 nt, Human
ugugaacucagccaa

SEQ ID NO: 3584616 - RNA, 16 nt, Human
ugugaacucagccaag

SEQ ID NO: 3584617 - RNA, 18 nt, Human
ugugaacucagccaagca

SEQ ID NO: 3584618 - RNA, 20 nt, Human
ugugaacucagccaagcaca

SEQ ID NO: 3584619 - RNA, 14 nt, Human
ugugaacugaaauu

SEQ ID NO: 3584620 - RNA, 23 nt, Human
ugugaacugaacucugacaacag

SEQ ID NO: 3584621 - RNA, 21 nt, Human
ugugaacuggacccuguugcu

SEQ ID NO: 3584622 - RNA, 14 nt, Human
ugugaacuugaaau

SEQ ID NO: 3584623 - RNA, 16 nt, Human
ugugaacuugaaauuu

SEQ ID NO: 3584624 - RNA, 15 nt, Human
ugugaacuuggaagc

SEQ ID NO: 3584625 - RNA, 20 nt, Human
ugugaacuuguagcuguaaa

SEQ ID NO: 3584626 - RNA, 22 nt, Human
ugugaagaucacguuccuuccc

SEQ ID NO: 3584627 - RNA, 16 nt, Human
ugugaagauguuugca

SEQ ID NO: 3584628 - RNA, 20 nt, Human
ugugaagccaauucagacag

SEQ ID NO: 3584629 - RNA, 21 nt, Human
ugugaagccaauucagacagg

SEQ ID NO: 3584630 - RNA, 23 nt, Human
ugugaagccaugaguuccagaaa

SEQ ID NO: 3584631 - RNA, 17 nt, Human
ugugaagcccuguugug

SEQ ID NO: 3584632 - RNA, 12 nt, Human
ugugaagccuuc

SEQ ID NO: 3584633 - RNA, 16 nt, Human
uuccgugcguggcacu

SEQ ID NO: 3584634 - RNA, 17 nt, Human
uuccguguccaccccca

SEQ ID NO: 3584635 - RNA, 22 nt, Human
uuccguuugauuugucacugcu

SEQ ID NO: 3584636 - RNA, 21 nt, Human
uuccuaaauauauuuuaagac

SEQ ID NO: 3584637 - RNA, 16 nt, Human
uuccuaaauauuauga

SEQ ID NO: 3584638 - RNA, 16 nt, Human
uuccuaaaugcaguga

SEQ ID NO: 3584639 - RNA, 18 nt, Human
uuccuaacacagcaugug

SEQ ID NO: 3584640 - RNA, 19 nt, Human
uuccuaacacagcaugugu

SEQ ID NO: 3584641 - RNA, 18 nt, Human
uuccuaagaagcuucuaa

SEQ ID NO: 3584642 - RNA, 19 nt, Human
uuccuaagccuguggcugu

SEQ ID NO: 3584643 - RNA, 17 nt, Human
uuccuaaguucuuagau

SEQ ID NO: 3584644 - RNA, 16 nt, Human
uuccuaauaucaaaug

SEQ ID NO: 3584645 - RNA, 20 nt, Human
uuccuaaucacucagagcag

SEQ ID NO: 3584646 - RNA, 20 nt, Human
uuccuaaucagaaauuuuua

SEQ ID NO: 3584647 - RNA, 14 nt, Human
uuccuaauuuuagu

SEQ ID NO: 3584648 - RNA, 23 nt, Human
uuccuaauuuuagugacagcucu

SEQ ID NO: 3584649 - RNA, 17 nt, Human
uuccuacagauagucaa

SEQ ID NO: 3584650 - RNA, 17 nt, Human
uuccuacaggcagucuc

SEQ ID NO: 3584651 - RNA, 20 nt, Human
uuccuacaggcagucucucu

SEQ ID NO: 3584652 - RNA, 21 nt, Human
uuccuaccacccgguccccac

SEQ ID NO: 3584653 - RNA, 23 nt, Human
uuccuacccacuuaggcuuugua

SEQ ID NO: 3584654 - RNA, 15 nt, Human
uuccuacccugccuc

SEQ ID NO: 3584655 - RNA, 23 nt, Human
uuccuacguaggaugaaaagauu

SEQ ID NO: 3584656 - RNA, 17 nt, Human
uuccuacucuucucucu

SEQ ID NO: 3584657 - RNA, 18 nt, Human
uuccuacucuucucucug

SEQ ID NO: 3584658 - RNA, 19 nt, Human
uuccuacucuucucucugc

SEQ ID NO: 3584659 - RNA, 19 nt, Human
uuccuacuuuuccuucccu

SEQ ID NO: 3584660 - RNA, 22 nt, Human
uuccuagaaguuacugaaugca

SEQ ID NO: 3584661 - RNA, 19 nt, Human
uuccuagagaagacaggcu

SEQ ID NO: 3584662 - RNA, 17 nt, Human
uuccuagauaaaaagau

SEQ ID NO: 3584663 - RNA, 21 nt, Human
uuccuagccaccgccuccuac

SEQ ID NO: 3584664 - RNA, 14 nt, Human
uuccuagcccucuc

SEQ ID NO: 3584665 - RNA, 13 nt, Human
uuccuagccuguu

SEQ ID NO: 3584666 - RNA, 22 nt, Human
uuccuagcuggagaggagcccu

SEQ ID NO: 3584667 - RNA, 16 nt, Human
uuccuaguucuguaga

SEQ ID NO: 3584668 - RNA, 17 nt, Human
uuccuaguucuguagaa

SEQ ID NO: 3584669 - RNA, 19 nt, Human
uuccuauaacuugaugcau

SEQ ID NO: 3584670 - RNA, 21 nt, Human
uuccuauaacuugaugcaugu

SEQ ID NO: 3584671 - RNA, 20 nt, Human
uuccuauaauauaauaaaua

SEQ ID NO: 3584672 - RNA, 19 nt, Human
uuccuauacgcagcgugcu

SEQ ID NO: 3584673 - RNA, 16 nt, Human
uuccuaucccauccca

SEQ ID NO: 3584674 - RNA, 17 nt, Human
uuccuaucccaucccau

SEQ ID NO: 3584675 - RNA, 21 nt, Human
uuccuaugauguauacugcca

SEQ ID NO: 3584676 - RNA, 14 nt, Human
uuccuaugcuuuga

SEQ ID NO: 3584677 - RNA, 20 nt, Human
uuccuauugugauuugacug

SEQ ID NO: 3584678 - RNA, 21 nt, Human
uuccuauugugauuugacugu

SEQ ID NO: 3584679 - RNA, 22 nt, Human
uuccuauugugauuugacuguu

SEQ ID NO: 3584680 - RNA, 22 nt, Human
uuccuauuucaguguuaccugu

SEQ ID NO: 3584681 - RNA, 20 nt, Human
uuccuauuugccaugggcuu

SEQ ID NO: 3584682 - RNA, 22 nt, Human
uuccuauuuuuaaauaauuucc

SEQ ID NO: 3584683 - RNA, 18 nt, Human
uuccucaaagcuuggauu

SEQ ID NO: 3584684 - RNA, 15 nt, Human
uuccucaaauguuga

SEQ ID NO: 3584685 - RNA, 20 nt, Human
uuccucaaauuuuuugacuu

SEQ ID NO: 3584686 - RNA, 21 nt, Human
uuccucacaccaggcuugccu

SEQ ID NO: 3584687 - RNA, 14 nt, Human
uuccucagccagcc

SEQ ID NO: 3584688 - RNA, 16 nt, Human
uuccucagccagccuc

SEQ ID NO: 3584689 - RNA, 19 nt, Human
uuccucagcuuaucucuuu

SEQ ID NO: 3584690 - RNA, 23 nt, Human
uuccucauaguaugguggcuggg

SEQ ID NO: 3584691 - RNA, 16 nt, Human
uuccucauccucagau

SEQ ID NO: 3584692 - RNA, 19 nt, Human
uuccucauccucagaugcu

SEQ ID NO: 3584693 - RNA, 15 nt, Human
uuccucaucugucca

SEQ ID NO: 3584694 - RNA, 14 nt, Human
uuccucaugaaugu

SEQ ID NO: 3584695 - RNA, 17 nt, Human
uuccucaugaauguaaa

SEQ ID NO: 3584696 - RNA, 22 nt, Human
uuccucaugaauguaaauuugu

SEQ ID NO: 3584697 - RNA, 15 nt, Human
uuccuccacauccuu

SEQ ID NO: 3584698 - RNA, 17 nt, Human
uuccuccacauccuuuc

SEQ ID NO: 3584699 - RNA, 13 nt, Human
uuccuccauccua

SEQ ID NO: 3584700 - RNA, 14 nt, Human
uuccuccauccucc

SEQ ID NO: 3584701 - RNA, 22 nt, Human
uuccuccauccuccuccuuccu

SEQ ID NO: 3584702 - RNA, 20 nt, Human
uuccucccaaguggugccua

SEQ ID NO: 3584703 - RNA, 14 nt, Human
uuccuccccagcag

SEQ ID NO: 3584704 - RNA, 23 nt, Human
uuccuccccauuagagucagccu

SEQ ID NO: 3584705 - RNA, 14 nt, Human
uuccucccuucugc

SEQ ID NO: 3584706 - RNA, 15 nt, Human
uuccucccuucugcu

SEQ ID NO: 3584707 - RNA, 16 nt, Human
uuccucccuucugcua

SEQ ID NO: 3584708 - RNA, 18 nt, Human
uuccucccuucugcuacu

SEQ ID NO: 3584709 - RNA, 13 nt, Human
uuccuccucaggc

SEQ ID NO: 3584710 - RNA, 20 nt, Human
uuccuccucaggcacacagc

SEQ ID NO: 3584711 - RNA, 15 nt, Human
uuccuccuccaccac

SEQ ID NO: 3584712 - RNA, 19 nt, Human
uuccuccuccaccaccgcc

SEQ ID NO: 3584713 - RNA, 19 nt, Human
uuccuccugacaccccacu

SEQ ID NO: 3584714 - RNA, 11 nt, Human
uuccuccugga

SEQ ID NO: 3584715 - RNA, 13 nt, Human
uuccuccuggaaa

SEQ ID NO: 3584716 - RNA, 14 nt, Human
uuccuccuggcaga

SEQ ID NO: 3584717 - RNA, 15 nt, Human
uuccuccugggcccu

SEQ ID NO: 3584718 - RNA, 23 nt, Human
uuccuccugggcccucucugcuc

SEQ ID NO: 3584719 - RNA, 14 nt, Human
uuccuccuuuauca

SEQ ID NO: 3584720 - RNA, 18 nt, Human
uuccucgcagagaggcca

SEQ ID NO: 3584721 - RNA, 23 nt, Human
uuccucuagugcccuccacagcc

SEQ ID NO: 3584722 - RNA, 17 nt, Human
uuccucucacuaaacuu

SEQ ID NO: 3584723 - RNA, 19 nt, Human
uuccucucacuaaacuuua

SEQ ID NO: 3584724 - RNA, 23 nt, Human
uuccucucauccuuuucuccuau

SEQ ID NO: 3584725 - RNA, 12 nt, Human
uuccucuccacu

SEQ ID NO: 3584726 - RNA, 15 nt, Human
uuccucuccacugcc

SEQ ID NO: 3584727 - RNA, 22 nt, Human
uuccucuccuucguaucccgag

SEQ ID NO: 3584728 - RNA, 16 nt, Human
uuccucucuauauuuc

SEQ ID NO: 3584729 - RNA, 21 nt, Human
uuccucucuuuguucucagcu

SEQ ID NO: 3584730 - RNA, 22 nt, Human
uuccucucuuuguucucagcuc

SEQ ID NO: 3584731 - RNA, 19 nt, Human
uuccucugcagcugaccuc

SEQ ID NO: 3584732 - RNA, 16 nt, Human
uuccucugcuaaauug

SEQ ID NO: 3584733 - RNA, 14 nt, Human
uuccucugcucacc

SEQ ID NO: 3584734 - RNA, 12 nt, Human
uuccucugcucc

SEQ ID NO: 3584735 - RNA, 21 nt, Human
uuccucugcucccccuuuucc

SEQ ID NO: 3584736 - RNA, 18 nt, Human
uuccucugucuccuaagc

SEQ ID NO: 3584737 - RNA, 21 nt, Human
uuccucuuagaagaauauugu

SEQ ID NO: 3584738 - RNA, 13 nt, Human
uuccucuucccca

SEQ ID NO: 3584739 - RNA, 19 nt, Human
uuccucuuccccuugcccu

SEQ ID NO: 3584740 - RNA, 20 nt, Human
uuccucuucuauuuuguaaa

SEQ ID NO: 3584741 - RNA, 17 nt, Human
uuccucuugacccugca

SEQ ID NO: 3584742 - RNA, 22 nt, Human
uuccucuuuccaucuacccucc

SEQ ID NO: 3584743 - RNA, 14 nt, Human
uuccucuuugcuuu

SEQ ID NO: 3584744 - RNA, 16 nt, Human
uuccucuuugcuuugc

SEQ ID NO: 3584745 - RNA, 16 nt, Human
uuccucuuuucucugc

SEQ ID NO: 3584746 - RNA, 21 nt, Human
uuccucuuuugugcugcuucu

SEQ ID NO: 3584747 - RNA, 22 nt, Human
uuccucuuuuuauuuaguuccu

SEQ ID NO: 3584748 - RNA, 18 nt, Human
uuccugaaacaacuugga

SEQ ID NO: 3584749 - RNA, 17 nt, Human
uuccugaaagaaacagu

SEQ ID NO: 3584750 - RNA, 15 nt, Human
uuccugaaaugcagu

SEQ ID NO: 3584751 - RNA, 12 nt, Human
uuccugaacagg

SEQ ID NO: 3584752 - RNA, 14 nt, Human
uuccugaaccaugu

SEQ ID NO: 3584753 - RNA, 15 nt, Human
uuccugaaccugaug

SEQ ID NO: 3584754 - RNA, 16 nt, Human
uuccugaagaaccagu

SEQ ID NO: 3584755 - RNA, 18 nt, Human
uuccugaagaauugaaaa

SEQ ID NO: 3584756 - RNA, 14 nt, Human
uuccugaagcugag

SEQ ID NO: 3584757 - RNA, 20 nt, Human
uuccugaauucuauuugcug

SEQ ID NO: 3584758 - RNA, 23 nt, Human
uuccugacccaggccgcagcucu

SEQ ID NO: 3584759 - RNA, 20 nt, Human
uuccugaccuccgccaucca

SEQ ID NO: 3584760 - RNA, 17 nt, Human
uuccugagacaaauuuu

SEQ ID NO: 3584761 - RNA, 16 nt, Human
uuccugagauuuccuc

SEQ ID NO: 3584762 - RNA, 22 nt, Human
uuccugaguuaggcuuucucuu

SEQ ID NO: 3584763 - RNA, 15 nt, Human
uuccugaugacccag

SEQ ID NO: 3584764 - RNA, 16 nt, Human
uuccugaugacccagg

SEQ ID NO: 3584765 - RNA, 18 nt, Human
uuccugaugacccaggcu

SEQ ID NO: 3584766 - RNA, 19 nt, Human
uuccugcaacucaaggacu

SEQ ID NO: 3584767 - RNA, 13 nt, Human
uuccugcaaugaa

SEQ ID NO: 3584768 - RNA, 21 nt, Human
uuccugcaaugaagucucuga

SEQ ID NO: 3584769 - RNA, 17 nt, Human
uuccugcaauuuucuaa

SEQ ID NO: 3584770 - RNA, 21 nt, Human
uuccugcaggccaggccagcu

SEQ ID NO: 3584771 - RNA, 17 nt, Human
uuccugccaggcauggu

SEQ ID NO: 3584772 - RNA, 23 nt, Human
uuccugccccaacuccuuccagc

SEQ ID NO: 3584773 - RNA, 17 nt, Human
uuccugccccucuuucu

SEQ ID NO: 3584774 - RNA, 20 nt, Human
uuccugccccucuuucucuu

SEQ ID NO: 3584775 - RNA, 21 nt, Human
uuccugccccucuuucucuuu

SEQ ID NO: 3584776 - RNA, 22 nt, Human
uuccugccccucuuucucuuuc

SEQ ID NO: 3584777 - RNA, 11 nt, Human
uuccugcccug

SEQ ID NO: 3584778 - RNA, 22 nt, Human
uuccugcccugggaggcaguga

SEQ ID NO: 3584779 - RNA, 17 nt, Human
uuccugcccuuccucag

SEQ ID NO: 3584780 - RNA, 18 nt, Human
uuccugccugucuccuuu

SEQ ID NO: 3584781 - RNA, 21 nt, Human
uuccugccuuggccucccaag

SEQ ID NO: 3584782 - RNA, 15 nt, Human
uuccugcguccuccu

SEQ ID NO: 3584783 - RNA, 11 nt, Human
uuccugcugcu

SEQ ID NO: 3584784 - RNA, 12 nt, Human
uuccugcugcug

SEQ ID NO: 3584785 - RNA, 17 nt, Human
uuccugcugcugucugg

SEQ ID NO: 3584786 - RNA, 16 nt, Human
uuccugcuuccucaga

SEQ ID NO: 3584787 - RNA, 22 nt, Human
uuccuggaauugccagcugaca

SEQ ID NO: 3584788 - RNA, 15 nt, Human
uuccuggacacucag

SEQ ID NO: 3584789 - RNA, 19 nt, Human
uuccuggacacucagaccu

SEQ ID NO: 3584790 - RNA, 17 nt, Human
uuccuggacagcugugc

SEQ ID NO: 3584791 - RNA, 19 nt, Human
uuccuggacagcugugccu

SEQ ID NO: 3584792 - RNA, 21 nt, Human
uuccuggacagcugugccucg

SEQ ID NO: 3584793 - RNA, 18 nt, Human
uuccuggacaggccaggu

SEQ ID NO: 3584794 - RNA, 24 nt, Human
uuccuggacauccucuucugcuua

SEQ ID NO: 3584795 - RNA, 19 nt, Human
uuccuggaggucagcauuu

SEQ ID NO: 3584796 - RNA, 15 nt, Human
uuccuggcaauagug

SEQ ID NO: 3584797 - RNA, 22 nt, Human
uuccuggcaauaguguguucug

SEQ ID NO: 3584798 - RNA, 19 nt, Human
uuccuggcacugcuuccag

SEQ ID NO: 3584799 - RNA, 21 nt, Human
uuccuggcacuggaccccagc

SEQ ID NO: 3584800 - RNA, 16 nt, Human
uuccugggaacaucac

SEQ ID NO: 3584801 - RNA, 19 nt, Human
uuccugggcacacgcugcu

SEQ ID NO: 3584802 - RNA, 22 nt, Human
uuccugggcacacgcugcucug

SEQ ID NO: 3584803 - RNA, 19 nt, Human
uuccuggggcauccauggg

SEQ ID NO: 3584804 - RNA, 16 nt, Human
uuccuggguggcuacu

SEQ ID NO: 3584805 - RNA, 22 nt, Human
uuccuggguggcuacucugugc

SEQ ID NO: 3584806 - RNA, 15 nt, Human
uuccugguacccagc

SEQ ID NO: 3584807 - RNA, 17 nt, Human
uuccugguacccagcca

SEQ ID NO: 3584808 - RNA, 14 nt, Human
uuccuggucuguag

SEQ ID NO: 3584809 - RNA, 15 nt, Human
uuccuggugcuggag

SEQ ID NO: 3584810 - RNA, 12 nt, Human
uuccuguacugu

SEQ ID NO: 3584811 - RNA, 22 nt, Human
uuccuguauuuguucccaagag

SEQ ID NO: 3584812 - RNA, 15 nt, Human
uuccugucccugcgc

SEQ ID NO: 3584813 - RNA, 21 nt, Human
uuccugucccugcgccuuucc

SEQ ID NO: 3584814 - RNA, 22 nt, Human
uuccugucccugcgccuuuccu

SEQ ID NO: 3584815 - RNA, 14 nt, Human
uuccuguccuccca

SEQ ID NO: 3584816 - RNA, 20 nt, Human
uuccuguccucuuucagcuc

SEQ ID NO: 3584817 - RNA, 24 nt, Human
uuccuguccuucucucaccuccua

SEQ ID NO: 3584818 - RNA, 14 nt, Human
uuccugucuuccug

SEQ ID NO: 3584819 - RNA, 17 nt, Human
uuccugugauccaccca

SEQ ID NO: 3584820 - RNA, 22 nt, Human
uuccugugauccacccaacccu

SEQ ID NO: 3584821 - RNA, 14 nt, Human
uuccugugcacagc

SEQ ID NO: 3584822 - RNA, 13 nt, Human
uuccuguggcucc

SEQ ID NO: 3584823 - RNA, 13 nt, Human
uuccugugucaau

SEQ ID NO: 3584824 - RNA, 21 nt, Human
uuccuguguguccaaaacugc

SEQ ID NO: 3584825 - RNA, 14 nt, Human
uuccuguucagcau

SEQ ID NO: 3584826 - RNA, 15 nt, Human
uuccuguucagcauu

SEQ ID NO: 3584827 - RNA, 13 nt, Human
uuccuguucugaa

SEQ ID NO: 3584828 - RNA, 22 nt, Human
uuccuguuguuauggaaacugu

SEQ ID NO: 3584829 - RNA, 15 nt, Human
uuccuguuucugaaa

SEQ ID NO: 3584830 - RNA, 22 nt, Human
uuccuguuuuguacauagauuu

SEQ ID NO: 3584831 - RNA, 23 nt, Human
uuccuguuuuucacauuuuccuu

SEQ ID NO: 3584832 - RNA, 15 nt, Human
uuccuuacccaaacu

SEQ ID NO: 3584833 - RNA, 21 nt, Human
uuccuuauuuuaagcauugug

SEQ ID NO: 3584834 - RNA, 20 nt, Human
uuccuucaaagcaaaugucu

SEQ ID NO: 3584835 - RNA, 15 nt, Human
uuccuucagauauuu

SEQ ID NO: 3584836 - RNA, 15 nt, Human
uuccuucagcuucca

SEQ ID NO: 3584837 - RNA, 15 nt, Human
uuccuucagggugau

SEQ ID NO: 3584838 - RNA, 11 nt, Human
uuccuucagug

SEQ ID NO: 3584839 - RNA, 15 nt, Human
uuccuucagugccuu

SEQ ID NO: 3584840 - RNA, 16 nt, Human
uuccuucagugccuua

SEQ ID NO: 3584841 - RNA, 14 nt, Human
uuccuucccaugga

SEQ ID NO: 3584842 - RNA, 21 nt, Human
uuccuucccugggcugugcua

SEQ ID NO: 3584843 - RNA, 15 nt, Human
uuccuuccuguucug

SEQ ID NO: 3584844 - RNA, 14 nt, Human
uuccuucucaucug

SEQ ID NO: 3584845 - RNA, 17 nt, Human
uuccuucucugaacaca

SEQ ID NO: 3584846 - RNA, 22 nt, Human
uuccuucucugaacacaggcag

SEQ ID NO: 3584847 - RNA, 14 nt, Human
uuccuucuggccuu

SEQ ID NO: 3584848 - RNA, 14 nt, Human
uuccuucuuugaua

SEQ ID NO: 3584849 - RNA, 15 nt, Human
uuccuucuuugcccu

SEQ ID NO: 3584850 - RNA, 13 nt, Human
uuccuugaagccg

SEQ ID NO: 3584851 - RNA, 14 nt, Human
uuccuugaagccga

SEQ ID NO: 3584852 - RNA, 15 nt, Human
uuccuugaccagcag

SEQ ID NO: 3584853 - RNA, 18 nt, Human
uuccuugaccuuccucug

SEQ ID NO: 3584854 - RNA, 22 nt, Human
uuccuugagacacggagcccag

SEQ ID NO: 3584855 - RNA, 22 nt, Human
uuccuugaggggagccaggagg

SEQ ID NO: 3584856 - RNA, 23 nt, Human
uuccuugaggggagccaggaggg

SEQ ID NO: 3584857 - RNA, 19 nt, Human
uuccuugccugcacaaacu

SEQ ID NO: 3584858 - RNA, 13 nt, Human
uuccuugcuaaug

SEQ ID NO: 3584859 - RNA, 13 nt, Human
uuccuugcucaac

SEQ ID NO: 3584860 - RNA, 15 nt, Human
uuccuugcucaacca

SEQ ID NO: 3584861 - RNA, 14 nt, Human
uuccuugcucuccc

SEQ ID NO: 3584862 - RNA, 23 nt, Human
uuccuuggauaggcuuuuuagua

SEQ ID NO: 3584863 - RNA, 15 nt, Human
uuccuuggcucccau

SEQ ID NO: 3584864 - RNA, 23 nt, Human
uuccuuggcucccauucacucuu

SEQ ID NO: 3584865 - RNA, 15 nt, Human
uuccuuggcuuuaug

SEQ ID NO: 3584866 - RNA, 17 nt, Human
uuccuuggggcaggcag

SEQ ID NO: 3584867 - RNA, 18 nt, Human
uuccuuggggcaggcagu

SEQ ID NO: 3584868 - RNA, 23 nt, Human
uuccuugguccuaguaagaagac

SEQ ID NO: 3584869 - RNA, 16 nt, Human
uuccuuguagccuuuu

SEQ ID NO: 3584870 - RNA, 17 nt, Human
uuccuuguccccacacu

SEQ ID NO: 3584871 - RNA, 21 nt, Human
uuccuuguuacccaugaaaaa

SEQ ID NO: 3584872 - RNA, 13 nt, Human
uuccuuuaaaaaa

SEQ ID NO: 3584873 - RNA, 17 nt, Human
uuccuuuaaaaaaauuu

SEQ ID NO: 3584874 - RNA, 23 nt, Human
uuccuuuaaaaaaauuuaagugc

SEQ ID NO: 3584875 - RNA, 18 nt, Human
uuccuuuaacaacauguu

SEQ ID NO: 3584876 - RNA, 21 nt, Human
uuccuuuaacaacauguuucc

SEQ ID NO: 3584877 - RNA, 22 nt, Human
uuccuuuaacaacauguuucca

SEQ ID NO: 3584878 - RNA, 13 nt, Human
uuccuuuacuuuc

SEQ ID NO: 3584879 - RNA, 15 nt, Human
uuccuuuacuuuccc

SEQ ID NO: 3584880 - RNA, 20 nt, Human
uuccuuuacuuucccuugcu

SEQ ID NO: 3584881 - RNA, 14 nt, Human
uuccuuuaugugaa

SEQ ID NO: 3584882 - RNA, 21 nt, Human
uuccuuucauuuacuguggcu

SEQ ID NO: 3584883 - RNA, 14 nt, Human
uuccuuuccccagc

SEQ ID NO: 3584884 - RNA, 17 nt, Human
uuccuuuccccagccca

SEQ ID NO: 3584885 - RNA, 16 nt, Human
uuccuuucccuuuagc

SEQ ID NO: 3584886 - RNA, 10 nt, Human
uuccuuucuc

SEQ ID NO: 3584887 - RNA, 12 nt, Human
uuccuuucucac

SEQ ID NO: 3584888 - RNA, 14 nt, Human
uuccuuugaagagg

SEQ ID NO: 3584889 - RNA, 15 nt, Human
uuccuuugaagagga

SEQ ID NO: 3584890 - RNA, 13 nt, Human
uuccuuugugcuu

SEQ ID NO: 3584891 - RNA, 20 nt, Human
uuccuuugugguuuuaugga

SEQ ID NO: 3584892 - RNA, 12 nt, Human
uuccuuuucacu

SEQ ID NO: 3584893 - RNA, 13 nt, Human
uuccuuuucacug

SEQ ID NO: 3584894 - RNA, 14 nt, Human
uuccuuuucccugc

SEQ ID NO: 3584895 - RNA, 15 nt, Human
uuccuuuucccugcu

SEQ ID NO: 3584896 - RNA, 18 nt, Human
uuccuuuucuaacucucc

SEQ ID NO: 3584897 - RNA, 20 nt, Human
uuccuuuugaacgccccccc

SEQ ID NO: 3584898 - RNA, 18 nt, Human
uuccuuuuuaugaggcaa

SEQ ID NO: 3584899 - RNA, 21 nt, Human
uuccuuuuucugauuagcuuu

SEQ ID NO: 3584900 - RNA, 22 nt, Human
uuccuuuuucugauuagcuuug

SEQ ID NO: 3584901 - RNA, 15 nt, Human
uuccuuuuugacacu

SEQ ID NO: 3584902 - RNA, 16 nt, Human
uuccuuuuugacacug

SEQ ID NO: 3584903 - RNA, 16 nt, Human
uuccuuuuuucaaaau

SEQ ID NO: 3584904 - RNA, 14 nt, Human
uuccuuuuuuugau

SEQ ID NO: 3584905 - RNA, 16 nt, Human
uuccuuuuuuuguacc

SEQ ID NO: 3584906 - RNA, 13 nt, Human
uucgaaaaucaaa

SEQ ID NO: 3584907 - RNA, 22 nt, Human
uucgaaaccugggauucaggaa

SEQ ID NO: 3584908 - RNA, 22 nt, Human
uucgaagccuugccuaaauuua

SEQ ID NO: 3584909 - RNA, 18 nt, Human
uucgaagucauuaaacug

SEQ ID NO: 3584910 - RNA, 14 nt, Human
uucgacacuguucu

SEQ ID NO: 3584911 - RNA, 23 nt, Human
uucgacagcauuuuccucugcuu

SEQ ID NO: 3584912 - RNA, 18 nt, Human
uucgaccugauuuacagu

SEQ ID NO: 3584913 - RNA, 17 nt, Human
uucgacucagccucagg

SEQ ID NO: 3584914 - RNA, 19 nt, Human
uucgacugugaccuguggg

SEQ ID NO: 3584915 - RNA, 16 nt, Human
uucgacuguuguuauc

SEQ ID NO: 3584916 - RNA, 22 nt, Human
uucgagcuauauuuaaguauuc

SEQ ID NO: 3584917 - RNA, 13 nt, Human
uucgaggccugaa

SEQ ID NO: 3584918 - RNA, 20 nt, Human
uucgaggccugaagccagcu

SEQ ID NO: 3584919 - RNA, 20 nt, Human
uucgaugggcccaauucuua

SEQ ID NO: 3584920 - RNA, 15 nt, Human
uucgcagccacccug

SEQ ID NO: 3584921 - RNA, 22 nt, Human
uucgcaguccacuucugacagc

SEQ ID NO: 3584922 - RNA, 14 nt, Human
uucgcaucaaaaga

SEQ ID NO: 3584923 - RNA, 18 nt, Human
uucgcaucaaaagacaau

SEQ ID NO: 3584924 - RNA, 21 nt, Human
uucgcaucaaaagacaauucu

SEQ ID NO: 3584925 - RNA, 22 nt, Human
uucgcaucaaaagacaauucuu

SEQ ID NO: 3584926 - RNA, 20 nt, Human
uucgcauggucacacacuga

SEQ ID NO: 3584927 - RNA, 21 nt, Human
uucgcauggucacacacugau

SEQ ID NO: 3584928 - RNA, 19 nt, Human
uucgcccaaagccagacag

SEQ ID NO: 3584929 - RNA, 21 nt, Human
uucgccguggcugcggcaccc

SEQ ID NO: 3584930 - RNA, 19 nt, Human
uucgcgugcccucgcugcu

SEQ ID NO: 3584931 - RNA, 19 nt, Human
uucucccagguaccagcug

SEQ ID NO: 3584932 - RNA, 20 nt, Human
uucuccccaaugagacuugc

SEQ ID NO: 3584933 - RNA, 22 nt, Human
uucuccccaaugagacuugccu

SEQ ID NO: 3584934 - RNA, 17 nt, Human
uucucccccugggcucu

SEQ ID NO: 3584935 - RNA, 21 nt, Human
uucuccccugcccccaggacu

SEQ ID NO: 3584936 - RNA, 18 nt, Human
uucuccccuuccauuucu

SEQ ID NO: 3584937 - RNA, 17 nt, Human
uucucccgggacucugc

SEQ ID NO: 3584938 - RNA, 20 nt, Human
uucucccucauuucaggagc

SEQ ID NO: 3584939 - RNA, 18 nt, Human
uucucccucccaccuuaa

SEQ ID NO: 3584940 - RNA, 17 nt, Human
uucucccucucacuguc

SEQ ID NO: 3584941 - RNA, 11 nt, Human
uucucccugga

SEQ ID NO: 3584942 - RNA, 19 nt, Human
uucucccuggauuuuuacc

SEQ ID NO: 3584943 - RNA, 20 nt, Human
uucucccuggauuuuuacca

SEQ ID NO: 3584944 - RNA, 10 nt, Human
uucucccugu

SEQ ID NO: 3584945 - RNA, 13 nt, Human
uucuccgccagcc

SEQ ID NO: 3584946 - RNA, 19 nt, Human
uucuccgccagccuccucu

SEQ ID NO: 3584947 - RNA, 19 nt, Human
uucuccguccucgauggga

SEQ ID NO: 3584948 - RNA, 22 nt, Human
uucuccguuagcuccuguggcc

SEQ ID NO: 3584949 - RNA, 13 nt, Human
uucuccucccagg

SEQ ID NO: 3584950 - RNA, 20 nt, Human
uucuccucccuuccuuuucc

SEQ ID NO: 3584951 - RNA, 10 nt, Human
uucuccugga

SEQ ID NO: 3584952 - RNA, 20 nt, Human
uucuccuguuuauucccauc

SEQ ID NO: 3584953 - RNA, 22 nt, Human
uucuccuuccaacugcugcccc

SEQ ID NO: 3584954 - RNA, 21 nt, Human
uucuccuugaauaucuuucga

SEQ ID NO: 3584955 - RNA, 21 nt, Human
uucuccuuguuguugguuguu

SEQ ID NO: 3584956 - RNA, 17 nt, Human
uucuccuuuguacuuug

SEQ ID NO: 3584957 - RNA, 16 nt, Human
uucuccuuuuuacccc

SEQ ID NO: 3584958 - RNA, 19 nt, Human
uucucgcuguccuuucuag

SEQ ID NO: 3584959 - RNA, 12 nt, Human
uucucgggcuga

SEQ ID NO: 3584960 - RNA, 20 nt, Human
uucucuaaaauagccacuua

SEQ ID NO: 3584961 - RNA, 13 nt, Human
uucucuaauaaua

SEQ ID NO: 3584962 - RNA, 21 nt, Human
uucucuaauucuuccuuugua

SEQ ID NO: 3584963 - RNA, 23 nt, Human
uucucuacccaucuuaaaaacaa

SEQ ID NO: 3584964 - RNA, 17 nt, Human
uucucuacucuagggaa

SEQ ID NO: 3584965 - RNA, 17 nt, Human
uucucuagcucucuagg

SEQ ID NO: 3584966 - RNA, 19 nt, Human
uucucuagcuggugguuuc

SEQ ID NO: 3584967 - RNA, 12 nt, Human
uucucuaggaaa

SEQ ID NO: 3584968 - RNA, 17 nt, Human
uucucuaguuugauuaa

SEQ ID NO: 3584969 - RNA, 16 nt, Human
uucucuauaaaaaaua

SEQ ID NO: 3584970 - RNA, 13 nt, Human
uucucuaucauuu

SEQ ID NO: 3584971 - RNA, 16 nt, Human
uucucuaucauuuaau

SEQ ID NO: 3584972 - RNA, 20 nt, Human
uucucucaacaccaugauuc

SEQ ID NO: 3584973 - RNA, 13 nt, Human
uucucucaccucc

SEQ ID NO: 3584974 - RNA, 13 nt, Human
uucucucaucucu

SEQ ID NO: 3584975 - RNA, 14 nt, Human
uucucucaucuguu

SEQ ID NO: 3584976 - RNA, 14 nt, Human
uucucuccagcccc

SEQ ID NO: 3584977 - RNA, 18 nt, Human
uucucuccagccccugga

SEQ ID NO: 3584978 - RNA, 19 nt, Human
uucucuccagcugacuaaa

SEQ ID NO: 3584979 - RNA, 12 nt, Human
uucucuccauuu

SEQ ID NO: 3584980 - RNA, 23 nt, Human
uucucucccaggggcuggcuuca

SEQ ID NO: 3584981 - RNA, 15 nt, Human
uucucuccccaaccc

SEQ ID NO: 3584982 - RNA, 12 nt, Human
uucucuccuccc

SEQ ID NO: 3584983 - RNA, 15 nt, Human
uucucuccuccccaa

SEQ ID NO: 3584984 - RNA, 17 nt, Human
uucucuccuccccaaau

SEQ ID NO: 3584985 - RNA, 23 nt, Human
uucucuccucuccccaugauguu

SEQ ID NO: 3584986 - RNA, 14 nt, Human
uucucuccuguacc

SEQ ID NO: 3584987 - RNA, 18 nt, Human
uucucuccuguaccucuu

SEQ ID NO: 3584988 - RNA, 17 nt, Human
uucucuccuguccuccc

SEQ ID NO: 3584989 - RNA, 21 nt, Human
uucucuccuguccucccucac

SEQ ID NO: 3584990 - RNA, 18 nt, Human
uucucucuaugguaaaga

SEQ ID NO: 3584991 - RNA, 20 nt, Human
uucucucuaugguaaagaua

SEQ ID NO: 3584992 - RNA, 12 nt, Human
uucucucugcuc

SEQ ID NO: 3584993 - RNA, 16 nt, Human
uucucucuucccucag

SEQ ID NO: 3584994 - RNA, 17 nt, Human
uucucucuuuauacagc

SEQ ID NO: 3584995 - RNA, 18 nt, Human
uucucucuuuauacagcu

SEQ ID NO: 3584996 - RNA, 18 nt, Human
uucucugaacacaggcag

SEQ ID NO: 3584997 - RNA, 23 nt, Human
uucucugaagaguggguuucaca

SEQ ID NO: 3584998 - RNA, 11 nt, Human
uucucugacuu

SEQ ID NO: 3584999 - RNA, 16 nt, Human
uucucugagcugugca

SEQ ID NO: 3585000 - RNA, 18 nt, Human
uucucugagcugugcagg

SEQ ID NO: 3585001 - RNA, 14 nt, Human
uucucugauacaga

SEQ ID NO: 3585002 - RNA, 10 nt, Human
uucucugcca

SEQ ID NO: 3585003 - RNA, 11 nt, Human
uucucugcccu

SEQ ID NO: 3585004 - RNA, 16 nt, Human
uucucugcccuccaag

SEQ ID NO: 3585005 - RNA, 23 nt, Human
uucucugccgcuaccucccuccc

SEQ ID NO: 3585006 - RNA, 21 nt, Human
uucucugccuuugacauuuaa

SEQ ID NO: 3585007 - RNA, 21 nt, Human
uucucugcuauauauaaaacg

SEQ ID NO: 3585008 - RNA, 13 nt, Human
uucucugcuccac

SEQ ID NO: 3585009 - RNA, 15 nt, Human
uucucugcuccacca

SEQ ID NO: 3585010 - RNA, 12 nt, Human
uucucugcuuca

SEQ ID NO: 3585011 - RNA, 15 nt, Human
uucucuggagccaag

SEQ ID NO: 3585012 - RNA, 12 nt, Human
uucucugggaga

SEQ ID NO: 3585013 - RNA, 15 nt, Human
uucucugggagaaaa

SEQ ID NO: 3585014 - RNA, 20 nt, Human
uucucugggagaaaaucauc

SEQ ID NO: 3585015 - RNA, 19 nt, Human
uucucugguaauauugacu

SEQ ID NO: 3585016 - RNA, 22 nt, Human
uucucugguacaauuucuuuug

SEQ ID NO: 3585017 - RNA, 12 nt, Human
uucucuguacau

SEQ ID NO: 3585018 - RNA, 14 nt, Human
uucucuguacuuuu

SEQ ID NO: 3585019 - RNA, 18 nt, Human
uucucuguacuuuucauu

SEQ ID NO: 3585020 - RNA, 21 nt, Human
uucucuguacuuuucauucuc

SEQ ID NO: 3585021 - RNA, 17 nt, Human
uucucugucucaugugu

SEQ ID NO: 3585022 - RNA, 12 nt, Human
uucucugugaac

SEQ ID NO: 3585023 - RNA, 20 nt, Human
uucucugugucuaagauucu

SEQ ID NO: 3585024 - RNA, 21 nt, Human
uucucugugucuaagauucua

SEQ ID NO: 3585025 - RNA, 22 nt, Human
uucucugugucuaagauucuag

SEQ ID NO: 3585026 - RNA, 19 nt, Human
uucucuguguuuguuccua

SEQ ID NO: 3585027 - RNA, 24 nt, Human
uucucuguguuuguuccuacagcc

SEQ ID NO: 3585028 - RNA, 18 nt, Human
uucucuuaaacuugugaa

SEQ ID NO: 3585029 - RNA, 16 nt, Human
uucucuuacugcaaau

SEQ ID NO: 3585030 - RNA, 22 nt, Human
uucucuuccaaccauuuaucuu

SEQ ID NO: 3585031 - RNA, 20 nt, Human
uucucuucuccccuuccauu

SEQ ID NO: 3585032 - RNA, 21 nt, Human
uucucuucuccccuuccauuu

SEQ ID NO: 3585033 - RNA, 14 nt, Human
uucucuucuugaac

SEQ ID NO: 3585034 - RNA, 16 nt, Human
uucucuugagcuggcc

SEQ ID NO: 3585035 - RNA, 22 nt, Human
uucucuugagcuggccucucua

SEQ ID NO: 3585036 - RNA, 18 nt, Human
uucucuugagucacacug

SEQ ID NO: 3585037 - RNA, 17 nt, Human
uucucuugggaacugaa

SEQ ID NO: 3585038 - RNA, 22 nt, Human
uucucuuuccuuggcucccauu

SEQ ID NO: 3585039 - RNA, 11 nt, Human
uucucuuucuu

SEQ ID NO: 3585040 - RNA, 19 nt, Human
uucucuuugauuauuugca

SEQ ID NO: 3585041 - RNA, 20 nt, Human
uucucuuugauuauuugcau

SEQ ID NO: 3585042 - RNA, 20 nt, Human
uucucuuuuccccuuuccug

SEQ ID NO: 3585043 - RNA, 22 nt, Human
uucucuuuuccccuuuccuguc

SEQ ID NO: 3585044 - RNA, 17 nt, Human
uucugaaacuaaugaaa

SEQ ID NO: 3585045 - RNA, 19 nt, Human
uucugaaagagucuuucuu

SEQ ID NO: 3585046 - RNA, 13 nt, Human
uucugaacuaaag

SEQ ID NO: 3585047 - RNA, 17 nt, Human
uucugaacucaaacuga

SEQ ID NO: 3585048 - RNA, 18 nt, Human
uucugaacucaaacugag

SEQ ID NO: 3585049 - RNA, 12 nt, Human
uucugaacucgc

SEQ ID NO: 3585050 - RNA, 14 nt, Human
uucugaagaagaug

SEQ ID NO: 3585051 - RNA, 18 nt, Human
uucugaagucuacuuugu

SEQ ID NO: 3585052 - RNA, 17 nt, Human
uucugaaguuauauuuc

SEQ ID NO: 3585053 - RNA, 19 nt, Human
uucugaaguuauauuuccu

SEQ ID NO: 3585054 - RNA, 14 nt, Human
uucugaauaaagca

SEQ ID NO: 3585055 - RNA, 15 nt, Human
uucugaauaaagcaa

SEQ ID NO: 3585056 - RNA, 19 nt, Human
uucugaauacaaagugaug

SEQ ID NO: 3585057 - RNA, 18 nt, Human
uucugaaugcuucuaagu

SEQ ID NO: 3585058 - RNA, 11 nt, Human
uucugaaugua

SEQ ID NO: 3585059 - RNA, 14 nt, Human
uucugaauuugcaa

SEQ ID NO: 3585060 - RNA, 17 nt, Human
uucugaauuugcaaagu

SEQ ID NO: 3585061 - RNA, 22 nt, Human
uucugacaaaaaguuuccauau

SEQ ID NO: 3585062 - RNA, 21 nt, Human
uucugacaguuuuucuguuuu

SEQ ID NO: 3585063 - RNA, 23 nt, Human
uucugacaucuuaguauuugcau

SEQ ID NO: 3585064 - RNA, 14 nt, Human
uucugacauuaaca

SEQ ID NO: 3585065 - RNA, 15 nt, Human
uucugacauuaacag

SEQ ID NO: 3585066 - RNA, 20 nt, Human
uucugacauuaacaguuuuc

SEQ ID NO: 3585067 - RNA, 22 nt, Human
uucugacauuaacaguuuucca

SEQ ID NO: 3585068 - RNA, 13 nt, Human
uucugaccacacu

SEQ ID NO: 3585069 - RNA, 22 nt, Human
uucugaccacacuuccugucca

SEQ ID NO: 3585070 - RNA, 18 nt, Human
uucugacccaugcugccc

SEQ ID NO: 3585071 - RNA, 21 nt, Human
uucugacccugcuucaaauau

SEQ ID NO: 3585072 - RNA, 14 nt, Human
uucugacggcccug

SEQ ID NO: 3585073 - RNA, 18 nt, Human
uucugacucgguuucucc

SEQ ID NO: 3585074 - RNA, 16 nt, Human
uucugacucugagcua

SEQ ID NO: 3585075 - RNA, 13 nt, Human
uucugacugcuga

SEQ ID NO: 3585076 - RNA, 12 nt, Human
uucugacuugac

SEQ ID NO: 3585077 - RNA, 14 nt, Human
uucugagaaaacaa

SEQ ID NO: 3585078 - RNA, 12 nt, Human
uucugagaaaag

SEQ ID NO: 3585079 - RNA, 22 nt, Human
uucugagcagcgagccugcuag

SEQ ID NO: 3585080 - RNA, 14 nt, Human
uucugagcauuuaa

SEQ ID NO: 3585081 - RNA, 20 nt, Human
uucugagcccgggcugccug

SEQ ID NO: 3585082 - RNA, 14 nt, Human
uucugagccugccu

SEQ ID NO: 3585083 - RNA, 23 nt, Human
uucugagcuauuucaucuauuuu

SEQ ID NO: 3585084 - RNA, 13 nt, Human
uucugagcuccug

SEQ ID NO: 3585085 - RNA, 15 nt, Human
uucugagcuccuguc

SEQ ID NO: 3585086 - RNA, 15 nt, Human
uucugagcugccagu

SEQ ID NO: 3585087 - RNA, 20 nt, Human
uucugagcuuacguaguucu

SEQ ID NO: 3585088 - RNA, 16 nt, Human
uucugagugccuucug

SEQ ID NO: 3585089 - RNA, 15 nt, Human
uucugaguuccugca

SEQ ID NO: 3585090 - RNA, 14 nt, Human
uucugaguuuugug

SEQ ID NO: 3585091 - RNA, 15 nt, Human
uucugaguuuugugu

SEQ ID NO: 3585092 - RNA, 23 nt, Human
uucugaguuuuguguuuguugua

SEQ ID NO: 3585093 - RNA, 13 nt, Human
uucugauagagga

SEQ ID NO: 3585094 - RNA, 21 nt, Human
uucugauagaggaagccugau

SEQ ID NO: 3585095 - RNA, 22 nt, Human
uucugauaugcaguuuuccuua

SEQ ID NO: 3585096 - RNA, 13 nt, Human
uucugauauuaau

SEQ ID NO: 3585097 - RNA, 14 nt, Human
uucugauauuaauu

SEQ ID NO: 3585098 - RNA, 19 nt, Human
uucugaucacugaaauaaa

SEQ ID NO: 3585099 - RNA, 19 nt, Human
uucugauccuaguuccacc

SEQ ID NO: 3585100 - RNA, 14 nt, Human
uucugaugaaaugu

SEQ ID NO: 3585101 - RNA, 18 nt, Human
uucugaugaaauguuaac

SEQ ID NO: 3585102 - RNA, 17 nt, Human
uucugauuacacaaaac

SEQ ID NO: 3585103 - RNA, 17 nt, Human
uucugauuagaaaugac

SEQ ID NO: 3585104 - RNA, 18 nt, Human
uucugauuagcuuugugu

SEQ ID NO: 3585105 - RNA, 22 nt, Human
uucugauuguaacguugcugug

SEQ ID NO: 3585106 - RNA, 23 nt, Human
uucugauuugccacugauauuca

SEQ ID NO: 3585107 - RNA, 14 nt, Human
uucugcaaacaaac

SEQ ID NO: 3585108 - RNA, 15 nt, Human
uucugcaaauagaaa

SEQ ID NO: 3585109 - RNA, 17 nt, Human
uucugcaaauagaaaac

SEQ ID NO: 3585110 - RNA, 19 nt, Human
uucugcaaauagaaaacag

SEQ ID NO: 3585111 - RNA, 15 nt, Human
uucugcaagccugcg

SEQ ID NO: 3585112 - RNA, 13 nt, Human
uucugcacccucc

SEQ ID NO: 3585113 - RNA, 23 nt, Human
uucugcacccuccacccuguccc

SEQ ID NO: 3585114 - RNA, 14 nt, Human
uucugcacugaaaa

SEQ ID NO: 3585115 - RNA, 15 nt, Human
uucugcagaagagga

SEQ ID NO: 3585116 - RNA, 20 nt, Human
uucugcagacacgccuuccc

SEQ ID NO: 3585117 - RNA, 20 nt, Human
uucugcagcaugaccuguga

SEQ ID NO: 3585118 - RNA, 22 nt, Human
uucugcagcaugaccugugacc

SEQ ID NO: 3585119 - RNA, 23 nt, Human
uucugcagcaugaccugugacca

SEQ ID NO: 3585120 - RNA, 15 nt, Human
uucugcagcuguuuu

SEQ ID NO: 3585121 - RNA, 19 nt, Human
uucugcaguagucucugug

SEQ ID NO: 3585122 - RNA, 22 nt, Human
uucugcauauguugaauacuuu

SEQ ID NO: 3585123 - RNA, 23 nt, Human
uucugcauauguugaauacuuuu

SEQ ID NO: 3585124 - RNA, 16 nt, Human
uucugcauugcuagau

SEQ ID NO: 3585125 - RNA, 20 nt, Human
uucugcauugcuagauaaaa

SEQ ID NO: 3585126 - RNA, 21 nt, Human
uucugccacccugcugagucu

SEQ ID NO: 3585127 - RNA, 14 nt, Human
uucugccacuuccc

SEQ ID NO: 3585128 - RNA, 17 nt, Human
uucugccacuucccagg

SEQ ID NO: 3585129 - RNA, 12 nt, Human
uucugccaggag

SEQ ID NO: 3585130 - RNA, 16 nt, Human
uucugccagggagcuu

SEQ ID NO: 3585131 - RNA, 19 nt, Human
uucugccaucuagccagcc

SEQ ID NO: 3585132 - RNA, 15 nt, Human
uucugcccccagccc

SEQ ID NO: 3585133 - RNA, 16 nt, Human
uucugcccccugcaga

SEQ ID NO: 3585134 - RNA, 19 nt, Human
uucugcccccugcagaacc

SEQ ID NO: 3585135 - RNA, 13 nt, Human
uucugcccuggcu

SEQ ID NO: 3585136 - RNA, 14 nt, Human
uucugcccuggcug

SEQ ID NO: 3585137 - RNA, 19 nt, Human
uucugcccuggcugcugcc

SEQ ID NO: 3585138 - RNA, 22 nt, Human
uucugccgcccccuccugaacc

SEQ ID NO: 3585139 - RNA, 18 nt, Human
uucugccggcccuggggc

SEQ ID NO: 3585140 - RNA, 14 nt, Human
uucugccuccuuua

SEQ ID NO: 3585141 - RNA, 17 nt, Human
uucugccuccuuuagua

SEQ ID NO: 3585142 - RNA, 12 nt, Human
uucugccucucc

SEQ ID NO: 3585143 - RNA, 14 nt, Human
uucugccucugagg

SEQ ID NO: 3585144 - RNA, 22 nt, Human
uucugccucugauguauuuugu

SEQ ID NO: 3585145 - RNA, 21 nt, Human
uucugccugaggggcagccug

SEQ ID NO: 3585146 - RNA, 18 nt, Human
uucugccugccagcugca

SEQ ID NO: 3585147 - RNA, 15 nt, Human
uucugccugcccagg

SEQ ID NO: 3585148 - RNA, 16 nt, Human
uucugccugcccaggc

SEQ ID NO: 3585149 - RNA, 21 nt, Human
uucugccugcccaggccccug

SEQ ID NO: 3585150 - RNA, 14 nt, Human
uucugccuggagac

SEQ ID NO: 3585151 - RNA, 19 nt, Human
uucugccuuugcagaaaca

SEQ ID NO: 3585152 - RNA, 14 nt, Human
uucugccuuugcca

SEQ ID NO: 3585153 - RNA, 15 nt, Human
uucugccuuuuuuau

SEQ ID NO: 3585154 - RNA, 15 nt, Human
uucugcuaccucacu

SEQ ID NO: 3585155 - RNA, 21 nt, Human
uucugcuaccucacugggguc

SEQ ID NO: 3585156 - RNA, 19 nt, Human
uucugcucacauaucuguc

SEQ ID NO: 3585157 - RNA, 20 nt, Human
uucugcucagcucugggcca

SEQ ID NO: 3585158 - RNA, 13 nt, Human
uucugcucaucau

SEQ ID NO: 3585159 - RNA, 14 nt, Human
uucugcucaucauu

SEQ ID NO: 3585160 - RNA, 21 nt, Human
uucugcucaucauucucuguc

SEQ ID NO: 3585161 - RNA, 17 nt, Human
uucugcuccacccuugg

SEQ ID NO: 3585162 - RNA, 11 nt, Human
uucugcuccuc

SEQ ID NO: 3585163 - RNA, 13 nt, Human
uucugcuccucuc

SEQ ID NO: 3585164 - RNA, 17 nt, Human
uucugcuccucuccagg

SEQ ID NO: 3585165 - RNA, 22 nt, Human
uucugcucugguuguuucuguu

SEQ ID NO: 3585166 - RNA, 20 nt, Human
uucugcuggccucugcgagu

SEQ ID NO: 3585167 - RNA, 15 nt, Human
uucugcugggcuggg

SEQ ID NO: 3585168 - RNA, 20 nt, Human
uucugcuggggccugggaca

SEQ ID NO: 3585169 - RNA, 14 nt, Human
uucugcuucacauu

SEQ ID NO: 3585170 - RNA, 14 nt, Human
uucugcuucagccu

SEQ ID NO: 3585171 - RNA, 19 nt, Human
uucugcuucagccucccga

SEQ ID NO: 3585172 - RNA, 18 nt, Human
uucugcuuguguuaagua

SEQ ID NO: 3585173 - RNA, 17 nt, Human
uucugcuuuagacuuga

SEQ ID NO: 3585174 - RNA, 19 nt, Human
uucugcuuuagacuugaaa

SEQ ID NO: 3585175 - RNA, 22 nt, Human
uucugcuuucuccccaaugaga

SEQ ID NO: 3585176 - RNA, 14 nt, Human
uucugcuuugcucu

SEQ ID NO: 3585177 - RNA, 12 nt, Human
uucugcuuuguu

SEQ ID NO: 3585178 - RNA, 17 nt, Human
uucugcuuuucugcccu

SEQ ID NO: 3585179 - RNA, 18 nt, Human
uucugcuuuucugcccug

SEQ ID NO: 3585180 - RNA, 21 nt, Human
uucuggaauuuguucaaguuu

SEQ ID NO: 3585181 - RNA, 22 nt, Human
uucuggacagucagcucuucau

SEQ ID NO: 3585182 - RNA, 19 nt, Human
uucuggacccguucaacuu

SEQ ID NO: 3585183 - RNA, 20 nt, Human
uucuggacuauagcuguucu

SEQ ID NO: 3585184 - RNA, 15 nt, Human
uucuggacucuggac

SEQ ID NO: 3585185 - RNA, 17 nt, Human
uucuggagucuccagug

SEQ ID NO: 3585186 - RNA, 10 nt, Human
uucuggaguu

SEQ ID NO: 3585187 - RNA, 15 nt, Human
uucuggaugcauuuc

SEQ ID NO: 3585188 - RNA, 15 nt, Human
uucuggauucuuggc

SEQ ID NO: 3585189 - RNA, 23 nt, Human
uucuggcaguuuugacaucagcc

SEQ ID NO: 3585190 - RNA, 14 nt, Human
uucuggccaggaag

SEQ ID NO: 3585191 - RNA, 16 nt, Human
uucuggccaguguuua

SEQ ID NO: 3585192 - RNA, 21 nt, Human
uucuggccaguguuuaaaacu

SEQ ID NO: 3585193 - RNA, 15 nt, Human
uucuggccucccaca

SEQ ID NO: 3585194 - RNA, 17 nt, Human
uucuggccuuguaagac

SEQ ID NO: 3585195 - RNA, 17 nt, Human
uucuggccuuuccucuc

SEQ ID NO: 3585196 - RNA, 18 nt, Human
uucuggcuaugcauuuga

SEQ ID NO: 3585197 - RNA, 17 nt, Human
uucuggcucagggaggu

SEQ ID NO: 3585198 - RNA, 17 nt, Human
uucuggcucuuccaggc

SEQ ID NO: 3585199 - RNA, 15 nt, Human
uucuggcugaaaaag

SEQ ID NO: 3585200 - RNA, 22 nt, Human
uucugggacacaguucaauucu

SEQ ID NO: 3585201 - RNA, 22 nt, Human
uucugggagacacccaaagggu

SEQ ID NO: 3585202 - RNA, 23 nt, Human
uucugggcaccacaaaauauaca

SEQ ID NO: 3585203 - RNA, 19 nt, Human
uucugggcacccucccacc

SEQ ID NO: 3585204 - RNA, 21 nt, Human
uucuggggaaagacacugccu

SEQ ID NO: 3585205 - RNA, 23 nt, Human
uucuggggaaagacacugccugg

SEQ ID NO: 3585206 - RNA, 17 nt, Human
uucuggggcaggcuggg

SEQ ID NO: 3585207 - RNA, 23 nt, Human
uucuggggccccuuuuuacuccc

SEQ ID NO: 3585208 - RNA, 21 nt, Human
uucuggggccuaauaaaacug

SEQ ID NO: 3585209 - RNA, 22 nt, Human
uucuggggggacccagugcaga

SEQ ID NO: 3585210 - RNA, 18 nt, Human
uucugggugguugcccuu

SEQ ID NO: 3585211 - RNA, 17 nt, Human
uucuggguucugggugg

SEQ ID NO: 3585212 - RNA, 20 nt, Human
uucugguaggaauagcaugu

SEQ ID NO: 3585213 - RNA, 21 nt, Human
uucugguaugaacuugaggac

SEQ ID NO: 3585214 - RNA, 22 nt, Human
uucuggucaagggcugucauug

SEQ ID NO: 3585215 - RNA, 19 nt, Human
uucuggucucgucuuccgu

SEQ ID NO: 3585216 - RNA, 22 nt, Human
uucuggucucgucuuccgucuc

SEQ ID NO: 3585217 - RNA, 21 nt, Human
uucuggucucuaggcugggga

SEQ ID NO: 3585218 - RNA, 13 nt, Human
uucuuugaauuua

SEQ ID NO: 3585219 - RNA, 16 nt, Human
uucuuugaauuuucau

SEQ ID NO: 3585220 - RNA, 21 nt, Human
uucuuugagggacugccucug

SEQ ID NO: 3585221 - RNA, 22 nt, Human
uucuuugauaauguuaaauuug

SEQ ID NO: 3585222 - RNA, 20 nt, Human
uucuuugauguuaacacauu

SEQ ID NO: 3585223 - RNA, 21 nt, Human
uucuuugauguuaacacauuu

SEQ ID NO: 3585224 - RNA, 12 nt, Human
uucuuugauuau

SEQ ID NO: 3585225 - RNA, 23 nt, Human
uucuuugauucuccuuuuaugug

SEQ ID NO: 3585226 - RNA, 12 nt, Human
uucuuugcaaag

SEQ ID NO: 3585227 - RNA, 19 nt, Human
uucuuugcacuuuuucuua

SEQ ID NO: 3585228 - RNA, 14 nt, Human
uucuuugcccuuua

SEQ ID NO: 3585229 - RNA, 17 nt, Human
uucuuugccuguucagu

SEQ ID NO: 3585230 - RNA, 15 nt, Human
uucuuugcuguaaga

SEQ ID NO: 3585231 - RNA, 16 nt, Human
uucuuugcuguaagau

SEQ ID NO: 3585232 - RNA, 16 nt, Human
uucuuuggaaaguaca

SEQ ID NO: 3585233 - RNA, 20 nt, Human
uucuuuggaguuaaaaugca

SEQ ID NO: 3585234 - RNA, 18 nt, Human
uucuuuggugccuuuccu

SEQ ID NO: 3585235 - RNA, 22 nt, Human
uucuuugguuucccaagagcua

SEQ ID NO: 3585236 - RNA, 15 nt, Human
uucuuuguagcauuu

SEQ ID NO: 3585237 - RNA, 17 nt, Human
uucuuuguuucuuucuu

SEQ ID NO: 3585238 - RNA, 18 nt, Human
uucuuuguuuuuagagac

SEQ ID NO: 3585239 - RNA, 21 nt, Human
uucuuuuaaaggggcagaaaa

SEQ ID NO: 3585240 - RNA, 17 nt, Human
uucuuuuaagaaucaau

SEQ ID NO: 3585241 - RNA, 15 nt, Human
uucuuuuauuuguua

SEQ ID NO: 3585242 - RNA, 19 nt, Human
uucuuuucacauucuuaua

SEQ ID NO: 3585243 - RNA, 12 nt, Human
uucuuuucucau

SEQ ID NO: 3585244 - RNA, 14 nt, Human
uucuuuucuuugua

SEQ ID NO: 3585245 - RNA, 20 nt, Human
uucuuuugccguuauuaaaa

SEQ ID NO: 3585246 - RNA, 22 nt, Human
uucuuuugguaaagacuggcuu

SEQ ID NO: 3585247 - RNA, 23 nt, Human
uucuuuugguaaagacuggcuuu

SEQ ID NO: 3585248 - RNA, 12 nt, Human
uucuuuuguaag

SEQ ID NO: 3585249 - RNA, 14 nt, Human
uucuuuuguaugua

SEQ ID NO: 3585250 - RNA, 12 nt, Human
uucuuuuguuac

SEQ ID NO: 3585251 - RNA, 14 nt, Human
uucuuuuguuacug

SEQ ID NO: 3585252 - RNA, 16 nt, Human
uucuuuuguuacuguu

SEQ ID NO: 3585253 - RNA, 21 nt, Human
uucuuuuguuacuguucuugc

SEQ ID NO: 3585254 - RNA, 14 nt, Human
uucuuuuuacauaa

SEQ ID NO: 3585255 - RNA, 16 nt, Human
uucuuuuuacauaacu

SEQ ID NO: 3585256 - RNA, 15 nt, Human
uucuuuuuauugaau

SEQ ID NO: 3585257 - RNA, 15 nt, Human
uucuuuuuauuuucu

SEQ ID NO: 3585258 - RNA, 16 nt, Human
uucuuuuucuggacuc

SEQ ID NO: 3585259 - RNA, 12 nt, Human
uucuuuuugaau

SEQ ID NO: 3585260 - RNA, 14 nt, Human
uucuuuuugcucua

SEQ ID NO: 3585261 - RNA, 13 nt, Human
uucuuuuugcugu

SEQ ID NO: 3585262 - RNA, 23 nt, Human
uucuuuuugcuguuguuucuaaa

SEQ ID NO: 3585263 - RNA, 17 nt, Human
uucuuuuuuaaaaucaa

SEQ ID NO: 3585264 - RNA, 15 nt, Human
uucuuuuuuauuaau

SEQ ID NO: 3585265 - RNA, 22 nt, Human
uucuuuuuuauuaaucacugug

SEQ ID NO: 3585266 - RNA, 23 nt, Human
uucuuuuuugauauagaaguaua

SEQ ID NO: 3585267 - RNA, 16 nt, Human
uucuuuuuuuagagaa

SEQ ID NO: 3585268 - RNA, 18 nt, Human
uucuuuuuuuccuuuuua

SEQ ID NO: 3585269 - RNA, 19 nt, Human
uucuuuuuuuccuuuuuaa

SEQ ID NO: 3585270 - RNA, 18 nt, Human
uucuuuuuuuucauuaua

SEQ ID NO: 3585271 - RNA, 17 nt, Human
uucuuuuuuuuuaaguu

SEQ ID NO: 3585272 - RNA, 21 nt, Human
uucuuuuuuuuuaaguucuua

SEQ ID NO: 3585273 - RNA, 15 nt, Human
uugaaaaaaacuuca

SEQ ID NO: 3585274 - RNA, 12 nt, Human
uugaaaaaaaua

SEQ ID NO: 3585275 - RNA, 14 nt, Human
uugaaaaaaauugg

SEQ ID NO: 3585276 - RNA, 18 nt, Human
uugaaaaaagcucauuuc

SEQ ID NO: 3585277 - RNA, 20 nt, Human
uugaaaaaccauuuugcugu

SEQ ID NO: 3585278 - RNA, 14 nt, Human
uugaaaaacucuuu

SEQ ID NO: 3585279 - RNA, 13 nt, Human
uugaaaaagcgaa

SEQ ID NO: 3585280 - RNA, 14 nt, Human
uugaaaaaucacuu

SEQ ID NO: 3585281 - RNA, 13 nt, Human
uugaaaaauuccu

SEQ ID NO: 3585282 - RNA, 18 nt, Human
uugaaaaccaaaaugaca

SEQ ID NO: 3585283 - RNA, 21 nt, Human
uugaaaaccaaaaugacaucu

SEQ ID NO: 3585284 - RNA, 13 nt, Human
uugaaaagagcug

SEQ ID NO: 3585285 - RNA, 17 nt, Human
uugaaaagcagacauuu

SEQ ID NO: 3585286 - RNA, 20 nt, Human
uugaaaagccauguuuaaga

SEQ ID NO: 3585287 - RNA, 22 nt, Human
uugaaaagccauguuuaagauu

SEQ ID NO: 3585288 - RNA, 22 nt, Human
uugaaaagcuauuagccaggau

SEQ ID NO: 3585289 - RNA, 17 nt, Human
uugaaaagcuucuuaau

SEQ ID NO: 3585290 - RNA, 16 nt, Human
uugaaaaggugaccuu

SEQ ID NO: 3585291 - RNA, 14 nt, Human
uugaaaauaguuua

SEQ ID NO: 3585292 - RNA, 21 nt, Human
uugaaaaucuuauaauuuaaa

SEQ ID NO: 3585293 - RNA, 15 nt, Human
uugaaaaucuugugu

SEQ ID NO: 3585294 - RNA, 18 nt, Human
uugaaaauuaacaugaau

SEQ ID NO: 3585295 - RNA, 20 nt, Human
uugaaaauuauuuuaaacaa

SEQ ID NO: 3585296 - RNA, 21 nt, Human
uugaaaauucaaaaaguguuu

SEQ ID NO: 3585297 - RNA, 16 nt, Human
uugaaaauugaaaagu

SEQ ID NO: 3585298 - RNA, 15 nt, Human
uugaaacagaaaaau

SEQ ID NO: 3585299 - RNA, 19 nt, Human
uugaaaccaccuuuuauua

SEQ ID NO: 3585300 - RNA, 16 nt, Human
uugaaaccugcucugu

SEQ ID NO: 3585301 - RNA, 16 nt, Human
uugaaacggaugauuu

SEQ ID NO: 3585302 - RNA, 23 nt, Human
uugaaacugagaugugaacacau

SEQ ID NO: 3585303 - RNA, 17 nt, Human
uugaaacugcauuugug

SEQ ID NO: 3585304 - RNA, 18 nt, Human
uugaaacugcauuugugc

SEQ ID NO: 3585305 - RNA, 14 nt, Human
uugaaacuuugaga

SEQ ID NO: 3585306 - RNA, 17 nt, Human
uugaaagaaaggacucu

SEQ ID NO: 3585307 - RNA, 14 nt, Human
uugaaagaauagaa

SEQ ID NO: 3585308 - RNA, 17 nt, Human
uugaaagaauguaaagc

SEQ ID NO: 3585309 - RNA, 14 nt, Human
uugaaagagauggc

SEQ ID NO: 3585310 - RNA, 14 nt, Human
uugaaagaguuaag

SEQ ID NO: 3585311 - RNA, 19 nt, Human
uugaaagaguuaagaaugu

SEQ ID NO: 3585312 - RNA, 20 nt, Human
uugaaagcaaaaaugcuaau

SEQ ID NO: 3585313 - RNA, 21 nt, Human
uugaaaggcauucucugaaga

SEQ ID NO: 3585314 - RNA, 17 nt, Human
uugaaagggaucaucau

SEQ ID NO: 3585315 - RNA, 21 nt, Human
uugaaagguuuuuuuucaguu

SEQ ID NO: 3585316 - RNA, 21 nt, Human
uugaaagugaauaaacuucag

SEQ ID NO: 3585317 - RNA, 17 nt, Human
uugaaaguuuucagaac

SEQ ID NO: 3585318 - RNA, 17 nt, Human
uugaaauaaaaagagua

SEQ ID NO: 3585319 - RNA, 21 nt, Human
uugaaauaagaauucagacau

SEQ ID NO: 3585320 - RNA, 13 nt, Human
uugaaauaccuca

SEQ ID NO: 3585321 - RNA, 19 nt, Human
uugaaauauaaugcaaacc

SEQ ID NO: 3585322 - RNA, 21 nt, Human
uugaaauauggucuuuugguu

SEQ ID NO: 3585323 - RNA, 11 nt, Human
uugaaaucuuu

SEQ ID NO: 3585324 - RNA, 13 nt, Human
uugaaaucuuuua

SEQ ID NO: 3585325 - RNA, 19 nt, Human
uugaaaugaggucuguuua

SEQ ID NO: 3585326 - RNA, 18 nt, Human
uugaaaugcauugcucug

SEQ ID NO: 3585327 - RNA, 21 nt, Human
uugaaauguaaggcuguguaa

SEQ ID NO: 3585328 - RNA, 18 nt, Human
uugaaauguguuucugua

SEQ ID NO: 3585329 - RNA, 20 nt, Human
uugaaauuaagaaggcaaaa

SEQ ID NO: 3585330 - RNA, 17 nt, Human
uugaaauuaugugacau

SEQ ID NO: 3585331 - RNA, 13 nt, Human
uugaaauucuauu

SEQ ID NO: 3585332 - RNA, 13 nt, Human
uugaaauucugaa

SEQ ID NO: 3585333 - RNA, 16 nt, Human
uugaaauucugaauuu

SEQ ID NO: 3585334 - RNA, 13 nt, Human
uugaaauuguaau

SEQ ID NO: 3585335 - RNA, 14 nt, Human
uugaaauuguaauu

SEQ ID NO: 3585336 - RNA, 20 nt, Human
uugaacacaaacuguaaaua

SEQ ID NO: 3585337 - RNA, 18 nt, Human
uugaacacaguauuuucc

SEQ ID NO: 3585338 - RNA, 20 nt, Human
uugaacacucaugcugaaag

SEQ ID NO: 3585339 - RNA, 20 nt, Human
uugaacacuggcuaaagaua

SEQ ID NO: 3585340 - RNA, 14 nt, Human
uugaaccaaaacau

SEQ ID NO: 3585341 - RNA, 15 nt, Human
uugaaccaaaccucc

SEQ ID NO: 3585342 - RNA, 16 nt, Human
uugaaccauaaaaugu

SEQ ID NO: 3585343 - RNA, 15 nt, Human
uugaaccauccacuu

SEQ ID NO: 3585344 - RNA, 16 nt, Human
uugaaccauccacuua

SEQ ID NO: 3585345 - RNA, 12 nt, Human
uugaacccagga

SEQ ID NO: 3585346 - RNA, 16 nt, Human
uugaaccuauuucucu

SEQ ID NO: 3585347 - RNA, 23 nt, Human
uugaaccugugaguaaauauuga

SEQ ID NO: 3585348 - RNA, 17 nt, Human
uugaaccuuugugcccu

SEQ ID NO: 3585349 - RNA, 19 nt, Human
uugaaccuuugugcccuau

SEQ ID NO: 3585350 - RNA, 22 nt, Human
uugaacuaagaaacuuuuguaa

SEQ ID NO: 3585351 - RNA, 17 nt, Human
uugaacuccugaccuca

SEQ ID NO: 3585352 - RNA, 15 nt, Human
uugaacuccuggccu

SEQ ID NO: 3585353 - RNA, 15 nt, Human
uugaacucugagaga

SEQ ID NO: 3585354 - RNA, 14 nt, Human
uugaacucugggcu

SEQ ID NO: 3585355 - RNA, 15 nt, Human
uugaacucugguggc

SEQ ID NO: 3585356 - RNA, 21 nt, Human
uugaacucuucucauuacuug

SEQ ID NO: 3585357 - RNA, 16 nt, Human
uugaacugagcuugga

SEQ ID NO: 3585358 - RNA, 16 nt, Human
uugaacugauaaagau

SEQ ID NO: 3585359 - RNA, 13 nt, Human
uugaacugauuca

SEQ ID NO: 3585360 - RNA, 18 nt, Human
uugaacuggguacuugug

SEQ ID NO: 3585361 - RNA, 22 nt, Human
uugaacuuaaauaaaugucauu

SEQ ID NO: 3585362 - RNA, 16 nt, Human
uugaacuucaccugca

SEQ ID NO: 3585363 - RNA, 17 nt, Human
uugaacuuugaccucug

SEQ ID NO: 3585364 - RNA, 20 nt, Human
uugaacuuugaccucugcag

SEQ ID NO: 3585365 - RNA, 13 nt, Human
uugaacuuuugua

SEQ ID NO: 3585366 - RNA, 14 nt, Human
uugaacuuuuguac

SEQ ID NO: 3585367 - RNA, 19 nt, Human
uugaacuuuuguacugaau

SEQ ID NO: 3585368 - RNA, 16 nt, Human
uugaacuuuuuuccac

SEQ ID NO: 3585369 - RNA, 21 nt, Human
uugaagaauguuaagacuuga

SEQ ID NO: 3585370 - RNA, 12 nt, Human
uugaagacaauu

SEQ ID NO: 3585371 - RNA, 15 nt, Human
uugaagacaauuuga

SEQ ID NO: 3585372 - RNA, 20 nt, Human
uugaagagagauauaucuga

SEQ ID NO: 3585373 - RNA, 18 nt, Human
uugaagagcagcuccuuc

SEQ ID NO: 3585374 - RNA, 22 nt, Human
uugaagauucuauguuaauauu

SEQ ID NO: 3585375 - RNA, 23 nt, Human
uugaagauucuauguuaauauuu

SEQ ID NO: 3585376 - RNA, 20 nt, Human
uugaagcaaaucgaaugaaa

SEQ ID NO: 3585377 - RNA, 20 nt, Human
uugaagcacagugaucaagu

SEQ ID NO: 3585378 - RNA, 15 nt, Human
uugaagcaguugugu

SEQ ID NO: 3585379 - RNA, 23 nt, Human
uugaagcauagauaauauuguuu

SEQ ID NO: 3585380 - RNA, 14 nt, Human
uugaagcauuuuau

SEQ ID NO: 3585381 - RNA, 15 nt, Human
uugaagcauuuuaua

SEQ ID NO: 3585382 - RNA, 20 nt, Human
uugaagccaaguggggugcu

SEQ ID NO: 3585383 - RNA, 15 nt, Human
uugaagccacugccu

SEQ ID NO: 3585384 - RNA, 14 nt, Human
uugaagccaugucu

SEQ ID NO: 3585385 - RNA, 17 nt, Human
uugaagccgacucuggc

SEQ ID NO: 3585386 - RNA, 19 nt, Human
uugaagccgacucuggccc

SEQ ID NO: 3585387 - RNA, 13 nt, Human
uugaagccugccc

SEQ ID NO: 3585388 - RNA, 13 nt, Human
uugaagccugcuc

SEQ ID NO: 3585389 - RNA, 16 nt, Human
uugaagccugcuccuu

SEQ ID NO: 3585390 - RNA, 13 nt, Human
uugaagccuuugu

SEQ ID NO: 3585391 - RNA, 17 nt, Human
uugaagcuaauuauuuu

SEQ ID NO: 3585392 - RNA, 14 nt, Human
uugaagcugaaaau

SEQ ID NO: 3585393 - RNA, 13 nt, Human
uugaaggaaacag

SEQ ID NO: 3585394 - RNA, 14 nt, Human
uugaaggaaacagu

SEQ ID NO: 3585395 - RNA, 17 nt, Human
uugaaggaaagauuugu

SEQ ID NO: 3585396 - RNA, 20 nt, Human
uugaaggaagccaaauuuau

SEQ ID NO: 3585397 - RNA, 21 nt, Human
uugaaggacuaauagaaaagu

SEQ ID NO: 3585398 - RNA, 15 nt, Human
uugaaggaucuguuu

SEQ ID NO: 3585399 - RNA, 14 nt, Human
uugaaggaugcugu

SEQ ID NO: 3585400 - RNA, 18 nt, Human
uugcccuaagcagaaagu

SEQ ID NO: 3585401 - RNA, 12 nt, Human
uugcccucccau

SEQ ID NO: 3585402 - RNA, 13 nt, Human
uugcccugaccuc

SEQ ID NO: 3585403 - RNA, 16 nt, Human
uugcccugcugcccuc

SEQ ID NO: 3585404 - RNA, 18 nt, Human
uugcccugcugcccuccc

SEQ ID NO: 3585405 - RNA, 16 nt, Human
uugcccuggggaucaa

SEQ ID NO: 3585406 - RNA, 10 nt, Human
uugcccuggu

SEQ ID NO: 3585407 - RNA, 14 nt, Human
uugcccuucacagu

SEQ ID NO: 3585408 - RNA, 17 nt, Human
uugcccuucccuguccc

SEQ ID NO: 3585409 - RNA, 19 nt, Human
uugcccuucccugucccuc

SEQ ID NO: 3585410 - RNA, 16 nt, Human
uugcccuugcccugac

SEQ ID NO: 3585411 - RNA, 18 nt, Human
uugcccuuucuguaccau

SEQ ID NO: 3585412 - RNA, 16 nt, Human
uugccgaaacuggaag

SEQ ID NO: 3585413 - RNA, 17 nt, Human
uugccgaaacuggaagu

SEQ ID NO: 3585414 - RNA, 15 nt, Human
uugccgucuaccuga

SEQ ID NO: 3585415 - RNA, 14 nt, Human
uugccguuauuaaa

SEQ ID NO: 3585416 - RNA, 15 nt, Human
uugccuaaauccauu

SEQ ID NO: 3585417 - RNA, 19 nt, Human
uugccuaagcauugccugg

SEQ ID NO: 3585418 - RNA, 23 nt, Human
uugccuaaguauuaaaacauugg

SEQ ID NO: 3585419 - RNA, 19 nt, Human
uugccuaauaaacauccuu

SEQ ID NO: 3585420 - RNA, 18 nt, Human
uugccuaauacauuaaag

SEQ ID NO: 3585421 - RNA, 19 nt, Human
uugccuaauacauuaaagc

SEQ ID NO: 3585422 - RNA, 21 nt, Human
uugccuaauacauuaaagcag

SEQ ID NO: 3585423 - RNA, 17 nt, Human
uugccuacuaugccaga

SEQ ID NO: 3585424 - RNA, 15 nt, Human
uugccuauccugcug

SEQ ID NO: 3585425 - RNA, 16 nt, Human
uugccuauccugcugu

SEQ ID NO: 3585426 - RNA, 20 nt, Human
uugccuauccugcuguucua

SEQ ID NO: 3585427 - RNA, 23 nt, Human
uugccucaaauaaaaagugcuuu

SEQ ID NO: 3585428 - RNA, 22 nt, Human
uugccuccccauuucccaucug

SEQ ID NO: 3585429 - RNA, 14 nt, Human
uugccuccguguca

SEQ ID NO: 3585430 - RNA, 18 nt, Human
uugccucugagagcauca

SEQ ID NO: 3585431 - RNA, 14 nt, Human
uugccucugccucu

SEQ ID NO: 3585432 - RNA, 20 nt, Human
uugccucuguccccuucucu

SEQ ID NO: 3585433 - RNA, 20 nt, Human
uugccugcagagagaagccu

SEQ ID NO: 3585434 - RNA, 13 nt, Human
uugccugcagggc

SEQ ID NO: 3585435 - RNA, 12 nt, Human
uugccugccuuu

SEQ ID NO: 3585436 - RNA, 15 nt, Human
uugccugccuuucca

SEQ ID NO: 3585437 - RNA, 12 nt, Human
uugccuggccuu

SEQ ID NO: 3585438 - RNA, 14 nt, Human
uugccuguaacaag

SEQ ID NO: 3585439 - RNA, 21 nt, Human
uugccuguguauggaaaaacc

SEQ ID NO: 3585440 - RNA, 13 nt, Human
uugccuguucagu

SEQ ID NO: 3585441 - RNA, 20 nt, Human
uugccuguucaguuacagaa

SEQ ID NO: 3585442 - RNA, 16 nt, Human
uugccuuaacuggagc

SEQ ID NO: 3585443 - RNA, 22 nt, Human
uugccuuccagaaaacaaaacu

SEQ ID NO: 3585444 - RNA, 22 nt, Human
uugccuuccuuucuccaggacc

SEQ ID NO: 3585445 - RNA, 23 nt, Human
uugccuuccuuucuccaggacca

SEQ ID NO: 3585446 - RNA, 14 nt, Human
uugccuucucacca

SEQ ID NO: 3585447 - RNA, 23 nt, Human
uugccuucucaccagcugcaaag

SEQ ID NO: 3585448 - RNA, 16 nt, Human
uugccuugacaaacuu

SEQ ID NO: 3585449 - RNA, 20 nt, Human
uugccuugcagaacugccau

SEQ ID NO: 3585450 - RNA, 20 nt, Human
uugccuugggcugcuccuca

SEQ ID NO: 3585451 - RNA, 22 nt, Human
uugccuuuagugaucacagcag

SEQ ID NO: 3585452 - RNA, 11 nt, Human
uugccuuucuc

SEQ ID NO: 3585453 - RNA, 14 nt, Human
uugccuuucugugu

SEQ ID NO: 3585454 - RNA, 17 nt, Human
uugaaggcagaaagcaa

SEQ ID NO: 3585455 - RNA, 15 nt, Human
uugaagggccagagc

SEQ ID NO: 3585456 - RNA, 19 nt, Human
uugaagggccagagccagg

SEQ ID NO: 3585457 - RNA, 19 nt, Human
uugaaggguaaagaaguuu

SEQ ID NO: 3585458 - RNA, 15 nt, Human
uugaagguagaaugu

SEQ ID NO: 3585459 - RNA, 19 nt, Human
uugaagguagaauguuuuc

SEQ ID NO: 3585460 - RNA, 22 nt, Human
uugaaggugauaagggaaaaga

SEQ ID NO: 3585461 - RNA, 15 nt, Human
uugaaguaaacuuuu

SEQ ID NO: 3585462 - RNA, 16 nt, Human
uugaaguaaacuuuuu

SEQ ID NO: 3585463 - RNA, 18 nt, Human
uugaaguaaucccgccac

SEQ ID NO: 3585464 - RNA, 12 nt, Human
uugaaguaauga

SEQ ID NO: 3585465 - RNA, 15 nt, Human
uugaaguacuugcca

SEQ ID NO: 3585466 - RNA, 21 nt, Human
uugaaguacuugccagaaguu

SEQ ID NO: 3585467 - RNA, 19 nt, Human
uugaagucaccuugugugu

SEQ ID NO: 3585468 - RNA, 16 nt, Human
uugaagucuuguauaa

SEQ ID NO: 3585469 - RNA, 20 nt, Human
uugaagucuuuaauaaauaa

SEQ ID NO: 3585470 - RNA, 17 nt, Human
uugaaguguaggcagac

SEQ ID NO: 3585471 - RNA, 18 nt, Human
uugaaguguaggcagaca

SEQ ID NO: 3585472 - RNA, 22 nt, Human
uugaaguguaggcagacacagg

SEQ ID NO: 3585473 - RNA, 23 nt, Human
uugaaguuagcuuuaacuuaaau

SEQ ID NO: 3585474 - RNA, 23 nt, Human
uugaaguugacucugcucuugca

SEQ ID NO: 3585475 - RNA, 19 nt, Human
uugaaguuuacauuuuuau

SEQ ID NO: 3585476 - RNA, 21 nt, Human
uugaauaaaaacuuugcuaaa

SEQ ID NO: 3585477 - RNA, 20 nt, Human
uugaauaaaaauauguacaa

SEQ ID NO: 3585478 - RNA, 21 nt, Human
uugaauaaacaccacuggauu

SEQ ID NO: 3585479 - RNA, 22 nt, Human
uugaauaaacaccacuggauua

SEQ ID NO: 3585480 - RNA, 12 nt, Human
uugaauaaacua

SEQ ID NO: 3585481 - RNA, 14 nt, Human
uugaauaaauguca

SEQ ID NO: 3585482 - RNA, 17 nt, Human
uugaauaaaugucacuu

SEQ ID NO: 3585483 - RNA, 15 nt, Human
uugaauaaggaaaug

SEQ ID NO: 3585484 - RNA, 12 nt, Human
uugaauaauggu

SEQ ID NO: 3585485 - RNA, 22 nt, Human
uugaauaaugguaccagauaaa

SEQ ID NO: 3585486 - RNA, 19 nt, Human
uugaauaccauuaaaacug

SEQ ID NO: 3585487 - RNA, 17 nt, Human
uugaauacuuugaaugu

SEQ ID NO: 3585488 - RNA, 18 nt, Human
uugaauacuuugaaugug

SEQ ID NO: 3585489 - RNA, 15 nt, Human
uugaauaguauugug

SEQ ID NO: 3585490 - RNA, 16 nt, Human
uugaauaguauugugu

SEQ ID NO: 3585491 - RNA, 17 nt, Human
uugaauauccccuccca

SEQ ID NO: 3585492 - RNA, 22 nt, Human
uugaauaucuuucgauaaacaa

SEQ ID NO: 3585493 - RNA, 23 nt, Human
uugaauaugauuaaaaauaucaa

SEQ ID NO: 3585494 - RNA, 22 nt, Human
uugaauauuugucgauauuucc

SEQ ID NO: 3585495 - RNA, 22 nt, Human
uugaaucaauaauauauuuucu

SEQ ID NO: 3585496 - RNA, 23 nt, Human
uugaaucaauaauauauuuucug

SEQ ID NO: 3585497 - RNA, 15 nt, Human
uugaaucacaugaau

SEQ ID NO: 3585498 - RNA, 23 nt, Human
uugaaucauguaguaucaaauau

SEQ ID NO: 3585499 - RNA, 14 nt, Human
uugaauccuuugcc

SEQ ID NO: 3585500 - RNA, 18 nt, Human
uugaaucuauuucacuua

SEQ ID NO: 3585501 - RNA, 21 nt, Human
uugaaucucauaauuuauaca

SEQ ID NO: 3585502 - RNA, 20 nt, Human
uugaaucuugucucaaugcu

SEQ ID NO: 3585503 - RNA, 14 nt, Human
uugaaucuuuaauu

SEQ ID NO: 3585504 - RNA, 15 nt, Human
uugaaucuuuccaau

SEQ ID NO: 3585505 - RNA, 20 nt, Human
uugaaugagaugauucagaa

SEQ ID NO: 3585506 - RNA, 23 nt, Human
uugaaugagaugauucagaaggg

SEQ ID NO: 3585507 - RNA, 16 nt, Human
uugaaugaugccauga

SEQ ID NO: 3585508 - RNA, 15 nt, Human
uugaaugcaaaccau

SEQ ID NO: 3585509 - RNA, 16 nt, Human
uugaaugcauuuuguu

SEQ ID NO: 3585510 - RNA, 14 nt, Human
uugaaugcugccag

SEQ ID NO: 3585511 - RNA, 15 nt, Human
uugaaugcuuuuuga

SEQ ID NO: 3585512 - RNA, 17 nt, Human
uugaaugcuuuuugaau

SEQ ID NO: 3585513 - RNA, 16 nt, Human
uugaauggcuauguuu

SEQ ID NO: 3585514 - RNA, 16 nt, Human
uugaaugguguuguau

SEQ ID NO: 3585515 - RNA, 20 nt, Human
uugaaugguguuguaugccu

SEQ ID NO: 3585516 - RNA, 18 nt, Human
uugaauguaugcuucaua

SEQ ID NO: 3585517 - RNA, 16 nt, Human
uugaaugucuuuugaa

SEQ ID NO: 3585518 - RNA, 21 nt, Human
uugaauguggcuugagaaaua

SEQ ID NO: 3585519 - RNA, 16 nt, Human
uugaauguuaagaauu

SEQ ID NO: 3585520 - RNA, 17 nt, Human
uugaauguuaagaauug

SEQ ID NO: 3585521 - RNA, 23 nt, Human
uugaauguuauuuguuauuuuca

SEQ ID NO: 3585522 - RNA, 14 nt, Human
uugaauuaaaacuu

SEQ ID NO: 3585523 - RNA, 16 nt, Human
uugaauuaaaacuucu

SEQ ID NO: 3585524 - RNA, 19 nt, Human
uugaauuaaauguucaucu

SEQ ID NO: 3585525 - RNA, 22 nt, Human
uugaauuaaauuaggaauaaau

SEQ ID NO: 3585526 - RNA, 23 nt, Human
uugaauuaauaucccuacaugua

SEQ ID NO: 3585527 - RNA, 14 nt, Human
uugaauuagaaaca

SEQ ID NO: 3585528 - RNA, 22 nt, Human
uugaauuaucuugguugaaaau

SEQ ID NO: 3585529 - RNA, 21 nt, Human
uugaauucuugguugaggaaa

SEQ ID NO: 3585530 - RNA, 14 nt, Human
uugaauuguuacau

SEQ ID NO: 3585531 - RNA, 14 nt, Human
uugaauuuaacaau

SEQ ID NO: 3585532 - RNA, 15 nt, Human
uugaauuuauuggcu

SEQ ID NO: 3585533 - RNA, 23 nt, Human
uugaauuuauuuuuaagaaagaa

SEQ ID NO: 3585534 - RNA, 16 nt, Human
uugaauuuuaaaucua

SEQ ID NO: 3585535 - RNA, 23 nt, Human
uugaauuuucaagcaucuccuga

SEQ ID NO: 3585536 - RNA, 18 nt, Human
uugaauuuucccacugca

SEQ ID NO: 3585537 - RNA, 21 nt, Human
uugaauuuuguguuagagauu

SEQ ID NO: 3585538 - RNA, 20 nt, Human
uugaauuuuguucucuggga

SEQ ID NO: 3585539 - RNA, 17 nt, Human
uugaauuuuuccuaugc

SEQ ID NO: 3585540 - RNA, 19 nt, Human
uugacaaaauguuauuucc

SEQ ID NO: 3585541 - RNA, 12 nt, Human
uugacaaaauuu

SEQ ID NO: 3585542 - RNA, 17 nt, Human
uugacaaaauuuucuca

SEQ ID NO: 3585543 - RNA, 18 nt, Human
uugacaaaauuuucucau

SEQ ID NO: 3585544 - RNA, 17 nt, Human
uugacaaaucuguguau

SEQ ID NO: 3585545 - RNA, 22 nt, Human
uugacaaaucuguguauauuau

SEQ ID NO: 3585546 - RNA, 14 nt, Human
uugacaacaaauua

SEQ ID NO: 3585547 - RNA, 12 nt, Human
uugacaacaucu

SEQ ID NO: 3585548 - RNA, 21 nt, Human
uugauucaccuccuaaaacaa

SEQ ID NO: 3585549 - RNA, 17 nt, Human
uugauucagacagcugc

SEQ ID NO: 3585550 - RNA, 14 nt, Human
uugauuccaucucc

SEQ ID NO: 3585551 - RNA, 13 nt, Human
uugauucuccuuc

SEQ ID NO: 3585552 - RNA, 17 nt, Human
uugauucuccuucagcc

SEQ ID NO: 3585553 - RNA, 23 nt, Human
uugauucuccuuuuauguguagu

SEQ ID NO: 3585554 - RNA, 13 nt, Human
uugauucucucca

SEQ ID NO: 3585555 - RNA, 14 nt, Human
uugauucucuccau

SEQ ID NO: 3585556 - RNA, 21 nt, Human
uugauugagaguaacuuaagu

SEQ ID NO: 3585557 - RNA, 23 nt, Human
uugauugcuaaauguaacagucu

SEQ ID NO: 3585558 - RNA, 15 nt, Human
uugauugcugugucc

SEQ ID NO: 3585559 - RNA, 22 nt, Human
uugauugggaaaacauuugcug

SEQ ID NO: 3585560 - RNA, 21 nt, Human
uugauugucagcuacuaauga

SEQ ID NO: 3585561 - RNA, 11 nt, Human
uugauuuacag

SEQ ID NO: 3585562 - RNA, 15 nt, Human
uugauuuauuaacuu

SEQ ID NO: 3585563 - RNA, 17 nt, Human
uugauuuauuaacuuaa

SEQ ID NO: 3585564 - RNA, 18 nt, Human
uugauuucccuucuucug

SEQ ID NO: 3585565 - RNA, 22 nt, Human
uugauuucuaguuauuuauucu

SEQ ID NO: 3585566 - RNA, 15 nt, Human
uugauuugcauugaa

SEQ ID NO: 3585567 - RNA, 13 nt, Human
uugauuuuacaau

SEQ ID NO: 3585568 - RNA, 20 nt, Human
uugauuuuuacguuugaaga

SEQ ID NO: 3585569 - RNA, 20 nt, Human
uugauuuuugccucuuccag

SEQ ID NO: 3585570 - RNA, 19 nt, Human
uugcaaaaacuacaaccaa

SEQ ID NO: 3585571 - RNA, 19 nt, Human
uugcaaaauagcauuuguu

SEQ ID NO: 3585572 - RNA, 16 nt, Human
uugcaaaauuuccagu

SEQ ID NO: 3585573 - RNA, 22 nt, Human
uugcaaaauuuccaguaccuuu

SEQ ID NO: 3585574 - RNA, 13 nt, Human
uugcaaagaaaga

SEQ ID NO: 3585575 - RNA, 19 nt, Human
uugcaaagaaagaaaaaaa

SEQ ID NO: 3585576 - RNA, 11 nt, Human
uugcaaagcaa

SEQ ID NO: 3585577 - RNA, 13 nt, Human
uugcaaaguacug

SEQ ID NO: 3585578 - RNA, 17 nt, Human
uugcaaaguauuguaaa

SEQ ID NO: 3585579 - RNA, 16 nt, Human
uugcaaauauaaacau

SEQ ID NO: 3585580 - RNA, 12 nt, Human
uugcaaaucuug

SEQ ID NO: 3585581 - RNA, 15 nt, Human
uugcaaaucuugaaa

SEQ ID NO: 3585582 - RNA, 22 nt, Human
uugcaaauguaguauggccugu

SEQ ID NO: 3585583 - RNA, 13 nt, Human
uugcaacacacag

SEQ ID NO: 3585584 - RNA, 14 nt, Human
uugcaacaggcugg

SEQ ID NO: 3585585 - RNA, 17 nt, Human
uugcaacaggcugggcu

SEQ ID NO: 3585586 - RNA, 12 nt, Human
uugcaaccacug

SEQ ID NO: 3585587 - RNA, 13 nt, Human
uugcaaccaggaa

SEQ ID NO: 3585588 - RNA, 19 nt, Human
uugcaagaugugaauuauu

SEQ ID NO: 3585589 - RNA, 16 nt, Human
uugcaagccuccugau

SEQ ID NO: 3585590 - RNA, 13 nt, Human
uugcaaggaagcc

SEQ ID NO: 3585591 - RNA, 19 nt, Human
uugcaagggaaaagucucu

SEQ ID NO: 3585592 - RNA, 21 nt, Human
uugcaaguauguuuuagcaug

SEQ ID NO: 3585593 - RNA, 15 nt, Human
uugcaagucauggcu

SEQ ID NO: 3585594 - RNA, 15 nt, Human
uugcaagugaagguu

SEQ ID NO: 3585595 - RNA, 18 nt, Human
uugcaagugaagguuuac

SEQ ID NO: 3585596 - RNA, 14 nt, Human
uugcaagugcugga

SEQ ID NO: 3585597 - RNA, 16 nt, Human
uugcaagugcuggagu

SEQ ID NO: 3585598 - RNA, 14 nt, Human
uugcaauaacagcu

SEQ ID NO: 3585599 - RNA, 17 nt, Human
uugcaauaacagcugca

SEQ ID NO: 3585600 - RNA, 20 nt, Human
uugcaauaacagcugcaauu

SEQ ID NO: 3585601 - RNA, 16 nt, Human
uugcaauggcagccuu

SEQ ID NO: 3585602 - RNA, 19 nt, Human
uugcaauggcagccuuggc

SEQ ID NO: 3585603 - RNA, 20 nt, Human
uugcaaugguguugcccuga

SEQ ID NO: 3585604 - RNA, 15 nt, Human
uugcaauuccugcuc

SEQ ID NO: 3585605 - RNA, 20 nt, Human
uugcaauuuuaacacacaua

SEQ ID NO: 3585606 - RNA, 15 nt, Human
uugcacaaaaagaua

SEQ ID NO: 3585607 - RNA, 22 nt, Human
uugcacaaaaagauaccuuaaa

SEQ ID NO: 3585608 - RNA, 19 nt, Human
uugcacaaaccaauuaaac

SEQ ID NO: 3585609 - RNA, 21 nt, Human
uugcacaauauugaacuuuuu

SEQ ID NO: 3585610 - RNA, 17 nt, Human
uugcacacaucaucugu

SEQ ID NO: 3585611 - RNA, 20 nt, Human
uugcacacaucaucuguaag

SEQ ID NO: 3585612 - RNA, 21 nt, Human
uugcacacccacucagcuccg

SEQ ID NO: 3585613 - RNA, 22 nt, Human
uugcacacuccccugcacugga

SEQ ID NO: 3585614 - RNA, 13 nt, Human
uugcacacuugug

SEQ ID NO: 3585615 - RNA, 23 nt, Human
uugcacagaaguccuguaugucu

SEQ ID NO: 3585616 - RNA, 15 nt, Human
uugcacagcaucuca

SEQ ID NO: 3585617 - RNA, 19 nt, Human
uugcacagccaaauuuaaa

SEQ ID NO: 3585618 - RNA, 16 nt, Human
uugcacagcuaugaag

SEQ ID NO: 3585619 - RNA, 21 nt, Human
uugcacagucacugcucuuca

SEQ ID NO: 3585620 - RNA, 11 nt, Human
uugcacauuaa

SEQ ID NO: 3585621 - RNA, 15 nt, Human
uugcacccagcccug

SEQ ID NO: 3585622 - RNA, 21 nt, Human
uugcaccccaaagcuuuccug

SEQ ID NO: 3585623 - RNA, 19 nt, Human
uugcaccccaugcuguuga

SEQ ID NO: 3585624 - RNA, 24 nt, Human
uugcaccccucacucuggccucag

SEQ ID NO: 3585625 - RNA, 15 nt, Human
uugcaccccucccau

SEQ ID NO: 3585626 - RNA, 13 nt, Human
uugcaccuguccc

SEQ ID NO: 3585627 - RNA, 19 nt, Human
uugcacgacgcccucuccc

SEQ ID NO: 3585628 - RNA, 20 nt, Human
uugcacgcgcccuuucuacc

SEQ ID NO: 3585629 - RNA, 14 nt, Human
uugcacguguguuu

SEQ ID NO: 3585630 - RNA, 23 nt, Human
uugcacguguguuuuucuauuaa

SEQ ID NO: 3585631 - RNA, 16 nt, Human
uugcacuaagauauuu

SEQ ID NO: 3585632 - RNA, 16 nt, Human
uugcacucaaaucuua

SEQ ID NO: 3585633 - RNA, 15 nt, Human
uugcacuccagccug

SEQ ID NO: 3585634 - RNA, 19 nt, Human
uugcacucuaaaagguuca

SEQ ID NO: 3585635 - RNA, 22 nt, Human
uugcacucuaaaagguucaggg

SEQ ID NO: 3585636 - RNA, 12 nt, Human
uugcacugaagu

SEQ ID NO: 3585637 - RNA, 17 nt, Human
uugcacuggaguucuau

SEQ ID NO: 3585638 - RNA, 20 nt, Human
uugcacuugugauuauuuau

SEQ ID NO: 3585639 - RNA, 12 nt, Human
uugcacuuugua

SEQ ID NO: 3585640 - RNA, 14 nt, Human
uugcacuuuguagu

SEQ ID NO: 3585641 - RNA, 20 nt, Human
uugcagaaaagcaccugccg

SEQ ID NO: 3585642 - RNA, 17 nt, Human
uugcagaaaauucugug

SEQ ID NO: 3585643 - RNA, 11 nt, Human
uugcagaacug

SEQ ID NO: 3585644 - RNA, 16 nt, Human
uugcagaacugccauu

SEQ ID NO: 3585645 - RNA, 21 nt, Human
uugcagaacuugaagccugcu

SEQ ID NO: 3585646 - RNA, 20 nt, Human
uugcagaagaggguguguuu

SEQ ID NO: 3585647 - RNA, 16 nt, Human
uugcagacaggcaagc

SEQ ID NO: 3585648 - RNA, 13 nt, Human
uugcagacuagaa

SEQ ID NO: 3585649 - RNA, 19 nt, Human
uugcagacucaguuuguca

SEQ ID NO: 3585650 - RNA, 19 nt, Human
uugcagagacaggaccuga

SEQ ID NO: 3585651 - RNA, 12 nt, Human
uugcagcaguga

SEQ ID NO: 3585652 - RNA, 22 nt, Human
uugcagcccugcugcugccugc

SEQ ID NO: 3585653 - RNA, 23 nt, Human
uugcagccugcucuagugggaca

SEQ ID NO: 3585654 - RNA, 19 nt, Human
uugcagcgauuaauaacag

SEQ ID NO: 3585655 - RNA, 17 nt, Human
uugcagcucccauucua

SEQ ID NO: 3585656 - RNA, 18 nt, Human
uugcagcugggagaaggg

SEQ ID NO: 3585657 - RNA, 20 nt, Human
uugcagcuguuuuguugaca

SEQ ID NO: 3585658 - RNA, 21 nt, Human
uugcagcuguuuuguugacau

SEQ ID NO: 3585659 - RNA, 12 nt, Human
uugcagggcagc

SEQ ID NO: 3585660 - RNA, 14 nt, Human
uugcagggcagccc

SEQ ID NO: 3585661 - RNA, 23 nt, Human
uugcaggguccucuucugggccu

SEQ ID NO: 3585662 - RNA, 19 nt, Human
uugcagguggaacucaguc

SEQ ID NO: 3585663 - RNA, 20 nt, Human
uugcagguggaacucaguca

SEQ ID NO: 3585664 - RNA, 14 nt, Human
uugcagguggccaa

SEQ ID NO: 3585665 - RNA, 23 nt, Human
uugcaguaucggcacuguacaaa

SEQ ID NO: 3585666 - RNA, 22 nt, Human
uugcagucacucuagucaauga

SEQ ID NO: 3585667 - RNA, 13 nt, Human
uugcagucccaag

SEQ ID NO: 3585668 - RNA, 23 nt, Human
uugcaguccuuuuacuacagcua

SEQ ID NO: 3585669 - RNA, 13 nt, Human
uugcagugagcca

SEQ ID NO: 3585670 - RNA, 15 nt, Human
uugcagugagcugag

SEQ ID NO: 3585671 - RNA, 21 nt, Human
uugcaguucccacauuaaaga

SEQ ID NO: 3585672 - RNA, 18 nt, Human
uugcaguuuaucauucaa

SEQ ID NO: 3585673 - RNA, 20 nt, Human
uugcaguuuaucauucaagu

SEQ ID NO: 3585674 - RNA, 14 nt, Human
uugcauaaagcaua

SEQ ID NO: 3585675 - RNA, 19 nt, Human
uugcauaacaauuccucua

SEQ ID NO: 3585676 - RNA, 21 nt, Human
uugcauaauaagcuaaagagg

SEQ ID NO: 3585677 - RNA, 16 nt, Human
uugcauacuauuaaac

SEQ ID NO: 3585678 - RNA, 19 nt, Human
uugcauacuauuaaacaug

SEQ ID NO: 3585679 - RNA, 17 nt, Human
uugcauacuuuguauuu

SEQ ID NO: 3585680 - RNA, 17 nt, Human
uugcauauaacuuauau

SEQ ID NO: 3585681 - RNA, 14 nt, Human
uugcauauauacau

SEQ ID NO: 3585682 - RNA, 14 nt, Human
uugcauauguauga

SEQ ID NO: 3585683 - RNA, 19 nt, Human
uugcauauuauaaaggaua

SEQ ID NO: 3585684 - RNA, 17 nt, Human
uugcauauugcauacua

SEQ ID NO: 3585685 - RNA, 18 nt, Human
uugcauauuuuguaacuu

SEQ ID NO: 3585686 - RNA, 20 nt, Human
uugcaucaccucuguaauuu

SEQ ID NO: 3585687 - RNA, 23 nt, Human
uugcaucaguauuaauacuaaaa

SEQ ID NO: 3585688 - RNA, 18 nt, Human
uugcauccaacuccagga

SEQ ID NO: 3585689 - RNA, 23 nt, Human
uugcaucccaaaccacgccucuu

SEQ ID NO: 3585690 - RNA, 15 nt, Human
uugcauccuuccuau

SEQ ID NO: 3585691 - RNA, 14 nt, Human
uugcaucugaaaua

SEQ ID NO: 3585692 - RNA, 20 nt, Human
uugcaucuggguagcuguaa

SEQ ID NO: 3585693 - RNA, 13 nt, Human
uugcaucuguaua

SEQ ID NO: 3585694 - RNA, 22 nt, Human
uugcaugcugcuuuaauuguga

SEQ ID NO: 3585695 - RNA, 19 nt, Human
uugcauggcacuugcaucu

SEQ ID NO: 3585696 - RNA, 19 nt, Human
uugcauggcaucaccucca

SEQ ID NO: 3585697 - RNA, 18 nt, Human
uugcaugggcuaaugaag

SEQ ID NO: 3585698 - RNA, 13 nt, Human
uugcauguaguaa

SEQ ID NO: 3585699 - RNA, 17 nt, Human
uugcauguaguaacacu

SEQ ID NO: 3585700 - RNA, 19 nt, Human
uugcauguaguaacacuaa

SEQ ID NO: 3585701 - RNA, 14 nt, Human
uugcaugugaaaau

SEQ ID NO: 3585702 - RNA, 17 nt, Human
uugcauguuauguuuaa

SEQ ID NO: 3585703 - RNA, 19 nt, Human
uugcauguuccacuaaccc

SEQ ID NO: 3585704 - RNA, 16 nt, Human
uugcauucuuauucau

SEQ ID NO: 3585705 - RNA, 19 nt, Human
uugcauugacuuuccccac

SEQ ID NO: 3585706 - RNA, 15 nt, Human
uugcauugucugucu

SEQ ID NO: 3585707 - RNA, 18 nt, Human
uugccaaaaagugaaaua

SEQ ID NO: 3585708 - RNA, 19 nt, Human
uugccaaaaagugaaauaa

SEQ ID NO: 3585709 - RNA, 23 nt, Human
uugccaaaacccagcugcacccc

SEQ ID NO: 3585710 - RNA, 15 nt, Human
uugccaaaauaaugu

SEQ ID NO: 3585711 - RNA, 22 nt, Human
uugccaaaauaaugucuuguua

SEQ ID NO: 3585712 - RNA, 14 nt, Human
uugccaaacauuaa

SEQ ID NO: 3585713 - RNA, 21 nt, Human
uugccaaacauuaauguugau

SEQ ID NO: 3585714 - RNA, 16 nt, Human
uugccaaauauguccu

SEQ ID NO: 3585715 - RNA, 22 nt, Human
uugccaagacaaaucaacagaa

SEQ ID NO: 3585716 - RNA, 17 nt, Human
uugccaagaccuuucaa

SEQ ID NO: 3585717 - RNA, 23 nt, Human
uugccaagggcccaaagaaagag

SEQ ID NO: 3585718 - RNA, 19 nt, Human
uugccaauuugcacauuaa

SEQ ID NO: 3585719 - RNA, 22 nt, Human
uugccaauuugcacauuaaaug

SEQ ID NO: 3585720 - RNA, 13 nt, Human
uugccacagcucu

SEQ ID NO: 3585721 - RNA, 22 nt, Human
uugccacagcuggagcucucaa

SEQ ID NO: 3585722 - RNA, 13 nt, Human
uugccacagcuuu

SEQ ID NO: 3585723 - RNA, 19 nt, Human
uugccacaggccucccugu

SEQ ID NO: 3585724 - RNA, 19 nt, Human
uugccaccaacuggcccuc

SEQ ID NO: 3585725 - RNA, 13 nt, Human
uugccacccucau

SEQ ID NO: 3585726 - RNA, 16 nt, Human
uugccacuaauuuuag

SEQ ID NO: 3585727 - RNA, 21 nt, Human
uugccacuaauuuuaguauuc

SEQ ID NO: 3585728 - RNA, 20 nt, Human
uugccacugauauucagaau

SEQ ID NO: 3585729 - RNA, 15 nt, Human
uugccacuuugcacg

SEQ ID NO: 3585730 - RNA, 17 nt, Human
uugccagcugcugagcc

SEQ ID NO: 3585731 - RNA, 20 nt, Human
uugccagcugcugagccgca

SEQ ID NO: 3585732 - RNA, 15 nt, Human
uugccagcugcugcu

SEQ ID NO: 3585733 - RNA, 19 nt, Human
uugccagcugcugcuggau

SEQ ID NO: 3585734 - RNA, 16 nt, Human
uugccaggacaugcaa

SEQ ID NO: 3585735 - RNA, 19 nt, Human
uugccaggcuggagugcag

SEQ ID NO: 3585736 - RNA, 14 nt, Human
uugccagugucuuu

SEQ ID NO: 3585737 - RNA, 17 nt, Human
uugccagugucuuucuu

SEQ ID NO: 3585738 - RNA, 20 nt, Human
uugccaguuguccuccuucc

SEQ ID NO: 3585739 - RNA, 13 nt, Human
uugccauauugca

SEQ ID NO: 3585740 - RNA, 22 nt, Human
uugccauauugcacaugucuua

SEQ ID NO: 3585741 - RNA, 13 nt, Human
uugccaucccucc

SEQ ID NO: 3585742 - RNA, 17 nt, Human
uugccaucccucccucc

SEQ ID NO: 3585743 - RNA, 18 nt, Human
uugccaucccucccucca

SEQ ID NO: 3585744 - RNA, 20 nt, Human
uugccaugacaacuucuaau

SEQ ID NO: 3585745 - RNA, 13 nt, Human
uugccaugugcuu

SEQ ID NO: 3585746 - RNA, 20 nt, Human
uugccaugugcuucugccac

SEQ ID NO: 3585747 - RNA, 14 nt, Human
uugccauguugcca

SEQ ID NO: 3585748 - RNA, 21 nt, Human
uugcccaacaccagccccugc

SEQ ID NO: 3585749 - RNA, 15 nt, Human
uugcccaaccucagc

SEQ ID NO: 3585750 - RNA, 23 nt, Human
uugcccacgcuggagugcaguga

SEQ ID NO: 3585751 - RNA, 22 nt, Human
uugcccacuccugcucugcucg

SEQ ID NO: 3585752 - RNA, 17 nt, Human
uugcccagagaugccuc

SEQ ID NO: 3585753 - RNA, 18 nt, Human
uugcccagagaugccucc

SEQ ID NO: 3585754 - RNA, 19 nt, Human
uugcccagagaugccucca

SEQ ID NO: 3585755 - RNA, 16 nt, Human
uugcccagccucuuuc

SEQ ID NO: 3585756 - RNA, 19 nt, Human
uugcccagccucuuucccu

SEQ ID NO: 3585757 - RNA, 17 nt, Human
uugcccaggcuggagug

SEQ ID NO: 3585758 - RNA, 14 nt, Human
uugcccaggcuggc

SEQ ID NO: 3585759 - RNA, 17 nt, Human
uugcccagggcucagcc

SEQ ID NO: 3585760 - RNA, 19 nt, Human
uugcccagggcucagccug

SEQ ID NO: 3585761 - RNA, 20 nt, Human
uugcccagggcucagccugg

SEQ ID NO: 3585762 - RNA, 13 nt, Human
uugcccauccuga

SEQ ID NO: 3585763 - RNA, 16 nt, Human
uugcccauuuacacuu

SEQ ID NO: 3585764 - RNA, 14 nt, Human
uugccccaaccccc

SEQ ID NO: 3585765 - RNA, 18 nt, Human
uugccccaacccuucuuc

SEQ ID NO: 3585766 - RNA, 21 nt, Human
uugcccccaaacccccauucu

SEQ ID NO: 3585767 - RNA, 13 nt, Human
uugccccccaccc

SEQ ID NO: 3585768 - RNA, 16 nt, Human
uugccccccaccccag

SEQ ID NO: 3585769 - RNA, 16 nt, Human
uugccccccuggccuc

SEQ ID NO: 3585770 - RNA, 17 nt, Human
uugccccgucucuguuc

SEQ ID NO: 3585771 - RNA, 13 nt, Human
uugccccugagac

SEQ ID NO: 3585772 - RNA, 19 nt, Human
uugcccggauucugggagg

SEQ ID NO: 3585773 - RNA, 16 nt, Human
uuggagggugucccaa

SEQ ID NO: 3585774 - RNA, 23 nt, Human
uuggaguccccucaccuccucua

SEQ ID NO: 3585775 - RNA, 15 nt, Human
uuggagucuuccaaa

SEQ ID NO: 3585776 - RNA, 15 nt, Human
uuggagugcaguggc

SEQ ID NO: 3585777 - RNA, 22 nt, Human
uuggaguucauucauauuacaa

SEQ ID NO: 3585778 - RNA, 17 nt, Human
uuggaguuggaguagaa

SEQ ID NO: 3585779 - RNA, 19 nt, Human
uuggaguuugcauucuuau

SEQ ID NO: 3585780 - RNA, 22 nt, Human
uuggauaacaccaccauucaca

SEQ ID NO: 3585781 - RNA, 13 nt, Human
uuggauccugugu

SEQ ID NO: 3585782 - RNA, 18 nt, Human
uuggauccuguguggaga

SEQ ID NO: 3585783 - RNA, 23 nt, Human
uuggaucucuucuuaauguacau

SEQ ID NO: 3585784 - RNA, 12 nt, Human
uuggaugaguuu

SEQ ID NO: 3585785 - RNA, 24 nt, Human
uuggaugcagugcucgcuguugcu

SEQ ID NO: 3585786 - RNA, 21 nt, Human
uuggauggaguccagggaaga

SEQ ID NO: 3585787 - RNA, 22 nt, Human
uuggaugguguuacauauuaua

SEQ ID NO: 3585788 - RNA, 15 nt, Human
uuggauguaauuuag

SEQ ID NO: 3585789 - RNA, 21 nt, Human
uuggauuaaauacauauggau

SEQ ID NO: 3585790 - RNA, 17 nt, Human
uuggauuauucauuuaa

SEQ ID NO: 3585791 - RNA, 14 nt, Human
uuggauuauuuaau

SEQ ID NO: 3585792 - RNA, 17 nt, Human
uuggauuauuuaauaac

SEQ ID NO: 3585793 - RNA, 23 nt, Human
uuggauuccaugcuaagcaagcu

SEQ ID NO: 3585794 - RNA, 17 nt, Human
uuggauucuaaauacau

SEQ ID NO: 3585795 - RNA, 15 nt, Human
uuggauucuuaugua

SEQ ID NO: 3585796 - RNA, 17 nt, Human
uuggauugacaguaacu

SEQ ID NO: 3585797 - RNA, 17 nt, Human
uuggauuggacaaaaug

SEQ ID NO: 3585798 - RNA, 21 nt, Human
uuggauuggacaaaaugacuu

SEQ ID NO: 3585799 - RNA, 19 nt, Human
uuggauuuaaaagccugcu

SEQ ID NO: 3585800 - RNA, 16 nt, Human
uuggauuuaguuucag

SEQ ID NO: 3585801 - RNA, 12 nt, Human
uuggauuuccua

SEQ ID NO: 3585802 - RNA, 16 nt, Human
uuggauuuuugacucu

SEQ ID NO: 3585803 - RNA, 17 nt, Human
uuggcaaaaaggcagga

SEQ ID NO: 3585804 - RNA, 20 nt, Human
uuggcaaacucuccaccaca

SEQ ID NO: 3585805 - RNA, 20 nt, Human
uuggcaauaguuugcauaga

SEQ ID NO: 3585806 - RNA, 21 nt, Human
uuggcaaugacucaaagucug

SEQ ID NO: 3585807 - RNA, 13 nt, Human
uuggcaauuuugu

SEQ ID NO: 3585808 - RNA, 16 nt, Human
uuggcacagaaacaca

SEQ ID NO: 3585809 - RNA, 17 nt, Human
uuggcaccagacaccca

SEQ ID NO: 3585810 - RNA, 20 nt, Human
uuggcaccagacacccagga

SEQ ID NO: 3585811 - RNA, 19 nt, Human
uuggcaccuaauccaggca

SEQ ID NO: 3585812 - RNA, 23 nt, Human
uuggcaccuucccccucccccag

SEQ ID NO: 3585813 - RNA, 14 nt, Human
uuggcacucacaga

SEQ ID NO: 3585814 - RNA, 15 nt, Human
uuggcagcaccuguc

SEQ ID NO: 3585815 - RNA, 14 nt, Human
uuggcagcagauuu

SEQ ID NO: 3585816 - RNA, 21 nt, Human
uuggcagcccgggucaucugu

SEQ ID NO: 3585817 - RNA, 20 nt, Human
uuggcagccuacuagggacc

SEQ ID NO: 3585818 - RNA, 12 nt, Human
uuggcagccuug

SEQ ID NO: 3585819 - RNA, 16 nt, Human
uuggcagccuugugau

SEQ ID NO: 3585820 - RNA, 20 nt, Human
uuggcagguccuggccagau

SEQ ID NO: 3585821 - RNA, 23 nt, Human
uuggcagugagugagccuggcuc

SEQ ID NO: 3585822 - RNA, 19 nt, Human
uuggcaguguuuugagaac

SEQ ID NO: 3585823 - RNA, 20 nt, Human
uuggcauggaaauuuaaagc

SEQ ID NO: 3585824 - RNA, 14 nt, Human
uuggcauggcuuua

SEQ ID NO: 3585825 - RNA, 20 nt, Human
uuggcauguaaauguaaacu

SEQ ID NO: 3585826 - RNA, 14 nt, Human
uuggcauuaaaacu

SEQ ID NO: 3585827 - RNA, 19 nt, Human
uuggcauuccccacuugag

SEQ ID NO: 3585828 - RNA, 15 nt, Human
uuggccaaacaagug

SEQ ID NO: 3585829 - RNA, 15 nt, Human
uuggccaaaguguua

SEQ ID NO: 3585830 - RNA, 21 nt, Human
uuggccacuccgagagguggg

SEQ ID NO: 3585831 - RNA, 22 nt, Human
uuggccagaaaccuuccugcug

SEQ ID NO: 3585832 - RNA, 14 nt, Human
uuggccaggcuggu

SEQ ID NO: 3585833 - RNA, 19 nt, Human
uuggccauauuuaccucag

SEQ ID NO: 3585834 - RNA, 22 nt, Human
uuggccauauuuaccucagccu

SEQ ID NO: 3585835 - RNA, 12 nt, Human
uuggccaucugc

SEQ ID NO: 3585836 - RNA, 19 nt, Human
uuggccaugcagaaagcau

SEQ ID NO: 3585837 - RNA, 22 nt, Human
uuggcccaggaguuuggccaga

SEQ ID NO: 3585838 - RNA, 20 nt, Human
uuggcccaggauuauuguca

SEQ ID NO: 3585839 - RNA, 18 nt, Human
uuggccccugcccggcug

SEQ ID NO: 3585840 - RNA, 19 nt, Human
uuggccggcugugcucaga

SEQ ID NO: 3585841 - RNA, 23 nt, Human
uuggccuagcccacccugcugcc

SEQ ID NO: 3585842 - RNA, 20 nt, Human
uuggccuaucuccuagggcu

SEQ ID NO: 3585843 - RNA, 12 nt, Human
uuggccucagaa

SEQ ID NO: 3585844 - RNA, 23 nt, Human
uuggccugagaugccuggugagc

SEQ ID NO: 3585845 - RNA, 16 nt, Human
uuggccuggagguggg

SEQ ID NO: 3585846 - RNA, 12 nt, Human
uuggccugggcc

SEQ ID NO: 3585847 - RNA, 19 nt, Human
uuggcgcacccuccccucc

SEQ ID NO: 3585848 - RNA, 15 nt, Human
uuggcgcuauuacaa

SEQ ID NO: 3585849 - RNA, 22 nt, Human
uuggcgcugccccuggcagccc

SEQ ID NO: 3585850 - RNA, 23 nt, Human
uuggcgcugccccuggcagcccc

SEQ ID NO: 3585851 - RNA, 22 nt, Human
uuggcggggaggaggaaauccc

SEQ ID NO: 3585852 - RNA, 22 nt, Human
uuggcguagcagaguuaaaucu

SEQ ID NO: 3585853 - RNA, 18 nt, Human
uuggcguaggcuacagag

SEQ ID NO: 3585854 - RNA, 13 nt, Human
uuggcgugacccg

SEQ ID NO: 3585855 - RNA, 21 nt, Human
uuggcuagagguucaaagaua

SEQ ID NO: 3585856 - RNA, 22 nt, Human
uuggcuaggaccccuccaugug

SEQ ID NO: 3585857 - RNA, 16 nt, Human
uuggcuauuuaaaacu

SEQ ID NO: 3585858 - RNA, 17 nt, Human
uuggcuauuuaaaacuu

SEQ ID NO: 3585859 - RNA, 22 nt, Human
uuggcucccaucuuuuguuacu

SEQ ID NO: 3585860 - RNA, 22 nt, Human
uuggcuccugcccacugauagc

SEQ ID NO: 3585861 - RNA, 12 nt, Human
uuggcucugagg

SEQ ID NO: 3585862 - RNA, 14 nt, Human
uuggcucugccagu

SEQ ID NO: 3585863 - RNA, 13 nt, Human
uuggcucuggaga

SEQ ID NO: 3585864 - RNA, 19 nt, Human
uuggcucuggagacagccc

SEQ ID NO: 3585865 - RNA, 19 nt, Human
uuggcugaaauucuccugg

SEQ ID NO: 3585866 - RNA, 20 nt, Human
uuggcugaaauucuccugga

SEQ ID NO: 3585867 - RNA, 11 nt, Human
uuggcugcuga

SEQ ID NO: 3585868 - RNA, 17 nt, Human
uuggcuggacccagcca

SEQ ID NO: 3585869 - RNA, 23 nt, Human
uuggcuggaugaaauuuucuaga

SEQ ID NO: 3585870 - RNA, 16 nt, Human
uuggcugggcccagaa

SEQ ID NO: 3585871 - RNA, 17 nt, Human
uuggcugggcccagaag

SEQ ID NO: 3585872 - RNA, 22 nt, Human
uuggcugggggccucagugcca

SEQ ID NO: 3585873 - RNA, 11 nt, Human
uuggcugggua

SEQ ID NO: 3585874 - RNA, 14 nt, Human
uuggcuuaaauaua

SEQ ID NO: 3585875 - RNA, 15 nt, Human
uuggcuuaaauauag

SEQ ID NO: 3585876 - RNA, 17 nt, Human
uuggcuuacugcagccu

SEQ ID NO: 3585877 - RNA, 19 nt, Human
uuggcuuauaauucuuuca

SEQ ID NO: 3585878 - RNA, 23 nt, Human
uuggcuucacggaagagccuugc

SEQ ID NO: 3585879 - RNA, 11 nt, Human
uuggcuucugu

SEQ ID NO: 3585880 - RNA, 14 nt, Human
uuggcuuuauccuc

SEQ ID NO: 3585881 - RNA, 17 nt, Human
uuggcuuuaugcacauu

SEQ ID NO: 3585882 - RNA, 16 nt, Human
uuggcuuuccagucau

SEQ ID NO: 3585883 - RNA, 22 nt, Human
uuggcuuuggguugcaggaccu

SEQ ID NO: 3585884 - RNA, 19 nt, Human
uuggcuuuucugauccagu

SEQ ID NO: 3585885 - RNA, 13 nt, Human
uugggaaaacaug

SEQ ID NO: 3585886 - RNA, 16 nt, Human
uugggaaaacauuugc

SEQ ID NO: 3585887 - RNA, 22 nt, Human
uugggaaccaagcuauuccuuu

SEQ ID NO: 3585888 - RNA, 19 nt, Human
uugggaauauccauguacu

SEQ ID NO: 3585889 - RNA, 17 nt, Human
uugggaauauuugaauc

SEQ ID NO: 3585890 - RNA, 18 nt, Human
uugggaauggauccugga

SEQ ID NO: 3585891 - RNA, 14 nt, Human
uugggaauguuugu

SEQ ID NO: 3585892 - RNA, 20 nt, Human
uuuaauaaaaaggcaccuau

SEQ ID NO: 3585893 - RNA, 16 nt, Human
uuuaauaaaauaauuc

SEQ ID NO: 3585894 - RNA, 17 nt, Human
uuuaauaaaauaauucu

SEQ ID NO: 3585895 - RNA, 21 nt, Human
uuuaauaaagcgaaaaacuca

SEQ ID NO: 3585896 - RNA, 14 nt, Human
uuuaauaaauuuau

SEQ ID NO: 3585897 - RNA, 23 nt, Human
uuuaauaacauuaccuuacugug

SEQ ID NO: 3585898 - RNA, 14 nt, Human
uuuaauaauuauau

SEQ ID NO: 3585899 - RNA, 14 nt, Human
uuuaauacagcagu

SEQ ID NO: 3585900 - RNA, 17 nt, Human
uuuaauagaauauaauu

SEQ ID NO: 3585901 - RNA, 17 nt, Human
uuuaauaguguuaauca

SEQ ID NO: 3585902 - RNA, 23 nt, Human
uuuaauauaaaguuuuauauauu

SEQ ID NO: 3585903 - RNA, 18 nt, Human
uuuaauauaaaugcaaau

SEQ ID NO: 3585904 - RNA, 14 nt, Human
uuuaauauagcuau

SEQ ID NO: 3585905 - RNA, 16 nt, Human
uuuaauauagcuauuu

SEQ ID NO: 3585906 - RNA, 13 nt, Human
uuuaauaucuuca

SEQ ID NO: 3585907 - RNA, 15 nt, Human
uuuaauaugaaauuu

SEQ ID NO: 3585908 - RNA, 16 nt, Human
uuuaauaugaaauuuu

SEQ ID NO: 3585909 - RNA, 18 nt, Human
uuuaauauggguucuuuu

SEQ ID NO: 3585910 - RNA, 13 nt, Human
uuuaauauguauu

SEQ ID NO: 3585911 - RNA, 15 nt, Human
uuuaauauuaaagcc

SEQ ID NO: 3585912 - RNA, 15 nt, Human
uuuaauauuaccuaa

SEQ ID NO: 3585913 - RNA, 15 nt, Human
uuuaauauugagaaa

SEQ ID NO: 3585914 - RNA, 12 nt, Human
uuuaauauuuaa

SEQ ID NO: 3585915 - RNA, 13 nt, Human
uuuaauauuuaaa

SEQ ID NO: 3585916 - RNA, 17 nt, Human
uuuaaucaaauuuguag

SEQ ID NO: 3585917 - RNA, 12 nt, Human
uuuaaucacuua

SEQ ID NO: 3585918 - RNA, 12 nt, Human
uuuaaucauaua

SEQ ID NO: 3585919 - RNA, 14 nt, Human
uuuaaucaugaaau

SEQ ID NO: 3585920 - RNA, 12 nt, Human
uuuaauccaguu

SEQ ID NO: 3585921 - RNA, 22 nt, Human
uuuaauccccaguaaaauugcc

SEQ ID NO: 3585922 - RNA, 16 nt, Human
uuuaaucuacugcauu

SEQ ID NO: 3585923 - RNA, 17 nt, Human
uuuaaucuacugcauuu

SEQ ID NO: 3585924 - RNA, 21 nt, Human
uuuaaucuccaccagucauuu

SEQ ID NO: 3585925 - RNA, 18 nt, Human
uuuaaucuguuauguacu

SEQ ID NO: 3585926 - RNA, 13 nt, Human
uuuaaucuucagu

SEQ ID NO: 3585927 - RNA, 15 nt, Human
uuuaaucuuuuauga

SEQ ID NO: 3585928 - RNA, 18 nt, Human
uuuaaucuuuuaugauug

SEQ ID NO: 3585929 - RNA, 16 nt, Human
uuuaaugaagaucuaa

SEQ ID NO: 3585930 - RNA, 19 nt, Human
uuuaaugaagaucuaaaua

SEQ ID NO: 3585931 - RNA, 14 nt, Human
uuuaaugagauaau

SEQ ID NO: 3585932 - RNA, 23 nt, Human
uuuaaugcauguuaggaaaauuu

SEQ ID NO: 3585933 - RNA, 18 nt, Human
uuuaaugcauuaaaccug

SEQ ID NO: 3585934 - RNA, 21 nt, Human
uuuaaugcauuaaaccugucu

SEQ ID NO: 3585935 - RNA, 19 nt, Human
uuuaaugcuaaucuuguga

SEQ ID NO: 3585936 - RNA, 15 nt, Human
uuuaaugcuauuuga

SEQ ID NO: 3585937 - RNA, 19 nt, Human
uuuaaugcuucauucaaua

SEQ ID NO: 3585938 - RNA, 21 nt, Human
uuuaauggacaugagauaaug

SEQ ID NO: 3585939 - RNA, 19 nt, Human
uuuaauggcagcagaaaac

SEQ ID NO: 3585940 - RNA, 20 nt, Human
uuuaauggccggcuggaaau

SEQ ID NO: 3585941 - RNA, 19 nt, Human
uuuaauggggugcaccugu

SEQ ID NO: 3585942 - RNA, 16 nt, Human
uuuaauguaaagauuu

SEQ ID NO: 3585943 - RNA, 14 nt, Human
uuuaauguagccau

SEQ ID NO: 3585944 - RNA, 18 nt, Human
uuuaauguauaguaaauc

SEQ ID NO: 3585945 - RNA, 20 nt, Human
uuuaauguauaguaaaucac

SEQ ID NO: 3585946 - RNA, 13 nt, Human
uuuaaugugaacu

SEQ ID NO: 3585947 - RNA, 14 nt, Human
uuuaucagauacau

SEQ ID NO: 3585948 - RNA, 16 nt, Human
uuuaucagauacauca

SEQ ID NO: 3585949 - RNA, 20 nt, Human
uuuaucagauacaucacugc

SEQ ID NO: 3585950 - RNA, 23 nt, Human
uuuaucagauugcuuuugugcau

SEQ ID NO: 3585951 - RNA, 12 nt, Human
uuuaucagcagu

SEQ ID NO: 3585952 - RNA, 22 nt, Human
uuuaucagcaguuguuauuaca

SEQ ID NO: 3585953 - RNA, 19 nt, Human
uuuaucagggaaacuaaga

SEQ ID NO: 3585954 - RNA, 16 nt, Human
uuuaucaugaagccug

SEQ ID NO: 3585955 - RNA, 17 nt, Human
uuuaucaugaaugcuuu

SEQ ID NO: 3585956 - RNA, 17 nt, Human
uuuaucauucaagugua

SEQ ID NO: 3585957 - RNA, 17 nt, Human
uuuauccaaaaugugua

SEQ ID NO: 3585958 - RNA, 20 nt, Human
uuuauccaaaauguguauuu

SEQ ID NO: 3585959 - RNA, 22 nt, Human
uuuauccaaaauguguauuucu

SEQ ID NO: 3585960 - RNA, 20 nt, Human
uuuauccacaggaaaguguu

SEQ ID NO: 3585961 - RNA, 16 nt, Human
uuuauccauuuguaau

SEQ ID NO: 3585962 - RNA, 21 nt, Human
uuuaucccaaaguuguuguaa

SEQ ID NO: 3585963 - RNA, 22 nt, Human
uuuauccuagucauucuucccu

SEQ ID NO: 3585964 - RNA, 23 nt, Human
uuuauccuagucauucuucccua

SEQ ID NO: 3585965 - RNA, 20 nt, Human
uuuaucgcugggaaaugaga

SEQ ID NO: 3585966 - RNA, 14 nt, Human
uuuaucguuuuugu

SEQ ID NO: 3585967 - RNA, 12 nt, Human
uuuaucuaaauu

SEQ ID NO: 3585968 - RNA, 15 nt, Human
uuuaucuaaauuaaa

SEQ ID NO: 3585969 - RNA, 15 nt, Human
uuuaucuagauguaa

SEQ ID NO: 3585970 - RNA, 17 nt, Human
uuuaucuagauguaaau

SEQ ID NO: 3585971 - RNA, 20 nt, Human
uuuaucuauauaaaauaacu

SEQ ID NO: 3585972 - RNA, 21 nt, Human
uuuaucuauuguaagauaaaa

SEQ ID NO: 3585973 - RNA, 18 nt, Human
uuuaucucagauguuaaa

SEQ ID NO: 3585974 - RNA, 19 nt, Human
uuuaucucagauguuaaaa

SEQ ID NO: 3585975 - RNA, 13 nt, Human
uuuaucucuauuu

SEQ ID NO: 3585976 - RNA, 14 nt, Human
uuuaucugccucuc

SEQ ID NO: 3585977 - RNA, 20 nt, Human
uuuaucugccucucuuguaa

SEQ ID NO: 3585978 - RNA, 21 nt, Human
uuuaucugccucucuuguaau

SEQ ID NO: 3585979 - RNA, 17 nt, Human
uuuaucuggccccaggu

SEQ ID NO: 3585980 - RNA, 17 nt, Human
uuuaucugggauuaugg

SEQ ID NO: 3585981 - RNA, 16 nt, Human
uuuaucuguucauaug

SEQ ID NO: 3585982 - RNA, 13 nt, Human
uuuaucuguucuu

SEQ ID NO: 3585983 - RNA, 21 nt, Human
uuuaucuuggacugacauuua

SEQ ID NO: 3585984 - RNA, 18 nt, Human
uuuaucuuuauaugaaga

SEQ ID NO: 3585985 - RNA, 18 nt, Human
uuuaucuuugauucuccu

SEQ ID NO: 3585986 - RNA, 12 nt, Human
uuuaucuuuucu

SEQ ID NO: 3585987 - RNA, 16 nt, Human
uuuaucuuuucuacag

SEQ ID NO: 3585988 - RNA, 16 nt, Human
uuuaucuuuuuaccuu

SEQ ID NO: 3585989 - RNA, 13 nt, Human
uuuaugaaaagag

SEQ ID NO: 3585990 - RNA, 11 nt, Human
uuuaugaaaau

SEQ ID NO: 3585991 - RNA, 16 nt, Human
uuuaugaaaauaaaua

SEQ ID NO: 3585992 - RNA, 19 nt, Human
uuuaugaaagguuuacauu

SEQ ID NO: 3585993 - RNA, 12 nt, Human
uuuaugaaauga

SEQ ID NO: 3585994 - RNA, 16 nt, Human
uuuaugacaguaauug

SEQ ID NO: 3585995 - RNA, 19 nt, Human
uuuaugacaguaauugugu

SEQ ID NO: 3585996 - RNA, 13 nt, Human
uuuaugagaaaug

SEQ ID NO: 3585997 - RNA, 19 nt, Human
uuuaugagccagacaaaug

SEQ ID NO: 3585998 - RNA, 18 nt, Human
uuuaugaguaacuauuau

SEQ ID NO: 3585999 - RNA, 21 nt, Human
uuuaugaguaacuauuauuau

SEQ ID NO: 3586000 - RNA, 22 nt, Human
uuuaugaguaacuauuauuaua

SEQ ID NO: 3586001 - RNA, 17 nt, Human
uuuaugauaauagauuc

SEQ ID NO: 3586002 - RNA, 18 nt, Human
uuuaugauaauagauucu

SEQ ID NO: 3586003 - RNA, 19 nt, Human
uuuaugauaauagauucuc

SEQ ID NO: 3586004 - RNA, 14 nt, Human
uuuaugauauuuuu

SEQ ID NO: 3586005 - RNA, 15 nt, Human
uuuaugaucaguguu

SEQ ID NO: 3586006 - RNA, 14 nt, Human
uuuaugaugaugaa

SEQ ID NO: 3586007 - RNA, 12 nt, Human
uuuaugauuuaa

SEQ ID NO: 3586008 - RNA, 17 nt, Human
uuuaugauuuucauaac

SEQ ID NO: 3586009 - RNA, 19 nt, Human
uuuaugcacuuauaaggug

SEQ ID NO: 3586010 - RNA, 14 nt, Human
uuuaugcagauaga

SEQ ID NO: 3586011 - RNA, 16 nt, Human
uuuaugcagugcugcu

SEQ ID NO: 3586012 - RNA, 14 nt, Human
uuuaugccaccuga

SEQ ID NO: 3586013 - RNA, 13 nt, Human
uuuaugcuugcaa

SEQ ID NO: 3586014 - RNA, 13 nt, Human
uuuauggccucag

SEQ ID NO: 3586015 - RNA, 18 nt, Human
uuuaugggccccuggcac

SEQ ID NO: 3586016 - RNA, 22 nt, Human
uuuauggggcugaacggggaga

SEQ ID NO: 3586017 - RNA, 23 nt, Human
uuuaugguccuaaaagcaaaaua

SEQ ID NO: 3586018 - RNA, 16 nt, Human
uuuaugguuucuccag

SEQ ID NO: 3586019 - RNA, 14 nt, Human
uuuauguaaaauuu

SEQ ID NO: 3586020 - RNA, 22 nt, Human
uuuauguaaacugcauuagaaa

SEQ ID NO: 3586021 - RNA, 14 nt, Human
uuuauguaauuuca

SEQ ID NO: 3586022 - RNA, 14 nt, Human
uuuauguacaggau

SEQ ID NO: 3586023 - RNA, 19 nt, Human
uuuauguauugugcaaugu

SEQ ID NO: 3586024 - RNA, 14 nt, Human
uuuaugucuaaaga

SEQ ID NO: 3586025 - RNA, 18 nt, Human
uuuaugucuauuuaagcc

SEQ ID NO: 3586026 - RNA, 11 nt, Human
uuuaugucugg

SEQ ID NO: 3586027 - RNA, 19 nt, Human
uuuaugucuguggauuuuu

SEQ ID NO: 3586028 - RNA, 17 nt, Human
uuuauguguaguugucu

SEQ ID NO: 3586029 - RNA, 16 nt, Human
uuuaugugugauucaa

SEQ ID NO: 3586030 - RNA, 11 nt, Human
uuuaugugugu

SEQ ID NO: 3586031 - RNA, 13 nt, Human
uuuaugugugugu

SEQ ID NO: 3586032 - RNA, 15 nt, Human
uuuauguuaaaagau

SEQ ID NO: 3586033 - RNA, 20 nt, Human
uuuauguuauauauaaauau

SEQ ID NO: 3586034 - RNA, 22 nt, Human
uuuauguuauauauaaauauau

SEQ ID NO: 3586035 - RNA, 14 nt, Human
uuuauguuugaaua

SEQ ID NO: 3586036 - RNA, 23 nt, Human
uuuauguuugcacuugugauuau

SEQ ID NO: 3586037 - RNA, 14 nt, Human
uuuauguuuugguc

SEQ ID NO: 3586038 - RNA, 20 nt, Human
uuuauguuuugguccacuuu

SEQ ID NO: 3586039 - RNA, 20 nt, Human
uuuauguuuuguuucugaaa

SEQ ID NO: 3586040 - RNA, 14 nt, Human
uuuauuaaaaugau

SEQ ID NO: 3586041 - RNA, 14 nt, Human
uuuauuaaagaaaa

SEQ ID NO: 3586042 - RNA, 12 nt, Human
uuuauuaaauaa

SEQ ID NO: 3586043 - RNA, 21 nt, Human
uuuauuaaauacaaaacuucc

SEQ ID NO: 3586044 - RNA, 19 nt, Human
uuuauuaaaugcccagccc

SEQ ID NO: 3586045 - RNA, 23 nt, Human
uuuauuaaauuuuuuuguaugaa

SEQ ID NO: 3586046 - RNA, 12 nt, Human
uuuauuaagaug

SEQ ID NO: 3586047 - RNA, 15 nt, Human
uuuauuaagauggau

SEQ ID NO: 3586048 - RNA, 20 nt, Human
uuuauuaagcacguauuuau

SEQ ID NO: 3586049 - RNA, 17 nt, Human
uuuauuaauauauauua

SEQ ID NO: 3586050 - RNA, 19 nt, Human
uuuauuaauauauauuauc

SEQ ID NO: 3586051 - RNA, 13 nt, Human
uuuauuaaucacu

SEQ ID NO: 3586052 - RNA, 13 nt, Human
uuuauuaaucuua

SEQ ID NO: 3586053 - RNA, 12 nt, Human
uuuauuaaugca

SEQ ID NO: 3586054 - RNA, 17 nt, Human
uuuauuaaugcacuuuc

SEQ ID NO: 3586055 - RNA, 14 nt, Human
uuuauuacaguaua

SEQ ID NO: 3586056 - RNA, 22 nt, Human
uuuauuacaguauaauuaacau

SEQ ID NO: 3586057 - RNA, 14 nt, Human
uuuauuacauaauu

SEQ ID NO: 3586058 - RNA, 14 nt, Human
uuuauuaccagugg

SEQ ID NO: 3586059 - RNA, 17 nt, Human
uuuauuacccccuccuu

SEQ ID NO: 3586060 - RNA, 13 nt, Human
uuuauuaccucug

SEQ ID NO: 3586061 - RNA, 19 nt, Human
uuuauuacuguaagaaaau

SEQ ID NO: 3586062 - RNA, 13 nt, Human
uuuauuagaugaa

SEQ ID NO: 3586063 - RNA, 14 nt, Human
uuuauuagaugaau

SEQ ID NO: 3586064 - RNA, 14 nt, Human
uuuauuauaaacug

SEQ ID NO: 3586065 - RNA, 15 nt, Human
uuuauuaugaagaag

SEQ ID NO: 3586066 - RNA, 17 nt, Human
uuuauuaugcauaacug

SEQ ID NO: 3586067 - RNA, 20 nt, Human
uuuauuaugcauaacugaca

SEQ ID NO: 3586068 - RNA, 16 nt, Human
uuuauuaugcauuaua

SEQ ID NO: 3586069 - RNA, 16 nt, Human
uuuauuauguaaaucc

SEQ ID NO: 3586070 - RNA, 18 nt, Human
uuuauucaagguaaaauu

SEQ ID NO: 3586071 - RNA, 19 nt, Human
uuuauucaagguaaaauuc

SEQ ID NO: 3586072 - RNA, 19 nt, Human
uuuauucagcuucauuugu

SEQ ID NO: 3586073 - RNA, 22 nt, Human
uuuauucauuggucuaauuuau

SEQ ID NO: 3586074 - RNA, 19 nt, Human
uuuauuccauauucaugua

SEQ ID NO: 3586075 - RNA, 22 nt, Human
uuuauuccuauauaguuuauug

SEQ ID NO: 3586076 - RNA, 15 nt, Human
uuuauucuucuagag

SEQ ID NO: 3586077 - RNA, 18 nt, Human
uuuauucuucuagaguuc

SEQ ID NO: 3586078 - RNA, 13 nt, Human
uuuauugacacag

SEQ ID NO: 3586079 - RNA, 15 nt, Human
uuuauugacacagaa

SEQ ID NO: 3586080 - RNA, 15 nt, Human
uuuauugaugugcaa

SEQ ID NO: 3586081 - RNA, 16 nt, Human
uuuauugaugugcaaa

SEQ ID NO: 3586082 - RNA, 19 nt, Human
uuuauugaugugcaaaaau

SEQ ID NO: 3586083 - RNA, 21 nt, Human
uuuauugaugugcaaaaauuu

SEQ ID NO: 3586084 - RNA, 23 nt, Human
uuuauugcaucuggguagcugua

SEQ ID NO: 3586085 - RNA, 22 nt, Human
uuuauugccuucucaccagcug

SEQ ID NO: 3586086 - RNA, 14 nt, Human
uuuauugcuacuuc

SEQ ID NO: 3586087 - RNA, 20 nt, Human
uuuauugcuaguauuugaau

SEQ ID NO: 3586088 - RNA, 19 nt, Human
uuuauugcuguguaacacu

SEQ ID NO: 3586089 - RNA, 17 nt, Human
uuuauuggcuuuucuga

SEQ ID NO: 3586090 - RNA, 17 nt, Human
uuuauugguuuugcaga

SEQ ID NO: 3586091 - RNA, 16 nt, Human
uuuauuguguuuguca

SEQ ID NO: 3586092 - RNA, 20 nt, Human
uuuauuguuaacucuugucu

SEQ ID NO: 3586093 - RNA, 17 nt, Human
uuuauuguuaauacaag

SEQ ID NO: 3586094 - RNA, 22 nt, Human
uuuauuguuuaaaaucauuucu

SEQ ID NO: 3586095 - RNA, 23 nt, Human
uuuauuguuuaaagcaacugucu

SEQ ID NO: 3586096 - RNA, 22 nt, Human
uuuauuuaaaaaacuaaaaacu

SEQ ID NO: 3586097 - RNA, 12 nt, Human
uuuauuuaaaag

SEQ ID NO: 3586098 - RNA, 17 nt, Human
uuuauuuaaaagauuca

SEQ ID NO: 3586099 - RNA, 14 nt, Human
uuuauuuaaagcau

SEQ ID NO: 3586100 - RNA, 21 nt, Human
uuuauuuaaaugucuaaugua

SEQ ID NO: 3586101 - RNA, 12 nt, Human
uuuauuuacuuc

SEQ ID NO: 3586102 - RNA, 15 nt, Human
uuuauuuagggaaca

SEQ ID NO: 3586103 - RNA, 15 nt, Human
uuuauuuauauguau

SEQ ID NO: 3586104 - RNA, 15 nt, Human
uuuauuuauauuuau

SEQ ID NO: 3586105 - RNA, 15 nt, Human
uuuauuuaucaguga

SEQ ID NO: 3586106 - RNA, 16 nt, Human
uuuauuucaaaauaua

SEQ ID NO: 3586107 - RNA, 15 nt, Human
uuuauuucagauuuu

SEQ ID NO: 3586108 - RNA, 20 nt, Human
uuuauuucauuuuucaauag

SEQ ID NO: 3586109 - RNA, 20 nt, Human
uuuauuuccacuaaaaauau

SEQ ID NO: 3586110 - RNA, 13 nt, Human
uuuauuuccuccc

SEQ ID NO: 3586111 - RNA, 13 nt, Human
uuuauuucuccuu

SEQ ID NO: 3586112 - RNA, 15 nt, Human
uuuauuucuccuuuu

SEQ ID NO: 3586113 - RNA, 17 nt, Human
uuuauuucuccuuuugu

SEQ ID NO: 3586114 - RNA, 21 nt, Human
uuuauuucuccuuuuguguuc

SEQ ID NO: 3586115 - RNA, 13 nt, Human
uuuauuucuuaaa

SEQ ID NO: 3586116 - RNA, 23 nt, Human
uuuauuugaacaaugaaguugaa

SEQ ID NO: 3586117 - RNA, 14 nt, Human
uuuauuugcuucuu

SEQ ID NO: 3586118 - RNA, 22 nt, Human
uuuauuuggaaaggaaugcaaa

SEQ ID NO: 3586119 - RNA, 13 nt, Human
uuuauuuguugag

SEQ ID NO: 3586120 - RNA, 14 nt, Human
uuuauuuguugaga

SEQ ID NO: 3586121 - RNA, 18 nt, Human
uuuauuuguugagagugu

SEQ ID NO: 3586122 - RNA, 20 nt, Human
uuuauuuguuugugcauuug

SEQ ID NO: 3586123 - RNA, 13 nt, Human
uuuauuuuaaaac

SEQ ID NO: 3586124 - RNA, 19 nt, Human
uuuauuuuagcaguucugc

SEQ ID NO: 3586125 - RNA, 23 nt, Human
uuuauuuuagcaguucugcaaau

SEQ ID NO: 3586126 - RNA, 15 nt, Human
uuuauuuuaugagaa

SEQ ID NO: 3586127 - RNA, 20 nt, Human
uuuauuuuaugagaaaugua

SEQ ID NO: 3586128 - RNA, 12 nt, Human
uuuauuuuccua

SEQ ID NO: 3586129 - RNA, 16 nt, Human
uuuauuuuccucccca

SEQ ID NO: 3586130 - RNA, 10 nt, Human
uuuauuuucu

SEQ ID NO: 3586131 - RNA, 22 nt, Human
uuuauuuucugguagauagaaa

SEQ ID NO: 3586132 - RNA, 22 nt, Human
uuuauuuugugcucauuuaagu

SEQ ID NO: 3586133 - RNA, 16 nt, Human
uuuauuuuuaagaaag

SEQ ID NO: 3586134 - RNA, 14 nt, Human
uuuauuuuuuaagu

SEQ ID NO: 3586135 - RNA, 15 nt, Human
uuuauuuuuuauaca

SEQ ID NO: 3586136 - RNA, 23 nt, Human
uuucaaaaacaccccccccccac

SEQ ID NO: 3586137 - RNA, 23 nt, Human
uuucaaaaaucugaagauuguuu

SEQ ID NO: 3586138 - RNA, 23 nt, Human
uuucaaaacacaucuuuccuguc

SEQ ID NO: 3586139 - RNA, 13 nt, Human
uuucaaaagaaag

SEQ ID NO: 3586140 - RNA, 18 nt, Human
uuucaaaagacauguugu

SEQ ID NO: 3586141 - RNA, 20 nt, Human
uuucaaaauaaaaaccaaga

SEQ ID NO: 3586142 - RNA, 18 nt, Human
uuucaaaauaaaauauca

SEQ ID NO: 3586143 - RNA, 18 nt, Human
uuucaaaauccaaaaaga

SEQ ID NO: 3586144 - RNA, 12 nt, Human
uuucaaaaugcu

SEQ ID NO: 3586145 - RNA, 13 nt, Human
uuucaaaaugcuu

SEQ ID NO: 3586146 - RNA, 15 nt, Human
uuucaaaaugcuuuu

SEQ ID NO: 3586147 - RNA, 19 nt, Human
uuucaaacaaucaaguuga

SEQ ID NO: 3586148 - RNA, 17 nt, Human
uuucaaacauauauaac

SEQ ID NO: 3586149 - RNA, 19 nt, Human
uuucaaacauauauaacaa

SEQ ID NO: 3586150 - RNA, 22 nt, Human
uuucaaaccaguauacaagaua

SEQ ID NO: 3586151 - RNA, 22 nt, Human
uuucaaacuccaagguucccuu

SEQ ID NO: 3586152 - RNA, 16 nt, Human
uuucaaacuuacuauu

SEQ ID NO: 3586153 - RNA, 22 nt, Human
uuucaaacuuuacuauggcccu

SEQ ID NO: 3586154 - RNA, 12 nt, Human
uuucaaagcaau

SEQ ID NO: 3586155 - RNA, 14 nt, Human
uuucaaagcaauug

SEQ ID NO: 3586156 - RNA, 21 nt, Human
uuucaaagcaauugaaaugca

SEQ ID NO: 3586157 - RNA, 18 nt, Human
uuucaaaggaacauugug

SEQ ID NO: 3586158 - RNA, 15 nt, Human
uuucaaaguacauaa

SEQ ID NO: 3586159 - RNA, 20 nt, Human
uuucaaaguuuuguuguacu

SEQ ID NO: 3586160 - RNA, 19 nt, Human
uuucaaauagggucuaacu

SEQ ID NO: 3586161 - RNA, 20 nt, Human
uuucaaauagggucuaacuc

SEQ ID NO: 3586162 - RNA, 19 nt, Human
uuucaaauuggacuuucaa

SEQ ID NO: 3586163 - RNA, 21 nt, Human
uuucaaauuggagcuucaugg

SEQ ID NO: 3586164 - RNA, 14 nt, Human
uuucaaauuuagaa

SEQ ID NO: 3586165 - RNA, 21 nt, Human
uuucaaauuuagaaacuaauu

SEQ ID NO: 3586166 - RNA, 23 nt, Human
uuucaacaaauaucuuguguugu

SEQ ID NO: 3586167 - RNA, 20 nt, Human
uuucaaccagauaacauacc

SEQ ID NO: 3586168 - RNA, 14 nt, Human
uuucaaccccaccc

SEQ ID NO: 3586169 - RNA, 19 nt, Human
uuucaaccccacccuguuu

SEQ ID NO: 3586170 - RNA, 21 nt, Human
uuucaaccccacccuguuugg

SEQ ID NO: 3586171 - RNA, 15 nt, Human
uuucaaccucuagaa

SEQ ID NO: 3586172 - RNA, 22 nt, Human
uuucaaccucuagaauuuuaag

SEQ ID NO: 3586173 - RNA, 15 nt, Human
uuucaacgcagcccu

SEQ ID NO: 3586174 - RNA, 20 nt, Human
uuucaacgcagcccugcuuu

SEQ ID NO: 3586175 - RNA, 13 nt, Human
uuucaacuuugaa

SEQ ID NO: 3586176 - RNA, 18 nt, Human
uuucaagaaaaaauaaau

SEQ ID NO: 3586177 - RNA, 23 nt, Human
uuucaagaauaaucacgcuuucc

SEQ ID NO: 3586178 - RNA, 22 nt, Human
uuucaagaucuaaaucauauau

SEQ ID NO: 3586179 - RNA, 20 nt, Human
uuucaagcagcaucuucugg

SEQ ID NO: 3586180 - RNA, 20 nt, Human
uuucaagcaucuccugagga

SEQ ID NO: 3586181 - RNA, 14 nt, Human
uuucaagcuuauuu

SEQ ID NO: 3586182 - RNA, 11 nt, Human
uuucaaggaag

SEQ ID NO: 3586183 - RNA, 17 nt, Human
uuucaaggaagguucau

SEQ ID NO: 3586184 - RNA, 21 nt, Human
uuucaaggcacucuagauucc

SEQ ID NO: 3586185 - RNA, 13 nt, Human
uuuuuuuuuuggu

SEQ ID NO: 3586186 - RNA, 19 nt, Human
uuuugugauggagugcugu

SEQ ID NO: 3586187 - RNA, 16 nt, Human
uuuugugauuuagaac

SEQ ID NO: 3586188 - RNA, 23 nt, Human
uuuugugcauuaucuagauacug

SEQ ID NO: 3586189 - RNA, 12 nt, Human
uuuugugcauuu

SEQ ID NO: 3586190 - RNA, 20 nt, Human
uuuuguguccuccaggagcu

SEQ ID NO: 3586191 - RNA, 21 nt, Human
uuuugugucucuuauggaugu

SEQ ID NO: 3586192 - RNA, 20 nt, Human
uuuugugugaccaacugugu

SEQ ID NO: 3586193 - RNA, 17 nt, Human
uuuuguguguauuugcu

SEQ ID NO: 3586194 - RNA, 23 nt, Human
uuuuguguuuauucuugaugaaa

SEQ ID NO: 3586195 - RNA, 16 nt, Human
uuuuguguuuguugua

SEQ ID NO: 3586196 - RNA, 16 nt, Human
uuuuguuaccuuuaug

SEQ ID NO: 3586197 - RNA, 16 nt, Human
uuuuguuacucuuggg

SEQ ID NO: 3586198 - RNA, 15 nt, Human
uuuuguuacuguucu

SEQ ID NO: 3586199 - RNA, 20 nt, Human
uuuuguuacuguucuugcug

SEQ ID NO: 3586200 - RNA, 18 nt, Human
uuuuguuaucagucaaua

SEQ ID NO: 3586201 - RNA, 15 nt, Human
uuuuguuauuaaaca

SEQ ID NO: 3586202 - RNA, 19 nt, Human
uuuuguucuuaauugcacu

SEQ ID NO: 3586203 - RNA, 19 nt, Human
uuuuguucuucagagauca

SEQ ID NO: 3586204 - RNA, 12 nt, Human
uuuuguugacau

SEQ ID NO: 3586205 - RNA, 15 nt, Human
uuuuguugcacugaa

SEQ ID NO: 3586206 - RNA, 13 nt, Human
uuuuguuggcaua

SEQ ID NO: 3586207 - RNA, 16 nt, Human
uuuuguuguuucagug

SEQ ID NO: 3586208 - RNA, 18 nt, Human
uuuuguuucaaugaggug

SEQ ID NO: 3586209 - RNA, 19 nt, Human
uuuuguuucauauugaugu

SEQ ID NO: 3586210 - RNA, 12 nt, Human
uuuuguuucugu

SEQ ID NO: 3586211 - RNA, 18 nt, Human
uuuuguuuggagacguuu

SEQ ID NO: 3586212 - RNA, 18 nt, Human
uuuuguuuggcaaggaaa

SEQ ID NO: 3586213 - RNA, 22 nt, Human
uuuuguuugguauuguauuuau

SEQ ID NO: 3586214 - RNA, 21 nt, Human
uuuuguuugguuauaucgaaa

SEQ ID NO: 3586215 - RNA, 16 nt, Human
uuuuguuuuacaaugu

SEQ ID NO: 3586216 - RNA, 13 nt, Human
uuuuguuuugcuu

SEQ ID NO: 3586217 - RNA, 18 nt, Human
uuuuguuuuucugcuuua

SEQ ID NO: 3586218 - RNA, 14 nt, Human
uuuuuaaaaaaaga

SEQ ID NO: 3586219 - RNA, 13 nt, Human
uuuuuaaaaaacu

SEQ ID NO: 3586220 - RNA, 14 nt, Human
uuuuuaaaaaacuu

SEQ ID NO: 3586221 - RNA, 18 nt, Human
uuuuuaaaaaagaaacau

SEQ ID NO: 3586222 - RNA, 15 nt, Human
uuuuuaaaaaagcuu

SEQ ID NO: 3586223 - RNA, 14 nt, Human
uuuuuaaaacacau

SEQ ID NO: 3586224 - RNA, 18 nt, Human
uuuuuaaaacacauguuu

SEQ ID NO: 3586225 - RNA, 15 nt, Human
uuuuuaaaagagaca

SEQ ID NO: 3586226 - RNA, 23 nt, Human
uuuuuaaaauagaaauuuuguaa

SEQ ID NO: 3586227 - RNA, 13 nt, Human
uuuuuaaaaucuu

SEQ ID NO: 3586228 - RNA, 16 nt, Human
uuuuuaaacaaguauu

SEQ ID NO: 3586229 - RNA, 16 nt, Human
uuuuuaaacaauaaag

SEQ ID NO: 3586230 - RNA, 13 nt, Human
uuuuuaaacauca

SEQ ID NO: 3586231 - RNA, 13 nt, Human
uuuuuaaacugua

SEQ ID NO: 3586232 - RNA, 19 nt, Human
uuuuuaaacuguacagugu

SEQ ID NO: 3586233 - RNA, 18 nt, Human
uuuuuaaagacuuuuaug

SEQ ID NO: 3586234 - RNA, 12 nt, Human
uuuuuaaagauc

SEQ ID NO: 3586235 - RNA, 11 nt, Human
uuuuuaaauaa

SEQ ID NO: 3586236 - RNA, 14 nt, Human
uuuuuaaauaaacu

SEQ ID NO: 3586237 - RNA, 14 nt, Human
uuuuuaaauauauu

SEQ ID NO: 3586238 - RNA, 11 nt, Human
uuuuuaaaugc

SEQ ID NO: 3586239 - RNA, 23 nt, Human
uuuuuaaauguauacuauaguac

SEQ ID NO: 3586240 - RNA, 19 nt, Human
uuuuuaaccccgucaacaa

SEQ ID NO: 3586241 - RNA, 22 nt, Human
uuuuuaacucaauauuuuccau

SEQ ID NO: 3586242 - RNA, 21 nt, Human
uuuuuaacuuuaccaugcuca

SEQ ID NO: 3586243 - RNA, 16 nt, Human
uuuuuaagaauaucug

SEQ ID NO: 3586244 - RNA, 13 nt, Human
uuuuuaagaauug

SEQ ID NO: 3586245 - RNA, 16 nt, Human
uuuuuaagauagugua

SEQ ID NO: 3586246 - RNA, 16 nt, Human
uuuuuaagauuuuucu

SEQ ID NO: 3586247 - RNA, 23 nt, Human
uuuuuaagcuguaaaaagagaga

SEQ ID NO: 3586248 - RNA, 18 nt, Human
uuuuuaagcuguuuccau

SEQ ID NO: 3586249 - RNA, 16 nt, Human
uuuuuaagcuucaguu

SEQ ID NO: 3586250 - RNA, 21 nt, Human
uuuuuaaguaauguggaagaa

SEQ ID NO: 3586251 - RNA, 16 nt, Human
uuuuuaaguauuuaua

SEQ ID NO: 3586252 - RNA, 14 nt, Human
uuuuuaagugaaau

SEQ ID NO: 3586253 - RNA, 18 nt, Human
uuuuuaagugcugcauuu

SEQ ID NO: 3586254 - RNA, 17 nt, Human
uuuuuaauaaagacagg

SEQ ID NO: 3586255 - RNA, 15 nt, Human
uuuuuaaucaugaaa

SEQ ID NO: 3586256 - RNA, 17 nt, Human
uuuuuaaucaugaauau

SEQ ID NO: 3586257 - RNA, 13 nt, Human
uuuuuaaugauau

SEQ ID NO: 3586258 - RNA, 20 nt, Human
uuuuuaaugcuaaucuugug

SEQ ID NO: 3586259 - RNA, 21 nt, Human
uuuuuaaugcuaaucuuguga

SEQ ID NO: 3586260 - RNA, 18 nt, Human
uuuuuaauguauaguaaa

SEQ ID NO: 3586261 - RNA, 17 nt, Human
uuuuuaaugugcugugu

SEQ ID NO: 3586262 - RNA, 20 nt, Human
uuuuuaaugugcuguguaaa

SEQ ID NO: 3586263 - RNA, 20 nt, Human
uuuuuaauuaaaaacuagua

SEQ ID NO: 3586264 - RNA, 12 nt, Human
uuuuuaauuauu

SEQ ID NO: 3586265 - RNA, 13 nt, Human
uuuuuaauuguau

SEQ ID NO: 3586266 - RNA, 18 nt, Human
uuuuuaauuguuguuucu

SEQ ID NO: 3586267 - RNA, 11 nt, Human
uuuuuaauuua

SEQ ID NO: 3586268 - RNA, 12 nt, Human
uuuuuaauuuug

SEQ ID NO: 3586269 - RNA, 17 nt, Human
uuuuuacaauguaauua

SEQ ID NO: 3586270 - RNA, 16 nt, Human
uuuuuacauggagaaa

SEQ ID NO: 3586271 - RNA, 11 nt, Human
uuuuuacauuu

SEQ ID NO: 3586272 - RNA, 18 nt, Human
uuuuuacccauauccccu

SEQ ID NO: 3586273 - RNA, 19 nt, Human
uuuuuaccguuucuucccu

SEQ ID NO: 3586274 - RNA, 17 nt, Human
uuuuuaccugucacauu

SEQ ID NO: 3586275 - RNA, 13 nt, Human
uuuuuacuguguu

SEQ ID NO: 3586276 - RNA, 20 nt, Human
uuuuuagaaagcauuugaau

SEQ ID NO: 3586277 - RNA, 12 nt, Human
uuuuuagaauuu

SEQ ID NO: 3586278 - RNA, 20 nt, Human
uuuuuaggaagcaagcuuaa

SEQ ID NO: 3586279 - RNA, 20 nt, Human
uuuuuaguaaucuguacauu

SEQ ID NO: 3586280 - RNA, 18 nt, Human
uuuuuauaaaauggcugu

SEQ ID NO: 3586281 - RNA, 23 nt, Human
uuuuuauaacaucuuuauugaaa

SEQ ID NO: 3586282 - RNA, 13 nt, Human
uuuuuauaauugu

SEQ ID NO: 3586283 - RNA, 18 nt, Human
uuuuuauaauuguacaaa

SEQ ID NO: 3586284 - RNA, 23 nt, Human
uuuuuauaauuguacaaaauuaa

SEQ ID NO: 3586285 - RNA, 13 nt, Human
uuuuuauacacau

SEQ ID NO: 3586286 - RNA, 18 nt, Human
uuuuuauagcaacaacaa

SEQ ID NO: 3586287 - RNA, 14 nt, Human
uuuuuauauauaca

SEQ ID NO: 3586288 - RNA, 17 nt, Human
uuuuuauauauaugcau

SEQ ID NO: 3586289 - RNA, 23 nt, Human
uuuuuauaucuggaaugagccug

SEQ ID NO: 3586290 - RNA, 14 nt, Human
uuuuuauaucuugg

SEQ ID NO: 3586291 - RNA, 17 nt, Human
uuuuuauauuaguugcu

SEQ ID NO: 3586292 - RNA, 18 nt, Human
uuuuuauauuaguugcuu

SEQ ID NO: 3586293 - RNA, 22 nt, Human
uuuuuauauuucaaguacacug

SEQ ID NO: 3586294 - RNA, 15 nt, Human
uuuuuauauuuccuu

SEQ ID NO: 3586295 - RNA, 17 nt, Human
uuuuuauauuugaaaua

SEQ ID NO: 3586296 - RNA, 17 nt, Human
uuuuuaucaugcauguc

SEQ ID NO: 3586297 - RNA, 22 nt, Human
uuuuuaucuauauaaaauaacu

SEQ ID NO: 3586298 - RNA, 14 nt, Human
uuuuuaucuuuuua

SEQ ID NO: 3586299 - RNA, 13 nt, Human
uuuuuaugaggca

SEQ ID NO: 3586300 - RNA, 16 nt, Human
uuuuuaugcuauuucu

SEQ ID NO: 3586301 - RNA, 21 nt, Human
uuuuuauggcuuuugugcauu

SEQ ID NO: 3586302 - RNA, 15 nt, Human
uuuuuauuaaucacu

SEQ ID NO: 3586303 - RNA, 17 nt, Human
uuuuuauuaguauuguu

SEQ ID NO: 3586304 - RNA, 14 nt, Human
uuuuuauuaugcau

SEQ ID NO: 3586305 - RNA, 15 nt, Human
uuuuuauuaugcauu

SEQ ID NO: 3586306 - RNA, 12 nt, Human
uuuuuauugaug

SEQ ID NO: 3586307 - RNA, 13 nt, Human
uuuuuauugaugu

SEQ ID NO: 3586308 - RNA, 22 nt, Human
uuuuuauugcuaguauuugaau

SEQ ID NO: 3586309 - RNA, 13 nt, Human
uuuuuauuuaaau

SEQ ID NO: 3586310 - RNA, 13 nt, Human
uuuuuauuuauau

SEQ ID NO: 3586311 - RNA, 14 nt, Human
uuuuuauuuauaug

SEQ ID NO: 3586312 - RNA, 18 nt, Human
uuuuuauuuauauguacu

SEQ ID NO: 3586313 - RNA, 22 nt, Human
uuuuuauuucugucaguuauga

SEQ ID NO: 3586314 - RNA, 19 nt, Human
uuuuucaaagauguguugc

SEQ ID NO: 3586315 - RNA, 18 nt, Human
uuuuucaacaaauaucuu

SEQ ID NO: 3586316 - RNA, 22 nt, Human
uuuuucaaccccacccuguuug

SEQ ID NO: 3586317 - RNA, 23 nt, Human
uuuuucaaccccacccuguuugg

SEQ ID NO: 3586318 - RNA, 13 nt, Human
uuuuucaaggaag

SEQ ID NO: 3586319 - RNA, 19 nt, Human
uuuuucaaguuguaaauaa

SEQ ID NO: 3586320 - RNA, 12 nt, Human
uuuuucaauaua

SEQ ID NO: 3586321 - RNA, 19 nt, Human
uuuuucaauauauugaacu

SEQ ID NO: 3586322 - RNA, 13 nt, Human
uuuuucaauuaaa

SEQ ID NO: 3586323 - RNA, 17 nt, Human
uuuuucaauuaaacgga

SEQ ID NO: 3586324 - RNA, 18 nt, Human
uuuuucaauuaaacggau

SEQ ID NO: 3586325 - RNA, 12 nt, Human
uuuuucagaccg

SEQ ID NO: 3586326 - RNA, 14 nt, Human
uuuuucagaccgaa

SEQ ID NO: 3586327 - RNA, 16 nt, Human
uuuuucaguucaaagu

SEQ ID NO: 3586328 - RNA, 12 nt, Human
uuuuucauauuu

SEQ ID NO: 3586329 - RNA, 19 nt, Human
uuuuucauauuuucuaaag

SEQ ID NO: 3586330 - RNA, 23 nt, Human
uuuuucaucuucaguugucucug

SEQ ID NO: 3586331 - RNA, 18 nt, Human
uuuuucauguuuuaacaa

SEQ ID NO: 3586332 - RNA, 20 nt, Human
uuuuucauuaaauaaauuug

SEQ ID NO: 3586333 - RNA, 21 nt, Human
uuuuucauugauaugaaaaau

SEQ ID NO: 3586334 - RNA, 22 nt, Human
uuuuucauuuauuguuuaugua

SEQ ID NO: 3586335 - RNA, 17 nt, Human
uuuuucauuuuccaaua

SEQ ID NO: 3586336 - RNA, 21 nt, Human
uuuuuccaacuacuaauagaa

SEQ ID NO: 3586337 - RNA, 23 nt, Human
uuuuuccaacuacuaauagaaua

SEQ ID NO: 3586338 - RNA, 21 nt, Human
uuuuuccacauaaggaaacug

SEQ ID NO: 3586339 - RNA, 18 nt, Human
uuuuucccauaagacaau

SEQ ID NO: 3586340 - RNA, 16 nt, Human
uuuuucccauuuagaa

SEQ ID NO: 3586341 - RNA, 23 nt, Human
uuuuucccuucaucugggcacug

SEQ ID NO: 3586342 - RNA, 11 nt, Human
uuuuuccuguc

SEQ ID NO: 3586343 - RNA, 19 nt, Human
uuuuuccuuacauaaacau

SEQ ID NO: 3586344 - RNA, 11 nt, Human
uuuuuccuuca

SEQ ID NO: 3586345 - RNA, 16 nt, Human
uuuuuccuucccuucu

SEQ ID NO: 3586346 - RNA, 16 nt, Human
uuuuuccuuuuucuga

SEQ ID NO: 3586347 - RNA, 22 nt, Human
uuuuucuaaaacuaaauagcau

SEQ ID NO: 3586348 - RNA, 13 nt, Human
uuuuucuaaagga

SEQ ID NO: 3586349 - RNA, 15 nt, Human
uuuuucuaacuacaa

SEQ ID NO: 3586350 - RNA, 16 nt, Human
uuuuucucaaaguuuu

SEQ ID NO: 3586351 - RNA, 14 nt, Human
uuuuucucccucug

SEQ ID NO: 3586352 - RNA, 19 nt, Human
uuuuucucuaggaaauauu

SEQ ID NO: 3586353 - RNA, 12 nt, Human
uuuuucucuccu

SEQ ID NO: 3586354 - RNA, 17 nt, Human
uuuuucugauaaaagau

SEQ ID NO: 3586355 - RNA, 13 nt, Human
uuuuucugauugu

SEQ ID NO: 3586356 - RNA, 22 nt, Human
uuuuucugcacugagcagaguc

SEQ ID NO: 3586357 - RNA, 23 nt, Human
uuuuucugcacugagcagagucu

SEQ ID NO: 3586358 - RNA, 14 nt, Human
uuuuucugccuccu

SEQ ID NO: 3586359 - RNA, 13 nt, Human
uuuuucugcuuua

SEQ ID NO: 3586360 - RNA, 14 nt, Human
uuuuucugcuuuug

SEQ ID NO: 3586361 - RNA, 17 nt, Human
uuuuucugcuuuugaaa

SEQ ID NO: 3586362 - RNA, 21 nt, Human
uuuuucuggagguugauaacu

SEQ ID NO: 3586363 - RNA, 13 nt, Human
uuuuucuguauaa

SEQ ID NO: 3586364 - RNA, 16 nt, Human
uuuuucuucacugcaa

SEQ ID NO: 3586365 - RNA, 12 nt, Human
uuuuucuugucu

SEQ ID NO: 3586366 - RNA, 17 nt, Human
uuuuucuugucuauaaa

SEQ ID NO: 3586367 - RNA, 12 nt, Human
uuuuucuuuaca

SEQ ID NO: 3586368 - RNA, 17 nt, Human
uuuuucuuuauaaacuu

SEQ ID NO: 3586369 - RNA, 23 nt, Human
uuuuugaaaucaguaaacacugu

SEQ ID NO: 3586370 - RNA, 12 nt, Human
uuuuugaaauga

SEQ ID NO: 3586371 - RNA, 15 nt, Human
uuuuugaaaugaaau

SEQ ID NO: 3586372 - RNA, 17 nt, Human
uuuuugaaaugaaauuu

SEQ ID NO: 3586373 - RNA, 21 nt, Human
uuuuugaaccauccacuuaca

SEQ ID NO: 3586374 - RNA, 19 nt, Human
uuuuugaacucuucucauu

SEQ ID NO: 3586375 - RNA, 15 nt, Human
uuuuugaagucuugu

SEQ ID NO: 3586376 - RNA, 13 nt, Human
uuuuugacagaau

SEQ ID NO: 3586377 - RNA, 13 nt, Human
uuuuugaggcaaa

SEQ ID NO: 3586378 - RNA, 15 nt, Human
uuuuugauaaagccu

SEQ ID NO: 3586379 - RNA, 21 nt, Human
uuuuugauaaaguuucucaga

SEQ ID NO: 3586380 - RNA, 14 nt, Human
uuuuugauagcuuu

SEQ ID NO: 3586381 - RNA, 11 nt, Human
uuuuugcaaua

SEQ ID NO: 3586382 - RNA, 20 nt, Human
uuuuugcacauguuuccucu

SEQ ID NO: 3586383 - RNA, 23 nt, Human
uuuuugcaccccaugcuguugau

SEQ ID NO: 3586384 - RNA, 19 nt, Human
uuuuugcaugcaugcaaau

SEQ ID NO: 3586385 - RNA, 17 nt, Human
uuuuugcauuuaaaaca

SEQ ID NO: 3586386 - RNA, 16 nt, Human
uuuuugccacagcuuu

SEQ ID NO: 3586387 - RNA, 23 nt, Human
uuuuugcugcugccucuuucccu

SEQ ID NO: 3586388 - RNA, 15 nt, Human
uuuuuggaaagucag

SEQ ID NO: 3586389 - RNA, 17 nt, Human
uuuuuggaaagucagaa

SEQ ID NO: 3586390 - RNA, 13 nt, Human
uuuuuggacauuu

SEQ ID NO: 3586391 - RNA, 21 nt, Human
uuuuuggagaagguuaucaaa

SEQ ID NO: 3586392 - RNA, 15 nt, Human
uuuuuggaggugcuu

SEQ ID NO: 3586393 - RNA, 14 nt, Human
uuuuuggaguguua

SEQ ID NO: 3586394 - RNA, 20 nt, Human
uuuuuggcguggcugacuua

SEQ ID NO: 3586395 - RNA, 20 nt, Human
uuuuugggcagcaauuuaaa

SEQ ID NO: 3586396 - RNA, 23 nt, Human
uuuuugggcagcaauuuaaaugu

SEQ ID NO: 3586397 - RNA, 13 nt, Human
uuuuugguacaaa

SEQ ID NO: 3586398 - RNA, 14 nt, Human
uuuuugguacaaaa

SEQ ID NO: 3586399 - RNA, 15 nt, Human
uuuuugguggaugua

SEQ ID NO: 3586400 - RNA, 18 nt, Human
uuuuugguggauguaaau

SEQ ID NO: 3586401 - RNA, 15 nt, Human
uuuuuguaaacugga

SEQ ID NO: 3586402 - RNA, 19 nt, Human
uuuuuguaaagauuucugu

SEQ ID NO: 3586403 - RNA, 16 nt, Human
uuuuuguaaaugugua

SEQ ID NO: 3586404 - RNA, 12 nt, Human
uuuuuguaccaa

SEQ ID NO: 3586405 - RNA, 19 nt, Human
uuuuuguagagccaggguc

SEQ ID NO: 3586406 - RNA, 11 nt, Human
uuuuuguagua

SEQ ID NO: 3586407 - RNA, 18 nt, Human
uuuuuguauaaaauagac

SEQ ID NO: 3586408 - RNA, 18 nt, Human
uuuuuguauaguuaacac

SEQ ID NO: 3586409 - RNA, 21 nt, Human
uuuuuguauaguuaacacacu

SEQ ID NO: 3586410 - RNA, 12 nt, Human
uuuuuguaugug

SEQ ID NO: 3586411 - RNA, 16 nt, Human
uuuuugucaacauugu

SEQ ID NO: 3586412 - RNA, 17 nt, Human
uuuuugucaacauugug

SEQ ID NO: 3586413 - RNA, 21 nt, Human
uuuuugucccccaacuugaga

SEQ ID NO: 3586414 - RNA, 20 nt, Human
uuuuugugaaaaugucaaag

SEQ ID NO: 3586415 - RNA, 15 nt, Human
uuuuuguguauuugu

SEQ ID NO: 3586416 - RNA, 17 nt, Human
uuuuuguguguauuugc

SEQ ID NO: 3586417 - RNA, 14 nt, Human
uuuuuguuaacuuu

SEQ ID NO: 3586418 - RNA, 13 nt, Human
uuuuuguugacau

SEQ ID NO: 3586419 - RNA, 19 nt, Human
uuuuuguuggaguguuucu

SEQ ID NO: 3586420 - RNA, 17 nt, Human
uuuuuguuguguucugu

SEQ ID NO: 3586421 - RNA, 12 nt, Human
uuuuuguuugcc

SEQ ID NO: 3586422 - RNA, 14 nt, Human
uuuuuguuuggaga

SEQ ID NO: 3586423 - RNA, 18 nt, Human
uuuuuguuuuguugcacu

SEQ ID NO: 3586424 - RNA, 18 nt, Human
uuuuuuaaaauaagucug

SEQ ID NO: 3586425 - RNA, 14 nt, Human
uuuuuuaaaauaga

SEQ ID NO: 3586426 - RNA, 15 nt, Human
uuuuuuaaauaaacu

SEQ ID NO: 3586427 - RNA, 16 nt, Human
uuuuuuaaauaaacuu

SEQ ID NO: 3586428 - RNA, 12 nt, Human
uuuuuuaacauu

SEQ ID NO: 3586429 - RNA, 19 nt, Human
uuuuuuaaccaaaggugaa

SEQ ID NO: 3586430 - RNA, 20 nt, Human
uuuuuuaaccccgucaacaa

SEQ ID NO: 3586431 - RNA, 17 nt, Human
uuuuuuaaguauuuaua

SEQ ID NO: 3586432 - RNA, 13 nt, Human
uuuuuuacaaagg

SEQ ID NO: 3586433 - RNA, 23 nt, Human
uuuuuuacaaauuggagcaggga

SEQ ID NO: 3586434 - RNA, 13 nt, Human
uuuuuuacagauu

SEQ ID NO: 3586435 - RNA, 11 nt, Human
uuuuuuacauu

SEQ ID NO: 3586436 - RNA, 14 nt, Human
uuuuuuacuuuugu

SEQ ID NO: 3586437 - RNA, 13 nt, Human
uuuuuuagaacag

SEQ ID NO: 3586438 - RNA, 15 nt, Human
uuuuuuagaucaaau

SEQ ID NO: 3586439 - RNA, 12 nt, Human
uuuuuuaggaaa

SEQ ID NO: 3586440 - RNA, 18 nt, Human
uuuuuuaggguuucugau

SEQ ID NO: 3586441 - RNA, 20 nt, Human
uuuuuuauacacuguaauga

SEQ ID NO: 3586442 - RNA, 15 nt, Human
uuuuuuauauaugug

SEQ ID NO: 3586443 - RNA, 11 nt, Human
uuuuuuauuau

SEQ ID NO: 3586444 - RNA, 16 nt, Human
uuuuuuauuguuuaaa

SEQ ID NO: 3586445 - RNA, 12 nt, Human
uuuuuuauuucu

SEQ ID NO: 3586446 - RNA, 17 nt, Human
uuuuuuauuucuacugu

SEQ ID NO: 3586447 - RNA, 14 nt, Human
uuuuuucagaccga

SEQ ID NO: 3586448 - RNA, 12 nt, Human
uuuuuucaguug

SEQ ID NO: 3586449 - RNA, 12 nt, Human
uuuuuuccaaaa

SEQ ID NO: 3586450 - RNA, 14 nt, Human
uuuuuuccaaaauc

SEQ ID NO: 3586451 - RNA, 13 nt, Human
uuuuuuccacuua

SEQ ID NO: 3586452 - RNA, 19 nt, Human
uuuuuuccuguuucugaaa

SEQ ID NO: 3586453 - RNA, 17 nt, Human
uuuuuuccuucagugcc

SEQ ID NO: 3586454 - RNA, 13 nt, Human
uuuuuucguuugu

SEQ ID NO: 3586455 - RNA, 15 nt, Human
uuuuuucuaagagaa

SEQ ID NO: 3586456 - RNA, 12 nt, Human
uuuuuucugaaa

SEQ ID NO: 3586457 - RNA, 12 nt, Human
uuuuuucuuuca

SEQ ID NO: 3586458 - RNA, 12 nt, Human
uuuuuugaaaac

SEQ ID NO: 3586459 - RNA, 13 nt, Human
uuuuuugaaauca

SEQ ID NO: 3586460 - RNA, 12 nt, Human
uuuuuugaaaug

SEQ ID NO: 3586461 - RNA, 10 nt, Human
uuuuuugaag

SEQ ID NO: 3586462 - RNA, 12 nt, Human
uuuuuuguauag

SEQ ID NO: 3586463 - RNA, 15 nt, Human
uuuuuuguauaguua

SEQ ID NO: 3586464 - RNA, 13 nt, Human
uuuuuuguaugug

SEQ ID NO: 3586465 - RNA, 18 nt, Human
uuuuuuguuuuacaaugu

SEQ ID NO: 3586466 - RNA, 11 nt, Human
uuuuuuuacua

SEQ ID NO: 3586467 - RNA, 12 nt, Human
uuuuuuucaaug

SEQ ID NO: 3586468 - RNA, 12 nt, Human
uuuuuuucaguu

SEQ ID NO: 3586469 - RNA, 13 nt, Human
uuuuuuuccagca

SEQ ID NO: 3586470 - RNA, 12 nt, Human
uuuuuuuccuua

SEQ ID NO: 3586471 - RNA, 12 nt, Human
uuuuuuucuacc

SEQ ID NO: 3586472 - RNA, 14 nt, Human
uuuuuuugaaacuu

SEQ ID NO: 3586473 - RNA, 12 nt, Human
uuuuuuuuaaga

SEQ ID NO: 3586474 - RNA, 13 nt, Human
uuuuuuuuaaugu

SEQ ID NO: 3586475 - RNA, 13 nt, Human
uuuuuuuuccugu

SEQ ID NO: 3586476 - RNA, 18 nt, Human
uuucuauauuuucauucu

SEQ ID NO: 3586477 - RNA, 15 nt, Human
uuucuauccucugua

SEQ ID NO: 3586478 - RNA, 14 nt, Human
uuucuaugaaauau

SEQ ID NO: 3586479 - RNA, 21 nt, Human
uuucuaugcugaguuugugcu

SEQ ID NO: 3586480 - RNA, 23 nt, Human
uuucuauggguguuaucaccuag

SEQ ID NO: 3586481 - RNA, 15 nt, Human
uuucuauuaaaagac

SEQ ID NO: 3586482 - RNA, 16 nt, Human
uuucuauuaaaagacu

SEQ ID NO: 3586483 - RNA, 13 nt, Human
uuucuauuccaaa

SEQ ID NO: 3586484 - RNA, 18 nt, Human
uuucuauuccuucuggcc

SEQ ID NO: 3586485 - RNA, 19 nt, Human
uuucuauuccuucuggccu

SEQ ID NO: 3586486 - RNA, 17 nt, Human
uuucuauuuaugccuug

SEQ ID NO: 3586487 - RNA, 17 nt, Human
uuucuauuucacuggag

SEQ ID NO: 3586488 - RNA, 16 nt, Human
uuucuauuugacuugu

SEQ ID NO: 3586489 - RNA, 16 nt, Human
uuucuauuuucucuga

SEQ ID NO: 3586490 - RNA, 14 nt, Human
uuucucaaaagcau

SEQ ID NO: 3586491 - RNA, 19 nt, Human
uuucucaaaagcauuuauc

SEQ ID NO: 3586492 - RNA, 15 nt, Human
uuucucaaaguuuug

SEQ ID NO: 3586493 - RNA, 18 nt, Human
uuucucaaaguuuugaaa

SEQ ID NO: 3586494 - RNA, 22 nt, Human
uuucucaaaguuuugaaaagcu

SEQ ID NO: 3586495 - RNA, 18 nt, Human
uuucucacagaagaugaa

SEQ ID NO: 3586496 - RNA, 16 nt, Human
uuucucacuaaaucuu

SEQ ID NO: 3586497 - RNA, 19 nt, Human
uuucucagacuuuggaaaa

SEQ ID NO: 3586498 - RNA, 17 nt, Human
uuucucagauccuuguu

SEQ ID NO: 3586499 - RNA, 23 nt, Human
uuucucagccgcuucugacugcu

SEQ ID NO: 3586500 - RNA, 20 nt, Human
uuucucagcucccauuucua

SEQ ID NO: 3586501 - RNA, 15 nt, Human
uuucucauauuugag

SEQ ID NO: 3586502 - RNA, 19 nt, Human
uuucucauguguuugcaua

SEQ ID NO: 3586503 - RNA, 15 nt, Human
uuucucauguugaaa

SEQ ID NO: 3586504 - RNA, 16 nt, Human
uuucucauucuuguuu

SEQ ID NO: 3586505 - RNA, 19 nt, Human
uuucucauugcucugaaua

SEQ ID NO: 3586506 - RNA, 20 nt, Human
uuucuccaauaucagugcuc

SEQ ID NO: 3586507 - RNA, 13 nt, Human
uuucuccagaacc

SEQ ID NO: 3586508 - RNA, 21 nt, Human
uuucuccagcucagaacccag

SEQ ID NO: 3586509 - RNA, 15 nt, Human
uuucuccagugcugu

SEQ ID NO: 3586510 - RNA, 14 nt, Human
uuucucccccuggg

SEQ ID NO: 3586511 - RNA, 13 nt, Human
uuucucccucuca

SEQ ID NO: 3586512 - RNA, 22 nt, Human
uuucucccucucacugucugag

SEQ ID NO: 3586513 - RNA, 16 nt, Human
uuucuccucccuuccu

SEQ ID NO: 3586514 - RNA, 16 nt, Human
uuucuccuuugauaaa

SEQ ID NO: 3586515 - RNA, 19 nt, Human
uuucuccuuuuguguucca

SEQ ID NO: 3586516 - RNA, 16 nt, Human
uuucucuauuaaaaug

SEQ ID NO: 3586517 - RNA, 16 nt, Human
uuucucucaacaccau

SEQ ID NO: 3586518 - RNA, 19 nt, Human
uuucucucagccuuacauu

SEQ ID NO: 3586519 - RNA, 16 nt, Human
uuucucucuacagugc

SEQ ID NO: 3586520 - RNA, 16 nt, Human
uuucucugauacagaa

SEQ ID NO: 3586521 - RNA, 17 nt, Human
uuucucugauacagaaa

SEQ ID NO: 3586522 - RNA, 18 nt, Human
uuucucugauacagaaaa

SEQ ID NO: 3586523 - RNA, 13 nt, Human
uuucucugcagaa

SEQ ID NO: 3586524 - RNA, 23 nt, Human
uuucucugccgcuaccucccucc

SEQ ID NO: 3586525 - RNA, 21 nt, Human
uuucucugcuucagcuugcuu

SEQ ID NO: 3586526 - RNA, 12 nt, Human
uuucucuuagaa

SEQ ID NO: 3586527 - RNA, 21 nt, Human
uuucucuuagaacauuguauu

SEQ ID NO: 3586528 - RNA, 13 nt, Human
uuucucuucuccc

SEQ ID NO: 3586529 - RNA, 14 nt, Human
uuucucuuucuccu

SEQ ID NO: 3586530 - RNA, 15 nt, Human
uuucucuuucuuccu

SEQ ID NO: 3586531 - RNA, 12 nt, Human
uuucucuuugaa

SEQ ID NO: 3586532 - RNA, 20 nt, Human
uuucucuuuuccccuuuccu

SEQ ID NO: 3586533 - RNA, 15 nt, Human
uuucucuuuucuagu

SEQ ID NO: 3586534 - RNA, 16 nt, Human
uuucugaaaagaaaua

SEQ ID NO: 3586535 - RNA, 16 nt, Human
uuucugaaaauauaac

SEQ ID NO: 3586536 - RNA, 18 nt, Human
uuucugaaaauuccagaa

SEQ ID NO: 3586537 - RNA, 21 nt, Human
uuucugaaaauuccagaaagg

SEQ ID NO: 3586538 - RNA, 17 nt, Human
uuucugaaacuaaugaa

SEQ ID NO: 3586539 - RNA, 20 nt, Human
uuucugaaaguuacccacug

SEQ ID NO: 3586540 - RNA, 21 nt, Human
uuucugaaauuuccugggagc

SEQ ID NO: 3586541 - RNA, 17 nt, Human
uuucugaacagcuggug

SEQ ID NO: 3586542 - RNA, 22 nt, Human
uuucugaacagcugguguagcu

SEQ ID NO: 3586543 - RNA, 19 nt, Human
uuucugaagguagcauucu

SEQ ID NO: 3586544 - RNA, 13 nt, Human
uuucugacaguuu

SEQ ID NO: 3586545 - RNA, 13 nt, Human
uuucugagaaaga

SEQ ID NO: 3586546 - RNA, 12 nt, Human
uuucugagcccg

SEQ ID NO: 3586547 - RNA, 15 nt, Human
uuucugagcccgggc

SEQ ID NO: 3586548 - RNA, 18 nt, Human
uuucugaggagaaacaaa

SEQ ID NO: 3586549 - RNA, 17 nt, Human
uuucugaguuuuaccaa

SEQ ID NO: 3586550 - RNA, 16 nt, Human
uuucugauccaguuuu

SEQ ID NO: 3586551 - RNA, 20 nt, Human
uuucugauccaguuuuguuu

SEQ ID NO: 3586552 - RNA, 15 nt, Human
uuucugauguugccu

SEQ ID NO: 3586553 - RNA, 18 nt, Human
uuucugauuagcuuugug

SEQ ID NO: 3586554 - RNA, 14 nt, Human
uuucugcaucagcu

SEQ ID NO: 3586555 - RNA, 13 nt, Human
uuucugcaucucc

SEQ ID NO: 3586556 - RNA, 15 nt, Human
uuucugcaucuccac

SEQ ID NO: 3586557 - RNA, 13 nt, Human
uuucugcauuuug

SEQ ID NO: 3586558 - RNA, 16 nt, Human
uuucugccagggagcu

SEQ ID NO: 3586559 - RNA, 13 nt, Human
uuucugcccugcc

SEQ ID NO: 3586560 - RNA, 13 nt, Human
uuucugcccuggc

SEQ ID NO: 3586561 - RNA, 14 nt, Human
uuucugcccuggcu

SEQ ID NO: 3586562 - RNA, 14 nt, Human
uuucugccgcagcc

SEQ ID NO: 3586563 - RNA, 16 nt, Human
uuucugccgcagcccu

SEQ ID NO: 3586564 - RNA, 22 nt, Human
uuucugccuggaguguaugacu

SEQ ID NO: 3586565 - RNA, 19 nt, Human
uuucugcucagcuucuccu

SEQ ID NO: 3586566 - RNA, 20 nt, Human
uuucugcugaauuuucacau

SEQ ID NO: 3586567 - RNA, 23 nt, Human
uuucugcugaauuuucacaugaa

SEQ ID NO: 3586568 - RNA, 19 nt, Human
uuucugcuggaaacagacu

SEQ ID NO: 3586569 - RNA, 19 nt, Human
uuucugcuuuagacuugaa

SEQ ID NO: 3586570 - RNA, 18 nt, Human
uuucuggaauguaaucaa

SEQ ID NO: 3586571 - RNA, 17 nt, Human
uuucuggacucuggacu

SEQ ID NO: 3586572 - RNA, 18 nt, Human
uuucuggacucuggacuu

SEQ ID NO: 3586573 - RNA, 23 nt, Human
uuucuggacugaagccugcagga

SEQ ID NO: 3586574 - RNA, 16 nt, Human
uuucuggagguugaua

SEQ ID NO: 3586575 - RNA, 17 nt, Human
uuucuggagguugauaa

SEQ ID NO: 3586576 - RNA, 11 nt, Human
uuucuggaguc

SEQ ID NO: 3586577 - RNA, 15 nt, Human
uuucuggauuucaua

SEQ ID NO: 3586578 - RNA, 19 nt, Human
uuucuggccaguguuuaaa

SEQ ID NO: 3586579 - RNA, 23 nt, Human
uuucugggagacagaaaacaugu

SEQ ID NO: 3586580 - RNA, 21 nt, Human
uuucugggcugucuauucuag

SEQ ID NO: 3586581 - RNA, 15 nt, Human
uuucuggggaaagac

SEQ ID NO: 3586582 - RNA, 21 nt, Human
uuucuggggaaagacacugcc

SEQ ID NO: 3586583 - RNA, 17 nt, Human
uuucugguggucuguug

SEQ ID NO: 3586584 - RNA, 15 nt, Human
uuucuguaaauacca

SEQ ID NO: 3586585 - RNA, 11 nt, Human
uuucuguacuu

SEQ ID NO: 3586586 - RNA, 19 nt, Human
uuucuguacuuuuuggcau

SEQ ID NO: 3586587 - RNA, 12 nt, Human
uuucuguauaga

SEQ ID NO: 3586588 - RNA, 14 nt, Human
uuucugucagaaug

SEQ ID NO: 3586589 - RNA, 20 nt, Human
uuucugucagaugagaacaa

SEQ ID NO: 3586590 - RNA, 22 nt, Human
uuucugucagaugagaacaaag

SEQ ID NO: 3586591 - RNA, 15 nt, Human
uuucugucccuucug

SEQ ID NO: 3586592 - RNA, 18 nt, Human
uuucuguccuguaacugu

SEQ ID NO: 3586593 - RNA, 15 nt, Human
uuucugucucugccu

SEQ ID NO: 3586594 - RNA, 13 nt, Human
uuucugugcccua

SEQ ID NO: 3586595 - RNA, 17 nt, Human
uuucugugcccuccuga

SEQ ID NO: 3586596 - RNA, 11 nt, Human
uuucugugugc

SEQ ID NO: 3586597 - RNA, 17 nt, Human
uuucuguguguuccugg

SEQ ID NO: 3586598 - RNA, 13 nt, Human
uuucuguguuuau

SEQ ID NO: 3586599 - RNA, 17 nt, Human
uuucuguuaaaaugcau

SEQ ID NO: 3586600 - RNA, 20 nt, Human
uuucuguucagcguuuugca

SEQ ID NO: 3586601 - RNA, 16 nt, Human
uuucuguuccaaauuc

SEQ ID NO: 3586602 - RNA, 14 nt, Human
uuucuguucuaguu

SEQ ID NO: 3586603 - RNA, 15 nt, Human
uuucuguugaaguuu

SEQ ID NO: 3586604 - RNA, 13 nt, Human
uuucuguugucau

SEQ ID NO: 3586605 - RNA, 16 nt, Human
uuucuguuugauucuu

SEQ ID NO: 3586606 - RNA, 17 nt, Human
uuucuuaaaaaguuaua

SEQ ID NO: 3586607 - RNA, 17 nt, Human
uuucuuaaacaaaugua

SEQ ID NO: 3586608 - RNA, 17 nt, Human
uuucuuaaagugccagu

SEQ ID NO: 3586609 - RNA, 19 nt, Human
uuucuuaaauaagaaacuu

SEQ ID NO: 3586610 - RNA, 20 nt, Human
uuucuuaaauaagaaacuuu

SEQ ID NO: 3586611 - RNA, 13 nt, Human
uuucuuaaauaau

SEQ ID NO: 3586612 - RNA, 23 nt, Human
uuucuuaaauaaugcuucagaua

SEQ ID NO: 3586613 - RNA, 18 nt, Human
uuucuuaaccagaucauu

SEQ ID NO: 3586614 - RNA, 15 nt, Human
uuucuuaaccaucuu

SEQ ID NO: 3586615 - RNA, 20 nt, Human
uuuggcugaaauucuccugg

SEQ ID NO: 3586616 - RNA, 15 nt, Human
uuuggcugugucuaa

SEQ ID NO: 3586617 - RNA, 17 nt, Human
uuuggcugugucuaaac

SEQ ID NO: 3586618 - RNA, 16 nt, Human
uuuggcuuaaauauag

SEQ ID NO: 3586619 - RNA, 16 nt, Human
uuugggaaacuuguca

SEQ ID NO: 3586620 - RNA, 17 nt, Human
uuugggaaccaagcuau

SEQ ID NO: 3586621 - RNA, 21 nt, Human
uuugggaaguuaaagggaaga

SEQ ID NO: 3586622 - RNA, 17 nt, Human
uuugggaauguuugucu

SEQ ID NO: 3586623 - RNA, 18 nt, Human
uuugggagacaugugaca

SEQ ID NO: 3586624 - RNA, 23 nt, Human
uuugggagagacuuguuuuggau

SEQ ID NO: 3586625 - RNA, 22 nt, Human
uuugggaggccaaggugggagg

SEQ ID NO: 3586626 - RNA, 15 nt, Human
uuugggaugucuuau

SEQ ID NO: 3586627 - RNA, 14 nt, Human
uuugggccucugcu

SEQ ID NO: 3586628 - RNA, 15 nt, Human
uuugggcuucagccu

SEQ ID NO: 3586629 - RNA, 16 nt, Human
uuugggcuucagcugc

SEQ ID NO: 3586630 - RNA, 18 nt, Human
uuuggggaaaccuagaga

SEQ ID NO: 3586631 - RNA, 23 nt, Human
uuuggggacagauucagucuugc

SEQ ID NO: 3586632 - RNA, 20 nt, Human
uuuggggagcagagacacua

SEQ ID NO: 3586633 - RNA, 20 nt, Human
uuuggggauuuucaaaagau

SEQ ID NO: 3586634 - RNA, 19 nt, Human
uuuggggcgaggcagagga

SEQ ID NO: 3586635 - RNA, 14 nt, Human
uuugggggaaacuu

SEQ ID NO: 3586636 - RNA, 20 nt, Human
uuugggggugggucuggccg

SEQ ID NO: 3586637 - RNA, 16 nt, Human
uuugggguaugggaga

SEQ ID NO: 3586638 - RNA, 10 nt, Human
uuuggggucu

SEQ ID NO: 3586639 - RNA, 18 nt, Human
uuuggggugccccucucc

SEQ ID NO: 3586640 - RNA, 11 nt, Human
uuuggguuucu

SEQ ID NO: 3586641 - RNA, 13 nt, Human
uuugguaaauguu

SEQ ID NO: 3586642 - RNA, 23 nt, Human
uuugguacuuuugagugugugug

SEQ ID NO: 3586643 - RNA, 14 nt, Human
uuugguagauuaaa

SEQ ID NO: 3586644 - RNA, 13 nt, Human
uuugguauuguau

SEQ ID NO: 3586645 - RNA, 17 nt, Human
uuugguccgucauaacc

SEQ ID NO: 3586646 - RNA, 16 nt, Human
uuuggucgaggaguaa

SEQ ID NO: 3586647 - RNA, 16 nt, Human
uuuggucuggacugac

SEQ ID NO: 3586648 - RNA, 21 nt, Human
uuuggucuuuuuuuguauuau

SEQ ID NO: 3586649 - RNA, 23 nt, Human
uuuggugaacauugcaauagaaa

SEQ ID NO: 3586650 - RNA, 18 nt, Human
uuuggugccuuuccuguu

SEQ ID NO: 3586651 - RNA, 21 nt, Human
uuuggugcuucucagauuucu

SEQ ID NO: 3586652 - RNA, 20 nt, Human
uuuggugcuuuuuauaaaaa

SEQ ID NO: 3586653 - RNA, 17 nt, Human
uuugguggauguaaaua

SEQ ID NO: 3586654 - RNA, 15 nt, Human
uuugguguacagacu

SEQ ID NO: 3586655 - RNA, 12 nt, Human
uuugguguaugg

SEQ ID NO: 3586656 - RNA, 13 nt, Human
uuugguguauggu

SEQ ID NO: 3586657 - RNA, 21 nt, Human
uuuggugucaacaugaaacac

SEQ ID NO: 3586658 - RNA, 16 nt, Human
uuuguauucucugagc

SEQ ID NO: 3586659 - RNA, 14 nt, Human
uuuguauuuucaug

SEQ ID NO: 3586660 - RNA, 15 nt, Human
uuuguauuuuccaag

SEQ ID NO: 3586661 - RNA, 17 nt, Human
uuuguauuuuuuugcaa

SEQ ID NO: 3586662 - RNA, 16 nt, Human
uuugucaaacuguaga

SEQ ID NO: 3586663 - RNA, 20 nt, Human
uuugucagaacuagaauuug

SEQ ID NO: 3586664 - RNA, 22 nt, Human
uuugucagaacuagaauuugau

SEQ ID NO: 3586665 - RNA, 14 nt, Human
uuugucagacuuua

SEQ ID NO: 3586666 - RNA, 17 nt, Human
uuugucaucagccacca

SEQ ID NO: 3586667 - RNA, 21 nt, Human
uuugucauuuucauuagcaaa

SEQ ID NO: 3586668 - RNA, 14 nt, Human
uuugucauuuugaa

SEQ ID NO: 3586669 - RNA, 17 nt, Human
uuugucauuuugaagcu

SEQ ID NO: 3586670 - RNA, 20 nt, Human
uuugucauuuugaagcuaau

SEQ ID NO: 3586671 - RNA, 13 nt, Human
uuuguccccaccg

SEQ ID NO: 3586672 - RNA, 15 nt, Human
uuugucccccaacuu

SEQ ID NO: 3586673 - RNA, 14 nt, Human
uuuguccccugcuu

SEQ ID NO: 3586674 - RNA, 17 nt, Human
uuuguccuaaaacaccu

SEQ ID NO: 3586675 - RNA, 22 nt, Human
uuuguccuuggggacaucucau

SEQ ID NO: 3586676 - RNA, 20 nt, Human
uuugucgaauuuuuauuauu

SEQ ID NO: 3586677 - RNA, 19 nt, Human
uuugucuaaaacaauaaaa

SEQ ID NO: 3586678 - RNA, 15 nt, Human
uuugucuacaccauu

SEQ ID NO: 3586679 - RNA, 18 nt, Human
uuugucucaguuggaaau

SEQ ID NO: 3586680 - RNA, 19 nt, Human
uuugucucaucccauucug

SEQ ID NO: 3586681 - RNA, 23 nt, Human
uuugucucugcaaacugccuucu

SEQ ID NO: 3586682 - RNA, 21 nt, Human
uuugucuguuuguuucaagaa

SEQ ID NO: 3586683 - RNA, 13 nt, Human
uuugucuuaaaaa

SEQ ID NO: 3586684 - RNA, 16 nt, Human
uuugucuugaaugucu

SEQ ID NO: 3586685 - RNA, 17 nt, Human
uuugucuuuaacuguca

SEQ ID NO: 3586686 - RNA, 19 nt, Human
uuugucuuuggugaacauu

SEQ ID NO: 3586687 - RNA, 20 nt, Human
uuugugaaacagacuuguau

SEQ ID NO: 3586688 - RNA, 17 nt, Human
uuugugaagcaaaauuu

SEQ ID NO: 3586689 - RNA, 20 nt, Human
uuugugaagguggaaauaaa

SEQ ID NO: 3586690 - RNA, 18 nt, Human
uuugugaauagaacucug

SEQ ID NO: 3586691 - RNA, 22 nt, Human
uuugugaauuaggcuguaacua

SEQ ID NO: 3586692 - RNA, 15 nt, Human
uuugugacauuccuu

SEQ ID NO: 3586693 - RNA, 14 nt, Human
uuugugacuauaua

SEQ ID NO: 3586694 - RNA, 22 nt, Human
uuugugacuauauagagauguu

SEQ ID NO: 3586695 - RNA, 23 nt, Human
uuugugacuauauagagauguuu

SEQ ID NO: 3586696 - RNA, 16 nt, Human
uuugugaguuuguuuc

SEQ ID NO: 3586697 - RNA, 14 nt, Human
uuugugauaauuua

SEQ ID NO: 3586698 - RNA, 22 nt, Human
uuugugauaugcacaauguaga

SEQ ID NO: 3586699 - RNA, 20 nt, Human
uuugugauauggagcccugu

SEQ ID NO: 3586700 - RNA, 21 nt, Human
uuugugcaaaagcuucaaauu

SEQ ID NO: 3586701 - RNA, 15 nt, Human
uuugugcaaagccaa

SEQ ID NO: 3586702 - RNA, 19 nt, Human
uuugugcauuaucuagaua

SEQ ID NO: 3586703 - RNA, 13 nt, Human
uuugugcauuuuc

SEQ ID NO: 3586704 - RNA, 15 nt, Human
uuugugcauuuucua

SEQ ID NO: 3586705 - RNA, 20 nt, Human
uuugugcuagaaauuuucaa

SEQ ID NO: 3586706 - RNA, 21 nt, Human
uuugugcuagaaauuuucaag

SEQ ID NO: 3586707 - RNA, 19 nt, Human
uuugugcugguguaugugu

SEQ ID NO: 3586708 - RNA, 13 nt, Human
uuugugcuguggg

SEQ ID NO: 3586709 - RNA, 17 nt, Human
uuuguggaaaauaacuc

SEQ ID NO: 3586710 - RNA, 19 nt, Human
uuuuauaaaccucuaauuu

SEQ ID NO: 3586711 - RNA, 13 nt, Human
uuuuauaaacuuu

SEQ ID NO: 3586712 - RNA, 22 nt, Human
uuuuauaaauacugcaaaucag

SEQ ID NO: 3586713 - RNA, 15 nt, Human
uuuuauaaauuaaau

SEQ ID NO: 3586714 - RNA, 20 nt, Human
uuuuauaacuaguccuuuac

SEQ ID NO: 3586715 - RNA, 15 nt, Human
uuuuauaagaaaacc

SEQ ID NO: 3586716 - RNA, 14 nt, Human
uuuuauaagcaaau

SEQ ID NO: 3586717 - RNA, 19 nt, Human
uuuuauaaggacuuccuga

SEQ ID NO: 3586718 - RNA, 15 nt, Human
uuuuauacacauaau

SEQ ID NO: 3586719 - RNA, 14 nt, Human
uuuuauacaguagu

SEQ ID NO: 3586720 - RNA, 21 nt, Human
uuuuauacauaaacaagacca

SEQ ID NO: 3586721 - RNA, 18 nt, Human
uuuuauacucuuucugua

SEQ ID NO: 3586722 - RNA, 17 nt, Human
uuuuauagccuggacug

SEQ ID NO: 3586723 - RNA, 20 nt, Human
uuuuauagccuggacugcua

SEQ ID NO: 3586724 - RNA, 22 nt, Human
uuuuauauaauaucuaaaguua

SEQ ID NO: 3586725 - RNA, 22 nt, Human
uuuuauauacagaggaaaucug

SEQ ID NO: 3586726 - RNA, 19 nt, Human
uuuuauauagcuugaaaca

SEQ ID NO: 3586727 - RNA, 12 nt, Human
uuuuauauauua

SEQ ID NO: 3586728 - RNA, 15 nt, Human
uuuuauauauuauau

SEQ ID NO: 3586729 - RNA, 20 nt, Human
uuuuauaugcuucuguuuua

SEQ ID NO: 3586730 - RNA, 16 nt, Human
uuuuauauguugcuau

SEQ ID NO: 3586731 - RNA, 11 nt, Human
uuuuauauuuc

SEQ ID NO: 3586732 - RNA, 18 nt, Human
uuuuauauuucaaguaca

SEQ ID NO: 3586733 - RNA, 22 nt, Human
uuuuauauuuccuuuaugugaa

SEQ ID NO: 3586734 - RNA, 13 nt, Human
uuuuauauuugua

SEQ ID NO: 3586735 - RNA, 15 nt, Human
uuuuaucaugacaug

SEQ ID NO: 3586736 - RNA, 17 nt, Human
uuuuaucaugacauguu

SEQ ID NO: 3586737 - RNA, 21 nt, Human
uuuuaugaagugcgugaaugu

SEQ ID NO: 3586738 - RNA, 21 nt, Human
uuuuaugacuucauuaauaau

SEQ ID NO: 3586739 - RNA, 16 nt, Human
uuuuaugagcuuccaa

SEQ ID NO: 3586740 - RNA, 16 nt, Human
uuuuaugauacuugaa

SEQ ID NO: 3586741 - RNA, 11 nt, Human
uuuuaugauau

SEQ ID NO: 3586742 - RNA, 13 nt, Human
uuuuaugauccag

SEQ ID NO: 3586743 - RNA, 16 nt, Human
uuuuaugaugaugaaa

SEQ ID NO: 3586744 - RNA, 15 nt, Human
uuuuaugcaaauauu

SEQ ID NO: 3586745 - RNA, 13 nt, Human
uuuuaugcagaua

SEQ ID NO: 3586746 - RNA, 18 nt, Human
uuuuaugcuuuaaacauu

SEQ ID NO: 3586747 - RNA, 19 nt, Human
uuuuauggcacuaguauuu

SEQ ID NO: 3586748 - RNA, 18 nt, Human
uuuuaugugaaacauguu

SEQ ID NO: 3586749 - RNA, 12 nt, Human
uuuuauguugac

SEQ ID NO: 3586750 - RNA, 18 nt, Human
uuuuauguugacauuugu

SEQ ID NO: 3586751 - RNA, 22 nt, Human
uuuuauguugcauagaauaaaa

SEQ ID NO: 3586752 - RNA, 15 nt, Human
uuuuauguuuagaua

SEQ ID NO: 3586753 - RNA, 12 nt, Human
uuuuauguuuga

SEQ ID NO: 3586754 - RNA, 16 nt, Human
uuuuauguuugaauau

SEQ ID NO: 3586755 - RNA, 22 nt, Human
uuuuauuaagcuuuuuggaauc

SEQ ID NO: 3586756 - RNA, 12 nt, Human
uuuuauuaauca

SEQ ID NO: 3586757 - RNA, 20 nt, Human
uuuuauuaaucacuguguau

SEQ ID NO: 3586758 - RNA, 11 nt, Human
uuuuauuaaug

SEQ ID NO: 3586759 - RNA, 13 nt, Human
uuuuauuaaugca

SEQ ID NO: 3586760 - RNA, 15 nt, Human
uuuuauuaguauugu

SEQ ID NO: 3586761 - RNA, 13 nt, Human
uuuuauuaugcau

SEQ ID NO: 3586762 - RNA, 12 nt, Human
uuuuauuaugcu

SEQ ID NO: 3586763 - RNA, 16 nt, Human
uuuuauuauuacuguu

SEQ ID NO: 3586764 - RNA, 15 nt, Human
uuuuauuauuguggu

SEQ ID NO: 3586765 - RNA, 22 nt, Human
uuuuauuauugugguaggccuu

SEQ ID NO: 3586766 - RNA, 14 nt, Human
uuuuauucaaggua

SEQ ID NO: 3586767 - RNA, 23 nt, Human
uuuuauucaagguaaaauucuaa

SEQ ID NO: 3586768 - RNA, 20 nt, Human
uuuuauucauaagccaauuu

SEQ ID NO: 3586769 - RNA, 15 nt, Human
uuuuauuccuguaug

SEQ ID NO: 3586770 - RNA, 13 nt, Human
uuuuauucuugau

SEQ ID NO: 3586771 - RNA, 14 nt, Human
aaggucuguuuuga

SEQ ID NO: 3586772 - RNA, 18 nt, Human
aaggucuuucaguacuuu

SEQ ID NO: 3586773 - RNA, 19 nt, Human
aaggucuuucaguacuuuu

SEQ ID NO: 3586774 - RNA, 13 nt, Human
aaggucuuugguu

SEQ ID NO: 3586775 - RNA, 16 nt, Human
aaggugaaggaauaua

SEQ ID NO: 3586776 - RNA, 17 nt, Human
aaggugaggccugucug

SEQ ID NO: 3586777 - RNA, 21 nt, Human
aaggugaggccugucugugac

SEQ ID NO: 3586778 - RNA, 20 nt, Human
aaggugaguuugagcugccu

SEQ ID NO: 3586779 - RNA, 15 nt, Human
aaggugauaaaauca

SEQ ID NO: 3586780 - RNA, 13 nt, Human
aaggugccacuuu

SEQ ID NO: 3586781 - RNA, 17 nt, Human
aaggugccauggaagag

SEQ ID NO: 3586782 - RNA, 19 nt, Human
aagguggaccuuuuaaagu

SEQ ID NO: 3586783 - RNA, 20 nt, Human
aagguggacuggaaggggcc

SEQ ID NO: 3586784 - RNA, 14 nt, Human
aagguggaguggau

SEQ ID NO: 3586785 - RNA, 11 nt, Human
aaggugggagg

SEQ ID NO: 3586786 - RNA, 20 nt, Human
aaggugggaggaugugaauu

SEQ ID NO: 3586787 - RNA, 22 nt, Human
aaggugggaggaugugaauugu

SEQ ID NO: 3586788 - RNA, 18 nt, Human
aaggugggcugagcccug

SEQ ID NO: 3586789 - RNA, 19 nt, Human
aaggugggcugagcccugg

SEQ ID NO: 3586790 - RNA, 16 nt, Human
aagguggggacaggga

SEQ ID NO: 3586791 - RNA, 13 nt, Human
aagguggggugga

SEQ ID NO: 3586792 - RNA, 22 nt, Human
aagguggucugcucgggcccag

SEQ ID NO: 3586793 - RNA, 12 nt, Human
aagguguauuua

SEQ ID NO: 3586794 - RNA, 18 nt, Human
aaggugucagaauaauaa

SEQ ID NO: 3586795 - RNA, 15 nt, Human
aagguguccuacaga

SEQ ID NO: 3586796 - RNA, 20 nt, Human
aagguguccuacagaaaaac

SEQ ID NO: 3586797 - RNA, 20 nt, Human
aaggugucuggacauucaga

SEQ ID NO: 3586798 - RNA, 20 nt, Human
aaggugucuuccucccaagu

SEQ ID NO: 3586799 - RNA, 21 nt, Human
aagguguuugaaaauaguuua

SEQ ID NO: 3586800 - RNA, 16 nt, Human
aagguguuuucugugu

SEQ ID NO: 3586801 - RNA, 19 nt, Human
aagguguuuucuguguaac

SEQ ID NO: 3586802 - RNA, 16 nt, Human
aagguuaagcccugag

SEQ ID NO: 3586803 - RNA, 15 nt, Human
aagguuaauaaagua

SEQ ID NO: 3586804 - RNA, 22 nt, Human
aagguuauaguaacaucaaaga

SEQ ID NO: 3586805 - RNA, 18 nt, Human
aagguuaucagugcuucc

SEQ ID NO: 3586806 - RNA, 17 nt, Human
aagguuauuuauuuaaa

SEQ ID NO: 3586807 - RNA, 17 nt, Human
aagguucacuaaagcag

SEQ ID NO: 3586808 - RNA, 22 nt, Human
aagguuccaaucagaucuuuau

SEQ ID NO: 3586809 - RNA, 17 nt, Human
aagguucccguugcauu

SEQ ID NO: 3586810 - RNA, 23 nt, Human
aagguuccgcuuggagcagaggg

SEQ ID NO: 3586811 - RNA, 13 nt, Human
aagguucuaaggc

SEQ ID NO: 3586812 - RNA, 21 nt, Human
aagguucucagguguugccaa

SEQ ID NO: 3586813 - RNA, 21 nt, Human
aagguucucuccuccccaagg

SEQ ID NO: 3586814 - RNA, 20 nt, Human
aagguucuucaucccuuucc

SEQ ID NO: 3586815 - RNA, 21 nt, Human
aagguucuucccuuuuacaua

SEQ ID NO: 3586816 - RNA, 17 nt, Human
aagguugaauaauauau

SEQ ID NO: 3586817 - RNA, 17 nt, Human
aagguuguauugcauau

SEQ ID NO: 3586818 - RNA, 22 nt, Human
aagguuuaaacuucucugaagg

SEQ ID NO: 3586819 - RNA, 23 nt, Human
aagguuuaaacuucucugaaggg

SEQ ID NO: 3586820 - RNA, 21 nt, Human
aagguuuaaaugaacaagaga

SEQ ID NO: 3586821 - RNA, 15 nt, Human
aagguuuaggcuggu

SEQ ID NO: 3586822 - RNA, 21 nt, Human
aagguuucguuucuguauaca

SEQ ID NO: 3586823 - RNA, 17 nt, Human
aagguuuguauauuguc

SEQ ID NO: 3586824 - RNA, 20 nt, Human
aagguuuuaauuuaguaaac

SEQ ID NO: 3586825 - RNA, 16 nt, Human
aagguuuuagguucua

SEQ ID NO: 3586826 - RNA, 15 nt, Human
aagguuuuauuuugu

SEQ ID NO: 3586827 - RNA, 13 nt, Human
aagguuuucucca

SEQ ID NO: 3586828 - RNA, 14 nt, Human
aagguuuucuccac

SEQ ID NO: 3586829 - RNA, 23 nt, Human
aagguuuuggaucuugaaugugg

SEQ ID NO: 3586830 - RNA, 14 nt, Human
aagguuuuugauag

SEQ ID NO: 3586831 - RNA, 17 nt, Human
aagguuuuuguaaagau

SEQ ID NO: 3586832 - RNA, 18 nt, Human
aagguuuuuguaaagauu

SEQ ID NO: 3586833 - RNA, 17 nt, Human
aaguaaaacaaacaaua

SEQ ID NO: 3586834 - RNA, 20 nt, Human
aaguaaaacaaacaauaccu

SEQ ID NO: 3586835 - RNA, 18 nt, Human
aaguaaaagcaaaaaaga

SEQ ID NO: 3586836 - RNA, 13 nt, Human
aaguaaacugccc

SEQ ID NO: 3586837 - RNA, 15 nt, Human
aaguaaaucucuucu

SEQ ID NO: 3586838 - RNA, 16 nt, Human
aaguaaaucucuucug

SEQ ID NO: 3586839 - RNA, 12 nt, Human
aaguaaaugcua

SEQ ID NO: 3586840 - RNA, 18 nt, Human
aaguaacuggugauauau

SEQ ID NO: 3586841 - RNA, 15 nt, Human
aaguaacuugucuua

SEQ ID NO: 3586842 - RNA, 18 nt, Human
aaguaacuugucuuaaau

SEQ ID NO: 3586843 - RNA, 13 nt, Human
aaguaacuuuaaa

SEQ ID NO: 3586844 - RNA, 21 nt, Human
aaguaacuuuauucuugaaag

SEQ ID NO: 3586845 - RNA, 13 nt, Human
aaguaagaaaaua

SEQ ID NO: 3586846 - RNA, 18 nt, Human
aaguaagaaagugaagca

SEQ ID NO: 3586847 - RNA, 21 nt, Human
aaguaagaaagugaagcaaau

SEQ ID NO: 3586848 - RNA, 14 nt, Human
aaguaagaagacau

SEQ ID NO: 3586849 - RNA, 15 nt, Human
aaguaagagacucag

SEQ ID NO: 3586850 - RNA, 20 nt, Human
aaguaaggugcuuggaguuu

SEQ ID NO: 3586851 - RNA, 16 nt, Human
aaguaauacaaacuaa

SEQ ID NO: 3586852 - RNA, 18 nt, Human
aaguaauaugcacacauu

SEQ ID NO: 3586853 - RNA, 14 nt, Human
aaguaauauuuauu

SEQ ID NO: 3586854 - RNA, 17 nt, Human
aaguaaucaucuaaguc

SEQ ID NO: 3586855 - RNA, 19 nt, Human
aaguaaugaauuuuuauga

SEQ ID NO: 3586856 - RNA, 21 nt, Human
aaguaaugaauuuuuaugaua

SEQ ID NO: 3586857 - RNA, 18 nt, Human
aaguaaugacagaacaug

SEQ ID NO: 3586858 - RNA, 14 nt, Human
aaguaaugccucug

SEQ ID NO: 3586859 - RNA, 15 nt, Human
aaguaaugccucugu

SEQ ID NO: 3586860 - RNA, 13 nt, Human
aaguaauguggaa

SEQ ID NO: 3586861 - RNA, 11 nt, Human
aaguaauuauc

SEQ ID NO: 3586862 - RNA, 15 nt, Human
aaguaauuaucggga

SEQ ID NO: 3586863 - RNA, 13 nt, Human
aaguaauuaugca

SEQ ID NO: 3586864 - RNA, 16 nt, Human
aaguaauuaugcacua

SEQ ID NO: 3586865 - RNA, 19 nt, Human
aaguaauuaugcacuaaau

SEQ ID NO: 3586866 - RNA, 23 nt, Human
aaguaauuucaguguaaagugug

SEQ ID NO: 3586867 - RNA, 16 nt, Human
aaguacacaauaagca

SEQ ID NO: 3586868 - RNA, 18 nt, Human
aaguacacuguuucaaac

SEQ ID NO: 3586869 - RNA, 19 nt, Human
aaguacagaauuugaauua

SEQ ID NO: 3586870 - RNA, 14 nt, Human
aaguacagagaagc

SEQ ID NO: 3586871 - RNA, 21 nt, Human
aaguacauauuaggaaaauau

SEQ ID NO: 3586872 - RNA, 21 nt, Human
aaguacauauuuauuuucuuu

SEQ ID NO: 3586873 - RNA, 12 nt, Human
aaguaccagacu

SEQ ID NO: 3586874 - RNA, 15 nt, Human
aaguacguuauuguu

SEQ ID NO: 3586875 - RNA, 14 nt, Human
aaguacuauaauuu

SEQ ID NO: 3586876 - RNA, 16 nt, Human
aaguacuauguaucaa

SEQ ID NO: 3586877 - RNA, 11 nt, Human
aaguacuguaa

SEQ ID NO: 3586878 - RNA, 15 nt, Human
aaguacuguaagaau

SEQ ID NO: 3586879 - RNA, 19 nt, Human
aaguacuguaagaauaauu

SEQ ID NO: 3586880 - RNA, 21 nt, Human
aaguacuguaauaauaccuca

SEQ ID NO: 3586881 - RNA, 20 nt, Human
aaguacuguuuaccauuuuu

SEQ ID NO: 3586882 - RNA, 19 nt, Human
aaguacuucuccacccugc

SEQ ID NO: 3586883 - RNA, 21 nt, Human
aaguacuugaguguaauguuu

SEQ ID NO: 3586884 - RNA, 22 nt, Human
aaguacuugaguguaauguuug

SEQ ID NO: 3586885 - RNA, 18 nt, Human
aaguagaaacaaaauaca

SEQ ID NO: 3586886 - RNA, 17 nt, Human
aaguagaacuuuguaua

SEQ ID NO: 3586887 - RNA, 21 nt, Human
aaguagaagucuuagauguau

SEQ ID NO: 3586888 - RNA, 19 nt, Human
aaguagacuacuguucagc

SEQ ID NO: 3586889 - RNA, 20 nt, Human
aaguagagguuguauacacc

SEQ ID NO: 3586890 - RNA, 14 nt, Human
aaguagcacaggcu

SEQ ID NO: 3586891 - RNA, 11 nt, Human
aaguagcauuu

SEQ ID NO: 3586892 - RNA, 15 nt, Human
aaguagcugggauuu

SEQ ID NO: 3586893 - RNA, 22 nt, Human
aaguaggacuuuccuaaauguu

SEQ ID NO: 3586894 - RNA, 23 nt, Human
aaguaggacuuuccuaaauguuu

SEQ ID NO: 3586895 - RNA, 13 nt, Human
aaguaguaaaaau

SEQ ID NO: 3586896 - RNA, 15 nt, Human
aaguaguaaaaauua

SEQ ID NO: 3586897 - RNA, 15 nt, Human
aaguagucugcucac

SEQ ID NO: 3586898 - RNA, 17 nt, Human
aaguaguguaucacagu

SEQ ID NO: 3586899 - RNA, 15 nt, Human
aaguaguuaucaugu

SEQ ID NO: 3586900 - RNA, 22 nt, Human
aaguaguucuguauuugaaagu

SEQ ID NO: 3586901 - RNA, 23 nt, Human
aaguaguucuguauuugaaagug

SEQ ID NO: 3586902 - RNA, 23 nt, Human
aaguaguucuguuuggugugucc

SEQ ID NO: 3586903 - RNA, 20 nt, Human
aaguauaaaauaguaugaaa

SEQ ID NO: 3586904 - RNA, 15 nt, Human
aaguauaaauuugug

SEQ ID NO: 3586905 - RNA, 20 nt, Human
aaguauaaauuuguguaaua

SEQ ID NO: 3586906 - RNA, 12 nt, Human
aaguauacaguu

SEQ ID NO: 3586907 - RNA, 12 nt, Human
aaguauacugua

SEQ ID NO: 3586908 - RNA, 16 nt, Human
aaguauagaaaaucuu

SEQ ID NO: 3586909 - RNA, 12 nt, Human
aaguauagagag

SEQ ID NO: 3586910 - RNA, 12 nt, Human
aaguauauaaug

SEQ ID NO: 3586911 - RNA, 13 nt, Human
aaguauauauuua

SEQ ID NO: 3586912 - RNA, 12 nt, Human
aaguauauuaaa

SEQ ID NO: 3586913 - RNA, 14 nt, Human
aaguauauuaaaca

SEQ ID NO: 3586914 - RNA, 12 nt, Human
aaguaucaugca

SEQ ID NO: 3586915 - RNA, 16 nt, Human
cuguucuaacauguaa

SEQ ID NO: 3586916 - RNA, 12 nt, Human
cuguucuaaggg

SEQ ID NO: 3586917 - RNA, 13 nt, Human
cuguucucugccc

SEQ ID NO: 3586918 - RNA, 15 nt, Human
cuguucucugcccuc

SEQ ID NO: 3586919 - RNA, 16 nt, Human
cuguucucugcccucc

SEQ ID NO: 3586920 - RNA, 20 nt, Human
cuguucugauauuaauuuau

SEQ ID NO: 3586921 - RNA, 13 nt, Human
cuguucugcacug

SEQ ID NO: 3586922 - RNA, 14 nt, Human
cuguucugcacuga

SEQ ID NO: 3586923 - RNA, 14 nt, Human
cuguucuggaggaa

SEQ ID NO: 3586924 - RNA, 22 nt, Human
cuguucuggaggaaagggagga

SEQ ID NO: 3586925 - RNA, 22 nt, Human
cuguucugguuuuuaaccauug

SEQ ID NO: 3586926 - RNA, 20 nt, Human
cuguucugugguuccucugc

SEQ ID NO: 3586927 - RNA, 21 nt, Human
cuguucuuagcucaaugagca

SEQ ID NO: 3586928 - RNA, 16 nt, Human
cuguucuuccucagcc

SEQ ID NO: 3586929 - RNA, 18 nt, Human
cuguucuuccucagccag

SEQ ID NO: 3586930 - RNA, 21 nt, Human
cuguucuuccuccagcugcac

SEQ ID NO: 3586931 - RNA, 13 nt, Human
cuguucuugcugc

SEQ ID NO: 3586932 - RNA, 15 nt, Human
cuguucuuggggccc

SEQ ID NO: 3586933 - RNA, 21 nt, Human
cuguucuuucuggcuaugcau

SEQ ID NO: 3586934 - RNA, 22 nt, Human
cuguugaaaauuauuuuaaaca

SEQ ID NO: 3586935 - RNA, 14 nt, Human
cuguugaaagcaaa

SEQ ID NO: 3586936 - RNA, 16 nt, Human
cuguugaaagcaaaaa

SEQ ID NO: 3586937 - RNA, 21 nt, Human
cuguugacacaggucuuuccu

SEQ ID NO: 3586938 - RNA, 17 nt, Human
cuguugacauauuuaau

SEQ ID NO: 3586939 - RNA, 18 nt, Human
cuguugacauauuuaaug

SEQ ID NO: 3586940 - RNA, 19 nt, Human
cuguugacauauuuaaugu

SEQ ID NO: 3586941 - RNA, 15 nt, Human
cuguugaccaggcac

SEQ ID NO: 3586942 - RNA, 17 nt, Human
cuguugagcaucacaga

SEQ ID NO: 3586943 - RNA, 21 nt, Human
cuguugauaauucuuauuuug

SEQ ID NO: 3586944 - RNA, 17 nt, Human
cuguugaugaggccucu

SEQ ID NO: 3586945 - RNA, 23 nt, Human
cuguugaugggaugauugaagaa

SEQ ID NO: 3586946 - RNA, 22 nt, Human
cuguugauguaucugaguugcc

SEQ ID NO: 3586947 - RNA, 21 nt, Human
cuguugauuaauuucugccau

SEQ ID NO: 3586948 - RNA, 14 nt, Human
cuguugauugcuaa

SEQ ID NO: 3586949 - RNA, 18 nt, Human
cuguugauugcuaaaugu

SEQ ID NO: 3586950 - RNA, 20 nt, Human
cuguugauugcuaaauguaa

SEQ ID NO: 3586951 - RNA, 22 nt, Human
cuguugauugcuaaauguaaca

SEQ ID NO: 3586952 - RNA, 21 nt, Human
cuguugcaauuaggauuuuga

SEQ ID NO: 3586953 - RNA, 22 nt, Human
cuguugcaauuaggauuuugau

SEQ ID NO: 3586954 - RNA, 14 nt, Human
cuguugcacccagc

SEQ ID NO: 3586955 - RNA, 19 nt, Human
cuguugcacccagcccugg

SEQ ID NO: 3586956 - RNA, 17 nt, Human
cuguugcacguguguuu

SEQ ID NO: 3586957 - RNA, 18 nt, Human
cuguugcacguguguuuu

SEQ ID NO: 3586958 - RNA, 23 nt, Human
ugcucaucucaguccucaaagcu

SEQ ID NO: 3586959 - RNA, 15 nt, Human
ugcucaucugcuggu

SEQ ID NO: 3586960 - RNA, 14 nt, Human
ugcucauggaauug

SEQ ID NO: 3586961 - RNA, 22 nt, Human
ugcucaugguccccauggcaug

SEQ ID NO: 3586962 - RNA, 12 nt, Human
ugcucauuuaag

SEQ ID NO: 3586963 - RNA, 14 nt, Human
ugcucauuucagga

SEQ ID NO: 3586964 - RNA, 14 nt, Human
ugcucauuucaugg

SEQ ID NO: 3586965 - RNA, 17 nt, Human
ugcuccaagauucuaga

SEQ ID NO: 3586966 - RNA, 13 nt, Human
ugcuccacagugu

SEQ ID NO: 3586967 - RNA, 14 nt, Human
ugcuccaccacauc

SEQ ID NO: 3586968 - RNA, 15 nt, Human
ugcuccaccacaucc

SEQ ID NO: 3586969 - RNA, 16 nt, Human
ugcuccaccccacuca

SEQ ID NO: 3586970 - RNA, 17 nt, Human
ugcuccaccccacucac

SEQ ID NO: 3586971 - RNA, 23 nt, Human
ugcuccacccuuggccugucuca

SEQ ID NO: 3586972 - RNA, 21 nt, Human
ugcuccaccuuucagcccacg

SEQ ID NO: 3586973 - RNA, 18 nt, Human
ugcuccacgcgcuucgac

SEQ ID NO: 3586974 - RNA, 22 nt, Human
ugcuccagaauuuggaaauccu

SEQ ID NO: 3586975 - RNA, 13 nt, Human
ugcuccagacagg

SEQ ID NO: 3586976 - RNA, 19 nt, Human
ugcuccagcaacacagccu

SEQ ID NO: 3586977 - RNA, 18 nt, Human
ugcuccagccaaccccug

SEQ ID NO: 3586978 - RNA, 20 nt, Human
ugcuccagccaaccccugug

SEQ ID NO: 3586979 - RNA, 23 nt, Human
ugcuccagccaaccccuguggag

SEQ ID NO: 3586980 - RNA, 14 nt, Human
ugcuccagccuggc

SEQ ID NO: 3586981 - RNA, 16 nt, Human
ugcuccagccuggcuc

SEQ ID NO: 3586982 - RNA, 18 nt, Human
ugcuccaggccugcagca

SEQ ID NO: 3586983 - RNA, 23 nt, Human
ugcuccauaguuuggcauuugca

SEQ ID NO: 3586984 - RNA, 22 nt, Human
ugcucccaaggggccugagcag

SEQ ID NO: 3586985 - RNA, 16 nt, Human
ugcucccaccuggcuc

SEQ ID NO: 3586986 - RNA, 18 nt, Human
ugcucccaccuggcucug

SEQ ID NO: 3586987 - RNA, 13 nt, Human
ugcucccagcagc

SEQ ID NO: 3586988 - RNA, 20 nt, Human
ugcucccagcagcccuaagg

SEQ ID NO: 3586989 - RNA, 22 nt, Human
ugcuccccacagcgucccuggc

SEQ ID NO: 3586990 - RNA, 22 nt, Human
ugcuccccagcccuggcucugc

SEQ ID NO: 3586991 - RNA, 14 nt, Human
ugcucccccacccc

SEQ ID NO: 3586992 - RNA, 16 nt, Human
ugcucccccacccccu

SEQ ID NO: 3586993 - RNA, 23 nt, Human
ugcucccccacccccuccccagg

SEQ ID NO: 3586994 - RNA, 15 nt, Human
ugcucccccuuuucc

SEQ ID NO: 3586995 - RNA, 15 nt, Human
ugcuccccucugaaa

SEQ ID NO: 3586996 - RNA, 18 nt, Human
ugcuccccugugccagcc

SEQ ID NO: 3586997 - RNA, 18 nt, Human
ugcucccuaagccagccu

SEQ ID NO: 3586998 - RNA, 19 nt, Human
ugcucccucagacuggggc

SEQ ID NO: 3586999 - RNA, 20 nt, Human
ugcucccuccccugcccugg

SEQ ID NO: 3587000 - RNA, 15 nt, Human
ugcucccucuccccc

SEQ ID NO: 3587001 - RNA, 13 nt, Human
ugcucccugaagc

SEQ ID NO: 3587002 - RNA, 18 nt, Human
ugcucccugaagccagcc

SEQ ID NO: 3587003 - RNA, 22 nt, Human
ugcucccugaagccagccuucu

SEQ ID NO: 3587004 - RNA, 13 nt, Human
ugcucccugacug

SEQ ID NO: 3587005 - RNA, 15 nt, Human
ugcucccuucagccc

SEQ ID NO: 3587006 - RNA, 16 nt, Human
ugcucccuucagcccc

SEQ ID NO: 3587007 - RNA, 20 nt, Human
ugcuccgaggacccaggaaa

SEQ ID NO: 3587008 - RNA, 18 nt, Human
ugcuccgccucugcuggc

SEQ ID NO: 3587009 - RNA, 14 nt, Human
ugcuccgccuggcc

SEQ ID NO: 3587010 - RNA, 16 nt, Human
ugcuccgccuggccug

SEQ ID NO: 3587011 - RNA, 15 nt, Human
ugcuccgcugcuccu

SEQ ID NO: 3587012 - RNA, 23 nt, Human
ugcuccgcugcuccuuggcuuac

SEQ ID NO: 3587013 - RNA, 17 nt, Human
ugcuccgugccuccacc

SEQ ID NO: 3587014 - RNA, 13 nt, Human
ugcuccgugcuug

SEQ ID NO: 3587015 - RNA, 14 nt, Human
ugcuccuagaggga

SEQ ID NO: 3587016 - RNA, 22 nt, Human
ugcuccuaggacccgucuccag

SEQ ID NO: 3587017 - RNA, 19 nt, Human
ugcuccucacugcccgcac

SEQ ID NO: 3587018 - RNA, 12 nt, Human
ugcuccuccagg

SEQ ID NO: 3587019 - RNA, 17 nt, Human
ugcuccucccuggcugc

SEQ ID NO: 3587020 - RNA, 14 nt, Human
ugcuccucuccagg

SEQ ID NO: 3587021 - RNA, 12 nt, Human
ugcuccugagcc

SEQ ID NO: 3587022 - RNA, 16 nt, Human
ugcuccugagccccca

SEQ ID NO: 3587023 - RNA, 21 nt, Human
ugcuccugagcccccagcuuc

SEQ ID NO: 3587024 - RNA, 21 nt, Human
ugcuccuggagccuuugaaua

SEQ ID NO: 3587025 - RNA, 20 nt, Human
ugcuccugggcuacaaggac

SEQ ID NO: 3587026 - RNA, 16 nt, Human
ugcuccuuagcugcca

SEQ ID NO: 3587027 - RNA, 19 nt, Human
ugcuccuuccaacaggagc

SEQ ID NO: 3587028 - RNA, 21 nt, Human
ugcuccuuccaacaggagcug

SEQ ID NO: 3587029 - RNA, 15 nt, Human
ugcuccuuccccauc

SEQ ID NO: 3587030 - RNA, 17 nt, Human
ugcuccuuggcuuaccu

SEQ ID NO: 3587031 - RNA, 19 nt, Human
ugcuccuuggcuuaccuga

SEQ ID NO: 3587032 - RNA, 18 nt, Human
ugcuccuugggcccuuug

SEQ ID NO: 3587033 - RNA, 16 nt, Human
ugcuccuuguuccuag

SEQ ID NO: 3587034 - RNA, 23 nt, Human
ugcucgauuauucccuguacaau

SEQ ID NO: 3587035 - RNA, 18 nt, Human
ugcucgcuguugcugaau

SEQ ID NO: 3587036 - RNA, 23 nt, Human
ugcucgggcccaggccaucuucc

SEQ ID NO: 3587037 - RNA, 14 nt, Human
ugcucuaaaauauu

SEQ ID NO: 3587038 - RNA, 23 nt, Human
ugcucuaaaauauuuaugaagaa

SEQ ID NO: 3587039 - RNA, 20 nt, Human
ugcucuacaaugacacacaa

SEQ ID NO: 3587040 - RNA, 16 nt, Human
ugcucuagaugagcug

SEQ ID NO: 3587041 - RNA, 20 nt, Human
ugcucuagaugagcugggcc

SEQ ID NO: 3587042 - RNA, 15 nt, Human
ugcucuaggaagaca

SEQ ID NO: 3587043 - RNA, 13 nt, Human
ugcucuagugccu

SEQ ID NO: 3587044 - RNA, 20 nt, Human
ugcucuaucucacagcacac

SEQ ID NO: 3587045 - RNA, 17 nt, Human
ugcucuaucucucaaaa

SEQ ID NO: 3587046 - RNA, 20 nt, Human
ugcucuaucuugcucuguaa

SEQ ID NO: 3587047 - RNA, 12 nt, Human
ugcucuauugua

SEQ ID NO: 3587048 - RNA, 21 nt, Human
ugcucuauuguagcauuucuu

SEQ ID NO: 3587049 - RNA, 19 nt, Human
ugcucucaaaccccugacc

SEQ ID NO: 3587050 - RNA, 20 nt, Human
ugcucucaccuugguuccug

SEQ ID NO: 3587051 - RNA, 19 nt, Human
ugcucuccaagucucagug

SEQ ID NO: 3587052 - RNA, 19 nt, Human
ugcucuccauucugcuccu

SEQ ID NO: 3587053 - RNA, 20 nt, Human
ugcucuccauucugcuccuu

SEQ ID NO: 3587054 - RNA, 13 nt, Human
ugcucuccccugc

SEQ ID NO: 3587055 - RNA, 13 nt, Human
ugcucuccucuuc

SEQ ID NO: 3587056 - RNA, 14 nt, Human
ugcucuccucuucu

SEQ ID NO: 3587057 - RNA, 18 nt, Human
ugcucuccucuugccacu

SEQ ID NO: 3587058 - RNA, 21 nt, Human
ugcucuccucuugccacugcc

SEQ ID NO: 3587059 - RNA, 22 nt, Human
ugcucucgcaccuuuccaaagu

SEQ ID NO: 3587060 - RNA, 14 nt, Human
ugcucucugcagcc

SEQ ID NO: 3587061 - RNA, 20 nt, Human
ugcucucugcagccagccca

SEQ ID NO: 3587062 - RNA, 13 nt, Human
ugcucucugccac

SEQ ID NO: 3587063 - RNA, 15 nt, Human
ugcucucuuucuguc

SEQ ID NO: 3587064 - RNA, 18 nt, Human
ugcucugaacacgaagcu

SEQ ID NO: 3587065 - RNA, 18 nt, Human
ugcucugagaagaggagc

SEQ ID NO: 3587066 - RNA, 22 nt, Human
ugcucugagaagaggagcccuc

SEQ ID NO: 3587067 - RNA, 12 nt, Human
ugcucugagagc

SEQ ID NO: 3587068 - RNA, 23 nt, Human
ugcucugagagcaaacuggcuug

SEQ ID NO: 3587069 - RNA, 16 nt, Human
ugcucugagccacagu

SEQ ID NO: 3587070 - RNA, 16 nt, Human
ugcucugaggcuucca

SEQ ID NO: 3587071 - RNA, 19 nt, Human
ugcucugaucauccacugu

SEQ ID NO: 3587072 - RNA, 14 nt, Human
ugcucugaucccuc

SEQ ID NO: 3587073 - RNA, 16 nt, Human
ugcucugaucccucua

SEQ ID NO: 3587074 - RNA, 18 nt, Human
ugcucugaugaagaggag

SEQ ID NO: 3587075 - RNA, 18 nt, Human
ugcucugaugcaucagaa

SEQ ID NO: 3587076 - RNA, 14 nt, Human
ugcucugauuuauc

SEQ ID NO: 3587077 - RNA, 18 nt, Human
ugcucugcauguuacaua

SEQ ID NO: 3587078 - RNA, 13 nt, Human
ugcucugcccaga

SEQ ID NO: 3587079 - RNA, 20 nt, Human
ugcucugcccagagcugggu

SEQ ID NO: 3587080 - RNA, 23 nt, Human
ugcucugccccagcuugggcaga

SEQ ID NO: 3587081 - RNA, 11 nt, Human
ugcucugcccu

SEQ ID NO: 3587082 - RNA, 12 nt, Human
ugcucugcccuu

SEQ ID NO: 3587083 - RNA, 15 nt, Human
ugcucugcugacaga

SEQ ID NO: 3587084 - RNA, 21 nt, Human
ugcucugcugacagacacagg

SEQ ID NO: 3587085 - RNA, 15 nt, Human
ugcucugcugaugac

SEQ ID NO: 3587086 - RNA, 19 nt, Human
ugcucuggaaaaugugacc

SEQ ID NO: 3587087 - RNA, 16 nt, Human
ugcucuggaagagagg

SEQ ID NO: 3587088 - RNA, 14 nt, Human
ugcucuggaauuug

SEQ ID NO: 3587089 - RNA, 14 nt, Human
ugcucuggacaggc

SEQ ID NO: 3587090 - RNA, 15 nt, Human
ugcucuggacaggca

SEQ ID NO: 3587091 - RNA, 16 nt, Human
ugcucuggaccugccc

SEQ ID NO: 3587092 - RNA, 20 nt, Human
ugcucuggaccugcccccgc

SEQ ID NO: 3587093 - RNA, 18 nt, Human
ugcucugguuguuucugu

SEQ ID NO: 3587094 - RNA, 19 nt, Human
ugcucugguuguuucuguu

SEQ ID NO: 3587095 - RNA, 14 nt, Human
ugcucuguagccua

SEQ ID NO: 3587096 - RNA, 20 nt, Human
ugcucuguaggagcuacccu

SEQ ID NO: 3587097 - RNA, 16 nt, Human
ugcucuuaauugccac

SEQ ID NO: 3587098 - RNA, 20 nt, Human
ugcucuuacuacacugagga

SEQ ID NO: 3587099 - RNA, 15 nt, Human
ugcucuuagcugucu

SEQ ID NO: 3587100 - RNA, 13 nt, Human
ugcucuuauuuca

SEQ ID NO: 3587101 - RNA, 17 nt, Human
ugcucuucagaugccac

SEQ ID NO: 3587102 - RNA, 18 nt, Human
ugcucuucagaugccacu

SEQ ID NO: 3587103 - RNA, 14 nt, Human
ugcucuucuuuaga

SEQ ID NO: 3587104 - RNA, 17 nt, Human
ugcucuugaugccuggc

SEQ ID NO: 3587105 - RNA, 14 nt, Human
ugcucuugucccac

SEQ ID NO: 3587106 - RNA, 19 nt, Human
ugcucuuucccacccagcc

SEQ ID NO: 3587107 - RNA, 21 nt, Human
ugcucuuucccacccagccug

SEQ ID NO: 3587108 - RNA, 13 nt, Human
ugcucuuuucucc

SEQ ID NO: 3587109 - RNA, 21 nt, Human
ugcucuuuucuccucacugua

SEQ ID NO: 3587110 - RNA, 23 nt, Human
ugcucuuuucuccucacuguauc

SEQ ID NO: 3587111 - RNA, 17 nt, Human
ugcucuuuuuuacucau

SEQ ID NO: 3587112 - RNA, 18 nt, Human
ugcucuuuuuuacucauu

SEQ ID NO: 3587113 - RNA, 19 nt, Human
ugcugaaaacuagcucgug

SEQ ID NO: 3587114 - RNA, 21 nt, Human
ugcugaaaauguccuugugau

SEQ ID NO: 3587115 - RNA, 17 nt, Human
ugcugaaacaacaaaua

SEQ ID NO: 3587116 - RNA, 17 nt, Human
ugcugaaauuuuauaug

SEQ ID NO: 3587117 - RNA, 15 nt, Human
ugcugaacaaaaaau

SEQ ID NO: 3587118 - RNA, 20 nt, Human
ugcugaacaaaaaauaaaaa

SEQ ID NO: 3587119 - RNA, 16 nt, Human
ugcugaacaccuugug

SEQ ID NO: 3587120 - RNA, 16 nt, Human
ugcugaagaaucuacu

SEQ ID NO: 3587121 - RNA, 14 nt, Human
ugcugaagcugccu

SEQ ID NO: 3587122 - RNA, 18 nt, Human
ugcugaagggcauucuuu

SEQ ID NO: 3587123 - RNA, 21 nt, Human
ugcugaagggcauucuuuccc

SEQ ID NO: 3587124 - RNA, 22 nt, Human
ugcugaagguggggauugccca

SEQ ID NO: 3587125 - RNA, 18 nt, Human
ugcugaauacagaggcaa

SEQ ID NO: 3587126 - RNA, 21 nt, Human
ugcugaauaggcgaucacaac

SEQ ID NO: 3587127 - RNA, 19 nt, Human
ugcugaaucggaaucucug

SEQ ID NO: 3587128 - RNA, 23 nt, Human
ugcugaaugccgcgaugggucag

SEQ ID NO: 3587129 - RNA, 17 nt, Human
ugcugaaugguuuucaa

SEQ ID NO: 3587130 - RNA, 18 nt, Human
ugcugaaugguuuucaaa

SEQ ID NO: 3587131 - RNA, 15 nt, Human
ugcugacagcugacc

SEQ ID NO: 3587132 - RNA, 14 nt, Human
ugcugacagcugcu

SEQ ID NO: 3587133 - RNA, 16 nt, Human
ugcugacagcugcucc

SEQ ID NO: 3587134 - RNA, 23 nt, Human
ugcugaccaauugugcugccauu

SEQ ID NO: 3587135 - RNA, 18 nt, Human
ugcugacccaugggcagg

SEQ ID NO: 3587136 - RNA, 21 nt, Human
ugcugacccaugggcaggaga

SEQ ID NO: 3587137 - RNA, 21 nt, Human
ugcugaccucagcgguugcca

SEQ ID NO: 3587138 - RNA, 13 nt, Human
ugcugaccugcug

SEQ ID NO: 3587139 - RNA, 16 nt, Human
ugcugacuguacuccu

SEQ ID NO: 3587140 - RNA, 21 nt, Human
ugcugacuguacuccucccag

SEQ ID NO: 3587141 - RNA, 17 nt, Human
ugcugacuguagcuuug

SEQ ID NO: 3587142 - RNA, 15 nt, Human
ugcugagaaaacaug

SEQ ID NO: 3587143 - RNA, 19 nt, Human
ugcugagaaccuggccuuc

SEQ ID NO: 3587144 - RNA, 14 nt, Human
ugcugagaagcuuu

SEQ ID NO: 3587145 - RNA, 14 nt, Human
ugcugagagaaaua

SEQ ID NO: 3587146 - RNA, 23 nt, Human
ugcugagagaaauauggaacuua

SEQ ID NO: 3587147 - RNA, 18 nt, Human
ugcugagagacccaagga

SEQ ID NO: 3587148 - RNA, 22 nt, Human
ugcugagagacccaaggaggaa

SEQ ID NO: 3587149 - RNA, 18 nt, Human
ugcugagauacauacaga

SEQ ID NO: 3587150 - RNA, 20 nt, Human
ugcugagauuacagguguga

SEQ ID NO: 3587151 - RNA, 16 nt, Human
ugcugagauucuucag

SEQ ID NO: 3587152 - RNA, 23 nt, Human
ugcugagccuguaaaauaaaagg

SEQ ID NO: 3587153 - RNA, 13 nt, Human
ugcugagcucuga

SEQ ID NO: 3587154 - RNA, 23 nt, Human
ugcugagcucugagaggcccugg

SEQ ID NO: 3587155 - RNA, 15 nt, Human
ugcugagcuguuuau

SEQ ID NO: 3587156 - RNA, 13 nt, Human
ugcugaggccugg

SEQ ID NO: 3587157 - RNA, 14 nt, Human
ugcugaggccuggg

SEQ ID NO: 3587158 - RNA, 15 nt, Human
ugcugaggccugggc

SEQ ID NO: 3587159 - RNA, 24 nt, Human
ugcugaguagaugcgcagccccau

SEQ ID NO: 3587160 - RNA, 17 nt, Human
ugcugagucaucuguua

SEQ ID NO: 3587161 - RNA, 19 nt, Human
ugcugagucaucuguuagg

SEQ ID NO: 3587162 - RNA, 15 nt, Human
ugcugagucccaggc

SEQ ID NO: 3587163 - RNA, 21 nt, Human
ugcugagucugaaggcugggu

SEQ ID NO: 3587164 - RNA, 23 nt, Human
ugcugagucugaaggcuggguuc

SEQ ID NO: 3587165 - RNA, 23 nt, Human
ugcugaguguacagaguggaaua

SEQ ID NO: 3587166 - RNA, 17 nt, Human
ugcugaguuugugcugg

SEQ ID NO: 3587167 - RNA, 18 nt, Human
ugcugauauuuucucuag

SEQ ID NO: 3587168 - RNA, 21 nt, Human
ugcugaucaucgccagaggug

SEQ ID NO: 3587169 - RNA, 19 nt, Human
ugcugaugaaucacuguuu

SEQ ID NO: 3587170 - RNA, 23 nt, Human
ugcugaugacccccccagcuuca

SEQ ID NO: 3587171 - RNA, 20 nt, Human
ugcugauguucaguguaauu

SEQ ID NO: 3587172 - RNA, 23 nt, Human
ugcugauguucaguguaauuucu

SEQ ID NO: 3587173 - RNA, 16 nt, Human
ugcugauuuccccucu

SEQ ID NO: 3587174 - RNA, 13 nt, Human
ugcugauuuuaau

SEQ ID NO: 3587175 - RNA, 16 nt, Human
ugcugcaaacuuaaug

SEQ ID NO: 3587176 - RNA, 17 nt, Human
ugcugcaacaaaaugua

SEQ ID NO: 3587177 - RNA, 14 nt, Human
ugcugcaccaaccc

SEQ ID NO: 3587178 - RNA, 17 nt, Human
ugcugcaccaacccagc

SEQ ID NO: 3587179 - RNA, 19 nt, Human
ugcugcaccaacccagccg

SEQ ID NO: 3587180 - RNA, 15 nt, Human
ugcugcacuuccugu

SEQ ID NO: 3587181 - RNA, 17 nt, Human
ugcugcacuuccuguuu

SEQ ID NO: 3587182 - RNA, 14 nt, Human
ugcugcagcucccu

SEQ ID NO: 3587183 - RNA, 16 nt, Human
ugcugcagggcuuuaa

SEQ ID NO: 3587184 - RNA, 16 nt, Human
ugcugcaguugccagu

SEQ ID NO: 3587185 - RNA, 23 nt, Human
ugcugcaguugccagucaccccg

SEQ ID NO: 3587186 - RNA, 23 nt, Human
ugcugcaucuuauagcacuuuga

SEQ ID NO: 3587187 - RNA, 15 nt, Human
ugcuucuuucauuuu

SEQ ID NO: 3587188 - RNA, 16 nt, Human
ugcuugaaggcccugc

SEQ ID NO: 3587189 - RNA, 12 nt, Human
ugcuugaauagc

SEQ ID NO: 3587190 - RNA, 15 nt, Human
ugcuugacaacaucu

SEQ ID NO: 3587191 - RNA, 20 nt, Human
ugcuugacauaauuucacug

SEQ ID NO: 3587192 - RNA, 21 nt, Human
ugcuugagccaggaggccugc

SEQ ID NO: 3587193 - RNA, 16 nt, Human
ugcuugagcccaggag

SEQ ID NO: 3587194 - RNA, 20 nt, Human
ugcuugagucagguuugagu

SEQ ID NO: 3587195 - RNA, 13 nt, Human
ugcuugauagaaa

SEQ ID NO: 3587196 - RNA, 18 nt, Human
ugcuugaugguuuauguu

SEQ ID NO: 3587197 - RNA, 12 nt, Human
ugcuugauuuuu

SEQ ID NO: 3587198 - RNA, 22 nt, Human
ugcuugcacuuuguaacauguu

SEQ ID NO: 3587199 - RNA, 16 nt, Human
ugcuugcaguagauuu

SEQ ID NO: 3587200 - RNA, 19 nt, Human
ugcuugcaguagauuuucu

SEQ ID NO: 3587201 - RNA, 21 nt, Human
ugcuugccaaggcagaggccu

SEQ ID NO: 3587202 - RNA, 18 nt, Human
ugcuugcccccaugcugg

SEQ ID NO: 3587203 - RNA, 14 nt, Human
ugcuugccuagggc

SEQ ID NO: 3587204 - RNA, 22 nt, Human
ugcuugccuagggccuggucca

SEQ ID NO: 3587205 - RNA, 20 nt, Human
ugcuugccugcagggccaug

SEQ ID NO: 3587206 - RNA, 19 nt, Human
ugcuugccugcguuuugga

SEQ ID NO: 3587207 - RNA, 19 nt, Human
ugcuugcggcaaaaggaaa

SEQ ID NO: 3587208 - RNA, 17 nt, Human
ugcuuggaacauacugu

SEQ ID NO: 3587209 - RNA, 21 nt, Human
ugcuuggaauaucugcuguau

SEQ ID NO: 3587210 - RNA, 20 nt, Human
ugcuuggaccucgugcuuua

SEQ ID NO: 3587211 - RNA, 15 nt, Human
ugcuuggcccaggag

SEQ ID NO: 3587212 - RNA, 19 nt, Human
ugcuuggcugcuuggccuu

SEQ ID NO: 3587213 - RNA, 15 nt, Human
ugcuugggaaggggc

SEQ ID NO: 3587214 - RNA, 12 nt, Human
ugcuugggcuuc

SEQ ID NO: 3587215 - RNA, 20 nt, Human
ugcuuggggggugaugaggg

SEQ ID NO: 3587216 - RNA, 16 nt, Human
ugcuuggucuguuuga

SEQ ID NO: 3587217 - RNA, 18 nt, Human
ugcuuguaacaagaaaac

SEQ ID NO: 3587218 - RNA, 14 nt, Human
ugcuuguacauaau

SEQ ID NO: 3587219 - RNA, 14 nt, Human
ugcuuguaccucug

SEQ ID NO: 3587220 - RNA, 19 nt, Human
ugcuuguauuuuuuaaugc

SEQ ID NO: 3587221 - RNA, 20 nt, Human
ugcuugugaaaauguguucu

SEQ ID NO: 3587222 - RNA, 12 nt, Human
ugcuuguguuaa

SEQ ID NO: 3587223 - RNA, 15 nt, Human
ugcuuguguuaagua

SEQ ID NO: 3587224 - RNA, 20 nt, Human
ugcuuguuaaugcuuucuga

SEQ ID NO: 3587225 - RNA, 14 nt, Human
ugcuuguugacaga

SEQ ID NO: 3587226 - RNA, 15 nt, Human
ugcuuguuucuuggu

SEQ ID NO: 3587227 - RNA, 16 nt, Human
ugcuuuaaaaacuauu

SEQ ID NO: 3587228 - RNA, 13 nt, Human
ugcuuuaaagaua

SEQ ID NO: 3587229 - RNA, 23 nt, Human
ugcuuuaaaguguaauaauauga

SEQ ID NO: 3587230 - RNA, 15 nt, Human
ugcuuuaauaucauc

SEQ ID NO: 3587231 - RNA, 19 nt, Human
ugcuuuaauuguuaagaua

SEQ ID NO: 3587232 - RNA, 19 nt, Human
ugcuuuaccaaacagcaaa

SEQ ID NO: 3587233 - RNA, 21 nt, Human
ugcuuuaccaauugaaguaaa

SEQ ID NO: 3587234 - RNA, 14 nt, Human
ugcuuuacugucaa

SEQ ID NO: 3587235 - RNA, 16 nt, Human
ugcuuuagacuugaaa

SEQ ID NO: 3587236 - RNA, 22 nt, Human
ugcuuuagcuugaaaaggugac

SEQ ID NO: 3587237 - RNA, 12 nt, Human
ugcuuuauaaau

SEQ ID NO: 3587238 - RNA, 14 nt, Human
ugcuuuauuccaga

SEQ ID NO: 3587239 - RNA, 17 nt, Human
ugcuuuauuccagaaug

SEQ ID NO: 3587240 - RNA, 13 nt, Human
ugcuuuauuugua

SEQ ID NO: 3587241 - RNA, 15 nt, Human
ugcuuuauuuguaaa

SEQ ID NO: 3587242 - RNA, 16 nt, Human
ugcuuuauuuguaaau

SEQ ID NO: 3587243 - RNA, 23 nt, Human
ugcuuuauuuguaaauuuagugu

SEQ ID NO: 3587244 - RNA, 12 nt, Human
ugcuuucacucu

SEQ ID NO: 3587245 - RNA, 16 nt, Human
ugcuuucagaagugcc

SEQ ID NO: 3587246 - RNA, 20 nt, Human
ugcuuuccaaaccuuaucuc

SEQ ID NO: 3587247 - RNA, 12 nt, Human
ugcuuuccagcu

SEQ ID NO: 3587248 - RNA, 21 nt, Human
ugcuuuccauucgugaaaaca

SEQ ID NO: 3587249 - RNA, 13 nt, Human
ugcuuuccccugu

SEQ ID NO: 3587250 - RNA, 17 nt, Human
ugcuuucgguuccaguu

SEQ ID NO: 3587251 - RNA, 21 nt, Human
ugcuuucuaugcuguuuguag

SEQ ID NO: 3587252 - RNA, 15 nt, Human
ugcuuucugaagcuu

SEQ ID NO: 3587253 - RNA, 20 nt, Human
ugcuuucugcucagcuucuc

SEQ ID NO: 3587254 - RNA, 16 nt, Human
ugcuuugaaguagcuc

SEQ ID NO: 3587255 - RNA, 20 nt, Human
ugcuuugaaguagcucuuuu

SEQ ID NO: 3587256 - RNA, 15 nt, Human
ugcuuugagagagaa

SEQ ID NO: 3587257 - RNA, 17 nt, Human
ugcuuugauauuucaau

SEQ ID NO: 3587258 - RNA, 17 nt, Human
ugcuuugcccacaugcc

SEQ ID NO: 3587259 - RNA, 12 nt, Human
ugcuuugcucuu

SEQ ID NO: 3587260 - RNA, 14 nt, Human
ugcuuugcucuugu

SEQ ID NO: 3587261 - RNA, 17 nt, Human
ugcuuuggaaaacccag

SEQ ID NO: 3587262 - RNA, 18 nt, Human
ugcuuuggaccuaaaugg

SEQ ID NO: 3587263 - RNA, 22 nt, Human
ugcuuuggaccuaaauggccuc

SEQ ID NO: 3587264 - RNA, 15 nt, Human
ugcuuugggaagccg

SEQ ID NO: 3587265 - RNA, 21 nt, Human
ugcuuuggucacuuuuagaug

SEQ ID NO: 3587266 - RNA, 17 nt, Human
ugcuuuggucuugcccc

SEQ ID NO: 3587267 - RNA, 23 nt, Human
ugcuuuguaagugaaaaacauga

SEQ ID NO: 3587268 - RNA, 22 nt, Human
ugcuuuguagaguuuugucauu

SEQ ID NO: 3587269 - RNA, 12 nt, Human
ugcuuugucucc

SEQ ID NO: 3587270 - RNA, 14 nt, Human
ugcuuugucuccuc

SEQ ID NO: 3587271 - RNA, 12 nt, Human
ugcuuugugauu

SEQ ID NO: 3587272 - RNA, 16 nt, Human
ugcuuugugauuuuug

SEQ ID NO: 3587273 - RNA, 17 nt, Human
ugcuuugugauuuuugu

SEQ ID NO: 3587274 - RNA, 14 nt, Human
ugcuuuguguucuu

SEQ ID NO: 3587275 - RNA, 21 nt, Human
ugcuuuguuaccuuaaaacua

SEQ ID NO: 3587276 - RNA, 13 nt, Human
ugcuuuguugcac

SEQ ID NO: 3587277 - RNA, 15 nt, Human
ugcuuuguugugugc

SEQ ID NO: 3587278 - RNA, 16 nt, Human
ugcuuuguugugugcc

SEQ ID NO: 3587279 - RNA, 24 nt, Human
ugcuuuguugugugccucuagcug

SEQ ID NO: 3587280 - RNA, 10 nt, Human
ugcuuuuaaa

SEQ ID NO: 3587281 - RNA, 17 nt, Human
ugcuuuuaaaaaaaaau

SEQ ID NO: 3587282 - RNA, 17 nt, Human
ugcuuuuaaaacuacuu

SEQ ID NO: 3587283 - RNA, 19 nt, Human
ugcuuuuaaaauuuuaagc

SEQ ID NO: 3587284 - RNA, 19 nt, Human
ugcuuuuaaggaaaggcaa

SEQ ID NO: 3587285 - RNA, 12 nt, Human
ugcuuuuaauua

SEQ ID NO: 3587286 - RNA, 17 nt, Human
ugcuuuuaccaugcccc

SEQ ID NO: 3587287 - RNA, 22 nt, Human
ugcuuuucacugcugcaaggcc

SEQ ID NO: 3587288 - RNA, 14 nt, Human
ugcuuuucauccuu

SEQ ID NO: 3587289 - RNA, 13 nt, Human
ugcuuuucccucu

SEQ ID NO: 3587290 - RNA, 14 nt, Human
ugcuuuucccucuu

SEQ ID NO: 3587291 - RNA, 22 nt, Human
ugcuuuuccuuggggcaggcag

SEQ ID NO: 3587292 - RNA, 15 nt, Human
ugcuuuucugcccug

SEQ ID NO: 3587293 - RNA, 18 nt, Human
ugcuuuucugcccuggcu

SEQ ID NO: 3587294 - RNA, 17 nt, Human
ugcuuuucuguauuuua

SEQ ID NO: 3587295 - RNA, 17 nt, Human
ugcuuuucuuuucuaac

SEQ ID NO: 3587296 - RNA, 14 nt, Human
ugcuuuugcuucua

SEQ ID NO: 3587297 - RNA, 21 nt, Human
ugcuuuuggcaaaacucuacu

SEQ ID NO: 3587298 - RNA, 18 nt, Human
ugcuuuuggucuguguga

SEQ ID NO: 3587299 - RNA, 17 nt, Human
ugcuuuuuaaguguuaa

SEQ ID NO: 3587300 - RNA, 16 nt, Human
ugcuuuuuauaaaaag

SEQ ID NO: 3587301 - RNA, 16 nt, Human
ugcuuuuuauggccug

SEQ ID NO: 3587302 - RNA, 14 nt, Human
ugcuuuuucuaaug

SEQ ID NO: 3587303 - RNA, 17 nt, Human
ugcuuuuucucaaaaug

SEQ ID NO: 3587304 - RNA, 17 nt, Human
ugcuuuuuuaaauauua

SEQ ID NO: 3587305 - RNA, 20 nt, Human
ugcuuuuuuccaaaacaaaa

SEQ ID NO: 3587306 - RNA, 17 nt, Human
ugcuuuuuuguuuuggc

SEQ ID NO: 3587307 - RNA, 20 nt, Human
ugcuuuuuuugaaacuuuga

SEQ ID NO: 3587308 - RNA, 23 nt, Human
ugcuuuuuuuguguguauuugcu

SEQ ID NO: 3587309 - RNA, 17 nt, Human
ugcuuuuuuuuuuccag

SEQ ID NO: 3587310 - RNA, 19 nt, Human
ugcuuuuuuuuuuccagca

SEQ ID NO: 3587311 - RNA, 23 nt, Human
uggaaaaaaaaaaaagaggaaaa

SEQ ID NO: 3587312 - RNA, 14 nt, Human
uggaaaaaaacauc

SEQ ID NO: 3587313 - RNA, 16 nt, Human
uggaaaaacagcaugu

SEQ ID NO: 3587314 - RNA, 20 nt, Human
uggaaaaauagccugccucu

SEQ ID NO: 3587315 - RNA, 13 nt, Human
uggaaaaauccag

SEQ ID NO: 3587316 - RNA, 14 nt, Human
uggaaaaauguuug

SEQ ID NO: 3587317 - RNA, 16 nt, Human
uggaaaaauuccagaa

SEQ ID NO: 3587318 - RNA, 18 nt, Human
uggaaaacagaacacuua

SEQ ID NO: 3587319 - RNA, 15 nt, Human
uggaaaacuguguug

SEQ ID NO: 3587320 - RNA, 20 nt, Human
uggaaaacuguguugccaca

SEQ ID NO: 3587321 - RNA, 15 nt, Human
uggaaaagaacuguu

SEQ ID NO: 3587322 - RNA, 16 nt, Human
uggaaaagaggaguuu

SEQ ID NO: 3587323 - RNA, 15 nt, Human
uggaaaaggaagacu

SEQ ID NO: 3587324 - RNA, 19 nt, Human
uggaaaagggucuugggaa

SEQ ID NO: 3587325 - RNA, 21 nt, Human
uggaaaagggucuugggaaau

SEQ ID NO: 3587326 - RNA, 17 nt, Human
uggaaaauaaaaggucu

SEQ ID NO: 3587327 - RNA, 15 nt, Human
uggaaaauaaauuau

SEQ ID NO: 3587328 - RNA, 16 nt, Human
uggaaaauaaauuauu

SEQ ID NO: 3587329 - RNA, 15 nt, Human
uggaaaauucauuuu

SEQ ID NO: 3587330 - RNA, 13 nt, Human
uggaaacaagaug

SEQ ID NO: 3587331 - RNA, 23 nt, Human
uggaaacacuaaauguuaaagau

SEQ ID NO: 3587332 - RNA, 22 nt, Human
uggaaacagcucgacuuuaaaa

SEQ ID NO: 3587333 - RNA, 21 nt, Human
uggaaacccuuaggacagggu

SEQ ID NO: 3587334 - RNA, 19 nt, Human
uggaaaccucuacauauuu

SEQ ID NO: 3587335 - RNA, 14 nt, Human
uggaaaccugcccu

SEQ ID NO: 3587336 - RNA, 15 nt, Human
uggaaaccugcccug

SEQ ID NO: 3587337 - RNA, 16 nt, Human
uggaaaccugcccugc

SEQ ID NO: 3587338 - RNA, 17 nt, Human
uggaaaccugcccugcc

SEQ ID NO: 3587339 - RNA, 19 nt, Human
uggaaaccugucugagguu

SEQ ID NO: 3587340 - RNA, 19 nt, Human
uggaaaccuuccacccagu

SEQ ID NO: 3587341 - RNA, 14 nt, Human
uggaaacuaauaaa

SEQ ID NO: 3587342 - RNA, 19 nt, Human
uggaaacuaauaaaauauu

SEQ ID NO: 3587343 - RNA, 22 nt, Human
uggaaacuaauaaaauauuuuc

SEQ ID NO: 3587344 - RNA, 23 nt, Human
uggaaacuaauaaaauauuuucu

SEQ ID NO: 3587345 - RNA, 21 nt, Human
uggaaacuauguguuuuucuc

SEQ ID NO: 3587346 - RNA, 18 nt, Human
uggaaacucuuuaacuuc

SEQ ID NO: 3587347 - RNA, 21 nt, Human
uggaaacuguugccagagaug

SEQ ID NO: 3587348 - RNA, 16 nt, Human
uggaaagaaucuaaua

SEQ ID NO: 3587349 - RNA, 21 nt, Human
uggaaagacuuuuccaacccu

SEQ ID NO: 3587350 - RNA, 12 nt, Human
uggaaagcaaag

SEQ ID NO: 3587351 - RNA, 12 nt, Human
uggaaagcaggu

SEQ ID NO: 3587352 - RNA, 16 nt, Human
uggaaagcaucaccuc

SEQ ID NO: 3587353 - RNA, 14 nt, Human
uggaaagccucugc

SEQ ID NO: 3587354 - RNA, 21 nt, Human
uggaaaggaaugcaaagauga

SEQ ID NO: 3587355 - RNA, 14 nt, Human
uggaaaggagagga

SEQ ID NO: 3587356 - RNA, 16 nt, Human
uggaaaggagaggaaa

SEQ ID NO: 3587357 - RNA, 17 nt, Human
uggaaaggagaggaaag

SEQ ID NO: 3587358 - RNA, 23 nt, Human
uggaaaggagaggaaagaacuca

SEQ ID NO: 3587359 - RNA, 13 nt, Human
uggaaaggcucag

SEQ ID NO: 3587360 - RNA, 23 nt, Human
uggaaaggcucagucucaggagc

SEQ ID NO: 3587361 - RNA, 22 nt, Human
uggaaaggugugagacugggaa

SEQ ID NO: 3587362 - RNA, 19 nt, Human
uggaaaguaacucauuugu

SEQ ID NO: 3587363 - RNA, 15 nt, Human
uggaaaguaacugug

SEQ ID NO: 3587364 - RNA, 20 nt, Human
uggaaaguacacucugcugu

SEQ ID NO: 3587365 - RNA, 15 nt, Human
uggaaagugaauuug

SEQ ID NO: 3587366 - RNA, 17 nt, Human
uggaaagugaauuugaa

SEQ ID NO: 3587367 - RNA, 15 nt, Human
uggaaaguguaaagc

SEQ ID NO: 3587368 - RNA, 16 nt, Human
uggaaaguguaaagca

SEQ ID NO: 3587369 - RNA, 17 nt, Human
uggaaaguguaaagcau

SEQ ID NO: 3587370 - RNA, 18 nt, Human
uggaaaguguaaagcauu

SEQ ID NO: 3587371 - RNA, 15 nt, Human
uggaaaguuuuugua

SEQ ID NO: 3587372 - RNA, 14 nt, Human
uggaaauaaaguca

SEQ ID NO: 3587373 - RNA, 17 nt, Human
uggaaauaauaaaagau

SEQ ID NO: 3587374 - RNA, 15 nt, Human
uggaaauacacagug

SEQ ID NO: 3587375 - RNA, 19 nt, Human
uggaaauauauauuauacu

SEQ ID NO: 3587376 - RNA, 15 nt, Human
uggaaauauuaagaa

SEQ ID NO: 3587377 - RNA, 20 nt, Human
uggaaauauuaagaaagacu

SEQ ID NO: 3587378 - RNA, 16 nt, Human
uggaaauauuaugcaa

SEQ ID NO: 3587379 - RNA, 19 nt, Human
uggaaauauuaugcaaauu

SEQ ID NO: 3587380 - RNA, 21 nt, Human
uggaaauauuuugauaauaaa

SEQ ID NO: 3587381 - RNA, 16 nt, Human
uggaaaucagccaagu

SEQ ID NO: 3587382 - RNA, 18 nt, Human
uggaaaucaucgaaaauu

SEQ ID NO: 3587383 - RNA, 22 nt, Human
uggaaauccuaguuuccucucc

SEQ ID NO: 3587384 - RNA, 14 nt, Human
uggaaaucuuuaaa

SEQ ID NO: 3587385 - RNA, 15 nt, Human
uggaaaugcugggcu

SEQ ID NO: 3587386 - RNA, 16 nt, Human
uggaaaugcugggcug

SEQ ID NO: 3587387 - RNA, 17 nt, Human
uggaaauggaugcaaag

SEQ ID NO: 3587388 - RNA, 17 nt, Human
uggaaaugggcagagca

SEQ ID NO: 3587389 - RNA, 20 nt, Human
uggaaauuagguugaaacau

SEQ ID NO: 3587390 - RNA, 14 nt, Human
uggaaauuccugua

SEQ ID NO: 3587391 - RNA, 22 nt, Human
uggaaauuccuguacugugucu

SEQ ID NO: 3587392 - RNA, 16 nt, Human
uggaaauugacgaggg

SEQ ID NO: 3587393 - RNA, 16 nt, Human
uggaaauuggaagagc

SEQ ID NO: 3587394 - RNA, 12 nt, Human
uggaaauuuaaa

SEQ ID NO: 3587395 - RNA, 13 nt, Human
uggaaauuuaaag

SEQ ID NO: 3587396 - RNA, 21 nt, Human
uggaaauuuguuauaaugaau

SEQ ID NO: 3587397 - RNA, 21 nt, Human
uggaacaagaugguucuagca

SEQ ID NO: 3587398 - RNA, 22 nt, Human
uggaacaccuaccaaaaaauaa

SEQ ID NO: 3587399 - RNA, 15 nt, Human
uggaacacggccaca

SEQ ID NO: 3587400 - RNA, 17 nt, Human
uggaacacggccacauc

SEQ ID NO: 3587401 - RNA, 19 nt, Human
uggaacacuaaugaggaaa

SEQ ID NO: 3587402 - RNA, 21 nt, Human
uggaacacuagacaagccaga

SEQ ID NO: 3587403 - RNA, 22 nt, Human
uggaacacuagacaagccagaa

SEQ ID NO: 3587404 - RNA, 19 nt, Human
uggaacacucuauaacaaa

SEQ ID NO: 3587405 - RNA, 14 nt, Human
uggaacacucugag

SEQ ID NO: 3587406 - RNA, 15 nt, Human
uggaacacucugaga

SEQ ID NO: 3587407 - RNA, 17 nt, Human
uggaacacucugagacu

SEQ ID NO: 3587408 - RNA, 19 nt, Human
uggaacagauucacacugu

SEQ ID NO: 3587409 - RNA, 20 nt, Human
uggaacagauucacacuguc

SEQ ID NO: 3587410 - RNA, 20 nt, Human
uggaacauaaaauacaaugu

SEQ ID NO: 3587411 - RNA, 22 nt, Human
uggaacauccuuugcagggcag

SEQ ID NO: 3587412 - RNA, 13 nt, Human
uggaacauuggaa

SEQ ID NO: 3587413 - RNA, 19 nt, Human
uggaaccacauugaagaau

SEQ ID NO: 3587414 - RNA, 21 nt, Human
uggaaccacggagaucuccuu

SEQ ID NO: 3587415 - RNA, 12 nt, Human
uggaacccagac

SEQ ID NO: 3587416 - RNA, 15 nt, Human
uggaacccagacuca

SEQ ID NO: 3587417 - RNA, 21 nt, Human
uggaacccagcaguucuguua

SEQ ID NO: 3587418 - RNA, 19 nt, Human
uggaacccuuuuggccccc

SEQ ID NO: 3587419 - RNA, 21 nt, Human
uggaacccuuuuggcccccga

SEQ ID NO: 3587420 - RNA, 19 nt, Human
uggaaccgcaggaagcugc

SEQ ID NO: 3587421 - RNA, 20 nt, Human
uggaaccgcaggaagcugcu

SEQ ID NO: 3587422 - RNA, 23 nt, Human
uggaaccgcaggaagcugcuccg

SEQ ID NO: 3587423 - RNA, 18 nt, Human
uggaaccucagccuggcc

SEQ ID NO: 3587424 - RNA, 19 nt, Human
uggaaccucagccuggcca

SEQ ID NO: 3587425 - RNA, 12 nt, Human
uggaaccuccuu

SEQ ID NO: 3587426 - RNA, 20 nt, Human
uggaaccucugucucauccu

SEQ ID NO: 3587427 - RNA, 14 nt, Human
uggaaccuugcugu

SEQ ID NO: 3587428 - RNA, 18 nt, Human
uggaacgcguugaaauug

SEQ ID NO: 3587429 - RNA, 23 nt, Human
uggaacucagcugucuguggcuu

SEQ ID NO: 3587430 - RNA, 19 nt, Human
uggaacucauuccugccug

SEQ ID NO: 3587431 - RNA, 18 nt, Human
uggaacucgugucuggca

SEQ ID NO: 3587432 - RNA, 20 nt, Human
uggaacucuaucugggccug

SEQ ID NO: 3587433 - RNA, 13 nt, Human
uggaacucugcuu

SEQ ID NO: 3587434 - RNA, 13 nt, Human
uggaacugaaggg

SEQ ID NO: 3587435 - RNA, 13 nt, Human
uggaacugcugcc

SEQ ID NO: 3587436 - RNA, 19 nt, Human
uggaacugcugccacugag

SEQ ID NO: 3587437 - RNA, 13 nt, Human
uggaacuggaggc

SEQ ID NO: 3587438 - RNA, 16 nt, Human
uggaacuuacauuguu

SEQ ID NO: 3587439 - RNA, 16 nt, Human
uggaacuuagccauuu

SEQ ID NO: 3587440 - RNA, 21 nt, Human
uggaacuuagccauuuuucaa

SEQ ID NO: 3587441 - RNA, 14 nt, Human
uggaacuucuaaua

SEQ ID NO: 3587442 - RNA, 18 nt, Human
uggaacuugccugccuuu

SEQ ID NO: 3587443 - RNA, 16 nt, Human
uggaacuuuuauuaga

SEQ ID NO: 3587444 - RNA, 21 nt, Human
uggaagaaaaaaaccacacaa

SEQ ID NO: 3587445 - RNA, 18 nt, Human
uggaagaaaaaaaucuuc

SEQ ID NO: 3587446 - RNA, 13 nt, Human
uggaagaaaguaa

SEQ ID NO: 3587447 - RNA, 18 nt, Human
uggaagaacaggccucuc

SEQ ID NO: 3587448 - RNA, 12 nt, Human
uggaagaaggga

SEQ ID NO: 3587449 - RNA, 15 nt, Human
uggaagacacauuga

SEQ ID NO: 3587450 - RNA, 12 nt, Human
uggaagacagcu

SEQ ID NO: 3587451 - RNA, 15 nt, Human
uggaagacagcucuu

SEQ ID NO: 3587452 - RNA, 14 nt, Human
uggaagagaaaucu

SEQ ID NO: 3587453 - RNA, 14 nt, Human
uggaagagaaucac

SEQ ID NO: 3587454 - RNA, 15 nt, Human
uggaagaggaaaagg

SEQ ID NO: 3587455 - RNA, 15 nt, Human
uggaagagggcugca

SEQ ID NO: 3587456 - RNA, 16 nt, Human
uggaagaggggacagg

SEQ ID NO: 3587457 - RNA, 21 nt, Human
uggaagaggggacaggucccu

SEQ ID NO: 3587458 - RNA, 18 nt, Human
uggaagauagcugugacu

SEQ ID NO: 3587459 - RNA, 13 nt, Human
uggaagauccugc

SEQ ID NO: 3587460 - RNA, 18 nt, Human
uggaagauuauugagagc

SEQ ID NO: 3587461 - RNA, 21 nt, Human
uggaagcacaccaaucuuacu

SEQ ID NO: 3587462 - RNA, 11 nt, Human
uggaagcacag

SEQ ID NO: 3587463 - RNA, 19 nt, Human
uggaagcagguuaaauguu

SEQ ID NO: 3587464 - RNA, 21 nt, Human
uggaagcagguuaaauguuuu

SEQ ID NO: 3587465 - RNA, 16 nt, Human
uggaagcagugcccag

SEQ ID NO: 3587466 - RNA, 20 nt, Human
uggaagcagugcccaggugg

SEQ ID NO: 3587467 - RNA, 19 nt, Human
uggaagcauauuguuauua

SEQ ID NO: 3587468 - RNA, 19 nt, Human
uggaagcauguaggagaau

SEQ ID NO: 3587469 - RNA, 15 nt, Human
uggaagccagcuuuc

SEQ ID NO: 3587470 - RNA, 16 nt, Human
uggaagccagcuuucc

SEQ ID NO: 3587471 - RNA, 12 nt, Human
uggaagcccucc

SEQ ID NO: 3587472 - RNA, 16 nt, Human
uggaagcccuccuucc

SEQ ID NO: 3587473 - RNA, 19 nt, Human
uggaagcccuccuuccacg

SEQ ID NO: 3587474 - RNA, 16 nt, Human
uggaagcuaauuugca

SEQ ID NO: 3587475 - RNA, 20 nt, Human
uggaagcuagacacaugaag

SEQ ID NO: 3587476 - RNA, 22 nt, Human
uggaagcuagcuccccuccucu

SEQ ID NO: 3587477 - RNA, 13 nt, Human
uggaagcuccgcu

SEQ ID NO: 3587478 - RNA, 18 nt, Human
uggaagcuguuuggaaaa

SEQ ID NO: 3587479 - RNA, 14 nt, Human
uggaagcuuccagu

SEQ ID NO: 3587480 - RNA, 20 nt, Human
uggaagcuucuggugaccuu

SEQ ID NO: 3587481 - RNA, 16 nt, Human
uggaagcuuggggaag

SEQ ID NO: 3587482 - RNA, 18 nt, Human
uggaagcuuguuuuccag

SEQ ID NO: 3587483 - RNA, 14 nt, Human
uggaaggaaagaug

SEQ ID NO: 3587484 - RNA, 15 nt, Human
uggaaggaaagaugc

SEQ ID NO: 3587485 - RNA, 15 nt, Human
uggaaggagacacag

SEQ ID NO: 3587486 - RNA, 19 nt, Human
uggaaggagacacagaugu

SEQ ID NO: 3587487 - RNA, 14 nt, Human
uggaaggagcagaa

SEQ ID NO: 3587488 - RNA, 11 nt, Human
uggagaggaac

SEQ ID NO: 3587489 - RNA, 15 nt, Human
uggagaggagcccug

SEQ ID NO: 3587490 - RNA, 16 nt, Human
uggagaggagcccugc

SEQ ID NO: 3587491 - RNA, 17 nt, Human
uggagaggagcccugcc

SEQ ID NO: 3587492 - RNA, 18 nt, Human
uggagaggagcccugccu

SEQ ID NO: 3587493 - RNA, 20 nt, Human
uggagaggcccggccucuca

SEQ ID NO: 3587494 - RNA, 18 nt, Human
uggagaggcccucuggag

SEQ ID NO: 3587495 - RNA, 15 nt, Human
uggagagggaaugug

SEQ ID NO: 3587496 - RNA, 18 nt, Human
uggagagggaaugugaaa

SEQ ID NO: 3587497 - RNA, 13 nt, Human
uggagagggauga

SEQ ID NO: 3587498 - RNA, 19 nt, Human
uggagagggcucugugcug

SEQ ID NO: 3587499 - RNA, 16 nt, Human
uggagagggggccugg

SEQ ID NO: 3587500 - RNA, 22 nt, Human
uggagagguuauaggucacucc

SEQ ID NO: 3587501 - RNA, 21 nt, Human
uggagaguucaauggcugcug

SEQ ID NO: 3587502 - RNA, 15 nt, Human
uggagaguuuccuga

SEQ ID NO: 3587503 - RNA, 17 nt, Human
uggagaguuuccugaaa

SEQ ID NO: 3587504 - RNA, 20 nt, Human
uggagauaaagauuucuuga

SEQ ID NO: 3587505 - RNA, 19 nt, Human
uggagaugaggccagacca

SEQ ID NO: 3587506 - RNA, 22 nt, Human
uggagaugaggccagaccaugg

SEQ ID NO: 3587507 - RNA, 13 nt, Human
uggagaugcagag

SEQ ID NO: 3587508 - RNA, 13 nt, Human
uggagauggggag

SEQ ID NO: 3587509 - RNA, 13 nt, Human
uggagaugucuuc

SEQ ID NO: 3587510 - RNA, 23 nt, Human
uggagaugucuucguacaguucu

SEQ ID NO: 3587511 - RNA, 16 nt, Human
uggagauuauaauaaa

SEQ ID NO: 3587512 - RNA, 16 nt, Human
uggagauugaccugga

SEQ ID NO: 3587513 - RNA, 21 nt, Human
uggagcaaagugagggccgag

SEQ ID NO: 3587514 - RNA, 22 nt, Human
uggagcacucugaguuuaccau

SEQ ID NO: 3587515 - RNA, 15 nt, Human
uggagcacugggcuc

SEQ ID NO: 3587516 - RNA, 19 nt, Human
uggagcacugggcucccgg

SEQ ID NO: 3587517 - RNA, 14 nt, Human
uggagcagaaucag

SEQ ID NO: 3587518 - RNA, 15 nt, Human
uggagcagaaucagu

SEQ ID NO: 3587519 - RNA, 13 nt, Human
uggagcagaccac

SEQ ID NO: 3587520 - RNA, 13 nt, Human
uggagcagccacc

SEQ ID NO: 3587521 - RNA, 16 nt, Human
uggagcagccacccca

SEQ ID NO: 3587522 - RNA, 17 nt, Human
uggagcaucaagccacu

SEQ ID NO: 3587523 - RNA, 15 nt, Human
uggagcaucugacuc

SEQ ID NO: 3587524 - RNA, 16 nt, Human
uggagcaucugacuca

SEQ ID NO: 3587525 - RNA, 21 nt, Human
uggagccagccgagcaggagg

SEQ ID NO: 3587526 - RNA, 22 nt, Human
uggagccagccgagcaggaggc

SEQ ID NO: 3587527 - RNA, 13 nt, Human
uggagccagcucc

SEQ ID NO: 3587528 - RNA, 13 nt, Human
uggagccaggcgu

SEQ ID NO: 3587529 - RNA, 15 nt, Human
uggagcccagaggag

SEQ ID NO: 3587530 - RNA, 20 nt, Human
uggagcccagaggagggcag

SEQ ID NO: 3587531 - RNA, 14 nt, Human
uggagcccaggagu

SEQ ID NO: 3587532 - RNA, 16 nt, Human
uggagccccacugccc

SEQ ID NO: 3587533 - RNA, 22 nt, Human
uggagccccacugcccuucuca

SEQ ID NO: 3587534 - RNA, 14 nt, Human
uggagccccagccc

SEQ ID NO: 3587535 - RNA, 14 nt, Human
uggagccccaucag

SEQ ID NO: 3587536 - RNA, 12 nt, Human
uggagccccugg

SEQ ID NO: 3587537 - RNA, 14 nt, Human
uggagccccugggu

SEQ ID NO: 3587538 - RNA, 23 nt, Human
uggagccccuggguggguggugg

SEQ ID NO: 3587539 - RNA, 18 nt, Human
uggagcccgaggcaccag

SEQ ID NO: 3587540 - RNA, 19 nt, Human
uggagcccgcacccccacc

SEQ ID NO: 3587541 - RNA, 22 nt, Human
uggagcccgcacccccacccuu

SEQ ID NO: 3587542 - RNA, 12 nt, Human
uggagccgaggc

SEQ ID NO: 3587543 - RNA, 23 nt, Human
uggagccggacuuucggaguugg

SEQ ID NO: 3587544 - RNA, 13 nt, Human
uggagccugacag

SEQ ID NO: 3587545 - RNA, 21 nt, Human
uggagccugagucagggccca

SEQ ID NO: 3587546 - RNA, 11 nt, Human
uggagccugca

SEQ ID NO: 3587547 - RNA, 13 nt, Human
uggagccuggugc

SEQ ID NO: 3587548 - RNA, 18 nt, Human
uggagccuguguaacagc

SEQ ID NO: 3587549 - RNA, 21 nt, Human
uggagccuguguaacagcucc

SEQ ID NO: 3587550 - RNA, 21 nt, Human
uggagcgcaccugcccccugg

SEQ ID NO: 3587551 - RNA, 18 nt, Human
uggagcggggcccacccg

SEQ ID NO: 3587552 - RNA, 18 nt, Human
uggagcgggguaugaaga

SEQ ID NO: 3587553 - RNA, 15 nt, Human
uggagcuauuuuaaa

SEQ ID NO: 3587554 - RNA, 16 nt, Human
uggagcuccagccuga

SEQ ID NO: 3587555 - RNA, 18 nt, Human
uggagcuccugggaaggc

SEQ ID NO: 3587556 - RNA, 12 nt, Human
uggagcugagca

SEQ ID NO: 3587557 - RNA, 15 nt, Human
uggagcugagccucu

SEQ ID NO: 3587558 - RNA, 18 nt, Human
uggagcuggcgucugucu

SEQ ID NO: 3587559 - RNA, 16 nt, Human
uggagcuuaagccacu

SEQ ID NO: 3587560 - RNA, 21 nt, Human
uggagcuuuuuucuuuaagau

SEQ ID NO: 3587561 - RNA, 21 nt, Human
uggaggaaaaccaagccgugg

SEQ ID NO: 3587562 - RNA, 21 nt, Human
uggaggaacaaucggcugcau

SEQ ID NO: 3587563 - RNA, 20 nt, Human
uggaggaaggaaacccagcu

SEQ ID NO: 3587564 - RNA, 21 nt, Human
uggaggaaggaaacccagcuc

SEQ ID NO: 3587565 - RNA, 13 nt, Human
uggaggaaggauu

SEQ ID NO: 3587566 - RNA, 18 nt, Human
uggaggaaggauuguaaa

SEQ ID NO: 3587567 - RNA, 21 nt, Human
uggaggaagggggguugcagu

SEQ ID NO: 3587568 - RNA, 15 nt, Human
uggaggaaugcuccc

SEQ ID NO: 3587569 - RNA, 17 nt, Human
uggaggaaugcuccccc

SEQ ID NO: 3587570 - RNA, 13 nt, Human
uggaggaccugag

SEQ ID NO: 3587571 - RNA, 19 nt, Human
uggaggaccugagccugcc

SEQ ID NO: 3587572 - RNA, 15 nt, Human
uggaggaccugcccg

SEQ ID NO: 3587573 - RNA, 14 nt, Human
uggaggagaagaau

SEQ ID NO: 3587574 - RNA, 21 nt, Human
uggaggagaagaauuuucaga

SEQ ID NO: 3587575 - RNA, 14 nt, Human
uggaggagaaggac

SEQ ID NO: 3587576 - RNA, 15 nt, Human
uggaggagagaagaa

SEQ ID NO: 3587577 - RNA, 11 nt, Human
uggaggagcaa

SEQ ID NO: 3587578 - RNA, 21 nt, Human
uggaggagcaaaggcugagaa

SEQ ID NO: 3587579 - RNA, 12 nt, Human
uggaggagccca

SEQ ID NO: 3587580 - RNA, 14 nt, Human
uggaggagcccagg

SEQ ID NO: 3587581 - RNA, 22 nt, Human
uggaggagcuugggggaugacu

SEQ ID NO: 3587582 - RNA, 17 nt, Human
uggaggaggaaggcaag

SEQ ID NO: 3587583 - RNA, 18 nt, Human
uggaggaggccugggggc

SEQ ID NO: 3587584 - RNA, 17 nt, Human
uggaggaucaguuuuuu

SEQ ID NO: 3587585 - RNA, 20 nt, Human
uggaggauggagagagggga

SEQ ID NO: 3587586 - RNA, 16 nt, Human
uggaggaugugggcag

SEQ ID NO: 3587587 - RNA, 13 nt, Human
uggaggauugcua

SEQ ID NO: 3587588 - RNA, 14 nt, Human
uggaggcaauccua

SEQ ID NO: 3587589 - RNA, 14 nt, Human
uggaggcagggccu

SEQ ID NO: 3587590 - RNA, 15 nt, Human
uggaggcagugucau

SEQ ID NO: 3587591 - RNA, 16 nt, Human
uggaggcagugucauu

SEQ ID NO: 3587592 - RNA, 12 nt, Human
uggaggcccagu

SEQ ID NO: 3587593 - RNA, 15 nt, Human
uggaggccucugggc

SEQ ID NO: 3587594 - RNA, 16 nt, Human
uggaggccucugggcc

SEQ ID NO: 3587595 - RNA, 18 nt, Human
uggaggccuuccagcugc

SEQ ID NO: 3587596 - RNA, 16 nt, Human
uggaggcugccuccca

SEQ ID NO: 3587597 - RNA, 13 nt, Human
uggaggcugucuu

SEQ ID NO: 3587598 - RNA, 22 nt, Human
uggaggcugucuucucaggcuc

SEQ ID NO: 3587599 - RNA, 23 nt, Human
uggaggcugucuucucaggcucu

SEQ ID NO: 3587600 - RNA, 17 nt, Human
uggaggcuuccugcguc

SEQ ID NO: 3587601 - RNA, 21 nt, Human
uggagggaaugaaccuggagg

SEQ ID NO: 3587602 - RNA, 22 nt, Human
uggagggacaaguggacucagg

SEQ ID NO: 3587603 - RNA, 18 nt, Human
uggagggaggccccaggg

SEQ ID NO: 3587604 - RNA, 19 nt, Human
uggagggaggccccagggg

SEQ ID NO: 3587605 - RNA, 21 nt, Human
uggagggcgugggagcguggg

SEQ ID NO: 3587606 - RNA, 21 nt, Human
uggagggcuagaaccuggaga

SEQ ID NO: 3587607 - RNA, 15 nt, Human
uggaggggagcucug

SEQ ID NO: 3587608 - RNA, 16 nt, Human
uggaggggcagagcca

SEQ ID NO: 3587609 - RNA, 14 nt, Human
uggaggggccccug

SEQ ID NO: 3587610 - RNA, 20 nt, Human
uggagggguaggggcuggga

SEQ ID NO: 3587611 - RNA, 19 nt, Human
uggaggggugguccugacu

SEQ ID NO: 3587612 - RNA, 20 nt, Human
uggaggggugguccugacuc

SEQ ID NO: 3587613 - RNA, 11 nt, Human
uggaggggugu

SEQ ID NO: 3587614 - RNA, 19 nt, Human
uggagggucccaagcuggg

SEQ ID NO: 3587615 - RNA, 21 nt, Human
uggagggucccaagcugggcc

SEQ ID NO: 3587616 - RNA, 14 nt, Human
uggagguacacucu

SEQ ID NO: 3587617 - RNA, 22 nt, Human
uggaggucacauucaggaagau

SEQ ID NO: 3587618 - RNA, 19 nt, Human
uggaggugccagcaaagcc

SEQ ID NO: 3587619 - RNA, 12 nt, Human
uggaggugggag

SEQ ID NO: 3587620 - RNA, 13 nt, Human
uggaggugggagc

SEQ ID NO: 3587621 - RNA, 16 nt, Human
uggagguggggcaugg

SEQ ID NO: 3587622 - RNA, 14 nt, Human
uggagguggggccu

SEQ ID NO: 3587623 - RNA, 21 nt, Human
uggagguggggcgaggcaggc

SEQ ID NO: 3587624 - RNA, 16 nt, Human
uggaggugucaggcug

SEQ ID NO: 3587625 - RNA, 20 nt, Human
uggaggugucaggcugcugg

SEQ ID NO: 3587626 - RNA, 17 nt, Human
uggagguugauaacuuu

SEQ ID NO: 3587627 - RNA, 18 nt, Human
uggaguaugucugaugga

SEQ ID NO: 3587628 - RNA, 21 nt, Human
uggaguaugucugauggaucc

SEQ ID NO: 3587629 - RNA, 19 nt, Human
uggagucagacagaugugg

SEQ ID NO: 3587630 - RNA, 14 nt, Human
uggagucagccucg

SEQ ID NO: 3587631 - RNA, 15 nt, Human
uggagucaugccaag

SEQ ID NO: 3587632 - RNA, 14 nt, Human
uggagucauucuca

SEQ ID NO: 3587633 - RNA, 22 nt, Human
uggaguccaggacaggagaugc

SEQ ID NO: 3587634 - RNA, 19 nt, Human
uggaguccccucaccuccu

SEQ ID NO: 3587635 - RNA, 17 nt, Human
uggagucuccagugguu

SEQ ID NO: 3587636 - RNA, 14 nt, Human
uggagucuccugag

SEQ ID NO: 3587637 - RNA, 17 nt, Human
uggagucuggagugggc

SEQ ID NO: 3587638 - RNA, 16 nt, Human
uggagugcaccaaaga

SEQ ID NO: 3587639 - RNA, 17 nt, Human
uggagugcagggaggag

SEQ ID NO: 3587640 - RNA, 19 nt, Human
uggagugcagggaggagag

SEQ ID NO: 3587641 - RNA, 13 nt, Human
uggagugcagugg

SEQ ID NO: 3587642 - RNA, 17 nt, Human
uggaguggcagcccagc

SEQ ID NO: 3587643 - RNA, 18 nt, Human
uggaguggcagcccagcc

SEQ ID NO: 3587644 - RNA, 19 nt, Human
uggaguggcucgccaggcc

SEQ ID NO: 3587645 - RNA, 17 nt, Human
uggaguguaugacugca

SEQ ID NO: 3587646 - RNA, 19 nt, Human
uggaguguaugacugcaca

SEQ ID NO: 3587647 - RNA, 17 nt, Human
uggaguguggcugagga

SEQ ID NO: 3587648 - RNA, 15 nt, Human
uggaguuaaaaugca

SEQ ID NO: 3587649 - RNA, 18 nt, Human
uggaguuacauuaauguu

SEQ ID NO: 3587650 - RNA, 20 nt, Human
uggaguucaucuugaauugu

SEQ ID NO: 3587651 - RNA, 17 nt, Human
uggaguucauucauauu

SEQ ID NO: 3587652 - RNA, 20 nt, Human
uggaguucauucauauuaca

SEQ ID NO: 3587653 - RNA, 14 nt, Human
uggaguuucuaagg

SEQ ID NO: 3587654 - RNA, 21 nt, Human
uggaguuuuuguuuggagagc

SEQ ID NO: 3587655 - RNA, 22 nt, Human
uggaguuuuuguuuggagagca

SEQ ID NO: 3587656 - RNA, 15 nt, Human
uggauaaauuguuua

SEQ ID NO: 3587657 - RNA, 17 nt, Human
uggauaaauuguuuagu

SEQ ID NO: 3587658 - RNA, 18 nt, Human
uggauaacaaagauaucu

SEQ ID NO: 3587659 - RNA, 20 nt, Human
uggauaacaaagauaucuuu

SEQ ID NO: 3587660 - RNA, 23 nt, Human
uggauaagcuauccguguugcag

SEQ ID NO: 3587661 - RNA, 15 nt, Human
uggauacagcaguag

SEQ ID NO: 3587662 - RNA, 15 nt, Human
uggauaccauuauau

SEQ ID NO: 3587663 - RNA, 19 nt, Human
uggauacgacaacuugcac

SEQ ID NO: 3587664 - RNA, 17 nt, Human
uggauacgugucaaugu

SEQ ID NO: 3587665 - RNA, 21 nt, Human
uggauacgugucaaugugugc

SEQ ID NO: 3587666 - RNA, 14 nt, Human
uggauacuacaucu

SEQ ID NO: 3587667 - RNA, 15 nt, Human
uggauacuacaucuu

SEQ ID NO: 3587668 - RNA, 22 nt, Human
uggauacugcccggggcagcug

SEQ ID NO: 3587669 - RNA, 22 nt, Human
uggauacuuggauuuaguuuca

SEQ ID NO: 3587670 - RNA, 13 nt, Human
uggauagaugccc

SEQ ID NO: 3587671 - RNA, 15 nt, Human
uggauauaaaaugug

SEQ ID NO: 3587672 - RNA, 17 nt, Human
uggauauaaauauauau

SEQ ID NO: 3587673 - RNA, 18 nt, Human
uggauauauguuuuugaa

SEQ ID NO: 3587674 - RNA, 16 nt, Human
uggauauguaaaacau

SEQ ID NO: 3587675 - RNA, 16 nt, Human
uggauauuauuagaaa

SEQ ID NO: 3587676 - RNA, 14 nt, Human
uggauauuguuacg

SEQ ID NO: 3587677 - RNA, 11 nt, Human
uggauauuugu

SEQ ID NO: 3587678 - RNA, 21 nt, Human
uggauauuuguacuguuuaau

SEQ ID NO: 3587679 - RNA, 13 nt, Human
uggauauuuucaa

SEQ ID NO: 3587680 - RNA, 23 nt, Human
uggaucaaaaucuguagagcagg

SEQ ID NO: 3587681 - RNA, 14 nt, Human
uggaucaaguauua

SEQ ID NO: 3587682 - RNA, 20 nt, Human
uggaucacagcugcuuucug

SEQ ID NO: 3587683 - RNA, 14 nt, Human
uggauccaauguua

SEQ ID NO: 3587684 - RNA, 18 nt, Human
uggaucccgaagaaugga

SEQ ID NO: 3587685 - RNA, 16 nt, Human
uggauccuguguggag

SEQ ID NO: 3587686 - RNA, 17 nt, Human
uggauccuguguggaga

SEQ ID NO: 3587687 - RNA, 15 nt, Human
uggaucuaccuggag

SEQ ID NO: 3587688 - RNA, 17 nt, Human
uggaucuaccuggaggg

SEQ ID NO: 3587689 - RNA, 18 nt, Human
uggaucuauuucauguuu

SEQ ID NO: 3587690 - RNA, 18 nt, Human
uggaucucauuggacccu

SEQ ID NO: 3587691 - RNA, 21 nt, Human
uggaucuccaaggaccagguu

SEQ ID NO: 3587692 - RNA, 19 nt, Human
uggaucuccccacucuagg

SEQ ID NO: 3587693 - RNA, 19 nt, Human
uggaucucuucuuaaugua

SEQ ID NO: 3587694 - RNA, 20 nt, Human
uggaucucuucuuaauguac

SEQ ID NO: 3587695 - RNA, 21 nt, Human
uggaucucuucuuaauguaca

SEQ ID NO: 3587696 - RNA, 16 nt, Human
uggaucuguccaagga

SEQ ID NO: 3587697 - RNA, 14 nt, Human
uggaugaaauuuuc

SEQ ID NO: 3587698 - RNA, 18 nt, Human
uggaugaaauuuucuaga

SEQ ID NO: 3587699 - RNA, 20 nt, Human
uggaugaccagaacaagguu

SEQ ID NO: 3587700 - RNA, 20 nt, Human
uggaugagacuuccaaaccu

SEQ ID NO: 3587701 - RNA, 13 nt, Human
uggaugagcuccc

SEQ ID NO: 3587702 - RNA, 15 nt, Human
uggaugaucaauccu

SEQ ID NO: 3587703 - RNA, 20 nt, Human
uggaugauggucuucagccu

SEQ ID NO: 3587704 - RNA, 14 nt, Human
uggaugauguuucg

SEQ ID NO: 3587705 - RNA, 17 nt, Human
uggaugauguuucguga

SEQ ID NO: 3587706 - RNA, 20 nt, Human
uggaugccaauauuaaaucu

SEQ ID NO: 3587707 - RNA, 20 nt, Human
uggaugccacagcccagcuu

SEQ ID NO: 3587708 - RNA, 15 nt, Human
uggaugcccagagga

SEQ ID NO: 3587709 - RNA, 13 nt, Human
uggaugccugauu

SEQ ID NO: 3587710 - RNA, 15 nt, Human
uggaugccugguggc

SEQ ID NO: 3587711 - RNA, 20 nt, Human
uggaugccugguggcagcug

SEQ ID NO: 3587712 - RNA, 17 nt, Human
uggaugcgcagugccuu

SEQ ID NO: 3587713 - RNA, 21 nt, Human
uggaugcuuagagggauuucu

SEQ ID NO: 3587714 - RNA, 16 nt, Human
uggauggccccagcac

SEQ ID NO: 3587715 - RNA, 21 nt, Human
uggauggccccagcacagcuu

SEQ ID NO: 3587716 - RNA, 13 nt, Human
uggauggcuucua

SEQ ID NO: 3587717 - RNA, 16 nt, Human
uggaugggcagucauu

SEQ ID NO: 3587718 - RNA, 18 nt, Human
uggaugggggaacucaga

SEQ ID NO: 3587719 - RNA, 17 nt, Human
uggauggguggauggcc

SEQ ID NO: 3587720 - RNA, 15 nt, Human
uggaugucugaacuu

SEQ ID NO: 3587721 - RNA, 16 nt, Human
uggaugucugaacuuu

SEQ ID NO: 3587722 - RNA, 15 nt, Human
uggauguugugugua

SEQ ID NO: 3587723 - RNA, 13 nt, Human
uggauguuuuaau

SEQ ID NO: 3587724 - RNA, 18 nt, Human
uggauguuuuaauuccau

SEQ ID NO: 3587725 - RNA, 20 nt, Human
uggauguuuuaauuccauga

SEQ ID NO: 3587726 - RNA, 22 nt, Human
uggauuaaacuuaaucuaaaug

SEQ ID NO: 3587727 - RNA, 14 nt, Human
uggauuaaacuuau

SEQ ID NO: 3587728 - RNA, 13 nt, Human
uggauuaaauuua

SEQ ID NO: 3587729 - RNA, 15 nt, Human
uggauuaaauuuaau

SEQ ID NO: 3587730 - RNA, 17 nt, Human
uggauuaauuaaaugca

SEQ ID NO: 3587731 - RNA, 13 nt, Human
uggauuaggucuc

SEQ ID NO: 3587732 - RNA, 16 nt, Human
uggauuauaaucagaa

SEQ ID NO: 3587733 - RNA, 16 nt, Human
uggauuauucaggcuu

SEQ ID NO: 3587734 - RNA, 14 nt, Human
uggauuauucauuu

SEQ ID NO: 3587735 - RNA, 22 nt, Human
uggauuauucuuucuccuuuuu

SEQ ID NO: 3587736 - RNA, 17 nt, Human
uggauuauuuaauaaca

SEQ ID NO: 3587737 - RNA, 14 nt, Human
uggauucauauuua

SEQ ID NO: 3587738 - RNA, 14 nt, Human
uggauucauugucu

SEQ ID NO: 3587739 - RNA, 13 nt, Human
uggauucauuucc

SEQ ID NO: 3587740 - RNA, 18 nt, Human
uggauuccccaucucagg

SEQ ID NO: 3587741 - RNA, 19 nt, Human
uggauuccccaucucaggc

SEQ ID NO: 3587742 - RNA, 12 nt, Human
uggauucucaga

SEQ ID NO: 3587743 - RNA, 14 nt, Human
uggauucucagaua

SEQ ID NO: 3587744 - RNA, 16 nt, Human
uggauucugagagcug

SEQ ID NO: 3587745 - RNA, 14 nt, Human
uggauucuuuccau

SEQ ID NO: 3587746 - RNA, 13 nt, Human
uggauugagggua

SEQ ID NO: 3587747 - RNA, 13 nt, Human
uggauuggacaaa

SEQ ID NO: 3587748 - RNA, 19 nt, Human
uggauuggacaaaaugacu

SEQ ID NO: 3587749 - RNA, 20 nt, Human
uggauuggagauagggaaag

SEQ ID NO: 3587750 - RNA, 21 nt, Human
uggauuggauuauuuaauaac

SEQ ID NO: 3587751 - RNA, 23 nt, Human
uggauuggauuauuuaauaacau

SEQ ID NO: 3587752 - RNA, 21 nt, Human
uggauugggggggccaaaagg

SEQ ID NO: 3587753 - RNA, 14 nt, Human
uggauugggguccc

SEQ ID NO: 3587754 - RNA, 18 nt, Human
uggauuggguuaugaaua

SEQ ID NO: 3587755 - RNA, 13 nt, Human
uggauuguccccg

SEQ ID NO: 3587756 - RNA, 19 nt, Human
uggauugugccuaaugugu

SEQ ID NO: 3587757 - RNA, 23 nt, Human
uggauugugccuaauguguuuga

SEQ ID NO: 3587758 - RNA, 14 nt, Human
uggauuuauaaaug

SEQ ID NO: 3587759 - RNA, 20 nt, Human
uggauuuauaaaugcuauuu

SEQ ID NO: 3587760 - RNA, 23 nt, Human
uggauuucccauccccuguggga

SEQ ID NO: 3587761 - RNA, 17 nt, Human
uggauuugccugugcca

SEQ ID NO: 3587762 - RNA, 18 nt, Human
uggauuugccugugccac

SEQ ID NO: 3587763 - RNA, 15 nt, Human
uggauuuguuuaaaa

SEQ ID NO: 3587764 - RNA, 16 nt, Human
uggauuuuauguugac

SEQ ID NO: 3587765 - RNA, 22 nt, Human
uggauuuugguuuuguuccccu

SEQ ID NO: 3587766 - RNA, 15 nt, Human
uggauuuuuaauuaa

SEQ ID NO: 3587767 - RNA, 12 nt, Human
uggcaaaaaggc

SEQ ID NO: 3587768 - RNA, 17 nt, Human
uggcaaaagccuugugu

SEQ ID NO: 3587769 - RNA, 15 nt, Human
uggcaaacagggccu

SEQ ID NO: 3587770 - RNA, 18 nt, Human
uggcaaacagggccucug

SEQ ID NO: 3587771 - RNA, 20 nt, Human
uggcaaacagggccucugcg

SEQ ID NO: 3587772 - RNA, 17 nt, Human
uggcaaacucuccacca

SEQ ID NO: 3587773 - RNA, 17 nt, Human
uggcaaacuucagacug

SEQ ID NO: 3587774 - RNA, 13 nt, Human
uggcaaagacaga

SEQ ID NO: 3587775 - RNA, 17 nt, Human
uggcaaagacagaagcc

SEQ ID NO: 3587776 - RNA, 23 nt, Human
uggcaaagcagcaacacacaugc

SEQ ID NO: 3587777 - RNA, 23 nt, Human
uggcaaagcagcaacuauucaca

SEQ ID NO: 3587778 - RNA, 21 nt, Human
uggcaaagccuucauugccuu

SEQ ID NO: 3587779 - RNA, 17 nt, Human
uggcaaagcuguucuuc

SEQ ID NO: 3587780 - RNA, 19 nt, Human
uggcaaagcuguucuuccu

SEQ ID NO: 3587781 - RNA, 20 nt, Human
uggcaaagcuguucuuccug

SEQ ID NO: 3587782 - RNA, 17 nt, Human
uggcaaagcuuuuagaa

SEQ ID NO: 3587783 - RNA, 18 nt, Human
uggcaaagcuuuuagaaa

SEQ ID NO: 3587784 - RNA, 12 nt, Human
uggcaaauauaa

SEQ ID NO: 3587785 - RNA, 13 nt, Human
uggcaacaaacug

SEQ ID NO: 3587786 - RNA, 14 nt, Human
uggcaacaaacugc

SEQ ID NO: 3587787 - RNA, 17 nt, Human
uggcaacaaacugcaca

SEQ ID NO: 3587788 - RNA, 12 nt, Human
uggcaacagaag

SEQ ID NO: 3587789 - RNA, 20 nt, Human
uggcccccacuggcuguggg

SEQ ID NO: 3587790 - RNA, 11 nt, Human
uggcccccucc

SEQ ID NO: 3587791 - RNA, 14 nt, Human
uggcccccuguccu

SEQ ID NO: 3587792 - RNA, 23 nt, Human
uggcccccuuucccgggcugucc

SEQ ID NO: 3587793 - RNA, 15 nt, Human
uggccccgccgccug

SEQ ID NO: 3587794 - RNA, 21 nt, Human
uggccccgccgccugguacuc

SEQ ID NO: 3587795 - RNA, 15 nt, Human
uggccccguuucugg

SEQ ID NO: 3587796 - RNA, 19 nt, Human
uggccccuagaaucagccu

SEQ ID NO: 3587797 - RNA, 13 nt, Human
uggccccucgccu

SEQ ID NO: 3587798 - RNA, 12 nt, Human
uggccccucuga

SEQ ID NO: 3587799 - RNA, 14 nt, Human
uggccccugagauc

SEQ ID NO: 3587800 - RNA, 15 nt, Human
uggccccugcccggc

SEQ ID NO: 3587801 - RNA, 20 nt, Human
uggccccugcccggcugcgg

SEQ ID NO: 3587802 - RNA, 21 nt, Human
uggccccugcccggcugcgga

SEQ ID NO: 3587803 - RNA, 13 nt, Human
uggccccuucacu

SEQ ID NO: 3587804 - RNA, 21 nt, Human
uggccccuucacuucugacca

SEQ ID NO: 3587805 - RNA, 16 nt, Human
uggccccuuugggccc

SEQ ID NO: 3587806 - RNA, 20 nt, Human
uggccccuuugggcccugca

SEQ ID NO: 3587807 - RNA, 19 nt, Human
uggcccgacagccuggcac

SEQ ID NO: 3587808 - RNA, 18 nt, Human
uggcccgugacagacucc

SEQ ID NO: 3587809 - RNA, 20 nt, Human
uggcccgugacagacuccug

SEQ ID NO: 3587810 - RNA, 19 nt, Human
uggcccucaaggccuccca

SEQ ID NO: 3587811 - RNA, 20 nt, Human
uggcccucaaggccucccac

SEQ ID NO: 3587812 - RNA, 23 nt, Human
uggcccucaaggccucccacagu

SEQ ID NO: 3587813 - RNA, 16 nt, Human
uggcccucaccccugc

SEQ ID NO: 3587814 - RNA, 21 nt, Human
uggcccucccaguaccuccug

SEQ ID NO: 3587815 - RNA, 16 nt, Human
uggcccucuucuuacu

SEQ ID NO: 3587816 - RNA, 23 nt, Human
uggcccugaggugugggggcugc

SEQ ID NO: 3587817 - RNA, 15 nt, Human
uggcccugcaaaagg

SEQ ID NO: 3587818 - RNA, 21 nt, Human
uggcccugccaucuucccagc

SEQ ID NO: 3587819 - RNA, 21 nt, Human
uggcccugcccucuccuuccu

SEQ ID NO: 3587820 - RNA, 15 nt, Human
uggcccugcccugag

SEQ ID NO: 3587821 - RNA, 12 nt, Human
uggcccugccuu

SEQ ID NO: 3587822 - RNA, 14 nt, Human
uggcccuggcagcc

SEQ ID NO: 3587823 - RNA, 14 nt, Human
uggcccuggcucug

SEQ ID NO: 3587824 - RNA, 15 nt, Human
uggcccugucccucc

SEQ ID NO: 3587825 - RNA, 20 nt, Human
uggcccugucccucccaccu

SEQ ID NO: 3587826 - RNA, 21 nt, Human
uggcccugucccucccaccuc

SEQ ID NO: 3587827 - RNA, 23 nt, Human
uggcccugucccucccaccucug

SEQ ID NO: 3587828 - RNA, 13 nt, Human
uggcccugugcua

SEQ ID NO: 3587829 - RNA, 19 nt, Human
uggcccuucccacuggagg

SEQ ID NO: 3587830 - RNA, 21 nt, Human
uggcccuuccuccuccaccac

SEQ ID NO: 3587831 - RNA, 15 nt, Human
uggcccuuccuggac

SEQ ID NO: 3587832 - RNA, 18 nt, Human
uggcccuuccuggacagc

SEQ ID NO: 3587833 - RNA, 20 nt, Human
uggcccuuccuggacagcug

SEQ ID NO: 3587834 - RNA, 21 nt, Human
uggcccuuccuggacagcugu

SEQ ID NO: 3587835 - RNA, 22 nt, Human
uggcccuugcaguucagcacca

SEQ ID NO: 3587836 - RNA, 17 nt, Human
uggccgaguccaagcug

SEQ ID NO: 3587837 - RNA, 13 nt, Human
uggccgcccccug

SEQ ID NO: 3587838 - RNA, 23 nt, Human
uggccgcccccugccccccagcc

SEQ ID NO: 3587839 - RNA, 16 nt, Human
uggccgccucaccccc

SEQ ID NO: 3587840 - RNA, 17 nt, Human
uggccgcugaguggcag

SEQ ID NO: 3587841 - RNA, 13 nt, Human
uggccggccagcc

SEQ ID NO: 3587842 - RNA, 19 nt, Human
uggccggccagccagccac

SEQ ID NO: 3587843 - RNA, 19 nt, Human
uggccgggaccccgagccu

SEQ ID NO: 3587844 - RNA, 14 nt, Human
uggccgggcacagc

SEQ ID NO: 3587845 - RNA, 13 nt, Human
uggccgggcaggg

SEQ ID NO: 3587846 - RNA, 21 nt, Human
uggccgugaaugggugcccac

SEQ ID NO: 3587847 - RNA, 17 nt, Human
uggccguggaugcgcag

SEQ ID NO: 3587848 - RNA, 14 nt, Human
uggccguggauggc

SEQ ID NO: 3587849 - RNA, 18 nt, Human
uggccuaaaacuggccug

SEQ ID NO: 3587850 - RNA, 22 nt, Human
uggccuagcccacccugcugcc

SEQ ID NO: 3587851 - RNA, 15 nt, Human
uggccuauccgcugc

SEQ ID NO: 3587852 - RNA, 13 nt, Human
uggccuaucuccu

SEQ ID NO: 3587853 - RNA, 19 nt, Human
uggccuauguggucuaagg

SEQ ID NO: 3587854 - RNA, 15 nt, Human
uggccucaacccucc

SEQ ID NO: 3587855 - RNA, 17 nt, Human
uggccucaacccucccu

SEQ ID NO: 3587856 - RNA, 19 nt, Human
uggccucaacccucccuca

SEQ ID NO: 3587857 - RNA, 21 nt, Human
uggccucaagaucaaugaaau

SEQ ID NO: 3587858 - RNA, 18 nt, Human
uggccucaagugauucuc

SEQ ID NO: 3587859 - RNA, 22 nt, Human
uggccucacccaccccugcaca

SEQ ID NO: 3587860 - RNA, 22 nt, Human
uggccucagacugcacccagga

SEQ ID NO: 3587861 - RNA, 23 nt, Human
uggccucagacugcacccaggag

SEQ ID NO: 3587862 - RNA, 22 nt, Human
uggccucagaggacccuuucca

SEQ ID NO: 3587863 - RNA, 22 nt, Human
uggccucagcugaaugccuccu

SEQ ID NO: 3587864 - RNA, 16 nt, Human
uggccucagcugccuc

SEQ ID NO: 3587865 - RNA, 17 nt, Human
uggccucagcugccuca

SEQ ID NO: 3587866 - RNA, 17 nt, Human
uggccucauguggcugg

SEQ ID NO: 3587867 - RNA, 21 nt, Human
uggccucauguggcuggaaga

SEQ ID NO: 3587868 - RNA, 22 nt, Human
uggccucauuacuuuaccaccc

SEQ ID NO: 3587869 - RNA, 14 nt, Human
uggccuccaggccc

SEQ ID NO: 3587870 - RNA, 11 nt, Human
uggccucccaa

SEQ ID NO: 3587871 - RNA, 20 nt, Human
uggccucccaaaugagccau

SEQ ID NO: 3587872 - RNA, 20 nt, Human
uggccucccaacucacccca

SEQ ID NO: 3587873 - RNA, 11 nt, Human
uggccucccac

SEQ ID NO: 3587874 - RNA, 15 nt, Human
uggccucccacccga

SEQ ID NO: 3587875 - RNA, 21 nt, Human
uggccuccccugccaccaggc

SEQ ID NO: 3587876 - RNA, 16 nt, Human
uggccucccugcucua

SEQ ID NO: 3587877 - RNA, 12 nt, Human
uggccuccggcc

SEQ ID NO: 3587878 - RNA, 15 nt, Human
uggccuccggccucc

SEQ ID NO: 3587879 - RNA, 18 nt, Human
uggccuccggccuccccu

SEQ ID NO: 3587880 - RNA, 13 nt, Human
uggccuccugccu

SEQ ID NO: 3587881 - RNA, 14 nt, Human
uggccuccugccuc

SEQ ID NO: 3587882 - RNA, 14 nt, Human
uggccucgccuggc

SEQ ID NO: 3587883 - RNA, 20 nt, Human
uggccucucacugccucccc

SEQ ID NO: 3587884 - RNA, 23 nt, Human
uggccucucuauccucucuuccu

SEQ ID NO: 3587885 - RNA, 15 nt, Human
uggccucucucuagg

SEQ ID NO: 3587886 - RNA, 17 nt, Human
uggccucugcacucccc

SEQ ID NO: 3587887 - RNA, 18 nt, Human
uggccucugcacuccccu

SEQ ID NO: 3587888 - RNA, 19 nt, Human
uggccucugcacuccccug

SEQ ID NO: 3587889 - RNA, 21 nt, Human
uggccucugcugauccuccca

SEQ ID NO: 3587890 - RNA, 13 nt, Human
uggccucuucaga

SEQ ID NO: 3587891 - RNA, 20 nt, Human
uggccucuugagcaguggcu

SEQ ID NO: 3587892 - RNA, 21 nt, Human
uggccugaagaguccucugaa

SEQ ID NO: 3587893 - RNA, 14 nt, Human
uggccugacucccc

SEQ ID NO: 3587894 - RNA, 12 nt, Human
uggccugaggag

SEQ ID NO: 3587895 - RNA, 16 nt, Human
uggccugcaaacuggg

SEQ ID NO: 3587896 - RNA, 20 nt, Human
uggccugcaaacugggaacc

SEQ ID NO: 3587897 - RNA, 20 nt, Human
uggccugcugggcucuccac

SEQ ID NO: 3587898 - RNA, 11 nt, Human
uggccugcugu

SEQ ID NO: 3587899 - RNA, 16 nt, Human
uggccuggcacacauc

SEQ ID NO: 3587900 - RNA, 12 nt, Human
uggccuggccag

SEQ ID NO: 3587901 - RNA, 15 nt, Human
uggccuggccaggag

SEQ ID NO: 3587902 - RNA, 12 nt, Human
uggccuggcccc

SEQ ID NO: 3587903 - RNA, 16 nt, Human
uggccuggcccugccc

SEQ ID NO: 3587904 - RNA, 14 nt, Human
uggccuggccuggc

SEQ ID NO: 3587905 - RNA, 19 nt, Human
uggccuggccuggcccugc

SEQ ID NO: 3587906 - RNA, 14 nt, Human
uggccuggcuccgc

SEQ ID NO: 3587907 - RNA, 18 nt, Human
uggccuggcuccgcugug

SEQ ID NO: 3587908 - RNA, 21 nt, Human
uggccugguauggcugcaguc

SEQ ID NO: 3587909 - RNA, 16 nt, Human
uggccugucucauccc

SEQ ID NO: 3587910 - RNA, 16 nt, Human
uggccugugucccaug

SEQ ID NO: 3587911 - RNA, 21 nt, Human
uggccugugucccaugaccca

SEQ ID NO: 3587912 - RNA, 12 nt, Human
uggccugugugg

SEQ ID NO: 3587913 - RNA, 21 nt, Human
uggccuguucuucuauggguu

SEQ ID NO: 3587914 - RNA, 18 nt, Human
uggccuguuucaacacag

SEQ ID NO: 3587915 - RNA, 15 nt, Human
uggccuuaauuuccu

SEQ ID NO: 3587916 - RNA, 18 nt, Human
uggccuuccauuuauaug

SEQ ID NO: 3587917 - RNA, 16 nt, Human
uggccuuccugcccua

SEQ ID NO: 3587918 - RNA, 17 nt, Human
uggccuucggccuccau

SEQ ID NO: 3587919 - RNA, 18 nt, Human
uggccuugaaaccaccuu

SEQ ID NO: 3587920 - RNA, 23 nt, Human
uggccuugcagcacucacacagg

SEQ ID NO: 3587921 - RNA, 12 nt, Human
uggccuugcuga

SEQ ID NO: 3587922 - RNA, 15 nt, Human
uggccuuguggucca

SEQ ID NO: 3587923 - RNA, 19 nt, Human
uggccuugugguccaaaua

SEQ ID NO: 3587924 - RNA, 14 nt, Human
uggccuuguucugu

SEQ ID NO: 3587925 - RNA, 14 nt, Human
uggccuuuccucuc

SEQ ID NO: 3587926 - RNA, 24 nt, Human
uggccuuugcgcuccuggcccagc

SEQ ID NO: 3587927 - RNA, 18 nt, Human
uggccuuugcuuaugaau

SEQ ID NO: 3587928 - RNA, 21 nt, Human
uggccuuugcuuaugaauauu

SEQ ID NO: 3587929 - RNA, 19 nt, Human
uggccuuuguaagugcagg

SEQ ID NO: 3587930 - RNA, 16 nt, Human
uggccuuuuucauuua

SEQ ID NO: 3587931 - RNA, 17 nt, Human
uggcgagaggaggggcc

SEQ ID NO: 3587932 - RNA, 19 nt, Human
uggcgaugccagccaagcu

SEQ ID NO: 3587933 - RNA, 15 nt, Human
uggcgcacccucccc

SEQ ID NO: 3587934 - RNA, 22 nt, Human
uggcgcagcauauucaggaagc

SEQ ID NO: 3587935 - RNA, 16 nt, Human
uggcgcaggugggcug

SEQ ID NO: 3587936 - RNA, 18 nt, Human
uggcgcagugccucuggu

SEQ ID NO: 3587937 - RNA, 17 nt, Human
uggcgccgucuccaggg

SEQ ID NO: 3587938 - RNA, 18 nt, Human
uggcgccgucuccagggg

SEQ ID NO: 3587939 - RNA, 16 nt, Human
uggcugcuucaaggau

SEQ ID NO: 3587940 - RNA, 16 nt, Human
uggcuggaagggagga

SEQ ID NO: 3587941 - RNA, 16 nt, Human
uggcuggacccagcca

SEQ ID NO: 3587942 - RNA, 23 nt, Human
uggcuggagacgggugggcggcu

SEQ ID NO: 3587943 - RNA, 19 nt, Human
uggcuggccucacccaccc

SEQ ID NO: 3587944 - RNA, 14 nt, Human
uggcuggcugcagu

SEQ ID NO: 3587945 - RNA, 23 nt, Human
uggcugggaacucaccuggggcu

SEQ ID NO: 3587946 - RNA, 15 nt, Human
uggcugggacguggc

SEQ ID NO: 3587947 - RNA, 15 nt, Human
uggcugggcccagaa

SEQ ID NO: 3587948 - RNA, 20 nt, Human
uggcuggggcauggaaggca

SEQ ID NO: 3587949 - RNA, 20 nt, Human
uggcuggggccuaucagugu

SEQ ID NO: 3587950 - RNA, 14 nt, Human
uggcugggggccuc

SEQ ID NO: 3587951 - RNA, 20 nt, Human
uggcugggggccucagugcc

SEQ ID NO: 3587952 - RNA, 19 nt, Human
uggcugggguggccugugu

SEQ ID NO: 3587953 - RNA, 21 nt, Human
uggcugggguggccugugugg

SEQ ID NO: 3587954 - RNA, 15 nt, Human
uggcugguccagggc

SEQ ID NO: 3587955 - RNA, 16 nt, Human
uggcugguccagggcu

SEQ ID NO: 3587956 - RNA, 16 nt, Human
uggcuggugagccggu

SEQ ID NO: 3587957 - RNA, 19 nt, Human
uggcuggugugguacagag

SEQ ID NO: 3587958 - RNA, 22 nt, Human
uggcugguuagagguucccuuu

SEQ ID NO: 3587959 - RNA, 15 nt, Human
uggcuguaaggcucu

SEQ ID NO: 3587960 - RNA, 13 nt, Human
uggcuguaaucau

SEQ ID NO: 3587961 - RNA, 17 nt, Human
uggcuguagaucccaag

SEQ ID NO: 3587962 - RNA, 22 nt, Human
uggcugucaaugggaccugugg

SEQ ID NO: 3587963 - RNA, 12 nt, Human
uggcugugagga

SEQ ID NO: 3587964 - RNA, 22 nt, Human
uggcugugccucugccugucuc

SEQ ID NO: 3587965 - RNA, 14 nt, Human
uggcuguggcaggc

SEQ ID NO: 3587966 - RNA, 20 nt, Human
uggcuguggccuaaccugcc

SEQ ID NO: 3587967 - RNA, 13 nt, Human
uggcugugggcuc

SEQ ID NO: 3587968 - RNA, 14 nt, Human
uggcugugucuaaa

SEQ ID NO: 3587969 - RNA, 19 nt, Human
uggcugugucuaaacugca

SEQ ID NO: 3587970 - RNA, 18 nt, Human
uggcuguuggcagugagu

SEQ ID NO: 3587971 - RNA, 18 nt, Human
uggcuguuggcugggggc

SEQ ID NO: 3587972 - RNA, 14 nt, Human
uggcuguuugagau

SEQ ID NO: 3587973 - RNA, 18 nt, Human
uggcuuaaaaaaaacucu

SEQ ID NO: 3587974 - RNA, 22 nt, Human
uggcuuaaauauaguuccuaag

SEQ ID NO: 3587975 - RNA, 22 nt, Human
uggcuuaccugaccucuugcug

SEQ ID NO: 3587976 - RNA, 15 nt, Human
uggcuuaccuggccc

SEQ ID NO: 3587977 - RNA, 20 nt, Human
uggcuuacuacaugugggag

SEQ ID NO: 3587978 - RNA, 16 nt, Human
uggcuuauagguguug

SEQ ID NO: 3587979 - RNA, 15 nt, Human
uggcuuauccagcug

SEQ ID NO: 3587980 - RNA, 14 nt, Human
uggcuuauuuuaau

SEQ ID NO: 3587981 - RNA, 17 nt, Human
uggcuucaaaauagaga

SEQ ID NO: 3587982 - RNA, 22 nt, Human
uggcuucaaauauuaugcaggg

SEQ ID NO: 3587983 - RNA, 17 nt, Human
uggcuucacggaagagc

SEQ ID NO: 3587984 - RNA, 20 nt, Human
uggcuucacggaagagccuu

SEQ ID NO: 3587985 - RNA, 14 nt, Human
uggcuucacuccug

SEQ ID NO: 3587986 - RNA, 16 nt, Human
uggcuucacuccugcu

SEQ ID NO: 3587987 - RNA, 18 nt, Human
uggcuucacuccugcugu

SEQ ID NO: 3587988 - RNA, 19 nt, Human
uggcuucacuccugcugua

SEQ ID NO: 3587989 - RNA, 12 nt, Human
uggcuucagcuc

SEQ ID NO: 3587990 - RNA, 21 nt, Human
uggcuucagcuccagccccuu

SEQ ID NO: 3587991 - RNA, 12 nt, Human
uggcuucaggag

SEQ ID NO: 3587992 - RNA, 13 nt, Human
uggcuucaggagg

SEQ ID NO: 3587993 - RNA, 20 nt, Human
uggcuucauuagagcaggcg

SEQ ID NO: 3587994 - RNA, 22 nt, Human
uggcuuccagaaaaccccagca

SEQ ID NO: 3587995 - RNA, 23 nt, Human
uggcuuccagaaaaccccagcau

SEQ ID NO: 3587996 - RNA, 16 nt, Human
uggcuuccaugauggu

SEQ ID NO: 3587997 - RNA, 15 nt, Human
uggcuucccaucccc

SEQ ID NO: 3587998 - RNA, 19 nt, Human
uggcuucccauccccagcg

SEQ ID NO: 3587999 - RNA, 15 nt, Human
uggcuucccaugucu

SEQ ID NO: 3588000 - RNA, 17 nt, Human
uggcuucccaugucuuu

SEQ ID NO: 3588001 - RNA, 16 nt, Human
uggcuucccgcucagc

SEQ ID NO: 3588002 - RNA, 21 nt, Human
uggcuuccuccucccuccugc

SEQ ID NO: 3588003 - RNA, 21 nt, Human
uggcuucucauacguccacca

SEQ ID NO: 3588004 - RNA, 22 nt, Human
uggcuucucauacguccaccau

SEQ ID NO: 3588005 - RNA, 15 nt, Human
uggcuucucugagga

SEQ ID NO: 3588006 - RNA, 16 nt, Human
uggcuucucugaggaa

SEQ ID NO: 3588007 - RNA, 22 nt, Human
uggcuucugugaugagcugauc

SEQ ID NO: 3588008 - RNA, 20 nt, Human
uggcuucuguggggccccuc

SEQ ID NO: 3588009 - RNA, 16 nt, Human
uggcuucuguuucuag

SEQ ID NO: 3588010 - RNA, 19 nt, Human
uggcuugacucaggauuua

SEQ ID NO: 3588011 - RNA, 21 nt, Human
uggcuugaguuuaaauuguaa

SEQ ID NO: 3588012 - RNA, 23 nt, Human
uggcuugggacuaaaugcccugc

SEQ ID NO: 3588013 - RNA, 16 nt, Human
uggcuugggcagcauc

SEQ ID NO: 3588014 - RNA, 17 nt, Human
uggcuuguaacuccacc

SEQ ID NO: 3588015 - RNA, 14 nt, Human
uggcuuguagaauu

SEQ ID NO: 3588016 - RNA, 16 nt, Human
uggcuuguagaauugu

SEQ ID NO: 3588017 - RNA, 24 nt, Human
uggcuuguaucaacacuguuacuu

SEQ ID NO: 3588018 - RNA, 14 nt, Human
uggcuuguccucac

SEQ ID NO: 3588019 - RNA, 16 nt, Human
uggcuuguuguaaagc

SEQ ID NO: 3588020 - RNA, 18 nt, Human
uggcuuguuguaaagcaa

SEQ ID NO: 3588021 - RNA, 21 nt, Human
uggcuuuauccucuuuagagu

SEQ ID NO: 3588022 - RNA, 15 nt, Human
uggcuuucagaaaac

SEQ ID NO: 3588023 - RNA, 11 nt, Human
uggcuuucagg

SEQ ID NO: 3588024 - RNA, 21 nt, Human
uggcuuucauuuucucucagg

SEQ ID NO: 3588025 - RNA, 19 nt, Human
uggcuuuccuuguggcaga

SEQ ID NO: 3588026 - RNA, 16 nt, Human
uggcuuugaugauaaa

SEQ ID NO: 3588027 - RNA, 13 nt, Human
uggcuuuggaagc

SEQ ID NO: 3588028 - RNA, 17 nt, Human
uggcuuuggcuucuugg

SEQ ID NO: 3588029 - RNA, 14 nt, Human
uggcuuuguauaga

SEQ ID NO: 3588030 - RNA, 20 nt, Human
uggcuuugugauucaaucug

SEQ ID NO: 3588031 - RNA, 22 nt, Human
uggcuuuuauuaaugcacuuuc

SEQ ID NO: 3588032 - RNA, 15 nt, Human
uggcuuuucacugcu

SEQ ID NO: 3588033 - RNA, 21 nt, Human
uggcuuuucacugcuggcugc

SEQ ID NO: 3588034 - RNA, 22 nt, Human
uggcuuuucacugcuggcugcc

SEQ ID NO: 3588035 - RNA, 21 nt, Human
uggcuuuucaugcgugugugu

SEQ ID NO: 3588036 - RNA, 18 nt, Human
uggcuuuucugauccagu

SEQ ID NO: 3588037 - RNA, 16 nt, Human
uggcuuuugugcauua

SEQ ID NO: 3588038 - RNA, 21 nt, Human
uggcuuuugugcauuaucuag

SEQ ID NO: 3588039 - RNA, 21 nt, Human
ugggaaaacauguuaaugaca

SEQ ID NO: 3588040 - RNA, 17 nt, Human
ugggaaaauauguccau

SEQ ID NO: 3588041 - RNA, 19 nt, Human
ugggaaacacuccuugcau

SEQ ID NO: 3588042 - RNA, 15 nt, Human
ugggaaacuugucac

SEQ ID NO: 3588043 - RNA, 17 nt, Human
ugggaaagagauuuaaa

SEQ ID NO: 3588044 - RNA, 17 nt, Human
ugggaaagcauuguaaa

SEQ ID NO: 3588045 - RNA, 18 nt, Human
ugggaaagcauuguaaau

SEQ ID NO: 3588046 - RNA, 21 nt, Human
ugggaaagccaccucucccuc

SEQ ID NO: 3588047 - RNA, 17 nt, Human
ugggaaaggaguagaaa

SEQ ID NO: 3588048 - RNA, 20 nt, Human
ugggaaagggauuuucagcc

SEQ ID NO: 3588049 - RNA, 19 nt, Human
ugggaaauauuuagcaaau

SEQ ID NO: 3588050 - RNA, 19 nt, Human
ugggaaaugagaaggcagc

SEQ ID NO: 3588051 - RNA, 15 nt, Human
ugggaaauggcuuga

SEQ ID NO: 3588052 - RNA, 22 nt, Human
ugggaaaugguaugagcugagg

SEQ ID NO: 3588053 - RNA, 23 nt, Human
ugggaaaugguaugagcugaggg

SEQ ID NO: 3588054 - RNA, 21 nt, Human
ugggaacauuuauuuuaugag

SEQ ID NO: 3588055 - RNA, 20 nt, Human
ugggaacccaaguccaagca

SEQ ID NO: 3588056 - RNA, 18 nt, Human
ugggaaccccuuucccac

SEQ ID NO: 3588057 - RNA, 17 nt, Human
ugggaaccucccagagg

SEQ ID NO: 3588058 - RNA, 19 nt, Human
ugggaaccucccagagguc

SEQ ID NO: 3588059 - RNA, 15 nt, Human
ugggaacgagagggg

SEQ ID NO: 3588060 - RNA, 16 nt, Human
ugggaacgugacugcc

SEQ ID NO: 3588061 - RNA, 15 nt, Human
ugggaacucaccugg

SEQ ID NO: 3588062 - RNA, 17 nt, Human
ugggaacucaccugggg

SEQ ID NO: 3588063 - RNA, 22 nt, Human
ugggaacucugacaagggcuga

SEQ ID NO: 3588064 - RNA, 17 nt, Human
ugggaacugcagaccug

SEQ ID NO: 3588065 - RNA, 13 nt, Human
ugggaagacauga

SEQ ID NO: 3588066 - RNA, 21 nt, Human
ugggaagacauggggaggaag

SEQ ID NO: 3588067 - RNA, 23 nt, Human
ugggaagaccagcuuugcaguga

SEQ ID NO: 3588068 - RNA, 17 nt, Human
ugggaagacgaggcccu

SEQ ID NO: 3588069 - RNA, 19 nt, Human
ugggaagacgccugagcuc

SEQ ID NO: 3588070 - RNA, 20 nt, Human
ugggaagagcuuagaaacug

SEQ ID NO: 3588071 - RNA, 20 nt, Human
ugggaagauaggcucugcac

SEQ ID NO: 3588072 - RNA, 12 nt, Human
ugggaaggaggg

SEQ ID NO: 3588073 - RNA, 23 nt, Human
ugggaaggcuacuucggggcugg

SEQ ID NO: 3588074 - RNA, 18 nt, Human
ugggaaggcuugggauuu

SEQ ID NO: 3588075 - RNA, 13 nt, Human
ugggaagggagag

SEQ ID NO: 3588076 - RNA, 15 nt, Human
ugggaagggguuucu

SEQ ID NO: 3588077 - RNA, 14 nt, Human
ugggaagugacuua

SEQ ID NO: 3588078 - RNA, 20 nt, Human
ugggaagugacuuagcagau

SEQ ID NO: 3588079 - RNA, 14 nt, Human
ugggaauaaauaug

SEQ ID NO: 3588080 - RNA, 15 nt, Human
ugggaauaccugugg

SEQ ID NO: 3588081 - RNA, 14 nt, Human
ugggaauauuugaa

SEQ ID NO: 3588082 - RNA, 18 nt, Human
ugggaauauuugaaucuu

SEQ ID NO: 3588083 - RNA, 15 nt, Human
ugggaaugagacaua

SEQ ID NO: 3588084 - RNA, 22 nt, Human
ugggaaugaggcuugcugagag

SEQ ID NO: 3588085 - RNA, 17 nt, Human
ugggaauggaggggcag

SEQ ID NO: 3588086 - RNA, 23 nt, Human
ugggaauggaggggcagagccag

SEQ ID NO: 3588087 - RNA, 13 nt, Human
aagccaaagccaa

SEQ ID NO: 3588088 - RNA, 20 nt, Human
aagccaaagcuaggccuggc

SEQ ID NO: 3588089 - RNA, 22 nt, Human
aagccaaaguggcauguuuugu

SEQ ID NO: 3588090 - RNA, 17 nt, Human
aagccaacagucaaaac

SEQ ID NO: 3588091 - RNA, 22 nt, Human
aagccaacuuggcuuucccgga

SEQ ID NO: 3588092 - RNA, 15 nt, Human
aagccaagaccucac

SEQ ID NO: 3588093 - RNA, 14 nt, Human
aagccaagggaaag

SEQ ID NO: 3588094 - RNA, 16 nt, Human
aagccaagggaaaggg

SEQ ID NO: 3588095 - RNA, 23 nt, Human
aagccaagggaaaggggugcuuu

SEQ ID NO: 3588096 - RNA, 18 nt, Human
aagccaagggaaccugug

SEQ ID NO: 3588097 - RNA, 16 nt, Human
aagccaagggccucuu

SEQ ID NO: 3588098 - RNA, 21 nt, Human
aagccaaggugucauuuaugu

SEQ ID NO: 3588099 - RNA, 22 nt, Human
aagccaagucagcuuugccuuc

SEQ ID NO: 3588100 - RNA, 20 nt, Human
aagccaauccccuccuuggg

SEQ ID NO: 3588101 - RNA, 19 nt, Human
aagccaaucuacaaucucu

SEQ ID NO: 3588102 - RNA, 17 nt, Human
aagccaauucagacagg

SEQ ID NO: 3588103 - RNA, 15 nt, Human
aagccacaagaaauu

SEQ ID NO: 3588104 - RNA, 16 nt, Human
aagccacaagaaauuu

SEQ ID NO: 3588105 - RNA, 18 nt, Human
aagccacaagaaauuuga

SEQ ID NO: 3588106 - RNA, 18 nt, Human
aagccacagcccaggccu

SEQ ID NO: 3588107 - RNA, 24 nt, Human
aagccacagcccaggccuccagcu

SEQ ID NO: 3588108 - RNA, 23 nt, Human
aagccacaggccugagauuucau

SEQ ID NO: 3588109 - RNA, 19 nt, Human
aagccaccaacauacuccc

SEQ ID NO: 3588110 - RNA, 16 nt, Human
aagccacccucccagc

SEQ ID NO: 3588111 - RNA, 18 nt, Human
aagccacccucccagcuc

SEQ ID NO: 3588112 - RNA, 21 nt, Human
aagccacccucccagcucuga

SEQ ID NO: 3588113 - RNA, 17 nt, Human
aagccaccucucccuca

SEQ ID NO: 3588114 - RNA, 13 nt, Human
aagccacugaagc

SEQ ID NO: 3588115 - RNA, 18 nt, Human
aagccacugccucucccu

SEQ ID NO: 3588116 - RNA, 19 nt, Human
aagccacugccucucccuc

SEQ ID NO: 3588117 - RNA, 12 nt, Human
aagccagaagcu

SEQ ID NO: 3588118 - RNA, 17 nt, Human
aagccagaagcugagca

SEQ ID NO: 3588119 - RNA, 11 nt, Human
aagccagacag

SEQ ID NO: 3588120 - RNA, 14 nt, Human
aagccagaggcugg

SEQ ID NO: 3588121 - RNA, 22 nt, Human
aagccagcaccggaccagccug

SEQ ID NO: 3588122 - RNA, 19 nt, Human
aagccagcaggcucucagg

SEQ ID NO: 3588123 - RNA, 16 nt, Human
aagccagcccggccgc

SEQ ID NO: 3588124 - RNA, 21 nt, Human
aagccagccugguccaugcag

SEQ ID NO: 3588125 - RNA, 20 nt, Human
aagccagcugcccccagagc

SEQ ID NO: 3588126 - RNA, 23 nt, Human
aagccagcugccgaccagagccc

SEQ ID NO: 3588127 - RNA, 11 nt, Human
aagccagcuug

SEQ ID NO: 3588128 - RNA, 23 nt, Human
aagccagcuuucccugccucuca

SEQ ID NO: 3588129 - RNA, 22 nt, Human
aagccaggaauuucccaggacc

SEQ ID NO: 3588130 - RNA, 23 nt, Human
aagccaggaauuucccaggaccc

SEQ ID NO: 3588131 - RNA, 23 nt, Human
aagccagggauggggccacagcc

SEQ ID NO: 3588132 - RNA, 17 nt, Human
aagccagggcuggagaa

SEQ ID NO: 3588133 - RNA, 16 nt, Human
aagccaggucccucuc

SEQ ID NO: 3588134 - RNA, 18 nt, Human
aagccagugacuccagga

SEQ ID NO: 3588135 - RNA, 18 nt, Human
aagccaguguugccuaag

SEQ ID NO: 3588136 - RNA, 17 nt, Human
aagccauaugaacagcu

SEQ ID NO: 3588137 - RNA, 16 nt, Human
aagccaucuugguaaa

SEQ ID NO: 3588138 - RNA, 13 nt, Human
aagccaugcugga

SEQ ID NO: 3588139 - RNA, 21 nt, Human
aagccaugcuggaaaauaaua

SEQ ID NO: 3588140 - RNA, 18 nt, Human
aagccauggguagccugg

SEQ ID NO: 3588141 - RNA, 22 nt, Human
aagccauggguagccugggugu

SEQ ID NO: 3588142 - RNA, 16 nt, Human
aagccauguauaaaug

SEQ ID NO: 3588143 - RNA, 12 nt, Human
aagccauguuua

SEQ ID NO: 3588144 - RNA, 15 nt, Human
aagccauguuuaaga

SEQ ID NO: 3588145 - RNA, 16 nt, Human
aagccauguuuaagau

SEQ ID NO: 3588146 - RNA, 13 nt, Human
aagccauguuuau

SEQ ID NO: 3588147 - RNA, 17 nt, Human
aagccauguuuauuaca

SEQ ID NO: 3588148 - RNA, 20 nt, Human
aagccauguuuauuacagua

SEQ ID NO: 3588149 - RNA, 22 nt, Human
aagccauguuuauuacaguaua

SEQ ID NO: 3588150 - RNA, 14 nt, Human
aagccauuccaaag

SEQ ID NO: 3588151 - RNA, 22 nt, Human
aagccauucuccugccucagcc

SEQ ID NO: 3588152 - RNA, 12 nt, Human
aagccauugucu

SEQ ID NO: 3588153 - RNA, 16 nt, Human
aagcccaaccuccuga

SEQ ID NO: 3588154 - RNA, 22 nt, Human
aagcccaaccuccugaccuguc

SEQ ID NO: 3588155 - RNA, 17 nt, Human
aagcccagagggucugg

SEQ ID NO: 3588156 - RNA, 14 nt, Human
aagcccagcuccag

SEQ ID NO: 3588157 - RNA, 15 nt, Human
aagcccagcuccagg

SEQ ID NO: 3588158 - RNA, 14 nt, Human
aagcccaggccccu

SEQ ID NO: 3588159 - RNA, 19 nt, Human
aagcccaguucagcuuggg

SEQ ID NO: 3588160 - RNA, 14 nt, Human
aagcccauccugac

SEQ ID NO: 3588161 - RNA, 20 nt, Human
aagcccaugaguccuugaaa

SEQ ID NO: 3588162 - RNA, 16 nt, Human
aagccccacaugucca

SEQ ID NO: 3588163 - RNA, 17 nt, Human
aagccccacccaggcca

SEQ ID NO: 3588164 - RNA, 18 nt, Human
aagccccacccaggccag

SEQ ID NO: 3588165 - RNA, 22 nt, Human
aagccccacccaggccaggcau

SEQ ID NO: 3588166 - RNA, 22 nt, Human
aagccccaugcuggagccugug

SEQ ID NO: 3588167 - RNA, 14 nt, Human
aagcccccaccgug

SEQ ID NO: 3588168 - RNA, 14 nt, Human
aagcccccagagcc

SEQ ID NO: 3588169 - RNA, 16 nt, Human
aagcccccccuuccac

SEQ ID NO: 3588170 - RNA, 14 nt, Human
aagccccugggccc

SEQ ID NO: 3588171 - RNA, 17 nt, Human
aagcccgacuugcuguu

SEQ ID NO: 3588172 - RNA, 19 nt, Human
aagcccuacagagcugugg

SEQ ID NO: 3588173 - RNA, 13 nt, Human
aagcccucccagg

SEQ ID NO: 3588174 - RNA, 14 nt, Human
aagcccuccuucca

SEQ ID NO: 3588175 - RNA, 21 nt, Human
aagcccucuuccaucaugucc

SEQ ID NO: 3588176 - RNA, 23 nt, Human
aagcccugauuguguauauucau

SEQ ID NO: 3588177 - RNA, 13 nt, Human
aagcccuggagac

SEQ ID NO: 3588178 - RNA, 23 nt, Human
aagcccuggagccaacugcugcu

SEQ ID NO: 3588179 - RNA, 19 nt, Human
aagcccugggaucacugug

SEQ ID NO: 3588180 - RNA, 18 nt, Human
aagcccugucgagacacu

SEQ ID NO: 3588181 - RNA, 18 nt, Human
aagcccuguugugccaca

SEQ ID NO: 3588182 - RNA, 15 nt, Human
aagccgaccuuagau

SEQ ID NO: 3588183 - RNA, 17 nt, Human
aagccgacucuggcccu

SEQ ID NO: 3588184 - RNA, 18 nt, Human
aagccgacucuggcccug

SEQ ID NO: 3588185 - RNA, 12 nt, Human
aagccggcggcc

SEQ ID NO: 3588186 - RNA, 14 nt, Human
aagccguggcuucc

SEQ ID NO: 3588187 - RNA, 13 nt, Human
aagccuaaagauu

SEQ ID NO: 3588188 - RNA, 23 nt, Human
aagccuaaaugccuuagaaaugu

SEQ ID NO: 3588189 - RNA, 14 nt, Human
aagccuaagaaucu

SEQ ID NO: 3588190 - RNA, 22 nt, Human
aagccuaaucacaguuuuuccu

SEQ ID NO: 3588191 - RNA, 21 nt, Human
aagccuaucaaagaccuugug

SEQ ID NO: 3588192 - RNA, 16 nt, Human
aagccucaaaacaaag

SEQ ID NO: 3588193 - RNA, 22 nt, Human
aagccucaacuagucauuuuuu

SEQ ID NO: 3588194 - RNA, 13 nt, Human
aagccucagagaa

SEQ ID NO: 3588195 - RNA, 20 nt, Human
aagccucagauuccuuccca

SEQ ID NO: 3588196 - RNA, 14 nt, Human
aagccucauauuua

SEQ ID NO: 3588197 - RNA, 15 nt, Human
aagccuccuccagcc

SEQ ID NO: 3588198 - RNA, 19 nt, Human
aagccuccuuagaaaaaaa

SEQ ID NO: 3588199 - RNA, 11 nt, Human
aagccucugcu

SEQ ID NO: 3588200 - RNA, 14 nt, Human
aagccucugcugcc

SEQ ID NO: 3588201 - RNA, 12 nt, Human
aagccucuggga

SEQ ID NO: 3588202 - RNA, 22 nt, Human
aagccucugugucacuggcugc

SEQ ID NO: 3588203 - RNA, 21 nt, Human
aagccugaaggggcgucuguu

SEQ ID NO: 3588204 - RNA, 24 nt, Human
aagccugaaggggcgucuguuccc

SEQ ID NO: 3588205 - RNA, 21 nt, Human
aagccugagggaaaggccagc

SEQ ID NO: 3588206 - RNA, 22 nt, Human
aagccugagggaaaggccagca

SEQ ID NO: 3588207 - RNA, 22 nt, Human
aagccugcacaauaaaaauguu

SEQ ID NO: 3588208 - RNA, 11 nt, Human
aagccugcccu

SEQ ID NO: 3588209 - RNA, 18 nt, Human
aagccugcccuugucuga

SEQ ID NO: 3588210 - RNA, 16 nt, Human
aagccugggggccugg

SEQ ID NO: 3588211 - RNA, 13 nt, Human
aagccugugcaaa

SEQ ID NO: 3588212 - RNA, 17 nt, Human
aagccugugcaaaaaaa

SEQ ID NO: 3588213 - RNA, 22 nt, Human
aagccuguggaugaucaauccu

SEQ ID NO: 3588214 - RNA, 13 nt, Human
aagccuguggcug

SEQ ID NO: 3588215 - RNA, 18 nt, Human
aagccuguucauggcaga

SEQ ID NO: 3588216 - RNA, 20 nt, Human
aagccuguuccccucacugg

SEQ ID NO: 3588217 - RNA, 14 nt, Human
aagccuuagggaag

SEQ ID NO: 3588218 - RNA, 23 nt, Human
aagccuuaucaagugucuuccau

SEQ ID NO: 3588219 - RNA, 13 nt, Human
aagccuucaagcu

SEQ ID NO: 3588220 - RNA, 16 nt, Human
aagccuucaagcucug

SEQ ID NO: 3588221 - RNA, 18 nt, Human
aagccuucaagcucugag

SEQ ID NO: 3588222 - RNA, 12 nt, Human
aagccuuccccu

SEQ ID NO: 3588223 - RNA, 11 nt, Human
aagccuuccua

SEQ ID NO: 3588224 - RNA, 22 nt, Human
aagccuucgggcgucugugugc

SEQ ID NO: 3588225 - RNA, 21 nt, Human
aagccuuggggcugaugcagu

SEQ ID NO: 3588226 - RNA, 22 nt, Human
aagccuuguguauauuuguaua

SEQ ID NO: 3588227 - RNA, 20 nt, Human
aagccuuuaguaucaguguu

SEQ ID NO: 3588228 - RNA, 18 nt, Human
aagccuuuguugaacugu

SEQ ID NO: 3588229 - RNA, 14 nt, Human
aagcgaaaaacuca

SEQ ID NO: 3588230 - RNA, 22 nt, Human
aagcgauauacagaugaaaauu

SEQ ID NO: 3588231 - RNA, 21 nt, Human
aagcgaugaauuuggagacuc

SEQ ID NO: 3588232 - RNA, 15 nt, Human
aagcgauucuccugc

SEQ ID NO: 3588233 - RNA, 16 nt, Human
aagcgauucuucugcu

SEQ ID NO: 3588234 - RNA, 17 nt, Human
aagcgauucuucugcuu

SEQ ID NO: 3588235 - RNA, 13 nt, Human
aagcgcccuggcc

SEQ ID NO: 3588236 - RNA, 23 nt, Human
ugggauucccaccaaggucuuca

SEQ ID NO: 3588237 - RNA, 15 nt, Human
ugggauuccugaccc

SEQ ID NO: 3588238 - RNA, 21 nt, Human
ugggauuccugacccaggccg

SEQ ID NO: 3588239 - RNA, 19 nt, Human
ugggauugugguacaaucu

SEQ ID NO: 3588240 - RNA, 16 nt, Human
ugggauuuaauuucca

SEQ ID NO: 3588241 - RNA, 15 nt, Human
ugggcaaaaaacucg

SEQ ID NO: 3588242 - RNA, 18 nt, Human
ugggcaaaacccacagaa

SEQ ID NO: 3588243 - RNA, 15 nt, Human
ugggcaaagagugua

SEQ ID NO: 3588244 - RNA, 15 nt, Human
ugggcaacaaaguga

SEQ ID NO: 3588245 - RNA, 17 nt, Human
ugggcaacccccagccu

SEQ ID NO: 3588246 - RNA, 22 nt, Human
ugggcaagcuggcggcuggggu

SEQ ID NO: 3588247 - RNA, 19 nt, Human
ugggcaaggaaaaagaaaa

SEQ ID NO: 3588248 - RNA, 15 nt, Human
ugggcaagugauuga

SEQ ID NO: 3588249 - RNA, 18 nt, Human
ugggcaauauucucugua

SEQ ID NO: 3588250 - RNA, 19 nt, Human
ugggcaauauucucuguac

SEQ ID NO: 3588251 - RNA, 20 nt, Human
ugggcaauauucucuguaca

SEQ ID NO: 3588252 - RNA, 15 nt, Human
ugggcaauuuagaaa

SEQ ID NO: 3588253 - RNA, 19 nt, Human
ugggcacaaagggcccaga

SEQ ID NO: 3588254 - RNA, 22 nt, Human
ugggcacaacugcaauaacuuc

SEQ ID NO: 3588255 - RNA, 18 nt, Human
ugggcaccacaaaauaua

SEQ ID NO: 3588256 - RNA, 21 nt, Human
ugggcacccagccucuaggga

SEQ ID NO: 3588257 - RNA, 18 nt, Human
ugggcacccccagccugg

SEQ ID NO: 3588258 - RNA, 15 nt, Human
ugggcaccuggggag

SEQ ID NO: 3588259 - RNA, 19 nt, Human
ugggcacgcugugggcagg

SEQ ID NO: 3588260 - RNA, 20 nt, Human
ugggcacuauuuauuuacaa

SEQ ID NO: 3588261 - RNA, 16 nt, Human
ugggcacugcugggug

SEQ ID NO: 3588262 - RNA, 15 nt, Human
ugggcacugggauga

SEQ ID NO: 3588263 - RNA, 16 nt, Human
ugggcacuucccugcu

SEQ ID NO: 3588264 - RNA, 16 nt, Human
ugggcagaaggaagac

SEQ ID NO: 3588265 - RNA, 18 nt, Human
ugggcagaaggccaagag

SEQ ID NO: 3588266 - RNA, 12 nt, Human
ugggcagagcag

SEQ ID NO: 3588267 - RNA, 13 nt, Human
ugggcagagcaga

SEQ ID NO: 3588268 - RNA, 22 nt, Human
ugggcagagcagagaccauccc

SEQ ID NO: 3588269 - RNA, 12 nt, Human
ugggcagagcug

SEQ ID NO: 3588270 - RNA, 16 nt, Human
ugggcagagcuggcuc

SEQ ID NO: 3588271 - RNA, 20 nt, Human
ugggcagagcuggcucugag

SEQ ID NO: 3588272 - RNA, 16 nt, Human
ugggcagaucuacccc

SEQ ID NO: 3588273 - RNA, 22 nt, Human
ugggcagaucuaccccuuacuu

SEQ ID NO: 3588274 - RNA, 19 nt, Human
ugggcagcaauuuaaaugu

SEQ ID NO: 3588275 - RNA, 18 nt, Human
ugggcagcauagcaagac

SEQ ID NO: 3588276 - RNA, 19 nt, Human
ugggcagcgcccuuccucu

SEQ ID NO: 3588277 - RNA, 21 nt, Human
ugggcagcgcccuuccucucc

SEQ ID NO: 3588278 - RNA, 17 nt, Human
ugggcagcugaacagug

SEQ ID NO: 3588279 - RNA, 19 nt, Human
ugggcagcugccuccccuc

SEQ ID NO: 3588280 - RNA, 20 nt, Human
ugggcagcugccuccccucc

SEQ ID NO: 3588281 - RNA, 22 nt, Human
ugggcagcugccuccccuccuc

SEQ ID NO: 3588282 - RNA, 19 nt, Human
ugggcagcugucccuugcu

SEQ ID NO: 3588283 - RNA, 23 nt, Human
ugggcagcuuagggcccuggagg

SEQ ID NO: 3588284 - RNA, 18 nt, Human
ugggcaggacucagcucc

SEQ ID NO: 3588285 - RNA, 23 nt, Human
ugggcaggacucagcuccccaga

SEQ ID NO: 3588286 - RNA, 15 nt, Human
ugggcaggagggagg

SEQ ID NO: 3588287 - RNA, 21 nt, Human
ugggcagggucuguuuggacu

SEQ ID NO: 3588288 - RNA, 14 nt, Human
ugggcagguggugg

SEQ ID NO: 3588289 - RNA, 15 nt, Human
ugggcaguuacaugc

SEQ ID NO: 3588290 - RNA, 21 nt, Human
ugggcauacuaauaaaguaug

SEQ ID NO: 3588291 - RNA, 16 nt, Human
ugggcaucuguucugg

SEQ ID NO: 3588292 - RNA, 17 nt, Human
ugggcaucuguucuggu

SEQ ID NO: 3588293 - RNA, 19 nt, Human
ugggcaucuuuuguauuaa

SEQ ID NO: 3588294 - RNA, 22 nt, Human
ugggcaugguaccagcccuggg

SEQ ID NO: 3588295 - RNA, 14 nt, Human
ugggcaugugggcu

SEQ ID NO: 3588296 - RNA, 15 nt, Human
ugggcaugugggcuu

SEQ ID NO: 3588297 - RNA, 23 nt, Human
ugggcauuacuguuuaagacacu

SEQ ID NO: 3588298 - RNA, 23 nt, Human
ugggcauugacaaaucuguguau

SEQ ID NO: 3588299 - RNA, 15 nt, Human
ugggcauugcuuucc

SEQ ID NO: 3588300 - RNA, 23 nt, Human
ugggccaaauccgcucucuuccu

SEQ ID NO: 3588301 - RNA, 19 nt, Human
ugggccaagccagggaugg

SEQ ID NO: 3588302 - RNA, 20 nt, Human
ugggccaagucaaagacauu

SEQ ID NO: 3588303 - RNA, 20 nt, Human
ugggccaccaggaucagcca

SEQ ID NO: 3588304 - RNA, 15 nt, Human
ugggccacuguggug

SEQ ID NO: 3588305 - RNA, 17 nt, Human
ugggccagaauuucaaa

SEQ ID NO: 3588306 - RNA, 14 nt, Human
ugggccagccccuc

SEQ ID NO: 3588307 - RNA, 22 nt, Human
ugggccagccccuccaucugua

SEQ ID NO: 3588308 - RNA, 23 nt, Human
ugggccagccccucccaccacag

SEQ ID NO: 3588309 - RNA, 18 nt, Human
ugggccaggacaggcccg

SEQ ID NO: 3588310 - RNA, 12 nt, Human
ugggccagggcu

SEQ ID NO: 3588311 - RNA, 14 nt, Human
ugggccagggucug

SEQ ID NO: 3588312 - RNA, 14 nt, Human
ugggccaguguggg

SEQ ID NO: 3588313 - RNA, 16 nt, Human
ugggccauacuggccu

SEQ ID NO: 3588314 - RNA, 18 nt, Human
ugggccauacuggccucg

SEQ ID NO: 3588315 - RNA, 20 nt, Human
ugggccauacuggccucgcc

SEQ ID NO: 3588316 - RNA, 18 nt, Human
ugggccauguccaaagag

SEQ ID NO: 3588317 - RNA, 18 nt, Human
ugggccauguugugccuc

SEQ ID NO: 3588318 - RNA, 15 nt, Human
ugggcccacaccucc

SEQ ID NO: 3588319 - RNA, 17 nt, Human
ugggcccagaggcacag

SEQ ID NO: 3588320 - RNA, 13 nt, Human
ugggcccagaucu

SEQ ID NO: 3588321 - RNA, 16 nt, Human
ugggcccagcugggcu

SEQ ID NO: 3588322 - RNA, 14 nt, Human
ugggcccaggacca

SEQ ID NO: 3588323 - RNA, 18 nt, Human
ugggcccaggaccagcug

SEQ ID NO: 3588324 - RNA, 19 nt, Human
ugggcccaggaccagcugg

SEQ ID NO: 3588325 - RNA, 21 nt, Human
ugggcccaggaccagcugggg

SEQ ID NO: 3588326 - RNA, 15 nt, Human
ugggcccaggccuca

SEQ ID NO: 3588327 - RNA, 12 nt, Human
ugggcccaggga

SEQ ID NO: 3588328 - RNA, 22 nt, Human
ugggcccagggacaccagccag

SEQ ID NO: 3588329 - RNA, 16 nt, Human
ugggcccccaaaugga

SEQ ID NO: 3588330 - RNA, 19 nt, Human
ugggccccccagcucaggg

SEQ ID NO: 3588331 - RNA, 19 nt, Human
ugggccccucaucugcuca

SEQ ID NO: 3588332 - RNA, 14 nt, Human
ugggccccucccua

SEQ ID NO: 3588333 - RNA, 13 nt, Human
ugggcccucucug

SEQ ID NO: 3588334 - RNA, 16 nt, Human
ugggcccucucugcuc

SEQ ID NO: 3588335 - RNA, 17 nt, Human
ugggcccugggcuggaa

SEQ ID NO: 3588336 - RNA, 13 nt, Human
ugggcccuggggc

SEQ ID NO: 3588337 - RNA, 16 nt, Human
ugggcccuggggccug

SEQ ID NO: 3588338 - RNA, 13 nt, Human
ugggcccuuugag

SEQ ID NO: 3588339 - RNA, 21 nt, Human
ugggccggcuucaugccagcu

SEQ ID NO: 3588340 - RNA, 21 nt, Human
ugggccguaucuccggcuccc

SEQ ID NO: 3588341 - RNA, 15 nt, Human
ugggccuaggcugca

SEQ ID NO: 3588342 - RNA, 19 nt, Human
ugggccuauggagagcccu

SEQ ID NO: 3588343 - RNA, 23 nt, Human
ugggccucaaggacuugaaagca

SEQ ID NO: 3588344 - RNA, 13 nt, Human
ugggccuccucac

SEQ ID NO: 3588345 - RNA, 16 nt, Human
ugggccuccugugugu

SEQ ID NO: 3588346 - RNA, 20 nt, Human
ugggccucugcuucucucac

SEQ ID NO: 3588347 - RNA, 13 nt, Human
ugggccugaguga

SEQ ID NO: 3588348 - RNA, 19 nt, Human
ugggccugccgggcugagg

SEQ ID NO: 3588349 - RNA, 15 nt, Human
ugggccugcuccaga

SEQ ID NO: 3588350 - RNA, 16 nt, Human
ugggccugcuccagac

SEQ ID NO: 3588351 - RNA, 18 nt, Human
ugggccugcugcugagaa

SEQ ID NO: 3588352 - RNA, 15 nt, Human
ugggccugcuuccug

SEQ ID NO: 3588353 - RNA, 13 nt, Human
ugggccugggcuc

SEQ ID NO: 3588354 - RNA, 12 nt, Human
ugggccuucagg

SEQ ID NO: 3588355 - RNA, 15 nt, Human
ugggccuucagggag

SEQ ID NO: 3588356 - RNA, 15 nt, Human
ugggccuuggccugg

SEQ ID NO: 3588357 - RNA, 16 nt, Human
ugggccuuggccugga

SEQ ID NO: 3588358 - RNA, 18 nt, Human
ugggccuuggccuggagc

SEQ ID NO: 3588359 - RNA, 19 nt, Human
ugggccuuggccuggagca

SEQ ID NO: 3588360 - RNA, 15 nt, Human
ugggccuugggcucc

SEQ ID NO: 3588361 - RNA, 20 nt, Human
ugggcgccccccccucccca

SEQ ID NO: 3588362 - RNA, 20 nt, Human
ugggcgccgugcugggcagc

SEQ ID NO: 3588363 - RNA, 19 nt, Human
ugggcggcagagaggacug

SEQ ID NO: 3588364 - RNA, 12 nt, Human
ugggcggcugag

SEQ ID NO: 3588365 - RNA, 14 nt, Human
ugggcggcugagag

SEQ ID NO: 3588366 - RNA, 15 nt, Human
ugggcggcugagagc

SEQ ID NO: 3588367 - RNA, 18 nt, Human
ugggcggcugagagcccc

SEQ ID NO: 3588368 - RNA, 19 nt, Human
ugggcgggcagcacagcaa

SEQ ID NO: 3588369 - RNA, 22 nt, Human
ugggcgggcaggggagggucag

SEQ ID NO: 3588370 - RNA, 18 nt, Human
ugggcgugagaccugccc

SEQ ID NO: 3588371 - RNA, 20 nt, Human
ugggcgugagaccugccccu

SEQ ID NO: 3588372 - RNA, 20 nt, Human
ugggcguuaggggcaggcag

SEQ ID NO: 3588373 - RNA, 14 nt, Human
ugggcuauggacac

SEQ ID NO: 3588374 - RNA, 15 nt, Human
ugggcuauggacaca

SEQ ID NO: 3588375 - RNA, 19 nt, Human
ugggcuauggacacagggu

SEQ ID NO: 3588376 - RNA, 20 nt, Human
ugggcucaagcaauccucuc

SEQ ID NO: 3588377 - RNA, 14 nt, Human
ugggcucagcacau

SEQ ID NO: 3588378 - RNA, 14 nt, Human
ugggcucagugaag

SEQ ID NO: 3588379 - RNA, 19 nt, Human
ugggcucagugaaguugcu

SEQ ID NO: 3588380 - RNA, 14 nt, Human
ugggcuccccucuu

SEQ ID NO: 3588381 - RNA, 15 nt, Human
ugggcucccugacug

SEQ ID NO: 3588382 - RNA, 20 nt, Human
ugggcucccuucccaccucu

SEQ ID NO: 3588383 - RNA, 21 nt, Human
ugggcucccuucccaccucuc

SEQ ID NO: 3588384 - RNA, 21 nt, Human
ugggcuccggaggacucacca

SEQ ID NO: 3588385 - RNA, 22 nt, Human
ugggaauguauaguauuugaaa

SEQ ID NO: 3588386 - RNA, 21 nt, Human
ugggaauguauuauucugcag

SEQ ID NO: 3588387 - RNA, 22 nt, Human
ugggaauguauuauucugcagc

SEQ ID NO: 3588388 - RNA, 10 nt, Human
ugggaauguu

SEQ ID NO: 3588389 - RNA, 16 nt, Human
ugggaauguuugucuc

SEQ ID NO: 3588390 - RNA, 22 nt, Human
ugggacaacuguagaggcaguu

SEQ ID NO: 3588391 - RNA, 14 nt, Human
ugggacaccaggga

SEQ ID NO: 3588392 - RNA, 18 nt, Human
ugggacaccagggaagaa

SEQ ID NO: 3588393 - RNA, 14 nt, Human
ugggacacccugug

SEQ ID NO: 3588394 - RNA, 22 nt, Human
ugggacacuaauggggcgguga

SEQ ID NO: 3588395 - RNA, 16 nt, Human
ugggacagcaaccugu

SEQ ID NO: 3588396 - RNA, 18 nt, Human
ugggacagcccagagccu

SEQ ID NO: 3588397 - RNA, 20 nt, Human
ugggacaguuuaucaugaag

SEQ ID NO: 3588398 - RNA, 14 nt, Human
ugggacccaguggc

SEQ ID NO: 3588399 - RNA, 16 nt, Human
ugggaccccaggccca

SEQ ID NO: 3588400 - RNA, 14 nt, Human
ugggacccccgugg

SEQ ID NO: 3588401 - RNA, 22 nt, Human
ugggacccccguggggcaggga

SEQ ID NO: 3588402 - RNA, 23 nt, Human
ugggacccugcuuuagagcuagg

SEQ ID NO: 3588403 - RNA, 13 nt, Human
ugggacccuuucc

SEQ ID NO: 3588404 - RNA, 21 nt, Human
ugggaccgcuacaccacucug

SEQ ID NO: 3588405 - RNA, 22 nt, Human
ugggaccgcuacaccacucugg

SEQ ID NO: 3588406 - RNA, 19 nt, Human
ugggaccuaggggcgccgc

SEQ ID NO: 3588407 - RNA, 23 nt, Human
ugggaccucaguuuuaucauuuu

SEQ ID NO: 3588408 - RNA, 18 nt, Human
ugggaccugccaggcagg

SEQ ID NO: 3588409 - RNA, 20 nt, Human
ugggaccugccaggcagggg

SEQ ID NO: 3588410 - RNA, 23 nt, Human
ugggacgggaugguucuggcugu

SEQ ID NO: 3588411 - RNA, 21 nt, Human
ugggacguggcucagccagca

SEQ ID NO: 3588412 - RNA, 16 nt, Human
ugggacuacaggcacc

SEQ ID NO: 3588413 - RNA, 20 nt, Human
ugggacucaaugcacugaca

SEQ ID NO: 3588414 - RNA, 17 nt, Human
ugggacucagccuucag

SEQ ID NO: 3588415 - RNA, 14 nt, Human
ugggacuggacaau

SEQ ID NO: 3588416 - RNA, 12 nt, Human
ugggacuggagu

SEQ ID NO: 3588417 - RNA, 14 nt, Human
ugggacuggccucu

SEQ ID NO: 3588418 - RNA, 13 nt, Human
ugggacugggagg

SEQ ID NO: 3588419 - RNA, 19 nt, Human
ugggacuggguuuggaccc

SEQ ID NO: 3588420 - RNA, 22 nt, Human
ugggacuguacacacuuuauuu

SEQ ID NO: 3588421 - RNA, 15 nt, Human
ugggacuuauuacaa

SEQ ID NO: 3588422 - RNA, 15 nt, Human
ugggagaaaaucauc

SEQ ID NO: 3588423 - RNA, 19 nt, Human
ugggagaaaucuggcuucu

SEQ ID NO: 3588424 - RNA, 15 nt, Human
ugggagaaaugaaaa

SEQ ID NO: 3588425 - RNA, 16 nt, Human
ugggagaaaugaaaaa

SEQ ID NO: 3588426 - RNA, 19 nt, Human
ugggagaaauugacagauc

SEQ ID NO: 3588427 - RNA, 21 nt, Human
ugggagaaccaaaaagaggcu

SEQ ID NO: 3588428 - RNA, 22 nt, Human
ugggagaaccaaaaagaggcua

SEQ ID NO: 3588429 - RNA, 14 nt, Human
ugggagaaccucag

SEQ ID NO: 3588430 - RNA, 22 nt, Human
ugggagaaccucaggcuuccuu

SEQ ID NO: 3588431 - RNA, 16 nt, Human
ugggagaagggcagag

SEQ ID NO: 3588432 - RNA, 22 nt, Human
ugggagaaugucaguaugugga

SEQ ID NO: 3588433 - RNA, 18 nt, Human
ugggagaaugucaguuca

SEQ ID NO: 3588434 - RNA, 15 nt, Human
ugggagacaugugac

SEQ ID NO: 3588435 - RNA, 20 nt, Human
ugggagaccggccugccagg

SEQ ID NO: 3588436 - RNA, 23 nt, Human
ugggagaccggccugccaggagg

SEQ ID NO: 3588437 - RNA, 18 nt, Human
ugggagaccuguaaucau

SEQ ID NO: 3588438 - RNA, 19 nt, Human
ugggagagaagagaaugca

SEQ ID NO: 3588439 - RNA, 12 nt, Human
ugggagagacuu

SEQ ID NO: 3588440 - RNA, 23 nt, Human
ugggugccccccuugccagacau

SEQ ID NO: 3588441 - RNA, 16 nt, Human
ugggugccuaggccug

SEQ ID NO: 3588442 - RNA, 20 nt, Human
ugggugcgaccccaucugcc

SEQ ID NO: 3588443 - RNA, 13 nt, Human
ugggugcucagaa

SEQ ID NO: 3588444 - RNA, 14 nt, Human
ugggugcucagaau

SEQ ID NO: 3588445 - RNA, 15 nt, Human
ugggugcucagaaua

SEQ ID NO: 3588446 - RNA, 13 nt, Human
ugggugcucccua

SEQ ID NO: 3588447 - RNA, 17 nt, Human
uggguggaaacuaagac

SEQ ID NO: 3588448 - RNA, 15 nt, Human
uggguggagaagcca

SEQ ID NO: 3588449 - RNA, 17 nt, Human
uggguggagaagccauu

SEQ ID NO: 3588450 - RNA, 21 nt, Human
uggguggagaagccauugucu

SEQ ID NO: 3588451 - RNA, 20 nt, Human
uggguggauauaaauauaua

SEQ ID NO: 3588452 - RNA, 14 nt, Human
uggguggaugccug

SEQ ID NO: 3588453 - RNA, 23 nt, Human
uggguggaugccugguggcagcu

SEQ ID NO: 3588454 - RNA, 20 nt, Human
uggguggcaccagcagccug

SEQ ID NO: 3588455 - RNA, 21 nt, Human
uggguggcaccagcagccugg

SEQ ID NO: 3588456 - RNA, 22 nt, Human
uggguggcaccagcagccugga

SEQ ID NO: 3588457 - RNA, 15 nt, Human
uggguggcacugcca

SEQ ID NO: 3588458 - RNA, 14 nt, Human
uggguggcccaucc

SEQ ID NO: 3588459 - RNA, 14 nt, Human
uggguggcuacucu

SEQ ID NO: 3588460 - RNA, 19 nt, Human
uggguggcuacucugugcc

SEQ ID NO: 3588461 - RNA, 20 nt, Human
uggguggcuacucugugcca

SEQ ID NO: 3588462 - RNA, 19 nt, Human
ugggugggcucugugcagu

SEQ ID NO: 3588463 - RNA, 14 nt, Human
uggguggggaggga

SEQ ID NO: 3588464 - RNA, 20 nt, Human
uggguggggggcauugagua

SEQ ID NO: 3588465 - RNA, 18 nt, Human
uggguggggggcuucaua

SEQ ID NO: 3588466 - RNA, 20 nt, Human
uggguggggggcuucauaca

SEQ ID NO: 3588467 - RNA, 14 nt, Human
ugggugguggggag

SEQ ID NO: 3588468 - RNA, 23 nt, Human
uggguguaacaggucuccucuua

SEQ ID NO: 3588469 - RNA, 20 nt, Human
uggguguauuaggacuggcu

SEQ ID NO: 3588470 - RNA, 23 nt, Human
ugggugucaagagggucugagga

SEQ ID NO: 3588471 - RNA, 14 nt, Human
ugggugucauuuca

SEQ ID NO: 3588472 - RNA, 19 nt, Human
ugggugucauuucauucca

SEQ ID NO: 3588473 - RNA, 20 nt, Human
ugggugucauuucauuccau

SEQ ID NO: 3588474 - RNA, 18 nt, Human
uggguguccaaaggaaga

SEQ ID NO: 3588475 - RNA, 15 nt, Human
uggguguccugccug

SEQ ID NO: 3588476 - RNA, 19 nt, Human
uggguguuccuggcaguuu

SEQ ID NO: 3588477 - RNA, 14 nt, Human
uggguuaaguauua

SEQ ID NO: 3588478 - RNA, 23 nt, Human
uggguuacaguaugcuugcucua

SEQ ID NO: 3588479 - RNA, 22 nt, Human
uggguuaggcauuaauguuucu

SEQ ID NO: 3588480 - RNA, 21 nt, Human
uggguuagggaaaacauucca

SEQ ID NO: 3588481 - RNA, 21 nt, Human
uggguucagaaaugcugccug

SEQ ID NO: 3588482 - RNA, 21 nt, Human
uggguucauccuauucuuucg

SEQ ID NO: 3588483 - RNA, 16 nt, Human
uggguucauuauugga

SEQ ID NO: 3588484 - RNA, 21 nt, Human
uggguuccagcaauucuccug

SEQ ID NO: 3588485 - RNA, 14 nt, Human
uggguuccuccucu

SEQ ID NO: 3588486 - RNA, 15 nt, Human
uggguucuacccagg

SEQ ID NO: 3588487 - RNA, 17 nt, Human
uggguucuauguuuacu

SEQ ID NO: 3588488 - RNA, 14 nt, Human
uggguucugccugc

SEQ ID NO: 3588489 - RNA, 16 nt, Human
uggguucugccugcca

SEQ ID NO: 3588490 - RNA, 17 nt, Human
uggguugcuaacugaac

SEQ ID NO: 3588491 - RNA, 23 nt, Human
uggguuggcgcacccuccccucc

SEQ ID NO: 3588492 - RNA, 20 nt, Human
uggguuggugcacagugauu

SEQ ID NO: 3588493 - RNA, 15 nt, Human
uggguugucaccaag

SEQ ID NO: 3588494 - RNA, 21 nt, Human
uggguuucuaaagcugccagc

SEQ ID NO: 3588495 - RNA, 14 nt, Human
uggguuuggacccc

SEQ ID NO: 3588496 - RNA, 19 nt, Human
uggguuuggaccccagcug

SEQ ID NO: 3588497 - RNA, 17 nt, Human
uggguuugguguauggu

SEQ ID NO: 3588498 - RNA, 14 nt, Human
uggguuuucuuccc

SEQ ID NO: 3588499 - RNA, 18 nt, Human
uggguuuuguagguacuu

SEQ ID NO: 3588500 - RNA, 19 nt, Human
uggguuuuguauucucuga

SEQ ID NO: 3588501 - RNA, 14 nt, Human
uggguuuuucccug

SEQ ID NO: 3588502 - RNA, 15 nt, Human
uggguuuuuguuacc

SEQ ID NO: 3588503 - RNA, 17 nt, Human
uggguuuuuuuccuuua

SEQ ID NO: 3588504 - RNA, 14 nt, Human
ugguaaaaagaaaa

SEQ ID NO: 3588505 - RNA, 15 nt, Human
ugguaaaaugaagaa

SEQ ID NO: 3588506 - RNA, 18 nt, Human
ugguaaaaugaagaauuu

SEQ ID NO: 3588507 - RNA, 16 nt, Human
ugguaaaauugcaugg

SEQ ID NO: 3588508 - RNA, 19 nt, Human
ugguaaacgcugucccuag

SEQ ID NO: 3588509 - RNA, 21 nt, Human
ugguaaacuauuugucuuuca

SEQ ID NO: 3588510 - RNA, 18 nt, Human
ugguaaagauauuauuca

SEQ ID NO: 3588511 - RNA, 13 nt, Human
ugguaaauguuuc

SEQ ID NO: 3588512 - RNA, 14 nt, Human
ugguaaauguuucu

SEQ ID NO: 3588513 - RNA, 16 nt, Human
ugguaaauuuccccaa

SEQ ID NO: 3588514 - RNA, 23 nt, Human
ugguaaauuuccccaacagugug

SEQ ID NO: 3588515 - RNA, 21 nt, Human
ugguaacaguucauguuugcu

SEQ ID NO: 3588516 - RNA, 14 nt, Human
ugguaacugcuuuc

SEQ ID NO: 3588517 - RNA, 14 nt, Human
ugguaacuuuugug

SEQ ID NO: 3588518 - RNA, 22 nt, Human
ugguaagaagccgggaacagac

SEQ ID NO: 3588519 - RNA, 13 nt, Human
ugguaagagaaaa

SEQ ID NO: 3588520 - RNA, 12 nt, Human
ugguaagauugu

SEQ ID NO: 3588521 - RNA, 14 nt, Human
ugguaagauuguua

SEQ ID NO: 3588522 - RNA, 19 nt, Human
ugguaagauuguuauuaaa

SEQ ID NO: 3588523 - RNA, 20 nt, Human
ugguaagauuguuauuaaau

SEQ ID NO: 3588524 - RNA, 14 nt, Human
ugguaagcucuggc

SEQ ID NO: 3588525 - RNA, 20 nt, Human
ugguaagcuuccaggaaaaa

SEQ ID NO: 3588526 - RNA, 20 nt, Human
ugguaaggggaauugaggac

SEQ ID NO: 3588527 - RNA, 16 nt, Human
ugguaauaagcacugu

SEQ ID NO: 3588528 - RNA, 23 nt, Human
ugguaauccccuaaaauaacagu

SEQ ID NO: 3588529 - RNA, 14 nt, Human
ugguaauuguacua

SEQ ID NO: 3588530 - RNA, 18 nt, Human
ugguacaaaaauaaauuu

SEQ ID NO: 3588531 - RNA, 21 nt, Human
ugguacaaaaauaaauuuaua

SEQ ID NO: 3588532 - RNA, 20 nt, Human
ugguacaacggaggccugcg

SEQ ID NO: 3588533 - RNA, 12 nt, Human
ugguacagagaa

SEQ ID NO: 3588534 - RNA, 13 nt, Human
ugguacagagaag

SEQ ID NO: 3588535 - RNA, 17 nt, Human
ugguacagagaagccag

SEQ ID NO: 3588536 - RNA, 19 nt, Human
ugguacagagaagccagcu

SEQ ID NO: 3588537 - RNA, 22 nt, Human
ugguacagagaagccagcuugu

SEQ ID NO: 3588538 - RNA, 15 nt, Human
ugguacauggccagu

SEQ ID NO: 3588539 - RNA, 16 nt, Human
ugguacauggccagug

SEQ ID NO: 3588540 - RNA, 17 nt, Human
ugguacaugucuuccau

SEQ ID NO: 3588541 - RNA, 21 nt, Human
ugguaccaaucaugaaucuuu

SEQ ID NO: 3588542 - RNA, 13 nt, Human
ugguaccagauaa

SEQ ID NO: 3588543 - RNA, 18 nt, Human
ugguaccagauaacuuuu

SEQ ID NO: 3588544 - RNA, 15 nt, Human
ugguaccagcccugg

SEQ ID NO: 3588545 - RNA, 21 nt, Human
ugguaccagcccuggggcugg

SEQ ID NO: 3588546 - RNA, 13 nt, Human
ugguacccagcca

SEQ ID NO: 3588547 - RNA, 21 nt, Human
ugguacccagccaucugccca

SEQ ID NO: 3588548 - RNA, 22 nt, Human
ugguacccagccaucugcccag

SEQ ID NO: 3588549 - RNA, 16 nt, Human
ugguacccuccuggcu

SEQ ID NO: 3588550 - RNA, 14 nt, Human
ugguacccucugga

SEQ ID NO: 3588551 - RNA, 15 nt, Human
ugguaccuugcacac

SEQ ID NO: 3588552 - RNA, 20 nt, Human
ugguacgugacccucugcug

SEQ ID NO: 3588553 - RNA, 20 nt, Human
ugguacuacuagaugucuuu

SEQ ID NO: 3588554 - RNA, 20 nt, Human
ugguacuauaaaagcuuucu

SEQ ID NO: 3588555 - RNA, 17 nt, Human
ugguacucauuaaaaaa

SEQ ID NO: 3588556 - RNA, 21 nt, Human
ugguacuguacagcuggcucu

SEQ ID NO: 3588557 - RNA, 19 nt, Human
ugguacuugcugcuauuuu

SEQ ID NO: 3588558 - RNA, 22 nt, Human
ugguacuuuuaugauguauauu

SEQ ID NO: 3588559 - RNA, 18 nt, Human
ugguacuuuugagugugu

SEQ ID NO: 3588560 - RNA, 20 nt, Human
ugguacuuuugagugugugu

SEQ ID NO: 3588561 - RNA, 17 nt, Human
ugguagauuaaauauag

SEQ ID NO: 3588562 - RNA, 14 nt, Human
ugguagcucaggug

SEQ ID NO: 3588563 - RNA, 20 nt, Human
ugguagcuuuucccuucuuu

SEQ ID NO: 3588564 - RNA, 17 nt, Human
ugguaggaauagcaugu

SEQ ID NO: 3588565 - RNA, 16 nt, Human
ugguaggaccaagcau

SEQ ID NO: 3588566 - RNA, 22 nt, Human
ugguaggaucagcccucauuuu

SEQ ID NO: 3588567 - RNA, 16 nt, Human
ugguaggcauuuccua

SEQ ID NO: 3588568 - RNA, 17 nt, Human
ugguagggacuuaaaaa

SEQ ID NO: 3588569 - RNA, 19 nt, Human
ugguagggggaaaaugugu

SEQ ID NO: 3588570 - RNA, 18 nt, Human
ugguaguaaaacacagag

SEQ ID NO: 3588571 - RNA, 22 nt, Human
ugguaguaaucacaguuggccu

SEQ ID NO: 3588572 - RNA, 22 nt, Human
ugguaguacuccugcaaaauuu

SEQ ID NO: 3588573 - RNA, 21 nt, Human
ugguagucuaaccaaaugcau

SEQ ID NO: 3588574 - RNA, 22 nt, Human
ugguagucuaaccaaaugcauc

SEQ ID NO: 3588575 - RNA, 20 nt, Human
ugguagugguuguaucugug

SEQ ID NO: 3588576 - RNA, 20 nt, Human
ugguaguuaguagcauguug

SEQ ID NO: 3588577 - RNA, 14 nt, Human
ugguaguuucugug

SEQ ID NO: 3588578 - RNA, 17 nt, Human
ugguaguuuuuucaucu

SEQ ID NO: 3588579 - RNA, 19 nt, Human
ugguauaaguaacuuuauu

SEQ ID NO: 3588580 - RNA, 13 nt, Human
ugguauagaaaug

SEQ ID NO: 3588581 - RNA, 16 nt, Human
ugguauagaaaugcug

SEQ ID NO: 3588582 - RNA, 16 nt, Human
ugguauauccaaaagc

SEQ ID NO: 3588583 - RNA, 14 nt, Human
ugguaucaaaauua

SEQ ID NO: 3588584 - RNA, 16 nt, Human
ugguaucaaaauuaca

SEQ ID NO: 3588585 - RNA, 15 nt, Human
ugguaucuaauucuu

SEQ ID NO: 3588586 - RNA, 16 nt, Human
ugguaucucagaaagu

SEQ ID NO: 3588587 - RNA, 23 nt, Human
ugguaucuguucuuuaauuuauu

SEQ ID NO: 3588588 - RNA, 16 nt, Human
ugguaucuuaaagugu

SEQ ID NO: 3588589 - RNA, 12 nt, Human
ugggcuccugga

SEQ ID NO: 3588590 - RNA, 12 nt, Human
ugggcuccuggc

SEQ ID NO: 3588591 - RNA, 15 nt, Human
ugggcucgucuuugc

SEQ ID NO: 3588592 - RNA, 21 nt, Human
ugggcucuccaccucagccuu

SEQ ID NO: 3588593 - RNA, 23 nt, Human
ugggcucuccaccucagccuugg

SEQ ID NO: 3588594 - RNA, 14 nt, Human
ugggcucuccgggg

SEQ ID NO: 3588595 - RNA, 15 nt, Human
ugggcucucgcggcc

SEQ ID NO: 3588596 - RNA, 21 nt, Human
ugggcucugaguaccccugcu

SEQ ID NO: 3588597 - RNA, 11 nt, Human
ugggcucugau

SEQ ID NO: 3588598 - RNA, 13 nt, Human
ugggcucugccac

SEQ ID NO: 3588599 - RNA, 21 nt, Human
ugggcucugugggcugcacuc

SEQ ID NO: 3588600 - RNA, 17 nt, Human
ugggcugaacacuccaa

SEQ ID NO: 3588601 - RNA, 18 nt, Human
ugggcugaauguauguaa

SEQ ID NO: 3588602 - RNA, 21 nt, Human
ugggcugaauguauguaaaua

SEQ ID NO: 3588603 - RNA, 14 nt, Human
ugggcugagacugg

SEQ ID NO: 3588604 - RNA, 12 nt, Human
ugggcugaggga

SEQ ID NO: 3588605 - RNA, 20 nt, Human
ugggcugcacucugugccca

SEQ ID NO: 3588606 - RNA, 22 nt, Human
ugggcugcacucugugcccaug

SEQ ID NO: 3588607 - RNA, 16 nt, Human
ugggcuggaugagcuc

SEQ ID NO: 3588608 - RNA, 18 nt, Human
ugggcuggaugagcuccc

SEQ ID NO: 3588609 - RNA, 14 nt, Human
ugggcugggcacug

SEQ ID NO: 3588610 - RNA, 20 nt, Human
ugggcugggcccucucuucu

SEQ ID NO: 3588611 - RNA, 23 nt, Human
ugggcuggguucuacccaggugc

SEQ ID NO: 3588612 - RNA, 14 nt, Human
ugggcugguaucuc

SEQ ID NO: 3588613 - RNA, 22 nt, Human
ugggcugguauugguggcuuuc

SEQ ID NO: 3588614 - RNA, 14 nt, Human
ugggcuuagagcag

SEQ ID NO: 3588615 - RNA, 21 nt, Human
ugggcuuauaucuggccucug

SEQ ID NO: 3588616 - RNA, 22 nt, Human
ugggcuuauaucuggccucugc

SEQ ID NO: 3588617 - RNA, 17 nt, Human
ugggcuucacuguauaa

SEQ ID NO: 3588618 - RNA, 14 nt, Human
ugggcuucagcugc

SEQ ID NO: 3588619 - RNA, 17 nt, Human
ugggcuucaguggcagc

SEQ ID NO: 3588620 - RNA, 21 nt, Human
ugggcuucaguggcagcugcu

SEQ ID NO: 3588621 - RNA, 13 nt, Human
ugggcuucaucug

SEQ ID NO: 3588622 - RNA, 23 nt, Human
ugggcuuccauuugugugugugc

SEQ ID NO: 3588623 - RNA, 13 nt, Human
ugggcuucccaag

SEQ ID NO: 3588624 - RNA, 13 nt, Human
ugggcuugauucu

SEQ ID NO: 3588625 - RNA, 21 nt, Human
ugggcuugcuauucugucccu

SEQ ID NO: 3588626 - RNA, 17 nt, Human
ugggcuuggccugcugu

SEQ ID NO: 3588627 - RNA, 13 nt, Human
ugggcuugggccu

SEQ ID NO: 3588628 - RNA, 15 nt, Human
ugggcuugggccuag

SEQ ID NO: 3588629 - RNA, 18 nt, Human
ugggcuugggccuaggcu

SEQ ID NO: 3588630 - RNA, 23 nt, Human
ugggcuuggggaccagagcugcc

SEQ ID NO: 3588631 - RNA, 17 nt, Human
ugggcuugucuguagau

SEQ ID NO: 3588632 - RNA, 21 nt, Human
ugggcuugucuguagauuuua

SEQ ID NO: 3588633 - RNA, 22 nt, Human
ugggcuuguggggccugggagg

SEQ ID NO: 3588634 - RNA, 20 nt, Human
ugggcuuugauuccaucucc

SEQ ID NO: 3588635 - RNA, 20 nt, Human
ugggcuuuuggggagccaga

SEQ ID NO: 3588636 - RNA, 21 nt, Human
ugggcuuuuggggagccagaa

SEQ ID NO: 3588637 - RNA, 17 nt, Human
uggggaaaaaaaucauc

SEQ ID NO: 3588638 - RNA, 21 nt, Human
uggggaaacaacauuuauaug

SEQ ID NO: 3588639 - RNA, 19 nt, Human
uggggaaagacacugccug

SEQ ID NO: 3588640 - RNA, 20 nt, Human
uggggaaagggguuggggug

SEQ ID NO: 3588641 - RNA, 13 nt, Human
uggggaagacagu

SEQ ID NO: 3588642 - RNA, 14 nt, Human
uggggaagacagug

SEQ ID NO: 3588643 - RNA, 24 nt, Human
uggggaagacccauuccuucccag

SEQ ID NO: 3588644 - RNA, 16 nt, Human
uggggaagacuguggc

SEQ ID NO: 3588645 - RNA, 15 nt, Human
uggggaagagagccu

SEQ ID NO: 3588646 - RNA, 13 nt, Human
uggggaaggaggc

SEQ ID NO: 3588647 - RNA, 15 nt, Human
uggggaaugaagaua

SEQ ID NO: 3588648 - RNA, 21 nt, Human
uggggacagauucagucuugc

SEQ ID NO: 3588649 - RNA, 17 nt, Human
uggggacaugggucgcc

SEQ ID NO: 3588650 - RNA, 22 nt, Human
uggggacccaggcuccgcccuu

SEQ ID NO: 3588651 - RNA, 13 nt, Human
uggggaccucagg

SEQ ID NO: 3588652 - RNA, 16 nt, Human
uggggaccucaggccu

SEQ ID NO: 3588653 - RNA, 23 nt, Human
uggggaccucaggccugggggcu

SEQ ID NO: 3588654 - RNA, 18 nt, Human
uggggaccugguacccuc

SEQ ID NO: 3588655 - RNA, 20 nt, Human
uggggacggggggccccagu

SEQ ID NO: 3588656 - RNA, 20 nt, Human
uggggacguccugccaccug

SEQ ID NO: 3588657 - RNA, 21 nt, Human
uggggacguccugccaccugg

SEQ ID NO: 3588658 - RNA, 22 nt, Human
uggggacuccggcugugcuggg

SEQ ID NO: 3588659 - RNA, 14 nt, Human
uggggacuuggccu

SEQ ID NO: 3588660 - RNA, 16 nt, Human
uggggacuugugucug

SEQ ID NO: 3588661 - RNA, 12 nt, Human
uggggagaaagu

SEQ ID NO: 3588662 - RNA, 23 nt, Human
uggggagacauaaccacugcuuc

SEQ ID NO: 3588663 - RNA, 13 nt, Human
uggggagagacgg

SEQ ID NO: 3588664 - RNA, 15 nt, Human
uggggagaggaacuc

SEQ ID NO: 3588665 - RNA, 23 nt, Human
uggggagaucggggccagaggca

SEQ ID NO: 3588666 - RNA, 23 nt, Human
uggggagcuuggcugagggucug

SEQ ID NO: 3588667 - RNA, 18 nt, Human
uggggaggacaaaacuuc

SEQ ID NO: 3588668 - RNA, 12 nt, Human
uggggaggagga

SEQ ID NO: 3588669 - RNA, 22 nt, Human
uggggagggauucugguuccag

SEQ ID NO: 3588670 - RNA, 22 nt, Human
uggggagggauuuggggcucag

SEQ ID NO: 3588671 - RNA, 17 nt, Human
uggggagggccguaccc

SEQ ID NO: 3588672 - RNA, 22 nt, Human
uggggaggggcgcuggcccagc

SEQ ID NO: 3588673 - RNA, 16 nt, Human
uggggaggugucacau

SEQ ID NO: 3588674 - RNA, 19 nt, Human
uggggaguaggacauacca

SEQ ID NO: 3588675 - RNA, 13 nt, Human
uggggagugggac

SEQ ID NO: 3588676 - RNA, 19 nt, Human
uggggaguuaagaccuggc

SEQ ID NO: 3588677 - RNA, 19 nt, Human
uggggaguuuagggugggg

SEQ ID NO: 3588678 - RNA, 16 nt, Human
uggggauaaaaugacu

SEQ ID NO: 3588679 - RNA, 20 nt, Human
uggggauaaaaugacuacuu

SEQ ID NO: 3588680 - RNA, 16 nt, Human
uggggauagaugugug

SEQ ID NO: 3588681 - RNA, 21 nt, Human
uggggauccccgccuggccag

SEQ ID NO: 3588682 - RNA, 23 nt, Human
uggggauccccgccuggccagga

SEQ ID NO: 3588683 - RNA, 20 nt, Human
uggggaucccucccccccau

SEQ ID NO: 3588684 - RNA, 22 nt, Human
uggggaugguaguuuuuucauc

SEQ ID NO: 3588685 - RNA, 15 nt, Human
uggggaugugggagg

SEQ ID NO: 3588686 - RNA, 16 nt, Human
uggggauucagauuuc

SEQ ID NO: 3588687 - RNA, 18 nt, Human
uggggauucagauuucuc

SEQ ID NO: 3588688 - RNA, 12 nt, Human
uggggcaaggcu

SEQ ID NO: 3588689 - RNA, 15 nt, Human
uggggcaagucaugu

SEQ ID NO: 3588690 - RNA, 19 nt, Human
uggggcagaaaucugagga

SEQ ID NO: 3588691 - RNA, 13 nt, Human
uggggcagagccu

SEQ ID NO: 3588692 - RNA, 14 nt, Human
uggggcagagccuc

SEQ ID NO: 3588693 - RNA, 15 nt, Human
uggggcagcuccucu

SEQ ID NO: 3588694 - RNA, 12 nt, Human
uggggcaggagu

SEQ ID NO: 3588695 - RNA, 14 nt, Human
uggggcaggaguag

SEQ ID NO: 3588696 - RNA, 18 nt, Human
uggggcaggaguagcuga

SEQ ID NO: 3588697 - RNA, 12 nt, Human
uggggcaggcag

SEQ ID NO: 3588698 - RNA, 14 nt, Human
uggggcaggcagug

SEQ ID NO: 3588699 - RNA, 21 nt, Human
uggggcaggccaccuggcucu

SEQ ID NO: 3588700 - RNA, 17 nt, Human
uggggcaggcugggcca

SEQ ID NO: 3588701 - RNA, 13 nt, Human
uggggcagggagc

SEQ ID NO: 3588702 - RNA, 16 nt, Human
uggggcaggggccggg

SEQ ID NO: 3588703 - RNA, 18 nt, Human
uggggcaggggccggggg

SEQ ID NO: 3588704 - RNA, 22 nt, Human
uggggcagucaccugcccagau

SEQ ID NO: 3588705 - RNA, 18 nt, Human
uggggcagugcuuggccc

SEQ ID NO: 3588706 - RNA, 22 nt, Human
uggggcagugcuuggcccagga

SEQ ID NO: 3588707 - RNA, 13 nt, Human
uggggccacagcc

SEQ ID NO: 3588708 - RNA, 14 nt, Human
uggggccacagcca

SEQ ID NO: 3588709 - RNA, 16 nt, Human
uggggccacagccaga

SEQ ID NO: 3588710 - RNA, 21 nt, Human
uggggccaccaaagcugccca

SEQ ID NO: 3588711 - RNA, 13 nt, Human
uggggccagaucc

SEQ ID NO: 3588712 - RNA, 15 nt, Human
uggggccagauccag

SEQ ID NO: 3588713 - RNA, 19 nt, Human
uggggccagauccagccug

SEQ ID NO: 3588714 - RNA, 21 nt, Human
uggggccagauccagccuggg

SEQ ID NO: 3588715 - RNA, 13 nt, Human
uggggccaggccg

SEQ ID NO: 3588716 - RNA, 17 nt, Human
uggggccaggcuggguc

SEQ ID NO: 3588717 - RNA, 22 nt, Human
uggggccaggcugggucgcccu

SEQ ID NO: 3588718 - RNA, 15 nt, Human
uggggccaggucacc

SEQ ID NO: 3588719 - RNA, 20 nt, Human
uggggccaguuggucccccu

SEQ ID NO: 3588720 - RNA, 20 nt, Human
uggggccaugccuccucagg

SEQ ID NO: 3588721 - RNA, 19 nt, Human
uggggcccagugcauggug

SEQ ID NO: 3588722 - RNA, 22 nt, Human
uggggcccagugcaugguggcc

SEQ ID NO: 3588723 - RNA, 22 nt, Human
uggggccccuuuuuacuccccu

SEQ ID NO: 3588724 - RNA, 20 nt, Human
uggggcccuaauucagccau

SEQ ID NO: 3588725 - RNA, 21 nt, Human
uggggcccuaauucagccaug

SEQ ID NO: 3588726 - RNA, 17 nt, Human
uggggccuaauaaaacu

SEQ ID NO: 3588727 - RNA, 16 nt, Human
uggggccuagacucug

SEQ ID NO: 3588728 - RNA, 22 nt, Human
uggggccuaucagugugccccc

SEQ ID NO: 3588729 - RNA, 14 nt, Human
uggggccuccagaa

SEQ ID NO: 3588730 - RNA, 11 nt, Human
uggggccucug

SEQ ID NO: 3588731 - RNA, 20 nt, Human
uggggccuggaccugccucc

SEQ ID NO: 3588732 - RNA, 22 nt, Human
uggggccugggacaacugcucc

SEQ ID NO: 3588733 - RNA, 22 nt, Human
uggggccuguggaaugagugug

SEQ ID NO: 3588734 - RNA, 13 nt, Human
uggggcgaggcag

SEQ ID NO: 3588735 - RNA, 15 nt, Human
uggggcgaggcagag

SEQ ID NO: 3588736 - RNA, 18 nt, Human
uggggcgaggcagaggac

SEQ ID NO: 3588737 - RNA, 19 nt, Human
uggggcgaggcagaggaca

SEQ ID NO: 3588738 - RNA, 19 nt, Human
ugguucuuaguucucacug

SEQ ID NO: 3588739 - RNA, 15 nt, Human
ugguucuugagggga

SEQ ID NO: 3588740 - RNA, 19 nt, Human
ugguucuuguauuaagaau

SEQ ID NO: 3588741 - RNA, 16 nt, Human
ugguugaaaauaaaaa

SEQ ID NO: 3588742 - RNA, 22 nt, Human
ugguugagguggaagcccuccu

SEQ ID NO: 3588743 - RNA, 14 nt, Human
ugguugaugccaaa

SEQ ID NO: 3588744 - RNA, 16 nt, Human
ugguuggagaauuuag

SEQ ID NO: 3588745 - RNA, 16 nt, Human
ugguugggaaugagga

SEQ ID NO: 3588746 - RNA, 19 nt, Human
ugguuggggcccugcccug

SEQ ID NO: 3588747 - RNA, 19 nt, Human
ugguuggguggcaauucca

SEQ ID NO: 3588748 - RNA, 14 nt, Human
ugguuguaucugug

SEQ ID NO: 3588749 - RNA, 16 nt, Human
ugguuguauuagaugu

SEQ ID NO: 3588750 - RNA, 15 nt, Human
ugguugugucugcuu

SEQ ID NO: 3588751 - RNA, 14 nt, Human
ugguugugucuuuu

SEQ ID NO: 3588752 - RNA, 23 nt, Human
ugguuuaaaagacacacuugucc

SEQ ID NO: 3588753 - RNA, 17 nt, Human
ugguuuaaagaaagugu

SEQ ID NO: 3588754 - RNA, 17 nt, Human
ugguuuacacuuuaugc

SEQ ID NO: 3588755 - RNA, 13 nt, Human
ugguuuacauuua

SEQ ID NO: 3588756 - RNA, 14 nt, Human
ugguuuacauuuaa

SEQ ID NO: 3588757 - RNA, 15 nt, Human
ugguuuacuuucaaa

SEQ ID NO: 3588758 - RNA, 14 nt, Human
ugguuuaguguaaa

SEQ ID NO: 3588759 - RNA, 20 nt, Human
ugguuuaguguaaaaaugag

SEQ ID NO: 3588760 - RNA, 21 nt, Human
ugguuucacggugccagguuu

SEQ ID NO: 3588761 - RNA, 16 nt, Human
ugguuucacuggccca

SEQ ID NO: 3588762 - RNA, 20 nt, Human
ugguuucagcacuagccaaa

SEQ ID NO: 3588763 - RNA, 12 nt, Human
ugguuucauguu

SEQ ID NO: 3588764 - RNA, 16 nt, Human
ugguuuccaaggagcu

SEQ ID NO: 3588765 - RNA, 17 nt, Human
ugguuucccaagagcua

SEQ ID NO: 3588766 - RNA, 22 nt, Human
ugguuuccuccauuugagaaaa

SEQ ID NO: 3588767 - RNA, 20 nt, Human
ugguuuccugcccugggagg

SEQ ID NO: 3588768 - RNA, 15 nt, Human
ugguuucucauucuu

SEQ ID NO: 3588769 - RNA, 16 nt, Human
ugguuucucauucuug

SEQ ID NO: 3588770 - RNA, 15 nt, Human
ugguuucucuucucc

SEQ ID NO: 3588771 - RNA, 19 nt, Human
ugguuucucuucuccccuu

SEQ ID NO: 3588772 - RNA, 23 nt, Human
ugguuucuucaacaggagaauuu

SEQ ID NO: 3588773 - RNA, 21 nt, Human
ugguuugagacacugguuuac

SEQ ID NO: 3588774 - RNA, 20 nt, Human
ugguuugauggugacuuccu

SEQ ID NO: 3588775 - RNA, 15 nt, Human
ugguuugcagagcuu

SEQ ID NO: 3588776 - RNA, 19 nt, Human
ugguuugcagaugacaaaa

SEQ ID NO: 3588777 - RNA, 17 nt, Human
ugguuuggaauauuaaa

SEQ ID NO: 3588778 - RNA, 22 nt, Human
ugguuuggaaugcuucuucuca

SEQ ID NO: 3588779 - RNA, 22 nt, Human
ugguuuggcccuucuccuuuug

SEQ ID NO: 3588780 - RNA, 23 nt, Human
ugguuuggcccuucuccuuuuga

SEQ ID NO: 3588781 - RNA, 17 nt, Human
ugguuugggggagaaga

SEQ ID NO: 3588782 - RNA, 17 nt, Human
ugguuugguuccucucu

SEQ ID NO: 3588783 - RNA, 14 nt, Human
ugguuuuaaaauac

SEQ ID NO: 3588784 - RNA, 21 nt, Human
ugguuuuaaaauacuguagau

SEQ ID NO: 3588785 - RNA, 12 nt, Human
ugguuuuaacaa

SEQ ID NO: 3588786 - RNA, 18 nt, Human
ugguuuuaacaauuuccu

SEQ ID NO: 3588787 - RNA, 21 nt, Human
ugguuuuaauugaaggaaaga

SEQ ID NO: 3588788 - RNA, 14 nt, Human
ugguuuuagauuuu

SEQ ID NO: 3588789 - RNA, 16 nt, Human
ugguuuuauacugaag

SEQ ID NO: 3588790 - RNA, 23 nt, Human
ugguuuuauacugaaggaaaaac

SEQ ID NO: 3588791 - RNA, 12 nt, Human
ugguuuuaugau

SEQ ID NO: 3588792 - RNA, 17 nt, Human
ugguuuucaaaauaaaa

SEQ ID NO: 3588793 - RNA, 16 nt, Human
ugguuuuccuaaaugc

SEQ ID NO: 3588794 - RNA, 19 nt, Human
ugguuuucuccaagagcua

SEQ ID NO: 3588795 - RNA, 13 nt, Human
ugguuuucuguuc

SEQ ID NO: 3588796 - RNA, 13 nt, Human
ugguuuucuguuu

SEQ ID NO: 3588797 - RNA, 14 nt, Human
ugguuuucuuaagg

SEQ ID NO: 3588798 - RNA, 21 nt, Human
ugguuuucuucuucucguccu

SEQ ID NO: 3588799 - RNA, 19 nt, Human
ugguuuucuuguguguuua

SEQ ID NO: 3588800 - RNA, 18 nt, Human
ugguuuucuuuugccaug

SEQ ID NO: 3588801 - RNA, 16 nt, Human
ugguuuugugccaucu

SEQ ID NO: 3588802 - RNA, 17 nt, Human
ugguuuuuguagccuuc

SEQ ID NO: 3588803 - RNA, 22 nt, Human
ugguuuuuguagccuuccucca

SEQ ID NO: 3588804 - RNA, 13 nt, Human
uguaaaaaaaaaa

SEQ ID NO: 3588805 - RNA, 14 nt, Human
uguaaaaaaaccac

SEQ ID NO: 3588806 - RNA, 19 nt, Human
uguaaaaacagcauugcuu

SEQ ID NO: 3588807 - RNA, 22 nt, Human
uguaaaaacagcauugcuuucu

SEQ ID NO: 3588808 - RNA, 23 nt, Human
uguaaaaacagcauugcuuucug

SEQ ID NO: 3588809 - RNA, 12 nt, Human
uguaaaaagaaa

SEQ ID NO: 3588810 - RNA, 16 nt, Human
uguaaaaaucuuuuga

SEQ ID NO: 3588811 - RNA, 11 nt, Human
uguaaaaauga

SEQ ID NO: 3588812 - RNA, 15 nt, Human
uguaaaacaaaaaac

SEQ ID NO: 3588813 - RNA, 23 nt, Human
uguaaaacaaaaauguaaugauc

SEQ ID NO: 3588814 - RNA, 12 nt, Human
uguaaaacaggu

SEQ ID NO: 3588815 - RNA, 18 nt, Human
uguaaaaccugucaauga

SEQ ID NO: 3588816 - RNA, 18 nt, Human
uguaaaacuuuauuuuau

SEQ ID NO: 3588817 - RNA, 23 nt, Human
uguaaaacuuuauuuuauauaau

SEQ ID NO: 3588818 - RNA, 12 nt, Human
uguaaaagaaau

SEQ ID NO: 3588819 - RNA, 13 nt, Human
uguaaaagaaauc

SEQ ID NO: 3588820 - RNA, 19 nt, Human
uguaaaagaacaguaaaca

SEQ ID NO: 3588821 - RNA, 12 nt, Human
uguaaaagcaag

SEQ ID NO: 3588822 - RNA, 17 nt, Human
uguaaaagcauuuugua

SEQ ID NO: 3588823 - RNA, 18 nt, Human
uguaaaauaagaaugauu

SEQ ID NO: 3588824 - RNA, 21 nt, Human
uguaaaauagcuuguauagug

SEQ ID NO: 3588825 - RNA, 11 nt, Human
uguaaaauaua

SEQ ID NO: 3588826 - RNA, 21 nt, Human
uguaaaauauagcuguacaaa

SEQ ID NO: 3588827 - RNA, 19 nt, Human
uguaaaauauuuugaauca

SEQ ID NO: 3588828 - RNA, 21 nt, Human
uguaaaauauuuugaaucaau

SEQ ID NO: 3588829 - RNA, 21 nt, Human
uguaaaaucuuucuuucuuag

SEQ ID NO: 3588830 - RNA, 23 nt, Human
uguaaaaucuuucuuucuuagaa

SEQ ID NO: 3588831 - RNA, 14 nt, Human
uguaaaaugaaauu

SEQ ID NO: 3588832 - RNA, 19 nt, Human
uguaaaaugacaaucaugu

SEQ ID NO: 3588833 - RNA, 11 nt, Human
uguaaaauggu

SEQ ID NO: 3588834 - RNA, 19 nt, Human
uguaaaauguauuaugucc

SEQ ID NO: 3588835 - RNA, 15 nt, Human
uguaaacaaacucuu

SEQ ID NO: 3588836 - RNA, 18 nt, Human
uguaaacagccucuuuuu

SEQ ID NO: 3588837 - RNA, 12 nt, Human
uguaaacagugc

SEQ ID NO: 3588838 - RNA, 22 nt, Human
uguaaacauguguuuuaauucc

SEQ ID NO: 3588839 - RNA, 13 nt, Human
uguaaacauuuau

SEQ ID NO: 3588840 - RNA, 23 nt, Human
uguaaaccacaaggcuguugcau

SEQ ID NO: 3588841 - RNA, 16 nt, Human
uguaaacucaaaacuu

SEQ ID NO: 3588842 - RNA, 21 nt, Human
uguaaacucaaaacuuaacau

SEQ ID NO: 3588843 - RNA, 18 nt, Human
uguaaacugcauuagaaa

SEQ ID NO: 3588844 - RNA, 20 nt, Human
uguaaacuggaauuaaaagg

SEQ ID NO: 3588845 - RNA, 19 nt, Human
uguaaacuguacuagucug

SEQ ID NO: 3588846 - RNA, 14 nt, Human
uguaaacugugcac

SEQ ID NO: 3588847 - RNA, 15 nt, Human
uguaaacugugcacc

SEQ ID NO: 3588848 - RNA, 14 nt, Human
uguaaacuguguau

SEQ ID NO: 3588849 - RNA, 19 nt, Human
uguaaacuguguauuccaa

SEQ ID NO: 3588850 - RNA, 14 nt, Human
uguaaacuuugaaa

SEQ ID NO: 3588851 - RNA, 17 nt, Human
uguaaacuuugaaauau

SEQ ID NO: 3588852 - RNA, 13 nt, Human
uguaaagaaagag

SEQ ID NO: 3588853 - RNA, 15 nt, Human
uguaaagaaagagag

SEQ ID NO: 3588854 - RNA, 16 nt, Human
uguaaagaaagagaga

SEQ ID NO: 3588855 - RNA, 19 nt, Human
uguaaagaaagagagaaaa

SEQ ID NO: 3588856 - RNA, 20 nt, Human
uguaaagaaagagagaaaau

SEQ ID NO: 3588857 - RNA, 12 nt, Human
uguaaagacugg

SEQ ID NO: 3588858 - RNA, 21 nt, Human
uguaaagagaccuaccucagg

SEQ ID NO: 3588859 - RNA, 15 nt, Human
uguaaagcaauaaaa

SEQ ID NO: 3588860 - RNA, 12 nt, Human
uguaaagcauuc

SEQ ID NO: 3588861 - RNA, 17 nt, Human
uguaaagcauuccaaca

SEQ ID NO: 3588862 - RNA, 18 nt, Human
uguaaagcauuccaacaa

SEQ ID NO: 3588863 - RNA, 13 nt, Human
uguaaagccaugc

SEQ ID NO: 3588864 - RNA, 21 nt, Human
uguaaaggagucaaaacuaca

SEQ ID NO: 3588865 - RNA, 18 nt, Human
uguaaaguauguaaacag

SEQ ID NO: 3588866 - RNA, 16 nt, Human
uguaaaguguaaaucc

SEQ ID NO: 3588867 - RNA, 13 nt, Human
uguaaaguguggu

SEQ ID NO: 3588868 - RNA, 22 nt, Human
uguaaaguguggucccaacagg

SEQ ID NO: 3588869 - RNA, 20 nt, Human
uguaaagugugugauugaag

SEQ ID NO: 3588870 - RNA, 20 nt, Human
uguaaaguugguuggauaag

SEQ ID NO: 3588871 - RNA, 18 nt, Human
uguaaauaaagcccuggg

SEQ ID NO: 3588872 - RNA, 21 nt, Human
uguaaauaaccccauucuuug

SEQ ID NO: 3588873 - RNA, 15 nt, Human
uguaaauaagagauu

SEQ ID NO: 3588874 - RNA, 22 nt, Human
uguaaauaauacauuauauuuc

SEQ ID NO: 3588875 - RNA, 13 nt, Human
uguaaauacauaa

SEQ ID NO: 3588876 - RNA, 11 nt, Human
uguaaauacca

SEQ ID NO: 3588877 - RNA, 15 nt, Human
uguaaauaccauuga

SEQ ID NO: 3588878 - RNA, 15 nt, Human
uguaaauacccauau

SEQ ID NO: 3588879 - RNA, 13 nt, Human
uguaaauauaaag

SEQ ID NO: 3588880 - RNA, 13 nt, Human
uguaaauauauaa

SEQ ID NO: 3588881 - RNA, 14 nt, Human
uguaaauauauaaa

SEQ ID NO: 3588882 - RNA, 16 nt, Human
uguaaauauauaaaua

SEQ ID NO: 3588883 - RNA, 18 nt, Human
uguaaauauauaaauaua

SEQ ID NO: 3588884 - RNA, 16 nt, Human
uguaaauauucuauau

SEQ ID NO: 3588885 - RNA, 20 nt, Human
uguaaauauucuauaugaau

SEQ ID NO: 3588886 - RNA, 15 nt, Human
uguaaauauugugug

SEQ ID NO: 3588887 - RNA, 13 nt, Human
uguaaauauuuau

SEQ ID NO: 3588888 - RNA, 18 nt, Human
uguaaauauuuauuuaug

SEQ ID NO: 3588889 - RNA, 21 nt, Human
ugguaugaacuugaggacaca

SEQ ID NO: 3588890 - RNA, 14 nt, Human
ugguaugagcugag

SEQ ID NO: 3588891 - RNA, 15 nt, Human
ugguaugagcugagg

SEQ ID NO: 3588892 - RNA, 16 nt, Human
ugguaugagcugaggg

SEQ ID NO: 3588893 - RNA, 18 nt, Human
ugguaugaucacggcuca

SEQ ID NO: 3588894 - RNA, 14 nt, Human
ugguauggguuucu

SEQ ID NO: 3588895 - RNA, 21 nt, Human
ugguaugugacaugcgggcug

SEQ ID NO: 3588896 - RNA, 12 nt, Human
ugguaugugugu

SEQ ID NO: 3588897 - RNA, 21 nt, Human
ugguauguuuucaggcuagau

SEQ ID NO: 3588898 - RNA, 15 nt, Human
ugguauuaaaugcca

SEQ ID NO: 3588899 - RNA, 22 nt, Human
ugguauuguauuuauucaauaa

SEQ ID NO: 3588900 - RNA, 13 nt, Human
ugguauuuucaau

SEQ ID NO: 3588901 - RNA, 18 nt, Human
ugguauuuuuuuaaauca

SEQ ID NO: 3588902 - RNA, 16 nt, Human
uggucaaacaaacucu

SEQ ID NO: 3588903 - RNA, 21 nt, Human
uggucaaacaaacucucugaa

SEQ ID NO: 3588904 - RNA, 14 nt, Human
uggucaaaccgcac

SEQ ID NO: 3588905 - RNA, 17 nt, Human
uggucaaaccgcacuca

SEQ ID NO: 3588906 - RNA, 21 nt, Human
uggucaaaccgcacucaccca

SEQ ID NO: 3588907 - RNA, 16 nt, Human
uggucaaccuccugga

SEQ ID NO: 3588908 - RNA, 23 nt, Human
uggucaagggcugucauugcaca

SEQ ID NO: 3588909 - RNA, 15 nt, Human
uggucacacacugau

SEQ ID NO: 3588910 - RNA, 12 nt, Human
uggucacagaga

SEQ ID NO: 3588911 - RNA, 14 nt, Human
uggucacagccagg

SEQ ID NO: 3588912 - RNA, 18 nt, Human
uggucacagccuccucug

SEQ ID NO: 3588913 - RNA, 13 nt, Human
uggucacagcugu

SEQ ID NO: 3588914 - RNA, 17 nt, Human
uggucacaggaaguaga

SEQ ID NO: 3588915 - RNA, 19 nt, Human
uggucacaggacucugccu

SEQ ID NO: 3588916 - RNA, 22 nt, Human
uggucacaggacucugccuccu

SEQ ID NO: 3588917 - RNA, 14 nt, Human
uggucaccagcucc

SEQ ID NO: 3588918 - RNA, 23 nt, Human
uggucaccuaggaagccucagau

SEQ ID NO: 3588919 - RNA, 19 nt, Human
uggucacguuuggugcuuc

SEQ ID NO: 3588920 - RNA, 15 nt, Human
uggucacugcuguca

SEQ ID NO: 3588921 - RNA, 15 nt, Human
uggucagauuugaac

SEQ ID NO: 3588922 - RNA, 16 nt, Human
uggucagauuugaacu

SEQ ID NO: 3588923 - RNA, 22 nt, Human
uggucagauuugaacucuucaa

SEQ ID NO: 3588924 - RNA, 11 nt, Human
uggucagccca

SEQ ID NO: 3588925 - RNA, 12 nt, Human
uggucagcccaa

SEQ ID NO: 3588926 - RNA, 15 nt, Human
uggucagcccuaggg

SEQ ID NO: 3588927 - RNA, 15 nt, Human
uggucaggcccuggu

SEQ ID NO: 3588928 - RNA, 22 nt, Human
uggucaguuugguuguguaaga

SEQ ID NO: 3588929 - RNA, 21 nt, Human
ugguccaaaagauugcugaaa

SEQ ID NO: 3588930 - RNA, 23 nt, Human
ugguccaaaagauugcugaaauu

SEQ ID NO: 3588931 - RNA, 15 nt, Human
ugguccaacugcaac

SEQ ID NO: 3588932 - RNA, 15 nt, Human
ugguccaauuaguuu

SEQ ID NO: 3588933 - RNA, 16 nt, Human
ugguccacuuuuccag

SEQ ID NO: 3588934 - RNA, 22 nt, Human
ugguccagcuugcucuucagug

SEQ ID NO: 3588935 - RNA, 16 nt, Human
ugguccaggagaaggc

SEQ ID NO: 3588936 - RNA, 19 nt, Human
ugguccauagagagcaaga

SEQ ID NO: 3588937 - RNA, 15 nt, Human
ugguccaugcagggg

SEQ ID NO: 3588938 - RNA, 21 nt, Human
uggucccaacaggaggacaau

SEQ ID NO: 3588939 - RNA, 17 nt, Human
uggucccacaucccugg

SEQ ID NO: 3588940 - RNA, 21 nt, Human
uggucccacaucccugggccu

SEQ ID NO: 3588941 - RNA, 13 nt, Human
uggucccacccca

SEQ ID NO: 3588942 - RNA, 15 nt, Human
uggucccaccccaca

SEQ ID NO: 3588943 - RNA, 13 nt, Human
uggucccauccag

SEQ ID NO: 3588944 - RNA, 15 nt, Human
uggucccauccaggc

SEQ ID NO: 3588945 - RNA, 16 nt, Human
uggucccauccaggca

SEQ ID NO: 3588946 - RNA, 22 nt, Human
ugguccccuccuucccaaguga

SEQ ID NO: 3588947 - RNA, 13 nt, Human
uggucccugagga

SEQ ID NO: 3588948 - RNA, 13 nt, Human
uggucccugccuu

SEQ ID NO: 3588949 - RNA, 12 nt, Human
uggucccugggu

SEQ ID NO: 3588950 - RNA, 19 nt, Human
ugguccggacacuccuaga

SEQ ID NO: 3588951 - RNA, 19 nt, Human
ugguccgugcuaaggacuu

SEQ ID NO: 3588952 - RNA, 20 nt, Human
ugguccgugggacggugccc

SEQ ID NO: 3588953 - RNA, 16 nt, Human
ugguccuaaaagcaaa

SEQ ID NO: 3588954 - RNA, 23 nt, Human
ugguccuaaaagcaaaauaaaaa

SEQ ID NO: 3588955 - RNA, 19 nt, Human
ugguccuaagucccugccc

SEQ ID NO: 3588956 - RNA, 16 nt, Human
ugguccuauggccuca

SEQ ID NO: 3588957 - RNA, 14 nt, Human
ugguccucuugcca

SEQ ID NO: 3588958 - RNA, 15 nt, Human
ugguccucuugccau

SEQ ID NO: 3588959 - RNA, 12 nt, Human
ugguccugacuc

SEQ ID NO: 3588960 - RNA, 19 nt, Human
ugguccuggggcucugugc

SEQ ID NO: 3588961 - RNA, 16 nt, Human
ugguccuguccccgca

SEQ ID NO: 3588962 - RNA, 20 nt, Human
ugguccuuuacacucaggcu

SEQ ID NO: 3588963 - RNA, 16 nt, Human
uggucgaggaguaaca

SEQ ID NO: 3588964 - RNA, 18 nt, Human
uggucgccuuccaccucu

SEQ ID NO: 3588965 - RNA, 17 nt, Human
uggucggaaaacaugcu

SEQ ID NO: 3588966 - RNA, 22 nt, Human
uggucguuuuuuuuuuguuugu

SEQ ID NO: 3588967 - RNA, 18 nt, Human
uggucuaaaaauaaacca

SEQ ID NO: 3588968 - RNA, 12 nt, Human
uggucuaaaacu

SEQ ID NO: 3588969 - RNA, 14 nt, Human
uggucuaauguuua

SEQ ID NO: 3588970 - RNA, 19 nt, Human
uggucuaauguuuaagcag

SEQ ID NO: 3588971 - RNA, 16 nt, Human
uggucucaaacucuug

SEQ ID NO: 3588972 - RNA, 17 nt, Human
uggucucaaacucuuga

SEQ ID NO: 3588973 - RNA, 14 nt, Human
uggucucacccugg

SEQ ID NO: 3588974 - RNA, 15 nt, Human
uggucucacccugga

SEQ ID NO: 3588975 - RNA, 23 nt, Human
uggucucccauaugcagaaauag

SEQ ID NO: 3588976 - RNA, 17 nt, Human
uggucuccucagccucc

SEQ ID NO: 3588977 - RNA, 23 nt, Human
uggucuccucagccuccucaucu

SEQ ID NO: 3588978 - RNA, 18 nt, Human
uggucuccugcccccaca

SEQ ID NO: 3588979 - RNA, 15 nt, Human
uggucucgaacuccu

SEQ ID NO: 3588980 - RNA, 20 nt, Human
uggucucgaacuccugaccu

SEQ ID NO: 3588981 - RNA, 22 nt, Human
uggucucgucuuccgucucccc

SEQ ID NO: 3588982 - RNA, 17 nt, Human
uggucucuaggcugggg

SEQ ID NO: 3588983 - RNA, 13 nt, Human
uggucucugccau

SEQ ID NO: 3588984 - RNA, 13 nt, Human
uggucucuugcuu

SEQ ID NO: 3588985 - RNA, 12 nt, Human
uggucugaaugu

SEQ ID NO: 3588986 - RNA, 14 nt, Human
uggucugaauguuc

SEQ ID NO: 3588987 - RNA, 16 nt, Human
uggucugaauguucug

SEQ ID NO: 3588988 - RNA, 21 nt, Human
uggucugaauguucugacauu

SEQ ID NO: 3588989 - RNA, 16 nt, Human
uggucugacccacugc

SEQ ID NO: 3588990 - RNA, 14 nt, Human
uggucugcaggcag

SEQ ID NO: 3588991 - RNA, 18 nt, Human
uggucugccaggccccca

SEQ ID NO: 3588992 - RNA, 11 nt, Human
uggucugcugu

SEQ ID NO: 3588993 - RNA, 16 nt, Human
uggucugguugggcag

SEQ ID NO: 3588994 - RNA, 22 nt, Human
uggucugugagaugcuagaacu

SEQ ID NO: 3588995 - RNA, 14 nt, Human
uggucuguuggcag

SEQ ID NO: 3588996 - RNA, 16 nt, Human
uggucuuaagaaaugu

SEQ ID NO: 3588997 - RNA, 20 nt, Human
uggucuugaaguccuggcuu

SEQ ID NO: 3588998 - RNA, 17 nt, Human
uggucuugagaugucuu

SEQ ID NO: 3588999 - RNA, 23 nt, Human
uggucuuguaagagcuauacagu

SEQ ID NO: 3589000 - RNA, 20 nt, Human
uggucuuucuuacaaggaag

SEQ ID NO: 3589001 - RNA, 10 nt, Human
uggucuuuga

SEQ ID NO: 3589002 - RNA, 14 nt, Human
uggucuuuguaaga

SEQ ID NO: 3589003 - RNA, 21 nt, Human
uggucuuuguaagaguguaga

SEQ ID NO: 3589004 - RNA, 22 nt, Human
uggucuuuguaagaguguagaa

SEQ ID NO: 3589005 - RNA, 12 nt, Human
uggucuuuuccu

SEQ ID NO: 3589006 - RNA, 22 nt, Human
uggugaaaagcagguugauaaa

SEQ ID NO: 3589007 - RNA, 18 nt, Human
uggugaaauuuauuaguu

SEQ ID NO: 3589008 - RNA, 19 nt, Human
uggugaaauuuauuaguua

SEQ ID NO: 3589009 - RNA, 19 nt, Human
uggugacaggacgcugacc

SEQ ID NO: 3589010 - RNA, 13 nt, Human
uggugaccucugc

SEQ ID NO: 3589011 - RNA, 21 nt, Human
uggugaccuuccaagagccug

SEQ ID NO: 3589012 - RNA, 18 nt, Human
uggugacugcgaucuuca

SEQ ID NO: 3589013 - RNA, 17 nt, Human
uguaaauauuuuaaaga

SEQ ID NO: 3589014 - RNA, 10 nt, Human
uguaaauccc

SEQ ID NO: 3589015 - RNA, 13 nt, Human
uguaaaucugcca

SEQ ID NO: 3589016 - RNA, 15 nt, Human
uguaaaucugccaca

SEQ ID NO: 3589017 - RNA, 16 nt, Human
uguaaaucugccacaa

SEQ ID NO: 3589018 - RNA, 17 nt, Human
uguaaaugguguacaua

SEQ ID NO: 3589019 - RNA, 16 nt, Human
uguaaaugucucacug

SEQ ID NO: 3589020 - RNA, 15 nt, Human
uguaaauguguugga

SEQ ID NO: 3589021 - RNA, 17 nt, Human
uguaaauguuaguuucu

SEQ ID NO: 3589022 - RNA, 22 nt, Human
uguaaauguuaguuucuuggua

SEQ ID NO: 3589023 - RNA, 22 nt, Human
uguaaauguuauuucugcaaac

SEQ ID NO: 3589024 - RNA, 14 nt, Human
uguaaauuaacuuu

SEQ ID NO: 3589025 - RNA, 16 nt, Human
uguaaauuaacuuuua

SEQ ID NO: 3589026 - RNA, 17 nt, Human
uguaaauuaacuuuuau

SEQ ID NO: 3589027 - RNA, 23 nt, Human
uguaaauuaggaggcucaacaau

SEQ ID NO: 3589028 - RNA, 15 nt, Human
uguaaauuauauuug

SEQ ID NO: 3589029 - RNA, 14 nt, Human
uguaaauuaucagg

SEQ ID NO: 3589030 - RNA, 13 nt, Human
uguaaauucugau

SEQ ID NO: 3589031 - RNA, 22 nt, Human
uguaaauugacuguacuaggcc

SEQ ID NO: 3589032 - RNA, 11 nt, Human
uguaaauuggc

SEQ ID NO: 3589033 - RNA, 18 nt, Human
uguaaauuuguacuauuu

SEQ ID NO: 3589034 - RNA, 17 nt, Human
uguaacaagaaaggaga

SEQ ID NO: 3589035 - RNA, 18 nt, Human
uguaacaagaaaggagag

SEQ ID NO: 3589036 - RNA, 19 nt, Human
uguaacaauuguguagccu

SEQ ID NO: 3589037 - RNA, 15 nt, Human
uguaacacaagccac

SEQ ID NO: 3589038 - RNA, 20 nt, Human
uguaacacaagccacagaag

SEQ ID NO: 3589039 - RNA, 21 nt, Human
uguaacacaagccacagaagc

SEQ ID NO: 3589040 - RNA, 23 nt, Human
uguaacacagcugagagacuuuu

SEQ ID NO: 3589041 - RNA, 20 nt, Human
uguaacaccaugauuaacca

SEQ ID NO: 3589042 - RNA, 18 nt, Human
uguaacacuuuacaaugu

SEQ ID NO: 3589043 - RNA, 22 nt, Human
uguaacagaaagggcaacaaua

SEQ ID NO: 3589044 - RNA, 23 nt, Human
uguaacagaaagggcaacaauaa

SEQ ID NO: 3589045 - RNA, 13 nt, Human
uguaacagacauu

SEQ ID NO: 3589046 - RNA, 16 nt, Human
uguaacagacauuguu

SEQ ID NO: 3589047 - RNA, 14 nt, Human
uguaacagcuccuu

SEQ ID NO: 3589048 - RNA, 18 nt, Human
uguaacaggucuccucuu

SEQ ID NO: 3589049 - RNA, 16 nt, Human
uguaacagucugaucg

SEQ ID NO: 3589050 - RNA, 17 nt, Human
uguaacauacuggccug

SEQ ID NO: 3589051 - RNA, 14 nt, Human
uguaacauaugcaa

SEQ ID NO: 3589052 - RNA, 20 nt, Human
uguaacauccaauaggaaug

SEQ ID NO: 3589053 - RNA, 17 nt, Human
uguaacauucuauuuca

SEQ ID NO: 3589054 - RNA, 18 nt, Human
uguaaccacaacuuucac

SEQ ID NO: 3589055 - RNA, 12 nt, Human
uguaaccucagc

SEQ ID NO: 3589056 - RNA, 16 nt, Human
uguaaccucagcucug

SEQ ID NO: 3589057 - RNA, 13 nt, Human
uguaaccugagau

SEQ ID NO: 3589058 - RNA, 15 nt, Human
uguaacgaaacacuu

SEQ ID NO: 3589059 - RNA, 14 nt, Human
uguaacgccugcuu

SEQ ID NO: 3589060 - RNA, 22 nt, Human
uguaacgugugcuguguuugcu

SEQ ID NO: 3589061 - RNA, 18 nt, Human
uguaacguugcuguggga

SEQ ID NO: 3589062 - RNA, 14 nt, Human
uguaacuaaaauaa

SEQ ID NO: 3589063 - RNA, 15 nt, Human
uguaacuaaaauaau

SEQ ID NO: 3589064 - RNA, 16 nt, Human
uguaacuacuuuauaa

SEQ ID NO: 3589065 - RNA, 17 nt, Human
uguaacuacuuuauaac

SEQ ID NO: 3589066 - RNA, 23 nt, Human
uguaacuauagacuggaaaaaau

SEQ ID NO: 3589067 - RNA, 19 nt, Human
uguaacucuaaaagauccu

SEQ ID NO: 3589068 - RNA, 20 nt, Human
uguaacucuaaaagauccuu

SEQ ID NO: 3589069 - RNA, 15 nt, Human
uguaacugccaggcu

SEQ ID NO: 3589070 - RNA, 16 nt, Human
uguaacugccuagaaa

SEQ ID NO: 3589071 - RNA, 23 nt, Human
uguaacugcucuugggcaauauu

SEQ ID NO: 3589072 - RNA, 12 nt, Human
uguaacugcuga

SEQ ID NO: 3589073 - RNA, 21 nt, Human
uguaacuggcaguuuuccauu

SEQ ID NO: 3589074 - RNA, 23 nt, Human
uguaacugucagccgggcccuga

SEQ ID NO: 3589075 - RNA, 20 nt, Human
uguaacuguuaccauuggaa

SEQ ID NO: 3589076 - RNA, 21 nt, Human
uguaacuguuuagaugaaugu

SEQ ID NO: 3589077 - RNA, 17 nt, Human
uguaacuuauauugaag

SEQ ID NO: 3589078 - RNA, 18 nt, Human
uguaacuuauauugaaga

SEQ ID NO: 3589079 - RNA, 15 nt, Human
uguaacuuauguaga

SEQ ID NO: 3589080 - RNA, 16 nt, Human
uguaacuuauguagau

SEQ ID NO: 3589081 - RNA, 15 nt, Human
uguaacuuccaaaua

SEQ ID NO: 3589082 - RNA, 17 nt, Human
uguaacuuccaaauaaa

SEQ ID NO: 3589083 - RNA, 19 nt, Human
uguaacuuccaaauaaaua

SEQ ID NO: 3589084 - RNA, 19 nt, Human
uguaacuuccaugugaggg

SEQ ID NO: 3589085 - RNA, 22 nt, Human
uguaacuugcuuaaauuucuua

SEQ ID NO: 3589086 - RNA, 17 nt, Human
uguaagaaaauaucacu

SEQ ID NO: 3589087 - RNA, 17 nt, Human
uguaagaaacacacuga

SEQ ID NO: 3589088 - RNA, 12 nt, Human
uguaagaaaccu

SEQ ID NO: 3589089 - RNA, 17 nt, Human
uguaagaaauacagacu

SEQ ID NO: 3589090 - RNA, 18 nt, Human
uguaagaaauacuguaca

SEQ ID NO: 3589091 - RNA, 21 nt, Human
uguaagaacaacuaccugagc

SEQ ID NO: 3589092 - RNA, 19 nt, Human
uguaagaacuacaaacaaa

SEQ ID NO: 3589093 - RNA, 19 nt, Human
uguaagaagagacugggaa

SEQ ID NO: 3589094 - RNA, 21 nt, Human
uguaagaagagacugggaaga

SEQ ID NO: 3589095 - RNA, 18 nt, Human
uguaagaauucagaagac

SEQ ID NO: 3589096 - RNA, 17 nt, Human
uguaagaauucugauug

SEQ ID NO: 3589097 - RNA, 11 nt, Human
uguaagacauu

SEQ ID NO: 3589098 - RNA, 22 nt, Human
uguaagacccuuauugcugucc

SEQ ID NO: 3589099 - RNA, 23 nt, Human
uguaagagagaugagcacuucua

SEQ ID NO: 3589100 - RNA, 17 nt, Human
uguaagagcuauacagu

SEQ ID NO: 3589101 - RNA, 21 nt, Human
uguaagagcuuuacaaaaaga

SEQ ID NO: 3589102 - RNA, 15 nt, Human
uguaagaguguuuau

SEQ ID NO: 3589103 - RNA, 13 nt, Human
uguaagauaaaaa

SEQ ID NO: 3589104 - RNA, 22 nt, Human
uguaagauauuugcaguuuuuc

SEQ ID NO: 3589105 - RNA, 19 nt, Human
uguaagaucguucucugcc

SEQ ID NO: 3589106 - RNA, 20 nt, Human
uguaagauuauagauucuaa

SEQ ID NO: 3589107 - RNA, 20 nt, Human
uguaagcauacuuuguaaau

SEQ ID NO: 3589108 - RNA, 22 nt, Human
uguaagcauacuuuguaaauag

SEQ ID NO: 3589109 - RNA, 17 nt, Human
uguaagcguauggcuuu

SEQ ID NO: 3589110 - RNA, 19 nt, Human
uguaagcucuuugaaacaa

SEQ ID NO: 3589111 - RNA, 16 nt, Human
uguaagcugaaaauau

SEQ ID NO: 3589112 - RNA, 15 nt, Human
uguaaggaaugauua

SEQ ID NO: 3589113 - RNA, 19 nt, Human
uguaaggauccggaaagaa

SEQ ID NO: 3589114 - RNA, 14 nt, Human
uguaaggcaugaag

SEQ ID NO: 3589115 - RNA, 22 nt, Human
uguaaggccaaguacacugaga

SEQ ID NO: 3589116 - RNA, 18 nt, Human
uguaaggcucuagaucau

SEQ ID NO: 3589117 - RNA, 20 nt, Human
uguaaggcuguguaagauuu

SEQ ID NO: 3589118 - RNA, 19 nt, Human
uguaagguauaucauucua

SEQ ID NO: 3589119 - RNA, 17 nt, Human
uguaaguaaacugcccu

SEQ ID NO: 3589120 - RNA, 21 nt, Human
uguaaguaaaugucuguggcc

SEQ ID NO: 3589121 - RNA, 16 nt, Human
uguaagucaguguuga

SEQ ID NO: 3589122 - RNA, 17 nt, Human
uguaagugagugugcug

SEQ ID NO: 3589123 - RNA, 21 nt, Human
uguaagugagugugcugcugu

SEQ ID NO: 3589124 - RNA, 19 nt, Human
uguaaguuuaugucuaaag

SEQ ID NO: 3589125 - RNA, 20 nt, Human
uguaaguuuaugucuaaaga

SEQ ID NO: 3589126 - RNA, 14 nt, Human
uguaaguuucaggu

SEQ ID NO: 3589127 - RNA, 18 nt, Human
uguaaguuucaggugaca

SEQ ID NO: 3589128 - RNA, 20 nt, Human
uguaaguuucaggugacaug

SEQ ID NO: 3589129 - RNA, 21 nt, Human
uguaaguuucaggugacaugu

SEQ ID NO: 3589130 - RNA, 23 nt, Human
uguaaguuucaggugacauguga

SEQ ID NO: 3589131 - RNA, 22 nt, Human
uguaauaaacccuuaacuggca

SEQ ID NO: 3589132 - RNA, 23 nt, Human
uguaauaaacccuuaacuggcau

SEQ ID NO: 3589133 - RNA, 17 nt, Human
uguaauaaacuuuaaua

SEQ ID NO: 3589134 - RNA, 13 nt, Human
uguaauaaaguau

SEQ ID NO: 3589135 - RNA, 15 nt, Human
uguaauaaaguauau

SEQ ID NO: 3589136 - RNA, 13 nt, Human
uguaauaaagugu

SEQ ID NO: 3589137 - RNA, 14 nt, Human
uguaauaaaguguu

SEQ ID NO: 3589138 - RNA, 18 nt, Human
uguaauaaaguguuuuca

SEQ ID NO: 3589139 - RNA, 19 nt, Human
uguaauaaaguguuuucag

SEQ ID NO: 3589140 - RNA, 13 nt, Human
uguaauaaauaug

SEQ ID NO: 3589141 - RNA, 21 nt, Human
uguaauaagacuuagauugug

SEQ ID NO: 3589142 - RNA, 16 nt, Human
uguaauaauaccucaa

SEQ ID NO: 3589143 - RNA, 21 nt, Human
uguaauaauaccucaauguuu

SEQ ID NO: 3589144 - RNA, 12 nt, Human
uguaauaaugga

SEQ ID NO: 3589145 - RNA, 16 nt, Human
uguaauagaaaacuga

SEQ ID NO: 3589146 - RNA, 18 nt, Human
uguaauagauguuugaua

SEQ ID NO: 3589147 - RNA, 17 nt, Human
uguaauauaaagauguu

SEQ ID NO: 3589148 - RNA, 19 nt, Human
uguaauauuacuuuaacau

SEQ ID NO: 3589149 - RNA, 15 nt, Human
uguaauauuuacaau

SEQ ID NO: 3589150 - RNA, 17 nt, Human
uguaauauuuacaaugu

SEQ ID NO: 3589151 - RNA, 14 nt, Human
uguaaucaauaaac

SEQ ID NO: 3589152 - RNA, 14 nt, Human
uguaaucacagcua

SEQ ID NO: 3589153 - RNA, 15 nt, Human
uguaaucacagcuac

SEQ ID NO: 3589154 - RNA, 17 nt, Human
uguaaucccagcacacu

SEQ ID NO: 3589155 - RNA, 16 nt, Human
uguaaucccagcacuu

SEQ ID NO: 3589156 - RNA, 21 nt, Human
uguaaucccagcuacucagga

SEQ ID NO: 3589157 - RNA, 19 nt, Human
uguaaucccagcuacucgg

SEQ ID NO: 3589158 - RNA, 16 nt, Human
uguaauccgaaucucu

SEQ ID NO: 3589159 - RNA, 19 nt, Human
uguaaucguuaugugugua

SEQ ID NO: 3589160 - RNA, 17 nt, Human
uguaaucucguuucaaa

SEQ ID NO: 3589161 - RNA, 18 nt, Human
uguaaucucguuucaaaa

SEQ ID NO: 3589162 - RNA, 15 nt, Human
ugucugcagccuuga

SEQ ID NO: 3589163 - RNA, 16 nt, Human
ugucugcagugugccc

SEQ ID NO: 3589164 - RNA, 19 nt, Human
ugucugccaaccuaaaacu

SEQ ID NO: 3589165 - RNA, 13 nt, Human
ugucugcccccuc

SEQ ID NO: 3589166 - RNA, 11 nt, Human
ugucugcccuu

SEQ ID NO: 3589167 - RNA, 16 nt, Human
ugucugcccuucaccc

SEQ ID NO: 3589168 - RNA, 15 nt, Human
ugucugccucuuaga

SEQ ID NO: 3589169 - RNA, 21 nt, Human
ugucugcgugguuccuuucuc

SEQ ID NO: 3589170 - RNA, 23 nt, Human
ugucugcuuaguaucucaucaac

SEQ ID NO: 3589171 - RNA, 19 nt, Human
ugucugcuuucuccauugu

SEQ ID NO: 3589172 - RNA, 17 nt, Human
ugucuggaagaugggga

SEQ ID NO: 3589173 - RNA, 21 nt, Human
ugucuggagaccaccagggca

SEQ ID NO: 3589174 - RNA, 14 nt, Human
ugucuggaucagua

SEQ ID NO: 3589175 - RNA, 14 nt, Human
ugucuggcaaggac

SEQ ID NO: 3589176 - RNA, 20 nt, Human
ugucuggcaaggacuuugua

SEQ ID NO: 3589177 - RNA, 19 nt, Human
ugucuggcaaugccacagc

SEQ ID NO: 3589178 - RNA, 17 nt, Human
ugucuggcacagccugc

SEQ ID NO: 3589179 - RNA, 18 nt, Human
ugucuggcacagccugca

SEQ ID NO: 3589180 - RNA, 23 nt, Human
ugucuggcugaggauuucaagcc

SEQ ID NO: 3589181 - RNA, 15 nt, Human
ugucugggugcuacu

SEQ ID NO: 3589182 - RNA, 19 nt, Human
ugucuggguuugagaaaug

SEQ ID NO: 3589183 - RNA, 16 nt, Human
ugucugguuaaaaaau

SEQ ID NO: 3589184 - RNA, 13 nt, Human
ugucugguucuca

SEQ ID NO: 3589185 - RNA, 22 nt, Human
ugucugguucucaauuccaaca

SEQ ID NO: 3589186 - RNA, 22 nt, Human
ugucuguaaaucuaacauuauu

SEQ ID NO: 3589187 - RNA, 20 nt, Human
ugucuguacacguguccugu

SEQ ID NO: 3589188 - RNA, 21 nt, Human
ugucuguacacguguccugua

SEQ ID NO: 3589189 - RNA, 15 nt, Human
ugucuguacuaaaaa

SEQ ID NO: 3589190 - RNA, 19 nt, Human
ugucuguagagggcccugg

SEQ ID NO: 3589191 - RNA, 23 nt, Human
ugucuguagagggcccugguguu

SEQ ID NO: 3589192 - RNA, 16 nt, Human
ugucugucccaguuaa

SEQ ID NO: 3589193 - RNA, 19 nt, Human
ugucugucucuccaucugu

SEQ ID NO: 3589194 - RNA, 14 nt, Human
ugucugucuuccuu

SEQ ID NO: 3589195 - RNA, 19 nt, Human
ugucugugaacagagagac

SEQ ID NO: 3589196 - RNA, 18 nt, Human
ugucugugaagugagacc

SEQ ID NO: 3589197 - RNA, 11 nt, Human
ugucugugcua

SEQ ID NO: 3589198 - RNA, 17 nt, Human
ugucuguggauggucau

SEQ ID NO: 3589199 - RNA, 19 nt, Human
ugucuguggcaaaaguuua

SEQ ID NO: 3589200 - RNA, 12 nt, Human
ugucugugugca

SEQ ID NO: 3589201 - RNA, 21 nt, Human
ugucugugugcaagugugugc

SEQ ID NO: 3589202 - RNA, 12 nt, Human
ugucuguuacac

SEQ ID NO: 3589203 - RNA, 22 nt, Human
ugucuguuaccaugucacugug

SEQ ID NO: 3589204 - RNA, 23 nt, Human
ugucuguuaccaugucacugugg

SEQ ID NO: 3589205 - RNA, 13 nt, Human
ugucuguucuaca

SEQ ID NO: 3589206 - RNA, 16 nt, Human
ugucuguuuaagaaaa

SEQ ID NO: 3589207 - RNA, 21 nt, Human
ugucuguuuaagaaaaguauu

SEQ ID NO: 3589208 - RNA, 16 nt, Human
ugucuguuuguucucu

SEQ ID NO: 3589209 - RNA, 15 nt, Human
ugucuguuuguuuca

SEQ ID NO: 3589210 - RNA, 16 nt, Human
ugucuguuuguuucaa

SEQ ID NO: 3589211 - RNA, 22 nt, Human
ugucuguuuguuucaagaaccu

SEQ ID NO: 3589212 - RNA, 18 nt, Human
ugucuuaaacuaaaugug

SEQ ID NO: 3589213 - RNA, 20 nt, Human
ugucuuaaugaaguuugaau

SEQ ID NO: 3589214 - RNA, 12 nt, Human
ugucuuaauuaa

SEQ ID NO: 3589215 - RNA, 14 nt, Human
ugucuuaauuaagu

SEQ ID NO: 3589216 - RNA, 21 nt, Human
ugucuuaauuaaguaaacuaa

SEQ ID NO: 3589217 - RNA, 20 nt, Human
ugucuuaauuucuaucuugu

SEQ ID NO: 3589218 - RNA, 19 nt, Human
ugucuuaauuuuugaaaaa

SEQ ID NO: 3589219 - RNA, 17 nt, Human
ugucuuauggauucauu

SEQ ID NO: 3589220 - RNA, 20 nt, Human
ugucuucaaggcuucagucu

SEQ ID NO: 3589221 - RNA, 21 nt, Human
ugucuucaauuuguauaaaau

SEQ ID NO: 3589222 - RNA, 22 nt, Human
ugucuucauaccuacauguauu

SEQ ID NO: 3589223 - RNA, 12 nt, Human
ugucuucaugua

SEQ ID NO: 3589224 - RNA, 21 nt, Human
ugucuucauuucauuguauga

SEQ ID NO: 3589225 - RNA, 15 nt, Human
ugucuuccacuuugc

SEQ ID NO: 3589226 - RNA, 12 nt, Human
ugucuuccauaa

SEQ ID NO: 3589227 - RNA, 13 nt, Human
ugucuucccaggg

SEQ ID NO: 3589228 - RNA, 16 nt, Human
ugucuucccaggguag

SEQ ID NO: 3589229 - RNA, 21 nt, Human
ugucuucccaggguagcccgc

SEQ ID NO: 3589230 - RNA, 19 nt, Human
ugucuuccuauuucagaag

SEQ ID NO: 3589231 - RNA, 16 nt, Human
ugucuuccucaaaaua

SEQ ID NO: 3589232 - RNA, 13 nt, Human
ugucuuccugugg

SEQ ID NO: 3589233 - RNA, 17 nt, Human
ugucuuccuuugcuucc

SEQ ID NO: 3589234 - RNA, 21 nt, Human
ugucuucucaggcucugcccu

SEQ ID NO: 3589235 - RNA, 12 nt, Human
ugucuucucccu

SEQ ID NO: 3589236 - RNA, 13 nt, Human
ugucuucugccug

SEQ ID NO: 3589237 - RNA, 15 nt, Human
ugucuucugccuguu

SEQ ID NO: 3589238 - RNA, 23 nt, Human
ugucuucugcuuuguugugugcc

SEQ ID NO: 3589239 - RNA, 12 nt, Human
ugucuucuguau

SEQ ID NO: 3589240 - RNA, 17 nt, Human
ugucuucuguauauaaa

SEQ ID NO: 3589241 - RNA, 16 nt, Human
ugucuucuucugugcu

SEQ ID NO: 3589242 - RNA, 19 nt, Human
ugucuugaaagauucaggu

SEQ ID NO: 3589243 - RNA, 16 nt, Human
ugucuugagcucuauu

SEQ ID NO: 3589244 - RNA, 22 nt, Human
ugucuugaugcaugcacuguuc

SEQ ID NO: 3589245 - RNA, 17 nt, Human
ugucuugcaauggcagc

SEQ ID NO: 3589246 - RNA, 21 nt, Human
ugucuugcaauggcagccuug

SEQ ID NO: 3589247 - RNA, 15 nt, Human
ugucuugccuuuuuc

SEQ ID NO: 3589248 - RNA, 16 nt, Human
ugucuugccuuuuuca

SEQ ID NO: 3589249 - RNA, 20 nt, Human
ugucuugcuguugacauauu

SEQ ID NO: 3589250 - RNA, 21 nt, Human
ugucuugggcagagcuggcuc

SEQ ID NO: 3589251 - RNA, 20 nt, Human
ugucuuguacauguguagcc

SEQ ID NO: 3589252 - RNA, 16 nt, Human
ugucuuguguuuuugu

SEQ ID NO: 3589253 - RNA, 14 nt, Human
ugucuuguucuguc

SEQ ID NO: 3589254 - RNA, 16 nt, Human
ugucuuuaaaagagag

SEQ ID NO: 3589255 - RNA, 12 nt, Human
ugucuuuauaug

SEQ ID NO: 3589256 - RNA, 11 nt, Human
ugucuuucaaa

SEQ ID NO: 3589257 - RNA, 16 nt, Human
ugucuuucagauacau

SEQ ID NO: 3589258 - RNA, 20 nt, Human
ugucuuucagauacaugguu

SEQ ID NO: 3589259 - RNA, 22 nt, Human
ugucuuuccuaagaccuggggu

SEQ ID NO: 3589260 - RNA, 13 nt, Human
ugucuuuccugaa

SEQ ID NO: 3589261 - RNA, 22 nt, Human
ugucuuuccugaaccaugugga

SEQ ID NO: 3589262 - RNA, 16 nt, Human
ugucuuucuaagaaau

SEQ ID NO: 3589263 - RNA, 12 nt, Human
ugucuuucugag

SEQ ID NO: 3589264 - RNA, 17 nt, Human
ugucuuucuugcucccu

SEQ ID NO: 3589265 - RNA, 15 nt, Human
ugucuuucuuuggug

SEQ ID NO: 3589266 - RNA, 13 nt, Human
ugucuuuggaaaa

SEQ ID NO: 3589267 - RNA, 16 nt, Human
ugucuuuggacccuga

SEQ ID NO: 3589268 - RNA, 22 nt, Human
ugucuuuggacccugaggccca

SEQ ID NO: 3589269 - RNA, 20 nt, Human
ugucuuugguccucuugcca

SEQ ID NO: 3589270 - RNA, 15 nt, Human
ugucuuuuaaaaugc

SEQ ID NO: 3589271 - RNA, 14 nt, Human
ugucuuuuaaugcu

SEQ ID NO: 3589272 - RNA, 20 nt, Human
ugucuuuuaaugcuucauuc

SEQ ID NO: 3589273 - RNA, 16 nt, Human
ugucuuuucuugcaug

SEQ ID NO: 3589274 - RNA, 21 nt, Human
ugucuuuucuugcaugaggcu

SEQ ID NO: 3589275 - RNA, 22 nt, Human
ugucuuuucuuggcaaaagccu

SEQ ID NO: 3589276 - RNA, 14 nt, Human
ugucuuuugcauga

SEQ ID NO: 3589277 - RNA, 23 nt, Human
ugucuuuuucuggacugaagccu

SEQ ID NO: 3589278 - RNA, 14 nt, Human
ugucuuuuuuugua

SEQ ID NO: 3589279 - RNA, 18 nt, Human
ugucuuuuuuuuaaugug

SEQ ID NO: 3589280 - RNA, 14 nt, Human
ugugaaaaaaauaa

SEQ ID NO: 3589281 - RNA, 13 nt, Human
ugugaaaaaucug

SEQ ID NO: 3589282 - RNA, 17 nt, Human
ugugaaaaucaaauaca

SEQ ID NO: 3589283 - RNA, 13 nt, Human
ugugaaaaugggu

SEQ ID NO: 3589284 - RNA, 14 nt, Human
ugugaaacagacuu

SEQ ID NO: 3589285 - RNA, 19 nt, Human
ugugaaacuggcacugaau

SEQ ID NO: 3589286 - RNA, 20 nt, Human
ugugaaagggagaagugaca

SEQ ID NO: 3589287 - RNA, 22 nt, Human
ugugaaagucagaugcccagag

SEQ ID NO: 3589288 - RNA, 17 nt, Human
ugugaaaguuuugagua

SEQ ID NO: 3589289 - RNA, 21 nt, Human
ugugaaauaguucaaagccaa

SEQ ID NO: 3589290 - RNA, 14 nt, Human
ugugaaauaucauc

SEQ ID NO: 3589291 - RNA, 14 nt, Human
ugugaaaugaaaac

SEQ ID NO: 3589292 - RNA, 14 nt, Human
ugugaaaugcuggc

SEQ ID NO: 3589293 - RNA, 13 nt, Human
ugugaaauuccca

SEQ ID NO: 3589294 - RNA, 14 nt, Human
ugugaaauuuacau

SEQ ID NO: 3589295 - RNA, 15 nt, Human
ugugaaauuuuucau

SEQ ID NO: 3589296 - RNA, 20 nt, Human
ugugaacaaaagaugcucuu

SEQ ID NO: 3589297 - RNA, 23 nt, Human
ugugaacaagcuucaguaaguua

SEQ ID NO: 3589298 - RNA, 22 nt, Human
ugugaacaguuguguuugaagc

SEQ ID NO: 3589299 - RNA, 14 nt, Human
ugugaacauggacu

SEQ ID NO: 3589300 - RNA, 14 nt, Human
ugugaacauuugug

SEQ ID NO: 3589301 - RNA, 23 nt, Human
ugugaaccaccacacccagccca

SEQ ID NO: 3589302 - RNA, 13 nt, Human
ugugaacccagga

SEQ ID NO: 3589303 - RNA, 14 nt, Human
ugugaacccaggac

SEQ ID NO: 3589304 - RNA, 18 nt, Human
ugugaacccuggggccug

SEQ ID NO: 3589305 - RNA, 22 nt, Human
ugugaacccuggggccugacug

SEQ ID NO: 3589306 - RNA, 20 nt, Human
ugugaacuagggaagcucag

SEQ ID NO: 3589307 - RNA, 12 nt, Human
ugugaacucauu

SEQ ID NO: 3589308 - RNA, 15 nt, Human
ugugaacugacaggc

SEQ ID NO: 3589309 - RNA, 19 nt, Human
ugugaacuggacccuguug

SEQ ID NO: 3589310 - RNA, 12 nt, Human
ugugaacuugaa

SEQ ID NO: 3589311 - RNA, 15 nt, Human
ugugaacuuguagcu

SEQ ID NO: 3589312 - RNA, 12 nt, Human
uguauauacuuu

SEQ ID NO: 3589313 - RNA, 11 nt, Human
uguauauauac

SEQ ID NO: 3589314 - RNA, 20 nt, Human
uguauauauaccugcgcuug

SEQ ID NO: 3589315 - RNA, 22 nt, Human
uguauauauguguauauauaca

SEQ ID NO: 3589316 - RNA, 18 nt, Human
uguauauauuuccuauau

SEQ ID NO: 3589317 - RNA, 14 nt, Human
uguauaucagaaaa

SEQ ID NO: 3589318 - RNA, 18 nt, Human
uguauaugaacuuaacau

SEQ ID NO: 3589319 - RNA, 22 nt, Human
uguauauuauuucuaggaagaa

SEQ ID NO: 3589320 - RNA, 16 nt, Human
uguauauuauuuggca

SEQ ID NO: 3589321 - RNA, 12 nt, Human
uguauauucacu

SEQ ID NO: 3589322 - RNA, 20 nt, Human
uguauauugguuuuaugaug

SEQ ID NO: 3589323 - RNA, 17 nt, Human
uguauauuguaauuuaa

SEQ ID NO: 3589324 - RNA, 18 nt, Human
uguauauuuguaaagcua

SEQ ID NO: 3589325 - RNA, 13 nt, Human
uguauauuuguau

SEQ ID NO: 3589326 - RNA, 15 nt, Human
uguauauuuguauga

SEQ ID NO: 3589327 - RNA, 18 nt, Human
uguauauuuguaugauau

SEQ ID NO: 3589328 - RNA, 23 nt, Human
uguauauuugugauagcacuuuc

SEQ ID NO: 3589329 - RNA, 13 nt, Human
uguaucaaaaugc

SEQ ID NO: 3589330 - RNA, 18 nt, Human
uguaucaaaaugcucuua

SEQ ID NO: 3589331 - RNA, 23 nt, Human
uguaucaaaaugcucuuauuuca

SEQ ID NO: 3589332 - RNA, 15 nt, Human
uguaucaaacuagug

SEQ ID NO: 3589333 - RNA, 21 nt, Human
uguaucaaauacauuuaaaac

SEQ ID NO: 3589334 - RNA, 18 nt, Human
uguaucaacccagaaaca

SEQ ID NO: 3589335 - RNA, 15 nt, Human
uguaucacaaaucuu

SEQ ID NO: 3589336 - RNA, 23 nt, Human
uguaucacucugugucugagugg

SEQ ID NO: 3589337 - RNA, 19 nt, Human
uguaucaguggauuuccca

SEQ ID NO: 3589338 - RNA, 13 nt, Human
uguaucaguguuu

SEQ ID NO: 3589339 - RNA, 13 nt, Human
uguaucauaauua

SEQ ID NO: 3589340 - RNA, 17 nt, Human
uguauccaguacauuua

SEQ ID NO: 3589341 - RNA, 20 nt, Human
uguauccauuaucaugugua

SEQ ID NO: 3589342 - RNA, 15 nt, Human
uguaucccaugagcc

SEQ ID NO: 3589343 - RNA, 16 nt, Human
uguaucccaugagccu

SEQ ID NO: 3589344 - RNA, 23 nt, Human
uguaucccaugagccucagcauc

SEQ ID NO: 3589345 - RNA, 20 nt, Human
uguauccccccccuguauag

SEQ ID NO: 3589346 - RNA, 14 nt, Human
uguauccccugcag

SEQ ID NO: 3589347 - RNA, 20 nt, Human
uguaucccuucucacagcac

SEQ ID NO: 3589348 - RNA, 17 nt, Human
uguauccuggaacaaua

SEQ ID NO: 3589349 - RNA, 13 nt, Human
uguauccuggggc

SEQ ID NO: 3589350 - RNA, 19 nt, Human
uguauccuggggcucccuu

SEQ ID NO: 3589351 - RNA, 19 nt, Human
uguaucgauguuuuauuau

SEQ ID NO: 3589352 - RNA, 17 nt, Human
uguaucggagacaguga

SEQ ID NO: 3589353 - RNA, 20 nt, Human
uguaucgggaagauuucuaa

SEQ ID NO: 3589354 - RNA, 16 nt, Human
uguaucguauagcugu

SEQ ID NO: 3589355 - RNA, 22 nt, Human
uguaucguauagcuguauugaa

SEQ ID NO: 3589356 - RNA, 15 nt, Human
uguaucuaagaauaa

SEQ ID NO: 3589357 - RNA, 19 nt, Human
uguaucuaagaauaauaaa

SEQ ID NO: 3589358 - RNA, 21 nt, Human
uguaucuaagaauaauaaaau

SEQ ID NO: 3589359 - RNA, 20 nt, Human
uguaucuacaucuuuuuuca

SEQ ID NO: 3589360 - RNA, 17 nt, Human
uguaucucugaagcaug

SEQ ID NO: 3589361 - RNA, 23 nt, Human
uguaucucugaagcauguuucau

SEQ ID NO: 3589362 - RNA, 15 nt, Human
uguaucugaaaguca

SEQ ID NO: 3589363 - RNA, 23 nt, Human
uguaucugaguugccaagacaaa

SEQ ID NO: 3589364 - RNA, 20 nt, Human
uguaucugauagcucuuugg

SEQ ID NO: 3589365 - RNA, 17 nt, Human
uguaucugcaggcagac

SEQ ID NO: 3589366 - RNA, 18 nt, Human
uguaucugcaggcagaca

SEQ ID NO: 3589367 - RNA, 14 nt, Human
uguaucugucuuuc

SEQ ID NO: 3589368 - RNA, 16 nt, Human
uguaucugucuuucca

SEQ ID NO: 3589369 - RNA, 20 nt, Human
uguaucugucuuuccacucu

SEQ ID NO: 3589370 - RNA, 13 nt, Human
uguaucuguguag

SEQ ID NO: 3589371 - RNA, 18 nt, Human
uguaucuuccauauuugg

SEQ ID NO: 3589372 - RNA, 21 nt, Human
uguaucuuccauauuuggaag

SEQ ID NO: 3589373 - RNA, 15 nt, Human
uguaugaucaaaugu

SEQ ID NO: 3589374 - RNA, 20 nt, Human
uguaugaucaaauguuuaau

SEQ ID NO: 3589375 - RNA, 15 nt, Human
uguaugauucccagc

SEQ ID NO: 3589376 - RNA, 19 nt, Human
uguaugcaagcaguuucaa

SEQ ID NO: 3589377 - RNA, 20 nt, Human
uguaugcaagcaguuucaau

SEQ ID NO: 3589378 - RNA, 17 nt, Human
uguaugcacacacauau

SEQ ID NO: 3589379 - RNA, 16 nt, Human
uguaugcacaguaaaa

SEQ ID NO: 3589380 - RNA, 18 nt, Human
uguaugccaagugagaag

SEQ ID NO: 3589381 - RNA, 21 nt, Human
uguaugccuuuaaaucuguga

SEQ ID NO: 3589382 - RNA, 23 nt, Human
uguaugccuuuaaaucugugaug

SEQ ID NO: 3589383 - RNA, 23 nt, Human
uguaugcugaucaucgccagagg

SEQ ID NO: 3589384 - RNA, 13 nt, Human
uguaugcugcuuu

SEQ ID NO: 3589385 - RNA, 16 nt, Human
uguaugcugcuuuucu

SEQ ID NO: 3589386 - RNA, 23 nt, Human
uguauggaaauaaauguaucaua

SEQ ID NO: 3589387 - RNA, 14 nt, Human
uguaugggcaaaaa

SEQ ID NO: 3589388 - RNA, 23 nt, Human
uguauggguguguguuuguguga

SEQ ID NO: 3589389 - RNA, 15 nt, Human
uguaugguucugugc

SEQ ID NO: 3589390 - RNA, 22 nt, Human
uguaugguuuuugagauauuaa

SEQ ID NO: 3589391 - RNA, 10 nt, Human
uguauguaaa

SEQ ID NO: 3589392 - RNA, 14 nt, Human
uguauguaaaugug

SEQ ID NO: 3589393 - RNA, 22 nt, Human
uguauguaaaugugcauucuuu

SEQ ID NO: 3589394 - RNA, 14 nt, Human
uguauguagaagca

SEQ ID NO: 3589395 - RNA, 17 nt, Human
uguauguauuagugaua

SEQ ID NO: 3589396 - RNA, 16 nt, Human
uguaugucagaagugc

SEQ ID NO: 3589397 - RNA, 13 nt, Human
uguaugucuguca

SEQ ID NO: 3589398 - RNA, 16 nt, Human
uguaugugccauuuau

SEQ ID NO: 3589399 - RNA, 12 nt, Human
uguauguggggg

SEQ ID NO: 3589400 - RNA, 20 nt, Human
uguaugugggggucugugug

SEQ ID NO: 3589401 - RNA, 22 nt, Human
uguaugugggggucuguguguu

SEQ ID NO: 3589402 - RNA, 14 nt, Human
uguauguguaagua

SEQ ID NO: 3589403 - RNA, 21 nt, Human
uguauuguaccuuuuaacacc

SEQ ID NO: 3589404 - RNA, 18 nt, Human
uguauuguauauuacaau

SEQ ID NO: 3589405 - RNA, 18 nt, Human
uguauugugucuuuugca

SEQ ID NO: 3589406 - RNA, 20 nt, Human
uguauugugucuuuugcaug

SEQ ID NO: 3589407 - RNA, 15 nt, Human
uguauuguucccagu

SEQ ID NO: 3589408 - RNA, 19 nt, Human
uguauuguucccagugaca

SEQ ID NO: 3589409 - RNA, 18 nt, Human
uguauuguugaaaaaguu

SEQ ID NO: 3589410 - RNA, 20 nt, Human
uguauuguugaaaaaguuug

SEQ ID NO: 3589411 - RNA, 22 nt, Human
uguauuguugaaaaaguuuguu

SEQ ID NO: 3589412 - RNA, 15 nt, Human
uguauuuaaaugaaa

SEQ ID NO: 3589413 - RNA, 15 nt, Human
uguauuuaacagaaa

SEQ ID NO: 3589414 - RNA, 18 nt, Human
uguauuuaacagggaggg

SEQ ID NO: 3589415 - RNA, 16 nt, Human
uguauuuaagcaaaua

SEQ ID NO: 3589416 - RNA, 20 nt, Human
uguauuuaagcaaauacuua

SEQ ID NO: 3589417 - RNA, 19 nt, Human
uguauuuaauuguaaacug

SEQ ID NO: 3589418 - RNA, 20 nt, Human
uguauuuacgcuuugauuca

SEQ ID NO: 3589419 - RNA, 21 nt, Human
uguauuuacgcuuugauucau

SEQ ID NO: 3589420 - RNA, 23 nt, Human
uguauuuacgcuuugauucauag

SEQ ID NO: 3589421 - RNA, 14 nt, Human
uguauuuauaaaua

SEQ ID NO: 3589422 - RNA, 17 nt, Human
uguauuuaugugugagg

SEQ ID NO: 3589423 - RNA, 13 nt, Human
uguauuuauucaa

SEQ ID NO: 3589424 - RNA, 14 nt, Human
uguauuuauucaau

SEQ ID NO: 3589425 - RNA, 19 nt, Human
uguauuuauucaauaaagu

SEQ ID NO: 3589426 - RNA, 22 nt, Human
uguauuuauucaauaaaguauu

SEQ ID NO: 3589427 - RNA, 14 nt, Human
uguauuuauucuuu

SEQ ID NO: 3589428 - RNA, 18 nt, Human
uguauuuauuuuccuccc

SEQ ID NO: 3589429 - RNA, 15 nt, Human
uguauuuccagugca

SEQ ID NO: 3589430 - RNA, 18 nt, Human
uguauuucuuauacgcuu

SEQ ID NO: 3589431 - RNA, 15 nt, Human
uguauuugagcauau

SEQ ID NO: 3589432 - RNA, 12 nt, Human
uguauuugugac

SEQ ID NO: 3589433 - RNA, 15 nt, Human
uguauuugugacuaa

SEQ ID NO: 3589434 - RNA, 16 nt, Human
uguauuugugacuaau

SEQ ID NO: 3589435 - RNA, 22 nt, Human
uguauuugugacuaauuguaua

SEQ ID NO: 3589436 - RNA, 20 nt, Human
uguauuuguuaaugguuuga

SEQ ID NO: 3589437 - RNA, 18 nt, Human
uguauuuguucauguuug

SEQ ID NO: 3589438 - RNA, 19 nt, Human
uguauuuguucauguuugg

SEQ ID NO: 3589439 - RNA, 14 nt, Human
uguauuuguuugca

SEQ ID NO: 3589440 - RNA, 19 nt, Human
uguauuuuaaaagaaugau

SEQ ID NO: 3589441 - RNA, 14 nt, Human
uguauuuuaacuca

SEQ ID NO: 3589442 - RNA, 15 nt, Human
uguauuuuaacucau

SEQ ID NO: 3589443 - RNA, 22 nt, Human
uguauuuuauaaaauuaaagaa

SEQ ID NO: 3589444 - RNA, 13 nt, Human
uguauuuuaugua

SEQ ID NO: 3589445 - RNA, 19 nt, Human
uguauuuuauguauguuua

SEQ ID NO: 3589446 - RNA, 17 nt, Human
uguauuuuccaagugug

SEQ ID NO: 3589447 - RNA, 20 nt, Human
uguauuuuccaagugugcau

SEQ ID NO: 3589448 - RNA, 22 nt, Human
uguauuuuccaagugugcauau

SEQ ID NO: 3589449 - RNA, 22 nt, Human
uguauuuucuucaccucugcua

SEQ ID NO: 3589450 - RNA, 22 nt, Human
uguauuuuguuuuugucuuaaa

SEQ ID NO: 3589451 - RNA, 17 nt, Human
uguauuuuuaaagcaug

SEQ ID NO: 3589452 - RNA, 18 nt, Human
uguauuuuucaauaauaa

SEQ ID NO: 3589453 - RNA, 21 nt, Human
uguauuuuuccucuuucacuu

SEQ ID NO: 3589454 - RNA, 14 nt, Human
uguauuuuugucaa

SEQ ID NO: 3589455 - RNA, 17 nt, Human
uguauuuuuuaaugcua

SEQ ID NO: 3589456 - RNA, 18 nt, Human
uguauuuuuucuugcauu

SEQ ID NO: 3589457 - RNA, 20 nt, Human
uguauuuuuucuugcauuga

SEQ ID NO: 3589458 - RNA, 14 nt, Human
ugucaaaacacugu

SEQ ID NO: 3589459 - RNA, 18 nt, Human
ugucaaaacacuguggaa

SEQ ID NO: 3589460 - RNA, 17 nt, Human
ugucaaaaguuggacua

SEQ ID NO: 3589461 - RNA, 16 nt, Human
ugucaaacaaagccag

SEQ ID NO: 3589462 - RNA, 17 nt, Human
ugucaaacaaagccaga

SEQ ID NO: 3589463 - RNA, 12 nt, Human
ugucaaacauua

SEQ ID NO: 3589464 - RNA, 16 nt, Human
ugucaaacuguagaaa

SEQ ID NO: 3589465 - RNA, 14 nt, Human
ugucaaagaaucaa

SEQ ID NO: 3589466 - RNA, 17 nt, Human
ugucaaagagagggcuu

SEQ ID NO: 3589467 - RNA, 15 nt, Human
ugucaaaguggugag

SEQ ID NO: 3589468 - RNA, 17 nt, Human
ugucaaaugaugugcaa

SEQ ID NO: 3589469 - RNA, 22 nt, Human
ugucaacaccccuguguggaug

SEQ ID NO: 3589470 - RNA, 17 nt, Human
ugucaacaugaacaaau

SEQ ID NO: 3589471 - RNA, 14 nt, Human
ugucaacauuguga

SEQ ID NO: 3589472 - RNA, 14 nt, Human
ugucaaccagacag

SEQ ID NO: 3589473 - RNA, 15 nt, Human
ugucaaccagacaga

SEQ ID NO: 3589474 - RNA, 20 nt, Human
ugucaaccagacagaggguc

SEQ ID NO: 3589475 - RNA, 20 nt, Human
ugucaaccccaaguuaguuc

SEQ ID NO: 3589476 - RNA, 15 nt, Human
ugucaacuaugauau

SEQ ID NO: 3589477 - RNA, 18 nt, Human
ugucaacuucuggcuccu

SEQ ID NO: 3589478 - RNA, 20 nt, Human
ugucaacuucuggcuccuca

SEQ ID NO: 3589479 - RNA, 21 nt, Human
ugucaagaauagcauuguaaa

SEQ ID NO: 3589480 - RNA, 22 nt, Human
ugucaagaguaguuauauaauu

SEQ ID NO: 3589481 - RNA, 17 nt, Human
ugucaagagucgcugug

SEQ ID NO: 3589482 - RNA, 19 nt, Human
ugucaagagucgcugugcc

SEQ ID NO: 3589483 - RNA, 16 nt, Human
ugucaagauucagcua

SEQ ID NO: 3589484 - RNA, 17 nt, Human
ugucaagccugugcaaa

SEQ ID NO: 3589485 - RNA, 14 nt, Human
ugucaagcugcucu

SEQ ID NO: 3589486 - RNA, 18 nt, Human
ugucaagcugcucugagc

SEQ ID NO: 3589487 - RNA, 23 nt, Human
ugucaagggcagcuuugcucaua

SEQ ID NO: 3589488 - RNA, 21 nt, Human
ugucaaggguucaagauuguu

SEQ ID NO: 3589489 - RNA, 14 nt, Human
ugucaaguugugcu

SEQ ID NO: 3589490 - RNA, 16 nt, Human
ugucaaguugugcuug

SEQ ID NO: 3589491 - RNA, 18 nt, Human
ugucaauaaacaacagcu

SEQ ID NO: 3589492 - RNA, 14 nt, Human
ugucaauauuaaau

SEQ ID NO: 3589493 - RNA, 18 nt, Human
ugucaauauuaaauacag

SEQ ID NO: 3589494 - RNA, 19 nt, Human
ugucaauauuaaauacaga

SEQ ID NO: 3589495 - RNA, 21 nt, Human
ugucaauauuaaauacagaca

SEQ ID NO: 3589496 - RNA, 20 nt, Human
ugucaaucagccuaguugau

SEQ ID NO: 3589497 - RNA, 16 nt, Human
ugucaauuuauaauga

SEQ ID NO: 3589498 - RNA, 23 nt, Human
ugucaauuucccugacuccucua

SEQ ID NO: 3589499 - RNA, 15 nt, Human
ugucaauuucugugu

SEQ ID NO: 3589500 - RNA, 13 nt, Human
ugucacaauaaau

SEQ ID NO: 3589501 - RNA, 21 nt, Human
ugucacaaugagauugaauuu

SEQ ID NO: 3589502 - RNA, 17 nt, Human
ugucacacacuuuggcu

SEQ ID NO: 3589503 - RNA, 15 nt, Human
ugucacacagggcag

SEQ ID NO: 3589504 - RNA, 13 nt, Human
ugucacaggcagg

SEQ ID NO: 3589505 - RNA, 14 nt, Human
ugucacaggcaggu

SEQ ID NO: 3589506 - RNA, 11 nt, Human
ugucacagggc

SEQ ID NO: 3589507 - RNA, 13 nt, Human
ugucacagggcca

SEQ ID NO: 3589508 - RNA, 18 nt, Human
ugucacaguaaaaauaaa

SEQ ID NO: 3589509 - RNA, 15 nt, Human
ugucacaucagauaa

SEQ ID NO: 3589510 - RNA, 16 nt, Human
ugucacauugcauucu

SEQ ID NO: 3589511 - RNA, 19 nt, Human
ugucacauugcauucuauu

SEQ ID NO: 3589512 - RNA, 22 nt, Human
ugucacauugcauucuauugcc

SEQ ID NO: 3589513 - RNA, 15 nt, Human
ugucaccaaggaaac

SEQ ID NO: 3589514 - RNA, 23 nt, Human
ugucaccaaggaaacgcuaccuc

SEQ ID NO: 3589515 - RNA, 23 nt, Human
ugucaccaauguacccaccgggc

SEQ ID NO: 3589516 - RNA, 19 nt, Human
ugucaccaccuucccagcu

SEQ ID NO: 3589517 - RNA, 18 nt, Human
ugucacccuccaccucuu

SEQ ID NO: 3589518 - RNA, 22 nt, Human
ugucacccuccaccucuucacc

SEQ ID NO: 3589519 - RNA, 19 nt, Human
ugucaccguggaccuuccu

SEQ ID NO: 3589520 - RNA, 20 nt, Human
ugucaccguggaccuuccug

SEQ ID NO: 3589521 - RNA, 13 nt, Human
ugucaccuucacc

SEQ ID NO: 3589522 - RNA, 14 nt, Human
ugucacgaauaugg

SEQ ID NO: 3589523 - RNA, 18 nt, Human
ugucacgaauauggacau

SEQ ID NO: 3589524 - RNA, 19 nt, Human
ugucacgaauauggacaua

SEQ ID NO: 3589525 - RNA, 15 nt, Human
ugucacguacugucu

SEQ ID NO: 3589526 - RNA, 18 nt, Human
ugucacguacugucugau

SEQ ID NO: 3589527 - RNA, 20 nt, Human
ugucacguuuuguuuugugc

SEQ ID NO: 3589528 - RNA, 14 nt, Human
ugucacuaaagcag

SEQ ID NO: 3589529 - RNA, 22 nt, Human
ugucacuacucacagucucuuu

SEQ ID NO: 3589530 - RNA, 20 nt, Human
ugucacuagaauggauaaaa

SEQ ID NO: 3589531 - RNA, 20 nt, Human
ugucacucaaggcggugcuu

SEQ ID NO: 3589532 - RNA, 22 nt, Human
ugucacucaaggcggugcuuga

SEQ ID NO: 3589533 - RNA, 15 nt, Human
ugucacucauugcug

SEQ ID NO: 3589534 - RNA, 21 nt, Human
ugucacucauugcugagccuc

SEQ ID NO: 3589535 - RNA, 17 nt, Human
ugucacugacacacacg

SEQ ID NO: 3589536 - RNA, 13 nt, Human
ugucacuggcugc

SEQ ID NO: 3589537 - RNA, 16 nt, Human
ugucacuggcugccuc

SEQ ID NO: 3589538 - RNA, 19 nt, Human
ugucacuggcugccuccac

SEQ ID NO: 3589539 - RNA, 21 nt, Human
ugucacuggcugccuccacuc

SEQ ID NO: 3589540 - RNA, 22 nt, Human
ugucacuggcugccuccacucc

SEQ ID NO: 3589541 - RNA, 21 nt, Human
ugucacugguagaccaaaaua

SEQ ID NO: 3589542 - RNA, 19 nt, Human
ugucacugucccuccuggu

SEQ ID NO: 3589543 - RNA, 18 nt, Human
ugucacuguuucucugcu

SEQ ID NO: 3589544 - RNA, 18 nt, Human
ugucacuugugcuuugcu

SEQ ID NO: 3589545 - RNA, 20 nt, Human
ugucacuugugcuuugcucu

SEQ ID NO: 3589546 - RNA, 14 nt, Human
ugucacuuugcucu

SEQ ID NO: 3589547 - RNA, 11 nt, Human
uguuguucugu

SEQ ID NO: 3589548 - RNA, 19 nt, Human
uguuguucuuggcaauaaa

SEQ ID NO: 3589549 - RNA, 16 nt, Human
uguuguucuuucagaa

SEQ ID NO: 3589550 - RNA, 19 nt, Human
uguuguugaaagguuuuuu

SEQ ID NO: 3589551 - RNA, 21 nt, Human
uguuguuuccuaauaucaaau

SEQ ID NO: 3589552 - RNA, 17 nt, Human
uguuguuucuuaaauaa

SEQ ID NO: 3589553 - RNA, 15 nt, Human
uguuguuuguaaaua

SEQ ID NO: 3589554 - RNA, 12 nt, Human
uguuguuuguuu

SEQ ID NO: 3589555 - RNA, 14 nt, Human
uguuguuuguuuag

SEQ ID NO: 3589556 - RNA, 14 nt, Human
uguuguuuuguaca

SEQ ID NO: 3589557 - RNA, 16 nt, Human
uguuuaaaaaaguuua

SEQ ID NO: 3589558 - RNA, 21 nt, Human
uguuuaaaaaaguuuaaaaug

SEQ ID NO: 3589559 - RNA, 22 nt, Human
uguuuaaaaaccgaauaaaugu

SEQ ID NO: 3589560 - RNA, 18 nt, Human
uguuuaaaacuucaguuu

SEQ ID NO: 3589561 - RNA, 12 nt, Human
uguuuaaaauaa

SEQ ID NO: 3589562 - RNA, 22 nt, Human
uguuuaaaauaaaaugaaaauu

SEQ ID NO: 3589563 - RNA, 14 nt, Human
uguuuaaaaucauu

SEQ ID NO: 3589564 - RNA, 23 nt, Human
uguuuaaaguucaacauguuauu

SEQ ID NO: 3589565 - RNA, 12 nt, Human
uguuuaaauaaa

SEQ ID NO: 3589566 - RNA, 17 nt, Human
uguuuaaauaaaguauc

SEQ ID NO: 3589567 - RNA, 20 nt, Human
uguuuaaauaaaguaucaug

SEQ ID NO: 3589568 - RNA, 22 nt, Human
uguuuaaauaaaguaucaugca

SEQ ID NO: 3589569 - RNA, 11 nt, Human
uguuuaaauau

SEQ ID NO: 3589570 - RNA, 16 nt, Human
uguuuaacuucuuaua

SEQ ID NO: 3589571 - RNA, 14 nt, Human
uguuuaagaaaagu

SEQ ID NO: 3589572 - RNA, 22 nt, Human
uguuuaagaaaaguauuuugaa

SEQ ID NO: 3589573 - RNA, 18 nt, Human
uguuuaagacacuuccgu

SEQ ID NO: 3589574 - RNA, 21 nt, Human
uguuuaagauuuaauuugcca

SEQ ID NO: 3589575 - RNA, 18 nt, Human
uguuuaagcagaauugga

SEQ ID NO: 3589576 - RNA, 21 nt, Human
uguuuaagugaauugacuuau

SEQ ID NO: 3589577 - RNA, 23 nt, Human
uguuuaauacucauccuuguaua

SEQ ID NO: 3589578 - RNA, 17 nt, Human
uguuuaauauuuaaaca

SEQ ID NO: 3589579 - RNA, 14 nt, Human
uguuuaaucauaua

SEQ ID NO: 3589580 - RNA, 15 nt, Human
uguuuaaucauauaa

SEQ ID NO: 3589581 - RNA, 15 nt, Human
uguuuaaugguaguu

SEQ ID NO: 3589582 - RNA, 22 nt, Human
uguuuaaugugaacuuguagcu

SEQ ID NO: 3589583 - RNA, 15 nt, Human
uguuuaauuucuuca

SEQ ID NO: 3589584 - RNA, 19 nt, Human
uguuuaauuuuuauuucuu

SEQ ID NO: 3589585 - RNA, 15 nt, Human
uguuuacagauaauu

SEQ ID NO: 3589586 - RNA, 17 nt, Human
uguuuacagauccccaa

SEQ ID NO: 3589587 - RNA, 22 nt, Human
uguuuacagcacuacucugugc

SEQ ID NO: 3589588 - RNA, 23 nt, Human
uguuuacagggagccuccugccc

SEQ ID NO: 3589589 - RNA, 21 nt, Human
uguuuacaucaguuuuaacga

SEQ ID NO: 3589590 - RNA, 22 nt, Human
uguuuacauguguagccuaugu

SEQ ID NO: 3589591 - RNA, 15 nt, Human
uguuuaccuuucucu

SEQ ID NO: 3589592 - RNA, 23 nt, Human
uguuuaccuuucucucucuaagg

SEQ ID NO: 3589593 - RNA, 15 nt, Human
uguuuacugcaaggu

SEQ ID NO: 3589594 - RNA, 16 nt, Human
uguuuacuuaaagauu

SEQ ID NO: 3589595 - RNA, 18 nt, Human
uguuuacuuaaagauuua

SEQ ID NO: 3589596 - RNA, 14 nt, Human
uguuuagaauugaa

SEQ ID NO: 3589597 - RNA, 17 nt, Human
uguuuagaauugaaggu

SEQ ID NO: 3589598 - RNA, 19 nt, Human
uguuuagacuuuaacauaa

SEQ ID NO: 3589599 - RNA, 16 nt, Human
uguuuagaguugcaau

SEQ ID NO: 3589600 - RNA, 16 nt, Human
uguuuagcaaauacau

SEQ ID NO: 3589601 - RNA, 17 nt, Human
uguuuagcagcagccuu

SEQ ID NO: 3589602 - RNA, 16 nt, Human
uguuuaguagcaguga

SEQ ID NO: 3589603 - RNA, 18 nt, Human
uguuuaguagcagugauu

SEQ ID NO: 3589604 - RNA, 13 nt, Human
uguuuagucuugu

SEQ ID NO: 3589605 - RNA, 18 nt, Human
uguuuagucuugucucag

SEQ ID NO: 3589606 - RNA, 17 nt, Human
uguuuagugauauuaca

SEQ ID NO: 3589607 - RNA, 16 nt, Human
uguuuauaaacauugu

SEQ ID NO: 3589608 - RNA, 22 nt, Human
uguuuauaacuauucaguugug

SEQ ID NO: 3589609 - RNA, 15 nt, Human
uguuuauacagcuca

SEQ ID NO: 3589610 - RNA, 21 nt, Human
uguuuauagcaaacuuggaau

SEQ ID NO: 3589611 - RNA, 22 nt, Human
uguuuauaucugcaaaaaaccu

SEQ ID NO: 3589612 - RNA, 14 nt, Human
uguuuauauguguu

SEQ ID NO: 3589613 - RNA, 17 nt, Human
uguuuaucagauacauc

SEQ ID NO: 3589614 - RNA, 15 nt, Human
uguuuauccuuucau

SEQ ID NO: 3589615 - RNA, 18 nt, Human
uguuuauccuuucauaua

SEQ ID NO: 3589616 - RNA, 16 nt, Human
uguuuaucuagaugua

SEQ ID NO: 3589617 - RNA, 18 nt, Human
uguuuaucuagauguaaa

SEQ ID NO: 3589618 - RNA, 12 nt, Human
uguuuaugaaaa

SEQ ID NO: 3589619 - RNA, 13 nt, Human
uguuuaugaaaau

SEQ ID NO: 3589620 - RNA, 21 nt, Human
uguuuaugaaaauaaauagcu

SEQ ID NO: 3589621 - RNA, 21 nt, Human
uguuuaugcaaggaaggaaag

SEQ ID NO: 3589622 - RNA, 14 nt, Human
uguuuaugcuuuug

SEQ ID NO: 3589623 - RNA, 24 nt, Human
uguuuauggccucagcugccucac

SEQ ID NO: 3589624 - RNA, 16 nt, Human
uguuuauguaauuuca

SEQ ID NO: 3589625 - RNA, 18 nt, Human
uguuuauguuguuuauaa

SEQ ID NO: 3589626 - RNA, 14 nt, Human
uguuuauuaaauag

SEQ ID NO: 3589627 - RNA, 14 nt, Human
uguuuauuaaucuu

SEQ ID NO: 3589628 - RNA, 15 nt, Human
uguuuauuaaucuua

SEQ ID NO: 3589629 - RNA, 14 nt, Human
uguugaacaaaaua

SEQ ID NO: 3589630 - RNA, 19 nt, Human
uguugaacaaaauaaauug

SEQ ID NO: 3589631 - RNA, 20 nt, Human
uguugaacagguguuuuucc

SEQ ID NO: 3589632 - RNA, 13 nt, Human
uguugaagagcag

SEQ ID NO: 3589633 - RNA, 23 nt, Human
uguugaaggaacuugucucuuca

SEQ ID NO: 3589634 - RNA, 15 nt, Human
uguugaauucuuuug

SEQ ID NO: 3589635 - RNA, 22 nt, Human
uguugacaaaauuuucucauuu

SEQ ID NO: 3589636 - RNA, 15 nt, Human
uguugacaacuguga

SEQ ID NO: 3589637 - RNA, 18 nt, Human
uguugacaacugugacug

SEQ ID NO: 3589638 - RNA, 16 nt, Human
uguugacaguucugaa

SEQ ID NO: 3589639 - RNA, 19 nt, Human
uguugacauauuuaauguu

SEQ ID NO: 3589640 - RNA, 20 nt, Human
uguugacauauuuaauguuu

SEQ ID NO: 3589641 - RNA, 18 nt, Human
uguugacauuaagaaugu

SEQ ID NO: 3589642 - RNA, 14 nt, Human
uguugacauucuga

SEQ ID NO: 3589643 - RNA, 16 nt, Human
uguugacauucugaau

SEQ ID NO: 3589644 - RNA, 15 nt, Human
uguugacauuuguuu

SEQ ID NO: 3589645 - RNA, 20 nt, Human
uguugacuuauuuucucugu

SEQ ID NO: 3589646 - RNA, 22 nt, Human
uguugacuuauuuucucugugu

SEQ ID NO: 3589647 - RNA, 18 nt, Human
uguugagaauugugcuca

SEQ ID NO: 3589648 - RNA, 15 nt, Human
uguugagagugugac

SEQ ID NO: 3589649 - RNA, 14 nt, Human
uguugagcaagcag

SEQ ID NO: 3589650 - RNA, 16 nt, Human
uguugagcaucacaga

SEQ ID NO: 3589651 - RNA, 17 nt, Human
uguugagccaggccugg

SEQ ID NO: 3589652 - RNA, 19 nt, Human
uguugagguggucugaaug

SEQ ID NO: 3589653 - RNA, 19 nt, Human
uguugauaaauuccacugg

SEQ ID NO: 3589654 - RNA, 21 nt, Human
uguugauacuguugcacgugu

SEQ ID NO: 3589655 - RNA, 23 nt, Human
uguugauacuguugcacgugugu

SEQ ID NO: 3589656 - RNA, 19 nt, Human
uguugaucauguacuuuuu

SEQ ID NO: 3589657 - RNA, 22 nt, Human
uguugaucauguacuuuuuagu

SEQ ID NO: 3589658 - RNA, 16 nt, Human
uguugauccauccagc

SEQ ID NO: 3589659 - RNA, 19 nt, Human
uguugauccauccagcuug

SEQ ID NO: 3589660 - RNA, 22 nt, Human
uguugaugcaauccuuacaaau

SEQ ID NO: 3589661 - RNA, 22 nt, Human
uguugauguaucugaguugcca

SEQ ID NO: 3589662 - RNA, 14 nt, Human
uguugauuaaaaca

SEQ ID NO: 3589663 - RNA, 20 nt, Human
uguugauugcaggaauaagg

SEQ ID NO: 3589664 - RNA, 11 nt, Human
uguugauuucu

SEQ ID NO: 3589665 - RNA, 15 nt, Human
uguugauuuucuguu

SEQ ID NO: 3589666 - RNA, 18 nt, Human
uguugauuuucuguugua

SEQ ID NO: 3589667 - RNA, 22 nt, Human
uguugauuuuuacuguguuuua

SEQ ID NO: 3589668 - RNA, 15 nt, Human
uguugcaagauguga

SEQ ID NO: 3589669 - RNA, 17 nt, Human
uguugcaagugcaauaa

SEQ ID NO: 3589670 - RNA, 20 nt, Human
uguugcaauuaggauuuuga

SEQ ID NO: 3589671 - RNA, 21 nt, Human
uguugcacacccacucagcuc

SEQ ID NO: 3589672 - RNA, 22 nt, Human
uguugcacacccacucagcucc

SEQ ID NO: 3589673 - RNA, 14 nt, Human
uguugcacccagcc

SEQ ID NO: 3589674 - RNA, 18 nt, Human
uguugcacccagcccugg

SEQ ID NO: 3589675 - RNA, 14 nt, Human
uguugcacgugugu

SEQ ID NO: 3589676 - RNA, 13 nt, Human
uguugcacugaag

SEQ ID NO: 3589677 - RNA, 18 nt, Human
uguugcauagguuagaua

SEQ ID NO: 3589678 - RNA, 14 nt, Human
uguugcaugggcua

SEQ ID NO: 3589679 - RNA, 14 nt, Human
uguugcauguuuga

SEQ ID NO: 3589680 - RNA, 16 nt, Human
uguugcauuauucauu

SEQ ID NO: 3589681 - RNA, 23 nt, Human
uguugccaaauauguccuggggu

SEQ ID NO: 3589682 - RNA, 16 nt, Human
uguugccaagagcccg

SEQ ID NO: 3589683 - RNA, 12 nt, Human
uguugcccaggc

SEQ ID NO: 3589684 - RNA, 17 nt, Human
uguugcccaggcagguc

SEQ ID NO: 3589685 - RNA, 19 nt, Human
uguugcccaggcuggagug

SEQ ID NO: 3589686 - RNA, 21 nt, Human
uguugccccuuucucuuuucc

SEQ ID NO: 3589687 - RNA, 21 nt, Human
uguugcccuuucuguaccauu

SEQ ID NO: 3589688 - RNA, 18 nt, Human
uguugccuuuaugguuuc

SEQ ID NO: 3589689 - RNA, 21 nt, Human
uguugcuaagccccagcaagc

SEQ ID NO: 3589690 - RNA, 22 nt, Human
uguugcuaagccccagcaagca

SEQ ID NO: 3589691 - RNA, 23 nt, Human
uguugcucaguguuuuugugaau

SEQ ID NO: 3589692 - RNA, 14 nt, Human
uguugcucccugug

SEQ ID NO: 3589693 - RNA, 15 nt, Human
uguugcucuaggaag

SEQ ID NO: 3589694 - RNA, 20 nt, Human
uguugcucuaggaagacauu

SEQ ID NO: 3589695 - RNA, 21 nt, Human
uguugcucucugugucugaga

SEQ ID NO: 3589696 - RNA, 11 nt, Human
uguugcugaau

SEQ ID NO: 3589697 - RNA, 13 nt, Human
uguugcugaauag

SEQ ID NO: 3589698 - RNA, 23 nt, Human
uguugcugaauaggcgaucacaa

SEQ ID NO: 3589699 - RNA, 14 nt, Human
uguugcugauuuua

SEQ ID NO: 3589700 - RNA, 19 nt, Human
uguugcuguacaaaagcaa

SEQ ID NO: 3589701 - RNA, 14 nt, Human
uguugcuuacaauu

SEQ ID NO: 3589702 - RNA, 16 nt, Human
uguugcuuacaauuuu

SEQ ID NO: 3589703 - RNA, 23 nt, Human
uguugcuugaauagcaauagcau

SEQ ID NO: 3589704 - RNA, 21 nt, Human
uguuggaagcuuguuuuccag

SEQ ID NO: 3589705 - RNA, 12 nt, Human
uguuggaaugaa

SEQ ID NO: 3589706 - RNA, 22 nt, Human
uguuggacaaaugugaagaugc

SEQ ID NO: 3589707 - RNA, 22 nt, Human
uguuggacaagcuucugagacg

SEQ ID NO: 3589708 - RNA, 13 nt, Human
uguuggacccgcu

SEQ ID NO: 3589709 - RNA, 19 nt, Human
uguuggacccgcucuggac

SEQ ID NO: 3589710 - RNA, 16 nt, Human
uguuggagaagaacug

SEQ ID NO: 3589711 - RNA, 11 nt, Human
uguuggaucuu

SEQ ID NO: 3589712 - RNA, 21 nt, Human
uguuggaucuucaauggcuuu

SEQ ID NO: 3589713 - RNA, 17 nt, Human
uguuggauuuuugucuu

SEQ ID NO: 3589714 - RNA, 21 nt, Human
uguuggcacucacagaccugg

SEQ ID NO: 3589715 - RNA, 22 nt, Human
uguuggcacucacagaccugga

SEQ ID NO: 3589716 - RNA, 15 nt, Human
uguuggcagaugcag

SEQ ID NO: 3589717 - RNA, 15 nt, Human
uguguccaucccagc

SEQ ID NO: 3589718 - RNA, 16 nt, Human
uguguccaucccagcg

SEQ ID NO: 3589719 - RNA, 20 nt, Human
uguguccaugcgcucagggc

SEQ ID NO: 3589720 - RNA, 21 nt, Human
ugugucccagaagaugacuga

SEQ ID NO: 3589721 - RNA, 17 nt, Human
ugugucccucucucugg

SEQ ID NO: 3589722 - RNA, 15 nt, Human
uguguccggcccagu

SEQ ID NO: 3589723 - RNA, 17 nt, Human
uguguccuccaggagcu

SEQ ID NO: 3589724 - RNA, 20 nt, Human
uguguccugaaacgcuccuu

SEQ ID NO: 3589725 - RNA, 14 nt, Human
uguguccugguucc

SEQ ID NO: 3589726 - RNA, 20 nt, Human
uguguccuugcaccugcauc

SEQ ID NO: 3589727 - RNA, 16 nt, Human
ugugucuaagauucua

SEQ ID NO: 3589728 - RNA, 17 nt, Human
ugugucuaagauucuag

SEQ ID NO: 3589729 - RNA, 13 nt, Human
ugugucuacagag

SEQ ID NO: 3589730 - RNA, 21 nt, Human
ugugucuacagagaaccugga

SEQ ID NO: 3589731 - RNA, 13 nt, Human
ugugucuccugca

SEQ ID NO: 3589732 - RNA, 16 nt, Human
ugugucucuuuucucu

SEQ ID NO: 3589733 - RNA, 19 nt, Human
ugugucugcgucuguguug

SEQ ID NO: 3589734 - RNA, 14 nt, Human
ugugucugcucagu

SEQ ID NO: 3589735 - RNA, 21 nt, Human
ugugucuguacacguguccug

SEQ ID NO: 3589736 - RNA, 20 nt, Human
ugugucuugcaauggcagcc

SEQ ID NO: 3589737 - RNA, 14 nt, Human
ugugucuuuugcau

SEQ ID NO: 3589738 - RNA, 22 nt, Human
ugugugaaaggaagcuccacug

SEQ ID NO: 3589739 - RNA, 20 nt, Human
ugugugaaauaccagugugg

SEQ ID NO: 3589740 - RNA, 13 nt, Human
ugugugaaggcag

SEQ ID NO: 3589741 - RNA, 22 nt, Human
ugugugaaugaacacucuuuug

SEQ ID NO: 3589742 - RNA, 12 nt, Human
ugugugaaugug

SEQ ID NO: 3589743 - RNA, 13 nt, Human
ugugugaaugugg

SEQ ID NO: 3589744 - RNA, 16 nt, Human
ugugugaccaacugug

SEQ ID NO: 3589745 - RNA, 19 nt, Human
ugugugaccaacuguguug

SEQ ID NO: 3589746 - RNA, 22 nt, Human
ugugugaccccuccuggggcca

SEQ ID NO: 3589747 - RNA, 23 nt, Human
ugugugaccccuccuggggccag

SEQ ID NO: 3589748 - RNA, 18 nt, Human
ugugugacucuuuagcaa

SEQ ID NO: 3589749 - RNA, 17 nt, Human
ugugugagcaagcauuu

SEQ ID NO: 3589750 - RNA, 12 nt, Human
ugugugauaaau

SEQ ID NO: 3589751 - RNA, 18 nt, Human
ugugugauauuucagaaa

SEQ ID NO: 3589752 - RNA, 20 nt, Human
ugugugauauuucagaaaua

SEQ ID NO: 3589753 - RNA, 15 nt, Human
ugugugaugugacau

SEQ ID NO: 3589754 - RNA, 14 nt, Human
ugugugaugugcau

SEQ ID NO: 3589755 - RNA, 14 nt, Human
ugugugauugaagg

SEQ ID NO: 3589756 - RNA, 18 nt, Human
ugugugauugacagcuuu

SEQ ID NO: 3589757 - RNA, 21 nt, Human
ugugugauugacagcuuugcu

SEQ ID NO: 3589758 - RNA, 16 nt, Human
ugugugcaaaagcagu

SEQ ID NO: 3589759 - RNA, 17 nt, Human
ugugugcaccuuaccaa

SEQ ID NO: 3589760 - RNA, 19 nt, Human
ugugugcacuuuuuuucua

SEQ ID NO: 3589761 - RNA, 13 nt, Human
ugugugcagugaa

SEQ ID NO: 3589762 - RNA, 21 nt, Human
ugugugccauagaguuuaaca

SEQ ID NO: 3589763 - RNA, 20 nt, Human
ugugugccucuagcugaauu

SEQ ID NO: 3589764 - RNA, 18 nt, Human
ugugugcgagugugugca

SEQ ID NO: 3589765 - RNA, 19 nt, Human
ugugugcggagucauuuug

SEQ ID NO: 3589766 - RNA, 17 nt, Human
ugugugcucauguaugu

SEQ ID NO: 3589767 - RNA, 22 nt, Human
ugugugcugugguuccuggggu

SEQ ID NO: 3589768 - RNA, 20 nt, Human
ugugugcuuuuuuugugugu

SEQ ID NO: 3589769 - RNA, 17 nt, Human
uguguggacucaagucc

SEQ ID NO: 3589770 - RNA, 16 nt, Human
uguguggacugugaug

SEQ ID NO: 3589771 - RNA, 19 nt, Human
uguguggacugugaugcca

SEQ ID NO: 3589772 - RNA, 20 nt, Human
uguguggagucauuucugau

SEQ ID NO: 3589773 - RNA, 14 nt, Human
uguguggauucuuu

SEQ ID NO: 3589774 - RNA, 18 nt, Human
uguguggccacuucuguc

SEQ ID NO: 3589775 - RNA, 20 nt, Human
uguguggccacuucugucca

SEQ ID NO: 3589776 - RNA, 11 nt, Human
uguguggccug

SEQ ID NO: 3589777 - RNA, 20 nt, Human
uguguggcuuucagagccuc

SEQ ID NO: 3589778 - RNA, 15 nt, Human
ugugugguagaaaca

SEQ ID NO: 3589779 - RNA, 14 nt, Human
uguguggucagugg

SEQ ID NO: 3589780 - RNA, 14 nt, Human
ugugugguggccuc

SEQ ID NO: 3589781 - RNA, 20 nt, Human
ugugugguggguucuuugga

SEQ ID NO: 3589782 - RNA, 22 nt, Human
ugugugguuuaguguaaaaaug

SEQ ID NO: 3589783 - RNA, 23 nt, Human
ugugugguuuaguguaaaaauga

SEQ ID NO: 3589784 - RNA, 15 nt, Human
uguguguauauaugu

SEQ ID NO: 3589785 - RNA, 17 nt, Human
uguguguaugcugcuuu

SEQ ID NO: 3589786 - RNA, 11 nt, Human
uguguguaugu

SEQ ID NO: 3589787 - RNA, 14 nt, Human
uguguguauuugcu

SEQ ID NO: 3589788 - RNA, 16 nt, Human
uguguguccaaaacug

SEQ ID NO: 3589789 - RNA, 21 nt, Human
uguguguccaaaacugccuca

SEQ ID NO: 3589790 - RNA, 16 nt, Human
ugugugucccaggcag

SEQ ID NO: 3589791 - RNA, 19 nt, Human
ugugugucccaggcaggga

SEQ ID NO: 3589792 - RNA, 16 nt, Human
ugugugucuuaauuau

SEQ ID NO: 3589793 - RNA, 17 nt, Human
ugugugugaaaaugugu

SEQ ID NO: 3589794 - RNA, 14 nt, Human
ugugugugcccucu

SEQ ID NO: 3589795 - RNA, 22 nt, Human
ugugugugcccucugggcucug

SEQ ID NO: 3589796 - RNA, 9 nt, Human
ugugugugu

SEQ ID NO: 3589797 - RNA, 14 nt, Human
uguguguguaugcu

SEQ ID NO: 3589798 - RNA, 14 nt, Human
uguguguguaugug

SEQ ID NO: 3589799 - RNA, 15 nt, Human
uguguguguauguga

SEQ ID NO: 3589800 - RNA, 15 nt, Human
ugugugugugcacau

SEQ ID NO: 3589801 - RNA, 12 nt, Human
ugugugugugua

SEQ ID NO: 3589802 - RNA, 14 nt, Human
ugugugugugugug

SEQ ID NO: 3589803 - RNA, 19 nt, Human
uguguguuccaaguuucca

SEQ ID NO: 3589804 - RNA, 11 nt, Human
uguguguuccu

SEQ ID NO: 3589805 - RNA, 15 nt, Human
uguguguugauacug

SEQ ID NO: 3589806 - RNA, 17 nt, Human
uguguguugauacuguu

SEQ ID NO: 3589807 - RNA, 19 nt, Human
uguguguugauacuguugc

SEQ ID NO: 3589808 - RNA, 16 nt, Human
uguguguugccacagg

SEQ ID NO: 3589809 - RNA, 15 nt, Human
uguguguuuaaauaa

SEQ ID NO: 3589810 - RNA, 16 nt, Human
uguguguuuaaauaaa

SEQ ID NO: 3589811 - RNA, 19 nt, Human
uguguguuuaaauaaagua

SEQ ID NO: 3589812 - RNA, 13 nt, Human
uguguuaauuuaa

SEQ ID NO: 3589813 - RNA, 18 nt, Human
uguguuaauuuaaguuuu

SEQ ID NO: 3589814 - RNA, 23 nt, Human
uguguuaccugaaaacacugugc

SEQ ID NO: 3589815 - RNA, 23 nt, Human
uguguuacuaaaaaaaagaugaa

SEQ ID NO: 3589816 - RNA, 22 nt, Human
uguguuaucacccagaagaaaa

SEQ ID NO: 3589817 - RNA, 19 nt, Human
uguguuaugcaaaagcaag

SEQ ID NO: 3589818 - RNA, 18 nt, Human
uguguuccaaguuuccaa

SEQ ID NO: 3589819 - RNA, 16 nt, Human
uguguucccauuucag

SEQ ID NO: 3589820 - RNA, 18 nt, Human
uguguucccuuugucuuu

SEQ ID NO: 3589821 - RNA, 15 nt, Human
uguguuccuggcaau

SEQ ID NO: 3589822 - RNA, 20 nt, Human
uguguucgcgugugugggug

SEQ ID NO: 3589823 - RNA, 15 nt, Human
uguguucguucuugu

SEQ ID NO: 3589824 - RNA, 17 nt, Human
uguguucguucuuguuc

SEQ ID NO: 3589825 - RNA, 13 nt, Human
uguguucuaucca

SEQ ID NO: 3589826 - RNA, 18 nt, Human
uguguucuguuuguuaaa

SEQ ID NO: 3589827 - RNA, 21 nt, Human
uguguucuguuuguuaaaacu

SEQ ID NO: 3589828 - RNA, 16 nt, Human
uguguugaaaaccaaa

SEQ ID NO: 3589829 - RNA, 15 nt, Human
uguguugauacuguu

SEQ ID NO: 3589830 - RNA, 16 nt, Human
uguguugauacuguug

SEQ ID NO: 3589831 - RNA, 17 nt, Human
uguguugauacuguugc

SEQ ID NO: 3589832 - RNA, 21 nt, Human
uguguugauacuguugcacgu

SEQ ID NO: 3589833 - RNA, 22 nt, Human
uguguugauacuguugcacgug

SEQ ID NO: 3589834 - RNA, 24 nt, Human
uguguugcauuauucauuuaguga

SEQ ID NO: 3589835 - RNA, 18 nt, Human
uguguugccacuuuccaa

SEQ ID NO: 3589836 - RNA, 19 nt, Human
uguguuggacagagaaggg

SEQ ID NO: 3589837 - RNA, 22 nt, Human
uguguugggauugagucugugc

SEQ ID NO: 3589838 - RNA, 19 nt, Human
uguguuggggccuuggccu

SEQ ID NO: 3589839 - RNA, 23 nt, Human
uguguuguugcuucuugugaagg

SEQ ID NO: 3589840 - RNA, 13 nt, Human
uguguuuaaauaa

SEQ ID NO: 3589841 - RNA, 12 nt, Human
uguguuuauuca

SEQ ID NO: 3589842 - RNA, 14 nt, Human
uguguuuauucaaa

SEQ ID NO: 3589843 - RNA, 21 nt, Human
uguguuucacaguuugaaaua

SEQ ID NO: 3589844 - RNA, 20 nt, Human
uguguuucuaugugacaauu

SEQ ID NO: 3589845 - RNA, 13 nt, Human
uguguuugaagca

SEQ ID NO: 3589846 - RNA, 16 nt, Human
uguguuugcuccccuu

SEQ ID NO: 3589847 - RNA, 15 nt, Human
uguguuugcuuucug

SEQ ID NO: 3589848 - RNA, 23 nt, Human
uguguuugguuuacauuuaaagc

SEQ ID NO: 3589849 - RNA, 14 nt, Human
uguguuugucauua

SEQ ID NO: 3589850 - RNA, 14 nt, Human
uguguuuguuccua

SEQ ID NO: 3589851 - RNA, 13 nt, Human
uguguuuucugaa

SEQ ID NO: 3589852 - RNA, 23 nt, Human
uguguuuucugaauaacauuugu

SEQ ID NO: 3589853 - RNA, 16 nt, Human
uguguuuugaaagaau

SEQ ID NO: 3589854 - RNA, 19 nt, Human
uguguuuugcaagccagau

SEQ ID NO: 3589855 - RNA, 14 nt, Human
uguguuuuucuauu

SEQ ID NO: 3589856 - RNA, 14 nt, Human
uguguuuuucucca

SEQ ID NO: 3589857 - RNA, 18 nt, Human
uguguuuuucuccagugc

SEQ ID NO: 3589858 - RNA, 13 nt, Human
uguguuuuugaaa

SEQ ID NO: 3589859 - RNA, 16 nt, Human
uguguuuuuuaagaua

SEQ ID NO: 3589860 - RNA, 17 nt, Human
uguguuuuuuaagauag

SEQ ID NO: 3589861 - RNA, 23 nt, Human
uguuaaaaaaauaagaagaaugc

SEQ ID NO: 3589862 - RNA, 16 nt, Human
uguuaaaaauaaaucc

SEQ ID NO: 3589863 - RNA, 18 nt, Human
uguuaaaacacuucuguc

SEQ ID NO: 3589864 - RNA, 12 nt, Human
uguuaaaauaac

SEQ ID NO: 3589865 - RNA, 23 nt, Human
uguuaaaaugcaugauugcagaa

SEQ ID NO: 3589866 - RNA, 23 nt, Human
uguuaaaauguauucuuaaauuc

SEQ ID NO: 3589867 - RNA, 18 nt, Human
uguuaaaccaugggauaa

SEQ ID NO: 3589868 - RNA, 12 nt, Human
uguuaaacuguu

SEQ ID NO: 3589869 - RNA, 16 nt, Human
uguuaaauaaauugua

SEQ ID NO: 3589870 - RNA, 15 nt, Human
uguuaaauaaggccu

SEQ ID NO: 3589871 - RNA, 23 nt, Human
uguuaaauaauauggcuaugcuu

SEQ ID NO: 3589872 - RNA, 18 nt, Human
uguuaaauacaggaaaca

SEQ ID NO: 3589873 - RNA, 15 nt, Human
uguuaaauuaauuau

SEQ ID NO: 3589874 - RNA, 19 nt, Human
uguuaaauuuguaaguuuc

SEQ ID NO: 3589875 - RNA, 19 nt, Human
uguuaacaaugccuauugu

SEQ ID NO: 3589876 - RNA, 23 nt, Human
uguuaacaaugccuauuguaaua

SEQ ID NO: 3589877 - RNA, 13 nt, Human
uguuaacagaagg

SEQ ID NO: 3589878 - RNA, 15 nt, Human
uguuaacauuccaag

SEQ ID NO: 3589879 - RNA, 21 nt, Human
uguuaacauuccaagacucua

SEQ ID NO: 3589880 - RNA, 16 nt, Human
uguuaaccaaggaaau

SEQ ID NO: 3589881 - RNA, 17 nt, Human
uguuaacugaauaccac

SEQ ID NO: 3589882 - RNA, 16 nt, Human
uguuaacugagugccu

SEQ ID NO: 3589883 - RNA, 14 nt, Human
uguuaacuuauuca

SEQ ID NO: 3589884 - RNA, 23 nt, Human
uguuaagaauugaccaucugcuu

SEQ ID NO: 3589885 - RNA, 13 nt, Human
uguuaagcucugc

SEQ ID NO: 3589886 - RNA, 14 nt, Human
uguuaagcucugcu

SEQ ID NO: 3589887 - RNA, 15 nt, Human
uguuaaggaaacucu

SEQ ID NO: 3589888 - RNA, 16 nt, Human
uguuaaggaaacucuu

SEQ ID NO: 3589889 - RNA, 17 nt, Human
uguuaaggaaacucuua

SEQ ID NO: 3589890 - RNA, 21 nt, Human
uguuaaggaaacucuuaucuc

SEQ ID NO: 3589891 - RNA, 22 nt, Human
uguuaaggaaacucuuaucuca

SEQ ID NO: 3589892 - RNA, 23 nt, Human
uguuaaggaaacucuuaucucag

SEQ ID NO: 3589893 - RNA, 22 nt, Human
uguuaagguggauugaggccag

SEQ ID NO: 3589894 - RNA, 17 nt, Human
uguuaaguauuuucaua

SEQ ID NO: 3589895 - RNA, 18 nt, Human
uguuaaguccucccugac

SEQ ID NO: 3589896 - RNA, 22 nt, Human
uguuaaguccucccugacuuuu

SEQ ID NO: 3589897 - RNA, 17 nt, Human
uguuaaguuauagugaa

SEQ ID NO: 3589898 - RNA, 16 nt, Human
uguuaauaaucucaca

SEQ ID NO: 3589899 - RNA, 14 nt, Human
uguuaauacaaggu

SEQ ID NO: 3589900 - RNA, 17 nt, Human
uguuaauacaagguaua

SEQ ID NO: 3589901 - RNA, 13 nt, Human
uguuaauaucacu

SEQ ID NO: 3589902 - RNA, 18 nt, Human
ugugaagagggagaagca

SEQ ID NO: 3589903 - RNA, 22 nt, Human
ugugaagaugauauacuauuuu

SEQ ID NO: 3589904 - RNA, 15 nt, Human
ugugauggagugcug

SEQ ID NO: 3589905 - RNA, 17 nt, Human
ugugauggggcccugcc

SEQ ID NO: 3589906 - RNA, 19 nt, Human
ugugauggggcccugccuc

SEQ ID NO: 3589907 - RNA, 21 nt, Human
uuauagaagaaugcaugcuuu

SEQ ID NO: 3589908 - RNA, 16 nt, Human
uuauagaaguuuagau

SEQ ID NO: 3589909 - RNA, 21 nt, Human
uuauagaggcuagcuucugcu

SEQ ID NO: 3589910 - RNA, 23 nt, Human
uuauagaguguacuuaacuauuc

SEQ ID NO: 3589911 - RNA, 21 nt, Human
uuauagaucccccagacuuua

SEQ ID NO: 3589912 - RNA, 13 nt, Human
uuauagauucuaa

SEQ ID NO: 3589913 - RNA, 16 nt, Human
uuauagccgaaaugau

SEQ ID NO: 3589914 - RNA, 15 nt, Human
uuauagccucugucu

SEQ ID NO: 3589915 - RNA, 19 nt, Human
uuauagccucugucuggca

SEQ ID NO: 3589916 - RNA, 12 nt, Human
uuauagcucuaa

SEQ ID NO: 3589917 - RNA, 17 nt, Human
uuauagcucuaauguuu

SEQ ID NO: 3589918 - RNA, 16 nt, Human
uuauaggaucauuugu

SEQ ID NO: 3589919 - RNA, 22 nt, Human
uuauagguaaucaaugaauauu

SEQ ID NO: 3589920 - RNA, 14 nt, Human
uuauaggugagaaa

SEQ ID NO: 3589921 - RNA, 19 nt, Human
uuauagguggccucuccuu

SEQ ID NO: 3589922 - RNA, 16 nt, Human
uuauaguacugacaga

SEQ ID NO: 3589923 - RNA, 22 nt, Human
uuauagucauuuauuuuaaaaa

SEQ ID NO: 3589924 - RNA, 20 nt, Human
uuauagucuaagacuauaua

SEQ ID NO: 3589925 - RNA, 13 nt, Human
uuauagugcaaua

SEQ ID NO: 3589926 - RNA, 13 nt, Human
uuauaguggaaaa

SEQ ID NO: 3589927 - RNA, 16 nt, Human
uuauaguggaaaaaca

SEQ ID NO: 3589928 - RNA, 20 nt, Human
uuauagugguguuuuaaaga

SEQ ID NO: 3589929 - RNA, 13 nt, Human
uuauaguuacugu

SEQ ID NO: 3589930 - RNA, 14 nt, Human
uuauaguuacugug

SEQ ID NO: 3589931 - RNA, 15 nt, Human
uuauaguuuauacag

SEQ ID NO: 3589932 - RNA, 16 nt, Human
uuauaguuugggcuuc

SEQ ID NO: 3589933 - RNA, 14 nt, Human
uuauauaaaugcuu

SEQ ID NO: 3589934 - RNA, 13 nt, Human
uuauauaaaugua

SEQ ID NO: 3589935 - RNA, 18 nt, Human
uuauauaacuguauuuga

SEQ ID NO: 3589936 - RNA, 22 nt, Human
uuauauaacuguauuugaaaua

SEQ ID NO: 3589937 - RNA, 14 nt, Human
uuauauaaguauuc

SEQ ID NO: 3589938 - RNA, 21 nt, Human
uuauauaauaucuaaaguuau

SEQ ID NO: 3589939 - RNA, 12 nt, Human
uuauauaauugu

SEQ ID NO: 3589940 - RNA, 16 nt, Human
uuauauaauuguugaa

SEQ ID NO: 3589941 - RNA, 19 nt, Human
uuauauagauuauaacuug

SEQ ID NO: 3589942 - RNA, 19 nt, Human
uuauauagcaagacauuau

SEQ ID NO: 3589943 - RNA, 17 nt, Human
uuauauagcaucuggaa

SEQ ID NO: 3589944 - RNA, 13 nt, Human
uuauauagcuuga

SEQ ID NO: 3589945 - RNA, 12 nt, Human
uuauauauauaa

SEQ ID NO: 3589946 - RNA, 18 nt, Human
uuauauaucccugauaaa

SEQ ID NO: 3589947 - RNA, 19 nt, Human
uuauauaucccugauaaau

SEQ ID NO: 3589948 - RNA, 15 nt, Human
uuauauaugaaaacu

SEQ ID NO: 3589949 - RNA, 12 nt, Human
uuauauauguga

SEQ ID NO: 3589950 - RNA, 23 nt, Human
uuauauaugugaacauuuaucaa

SEQ ID NO: 3589951 - RNA, 16 nt, Human
uuauauauuauaugga

SEQ ID NO: 3589952 - RNA, 17 nt, Human
uuauauauuauauggaa

SEQ ID NO: 3589953 - RNA, 12 nt, Human
uuauaucaaagu

SEQ ID NO: 3589954 - RNA, 13 nt, Human
uuauaucaaagua

SEQ ID NO: 3589955 - RNA, 15 nt, Human
uuauaucaaaguauu

SEQ ID NO: 3589956 - RNA, 15 nt, Human
uuauaucagccugag

SEQ ID NO: 3589957 - RNA, 16 nt, Human
uuauaucagccugagu

SEQ ID NO: 3589958 - RNA, 19 nt, Human
uuauaucaguccucuuuca

SEQ ID NO: 3589959 - RNA, 15 nt, Human
uuauaucauauguau

SEQ ID NO: 3589960 - RNA, 21 nt, Human
uuauaucaucagcauaccuuu

SEQ ID NO: 3589961 - RNA, 17 nt, Human
uuauauccauuuuuauc

SEQ ID NO: 3589962 - RNA, 23 nt, Human
uuauaucuauauuuuacauaaau

SEQ ID NO: 3589963 - RNA, 23 nt, Human
uuauaucuccuuuguauucuguc

SEQ ID NO: 3589964 - RNA, 14 nt, Human
uuauaucugaggaa

SEQ ID NO: 3589965 - RNA, 20 nt, Human
uuauaucugaggaauucugu

SEQ ID NO: 3589966 - RNA, 13 nt, Human
uuauaucuguaug

SEQ ID NO: 3589967 - RNA, 21 nt, Human
uuauaugaacauacaaaugca

SEQ ID NO: 3589968 - RNA, 19 nt, Human
uuauaugaagaaaaucacu

SEQ ID NO: 3589969 - RNA, 20 nt, Human
uuauaugcuuuauuaauguu

SEQ ID NO: 3589970 - RNA, 19 nt, Human
uuauauggaaauauauauu

SEQ ID NO: 3589971 - RNA, 13 nt, Human
uuauauggaaauu

SEQ ID NO: 3589972 - RNA, 22 nt, Human
uuauauguacccucugaaauac

SEQ ID NO: 3589973 - RNA, 14 nt, Human
uuauauguaccgua

SEQ ID NO: 3589974 - RNA, 22 nt, Human
uuauauguauccaguacauuua

SEQ ID NO: 3589975 - RNA, 23 nt, Human
uuauauguauccaguacauuuaa

SEQ ID NO: 3589976 - RNA, 14 nt, Human
uuauauguaugugu

SEQ ID NO: 3589977 - RNA, 16 nt, Human
uuauauguauguguuu

SEQ ID NO: 3589978 - RNA, 17 nt, Human
uuauauguauguguuua

SEQ ID NO: 3589979 - RNA, 19 nt, Human
uuauauguauguguuuaga

SEQ ID NO: 3589980 - RNA, 21 nt, Human
uuauauguauguguuuagaau

SEQ ID NO: 3589981 - RNA, 16 nt, Human
uuauaugucaaagcag

SEQ ID NO: 3589982 - RNA, 14 nt, Human
uuauauguguugaa

SEQ ID NO: 3589983 - RNA, 19 nt, Human
uuauauguguugaaaacca

SEQ ID NO: 3589984 - RNA, 15 nt, Human
uuauauuaaaauaug

SEQ ID NO: 3589985 - RNA, 20 nt, Human
uuauauuaaaauauggcuau

SEQ ID NO: 3589986 - RNA, 16 nt, Human
uuauuucaauguaauu

SEQ ID NO: 3589987 - RNA, 18 nt, Human
uuauuucaauguaauuaa

SEQ ID NO: 3589988 - RNA, 20 nt, Human
uuauuucacuuuagaugcug

SEQ ID NO: 3589989 - RNA, 17 nt, Human
uuauuucagauuuugau

SEQ ID NO: 3589990 - RNA, 18 nt, Human
uuauuucagauuuugaua

SEQ ID NO: 3589991 - RNA, 18 nt, Human
uuauuucauaaacaacuu

SEQ ID NO: 3589992 - RNA, 19 nt, Human
uuauuuccaaauaaaauga

SEQ ID NO: 3589993 - RNA, 18 nt, Human
uuauuuccaguguucuau

SEQ ID NO: 3589994 - RNA, 21 nt, Human
uuauuuccaucaugucagagc

SEQ ID NO: 3589995 - RNA, 22 nt, Human
uuauuucccuacauuaaacaug

SEQ ID NO: 3589996 - RNA, 19 nt, Human
uuauuuccuaguucuguag

SEQ ID NO: 3589997 - RNA, 11 nt, Human
uuauuuccuau

SEQ ID NO: 3589998 - RNA, 17 nt, Human
uuauuuccuuuguccuu

SEQ ID NO: 3589999 - RNA, 14 nt, Human
uuauuucuaaaaua

SEQ ID NO: 3590000 - RNA, 18 nt, Human
uuauuucuagcuuuuuaa

SEQ ID NO: 3590001 - RNA, 18 nt, Human
uuauuucuaguccaaaau

SEQ ID NO: 3590002 - RNA, 22 nt, Human
uuauuucuaguccaaaauuaca

SEQ ID NO: 3590003 - RNA, 11 nt, Human
uuauuucugca

SEQ ID NO: 3590004 - RNA, 16 nt, Human
uuauuucugucauuca

SEQ ID NO: 3590005 - RNA, 22 nt, Human
uuauuugaaaacauauaaagca

SEQ ID NO: 3590006 - RNA, 14 nt, Human
uuauuugaaugacu

SEQ ID NO: 3590007 - RNA, 12 nt, Human
uuauuugagaag

SEQ ID NO: 3590008 - RNA, 18 nt, Human
uuauuugcagagacagga

SEQ ID NO: 3590009 - RNA, 21 nt, Human
uuauuugcagugcaguauaga

SEQ ID NO: 3590010 - RNA, 21 nt, Human
uuauuugcauguuauguuuaa

SEQ ID NO: 3590011 - RNA, 20 nt, Human
uuauuuggaaaggaaugcaa

SEQ ID NO: 3590012 - RNA, 18 nt, Human
uuauuugguucccuuccu

SEQ ID NO: 3590013 - RNA, 15 nt, Human
uuauuuguaaauuua

SEQ ID NO: 3590014 - RNA, 17 nt, Human
uuauuuguaauagaugu

SEQ ID NO: 3590015 - RNA, 14 nt, Human
uuauuuguacaguu

SEQ ID NO: 3590016 - RNA, 21 nt, Human
uuauuuguguaauagaaaacu

SEQ ID NO: 3590017 - RNA, 22 nt, Human
uuauuuguguuuuaauuuaaac

SEQ ID NO: 3590018 - RNA, 14 nt, Human
uuauuuguugagag

SEQ ID NO: 3590019 - RNA, 19 nt, Human
uuauuuguugagaguguga

SEQ ID NO: 3590020 - RNA, 17 nt, Human
uuauuuuaaaaaaugaa

SEQ ID NO: 3590021 - RNA, 17 nt, Human
uuauuuuaaacaaaaua

SEQ ID NO: 3590022 - RNA, 21 nt, Human
uuauuuuaaauuauaaggacu

SEQ ID NO: 3590023 - RNA, 12 nt, Human
uuauuuuaagac

SEQ ID NO: 3590024 - RNA, 19 nt, Human
uuauuuuaauaauguuuca

SEQ ID NO: 3590025 - RNA, 17 nt, Human
uuauuuuaaugugauga

SEQ ID NO: 3590026 - RNA, 17 nt, Human
uuauuuuaauucaguug

SEQ ID NO: 3590027 - RNA, 12 nt, Human
uuauuuuagcag

SEQ ID NO: 3590028 - RNA, 16 nt, Human
uuauuuuagcaguucu

SEQ ID NO: 3590029 - RNA, 13 nt, Human
uuauuuuauuaug

SEQ ID NO: 3590030 - RNA, 15 nt, Human
uuauuuuauuaugaa

SEQ ID NO: 3590031 - RNA, 17 nt, Human
uuauuuucaaaaccagg

SEQ ID NO: 3590032 - RNA, 15 nt, Human
uuauuuucaaguagc

SEQ ID NO: 3590033 - RNA, 12 nt, Human
uuauuuucacug

SEQ ID NO: 3590034 - RNA, 12 nt, Human
uuauuuucagua

SEQ ID NO: 3590035 - RNA, 12 nt, Human
uuauuuucauua

SEQ ID NO: 3590036 - RNA, 13 nt, Human
uuauuuuccaaaa

SEQ ID NO: 3590037 - RNA, 18 nt, Human
uuauuuuccccuaucauu

SEQ ID NO: 3590038 - RNA, 15 nt, Human
uuauuuuccucccca

SEQ ID NO: 3590039 - RNA, 12 nt, Human
uuauuuucuaca

SEQ ID NO: 3590040 - RNA, 19 nt, Human
uuauuuucuacguuucuuu

SEQ ID NO: 3590041 - RNA, 15 nt, Human
uuauuuucugucaga

SEQ ID NO: 3590042 - RNA, 20 nt, Human
uuauuuucuuuugaauuguu

SEQ ID NO: 3590043 - RNA, 22 nt, Human
uuauuuugaaaagcuucuuaau

SEQ ID NO: 3590044 - RNA, 21 nt, Human
uuauuuugagauguaaaaaga

SEQ ID NO: 3590045 - RNA, 12 nt, Human
uuauuuugcaac

SEQ ID NO: 3590046 - RNA, 22 nt, Human
uuauuuuggaaaauaaauuauu

SEQ ID NO: 3590047 - RNA, 15 nt, Human
uuauuuuggggucuc

SEQ ID NO: 3590048 - RNA, 13 nt, Human
uuauuuuguaauu

SEQ ID NO: 3590049 - RNA, 17 nt, Human
uuauuuuguaauuauga

SEQ ID NO: 3590050 - RNA, 14 nt, Human
uuauuuuguguaaa

SEQ ID NO: 3590051 - RNA, 17 nt, Human
uuauuuuguucauacau

SEQ ID NO: 3590052 - RNA, 16 nt, Human
uuauuuuuaagaaaga

SEQ ID NO: 3590053 - RNA, 14 nt, Human
uuauuuuuagaauu

SEQ ID NO: 3590054 - RNA, 22 nt, Human
uuauuuuuagaauuuugugaaa

SEQ ID NO: 3590055 - RNA, 17 nt, Human
uuauuuuuagacagagu

SEQ ID NO: 3590056 - RNA, 14 nt, Human
uuauuuuuauaauu

SEQ ID NO: 3590057 - RNA, 18 nt, Human
uuauuuuuauaauuguac

SEQ ID NO: 3590058 - RNA, 21 nt, Human
uuauuuuuauaauuguacaaa

SEQ ID NO: 3590059 - RNA, 15 nt, Human
uuauuuuuauacagu

SEQ ID NO: 3590060 - RNA, 16 nt, Human
uuauuuuuauacagua

SEQ ID NO: 3590061 - RNA, 20 nt, Human
uuauuuuuauacaguaguga

SEQ ID NO: 3590062 - RNA, 14 nt, Human
uuauuuuucauauu

SEQ ID NO: 3590063 - RNA, 22 nt, Human
uuauuuuucuaagguucucaua

SEQ ID NO: 3590064 - RNA, 23 nt, Human
uuauuuuuggcguggcugacuua

SEQ ID NO: 3590065 - RNA, 14 nt, Human
uuauuuuuuaauua

SEQ ID NO: 3590066 - RNA, 13 nt, Human
uuauuuuuuauug

SEQ ID NO: 3590067 - RNA, 13 nt, Human
uuauuuuuucaga

SEQ ID NO: 3590068 - RNA, 19 nt, Human
uuauuuuuucagaccgaaa

SEQ ID NO: 3590069 - RNA, 21 nt, Human
uuauuuuuuggacuucaaagc

SEQ ID NO: 3590070 - RNA, 17 nt, Human
uuauuuuuuuaaaauuu

SEQ ID NO: 3590071 - RNA, 19 nt, Human
uuauuuuuuuuaauuguau

SEQ ID NO: 3590072 - RNA, 18 nt, Human
uuauuuuuuuuuuuugaa

SEQ ID NO: 3590073 - RNA, 20 nt, Human
uuauuuuuuuuuuuugaaaa

SEQ ID NO: 3590074 - RNA, 17 nt, Human
uucaaaaaaacacuagu

SEQ ID NO: 3590075 - RNA, 18 nt, Human
uucaaaaaaauaaaauaa

SEQ ID NO: 3590076 - RNA, 17 nt, Human
uucaaaaacacaguguu

SEQ ID NO: 3590077 - RNA, 23 nt, Human
uucaaaaacacaguguuuuugua

SEQ ID NO: 3590078 - RNA, 14 nt, Human
uucaaaaacuguuu

SEQ ID NO: 3590079 - RNA, 21 nt, Human
uucaaaaagucacaguuaagg

SEQ ID NO: 3590080 - RNA, 14 nt, Human
uucaaaaaucugaa

SEQ ID NO: 3590081 - RNA, 17 nt, Human
uucaaaaauguacaaaa

SEQ ID NO: 3590082 - RNA, 21 nt, Human
uucaaaaauguacaaaauaaa

SEQ ID NO: 3590083 - RNA, 18 nt, Human
uucaaaacauugugccau

SEQ ID NO: 3590084 - RNA, 20 nt, Human
uucaaaaguauuuuccugua

SEQ ID NO: 3590085 - RNA, 12 nt, Human
uucaaaaguucc

SEQ ID NO: 3590086 - RNA, 16 nt, Human
uucaaaaguuccaaga

SEQ ID NO: 3590087 - RNA, 16 nt, Human
uucaaaaguugaaauu

SEQ ID NO: 3590088 - RNA, 20 nt, Human
uucaaaaguuuguuugcuua

SEQ ID NO: 3590089 - RNA, 20 nt, Human
uucaaaauaggguauauuuu

SEQ ID NO: 3590090 - RNA, 16 nt, Human
uucaaaauauguucuu

SEQ ID NO: 3590091 - RNA, 23 nt, Human
uucaaaauauugagcagaauuca

SEQ ID NO: 3590092 - RNA, 13 nt, Human
uucaaaaugauuu

SEQ ID NO: 3590093 - RNA, 17 nt, Human
uucaaaaugcuuuuuau

SEQ ID NO: 3590094 - RNA, 11 nt, Human
uucaaaauguc

SEQ ID NO: 3590095 - RNA, 14 nt, Human
uucaaaaugucugu

SEQ ID NO: 3590096 - RNA, 15 nt, Human
uucaaaauguuaucu

SEQ ID NO: 3590097 - RNA, 23 nt, Human
uucaaaauguuaucuucucaagu

SEQ ID NO: 3590098 - RNA, 19 nt, Human
uucaaacugugaagcauuu

SEQ ID NO: 3590099 - RNA, 17 nt, Human
uucaaacuuacuauuuu

SEQ ID NO: 3590100 - RNA, 15 nt, Human
uucaaagagaaaaca

SEQ ID NO: 3590101 - RNA, 18 nt, Human
uucaaagaugcugugagu

SEQ ID NO: 3590102 - RNA, 12 nt, Human
uucaaagcaauu

SEQ ID NO: 3590103 - RNA, 19 nt, Human
uucaaagcaccaaaauaag

SEQ ID NO: 3590104 - RNA, 23 nt, Human
uucaaagcauggacauuuagaag

SEQ ID NO: 3590105 - RNA, 17 nt, Human
uucaaagccuucucccu

SEQ ID NO: 3590106 - RNA, 12 nt, Human
uucaaagguucu

SEQ ID NO: 3590107 - RNA, 17 nt, Human
uucaaagucaugauguu

SEQ ID NO: 3590108 - RNA, 21 nt, Human
uucaaagucaugauguuuuua

SEQ ID NO: 3590109 - RNA, 19 nt, Human
uucaaagucucaaugaaau

SEQ ID NO: 3590110 - RNA, 15 nt, Human
uucaaaguugccuaa

SEQ ID NO: 3590111 - RNA, 16 nt, Human
uucaaaguuuuguugu

SEQ ID NO: 3590112 - RNA, 20 nt, Human
uucaaaguuuuguuguacuu

SEQ ID NO: 3590113 - RNA, 18 nt, Human
uucaaauagggucuaacu

SEQ ID NO: 3590114 - RNA, 23 nt, Human
uucaaauccuuccaaaaauuauu

SEQ ID NO: 3590115 - RNA, 17 nt, Human
uucaaauccuugaagau

SEQ ID NO: 3590116 - RNA, 17 nt, Human
uucaaauggaguuggag

SEQ ID NO: 3590117 - RNA, 19 nt, Human
uucaaaugggcugcugcuu

SEQ ID NO: 3590118 - RNA, 21 nt, Human
uucaaauguguuuugguccug

SEQ ID NO: 3590119 - RNA, 22 nt, Human
uucaaauuccuauuuuuaaaua

SEQ ID NO: 3590120 - RNA, 19 nt, Human
uucaaauucuucugaacuc

SEQ ID NO: 3590121 - RNA, 14 nt, Human
uucaaauugugugu

SEQ ID NO: 3590122 - RNA, 11 nt, Human
uucaaauuuag

SEQ ID NO: 3590123 - RNA, 22 nt, Human
uucaaauuugucugguuaaaaa

SEQ ID NO: 3590124 - RNA, 12 nt, Human
uucaacaaacau

SEQ ID NO: 3590125 - RNA, 20 nt, Human
uucaacaaacauuugcugaa

SEQ ID NO: 3590126 - RNA, 20 nt, Human
uucaacaaggcuugcugcag

SEQ ID NO: 3590127 - RNA, 19 nt, Human
uucaacagcaagugugaau

SEQ ID NO: 3590128 - RNA, 16 nt, Human
uucaacagugaagaca

SEQ ID NO: 3590129 - RNA, 14 nt, Human
uucaacauccugcc

SEQ ID NO: 3590130 - RNA, 17 nt, Human
uucaacauguuauuugu

SEQ ID NO: 3590131 - RNA, 19 nt, Human
uucaaccacuguaaaauga

SEQ ID NO: 3590132 - RNA, 14 nt, Human
uucaaccagauaac

SEQ ID NO: 3590133 - RNA, 14 nt, Human
uucaaccauggacu

SEQ ID NO: 3590134 - RNA, 16 nt, Human
uucaacgcagcccugc

SEQ ID NO: 3590135 - RNA, 19 nt, Human
uucaacgcagcccugcuuu

SEQ ID NO: 3590136 - RNA, 20 nt, Human
uucaacgcagcccugcuuug

SEQ ID NO: 3590137 - RNA, 18 nt, Human
uucaacguuucuucacuu

SEQ ID NO: 3590138 - RNA, 12 nt, Human
uucaacuauuuu

SEQ ID NO: 3590139 - RNA, 13 nt, Human
uucaacucagacu

SEQ ID NO: 3590140 - RNA, 14 nt, Human
uucaacugaaaaga

SEQ ID NO: 3590141 - RNA, 14 nt, Human
uucaacuuaacuau

SEQ ID NO: 3590142 - RNA, 19 nt, Human
uucaacuuauuaacaauua

SEQ ID NO: 3590143 - RNA, 15 nt, Human
uucaacuuugaauaa

SEQ ID NO: 3590144 - RNA, 19 nt, Human
uucaacuuugaauaaagaa

SEQ ID NO: 3590145 - RNA, 22 nt, Human
uucaacuuugaauaaagaauac

SEQ ID NO: 3590146 - RNA, 17 nt, Human
uucaagaaaaaauaaau

SEQ ID NO: 3590147 - RNA, 23 nt, Human
uucaagaaaaaauaaauggaaau

SEQ ID NO: 3590148 - RNA, 22 nt, Human
uucaagaaaacaacuucaauau

SEQ ID NO: 3590149 - RNA, 19 nt, Human
uucaagaaaaguaagcccu

SEQ ID NO: 3590150 - RNA, 20 nt, Human
uucaagaaacugaggaauuu

SEQ ID NO: 3590151 - RNA, 11 nt, Human
uucaagaaaug

SEQ ID NO: 3590152 - RNA, 14 nt, Human
uucaagaaaugaag

SEQ ID NO: 3590153 - RNA, 19 nt, Human
uucaagaaaugaagagcug

SEQ ID NO: 3590154 - RNA, 23 nt, Human
uucaagaaguccccucuccucca

SEQ ID NO: 3590155 - RNA, 23 nt, Human
uucaagaaugcaguacuaacauu

SEQ ID NO: 3590156 - RNA, 22 nt, Human
uucaagaggagcccccacccug

SEQ ID NO: 3590157 - RNA, 21 nt, Human
uucaagaucuaaaucauauau

SEQ ID NO: 3590158 - RNA, 11 nt, Human
uucaagauucc

SEQ ID NO: 3590159 - RNA, 14 nt, Human
uucaagcaauccuc

SEQ ID NO: 3590160 - RNA, 17 nt, Human
uucaagcacuuacagcu

SEQ ID NO: 3590161 - RNA, 22 nt, Human
uucaagcagucgugccuguguc

SEQ ID NO: 3590162 - RNA, 21 nt, Human
uucaagcgauucuccugccuc

SEQ ID NO: 3590163 - RNA, 20 nt, Human
uucaaggaacuugaaaaaua

SEQ ID NO: 3590164 - RNA, 11 nt, Human
uucaaggaagg

SEQ ID NO: 3590165 - RNA, 16 nt, Human
uucaaggaauuucuua

SEQ ID NO: 3590166 - RNA, 19 nt, Human
uucaaggauccugagccag

SEQ ID NO: 3590167 - RNA, 20 nt, Human
uucaaggcaucaugcagagu

SEQ ID NO: 3590168 - RNA, 16 nt, Human
uucaaggcuuccacug

SEQ ID NO: 3590169 - RNA, 16 nt, Human
uucaagguaaaauucu

SEQ ID NO: 3590170 - RNA, 20 nt, Human
uucaagguaaaauucuaaau

SEQ ID NO: 3590171 - RNA, 17 nt, Human
uucaaggucugcuuuuc

SEQ ID NO: 3590172 - RNA, 18 nt, Human
uucaagguggccaaauua

SEQ ID NO: 3590173 - RNA, 20 nt, Human
uucaagguggccaaauuauu

SEQ ID NO: 3590174 - RNA, 22 nt, Human
uucaagguggccaaauuauuug

SEQ ID NO: 3590175 - RNA, 15 nt, Human
uucaaguaauucugc

SEQ ID NO: 3590176 - RNA, 18 nt, Human
uucaaguaauucugcugu

SEQ ID NO: 3590177 - RNA, 21 nt, Human
uucaaguacuguaacuguguc

SEQ ID NO: 3590178 - RNA, 20 nt, Human
uucaaguagcugggauuuua

SEQ ID NO: 3590179 - RNA, 17 nt, Human
uucaagugaaucuaaaa

SEQ ID NO: 3590180 - RNA, 20 nt, Human
uucaagugauucucaugccu

SEQ ID NO: 3590181 - RNA, 21 nt, Human
uucaagugccuuucugcaguu

SEQ ID NO: 3590182 - RNA, 23 nt, Human
uucaauaaaaaaaagaaaugaaa

SEQ ID NO: 3590183 - RNA, 19 nt, Human
uucaauaaagcacugagca

SEQ ID NO: 3590184 - RNA, 16 nt, Human
uucaauaaagcauuua

SEQ ID NO: 3590185 - RNA, 18 nt, Human
uucaauaaagcauuuaua

SEQ ID NO: 3590186 - RNA, 12 nt, Human
uucaauaaagua

SEQ ID NO: 3590187 - RNA, 19 nt, Human
uucaauaaaguaucuacau

SEQ ID NO: 3590188 - RNA, 21 nt, Human
uucaauaaaguauuuaauuag

SEQ ID NO: 3590189 - RNA, 14 nt, Human
uucaauaaaguuug

SEQ ID NO: 3590190 - RNA, 15 nt, Human
uucaauaaaguuuga

SEQ ID NO: 3590191 - RNA, 12 nt, Human
uucaauaacugg

SEQ ID NO: 3590192 - RNA, 22 nt, Human
uucaauaacuggaacacucuau

SEQ ID NO: 3590193 - RNA, 16 nt, Human
uucaauaauaaauauu

SEQ ID NO: 3590194 - RNA, 13 nt, Human
uucaauacaaaca

SEQ ID NO: 3590195 - RNA, 23 nt, Human
uucaauacaaacaaucucuuaaa

SEQ ID NO: 3590196 - RNA, 18 nt, Human
uucaauaggaaaaacuga

SEQ ID NO: 3590197 - RNA, 22 nt, Human
uucaauaggaaaaacugauuuu

SEQ ID NO: 3590198 - RNA, 18 nt, Human
uucaauaguaauauaaua

SEQ ID NO: 3590199 - RNA, 18 nt, Human
uucaauauaagcuuuucu

SEQ ID NO: 3590200 - RNA, 19 nt, Human
uucaauauaagcuuuucuu

SEQ ID NO: 3590201 - RNA, 18 nt, Human
uucaauauauugaacuuu

SEQ ID NO: 3590202 - RNA, 19 nt, Human
uucaauauugacauuugua

SEQ ID NO: 3590203 - RNA, 21 nt, Human
uucaauauugacauuuguagu

SEQ ID NO: 3590204 - RNA, 22 nt, Human
uucaauauugacauuuguaguu

SEQ ID NO: 3590205 - RNA, 22 nt, Human
uucaauccuugaagguauaucu

SEQ ID NO: 3590206 - RNA, 20 nt, Human
uucaaucucccgcugcugcu

SEQ ID NO: 3590207 - RNA, 23 nt, Human
uucaaugaucuagguuuaacuca

SEQ ID NO: 3590208 - RNA, 16 nt, Human
uucaauggcugcugaa

SEQ ID NO: 3590209 - RNA, 23 nt, Human
uucaaugguuugcaaggaagcca

SEQ ID NO: 3590210 - RNA, 16 nt, Human
uucaauguaauuaaac

SEQ ID NO: 3590211 - RNA, 20 nt, Human
uucaauguuuuuaaaaaucu

SEQ ID NO: 3590212 - RNA, 11 nt, Human
uucaauuaaac

SEQ ID NO: 3590213 - RNA, 18 nt, Human
uucaauuaaacggauuau

SEQ ID NO: 3590214 - RNA, 14 nt, Human
uucaauuaaagaaa

SEQ ID NO: 3590215 - RNA, 21 nt, Human
uucaauuaauauuaauuuucu

SEQ ID NO: 3590216 - RNA, 14 nt, Human
uucaauuauuuccc

SEQ ID NO: 3590217 - RNA, 17 nt, Human
uucaauucaacacuccc

SEQ ID NO: 3590218 - RNA, 19 nt, Human
uucaauucagugcuguacu

SEQ ID NO: 3590219 - RNA, 15 nt, Human
uucaauugcaucucc

SEQ ID NO: 3590220 - RNA, 16 nt, Human
uucaauuuauugcaca

SEQ ID NO: 3590221 - RNA, 18 nt, Human
uucaauuuauugcacaaa

SEQ ID NO: 3590222 - RNA, 20 nt, Human
uucaauuuauugcacaaaau

SEQ ID NO: 3590223 - RNA, 17 nt, Human
uucaauuuccaagagcu

SEQ ID NO: 3590224 - RNA, 12 nt, Human
uucaauuuguuc

SEQ ID NO: 3590225 - RNA, 17 nt, Human
uucacaaacagaaaaca

SEQ ID NO: 3590226 - RNA, 15 nt, Human
uucacaaacuuuuau

SEQ ID NO: 3590227 - RNA, 18 nt, Human
uucacaaaguaauuugga

SEQ ID NO: 3590228 - RNA, 13 nt, Human
uucacaaauaaua

SEQ ID NO: 3590229 - RNA, 22 nt, Human
uucacaagacccaaaaggcaga

SEQ ID NO: 3590230 - RNA, 16 nt, Human
uucacaagcugccucc

SEQ ID NO: 3590231 - RNA, 17 nt, Human
uucacaagcugccuccc

SEQ ID NO: 3590232 - RNA, 20 nt, Human
uucacacacagacuguuguc

SEQ ID NO: 3590233 - RNA, 14 nt, Human
uucacacagauaga

SEQ ID NO: 3590234 - RNA, 17 nt, Human
uucacaccccaccugcg

SEQ ID NO: 3590235 - RNA, 19 nt, Human
uucacaccccaccugcgcu

SEQ ID NO: 3590236 - RNA, 18 nt, Human
uucacacgcuguucuaau

SEQ ID NO: 3590237 - RNA, 14 nt, Human
uucacacucucaca

SEQ ID NO: 3590238 - RNA, 22 nt, Human
uucacacucucacauguuuaga

SEQ ID NO: 3590239 - RNA, 13 nt, Human
uucacagaaaaua

SEQ ID NO: 3590240 - RNA, 21 nt, Human
uucacagagugugcuggagga

SEQ ID NO: 3590241 - RNA, 17 nt, Human
uucacagcuccucccac

SEQ ID NO: 3590242 - RNA, 20 nt, Human
uuaaaaaaaauccuucuaau

SEQ ID NO: 3590243 - RNA, 19 nt, Human
uuaaaaaaaggcauuguuu

SEQ ID NO: 3590244 - RNA, 12 nt, Human
uuaaaaaaauaa

SEQ ID NO: 3590245 - RNA, 18 nt, Human
uuaaaaaaauaaaacauu

SEQ ID NO: 3590246 - RNA, 19 nt, Human
uuaaaaaaauaaaacauuu

SEQ ID NO: 3590247 - RNA, 12 nt, Human
uuaaaaaaauca

SEQ ID NO: 3590248 - RNA, 21 nt, Human
uuaaaaaaauugguuggagaa

SEQ ID NO: 3590249 - RNA, 16 nt, Human
uuaaaaaaauuuaagu

SEQ ID NO: 3590250 - RNA, 11 nt, Human
uuaaaaaacaa

SEQ ID NO: 3590251 - RNA, 13 nt, Human
uuaaaaaacuaaa

SEQ ID NO: 3590252 - RNA, 13 nt, Human
uuaaaaaacuuca

SEQ ID NO: 3590253 - RNA, 13 nt, Human
uuaaaaaagauaa

SEQ ID NO: 3590254 - RNA, 17 nt, Human
uuaaaaaagauaaacac

SEQ ID NO: 3590255 - RNA, 23 nt, Human
uuaaaaaauaggugguagauauu

SEQ ID NO: 3590256 - RNA, 14 nt, Human
uuaaaaaauauuuu

SEQ ID NO: 3590257 - RNA, 16 nt, Human
uuaaaaaauauuuucu

SEQ ID NO: 3590258 - RNA, 12 nt, Human
uuaaaaaaugaa

SEQ ID NO: 3590259 - RNA, 12 nt, Human
uuaaaaaauguc

SEQ ID NO: 3590260 - RNA, 17 nt, Human
uuaaaaaauuuuugaaa

SEQ ID NO: 3590261 - RNA, 22 nt, Human
uuaaaaacaacgaaagaaggca

SEQ ID NO: 3590262 - RNA, 16 nt, Human
uuaaaaacauagaaaa

SEQ ID NO: 3590263 - RNA, 18 nt, Human
uuaaaaaccuguucaagu

SEQ ID NO: 3590264 - RNA, 17 nt, Human
uuaaaaagaaacaagau

SEQ ID NO: 3590265 - RNA, 14 nt, Human
uuaaaaagaaaucu

SEQ ID NO: 3590266 - RNA, 23 nt, Human
uuaaaaagauaaaaaaacagcuu

SEQ ID NO: 3590267 - RNA, 13 nt, Human
uuaaaaagauucu

SEQ ID NO: 3590268 - RNA, 13 nt, Human
uuaaaaagccagu

SEQ ID NO: 3590269 - RNA, 19 nt, Human
uuaaaaaggaacugcagca

SEQ ID NO: 3590270 - RNA, 20 nt, Human
uuaaaaaggcaguuugcaaa

SEQ ID NO: 3590271 - RNA, 22 nt, Human
uuaaaaaggcaguuugcaaaaa

SEQ ID NO: 3590272 - RNA, 14 nt, Human
uuaaaaagucuuca

SEQ ID NO: 3590273 - RNA, 20 nt, Human
uuaaaaaguuaaucuucaug

SEQ ID NO: 3590274 - RNA, 20 nt, Human
uuaaaaaguuauaaccaacu

SEQ ID NO: 3590275 - RNA, 15 nt, Human
uuaaaaauaagucaa

SEQ ID NO: 3590276 - RNA, 13 nt, Human
uuaaaaauauaaa

SEQ ID NO: 3590277 - RNA, 13 nt, Human
uuaaaaauaucaa

SEQ ID NO: 3590278 - RNA, 18 nt, Human
uuaaaaauaucaaauuaa

SEQ ID NO: 3590279 - RNA, 22 nt, Human
uuaaaaauauggaacuucuaau

SEQ ID NO: 3590280 - RNA, 12 nt, Human
uuaaaaaucaac

SEQ ID NO: 3590281 - RNA, 16 nt, Human
uuaaaaaucucaaauu

SEQ ID NO: 3590282 - RNA, 19 nt, Human
uuaaaaaucucaaauuucu

SEQ ID NO: 3590283 - RNA, 15 nt, Human
uuaaaaaugcaaauc

SEQ ID NO: 3590284 - RNA, 10 nt, Human
uuaaaaaugg

SEQ ID NO: 3590285 - RNA, 12 nt, Human
uuaaaaauggua

SEQ ID NO: 3590286 - RNA, 14 nt, Human
uuaaaaaugguaaa

SEQ ID NO: 3590287 - RNA, 22 nt, Human
uuaaaaaugguaaaauugcaug

SEQ ID NO: 3590288 - RNA, 19 nt, Human
uuaaaaaugguaucaaaau

SEQ ID NO: 3590289 - RNA, 20 nt, Human
uuaaaaaugguaucaaaauu

SEQ ID NO: 3590290 - RNA, 13 nt, Human
uuaaaaauguaaa

SEQ ID NO: 3590291 - RNA, 21 nt, Human
uuaaaaauguuaaaauguauu

SEQ ID NO: 3590292 - RNA, 15 nt, Human
uuaaaaauuuacuac

SEQ ID NO: 3590293 - RNA, 23 nt, Human
uuaaaaauuuacuacaauaugua

SEQ ID NO: 3590294 - RNA, 20 nt, Human
uuaaaacaagaaaguuuccc

SEQ ID NO: 3590295 - RNA, 20 nt, Human
uuaaaacaauauuguuucua

SEQ ID NO: 3590296 - RNA, 19 nt, Human
uuaaaacacguuuuaagga

SEQ ID NO: 3590297 - RNA, 20 nt, Human
uuaaaacacuucuguccugu

SEQ ID NO: 3590298 - RNA, 12 nt, Human
uuaaaacacuuu

SEQ ID NO: 3590299 - RNA, 21 nt, Human
uuaaaacagacacuggcaugg

SEQ ID NO: 3590300 - RNA, 22 nt, Human
uuaaaacaguauuuauuuugua

SEQ ID NO: 3590301 - RNA, 18 nt, Human
uuaaaacaucauuccuuu

SEQ ID NO: 3590302 - RNA, 14 nt, Human
uuaaaaccaaagag

SEQ ID NO: 3590303 - RNA, 21 nt, Human
uuaaaaccugcuuuucaaugu

SEQ ID NO: 3590304 - RNA, 14 nt, Human
uuaaaacucagccu

SEQ ID NO: 3590305 - RNA, 14 nt, Human
uuaaaacugaaguc

SEQ ID NO: 3590306 - RNA, 18 nt, Human
uuaaaacugaagucugaa

SEQ ID NO: 3590307 - RNA, 21 nt, Human
uuaaaacugaagucugaaauu

SEQ ID NO: 3590308 - RNA, 14 nt, Human
uuaaaacuggaccu

SEQ ID NO: 3590309 - RNA, 23 nt, Human
uuaaaacuuaaccgcaucagaag

SEQ ID NO: 3590310 - RNA, 14 nt, Human
uuaaaacuucaucu

SEQ ID NO: 3590311 - RNA, 14 nt, Human
uuaaaacuucuuaa

SEQ ID NO: 3590312 - RNA, 14 nt, Human
uuaaaagaaaaaau

SEQ ID NO: 3590313 - RNA, 18 nt, Human
uuaaaagaaaaaaugaca

SEQ ID NO: 3590314 - RNA, 22 nt, Human
uuaaaagaaaauaaaaaaaaga

SEQ ID NO: 3590315 - RNA, 20 nt, Human
uuaaaagaaaggguucugua

SEQ ID NO: 3590316 - RNA, 13 nt, Human
uuaaaagaaugac

SEQ ID NO: 3590317 - RNA, 13 nt, Human
uuaaaagaaugau

SEQ ID NO: 3590318 - RNA, 22 nt, Human
uuaaaagaaugggcaguuacau

SEQ ID NO: 3590319 - RNA, 14 nt, Human
uuaaaagacacugu

SEQ ID NO: 3590320 - RNA, 12 nt, Human
uuaaaagacuca

SEQ ID NO: 3590321 - RNA, 14 nt, Human
uuaaaagacucauc

SEQ ID NO: 3590322 - RNA, 18 nt, Human
uuaaaagauaaauauuau

SEQ ID NO: 3590323 - RNA, 17 nt, Human
uuaaaagauacaguuac

SEQ ID NO: 3590324 - RNA, 18 nt, Human
uuaaaagaugaaaauauu

SEQ ID NO: 3590325 - RNA, 21 nt, Human
uuaaaagaugcaauguagagg

SEQ ID NO: 3590326 - RNA, 22 nt, Human
uuaaaagaugcuuuuaacagag

SEQ ID NO: 3590327 - RNA, 13 nt, Human
uuaaaagauuuuu

SEQ ID NO: 3590328 - RNA, 14 nt, Human
uuaaaagcaaauca

SEQ ID NO: 3590329 - RNA, 18 nt, Human
uuaaaagcaaaucauuug

SEQ ID NO: 3590330 - RNA, 12 nt, Human
uuaaaagccauc

SEQ ID NO: 3590331 - RNA, 21 nt, Human
uuaaaagccuuggccucagag

SEQ ID NO: 3590332 - RNA, 18 nt, Human
uuaaaaguaaaaugucuu

SEQ ID NO: 3590333 - RNA, 16 nt, Human
uuaaaagugucaagcu

SEQ ID NO: 3590334 - RNA, 19 nt, Human
uuaaaaguuucaaugugau

SEQ ID NO: 3590335 - RNA, 15 nt, Human
uuaaaauaaaaugaa

SEQ ID NO: 3590336 - RNA, 20 nt, Human
uuaaaauaaaaugaaaauug

SEQ ID NO: 3590337 - RNA, 19 nt, Human
uuaaaauaaacaguuguga

SEQ ID NO: 3590338 - RNA, 20 nt, Human
uuaaaauaaacaguugugaa

SEQ ID NO: 3590339 - RNA, 14 nt, Human
uuaaaauaaauauu

SEQ ID NO: 3590340 - RNA, 13 nt, Human
uuaaaauacaaga

SEQ ID NO: 3590341 - RNA, 12 nt, Human
uuaaaauagaaa

SEQ ID NO: 3590342 - RNA, 22 nt, Human
uuaaaauagcaacacucuauau

SEQ ID NO: 3590343 - RNA, 21 nt, Human
uuaaaauagcguucuuguaau

SEQ ID NO: 3590344 - RNA, 23 nt, Human
uuaaaauaggggauauuuaaggu

SEQ ID NO: 3590345 - RNA, 12 nt, Human
uuaaaauauaau

SEQ ID NO: 3590346 - RNA, 22 nt, Human
uuaaaauauagauguguuuuau

SEQ ID NO: 3590347 - RNA, 14 nt, Human
uuaaaauaugcacu

SEQ ID NO: 3590348 - RNA, 15 nt, Human
uuaaaauaugcacua

SEQ ID NO: 3590349 - RNA, 19 nt, Human
uuaaaauauuccugcauuu

SEQ ID NO: 3590350 - RNA, 14 nt, Human
uuaaaauauuuuau

SEQ ID NO: 3590351 - RNA, 12 nt, Human
uuaaaaucacua

SEQ ID NO: 3590352 - RNA, 19 nt, Human
uuaaaaucacuaacauuau

SEQ ID NO: 3590353 - RNA, 21 nt, Human
uuaaaaucacuaacauuauau

SEQ ID NO: 3590354 - RNA, 13 nt, Human
uuaaaauccucaa

SEQ ID NO: 3590355 - RNA, 24 nt, Human
uuaaaaucuauucuguguugcauu

SEQ ID NO: 3590356 - RNA, 13 nt, Human
uuaaaaucuuauu

SEQ ID NO: 3590357 - RNA, 20 nt, Human
uuaaaaugcaauauuuguaa

SEQ ID NO: 3590358 - RNA, 23 nt, Human
uuaaaaugcaauauuuguaaggc

SEQ ID NO: 3590359 - RNA, 21 nt, Human
uuaaaaugcaugauugcagaa

SEQ ID NO: 3590360 - RNA, 17 nt, Human
uuaaaauguaaagccau

SEQ ID NO: 3590361 - RNA, 24 nt, Human
uuaaaauguaagauuauagauucu

SEQ ID NO: 3590362 - RNA, 22 nt, Human
uuaaaauguauaaguugaggca

SEQ ID NO: 3590363 - RNA, 14 nt, Human
uuaaaauguaugca

SEQ ID NO: 3590364 - RNA, 17 nt, Human
uuaaaaugugcaguaau

SEQ ID NO: 3590365 - RNA, 16 nt, Human
uuaaaauuacaacuaa

SEQ ID NO: 3590366 - RNA, 23 nt, Human
uuaaaauuaucaauaucuaauau

SEQ ID NO: 3590367 - RNA, 16 nt, Human
uuaaaauuaugaaucu

SEQ ID NO: 3590368 - RNA, 22 nt, Human
uuaaaauuaugaaucugauuuu

SEQ ID NO: 3590369 - RNA, 15 nt, Human
uuaaaauugcuaugu

SEQ ID NO: 3590370 - RNA, 13 nt, Human
uuaaaauugugau

SEQ ID NO: 3590371 - RNA, 18 nt, Human
uuaaaauugugauguguc

SEQ ID NO: 3590372 - RNA, 13 nt, Human
uuaaaauuuauau

SEQ ID NO: 3590373 - RNA, 13 nt, Human
uuaaaauuucaua

SEQ ID NO: 3590374 - RNA, 13 nt, Human
uuaaaauuugaaa

SEQ ID NO: 3590375 - RNA, 20 nt, Human
uuaaaauuuuguauguuaaa

SEQ ID NO: 3590376 - RNA, 16 nt, Human
uuaaacaaaccagaau

SEQ ID NO: 3590377 - RNA, 16 nt, Human
uuaaacaauaaagcaa

SEQ ID NO: 3590378 - RNA, 14 nt, Human
uuaaacacaaagug

SEQ ID NO: 3590379 - RNA, 12 nt, Human
uuaaacacacag

SEQ ID NO: 3590380 - RNA, 16 nt, Human
uuaaacagauuuuuac

SEQ ID NO: 3590381 - RNA, 16 nt, Human
uuaaacaggcccagca

SEQ ID NO: 3590382 - RNA, 13 nt, Human
uuaaacauaaaua

SEQ ID NO: 3590383 - RNA, 21 nt, Human
uuaaacaugcuguacauacuu

SEQ ID NO: 3590384 - RNA, 20 nt, Human
uuaaacauugguucuuguau

SEQ ID NO: 3590385 - RNA, 14 nt, Human
uuaaaccacuuaaa

SEQ ID NO: 3590386 - RNA, 19 nt, Human
uuaaaccagauuggagcaa

SEQ ID NO: 3590387 - RNA, 14 nt, Human
uuaaaccaucuccc

SEQ ID NO: 3590388 - RNA, 15 nt, Human
uuaaaccaucucccu

SEQ ID NO: 3590389 - RNA, 22 nt, Human
uuaaaccaugggauaaaugcca

SEQ ID NO: 3590390 - RNA, 17 nt, Human
uuaaaccgccaaggcug

SEQ ID NO: 3590391 - RNA, 18 nt, Human
uuaaaccucucuucuacc

SEQ ID NO: 3590392 - RNA, 21 nt, Human
uuaaaccugucuccacugugc

SEQ ID NO: 3590393 - RNA, 14 nt, Human
uuaaaccuuuuuug

SEQ ID NO: 3590394 - RNA, 18 nt, Human
uuaaacgauuuuuaaaau

SEQ ID NO: 3590395 - RNA, 21 nt, Human
uuaaacggauuauuuuuucag

SEQ ID NO: 3590396 - RNA, 22 nt, Human
uuaaacggauuauuuuuucaga

SEQ ID NO: 3590397 - RNA, 16 nt, Human
uuaaacguaugcaugu

SEQ ID NO: 3590398 - RNA, 20 nt, Human
uuaaacuaaggcccucuuga

SEQ ID NO: 3590399 - RNA, 15 nt, Human
uuaaacuacagguag

SEQ ID NO: 3590400 - RNA, 22 nt, Human
uuaaacuacauuagguugugaa

SEQ ID NO: 3590401 - RNA, 23 nt, Human
uuaaacuacauuagguugugaau

SEQ ID NO: 3590402 - RNA, 16 nt, Human
uuaaacuagaugaccu

SEQ ID NO: 3590403 - RNA, 20 nt, Human
uuaaacuagaugaccucauu

SEQ ID NO: 3590404 - RNA, 22 nt, Human
uuaaacuagcauaucugccuuu

SEQ ID NO: 3590405 - RNA, 13 nt, Human
uuaaacucaggga

SEQ ID NO: 3590406 - RNA, 22 nt, Human
uuaaacucagggacagagccau

SEQ ID NO: 3590407 - RNA, 19 nt, Human
uuaaacugguauuuuaucu

SEQ ID NO: 3590408 - RNA, 17 nt, Human
uuaaacuguacaguguc

SEQ ID NO: 3590409 - RNA, 21 nt, Human
uuaaacuguacagugucuuuu

SEQ ID NO: 3590410 - RNA, 16 nt, Human
uuaaacuuauaaauca

SEQ ID NO: 3590411 - RNA, 18 nt, Human
uuaaacuuccaaagaaag

SEQ ID NO: 3590412 - RNA, 15 nt, Human
uuaaacuucucugaa

SEQ ID NO: 3590413 - RNA, 17 nt, Human
uuaaacuugcaucacuu

SEQ ID NO: 3590414 - RNA, 18 nt, Human
uuaaagaaaaaaauguau

SEQ ID NO: 3590415 - RNA, 21 nt, Human
uuaaagaaaaaaauguauuuu

SEQ ID NO: 3590416 - RNA, 17 nt, Human
uuaaagaaaaaaauuga

SEQ ID NO: 3590417 - RNA, 11 nt, Human
uuaaagaaagu

SEQ ID NO: 3590418 - RNA, 12 nt, Human
uuaaagaaagug

SEQ ID NO: 3590419 - RNA, 13 nt, Human
uuaaagaagacau

SEQ ID NO: 3590420 - RNA, 19 nt, Human
uuaaagaaguaugggaaau

SEQ ID NO: 3590421 - RNA, 19 nt, Human
uuaaagaaguauuuuuaga

SEQ ID NO: 3590422 - RNA, 16 nt, Human
uuaaagaauaugaaac

SEQ ID NO: 3590423 - RNA, 17 nt, Human
uuaaagaaucauuauuu

SEQ ID NO: 3590424 - RNA, 14 nt, Human
uuaaagaauucaaa

SEQ ID NO: 3590425 - RNA, 20 nt, Human
uuaaagaauucaaauuuuau

SEQ ID NO: 3590426 - RNA, 17 nt, Human
uuaaagaauuucuuuau

SEQ ID NO: 3590427 - RNA, 21 nt, Human
uuaaagacaaagacaaauucu

SEQ ID NO: 3590428 - RNA, 11 nt, Human
uuaaagacaga

SEQ ID NO: 3590429 - RNA, 18 nt, Human
uuaaagacaggagacaaa

SEQ ID NO: 3590430 - RNA, 15 nt, Human
uuaaagagaaugagu

SEQ ID NO: 3590431 - RNA, 13 nt, Human
uuaaagagagguu

SEQ ID NO: 3590432 - RNA, 19 nt, Human
uuaaagauauuguucaaac

SEQ ID NO: 3590433 - RNA, 18 nt, Human
uuaaagaucaugacauau

SEQ ID NO: 3590434 - RNA, 22 nt, Human
uuaaagaucuguaaguaacuuc

SEQ ID NO: 3590435 - RNA, 16 nt, Human
uuaaagauguagcaaa

SEQ ID NO: 3590436 - RNA, 17 nt, Human
uuaaagcaaaaaaugaa

SEQ ID NO: 3590437 - RNA, 16 nt, Human
uuaaagcaagcaacac

SEQ ID NO: 3590438 - RNA, 21 nt, Human
uuaaagcagagggacuuugua

SEQ ID NO: 3590439 - RNA, 14 nt, Human
uuaaagcagucacu

SEQ ID NO: 3590440 - RNA, 22 nt, Human
uuaaagccacaaccacauacaa

SEQ ID NO: 3590441 - RNA, 12 nt, Human
uuaaagccaugu

SEQ ID NO: 3590442 - RNA, 14 nt, Human
uuaaagccauguuu

SEQ ID NO: 3590443 - RNA, 14 nt, Human
uuaaagccuccuca

SEQ ID NO: 3590444 - RNA, 18 nt, Human
uuaaagccuuuaguauca

SEQ ID NO: 3590445 - RNA, 22 nt, Human
uuaaagccuuuaguaucagugu

SEQ ID NO: 3590446 - RNA, 15 nt, Human
uuaaagcuuccauug

SEQ ID NO: 3590447 - RNA, 12 nt, Human
uuaaaggaaaaa

SEQ ID NO: 3590448 - RNA, 16 nt, Human
uuaaaggaaaaaaugu

SEQ ID NO: 3590449 - RNA, 20 nt, Human
uuaaaggaagguucuggugu

SEQ ID NO: 3590450 - RNA, 15 nt, Human
uuaaaggaagucagu

SEQ ID NO: 3590451 - RNA, 18 nt, Human
uuaaaggcaccaucuaau

SEQ ID NO: 3590452 - RNA, 18 nt, Human
uuaaaggcccagccccua

SEQ ID NO: 3590453 - RNA, 15 nt, Human
uuaaaggcuucucuc

SEQ ID NO: 3590454 - RNA, 17 nt, Human
uuaaaggcuucucucuc

SEQ ID NO: 3590455 - RNA, 13 nt, Human
uuaaagggaagaa

SEQ ID NO: 3590456 - RNA, 22 nt, Human
uuaaagggaagaaaacacuguu

SEQ ID NO: 3590457 - RNA, 21 nt, Human
uuaaaggggagaccucagaag

SEQ ID NO: 3590458 - RNA, 20 nt, Human
uuaaaguaauuguuccagag

SEQ ID NO: 3590459 - RNA, 20 nt, Human
uuaaaguaugcauuauuaaa

SEQ ID NO: 3590460 - RNA, 18 nt, Human
uuaaaguauguuauugca

SEQ ID NO: 3590461 - RNA, 14 nt, Human
uuaaaguauuuucu

SEQ ID NO: 3590462 - RNA, 13 nt, Human
uuaaagugaauug

SEQ ID NO: 3590463 - RNA, 17 nt, Human
uuaaagugauacugaaa

SEQ ID NO: 3590464 - RNA, 21 nt, Human
uuaaagugcuaagguucuaag

SEQ ID NO: 3590465 - RNA, 22 nt, Human
uuaaagugcuaagguucuaagg

SEQ ID NO: 3590466 - RNA, 20 nt, Human
uuaaaguguauuauaacagu

SEQ ID NO: 3590467 - RNA, 14 nt, Human
uuaaaguguuucag

SEQ ID NO: 3590468 - RNA, 13 nt, Human
uuaaaguugaauu

SEQ ID NO: 3590469 - RNA, 16 nt, Human
uuaaaguugaauuuau

SEQ ID NO: 3590470 - RNA, 12 nt, Human
uuaaaguuucaa

SEQ ID NO: 3590471 - RNA, 14 nt, Human
uuaaaguuucaaaa

SEQ ID NO: 3590472 - RNA, 20 nt, Human
uuaaaguuucaaaaaucuga

SEQ ID NO: 3590473 - RNA, 21 nt, Human
uuaaaguuucaaaaaucugaa

SEQ ID NO: 3590474 - RNA, 11 nt, Human
uuaaauaaaag

SEQ ID NO: 3590475 - RNA, 22 nt, Human
uuaaauaaaagaaaugcacaau

SEQ ID NO: 3590476 - RNA, 15 nt, Human
uuaaauaaaauaacc

SEQ ID NO: 3590477 - RNA, 14 nt, Human
uuaaauaaacuuuu

SEQ ID NO: 3590478 - RNA, 19 nt, Human
uuaaauaaaguaucaugca

SEQ ID NO: 3590479 - RNA, 13 nt, Human
uuaaauaaaucau

SEQ ID NO: 3590480 - RNA, 20 nt, Human
uuaauuucugccauuucaug

SEQ ID NO: 3590481 - RNA, 14 nt, Human
uuaauuucuucaaa

SEQ ID NO: 3590482 - RNA, 13 nt, Human
uuaauuugaaaua

SEQ ID NO: 3590483 - RNA, 18 nt, Human
uuaauuugaugaaagcug

SEQ ID NO: 3590484 - RNA, 15 nt, Human
uuaaauaaaucauaa

SEQ ID NO: 3590485 - RNA, 20 nt, Human
uuaaauaaaugucauuaaaa

SEQ ID NO: 3590486 - RNA, 21 nt, Human
uuaaauaaaugucauuaaaau

SEQ ID NO: 3590487 - RNA, 18 nt, Human
uuaaauaaauuguauauu

SEQ ID NO: 3590488 - RNA, 17 nt, Human
uuaaauaagaaacuuuu

SEQ ID NO: 3590489 - RNA, 15 nt, Human
uuaaauaagauucua

SEQ ID NO: 3590490 - RNA, 15 nt, Human
uuaaauaauauggcu

SEQ ID NO: 3590491 - RNA, 13 nt, Human
uuaaauaauguga

SEQ ID NO: 3590492 - RNA, 21 nt, Human
uuaaauaaugugaaacuggau

SEQ ID NO: 3590493 - RNA, 17 nt, Human
uuaaauacagacacuaa

SEQ ID NO: 3590494 - RNA, 19 nt, Human
uuaaauagaguauaugcac

SEQ ID NO: 3590495 - RNA, 18 nt, Human
uuaaauagaguuugcuau

SEQ ID NO: 3590496 - RNA, 14 nt, Human
uuaaauagaugaca

SEQ ID NO: 3590497 - RNA, 15 nt, Human
uuaaauagcuuuugu

SEQ ID NO: 3590498 - RNA, 18 nt, Human
uuaaauaggauauuaaca

SEQ ID NO: 3590499 - RNA, 15 nt, Human
uuaaauauaauaugc

SEQ ID NO: 3590500 - RNA, 12 nt, Human
uuaaauauaauu

SEQ ID NO: 3590501 - RNA, 17 nt, Human
uuaaauauaauucugua

SEQ ID NO: 3590502 - RNA, 17 nt, Human
uuaaauauagauuagaa

SEQ ID NO: 3590503 - RNA, 12 nt, Human
uuaaauauaguu

SEQ ID NO: 3590504 - RNA, 18 nt, Human
uuaaauauauguauguaa

SEQ ID NO: 3590505 - RNA, 13 nt, Human
uuaaauauauuuu

SEQ ID NO: 3590506 - RNA, 18 nt, Human
uuaaauaucaaucauuuu

SEQ ID NO: 3590507 - RNA, 17 nt, Human
uuaaauaucuuuuaugu

SEQ ID NO: 3590508 - RNA, 19 nt, Human
uuaaauaucuuuuauguuu

SEQ ID NO: 3590509 - RNA, 17 nt, Human
uuaaauauuuacauaug

SEQ ID NO: 3590510 - RNA, 18 nt, Human
uuaaauauuuucuauuuu

SEQ ID NO: 3590511 - RNA, 13 nt, Human
uuaaaucauuuua

SEQ ID NO: 3590512 - RNA, 18 nt, Human
uuaaaucauuuuaggaaa

SEQ ID NO: 3590513 - RNA, 21 nt, Human
uuaaaucauuuuaggaaagga

SEQ ID NO: 3590514 - RNA, 12 nt, Human
uuaaauccuguu

SEQ ID NO: 3590515 - RNA, 21 nt, Human
uuaaaucuaugaaguauauaa

SEQ ID NO: 3590516 - RNA, 18 nt, Human
uuaaaucuguuuuucuaa

SEQ ID NO: 3590517 - RNA, 15 nt, Human
uuaaaugaaagcaug

SEQ ID NO: 3590518 - RNA, 23 nt, Human
uuaaaugaaauuguaaaaccugu

SEQ ID NO: 3590519 - RNA, 13 nt, Human
uuaaaugcccagc

SEQ ID NO: 3590520 - RNA, 17 nt, Human
uuaaaugcccagccccu

SEQ ID NO: 3590521 - RNA, 18 nt, Human
uuaaaugcccagccccuu

SEQ ID NO: 3590522 - RNA, 12 nt, Human
uuaaaugcugcu

SEQ ID NO: 3590523 - RNA, 16 nt, Human
uuaaaugcuucauuug

SEQ ID NO: 3590524 - RNA, 20 nt, Human
uuaaauggaaaaaaugaugu

SEQ ID NO: 3590525 - RNA, 13 nt, Human
uuaaauggacaga

SEQ ID NO: 3590526 - RNA, 21 nt, Human
uuaaauguacagacauauuua

SEQ ID NO: 3590527 - RNA, 15 nt, Human
uuaaauguagaaagu

SEQ ID NO: 3590528 - RNA, 22 nt, Human
uuaaauguagcuucagucauua

SEQ ID NO: 3590529 - RNA, 20 nt, Human
uuaaaugucaaaugugaauu

SEQ ID NO: 3590530 - RNA, 19 nt, Human
uuaaaugucuuauauagca

SEQ ID NO: 3590531 - RNA, 14 nt, Human
uuaaauguuaugua

SEQ ID NO: 3590532 - RNA, 18 nt, Human
uuaaauguuuuguaaacu

SEQ ID NO: 3590533 - RNA, 20 nt, Human
uuaaauguuuuguaaacuuu

SEQ ID NO: 3590534 - RNA, 21 nt, Human
uuaaauguuuuguaaacuuug

SEQ ID NO: 3590535 - RNA, 12 nt, Human
uuaaauuaaaca

SEQ ID NO: 3590536 - RNA, 22 nt, Human
uuaaauuaauaucuuucugcac

SEQ ID NO: 3590537 - RNA, 17 nt, Human
uuaaauuaguuugugaa

SEQ ID NO: 3590538 - RNA, 13 nt, Human
uuaaauuauaagg

SEQ ID NO: 3590539 - RNA, 14 nt, Human
uuaaauuauaagga

SEQ ID NO: 3590540 - RNA, 15 nt, Human
uuaaauuauaaggac

SEQ ID NO: 3590541 - RNA, 17 nt, Human
uuaaauuauaaggacug

SEQ ID NO: 3590542 - RNA, 19 nt, Human
uuaaauuauaaggacugca

SEQ ID NO: 3590543 - RNA, 20 nt, Human
uuaaauuauaaggacugcau

SEQ ID NO: 3590544 - RNA, 21 nt, Human
uuaaauuauguuuuuauuaag

SEQ ID NO: 3590545 - RNA, 23 nt, Human
uuaaauucuccaguuuuuuguua

SEQ ID NO: 3590546 - RNA, 14 nt, Human
uuaaauucugagac

SEQ ID NO: 3590547 - RNA, 14 nt, Human
uuaaauugcucaca

SEQ ID NO: 3590548 - RNA, 15 nt, Human
uuaaauuuaaagaua

SEQ ID NO: 3590549 - RNA, 17 nt, Human
uuaaauuuguaaguuuc

SEQ ID NO: 3590550 - RNA, 19 nt, Human
uuaaauuuguugacaaaau

SEQ ID NO: 3590551 - RNA, 20 nt, Human
uuaaauuuuacccuuuagac

SEQ ID NO: 3590552 - RNA, 23 nt, Human
uuaaauuuuacccuuuagacugu

SEQ ID NO: 3590553 - RNA, 16 nt, Human
uuaaauuuucuucagu

SEQ ID NO: 3590554 - RNA, 20 nt, Human
uuaaauuuugaguucuacau

SEQ ID NO: 3590555 - RNA, 22 nt, Human
uuaaauuuuuuuguaugaaaac

SEQ ID NO: 3590556 - RNA, 16 nt, Human
uuaaauuuuuuuuaca

SEQ ID NO: 3590557 - RNA, 18 nt, Human
uuaaauuuuuuuuacauu

SEQ ID NO: 3590558 - RNA, 11 nt, Human
uuaacaaauaa

SEQ ID NO: 3590559 - RNA, 21 nt, Human
uuaacaaauaugcuaauuugg

SEQ ID NO: 3590560 - RNA, 18 nt, Human
uuaacaaauguaucacua

SEQ ID NO: 3590561 - RNA, 22 nt, Human
uuaacaacaauaacacugucuc

SEQ ID NO: 3590562 - RNA, 19 nt, Human
uuaacaacauguuuccagc

SEQ ID NO: 3590563 - RNA, 14 nt, Human
uuaacaagaacuuu

SEQ ID NO: 3590564 - RNA, 19 nt, Human
uuaacaagcucccaggccg

SEQ ID NO: 3590565 - RNA, 23 nt, Human
uuaacaauaacuacuguguuccu

SEQ ID NO: 3590566 - RNA, 18 nt, Human
uuaacaaugcgaauggua

SEQ ID NO: 3590567 - RNA, 23 nt, Human
uuaacaauuucuguccuucagau

SEQ ID NO: 3590568 - RNA, 17 nt, Human
uuaacacauuuuguaua

SEQ ID NO: 3590569 - RNA, 19 nt, Human
uuaacaccugauguguaca

SEQ ID NO: 3590570 - RNA, 20 nt, Human
uuaacaccugauguguacau

SEQ ID NO: 3590571 - RNA, 20 nt, Human
uuaacagaagggagggcaga

SEQ ID NO: 3590572 - RNA, 14 nt, Human
uuaacagagacaga

SEQ ID NO: 3590573 - RNA, 21 nt, Human
uuaacagagacagauaacucu

SEQ ID NO: 3590574 - RNA, 13 nt, Human
uuaacagagucug

SEQ ID NO: 3590575 - RNA, 23 nt, Human
uuaacaggcaaacauuuucucuu

SEQ ID NO: 3590576 - RNA, 22 nt, Human
uuaacagggucucuagugcugu

SEQ ID NO: 3590577 - RNA, 15 nt, Human
uuaacagucauuuaa

SEQ ID NO: 3590578 - RNA, 14 nt, Human
uuaacaguuuucca

SEQ ID NO: 3590579 - RNA, 20 nt, Human
uuaacaguuuuccaugaaaa

SEQ ID NO: 3590580 - RNA, 21 nt, Human
uuaacaguuuuccaugaaaac

SEQ ID NO: 3590581 - RNA, 13 nt, Human
uuaacauaagcua

SEQ ID NO: 3590582 - RNA, 15 nt, Human
uuaacauaagcuauu

SEQ ID NO: 3590583 - RNA, 22 nt, Human
uuaacauaccuaagaaguacau

SEQ ID NO: 3590584 - RNA, 17 nt, Human
uuaacauaguaaguuca

SEQ ID NO: 3590585 - RNA, 23 nt, Human
uuaacauaguaaguucagcacuu

SEQ ID NO: 3590586 - RNA, 18 nt, Human
uuaacauauaauauaugu

SEQ ID NO: 3590587 - RNA, 13 nt, Human
uuaacaucaguuu

SEQ ID NO: 3590588 - RNA, 13 nt, Human
uuaacaucuuuuu

SEQ ID NO: 3590589 - RNA, 18 nt, Human
uuaacauguuaaaccaug

SEQ ID NO: 3590590 - RNA, 13 nt, Human
uuaacauuauuua

SEQ ID NO: 3590591 - RNA, 15 nt, Human
uuaacauucauagag

SEQ ID NO: 3590592 - RNA, 14 nt, Human
uuaacauuccaaga

SEQ ID NO: 3590593 - RNA, 17 nt, Human
uuaacauuccaagacuc

SEQ ID NO: 3590594 - RNA, 19 nt, Human
uuaacauuccaagacucua

SEQ ID NO: 3590595 - RNA, 14 nt, Human
uuaacauugaccaa

SEQ ID NO: 3590596 - RNA, 19 nt, Human
uuaacauugaccaagaacu

SEQ ID NO: 3590597 - RNA, 23 nt, Human
uuaacauugaccaagaacugcau

SEQ ID NO: 3590598 - RNA, 15 nt, Human
uuaacauuucuaacu

SEQ ID NO: 3590599 - RNA, 23 nt, Human
uuaacauuugccuugcagaacug

SEQ ID NO: 3590600 - RNA, 22 nt, Human
uuaaccagucugaaguuucauu

SEQ ID NO: 3590601 - RNA, 13 nt, Human
uuaaccauugucu

SEQ ID NO: 3590602 - RNA, 19 nt, Human
uuaaccauugucuuguucu

SEQ ID NO: 3590603 - RNA, 18 nt, Human
uuaaccccgucaacaaau

SEQ ID NO: 3590604 - RNA, 21 nt, Human
uuaacccuucaucuuccugug

SEQ ID NO: 3590605 - RNA, 20 nt, Human
uuaaccgaugcuuuaccaaa

SEQ ID NO: 3590606 - RNA, 15 nt, Human
uuaaccuaccuguaa

SEQ ID NO: 3590607 - RNA, 20 nt, Human
uuaacgugggauucagagaa

SEQ ID NO: 3590608 - RNA, 20 nt, Human
uuaacuaaauuuuaaagcca

SEQ ID NO: 3590609 - RNA, 13 nt, Human
uuaacuacauuua

SEQ ID NO: 3590610 - RNA, 16 nt, Human
uuaacuacauuuauga

SEQ ID NO: 3590611 - RNA, 16 nt, Human
uuaacuacccuuaauu

SEQ ID NO: 3590612 - RNA, 12 nt, Human
uuaacuagaauu

SEQ ID NO: 3590613 - RNA, 21 nt, Human
uuaacuagaauuuauucaauu

SEQ ID NO: 3590614 - RNA, 15 nt, Human
uuaacuauaaauaug

SEQ ID NO: 3590615 - RNA, 15 nt, Human
uuaacuauguacaau

SEQ ID NO: 3590616 - RNA, 18 nt, Human
uuaacuauguacaauauu

SEQ ID NO: 3590617 - RNA, 14 nt, Human
uuaacuauugcauu

SEQ ID NO: 3590618 - RNA, 14 nt, Human
uuaacucaggacuc

SEQ ID NO: 3590619 - RNA, 19 nt, Human
uuaacucaggacuccagcc

SEQ ID NO: 3590620 - RNA, 12 nt, Human
uuaacucagucu

SEQ ID NO: 3590621 - RNA, 16 nt, Human
uuaacucauuagacug

SEQ ID NO: 3590622 - RNA, 13 nt, Human
uuaacucuacugu

SEQ ID NO: 3590623 - RNA, 17 nt, Human
uuaacucucuuuauguc

SEQ ID NO: 3590624 - RNA, 16 nt, Human
uuaacugaacaauggc

SEQ ID NO: 3590625 - RNA, 21 nt, Human
uuaacugaagauguugagaaa

SEQ ID NO: 3590626 - RNA, 20 nt, Human
uuaacugaauaccacucugu

SEQ ID NO: 3590627 - RNA, 22 nt, Human
uuaacugaauaccacucuguaa

SEQ ID NO: 3590628 - RNA, 20 nt, Human
uuaacugacaagcuccauuu

SEQ ID NO: 3590629 - RNA, 19 nt, Human
uuaacugccguaauuuaac

SEQ ID NO: 3590630 - RNA, 15 nt, Human
uuaacugcuuccuau

SEQ ID NO: 3590631 - RNA, 23 nt, Human
uuaacuggugcacuuuguaaauu

SEQ ID NO: 3590632 - RNA, 14 nt, Human
uuaacuuaguuuug

SEQ ID NO: 3590633 - RNA, 22 nt, Human
uuaacuucagagggaaaguaaa

SEQ ID NO: 3590634 - RNA, 16 nt, Human
uuaaucaauuaauuuu

SEQ ID NO: 3590635 - RNA, 17 nt, Human
uuaaucaauuaauuuuu

SEQ ID NO: 3590636 - RNA, 11 nt, Human
uuaaucacugu

SEQ ID NO: 3590637 - RNA, 13 nt, Human
uuaaucacugugu

SEQ ID NO: 3590638 - RNA, 15 nt, Human
uuaaucagaagaaaa

SEQ ID NO: 3590639 - RNA, 22 nt, Human
uuaaucaguucauuagaaauau

SEQ ID NO: 3590640 - RNA, 18 nt, Human
uuaaucauaguuacugug

SEQ ID NO: 3590641 - RNA, 19 nt, Human
uuaaucauaguuacugugu

SEQ ID NO: 3590642 - RNA, 15 nt, Human
uuaaucauauaaaua

SEQ ID NO: 3590643 - RNA, 17 nt, Human
uuaaucaugaaugugua

SEQ ID NO: 3590644 - RNA, 23 nt, Human
uuaaucauuaggugugacugaau

SEQ ID NO: 3590645 - RNA, 12 nt, Human
uuaauccaaugg

SEQ ID NO: 3590646 - RNA, 17 nt, Human
uuaauccacacaucagu

SEQ ID NO: 3590647 - RNA, 21 nt, Human
uuaauccaguuauaagaagaa

SEQ ID NO: 3590648 - RNA, 18 nt, Human
uuaauccccaguaaaauu

SEQ ID NO: 3590649 - RNA, 20 nt, Human
uuaauccuucuaguuuccca

SEQ ID NO: 3590650 - RNA, 23 nt, Human
uuaauccuuuguuuucugacuaa

SEQ ID NO: 3590651 - RNA, 21 nt, Human
uuaaucuacugcauuuaggga

SEQ ID NO: 3590652 - RNA, 15 nt, Human
uuaaucucuguuaug

SEQ ID NO: 3590653 - RNA, 22 nt, Human
uuaaucucuguuauguacugua

SEQ ID NO: 3590654 - RNA, 16 nt, Human
uuaaucugaaauucua

SEQ ID NO: 3590655 - RNA, 16 nt, Human
uuaaucuguauuuccc

SEQ ID NO: 3590656 - RNA, 20 nt, Human
uuaaucuguuuauuuacaag

SEQ ID NO: 3590657 - RNA, 16 nt, Human
uuaaucuuaguguaug

SEQ ID NO: 3590658 - RNA, 21 nt, Human
uuaaucuuaguguaugauuac

SEQ ID NO: 3590659 - RNA, 16 nt, Human
uuaaucuuggauagcu

SEQ ID NO: 3590660 - RNA, 17 nt, Human
uuaaucuuugaaagguu

SEQ ID NO: 3590661 - RNA, 18 nt, Human
uuaaucuuuucacaaaua

SEQ ID NO: 3590662 - RNA, 15 nt, Human
uuaaugaaaauaaga

SEQ ID NO: 3590663 - RNA, 14 nt, Human
uuaaugaaaauguc

SEQ ID NO: 3590664 - RNA, 16 nt, Human
uuaaugaaaaugucag

SEQ ID NO: 3590665 - RNA, 17 nt, Human
uuaaugaagaucuaaau

SEQ ID NO: 3590666 - RNA, 18 nt, Human
uuaaugaagaucuaaaua

SEQ ID NO: 3590667 - RNA, 14 nt, Human
uuaaugaaguuuga

SEQ ID NO: 3590668 - RNA, 17 nt, Human
uuaaugaaugcuuaaag

SEQ ID NO: 3590669 - RNA, 14 nt, Human
uuaaugacacuugu

SEQ ID NO: 3590670 - RNA, 19 nt, Human
uuaaugacacuugucccca

SEQ ID NO: 3590671 - RNA, 19 nt, Human
uuaaugacagagccagugg

SEQ ID NO: 3590672 - RNA, 21 nt, Human
uuaaugagacuuuaaaagcau

SEQ ID NO: 3590673 - RNA, 17 nt, Human
uuaaugauaaguaaaug

SEQ ID NO: 3590674 - RNA, 21 nt, Human
uuaaugauaaguaaaugcuag

SEQ ID NO: 3590675 - RNA, 14 nt, Human
uuaaugauuccuau

SEQ ID NO: 3590676 - RNA, 11 nt, Human
uuaaugcacuu

SEQ ID NO: 3590677 - RNA, 13 nt, Human
uuaaugcacuuuc

SEQ ID NO: 3590678 - RNA, 18 nt, Human
uuaaugcaucuagauuau

SEQ ID NO: 3590679 - RNA, 18 nt, Human
uuaaugcauuaaaccugu

SEQ ID NO: 3590680 - RNA, 19 nt, Human
uuaaugcauuaaaccuguc

SEQ ID NO: 3590681 - RNA, 19 nt, Human
uuaaugccugcuuuuugga

SEQ ID NO: 3590682 - RNA, 15 nt, Human
uuaaugccuuuaaag

SEQ ID NO: 3590683 - RNA, 17 nt, Human
uuaaugcuaaucuugug

SEQ ID NO: 3590684 - RNA, 16 nt, Human
uuaaugcugccuuuuc

SEQ ID NO: 3590685 - RNA, 13 nt, Human
uuaaugcuucauu

SEQ ID NO: 3590686 - RNA, 18 nt, Human
uuaaugcuuuuauauuuu

SEQ ID NO: 3590687 - RNA, 19 nt, Human
uuaauggacaugagauaau

SEQ ID NO: 3590688 - RNA, 21 nt, Human
uuaauggacuuauuucuucaa

SEQ ID NO: 3590689 - RNA, 16 nt, Human
uuaauggauuguuaau

SEQ ID NO: 3590690 - RNA, 20 nt, Human
uuaauggauuguuaauuuca

SEQ ID NO: 3590691 - RNA, 23 nt, Human
uuaauggcaaggcagcccugucu

SEQ ID NO: 3590692 - RNA, 14 nt, Human
uuaauggcacugau

SEQ ID NO: 3590693 - RNA, 22 nt, Human
uuaauggccggcuggaaaugcu

SEQ ID NO: 3590694 - RNA, 21 nt, Human
uuaauguauauaaaaauggcu

SEQ ID NO: 3590695 - RNA, 17 nt, Human
uuaauguaucaaacugu

SEQ ID NO: 3590696 - RNA, 17 nt, Human
uuaauguauguuaccaa

SEQ ID NO: 3590697 - RNA, 17 nt, Human
uuaauguauuuguucau

SEQ ID NO: 3590698 - RNA, 23 nt, Human
uuaauguauuuguucauguuugg

SEQ ID NO: 3590699 - RNA, 13 nt, Human
uuaaugugaugau

SEQ ID NO: 3590700 - RNA, 14 nt, Human
uuaaugugcugugu

SEQ ID NO: 3590701 - RNA, 16 nt, Human
uuaaugugcuguguaa

SEQ ID NO: 3590702 - RNA, 22 nt, Human
uuaaugugcuguguaaaguuag

SEQ ID NO: 3590703 - RNA, 14 nt, Human
uuaauguguaaaga

SEQ ID NO: 3590704 - RNA, 14 nt, Human
uuaauguugauuuc

SEQ ID NO: 3590705 - RNA, 15 nt, Human
uuaauguugauuucu

SEQ ID NO: 3590706 - RNA, 21 nt, Human
uuaauguugauuucuaguuau

SEQ ID NO: 3590707 - RNA, 17 nt, Human
uuaauguuuauuccuga

SEQ ID NO: 3590708 - RNA, 18 nt, Human
uuaauguuuuaaauguac

SEQ ID NO: 3590709 - RNA, 13 nt, Human
uuaauuaaaugca

SEQ ID NO: 3590710 - RNA, 22 nt, Human
uuaauuaaccccauaauuagau

SEQ ID NO: 3590711 - RNA, 16 nt, Human
uuaauuaagacugaaa

SEQ ID NO: 3590712 - RNA, 14 nt, Human
uuaauuaaguaaac

SEQ ID NO: 3590713 - RNA, 16 nt, Human
uuaauuaauuugauua

SEQ ID NO: 3590714 - RNA, 20 nt, Human
uuaauuaauuugauuaacaa

SEQ ID NO: 3590715 - RNA, 21 nt, Human
uuaauuaauuugauuaacaaa

SEQ ID NO: 3590716 - RNA, 21 nt, Human
uuaauuacucagcagaauggu

SEQ ID NO: 3590717 - RNA, 14 nt, Human
uuaauuacuuaaaa

SEQ ID NO: 3590718 - RNA, 19 nt, Human
uuaauuagccagugaaaaa

SEQ ID NO: 3590719 - RNA, 14 nt, Human
uuaauuaggaaaaa

SEQ ID NO: 3590720 - RNA, 19 nt, Human
uuaauuagggguugcuaag

SEQ ID NO: 3590721 - RNA, 18 nt, Human
uuaauuagguuaacuaug

SEQ ID NO: 3590722 - RNA, 13 nt, Human
uuaauuagugcua

SEQ ID NO: 3590723 - RNA, 20 nt, Human
uuaauuagugcuaaguguga

SEQ ID NO: 3590724 - RNA, 16 nt, Human
uuaauuauuaacuaca

SEQ ID NO: 3590725 - RNA, 14 nt, Human
uuaauuauuauuua

SEQ ID NO: 3590726 - RNA, 15 nt, Human
uuaauucaugaggag

SEQ ID NO: 3590727 - RNA, 13 nt, Human
uuaauucauguuu

SEQ ID NO: 3590728 - RNA, 22 nt, Human
uuaauuccaugaaucgcuucuc

SEQ ID NO: 3590729 - RNA, 15 nt, Human
uuaauuccuuuccag

SEQ ID NO: 3590730 - RNA, 12 nt, Human
uuaauucucuuu

SEQ ID NO: 3590731 - RNA, 22 nt, Human
uuaauucuguucugauauuaau

SEQ ID NO: 3590732 - RNA, 13 nt, Human
uuaauugaaaaga

SEQ ID NO: 3590733 - RNA, 21 nt, Human
uuaauugaaaagaaguagugu

SEQ ID NO: 3590734 - RNA, 20 nt, Human
uuaauugaaagaauguaaag

SEQ ID NO: 3590735 - RNA, 17 nt, Human
uuaauugauagaauaaa

SEQ ID NO: 3590736 - RNA, 12 nt, Human
uuaauugcugag

SEQ ID NO: 3590737 - RNA, 12 nt, Human
uuaauugcugca

SEQ ID NO: 3590738 - RNA, 13 nt, Human
uuaauugcugcaa

SEQ ID NO: 3590739 - RNA, 18 nt, Human
uuaauugggccagcuuuu

SEQ ID NO: 3590740 - RNA, 15 nt, Human
uuaauuguaaaguaa

SEQ ID NO: 3590741 - RNA, 14 nt, Human
uuaauuguaaucug

SEQ ID NO: 3590742 - RNA, 12 nt, Human
uuaauugucaug

SEQ ID NO: 3590743 - RNA, 14 nt, Human
uuaauugucauggu

SEQ ID NO: 3590744 - RNA, 15 nt, Human
uuaauuguucauuuu

SEQ ID NO: 3590745 - RNA, 13 nt, Human
uuaauuguuguuu

SEQ ID NO: 3590746 - RNA, 20 nt, Human
uuaauuguuguuucuuucua

SEQ ID NO: 3590747 - RNA, 12 nt, Human
uuaauuguuuaa

SEQ ID NO: 3590748 - RNA, 23 nt, Human
uuaauuuaaaugauuuaaauuua

SEQ ID NO: 3590749 - RNA, 13 nt, Human
uuaauuuaaguuu

SEQ ID NO: 3590750 - RNA, 16 nt, Human
uuaauuuaaguuuuga

SEQ ID NO: 3590751 - RNA, 14 nt, Human
uuaauuuacaaaaa

SEQ ID NO: 3590752 - RNA, 17 nt, Human
uuaauuuaguaaaccaa

SEQ ID NO: 3590753 - RNA, 14 nt, Human
uuaauuuaucagau

SEQ ID NO: 3590754 - RNA, 15 nt, Human
uuaauuuaucuaaau

SEQ ID NO: 3590755 - RNA, 17 nt, Human
uuaauuuaucuaaauua

SEQ ID NO: 3590756 - RNA, 15 nt, Human
uuaauuuaugaguuu

SEQ ID NO: 3590757 - RNA, 18 nt, Human
uuaauuuaugaguuuuug

SEQ ID NO: 3590758 - RNA, 20 nt, Human
uuaauuuaugaguuuuugau

SEQ ID NO: 3590759 - RNA, 14 nt, Human
uuaauuuauuauua

SEQ ID NO: 3590760 - RNA, 19 nt, Human
uuaauuuauuauugaaauu

SEQ ID NO: 3590761 - RNA, 14 nt, Human
uuaauuucaguaag

SEQ ID NO: 3590762 - RNA, 14 nt, Human
uuaauuucaguccu

SEQ ID NO: 3590763 - RNA, 18 nt, Human
uuaauuuccuuuuugaca

SEQ ID NO: 3590764 - RNA, 13 nt, Human
uuaauuucugcca

SEQ ID NO: 3590765 - RNA, 15 nt, Human
aauuggggauucuua

SEQ ID NO: 3590766 - RNA, 16 nt, Human
aauuggggauucuuaa

SEQ ID NO: 3590767 - RNA, 22 nt, Human
aauuggguggggggcuucauac

SEQ ID NO: 3590768 - RNA, 21 nt, Human
aauugguaaaacucacuguga

SEQ ID NO: 3590769 - RNA, 21 nt, Human
aauugguuggagaauuuaggu

SEQ ID NO: 3590770 - RNA, 15 nt, Human
aauuguaaacuguac

SEQ ID NO: 3590771 - RNA, 17 nt, Human
aauuguaaauugaauca

SEQ ID NO: 3590772 - RNA, 13 nt, Human
aauuguacaaaau

SEQ ID NO: 3590773 - RNA, 18 nt, Human
aauuguacaaaauuaagc

SEQ ID NO: 3590774 - RNA, 17 nt, Human
aauuguacuaaagccaa

SEQ ID NO: 3590775 - RNA, 13 nt, Human
aauuguauaacag

SEQ ID NO: 3590776 - RNA, 13 nt, Human
aauuguauagaga

SEQ ID NO: 3590777 - RNA, 16 nt, Human
aauuguauagagauau

SEQ ID NO: 3590778 - RNA, 23 nt, Human
aauuguauagagauaugcagaag

SEQ ID NO: 3590779 - RNA, 14 nt, Human
acucuccaaccugg

SEQ ID NO: 3590780 - RNA, 17 nt, Human
acucuccaaccuggaca

SEQ ID NO: 3590781 - RNA, 13 nt, Human
acucuccaucuua

SEQ ID NO: 3590782 - RNA, 22 nt, Human
acucuccauuuaauaauuauau

SEQ ID NO: 3590783 - RNA, 23 nt, Human
acucucccauggcuuaaugcuuc

SEQ ID NO: 3590784 - RNA, 12 nt, Human
acucuccccaca

SEQ ID NO: 3590785 - RNA, 15 nt, Human
acucuccccacacua

SEQ ID NO: 3590786 - RNA, 22 nt, Human
acucuccccacgagggcuggcu

SEQ ID NO: 3590787 - RNA, 12 nt, Human
acucuccuagag

SEQ ID NO: 3590788 - RNA, 13 nt, Human
acucuccuagaga

SEQ ID NO: 3590789 - RNA, 23 nt, Human
acucuccuagagacagaagcagg

SEQ ID NO: 3590790 - RNA, 15 nt, Human
acucuccuaugccuu

SEQ ID NO: 3590791 - RNA, 14 nt, Human
acucuccucaucuc

SEQ ID NO: 3590792 - RNA, 15 nt, Human
acucuccucaucucu

SEQ ID NO: 3590793 - RNA, 14 nt, Human
acucuccuccagag

SEQ ID NO: 3590794 - RNA, 22 nt, Human
acucuccucggcccccuccauc

SEQ ID NO: 3590795 - RNA, 14 nt, Human
acucuccucugccu

SEQ ID NO: 3590796 - RNA, 16 nt, Human
acucuccucugccuca

SEQ ID NO: 3590797 - RNA, 16 nt, Human
acucuccucugcugcu

SEQ ID NO: 3590798 - RNA, 17 nt, Human
acucuccucugcugcug

SEQ ID NO: 3590799 - RNA, 18 nt, Human
acucuccucugcugcugg

SEQ ID NO: 3590800 - RNA, 13 nt, Human
acucuccugcccc

SEQ ID NO: 3590801 - RNA, 23 nt, Human
acucuccugccuugaaaaagaca

SEQ ID NO: 3590802 - RNA, 11 nt, Human
acucuccuggg

SEQ ID NO: 3590803 - RNA, 16 nt, Human
acucuccuugcaguuc

SEQ ID NO: 3590804 - RNA, 15 nt, Human
acucuccuugguguc

SEQ ID NO: 3590805 - RNA, 17 nt, Human
acucucgcaucuuccca

SEQ ID NO: 3590806 - RNA, 19 nt, Human
acucucucuuguucuuacu

SEQ ID NO: 3590807 - RNA, 19 nt, Human
acucucugaaccccucccu

SEQ ID NO: 3590808 - RNA, 13 nt, Human
acucucuucccuu

SEQ ID NO: 3590809 - RNA, 16 nt, Human
acucucuucccuuucc

SEQ ID NO: 3590810 - RNA, 20 nt, Human
acucucuucccuuuccccag

SEQ ID NO: 3590811 - RNA, 21 nt, Human
acucucuucccuuuccccagc

SEQ ID NO: 3590812 - RNA, 13 nt, Human
acucucuucuucu

SEQ ID NO: 3590813 - RNA, 17 nt, Human
acucucuucuucucaua

SEQ ID NO: 3590814 - RNA, 9 nt, Human
acucugaac

SEQ ID NO: 3590815 - RNA, 16 nt, Human
acucugaacuuuggag

SEQ ID NO: 3590816 - RNA, 16 nt, Human
acucugaagccucugg

SEQ ID NO: 3590817 - RNA, 23 nt, Human
acucugaagcugacgaacuucca

SEQ ID NO: 3590818 - RNA, 23 nt, Human
acucugaauaagcacuuuuuaaa

SEQ ID NO: 3590819 - RNA, 18 nt, Human
acucugaauuuaucuuug

SEQ ID NO: 3590820 - RNA, 17 nt, Human
acucugacaacagacuu

SEQ ID NO: 3590821 - RNA, 22 nt, Human
acucugacaacagacuucugaa

SEQ ID NO: 3590822 - RNA, 22 nt, Human
acucugagacucgcgacaaugc

SEQ ID NO: 3590823 - RNA, 11 nt, Human
acucugagccc

SEQ ID NO: 3590824 - RNA, 12 nt, Human
acucugagccca

SEQ ID NO: 3590825 - RNA, 22 nt, Human
acucugagugcaaacuucagag

SEQ ID NO: 3590826 - RNA, 20 nt, Human
acucugaguguuuuaugaga

SEQ ID NO: 3590827 - RNA, 21 nt, Human
acucugaguguuuuaugagaa

SEQ ID NO: 3590828 - RNA, 14 nt, Human
acucugauagaauu

SEQ ID NO: 3590829 - RNA, 14 nt, Human
acucugauguaaau

SEQ ID NO: 3590830 - RNA, 17 nt, Human
acucugauguaaaugaa

SEQ ID NO: 3590831 - RNA, 18 nt, Human
acucugauguaaaugaag

SEQ ID NO: 3590832 - RNA, 14 nt, Human
acucugcacauacg

SEQ ID NO: 3590833 - RNA, 13 nt, Human
acucugcacaugu

SEQ ID NO: 3590834 - RNA, 19 nt, Human
acucugcacaugucuugua

SEQ ID NO: 3590835 - RNA, 23 nt, Human
acucugcacuacuccucugcagu

SEQ ID NO: 3590836 - RNA, 12 nt, Human
acucugcagccu

SEQ ID NO: 3590837 - RNA, 13 nt, Human
acucugcagccuc

SEQ ID NO: 3590838 - RNA, 20 nt, Human
acucugcauccagagauuca

SEQ ID NO: 3590839 - RNA, 16 nt, Human
acucugccacuuuauu

SEQ ID NO: 3590840 - RNA, 17 nt, Human
acucugccacuuuauuu

SEQ ID NO: 3590841 - RNA, 20 nt, Human
acucugccagggcagugcua

SEQ ID NO: 3590842 - RNA, 13 nt, Human
acucugccccccc

SEQ ID NO: 3590843 - RNA, 18 nt, Human
acucugcccccugcuggc

SEQ ID NO: 3590844 - RNA, 21 nt, Human
acucugcccccugcuggcucu

SEQ ID NO: 3590845 - RNA, 12 nt, Human
acucugccuccu

SEQ ID NO: 3590846 - RNA, 12 nt, Human
acucugccucug

SEQ ID NO: 3590847 - RNA, 14 nt, Human
acucugccugcccu

SEQ ID NO: 3590848 - RNA, 14 nt, Human
acucugcucuugca

SEQ ID NO: 3590849 - RNA, 9 nt, Human
acucugcug

SEQ ID NO: 3590850 - RNA, 14 nt, Human
acucugcugagggu

SEQ ID NO: 3590851 - RNA, 12 nt, Human
acucugcuucuc

SEQ ID NO: 3590852 - RNA, 15 nt, Human
acucugcuucucuga

SEQ ID NO: 3590853 - RNA, 20 nt, Human
acucugcuucucugacuucu

SEQ ID NO: 3590854 - RNA, 16 nt, Human
acucugcuugauuuuu

SEQ ID NO: 3590855 - RNA, 18 nt, Human
acucugcuugauuuuugc

SEQ ID NO: 3590856 - RNA, 13 nt, Human
acucugcuuguua

SEQ ID NO: 3590857 - RNA, 17 nt, Human
acucuggaaaaggcaua

SEQ ID NO: 3590858 - RNA, 23 nt, Human
acucuggacuuucucuaauaaua

SEQ ID NO: 3590859 - RNA, 21 nt, Human
acucuggagguuuguuuagaa

SEQ ID NO: 3590860 - RNA, 21 nt, Human
acucuggauucagccuucuuu

SEQ ID NO: 3590861 - RNA, 14 nt, Human
acucuggcagccac

SEQ ID NO: 3590862 - RNA, 15 nt, Human
acucuggcagccaca

SEQ ID NO: 3590863 - RNA, 16 nt, Human
acucuggcagcucaga

SEQ ID NO: 3590864 - RNA, 15 nt, Human
acucuggcccuggcc

SEQ ID NO: 3590865 - RNA, 12 nt, Human
acucuggccucu

SEQ ID NO: 3590866 - RNA, 13 nt, Human
acucuggccucug

SEQ ID NO: 3590867 - RNA, 12 nt, Human
acucuggcuggu

SEQ ID NO: 3590868 - RNA, 15 nt, Human
acucuggcuuggccu

SEQ ID NO: 3590869 - RNA, 22 nt, Human
acucuggcuuggccuaucuccu

SEQ ID NO: 3590870 - RNA, 13 nt, Human
acucugggaaaua

SEQ ID NO: 3590871 - RNA, 17 nt, Human
acucugggcugcuaccc

SEQ ID NO: 3590872 - RNA, 23 nt, Human
acucugggcuguaacguggcacu

SEQ ID NO: 3590873 - RNA, 17 nt, Human
acucugggguuuuuacu

SEQ ID NO: 3590874 - RNA, 17 nt, Human
acucuggugccuccaga

SEQ ID NO: 3590875 - RNA, 15 nt, Human
acucugguuucucau

SEQ ID NO: 3590876 - RNA, 13 nt, Human
acucuguaauugc

SEQ ID NO: 3590877 - RNA, 14 nt, Human
acucuguaauugca

SEQ ID NO: 3590878 - RNA, 15 nt, Human
acucuguaauugcaa

SEQ ID NO: 3590879 - RNA, 16 nt, Human
acucugucagauggga

SEQ ID NO: 3590880 - RNA, 11 nt, Human
acucuguccag

SEQ ID NO: 3590881 - RNA, 23 nt, Human
acucuguccugaaggccugaggu

SEQ ID NO: 3590882 - RNA, 19 nt, Human
acucugucgcccagucugg

SEQ ID NO: 3590883 - RNA, 21 nt, Human
acucugucuaaaaaacaaaac

SEQ ID NO: 3590884 - RNA, 20 nt, Human
acucugucucaguccaugaa

SEQ ID NO: 3590885 - RNA, 22 nt, Human
acucugucuucaccugauucaa

SEQ ID NO: 3590886 - RNA, 14 nt, Human
acucugugccagag

SEQ ID NO: 3590887 - RNA, 15 nt, Human
acucugugccagagc

SEQ ID NO: 3590888 - RNA, 13 nt, Human
acucugugcccau

SEQ ID NO: 3590889 - RNA, 21 nt, Human
acucugugcccaugggcacug

SEQ ID NO: 3590890 - RNA, 23 nt, Human
acucugugcccaugggcacugcu

SEQ ID NO: 3590891 - RNA, 20 nt, Human
acucugugccugaccuugag

SEQ ID NO: 3590892 - RNA, 15 nt, Human
acucugugcuggcca

SEQ ID NO: 3590893 - RNA, 16 nt, Human
acucuguggggccuug

SEQ ID NO: 3590894 - RNA, 17 nt, Human
acucuguggggccuugg

SEQ ID NO: 3590895 - RNA, 17 nt, Human
acucugugucccccguc

SEQ ID NO: 3590896 - RNA, 18 nt, Human
acucuguucauuccucca

SEQ ID NO: 3590897 - RNA, 16 nt, Human
acucuguuccuggcuc

SEQ ID NO: 3590898 - RNA, 13 nt, Human
acucuguuguacu

SEQ ID NO: 3590899 - RNA, 19 nt, Human
acucuguuguacuauggaa

SEQ ID NO: 3590900 - RNA, 21 nt, Human
acucuuaaaaauguuuuuuca

SEQ ID NO: 3590901 - RNA, 14 nt, Human
acucuuaaaaccca

SEQ ID NO: 3590902 - RNA, 12 nt, Human
acucuuaaagca

SEQ ID NO: 3590903 - RNA, 21 nt, Human
acucuuaagaagacugcauua

SEQ ID NO: 3590904 - RNA, 18 nt, Human
acucuuaaguuucucagc

SEQ ID NO: 3590905 - RNA, 17 nt, Human
acucuuauaucuauauu

SEQ ID NO: 3590906 - RNA, 12 nt, Human
acucuuaucuca

SEQ ID NO: 3590907 - RNA, 13 nt, Human
acucuuaucucag

SEQ ID NO: 3590908 - RNA, 16 nt, Human
acucuuauugcccacg

SEQ ID NO: 3590909 - RNA, 21 nt, Human
acucuuauugcccacgcugga

SEQ ID NO: 3590910 - RNA, 15 nt, Human
acucuucacucuuca

SEQ ID NO: 3590911 - RNA, 16 nt, Human
acucuucagagaaauc

SEQ ID NO: 3590912 - RNA, 20 nt, Human
acucuucccccacuccucuu

SEQ ID NO: 3590913 - RNA, 15 nt, Human
acucuucccucaaau

SEQ ID NO: 3590914 - RNA, 14 nt, Human
acucuucccucucu

SEQ ID NO: 3590915 - RNA, 23 nt, Human
acucuucccugaacuuccugcuu

SEQ ID NO: 3590916 - RNA, 21 nt, Human
acucuuccgaaaaauccucuu

SEQ ID NO: 3590917 - RNA, 22 nt, Human
acucuuccuauuuuuguaguga

SEQ ID NO: 3590918 - RNA, 18 nt, Human
acucuucuaugacccagc

SEQ ID NO: 3590919 - RNA, 17 nt, Human
acucuucucauuacuug

SEQ ID NO: 3590920 - RNA, 16 nt, Human
acucuucucucugcuc

SEQ ID NO: 3590921 - RNA, 19 nt, Human
acucuucuugauuaaaagu

SEQ ID NO: 3590922 - RNA, 19 nt, Human
acucuugaaaaaugcaugu

SEQ ID NO: 3590923 - RNA, 21 nt, Human
acucuugaaaaaugcauguug

SEQ ID NO: 3590924 - RNA, 15 nt, Human
acucuugaguuguuu

SEQ ID NO: 3590925 - RNA, 19 nt, Human
acucuugcuauugaauuga

SEQ ID NO: 3590926 - RNA, 14 nt, Human
acucuugcucuuuc

SEQ ID NO: 3590927 - RNA, 22 nt, Human
acucuuggagccugcagagcug

SEQ ID NO: 3590928 - RNA, 23 nt, Human
acucuuggagccugcagagcugc

SEQ ID NO: 3590929 - RNA, 13 nt, Human
acucuuguaagau

SEQ ID NO: 3590930 - RNA, 21 nt, Human
agcuauuuuccaggcuucugc

SEQ ID NO: 3590931 - RNA, 21 nt, Human
agcuauuuuuacuagaacaca

SEQ ID NO: 3590932 - RNA, 15 nt, Human
agcucaaaggcacag

SEQ ID NO: 3590933 - RNA, 14 nt, Human
agcucaaagguuug

SEQ ID NO: 3590934 - RNA, 21 nt, Human
agcucaaagguuuggaaggag

SEQ ID NO: 3590935 - RNA, 23 nt, Human
agcucaaagguuuggaaggagca

SEQ ID NO: 3590936 - RNA, 20 nt, Human
agcucaagcaggaaguucaa

SEQ ID NO: 3590937 - RNA, 19 nt, Human
agcucaagggacaaggaca

SEQ ID NO: 3590938 - RNA, 18 nt, Human
agcucaagucuucccuga

SEQ ID NO: 3590939 - RNA, 23 nt, Human
agcucaagucuucccugaucaag

SEQ ID NO: 3590940 - RNA, 12 nt, Human
agcucaaugagc

SEQ ID NO: 3590941 - RNA, 21 nt, Human
agcucacaauaaaaauggcuc

SEQ ID NO: 3590942 - RNA, 18 nt, Human
agcucacagugcugugug

SEQ ID NO: 3590943 - RNA, 23 nt, Human
agcucacaguuccucgcccuggg

SEQ ID NO: 3590944 - RNA, 13 nt, Human
agcucaccagccc

SEQ ID NO: 3590945 - RNA, 15 nt, Human
agcucaccagcccca

SEQ ID NO: 3590946 - RNA, 19 nt, Human
agcucaccagccccagugc

SEQ ID NO: 3590947 - RNA, 17 nt, Human
agcucacccaauaaaca

SEQ ID NO: 3590948 - RNA, 21 nt, Human
agcucacccaauaaacauuaa

SEQ ID NO: 3590949 - RNA, 15 nt, Human
agcucaccucucccu

SEQ ID NO: 3590950 - RNA, 19 nt, Human
agcucaccucucccuugga

SEQ ID NO: 3590951 - RNA, 16 nt, Human
agcucaccuguugcuu

SEQ ID NO: 3590952 - RNA, 22 nt, Human
agcucaccuguugcuuacaauu

SEQ ID NO: 3590953 - RNA, 23 nt, Human
agcucaccuguugcuuacaauuu

SEQ ID NO: 3590954 - RNA, 13 nt, Human
agcucacuacccu

SEQ ID NO: 3590955 - RNA, 17 nt, Human
agcucacugaaaagacu

SEQ ID NO: 3590956 - RNA, 18 nt, Human
agcucagaaaauaucccu

SEQ ID NO: 3590957 - RNA, 21 nt, Human
agcucagaaaauaucccuccu

SEQ ID NO: 3590958 - RNA, 23 nt, Human
agcucagaaggcucuucugacua

SEQ ID NO: 3590959 - RNA, 16 nt, Human
agcucagaauccaagu

SEQ ID NO: 3590960 - RNA, 17 nt, Human
agcucagacccccacuc

SEQ ID NO: 3590961 - RNA, 18 nt, Human
agcucagacccccacucu

SEQ ID NO: 3590962 - RNA, 14 nt, Human
agcucagagagggc

SEQ ID NO: 3590963 - RNA, 13 nt, Human
agcucagcacugc

SEQ ID NO: 3590964 - RNA, 22 nt, Human
agcucagccccgagcugucccc

SEQ ID NO: 3590965 - RNA, 23 nt, Human
agcucagcugcauuccgcagccc

SEQ ID NO: 3590966 - RNA, 22 nt, Human
agcucagcuuuuugucuuuucu

SEQ ID NO: 3590967 - RNA, 20 nt, Human
agcucaggaaccgaggcagg

SEQ ID NO: 3590968 - RNA, 13 nt, Human
agcucaggacaga

SEQ ID NO: 3590969 - RNA, 13 nt, Human
agcucaggaucuc

SEQ ID NO: 3590970 - RNA, 22 nt, Human
agcucaggaugagggaaaagaa

SEQ ID NO: 3590971 - RNA, 17 nt, Human
agcucagggccuggcuc

SEQ ID NO: 3590972 - RNA, 17 nt, Human
agcucaggggcagcuca

SEQ ID NO: 3590973 - RNA, 10 nt, Human
agcucaggug

SEQ ID NO: 3590974 - RNA, 16 nt, Human
agcucaggugggcgug

SEQ ID NO: 3590975 - RNA, 18 nt, Human
agcucaggugucccugca

SEQ ID NO: 3590976 - RNA, 21 nt, Human
agcucagucccaucagagagc

SEQ ID NO: 3590977 - RNA, 18 nt, Human
agcucagucuucccuagg

SEQ ID NO: 3590978 - RNA, 21 nt, Human
agcucagucuucccuagggcu

SEQ ID NO: 3590979 - RNA, 22 nt, Human
agcucagucuucccuagggcug

SEQ ID NO: 3590980 - RNA, 21 nt, Human
agcucaguucuagucucucug

SEQ ID NO: 3590981 - RNA, 14 nt, Human
agcucauauuuugu

SEQ ID NO: 3590982 - RNA, 15 nt, Human
agcucauauuuugua

SEQ ID NO: 3590983 - RNA, 20 nt, Human
agcucaucucagcuccugaa

SEQ ID NO: 3590984 - RNA, 14 nt, Human
agcucaucucuguc

SEQ ID NO: 3590985 - RNA, 22 nt, Human
agcucaugugcauuauuuucca

SEQ ID NO: 3590986 - RNA, 19 nt, Human
agcucauuaaacuuuuuua

SEQ ID NO: 3590987 - RNA, 16 nt, Human
agcucauucauuuuau

SEQ ID NO: 3590988 - RNA, 17 nt, Human
agcucauucauuuuaua

SEQ ID NO: 3590989 - RNA, 21 nt, Human
agcucauucuccuuguguuac

SEQ ID NO: 3590990 - RNA, 18 nt, Human
agcuccaagaauuucuag

SEQ ID NO: 3590991 - RNA, 20 nt, Human
agcuccaagaccuguugguu

SEQ ID NO: 3590992 - RNA, 23 nt, Human
agcuccacacccucucccaggac

SEQ ID NO: 3590993 - RNA, 11 nt, Human
agcuccacucu

SEQ ID NO: 3590994 - RNA, 12 nt, Human
agcuccacucug

SEQ ID NO: 3590995 - RNA, 13 nt, Human
agcuccacucugc

SEQ ID NO: 3590996 - RNA, 14 nt, Human
agcuccacucugcu

SEQ ID NO: 3590997 - RNA, 16 nt, Human
agcuccacucugcuuc

SEQ ID NO: 3590998 - RNA, 19 nt, Human
agcuccacucugcuucucu

SEQ ID NO: 3590999 - RNA, 22 nt, Human
agcuccacucugcuucucugac

SEQ ID NO: 3591000 - RNA, 18 nt, Human
agcuccacugucacccuc

SEQ ID NO: 3591001 - RNA, 23 nt, Human
agcuccacugucacccuccaccu

SEQ ID NO: 3591002 - RNA, 17 nt, Human
agcuccagacccccagc

SEQ ID NO: 3591003 - RNA, 18 nt, Human
agcuccagacccccagca

SEQ ID NO: 3591004 - RNA, 23 nt, Human
agcuccagacccccagcaacccu

SEQ ID NO: 3591005 - RNA, 13 nt, Human
agcuccagccuga

SEQ ID NO: 3591006 - RNA, 14 nt, Human
agcuccagccugac

SEQ ID NO: 3591007 - RNA, 15 nt, Human
agcuccagccugaca

SEQ ID NO: 3591008 - RNA, 23 nt, Human
agcuccaguggaagaagaaaaca

SEQ ID NO: 3591009 - RNA, 15 nt, Human
agcuccaguguccug

SEQ ID NO: 3591010 - RNA, 22 nt, Human
agcuccauacacacgcugccuu

SEQ ID NO: 3591011 - RNA, 16 nt, Human
agcuccaucuccacuc

SEQ ID NO: 3591012 - RNA, 21 nt, Human
agcuccaucuccacuccagau

SEQ ID NO: 3591013 - RNA, 20 nt, Human
agcucccaagggauggugcc

SEQ ID NO: 3591014 - RNA, 17 nt, Human
agcucccacaagccucu

SEQ ID NO: 3591015 - RNA, 18 nt, Human
agcucccacaagccucug

SEQ ID NO: 3591016 - RNA, 20 nt, Human
agcucccacaagccucugcc

SEQ ID NO: 3591017 - RNA, 19 nt, Human
agcucccacaagccugagg

SEQ ID NO: 3591018 - RNA, 17 nt, Human
agcucccacuucugcca

SEQ ID NO: 3591019 - RNA, 19 nt, Human
agcucccacuucugccaga

SEQ ID NO: 3591020 - RNA, 23 nt, Human
agcucccaggcauuccccaggag

SEQ ID NO: 3591021 - RNA, 15 nt, Human
agcucccaggugcag

SEQ ID NO: 3591022 - RNA, 22 nt, Human
agcucccaggugcagccagagg

SEQ ID NO: 3591023 - RNA, 20 nt, Human
agcucccauucuauguguca

SEQ ID NO: 3591024 - RNA, 18 nt, Human
agcucccauuucuacucu

SEQ ID NO: 3591025 - RNA, 22 nt, Human
agcuccccaaaaaccucacccg

SEQ ID NO: 3591026 - RNA, 17 nt, Human
agcuccccaccacccca

SEQ ID NO: 3591027 - RNA, 13 nt, Human
agcuccccagagu

SEQ ID NO: 3591028 - RNA, 19 nt, Human
agcucccccagcaaagccc

SEQ ID NO: 3591029 - RNA, 14 nt, Human
agcucccccagcuc

SEQ ID NO: 3591030 - RNA, 23 nt, Human
agcucccccgggaggggcccgcu

SEQ ID NO: 3591031 - RNA, 15 nt, Human
agcucccccucccuc

SEQ ID NO: 3591032 - RNA, 15 nt, Human
agcucccccuguccc

SEQ ID NO: 3591033 - RNA, 17 nt, Human
agcucccccuguccccu

SEQ ID NO: 3591034 - RNA, 23 nt, Human
agcucccccuguccccucagcuc

SEQ ID NO: 3591035 - RNA, 20 nt, Human
agcuccccgcuucugccugc

SEQ ID NO: 3591036 - RNA, 13 nt, Human
agcuccccuccuc

SEQ ID NO: 3591037 - RNA, 20 nt, Human
agcuccccucggagaagagc

SEQ ID NO: 3591038 - RNA, 20 nt, Human
agcucccucaaagaggcagu

SEQ ID NO: 3591039 - RNA, 12 nt, Human
agcucccugcca

SEQ ID NO: 3591040 - RNA, 13 nt, Human
agcucccugccaa

SEQ ID NO: 3591041 - RNA, 16 nt, Human
agcucccuggcuucug

SEQ ID NO: 3591042 - RNA, 13 nt, Human
agcucccuucucu

SEQ ID NO: 3591043 - RNA, 15 nt, Human
agcuccgcaggacuu

SEQ ID NO: 3591044 - RNA, 23 nt, Human
agcuccgcuuucuacccagcgag

SEQ ID NO: 3591045 - RNA, 14 nt, Human
agcuccguggagca

SEQ ID NO: 3591046 - RNA, 15 nt, Human
agcuccuagcagaga

SEQ ID NO: 3591047 - RNA, 15 nt, Human
agcuccucacugugg

SEQ ID NO: 3591048 - RNA, 15 nt, Human
agcugacaucuugaa

SEQ ID NO: 3591049 - RNA, 12 nt, Human
agcugacaugga

SEQ ID NO: 3591050 - RNA, 14 nt, Human
agcugacauggaaa

SEQ ID NO: 3591051 - RNA, 22 nt, Human
agcugaccagccgugagcaugu

SEQ ID NO: 3591052 - RNA, 17 nt, Human
agcugaccucuguuguc

SEQ ID NO: 3591053 - RNA, 15 nt, Human
agcugacgaggcugg

SEQ ID NO: 3591054 - RNA, 19 nt, Human
agcugacuuggcuggugug

SEQ ID NO: 3591055 - RNA, 15 nt, Human
agcugacuuuucugu

SEQ ID NO: 3591056 - RNA, 16 nt, Human
agcugagaacuccuga

SEQ ID NO: 3591057 - RNA, 18 nt, Human
agcugagaacuccugacu

SEQ ID NO: 3591058 - RNA, 18 nt, Human
agcugagaauagaaggaa

SEQ ID NO: 3591059 - RNA, 20 nt, Human
agcugagaauagaaggaaac

SEQ ID NO: 3591060 - RNA, 23 nt, Human
agcugagaauagaaggaaacuag

SEQ ID NO: 3591061 - RNA, 21 nt, Human
agcugagaucgugccacugca

SEQ ID NO: 3591062 - RNA, 20 nt, Human
agcugagcacccagcucugu

SEQ ID NO: 3591063 - RNA, 15 nt, Human
agcugagcaggccac

SEQ ID NO: 3591064 - RNA, 13 nt, Human
agcugagccaggc

SEQ ID NO: 3591065 - RNA, 20 nt, Human
agcugagcucacaaggcagc

SEQ ID NO: 3591066 - RNA, 21 nt, Human
agcugagcucacaaggcagca

SEQ ID NO: 3591067 - RNA, 15 nt, Human
agcugaggcagcagu

SEQ ID NO: 3591068 - RNA, 17 nt, Human
agcugaggccacacuca

SEQ ID NO: 3591069 - RNA, 21 nt, Human
agcugaggccacacucagcac

SEQ ID NO: 3591070 - RNA, 22 nt, Human
agcugaggggggccgugcccag

SEQ ID NO: 3591071 - RNA, 23 nt, Human
agcugaggucucuugagggagcu

SEQ ID NO: 3591072 - RNA, 12 nt, Human
agcugaggugcc

SEQ ID NO: 3591073 - RNA, 19 nt, Human
agcugaggugcccaggaga

SEQ ID NO: 3591074 - RNA, 19 nt, Human
agcugaguauuaaaaugua

SEQ ID NO: 3591075 - RNA, 22 nt, Human
agcugaguauuaaaauguaugc

SEQ ID NO: 3591076 - RNA, 20 nt, Human
agcugagucucccuaaggca

SEQ ID NO: 3591077 - RNA, 15 nt, Human
agcugagugagcuga

SEQ ID NO: 3591078 - RNA, 16 nt, Human
agcugaguuguugugg

SEQ ID NO: 3591079 - RNA, 13 nt, Human
agcugaguuuccu

SEQ ID NO: 3591080 - RNA, 20 nt, Human
agcugauacuucauuuaaaa

SEQ ID NO: 3591081 - RNA, 14 nt, Human
agcugauauaaauu

SEQ ID NO: 3591082 - RNA, 15 nt, Human
agcugauauaaauuc

SEQ ID NO: 3591083 - RNA, 16 nt, Human
agcugauauaaauucu

SEQ ID NO: 3591084 - RNA, 18 nt, Human
agcugauauaaauucugu

SEQ ID NO: 3591085 - RNA, 12 nt, Human
agcugaugaaac

SEQ ID NO: 3591086 - RNA, 20 nt, Human
agcugaugaacuuauucugu

SEQ ID NO: 3591087 - RNA, 22 nt, Human
agcugaugacucaagauuccca

SEQ ID NO: 3591088 - RNA, 17 nt, Human
agcugauggagaaggaa

SEQ ID NO: 3591089 - RNA, 16 nt, Human
agcugauuaaaugaca

SEQ ID NO: 3591090 - RNA, 22 nt, Human
agcugauuacugucaauaaaca

SEQ ID NO: 3591091 - RNA, 19 nt, Human
agcugauuuuaacaauaac

SEQ ID NO: 3591092 - RNA, 18 nt, Human
agcugcaaaaauaaucau

SEQ ID NO: 3591093 - RNA, 13 nt, Human
agcugcaaaggac

SEQ ID NO: 3591094 - RNA, 15 nt, Human
agcugcaaaggacag

SEQ ID NO: 3591095 - RNA, 17 nt, Human
agaaaauauauguauuu

SEQ ID NO: 3591096 - RNA, 23 nt, Human
agaaaauauauguauuuuuauau

SEQ ID NO: 3591097 - RNA, 19 nt, Human
agaaaauauuuugucuaaa

SEQ ID NO: 3591098 - RNA, 17 nt, Human
agaaaaucaucaagaag

SEQ ID NO: 3591099 - RNA, 16 nt, Human
agaaaaugaaaaacaa

SEQ ID NO: 3591100 - RNA, 17 nt, Human
agaaaaugaaaugcaua

SEQ ID NO: 3591101 - RNA, 16 nt, Human
agaaaauguugagaau

SEQ ID NO: 3591102 - RNA, 22 nt, Human
agaaaauuaagggccgauuuaa

SEQ ID NO: 3591103 - RNA, 15 nt, Human
agaaaauucaauugu

SEQ ID NO: 3591104 - RNA, 18 nt, Human
agaaaauucaauuguaaa

SEQ ID NO: 3591105 - RNA, 15 nt, Human
agaaaauuccuauaa

SEQ ID NO: 3591106 - RNA, 22 nt, Human
agaaaauuccuauaaggaagau

SEQ ID NO: 3591107 - RNA, 23 nt, Human
agaaaauucugugccuuguuuuu

SEQ ID NO: 3591108 - RNA, 14 nt, Human
agaaaauugaauuu

SEQ ID NO: 3591109 - RNA, 19 nt, Human
agaaaauugaauuuaacaa

SEQ ID NO: 3591110 - RNA, 13 nt, Human
agaaaauugaguu

SEQ ID NO: 3591111 - RNA, 22 nt, Human
agaaaauugaguugcacuuauu

SEQ ID NO: 3591112 - RNA, 18 nt, Human
agaaaauugcugugccuc

SEQ ID NO: 3591113 - RNA, 22 nt, Human
agaaaauuuuuguaguagcguu

SEQ ID NO: 3591114 - RNA, 15 nt, Human
agaaacaaacaaaag

SEQ ID NO: 3591115 - RNA, 13 nt, Human
agaaacaaagaug

SEQ ID NO: 3591116 - RNA, 17 nt, Human
agaaacaaagauguuau

SEQ ID NO: 3591117 - RNA, 15 nt, Human
agaaacaauaaagag

SEQ ID NO: 3591118 - RNA, 16 nt, Human
agaaacaauaaagaga

SEQ ID NO: 3591119 - RNA, 15 nt, Human
agaaacaauuucugu

SEQ ID NO: 3591120 - RNA, 16 nt, Human
agaaacacaacuauau

SEQ ID NO: 3591121 - RNA, 22 nt, Human
agaaacacacugaggcagggaa

SEQ ID NO: 3591122 - RNA, 18 nt, Human
agaaacacccacaggcau

SEQ ID NO: 3591123 - RNA, 20 nt, Human
agaaacaccuagaucagaac

SEQ ID NO: 3591124 - RNA, 23 nt, Human
agaaacacguaucccaccugaca

SEQ ID NO: 3591125 - RNA, 11 nt, Human
agaaacacuga

SEQ ID NO: 3591126 - RNA, 16 nt, Human
agaaacacugaaaaga

SEQ ID NO: 3591127 - RNA, 15 nt, Human
agaaacacugccuuu

SEQ ID NO: 3591128 - RNA, 15 nt, Human
agaaacacuuucucu

SEQ ID NO: 3591129 - RNA, 15 nt, Human
agaaacagauaccau

SEQ ID NO: 3591130 - RNA, 11 nt, Human
agaaacagcuu

SEQ ID NO: 3591131 - RNA, 15 nt, Human
agaaacagcuuucaa

SEQ ID NO: 3591132 - RNA, 16 nt, Human
agaaacagcuuucaag

SEQ ID NO: 3591133 - RNA, 20 nt, Human
agaaacagcuuucaagugcc

SEQ ID NO: 3591134 - RNA, 17 nt, Human
agaaacaguugguaacu

SEQ ID NO: 3591135 - RNA, 18 nt, Human
agaaacaguugguaacuu

SEQ ID NO: 3591136 - RNA, 17 nt, Human
agaaacauaaauaaaau

SEQ ID NO: 3591137 - RNA, 16 nt, Human
agaaacaucaguuacu

SEQ ID NO: 3591138 - RNA, 21 nt, Human
agaaacaucaguuacucugaa

SEQ ID NO: 3591139 - RNA, 23 nt, Human
agaaacaucaguuacucugaagg

SEQ ID NO: 3591140 - RNA, 15 nt, Human
agaaacaugacacug

SEQ ID NO: 3591141 - RNA, 14 nt, Human
agaaacauugaaga

SEQ ID NO: 3591142 - RNA, 12 nt, Human
agaaacauuuau

SEQ ID NO: 3591143 - RNA, 19 nt, Human
agaaacauuuauauugaua

SEQ ID NO: 3591144 - RNA, 14 nt, Human
agaaaccagcuucc

SEQ ID NO: 3591145 - RNA, 22 nt, Human
agaaaccagcuuccuucagaga

SEQ ID NO: 3591146 - RNA, 16 nt, Human
agaaacccaagcuccu

SEQ ID NO: 3591147 - RNA, 16 nt, Human
agaaacccgacagagg

SEQ ID NO: 3591148 - RNA, 15 nt, Human
agaaaccuacugccc

SEQ ID NO: 3591149 - RNA, 20 nt, Human
agaaaccuuauuguaccucu

SEQ ID NO: 3591150 - RNA, 18 nt, Human
agaaaccuuuuuaaaaau

SEQ ID NO: 3591151 - RNA, 21 nt, Human
agaaacgaguuggugucuuuc

SEQ ID NO: 3591152 - RNA, 16 nt, Human
agaaacgucuucuaaa

SEQ ID NO: 3591153 - RNA, 21 nt, Human
agaaacguuuggaacaaucua

SEQ ID NO: 3591154 - RNA, 16 nt, Human
agaaacugaggaauuu

SEQ ID NO: 3591155 - RNA, 17 nt, Human
agaaacuggaaauacua

SEQ ID NO: 3591156 - RNA, 13 nt, Human
agaaacuggaacu

SEQ ID NO: 3591157 - RNA, 20 nt, Human
agaaacuguagucucaggac

SEQ ID NO: 3591158 - RNA, 22 nt, Human
agaaacuuaucuuacaaagugu

SEQ ID NO: 3591159 - RNA, 20 nt, Human
agaaacuuauuucucauauc

SEQ ID NO: 3591160 - RNA, 23 nt, Human
agaaacuuguucuuccaaagcag

SEQ ID NO: 3591161 - RNA, 18 nt, Human
agaaacuuuauacauuag

SEQ ID NO: 3591162 - RNA, 22 nt, Human
agaaacuuuauucaaguaaaaa

SEQ ID NO: 3591163 - RNA, 23 nt, Human
agaaacuuuuaucuauucugaga

SEQ ID NO: 3591164 - RNA, 23 nt, Human
agaaacuuuuguaaagaaauuua

SEQ ID NO: 3591165 - RNA, 14 nt, Human
agaaagaaaaucag

SEQ ID NO: 3591166 - RNA, 16 nt, Human
agaaagaaaaugaaga

SEQ ID NO: 3591167 - RNA, 20 nt, Human
agaaagaaacccgacagagg

SEQ ID NO: 3591168 - RNA, 12 nt, Human
agaaagaaaguu

SEQ ID NO: 3591169 - RNA, 12 nt, Human
agaaagaaauua

SEQ ID NO: 3591170 - RNA, 16 nt, Human
agaaagaacuaucuuc

SEQ ID NO: 3591171 - RNA, 12 nt, Human
agaaagaagaga

SEQ ID NO: 3591172 - RNA, 13 nt, Human
agaaagaagagac

SEQ ID NO: 3591173 - RNA, 15 nt, Human
agaaagaagaugaau

SEQ ID NO: 3591174 - RNA, 12 nt, Human
agaaagaaggaa

SEQ ID NO: 3591175 - RNA, 13 nt, Human
agaaagaaggaag

SEQ ID NO: 3591176 - RNA, 22 nt, Human
agaaagaauguuacugccuuaa

SEQ ID NO: 3591177 - RNA, 15 nt, Human
agaaagacagagcug

SEQ ID NO: 3591178 - RNA, 23 nt, Human
agaaagacuauucaaacagucuc

SEQ ID NO: 3591179 - RNA, 22 nt, Human
agaaagacuugguugguagggu

SEQ ID NO: 3591180 - RNA, 12 nt, Human
agaaagagagaa

SEQ ID NO: 3591181 - RNA, 16 nt, Human
agaaagagagaaaaua

SEQ ID NO: 3591182 - RNA, 17 nt, Human
agaaagagagaaaauaa

SEQ ID NO: 3591183 - RNA, 22 nt, Human
agaaagagagaaaauaaaaagu

SEQ ID NO: 3591184 - RNA, 22 nt, Human
agaaagaggugaccccagggca

SEQ ID NO: 3591185 - RNA, 23 nt, Human
agaaagaguuugagaccugaaua

SEQ ID NO: 3591186 - RNA, 21 nt, Human
agaaagcaaaauuauguuugc

SEQ ID NO: 3591187 - RNA, 18 nt, Human
agaaagcagaacagugau

SEQ ID NO: 3591188 - RNA, 14 nt, Human
agaaagcauuugaa

SEQ ID NO: 3591189 - RNA, 16 nt, Human
agaaagcauuugaaug

SEQ ID NO: 3591190 - RNA, 21 nt, Human
agaaagcauuugaaugcauuu

SEQ ID NO: 3591191 - RNA, 15 nt, Human
agaaagccaggcagg

SEQ ID NO: 3591192 - RNA, 11 nt, Human
agccccugucc

SEQ ID NO: 3591193 - RNA, 20 nt, Human
agccccugucuagagaggga

SEQ ID NO: 3591194 - RNA, 21 nt, Human
agccccugucuagagagggag

SEQ ID NO: 3591195 - RNA, 14 nt, Human
agccccuguggaga

SEQ ID NO: 3591196 - RNA, 15 nt, Human
agccccuucucagaa

SEQ ID NO: 3591197 - RNA, 15 nt, Human
agccccuucugcuca

SEQ ID NO: 3591198 - RNA, 16 nt, Human
agccccuucugcucag

SEQ ID NO: 3591199 - RNA, 23 nt, Human
agccccuuuuucauauguugcuc

SEQ ID NO: 3591200 - RNA, 14 nt, Human
agcccgaauacaaa

SEQ ID NO: 3591201 - RNA, 21 nt, Human
agcccgauccuccccuggacu

SEQ ID NO: 3591202 - RNA, 21 nt, Human
agcccgcacccccacccuuug

SEQ ID NO: 3591203 - RNA, 21 nt, Human
agcccgcaugcagcagcuugc

SEQ ID NO: 3591204 - RNA, 18 nt, Human
agcccgccugacagaaac

SEQ ID NO: 3591205 - RNA, 14 nt, Human
agcccgccugccag

SEQ ID NO: 3591206 - RNA, 16 nt, Human
agcccgccugccaguc

SEQ ID NO: 3591207 - RNA, 18 nt, Human
agcccgccugccaguccu

SEQ ID NO: 3591208 - RNA, 19 nt, Human
agcccgccugccaguccua

SEQ ID NO: 3591209 - RNA, 23 nt, Human
agcccgccugccaguccuagcug

SEQ ID NO: 3591210 - RNA, 20 nt, Human
agcccgcggggacauuggga

SEQ ID NO: 3591211 - RNA, 14 nt, Human
agcccgcuaggcuc

SEQ ID NO: 3591212 - RNA, 14 nt, Human
agcccggccgcucc

SEQ ID NO: 3591213 - RNA, 11 nt, Human
agcccggccug

SEQ ID NO: 3591214 - RNA, 21 nt, Human
agcccggcgccaccauccugc

SEQ ID NO: 3591215 - RNA, 15 nt, Human
agcccggcuccuggu

SEQ ID NO: 3591216 - RNA, 15 nt, Human
agcccggcugguuuu

SEQ ID NO: 3591217 - RNA, 15 nt, Human
agcccgggaaaggag

SEQ ID NO: 3591218 - RNA, 14 nt, Human
agcccgggagccua

SEQ ID NO: 3591219 - RNA, 15 nt, Human
agcccgggagccuag

SEQ ID NO: 3591220 - RNA, 17 nt, Human
agcccgggagccuagga

SEQ ID NO: 3591221 - RNA, 20 nt, Human
agcccgggagccuaggacca

SEQ ID NO: 3591222 - RNA, 14 nt, Human
agcccgggcucugc

SEQ ID NO: 3591223 - RNA, 15 nt, Human
agcccgggcucugcc

SEQ ID NO: 3591224 - RNA, 19 nt, Human
acucuagucaaugacauga

SEQ ID NO: 3591225 - RNA, 20 nt, Human
acucuagucaaugacaugaa

SEQ ID NO: 3591226 - RNA, 18 nt, Human
acucuauaagauuccaaa

SEQ ID NO: 3591227 - RNA, 22 nt, Human
acucuauaagcaaauugcuuuu

SEQ ID NO: 3591228 - RNA, 16 nt, Human
acucuauauuguucag

SEQ ID NO: 3591229 - RNA, 21 nt, Human
acucuaucaaguauuauaccu

SEQ ID NO: 3591230 - RNA, 23 nt, Human
acucuaucaaguauuauaccuuu

SEQ ID NO: 3591231 - RNA, 20 nt, Human
acucuaucggagaacaugaa

SEQ ID NO: 3591232 - RNA, 16 nt, Human
acucuaugccccaaau

SEQ ID NO: 3591233 - RNA, 20 nt, Human
acucuaugccccaaauauag

SEQ ID NO: 3591234 - RNA, 16 nt, Human
acucucagaggcccca

SEQ ID NO: 3591235 - RNA, 17 nt, Human
acucucagaggccccaa

SEQ ID NO: 3591236 - RNA, 21 nt, Human
acucucaggaaaugcugaccc

SEQ ID NO: 3591237 - RNA, 22 nt, Human
acucucaggaaaugcugaccca

SEQ ID NO: 3591238 - RNA, 19 nt, Human
acucucaggaucaagaaag

SEQ ID NO: 3591239 - RNA, 16 nt, Human
acucucauuccccagg

SEQ ID NO: 3591240 - RNA, 23 nt, Human
acucuccagggguccuaggccuc

SEQ ID NO: 3591241 - RNA, 14 nt, Human
acucuccccacacu

SEQ ID NO: 3591242 - RNA, 19 nt, Human
acucuccccacgagggcug

SEQ ID NO: 3591243 - RNA, 14 nt, Human
acucucccccaccc

SEQ ID NO: 3591244 - RNA, 22 nt, Human
acucucccccacccccuccccg

SEQ ID NO: 3591245 - RNA, 21 nt, Human
acucuccuagagacagaagca

SEQ ID NO: 3591246 - RNA, 20 nt, Human
acucuccuaggcauucugga

SEQ ID NO: 3591247 - RNA, 12 nt, Human
acucuccucugc

SEQ ID NO: 3591248 - RNA, 21 nt, Human
acucuccucugcugcuggcug

SEQ ID NO: 3591249 - RNA, 14 nt, Human
acucuccugccuug

SEQ ID NO: 3591250 - RNA, 12 nt, Human
acucuccugggc

SEQ ID NO: 3591251 - RNA, 14 nt, Human
acucuccugggccc

SEQ ID NO: 3591252 - RNA, 17 nt, Human
acucuccugggccccuc

SEQ ID NO: 3591253 - RNA, 17 nt, Human
acucuccuugcuaccca

SEQ ID NO: 3591254 - RNA, 16 nt, Human
acucuccuuggugucg

SEQ ID NO: 3591255 - RNA, 18 nt, Human
acucucgcaucuucccaa

SEQ ID NO: 3591256 - RNA, 14 nt, Human
acucucuaccagau

SEQ ID NO: 3591257 - RNA, 13 nt, Human
acucucuccaccc

SEQ ID NO: 3591258 - RNA, 21 nt, Human
acucucuccacccuauaugua

SEQ ID NO: 3591259 - RNA, 21 nt, Human
acucucugaaccccucccucc

SEQ ID NO: 3591260 - RNA, 20 nt, Human
acucucuuauugccucacuu

SEQ ID NO: 3591261 - RNA, 23 nt, Human
acucucuuauugccucacuucag

SEQ ID NO: 3591262 - RNA, 20 nt, Human
acucugaaacacacugaaag

SEQ ID NO: 3591263 - RNA, 17 nt, Human
acucugaagccucuggg

SEQ ID NO: 3591264 - RNA, 19 nt, Human
acucugaagccucugggaa

SEQ ID NO: 3591265 - RNA, 12 nt, Human
acucugaagcug

SEQ ID NO: 3591266 - RNA, 21 nt, Human
acucugaagggcaucaugcau

SEQ ID NO: 3591267 - RNA, 19 nt, Human
acucugaauuuaucuuuga

SEQ ID NO: 3591268 - RNA, 20 nt, Human
acucugacaacagacuucug

SEQ ID NO: 3591269 - RNA, 19 nt, Human
acucugacaagggcugacc

SEQ ID NO: 3591270 - RNA, 19 nt, Human
acucugacgcaaaaccacu

SEQ ID NO: 3591271 - RNA, 11 nt, Human
acucugagacu

SEQ ID NO: 3591272 - RNA, 13 nt, Human
acucugagcccau

SEQ ID NO: 3591273 - RNA, 18 nt, Human
acucugagcgggaggcag

SEQ ID NO: 3591274 - RNA, 22 nt, Human
acucugagcgggaggcagaguu

SEQ ID NO: 3591275 - RNA, 22 nt, Human
acucugaguuuaccauuuguaa

SEQ ID NO: 3591276 - RNA, 22 nt, Human
acucugauagaauuauuucaca

SEQ ID NO: 3591277 - RNA, 11 nt, Human
acucugcacau

SEQ ID NO: 3591278 - RNA, 18 nt, Human
acucugcacaugucuugu

SEQ ID NO: 3591279 - RNA, 22 nt, Human
acucugcacaugucuuguacau

SEQ ID NO: 3591280 - RNA, 15 nt, Human
acucugcacuacucc

SEQ ID NO: 3591281 - RNA, 19 nt, Human
acucugcacuacuccucug

SEQ ID NO: 3591282 - RNA, 13 nt, Human
acucugcagacug

SEQ ID NO: 3591283 - RNA, 17 nt, Human
acucugcagacugcuag

SEQ ID NO: 3591284 - RNA, 14 nt, Human
acucugcagccuca

SEQ ID NO: 3591285 - RNA, 17 nt, Human
acucugcagccucagag

SEQ ID NO: 3591286 - RNA, 16 nt, Human
acucugccagccacau

SEQ ID NO: 3591287 - RNA, 18 nt, Human
acucugccagggcagugc

SEQ ID NO: 3591288 - RNA, 17 nt, Human
acucugcccccugcugg

SEQ ID NO: 3591289 - RNA, 18 nt, Human
acucugcccuacucacuc

SEQ ID NO: 3591290 - RNA, 16 nt, Human
acucugccuccucuuc

SEQ ID NO: 3591291 - RNA, 11 nt, Human
acucugccucu

SEQ ID NO: 3591292 - RNA, 16 nt, Human
acucugcuaccuugcc

SEQ ID NO: 3591293 - RNA, 18 nt, Human
acucugcucgccuuagca

SEQ ID NO: 3591294 - RNA, 11 nt, Human
acucugcucug

SEQ ID NO: 3591295 - RNA, 12 nt, Human
acucugcucuga

SEQ ID NO: 3591296 - RNA, 13 nt, Human
acucugcucugau

SEQ ID NO: 3591297 - RNA, 16 nt, Human
acucugcucugaugca

SEQ ID NO: 3591298 - RNA, 20 nt, Human
acucugcucugcccuuguuc

SEQ ID NO: 3591299 - RNA, 15 nt, Human
acucugcugaggguc

SEQ ID NO: 3591300 - RNA, 20 nt, Human
acucugcugaggguccagaa

SEQ ID NO: 3591301 - RNA, 14 nt, Human
acucugcugcuuag

SEQ ID NO: 3591302 - RNA, 14 nt, Human
acucugcuucucug

SEQ ID NO: 3591303 - RNA, 16 nt, Human
acucugcuucucugac

SEQ ID NO: 3591304 - RNA, 21 nt, Human
acucugcuucucugacuucug

SEQ ID NO: 3591305 - RNA, 14 nt, Human
acucugcuuugacu

SEQ ID NO: 3591306 - RNA, 20 nt, Human
acucugcuuugacugagcag

SEQ ID NO: 3591307 - RNA, 23 nt, Human
acucugcuuugacugagcagacu

SEQ ID NO: 3591308 - RNA, 14 nt, Human
acucuggacuuucu

SEQ ID NO: 3591309 - RNA, 17 nt, Human
acucuggauucagccuu

SEQ ID NO: 3591310 - RNA, 20 nt, Human
acucuggauucagccuucuu

SEQ ID NO: 3591311 - RNA, 14 nt, Human
acucuggcaaagcu

SEQ ID NO: 3591312 - RNA, 16 nt, Human
acucuggcaaagcuuu

SEQ ID NO: 3591313 - RNA, 22 nt, Human
acucuggcagcaccgccucuuc

SEQ ID NO: 3591314 - RNA, 13 nt, Human
acucuggcagcca

SEQ ID NO: 3591315 - RNA, 16 nt, Human
acucuggcagccacac

SEQ ID NO: 3591316 - RNA, 15 nt, Human
acucuggcagcucag

SEQ ID NO: 3591317 - RNA, 20 nt, Human
acucuggcagcucagagagg

SEQ ID NO: 3591318 - RNA, 13 nt, Human
acucuggcccugg

SEQ ID NO: 3591319 - RNA, 17 nt, Human
acucuggcccuggcccu

SEQ ID NO: 3591320 - RNA, 22 nt, Human
acucuggcugguuuggaaugcu

SEQ ID NO: 3591321 - RNA, 23 nt, Human
acucuggcugguuuggaaugcuu

SEQ ID NO: 3591322 - RNA, 15 nt, Human
acucuggcuuccagg

SEQ ID NO: 3591323 - RNA, 17 nt, Human
acucuggcuuccaggua

SEQ ID NO: 3591324 - RNA, 17 nt, Human
acucuggcuuuuggaag

SEQ ID NO: 3591325 - RNA, 22 nt, Human
acucugggaacuucuuugcagu

SEQ ID NO: 3591326 - RNA, 23 nt, Human
acucugggcucaagcaauccucu

SEQ ID NO: 3591327 - RNA, 17 nt, Human
acucuggggugcugccu

SEQ ID NO: 3591328 - RNA, 19 nt, Human
acucuggguccuuccugaa

SEQ ID NO: 3591329 - RNA, 20 nt, Human
acucuggugagucaccacuu

SEQ ID NO: 3591330 - RNA, 16 nt, Human
acucuggugccuccag

SEQ ID NO: 3591331 - RNA, 19 nt, Human
acucugguggcacaggagu

SEQ ID NO: 3591332 - RNA, 17 nt, Human
acucugguuucucauuc

SEQ ID NO: 3591333 - RNA, 16 nt, Human
acucuguaacaucacu

SEQ ID NO: 3591334 - RNA, 23 nt, Human
acucugucaauuucccugacucc

SEQ ID NO: 3591335 - RNA, 11 nt, Human
acucuguccug

SEQ ID NO: 3591336 - RNA, 17 nt, Human
agaucacgccacugcac

SEQ ID NO: 3591337 - RNA, 17 nt, Human
agaucacuguuuagauu

SEQ ID NO: 3591338 - RNA, 18 nt, Human
agaucacuguuuagauuu

SEQ ID NO: 3591339 - RNA, 20 nt, Human
agaucacuguuuagauuugc

SEQ ID NO: 3591340 - RNA, 11 nt, Human
agaucacuuuc

SEQ ID NO: 3591341 - RNA, 15 nt, Human
agaucacuuugcucu

SEQ ID NO: 3591342 - RNA, 20 nt, Human
agaucagaaaaauggagcaa

SEQ ID NO: 3591343 - RNA, 21 nt, Human
agaucagaaaaauggagcaaa

SEQ ID NO: 3591344 - RNA, 22 nt, Human
agaucagaugcuccaagauucu

SEQ ID NO: 3591345 - RNA, 13 nt, Human
agaucagccuggg

SEQ ID NO: 3591346 - RNA, 18 nt, Human
agaucaggaagagaagga

SEQ ID NO: 3591347 - RNA, 18 nt, Human
agaucaguguaccauuug

SEQ ID NO: 3591348 - RNA, 19 nt, Human
agaucauagauuucugauu

SEQ ID NO: 3591349 - RNA, 13 nt, Human
agaucauaguuuu

SEQ ID NO: 3591350 - RNA, 20 nt, Human
agaucauaguuuuauuuaua

SEQ ID NO: 3591351 - RNA, 18 nt, Human
agaucauauacgugaaaa

SEQ ID NO: 3591352 - RNA, 13 nt, Human
agaucauccuuuc

SEQ ID NO: 3591353 - RNA, 18 nt, Human
agaucauccuuuccagca

SEQ ID NO: 3591354 - RNA, 17 nt, Human
agaucauggaacacaaa

SEQ ID NO: 3591355 - RNA, 16 nt, Human
agaucauuuguucugg

SEQ ID NO: 3591356 - RNA, 16 nt, Human
agaucauuuugaaauu

SEQ ID NO: 3591357 - RNA, 12 nt, Human
agauccaaagac

SEQ ID NO: 3591358 - RNA, 14 nt, Human
agauccaaagacuc

SEQ ID NO: 3591359 - RNA, 15 nt, Human
agauccacacacaga

SEQ ID NO: 3591360 - RNA, 14 nt, Human
agauccagccuggg

SEQ ID NO: 3591361 - RNA, 12 nt, Human
agauccaggacu

SEQ ID NO: 3591362 - RNA, 13 nt, Human
agauccaggacua

SEQ ID NO: 3591363 - RNA, 15 nt, Human
agauccaggagcucc

SEQ ID NO: 3591364 - RNA, 21 nt, Human
agaucccagaaggaccuccug

SEQ ID NO: 3591365 - RNA, 16 nt, Human
agaucccaggccccug

SEQ ID NO: 3591366 - RNA, 20 nt, Human
agaucccaggccccuggagg

SEQ ID NO: 3591367 - RNA, 21 nt, Human
agauccccaaaacaggccagg

SEQ ID NO: 3591368 - RNA, 15 nt, Human
agaucccccagaaaa

SEQ ID NO: 3591369 - RNA, 17 nt, Human
acugcagggccaggacu

SEQ ID NO: 3591370 - RNA, 20 nt, Human
acugcagggccaggacugag

SEQ ID NO: 3591371 - RNA, 21 nt, Human
acugcagggguuauguggaag

SEQ ID NO: 3591372 - RNA, 13 nt, Human
acugcagucacug

SEQ ID NO: 3591373 - RNA, 17 nt, Human
acugcaguccuggagca

SEQ ID NO: 3591374 - RNA, 20 nt, Human
acugcauaccaaccugggca

SEQ ID NO: 3591375 - RNA, 13 nt, Human
acugcauacuuuu

SEQ ID NO: 3591376 - RNA, 17 nt, Human
acugcauacuuuuuaaa

SEQ ID NO: 3591377 - RNA, 15 nt, Human
acugcauccagccug

SEQ ID NO: 3591378 - RNA, 17 nt, Human
acugcauccuccgccuc

SEQ ID NO: 3591379 - RNA, 20 nt, Human
acugcauccuccgccucccg

SEQ ID NO: 3591380 - RNA, 12 nt, Human
acugcaugcacu

SEQ ID NO: 3591381 - RNA, 18 nt, Human
acugcaugcacuucuuac

SEQ ID NO: 3591382 - RNA, 14 nt, Human
acugcaugcccaga

SEQ ID NO: 3591383 - RNA, 20 nt, Human
acugcauggaccuaacauuc

SEQ ID NO: 3591384 - RNA, 16 nt, Human
acugcaugguaauuua

SEQ ID NO: 3591385 - RNA, 14 nt, Human
acugcauguauaaa

SEQ ID NO: 3591386 - RNA, 15 nt, Human
acugcauguauaaau

SEQ ID NO: 3591387 - RNA, 20 nt, Human
acugcauguauaaaugaagu

SEQ ID NO: 3591388 - RNA, 19 nt, Human
agcaauucuccugccucag

SEQ ID NO: 3591389 - RNA, 20 nt, Human
agcaauucuccugccucagc

SEQ ID NO: 3591390 - RNA, 19 nt, Human
agcaauuuaaauguuauga

SEQ ID NO: 3591391 - RNA, 17 nt, Human
agcaauuuaacuagaca

SEQ ID NO: 3591392 - RNA, 19 nt, Human
agcaauuuaacuagacaca

SEQ ID NO: 3591393 - RNA, 22 nt, Human
agcaauuuaacuagacacagau

SEQ ID NO: 3591394 - RNA, 24 nt, Human
agcaauuuaauauuuugcacaguu

SEQ ID NO: 3591395 - RNA, 22 nt, Human
agcaauuucccccuaaaccaac

SEQ ID NO: 3591396 - RNA, 12 nt, Human
agcaauuuuccu

SEQ ID NO: 3591397 - RNA, 13 nt, Human
agcaauuuuccuu

SEQ ID NO: 3591398 - RNA, 14 nt, Human
agcaauuuuccuug

SEQ ID NO: 3591399 - RNA, 17 nt, Human
agcaauuuuccuugaag

SEQ ID NO: 3591400 - RNA, 12 nt, Human
agcacaaaauuc

SEQ ID NO: 3591401 - RNA, 12 nt, Human
agcacaaacaca

SEQ ID NO: 3591402 - RNA, 13 nt, Human
agcacaaacacaa

SEQ ID NO: 3591403 - RNA, 15 nt, Human
agcacaaacacaagg

SEQ ID NO: 3591404 - RNA, 14 nt, Human
agcacaaacauuuu

SEQ ID NO: 3591405 - RNA, 18 nt, Human
agcacaacccccagcucc

SEQ ID NO: 3591406 - RNA, 18 nt, Human
agcacaagaagcgugaga

SEQ ID NO: 3591407 - RNA, 17 nt, Human
agcacaaguuauuuaaa

SEQ ID NO: 3591408 - RNA, 17 nt, Human
agcacaauaaauggcug

SEQ ID NO: 3591409 - RNA, 14 nt, Human
agcacacacuuuug

SEQ ID NO: 3591410 - RNA, 17 nt, Human
agcacacucuggucuug

SEQ ID NO: 3591411 - RNA, 22 nt, Human
agcacacugcuugugaaaggaa

SEQ ID NO: 3591412 - RNA, 16 nt, Human
agcacagaaaacuaga

SEQ ID NO: 3591413 - RNA, 15 nt, Human
agcacagacccugcc

SEQ ID NO: 3591414 - RNA, 16 nt, Human
agcacagacccugccc

SEQ ID NO: 3591415 - RNA, 12 nt, Human
agcacagagagg

SEQ ID NO: 3591416 - RNA, 19 nt, Human
agcacagagagggggccac

SEQ ID NO: 3591417 - RNA, 20 nt, Human
agcacagagagggggccacc

SEQ ID NO: 3591418 - RNA, 21 nt, Human
agcacagagagggggccaccu

SEQ ID NO: 3591419 - RNA, 19 nt, Human
agcacagagagucuggaua

SEQ ID NO: 3591420 - RNA, 19 nt, Human
agcacagauaaaaagugga

SEQ ID NO: 3591421 - RNA, 22 nt, Human
agcacagcaaggaggcuggcug

SEQ ID NO: 3591422 - RNA, 23 nt, Human
agcacagcaaggaggcuggcugg

SEQ ID NO: 3591423 - RNA, 13 nt, Human
agcacagcagccu

SEQ ID NO: 3591424 - RNA, 13 nt, Human
agcacagcagcuu

SEQ ID NO: 3591425 - RNA, 12 nt, Human
agcacagccaac

SEQ ID NO: 3591426 - RNA, 23 nt, Human
agcacagccaacacgcaccugcc

SEQ ID NO: 3591427 - RNA, 10 nt, Human
agcacagccc

SEQ ID NO: 3591428 - RNA, 15 nt, Human
agcacagcucccuuc

SEQ ID NO: 3591429 - RNA, 18 nt, Human
agcacagcuuagauuuca

SEQ ID NO: 3591430 - RNA, 16 nt, Human
agcacagcuucauuuc

SEQ ID NO: 3591431 - RNA, 18 nt, Human
agcacagcuugaccugag

SEQ ID NO: 3591432 - RNA, 13 nt, Human
agcacaggagaca

SEQ ID NO: 3591433 - RNA, 13 nt, Human
agcacaggcagcu

SEQ ID NO: 3591434 - RNA, 12 nt, Human
agcacaggcuaa

SEQ ID NO: 3591435 - RNA, 18 nt, Human
agcacaggcugagugcag

SEQ ID NO: 3591436 - RNA, 19 nt, Human
agcacaggcugagugcagg

SEQ ID NO: 3591437 - RNA, 20 nt, Human
agcacaggcugagugcaggc

SEQ ID NO: 3591438 - RNA, 16 nt, Human
agcacaggucccaccu

SEQ ID NO: 3591439 - RNA, 20 nt, Human
agcacaggucccaccuccag

SEQ ID NO: 3591440 - RNA, 19 nt, Human
agcacaggugggcuuccca

SEQ ID NO: 3591441 - RNA, 15 nt, Human
agcacagugccugca

SEQ ID NO: 3591442 - RNA, 16 nt, Human
agcacagugguggcag

SEQ ID NO: 3591443 - RNA, 20 nt, Human
agcacagugguggcagggcc

SEQ ID NO: 3591444 - RNA, 14 nt, Human
agcacaguuugaac

SEQ ID NO: 3591445 - RNA, 12 nt, Human
agcacaguuugu

SEQ ID NO: 3591446 - RNA, 16 nt, Human
agcacauauggaauuu

SEQ ID NO: 3591447 - RNA, 18 nt, Human
agcacauauuagugcagc

SEQ ID NO: 3591448 - RNA, 17 nt, Human
agcacauauuuucuguu

SEQ ID NO: 3591449 - RNA, 23 nt, Human
agcacaucucaacaggccucagg

SEQ ID NO: 3591450 - RNA, 13 nt, Human
agcacaugccucu

SEQ ID NO: 3591451 - RNA, 18 nt, Human
agcacaugccucucucag

SEQ ID NO: 3591452 - RNA, 16 nt, Human
agcacaugcuggccag

SEQ ID NO: 3591453 - RNA, 19 nt, Human
agcacaugcuggccagccu

SEQ ID NO: 3591454 - RNA, 16 nt, Human
agcaccaaaauaagaa

SEQ ID NO: 3591455 - RNA, 18 nt, Human
agcaccaaaauaagaaaa

SEQ ID NO: 3591456 - RNA, 20 nt, Human
agcaccaaaauaagaaaaga

SEQ ID NO: 3591457 - RNA, 17 nt, Human
agcaccaaaucaaaauc

SEQ ID NO: 3591458 - RNA, 17 nt, Human
agcaccaagcucaaagc

SEQ ID NO: 3591459 - RNA, 16 nt, Human
agcaccaccaggucuc

SEQ ID NO: 3591460 - RNA, 20 nt, Human
agcaccaccaggucucccgg

SEQ ID NO: 3591461 - RNA, 16 nt, Human
agcaccacccuccuuc

SEQ ID NO: 3591462 - RNA, 20 nt, Human
agcaccagcuucuccaggcu

SEQ ID NO: 3591463 - RNA, 12 nt, Human
agcaccagggaa

SEQ ID NO: 3591464 - RNA, 15 nt, Human
agcaccagggacuau

SEQ ID NO: 3591465 - RNA, 15 nt, Human
agcaccauccccucc

SEQ ID NO: 3591466 - RNA, 16 nt, Human
agcaccauccccuccg

SEQ ID NO: 3591467 - RNA, 16 nt, Human
agcaccaucucuccuc

SEQ ID NO: 3591468 - RNA, 21 nt, Human
agcacccauuucaauguguau

SEQ ID NO: 3591469 - RNA, 19 nt, Human
agcaccccaugccaaagcu

SEQ ID NO: 3591470 - RNA, 20 nt, Human
agcacccccacgcccucauu

SEQ ID NO: 3591471 - RNA, 18 nt, Human
agcaccccuacucacaua

SEQ ID NO: 3591472 - RNA, 13 nt, Human
agcaccccugucu

SEQ ID NO: 3591473 - RNA, 12 nt, Human
agcaccccuucc

SEQ ID NO: 3591474 - RNA, 13 nt, Human
agcaccccuucca

SEQ ID NO: 3591475 - RNA, 13 nt, Human
agcacccugaggg

SEQ ID NO: 3591476 - RNA, 15 nt, Human
agcacccugagggcg

SEQ ID NO: 3591477 - RNA, 18 nt, Human
agcaccgaggggccuuug

SEQ ID NO: 3591478 - RNA, 18 nt, Human
agcaccgccucuucccgc

SEQ ID NO: 3591479 - RNA, 16 nt, Human
agcaccggaccagccu

SEQ ID NO: 3591480 - RNA, 17 nt, Human
agcaccggaccagccug

SEQ ID NO: 3591481 - RNA, 23 nt, Human
agcaccggaccagccuggcccac

SEQ ID NO: 3591482 - RNA, 21 nt, Human
agcaccgugucaagcugcucu

SEQ ID NO: 3591483 - RNA, 18 nt, Human
agcaccguucugugcaca

SEQ ID NO: 3591484 - RNA, 18 nt, Human
agcaccuaguccagugac

SEQ ID NO: 3591485 - RNA, 15 nt, Human
agcaccuccaggccu

SEQ ID NO: 3591486 - RNA, 16 nt, Human
agcaccucccagcccc

SEQ ID NO: 3591487 - RNA, 17 nt, Human
agcaccucccagccccu

SEQ ID NO: 3591488 - RNA, 18 nt, Human
agcaccucccagccccug

SEQ ID NO: 3591489 - RNA, 14 nt, Human
agcaccuccucagc

SEQ ID NO: 3591490 - RNA, 16 nt, Human
agcaccuccugccucg

SEQ ID NO: 3591491 - RNA, 15 nt, Human
agcaccugccaggga

SEQ ID NO: 3591492 - RNA, 18 nt, Human
agcaccugcccuaccugc

SEQ ID NO: 3591493 - RNA, 11 nt, Human
agcaccugccg

SEQ ID NO: 3591494 - RNA, 16 nt, Human
agcaccugccgaccuc

SEQ ID NO: 3591495 - RNA, 19 nt, Human
agcaccugccgaccucguc

SEQ ID NO: 3591496 - RNA, 22 nt, Human
agcaccugucuccuuucacccc

SEQ ID NO: 3591497 - RNA, 18 nt, Human
agcaccuuccucacuucc

SEQ ID NO: 3591498 - RNA, 15 nt, Human
agcaccuugugccug

SEQ ID NO: 3591499 - RNA, 17 nt, Human
agcaccuugugccuggg

SEQ ID NO: 3591500 - RNA, 17 nt, Human
agcacgaaauguuauuu

SEQ ID NO: 3591501 - RNA, 19 nt, Human
agcacgaauguuccccuca

SEQ ID NO: 3591502 - RNA, 17 nt, Human
agcacgauuucuguuua

SEQ ID NO: 3591503 - RNA, 14 nt, Human
agcacggacaauaa

SEQ ID NO: 3591504 - RNA, 15 nt, Human
agcacggcucugucc

SEQ ID NO: 3591505 - RNA, 18 nt, Human
agcacgggacggaagugc

SEQ ID NO: 3591506 - RNA, 18 nt, Human
agcacgguggugaggcag

SEQ ID NO: 3591507 - RNA, 17 nt, Human
agcacgugguaaaacac

SEQ ID NO: 3591508 - RNA, 14 nt, Human
agcacuaaagcagu

SEQ ID NO: 3591509 - RNA, 20 nt, Human
agcacuaaagcaguggacac

SEQ ID NO: 3591510 - RNA, 16 nt, Human
agcacuaacguaaaua

SEQ ID NO: 3591511 - RNA, 17 nt, Human
agcacuacauaaacuga

SEQ ID NO: 3591512 - RNA, 16 nt, Human
agcacuacuggguguc

SEQ ID NO: 3591513 - RNA, 15 nt, Human
agcacuagagaaugc

SEQ ID NO: 3591514 - RNA, 16 nt, Human
agcacuagccaaaccu

SEQ ID NO: 3591515 - RNA, 14 nt, Human
agcagccagcucuc

SEQ ID NO: 3591516 - RNA, 21 nt, Human
agcagcccaagcuucccucca

SEQ ID NO: 3591517 - RNA, 12 nt, Human
agcagcccaccc

SEQ ID NO: 3591518 - RNA, 20 nt, Human
agcagcccacccugcugcug

SEQ ID NO: 3591519 - RNA, 21 nt, Human
agcagcccgcugaguggacug

SEQ ID NO: 3591520 - RNA, 14 nt, Human
agcagcccugcccc

SEQ ID NO: 3591521 - RNA, 19 nt, Human
agcagcccuggagucaugc

SEQ ID NO: 3591522 - RNA, 20 nt, Human
agcagccgccuuaagcugau

SEQ ID NO: 3591523 - RNA, 21 nt, Human
agcagccgccuuaagcugauc

SEQ ID NO: 3591524 - RNA, 21 nt, Human
agcagccucgccccuggcaga

SEQ ID NO: 3591525 - RNA, 21 nt, Human
agcagccucuccccaggucca

SEQ ID NO: 3591526 - RNA, 16 nt, Human
agcagccugcuuccca

SEQ ID NO: 3591527 - RNA, 19 nt, Human
agcagccuggagcccugga

SEQ ID NO: 3591528 - RNA, 20 nt, Human
agcagccuggagcccuggag

SEQ ID NO: 3591529 - RNA, 14 nt, Human
agcagccuggcucc

SEQ ID NO: 3591530 - RNA, 13 nt, Human
agcagccuguggc

SEQ ID NO: 3591531 - RNA, 14 nt, Human
agcagccuguggca

SEQ ID NO: 3591532 - RNA, 11 nt, Human
agcagccuuuc

SEQ ID NO: 3591533 - RNA, 18 nt, Human
agcagcgaccaccccugc

SEQ ID NO: 3591534 - RNA, 21 nt, Human
agcagcggggcgaagcccagg

SEQ ID NO: 3591535 - RNA, 22 nt, Human
agcagcgguuuggggagcagag

SEQ ID NO: 3591536 - RNA, 19 nt, Human
agcagcguuucuaugacac

SEQ ID NO: 3591537 - RNA, 17 nt, Human
agcagcuaaauuuucug

SEQ ID NO: 3591538 - RNA, 20 nt, Human
agcagcuagaaaacauuuuu

SEQ ID NO: 3591539 - RNA, 17 nt, Human
agcagcuaucucucagu

SEQ ID NO: 3591540 - RNA, 12 nt, Human
agcagcucuccc

SEQ ID NO: 3591541 - RNA, 13 nt, Human
agcagcucuugcu

SEQ ID NO: 3591542 - RNA, 12 nt, Human
agcagcugagca

SEQ ID NO: 3591543 - RNA, 17 nt, Human
agcagcugagcagggcc

SEQ ID NO: 3591544 - RNA, 18 nt, Human
agcagcugagcagggccg

SEQ ID NO: 3591545 - RNA, 17 nt, Human
agcaagcuuaauggcug

SEQ ID NO: 3591546 - RNA, 23 nt, Human
agcaagcuuuuacaacagugcug

SEQ ID NO: 3591547 - RNA, 17 nt, Human
agcaagcuuuuuuauuu

SEQ ID NO: 3591548 - RNA, 21 nt, Human
agcaaggaagauauacaugaa

SEQ ID NO: 3591549 - RNA, 21 nt, Human
agcaaggaagguaaaaaguua

SEQ ID NO: 3591550 - RNA, 22 nt, Human
agcaaggaagguaaaaaguuaa

SEQ ID NO: 3591551 - RNA, 17 nt, Human
agcaaggagauuuacaa

SEQ ID NO: 3591552 - RNA, 15 nt, Human
agcaaggccaccucu

SEQ ID NO: 3591553 - RNA, 19 nt, Human
agcaaggccaccucuuccu

SEQ ID NO: 3591554 - RNA, 20 nt, Human
agcaaggcccgagcagcuga

SEQ ID NO: 3591555 - RNA, 20 nt, Human
agcaaggcgcuaacuugcuu

SEQ ID NO: 3591556 - RNA, 20 nt, Human
agcaagggugaugggaaagc

SEQ ID NO: 3591557 - RNA, 16 nt, Human
agcaaggucauuucuu

SEQ ID NO: 3591558 - RNA, 20 nt, Human
agcaaggucauuucuucagu

SEQ ID NO: 3591559 - RNA, 20 nt, Human
agcaaggucuugcucuccua

SEQ ID NO: 3591560 - RNA, 14 nt, Human
agcaagguggagug

SEQ ID NO: 3591561 - RNA, 13 nt, Human
agcaaguaaaaag

SEQ ID NO: 3591562 - RNA, 15 nt, Human
agcaagucugcaggu

SEQ ID NO: 3591563 - RNA, 14 nt, Human
agcaagugaauuuu

SEQ ID NO: 3591564 - RNA, 13 nt, Human
agcaagugagagc

SEQ ID NO: 3591565 - RNA, 14 nt, Human
agcaagugagagcu

SEQ ID NO: 3591566 - RNA, 15 nt, Human
agcaagugagagcug

SEQ ID NO: 3591567 - RNA, 18 nt, Human
agcaagugagagcugggu

SEQ ID NO: 3591568 - RNA, 22 nt, Human
agcaagugagagcuggguguca

SEQ ID NO: 3591569 - RNA, 23 nt, Human
agcaaguucuagagaagaggcug

SEQ ID NO: 3591570 - RNA, 20 nt, Human
agcaaguucugagagccagg

SEQ ID NO: 3591571 - RNA, 15 nt, Human
agcaaguuuucuucc

SEQ ID NO: 3591572 - RNA, 16 nt, Human
agcaauaaagaagagu

SEQ ID NO: 3591573 - RNA, 13 nt, Human
agcaauaaaugaa

SEQ ID NO: 3591574 - RNA, 12 nt, Human
agcaauagaaac

SEQ ID NO: 3591575 - RNA, 23 nt, Human
agcaauauauuaccagcaagaau

SEQ ID NO: 3591576 - RNA, 15 nt, Human
agcaauauguaaaua

SEQ ID NO: 3591577 - RNA, 21 nt, Human
agcaauauucuuggagauuga

SEQ ID NO: 3591578 - RNA, 19 nt, Human
agcaauauuguauauuuuu

SEQ ID NO: 3591579 - RNA, 18 nt, Human
agcaauauuuaaggagau

SEQ ID NO: 3591580 - RNA, 20 nt, Human
agcaauccauguuaguuuuu

SEQ ID NO: 3591581 - RNA, 23 nt, Human
agcaauccauguuaguuuuuacu

SEQ ID NO: 3591582 - RNA, 18 nt, Human
agcaaucucuucauuauu

SEQ ID NO: 3591583 - RNA, 21 nt, Human
agcaaugacaucucaggggcc

SEQ ID NO: 3591584 - RNA, 19 nt, Human
agcaaugauguccagaaga

SEQ ID NO: 3591585 - RNA, 15 nt, Human
agcaaugcuguugga

SEQ ID NO: 3591586 - RNA, 13 nt, Human
agcaaugucugug

SEQ ID NO: 3591587 - RNA, 13 nt, Human
agcaauuaaaaau

SEQ ID NO: 3591588 - RNA, 21 nt, Human
agcaauuacaacggagucaaa

SEQ ID NO: 3591589 - RNA, 15 nt, Human
agcaauuaugaaaau

SEQ ID NO: 3591590 - RNA, 17 nt, Human
agcaauuaugaaaauaa

SEQ ID NO: 3591591 - RNA, 20 nt, Human
agcaauuccaugcuauaaaa

SEQ ID NO: 3591592 - RNA, 13 nt, Human
agcaauuuaaaug

SEQ ID NO: 3591593 - RNA, 18 nt, Human
agcaauuuuccuugaagc

SEQ ID NO: 3591594 - RNA, 11 nt, Human
agcacaaaauu

SEQ ID NO: 3591595 - RNA, 20 nt, Human
agcacaaaauucaaagcaug

SEQ ID NO: 3591596 - RNA, 22 nt, Human
agcacaaaauucaaagcaugga

SEQ ID NO: 3591597 - RNA, 16 nt, Human
agcacaaacacaaggu

SEQ ID NO: 3591598 - RNA, 18 nt, Human
agcacaaacacaagguca

SEQ ID NO: 3591599 - RNA, 15 nt, Human
agcacaaacauuuuu

SEQ ID NO: 3591600 - RNA, 19 nt, Human
agcacaaagacccuggcuu

SEQ ID NO: 3591601 - RNA, 13 nt, Human
agcacaaauuagu

SEQ ID NO: 3591602 - RNA, 19 nt, Human
agcacaaauuaguuauaua

SEQ ID NO: 3591603 - RNA, 14 nt, Human
agcacaacccccag

SEQ ID NO: 3591604 - RNA, 19 nt, Human
agcacaacccccagcuccc

SEQ ID NO: 3591605 - RNA, 18 nt, Human
agcacaaccuucaagcug

SEQ ID NO: 3591606 - RNA, 11 nt, Human
agcacaagaag

SEQ ID NO: 3591607 - RNA, 12 nt, Human
agcacaagaagc

SEQ ID NO: 3591608 - RNA, 13 nt, Human
agcacaagaagcg

SEQ ID NO: 3591609 - RNA, 21 nt, Human
agcacaaguguaaugaauacc

SEQ ID NO: 3591610 - RNA, 18 nt, Human
agcacaaguuauuuaaau

SEQ ID NO: 3591611 - RNA, 19 nt, Human
agcacaauuugcacuaaau

SEQ ID NO: 3591612 - RNA, 20 nt, Human
agcacacacuuuugguuaag

SEQ ID NO: 3591613 - RNA, 22 nt, Human
agcacaccaaucuuacuuugua

SEQ ID NO: 3591614 - RNA, 14 nt, Human
agcacacucauccc

SEQ ID NO: 3591615 - RNA, 23 nt, Human
agcacacuugacaucaacugcau

SEQ ID NO: 3591616 - RNA, 17 nt, Human
agcacagacccugcccu

SEQ ID NO: 3591617 - RNA, 18 nt, Human
agcacagacccugcccug

SEQ ID NO: 3591618 - RNA, 12 nt, Human
agcacagagagu

SEQ ID NO: 3591619 - RNA, 17 nt, Human
agcacagauaaaaagug

SEQ ID NO: 3591620 - RNA, 21 nt, Human
agcacagauaaaaaguggaau

SEQ ID NO: 3591621 - RNA, 17 nt, Human
agcacagauggccagcc

SEQ ID NO: 3591622 - RNA, 15 nt, Human
agcacagauuuuaau

SEQ ID NO: 3591623 - RNA, 16 nt, Human
agcacagauuuuaauu

SEQ ID NO: 3591624 - RNA, 17 nt, Human
agcacagauuuuaauug

SEQ ID NO: 3591625 - RNA, 21 nt, Human
agcacagauuuuaauugucau

SEQ ID NO: 3591626 - RNA, 24 nt, Human
agcacagcaaggaggcuggcuggg

SEQ ID NO: 3591627 - RNA, 21 nt, Human
agcacagcagccccugcacaa

SEQ ID NO: 3591628 - RNA, 15 nt, Human
agcacagcagccugg

SEQ ID NO: 3591629 - RNA, 13 nt, Human
agcacagcccucc

SEQ ID NO: 3591630 - RNA, 15 nt, Human
agcacagcucccugc

SEQ ID NO: 3591631 - RNA, 14 nt, Human
agcacagcucccuu

SEQ ID NO: 3591632 - RNA, 16 nt, Human
agcacagcucccuucu

SEQ ID NO: 3591633 - RNA, 21 nt, Human
agcacagcuucauuuccugug

SEQ ID NO: 3591634 - RNA, 12 nt, Human
agcacaggcagc

SEQ ID NO: 3591635 - RNA, 15 nt, Human
agcacaggcagcugg

SEQ ID NO: 3591636 - RNA, 17 nt, Human
agcacaggcuaauuuuu

SEQ ID NO: 3591637 - RNA, 21 nt, Human
agcacaggcugagugcaggcc

SEQ ID NO: 3591638 - RNA, 23 nt, Human
agcacaggcugagugcaggccca

SEQ ID NO: 3591639 - RNA, 15 nt, Human
agcacaggugggcuu

SEQ ID NO: 3591640 - RNA, 19 nt, Human
agcacagucugaugacaca

SEQ ID NO: 3591641 - RNA, 14 nt, Human
agcacagugccugc

SEQ ID NO: 3591642 - RNA, 17 nt, Human
agcacagugguggcagg

SEQ ID NO: 3591643 - RNA, 18 nt, Human
agcacagugguggcaggg

SEQ ID NO: 3591644 - RNA, 22 nt, Human
agcacaguguuaaaugaaauug

SEQ ID NO: 3591645 - RNA, 17 nt, Human
agcacaguuugaacaaa

SEQ ID NO: 3591646 - RNA, 20 nt, Human
agcacaucucaacaggccuc

SEQ ID NO: 3591647 - RNA, 23 nt, Human
agcacaucugcauuuucacccca

SEQ ID NO: 3591648 - RNA, 14 nt, Human
agcacaugccucuc

SEQ ID NO: 3591649 - RNA, 19 nt, Human
agcacaugccucucucagg

SEQ ID NO: 3591650 - RNA, 21 nt, Human
agcacaugccucucucaggcc

SEQ ID NO: 3591651 - RNA, 22 nt, Human
agcacaugccucucucaggcca

SEQ ID NO: 3591652 - RNA, 23 nt, Human
agcacaugccucucucaggccaa

SEQ ID NO: 3591653 - RNA, 21 nt, Human
agcacaugcuggccagccugg

SEQ ID NO: 3591654 - RNA, 14 nt, Human
agcaccaagcaugu

SEQ ID NO: 3591655 - RNA, 16 nt, Human
agcaccaaucaugaau

SEQ ID NO: 3591656 - RNA, 15 nt, Human
agcaccaccaggucu

SEQ ID NO: 3591657 - RNA, 23 nt, Human
agcaccacccuagucccuucccc

SEQ ID NO: 3591658 - RNA, 18 nt, Human
agcaccacccuccuuccc

SEQ ID NO: 3591659 - RNA, 12 nt, Human
acugcuauuuuu

SEQ ID NO: 3591660 - RNA, 22 nt, Human
acugcucagaacuugcugcugu

SEQ ID NO: 3591661 - RNA, 21 nt, Human
acugcucaggcugcagcugga

SEQ ID NO: 3591662 - RNA, 20 nt, Human
acugcuccccagcccuggcu

SEQ ID NO: 3591663 - RNA, 20 nt, Human
acugcucccuaagccagccu

SEQ ID NO: 3591664 - RNA, 17 nt, Human
acugcuccguggaggag

SEQ ID NO: 3591665 - RNA, 23 nt, Human
acugcuccguggaggagguuggg

SEQ ID NO: 3591666 - RNA, 18 nt, Human
acugcuccugagccccca

SEQ ID NO: 3591667 - RNA, 20 nt, Human
acugcuccugagcccccagc

SEQ ID NO: 3591668 - RNA, 21 nt, Human
acugcucucaccuugguuccu

SEQ ID NO: 3591669 - RNA, 22 nt, Human
acugcucucaccuugguuccug

SEQ ID NO: 3591670 - RNA, 19 nt, Human
acugcugagauacauacag

SEQ ID NO: 3591671 - RNA, 13 nt, Human
acugcugcugccu

SEQ ID NO: 3591672 - RNA, 20 nt, Human
acugcugcuucauguuugcc

SEQ ID NO: 3591673 - RNA, 20 nt, Human
acugcuggacgucuuucuuu

SEQ ID NO: 3591674 - RNA, 22 nt, Human
acugcuggacgucuuucuuuuu

SEQ ID NO: 3591675 - RNA, 12 nt, Human
acugcugggugg

SEQ ID NO: 3591676 - RNA, 16 nt, Human
acugcuggguggccca

SEQ ID NO: 3591677 - RNA, 21 nt, Human
acugcugugcugugcccaagu

SEQ ID NO: 3591678 - RNA, 16 nt, Human
acugcuguggccagga

SEQ ID NO: 3591679 - RNA, 17 nt, Human
acugcuguggccaggag

SEQ ID NO: 3591680 - RNA, 18 nt, Human
acugcuguuauauuucau

SEQ ID NO: 3591681 - RNA, 20 nt, Human
acugcuguuauauuucauca

SEQ ID NO: 3591682 - RNA, 17 nt, Human
acugcuuccagugaggc

SEQ ID NO: 3591683 - RNA, 16 nt, Human
acugcuucccauccua

SEQ ID NO: 3591684 - RNA, 17 nt, Human
acugcuuccuuucuuga

SEQ ID NO: 3591685 - RNA, 23 nt, Human
acugcuugaacuaggcugagcaa

SEQ ID NO: 3591686 - RNA, 18 nt, Human
acugcuugaggaaaacaa

SEQ ID NO: 3591687 - RNA, 16 nt, Human
acugcuugaugaagca

SEQ ID NO: 3591688 - RNA, 20 nt, Human
acugcuugcccuaagcagaa

SEQ ID NO: 3591689 - RNA, 22 nt, Human
acugcuugcccuaagcagaaag

SEQ ID NO: 3591690 - RNA, 18 nt, Human
acugcuuguguuuuuaac

SEQ ID NO: 3591691 - RNA, 13 nt, Human
acugcuuguuucc

SEQ ID NO: 3591692 - RNA, 17 nt, Human
acugcuuucuuucguuu

SEQ ID NO: 3591693 - RNA, 22 nt, Human
acugcuuugggauuuaauuucc

SEQ ID NO: 3591694 - RNA, 18 nt, Human
acugcuuuuaacuucuga

SEQ ID NO: 3591695 - RNA, 17 nt, Human
acugcuuuuggccugga

SEQ ID NO: 3591696 - RNA, 16 nt, Human
acugcuuuuggucugu

SEQ ID NO: 3591697 - RNA, 17 nt, Human
acuggaaaacagaacac

SEQ ID NO: 3591698 - RNA, 16 nt, Human
agcacuacauaaacug

SEQ ID NO: 3591699 - RNA, 21 nt, Human
agcacuacauaaacugacuuu

SEQ ID NO: 3591700 - RNA, 18 nt, Human
agcacuacugggugucau

SEQ ID NO: 3591701 - RNA, 23 nt, Human
agcacuacugggugucauuucau

SEQ ID NO: 3591702 - RNA, 13 nt, Human
agcacuagagaau

SEQ ID NO: 3591703 - RNA, 16 nt, Human
agcacuagagaaugca

SEQ ID NO: 3591704 - RNA, 17 nt, Human
agcacuagagaaugcac

SEQ ID NO: 3591705 - RNA, 20 nt, Human
agcacuagccaaaccucacc

SEQ ID NO: 3591706 - RNA, 15 nt, Human
agcacuaggcaccca

SEQ ID NO: 3591707 - RNA, 17 nt, Human
agcacuaugcuuuccuu

SEQ ID NO: 3591708 - RNA, 14 nt, Human
agcacucacaugcu

SEQ ID NO: 3591709 - RNA, 19 nt, Human
agcacucaggcucuccauu

SEQ ID NO: 3591710 - RNA, 19 nt, Human
agcacucccaagucuacag

SEQ ID NO: 3591711 - RNA, 19 nt, Human
agcacuccucccugaugua

SEQ ID NO: 3591712 - RNA, 19 nt, Human
agcacucgcuagcaguggc

SEQ ID NO: 3591713 - RNA, 23 nt, Human
agcacucugaguuuaccauuugu

SEQ ID NO: 3591714 - RNA, 22 nt, Human
agcacugaaaauaccaucaggc

SEQ ID NO: 3591715 - RNA, 16 nt, Human
agcacugaaccuggga

SEQ ID NO: 3591716 - RNA, 14 nt, Human
agcacugacagauu

SEQ ID NO: 3591717 - RNA, 18 nt, Human
agcacugacagauuucca

SEQ ID NO: 3591718 - RNA, 12 nt, Human
agcacugaccug

SEQ ID NO: 3591719 - RNA, 13 nt, Human
agcacugaccugu

SEQ ID NO: 3591720 - RNA, 22 nt, Human
agcacugaccugucaugccccc

SEQ ID NO: 3591721 - RNA, 17 nt, Human
agcacugacuucuaagu

SEQ ID NO: 3591722 - RNA, 11 nt, Human
agcacugagca

SEQ ID NO: 3591723 - RNA, 11 nt, Human
agcacugagga

SEQ ID NO: 3591724 - RNA, 14 nt, Human
agcacugccaccag

SEQ ID NO: 3591725 - RNA, 15 nt, Human
agcacugccaggagg

SEQ ID NO: 3591726 - RNA, 16 nt, Human
agcacugccaggaggg

SEQ ID NO: 3591727 - RNA, 19 nt, Human
agcacugccugcucccauc

SEQ ID NO: 3591728 - RNA, 16 nt, Human
agcacuggagugcagg

SEQ ID NO: 3591729 - RNA, 22 nt, Human
agcacuggagugcagggaggag

SEQ ID NO: 3591730 - RNA, 18 nt, Human
agcacuggcucucuccag

SEQ ID NO: 3591731 - RNA, 15 nt, Human
agcacugggcucccg

SEQ ID NO: 3591732 - RNA, 21 nt, Human
agcacugggcucccgggcccc

SEQ ID NO: 3591733 - RNA, 19 nt, Human
agcacugucccuugccuca

SEQ ID NO: 3591734 - RNA, 22 nt, Human
agcacugucccuugccucaaug

SEQ ID NO: 3591735 - RNA, 15 nt, Human
agcacugugcuaaua

SEQ ID NO: 3591736 - RNA, 19 nt, Human
agcacugugcucagggcua

SEQ ID NO: 3591737 - RNA, 20 nt, Human
agcacuguugauguaucuga

SEQ ID NO: 3591738 - RNA, 15 nt, Human
agcacuguuuucuag

SEQ ID NO: 3591739 - RNA, 22 nt, Human
agcacuguuuucuaguguauca

SEQ ID NO: 3591740 - RNA, 19 nt, Human
agcacuucaucuggcugcc

SEQ ID NO: 3591741 - RNA, 19 nt, Human
agcacuuccaaaauucuua

SEQ ID NO: 3591742 - RNA, 20 nt, Human
agcacuuccuugccagucuu

SEQ ID NO: 3591743 - RNA, 15 nt, Human
agcacuucuuuuucu

SEQ ID NO: 3591744 - RNA, 16 nt, Human
agcacuuguccagcug

SEQ ID NO: 3591745 - RNA, 21 nt, Human
agcacuuuagaauaugccuug

SEQ ID NO: 3591746 - RNA, 16 nt, Human
agcacuuucauugcca

SEQ ID NO: 3591747 - RNA, 20 nt, Human
agcacuuugaaauaccucau

SEQ ID NO: 3591748 - RNA, 15 nt, Human
agcacuuugcaagga

SEQ ID NO: 3591749 - RNA, 17 nt, Human
agcacuuugggaggccg

SEQ ID NO: 3591750 - RNA, 20 nt, Human
agcacuuugggaggccgagg

SEQ ID NO: 3591751 - RNA, 14 nt, Human
agcacuuuuuaaaa

SEQ ID NO: 3591752 - RNA, 22 nt, Human
agcagaaaacuggcccugcccu

SEQ ID NO: 3591753 - RNA, 18 nt, Human
agcagaaauccaagcacc

SEQ ID NO: 3591754 - RNA, 19 nt, Human
agcagaaaugccuuacccu

SEQ ID NO: 3591755 - RNA, 14 nt, Human
agcagaaauucugu

SEQ ID NO: 3591756 - RNA, 14 nt, Human
agcagaacagugau

SEQ ID NO: 3591757 - RNA, 23 nt, Human
agcagaacugcuauuuuucaucc

SEQ ID NO: 3591758 - RNA, 16 nt, Human
agcagaaggauuuuuu

SEQ ID NO: 3591759 - RNA, 12 nt, Human
agcagaaggggg

SEQ ID NO: 3591760 - RNA, 16 nt, Human
agcagaaggggguggu

SEQ ID NO: 3591761 - RNA, 22 nt, Human
agcagaaggggguggugucucc

SEQ ID NO: 3591762 - RNA, 12 nt, Human
agcagaauaaag

SEQ ID NO: 3591763 - RNA, 19 nt, Human
agcagaauagcaaggugcu

SEQ ID NO: 3591764 - RNA, 14 nt, Human
agcagaauucauuc

SEQ ID NO: 3591765 - RNA, 13 nt, Human
agcagacauuguc

SEQ ID NO: 3591766 - RNA, 17 nt, Human
agcagacauugucagca

SEQ ID NO: 3591767 - RNA, 23 nt, Human
agcagaccauuggggcucccagc

SEQ ID NO: 3591768 - RNA, 18 nt, Human
agcagacugaucaggacc

SEQ ID NO: 3591769 - RNA, 19 nt, Human
agcagacuggugagcagac

SEQ ID NO: 3591770 - RNA, 22 nt, Human
agcagagaaugaaagggcccag

SEQ ID NO: 3591771 - RNA, 21 nt, Human
agcagagaauucucuuaucca

SEQ ID NO: 3591772 - RNA, 19 nt, Human
agcagagaccaucccugaa

SEQ ID NO: 3591773 - RNA, 19 nt, Human
agcagagagcauuauaauc

SEQ ID NO: 3591774 - RNA, 19 nt, Human
agcagagcaagucugcagg

SEQ ID NO: 3591775 - RNA, 15 nt, Human
agcagagcaggggca

SEQ ID NO: 3591776 - RNA, 17 nt, Human
agcagagcugauggaga

SEQ ID NO: 3591777 - RNA, 23 nt, Human
agcagagcugauggagaaggaag

SEQ ID NO: 3591778 - RNA, 16 nt, Human
agcagaggaccagggc

SEQ ID NO: 3591779 - RNA, 12 nt, Human
agcagaggaggg

SEQ ID NO: 3591780 - RNA, 15 nt, Human
agcagaggaggggcc

SEQ ID NO: 3591781 - RNA, 13 nt, Human
agcagaggcagcg

SEQ ID NO: 3591782 - RNA, 19 nt, Human
agcagaggcuggccucaga

SEQ ID NO: 3591783 - RNA, 13 nt, Human
agcagaggucucc

SEQ ID NO: 3591784 - RNA, 16 nt, Human
agcagagugcacagcu

SEQ ID NO: 3591785 - RNA, 12 nt, Human
agcagaguuaaa

SEQ ID NO: 3591786 - RNA, 13 nt, Human
agcagaguuuuca

SEQ ID NO: 3591787 - RNA, 19 nt, Human
agcagaguuuucauuaaau

SEQ ID NO: 3591788 - RNA, 15 nt, Human
agcagauacugcugu

SEQ ID NO: 3591789 - RNA, 18 nt, Human
agcagaucuguuuugugg

SEQ ID NO: 3591790 - RNA, 18 nt, Human
agcagaugcaaagaggca

SEQ ID NO: 3591791 - RNA, 19 nt, Human
agcagaugcaaagaggcaa

SEQ ID NO: 3591792 - RNA, 20 nt, Human
agcagaugcaaagaggcaag

SEQ ID NO: 3591793 - RNA, 21 nt, Human
agcagaugcagagagccauuu

SEQ ID NO: 3591794 - RNA, 13 nt, Human
agcagaugcuggu

SEQ ID NO: 3591795 - RNA, 14 nt, Human
agcagauuauucac

SEQ ID NO: 3591796 - RNA, 15 nt, Human
agcagauuauucacu

SEQ ID NO: 3591797 - RNA, 13 nt, Human
agcagauuggaag

SEQ ID NO: 3591798 - RNA, 18 nt, Human
agcagauuuaacaauucc

SEQ ID NO: 3591799 - RNA, 13 nt, Human
agcagauuuuaau

SEQ ID NO: 3591800 - RNA, 20 nt, Human
agcagcaaauuuucagcauu

SEQ ID NO: 3591801 - RNA, 17 nt, Human
agcagcaacuuguccua

SEQ ID NO: 3591802 - RNA, 15 nt, Human
agcagcaagaaaaaa

SEQ ID NO: 3591803 - RNA, 18 nt, Human
agccaucaccuuagacca

SEQ ID NO: 3591804 - RNA, 13 nt, Human
agccaucauggau

SEQ ID NO: 3591805 - RNA, 14 nt, Human
agccaucccagccu

SEQ ID NO: 3591806 - RNA, 22 nt, Human
agccaucggugaaacuaacaga

SEQ ID NO: 3591807 - RNA, 21 nt, Human
agccaucucaugaggggagag

SEQ ID NO: 3591808 - RNA, 23 nt, Human
agccaucucaugaggggagagga

SEQ ID NO: 3591809 - RNA, 19 nt, Human
agccaucugcccaggggug

SEQ ID NO: 3591810 - RNA, 15 nt, Human
agccaucuugguaaa

SEQ ID NO: 3591811 - RNA, 19 nt, Human
agccaucuugguaaauuuc

SEQ ID NO: 3591812 - RNA, 17 nt, Human
agccaugaccuuacauu

SEQ ID NO: 3591813 - RNA, 19 nt, Human
agccaugaggaguugcugu

SEQ ID NO: 3591814 - RNA, 18 nt, Human
agccaugauaacugcaau

SEQ ID NO: 3591815 - RNA, 14 nt, Human
agccaugccagcug

SEQ ID NO: 3591816 - RNA, 21 nt, Human
agccaugccagcuggccuuug

SEQ ID NO: 3591817 - RNA, 18 nt, Human
agccauggacucuacacu

SEQ ID NO: 3591818 - RNA, 22 nt, Human
agccaugggcacaaagggccca

SEQ ID NO: 3591819 - RNA, 23 nt, Human
agccauguacagacagagaauau

SEQ ID NO: 3591820 - RNA, 17 nt, Human
agccauguauaaaugug

SEQ ID NO: 3591821 - RNA, 15 nt, Human
agccaugucuucucc

SEQ ID NO: 3591822 - RNA, 16 nt, Human
agccaugucuucuccc

SEQ ID NO: 3591823 - RNA, 14 nt, Human
agccauguuuaaga

SEQ ID NO: 3591824 - RNA, 15 nt, Human
agccauguuuaagau

SEQ ID NO: 3591825 - RNA, 22 nt, Human
agccauguuuaagauuuaauuu

SEQ ID NO: 3591826 - RNA, 22 nt, Human
agccauguuuauuacaguauaa

SEQ ID NO: 3591827 - RNA, 14 nt, Human
agccauuaaaugaa

SEQ ID NO: 3591828 - RNA, 18 nt, Human
agccauuaaaugaauauu

SEQ ID NO: 3591829 - RNA, 22 nt, Human
agccauuaaaugaauauuuuga

SEQ ID NO: 3591830 - RNA, 20 nt, Human
agccauuaccauggagacaa

SEQ ID NO: 3591831 - RNA, 22 nt, Human
agccauuccugguacccagcca

SEQ ID NO: 3591832 - RNA, 21 nt, Human
agccauuggcuauuuaaaacu

SEQ ID NO: 3591833 - RNA, 14 nt, Human
agccauuucuuguu

SEQ ID NO: 3591834 - RNA, 19 nt, Human
agccauuugucccaagugc

SEQ ID NO: 3591835 - RNA, 20 nt, Human
agccauuuuggggggccccc

SEQ ID NO: 3591836 - RNA, 15 nt, Human
agccauuuugugaau

SEQ ID NO: 3591837 - RNA, 19 nt, Human
agccauuuugugaauggau

SEQ ID NO: 3591838 - RNA, 18 nt, Human
agccauuuuucaaagcaa

SEQ ID NO: 3591839 - RNA, 17 nt, Human
agcccaaaccaccagaa

SEQ ID NO: 3591840 - RNA, 23 nt, Human
agcccaaaggggacaggccucac

SEQ ID NO: 3591841 - RNA, 16 nt, Human
agcccaaccucuuccu

SEQ ID NO: 3591842 - RNA, 15 nt, Human
agcccaagcuucccu

SEQ ID NO: 3591843 - RNA, 23 nt, Human
agcccaagguuuaaacuucucug

SEQ ID NO: 3591844 - RNA, 21 nt, Human
agcccaaguucaugcagcugu

SEQ ID NO: 3591845 - RNA, 23 nt, Human
agcccaaguucaugcagcugugg

SEQ ID NO: 3591846 - RNA, 16 nt, Human
agcccaauaaaccucu

SEQ ID NO: 3591847 - RNA, 16 nt, Human
agcccaauccagguac

SEQ ID NO: 3591848 - RNA, 22 nt, Human
agcccacagguguccccagccc

SEQ ID NO: 3591849 - RNA, 16 nt, Human
agcccaccccccucau

SEQ ID NO: 3591850 - RNA, 23 nt, Human
agcccaccccucaacaccucugc

SEQ ID NO: 3591851 - RNA, 23 nt, Human
agcccacccuccugucuucccag

SEQ ID NO: 3591852 - RNA, 16 nt, Human
agcccacccugcugcc

SEQ ID NO: 3591853 - RNA, 22 nt, Human
agcccacccugcugcuggugca

SEQ ID NO: 3591854 - RNA, 20 nt, Human
agcccacgacacugcagccc

SEQ ID NO: 3591855 - RNA, 15 nt, Human
agcccacgcccccac

SEQ ID NO: 3591856 - RNA, 20 nt, Human
agcccacgcccccacuggug

SEQ ID NO: 3591857 - RNA, 21 nt, Human
agcccacgcugacuacagggc

SEQ ID NO: 3591858 - RNA, 22 nt, Human
agcccacgcugacuacagggcc

SEQ ID NO: 3591859 - RNA, 20 nt, Human
agcccacggcuaagaggcug

SEQ ID NO: 3591860 - RNA, 22 nt, Human
agcccacggcuaagaggcugcu

SEQ ID NO: 3591861 - RNA, 16 nt, Human
agcccacgucacgugu

SEQ ID NO: 3591862 - RNA, 23 nt, Human
agcccacgucacguguagugucc

SEQ ID NO: 3591863 - RNA, 14 nt, Human
agcccacuggauca

SEQ ID NO: 3591864 - RNA, 14 nt, Human
agcccacuguacuu

SEQ ID NO: 3591865 - RNA, 14 nt, Human
agcccacuucugcc

SEQ ID NO: 3591866 - RNA, 17 nt, Human
agcccagaaaaggacag

SEQ ID NO: 3591867 - RNA, 11 nt, Human
agcccagagaa

SEQ ID NO: 3591868 - RNA, 12 nt, Human
agcccagagaca

SEQ ID NO: 3591869 - RNA, 12 nt, Human
agcccagagacu

SEQ ID NO: 3591870 - RNA, 17 nt, Human
agcccagagccuggcug

SEQ ID NO: 3591871 - RNA, 12 nt, Human
agcccagaggag

SEQ ID NO: 3591872 - RNA, 17 nt, Human
agcccagagggucuggg

SEQ ID NO: 3591873 - RNA, 20 nt, Human
agcccagagggucugggggc

SEQ ID NO: 3591874 - RNA, 13 nt, Human
agcccagagguaa

SEQ ID NO: 3591875 - RNA, 16 nt, Human
agcccagagguaacag

SEQ ID NO: 3591876 - RNA, 17 nt, Human
agcccagagucccccca

SEQ ID NO: 3591877 - RNA, 17 nt, Human
agcccagauuccccugu

SEQ ID NO: 3591878 - RNA, 20 nt, Human
agcccagauuccccuguguc

SEQ ID NO: 3591879 - RNA, 21 nt, Human
agcccagauuccccuguguca

SEQ ID NO: 3591880 - RNA, 21 nt, Human
agcccagauugugccacugcu

SEQ ID NO: 3591881 - RNA, 15 nt, Human
agcccagcacugcuu

SEQ ID NO: 3591882 - RNA, 11 nt, Human
agcccagccag

SEQ ID NO: 3591883 - RNA, 15 nt, Human
agcccagcccagcug

SEQ ID NO: 3591884 - RNA, 16 nt, Human
agcccagcccagcugc

SEQ ID NO: 3591885 - RNA, 14 nt, Human
agcccagcuccagg

SEQ ID NO: 3591886 - RNA, 16 nt, Human
agcccagcuccagggc

SEQ ID NO: 3591887 - RNA, 18 nt, Human
agcccagcuccagggcca

SEQ ID NO: 3591888 - RNA, 18 nt, Human
agcccagcugcucugccc

SEQ ID NO: 3591889 - RNA, 19 nt, Human
agcccagcugcucugccca

SEQ ID NO: 3591890 - RNA, 22 nt, Human
agcccagcugcucugcccagag

SEQ ID NO: 3591891 - RNA, 13 nt, Human
agcccagcugggu

SEQ ID NO: 3591892 - RNA, 20 nt, Human
agcccagcugggucaggcag

SEQ ID NO: 3591893 - RNA, 21 nt, Human
agcccagcugggucaggcagg

SEQ ID NO: 3591894 - RNA, 19 nt, Human
agcauucuuagccuguggc

SEQ ID NO: 3591895 - RNA, 16 nt, Human
agcauucuugucacaa

SEQ ID NO: 3591896 - RNA, 21 nt, Human
agcauucuugucacaauaaau

SEQ ID NO: 3591897 - RNA, 22 nt, Human
agcauucuuuggaguuaaaaug

SEQ ID NO: 3591898 - RNA, 15 nt, Human
agcauugauauuugu

SEQ ID NO: 3591899 - RNA, 19 nt, Human
agcauugauauuugugcau

SEQ ID NO: 3591900 - RNA, 13 nt, Human
agcauugccauuc

SEQ ID NO: 3591901 - RNA, 12 nt, Human
agcauugccugg

SEQ ID NO: 3591902 - RNA, 17 nt, Human
agcauugccuggccuuc

SEQ ID NO: 3591903 - RNA, 15 nt, Human
agcauugcuggacuc

SEQ ID NO: 3591904 - RNA, 16 nt, Human
agcauugcuguuaugu

SEQ ID NO: 3591905 - RNA, 20 nt, Human
agcauugcuguuaugucugu

SEQ ID NO: 3591906 - RNA, 23 nt, Human
agcauugcuguuaugucuguuua

SEQ ID NO: 3591907 - RNA, 13 nt, Human
agcauugcuuucu

SEQ ID NO: 3591908 - RNA, 17 nt, Human
agcauuguaaaagcauu

SEQ ID NO: 3591909 - RNA, 17 nt, Human
agcauuguaaaugugcu

SEQ ID NO: 3591910 - RNA, 22 nt, Human
agcauuguaagcguauggcuuu

SEQ ID NO: 3591911 - RNA, 20 nt, Human
agcauuguagugcuuugaga

SEQ ID NO: 3591912 - RNA, 22 nt, Human
agcauugucuauuuuucucuuc

SEQ ID NO: 3591913 - RNA, 17 nt, Human
agcauuguuugcuuauu

SEQ ID NO: 3591914 - RNA, 22 nt, Human
agcauuguuugcuuauuguucc

SEQ ID NO: 3591915 - RNA, 23 nt, Human
agcauuuaaccccccuguacaca

SEQ ID NO: 3591916 - RNA, 14 nt, Human
agcauuuccaacac

SEQ ID NO: 3591917 - RNA, 18 nt, Human
agcauuuccaacaccaca

SEQ ID NO: 3591918 - RNA, 20 nt, Human
agcauuucgcgauggacaga

SEQ ID NO: 3591919 - RNA, 14 nt, Human
agcauuucucauca

SEQ ID NO: 3591920 - RNA, 13 nt, Human
agcauuucugaag

SEQ ID NO: 3591921 - RNA, 21 nt, Human
agcauuugacccuugcuguga

SEQ ID NO: 3591922 - RNA, 17 nt, Human
agcauuugacuuucugu

SEQ ID NO: 3591923 - RNA, 14 nt, Human
agcauuugauaaug

SEQ ID NO: 3591924 - RNA, 15 nt, Human
agcauuugauaauga

SEQ ID NO: 3591925 - RNA, 19 nt, Human
agcauuugauaaugauaaa

SEQ ID NO: 3591926 - RNA, 12 nt, Human
agcauuugauau

SEQ ID NO: 3591927 - RNA, 15 nt, Human
agcauuugaucuguu

SEQ ID NO: 3591928 - RNA, 13 nt, Human
agcauuuggugcu

SEQ ID NO: 3591929 - RNA, 16 nt, Human
agcauuugucaacaaa

SEQ ID NO: 3591930 - RNA, 16 nt, Human
agcauuuguguguuac

SEQ ID NO: 3591931 - RNA, 17 nt, Human
agcauuuguuucuacuu

SEQ ID NO: 3591932 - RNA, 20 nt, Human
agcauuuuauaaaucgcuuu

SEQ ID NO: 3591933 - RNA, 13 nt, Human
agcauuuuucaau

SEQ ID NO: 3591934 - RNA, 16 nt, Human
agcauuuuucaauaua

SEQ ID NO: 3591935 - RNA, 18 nt, Human
agccaaaaauagcuaaau

SEQ ID NO: 3591936 - RNA, 15 nt, Human
agccaaaacugagca

SEQ ID NO: 3591937 - RNA, 15 nt, Human
agccaaaauuaaggu

SEQ ID NO: 3591938 - RNA, 17 nt, Human
agccaaaauuaaggugu

SEQ ID NO: 3591939 - RNA, 22 nt, Human
agccaaacacacagaaggggac

SEQ ID NO: 3591940 - RNA, 19 nt, Human
agccaaacccaugaggcaa

SEQ ID NO: 3591941 - RNA, 14 nt, Human
agccaaacccuguc

SEQ ID NO: 3591942 - RNA, 11 nt, Human
agccaaagagu

SEQ ID NO: 3591943 - RNA, 20 nt, Human
agccaaauguaauugaauaa

SEQ ID NO: 3591944 - RNA, 16 nt, Human
agccaaauuuaucaaa

SEQ ID NO: 3591945 - RNA, 23 nt, Human
agccaacacccugucuaaaaaac

SEQ ID NO: 3591946 - RNA, 19 nt, Human
agccaacacgcaccugccu

SEQ ID NO: 3591947 - RNA, 18 nt, Human
agccaacagaagcuucca

SEQ ID NO: 3591948 - RNA, 15 nt, Human
agccaacagguggca

SEQ ID NO: 3591949 - RNA, 21 nt, Human
agccaacagguggcaggacca

SEQ ID NO: 3591950 - RNA, 16 nt, Human
agccaacuagccccug

SEQ ID NO: 3591951 - RNA, 12 nt, Human
agccaacuccau

SEQ ID NO: 3591952 - RNA, 13 nt, Human
agccaacugcugc

SEQ ID NO: 3591953 - RNA, 20 nt, Human
agccaacuuggcuuucccgg

SEQ ID NO: 3591954 - RNA, 15 nt, Human
agccaacuuuugcau

SEQ ID NO: 3591955 - RNA, 19 nt, Human
agccaagauugcgccauug

SEQ ID NO: 3591956 - RNA, 22 nt, Human
agccaagauuuuccucuuguga

SEQ ID NO: 3591957 - RNA, 14 nt, Human
agccaagcacagug

SEQ ID NO: 3591958 - RNA, 16 nt, Human
agccaagcacaguggu

SEQ ID NO: 3591959 - RNA, 17 nt, Human
agccaagcacaguggug

SEQ ID NO: 3591960 - RNA, 21 nt, Human
agccaagcuagaauucccucu

SEQ ID NO: 3591961 - RNA, 15 nt, Human
agccaagcucugcag

SEQ ID NO: 3591962 - RNA, 16 nt, Human
agccaagcucugcagu

SEQ ID NO: 3591963 - RNA, 17 nt, Human
agccaagcuuguuauca

SEQ ID NO: 3591964 - RNA, 15 nt, Human
agccaagcuuuaaau

SEQ ID NO: 3591965 - RNA, 19 nt, Human
agccaaggagucacugaga

SEQ ID NO: 3591966 - RNA, 22 nt, Human
agccaaggauagaagcugcagu

SEQ ID NO: 3591967 - RNA, 17 nt, Human
agccaaggccaaaggaa

SEQ ID NO: 3591968 - RNA, 21 nt, Human
agccaaggcucuguuuaugcu

SEQ ID NO: 3591969 - RNA, 20 nt, Human
agccaagggaaccugugucc

SEQ ID NO: 3591970 - RNA, 20 nt, Human
agccaagggauggacaucuu

SEQ ID NO: 3591971 - RNA, 23 nt, Human
agccaagggcaacagaucaguaa

SEQ ID NO: 3591972 - RNA, 18 nt, Human
agccaaggguucagagac

SEQ ID NO: 3591973 - RNA, 22 nt, Human
agccaaggguucagagacucag

SEQ ID NO: 3591974 - RNA, 20 nt, Human
agccaaggugggcugagccc

SEQ ID NO: 3591975 - RNA, 20 nt, Human
agccaaguagccucuccugu

SEQ ID NO: 3591976 - RNA, 21 nt, Human
agccaagucagcuuugccuuc

SEQ ID NO: 3591977 - RNA, 23 nt, Human
agccaagucagcuuugccuucca

SEQ ID NO: 3591978 - RNA, 15 nt, Human
agccaaguccagauu

SEQ ID NO: 3591979 - RNA, 13 nt, Human
agccaagugcagg

SEQ ID NO: 3591980 - RNA, 18 nt, Human
agccaagugccaaaugcu

SEQ ID NO: 3591981 - RNA, 19 nt, Human
agccaagugccaaaugcuc

SEQ ID NO: 3591982 - RNA, 15 nt, Human
agccaauccccuccu

SEQ ID NO: 3591983 - RNA, 18 nt, Human
agccaauccccuccuugg

SEQ ID NO: 3591984 - RNA, 20 nt, Human
agccaauccccuccuugggc

SEQ ID NO: 3591985 - RNA, 13 nt, Human
agccaaugcuguc

SEQ ID NO: 3591986 - RNA, 13 nt, Human
agccaaugcuuac

SEQ ID NO: 3591987 - RNA, 20 nt, Human
agccaaugucuccuccccuu

SEQ ID NO: 3591988 - RNA, 14 nt, Human
agccaauguuuucc

SEQ ID NO: 3591989 - RNA, 16 nt, Human
agccaauucagacagg

SEQ ID NO: 3591990 - RNA, 17 nt, Human
agccaauucagacaggc

SEQ ID NO: 3591991 - RNA, 20 nt, Human
agccaauuuuucugcacuga

SEQ ID NO: 3591992 - RNA, 23 nt, Human
agccaauuuuucugcacugagca

SEQ ID NO: 3591993 - RNA, 15 nt, Human
agccacaagucuucc

SEQ ID NO: 3591994 - RNA, 13 nt, Human
agccacacacaca

SEQ ID NO: 3591995 - RNA, 17 nt, Human
agccacaccaggauaga

SEQ ID NO: 3591996 - RNA, 24 nt, Human
agccacaccaggauagagacugga

SEQ ID NO: 3591997 - RNA, 18 nt, Human
agccacacuucucaggac

SEQ ID NO: 3591998 - RNA, 10 nt, Human
agccacagaa

SEQ ID NO: 3591999 - RNA, 23 nt, Human
agccacagaagccaggagcaaau

SEQ ID NO: 3592000 - RNA, 20 nt, Human
agccacagcagcauuuuuau

SEQ ID NO: 3592001 - RNA, 16 nt, Human
agccacagcccaggcc

SEQ ID NO: 3592002 - RNA, 14 nt, Human
agccacaggccuga

SEQ ID NO: 3592003 - RNA, 22 nt, Human
agccacaggccugagauuucau

SEQ ID NO: 3592004 - RNA, 13 nt, Human
agccacaguggga

SEQ ID NO: 3592005 - RNA, 22 nt, Human
agccacaguuuccucaucuguc

SEQ ID NO: 3592006 - RNA, 14 nt, Human
agccacauuauuuc

SEQ ID NO: 3592007 - RNA, 22 nt, Human
agccacauuuggaauacuuuuu

SEQ ID NO: 3592008 - RNA, 20 nt, Human
agccaccaacauacucccau

SEQ ID NO: 3592009 - RNA, 23 nt, Human
agccaccaacauacucccaucug

SEQ ID NO: 3592010 - RNA, 17 nt, Human
agccaccacaccuggcu

SEQ ID NO: 3592011 - RNA, 15 nt, Human
agccacccaaagcag

SEQ ID NO: 3592012 - RNA, 13 nt, Human
agccaccccugag

SEQ ID NO: 3592013 - RNA, 18 nt, Human
agccacccugaggagucu

SEQ ID NO: 3592014 - RNA, 20 nt, Human
agccacccugaggagucuga

SEQ ID NO: 3592015 - RNA, 22 nt, Human
agccacccugaggagucugagg

SEQ ID NO: 3592016 - RNA, 14 nt, Human
agccacccugaguu

SEQ ID NO: 3592017 - RNA, 20 nt, Human
agccaccgaagccgccugug

SEQ ID NO: 3592018 - RNA, 22 nt, Human
agccaccgaagccgccugugga

SEQ ID NO: 3592019 - RNA, 18 nt, Human
agccaccgugccuggcca

SEQ ID NO: 3592020 - RNA, 14 nt, Human
agccaccugaguuc

SEQ ID NO: 3592021 - RNA, 18 nt, Human
agccaccugucccaccuc

SEQ ID NO: 3592022 - RNA, 23 nt, Human
agccaccuuuugggaauguuuua

SEQ ID NO: 3592023 - RNA, 19 nt, Human
agccacggggacucagccc

SEQ ID NO: 3592024 - RNA, 15 nt, Human
agccacgguguucug

SEQ ID NO: 3592025 - RNA, 21 nt, Human
agccacguuccuuacugcaga

SEQ ID NO: 3592026 - RNA, 19 nt, Human
agccacuaaccuugccugg

SEQ ID NO: 3592027 - RNA, 20 nt, Human
agccacuaaccuugccuggu

SEQ ID NO: 3592028 - RNA, 22 nt, Human
agccacuaagaaccccucugcu

SEQ ID NO: 3592029 - RNA, 11 nt, Human
agccacucccc

SEQ ID NO: 3592030 - RNA, 13 nt, Human
agccacuccccag

SEQ ID NO: 3592031 - RNA, 14 nt, Human
agccacuccccagc

SEQ ID NO: 3592032 - RNA, 22 nt, Human
agccacuccccagccagccugg

SEQ ID NO: 3592033 - RNA, 16 nt, Human
agccacucucuucccu

SEQ ID NO: 3592034 - RNA, 12 nt, Human
agccacugaagc

SEQ ID NO: 3592035 - RNA, 18 nt, Human
agccacugcaccgggcca

SEQ ID NO: 3592036 - RNA, 20 nt, Human
agccacugcaccgggccaca

SEQ ID NO: 3592037 - RNA, 15 nt, Human
agccacugccucucc

SEQ ID NO: 3592038 - RNA, 13 nt, Human
agccacuuaccuu

SEQ ID NO: 3592039 - RNA, 16 nt, Human
agccacuuaccuucaa

SEQ ID NO: 3592040 - RNA, 18 nt, Human
agccacuuaccuucaaua

SEQ ID NO: 3592041 - RNA, 21 nt, Human
agccacuuaccuucaauaaag

SEQ ID NO: 3592042 - RNA, 23 nt, Human
agccacuuaccuucaauaaagua

SEQ ID NO: 3592043 - RNA, 21 nt, Human
agcccagcuuuuccugggaca

SEQ ID NO: 3592044 - RNA, 14 nt, Human
agcccaggaaaggc

SEQ ID NO: 3592045 - RNA, 18 nt, Human
agcccaggaaaggcucca

SEQ ID NO: 3592046 - RNA, 19 nt, Human
agcccaggaaaggcuccag

SEQ ID NO: 3592047 - RNA, 21 nt, Human
agcccaggaaaggcuccagga

SEQ ID NO: 3592048 - RNA, 23 nt, Human
agcccaggaaaggcuccaggagc

SEQ ID NO: 3592049 - RNA, 14 nt, Human
agcccaggagagag

SEQ ID NO: 3592050 - RNA, 15 nt, Human
agcccaggagagaga

SEQ ID NO: 3592051 - RNA, 17 nt, Human
agcccaggagagagaaa

SEQ ID NO: 3592052 - RNA, 19 nt, Human
agcccaggagagagaaagc

SEQ ID NO: 3592053 - RNA, 14 nt, Human
agcccaggagccca

SEQ ID NO: 3592054 - RNA, 16 nt, Human
agcccaggagcccauu

SEQ ID NO: 3592055 - RNA, 23 nt, Human
agcccaggagcuccccuccccaa

SEQ ID NO: 3592056 - RNA, 17 nt, Human
agcccaggaggacugcc

SEQ ID NO: 3592057 - RNA, 12 nt, Human
agcccaggaggg

SEQ ID NO: 3592058 - RNA, 19 nt, Human
agcccaggagggagcagag

SEQ ID NO: 3592059 - RNA, 23 nt, Human
agcccaggagggcauccauacca

SEQ ID NO: 3592060 - RNA, 20 nt, Human
agcccaggagucccacucca

SEQ ID NO: 3592061 - RNA, 23 nt, Human
agcccaggauacuggcacagagg

SEQ ID NO: 3592062 - RNA, 14 nt, Human
agcccaggccagga

SEQ ID NO: 3592063 - RNA, 16 nt, Human
agcccaggccaggacu

SEQ ID NO: 3592064 - RNA, 20 nt, Human
agcccaggcucggccugccc

SEQ ID NO: 3592065 - RNA, 18 nt, Human
agcccagggagcggaaag

SEQ ID NO: 3592066 - RNA, 22 nt, Human
agcccagggagcggaaagcagc

SEQ ID NO: 3592067 - RNA, 15 nt, Human
agcccagggcuccug

SEQ ID NO: 3592068 - RNA, 17 nt, Human
agcccagggcuccugca

SEQ ID NO: 3592069 - RNA, 10 nt, Human
agcccagggu

SEQ ID NO: 3592070 - RNA, 18 nt, Human
agcccaggguucccccag

SEQ ID NO: 3592071 - RNA, 22 nt, Human
agcccaggguucccccagcccu

SEQ ID NO: 3592072 - RNA, 15 nt, Human
agcccaguagaccuu

SEQ ID NO: 3592073 - RNA, 16 nt, Human
agcccauacucagccu

SEQ ID NO: 3592074 - RNA, 17 nt, Human
agcccauacucagccug

SEQ ID NO: 3592075 - RNA, 16 nt, Human
agcccauccauaguaa

SEQ ID NO: 3592076 - RNA, 19 nt, Human
agcccaucgccacaaacuc

SEQ ID NO: 3592077 - RNA, 17 nt, Human
agcccaugaguccuuga

SEQ ID NO: 3592078 - RNA, 11 nt, Human
agcccaugccc

SEQ ID NO: 3592079 - RNA, 22 nt, Human
agcccaugcccaccugcccauc

SEQ ID NO: 3592080 - RNA, 19 nt, Human
agcccauggagauugaccu

SEQ ID NO: 3592081 - RNA, 21 nt, Human
agcccauguggagucagccuc

SEQ ID NO: 3592082 - RNA, 21 nt, Human
agcccauguucugcccccagc

SEQ ID NO: 3592083 - RNA, 22 nt, Human
agcccauucauuccauucugga

SEQ ID NO: 3592084 - RNA, 16 nt, Human
agcccauuguggccua

SEQ ID NO: 3592085 - RNA, 22 nt, Human
agcccauuguggccuaagaggc

SEQ ID NO: 3592086 - RNA, 19 nt, Human
agcccauuucuccagaacc

SEQ ID NO: 3592087 - RNA, 20 nt, Human
agcccauuuggagggccugg

SEQ ID NO: 3592088 - RNA, 21 nt, Human
agcccauuuggagggccuggg

SEQ ID NO: 3592089 - RNA, 23 nt, Human
agcccauuugggcagagaggcug

SEQ ID NO: 3592090 - RNA, 17 nt, Human
accaacccuguuuccug

SEQ ID NO: 3592091 - RNA, 16 nt, Human
accaacccuucccuga

SEQ ID NO: 3592092 - RNA, 21 nt, Human
accaacgcgaaaccaauuccu

SEQ ID NO: 3592093 - RNA, 23 nt, Human
accaacugaaggcuaaaaagcaa

SEQ ID NO: 3592094 - RNA, 17 nt, Human
accaacuggaagcacag

SEQ ID NO: 3592095 - RNA, 20 nt, Human
accaacuggcccucuucuua

SEQ ID NO: 3592096 - RNA, 20 nt, Human
accaacugugaugucacuga

SEQ ID NO: 3592097 - RNA, 13 nt, Human
accaacuguguug

SEQ ID NO: 3592098 - RNA, 12 nt, Human
accaacuuacaa

SEQ ID NO: 3592099 - RNA, 22 nt, Human
accaacuugguucugcuucaau

SEQ ID NO: 3592100 - RNA, 14 nt, Human
accaacuuucugua

SEQ ID NO: 3592101 - RNA, 15 nt, Human
accaagaaagcucac

SEQ ID NO: 3592102 - RNA, 11 nt, Human
accaagaagau

SEQ ID NO: 3592103 - RNA, 17 nt, Human
accaagaauugauuggg

SEQ ID NO: 3592104 - RNA, 16 nt, Human
accaagacucugaaau

SEQ ID NO: 3592105 - RNA, 20 nt, Human
accaagagagaaagaaguag

SEQ ID NO: 3592106 - RNA, 22 nt, Human
accaagagauugcuaauugcug

SEQ ID NO: 3592107 - RNA, 16 nt, Human
accaagaggcugguuu

SEQ ID NO: 3592108 - RNA, 21 nt, Human
accaagauacuuaagugcugc

SEQ ID NO: 3592109 - RNA, 19 nt, Human
accaagauggcccauccug

SEQ ID NO: 3592110 - RNA, 19 nt, Human
accaagauuggccugaggc

SEQ ID NO: 3592111 - RNA, 14 nt, Human
accaagcacagcag

SEQ ID NO: 3592112 - RNA, 16 nt, Human
accaagcacagcagcc

SEQ ID NO: 3592113 - RNA, 13 nt, Human
accaagcaggaag

SEQ ID NO: 3592114 - RNA, 17 nt, Human
accaagcaggaagcuca

SEQ ID NO: 3592115 - RNA, 14 nt, Human
accaagccguggcu

SEQ ID NO: 3592116 - RNA, 16 nt, Human
accaagccguggcuuc

SEQ ID NO: 3592117 - RNA, 17 nt, Human
accaagccguggcuucc

SEQ ID NO: 3592118 - RNA, 18 nt, Human
accaagccuggucagccc

SEQ ID NO: 3592119 - RNA, 15 nt, Human
accaagcuauccugg

SEQ ID NO: 3592120 - RNA, 14 nt, Human
accaagcuauuccu

SEQ ID NO: 3592121 - RNA, 21 nt, Human
accaagcuauuccuuucccuu

SEQ ID NO: 3592122 - RNA, 18 nt, Human
accaagcugaguuuccua

SEQ ID NO: 3592123 - RNA, 14 nt, Human
accaagcugcugug

SEQ ID NO: 3592124 - RNA, 14 nt, Human
accaagcugugcca

SEQ ID NO: 3592125 - RNA, 18 nt, Human
accaagcugugccacccu

SEQ ID NO: 3592126 - RNA, 19 nt, Human
accaagcugugccacccug

SEQ ID NO: 3592127 - RNA, 23 nt, Human
accaagcugugccacccugggcu

SEQ ID NO: 3592128 - RNA, 11 nt, Human
accaaggaaac

SEQ ID NO: 3592129 - RNA, 16 nt, Human
accaaggaccccucac

SEQ ID NO: 3592130 - RNA, 18 nt, Human
accaaggaccccucaccu

SEQ ID NO: 3592131 - RNA, 17 nt, Human
accaaggcaaggcaggu

SEQ ID NO: 3592132 - RNA, 23 nt, Human
accaaggcugagacagugaauuu

SEQ ID NO: 3592133 - RNA, 19 nt, Human
accaaggcugauuaaacca

SEQ ID NO: 3592134 - RNA, 23 nt, Human
accaaguuauaaaucaaugucac

SEQ ID NO: 3592135 - RNA, 22 nt, Human
accaaguuauauaaagagaaaa

SEQ ID NO: 3592136 - RNA, 17 nt, Human
accaauaaaauaauuuu

SEQ ID NO: 3592137 - RNA, 14 nt, Human
accaauagauuccc

SEQ ID NO: 3592138 - RNA, 20 nt, Human
accaauauuauacuaagaaa

SEQ ID NO: 3592139 - RNA, 15 nt, Human
accaauauuguacag

SEQ ID NO: 3592140 - RNA, 16 nt, Human
accaauauuguacagu

SEQ ID NO: 3592141 - RNA, 17 nt, Human
accaauauuguacaguu

SEQ ID NO: 3592142 - RNA, 13 nt, Human
accaauauuugua

SEQ ID NO: 3592143 - RNA, 19 nt, Human
accaaucaagauaaaggac

SEQ ID NO: 3592144 - RNA, 18 nt, Human
accaaucuuacuuuguaa

SEQ ID NO: 3592145 - RNA, 23 nt, Human
accaaucuuacuuuguaaauucu

SEQ ID NO: 3592146 - RNA, 14 nt, Human
accaaugaaaaaau

SEQ ID NO: 3592147 - RNA, 16 nt, Human
accaaugccaagauaa

SEQ ID NO: 3592148 - RNA, 18 nt, Human
accaaugcuuuuaucaaa

SEQ ID NO: 3592149 - RNA, 16 nt, Human
accaauuauuuucauc

SEQ ID NO: 3592150 - RNA, 13 nt, Human
accaauugugcug

SEQ ID NO: 3592151 - RNA, 20 nt, Human
accaauuguguccugaaaau

SEQ ID NO: 3592152 - RNA, 15 nt, Human
accaauuuuaacuua

SEQ ID NO: 3592153 - RNA, 14 nt, Human
accacaaaaauuga

SEQ ID NO: 3592154 - RNA, 14 nt, Human
accacaaacuguaa

SEQ ID NO: 3592155 - RNA, 18 nt, Human
accacaaauagugcucgc

SEQ ID NO: 3592156 - RNA, 21 nt, Human
accacaacaugaggccacugg

SEQ ID NO: 3592157 - RNA, 16 nt, Human
accacaacugacacag

SEQ ID NO: 3592158 - RNA, 14 nt, Human
accacacaaagaca

SEQ ID NO: 3592159 - RNA, 23 nt, Human
accacacaacauccaaguggccu

SEQ ID NO: 3592160 - RNA, 13 nt, Human
accacacacaaca

SEQ ID NO: 3592161 - RNA, 15 nt, Human
accacacaucccagc

SEQ ID NO: 3592162 - RNA, 13 nt, Human
accacacccagcc

SEQ ID NO: 3592163 - RNA, 15 nt, Human
accacacccagccca

SEQ ID NO: 3592164 - RNA, 23 nt, Human
accacacccagcccacuucugcc

SEQ ID NO: 3592165 - RNA, 17 nt, Human
accacacccagccucag

SEQ ID NO: 3592166 - RNA, 16 nt, Human
accacaccucccugaa

SEQ ID NO: 3592167 - RNA, 14 nt, Human
accacacuccagcu

SEQ ID NO: 3592168 - RNA, 13 nt, Human
acuuuaucacauu

SEQ ID NO: 3592169 - RNA, 14 nt, Human
acuuuaucacauua

SEQ ID NO: 3592170 - RNA, 21 nt, Human
acuuuaucacauuauuugcau

SEQ ID NO: 3592171 - RNA, 20 nt, Human
acuuuaucacuuuuugaacu

SEQ ID NO: 3592172 - RNA, 16 nt, Human
acuuuaucaugaaugc

SEQ ID NO: 3592173 - RNA, 19 nt, Human
acuuuaugcagcuuccuuu

SEQ ID NO: 3592174 - RNA, 20 nt, Human
acuuuaugccggaugugcuu

SEQ ID NO: 3592175 - RNA, 21 nt, Human
acuuuaugccggaugugcuuu

SEQ ID NO: 3592176 - RNA, 16 nt, Human
acuuuaugcuaaguga

SEQ ID NO: 3592177 - RNA, 13 nt, Human
acuuuauguguaa

SEQ ID NO: 3592178 - RNA, 16 nt, Human
acuuuauguguaaaua

SEQ ID NO: 3592179 - RNA, 21 nt, Human
acuuuauguguaaauacauaa

SEQ ID NO: 3592180 - RNA, 16 nt, Human
acuuuauuagcagcug

SEQ ID NO: 3592181 - RNA, 12 nt, Human
acuuuauuuacu

SEQ ID NO: 3592182 - RNA, 20 nt, Human
acuuuauuuauacacugucu

SEQ ID NO: 3592183 - RNA, 21 nt, Human
acuuuauuuccaaguuguuca

SEQ ID NO: 3592184 - RNA, 16 nt, Human
acuuuauuucucucau

SEQ ID NO: 3592185 - RNA, 15 nt, Human
acuuuauuuuguguu

SEQ ID NO: 3592186 - RNA, 21 nt, Human
acuuucaaaucgguccccugu

SEQ ID NO: 3592187 - RNA, 16 nt, Human
acuuucaagaacuugu

SEQ ID NO: 3592188 - RNA, 11 nt, Human
acuuucaaucu

SEQ ID NO: 3592189 - RNA, 17 nt, Human
acuuucacauagauguc

SEQ ID NO: 3592190 - RNA, 11 nt, Human
acuuucagcug

SEQ ID NO: 3592191 - RNA, 18 nt, Human
acuuucagguacuaaaua

SEQ ID NO: 3592192 - RNA, 17 nt, Human
acuuucauuuuuuucca

SEQ ID NO: 3592193 - RNA, 16 nt, Human
acuuuccacccccucc

SEQ ID NO: 3592194 - RNA, 22 nt, Human
acuuuccacuucuuccuuucuc

SEQ ID NO: 3592195 - RNA, 15 nt, Human
acuuuccauuacaag

SEQ ID NO: 3592196 - RNA, 16 nt, Human
acuuucccagguucug

SEQ ID NO: 3592197 - RNA, 13 nt, Human
acuuucccuaccc

SEQ ID NO: 3592198 - RNA, 21 nt, Human
acuuucccuacccucuagaga

SEQ ID NO: 3592199 - RNA, 23 nt, Human
acuuucccuugcuuuucccucuu

SEQ ID NO: 3592200 - RNA, 21 nt, Human
acuuuccgaaaaauaaagaca

SEQ ID NO: 3592201 - RNA, 19 nt, Human
acuuuccuccugaggcuuu

SEQ ID NO: 3592202 - RNA, 14 nt, Human
acuuuccugcaacu

SEQ ID NO: 3592203 - RNA, 17 nt, Human
acuuuccuggaugucug

SEQ ID NO: 3592204 - RNA, 19 nt, Human
acuuuccuuuccccagccc

SEQ ID NO: 3592205 - RNA, 22 nt, Human
acuuuccuuuccccagcccagg

SEQ ID NO: 3592206 - RNA, 17 nt, Human
acuuucuacucauuuua

SEQ ID NO: 3592207 - RNA, 19 nt, Human
acuuucuacucauuuuaau

SEQ ID NO: 3592208 - RNA, 16 nt, Human
acuuucuagccagagg

SEQ ID NO: 3592209 - RNA, 17 nt, Human
acuuucuagccagagga

SEQ ID NO: 3592210 - RNA, 14 nt, Human
acuuucucaguuuu

SEQ ID NO: 3592211 - RNA, 19 nt, Human
acuuucucuaauaauaaau

SEQ ID NO: 3592212 - RNA, 14 nt, Human
acuuucugccugga

SEQ ID NO: 3592213 - RNA, 12 nt, Human
acuuucuguuaa

SEQ ID NO: 3592214 - RNA, 13 nt, Human
acuuucuguuaaa

SEQ ID NO: 3592215 - RNA, 16 nt, Human
acuuucuguuaaaaug

SEQ ID NO: 3592216 - RNA, 14 nt, Human
acuuucuguuaugg

SEQ ID NO: 3592217 - RNA, 22 nt, Human
acuuucuguuggauuccaugcu

SEQ ID NO: 3592218 - RNA, 14 nt, Human
acuuucuucaggua

SEQ ID NO: 3592219 - RNA, 18 nt, Human
acuuucuucugaauauuu

SEQ ID NO: 3592220 - RNA, 16 nt, Human
acuuucuuuagucuuu

SEQ ID NO: 3592221 - RNA, 22 nt, Human
acuuucuuucucacuaaaucuu

SEQ ID NO: 3592222 - RNA, 20 nt, Human
acuuugaaaggagaugucuu

SEQ ID NO: 3592223 - RNA, 21 nt, Human
acuuugaaauaccucauguuu

SEQ ID NO: 3592224 - RNA, 22 nt, Human
acuuugaaauaccucauguuua

SEQ ID NO: 3592225 - RNA, 15 nt, Human
acuuugaauaaagaa

SEQ ID NO: 3592226 - RNA, 19 nt, Human
acuuugaauaaagaauacu

SEQ ID NO: 3592227 - RNA, 20 nt, Human
acuuugaauaaagaauacuu

SEQ ID NO: 3592228 - RNA, 23 nt, Human
acuuugaauuuuagcacauugca

SEQ ID NO: 3592229 - RNA, 21 nt, Human
acuuugacagcgcacagcugc

SEQ ID NO: 3592230 - RNA, 18 nt, Human
acuuugacaguguuuuua

SEQ ID NO: 3592231 - RNA, 16 nt, Human
acuuugaccucugcag

SEQ ID NO: 3592232 - RNA, 18 nt, Human
acuuugaccucugcagca

SEQ ID NO: 3592233 - RNA, 19 nt, Human
acuuugaccucugcagcaa

SEQ ID NO: 3592234 - RNA, 23 nt, Human
acuuugaccucugcagcaauaaa

SEQ ID NO: 3592235 - RNA, 22 nt, Human
acuuugacgagucaccuuccag

SEQ ID NO: 3592236 - RNA, 21 nt, Human
acuuugacuuuuugcauuuaa

SEQ ID NO: 3592237 - RNA, 16 nt, Human
acuuugaggugucuca

SEQ ID NO: 3592238 - RNA, 11 nt, Human
acuuugauguc

SEQ ID NO: 3592239 - RNA, 12 nt, Human
acuuugauguca

SEQ ID NO: 3592240 - RNA, 17 nt, Human
acuuugaugucagcagu

SEQ ID NO: 3592241 - RNA, 15 nt, Human
acuuugaugucaugu

SEQ ID NO: 3592242 - RNA, 21 nt, Human
acuuugaugucauguguuccc

SEQ ID NO: 3592243 - RNA, 17 nt, Human
acuuugauucacauguu

SEQ ID NO: 3592244 - RNA, 19 nt, Human
acuuugcacugauauauca

SEQ ID NO: 3592245 - RNA, 23 nt, Human
acuuugcagccggcacagggucu

SEQ ID NO: 3592246 - RNA, 19 nt, Human
acuuugccagcuuuuccuc

SEQ ID NO: 3592247 - RNA, 16 nt, Human
acuuugccuccugugu

SEQ ID NO: 3592248 - RNA, 17 nt, Human
acuuugcuaaagacaug

SEQ ID NO: 3592249 - RNA, 14 nt, Human
acuuugcucugggu

SEQ ID NO: 3592250 - RNA, 15 nt, Human
acuuugcucuuucuu

SEQ ID NO: 3592251 - RNA, 17 nt, Human
acuuugcucuuucuuga

SEQ ID NO: 3592252 - RNA, 19 nt, Human
acuuugcuguuccuuacuu

SEQ ID NO: 3592253 - RNA, 14 nt, Human
acuuugcuucccau

SEQ ID NO: 3592254 - RNA, 11 nt, Human
acuuugcuugc

SEQ ID NO: 3592255 - RNA, 20 nt, Human
acuuugcuugcuuugaagua

SEQ ID NO: 3592256 - RNA, 17 nt, Human
acuuugcuuuaauauaa

SEQ ID NO: 3592257 - RNA, 21 nt, Human
acuuugcuuuaauauaaaugc

SEQ ID NO: 3592258 - RNA, 18 nt, Human
acuuuggaaaaugcauug

SEQ ID NO: 3592259 - RNA, 14 nt, Human
acuuuggaaagacu

SEQ ID NO: 3592260 - RNA, 17 nt, Human
acuuuggaaagacuuuu

SEQ ID NO: 3592261 - RNA, 13 nt, Human
acuuuggaaagag

SEQ ID NO: 3592262 - RNA, 22 nt, Human
acuuuggaaccagacucuugcc

SEQ ID NO: 3592263 - RNA, 18 nt, Human
acuuuggaguccccucac

SEQ ID NO: 3592264 - RNA, 23 nt, Human
acuuuggaguccccucaccuccu

SEQ ID NO: 3592265 - RNA, 17 nt, Human
acuuuggauaauaagga

SEQ ID NO: 3592266 - RNA, 19 nt, Human
acuuuggcuuauaauucuu

SEQ ID NO: 3592267 - RNA, 23 nt, Human
acuuuggcuuauaauucuuucaa

SEQ ID NO: 3592268 - RNA, 19 nt, Human
acuuugggaaaacauguua

SEQ ID NO: 3592269 - RNA, 21 nt, Human
acuuugggaggccgaggcggg

SEQ ID NO: 3592270 - RNA, 17 nt, Human
acuuugguaccagauaa

SEQ ID NO: 3592271 - RNA, 19 nt, Human
acuuugguaccagauaacu

SEQ ID NO: 3592272 - RNA, 22 nt, Human
acuuugguagcugggaaagcau

SEQ ID NO: 3592273 - RNA, 13 nt, Human
acuuugguuauuu

SEQ ID NO: 3592274 - RNA, 22 nt, Human
acuuugguuauuuuacuuuuug

SEQ ID NO: 3592275 - RNA, 14 nt, Human
acuuugguuucuga

SEQ ID NO: 3592276 - RNA, 21 nt, Human
acuuuguaaaaaucuuuugaa

SEQ ID NO: 3592277 - RNA, 12 nt, Human
acuuuguaaaua

SEQ ID NO: 3592278 - RNA, 23 nt, Human
acuuuguaaauaggauuuuuaga

SEQ ID NO: 3592279 - RNA, 12 nt, Human
acuuuguaaauu

SEQ ID NO: 3592280 - RNA, 13 nt, Human
acuuuguaaauuc

SEQ ID NO: 3592281 - RNA, 18 nt, Human
acuuuguaaauucugauu

SEQ ID NO: 3592282 - RNA, 22 nt, Human
acuuuguaccccccaaccccug

SEQ ID NO: 3592283 - RNA, 19 nt, Human
acuuuguauaaaagggacu

SEQ ID NO: 3592284 - RNA, 16 nt, Human
acuuuguauacaagua

SEQ ID NO: 3592285 - RNA, 16 nt, Human
acuuuguauacuuuaa

SEQ ID NO: 3592286 - RNA, 18 nt, Human
acuuuguauaguuaugua

SEQ ID NO: 3592287 - RNA, 20 nt, Human
acuuuguaugauauuccaua

SEQ ID NO: 3592288 - RNA, 22 nt, Human
acuuuguaugauauuccauagu

SEQ ID NO: 3592289 - RNA, 19 nt, Human
acuuuguaugucauuuccu

SEQ ID NO: 3592290 - RNA, 22 nt, Human
acuuuguaugucauuuccuuca

SEQ ID NO: 3592291 - RNA, 15 nt, Human
acuuuguauuguccu

SEQ ID NO: 3592292 - RNA, 15 nt, Human
acuuugucagaggca

SEQ ID NO: 3592293 - RNA, 16 nt, Human
acuuugucuaagaaac

SEQ ID NO: 3592294 - RNA, 20 nt, Human
acuuugucuaagaaacauug

SEQ ID NO: 3592295 - RNA, 15 nt, Human
acuuugucugaaaaa

SEQ ID NO: 3592296 - RNA, 18 nt, Human
acuuugugcauucuggau

SEQ ID NO: 3592297 - RNA, 19 nt, Human
acuuuguggaugucuuccu

SEQ ID NO: 3592298 - RNA, 20 nt, Human
acuuuguuaguuucuccaag

SEQ ID NO: 3592299 - RNA, 11 nt, Human
acuuuguucac

SEQ ID NO: 3592300 - RNA, 16 nt, Human
acugugcaguugcugu

SEQ ID NO: 3592301 - RNA, 17 nt, Human
acugugcauagugcugg

SEQ ID NO: 3592302 - RNA, 23 nt, Human
acugugccacaaugcaguucuga

SEQ ID NO: 3592303 - RNA, 18 nt, Human
acugugcccugguggaga

SEQ ID NO: 3592304 - RNA, 15 nt, Human
acugugccucagaga

SEQ ID NO: 3592305 - RNA, 18 nt, Human
acugugccucagagacca

SEQ ID NO: 3592306 - RNA, 19 nt, Human
acugugccucagagaccag

SEQ ID NO: 3592307 - RNA, 20 nt, Human
acugugccucagagaccagg

SEQ ID NO: 3592308 - RNA, 17 nt, Human
acugugcguggggcucc

SEQ ID NO: 3592309 - RNA, 13 nt, Human
acugugcugaaug

SEQ ID NO: 3592310 - RNA, 15 nt, Human
acugugcuggagcca

SEQ ID NO: 3592311 - RNA, 17 nt, Human
acugugcuguuguucuc

SEQ ID NO: 3592312 - RNA, 15 nt, Human
accccgggcucucug

SEQ ID NO: 3592313 - RNA, 16 nt, Human
accccgggcucucugc

SEQ ID NO: 3592314 - RNA, 18 nt, Human
accccgggcucucugcug

SEQ ID NO: 3592315 - RNA, 15 nt, Human
acuuaauaacugugu

SEQ ID NO: 3592316 - RNA, 17 nt, Human
acuuaauacuaccuuga

SEQ ID NO: 3592317 - RNA, 21 nt, Human
acuuaauacuaccuugaaaau

SEQ ID NO: 3592318 - RNA, 13 nt, Human
acuuaaucuaaau

SEQ ID NO: 3592319 - RNA, 16 nt, Human
acuuaaugaaaacaau

SEQ ID NO: 3592320 - RNA, 18 nt, Human
acuuaaugaaaacaaugc

SEQ ID NO: 3592321 - RNA, 13 nt, Human
acuuaaugaauga

SEQ ID NO: 3592322 - RNA, 16 nt, Human
acuuaaugagacuuua

SEQ ID NO: 3592323 - RNA, 16 nt, Human
acuuaauguauguuac

SEQ ID NO: 3592324 - RNA, 13 nt, Human
acuuaauucuguu

SEQ ID NO: 3592325 - RNA, 17 nt, Human
acuuacacuuuaugcac

SEQ ID NO: 3592326 - RNA, 17 nt, Human
acuuacagcaaauccuu

SEQ ID NO: 3592327 - RNA, 17 nt, Human
acuuacagcucuggcca

SEQ ID NO: 3592328 - RNA, 15 nt, Human
acuuacaucaugugu

SEQ ID NO: 3592329 - RNA, 17 nt, Human
acuuacaugauucauuu

SEQ ID NO: 3592330 - RNA, 21 nt, Human
acuuacauucucuaauaagaa

SEQ ID NO: 3592331 - RNA, 22 nt, Human
acuuaccaggcaccaaaagaag

SEQ ID NO: 3592332 - RNA, 20 nt, Human
acuuaccgcguaaugcgcca

SEQ ID NO: 3592333 - RNA, 23 nt, Human
acuuaccugaagggguuuucuug

SEQ ID NO: 3592334 - RNA, 17 nt, Human
acuuaccuucaauaaag

SEQ ID NO: 3592335 - RNA, 22 nt, Human
acuuacuaaaauauauauagaa

SEQ ID NO: 3592336 - RNA, 15 nt, Human
acuuacuguacauga

SEQ ID NO: 3592337 - RNA, 16 nt, Human
acuuacuguacaugaa

SEQ ID NO: 3592338 - RNA, 24 nt, Human
acuuacuguuguccuaugggaguc

SEQ ID NO: 3592339 - RNA, 16 nt, Human
acuuacuguuucuguc

SEQ ID NO: 3592340 - RNA, 13 nt, Human
acuuacuuuuucu

SEQ ID NO: 3592341 - RNA, 16 nt, Human
acuuagaaagcagggg

SEQ ID NO: 3592342 - RNA, 19 nt, Human
acuuagaaagcaggggcua

SEQ ID NO: 3592343 - RNA, 22 nt, Human
acuuagaaggauugaacuucuu

SEQ ID NO: 3592344 - RNA, 13 nt, Human
acuuagaggaaau

SEQ ID NO: 3592345 - RNA, 20 nt, Human
acuuagagguggggagcaga

SEQ ID NO: 3592346 - RNA, 15 nt, Human
acuuagaguuucugu

SEQ ID NO: 3592347 - RNA, 18 nt, Human
acuuagaguuucuguuug

SEQ ID NO: 3592348 - RNA, 20 nt, Human
acuuagaguuucuguuugau

SEQ ID NO: 3592349 - RNA, 18 nt, Human
acuuagaucuccaggaga

SEQ ID NO: 3592350 - RNA, 19 nt, Human
acuuagauuuuacaugaag

SEQ ID NO: 3592351 - RNA, 20 nt, Human
acuuagauuuuacaugaagu

SEQ ID NO: 3592352 - RNA, 14 nt, Human
acuuagcauccuaa

SEQ ID NO: 3592353 - RNA, 21 nt, Human
acuuagcauccuaagaaauau

SEQ ID NO: 3592354 - RNA, 15 nt, Human
acuuagcaugcacaa

SEQ ID NO: 3592355 - RNA, 20 nt, Human
acuuagcauuuucugcaucu

SEQ ID NO: 3592356 - RNA, 16 nt, Human
acuuagcuaucagaag

SEQ ID NO: 3592357 - RNA, 14 nt, Human
acuuagcuuaucaa

SEQ ID NO: 3592358 - RNA, 20 nt, Human
acuuagcuuaucaauuuguc

SEQ ID NO: 3592359 - RNA, 22 nt, Human
acuuagcuuaucaauuugucau

SEQ ID NO: 3592360 - RNA, 16 nt, Human
acuuaggcuuuguagc

SEQ ID NO: 3592361 - RNA, 18 nt, Human
acuuagguaagaagauuc

SEQ ID NO: 3592362 - RNA, 15 nt, Human
acuuaguagauuaaa

SEQ ID NO: 3592363 - RNA, 20 nt, Human
acuuaguagauuaaaaauua

SEQ ID NO: 3592364 - RNA, 16 nt, Human
acuuaguauugcaaag

SEQ ID NO: 3592365 - RNA, 17 nt, Human
acuuagucaauaagaaa

SEQ ID NO: 3592366 - RNA, 20 nt, Human
acuuagugcggacaaguuuu

SEQ ID NO: 3592367 - RNA, 18 nt, Human
acuuauaaagaagguugg

SEQ ID NO: 3592368 - RNA, 13 nt, Human
acuuauaaggugu

SEQ ID NO: 3592369 - RNA, 23 nt, Human
acuuauaagugaagugauacuau

SEQ ID NO: 3592370 - RNA, 17 nt, Human
acuuauaauuuuccuaa

SEQ ID NO: 3592371 - RNA, 11 nt, Human
acuuauaccug

SEQ ID NO: 3592372 - RNA, 15 nt, Human
acuuauaguacauga

SEQ ID NO: 3592373 - RNA, 17 nt, Human
acuuauaucaucagcau

SEQ ID NO: 3592374 - RNA, 18 nt, Human
acuuauauggaaauucug

SEQ ID NO: 3592375 - RNA, 18 nt, Human
acuuauauugaagacaau

SEQ ID NO: 3592376 - RNA, 20 nt, Human
acuuauauugaagacaauuu

SEQ ID NO: 3592377 - RNA, 19 nt, Human
acuuauauuguaagaaaua

SEQ ID NO: 3592378 - RNA, 20 nt, Human
acuuauauuguaagaaauac

SEQ ID NO: 3592379 - RNA, 19 nt, Human
acuuauauuuucguaugaa

SEQ ID NO: 3592380 - RNA, 14 nt, Human
acuuaucccucucc

SEQ ID NO: 3592381 - RNA, 18 nt, Human
acuuauccuaaaacaaau

SEQ ID NO: 3592382 - RNA, 18 nt, Human
acuuaucuuacaaagugu

SEQ ID NO: 3592383 - RNA, 20 nt, Human
acuuaucuuacaaaguguau

SEQ ID NO: 3592384 - RNA, 22 nt, Human
acuuaucuuacaaaguguauuu

SEQ ID NO: 3592385 - RNA, 14 nt, Human
acuuaucuuaugcc

SEQ ID NO: 3592386 - RNA, 17 nt, Human
acuuaugaaugauuugc

SEQ ID NO: 3592387 - RNA, 13 nt, Human
acuuaugaauguu

SEQ ID NO: 3592388 - RNA, 14 nt, Human
acuuaugaauguuu

SEQ ID NO: 3592389 - RNA, 15 nt, Human
acuuaugaauguuuc

SEQ ID NO: 3592390 - RNA, 17 nt, Human
acuuaugauuucaugug

SEQ ID NO: 3592391 - RNA, 13 nt, Human
acuuauguagaua

SEQ ID NO: 3592392 - RNA, 12 nt, Human
acuuauuaacaa

SEQ ID NO: 3592393 - RNA, 22 nt, Human
acuuauuaaucuguaugaagau

SEQ ID NO: 3592394 - RNA, 20 nt, Human
acuuauuacaauuuguucau

SEQ ID NO: 3592395 - RNA, 14 nt, Human
acuuauuacugcua

SEQ ID NO: 3592396 - RNA, 16 nt, Human
acuuauuaucuucagg

SEQ ID NO: 3592397 - RNA, 15 nt, Human
acuuauucauugugg

SEQ ID NO: 3592398 - RNA, 20 nt, Human
acuuauucauugugguuauu

SEQ ID NO: 3592399 - RNA, 15 nt, Human
acuuauugcugauuu

SEQ ID NO: 3592400 - RNA, 21 nt, Human
acuuauugcugauuuuaaugg

SEQ ID NO: 3592401 - RNA, 13 nt, Human
acuuauugcuuug

SEQ ID NO: 3592402 - RNA, 23 nt, Human
acuuauuguagcauccuggaaua

SEQ ID NO: 3592403 - RNA, 17 nt, Human
acuuauuuaugaaccug

SEQ ID NO: 3592404 - RNA, 17 nt, Human
acuuauuuuauuuccau

SEQ ID NO: 3592405 - RNA, 21 nt, Human
acuuauuuuuuucugauugua

SEQ ID NO: 3592406 - RNA, 21 nt, Human
acuucaaaaacugucaaagaa

SEQ ID NO: 3592407 - RNA, 15 nt, Human
acuucaaaaguauuu

SEQ ID NO: 3592408 - RNA, 16 nt, Human
acuucaaaaguauuuu

SEQ ID NO: 3592409 - RNA, 15 nt, Human
acuucaaaaguuugu

SEQ ID NO: 3592410 - RNA, 16 nt, Human
acuucaaacugagauc

SEQ ID NO: 3592411 - RNA, 15 nt, Human
acuucaaagcaagcu

SEQ ID NO: 3592412 - RNA, 17 nt, Human
acuucaaauccuugaag

SEQ ID NO: 3592413 - RNA, 19 nt, Human
acuucaaauccuugaagau

SEQ ID NO: 3592414 - RNA, 19 nt, Human
acuucaacauuuacaugua

SEQ ID NO: 3592415 - RNA, 23 nt, Human
acuucaagcauggcuauuuuaua

SEQ ID NO: 3592416 - RNA, 13 nt, Human
acuucaaggccca

SEQ ID NO: 3592417 - RNA, 16 nt, Human
acuucaaggugacaga

SEQ ID NO: 3592418 - RNA, 23 nt, Human
acuucaagugcaugcucucugca

SEQ ID NO: 3592419 - RNA, 15 nt, Human
acuucaaugauagua

SEQ ID NO: 3592420 - RNA, 19 nt, Human
acuucaaugggcucuucca

SEQ ID NO: 3592421 - RNA, 19 nt, Human
acuucacacacaggcaacu

SEQ ID NO: 3592422 - RNA, 23 nt, Human
acuucacauauugauuuccguua

SEQ ID NO: 3592423 - RNA, 18 nt, Human
acuucacauuaaaaaaug

SEQ ID NO: 3592424 - RNA, 16 nt, Human
acuucacgcccuuggc

SEQ ID NO: 3592425 - RNA, 13 nt, Human
acuucacugugcu

SEQ ID NO: 3592426 - RNA, 24 nt, Human
acuucacugugcuguuguuaugau

SEQ ID NO: 3592427 - RNA, 17 nt, Human
acuucacuuuaauucuc

SEQ ID NO: 3592428 - RNA, 13 nt, Human
acuucagacugaa

SEQ ID NO: 3592429 - RNA, 19 nt, Human
acuucagacugaacaugua

SEQ ID NO: 3592430 - RNA, 20 nt, Human
acuucagagagcugguaguu

SEQ ID NO: 3592431 - RNA, 14 nt, Human
acuucagauugaac

SEQ ID NO: 3592432 - RNA, 15 nt, Human
acuucagcaagagag

SEQ ID NO: 3592433 - RNA, 16 nt, Human
acuucagcaagagaga

SEQ ID NO: 3592434 - RNA, 18 nt, Human
acuucagcaagagagaac

SEQ ID NO: 3592435 - RNA, 16 nt, Human
acuucagcugacuuuu

SEQ ID NO: 3592436 - RNA, 14 nt, Human
acuucaggcucuuc

SEQ ID NO: 3592437 - RNA, 16 nt, Human
acuucaggcucuucuc

SEQ ID NO: 3592438 - RNA, 20 nt, Human
acuucaggcuugauaauacu

SEQ ID NO: 3592439 - RNA, 20 nt, Human
acuucagggcagauuuuagu

SEQ ID NO: 3592440 - RNA, 21 nt, Human
acuucagggcagauuuuaguu

SEQ ID NO: 3592441 - RNA, 18 nt, Human
acuucagguauaccucac

SEQ ID NO: 3592442 - RNA, 20 nt, Human
acuucagguauaccucacuu

SEQ ID NO: 3592443 - RNA, 19 nt, Human
acuucaguauguugucaaa

SEQ ID NO: 3592444 - RNA, 23 nt, Human
acuucaguauguugucaaagaga

SEQ ID NO: 3592445 - RNA, 19 nt, Human
acuucaguccugcuccaga

SEQ ID NO: 3592446 - RNA, 15 nt, Human
acuucaguccuggga

SEQ ID NO: 3592447 - RNA, 15 nt, Human
acuucaucaaacaug

SEQ ID NO: 3592448 - RNA, 20 nt, Human
acuucaucaaacauggguuu

SEQ ID NO: 3592449 - RNA, 21 nt, Human
acuucaucuggcugccuuugc

SEQ ID NO: 3592450 - RNA, 16 nt, Human
acuucaugcaggugaa

SEQ ID NO: 3592451 - RNA, 23 nt, Human
acuucauggccuuugauaaaugu

SEQ ID NO: 3592452 - RNA, 13 nt, Human
acuucauguaaag

SEQ ID NO: 3592453 - RNA, 21 nt, Human
acuucauuauuuuaaaaauau

SEQ ID NO: 3592454 - RNA, 14 nt, Human
acuuccaaaauucu

SEQ ID NO: 3592455 - RNA, 15 nt, Human
acuuccaaaauucuu

SEQ ID NO: 3592456 - RNA, 16 nt, Human
agaaaaagcaaaaggc

SEQ ID NO: 3592457 - RNA, 14 nt, Human
agaaaaagggucaa

SEQ ID NO: 3592458 - RNA, 18 nt, Human
agaaaaauaucuguaaga

SEQ ID NO: 3592459 - RNA, 21 nt, Human
agaaaaaugagcauacaucuu

SEQ ID NO: 3592460 - RNA, 20 nt, Human
agaaaaauucagcaaaccau

SEQ ID NO: 3592461 - RNA, 12 nt, Human
agaaaacaaaaa

SEQ ID NO: 3592462 - RNA, 21 nt, Human
agaaaacaagcaaguucugag

SEQ ID NO: 3592463 - RNA, 19 nt, Human
agaaaacaaggaugaauua

SEQ ID NO: 3592464 - RNA, 21 nt, Human
agaaaacacuguuaucauuuu

SEQ ID NO: 3592465 - RNA, 15 nt, Human
agaaaacagaaaaaa

SEQ ID NO: 3592466 - RNA, 16 nt, Human
agaaaacagaaaacaa

SEQ ID NO: 3592467 - RNA, 23 nt, Human
agaaaacauaaucuucugccuuc

SEQ ID NO: 3592468 - RNA, 12 nt, Human
agaaaacaucua

SEQ ID NO: 3592469 - RNA, 11 nt, Human
agaaaacauug

SEQ ID NO: 3592470 - RNA, 23 nt, Human
agaaaacauuuuuuuuuuaaauc

SEQ ID NO: 3592471 - RNA, 20 nt, Human
agaaaaccagcucagcacug

SEQ ID NO: 3592472 - RNA, 16 nt, Human
agaaaaccuuucuuca

SEQ ID NO: 3592473 - RNA, 18 nt, Human
agaaaacuagaauuucau

SEQ ID NO: 3592474 - RNA, 16 nt, Human
agaaaacugaaaaucu

SEQ ID NO: 3592475 - RNA, 14 nt, Human
agaaaacugugauu

SEQ ID NO: 3592476 - RNA, 20 nt, Human
agaaaacuuuguuaggccaa

SEQ ID NO: 3592477 - RNA, 17 nt, Human
agaaaacuuuuaugcaa

SEQ ID NO: 3592478 - RNA, 9 nt, Human
agaaaagaa

SEQ ID NO: 3592479 - RNA, 10 nt, Human
agaaaagaaa

SEQ ID NO: 3592480 - RNA, 18 nt, Human
agaaaagaaaaaaaaaga

SEQ ID NO: 3592481 - RNA, 17 nt, Human
agaaaagaacuggaaac

SEQ ID NO: 3592482 - RNA, 19 nt, Human
agaaaagacgcaccagccc

SEQ ID NO: 3592483 - RNA, 15 nt, Human
agaaaagagaagaag

SEQ ID NO: 3592484 - RNA, 23 nt, Human
agaaaagagauauuuuaaaauga

SEQ ID NO: 3592485 - RNA, 16 nt, Human
agaaaagaugcacuuu

SEQ ID NO: 3592486 - RNA, 19 nt, Human
agaaaagaugcacuuugcu

SEQ ID NO: 3592487 - RNA, 12 nt, Human
agaaaagauuuu

SEQ ID NO: 3592488 - RNA, 15 nt, Human
agaaaagauuuuaau

SEQ ID NO: 3592489 - RNA, 12 nt, Human
agaaaagcacac

SEQ ID NO: 3592490 - RNA, 15 nt, Human
agaaaagcaccugcc

SEQ ID NO: 3592491 - RNA, 18 nt, Human
agaaaagcaccugccgac

SEQ ID NO: 3592492 - RNA, 13 nt, Human
agaaaagcuauaa

SEQ ID NO: 3592493 - RNA, 13 nt, Human
agaaaaggaaaag

SEQ ID NO: 3592494 - RNA, 20 nt, Human
agaaaagggaacugaacauu

SEQ ID NO: 3592495 - RNA, 23 nt, Human
agaaaagggaaguugugccuuuu

SEQ ID NO: 3592496 - RNA, 13 nt, Human
agaaaaggucuug

SEQ ID NO: 3592497 - RNA, 21 nt, Human
agaaaaggugauaaaaucaua

SEQ ID NO: 3592498 - RNA, 15 nt, Human
agaaaaguaagcccu

SEQ ID NO: 3592499 - RNA, 14 nt, Human
agaaaaguagacaa

SEQ ID NO: 3592500 - RNA, 17 nt, Human
agaaaaguauguucuaa

SEQ ID NO: 3592501 - RNA, 18 nt, Human
agaaaaguauuuugaagu

SEQ ID NO: 3592502 - RNA, 14 nt, Human
agaaaagugaauug

SEQ ID NO: 3592503 - RNA, 19 nt, Human
agaaaagugaauugaaguu

SEQ ID NO: 3592504 - RNA, 12 nt, Human
agaaaauaaaaa

SEQ ID NO: 3592505 - RNA, 18 nt, Human
agaaaauaaaaaaaagaa

SEQ ID NO: 3592506 - RNA, 21 nt, Human
agaaaauaaaaaaaagaaaaa

SEQ ID NO: 3592507 - RNA, 22 nt, Human
agaaaauaaaaaaaagaaaaaa

SEQ ID NO: 3592508 - RNA, 15 nt, Human
agaaaauaaaaaguu

SEQ ID NO: 3592509 - RNA, 18 nt, Human
agaaaauaaaauuaagaa

SEQ ID NO: 3592510 - RNA, 21 nt, Human
agaaaauaaaauuaagaaugu

SEQ ID NO: 3592511 - RNA, 14 nt, Human
agaaaauaacaaua

SEQ ID NO: 3592512 - RNA, 18 nt, Human
agaaaauacuuaaauguu

SEQ ID NO: 3592513 - RNA, 19 nt, Human
agaaaauacuuaaauguua

SEQ ID NO: 3592514 - RNA, 19 nt, Human
agaaaauaguggugugauu

SEQ ID NO: 3592515 - RNA, 10 nt, Human
agaaaauaua

SEQ ID NO: 3592516 - RNA, 13 nt, Human
agaaaauauacug

SEQ ID NO: 3592517 - RNA, 15 nt, Human
agaaaauauacugua

SEQ ID NO: 3592518 - RNA, 18 nt, Human
agaaaauauacuguaaag

SEQ ID NO: 3592519 - RNA, 22 nt, Human
agaaaauauacuguaaagaaag

SEQ ID NO: 3592520 - RNA, 17 nt, Human
accuaggcuaggguggg

SEQ ID NO: 3592521 - RNA, 24 nt, Human
accuagggaggaccuuaucugugc

SEQ ID NO: 3592522 - RNA, 20 nt, Human
accuagggauguucuggccc

SEQ ID NO: 3592523 - RNA, 15 nt, Human
accuaguagucauuu

SEQ ID NO: 3592524 - RNA, 13 nt, Human
accuagucuaagg

SEQ ID NO: 3592525 - RNA, 17 nt, Human
accuaguggcuguccag

SEQ ID NO: 3592526 - RNA, 19 nt, Human
accuaguggcuguccagug

SEQ ID NO: 3592527 - RNA, 22 nt, Human
accuaguggcuguccagugccc

SEQ ID NO: 3592528 - RNA, 18 nt, Human
accuaguuaaagaaagga

SEQ ID NO: 3592529 - RNA, 16 nt, Human
accuauaaaguaaagc

SEQ ID NO: 3592530 - RNA, 19 nt, Human
accuauaaaguaaagcuaa

SEQ ID NO: 3592531 - RNA, 15 nt, Human
accuauagucccagc

SEQ ID NO: 3592532 - RNA, 22 nt, Human
accuauagucccagcuacucag

SEQ ID NO: 3592533 - RNA, 12 nt, Human
accuauccacac

SEQ ID NO: 3592534 - RNA, 15 nt, Human
accuaucucguggga

SEQ ID NO: 3592535 - RNA, 18 nt, Human
accuaucucgugggagag

SEQ ID NO: 3592536 - RNA, 19 nt, Human
accuaugucauuucauuuc

SEQ ID NO: 3592537 - RNA, 12 nt, Human
accuauguuugc

SEQ ID NO: 3592538 - RNA, 16 nt, Human
accuauuaucccagcu

SEQ ID NO: 3592539 - RNA, 19 nt, Human
accuauuucucuuucuuua

SEQ ID NO: 3592540 - RNA, 20 nt, Human
accuauuuugaaaaauuccu

SEQ ID NO: 3592541 - RNA, 20 nt, Human
accuauuuuugacauggaaa

SEQ ID NO: 3592542 - RNA, 22 nt, Human
accucaaaugaugugccugcuu

SEQ ID NO: 3592543 - RNA, 15 nt, Human
accucaaauuuaaag

SEQ ID NO: 3592544 - RNA, 17 nt, Human
accucaaccauccuggc

SEQ ID NO: 3592545 - RNA, 21 nt, Human
accucaacccccauuucuauu

SEQ ID NO: 3592546 - RNA, 22 nt, Human
accucaacccccauuucuauuu

SEQ ID NO: 3592547 - RNA, 23 nt, Human
accucaaccuguaaauuauuuua

SEQ ID NO: 3592548 - RNA, 14 nt, Human
accucaagcugcau

SEQ ID NO: 3592549 - RNA, 20 nt, Human
accucaagggggacugucuu

SEQ ID NO: 3592550 - RNA, 20 nt, Human
accucaauuuucacuguguc

SEQ ID NO: 3592551 - RNA, 14 nt, Human
accucacagugacc

SEQ ID NO: 3592552 - RNA, 22 nt, Human
accucacaugcauacauacaca

SEQ ID NO: 3592553 - RNA, 17 nt, Human
accucaccaacuccuag

SEQ ID NO: 3592554 - RNA, 12 nt, Human
accucaccccac

SEQ ID NO: 3592555 - RNA, 23 nt, Human
accucaccccgaggcccugcaug

SEQ ID NO: 3592556 - RNA, 14 nt, Human
accucaccuagaaa

SEQ ID NO: 3592557 - RNA, 16 nt, Human
accucacgcaccuccc

SEQ ID NO: 3592558 - RNA, 22 nt, Human
accucacgcaccucccauccua

SEQ ID NO: 3592559 - RNA, 21 nt, Human
accucacucagaaguccagag

SEQ ID NO: 3592560 - RNA, 22 nt, Human
accucacucagcaccacucaag

SEQ ID NO: 3592561 - RNA, 18 nt, Human
accucacucuugccaacc

SEQ ID NO: 3592562 - RNA, 17 nt, Human
accucagaccccggggu

SEQ ID NO: 3592563 - RNA, 22 nt, Human
accucagaggcuguucuugggg

SEQ ID NO: 3592564 - RNA, 18 nt, Human
accucagaguauggagcu

SEQ ID NO: 3592565 - RNA, 19 nt, Human
accucagaguccaggcccc

SEQ ID NO: 3592566 - RNA, 15 nt, Human
accucagauggcagc

SEQ ID NO: 3592567 - RNA, 18 nt, Human
accucagauggcagcuuu

SEQ ID NO: 3592568 - RNA, 19 nt, Human
accucagauggcagcuuuu

SEQ ID NO: 3592569 - RNA, 22 nt, Human
accucagauggcagcuuuuaaa

SEQ ID NO: 3592570 - RNA, 10 nt, Human
accucagccu

SEQ ID NO: 3592571 - RNA, 13 nt, Human
accucagccuaga

SEQ ID NO: 3592572 - RNA, 11 nt, Human
accucagccuc

SEQ ID NO: 3592573 - RNA, 12 nt, Human
accucagccucc

SEQ ID NO: 3592574 - RNA, 23 nt, Human
accucagccugcacagugucccc

SEQ ID NO: 3592575 - RNA, 13 nt, Human
accucagccuggc

SEQ ID NO: 3592576 - RNA, 16 nt, Human
accucagccuggccag

SEQ ID NO: 3592577 - RNA, 17 nt, Human
accucagccuggccaga

SEQ ID NO: 3592578 - RNA, 12 nt, Human
accucagccugu

SEQ ID NO: 3592579 - RNA, 17 nt, Human
accucagccugugcugc

SEQ ID NO: 3592580 - RNA, 18 nt, Human
accucagccugugcugcc

SEQ ID NO: 3592581 - RNA, 12 nt, Human
accucagcucug

SEQ ID NO: 3592582 - RNA, 14 nt, Human
accucagcucuggg

SEQ ID NO: 3592583 - RNA, 15 nt, Human
accucagcucuggga

SEQ ID NO: 3592584 - RNA, 22 nt, Human
accucagcucugggagaggauu

SEQ ID NO: 3592585 - RNA, 13 nt, Human
accucagcugcuu

SEQ ID NO: 3592586 - RNA, 16 nt, Human
accucaggaaagaaua

SEQ ID NO: 3592587 - RNA, 12 nt, Human
accucaggccug

SEQ ID NO: 3592588 - RNA, 14 nt, Human
accucaggccuggg

SEQ ID NO: 3592589 - RNA, 16 nt, Human
accucagggcucccag

SEQ ID NO: 3592590 - RNA, 16 nt, Human
accucagguugcuggu

SEQ ID NO: 3592591 - RNA, 15 nt, Human
accucagucaguauu

SEQ ID NO: 3592592 - RNA, 18 nt, Human
accucaguucauuguggu

SEQ ID NO: 3592593 - RNA, 16 nt, Human
accucaguucccuugg

SEQ ID NO: 3592594 - RNA, 14 nt, Human
accucaucaggaug

SEQ ID NO: 3592595 - RNA, 15 nt, Human
accucauccaaacaa

SEQ ID NO: 3592596 - RNA, 16 nt, Human
accucaugcaucucca

SEQ ID NO: 3592597 - RNA, 16 nt, Human
accucaugcccacccc

SEQ ID NO: 3592598 - RNA, 23 nt, Human
accucaugcccacccccugcccu

SEQ ID NO: 3592599 - RNA, 15 nt, Human
accucauguuuauga

SEQ ID NO: 3592600 - RNA, 18 nt, Human
accucauguuuaugaaaa

SEQ ID NO: 3592601 - RNA, 21 nt, Human
accucauuaaccgaugcuuua

SEQ ID NO: 3592602 - RNA, 18 nt, Human
agaacuacaaacaaaauu

SEQ ID NO: 3592603 - RNA, 22 nt, Human
agaacuacucagggaaugaagg

SEQ ID NO: 3592604 - RNA, 20 nt, Human
agaacuagagguuuuaugau

SEQ ID NO: 3592605 - RNA, 23 nt, Human
agaacuagagguuuuaugauauu

SEQ ID NO: 3592606 - RNA, 19 nt, Human
agaacuagccaaaccagga

SEQ ID NO: 3592607 - RNA, 22 nt, Human
agaacuagugguggcucugaga

SEQ ID NO: 3592608 - RNA, 17 nt, Human
agaacuaucuucaucug

SEQ ID NO: 3592609 - RNA, 19 nt, Human
agaacuaucuucaucugag

SEQ ID NO: 3592610 - RNA, 17 nt, Human
agaacuauguuuuuguu

SEQ ID NO: 3592611 - RNA, 17 nt, Human
agaacuauuuuauucua

SEQ ID NO: 3592612 - RNA, 14 nt, Human
agaacucacugggg

SEQ ID NO: 3592613 - RNA, 16 nt, Human
agaacucacuggggcc

SEQ ID NO: 3592614 - RNA, 19 nt, Human
agaacucacuggggccuac

SEQ ID NO: 3592615 - RNA, 23 nt, Human
agaacucaucacuguggcugucu

SEQ ID NO: 3592616 - RNA, 22 nt, Human
agaacucauguuauuuuuuaac

SEQ ID NO: 3592617 - RNA, 17 nt, Human
agaacuccaggcccucc

SEQ ID NO: 3592618 - RNA, 15 nt, Human
agaacucccuuucaa

SEQ ID NO: 3592619 - RNA, 11 nt, Human
agaacuccuag

SEQ ID NO: 3592620 - RNA, 13 nt, Human
agaacuccugacu

SEQ ID NO: 3592621 - RNA, 23 nt, Human
agaacucuccaucuuauuuucau

SEQ ID NO: 3592622 - RNA, 17 nt, Human
agaacucugccugcccu

SEQ ID NO: 3592623 - RNA, 14 nt, Human
agaacucuuucaaa

SEQ ID NO: 3592624 - RNA, 10 nt, Human
agaacugaaa

SEQ ID NO: 3592625 - RNA, 15 nt, Human
agaacugaaaacaua

SEQ ID NO: 3592626 - RNA, 12 nt, Human
agaacugaaaag

SEQ ID NO: 3592627 - RNA, 14 nt, Human
agaacugaaaagag

SEQ ID NO: 3592628 - RNA, 20 nt, Human
agaacugaaaggcuuuucaa

SEQ ID NO: 3592629 - RNA, 15 nt, Human
agaacugagcuccuc

SEQ ID NO: 3592630 - RNA, 21 nt, Human
agaacugcacaugaagaaaua

SEQ ID NO: 3592631 - RNA, 15 nt, Human
agaacugcaggcccu

SEQ ID NO: 3592632 - RNA, 20 nt, Human
agaacugcaggcccuggccu

SEQ ID NO: 3592633 - RNA, 19 nt, Human
agaacugcauauguuucgc

SEQ ID NO: 3592634 - RNA, 20 nt, Human
agaacugcauggaccuaaca

SEQ ID NO: 3592635 - RNA, 23 nt, Human
agaacugcuuucuuucguuuguu

SEQ ID NO: 3592636 - RNA, 17 nt, Human
agaacuggacucaggau

SEQ ID NO: 3592637 - RNA, 20 nt, Human
agaacuggacucaggaugcc

SEQ ID NO: 3592638 - RNA, 12 nt, Human
agaacuggguaa

SEQ ID NO: 3592639 - RNA, 19 nt, Human
agaacuguaugucagacau

SEQ ID NO: 3592640 - RNA, 19 nt, Human
agaacugucggaggaaaga

SEQ ID NO: 3592641 - RNA, 13 nt, Human
agaacugugccac

SEQ ID NO: 3592642 - RNA, 22 nt, Human
agaacuuagccuuuaccuguga

SEQ ID NO: 3592643 - RNA, 14 nt, Human
agaacuucagaaag

SEQ ID NO: 3592644 - RNA, 17 nt, Human
agaacuucagaaagacu

SEQ ID NO: 3592645 - RNA, 14 nt, Human
agaacuucauggau

SEQ ID NO: 3592646 - RNA, 23 nt, Human
agaacuucccugauugaccugcu

SEQ ID NO: 3592647 - RNA, 22 nt, Human
agaacuugaagccugcuccuuc

SEQ ID NO: 3592648 - RNA, 16 nt, Human
agaacuugcugcuguc

SEQ ID NO: 3592649 - RNA, 18 nt, Human
agaacuuggauguaccug

SEQ ID NO: 3592650 - RNA, 15 nt, Human
agaacuuucauuuuu

SEQ ID NO: 3592651 - RNA, 16 nt, Human
agaacuuugaaggaca

SEQ ID NO: 3592652 - RNA, 15 nt, Human
agaacuuuguauagu

SEQ ID NO: 3592653 - RNA, 21 nt, Human
agaacuuuugguaagggaaaa

SEQ ID NO: 3592654 - RNA, 10 nt, Human
agaacuuuuu

SEQ ID NO: 3592655 - RNA, 14 nt, Human
agaacuuuuuuaaa

SEQ ID NO: 3592656 - RNA, 21 nt, Human
agaacuuuuuuaaauaaacuu

SEQ ID NO: 3592657 - RNA, 23 nt, Human
agaacuuuuuuaaauaaacuuuu

SEQ ID NO: 3592658 - RNA, 15 nt, Human
agaagaaaaagaagc

SEQ ID NO: 3592659 - RNA, 15 nt, Human
agaagaaaagagaag

SEQ ID NO: 3592660 - RNA, 17 nt, Human
agaagaaaagagaagaa

SEQ ID NO: 3592661 - RNA, 17 nt, Human
agaagaaaauucuccug

SEQ ID NO: 3592662 - RNA, 16 nt, Human
agaagaaagaacggaa

SEQ ID NO: 3592663 - RNA, 14 nt, Human
agaagaaauaaaua

SEQ ID NO: 3592664 - RNA, 18 nt, Human
agaagaaaugaaauuuua

SEQ ID NO: 3592665 - RNA, 19 nt, Human
agaagaaaugaaauuuuac

SEQ ID NO: 3592666 - RNA, 18 nt, Human
agaagaaauucugucaua

SEQ ID NO: 3592667 - RNA, 19 nt, Human
agaagaacuagagguuuua

SEQ ID NO: 3592668 - RNA, 20 nt, Human
agaagaacuguguuucaagu

SEQ ID NO: 3592669 - RNA, 13 nt, Human
agaagaagaaaag

SEQ ID NO: 3592670 - RNA, 16 nt, Human
agaagaagagaagcug

SEQ ID NO: 3592671 - RNA, 18 nt, Human
agaagaagagaagcugcu

SEQ ID NO: 3592672 - RNA, 20 nt, Human
agaagaagagaagcugcuga

SEQ ID NO: 3592673 - RNA, 13 nt, Human
agaagaaggaaau

SEQ ID NO: 3592674 - RNA, 18 nt, Human
agaagaaggaaaugaauu

SEQ ID NO: 3592675 - RNA, 13 nt, Human
agaagaaggcagc

SEQ ID NO: 3592676 - RNA, 21 nt, Human
agaagaaggcagcagguggca

SEQ ID NO: 3592677 - RNA, 16 nt, Human
agaagaagucagagag

SEQ ID NO: 3592678 - RNA, 20 nt, Human
agaagaauacaaacauauuu

SEQ ID NO: 3592679 - RNA, 14 nt, Human
agaagaauauucag

SEQ ID NO: 3592680 - RNA, 19 nt, Human
agaagaauugaacccagga

SEQ ID NO: 3592681 - RNA, 20 nt, Human
agaagaauugaacccaggag

SEQ ID NO: 3592682 - RNA, 23 nt, Human
agaagaauuuucagaccccagcg

SEQ ID NO: 3592683 - RNA, 15 nt, Human
agaagacaauugaca

SEQ ID NO: 3592684 - RNA, 15 nt, Human
agaagacaugaacca

SEQ ID NO: 3592685 - RNA, 16 nt, Human
agaagacaugaaccaa

SEQ ID NO: 3592686 - RNA, 16 nt, Human
agaagacauggagacu

SEQ ID NO: 3592687 - RNA, 13 nt, Human
agaagacauguuu

SEQ ID NO: 3592688 - RNA, 14 nt, Human
agaagacauguuuu

SEQ ID NO: 3592689 - RNA, 17 nt, Human
agaagacauguuuuaga

SEQ ID NO: 3592690 - RNA, 21 nt, Human
agaagaccacaaaaauugacu

SEQ ID NO: 3592691 - RNA, 14 nt, Human
agaagacucuacca

SEQ ID NO: 3592692 - RNA, 19 nt, Human
agaagacucuaccagacug

SEQ ID NO: 3592693 - RNA, 20 nt, Human
agaagacucuaccagacugu

SEQ ID NO: 3592694 - RNA, 16 nt, Human
agaagagaagcugcug

SEQ ID NO: 3592695 - RNA, 23 nt, Human
agaagagaaugcacaaacagagg

SEQ ID NO: 3592696 - RNA, 21 nt, Human
agaagagaggagaggagagag

SEQ ID NO: 3592697 - RNA, 23 nt, Human
agaagagagggugaguccuccag

SEQ ID NO: 3592698 - RNA, 14 nt, Human
agaagagccacagu

SEQ ID NO: 3592699 - RNA, 22 nt, Human
agaagagccacagugagggaga

SEQ ID NO: 3592700 - RNA, 12 nt, Human
agaagagcccca

SEQ ID NO: 3592701 - RNA, 17 nt, Human
agaagagccccacucuc

SEQ ID NO: 3592702 - RNA, 14 nt, Human
agaagagcgcagug

SEQ ID NO: 3592703 - RNA, 13 nt, Human
agaagagcuguuc

SEQ ID NO: 3592704 - RNA, 22 nt, Human
agaagagcuguucacagccaga

SEQ ID NO: 3592705 - RNA, 17 nt, Human
agaagaggcuggugcug

SEQ ID NO: 3592706 - RNA, 22 nt, Human
agaagaggcuggugcuguggcc

SEQ ID NO: 3592707 - RNA, 24 nt, Human
agaagagggccugugggagccugc

SEQ ID NO: 3592708 - RNA, 15 nt, Human
agaagaggguguguu

SEQ ID NO: 3592709 - RNA, 17 nt, Human
agaagaggguguguuug

SEQ ID NO: 3592710 - RNA, 13 nt, Human
agaagaguggcag

SEQ ID NO: 3592711 - RNA, 19 nt, Human
agaagaguugugcacgcag

SEQ ID NO: 3592712 - RNA, 13 nt, Human
agaagauaauugu

SEQ ID NO: 3592713 - RNA, 13 nt, Human
agaagauagcagg

SEQ ID NO: 3592714 - RNA, 17 nt, Human
agaagauagucuuggaa

SEQ ID NO: 3592715 - RNA, 20 nt, Human
agaagaucaacgccucacug

SEQ ID NO: 3592716 - RNA, 13 nt, Human
agaagaugaaugg

SEQ ID NO: 3592717 - RNA, 22 nt, Human
agaagauguugaagaauacagu

SEQ ID NO: 3592718 - RNA, 14 nt, Human
agaagauguuuaac

SEQ ID NO: 3592719 - RNA, 22 nt, Human
agaagauguuuaacuuaaucaa

SEQ ID NO: 3592720 - RNA, 22 nt, Human
agaagauucuucccauucucca

SEQ ID NO: 3592721 - RNA, 13 nt, Human
agaagcagcucuu

SEQ ID NO: 3592722 - RNA, 15 nt, Human
agaagcaguggccuu

SEQ ID NO: 3592723 - RNA, 15 nt, Human
agaagcaugaaaaag

SEQ ID NO: 3592724 - RNA, 16 nt, Human
agaagcaugaaaaagc

SEQ ID NO: 3592725 - RNA, 13 nt, Human
agaagcauuccuu

SEQ ID NO: 3592726 - RNA, 15 nt, Human
agaagcauuccuucu

SEQ ID NO: 3592727 - RNA, 17 nt, Human
agaagcauuccuucuuu

SEQ ID NO: 3592728 - RNA, 24 nt, Human
agaagcauuccuucuuugauaaug

SEQ ID NO: 3592729 - RNA, 15 nt, Human
agaagcauuuguauu

SEQ ID NO: 3592730 - RNA, 19 nt, Human
agaagcauuuguauuuugu

SEQ ID NO: 3592731 - RNA, 19 nt, Human
agaagccaagggaaagggg

SEQ ID NO: 3592732 - RNA, 18 nt, Human
agaagccacaggccugag

SEQ ID NO: 3592733 - RNA, 19 nt, Human
agaagccacaggccugaga

SEQ ID NO: 3592734 - RNA, 13 nt, Human
agaagccagcuug

SEQ ID NO: 3592735 - RNA, 19 nt, Human
agaagccagcuuguuuaca

SEQ ID NO: 3592736 - RNA, 21 nt, Human
agaagccagcuuguuuacaug

SEQ ID NO: 3592737 - RNA, 22 nt, Human
agaagccaggaauuucccagga

SEQ ID NO: 3592738 - RNA, 12 nt, Human
agaagccaggag

SEQ ID NO: 3592739 - RNA, 14 nt, Human
agaagccaggagca

SEQ ID NO: 3592740 - RNA, 20 nt, Human
agaagccaggagcaaauguu

SEQ ID NO: 3592741 - RNA, 22 nt, Human
agaagccaucaccucagauggc

SEQ ID NO: 3592742 - RNA, 11 nt, Human
agaagccauug

SEQ ID NO: 3592743 - RNA, 18 nt, Human
agaagcccaauauuauaa

SEQ ID NO: 3592744 - RNA, 12 nt, Human
agaagcccagaa

SEQ ID NO: 3592745 - RNA, 16 nt, Human
agaagcccaggaaagg

SEQ ID NO: 3592746 - RNA, 22 nt, Human
agaagcccaggaaaggcuccag

SEQ ID NO: 3592747 - RNA, 21 nt, Human
acgcugguagagauggaggag

SEQ ID NO: 3592748 - RNA, 11 nt, Human
acgcugugcug

SEQ ID NO: 3592749 - RNA, 12 nt, Human
acgcugugcugc

SEQ ID NO: 3592750 - RNA, 18 nt, Human
acgcugugcugcccugcc

SEQ ID NO: 3592751 - RNA, 12 nt, Human
acgcuucugaau

SEQ ID NO: 3592752 - RNA, 22 nt, Human
acgcuucugaaugcugcuacuu

SEQ ID NO: 3592753 - RNA, 14 nt, Human
agacaugaauauga

SEQ ID NO: 3592754 - RNA, 15 nt, Human
agacaugauuuccuu

SEQ ID NO: 3592755 - RNA, 22 nt, Human
agacaugauuuccuugaaugug

SEQ ID NO: 3592756 - RNA, 14 nt, Human
agacaugcagagau

SEQ ID NO: 3592757 - RNA, 13 nt, Human
agacauggagacu

SEQ ID NO: 3592758 - RNA, 22 nt, Human
agacauggagacuccugcccug

SEQ ID NO: 3592759 - RNA, 19 nt, Human
agacauggagguucuaagg

SEQ ID NO: 3592760 - RNA, 21 nt, Human
agacauggcuuucagaaaacg

SEQ ID NO: 3592761 - RNA, 16 nt, Human
agacauggggaggaag

SEQ ID NO: 3592762 - RNA, 18 nt, Human
agacauggggaggaagga

SEQ ID NO: 3592763 - RNA, 12 nt, Human
agacaugguggc

SEQ ID NO: 3592764 - RNA, 18 nt, Human
agacaugguggggucucc

SEQ ID NO: 3592765 - RNA, 20 nt, Human
agacaugucuguucuacaua

SEQ ID NO: 3592766 - RNA, 12 nt, Human
agacaugugaca

SEQ ID NO: 3592767 - RNA, 15 nt, Human
agacaugugucaaca

SEQ ID NO: 3592768 - RNA, 23 nt, Human
agacauguuuuagacaaauacuc

SEQ ID NO: 3592769 - RNA, 18 nt, Human
agacauguuuuccgugaa

SEQ ID NO: 3592770 - RNA, 22 nt, Human
agacauuaacucauuagacugg

SEQ ID NO: 3592771 - RNA, 17 nt, Human
agacauuccaaaacgaa

SEQ ID NO: 3592772 - RNA, 21 nt, Human
agacauucucgcuucccugaa

SEQ ID NO: 3592773 - RNA, 19 nt, Human
agacauucuuccaaaaaga

SEQ ID NO: 3592774 - RNA, 16 nt, Human
agacauugucaauaaa

SEQ ID NO: 3592775 - RNA, 23 nt, Human
agacauuucucuuacugcaaaug

SEQ ID NO: 3592776 - RNA, 19 nt, Human
agacauuucuuuucuuuuu

SEQ ID NO: 3592777 - RNA, 21 nt, Human
agacauuucuuuucuuuuuac

SEQ ID NO: 3592778 - RNA, 22 nt, Human
agacauuuguaaauguaaaacu

SEQ ID NO: 3592779 - RNA, 18 nt, Human
agaccaaacagugcuguu

SEQ ID NO: 3592780 - RNA, 17 nt, Human
agaccaagacucugaaa

SEQ ID NO: 3592781 - RNA, 16 nt, Human
agaccaagcuugucca

SEQ ID NO: 3592782 - RNA, 13 nt, Human
agaccacaucuuu

SEQ ID NO: 3592783 - RNA, 23 nt, Human
agaccacaucuuuaucuguucuu

SEQ ID NO: 3592784 - RNA, 15 nt, Human
agaccaccaccucag

SEQ ID NO: 3592785 - RNA, 16 nt, Human
agaccaccacuucgaa

SEQ ID NO: 3592786 - RNA, 19 nt, Human
agaccacccauaucaugca

SEQ ID NO: 3592787 - RNA, 14 nt, Human
agaccaccccgccu

SEQ ID NO: 3592788 - RNA, 16 nt, Human
agaccaccccgccugc

SEQ ID NO: 3592789 - RNA, 23 nt, Human
agaccacgcccguccugccugug

SEQ ID NO: 3592790 - RNA, 14 nt, Human
agaccacugccaua

SEQ ID NO: 3592791 - RNA, 17 nt, Human
agaccagacuguggaga

SEQ ID NO: 3592792 - RNA, 18 nt, Human
agaccagacuguggagaa

SEQ ID NO: 3592793 - RNA, 16 nt, Human
agaccagagcucugga

SEQ ID NO: 3592794 - RNA, 15 nt, Human
agaccagcagacaga

SEQ ID NO: 3592795 - RNA, 21 nt, Human
agaccagcagacagagccagg

SEQ ID NO: 3592796 - RNA, 22 nt, Human
agaccagccuggccaacauggc

SEQ ID NO: 3592797 - RNA, 13 nt, Human
agaccagcucuuc

SEQ ID NO: 3592798 - RNA, 16 nt, Human
agaccaggauuucuaa

SEQ ID NO: 3592799 - RNA, 17 nt, Human
agaccaggcaaagcaag

SEQ ID NO: 3592800 - RNA, 13 nt, Human
agaccaggcccug

SEQ ID NO: 3592801 - RNA, 15 nt, Human
agaccaggcuguguc

SEQ ID NO: 3592802 - RNA, 12 nt, Human
agaccagggcuc

SEQ ID NO: 3592803 - RNA, 22 nt, Human
agaccaguuagauuauugaaau

SEQ ID NO: 3592804 - RNA, 19 nt, Human
agaccaguugggagcacug

SEQ ID NO: 3592805 - RNA, 21 nt, Human
agaccaguugggagcacugga

SEQ ID NO: 3592806 - RNA, 13 nt, Human
agaccauaauguu

SEQ ID NO: 3592807 - RNA, 17 nt, Human
agaccauccaccaggcc

SEQ ID NO: 3592808 - RNA, 18 nt, Human
agaccaucccugaaggcc

SEQ ID NO: 3592809 - RNA, 23 nt, Human
agaccaucccugaaggccccgcc

SEQ ID NO: 3592810 - RNA, 14 nt, Human
agaccauccuggcu

SEQ ID NO: 3592811 - RNA, 18 nt, Human
agaccauuggggcuccca

SEQ ID NO: 3592812 - RNA, 22 nt, Human
agacccaacacaugggaccuau

SEQ ID NO: 3592813 - RNA, 13 nt, Human
agacccaccccac

SEQ ID NO: 3592814 - RNA, 18 nt, Human
agacccaccccaccugca

SEQ ID NO: 3592815 - RNA, 20 nt, Human
agacccaccccaccugcagg

SEQ ID NO: 3592816 - RNA, 12 nt, Human
agaccccaccca

SEQ ID NO: 3592817 - RNA, 23 nt, Human
agaccccacccaagcuuggcagc

SEQ ID NO: 3592818 - RNA, 13 nt, Human
agaccccaggcug

SEQ ID NO: 3592819 - RNA, 19 nt, Human
agacccccggaacaagccu

SEQ ID NO: 3592820 - RNA, 13 nt, Human
agacccccuggag

SEQ ID NO: 3592821 - RNA, 15 nt, Human
agacccccuggagac

SEQ ID NO: 3592822 - RNA, 17 nt, Human
agaccccucuggccagg

SEQ ID NO: 3592823 - RNA, 22 nt, Human
agaccccucuggccaggaugga

SEQ ID NO: 3592824 - RNA, 13 nt, Human
agaccccuggcug

SEQ ID NO: 3592825 - RNA, 21 nt, Human
agaccccuggcuuuucacugc

SEQ ID NO: 3592826 - RNA, 23 nt, Human
agaccccugucuuugcugagagc

SEQ ID NO: 3592827 - RNA, 14 nt, Human
agacccggcugcgu

SEQ ID NO: 3592828 - RNA, 16 nt, Human
agacccuaccccacca

SEQ ID NO: 3592829 - RNA, 24 nt, Human
agacccucaugcugccaauauccu

SEQ ID NO: 3592830 - RNA, 19 nt, Human
agacccucgcccaacucca

SEQ ID NO: 3592831 - RNA, 14 nt, Human
agacccucguggcc

SEQ ID NO: 3592832 - RNA, 12 nt, Human
agacccucucaa

SEQ ID NO: 3592833 - RNA, 16 nt, Human
agacccucucaaacua

SEQ ID NO: 3592834 - RNA, 16 nt, Human
agacccucugccacca

SEQ ID NO: 3592835 - RNA, 20 nt, Human
agacccucugccaccagaga

SEQ ID NO: 3592836 - RNA, 12 nt, Human
agacccugcccu

SEQ ID NO: 3592837 - RNA, 14 nt, Human
agacccugcccugu

SEQ ID NO: 3592838 - RNA, 16 nt, Human
agacccugcccugugg

SEQ ID NO: 3592839 - RNA, 22 nt, Human
agacccugggugggcucugugc

SEQ ID NO: 3592840 - RNA, 12 nt, Human
agacccugucuc

SEQ ID NO: 3592841 - RNA, 21 nt, Human
agacccuuauugcuguccugg

SEQ ID NO: 3592842 - RNA, 22 nt, Human
agacccuuguggucccacccca

SEQ ID NO: 3592843 - RNA, 22 nt, Human
agacccuuucuucagcucugaa

SEQ ID NO: 3592844 - RNA, 17 nt, Human
agacccuuuuggguuuc

SEQ ID NO: 3592845 - RNA, 17 nt, Human
agaccgaacuguuguau

SEQ ID NO: 3592846 - RNA, 16 nt, Human
agaccgagugaaccua

SEQ ID NO: 3592847 - RNA, 17 nt, Human
agaccgcucucuuuucu

SEQ ID NO: 3592848 - RNA, 16 nt, Human
agaccggaagcuccug

SEQ ID NO: 3592849 - RNA, 20 nt, Human
agaccggccugccaggagga

SEQ ID NO: 3592850 - RNA, 23 nt, Human
agaccggccugccaggaggaccc

SEQ ID NO: 3592851 - RNA, 14 nt, Human
agaccguccucacc

SEQ ID NO: 3592852 - RNA, 19 nt, Human
agaccguccucaccccugu

SEQ ID NO: 3592853 - RNA, 23 nt, Human
agaccgucgggggcugaggggca

SEQ ID NO: 3592854 - RNA, 14 nt, Human
agaccgucuuccuc

SEQ ID NO: 3592855 - RNA, 18 nt, Human
agaccgucuuccuccaac

SEQ ID NO: 3592856 - RNA, 18 nt, Human
agaccgugaagauacuuu

SEQ ID NO: 3592857 - RNA, 21 nt, Human
agaccgugaagauacuuugua

SEQ ID NO: 3592858 - RNA, 12 nt, Human
agaccuaaccag

SEQ ID NO: 3592859 - RNA, 18 nt, Human
agaccuaaugcuccuugu

SEQ ID NO: 3592860 - RNA, 11 nt, Human
agaccuacagg

SEQ ID NO: 3592861 - RNA, 16 nt, Human
agaccuacaggcugac

SEQ ID NO: 3592862 - RNA, 22 nt, Human
agaccuacagggggucuggcug

SEQ ID NO: 3592863 - RNA, 23 nt, Human
agaccuacagggggucuggcugg

SEQ ID NO: 3592864 - RNA, 14 nt, Human
agaccuaccucagg

SEQ ID NO: 3592865 - RNA, 16 nt, Human
agaccuaccucagguu

SEQ ID NO: 3592866 - RNA, 15 nt, Human
agaccuacuguucua

SEQ ID NO: 3592867 - RNA, 21 nt, Human
agaccuacuguucuaaagcuc

SEQ ID NO: 3592868 - RNA, 12 nt, Human
agaccucagcca

SEQ ID NO: 3592869 - RNA, 12 nt, Human
agaccucagccu

SEQ ID NO: 3592870 - RNA, 13 nt, Human
agaccucagccug

SEQ ID NO: 3592871 - RNA, 19 nt, Human
agaccucagccugugcugc

SEQ ID NO: 3592872 - RNA, 20 nt, Human
agaccucagccugugcugcc

SEQ ID NO: 3592873 - RNA, 13 nt, Human
agaccucagggca

SEQ ID NO: 3592874 - RNA, 17 nt, Human
agaccucaucaggauga

SEQ ID NO: 3592875 - RNA, 18 nt, Human
agaccucaucaggaugaa

SEQ ID NO: 3592876 - RNA, 22 nt, Human
agaccucaucaggaugaaccca

SEQ ID NO: 3592877 - RNA, 14 nt, Human
agaccuccccagcc

SEQ ID NO: 3592878 - RNA, 15 nt, Human
agaccuccccagccc

SEQ ID NO: 3592879 - RNA, 16 nt, Human
agaccucgagcagaug

SEQ ID NO: 3592880 - RNA, 19 nt, Human
agaccucuacugccuugga

SEQ ID NO: 3592881 - RNA, 13 nt, Human
agaccugaagaau

SEQ ID NO: 3592882 - RNA, 19 nt, Human
agaccugacaccuuucaua

SEQ ID NO: 3592883 - RNA, 19 nt, Human
agaccugauccuggaggcc

SEQ ID NO: 3592884 - RNA, 23 nt, Human
agaccugauccuggaggcccagu

SEQ ID NO: 3592885 - RNA, 12 nt, Human
agaccugccccu

SEQ ID NO: 3592886 - RNA, 13 nt, Human
agaccugccccuc

SEQ ID NO: 3592887 - RNA, 20 nt, Human
agaccuggaagaacaggccu

SEQ ID NO: 3592888 - RNA, 21 nt, Human
agaccuggaagaacaggccuc

SEQ ID NO: 3592889 - RNA, 19 nt, Human
agaccuggacacaggccug

SEQ ID NO: 3592890 - RNA, 19 nt, Human
agaccuggagccccugggu

SEQ ID NO: 3592891 - RNA, 20 nt, Human
agaccuggagccccugggug

SEQ ID NO: 3592892 - RNA, 21 nt, Human
agacugcuucccauccuaccc

SEQ ID NO: 3592893 - RNA, 17 nt, Human
agacuggaaaaaaugag

SEQ ID NO: 3592894 - RNA, 13 nt, Human
agacuggaacuug

SEQ ID NO: 3592895 - RNA, 17 nt, Human
agacuggaagcacagcu

SEQ ID NO: 3592896 - RNA, 21 nt, Human
agacuggaaguucauaccuaa

SEQ ID NO: 3592897 - RNA, 13 nt, Human
agacuggacagcu

SEQ ID NO: 3592898 - RNA, 14 nt, Human
agacuggagcaucu

SEQ ID NO: 3592899 - RNA, 18 nt, Human
agacuggagcaucugacu

SEQ ID NO: 3592900 - RNA, 11 nt, Human
agacuggaggg

SEQ ID NO: 3592901 - RNA, 21 nt, Human
agacuggauaguccgucucug

SEQ ID NO: 3592902 - RNA, 15 nt, Human
agacuggcacaguuu

SEQ ID NO: 3592903 - RNA, 21 nt, Human
agacuggcacaguuuucugag

SEQ ID NO: 3592904 - RNA, 16 nt, Human
agacuggccugaggag

SEQ ID NO: 3592905 - RNA, 18 nt, Human
agacuggcgugaacccag

SEQ ID NO: 3592906 - RNA, 22 nt, Human
agacuggcgugaacccaggagg

SEQ ID NO: 3592907 - RNA, 23 nt, Human
agacuggcgugaacccaggaggc

SEQ ID NO: 3592908 - RNA, 11 nt, Human
agacuggcuuu

SEQ ID NO: 3592909 - RNA, 22 nt, Human
agacuggcuuuuauuaaugcac

SEQ ID NO: 3592910 - RNA, 23 nt, Human
agacuggcuuuuauuaaugcacu

SEQ ID NO: 3592911 - RNA, 19 nt, Human
agacugggaaggcuuggga

SEQ ID NO: 3592912 - RNA, 16 nt, Human
agacugggcugaggga

SEQ ID NO: 3592913 - RNA, 18 nt, Human
agacuggggggcuugaaa

SEQ ID NO: 3592914 - RNA, 17 nt, Human
agacugguccugugugc

SEQ ID NO: 3592915 - RNA, 17 nt, Human
agacuggugacugauuc

SEQ ID NO: 3592916 - RNA, 23 nt, Human
agacuggugagcagacugguggg

SEQ ID NO: 3592917 - RNA, 15 nt, Human
agacugguuuucugc

SEQ ID NO: 3592918 - RNA, 16 nt, Human
agacuguacaaaguag

SEQ ID NO: 3592919 - RNA, 22 nt, Human
agacuguagauugcuucuguag

SEQ ID NO: 3592920 - RNA, 23 nt, Human
agacuguagauugcuucuguagu

SEQ ID NO: 3592921 - RNA, 21 nt, Human
agacugucagcuuccaaacau

SEQ ID NO: 3592922 - RNA, 20 nt, Human
acguuccgggcaaaugccag

SEQ ID NO: 3592923 - RNA, 18 nt, Human
acguuccuauugucauua

SEQ ID NO: 3592924 - RNA, 20 nt, Human
acguuccuauugucauuaaa

SEQ ID NO: 3592925 - RNA, 21 nt, Human
acguuccuauugucauuaaag

SEQ ID NO: 3592926 - RNA, 18 nt, Human
acguuccuuacugcagaa

SEQ ID NO: 3592927 - RNA, 14 nt, Human
acguucggggcaug

SEQ ID NO: 3592928 - RNA, 15 nt, Human
acguucucacaccca

SEQ ID NO: 3592929 - RNA, 16 nt, Human
acguugagccccugga

SEQ ID NO: 3592930 - RNA, 11 nt, Human
acguugcugug

SEQ ID NO: 3592931 - RNA, 15 nt, Human
acguugcugugggaa

SEQ ID NO: 3592932 - RNA, 19 nt, Human
acguuggacuuuucguuaa

SEQ ID NO: 3592933 - RNA, 21 nt, Human
acguuggacuuuucguuaaca

SEQ ID NO: 3592934 - RNA, 19 nt, Human
acguuggagaagcccgugu

SEQ ID NO: 3592935 - RNA, 13 nt, Human
acguugugcauuu

SEQ ID NO: 3592936 - RNA, 13 nt, Human
acguuuaaaguuc

SEQ ID NO: 3592937 - RNA, 14 nt, Human
acguuuaaaguucu

SEQ ID NO: 3592938 - RNA, 15 nt, Human
acguuuaaaguucug

SEQ ID NO: 3592939 - RNA, 23 nt, Human
acguuuaagccaaaacaauguuu

SEQ ID NO: 3592940 - RNA, 18 nt, Human
acguuuacaagccccccc

SEQ ID NO: 3592941 - RNA, 16 nt, Human
acguuuauaaacagaa

SEQ ID NO: 3592942 - RNA, 15 nt, Human
acguuuccugagaag

SEQ ID NO: 3592943 - RNA, 14 nt, Human
acguuucuaaaggc

SEQ ID NO: 3592944 - RNA, 16 nt, Human
acguuucuaaaggcua

SEQ ID NO: 3592945 - RNA, 12 nt, Human
acguuucuucac

SEQ ID NO: 3592946 - RNA, 13 nt, Human
acguuuguaugug

SEQ ID NO: 3592947 - RNA, 12 nt, Human
acguuuuaagga

SEQ ID NO: 3592948 - RNA, 14 nt, Human
acguuuuaaggacu

SEQ ID NO: 3592949 - RNA, 18 nt, Human
acguuuuaaggacugacu

SEQ ID NO: 3592950 - RNA, 14 nt, Human
acguuuuauaagca

SEQ ID NO: 3592951 - RNA, 15 nt, Human
acguuuuauuguguu

SEQ ID NO: 3592952 - RNA, 16 nt, Human
acguuuuauuguguuu

SEQ ID NO: 3592953 - RNA, 13 nt, Human
acguuuucuaauu

SEQ ID NO: 3592954 - RNA, 20 nt, Human
acguuuuguuugaaaaagca

SEQ ID NO: 3592955 - RNA, 20 nt, Human
acguuuuuaauauaaagccu

SEQ ID NO: 3592956 - RNA, 14 nt, Human
acguuuuuccuuua

SEQ ID NO: 3592957 - RNA, 15 nt, Human
acuaaaaaaaagaug

SEQ ID NO: 3592958 - RNA, 17 nt, Human
acuaaaaaaaagaugaa

SEQ ID NO: 3592959 - RNA, 16 nt, Human
acuaaaaagaaggaaa

SEQ ID NO: 3592960 - RNA, 17 nt, Human
acuaaaaagaaggaaaa

SEQ ID NO: 3592961 - RNA, 20 nt, Human
acuaaaaaguauaaaauagu

SEQ ID NO: 3592962 - RNA, 21 nt, Human
acuaaaaaguauaaaauagua

SEQ ID NO: 3592963 - RNA, 13 nt, Human
acuaaaaauauua

SEQ ID NO: 3592964 - RNA, 15 nt, Human
acuaaaaaugcaaaa

SEQ ID NO: 3592965 - RNA, 19 nt, Human
acuaaaacaaagccacuuu

SEQ ID NO: 3592966 - RNA, 15 nt, Human
acuaaaagacauuug

SEQ ID NO: 3592967 - RNA, 11 nt, Human
acuaaaagaua

SEQ ID NO: 3592968 - RNA, 14 nt, Human
acuaaaauaauuuu

SEQ ID NO: 3592969 - RNA, 16 nt, Human
acuaaaauaauuuugu

SEQ ID NO: 3592970 - RNA, 19 nt, Human
acuaaaauaauuuuguaau

SEQ ID NO: 3592971 - RNA, 20 nt, Human
acuaaaauaauuuuguaaug

SEQ ID NO: 3592972 - RNA, 16 nt, Human
acuaaaauguaucuaa

SEQ ID NO: 3592973 - RNA, 13 nt, Human
acuaaacauuuug

SEQ ID NO: 3592974 - RNA, 14 nt, Human
acuaaacauuuugu

SEQ ID NO: 3592975 - RNA, 23 nt, Human
acuaaacucucuuugggaauguu

SEQ ID NO: 3592976 - RNA, 22 nt, Human
acuaaacucugaauaagcacuu

SEQ ID NO: 3592977 - RNA, 17 nt, Human
acuaaacucuuaccaua

SEQ ID NO: 3592978 - RNA, 20 nt, Human
acuaaacuuuuuuucuguac

SEQ ID NO: 3592979 - RNA, 18 nt, Human
acuaaagaagaucuguaa

SEQ ID NO: 3592980 - RNA, 17 nt, Human
acuaaagcaggccuuuu

SEQ ID NO: 3592981 - RNA, 20 nt, Human
acuaaagcaggccuuuugau

SEQ ID NO: 3592982 - RNA, 20 nt, Human
acuaaagcaugaaaugugaa

SEQ ID NO: 3592983 - RNA, 23 nt, Human
acuaaagccaaacauauauauac

SEQ ID NO: 3592984 - RNA, 12 nt, Human
acuaaagccuuu

SEQ ID NO: 3592985 - RNA, 22 nt, Human
acuaaagguggccacaaauucu

SEQ ID NO: 3592986 - RNA, 14 nt, Human
acuaaaguauguaa

SEQ ID NO: 3592987 - RNA, 15 nt, Human
acuaaaucagagaca

SEQ ID NO: 3592988 - RNA, 19 nt, Human
acuaaaucagagacaaaau

SEQ ID NO: 3592989 - RNA, 14 nt, Human
acuaaaucucuaau

SEQ ID NO: 3592990 - RNA, 19 nt, Human
acuaaaucuguaagcucuu

SEQ ID NO: 3592991 - RNA, 23 nt, Human
acuaaaucuguaagcucuuugaa

SEQ ID NO: 3592992 - RNA, 14 nt, Human
acuaaauguuaaag

SEQ ID NO: 3592993 - RNA, 15 nt, Human
acuaaauguuaaaga

SEQ ID NO: 3592994 - RNA, 13 nt, Human
acuaaauguucua

SEQ ID NO: 3592995 - RNA, 15 nt, Human
acuaaauuugauacu

SEQ ID NO: 3592996 - RNA, 24 nt, Human
acuaaauuuggggacagauucagu

SEQ ID NO: 3592997 - RNA, 13 nt, Human
acuaaauuuuaaa

SEQ ID NO: 3592998 - RNA, 20 nt, Human
acuaacaaaguuuucaugug

SEQ ID NO: 3592999 - RNA, 18 nt, Human
acuaacaaccaaagacua

SEQ ID NO: 3593000 - RNA, 19 nt, Human
acuaacacucagaagccug

SEQ ID NO: 3593001 - RNA, 13 nt, Human
acuaacagauaag

SEQ ID NO: 3593002 - RNA, 17 nt, Human
acuaacaggcuuaguga

SEQ ID NO: 3593003 - RNA, 18 nt, Human
acuaacaggcuuagugau

SEQ ID NO: 3593004 - RNA, 15 nt, Human
acuaacauauaaugu

SEQ ID NO: 3593005 - RNA, 17 nt, Human
acuaacauauaauguug

SEQ ID NO: 3593006 - RNA, 17 nt, Human
acuaacauguccugccu

SEQ ID NO: 3593007 - RNA, 18 nt, Human
acuaaccaagcugaguuu

SEQ ID NO: 3593008 - RNA, 12 nt, Human
acuaaccacgcu

SEQ ID NO: 3593009 - RNA, 21 nt, Human
acuaaccauguguuauguuuu

SEQ ID NO: 3593010 - RNA, 21 nt, Human
acuaaccccaacgcacaggaa

SEQ ID NO: 3593011 - RNA, 22 nt, Human
acuaaccuuccaaaaauuacuu

SEQ ID NO: 3593012 - RNA, 20 nt, Human
acuaacuagacaccaaaguu

SEQ ID NO: 3593013 - RNA, 22 nt, Human
acuaacuagacaccaaaguucu

SEQ ID NO: 3593014 - RNA, 12 nt, Human
acuaacuagagc

SEQ ID NO: 3593015 - RNA, 17 nt, Human
acuaacuaucaaauaga

SEQ ID NO: 3593016 - RNA, 18 nt, Human
acuaacucaaauacacau

SEQ ID NO: 3593017 - RNA, 22 nt, Human
acuaacucaaauacacauuugc

SEQ ID NO: 3593018 - RNA, 22 nt, Human
acuaacucaccagccccacugc

SEQ ID NO: 3593019 - RNA, 21 nt, Human
acuaacuccugagaaauguua

SEQ ID NO: 3593020 - RNA, 23 nt, Human
acuaacuuauuuauguuaaaaga

SEQ ID NO: 3593021 - RNA, 13 nt, Human
acuaacuucuaaa

SEQ ID NO: 3593022 - RNA, 16 nt, Human
acuaacuucuaaaacu

SEQ ID NO: 3593023 - RNA, 19 nt, Human
acuaacuucuaaaacugua

SEQ ID NO: 3593024 - RNA, 12 nt, Human
acuaagaaacuu

SEQ ID NO: 3593025 - RNA, 15 nt, Human
acuaagaaacuuuug

SEQ ID NO: 3593026 - RNA, 23 nt, Human
acuaagaaauauuccaaaugucu

SEQ ID NO: 3593027 - RNA, 14 nt, Human
acuaagaagaaaau

SEQ ID NO: 3593028 - RNA, 16 nt, Human
acuaagagagaaugag

SEQ ID NO: 3593029 - RNA, 15 nt, Human
acuaagaggcaaacc

SEQ ID NO: 3593030 - RNA, 19 nt, Human
acuaagaucgguuaacaaa

SEQ ID NO: 3593031 - RNA, 12 nt, Human
acuaagcagagg

SEQ ID NO: 3593032 - RNA, 15 nt, Human
acuaagcagaggagg

SEQ ID NO: 3593033 - RNA, 19 nt, Human
acuaagcagaggaggggcc

SEQ ID NO: 3593034 - RNA, 12 nt, Human
acuaagcauuuc

SEQ ID NO: 3593035 - RNA, 18 nt, Human
acuaagccagcaccggac

SEQ ID NO: 3593036 - RNA, 22 nt, Human
acuaagcccugucgagacacuu

SEQ ID NO: 3593037 - RNA, 15 nt, Human
acuggccaccaggcu

SEQ ID NO: 3593038 - RNA, 16 nt, Human
acuggccaccaggcug

SEQ ID NO: 3593039 - RNA, 17 nt, Human
acuggccaccaggcugg

SEQ ID NO: 3593040 - RNA, 11 nt, Human
acuggccaggg

SEQ ID NO: 3593041 - RNA, 23 nt, Human
acuggccaguggcuggaucugug

SEQ ID NO: 3593042 - RNA, 16 nt, Human
acuggccauggccugc

SEQ ID NO: 3593043 - RNA, 14 nt, Human
acuggcccucuucu

SEQ ID NO: 3593044 - RNA, 16 nt, Human
acuggcccucuucuua

SEQ ID NO: 3593045 - RNA, 17 nt, Human
acuggcccucuucuuac

SEQ ID NO: 3593046 - RNA, 22 nt, Human
acuggccggucugcaagucaga

SEQ ID NO: 3593047 - RNA, 17 nt, Human
acuggccucaaagcaag

SEQ ID NO: 3593048 - RNA, 22 nt, Human
acuggccucaaagcaagcauuc

SEQ ID NO: 3593049 - RNA, 16 nt, Human
acuggccucgccuggc

SEQ ID NO: 3593050 - RNA, 17 nt, Human
acuggccucgccuggcc

SEQ ID NO: 3593051 - RNA, 22 nt, Human
acuggccucgccuggccugagg

SEQ ID NO: 3593052 - RNA, 23 nt, Human
acuggccucgccuggccugaggu

SEQ ID NO: 3593053 - RNA, 16 nt, Human
acuggccucugcugau

SEQ ID NO: 3593054 - RNA, 17 nt, Human
acuggccugaggagcag

SEQ ID NO: 3593055 - RNA, 19 nt, Human
acuggccuucugaugaaau

SEQ ID NO: 3593056 - RNA, 19 nt, Human
acuggcgacacguagcagc

SEQ ID NO: 3593057 - RNA, 21 nt, Human
acuggcgugaacccaggaggc

SEQ ID NO: 3593058 - RNA, 18 nt, Human
acuggcuagaguccucac

SEQ ID NO: 3593059 - RNA, 18 nt, Human
acuggcucacccaguccu

SEQ ID NO: 3593060 - RNA, 22 nt, Human
acuggcucauauuccugcagcc

SEQ ID NO: 3593061 - RNA, 12 nt, Human
acuggcucucca

SEQ ID NO: 3593062 - RNA, 17 nt, Human
acuggcucuccaagugc

SEQ ID NO: 3593063 - RNA, 14 nt, Human
acuggcucucucca

SEQ ID NO: 3593064 - RNA, 23 nt, Human
acuggcucucuccaggauccaga

SEQ ID NO: 3593065 - RNA, 12 nt, Human
acuggcugccuc

SEQ ID NO: 3593066 - RNA, 14 nt, Human
acuggcugccucca

SEQ ID NO: 3593067 - RNA, 16 nt, Human
acuggcugccuccacu

SEQ ID NO: 3593068 - RNA, 19 nt, Human
acuggcugccuccacuccc

SEQ ID NO: 3593069 - RNA, 22 nt, Human
acuggcugccuccacucccacu

SEQ ID NO: 3593070 - RNA, 21 nt, Human
acuggcugucaguaugacauu

SEQ ID NO: 3593071 - RNA, 18 nt, Human
acuggcuuaccuccucau

SEQ ID NO: 3593072 - RNA, 13 nt, Human
acuggcuuuggcu

SEQ ID NO: 3593073 - RNA, 16 nt, Human
acuggcuuuggcuucu

SEQ ID NO: 3593074 - RNA, 19 nt, Human
acuggcuuugucccacagc

SEQ ID NO: 3593075 - RNA, 21 nt, Human
acuggcuuugucccacagcuu

SEQ ID NO: 3593076 - RNA, 16 nt, Human
acugggaacagaacuc

SEQ ID NO: 3593077 - RNA, 17 nt, Human
acugggaaccccuuucc

SEQ ID NO: 3593078 - RNA, 22 nt, Human
acugggaagauaggcucugcac

SEQ ID NO: 3593079 - RNA, 23 nt, Human
acugggaagauaggcucugcaca

SEQ ID NO: 3593080 - RNA, 16 nt, Human
acugggaagugacuua

SEQ ID NO: 3593081 - RNA, 17 nt, Human
acugggagaaaugaaaa

SEQ ID NO: 3593082 - RNA, 15 nt, Human
acugggagcccccag

SEQ ID NO: 3593083 - RNA, 23 nt, Human
acugggagccuacccacccccag

SEQ ID NO: 3593084 - RNA, 23 nt, Human
acugggcaugagggguuccuccc

SEQ ID NO: 3593085 - RNA, 20 nt, Human
acugggccauguugugccuc

SEQ ID NO: 3593086 - RNA, 21 nt, Human
acugggccuuagugggccagg

SEQ ID NO: 3593087 - RNA, 21 nt, Human
acugggcugaacacuccaauu

SEQ ID NO: 3593088 - RNA, 22 nt, Human
acugggcuuggggaccagagcu

SEQ ID NO: 3593089 - RNA, 13 nt, Human
acuggggagcccg

SEQ ID NO: 3593090 - RNA, 21 nt, Human
acuggggagcccgucucagug

SEQ ID NO: 3593091 - RNA, 12 nt, Human
acuggggcacuu

SEQ ID NO: 3593092 - RNA, 16 nt, Human
acauuguguugacauu

SEQ ID NO: 3593093 - RNA, 17 nt, Human
acauuguuaagaaaaau

SEQ ID NO: 3593094 - RNA, 16 nt, Human
acauuguucaauuaga

SEQ ID NO: 3593095 - RNA, 18 nt, Human
acauuuaaaacauuaaaa

SEQ ID NO: 3593096 - RNA, 17 nt, Human
acauuuaaaauugcuau

SEQ ID NO: 3593097 - RNA, 19 nt, Human
acauuuaaagcauugcugu

SEQ ID NO: 3593098 - RNA, 20 nt, Human
acauuuaagagacagucacc

SEQ ID NO: 3593099 - RNA, 16 nt, Human
acauuuaauaucuuca

SEQ ID NO: 3593100 - RNA, 11 nt, Human
acauuuaauug

SEQ ID NO: 3593101 - RNA, 16 nt, Human
acauuuacaaacugaa

SEQ ID NO: 3593102 - RNA, 17 nt, Human
acauuuacaaacugaag

SEQ ID NO: 3593103 - RNA, 12 nt, Human
acauuuacaguc

SEQ ID NO: 3593104 - RNA, 21 nt, Human
acauuuacaguccuucaaaau

SEQ ID NO: 3593105 - RNA, 18 nt, Human
acauuuaccaaucauauu

SEQ ID NO: 3593106 - RNA, 21 nt, Human
acauuuagagaacuguggccg

SEQ ID NO: 3593107 - RNA, 17 nt, Human
acauuuagucucuuuau

SEQ ID NO: 3593108 - RNA, 20 nt, Human
acauuuauaauguuugcuau

SEQ ID NO: 3593109 - RNA, 14 nt, Human
acauuuauuuccuc

SEQ ID NO: 3593110 - RNA, 15 nt, Human
acauuuauuuccucc

SEQ ID NO: 3593111 - RNA, 15 nt, Human
acauuuauuuuauga

SEQ ID NO: 3593112 - RNA, 18 nt, Human
acauuuauuuuaugagaa

SEQ ID NO: 3593113 - RNA, 22 nt, Human
acauuuauuuuuuuuaaagaaa

SEQ ID NO: 3593114 - RNA, 15 nt, Human
acauuucacugucug

SEQ ID NO: 3593115 - RNA, 15 nt, Human
acauuucccugugcu

SEQ ID NO: 3593116 - RNA, 19 nt, Human
acauuuccgccacaucccu

SEQ ID NO: 3593117 - RNA, 20 nt, Human
acauuucuauagccaaaaau

SEQ ID NO: 3593118 - RNA, 22 nt, Human
acauuucuccuuugauaaaaua

SEQ ID NO: 3593119 - RNA, 23 nt, Human
acauuucucuaagagaacaaugu

SEQ ID NO: 3593120 - RNA, 23 nt, Human
acauuucuuagacuacauuuaga

SEQ ID NO: 3593121 - RNA, 15 nt, Human
acauuucuuuucuuu

SEQ ID NO: 3593122 - RNA, 20 nt, Human
acauuucuuuucuuuuuaca

SEQ ID NO: 3593123 - RNA, 19 nt, Human
acauuugagucccuuccag

SEQ ID NO: 3593124 - RNA, 20 nt, Human
acauuugaugcaugucuuuu

SEQ ID NO: 3593125 - RNA, 16 nt, Human
acauuugcucauggaa

SEQ ID NO: 3593126 - RNA, 22 nt, Human
acauuugcuguuuuaaacauua

SEQ ID NO: 3593127 - RNA, 21 nt, Human
acauuuggaacuaacacguga

SEQ ID NO: 3593128 - RNA, 15 nt, Human
acauuuggaauacuu

SEQ ID NO: 3593129 - RNA, 17 nt, Human
acauuuggaauacuuuu

SEQ ID NO: 3593130 - RNA, 18 nt, Human
acauuuggaauacuuuuu

SEQ ID NO: 3593131 - RNA, 22 nt, Human
acauuuggaggcaauccuaccu

SEQ ID NO: 3593132 - RNA, 19 nt, Human
acauuugggagacauguga

SEQ ID NO: 3593133 - RNA, 18 nt, Human
acauuuggguaaaucaug

SEQ ID NO: 3593134 - RNA, 18 nt, Human
acauuuggguuacuauuu

SEQ ID NO: 3593135 - RNA, 14 nt, Human
acauuugguaaugu

SEQ ID NO: 3593136 - RNA, 19 nt, Human
acauuugguaauguuuuua

SEQ ID NO: 3593137 - RNA, 14 nt, Human
acauuugucauuuu

SEQ ID NO: 3593138 - RNA, 19 nt, Human
acauuugugauauauguau

SEQ ID NO: 3593139 - RNA, 19 nt, Human
acauuugugccgacacugu

SEQ ID NO: 3593140 - RNA, 21 nt, Human
acauuugugccgacacuguuc

SEQ ID NO: 3593141 - RNA, 19 nt, Human
acauuuguucuauagcuuu

SEQ ID NO: 3593142 - RNA, 23 nt, Human
acauuuguuugguuauagugcaa

SEQ ID NO: 3593143 - RNA, 23 nt, Human
acauuuuaaaaacauagaaaaau

SEQ ID NO: 3593144 - RNA, 20 nt, Human
acauuuuaaauaaaagaaaa

SEQ ID NO: 3593145 - RNA, 18 nt, Human
acauuuuaaauggacaga

SEQ ID NO: 3593146 - RNA, 13 nt, Human
acauuuuaacaag

SEQ ID NO: 3593147 - RNA, 15 nt, Human
acauuuuaacaagaa

SEQ ID NO: 3593148 - RNA, 17 nt, Human
acauuuuaacaagaaga

SEQ ID NO: 3593149 - RNA, 18 nt, Human
acauuuuaacaagaagau

SEQ ID NO: 3593150 - RNA, 12 nt, Human
acauuuuaacau

SEQ ID NO: 3593151 - RNA, 13 nt, Human
acauuuuaacaug

SEQ ID NO: 3593152 - RNA, 13 nt, Human
acauuuuaauuca

SEQ ID NO: 3593153 - RNA, 16 nt, Human
acauuuuacacacugu

SEQ ID NO: 3593154 - RNA, 20 nt, Human
acauuuuauggugccuagua

SEQ ID NO: 3593155 - RNA, 13 nt, Human
acauuuuauuaag

SEQ ID NO: 3593156 - RNA, 18 nt, Human
acauuuuauuuuauuaug

SEQ ID NO: 3593157 - RNA, 22 nt, Human
acauuuucagaaauauucauga

SEQ ID NO: 3593158 - RNA, 14 nt, Human
acauuuucagccaa

SEQ ID NO: 3593159 - RNA, 12 nt, Human
acauuuucagug

SEQ ID NO: 3593160 - RNA, 17 nt, Human
acauuuugaaagucugu

SEQ ID NO: 3593161 - RNA, 12 nt, Human
acauuuugagaa

SEQ ID NO: 3593162 - RNA, 18 nt, Human
acauuuuggugagaaaug

SEQ ID NO: 3593163 - RNA, 12 nt, Human
acauuuuguaua

SEQ ID NO: 3593164 - RNA, 18 nt, Human
acauuuuguucuuacaca

SEQ ID NO: 3593165 - RNA, 19 nt, Human
acauuuuguucuuacacau

SEQ ID NO: 3593166 - RNA, 17 nt, Human
acauuuuguuguaaaaa

SEQ ID NO: 3593167 - RNA, 21 nt, Human
acauuuuguuguaaaaagaaa

SEQ ID NO: 3593168 - RNA, 21 nt, Human
acauuuuuaagugcugcauuu

SEQ ID NO: 3593169 - RNA, 12 nt, Human
acauuuuuacaa

SEQ ID NO: 3593170 - RNA, 15 nt, Human
acauuuuuacaauaa

SEQ ID NO: 3593171 - RNA, 18 nt, Human
acauuuuuagccuguguc

SEQ ID NO: 3593172 - RNA, 16 nt, Human
acauuuuuauaccugu

SEQ ID NO: 3593173 - RNA, 19 nt, Human
acauuuuucaacuuugaau

SEQ ID NO: 3593174 - RNA, 21 nt, Human
acauuuuucaacuuugaauaa

SEQ ID NO: 3593175 - RNA, 22 nt, Human
acauuuuucaacuuugaauaaa

SEQ ID NO: 3593176 - RNA, 21 nt, Human
acauuuuuccguuugcuuuug

SEQ ID NO: 3593177 - RNA, 12 nt, Human
acauuuuuuaaa

SEQ ID NO: 3593178 - RNA, 17 nt, Human
acauuuuuuaaaugcac

SEQ ID NO: 3593179 - RNA, 21 nt, Human
acauuuuuuaaaugcaccugg

SEQ ID NO: 3593180 - RNA, 14 nt, Human
acauuuuuuaagcu

SEQ ID NO: 3593181 - RNA, 14 nt, Human
acaguauuuuccca

SEQ ID NO: 3593182 - RNA, 16 nt, Human
acagucaaaacagaga

SEQ ID NO: 3593183 - RNA, 16 nt, Human
acagucaaaauaauuc

SEQ ID NO: 3593184 - RNA, 18 nt, Human
acagucaaggaguggcuu

SEQ ID NO: 3593185 - RNA, 13 nt, Human
acagucacaaauu

SEQ ID NO: 3593186 - RNA, 20 nt, Human
acagucacugccacuuugca

SEQ ID NO: 3593187 - RNA, 18 nt, Human
acagucagcucuucaucu

SEQ ID NO: 3593188 - RNA, 15 nt, Human
acagucagguugaag

SEQ ID NO: 3593189 - RNA, 16 nt, Human
acagucagguugaaga

SEQ ID NO: 3593190 - RNA, 14 nt, Human
acagucaucaucag

SEQ ID NO: 3593191 - RNA, 18 nt, Human
acagucaucaucagggcc

SEQ ID NO: 3593192 - RNA, 21 nt, Human
acagucaucaucagggccugg

SEQ ID NO: 3593193 - RNA, 17 nt, Human
acagucaucgcucgugu

SEQ ID NO: 3593194 - RNA, 15 nt, Human
acaguccagccugga

SEQ ID NO: 3593195 - RNA, 19 nt, Human
acagucccacugugcaggu

SEQ ID NO: 3593196 - RNA, 15 nt, Human
acagucccugccaau

SEQ ID NO: 3593197 - RNA, 17 nt, Human
acaguccgucaaaacag

SEQ ID NO: 3593198 - RNA, 21 nt, Human
acaguccgucaaaacagauug

SEQ ID NO: 3593199 - RNA, 18 nt, Human
acaguccuaacugguaua

SEQ ID NO: 3593200 - RNA, 19 nt, Human
acaguccuaacugguauag

SEQ ID NO: 3593201 - RNA, 15 nt, Human
acaguccucccaucu

SEQ ID NO: 3593202 - RNA, 22 nt, Human
acaguccuuaccagcagagcac

SEQ ID NO: 3593203 - RNA, 18 nt, Human
acagucuaauuuuuauuc

SEQ ID NO: 3593204 - RNA, 19 nt, Human
acagucuccggccucucca

SEQ ID NO: 3593205 - RNA, 19 nt, Human
acagucucuuuaaucuuca

SEQ ID NO: 3593206 - RNA, 13 nt, Human
acagucugucuuc

SEQ ID NO: 3593207 - RNA, 23 nt, Human
acagucuucauuuuuuuuaauug

SEQ ID NO: 3593208 - RNA, 21 nt, Human
acagucuuccacaaagaaaau

SEQ ID NO: 3593209 - RNA, 15 nt, Human
acagucuuguauuaa

SEQ ID NO: 3593210 - RNA, 22 nt, Human
acagucuuguauuaaguuguua

SEQ ID NO: 3593211 - RNA, 14 nt, Human
acagugaagacaga

SEQ ID NO: 3593212 - RNA, 19 nt, Human
acagugaagacagaaguuu

SEQ ID NO: 3593213 - RNA, 21 nt, Human
acagugaagacagaaguuugc

SEQ ID NO: 3593214 - RNA, 17 nt, Human
acagugaaggcuguccu

SEQ ID NO: 3593215 - RNA, 14 nt, Human
acagugacccuucc

SEQ ID NO: 3593216 - RNA, 16 nt, Human
acagugacccuuccca

SEQ ID NO: 3593217 - RNA, 18 nt, Human
acagugacucgggcuccu

SEQ ID NO: 3593218 - RNA, 19 nt, Human
acagugacucgggcuccug

SEQ ID NO: 3593219 - RNA, 14 nt, Human
acagugacuucuga

SEQ ID NO: 3593220 - RNA, 12 nt, Human
acagugagccug

SEQ ID NO: 3593221 - RNA, 17 nt, Human
acagugaggugcccagc

SEQ ID NO: 3593222 - RNA, 23 nt, Human
acagugaucaaguuauuuuuaau

SEQ ID NO: 3593223 - RNA, 24 nt, Human
acagugaugcugugcuaugaauuu

SEQ ID NO: 3593224 - RNA, 22 nt, Human
acagugauuuuuuuuuagaaca

SEQ ID NO: 3593225 - RNA, 13 nt, Human
acagugcacauga

SEQ ID NO: 3593226 - RNA, 20 nt, Human
acagugcagagccuucucag

SEQ ID NO: 3593227 - RNA, 21 nt, Human
acagugcagagccuucucaga

SEQ ID NO: 3593228 - RNA, 20 nt, Human
acagugcauauuccuuucua

SEQ ID NO: 3593229 - RNA, 15 nt, Human
acagugcaucucagc

SEQ ID NO: 3593230 - RNA, 18 nt, Human
acagugcaucucagccca

SEQ ID NO: 3593231 - RNA, 16 nt, Human
acagugccauugucuu

SEQ ID NO: 3593232 - RNA, 18 nt, Human
acagugccauugucuuua

SEQ ID NO: 3593233 - RNA, 11 nt, Human
acagugccugc

SEQ ID NO: 3593234 - RNA, 13 nt, Human
acagugccugcug

SEQ ID NO: 3593235 - RNA, 21 nt, Human
acagugccuucaauaaauggu

SEQ ID NO: 3593236 - RNA, 14 nt, Human
acagugcuaaaaau

SEQ ID NO: 3593237 - RNA, 16 nt, Human
acagugcucuuuucuc

SEQ ID NO: 3593238 - RNA, 20 nt, Human
acagugcugaccagacagcc

SEQ ID NO: 3593239 - RNA, 21 nt, Human
acagugcugcagcucccuggc

SEQ ID NO: 3593240 - RNA, 14 nt, Human
acagugcugucuga

SEQ ID NO: 3593241 - RNA, 22 nt, Human
acagugcugucugaucugugcu

SEQ ID NO: 3593242 - RNA, 13 nt, Human
acagugcugugug

SEQ ID NO: 3593243 - RNA, 14 nt, Human
acagugcuucagcc

SEQ ID NO: 3593244 - RNA, 22 nt, Human
acagugcuucagccugaggcug

SEQ ID NO: 3593245 - RNA, 21 nt, Human
acagugcuugccacagagcgg

SEQ ID NO: 3593246 - RNA, 21 nt, Human
acagugcuuuuaagugaaaau

SEQ ID NO: 3593247 - RNA, 18 nt, Human
acaguggaaccagcccag

SEQ ID NO: 3593248 - RNA, 18 nt, Human
acaguggaacuacauuag

SEQ ID NO: 3593249 - RNA, 17 nt, Human
acaguggagugcaaaag

SEQ ID NO: 3593250 - RNA, 19 nt, Human
acaguggagugcaaaaggc

SEQ ID NO: 3593251 - RNA, 15 nt, Human
acaguggauugcuca

SEQ ID NO: 3593252 - RNA, 12 nt, Human
acaguggcagga

SEQ ID NO: 3593253 - RNA, 13 nt, Human
acaguggcaggac

SEQ ID NO: 3593254 - RNA, 12 nt, Human
acagugggaaau

SEQ ID NO: 3593255 - RNA, 15 nt, Human
acagugggaaauauu

SEQ ID NO: 3593256 - RNA, 18 nt, Human
acagugggaacucugaca

SEQ ID NO: 3593257 - RNA, 17 nt, Human
acagugggagccagggc

SEQ ID NO: 3593258 - RNA, 15 nt, Human
acaguggggaaugaa

SEQ ID NO: 3593259 - RNA, 19 nt, Human
acaguggggaaugaagaua

SEQ ID NO: 3593260 - RNA, 14 nt, Human
acagugggugcccc

SEQ ID NO: 3593261 - RNA, 15 nt, Human
acaguggguggugga

SEQ ID NO: 3593262 - RNA, 17 nt, Human
acagugguggcaacauu

SEQ ID NO: 3593263 - RNA, 21 nt, Human
acagugguggcaacauucauu

SEQ ID NO: 3593264 - RNA, 13 nt, Human
acagugguggcag

SEQ ID NO: 3593265 - RNA, 15 nt, Human
acagugguggcaggg

SEQ ID NO: 3593266 - RNA, 16 nt, Human
acagugguggcagggc

SEQ ID NO: 3593267 - RNA, 19 nt, Human
acagugguucuacaaucua

SEQ ID NO: 3593268 - RNA, 23 nt, Human
acagugguucuacaaucuauuua

SEQ ID NO: 3593269 - RNA, 22 nt, Human
acagugguuuuauacugaagga

SEQ ID NO: 3593270 - RNA, 15 nt, Human
acaguguacagucuu

SEQ ID NO: 3593271 - RNA, 18 nt, Human
acaguguacagucuugua

SEQ ID NO: 3593272 - RNA, 19 nt, Human
acaguguaccauuaaaaua

SEQ ID NO: 3593273 - RNA, 20 nt, Human
acaguguaccauuaaaauau

SEQ ID NO: 3593274 - RNA, 15 nt, Human
acagugucugggcug

SEQ ID NO: 3593275 - RNA, 16 nt, Human
acagugucugggcuga

SEQ ID NO: 3593276 - RNA, 23 nt, Human
acagugucuguaucggagacagu

SEQ ID NO: 3593277 - RNA, 22 nt, Human
acagugugcaaggcagccgugg

SEQ ID NO: 3593278 - RNA, 22 nt, Human
acaguguguggucaacauuucu

SEQ ID NO: 3593279 - RNA, 20 nt, Human
acaguguuauuuucuuugaa

SEQ ID NO: 3593280 - RNA, 13 nt, Human
acaguguucuguu

SEQ ID NO: 3593281 - RNA, 15 nt, Human
acaguguucuguuua

SEQ ID NO: 3593282 - RNA, 21 nt, Human
acaguguugaaaauguucaga

SEQ ID NO: 3593283 - RNA, 14 nt, Human
acaguguuuauccu

SEQ ID NO: 3593284 - RNA, 18 nt, Human
acaguguuuauccuuuca

SEQ ID NO: 3593285 - RNA, 15 nt, Human
acaguguuucccaua

SEQ ID NO: 3593286 - RNA, 16 nt, Human
acaguguuucccauaa

SEQ ID NO: 3593287 - RNA, 19 nt, Human
acaguguuucgacagcuga

SEQ ID NO: 3593288 - RNA, 20 nt, Human
acaguguuuuuguaaagugu

SEQ ID NO: 3593289 - RNA, 14 nt, Human
acaguuaacuuuca

SEQ ID NO: 3593290 - RNA, 16 nt, Human
acaguuaacuuucaga

SEQ ID NO: 3593291 - RNA, 15 nt, Human
acaguuaagagaaau

SEQ ID NO: 3593292 - RNA, 20 nt, Human
acaguuacuuuuccuugcau

SEQ ID NO: 3593293 - RNA, 23 nt, Human
acaguuacuuuuccuugcauaca

SEQ ID NO: 3593294 - RNA, 17 nt, Human
acaguuauaaaauuaaa

SEQ ID NO: 3593295 - RNA, 17 nt, Human
acaguuaucuaaguuaa

SEQ ID NO: 3593296 - RNA, 18 nt, Human
acaguuauuuauagucau

SEQ ID NO: 3593297 - RNA, 23 nt, Human
acaguuauuuauagucauuuauu

SEQ ID NO: 3593298 - RNA, 22 nt, Human
acaguucaaaauucuaaaugua

SEQ ID NO: 3593299 - RNA, 12 nt, Human
acaguucaagaa

SEQ ID NO: 3593300 - RNA, 16 nt, Human
acaguucaagaaagcu

SEQ ID NO: 3593301 - RNA, 20 nt, Human
acaguucaagaaagcuucaa

SEQ ID NO: 3593302 - RNA, 23 nt, Human
acaguucaauaaacuuaacuuua

SEQ ID NO: 3593303 - RNA, 14 nt, Human
acucagaagccugg

SEQ ID NO: 3593304 - RNA, 17 nt, Human
acucagaagggagcuag

SEQ ID NO: 3593305 - RNA, 14 nt, Human
acucagaauucucu

SEQ ID NO: 3593306 - RNA, 19 nt, Human
acucagacaggaaagggaa

SEQ ID NO: 3593307 - RNA, 15 nt, Human
acucagaucacuacu

SEQ ID NO: 3593308 - RNA, 16 nt, Human
acucagaucacuacug

SEQ ID NO: 3593309 - RNA, 17 nt, Human
acucagaucacuacugc

SEQ ID NO: 3593310 - RNA, 18 nt, Human
acucagaucacuacugca

SEQ ID NO: 3593311 - RNA, 19 nt, Human
acucagaucacuacugcag

SEQ ID NO: 3593312 - RNA, 12 nt, Human
acucagauccag

SEQ ID NO: 3593313 - RNA, 14 nt, Human
acucagauccaggg

SEQ ID NO: 3593314 - RNA, 19 nt, Human
acucagcagcccuccucac

SEQ ID NO: 3593315 - RNA, 20 nt, Human
acucagcagcccuccucacc

SEQ ID NO: 3593316 - RNA, 22 nt, Human
acucagcagcccuccucacccc

SEQ ID NO: 3593317 - RNA, 23 nt, Human
acucagcagcccuccucaccccg

SEQ ID NO: 3593318 - RNA, 22 nt, Human
acucagccaagcacaguggugg

SEQ ID NO: 3593319 - RNA, 23 nt, Human
acucagccaagcacagugguggc

SEQ ID NO: 3593320 - RNA, 12 nt, Human
acucagccccua

SEQ ID NO: 3593321 - RNA, 17 nt, Human
acucagcccucauuggc

SEQ ID NO: 3593322 - RNA, 15 nt, Human
acucagcccugaggu

SEQ ID NO: 3593323 - RNA, 13 nt, Human
acucagcccuggg

SEQ ID NO: 3593324 - RNA, 14 nt, Human
acucagcccugggc

SEQ ID NO: 3593325 - RNA, 15 nt, Human
acaugacaacuuugc

SEQ ID NO: 3593326 - RNA, 14 nt, Human
acaugacacugaaa

SEQ ID NO: 3593327 - RNA, 15 nt, Human
acaugacacugaaau

SEQ ID NO: 3593328 - RNA, 17 nt, Human
acaugacacugaaaugc

SEQ ID NO: 3593329 - RNA, 14 nt, Human
acuauuuucuacaa

SEQ ID NO: 3593330 - RNA, 18 nt, Human
acuauuuuuauuuauauu

SEQ ID NO: 3593331 - RNA, 20 nt, Human
acuauuuuuguuuuuauuaa

SEQ ID NO: 3593332 - RNA, 13 nt, Human
acucaaaaagcug

SEQ ID NO: 3593333 - RNA, 20 nt, Human
acucaaaacccaucugggcu

SEQ ID NO: 3593334 - RNA, 15 nt, Human
acucaaaacuuaaca

SEQ ID NO: 3593335 - RNA, 16 nt, Human
acucaaacucuuaaaa

SEQ ID NO: 3593336 - RNA, 14 nt, Human
acucaaacugagga

SEQ ID NO: 3593337 - RNA, 23 nt, Human
acucaaacugaggaauuucaccu

SEQ ID NO: 3593338 - RNA, 17 nt, Human
acucaaacuucuggcuc

SEQ ID NO: 3593339 - RNA, 17 nt, Human
acucaaaggguggaaua

SEQ ID NO: 3593340 - RNA, 22 nt, Human
acucaaaucuuaagaaauaaau

SEQ ID NO: 3593341 - RNA, 21 nt, Human
acucaaauggggccagaucca

SEQ ID NO: 3593342 - RNA, 14 nt, Human
acucaaauuuuggc

SEQ ID NO: 3593343 - RNA, 15 nt, Human
acucaacaugaguca

SEQ ID NO: 3593344 - RNA, 17 nt, Human
acucaacauguuacuga

SEQ ID NO: 3593345 - RNA, 22 nt, Human
acucaacauguuacugaccagc

SEQ ID NO: 3593346 - RNA, 15 nt, Human
acucaaccaaauggu

SEQ ID NO: 3593347 - RNA, 15 nt, Human
acucaacccucucag

SEQ ID NO: 3593348 - RNA, 20 nt, Human
acucaacugggcucuguccc

SEQ ID NO: 3593349 - RNA, 14 nt, Human
acucaagaagcagg

SEQ ID NO: 3593350 - RNA, 16 nt, Human
acucaagaagcaggcu

SEQ ID NO: 3593351 - RNA, 19 nt, Human
acucaagaagcaggcuaca

SEQ ID NO: 3593352 - RNA, 15 nt, Human
acucaagauucccag

SEQ ID NO: 3593353 - RNA, 16 nt, Human
acucaagauucccagg

SEQ ID NO: 3593354 - RNA, 17 nt, Human
acucaagauucccagga

SEQ ID NO: 3593355 - RNA, 18 nt, Human
acucaagauucccaggag

SEQ ID NO: 3593356 - RNA, 19 nt, Human
acucaagauucccaggagu

SEQ ID NO: 3593357 - RNA, 23 nt, Human
acucaagauucccaggaguucug

SEQ ID NO: 3593358 - RNA, 19 nt, Human
acucaagccaagcagccaa

SEQ ID NO: 3593359 - RNA, 22 nt, Human
acucaagccaagcagccaagcu

SEQ ID NO: 3593360 - RNA, 20 nt, Human
acucaagguucccagagaug

SEQ ID NO: 3593361 - RNA, 18 nt, Human
acucaaguugauuagaaa

SEQ ID NO: 3593362 - RNA, 18 nt, Human
acucaauaaaaucaugua

SEQ ID NO: 3593363 - RNA, 23 nt, Human
acucaauauuuuccaugaaaaug

SEQ ID NO: 3593364 - RNA, 17 nt, Human
acucaaugcuuuauuug

SEQ ID NO: 3593365 - RNA, 18 nt, Human
acucaauguuacuaucug

SEQ ID NO: 3593366 - RNA, 14 nt, Human
acucaauuucuccc

SEQ ID NO: 3593367 - RNA, 14 nt, Human
acucacacagccag

SEQ ID NO: 3593368 - RNA, 19 nt, Human
acucacacaggcauuuccu

SEQ ID NO: 3593369 - RNA, 17 nt, Human
acucacaccacuagccu

SEQ ID NO: 3593370 - RNA, 22 nt, Human
acucacagaccuggagccccug

SEQ ID NO: 3593371 - RNA, 18 nt, Human
acucacagagacacaggg

SEQ ID NO: 3593372 - RNA, 21 nt, Human
acucacagagucaaggccugc

SEQ ID NO: 3593373 - RNA, 13 nt, Human
acucacagccagc

SEQ ID NO: 3593374 - RNA, 15 nt, Human
acucacaggaaggag

SEQ ID NO: 3593375 - RNA, 14 nt, Human
acucaccagcccca

SEQ ID NO: 3593376 - RNA, 20 nt, Human
acucaccagccccacugcca

SEQ ID NO: 3593377 - RNA, 23 nt, Human
acucaccaguguccccuccacug

SEQ ID NO: 3593378 - RNA, 13 nt, Human
acucaccaucugu

SEQ ID NO: 3593379 - RNA, 13 nt, Human
acucaccccagcc

SEQ ID NO: 3593380 - RNA, 14 nt, Human
acucaccccagccc

SEQ ID NO: 3593381 - RNA, 15 nt, Human
acucaccccagcccc

SEQ ID NO: 3593382 - RNA, 16 nt, Human
acucaccccagcccca

SEQ ID NO: 3593383 - RNA, 19 nt, Human
acucaccccggcagacgcc

SEQ ID NO: 3593384 - RNA, 16 nt, Human
acucaccucugccuca

SEQ ID NO: 3593385 - RNA, 14 nt, Human
acucaccugccccu

SEQ ID NO: 3593386 - RNA, 18 nt, Human
acucaccugcuggccccu

SEQ ID NO: 3593387 - RNA, 19 nt, Human
acucaccugcuggccccuc

SEQ ID NO: 3593388 - RNA, 20 nt, Human
acucaccugcuggccccuca

SEQ ID NO: 3593389 - RNA, 14 nt, Human
acucaccuggggcu

SEQ ID NO: 3593390 - RNA, 19 nt, Human
acucaccuggggcugcugg

SEQ ID NO: 3593391 - RNA, 20 nt, Human
acucaccuggggcugcuggc

SEQ ID NO: 3593392 - RNA, 15 nt, Human
acucaccuguuacuu

SEQ ID NO: 3593393 - RNA, 14 nt, Human
acucaccuugaaca

SEQ ID NO: 3593394 - RNA, 23 nt, Human
acucacgauaaauaaucggccca

SEQ ID NO: 3593395 - RNA, 18 nt, Human
acucacuaauucauuaau

SEQ ID NO: 3593396 - RNA, 14 nt, Human
acucacuaggcccc

SEQ ID NO: 3593397 - RNA, 21 nt, Human
acucacuaggcccccacuugc

SEQ ID NO: 3593398 - RNA, 15 nt, Human
acucacucaaguuca

SEQ ID NO: 3593399 - RNA, 13 nt, Human
acucacuccugag

SEQ ID NO: 3593400 - RNA, 18 nt, Human
acucacuccuuuuaaaga

SEQ ID NO: 3593401 - RNA, 19 nt, Human
acucacuccuuuuaaagaa

SEQ ID NO: 3593402 - RNA, 12 nt, Human
acucacugaagc

SEQ ID NO: 3593403 - RNA, 14 nt, Human
acucacugaagccu

SEQ ID NO: 3593404 - RNA, 15 nt, Human
acucacugaagccug

SEQ ID NO: 3593405 - RNA, 19 nt, Human
acucacugaagccugcguu

SEQ ID NO: 3593406 - RNA, 15 nt, Human
acucacuggcagccc

SEQ ID NO: 3593407 - RNA, 22 nt, Human
acucacuggggccuacagcuuu

SEQ ID NO: 3593408 - RNA, 14 nt, Human
acucagaaacauca

SEQ ID NO: 3593409 - RNA, 15 nt, Human
acucagaaagccaac

SEQ ID NO: 3593410 - RNA, 18 nt, Human
acucagaagacacugaug

SEQ ID NO: 3593411 - RNA, 15 nt, Human
acucagaagccucug

SEQ ID NO: 3593412 - RNA, 16 nt, Human
acucagaagccucugg

SEQ ID NO: 3593413 - RNA, 20 nt, Human
acucagaagccucuggguca

SEQ ID NO: 3593414 - RNA, 13 nt, Human
acucagaagccug

SEQ ID NO: 3593415 - RNA, 17 nt, Human
acucagaagccugaggc

SEQ ID NO: 3593416 - RNA, 18 nt, Human
acucagaagccugaggcu

SEQ ID NO: 3593417 - RNA, 21 nt, Human
acucagaagccugggggccug

SEQ ID NO: 3593418 - RNA, 23 nt, Human
acucagaagccugggggccuggc

SEQ ID NO: 3593419 - RNA, 16 nt, Human
acucagaaguccagag

SEQ ID NO: 3593420 - RNA, 22 nt, Human
acucagaauucucuaguuugau

SEQ ID NO: 3593421 - RNA, 18 nt, Human
acucagacauuggcaccu

SEQ ID NO: 3593422 - RNA, 12 nt, Human
acucagaccuga

SEQ ID NO: 3593423 - RNA, 12 nt, Human
acucagagcagu

SEQ ID NO: 3593424 - RNA, 20 nt, Human
acucagagcucucucuacag

SEQ ID NO: 3593425 - RNA, 21 nt, Human
acucagagcucucucuacaga

SEQ ID NO: 3593426 - RNA, 14 nt, Human
acucagagggagga

SEQ ID NO: 3593427 - RNA, 22 nt, Human
acucagaguucuauacuguaaa

SEQ ID NO: 3593428 - RNA, 22 nt, Human
acucagauaagguaaaaugcca

SEQ ID NO: 3593429 - RNA, 21 nt, Human
acucagaucacuacugcaguc

SEQ ID NO: 3593430 - RNA, 11 nt, Human
acucagaucca

SEQ ID NO: 3593431 - RNA, 16 nt, Human
acucagauccagggac

SEQ ID NO: 3593432 - RNA, 21 nt, Human
acucagauggaaccgcaggaa

SEQ ID NO: 3593433 - RNA, 14 nt, Human
acucagcaccacuc

SEQ ID NO: 3593434 - RNA, 22 nt, Human
acucagcaccacucaagaccaa

SEQ ID NO: 3593435 - RNA, 15 nt, Human
acucagcagcccucc

SEQ ID NO: 3593436 - RNA, 17 nt, Human
acucagcagcccuccuc

SEQ ID NO: 3593437 - RNA, 17 nt, Human
acucagccacccugagu

SEQ ID NO: 3593438 - RNA, 15 nt, Human
acucagccccuagga

SEQ ID NO: 3593439 - RNA, 14 nt, Human
acucagcccugagg

SEQ ID NO: 3593440 - RNA, 12 nt, Human
acucagcccugg

SEQ ID NO: 3593441 - RNA, 21 nt, Human
acucagccugcaguuaauuag

SEQ ID NO: 3593442 - RNA, 16 nt, Human
acucagccugcugccc

SEQ ID NO: 3593443 - RNA, 16 nt, Human
acucagccugggacag

SEQ ID NO: 3593444 - RNA, 11 nt, Human
acucagccuuc

SEQ ID NO: 3593445 - RNA, 19 nt, Human
acucagcuguccugcagca

SEQ ID NO: 3593446 - RNA, 20 nt, Human
acucagcuuucuuuaaaguu

SEQ ID NO: 3593447 - RNA, 13 nt, Human
acucaggaagaac

SEQ ID NO: 3593448 - RNA, 12 nt, Human
acucaggacucc

SEQ ID NO: 3593449 - RNA, 15 nt, Human
acucaggacuccagc

SEQ ID NO: 3593450 - RNA, 18 nt, Human
acucaggaggcugagggg

SEQ ID NO: 3593451 - RNA, 14 nt, Human
acucaggaugccca

SEQ ID NO: 3593452 - RNA, 18 nt, Human
acucaggaugcccagggc

SEQ ID NO: 3593453 - RNA, 22 nt, Human
acucaggauuuaaaaacuggaa

SEQ ID NO: 3593454 - RNA, 16 nt, Human
acucaggcccaaagcc

SEQ ID NO: 3593455 - RNA, 17 nt, Human
acucaggcccaaagccu

SEQ ID NO: 3593456 - RNA, 22 nt, Human
acucaggcccccaccuggcuca

SEQ ID NO: 3593457 - RNA, 20 nt, Human
acucaggcgggacagugcug

SEQ ID NO: 3593458 - RNA, 12 nt, Human
acucaggcugga

SEQ ID NO: 3593459 - RNA, 23 nt, Human
acucaggcuuucacuauuuccuu

SEQ ID NO: 3593460 - RNA, 20 nt, Human
acucagggacagagccaugc

SEQ ID NO: 3593461 - RNA, 21 nt, Human
acucagggaggcuaaaucagu

SEQ ID NO: 3593462 - RNA, 17 nt, Human
acucagggcagcgccag

SEQ ID NO: 3593463 - RNA, 20 nt, Human
acucagggcagcgccaggcu

SEQ ID NO: 3593464 - RNA, 22 nt, Human
acucagggccccagcacuaaag

SEQ ID NO: 3593465 - RNA, 16 nt, Human
acucagggcuccuccc

SEQ ID NO: 3593466 - RNA, 22 nt, Human
acucagggcuccucccagcuug

SEQ ID NO: 3593467 - RNA, 18 nt, Human
acucagggcuucuaguuu

SEQ ID NO: 3593468 - RNA, 15 nt, Human
acucaggggucacug

SEQ ID NO: 3593469 - RNA, 15 nt, Human
acucagguggcccua

SEQ ID NO: 3593470 - RNA, 18 nt, Human
agcauccuggcacccggc

SEQ ID NO: 3593471 - RNA, 23 nt, Human
agcauccuggcacccggccccug

SEQ ID NO: 3593472 - RNA, 20 nt, Human
agcauccuuaaguaucagaa

SEQ ID NO: 3593473 - RNA, 21 nt, Human
agcauccuuuucugcagaggg

SEQ ID NO: 3593474 - RNA, 22 nt, Human
agcaucggacaagacccccagc

SEQ ID NO: 3593475 - RNA, 19 nt, Human
agcaucggccuagggcccc

SEQ ID NO: 3593476 - RNA, 13 nt, Human
agcaucuaaacuu

SEQ ID NO: 3593477 - RNA, 17 nt, Human
agcaucuaaacuuuaau

SEQ ID NO: 3593478 - RNA, 20 nt, Human
agcaucuaaguuauaagacu

SEQ ID NO: 3593479 - RNA, 15 nt, Human
agcaucuacuucagg

SEQ ID NO: 3593480 - RNA, 13 nt, Human
agcaucuaucaga

SEQ ID NO: 3593481 - RNA, 15 nt, Human
agcaucuaucucauc

SEQ ID NO: 3593482 - RNA, 13 nt, Human
agcaucucccagu

SEQ ID NO: 3593483 - RNA, 22 nt, Human
agcaucucccucacugaaacca

SEQ ID NO: 3593484 - RNA, 18 nt, Human
agcaucucuaccuucucc

SEQ ID NO: 3593485 - RNA, 13 nt, Human
agcaucugcuaau

SEQ ID NO: 3593486 - RNA, 17 nt, Human
agcaucuggaagagcua

SEQ ID NO: 3593487 - RNA, 15 nt, Human
agcaucugucccccu

SEQ ID NO: 3593488 - RNA, 20 nt, Human
agcaucuuccagaaguguga

SEQ ID NO: 3593489 - RNA, 22 nt, Human
agcaucuuccagaagugugauu

SEQ ID NO: 3593490 - RNA, 23 nt, Human
agcaucuuccagaagugugauug

SEQ ID NO: 3593491 - RNA, 15 nt, Human
agcaucuucuggagu

SEQ ID NO: 3593492 - RNA, 15 nt, Human
agcaucuugcauuau

SEQ ID NO: 3593493 - RNA, 19 nt, Human
agcaucuuggggggguggc

SEQ ID NO: 3593494 - RNA, 23 nt, Human
agcaucuuggggggguggccgcu

SEQ ID NO: 3593495 - RNA, 23 nt, Human
agcaugaagucuuaaggacaaag

SEQ ID NO: 3593496 - RNA, 14 nt, Human
agcaugacagaaaa

SEQ ID NO: 3593497 - RNA, 18 nt, Human
agcaugacagaaaauaug

SEQ ID NO: 3593498 - RNA, 20 nt, Human
agcaugacagccugcagcag

SEQ ID NO: 3593499 - RNA, 20 nt, Human
agcaugacauaacagugcag

SEQ ID NO: 3593500 - RNA, 14 nt, Human
agcaugacauuucu

SEQ ID NO: 3593501 - RNA, 16 nt, Human
agcaugacccagguca

SEQ ID NO: 3593502 - RNA, 18 nt, Human
agcaugaccugugaccag

SEQ ID NO: 3593503 - RNA, 22 nt, Human
agcaugaccugugaccagcacu

SEQ ID NO: 3593504 - RNA, 13 nt, Human
agcaugaggaacu

SEQ ID NO: 3593505 - RNA, 18 nt, Human
agcaugagguaucuaagg

SEQ ID NO: 3593506 - RNA, 20 nt, Human
agcaugauuuauacucauuu

SEQ ID NO: 3593507 - RNA, 18 nt, Human
agcaugcaauacauacca

SEQ ID NO: 3593508 - RNA, 18 nt, Human
agcaugcacaaaguguau

SEQ ID NO: 3593509 - RNA, 17 nt, Human
agcaugcagcuuugcaa

SEQ ID NO: 3593510 - RNA, 18 nt, Human
agcaugccaacaagaaug

SEQ ID NO: 3593511 - RNA, 20 nt, Human
agcaugccaacaagaaugca

SEQ ID NO: 3593512 - RNA, 17 nt, Human
agcaugccaauuucucu

SEQ ID NO: 3593513 - RNA, 15 nt, Human
agcaugccuucaaau

SEQ ID NO: 3593514 - RNA, 22 nt, Human
agcaugcuugugaaaauguguu

SEQ ID NO: 3593515 - RNA, 19 nt, Human
agcauggaacacuucgagu

SEQ ID NO: 3593516 - RNA, 23 nt, Human
agcauggacuaaccccaacgcac

SEQ ID NO: 3593517 - RNA, 17 nt, Human
agcauggcacucccucc

SEQ ID NO: 3593518 - RNA, 20 nt, Human
agcauggcacucccuccagc

SEQ ID NO: 3593519 - RNA, 23 nt, Human
agcauggcacucccuccagcaca

SEQ ID NO: 3593520 - RNA, 18 nt, Human
agcauggcauauuuuuca

SEQ ID NO: 3593521 - RNA, 19 nt, Human
agcauggcauauuuuucac

SEQ ID NO: 3593522 - RNA, 21 nt, Human
agcauggcauauuuuucacau

SEQ ID NO: 3593523 - RNA, 22 nt, Human
agcauggcauauuuuucacaua

SEQ ID NO: 3593524 - RNA, 16 nt, Human
agcauggcugugagga

SEQ ID NO: 3593525 - RNA, 19 nt, Human
agcaugggccuggccaccu

SEQ ID NO: 3593526 - RNA, 22 nt, Human
agcauggucccacaucccuggg

SEQ ID NO: 3593527 - RNA, 23 nt, Human
agcauggucccacaucccugggc

SEQ ID NO: 3593528 - RNA, 15 nt, Human
agcauggugcaugcc

SEQ ID NO: 3593529 - RNA, 21 nt, Human
agcauguaauguuaauguuau

SEQ ID NO: 3593530 - RNA, 19 nt, Human
agcauguacaguguucugu

SEQ ID NO: 3593531 - RNA, 21 nt, Human
agcauguacugagccuuguaa

SEQ ID NO: 3593532 - RNA, 15 nt, Human
agcauguaggagaau

SEQ ID NO: 3593533 - RNA, 16 nt, Human
agcauguauugugucu

SEQ ID NO: 3593534 - RNA, 20 nt, Human
agcaugucgucaaagcugaa

SEQ ID NO: 3593535 - RNA, 16 nt, Human
agcaugucuuauuuaa

SEQ ID NO: 3593536 - RNA, 17 nt, Human
agcaugugcccuccuga

SEQ ID NO: 3593537 - RNA, 18 nt, Human
agcaugugccuuaaugcu

SEQ ID NO: 3593538 - RNA, 16 nt, Human
agcauguguuaaucuu

SEQ ID NO: 3593539 - RNA, 22 nt, Human
agcauguguuugguucuggggc

SEQ ID NO: 3593540 - RNA, 19 nt, Human
agcauguugagccaggccu

SEQ ID NO: 3593541 - RNA, 21 nt, Human
agcauguugagccaggccugg

SEQ ID NO: 3593542 - RNA, 23 nt, Human
agcauguuguagauacaaucagc

SEQ ID NO: 3593543 - RNA, 18 nt, Human
agcauguuucauguuuug

SEQ ID NO: 3593544 - RNA, 21 nt, Human
agcauguuucauguuuuguga

SEQ ID NO: 3593545 - RNA, 15 nt, Human
agcauguuugcugaa

SEQ ID NO: 3593546 - RNA, 14 nt, Human
agcauguuuuguau

SEQ ID NO: 3593547 - RNA, 15 nt, Human
agcauguuuuguaua

SEQ ID NO: 3593548 - RNA, 17 nt, Human
agcauuaacuucucugg

SEQ ID NO: 3593549 - RNA, 20 nt, Human
agcauuaagcuguuccuguu

SEQ ID NO: 3593550 - RNA, 15 nt, Human
agcauuacaaauugc

SEQ ID NO: 3593551 - RNA, 23 nt, Human
agcauuaccucuuuggaaaagga

SEQ ID NO: 3593552 - RNA, 19 nt, Human
agcauuacgugagccaggu

SEQ ID NO: 3593553 - RNA, 17 nt, Human
agcauuacucuuguaag

SEQ ID NO: 3593554 - RNA, 16 nt, Human
agcauuagugggaaaa

SEQ ID NO: 3593555 - RNA, 19 nt, Human
agcauuaugauguggguca

SEQ ID NO: 3593556 - RNA, 22 nt, Human
agcauucaauuuauucaagaaa

SEQ ID NO: 3593557 - RNA, 15 nt, Human
agcauucagaagaaa

SEQ ID NO: 3593558 - RNA, 19 nt, Human
agcauucagaagaaaaaga

SEQ ID NO: 3593559 - RNA, 21 nt, Human
agcauucagaagaaaaagaag

SEQ ID NO: 3593560 - RNA, 14 nt, Human
agcauucagagagc

SEQ ID NO: 3593561 - RNA, 17 nt, Human
agcauucagagagcagc

SEQ ID NO: 3593562 - RNA, 17 nt, Human
agcauuccaacaaaggg

SEQ ID NO: 3593563 - RNA, 15 nt, Human
agcauuccuucuuug

SEQ ID NO: 3593564 - RNA, 14 nt, Human
agcauuccuuuuga

SEQ ID NO: 3593565 - RNA, 17 nt, Human
agcauucuuagccugug

SEQ ID NO: 3593566 - RNA, 19 nt, Human
agcauucuuuggaguuaaa

SEQ ID NO: 3593567 - RNA, 24 nt, Human
agcauucuuuggaguuaaaaugca

SEQ ID NO: 3593568 - RNA, 15 nt, Human
agcauugaaauuaua

SEQ ID NO: 3593569 - RNA, 13 nt, Human
agcauugcaugga

SEQ ID NO: 3593570 - RNA, 14 nt, Human
agcauugccauucc

SEQ ID NO: 3593571 - RNA, 14 nt, Human
agcauugcugguuc

SEQ ID NO: 3593572 - RNA, 17 nt, Human
agcauugcuguuauguc

SEQ ID NO: 3593573 - RNA, 17 nt, Human
agcauugcuuucugaaa

SEQ ID NO: 3593574 - RNA, 21 nt, Human
agcauugcuuuuauuuugaaa

SEQ ID NO: 3593575 - RNA, 23 nt, Human
agcauuggauacagcaguagaca

SEQ ID NO: 3593576 - RNA, 21 nt, Human
agcauugggugagguaauaaa

SEQ ID NO: 3593577 - RNA, 14 nt, Human
agcauuguaaaaua

SEQ ID NO: 3593578 - RNA, 20 nt, Human
aguauuauaaauuauguuua

SEQ ID NO: 3593579 - RNA, 14 nt, Human
aguauuauaccuuu

SEQ ID NO: 3593580 - RNA, 15 nt, Human
aguauuauaccuuuu

SEQ ID NO: 3593581 - RNA, 23 nt, Human
aguauuaucuuguucaggaaaag

SEQ ID NO: 3593582 - RNA, 18 nt, Human
aguauuauucuacuauac

SEQ ID NO: 3593583 - RNA, 15 nt, Human
aguauuauuuuccaa

SEQ ID NO: 3593584 - RNA, 18 nt, Human
aguauuauuuuccaaaag

SEQ ID NO: 3593585 - RNA, 21 nt, Human
aguauuccaccuuaaauuaaa

SEQ ID NO: 3593586 - RNA, 22 nt, Human
aguauuccaccuuaaauuaaac

SEQ ID NO: 3593587 - RNA, 22 nt, Human
aguauuccauugugugagugua

SEQ ID NO: 3593588 - RNA, 17 nt, Human
aguauucuaauaagcua

SEQ ID NO: 3593589 - RNA, 16 nt, Human
aguauucucuuuucaa

SEQ ID NO: 3593590 - RNA, 13 nt, Human
aguauucugccuu

SEQ ID NO: 3593591 - RNA, 18 nt, Human
aguauugaagcauuuuau

SEQ ID NO: 3593592 - RNA, 21 nt, Human
aguauugaagcauuuuauaaa

SEQ ID NO: 3593593 - RNA, 17 nt, Human
aguauugacaaaauguu

SEQ ID NO: 3593594 - RNA, 18 nt, Human
aguauugacaaaauguua

SEQ ID NO: 3593595 - RNA, 22 nt, Human
aguauugacaaaauguuauuuc

SEQ ID NO: 3593596 - RNA, 23 nt, Human
aguauugauucugcuugagaaua

SEQ ID NO: 3593597 - RNA, 16 nt, Human
aguauugccaaacauu

SEQ ID NO: 3593598 - RNA, 22 nt, Human
aguauugcucacccagugcccu

SEQ ID NO: 3593599 - RNA, 18 nt, Human
aguauuggggucugaccc

SEQ ID NO: 3593600 - RNA, 12 nt, Human
aguauuguaaau

SEQ ID NO: 3593601 - RNA, 14 nt, Human
aguauuguaaauua

SEQ ID NO: 3593602 - RNA, 15 nt, Human
aguauuguaaauuau

SEQ ID NO: 3593603 - RNA, 16 nt, Human
aguauuguaaauuaua

SEQ ID NO: 3593604 - RNA, 11 nt, Human
aguauuguaca

SEQ ID NO: 3593605 - RNA, 15 nt, Human
aguauuguuguccuu

SEQ ID NO: 3593606 - RNA, 16 nt, Human
aguauuguuguccuuu

SEQ ID NO: 3593607 - RNA, 20 nt, Human
aguauuguuguccuuuucau

SEQ ID NO: 3593608 - RNA, 12 nt, Human
aguauuguuuaa

SEQ ID NO: 3593609 - RNA, 14 nt, Human
aguauuguuuaaaa

SEQ ID NO: 3593610 - RNA, 16 nt, Human
aguauuguuuaaaaug

SEQ ID NO: 3593611 - RNA, 19 nt, Human
aguauuuaauuagugcuaa

SEQ ID NO: 3593612 - RNA, 17 nt, Human
aguauuuauauauuuau

SEQ ID NO: 3593613 - RNA, 13 nt, Human
agucaugcauaaa

SEQ ID NO: 3593614 - RNA, 21 nt, Human
agucaugcauaaauaugcagu

SEQ ID NO: 3593615 - RNA, 19 nt, Human
agucaugcuccccugugcc

SEQ ID NO: 3593616 - RNA, 23 nt, Human
agucaugcuccccugugccagcc

SEQ ID NO: 3593617 - RNA, 12 nt, Human
agucauggagaa

SEQ ID NO: 3593618 - RNA, 13 nt, Human
agucauggcugug

SEQ ID NO: 3593619 - RNA, 18 nt, Human
agucauguaaauacuguu

SEQ ID NO: 3593620 - RNA, 20 nt, Human
agucauguaagcugaaaaua

SEQ ID NO: 3593621 - RNA, 11 nt, Human
agucauguaug

SEQ ID NO: 3593622 - RNA, 12 nt, Human
agucauguaugu

SEQ ID NO: 3593623 - RNA, 13 nt, Human
agucaugugcauu

SEQ ID NO: 3593624 - RNA, 14 nt, Human
agucaugugggcca

SEQ ID NO: 3593625 - RNA, 16 nt, Human
agucauuaaauuacua

SEQ ID NO: 3593626 - RNA, 14 nt, Human
agucauuagacucc

SEQ ID NO: 3593627 - RNA, 18 nt, Human
agucauuagacuccuccu

SEQ ID NO: 3593628 - RNA, 12 nt, Human
agucauuccuuc

SEQ ID NO: 3593629 - RNA, 14 nt, Human
agucauucuucccu

SEQ ID NO: 3593630 - RNA, 13 nt, Human
agucauucuuuaa

SEQ ID NO: 3593631 - RNA, 15 nt, Human
agucauuggcugucu

SEQ ID NO: 3593632 - RNA, 20 nt, Human
agucauuggcuuuauccucu

SEQ ID NO: 3593633 - RNA, 22 nt, Human
agucauuggcuuuauccucuuu

SEQ ID NO: 3593634 - RNA, 20 nt, Human
agucauuguaauguugugaa

SEQ ID NO: 3593635 - RNA, 13 nt, Human
agucauuguaugu

SEQ ID NO: 3593636 - RNA, 15 nt, Human
agucauuuacuaaac

SEQ ID NO: 3593637 - RNA, 16 nt, Human
agucauuuauuuuaaa

SEQ ID NO: 3593638 - RNA, 22 nt, Human
agucauuugcgcacaacuuaaa

SEQ ID NO: 3593639 - RNA, 19 nt, Human
agucauuugcugagcaugu

SEQ ID NO: 3593640 - RNA, 21 nt, Human
agucauuuuaacuuuaucaca

SEQ ID NO: 3593641 - RNA, 14 nt, Human
agucauuuuuacaa

SEQ ID NO: 3593642 - RNA, 21 nt, Human
aguccaaaaagcuccuggggc

SEQ ID NO: 3593643 - RNA, 16 nt, Human
aguccaaauguccucc

SEQ ID NO: 3593644 - RNA, 23 nt, Human
aguccaaauguccuccagaagcc

SEQ ID NO: 3593645 - RNA, 17 nt, Human
aguccaacaauguuguu

SEQ ID NO: 3593646 - RNA, 18 nt, Human
aguccaacguggggcagc

SEQ ID NO: 3593647 - RNA, 23 nt, Human
aguccaacguggggcagcacaga

SEQ ID NO: 3593648 - RNA, 18 nt, Human
aguccaaggaaaccacag

SEQ ID NO: 3593649 - RNA, 16 nt, Human
aguccaagguuuaaag

SEQ ID NO: 3593650 - RNA, 20 nt, Human
aguccaaucucauggagaag

SEQ ID NO: 3593651 - RNA, 14 nt, Human
aguccaauguggca

SEQ ID NO: 3593652 - RNA, 16 nt, Human
aguccacccugccugc

SEQ ID NO: 3593653 - RNA, 14 nt, Human
aguccacucccagu

SEQ ID NO: 3593654 - RNA, 20 nt, Human
aguccagaaacuguucccac

SEQ ID NO: 3593655 - RNA, 22 nt, Human
aguccagauuuacacugggaga

SEQ ID NO: 3593656 - RNA, 23 nt, Human
aguccagauuuacacugggagag

SEQ ID NO: 3593657 - RNA, 15 nt, Human
aguccagccuggaga

SEQ ID NO: 3593658 - RNA, 22 nt, Human
aguccaggaugcuaacaucuaa

SEQ ID NO: 3593659 - RNA, 14 nt, Human
aguccaggcacagg

SEQ ID NO: 3593660 - RNA, 16 nt, Human
aguccaggcacaggau

SEQ ID NO: 3593661 - RNA, 19 nt, Human
aguccaggcacaggaugcu

SEQ ID NO: 3593662 - RNA, 18 nt, Human
aguccaggccccaaaacc

SEQ ID NO: 3593663 - RNA, 23 nt, Human
aguccaggccccaaaaccacagc

SEQ ID NO: 3593664 - RNA, 14 nt, Human
aguccagguccugg

SEQ ID NO: 3593665 - RNA, 17 nt, Human
aguccagguccuggugg

SEQ ID NO: 3593666 - RNA, 21 nt, Human
aguccaggucgggcucagcuc

SEQ ID NO: 3593667 - RNA, 23 nt, Human
aguccaggucgggcucagcucug

SEQ ID NO: 3593668 - RNA, 23 nt, Human
aguccauauuucaauuuccaaga

SEQ ID NO: 3593669 - RNA, 13 nt, Human
aguccaucagccu

SEQ ID NO: 3593670 - RNA, 20 nt, Human
aguccaugcaugacagccuc

SEQ ID NO: 3593671 - RNA, 21 nt, Human
aguccaugcaugacagccucu

SEQ ID NO: 3593672 - RNA, 15 nt, Human
aguccauucucccag

SEQ ID NO: 3593673 - RNA, 16 nt, Human
aguccauugaaaggga

SEQ ID NO: 3593674 - RNA, 16 nt, Human
aguccauuuauauaug

SEQ ID NO: 3593675 - RNA, 18 nt, Human
aguccauuuauauaugaa

SEQ ID NO: 3593676 - RNA, 14 nt, Human
agucccaagcggug

SEQ ID NO: 3593677 - RNA, 16 nt, Human
agucccaccuuggcug

SEQ ID NO: 3593678 - RNA, 18 nt, Human
agucccacuccaagccag

SEQ ID NO: 3593679 - RNA, 19 nt, Human
agucccacuccaagccagc

SEQ ID NO: 3593680 - RNA, 12 nt, Human
agucccacugcc

SEQ ID NO: 3593681 - RNA, 20 nt, Human
agucccacugccucagguuc

SEQ ID NO: 3593682 - RNA, 14 nt, Human
agucccagcagcca

SEQ ID NO: 3593683 - RNA, 22 nt, Human
agucccagcuacucagaagccu

SEQ ID NO: 3593684 - RNA, 18 nt, Human
agucccaggcugagccuc

SEQ ID NO: 3593685 - RNA, 21 nt, Human
agucccagguuggcucugcca

SEQ ID NO: 3593686 - RNA, 22 nt, Human
agucccagguuggcucugccag

SEQ ID NO: 3593687 - RNA, 13 nt, Human
agucccaguggga

SEQ ID NO: 3593688 - RNA, 17 nt, Human
agucccaucugcuucag

SEQ ID NO: 3593689 - RNA, 20 nt, Human
aguccccaccccugccccca

SEQ ID NO: 3593690 - RNA, 23 nt, Human
aguccccagcccuucacauuuuu

SEQ ID NO: 3593691 - RNA, 22 nt, Human
agucccccaacagaugcuuuuc

SEQ ID NO: 3593692 - RNA, 18 nt, Human
agucccccaaccccagcc

SEQ ID NO: 3593693 - RNA, 18 nt, Human
agucccccaacucugagc

SEQ ID NO: 3593694 - RNA, 22 nt, Human
agucccccaacucugagcccau

SEQ ID NO: 3593695 - RNA, 14 nt, Human
aguccccccacucc

SEQ ID NO: 3593696 - RNA, 19 nt, Human
agucccccuauccuuggca

SEQ ID NO: 3593697 - RNA, 18 nt, Human
aguccccgugccccgccu

SEQ ID NO: 3593698 - RNA, 16 nt, Human
aguccccucaccuccu

SEQ ID NO: 3593699 - RNA, 18 nt, Human
aguccccuccccggcccu

SEQ ID NO: 3593700 - RNA, 16 nt, Human
aguccccucuccucca

SEQ ID NO: 3593701 - RNA, 14 nt, Human
aguccccuguuugu

SEQ ID NO: 3593702 - RNA, 19 nt, Human
agucccugacucucuguga

SEQ ID NO: 3593703 - RNA, 21 nt, Human
agucccugacucucugugacc

SEQ ID NO: 3593704 - RNA, 12 nt, Human
agucccugccaa

SEQ ID NO: 3593705 - RNA, 14 nt, Human
agucccugccaaug

SEQ ID NO: 3593706 - RNA, 16 nt, Human
agucccugccaaugga

SEQ ID NO: 3593707 - RNA, 22 nt, Human
agucccugccacgaauuucugu

SEQ ID NO: 3593708 - RNA, 12 nt, Human
agucccugcccc

SEQ ID NO: 3593709 - RNA, 21 nt, Human
agucccugccuggaccagccu

SEQ ID NO: 3593710 - RNA, 20 nt, Human
agucccugggggaagcccug

SEQ ID NO: 3593711 - RNA, 18 nt, Human
agucccugucaccucuuc

SEQ ID NO: 3593712 - RNA, 13 nt, Human
agucccuguuuuc

SEQ ID NO: 3593713 - RNA, 15 nt, Human
agucccuuccccucc

SEQ ID NO: 3593714 - RNA, 17 nt, Human
agucccuuccccucccu

SEQ ID NO: 3593715 - RNA, 13 nt, Human
agucccuuuaaag

SEQ ID NO: 3593716 - RNA, 20 nt, Human
aguccgaccuggccugucug

SEQ ID NO: 3593717 - RNA, 17 nt, Human
aguccgcagaagcccug

SEQ ID NO: 3593718 - RNA, 20 nt, Human
aguccgugcugacagcugcu

SEQ ID NO: 3593719 - RNA, 13 nt, Human
aguccgugggacg

SEQ ID NO: 3593720 - RNA, 22 nt, Human
aguccuacuuuacauaugcuuu

SEQ ID NO: 3593721 - RNA, 16 nt, Human
aguccuagaauguuuc

SEQ ID NO: 3593722 - RNA, 17 nt, Human
aguccuagccacucagg

SEQ ID NO: 3593723 - RNA, 16 nt, Human
aguccuagcugcacag

SEQ ID NO: 3593724 - RNA, 13 nt, Human
aguccuagugaac

SEQ ID NO: 3593725 - RNA, 16 nt, Human
aguccuaguuuuccua

SEQ ID NO: 3593726 - RNA, 22 nt, Human
aguccuaucugggcuuccugga

SEQ ID NO: 3593727 - RNA, 24 nt, Human
aguccuaucugggcuuccuggagc

SEQ ID NO: 3593728 - RNA, 15 nt, Human
aguccuauggaaacc

SEQ ID NO: 3593729 - RNA, 19 nt, Human
aguccuauucaaauuccua

SEQ ID NO: 3593730 - RNA, 23 nt, Human
aguccucaaagcuuuuugaaaac

SEQ ID NO: 3593731 - RNA, 18 nt, Human
aguccucacucccagucc

SEQ ID NO: 3593732 - RNA, 17 nt, Human
aguccucauaaaaagca

SEQ ID NO: 3593733 - RNA, 18 nt, Human
aguccucauaaaaagcaa

SEQ ID NO: 3593734 - RNA, 20 nt, Human
aguccuccagaacucuuccu

SEQ ID NO: 3593735 - RNA, 21 nt, Human
aguccuccccucacagccucu

SEQ ID NO: 3593736 - RNA, 23 nt, Human
aguccuccgguugcauacuggac

SEQ ID NO: 3593737 - RNA, 15 nt, Human
agcauuguaaaauaa

SEQ ID NO: 3593738 - RNA, 22 nt, Human
agcauuguagugcuuugagaga

SEQ ID NO: 3593739 - RNA, 15 nt, Human
agcauugucuauuuu

SEQ ID NO: 3593740 - RNA, 17 nt, Human
agcauugugaacugaca

SEQ ID NO: 3593741 - RNA, 23 nt, Human
agcauugugugugcagacuucag

SEQ ID NO: 3593742 - RNA, 22 nt, Human
agcauuuaaccccccuguacac

SEQ ID NO: 3593743 - RNA, 16 nt, Human
agcauuuacugugucu

SEQ ID NO: 3593744 - RNA, 22 nt, Human
agcauuuagauguauagguuga

SEQ ID NO: 3593745 - RNA, 16 nt, Human
agcauuuaucauucuu

SEQ ID NO: 3593746 - RNA, 17 nt, Human
agcauuuaugguaauca

SEQ ID NO: 3593747 - RNA, 13 nt, Human
agcauuuauguuu

SEQ ID NO: 3593748 - RNA, 21 nt, Human
agcauuucauucuucucuagc

SEQ ID NO: 3593749 - RNA, 22 nt, Human
agcauuuccaacaccacagaca

SEQ ID NO: 3593750 - RNA, 20 nt, Human
agcauuucuuuucuggccaa

SEQ ID NO: 3593751 - RNA, 17 nt, Human
agcauuugaaugcauuu

SEQ ID NO: 3593752 - RNA, 22 nt, Human
agcauuugaucuguugcaagcc

SEQ ID NO: 3593753 - RNA, 13 nt, Human
agcauuuguauuu

SEQ ID NO: 3593754 - RNA, 17 nt, Human
agcauuuguguugaaga

SEQ ID NO: 3593755 - RNA, 14 nt, Human
agcauuuuauaaau

SEQ ID NO: 3593756 - RNA, 17 nt, Human
agcauuuuccucugcuu

SEQ ID NO: 3593757 - RNA, 21 nt, Human
aguccuggagcaaucacagau

SEQ ID NO: 3593758 - RNA, 22 nt, Human
aguccuggagcaaucacagaug

SEQ ID NO: 3593759 - RNA, 17 nt, Human
aguccuggaugauacua

SEQ ID NO: 3593760 - RNA, 22 nt, Human
aguccuggaugauacuaauaaa

SEQ ID NO: 3593761 - RNA, 21 nt, Human
aguccuggcaugggaaugaau

SEQ ID NO: 3593762 - RNA, 22 nt, Human
aguccuggcaugggaaugaaug

SEQ ID NO: 3593763 - RNA, 13 nt, Human
aguccuggcccaa

SEQ ID NO: 3593764 - RNA, 15 nt, Human
aguccuggcuucagg

SEQ ID NO: 3593765 - RNA, 21 nt, Human
aguccugggagaaccucaggc

SEQ ID NO: 3593766 - RNA, 19 nt, Human
aguccugggauuacaggug

SEQ ID NO: 3593767 - RNA, 12 nt, Human
aguccuguaaug

SEQ ID NO: 3593768 - RNA, 15 nt, Human
aguccuguaugucug

SEQ ID NO: 3593769 - RNA, 16 nt, Human
aguccuguaugucugu

SEQ ID NO: 3593770 - RNA, 23 nt, Human
aguccuguaugucugucauugua

SEQ ID NO: 3593771 - RNA, 15 nt, Human
aguccugugcugaau

SEQ ID NO: 3593772 - RNA, 14 nt, Human
aguccuuaaaaauc

SEQ ID NO: 3593773 - RNA, 24 nt, Human
aguccuuaaaauguaagauuauag

SEQ ID NO: 3593774 - RNA, 19 nt, Human
aguccuuaccagcagagca

SEQ ID NO: 3593775 - RNA, 16 nt, Human
aguccuuaucuagcug

SEQ ID NO: 3593776 - RNA, 11 nt, Human
aguccuuccac

SEQ ID NO: 3593777 - RNA, 17 nt, Human
aguccuugaaaauauuu

SEQ ID NO: 3593778 - RNA, 15 nt, Human
aguccuugcaagaau

SEQ ID NO: 3593779 - RNA, 18 nt, Human
aguccuugcaagaaucag

SEQ ID NO: 3593780 - RNA, 12 nt, Human
aguccuugcuug

SEQ ID NO: 3593781 - RNA, 13 nt, Human
aguccuugcuugg

SEQ ID NO: 3593782 - RNA, 18 nt, Human
aguccuugcuuggcugcu

SEQ ID NO: 3593783 - RNA, 14 nt, Human
aguccuuggccugc

SEQ ID NO: 3593784 - RNA, 18 nt, Human
aguccuuuaauuaagacu

SEQ ID NO: 3593785 - RNA, 15 nt, Human
aguccuuuuguaaag

SEQ ID NO: 3593786 - RNA, 16 nt, Human
aguccuuuuguaaagu

SEQ ID NO: 3593787 - RNA, 22 nt, Human
aguccuuuuguaaagugaagaa

SEQ ID NO: 3593788 - RNA, 18 nt, Human
agucgaauuaauagcuuu

SEQ ID NO: 3593789 - RNA, 16 nt, Human
agucgaggacagggag

SEQ ID NO: 3593790 - RNA, 19 nt, Human
agucgauagagcuguauua

SEQ ID NO: 3593791 - RNA, 21 nt, Human
agucgccuuucagcaggcagc

SEQ ID NO: 3593792 - RNA, 13 nt, Human
agucgcgcugccu

SEQ ID NO: 3593793 - RNA, 19 nt, Human
agucgcugugguuguuuua

SEQ ID NO: 3593794 - RNA, 15 nt, Human
agucggaacagcaga

SEQ ID NO: 3593795 - RNA, 18 nt, Human
agucguacagaaagcugc

SEQ ID NO: 3593796 - RNA, 21 nt, Human
agucguccuuacuccuguggg

SEQ ID NO: 3593797 - RNA, 22 nt, Human
agucguccuuacuccuguggga

SEQ ID NO: 3593798 - RNA, 16 nt, Human
agucgucgcacagucu

SEQ ID NO: 3593799 - RNA, 21 nt, Human
agucgugagcucuugugagga

SEQ ID NO: 3593800 - RNA, 14 nt, Human
agucuaaaguuuac

SEQ ID NO: 3593801 - RNA, 18 nt, Human
agucuaaaguuuacagua

SEQ ID NO: 3593802 - RNA, 13 nt, Human
agucuacucuuaa

SEQ ID NO: 3593803 - RNA, 20 nt, Human
agucuacucuuaagccaucu

SEQ ID NO: 3593804 - RNA, 15 nt, Human
agucuagauucaaag

SEQ ID NO: 3593805 - RNA, 13 nt, Human
agucuagauucuc

SEQ ID NO: 3593806 - RNA, 14 nt, Human
agucuagauucucu

SEQ ID NO: 3593807 - RNA, 16 nt, Human
agucuagauucucugg

SEQ ID NO: 3593808 - RNA, 16 nt, Human
agucuagcacucauuu

SEQ ID NO: 3593809 - RNA, 20 nt, Human
agucuagcacucauuuucua

SEQ ID NO: 3593810 - RNA, 23 nt, Human
agucuaucaaccccagacacugg

SEQ ID NO: 3593811 - RNA, 14 nt, Human
agucuaucauuguu

SEQ ID NO: 3593812 - RNA, 14 nt, Human
agucuauccacaga

SEQ ID NO: 3593813 - RNA, 19 nt, Human
agucuaucugguauuaaau

SEQ ID NO: 3593814 - RNA, 17 nt, Human
agucuauucauuauauu

SEQ ID NO: 3593815 - RNA, 13 nt, Human
agucuauugucuc

SEQ ID NO: 3593816 - RNA, 14 nt, Human
agucucacuccccu

SEQ ID NO: 3593817 - RNA, 21 nt, Human
agucucacuccccuccuuucc

SEQ ID NO: 3593818 - RNA, 16 nt, Human
agucucacuguugccc

SEQ ID NO: 3593819 - RNA, 17 nt, Human
agucucacuguugccca

SEQ ID NO: 3593820 - RNA, 19 nt, Human
agucucacuguugcccagg

SEQ ID NO: 3593821 - RNA, 21 nt, Human
agucucacuguugcccaggcu

SEQ ID NO: 3593822 - RNA, 18 nt, Human
agucucagcuaagcucac

SEQ ID NO: 3593823 - RNA, 22 nt, Human
agucucaggaaaucaaauaugc

SEQ ID NO: 3593824 - RNA, 13 nt, Human
agucucaggagca

SEQ ID NO: 3593825 - RNA, 18 nt, Human
agucucaguuuguguguc

SEQ ID NO: 3593826 - RNA, 20 nt, Human
agucucaguuugugugucuu

SEQ ID NO: 3593827 - RNA, 21 nt, Human
agucucaguuugugugucuua

SEQ ID NO: 3593828 - RNA, 15 nt, Human
agucuccaccaggaa

SEQ ID NO: 3593829 - RNA, 16 nt, Human
agucuccaccaggaac

SEQ ID NO: 3593830 - RNA, 12 nt, Human
agucuccagccc

SEQ ID NO: 3593831 - RNA, 22 nt, Human
agucuccagugguugcuguuga

SEQ ID NO: 3593832 - RNA, 13 nt, Human
agucucccaggga

SEQ ID NO: 3593833 - RNA, 15 nt, Human
agucucccucacagc

SEQ ID NO: 3593834 - RNA, 17 nt, Human
agucuccggccucucca

SEQ ID NO: 3593835 - RNA, 11 nt, Human
agucuccucaa

SEQ ID NO: 3593836 - RNA, 23 nt, Human
agucuccucaauuuuugucucag

SEQ ID NO: 3593837 - RNA, 19 nt, Human
agucuccucuuuaaaacaa

SEQ ID NO: 3593838 - RNA, 20 nt, Human
agucuccucuuuaaaacaaa

SEQ ID NO: 3593839 - RNA, 22 nt, Human
agucuccucuuuaaaacaaaac

SEQ ID NO: 3593840 - RNA, 20 nt, Human
agucucgcucugucacccag

SEQ ID NO: 3593841 - RNA, 20 nt, Human
agucucgucucuuuuacccu

SEQ ID NO: 3593842 - RNA, 15 nt, Human
agucucuauaccaau

SEQ ID NO: 3593843 - RNA, 17 nt, Human
agucucuauaccaauaa

SEQ ID NO: 3593844 - RNA, 17 nt, Human
agucucuaucauuaaag

SEQ ID NO: 3593845 - RNA, 22 nt, Human
agucucuauuuaaauucuuuuu

SEQ ID NO: 3593846 - RNA, 17 nt, Human
agucucucuuaaaguug

SEQ ID NO: 3593847 - RNA, 23 nt, Human
agucucucuuaaaguuggaauuu

SEQ ID NO: 3593848 - RNA, 19 nt, Human
agucucugaagugaaacug

SEQ ID NO: 3593849 - RNA, 23 nt, Human
agucucugaggggcuaccaggaa

SEQ ID NO: 3593850 - RNA, 17 nt, Human
agucucugccuugccuu

SEQ ID NO: 3593851 - RNA, 13 nt, Human
agucucugcucca

SEQ ID NO: 3593852 - RNA, 16 nt, Human
agucucugugcuuuga

SEQ ID NO: 3593853 - RNA, 17 nt, Human
agucucuuguauuaaac

SEQ ID NO: 3593854 - RNA, 22 nt, Human
agucucuuuaaucuucaguuuu

SEQ ID NO: 3593855 - RNA, 23 nt, Human
agucucuuuaaucuucaguuuua

SEQ ID NO: 3593856 - RNA, 16 nt, Human
agucucuuuauuccua

SEQ ID NO: 3593857 - RNA, 17 nt, Human
agucucuuuauuccuag

SEQ ID NO: 3593858 - RNA, 23 nt, Human
agucucuuuucuuuagagcauug

SEQ ID NO: 3593859 - RNA, 20 nt, Human
agucucuuuuuuacaaaggc

SEQ ID NO: 3593860 - RNA, 21 nt, Human
agucucuuuuuuacaaaggcu

SEQ ID NO: 3593861 - RNA, 22 nt, Human
agucucuuuuuuacaaaggcug

SEQ ID NO: 3593862 - RNA, 21 nt, Human
agucucuuuuuuuggcccagg

SEQ ID NO: 3593863 - RNA, 15 nt, Human
agucugaaggcuggg

SEQ ID NO: 3593864 - RNA, 18 nt, Human
agucugaaguuucauuua

SEQ ID NO: 3593865 - RNA, 17 nt, Human
agucugaaugcugccac

SEQ ID NO: 3593866 - RNA, 16 nt, Human
agucugaauuuuuaaa

SEQ ID NO: 3593867 - RNA, 16 nt, Human
agucugagagaggcca

SEQ ID NO: 3593868 - RNA, 18 nt, Human
agucugaggccguugcug

SEQ ID NO: 3593869 - RNA, 17 nt, Human
agucugagggcuuguag

SEQ ID NO: 3593870 - RNA, 17 nt, Human
agucugagguccugagc

SEQ ID NO: 3593871 - RNA, 22 nt, Human
agucugauccaggaggccgggg

SEQ ID NO: 3593872 - RNA, 21 nt, Human
agucugaucgugacgcugaau

SEQ ID NO: 3593873 - RNA, 20 nt, Human
agucugauucccaagcucug

SEQ ID NO: 3593874 - RNA, 21 nt, Human
agucugauucccaagcucugc

SEQ ID NO: 3593875 - RNA, 18 nt, Human
agucugcauuacauuccu

SEQ ID NO: 3593876 - RNA, 14 nt, Human
agucugccacccag

SEQ ID NO: 3593877 - RNA, 17 nt, Human
agucugcugcccuccau

SEQ ID NO: 3593878 - RNA, 20 nt, Human
agucugcugcccuccauccc

SEQ ID NO: 3593879 - RNA, 17 nt, Human
agucugcuuagaaauaa

SEQ ID NO: 3593880 - RNA, 19 nt, Human
agucugcuuauccuuccac

SEQ ID NO: 3593881 - RNA, 17 nt, Human
agucuggaaugcagugg

SEQ ID NO: 3593882 - RNA, 19 nt, Human
agucuggagugggcagagc

SEQ ID NO: 3593883 - RNA, 21 nt, Human
agucuggauaacuuccacagg

SEQ ID NO: 3593884 - RNA, 23 nt, Human
agucuggauaacuuccacagggu

SEQ ID NO: 3593885 - RNA, 21 nt, Human
agucuggcuguacccaggaau

SEQ ID NO: 3593886 - RNA, 21 nt, Human
agucugggacacaaaacuccg

SEQ ID NO: 3593887 - RNA, 15 nt, Human
agucuggugaagcuc

SEQ ID NO: 3593888 - RNA, 17 nt, Human
agucuguacuaaacagu

SEQ ID NO: 3593889 - RNA, 15 nt, Human
agucuguccugugac

SEQ ID NO: 3593890 - RNA, 18 nt, Human
agucugucucugucaugg

SEQ ID NO: 3593891 - RNA, 14 nt, Human
agucugucuucugu

SEQ ID NO: 3593892 - RNA, 19 nt, Human
agucugugugaugaacuuu

SEQ ID NO: 3593893 - RNA, 21 nt, Human
agucugugugaugaacuuucu

SEQ ID NO: 3593894 - RNA, 17 nt, Human
agucugugugggacugu

SEQ ID NO: 3593895 - RNA, 19 nt, Human
agucugugugggacuguac

SEQ ID NO: 3593896 - RNA, 20 nt, Human
agccagacacucugcucugc

SEQ ID NO: 3593897 - RNA, 13 nt, Human
agccagacagacc

SEQ ID NO: 3593898 - RNA, 15 nt, Human
agccagacagacccu

SEQ ID NO: 3593899 - RNA, 21 nt, Human
agccagacagcaacggggagg

SEQ ID NO: 3593900 - RNA, 16 nt, Human
aguccccaggccccag

SEQ ID NO: 3593901 - RNA, 19 nt, Human
aguccccaggccccaggaa

SEQ ID NO: 3593902 - RNA, 18 nt, Human
aguccccauugaggcuug

SEQ ID NO: 3593903 - RNA, 19 nt, Human
agucccccaacucugagcc

SEQ ID NO: 3593904 - RNA, 18 nt, Human
agucccccagagauguca

SEQ ID NO: 3593905 - RNA, 18 nt, Human
agucccccuauccuuggc

SEQ ID NO: 3593906 - RNA, 19 nt, Human
aguccccgaguuuccccag

SEQ ID NO: 3593907 - RNA, 16 nt, Human
aguccccguggccauc

SEQ ID NO: 3593908 - RNA, 13 nt, Human
aguccccucccau

SEQ ID NO: 3593909 - RNA, 21 nt, Human
aguccccucccaucugggagu

SEQ ID NO: 3593910 - RNA, 21 nt, Human
aguccccuccccggcccuacc

SEQ ID NO: 3593911 - RNA, 14 nt, Human
agucccgccccucu

SEQ ID NO: 3593912 - RNA, 20 nt, Human
agucccugaggcaggucccc

SEQ ID NO: 3593913 - RNA, 22 nt, Human
agucccugaggcagguccccag

SEQ ID NO: 3593914 - RNA, 19 nt, Human
agucccugcacagugacuu

SEQ ID NO: 3593915 - RNA, 21 nt, Human
agucccugggggaagcccugg

SEQ ID NO: 3593916 - RNA, 22 nt, Human
agucccugggggaagcccugga

SEQ ID NO: 3593917 - RNA, 14 nt, Human
agucccugucaccu

SEQ ID NO: 3593918 - RNA, 19 nt, Human
agucccugucaccucuucc

SEQ ID NO: 3593919 - RNA, 21 nt, Human
agucccugugaagacugggug

SEQ ID NO: 3593920 - RNA, 17 nt, Human
agucccuguuuucugag

SEQ ID NO: 3593921 - RNA, 19 nt, Human
agucccuguuuucugagcc

SEQ ID NO: 3593922 - RNA, 22 nt, Human
agucccuguuuucugagcccgg

SEQ ID NO: 3593923 - RNA, 19 nt, Human
agucccuuccacaccccca

SEQ ID NO: 3593924 - RNA, 14 nt, Human
agucccuuccaggc

SEQ ID NO: 3593925 - RNA, 21 nt, Human
agucccuuccccucccuggcu

SEQ ID NO: 3593926 - RNA, 21 nt, Human
aguccgaccuggccugucugu

SEQ ID NO: 3593927 - RNA, 15 nt, Human
aguccgcagaagccc

SEQ ID NO: 3593928 - RNA, 22 nt, Human
aguccggacccaccucaccccg

SEQ ID NO: 3593929 - RNA, 23 nt, Human
aguccgugggacgggaugguucu

SEQ ID NO: 3593930 - RNA, 19 nt, Human
aguccguguggauccaaug

SEQ ID NO: 3593931 - RNA, 12 nt, Human
aguccuagcugc

SEQ ID NO: 3593932 - RNA, 15 nt, Human
aguccuagcugcaca

SEQ ID NO: 3593933 - RNA, 20 nt, Human
aguccuagcugcacagggca

SEQ ID NO: 3593934 - RNA, 22 nt, Human
aguccuagcugcacagggcagc

SEQ ID NO: 3593935 - RNA, 16 nt, Human
aguccuagugaaccuc

SEQ ID NO: 3593936 - RNA, 15 nt, Human
aguccuaucugggcu

SEQ ID NO: 3593937 - RNA, 19 nt, Human
aguccuaucugggcuuccu

SEQ ID NO: 3593938 - RNA, 18 nt, Human
aguccuauucaaauuccu

SEQ ID NO: 3593939 - RNA, 19 nt, Human
aguccucaaagcuuuuuga

SEQ ID NO: 3593940 - RNA, 20 nt, Human
aguccucaaggggccauccu

SEQ ID NO: 3593941 - RNA, 16 nt, Human
agugcuaagguucuaa

SEQ ID NO: 3593942 - RNA, 17 nt, Human
agugcuaagguucuaag

SEQ ID NO: 3593943 - RNA, 13 nt, Human
agugcuaagugug

SEQ ID NO: 3593944 - RNA, 15 nt, Human
agugcuaagugugaa

SEQ ID NO: 3593945 - RNA, 16 nt, Human
agugcuaagugugaac

SEQ ID NO: 3593946 - RNA, 16 nt, Human
agugcuacagggucca

SEQ ID NO: 3593947 - RNA, 23 nt, Human
agugcuagugagcugggcauggu

SEQ ID NO: 3593948 - RNA, 15 nt, Human
agugcuauauauaua

SEQ ID NO: 3593949 - RNA, 14 nt, Human
agugcucaucuguu

SEQ ID NO: 3593950 - RNA, 11 nt, Human
agugcucccuc

SEQ ID NO: 3593951 - RNA, 14 nt, Human
agugcucccucaca

SEQ ID NO: 3593952 - RNA, 16 nt, Human
agugcucgcuguugcu

SEQ ID NO: 3593953 - RNA, 18 nt, Human
agugcucgcuuucuaugu

SEQ ID NO: 3593954 - RNA, 17 nt, Human
agugcucugaucccucu

SEQ ID NO: 3593955 - RNA, 16 nt, Human
agugcugaacagugga

SEQ ID NO: 3593956 - RNA, 19 nt, Human
agugcugaauuucccucuc

SEQ ID NO: 3593957 - RNA, 15 nt, Human
agugcugagauuaca

SEQ ID NO: 3593958 - RNA, 21 nt, Human
agugcugcagcucccuggcuu

SEQ ID NO: 3593959 - RNA, 22 nt, Human
agugcugcagcucccuggcuuc

SEQ ID NO: 3593960 - RNA, 23 nt, Human
agugcugcagcucccuggcuucu

SEQ ID NO: 3593961 - RNA, 16 nt, Human
agugcugcaucuuaua

SEQ ID NO: 3593962 - RNA, 22 nt, Human
agugcugcaucuuauagcacuu

SEQ ID NO: 3593963 - RNA, 15 nt, Human
agugcugcuuugcca

SEQ ID NO: 3593964 - RNA, 20 nt, Human
agugcugggauuacaggugu

SEQ ID NO: 3593965 - RNA, 21 nt, Human
agugcugggauuacaggugug

SEQ ID NO: 3593966 - RNA, 12 nt, Human
agugcuguauaa

SEQ ID NO: 3593967 - RNA, 13 nt, Human
agugcuguauaaa

SEQ ID NO: 3593968 - RNA, 14 nt, Human
agugcuguauaaaa

SEQ ID NO: 3593969 - RNA, 22 nt, Human
agugcuguauaaaaucagccaa

SEQ ID NO: 3593970 - RNA, 19 nt, Human
agugcuguccaugcuucuc

SEQ ID NO: 3593971 - RNA, 20 nt, Human
agugcugucugaucugugcu

SEQ ID NO: 3593972 - RNA, 14 nt, Human
agugcugugaaaaa

SEQ ID NO: 3593973 - RNA, 18 nt, Human
agugcugugcaagguauu

SEQ ID NO: 3593974 - RNA, 21 nt, Human
agugcuguuuauuaaucuuag

SEQ ID NO: 3593975 - RNA, 15 nt, Human
agugcuguuuuguua

SEQ ID NO: 3593976 - RNA, 17 nt, Human
agugcuuaaaaaucauu

SEQ ID NO: 3593977 - RNA, 15 nt, Human
agugcuuagcaaaaa

SEQ ID NO: 3593978 - RNA, 15 nt, Human
agugcuucagccuga

SEQ ID NO: 3593979 - RNA, 19 nt, Human
agugcuucagccugaggcu

SEQ ID NO: 3593980 - RNA, 20 nt, Human
agugcuucagccugaggcug

SEQ ID NO: 3593981 - RNA, 17 nt, Human
agugcuuccaaggcaga

SEQ ID NO: 3593982 - RNA, 14 nt, Human
agugcuucucuaca

SEQ ID NO: 3593983 - RNA, 21 nt, Human
agugcuucuuacuauuaagca

SEQ ID NO: 3593984 - RNA, 16 nt, Human
agugcuugccacagag

SEQ ID NO: 3593985 - RNA, 17 nt, Human
agugcuugccacagagc

SEQ ID NO: 3593986 - RNA, 19 nt, Human
agugcuugccacagagcgg

SEQ ID NO: 3593987 - RNA, 13 nt, Human
agugcuugcuuuu

SEQ ID NO: 3593988 - RNA, 13 nt, Human
agugcuuggaaca

SEQ ID NO: 3593989 - RNA, 12 nt, Human
agugcuuggccc

SEQ ID NO: 3593990 - RNA, 15 nt, Human
agugcuuggcccagg

SEQ ID NO: 3593991 - RNA, 13 nt, Human
agugcuuguguaa

SEQ ID NO: 3593992 - RNA, 22 nt, Human
agugcuuguguaauuuauguga

SEQ ID NO: 3593993 - RNA, 22 nt, Human
agugcuuuccuuuuuuaaaaau

SEQ ID NO: 3593994 - RNA, 23 nt, Human
agugcuuuuaagugaaaaugguc

SEQ ID NO: 3593995 - RNA, 13 nt, Human
aguggaaaaacac

SEQ ID NO: 3593996 - RNA, 14 nt, Human
aguggaaaaggcac

SEQ ID NO: 3593997 - RNA, 23 nt, Human
aguggaaaauaggcuuuuuaauc

SEQ ID NO: 3593998 - RNA, 20 nt, Human
aguggaaacuauguguuuuu

SEQ ID NO: 3593999 - RNA, 16 nt, Human
aguggaaccagcccag

SEQ ID NO: 3594000 - RNA, 24 nt, Human
aguggaacgaaaaugaaagcuacu

SEQ ID NO: 3594001 - RNA, 16 nt, Human
aguggaagaagaggga

SEQ ID NO: 3594002 - RNA, 17 nt, Human
aguggaaguaguggagc

SEQ ID NO: 3594003 - RNA, 21 nt, Human
aguggaaguauguauauuaaa

SEQ ID NO: 3594004 - RNA, 22 nt, Human
aguggaaguauguauauuaaaa

SEQ ID NO: 3594005 - RNA, 17 nt, Human
aguggaauaguauccuc

SEQ ID NO: 3594006 - RNA, 21 nt, Human
aguggaauaguauccuccagg

SEQ ID NO: 3594007 - RNA, 14 nt, Human
aguggaauuucuug

SEQ ID NO: 3594008 - RNA, 19 nt, Human
aguggacaaauuuugaguu

SEQ ID NO: 3594009 - RNA, 21 nt, Human
aguggacccugaaaugugugu

SEQ ID NO: 3594010 - RNA, 21 nt, Human
aguggaccgcccuuuuccccu

SEQ ID NO: 3594011 - RNA, 19 nt, Human
aguggaccuugagaccaca

SEQ ID NO: 3594012 - RNA, 16 nt, Human
aguggacucagggcag

SEQ ID NO: 3594013 - RNA, 20 nt, Human
aguggacuggaggagcuggg

SEQ ID NO: 3594014 - RNA, 19 nt, Human
aguggacuggaguggagca

SEQ ID NO: 3594015 - RNA, 20 nt, Human
aguggacuuuccacccccuc

SEQ ID NO: 3594016 - RNA, 19 nt, Human
aguggagaacugggcuugc

SEQ ID NO: 3594017 - RNA, 12 nt, Human
aguggagaggga

SEQ ID NO: 3594018 - RNA, 20 nt, Human
aguggagccugacagccaga

SEQ ID NO: 3594019 - RNA, 14 nt, Human
aguggaggugcugc

SEQ ID NO: 3594020 - RNA, 22 nt, Human
aguggagguuaaggcugaggaa

SEQ ID NO: 3594021 - RNA, 20 nt, Human
aguggagucugccacccagg

SEQ ID NO: 3594022 - RNA, 18 nt, Human
aguggaucuccaaggacc

SEQ ID NO: 3594023 - RNA, 20 nt, Human
aguggaugauguuucgugaa

SEQ ID NO: 3594024 - RNA, 17 nt, Human
aguggauggaaggggcu

SEQ ID NO: 3594025 - RNA, 21 nt, Human
aguggauuguaggugcaagau

SEQ ID NO: 3594026 - RNA, 15 nt, Human
aguggauuucccauc

SEQ ID NO: 3594027 - RNA, 23 nt, Human
aguggcaagaccaaaaugacaau

SEQ ID NO: 3594028 - RNA, 13 nt, Human
aguggcaccuguc

SEQ ID NO: 3594029 - RNA, 22 nt, Human
aguggcaccugucugcuccagc

SEQ ID NO: 3594030 - RNA, 20 nt, Human
aguggcacgucaucuaguuu

SEQ ID NO: 3594031 - RNA, 14 nt, Human
aguggcagcccagc

SEQ ID NO: 3594032 - RNA, 15 nt, Human
aguggcagcccagcc

SEQ ID NO: 3594033 - RNA, 16 nt, Human
aguggcagcccagcca

SEQ ID NO: 3594034 - RNA, 17 nt, Human
aguggcagcccagccag

SEQ ID NO: 3594035 - RNA, 13 nt, Human
aguggcagcugcu

SEQ ID NO: 3594036 - RNA, 13 nt, Human
aguggcaggacag

SEQ ID NO: 3594037 - RNA, 23 nt, Human
aguggcaggcagaggcccaggcu

SEQ ID NO: 3594038 - RNA, 12 nt, Human
aguggcagggca

SEQ ID NO: 3594039 - RNA, 13 nt, Human
aguggcagggcuc

SEQ ID NO: 3594040 - RNA, 17 nt, Human
aguggcagggcucagga

SEQ ID NO: 3594041 - RNA, 18 nt, Human
aguggcagggcucaggau

SEQ ID NO: 3594042 - RNA, 13 nt, Human
aguggcauaaaaa

SEQ ID NO: 3594043 - RNA, 15 nt, Human
aguggcaucaucuca

SEQ ID NO: 3594044 - RNA, 16 nt, Human
agucuauccacagaga

SEQ ID NO: 3594045 - RNA, 14 nt, Human
agucuauuagccac

SEQ ID NO: 3594046 - RNA, 22 nt, Human
agucucacaugauuccagccau

SEQ ID NO: 3594047 - RNA, 24 nt, Human
agucucacaugauuccagccauca

SEQ ID NO: 3594048 - RNA, 20 nt, Human
agucucaccauuuccccagg

SEQ ID NO: 3594049 - RNA, 22 nt, Human
agucucaccauuuccccagggc

SEQ ID NO: 3594050 - RNA, 16 nt, Human
agucucacuccccucc

SEQ ID NO: 3594051 - RNA, 18 nt, Human
agucucacuguugcccag

SEQ ID NO: 3594052 - RNA, 20 nt, Human
agucucacuguugcccaggc

SEQ ID NO: 3594053 - RNA, 19 nt, Human
agucucacuuugucgccca

SEQ ID NO: 3594054 - RNA, 19 nt, Human
agucucagaaugucauuuu

SEQ ID NO: 3594055 - RNA, 11 nt, Human
agucucagcua

SEQ ID NO: 3594056 - RNA, 17 nt, Human
agucucaggagcauggg

SEQ ID NO: 3594057 - RNA, 18 nt, Human
agucucaggagucucugg

SEQ ID NO: 3594058 - RNA, 10 nt, Human
agucucaguu

SEQ ID NO: 3594059 - RNA, 19 nt, Human
agucucauagguuaaaaaa

SEQ ID NO: 3594060 - RNA, 19 nt, Human
agucuccagugguugcugu

SEQ ID NO: 3594061 - RNA, 14 nt, Human
agucucccaaggcu

SEQ ID NO: 3594062 - RNA, 20 nt, Human
agucucccucacagcacaga

SEQ ID NO: 3594063 - RNA, 23 nt, Human
agucucccucacagcacagagaa

SEQ ID NO: 3594064 - RNA, 18 nt, Human
agucucccucccuugggg

SEQ ID NO: 3594065 - RNA, 15 nt, Human
agucucccuuccuau

SEQ ID NO: 3594066 - RNA, 17 nt, Human
agucucccuuucccuuc

SEQ ID NO: 3594067 - RNA, 19 nt, Human
agucuccggccucuccagc

SEQ ID NO: 3594068 - RNA, 13 nt, Human
agucuccucuuua

SEQ ID NO: 3594069 - RNA, 15 nt, Human
agucuccucuuuaaa

SEQ ID NO: 3594070 - RNA, 16 nt, Human
agucuccucuuuaaaa

SEQ ID NO: 3594071 - RNA, 18 nt, Human
agucuccucuuuaaaaca

SEQ ID NO: 3594072 - RNA, 21 nt, Human
agucuccuuugcacugagggc

SEQ ID NO: 3594073 - RNA, 23 nt, Human
agucucgcucuguugcccaggcu

SEQ ID NO: 3594074 - RNA, 19 nt, Human
agucucuauaccaauaaag

SEQ ID NO: 3594075 - RNA, 21 nt, Human
agucucuauaccaauaaagug

SEQ ID NO: 3594076 - RNA, 15 nt, Human
agucucuaucauuaa

SEQ ID NO: 3594077 - RNA, 16 nt, Human
agucucuaucauuaaa

SEQ ID NO: 3594078 - RNA, 21 nt, Human
agucucuaucauuaaaguucu

SEQ ID NO: 3594079 - RNA, 15 nt, Human
agucucuauuuaaau

SEQ ID NO: 3594080 - RNA, 18 nt, Human
agucucuauuuaaauucu

SEQ ID NO: 3594081 - RNA, 21 nt, Human
agucucuauuuaaauucuuuu

SEQ ID NO: 3594082 - RNA, 11 nt, Human
agucucuccug

SEQ ID NO: 3594083 - RNA, 13 nt, Human
agucucuccugua

SEQ ID NO: 3594084 - RNA, 21 nt, Human
agucucucuucucuccagcug

SEQ ID NO: 3594085 - RNA, 11 nt, Human
agucucugagc

SEQ ID NO: 3594086 - RNA, 13 nt, Human
agucucugagcag

SEQ ID NO: 3594087 - RNA, 15 nt, Human
agucucugagggcuu

SEQ ID NO: 3594088 - RNA, 19 nt, Human
agucucugagggcuuccuu

SEQ ID NO: 3594089 - RNA, 16 nt, Human
agucucugaggggcua

SEQ ID NO: 3594090 - RNA, 22 nt, Human
agucucugaggggcuaccagga

SEQ ID NO: 3594091 - RNA, 13 nt, Human
agucucugccuug

SEQ ID NO: 3594092 - RNA, 15 nt, Human
agucucugcuccacc

SEQ ID NO: 3594093 - RNA, 16 nt, Human
agucucuggggcaggc

SEQ ID NO: 3594094 - RNA, 18 nt, Human
agucucuggggcaggcug

SEQ ID NO: 3594095 - RNA, 11 nt, Human
agucucuguga

SEQ ID NO: 3594096 - RNA, 12 nt, Human
agucucugugag

SEQ ID NO: 3594097 - RNA, 14 nt, Human
agucucuucuccac

SEQ ID NO: 3594098 - RNA, 18 nt, Human
agucucuucuccacugga

SEQ ID NO: 3594099 - RNA, 17 nt, Human
agucucuugauucauaa

SEQ ID NO: 3594100 - RNA, 15 nt, Human
agucucuuuaaucuu

SEQ ID NO: 3594101 - RNA, 18 nt, Human
agucucuuuauuccuagu

SEQ ID NO: 3594102 - RNA, 23 nt, Human
agucucuuuauuccuaguuggug

SEQ ID NO: 3594103 - RNA, 21 nt, Human
agucucuuuucuuuagagcau

SEQ ID NO: 3594104 - RNA, 16 nt, Human
agucucuuuuuuacaa

SEQ ID NO: 3594105 - RNA, 17 nt, Human
agucucuuuuuuacaaa

SEQ ID NO: 3594106 - RNA, 19 nt, Human
agucucuuuuuuacaaagg

SEQ ID NO: 3594107 - RNA, 23 nt, Human
agugugccccccauccuggccca

SEQ ID NO: 3594108 - RNA, 22 nt, Human
agugugcgugguggucccuggg

SEQ ID NO: 3594109 - RNA, 23 nt, Human
agugugcgugguggucccugggu

SEQ ID NO: 3594110 - RNA, 14 nt, Human
agugugcuaaaaau

SEQ ID NO: 3594111 - RNA, 13 nt, Human
agugugcuggagg

SEQ ID NO: 3594112 - RNA, 15 nt, Human
agugugcuggaggac

SEQ ID NO: 3594113 - RNA, 22 nt, Human
agugugcuucuguuaucaaaca

SEQ ID NO: 3594114 - RNA, 14 nt, Human
aguguggacucugg

SEQ ID NO: 3594115 - RNA, 17 nt, Human
aguguggaguggguaau

SEQ ID NO: 3594116 - RNA, 17 nt, Human
aguguggcaguuuggca

SEQ ID NO: 3594117 - RNA, 14 nt, Human
aguguggccaggcu

SEQ ID NO: 3594118 - RNA, 14 nt, Human
aguguggcuccccu

SEQ ID NO: 3594119 - RNA, 17 nt, Human
agugugggaagggagag

SEQ ID NO: 3594120 - RNA, 20 nt, Human
agugugggaggcuccuguua

SEQ ID NO: 3594121 - RNA, 18 nt, Human
agugugggcuugaccagg

SEQ ID NO: 3594122 - RNA, 15 nt, Human
agugugggucugugu

SEQ ID NO: 3594123 - RNA, 19 nt, Human
agugugggucugugugugu

SEQ ID NO: 3594124 - RNA, 23 nt, Human
agugugguguuuccugcaggcca

SEQ ID NO: 3594125 - RNA, 20 nt, Human
agugugguguuuccuggcac

SEQ ID NO: 3594126 - RNA, 12 nt, Human
agugugguuuuc

SEQ ID NO: 3594127 - RNA, 17 nt, Human
agugugguuuucuguuu

SEQ ID NO: 3594128 - RNA, 12 nt, Human
aguguguaaaca

SEQ ID NO: 3594129 - RNA, 11 nt, Human
aguguguauua

SEQ ID NO: 3594130 - RNA, 18 nt, Human
aguguguccaagugugug

SEQ ID NO: 3594131 - RNA, 17 nt, Human
agugugucuaaauuuga

SEQ ID NO: 3594132 - RNA, 13 nt, Human
agugugucuccug

SEQ ID NO: 3594133 - RNA, 20 nt, Human
agugugucuuagugugugca

SEQ ID NO: 3594134 - RNA, 18 nt, Human
agugugugcacaugugug

SEQ ID NO: 3594135 - RNA, 17 nt, Human
agugugugcaugugugc

SEQ ID NO: 3594136 - RNA, 21 nt, Human
aguguguggcuuucagagccu

SEQ ID NO: 3594137 - RNA, 12 nt, Human
agugugugugcg

SEQ ID NO: 3594138 - RNA, 16 nt, Human
agugugugugugcaug

SEQ ID NO: 3594139 - RNA, 13 nt, Human
aguguguucugau

SEQ ID NO: 3594140 - RNA, 20 nt, Human
aguguuaauacuaguuguga

SEQ ID NO: 3594141 - RNA, 12 nt, Human
aguguuaaucaa

SEQ ID NO: 3594142 - RNA, 20 nt, Human
aguguuaaucaauuuaaacc

SEQ ID NO: 3594143 - RNA, 19 nt, Human
aguguuaggccuggcacag

SEQ ID NO: 3594144 - RNA, 19 nt, Human
aguguuagggaagggccug

SEQ ID NO: 3594145 - RNA, 15 nt, Human
aguguuauaugaaca

SEQ ID NO: 3594146 - RNA, 16 nt, Human
aguguuauaugaacau

SEQ ID NO: 3594147 - RNA, 20 nt, Human
aguguuauaugaacauacaa

SEQ ID NO: 3594148 - RNA, 16 nt, Human
aguguuaucagucaua

SEQ ID NO: 3594149 - RNA, 23 nt, Human
aguguuaucagucauaacuaaau

SEQ ID NO: 3594150 - RNA, 14 nt, Human
aguguuaugagcca

SEQ ID NO: 3594151 - RNA, 22 nt, Human
aguguuauuuucuuugaaauug

SEQ ID NO: 3594152 - RNA, 15 nt, Human
aguguucacaaccug

SEQ ID NO: 3594153 - RNA, 18 nt, Human
aguguucugccagaucuu

SEQ ID NO: 3594154 - RNA, 19 nt, Human
aguguucugucugacuuuc

SEQ ID NO: 3594155 - RNA, 18 nt, Human
aguguucuguuacaaaau

SEQ ID NO: 3594156 - RNA, 12 nt, Human
aguguugaaggg

SEQ ID NO: 3594157 - RNA, 17 nt, Human
aguguuggaaaaaauuu

SEQ ID NO: 3594158 - RNA, 14 nt, Human
aguguuggagaaga

SEQ ID NO: 3594159 - RNA, 17 nt, Human
aguguuggagaagaacu

SEQ ID NO: 3594160 - RNA, 21 nt, Human
aguguugguauauuuuauauu

SEQ ID NO: 3594161 - RNA, 16 nt, Human
aguguuguggauuuaa

SEQ ID NO: 3594162 - RNA, 20 nt, Human
aguguuguggauuuaacaga

SEQ ID NO: 3594163 - RNA, 15 nt, Human
aguguuguuuguaaa

SEQ ID NO: 3594164 - RNA, 12 nt, Human
aguguuuaaaug

SEQ ID NO: 3594165 - RNA, 18 nt, Human
aguguuuauccuuucaua

SEQ ID NO: 3594166 - RNA, 19 nt, Human
aguguuuauuuuucauauu

SEQ ID NO: 3594167 - RNA, 21 nt, Human
aguguuucagcuaagggaaga

SEQ ID NO: 3594168 - RNA, 13 nt, Human
aguguuuccuuuu

SEQ ID NO: 3594169 - RNA, 16 nt, Human
aguguuuccuuuuugg

SEQ ID NO: 3594170 - RNA, 17 nt, Human
aguguuucuaauaaacu

SEQ ID NO: 3594171 - RNA, 13 nt, Human
aguguuucugugc

SEQ ID NO: 3594172 - RNA, 12 nt, Human
aguguuucuguu

SEQ ID NO: 3594173 - RNA, 14 nt, Human
aguguuucuguuau

SEQ ID NO: 3594174 - RNA, 15 nt, Human
aguguuuuaaauucu

SEQ ID NO: 3594175 - RNA, 18 nt, Human
aguguuuuaaauucugag

SEQ ID NO: 3594176 - RNA, 19 nt, Human
aguguuuuaagaaauguag

SEQ ID NO: 3594177 - RNA, 21 nt, Human
aguguuuuaagaaauguaguu

SEQ ID NO: 3594178 - RNA, 21 nt, Human
aguguuuuaugagaaagccuu

SEQ ID NO: 3594179 - RNA, 16 nt, Human
aguguuuucaauuuua

SEQ ID NO: 3594180 - RNA, 17 nt, Human
aguguuuucagaagaaa

SEQ ID NO: 3594181 - RNA, 13 nt, Human
aguguuuucagag

SEQ ID NO: 3594182 - RNA, 15 nt, Human
aguguuuucucugaa

SEQ ID NO: 3594183 - RNA, 18 nt, Human
aguguuuuggacuccauc

SEQ ID NO: 3594184 - RNA, 20 nt, Human
aguguuuuggacuccaucuc

SEQ ID NO: 3594185 - RNA, 22 nt, Human
aguguuuuggacuccaucucuc

SEQ ID NO: 3594186 - RNA, 23 nt, Human
aguguuuuggacuccaucucuca

SEQ ID NO: 3594187 - RNA, 21 nt, Human
aguguuuuuaccucugucuug

SEQ ID NO: 3594188 - RNA, 17 nt, Human
aguuaaaaguaaaagag

SEQ ID NO: 3594189 - RNA, 13 nt, Human
aguggccuggcca

SEQ ID NO: 3594190 - RNA, 13 nt, Human
aguggccuggcuc

SEQ ID NO: 3594191 - RNA, 18 nt, Human
aguggccuuccccagcau

SEQ ID NO: 3594192 - RNA, 19 nt, Human
aguggcgugaucucagcuc

SEQ ID NO: 3594193 - RNA, 20 nt, Human
aguggcgugaucucagcuca

SEQ ID NO: 3594194 - RNA, 21 nt, Human
aguggcuccucccggugccca

SEQ ID NO: 3594195 - RNA, 15 nt, Human
aguggcucgccaggc

SEQ ID NO: 3594196 - RNA, 12 nt, Human
aguggcugcugc

SEQ ID NO: 3594197 - RNA, 13 nt, Human
aguggcugcugcc

SEQ ID NO: 3594198 - RNA, 19 nt, Human
aguggcugcugcccaggcc

SEQ ID NO: 3594199 - RNA, 22 nt, Human
aguggcugcugcccaggcccag

SEQ ID NO: 3594200 - RNA, 13 nt, Human
aguggcuggggca

SEQ ID NO: 3594201 - RNA, 15 nt, Human
aguggcugguccagg

SEQ ID NO: 3594202 - RNA, 17 nt, Human
aguggcugguccagggc

SEQ ID NO: 3594203 - RNA, 19 nt, Human
aguggcugguccagggcua

SEQ ID NO: 3594204 - RNA, 18 nt, Human
aguggcuguccagugccc

SEQ ID NO: 3594205 - RNA, 18 nt, Human
aguggcuucacuccugcu

SEQ ID NO: 3594206 - RNA, 19 nt, Human
aguggcuucacuccugcug

SEQ ID NO: 3594207 - RNA, 17 nt, Human
aguggcuucaucuguca

SEQ ID NO: 3594208 - RNA, 20 nt, Human
aguggcuucauuagagcagg

SEQ ID NO: 3594209 - RNA, 19 nt, Human
aguggcuugaaaucuuuuu

SEQ ID NO: 3594210 - RNA, 21 nt, Human
aguggcuuuuuuccuccugug

SEQ ID NO: 3594211 - RNA, 19 nt, Human
agugggaaaaauguaggag

SEQ ID NO: 3594212 - RNA, 20 nt, Human
agugggaacgugacugcccc

SEQ ID NO: 3594213 - RNA, 17 nt, Human
agugggaagcccauccu

SEQ ID NO: 3594214 - RNA, 21 nt, Human
agugggaagcccauccugacc

SEQ ID NO: 3594215 - RNA, 15 nt, Human
agugggacagcccag

SEQ ID NO: 3594216 - RNA, 22 nt, Human
agugggacagcccagagccugg

SEQ ID NO: 3594217 - RNA, 23 nt, Human
agugggacccauagaucuucuga

SEQ ID NO: 3594218 - RNA, 12 nt, Human
agugggagaaaa

SEQ ID NO: 3594219 - RNA, 15 nt, Human
agugggagaaggcag

SEQ ID NO: 3594220 - RNA, 14 nt, Human
agugggagccaggg

SEQ ID NO: 3594221 - RNA, 16 nt, Human
agugggagcugccugu

SEQ ID NO: 3594222 - RNA, 12 nt, Human
agugggaggggc

SEQ ID NO: 3594223 - RNA, 12 nt, Human
agugggagguca

SEQ ID NO: 3594224 - RNA, 22 nt, Human
agugggauaaaggcccagacuc

SEQ ID NO: 3594225 - RNA, 19 nt, Human
agugggccaggacaggccc

SEQ ID NO: 3594226 - RNA, 12 nt, Human
agugggccaggg

SEQ ID NO: 3594227 - RNA, 14 nt, Human
agugggccagggcu

SEQ ID NO: 3594228 - RNA, 22 nt, Human
agugggccagggcugcccugag

SEQ ID NO: 3594229 - RNA, 22 nt, Human
agugggcccaaugcacuuuguu

SEQ ID NO: 3594230 - RNA, 18 nt, Human
agugggcccacccggugg

SEQ ID NO: 3594231 - RNA, 19 nt, Human
agugggcccuccgacagcc

SEQ ID NO: 3594232 - RNA, 20 nt, Human
aguggggagacaccucagag

SEQ ID NO: 3594233 - RNA, 14 nt, Human
aguggggaggggcu

SEQ ID NO: 3594234 - RNA, 12 nt, Human
aguggggccugu

SEQ ID NO: 3594235 - RNA, 15 nt, Human
aguggggccugugga

SEQ ID NO: 3594236 - RNA, 15 nt, Human
aguggggcucgccau

SEQ ID NO: 3594237 - RNA, 16 nt, Human
agugggggagagcagg

SEQ ID NO: 3594238 - RNA, 21 nt, Human
agugggggagagcaggcuggc

SEQ ID NO: 3594239 - RNA, 23 nt, Human
agugggggagagcaggcuggcag

SEQ ID NO: 3594240 - RNA, 19 nt, Human
agugggggaguggccacag

SEQ ID NO: 3594241 - RNA, 18 nt, Human
agugggggaucacagccu

SEQ ID NO: 3594242 - RNA, 20 nt, Human
agugggggaucacagccucu

SEQ ID NO: 3594243 - RNA, 18 nt, Human
aguggggggaacgcccac

SEQ ID NO: 3594244 - RNA, 19 nt, Human
aguggggggaacgcccacu

SEQ ID NO: 3594245 - RNA, 16 nt, Human
aguggggguggggggu

SEQ ID NO: 3594246 - RNA, 20 nt, Human
aguggggucucccucuccug

SEQ ID NO: 3594247 - RNA, 16 nt, Human
aguggggugcugggag

SEQ ID NO: 3594248 - RNA, 21 nt, Human
aguggggugcugggaggaggg

SEQ ID NO: 3594249 - RNA, 20 nt, Human
agugggguuaucucuguguu

SEQ ID NO: 3594250 - RNA, 14 nt, Human
agugggucccacuu

SEQ ID NO: 3594251 - RNA, 17 nt, Human
agugggucccacuuccc

SEQ ID NO: 3594252 - RNA, 22 nt, Human
agugggucccacuuccccuccu

SEQ ID NO: 3594253 - RNA, 19 nt, Human
agugggugagaugcuggag

SEQ ID NO: 3594254 - RNA, 16 nt, Human
agugguaagcucuggc

SEQ ID NO: 3594255 - RNA, 18 nt, Human
agugguauagaaaugcug

SEQ ID NO: 3594256 - RNA, 18 nt, Human
agugguccauggaaugcu

SEQ ID NO: 3594257 - RNA, 16 nt, Human
aguggucccugcccuc

SEQ ID NO: 3594258 - RNA, 20 nt, Human
aguggucuuuccuaucaugg

SEQ ID NO: 3594259 - RNA, 15 nt, Human
aguggucuuucugga

SEQ ID NO: 3594260 - RNA, 18 nt, Human
aguggucuuucuggagag

SEQ ID NO: 3594261 - RNA, 20 nt, Human
aguggucuuucuggagaggu

SEQ ID NO: 3594262 - RNA, 16 nt, Human
aguggucuuuguaaga

SEQ ID NO: 3594263 - RNA, 19 nt, Human
aguggucuuuguaagagug

SEQ ID NO: 3594264 - RNA, 23 nt, Human
aguggugccaucauugcugucug

SEQ ID NO: 3594265 - RNA, 16 nt, Human
aguggugcucaguugu

SEQ ID NO: 3594266 - RNA, 22 nt, Human
agugguggcagugcagcaacca

SEQ ID NO: 3594267 - RNA, 14 nt, Human
agugguggcucuga

SEQ ID NO: 3594268 - RNA, 20 nt, Human
aguggugguaacccuggugg

SEQ ID NO: 3594269 - RNA, 22 nt, Human
agugguguuuuaaagagaaugu

SEQ ID NO: 3594270 - RNA, 16 nt, Human
agugguuuuaauaaaa

SEQ ID NO: 3594271 - RNA, 16 nt, Human
aguguaaaaaugagaa

SEQ ID NO: 3594272 - RNA, 18 nt, Human
aguguaaagcauuccaac

SEQ ID NO: 3594273 - RNA, 20 nt, Human
aguguaaagcauuccaacaa

SEQ ID NO: 3594274 - RNA, 20 nt, Human
aguguaacaagaaaggagag

SEQ ID NO: 3594275 - RNA, 22 nt, Human
aguguaacaauuguguagccuu

SEQ ID NO: 3594276 - RNA, 16 nt, Human
aguguaacagcugagg

SEQ ID NO: 3594277 - RNA, 22 nt, Human
aguguaacauaugcaaacauaa

SEQ ID NO: 3594278 - RNA, 16 nt, Human
aguguaacuugcuuaa

SEQ ID NO: 3594279 - RNA, 15 nt, Human
aguguaauaauauga

SEQ ID NO: 3594280 - RNA, 16 nt, Human
aguguaauuucuuugc

SEQ ID NO: 3594281 - RNA, 16 nt, Human
aguguacagccagacc

SEQ ID NO: 3594282 - RNA, 13 nt, Human
aguguacagucuu

SEQ ID NO: 3594283 - RNA, 15 nt, Human
aguguacagucuugu

SEQ ID NO: 3594284 - RNA, 17 nt, Human
aguguacagucuuguau

SEQ ID NO: 3594285 - RNA, 14 nt, Human
aguguacauagugu

SEQ ID NO: 3594286 - RNA, 16 nt, Human
aguguacauaguguaa

SEQ ID NO: 3594287 - RNA, 20 nt, Human
aguguacauuucuauaaaua

SEQ ID NO: 3594288 - RNA, 12 nt, Human
aguguaccauua

SEQ ID NO: 3594289 - RNA, 18 nt, Human
aguguaccauuaaaauau

SEQ ID NO: 3594290 - RNA, 16 nt, Human
aguguaccauuugccu

SEQ ID NO: 3594291 - RNA, 19 nt, Human
aguguacccccgcccaggc

SEQ ID NO: 3594292 - RNA, 22 nt, Human
aguguacccccgcccaggcugg

SEQ ID NO: 3594293 - RNA, 23 nt, Human
aguguaccgcgucuacccuggga

SEQ ID NO: 3594294 - RNA, 14 nt, Human
aguguaccuccucu

SEQ ID NO: 3594295 - RNA, 15 nt, Human
aguguaccuccucuc

SEQ ID NO: 3594296 - RNA, 21 nt, Human
aguguaccuccucucaguguu

SEQ ID NO: 3594297 - RNA, 22 nt, Human
aguguaccuccucucaguguuu

SEQ ID NO: 3594298 - RNA, 13 nt, Human
aguguaccugugu

SEQ ID NO: 3594299 - RNA, 16 nt, Human
aguguacuaauuaaca

SEQ ID NO: 3594300 - RNA, 20 nt, Human
aguguagaaccuaauucaau

SEQ ID NO: 3594301 - RNA, 20 nt, Human
aguguagaagcauuccuucu

SEQ ID NO: 3594302 - RNA, 14 nt, Human
aguguagauuuuau

SEQ ID NO: 3594303 - RNA, 15 nt, Human
aguguagauuuuaua

SEQ ID NO: 3594304 - RNA, 19 nt, Human
aguguagcauccuaaagau

SEQ ID NO: 3594305 - RNA, 16 nt, Human
aguguagccagguccc

SEQ ID NO: 3594306 - RNA, 17 nt, Human
aguguagccaggucccc

SEQ ID NO: 3594307 - RNA, 23 nt, Human
aguguagccaggucccccugcag

SEQ ID NO: 3594308 - RNA, 16 nt, Human
aguguagccccaagaa

SEQ ID NO: 3594309 - RNA, 15 nt, Human
aguguagccuugccc

SEQ ID NO: 3594310 - RNA, 20 nt, Human
aguguaggcagacacaggga

SEQ ID NO: 3594311 - RNA, 23 nt, Human
aguguaggcagacacagggacuu

SEQ ID NO: 3594312 - RNA, 17 nt, Human
aguuuggauauguaaaa

SEQ ID NO: 3594313 - RNA, 20 nt, Human
aguuuggauauguaaaacau

SEQ ID NO: 3594314 - RNA, 18 nt, Human
aguuuggauucuuaugua

SEQ ID NO: 3594315 - RNA, 11 nt, Human
aguuuggccag

SEQ ID NO: 3594316 - RNA, 13 nt, Human
aguuuggccagaa

SEQ ID NO: 3594317 - RNA, 23 nt, Human
aguuuggcugcugucauaacauc

SEQ ID NO: 3594318 - RNA, 14 nt, Human
aguuugggcuucag

SEQ ID NO: 3594319 - RNA, 15 nt, Human
aguuugggcuucagc

SEQ ID NO: 3594320 - RNA, 20 nt, Human
aguuuggggcaagucaugua

SEQ ID NO: 3594321 - RNA, 22 nt, Human
aguuuggggcaagucauguaaa

SEQ ID NO: 3594322 - RNA, 17 nt, Human
aguuuguaaauguuauu

SEQ ID NO: 3594323 - RNA, 23 nt, Human
aguuuguacagacguaugcuuau

SEQ ID NO: 3594324 - RNA, 18 nt, Human
aguuuguacaugcauuca

SEQ ID NO: 3594325 - RNA, 14 nt, Human
aguuuguagguaaa

SEQ ID NO: 3594326 - RNA, 21 nt, Human
aguuuguagguaaaauguauu

SEQ ID NO: 3594327 - RNA, 22 nt, Human
aguuuguagguaaaauguauuu

SEQ ID NO: 3594328 - RNA, 17 nt, Human
aguuuguaguuguuuua

SEQ ID NO: 3594329 - RNA, 14 nt, Human
aguuuguauaacuu

SEQ ID NO: 3594330 - RNA, 13 nt, Human
aguuugucuauuu

SEQ ID NO: 3594331 - RNA, 16 nt, Human
aguuugucuauuuuaa

SEQ ID NO: 3594332 - RNA, 22 nt, Human
aguuugugugucuuaauuauua

SEQ ID NO: 3594333 - RNA, 16 nt, Human
auaaaauaauuuuuau

SEQ ID NO: 3594334 - RNA, 22 nt, Human
auaaaauaauuuuuauauuuga

SEQ ID NO: 3594335 - RNA, 18 nt, Human
auaaaauacauagugaaa

SEQ ID NO: 3594336 - RNA, 20 nt, Human
auaaaauagcaauccuaaag

SEQ ID NO: 3594337 - RNA, 19 nt, Human
auaaaauaguuguccauau

SEQ ID NO: 3594338 - RNA, 18 nt, Human
auaaaauaucauucagca

SEQ ID NO: 3594339 - RNA, 21 nt, Human
auaaaauaugaagacauaaac

SEQ ID NO: 3594340 - RNA, 19 nt, Human
auaaaauauuuucauacag

SEQ ID NO: 3594341 - RNA, 15 nt, Human
auaaaauauuuucug

SEQ ID NO: 3594342 - RNA, 16 nt, Human
auaaaaucaaaacaag

SEQ ID NO: 3594343 - RNA, 21 nt, Human
auaaaaucaaaacaagugaaa

SEQ ID NO: 3594344 - RNA, 16 nt, Human
auaaaaucaauuuuua

SEQ ID NO: 3594345 - RNA, 18 nt, Human
auaaaaucagccaauuau

SEQ ID NO: 3594346 - RNA, 20 nt, Human
auaaaaucauaaguauuugg

SEQ ID NO: 3594347 - RNA, 22 nt, Human
auaaaaucauaaguauuuggaa

SEQ ID NO: 3594348 - RNA, 18 nt, Human
auaaaauccauacauuug

SEQ ID NO: 3594349 - RNA, 20 nt, Human
auaaaauccuaagacacaaa

SEQ ID NO: 3594350 - RNA, 14 nt, Human
auaaaauccugugc

SEQ ID NO: 3594351 - RNA, 16 nt, Human
auaaaaugaaaauugu

SEQ ID NO: 3594352 - RNA, 17 nt, Human
auaaaaugcuagguucu

SEQ ID NO: 3594353 - RNA, 18 nt, Human
auaaaaugcuagguucua

SEQ ID NO: 3594354 - RNA, 16 nt, Human
auaaaauggcaacaaa

SEQ ID NO: 3594355 - RNA, 16 nt, Human
auaaaauggcuguaau

SEQ ID NO: 3594356 - RNA, 15 nt, Human
auaaaauguguugaa

SEQ ID NO: 3594357 - RNA, 12 nt, Human
auaaaauguuga

SEQ ID NO: 3594358 - RNA, 16 nt, Human
auaaaauguugaaaag

SEQ ID NO: 3594359 - RNA, 19 nt, Human
auaaaauguugaaaaguca

SEQ ID NO: 3594360 - RNA, 16 nt, Human
auaaaauuaaagcuga

SEQ ID NO: 3594361 - RNA, 12 nt, Human
auaaaauuacag

SEQ ID NO: 3594362 - RNA, 12 nt, Human
auaaaauuauag

SEQ ID NO: 3594363 - RNA, 14 nt, Human
auaaaauuauagau

SEQ ID NO: 3594364 - RNA, 19 nt, Human
auaaaauuauagcucuaau

SEQ ID NO: 3594365 - RNA, 13 nt, Human
auaaaauuaugcc

SEQ ID NO: 3594366 - RNA, 13 nt, Human
auaaaauuauuuu

SEQ ID NO: 3594367 - RNA, 22 nt, Human
auaaaauucuauuacaguaugu

SEQ ID NO: 3594368 - RNA, 16 nt, Human
auaaaauuuugcuuuu

SEQ ID NO: 3594369 - RNA, 16 nt, Human
auaaacaaagauucau

SEQ ID NO: 3594370 - RNA, 17 nt, Human
auaaacaagaaaaauaa

SEQ ID NO: 3594371 - RNA, 15 nt, Human
auaaacaagaccacg

SEQ ID NO: 3594372 - RNA, 15 nt, Human
auaaacacauagauu

SEQ ID NO: 3594373 - RNA, 20 nt, Human
auaaacagacuguuaauuau

SEQ ID NO: 3594374 - RNA, 17 nt, Human
auaaacagaugaauaaa

SEQ ID NO: 3594375 - RNA, 19 nt, Human
auaaacaggucaaugaaug

SEQ ID NO: 3594376 - RNA, 17 nt, Human
auaaacaucacacacac

SEQ ID NO: 3594377 - RNA, 23 nt, Human
auaaacauuaagauugaggccug

SEQ ID NO: 3594378 - RNA, 15 nt, Human
auaaaccaaaggaca

SEQ ID NO: 3594379 - RNA, 20 nt, Human
auaaaccaaaggacauuaug

SEQ ID NO: 3594380 - RNA, 21 nt, Human
auaaaccagguuuagacagua

SEQ ID NO: 3594381 - RNA, 19 nt, Human
auaaaccauuuuuguuacu

SEQ ID NO: 3594382 - RNA, 20 nt, Human
auaaaccauuuuuguuacuc

SEQ ID NO: 3594383 - RNA, 22 nt, Human
auaaaccccaccccaaaauuag

SEQ ID NO: 3594384 - RNA, 20 nt, Human
auaaaccuaaaaaagauaua

SEQ ID NO: 3594385 - RNA, 16 nt, Human
auaaaccucaaaaugu

SEQ ID NO: 3594386 - RNA, 18 nt, Human
auaaaccuuaauauuucu

SEQ ID NO: 3594387 - RNA, 22 nt, Human
auaaaccuugucuaugaaauga

SEQ ID NO: 3594388 - RNA, 15 nt, Human
auaaacgauuuaauu

SEQ ID NO: 3594389 - RNA, 20 nt, Human
auaaacgauuuaauucucuu

SEQ ID NO: 3594390 - RNA, 18 nt, Human
auaaacgucuuaaauauu

SEQ ID NO: 3594391 - RNA, 17 nt, Human
auaaacuaauaauugca

SEQ ID NO: 3594392 - RNA, 22 nt, Human
auaaacuaaugguccacaccca

SEQ ID NO: 3594393 - RNA, 16 nt, Human
auaaacuacucuuuga

SEQ ID NO: 3594394 - RNA, 17 nt, Human
auaaacucauuuugcuu

SEQ ID NO: 3594395 - RNA, 12 nt, Human
auaaacugaaaa

SEQ ID NO: 3594396 - RNA, 12 nt, Human
auaaacugacuu

SEQ ID NO: 3594397 - RNA, 13 nt, Human
auaaacugacuuu

SEQ ID NO: 3594398 - RNA, 18 nt, Human
auaaacuggcagcucagc

SEQ ID NO: 3594399 - RNA, 17 nt, Human
auaaacuguccucuuuc

SEQ ID NO: 3594400 - RNA, 12 nt, Human
auaaacugugug

SEQ ID NO: 3594401 - RNA, 21 nt, Human
auaaacuguuucagauuuuuu

SEQ ID NO: 3594402 - RNA, 16 nt, Human
auaaacuuaacuuuaa

SEQ ID NO: 3594403 - RNA, 15 nt, Human
auaaacuuagaauaa

SEQ ID NO: 3594404 - RNA, 15 nt, Human
auaaacuucagcacc

SEQ ID NO: 3594405 - RNA, 21 nt, Human
auaaacuuuaccuuuuuuaua

SEQ ID NO: 3594406 - RNA, 16 nt, Human
auaaacuuuuuuucaa

SEQ ID NO: 3594407 - RNA, 23 nt, Human
auaaacuuuuuuuugagaauggu

SEQ ID NO: 3594408 - RNA, 18 nt, Human
auaaagaaaaaaauacua

SEQ ID NO: 3594409 - RNA, 17 nt, Human
auaaagaaauagaacaa

SEQ ID NO: 3594410 - RNA, 23 nt, Human
auaaagaaggaugaugucuuuuu

SEQ ID NO: 3594411 - RNA, 12 nt, Human
auaaagaauacu

SEQ ID NO: 3594412 - RNA, 20 nt, Human
auaaagaauacuugaacuug

SEQ ID NO: 3594413 - RNA, 23 nt, Human
auaaagaauaggacuuguuuuug

SEQ ID NO: 3594414 - RNA, 12 nt, Human
auaaagaauaua

SEQ ID NO: 3594415 - RNA, 11 nt, Human
auaaagaaugg

SEQ ID NO: 3594416 - RNA, 14 nt, Human
auaaagaccacuuu

SEQ ID NO: 3594417 - RNA, 16 nt, Human
auaaagaccuauaaau

SEQ ID NO: 3594418 - RNA, 22 nt, Human
auaaagacguuuuauaagcauc

SEQ ID NO: 3594419 - RNA, 20 nt, Human
auaaagagaaaauugaauuu

SEQ ID NO: 3594420 - RNA, 21 nt, Human
auaaagagaaaauugaauuua

SEQ ID NO: 3594421 - RNA, 15 nt, Human
auaaagagagaaaaa

SEQ ID NO: 3594422 - RNA, 19 nt, Human
auaaagaggcguugcuuuc

SEQ ID NO: 3594423 - RNA, 19 nt, Human
auaaagaucauguaaaagu

SEQ ID NO: 3594424 - RNA, 21 nt, Human
auaaagaugagugagcaugcc

SEQ ID NO: 3594425 - RNA, 11 nt, Human
auaaagaugau

SEQ ID NO: 3594426 - RNA, 17 nt, Human
auaaagauuuuuuaaua

SEQ ID NO: 3594427 - RNA, 14 nt, Human
auaaagcaaauaga

SEQ ID NO: 3594428 - RNA, 22 nt, Human
auaaagcaacuguuaugaaaua

SEQ ID NO: 3594429 - RNA, 12 nt, Human
auaaagcaauuu

SEQ ID NO: 3594430 - RNA, 14 nt, Human
auaaagcaauuuuc

SEQ ID NO: 3594431 - RNA, 16 nt, Human
auaaagcaauuuuccu

SEQ ID NO: 3594432 - RNA, 19 nt, Human
auaaagcaauuuuccuuga

SEQ ID NO: 3594433 - RNA, 14 nt, Human
auaaagcacagcug

SEQ ID NO: 3594434 - RNA, 14 nt, Human
auaaagcagcguuu

SEQ ID NO: 3594435 - RNA, 18 nt, Human
auaaagcagcguuucuau

SEQ ID NO: 3594436 - RNA, 20 nt, Human
auaaagcagcguuucuauga

SEQ ID NO: 3594437 - RNA, 14 nt, Human
auaaagcaguauuu

SEQ ID NO: 3594438 - RNA, 21 nt, Human
auaaagcauaaguauacaguu

SEQ ID NO: 3594439 - RNA, 17 nt, Human
auaaagcaucuaaacuu

SEQ ID NO: 3594440 - RNA, 13 nt, Human
auaaagcauuuaa

SEQ ID NO: 3594441 - RNA, 18 nt, Human
auaaagcauuuauaaauu

SEQ ID NO: 3594442 - RNA, 20 nt, Human
auaaagcccugggaucacug

SEQ ID NO: 3594443 - RNA, 21 nt, Human
auaaagccucaagguuuuagg

SEQ ID NO: 3594444 - RNA, 18 nt, Human
auaaagcuguguggcagu

SEQ ID NO: 3594445 - RNA, 15 nt, Human
auaaaggaaucuagc

SEQ ID NO: 3594446 - RNA, 14 nt, Human
auaaaggacuguaa

SEQ ID NO: 3594447 - RNA, 14 nt, Human
auaaaggauaaacu

SEQ ID NO: 3594448 - RNA, 13 nt, Human
auaaaggauguga

SEQ ID NO: 3594449 - RNA, 19 nt, Human
auaaaggccccaaauacca

SEQ ID NO: 3594450 - RNA, 20 nt, Human
auaaaggugguaugugugug

SEQ ID NO: 3594451 - RNA, 15 nt, Human
auaaagguucaugca

SEQ ID NO: 3594452 - RNA, 21 nt, Human
auaaagguugacaauaaaugu

SEQ ID NO: 3594453 - RNA, 17 nt, Human
auaaaguaaagcuaaaa

SEQ ID NO: 3594454 - RNA, 18 nt, Human
auaaaguaaauacaugca

SEQ ID NO: 3594455 - RNA, 13 nt, Human
auaaaguaguaaa

SEQ ID NO: 3594456 - RNA, 16 nt, Human
auaaaguaguccugug

SEQ ID NO: 3594457 - RNA, 17 nt, Human
auaaaguaguccuguga

SEQ ID NO: 3594458 - RNA, 11 nt, Human
auaaaguauag

SEQ ID NO: 3594459 - RNA, 14 nt, Human
auaaaguaucuaca

SEQ ID NO: 3594460 - RNA, 16 nt, Human
auaaaguauuccaccu

SEQ ID NO: 3594461 - RNA, 14 nt, Human
auaaaguauucuuu

SEQ ID NO: 3594462 - RNA, 21 nt, Human
auaaaguauuuaauuagugcu

SEQ ID NO: 3594463 - RNA, 19 nt, Human
auaaaguguaacaauugug

SEQ ID NO: 3594464 - RNA, 14 nt, Human
auaaaguuaaaagu

SEQ ID NO: 3594465 - RNA, 16 nt, Human
auaaaguugauaaaga

SEQ ID NO: 3594466 - RNA, 20 nt, Human
auaaaguugauaaagauuuu

SEQ ID NO: 3594467 - RNA, 12 nt, Human
auaaaguuugau

SEQ ID NO: 3594468 - RNA, 19 nt, Human
auaaaguuugcuuagaaaa

SEQ ID NO: 3594469 - RNA, 20 nt, Human
auaaaguuuuauauauuaua

SEQ ID NO: 3594470 - RNA, 15 nt, Human
auaaauaaaaaugga

SEQ ID NO: 3594471 - RNA, 19 nt, Human
auaaauaaaguuuguugaa

SEQ ID NO: 3594472 - RNA, 15 nt, Human
auaaauaaauaaaua

SEQ ID NO: 3594473 - RNA, 17 nt, Human
agcucauuucaugcucu

SEQ ID NO: 3594474 - RNA, 14 nt, Human
agcuccaaccugca

SEQ ID NO: 3594475 - RNA, 22 nt, Human
agcuccaagaccuguugguucc

SEQ ID NO: 3594476 - RNA, 19 nt, Human
agcuccaagcucccaggca

SEQ ID NO: 3594477 - RNA, 17 nt, Human
agcuccacucugcuucu

SEQ ID NO: 3594478 - RNA, 15 nt, Human
auaacguuuuuccuu

SEQ ID NO: 3594479 - RNA, 16 nt, Human
auaacuaaaagguaug

SEQ ID NO: 3594480 - RNA, 21 nt, Human
auaacuaaauuugauacuuau

SEQ ID NO: 3594481 - RNA, 15 nt, Human
auaacuacuguguuc

SEQ ID NO: 3594482 - RNA, 19 nt, Human
auaacuacuguguuccugg

SEQ ID NO: 3594483 - RNA, 20 nt, Human
auaacuagauggugcugaga

SEQ ID NO: 3594484 - RNA, 21 nt, Human
auaacuagauggugcugagaa

SEQ ID NO: 3594485 - RNA, 15 nt, Human
auaacuauguugaua

SEQ ID NO: 3594486 - RNA, 17 nt, Human
auaacuauucaguugug

SEQ ID NO: 3594487 - RNA, 15 nt, Human
auaacucaauggaaa

SEQ ID NO: 3594488 - RNA, 15 nt, Human
auaacucaucauaaa

SEQ ID NO: 3594489 - RNA, 15 nt, Human
aguucagcaaaacug

SEQ ID NO: 3594490 - RNA, 17 nt, Human
aguucagcaccacccua

SEQ ID NO: 3594491 - RNA, 18 nt, Human
aguucagcaccacccuag

SEQ ID NO: 3594492 - RNA, 16 nt, Human
aguucaggagucccaa

SEQ ID NO: 3594493 - RNA, 20 nt, Human
aguucaggagucccaaggaa

SEQ ID NO: 3594494 - RNA, 16 nt, Human
aguucaguaccuggag

SEQ ID NO: 3594495 - RNA, 11 nt, Human
aguucaguggc

SEQ ID NO: 3594496 - RNA, 19 nt, Human
aguucaguggcagggcuca

SEQ ID NO: 3594497 - RNA, 19 nt, Human
aguucaguuuuaccagaug

SEQ ID NO: 3594498 - RNA, 16 nt, Human
aguucauaacagugcc

SEQ ID NO: 3594499 - RNA, 17 nt, Human
aguucauaacagugcca

SEQ ID NO: 3594500 - RNA, 22 nt, Human
aguucauaacagugccauuguc

SEQ ID NO: 3594501 - RNA, 18 nt, Human
aguucauaccuaaguacu

SEQ ID NO: 3594502 - RNA, 20 nt, Human
aguucauaccuaaguacugu

SEQ ID NO: 3594503 - RNA, 19 nt, Human
aguucaucagaguuauggu

SEQ ID NO: 3594504 - RNA, 18 nt, Human
aguucauccaauccucac

SEQ ID NO: 3594505 - RNA, 20 nt, Human
aguucaucccagccccaauu

SEQ ID NO: 3594506 - RNA, 15 nt, Human
aguucaucccuucuc

SEQ ID NO: 3594507 - RNA, 13 nt, Human
aguucaucuugaa

SEQ ID NO: 3594508 - RNA, 13 nt, Human
aguucaucuuuug

SEQ ID NO: 3594509 - RNA, 13 nt, Human
aguucaugagaau

SEQ ID NO: 3594510 - RNA, 22 nt, Human
aguucaugcagcuguggcagag

SEQ ID NO: 3594511 - RNA, 16 nt, Human
aguucauguaaauaau

SEQ ID NO: 3594512 - RNA, 22 nt, Human
aguucauguauguucagaagaa

SEQ ID NO: 3594513 - RNA, 15 nt, Human
aguucauuagaaaua

SEQ ID NO: 3594514 - RNA, 23 nt, Human
aguucauuagaaauauuuuaaaa

SEQ ID NO: 3594515 - RNA, 16 nt, Human
aguucauucagggccg

SEQ ID NO: 3594516 - RNA, 14 nt, Human
aguucauucauauu

SEQ ID NO: 3594517 - RNA, 15 nt, Human
aguucauucauauua

SEQ ID NO: 3594518 - RNA, 16 nt, Human
aguucauucauauuac

SEQ ID NO: 3594519 - RNA, 23 nt, Human
aguucauucauauuacaauauuu

SEQ ID NO: 3594520 - RNA, 15 nt, Human
aguucauugcaauua

SEQ ID NO: 3594521 - RNA, 19 nt, Human
aguuccaagagucuaaaga

SEQ ID NO: 3594522 - RNA, 20 nt, Human
aguuccaagagucuaaagau

SEQ ID NO: 3594523 - RNA, 20 nt, Human
aguuccaaguccaauaagac

SEQ ID NO: 3594524 - RNA, 18 nt, Human
aguuccaccaucaagcca

SEQ ID NO: 3594525 - RNA, 15 nt, Human
aguuccacugagacc

SEQ ID NO: 3594526 - RNA, 20 nt, Human
aguuccacuuauagccucug

SEQ ID NO: 3594527 - RNA, 15 nt, Human
aguuccagaaaguaa

SEQ ID NO: 3594528 - RNA, 17 nt, Human
aguucccaaaagauugc

SEQ ID NO: 3594529 - RNA, 14 nt, Human
aguucccagaauca

SEQ ID NO: 3594530 - RNA, 20 nt, Human
aguucccaucuccuuucucu

SEQ ID NO: 3594531 - RNA, 18 nt, Human
aguucccccaaccucaga

SEQ ID NO: 3594532 - RNA, 18 nt, Human
aguuccccuauguggaag

SEQ ID NO: 3594533 - RNA, 19 nt, Human
aguucccugaaaacccaga

SEQ ID NO: 3594534 - RNA, 20 nt, Human
aguucccugaaaacccagag

SEQ ID NO: 3594535 - RNA, 21 nt, Human
aguucccugaaaacccagaga

SEQ ID NO: 3594536 - RNA, 13 nt, Human
aguucccuuggcc

SEQ ID NO: 3594537 - RNA, 16 nt, Human
aguuccgauuucccag

SEQ ID NO: 3594538 - RNA, 20 nt, Human
aguuccuaagaagcuucuaa

SEQ ID NO: 3594539 - RNA, 17 nt, Human
aguuccuagagaacugu

SEQ ID NO: 3594540 - RNA, 12 nt, Human
aguuccucgccc

SEQ ID NO: 3594541 - RNA, 13 nt, Human
aguuccucgcccu

SEQ ID NO: 3594542 - RNA, 21 nt, Human
aguuccucuaacuuggcucac

SEQ ID NO: 3594543 - RNA, 15 nt, Human
aguuccucuuugcau

SEQ ID NO: 3594544 - RNA, 16 nt, Human
aguuccucuuugcaug

SEQ ID NO: 3594545 - RNA, 21 nt, Human
aguuccucuuugcauggaauu

SEQ ID NO: 3594546 - RNA, 18 nt, Human
aguuccugaugacccagg

SEQ ID NO: 3594547 - RNA, 23 nt, Human
aguuccugcuacaacuucagcag

SEQ ID NO: 3594548 - RNA, 13 nt, Human
aguuccugggaac

SEQ ID NO: 3594549 - RNA, 23 nt, Human
aguuccugucccuucucuuaauu

SEQ ID NO: 3594550 - RNA, 20 nt, Human
aguuccuugaucuguauaua

SEQ ID NO: 3594551 - RNA, 14 nt, Human
aguuccuuuagaaa

SEQ ID NO: 3594552 - RNA, 14 nt, Human
aguucgagaccagc

SEQ ID NO: 3594553 - RNA, 14 nt, Human
aguucgcagccacc

SEQ ID NO: 3594554 - RNA, 16 nt, Human
aguucgccuggagccc

SEQ ID NO: 3594555 - RNA, 20 nt, Human
aguucggugagcuacaaaug

SEQ ID NO: 3594556 - RNA, 19 nt, Human
aguucuaacagugaaguuu

SEQ ID NO: 3594557 - RNA, 18 nt, Human
aguucuaagacucaaaug

SEQ ID NO: 3594558 - RNA, 23 nt, Human
aguucuaagacucaaauguucua

SEQ ID NO: 3594559 - RNA, 15 nt, Human
aguucuaagauucug

SEQ ID NO: 3594560 - RNA, 18 nt, Human
aguucuaauaauuucuaa

SEQ ID NO: 3594561 - RNA, 13 nt, Human
aguucuacagaaa

SEQ ID NO: 3594562 - RNA, 12 nt, Human
aguucuagaaaa

SEQ ID NO: 3594563 - RNA, 15 nt, Human
aguucuagaaaaaca

SEQ ID NO: 3594564 - RNA, 13 nt, Human
aguucuagagaag

SEQ ID NO: 3594565 - RNA, 14 nt, Human
aguucuagagaaga

SEQ ID NO: 3594566 - RNA, 15 nt, Human
aguucuaggaaaaua

SEQ ID NO: 3594567 - RNA, 22 nt, Human
aguucuaggcacuguaguucua

SEQ ID NO: 3594568 - RNA, 15 nt, Human
aguucuaguuugcau

SEQ ID NO: 3594569 - RNA, 15 nt, Human
aguucuauuuaagug

SEQ ID NO: 3594570 - RNA, 12 nt, Human
aguucucacugu

SEQ ID NO: 3594571 - RNA, 19 nt, Human
aguucucacuguucccucu

SEQ ID NO: 3594572 - RNA, 16 nt, Human
aguucucucguaacug

SEQ ID NO: 3594573 - RNA, 14 nt, Human
aguucugaagaaga

SEQ ID NO: 3594574 - RNA, 18 nt, Human
aguucugagcugccagug

SEQ ID NO: 3594575 - RNA, 15 nt, Human
aguucugaguguuuu

SEQ ID NO: 3594576 - RNA, 15 nt, Human
aguucugcaaauaga

SEQ ID NO: 3594577 - RNA, 16 nt, Human
aguucugcagauaaac

SEQ ID NO: 3594578 - RNA, 21 nt, Human
aguucugcagauaaacaguag

SEQ ID NO: 3594579 - RNA, 18 nt, Human
aguucugcagguugaagc

SEQ ID NO: 3594580 - RNA, 21 nt, Human
aguucugcucauucuaaugau

SEQ ID NO: 3594581 - RNA, 12 nt, Human
aguucugcucca

SEQ ID NO: 3594582 - RNA, 14 nt, Human
aguucugcuccaga

SEQ ID NO: 3594583 - RNA, 15 nt, Human
aguucugcuccagac

SEQ ID NO: 3594584 - RNA, 17 nt, Human
aguucugcuccagacag

SEQ ID NO: 3594585 - RNA, 15 nt, Human
aguucugcugaaugc

SEQ ID NO: 3594586 - RNA, 12 nt, Human
aguucugggugc

SEQ ID NO: 3594587 - RNA, 16 nt, Human
aguucuguagaaaugg

SEQ ID NO: 3594588 - RNA, 17 nt, Human
aguucuguagaaauggu

SEQ ID NO: 3594589 - RNA, 16 nt, Human
aguucuguauuugaaa

SEQ ID NO: 3594590 - RNA, 22 nt, Human
aguucuguauuugaaagugccu

SEQ ID NO: 3594591 - RNA, 16 nt, Human
aguucugugguuucau

SEQ ID NO: 3594592 - RNA, 19 nt, Human
aguucugugguuucauguu

SEQ ID NO: 3594593 - RNA, 23 nt, Human
aguucugugguuucauguuaguu

SEQ ID NO: 3594594 - RNA, 15 nt, Human
aguucuguguuuaau

SEQ ID NO: 3594595 - RNA, 22 nt, Human
aguucuguguuuaauuucuuca

SEQ ID NO: 3594596 - RNA, 14 nt, Human
aguucuuaguuaua

SEQ ID NO: 3594597 - RNA, 20 nt, Human
aguucuuaugaggaggggag

SEQ ID NO: 3594598 - RNA, 17 nt, Human
aguucuucgacuguugu

SEQ ID NO: 3594599 - RNA, 18 nt, Human
aguucuucgacuguuguu

SEQ ID NO: 3594600 - RNA, 15 nt, Human
aguucuucgggaaga

SEQ ID NO: 3594601 - RNA, 19 nt, Human
aguucuucgggaagagagg

SEQ ID NO: 3594602 - RNA, 12 nt, Human
aguucuugugcc

SEQ ID NO: 3594603 - RNA, 17 nt, Human
aguucuuuaaaauguaa

SEQ ID NO: 3594604 - RNA, 22 nt, Human
aguucuuuggauucuaaauaca

SEQ ID NO: 3594605 - RNA, 16 nt, Human
aguugaaaauaaagug

SEQ ID NO: 3594606 - RNA, 19 nt, Human
aguugaaaauucauaguaa

SEQ ID NO: 3594607 - RNA, 17 nt, Human
aguugaagacagagcua

SEQ ID NO: 3594608 - RNA, 16 nt, Human
aguugaagcuaagauu

SEQ ID NO: 3594609 - RNA, 19 nt, Human
aguugaaguuaguggaaau

SEQ ID NO: 3594610 - RNA, 22 nt, Human
aguugaaguuaguggaaaucug

SEQ ID NO: 3594611 - RNA, 14 nt, Human
aguugaauacuuga

SEQ ID NO: 3594612 - RNA, 16 nt, Human
aguugaauacuugaac

SEQ ID NO: 3594613 - RNA, 18 nt, Human
aguugaauacuugaacca

SEQ ID NO: 3594614 - RNA, 11 nt, Human
aguugaauuua

SEQ ID NO: 3594615 - RNA, 12 nt, Human
aguugaauuuuu

SEQ ID NO: 3594616 - RNA, 22 nt, Human
aguugaauuuuuuuuaacauuc

SEQ ID NO: 3594617 - RNA, 17 nt, Human
aguugacaccugagaaa

SEQ ID NO: 3594618 - RNA, 13 nt, Human
aguugacagcagg

SEQ ID NO: 3594619 - RNA, 18 nt, Human
aguugacuagaaucgaca

SEQ ID NO: 3594620 - RNA, 17 nt, Human
aguugacucugcucuug

SEQ ID NO: 3594621 - RNA, 16 nt, Human
aguugagccagcagac

SEQ ID NO: 3594622 - RNA, 20 nt, Human
aguugagccagcagacauug

SEQ ID NO: 3594623 - RNA, 13 nt, Human
auaaagcagcguu

SEQ ID NO: 3594624 - RNA, 19 nt, Human
auaaagcagcguuucuaug

SEQ ID NO: 3594625 - RNA, 16 nt, Human
auaaagcaguauuuuu

SEQ ID NO: 3594626 - RNA, 14 nt, Human
auaaagcauuuaua

SEQ ID NO: 3594627 - RNA, 12 nt, Human
auaaagccacug

SEQ ID NO: 3594628 - RNA, 18 nt, Human
auaaagccucaagguuuu

SEQ ID NO: 3594629 - RNA, 18 nt, Human
auaaagccuguauucuca

SEQ ID NO: 3594630 - RNA, 20 nt, Human
auaaagccuuggauguauau

SEQ ID NO: 3594631 - RNA, 22 nt, Human
auaaagcgaaaaacucaaccaa

SEQ ID NO: 3594632 - RNA, 19 nt, Human
auaaagcgauauacagaug

SEQ ID NO: 3594633 - RNA, 21 nt, Human
auaaagcgauauacagaugaa

SEQ ID NO: 3594634 - RNA, 20 nt, Human
auaaaggaaaaaagagaagu

SEQ ID NO: 3594635 - RNA, 18 nt, Human
auaaaggaaaagacacau

SEQ ID NO: 3594636 - RNA, 21 nt, Human
auaaaggauaaacuuuuagaa

SEQ ID NO: 3594637 - RNA, 16 nt, Human
auaaaggcaguuuucu

SEQ ID NO: 3594638 - RNA, 18 nt, Human
auaaaggcaguuuucuaa

SEQ ID NO: 3594639 - RNA, 20 nt, Human
auaaagguuauuuucuccug

SEQ ID NO: 3594640 - RNA, 16 nt, Human
auaaagguugacaaua

SEQ ID NO: 3594641 - RNA, 22 nt, Human
auaaagguugacaauaaaugug

SEQ ID NO: 3594642 - RNA, 16 nt, Human
auaaaguaaauacaug

SEQ ID NO: 3594643 - RNA, 13 nt, Human
auaaaguacuuga

SEQ ID NO: 3594644 - RNA, 14 nt, Human
auaaaguagaaaug

SEQ ID NO: 3594645 - RNA, 18 nt, Human
auaaaguaguaaaaauua

SEQ ID NO: 3594646 - RNA, 17 nt, Human
auaaaguauaauguuua

SEQ ID NO: 3594647 - RNA, 18 nt, Human
auaaaguaucaugcauuc

SEQ ID NO: 3594648 - RNA, 20 nt, Human
auaaaguauuccaccuuaaa

SEQ ID NO: 3594649 - RNA, 15 nt, Human
auaaaguauucuuuu

SEQ ID NO: 3594650 - RNA, 17 nt, Human
auaaaguauuuaauuag

SEQ ID NO: 3594651 - RNA, 18 nt, Human
auaaagugacccugcucu

SEQ ID NO: 3594652 - RNA, 20 nt, Human
auaaagugacccugcucuca

SEQ ID NO: 3594653 - RNA, 20 nt, Human
auaaagugagaaaacuguga

SEQ ID NO: 3594654 - RNA, 23 nt, Human
auaaagugcugcggagcaagagg

SEQ ID NO: 3594655 - RNA, 24 nt, Human
auaaagugcugcggagcaagagga

SEQ ID NO: 3594656 - RNA, 17 nt, Human
auaaagugcuuguguaa

SEQ ID NO: 3594657 - RNA, 18 nt, Human
auaaagugcuuguguaau

SEQ ID NO: 3594658 - RNA, 19 nt, Human
auaaaguguuugaaagcuu

SEQ ID NO: 3594659 - RNA, 16 nt, Human
auaaaguguuuucaga

SEQ ID NO: 3594660 - RNA, 17 nt, Human
auaaaguguuuucagag

SEQ ID NO: 3594661 - RNA, 18 nt, Human
auaaaguguuuucagagc

SEQ ID NO: 3594662 - RNA, 16 nt, Human
auaaaguuagaaucua

SEQ ID NO: 3594663 - RNA, 17 nt, Human
auaaaguuagaaucuau

SEQ ID NO: 3594664 - RNA, 17 nt, Human
auaaaguugauaaagau

SEQ ID NO: 3594665 - RNA, 18 nt, Human
auaaaguuggugacagau

SEQ ID NO: 3594666 - RNA, 13 nt, Human
auaaaguuucuca

SEQ ID NO: 3594667 - RNA, 22 nt, Human
auaaaguuugaucuuccucugc

SEQ ID NO: 3594668 - RNA, 12 nt, Human
auaaaguuugcu

SEQ ID NO: 3594669 - RNA, 14 nt, Human
auaaaguuuuauau

SEQ ID NO: 3594670 - RNA, 18 nt, Human
auaaaguuuuauauauua

SEQ ID NO: 3594671 - RNA, 17 nt, Human
auaaauaaaaauggaua

SEQ ID NO: 3594672 - RNA, 12 nt, Human
auaaauaaaagc

SEQ ID NO: 3594673 - RNA, 14 nt, Human
auaaauaaaaugac

SEQ ID NO: 3594674 - RNA, 13 nt, Human
auaaauaaauaua

SEQ ID NO: 3594675 - RNA, 15 nt, Human
auaaauaaauauaua

SEQ ID NO: 3594676 - RNA, 12 nt, Human
auaaauaaaugu

SEQ ID NO: 3594677 - RNA, 14 nt, Human
auaaauaacuuuuu

SEQ ID NO: 3594678 - RNA, 15 nt, Human
auaaauaaucuguac

SEQ ID NO: 3594679 - RNA, 20 nt, Human
auaaauagaauguaaauguc

SEQ ID NO: 3594680 - RNA, 14 nt, Human
auaaauagagcaau

SEQ ID NO: 3594681 - RNA, 16 nt, Human
auaaauagcuagacug

SEQ ID NO: 3594682 - RNA, 21 nt, Human
auaaauagcuauauccaugua

SEQ ID NO: 3594683 - RNA, 13 nt, Human
auaaauauaucua

SEQ ID NO: 3594684 - RNA, 21 nt, Human
auaaauauaucuaccccagac

SEQ ID NO: 3594685 - RNA, 22 nt, Human
auaaauauauuauuacuuguaa

SEQ ID NO: 3594686 - RNA, 14 nt, Human
auaaauaugagugc

SEQ ID NO: 3594687 - RNA, 14 nt, Human
auaaauaugcagug

SEQ ID NO: 3594688 - RNA, 12 nt, Human
auaaauauuaua

SEQ ID NO: 3594689 - RNA, 19 nt, Human
auaaauauucacacuugaa

SEQ ID NO: 3594690 - RNA, 23 nt, Human
auaaauauugguugggaugacuu

SEQ ID NO: 3594691 - RNA, 20 nt, Human
auaaauauugucuuuuugua

SEQ ID NO: 3594692 - RNA, 23 nt, Human
auaaauauugucuuuuuguaugu

SEQ ID NO: 3594693 - RNA, 20 nt, Human
auaaauauuuauguagaugu

SEQ ID NO: 3594694 - RNA, 12 nt, Human
auaaaucauaaa

SEQ ID NO: 3594695 - RNA, 15 nt, Human
auaaaucauaaaguc

SEQ ID NO: 3594696 - RNA, 16 nt, Human
auaaaucauaaaguca

SEQ ID NO: 3594697 - RNA, 11 nt, Human
auacuguugca

SEQ ID NO: 3594698 - RNA, 12 nt, Human
auacuguugcac

SEQ ID NO: 3594699 - RNA, 18 nt, Human
auacuguugcacgugugu

SEQ ID NO: 3594700 - RNA, 19 nt, Human
auacuguugcacguguguu

SEQ ID NO: 3594701 - RNA, 22 nt, Human
auacuuacauguguguauaugu

SEQ ID NO: 3594702 - RNA, 22 nt, Human
auacuuacauucucuaauaaga

SEQ ID NO: 3594703 - RNA, 20 nt, Human
auacuuaccuagugaaacuu

SEQ ID NO: 3594704 - RNA, 21 nt, Human
auacuuaccuagugaaacuuu

SEQ ID NO: 3594705 - RNA, 18 nt, Human
auacuuagcaaaaagugg

SEQ ID NO: 3594706 - RNA, 23 nt, Human
auacuuagcaaaaaguggggcag

SEQ ID NO: 3594707 - RNA, 19 nt, Human
auacuuauauggaaauucu

SEQ ID NO: 3594708 - RNA, 18 nt, Human
auacuuaucucucugugc

SEQ ID NO: 3594709 - RNA, 14 nt, Human
auacuuauucauug

SEQ ID NO: 3594710 - RNA, 13 nt, Human
auacuuauuuaaa

SEQ ID NO: 3594711 - RNA, 21 nt, Human
auacuuauuuaaauagaugac

SEQ ID NO: 3594712 - RNA, 22 nt, Human
auacuuauuuaaauagaugaca

SEQ ID NO: 3594713 - RNA, 18 nt, Human
auacuuauuuguauaugg

SEQ ID NO: 3594714 - RNA, 12 nt, Human
auacuucaaaag

SEQ ID NO: 3594715 - RNA, 14 nt, Human
auacuucaaaagua

SEQ ID NO: 3594716 - RNA, 19 nt, Human
auacuucgacacuguucuu

SEQ ID NO: 3594717 - RNA, 21 nt, Human
auacuucucaaaccuguuuaa

SEQ ID NO: 3594718 - RNA, 16 nt, Human
auacuucucauuuuuu

SEQ ID NO: 3594719 - RNA, 20 nt, Human
auacuucuuguguguaugca

SEQ ID NO: 3594720 - RNA, 19 nt, Human
auacuugaaaauuaacaug

SEQ ID NO: 3594721 - RNA, 12 nt, Human
auacuugaacaa

SEQ ID NO: 3594722 - RNA, 17 nt, Human
auacuugaaccauaaaa

SEQ ID NO: 3594723 - RNA, 20 nt, Human
auacuugaaccauaaaaugu

SEQ ID NO: 3594724 - RNA, 21 nt, Human
auacuugaacuugccucuuuu

SEQ ID NO: 3594725 - RNA, 17 nt, Human
auacuugaagggccaga

SEQ ID NO: 3594726 - RNA, 20 nt, Human
auacuugaagggccagagcc

SEQ ID NO: 3594727 - RNA, 21 nt, Human
auacuugaagggccagagcca

SEQ ID NO: 3594728 - RNA, 15 nt, Human
auacuuguaauuaug

SEQ ID NO: 3594729 - RNA, 17 nt, Human
auacuuguaauuaugga

SEQ ID NO: 3594730 - RNA, 21 nt, Human
auacuuguaauuauggaguca

SEQ ID NO: 3594731 - RNA, 18 nt, Human
auacuugugguuuucaaa

SEQ ID NO: 3594732 - RNA, 16 nt, Human
auacuuguuuuuguaa

SEQ ID NO: 3594733 - RNA, 14 nt, Human
auacuuuaaaggaa

SEQ ID NO: 3594734 - RNA, 13 nt, Human
auacuuuaaauaa

SEQ ID NO: 3594735 - RNA, 17 nt, Human
auacuuuaaauaauuua

SEQ ID NO: 3594736 - RNA, 20 nt, Human
auacuuuaguagacauuuau

SEQ ID NO: 3594737 - RNA, 15 nt, Human
auacuuuaucaaugu

SEQ ID NO: 3594738 - RNA, 13 nt, Human
auacuuugaaugu

SEQ ID NO: 3594739 - RNA, 15 nt, Human
auacuuugaaugugu

SEQ ID NO: 3594740 - RNA, 10 nt, Human
auacuuugua

SEQ ID NO: 3594741 - RNA, 14 nt, Human
auacuuuguaaaua

SEQ ID NO: 3594742 - RNA, 13 nt, Human
auacuuuguauug

SEQ ID NO: 3594743 - RNA, 18 nt, Human
auacuuuguauuguccua

SEQ ID NO: 3594744 - RNA, 17 nt, Human
auacuuuguauuuugau

SEQ ID NO: 3594745 - RNA, 13 nt, Human
auacuuugucuga

SEQ ID NO: 3594746 - RNA, 16 nt, Human
auacuuuguggaccaa

SEQ ID NO: 3594747 - RNA, 20 nt, Human
auacuuuuacucugccuaca

SEQ ID NO: 3594748 - RNA, 19 nt, Human
auacuuuuuaaauguaaag

SEQ ID NO: 3594749 - RNA, 13 nt, Human
auacuuuuuacaa

SEQ ID NO: 3594750 - RNA, 17 nt, Human
auacuuuuucuaaugag

SEQ ID NO: 3594751 - RNA, 15 nt, Human
auacuuuuucuuuug

SEQ ID NO: 3594752 - RNA, 19 nt, Human
auacuuuuuucuuauuuaa

SEQ ID NO: 3594753 - RNA, 13 nt, Human
auagaaaaacaaa

SEQ ID NO: 3594754 - RNA, 10 nt, Human
auagaaaaau

SEQ ID NO: 3594755 - RNA, 23 nt, Human
auagaaaaauucagcaaaccauu

SEQ ID NO: 3594756 - RNA, 23 nt, Human
auagaaaacaggaaaaaaacuuu

SEQ ID NO: 3594757 - RNA, 17 nt, Human
auagaaaacugaaaauc

SEQ ID NO: 3594758 - RNA, 21 nt, Human
auagaaaaguagacaaucauu

SEQ ID NO: 3594759 - RNA, 13 nt, Human
auagaaaaguuau

SEQ ID NO: 3594760 - RNA, 21 nt, Human
auagaaacaugacacugaccu

SEQ ID NO: 3594761 - RNA, 13 nt, Human
auagaaagaaagu

SEQ ID NO: 3594762 - RNA, 15 nt, Human
auagaaagcuuuguu

SEQ ID NO: 3594763 - RNA, 17 nt, Human
auagaaaguguucuguu

SEQ ID NO: 3594764 - RNA, 18 nt, Human
auagaaaguugcaaggca

SEQ ID NO: 3594765 - RNA, 22 nt, Human
auagaaauaaaggaugugauug

SEQ ID NO: 3594766 - RNA, 20 nt, Human
auagaaauauagccaaaaau

SEQ ID NO: 3594767 - RNA, 18 nt, Human
auagaaauauauacgaac

SEQ ID NO: 3594768 - RNA, 12 nt, Human
auagcccagaca

SEQ ID NO: 3594769 - RNA, 21 nt, Human
auagcccaggauauauuuuau

SEQ ID NO: 3594770 - RNA, 16 nt, Human
auagcccaucccugcc

SEQ ID NO: 3594771 - RNA, 17 nt, Human
auagcccaucccugccu

SEQ ID NO: 3594772 - RNA, 18 nt, Human
auagcccaucccugccug

SEQ ID NO: 3594773 - RNA, 15 nt, Human
auagcccuguccugg

SEQ ID NO: 3594774 - RNA, 23 nt, Human
auagcccuguccuggugguauuu

SEQ ID NO: 3594775 - RNA, 19 nt, Human
auagccgauaucagaauuu

SEQ ID NO: 3594776 - RNA, 12 nt, Human
auagccuauauu

SEQ ID NO: 3594777 - RNA, 19 nt, Human
auagccuauggcagaaaaa

SEQ ID NO: 3594778 - RNA, 15 nt, Human
auagccucugucugg

SEQ ID NO: 3594779 - RNA, 16 nt, Human
auagccucugucuggc

SEQ ID NO: 3594780 - RNA, 18 nt, Human
auagccugccucuucucu

SEQ ID NO: 3594781 - RNA, 11 nt, Human
auagccugugg

SEQ ID NO: 3594782 - RNA, 12 nt, Human
auagccuguggc

SEQ ID NO: 3594783 - RNA, 16 nt, Human
auagcgaggcucuaac

SEQ ID NO: 3594784 - RNA, 20 nt, Human
auagcggguuacuuucacau

SEQ ID NO: 3594785 - RNA, 20 nt, Human
auagcguuggaauuaaaaca

SEQ ID NO: 3594786 - RNA, 16 nt, Human
auagcuaacuguaaau

SEQ ID NO: 3594787 - RNA, 19 nt, Human
auagcuacccaaaagagaa

SEQ ID NO: 3594788 - RNA, 21 nt, Human
auagcuacccaaaagagaaaa

SEQ ID NO: 3594789 - RNA, 14 nt, Human
auagcuacuaauuu

SEQ ID NO: 3594790 - RNA, 16 nt, Human
auagcuagacugguga

SEQ ID NO: 3594791 - RNA, 14 nt, Human
auagcuauauccau

SEQ ID NO: 3594792 - RNA, 16 nt, Human
auagcuauauccaugu

SEQ ID NO: 3594793 - RNA, 20 nt, Human
auagcuauauccauguacug

SEQ ID NO: 3594794 - RNA, 22 nt, Human
auagcuauauccauguacugua

SEQ ID NO: 3594795 - RNA, 13 nt, Human
auagcucaguuua

SEQ ID NO: 3594796 - RNA, 22 nt, Human
auagcucaguuuauccaaggug

SEQ ID NO: 3594797 - RNA, 21 nt, Human
auagcucuaauguuugcauau

SEQ ID NO: 3594798 - RNA, 12 nt, Human
auagcucugggg

SEQ ID NO: 3594799 - RNA, 20 nt, Human
auagcucuuuggcagucuau

SEQ ID NO: 3594800 - RNA, 19 nt, Human
auagcugacccagccccuu

SEQ ID NO: 3594801 - RNA, 21 nt, Human
auagcugagauuccugguucg

SEQ ID NO: 3594802 - RNA, 18 nt, Human
auagcugcauguggcuuu

SEQ ID NO: 3594803 - RNA, 19 nt, Human
auagcugcccauuucguga

SEQ ID NO: 3594804 - RNA, 17 nt, Human
auagcugcuuccagugu

SEQ ID NO: 3594805 - RNA, 17 nt, Human
auagcuggcaagaaugg

SEQ ID NO: 3594806 - RNA, 15 nt, Human
auagcuguacuucuu

SEQ ID NO: 3594807 - RNA, 18 nt, Human
auagcuguauugaaucau

SEQ ID NO: 3594808 - RNA, 22 nt, Human
auagcuucaccccaaucccagc

SEQ ID NO: 3594809 - RNA, 19 nt, Human
auagcuugcgcauucucau

SEQ ID NO: 3594810 - RNA, 22 nt, Human
auagcuuuauuuuuuaaguauu

SEQ ID NO: 3594811 - RNA, 14 nt, Human
auaggaaaaacuga

SEQ ID NO: 3594812 - RNA, 19 nt, Human
auaggaaaaguacauuuaa

SEQ ID NO: 3594813 - RNA, 21 nt, Human
auaggaaaguauuuuuuuaag

SEQ ID NO: 3594814 - RNA, 21 nt, Human
auaggaacauaugaaaauaca

SEQ ID NO: 3594815 - RNA, 17 nt, Human
auaggaaggucauuucc

SEQ ID NO: 3594816 - RNA, 19 nt, Human
auaggaaggucauuuccau

SEQ ID NO: 3594817 - RNA, 22 nt, Human
auaggaaguuagccuuuaucua

SEQ ID NO: 3594818 - RNA, 20 nt, Human
auaggaaucauucagaaaug

SEQ ID NO: 3594819 - RNA, 15 nt, Human
auaggagacuuguag

SEQ ID NO: 3594820 - RNA, 22 nt, Human
auaggagagagaucaugagaaa

SEQ ID NO: 3594821 - RNA, 19 nt, Human
auaggagaggaugagagcc

SEQ ID NO: 3594822 - RNA, 20 nt, Human
auaggagaggaugagagccc

SEQ ID NO: 3594823 - RNA, 17 nt, Human
auaggagggaaaccuuu

SEQ ID NO: 3594824 - RNA, 23 nt, Human
auaggaucauuuguuggaaugaa

SEQ ID NO: 3594825 - RNA, 21 nt, Human
auaggauuuauuuaaaauagc

SEQ ID NO: 3594826 - RNA, 23 nt, Human
auaggauuuauuuaaaauagcaa

SEQ ID NO: 3594827 - RNA, 16 nt, Human
auaggauuuuuagaau

SEQ ID NO: 3594828 - RNA, 14 nt, Human
auaggcaaauuaau

SEQ ID NO: 3594829 - RNA, 17 nt, Human
auaggcacaggaaacca

SEQ ID NO: 3594830 - RNA, 22 nt, Human
auaggcaccuaccaccacgccc

SEQ ID NO: 3594831 - RNA, 15 nt, Human
auaggcaccuuuuac

SEQ ID NO: 3594832 - RNA, 17 nt, Human
auaggcagacuggguuu

SEQ ID NO: 3594833 - RNA, 20 nt, Human
auaggcaggaagcccaauug

SEQ ID NO: 3594834 - RNA, 22 nt, Human
auaggccaaacuggcaaacuuc

SEQ ID NO: 3594835 - RNA, 15 nt, Human
auaggcccacacaca

SEQ ID NO: 3594836 - RNA, 18 nt, Human
auaggcccacacacaggu

SEQ ID NO: 3594837 - RNA, 17 nt, Human
auaggcguaacuaauuu

SEQ ID NO: 3594838 - RNA, 18 nt, Human
auaggcuauuaaaaaagu

SEQ ID NO: 3594839 - RNA, 18 nt, Human
auaggcuauuuucuaaag

SEQ ID NO: 3594840 - RNA, 21 nt, Human
auaggcuauuuucuaaagacu

SEQ ID NO: 3594841 - RNA, 22 nt, Human
auaggcuauuuucuaaagacuu

SEQ ID NO: 3594842 - RNA, 11 nt, Human
auaggcucugc

SEQ ID NO: 3594843 - RNA, 12 nt, Human
auaggcucugca

SEQ ID NO: 3594844 - RNA, 14 nt, Human
auaggcucugcaca

SEQ ID NO: 3594845 - RNA, 22 nt, Human
auaggcucugcacagauggauu

SEQ ID NO: 3594846 - RNA, 13 nt, Human
auaggcuggagaa

SEQ ID NO: 3594847 - RNA, 21 nt, Human
auaggcuggagaagcucaccc

SEQ ID NO: 3594848 - RNA, 15 nt, Human
auaggcuuuuuaauc

SEQ ID NO: 3594849 - RNA, 16 nt, Human
auagggaaaauucuaa

SEQ ID NO: 3594850 - RNA, 17 nt, Human
auagggaauauaucucu

SEQ ID NO: 3594851 - RNA, 23 nt, Human
auagggcaauuaauuccuucagc

SEQ ID NO: 3594852 - RNA, 17 nt, Human
auaggggauauuuaagg

SEQ ID NO: 3594853 - RNA, 20 nt, Human
auaggguuugugacagggcg

SEQ ID NO: 3594854 - RNA, 14 nt, Human
auagguaaucaaug

SEQ ID NO: 3594855 - RNA, 18 nt, Human
auagguagaauguaaagc

SEQ ID NO: 3594856 - RNA, 23 nt, Human
auagguagaauguaaagcuuguc

SEQ ID NO: 3594857 - RNA, 16 nt, Human
auaggucacuggcucu

SEQ ID NO: 3594858 - RNA, 17 nt, Human
auaggucacuggcucuc

SEQ ID NO: 3594859 - RNA, 22 nt, Human
auaggucacuggcucuccaagu

SEQ ID NO: 3594860 - RNA, 18 nt, Human
auagguccagaaguccuu

SEQ ID NO: 3594861 - RNA, 12 nt, Human
auaagaaaagau

SEQ ID NO: 3594862 - RNA, 18 nt, Human
auaagaaaagauguagau

SEQ ID NO: 3594863 - RNA, 22 nt, Human
auaagaaaagauguagauuuau

SEQ ID NO: 3594864 - RNA, 13 nt, Human
auaagaaacuuuu

SEQ ID NO: 3594865 - RNA, 22 nt, Human
auaagaaacuuuuuuauuuaaa

SEQ ID NO: 3594866 - RNA, 15 nt, Human
auaagaaagccugag

SEQ ID NO: 3594867 - RNA, 22 nt, Human
auaagaaagugcgaguccucca

SEQ ID NO: 3594868 - RNA, 17 nt, Human
auaagaaaugcauaugu

SEQ ID NO: 3594869 - RNA, 15 nt, Human
auaagaagaaugcuu

SEQ ID NO: 3594870 - RNA, 22 nt, Human
auaagaaugcugguuuuccuaa

SEQ ID NO: 3594871 - RNA, 12 nt, Human
auaagaauuugc

SEQ ID NO: 3594872 - RNA, 13 nt, Human
auaagaauuugca

SEQ ID NO: 3594873 - RNA, 23 nt, Human
auaagacauaacguuuuuccuuu

SEQ ID NO: 3594874 - RNA, 22 nt, Human
auaagacauaucucuaauucca

SEQ ID NO: 3594875 - RNA, 14 nt, Human
auaagagaaagaaa

SEQ ID NO: 3594876 - RNA, 19 nt, Human
auaagagagccuugguuca

SEQ ID NO: 3594877 - RNA, 19 nt, Human
auaagagagucauaaaccu

SEQ ID NO: 3594878 - RNA, 20 nt, Human
auaagagagucauaaaccuu

SEQ ID NO: 3594879 - RNA, 22 nt, Human
auaagagcaugaaauuuuuaaa

SEQ ID NO: 3594880 - RNA, 22 nt, Human
auaagagcuuccaauuuuccuu

SEQ ID NO: 3594881 - RNA, 17 nt, Human
auaagaugacuguguug

SEQ ID NO: 3594882 - RNA, 13 nt, Human
auaagauuagaau

SEQ ID NO: 3594883 - RNA, 20 nt, Human
auaagauuagaaugaaaauu

SEQ ID NO: 3594884 - RNA, 22 nt, Human
auaagauuccaaaaagcacaua

SEQ ID NO: 3594885 - RNA, 18 nt, Human
auaagcaaauugcuuuuu

SEQ ID NO: 3594886 - RNA, 21 nt, Human
auaagcaaauuucaaaagaca

SEQ ID NO: 3594887 - RNA, 22 nt, Human
auaagcaaauuucaaaagacau

SEQ ID NO: 3594888 - RNA, 13 nt, Human
auaagcaacaauu

SEQ ID NO: 3594889 - RNA, 18 nt, Human
auaagcaacaauuuucag

SEQ ID NO: 3594890 - RNA, 19 nt, Human
auaagcaacaauuuucaga

SEQ ID NO: 3594891 - RNA, 20 nt, Human
auaagcaacaauuuucagau

SEQ ID NO: 3594892 - RNA, 15 nt, Human
auaagcaagagagau

SEQ ID NO: 3594893 - RNA, 17 nt, Human
auaagcacugugcuaau

SEQ ID NO: 3594894 - RNA, 16 nt, Human
auaagcagauuuaaca

SEQ ID NO: 3594895 - RNA, 16 nt, Human
auaagcagguggaucu

SEQ ID NO: 3594896 - RNA, 15 nt, Human
auaagcaguuaugug

SEQ ID NO: 3594897 - RNA, 17 nt, Human
auaagcaucauuauuua

SEQ ID NO: 3594898 - RNA, 19 nt, Human
auaagccaauuuuucugca

SEQ ID NO: 3594899 - RNA, 22 nt, Human
auaagccagacaucaacagaua

SEQ ID NO: 3594900 - RNA, 20 nt, Human
auaagccaguguugccuaag

SEQ ID NO: 3594901 - RNA, 16 nt, Human
auaagccaugagaaug

SEQ ID NO: 3594902 - RNA, 21 nt, Human
auaagccuccauuuaguucuu

SEQ ID NO: 3594903 - RNA, 13 nt, Human
auaagcuaaagag

SEQ ID NO: 3594904 - RNA, 17 nt, Human
auaagcuaaagaggcug

SEQ ID NO: 3594905 - RNA, 17 nt, Human
auaagcuacuagcaaaa

SEQ ID NO: 3594906 - RNA, 18 nt, Human
auaagcuaguugaauacu

SEQ ID NO: 3594907 - RNA, 21 nt, Human
auaagcuaguugaauacuuga

SEQ ID NO: 3594908 - RNA, 22 nt, Human
auaagcuauuugauguaauacu

SEQ ID NO: 3594909 - RNA, 16 nt, Human
auaagcuauuuuucua

SEQ ID NO: 3594910 - RNA, 15 nt, Human
auaagcucagaaucc

SEQ ID NO: 3594911 - RNA, 14 nt, Human
auaccagguugaaa

SEQ ID NO: 3594912 - RNA, 17 nt, Human
auaccagugaaccaaag

SEQ ID NO: 3594913 - RNA, 21 nt, Human
auaccauacucauuucuaaaa

SEQ ID NO: 3594914 - RNA, 18 nt, Human
auaccauuaaaacugcuu

SEQ ID NO: 3594915 - RNA, 20 nt, Human
auaccauuauuaucaaguag

SEQ ID NO: 3594916 - RNA, 22 nt, Human
auaccauucagaucacugaauu

SEQ ID NO: 3594917 - RNA, 22 nt, Human
auaccauuuaguaagaauacca

SEQ ID NO: 3594918 - RNA, 15 nt, Human
auaccauuuccguaa

SEQ ID NO: 3594919 - RNA, 20 nt, Human
auaccauuuuuuaaggaaac

SEQ ID NO: 3594920 - RNA, 22 nt, Human
auaccauuuuuuaaggaaacaa

SEQ ID NO: 3594921 - RNA, 14 nt, Human
auacccaaauccuc

SEQ ID NO: 3594922 - RNA, 23 nt, Human
auacccaaauccucuccagcuau

SEQ ID NO: 3594923 - RNA, 14 nt, Human
auacccacccagaa

SEQ ID NO: 3594924 - RNA, 14 nt, Human
auacccacccccac

SEQ ID NO: 3594925 - RNA, 16 nt, Human
auacccacccccaccc

SEQ ID NO: 3594926 - RNA, 17 nt, Human
auacccacccccaccca

SEQ ID NO: 3594927 - RNA, 17 nt, Human
auacccagaaaguuauu

SEQ ID NO: 3594928 - RNA, 18 nt, Human
auacccauagcuuccaug

SEQ ID NO: 3594929 - RNA, 21 nt, Human
auacccccugcaaagcccagc

SEQ ID NO: 3594930 - RNA, 16 nt, Human
auacccucccucccua

SEQ ID NO: 3594931 - RNA, 22 nt, Human
auacccucccucccuacccuaa

SEQ ID NO: 3594932 - RNA, 19 nt, Human
auacccuggccgcccccug

SEQ ID NO: 3594933 - RNA, 19 nt, Human
auacccuucuuuuaugagc

SEQ ID NO: 3594934 - RNA, 15 nt, Human
auaccuaaguacugu

SEQ ID NO: 3594935 - RNA, 16 nt, Human
auaccuaaguacugua

SEQ ID NO: 3594936 - RNA, 21 nt, Human
auaccuaaguacuguaauaau

SEQ ID NO: 3594937 - RNA, 22 nt, Human
auaccuaaguacuguaauaaua

SEQ ID NO: 3594938 - RNA, 17 nt, Human
auaccuauaaugugugu

SEQ ID NO: 3594939 - RNA, 18 nt, Human
auaccuauaaugugugua

SEQ ID NO: 3594940 - RNA, 19 nt, Human
auaccuauaauguguguau

SEQ ID NO: 3594941 - RNA, 14 nt, Human
auaccucaauguuu

SEQ ID NO: 3594942 - RNA, 16 nt, Human
auaccucaauguuuga

SEQ ID NO: 3594943 - RNA, 15 nt, Human
auaccucacccugcu

SEQ ID NO: 3594944 - RNA, 19 nt, Human
auaccucaggaaagaauag

SEQ ID NO: 3594945 - RNA, 11 nt, Human
auaccugcccu

SEQ ID NO: 3594946 - RNA, 14 nt, Human
auaccugucccccu

SEQ ID NO: 3594947 - RNA, 17 nt, Human
auaccuguuuaaauugc

SEQ ID NO: 3594948 - RNA, 16 nt, Human
auaccuuaaaauuuga

SEQ ID NO: 3594949 - RNA, 20 nt, Human
auaccuuccuucccugggcu

SEQ ID NO: 3594950 - RNA, 14 nt, Human
auaccuuuuauuuu

SEQ ID NO: 3594951 - RNA, 14 nt, Human
auacgaaacacaaa

SEQ ID NO: 3594952 - RNA, 13 nt, Human
auacgacuuuauu

SEQ ID NO: 3594953 - RNA, 17 nt, Human
auacgagagcagagguc

SEQ ID NO: 3594954 - RNA, 13 nt, Human
auacgauaaauaa

SEQ ID NO: 3594955 - RNA, 20 nt, Human
auacgccagaacugcuuuau

SEQ ID NO: 3594956 - RNA, 21 nt, Human
auacgccuguaguccuagcca

SEQ ID NO: 3594957 - RNA, 19 nt, Human
auacgcuacuauaaagaga

SEQ ID NO: 3594958 - RNA, 14 nt, Human
auacgcucagcuca

SEQ ID NO: 3594959 - RNA, 22 nt, Human
auacgcuuuuaaugaaaaggaa

SEQ ID NO: 3594960 - RNA, 13 nt, Human
auacguacacauu

SEQ ID NO: 3594961 - RNA, 18 nt, Human
auacgugggcauucaaau

SEQ ID NO: 3594962 - RNA, 18 nt, Human
auacguuuuucaguuuca

SEQ ID NO: 3594963 - RNA, 19 nt, Human
auacuaaaaagaagugcug

SEQ ID NO: 3594964 - RNA, 14 nt, Human
auacuaaaauaugu

SEQ ID NO: 3594965 - RNA, 20 nt, Human
auacuaaccagcagaaaugc

SEQ ID NO: 3594966 - RNA, 21 nt, Human
auacuaaccagcagaaaugcc

SEQ ID NO: 3594967 - RNA, 17 nt, Human
auacuaagcauugaaug

SEQ ID NO: 3594968 - RNA, 22 nt, Human
auacuagauuugggagaagggc

SEQ ID NO: 3594969 - RNA, 16 nt, Human
auacuagccagagcuc

SEQ ID NO: 3594970 - RNA, 22 nt, Human
auacuagccagagcuccuccuu

SEQ ID NO: 3594971 - RNA, 20 nt, Human
auacuagggagccauuugag

SEQ ID NO: 3594972 - RNA, 21 nt, Human
auacuagggagccauuugaga

SEQ ID NO: 3594973 - RNA, 14 nt, Human
auacuauauuuaug

SEQ ID NO: 3594974 - RNA, 17 nt, Human
auacuauggaauuucuc

SEQ ID NO: 3594975 - RNA, 23 nt, Human
auacuauguggaugugacagugg

SEQ ID NO: 3594976 - RNA, 21 nt, Human
auacuauuaaaaagguuuaca

SEQ ID NO: 3594977 - RNA, 22 nt, Human
auacuauuuaaagccuccucau

SEQ ID NO: 3594978 - RNA, 13 nt, Human
auacuauuuaaga

SEQ ID NO: 3594979 - RNA, 21 nt, Human
auacuauuuaagaugugaaaa

SEQ ID NO: 3594980 - RNA, 22 nt, Human
auacuauuuaagaugugaaaau

SEQ ID NO: 3594981 - RNA, 15 nt, Human
auacuauuuuuacug

SEQ ID NO: 3594982 - RNA, 19 nt, Human
auacuauuuuuacugccac

SEQ ID NO: 3594983 - RNA, 19 nt, Human
auacucaaaugaguaacau

SEQ ID NO: 3594984 - RNA, 20 nt, Human
auacucaaaugaguaacauu

SEQ ID NO: 3594985 - RNA, 12 nt, Human
auacucagccug

SEQ ID NO: 3594986 - RNA, 17 nt, Human
auacucagccugcugcc

SEQ ID NO: 3594987 - RNA, 16 nt, Human
auacucauaaugugaa

SEQ ID NO: 3594988 - RNA, 15 nt, Human
auacucauccuugua

SEQ ID NO: 3594989 - RNA, 11 nt, Human
auacucaugug

SEQ ID NO: 3594990 - RNA, 13 nt, Human
auacucauuagaa

SEQ ID NO: 3594991 - RNA, 20 nt, Human
auacucauuucuaaaagaau

SEQ ID NO: 3594992 - RNA, 23 nt, Human
auacucauuucuaaaagaauauu

SEQ ID NO: 3594993 - RNA, 14 nt, Human
auacucauuucuua

SEQ ID NO: 3594994 - RNA, 13 nt, Human
auacuccagugua

SEQ ID NO: 3594995 - RNA, 21 nt, Human
auacuccaguguacauagugu

SEQ ID NO: 3594996 - RNA, 14 nt, Human
auacucccaucugu

SEQ ID NO: 3594997 - RNA, 16 nt, Human
auacuccuaugcuuua

SEQ ID NO: 3594998 - RNA, 17 nt, Human
auacuccuccaagguua

SEQ ID NO: 3594999 - RNA, 14 nt, Human
auacucuaauucua

SEQ ID NO: 3595000 - RNA, 16 nt, Human
auacucuaauucuaac

SEQ ID NO: 3595001 - RNA, 17 nt, Human
auacucuagaugaaguu

SEQ ID NO: 3595002 - RNA, 15 nt, Human
auacucuagauuuug

SEQ ID NO: 3595003 - RNA, 22 nt, Human
auacucuagauuuuguuuugcu

SEQ ID NO: 3595004 - RNA, 20 nt, Human
auacucucaccauuuggauc

SEQ ID NO: 3595005 - RNA, 15 nt, Human
auacucuuucuguau

SEQ ID NO: 3595006 - RNA, 16 nt, Human
auacucuuucuguaua

SEQ ID NO: 3595007 - RNA, 12 nt, Human
auacugaaccac

SEQ ID NO: 3595008 - RNA, 18 nt, Human
auacugaaccacuuguag

SEQ ID NO: 3595009 - RNA, 11 nt, Human
auacugaagau

SEQ ID NO: 3595010 - RNA, 22 nt, Human
auacugaaggaaaaacacaagc

SEQ ID NO: 3595011 - RNA, 22 nt, Human
auacugacuccaaccauucaaa

SEQ ID NO: 3595012 - RNA, 17 nt, Human
auacugagaaaaccugu

SEQ ID NO: 3595013 - RNA, 14 nt, Human
auacugagggacca

SEQ ID NO: 3595014 - RNA, 13 nt, Human
auacugauggaau

SEQ ID NO: 3595015 - RNA, 14 nt, Human
auacugcaagaaaa

SEQ ID NO: 3595016 - RNA, 13 nt, Human
auacugcacuuac

SEQ ID NO: 3595017 - RNA, 20 nt, Human
auacugcacuuacaauccca

SEQ ID NO: 3595018 - RNA, 15 nt, Human
auacugcauacuuuu

SEQ ID NO: 3595019 - RNA, 15 nt, Human
auacugccagaugcu

SEQ ID NO: 3595020 - RNA, 21 nt, Human
auacugccagaugcugauguu

SEQ ID NO: 3595021 - RNA, 22 nt, Human
auacugcccggggcagcugcca

SEQ ID NO: 3595022 - RNA, 22 nt, Human
auacugcuacagcaauuucuaa

SEQ ID NO: 3595023 - RNA, 16 nt, Human
auacugcuacuguaau

SEQ ID NO: 3595024 - RNA, 20 nt, Human
auacugcuacuguaauuuua

SEQ ID NO: 3595025 - RNA, 19 nt, Human
auacugcuugaauaaacac

SEQ ID NO: 3595026 - RNA, 20 nt, Human
auacugcuuggagcugagca

SEQ ID NO: 3595027 - RNA, 17 nt, Human
auacuggaaguuuugca

SEQ ID NO: 3595028 - RNA, 19 nt, Human
auacuggaaguuuugcauu

SEQ ID NO: 3595029 - RNA, 19 nt, Human
auacuggacucuucaaaaa

SEQ ID NO: 3595030 - RNA, 21 nt, Human
auacuggacucuucaaaaacu

SEQ ID NO: 3595031 - RNA, 13 nt, Human
auacuggcacaga

SEQ ID NO: 3595032 - RNA, 14 nt, Human
auacuggccuggac

SEQ ID NO: 3595033 - RNA, 14 nt, Human
auacuggcugguga

SEQ ID NO: 3595034 - RNA, 13 nt, Human
auacuguaaagaa

SEQ ID NO: 3595035 - RNA, 15 nt, Human
auacuguaaagaaag

SEQ ID NO: 3595036 - RNA, 20 nt, Human
auacuguaaagaaagagaga

SEQ ID NO: 3595037 - RNA, 23 nt, Human
auacuguaaagaaagagagaaaa

SEQ ID NO: 3595038 - RNA, 12 nt, Human
auacuguaacac

SEQ ID NO: 3595039 - RNA, 20 nt, Human
auacuguacaaugacuuuau

SEQ ID NO: 3595040 - RNA, 14 nt, Human
auacuguacagggg

SEQ ID NO: 3595041 - RNA, 16 nt, Human
auacuguacuuaauaa

SEQ ID NO: 3595042 - RNA, 13 nt, Human
auacuguauuaag

SEQ ID NO: 3595043 - RNA, 22 nt, Human
auacuguauuaagagugaaaau

SEQ ID NO: 3595044 - RNA, 20 nt, Human
auacuguuauucuuugcacu

SEQ ID NO: 3595045 - RNA, 22 nt, Human
auacuguuauucuuugcacuuu

SEQ ID NO: 3595046 - RNA, 12 nt, Human
auacuguuugag

SEQ ID NO: 3595047 - RNA, 12 nt, Human
auacuuaaaugu

SEQ ID NO: 3595048 - RNA, 14 nt, Human
auacuuaaauguua

SEQ ID NO: 3595049 - RNA, 17 nt, Human
auacuuaaauguuaugu

SEQ ID NO: 3595050 - RNA, 23 nt, Human
auaugaguguggaagccggaggg

SEQ ID NO: 3595051 - RNA, 22 nt, Human
auaugauagcgggaaaaggaga

SEQ ID NO: 3595052 - RNA, 16 nt, Human
auaugaucugucugug

SEQ ID NO: 3595053 - RNA, 17 nt, Human
auaugaucugucugugg

SEQ ID NO: 3595054 - RNA, 13 nt, Human
auaugauucaaau

SEQ ID NO: 3595055 - RNA, 15 nt, Human
auaugauucugcuuu

SEQ ID NO: 3595056 - RNA, 14 nt, Human
auacuuaagcaaaa

SEQ ID NO: 3595057 - RNA, 23 nt, Human
auacuuacauucucuaauaagaa

SEQ ID NO: 3595058 - RNA, 17 nt, Human
auacuuagcaaaaagug

SEQ ID NO: 3595059 - RNA, 22 nt, Human
auacuuagcaaaguuuuaccug

SEQ ID NO: 3595060 - RNA, 14 nt, Human
auacuuauauuuuc

SEQ ID NO: 3595061 - RNA, 17 nt, Human
auacuuaucucucugug

SEQ ID NO: 3595062 - RNA, 20 nt, Human
auacuuaucucucugugcug

SEQ ID NO: 3595063 - RNA, 21 nt, Human
auacuucaugaaauccugggu

SEQ ID NO: 3595064 - RNA, 20 nt, Human
auacuucauuuaaaaaaauc

SEQ ID NO: 3595065 - RNA, 15 nt, Human
auacuucgacacugu

SEQ ID NO: 3595066 - RNA, 16 nt, Human
auacuugaaaauuaac

SEQ ID NO: 3595067 - RNA, 17 nt, Human
auacuugaacaaaaggg

SEQ ID NO: 3595068 - RNA, 18 nt, Human
auacuugaacaaaagggu

SEQ ID NO: 3595069 - RNA, 13 nt, Human
auacuugaaccau

SEQ ID NO: 3595070 - RNA, 16 nt, Human
auacuugaaccauaaa

SEQ ID NO: 3595071 - RNA, 21 nt, Human
auacuugaacguuuucuaauu

SEQ ID NO: 3595072 - RNA, 14 nt, Human
auacuugaacuugu

SEQ ID NO: 3595073 - RNA, 12 nt, Human
auacuuggauuu

SEQ ID NO: 3595074 - RNA, 17 nt, Human
auacuuggauuuaguuu

SEQ ID NO: 3595075 - RNA, 13 nt, Human
auacuuguaauua

SEQ ID NO: 3595076 - RNA, 16 nt, Human
auacuuguaauuaugg

SEQ ID NO: 3595077 - RNA, 13 nt, Human
auacuugucuguu

SEQ ID NO: 3595078 - RNA, 16 nt, Human
auacuugucuguuuua

SEQ ID NO: 3595079 - RNA, 18 nt, Human
auacuuguuguuuaaugu

SEQ ID NO: 3595080 - RNA, 15 nt, Human
auacuuguuuucaaa

SEQ ID NO: 3595081 - RNA, 19 nt, Human
auacuuguuuuuguaaaga

SEQ ID NO: 3595082 - RNA, 16 nt, Human
auacuuuaaaggaaaa

SEQ ID NO: 3595083 - RNA, 23 nt, Human
auacuuuaaaggaaaaaauguug

SEQ ID NO: 3595084 - RNA, 12 nt, Human
auacuuuacaug

SEQ ID NO: 3595085 - RNA, 14 nt, Human
auacuuuaguauga

SEQ ID NO: 3595086 - RNA, 23 nt, Human
auacuuugaaaggagaugucuug

SEQ ID NO: 3595087 - RNA, 22 nt, Human
auacuuugaauguguuucacag

SEQ ID NO: 3595088 - RNA, 22 nt, Human
auacuuugcagcacagcugaga

SEQ ID NO: 3595089 - RNA, 16 nt, Human
auacuuugcauugucu

SEQ ID NO: 3595090 - RNA, 21 nt, Human
auacuuuuacaaguaacaaaa

SEQ ID NO: 3595091 - RNA, 15 nt, Human
auacuuuuacucugc

SEQ ID NO: 3595092 - RNA, 16 nt, Human
auacuuuuacucugcc

SEQ ID NO: 3595093 - RNA, 12 nt, Human
auacuuuuccuu

SEQ ID NO: 3595094 - RNA, 16 nt, Human
auacuuuugcccuuug

SEQ ID NO: 3595095 - RNA, 20 nt, Human
auacuuuuuacaauuaaaaa

SEQ ID NO: 3595096 - RNA, 18 nt, Human
auacuuuuucuuuuguaa

SEQ ID NO: 3595097 - RNA, 17 nt, Human
auacuuuuuugaaauca

SEQ ID NO: 3595098 - RNA, 14 nt, Human
auacuuuuuuucac

SEQ ID NO: 3595099 - RNA, 15 nt, Human
auacuuuuuuucaca

SEQ ID NO: 3595100 - RNA, 17 nt, Human
auagaaaaaaacauucu

SEQ ID NO: 3595101 - RNA, 11 nt, Human
auagaaacaug

SEQ ID NO: 3595102 - RNA, 21 nt, Human
auagaaacucaccauguaaaa

SEQ ID NO: 3595103 - RNA, 23 nt, Human
auagaaacugucuagcacuuccu

SEQ ID NO: 3595104 - RNA, 16 nt, Human
auagaaagugccagaa

SEQ ID NO: 3595105 - RNA, 15 nt, Human
auagaaaguguucug

SEQ ID NO: 3595106 - RNA, 20 nt, Human
auagaaaguguucuguuaca

SEQ ID NO: 3595107 - RNA, 19 nt, Human
auagaaauaagugguuauu

SEQ ID NO: 3595108 - RNA, 19 nt, Human
auagaaaugcugguuuuuc

SEQ ID NO: 3595109 - RNA, 20 nt, Human
auagaaauggaaauuuugcu

SEQ ID NO: 3595110 - RNA, 16 nt, Human
auagaaauuuccagag

SEQ ID NO: 3595111 - RNA, 17 nt, Human
auagaacagagaaagag

SEQ ID NO: 3595112 - RNA, 14 nt, Human
auagaaccucuuug

SEQ ID NO: 3595113 - RNA, 18 nt, Human
auagaacucugaaaugaa

SEQ ID NO: 3595114 - RNA, 14 nt, Human
auagaacugaauga

SEQ ID NO: 3595115 - RNA, 18 nt, Human
auagaacuggauuuucag

SEQ ID NO: 3595116 - RNA, 14 nt, Human
auagaacuggguaa

SEQ ID NO: 3595117 - RNA, 15 nt, Human
auagaacuggguaaa

SEQ ID NO: 3595118 - RNA, 16 nt, Human
auagaacuggguaaau

SEQ ID NO: 3595119 - RNA, 20 nt, Human
auagaacuggguaaaugcaa

SEQ ID NO: 3595120 - RNA, 23 nt, Human
auagaagaaaaaagaaugucaga

SEQ ID NO: 3595121 - RNA, 15 nt, Human
auagaagaacugcaa

SEQ ID NO: 3595122 - RNA, 13 nt, Human
auagaagaaugca

SEQ ID NO: 3595123 - RNA, 17 nt, Human
auagaagaaugcaugcu

SEQ ID NO: 3595124 - RNA, 23 nt, Human
auagaagcugcagugguauuaau

SEQ ID NO: 3595125 - RNA, 16 nt, Human
auagaaggaggagagg

SEQ ID NO: 3595126 - RNA, 13 nt, Human
auagaagucuuca

SEQ ID NO: 3595127 - RNA, 20 nt, Human
auagaagucuucaugaaaug

SEQ ID NO: 3595128 - RNA, 21 nt, Human
auagaaguuuguccauuugua

SEQ ID NO: 3595129 - RNA, 22 nt, Human
auagaaguuuguccauuuguaa

SEQ ID NO: 3595130 - RNA, 19 nt, Human
auagaauaaaauuuuuaau

SEQ ID NO: 3595131 - RNA, 17 nt, Human
auagaauaaaggcaguu

SEQ ID NO: 3595132 - RNA, 22 nt, Human
auagaauaggcacuuuaaaaca

SEQ ID NO: 3595133 - RNA, 13 nt, Human
auagaauauuuau

SEQ ID NO: 3595134 - RNA, 19 nt, Human
auagaauauuuauuaccuc

SEQ ID NO: 3595135 - RNA, 22 nt, Human
auagaauauuuauuaccucuga

SEQ ID NO: 3595136 - RNA, 18 nt, Human
auagaaugguaucaauaa

SEQ ID NO: 3595137 - RNA, 17 nt, Human
auagaauguaaaugucu

SEQ ID NO: 3595138 - RNA, 22 nt, Human
auagaauuauuucacaaauaau

SEQ ID NO: 3595139 - RNA, 20 nt, Human
auagaauugcaauuuuaaca

SEQ ID NO: 3595140 - RNA, 14 nt, Human
auagacaauugagg

SEQ ID NO: 3595141 - RNA, 14 nt, Human
auagacacauacau

SEQ ID NO: 3595142 - RNA, 22 nt, Human
auagacacuccccgaagucuuu

SEQ ID NO: 3595143 - RNA, 15 nt, Human
auagacagcuuugac

SEQ ID NO: 3595144 - RNA, 16 nt, Human
auagacagcuuugacu

SEQ ID NO: 3595145 - RNA, 22 nt, Human
auagacaguuuguaaauguuau

SEQ ID NO: 3595146 - RNA, 12 nt, Human
auagacaugaaa

SEQ ID NO: 3595147 - RNA, 18 nt, Human
auagaccucuaguagcug

SEQ ID NO: 3595148 - RNA, 15 nt, Human
auagacuaaaugaaa

SEQ ID NO: 3595149 - RNA, 19 nt, Human
auagacuguaacuuccaaa

SEQ ID NO: 3595150 - RNA, 13 nt, Human
auagagaauguuc

SEQ ID NO: 3595151 - RNA, 14 nt, Human
auagagacuguaga

SEQ ID NO: 3595152 - RNA, 14 nt, Human
auagagagagacca

SEQ ID NO: 3595153 - RNA, 16 nt, Human
auagagauguuuuuaa

SEQ ID NO: 3595154 - RNA, 21 nt, Human
auagagcaaaauugauguguu

SEQ ID NO: 3595155 - RNA, 15 nt, Human
auagagcagaaauuc

SEQ ID NO: 3595156 - RNA, 22 nt, Human
auagaggauggucuuacagcag

SEQ ID NO: 3595157 - RNA, 19 nt, Human
auagaggcuaaauuacuca

SEQ ID NO: 3595158 - RNA, 20 nt, Human
auagaggcuagcuucugcuu

SEQ ID NO: 3595159 - RNA, 23 nt, Human
auagaggcuucuccgccagccuc

SEQ ID NO: 3595160 - RNA, 18 nt, Human
auagagguauauuggaag

SEQ ID NO: 3595161 - RNA, 22 nt, Human
auagaggugagggaagccugaa

SEQ ID NO: 3595162 - RNA, 17 nt, Human
auagaguacacugccug

SEQ ID NO: 3595163 - RNA, 13 nt, Human
auagagucuugcu

SEQ ID NO: 3595164 - RNA, 22 nt, Human
auagagugacuccaagaacaau

SEQ ID NO: 3595165 - RNA, 19 nt, Human
auagaguguacuuaacuau

SEQ ID NO: 3595166 - RNA, 16 nt, Human
auagaguguaguuuac

SEQ ID NO: 3595167 - RNA, 23 nt, Human
auagaguguaguuuacagaaaaa

SEQ ID NO: 3595168 - RNA, 21 nt, Human
auagauaaaacaucuuugaaa

SEQ ID NO: 3595169 - RNA, 18 nt, Human
auagauauaaauuuuuaa

SEQ ID NO: 3595170 - RNA, 14 nt, Human
auagauauaaugaa

SEQ ID NO: 3595171 - RNA, 23 nt, Human
auagauauaaugaacaaaauuau

SEQ ID NO: 3595172 - RNA, 15 nt, Human
auagaucacauaaca

SEQ ID NO: 3595173 - RNA, 12 nt, Human
auagaucuucug

SEQ ID NO: 3595174 - RNA, 16 nt, Human
auagaugcaagauauu

SEQ ID NO: 3595175 - RNA, 16 nt, Human
auagaugcuggcccag

SEQ ID NO: 3595176 - RNA, 15 nt, Human
auagaugggaaugaa

SEQ ID NO: 3595177 - RNA, 23 nt, Human
auagaugucccuuucuuggccag

SEQ ID NO: 3595178 - RNA, 18 nt, Human
auagaugucuagguacuu

SEQ ID NO: 3595179 - RNA, 13 nt, Human
auagaugucuuuu

SEQ ID NO: 3595180 - RNA, 21 nt, Human
auagaugucuuuuauagugga

SEQ ID NO: 3595181 - RNA, 14 nt, Human
auagauguugcuaa

SEQ ID NO: 3595182 - RNA, 20 nt, Human
auagauguugcuaacagcaa

SEQ ID NO: 3595183 - RNA, 13 nt, Human
auagauguuuccu

SEQ ID NO: 3595184 - RNA, 23 nt, Human
auagauguuuugguagauuaaau

SEQ ID NO: 3595185 - RNA, 12 nt, Human
auagauuaaauc

SEQ ID NO: 3595186 - RNA, 21 nt, Human
auagauuagaaaaauuccuaa

SEQ ID NO: 3595187 - RNA, 22 nt, Human
auagauuagagaguguugaaac

SEQ ID NO: 3595188 - RNA, 15 nt, Human
auagauuagauuaua

SEQ ID NO: 3595189 - RNA, 14 nt, Human
auagauuauaacuu

SEQ ID NO: 3595190 - RNA, 13 nt, Human
auagauucaccug

SEQ ID NO: 3595191 - RNA, 15 nt, Human
auagauucaccugua

SEQ ID NO: 3595192 - RNA, 14 nt, Human
auagauucuaaaga

SEQ ID NO: 3595193 - RNA, 14 nt, Human
auagauuguccuuu

SEQ ID NO: 3595194 - RNA, 19 nt, Human
auagauugugaauaaugau

SEQ ID NO: 3595195 - RNA, 20 nt, Human
auagauuuauuuuucaguuc

SEQ ID NO: 3595196 - RNA, 23 nt, Human
auagauuuauuuuucaguuccaa

SEQ ID NO: 3595197 - RNA, 19 nt, Human
auagauuucugauuuuaug

SEQ ID NO: 3595198 - RNA, 15 nt, Human
auagauuuuauaaga

SEQ ID NO: 3595199 - RNA, 23 nt, Human
auagcaaaacuuuuaaacuacag

SEQ ID NO: 3595200 - RNA, 16 nt, Human
auagcaaacuuggaau

SEQ ID NO: 3595201 - RNA, 22 nt, Human
auagcaaagcgacguuagucgu

SEQ ID NO: 3595202 - RNA, 14 nt, Human
auagcaaaugacau

SEQ ID NO: 3595203 - RNA, 14 nt, Human
auagcacagacccu

SEQ ID NO: 3595204 - RNA, 18 nt, Human
auagcacagacccugccc

SEQ ID NO: 3595205 - RNA, 14 nt, Human
auauuacaaaaaca

SEQ ID NO: 3595206 - RNA, 22 nt, Human
auauuacaaaaacaaaauaaaa

SEQ ID NO: 3595207 - RNA, 13 nt, Human
auauuacaaugau

SEQ ID NO: 3595208 - RNA, 15 nt, Human
auauuacaaugauca

SEQ ID NO: 3595209 - RNA, 20 nt, Human
auauuacacaaauacuuauu

SEQ ID NO: 3595210 - RNA, 19 nt, Human
auauuaccacagacauacu

SEQ ID NO: 3595211 - RNA, 22 nt, Human
auauuaccacagacauacuaac

SEQ ID NO: 3595212 - RNA, 16 nt, Human
auauuacuagcauaug

SEQ ID NO: 3595213 - RNA, 21 nt, Human
auauuacuguuuauuucuguu

SEQ ID NO: 3595214 - RNA, 17 nt, Human
auauuacuuuaacaugc

SEQ ID NO: 3595215 - RNA, 16 nt, Human
auauuacuuuaucacu

SEQ ID NO: 3595216 - RNA, 14 nt, Human
auauuagaaaacuu

SEQ ID NO: 3595217 - RNA, 15 nt, Human
auauuagaaaggcuc

SEQ ID NO: 3595218 - RNA, 14 nt, Human
auauuagaaguguu

SEQ ID NO: 3595219 - RNA, 16 nt, Human
auauuagacuucuguu

SEQ ID NO: 3595220 - RNA, 21 nt, Human
auauuagacuucuguuuucaa

SEQ ID NO: 3595221 - RNA, 13 nt, Human
auauuagaucaaa

SEQ ID NO: 3595222 - RNA, 15 nt, Human
auauuagaugugauu

SEQ ID NO: 3595223 - RNA, 17 nt, Human
auauuagaugugauuua

SEQ ID NO: 3595224 - RNA, 18 nt, Human
auauuagaugugauuuaa

SEQ ID NO: 3595225 - RNA, 20 nt, Human
auauuagaugugauuuaaua

SEQ ID NO: 3595226 - RNA, 19 nt, Human
auauuauaaaggauaaaga

SEQ ID NO: 3595227 - RNA, 17 nt, Human
auauuauaacuuaaaaa

SEQ ID NO: 3595228 - RNA, 22 nt, Human
auauuauaauuuuuuucaauau

SEQ ID NO: 3595229 - RNA, 15 nt, Human
auauuauauauauau

SEQ ID NO: 3595230 - RNA, 12 nt, Human
auauuauaugga

SEQ ID NO: 3595231 - RNA, 19 nt, Human
auauuauauggaaauauau

SEQ ID NO: 3595232 - RNA, 20 nt, Human
auauuauauggaaauauaua

SEQ ID NO: 3595233 - RNA, 13 nt, Human
auauuauauuugg

SEQ ID NO: 3595234 - RNA, 13 nt, Human
auauuaucuuuuc

SEQ ID NO: 3595235 - RNA, 23 nt, Human
auauuaugaagcuuuuaugugaa

SEQ ID NO: 3595236 - RNA, 21 nt, Human
auauuauguauuuauauuuug

SEQ ID NO: 3595237 - RNA, 17 nt, Human
auauuauguguuuccau

SEQ ID NO: 3595238 - RNA, 17 nt, Human
auauuauuacuuguaaa

SEQ ID NO: 3595239 - RNA, 19 nt, Human
auauuauuagaaauuagaa

SEQ ID NO: 3595240 - RNA, 19 nt, Human
auauuauuaguuuugauuu

SEQ ID NO: 3595241 - RNA, 22 nt, Human
auauuauuaguuuugauuuaau

SEQ ID NO: 3595242 - RNA, 18 nt, Human
auauuauuauaaucuuau

SEQ ID NO: 3595243 - RNA, 20 nt, Human
auauuauucaccauguaaaa

SEQ ID NO: 3595244 - RNA, 17 nt, Human
auauuauucauucauuu

SEQ ID NO: 3595245 - RNA, 22 nt, Human
auauuauuucuaggaagaauuu

SEQ ID NO: 3595246 - RNA, 12 nt, Human
auauuauuuggc

SEQ ID NO: 3595247 - RNA, 16 nt, Human
auauuauuuggcaguu

SEQ ID NO: 3595248 - RNA, 18 nt, Human
auauuauuuggcaguuug

SEQ ID NO: 3595249 - RNA, 18 nt, Human
auauuauuuguguuuccu

SEQ ID NO: 3595250 - RNA, 11 nt, Human
auauucaacca

SEQ ID NO: 3595251 - RNA, 17 nt, Human
auauucaaccauggacu

SEQ ID NO: 3595252 - RNA, 23 nt, Human
auauucaaccauggacuuuauaa

SEQ ID NO: 3595253 - RNA, 20 nt, Human
auauucaauaaagcugcuga

SEQ ID NO: 3595254 - RNA, 13 nt, Human
auauucacaucuu

SEQ ID NO: 3595255 - RNA, 16 nt, Human
auauucagauguaugu

SEQ ID NO: 3595256 - RNA, 13 nt, Human
auauucaggaagc

SEQ ID NO: 3595257 - RNA, 14 nt, Human
auauucaggaagcu

SEQ ID NO: 3595258 - RNA, 19 nt, Human
auauucaggaagcucaggg

SEQ ID NO: 3595259 - RNA, 22 nt, Human
auauucagugcuguggccuggg

SEQ ID NO: 3595260 - RNA, 23 nt, Human
auauucagugcuguggccugggc

SEQ ID NO: 3595261 - RNA, 19 nt, Human
auauucauaguagaacuuu

SEQ ID NO: 3595262 - RNA, 18 nt, Human
auauucaugcuucuuccu

SEQ ID NO: 3595263 - RNA, 19 nt, Human
auauucauguaaacaaaau

SEQ ID NO: 3595264 - RNA, 17 nt, Human
auauucauucauggacc

SEQ ID NO: 3595265 - RNA, 15 nt, Human
auauucauuguauaa

SEQ ID NO: 3595266 - RNA, 16 nt, Human
auauucauuguauaaa

SEQ ID NO: 3595267 - RNA, 21 nt, Human
auauucauuguauaaaaauag

SEQ ID NO: 3595268 - RNA, 13 nt, Human
auauucauuucaa

SEQ ID NO: 3595269 - RNA, 15 nt, Human
auauuccagaucuuu

SEQ ID NO: 3595270 - RNA, 16 nt, Human
auauuccauaguauau

SEQ ID NO: 3595271 - RNA, 17 nt, Human
auauuccauaguauauu

SEQ ID NO: 3595272 - RNA, 23 nt, Human
auauuccauaguauauuaaaaau

SEQ ID NO: 3595273 - RNA, 19 nt, Human
auauuccaugaauguauca

SEQ ID NO: 3595274 - RNA, 23 nt, Human
auauucccuagaaacuuccaaau

SEQ ID NO: 3595275 - RNA, 22 nt, Human
auauuccuauugugcaauguaa

SEQ ID NO: 3595276 - RNA, 21 nt, Human
auauuccugcauuugugaaau

SEQ ID NO: 3595277 - RNA, 14 nt, Human
auauucuaagacuu

SEQ ID NO: 3595278 - RNA, 23 nt, Human
auauucuaagacuuacucuaaga

SEQ ID NO: 3595279 - RNA, 22 nt, Human
auauucuauuacauuuucagug

SEQ ID NO: 3595280 - RNA, 14 nt, Human
auauucuauuuuac

SEQ ID NO: 3595281 - RNA, 16 nt, Human
auauucucagcagagu

SEQ ID NO: 3595282 - RNA, 18 nt, Human
auauucucagcagagugc

SEQ ID NO: 3595283 - RNA, 12 nt, Human
auauucucugua

SEQ ID NO: 3595284 - RNA, 13 nt, Human
auauucucuguac

SEQ ID NO: 3595285 - RNA, 13 nt, Human
auauucucuuugg

SEQ ID NO: 3595286 - RNA, 24 nt, Human
auauucugaagcaacauuuuagcu

SEQ ID NO: 3595287 - RNA, 21 nt, Human
auauucugcucuauuauauaa

SEQ ID NO: 3595288 - RNA, 21 nt, Human
auauucuggccagacucgaug

SEQ ID NO: 3595289 - RNA, 17 nt, Human
auauucuggcugauaaa

SEQ ID NO: 3595290 - RNA, 15 nt, Human
auauucuuucaaagg

SEQ ID NO: 3595291 - RNA, 16 nt, Human
auauugaaaaaaauaa

SEQ ID NO: 3595292 - RNA, 16 nt, Human
auauugaaaaaauaga

SEQ ID NO: 3595293 - RNA, 20 nt, Human
auauugaaaauugaaaagua

SEQ ID NO: 3595294 - RNA, 21 nt, Human
auauugaaaauugaaaaguac

SEQ ID NO: 3595295 - RNA, 18 nt, Human
auauugaacuuuuguacu

SEQ ID NO: 3595296 - RNA, 14 nt, Human
auauugaagacaau

SEQ ID NO: 3595297 - RNA, 15 nt, Human
auauugaagacaauu

SEQ ID NO: 3595298 - RNA, 17 nt, Human
auauugaagacaauuug

SEQ ID NO: 3595299 - RNA, 18 nt, Human
auauugaauauaauauau

SEQ ID NO: 3595300 - RNA, 16 nt, Human
auauugaauuuuuccu

SEQ ID NO: 3595301 - RNA, 21 nt, Human
auauugacaaguuuaaaggcu

SEQ ID NO: 3595302 - RNA, 15 nt, Human
auauugagacaaaaa

SEQ ID NO: 3595303 - RNA, 20 nt, Human
auauugagcaauaugucagu

SEQ ID NO: 3595304 - RNA, 13 nt, Human
auauugagcagaa

SEQ ID NO: 3595305 - RNA, 14 nt, Human
auauugagcagaau

SEQ ID NO: 3595306 - RNA, 21 nt, Human
auauugaggagcacugaaagu

SEQ ID NO: 3595307 - RNA, 17 nt, Human
auauugaggcuuugugu

SEQ ID NO: 3595308 - RNA, 19 nt, Human
auauugaggcuuuguguug

SEQ ID NO: 3595309 - RNA, 18 nt, Human
auauugauaagaucuuuu

SEQ ID NO: 3595310 - RNA, 22 nt, Human
auauugauccagaaagaaaacu

SEQ ID NO: 3595311 - RNA, 14 nt, Human
auauugaugaaaag

SEQ ID NO: 3595312 - RNA, 13 nt, Human
auauugaugugug

SEQ ID NO: 3595313 - RNA, 15 nt, Human
auauugauugggaaa

SEQ ID NO: 3595314 - RNA, 21 nt, Human
auauugauuuccguuaaaaua

SEQ ID NO: 3595315 - RNA, 19 nt, Human
auauugcaaaauacaugaa

SEQ ID NO: 3595316 - RNA, 17 nt, Human
auauugcacaauuauaa

SEQ ID NO: 3595317 - RNA, 15 nt, Human
auauugcacaugucu

SEQ ID NO: 3595318 - RNA, 16 nt, Human
auauugcacaugucuu

SEQ ID NO: 3595319 - RNA, 19 nt, Human
auauugcacaugucuuaau

SEQ ID NO: 3595320 - RNA, 20 nt, Human
auauugcacaugucuuaaug

SEQ ID NO: 3595321 - RNA, 16 nt, Human
auauugccaaugcuac

SEQ ID NO: 3595322 - RNA, 17 nt, Human
auauugcccaggcuggu

SEQ ID NO: 3595323 - RNA, 21 nt, Human
auauugcugaagaaucuacuu

SEQ ID NO: 3595324 - RNA, 18 nt, Human
auauugcugaaugcaaga

SEQ ID NO: 3595325 - RNA, 17 nt, Human
auauugcugauggugca

SEQ ID NO: 3595326 - RNA, 17 nt, Human
auauugcuguauagcuc

SEQ ID NO: 3595327 - RNA, 13 nt, Human
auauugcuuuuuc

SEQ ID NO: 3595328 - RNA, 18 nt, Human
auauugcuuuuucuaaug

SEQ ID NO: 3595329 - RNA, 22 nt, Human
auauugcuuuuucuaauguggu

SEQ ID NO: 3595330 - RNA, 19 nt, Human
auauuggguuccauucuca

SEQ ID NO: 3595331 - RNA, 21 nt, Human
auauugguauauccuuuucug

SEQ ID NO: 3595332 - RNA, 15 nt, Human
auauugguuuuauga

SEQ ID NO: 3595333 - RNA, 17 nt, Human
auauugguuuuaugaug

SEQ ID NO: 3595334 - RNA, 18 nt, Human
auauugguuuuaugauga

SEQ ID NO: 3595335 - RNA, 16 nt, Human
auauuguaaaacaggu

SEQ ID NO: 3595336 - RNA, 12 nt, Human
auauuguacacu

SEQ ID NO: 3595337 - RNA, 13 nt, Human
auauuguacauaa

SEQ ID NO: 3595338 - RNA, 14 nt, Human
auauuguacauaaa

SEQ ID NO: 3595339 - RNA, 16 nt, Human
auauuguacauaaaag

SEQ ID NO: 3595340 - RNA, 17 nt, Human
auauuguacauaaaaga

SEQ ID NO: 3595341 - RNA, 16 nt, Human
auauuguauuacuaga

SEQ ID NO: 3595342 - RNA, 18 nt, Human
auauugucauuccuguau

SEQ ID NO: 3595343 - RNA, 20 nt, Human
auauugucucuuuuuuaagu

SEQ ID NO: 3595344 - RNA, 19 nt, Human
aggagcagugcaggcacag

SEQ ID NO: 3595345 - RNA, 15 nt, Human
aggagccaccaguuc

SEQ ID NO: 3595346 - RNA, 17 nt, Human
aggagccaccaguucuc

SEQ ID NO: 3595347 - RNA, 12 nt, Human
aggagccaggca

SEQ ID NO: 3595348 - RNA, 13 nt, Human
aggagcccaggcc

SEQ ID NO: 3595349 - RNA, 20 nt, Human
aggagcccauacucagccug

SEQ ID NO: 3595350 - RNA, 16 nt, Human
aggagccccauuccug

SEQ ID NO: 3595351 - RNA, 13 nt, Human
aggagcccucauc

SEQ ID NO: 3595352 - RNA, 11 nt, Human
aggagcccugc

SEQ ID NO: 3595353 - RNA, 15 nt, Human
aggagcccugccucu

SEQ ID NO: 3595354 - RNA, 18 nt, Human
aggagcccugggaggcuc

SEQ ID NO: 3595355 - RNA, 19 nt, Human
aggagcccugggaggcucu

SEQ ID NO: 3595356 - RNA, 21 nt, Human
aggagcccuuaucugugcuca

SEQ ID NO: 3595357 - RNA, 23 nt, Human
aggagcccuucuauacccaccca

SEQ ID NO: 3595358 - RNA, 16 nt, Human
aggagccgaagcccag

SEQ ID NO: 3595359 - RNA, 18 nt, Human
aggagccgaagcccaggg

SEQ ID NO: 3595360 - RNA, 14 nt, Human
auagcacaggcuaa

SEQ ID NO: 3595361 - RNA, 17 nt, Human
auagcacaggcuaauuu

SEQ ID NO: 3595362 - RNA, 15 nt, Human
auagcacuuucauug

SEQ ID NO: 3595363 - RNA, 21 nt, Human
auagcacuuugaaauaccuca

SEQ ID NO: 3595364 - RNA, 22 nt, Human
auagcacuuugaaauaccucau

SEQ ID NO: 3595365 - RNA, 16 nt, Human
auagcagacaguguuu

SEQ ID NO: 3595366 - RNA, 14 nt, Human
auagcagauuuuaa

SEQ ID NO: 3595367 - RNA, 22 nt, Human
auagcagauuuuaauuuugaau

SEQ ID NO: 3595368 - RNA, 15 nt, Human
auagcagcaaaaaua

SEQ ID NO: 3595369 - RNA, 19 nt, Human
auagcagcaaaaauauaaa

SEQ ID NO: 3595370 - RNA, 13 nt, Human
auagcagccuuuc

SEQ ID NO: 3595371 - RNA, 19 nt, Human
auagcagccuuucucucuu

SEQ ID NO: 3595372 - RNA, 18 nt, Human
auagcaguauauguuaau

SEQ ID NO: 3595373 - RNA, 13 nt, Human
auagcaucacuua

SEQ ID NO: 3595374 - RNA, 17 nt, Human
auagcaucacuuaaaac

SEQ ID NO: 3595375 - RNA, 20 nt, Human
auagcaucacuuaaaacacg

SEQ ID NO: 3595376 - RNA, 17 nt, Human
auagcauccaaguggca

SEQ ID NO: 3595377 - RNA, 23 nt, Human
auagcauguauugugucuuuugc

SEQ ID NO: 3595378 - RNA, 13 nt, Human
auagcauuaacua

SEQ ID NO: 3595379 - RNA, 16 nt, Human
auagcauucucuauca

SEQ ID NO: 3595380 - RNA, 15 nt, Human
auagcauugucuauu

SEQ ID NO: 3595381 - RNA, 15 nt, Human
auagcauugugaacu

SEQ ID NO: 3595382 - RNA, 17 nt, Human
auagcauuuaugguaau

SEQ ID NO: 3595383 - RNA, 18 nt, Human
auagcauuuuugauuuau

SEQ ID NO: 3595384 - RNA, 19 nt, Human
auagcauuuuugauuuaug

SEQ ID NO: 3595385 - RNA, 12 nt, Human
auagccaaaaau

SEQ ID NO: 3595386 - RNA, 13 nt, Human
auagccaaaaaua

SEQ ID NO: 3595387 - RNA, 16 nt, Human
auagccacauuuggaa

SEQ ID NO: 3595388 - RNA, 22 nt, Human
auagccacauuuggaauacuuu

SEQ ID NO: 3595389 - RNA, 15 nt, Human
auagccacuaaccuu

SEQ ID NO: 3595390 - RNA, 21 nt, Human
auagccacuaaccuugccugg

SEQ ID NO: 3595391 - RNA, 20 nt, Human
auagccauauuuguaaaaug

SEQ ID NO: 3595392 - RNA, 22 nt, Human
auagccauauuuguaaaaugac

SEQ ID NO: 3595393 - RNA, 23 nt, Human
auagccauauuuguaaaaugaca

SEQ ID NO: 3595394 - RNA, 23 nt, Human
auagccauguaucauaauuacca

SEQ ID NO: 3595395 - RNA, 13 nt, Human
auagcccagacac

SEQ ID NO: 3595396 - RNA, 14 nt, Human
auagcccagaucag

SEQ ID NO: 3595397 - RNA, 20 nt, Human
auagcccaggauauauuuua

SEQ ID NO: 3595398 - RNA, 15 nt, Human
auagccccucucccc

SEQ ID NO: 3595399 - RNA, 19 nt, Human
auagccccucuccccgcag

SEQ ID NO: 3595400 - RNA, 14 nt, Human
auagccgggcaugg

SEQ ID NO: 3595401 - RNA, 16 nt, Human
auagccuauauuuaca

SEQ ID NO: 3595402 - RNA, 23 nt, Human
auagccucugucuggcaaugcca

SEQ ID NO: 3595403 - RNA, 18 nt, Human
auagccuggacugcuacc

SEQ ID NO: 3595404 - RNA, 18 nt, Human
auagcgucauaacuagaa

SEQ ID NO: 3595405 - RNA, 12 nt, Human
auagcgugugua

SEQ ID NO: 3595406 - RNA, 15 nt, Human
auagcguucuuguaa

SEQ ID NO: 3595407 - RNA, 17 nt, Human
auagcguucuuguaauu

SEQ ID NO: 3595408 - RNA, 18 nt, Human
auagcguucuuguaauuu

SEQ ID NO: 3595409 - RNA, 13 nt, Human
auagcuaaauacc

SEQ ID NO: 3595410 - RNA, 14 nt, Human
auagcuaaguacac

SEQ ID NO: 3595411 - RNA, 18 nt, Human
auagcuaaguacacaaua

SEQ ID NO: 3595412 - RNA, 16 nt, Human
auagcuacccaaaaga

SEQ ID NO: 3595413 - RNA, 17 nt, Human
auagcuacuaauuuuaa

SEQ ID NO: 3595414 - RNA, 18 nt, Human
auagcuagacuggugacu

SEQ ID NO: 3595415 - RNA, 12 nt, Human
auagcuauuuuu

SEQ ID NO: 3595416 - RNA, 18 nt, Human
auagcuauuuuuauggaa

SEQ ID NO: 3595417 - RNA, 19 nt, Human
auagcucaggugucccugc

SEQ ID NO: 3595418 - RNA, 21 nt, Human
auagcucaggugucccugcac

SEQ ID NO: 3595419 - RNA, 22 nt, Human
auagcucaggugucccugcacu

SEQ ID NO: 3595420 - RNA, 20 nt, Human
auagcuccccgcuucugccu

SEQ ID NO: 3595421 - RNA, 23 nt, Human
auagcuccccgcuucugccugca

SEQ ID NO: 3595422 - RNA, 15 nt, Human
auagcucuaauguuu

SEQ ID NO: 3595423 - RNA, 17 nt, Human
auagcucuaauguuugc

SEQ ID NO: 3595424 - RNA, 20 nt, Human
auagcucuaauguuugcaua

SEQ ID NO: 3595425 - RNA, 22 nt, Human
auagcucuaauguuugcauaua

SEQ ID NO: 3595426 - RNA, 19 nt, Human
auagcucuggggugggcag

SEQ ID NO: 3595427 - RNA, 14 nt, Human
auagcugaucaguu

SEQ ID NO: 3595428 - RNA, 21 nt, Human
auagcugcccauuucgugagc

SEQ ID NO: 3595429 - RNA, 12 nt, Human
auagcugcugcc

SEQ ID NO: 3595430 - RNA, 16 nt, Human
auagcuggcaagaaug

SEQ ID NO: 3595431 - RNA, 15 nt, Human
auagcuguacaaaua

SEQ ID NO: 3595432 - RNA, 22 nt, Human
auagcuguacuucuugaauaua

SEQ ID NO: 3595433 - RNA, 15 nt, Human
auagcuguauugaau

SEQ ID NO: 3595434 - RNA, 16 nt, Human
auagcuguauugaauc

SEQ ID NO: 3595435 - RNA, 16 nt, Human
auagcuuauuauugaa

SEQ ID NO: 3595436 - RNA, 14 nt, Human
auagcuuguauagu

SEQ ID NO: 3595437 - RNA, 17 nt, Human
auagcuuguauagugua

SEQ ID NO: 3595438 - RNA, 20 nt, Human
auagcuuguauaguguaaaa

SEQ ID NO: 3595439 - RNA, 10 nt, Human
auagcuuuau

SEQ ID NO: 3595440 - RNA, 15 nt, Human
auagcuuuauuuuuu

SEQ ID NO: 3595441 - RNA, 18 nt, Human
auagcuuuauuuuuuaag

SEQ ID NO: 3595442 - RNA, 15 nt, Human
auagcuuuuuucucu

SEQ ID NO: 3595443 - RNA, 12 nt, Human
auaggaaaaacu

SEQ ID NO: 3595444 - RNA, 17 nt, Human
auaggaaaaacugauuu

SEQ ID NO: 3595445 - RNA, 18 nt, Human
auaggaaaaguacauuua

SEQ ID NO: 3595446 - RNA, 21 nt, Human
auaggaaaugguauccagaau

SEQ ID NO: 3595447 - RNA, 19 nt, Human
auaggaacuuaaauaaugu

SEQ ID NO: 3595448 - RNA, 13 nt, Human
auaggaagacaca

SEQ ID NO: 3595449 - RNA, 18 nt, Human
auaggaaugugaaagcac

SEQ ID NO: 3595450 - RNA, 21 nt, Human
auaggaauugacccacaagaa

SEQ ID NO: 3595451 - RNA, 16 nt, Human
auaggaccuugggcca

SEQ ID NO: 3595452 - RNA, 17 nt, Human
auaggaccuugggccaa

SEQ ID NO: 3595453 - RNA, 15 nt, Human
auaggacuuguuuuu

SEQ ID NO: 3595454 - RNA, 21 nt, Human
auaggagaggaugagagccca

SEQ ID NO: 3595455 - RNA, 16 nt, Human
auaggagccugcuggu

SEQ ID NO: 3595456 - RNA, 19 nt, Human
auaggaugggcuucugugc

SEQ ID NO: 3595457 - RNA, 20 nt, Human
auaggcagacuggguuucua

SEQ ID NO: 3595458 - RNA, 23 nt, Human
auaggcccaaccaccagaugaga

SEQ ID NO: 3595459 - RNA, 16 nt, Human
auaggcccacacacag

SEQ ID NO: 3595460 - RNA, 17 nt, Human
auaggcccacacacagg

SEQ ID NO: 3595461 - RNA, 14 nt, Human
auaggccugggugc

SEQ ID NO: 3595462 - RNA, 13 nt, Human
auaggcucugcac

SEQ ID NO: 3595463 - RNA, 15 nt, Human
auaggcucugcacag

SEQ ID NO: 3595464 - RNA, 18 nt, Human
auaggcuggagaagcuca

SEQ ID NO: 3595465 - RNA, 15 nt, Human
auagggagaaaccaa

SEQ ID NO: 3595466 - RNA, 22 nt, Human
auagggcaauuaauuccuucag

SEQ ID NO: 3595467 - RNA, 22 nt, Human
auagggcccaugggagggagcu

SEQ ID NO: 3595468 - RNA, 14 nt, Human
auagggcugagcuc

SEQ ID NO: 3595469 - RNA, 16 nt, Human
auagggguguuuauuu

SEQ ID NO: 3595470 - RNA, 14 nt, Human
auagggucuaacuc

SEQ ID NO: 3595471 - RNA, 16 nt, Human
auagggucucuucagg

SEQ ID NO: 3595472 - RNA, 20 nt, Human
auagguaaucaaugaauauu

SEQ ID NO: 3595473 - RNA, 15 nt, Human
auaggucacuccugg

SEQ ID NO: 3595474 - RNA, 19 nt, Human
auaggucacuggcucucca

SEQ ID NO: 3595475 - RNA, 13 nt, Human
auaggucugaaau

SEQ ID NO: 3595476 - RNA, 14 nt, Human
auaggugcuacaaa

SEQ ID NO: 3595477 - RNA, 14 nt, Human
auagguuagauaua

SEQ ID NO: 3595478 - RNA, 16 nt, Human
auagguugagcaauuu

SEQ ID NO: 3595479 - RNA, 24 nt, Human
auagguuuggacaaaauggaauac

SEQ ID NO: 3595480 - RNA, 19 nt, Human
auagguuuuguuugcuauc

SEQ ID NO: 3595481 - RNA, 16 nt, Human
auaguaaaauucuacu

SEQ ID NO: 3595482 - RNA, 13 nt, Human
auaguaaaucacg

SEQ ID NO: 3595483 - RNA, 20 nt, Human
auaguaacugacaugauuag

SEQ ID NO: 3595484 - RNA, 21 nt, Human
auaguaacuucuuauggaauu

SEQ ID NO: 3595485 - RNA, 17 nt, Human
auaguaaguucagcacu

SEQ ID NO: 3595486 - RNA, 13 nt, Human
auaguaauauaau

SEQ ID NO: 3595487 - RNA, 13 nt, Human
auaguaauuugua

SEQ ID NO: 3595488 - RNA, 17 nt, Human
auaguaccaaucauuuu

SEQ ID NO: 3595489 - RNA, 17 nt, Human
auauuuuucacauaucu

SEQ ID NO: 3595490 - RNA, 15 nt, Human
auauuuuucuuaaaa

SEQ ID NO: 3595491 - RNA, 19 nt, Human
auauuuuucuuaaaaagua

SEQ ID NO: 3595492 - RNA, 18 nt, Human
auauuuuugguugucaau

SEQ ID NO: 3595493 - RNA, 23 nt, Human
auauuuuuguagcacugacagau

SEQ ID NO: 3595494 - RNA, 16 nt, Human
auauuuuuguuuguuu

SEQ ID NO: 3595495 - RNA, 23 nt, Human
auauuuuuuaaaauaagucugau

SEQ ID NO: 3595496 - RNA, 18 nt, Human
auauuuuuucagaaauau

SEQ ID NO: 3595497 - RNA, 18 nt, Human
auauuuuuuuccuuacau

SEQ ID NO: 3595498 - RNA, 19 nt, Human
auauuuuuuuccuuacaua

SEQ ID NO: 3595499 - RNA, 15 nt, Human
auauuuuuuuguaga

SEQ ID NO: 3595500 - RNA, 13 nt, Human
aucaaaaaggcuu

SEQ ID NO: 3595501 - RNA, 17 nt, Human
aucaaaaaggcuuauaa

SEQ ID NO: 3595502 - RNA, 16 nt, Human
aucaaaaauauuccau

SEQ ID NO: 3595503 - RNA, 21 nt, Human
aucaaaaccuuucaaauauca

SEQ ID NO: 3595504 - RNA, 21 nt, Human
aucaaaacuuucuuuucugga

SEQ ID NO: 3595505 - RNA, 14 nt, Human
aucaaaagaaagaa

SEQ ID NO: 3595506 - RNA, 16 nt, Human
aucaaaagacaauucu

SEQ ID NO: 3595507 - RNA, 18 nt, Human
aucaaaagggccaaagaa

SEQ ID NO: 3595508 - RNA, 18 nt, Human
aucaaaauaaaaagugac

SEQ ID NO: 3595509 - RNA, 14 nt, Human
aucaaaauagucua

SEQ ID NO: 3595510 - RNA, 15 nt, Human
aucaaaaucucucca

SEQ ID NO: 3595511 - RNA, 17 nt, Human
aucaaaaucucuccacu

SEQ ID NO: 3595512 - RNA, 22 nt, Human
aucaaaaugcuuuuuauuucug

SEQ ID NO: 3595513 - RNA, 12 nt, Human
aucaaaauuaca

SEQ ID NO: 3595514 - RNA, 18 nt, Human
aucaaacauggguuuagu

SEQ ID NO: 3595515 - RNA, 14 nt, Human
auagucaaagagag

SEQ ID NO: 3595516 - RNA, 14 nt, Human
auagucaaauugug

SEQ ID NO: 3595517 - RNA, 19 nt, Human
auagucaauggcuuguuca

SEQ ID NO: 3595518 - RNA, 18 nt, Human
auagucauuuauuuuaaa

SEQ ID NO: 3595519 - RNA, 12 nt, Human
auagucccugcc

SEQ ID NO: 3595520 - RNA, 13 nt, Human
auagucuguguga

SEQ ID NO: 3595521 - RNA, 22 nt, Human
auagucuuggaagcuguuugga

SEQ ID NO: 3595522 - RNA, 17 nt, Human
auagucuuuugcuuuug

SEQ ID NO: 3595523 - RNA, 13 nt, Human
auagugaauacug

SEQ ID NO: 3595524 - RNA, 18 nt, Human
auagugacuaugaacuuc

SEQ ID NO: 3595525 - RNA, 18 nt, Human
auagugacuuuucaagua

SEQ ID NO: 3595526 - RNA, 23 nt, Human
auagugacuuuucaaguauuuaa

SEQ ID NO: 3595527 - RNA, 21 nt, Human
auagugaggcaucgcaaugua

SEQ ID NO: 3595528 - RNA, 12 nt, Human
auagugcaauau

SEQ ID NO: 3595529 - RNA, 20 nt, Human
auagugcaauauauuuugua

SEQ ID NO: 3595530 - RNA, 16 nt, Human
auagugcuauauauau

SEQ ID NO: 3595531 - RNA, 19 nt, Human
auagugcuauauauauaaa

SEQ ID NO: 3595532 - RNA, 20 nt, Human
auagugcugggauggagggg

SEQ ID NO: 3595533 - RNA, 22 nt, Human
auagugcugggauggaggggag

SEQ ID NO: 3595534 - RNA, 22 nt, Human
auaguggacauuguuggcagca

SEQ ID NO: 3595535 - RNA, 13 nt, Human
auaguggccagac

SEQ ID NO: 3595536 - RNA, 15 nt, Human
auagugggauuucca

SEQ ID NO: 3595537 - RNA, 20 nt, Human
auagugggcaccccacugca

SEQ ID NO: 3595538 - RNA, 15 nt, Human
auaguggugugauuu

SEQ ID NO: 3595539 - RNA, 17 nt, Human
auagugguucuuggaaa

SEQ ID NO: 3595540 - RNA, 21 nt, Human
auagugguucuuggaaaaaug

SEQ ID NO: 3595541 - RNA, 13 nt, Human
auaguguaaaaua

SEQ ID NO: 3595542 - RNA, 19 nt, Human
auaguguagcugaggaggc

SEQ ID NO: 3595543 - RNA, 17 nt, Human
auaguguaggcuuuacu

SEQ ID NO: 3595544 - RNA, 16 nt, Human
auaguguccuaugcaa

SEQ ID NO: 3595545 - RNA, 18 nt, Human
auaguguccuaugcaaua

SEQ ID NO: 3595546 - RNA, 13 nt, Human
auagugugaggga

SEQ ID NO: 3595547 - RNA, 12 nt, Human
auaguguguucu

SEQ ID NO: 3595548 - RNA, 21 nt, Human
auaguguguugugcuuucaag

SEQ ID NO: 3595549 - RNA, 22 nt, Human
auaguguguugugcuuucaaga

SEQ ID NO: 3595550 - RNA, 15 nt, Human
auaguguuaaucaau

SEQ ID NO: 3595551 - RNA, 21 nt, Human
auaguguuaaucaauuuaaac

SEQ ID NO: 3595552 - RNA, 17 nt, Human
auaguuaacacacuacc

SEQ ID NO: 3595553 - RNA, 20 nt, Human
auaguuacuccagugccaac

SEQ ID NO: 3595554 - RNA, 15 nt, Human
auaguuacuguaaaa

SEQ ID NO: 3595555 - RNA, 21 nt, Human
auaguuacuguaaaaugcaaa

SEQ ID NO: 3595556 - RNA, 12 nt, Human
auaguuacugug

SEQ ID NO: 3595557 - RNA, 14 nt, Human
auaguuacugugua

SEQ ID NO: 3595558 - RNA, 16 nt, Human
auaguuacuguguaaa

SEQ ID NO: 3595559 - RNA, 18 nt, Human
auaguuacuguguaaacu

SEQ ID NO: 3595560 - RNA, 12 nt, Human
auaguuacuguu

SEQ ID NO: 3595561 - RNA, 14 nt, Human
auaguuauguaaau

SEQ ID NO: 3595562 - RNA, 17 nt, Human
auaguuauguaaauaau

SEQ ID NO: 3595563 - RNA, 19 nt, Human
auaguuauguaaauaauuc

SEQ ID NO: 3595564 - RNA, 15 nt, Human
auaguucaaagccaa

SEQ ID NO: 3595565 - RNA, 17 nt, Human
auaguucccauguuaaa

SEQ ID NO: 3595566 - RNA, 21 nt, Human
auaguuccuaagaagcuucua

SEQ ID NO: 3595567 - RNA, 23 nt, Human
auaguuccuaagaagcuucuaau

SEQ ID NO: 3595568 - RNA, 23 nt, Human
auaguucuagacauggagguucu

SEQ ID NO: 3595569 - RNA, 12 nt, Human
auaguucuaggc

SEQ ID NO: 3595570 - RNA, 21 nt, Human
auaguucuccaguuguaugga

SEQ ID NO: 3595571 - RNA, 12 nt, Human
auaguugaauua

SEQ ID NO: 3595572 - RNA, 17 nt, Human
auaguugagccagcaga

SEQ ID NO: 3595573 - RNA, 21 nt, Human
auaguugcauagcaguauaug

SEQ ID NO: 3595574 - RNA, 19 nt, Human
auaguugcuccgccucugc

SEQ ID NO: 3595575 - RNA, 19 nt, Human
auaguuguagacaaaguac

SEQ ID NO: 3595576 - RNA, 19 nt, Human
auaguuguccauauuuuca

SEQ ID NO: 3595577 - RNA, 18 nt, Human
auaguugugggugggaga

SEQ ID NO: 3595578 - RNA, 16 nt, Human
auaguuuacuauuuua

SEQ ID NO: 3595579 - RNA, 13 nt, Human
auaguuuauugac

SEQ ID NO: 3595580 - RNA, 19 nt, Human
auaguuucuuuauuuugug

SEQ ID NO: 3595581 - RNA, 17 nt, Human
auaguuuggcauuugca

SEQ ID NO: 3595582 - RNA, 20 nt, Human
auaguuugggcuucagccua

SEQ ID NO: 3595583 - RNA, 22 nt, Human
auaguuugggcuucagccuagu

SEQ ID NO: 3595584 - RNA, 13 nt, Human
auaguuugucuau

SEQ ID NO: 3595585 - RNA, 20 nt, Human
auaguuuuaaacucauuuuu

SEQ ID NO: 3595586 - RNA, 16 nt, Human
auaguuuuauuaauaa

SEQ ID NO: 3595587 - RNA, 18 nt, Human
auaguuuuauuuauauuu

SEQ ID NO: 3595588 - RNA, 23 nt, Human
auaguuuucauccauaacugaac

SEQ ID NO: 3595589 - RNA, 13 nt, Human
auaguuuugauga

SEQ ID NO: 3595590 - RNA, 20 nt, Human
auaguuuugaugacuggcau

SEQ ID NO: 3595591 - RNA, 20 nt, Human
auaguuuuuaagguuauuua

SEQ ID NO: 3595592 - RNA, 21 nt, Human
auaguuuuuaccuuuuaugua

SEQ ID NO: 3595593 - RNA, 22 nt, Human
auauaaaaagaaaagauaaaga

SEQ ID NO: 3595594 - RNA, 23 nt, Human
auauaaaaagaaaagauaaagau

SEQ ID NO: 3595595 - RNA, 19 nt, Human
auauaaaaauauauauagu

SEQ ID NO: 3595596 - RNA, 13 nt, Human
auauaaaacugcg

SEQ ID NO: 3595597 - RNA, 19 nt, Human
auauaaaagaucuugcaga

SEQ ID NO: 3595598 - RNA, 15 nt, Human
auauaaaauaaauau

SEQ ID NO: 3595599 - RNA, 18 nt, Human
auauaaaauaaauauaua

SEQ ID NO: 3595600 - RNA, 21 nt, Human
auauaaaauaaauauauauaa

SEQ ID NO: 3595601 - RNA, 12 nt, Human
auauaaaauaac

SEQ ID NO: 3595602 - RNA, 13 nt, Human
auauaaaauaacu

SEQ ID NO: 3595603 - RNA, 13 nt, Human
auauaaaauaaug

SEQ ID NO: 3595604 - RNA, 14 nt, Human
auauaaaauaugaa

SEQ ID NO: 3595605 - RNA, 13 nt, Human
auauaaaaugcca

SEQ ID NO: 3595606 - RNA, 14 nt, Human
auauaaaauggcaa

SEQ ID NO: 3595607 - RNA, 15 nt, Human
auauaaacacuauau

SEQ ID NO: 3595608 - RNA, 13 nt, Human
auauaaacagcuu

SEQ ID NO: 3595609 - RNA, 14 nt, Human
auauaaaccuaaaa

SEQ ID NO: 3595610 - RNA, 20 nt, Human
auauaaaccuaaaaaagaua

SEQ ID NO: 3595611 - RNA, 13 nt, Human
auauaaagaauau

SEQ ID NO: 3595612 - RNA, 14 nt, Human
auauaaagaauaua

SEQ ID NO: 3595613 - RNA, 15 nt, Human
auauaaagaauauau

SEQ ID NO: 3595614 - RNA, 13 nt, Human
auauaaagagaaa

SEQ ID NO: 3595615 - RNA, 15 nt, Human
auauaaagagaaaau

SEQ ID NO: 3595616 - RNA, 20 nt, Human
auauaaagagaaaauugaau

SEQ ID NO: 3595617 - RNA, 21 nt, Human
auauaaagagaaaauugaauu

SEQ ID NO: 3595618 - RNA, 14 nt, Human
auauaaagauguua

SEQ ID NO: 3595619 - RNA, 18 nt, Human
auauaaagcaucuaaacu

SEQ ID NO: 3595620 - RNA, 13 nt, Human
auauaaaggaaaa

SEQ ID NO: 3595621 - RNA, 17 nt, Human
auauaaaguuuuauaua

SEQ ID NO: 3595622 - RNA, 18 nt, Human
auauaaauaaaacauuuu

SEQ ID NO: 3595623 - RNA, 16 nt, Human
auauaaauaaauauau

SEQ ID NO: 3595624 - RNA, 12 nt, Human
auauaaauauau

SEQ ID NO: 3595625 - RNA, 13 nt, Human
auauaaauauaua

SEQ ID NO: 3595626 - RNA, 16 nt, Human
auauaaauauuagaaa

SEQ ID NO: 3595627 - RNA, 18 nt, Human
auauaaauggcugguuuu

SEQ ID NO: 3595628 - RNA, 12 nt, Human
auauaaauggga

SEQ ID NO: 3595629 - RNA, 14 nt, Human
auauaaaugggaac

SEQ ID NO: 3595630 - RNA, 19 nt, Human
auauaaaugggaacauuua

SEQ ID NO: 3595631 - RNA, 17 nt, Human
auauaaaugguuaaaag

SEQ ID NO: 3595632 - RNA, 13 nt, Human
auauaaauucugu

SEQ ID NO: 3595633 - RNA, 17 nt, Human
auauaaauuuuuuuugu

SEQ ID NO: 3595634 - RNA, 17 nt, Human
auauaacaaugcuguau

SEQ ID NO: 3595635 - RNA, 16 nt, Human
auccaaucucaaggaa

SEQ ID NO: 3595636 - RNA, 19 nt, Human
auccaaucuuguuuccaaa

SEQ ID NO: 3595637 - RNA, 22 nt, Human
auccaauguuagagacuuuuuu

SEQ ID NO: 3595638 - RNA, 17 nt, Human
auccacaauaaccaaga

SEQ ID NO: 3595639 - RNA, 16 nt, Human
auccacacacagagga

SEQ ID NO: 3595640 - RNA, 17 nt, Human
auccacagagaguccca

SEQ ID NO: 3595641 - RNA, 19 nt, Human
auccacagagagucccacu

SEQ ID NO: 3595642 - RNA, 22 nt, Human
auccacauacccugaccuggcc

SEQ ID NO: 3595643 - RNA, 16 nt, Human
auccacaugaaaauaa

SEQ ID NO: 3595644 - RNA, 17 nt, Human
auccaccaccucccuca

SEQ ID NO: 3595645 - RNA, 16 nt, Human
auccacccaccucagc

SEQ ID NO: 3595646 - RNA, 13 nt, Human
auccacccagccc

SEQ ID NO: 3595647 - RNA, 19 nt, Human
auccaccguccccucccag

SEQ ID NO: 3595648 - RNA, 22 nt, Human
auccaccuccaucuucuuugca

SEQ ID NO: 3595649 - RNA, 14 nt, Human
auccaccuccuucu

SEQ ID NO: 3595650 - RNA, 17 nt, Human
auccaccugccuuggcu

SEQ ID NO: 3595651 - RNA, 13 nt, Human
auccaccugucuc

SEQ ID NO: 3595652 - RNA, 21 nt, Human
auccacguauuccccuuccca

SEQ ID NO: 3595653 - RNA, 13 nt, Human
auccacucgccuu

SEQ ID NO: 3595654 - RNA, 18 nt, Human
auccacucuacccuccca

SEQ ID NO: 3595655 - RNA, 20 nt, Human
auccacucuacccucccacc

SEQ ID NO: 3595656 - RNA, 22 nt, Human
auccacucugcaggaaauaggc

SEQ ID NO: 3595657 - RNA, 21 nt, Human
auccacuggguguaaacacau

SEQ ID NO: 3595658 - RNA, 22 nt, Human
auccacuucuuucagcagacug

SEQ ID NO: 3595659 - RNA, 17 nt, Human
auccagaaaacugugau

SEQ ID NO: 3595660 - RNA, 10 nt, Human
auccagaaac

SEQ ID NO: 3595661 - RNA, 19 nt, Human
auccagaaacuuguucuuc

SEQ ID NO: 3595662 - RNA, 13 nt, Human
auccagaaagaaa

SEQ ID NO: 3595663 - RNA, 20 nt, Human
auccagaauugaccuuuuga

SEQ ID NO: 3595664 - RNA, 23 nt, Human
auccagacucagagcucucucua

SEQ ID NO: 3595665 - RNA, 19 nt, Human
auccagagauucauuuucu

SEQ ID NO: 3595666 - RNA, 22 nt, Human
auccagagauucauuuucuaga

SEQ ID NO: 3595667 - RNA, 19 nt, Human
auccagagucccugccugg

SEQ ID NO: 3595668 - RNA, 21 nt, Human
auccagagucccugccuggac

SEQ ID NO: 3595669 - RNA, 15 nt, Human
auccagaugguggga

SEQ ID NO: 3595670 - RNA, 16 nt, Human
auccagcagucucugc

SEQ ID NO: 3595671 - RNA, 17 nt, Human
auccagccucuccccug

SEQ ID NO: 3595672 - RNA, 12 nt, Human
auccagccuggg

SEQ ID NO: 3595673 - RNA, 19 nt, Human
auccagccuggggcugagg

SEQ ID NO: 3595674 - RNA, 15 nt, Human
auccagcuauguuau

SEQ ID NO: 3595675 - RNA, 14 nt, Human
auccagcucacuca

SEQ ID NO: 3595676 - RNA, 14 nt, Human
auccagcuggugag

SEQ ID NO: 3595677 - RNA, 11 nt, Human
auccaggaccc

SEQ ID NO: 3595678 - RNA, 18 nt, Human
auccaggacccugccagg

SEQ ID NO: 3595679 - RNA, 14 nt, Human
auccaggagcucca

SEQ ID NO: 3595680 - RNA, 21 nt, Human
auccaggagcuccaguguccu

SEQ ID NO: 3595681 - RNA, 14 nt, Human
auccaggcagaucc

SEQ ID NO: 3595682 - RNA, 12 nt, Human
auccaggccacu

SEQ ID NO: 3595683 - RNA, 12 nt, Human
auccagggacag

SEQ ID NO: 3595684 - RNA, 20 nt, Human
auccagggacagaggcccca

SEQ ID NO: 3595685 - RNA, 21 nt, Human
auccagggacagaggccccag

SEQ ID NO: 3595686 - RNA, 23 nt, Human
auccagggaggcugguccuaugg

SEQ ID NO: 3595687 - RNA, 17 nt, Human
auccagggggcaagagg

SEQ ID NO: 3595688 - RNA, 14 nt, Human
auccagguaaucca

SEQ ID NO: 3595689 - RNA, 14 nt, Human
auccaggucaacag

SEQ ID NO: 3595690 - RNA, 20 nt, Human
auccaggucaacagaaugaa

SEQ ID NO: 3595691 - RNA, 21 nt, Human
auccaggucaacagaaugaaa

SEQ ID NO: 3595692 - RNA, 17 nt, Human
auccagguucagcuugu

SEQ ID NO: 3595693 - RNA, 18 nt, Human
auccaguacauuuaauug

SEQ ID NO: 3595694 - RNA, 16 nt, Human
auccaguaggauccag

SEQ ID NO: 3595695 - RNA, 21 nt, Human
auccaguaucuugaagacuuu

SEQ ID NO: 3595696 - RNA, 19 nt, Human
auccagugaccucucucuc

SEQ ID NO: 3595697 - RNA, 21 nt, Human
auccauaaagaagcaauaaag

SEQ ID NO: 3595698 - RNA, 14 nt, Human
auccauaacugaac

SEQ ID NO: 3595699 - RNA, 14 nt, Human
auccauacauuugu

SEQ ID NO: 3595700 - RNA, 16 nt, Human
auccauaccagcucgc

SEQ ID NO: 3595701 - RNA, 21 nt, Human
auccauacuaacccuuuucca

SEQ ID NO: 3595702 - RNA, 17 nt, Human
auccauaguaacugaca

SEQ ID NO: 3595703 - RNA, 14 nt, Human
auccauagugacuu

SEQ ID NO: 3595704 - RNA, 22 nt, Human
auccauagugacuuuucaagua

SEQ ID NO: 3595705 - RNA, 23 nt, Human
auccauaucuuaaagaaacagcu

SEQ ID NO: 3595706 - RNA, 19 nt, Human
auccauauuaaguaagucu

SEQ ID NO: 3595707 - RNA, 18 nt, Human
auccauauuuuauuacug

SEQ ID NO: 3595708 - RNA, 13 nt, Human
auccaucaggcca

SEQ ID NO: 3595709 - RNA, 14 nt, Human
auccaucagugcca

SEQ ID NO: 3595710 - RNA, 14 nt, Human
auccaucaucaugu

SEQ ID NO: 3595711 - RNA, 17 nt, Human
auccauccagcuugcca

SEQ ID NO: 3595712 - RNA, 13 nt, Human
auauuauuuggca

SEQ ID NO: 3595713 - RNA, 14 nt, Human
auauuauuuggcag

SEQ ID NO: 3595714 - RNA, 17 nt, Human
auauuauuuguguuucc

SEQ ID NO: 3595715 - RNA, 14 nt, Human
auauuauuuuaugu

SEQ ID NO: 3595716 - RNA, 15 nt, Human
auauucacugggcca

SEQ ID NO: 3595717 - RNA, 12 nt, Human
auauucagaauu

SEQ ID NO: 3595718 - RNA, 18 nt, Human
auauucagacaaaaugga

SEQ ID NO: 3595719 - RNA, 22 nt, Human
auauucagacaaaauggauaca

SEQ ID NO: 3595720 - RNA, 14 nt, Human
auauucagagaaua

SEQ ID NO: 3595721 - RNA, 17 nt, Human
auauucagagaauauca

SEQ ID NO: 3595722 - RNA, 17 nt, Human
auauucaggaagcucag

SEQ ID NO: 3595723 - RNA, 19 nt, Human
auauucaggguaaauagga

SEQ ID NO: 3595724 - RNA, 14 nt, Human
auauucauauugga

SEQ ID NO: 3595725 - RNA, 17 nt, Human
auauucauauuggaaaa

SEQ ID NO: 3595726 - RNA, 23 nt, Human
auauucauuguauaaaaauagaa

SEQ ID NO: 3595727 - RNA, 21 nt, Human
auauuccagaucuuucagaaa

SEQ ID NO: 3595728 - RNA, 22 nt, Human
auauuccauaguauauuaaaaa

SEQ ID NO: 3595729 - RNA, 16 nt, Human
auauuccaugaaugua

SEQ ID NO: 3595730 - RNA, 17 nt, Human
auauuccuauugugcaa

SEQ ID NO: 3595731 - RNA, 23 nt, Human
auauuccuauugugcaauguaaa

SEQ ID NO: 3595732 - RNA, 17 nt, Human
auauuccugaaugaaau

SEQ ID NO: 3595733 - RNA, 22 nt, Human
auauuccugaaugaaauaucag

SEQ ID NO: 3595734 - RNA, 21 nt, Human
auauuccugcagccuggaggc

SEQ ID NO: 3595735 - RNA, 23 nt, Human
auauuccuuugcauauuauaaag

SEQ ID NO: 3595736 - RNA, 16 nt, Human
auauucuaaaaccauu

SEQ ID NO: 3595737 - RNA, 23 nt, Human
auauucuaagaaauaucugugaa

SEQ ID NO: 3595738 - RNA, 21 nt, Human
auauucuaguaauaaagacuc

SEQ ID NO: 3595739 - RNA, 15 nt, Human
auauucuauuuuuau

SEQ ID NO: 3595740 - RNA, 21 nt, Human
auauucucacagcuccaagaa

SEQ ID NO: 3595741 - RNA, 23 nt, Human
auauucucacagcuccaagaauu

SEQ ID NO: 3595742 - RNA, 15 nt, Human
auauucucagcagag

SEQ ID NO: 3595743 - RNA, 14 nt, Human
auauucucuguaca

SEQ ID NO: 3595744 - RNA, 16 nt, Human
auauucucuguacaua

SEQ ID NO: 3595745 - RNA, 13 nt, Human
auauucuuauaaa

SEQ ID NO: 3595746 - RNA, 14 nt, Human
auauucuuauguau

SEQ ID NO: 3595747 - RNA, 23 nt, Human
auauucuuauguaugugaaaguu

SEQ ID NO: 3595748 - RNA, 15 nt, Human
auauucuugugcuuu

SEQ ID NO: 3595749 - RNA, 12 nt, Human
auauucuuucaa

SEQ ID NO: 3595750 - RNA, 13 nt, Human
auauucuuucaau

SEQ ID NO: 3595751 - RNA, 14 nt, Human
auauucuuuguuaa

SEQ ID NO: 3595752 - RNA, 20 nt, Human
auauucuuuguuaauuugga

SEQ ID NO: 3595753 - RNA, 14 nt, Human
auauugaaaauuga

SEQ ID NO: 3595754 - RNA, 23 nt, Human
auauugaaaauugaaaaguacaa

SEQ ID NO: 3595755 - RNA, 20 nt, Human
auauugaaaggcaaacauuu

SEQ ID NO: 3595756 - RNA, 12 nt, Human
auauugaacuuu

SEQ ID NO: 3595757 - RNA, 18 nt, Human
auauugaauguuuccaac

SEQ ID NO: 3595758 - RNA, 12 nt, Human
auauugacauuu

SEQ ID NO: 3595759 - RNA, 14 nt, Human
auauugacuuguau

SEQ ID NO: 3595760 - RNA, 15 nt, Human
auauugacuuguaua

SEQ ID NO: 3595761 - RNA, 16 nt, Human
auauugagcagaauuc

SEQ ID NO: 3595762 - RNA, 19 nt, Human
auauugaggccaagaauau

SEQ ID NO: 3595763 - RNA, 22 nt, Human
auauugaggccaagaauauugc

SEQ ID NO: 3595764 - RNA, 19 nt, Human
auauugauaagaucuuuua

SEQ ID NO: 3595765 - RNA, 15 nt, Human
auauugauaugcuua

SEQ ID NO: 3595766 - RNA, 13 nt, Human
auauugaugaaaa

SEQ ID NO: 3595767 - RNA, 19 nt, Human
auauugauugggaaaacau

SEQ ID NO: 3595768 - RNA, 21 nt, Human
auauugauugggaaaacauuu

SEQ ID NO: 3595769 - RNA, 15 nt, Human
auauugauuuauuaa

SEQ ID NO: 3595770 - RNA, 19 nt, Human
auauugauuuccguuaaaa

SEQ ID NO: 3595771 - RNA, 22 nt, Human
auauugauuuccguuaaaauac

SEQ ID NO: 3595772 - RNA, 16 nt, Human
auauugauuucugccu

SEQ ID NO: 3595773 - RNA, 18 nt, Human
auauugcaaaauacauga

SEQ ID NO: 3595774 - RNA, 17 nt, Human
auauugcacaugucuua

SEQ ID NO: 3595775 - RNA, 21 nt, Human
auauugcacaugucuuaauga

SEQ ID NO: 3595776 - RNA, 20 nt, Human
auauugcauacuauuaaaca

SEQ ID NO: 3595777 - RNA, 17 nt, Human
auauugccauuaugcuu

SEQ ID NO: 3595778 - RNA, 16 nt, Human
auauugccgcacuagg

SEQ ID NO: 3595779 - RNA, 23 nt, Human
auauugccuaagaauaaacauuu

SEQ ID NO: 3595780 - RNA, 18 nt, Human
aucccauguaacagaaag

SEQ ID NO: 3595781 - RNA, 23 nt, Human
aucccauguaacagaaagggcaa

SEQ ID NO: 3595782 - RNA, 15 nt, Human
aucccauuuaaaaaa

SEQ ID NO: 3595783 - RNA, 23 nt, Human
auccccaaaacaggccaggugug

SEQ ID NO: 3595784 - RNA, 16 nt, Human
auccccaagccuggca

SEQ ID NO: 3595785 - RNA, 21 nt, Human
auccccaauaauugcagaacu

SEQ ID NO: 3595786 - RNA, 11 nt, Human
auccccacccu

SEQ ID NO: 3595787 - RNA, 14 nt, Human
auccccacccuggg

SEQ ID NO: 3595788 - RNA, 17 nt, Human
auccccaccugucuuca

SEQ ID NO: 3595789 - RNA, 16 nt, Human
auccccacgccacagc

SEQ ID NO: 3595790 - RNA, 16 nt, Human
auccccaucucccugc

SEQ ID NO: 3595791 - RNA, 20 nt, Human
auccccaucucccugccugg

SEQ ID NO: 3595792 - RNA, 14 nt, Human
aucccccaggagaa

SEQ ID NO: 3595793 - RNA, 20 nt, Human
auccccccaucuugcuuccc

SEQ ID NO: 3595794 - RNA, 12 nt, Human
aucccccugccc

SEQ ID NO: 3595795 - RNA, 14 nt, Human
aucccccuugccac

SEQ ID NO: 3595796 - RNA, 18 nt, Human
aucccccuugccacccca

SEQ ID NO: 3595797 - RNA, 18 nt, Human
auccccgcagugugcacu

SEQ ID NO: 3595798 - RNA, 18 nt, Human
auccccgccuggccagga

SEQ ID NO: 3595799 - RNA, 20 nt, Human
auccccgccuggccaggagc

SEQ ID NO: 3595800 - RNA, 22 nt, Human
auccccguuccugacaucacag

SEQ ID NO: 3595801 - RNA, 15 nt, Human
auccccucucccccc

SEQ ID NO: 3595802 - RNA, 20 nt, Human
auccccucugucuacaaaua

SEQ ID NO: 3595803 - RNA, 15 nt, Human
auccccuguagagug

SEQ ID NO: 3595804 - RNA, 13 nt, Human
auccccuuacccu

SEQ ID NO: 3595805 - RNA, 11 nt, Human
auccccuuccu

SEQ ID NO: 3595806 - RNA, 15 nt, Human
auccccuucuccccu

SEQ ID NO: 3595807 - RNA, 12 nt, Human
auccccuugaac

SEQ ID NO: 3595808 - RNA, 13 nt, Human
aucccgaagaaug

SEQ ID NO: 3595809 - RNA, 19 nt, Human
aucccgagcaccuccacau

SEQ ID NO: 3595810 - RNA, 17 nt, Human
aucccgagucugggaca

SEQ ID NO: 3595811 - RNA, 15 nt, Human
aucccgauucacccu

SEQ ID NO: 3595812 - RNA, 16 nt, Human
aucccgccaccuaucu

SEQ ID NO: 3595813 - RNA, 17 nt, Human
aucccggaggaaaucug

SEQ ID NO: 3595814 - RNA, 14 nt, Human
aucccggggguggg

SEQ ID NO: 3595815 - RNA, 14 nt, Human
aucccgugcuuuua

SEQ ID NO: 3595816 - RNA, 16 nt, Human
aucccguguucuccuu

SEQ ID NO: 3595817 - RNA, 18 nt, Human
aucccuaaugugugccau

SEQ ID NO: 3595818 - RNA, 15 nt, Human
aucccuacauguauu

SEQ ID NO: 3595819 - RNA, 21 nt, Human
aucccuagacuuuaggcuuuc

SEQ ID NO: 3595820 - RNA, 19 nt, Human
aucccuagucuucaagcag

SEQ ID NO: 3595821 - RNA, 17 nt, Human
aucccuaugggauucag

SEQ ID NO: 3595822 - RNA, 13 nt, Human
aucccucaccugu

SEQ ID NO: 3595823 - RNA, 14 nt, Human
aucccucaccugua

SEQ ID NO: 3595824 - RNA, 13 nt, Human
aucccucauccuc

SEQ ID NO: 3595825 - RNA, 21 nt, Human
aucccucauccucauacccac

SEQ ID NO: 3595826 - RNA, 17 nt, Human
aucccucaucugucccu

SEQ ID NO: 3595827 - RNA, 15 nt, Human
aucccuccccaguuc

SEQ ID NO: 3595828 - RNA, 18 nt, Human
aucccucccccccaugca

SEQ ID NO: 3595829 - RNA, 11 nt, Human
aucccucccuc

SEQ ID NO: 3595830 - RNA, 21 nt, Human
aucccucccuccaccucccug

SEQ ID NO: 3595831 - RNA, 15 nt, Human
aucccuccuguuggg

SEQ ID NO: 3595832 - RNA, 17 nt, Human
aucccuccuuaagagau

SEQ ID NO: 3595833 - RNA, 24 nt, Human
aucccucgauauuuuuaaagaucu

SEQ ID NO: 3595834 - RNA, 17 nt, Human
aucccucuacagagcuu

SEQ ID NO: 3595835 - RNA, 23 nt, Human
aucccucuacagagcuucccuga

SEQ ID NO: 3595836 - RNA, 15 nt, Human
aucccucuccuaacu

SEQ ID NO: 3595837 - RNA, 15 nt, Human
aucccucugggcacu

SEQ ID NO: 3595838 - RNA, 22 nt, Human
aucccugaaggccccgcccagg

SEQ ID NO: 3595839 - RNA, 22 nt, Human
aucccugaaucccccuugccac

SEQ ID NO: 3595840 - RNA, 16 nt, Human
aucccugaggcuggac

SEQ ID NO: 3595841 - RNA, 22 nt, Human
aucccugauaaauauucacacu

SEQ ID NO: 3595842 - RNA, 20 nt, Human
aucccugaucccauuuuccu

SEQ ID NO: 3595843 - RNA, 19 nt, Human
aucccugauccuaacugaa

SEQ ID NO: 3595844 - RNA, 16 nt, Human
aucccugcucacugca

SEQ ID NO: 3595845 - RNA, 12 nt, Human
aucccuggcccc

SEQ ID NO: 3595846 - RNA, 16 nt, Human
aucccuggcccccucc

SEQ ID NO: 3595847 - RNA, 16 nt, Human
aucccugggcauugcu

SEQ ID NO: 3595848 - RNA, 13 nt, Human
aucccugggccug

SEQ ID NO: 3595849 - RNA, 18 nt, Human
aucccugggccugcugcu

SEQ ID NO: 3595850 - RNA, 22 nt, Human
aucccugggccugcugcugaga

SEQ ID NO: 3595851 - RNA, 20 nt, Human
aucccuguguuaauuuaagu

SEQ ID NO: 3595852 - RNA, 17 nt, Human
aucccuguucauuguaa

SEQ ID NO: 3595853 - RNA, 18 nt, Human
aucccuguuuaauauuua

SEQ ID NO: 3595854 - RNA, 21 nt, Human
aucccuguuuaauauuuaaac

SEQ ID NO: 3595855 - RNA, 14 nt, Human
aucccuuaagaaug

SEQ ID NO: 3595856 - RNA, 21 nt, Human
aucccuuaagaaugaguuucu

SEQ ID NO: 3595857 - RNA, 20 nt, Human
aucccuuaauauccuaaaca

SEQ ID NO: 3595858 - RNA, 22 nt, Human
aucccuuccaccugcucugcug

SEQ ID NO: 3595859 - RNA, 14 nt, Human
aucccuucucuucc

SEQ ID NO: 3595860 - RNA, 15 nt, Human
aucccuucucuucca

SEQ ID NO: 3595861 - RNA, 17 nt, Human
aucccuucucuuccagg

SEQ ID NO: 3595862 - RNA, 22 nt, Human
aucccuucucuuccaggcagcc

SEQ ID NO: 3595863 - RNA, 20 nt, Human
aucccuuggacauuuuaugu

SEQ ID NO: 3595864 - RNA, 15 nt, Human
aucccuuuucuugac

SEQ ID NO: 3595865 - RNA, 18 nt, Human
aucccuuuuugaagugua

SEQ ID NO: 3595866 - RNA, 12 nt, Human
auccgaggcagg

SEQ ID NO: 3595867 - RNA, 13 nt, Human
auccgaggcaggg

SEQ ID NO: 3595868 - RNA, 23 nt, Human
aggcacacagcugcagagacaga

SEQ ID NO: 3595869 - RNA, 12 nt, Human
aggcacacuucu

SEQ ID NO: 3595870 - RNA, 16 nt, Human
aggcacagcaaacugu

SEQ ID NO: 3595871 - RNA, 21 nt, Human
aggcacagccggggccugccu

SEQ ID NO: 3595872 - RNA, 21 nt, Human
aggcacauggaauauauuuua

SEQ ID NO: 3595873 - RNA, 17 nt, Human
aggcaccaaaagaagua

SEQ ID NO: 3595874 - RNA, 14 nt, Human
aggcaccagugucc

SEQ ID NO: 3595875 - RNA, 14 nt, Human
aggcaccaucuccc

SEQ ID NO: 3595876 - RNA, 19 nt, Human
aggcaccauucaggaaccu

SEQ ID NO: 3595877 - RNA, 15 nt, Human
aggcacccaccauca

SEQ ID NO: 3595878 - RNA, 21 nt, Human
aggcacccaccaucaugucug

SEQ ID NO: 3595879 - RNA, 22 nt, Human
aggcacccaccaucaugucugg

SEQ ID NO: 3595880 - RNA, 21 nt, Human
aggcacccauccuagagaaaa

SEQ ID NO: 3595881 - RNA, 22 nt, Human
aggcacccauccuagagaaaac

SEQ ID NO: 3595882 - RNA, 15 nt, Human
aggcacccccuggag

SEQ ID NO: 3595883 - RNA, 16 nt, Human
aggcacccccuggaga

SEQ ID NO: 3595884 - RNA, 19 nt, Human
aggcacccccuggagagaa

SEQ ID NO: 3595885 - RNA, 15 nt, Human
aggcaccgagaaugu

SEQ ID NO: 3595886 - RNA, 18 nt, Human
aggcaccgagaauguugu

SEQ ID NO: 3595887 - RNA, 21 nt, Human
aggcaccuacacucaccugca

SEQ ID NO: 3595888 - RNA, 20 nt, Human
aggcaccuaccaccacgccc

SEQ ID NO: 3595889 - RNA, 17 nt, Human
aggcaccuagcaauucc

SEQ ID NO: 3595890 - RNA, 21 nt, Human
aggcaccuauaaaacagguca

SEQ ID NO: 3595891 - RNA, 20 nt, Human
aggcaccucacaggccccag

SEQ ID NO: 3595892 - RNA, 14 nt, Human
aggcaccucuuccu

SEQ ID NO: 3595893 - RNA, 20 nt, Human
aggcaccugguggccaugcu

SEQ ID NO: 3595894 - RNA, 13 nt, Human
aggcacuagccuu

SEQ ID NO: 3595895 - RNA, 17 nt, Human
aggcacucuagauucca

SEQ ID NO: 3595896 - RNA, 14 nt, Human
aggcacugccugau

SEQ ID NO: 3595897 - RNA, 14 nt, Human
aggcacugcugccc

SEQ ID NO: 3595898 - RNA, 23 nt, Human
aggcacugggggcagcgggggcc

SEQ ID NO: 3595899 - RNA, 16 nt, Human
aggcacuguacuaggc

SEQ ID NO: 3595900 - RNA, 14 nt, Human
aggcacuuauugua

SEQ ID NO: 3595901 - RNA, 18 nt, Human
aggcacuuauuguaaauu

SEQ ID NO: 3595902 - RNA, 15 nt, Human
aggcacuuggcagcc

SEQ ID NO: 3595903 - RNA, 18 nt, Human
aggcacuuggcagccuug

SEQ ID NO: 3595904 - RNA, 23 nt, Human
aggcagaaagcagaggcuggccu

SEQ ID NO: 3595905 - RNA, 14 nt, Human
aggcagaacccugg

SEQ ID NO: 3595906 - RNA, 22 nt, Human
aggcagaacccuggugaggaag

SEQ ID NO: 3595907 - RNA, 22 nt, Human
aggcagaacucaucuagguaaa

SEQ ID NO: 3595908 - RNA, 18 nt, Human
aggcagaauaagaaaaca

SEQ ID NO: 3595909 - RNA, 20 nt, Human
aggcagaauccuggcccucu

SEQ ID NO: 3595910 - RNA, 21 nt, Human
aggcagaauccuggcccucug

SEQ ID NO: 3595911 - RNA, 11 nt, Human
aggcagacacg

SEQ ID NO: 3595912 - RNA, 14 nt, Human
aggcagacagcagc

SEQ ID NO: 3595913 - RNA, 15 nt, Human
aggcagacagcagcu

SEQ ID NO: 3595914 - RNA, 18 nt, Human
aggcagacagcagcucag

SEQ ID NO: 3595915 - RNA, 19 nt, Human
aggcagacagcaggcagcg

SEQ ID NO: 3595916 - RNA, 23 nt, Human
aggcagacagcaggcagcgccaa

SEQ ID NO: 3595917 - RNA, 21 nt, Human
aggcagacucuuuaugcuugc

SEQ ID NO: 3595918 - RNA, 15 nt, Human
aggcagagaaagaag

SEQ ID NO: 3595919 - RNA, 13 nt, Human
aggcagagaaagg

SEQ ID NO: 3595920 - RNA, 13 nt, Human
aggcagagaaauc

SEQ ID NO: 3595921 - RNA, 14 nt, Human
aggcagagaagaaa

SEQ ID NO: 3595922 - RNA, 20 nt, Human
aggcagagagcggucucagg

SEQ ID NO: 3595923 - RNA, 21 nt, Human
aggcagaggcccaggcugccg

SEQ ID NO: 3595924 - RNA, 13 nt, Human
aggcagauacagg

SEQ ID NO: 3595925 - RNA, 16 nt, Human
auauuuucaauucaaa

SEQ ID NO: 3595926 - RNA, 17 nt, Human
auauuuucacaauguca

SEQ ID NO: 3595927 - RNA, 13 nt, Human
auauuuucauucu

SEQ ID NO: 3595928 - RNA, 17 nt, Human
auauuuucauucuccua

SEQ ID NO: 3595929 - RNA, 16 nt, Human
auauuuuccaugaaaa

SEQ ID NO: 3595930 - RNA, 24 nt, Human
auauuuuccuaguagaucuauauu

SEQ ID NO: 3595931 - RNA, 13 nt, Human
auauuuucugugu

SEQ ID NO: 3595932 - RNA, 16 nt, Human
auauuuucuguguguu

SEQ ID NO: 3595933 - RNA, 19 nt, Human
auauuuucuguguguuccu

SEQ ID NO: 3595934 - RNA, 21 nt, Human
auauuuucuuuaaaagacaaa

SEQ ID NO: 3595935 - RNA, 18 nt, Human
auauuuucuuuaaugcuu

SEQ ID NO: 3595936 - RNA, 13 nt, Human
auauuuucuuuuc

SEQ ID NO: 3595937 - RNA, 14 nt, Human
auauuuugaaucaa

SEQ ID NO: 3595938 - RNA, 17 nt, Human
auauuuugauaauaaua

SEQ ID NO: 3595939 - RNA, 18 nt, Human
auauuuugauaauaauau

SEQ ID NO: 3595940 - RNA, 19 nt, Human
auauuuugaucuucaacaa

SEQ ID NO: 3595941 - RNA, 22 nt, Human
auauuuugaucuucaacaaauu

SEQ ID NO: 3595942 - RNA, 21 nt, Human
auauuuugcacaguuagcaaa

SEQ ID NO: 3595943 - RNA, 21 nt, Human
auauuuuguauauaucugcuu

SEQ ID NO: 3595944 - RNA, 16 nt, Human
auauuuuguauuauug

SEQ ID NO: 3595945 - RNA, 18 nt, Human
auauuuuguauuauugcu

SEQ ID NO: 3595946 - RNA, 22 nt, Human
auauuuuguauuauugcuguug

SEQ ID NO: 3595947 - RNA, 17 nt, Human
auauuuugucuaaaaug

SEQ ID NO: 3595948 - RNA, 15 nt, Human
auauuuuuaauaaaa

SEQ ID NO: 3595949 - RNA, 13 nt, Human
auauuuuuagaua

SEQ ID NO: 3595950 - RNA, 17 nt, Human
auauuuuuauaauaaac

SEQ ID NO: 3595951 - RNA, 16 nt, Human
auauuuuuauauuuag

SEQ ID NO: 3595952 - RNA, 19 nt, Human
auauuuuuauauuuccuuu

SEQ ID NO: 3595953 - RNA, 22 nt, Human
auauuuuuaucuauauaaaaua

SEQ ID NO: 3595954 - RNA, 22 nt, Human
auauuuuuaucuuuauaugaag

SEQ ID NO: 3595955 - RNA, 16 nt, Human
auauuuuuauuuuauu

SEQ ID NO: 3595956 - RNA, 18 nt, Human
auauuuuucacauaucua

SEQ ID NO: 3595957 - RNA, 21 nt, Human
auauuuuucaugauuuugaaa

SEQ ID NO: 3595958 - RNA, 14 nt, Human
auauuuuucuuaaa

SEQ ID NO: 3595959 - RNA, 16 nt, Human
auauuuuuguagcacu

SEQ ID NO: 3595960 - RNA, 15 nt, Human
auauuuuuguuuguu

SEQ ID NO: 3595961 - RNA, 17 nt, Human
auauuuuuuaaaaaucu

SEQ ID NO: 3595962 - RNA, 15 nt, Human
auauuuuuuaaaaua

SEQ ID NO: 3595963 - RNA, 20 nt, Human
auauuuuuuguuaaaugauu

SEQ ID NO: 3595964 - RNA, 17 nt, Human
auauuuuuuuaacuuua

SEQ ID NO: 3595965 - RNA, 14 nt, Human
auauuuuuuuaagu

SEQ ID NO: 3595966 - RNA, 17 nt, Human
auauuuuuuuaagucuu

SEQ ID NO: 3595967 - RNA, 16 nt, Human
auauuuuuuuaauuua

SEQ ID NO: 3595968 - RNA, 21 nt, Human
auauuuuuuuccuuacauaaa

SEQ ID NO: 3595969 - RNA, 14 nt, Human
auauuuuuuucuga

SEQ ID NO: 3595970 - RNA, 18 nt, Human
auauuuuuuucugaaauu

SEQ ID NO: 3595971 - RNA, 19 nt, Human
auauuuuuuucugaaauuu

SEQ ID NO: 3595972 - RNA, 22 nt, Human
auauuuuuuuucuuuuuaccca

SEQ ID NO: 3595973 - RNA, 18 nt, Human
auauuuuuuuuuaagcuc

SEQ ID NO: 3595974 - RNA, 21 nt, Human
auauuuuuuuuuaagcucuga

SEQ ID NO: 3595975 - RNA, 12 nt, Human
aucaaaaauaau

SEQ ID NO: 3595976 - RNA, 16 nt, Human
aucaaaacaagugaaa

SEQ ID NO: 3595977 - RNA, 19 nt, Human
aucaaaacucacaagugcu

SEQ ID NO: 3595978 - RNA, 18 nt, Human
aucaaaagacaauucuuu

SEQ ID NO: 3595979 - RNA, 21 nt, Human
aucaaaagacaauucuuuaua

SEQ ID NO: 3595980 - RNA, 23 nt, Human
aucaaaagacaauucuuuauaca

SEQ ID NO: 3595981 - RNA, 22 nt, Human
aucaaaagggccaaagaaccaa

SEQ ID NO: 3595982 - RNA, 16 nt, Human
aucaaaauaaauugaa

SEQ ID NO: 3595983 - RNA, 23 nt, Human
aucaaaaucucuccacuuucagc

SEQ ID NO: 3595984 - RNA, 21 nt, Human
aucaaaaucuguagagcaggg

SEQ ID NO: 3595985 - RNA, 21 nt, Human
aucaaaaugcucuuauuucau

SEQ ID NO: 3595986 - RNA, 23 nt, Human
aucaaaaugcucuuauuucauca

SEQ ID NO: 3595987 - RNA, 14 nt, Human
aucaaaauuacaua

SEQ ID NO: 3595988 - RNA, 22 nt, Human
aucaaacaccaacauaaaaaug

SEQ ID NO: 3595989 - RNA, 21 nt, Human
aucaaacccuagccuugcuug

SEQ ID NO: 3595990 - RNA, 17 nt, Human
aucaaacugaagccaga

SEQ ID NO: 3595991 - RNA, 23 nt, Human
aucaaagagguuuuaaaaaaauc

SEQ ID NO: 3595992 - RNA, 16 nt, Human
aucaaagcaaugcauu

SEQ ID NO: 3595993 - RNA, 17 nt, Human
aucaaagcauagauguu

SEQ ID NO: 3595994 - RNA, 13 nt, Human
aucaaagccaggg

SEQ ID NO: 3595995 - RNA, 16 nt, Human
aucaaagccagggucu

SEQ ID NO: 3595996 - RNA, 12 nt, Human
aucaaaggacac

SEQ ID NO: 3595997 - RNA, 22 nt, Human
aucaaagucauuaaagacagga

SEQ ID NO: 3595998 - RNA, 11 nt, Human
aucaaagugcu

SEQ ID NO: 3595999 - RNA, 20 nt, Human
aucaaaguucugcuuucucc

SEQ ID NO: 3596000 - RNA, 21 nt, Human
aucaaauaaaaauucuagauu

SEQ ID NO: 3596001 - RNA, 15 nt, Human
aucaaauaaagagag

SEQ ID NO: 3596002 - RNA, 17 nt, Human
aucaaauaaguauuuau

SEQ ID NO: 3596003 - RNA, 22 nt, Human
aucaaauacuuuaaaggaaaaa

SEQ ID NO: 3596004 - RNA, 20 nt, Human
aucaaauagaaccacuauga

SEQ ID NO: 3596005 - RNA, 15 nt, Human
aucaaauaugcaaag

SEQ ID NO: 3596006 - RNA, 18 nt, Human
aucaaauaugcaaagcac

SEQ ID NO: 3596007 - RNA, 20 nt, Human
aucaaauaugcaaagcacug

SEQ ID NO: 3596008 - RNA, 21 nt, Human
aucaaauauuagaugugauuu

SEQ ID NO: 3596009 - RNA, 13 nt, Human
aucaaauguuuaa

SEQ ID NO: 3596010 - RNA, 17 nt, Human
aucaaauguuuaaucau

SEQ ID NO: 3596011 - RNA, 16 nt, Human
aucaaauuaauugugu

SEQ ID NO: 3596012 - RNA, 18 nt, Human
aucaaauucuacaacuuu

SEQ ID NO: 3596013 - RNA, 20 nt, Human
aucaaauuucacgucgucuu

SEQ ID NO: 3596014 - RNA, 22 nt, Human
aucaaauuucacgucgucuucu

SEQ ID NO: 3596015 - RNA, 21 nt, Human
aucaaauuuguaggguuucua

SEQ ID NO: 3596016 - RNA, 22 nt, Human
aucaacaauaaaauuuuuuuaa

SEQ ID NO: 3596017 - RNA, 22 nt, Human
aucaacagaagcauuuguauuu

SEQ ID NO: 3596018 - RNA, 14 nt, Human
aucaacagauaaau

SEQ ID NO: 3596019 - RNA, 19 nt, Human
aucaaccccuucgcuccug

SEQ ID NO: 3596020 - RNA, 21 nt, Human
aucaacuaaaguuguacuuua

SEQ ID NO: 3596021 - RNA, 19 nt, Human
auccgccagggcccacacc

SEQ ID NO: 3596022 - RNA, 15 nt, Human
auccgccuuuuguau

SEQ ID NO: 3596023 - RNA, 16 nt, Human
auccgcucucuuccug

SEQ ID NO: 3596024 - RNA, 19 nt, Human
auccgcucucuuccugccc

SEQ ID NO: 3596025 - RNA, 20 nt, Human
auccgcugccagccuugagc

SEQ ID NO: 3596026 - RNA, 13 nt, Human
auccggaaagaag

SEQ ID NO: 3596027 - RNA, 22 nt, Human
auccggaggagaagaaggaaau

SEQ ID NO: 3596028 - RNA, 18 nt, Human
auccguaguuauuuugca

SEQ ID NO: 3596029 - RNA, 16 nt, Human
auccguauauaucccc

SEQ ID NO: 3596030 - RNA, 21 nt, Human
auccgucuuuggccuccucca

SEQ ID NO: 3596031 - RNA, 18 nt, Human
auccuaaagaacaaagua

SEQ ID NO: 3596032 - RNA, 15 nt, Human
auccuaagaaauaug

SEQ ID NO: 3596033 - RNA, 21 nt, Human
auccuaagaaauaugugagau

SEQ ID NO: 3596034 - RNA, 23 nt, Human
auccuaagaaauaugugagauuu

SEQ ID NO: 3596035 - RNA, 20 nt, Human
auccuaagacacaaaugcau

SEQ ID NO: 3596036 - RNA, 18 nt, Human
auccuaagauguguucuu

SEQ ID NO: 3596037 - RNA, 18 nt, Human
auccuaagcaucuaaguu

SEQ ID NO: 3596038 - RNA, 18 nt, Human
auccuaagggucgaaagc

SEQ ID NO: 3596039 - RNA, 21 nt, Human
auccuaagggucgaaagcucu

SEQ ID NO: 3596040 - RNA, 19 nt, Human
auccuaaguuaccuuucua

SEQ ID NO: 3596041 - RNA, 22 nt, Human
auccuaauaaaaaggugaccau

SEQ ID NO: 3596042 - RNA, 19 nt, Human
auccuaaucauccaaugcu

SEQ ID NO: 3596043 - RNA, 12 nt, Human
auccuaaugaau

SEQ ID NO: 3596044 - RNA, 14 nt, Human
auccuacaagacac

SEQ ID NO: 3596045 - RNA, 21 nt, Human
auccuacaaggccuaugagua

SEQ ID NO: 3596046 - RNA, 14 nt, Human
auccuaccaaugca

SEQ ID NO: 3596047 - RNA, 15 nt, Human
auccuaccaaugcau

SEQ ID NO: 3596048 - RNA, 22 nt, Human
auccuaccacaaugcagugccu

SEQ ID NO: 3596049 - RNA, 24 nt, Human
auccuacgaguaauugcauuugcu

SEQ ID NO: 3596050 - RNA, 21 nt, Human
auccuagagauuugguguaca

SEQ ID NO: 3596051 - RNA, 15 nt, Human
auccuagauccuaag

SEQ ID NO: 3596052 - RNA, 13 nt, Human
auccuagauuaua

SEQ ID NO: 3596053 - RNA, 17 nt, Human
auccuagauuauaucaa

SEQ ID NO: 3596054 - RNA, 20 nt, Human
auccuagccuuauccucuga

SEQ ID NO: 3596055 - RNA, 22 nt, Human
auccuagccuuauccucugauc

SEQ ID NO: 3596056 - RNA, 14 nt, Human
auccuagcugugug

SEQ ID NO: 3596057 - RNA, 19 nt, Human
auccuagcugugugcaguc

SEQ ID NO: 3596058 - RNA, 17 nt, Human
auccuagggccuggguu

SEQ ID NO: 3596059 - RNA, 20 nt, Human
auccuagucucuaucauuaa

SEQ ID NO: 3596060 - RNA, 17 nt, Human
auccuaguuuccucucc

SEQ ID NO: 3596061 - RNA, 18 nt, Human
auccuaguuuccucuccu

SEQ ID NO: 3596062 - RNA, 13 nt, Human
auccuauauagaa

SEQ ID NO: 3596063 - RNA, 20 nt, Human
auccuauauagaaugcugca

SEQ ID NO: 3596064 - RNA, 20 nt, Human
auccuaucagccugucucuu

SEQ ID NO: 3596065 - RNA, 13 nt, Human
auccuaugcaaua

SEQ ID NO: 3596066 - RNA, 17 nt, Human
auccuaugcaugguuuc

SEQ ID NO: 3596067 - RNA, 12 nt, Human
auccuaugugau

SEQ ID NO: 3596068 - RNA, 21 nt, Human
aucaaucauuguacaguuugu

SEQ ID NO: 3596069 - RNA, 23 nt, Human
aucaauccugauuccucucuaag

SEQ ID NO: 3596070 - RNA, 16 nt, Human
aucaauccuuuauuau

SEQ ID NO: 3596071 - RNA, 16 nt, Human
aucaaucuugcaugua

SEQ ID NO: 3596072 - RNA, 22 nt, Human
aucaaucuuuaaaccaauugcu

SEQ ID NO: 3596073 - RNA, 16 nt, Human
aucaaugaauauugaa

SEQ ID NO: 3596074 - RNA, 18 nt, Human
aucaaugaauauugaagu

SEQ ID NO: 3596075 - RNA, 14 nt, Human
aucaaugaguguga

SEQ ID NO: 3596076 - RNA, 17 nt, Human
aucaaugugucuuucua

SEQ ID NO: 3596077 - RNA, 16 nt, Human
aucaauguucauugua

SEQ ID NO: 3596078 - RNA, 17 nt, Human
aucaauguucauuguaa

SEQ ID NO: 3596079 - RNA, 14 nt, Human
aucaauuaauuuuu

SEQ ID NO: 3596080 - RNA, 17 nt, Human
aucaauuauaguuucug

SEQ ID NO: 3596081 - RNA, 17 nt, Human
aucaauuuaaguguugg

SEQ ID NO: 3596082 - RNA, 14 nt, Human
aucacaaaguggaa

SEQ ID NO: 3596083 - RNA, 15 nt, Human
aucacaaaguggaac

SEQ ID NO: 3596084 - RNA, 24 nt, Human
aucacaaaguggaacgaaaaugaa

SEQ ID NO: 3596085 - RNA, 19 nt, Human
aucacaaauccaaaggaaa

SEQ ID NO: 3596086 - RNA, 11 nt, Human
aucacaaauga

SEQ ID NO: 3596087 - RNA, 12 nt, Human
aucacaaaugac

SEQ ID NO: 3596088 - RNA, 17 nt, Human
aucacaacacuggcuga

SEQ ID NO: 3596089 - RNA, 22 nt, Human
aucacaacgugcauugugcuuc

SEQ ID NO: 3596090 - RNA, 16 nt, Human
aucacaauuuuuaaug

SEQ ID NO: 3596091 - RNA, 11 nt, Human
aucacacacac

SEQ ID NO: 3596092 - RNA, 21 nt, Human
aucacacccagcccauguggc

SEQ ID NO: 3596093 - RNA, 22 nt, Human
aucacagagacauuccuccgag

SEQ ID NO: 3596094 - RNA, 14 nt, Human
aucacagcagcuuc

SEQ ID NO: 3596095 - RNA, 12 nt, Human
aucacagcugcu

SEQ ID NO: 3596096 - RNA, 18 nt, Human
aucacagcuuguuuugga

SEQ ID NO: 3596097 - RNA, 21 nt, Human
aucacaggcugggcugggcac

SEQ ID NO: 3596098 - RNA, 12 nt, Human
aucacagggccc

SEQ ID NO: 3596099 - RNA, 16 nt, Human
aucacagggccccaga

SEQ ID NO: 3596100 - RNA, 21 nt, Human
aucacagggccccagaaggca

SEQ ID NO: 3596101 - RNA, 17 nt, Human
aucacagggugggccuc

SEQ ID NO: 3596102 - RNA, 19 nt, Human
aucacaggguugggcccag

SEQ ID NO: 3596103 - RNA, 21 nt, Human
aucacaguuuugguugcuuua

SEQ ID NO: 3596104 - RNA, 13 nt, Human
aucacauguaugu

SEQ ID NO: 3596105 - RNA, 16 nt, Human
aucacauuauuugcau

SEQ ID NO: 3596106 - RNA, 22 nt, Human
aucacauugagcugauauaaau

SEQ ID NO: 3596107 - RNA, 19 nt, Human
aucaccacaguaaguuccu

SEQ ID NO: 3596108 - RNA, 13 nt, Human
aucaccagaauaa

SEQ ID NO: 3596109 - RNA, 21 nt, Human
aucaccagcccggccugcucc

SEQ ID NO: 3596110 - RNA, 20 nt, Human
aucaccccaaccccccaaaa

SEQ ID NO: 3596111 - RNA, 19 nt, Human
aucacccuuaccaugugcc

SEQ ID NO: 3596112 - RNA, 19 nt, Human
aucaccgugggcucccuga

SEQ ID NO: 3596113 - RNA, 20 nt, Human
aucaccuagcugaauguuuu

SEQ ID NO: 3596114 - RNA, 15 nt, Human
aucaccuauuuccau

SEQ ID NO: 3596115 - RNA, 15 nt, Human
aucaccucagauggc

SEQ ID NO: 3596116 - RNA, 14 nt, Human
aucaccucaggcca

SEQ ID NO: 3596117 - RNA, 19 nt, Human
aucaccuuagaccaccaag

SEQ ID NO: 3596118 - RNA, 16 nt, Human
aucaccuuaggcaggg

SEQ ID NO: 3596119 - RNA, 18 nt, Human
aucaccuuaggcagggaa

SEQ ID NO: 3596120 - RNA, 14 nt, Human
aucacgccacugca

SEQ ID NO: 3596121 - RNA, 23 nt, Human
aucacgccacugcacuccagccu

SEQ ID NO: 3596122 - RNA, 14 nt, Human
aucacgccuggcua

SEQ ID NO: 3596123 - RNA, 13 nt, Human
aucacgcuuuccu

SEQ ID NO: 3596124 - RNA, 22 nt, Human
aucacggucgccaccuggcauu

SEQ ID NO: 3596125 - RNA, 14 nt, Human
aucacguaaagcua

SEQ ID NO: 3596126 - RNA, 19 nt, Human
aucacguguacuggcuccu

SEQ ID NO: 3596127 - RNA, 17 nt, Human
aucacguuagaggaaaa

SEQ ID NO: 3596128 - RNA, 13 nt, Human
aucacuaacauua

SEQ ID NO: 3596129 - RNA, 14 nt, Human
aucacuaacauuau

SEQ ID NO: 3596130 - RNA, 21 nt, Human
aucacuaacauuauauugcaa

SEQ ID NO: 3596131 - RNA, 14 nt, Human
aucacuacugcagu

SEQ ID NO: 3596132 - RNA, 21 nt, Human
aucacuauccaugcaccaaac

SEQ ID NO: 3596133 - RNA, 15 nt, Human
aucacuaugcauuuu

SEQ ID NO: 3596134 - RNA, 14 nt, Human
aucacucagagcag

SEQ ID NO: 3596135 - RNA, 18 nt, Human
aucacucagagcagucug

SEQ ID NO: 3596136 - RNA, 14 nt, Human
aucacuccccucca

SEQ ID NO: 3596137 - RNA, 14 nt, Human
aucacucugcugcu

SEQ ID NO: 3596138 - RNA, 14 nt, Human
aucacucuugugga

SEQ ID NO: 3596139 - RNA, 21 nt, Human
aucacugaacuuugcugagcc

SEQ ID NO: 3596140 - RNA, 20 nt, Human
aucacugaauuuauaaagua

SEQ ID NO: 3596141 - RNA, 17 nt, Human
aucacugaguuuuccau

SEQ ID NO: 3596142 - RNA, 21 nt, Human
aucacugccagagauaaacua

SEQ ID NO: 3596143 - RNA, 14 nt, Human
aucacugcuugaug

SEQ ID NO: 3596144 - RNA, 10 nt, Human
aucacuggag

SEQ ID NO: 3596145 - RNA, 15 nt, Human
aucacuggagcccag

SEQ ID NO: 3596146 - RNA, 13 nt, Human
aucacuggaugaa

SEQ ID NO: 3596147 - RNA, 22 nt, Human
aucacuggcaaugaaaaauucu

SEQ ID NO: 3596148 - RNA, 23 nt, Human
aucacuggcaaugaaaaauucuc

SEQ ID NO: 3596149 - RNA, 18 nt, Human
aucacuguaucauuuucu

SEQ ID NO: 3596150 - RNA, 12 nt, Human
aucacugucuuu

SEQ ID NO: 3596151 - RNA, 16 nt, Human
aucacugucuuuccua

SEQ ID NO: 3596152 - RNA, 17 nt, Human
aucacuguguauauuug

SEQ ID NO: 3596153 - RNA, 19 nt, Human
aucacuguguauauuugau

SEQ ID NO: 3596154 - RNA, 17 nt, Human
aucacuguuuagauuug

SEQ ID NO: 3596155 - RNA, 18 nt, Human
aucacuguuuagauuugc

SEQ ID NO: 3596156 - RNA, 14 nt, Human
aucacuuaaaacac

SEQ ID NO: 3596157 - RNA, 17 nt, Human
aucacuuaaacuugcau

SEQ ID NO: 3596158 - RNA, 20 nt, Human
aucacuuaggaaauggcuuu

SEQ ID NO: 3596159 - RNA, 18 nt, Human
aucacuucugagaacuca

SEQ ID NO: 3596160 - RNA, 17 nt, Human
aucacuugaauccuagg

SEQ ID NO: 3596161 - RNA, 19 nt, Human
aucacuugaggucaggagu

SEQ ID NO: 3596162 - RNA, 17 nt, Human
aucacuuguacaaaaua

SEQ ID NO: 3596163 - RNA, 22 nt, Human
aucacuugucaauaaaauccau

SEQ ID NO: 3596164 - RNA, 16 nt, Human
aucacuuucucaguuu

SEQ ID NO: 3596165 - RNA, 21 nt, Human
aucacuuucucaguuuucaua

SEQ ID NO: 3596166 - RNA, 15 nt, Human
aucacuuugcucuga

SEQ ID NO: 3596167 - RNA, 16 nt, Human
aucacuuugucuaacu

SEQ ID NO: 3596168 - RNA, 15 nt, Human
aucacuuuucaguga

SEQ ID NO: 3596169 - RNA, 14 nt, Human
aucacuuuucugua

SEQ ID NO: 3596170 - RNA, 17 nt, Human
aucacuuuuugaacuaa

SEQ ID NO: 3596171 - RNA, 18 nt, Human
aucagaaaaauggagcaa

SEQ ID NO: 3596172 - RNA, 15 nt, Human
aucagaaaagggaag

SEQ ID NO: 3596173 - RNA, 16 nt, Human
aucagaaagcuuuauu

SEQ ID NO: 3596174 - RNA, 23 nt, Human
aucagaaagggagggcucugagg

SEQ ID NO: 3596175 - RNA, 21 nt, Human
auccuguguguuaagcucugc

SEQ ID NO: 3596176 - RNA, 14 nt, Human
auccuguguuucua

SEQ ID NO: 3596177 - RNA, 19 nt, Human
auccuguugaaaagccaug

SEQ ID NO: 3596178 - RNA, 18 nt, Human
auccuuaaguaucagaaa

SEQ ID NO: 3596179 - RNA, 19 nt, Human
auccuuaaguaucagaaag

SEQ ID NO: 3596180 - RNA, 18 nt, Human
auccuuagaucuggcaug

SEQ ID NO: 3596181 - RNA, 20 nt, Human
auccuuaucagagcuaaggg

SEQ ID NO: 3596182 - RNA, 23 nt, Human
auccuucaaagucucaaugaaau

SEQ ID NO: 3596183 - RNA, 16 nt, Human
auccuucacugcucac

SEQ ID NO: 3596184 - RNA, 18 nt, Human
auccuuccaaagaauucu

SEQ ID NO: 3596185 - RNA, 12 nt, Human
auccuuccacgg

SEQ ID NO: 3596186 - RNA, 16 nt, Human
auccuuccauuccaca

SEQ ID NO: 3596187 - RNA, 20 nt, Human
auccuuccauuccacacaga

SEQ ID NO: 3596188 - RNA, 23 nt, Human
auccuucccaaguaagaggcugg

SEQ ID NO: 3596189 - RNA, 12 nt, Human
auccuucccacu

SEQ ID NO: 3596190 - RNA, 16 nt, Human
auccuucccuuuggag

SEQ ID NO: 3596191 - RNA, 21 nt, Human
auccuucccuuuggagaugcu

SEQ ID NO: 3596192 - RNA, 12 nt, Human
auccuuccuaua

SEQ ID NO: 3596193 - RNA, 14 nt, Human
auccuuccuauaac

SEQ ID NO: 3596194 - RNA, 22 nt, Human
auccuuccuucccacccaucgc

SEQ ID NO: 3596195 - RNA, 23 nt, Human
auccuucgugaacauccccuccc

SEQ ID NO: 3596196 - RNA, 17 nt, Human
auccuucuaguuuccca

SEQ ID NO: 3596197 - RNA, 19 nt, Human
auccuucuaguuucccaca

SEQ ID NO: 3596198 - RNA, 14 nt, Human
auccuugaagguau

SEQ ID NO: 3596199 - RNA, 14 nt, Human
auccuugacuuuuu

SEQ ID NO: 3596200 - RNA, 22 nt, Human
auccuugccaauagugucaucc

SEQ ID NO: 3596201 - RNA, 17 nt, Human
auccuugggggcuccca

SEQ ID NO: 3596202 - RNA, 15 nt, Human
auccuuggucuuugu

SEQ ID NO: 3596203 - RNA, 17 nt, Human
auccuuggucuuuguau

SEQ ID NO: 3596204 - RNA, 16 nt, Human
auccuuguuucaaaca

SEQ ID NO: 3596205 - RNA, 23 nt, Human
auccuuguuucaaacacaaaugc

SEQ ID NO: 3596206 - RNA, 23 nt, Human
auccuuguuuugaaaaccuaaaa

SEQ ID NO: 3596207 - RNA, 21 nt, Human
auccuuguuuugugacauuuu

SEQ ID NO: 3596208 - RNA, 17 nt, Human
auccuuuaaaauuuaaa

SEQ ID NO: 3596209 - RNA, 17 nt, Human
auccuuuacguguuuaa

SEQ ID NO: 3596210 - RNA, 19 nt, Human
auccuuucacuucuuuccc

SEQ ID NO: 3596211 - RNA, 22 nt, Human
auccuuucacuucuuucccuuc

SEQ ID NO: 3596212 - RNA, 17 nt, Human
auccuuucauauaguua

SEQ ID NO: 3596213 - RNA, 14 nt, Human
aggcugcuuuccaa

SEQ ID NO: 3596214 - RNA, 15 nt, Human
aggcugcuuuccaaa

SEQ ID NO: 3596215 - RNA, 17 nt, Human
aggcugcuuuccaaagc

SEQ ID NO: 3596216 - RNA, 11 nt, Human
aggcuggaagg

SEQ ID NO: 3596217 - RNA, 15 nt, Human
aggcuggaaggagga

SEQ ID NO: 3596218 - RNA, 16 nt, Human
aggcuggacaugcuga

SEQ ID NO: 3596219 - RNA, 16 nt, Human
auccacauguuucaga

SEQ ID NO: 3596220 - RNA, 17 nt, Human
auccacauuguuuuaaa

SEQ ID NO: 3596221 - RNA, 15 nt, Human
auccacauuucuaaa

SEQ ID NO: 3596222 - RNA, 20 nt, Human
auccacccaacccuaucucc

SEQ ID NO: 3596223 - RNA, 13 nt, Human
auccacccaccuc

SEQ ID NO: 3596224 - RNA, 18 nt, Human
auccacccaccucagccu

SEQ ID NO: 3596225 - RNA, 10 nt, Human
auccacccca

SEQ ID NO: 3596226 - RNA, 16 nt, Human
auccaccguccccucc

SEQ ID NO: 3596227 - RNA, 10 nt, Human
auccaccucc

SEQ ID NO: 3596228 - RNA, 12 nt, Human
auccaccuccau

SEQ ID NO: 3596229 - RNA, 13 nt, Human
auccaccuccuuc

SEQ ID NO: 3596230 - RNA, 18 nt, Human
auccaccugucucagccu

SEQ ID NO: 3596231 - RNA, 21 nt, Human
auccaccugucucagccuccc

SEQ ID NO: 3596232 - RNA, 21 nt, Human
auccacuagugcaaaucauag

SEQ ID NO: 3596233 - RNA, 16 nt, Human
auccacucuacccucc

SEQ ID NO: 3596234 - RNA, 21 nt, Human
auccacucuacccucccaccc

SEQ ID NO: 3596235 - RNA, 22 nt, Human
auccacucuacccucccacccc

SEQ ID NO: 3596236 - RNA, 23 nt, Human
auccacucucucuuguucuuacu

SEQ ID NO: 3596237 - RNA, 21 nt, Human
auccacugugccaugugccag

SEQ ID NO: 3596238 - RNA, 14 nt, Human
auccacuucuuuca

SEQ ID NO: 3596239 - RNA, 15 nt, Human
auccacuuuggggga

SEQ ID NO: 3596240 - RNA, 20 nt, Human
auccagaaacuuguucuucc

SEQ ID NO: 3596241 - RNA, 21 nt, Human
auccagaaacuuguucuucca

SEQ ID NO: 3596242 - RNA, 16 nt, Human
auccagaaagaaaacu

SEQ ID NO: 3596243 - RNA, 16 nt, Human
auccagacaucaugaa

SEQ ID NO: 3596244 - RNA, 15 nt, Human
auccagacccggcug

SEQ ID NO: 3596245 - RNA, 19 nt, Human
auccagacccggcugcgug

SEQ ID NO: 3596246 - RNA, 17 nt, Human
auccagagauucauuuu

SEQ ID NO: 3596247 - RNA, 23 nt, Human
auccagagauucauuuucuagau

SEQ ID NO: 3596248 - RNA, 22 nt, Human
auccagaggcaaacggaggcaa

SEQ ID NO: 3596249 - RNA, 20 nt, Human
auccagauacacccaaagua

SEQ ID NO: 3596250 - RNA, 14 nt, Human
auccagaugguggg

SEQ ID NO: 3596251 - RNA, 15 nt, Human
auccagauguggcua

SEQ ID NO: 3596252 - RNA, 18 nt, Human
auccagcagauuauucac

SEQ ID NO: 3596253 - RNA, 19 nt, Human
auccagccggaggccagag

SEQ ID NO: 3596254 - RNA, 14 nt, Human
auccagccucuccc

SEQ ID NO: 3596255 - RNA, 16 nt, Human
auccagccucuccccu

SEQ ID NO: 3596256 - RNA, 17 nt, Human
auccagccuggggucug

SEQ ID NO: 3596257 - RNA, 22 nt, Human
auccagcuccccuucugaauca

SEQ ID NO: 3596258 - RNA, 22 nt, Human
auccagcucuaagucucaacug

SEQ ID NO: 3596259 - RNA, 15 nt, Human
auccaggacccugcc

SEQ ID NO: 3596260 - RNA, 22 nt, Human
auccaggacccugccaggcaca

SEQ ID NO: 3596261 - RNA, 12 nt, Human
auccaggagcuc

SEQ ID NO: 3596262 - RNA, 16 nt, Human
auccaggagcuccagu

SEQ ID NO: 3596263 - RNA, 24 nt, Human
auccaggcagucgggggcuggccu

SEQ ID NO: 3596264 - RNA, 20 nt, Human
auccaggccccucccucucc

SEQ ID NO: 3596265 - RNA, 14 nt, Human
auccaggccggcuu

SEQ ID NO: 3596266 - RNA, 13 nt, Human
auccagggacaga

SEQ ID NO: 3596267 - RNA, 21 nt, Human
auccagguacgcacagacagg

SEQ ID NO: 3596268 - RNA, 19 nt, Human
auccaggucaacagaauga

SEQ ID NO: 3596269 - RNA, 16 nt, Human
auccaguaucuugaag

SEQ ID NO: 3596270 - RNA, 19 nt, Human
auccaguuauaagaagaag

SEQ ID NO: 3596271 - RNA, 16 nt, Human
auccaguucaugagaa

SEQ ID NO: 3596272 - RNA, 17 nt, Human
auccaguuuuguuugga

SEQ ID NO: 3596273 - RNA, 20 nt, Human
auccaguuuuguuuggacca

SEQ ID NO: 3596274 - RNA, 11 nt, Human
auccauaaaga

SEQ ID NO: 3596275 - RNA, 13 nt, Human
auccauaaagaag

SEQ ID NO: 3596276 - RNA, 17 nt, Human
auccauaaagaagcaau

SEQ ID NO: 3596277 - RNA, 19 nt, Human
auccauagcaccuccacau

SEQ ID NO: 3596278 - RNA, 20 nt, Human
auccauaguaacugacauga

SEQ ID NO: 3596279 - RNA, 16 nt, Human
auccauagugacuuuu

SEQ ID NO: 3596280 - RNA, 18 nt, Human
auccauauugagucaaau

SEQ ID NO: 3596281 - RNA, 20 nt, Human
auccauauugagucaaaugg

SEQ ID NO: 3596282 - RNA, 12 nt, Human
auccauccaauc

SEQ ID NO: 3596283 - RNA, 20 nt, Human
auccauccuugccaauagug

SEQ ID NO: 3596284 - RNA, 19 nt, Human
auccaugaguuugcccugg

SEQ ID NO: 3596285 - RNA, 13 nt, Human
auccauggccagc

SEQ ID NO: 3596286 - RNA, 16 nt, Human
auccauggccagcagc

SEQ ID NO: 3596287 - RNA, 21 nt, Human
auccauggccagcagcaccug

SEQ ID NO: 3596288 - RNA, 18 nt, Human
auccauggggucucucac

SEQ ID NO: 3596289 - RNA, 14 nt, Human
auccauguacugua

SEQ ID NO: 3596290 - RNA, 18 nt, Human
auccauguccuaugugug

SEQ ID NO: 3596291 - RNA, 19 nt, Human
auccauguccuauguguga

SEQ ID NO: 3596292 - RNA, 18 nt, Human
auccauguuaguuuuuac

SEQ ID NO: 3596293 - RNA, 19 nt, Human
auccauguuaguuuuuacu

SEQ ID NO: 3596294 - RNA, 15 nt, Human
auccauuaggccagc

SEQ ID NO: 3596295 - RNA, 18 nt, Human
auccauuaucauguguaa

SEQ ID NO: 3596296 - RNA, 20 nt, Human
auccauuucaucuauuucug

SEQ ID NO: 3596297 - RNA, 17 nt, Human
auccauuuccauugcuu

SEQ ID NO: 3596298 - RNA, 13 nt, Human
auccauuuccccu

SEQ ID NO: 3596299 - RNA, 19 nt, Human
auccauuuccccuccuucc

SEQ ID NO: 3596300 - RNA, 12 nt, Human
auccauuucuaa

SEQ ID NO: 3596301 - RNA, 20 nt, Human
aucccaaacccuucagugcc

SEQ ID NO: 3596302 - RNA, 15 nt, Human
aucccaaaguuguug

SEQ ID NO: 3596303 - RNA, 17 nt, Human
aucccaacacugccagc

SEQ ID NO: 3596304 - RNA, 19 nt, Human
aucccaaccagugccaagg

SEQ ID NO: 3596305 - RNA, 21 nt, Human
aucccaaccagugccaaggac

SEQ ID NO: 3596306 - RNA, 17 nt, Human
aucccaagacccagggc

SEQ ID NO: 3596307 - RNA, 16 nt, Human
aucccaaucauuguug

SEQ ID NO: 3596308 - RNA, 15 nt, Human
aucccacccacaugu

SEQ ID NO: 3596309 - RNA, 16 nt, Human
aucccacgcacuccau

SEQ ID NO: 3596310 - RNA, 18 nt, Human
aucccacgcacuccauga

SEQ ID NO: 3596311 - RNA, 23 nt, Human
aucccacggaaaaugccaaucuc

SEQ ID NO: 3596312 - RNA, 16 nt, Human
aucccacuugccccug

SEQ ID NO: 3596313 - RNA, 13 nt, Human
aucccagaaauua

SEQ ID NO: 3596314 - RNA, 20 nt, Human
aucccagagggugggcuuca

SEQ ID NO: 3596315 - RNA, 14 nt, Human
aucccagcaccugc

SEQ ID NO: 3596316 - RNA, 19 nt, Human
aucccagcacuuugggaga

SEQ ID NO: 3596317 - RNA, 12 nt, Human
aucccagcccca

SEQ ID NO: 3596318 - RNA, 16 nt, Human
aucccagcccccugac

SEQ ID NO: 3596319 - RNA, 15 nt, Human
aucccagccuuggca

SEQ ID NO: 3596320 - RNA, 20 nt, Human
aucccagcuacucaagaggc

SEQ ID NO: 3596321 - RNA, 17 nt, Human
aucccagcuacucagga

SEQ ID NO: 3596322 - RNA, 22 nt, Human
aucccagcuucggcauuugauc

SEQ ID NO: 3596323 - RNA, 12 nt, Human
aucccaggacac

SEQ ID NO: 3596324 - RNA, 17 nt, Human
aucccaggauguacaag

SEQ ID NO: 3596325 - RNA, 24 nt, Human
aucccaggccccuggaggcugccu

SEQ ID NO: 3596326 - RNA, 19 nt, Human
aucccaggggaccacaccu

SEQ ID NO: 3596327 - RNA, 16 nt, Human
aucccauaugccuggg

SEQ ID NO: 3596328 - RNA, 17 nt, Human
aucccauaugccugggc

SEQ ID NO: 3596329 - RNA, 15 nt, Human
aucccaucccauccc

SEQ ID NO: 3596330 - RNA, 18 nt, Human
aucccaucccaucccauc

SEQ ID NO: 3596331 - RNA, 23 nt, Human
aucccaucgucucggccuucaca

SEQ ID NO: 3596332 - RNA, 18 nt, Human
aucccaucuaagcugcag

SEQ ID NO: 3596333 - RNA, 19 nt, Human
aucccaugagccucagcau

SEQ ID NO: 3596334 - RNA, 13 nt, Human
aucccauguaaca

SEQ ID NO: 3596335 - RNA, 16 nt, Human
aucccauguaacagaa

SEQ ID NO: 3596336 - RNA, 14 nt, Human
aucccauuauucaa

SEQ ID NO: 3596337 - RNA, 20 nt, Human
aucccauuauucaaaguugc

SEQ ID NO: 3596338 - RNA, 14 nt, Human
aucccauuccaggc

SEQ ID NO: 3596339 - RNA, 15 nt, Human
aucccauuccaggca

SEQ ID NO: 3596340 - RNA, 16 nt, Human
aucccauucugcguca

SEQ ID NO: 3596341 - RNA, 16 nt, Human
aucccauugcccuggu

SEQ ID NO: 3596342 - RNA, 21 nt, Human
aucccauugucuucugaccuc

SEQ ID NO: 3596343 - RNA, 20 nt, Human
auccccaacaugcacugaug

SEQ ID NO: 3596344 - RNA, 16 nt, Human
auccccaagugugaac

SEQ ID NO: 3596345 - RNA, 13 nt, Human
auccccacccuug

SEQ ID NO: 3596346 - RNA, 21 nt, Human
auccccaggggucccagccac

SEQ ID NO: 3596347 - RNA, 15 nt, Human
auccccaguaaaauu

SEQ ID NO: 3596348 - RNA, 17 nt, Human
auccccauccuccagcu

SEQ ID NO: 3596349 - RNA, 18 nt, Human
auccccaucucccugccu

SEQ ID NO: 3596350 - RNA, 13 nt, Human
aucccccaaaguu

SEQ ID NO: 3596351 - RNA, 12 nt, Human
aucccccagaaa

SEQ ID NO: 3596352 - RNA, 12 nt, Human
aucccccagacu

SEQ ID NO: 3596353 - RNA, 13 nt, Human
aucccccugcccu

SEQ ID NO: 3596354 - RNA, 14 nt, Human
aucccccugcccuc

SEQ ID NO: 3596355 - RNA, 15 nt, Human
aucccccugcccucg

SEQ ID NO: 3596356 - RNA, 14 nt, Human
auccccgccuggcc

SEQ ID NO: 3596357 - RNA, 19 nt, Human
auccccguuccugacauca

SEQ ID NO: 3596358 - RNA, 13 nt, Human
auccccuaaaaua

SEQ ID NO: 3596359 - RNA, 14 nt, Human
aucuuuucauacau

SEQ ID NO: 3596360 - RNA, 13 nt, Human
aucuuuucauucu

SEQ ID NO: 3596361 - RNA, 18 nt, Human
aucuuuucuuuagagaac

SEQ ID NO: 3596362 - RNA, 20 nt, Human
aucuuuucuuuagagaacug

SEQ ID NO: 3596363 - RNA, 23 nt, Human
aucuuuucuuuagagaacugaaa

SEQ ID NO: 3596364 - RNA, 23 nt, Human
aucuuuugugagauguaauuguu

SEQ ID NO: 3596365 - RNA, 22 nt, Human
aucuuuuguuacucuugggaca

SEQ ID NO: 3596366 - RNA, 16 nt, Human
aucuuuuguucccauc

SEQ ID NO: 3596367 - RNA, 18 nt, Human
aucuuuuuuagcauaaaa

SEQ ID NO: 3596368 - RNA, 19 nt, Human
aucuuuuuuagcauaaaau

SEQ ID NO: 3596369 - RNA, 15 nt, Human
augaaaaagaagaau

SEQ ID NO: 3596370 - RNA, 14 nt, Human
augaaaaagcaugu

SEQ ID NO: 3596371 - RNA, 16 nt, Human
augaaaaagcauguac

SEQ ID NO: 3596372 - RNA, 18 nt, Human
augaaaaagcauguacag

SEQ ID NO: 3596373 - RNA, 18 nt, Human
augaaaaauuuaagcauu

SEQ ID NO: 3596374 - RNA, 19 nt, Human
augaaaaauuuaagcauug

SEQ ID NO: 3596375 - RNA, 15 nt, Human
aggcuggacuccaga

SEQ ID NO: 3596376 - RNA, 22 nt, Human
aggcuggacuccagaucugcac

SEQ ID NO: 3596377 - RNA, 14 nt, Human
aggcuggagaagcu

SEQ ID NO: 3596378 - RNA, 15 nt, Human
aggcuggagcccagg

SEQ ID NO: 3596379 - RNA, 18 nt, Human
aggcuggagcccagggag

SEQ ID NO: 3596380 - RNA, 12 nt, Human
aggcuggagcug

SEQ ID NO: 3596381 - RNA, 18 nt, Human
aggcuggagcuggcgucu

SEQ ID NO: 3596382 - RNA, 13 nt, Human
aggcuggaggcag

SEQ ID NO: 3596383 - RNA, 17 nt, Human
aggcuggaggcagggcc

SEQ ID NO: 3596384 - RNA, 18 nt, Human
aggcuggaggcagggccu

SEQ ID NO: 3596385 - RNA, 20 nt, Human
aggcuggaguggaguggcgu

SEQ ID NO: 3596386 - RNA, 17 nt, Human
aggcuggaguuggggca

SEQ ID NO: 3596387 - RNA, 18 nt, Human
aggcuggaguugucacug

SEQ ID NO: 3596388 - RNA, 18 nt, Human
aggcuggcacaggacaug

SEQ ID NO: 3596389 - RNA, 18 nt, Human
aggcuggcagcucuccag

SEQ ID NO: 3596390 - RNA, 21 nt, Human
aggcuggcagcucuccaguca

SEQ ID NO: 3596391 - RNA, 19 nt, Human
aggcuggccaacgggguga

SEQ ID NO: 3596392 - RNA, 12 nt, Human
aggcuggccagc

SEQ ID NO: 3596393 - RNA, 14 nt, Human
aggcuggccagccc

SEQ ID NO: 3596394 - RNA, 16 nt, Human
aggcuggccagcccca

SEQ ID NO: 3596395 - RNA, 22 nt, Human
aggcuggccagccccacagccc

SEQ ID NO: 3596396 - RNA, 17 nt, Human
aggcuggccagccgcuc

SEQ ID NO: 3596397 - RNA, 21 nt, Human
aggcuggccaguccaggcugc

SEQ ID NO: 3596398 - RNA, 17 nt, Human
aggcuggcccugcccug

SEQ ID NO: 3596399 - RNA, 21 nt, Human
aggcuggccuauguggucuaa

SEQ ID NO: 3596400 - RNA, 16 nt, Human
aggcuggccucagacu

SEQ ID NO: 3596401 - RNA, 19 nt, Human
aggcuggcgagagucuggc

SEQ ID NO: 3596402 - RNA, 15 nt, Human
aggcuggcgcagcca

SEQ ID NO: 3596403 - RNA, 20 nt, Human
aggcuggcgcagccaaggcc

SEQ ID NO: 3596404 - RNA, 19 nt, Human
aggcuggcuccagaugcag

SEQ ID NO: 3596405 - RNA, 22 nt, Human
aggcuggcuggcccgucauguu

SEQ ID NO: 3596406 - RNA, 12 nt, Human
aggcuggcuggg

SEQ ID NO: 3596407 - RNA, 13 nt, Human
aggcuggcugggg

SEQ ID NO: 3596408 - RNA, 17 nt, Human
aggcuggcuggggccua

SEQ ID NO: 3596409 - RNA, 22 nt, Human
aggcuggcuuguccccuccuca

SEQ ID NO: 3596410 - RNA, 19 nt, Human
aggcugggacgcucugcug

SEQ ID NO: 3596411 - RNA, 20 nt, Human
aggcugggagagccuuccag

SEQ ID NO: 3596412 - RNA, 22 nt, Human
aggcugggagagccuuccaggg

SEQ ID NO: 3596413 - RNA, 13 nt, Human
aggcugggcaagg

SEQ ID NO: 3596414 - RNA, 10 nt, Human
aggcugggcc

SEQ ID NO: 3596415 - RNA, 20 nt, Human
aggcugggccauguccaaag

SEQ ID NO: 3596416 - RNA, 13 nt, Human
aggcugggcccag

SEQ ID NO: 3596417 - RNA, 15 nt, Human
aggcugggcccagag

SEQ ID NO: 3596418 - RNA, 16 nt, Human
aggcugggcccagagg

SEQ ID NO: 3596419 - RNA, 17 nt, Human
aggcugggcccagaggc

SEQ ID NO: 3596420 - RNA, 18 nt, Human
aggcugggcccagaggca

SEQ ID NO: 3596421 - RNA, 13 nt, Human
aggcugggcuccc

SEQ ID NO: 3596422 - RNA, 16 nt, Human
aggcugggcugggcac

SEQ ID NO: 3596423 - RNA, 21 nt, Human
aggcugggcugggcacugcuc

SEQ ID NO: 3596424 - RNA, 14 nt, Human
aggcugggcuucag

SEQ ID NO: 3596425 - RNA, 18 nt, Human
aggcugggcuucaguggc

SEQ ID NO: 3596426 - RNA, 19 nt, Human
aggcugggcuucaguggca

SEQ ID NO: 3596427 - RNA, 21 nt, Human
aggcuggggaaguccucuggg

SEQ ID NO: 3596428 - RNA, 17 nt, Human
aggcugggggaagaagc

SEQ ID NO: 3596429 - RNA, 15 nt, Human
aggcugggucgcccu

SEQ ID NO: 3596430 - RNA, 16 nt, Human
aggcugggucgcccug

SEQ ID NO: 3596431 - RNA, 15 nt, Human
aggcugggugcccac

SEQ ID NO: 3596432 - RNA, 18 nt, Human
aggcugggugcccacagc

SEQ ID NO: 3596433 - RNA, 19 nt, Human
aggcugggugcccacagcc

SEQ ID NO: 3596434 - RNA, 23 nt, Human
aggcugguccuauggccucaugu

SEQ ID NO: 3596435 - RNA, 23 nt, Human
aggcuggucucgaacuccugacc

SEQ ID NO: 3596436 - RNA, 19 nt, Human
aggcuggucuugaaguccu

SEQ ID NO: 3596437 - RNA, 23 nt, Human
aggcuggugcuguggccagggug

SEQ ID NO: 3596438 - RNA, 20 nt, Human
aggcugguuuuggcaucucu

SEQ ID NO: 3596439 - RNA, 21 nt, Human
aggcuguaucccaugagccuc

SEQ ID NO: 3596440 - RNA, 12 nt, Human
aggcugucaauu

SEQ ID NO: 3596441 - RNA, 21 nt, Human
aggcugucaauuacaggaagu

SEQ ID NO: 3596442 - RNA, 14 nt, Human
aggcugugcucccu

SEQ ID NO: 3596443 - RNA, 16 nt, Human
aggcugugcugcccug

SEQ ID NO: 3596444 - RNA, 15 nt, Human
aggcugugggccuca

SEQ ID NO: 3596445 - RNA, 20 nt, Human
aggcuguguuuggcuuucag

SEQ ID NO: 3596446 - RNA, 22 nt, Human
aggcuguguuuggcuuucaggg

SEQ ID NO: 3596447 - RNA, 19 nt, Human
aggcuguuaaauacaggaa

SEQ ID NO: 3596448 - RNA, 20 nt, Human
aggcuguuaaauacaggaaa

SEQ ID NO: 3596449 - RNA, 23 nt, Human
aggcuguuaaauacaggaaacag

SEQ ID NO: 3596450 - RNA, 20 nt, Human
aggcuguucccauguagccc

SEQ ID NO: 3596451 - RNA, 19 nt, Human
aggcuguuugcuucaccgu

SEQ ID NO: 3596452 - RNA, 20 nt, Human
aggcuuagcuuugcucugcc

SEQ ID NO: 3596453 - RNA, 17 nt, Human
aggcuuagucacugaga

SEQ ID NO: 3596454 - RNA, 18 nt, Human
aggcuuagucacugagac

SEQ ID NO: 3596455 - RNA, 23 nt, Human
aggcuuagucacugagacagccc

SEQ ID NO: 3596456 - RNA, 17 nt, Human
aggcuuagugauguaau

SEQ ID NO: 3596457 - RNA, 14 nt, Human
aggcuuaguuugug

SEQ ID NO: 3596458 - RNA, 15 nt, Human
aggcuuaguuugugu

SEQ ID NO: 3596459 - RNA, 15 nt, Human
aggcuuauauucaac

SEQ ID NO: 3596460 - RNA, 21 nt, Human
aggcuuauauucaaccaugga

SEQ ID NO: 3596461 - RNA, 22 nt, Human
aggcuucaauuuauugcacaaa

SEQ ID NO: 3596462 - RNA, 20 nt, Human
aggcuucagcauauuuauag

SEQ ID NO: 3596463 - RNA, 23 nt, Human
aggcuuccacguacugcagccuc

SEQ ID NO: 3596464 - RNA, 22 nt, Human
aggcuuccugcguccuccucac

SEQ ID NO: 3596465 - RNA, 15 nt, Human
aggcuucuccgccag

SEQ ID NO: 3596466 - RNA, 17 nt, Human
aggcuucuccgccagcc

SEQ ID NO: 3596467 - RNA, 20 nt, Human
aggcuucuccgccagccucc

SEQ ID NO: 3596468 - RNA, 17 nt, Human
aggcuucugcuggggcc

SEQ ID NO: 3596469 - RNA, 23 nt, Human
aggcuucuucagaucagugcuug

SEQ ID NO: 3596470 - RNA, 12 nt, Human
aggcuugcagaa

SEQ ID NO: 3596471 - RNA, 21 nt, Human
aggcuugcccaguacauuuaa

SEQ ID NO: 3596472 - RNA, 20 nt, Human
aggcuugguuccuucccaau

SEQ ID NO: 3596473 - RNA, 16 nt, Human
aggcuugucagagcug

SEQ ID NO: 3596474 - RNA, 17 nt, Human
aggcuugucagagcugg

SEQ ID NO: 3596475 - RNA, 18 nt, Human
aggcuugucagagcuggg

SEQ ID NO: 3596476 - RNA, 21 nt, Human
aggcuuguuuaccuuucucuc

SEQ ID NO: 3596477 - RNA, 13 nt, Human
aggcuuuacuuag

SEQ ID NO: 3596478 - RNA, 14 nt, Human
aggcuuucagggcc

SEQ ID NO: 3596479 - RNA, 18 nt, Human
aggcuuucccacuuccca

SEQ ID NO: 3596480 - RNA, 22 nt, Human
aggcuuucuguugccaugguga

SEQ ID NO: 3596481 - RNA, 20 nt, Human
aggcuuugcccugcugcccu

SEQ ID NO: 3596482 - RNA, 19 nt, Human
aggcuuuggauuugacauu

SEQ ID NO: 3596483 - RNA, 18 nt, Human
aggcuuuguguuguaauu

SEQ ID NO: 3596484 - RNA, 15 nt, Human
aggcuuuuuuaucau

SEQ ID NO: 3596485 - RNA, 23 nt, Human
agggaaaaaucaaguauuauaaa

SEQ ID NO: 3596486 - RNA, 16 nt, Human
agggaaaaggggcucc

SEQ ID NO: 3596487 - RNA, 17 nt, Human
agggaaaaggggcuccu

SEQ ID NO: 3596488 - RNA, 22 nt, Human
agggaaaauaaaaaaagaaaaa

SEQ ID NO: 3596489 - RNA, 23 nt, Human
agggaaaauaaaaaaagaaaaaa

SEQ ID NO: 3596490 - RNA, 16 nt, Human
agggaaacugccagca

SEQ ID NO: 3596491 - RNA, 19 nt, Human
agggaaagaaaaggaaggc

SEQ ID NO: 3596492 - RNA, 16 nt, Human
agggaaagacuggcaa

SEQ ID NO: 3596493 - RNA, 18 nt, Human
agggaaaggggugcuuuu

SEQ ID NO: 3596494 - RNA, 15 nt, Human
agggaaauagaaaaa

SEQ ID NO: 3596495 - RNA, 20 nt, Human
agggaacaaguugagcuaug

SEQ ID NO: 3596496 - RNA, 21 nt, Human
agggaacaaguugagcuauga

SEQ ID NO: 3596497 - RNA, 23 nt, Human
agggaacaauuuggcaauuuugu

SEQ ID NO: 3596498 - RNA, 17 nt, Human
agggaaccacuuucuua

SEQ ID NO: 3596499 - RNA, 23 nt, Human
agggaacccagcucuaauacauu

SEQ ID NO: 3596500 - RNA, 14 nt, Human
agggaaccuguguc

SEQ ID NO: 3596501 - RNA, 18 nt, Human
agggaacgugauuaguga

SEQ ID NO: 3596502 - RNA, 13 nt, Human
auccucucaccuc

SEQ ID NO: 3596503 - RNA, 16 nt, Human
auccucucaccucagc

SEQ ID NO: 3596504 - RNA, 15 nt, Human
auccucuccuuugaa

SEQ ID NO: 3596505 - RNA, 13 nt, Human
auccucucuuccu

SEQ ID NO: 3596506 - RNA, 10 nt, Human
auccucuggc

SEQ ID NO: 3596507 - RNA, 14 nt, Human
auccucuggcuggc

SEQ ID NO: 3596508 - RNA, 13 nt, Human
auccucuggcuug

SEQ ID NO: 3596509 - RNA, 13 nt, Human
auccucuguugau

SEQ ID NO: 3596510 - RNA, 22 nt, Human
auccucuuccauauggauccac

SEQ ID NO: 3596511 - RNA, 19 nt, Human
auccucuuccucugaggcu

SEQ ID NO: 3596512 - RNA, 21 nt, Human
auccucuuuagaguuagacug

SEQ ID NO: 3596513 - RNA, 20 nt, Human
auccucuuucucuuuucuag

SEQ ID NO: 3596514 - RNA, 15 nt, Human
auccucuuuuuccaa

SEQ ID NO: 3596515 - RNA, 16 nt, Human
auccugaaauuucaga

SEQ ID NO: 3596516 - RNA, 15 nt, Human
auccugaacagcaug

SEQ ID NO: 3596517 - RNA, 13 nt, Human
auccugaggcucc

SEQ ID NO: 3596518 - RNA, 18 nt, Human
auccugaggcuccacuug

SEQ ID NO: 3596519 - RNA, 22 nt, Human
auccugaggcuccacuuggucu

SEQ ID NO: 3596520 - RNA, 15 nt, Human
auccugauuccucuc

SEQ ID NO: 3596521 - RNA, 17 nt, Human
auccugauuccucucua

SEQ ID NO: 3596522 - RNA, 18 nt, Human
auccugauuccucucuaa

SEQ ID NO: 3596523 - RNA, 17 nt, Human
auccugcacugacucug

SEQ ID NO: 3596524 - RNA, 18 nt, Human
auccugcacugacucugg

SEQ ID NO: 3596525 - RNA, 16 nt, Human
auccugcagccuccuc

SEQ ID NO: 3596526 - RNA, 17 nt, Human
auccugcagccuccucc

SEQ ID NO: 3596527 - RNA, 14 nt, Human
auccugccacccug

SEQ ID NO: 3596528 - RNA, 22 nt, Human
auccugccagccccacacagcu

SEQ ID NO: 3596529 - RNA, 20 nt, Human
augaaaaauuuaagcauugu

SEQ ID NO: 3596530 - RNA, 14 nt, Human
augaaaacacauuu

SEQ ID NO: 3596531 - RNA, 15 nt, Human
augaaaacacauuuu

SEQ ID NO: 3596532 - RNA, 17 nt, Human
augaaaacagaaugucu

SEQ ID NO: 3596533 - RNA, 13 nt, Human
augaaaacaugua

SEQ ID NO: 3596534 - RNA, 20 nt, Human
augaaaacguuuuauugugu

SEQ ID NO: 3596535 - RNA, 17 nt, Human
augaaaacuauacaaca

SEQ ID NO: 3596536 - RNA, 17 nt, Human
augaaaagauucuucug

SEQ ID NO: 3596537 - RNA, 13 nt, Human
augaaaagauuua

SEQ ID NO: 3596538 - RNA, 17 nt, Human
augaaaagccucuguuu

SEQ ID NO: 3596539 - RNA, 18 nt, Human
augaaaaggugauuguca

SEQ ID NO: 3596540 - RNA, 16 nt, Human
augaaaaguauauuga

SEQ ID NO: 3596541 - RNA, 22 nt, Human
augaaaauaacugaauuuggag

SEQ ID NO: 3596542 - RNA, 24 nt, Human
augaaaauaccauuuaguaagaau

SEQ ID NO: 3596543 - RNA, 16 nt, Human
augaaaauauuuaaag

SEQ ID NO: 3596544 - RNA, 17 nt, Human
augaaaauccuaccaac

SEQ ID NO: 3596545 - RNA, 20 nt, Human
augaaaaugcaacaacaugu

SEQ ID NO: 3596546 - RNA, 15 nt, Human
augaaaaugucagaa

SEQ ID NO: 3596547 - RNA, 14 nt, Human
augaaaauuguaug

SEQ ID NO: 3596548 - RNA, 19 nt, Human
augaaacaccuucucugga

SEQ ID NO: 3596549 - RNA, 22 nt, Human
augaaacagaaacaaaaacacu

SEQ ID NO: 3596550 - RNA, 23 nt, Human
augaaaccuuauuuuuucccaaa

SEQ ID NO: 3596551 - RNA, 23 nt, Human
augaaacuagaaagcagagauuu

SEQ ID NO: 3596552 - RNA, 16 nt, Human
augaaacucacaaaug

SEQ ID NO: 3596553 - RNA, 15 nt, Human
augaaagaauauauu

SEQ ID NO: 3596554 - RNA, 15 nt, Human
augaaagacucaaaa

SEQ ID NO: 3596555 - RNA, 12 nt, Human
augaaagacugu

SEQ ID NO: 3596556 - RNA, 20 nt, Human
augaaagacuguacaaagua

SEQ ID NO: 3596557 - RNA, 13 nt, Human
augaaagaggagg

SEQ ID NO: 3596558 - RNA, 23 nt, Human
augaaagauggcugugccucugc

SEQ ID NO: 3596559 - RNA, 22 nt, Human
augaaagcugauuacugucaau

SEQ ID NO: 3596560 - RNA, 15 nt, Human
augaaaggagagcau

SEQ ID NO: 3596561 - RNA, 21 nt, Human
augaaaggcaggccuauuuca

SEQ ID NO: 3596562 - RNA, 15 nt, Human
augaaagggcccaga

SEQ ID NO: 3596563 - RNA, 14 nt, Human
augaaagguacuau

SEQ ID NO: 3596564 - RNA, 20 nt, Human
augaaagguacuauauuugc

SEQ ID NO: 3596565 - RNA, 21 nt, Human
augaaagguacuauauuugcu

SEQ ID NO: 3596566 - RNA, 18 nt, Human
augaaagucuugugacua

SEQ ID NO: 3596567 - RNA, 16 nt, Human
augaaagugagacuuu

SEQ ID NO: 3596568 - RNA, 17 nt, Human
augaaauaaaugcccca

SEQ ID NO: 3596569 - RNA, 13 nt, Human
augaaauauuuuu

SEQ ID NO: 3596570 - RNA, 14 nt, Human
augaaaugacuucu

SEQ ID NO: 3596571 - RNA, 18 nt, Human
augaaaugcauauuugca

SEQ ID NO: 3596572 - RNA, 22 nt, Human
augaaaugcuaugucauuucau

SEQ ID NO: 3596573 - RNA, 16 nt, Human
augaaaugguuaagaa

SEQ ID NO: 3596574 - RNA, 13 nt, Human
augaaauguaugu

SEQ ID NO: 3596575 - RNA, 12 nt, Human
augaaaugugaa

SEQ ID NO: 3596576 - RNA, 13 nt, Human
augaaaugugaau

SEQ ID NO: 3596577 - RNA, 18 nt, Human
augaaaugugaauuuuua

SEQ ID NO: 3596578 - RNA, 15 nt, Human
augaaauguuaacaa

SEQ ID NO: 3596579 - RNA, 15 nt, Human
augaaauuuaaacau

SEQ ID NO: 3596580 - RNA, 16 nt, Human
augaaauuuaaacauu

SEQ ID NO: 3596581 - RNA, 18 nt, Human
augaaauuuaaacauuaa

SEQ ID NO: 3596582 - RNA, 14 nt, Human
augaaauuuuacca

SEQ ID NO: 3596583 - RNA, 16 nt, Human
augaaauuuuaccaag

SEQ ID NO: 3596584 - RNA, 20 nt, Human
augaaauuuuaccaaguuau

SEQ ID NO: 3596585 - RNA, 21 nt, Human
augaaauuuucuagacuuucu

SEQ ID NO: 3596586 - RNA, 23 nt, Human
augaaauuuucuagacuuucugu

SEQ ID NO: 3596587 - RNA, 17 nt, Human
augaaauuuuuguaaau

SEQ ID NO: 3596588 - RNA, 16 nt, Human
augaacaaaauuauuu

SEQ ID NO: 3596589 - RNA, 19 nt, Human
augaacaaagaccaauuuu

SEQ ID NO: 3596590 - RNA, 18 nt, Human
augaacaagagaagcauu

SEQ ID NO: 3596591 - RNA, 13 nt, Human
augaacaaguuuu

SEQ ID NO: 3596592 - RNA, 14 nt, Human
augaacaaguuuua

SEQ ID NO: 3596593 - RNA, 15 nt, Human
augaacaaguuuuaa

SEQ ID NO: 3596594 - RNA, 13 nt, Human
augaacacaaauu

SEQ ID NO: 3596595 - RNA, 22 nt, Human
augaacacacuguguccuggug

SEQ ID NO: 3596596 - RNA, 17 nt, Human
augaacacccuuagaaa

SEQ ID NO: 3596597 - RNA, 21 nt, Human
augaacagaacauagacagaa

SEQ ID NO: 3596598 - RNA, 18 nt, Human
augaacauguacuguucu

SEQ ID NO: 3596599 - RNA, 20 nt, Human
augaaccacaucuugcucug

SEQ ID NO: 3596600 - RNA, 15 nt, Human
augaaccauaaauuc

SEQ ID NO: 3596601 - RNA, 21 nt, Human
augaacccaggacgcuucuga

SEQ ID NO: 3596602 - RNA, 21 nt, Human
augaacccuuccugagcuuua

SEQ ID NO: 3596603 - RNA, 20 nt, Human
augaacuauuccccagcagg

SEQ ID NO: 3596604 - RNA, 12 nt, Human
augaacugaaag

SEQ ID NO: 3596605 - RNA, 14 nt, Human
augaacugaaguuu

SEQ ID NO: 3596606 - RNA, 15 nt, Human
augaacugaaguuuc

SEQ ID NO: 3596607 - RNA, 18 nt, Human
augaacuggaggccagga

SEQ ID NO: 3596608 - RNA, 22 nt, Human
augaacuuagauuuuacaugaa

SEQ ID NO: 3596609 - RNA, 15 nt, Human
augaacuuauuaaua

SEQ ID NO: 3596610 - RNA, 16 nt, Human
augaacuuauucugua

SEQ ID NO: 3596611 - RNA, 13 nt, Human
augaacuugagga

SEQ ID NO: 3596612 - RNA, 18 nt, Human
augaacuugaggacacau

SEQ ID NO: 3596613 - RNA, 19 nt, Human
augaacuugaggacacaug

SEQ ID NO: 3596614 - RNA, 17 nt, Human
augaacuuucucuucau

SEQ ID NO: 3596615 - RNA, 15 nt, Human
augaagaaaaaauac

SEQ ID NO: 3596616 - RNA, 20 nt, Human
augaagaaaaaauacauuuu

SEQ ID NO: 3596617 - RNA, 19 nt, Human
augaagaaaagugggccag

SEQ ID NO: 3596618 - RNA, 21 nt, Human
augaagaaaauacuuaaaugu

SEQ ID NO: 3596619 - RNA, 19 nt, Human
augaagaaaaucacuuagg

SEQ ID NO: 3596620 - RNA, 15 nt, Human
augaagaacauaaaa

SEQ ID NO: 3596621 - RNA, 14 nt, Human
augaagaacugagg

SEQ ID NO: 3596622 - RNA, 18 nt, Human
augaagaauagaaacaag

SEQ ID NO: 3596623 - RNA, 20 nt, Human
augaagacaauuuugauuua

SEQ ID NO: 3596624 - RNA, 22 nt, Human
augaagaccuuuuucugcacua

SEQ ID NO: 3596625 - RNA, 15 nt, Human
augaagagaagcaau

SEQ ID NO: 3596626 - RNA, 15 nt, Human
augaagagcaaaaau

SEQ ID NO: 3596627 - RNA, 17 nt, Human
augaagagcuagagaaa

SEQ ID NO: 3596628 - RNA, 19 nt, Human
augaagagugagagggcau

SEQ ID NO: 3596629 - RNA, 16 nt, Human
augaagauacugaaau

SEQ ID NO: 3596630 - RNA, 17 nt, Human
augaagauacugaaaua

SEQ ID NO: 3596631 - RNA, 20 nt, Human
augaagaucauauacgugaa

SEQ ID NO: 3596632 - RNA, 22 nt, Human
augaagauucuccugugcuaga

SEQ ID NO: 3596633 - RNA, 21 nt, Human
augaagauuggugggauuuuu

SEQ ID NO: 3596634 - RNA, 13 nt, Human
augaagcaaggaa

SEQ ID NO: 3596635 - RNA, 15 nt, Human
augaagcaaggaaga

SEQ ID NO: 3596636 - RNA, 13 nt, Human
augaagcagcuuu

SEQ ID NO: 3596637 - RNA, 18 nt, Human
augaagccgaccuuagau

SEQ ID NO: 3596638 - RNA, 22 nt, Human
augaagccuguggaugaucaau

SEQ ID NO: 3596639 - RNA, 14 nt, Human
augaagccuuuuga

SEQ ID NO: 3596640 - RNA, 17 nt, Human
augaagccuuuugaaag

SEQ ID NO: 3596641 - RNA, 20 nt, Human
augaagccuuuugaaaggga

SEQ ID NO: 3596642 - RNA, 14 nt, Human
augaagcuaccuca

SEQ ID NO: 3596643 - RNA, 19 nt, Human
augaagcuuguguauccau

SEQ ID NO: 3596644 - RNA, 15 nt, Human
augaagguaaauaaa

SEQ ID NO: 3596645 - RNA, 18 nt, Human
augaaggugucauacaga

SEQ ID NO: 3596646 - RNA, 22 nt, Human
augaagguuaggauuuaacagu

SEQ ID NO: 3596647 - RNA, 15 nt, Human
aucguuaugugugua

SEQ ID NO: 3596648 - RNA, 14 nt, Human
aucguucucugccu

SEQ ID NO: 3596649 - RNA, 15 nt, Human
aucguuuuuguauuu

SEQ ID NO: 3596650 - RNA, 16 nt, Human
aucuaaaaauaacugu

SEQ ID NO: 3596651 - RNA, 23 nt, Human
aucuaaaaauagacuuaaaucuc

SEQ ID NO: 3596652 - RNA, 23 nt, Human
aucuaaaaauauacauguuuaug

SEQ ID NO: 3596653 - RNA, 15 nt, Human
aucuaaaguguguug

SEQ ID NO: 3596654 - RNA, 13 nt, Human
aucuaaaguuugu

SEQ ID NO: 3596655 - RNA, 17 nt, Human
aucuaaauaaaaugcua

SEQ ID NO: 3596656 - RNA, 18 nt, Human
aucuaaauaccugcccug

SEQ ID NO: 3596657 - RNA, 22 nt, Human
aucuaaauauggacugcucagg

SEQ ID NO: 3596658 - RNA, 16 nt, Human
aucuaaaucuauuuau

SEQ ID NO: 3596659 - RNA, 18 nt, Human
aucuaaaucuauuuauua

SEQ ID NO: 3596660 - RNA, 19 nt, Human
aucuaaauggaaccacucu

SEQ ID NO: 3596661 - RNA, 15 nt, Human
aucuaaauugaauaa

SEQ ID NO: 3596662 - RNA, 16 nt, Human
aucuaaauugaauaau

SEQ ID NO: 3596663 - RNA, 17 nt, Human
aucuaaauuuagaaauc

SEQ ID NO: 3596664 - RNA, 15 nt, Human
aucuaacaauggaag

SEQ ID NO: 3596665 - RNA, 14 nt, Human
aucuaacauuauua

SEQ ID NO: 3596666 - RNA, 16 nt, Human
aucuaacauuauuacu

SEQ ID NO: 3596667 - RNA, 14 nt, Human
aucuaaccacauca

SEQ ID NO: 3596668 - RNA, 13 nt, Human
aucuaaccucauc

SEQ ID NO: 3596669 - RNA, 18 nt, Human
aucuaagaauaauaaaau

SEQ ID NO: 3596670 - RNA, 14 nt, Human
aucuaagcugcagc

SEQ ID NO: 3596671 - RNA, 18 nt, Human
aucuaagcugcagcuucc

SEQ ID NO: 3596672 - RNA, 18 nt, Human
aucuaaggaugucacagg

SEQ ID NO: 3596673 - RNA, 17 nt, Human
aucuaaggcuguuugcu

SEQ ID NO: 3596674 - RNA, 21 nt, Human
aucuaagugccucacauuuuu

SEQ ID NO: 3596675 - RNA, 20 nt, Human
aucuaauauauaugaauaaa

SEQ ID NO: 3596676 - RNA, 15 nt, Human
aucuaauucuuuaau

SEQ ID NO: 3596677 - RNA, 13 nt, Human
aucuaauuuauaa

SEQ ID NO: 3596678 - RNA, 12 nt, Human
aucuaauuucaa

SEQ ID NO: 3596679 - RNA, 14 nt, Human
aucuacaucuuuuu

SEQ ID NO: 3596680 - RNA, 20 nt, Human
aucuacaucuuuuuucacaa

SEQ ID NO: 3596681 - RNA, 21 nt, Human
aucuacaucuuuuuucacaaa

SEQ ID NO: 3596682 - RNA, 12 nt, Human
aucuaccaacuu

SEQ ID NO: 3596683 - RNA, 15 nt, Human
aucuaccaacuuuca

SEQ ID NO: 3596684 - RNA, 17 nt, Human
augaaucugauuuuuau

SEQ ID NO: 3596685 - RNA, 16 nt, Human
augaaucugcucacuu

SEQ ID NO: 3596686 - RNA, 18 nt, Human
augaaucugcucacuuua

SEQ ID NO: 3596687 - RNA, 24 nt, Human
augaaucugucucccaguuaugaa

SEQ ID NO: 3596688 - RNA, 23 nt, Human
augaaucuuuguuucagguucag

SEQ ID NO: 3596689 - RNA, 16 nt, Human
augaaucuuuuccacu

SEQ ID NO: 3596690 - RNA, 14 nt, Human
augaaugaaugaau

SEQ ID NO: 3596691 - RNA, 16 nt, Human
augaaugagaaucuac

SEQ ID NO: 3596692 - RNA, 15 nt, Human
augaaugauuugcau

SEQ ID NO: 3596693 - RNA, 17 nt, Human
augaaugauuugcauau

SEQ ID NO: 3596694 - RNA, 13 nt, Human
augaaugcccagu

SEQ ID NO: 3596695 - RNA, 16 nt, Human
augaaugcuuuuagug

SEQ ID NO: 3596696 - RNA, 23 nt, Human
augaauggcuaagcaaaauguga

SEQ ID NO: 3596697 - RNA, 17 nt, Human
augaaugggcaaaacug

SEQ ID NO: 3596698 - RNA, 18 nt, Human
augaaugggcaaaacuga

SEQ ID NO: 3596699 - RNA, 21 nt, Human
augaaugggcugagcugccug

SEQ ID NO: 3596700 - RNA, 21 nt, Human
augaaugguauggaacucucu

SEQ ID NO: 3596701 - RNA, 15 nt, Human
augaauguaaauuug

SEQ ID NO: 3596702 - RNA, 13 nt, Human
augaauguaucag

SEQ ID NO: 3596703 - RNA, 18 nt, Human
augaaugucagugugacu

SEQ ID NO: 3596704 - RNA, 20 nt, Human
augaaugucagugugacuga

SEQ ID NO: 3596705 - RNA, 21 nt, Human
augaaugugugugguuuuuuu

SEQ ID NO: 3596706 - RNA, 13 nt, Human
augaauguuccug

SEQ ID NO: 3596707 - RNA, 11 nt, Human
augaauguuua

SEQ ID NO: 3596708 - RNA, 14 nt, Human
augaauuaaagugg

SEQ ID NO: 3596709 - RNA, 13 nt, Human
augaauuaaauuu

SEQ ID NO: 3596710 - RNA, 16 nt, Human
augaauuacauuugua

SEQ ID NO: 3596711 - RNA, 17 nt, Human
augaauuacauuuguau

SEQ ID NO: 3596712 - RNA, 19 nt, Human
augaauuacauuuguauaa

SEQ ID NO: 3596713 - RNA, 23 nt, Human
augaauuaguuuuauaugcuucu

SEQ ID NO: 3596714 - RNA, 15 nt, Human
augaauuauuacagu

SEQ ID NO: 3596715 - RNA, 13 nt, Human
augaauuguacag

SEQ ID NO: 3596716 - RNA, 14 nt, Human
augaauuguacaga

SEQ ID NO: 3596717 - RNA, 13 nt, Human
augaauuuaaaua

SEQ ID NO: 3596718 - RNA, 12 nt, Human
augaauuuagug

SEQ ID NO: 3596719 - RNA, 22 nt, Human
augaauuuauugcacauuguuc

SEQ ID NO: 3596720 - RNA, 13 nt, Human
augaauuucucua

SEQ ID NO: 3596721 - RNA, 20 nt, Human
augaauuuggagacucugug

SEQ ID NO: 3596722 - RNA, 15 nt, Human
augaauuuuaaagua

SEQ ID NO: 3596723 - RNA, 16 nt, Human
augaauuuuaaaguau

SEQ ID NO: 3596724 - RNA, 13 nt, Human
augaauuuuacau

SEQ ID NO: 3596725 - RNA, 17 nt, Human
augaauuuuagcuuuug

SEQ ID NO: 3596726 - RNA, 23 nt, Human
augaauuuuguuuggacuucuuu

SEQ ID NO: 3596727 - RNA, 20 nt, Human
augaauuuuuuuauuucugu

SEQ ID NO: 3596728 - RNA, 22 nt, Human
augaauuuuuuucaucuucucu

SEQ ID NO: 3596729 - RNA, 14 nt, Human
augacaaaaaaugu

SEQ ID NO: 3596730 - RNA, 14 nt, Human
augacaacagaagc

SEQ ID NO: 3596731 - RNA, 19 nt, Human
augacaacagaagcuucag

SEQ ID NO: 3596732 - RNA, 14 nt, Human
augacaacuucuaa

SEQ ID NO: 3596733 - RNA, 18 nt, Human
augacaacuucuaauugc

SEQ ID NO: 3596734 - RNA, 18 nt, Human
augacaagccccaggcag

SEQ ID NO: 3596735 - RNA, 17 nt, Human
augacaaucaugugugu

SEQ ID NO: 3596736 - RNA, 15 nt, Human
augacaaugacugug

SEQ ID NO: 3596737 - RNA, 22 nt, Human
augacaccaucuuuuauucuuu

SEQ ID NO: 3596738 - RNA, 22 nt, Human
augacacccgugagcgccugug

SEQ ID NO: 3596739 - RNA, 19 nt, Human
augacacgaauauugcuga

SEQ ID NO: 3596740 - RNA, 14 nt, Human
augacacugaaaug

SEQ ID NO: 3596741 - RNA, 16 nt, Human
augacacugaaaugcc

SEQ ID NO: 3596742 - RNA, 12 nt, Human
augacagagcga

SEQ ID NO: 3596743 - RNA, 21 nt, Human
augacagcugucccugucacc

SEQ ID NO: 3596744 - RNA, 17 nt, Human
augacaggauguuugcu

SEQ ID NO: 3596745 - RNA, 17 nt, Human
augacaggccugaagau

SEQ ID NO: 3596746 - RNA, 19 nt, Human
augacaggccugaagauau

SEQ ID NO: 3596747 - RNA, 23 nt, Human
augacaggccugaagauauuacu

SEQ ID NO: 3596748 - RNA, 24 nt, Human
augacaggccugaagauauuacua

SEQ ID NO: 3596749 - RNA, 21 nt, Human
augacaguaauuguguuuaca

SEQ ID NO: 3596750 - RNA, 13 nt, Human
augacaucuuuuu

SEQ ID NO: 3596751 - RNA, 14 nt, Human
augacaucuuuuua

SEQ ID NO: 3596752 - RNA, 15 nt, Human
augacaucuuuuuaa

SEQ ID NO: 3596753 - RNA, 21 nt, Human
augacaugaauuuuagcuuuu

SEQ ID NO: 3596754 - RNA, 13 nt, Human
augacauugcuaa

SEQ ID NO: 3596755 - RNA, 23 nt, Human
augacauugcuaagaugcucuau

SEQ ID NO: 3596756 - RNA, 19 nt, Human
augacauuguuaaaauaaa

SEQ ID NO: 3596757 - RNA, 22 nt, Human
augacauuuauaucacauguuu

SEQ ID NO: 3596758 - RNA, 21 nt, Human
augacauuucuuugugcuuug

SEQ ID NO: 3596759 - RNA, 14 nt, Human
augacauuuugcca

SEQ ID NO: 3596760 - RNA, 17 nt, Human
augacauuuugccaaaa

SEQ ID NO: 3596761 - RNA, 23 nt, Human
augaccaauauuauacuaagaaa

SEQ ID NO: 3596762 - RNA, 17 nt, Human
augaccaauuuuaacuu

SEQ ID NO: 3596763 - RNA, 14 nt, Human
augaccacaccugc

SEQ ID NO: 3596764 - RNA, 15 nt, Human
augaccacacuccag

SEQ ID NO: 3596765 - RNA, 19 nt, Human
augaccacuuuuuagaaag

SEQ ID NO: 3596766 - RNA, 18 nt, Human
augaccagaugcguccca

SEQ ID NO: 3596767 - RNA, 20 nt, Human
augaccauaaaauuagacau

SEQ ID NO: 3596768 - RNA, 17 nt, Human
augaccauacugaggga

SEQ ID NO: 3596769 - RNA, 12 nt, Human
augacccacccc

SEQ ID NO: 3596770 - RNA, 17 nt, Human
augacccaccccugugc

SEQ ID NO: 3596771 - RNA, 19 nt, Human
augacccaccccugugcuc

SEQ ID NO: 3596772 - RNA, 18 nt, Human
augacccaggcugccuga

SEQ ID NO: 3596773 - RNA, 14 nt, Human
augacccaggcugg

SEQ ID NO: 3596774 - RNA, 16 nt, Human
augacccaggcugggc

SEQ ID NO: 3596775 - RNA, 22 nt, Human
augacccaggcugggcaaggag

SEQ ID NO: 3596776 - RNA, 14 nt, Human
augacccugccucu

SEQ ID NO: 3596777 - RNA, 20 nt, Human
augacccugccucucccagg

SEQ ID NO: 3596778 - RNA, 23 nt, Human
augacccugcgaaggggcccugg

SEQ ID NO: 3596779 - RNA, 14 nt, Human
augacccuuuucau

SEQ ID NO: 3596780 - RNA, 18 nt, Human
augaccuaguuuuccaug

SEQ ID NO: 3596781 - RNA, 16 nt, Human
augaccucaugcaucu

SEQ ID NO: 3596782 - RNA, 13 nt, Human
augaccuccagcu

SEQ ID NO: 3596783 - RNA, 19 nt, Human
augaccuccagcuuuccug

SEQ ID NO: 3596784 - RNA, 18 nt, Human
augaccucuuccuuuagg

SEQ ID NO: 3596785 - RNA, 21 nt, Human
augaccugugaccagcacugu

SEQ ID NO: 3596786 - RNA, 18 nt, Human
augaccuucuaggaagcu

SEQ ID NO: 3596787 - RNA, 21 nt, Human
augaccuuucaauaggaaaaa

SEQ ID NO: 3596788 - RNA, 16 nt, Human
augacgacaaagcugc

SEQ ID NO: 3596789 - RNA, 23 nt, Human
augacgacaaagcugcuaaaucu

SEQ ID NO: 3596790 - RNA, 16 nt, Human
augacggaagaacaua

SEQ ID NO: 3596791 - RNA, 23 nt, Human
augacguacaaguaguucuguau

SEQ ID NO: 3596792 - RNA, 22 nt, Human
aucuucccuagaggguuccugu

SEQ ID NO: 3596793 - RNA, 16 nt, Human
aucuuccucugcuaaa

SEQ ID NO: 3596794 - RNA, 19 nt, Human
aucuuccucugcuaaauug

SEQ ID NO: 3596795 - RNA, 20 nt, Human
aucuuccucugcuaaauuga

SEQ ID NO: 3596796 - RNA, 19 nt, Human
aucuuccuggucgaaaguu

SEQ ID NO: 3596797 - RNA, 22 nt, Human
aucuuccuggucgaaaguuagu

SEQ ID NO: 3596798 - RNA, 13 nt, Human
aucuuccuguguc

SEQ ID NO: 3596799 - RNA, 18 nt, Human
aucuucgggaccaggauu

SEQ ID NO: 3596800 - RNA, 16 nt, Human
aucuucucaaguucua

SEQ ID NO: 3596801 - RNA, 18 nt, Human
aucuucucaaguucuaag

SEQ ID NO: 3596802 - RNA, 20 nt, Human
aucuucucaaguucuaagau

SEQ ID NO: 3596803 - RNA, 16 nt, Human
aucuucucacucccuu

SEQ ID NO: 3596804 - RNA, 24 nt, Human
aucuucucagaaggcaaaugacuu

SEQ ID NO: 3596805 - RNA, 14 nt, Human
aucuucucuggcga

SEQ ID NO: 3596806 - RNA, 17 nt, Human
aucuucugcaauugcuu

SEQ ID NO: 3596807 - RNA, 14 nt, Human
aucuucugccuucu

SEQ ID NO: 3596808 - RNA, 22 nt, Human
aucuucugguuuaaacuuguuu

SEQ ID NO: 3596809 - RNA, 20 nt, Human
aucuucuuaugcaauuuccu

SEQ ID NO: 3596810 - RNA, 14 nt, Human
aucuucuuuauaau

SEQ ID NO: 3596811 - RNA, 14 nt, Human
aucuucuuugcagc

SEQ ID NO: 3596812 - RNA, 12 nt, Human
aucuugaaauua

SEQ ID NO: 3596813 - RNA, 23 nt, Human
aucuugaaauuaagaaggcaaaa

SEQ ID NO: 3596814 - RNA, 18 nt, Human
aucuugaagacuuuucuu

SEQ ID NO: 3596815 - RNA, 14 nt, Human
aucuugaagggccc

SEQ ID NO: 3596816 - RNA, 17 nt, Human
aucuugaagggcccagg

SEQ ID NO: 3596817 - RNA, 18 nt, Human
aucuugaauaauguaaga

SEQ ID NO: 3596818 - RNA, 19 nt, Human
aucuugaauguggucucag

SEQ ID NO: 3596819 - RNA, 20 nt, Human
aucuugaauguggucucagg

SEQ ID NO: 3596820 - RNA, 17 nt, Human
aucuugaauuguaagga

SEQ ID NO: 3596821 - RNA, 22 nt, Human
aucuugaccaagcaggaagcuc

SEQ ID NO: 3596822 - RNA, 16 nt, Human
aucuugacucacugca

SEQ ID NO: 3596823 - RNA, 20 nt, Human
aucuugauacauucaaauuu

SEQ ID NO: 3596824 - RNA, 21 nt, Human
aucuugauacauucaaauuug

SEQ ID NO: 3596825 - RNA, 13 nt, Human
aucuugcauguaa

SEQ ID NO: 3596826 - RNA, 23 nt, Human
aucuugcgaauccaagcucccug

SEQ ID NO: 3596827 - RNA, 20 nt, Human
aucuugcucuaucucacagc

SEQ ID NO: 3596828 - RNA, 21 nt, Human
aucuugcucuaucucacagca

SEQ ID NO: 3596829 - RNA, 23 nt, Human
aucuugcucuaucucacagcaca

SEQ ID NO: 3596830 - RNA, 17 nt, Human
aucuugcucucuuuuau

SEQ ID NO: 3596831 - RNA, 13 nt, Human
aucuugcucugcu

SEQ ID NO: 3596832 - RNA, 16 nt, Human
aucuugcucuguaauc

SEQ ID NO: 3596833 - RNA, 23 nt, Human
aucuugcuuuuuuucaccaauau

SEQ ID NO: 3596834 - RNA, 16 nt, Human
aucuuggacaaaucac

SEQ ID NO: 3596835 - RNA, 17 nt, Human
aucuuggagacccugca

SEQ ID NO: 3596836 - RNA, 21 nt, Human
aucuuggauagcuaauaauga

SEQ ID NO: 3596837 - RNA, 18 nt, Human
aucuuggcagguaggaau

SEQ ID NO: 3596838 - RNA, 21 nt, Human
aucuuggcuauguaauucuug

SEQ ID NO: 3596839 - RNA, 17 nt, Human
aucuugggacuggguuu

SEQ ID NO: 3596840 - RNA, 23 nt, Human
aucuuggggacaucucuuugaau

SEQ ID NO: 3596841 - RNA, 23 nt, Human
aucuuggggggguggccgcugag

SEQ ID NO: 3596842 - RNA, 21 nt, Human
aucuugguuugccuuccagaa

SEQ ID NO: 3596843 - RNA, 18 nt, Human
aucuuguagcuuuaucaa

SEQ ID NO: 3596844 - RNA, 19 nt, Human
aucuuguagcuuuaucaaa

SEQ ID NO: 3596845 - RNA, 16 nt, Human
aucuuguauacacaua

SEQ ID NO: 3596846 - RNA, 11 nt, Human
aucuugucaug

SEQ ID NO: 3596847 - RNA, 15 nt, Human
aucuugucaugugua

SEQ ID NO: 3596848 - RNA, 16 nt, Human
aucuugucauguguau

SEQ ID NO: 3596849 - RNA, 17 nt, Human
aucuugucauguguaua

SEQ ID NO: 3596850 - RNA, 13 nt, Human
aucuugucucaau

SEQ ID NO: 3596851 - RNA, 15 nt, Human
aucuugugaaaauaa

SEQ ID NO: 3596852 - RNA, 14 nt, Human
aucuuguucaggaa

SEQ ID NO: 3596853 - RNA, 16 nt, Human
aucuuguuucugaaaa

SEQ ID NO: 3596854 - RNA, 20 nt, Human
aucuuuaaaagaugcuuuua

SEQ ID NO: 3596855 - RNA, 15 nt, Human
aucuuuaaaauacac

SEQ ID NO: 3596856 - RNA, 14 nt, Human
aucuuuaagaaaaa

SEQ ID NO: 3596857 - RNA, 13 nt, Human
aucuuuaauuaaa

SEQ ID NO: 3596858 - RNA, 17 nt, Human
aucuuuaccuguauaca

SEQ ID NO: 3596859 - RNA, 16 nt, Human
aucuuuagaaaaggca

SEQ ID NO: 3596860 - RNA, 15 nt, Human
aucuuuauaaaugua

SEQ ID NO: 3596861 - RNA, 14 nt, Human
aucuuuauuaauca

SEQ ID NO: 3596862 - RNA, 15 nt, Human
aucuuuauugaaauu

SEQ ID NO: 3596863 - RNA, 19 nt, Human
aucuuucacccacagaaag

SEQ ID NO: 3596864 - RNA, 20 nt, Human
aucuuucacccacagaaaga

SEQ ID NO: 3596865 - RNA, 17 nt, Human
aucuuucagaaauauaa

SEQ ID NO: 3596866 - RNA, 19 nt, Human
aucuuucauuaaaggcuuc

SEQ ID NO: 3596867 - RNA, 20 nt, Human
aucuuucauuaaaggcuucu

SEQ ID NO: 3596868 - RNA, 12 nt, Human
aucuuucccucc

SEQ ID NO: 3596869 - RNA, 16 nt, Human
aucuuucccuccuugg

SEQ ID NO: 3596870 - RNA, 17 nt, Human
aucuuucgcacagcagu

SEQ ID NO: 3596871 - RNA, 14 nt, Human
aucuuucugcacac

SEQ ID NO: 3596872 - RNA, 22 nt, Human
aucuuucuucuauuuuauuccc

SEQ ID NO: 3596873 - RNA, 18 nt, Human
aucuuucuugaucaacau

SEQ ID NO: 3596874 - RNA, 14 nt, Human
aucuuucuuuaccu

SEQ ID NO: 3596875 - RNA, 17 nt, Human
aucuuucuuucuuagaa

SEQ ID NO: 3596876 - RNA, 20 nt, Human
aucuuucuuucuuagaaauu

SEQ ID NO: 3596877 - RNA, 16 nt, Human
aucuuugaaauuaugu

SEQ ID NO: 3596878 - RNA, 21 nt, Human
aucuuugauguguuguucuug

SEQ ID NO: 3596879 - RNA, 19 nt, Human
aucuuugauucuccuucag

SEQ ID NO: 3596880 - RNA, 20 nt, Human
augcacugugaaggacccuu

SEQ ID NO: 3596881 - RNA, 22 nt, Human
augcacuuucuauccucuguaa

SEQ ID NO: 3596882 - RNA, 20 nt, Human
augcacuuugcuuuaauaua

SEQ ID NO: 3596883 - RNA, 22 nt, Human
augcacuuugcuuuaauauaaa

SEQ ID NO: 3596884 - RNA, 17 nt, Human
augcacuuuguucuggc

SEQ ID NO: 3596885 - RNA, 21 nt, Human
augcacuuuguucuggcucuu

SEQ ID NO: 3596886 - RNA, 23 nt, Human
augcacuuuguucuggcucuucc

SEQ ID NO: 3596887 - RNA, 18 nt, Human
augcagaaauagacaaaa

SEQ ID NO: 3596888 - RNA, 15 nt, Human
augcagaacaaauga

SEQ ID NO: 3596889 - RNA, 14 nt, Human
augcagaauacuuu

SEQ ID NO: 3596890 - RNA, 17 nt, Human
augcagaauggcauuug

SEQ ID NO: 3596891 - RNA, 21 nt, Human
augcagaauguugauuacagu

SEQ ID NO: 3596892 - RNA, 13 nt, Human
augcagagagcca

SEQ ID NO: 3596893 - RNA, 14 nt, Human
augcagagagccau

SEQ ID NO: 3596894 - RNA, 16 nt, Human
augcagagagccauuu

SEQ ID NO: 3596895 - RNA, 18 nt, Human
augcagagguccacaaca

SEQ ID NO: 3596896 - RNA, 16 nt, Human
augcagagucagcaga

SEQ ID NO: 3596897 - RNA, 12 nt, Human
augcagaugcca

SEQ ID NO: 3596898 - RNA, 13 nt, Human
augcagcagcuug

SEQ ID NO: 3596899 - RNA, 20 nt, Human
augcagcagggaugcccugg

SEQ ID NO: 3596900 - RNA, 15 nt, Human
augcagcauuugaua

SEQ ID NO: 3596901 - RNA, 16 nt, Human
augcagcauuugauaa

SEQ ID NO: 3596902 - RNA, 11 nt, Human
augcagcccau

SEQ ID NO: 3596903 - RNA, 23 nt, Human
augcagcccaugcccaccugccc

SEQ ID NO: 3596904 - RNA, 16 nt, Human
augcagcccauuucuc

SEQ ID NO: 3596905 - RNA, 19 nt, Human
augcagccgccuuccuuga

SEQ ID NO: 3596906 - RNA, 21 nt, Human
augcagccgugaucaagggaa

SEQ ID NO: 3596907 - RNA, 13 nt, Human
augcagccucaca

SEQ ID NO: 3596908 - RNA, 17 nt, Human
augcagccucacagucc

SEQ ID NO: 3596909 - RNA, 18 nt, Human
augcagccucacaguccu

SEQ ID NO: 3596910 - RNA, 23 nt, Human
augcagcucaacuuucuguugga

SEQ ID NO: 3596911 - RNA, 14 nt, Human
augcagcucuuccu

SEQ ID NO: 3596912 - RNA, 21 nt, Human
augcagcugcacccucccucc

SEQ ID NO: 3596913 - RNA, 16 nt, Human
augcagcuuauacgaa

SEQ ID NO: 3596914 - RNA, 19 nt, Human
augcaggauuuguucucug

SEQ ID NO: 3596915 - RNA, 21 nt, Human
augcaggcacuuauuguaaau

SEQ ID NO: 3596916 - RNA, 22 nt, Human
augcaggcacuuauuguaaauu

SEQ ID NO: 3596917 - RNA, 12 nt, Human
augcaggcccuu

SEQ ID NO: 3596918 - RNA, 22 nt, Human
augcaggcccuuugaagccuca

SEQ ID NO: 3596919 - RNA, 15 nt, Human
augcaggcuccccug

SEQ ID NO: 3596920 - RNA, 20 nt, Human
augcagggauugcugccacu

SEQ ID NO: 3596921 - RNA, 13 nt, Human
augcagggcaguc

SEQ ID NO: 3596922 - RNA, 17 nt, Human
augcaggugaaacccag

SEQ ID NO: 3596923 - RNA, 19 nt, Human
augcaguacaggacauaua

SEQ ID NO: 3596924 - RNA, 20 nt, Human
augcaguacaggacauauau

SEQ ID NO: 3596925 - RNA, 13 nt, Human
augcagucuccuc

SEQ ID NO: 3596926 - RNA, 15 nt, Human
augcagucuccucuu

SEQ ID NO: 3596927 - RNA, 17 nt, Human
augcagucuccucuuua

SEQ ID NO: 3596928 - RNA, 18 nt, Human
augcagucuccucuuuaa

SEQ ID NO: 3596929 - RNA, 20 nt, Human
augcagucuccucuuuaaaa

SEQ ID NO: 3596930 - RNA, 19 nt, Human
augcagucuguccaggcuc

SEQ ID NO: 3596931 - RNA, 21 nt, Human
augcagucuuagaucauaguu

SEQ ID NO: 3596932 - RNA, 19 nt, Human
augcagugauauggcagaa

SEQ ID NO: 3596933 - RNA, 23 nt, Human
augcagugauauggcagaagaca

SEQ ID NO: 3596934 - RNA, 13 nt, Human
augcagugcucgc

SEQ ID NO: 3596935 - RNA, 19 nt, Human
augcagugcucgcuguugc

SEQ ID NO: 3596936 - RNA, 21 nt, Human
augcagugcucgcuguugcug

SEQ ID NO: 3596937 - RNA, 13 nt, Human
augcagugcuucc

SEQ ID NO: 3596938 - RNA, 23 nt, Human
augcagugguaugaucacggcuc

SEQ ID NO: 3596939 - RNA, 17 nt, Human
augcaguucugaagaag

SEQ ID NO: 3596940 - RNA, 16 nt, Human
augcaguugucucugu

SEQ ID NO: 3596941 - RNA, 18 nt, Human
augcaguugucucuguuu

SEQ ID NO: 3596942 - RNA, 23 nt, Human
augcaguuugaaauucugaauuu

SEQ ID NO: 3596943 - RNA, 15 nt, Human
augcauaaagucagu

SEQ ID NO: 3596944 - RNA, 17 nt, Human
augcauaaauaugcagu

SEQ ID NO: 3596945 - RNA, 14 nt, Human
augcauaaaugcau

SEQ ID NO: 3596946 - RNA, 12 nt, Human
augcauaacuga

SEQ ID NO: 3596947 - RNA, 19 nt, Human
augcauaacugacaaauca

SEQ ID NO: 3596948 - RNA, 21 nt, Human
augcauaauaauccugcaaag

SEQ ID NO: 3596949 - RNA, 10 nt, Human
augcauacac

SEQ ID NO: 3596950 - RNA, 11 nt, Human
augcauacaca

SEQ ID NO: 3596951 - RNA, 12 nt, Human
augcauacacac

SEQ ID NO: 3596952 - RNA, 15 nt, Human
augcauacacacaca

SEQ ID NO: 3596953 - RNA, 17 nt, Human
augcauacacacacaca

SEQ ID NO: 3596954 - RNA, 17 nt, Human
augcauacauacacaua

SEQ ID NO: 3596955 - RNA, 22 nt, Human
augcauaguucccauguuaaau

SEQ ID NO: 3596956 - RNA, 16 nt, Human
augcauauauauaugu

SEQ ID NO: 3596957 - RNA, 20 nt, Human
augcauauauauaugugugu

SEQ ID NO: 3596958 - RNA, 22 nt, Human
augcauaugucacuagaaugga

SEQ ID NO: 3596959 - RNA, 24 nt, Human
augcauauuauuuuauguugcaua

SEQ ID NO: 3596960 - RNA, 18 nt, Human
augcaucagaaagggagg

SEQ ID NO: 3596961 - RNA, 22 nt, Human
augcauccauuccucagggaca

SEQ ID NO: 3596962 - RNA, 23 nt, Human
augcauccauuccucagggacag

SEQ ID NO: 3596963 - RNA, 14 nt, Human
augcaucuccaccu

SEQ ID NO: 3596964 - RNA, 18 nt, Human
augcaucuuacugaaggu

SEQ ID NO: 3596965 - RNA, 13 nt, Human
augcaucuuugau

SEQ ID NO: 3596966 - RNA, 13 nt, Human
augcaugaacaag

SEQ ID NO: 3596967 - RNA, 21 nt, Human
augcaugaacaaguuuuaaug

SEQ ID NO: 3596968 - RNA, 15 nt, Human
augcaugcuuuccau

SEQ ID NO: 3596969 - RNA, 19 nt, Human
augcaugcuuuccauauuu

SEQ ID NO: 3596970 - RNA, 21 nt, Human
augcaugcuuuccauauuuuu

SEQ ID NO: 3596971 - RNA, 12 nt, Human
augcauggaaac

SEQ ID NO: 3596972 - RNA, 23 nt, Human
augcauggaaaccugaaaaaaag

SEQ ID NO: 3596973 - RNA, 16 nt, Human
augcauggaaauuccc

SEQ ID NO: 3596974 - RNA, 23 nt, Human
augcauggugcaguugacagcag

SEQ ID NO: 3596975 - RNA, 17 nt, Human
augcaugguuucagcac

SEQ ID NO: 3596976 - RNA, 19 nt, Human
augcaugguuucagcacua

SEQ ID NO: 3596977 - RNA, 19 nt, Human
augcauguaaucaacaugg

SEQ ID NO: 3596978 - RNA, 23 nt, Human
augcaugugguuugguuccucuc

SEQ ID NO: 3596979 - RNA, 20 nt, Human
augcauguuuuccagcuccu

SEQ ID NO: 3596980 - RNA, 14 nt, Human
augcauuaaaccug

SEQ ID NO: 3596981 - RNA, 20 nt, Human
augcauuaaaccugucucca

SEQ ID NO: 3596982 - RNA, 18 nt, Human
augcauuauaucaaaucu

SEQ ID NO: 3596983 - RNA, 13 nt, Human
augcauuauuaaa

SEQ ID NO: 3596984 - RNA, 22 nt, Human
augcauucacauuuagaaaagu

SEQ ID NO: 3596985 - RNA, 17 nt, Human
augcauugauauuguga

SEQ ID NO: 3596986 - RNA, 19 nt, Human
augcauugauauugugaac

SEQ ID NO: 3596987 - RNA, 14 nt, Human
augcauuguccucu

SEQ ID NO: 3596988 - RNA, 16 nt, Human
augcauuguugaggug

SEQ ID NO: 3596989 - RNA, 18 nt, Human
augcauuugaaaauuuug

SEQ ID NO: 3596990 - RNA, 12 nt, Human
augcauuugacu

SEQ ID NO: 3596991 - RNA, 14 nt, Human
augcauuugcauuu

SEQ ID NO: 3596992 - RNA, 17 nt, Human
augcauuuggguccagg

SEQ ID NO: 3596993 - RNA, 19 nt, Human
augcauuuugcagcaguga

SEQ ID NO: 3596994 - RNA, 17 nt, Human
augccaaaaaaaaauac

SEQ ID NO: 3596995 - RNA, 16 nt, Human
augccaaagaucacuu

SEQ ID NO: 3596996 - RNA, 14 nt, Human
augccaaauuaaaa

SEQ ID NO: 3596997 - RNA, 22 nt, Human
augccaaauuaaaaaagauaaa

SEQ ID NO: 3596998 - RNA, 20 nt, Human
augccaaauuguaguucuug

SEQ ID NO: 3596999 - RNA, 19 nt, Human
augccaacaagaaugcauu

SEQ ID NO: 3597000 - RNA, 13 nt, Human
augccaaccagcu

SEQ ID NO: 3597001 - RNA, 16 nt, Human
augccaagcacuucag

SEQ ID NO: 3597002 - RNA, 22 nt, Human
augccaaggaccuuuugcugcc

SEQ ID NO: 3597003 - RNA, 14 nt, Human
augccaaguuguuu

SEQ ID NO: 3597004 - RNA, 16 nt, Human
augccaaguuguuuga

SEQ ID NO: 3597005 - RNA, 17 nt, Human
augccaauauuaaaucu

SEQ ID NO: 3597006 - RNA, 16 nt, Human
augccacaaggacuuc

SEQ ID NO: 3597007 - RNA, 19 nt, Human
augccacaaggacuuccug

SEQ ID NO: 3597008 - RNA, 15 nt, Human
augccacacagagug

SEQ ID NO: 3597009 - RNA, 15 nt, Human
augccacaccaagcu

SEQ ID NO: 3597010 - RNA, 20 nt, Human
augccacaccaagcugugcc

SEQ ID NO: 3597011 - RNA, 23 nt, Human
augccacaccaagcugugccacc

SEQ ID NO: 3597012 - RNA, 14 nt, Human
augccacagcccug

SEQ ID NO: 3597013 - RNA, 19 nt, Human
augccaccaacuuacaaaa

SEQ ID NO: 3597014 - RNA, 20 nt, Human
augccacccccgcuggagga

SEQ ID NO: 3597015 - RNA, 23 nt, Human
augccacgcgguacaaaggaaaa

SEQ ID NO: 3597016 - RNA, 14 nt, Human
augccacguuccac

SEQ ID NO: 3597017 - RNA, 15 nt, Human
augccacuaaauuga

SEQ ID NO: 3597018 - RNA, 16 nt, Human
augccacuccucccuc

SEQ ID NO: 3597019 - RNA, 17 nt, Human
augccacuccucccucc

SEQ ID NO: 3597020 - RNA, 20 nt, Human
augccacuuccuuuuaacug

SEQ ID NO: 3597021 - RNA, 17 nt, Human
augccagccaagcucug

SEQ ID NO: 3597022 - RNA, 21 nt, Human
augccagccaagcucugcagu

SEQ ID NO: 3597023 - RNA, 16 nt, Human
augccagcuacuuccu

SEQ ID NO: 3597024 - RNA, 12 nt, Human
augccaggacac

SEQ ID NO: 3597025 - RNA, 21 nt, Human
augccagguucuauuuggaau

SEQ ID NO: 3597026 - RNA, 22 nt, Human
augccaguaacgcgucuuccug

SEQ ID NO: 3597027 - RNA, 20 nt, Human
augccaguauuuuuaaaggc

SEQ ID NO: 3597028 - RNA, 11 nt, Human
augccauaaua

SEQ ID NO: 3597029 - RNA, 15 nt, Human
aucuuuguaccaaaa

SEQ ID NO: 3597030 - RNA, 19 nt, Human
aucuuuguaccaaaauuuu

SEQ ID NO: 3597031 - RNA, 13 nt, Human
aucuuuguggcca

SEQ ID NO: 3597032 - RNA, 14 nt, Human
aucuuuguggccaa

SEQ ID NO: 3597033 - RNA, 23 nt, Human
aucuuuguggccaaggagcugcu

SEQ ID NO: 3597034 - RNA, 21 nt, Human
aucuuuguuaagguccugaaa

SEQ ID NO: 3597035 - RNA, 14 nt, Human
aucuuuuaaagaaa

SEQ ID NO: 3597036 - RNA, 14 nt, Human
aucuuuuauuuugc

SEQ ID NO: 3597037 - RNA, 12 nt, Human
aucuuuucuaca

SEQ ID NO: 3597038 - RNA, 22 nt, Human
aucuuuucuacagcaaauuuau

SEQ ID NO: 3597039 - RNA, 16 nt, Human
aucuuuucugaaucuu

SEQ ID NO: 3597040 - RNA, 14 nt, Human
aucuuuucuugccu

SEQ ID NO: 3597041 - RNA, 16 nt, Human
aucuuuugaagcauag

SEQ ID NO: 3597042 - RNA, 19 nt, Human
aucuuuugaccuguggugc

SEQ ID NO: 3597043 - RNA, 13 nt, Human
aucuuuuguauua

SEQ ID NO: 3597044 - RNA, 22 nt, Human
aucuuuuguauuaagaaaggaa

SEQ ID NO: 3597045 - RNA, 22 nt, Human
aucuuuuguucccauccucuuc

SEQ ID NO: 3597046 - RNA, 16 nt, Human
aucuuuuguuuccuuu

SEQ ID NO: 3597047 - RNA, 21 nt, Human
aucuuuuuaaccucuguucag

SEQ ID NO: 3597048 - RNA, 19 nt, Human
aucuuuuuaccuuucauac

SEQ ID NO: 3597049 - RNA, 13 nt, Human
aucuuuuuauuca

SEQ ID NO: 3597050 - RNA, 14 nt, Human
aucuuuuuucacaa

SEQ ID NO: 3597051 - RNA, 17 nt, Human
aucuuuuuucacaaauu

SEQ ID NO: 3597052 - RNA, 20 nt, Human
aucuuuuuuuuauuccacau

SEQ ID NO: 3597053 - RNA, 21 nt, Human
augaaaaaaggacaauuucaa

SEQ ID NO: 3597054 - RNA, 23 nt, Human
augaaaaaauauauaucaaauau

SEQ ID NO: 3597055 - RNA, 20 nt, Human
augaaaaacaaaaauaacau

SEQ ID NO: 3597056 - RNA, 13 nt, Human
augaaaaacaacc

SEQ ID NO: 3597057 - RNA, 17 nt, Human
augaaaaagaagaaucu

SEQ ID NO: 3597058 - RNA, 19 nt, Human
augaaaaagcauguacagu

SEQ ID NO: 3597059 - RNA, 15 nt, Human
augaaaaaugaaaga

SEQ ID NO: 3597060 - RNA, 19 nt, Human
augaaaaaugaaagaugau

SEQ ID NO: 3597061 - RNA, 18 nt, Human
augaaaaauugcugacug

SEQ ID NO: 3597062 - RNA, 21 nt, Human
augaaaaauuuaagcauuguu

SEQ ID NO: 3597063 - RNA, 22 nt, Human
augaaaaauuuaagcauuguuu

SEQ ID NO: 3597064 - RNA, 15 nt, Human
augaaaacagaaugu

SEQ ID NO: 3597065 - RNA, 19 nt, Human
augaaaacagaaugucucu

SEQ ID NO: 3597066 - RNA, 20 nt, Human
augaaaacaguguguaaaca

SEQ ID NO: 3597067 - RNA, 17 nt, Human
augaaaacauggaacag

SEQ ID NO: 3597068 - RNA, 16 nt, Human
augaaaacucuuugcu

SEQ ID NO: 3597069 - RNA, 13 nt, Human
augaaaagcuaga

SEQ ID NO: 3597070 - RNA, 18 nt, Human
augaaaagcuagaauuga

SEQ ID NO: 3597071 - RNA, 18 nt, Human
augaaaagcuuuguuugu

SEQ ID NO: 3597072 - RNA, 15 nt, Human
augaaaauaaagaau

SEQ ID NO: 3597073 - RNA, 18 nt, Human
augaaaauaacugaauuu

SEQ ID NO: 3597074 - RNA, 19 nt, Human
augaaaauaacugaauuug

SEQ ID NO: 3597075 - RNA, 19 nt, Human
augaaaauaaucucugauu

SEQ ID NO: 3597076 - RNA, 22 nt, Human
augaaaauacaacuuaaauaau

SEQ ID NO: 3597077 - RNA, 14 nt, Human
augaaaauauuuaa

SEQ ID NO: 3597078 - RNA, 18 nt, Human
augaaaauauuuuuuaca

SEQ ID NO: 3597079 - RNA, 19 nt, Human
augaaaauccuaccaaccu

SEQ ID NO: 3597080 - RNA, 22 nt, Human
agggggaggggguuacaaacug

SEQ ID NO: 3597081 - RNA, 19 nt, Human
agggggauccgacugcuuu

SEQ ID NO: 3597082 - RNA, 16 nt, Human
agggggaugccacucc

SEQ ID NO: 3597083 - RNA, 16 nt, Human
agggggcaagaggaau

SEQ ID NO: 3597084 - RNA, 15 nt, Human
agggggccuggaugc

SEQ ID NO: 3597085 - RNA, 15 nt, Human
agggggcggccuaug

SEQ ID NO: 3597086 - RNA, 14 nt, Human
agggggcugcuccc

SEQ ID NO: 3597087 - RNA, 15 nt, Human
agggggcugcuccca

SEQ ID NO: 3597088 - RNA, 16 nt, Human
agggggcugcucccac

SEQ ID NO: 3597089 - RNA, 19 nt, Human
agggggcugcucccaccug

SEQ ID NO: 3597090 - RNA, 13 nt, Human
agggggcugcugc

SEQ ID NO: 3597091 - RNA, 20 nt, Human
agggggcugcugcugggcuc

SEQ ID NO: 3597092 - RNA, 13 nt, Human
agggggcuggagg

SEQ ID NO: 3597093 - RNA, 12 nt, Human
agggggcuuccu

SEQ ID NO: 3597094 - RNA, 18 nt, Human
agggggcuugaagccaaa

SEQ ID NO: 3597095 - RNA, 13 nt, Human
aggggggagcugg

SEQ ID NO: 3597096 - RNA, 17 nt, Human
aggggggagggggaggg

SEQ ID NO: 3597097 - RNA, 21 nt, Human
agggggguugugaggccuggc

SEQ ID NO: 3597098 - RNA, 16 nt, Human
agggggucccaguggg

SEQ ID NO: 3597099 - RNA, 19 nt, Human
agggggucccagugggagg

SEQ ID NO: 3597100 - RNA, 24 nt, Human
agggggucccagugggaggggcag

SEQ ID NO: 3597101 - RNA, 15 nt, Human
agggggucguggaga

SEQ ID NO: 3597102 - RNA, 16 nt, Human
agggggucguggagag

SEQ ID NO: 3597103 - RNA, 15 nt, Human
aggggguggaggggu

SEQ ID NO: 3597104 - RNA, 18 nt, Human
aggggguggccucccaac

SEQ ID NO: 3597105 - RNA, 20 nt, Human
agggggugucucaggccaca

SEQ ID NO: 3597106 - RNA, 14 nt, Human
aggggguuacaaac

SEQ ID NO: 3597107 - RNA, 18 nt, Human
agggguaggggcugggaa

SEQ ID NO: 3597108 - RNA, 16 nt, Human
aggggucaaagaaaug

SEQ ID NO: 3597109 - RNA, 15 nt, Human
aggggucaaguuauu

SEQ ID NO: 3597110 - RNA, 20 nt, Human
aggggucagggaccaaggac

SEQ ID NO: 3597111 - RNA, 24 nt, Human
aggggucagggaccaaggaccccu

SEQ ID NO: 3597112 - RNA, 15 nt, Human
aggggucccagccac

SEQ ID NO: 3597113 - RNA, 19 nt, Human
aggggucccagccaccccg

SEQ ID NO: 3597114 - RNA, 16 nt, Human
agggguccuuggugug

SEQ ID NO: 3597115 - RNA, 19 nt, Human
aggggucgacuucgggcug

SEQ ID NO: 3597116 - RNA, 21 nt, Human
aggggucggcugaccaugcuc

SEQ ID NO: 3597117 - RNA, 19 nt, Human
aggggucuccaggaggaga

SEQ ID NO: 3597118 - RNA, 13 nt, Human
aggggucucccug

SEQ ID NO: 3597119 - RNA, 15 nt, Human
aggggugacacagac

SEQ ID NO: 3597120 - RNA, 16 nt, Human
aggggugacacagacu

SEQ ID NO: 3597121 - RNA, 23 nt, Human
aggggugacacagacucauccug

SEQ ID NO: 3597122 - RNA, 16 nt, Human
aggggugacggcccuc

SEQ ID NO: 3597123 - RNA, 13 nt, Human
aggggugauuuca

SEQ ID NO: 3597124 - RNA, 22 nt, Human
aggggugauuucagagagggca

SEQ ID NO: 3597125 - RNA, 16 nt, Human
aggggugcagaggcug

SEQ ID NO: 3597126 - RNA, 17 nt, Human
aggggugcagaggcugu

SEQ ID NO: 3597127 - RNA, 21 nt, Human
aggggugcccccuccucuccc

SEQ ID NO: 3597128 - RNA, 23 nt, Human
aggggugcccccuccucucccau

SEQ ID NO: 3597129 - RNA, 20 nt, Human
aggggugcggcggucccagc

SEQ ID NO: 3597130 - RNA, 21 nt, Human
aggggugcggcggucccagcu

SEQ ID NO: 3597131 - RNA, 22 nt, Human
aggggugcggcggucccagcuc

SEQ ID NO: 3597132 - RNA, 23 nt, Human
aggggugcggcggucccagcucc

SEQ ID NO: 3597133 - RNA, 15 nt, Human
agggguggagacugc

SEQ ID NO: 3597134 - RNA, 13 nt, Human
aggggugggcugg

SEQ ID NO: 3597135 - RNA, 16 nt, Human
agggguguggcagugg

SEQ ID NO: 3597136 - RNA, 18 nt, Human
agggguguggcagugguu

SEQ ID NO: 3597137 - RNA, 20 nt, Human
agggguuccucaaauuuuuu

SEQ ID NO: 3597138 - RNA, 19 nt, Human
agggguuccuucugggcau

SEQ ID NO: 3597139 - RNA, 19 nt, Human
agggguugccacaggccuc

SEQ ID NO: 3597140 - RNA, 22 nt, Human
agggguugccacaggccucccu

SEQ ID NO: 3597141 - RNA, 19 nt, Human
agggguugguugaggugga

SEQ ID NO: 3597142 - RNA, 20 nt, Human
agggguugguugagguggaa

SEQ ID NO: 3597143 - RNA, 14 nt, Human
agggguuuacagug

SEQ ID NO: 3597144 - RNA, 20 nt, Human
agggguuuuaggucucuucc

SEQ ID NO: 3597145 - RNA, 22 nt, Human
agggguuuuaggucucuucccc

SEQ ID NO: 3597146 - RNA, 22 nt, Human
agggguuuucgaagcucagccc

SEQ ID NO: 3597147 - RNA, 23 nt, Human
aggguaaaucaguaagagguguu

SEQ ID NO: 3597148 - RNA, 15 nt, Human
aggguaaggugccuu

SEQ ID NO: 3597149 - RNA, 14 nt, Human
aggguaccagcaga

SEQ ID NO: 3597150 - RNA, 15 nt, Human
aggguaccagcagaa

SEQ ID NO: 3597151 - RNA, 23 nt, Human
aggguaccuugaacacuggggga

SEQ ID NO: 3597152 - RNA, 20 nt, Human
aggguacuuccacugaugga

SEQ ID NO: 3597153 - RNA, 16 nt, Human
aggguagcccgccugc

SEQ ID NO: 3597154 - RNA, 20 nt, Human
aggguaggagggugggaagg

SEQ ID NO: 3597155 - RNA, 18 nt, Human
aggguaggcaggauuggg

SEQ ID NO: 3597156 - RNA, 16 nt, Human
aggguaggcuggaguu

SEQ ID NO: 3597157 - RNA, 12 nt, Human
aggguagggugg

SEQ ID NO: 3597158 - RNA, 18 nt, Human
aggguaucaaauaaaauu

SEQ ID NO: 3597159 - RNA, 22 nt, Human
aggguauccaaguuggacuggg

SEQ ID NO: 3597160 - RNA, 21 nt, Human
aggguauggacuaucugucug

SEQ ID NO: 3597161 - RNA, 18 nt, Human
aggguauugcuugccacu

SEQ ID NO: 3597162 - RNA, 19 nt, Human
agggucacuggggcccaag

SEQ ID NO: 3597163 - RNA, 13 nt, Human
agggucagagagg

SEQ ID NO: 3597164 - RNA, 21 nt, Human
agggucagagaggagucagag

SEQ ID NO: 3597165 - RNA, 20 nt, Human
agggucagaggaccuguauu

SEQ ID NO: 3597166 - RNA, 14 nt, Human
agggucaggagagg

SEQ ID NO: 3597167 - RNA, 15 nt, Human
agggucaggagaggg

SEQ ID NO: 3597168 - RNA, 12 nt, Human
agggucaggccu

SEQ ID NO: 3597169 - RNA, 14 nt, Human
agggucaggccuuu

SEQ ID NO: 3597170 - RNA, 21 nt, Human
aggguccagaaggagacaggc

SEQ ID NO: 3597171 - RNA, 20 nt, Human
aggguccauuuuucuuccag

SEQ ID NO: 3597172 - RNA, 17 nt, Human
agggucccaagcugggc

SEQ ID NO: 3597173 - RNA, 12 nt, Human
agggucccucug

SEQ ID NO: 3597174 - RNA, 12 nt, Human
agggucccuggg

SEQ ID NO: 3597175 - RNA, 20 nt, Human
agggucccugguggcagcuc

SEQ ID NO: 3597176 - RNA, 21 nt, Human
aggguccugcagccugcagga

SEQ ID NO: 3597177 - RNA, 17 nt, Human
aggguccuggcuccuga

SEQ ID NO: 3597178 - RNA, 19 nt, Human
aggguccuggcuccugagg

SEQ ID NO: 3597179 - RNA, 21 nt, Human
aggguccuggcuccugagggg

SEQ ID NO: 3597180 - RNA, 14 nt, Human
aggguccuucccuc

SEQ ID NO: 3597181 - RNA, 16 nt, Human
aggguccuucccucuc

SEQ ID NO: 3597182 - RNA, 22 nt, Human
aggguccuucccucuccccaag

SEQ ID NO: 3597183 - RNA, 22 nt, Human
aggguccuuuugacacugcucu

SEQ ID NO: 3597184 - RNA, 20 nt, Human
augaagauuauuuuuuauga

SEQ ID NO: 3597185 - RNA, 15 nt, Human
augaagcaaacacau

SEQ ID NO: 3597186 - RNA, 21 nt, Human
augaagcaaaugucaugcugc

SEQ ID NO: 3597187 - RNA, 22 nt, Human
augaagcaaaugucaugcugcc

SEQ ID NO: 3597188 - RNA, 14 nt, Human
augaagcaaggaag

SEQ ID NO: 3597189 - RNA, 22 nt, Human
augaagcagcuuuaaacaaauu

SEQ ID NO: 3597190 - RNA, 12 nt, Human
augaagcccaag

SEQ ID NO: 3597191 - RNA, 19 nt, Human
augaagcgaaacacagaga

SEQ ID NO: 3597192 - RNA, 15 nt, Human
augaagcuaccucaa

SEQ ID NO: 3597193 - RNA, 13 nt, Human
augaagcuguugu

SEQ ID NO: 3597194 - RNA, 18 nt, Human
augaagcuuguguaucca

SEQ ID NO: 3597195 - RNA, 19 nt, Human
augaagcuuuuaugugaaa

SEQ ID NO: 3597196 - RNA, 21 nt, Human
augaagcuuuuaugugaaaca

SEQ ID NO: 3597197 - RNA, 22 nt, Human
augaagcuuuuaugugaaacau

SEQ ID NO: 3597198 - RNA, 22 nt, Human
augaaggcagaaaaaugucauu

SEQ ID NO: 3597199 - RNA, 17 nt, Human
augaagguaaauaaaaa

SEQ ID NO: 3597200 - RNA, 16 nt, Human
augaagguuaggauuu

SEQ ID NO: 3597201 - RNA, 20 nt, Human
augaagguuaggauuuaaca

SEQ ID NO: 3597202 - RNA, 21 nt, Human
augaagguuaggauuuaacag

SEQ ID NO: 3597203 - RNA, 22 nt, Human
augaaguaaagccauuaaauga

SEQ ID NO: 3597204 - RNA, 19 nt, Human
augaaguaacuugucuuaa

SEQ ID NO: 3597205 - RNA, 14 nt, Human
augaaguauauaau

SEQ ID NO: 3597206 - RNA, 16 nt, Human
augaaguauauaaugg

SEQ ID NO: 3597207 - RNA, 21 nt, Human
augaaguaucuaaaaguguca

SEQ ID NO: 3597208 - RNA, 12 nt, Human
augaaguauuuu

SEQ ID NO: 3597209 - RNA, 20 nt, Human
augaaguuacuuucuuaaug

SEQ ID NO: 3597210 - RNA, 20 nt, Human
augaaguuuaaaacaguauu

SEQ ID NO: 3597211 - RNA, 21 nt, Human
augaaguuuaaaacaguauuu

SEQ ID NO: 3597212 - RNA, 15 nt, Human
augaaguuuauacag

SEQ ID NO: 3597213 - RNA, 16 nt, Human
augaaguuuauacagu

SEQ ID NO: 3597214 - RNA, 18 nt, Human
augaaguuugaacuucau

SEQ ID NO: 3597215 - RNA, 13 nt, Human
augaaguuugaau

SEQ ID NO: 3597216 - RNA, 14 nt, Human
augaaguuugaaug

SEQ ID NO: 3597217 - RNA, 15 nt, Human
augaaguuugaaugu

SEQ ID NO: 3597218 - RNA, 16 nt, Human
augaaguuugaauguu

SEQ ID NO: 3597219 - RNA, 19 nt, Human
augaaguuugaauguuaaa

SEQ ID NO: 3597220 - RNA, 20 nt, Human
augaaguuugaauguuaaau

SEQ ID NO: 3597221 - RNA, 22 nt, Human
augaaguuuguaguuguuuuaa

SEQ ID NO: 3597222 - RNA, 16 nt, Human
augaaguuuuacauug

SEQ ID NO: 3597223 - RNA, 20 nt, Human
augaauaaugccuuuguaac

SEQ ID NO: 3597224 - RNA, 17 nt, Human
augccuaccaauauuua

SEQ ID NO: 3597225 - RNA, 20 nt, Human
augccucagcccugacccug

SEQ ID NO: 3597226 - RNA, 14 nt, Human
augccucaguguau

SEQ ID NO: 3597227 - RNA, 12 nt, Human
augccuccaccg

SEQ ID NO: 3597228 - RNA, 13 nt, Human
augccuccaccgc

SEQ ID NO: 3597229 - RNA, 22 nt, Human
augccucccugacccugcagag

SEQ ID NO: 3597230 - RNA, 17 nt, Human
augccucuccuuuguau

SEQ ID NO: 3597231 - RNA, 21 nt, Human
augccucuccuuuguauauua

SEQ ID NO: 3597232 - RNA, 12 nt, Human
augccucugagg

SEQ ID NO: 3597233 - RNA, 19 nt, Human
augccucugaggccagccu

SEQ ID NO: 3597234 - RNA, 21 nt, Human
augccucugauaugggacuga

SEQ ID NO: 3597235 - RNA, 13 nt, Human
augccucugucua

SEQ ID NO: 3597236 - RNA, 17 nt, Human
augccucugucuagcau

SEQ ID NO: 3597237 - RNA, 22 nt, Human
augccucugucuagcaugccaa

SEQ ID NO: 3597238 - RNA, 21 nt, Human
augccugauugccaagcucag

SEQ ID NO: 3597239 - RNA, 12 nt, Human
augccugcucuu

SEQ ID NO: 3597240 - RNA, 23 nt, Human
augccugcuuugaauaaaugugu

SEQ ID NO: 3597241 - RNA, 18 nt, Human
augccuggaagcuuuguc

SEQ ID NO: 3597242 - RNA, 12 nt, Human
augccugguggc

SEQ ID NO: 3597243 - RNA, 14 nt, Human
augccugguggcag

SEQ ID NO: 3597244 - RNA, 16 nt, Human
augccugguggcagcu

SEQ ID NO: 3597245 - RNA, 18 nt, Human
augccugguggcagcugc

SEQ ID NO: 3597246 - RNA, 18 nt, Human
augccuguaauucagugu

SEQ ID NO: 3597247 - RNA, 16 nt, Human
augccuguccagccug

SEQ ID NO: 3597248 - RNA, 17 nt, Human
augccuguccagccugg

SEQ ID NO: 3597249 - RNA, 22 nt, Human
augccuguggaagagugugugu

SEQ ID NO: 3597250 - RNA, 12 nt, Human
augccuguggcu

SEQ ID NO: 3597251 - RNA, 15 nt, Human
augccuuaaaaugga

SEQ ID NO: 3597252 - RNA, 18 nt, Human
augccuuaaaauggaauu

SEQ ID NO: 3597253 - RNA, 22 nt, Human
augccuuaaaauggaauugaaa

SEQ ID NO: 3597254 - RNA, 18 nt, Human
augccuuacucuucuuga

SEQ ID NO: 3597255 - RNA, 18 nt, Human
augccuuacuuuguauga

SEQ ID NO: 3597256 - RNA, 15 nt, Human
augccuucuccagac

SEQ ID NO: 3597257 - RNA, 20 nt, Human
augccuuggggaggacaaaa

SEQ ID NO: 3597258 - RNA, 21 nt, Human
augccuuguauaauauugaaa

SEQ ID NO: 3597259 - RNA, 13 nt, Human
augccuuucuagu

SEQ ID NO: 3597260 - RNA, 12 nt, Human
augccuuugaga

SEQ ID NO: 3597261 - RNA, 14 nt, Human
augccuuugagaca

SEQ ID NO: 3597262 - RNA, 16 nt, Human
augccuuugagacagu

SEQ ID NO: 3597263 - RNA, 19 nt, Human
augccuuugagacaguuuc

SEQ ID NO: 3597264 - RNA, 21 nt, Human
augccuuugagacaguuucuu

SEQ ID NO: 3597265 - RNA, 13 nt, Human
augccuuuguaac

SEQ ID NO: 3597266 - RNA, 21 nt, Human
augccuuuucccaaaauguug

SEQ ID NO: 3597267 - RNA, 20 nt, Human
augccuuuucccaacuccag

SEQ ID NO: 3597268 - RNA, 22 nt, Human
augccuuuucccaacuccagaa

SEQ ID NO: 3597269 - RNA, 20 nt, Human
augcgacacugggaggccag

SEQ ID NO: 3597270 - RNA, 20 nt, Human
augcgcacaaggcugaccaa

SEQ ID NO: 3597271 - RNA, 12 nt, Human
augcgcagcccc

SEQ ID NO: 3597272 - RNA, 20 nt, Human
augcgcaggcuggcccugcc

SEQ ID NO: 3597273 - RNA, 15 nt, Human
augcgccaauaaacc

SEQ ID NO: 3597274 - RNA, 16 nt, Human
augcgccaauaaacca

SEQ ID NO: 3597275 - RNA, 22 nt, Human
augcgcccccuccgcccugcca

SEQ ID NO: 3597276 - RNA, 23 nt, Human
augcgcucagggccaugcugagg

SEQ ID NO: 3597277 - RNA, 12 nt, Human
augcggcccagc

SEQ ID NO: 3597278 - RNA, 14 nt, Human
augcggcccagccc

SEQ ID NO: 3597279 - RNA, 15 nt, Human
augcggcccagcccg

SEQ ID NO: 3597280 - RNA, 21 nt, Human
augcgggccagugcuccagcc

SEQ ID NO: 3597281 - RNA, 17 nt, Human
augcgggcugggcagcu

SEQ ID NO: 3597282 - RNA, 19 nt, Human
augcgggcugggcagcugu

SEQ ID NO: 3597283 - RNA, 18 nt, Human
augcgguagccagcacac

SEQ ID NO: 3597284 - RNA, 20 nt, Human
augcgguagccagcacacag

SEQ ID NO: 3597285 - RNA, 15 nt, Human
augcggucuagggaa

SEQ ID NO: 3597286 - RNA, 21 nt, Human
augcgguguuugguuuuuugu

SEQ ID NO: 3597287 - RNA, 22 nt, Human
augcgugcauaccacuuuuguu

SEQ ID NO: 3597288 - RNA, 16 nt, Human
augcguguuucugacu

SEQ ID NO: 3597289 - RNA, 17 nt, Human
augcguguuucugacuc

SEQ ID NO: 3597290 - RNA, 22 nt, Human
augcuaaaccuuaguacugagu

SEQ ID NO: 3597291 - RNA, 23 nt, Human
augcuaaagguuguauugcauau

SEQ ID NO: 3597292 - RNA, 15 nt, Human
augcuaacaaagaca

SEQ ID NO: 3597293 - RNA, 16 nt, Human
augcuaacaucuaaaa

SEQ ID NO: 3597294 - RNA, 17 nt, Human
augcuaacaucuaaaaa

SEQ ID NO: 3597295 - RNA, 19 nt, Human
augcuaacaucuaaaaaua

SEQ ID NO: 3597296 - RNA, 13 nt, Human
augcuaagaauuu

SEQ ID NO: 3597297 - RNA, 16 nt, Human
augcuaagacucagug

SEQ ID NO: 3597298 - RNA, 20 nt, Human
augcuaagggcaggcccaaa

SEQ ID NO: 3597299 - RNA, 16 nt, Human
augcuaauuuaaagag

SEQ ID NO: 3597300 - RNA, 18 nt, Human
augcuaauuuaaagagac

SEQ ID NO: 3597301 - RNA, 18 nt, Human
augcuacaggauuugaaa

SEQ ID NO: 3597302 - RNA, 17 nt, Human
augcuacaguaauaaau

SEQ ID NO: 3597303 - RNA, 13 nt, Human
augcuaccaccag

SEQ ID NO: 3597304 - RNA, 17 nt, Human
augcuaccaccagcugu

SEQ ID NO: 3597305 - RNA, 16 nt, Human
augcuacccagccauu

SEQ ID NO: 3597306 - RNA, 16 nt, Human
augcuacgugugauuu

SEQ ID NO: 3597307 - RNA, 21 nt, Human
augcuacuacaaaaaaguugu

SEQ ID NO: 3597308 - RNA, 14 nt, Human
augcuacugucuca

SEQ ID NO: 3597309 - RNA, 21 nt, Human
augcuagaacucccuuucaac

SEQ ID NO: 3597310 - RNA, 16 nt, Human
augcuagaagaaaaca

SEQ ID NO: 3597311 - RNA, 16 nt, Human
augcuagcucugagcc

SEQ ID NO: 3597312 - RNA, 17 nt, Human
augcuaugucauuucau

SEQ ID NO: 3597313 - RNA, 13 nt, Human
augcuauuaaagu

SEQ ID NO: 3597314 - RNA, 15 nt, Human
augcuauugaaaaug

SEQ ID NO: 3597315 - RNA, 13 nt, Human
augcuauuucuau

SEQ ID NO: 3597316 - RNA, 15 nt, Human
augcuauuucuauau

SEQ ID NO: 3597317 - RNA, 18 nt, Human
augcuauuuuuguuuuua

SEQ ID NO: 3597318 - RNA, 16 nt, Human
augcucaaagaaaucu

SEQ ID NO: 3597319 - RNA, 17 nt, Human
augcucaaagaaaucua

SEQ ID NO: 3597320 - RNA, 15 nt, Human
augcucaaguuuuuc

SEQ ID NO: 3597321 - RNA, 14 nt, Human
augcucagaccagc

SEQ ID NO: 3597322 - RNA, 13 nt, Human
augcucagcccug

SEQ ID NO: 3597323 - RNA, 19 nt, Human
augcucagguacagagaag

SEQ ID NO: 3597324 - RNA, 19 nt, Human
augcucaggugcuggggcc

SEQ ID NO: 3597325 - RNA, 14 nt, Human
augcucaucugcug

SEQ ID NO: 3597326 - RNA, 15 nt, Human
augcuccaaaugcug

SEQ ID NO: 3597327 - RNA, 16 nt, Human
augcuccaagauucua

SEQ ID NO: 3597328 - RNA, 19 nt, Human
augcuccagccaaccccug

SEQ ID NO: 3597329 - RNA, 13 nt, Human
augcuccccacag

SEQ ID NO: 3597330 - RNA, 14 nt, Human
augcuccccacagc

SEQ ID NO: 3597331 - RNA, 21 nt, Human
augcucccccauccuccccuu

SEQ ID NO: 3597332 - RNA, 13 nt, Human
augcuccuaguuu

SEQ ID NO: 3597333 - RNA, 22 nt, Human
augcuccuaguuugaccucaca

SEQ ID NO: 3597334 - RNA, 15 nt, Human
augcuccuuguuccu

SEQ ID NO: 3597335 - RNA, 18 nt, Human
augcuccuuguuccuaga

SEQ ID NO: 3597336 - RNA, 17 nt, Human
augcucuagugccuucu

SEQ ID NO: 3597337 - RNA, 19 nt, Human
augcucuaucuugcucugu

SEQ ID NO: 3597338 - RNA, 13 nt, Human
augcucucugcag

SEQ ID NO: 3597339 - RNA, 15 nt, Human
agggucgaaagcucu

SEQ ID NO: 3597340 - RNA, 17 nt, Human
agggucggaacccaagc

SEQ ID NO: 3597341 - RNA, 16 nt, Human
agggucggugccuuca

SEQ ID NO: 3597342 - RNA, 23 nt, Human
agggucuagggagagacccuugu

SEQ ID NO: 3597343 - RNA, 22 nt, Human
agggucucacuauguugcccag

SEQ ID NO: 3597344 - RNA, 14 nt, Human
agggucucacucug

SEQ ID NO: 3597345 - RNA, 15 nt, Human
agggucucacucugu

SEQ ID NO: 3597346 - RNA, 20 nt, Human
agggucucuagugcugugaa

SEQ ID NO: 3597347 - RNA, 12 nt, Human
agggucucuccc

SEQ ID NO: 3597348 - RNA, 13 nt, Human
agggucucugcug

SEQ ID NO: 3597349 - RNA, 14 nt, Human
agggucucugcugc

SEQ ID NO: 3597350 - RNA, 15 nt, Human
agggucucugcugcc

SEQ ID NO: 3597351 - RNA, 21 nt, Human
agggucugcucuuucucugcc

SEQ ID NO: 3597352 - RNA, 13 nt, Human
agggucuggagaa

SEQ ID NO: 3597353 - RNA, 20 nt, Human
agggucuguagguugcacac

SEQ ID NO: 3597354 - RNA, 21 nt, Human
agggucuguagguugcacacu

SEQ ID NO: 3597355 - RNA, 15 nt, Human
agggucugugugaau

SEQ ID NO: 3597356 - RNA, 18 nt, Human
agggucugugugaaugug

SEQ ID NO: 3597357 - RNA, 13 nt, Human
agggucuuuucau

SEQ ID NO: 3597358 - RNA, 18 nt, Human
agggucuuuucaucuggg

SEQ ID NO: 3597359 - RNA, 15 nt, Human
agggugccguguccc

SEQ ID NO: 3597360 - RNA, 19 nt, Human
agggugcuaguggugggca

SEQ ID NO: 3597361 - RNA, 21 nt, Human
aggguggacuuagaaagcagg

SEQ ID NO: 3597362 - RNA, 12 nt, Human
aggguggagacu

SEQ ID NO: 3597363 - RNA, 15 nt, Human
aggguggcagcaaca

SEQ ID NO: 3597364 - RNA, 16 nt, Human
aggguggcagcaacaa

SEQ ID NO: 3597365 - RNA, 11 nt, Human
aggguggcccu

SEQ ID NO: 3597366 - RNA, 17 nt, Human
agggugggagagcccag

SEQ ID NO: 3597367 - RNA, 18 nt, Human
agggugggagagcccagc

SEQ ID NO: 3597368 - RNA, 18 nt, Human
agggugggggagggaggu

SEQ ID NO: 3597369 - RNA, 20 nt, Human
agggugggggccaccugccu

SEQ ID NO: 3597370 - RNA, 20 nt, Human
aaugcaugcuuuccauauuu

SEQ ID NO: 3597371 - RNA, 18 nt, Human
aaugcauguuaggaaaau

SEQ ID NO: 3597372 - RNA, 22 nt, Human
aaugcauuauaggaucauuugu

SEQ ID NO: 3597373 - RNA, 18 nt, Human
aauuucauagcuguacuu

SEQ ID NO: 3597374 - RNA, 21 nt, Human
aauuuccacucaggucuguuu

SEQ ID NO: 3597375 - RNA, 20 nt, Human
aauuuccaguaccuuuguca

SEQ ID NO: 3597376 - RNA, 15 nt, Human
aauuucccaaagcag

SEQ ID NO: 3597377 - RNA, 17 nt, Human
aauuucccaaagcagug

SEQ ID NO: 3597378 - RNA, 22 nt, Human
aauuucccacaccguguaaacc

SEQ ID NO: 3597379 - RNA, 18 nt, Human
aauuucccacccccaccc

SEQ ID NO: 3597380 - RNA, 21 nt, Human
aauuucccaggacccugaagg

SEQ ID NO: 3597381 - RNA, 14 nt, Human
aauuuccccaacag

SEQ ID NO: 3597382 - RNA, 22 nt, Human
aauuuccccaacagugugaagu

SEQ ID NO: 3597383 - RNA, 17 nt, Human
aauuuccccuaaucuuu

SEQ ID NO: 3597384 - RNA, 18 nt, Human
aauuuccccuaaucuuuu

SEQ ID NO: 3597385 - RNA, 18 nt, Human
aauuuccuggugugaagg

SEQ ID NO: 3597386 - RNA, 14 nt, Human
aauuuccuuuuuga

SEQ ID NO: 3597387 - RNA, 17 nt, Human
aauuuccuuuuugacac

SEQ ID NO: 3597388 - RNA, 19 nt, Human
aauuuccuuuuugacacug

SEQ ID NO: 3597389 - RNA, 18 nt, Human
aauuucgccguugaagag

SEQ ID NO: 3597390 - RNA, 18 nt, Human
aauuucggauuuuuucca

SEQ ID NO: 3597391 - RNA, 20 nt, Human
aauuucggauuuuuuccaaa

SEQ ID NO: 3597392 - RNA, 21 nt, Human
aauuucggauuuuuuccaaaa

SEQ ID NO: 3597393 - RNA, 22 nt, Human
aauuucuaaaaagauuagcaag

SEQ ID NO: 3597394 - RNA, 13 nt, Human
aauuucuaaagau

SEQ ID NO: 3597395 - RNA, 23 nt, Human
aauuucuaaagauaauauuacug

SEQ ID NO: 3597396 - RNA, 16 nt, Human
aauuucuacuuugaag

SEQ ID NO: 3597397 - RNA, 22 nt, Human
aauuucuaggacugaauuauga

SEQ ID NO: 3597398 - RNA, 13 nt, Human
aauuucuccccag

SEQ ID NO: 3597399 - RNA, 20 nt, Human
aauuucuccucccuuccuuu

SEQ ID NO: 3597400 - RNA, 14 nt, Human
aauuucucuacaga

SEQ ID NO: 3597401 - RNA, 23 nt, Human
aauuucucuacagaugucccauu

SEQ ID NO: 3597402 - RNA, 17 nt, Human
aauuucugccauuucau

SEQ ID NO: 3597403 - RNA, 18 nt, Human
aauuucugccauuucaug

SEQ ID NO: 3597404 - RNA, 20 nt, Human
aauuucugccauuucauguc

SEQ ID NO: 3597405 - RNA, 19 nt, Human
aauuucugugcccuccuga

SEQ ID NO: 3597406 - RNA, 20 nt, Human
aauuucugugcccuccugac

SEQ ID NO: 3597407 - RNA, 20 nt, Human
aauuucuuacuaaacauuuu

SEQ ID NO: 3597408 - RNA, 17 nt, Human
aauuucuugguaagaag

SEQ ID NO: 3597409 - RNA, 20 nt, Human
aauuucuugguaagaagccg

SEQ ID NO: 3597410 - RNA, 15 nt, Human
aauuucuuguuucuc

SEQ ID NO: 3597411 - RNA, 16 nt, Human
aauuucuuuauaaaau

SEQ ID NO: 3597412 - RNA, 22 nt, Human
aauuucuuuauaaaauuuacug

SEQ ID NO: 3597413 - RNA, 11 nt, Human
aauuucuuuug

SEQ ID NO: 3597414 - RNA, 22 nt, Human
aauuucuuuuuuuccuuuuuaa

SEQ ID NO: 3597415 - RNA, 18 nt, Human
aauuugaaaauaauuguu

SEQ ID NO: 3597416 - RNA, 13 nt, Human
aauuugaaacauu

SEQ ID NO: 3597417 - RNA, 15 nt, Human
aauuugaaacauugc

SEQ ID NO: 3597418 - RNA, 14 nt, Human
aauuugaaauuuag

SEQ ID NO: 3597419 - RNA, 16 nt, Human
aauuugaaccaaaaca

SEQ ID NO: 3597420 - RNA, 12 nt, Human
aauuugaaugaa

SEQ ID NO: 3597421 - RNA, 16 nt, Human
aauuugacuaauuuua

SEQ ID NO: 3597422 - RNA, 16 nt, Human
aauuugacuuuucugu

SEQ ID NO: 3597423 - RNA, 18 nt, Human
aauuugagagaaauauga

SEQ ID NO: 3597424 - RNA, 17 nt, Human
aauuugagauacaaaca

SEQ ID NO: 3597425 - RNA, 13 nt, Human
aauuugagugcuc

SEQ ID NO: 3597426 - RNA, 14 nt, Human
aauuugauacauaa

SEQ ID NO: 3597427 - RNA, 17 nt, Human
aauuugauacauaauaa

SEQ ID NO: 3597428 - RNA, 16 nt, Human
aauuugauacuuauau

SEQ ID NO: 3597429 - RNA, 18 nt, Human
aauuugauacuuauauuu

SEQ ID NO: 3597430 - RNA, 20 nt, Human
aauuugauacuuauauuuuc

SEQ ID NO: 3597431 - RNA, 16 nt, Human
aauuugauugauuuga

SEQ ID NO: 3597432 - RNA, 20 nt, Human
aauuugauugauuugaagaa

SEQ ID NO: 3597433 - RNA, 15 nt, Human
aauuugauuucuauu

SEQ ID NO: 3597434 - RNA, 15 nt, Human
aauuugcaaaguacu

SEQ ID NO: 3597435 - RNA, 16 nt, Human
aauuugcaaaguacug

SEQ ID NO: 3597436 - RNA, 17 nt, Human
aauuugcaaaguacugu

SEQ ID NO: 3597437 - RNA, 16 nt, Human
aauuugcacuguuuaa

SEQ ID NO: 3597438 - RNA, 20 nt, Human
aauuugcacuuucaggaaca

SEQ ID NO: 3597439 - RNA, 15 nt, Human
aauuugcagcuucca

SEQ ID NO: 3597440 - RNA, 23 nt, Human
aauuugcauuaaauucacaaacu

SEQ ID NO: 3597441 - RNA, 18 nt, Human
aauuugccaaaauaaugu

SEQ ID NO: 3597442 - RNA, 21 nt, Human
aauuugccaaaauaaugucuu

SEQ ID NO: 3597443 - RNA, 13 nt, Human
aauuugccugcug

SEQ ID NO: 3597444 - RNA, 12 nt, Human
aauuugcugcug

SEQ ID NO: 3597445 - RNA, 18 nt, Human
aauuuggaaacuaauaaa

SEQ ID NO: 3597446 - RNA, 12 nt, Human
aauuuggauuua

SEQ ID NO: 3597447 - RNA, 23 nt, Human
aauuuggauuuaaaagccugcuc

SEQ ID NO: 3597448 - RNA, 15 nt, Human
aauuuggcaauuuug

SEQ ID NO: 3597449 - RNA, 18 nt, Human
aauuuggcuucuguuguc

SEQ ID NO: 3597450 - RNA, 22 nt, Human
aauuugggaagguuuguguuuu

SEQ ID NO: 3597451 - RNA, 21 nt, Human
aauuugggacccugcuuuaga

SEQ ID NO: 3597452 - RNA, 20 nt, Human
aauuuggggacagauucagu

SEQ ID NO: 3597453 - RNA, 16 nt, Human
aauuugguucuaauag

SEQ ID NO: 3597454 - RNA, 17 nt, Human
aauuugguucuaggccg

SEQ ID NO: 3597455 - RNA, 21 nt, Human
aauuugguuuucacauuggaa

SEQ ID NO: 3597456 - RNA, 24 nt, Human
aauuuguaaaaacagcauugcuuu

SEQ ID NO: 3597457 - RNA, 22 nt, Human
aauuuguaaaguugguuggaua

SEQ ID NO: 3597458 - RNA, 15 nt, Human
aauuuguaaccucag

SEQ ID NO: 3597459 - RNA, 14 nt, Human
aauuuguaaguuua

SEQ ID NO: 3597460 - RNA, 18 nt, Human
aauuuguaaugucuugag

SEQ ID NO: 3597461 - RNA, 15 nt, Human
aauuuguaauugcuu

SEQ ID NO: 3597462 - RNA, 20 nt, Human
aauuuguacauauguaaaau

SEQ ID NO: 3597463 - RNA, 17 nt, Human
aauuuguaccauuucag

SEQ ID NO: 3597464 - RNA, 19 nt, Human
aauuuguacuauuuaacug

SEQ ID NO: 3597465 - RNA, 20 nt, Human
aauuuguaucugaaggagau

SEQ ID NO: 3597466 - RNA, 14 nt, Human
aauuugucauuuug

SEQ ID NO: 3597467 - RNA, 17 nt, Human
aauuugucauuuugaag

SEQ ID NO: 3597468 - RNA, 16 nt, Human
aauuugucuugccuua

SEQ ID NO: 3597469 - RNA, 17 nt, Human
aauuugugauacaaugc

SEQ ID NO: 3597470 - RNA, 14 nt, Human
aauuuguggugauu

SEQ ID NO: 3597471 - RNA, 22 nt, Human
aauuuguguaauaaaguguuuu

SEQ ID NO: 3597472 - RNA, 21 nt, Human
aauuuguguguuuuuagcugu

SEQ ID NO: 3597473 - RNA, 18 nt, Human
aauuuguuauuuugcaac

SEQ ID NO: 3597474 - RNA, 16 nt, Human
aauuuguuugugcuuc

SEQ ID NO: 3597475 - RNA, 12 nt, Human
aauuuuaaaaaa

SEQ ID NO: 3597476 - RNA, 23 nt, Human
aauuuuaaaaaagggaguuuuug

SEQ ID NO: 3597477 - RNA, 14 nt, Human
aauuuuaaaaauac

SEQ ID NO: 3597478 - RNA, 18 nt, Human
aauuuuaaaaauacauau

SEQ ID NO: 3597479 - RNA, 15 nt, Human
aauuuuaaaaaucua

SEQ ID NO: 3597480 - RNA, 15 nt, Human
aauuuuaaaaucuga

SEQ ID NO: 3597481 - RNA, 14 nt, Human
aauuuuaaacaaag

SEQ ID NO: 3597482 - RNA, 14 nt, Human
aauuuuaaacauau

SEQ ID NO: 3597483 - RNA, 19 nt, Human
aauuuuaagauuccuuuuc

SEQ ID NO: 3597484 - RNA, 14 nt, Human
aauuuuaauuuagu

SEQ ID NO: 3597485 - RNA, 13 nt, Human
aauuuuacacauu

SEQ ID NO: 3597486 - RNA, 19 nt, Human
aauuuuacacgcuuuugug

SEQ ID NO: 3597487 - RNA, 20 nt, Human
aauuuuacacgcuuuuguga

SEQ ID NO: 3597488 - RNA, 18 nt, Human
aauuuuacccuuuagacu

SEQ ID NO: 3597489 - RNA, 23 nt, Human
aauuuuacuccauaaacagacug

SEQ ID NO: 3597490 - RNA, 13 nt, Human
aauuuuagaaaua

SEQ ID NO: 3597491 - RNA, 16 nt, Human
aauuuuagaaauauuc

SEQ ID NO: 3597492 - RNA, 17 nt, Human
aauuuuagaaauauuca

SEQ ID NO: 3597493 - RNA, 15 nt, Human
aauuuuagcuuuugu

SEQ ID NO: 3597494 - RNA, 17 nt, Human
aauuuuaguccaaauaa

SEQ ID NO: 3597495 - RNA, 14 nt, Human
aauuuuaguuuuuc

SEQ ID NO: 3597496 - RNA, 15 nt, Human
aauuuuaguuuuuca

SEQ ID NO: 3597497 - RNA, 20 nt, Human
aauuuuauacuuucccuacc

SEQ ID NO: 3597498 - RNA, 21 nt, Human
aauuuuauacuuucccuaccc

SEQ ID NO: 3597499 - RNA, 13 nt, Human
aauuuuaucugcc

SEQ ID NO: 3597500 - RNA, 22 nt, Human
aauuuuaugaacugcauguaua

SEQ ID NO: 3597501 - RNA, 20 nt, Human
aauuuuauuuugugcucauu

SEQ ID NO: 3597502 - RNA, 15 nt, Human
aauuuucaaguaauu

SEQ ID NO: 3597503 - RNA, 19 nt, Human
aauuuucacacacgugaga

SEQ ID NO: 3597504 - RNA, 14 nt, Human
aauuuucacaugaa

SEQ ID NO: 3597505 - RNA, 17 nt, Human
aauuuucacaugaacau

SEQ ID NO: 3597506 - RNA, 14 nt, Human
aauuuucacugugu

SEQ ID NO: 3597507 - RNA, 21 nt, Human
aauuuucacuuuuggcaauga

SEQ ID NO: 3597508 - RNA, 17 nt, Human
aauuuucagaccccagc

SEQ ID NO: 3597509 - RNA, 18 nt, Human
aauuuucagauuugcaca

SEQ ID NO: 3597510 - RNA, 12 nt, Human
aauuuucagcau

SEQ ID NO: 3597511 - RNA, 23 nt, Human
aauuuuccuguccucuuucagcu

SEQ ID NO: 3597512 - RNA, 20 nt, Human
aauuuuccuucagauauuuu

SEQ ID NO: 3597513 - RNA, 14 nt, Human
aauuuuccuugaag

SEQ ID NO: 3597514 - RNA, 23 nt, Human
aaguggcaaagcuguucuuccug

SEQ ID NO: 3597515 - RNA, 13 nt, Human
aaguggcaccugu

SEQ ID NO: 3597516 - RNA, 17 nt, Human
aaguggcaccugucugc

SEQ ID NO: 3597517 - RNA, 21 nt, Human
aaguggcaccugucugcucca

SEQ ID NO: 3597518 - RNA, 16 nt, Human
aaguggcauguuuugu

SEQ ID NO: 3597519 - RNA, 19 nt, Human
aaguggccaagaagcagug

SEQ ID NO: 3597520 - RNA, 22 nt, Human
aaguggccucuuugucuaaaac

SEQ ID NO: 3597521 - RNA, 20 nt, Human
aaguggcgugggagccagcc

SEQ ID NO: 3597522 - RNA, 14 nt, Human
aaguggcugcugac

SEQ ID NO: 3597523 - RNA, 11 nt, Human
aagugggacag

SEQ ID NO: 3597524 - RNA, 21 nt, Human
aagugggccaggacaggcccg

SEQ ID NO: 3597525 - RNA, 11 nt, Human
aagugggccca

SEQ ID NO: 3597526 - RNA, 22 nt, Human
aagugggcuugauucugcagua

SEQ ID NO: 3597527 - RNA, 17 nt, Human
aaguggggcagagccuc

SEQ ID NO: 3597528 - RNA, 20 nt, Human
aaguggguuauucuggaguu

SEQ ID NO: 3597529 - RNA, 19 nt, Human
aaguggucuuaagaaaugu

SEQ ID NO: 3597530 - RNA, 13 nt, Human
aaguggugcucag

SEQ ID NO: 3597531 - RNA, 17 nt, Human
aaguggugcucaguugu

SEQ ID NO: 3597532 - RNA, 18 nt, Human
aagugguucccucucuua

SEQ ID NO: 3597533 - RNA, 21 nt, Human
aauuuugaauaaauaaaugua

SEQ ID NO: 3597534 - RNA, 12 nt, Human
aauuuugacacu

SEQ ID NO: 3597535 - RNA, 17 nt, Human
aauuuugacuuaaugug

SEQ ID NO: 3597536 - RNA, 14 nt, Human
aauuuugaugaaca

SEQ ID NO: 3597537 - RNA, 14 nt, Human
aauuuugauguuuu

SEQ ID NO: 3597538 - RNA, 18 nt, Human
aauuuugccuaauacauu

SEQ ID NO: 3597539 - RNA, 20 nt, Human
aauuuugcuggaauuccuaa

SEQ ID NO: 3597540 - RNA, 18 nt, Human
aauuuugcuuuuaauuaa

SEQ ID NO: 3597541 - RNA, 18 nt, Human
aauuuuggaagauuuuca

SEQ ID NO: 3597542 - RNA, 12 nt, Human
aauuuuggaauu

SEQ ID NO: 3597543 - RNA, 17 nt, Human
aauuuuggccaaagugu

SEQ ID NO: 3597544 - RNA, 22 nt, Human
aauuuuggggauuuucaaaaga

SEQ ID NO: 3597545 - RNA, 21 nt, Human
aauuuugggguaagacuuuuu

SEQ ID NO: 3597546 - RNA, 20 nt, Human
aauuuuggucauagcauuca

SEQ ID NO: 3597547 - RNA, 15 nt, Human
aauuuugguuguauu

SEQ ID NO: 3597548 - RNA, 17 nt, Human
aauuuuguaaaggugaa

SEQ ID NO: 3597549 - RNA, 20 nt, Human
aauuuuguauguuaaagaga

SEQ ID NO: 3597550 - RNA, 13 nt, Human
aauuuuguauuuu

SEQ ID NO: 3597551 - RNA, 15 nt, Human
aauuuuguauuuucc

SEQ ID NO: 3597552 - RNA, 17 nt, Human
aauuuuguauuuuccaa

SEQ ID NO: 3597553 - RNA, 17 nt, Human
aauuuugugaagcaaaa

SEQ ID NO: 3597554 - RNA, 18 nt, Human
aauuuugugguuuucgag

SEQ ID NO: 3597555 - RNA, 14 nt, Human
aauuuuguucucug

SEQ ID NO: 3597556 - RNA, 15 nt, Human
aauuuuguucucugg

SEQ ID NO: 3597557 - RNA, 18 nt, Human
aauuuuguucucugggag

SEQ ID NO: 3597558 - RNA, 21 nt, Human
aauuuuguucucugggagaaa

SEQ ID NO: 3597559 - RNA, 24 nt, Human
aauuuuguucucugggagaaaauc

SEQ ID NO: 3597560 - RNA, 13 nt, Human
aauuuuguuucug

SEQ ID NO: 3597561 - RNA, 15 nt, Human
aauuuuuaaacaagu

SEQ ID NO: 3597562 - RNA, 19 nt, Human
aauuuuuaaacaaguauuu

SEQ ID NO: 3597563 - RNA, 22 nt, Human
aauuuuuaaaguauauauuuau

SEQ ID NO: 3597564 - RNA, 11 nt, Human
aauuuuuaagc

SEQ ID NO: 3597565 - RNA, 14 nt, Human
aauuuuuaaugaug

SEQ ID NO: 3597566 - RNA, 22 nt, Human
aauuuuuacccuaaugucuuca

SEQ ID NO: 3597567 - RNA, 22 nt, Human
aauuuuuaggaaguuuucugua

SEQ ID NO: 3597568 - RNA, 15 nt, Human
aauuuuuauucauaa

SEQ ID NO: 3597569 - RNA, 15 nt, Human
aauuuuuauuucuuc

SEQ ID NO: 3597570 - RNA, 15 nt, Human
aauuuuuauuucuuu

SEQ ID NO: 3597571 - RNA, 15 nt, Human
aauuuuuauuuuucu

SEQ ID NO: 3597572 - RNA, 15 nt, Human
aauuuuucagaugcu

SEQ ID NO: 3597573 - RNA, 20 nt, Human
aauuuuucagcucucuguau

SEQ ID NO: 3597574 - RNA, 14 nt, Human
aauuuuucauauuu

SEQ ID NO: 3597575 - RNA, 14 nt, Human
aauuuuucuguaua

SEQ ID NO: 3597576 - RNA, 14 nt, Human
aauuuuucuucuug

SEQ ID NO: 3597577 - RNA, 20 nt, Human
aauuuuugccuucauuaccu

SEQ ID NO: 3597578 - RNA, 18 nt, Human
aauuuuugcuuuuagaaa

SEQ ID NO: 3597579 - RNA, 19 nt, Human
aauuuuugcuuuuagaaaa

SEQ ID NO: 3597580 - RNA, 18 nt, Human
aauuuuuggauugacagu

SEQ ID NO: 3597581 - RNA, 19 nt, Human
aauuuuuggauugacagua

SEQ ID NO: 3597582 - RNA, 21 nt, Human
aauuuuuggauugacaguaac

SEQ ID NO: 3597583 - RNA, 18 nt, Human
aauuuuugguugaauaaa

SEQ ID NO: 3597584 - RNA, 12 nt, Human
aauuuuuguauu

SEQ ID NO: 3597585 - RNA, 17 nt, Human
aauuuuugucucagaag

SEQ ID NO: 3597586 - RNA, 18 nt, Human
aauuuuuuaucaugcaug

SEQ ID NO: 3597587 - RNA, 20 nt, Human
aauuuuuuaucaugcauguc

SEQ ID NO: 3597588 - RNA, 21 nt, Human
aauuuuuugguacaaaaauaa

SEQ ID NO: 3597589 - RNA, 17 nt, Human
aauuuuuuguugacauu

SEQ ID NO: 3597590 - RNA, 16 nt, Human
aauuuuuuuaauuuug

SEQ ID NO: 3597591 - RNA, 17 nt, Human
aauuuuuuuaauuuugu

SEQ ID NO: 3597592 - RNA, 15 nt, Human
aauuuuuuuagaaag

SEQ ID NO: 3597593 - RNA, 23 nt, Human
aauuuuuuuauguuuuguuucug

SEQ ID NO: 3597594 - RNA, 20 nt, Human
aauuuuuuucaccuagauuu

SEQ ID NO: 3597595 - RNA, 15 nt, Human
aauuuuuuuguaaua

SEQ ID NO: 3597596 - RNA, 17 nt, Human
aauuuuuuuguaugaaa

SEQ ID NO: 3597597 - RNA, 18 nt, Human
aauuuuuuuguauuuuag

SEQ ID NO: 3597598 - RNA, 19 nt, Human
aauuuuuuuuaaaauagaa

SEQ ID NO: 3597599 - RNA, 20 nt, Human
aauuuuuuuuaaaauagaaa

SEQ ID NO: 3597600 - RNA, 15 nt, Human
aauuuuuuuuaacau

SEQ ID NO: 3597601 - RNA, 17 nt, Human
aauuuuuuuuaacauuc

SEQ ID NO: 3597602 - RNA, 18 nt, Human
aauuuuuuuuaacauucc

SEQ ID NO: 3597603 - RNA, 19 nt, Human
aauuuuuuuuaacauuccu

SEQ ID NO: 3597604 - RNA, 23 nt, Human
aauuuuuuuuauuaguauuguug

SEQ ID NO: 3597605 - RNA, 14 nt, Human
aauuuuuuuucaug

SEQ ID NO: 3597606 - RNA, 15 nt, Human
aauuuuuuuucaugu

SEQ ID NO: 3597607 - RNA, 21 nt, Human
aauuuuuuuuguuguuucagu

SEQ ID NO: 3597608 - RNA, 19 nt, Human
aauuuuuuuuuccuagccc

SEQ ID NO: 3597609 - RNA, 15 nt, Human
aauuuuuuuuuccuu

SEQ ID NO: 3597610 - RNA, 20 nt, Human
aauuuuuuuuuuuuaacuuu

SEQ ID NO: 3597611 - RNA, 19 nt, Human
acaaaaaaaaaguuuuauu

SEQ ID NO: 3597612 - RNA, 14 nt, Human
acaaaaaaaaauuu

SEQ ID NO: 3597613 - RNA, 19 nt, Human
acaaaaaaaguugaaggcc

SEQ ID NO: 3597614 - RNA, 23 nt, Human
acaaaaaaauaccucaggaaaga

SEQ ID NO: 3597615 - RNA, 19 nt, Human
acaaaaaaaucuuccaauu

SEQ ID NO: 3597616 - RNA, 17 nt, Human
acaaaaaacaauauuua

SEQ ID NO: 3597617 - RNA, 11 nt, Human
acaaaaaagug

SEQ ID NO: 3597618 - RNA, 14 nt, Human
acaaaaaauguuuu

SEQ ID NO: 3597619 - RNA, 15 nt, Human
acaaaaacacagcaa

SEQ ID NO: 3597620 - RNA, 16 nt, Human
acaaaaacacagcaag

SEQ ID NO: 3597621 - RNA, 16 nt, Human
acaaaaagaacaaaaa

SEQ ID NO: 3597622 - RNA, 20 nt, Human
acaaaaagauaccuuaaaau

SEQ ID NO: 3597623 - RNA, 16 nt, Human
acaaaaagcuacuuau

SEQ ID NO: 3597624 - RNA, 14 nt, Human
acaaaaagcuuccc

SEQ ID NO: 3597625 - RNA, 20 nt, Human
acaaaaagguucucaggugu

SEQ ID NO: 3597626 - RNA, 12 nt, Human
acaaaaauaaaa

SEQ ID NO: 3597627 - RNA, 20 nt, Human
acaaaaauaaauuuauauga

SEQ ID NO: 3597628 - RNA, 15 nt, Human
acaaaaaucagccag

SEQ ID NO: 3597629 - RNA, 23 nt, Human
acaaaaaugaacugaaguuucac

SEQ ID NO: 3597630 - RNA, 12 nt, Human
acaaaaauuauc

SEQ ID NO: 3597631 - RNA, 11 nt, Human
acaaaacaaaa

SEQ ID NO: 3597632 - RNA, 15 nt, Human
acaaaacaaaacaaa

SEQ ID NO: 3597633 - RNA, 18 nt, Human
acaaaacaaaacaaaacu

SEQ ID NO: 3597634 - RNA, 15 nt, Human
acaaaacaaauccug

SEQ ID NO: 3597635 - RNA, 23 nt, Human
acaaaacacucggcauuucaaau

SEQ ID NO: 3597636 - RNA, 16 nt, Human
acaaaaccaaaaguua

SEQ ID NO: 3597637 - RNA, 15 nt, Human
acaaaaccacagugu

SEQ ID NO: 3597638 - RNA, 16 nt, Human
acaaaacuagagacuc

SEQ ID NO: 3597639 - RNA, 17 nt, Human
acaaaacuucuugucag

SEQ ID NO: 3597640 - RNA, 19 nt, Human
acaaaacuucuugucagac

SEQ ID NO: 3597641 - RNA, 18 nt, Human
acaaaagaaauaccuuga

SEQ ID NO: 3597642 - RNA, 22 nt, Human
acaaaagcugaacacauuucuu

SEQ ID NO: 3597643 - RNA, 18 nt, Human
acaaaaggauaaugaaua

SEQ ID NO: 3597644 - RNA, 21 nt, Human
acaaaaggguuuaaacugauu

SEQ ID NO: 3597645 - RNA, 21 nt, Human
acaaaagucugucuuuccuga

SEQ ID NO: 3597646 - RNA, 22 nt, Human
acaaaaguuucauccuuuucau

SEQ ID NO: 3597647 - RNA, 10 nt, Human
acaaaauaaa

SEQ ID NO: 3597648 - RNA, 14 nt, Human
acaaaauaaacaaa

SEQ ID NO: 3597649 - RNA, 14 nt, Human
acaaaauacauucu

SEQ ID NO: 3597650 - RNA, 16 nt, Human
acaaaauacauucuuu

SEQ ID NO: 3597651 - RNA, 14 nt, Human
acaaaauagaaagu

SEQ ID NO: 3597652 - RNA, 12 nt, Human
acaaaauauaca

SEQ ID NO: 3597653 - RNA, 17 nt, Human
acaaaaucacuuccaua

SEQ ID NO: 3597654 - RNA, 20 nt, Human
acaaaauccagcuaugaaua

SEQ ID NO: 3597655 - RNA, 14 nt, Human
acaaaaucuguuua

SEQ ID NO: 3597656 - RNA, 13 nt, Human
acaaaaugaaacg

SEQ ID NO: 3597657 - RNA, 22 nt, Human
acaaaaugaaacgcaaccacca

SEQ ID NO: 3597658 - RNA, 13 nt, Human
acaaaaugaagcu

SEQ ID NO: 3597659 - RNA, 20 nt, Human
aauguauguguaaguauucu

SEQ ID NO: 3597660 - RNA, 17 nt, Human
aauguauguuaccaaaa

SEQ ID NO: 3597661 - RNA, 21 nt, Human
aauguauguuaccaaaaauaa

SEQ ID NO: 3597662 - RNA, 16 nt, Human
aauguauuauucugca

SEQ ID NO: 3597663 - RNA, 22 nt, Human
aauguauuauucugcagcauga

SEQ ID NO: 3597664 - RNA, 15 nt, Human
aauguauucauauuu

SEQ ID NO: 3597665 - RNA, 17 nt, Human
aauguauucauauuugu

SEQ ID NO: 3597666 - RNA, 20 nt, Human
aauguauucauauuuguacu

SEQ ID NO: 3597667 - RNA, 16 nt, Human
aauguauucuaucucu

SEQ ID NO: 3597668 - RNA, 21 nt, Human
aauguauucuaucucucuuua

SEQ ID NO: 3597669 - RNA, 13 nt, Human
aauguauuguacc

SEQ ID NO: 3597670 - RNA, 19 nt, Human
aauguauuguugguaauua

SEQ ID NO: 3597671 - RNA, 18 nt, Human
aauguauuuuauguuaua

SEQ ID NO: 3597672 - RNA, 20 nt, Human
aauguauuuuauguuauaua

SEQ ID NO: 3597673 - RNA, 15 nt, Human
aauguauuuuauugu

SEQ ID NO: 3597674 - RNA, 14 nt, Human
aaugucaaaaguag

SEQ ID NO: 3597675 - RNA, 15 nt, Human
aaugucaaaauuguu

SEQ ID NO: 3597676 - RNA, 16 nt, Human
aaugucaaggugcugu

SEQ ID NO: 3597677 - RNA, 14 nt, Human
aaugucacaggcag

SEQ ID NO: 3597678 - RNA, 16 nt, Human
aaugucacaggcaggu

SEQ ID NO: 3597679 - RNA, 18 nt, Human
aaugucaccaccuuccca

SEQ ID NO: 3597680 - RNA, 19 nt, Human
aaugucaccaccuucccag

SEQ ID NO: 3597681 - RNA, 20 nt, Human
aaugucaccaccuucccagc

SEQ ID NO: 3597682 - RNA, 23 nt, Human
aaugucaccaccuucccagcucu

SEQ ID NO: 3597683 - RNA, 22 nt, Human
aaugucacguuuuguuuugugc

SEQ ID NO: 3597684 - RNA, 17 nt, Human
aaugucagaaaaacaau

SEQ ID NO: 3597685 - RNA, 21 nt, Human
aaugucagaaaaacaauaaga

SEQ ID NO: 3597686 - RNA, 15 nt, Human
aaugucagauacaau

SEQ ID NO: 3597687 - RNA, 17 nt, Human
aaugucagauacaaugu

SEQ ID NO: 3597688 - RNA, 13 nt, Human
aaugucaguaugu

SEQ ID NO: 3597689 - RNA, 15 nt, Human
aaugucagugugacu

SEQ ID NO: 3597690 - RNA, 17 nt, Human
aaugucagugugacuga

SEQ ID NO: 3597691 - RNA, 21 nt, Human
aaugucauaaagugagaaaac

SEQ ID NO: 3597692 - RNA, 23 nt, Human
aaugucauaaagugagaaaacug

SEQ ID NO: 3597693 - RNA, 15 nt, Human
aaugucauauacugc

SEQ ID NO: 3597694 - RNA, 22 nt, Human
acaaacaucuaauaaguauaua

SEQ ID NO: 3597695 - RNA, 16 nt, Human
acaaacauuguguuga

SEQ ID NO: 3597696 - RNA, 15 nt, Human
acaaacauuuuucaa

SEQ ID NO: 3597697 - RNA, 12 nt, Human
acaaaccaaguc

SEQ ID NO: 3597698 - RNA, 15 nt, Human
acaaaccacaacuga

SEQ ID NO: 3597699 - RNA, 21 nt, Human
acaaaccacaacugacacagg

SEQ ID NO: 3597700 - RNA, 21 nt, Human
acaaacucguuuuuuacaaag

SEQ ID NO: 3597701 - RNA, 13 nt, Human
acaaacucuugaa

SEQ ID NO: 3597702 - RNA, 11 nt, Human
acaaacugaag

SEQ ID NO: 3597703 - RNA, 10 nt, Human
acaaacugca

SEQ ID NO: 3597704 - RNA, 13 nt, Human
acaaacugcaaua

SEQ ID NO: 3597705 - RNA, 16 nt, Human
acaaacugcacaugau

SEQ ID NO: 3597706 - RNA, 22 nt, Human
acaaacugcaccaguugcugcu

SEQ ID NO: 3597707 - RNA, 13 nt, Human
acaaacuuugcau

SEQ ID NO: 3597708 - RNA, 13 nt, Human
acaaacuuuuaua

SEQ ID NO: 3597709 - RNA, 12 nt, Human
acaaagaaaauu

SEQ ID NO: 3597710 - RNA, 18 nt, Human
acaaagaaacaaagaugu

SEQ ID NO: 3597711 - RNA, 13 nt, Human
acaaagaagacau

SEQ ID NO: 3597712 - RNA, 16 nt, Human
acaaagaagacauguu

SEQ ID NO: 3597713 - RNA, 14 nt, Human
acaaagaauuccaa

SEQ ID NO: 3597714 - RNA, 19 nt, Human
acaaagacaaauucuguuu

SEQ ID NO: 3597715 - RNA, 21 nt, Human
acaaagagaaaaagaaaugca

SEQ ID NO: 3597716 - RNA, 22 nt, Human
acaaagaguucaagaaauaagu

SEQ ID NO: 3597717 - RNA, 20 nt, Human
acaaagauaucuuuucuuua

SEQ ID NO: 3597718 - RNA, 20 nt, Human
acaaagauggcucagagggg

SEQ ID NO: 3597719 - RNA, 23 nt, Human
acaaagauguuugucagauauga

SEQ ID NO: 3597720 - RNA, 12 nt, Human
acaaagcagcca

SEQ ID NO: 3597721 - RNA, 19 nt, Human
acaaagccaaacucugcca

SEQ ID NO: 3597722 - RNA, 11 nt, Human
acaaagccaga

SEQ ID NO: 3597723 - RNA, 20 nt, Human
acaaagcccaagggaucugg

SEQ ID NO: 3597724 - RNA, 16 nt, Human
acaaagcccuuuuaua

SEQ ID NO: 3597725 - RNA, 13 nt, Human
acaaagcugcuaa

SEQ ID NO: 3597726 - RNA, 17 nt, Human
acaaagcugcuaaaucu

SEQ ID NO: 3597727 - RNA, 23 nt, Human
acaaagcugcuaaaucuccuauu

SEQ ID NO: 3597728 - RNA, 20 nt, Human
acaaagcuguuaaacuguua

SEQ ID NO: 3597729 - RNA, 21 nt, Human
acaaagcuuagcaggagagga

SEQ ID NO: 3597730 - RNA, 15 nt, Human
acaaagcuuuugcau

SEQ ID NO: 3597731 - RNA, 15 nt, Human
acaaaggagccugug

SEQ ID NO: 3597732 - RNA, 23 nt, Human
acaaaggagccugugaacccagg

SEQ ID NO: 3597733 - RNA, 23 nt, Human
acaaaggauacuuauuuaaauag

SEQ ID NO: 3597734 - RNA, 24 nt, Human
acaaaggauacuuauuuaaauaga

SEQ ID NO: 3597735 - RNA, 11 nt, Human
acaaaggcaag

SEQ ID NO: 3597736 - RNA, 23 nt, Human
acaaaggcaaguuaagagaaacu

SEQ ID NO: 3597737 - RNA, 18 nt, Human
acaaaggcuuauuaauuu

SEQ ID NO: 3597738 - RNA, 20 nt, Human
acaaagggcacagcaucugu

SEQ ID NO: 3597739 - RNA, 21 nt, Human
acaaaggggaucauaaaguua

SEQ ID NO: 3597740 - RNA, 19 nt, Human
acaaagguauaauuuuaug

SEQ ID NO: 3597741 - RNA, 17 nt, Human
acaaagguuuaaaugaa

SEQ ID NO: 3597742 - RNA, 18 nt, Human
acaaagguuuaaaugaac

SEQ ID NO: 3597743 - RNA, 19 nt, Human
acaaagguuuaaaugaaca

SEQ ID NO: 3597744 - RNA, 23 nt, Human
acaaagguuuaaaugaacaagag

SEQ ID NO: 3597745 - RNA, 13 nt, Human
acaaaguauuaag

SEQ ID NO: 3597746 - RNA, 14 nt, Human
acaaagucuccagc

SEQ ID NO: 3597747 - RNA, 15 nt, Human
acaaagugccaaaga

SEQ ID NO: 3597748 - RNA, 18 nt, Human
acaaagugccaaagaaag

SEQ ID NO: 3597749 - RNA, 14 nt, Human
acaaaguggaagga

SEQ ID NO: 3597750 - RNA, 16 nt, Human
acaaaguggaaggaaa

SEQ ID NO: 3597751 - RNA, 17 nt, Human
acaaaguggaaggaaag

SEQ ID NO: 3597752 - RNA, 19 nt, Human
acaaaguggcauaaaaaac

SEQ ID NO: 3597753 - RNA, 15 nt, Human
acaaaguguguauua

SEQ ID NO: 3597754 - RNA, 19 nt, Human
acaaaguguguauuaaaaa

SEQ ID NO: 3597755 - RNA, 21 nt, Human
acaaaguuacuagguaacuuc

SEQ ID NO: 3597756 - RNA, 18 nt, Human
acaaaguuuaucuuggcc

SEQ ID NO: 3597757 - RNA, 14 nt, Human
acaaaguuucagag

SEQ ID NO: 3597758 - RNA, 18 nt, Human
acaaaguuucagaguaua

SEQ ID NO: 3597759 - RNA, 22 nt, Human
acaaaguuucagaguauauugu

SEQ ID NO: 3597760 - RNA, 23 nt, Human
acaaauaacaacuuuuuuuucuu

SEQ ID NO: 3597761 - RNA, 13 nt, Human
acaaauaaucaca

SEQ ID NO: 3597762 - RNA, 15 nt, Human
acaaauacucuuagg

SEQ ID NO: 3597763 - RNA, 18 nt, Human
acaaauacuuauucauug

SEQ ID NO: 3597764 - RNA, 19 nt, Human
acaaauaggaugcuuggga

SEQ ID NO: 3597765 - RNA, 22 nt, Human
acaaauaguaggcaagauggca

SEQ ID NO: 3597766 - RNA, 23 nt, Human
acaaauaguaggcaagauggcac

SEQ ID NO: 3597767 - RNA, 20 nt, Human
acaaauagugcaacuaugaa

SEQ ID NO: 3597768 - RNA, 19 nt, Human
acaaauauaagaauaaaau

SEQ ID NO: 3597769 - RNA, 12 nt, Human
acaaauauauug

SEQ ID NO: 3597770 - RNA, 19 nt, Human
acaaauaugcaaaagguuc

SEQ ID NO: 3597771 - RNA, 16 nt, Human
acaaauaugcuaauuu

SEQ ID NO: 3597772 - RNA, 12 nt, Human
acaaauauuaaa

SEQ ID NO: 3597773 - RNA, 20 nt, Human
acaaauauuaaaaagucuuu

SEQ ID NO: 3597774 - RNA, 12 nt, Human
acaaauauuuau

SEQ ID NO: 3597775 - RNA, 19 nt, Human
acaaaucaacagaagcauu

SEQ ID NO: 3597776 - RNA, 23 nt, Human
acaaaucaacagaagcauuugua

SEQ ID NO: 3597777 - RNA, 22 nt, Human
acaaaucaagcuucaguuuccu

SEQ ID NO: 3597778 - RNA, 14 nt, Human
acaaaucagaaguc

SEQ ID NO: 3597779 - RNA, 20 nt, Human
acaaaucagaagucaucuug

SEQ ID NO: 3597780 - RNA, 23 nt, Human
acaaaucagaagucaucuugcua

SEQ ID NO: 3597781 - RNA, 15 nt, Human
acaaaucaguaauuu

SEQ ID NO: 3597782 - RNA, 21 nt, Human
acaaauccaaaggaaagaaua

SEQ ID NO: 3597783 - RNA, 18 nt, Human
acaaaucuaggaaaauau

SEQ ID NO: 3597784 - RNA, 20 nt, Human
acaaaucuauuuaauuagga

SEQ ID NO: 3597785 - RNA, 17 nt, Human
acaaaucuguguauauu

SEQ ID NO: 3597786 - RNA, 11 nt, Human
acaaaugaaaa

SEQ ID NO: 3597787 - RNA, 17 nt, Human
acaaaugacugucucuu

SEQ ID NO: 3597788 - RNA, 12 nt, Human
acaaaugacuuu

SEQ ID NO: 3597789 - RNA, 18 nt, Human
acaaaugacuuuauuauu

SEQ ID NO: 3597790 - RNA, 17 nt, Human
acaaaugcaugaacaag

SEQ ID NO: 3597791 - RNA, 23 nt, Human
acaaaugcauuucuaaagccauu

SEQ ID NO: 3597792 - RNA, 18 nt, Human
acaaaugccaaauuaaaa

SEQ ID NO: 3597793 - RNA, 16 nt, Human
acaaaugccacacauc

SEQ ID NO: 3597794 - RNA, 20 nt, Human
acaaaugccacacaucaccc

SEQ ID NO: 3597795 - RNA, 21 nt, Human
acaaaugcucaaagaaaucua

SEQ ID NO: 3597796 - RNA, 14 nt, Human
acaaauggccuuua

SEQ ID NO: 3597797 - RNA, 14 nt, Human
acaaauguaaacau

SEQ ID NO: 3597798 - RNA, 18 nt, Human
acaaauguaaacauuuuc

SEQ ID NO: 3597799 - RNA, 13 nt, Human
acaaauguaugau

SEQ ID NO: 3597800 - RNA, 13 nt, Human
acaaaugugaaga

SEQ ID NO: 3597801 - RNA, 23 nt, Human
acaaaugugaagaugcauuguag

SEQ ID NO: 3597802 - RNA, 22 nt, Human
acaaauguguaucggaugcuuu

SEQ ID NO: 3597803 - RNA, 13 nt, Human
aauacauucuuuu

SEQ ID NO: 3597804 - RNA, 18 nt, Human
aauacauugaauuagaaa

SEQ ID NO: 3597805 - RNA, 20 nt, Human
aauacauuuaaaacauuaaa

SEQ ID NO: 3597806 - RNA, 23 nt, Human
aauacauuuaaaacauuaaaaua

SEQ ID NO: 3597807 - RNA, 16 nt, Human
aauaccaaguauuuau

SEQ ID NO: 3597808 - RNA, 23 nt, Human
aauaccacaggaaccacaagacu

SEQ ID NO: 3597809 - RNA, 21 nt, Human
aauaccacaucaaauaagaaa

SEQ ID NO: 3597810 - RNA, 17 nt, Human
aauaccagccaguaaau

SEQ ID NO: 3597811 - RNA, 19 nt, Human
aauaccagccaguaaaugg

SEQ ID NO: 3597812 - RNA, 13 nt, Human
aauaccaggauuu

SEQ ID NO: 3597813 - RNA, 15 nt, Human
aauaccauuaaaacu

SEQ ID NO: 3597814 - RNA, 21 nt, Human
aauaccauuaaaacugcuuuu

SEQ ID NO: 3597815 - RNA, 16 nt, Human
aauaccauugacacau

SEQ ID NO: 3597816 - RNA, 20 nt, Human
aauaccauuuuuuaaggaaa

SEQ ID NO: 3597817 - RNA, 16 nt, Human
aauaccucaggaaaga

SEQ ID NO: 3597818 - RNA, 22 nt, Human
aauaccucauguuuaugaaaau

SEQ ID NO: 3597819 - RNA, 13 nt, Human
aauaccucugugu

SEQ ID NO: 3597820 - RNA, 15 nt, Human
aauaccucugugugc

SEQ ID NO: 3597821 - RNA, 21 nt, Human
aauaccucuuagcugagugga

SEQ ID NO: 3597822 - RNA, 12 nt, Human
aauaccugcccu

SEQ ID NO: 3597823 - RNA, 20 nt, Human
aauacgacacugaaauaugu

SEQ ID NO: 3597824 - RNA, 15 nt, Human
aauacuaccuugaaa

SEQ ID NO: 3597825 - RNA, 21 nt, Human
aauacuaccuugaaaauaaga

SEQ ID NO: 3597826 - RNA, 13 nt, Human
aauacuagccaga

SEQ ID NO: 3597827 - RNA, 19 nt, Human
aauacuagggagaagguuu

SEQ ID NO: 3597828 - RNA, 17 nt, Human
aauacuagucaccccaa

SEQ ID NO: 3597829 - RNA, 14 nt, Human
aauacuaguuguga

SEQ ID NO: 3597830 - RNA, 21 nt, Human
aauacuauuuaagaugugaaa

SEQ ID NO: 3597831 - RNA, 16 nt, Human
aauacuauuuuuacug

SEQ ID NO: 3597832 - RNA, 21 nt, Human
aauacuauuuuuacugccacu

SEQ ID NO: 3597833 - RNA, 13 nt, Human
aauacucaaauga

SEQ ID NO: 3597834 - RNA, 21 nt, Human
aauacucagggaaagcauuua

SEQ ID NO: 3597835 - RNA, 19 nt, Human
aauacucauaaugugaagu

SEQ ID NO: 3597836 - RNA, 12 nt, Human
aauacucaugug

SEQ ID NO: 3597837 - RNA, 14 nt, Human
aauacucaugugua

SEQ ID NO: 3597838 - RNA, 13 nt, Human
aauacucuaauuc

SEQ ID NO: 3597839 - RNA, 18 nt, Human
aauacucuauuuuuacau

SEQ ID NO: 3597840 - RNA, 13 nt, Human
aauacucugcccu

SEQ ID NO: 3597841 - RNA, 22 nt, Human
aauacucuguuguacuauggaa

SEQ ID NO: 3597842 - RNA, 23 nt, Human
aauacucuuaggaagagaaacca

SEQ ID NO: 3597843 - RNA, 15 nt, Human
aauacugaacaucug

SEQ ID NO: 3597844 - RNA, 14 nt, Human
aauacugaaccacu

SEQ ID NO: 3597845 - RNA, 14 nt, Human
aauacugcaaauca

SEQ ID NO: 3597846 - RNA, 18 nt, Human
aauacugccagaugcuga

SEQ ID NO: 3597847 - RNA, 19 nt, Human
aauacugccagaugcugau

SEQ ID NO: 3597848 - RNA, 23 nt, Human
aauacugccagaugcugauguuc

SEQ ID NO: 3597849 - RNA, 21 nt, Human
aauacugcugagauacauaca

SEQ ID NO: 3597850 - RNA, 22 nt, Human
aauacuguacaaugacuuuauu

SEQ ID NO: 3597851 - RNA, 15 nt, Human
aauacuguacagggg

SEQ ID NO: 3597852 - RNA, 14 nt, Human
aauacuguguggaa

SEQ ID NO: 3597853 - RNA, 12 nt, Human
aauacuguuuga

SEQ ID NO: 3597854 - RNA, 17 nt, Human
aauacuuauucauugug

SEQ ID NO: 3597855 - RNA, 15 nt, Human
aauacuuccagaagu

SEQ ID NO: 3597856 - RNA, 14 nt, Human
aauacuucucauuu

SEQ ID NO: 3597857 - RNA, 22 nt, Human
aauacuucucauuuuuuaaaaa

SEQ ID NO: 3597858 - RNA, 14 nt, Human
aauacuucuugugu

SEQ ID NO: 3597859 - RNA, 19 nt, Human
aauacuucuuguguguaug

SEQ ID NO: 3597860 - RNA, 19 nt, Human
aauacuugaaccauaaaau

SEQ ID NO: 3597861 - RNA, 15 nt, Human
aauacuugaacuugu

SEQ ID NO: 3597862 - RNA, 14 nt, Human
aauacuuugaaugu

SEQ ID NO: 3597863 - RNA, 17 nt, Human
aauacuuugaauguguu

SEQ ID NO: 3597864 - RNA, 17 nt, Human
aauacuuuguauacaag

SEQ ID NO: 3597865 - RNA, 15 nt, Human
aauacuuuuacucug

SEQ ID NO: 3597866 - RNA, 18 nt, Human
aauacuuuuacucugccu

SEQ ID NO: 3597867 - RNA, 20 nt, Human
aauacuuuuacucugccuac

SEQ ID NO: 3597868 - RNA, 10 nt, Human
aauacuuuuu

SEQ ID NO: 3597869 - RNA, 15 nt, Human
aauacuuuuuacaau

SEQ ID NO: 3597870 - RNA, 19 nt, Human
aauagaaaacugaaaaucu

SEQ ID NO: 3597871 - RNA, 15 nt, Human
aauagaaaaguuauu

SEQ ID NO: 3597872 - RNA, 13 nt, Human
aauagaaaauggu

SEQ ID NO: 3597873 - RNA, 22 nt, Human
aauagaaauaaaggaugugauu

SEQ ID NO: 3597874 - RNA, 17 nt, Human
aauagaaauuuuguaag

SEQ ID NO: 3597875 - RNA, 18 nt, Human
aauagaaauuuuguaaga

SEQ ID NO: 3597876 - RNA, 19 nt, Human
aauagaaauuuuguaagaa

SEQ ID NO: 3597877 - RNA, 15 nt, Human
aauagaagaacaucc

SEQ ID NO: 3597878 - RNA, 19 nt, Human
aauagaaggauguacauuu

SEQ ID NO: 3597879 - RNA, 20 nt, Human
aauagaaggauguacauuuc

SEQ ID NO: 3597880 - RNA, 19 nt, Human
aauagaagugcuccccucu

SEQ ID NO: 3597881 - RNA, 16 nt, Human
aauagaauaaaggcag

SEQ ID NO: 3597882 - RNA, 19 nt, Human
aauagacaaauagaaaaug

SEQ ID NO: 3597883 - RNA, 18 nt, Human
aauagacaauuuauuaug

SEQ ID NO: 3597884 - RNA, 23 nt, Human
aauagacaauuuauuauggcaca

SEQ ID NO: 3597885 - RNA, 16 nt, Human
aauagacagcaugaga

SEQ ID NO: 3597886 - RNA, 15 nt, Human
aauagacaguauauu

SEQ ID NO: 3597887 - RNA, 20 nt, Human
aauagacaguauauuuauag

SEQ ID NO: 3597888 - RNA, 15 nt, Human
aauagacaucaaacu

SEQ ID NO: 3597889 - RNA, 15 nt, Human
aauagacuaaaugaa

SEQ ID NO: 3597890 - RNA, 16 nt, Human
aauagacuaaaugaaa

SEQ ID NO: 3597891 - RNA, 14 nt, Human
aauagagacuguag

SEQ ID NO: 3597892 - RNA, 18 nt, Human
aauagagacuguagauug

SEQ ID NO: 3597893 - RNA, 19 nt, Human
aauagagaugagcuuucuu

SEQ ID NO: 3597894 - RNA, 20 nt, Human
aauagagcaaaauugaugug

SEQ ID NO: 3597895 - RNA, 22 nt, Human
aauagagcaaaauugauguguu

SEQ ID NO: 3597896 - RNA, 18 nt, Human
aauagaguauaugcacuu

SEQ ID NO: 3597897 - RNA, 21 nt, Human
aauuguaaaauuguauagaga

SEQ ID NO: 3597898 - RNA, 14 nt, Human
aauuguaaacugua

SEQ ID NO: 3597899 - RNA, 24 nt, Human
aauuguaaauugaaucaguauaaa

SEQ ID NO: 3597900 - RNA, 12 nt, Human
aauuguaaggaa

SEQ ID NO: 3597901 - RNA, 22 nt, Human
aauuguaaggaaugauuaauua

SEQ ID NO: 3597902 - RNA, 14 nt, Human
aauuguaauuauau

SEQ ID NO: 3597903 - RNA, 17 nt, Human
aauuguaauuauaucug

SEQ ID NO: 3597904 - RNA, 14 nt, Human
aauuguacauauuu

SEQ ID NO: 3597905 - RNA, 16 nt, Human
aauuguacuaaagcca

SEQ ID NO: 3597906 - RNA, 18 nt, Human
aauuguaggggugugugu

SEQ ID NO: 3597907 - RNA, 17 nt, Human
aauuguauaacagguua

SEQ ID NO: 3597908 - RNA, 13 nt, Human
aauuguauauuca

SEQ ID NO: 3597909 - RNA, 17 nt, Human
aauuguauauucacuuu

SEQ ID NO: 3597910 - RNA, 21 nt, Human
aauuguaucagaggccuauaa

SEQ ID NO: 3597911 - RNA, 22 nt, Human
aauuguaucagaggccuauaau

SEQ ID NO: 3597912 - RNA, 18 nt, Human
aauuguaucauuugaaca

SEQ ID NO: 3597913 - RNA, 20 nt, Human
aauuguaucguauagcugua

SEQ ID NO: 3597914 - RNA, 21 nt, Human
aauuguaucguauagcuguau

SEQ ID NO: 3597915 - RNA, 20 nt, Human
aauuguaucuagugcagcug

SEQ ID NO: 3597916 - RNA, 23 nt, Human
aauuguaucuagugcagcugauu

SEQ ID NO: 3597917 - RNA, 16 nt, Human
aauuguauuuuaguaa

SEQ ID NO: 3597918 - RNA, 18 nt, Human
aauugucagcaauuuaac

SEQ ID NO: 3597919 - RNA, 12 nt, Human
aauugucuauuu

SEQ ID NO: 3597920 - RNA, 18 nt, Human
aauugucuauuuaucuuu

SEQ ID NO: 3597921 - RNA, 18 nt, Human
aauugugaauugauaaua

SEQ ID NO: 3597922 - RNA, 18 nt, Human
aauugugauuagacagaa

SEQ ID NO: 3597923 - RNA, 20 nt, Human
aauugugauuagacagaaca

SEQ ID NO: 3597924 - RNA, 21 nt, Human
aauugugauuagacagaacac

SEQ ID NO: 3597925 - RNA, 14 nt, Human
aauugugcugccau

SEQ ID NO: 3597926 - RNA, 15 nt, Human
aauugugcugccauu

SEQ ID NO: 3597927 - RNA, 16 nt, Human
aauugugcugccauuu

SEQ ID NO: 3597928 - RNA, 19 nt, Human
aauugugcugccauuugau

SEQ ID NO: 3597929 - RNA, 20 nt, Human
aauugugcuucuccccagaa

SEQ ID NO: 3597930 - RNA, 21 nt, Human
aauugugcuucuccccagaau

SEQ ID NO: 3597931 - RNA, 17 nt, Human
aauugugggucuauuuc

SEQ ID NO: 3597932 - RNA, 22 nt, Human
aauuguguacucggaaauuaaa

SEQ ID NO: 3597933 - RNA, 15 nt, Human
aauuguguagccuuu

SEQ ID NO: 3597934 - RNA, 14 nt, Human
aauugugucugcag

SEQ ID NO: 3597935 - RNA, 18 nt, Human
aauugugugaacuuggaa

SEQ ID NO: 3597936 - RNA, 15 nt, Human
aauugugugauauuu

SEQ ID NO: 3597937 - RNA, 21 nt, Human
aauugugugauauuucagaaa

SEQ ID NO: 3597938 - RNA, 14 nt, Human
aauuguguuuacau

SEQ ID NO: 3597939 - RNA, 19 nt, Human
aauuguguuuacauuuuau

SEQ ID NO: 3597940 - RNA, 20 nt, Human
aauuguguuuauaauuuuaa

SEQ ID NO: 3597941 - RNA, 15 nt, Human
aauuguuaagauaug

SEQ ID NO: 3597942 - RNA, 13 nt, Human
aauuguucucaga

SEQ ID NO: 3597943 - RNA, 18 nt, Human
aauuguugaaauuuugca

SEQ ID NO: 3597944 - RNA, 14 nt, Human
aauuguugacaaau

SEQ ID NO: 3597945 - RNA, 20 nt, Human
aauuguugacaguucugaag

SEQ ID NO: 3597946 - RNA, 20 nt, Human
aauuguuguccgguuuacuu

SEQ ID NO: 3597947 - RNA, 22 nt, Human
aauuguuguccgguuuacuuua

SEQ ID NO: 3597948 - RNA, 23 nt, Human
aauuguuguccgguuuacuuuaa

SEQ ID NO: 3597949 - RNA, 15 nt, Human
aauuguuguucuguu

SEQ ID NO: 3597950 - RNA, 17 nt, Human
aauuguuguucuguuaa

SEQ ID NO: 3597951 - RNA, 22 nt, Human
aauuguuguucuguuaacugaa

SEQ ID NO: 3597952 - RNA, 12 nt, Human
aauuguuguuuc

SEQ ID NO: 3597953 - RNA, 21 nt, Human
aauuguuguuucuuucuagug

SEQ ID NO: 3597954 - RNA, 23 nt, Human
aauuguuguuucuuucuaguggu

SEQ ID NO: 3597955 - RNA, 19 nt, Human
aauuguuguuuguauguau

SEQ ID NO: 3597956 - RNA, 22 nt, Human
aauuguuguuuguauguauaau

SEQ ID NO: 3597957 - RNA, 14 nt, Human
aauuguuuagauuu

SEQ ID NO: 3597958 - RNA, 22 nt, Human
aauuguuuagauuuuguguuua

SEQ ID NO: 3597959 - RNA, 20 nt, Human
aauuguuucaaaauaaaaac

SEQ ID NO: 3597960 - RNA, 14 nt, Human
aauuguuucagaau

SEQ ID NO: 3597961 - RNA, 21 nt, Human
aauuguuugacggcaagguuu

SEQ ID NO: 3597962 - RNA, 18 nt, Human
aauuguuuuaaucugaaa

SEQ ID NO: 3597963 - RNA, 19 nt, Human
aauuguuuuaaucugaaau

SEQ ID NO: 3597964 - RNA, 14 nt, Human
aauuguuuucuuua

SEQ ID NO: 3597965 - RNA, 15 nt, Human
aauuguuuucuuuaa

SEQ ID NO: 3597966 - RNA, 19 nt, Human
aauuguuuucuuuaaagau

SEQ ID NO: 3597967 - RNA, 17 nt, Human
aauuuaaaaagcccaac

SEQ ID NO: 3597968 - RNA, 22 nt, Human
aauuuaaaaaugagugugaagg

SEQ ID NO: 3597969 - RNA, 12 nt, Human
aauuuaaaacaa

SEQ ID NO: 3597970 - RNA, 16 nt, Human
aauuuaaaaguaaaau

SEQ ID NO: 3597971 - RNA, 19 nt, Human
aauuuaaaauaauuauaua

SEQ ID NO: 3597972 - RNA, 20 nt, Human
aauuuaaacaggcccagcau

SEQ ID NO: 3597973 - RNA, 19 nt, Human
aauuuaaacccauuuuagu

SEQ ID NO: 3597974 - RNA, 22 nt, Human
aauuuaaacuauaagcaagaag

SEQ ID NO: 3597975 - RNA, 19 nt, Human
aauuuaaagcagguucuug

SEQ ID NO: 3597976 - RNA, 21 nt, Human
aauuuaaaggguguacuuaua

SEQ ID NO: 3597977 - RNA, 15 nt, Human
aauuuaaauagcuuu

SEQ ID NO: 3597978 - RNA, 16 nt, Human
aauuuaaauauaauuc

SEQ ID NO: 3597979 - RNA, 19 nt, Human
aauuuaaauauaauucugu

SEQ ID NO: 3597980 - RNA, 15 nt, Human
aauuuaacaaugcga

SEQ ID NO: 3597981 - RNA, 23 nt, Human
aauuuaacuacccuuaauuacuu

SEQ ID NO: 3597982 - RNA, 21 nt, Human
aauuuaacuagacacagauaa

SEQ ID NO: 3597983 - RNA, 12 nt, Human
aauuuaagcauu

SEQ ID NO: 3597984 - RNA, 14 nt, Human
aauuuaaguaucuu

SEQ ID NO: 3597985 - RNA, 16 nt, Human
aauuuaagugcgugug

SEQ ID NO: 3597986 - RNA, 20 nt, Human
aauuuaagugcguguguaga

SEQ ID NO: 3597987 - RNA, 20 nt, Human
aauuuaauaccagauaccuu

SEQ ID NO: 3597988 - RNA, 14 nt, Human
aauuuaaugcaugu

SEQ ID NO: 3597989 - RNA, 15 nt, Human
aauuuaaugcugccu

SEQ ID NO: 3597990 - RNA, 18 nt, Human
aauuuaauucauguuucu

SEQ ID NO: 3597991 - RNA, 17 nt, Human
aauuuacagagacagaa

SEQ ID NO: 3597992 - RNA, 23 nt, Human
aauuuacuacaauauguacauuu

SEQ ID NO: 3597993 - RNA, 19 nt, Human
aauuuacuggacaaagaau

SEQ ID NO: 3597994 - RNA, 14 nt, Human
aauuuacuugccau

SEQ ID NO: 3597995 - RNA, 15 nt, Human
aauuuacuuguuuug

SEQ ID NO: 3597996 - RNA, 18 nt, Human
aauuuacuuuaaacuaca

SEQ ID NO: 3597997 - RNA, 15 nt, Human
aauuuagaaaaagaa

SEQ ID NO: 3597998 - RNA, 21 nt, Human
aauuuagaaaaagaacaugca

SEQ ID NO: 3597999 - RNA, 13 nt, Human
aauuuagaaacua

SEQ ID NO: 3598000 - RNA, 18 nt, Human
aauuuagaaacuaauuga

SEQ ID NO: 3598001 - RNA, 21 nt, Human
aauuuagaaacuaauugacuu

SEQ ID NO: 3598002 - RNA, 17 nt, Human
aauuuagacuucaagca

SEQ ID NO: 3598003 - RNA, 20 nt, Human
aauuuagacuuggauucuuu

SEQ ID NO: 3598004 - RNA, 13 nt, Human
aauuuagcauugu

SEQ ID NO: 3598005 - RNA, 18 nt, Human
aauuuaggguacuaaauu

SEQ ID NO: 3598006 - RNA, 21 nt, Human
aauuuaggguacuaaauuuaa

SEQ ID NO: 3598007 - RNA, 15 nt, Human
aauuuaguaaaccaa

SEQ ID NO: 3598008 - RNA, 20 nt, Human
aauuuaguaaaccaauccua

SEQ ID NO: 3598009 - RNA, 12 nt, Human
aauuuaguauua

SEQ ID NO: 3598010 - RNA, 13 nt, Human
aauuuaguguuuu

SEQ ID NO: 3598011 - RNA, 16 nt, Human
aauuuaguuguuguag

SEQ ID NO: 3598012 - RNA, 22 nt, Human
aauuuauaaaaagguguuuuga

SEQ ID NO: 3598013 - RNA, 18 nt, Human
aauuuauaaaauuagaaa

SEQ ID NO: 3598014 - RNA, 15 nt, Human
aauuuauaaugauua

SEQ ID NO: 3598015 - RNA, 13 nt, Human
aauuuauaauuca

SEQ ID NO: 3598016 - RNA, 13 nt, Human
aauuuauaauuuu

SEQ ID NO: 3598017 - RNA, 20 nt, Human
aauuuauaccucaauuuuca

SEQ ID NO: 3598018 - RNA, 15 nt, Human
aauuuauaguaauga

SEQ ID NO: 3598019 - RNA, 20 nt, Human
aauuuauaguaaugaguuua

SEQ ID NO: 3598020 - RNA, 16 nt, Human
aauuuauauguaucca

SEQ ID NO: 3598021 - RNA, 17 nt, Human
aauuuaucacacuucug

SEQ ID NO: 3598022 - RNA, 18 nt, Human
aauuuauccugaaauuuc

SEQ ID NO: 3598023 - RNA, 23 nt, Human
aauuuauccugaaauuucagauu

SEQ ID NO: 3598024 - RNA, 18 nt, Human
aauuuaucuugucucugg

SEQ ID NO: 3598025 - RNA, 19 nt, Human
aauuuaucuugucucuggg

SEQ ID NO: 3598026 - RNA, 20 nt, Human
aauuuaucuugucucugggc

SEQ ID NO: 3598027 - RNA, 16 nt, Human
aauuuaucuuugauaa

SEQ ID NO: 3598028 - RNA, 12 nt, Human
aauuuauuaaau

SEQ ID NO: 3598029 - RNA, 19 nt, Human
aauuuauuacuuguugcaa

SEQ ID NO: 3598030 - RNA, 14 nt, Human
aauuuauucaagaa

SEQ ID NO: 3598031 - RNA, 12 nt, Human
aauuuauucaau

SEQ ID NO: 3598032 - RNA, 22 nt, Human
aauuuauugaggaaaaauaugu

SEQ ID NO: 3598033 - RNA, 20 nt, Human
aauuuauuuauacuauuuag

SEQ ID NO: 3598034 - RNA, 20 nt, Human
aauuuauuuaugggauccug

SEQ ID NO: 3598035 - RNA, 22 nt, Human
aauuuauuuauuaagauggauu

SEQ ID NO: 3598036 - RNA, 12 nt, Human
aauuuauuucca

SEQ ID NO: 3598037 - RNA, 14 nt, Human
aauuuauuuccacu

SEQ ID NO: 3598038 - RNA, 20 nt, Human
aauuuauuuccacuaaaaau

SEQ ID NO: 3598039 - RNA, 16 nt, Human
aauuuauuuuauaaga

SEQ ID NO: 3598040 - RNA, 17 nt, Human
aauuuauuuuauaagaa

SEQ ID NO: 3598041 - RNA, 22 nt, Human
aauuuauuuuauuuuagcaguu

SEQ ID NO: 3598042 - RNA, 17 nt, Human
aauuuauuuugucgaau

SEQ ID NO: 3598043 - RNA, 15 nt, Human
aauuuauuuuugcau

SEQ ID NO: 3598044 - RNA, 19 nt, Human
aauuucaaaaauauaacuu

SEQ ID NO: 3598045 - RNA, 15 nt, Human
aauuucaaaagacau

SEQ ID NO: 3598046 - RNA, 23 nt, Human
acacauccgccuuuuguauacau

SEQ ID NO: 3598047 - RNA, 15 nt, Human
acacaucuucaacag

SEQ ID NO: 3598048 - RNA, 13 nt, Human
acacaucuuccac

SEQ ID NO: 3598049 - RNA, 13 nt, Human
acacaucuuuccu

SEQ ID NO: 3598050 - RNA, 21 nt, Human
acacaugagcaucaggccagg

SEQ ID NO: 3598051 - RNA, 19 nt, Human
acacaugcaaggucauuuu

SEQ ID NO: 3598052 - RNA, 12 nt, Human
acacaugcacac

SEQ ID NO: 3598053 - RNA, 13 nt, Human
acacaugcauaca

SEQ ID NO: 3598054 - RNA, 15 nt, Human
acacaugcauacaca

SEQ ID NO: 3598055 - RNA, 13 nt, Human
acacauguccaag

SEQ ID NO: 3598056 - RNA, 18 nt, Human
acacauguccaagaagcc

SEQ ID NO: 3598057 - RNA, 14 nt, Human
acacauuacaaagu

SEQ ID NO: 3598058 - RNA, 23 nt, Human
acacauuacaaaguuaaaauugu

SEQ ID NO: 3598059 - RNA, 22 nt, Human
acacauugaguuggaaucacug

SEQ ID NO: 3598060 - RNA, 21 nt, Human
acacauugugucacaucauga

SEQ ID NO: 3598061 - RNA, 13 nt, Human
acacauuguuauu

SEQ ID NO: 3598062 - RNA, 18 nt, Human
acacauuucacugucugu

SEQ ID NO: 3598063 - RNA, 17 nt, Human
acacauuugcuacuguu

SEQ ID NO: 3598064 - RNA, 18 nt, Human
acacauuuguacagaauu

SEQ ID NO: 3598065 - RNA, 14 nt, Human
acacauuuuauuuu

SEQ ID NO: 3598066 - RNA, 21 nt, Human
acacauuuuauuuuauuaugc

SEQ ID NO: 3598067 - RNA, 12 nt, Human
acacauuuugua

SEQ ID NO: 3598068 - RNA, 14 nt, Human
acacauuuuguaua

SEQ ID NO: 3598069 - RNA, 16 nt, Human
acacauuuuguauaau

SEQ ID NO: 3598070 - RNA, 15 nt, Human
acacauuuuuaaauu

SEQ ID NO: 3598071 - RNA, 12 nt, Human
acacauuuuucu

SEQ ID NO: 3598072 - RNA, 16 nt, Human
acacauuuuuuaaaug

SEQ ID NO: 3598073 - RNA, 20 nt, Human
acacauuuuuuaaaugcacc

SEQ ID NO: 3598074 - RNA, 15 nt, Human
acacauuuuuuagga

SEQ ID NO: 3598075 - RNA, 19 nt, Human
acacauuuuuuaggaaaug

SEQ ID NO: 3598076 - RNA, 14 nt, Human
acaccaaaguucua

SEQ ID NO: 3598077 - RNA, 14 nt, Human
acaccaaauaaaua

SEQ ID NO: 3598078 - RNA, 16 nt, Human
acaccaagcagcaaca

SEQ ID NO: 3598079 - RNA, 17 nt, Human
acaccaagcugugccac

SEQ ID NO: 3598080 - RNA, 22 nt, Human
acaccaagcugugccacccugg

SEQ ID NO: 3598081 - RNA, 20 nt, Human
acaccaaucuuacuuuguaa

SEQ ID NO: 3598082 - RNA, 12 nt, Human
acaccacacaca

SEQ ID NO: 3598083 - RNA, 16 nt, Human
acaccacacacaacag

SEQ ID NO: 3598084 - RNA, 13 nt, Human
acaccacacccag

SEQ ID NO: 3598085 - RNA, 16 nt, Human
acaccacagacacaca

SEQ ID NO: 3598086 - RNA, 14 nt, Human
acaccacuacauuc

SEQ ID NO: 3598087 - RNA, 20 nt, Human
acaccacuacauucuguuaa

SEQ ID NO: 3598088 - RNA, 21 nt, Human
acaccacuacauucuguuaau

SEQ ID NO: 3598089 - RNA, 13 nt, Human
acaccacuagccu

SEQ ID NO: 3598090 - RNA, 16 nt, Human
acaccacucuggcagc

SEQ ID NO: 3598091 - RNA, 19 nt, Human
acaccagagcagaugcaga

SEQ ID NO: 3598092 - RNA, 18 nt, Human
aauuucuuaugugacauu

SEQ ID NO: 3598093 - RNA, 16 nt, Human
aauuucuucaaaaugu

SEQ ID NO: 3598094 - RNA, 19 nt, Human
aauuucuucaaaauguaua

SEQ ID NO: 3598095 - RNA, 18 nt, Human
aauuucuucucaaagggu

SEQ ID NO: 3598096 - RNA, 23 nt, Human
aauuucuucuccuggaguugcau

SEQ ID NO: 3598097 - RNA, 22 nt, Human
aauuucuuuauguaaucuaugu

SEQ ID NO: 3598098 - RNA, 16 nt, Human
aauuugaaaaugauaa

SEQ ID NO: 3598099 - RNA, 15 nt, Human
aauuugaaacacuuu

SEQ ID NO: 3598100 - RNA, 12 nt, Human
aauuugaaacau

SEQ ID NO: 3598101 - RNA, 21 nt, Human
aauuugaaacauugcuuuuaa

SEQ ID NO: 3598102 - RNA, 14 nt, Human
aauuugaaguaaug

SEQ ID NO: 3598103 - RNA, 14 nt, Human
aauuugaaugaaaa

SEQ ID NO: 3598104 - RNA, 15 nt, Human
aauuugaaugaaaaa

SEQ ID NO: 3598105 - RNA, 16 nt, Human
aauuugaaugaaaaau

SEQ ID NO: 3598106 - RNA, 17 nt, Human
aauuugacuuuucugua

SEQ ID NO: 3598107 - RNA, 19 nt, Human
aauuugacuuuucuguaau

SEQ ID NO: 3598108 - RNA, 13 nt, Human
aauuugaggacaa

SEQ ID NO: 3598109 - RNA, 14 nt, Human
aauuugaggacaac

SEQ ID NO: 3598110 - RNA, 13 nt, Human
aauuugauacaua

SEQ ID NO: 3598111 - RNA, 12 nt, Human
aauuugauacuu

SEQ ID NO: 3598112 - RNA, 14 nt, Human
aauuugauaucaca

SEQ ID NO: 3598113 - RNA, 16 nt, Human
aauuugauaucacagu

SEQ ID NO: 3598114 - RNA, 18 nt, Human
aauuugauaucacagucu

SEQ ID NO: 3598115 - RNA, 19 nt, Human
aauuugauaugugaacagu

SEQ ID NO: 3598116 - RNA, 22 nt, Human
aauuugauguggugaaaagcag

SEQ ID NO: 3598117 - RNA, 15 nt, Human
aauuugauuaacaaa

SEQ ID NO: 3598118 - RNA, 17 nt, Human
aauuugauuauuaacau

SEQ ID NO: 3598119 - RNA, 15 nt, Human
aauuugauugauuug

SEQ ID NO: 3598120 - RNA, 19 nt, Human
aauuugcaaaguacuguaa

SEQ ID NO: 3598121 - RNA, 16 nt, Human
aauuugcacauuaaau

SEQ ID NO: 3598122 - RNA, 14 nt, Human
aauuugcauacuua

SEQ ID NO: 3598123 - RNA, 20 nt, Human
aauuugcauuaaauuacaga

SEQ ID NO: 3598124 - RNA, 17 nt, Human
aauuugcauuaaauuca

SEQ ID NO: 3598125 - RNA, 18 nt, Human
aauuugcauuaaauucac

SEQ ID NO: 3598126 - RNA, 21 nt, Human
aauuugcauuaaauucacaaa

SEQ ID NO: 3598127 - RNA, 16 nt, Human
aauuugccaaaauaau

SEQ ID NO: 3598128 - RNA, 20 nt, Human
aauuugccaaaauaaugucu

SEQ ID NO: 3598129 - RNA, 20 nt, Human
aauuugcccugggaaacccc

SEQ ID NO: 3598130 - RNA, 15 nt, Human
aauuugccugcuggg

SEQ ID NO: 3598131 - RNA, 20 nt, Human
aauuugcugccaaaugcgua

SEQ ID NO: 3598132 - RNA, 13 nt, Human
aauuugcugcuga

SEQ ID NO: 3598133 - RNA, 16 nt, Human
aauuuggaaacuaaua

SEQ ID NO: 3598134 - RNA, 17 nt, Human
aauuuggaaacuaauaa

SEQ ID NO: 3598135 - RNA, 20 nt, Human
aauuuggaaacuaauaaaau

SEQ ID NO: 3598136 - RNA, 14 nt, Human
aauuuggaaauccu

SEQ ID NO: 3598137 - RNA, 18 nt, Human
aauuuggagcacaaaauu

SEQ ID NO: 3598138 - RNA, 19 nt, Human
aauuuggagcacaaaauuc

SEQ ID NO: 3598139 - RNA, 21 nt, Human
aauuuggagcacaaaauucaa

SEQ ID NO: 3598140 - RNA, 22 nt, Human
aauuuggaucucuucuuaaugu

SEQ ID NO: 3598141 - RNA, 23 nt, Human
aauuuggaucucuucuuaaugua

SEQ ID NO: 3598142 - RNA, 18 nt, Human
aauuuggcaauuuugugg

SEQ ID NO: 3598143 - RNA, 18 nt, Human
aauuuggccugcacuaau

SEQ ID NO: 3598144 - RNA, 12 nt, Human
aauuuggcuucu

SEQ ID NO: 3598145 - RNA, 17 nt, Human
aauuugggacccugcuu

SEQ ID NO: 3598146 - RNA, 11 nt, Human
aauuuggggac

SEQ ID NO: 3598147 - RNA, 22 nt, Human
aauuuggggacagauucagucu

SEQ ID NO: 3598148 - RNA, 23 nt, Human
aauuuggggacagauucagucuu

SEQ ID NO: 3598149 - RNA, 18 nt, Human
aauuugggggacuuacau

SEQ ID NO: 3598150 - RNA, 22 nt, Human
aauuugguucuaauagaacuca

SEQ ID NO: 3598151 - RNA, 20 nt, Human
aauuuguaaaauguucucuu

SEQ ID NO: 3598152 - RNA, 16 nt, Human
aauuuguaaguuucag

SEQ ID NO: 3598153 - RNA, 18 nt, Human
aauuuguaaguuucaggu

SEQ ID NO: 3598154 - RNA, 20 nt, Human
aauuuguaaugucuugagcu

SEQ ID NO: 3598155 - RNA, 19 nt, Human
aauuuguaauugcuuacau

SEQ ID NO: 3598156 - RNA, 12 nt, Human
aauuuguaucug

SEQ ID NO: 3598157 - RNA, 14 nt, Human
aauuuguaucugaa

SEQ ID NO: 3598158 - RNA, 18 nt, Human
aauuugucauuuugaagc

SEQ ID NO: 3598159 - RNA, 20 nt, Human
aauuugucugaaacauuuca

SEQ ID NO: 3598160 - RNA, 22 nt, Human
aauuugucugaaacauuucaua

SEQ ID NO: 3598161 - RNA, 18 nt, Human
aauuugugauacaaugcu

SEQ ID NO: 3598162 - RNA, 20 nt, Human
aauuugugauacaaugcugu

SEQ ID NO: 3598163 - RNA, 16 nt, Human
aauuuguggugauuug

SEQ ID NO: 3598164 - RNA, 19 nt, Human
aauuuguguaaauuauuga

SEQ ID NO: 3598165 - RNA, 19 nt, Human
aauuuguguaauaaagugu

SEQ ID NO: 3598166 - RNA, 19 nt, Human
aauuuguguugaaggaacu

SEQ ID NO: 3598167 - RNA, 15 nt, Human
aauuuguucuuguau

SEQ ID NO: 3598168 - RNA, 16 nt, Human
aauuuguucuuguauu

SEQ ID NO: 3598169 - RNA, 18 nt, Human
aauuuguugaaauuaugu

SEQ ID NO: 3598170 - RNA, 15 nt, Human
aauuuguuugugcuu

SEQ ID NO: 3598171 - RNA, 17 nt, Human
aauuuguuugugcuucu

SEQ ID NO: 3598172 - RNA, 18 nt, Human
aauuuguuugugcuucua

SEQ ID NO: 3598173 - RNA, 17 nt, Human
aauuuuaaaaaugaauc

SEQ ID NO: 3598174 - RNA, 21 nt, Human
aauuuuaaaaaugaauccuac

SEQ ID NO: 3598175 - RNA, 14 nt, Human
aauuuuaaaaaugg

SEQ ID NO: 3598176 - RNA, 20 nt, Human
aauuuuaaaaaugguggcuu

SEQ ID NO: 3598177 - RNA, 12 nt, Human
aauuuuaaagcc

SEQ ID NO: 3598178 - RNA, 13 nt, Human
aauuuuaaagcca

SEQ ID NO: 3598179 - RNA, 12 nt, Human
aauuuuaaagua

SEQ ID NO: 3598180 - RNA, 14 nt, Human
aauuuuaaaguaug

SEQ ID NO: 3598181 - RNA, 18 nt, Human
aauuuuaaaguaugcauu

SEQ ID NO: 3598182 - RNA, 17 nt, Human
aauuuuaaagugcaaaa

SEQ ID NO: 3598183 - RNA, 20 nt, Human
aauuuuaagccuuuguugaa

SEQ ID NO: 3598184 - RNA, 23 nt, Human
aauuuuaagccuuuguugaacug

SEQ ID NO: 3598185 - RNA, 16 nt, Human
aauuuuaaugaagaaa

SEQ ID NO: 3598186 - RNA, 12 nt, Human
aauuuuaauuua

SEQ ID NO: 3598187 - RNA, 13 nt, Human
aauuuuaauuuau

SEQ ID NO: 3598188 - RNA, 20 nt, Human
aauuuuacauggcuggagcu

SEQ ID NO: 3598189 - RNA, 14 nt, Human
aauuuuaccaaguu

SEQ ID NO: 3598190 - RNA, 23 nt, Human
aauuuuaggcacucuuaaaugau

SEQ ID NO: 3598191 - RNA, 23 nt, Human
aauuuuagugacagcucugccug

SEQ ID NO: 3598192 - RNA, 16 nt, Human
aauuuuaguuuuucau

SEQ ID NO: 3598193 - RNA, 15 nt, Human
aauuuuauaaacaaa

SEQ ID NO: 3598194 - RNA, 21 nt, Human
aauuuuauaagcaaauuucaa

SEQ ID NO: 3598195 - RNA, 15 nt, Human
aauuuuauaaucugc

SEQ ID NO: 3598196 - RNA, 20 nt, Human
aauuuuaucccucaccugua

SEQ ID NO: 3598197 - RNA, 19 nt, Human
aauuuuaugagggccacgg

SEQ ID NO: 3598198 - RNA, 23 nt, Human
aauuuuauuuugugcucauuuaa

SEQ ID NO: 3598199 - RNA, 22 nt, Human
aauuuucaacugucuuccucaa

SEQ ID NO: 3598200 - RNA, 18 nt, Human
aauuuucacuuuuggcaa

SEQ ID NO: 3598201 - RNA, 10 nt, Human
aauuuucauu

SEQ ID NO: 3598202 - RNA, 19 nt, Human
aauuuuccuaauaaaguuc

SEQ ID NO: 3598203 - RNA, 17 nt, Human
aauuuucuagacuuucu

SEQ ID NO: 3598204 - RNA, 13 nt, Human
aauuuucuucaug

SEQ ID NO: 3598205 - RNA, 19 nt, Human
aauuuucuucaugcaauga

SEQ ID NO: 3598206 - RNA, 22 nt, Human
aauuuucuucaugcaaugacau

SEQ ID NO: 3598207 - RNA, 12 nt, Human
aauuuucuugau

SEQ ID NO: 3598208 - RNA, 21 nt, Human
aauuuucuuuuuaauaaaaag

SEQ ID NO: 3598209 - RNA, 20 nt, Human
aauuuugaaaaguaauauuu

SEQ ID NO: 3598210 - RNA, 21 nt, Human
aauuuugaaaaguaauauuua

SEQ ID NO: 3598211 - RNA, 19 nt, Human
aauuuugacacuauaucug

SEQ ID NO: 3598212 - RNA, 16 nt, Human
aauuuugagauuaaga

SEQ ID NO: 3598213 - RNA, 17 nt, Human
aauuuugaguugccaca

SEQ ID NO: 3598214 - RNA, 23 nt, Human
aauuuugauaaaaauuuagaaca

SEQ ID NO: 3598215 - RNA, 16 nt, Human
aauuuugcaaauauaa

SEQ ID NO: 3598216 - RNA, 18 nt, Human
aauuuugcaaauauaaac

SEQ ID NO: 3598217 - RNA, 12 nt, Human
aauuuugcaaug

SEQ ID NO: 3598218 - RNA, 17 nt, Human
aauuuugcuuuuaauua

SEQ ID NO: 3598219 - RNA, 11 nt, Human
aauuuuggaau

SEQ ID NO: 3598220 - RNA, 12 nt, Human
aauuuuggauuu

SEQ ID NO: 3598221 - RNA, 18 nt, Human
aauuuugguuguauucuu

SEQ ID NO: 3598222 - RNA, 13 nt, Human
aauuuuguaagaa

SEQ ID NO: 3598223 - RNA, 18 nt, Human
aauuuuguaauguaucaa

SEQ ID NO: 3598224 - RNA, 14 nt, Human
aauuuuguauuuuc

SEQ ID NO: 3598225 - RNA, 21 nt, Human
aauuuuguauuuuccaagugu

SEQ ID NO: 3598226 - RNA, 23 nt, Human
aauuuuguauuuuccaagugugc

SEQ ID NO: 3598227 - RNA, 17 nt, Human
aauuuuguucucuggga

SEQ ID NO: 3598228 - RNA, 19 nt, Human
aauuuuguucucugggaga

SEQ ID NO: 3598229 - RNA, 23 nt, Human
aauuuuguucucugggagaaaau

SEQ ID NO: 3598230 - RNA, 15 nt, Human
aauuuuguuucugua

SEQ ID NO: 3598231 - RNA, 19 nt, Human
aauuuuuaaaguauauauu

SEQ ID NO: 3598232 - RNA, 19 nt, Human
aauuuuuauauuugaaaua

SEQ ID NO: 3598233 - RNA, 18 nt, Human
aauuuuuauuaaauuaug

SEQ ID NO: 3598234 - RNA, 16 nt, Human
aauuuuuauuaugcau

SEQ ID NO: 3598235 - RNA, 19 nt, Human
aauuuuuauuaugcauaac

SEQ ID NO: 3598236 - RNA, 21 nt, Human
aauuuuuauuauuuguuuucc

SEQ ID NO: 3598237 - RNA, 13 nt, Human
aauuuuuauucau

SEQ ID NO: 3598238 - RNA, 16 nt, Human
aauuuuuauucauaag

SEQ ID NO: 3598239 - RNA, 13 nt, Human
aauuuuuauuguu

SEQ ID NO: 3598240 - RNA, 23 nt, Human
aauuuuucauugauaugaaaaau

SEQ ID NO: 3598241 - RNA, 20 nt, Human
aauuuuuccaacuacuaaua

SEQ ID NO: 3598242 - RNA, 13 nt, Human
aauuuuuccuaug

SEQ ID NO: 3598243 - RNA, 22 nt, Human
aauuuuucucuaacucagaaac

SEQ ID NO: 3598244 - RNA, 16 nt, Human
aauuuuucuucuugag

SEQ ID NO: 3598245 - RNA, 13 nt, Human
aauuuuugaaaag

SEQ ID NO: 3598246 - RNA, 15 nt, Human
aauuuuugcaauaau

SEQ ID NO: 3598247 - RNA, 18 nt, Human
aauuuuugcaauaaugca

SEQ ID NO: 3598248 - RNA, 16 nt, Human
aauuuuugccuucauu

SEQ ID NO: 3598249 - RNA, 17 nt, Human
aauuuuuguauuauuuu

SEQ ID NO: 3598250 - RNA, 15 nt, Human
aauuuuugucucaga

SEQ ID NO: 3598251 - RNA, 15 nt, Human
aauuuuuuaaaaagc

SEQ ID NO: 3598252 - RNA, 21 nt, Human
aauuuuuuaagugaaaauaua

SEQ ID NO: 3598253 - RNA, 17 nt, Human
aauuuuuuauaaaagug

SEQ ID NO: 3598254 - RNA, 21 nt, Human
aauuuuuuauucuugugaaua

SEQ ID NO: 3598255 - RNA, 11 nt, Human
aauuuuuuccu

SEQ ID NO: 3598256 - RNA, 13 nt, Human
aauuuuuugacuu

SEQ ID NO: 3598257 - RNA, 20 nt, Human
aauuuuuuggcacuugccau

SEQ ID NO: 3598258 - RNA, 15 nt, Human
aauuuuuugguacaa

SEQ ID NO: 3598259 - RNA, 20 nt, Human
aauuuuuugguacaaaaaua

SEQ ID NO: 3598260 - RNA, 19 nt, Human
aauuuuuuuaaccaaaggu

SEQ ID NO: 3598261 - RNA, 20 nt, Human
aauuuuuuuaauuuuguauu

SEQ ID NO: 3598262 - RNA, 18 nt, Human
aauuuuuuuauguuuugu

SEQ ID NO: 3598263 - RNA, 17 nt, Human
aauuuuuuuauuacuga

SEQ ID NO: 3598264 - RNA, 18 nt, Human
aauuuuuuuauuguuuaa

SEQ ID NO: 3598265 - RNA, 17 nt, Human
aauuuuuuugagacaga

SEQ ID NO: 3598266 - RNA, 18 nt, Human
aauuuuuuuguaugaaaa

SEQ ID NO: 3598267 - RNA, 23 nt, Human
aauuuuuuuuaguauuuauuuau

SEQ ID NO: 3598268 - RNA, 22 nt, Human
aauuuuuuuuauuaguauuguu

SEQ ID NO: 3598269 - RNA, 20 nt, Human
aauuuuuuuucaugcuuuau

SEQ ID NO: 3598270 - RNA, 20 nt, Human
aauuuuuuuuguuguuucag

SEQ ID NO: 3598271 - RNA, 22 nt, Human
aauuuuuuuuguuguuucagug

SEQ ID NO: 3598272 - RNA, 23 nt, Human
aauuuuuuuuguuguuucaguga

SEQ ID NO: 3598273 - RNA, 19 nt, Human
acaaaaaaaaaauuugcca

SEQ ID NO: 3598274 - RNA, 20 nt, Human
acaaaaaaauauauuuaaug

SEQ ID NO: 3598275 - RNA, 18 nt, Human
acaaaaaaaucugcagaa

SEQ ID NO: 3598276 - RNA, 13 nt, Human
acaaaaaacaaua

SEQ ID NO: 3598277 - RNA, 15 nt, Human
acaaaaaacaauauu

SEQ ID NO: 3598278 - RNA, 21 nt, Human
acaaaaacagccucacagaag

SEQ ID NO: 3598279 - RNA, 22 nt, Human
acaaaaacagguauauacuuug

SEQ ID NO: 3598280 - RNA, 11 nt, Human
acaaaaaccaa

SEQ ID NO: 3598281 - RNA, 20 nt, Human
acaaaaagccacaaugaaca

SEQ ID NO: 3598282 - RNA, 15 nt, Human
acaaaaagugcuuca

SEQ ID NO: 3598283 - RNA, 23 nt, Human
acaaaaagugcuucauucuuugc

SEQ ID NO: 3598284 - RNA, 12 nt, Human
acaaaaauaaau

SEQ ID NO: 3598285 - RNA, 12 nt, Human
acaaaaauaaca

SEQ ID NO: 3598286 - RNA, 21 nt, Human
acaaaaauacucuaauucuaa

SEQ ID NO: 3598287 - RNA, 18 nt, Human
acaaaaaucagccagaca

SEQ ID NO: 3598288 - RNA, 22 nt, Human
acaaaaaugaaagcaugucuca

SEQ ID NO: 3598289 - RNA, 21 nt, Human
acaaaaauguaaugaucauaa

SEQ ID NO: 3598290 - RNA, 19 nt, Human
acaaaaauucucaguucuc

SEQ ID NO: 3598291 - RNA, 12 nt, Human
acaaaacaaaac

SEQ ID NO: 3598292 - RNA, 16 nt, Human
acaaaacaaaacaaaa

SEQ ID NO: 3598293 - RNA, 14 nt, Human
acaaaacaaaacua

SEQ ID NO: 3598294 - RNA, 13 nt, Human
acaaaacaaacuc

SEQ ID NO: 3598295 - RNA, 14 nt, Human
acaaaaccaaaagu

SEQ ID NO: 3598296 - RNA, 22 nt, Human
acaaaaccacaguguaccauua

SEQ ID NO: 3598297 - RNA, 20 nt, Human
acaaaaccccccagauauca

SEQ ID NO: 3598298 - RNA, 16 nt, Human
acaaaaccuaacuugc

SEQ ID NO: 3598299 - RNA, 23 nt, Human
acaaaacuacaugagaacaaaca

SEQ ID NO: 3598300 - RNA, 14 nt, Human
acaaaacuauacuu

SEQ ID NO: 3598301 - RNA, 15 nt, Human
acaaaacuauacuug

SEQ ID NO: 3598302 - RNA, 21 nt, Human
acaaaacuuagcaucuaauuu

SEQ ID NO: 3598303 - RNA, 13 nt, Human
acaaaacuucuug

SEQ ID NO: 3598304 - RNA, 18 nt, Human
acaaaacuucuugucaga

SEQ ID NO: 3598305 - RNA, 15 nt, Human
acaaaagaaauaccu

SEQ ID NO: 3598306 - RNA, 23 nt, Human
acaaaagaagcccggcuccuggu

SEQ ID NO: 3598307 - RNA, 23 nt, Human
acaaaagaggagcacuuccaaaa

SEQ ID NO: 3598308 - RNA, 13 nt, Human
acaaaagaugaaa

SEQ ID NO: 3598309 - RNA, 11 nt, Human
acaaaagaugu

SEQ ID NO: 3598310 - RNA, 21 nt, Human
acaaaagauguauccuuccaa

SEQ ID NO: 3598311 - RNA, 21 nt, Human
acaaaagcugaacacauuucu

SEQ ID NO: 3598312 - RNA, 19 nt, Human
acaaaaggcuccauauaua

SEQ ID NO: 3598313 - RNA, 11 nt, Human
acaaaaggguc

SEQ ID NO: 3598314 - RNA, 13 nt, Human
acaaaagggucag

SEQ ID NO: 3598315 - RNA, 16 nt, Human
acaaaauaaaauaaua

SEQ ID NO: 3598316 - RNA, 23 nt, Human
acaaaauauaaagcaucuaaacu

SEQ ID NO: 3598317 - RNA, 16 nt, Human
acaaaauauuucccau

SEQ ID NO: 3598318 - RNA, 13 nt, Human
acaaaaucaaaua

SEQ ID NO: 3598319 - RNA, 14 nt, Human
acaaaaucuccucu

SEQ ID NO: 3598320 - RNA, 10 nt, Human
acaaaaugga

SEQ ID NO: 3598321 - RNA, 22 nt, Human
acaaaauggaauucauucuggu

SEQ ID NO: 3598322 - RNA, 11 nt, Human
acaaaauggac

SEQ ID NO: 3598323 - RNA, 22 nt, Human
acaaaauggauacauaaagacu

SEQ ID NO: 3598324 - RNA, 16 nt, Human
acaaaauguaacuguu

SEQ ID NO: 3598325 - RNA, 17 nt, Human
acaaaauguagaauauu

SEQ ID NO: 3598326 - RNA, 21 nt, Human
acaaaauguagaauauucaga

SEQ ID NO: 3598327 - RNA, 11 nt, Human
acaaaauguua

SEQ ID NO: 3598328 - RNA, 16 nt, Human
acaaaauuauuuguaa

SEQ ID NO: 3598329 - RNA, 14 nt, Human
acaaacaaacaagc

SEQ ID NO: 3598330 - RNA, 13 nt, Human
acaaacaaauuuu

SEQ ID NO: 3598331 - RNA, 16 nt, Human
acaaacaaucucuuaa

SEQ ID NO: 3598332 - RNA, 19 nt, Human
acaaacauauuuguuaaau

SEQ ID NO: 3598333 - RNA, 14 nt, Human
acaaacaucacucu

SEQ ID NO: 3598334 - RNA, 20 nt, Human
acaaacauuguguugacauu

SEQ ID NO: 3598335 - RNA, 19 nt, Human
acaaaccacaacugacaca

SEQ ID NO: 3598336 - RNA, 23 nt, Human
acaaaccacaacugacacaggaa

SEQ ID NO: 3598337 - RNA, 14 nt, Human
acaaaccaugcaaa

SEQ ID NO: 3598338 - RNA, 21 nt, Human
acaaaccgagugcaaugaaug

SEQ ID NO: 3598339 - RNA, 14 nt, Human
acaaaccugccugg

SEQ ID NO: 3598340 - RNA, 21 nt, Human
acaaaccuguuucugcagcca

SEQ ID NO: 3598341 - RNA, 15 nt, Human
acaaacgggcucagc

SEQ ID NO: 3598342 - RNA, 23 nt, Human
acaaacuacuugauuuuauugua

SEQ ID NO: 3598343 - RNA, 20 nt, Human
acaaacucaccaucugugca

SEQ ID NO: 3598344 - RNA, 22 nt, Human
acaaacucucugaaccccuccc

SEQ ID NO: 3598345 - RNA, 16 nt, Human
acaaacugcaauagag

SEQ ID NO: 3598346 - RNA, 21 nt, Human
acaaacugcacaugauuucac

SEQ ID NO: 3598347 - RNA, 22 nt, Human
acaaacugcuucccuuacuuug

SEQ ID NO: 3598348 - RNA, 21 nt, Human
acaaacugcuuccuuucuuga

SEQ ID NO: 3598349 - RNA, 13 nt, Human
acaaacuguaaau

SEQ ID NO: 3598350 - RNA, 16 nt, Human
acaaacuguaauacaa

SEQ ID NO: 3598351 - RNA, 15 nt, Human
acaaacuuugcaucu

SEQ ID NO: 3598352 - RNA, 12 nt, Human
acaaagaaauua

SEQ ID NO: 3598353 - RNA, 20 nt, Human
acaaagaaccuaacauuuau

SEQ ID NO: 3598354 - RNA, 12 nt, Human
acaaagaaccuu

SEQ ID NO: 3598355 - RNA, 18 nt, Human
acaaagacaaaagucugu

SEQ ID NO: 3598356 - RNA, 13 nt, Human
aauauauauuaua

SEQ ID NO: 3598357 - RNA, 14 nt, Human
aauauauauuauac

SEQ ID NO: 3598358 - RNA, 16 nt, Human
aauauauauuauacuu

SEQ ID NO: 3598359 - RNA, 16 nt, Human
aauauauauuaucuuu

SEQ ID NO: 3598360 - RNA, 19 nt, Human
aauauauauuaucuuuuca

SEQ ID NO: 3598361 - RNA, 16 nt, Human
aauauaucccagaaau

SEQ ID NO: 3598362 - RNA, 18 nt, Human
aauauaucuaaauugaau

SEQ ID NO: 3598363 - RNA, 20 nt, Human
aauauaucuaaauugaauaa

SEQ ID NO: 3598364 - RNA, 19 nt, Human
aauauauggcagaguugua

SEQ ID NO: 3598365 - RNA, 20 nt, Human
aauauauggcagaguuguaa

SEQ ID NO: 3598366 - RNA, 21 nt, Human
aauauauggcagaguuguaaa

SEQ ID NO: 3598367 - RNA, 16 nt, Human
aauauauggcauuugc

SEQ ID NO: 3598368 - RNA, 18 nt, Human
aauauauggucuaauguu

SEQ ID NO: 3598369 - RNA, 19 nt, Human
aauauauggucuaauguuu

SEQ ID NO: 3598370 - RNA, 20 nt, Human
aauauauggucuaauguuua

SEQ ID NO: 3598371 - RNA, 14 nt, Human
aauauauguaugua

SEQ ID NO: 3598372 - RNA, 19 nt, Human
aauauauguauguaaaaau

SEQ ID NO: 3598373 - RNA, 14 nt, Human
aauauauguauuau

SEQ ID NO: 3598374 - RNA, 18 nt, Human
aauauauguauuauuuau

SEQ ID NO: 3598375 - RNA, 23 nt, Human
aauauauuaccagcaagaauaaa

SEQ ID NO: 3598376 - RNA, 23 nt, Human
aauauauuccugagauuuccucc

SEQ ID NO: 3598377 - RNA, 20 nt, Human
aauauauugaacuuuuguac

SEQ ID NO: 3598378 - RNA, 13 nt, Human
aauauauuguuaa

SEQ ID NO: 3598379 - RNA, 22 nt, Human
aauauauuuaaagggaaauuga

SEQ ID NO: 3598380 - RNA, 15 nt, Human
acacacacacacagg

SEQ ID NO: 3598381 - RNA, 14 nt, Human
acacacacacacau

SEQ ID NO: 3598382 - RNA, 14 nt, Human
acacacacacagcc

SEQ ID NO: 3598383 - RNA, 15 nt, Human
acacacacacauaca

SEQ ID NO: 3598384 - RNA, 13 nt, Human
acacacacacauc

SEQ ID NO: 3598385 - RNA, 14 nt, Human
acacacacacaugc

SEQ ID NO: 3598386 - RNA, 15 nt, Human
acacacacacaugca

SEQ ID NO: 3598387 - RNA, 12 nt, Human
acacacacagcc

SEQ ID NO: 3598388 - RNA, 14 nt, Human
acacacacagccac

SEQ ID NO: 3598389 - RNA, 14 nt, Human
acacacacaggagg

SEQ ID NO: 3598390 - RNA, 14 nt, Human
acacacacauccac

SEQ ID NO: 3598391 - RNA, 11 nt, Human
acacacacaug

SEQ ID NO: 3598392 - RNA, 12 nt, Human
acacacacaugc

SEQ ID NO: 3598393 - RNA, 15 nt, Human
acacacacaugcaua

SEQ ID NO: 3598394 - RNA, 16 nt, Human
acacacacaugcauac

SEQ ID NO: 3598395 - RNA, 14 nt, Human
acacacacgcacgc

SEQ ID NO: 3598396 - RNA, 22 nt, Human
acacacacgcgugcacacacca

SEQ ID NO: 3598397 - RNA, 15 nt, Human
acacacagaaaauau

SEQ ID NO: 3598398 - RNA, 18 nt, Human
acacacagaaaauauacu

SEQ ID NO: 3598399 - RNA, 19 nt, Human
acacacagaaaauauacug

SEQ ID NO: 3598400 - RNA, 21 nt, Human
acacacagaaaauauacugua

SEQ ID NO: 3598401 - RNA, 22 nt, Human
acacacagaggaagagcaggca

SEQ ID NO: 3598402 - RNA, 21 nt, Human
acacacagccacacacacaga

SEQ ID NO: 3598403 - RNA, 11 nt, Human
acacacagcuc

SEQ ID NO: 3598404 - RNA, 14 nt, Human
acacacagcucugu

SEQ ID NO: 3598405 - RNA, 18 nt, Human
acacacauaaaggauaaa

SEQ ID NO: 3598406 - RNA, 12 nt, Human
acacacauacac

SEQ ID NO: 3598407 - RNA, 12 nt, Human
acacacauagau

SEQ ID NO: 3598408 - RNA, 16 nt, Human
acacacauauacacga

SEQ ID NO: 3598409 - RNA, 13 nt, Human
acacacaugcaca

SEQ ID NO: 3598410 - RNA, 17 nt, Human
acacacaugcacacaca

SEQ ID NO: 3598411 - RNA, 21 nt, Human
acacacaugcauacacacaca

SEQ ID NO: 3598412 - RNA, 15 nt, Human
acacaccacacauac

SEQ ID NO: 3598413 - RNA, 20 nt, Human
acacaccagagcccaccuug

SEQ ID NO: 3598414 - RNA, 14 nt, Human
acacaccaggcgcu

SEQ ID NO: 3598415 - RNA, 14 nt, Human
acacacccugaggu

SEQ ID NO: 3598416 - RNA, 22 nt, Human
acacaccuaagggacauguuuu

SEQ ID NO: 3598417 - RNA, 20 nt, Human
acacaccuguagcacuuacu

SEQ ID NO: 3598418 - RNA, 24 nt, Human
acacaccuguagucccagcuacuc

SEQ ID NO: 3598419 - RNA, 14 nt, Human
acacacgcaggaac

SEQ ID NO: 3598420 - RNA, 21 nt, Human
acacacgcaggaacucccagc

SEQ ID NO: 3598421 - RNA, 19 nt, Human
acacacgugcaauuuguuu

SEQ ID NO: 3598422 - RNA, 13 nt, Human
acacacuaaucga

SEQ ID NO: 3598423 - RNA, 16 nt, Human
acacacuacaccacac

SEQ ID NO: 3598424 - RNA, 18 nt, Human
acacacuacaccacacac

SEQ ID NO: 3598425 - RNA, 22 nt, Human
acacacuaccgaaugugucuuu

SEQ ID NO: 3598426 - RNA, 12 nt, Human
acacacugaaag

SEQ ID NO: 3598427 - RNA, 14 nt, Human
acacacugaagaag

SEQ ID NO: 3598428 - RNA, 22 nt, Human
acacacugucaugcuucaucau

SEQ ID NO: 3598429 - RNA, 21 nt, Human
acacacugugcuuucuauugu

SEQ ID NO: 3598430 - RNA, 13 nt, Human
acacacuguuguu

SEQ ID NO: 3598431 - RNA, 19 nt, Human
acacacuuuuuaagaaaua

SEQ ID NO: 3598432 - RNA, 17 nt, Human
acacagaaaauauacug

SEQ ID NO: 3598433 - RNA, 18 nt, Human
acacagaaaauauacugu

SEQ ID NO: 3598434 - RNA, 19 nt, Human
acacagaaaauguugagaa

SEQ ID NO: 3598435 - RNA, 16 nt, Human
acacagaaacacugcc

SEQ ID NO: 3598436 - RNA, 17 nt, Human
acacagaaacacugccu

SEQ ID NO: 3598437 - RNA, 23 nt, Human
acacagacauucugccaggcccc

SEQ ID NO: 3598438 - RNA, 14 nt, Human
acacagacuauuuu

SEQ ID NO: 3598439 - RNA, 21 nt, Human
acacagaggaagagcaggcac

SEQ ID NO: 3598440 - RNA, 23 nt, Human
acacagaguggucuuucuggaga

SEQ ID NO: 3598441 - RNA, 17 nt, Human
acacagauuugagcuca

SEQ ID NO: 3598442 - RNA, 22 nt, Human
acacagcagcuucaccagagca

SEQ ID NO: 3598443 - RNA, 14 nt, Human
acacagcaugugua

SEQ ID NO: 3598444 - RNA, 18 nt, Human
acacagcauuguauaugu

SEQ ID NO: 3598445 - RNA, 12 nt, Human
acacagccacac

SEQ ID NO: 3598446 - RNA, 18 nt, Human
acacagccacacacacag

SEQ ID NO: 3598447 - RNA, 21 nt, Human
acacagccacacacacagaaa

SEQ ID NO: 3598448 - RNA, 22 nt, Human
acacagccacacacacagaaaa

SEQ ID NO: 3598449 - RNA, 23 nt, Human
acacagccacacacacagaaaau

SEQ ID NO: 3598450 - RNA, 13 nt, Human
acacagccugggc

SEQ ID NO: 3598451 - RNA, 18 nt, Human
acacagccugggccccag

SEQ ID NO: 3598452 - RNA, 20 nt, Human
acacagccugggccccagcu

SEQ ID NO: 3598453 - RNA, 17 nt, Human
acacagcgucccuagca

SEQ ID NO: 3598454 - RNA, 20 nt, Human
acacagcuaacacacagcuc

SEQ ID NO: 3598455 - RNA, 14 nt, Human
acacagcucugucc

SEQ ID NO: 3598456 - RNA, 20 nt, Human
acacagcucuguccugggag

SEQ ID NO: 3598457 - RNA, 12 nt, Human
acacagcugccg

SEQ ID NO: 3598458 - RNA, 12 nt, Human
acacagcugggc

SEQ ID NO: 3598459 - RNA, 21 nt, Human
acacagcuuuaucaccagaga

SEQ ID NO: 3598460 - RNA, 23 nt, Human
acacagcuuuuaguacccaccug

SEQ ID NO: 3598461 - RNA, 21 nt, Human
acacaggcaacugaggcagac

SEQ ID NO: 3598462 - RNA, 11 nt, Human
acacaggcagc

SEQ ID NO: 3598463 - RNA, 16 nt, Human
acacaggcauuuccug

SEQ ID NO: 3598464 - RNA, 20 nt, Human
acacaggcauuuccugggug

SEQ ID NO: 3598465 - RNA, 23 nt, Human
acacaggcauuuccuggguggcu

SEQ ID NO: 3598466 - RNA, 23 nt, Human
acacaggcccggcuccaggcucc

SEQ ID NO: 3598467 - RNA, 13 nt, Human
acacaggcccucc

SEQ ID NO: 3598468 - RNA, 16 nt, Human
acacaggccugcucuc

SEQ ID NO: 3598469 - RNA, 12 nt, Human
acacaggccugu

SEQ ID NO: 3598470 - RNA, 14 nt, Human
acacagggacuuga

SEQ ID NO: 3598471 - RNA, 21 nt, Human
acacaggggacacccagaaac

SEQ ID NO: 3598472 - RNA, 23 nt, Human
acacagggugacggugacaaaga

SEQ ID NO: 3598473 - RNA, 16 nt, Human
acacaguauuacuucu

SEQ ID NO: 3598474 - RNA, 22 nt, Human
acacaguauuacuucugcuaca

SEQ ID NO: 3598475 - RNA, 23 nt, Human
acacagucaaaauaauucuaaau

SEQ ID NO: 3598476 - RNA, 19 nt, Human
acacagugggaacucugac

SEQ ID NO: 3598477 - RNA, 18 nt, Human
acacaguuacacuugugc

SEQ ID NO: 3598478 - RNA, 15 nt, Human
acacaguuccuggga

SEQ ID NO: 3598479 - RNA, 13 nt, Human
acacauaaaggau

SEQ ID NO: 3598480 - RNA, 18 nt, Human
acacauaaaggauaaacu

SEQ ID NO: 3598481 - RNA, 12 nt, Human
acacauaaauau

SEQ ID NO: 3598482 - RNA, 15 nt, Human
acacauaauuaaagu

SEQ ID NO: 3598483 - RNA, 19 nt, Human
acacauaauuaaagugucc

SEQ ID NO: 3598484 - RNA, 16 nt, Human
acacauacaugucaca

SEQ ID NO: 3598485 - RNA, 14 nt, Human
acacauaccuuugg

SEQ ID NO: 3598486 - RNA, 19 nt, Human
acacauacucauuuuucau

SEQ ID NO: 3598487 - RNA, 20 nt, Human
acacauagauuaauggcacu

SEQ ID NO: 3598488 - RNA, 23 nt, Human
acacauagauuaauggcacugau

SEQ ID NO: 3598489 - RNA, 17 nt, Human
acacauagcauguaaug

SEQ ID NO: 3598490 - RNA, 22 nt, Human
acacauauaaacaucacacaca

SEQ ID NO: 3598491 - RNA, 15 nt, Human
acacauauacacgaa

SEQ ID NO: 3598492 - RNA, 13 nt, Human
acacauaugaggg

SEQ ID NO: 3598493 - RNA, 15 nt, Human
acacaucacagauga

SEQ ID NO: 3598494 - RNA, 14 nt, Human
acacauccacccca

SEQ ID NO: 3598495 - RNA, 15 nt, Human
acacaucccagccca

SEQ ID NO: 3598496 - RNA, 19 nt, Human
acacauccgccuuuuguau

SEQ ID NO: 3598497 - RNA, 22 nt, Human
acacauccgccuuuuguauaca

SEQ ID NO: 3598498 - RNA, 14 nt, Human
acacaucuccucca

SEQ ID NO: 3598499 - RNA, 13 nt, Human
acacaucuucccu

SEQ ID NO: 3598500 - RNA, 21 nt, Human
acacaugcaaggucauuuuuu

SEQ ID NO: 3598501 - RNA, 13 nt, Human
acacaugcacaca

SEQ ID NO: 3598502 - RNA, 18 nt, Human
acacauggaaacccauag

SEQ ID NO: 3598503 - RNA, 22 nt, Human
acacauguccaagaagcccagg

SEQ ID NO: 3598504 - RNA, 14 nt, Human
acacauuaucuucu

SEQ ID NO: 3598505 - RNA, 16 nt, Human
acacauucaauaagca

SEQ ID NO: 3598506 - RNA, 17 nt, Human
acacauucaauaagcau

SEQ ID NO: 3598507 - RNA, 11 nt, Human
acacauuucuu

SEQ ID NO: 3598508 - RNA, 19 nt, Human
acacauuugcuacuguugu

SEQ ID NO: 3598509 - RNA, 20 nt, Human
acacauuugcuacuguugua

SEQ ID NO: 3598510 - RNA, 12 nt, Human
acacauuuguac

SEQ ID NO: 3598511 - RNA, 23 nt, Human
acacauuuguugccagauuucag

SEQ ID NO: 3598512 - RNA, 19 nt, Human
acacauuuuauuuuauuau

SEQ ID NO: 3598513 - RNA, 22 nt, Human
acacauuuuauuuuauuaugca

SEQ ID NO: 3598514 - RNA, 15 nt, Human
acacauuuuguauaa

SEQ ID NO: 3598515 - RNA, 21 nt, Human
acacauuuuguauaauuguau

SEQ ID NO: 3598516 - RNA, 19 nt, Human
acacauuuuuuaaaugcac

SEQ ID NO: 3598517 - RNA, 22 nt, Human
acacauuuuuuaaaugcaccug

SEQ ID NO: 3598518 - RNA, 16 nt, Human
acacauuuuuuaggaa

SEQ ID NO: 3598519 - RNA, 19 nt, Human
acaccaaaaaaauccagaa

SEQ ID NO: 3598520 - RNA, 14 nt, Human
acaccaaaaaauau

SEQ ID NO: 3598521 - RNA, 15 nt, Human
acaccaaaguucuaa

SEQ ID NO: 3598522 - RNA, 16 nt, Human
acaccaagcacagcag

SEQ ID NO: 3598523 - RNA, 20 nt, Human
acaccaagcacagcagccug

SEQ ID NO: 3598524 - RNA, 20 nt, Human
acaccaagcugugccacccu

SEQ ID NO: 3598525 - RNA, 17 nt, Human
acagcuguauugucuga

SEQ ID NO: 3598526 - RNA, 14 nt, Human
acagcugucccugu

SEQ ID NO: 3598527 - RNA, 13 nt, Human
acagcugugccuc

SEQ ID NO: 3598528 - RNA, 21 nt, Human
acagcuguucuucuguucugc

SEQ ID NO: 3598529 - RNA, 14 nt, Human
acagcuguuuaaga

SEQ ID NO: 3598530 - RNA, 19 nt, Human
acagcuguuuaagaugggc

SEQ ID NO: 3598531 - RNA, 12 nt, Human
acagcuuagaau

SEQ ID NO: 3598532 - RNA, 15 nt, Human
acagcuucagccagg

SEQ ID NO: 3598533 - RNA, 22 nt, Human
acagcuucagccaggagcuggg

SEQ ID NO: 3598534 - RNA, 22 nt, Human
acagcuucagguuaucgaaaua

SEQ ID NO: 3598535 - RNA, 19 nt, Human
acagcuucaugccuuugua

SEQ ID NO: 3598536 - RNA, 20 nt, Human
acagcuuccccucucuccuc

SEQ ID NO: 3598537 - RNA, 22 nt, Human
acagcuuccccucucuccuccu

SEQ ID NO: 3598538 - RNA, 21 nt, Human
acagcuucucauccugcaggc

SEQ ID NO: 3598539 - RNA, 23 nt, Human
acagcuugaccgugaggccagag

SEQ ID NO: 3598540 - RNA, 15 nt, Human
acagcuuuacacaca

SEQ ID NO: 3598541 - RNA, 20 nt, Human
acagcuuuccccucauuuuu

SEQ ID NO: 3598542 - RNA, 12 nt, Human
acagcuuucuga

SEQ ID NO: 3598543 - RNA, 14 nt, Human
acagcuuucugacc

SEQ ID NO: 3598544 - RNA, 17 nt, Human
acagcuuucuugcuccc

SEQ ID NO: 3598545 - RNA, 12 nt, Human
acagcuuugacu

SEQ ID NO: 3598546 - RNA, 22 nt, Human
acagcuuuggggugucuuuuuu

SEQ ID NO: 3598547 - RNA, 15 nt, Human
acagcuuugugacug

SEQ ID NO: 3598548 - RNA, 19 nt, Human
acagcuuugugacuguaua

SEQ ID NO: 3598549 - RNA, 23 nt, Human
acagcuuuuaguacccaccugag

SEQ ID NO: 3598550 - RNA, 17 nt, Human
acaggaaaagcugcuga

SEQ ID NO: 3598551 - RNA, 18 nt, Human
acaggaaaagcugcugac

SEQ ID NO: 3598552 - RNA, 17 nt, Human
acaggaaaauccucugg

SEQ ID NO: 3598553 - RNA, 18 nt, Human
acaggaaaauccucuggc

SEQ ID NO: 3598554 - RNA, 23 nt, Human
acaggaaaauccucuggcuggcu

SEQ ID NO: 3598555 - RNA, 14 nt, Human
acaggaaccuuaag

SEQ ID NO: 3598556 - RNA, 20 nt, Human
acaggaagcaccccaugcca

SEQ ID NO: 3598557 - RNA, 17 nt, Human
acaggaaguagaggagg

SEQ ID NO: 3598558 - RNA, 20 nt, Human
acaggacagugcuucagccu

SEQ ID NO: 3598559 - RNA, 14 nt, Human
acaggaccagauuu

SEQ ID NO: 3598560 - RNA, 15 nt, Human
acaggaccccugcag

SEQ ID NO: 3598561 - RNA, 21 nt, Human
acaggacgcugaccguggagc

SEQ ID NO: 3598562 - RNA, 16 nt, Human
acaggacuaacacuca

SEQ ID NO: 3598563 - RNA, 18 nt, Human
acaggacuaacacucaga

SEQ ID NO: 3598564 - RNA, 15 nt, Human
acaggacucugccuc

SEQ ID NO: 3598565 - RNA, 23 nt, Human
acaggacugauucugggaugcuc

SEQ ID NO: 3598566 - RNA, 22 nt, Human
acacccaaagcauggacuaacc

SEQ ID NO: 3598567 - RNA, 13 nt, Human
acacccaaagcug

SEQ ID NO: 3598568 - RNA, 21 nt, Human
acacccaccguccgcccugcu

SEQ ID NO: 3598569 - RNA, 23 nt, Human
acacccaccguccgcccugcucc

SEQ ID NO: 3598570 - RNA, 15 nt, Human
acacccacucagcuc

SEQ ID NO: 3598571 - RNA, 12 nt, Human
acacccagccca

SEQ ID NO: 3598572 - RNA, 17 nt, Human
acacccagcccccacau

SEQ ID NO: 3598573 - RNA, 16 nt, Human
acacccagccucaguc

SEQ ID NO: 3598574 - RNA, 17 nt, Human
acacccagccucagucc

SEQ ID NO: 3598575 - RNA, 13 nt, Human
acacccauguuuc

SEQ ID NO: 3598576 - RNA, 16 nt, Human
acacccauuuuuccuu

SEQ ID NO: 3598577 - RNA, 14 nt, Human
acaccccaccugcg

SEQ ID NO: 3598578 - RNA, 17 nt, Human
acacccucaaccucuuc

SEQ ID NO: 3598579 - RNA, 18 nt, Human
acacccucaaccucuucu

SEQ ID NO: 3598580 - RNA, 17 nt, Human
acacccucacucugcca

SEQ ID NO: 3598581 - RNA, 13 nt, Human
acacccucuccca

SEQ ID NO: 3598582 - RNA, 11 nt, Human
acacccugcaa

SEQ ID NO: 3598583 - RNA, 23 nt, Human
acacccugcaaggcccacaggag

SEQ ID NO: 3598584 - RNA, 13 nt, Human
acacccuguacug

SEQ ID NO: 3598585 - RNA, 11 nt, Human
acacccuguga

SEQ ID NO: 3598586 - RNA, 18 nt, Human
acacccugugauggggcc

SEQ ID NO: 3598587 - RNA, 19 nt, Human
acacccugugauggggccc

SEQ ID NO: 3598588 - RNA, 17 nt, Human
acacccuucucccacuc

SEQ ID NO: 3598589 - RNA, 14 nt, Human
acacccuuggagcu

SEQ ID NO: 3598590 - RNA, 18 nt, Human
acacccuuggagcucuga

SEQ ID NO: 3598591 - RNA, 17 nt, Human
acaccguguaaaccaaa

SEQ ID NO: 3598592 - RNA, 20 nt, Human
acaccguguaaaccaaagcc

SEQ ID NO: 3598593 - RNA, 18 nt, Human
acaccguucauucaggca

SEQ ID NO: 3598594 - RNA, 21 nt, Human
acaccuaaagguguauuuaaa

SEQ ID NO: 3598595 - RNA, 17 nt, Human
acaccuacccuccuuuu

SEQ ID NO: 3598596 - RNA, 21 nt, Human
acaccuacuagucaccagaga

SEQ ID NO: 3598597 - RNA, 18 nt, Human
acaccuagcuuuauucuu

SEQ ID NO: 3598598 - RNA, 20 nt, Human
acaccuaggcuagggugggg

SEQ ID NO: 3598599 - RNA, 19 nt, Human
acaccucacaccucacucu

SEQ ID NO: 3598600 - RNA, 16 nt, Human
acaccucacucuuuau

SEQ ID NO: 3598601 - RNA, 18 nt, Human
acaccucacucuuuauag

SEQ ID NO: 3598602 - RNA, 12 nt, Human
acaccucagagc

SEQ ID NO: 3598603 - RNA, 18 nt, Human
acaccucagagccccgca

SEQ ID NO: 3598604 - RNA, 12 nt, Human
acaccucccagg

SEQ ID NO: 3598605 - RNA, 19 nt, Human
acaccucccaggagacagu

SEQ ID NO: 3598606 - RNA, 16 nt, Human
acaccucccugaacca

SEQ ID NO: 3598607 - RNA, 22 nt, Human
acaccucccugaaccaucccug

SEQ ID NO: 3598608 - RNA, 22 nt, Human
acaccuccucccacugcccacu

SEQ ID NO: 3598609 - RNA, 14 nt, Human
acaccuccuggggc

SEQ ID NO: 3598610 - RNA, 18 nt, Human
acaccuccuucccucucu

SEQ ID NO: 3598611 - RNA, 19 nt, Human
acaccuccuucccucucug

SEQ ID NO: 3598612 - RNA, 21 nt, Human
acaccucguuagggaagagaa

SEQ ID NO: 3598613 - RNA, 19 nt, Human
acaccucugcacaagcugc

SEQ ID NO: 3598614 - RNA, 21 nt, Human
acaccucugcacaagcugcac

SEQ ID NO: 3598615 - RNA, 14 nt, Human
acaccucugccaga

SEQ ID NO: 3598616 - RNA, 16 nt, Human
acaccugacagccccu

SEQ ID NO: 3598617 - RNA, 14 nt, Human
acaccugacucuga

SEQ ID NO: 3598618 - RNA, 18 nt, Human
acaccugacucugaaauc

SEQ ID NO: 3598619 - RNA, 19 nt, Human
acaccugagaaacaucuag

SEQ ID NO: 3598620 - RNA, 15 nt, Human
acaccugauguguac

SEQ ID NO: 3598621 - RNA, 18 nt, Human
acaccugauguguacauc

SEQ ID NO: 3598622 - RNA, 11 nt, Human
acaccugcacc

SEQ ID NO: 3598623 - RNA, 14 nt, Human
acaccugcaccucc

SEQ ID NO: 3598624 - RNA, 15 nt, Human
acaccugcaccuccc

SEQ ID NO: 3598625 - RNA, 14 nt, Human
acaccugcccuaaa

SEQ ID NO: 3598626 - RNA, 13 nt, Human
acaccugcccugc

SEQ ID NO: 3598627 - RNA, 20 nt, Human
acaccugcccugcccugcca

SEQ ID NO: 3598628 - RNA, 18 nt, Human
acaccuggcccuggggcc

SEQ ID NO: 3598629 - RNA, 17 nt, Human
acaccugggcuuaagaa

SEQ ID NO: 3598630 - RNA, 15 nt, Human
acaccuguacuggag

SEQ ID NO: 3598631 - RNA, 14 nt, Human
acaccuucauuuug

SEQ ID NO: 3598632 - RNA, 16 nt, Human
acaccuuccagcuccu

SEQ ID NO: 3598633 - RNA, 20 nt, Human
acaccuuccagcuccuguaa

SEQ ID NO: 3598634 - RNA, 19 nt, Human
acaccuucuuauuauauau

SEQ ID NO: 3598635 - RNA, 16 nt, Human
acaccuugacagggca

SEQ ID NO: 3598636 - RNA, 21 nt, Human
acaccuugugaccuucucuau

SEQ ID NO: 3598637 - RNA, 23 nt, Human
acaccuugugaccuucucuauau

SEQ ID NO: 3598638 - RNA, 16 nt, Human
acaccuuuagguucuu

SEQ ID NO: 3598639 - RNA, 14 nt, Human
acaccuuucuccuu

SEQ ID NO: 3598640 - RNA, 22 nt, Human
acaccuuucuccuuuguacuuu

SEQ ID NO: 3598641 - RNA, 16 nt, Human
acaccuuugcaggcau

SEQ ID NO: 3598642 - RNA, 22 nt, Human
acaccuuugcaggcaugcaugu

SEQ ID NO: 3598643 - RNA, 21 nt, Human
acaccuuuuauugacacagaa

SEQ ID NO: 3598644 - RNA, 14 nt, Human
acacgaaacuuguu

SEQ ID NO: 3598645 - RNA, 17 nt, Human
acacgaaacuuguuauu

SEQ ID NO: 3598646 - RNA, 15 nt, Human
acacgaaagaaaugu

SEQ ID NO: 3598647 - RNA, 22 nt, Human
acacgagguaugaggucuagga

SEQ ID NO: 3598648 - RNA, 20 nt, Human
acacgcacacacacacacag

SEQ ID NO: 3598649 - RNA, 21 nt, Human
acacgcacauauacacacaca

SEQ ID NO: 3598650 - RNA, 14 nt, Human
acacgcaccugccu

SEQ ID NO: 3598651 - RNA, 16 nt, Human
acacgcaccugccuca

SEQ ID NO: 3598652 - RNA, 14 nt, Human
acacgcacgcacac

SEQ ID NO: 3598653 - RNA, 15 nt, Human
acacgcacgcacaca

SEQ ID NO: 3598654 - RNA, 20 nt, Human
acacgcauggucaacccuca

SEQ ID NO: 3598655 - RNA, 21 nt, Human
acacgccccaauuuucaggua

SEQ ID NO: 3598656 - RNA, 16 nt, Human
acacgccuuccccuca

SEQ ID NO: 3598657 - RNA, 22 nt, Human
acacgcgcgcacacacacacau

SEQ ID NO: 3598658 - RNA, 22 nt, Human
acacgcgguuugguuugcagcg

SEQ ID NO: 3598659 - RNA, 20 nt, Human
acacgcucccucccccugcc

SEQ ID NO: 3598660 - RNA, 14 nt, Human
acacgcuccucccu

SEQ ID NO: 3598661 - RNA, 23 nt, Human
acacgcugcucugccccagcuug

SEQ ID NO: 3598662 - RNA, 15 nt, Human
acacggaucugagaa

SEQ ID NO: 3598663 - RNA, 17 nt, Human
acacggaucugagaauc

SEQ ID NO: 3598664 - RNA, 21 nt, Human
acacggaucugagaaucuuua

SEQ ID NO: 3598665 - RNA, 12 nt, Human
acacggccacau

SEQ ID NO: 3598666 - RNA, 23 nt, Human
acacgggggcagcugauacaaau

SEQ ID NO: 3598667 - RNA, 17 nt, Human
acacgggguauuuuagg

SEQ ID NO: 3598668 - RNA, 19 nt, Human
acacgguuugaagccugga

SEQ ID NO: 3598669 - RNA, 18 nt, Human
acauggagguucuaaggc

SEQ ID NO: 3598670 - RNA, 18 nt, Human
acauggccuaugcacaua

SEQ ID NO: 3598671 - RNA, 20 nt, Human
acauggccuaugcacauaug

SEQ ID NO: 3598672 - RNA, 14 nt, Human
acauggccuuugcu

SEQ ID NO: 3598673 - RNA, 22 nt, Human
acauggcuccggccucugccuu

SEQ ID NO: 3598674 - RNA, 20 nt, Human
acauggcucuaaaaaguuuu

SEQ ID NO: 3598675 - RNA, 16 nt, Human
acauggcuuccuccug

SEQ ID NO: 3598676 - RNA, 13 nt, Human
acaugggagcagu

SEQ ID NO: 3598677 - RNA, 23 nt, Human
acaugggagcaguccaugcauga

SEQ ID NO: 3598678 - RNA, 23 nt, Human
acaugggagccgggucugccucu

SEQ ID NO: 3598679 - RNA, 18 nt, Human
acauggggaaaaaaauca

SEQ ID NO: 3598680 - RNA, 16 nt, Human
acaugggguuuucaau

SEQ ID NO: 3598681 - RNA, 14 nt, Human
acauggguuuaguu

SEQ ID NO: 3598682 - RNA, 20 nt, Human
acaugguacucuuguugagu

SEQ ID NO: 3598683 - RNA, 19 nt, Human
acauggugccugagaggca

SEQ ID NO: 3598684 - RNA, 23 nt, Human
acauggugcuacgccugcaugua

SEQ ID NO: 3598685 - RNA, 16 nt, Human
acauggugcugggaga

SEQ ID NO: 3598686 - RNA, 23 nt, Human
acauggugcugggagaggcagcc

SEQ ID NO: 3598687 - RNA, 21 nt, Human
acaugguggcaugcaccugca

SEQ ID NO: 3598688 - RNA, 19 nt, Human
acaugguggggucuccuca

SEQ ID NO: 3598689 - RNA, 18 nt, Human
acaugguuaccaugucuu

SEQ ID NO: 3598690 - RNA, 15 nt, Human
acaugguuugacucu

SEQ ID NO: 3598691 - RNA, 19 nt, Human
acauguaauaaaaaguaua

SEQ ID NO: 3598692 - RNA, 20 nt, Human
acauguaauaaaaaguauau

SEQ ID NO: 3598693 - RNA, 18 nt, Human
acauguaauauaaagaug

SEQ ID NO: 3598694 - RNA, 19 nt, Human
acauguaauuaaguacuau

SEQ ID NO: 3598695 - RNA, 21 nt, Human
acauguaauuaaguacuaugu

SEQ ID NO: 3598696 - RNA, 13 nt, Human
acauguacagaga

SEQ ID NO: 3598697 - RNA, 20 nt, Human
acauguacuguucucuucuu

SEQ ID NO: 3598698 - RNA, 18 nt, Human
acauguagaaaacaaaau

SEQ ID NO: 3598699 - RNA, 21 nt, Human
acauguauuaaauuacauuug

SEQ ID NO: 3598700 - RNA, 19 nt, Human
acauguauugcacauugua

SEQ ID NO: 3598701 - RNA, 21 nt, Human
acauguauugcacauuguaaa

SEQ ID NO: 3598702 - RNA, 21 nt, Human
acauguccaagaagcccagga

SEQ ID NO: 3598703 - RNA, 22 nt, Human
acauguccuaauucuucugucc

SEQ ID NO: 3598704 - RNA, 19 nt, Human
acauguccuucugagcccg

SEQ ID NO: 3598705 - RNA, 19 nt, Human
acaugucuccuacugagga

SEQ ID NO: 3598706 - RNA, 16 nt, Human
acaugucuuaaugaag

SEQ ID NO: 3598707 - RNA, 18 nt, Human
acaugucuuaaugaaguu

SEQ ID NO: 3598708 - RNA, 20 nt, Human
acaugucuuccauguaucuu

SEQ ID NO: 3598709 - RNA, 16 nt, Human
acaugucuuguacaug

SEQ ID NO: 3598710 - RNA, 19 nt, Human
acaugucuuguacaugugu

SEQ ID NO: 3598711 - RNA, 12 nt, Human
acaugugaaacc

SEQ ID NO: 3598712 - RNA, 13 nt, Human
acaugugaaaccu

SEQ ID NO: 3598713 - RNA, 14 nt, Human
acaugugaaaccuu

SEQ ID NO: 3598714 - RNA, 15 nt, Human
acaugugaaaccuuu

SEQ ID NO: 3598715 - RNA, 15 nt, Human
acaugugacauuuau

SEQ ID NO: 3598716 - RNA, 14 nt, Human
acaugugauacauu

SEQ ID NO: 3598717 - RNA, 16 nt, Human
acaugugcacaugcac

SEQ ID NO: 3598718 - RNA, 18 nt, Human
acaugugcugcccuacag

SEQ ID NO: 3598719 - RNA, 18 nt, Human
acauguggcuugaauuaa

SEQ ID NO: 3598720 - RNA, 18 nt, Human
acauguggggccagguca

SEQ ID NO: 3598721 - RNA, 15 nt, Human
acauguggugggaca

SEQ ID NO: 3598722 - RNA, 16 nt, Human
acaugugguuuauaga

SEQ ID NO: 3598723 - RNA, 20 nt, Human
acauguguagccuauguugu

SEQ ID NO: 3598724 - RNA, 23 nt, Human
acaugugucaacaccccugugug

SEQ ID NO: 3598725 - RNA, 20 nt, Human
acaugugucaagcugcuugg

SEQ ID NO: 3598726 - RNA, 12 nt, Human
acauguguguau

SEQ ID NO: 3598727 - RNA, 15 nt, Human
acauguguguauaua

SEQ ID NO: 3598728 - RNA, 12 nt, Human
acauguguuuua

SEQ ID NO: 3598729 - RNA, 21 nt, Human
acauguguuuuaauuccaaua

SEQ ID NO: 3598730 - RNA, 13 nt, Human
acauguuacaaca

SEQ ID NO: 3598731 - RNA, 16 nt, Human
acauguuacugaccag

SEQ ID NO: 3598732 - RNA, 15 nt, Human
acauguucccuucuc

SEQ ID NO: 3598733 - RNA, 18 nt, Human
acauguugguauuuaucu

SEQ ID NO: 3598734 - RNA, 20 nt, Human
acauguugguauuuaucuau

SEQ ID NO: 3598735 - RNA, 21 nt, Human
acauguuguaaauuaggaggc

SEQ ID NO: 3598736 - RNA, 20 nt, Human
acauguuuagaguugcaauc

SEQ ID NO: 3598737 - RNA, 21 nt, Human
acauguuuauguaaacaaauc

SEQ ID NO: 3598738 - RNA, 23 nt, Human
acauguuuauuuauucugcauuu

SEQ ID NO: 3598739 - RNA, 16 nt, Human
acauguuuccucuagu

SEQ ID NO: 3598740 - RNA, 21 nt, Human
acauguuugcaccuuucuagu

SEQ ID NO: 3598741 - RNA, 16 nt, Human
acauguuuuaaagaaa

SEQ ID NO: 3598742 - RNA, 21 nt, Human
acauguuuuagacaaauacuc

SEQ ID NO: 3598743 - RNA, 23 nt, Human
acauguuuuagacaaauacucau

SEQ ID NO: 3598744 - RNA, 14 nt, Human
acauguuuucaaau

SEQ ID NO: 3598745 - RNA, 20 nt, Human
acauguuuugauaaaguagu

SEQ ID NO: 3598746 - RNA, 14 nt, Human
acauuaaaaaugga

SEQ ID NO: 3598747 - RNA, 16 nt, Human
acauuaaaaauggaac

SEQ ID NO: 3598748 - RNA, 22 nt, Human
acauuaaaacaauauuguuucu

SEQ ID NO: 3598749 - RNA, 12 nt, Human
acauuaaauaau

SEQ ID NO: 3598750 - RNA, 12 nt, Human
acauuaaaugac

SEQ ID NO: 3598751 - RNA, 12 nt, Human
acauuaaauguc

SEQ ID NO: 3598752 - RNA, 17 nt, Human
acauuaaaugucuuaua

SEQ ID NO: 3598753 - RNA, 22 nt, Human
acauuaaauuuuuuuuacauuu

SEQ ID NO: 3598754 - RNA, 16 nt, Human
acauuaacaguuuucc

SEQ ID NO: 3598755 - RNA, 17 nt, Human
acauuaacaguuuucca

SEQ ID NO: 3598756 - RNA, 22 nt, Human
acauuaacaguuuuccaugaaa

SEQ ID NO: 3598757 - RNA, 14 nt, Human
acauuaacucauua

SEQ ID NO: 3598758 - RNA, 13 nt, Human
acauuaagaaaau

SEQ ID NO: 3598759 - RNA, 13 nt, Human
acauuaagaaugu

SEQ ID NO: 3598760 - RNA, 14 nt, Human
acauuaagaauguu

SEQ ID NO: 3598761 - RNA, 19 nt, Human
acauuaagaauguugguuu

SEQ ID NO: 3598762 - RNA, 18 nt, Human
acauuaauagcagccuuu

SEQ ID NO: 3598763 - RNA, 19 nt, Human
acauuaauccacauguuuc

SEQ ID NO: 3598764 - RNA, 13 nt, Human
acauuaauguuga

SEQ ID NO: 3598765 - RNA, 14 nt, Human
acauuaauguugau

SEQ ID NO: 3598766 - RNA, 21 nt, Human
acauuaauguugauuucuagu

SEQ ID NO: 3598767 - RNA, 15 nt, Human
acauuaccuuacugu

SEQ ID NO: 3598768 - RNA, 11 nt, Human
acauuagaacu

SEQ ID NO: 3598769 - RNA, 14 nt, Human
acauuagaacuucu

SEQ ID NO: 3598770 - RNA, 22 nt, Human
acauuagaacuucuccguccuc

SEQ ID NO: 3598771 - RNA, 17 nt, Human
acauuagguugugaaug

SEQ ID NO: 3598772 - RNA, 18 nt, Human
acauuaguaaaugucuuu

SEQ ID NO: 3598773 - RNA, 19 nt, Human
acagccgcuccugucugcc

SEQ ID NO: 3598774 - RNA, 24 nt, Human
acagccgcuccugucugccagcca

SEQ ID NO: 3598775 - RNA, 16 nt, Human
acagccggggccugcc

SEQ ID NO: 3598776 - RNA, 20 nt, Human
acagccgucagccaaaugua

SEQ ID NO: 3598777 - RNA, 18 nt, Human
acagccguuuguucccca

SEQ ID NO: 3598778 - RNA, 17 nt, Human
acagccuauuccugaac

SEQ ID NO: 3598779 - RNA, 14 nt, Human
acagccucacuugg

SEQ ID NO: 3598780 - RNA, 22 nt, Human
acagccucacuuggucugccag

SEQ ID NO: 3598781 - RNA, 12 nt, Human
acagccucagaa

SEQ ID NO: 3598782 - RNA, 18 nt, Human
acagccuccccugccagg

SEQ ID NO: 3598783 - RNA, 15 nt, Human
acagccuccucuguc

SEQ ID NO: 3598784 - RNA, 19 nt, Human
acagccuccucugucugcc

SEQ ID NO: 3598785 - RNA, 20 nt, Human
acagccuccucugucugccc

SEQ ID NO: 3598786 - RNA, 12 nt, Human
acagccucuauc

SEQ ID NO: 3598787 - RNA, 16 nt, Human
acagccucugaccccu

SEQ ID NO: 3598788 - RNA, 20 nt, Human
acagccucugaccccuccuc

SEQ ID NO: 3598789 - RNA, 16 nt, Human
acagccucuuagaugc

SEQ ID NO: 3598790 - RNA, 17 nt, Human
acagccugacaacauuu

SEQ ID NO: 3598791 - RNA, 12 nt, Human
acagccuggcug

SEQ ID NO: 3598792 - RNA, 15 nt, Human
acagccugggcccca

SEQ ID NO: 3598793 - RNA, 14 nt, Human
acagccugugucuu

SEQ ID NO: 3598794 - RNA, 16 nt, Human
acagccuugucccccu

SEQ ID NO: 3598795 - RNA, 14 nt, Human
acagcgagggcagc

SEQ ID NO: 3598796 - RNA, 16 nt, Human
acagcgagggcagcug

SEQ ID NO: 3598797 - RNA, 21 nt, Human
acagcgcccaaaggacgcacu

SEQ ID NO: 3598798 - RNA, 13 nt, Human
acagcgcuaugca

SEQ ID NO: 3598799 - RNA, 15 nt, Human
acagcggaggugugg

SEQ ID NO: 3598800 - RNA, 16 nt, Human
acagcggaggugugga

SEQ ID NO: 3598801 - RNA, 22 nt, Human
acagcggcuggacuuggaggua

SEQ ID NO: 3598802 - RNA, 16 nt, Human
acagcggggccccagg

SEQ ID NO: 3598803 - RNA, 21 nt, Human
acagcgucccuagcagugaac

SEQ ID NO: 3598804 - RNA, 23 nt, Human
acagcgucccuagcagugaacua

SEQ ID NO: 3598805 - RNA, 22 nt, Human
acagcguuccuagagaagacag

SEQ ID NO: 3598806 - RNA, 17 nt, Human
acagcguuuaagacugu

SEQ ID NO: 3598807 - RNA, 19 nt, Human
acagcuaacaauugugaag

SEQ ID NO: 3598808 - RNA, 15 nt, Human
acagcuaacacacag

SEQ ID NO: 3598809 - RNA, 19 nt, Human
acagcuaacacacagcucc

SEQ ID NO: 3598810 - RNA, 13 nt, Human
acagcuaacaugg

SEQ ID NO: 3598811 - RNA, 22 nt, Human
acagcuaaucagcauucucacu

SEQ ID NO: 3598812 - RNA, 21 nt, Human
acagcuaauucuacucacagu

SEQ ID NO: 3598813 - RNA, 13 nt, Human
acauucaggagcu

SEQ ID NO: 3598814 - RNA, 15 nt, Human
acauucaugccuggc

SEQ ID NO: 3598815 - RNA, 17 nt, Human
acauuccaaagaacagc

SEQ ID NO: 3598816 - RNA, 15 nt, Human
acauuccaacucgua

SEQ ID NO: 3598817 - RNA, 17 nt, Human
acauucccaucugucac

SEQ ID NO: 3598818 - RNA, 17 nt, Human
acauuccccuggggacc

SEQ ID NO: 3598819 - RNA, 23 nt, Human
acauuccgacaaccgaugcucca

SEQ ID NO: 3598820 - RNA, 16 nt, Human
acauuccguuuacauu

SEQ ID NO: 3598821 - RNA, 20 nt, Human
acauuccucaugaauguaaa

SEQ ID NO: 3598822 - RNA, 14 nt, Human
acauuccugaugcu

SEQ ID NO: 3598823 - RNA, 23 nt, Human
acauuccuucucccaucucuucc

SEQ ID NO: 3598824 - RNA, 23 nt, Human
acauucgaucucauucaguauua

SEQ ID NO: 3598825 - RNA, 14 nt, Human
acauucuaucuacu

SEQ ID NO: 3598826 - RNA, 18 nt, Human
acauucuaucuacugauu

SEQ ID NO: 3598827 - RNA, 13 nt, Human
acauucucaguuu

SEQ ID NO: 3598828 - RNA, 15 nt, Human
acauucucaguuuuu

SEQ ID NO: 3598829 - RNA, 15 nt, Human
acauucugaaugcuu

SEQ ID NO: 3598830 - RNA, 20 nt, Human
acauucugaaugcuucuaag

SEQ ID NO: 3598831 - RNA, 21 nt, Human
acauucugaaugcuucuaagu

SEQ ID NO: 3598832 - RNA, 15 nt, Human
acauucugaugagca

SEQ ID NO: 3598833 - RNA, 17 nt, Human
acauucuguaaaauguc

SEQ ID NO: 3598834 - RNA, 10 nt, Human
acauucuuau

SEQ ID NO: 3598835 - RNA, 15 nt, Human
acauucuuauaaaua

SEQ ID NO: 3598836 - RNA, 16 nt, Human
acauucuuauaaauau

SEQ ID NO: 3598837 - RNA, 23 nt, Human
acauucuuauaaauaugaagcuc

SEQ ID NO: 3598838 - RNA, 21 nt, Human
acauucuucaagaucccauuu

SEQ ID NO: 3598839 - RNA, 11 nt, Human
acauucuugua

SEQ ID NO: 3598840 - RNA, 19 nt, Human
acauucuuuuugcucuaaa

SEQ ID NO: 3598841 - RNA, 12 nt, Human
acauugaaagag

SEQ ID NO: 3598842 - RNA, 13 nt, Human
acauugaaaucua

SEQ ID NO: 3598843 - RNA, 19 nt, Human
acauugaaaucuaggaaaa

SEQ ID NO: 3598844 - RNA, 23 nt, Human
acauugaaaucuaggaaaauuau

SEQ ID NO: 3598845 - RNA, 18 nt, Human
acauugaaguaaugaauu

SEQ ID NO: 3598846 - RNA, 22 nt, Human
acauugaauuagaaacauaaau

SEQ ID NO: 3598847 - RNA, 19 nt, Human
acauugaccaagaacugca

SEQ ID NO: 3598848 - RNA, 22 nt, Human
acauugacgauuccuucucuga

SEQ ID NO: 3598849 - RNA, 14 nt, Human
acauugaguagaca

SEQ ID NO: 3598850 - RNA, 16 nt, Human
acauugcaauagaaau

SEQ ID NO: 3598851 - RNA, 17 nt, Human
acauugcaucaaagcau

SEQ ID NO: 3598852 - RNA, 16 nt, Human
acauugcauucuauug

SEQ ID NO: 3598853 - RNA, 22 nt, Human
acauugcauucuauugccuucu

SEQ ID NO: 3598854 - RNA, 19 nt, Human
acauugccguggcaucuua

SEQ ID NO: 3598855 - RNA, 17 nt, Human
acauugccuuugaaugu

SEQ ID NO: 3598856 - RNA, 23 nt, Human
acauugccuuugaauguuaauuu

SEQ ID NO: 3598857 - RNA, 22 nt, Human
acauugccuuuucuagcccgaa

SEQ ID NO: 3598858 - RNA, 20 nt, Human
acauugcuugugccacaccc

SEQ ID NO: 3598859 - RNA, 21 nt, Human
acauuggaagcagguuaaaug

SEQ ID NO: 3598860 - RNA, 17 nt, Human
acauuggaauguucuca

SEQ ID NO: 3598861 - RNA, 16 nt, Human
acauuggauuauccug

SEQ ID NO: 3598862 - RNA, 18 nt, Human
acauuggauuauccugag

SEQ ID NO: 3598863 - RNA, 21 nt, Human
acauugggcagcgcccuuccu

SEQ ID NO: 3598864 - RNA, 18 nt, Human
acauugggucuauuccag

SEQ ID NO: 3598865 - RNA, 21 nt, Human
acauugggucuauuccagcuc

SEQ ID NO: 3598866 - RNA, 23 nt, Human
acauugguucuuguauuaagaau

SEQ ID NO: 3598867 - RNA, 21 nt, Human
acauuguaaauaguauuugag

SEQ ID NO: 3598868 - RNA, 15 nt, Human
acauugucauuuaua

SEQ ID NO: 3598869 - RNA, 24 nt, Human
acauuguccccaaugaauauacuc

SEQ ID NO: 3598870 - RNA, 19 nt, Human
acauugucucccgcccccc

SEQ ID NO: 3598871 - RNA, 16 nt, Human
acauuguuaaaauaaa

SEQ ID NO: 3598872 - RNA, 20 nt, Human
acauuguucaauuagaauag

SEQ ID NO: 3598873 - RNA, 17 nt, Human
acauuguucuuauucug

SEQ ID NO: 3598874 - RNA, 17 nt, Human
acauuguugagcuauug

SEQ ID NO: 3598875 - RNA, 15 nt, Human
acauuguugcucccu

SEQ ID NO: 3598876 - RNA, 14 nt, Human
acauuguuguuuuu

SEQ ID NO: 3598877 - RNA, 13 nt, Human
acauuguuuuaaa

SEQ ID NO: 3598878 - RNA, 17 nt, Human
acauuguuuuaaaaaga

SEQ ID NO: 3598879 - RNA, 16 nt, Human
acauuuaaaccuuuua

SEQ ID NO: 3598880 - RNA, 17 nt, Human
acauuuaaacuugucag

SEQ ID NO: 3598881 - RNA, 23 nt, Human
acauuuaaauuuuacccuuuaga

SEQ ID NO: 3598882 - RNA, 21 nt, Human
acauuuaaggaugggguuaug

SEQ ID NO: 3598883 - RNA, 15 nt, Human
acauuuaauuuagug

SEQ ID NO: 3598884 - RNA, 21 nt, Human
acauuuacauguauuauuuca

SEQ ID NO: 3598885 - RNA, 15 nt, Human
acauuuaccaaucau

SEQ ID NO: 3598886 - RNA, 16 nt, Human
acauuuagaaaaguga

SEQ ID NO: 3598887 - RNA, 15 nt, Human
acauuuagaagaaag

SEQ ID NO: 3598888 - RNA, 18 nt, Human
acauuuagaagaaagaug

SEQ ID NO: 3598889 - RNA, 13 nt, Human
acauuuagauccu

SEQ ID NO: 3598890 - RNA, 15 nt, Human
acauuuauaauguuu

SEQ ID NO: 3598891 - RNA, 18 nt, Human
acauuuauaauguuugcu

SEQ ID NO: 3598892 - RNA, 22 nt, Human
acauuuaucaaucaguauaauu

SEQ ID NO: 3598893 - RNA, 18 nt, Human
acauuuaugaguaacuau

SEQ ID NO: 3598894 - RNA, 20 nt, Human
acauuuaugauuuaauaaaa

SEQ ID NO: 3598895 - RNA, 22 nt, Human
acauuuaugauuuaauaaaaua

SEQ ID NO: 3598896 - RNA, 15 nt, Human
acauuuauucugcuc

SEQ ID NO: 3598897 - RNA, 18 nt, Human
acauuuauuuauccagaa

SEQ ID NO: 3598898 - RNA, 13 nt, Human
acauuuauuuccu

SEQ ID NO: 3598899 - RNA, 14 nt, Human
acauuuauuuuaug

SEQ ID NO: 3598900 - RNA, 17 nt, Human
acauuuauuuuaugaga

SEQ ID NO: 3598901 - RNA, 20 nt, Human
acauuuauuuuaugagaaau

SEQ ID NO: 3598902 - RNA, 22 nt, Human
acauuuauuuuaugagaaaugu

SEQ ID NO: 3598903 - RNA, 14 nt, Human
acauuucaaaguuu

SEQ ID NO: 3598904 - RNA, 22 nt, Human
acauuucacugucugucugguc

SEQ ID NO: 3598905 - RNA, 13 nt, Human
acauuucccaggg

SEQ ID NO: 3598906 - RNA, 21 nt, Human
acauuuccccagaccugagcu

SEQ ID NO: 3598907 - RNA, 16 nt, Human
acauuuccuaaauaua

SEQ ID NO: 3598908 - RNA, 18 nt, Human
acauuuccuuacagaacu

SEQ ID NO: 3598909 - RNA, 20 nt, Human
acauuucuaacucugaugua

SEQ ID NO: 3598910 - RNA, 12 nt, Human
acauuucucaau

SEQ ID NO: 3598911 - RNA, 17 nt, Human
acauuucucauguugaa

SEQ ID NO: 3598912 - RNA, 19 nt, Human
acauuucuguaaauaccau

SEQ ID NO: 3598913 - RNA, 21 nt, Human
acauuucuuuucuuuuuacau

SEQ ID NO: 3598914 - RNA, 22 nt, Human
acauuucuuuucuuuuuacaua

SEQ ID NO: 3598915 - RNA, 17 nt, Human
acauuugaugcaugucu

SEQ ID NO: 3598916 - RNA, 13 nt, Human
acauuugccuugc

SEQ ID NO: 3598917 - RNA, 14 nt, Human
acauuugccuugca

SEQ ID NO: 3598918 - RNA, 19 nt, Human
acauuugcuacuguuguaa

SEQ ID NO: 3598919 - RNA, 15 nt, Human
acauuugcucaugga

SEQ ID NO: 3598920 - RNA, 23 nt, Human
acauuugcuguuuuaaacauuaa

SEQ ID NO: 3598921 - RNA, 14 nt, Human
acauuuggagaggg

SEQ ID NO: 3598922 - RNA, 15 nt, Human
acauuuggaguguuc

SEQ ID NO: 3598923 - RNA, 20 nt, Human
acauuugggagacaugugac

SEQ ID NO: 3598924 - RNA, 20 nt, Human
acauuugggaguuuuuauga

SEQ ID NO: 3598925 - RNA, 15 nt, Human
acauuuguacagaau

SEQ ID NO: 3598926 - RNA, 21 nt, Human
acauuuguagcauccucuuua

SEQ ID NO: 3598927 - RNA, 18 nt, Human
acauuugucauuuucauu

SEQ ID NO: 3598928 - RNA, 19 nt, Human
acauuugucauuuucauua

SEQ ID NO: 3598929 - RNA, 22 nt, Human
acauuugucauuuucauuagca

SEQ ID NO: 3598930 - RNA, 12 nt, Human
acauuugugaga

SEQ ID NO: 3598931 - RNA, 21 nt, Human
acauuugugauauauguauua

SEQ ID NO: 3598932 - RNA, 14 nt, Human
acaggaugcugugu

SEQ ID NO: 3598933 - RNA, 15 nt, Human
acaggaugcuuuggu

SEQ ID NO: 3598934 - RNA, 24 nt, Human
acaggaugguucccuugaugaaga

SEQ ID NO: 3598935 - RNA, 16 nt, Human
acaggauguguuugcu

SEQ ID NO: 3598936 - RNA, 20 nt, Human
acaggauguguuugcuuucu

SEQ ID NO: 3598937 - RNA, 21 nt, Human
acaggauguguuugcuuucug

SEQ ID NO: 3598938 - RNA, 22 nt, Human
acaggauguuugcucagcuucu

SEQ ID NO: 3598939 - RNA, 14 nt, Human
acaggauuauuuug

SEQ ID NO: 3598940 - RNA, 14 nt, Human
acaggcaaacauuu

SEQ ID NO: 3598941 - RNA, 15 nt, Human
acaggcaaacauuuu

SEQ ID NO: 3598942 - RNA, 23 nt, Human
acaggcaaauccgaaaucagcag

SEQ ID NO: 3598943 - RNA, 14 nt, Human
acaggcaaaugcau

SEQ ID NO: 3598944 - RNA, 18 nt, Human
acaggcaacugaggcaga

SEQ ID NO: 3598945 - RNA, 16 nt, Human
acaggcaagcaccucc

SEQ ID NO: 3598946 - RNA, 17 nt, Human
acaggcacacaccacca

SEQ ID NO: 3598947 - RNA, 16 nt, Human
acaggcacugcccugg

SEQ ID NO: 3598948 - RNA, 23 nt, Human
acaggcacugcccugguggcccu

SEQ ID NO: 3598949 - RNA, 13 nt, Human
acaggcagaaaga

SEQ ID NO: 3598950 - RNA, 13 nt, Human
acaggcagagcug

SEQ ID NO: 3598951 - RNA, 15 nt, Human
acaggcagauacagg

SEQ ID NO: 3598952 - RNA, 13 nt, Human
acaggcagcacag

SEQ ID NO: 3598953 - RNA, 12 nt, Human
acaggcagcaga

SEQ ID NO: 3598954 - RNA, 14 nt, Human
acaggcagcauuua

SEQ ID NO: 3598955 - RNA, 22 nt, Human
acaggcagccagugcccugagc

SEQ ID NO: 3598956 - RNA, 16 nt, Human
acaggcagccuggaca

SEQ ID NO: 3598957 - RNA, 12 nt, Human
aauuaaacuuag

SEQ ID NO: 3598958 - RNA, 16 nt, Human
aauuaaacuuccaaag

SEQ ID NO: 3598959 - RNA, 22 nt, Human
aauuaaacuuccaaagaaaguu

SEQ ID NO: 3598960 - RNA, 12 nt, Human
aauuaaaguguc

SEQ ID NO: 3598961 - RNA, 14 nt, Human
aauuaaauaaaaua

SEQ ID NO: 3598962 - RNA, 19 nt, Human
aauuaaauauauguaugua

SEQ ID NO: 3598963 - RNA, 11 nt, Human
aauuaaaugua

SEQ ID NO: 3598964 - RNA, 14 nt, Human
aauuaaauuaggaa

SEQ ID NO: 3598965 - RNA, 14 nt, Human
aauuaaauuuugag

SEQ ID NO: 3598966 - RNA, 22 nt, Human
aauuaaauuuugaguucuacau

SEQ ID NO: 3598967 - RNA, 17 nt, Human
aauuaaauuuugugucu

SEQ ID NO: 3598968 - RNA, 14 nt, Human
aauuaacagaaaaa

SEQ ID NO: 3598969 - RNA, 17 nt, Human
aauuaacauauaauaua

SEQ ID NO: 3598970 - RNA, 18 nt, Human
aauuaacauauaauauau

SEQ ID NO: 3598971 - RNA, 19 nt, Human
aauuaacauauaauauaug

SEQ ID NO: 3598972 - RNA, 19 nt, Human
aauuaacauguuaaaccau

SEQ ID NO: 3598973 - RNA, 20 nt, Human
aauuaacauugggaaaucuu

SEQ ID NO: 3598974 - RNA, 20 nt, Human
aauuaaccaagguagaauga

SEQ ID NO: 3598975 - RNA, 12 nt, Human
aauuaaccuggu

SEQ ID NO: 3598976 - RNA, 13 nt, Human
aauuaaccuggug

SEQ ID NO: 3598977 - RNA, 18 nt, Human
aauuaaccuggugcugga

SEQ ID NO: 3598978 - RNA, 20 nt, Human
aauuaacuuuuauaaacuuu

SEQ ID NO: 3598979 - RNA, 16 nt, Human
aauuaagaagaaacua

SEQ ID NO: 3598980 - RNA, 13 nt, Human
aauuaagaaggca

SEQ ID NO: 3598981 - RNA, 12 nt, Human
aauuaagacaag

SEQ ID NO: 3598982 - RNA, 19 nt, Human
aauuaagaggauacacacg

SEQ ID NO: 3598983 - RNA, 22 nt, Human
aauuaagcaaauguuaaaaguu

SEQ ID NO: 3598984 - RNA, 16 nt, Human
aauuaaggcauaagaa

SEQ ID NO: 3598985 - RNA, 12 nt, Human
aauuaaguaaac

SEQ ID NO: 3598986 - RNA, 13 nt, Human
aauuaaguaucug

SEQ ID NO: 3598987 - RNA, 23 nt, Human
aauuaauaaaaaauggaaagaau

SEQ ID NO: 3598988 - RNA, 11 nt, Human
aauuaauaaau

SEQ ID NO: 3598989 - RNA, 13 nt, Human
aauuaauagcuuu

SEQ ID NO: 3598990 - RNA, 14 nt, Human
aauuaauaguuugu

SEQ ID NO: 3598991 - RNA, 22 nt, Human
aauuaauaguuugucuauuuua

SEQ ID NO: 3598992 - RNA, 19 nt, Human
aauuaauauauuaaaauuc

SEQ ID NO: 3598993 - RNA, 16 nt, Human
aauuaaucaugaaugu

SEQ ID NO: 3598994 - RNA, 19 nt, Human
aauuaaugaaauaucugua

SEQ ID NO: 3598995 - RNA, 13 nt, Human
aauuaaugacaga

SEQ ID NO: 3598996 - RNA, 16 nt, Human
aauuaauugcuauugu

SEQ ID NO: 3598997 - RNA, 13 nt, Human
aauuaauuggcag

SEQ ID NO: 3598998 - RNA, 18 nt, Human
aauuaauuggcagcagau

SEQ ID NO: 3598999 - RNA, 15 nt, Human
aauuaauuguaaucu

SEQ ID NO: 3599000 - RNA, 15 nt, Human
aauuaauugugugaa

SEQ ID NO: 3599001 - RNA, 16 nt, Human
aauuaauuugauuaac

SEQ ID NO: 3599002 - RNA, 12 nt, Human
aauuaauuuuac

SEQ ID NO: 3599003 - RNA, 23 nt, Human
aauuaauuuuuuuauuguuuaaa

SEQ ID NO: 3599004 - RNA, 15 nt, Human
aauuacaauuuuauc

SEQ ID NO: 3599005 - RNA, 20 nt, Human
aauuacacucuuccuccauu

SEQ ID NO: 3599006 - RNA, 17 nt, Human
aauuacagaaauuuaau

SEQ ID NO: 3599007 - RNA, 11 nt, Human
aauuacaggaa

SEQ ID NO: 3599008 - RNA, 20 nt, Human
aauuacaggaaguacuggag

SEQ ID NO: 3599009 - RNA, 19 nt, Human
aauuacaguggauugcuca

SEQ ID NO: 3599010 - RNA, 15 nt, Human
aauuaccauuuguua

SEQ ID NO: 3599011 - RNA, 16 nt, Human
aauuaccauuuguuaa

SEQ ID NO: 3599012 - RNA, 14 nt, Human
aauuaccuacucug

SEQ ID NO: 3599013 - RNA, 23 nt, Human
aauuaccuuagauuagcucugga

SEQ ID NO: 3599014 - RNA, 21 nt, Human
aauuaccuugagccaguaauu

SEQ ID NO: 3599015 - RNA, 20 nt, Human
aauuacgauaaggaagaaac

SEQ ID NO: 3599016 - RNA, 14 nt, Human
aauuacgugcucug

SEQ ID NO: 3599017 - RNA, 20 nt, Human
aauuacuaaauuacaaaugc

SEQ ID NO: 3599018 - RNA, 16 nt, Human
aauuacuaacuucuaa

SEQ ID NO: 3599019 - RNA, 23 nt, Human
aauuacuaacuucuaaaacugua

SEQ ID NO: 3599020 - RNA, 17 nt, Human
aauuacuacaaaauuug

SEQ ID NO: 3599021 - RNA, 16 nt, Human
aauuacugccuugaaa

SEQ ID NO: 3599022 - RNA, 15 nt, Human
aauuacuuaaaaaaa

SEQ ID NO: 3599023 - RNA, 17 nt, Human
aauuacuuaguauugca

SEQ ID NO: 3599024 - RNA, 23 nt, Human
aauuacuuuggggcuaauuuaac

SEQ ID NO: 3599025 - RNA, 14 nt, Human
aauuacuuugguag

SEQ ID NO: 3599026 - RNA, 19 nt, Human
aauuagacugugauucaga

SEQ ID NO: 3599027 - RNA, 22 nt, Human
aauuagagcagaugaccccucc

SEQ ID NO: 3599028 - RNA, 21 nt, Human
aauuagaugcauguugaccau

SEQ ID NO: 3599029 - RNA, 13 nt, Human
aauuagauuucuc

SEQ ID NO: 3599030 - RNA, 15 nt, Human
aauuagccaagugug

SEQ ID NO: 3599031 - RNA, 17 nt, Human
aauuagccaguaauccu

SEQ ID NO: 3599032 - RNA, 15 nt, Human
aauuagccuaagaua

SEQ ID NO: 3599033 - RNA, 16 nt, Human
aauuagcugugugaaa

SEQ ID NO: 3599034 - RNA, 16 nt, Human
aauuagcuuauguuaa

SEQ ID NO: 3599035 - RNA, 17 nt, Human
aauuagcuuggggccag

SEQ ID NO: 3599036 - RNA, 21 nt, Human
aauuaggaaguguaacagcug

SEQ ID NO: 3599037 - RNA, 18 nt, Human
aauuaggcuguaacuacu

SEQ ID NO: 3599038 - RNA, 17 nt, Human
aauuagggguugcuaag

SEQ ID NO: 3599039 - RNA, 16 nt, Human
aauuaggguacauuua

SEQ ID NO: 3599040 - RNA, 20 nt, Human
aauuaggguacauuuauaau

SEQ ID NO: 3599041 - RNA, 14 nt, Human
aauuagguuaacua

SEQ ID NO: 3599042 - RNA, 22 nt, Human
aauuagguuaacuauguacaau

SEQ ID NO: 3599043 - RNA, 17 nt, Human
aauuagguugaaacaua

SEQ ID NO: 3599044 - RNA, 18 nt, Human
aauuagguuuuuccuuau

SEQ ID NO: 3599045 - RNA, 17 nt, Human
aauuaguaacauguguu

SEQ ID NO: 3599046 - RNA, 22 nt, Human
aauuaguaggcucauuuacugu

SEQ ID NO: 3599047 - RNA, 22 nt, Human
aauuagugcuaagugugaacug

SEQ ID NO: 3599048 - RNA, 12 nt, Human
aauuaguuuccu

SEQ ID NO: 3599049 - RNA, 17 nt, Human
aauuaguuuuauaugcu

SEQ ID NO: 3599050 - RNA, 14 nt, Human
aauuauaaaagcca

SEQ ID NO: 3599051 - RNA, 20 nt, Human
aauuauaagaggcugauaau

SEQ ID NO: 3599052 - RNA, 18 nt, Human
aauuauaaggacugcaug

SEQ ID NO: 3599053 - RNA, 16 nt, Human
aauuauaagucacaaa

SEQ ID NO: 3599054 - RNA, 16 nt, Human
aauuauaauguauuca

SEQ ID NO: 3599055 - RNA, 13 nt, Human
aauuauacaaauu

SEQ ID NO: 3599056 - RNA, 12 nt, Human
aauuauacuaac

SEQ ID NO: 3599057 - RNA, 20 nt, Human
aauuauagcucuaauguuug

SEQ ID NO: 3599058 - RNA, 23 nt, Human
aauuauagcucuaauguuugcau

SEQ ID NO: 3599059 - RNA, 14 nt, Human
aauuauaguuucug

SEQ ID NO: 3599060 - RNA, 16 nt, Human
aauuauaguuucugag

SEQ ID NO: 3599061 - RNA, 17 nt, Human
aauuauaguuucugagg

SEQ ID NO: 3599062 - RNA, 14 nt, Human
aauuauauaacugu

SEQ ID NO: 3599063 - RNA, 22 nt, Human
aauuauaucaguccucuuucaa

SEQ ID NO: 3599064 - RNA, 14 nt, Human
aauuauauguugua

SEQ ID NO: 3599065 - RNA, 13 nt, Human
aauuauauuugug

SEQ ID NO: 3599066 - RNA, 16 nt, Human
aauuaucagcaaagaa

SEQ ID NO: 3599067 - RNA, 19 nt, Human
aauuaucagcaaagaaaaa

SEQ ID NO: 3599068 - RNA, 21 nt, Human
aauuaucagcaaagaaaaaaa

SEQ ID NO: 3599069 - RNA, 22 nt, Human
aauuaucaggcaaauuugcauu

SEQ ID NO: 3599070 - RNA, 15 nt, Human
aauuauccagaguuu

SEQ ID NO: 3599071 - RNA, 21 nt, Human
aauuaucccuuuucuugacua

SEQ ID NO: 3599072 - RNA, 16 nt, Human
aauuauccuauuucag

SEQ ID NO: 3599073 - RNA, 21 nt, Human
aauuaucggaagcagugccuu

SEQ ID NO: 3599074 - RNA, 23 nt, Human
aauuaucgggaacaguguuuccc

SEQ ID NO: 3599075 - RNA, 15 nt, Human
aauuaucuaauuuau

SEQ ID NO: 3599076 - RNA, 18 nt, Human
aauuaucuaauuuauaaa

SEQ ID NO: 3599077 - RNA, 14 nt, Human
aauuaucuauacau

SEQ ID NO: 3599078 - RNA, 16 nt, Human
aauuaucuauacauau

SEQ ID NO: 3599079 - RNA, 15 nt, Human
aauuaucuauagcua

SEQ ID NO: 3599080 - RNA, 22 nt, Human
aauuaucuauagcuaaguacac

SEQ ID NO: 3599081 - RNA, 23 nt, Human
aauuaucuauagcuaaguacaca

SEQ ID NO: 3599082 - RNA, 13 nt, Human
aauuaucuauuug

SEQ ID NO: 3599083 - RNA, 18 nt, Human
aauuaucuugauacauuc

SEQ ID NO: 3599084 - RNA, 12 nt, Human
aauuaugaaacu

SEQ ID NO: 3599085 - RNA, 15 nt, Human
aauuaugaagauuua

SEQ ID NO: 3599086 - RNA, 21 nt, Human
aauuaugaaucugauuuuuau

SEQ ID NO: 3599087 - RNA, 13 nt, Human
aauuaugacaguu

SEQ ID NO: 3599088 - RNA, 15 nt, Human
aauuaugacaguuau

SEQ ID NO: 3599089 - RNA, 16 nt, Human
aauuaugcuaagaauu

SEQ ID NO: 3599090 - RNA, 18 nt, Human
aauuaugcuaagaauuuu

SEQ ID NO: 3599091 - RNA, 21 nt, Human
aauuauggaaaaaaaauauuc

SEQ ID NO: 3599092 - RNA, 21 nt, Human
aauuauggcccagggggcuaa

SEQ ID NO: 3599093 - RNA, 17 nt, Human
aauuaugguaaaauuuu

SEQ ID NO: 3599094 - RNA, 22 nt, Human
acaguauaucccaagugcacuu

SEQ ID NO: 3599095 - RNA, 18 nt, Human
acaguauauuuuauuuca

SEQ ID NO: 3599096 - RNA, 15 nt, Human
acaguaucccacauc

SEQ ID NO: 3599097 - RNA, 21 nt, Human
acaguaucccacauccaacuc

SEQ ID NO: 3599098 - RNA, 21 nt, Human
acaguauggcagcuuuccuca

SEQ ID NO: 3599099 - RNA, 19 nt, Human
acaguauggggguuguaaa

SEQ ID NO: 3599100 - RNA, 22 nt, Human
acaguauggggguuguaaauug

SEQ ID NO: 3599101 - RNA, 17 nt, Human
acaguaugucccauagg

SEQ ID NO: 3599102 - RNA, 15 nt, Human
aaaguguuuucagag

SEQ ID NO: 3599103 - RNA, 17 nt, Human
aaaguguuuuguaccag

SEQ ID NO: 3599104 - RNA, 15 nt, Human
aaaguuaaaaaaaau

SEQ ID NO: 3599105 - RNA, 17 nt, Human
aaaguuaaaauuguuau

SEQ ID NO: 3599106 - RNA, 16 nt, Human
aaaguuaaacauugaa

SEQ ID NO: 3599107 - RNA, 20 nt, Human
aaaguuaaccuaccuguaac

SEQ ID NO: 3599108 - RNA, 22 nt, Human
aaaguuaaugcuuaagagggaa

SEQ ID NO: 3599109 - RNA, 14 nt, Human
aaaguuacagaaau

SEQ ID NO: 3599110 - RNA, 19 nt, Human
aaaguuacuaccugucaag

SEQ ID NO: 3599111 - RNA, 20 nt, Human
aaaguuacuuugucagaggc

SEQ ID NO: 3599112 - RNA, 13 nt, Human
aaaguuagaaucu

SEQ ID NO: 3599113 - RNA, 18 nt, Human
aaaguuagaaucuauuuu

SEQ ID NO: 3599114 - RNA, 20 nt, Human
aaaguuaguaucuuuugaua

SEQ ID NO: 3599115 - RNA, 16 nt, Human
aaaguuauauagguuu

SEQ ID NO: 3599116 - RNA, 24 nt, Human
aaaguuauauuucagauguaaugu

SEQ ID NO: 3599117 - RNA, 20 nt, Human
aaaguuauugauaaguucau

SEQ ID NO: 3599118 - RNA, 23 nt, Human
aaaguuauugauaaguucauaca

SEQ ID NO: 3599119 - RNA, 18 nt, Human
aaaguuauuuuuaaaaac

SEQ ID NO: 3599120 - RNA, 18 nt, Human
aaaguucacaauguggcc

SEQ ID NO: 3599121 - RNA, 15 nt, Human
aaaguucagaguuuu

SEQ ID NO: 3599122 - RNA, 22 nt, Human
aaaguucauaacagugccauug

SEQ ID NO: 3599123 - RNA, 16 nt, Human
aaaguuccaagagucu

SEQ ID NO: 3599124 - RNA, 11 nt, Human
aaaguucuaag

SEQ ID NO: 3599125 - RNA, 19 nt, Human
aaaguucuaauaauuucua

SEQ ID NO: 3599126 - RNA, 21 nt, Human
aaaguucuaauaauuucuaau

SEQ ID NO: 3599127 - RNA, 23 nt, Human
aaaguucugcagauaaacaguag

SEQ ID NO: 3599128 - RNA, 17 nt, Human
aaaguucuguaaaauau

SEQ ID NO: 3599129 - RNA, 12 nt, Human
aaaguucugugu

SEQ ID NO: 3599130 - RNA, 13 nt, Human
aaaguucugugua

SEQ ID NO: 3599131 - RNA, 15 nt, Human
aaaguugcaaggcaa

SEQ ID NO: 3599132 - RNA, 18 nt, Human
aaaguugcagcuguuuug

SEQ ID NO: 3599133 - RNA, 13 nt, Human
aaaguugccuaaa

SEQ ID NO: 3599134 - RNA, 14 nt, Human
aaaguugccuaaau

SEQ ID NO: 3599135 - RNA, 13 nt, Human
aaaguuggacuaa

SEQ ID NO: 3599136 - RNA, 15 nt, Human
aaaguuggacuaaau

SEQ ID NO: 3599137 - RNA, 13 nt, Human
aaaguuguacaug

SEQ ID NO: 3599138 - RNA, 16 nt, Human
aaaguuguacuuuaaa

SEQ ID NO: 3599139 - RNA, 16 nt, Human
aaaguuguucaacuau

SEQ ID NO: 3599140 - RNA, 19 nt, Human
aaaguuguucaacuauuuu

SEQ ID NO: 3599141 - RNA, 20 nt, Human
aaaguuuaaaacagaagccu

SEQ ID NO: 3599142 - RNA, 12 nt, Human
aaaguuuaaaau

SEQ ID NO: 3599143 - RNA, 21 nt, Human
aaaguuuaauauuaaagccau

SEQ ID NO: 3599144 - RNA, 18 nt, Human
aaaguuuacaguaaauaa

SEQ ID NO: 3599145 - RNA, 19 nt, Human
aaaguuuagccccugaaag

SEQ ID NO: 3599146 - RNA, 19 nt, Human
aaaguuucaaaaaucugaa

SEQ ID NO: 3599147 - RNA, 21 nt, Human
aaaguuucaaaaaucugaaga

SEQ ID NO: 3599148 - RNA, 12 nt, Human
aaaguuucaaug

SEQ ID NO: 3599149 - RNA, 22 nt, Human
aaaguuuccccaccagugaaug

SEQ ID NO: 3599150 - RNA, 14 nt, Human
aaaguuugaucuuc

SEQ ID NO: 3599151 - RNA, 22 nt, Human
aaaguuugaucuuccucugcua

SEQ ID NO: 3599152 - RNA, 15 nt, Human
aaaguuugccagaag

SEQ ID NO: 3599153 - RNA, 15 nt, Human
aaaguuugcuuagaa

SEQ ID NO: 3599154 - RNA, 16 nt, Human
aaaguuugcuuagaaa

SEQ ID NO: 3599155 - RNA, 14 nt, Human
aaaguuuuauauau

SEQ ID NO: 3599156 - RNA, 17 nt, Human
aaaguuuuauauauuau

SEQ ID NO: 3599157 - RNA, 18 nt, Human
aaaguuuuauauauuaua

SEQ ID NO: 3599158 - RNA, 20 nt, Human
aaaguuuuauauauuauaug

SEQ ID NO: 3599159 - RNA, 21 nt, Human
aaaguuuuauauauuauaugg

SEQ ID NO: 3599160 - RNA, 22 nt, Human
aaaguuuuauauauuauaugga

SEQ ID NO: 3599161 - RNA, 16 nt, Human
aaaguuuuauuuuucu

SEQ ID NO: 3599162 - RNA, 16 nt, Human
aaaguuuugaaaagcu

SEQ ID NO: 3599163 - RNA, 19 nt, Human
aaaguuuugaaaagcuauu

SEQ ID NO: 3599164 - RNA, 23 nt, Human
aaaguuuugaguagauauuacuu

SEQ ID NO: 3599165 - RNA, 23 nt, Human
aaaguuuuguuguacuuaaaugg

SEQ ID NO: 3599166 - RNA, 22 nt, Human
aaauaaaaaaaagaaaaaagag

SEQ ID NO: 3599167 - RNA, 16 nt, Human
aaauaaaaaagauccc

SEQ ID NO: 3599168 - RNA, 10 nt, Human
aaauaaaaag

SEQ ID NO: 3599169 - RNA, 19 nt, Human
aaauaaaaagaaaggcugu

SEQ ID NO: 3599170 - RNA, 15 nt, Human
aaauaaaaagugaca

SEQ ID NO: 3599171 - RNA, 14 nt, Human
aaauaaaaaguuaa

SEQ ID NO: 3599172 - RNA, 14 nt, Human
aaauaaaaauauug

SEQ ID NO: 3599173 - RNA, 20 nt, Human
aaauaaaaauauuguguugu

SEQ ID NO: 3599174 - RNA, 23 nt, Human
aaauaaaaauuauuauugauuuu

SEQ ID NO: 3599175 - RNA, 13 nt, Human
aaauaaaaauucu

SEQ ID NO: 3599176 - RNA, 20 nt, Human
aaauaaaacaaagggcacag

SEQ ID NO: 3599177 - RNA, 13 nt, Human
aaauaaaacauuu

SEQ ID NO: 3599178 - RNA, 22 nt, Human
aaauaaaacauuuucacacaau

SEQ ID NO: 3599179 - RNA, 15 nt, Human
aaauaaaaccuuuca

SEQ ID NO: 3599180 - RNA, 17 nt, Human
aaauaaaaccuuucaaa

SEQ ID NO: 3599181 - RNA, 19 nt, Human
aaauaaaacuuuuuaaaau

SEQ ID NO: 3599182 - RNA, 20 nt, Human
aaauaaaagaaaugcacaau

SEQ ID NO: 3599183 - RNA, 19 nt, Human
aaauaaaagcagcaucugc

SEQ ID NO: 3599184 - RNA, 16 nt, Human
aaauaaaagugaucaa

SEQ ID NO: 3599185 - RNA, 13 nt, Human
aaauaaaauauaa

SEQ ID NO: 3599186 - RNA, 15 nt, Human
aaauaaaauauaauu

SEQ ID NO: 3599187 - RNA, 17 nt, Human
aaauaaaaugcuagguu

SEQ ID NO: 3599188 - RNA, 21 nt, Human
aaauaaacacauagauucacc

SEQ ID NO: 3599189 - RNA, 23 nt, Human
aaauaaacacauagauucaccug

SEQ ID NO: 3599190 - RNA, 16 nt, Human
aaauaaacacuacaga

SEQ ID NO: 3599191 - RNA, 17 nt, Human
aaacuacauuuuaacau

SEQ ID NO: 3599192 - RNA, 17 nt, Human
aaacuacucuuugauuu

SEQ ID NO: 3599193 - RNA, 21 nt, Human
aaacuacugccuuuagaaaau

SEQ ID NO: 3599194 - RNA, 23 nt, Human
aaacuagacuugaggaaaccagg

SEQ ID NO: 3599195 - RNA, 22 nt, Human
aaacuagaggugagaaauuuaa

SEQ ID NO: 3599196 - RNA, 12 nt, Human
aaacuagaugac

SEQ ID NO: 3599197 - RNA, 13 nt, Human
aaacuagaugacc

SEQ ID NO: 3599198 - RNA, 17 nt, Human
aaacuagaugaccucau

SEQ ID NO: 3599199 - RNA, 19 nt, Human
aaacuagcauaucugccuu

SEQ ID NO: 3599200 - RNA, 21 nt, Human
aaacuagcauaucugccuuua

SEQ ID NO: 3599201 - RNA, 13 nt, Human
aaacuaggaaaau

SEQ ID NO: 3599202 - RNA, 17 nt, Human
aaacuaggaaaauugga

SEQ ID NO: 3599203 - RNA, 15 nt, Human
aaacuaggcuccuuc

SEQ ID NO: 3599204 - RNA, 20 nt, Human
aaacuaggggacaaagcaaa

SEQ ID NO: 3599205 - RNA, 18 nt, Human
aaacuaggugcauauuua

SEQ ID NO: 3599206 - RNA, 19 nt, Human
aaacuauacuugaacaaaa

SEQ ID NO: 3599207 - RNA, 17 nt, Human
aaacuauauuuugucau

SEQ ID NO: 3599208 - RNA, 14 nt, Human
aaacuaucuugugu

SEQ ID NO: 3599209 - RNA, 19 nt, Human
aaacuaugaaaccuuuuuc

SEQ ID NO: 3599210 - RNA, 13 nt, Human
aaacuauguguuu

SEQ ID NO: 3599211 - RNA, 17 nt, Human
aaacuauguguuuuucu

SEQ ID NO: 3599212 - RNA, 18 nt, Human
aaacuauuuaaagaaaua

SEQ ID NO: 3599213 - RNA, 18 nt, Human
aaacucaaaacuuaacau

SEQ ID NO: 3599214 - RNA, 15 nt, Human
aaacucaaacuuuuc

SEQ ID NO: 3599215 - RNA, 20 nt, Human
aaacucaaccaaaugguaca

SEQ ID NO: 3599216 - RNA, 22 nt, Human
aaacucaaccaaaugguacaaa

SEQ ID NO: 3599217 - RNA, 13 nt, Human
aaacucaaugcuu

SEQ ID NO: 3599218 - RNA, 18 nt, Human
aaacucaaugcuuuauuu

SEQ ID NO: 3599219 - RNA, 15 nt, Human
aaacucacaaaugau

SEQ ID NO: 3599220 - RNA, 15 nt, Human
aaacucacugcucaa

SEQ ID NO: 3599221 - RNA, 23 nt, Human
aaacucagccucaauaagccuug

SEQ ID NO: 3599222 - RNA, 19 nt, Human
aaacucaggcaaagaaaau

SEQ ID NO: 3599223 - RNA, 17 nt, Human
aaacucagggacagagc

SEQ ID NO: 3599224 - RNA, 21 nt, Human
aaacucauucauuagucaugu

SEQ ID NO: 3599225 - RNA, 15 nt, Human
aaacucauuuauaaa

SEQ ID NO: 3599226 - RNA, 24 nt, Human
aaacucauuuauaaagcuaaaaua

SEQ ID NO: 3599227 - RNA, 15 nt, Human
aaacucauuuccuau

SEQ ID NO: 3599228 - RNA, 18 nt, Human
aaacuccacaucugccuu

SEQ ID NO: 3599229 - RNA, 19 nt, Human
aaacuccacaucugccuua

SEQ ID NO: 3599230 - RNA, 15 nt, Human
aaacuccaccuuccc

SEQ ID NO: 3599231 - RNA, 22 nt, Human
aaacuccgagugaacuggucuu

SEQ ID NO: 3599232 - RNA, 17 nt, Human
aaacuccggauugcguu

SEQ ID NO: 3599233 - RNA, 14 nt, Human
aaacuccugccccu

SEQ ID NO: 3599234 - RNA, 16 nt, Human
aaacucgaggacugua

SEQ ID NO: 3599235 - RNA, 17 nt, Human
aaacucgaggacuguau

SEQ ID NO: 3599236 - RNA, 19 nt, Human
aaacucgaggacuguauuu

SEQ ID NO: 3599237 - RNA, 22 nt, Human
aaacucgaggacuguauuugug

SEQ ID NO: 3599238 - RNA, 15 nt, Human
aaacucguuaauuug

SEQ ID NO: 3599239 - RNA, 20 nt, Human
aaacucuaaacauuaaucaa

SEQ ID NO: 3599240 - RNA, 22 nt, Human
aaacucuaucggagaacaugaa

SEQ ID NO: 3599241 - RNA, 23 nt, Human
aaacucucuuugggaauguuugu

SEQ ID NO: 3599242 - RNA, 23 nt, Human
aaacucugcauccagagauucau

SEQ ID NO: 3599243 - RNA, 14 nt, Human
aaacucugggaaau

SEQ ID NO: 3599244 - RNA, 22 nt, Human
aaacucugggaaauaagagaga

SEQ ID NO: 3599245 - RNA, 18 nt, Human
aaacucuguuacacuuuu

SEQ ID NO: 3599246 - RNA, 15 nt, Human
aaauaagcaggugga

SEQ ID NO: 3599247 - RNA, 22 nt, Human
aaauaagcagguggaucuauuu

SEQ ID NO: 3599248 - RNA, 12 nt, Human
aaauaagcuauu

SEQ ID NO: 3599249 - RNA, 18 nt, Human
aaauaagcuauuugaugu

SEQ ID NO: 3599250 - RNA, 22 nt, Human
aaauaagcuauuugauguaaua

SEQ ID NO: 3599251 - RNA, 22 nt, Human
aaauaaggcacccaucugucug

SEQ ID NO: 3599252 - RNA, 12 nt, Human
aaauaaguauuu

SEQ ID NO: 3599253 - RNA, 17 nt, Human
aaauaaguauuuauaau

SEQ ID NO: 3599254 - RNA, 22 nt, Human
aaauaaguauuuauaauagcaa

SEQ ID NO: 3599255 - RNA, 13 nt, Human
aaauaagucaaca

SEQ ID NO: 3599256 - RNA, 12 nt, Human
aaauaagucuga

SEQ ID NO: 3599257 - RNA, 14 nt, Human
aaauaagucugauu

SEQ ID NO: 3599258 - RNA, 17 nt, Human
aaauaagucugauuuaa

SEQ ID NO: 3599259 - RNA, 14 nt, Human
aaauaaguguauuu

SEQ ID NO: 3599260 - RNA, 16 nt, Human
aaauaaguuuuuguuu

SEQ ID NO: 3599261 - RNA, 11 nt, Human
aaauaauaaag

SEQ ID NO: 3599262 - RNA, 16 nt, Human
aaauaauaaauugcau

SEQ ID NO: 3599263 - RNA, 15 nt, Human
aaauaauaauaaugu

SEQ ID NO: 3599264 - RNA, 13 nt, Human
aaauaauaauuuu

SEQ ID NO: 3599265 - RNA, 14 nt, Human
aaauaauaugcauu

SEQ ID NO: 3599266 - RNA, 14 nt, Human
aaauaaucauucuu

SEQ ID NO: 3599267 - RNA, 13 nt, Human
aaauaaucucuga

SEQ ID NO: 3599268 - RNA, 19 nt, Human
aaauaaugcuacaauuuua

SEQ ID NO: 3599269 - RNA, 18 nt, Human
aaauaauguaauuguaau

SEQ ID NO: 3599270 - RNA, 12 nt, Human
aaauaaugucuc

SEQ ID NO: 3599271 - RNA, 21 nt, Human
aaauaaugucuuguuaauauu

SEQ ID NO: 3599272 - RNA, 12 nt, Human
aaauaaugugaa

SEQ ID NO: 3599273 - RNA, 14 nt, Human
aaauaaugugaaac

SEQ ID NO: 3599274 - RNA, 13 nt, Human
aaauaauucuuuu

SEQ ID NO: 3599275 - RNA, 14 nt, Human
aaauaauucuuuuu

SEQ ID NO: 3599276 - RNA, 21 nt, Human
aaauaauucuuuuuuauuaau

SEQ ID NO: 3599277 - RNA, 17 nt, Human
aaauaauugauuucaag

SEQ ID NO: 3599278 - RNA, 13 nt, Human
aaauaauuguugu

SEQ ID NO: 3599279 - RNA, 19 nt, Human
aaauaauuuaacuacccuu

SEQ ID NO: 3599280 - RNA, 12 nt, Human
aaauaauuuuaa

SEQ ID NO: 3599281 - RNA, 20 nt, Human
aaauaauuuuaaacaaaggu

SEQ ID NO: 3599282 - RNA, 13 nt, Human
aaauaauuuuagu

SEQ ID NO: 3599283 - RNA, 19 nt, Human
aaauaauuuuaucucuuuc

SEQ ID NO: 3599284 - RNA, 14 nt, Human
aaauaauuuuauga

SEQ ID NO: 3599285 - RNA, 23 nt, Human
aaauaauuuuaugaacugcaugu

SEQ ID NO: 3599286 - RNA, 13 nt, Human
aaauaauuuugua

SEQ ID NO: 3599287 - RNA, 18 nt, Human
aaauaauuuuuauauuug

SEQ ID NO: 3599288 - RNA, 20 nt, Human
aaauaauuuuuauauuugaa

SEQ ID NO: 3599289 - RNA, 11 nt, Human
aaauacaaaaa

SEQ ID NO: 3599290 - RNA, 17 nt, Human
aaauacaaguucuauuu

SEQ ID NO: 3599291 - RNA, 13 nt, Human
aaauacaauaaac

SEQ ID NO: 3599292 - RNA, 17 nt, Human
aaauacaauuuuguuuc

SEQ ID NO: 3599293 - RNA, 18 nt, Human
aaauacaauuuuguuucu

SEQ ID NO: 3599294 - RNA, 20 nt, Human
aaauacaauuuuguuucugu

SEQ ID NO: 3599295 - RNA, 21 nt, Human
aaauacaccaccucacuccug

SEQ ID NO: 3599296 - RNA, 14 nt, Human
aaauacagacacua

SEQ ID NO: 3599297 - RNA, 16 nt, Human
aaauacagacacuaag

SEQ ID NO: 3599298 - RNA, 22 nt, Human
aaauacagacacuaaguuauag

SEQ ID NO: 3599299 - RNA, 16 nt, Human
aaauacagauaaauga

SEQ ID NO: 3599300 - RNA, 20 nt, Human
aaauacagauaaaugauuca

SEQ ID NO: 3599301 - RNA, 22 nt, Human
aaauacagauaaaugauucaaa

SEQ ID NO: 3599302 - RNA, 17 nt, Human
aaauacagcuggauugg

SEQ ID NO: 3599303 - RNA, 16 nt, Human
aaauacaggaaacagu

SEQ ID NO: 3599304 - RNA, 16 nt, Human
aaauacaguauucugu

SEQ ID NO: 3599305 - RNA, 22 nt, Human
aaauacaguuugucacaugaaa

SEQ ID NO: 3599306 - RNA, 16 nt, Human
aaauacauacggucag

SEQ ID NO: 3599307 - RNA, 19 nt, Human
aaauacaugcauauaauga

SEQ ID NO: 3599308 - RNA, 18 nt, Human
aaauacaugcuaagagaa

SEQ ID NO: 3599309 - RNA, 13 nt, Human
aaauacauucuuu

SEQ ID NO: 3599310 - RNA, 19 nt, Human
aaauacauucuuuuugcuc

SEQ ID NO: 3599311 - RNA, 23 nt, Human
aaauaccaaaauuauuucagaaa

SEQ ID NO: 3599312 - RNA, 23 nt, Human
aaauaccaaaccuucugacuuug

SEQ ID NO: 3599313 - RNA, 18 nt, Human
aaauaccagugaaccaaa

SEQ ID NO: 3599314 - RNA, 21 nt, Human
aaauaccagugaaccaaagag

SEQ ID NO: 3599315 - RNA, 12 nt, Human
aaauaccauuua

SEQ ID NO: 3599316 - RNA, 14 nt, Human
aaauaccucaggaa

SEQ ID NO: 3599317 - RNA, 15 nt, Human
aaauaccucauguuu

SEQ ID NO: 3599318 - RNA, 14 nt, Human
aaauacuacuccug

SEQ ID NO: 3599319 - RNA, 22 nt, Human
aaauacuauuuuuacugccacu

SEQ ID NO: 3599320 - RNA, 16 nt, Human
aaauacucauguguau

SEQ ID NO: 3599321 - RNA, 15 nt, Human
aaauacugcaaauca

SEQ ID NO: 3599322 - RNA, 18 nt, Human
aaauacugccagaugcug

SEQ ID NO: 3599323 - RNA, 20 nt, Human
aaauacugccagaugcugau

SEQ ID NO: 3599324 - RNA, 18 nt, Human
aaauacuguagauaauua

SEQ ID NO: 3599325 - RNA, 23 nt, Human
aaauacuguagauaauuaaccaa

SEQ ID NO: 3599326 - RNA, 22 nt, Human
aaauacuguuuuuaacaacuau

SEQ ID NO: 3599327 - RNA, 19 nt, Human
aaauacuuaaauguuaugu

SEQ ID NO: 3599328 - RNA, 17 nt, Human
aaauacuuauucauugu

SEQ ID NO: 3599329 - RNA, 20 nt, Human
aaauacuugucaauauuuaa

SEQ ID NO: 3599330 - RNA, 21 nt, Human
aaauacuugucaauauuuaaa

SEQ ID NO: 3599331 - RNA, 14 nt, Human
aaauacuugucugu

SEQ ID NO: 3599332 - RNA, 16 nt, Human
aaauacuuuaaaggaa

SEQ ID NO: 3599333 - RNA, 19 nt, Human
aaauacuuuuacucugccu

SEQ ID NO: 3599334 - RNA, 19 nt, Human
aaauacuuuuccuuaccuu

SEQ ID NO: 3599335 - RNA, 16 nt, Human
aaauacuuuuucuaau

SEQ ID NO: 3599336 - RNA, 18 nt, Human
aaauacuuuuucuaauga

SEQ ID NO: 3599337 - RNA, 16 nt, Human
aaauagaaaaguuauu

SEQ ID NO: 3599338 - RNA, 12 nt, Human
aaauagaaauaa

SEQ ID NO: 3599339 - RNA, 14 nt, Human
aaauagaaauuuug

SEQ ID NO: 3599340 - RNA, 16 nt, Human
aaauagaagagagagg

SEQ ID NO: 3599341 - RNA, 19 nt, Human
aaauagacaaaaaguauau

SEQ ID NO: 3599342 - RNA, 15 nt, Human
aaauagacaguauau

SEQ ID NO: 3599343 - RNA, 17 nt, Human
aaauagaguauaugcac

SEQ ID NO: 3599344 - RNA, 14 nt, Human
aaauagaguguagu

SEQ ID NO: 3599345 - RNA, 14 nt, Human
aaauagauacaaau

SEQ ID NO: 3599346 - RNA, 14 nt, Human
aaauagauauaaau

SEQ ID NO: 3599347 - RNA, 21 nt, Human
aaauagaugacauugacuauu

SEQ ID NO: 3599348 - RNA, 20 nt, Human
aaauagauggauuuguauca

SEQ ID NO: 3599349 - RNA, 16 nt, Human
aaauagaugucuuuua

SEQ ID NO: 3599350 - RNA, 17 nt, Human
aaauagcaaaagaagaa

SEQ ID NO: 3599351 - RNA, 16 nt, Human
aaauagcaauccuaaa

SEQ ID NO: 3599352 - RNA, 22 nt, Human
aaauagcagcccucaauuguga

SEQ ID NO: 3599353 - RNA, 16 nt, Human
aaauagcauguauugu

SEQ ID NO: 3599354 - RNA, 23 nt, Human
aaauagccaacacccaucuguuu

SEQ ID NO: 3599355 - RNA, 16 nt, Human
aaauagcuauauccau

SEQ ID NO: 3599356 - RNA, 15 nt, Human
aaauagcuuguauag

SEQ ID NO: 3599357 - RNA, 21 nt, Human
aaaguguuucagcuaagggaa

SEQ ID NO: 3599358 - RNA, 15 nt, Human
aaaguguuucuguua

SEQ ID NO: 3599359 - RNA, 14 nt, Human
aaaguguuuucucu

SEQ ID NO: 3599360 - RNA, 17 nt, Human
aaaguguuuucucugaa

SEQ ID NO: 3599361 - RNA, 16 nt, Human
aaaguuaacagauuuu

SEQ ID NO: 3599362 - RNA, 17 nt, Human
aaaguuacaaauugcuu

SEQ ID NO: 3599363 - RNA, 12 nt, Human
aaaguuacuagg

SEQ ID NO: 3599364 - RNA, 15 nt, Human
aaaguuagaaucuau

SEQ ID NO: 3599365 - RNA, 19 nt, Human
aaaguuagaaucuauuuuc

SEQ ID NO: 3599366 - RNA, 14 nt, Human
aaaguuagucuacu

SEQ ID NO: 3599367 - RNA, 13 nt, Human
aaaguuauauuuc

SEQ ID NO: 3599368 - RNA, 14 nt, Human
aaaguuauauuuca

SEQ ID NO: 3599369 - RNA, 16 nt, Human
aaaguuauuaaaauug

SEQ ID NO: 3599370 - RNA, 16 nt, Human
aaaguucagaguuuuc

SEQ ID NO: 3599371 - RNA, 18 nt, Human
aaaguuccaagagucuaa

SEQ ID NO: 3599372 - RNA, 20 nt, Human
aaaguuccaagagucuaaag

SEQ ID NO: 3599373 - RNA, 22 nt, Human
aaaguuccaagagucuaaagau

SEQ ID NO: 3599374 - RNA, 16 nt, Human
aaaguucuaagauucu

SEQ ID NO: 3599375 - RNA, 18 nt, Human
aaaguucuaauaauuucu

SEQ ID NO: 3599376 - RNA, 20 nt, Human
aaaguucuaauaauuucuaa

SEQ ID NO: 3599377 - RNA, 16 nt, Human
aaaguucuagugaccg

SEQ ID NO: 3599378 - RNA, 18 nt, Human
aaaguucuguguauuuaa

SEQ ID NO: 3599379 - RNA, 16 nt, Human
aaaguugaauuuuaca

SEQ ID NO: 3599380 - RNA, 16 nt, Human
aaaguugccuaaaucc

SEQ ID NO: 3599381 - RNA, 22 nt, Human
aaaguugcuauuugaacuuuuu

SEQ ID NO: 3599382 - RNA, 19 nt, Human
aaaguuggacuaaaugccu

SEQ ID NO: 3599383 - RNA, 12 nt, Human
aaaguuguacau

SEQ ID NO: 3599384 - RNA, 17 nt, Human
aaaguuguacaugaaau

SEQ ID NO: 3599385 - RNA, 15 nt, Human
aaaguuguacuuuaa

SEQ ID NO: 3599386 - RNA, 18 nt, Human
aaaguugugauuccagau

SEQ ID NO: 3599387 - RNA, 18 nt, Human
aaaguuguucaacuauuu

SEQ ID NO: 3599388 - RNA, 14 nt, Human
aaaguuuaaaaugu

SEQ ID NO: 3599389 - RNA, 15 nt, Human
aaaguuuaauaaauu

SEQ ID NO: 3599390 - RNA, 12 nt, Human
aaaguuuaauau

SEQ ID NO: 3599391 - RNA, 14 nt, Human
aaaguuuaauauua

SEQ ID NO: 3599392 - RNA, 19 nt, Human
aaauauacauguuuaugua

SEQ ID NO: 3599393 - RNA, 21 nt, Human
aaauauacauguuuauguaaa

SEQ ID NO: 3599394 - RNA, 14 nt, Human
aaauauacuguaaa

SEQ ID NO: 3599395 - RNA, 15 nt, Human
aaauauacuguaaag

SEQ ID NO: 3599396 - RNA, 16 nt, Human
aaauauacuguaaaga

SEQ ID NO: 3599397 - RNA, 14 nt, Human
aaauauacuuaaau

SEQ ID NO: 3599398 - RNA, 23 nt, Human
aaauauacuuuuacaaguaacaa

SEQ ID NO: 3599399 - RNA, 13 nt, Human
aaauauagauuag

SEQ ID NO: 3599400 - RNA, 16 nt, Human
aaauauagauuagaaa

SEQ ID NO: 3599401 - RNA, 10 nt, Human
aaauauagcg

SEQ ID NO: 3599402 - RNA, 12 nt, Human
aaauauauaaau

SEQ ID NO: 3599403 - RNA, 13 nt, Human
aaauauauauaaa

SEQ ID NO: 3599404 - RNA, 21 nt, Human
aaauauauauaaagaauauau

SEQ ID NO: 3599405 - RNA, 17 nt, Human
aaauauauauaaauaua

SEQ ID NO: 3599406 - RNA, 20 nt, Human
aaauauauauaaauauauau

SEQ ID NO: 3599407 - RNA, 14 nt, Human
aaauauauauacau

SEQ ID NO: 3599408 - RNA, 13 nt, Human
aaauauauauagu

SEQ ID NO: 3599409 - RNA, 22 nt, Human
aaauauauaucuaaauuuagaa

SEQ ID NO: 3599410 - RNA, 13 nt, Human
aaauauauauuau

SEQ ID NO: 3599411 - RNA, 15 nt, Human
aaauauaugaacauu

SEQ ID NO: 3599412 - RNA, 21 nt, Human
aaauauauggucuaauguuua

SEQ ID NO: 3599413 - RNA, 19 nt, Human
aaauauauguauguaaaaa

SEQ ID NO: 3599414 - RNA, 12 nt, Human
aaauauauuauu

SEQ ID NO: 3599415 - RNA, 17 nt, Human
aaauauauucucuuugg

SEQ ID NO: 3599416 - RNA, 20 nt, Human
aaauauauucuuucaaagga

SEQ ID NO: 3599417 - RNA, 21 nt, Human
aaauauauuuaagauaauuau

SEQ ID NO: 3599418 - RNA, 14 nt, Human
aaauauauuuaaug

SEQ ID NO: 3599419 - RNA, 16 nt, Human
aaauauauuuuaagac

SEQ ID NO: 3599420 - RNA, 12 nt, Human
aaauaucaaagu

SEQ ID NO: 3599421 - RNA, 14 nt, Human
aaauaucaaaguca

SEQ ID NO: 3599422 - RNA, 18 nt, Human
aaauaucaaucauuuucc

SEQ ID NO: 3599423 - RNA, 23 nt, Human
aaauaucaugcuccauuguucag

SEQ ID NO: 3599424 - RNA, 16 nt, Human
aaauaucauucagcaa

SEQ ID NO: 3599425 - RNA, 20 nt, Human
aaauaucccaaacugugaug

SEQ ID NO: 3599426 - RNA, 23 nt, Human
aaauaucccuccuguugggagag

SEQ ID NO: 3599427 - RNA, 23 nt, Human
aaauaucccuuggacauuuuaug

SEQ ID NO: 3599428 - RNA, 17 nt, Human
aaauaucucuauuuaau

SEQ ID NO: 3599429 - RNA, 15 nt, Human
aaauaucucugaguu

SEQ ID NO: 3599430 - RNA, 12 nt, Human
aaauaucugaaa

SEQ ID NO: 3599431 - RNA, 18 nt, Human
aaauaucugaaaauguau

SEQ ID NO: 3599432 - RNA, 19 nt, Human
aaauaucugaaaauguaug

SEQ ID NO: 3599433 - RNA, 19 nt, Human
aaauaucugaacauuuacu

SEQ ID NO: 3599434 - RNA, 14 nt, Human
aaauaucugcucaa

SEQ ID NO: 3599435 - RNA, 15 nt, Human
aaauaucuguauuua

SEQ ID NO: 3599436 - RNA, 22 nt, Human
aaauaucuguauuuaauuuuga

SEQ ID NO: 3599437 - RNA, 19 nt, Human
aaauaucuuuuauguuuga

SEQ ID NO: 3599438 - RNA, 16 nt, Human
aaauaucuuuugaccu

SEQ ID NO: 3599439 - RNA, 23 nt, Human
aaauaugagugguuauugaaaau

SEQ ID NO: 3599440 - RNA, 16 nt, Human
aaauaugcacuaaguc

SEQ ID NO: 3599441 - RNA, 22 nt, Human
aaauaugcagugauauggcaga

SEQ ID NO: 3599442 - RNA, 20 nt, Human
aaauaugccucuccuuugua

SEQ ID NO: 3599443 - RNA, 13 nt, Human
aaauauggaacuu

SEQ ID NO: 3599444 - RNA, 17 nt, Human
aaauauggaacuuacau

SEQ ID NO: 3599445 - RNA, 19 nt, Human
aaauauggaacuucuaaua

SEQ ID NO: 3599446 - RNA, 15 nt, Human
aaauauggacacuua

SEQ ID NO: 3599447 - RNA, 19 nt, Human
aaauauggucuuuugguua

SEQ ID NO: 3599448 - RNA, 12 nt, Human
aaauauguacaa

SEQ ID NO: 3599449 - RNA, 13 nt, Human
aaauauguaccaa

SEQ ID NO: 3599450 - RNA, 17 nt, Human
aaauauguauaacuuua

SEQ ID NO: 3599451 - RNA, 13 nt, Human
aaauauguauuaa

SEQ ID NO: 3599452 - RNA, 21 nt, Human
aaauauguauuuaccaaaaau

SEQ ID NO: 3599453 - RNA, 16 nt, Human
aaauauguccuggggu

SEQ ID NO: 3599454 - RNA, 21 nt, Human
aaauaugugagauuuuuuauu

SEQ ID NO: 3599455 - RNA, 20 nt, Human
aaauauguuagcaaagaguu

SEQ ID NO: 3599456 - RNA, 22 nt, Human
aaauauguucuuuaaaaauaua

SEQ ID NO: 3599457 - RNA, 14 nt, Human
aaauauguuucaca

SEQ ID NO: 3599458 - RNA, 19 nt, Human
aaauauguuuuuuagauca

SEQ ID NO: 3599459 - RNA, 14 nt, Human
aaauauuaaaaagu

SEQ ID NO: 3599460 - RNA, 17 nt, Human
aaauauuaaaaagucuu

SEQ ID NO: 3599461 - RNA, 12 nt, Human
aaauauuaagac

SEQ ID NO: 3599462 - RNA, 14 nt, Human
aaauauuaagcaug

SEQ ID NO: 3599463 - RNA, 17 nt, Human
aaauauuagaaacagcu

SEQ ID NO: 3599464 - RNA, 14 nt, Human
aaauauuagaugug

SEQ ID NO: 3599465 - RNA, 18 nt, Human
aaauauuagaugugauuu

SEQ ID NO: 3599466 - RNA, 20 nt, Human
aaauauuauaacuuaaaaaa

SEQ ID NO: 3599467 - RNA, 17 nt, Human
aaauauuaugagaugcu

SEQ ID NO: 3599468 - RNA, 12 nt, Human
aaauauuaugca

SEQ ID NO: 3599469 - RNA, 17 nt, Human
aaauauuaugcaaauuc

SEQ ID NO: 3599470 - RNA, 17 nt, Human
aaauauuauguuaaaac

SEQ ID NO: 3599471 - RNA, 16 nt, Human
aaauauuauuuguguu

SEQ ID NO: 3599472 - RNA, 17 nt, Human
aaauauucacuggcccc

SEQ ID NO: 3599473 - RNA, 17 nt, Human
aaauauucagaaucuuu

SEQ ID NO: 3599474 - RNA, 15 nt, Human
aaauauuccugcauu

SEQ ID NO: 3599475 - RNA, 18 nt, Human
aaauauucuauaugaauu

SEQ ID NO: 3599476 - RNA, 21 nt, Human
aaauauugagcagaauucauu

SEQ ID NO: 3599477 - RNA, 17 nt, Human
aaauauugaggcuuugu

SEQ ID NO: 3599478 - RNA, 19 nt, Human
aaauauugaggcuuugugu

SEQ ID NO: 3599479 - RNA, 13 nt, Human
aaauauugcuggg

SEQ ID NO: 3599480 - RNA, 15 nt, Human
aaauauugcuguaua

SEQ ID NO: 3599481 - RNA, 20 nt, Human
aaauauuguguugugaaugu

SEQ ID NO: 3599482 - RNA, 12 nt, Human
aaauauuguuaa

SEQ ID NO: 3599483 - RNA, 15 nt, Human
aaauauuguuucugc

SEQ ID NO: 3599484 - RNA, 22 nt, Human
aaauauuguuucugcauucauu

SEQ ID NO: 3599485 - RNA, 22 nt, Human
aaauauuguuuuacaauaguuc

SEQ ID NO: 3599486 - RNA, 12 nt, Human
aaauauuuaaga

SEQ ID NO: 3599487 - RNA, 19 nt, Human
aaauauuuacauaugaaau

SEQ ID NO: 3599488 - RNA, 12 nt, Human
aaauauuuaucu

SEQ ID NO: 3599489 - RNA, 13 nt, Human
aaauauuuaugaa

SEQ ID NO: 3599490 - RNA, 16 nt, Human
aaauauuuaugaagaa

SEQ ID NO: 3599491 - RNA, 16 nt, Human
aaauauuuauuaaaua

SEQ ID NO: 3599492 - RNA, 18 nt, Human
aaauauuuauuaaauaaa

SEQ ID NO: 3599493 - RNA, 18 nt, Human
aaauauuugacuugcaug

SEQ ID NO: 3599494 - RNA, 21 nt, Human
aaauauuuggucucuauuuca

SEQ ID NO: 3599495 - RNA, 22 nt, Human
aaauauuuguacauaguuauuu

SEQ ID NO: 3599496 - RNA, 19 nt, Human
aaauauuuuaaaaucagcu

SEQ ID NO: 3599497 - RNA, 14 nt, Human
aaauauuuuaaaga

SEQ ID NO: 3599498 - RNA, 15 nt, Human
aaauauuuuaaagaa

SEQ ID NO: 3599499 - RNA, 17 nt, Human
aaauauuuuaaagaauu

SEQ ID NO: 3599500 - RNA, 19 nt, Human
aaauauuuuaaagaauugu

SEQ ID NO: 3599501 - RNA, 21 nt, Human
aaauauuuuaauuuuuaaaug

SEQ ID NO: 3599502 - RNA, 22 nt, Human
aaauauuuuaauuuuuaaaugc

SEQ ID NO: 3599503 - RNA, 18 nt, Human
aaauauuuuaugauccag

SEQ ID NO: 3599504 - RNA, 19 nt, Human
aaauauuuuaugauccagc

SEQ ID NO: 3599505 - RNA, 20 nt, Human
aaauauuuucauacagcauu

SEQ ID NO: 3599506 - RNA, 11 nt, Human
aaauauuuucu

SEQ ID NO: 3599507 - RNA, 17 nt, Human
aaauauuuucuauuuua

SEQ ID NO: 3599508 - RNA, 15 nt, Human
aaauauuuucucugu

SEQ ID NO: 3599509 - RNA, 21 nt, Human
aaauauuuucucuguacuuuu

SEQ ID NO: 3599510 - RNA, 19 nt, Human
aaauauuuucuguguguuc

SEQ ID NO: 3599511 - RNA, 20 nt, Human
aaauauuuucuguguguucc

SEQ ID NO: 3599512 - RNA, 23 nt, Human
aaauauuuucuguguguuccugg

SEQ ID NO: 3599513 - RNA, 21 nt, Human
aaauauuuugaaucaauaaua

SEQ ID NO: 3599514 - RNA, 22 nt, Human
aaauauuuugaaucaauaauau

SEQ ID NO: 3599515 - RNA, 19 nt, Human
aaauauuuugauaauaaau

SEQ ID NO: 3599516 - RNA, 16 nt, Human
aaauauuuugucuaaa

SEQ ID NO: 3599517 - RNA, 15 nt, Human
aaauauuuuuauaga

SEQ ID NO: 3599518 - RNA, 22 nt, Human
aaauauuuuuggucauuguaau

SEQ ID NO: 3599519 - RNA, 20 nt, Human
aaagaggcaguugcccagcc

SEQ ID NO: 3599520 - RNA, 21 nt, Human
aaagaggccaaacaggcccuc

SEQ ID NO: 3599521 - RNA, 18 nt, Human
aaagaggcgucuguauau

SEQ ID NO: 3599522 - RNA, 19 nt, Human
aaagaggcguugcuuucac

SEQ ID NO: 3599523 - RNA, 12 nt, Human
aaagaggcugag

SEQ ID NO: 3599524 - RNA, 22 nt, Human
aaagaggcugccccucucacca

SEQ ID NO: 3599525 - RNA, 20 nt, Human
aaagaggugaccccagggca

SEQ ID NO: 3599526 - RNA, 22 nt, Human
aaagagugggcugcaucuggga

SEQ ID NO: 3599527 - RNA, 19 nt, Human
aaagaguguggcaaaauaa

SEQ ID NO: 3599528 - RNA, 16 nt, Human
aaagaguucuuaagga

SEQ ID NO: 3599529 - RNA, 18 nt, Human
aaagaguuugagaccuga

SEQ ID NO: 3599530 - RNA, 15 nt, Human
aaagauaaaauagug

SEQ ID NO: 3599531 - RNA, 21 nt, Human
aaagauaauauuuuacauaca

SEQ ID NO: 3599532 - RNA, 19 nt, Human
aaagauaaucucucagcuu

SEQ ID NO: 3599533 - RNA, 15 nt, Human
aaagauacauuugua

SEQ ID NO: 3599534 - RNA, 16 nt, Human
aaagauaccuuaaaau

SEQ ID NO: 3599535 - RNA, 22 nt, Human
aaagauaccuuaaaauuugaaa

SEQ ID NO: 3599536 - RNA, 20 nt, Human
aaagauauaagugcuguaua

SEQ ID NO: 3599537 - RNA, 14 nt, Human
aaauguuuuugguc

SEQ ID NO: 3599538 - RNA, 17 nt, Human
aaauuaaaaaaaaauug

SEQ ID NO: 3599539 - RNA, 22 nt, Human
aaauuaaaaaaaaauuguaucu

SEQ ID NO: 3599540 - RNA, 12 nt, Human
aaauuaaaaaag

SEQ ID NO: 3599541 - RNA, 15 nt, Human
aaauuaaaaaagaua

SEQ ID NO: 3599542 - RNA, 16 nt, Human
aaauuaaaaaagauaa

SEQ ID NO: 3599543 - RNA, 23 nt, Human
aaauuaaaaagauucuuuuucug

SEQ ID NO: 3599544 - RNA, 21 nt, Human
aaauuaaaaguuugaaaagca

SEQ ID NO: 3599545 - RNA, 19 nt, Human
aaauuaaaccggaccaucu

SEQ ID NO: 3599546 - RNA, 17 nt, Human
aaauuaaagcugaaaac

SEQ ID NO: 3599547 - RNA, 12 nt, Human
aaauuaaauaua

SEQ ID NO: 3599548 - RNA, 21 nt, Human
aaauuaacacugcuuguguuu

SEQ ID NO: 3599549 - RNA, 18 nt, Human
aaauuaacagaaaaacag

SEQ ID NO: 3599550 - RNA, 17 nt, Human
aaauuaacaguccuaac

SEQ ID NO: 3599551 - RNA, 14 nt, Human
aaauuaacuuuuau

SEQ ID NO: 3599552 - RNA, 15 nt, Human
aaauuaagaagaaac

SEQ ID NO: 3599553 - RNA, 16 nt, Human
aaauuaagaauguucu

SEQ ID NO: 3599554 - RNA, 12 nt, Human
aaauuaagacau

SEQ ID NO: 3599555 - RNA, 13 nt, Human
aaauuaagacuuu

SEQ ID NO: 3599556 - RNA, 17 nt, Human
aaauuaagauguucaga

SEQ ID NO: 3599557 - RNA, 17 nt, Human
aaauuaagcaaauguua

SEQ ID NO: 3599558 - RNA, 14 nt, Human
aaauuaaggcauaa

SEQ ID NO: 3599559 - RNA, 14 nt, Human
aaauuaauaucuuu

SEQ ID NO: 3599560 - RNA, 16 nt, Human
aaauuaauuggcagca

SEQ ID NO: 3599561 - RNA, 21 nt, Human
aaauuaauuggcagcagauuu

SEQ ID NO: 3599562 - RNA, 13 nt, Human
aaauuaauugugu

SEQ ID NO: 3599563 - RNA, 15 nt, Human
aaauuaauuguguga

SEQ ID NO: 3599564 - RNA, 13 nt, Human
aaauuacaacuaa

SEQ ID NO: 3599565 - RNA, 13 nt, Human
aaauuacaauuuu

SEQ ID NO: 3599566 - RNA, 13 nt, Human
aaauuacauuugu

SEQ ID NO: 3599567 - RNA, 15 nt, Human
aaauuacauuuguaa

SEQ ID NO: 3599568 - RNA, 16 nt, Human
aaauuaccaguaaagu

SEQ ID NO: 3599569 - RNA, 13 nt, Human
aaauugcuauguu

SEQ ID NO: 3599570 - RNA, 17 nt, Human
aaauugcuauguuacua

SEQ ID NO: 3599571 - RNA, 15 nt, Human
aaauugcucacaguu

SEQ ID NO: 3599572 - RNA, 22 nt, Human
aaauugcuccuaagcuucaaau

SEQ ID NO: 3599573 - RNA, 23 nt, Human
aaauugcugacuguagcuuugga

SEQ ID NO: 3599574 - RNA, 13 nt, Human
aaauugcuuuuga

SEQ ID NO: 3599575 - RNA, 12 nt, Human
aaauugcuuuuu

SEQ ID NO: 3599576 - RNA, 16 nt, Human
aaauuggaacagaaug

SEQ ID NO: 3599577 - RNA, 23 nt, Human
aaauuggacuuucaaaauuaaau

SEQ ID NO: 3599578 - RNA, 12 nt, Human
aaauuggagaaa

SEQ ID NO: 3599579 - RNA, 18 nt, Human
aaauuggcauuaaaacuu

SEQ ID NO: 3599580 - RNA, 16 nt, Human
aaauuggcuaguugaa

SEQ ID NO: 3599581 - RNA, 17 nt, Human
aaauuggggauucuuaa

SEQ ID NO: 3599582 - RNA, 18 nt, Human
aaauuggggauucuuaaa

SEQ ID NO: 3599583 - RNA, 19 nt, Human
aaauuggggauucuuaaag

SEQ ID NO: 3599584 - RNA, 23 nt, Human
aaauuggggauucuuaaaguuga

SEQ ID NO: 3599585 - RNA, 16 nt, Human
aaauuggguucaugau

SEQ ID NO: 3599586 - RNA, 20 nt, Human
aaauuguaagcaugcacaaa

SEQ ID NO: 3599587 - RNA, 12 nt, Human
aaauuguacaua

SEQ ID NO: 3599588 - RNA, 15 nt, Human
aaauuguacauauuu

SEQ ID NO: 3599589 - RNA, 15 nt, Human
aaauuguauauucac

SEQ ID NO: 3599590 - RNA, 15 nt, Human
aaauuguauauugua

SEQ ID NO: 3599591 - RNA, 22 nt, Human
aaauuguaucuagugcagcuga

SEQ ID NO: 3599592 - RNA, 18 nt, Human
aaauugucagaugcugug

SEQ ID NO: 3599593 - RNA, 21 nt, Human
aaauugucccuuaaacaaaaa

SEQ ID NO: 3599594 - RNA, 14 nt, Human
aaauugucuucaug

SEQ ID NO: 3599595 - RNA, 22 nt, Human
aaauugugcuucuccccagaau

SEQ ID NO: 3599596 - RNA, 11 nt, Human
aaauuguguua

SEQ ID NO: 3599597 - RNA, 23 nt, Human
aaauuguuugacggcaagguuua

SEQ ID NO: 3599598 - RNA, 22 nt, Human
aaauuguuuggcuuccuccuga

SEQ ID NO: 3599599 - RNA, 13 nt, Human
aaauuuaaaaaau

SEQ ID NO: 3599600 - RNA, 13 nt, Human
aaauuuaaaacaa

SEQ ID NO: 3599601 - RNA, 14 nt, Human
aaauuuaaaacaaa

SEQ ID NO: 3599602 - RNA, 16 nt, Human
aaauuuaaaacaaaca

SEQ ID NO: 3599603 - RNA, 22 nt, Human
aaauuuaaaaguaaaaugucuu

SEQ ID NO: 3599604 - RNA, 14 nt, Human
aaauuuaaacuaua

SEQ ID NO: 3599605 - RNA, 16 nt, Human
aaauuuaagugcgugu

SEQ ID NO: 3599606 - RNA, 20 nt, Human
aaauuuaauauagcuauuuu

SEQ ID NO: 3599607 - RNA, 17 nt, Human
aaauuuaaugcugccuu

SEQ ID NO: 3599608 - RNA, 17 nt, Human
aaauuuaauucauguuu

SEQ ID NO: 3599609 - RNA, 21 nt, Human
aaauuuacuacaauauguaca

SEQ ID NO: 3599610 - RNA, 13 nt, Human
aaauuuagcauug

SEQ ID NO: 3599611 - RNA, 16 nt, Human
aaauuuagcauuguag

SEQ ID NO: 3599612 - RNA, 12 nt, Human
aaauuuaguguu

SEQ ID NO: 3599613 - RNA, 15 nt, Human
aaauuuaguuuuugu

SEQ ID NO: 3599614 - RNA, 18 nt, Human
aaauuuaguuuuuguucu

SEQ ID NO: 3599615 - RNA, 17 nt, Human
aaauuuaucaaagcaua

SEQ ID NO: 3599616 - RNA, 12 nt, Human
aaauuuauguga

SEQ ID NO: 3599617 - RNA, 15 nt, Human
aaauuuaugugaugg

SEQ ID NO: 3599618 - RNA, 16 nt, Human
aaauuuauugaggaaa

SEQ ID NO: 3599619 - RNA, 19 nt, Human
aaauuuauugaggaaaaau

SEQ ID NO: 3599620 - RNA, 23 nt, Human
aaauuuauugaggaaaaauaugu

SEQ ID NO: 3599621 - RNA, 14 nt, Human
aaauuuauuuacug

SEQ ID NO: 3599622 - RNA, 21 nt, Human
aaauuuauuuacugcuagucu

SEQ ID NO: 3599623 - RNA, 22 nt, Human
aaauuuauuucaauauuagcaa

SEQ ID NO: 3599624 - RNA, 22 nt, Human
aaauuuauuuuauaagaaaaac

SEQ ID NO: 3599625 - RNA, 17 nt, Human
aaauuucacgauucauu

SEQ ID NO: 3599626 - RNA, 21 nt, Human
aaauuucacgauucauuuuug

SEQ ID NO: 3599627 - RNA, 18 nt, Human
aaauuucagcagcugcag

SEQ ID NO: 3599628 - RNA, 14 nt, Human
aaauuuccacucag

SEQ ID NO: 3599629 - RNA, 22 nt, Human
aaauuuccacucaggucuguuu

SEQ ID NO: 3599630 - RNA, 16 nt, Human
aaauuuccccaacagu

SEQ ID NO: 3599631 - RNA, 17 nt, Human
aaauuuccccaacagug

SEQ ID NO: 3599632 - RNA, 19 nt, Human
aaauuuccccaacagugug

SEQ ID NO: 3599633 - RNA, 20 nt, Human
aaauuuccccaacaguguga

SEQ ID NO: 3599634 - RNA, 20 nt, Human
aaauuucgcuucuuagaaca

SEQ ID NO: 3599635 - RNA, 12 nt, Human
aaauuucuaaau

SEQ ID NO: 3599636 - RNA, 15 nt, Human
aaauuucuaaaucuc

SEQ ID NO: 3599637 - RNA, 19 nt, Human
aaauuucuaaaucuccaaa

SEQ ID NO: 3599638 - RNA, 16 nt, Human
aaauuucuaagagagc

SEQ ID NO: 3599639 - RNA, 12 nt, Human
aaauuucucugu

SEQ ID NO: 3599640 - RNA, 18 nt, Human
aaauuucuguaaaacagg

SEQ ID NO: 3599641 - RNA, 15 nt, Human
aaauuugaaacauug

SEQ ID NO: 3599642 - RNA, 10 nt, Human
aaauuugaau

SEQ ID NO: 3599643 - RNA, 15 nt, Human
aaauuugauacuuau

SEQ ID NO: 3599644 - RNA, 14 nt, Human
aaauuugauugauu

SEQ ID NO: 3599645 - RNA, 15 nt, Human
aaauuugauugauuu

SEQ ID NO: 3599646 - RNA, 22 nt, Human
aaauuugauuuacauauauuau

SEQ ID NO: 3599647 - RNA, 17 nt, Human
aaauuugcauuaaauua

SEQ ID NO: 3599648 - RNA, 12 nt, Human
aaauuugccaag

SEQ ID NO: 3599649 - RNA, 17 nt, Human
aaauuuggaauucuguu

SEQ ID NO: 3599650 - RNA, 20 nt, Human
aaauuuggggacagauucag

SEQ ID NO: 3599651 - RNA, 15 nt, Human
aaauuuguaaguuuc

SEQ ID NO: 3599652 - RNA, 16 nt, Human
aaauuuguaaguuuca

SEQ ID NO: 3599653 - RNA, 19 nt, Human
aaauuuguaaguuucaggu

SEQ ID NO: 3599654 - RNA, 12 nt, Human
aaauuuguacua

SEQ ID NO: 3599655 - RNA, 20 nt, Human
aaauuuguacuauuuaacug

SEQ ID NO: 3599656 - RNA, 19 nt, Human
aaauuugucugaaacauuu

SEQ ID NO: 3599657 - RNA, 15 nt, Human
aaauuuguguaauau

SEQ ID NO: 3599658 - RNA, 18 nt, Human
aaauuuguucuuguauuu

SEQ ID NO: 3599659 - RNA, 14 nt, Human
aaauuuguuugaaa

SEQ ID NO: 3599660 - RNA, 22 nt, Human
aaauuuuaaagccauucugauu

SEQ ID NO: 3599661 - RNA, 14 nt, Human
aaauuuuagaaaua

SEQ ID NO: 3599662 - RNA, 15 nt, Human
aaauuuuagaaauau

SEQ ID NO: 3599663 - RNA, 21 nt, Human
aaauuuuauaaaauuaagcaa

SEQ ID NO: 3599664 - RNA, 12 nt, Human
aaauuuuauaug

SEQ ID NO: 3599665 - RNA, 23 nt, Human
aaauuuuaucugccucucuugua

SEQ ID NO: 3599666 - RNA, 11 nt, Human
aaauuuuaugu

SEQ ID NO: 3599667 - RNA, 18 nt, Human
aaauuuucacauaaaaua

SEQ ID NO: 3599668 - RNA, 16 nt, Human
aaauuuugcaaauaua

SEQ ID NO: 3599669 - RNA, 23 nt, Human
aaauuuugccuaauacauuaaag

SEQ ID NO: 3599670 - RNA, 18 nt, Human
aaauuuuggccaaagugu

SEQ ID NO: 3599671 - RNA, 14 nt, Human
aaauuuuguaagaa

SEQ ID NO: 3599672 - RNA, 12 nt, Human
aaauuuuguaau

SEQ ID NO: 3599673 - RNA, 17 nt, Human
aaauuuuguaauuuucu

SEQ ID NO: 3599674 - RNA, 15 nt, Human
aaauuuuuauuuuuc

SEQ ID NO: 3599675 - RNA, 21 nt, Human
aaauuuuucaaccccacccug

SEQ ID NO: 3599676 - RNA, 17 nt, Human
aaauuuuucagaugcuu

SEQ ID NO: 3599677 - RNA, 15 nt, Human
aaauuuuucauauuu

SEQ ID NO: 3599678 - RNA, 17 nt, Human
aaauuuuuccuuagcau

SEQ ID NO: 3599679 - RNA, 21 nt, Human
aaauuuuucucaguuuguaua

SEQ ID NO: 3599680 - RNA, 17 nt, Human
aaauuuuucuucuugag

SEQ ID NO: 3599681 - RNA, 13 nt, Human
aaauuuuuggauu

SEQ ID NO: 3599682 - RNA, 17 nt, Human
aaauuuuuguaguagcg

SEQ ID NO: 3599683 - RNA, 16 nt, Human
aacaauuuucagauuu

SEQ ID NO: 3599684 - RNA, 22 nt, Human
aacaauuuucagauuugcacaa

SEQ ID NO: 3599685 - RNA, 18 nt, Human
aacacaaagcuuuugcau

SEQ ID NO: 3599686 - RNA, 19 nt, Human
aacacaaagcuuuugcaua

SEQ ID NO: 3599687 - RNA, 17 nt, Human
aacacaacuauauuguu

SEQ ID NO: 3599688 - RNA, 21 nt, Human
aacacaagauugguguuuuuu

SEQ ID NO: 3599689 - RNA, 15 nt, Human
aacacaagcuggaag

SEQ ID NO: 3599690 - RNA, 17 nt, Human
aacacaaggucauggcc

SEQ ID NO: 3599691 - RNA, 13 nt, Human
aacacaauguuau

SEQ ID NO: 3599692 - RNA, 15 nt, Human
aacacacacauauac

SEQ ID NO: 3599693 - RNA, 20 nt, Human
aacacacagauacacacaca

SEQ ID NO: 3599694 - RNA, 15 nt, Human
aacacaccaggcugu

SEQ ID NO: 3599695 - RNA, 16 nt, Human
aacacaccaggcugug

SEQ ID NO: 3599696 - RNA, 23 nt, Human
aacacaccaggcugugggccuca

SEQ ID NO: 3599697 - RNA, 12 nt, Human
aacacacugaaa

SEQ ID NO: 3599698 - RNA, 20 nt, Human
aacacacugaggcagggaag

SEQ ID NO: 3599699 - RNA, 16 nt, Human
aacacacuguguccug

SEQ ID NO: 3599700 - RNA, 21 nt, Human
aacacacuguguccuggugcu

SEQ ID NO: 3599701 - RNA, 20 nt, Human
aacacagacauucugccagg

SEQ ID NO: 3599702 - RNA, 22 nt, Human
aacacagaggaauuuauaccuc

SEQ ID NO: 3599703 - RNA, 15 nt, Human
aacacagcaagggug

SEQ ID NO: 3599704 - RNA, 20 nt, Human
aacacagcaagggugauggg

SEQ ID NO: 3599705 - RNA, 17 nt, Human
aacacagcuguucuucu

SEQ ID NO: 3599706 - RNA, 18 nt, Human
aacacagcuguucuucug

SEQ ID NO: 3599707 - RNA, 13 nt, Human
aacacaggcagcu

SEQ ID NO: 3599708 - RNA, 17 nt, Human
aacacaggcagcuuucu

SEQ ID NO: 3599709 - RNA, 13 nt, Human
aacacaguauuuu

SEQ ID NO: 3599710 - RNA, 19 nt, Human
aacacagucaaaauaauuc

SEQ ID NO: 3599711 - RNA, 22 nt, Human
aacacaguguuuuuguaaagug

SEQ ID NO: 3599712 - RNA, 18 nt, Human
aacacauagauucaccug

SEQ ID NO: 3599713 - RNA, 12 nt, Human
aacacaucagcu

SEQ ID NO: 3599714 - RNA, 22 nt, Human
aacacaucagcuagcaaaagaa

SEQ ID NO: 3599715 - RNA, 16 nt, Human
aacacaucagcuugcc

SEQ ID NO: 3599716 - RNA, 21 nt, Human
aacacauuaagccuuccacac

SEQ ID NO: 3599717 - RNA, 21 nt, Human
aacacauuaucgggagcagug

SEQ ID NO: 3599718 - RNA, 17 nt, Human
aacacauuguuauuuuc

SEQ ID NO: 3599719 - RNA, 14 nt, Human
aacacauuucaaau

SEQ ID NO: 3599720 - RNA, 16 nt, Human
aacacauuucaaauga

SEQ ID NO: 3599721 - RNA, 12 nt, Human
aacacauuucuu

SEQ ID NO: 3599722 - RNA, 15 nt, Human
aacacauuucuuuuu

SEQ ID NO: 3599723 - RNA, 18 nt, Human
aacacauuugauucugug

SEQ ID NO: 3599724 - RNA, 21 nt, Human
aacacauuugcuuuuugugau

SEQ ID NO: 3599725 - RNA, 21 nt, Human
aacacauuuuguauaauugua

SEQ ID NO: 3599726 - RNA, 22 nt, Human
aacacauuuuguauaauuguau

SEQ ID NO: 3599727 - RNA, 20 nt, Human
aacacauuuuuuugcaugca

SEQ ID NO: 3599728 - RNA, 22 nt, Human
aacaccaaaaaaauccagaaac

SEQ ID NO: 3599729 - RNA, 15 nt, Human
aacaccaaaaaauau

SEQ ID NO: 3599730 - RNA, 17 nt, Human
aacaccaagcacagcag

SEQ ID NO: 3599731 - RNA, 14 nt, Human
aacaccacagaaau

SEQ ID NO: 3599732 - RNA, 16 nt, Human
aacaccacagacacac

SEQ ID NO: 3599733 - RNA, 18 nt, Human
aacaccacagacacacac

SEQ ID NO: 3599734 - RNA, 23 nt, Human
aacaccacagacacacacacgca

SEQ ID NO: 3599735 - RNA, 17 nt, Human
aaauaacuaguguugcu

SEQ ID NO: 3599736 - RNA, 19 nt, Human
aaauaacuggaaaacagaa

SEQ ID NO: 3599737 - RNA, 21 nt, Human
aaauaacuggaaaacagaaca

SEQ ID NO: 3599738 - RNA, 20 nt, Human
aaauaacuggaacaaauuau

SEQ ID NO: 3599739 - RNA, 16 nt, Human
aaauaacuguaauuau

SEQ ID NO: 3599740 - RNA, 22 nt, Human
aaauaacuguaauuauuugaau

SEQ ID NO: 3599741 - RNA, 14 nt, Human
aaauaacuucaguc

SEQ ID NO: 3599742 - RNA, 15 nt, Human
aaauaagaaaaauca

SEQ ID NO: 3599743 - RNA, 12 nt, Human
aaauaagaaaag

SEQ ID NO: 3599744 - RNA, 21 nt, Human
aaauaagaaacuuuuuuauuu

SEQ ID NO: 3599745 - RNA, 17 nt, Human
aaauaagaauagaaaua

SEQ ID NO: 3599746 - RNA, 23 nt, Human
aaauaagacggauuuauuuuucc

SEQ ID NO: 3599747 - RNA, 14 nt, Human
aaauaagagauuug

SEQ ID NO: 3599748 - RNA, 17 nt, Human
aaauaagagcucaggau

SEQ ID NO: 3599749 - RNA, 12 nt, Human
aaauaagauucu

SEQ ID NO: 3599750 - RNA, 13 nt, Human
aaauaagauucua

SEQ ID NO: 3599751 - RNA, 13 nt, Human
aaauaagcaggug

SEQ ID NO: 3599752 - RNA, 20 nt, Human
aaauaagcccccucaacuac

SEQ ID NO: 3599753 - RNA, 17 nt, Human
aaauaagcuauuugaug

SEQ ID NO: 3599754 - RNA, 14 nt, Human
aaauaagucaacag

SEQ ID NO: 3599755 - RNA, 16 nt, Human
aaauaagucugauuua

SEQ ID NO: 3599756 - RNA, 19 nt, Human
aaauaaguguauuuugaaa

SEQ ID NO: 3599757 - RNA, 13 nt, Human
aaauaaguuuuug

SEQ ID NO: 3599758 - RNA, 14 nt, Human
aaauaauaaaagau

SEQ ID NO: 3599759 - RNA, 12 nt, Human
aaauaauaaauc

SEQ ID NO: 3599760 - RNA, 13 nt, Human
aaauaauacauua

SEQ ID NO: 3599761 - RNA, 19 nt, Human
aaauaauaccuuagaaggu

SEQ ID NO: 3599762 - RNA, 18 nt, Human
aaauaauaucucuaauau

SEQ ID NO: 3599763 - RNA, 15 nt, Human
aaauaaucggcccac

SEQ ID NO: 3599764 - RNA, 23 nt, Human
aaauaaucuauuucuaugagaaa

SEQ ID NO: 3599765 - RNA, 13 nt, Human
aaauaaugcuguu

SEQ ID NO: 3599766 - RNA, 21 nt, Human
aaauaauguguaguucaugua

SEQ ID NO: 3599767 - RNA, 21 nt, Human
aaauaauuauauaacuguauu

SEQ ID NO: 3599768 - RNA, 22 nt, Human
aaauaauuauauaacuguauuu

SEQ ID NO: 3599769 - RNA, 20 nt, Human
aaauaauuauuuauuacaua

SEQ ID NO: 3599770 - RNA, 14 nt, Human
aaauaauucuaaag

SEQ ID NO: 3599771 - RNA, 14 nt, Human
aaauaauuuuaaac

SEQ ID NO: 3599772 - RNA, 15 nt, Human
aaauaauuuuaugaa

SEQ ID NO: 3599773 - RNA, 12 nt, Human
aaauaauuuugu

SEQ ID NO: 3599774 - RNA, 21 nt, Human
aaauaauuuuuauauuugaaa

SEQ ID NO: 3599775 - RNA, 13 nt, Human
aaauacaaaguua

SEQ ID NO: 3599776 - RNA, 13 nt, Human
aaauacaagacug

SEQ ID NO: 3599777 - RNA, 12 nt, Human
aaauacaauaaa

SEQ ID NO: 3599778 - RNA, 22 nt, Human
aaauacaauaaacuauuggaaa

SEQ ID NO: 3599779 - RNA, 13 nt, Human
aaauacaauuuuu

SEQ ID NO: 3599780 - RNA, 21 nt, Human
aaauacaauuuuuauuucuuu

SEQ ID NO: 3599781 - RNA, 18 nt, Human
aaauacacauagcaugua

SEQ ID NO: 3599782 - RNA, 14 nt, Human
aaauacacauuugc

SEQ ID NO: 3599783 - RNA, 23 nt, Human
aaauacaccaccucacuccuguu

SEQ ID NO: 3599784 - RNA, 15 nt, Human
aaauacagacuggau

SEQ ID NO: 3599785 - RNA, 15 nt, Human
aaauacaguacuguu

SEQ ID NO: 3599786 - RNA, 23 nt, Human
aaauacagucuuccauuugcaag

SEQ ID NO: 3599787 - RNA, 20 nt, Human
aaauacaguuugucacauga

SEQ ID NO: 3599788 - RNA, 16 nt, Human
aaauacauauuuccaa

SEQ ID NO: 3599789 - RNA, 20 nt, Human
aaauacaugaagcuucaugc

SEQ ID NO: 3599790 - RNA, 18 nt, Human
aaauacauuguauauaug

SEQ ID NO: 3599791 - RNA, 21 nt, Human
aaauaccaaaauuauuucaga

SEQ ID NO: 3599792 - RNA, 16 nt, Human
aaauaccaggauuuuu

SEQ ID NO: 3599793 - RNA, 21 nt, Human
aaauaccaugccauuuaaagc

SEQ ID NO: 3599794 - RNA, 19 nt, Human
aaauaccccaucauucaug

SEQ ID NO: 3599795 - RNA, 21 nt, Human
aaauacccuucuuuuaugagc

SEQ ID NO: 3599796 - RNA, 17 nt, Human
aaauaccucaggaaaga

SEQ ID NO: 3599797 - RNA, 14 nt, Human
aaauaccucauguu

SEQ ID NO: 3599798 - RNA, 15 nt, Human
aaauacggugggggu

SEQ ID NO: 3599799 - RNA, 23 nt, Human
aaauacuaaugaaaacagaaugu

SEQ ID NO: 3599800 - RNA, 20 nt, Human
aaauacuauuuaaagccucc

SEQ ID NO: 3599801 - RNA, 16 nt, Human
aaauacuauuuaagau

SEQ ID NO: 3599802 - RNA, 21 nt, Human
aaauacuauuuuuacugccac

SEQ ID NO: 3599803 - RNA, 14 nt, Human
aaauacucaugugu

SEQ ID NO: 3599804 - RNA, 17 nt, Human
aaauacucauguguaug

SEQ ID NO: 3599805 - RNA, 15 nt, Human
aaauacucuaauucu

SEQ ID NO: 3599806 - RNA, 17 nt, Human
aaauacucuaauucuaa

SEQ ID NO: 3599807 - RNA, 13 nt, Human
aaauacugccaga

SEQ ID NO: 3599808 - RNA, 14 nt, Human
aaauacuguacaau

SEQ ID NO: 3599809 - RNA, 14 nt, Human
aaauacuguagaua

SEQ ID NO: 3599810 - RNA, 15 nt, Human
aaauacuguagauaa

SEQ ID NO: 3599811 - RNA, 20 nt, Human
aaauacuguagauaauuaac

SEQ ID NO: 3599812 - RNA, 14 nt, Human
aaauacugugugga

SEQ ID NO: 3599813 - RNA, 13 nt, Human
aaauacuguuggu

SEQ ID NO: 3599814 - RNA, 14 nt, Human
aaauacuguuggug

SEQ ID NO: 3599815 - RNA, 13 nt, Human
aaauacuuaaaug

SEQ ID NO: 3599816 - RNA, 16 nt, Human
aaauacuuaaauguua

SEQ ID NO: 3599817 - RNA, 18 nt, Human
aaauacuuaaauguuaug

SEQ ID NO: 3599818 - RNA, 19 nt, Human
aaauacuuaacuacuguuu

SEQ ID NO: 3599819 - RNA, 16 nt, Human
aaauacuuagcaaaaa

SEQ ID NO: 3599820 - RNA, 14 nt, Human
aaauacuuauucau

SEQ ID NO: 3599821 - RNA, 11 nt, Human
aaauacuuguc

SEQ ID NO: 3599822 - RNA, 15 nt, Human
aaauacuuuaaagga

SEQ ID NO: 3599823 - RNA, 17 nt, Human
aaauacuuuaaaggaaa

SEQ ID NO: 3599824 - RNA, 14 nt, Human
aaauacuuuuccuu

SEQ ID NO: 3599825 - RNA, 15 nt, Human
aaauacuuuuccuua

SEQ ID NO: 3599826 - RNA, 14 nt, Human
aaauagaaaaguua

SEQ ID NO: 3599827 - RNA, 15 nt, Human
aaauagaaaaguuau

SEQ ID NO: 3599828 - RNA, 16 nt, Human
aaauagaaaguugcaa

SEQ ID NO: 3599829 - RNA, 21 nt, Human
aaaugcaugauuuuguaaccc

SEQ ID NO: 3599830 - RNA, 13 nt, Human
aaaugcauggagg

SEQ ID NO: 3599831 - RNA, 13 nt, Human
aaaugcauguugc

SEQ ID NO: 3599832 - RNA, 22 nt, Human
aaaugccaaauuaaaaaagaua

SEQ ID NO: 3599833 - RNA, 14 nt, Human
aaaugccaaucucu

SEQ ID NO: 3599834 - RNA, 17 nt, Human
aaaugccauaauacaaa

SEQ ID NO: 3599835 - RNA, 19 nt, Human
aaaugccauaauacaaaag

SEQ ID NO: 3599836 - RNA, 18 nt, Human
aaaugccauagaaaugua

SEQ ID NO: 3599837 - RNA, 19 nt, Human
aaaugccauuuauuuauug

SEQ ID NO: 3599838 - RNA, 20 nt, Human
aaaugccauuuauuuauuga

SEQ ID NO: 3599839 - RNA, 15 nt, Human
aaaugccuaguuuuu

SEQ ID NO: 3599840 - RNA, 16 nt, Human
aaaugccuaguuuuua

SEQ ID NO: 3599841 - RNA, 19 nt, Human
aaaugccuaguuuuuagua

SEQ ID NO: 3599842 - RNA, 22 nt, Human
aaaugccucaguguauuuguau

SEQ ID NO: 3599843 - RNA, 23 nt, Human
aaaugccucaguguauuuguauu

SEQ ID NO: 3599844 - RNA, 23 nt, Human
aaaugccuuacccucauguucuu

SEQ ID NO: 3599845 - RNA, 19 nt, Human
aaaugccuuacuuuguaug

SEQ ID NO: 3599846 - RNA, 22 nt, Human
aaaugccuuagaaauguaaacu

SEQ ID NO: 3599847 - RNA, 13 nt, Human
aaaugccuuugag

SEQ ID NO: 3599848 - RNA, 19 nt, Human
aaaugccuuugagacaguu

SEQ ID NO: 3599849 - RNA, 20 nt, Human
aaaugccuuugagacaguuu

SEQ ID NO: 3599850 - RNA, 16 nt, Human
aaaugcgggguggggg

SEQ ID NO: 3599851 - RNA, 16 nt, Human
aaaugcuagguucuac

SEQ ID NO: 3599852 - RNA, 18 nt, Human
aaaugcucaaagaaaucu

SEQ ID NO: 3599853 - RNA, 12 nt, Human
aaaugcugaaca

SEQ ID NO: 3599854 - RNA, 10 nt, Human
aaaugcugcu

SEQ ID NO: 3599855 - RNA, 22 nt, Human
aaaugcugguuuuucaguuuuc

SEQ ID NO: 3599856 - RNA, 23 nt, Human
aaaugcugucuuucuugcucccu

SEQ ID NO: 3599857 - RNA, 21 nt, Human
aaaugcuuuaaaaacuauuua

SEQ ID NO: 3599858 - RNA, 18 nt, Human
aaaugcuuuaugcaaacc

SEQ ID NO: 3599859 - RNA, 21 nt, Human
aaauggaaagcagaguuuuca

SEQ ID NO: 3599860 - RNA, 20 nt, Human
aaauggaaaguaacucauuu

SEQ ID NO: 3599861 - RNA, 12 nt, Human
aaauggaaauuu

SEQ ID NO: 3599862 - RNA, 15 nt, Human
aaauggaagacacau

SEQ ID NO: 3599863 - RNA, 18 nt, Human
aaauggaagacacauuga

SEQ ID NO: 3599864 - RNA, 18 nt, Human
aaauggaagacagcucuu

SEQ ID NO: 3599865 - RNA, 19 nt, Human
aaauggacauaggacucaa

SEQ ID NO: 3599866 - RNA, 15 nt, Human
aaauggacguguuau

SEQ ID NO: 3599867 - RNA, 18 nt, Human
aaauggagaagcugcagg

SEQ ID NO: 3599868 - RNA, 22 nt, Human
aaauggaggaucucuaaagagc

SEQ ID NO: 3599869 - RNA, 22 nt, Human
aaauggaguuggaguucauuca

SEQ ID NO: 3599870 - RNA, 16 nt, Human
aaauggauacauaaag

SEQ ID NO: 3599871 - RNA, 23 nt, Human
aaauggaugccuugaauaauaag

SEQ ID NO: 3599872 - RNA, 17 nt, Human
aaauggcaaguuuugau

SEQ ID NO: 3599873 - RNA, 13 nt, Human
aaauggccauuug

SEQ ID NO: 3599874 - RNA, 19 nt, Human
aaauggccauuugcuuuuu

SEQ ID NO: 3599875 - RNA, 22 nt, Human
aaauggccucauguggcuggaa

SEQ ID NO: 3599876 - RNA, 18 nt, Human
aaauggcuuccuggcaau

SEQ ID NO: 3599877 - RNA, 16 nt, Human
aaaugggacuucuuuu

SEQ ID NO: 3599878 - RNA, 20 nt, Human
aaaugggacuucuuuucaca

SEQ ID NO: 3599879 - RNA, 21 nt, Human
aaaugggacuucuuuucacau

SEQ ID NO: 3599880 - RNA, 20 nt, Human
aaaugggcagagcagagacc

SEQ ID NO: 3599881 - RNA, 20 nt, Human
aaaugggcgccccccccucc

SEQ ID NO: 3599882 - RNA, 16 nt, Human
aaauggggccagaucc

SEQ ID NO: 3599883 - RNA, 17 nt, Human
aaaugggggugcauuug

SEQ ID NO: 3599884 - RNA, 19 nt, Human
aaauggguagagaaacacu

SEQ ID NO: 3599885 - RNA, 18 nt, Human
aaaugguaaaauugcaug

SEQ ID NO: 3599886 - RNA, 18 nt, Human
aaaugguacuguacagcu

SEQ ID NO: 3599887 - RNA, 22 nt, Human
aaaugguagcauuuuaaacaaa

SEQ ID NO: 3599888 - RNA, 19 nt, Human
aaaugguaggcauuuccua

SEQ ID NO: 3599889 - RNA, 17 nt, Human
aaaugguaucaaaauua

SEQ ID NO: 3599890 - RNA, 21 nt, Human
aaaugguaucaaaauuacaua

SEQ ID NO: 3599891 - RNA, 17 nt, Human
aaauggucgcccaggag

SEQ ID NO: 3599892 - RNA, 22 nt, Human
aaaugguggcuucagcuccagc

SEQ ID NO: 3599893 - RNA, 14 nt, Human
aaaugguguacaua

SEQ ID NO: 3599894 - RNA, 16 nt, Human
aaaugguguacauaau

SEQ ID NO: 3599895 - RNA, 19 nt, Human
aaaugguguuuucauguaa

SEQ ID NO: 3599896 - RNA, 19 nt, Human
aaaugguuaaaagagguuu

SEQ ID NO: 3599897 - RNA, 14 nt, Human
aaaugguucagaau

SEQ ID NO: 3599898 - RNA, 15 nt, Human
aaaugguucagaauu

SEQ ID NO: 3599899 - RNA, 16 nt, Human
aaaugguuguauuaga

SEQ ID NO: 3599900 - RNA, 19 nt, Human
aaaugguuguauuagaugu

SEQ ID NO: 3599901 - RNA, 23 nt, Human
aaaugguuuauuuuguauugugg

SEQ ID NO: 3599902 - RNA, 11 nt, Human
aaauguaaacu

SEQ ID NO: 3599903 - RNA, 16 nt, Human
aaauguaaacugccau

SEQ ID NO: 3599904 - RNA, 22 nt, Human
aaauguaaagauauuuuuaucu

SEQ ID NO: 3599905 - RNA, 15 nt, Human
aaauguaaauauucu

SEQ ID NO: 3599906 - RNA, 16 nt, Human
aaauguaacagucuga

SEQ ID NO: 3599907 - RNA, 13 nt, Human
aaauguaacuguc

SEQ ID NO: 3599908 - RNA, 18 nt, Human
aaauguaacugugccagu

SEQ ID NO: 3599909 - RNA, 18 nt, Human
aaauguaacuguuaccau

SEQ ID NO: 3599910 - RNA, 17 nt, Human
aaauguaacuuuuguaa

SEQ ID NO: 3599911 - RNA, 13 nt, Human
aaauguaaggcug

SEQ ID NO: 3599912 - RNA, 17 nt, Human
aaauguaaggcugugua

SEQ ID NO: 3599913 - RNA, 18 nt, Human
aaauguaaggcuguguaa

SEQ ID NO: 3599914 - RNA, 20 nt, Human
aaauguaaggcuguguaaga

SEQ ID NO: 3599915 - RNA, 18 nt, Human
aaauguaaugcgauuuua

SEQ ID NO: 3599916 - RNA, 12 nt, Human
aaauguacaaaa

SEQ ID NO: 3599917 - RNA, 12 nt, Human
aaauguacaugu

SEQ ID NO: 3599918 - RNA, 13 nt, Human
aaauguacaugua

SEQ ID NO: 3599919 - RNA, 23 nt, Human
aaauguacauguauuaaauuaca

SEQ ID NO: 3599920 - RNA, 17 nt, Human
aaauguagcuucaguca

SEQ ID NO: 3599921 - RNA, 20 nt, Human
aaauguaggcuuaguuugug

SEQ ID NO: 3599922 - RNA, 13 nt, Human
aaauguagguccu

SEQ ID NO: 3599923 - RNA, 17 nt, Human
aaauguagguccucaga

SEQ ID NO: 3599924 - RNA, 22 nt, Human
aaauguaguauggccuguguca

SEQ ID NO: 3599925 - RNA, 13 nt, Human
aaauguaguucau

SEQ ID NO: 3599926 - RNA, 20 nt, Human
aaauguaguucugcuccaga

SEQ ID NO: 3599927 - RNA, 19 nt, Human
aaauguaguugauguaucc

SEQ ID NO: 3599928 - RNA, 16 nt, Human
aaauguauaaauauac

SEQ ID NO: 3599929 - RNA, 21 nt, Human
aaauguauaaauauacaguau

SEQ ID NO: 3599930 - RNA, 11 nt, Human
aaauguauacu

SEQ ID NO: 3599931 - RNA, 14 nt, Human
aaauguauauacac

SEQ ID NO: 3599932 - RNA, 16 nt, Human
aaauguauauacacau

SEQ ID NO: 3599933 - RNA, 14 nt, Human
aaauguauaugcac

SEQ ID NO: 3599934 - RNA, 15 nt, Human
aaauguauaugcacu

SEQ ID NO: 3599935 - RNA, 17 nt, Human
aaauguaucauagaaau

SEQ ID NO: 3599936 - RNA, 20 nt, Human
aaauguaucauagaaaugua

SEQ ID NO: 3599937 - RNA, 14 nt, Human
aaauguaucuucca

SEQ ID NO: 3599938 - RNA, 18 nt, Human
aaauguaugauuacauca

SEQ ID NO: 3599939 - RNA, 19 nt, Human
aaauguaugcauguugucu

SEQ ID NO: 3599940 - RNA, 14 nt, Human
aaauguauuauguc

SEQ ID NO: 3599941 - RNA, 23 nt, Human
aaauguauuauguccugugagau

SEQ ID NO: 3599942 - RNA, 21 nt, Human
aaccaaaaugacaucuuuuua

SEQ ID NO: 3599943 - RNA, 13 nt, Human
aaccaaacaauua

SEQ ID NO: 3599944 - RNA, 16 nt, Human
aaccaaaggacauuau

SEQ ID NO: 3599945 - RNA, 10 nt, Human
aaccaaaggu

SEQ ID NO: 3599946 - RNA, 14 nt, Human
aaccaaaggugaag

SEQ ID NO: 3599947 - RNA, 16 nt, Human
aaccaaaggugaagga

SEQ ID NO: 3599948 - RNA, 12 nt, Human
aaccaaaugcau

SEQ ID NO: 3599949 - RNA, 14 nt, Human
aaccaagaagggcu

SEQ ID NO: 3599950 - RNA, 15 nt, Human
aaccaagagauugcu

SEQ ID NO: 3599951 - RNA, 18 nt, Human
aaccaagagauugcuaau

SEQ ID NO: 3599952 - RNA, 19 nt, Human
aaccaagcaggagacgaca

SEQ ID NO: 3599953 - RNA, 18 nt, Human
aaccaagccguggcuucc

SEQ ID NO: 3599954 - RNA, 15 nt, Human
aaccaagcucucugc

SEQ ID NO: 3599955 - RNA, 17 nt, Human
aaccaagcucucugcau

SEQ ID NO: 3599956 - RNA, 18 nt, Human
aaccaagcugaguuuccu

SEQ ID NO: 3599957 - RNA, 19 nt, Human
aaccaagcugaguuuccua

SEQ ID NO: 3599958 - RNA, 21 nt, Human
aaccaaggaaauauauuuuac

SEQ ID NO: 3599959 - RNA, 20 nt, Human
aaccaagguagaaugaccuu

SEQ ID NO: 3599960 - RNA, 22 nt, Human
aaccaagguagaaugaccuugu

SEQ ID NO: 3599961 - RNA, 23 nt, Human
aaccaagguagaaugaccuugua

SEQ ID NO: 3599962 - RNA, 20 nt, Human
aaccaagugaucaaacuaca

SEQ ID NO: 3599963 - RNA, 15 nt, Human
aaccaauauuuguag

SEQ ID NO: 3599964 - RNA, 22 nt, Human
aaccaauguuuaaaaaaguuua

SEQ ID NO: 3599965 - RNA, 21 nt, Human
aaccaauuuuuuguucuucag

SEQ ID NO: 3599966 - RNA, 23 nt, Human
aaccacaccacaucuaagccuga

SEQ ID NO: 3599967 - RNA, 17 nt, Human
aaccacacccacacuca

SEQ ID NO: 3599968 - RNA, 12 nt, Human
aaccacagcagu

SEQ ID NO: 3599969 - RNA, 13 nt, Human
aaccacagcccug

SEQ ID NO: 3599970 - RNA, 14 nt, Human
aaccacagcccugu

SEQ ID NO: 3599971 - RNA, 13 nt, Human
aaccacaucuugc

SEQ ID NO: 3599972 - RNA, 20 nt, Human
aaccacaucuugcucugcug

SEQ ID NO: 3599973 - RNA, 19 nt, Human
aaaugucuaauguauuuua

SEQ ID NO: 3599974 - RNA, 19 nt, Human
aaaugucuaguuguaacac

SEQ ID NO: 3599975 - RNA, 16 nt, Human
aaaugucucacugagc

SEQ ID NO: 3599976 - RNA, 21 nt, Human
aaaugucucuuuaaugucaca

SEQ ID NO: 3599977 - RNA, 16 nt, Human
aaaugucuguggccuu

SEQ ID NO: 3599978 - RNA, 23 nt, Human
aaaugucuguggccuuguucucu

SEQ ID NO: 3599979 - RNA, 16 nt, Human
aaaugucuuauauagc

SEQ ID NO: 3599980 - RNA, 23 nt, Human
aaaugucuugcuguugacauauu

SEQ ID NO: 3599981 - RNA, 18 nt, Human
aaaugucuuuaaugcaau

SEQ ID NO: 3599982 - RNA, 13 nt, Human
aaaugucuuugua

SEQ ID NO: 3599983 - RNA, 20 nt, Human
aaaugucuuuuuuuuaaugu

SEQ ID NO: 3599984 - RNA, 21 nt, Human
aaaugugaauaaaauuauuuu

SEQ ID NO: 3599985 - RNA, 13 nt, Human
aaaugugaugaau

SEQ ID NO: 3599986 - RNA, 20 nt, Human
aaaugugauguucuaaggcu

SEQ ID NO: 3599987 - RNA, 16 nt, Human
aaaugugauuuuucug

SEQ ID NO: 3599988 - RNA, 22 nt, Human
aaaugugcauucuuuuaaaaga

SEQ ID NO: 3599989 - RNA, 23 nt, Human
aaaugugcauucuuuuaaaagac

SEQ ID NO: 3599990 - RNA, 23 nt, Human
aaauguguacaauguacacacug

SEQ ID NO: 3599991 - RNA, 20 nt, Human
aaauguguaucggaugcuuu

SEQ ID NO: 3599992 - RNA, 18 nt, Human
aaauguguguauucuuaa

SEQ ID NO: 3599993 - RNA, 12 nt, Human
aaaugugugugu

SEQ ID NO: 3599994 - RNA, 19 nt, Human
aaauguguuggacaaaugu

SEQ ID NO: 3599995 - RNA, 21 nt, Human
aaauguguuggacaaauguga

SEQ ID NO: 3599996 - RNA, 13 nt, Human
aaauguguuucug

SEQ ID NO: 3599997 - RNA, 14 nt, Human
aaauguguuucugu

SEQ ID NO: 3599998 - RNA, 15 nt, Human
aaauguguuuugguc

SEQ ID NO: 3599999 - RNA, 16 nt, Human
aaauguguuuuggucc

SEQ ID NO: 3600000 - RNA, 16 nt, Human
aaauguuaaaaguuuu

SEQ ID NO: 3600001 - RNA, 14 nt, Human
aaauguuaaaaugu

SEQ ID NO: 3600002 - RNA, 16 nt, Human
aaauguuaaaauguau

SEQ ID NO: 3600003 - RNA, 12 nt, Human
aaauguuaaaga

SEQ ID NO: 3600004 - RNA, 15 nt, Human
aaauguuaaagaugu

SEQ ID NO: 3600005 - RNA, 23 nt, Human
aaauguuaacaaugccuauugua

SEQ ID NO: 3600006 - RNA, 20 nt, Human
aaauguuaaguugaugguga

SEQ ID NO: 3600007 - RNA, 18 nt, Human
aaauguuagucauuguua

SEQ ID NO: 3600008 - RNA, 22 nt, Human
aaauguuaugacuauguaaacu

SEQ ID NO: 3600009 - RNA, 17 nt, Human
aaauguuauuucugcaa

SEQ ID NO: 3600010 - RNA, 20 nt, Human
aaauguucaucaaugaauga

SEQ ID NO: 3600011 - RNA, 13 nt, Human
aaauguucuugca

SEQ ID NO: 3600012 - RNA, 22 nt, Human
aaauguugacaugggacauuug

SEQ ID NO: 3600013 - RNA, 18 nt, Human
aaauguuggauuuauaaa

SEQ ID NO: 3600014 - RNA, 21 nt, Human
aaauguuggauuuauaaaugc

SEQ ID NO: 3600015 - RNA, 17 nt, Human
aaauguuggucauuuua

SEQ ID NO: 3600016 - RNA, 22 nt, Human
aaauguuguucucuucuuuaaa

SEQ ID NO: 3600017 - RNA, 17 nt, Human
aaauguuuaaucauaua

SEQ ID NO: 3600018 - RNA, 18 nt, Human
aaauguuuaaucauauaa

SEQ ID NO: 3600019 - RNA, 20 nt, Human
aaauguuuacagggagccuc

SEQ ID NO: 3600020 - RNA, 21 nt, Human
aaauguuuacagggagccucc

SEQ ID NO: 3600021 - RNA, 14 nt, Human
aaauguuuauuuaa

SEQ ID NO: 3600022 - RNA, 12 nt, Human
aaauguuucuaa

SEQ ID NO: 3600023 - RNA, 13 nt, Human
aaauguuucugca

SEQ ID NO: 3600024 - RNA, 23 nt, Human
aaauguuucugcaguagucucug

SEQ ID NO: 3600025 - RNA, 15 nt, Human
aaauguuucuuuuaa

SEQ ID NO: 3600026 - RNA, 18 nt, Human
aaauguuucuuuuaaaga

SEQ ID NO: 3600027 - RNA, 10 nt, Human
aaauguuugg

SEQ ID NO: 3600028 - RNA, 19 nt, Human
aaauguuuggcauguaaau

SEQ ID NO: 3600029 - RNA, 22 nt, Human
aaauguuuggcauguaaaugua

SEQ ID NO: 3600030 - RNA, 21 nt, Human
aaauguuugucucaguuggaa

SEQ ID NO: 3600031 - RNA, 20 nt, Human
aaauguuuguuaaaaauaaa

SEQ ID NO: 3600032 - RNA, 14 nt, Human
aaauguuuucagcu

SEQ ID NO: 3600033 - RNA, 15 nt, Human
aaauguuuucagcua

SEQ ID NO: 3600034 - RNA, 14 nt, Human
aaauguuuuguaaa

SEQ ID NO: 3600035 - RNA, 19 nt, Human
aaauguuuuguaaacuuug

SEQ ID NO: 3600036 - RNA, 21 nt, Human
aaauguuuuguaaacuuugaa

SEQ ID NO: 3600037 - RNA, 22 nt, Human
aaauguuuuguaaacuuugaaa

SEQ ID NO: 3600038 - RNA, 22 nt, Human
aaauguuuuuaauaaaagaaaa

SEQ ID NO: 3600039 - RNA, 18 nt, Human
aaauguuuuuuuuuaaag

SEQ ID NO: 3600040 - RNA, 18 nt, Human
aaauuaaaaagauucuuu

SEQ ID NO: 3600041 - RNA, 14 nt, Human
aaauuaaaauggau

SEQ ID NO: 3600042 - RNA, 12 nt, Human
aaauuaaacaau

SEQ ID NO: 3600043 - RNA, 15 nt, Human
aaauuaaacaauuua

SEQ ID NO: 3600044 - RNA, 16 nt, Human
aaauuaaacacaaagu

SEQ ID NO: 3600045 - RNA, 13 nt, Human
aaauuaaagcauu

SEQ ID NO: 3600046 - RNA, 13 nt, Human
aaauuaaagcuga

SEQ ID NO: 3600047 - RNA, 14 nt, Human
aaauuaaagcugaa

SEQ ID NO: 3600048 - RNA, 13 nt, Human
aaauuaaaucugu

SEQ ID NO: 3600049 - RNA, 23 nt, Human
aaauuaaaucugucccugagagu

SEQ ID NO: 3600050 - RNA, 12 nt, Human
aaauuaacacug

SEQ ID NO: 3600051 - RNA, 20 nt, Human
aaauuaaccauagauguaga

SEQ ID NO: 3600052 - RNA, 12 nt, Human
aaauuaacuuuu

SEQ ID NO: 3600053 - RNA, 19 nt, Human
aaauuaacuuuuauaaacu

SEQ ID NO: 3600054 - RNA, 21 nt, Human
aaauuaacuuuuauaaacuuu

SEQ ID NO: 3600055 - RNA, 22 nt, Human
aaauuaacuuuuauaaacuuua

SEQ ID NO: 3600056 - RNA, 14 nt, Human
aaauuaagaaagga

SEQ ID NO: 3600057 - RNA, 13 nt, Human
aaauuaagaagaa

SEQ ID NO: 3600058 - RNA, 16 nt, Human
aaauuaagaagaaacu

SEQ ID NO: 3600059 - RNA, 14 nt, Human
aaauuaagaaggca

SEQ ID NO: 3600060 - RNA, 13 nt, Human
aaauuaagaaugu

SEQ ID NO: 3600061 - RNA, 13 nt, Human
aaauuaagcaaau

SEQ ID NO: 3600062 - RNA, 23 nt, Human
aaauuaaggcaacugaacaaaaa

SEQ ID NO: 3600063 - RNA, 17 nt, Human
aaauuaaggguuaagaa

SEQ ID NO: 3600064 - RNA, 19 nt, Human
aaauuaagguguuugaaaa

SEQ ID NO: 3600065 - RNA, 18 nt, Human
aaauuaauuggcagcaga

SEQ ID NO: 3600066 - RNA, 18 nt, Human
aaauuaauugugugaacu

SEQ ID NO: 3600067 - RNA, 14 nt, Human
aaauuaauuuuacu

SEQ ID NO: 3600068 - RNA, 15 nt, Human
aaauuacaauuuuau

SEQ ID NO: 3600069 - RNA, 23 nt, Human
aaauuacauuacugaaaacuuca

SEQ ID NO: 3600070 - RNA, 18 nt, Human
aaauuaccaguaaagugu

SEQ ID NO: 3600071 - RNA, 20 nt, Human
aaauuaccaguaaaguguaa

SEQ ID NO: 3600072 - RNA, 18 nt, Human
aaauuaccuguggauauu

SEQ ID NO: 3600073 - RNA, 20 nt, Human
aaauuacguacuaaggauac

SEQ ID NO: 3600074 - RNA, 22 nt, Human
aaauuacuaauuuuacacauua

SEQ ID NO: 3600075 - RNA, 15 nt, Human
aaauuacucuuucuc

SEQ ID NO: 3600076 - RNA, 21 nt, Human
aaauuacuuaucauccacauu

SEQ ID NO: 3600077 - RNA, 19 nt, Human
aaauuagaaaaaaauuacu

SEQ ID NO: 3600078 - RNA, 19 nt, Human
aaauuagaaaauauucucu

SEQ ID NO: 3600079 - RNA, 14 nt, Human
aaauuagaugaacu

SEQ ID NO: 3600080 - RNA, 16 nt, Human
aaauuagaugcauguu

SEQ ID NO: 3600081 - RNA, 18 nt, Human
aaauuagccaguaauccu

SEQ ID NO: 3600082 - RNA, 22 nt, Human
aaauuagccaguaauccuguag

SEQ ID NO: 3600083 - RNA, 14 nt, Human
aaauuaggaauaaa

SEQ ID NO: 3600084 - RNA, 19 nt, Human
aaauuaggauuucaugauu

SEQ ID NO: 3600085 - RNA, 21 nt, Human
aaauuagggcucuaauuuccu

SEQ ID NO: 3600086 - RNA, 23 nt, Human
aaauuagggcucuaauuuccuua

SEQ ID NO: 3600087 - RNA, 14 nt, Human
aaauuagguugaaa

SEQ ID NO: 3600088 - RNA, 23 nt, Human
aaauuagguuuuguacaauugaa

SEQ ID NO: 3600089 - RNA, 21 nt, Human
aaauuaguuagccaauauuuu

SEQ ID NO: 3600090 - RNA, 16 nt, Human
aaauuauaacuuaaaa

SEQ ID NO: 3600091 - RNA, 22 nt, Human
aaauuauaacuuaaaauauuuu

SEQ ID NO: 3600092 - RNA, 20 nt, Human
aaauuauaaggacugcaugg

SEQ ID NO: 3600093 - RNA, 12 nt, Human
aaauuauaaugu

SEQ ID NO: 3600094 - RNA, 14 nt, Human
aaauuauaauguau

SEQ ID NO: 3600095 - RNA, 16 nt, Human
aaauuauauaaguauu

SEQ ID NO: 3600096 - RNA, 22 nt, Human
aaauuauauaaguauucuaaau

SEQ ID NO: 3600097 - RNA, 15 nt, Human
aaauuauaucaauuu

SEQ ID NO: 3600098 - RNA, 16 nt, Human
aaauuaucaagcuaau

SEQ ID NO: 3600099 - RNA, 16 nt, Human
aaauuaucaauaucua

SEQ ID NO: 3600100 - RNA, 13 nt, Human
aaauuaucuauuu

SEQ ID NO: 3600101 - RNA, 17 nt, Human
aaauuaucuugauacau

SEQ ID NO: 3600102 - RNA, 21 nt, Human
aaauuaugcuaagaauuuuuu

SEQ ID NO: 3600103 - RNA, 21 nt, Human
aaauuauggaaacagaugaaa

SEQ ID NO: 3600104 - RNA, 22 nt, Human
aaauuaugugacauuuuacauu

SEQ ID NO: 3600105 - RNA, 21 nt, Human
aaauuaugugaccauaaugua

SEQ ID NO: 3600106 - RNA, 14 nt, Human
aaauuauguuuaua

SEQ ID NO: 3600107 - RNA, 17 nt, Human
aacgaucagacagaucu

SEQ ID NO: 3600108 - RNA, 17 nt, Human
aacgaugaugcuuguaa

SEQ ID NO: 3600109 - RNA, 20 nt, Human
aacgauuuaauucucuugaa

SEQ ID NO: 3600110 - RNA, 11 nt, Human
aacgcagcccu

SEQ ID NO: 3600111 - RNA, 12 nt, Human
aacgcagcccug

SEQ ID NO: 3600112 - RNA, 20 nt, Human
aacgcaggcccccaggugcc

SEQ ID NO: 3600113 - RNA, 22 nt, Human
aacgcaucuaguuccccuguuu

SEQ ID NO: 3600114 - RNA, 23 nt, Human
aacgcauggaguguguauuguuc

SEQ ID NO: 3600115 - RNA, 13 nt, Human
aacgccugagccc

SEQ ID NO: 3600116 - RNA, 18 nt, Human
aacgccugagcccaggga

SEQ ID NO: 3600117 - RNA, 20 nt, Human
aacuuuacccaaaaacuaaa

SEQ ID NO: 3600118 - RNA, 15 nt, Human
aacuuuagaaauaaa

SEQ ID NO: 3600119 - RNA, 19 nt, Human
aacuuuauaaauccaguga

SEQ ID NO: 3600120 - RNA, 15 nt, Human
aacuuuauacauuag

SEQ ID NO: 3600121 - RNA, 22 nt, Human
aacuuuauacccagaaaguuau

SEQ ID NO: 3600122 - RNA, 14 nt, Human
aacuuuaucacuua

SEQ ID NO: 3600123 - RNA, 21 nt, Human
aacuuuaugcuaagugaaaua

SEQ ID NO: 3600124 - RNA, 13 nt, Human
aacuuuaugugua

SEQ ID NO: 3600125 - RNA, 17 nt, Human
aacuuuauguguaaaua

SEQ ID NO: 3600126 - RNA, 21 nt, Human
aacuuuauuaaauacaaaacu

SEQ ID NO: 3600127 - RNA, 22 nt, Human
aacuuucacuauaaugugaaau

SEQ ID NO: 3600128 - RNA, 14 nt, Human
aacuuucauuuuuu

SEQ ID NO: 3600129 - RNA, 23 nt, Human
aacuuucccagguucuguuuaug

SEQ ID NO: 3600130 - RNA, 14 nt, Human
aacuuuccucgccu

SEQ ID NO: 3600131 - RNA, 19 nt, Human
aacuuuccucuuccugccu

SEQ ID NO: 3600132 - RNA, 18 nt, Human
aacuuucucuucauacuu

SEQ ID NO: 3600133 - RNA, 23 nt, Human
aacuuucuguuggauuccaugcu

SEQ ID NO: 3600134 - RNA, 15 nt, Human
aacuuucuuauccua

SEQ ID NO: 3600135 - RNA, 12 nt, Human
aacuuugaauaa

SEQ ID NO: 3600136 - RNA, 17 nt, Human
aacuuugaauaaagaau

SEQ ID NO: 3600137 - RNA, 14 nt, Human
aacuuugaccucug

SEQ ID NO: 3600138 - RNA, 17 nt, Human
aacuuugaccucugcag

SEQ ID NO: 3600139 - RNA, 16 nt, Human
aacuuuggaacaagau

SEQ ID NO: 3600140 - RNA, 11 nt, Human
aacuuuuaugc

SEQ ID NO: 3600141 - RNA, 16 nt, Human
aacuuuucuaacagaa

SEQ ID NO: 3600142 - RNA, 18 nt, Human
aacuuuucuauuaaaagu

SEQ ID NO: 3600143 - RNA, 22 nt, Human
aacuuuuugguuugcagaugac

SEQ ID NO: 3600144 - RNA, 19 nt, Human
aacuuuuuuaaauaaacuu

SEQ ID NO: 3600145 - RNA, 13 nt, Human
aacuuuuuuucaa

SEQ ID NO: 3600146 - RNA, 14 nt, Human
aacuuuuuuucaau

SEQ ID NO: 3600147 - RNA, 22 nt, Human
aacuuuuuuucuguaccaguua

SEQ ID NO: 3600148 - RNA, 16 nt, Human
aacuuuuuuuucuuuu

SEQ ID NO: 3600149 - RNA, 17 nt, Human
aacuuuuuuuugagaau

SEQ ID NO: 3600150 - RNA, 18 nt, Human
aagaaaaaaaaaaaagcc

SEQ ID NO: 3600151 - RNA, 15 nt, Human
aagaaaaaaaaagaa

SEQ ID NO: 3600152 - RNA, 17 nt, Human
aagaaaaaaaagaaagc

SEQ ID NO: 3600153 - RNA, 16 nt, Human
aagaaaaaaaauaaca

SEQ ID NO: 3600154 - RNA, 18 nt, Human
aagaaaaaaaauaacaca

SEQ ID NO: 3600155 - RNA, 14 nt, Human
aagaaaaaaauaau

SEQ ID NO: 3600156 - RNA, 24 nt, Human
aagaaaaaaauaauuuuaugaacu

SEQ ID NO: 3600157 - RNA, 15 nt, Human
aagaaaaaaauacua

SEQ ID NO: 3600158 - RNA, 15 nt, Human
aagaaaaaaaucuuc

SEQ ID NO: 3600159 - RNA, 13 nt, Human
aagaaaaaaaugu

SEQ ID NO: 3600160 - RNA, 21 nt, Human
aagaaaaaaauguauuuuaug

SEQ ID NO: 3600161 - RNA, 17 nt, Human
aagaaaaaaauugaaau

SEQ ID NO: 3600162 - RNA, 21 nt, Human
aagaaaaaaauugaaauguaa

SEQ ID NO: 3600163 - RNA, 19 nt, Human
aagaaaaaauauuuucccu

SEQ ID NO: 3600164 - RNA, 14 nt, Human
aagaaaaauaaaga

SEQ ID NO: 3600165 - RNA, 15 nt, Human
aagaaaaauaaagaa

SEQ ID NO: 3600166 - RNA, 12 nt, Human
aagaaaaauauu

SEQ ID NO: 3600167 - RNA, 12 nt, Human
aagaaaaaucag

SEQ ID NO: 3600168 - RNA, 13 nt, Human
aagaaaaaucaug

SEQ ID NO: 3600169 - RNA, 17 nt, Human
aagaaaaaucauguuug

SEQ ID NO: 3600170 - RNA, 18 nt, Human
aagaaaaaugagccuggc

SEQ ID NO: 3600171 - RNA, 13 nt, Human
aagaaaaccaaac

SEQ ID NO: 3600172 - RNA, 14 nt, Human
aagaaaacccaccc

SEQ ID NO: 3600173 - RNA, 20 nt, Human
aagaaaagaaucccuguuca

SEQ ID NO: 3600174 - RNA, 18 nt, Human
aagaaaagacuuguaaua

SEQ ID NO: 3600175 - RNA, 16 nt, Human
aagaaaagagcuuucu

SEQ ID NO: 3600176 - RNA, 11 nt, Human
aagaaaagaua

SEQ ID NO: 3600177 - RNA, 23 nt, Human
aagaaaagaugcacuuugcuuua

SEQ ID NO: 3600178 - RNA, 17 nt, Human
aagaaaaguauuuugaa

SEQ ID NO: 3600179 - RNA, 16 nt, Human
aagaaaagugguuguu

SEQ ID NO: 3600180 - RNA, 18 nt, Human
aagaaaaguuuauaaaag

SEQ ID NO: 3600181 - RNA, 21 nt, Human
aagaaaaguuuuguaaauuuc

SEQ ID NO: 3600182 - RNA, 22 nt, Human
aagaaaauaaaaaaaagaaaaa

SEQ ID NO: 3600183 - RNA, 23 nt, Human
aagaaaauaaaaaaaagaaaaaa

SEQ ID NO: 3600184 - RNA, 22 nt, Human
aagaaaauaaaauuaagaaugu

SEQ ID NO: 3600185 - RNA, 13 nt, Human
aagaaaauacuua

SEQ ID NO: 3600186 - RNA, 20 nt, Human
aagaaaauacuuaaauguua

SEQ ID NO: 3600187 - RNA, 21 nt, Human
aagaaaauaguggugugauuu

SEQ ID NO: 3600188 - RNA, 23 nt, Human
aagaaaaucagauggagcaugaa

SEQ ID NO: 3600189 - RNA, 15 nt, Human
aagaaaaucauauug

SEQ ID NO: 3600190 - RNA, 22 nt, Human
aagaaaaucuauuuuguaacuu

SEQ ID NO: 3600191 - RNA, 15 nt, Human
aagaaaaucuuuaua

SEQ ID NO: 3600192 - RNA, 12 nt, Human
aagaaaaugguu

SEQ ID NO: 3600193 - RNA, 16 nt, Human
aagaaaauuacaaaaa

SEQ ID NO: 3600194 - RNA, 19 nt, Human
aagaaaauuuuuguaguag

SEQ ID NO: 3600195 - RNA, 13 nt, Human
aagaaacaaaccc

SEQ ID NO: 3600196 - RNA, 15 nt, Human
aagaaacaaagaugu

SEQ ID NO: 3600197 - RNA, 22 nt, Human
aagaaacacacugaggcaggga

SEQ ID NO: 3600198 - RNA, 16 nt, Human
aagaaacagauaccau

SEQ ID NO: 3600199 - RNA, 11 nt, Human
aagaaacauug

SEQ ID NO: 3600200 - RNA, 21 nt, Human
aagaaaccuacugcccaggca

SEQ ID NO: 3600201 - RNA, 21 nt, Human
aagaaacugacaugcccuccc

SEQ ID NO: 3600202 - RNA, 22 nt, Human
aagaaacugacaugcccucccu

SEQ ID NO: 3600203 - RNA, 23 nt, Human
aagaaacuuucuuucucacuaaa

SEQ ID NO: 3600204 - RNA, 12 nt, Human
aagaaacuuuug

SEQ ID NO: 3600205 - RNA, 13 nt, Human
aagaaacuuuugu

SEQ ID NO: 3600206 - RNA, 15 nt, Human
aagaaacuuuuguaa

SEQ ID NO: 3600207 - RNA, 13 nt, Human
aagaaagaaaauc

SEQ ID NO: 3600208 - RNA, 12 nt, Human
aagaaagaaaga

SEQ ID NO: 3600209 - RNA, 12 nt, Human
aagaaagaaaua

SEQ ID NO: 3600210 - RNA, 15 nt, Human
aagaaagaaggaagu

SEQ ID NO: 3600211 - RNA, 12 nt, Human
aagaaagaaugu

SEQ ID NO: 3600212 - RNA, 13 nt, Human
aagaaagagagaa

SEQ ID NO: 3600213 - RNA, 23 nt, Human
aagaaagaggugaccccagggca

SEQ ID NO: 3600214 - RNA, 14 nt, Human
aagaaagauguuug

SEQ ID NO: 3600215 - RNA, 12 nt, Human
aagaaagcaacu

SEQ ID NO: 3600216 - RNA, 16 nt, Human
aagaaagccagucuua

SEQ ID NO: 3600217 - RNA, 12 nt, Human
aagaaagccuga

SEQ ID NO: 3600218 - RNA, 22 nt, Human
aagaaagccugaguacuccaca

SEQ ID NO: 3600219 - RNA, 16 nt, Human
aagaaaggaaaccuuu

SEQ ID NO: 3600220 - RNA, 23 nt, Human
aagaaaggaagcauuguaaaaua

SEQ ID NO: 3600221 - RNA, 18 nt, Human
aagaaaggggcaggagcu

SEQ ID NO: 3600222 - RNA, 16 nt, Human
aagaaagucagccaua

SEQ ID NO: 3600223 - RNA, 17 nt, Human
aagaaagugggagguca

SEQ ID NO: 3600224 - RNA, 23 nt, Human
aagaaagugggaggucaggaaac

SEQ ID NO: 3600225 - RNA, 22 nt, Human
aagaaaguggucuuaagaaaug

SEQ ID NO: 3600226 - RNA, 18 nt, Human
aagaaaguguauuuggaa

SEQ ID NO: 3600227 - RNA, 16 nt, Human
aagaaaguucuacagu

SEQ ID NO: 3600228 - RNA, 23 nt, Human
aagaaauaaaaggaagccaaaga

SEQ ID NO: 3600229 - RNA, 13 nt, Human
aagaaauaauaau

SEQ ID NO: 3600230 - RNA, 15 nt, Human
aagaaauaauaauau

SEQ ID NO: 3600231 - RNA, 12 nt, Human
aagaaauaauuu

SEQ ID NO: 3600232 - RNA, 15 nt, Human
aagaaauaguucugu

SEQ ID NO: 3600233 - RNA, 19 nt, Human
aagaaauaucugugaaaua

SEQ ID NO: 3600234 - RNA, 20 nt, Human
aagaaauauguauucuguaa

SEQ ID NO: 3600235 - RNA, 12 nt, Human
aagaaaucaugu

SEQ ID NO: 3600236 - RNA, 21 nt, Human
aagaaaucauguuaugauaaa

SEQ ID NO: 3600237 - RNA, 20 nt, Human
aagaaaucuauagaaagugu

SEQ ID NO: 3600238 - RNA, 20 nt, Human
aagaaaugaaauuuuaccaa

SEQ ID NO: 3600239 - RNA, 14 nt, Human
aagaaaugaacauu

SEQ ID NO: 3600240 - RNA, 16 nt, Human
aagaaaugaacauucc

SEQ ID NO: 3600241 - RNA, 13 nt, Human
aagaaaugcacaa

SEQ ID NO: 3600242 - RNA, 13 nt, Human
aagaaauguaagg

SEQ ID NO: 3600243 - RNA, 14 nt, Human
aagaaauguaaggg

SEQ ID NO: 3600244 - RNA, 12 nt, Human
aagaaauguacc

SEQ ID NO: 3600245 - RNA, 14 nt, Human
aagaaauguauaaa

SEQ ID NO: 3600246 - RNA, 15 nt, Human
aagaaauuauaaaga

SEQ ID NO: 3600247 - RNA, 22 nt, Human
aagaaauuaugugccagauuua

SEQ ID NO: 3600248 - RNA, 15 nt, Human
aagaaauucccugga

SEQ ID NO: 3600249 - RNA, 19 nt, Human
aagaaauugaauacuuuga

SEQ ID NO: 3600250 - RNA, 22 nt, Human
aagaaauugaauacuuugaaug

SEQ ID NO: 3600251 - RNA, 17 nt, Human
aagaaauuuaaaagaca

SEQ ID NO: 3600252 - RNA, 15 nt, Human
aagaaauuuauuacu

SEQ ID NO: 3600253 - RNA, 13 nt, Human
aagaaauuugugg

SEQ ID NO: 3600254 - RNA, 21 nt, Human
aagaacaaaaaaaucugcaga

SEQ ID NO: 3600255 - RNA, 14 nt, Human
aagaacaacggcaa

SEQ ID NO: 3600256 - RNA, 15 nt, Human
aagaacaauauugac

SEQ ID NO: 3600257 - RNA, 15 nt, Human
aagaacacacacaua

SEQ ID NO: 3600258 - RNA, 21 nt, Human
aagaacacccuauauuuugca

SEQ ID NO: 3600259 - RNA, 20 nt, Human
aagaacacuuuuaauaaacu

SEQ ID NO: 3600260 - RNA, 12 nt, Human
aagaacaggccu

SEQ ID NO: 3600261 - RNA, 16 nt, Human
aagaacauagaacucu

SEQ ID NO: 3600262 - RNA, 14 nt, Human
aagaacaugcaguu

SEQ ID NO: 3600263 - RNA, 21 nt, Human
aagacaaaacauacauuuugu

SEQ ID NO: 3600264 - RNA, 13 nt, Human
aagacaaauauuc

SEQ ID NO: 3600265 - RNA, 17 nt, Human
aagacaaaucaaagcag

SEQ ID NO: 3600266 - RNA, 17 nt, Human
aagacaaccauauuuag

SEQ ID NO: 3600267 - RNA, 14 nt, Human
aagacaagaaaauc

SEQ ID NO: 3600268 - RNA, 22 nt, Human
aagacaagaacuccccuuuuuu

SEQ ID NO: 3600269 - RNA, 15 nt, Human
aagacaagacuucag

SEQ ID NO: 3600270 - RNA, 13 nt, Human
aagacaagcugca

SEQ ID NO: 3600271 - RNA, 15 nt, Human
aagacaauucuuuau

SEQ ID NO: 3600272 - RNA, 19 nt, Human
aagacaauucuuuauacaa

SEQ ID NO: 3600273 - RNA, 16 nt, Human
aagacaauuugauaca

SEQ ID NO: 3600274 - RNA, 13 nt, Human
aagacaccagagc

SEQ ID NO: 3600275 - RNA, 17 nt, Human
aagacacucaaauauga

SEQ ID NO: 3600276 - RNA, 14 nt, Human
aagacacugccugg

SEQ ID NO: 3600277 - RNA, 15 nt, Human
aagacagagcuggga

SEQ ID NO: 3600278 - RNA, 12 nt, Human
aagacagagucu

SEQ ID NO: 3600279 - RNA, 23 nt, Human
aagacagauacuccuccaagguu

SEQ ID NO: 3600280 - RNA, 17 nt, Human
aagacagaugccccaga

SEQ ID NO: 3600281 - RNA, 22 nt, Human
aagacagaugccccagagcugu

SEQ ID NO: 3600282 - RNA, 18 nt, Human
aagacaggagacaaaaga

SEQ ID NO: 3600283 - RNA, 21 nt, Human
aagacagggcugauaagcuaa

SEQ ID NO: 3600284 - RNA, 18 nt, Human
aagacaguguauguagaa

SEQ ID NO: 3600285 - RNA, 18 nt, Human
aagacauaacguuuuucc

SEQ ID NO: 3600286 - RNA, 16 nt, Human
aagacauaucucuaau

SEQ ID NO: 3600287 - RNA, 18 nt, Human
aagacaugaaugcacacu

SEQ ID NO: 3600288 - RNA, 21 nt, Human
aagacaugauuuccuugaaug

SEQ ID NO: 3600289 - RNA, 18 nt, Human
aagacauggagacuccug

SEQ ID NO: 3600290 - RNA, 19 nt, Human
aagacauggagacuccugc

SEQ ID NO: 3600291 - RNA, 19 nt, Human
aagacauggggaggaagga

SEQ ID NO: 3600292 - RNA, 16 nt, Human
aagacauguagguguu

SEQ ID NO: 3600293 - RNA, 15 nt, Human
aagacauuaaaucua

SEQ ID NO: 3600294 - RNA, 22 nt, Human
aagacauucuuauauuucauau

SEQ ID NO: 3600295 - RNA, 17 nt, Human
aagacauugucaauaaa

SEQ ID NO: 3600296 - RNA, 12 nt, Human
aagacauuucuu

SEQ ID NO: 3600297 - RNA, 22 nt, Human
aagacauuucuuuucuuuuuac

SEQ ID NO: 3600298 - RNA, 23 nt, Human
aagacauuucuuuucuuuuuaca

SEQ ID NO: 3600299 - RNA, 13 nt, Human
aagaccaaacuuc

SEQ ID NO: 3600300 - RNA, 17 nt, Human
aagaccacaaaaauuga

SEQ ID NO: 3600301 - RNA, 12 nt, Human
aagaccagacua

SEQ ID NO: 3600302 - RNA, 23 nt, Human
aagaccagagauaguggggagac

SEQ ID NO: 3600303 - RNA, 13 nt, Human
aagaccagccugg

SEQ ID NO: 3600304 - RNA, 12 nt, Human
aagaccagucca

SEQ ID NO: 3600305 - RNA, 16 nt, Human
aagaccccacccaagc

SEQ ID NO: 3600306 - RNA, 23 nt, Human
aagaccccuuaccacugcucuga

SEQ ID NO: 3600307 - RNA, 17 nt, Human
aagacccucucaaacua

SEQ ID NO: 3600308 - RNA, 21 nt, Human
aagacccucuugcccauccug

SEQ ID NO: 3600309 - RNA, 13 nt, Human
aagacccuucucg

SEQ ID NO: 3600310 - RNA, 18 nt, Human
aagacccuugugguccca

SEQ ID NO: 3600311 - RNA, 21 nt, Human
aagacccuuguggucccaccc

SEQ ID NO: 3600312 - RNA, 20 nt, Human
aagacccuuuuggguuucug

SEQ ID NO: 3600313 - RNA, 15 nt, Human
aagaccgccccccgc

SEQ ID NO: 3600314 - RNA, 22 nt, Human
aagaccuaaccagggccagaag

SEQ ID NO: 3600315 - RNA, 22 nt, Human
aagaccuacuguucuaaagcuc

SEQ ID NO: 3600316 - RNA, 23 nt, Human
aagaccuaggcucauggacgaga

SEQ ID NO: 3600317 - RNA, 17 nt, Human
aagaccucaccuagaaa

SEQ ID NO: 3600318 - RNA, 15 nt, Human
aagaccugagaaugu

SEQ ID NO: 3600319 - RNA, 21 nt, Human
aagaccuggcaaggacacaga

SEQ ID NO: 3600320 - RNA, 23 nt, Human
aagaccuggggcugcugugaagc

SEQ ID NO: 3600321 - RNA, 18 nt, Human
aagaccuuguguguaugu

SEQ ID NO: 3600322 - RNA, 13 nt, Human
aagaccuuucaaa

SEQ ID NO: 3600323 - RNA, 18 nt, Human
aagaccuuuuucugcacu

SEQ ID NO: 3600324 - RNA, 22 nt, Human
aagacgcacuuuggcuuauaau

SEQ ID NO: 3600325 - RNA, 13 nt, Human
aagacgcugugcu

SEQ ID NO: 3600326 - RNA, 22 nt, Human
aagacgcugugcugcccugccc

SEQ ID NO: 3600327 - RNA, 21 nt, Human
aagacggcacggucuucccuc

SEQ ID NO: 3600328 - RNA, 20 nt, Human
aagacgugaugccaggacca

SEQ ID NO: 3600329 - RNA, 20 nt, Human
aagaaguauuuuuagaauaa

SEQ ID NO: 3600330 - RNA, 22 nt, Human
aagaagugaaaaucuacacucc

SEQ ID NO: 3600331 - RNA, 19 nt, Human
aagaagugaccaaggagga

SEQ ID NO: 3600332 - RNA, 20 nt, Human
aagaagugaccaaggaggag

SEQ ID NO: 3600333 - RNA, 20 nt, Human
aagaagugaguguuucuaug

SEQ ID NO: 3600334 - RNA, 16 nt, Human
aagaaguguccgagaa

SEQ ID NO: 3600335 - RNA, 17 nt, Human
aagaaguucauguccaa

SEQ ID NO: 3600336 - RNA, 14 nt, Human
aagaaguucuuuga

SEQ ID NO: 3600337 - RNA, 12 nt, Human
aagaaguuuauu

SEQ ID NO: 3600338 - RNA, 18 nt, Human
aagaaguuucaucauuuu

SEQ ID NO: 3600339 - RNA, 23 nt, Human
aagaauaaaauguugaaaaguca

SEQ ID NO: 3600340 - RNA, 16 nt, Human
aagaauaauaaaauca

SEQ ID NO: 3600341 - RNA, 21 nt, Human
aagaauaauaugcugccaaau

SEQ ID NO: 3600342 - RNA, 18 nt, Human
aagaauacaaacauauuu

SEQ ID NO: 3600343 - RNA, 14 nt, Human
aagaauacagaaag

SEQ ID NO: 3600344 - RNA, 23 nt, Human
aagaauacaguuaggcaccagaa

SEQ ID NO: 3600345 - RNA, 12 nt, Human
aagaauacuucu

SEQ ID NO: 3600346 - RNA, 17 nt, Human
aagaauacuucucauuu

SEQ ID NO: 3600347 - RNA, 15 nt, Human
aagaauagcaucugu

SEQ ID NO: 3600348 - RNA, 21 nt, Human
aagaauagcaucuguacaaag

SEQ ID NO: 3600349 - RNA, 23 nt, Human
aagaauagcaucuguacaaaggg

SEQ ID NO: 3600350 - RNA, 23 nt, Human
aagaauagcauuguaaaagcauu

SEQ ID NO: 3600351 - RNA, 19 nt, Human
aagaauaggcauuaacaca

SEQ ID NO: 3600352 - RNA, 15 nt, Human
aagaauagggcccau

SEQ ID NO: 3600353 - RNA, 21 nt, Human
aagaauauccuuuaaaauuua

SEQ ID NO: 3600354 - RNA, 16 nt, Human
aagaauaucuggcaaa

SEQ ID NO: 3600355 - RNA, 20 nt, Human
aagaauaucuguaaugguac

SEQ ID NO: 3600356 - RNA, 21 nt, Human
aagaauauucagagaauauca

SEQ ID NO: 3600357 - RNA, 13 nt, Human
aagaauauucagg

SEQ ID NO: 3600358 - RNA, 17 nt, Human
aagaauauugcaaaaua

SEQ ID NO: 3600359 - RNA, 19 nt, Human
aagaauauugcaaaauaca

SEQ ID NO: 3600360 - RNA, 13 nt, Human
aagaauauuguau

SEQ ID NO: 3600361 - RNA, 21 nt, Human
aagaauauuguuccuaaguuc

SEQ ID NO: 3600362 - RNA, 11 nt, Human
aagaauauuug

SEQ ID NO: 3600363 - RNA, 21 nt, Human
aagaaucacaauaauuuucua

SEQ ID NO: 3600364 - RNA, 22 nt, Human
aagaaucauuauuuauuaaauu

SEQ ID NO: 3600365 - RNA, 19 nt, Human
aagaauccacauuucuaaa

SEQ ID NO: 3600366 - RNA, 21 nt, Human
aagaauccacauuucuaaaau

SEQ ID NO: 3600367 - RNA, 21 nt, Human
aagaauccuuuuguagaauga

SEQ ID NO: 3600368 - RNA, 13 nt, Human
aagaaucuacuua

SEQ ID NO: 3600369 - RNA, 17 nt, Human
aagaaucuaucugcuua

SEQ ID NO: 3600370 - RNA, 20 nt, Human
aagaaucuucuguuccacau

SEQ ID NO: 3600371 - RNA, 13 nt, Human
aagaaugaaagcu

SEQ ID NO: 3600372 - RNA, 17 nt, Human
aagaaugaaagcuguuc

SEQ ID NO: 3600373 - RNA, 22 nt, Human
aagaaugaagguuuuuguaaag

SEQ ID NO: 3600374 - RNA, 21 nt, Human
aagaaugagaaggagucagaa

SEQ ID NO: 3600375 - RNA, 21 nt, Human
aagaaugaguuucuuagacuu

SEQ ID NO: 3600376 - RNA, 24 nt, Human
aagaaugcaguacuaacauuuauu

SEQ ID NO: 3600377 - RNA, 20 nt, Human
aagaaugcaugcuuuccaua

SEQ ID NO: 3600378 - RNA, 13 nt, Human
aagaaugcauuga

SEQ ID NO: 3600379 - RNA, 9 nt, Human
aagaaugcu

SEQ ID NO: 3600380 - RNA, 13 nt, Human
aagaaugcugaaa

SEQ ID NO: 3600381 - RNA, 16 nt, Human
aagaaugcugaaacca

SEQ ID NO: 3600382 - RNA, 13 nt, Human
aagaaugcuuaau

SEQ ID NO: 3600383 - RNA, 13 nt, Human
aagaauggaaaag

SEQ ID NO: 3600384 - RNA, 15 nt, Human
aagaauggaaaagag

SEQ ID NO: 3600385 - RNA, 20 nt, Human
aagaauggcagaaaaguuua

SEQ ID NO: 3600386 - RNA, 17 nt, Human
aagaaugggcaguuaca

SEQ ID NO: 3600387 - RNA, 20 nt, Human
aagaaugggcaguuacaugc

SEQ ID NO: 3600388 - RNA, 22 nt, Human
aagaaugguccgugcuaaggac

SEQ ID NO: 3600389 - RNA, 19 nt, Human
aagaaugguggcuucuuuu

SEQ ID NO: 3600390 - RNA, 13 nt, Human
aagaauguaaagc

SEQ ID NO: 3600391 - RNA, 23 nt, Human
aagaaugucagaaaaacaauaag

SEQ ID NO: 3600392 - RNA, 14 nt, Human
aagaauguguuuca

SEQ ID NO: 3600393 - RNA, 12 nt, Human
aagaauguuaag

SEQ ID NO: 3600394 - RNA, 17 nt, Human
aagaauguuacugccuu

SEQ ID NO: 3600395 - RNA, 20 nt, Human
aagaauguuagaguaaugaa

SEQ ID NO: 3600396 - RNA, 17 nt, Human
aagaauguugguuuacu

SEQ ID NO: 3600397 - RNA, 16 nt, Human
aagaauuauuuugaug

SEQ ID NO: 3600398 - RNA, 17 nt, Human
aagaauucaaauuuuau

SEQ ID NO: 3600399 - RNA, 13 nt, Human
aagaauuccaaag

SEQ ID NO: 3600400 - RNA, 17 nt, Human
aagaauuccuacaauau

SEQ ID NO: 3600401 - RNA, 23 nt, Human
aagaauuccuacaauauauauuc

SEQ ID NO: 3600402 - RNA, 12 nt, Human
aagaauucuuau

SEQ ID NO: 3600403 - RNA, 19 nt, Human
aagaauugaaaaguuuuug

SEQ ID NO: 3600404 - RNA, 18 nt, Human
aagaauugaacccaggag

SEQ ID NO: 3600405 - RNA, 19 nt, Human
aagaauugaacccaggagg

SEQ ID NO: 3600406 - RNA, 17 nt, Human
aagaauugaguaauggu

SEQ ID NO: 3600407 - RNA, 21 nt, Human
aacccucucaggugaccaaaa

SEQ ID NO: 3600408 - RNA, 11 nt, Human
aacccugcccc

SEQ ID NO: 3600409 - RNA, 21 nt, Human
aacccugccgucaccaccacc

SEQ ID NO: 3600410 - RNA, 16 nt, Human
aacccugcguggggac

SEQ ID NO: 3600411 - RNA, 19 nt, Human
aacccugcguggggacagg

SEQ ID NO: 3600412 - RNA, 12 nt, Human
aacccuggagag

SEQ ID NO: 3600413 - RNA, 19 nt, Human
aacccugucaaacauuagu

SEQ ID NO: 3600414 - RNA, 14 nt, Human
aacccugugcuggu

SEQ ID NO: 3600415 - RNA, 23 nt, Human
aacccuuaccccuuagccucccu

SEQ ID NO: 3600416 - RNA, 23 nt, Human
aacccuuaggacagggucccugc

SEQ ID NO: 3600417 - RNA, 19 nt, Human
aacccuucaacguuucuuc

SEQ ID NO: 3600418 - RNA, 22 nt, Human
aacccuucaacguuucuucacu

SEQ ID NO: 3600419 - RNA, 13 nt, Human
aacccuucagugc

SEQ ID NO: 3600420 - RNA, 22 nt, Human
aacccuucaucuuccugugucc

SEQ ID NO: 3600421 - RNA, 20 nt, Human
aacccuuccugagcuuuaug

SEQ ID NO: 3600422 - RNA, 18 nt, Human
aacccuucuccucuugua

SEQ ID NO: 3600423 - RNA, 20 nt, Human
aacccuucuccucuuguaaa

SEQ ID NO: 3600424 - RNA, 21 nt, Human
aacccuucuccucuuguaaau

SEQ ID NO: 3600425 - RNA, 15 nt, Human
aacccuugaaaagac

SEQ ID NO: 3600426 - RNA, 16 nt, Human
aacccuugccaggucc

SEQ ID NO: 3600427 - RNA, 14 nt, Human
aacccuugggccag

SEQ ID NO: 3600428 - RNA, 15 nt, Human
aacccuugggccaga

SEQ ID NO: 3600429 - RNA, 13 nt, Human
aacccuugucagu

SEQ ID NO: 3600430 - RNA, 18 nt, Human
aacccuuuuaaaguugau

SEQ ID NO: 3600431 - RNA, 21 nt, Human
aacccuuuucauccuggcugg

SEQ ID NO: 3600432 - RNA, 22 nt, Human
aacccuuuuggcccccgagcug

SEQ ID NO: 3600433 - RNA, 21 nt, Human
aaccgaaaggccaaauucccu

SEQ ID NO: 3600434 - RNA, 21 nt, Human
aaccgaacugauguaaguaaa

SEQ ID NO: 3600435 - RNA, 21 nt, Human
aaccgagagaaugcugaccug

SEQ ID NO: 3600436 - RNA, 15 nt, Human
aaccgagcaaagauc

SEQ ID NO: 3600437 - RNA, 22 nt, Human
aaccgagcaaagaucaaaauaa

SEQ ID NO: 3600438 - RNA, 20 nt, Human
aaccgaggggcucaggaaaa

SEQ ID NO: 3600439 - RNA, 20 nt, Human
aaccgagggggcugcuccca

SEQ ID NO: 3600440 - RNA, 23 nt, Human
aaccgaguagaaaaugugacccu

SEQ ID NO: 3600441 - RNA, 17 nt, Human
aaccgaugcuccagcca

SEQ ID NO: 3600442 - RNA, 18 nt, Human
aaccgaugcuuuaccaaa

SEQ ID NO: 3600443 - RNA, 12 nt, Human
aaccgcacagcu

SEQ ID NO: 3600444 - RNA, 14 nt, Human
aaccgcacagcuca

SEQ ID NO: 3600445 - RNA, 21 nt, Human
aaccgcaggaagcugcuccgu

SEQ ID NO: 3600446 - RNA, 16 nt, Human
aaccgccucaaaaugu

SEQ ID NO: 3600447 - RNA, 12 nt, Human
aaccgcucaccu

SEQ ID NO: 3600448 - RNA, 17 nt, Human
aaccgcuuuggccugag

SEQ ID NO: 3600449 - RNA, 18 nt, Human
aaccgcuuuggccugagu

SEQ ID NO: 3600450 - RNA, 21 nt, Human
aaccguggcccuuccuggaca

SEQ ID NO: 3600451 - RNA, 22 nt, Human
aaccguuauuauaauuguauca

SEQ ID NO: 3600452 - RNA, 17 nt, Human
aaccguuuugaagcuac

SEQ ID NO: 3600453 - RNA, 21 nt, Human
aaccuaaaauaauugguucuu

SEQ ID NO: 3600454 - RNA, 20 nt, Human
aaccuaccaccccuuccugu

SEQ ID NO: 3600455 - RNA, 21 nt, Human
aaccuaccuucauuucaggag

SEQ ID NO: 3600456 - RNA, 14 nt, Human
aaccuagagaagau

SEQ ID NO: 3600457 - RNA, 16 nt, Human
aaccuauaugauuuau

SEQ ID NO: 3600458 - RNA, 22 nt, Human
aaccuaugauauuuucugugcc

SEQ ID NO: 3600459 - RNA, 18 nt, Human
aaccuauuucucuuucuu

SEQ ID NO: 3600460 - RNA, 22 nt, Human
aaccuauuuugaaaaauuccua

SEQ ID NO: 3600461 - RNA, 15 nt, Human
aaccuauuuugaagu

SEQ ID NO: 3600462 - RNA, 17 nt, Human
aaccucaaaaugucuaa

SEQ ID NO: 3600463 - RNA, 21 nt, Human
aaccucaccccgaggcccugc

SEQ ID NO: 3600464 - RNA, 22 nt, Human
aaccucaccccgaggcccugca

SEQ ID NO: 3600465 - RNA, 19 nt, Human
aaccucacgcaccucccau

SEQ ID NO: 3600466 - RNA, 12 nt, Human
aaccucacucuu

SEQ ID NO: 3600467 - RNA, 15 nt, Human
aaccucacucuugcc

SEQ ID NO: 3600468 - RNA, 16 nt, Human
aaccucacucuugcca

SEQ ID NO: 3600469 - RNA, 17 nt, Human
aaccucacucuugccaa

SEQ ID NO: 3600470 - RNA, 12 nt, Human
aaccucagccug

SEQ ID NO: 3600471 - RNA, 16 nt, Human
aaccucagccuggcca

SEQ ID NO: 3600472 - RNA, 20 nt, Human
aaccucagccuggccagaca

SEQ ID NO: 3600473 - RNA, 14 nt, Human
aaccucagcucugg

SEQ ID NO: 3600474 - RNA, 18 nt, Human
aaccucaggcuuccuugg

SEQ ID NO: 3600475 - RNA, 17 nt, Human
aaccucagggcucccag

SEQ ID NO: 3600476 - RNA, 19 nt, Human
aaccucagggcucccaggg

SEQ ID NO: 3600477 - RNA, 21 nt, Human
aaccucauugacaagaacuga

SEQ ID NO: 3600478 - RNA, 13 nt, Human
aaccuccaccucc

SEQ ID NO: 3600479 - RNA, 11 nt, Human
aaccucccaga

SEQ ID NO: 3600480 - RNA, 13 nt, Human
aaccucccagagg

SEQ ID NO: 3600481 - RNA, 14 nt, Human
aaccuccccagccu

SEQ ID NO: 3600482 - RNA, 16 nt, Human
aaccuccccagccugc

SEQ ID NO: 3600483 - RNA, 17 nt, Human
aaccuccccagccugcg

SEQ ID NO: 3600484 - RNA, 13 nt, Human
aaccuccucugug

SEQ ID NO: 3600485 - RNA, 15 nt, Human
aaccuccucugugaa

SEQ ID NO: 3600486 - RNA, 19 nt, Human
aaccuccuuuacccucauc

SEQ ID NO: 3600487 - RNA, 18 nt, Human
aaccuccuuucucuucuc

SEQ ID NO: 3600488 - RNA, 21 nt, Human
aaccucgagguuucucaaaga

SEQ ID NO: 3600489 - RNA, 16 nt, Human
aaccucgaguacugug

SEQ ID NO: 3600490 - RNA, 17 nt, Human
aaccucgcccucuccuu

SEQ ID NO: 3600491 - RNA, 17 nt, Human
aaccucgcuccaacucc

SEQ ID NO: 3600492 - RNA, 14 nt, Human
aaccucgcuggacu

SEQ ID NO: 3600493 - RNA, 12 nt, Human
aaccucuaaauu

SEQ ID NO: 3600494 - RNA, 21 nt, Human
aaccucuaauuuauuuugucg

SEQ ID NO: 3600495 - RNA, 13 nt, Human
aaccucugucuca

SEQ ID NO: 3600496 - RNA, 15 nt, Human
aaccucuguucagug

SEQ ID NO: 3600497 - RNA, 14 nt, Human
aaccucuuccccag

SEQ ID NO: 3600498 - RNA, 21 nt, Human
aaccugaaaagauguuguguc

SEQ ID NO: 3600499 - RNA, 15 nt, Human
aaccugaaguuuuuu

SEQ ID NO: 3600500 - RNA, 11 nt, Human
aaccugacccc

SEQ ID NO: 3600501 - RNA, 19 nt, Human
aaccugaccccugcucagu

SEQ ID NO: 3600502 - RNA, 20 nt, Human
aaccugagauggcccucugg

SEQ ID NO: 3600503 - RNA, 21 nt, Human
aaccugagauggcccucuggu

SEQ ID NO: 3600504 - RNA, 20 nt, Human
aaccugagauuuauuaaaga

SEQ ID NO: 3600505 - RNA, 21 nt, Human
aaccugagauuuauuaaagaa

SEQ ID NO: 3600506 - RNA, 19 nt, Human
aaccugaugaaaauaaaga

SEQ ID NO: 3600507 - RNA, 23 nt, Human
aaccugaugaaaauaaagaaugg

SEQ ID NO: 3600508 - RNA, 17 nt, Human
aaccugauguuaaaauu

SEQ ID NO: 3600509 - RNA, 12 nt, Human
aaccugauugua

SEQ ID NO: 3600510 - RNA, 18 nt, Human
aaccugauuguaaacuuc

SEQ ID NO: 3600511 - RNA, 18 nt, Human
aaccugauugugucucuu

SEQ ID NO: 3600512 - RNA, 14 nt, Human
aaccugcaaaaaau

SEQ ID NO: 3600513 - RNA, 15 nt, Human
aaccugcucuccucu

SEQ ID NO: 3600514 - RNA, 16 nt, Human
aaccugcucuccucuu

SEQ ID NO: 3600515 - RNA, 17 nt, Human
aaccugcucuccucuuc

SEQ ID NO: 3600516 - RNA, 22 nt, Human
aaccugcuuggguggagaagcc

SEQ ID NO: 3600517 - RNA, 22 nt, Human
aaccugcuuucaagaccccugu

SEQ ID NO: 3600518 - RNA, 11 nt, Human
aaccuggagau

SEQ ID NO: 3600519 - RNA, 17 nt, Human
aaccuggagauggggag

SEQ ID NO: 3600520 - RNA, 10 nt, Human
aaccuggagg

SEQ ID NO: 3600521 - RNA, 19 nt, Human
aaccuggagggcuagaacc

SEQ ID NO: 3600522 - RNA, 22 nt, Human
aaccuggagggcuagaaucugg

SEQ ID NO: 3600523 - RNA, 11 nt, Human
aaccuggaggu

SEQ ID NO: 3600524 - RNA, 23 nt, Human
aaccuggccgcguuuagaccaag

SEQ ID NO: 3600525 - RNA, 22 nt, Human
aaccugggaggcggagaguaca

SEQ ID NO: 3600526 - RNA, 22 nt, Human
aagcagaauaaagcaauuuucc

SEQ ID NO: 3600527 - RNA, 23 nt, Human
aagcagaauaaagcaauuuuccu

SEQ ID NO: 3600528 - RNA, 12 nt, Human
aagcagacagcu

SEQ ID NO: 3600529 - RNA, 14 nt, Human
aagcagacagcucc

SEQ ID NO: 3600530 - RNA, 21 nt, Human
aagcagaccacugauaaaacc

SEQ ID NO: 3600531 - RNA, 23 nt, Human
aagcagaccauuggggcucccag

SEQ ID NO: 3600532 - RNA, 16 nt, Human
aagcagagaagcucuc

SEQ ID NO: 3600533 - RNA, 19 nt, Human
aagcagagauuuucaacau

SEQ ID NO: 3600534 - RNA, 15 nt, Human
aagcagaggaccagg

SEQ ID NO: 3600535 - RNA, 15 nt, Human
aagcagaggaggggc

SEQ ID NO: 3600536 - RNA, 18 nt, Human
aagcagaggcuggccuca

SEQ ID NO: 3600537 - RNA, 20 nt, Human
aagcagaggcuggccucaga

SEQ ID NO: 3600538 - RNA, 10 nt, Human
aagcagagug

SEQ ID NO: 3600539 - RNA, 19 nt, Human
aagcagagugcacagcugu

SEQ ID NO: 3600540 - RNA, 20 nt, Human
aagcagaguggcagucuuca

SEQ ID NO: 3600541 - RNA, 23 nt, Human
aagcagaugcaaagaggcaagag

SEQ ID NO: 3600542 - RNA, 19 nt, Human
aagcagcaacuuguccuag

SEQ ID NO: 3600543 - RNA, 22 nt, Human
aagcagcggucagcagacaagg

SEQ ID NO: 3600544 - RNA, 22 nt, Human
aagcagcguuucuaugacacau

SEQ ID NO: 3600545 - RNA, 11 nt, Human
aagcagcucuu

SEQ ID NO: 3600546 - RNA, 15 nt, Human
aagcagcuuagaguu

SEQ ID NO: 3600547 - RNA, 16 nt, Human
aagcagcuuauuguuu

SEQ ID NO: 3600548 - RNA, 16 nt, Human
aagcagcuuuaaacaa

SEQ ID NO: 3600549 - RNA, 17 nt, Human
aagcagcuuuaaacaaa

SEQ ID NO: 3600550 - RNA, 21 nt, Human
aagcagcuuuaaacaaauuca

SEQ ID NO: 3600551 - RNA, 16 nt, Human
aaccuuauccugcauu

SEQ ID NO: 3600552 - RNA, 18 nt, Human
aaccuuauccugcauugu

SEQ ID NO: 3600553 - RNA, 19 nt, Human
aaccuuauccugcauuguu

SEQ ID NO: 3600554 - RNA, 22 nt, Human
aaccuuauccugcauuguuagc

SEQ ID NO: 3600555 - RNA, 22 nt, Human
aaccuuccauacauuuuuuucu

SEQ ID NO: 3600556 - RNA, 13 nt, Human
aaccuuccaucuc

SEQ ID NO: 3600557 - RNA, 13 nt, Human
aaccuuccugucu

SEQ ID NO: 3600558 - RNA, 21 nt, Human
aaccuuccugucuucauccuu

SEQ ID NO: 3600559 - RNA, 19 nt, Human
aaccuuccuuccugcuuga

SEQ ID NO: 3600560 - RNA, 23 nt, Human
aaccuucugcccauccugucugu

SEQ ID NO: 3600561 - RNA, 13 nt, Human
aaccuugaaugcu

SEQ ID NO: 3600562 - RNA, 16 nt, Human
aaccuugaaugcugcc

SEQ ID NO: 3600563 - RNA, 17 nt, Human
aaccuugaaugcugcca

SEQ ID NO: 3600564 - RNA, 18 nt, Human
aaccuugaaugcugccag

SEQ ID NO: 3600565 - RNA, 13 nt, Human
aaccuugccuggu

SEQ ID NO: 3600566 - RNA, 13 nt, Human
aaccuugccuuuc

SEQ ID NO: 3600567 - RNA, 17 nt, Human
aaccuuggccugggccg

SEQ ID NO: 3600568 - RNA, 14 nt, Human
aaccuuguauaaau

SEQ ID NO: 3600569 - RNA, 19 nt, Human
aaccuugucucuaugccag

SEQ ID NO: 3600570 - RNA, 17 nt, Human
aaccuuguuauuucuca

SEQ ID NO: 3600571 - RNA, 15 nt, Human
aaccuuguuuuggac

SEQ ID NO: 3600572 - RNA, 23 nt, Human
aaccuuguuuuggacaguuuacc

SEQ ID NO: 3600573 - RNA, 14 nt, Human
aaccuuuagggcag

SEQ ID NO: 3600574 - RNA, 11 nt, Human
aaccuuucccc

SEQ ID NO: 3600575 - RNA, 11 nt, Human
aaccuuucccu

SEQ ID NO: 3600576 - RNA, 22 nt, Human
aaccuuucccucacccccuccc

SEQ ID NO: 3600577 - RNA, 16 nt, Human
aaccuuucuucaccaa

SEQ ID NO: 3600578 - RNA, 18 nt, Human
aaccuuucuucaccaaau

SEQ ID NO: 3600579 - RNA, 21 nt, Human
aaccuuugaguagauccauuu

SEQ ID NO: 3600580 - RNA, 18 nt, Human
aaccuuuguuugcaucug

SEQ ID NO: 3600581 - RNA, 23 nt, Human
aaccuuuugagugccuuacacaa

SEQ ID NO: 3600582 - RNA, 12 nt, Human
aaccuuuuuaaa

SEQ ID NO: 3600583 - RNA, 22 nt, Human
aaccuuuuuuaagauuuuucuc

SEQ ID NO: 3600584 - RNA, 12 nt, Human
aacgaaaagcac

SEQ ID NO: 3600585 - RNA, 16 nt, Human
aacgaaaaugaaagcu

SEQ ID NO: 3600586 - RNA, 14 nt, Human
aacgaaacacuuca

SEQ ID NO: 3600587 - RNA, 14 nt, Human
aacgaaacccacuc

SEQ ID NO: 3600588 - RNA, 14 nt, Human
aacgaaagaaggca

SEQ ID NO: 3600589 - RNA, 18 nt, Human
aacgaaccuuggccuggg

SEQ ID NO: 3600590 - RNA, 11 nt, Human
aacgaaugaag

SEQ ID NO: 3600591 - RNA, 21 nt, Human
aacgagacuuuccauuacaag

SEQ ID NO: 3600592 - RNA, 21 nt, Human
aacgagccuuuucacccuucu

SEQ ID NO: 3600593 - RNA, 15 nt, Human
aacgauccuucaaag

SEQ ID NO: 3600594 - RNA, 17 nt, Human
aacgauuuaauucucuu

SEQ ID NO: 3600595 - RNA, 18 nt, Human
aacgauuuaauucucuug

SEQ ID NO: 3600596 - RNA, 15 nt, Human
aacgauuuaauuuau

SEQ ID NO: 3600597 - RNA, 18 nt, Human
aacgcaaagggcugaaag

SEQ ID NO: 3600598 - RNA, 22 nt, Human
aacgcaaguucccaguuggagc

SEQ ID NO: 3600599 - RNA, 18 nt, Human
aacgcagaugauccauga

SEQ ID NO: 3600600 - RNA, 21 nt, Human
aacgcauggaguguguauugu

SEQ ID NO: 3600601 - RNA, 17 nt, Human
aacgcccacuucccugg

SEQ ID NO: 3600602 - RNA, 11 nt, Human
aacgccugagc

SEQ ID NO: 3600603 - RNA, 21 nt, Human
aacgccugcuugucccugccc

SEQ ID NO: 3600604 - RNA, 14 nt, Human
aacgcgcagaugug

SEQ ID NO: 3600605 - RNA, 23 nt, Human
aacgcgcagaugugcagcagauu

SEQ ID NO: 3600606 - RNA, 17 nt, Human
aacgcguugaaauugua

SEQ ID NO: 3600607 - RNA, 17 nt, Human
aacgcuaaagagcccuu

SEQ ID NO: 3600608 - RNA, 15 nt, Human
aacgcuaccucucug

SEQ ID NO: 3600609 - RNA, 14 nt, Human
aacgcuccuuugug

SEQ ID NO: 3600610 - RNA, 17 nt, Human
aacgcugagccaccugc

SEQ ID NO: 3600611 - RNA, 13 nt, Human
aacgcugccugcc

SEQ ID NO: 3600612 - RNA, 15 nt, Human
aacgcugccugcccg

SEQ ID NO: 3600613 - RNA, 14 nt, Human
aacggaccaaagca

SEQ ID NO: 3600614 - RNA, 21 nt, Human
aacggaccaaagcaagacccu

SEQ ID NO: 3600615 - RNA, 14 nt, Human
aacggagaaaggug

SEQ ID NO: 3600616 - RNA, 20 nt, Human
aacggagccccaggccucug

SEQ ID NO: 3600617 - RNA, 12 nt, Human
aacggagucaaa

SEQ ID NO: 3600618 - RNA, 18 nt, Human
aacggaucagaaauacag

SEQ ID NO: 3600619 - RNA, 16 nt, Human
aacggaugauuucuau

SEQ ID NO: 3600620 - RNA, 16 nt, Human
aacggauuauuuuuuc

SEQ ID NO: 3600621 - RNA, 17 nt, Human
aacggauuauuuuuuca

SEQ ID NO: 3600622 - RNA, 19 nt, Human
aacggauuauuuuuucaga

SEQ ID NO: 3600623 - RNA, 17 nt, Human
aacgggaacaugccccc

SEQ ID NO: 3600624 - RNA, 18 nt, Human
aacggggcucuucucauu

SEQ ID NO: 3600625 - RNA, 17 nt, Human
aacgguaaauuucugug

SEQ ID NO: 3600626 - RNA, 20 nt, Human
aacggugcugugagggaggg

SEQ ID NO: 3600627 - RNA, 14 nt, Human
aacgguucaguuuc

SEQ ID NO: 3600628 - RNA, 17 nt, Human
aacguaaccacggaaaa

SEQ ID NO: 3600629 - RNA, 15 nt, Human
aacguauaaaagccu

SEQ ID NO: 3600630 - RNA, 21 nt, Human
aacguaugcaugugaagaaag

SEQ ID NO: 3600631 - RNA, 12 nt, Human
aacgucuuaaau

SEQ ID NO: 3600632 - RNA, 15 nt, Human
aacgugauacauuug

SEQ ID NO: 3600633 - RNA, 11 nt, Human
aacgugcaacu

SEQ ID NO: 3600634 - RNA, 23 nt, Human
aacgugcauugugcuucuuucuu

SEQ ID NO: 3600635 - RNA, 20 nt, Human
aacguggagaaucacaggcu

SEQ ID NO: 3600636 - RNA, 17 nt, Human
aacguggcucugcuggc

SEQ ID NO: 3600637 - RNA, 12 nt, Human
aacguggcugcu

SEQ ID NO: 3600638 - RNA, 23 nt, Human
aacguggcugcuucaaggauccu

SEQ ID NO: 3600639 - RNA, 22 nt, Human
aacguggggcagcacagagagg

SEQ ID NO: 3600640 - RNA, 18 nt, Human
aacguuaagaauuguuaa

SEQ ID NO: 3600641 - RNA, 17 nt, Human
aacguuacucagggcuc

SEQ ID NO: 3600642 - RNA, 14 nt, Human
aacguugcuguggg

SEQ ID NO: 3600643 - RNA, 21 nt, Human
aacguuuucuaauugcuuauu

SEQ ID NO: 3600644 - RNA, 17 nt, Human
aacguuuuuccuguucu

SEQ ID NO: 3600645 - RNA, 23 nt, Human
aacguuuuuccuuuaaaaaaauu

SEQ ID NO: 3600646 - RNA, 17 nt, Human
aacuaaaacaaagccac

SEQ ID NO: 3600647 - RNA, 17 nt, Human
aacuaaaauaauuuugu

SEQ ID NO: 3600648 - RNA, 19 nt, Human
aacuaaacuaguuuuuccu

SEQ ID NO: 3600649 - RNA, 18 nt, Human
aacuaaacucauuuauaa

SEQ ID NO: 3600650 - RNA, 16 nt, Human
aacuaaacucucuuug

SEQ ID NO: 3600651 - RNA, 13 nt, Human
aacuaaacuuuca

SEQ ID NO: 3600652 - RNA, 15 nt, Human
aacuaaacuuucaca

SEQ ID NO: 3600653 - RNA, 19 nt, Human
aacuaaagaagaucuguaa

SEQ ID NO: 3600654 - RNA, 15 nt, Human
aacuaaaguuguacu

SEQ ID NO: 3600655 - RNA, 17 nt, Human
aacuaaaguuguacuuu

SEQ ID NO: 3600656 - RNA, 21 nt, Human
aacuaaaugugcaauagaagg

SEQ ID NO: 3600657 - RNA, 13 nt, Human
aacuaaauuucac

SEQ ID NO: 3600658 - RNA, 22 nt, Human
aacuaaauuucacuacuagauu

SEQ ID NO: 3600659 - RNA, 17 nt, Human
aacuaaauuugauacuu

SEQ ID NO: 3600660 - RNA, 19 nt, Human
aacuaaauuugauacuuau

SEQ ID NO: 3600661 - RNA, 18 nt, Human
aacuaacaggcuuaguga

SEQ ID NO: 3600662 - RNA, 18 nt, Human
aacuaagaaacuuuugua

SEQ ID NO: 3600663 - RNA, 23 nt, Human
aacuaagcagucccugagaccau

SEQ ID NO: 3600664 - RNA, 15 nt, Human
aacuaaggugcuaaa

SEQ ID NO: 3600665 - RNA, 10 nt, Human
aacuaauaaa

SEQ ID NO: 3600666 - RNA, 11 nt, Human
aacuaauaaaa

SEQ ID NO: 3600667 - RNA, 18 nt, Human
aacuaauugacuuuagaa

SEQ ID NO: 3600668 - RNA, 20 nt, Human
aacuaauugacuuuagaaag

SEQ ID NO: 3600669 - RNA, 15 nt, Human
aacuaauuuaguaau

SEQ ID NO: 3600670 - RNA, 23 nt, Human
aacuaauuuuuauuuuugcugag

SEQ ID NO: 3600671 - RNA, 18 nt, Human
aacuacaaagguuuaaau

SEQ ID NO: 3600672 - RNA, 20 nt, Human
aacuacaaagguuuaaauga

SEQ ID NO: 3600673 - RNA, 20 nt, Human
aacuacaaccaauggaaugu

SEQ ID NO: 3600674 - RNA, 13 nt, Human
aacuacaugagaa

SEQ ID NO: 3600675 - RNA, 12 nt, Human
aacuacauuuua

SEQ ID NO: 3600676 - RNA, 17 nt, Human
aacuaccaccugacauu

SEQ ID NO: 3600677 - RNA, 21 nt, Human
aacuacccaaaacaagccugg

SEQ ID NO: 3600678 - RNA, 21 nt, Human
aacuaccuguauuuaaaaaua

SEQ ID NO: 3600679 - RNA, 23 nt, Human
aacuaccuguauuuaaaaauaga

SEQ ID NO: 3600680 - RNA, 15 nt, Human
aacuacuauucaaaa

SEQ ID NO: 3600681 - RNA, 21 nt, Human
aagcacugaccugucaugccc

SEQ ID NO: 3600682 - RNA, 19 nt, Human
aagcacugacuucuaagua

SEQ ID NO: 3600683 - RNA, 19 nt, Human
aagcacugcuaggcgagug

SEQ ID NO: 3600684 - RNA, 23 nt, Human
aagcacugcuaggcgagugccag

SEQ ID NO: 3600685 - RNA, 15 nt, Human
aagcacugugcucag

SEQ ID NO: 3600686 - RNA, 18 nt, Human
aagcacuuugggauucuu

SEQ ID NO: 3600687 - RNA, 13 nt, Human
aagcagaaaauac

SEQ ID NO: 3600688 - RNA, 18 nt, Human
aagcagaaagugccuuuc

SEQ ID NO: 3600689 - RNA, 14 nt, Human
aagcagaauaaagc

SEQ ID NO: 3600690 - RNA, 15 nt, Human
aagcagaauaaagca

SEQ ID NO: 3600691 - RNA, 18 nt, Human
aagcagaauaaagcaauu

SEQ ID NO: 3600692 - RNA, 21 nt, Human
aagcagaauaguauuuuuaua

SEQ ID NO: 3600693 - RNA, 19 nt, Human
aagcagaauuggaaaagac

SEQ ID NO: 3600694 - RNA, 21 nt, Human
aagcagaauuggaaaagacua

SEQ ID NO: 3600695 - RNA, 21 nt, Human
aagcagaggaaggagaggaga

SEQ ID NO: 3600696 - RNA, 18 nt, Human
aagcagaggaccagggcc

SEQ ID NO: 3600697 - RNA, 13 nt, Human
aagcagaggcugg

SEQ ID NO: 3600698 - RNA, 18 nt, Human
aagcagagugcacagcug

SEQ ID NO: 3600699 - RNA, 21 nt, Human
aagcagagugcacagcugucc

SEQ ID NO: 3600700 - RNA, 17 nt, Human
aagcagauggaaugcug

SEQ ID NO: 3600701 - RNA, 19 nt, Human
aagcagauggaaugcugug

SEQ ID NO: 3600702 - RNA, 21 nt, Human
aagcagcagccucgccccugg

SEQ ID NO: 3600703 - RNA, 14 nt, Human
aagcagccaagcuc

SEQ ID NO: 3600704 - RNA, 16 nt, Human
aagcagccagccguga

SEQ ID NO: 3600705 - RNA, 16 nt, Human
aagcagccucucccca

SEQ ID NO: 3600706 - RNA, 17 nt, Human
aagcagccucuccccag

SEQ ID NO: 3600707 - RNA, 20 nt, Human
aagcagcgaccgcccccucc

SEQ ID NO: 3600708 - RNA, 14 nt, Human
aagcagcguuucua

SEQ ID NO: 3600709 - RNA, 17 nt, Human
aagcagcguuucuauga

SEQ ID NO: 3600710 - RNA, 16 nt, Human
aagcagcuaaauuuuc

SEQ ID NO: 3600711 - RNA, 16 nt, Human
aagcagcucaaaggca

SEQ ID NO: 3600712 - RNA, 18 nt, Human
aagcagcucaaaggcaca

SEQ ID NO: 3600713 - RNA, 17 nt, Human
aagcagcucuccccuca

SEQ ID NO: 3600714 - RNA, 22 nt, Human
aagcaggaaaugaaaaugucuu

SEQ ID NO: 3600715 - RNA, 12 nt, Human
aagcaggaagcu

SEQ ID NO: 3600716 - RNA, 11 nt, Human
aagcaggaggc

SEQ ID NO: 3600717 - RNA, 23 nt, Human
aagcaggcgcaagggaggcccag

SEQ ID NO: 3600718 - RNA, 18 nt, Human
aagcaggcgcugugcuau

SEQ ID NO: 3600719 - RNA, 16 nt, Human
aagcaggcuacacuga

SEQ ID NO: 3600720 - RNA, 15 nt, Human
aagcaggcuggaggu

SEQ ID NO: 3600721 - RNA, 18 nt, Human
aagcaggcuucuaugaaa

SEQ ID NO: 3600722 - RNA, 16 nt, Human
aagcagggaauuucua

SEQ ID NO: 3600723 - RNA, 18 nt, Human
aagcaggggaguaugcaa

SEQ ID NO: 3600724 - RNA, 22 nt, Human
aagcagguggaucuauuucaug

SEQ ID NO: 3600725 - RNA, 21 nt, Human
aagcagguuaaauguuuugua

SEQ ID NO: 3600726 - RNA, 18 nt, Human
aagcagguucccaagcuc

SEQ ID NO: 3600727 - RNA, 16 nt, Human
aagcagguuuuucucc

SEQ ID NO: 3600728 - RNA, 22 nt, Human
aagcaguaaaaacuguucucua

SEQ ID NO: 3600729 - RNA, 22 nt, Human
aagcaguagaaauaauaugcau

SEQ ID NO: 3600730 - RNA, 14 nt, Human
aagcaguagacaag

SEQ ID NO: 3600731 - RNA, 17 nt, Human
aagcaguauuuuucuug

SEQ ID NO: 3600732 - RNA, 18 nt, Human
aagcaguauuuuucuuga

SEQ ID NO: 3600733 - RNA, 16 nt, Human
aagcagucacuuuucc

SEQ ID NO: 3600734 - RNA, 13 nt, Human
aagcagugcccag

SEQ ID NO: 3600735 - RNA, 15 nt, Human
aagcagugcccaggu

SEQ ID NO: 3600736 - RNA, 18 nt, Human
aagcagugccuuccauaa

SEQ ID NO: 3600737 - RNA, 17 nt, Human
aagcaguggacaccagg

SEQ ID NO: 3600738 - RNA, 18 nt, Human
aagcaguggagcccagga

SEQ ID NO: 3600739 - RNA, 12 nt, Human
aagcaguuucaa

SEQ ID NO: 3600740 - RNA, 19 nt, Human
aagcaguuucaauaaaguu

SEQ ID NO: 3600741 - RNA, 22 nt, Human
aagcauaaaugcaaacacacaa

SEQ ID NO: 3600742 - RNA, 22 nt, Human
aagcauacaugcaaaaagaaau

SEQ ID NO: 3600743 - RNA, 17 nt, Human
aagcauacuuuguaaau

SEQ ID NO: 3600744 - RNA, 20 nt, Human
aagcauagauaauauuguuu

SEQ ID NO: 3600745 - RNA, 15 nt, Human
aagcauagauguuuu

SEQ ID NO: 3600746 - RNA, 15 nt, Human
aagcauauagagaug

SEQ ID NO: 3600747 - RNA, 21 nt, Human
aagcauauggguuagauguug

SEQ ID NO: 3600748 - RNA, 14 nt, Human
aagcaucaaacucu

SEQ ID NO: 3600749 - RNA, 15 nt, Human
aagcaucaaacucuu

SEQ ID NO: 3600750 - RNA, 14 nt, Human
aagcaucacaaaug

SEQ ID NO: 3600751 - RNA, 15 nt, Human
aagcaucacaaauga

SEQ ID NO: 3600752 - RNA, 18 nt, Human
aagcaucaccucaggcca

SEQ ID NO: 3600753 - RNA, 19 nt, Human
aagcaucaccucaggccag

SEQ ID NO: 3600754 - RNA, 13 nt, Human
aagcaucagaaag

SEQ ID NO: 3600755 - RNA, 19 nt, Human
aagcaucaguucuacggau

SEQ ID NO: 3600756 - RNA, 14 nt, Human
aagcaucauuauuu

SEQ ID NO: 3600757 - RNA, 12 nt, Human
aagcauccaugu

SEQ ID NO: 3600758 - RNA, 20 nt, Human
aagcauccauguguggacuc

SEQ ID NO: 3600759 - RNA, 13 nt, Human
aagcaucccucac

SEQ ID NO: 3600760 - RNA, 17 nt, Human
aagcaucuaaacuuuaa

SEQ ID NO: 3600761 - RNA, 17 nt, Human
aagcaucuaaggacaag

SEQ ID NO: 3600762 - RNA, 13 nt, Human
aagcaucuaaguu

SEQ ID NO: 3600763 - RNA, 12 nt, Human
aagcaucuacuu

SEQ ID NO: 3600764 - RNA, 14 nt, Human
aagcaucuugcauu

SEQ ID NO: 3600765 - RNA, 16 nt, Human
aagcaugaaaugugaa

SEQ ID NO: 3600766 - RNA, 17 nt, Human
aagcaugaaaugugaau

SEQ ID NO: 3600767 - RNA, 12 nt, Human
aagcaugaacag

SEQ ID NO: 3600768 - RNA, 13 nt, Human
aagcaugcauucu

SEQ ID NO: 3600769 - RNA, 16 nt, Human
aagcaugccaauuucu

SEQ ID NO: 3600770 - RNA, 11 nt, Human
aagcauggacu

SEQ ID NO: 3600771 - RNA, 23 nt, Human
aagcauggcuugaauaaggaaau

SEQ ID NO: 3600772 - RNA, 17 nt, Human
aagcauggucccacauc

SEQ ID NO: 3600773 - RNA, 22 nt, Human
aagcauggucccacaucccugg

SEQ ID NO: 3600774 - RNA, 16 nt, Human
aagcauguacaguguu

SEQ ID NO: 3600775 - RNA, 12 nt, Human
aagcaugugaga

SEQ ID NO: 3600776 - RNA, 13 nt, Human
aagcauguggcau

SEQ ID NO: 3600777 - RNA, 12 nt, Human
aagcauguuuca

SEQ ID NO: 3600778 - RNA, 15 nt, Human
aagcauguuucaugu

SEQ ID NO: 3600779 - RNA, 14 nt, Human
aagcauguuuugca

SEQ ID NO: 3600780 - RNA, 18 nt, Human
aagcauuaacuucucugg

SEQ ID NO: 3600781 - RNA, 18 nt, Human
aagcauuaagaacacuuu

SEQ ID NO: 3600782 - RNA, 19 nt, Human
aagcauuaccacucaggca

SEQ ID NO: 3600783 - RNA, 21 nt, Human
aagcauuacucuuguaagauu

SEQ ID NO: 3600784 - RNA, 12 nt, Human
aagcauucacaa

SEQ ID NO: 3600785 - RNA, 13 nt, Human
aagcauucacaac

SEQ ID NO: 3600786 - RNA, 20 nt, Human
aagcauuccuucuuugauaa

SEQ ID NO: 3600787 - RNA, 22 nt, Human
aagcauuccuucuuugauaaug

SEQ ID NO: 3600788 - RNA, 23 nt, Human
aagcauuccuucuuugauaaugu

SEQ ID NO: 3600789 - RNA, 23 nt, Human
aagcauucuccccaguguauguc

SEQ ID NO: 3600790 - RNA, 13 nt, Human
aagcauucugucu

SEQ ID NO: 3600791 - RNA, 14 nt, Human
aagcauugaaauua

SEQ ID NO: 3600792 - RNA, 17 nt, Human
aagcauugaaauuauag

SEQ ID NO: 3600793 - RNA, 21 nt, Human
aagcauugcuguuaugucugu

SEQ ID NO: 3600794 - RNA, 22 nt, Human
aagcauugcuuuuauuuugaaa

SEQ ID NO: 3600795 - RNA, 15 nt, Human
aagcauuguaaaaua

SEQ ID NO: 3600796 - RNA, 17 nt, Human
aagcauuguaaaauaau

SEQ ID NO: 3600797 - RNA, 13 nt, Human
aagcauugugagu

SEQ ID NO: 3600798 - RNA, 20 nt, Human
aagcauuguuugcuuauugu

SEQ ID NO: 3600799 - RNA, 22 nt, Human
aagcauuuaaccccccuguaca

SEQ ID NO: 3600800 - RNA, 23 nt, Human
aagcauuuaaccccccuguacac

SEQ ID NO: 3600801 - RNA, 14 nt, Human
aagcauuuaggaau

SEQ ID NO: 3600802 - RNA, 12 nt, Human
aagcauuugaau

SEQ ID NO: 3600803 - RNA, 14 nt, Human
aagcauuuguauuu

SEQ ID NO: 3600804 - RNA, 19 nt, Human
aagcauuuguauuuugugu

SEQ ID NO: 3600805 - RNA, 19 nt, Human
aagcauuuguuucuacuuu

SEQ ID NO: 3600806 - RNA, 12 nt, Human
aagcauuuuaua

SEQ ID NO: 3600807 - RNA, 15 nt, Human
aagcauuuuauaaau

SEQ ID NO: 3600808 - RNA, 13 nt, Human
aagcauuuuguaa

SEQ ID NO: 3600809 - RNA, 23 nt, Human
aagcauuuuguaaguugaagcaa

SEQ ID NO: 3600810 - RNA, 22 nt, Human
aagccaaaaaccuuagcucccu

SEQ ID NO: 3600811 - RNA, 16 nt, Human
aagccaaaacugagca

SEQ ID NO: 3600812 - RNA, 17 nt, Human
aagccaaaauuaaggug

SEQ ID NO: 3600813 - RNA, 14 nt, Human
aagccaaacucugc

SEQ ID NO: 3600814 - RNA, 16 nt, Human
aagccaaacucugcca

SEQ ID NO: 3600815 - RNA, 20 nt, Human
aagccaaacucugccagcca

SEQ ID NO: 3600816 - RNA, 13 nt, Human
aagccaaagaaaa

SEQ ID NO: 3600817 - RNA, 17 nt, Human
aagccaaagcuaggccu

SEQ ID NO: 3600818 - RNA, 18 nt, Human
aagccaaagcuaggccug

SEQ ID NO: 3600819 - RNA, 17 nt, Human
aagccaaaucaaaauau

SEQ ID NO: 3600820 - RNA, 14 nt, Human
aagccaaauuuauc

SEQ ID NO: 3600821 - RNA, 16 nt, Human
aagccaaauuuaucaa

SEQ ID NO: 3600822 - RNA, 16 nt, Human
aagccaacgacaaagc

SEQ ID NO: 3600823 - RNA, 19 nt, Human
aagccaacuuguaaauaca

SEQ ID NO: 3600824 - RNA, 14 nt, Human
aagccaagaaagau

SEQ ID NO: 3600825 - RNA, 22 nt, Human
aagccaagaggcugcagccagg

SEQ ID NO: 3600826 - RNA, 16 nt, Human
aagccaagcagccaag

SEQ ID NO: 3600827 - RNA, 13 nt, Human
aagccaagggccu

SEQ ID NO: 3600828 - RNA, 19 nt, Human
aagccaaguggggugcugg

SEQ ID NO: 3600829 - RNA, 20 nt, Human
aagccaauaacacacagcua

SEQ ID NO: 3600830 - RNA, 14 nt, Human
aagccaauccccuc

SEQ ID NO: 3600831 - RNA, 15 nt, Human
aagccaauccccucc

SEQ ID NO: 3600832 - RNA, 23 nt, Human
aagccagcaccggaccagccugg

SEQ ID NO: 3600833 - RNA, 23 nt, Human
aagccagcaggcucucaggccag

SEQ ID NO: 3600834 - RNA, 20 nt, Human
aagccagccaagcuuuaaau

SEQ ID NO: 3600835 - RNA, 19 nt, Human
aagccagccugaccuuccu

SEQ ID NO: 3600836 - RNA, 19 nt, Human
aagccagcguccuccucug

SEQ ID NO: 3600837 - RNA, 21 nt, Human
aagccagcugcccccagagcc

SEQ ID NO: 3600838 - RNA, 15 nt, Human
aagccagcugcccua

SEQ ID NO: 3600839 - RNA, 16 nt, Human
aagccagcugcccuau

SEQ ID NO: 3600840 - RNA, 15 nt, Human
aagccagcugccgac

SEQ ID NO: 3600841 - RNA, 23 nt, Human
aagccagcuuguuuacaugcuua

SEQ ID NO: 3600842 - RNA, 19 nt, Human
aacuacugaaugaagcagu

SEQ ID NO: 3600843 - RNA, 20 nt, Human
aacuacugcaccauuuaaaa

SEQ ID NO: 3600844 - RNA, 20 nt, Human
aacuacugccuuuagaaaau

SEQ ID NO: 3600845 - RNA, 14 nt, Human
aacuacuguguuau

SEQ ID NO: 3600846 - RNA, 14 nt, Human
aacuacuguguucc

SEQ ID NO: 3600847 - RNA, 15 nt, Human
aacuacuguguuccu

SEQ ID NO: 3600848 - RNA, 19 nt, Human
aacuacuuugcugcuaaua

SEQ ID NO: 3600849 - RNA, 22 nt, Human
aacuagaauuuauucaauuccu

SEQ ID NO: 3600850 - RNA, 16 nt, Human
aacuagaauuugauua

SEQ ID NO: 3600851 - RNA, 20 nt, Human
aacuagacaccaaaguucua

SEQ ID NO: 3600852 - RNA, 16 nt, Human
aacuagagcagcccug

SEQ ID NO: 3600853 - RNA, 23 nt, Human
aacuagagcagcccuggagucau

SEQ ID NO: 3600854 - RNA, 22 nt, Human
aacuagaggugagaaauuuaaa

SEQ ID NO: 3600855 - RNA, 18 nt, Human
aacuagagguuuuaugau

SEQ ID NO: 3600856 - RNA, 20 nt, Human
aacuagagguuuuaugauau

SEQ ID NO: 3600857 - RNA, 22 nt, Human
aacuagagguuuuaugauauuu

SEQ ID NO: 3600858 - RNA, 17 nt, Human
aacuagaugaccucauu

SEQ ID NO: 3600859 - RNA, 20 nt, Human
aacuagauuacauucaguug

SEQ ID NO: 3600860 - RNA, 21 nt, Human
aacuagccaaaccaggacccu

SEQ ID NO: 3600861 - RNA, 12 nt, Human
aacuagcuggaa

SEQ ID NO: 3600862 - RNA, 22 nt, Human
aacuaggagcuuugacucagga

SEQ ID NO: 3600863 - RNA, 23 nt, Human
aacuaggagcuuugacucaggag

SEQ ID NO: 3600864 - RNA, 17 nt, Human
aacuaggcauuuguaaa

SEQ ID NO: 3600865 - RNA, 18 nt, Human
aacuaggcauuuguaaau

SEQ ID NO: 3600866 - RNA, 15 nt, Human
aacuaggcuccuuca

SEQ ID NO: 3600867 - RNA, 17 nt, Human
aacuagggccaagccca

SEQ ID NO: 3600868 - RNA, 21 nt, Human
aacuaggugcauauuuauaaa

SEQ ID NO: 3600869 - RNA, 16 nt, Human
aacuauaaauauguac

SEQ ID NO: 3600870 - RNA, 16 nt, Human
aacuauacuugaacaa

SEQ ID NO: 3600871 - RNA, 18 nt, Human
aacuauacuugaacaaaa

SEQ ID NO: 3600872 - RNA, 13 nt, Human
aacuauauuguuu

SEQ ID NO: 3600873 - RNA, 13 nt, Human
aacuauauuuucu

SEQ ID NO: 3600874 - RNA, 17 nt, Human
aacuauauuuugucaua

SEQ ID NO: 3600875 - RNA, 13 nt, Human
aacuaucuucauc

SEQ ID NO: 3600876 - RNA, 23 nt, Human
aacuaugagcuugcucauuaauu

SEQ ID NO: 3600877 - RNA, 18 nt, Human
aacuaugauaugguaaaa

SEQ ID NO: 3600878 - RNA, 16 nt, Human
aacuaugauuauuaac

SEQ ID NO: 3600879 - RNA, 16 nt, Human
aacuaugauuuggaaa

SEQ ID NO: 3600880 - RNA, 19 nt, Human
aacuauguacaauauuuua

SEQ ID NO: 3600881 - RNA, 20 nt, Human
aacuauguacaauauuuuaa

SEQ ID NO: 3600882 - RNA, 13 nt, Human
aacuauguugaua

SEQ ID NO: 3600883 - RNA, 18 nt, Human
aacuauguuuaaaguaau

SEQ ID NO: 3600884 - RNA, 16 nt, Human
aacuauucaguugugu

SEQ ID NO: 3600885 - RNA, 21 nt, Human
aacuauucaguuguguuuguu

SEQ ID NO: 3600886 - RNA, 21 nt, Human
aacuauugcauuuauauguac

SEQ ID NO: 3600887 - RNA, 15 nt, Human
aacuauuggaaagua

SEQ ID NO: 3600888 - RNA, 21 nt, Human
aacuauugugcucagagacac

SEQ ID NO: 3600889 - RNA, 16 nt, Human
aacuauuuaacuugag

SEQ ID NO: 3600890 - RNA, 21 nt, Human
aacuauuuauugacucugggu

SEQ ID NO: 3600891 - RNA, 18 nt, Human
aacuauuuucaaagacuu

SEQ ID NO: 3600892 - RNA, 12 nt, Human
aacuauuuucag

SEQ ID NO: 3600893 - RNA, 13 nt, Human
aacuauuuucaga

SEQ ID NO: 3600894 - RNA, 16 nt, Human
aacuauuuucagaugu

SEQ ID NO: 3600895 - RNA, 19 nt, Human
aacucaaaacuuaacauau

SEQ ID NO: 3600896 - RNA, 18 nt, Human
aacucaaauggggccaga

SEQ ID NO: 3600897 - RNA, 19 nt, Human
aacucaaccaaaugguaca

SEQ ID NO: 3600898 - RNA, 21 nt, Human
aacucaacugggcucuguccc

SEQ ID NO: 3600899 - RNA, 14 nt, Human
aacucaauauuuuc

SEQ ID NO: 3600900 - RNA, 21 nt, Human
aacucaauauuuuccaugaaa

SEQ ID NO: 3600901 - RNA, 15 nt, Human
aacucaccauguaaa

SEQ ID NO: 3600902 - RNA, 15 nt, Human
aacucaccccagccc

SEQ ID NO: 3600903 - RNA, 16 nt, Human
aacucaccccagcccc

SEQ ID NO: 3600904 - RNA, 18 nt, Human
aacucaccccagccccaa

SEQ ID NO: 3600905 - RNA, 14 nt, Human
aacucaccuaacuc

SEQ ID NO: 3600906 - RNA, 16 nt, Human
aacucaccugccccuc

SEQ ID NO: 3600907 - RNA, 21 nt, Human
aacucaccugcuggccccuca

SEQ ID NO: 3600908 - RNA, 22 nt, Human
aacucacucaguuuaugcugug

SEQ ID NO: 3600909 - RNA, 16 nt, Human
aacucacuccuuuuaa

SEQ ID NO: 3600910 - RNA, 12 nt, Human
aacucacucugg

SEQ ID NO: 3600911 - RNA, 18 nt, Human
aacucagaauuauuuuua

SEQ ID NO: 3600912 - RNA, 14 nt, Human
aacucagagccucc

SEQ ID NO: 3600913 - RNA, 18 nt, Human
aacucagaucacuacugc

SEQ ID NO: 3600914 - RNA, 13 nt, Human
aacucagauccag

SEQ ID NO: 3600915 - RNA, 14 nt, Human
aacucagauccagg

SEQ ID NO: 3600916 - RNA, 15 nt, Human
aacucagauccaggg

SEQ ID NO: 3600917 - RNA, 13 nt, Human
aacucagaucugu

SEQ ID NO: 3600918 - RNA, 12 nt, Human
aacucagccaag

SEQ ID NO: 3600919 - RNA, 15 nt, Human
aacucagccaagcac

SEQ ID NO: 3600920 - RNA, 18 nt, Human
aacucagccaagcacagu

SEQ ID NO: 3600921 - RNA, 20 nt, Human
aacucagccaagcacagugg

SEQ ID NO: 3600922 - RNA, 16 nt, Human
aacucagccugggaca

SEQ ID NO: 3600923 - RNA, 16 nt, Human
aacucaggacuccagc

SEQ ID NO: 3600924 - RNA, 14 nt, Human
aacucaggcaaaga

SEQ ID NO: 3600925 - RNA, 15 nt, Human
aacucaggcaaagaa

SEQ ID NO: 3600926 - RNA, 17 nt, Human
aacucagggacagagcc

SEQ ID NO: 3600927 - RNA, 20 nt, Human
aacucaguccuguacucugg

SEQ ID NO: 3600928 - RNA, 15 nt, Human
aacucaguuuuaacu

SEQ ID NO: 3600929 - RNA, 23 nt, Human
aacucauacugugcuggagccac

SEQ ID NO: 3600930 - RNA, 15 nt, Human
aacucaucauaaaau

SEQ ID NO: 3600931 - RNA, 21 nt, Human
aacucaucccuaaugcugcag

SEQ ID NO: 3600932 - RNA, 22 nt, Human
aacucaucccuaaugcugcaga

SEQ ID NO: 3600933 - RNA, 17 nt, Human
aacucaucugucaccaa

SEQ ID NO: 3600934 - RNA, 21 nt, Human
aacucauuccagaucccaggc

SEQ ID NO: 3600935 - RNA, 15 nt, Human
aacucauuccugccu

SEQ ID NO: 3600936 - RNA, 21 nt, Human
aacucauuccugccugucucc

SEQ ID NO: 3600937 - RNA, 22 nt, Human
aacucauuccugccugucuccu

SEQ ID NO: 3600938 - RNA, 17 nt, Human
aacucauuuuugccaua

SEQ ID NO: 3600939 - RNA, 19 nt, Human
aacucauuuuugccauaca

SEQ ID NO: 3600940 - RNA, 21 nt, Human
aacucauuuuuguuuucauua

SEQ ID NO: 3600941 - RNA, 16 nt, Human
aacuccaacauccacu

SEQ ID NO: 3600942 - RNA, 14 nt, Human
aacuccacaucugc

SEQ ID NO: 3600943 - RNA, 12 nt, Human
aacuccaugaug

SEQ ID NO: 3600944 - RNA, 19 nt, Human
aacucccugccccccagcc

SEQ ID NO: 3600945 - RNA, 14 nt, Human
aacucccuuucaac

SEQ ID NO: 3600946 - RNA, 17 nt, Human
aacuccgagugaacugg

SEQ ID NO: 3600947 - RNA, 15 nt, Human
aacuccgcccccagc

SEQ ID NO: 3600948 - RNA, 19 nt, Human
aacuccuaguucuagaaaa

SEQ ID NO: 3600949 - RNA, 21 nt, Human
aacuccuaguucuagaaaaac

SEQ ID NO: 3600950 - RNA, 12 nt, Human
aacuccucccau

SEQ ID NO: 3600951 - RNA, 23 nt, Human
aacuccugacgucugaagcuuga

SEQ ID NO: 3600952 - RNA, 18 nt, Human
aacuccugagaaauguua

SEQ ID NO: 3600953 - RNA, 18 nt, Human
aacuccugccccuguucu

SEQ ID NO: 3600954 - RNA, 18 nt, Human
aacuccuggaaauaucag

SEQ ID NO: 3600955 - RNA, 12 nt, Human
aacuccuggccu

SEQ ID NO: 3600956 - RNA, 17 nt, Human
aacuccuuccuggccug

SEQ ID NO: 3600957 - RNA, 20 nt, Human
aacuccuuccuggccugaga

SEQ ID NO: 3600958 - RNA, 12 nt, Human
aacuccuuggcc

SEQ ID NO: 3600959 - RNA, 15 nt, Human
aacucgaaucugugu

SEQ ID NO: 3600960 - RNA, 16 nt, Human
aacucgaaucugugug

SEQ ID NO: 3600961 - RNA, 16 nt, Human
aacucgguguccccac

SEQ ID NO: 3600962 - RNA, 18 nt, Human
aacucgguguccccacca

SEQ ID NO: 3600963 - RNA, 21 nt, Human
aacucguauagcaugcaucug

SEQ ID NO: 3600964 - RNA, 18 nt, Human
aacucguuaauuuguagu

SEQ ID NO: 3600965 - RNA, 15 nt, Human
aacucguuuuuuaca

SEQ ID NO: 3600966 - RNA, 19 nt, Human
aacucuaaaagauccuuuu

SEQ ID NO: 3600967 - RNA, 22 nt, Human
aacucuaauucccauuuugcaa

SEQ ID NO: 3600968 - RNA, 19 nt, Human
aacucuagcuggggguggg

SEQ ID NO: 3600969 - RNA, 15 nt, Human
aacucuccagugccu

SEQ ID NO: 3600970 - RNA, 17 nt, Human
aacucuccucugcugcu

SEQ ID NO: 3600971 - RNA, 12 nt, Human
aacucucuccac

SEQ ID NO: 3600972 - RNA, 16 nt, Human
aacucugaacuuugga

SEQ ID NO: 3600973 - RNA, 16 nt, Human
aacucugaauuuaucu

SEQ ID NO: 3600974 - RNA, 16 nt, Human
aacucugacaacagac

SEQ ID NO: 3600975 - RNA, 20 nt, Human
aacucugacaacagacuucu

SEQ ID NO: 3600976 - RNA, 12 nt, Human
aacucugagccc

SEQ ID NO: 3600977 - RNA, 14 nt, Human
aacucugagcccau

SEQ ID NO: 3600978 - RNA, 22 nt, Human
aacucugauguaaaugaaguaa

SEQ ID NO: 3600979 - RNA, 18 nt, Human
aacucugcaugguccccu

SEQ ID NO: 3600980 - RNA, 14 nt, Human
aacucugccagcca

SEQ ID NO: 3600981 - RNA, 22 nt, Human
aacucugcugucuaaccuguga

SEQ ID NO: 3600982 - RNA, 16 nt, Human
aacucugcuugauuuu

SEQ ID NO: 3600983 - RNA, 22 nt, Human
aacucugggcugcuacccagaa

SEQ ID NO: 3600984 - RNA, 13 nt, Human
aacucuguaauuc

SEQ ID NO: 3600985 - RNA, 22 nt, Human
aacucuguuacacuuuuuggaa

SEQ ID NO: 3600986 - RNA, 17 nt, Human
aacucuuagaaaugaag

SEQ ID NO: 3600987 - RNA, 11 nt, Human
aagucaugagc

SEQ ID NO: 3600988 - RNA, 13 nt, Human
aagucaugauguu

SEQ ID NO: 3600989 - RNA, 18 nt, Human
aagucaugauguuuuuaa

SEQ ID NO: 3600990 - RNA, 23 nt, Human
aagucaugauguuuuuaaaaucu

SEQ ID NO: 3600991 - RNA, 19 nt, Human
aagucaugcuccccugugc

SEQ ID NO: 3600992 - RNA, 14 nt, Human
aagucaugugcauu

SEQ ID NO: 3600993 - RNA, 14 nt, Human
aagucauuaaacug

SEQ ID NO: 3600994 - RNA, 16 nt, Human
aagucauuaaacuggu

SEQ ID NO: 3600995 - RNA, 17 nt, Human
aagucauuaaacugguu

SEQ ID NO: 3600996 - RNA, 13 nt, Human
aagucauuggcuu

SEQ ID NO: 3600997 - RNA, 20 nt, Human
aagucauuggcuuuauccuc

SEQ ID NO: 3600998 - RNA, 17 nt, Human
aaguccaagcauaccaa

SEQ ID NO: 3600999 - RNA, 14 nt, Human
aaguccaauaagac

SEQ ID NO: 3601000 - RNA, 19 nt, Human
aaguccagauuuacacugg

SEQ ID NO: 3601001 - RNA, 22 nt, Human
aaguccagauuuacacugggag

SEQ ID NO: 3601002 - RNA, 15 nt, Human
aaguccagguccugg

SEQ ID NO: 3601003 - RNA, 23 nt, Human
aagucccaccgguugcuucuggg

SEQ ID NO: 3601004 - RNA, 22 nt, Human
aagucccccaagaccuaagggu

SEQ ID NO: 3601005 - RNA, 21 nt, Human
aaguccccgaguuuccccaga

SEQ ID NO: 3601006 - RNA, 14 nt, Human
aagucccugccccc

SEQ ID NO: 3601007 - RNA, 17 nt, Human
aagucccugcccccucc

SEQ ID NO: 3601008 - RNA, 19 nt, Human
aaguccuacuuuuaaagaa

SEQ ID NO: 3601009 - RNA, 15 nt, Human
aaguccuauggaaac

SEQ ID NO: 3601010 - RNA, 16 nt, Human
aaguccuauggaaacc

SEQ ID NO: 3601011 - RNA, 23 nt, Human
aaguccucccugacuuuucugug

SEQ ID NO: 3601012 - RNA, 22 nt, Human
aaguccucuuuucugagaggac

SEQ ID NO: 3601013 - RNA, 18 nt, Human
aaguccuuaccucuuccg

SEQ ID NO: 3601014 - RNA, 16 nt, Human
aaguccuuuaugugga

SEQ ID NO: 3601015 - RNA, 15 nt, Human
aaguccuuuuguaaa

SEQ ID NO: 3601016 - RNA, 15 nt, Human
aagucgaauuaauag

SEQ ID NO: 3601017 - RNA, 14 nt, Human
aagucgguuagugg

SEQ ID NO: 3601018 - RNA, 22 nt, Human
aagucguccuuacuccuguggg

SEQ ID NO: 3601019 - RNA, 17 nt, Human
aagucuaaauauuuccu

SEQ ID NO: 3601020 - RNA, 18 nt, Human
aagucuaucugguauuaa

SEQ ID NO: 3601021 - RNA, 17 nt, Human
aagucucaaugaaauag

SEQ ID NO: 3601022 - RNA, 19 nt, Human
aagucucagcuaagcucac

SEQ ID NO: 3601023 - RNA, 14 nt, Human
aagucuccaaaguc

SEQ ID NO: 3601024 - RNA, 15 nt, Human
aagucuccagcccac

SEQ ID NO: 3601025 - RNA, 14 nt, Human
aagucuccuucccc

SEQ ID NO: 3601026 - RNA, 15 nt, Human
aagucucuaauucua

SEQ ID NO: 3601027 - RNA, 18 nt, Human
aagucucuaauucuauua

SEQ ID NO: 3601028 - RNA, 14 nt, Human
aagucucuauuuaa

SEQ ID NO: 3601029 - RNA, 19 nt, Human
aagucucuauuuaaauucu

SEQ ID NO: 3601030 - RNA, 20 nt, Human
aagucucuauuuaaauucuu

SEQ ID NO: 3601031 - RNA, 23 nt, Human
aagucucuauuuaaauucuuuuu

SEQ ID NO: 3601032 - RNA, 22 nt, Human
aagucucugaagugaaacugcu

SEQ ID NO: 3601033 - RNA, 11 nt, Human
aagucucugug

SEQ ID NO: 3601034 - RNA, 14 nt, Human
aagucucugugaau

SEQ ID NO: 3601035 - RNA, 16 nt, Human
aagucucuuuuuuaca

SEQ ID NO: 3601036 - RNA, 18 nt, Human
aagucucuuuuuuacaaa

SEQ ID NO: 3601037 - RNA, 22 nt, Human
aagucucuuuuuuuggcccagg

SEQ ID NO: 3601038 - RNA, 22 nt, Human
aagucugcucucauauaagaca

SEQ ID NO: 3601039 - RNA, 15 nt, Human
aagucugucuuuccu

SEQ ID NO: 3601040 - RNA, 22 nt, Human
aagucugugagauucauucaug

SEQ ID NO: 3601041 - RNA, 18 nt, Human
aagucugugccuggagcu

SEQ ID NO: 3601042 - RNA, 20 nt, Human
aagucuguugauuaaagaug

SEQ ID NO: 3601043 - RNA, 20 nt, Human
aaggauuuuaugcuuuaaac

SEQ ID NO: 3601044 - RNA, 22 nt, Human
aaggauuuuaugcuuuaaacau

SEQ ID NO: 3601045 - RNA, 23 nt, Human
aaggauuuuaugcuuuaaacauu

SEQ ID NO: 3601046 - RNA, 15 nt, Human
aaggauuuuuuaaag

SEQ ID NO: 3601047 - RNA, 21 nt, Human
aaggauuuuuuaaaguuuuuu

SEQ ID NO: 3601048 - RNA, 19 nt, Human
aaggcaaaauugcaaaucu

SEQ ID NO: 3601049 - RNA, 20 nt, Human
aaggcaaagcacgaaauguu

SEQ ID NO: 3601050 - RNA, 14 nt, Human
aaggcaaaugacuu

SEQ ID NO: 3601051 - RNA, 17 nt, Human
aaggcaaaugcccaagg

SEQ ID NO: 3601052 - RNA, 21 nt, Human
aaggcaagaggggguggaggg

SEQ ID NO: 3601053 - RNA, 18 nt, Human
aaggcaagcacuuguggg

SEQ ID NO: 3601054 - RNA, 15 nt, Human
aaggcaagccaggcu

SEQ ID NO: 3601055 - RNA, 23 nt, Human
aaggcaagccaggcucacucaca

SEQ ID NO: 3601056 - RNA, 18 nt, Human
aaggcaaggcugucaauu

SEQ ID NO: 3601057 - RNA, 17 nt, Human
aaggcaaguuaagagaa

SEQ ID NO: 3601058 - RNA, 19 nt, Human
aaggcaaguuaagagaaac

SEQ ID NO: 3601059 - RNA, 22 nt, Human
aaggcaaugccauccucaaaca

SEQ ID NO: 3601060 - RNA, 22 nt, Human
aaggcacccaucugucugccaa

SEQ ID NO: 3601061 - RNA, 16 nt, Human
aaggcacuugaggggg

SEQ ID NO: 3601062 - RNA, 15 nt, Human
aaggcagaaagcaaa

SEQ ID NO: 3601063 - RNA, 16 nt, Human
aaggcagaaagcaaaa

SEQ ID NO: 3601064 - RNA, 14 nt, Human
aaggcagaagcagc

SEQ ID NO: 3601065 - RNA, 14 nt, Human
aaggcagacagcag

SEQ ID NO: 3601066 - RNA, 13 nt, Human
aaggcagagaaau

SEQ ID NO: 3601067 - RNA, 18 nt, Human
aaggcagaggccugggcu

SEQ ID NO: 3601068 - RNA, 19 nt, Human
aaggcagaggccugggcug

SEQ ID NO: 3601069 - RNA, 16 nt, Human
aaggcagcaaggcccg

SEQ ID NO: 3601070 - RNA, 16 nt, Human
aaggcagcauguauag

SEQ ID NO: 3601071 - RNA, 14 nt, Human
aaggcagccaccag

SEQ ID NO: 3601072 - RNA, 12 nt, Human
aaggcaggaaga

SEQ ID NO: 3601073 - RNA, 14 nt, Human
aaggcaggaagaga

SEQ ID NO: 3601074 - RNA, 15 nt, Human
aaggcaggccuauuu

SEQ ID NO: 3601075 - RNA, 17 nt, Human
aaggcaggccuauuuca

SEQ ID NO: 3601076 - RNA, 18 nt, Human
aaggcagggaaaggcucu

SEQ ID NO: 3601077 - RNA, 14 nt, Human
aaggcagggaggag

SEQ ID NO: 3601078 - RNA, 19 nt, Human
aaggcagggaggaggcaga

SEQ ID NO: 3601079 - RNA, 20 nt, Human
aaggcaggggaauguaugug

SEQ ID NO: 3601080 - RNA, 22 nt, Human
aaggcaguuaccauuaaaccau

SEQ ID NO: 3601081 - RNA, 19 nt, Human
aaggcaguuugcaaaaaau

SEQ ID NO: 3601082 - RNA, 22 nt, Human
aaggcauacgagagcagagguc

SEQ ID NO: 3601083 - RNA, 20 nt, Human
aaggcaucagucccuaugua

SEQ ID NO: 3601084 - RNA, 17 nt, Human
aaggcaucugacaugca

SEQ ID NO: 3601085 - RNA, 17 nt, Human
aaggcauggacuucugg

SEQ ID NO: 3601086 - RNA, 19 nt, Human
aaggcauuauaaaaagaau

SEQ ID NO: 3601087 - RNA, 14 nt, Human
aaggcauucucuga

SEQ ID NO: 3601088 - RNA, 21 nt, Human
aaggccaauaaagaguuagaa

SEQ ID NO: 3601089 - RNA, 21 nt, Human
aaggccaccucuuccuggccg

SEQ ID NO: 3601090 - RNA, 22 nt, Human
aaggccaccucuuccuggccgg

SEQ ID NO: 3601091 - RNA, 20 nt, Human
aaggccagaccugcagacgc

SEQ ID NO: 3601092 - RNA, 17 nt, Human
aaggccagaguggccug

SEQ ID NO: 3601093 - RNA, 21 nt, Human
aaggccagaguggccuggcca

SEQ ID NO: 3601094 - RNA, 13 nt, Human
aaggccagcacuc

SEQ ID NO: 3601095 - RNA, 17 nt, Human
aaggccagcuggcagca

SEQ ID NO: 3601096 - RNA, 19 nt, Human
aaggccagcuggcagcaga

SEQ ID NO: 3601097 - RNA, 18 nt, Human
aaggccaggggcuuuugc

SEQ ID NO: 3601098 - RNA, 17 nt, Human
aaggccauaaaacaggu

SEQ ID NO: 3601099 - RNA, 22 nt, Human
aaggccauccuucccugucugc

SEQ ID NO: 3601100 - RNA, 21 nt, Human
aaggcccagagagaagagccc

SEQ ID NO: 3601101 - RNA, 15 nt, Human
aaggcccagccccua

SEQ ID NO: 3601102 - RNA, 16 nt, Human
aaggcccagccccuag

SEQ ID NO: 3601103 - RNA, 18 nt, Human
aaggccccaagguuuaca

SEQ ID NO: 3601104 - RNA, 14 nt, Human
aaggcccgagcagc

SEQ ID NO: 3601105 - RNA, 13 nt, Human
aaggcccugcuga

SEQ ID NO: 3601106 - RNA, 19 nt, Human
aaggccgaagcucuggcug

SEQ ID NO: 3601107 - RNA, 14 nt, Human
aaggccgagaagca

SEQ ID NO: 3601108 - RNA, 18 nt, Human
aaggccgagaagcaagaa

SEQ ID NO: 3601109 - RNA, 13 nt, Human
aaggccucccaca

SEQ ID NO: 3601110 - RNA, 15 nt, Human
aaggccucccacagu

SEQ ID NO: 3601111 - RNA, 17 nt, Human
aaggccucccacaguga

SEQ ID NO: 3601112 - RNA, 17 nt, Human
aaggccucgcaggaaga

SEQ ID NO: 3601113 - RNA, 15 nt, Human
aaggccugcacacaa

SEQ ID NO: 3601114 - RNA, 15 nt, Human
aaggccuggggugac

SEQ ID NO: 3601115 - RNA, 20 nt, Human
aaggccugguguuucuugau

SEQ ID NO: 3601116 - RNA, 15 nt, Human
aaggccuuaauaugu

SEQ ID NO: 3601117 - RNA, 12 nt, Human
aaggccuucucc

SEQ ID NO: 3601118 - RNA, 11 nt, Human
aaggccuuuaa

SEQ ID NO: 3601119 - RNA, 22 nt, Human
aaggcgcuaacuugcuuaaaug

SEQ ID NO: 3601120 - RNA, 12 nt, Human
aaggcgcugaga

SEQ ID NO: 3601121 - RNA, 22 nt, Human
aaggcgguggacuugaacuuuc

SEQ ID NO: 3601122 - RNA, 16 nt, Human
aaggcguggagcugcc

SEQ ID NO: 3601123 - RNA, 18 nt, Human
aaggcguggagcugccug

SEQ ID NO: 3601124 - RNA, 17 nt, Human
aaggcuaaaaagcaaca

SEQ ID NO: 3601125 - RNA, 13 nt, Human
aaggcuaccuuug

SEQ ID NO: 3601126 - RNA, 14 nt, Human
aaggcuagaaccac

SEQ ID NO: 3601127 - RNA, 15 nt, Human
aaggcuaugugauua

SEQ ID NO: 3601128 - RNA, 15 nt, Human
aaggcuccaggagca

SEQ ID NO: 3601129 - RNA, 18 nt, Human
aaggcuccugaucauucu

SEQ ID NO: 3601130 - RNA, 18 nt, Human
aaggcucgagcaugccug

SEQ ID NO: 3601131 - RNA, 23 nt, Human
aaggcucgauuuuguaucugcag

SEQ ID NO: 3601132 - RNA, 22 nt, Human
aagaauauucagagaauaucaa

SEQ ID NO: 3601133 - RNA, 23 nt, Human
aagaauauugcaaaauacaugaa

SEQ ID NO: 3601134 - RNA, 18 nt, Human
aagaauauuguauuguua

SEQ ID NO: 3601135 - RNA, 15 nt, Human
aagaauauuugaaug

SEQ ID NO: 3601136 - RNA, 23 nt, Human
aagaaucagagaaggaacauacc

SEQ ID NO: 3601137 - RNA, 22 nt, Human
aagaaucagaguagaaauaaaa

SEQ ID NO: 3601138 - RNA, 17 nt, Human
aagaauccacauuucua

SEQ ID NO: 3601139 - RNA, 13 nt, Human
aagaauccuuuug

SEQ ID NO: 3601140 - RNA, 19 nt, Human
aagaaucuaucugcuuaug

SEQ ID NO: 3601141 - RNA, 20 nt, Human
aagaaucuugguuugccuuc

SEQ ID NO: 3601142 - RNA, 18 nt, Human
aagaaugaagguuuuugu

SEQ ID NO: 3601143 - RNA, 23 nt, Human
aagaaugaagguuuuuguaaaga

SEQ ID NO: 3601144 - RNA, 16 nt, Human
aagaaugacuauauaa

SEQ ID NO: 3601145 - RNA, 22 nt, Human
aagaaugagccuacgcugaaga

SEQ ID NO: 3601146 - RNA, 14 nt, Human
aagaaugaguuucu

SEQ ID NO: 3601147 - RNA, 19 nt, Human
aagaaugaucugauugacc

SEQ ID NO: 3601148 - RNA, 16 nt, Human
aagaaugauuaugaau

SEQ ID NO: 3601149 - RNA, 17 nt, Human
aagaaugcacaagaaug

SEQ ID NO: 3601150 - RNA, 19 nt, Human
aagaaugcacaagaaugga

SEQ ID NO: 3601151 - RNA, 15 nt, Human
aagaaugcaugcuuu

SEQ ID NO: 3601152 - RNA, 20 nt, Human
aagaaugcauugauauugug

SEQ ID NO: 3601153 - RNA, 23 nt, Human
aagaaugcauugauauugugaac

SEQ ID NO: 3601154 - RNA, 18 nt, Human
aagaaugcugguuuuccu

SEQ ID NO: 3601155 - RNA, 22 nt, Human
aagaaugcugguuuuccuaaau

SEQ ID NO: 3601156 - RNA, 17 nt, Human
aagaauggcagaaaagu

SEQ ID NO: 3601157 - RNA, 21 nt, Human
aagaaugggcaguuacaugca

SEQ ID NO: 3601158 - RNA, 20 nt, Human
aagaauggggaucacagaga

SEQ ID NO: 3601159 - RNA, 12 nt, Human
aagaauguaaag

SEQ ID NO: 3601160 - RNA, 21 nt, Human
aagaauguguuuaaacuuggu

SEQ ID NO: 3601161 - RNA, 19 nt, Human
aagaauguuacugccuuaa

SEQ ID NO: 3601162 - RNA, 15 nt, Human
aagaauguuagagua

SEQ ID NO: 3601163 - RNA, 19 nt, Human
aagaauguugguuuacuuu

SEQ ID NO: 3601164 - RNA, 15 nt, Human
aagaauguuuauagc

SEQ ID NO: 3601165 - RNA, 11 nt, Human
aagaauuauuu

SEQ ID NO: 3601166 - RNA, 14 nt, Human
aagaauuauuuugu

SEQ ID NO: 3601167 - RNA, 19 nt, Human
aagaauucaaacuggggcc

SEQ ID NO: 3601168 - RNA, 14 nt, Human
aagaauucagauug

SEQ ID NO: 3601169 - RNA, 19 nt, Human
aagaauucugauugauuug

SEQ ID NO: 3601170 - RNA, 19 nt, Human
aagaauucuuauacacauu

SEQ ID NO: 3601171 - RNA, 20 nt, Human
aagaauugaccaucugcuuu

SEQ ID NO: 3601172 - RNA, 22 nt, Human
aagaauugaccaucugcuuuua

SEQ ID NO: 3601173 - RNA, 16 nt, Human
aagaauugaguaaugg

SEQ ID NO: 3601174 - RNA, 22 nt, Human
aagaauugugguuuauauauuu

SEQ ID NO: 3601175 - RNA, 23 nt, Human
aagaauugugguuuauauauuua

SEQ ID NO: 3601176 - RNA, 14 nt, Human
aagaauuuaaagaa

SEQ ID NO: 3601177 - RNA, 16 nt, Human
aagaauuuaguauuau

SEQ ID NO: 3601178 - RNA, 15 nt, Human
aagaauuucaauuug

SEQ ID NO: 3601179 - RNA, 24 nt, Human
aagaauuucuaggacugaauuaug

SEQ ID NO: 3601180 - RNA, 20 nt, Human
aagaauuucuugguaagaag

SEQ ID NO: 3601181 - RNA, 16 nt, Human
aagaauuuuaaaaaug

SEQ ID NO: 3601182 - RNA, 19 nt, Human
aagaauuuuaaaaaugaau

SEQ ID NO: 3601183 - RNA, 20 nt, Human
aagaauuuucagaccccagc

SEQ ID NO: 3601184 - RNA, 16 nt, Human
aagaauuuuuuauuuu

SEQ ID NO: 3601185 - RNA, 14 nt, Human
aagaauuuuuuugu

SEQ ID NO: 3601186 - RNA, 15 nt, Human
aagaauuuuuuuguc

SEQ ID NO: 3601187 - RNA, 15 nt, Human
aagaauuuuuuuuaa

SEQ ID NO: 3601188 - RNA, 15 nt, Human
aagacaaaaauacuc

SEQ ID NO: 3601189 - RNA, 21 nt, Human
aagacaaaaauacucuaauuc

SEQ ID NO: 3601190 - RNA, 22 nt, Human
aagacaaaagucugucuuuccu

SEQ ID NO: 3601191 - RNA, 18 nt, Human
aagacaaacuuugcaucu

SEQ ID NO: 3601192 - RNA, 22 nt, Human
aagacaaaucaacagaagcauu

SEQ ID NO: 3601193 - RNA, 16 nt, Human
aagacaaauucuguuu

SEQ ID NO: 3601194 - RNA, 18 nt, Human
aagacaaauucuguuucu

SEQ ID NO: 3601195 - RNA, 13 nt, Human
aagacaagaaaau

SEQ ID NO: 3601196 - RNA, 16 nt, Human
aagacaauccauguaa

SEQ ID NO: 3601197 - RNA, 15 nt, Human
aagacaaugacauac

SEQ ID NO: 3601198 - RNA, 20 nt, Human
aagacaaugugaaaagaaaa

SEQ ID NO: 3601199 - RNA, 11 nt, Human
aagacaauucu

SEQ ID NO: 3601200 - RNA, 23 nt, Human
aagacacaggggacacccagaaa

SEQ ID NO: 3601201 - RNA, 15 nt, Human
aagacaccagagcag

SEQ ID NO: 3601202 - RNA, 22 nt, Human
aagacaccagagcagaugcaga

SEQ ID NO: 3601203 - RNA, 18 nt, Human
aagacaccguucauucag

SEQ ID NO: 3601204 - RNA, 21 nt, Human
aagacacugaaauauacacac

SEQ ID NO: 3601205 - RNA, 22 nt, Human
aagacacugaaauauacacaca

SEQ ID NO: 3601206 - RNA, 11 nt, Human
aagacacugcc

SEQ ID NO: 3601207 - RNA, 17 nt, Human
aagacacugccugggcu

SEQ ID NO: 3601208 - RNA, 18 nt, Human
aagacagaaguuugcacu

SEQ ID NO: 3601209 - RNA, 16 nt, Human
aagacagaugccccag

SEQ ID NO: 3601210 - RNA, 16 nt, Human
aagacagcauuugugu

SEQ ID NO: 3601211 - RNA, 14 nt, Human
aagacaguggcccc

SEQ ID NO: 3601212 - RNA, 14 nt, Human
aagacauaacguuu

SEQ ID NO: 3601213 - RNA, 20 nt, Human
aaguguauuuuauaaaauua

SEQ ID NO: 3601214 - RNA, 22 nt, Human
aaguguauuuuauaaaauuaaa

SEQ ID NO: 3601215 - RNA, 21 nt, Human
aaguguauuuugaaauuguuu

SEQ ID NO: 3601216 - RNA, 13 nt, Human
aaguguauuuuuc

SEQ ID NO: 3601217 - RNA, 17 nt, Human
aagugucaacucuuugu

SEQ ID NO: 3601218 - RNA, 13 nt, Human
aagugucauguuu

SEQ ID NO: 3601219 - RNA, 18 nt, Human
aaguguccauugacaugu

SEQ ID NO: 3601220 - RNA, 14 nt, Human
aaguguccuucuug

SEQ ID NO: 3601221 - RNA, 19 nt, Human
aagugucucacuaaagcau

SEQ ID NO: 3601222 - RNA, 19 nt, Human
aagugucucaguccaccug

SEQ ID NO: 3601223 - RNA, 21 nt, Human
aagugugaacuggacccuguu

SEQ ID NO: 3601224 - RNA, 14 nt, Human
aagugugaauacug

SEQ ID NO: 3601225 - RNA, 15 nt, Human
aagugugaauacugc

SEQ ID NO: 3601226 - RNA, 16 nt, Human
aagugugaauacugcu

SEQ ID NO: 3601227 - RNA, 20 nt, Human
aagugugaauacugcuugaa

SEQ ID NO: 3601228 - RNA, 18 nt, Human
aagugugaguaagagcug

SEQ ID NO: 3601229 - RNA, 21 nt, Human
aagugugaguaagagcuggug

SEQ ID NO: 3601230 - RNA, 18 nt, Human
aagugugcauauuguaca

SEQ ID NO: 3601231 - RNA, 22 nt, Human
aagugugcauauuguacacuuu

SEQ ID NO: 3601232 - RNA, 20 nt, Human
aaguguggggauuuucacug

SEQ ID NO: 3601233 - RNA, 17 nt, Human
aagugugggucugugug

SEQ ID NO: 3601234 - RNA, 19 nt, Human
aaguguguauauauuuugu

SEQ ID NO: 3601235 - RNA, 22 nt, Human
aaguguguaugugcgugugugc

SEQ ID NO: 3601236 - RNA, 16 nt, Human
aaguguguauuaaaaa

SEQ ID NO: 3601237 - RNA, 18 nt, Human
aagugugugauugaaggu

SEQ ID NO: 3601238 - RNA, 18 nt, Human
aagugugugguagaaaca

SEQ ID NO: 3601239 - RNA, 16 nt, Human
aaguguguguuuuuca

SEQ ID NO: 3601240 - RNA, 16 nt, Human
aaguguguuguugcuu

SEQ ID NO: 3601241 - RNA, 21 nt, Human
aaguguguuuccuucagugca

SEQ ID NO: 3601242 - RNA, 14 nt, Human
aaguguucauuguu

SEQ ID NO: 3601243 - RNA, 16 nt, Human
aaguguucuguuacaa

SEQ ID NO: 3601244 - RNA, 19 nt, Human
aaguguucuguuacaaaau

SEQ ID NO: 3601245 - RNA, 21 nt, Human
aaguguucuguuacaaaaugu

SEQ ID NO: 3601246 - RNA, 23 nt, Human
aaguguucuguuacaaaauguaa

SEQ ID NO: 3601247 - RNA, 16 nt, Human
aaguguuggaaaaaau

SEQ ID NO: 3601248 - RNA, 23 nt, Human
aaguguuggcuaaugaagggaaa

SEQ ID NO: 3601249 - RNA, 22 nt, Human
aaguguuguaaauauuuaugua

SEQ ID NO: 3601250 - RNA, 19 nt, Human
aaguguuuauuuuucauau

SEQ ID NO: 3601251 - RNA, 23 nt, Human
aaguguuucauaaauuugagagu

SEQ ID NO: 3601252 - RNA, 21 nt, Human
aaguguuucuguuauuaacaa

SEQ ID NO: 3601253 - RNA, 13 nt, Human
aaguguuuucaga

SEQ ID NO: 3601254 - RNA, 14 nt, Human
aaguguuuucagag

SEQ ID NO: 3601255 - RNA, 18 nt, Human
aaguguuuuguaccagug

SEQ ID NO: 3601256 - RNA, 21 nt, Human
aaguuaaaaaaaauaauaaau

SEQ ID NO: 3601257 - RNA, 17 nt, Human
aaguuaaagugaauaac

SEQ ID NO: 3601258 - RNA, 13 nt, Human
aaguuaaauguag

SEQ ID NO: 3601259 - RNA, 18 nt, Human
aaguuaagagaaacuuua

SEQ ID NO: 3601260 - RNA, 16 nt, Human
aaguuaagauucuugg

SEQ ID NO: 3601261 - RNA, 14 nt, Human
aaguuaauaagcaa

SEQ ID NO: 3601262 - RNA, 12 nt, Human
aaguuaauagau

SEQ ID NO: 3601263 - RNA, 19 nt, Human
aaguuaauccacugugacu

SEQ ID NO: 3601264 - RNA, 16 nt, Human
aaguuaaugcuuaaga

SEQ ID NO: 3601265 - RNA, 16 nt, Human
aaguuaauuuaaaguu

SEQ ID NO: 3601266 - RNA, 18 nt, Human
aaguuacaacuuccuaau

SEQ ID NO: 3601267 - RNA, 19 nt, Human
aaguuacagaaauacuaua

SEQ ID NO: 3601268 - RNA, 16 nt, Human
aaguuacuauccuggc

SEQ ID NO: 3601269 - RNA, 19 nt, Human
aaguuagaacauuugcugu

SEQ ID NO: 3601270 - RNA, 15 nt, Human
aaguuagaaucuauu

SEQ ID NO: 3601271 - RNA, 17 nt, Human
aaguuagaauuccuuca

SEQ ID NO: 3601272 - RNA, 14 nt, Human
aaguuagcucagga

SEQ ID NO: 3601273 - RNA, 16 nt, Human
aaguuagcuuuaacuu

SEQ ID NO: 3601274 - RNA, 16 nt, Human
aaguuaguaggauaug

SEQ ID NO: 3601275 - RNA, 23 nt, Human
aaguuagucuacucuuaagccau

SEQ ID NO: 3601276 - RNA, 23 nt, Human
aaguuaguggaaaucugaacauu

SEQ ID NO: 3601277 - RNA, 19 nt, Human
aaguuauaaaucaauguca

SEQ ID NO: 3601278 - RNA, 13 nt, Human
aaguuauaguacu

SEQ ID NO: 3601279 - RNA, 17 nt, Human
aaguuauagugaauacu

SEQ ID NO: 3601280 - RNA, 23 nt, Human
aaguuauauaaagagaaaauuga

SEQ ID NO: 3601281 - RNA, 12 nt, Human
aaguuauauuuc

SEQ ID NO: 3601282 - RNA, 23 nt, Human
aaguuauauuucagauguaaugu

SEQ ID NO: 3601283 - RNA, 14 nt, Human
aaguuauauuuccu

SEQ ID NO: 3601284 - RNA, 22 nt, Human
aaguuaucagacacucuggcug

SEQ ID NO: 3601285 - RNA, 17 nt, Human
aaguuauuaacuuuaau

SEQ ID NO: 3601286 - RNA, 21 nt, Human
aaguuauuaagagguaagacu

SEQ ID NO: 3601287 - RNA, 19 nt, Human
aaguuauuaauauuuuaau

SEQ ID NO: 3601288 - RNA, 18 nt, Human
aaguuauugacaaacucu

SEQ ID NO: 3601289 - RNA, 15 nt, Human
aaguuauugcaguuu

SEQ ID NO: 3601290 - RNA, 23 nt, Human
aaguuauugcaguuuaucauuca

SEQ ID NO: 3601291 - RNA, 11 nt, Human
aaguuauugua

SEQ ID NO: 3601292 - RNA, 20 nt, Human
aaguuauuguacagcuguuu

SEQ ID NO: 3601293 - RNA, 10 nt, Human
aaguuauuuu

SEQ ID NO: 3601294 - RNA, 14 nt, Human
aaguuauuuuaccu

SEQ ID NO: 3601295 - RNA, 16 nt, Human
aaguuauuuuuguaca

SEQ ID NO: 3601296 - RNA, 17 nt, Human
aaguuauuuuuguacau

SEQ ID NO: 3601297 - RNA, 19 nt, Human
aaguucaaucuguuuuuca

SEQ ID NO: 3601298 - RNA, 11 nt, Human
aaguucacaaa

SEQ ID NO: 3601299 - RNA, 19 nt, Human
aaguucagaguuuucuggg

SEQ ID NO: 3601300 - RNA, 22 nt, Human
aaguucagcacuugucucauuu

SEQ ID NO: 3601301 - RNA, 15 nt, Human
aaguucauacauugu

SEQ ID NO: 3601302 - RNA, 22 nt, Human
aaguucauaccuaaguacugua

SEQ ID NO: 3601303 - RNA, 14 nt, Human
aaguucauaggguc

SEQ ID NO: 3601304 - RNA, 15 nt, Human
aaguucauauuccau

SEQ ID NO: 3601305 - RNA, 22 nt, Human
aaguucauauuccauauuuauu

SEQ ID NO: 3601306 - RNA, 18 nt, Human
aaguucccaguuggagcu

SEQ ID NO: 3601307 - RNA, 20 nt, Human
aaguuccuuauguauauuua

SEQ ID NO: 3601308 - RNA, 12 nt, Human
aaguucgucugu

SEQ ID NO: 3601309 - RNA, 11 nt, Human
aaguucuaaga

SEQ ID NO: 3601310 - RNA, 21 nt, Human
aaguucuaagauucuaaugau

SEQ ID NO: 3601311 - RNA, 21 nt, Human
aaguucuaguguuuucaauuu

SEQ ID NO: 3601312 - RNA, 22 nt, Human
aaguucuaguguuuucaauuuu

SEQ ID NO: 3601313 - RNA, 21 nt, Human
aaguucuauuggaaaaaccac

SEQ ID NO: 3601314 - RNA, 12 nt, Human
aaguucuauuua

SEQ ID NO: 3601315 - RNA, 15 nt, Human
aaguucugacuugac

SEQ ID NO: 3601316 - RNA, 15 nt, Human
aaguucugaguguuu

SEQ ID NO: 3601317 - RNA, 17 nt, Human
aaguucugcagauaaac

SEQ ID NO: 3601318 - RNA, 22 nt, Human
aaguucugccucugauguauuu

SEQ ID NO: 3601319 - RNA, 19 nt, Human
aaguucuguacucaaaugu

SEQ ID NO: 3601320 - RNA, 16 nt, Human
aaguucuguguauuua

SEQ ID NO: 3601321 - RNA, 20 nt, Human
aaguucuguguuuaauuucu

SEQ ID NO: 3601322 - RNA, 14 nt, Human
aaguucuuagauau

SEQ ID NO: 3601323 - RNA, 15 nt, Human
aaguucuuagauauc

SEQ ID NO: 3601324 - RNA, 17 nt, Human
aaguucuuagauaucuu

SEQ ID NO: 3601325 - RNA, 22 nt, Human
aaguucuuaguugcuguauguc

SEQ ID NO: 3601326 - RNA, 15 nt, Human
aaguugaaaaucaua

SEQ ID NO: 3601327 - RNA, 21 nt, Human
aaguugaaaaucauaggcacc

SEQ ID NO: 3601328 - RNA, 23 nt, Human
aaguugaauugaggggauuaaua

SEQ ID NO: 3601329 - RNA, 14 nt, Human
aaguugaauuuauu

SEQ ID NO: 3601330 - RNA, 15 nt, Human
aaguugaauuuauug

SEQ ID NO: 3601331 - RNA, 17 nt, Human
aaguugaauuuauuggc

SEQ ID NO: 3601332 - RNA, 16 nt, Human
aaguugacuuauagua

SEQ ID NO: 3601333 - RNA, 23 nt, Human
aaguugacuuauaguacaugaua

SEQ ID NO: 3601334 - RNA, 16 nt, Human
aaguugagauaguuuu

SEQ ID NO: 3601335 - RNA, 18 nt, Human
aaguugagauaguuuuca

SEQ ID NO: 3601336 - RNA, 16 nt, Human
aaguugagcaaacauu

SEQ ID NO: 3601337 - RNA, 16 nt, Human
aaguugagcuaugacu

SEQ ID NO: 3601338 - RNA, 17 nt, Human
aaguugaggauuguuga

SEQ ID NO: 3601339 - RNA, 14 nt, Human
aaguugaggcauuu

SEQ ID NO: 3601340 - RNA, 16 nt, Human
aaguugaguauauuau

SEQ ID NO: 3601341 - RNA, 17 nt, Human
aaguugauauagaacag

SEQ ID NO: 3601342 - RNA, 22 nt, Human
aaguugauaugccuuuucccaa

SEQ ID NO: 3601343 - RNA, 14 nt, Human
aaguugauuagaaa

SEQ ID NO: 3601344 - RNA, 16 nt, Human
aaguugcacggcugcu

SEQ ID NO: 3601345 - RNA, 18 nt, Human
aaguugcacugauauuuu

SEQ ID NO: 3601346 - RNA, 19 nt, Human
aaguugcauuccuuugucu

SEQ ID NO: 3601347 - RNA, 16 nt, Human
aaguugccuaaaucca

SEQ ID NO: 3601348 - RNA, 17 nt, Human
aaguugccuaaauccau

SEQ ID NO: 3601349 - RNA, 16 nt, Human
aaguugcugaugaacu

SEQ ID NO: 3601350 - RNA, 23 nt, Human
aaguugcugcuucucccaggcaa

SEQ ID NO: 3601351 - RNA, 21 nt, Human
aaguuggaaacacuaaauguu

SEQ ID NO: 3601352 - RNA, 22 nt, Human
aaguuggaaacacuaaauguua

SEQ ID NO: 3601353 - RNA, 22 nt, Human
aaguuggacuaaaugccuaguu

SEQ ID NO: 3601354 - RNA, 19 nt, Human
aaguuggcuucuguuucua

SEQ ID NO: 3601355 - RNA, 19 nt, Human
aaguugggaucuaggagag

SEQ ID NO: 3601356 - RNA, 19 nt, Human
aaguugggcaauauaacca

SEQ ID NO: 3601357 - RNA, 17 nt, Human
aaguugggcuugcuauu

SEQ ID NO: 3601358 - RNA, 21 nt, Human
aaguuggguuaauaccagcuu

SEQ ID NO: 3601359 - RNA, 19 nt, Human
aaguuguaacuuauauuga

SEQ ID NO: 3601360 - RNA, 22 nt, Human
aaguuguaugaucugugccuuu

SEQ ID NO: 3601361 - RNA, 19 nt, Human
aaguugugccuuuuauagc

SEQ ID NO: 3601362 - RNA, 20 nt, Human
aaguugugcuugagccagga

SEQ ID NO: 3601363 - RNA, 15 nt, Human
aaguugugcuuguuu

SEQ ID NO: 3601364 - RNA, 19 nt, Human
aaguuguggauuucaguuu

SEQ ID NO: 3601365 - RNA, 20 nt, Human
aaguuguuacuaacuaaacu

SEQ ID NO: 3601366 - RNA, 23 nt, Human
aaguuguuacuaacuaaacucuc

SEQ ID NO: 3601367 - RNA, 12 nt, Human
aaguuguuugag

SEQ ID NO: 3601368 - RNA, 13 nt, Human
aaguuguuugcau

SEQ ID NO: 3601369 - RNA, 12 nt, Human
aaguuuaaaaca

SEQ ID NO: 3601370 - RNA, 17 nt, Human
aaguuuaauaaauuuau

SEQ ID NO: 3601371 - RNA, 18 nt, Human
aaguuuaauauuaaagcc

SEQ ID NO: 3601372 - RNA, 19 nt, Human
aaguuuaauauuaaagcca

SEQ ID NO: 3601373 - RNA, 21 nt, Human
aaguuuaauauuaaagccaug

SEQ ID NO: 3601374 - RNA, 23 nt, Human
aaguuuacaaguguauaucagaa

SEQ ID NO: 3601375 - RNA, 12 nt, Human
aaguuuacagua

SEQ ID NO: 3601376 - RNA, 19 nt, Human
aaguuuacaguaaauaaau

SEQ ID NO: 3601377 - RNA, 20 nt, Human
aaguuuacaguaaauaaauu

SEQ ID NO: 3601378 - RNA, 12 nt, Human
aaguuuacauuu

SEQ ID NO: 3601379 - RNA, 22 nt, Human
aaguuuacauuuuuauuuauga

SEQ ID NO: 3601380 - RNA, 19 nt, Human
aaguuuacucaacccucuc

SEQ ID NO: 3601381 - RNA, 13 nt, Human
aaguuuagcucug

SEQ ID NO: 3601382 - RNA, 18 nt, Human
aaguuuauacaguacagu

SEQ ID NO: 3601383 - RNA, 18 nt, Human
aaguuuaucaguaaauaa

SEQ ID NO: 3601384 - RNA, 17 nt, Human
aaguuuaugucuaaaga

SEQ ID NO: 3601385 - RNA, 14 nt, Human
aaguuuaugucuca

SEQ ID NO: 3601386 - RNA, 16 nt, Human
aaguuuauucucauuu

SEQ ID NO: 3601387 - RNA, 22 nt, Human
aaguuucaaugugauucuaaug

SEQ ID NO: 3601388 - RNA, 20 nt, Human
aaguuucacugacuuagaac

SEQ ID NO: 3601389 - RNA, 21 nt, Human
aaguuucagagaccauugcaa

SEQ ID NO: 3601390 - RNA, 16 nt, Human
aaguuucagaguauau

SEQ ID NO: 3601391 - RNA, 12 nt, Human
aaguuucauuua

SEQ ID NO: 3601392 - RNA, 14 nt, Human
aaguuucccuuccu

SEQ ID NO: 3601393 - RNA, 18 nt, Human
aaguuuccuuccagccca

SEQ ID NO: 3601394 - RNA, 11 nt, Human
aaguuucuaag

SEQ ID NO: 3601395 - RNA, 17 nt, Human
aaguuucuaagauucua

SEQ ID NO: 3601396 - RNA, 20 nt, Human
aaguuucuaagauucuaaag

SEQ ID NO: 3601397 - RNA, 19 nt, Human
aaguuucuagcuagaaaua

SEQ ID NO: 3601398 - RNA, 14 nt, Human
aaguuucucagcuc

SEQ ID NO: 3601399 - RNA, 18 nt, Human
aaguuucucagcucccau

SEQ ID NO: 3601400 - RNA, 13 nt, Human
aaguuucucuucu

SEQ ID NO: 3601401 - RNA, 19 nt, Human
aaguuucugccgcagcccu

SEQ ID NO: 3601402 - RNA, 21 nt, Human
aaguuucugccgcagcccugc

SEQ ID NO: 3601403 - RNA, 16 nt, Human
aaguuucuuugcuuca

SEQ ID NO: 3601404 - RNA, 17 nt, Human
aaguuugaaggaaacag

SEQ ID NO: 3601405 - RNA, 14 nt, Human
aaguuugaauguua

SEQ ID NO: 3601406 - RNA, 15 nt, Human
aaguuugaauguuaa

SEQ ID NO: 3601407 - RNA, 20 nt, Human
aaguuugagaucagccuggg

SEQ ID NO: 3601408 - RNA, 17 nt, Human
aaguuugauaaauagug

SEQ ID NO: 3601409 - RNA, 19 nt, Human
aaguuugcacuaucuuuca

SEQ ID NO: 3601410 - RNA, 13 nt, Human
aaguuugcuuaga

SEQ ID NO: 3601411 - RNA, 19 nt, Human
aaguuugcuuguuucuugg

SEQ ID NO: 3601412 - RNA, 22 nt, Human
aaguuuguguucuguuuguuaa

SEQ ID NO: 3601413 - RNA, 14 nt, Human
aaguuuguuuuuaa

SEQ ID NO: 3601414 - RNA, 17 nt, Human
aaguuuuaaaaagccag

SEQ ID NO: 3601415 - RNA, 14 nt, Human
aaguuuuaggacaa

SEQ ID NO: 3601416 - RNA, 19 nt, Human
aaguuuuaggguacaugug

SEQ ID NO: 3601417 - RNA, 21 nt, Human
aaguuuuauauauuauaugga

SEQ ID NO: 3601418 - RNA, 15 nt, Human
aaguuuucaaugaug

SEQ ID NO: 3601419 - RNA, 16 nt, Human
aauauccuaaacauca

SEQ ID NO: 3601420 - RNA, 21 nt, Human
aauauccuaauaaaaagguga

SEQ ID NO: 3601421 - RNA, 13 nt, Human
aauauccugcuug

SEQ ID NO: 3601422 - RNA, 20 nt, Human
aauaucuaaaguuauauuuc

SEQ ID NO: 3601423 - RNA, 13 nt, Human
aauaucugaaaug

SEQ ID NO: 3601424 - RNA, 19 nt, Human
aauaucugaacauuuacua

SEQ ID NO: 3601425 - RNA, 16 nt, Human
aauaucugcuguaugu

SEQ ID NO: 3601426 - RNA, 13 nt, Human
aauaucugggauu

SEQ ID NO: 3601427 - RNA, 21 nt, Human
aauaucugggauucuacuuua

SEQ ID NO: 3601428 - RNA, 17 nt, Human
aauaucuguaaugguac

SEQ ID NO: 3601429 - RNA, 13 nt, Human
aauaucuguauuu

SEQ ID NO: 3601430 - RNA, 14 nt, Human
aauaucuguauuua

SEQ ID NO: 3601431 - RNA, 20 nt, Human
aauaucuguauuuaauuuug

SEQ ID NO: 3601432 - RNA, 19 nt, Human
aauaucugugaaauaucau

SEQ ID NO: 3601433 - RNA, 17 nt, Human
aauaucuugcuugaacu

SEQ ID NO: 3601434 - RNA, 20 nt, Human
aauaucuuugugauaauuua

SEQ ID NO: 3601435 - RNA, 21 nt, Human
aauaucuuugugauaauuuaa

SEQ ID NO: 3601436 - RNA, 15 nt, Human
aauaucuuuuauguu

SEQ ID NO: 3601437 - RNA, 20 nt, Human
aauaucuuuuauguuugaau

SEQ ID NO: 3601438 - RNA, 15 nt, Human
aauaucuuuugaccu

SEQ ID NO: 3601439 - RNA, 23 nt, Human
aauaugaaauuuuuuuucaugcu

SEQ ID NO: 3601440 - RNA, 18 nt, Human
aauaugaagcucaccugu

SEQ ID NO: 3601441 - RNA, 12 nt, Human
aauaugaaguua

SEQ ID NO: 3601442 - RNA, 19 nt, Human
aauaugaaguuacuuucuu

SEQ ID NO: 3601443 - RNA, 20 nt, Human
aauaugaaucugcucacuuu

SEQ ID NO: 3601444 - RNA, 16 nt, Human
aauaugacagcugucc

SEQ ID NO: 3601445 - RNA, 17 nt, Human
aauaugacggaagaaca

SEQ ID NO: 3601446 - RNA, 19 nt, Human
aauaugacggaagaacaua

SEQ ID NO: 3601447 - RNA, 19 nt, Human
aauaugaguacaaaugccu

SEQ ID NO: 3601448 - RNA, 21 nt, Human
aauaugaguacaaaugccuua

SEQ ID NO: 3601449 - RNA, 17 nt, Human
aauaugauauugcauau

SEQ ID NO: 3601450 - RNA, 16 nt, Human
aauaugaugacaauca

SEQ ID NO: 3601451 - RNA, 16 nt, Human
aauaugaugacuguuu

SEQ ID NO: 3601452 - RNA, 19 nt, Human
aauaugauuaguaaagaaa

SEQ ID NO: 3601453 - RNA, 22 nt, Human
aauaugauuaguaaagaaauga

SEQ ID NO: 3601454 - RNA, 21 nt, Human
aauaugauuuuuuaaaagaaa

SEQ ID NO: 3601455 - RNA, 23 nt, Human
aauaugauuuuuuaaaagaaauu

SEQ ID NO: 3601456 - RNA, 15 nt, Human
aauaugcacacauuu

SEQ ID NO: 3601457 - RNA, 22 nt, Human
aauaugcacacauuuuuuaaau

SEQ ID NO: 3601458 - RNA, 17 nt, Human
aauaugcacuaagucuc

SEQ ID NO: 3601459 - RNA, 22 nt, Human
aauaugcacuaagucucuuuuu

SEQ ID NO: 3601460 - RNA, 22 nt, Human
aauaugcagugauauggcagaa

SEQ ID NO: 3601461 - RNA, 23 nt, Human
aauaugccucuccuuuguauauu

SEQ ID NO: 3601462 - RNA, 10 nt, Human
aauaugcuua

SEQ ID NO: 3601463 - RNA, 22 nt, Human
aauaugcuuaaaauaagcaggu

SEQ ID NO: 3601464 - RNA, 17 nt, Human
aauauggaacuuacauu

SEQ ID NO: 3601465 - RNA, 17 nt, Human
aauauggaacuucuaau

SEQ ID NO: 3601466 - RNA, 14 nt, Human
aauauggacaagag

SEQ ID NO: 3601467 - RNA, 15 nt, Human
aauauggacaagagg

SEQ ID NO: 3601468 - RNA, 17 nt, Human
aauauggacacuuaaua

SEQ ID NO: 3601469 - RNA, 21 nt, Human
aauauggacacuuaauacuac

SEQ ID NO: 3601470 - RNA, 14 nt, Human
aauauggauuuguu

SEQ ID NO: 3601471 - RNA, 13 nt, Human
aauaugggagaaa

SEQ ID NO: 3601472 - RNA, 18 nt, Human
aauauggucuuuugguua

SEQ ID NO: 3601473 - RNA, 14 nt, Human
aauauguacauuuc

SEQ ID NO: 3601474 - RNA, 15 nt, Human
aauauguacauuucu

SEQ ID NO: 3601475 - RNA, 18 nt, Human
aauauguacauuucuaag

SEQ ID NO: 3601476 - RNA, 19 nt, Human
aauauguacauuucuaagu

SEQ ID NO: 3601477 - RNA, 23 nt, Human
aauauguauaacuuuaacuucug

SEQ ID NO: 3601478 - RNA, 16 nt, Human
aauauguauuaacacu

SEQ ID NO: 3601479 - RNA, 21 nt, Human
aauauguauuuaccaaaaauu

SEQ ID NO: 3601480 - RNA, 16 nt, Human
aauauguauuuuaugu

SEQ ID NO: 3601481 - RNA, 11 nt, Human
aauaugucugc

SEQ ID NO: 3601482 - RNA, 11 nt, Human
aauaugugaag

SEQ ID NO: 3601483 - RNA, 16 nt, Human
aauaugugagauuuuu

SEQ ID NO: 3601484 - RNA, 22 nt, Human
aauaugugagauuuuuuauugc

SEQ ID NO: 3601485 - RNA, 12 nt, Human
aauaugugauuu

SEQ ID NO: 3601486 - RNA, 19 nt, Human
aauauguggaagcaaccaa

SEQ ID NO: 3601487 - RNA, 20 nt, Human
aauauguucuuuaaaaauau

SEQ ID NO: 3601488 - RNA, 20 nt, Human
aauauguuuaaaauaaaaug

SEQ ID NO: 3601489 - RNA, 22 nt, Human
aauauguuuuuuagaucaaaua

SEQ ID NO: 3601490 - RNA, 13 nt, Human
aauauuaaaaaac

SEQ ID NO: 3601491 - RNA, 16 nt, Human
aauauuaaaaagucuu

SEQ ID NO: 3601492 - RNA, 19 nt, Human
aauauuaaaaagucuuuua

SEQ ID NO: 3601493 - RNA, 13 nt, Human
aauauuaaaagaa

SEQ ID NO: 3601494 - RNA, 22 nt, Human
aauauuaaccuaaucaccaugu

SEQ ID NO: 3601495 - RNA, 18 nt, Human
aauauuaccuaaugaaag

SEQ ID NO: 3601496 - RNA, 22 nt, Human
aauauuacucaguuuauguugu

SEQ ID NO: 3601497 - RNA, 19 nt, Human
aauauuacuuuaacaugcc

SEQ ID NO: 3601498 - RNA, 18 nt, Human
aauauuagcuuuacuguu

SEQ ID NO: 3601499 - RNA, 19 nt, Human
aauauuagcuuuacuguuu

SEQ ID NO: 3601500 - RNA, 21 nt, Human
aauauuagcuuuacuguuugu

SEQ ID NO: 3601501 - RNA, 20 nt, Human
aauauuaucuuuguaauuau

SEQ ID NO: 3601502 - RNA, 14 nt, Human
aauauuaugagaug

SEQ ID NO: 3601503 - RNA, 22 nt, Human
aauauuaugagaugcuggcuug

SEQ ID NO: 3601504 - RNA, 12 nt, Human
aauauuaugcaa

SEQ ID NO: 3601505 - RNA, 17 nt, Human
aauauuaugcaaauucc

SEQ ID NO: 3601506 - RNA, 19 nt, Human
aauauuaugcaaauuccca

SEQ ID NO: 3601507 - RNA, 20 nt, Human
aauauuaugcaaauucccag

SEQ ID NO: 3601508 - RNA, 16 nt, Human
aauauuauguuaaaac

SEQ ID NO: 3601509 - RNA, 14 nt, Human
aauauuauugaacu

SEQ ID NO: 3601510 - RNA, 19 nt, Human
aauauuauuuguguuuccu

SEQ ID NO: 3601511 - RNA, 21 nt, Human
aauauucagaaucuuuguuaa

SEQ ID NO: 3601512 - RNA, 21 nt, Human
aauauucagacaaaauggaua

SEQ ID NO: 3601513 - RNA, 23 nt, Human
aauauucagacaaaauggauaca

SEQ ID NO: 3601514 - RNA, 16 nt, Human
aauauuccagaucuuu

SEQ ID NO: 3601515 - RNA, 23 nt, Human
aauauuccagaucuuucagaaau

SEQ ID NO: 3601516 - RNA, 12 nt, Human
aauauuccugaa

SEQ ID NO: 3601517 - RNA, 16 nt, Human
aauauucuauaugaau

SEQ ID NO: 3601518 - RNA, 23 nt, Human
aauauucuauuuucauuuucugc

SEQ ID NO: 3601519 - RNA, 14 nt, Human
aauauucucuguac

SEQ ID NO: 3601520 - RNA, 21 nt, Human
aauauucucuguacauauuag

SEQ ID NO: 3601521 - RNA, 18 nt, Human
aauauugaauuuuuccua

SEQ ID NO: 3601522 - RNA, 15 nt, Human
aauauugacauuugu

SEQ ID NO: 3601523 - RNA, 17 nt, Human
aauauugacuuguauau

SEQ ID NO: 3601524 - RNA, 15 nt, Human
aauauugacuuuguc

SEQ ID NO: 3601525 - RNA, 19 nt, Human
aauauugagaaagaaacua

SEQ ID NO: 3601526 - RNA, 20 nt, Human
aauauugagaaagaaacuaa

SEQ ID NO: 3601527 - RNA, 14 nt, Human
aauauugaggcuuu

SEQ ID NO: 3601528 - RNA, 18 nt, Human
aauauugaggcuuugugu

SEQ ID NO: 3601529 - RNA, 20 nt, Human
aauauugaggcuuuguguug

SEQ ID NO: 3601530 - RNA, 17 nt, Human
aauauugauaugcuuau

SEQ ID NO: 3601531 - RNA, 22 nt, Human
aauauugauugggaaaacauuu

SEQ ID NO: 3601532 - RNA, 20 nt, Human
aauauugauuucugccuucc

SEQ ID NO: 3601533 - RNA, 16 nt, Human
aauauugcaaaauaca

SEQ ID NO: 3601534 - RNA, 17 nt, Human
aauauugcaaaauacau

SEQ ID NO: 3601535 - RNA, 15 nt, Human
aauauugguugggau

SEQ ID NO: 3601536 - RNA, 14 nt, Human
aauauuguauauuu

SEQ ID NO: 3601537 - RNA, 16 nt, Human
aauauuguguuccuuu

SEQ ID NO: 3601538 - RNA, 18 nt, Human
aauauuguguugugaaug

SEQ ID NO: 3601539 - RNA, 18 nt, Human
aauauuguuccuaaguuc

SEQ ID NO: 3601540 - RNA, 20 nt, Human
aauauuguuccuaaguucuu

SEQ ID NO: 3601541 - RNA, 13 nt, Human
aauauuguucucu

SEQ ID NO: 3601542 - RNA, 22 nt, Human
aauauuguugacaacugugacu

SEQ ID NO: 3601543 - RNA, 19 nt, Human
aauauuguuguauaauuuc

SEQ ID NO: 3601544 - RNA, 23 nt, Human
aauauuguuguauaauuucgaga

SEQ ID NO: 3601545 - RNA, 12 nt, Human
aauauuguuucu

SEQ ID NO: 3601546 - RNA, 18 nt, Human
aauauuguuuuucuuucu

SEQ ID NO: 3601547 - RNA, 14 nt, Human
aauauuuaaacagc

SEQ ID NO: 3601548 - RNA, 17 nt, Human
aauauuuaaacagcagu

SEQ ID NO: 3601549 - RNA, 19 nt, Human
aauauuuaaacagcagugu

SEQ ID NO: 3601550 - RNA, 22 nt, Human
aauauuuaaacaugguuacaau

SEQ ID NO: 3601551 - RNA, 13 nt, Human
aauauuuaauguu

SEQ ID NO: 3601552 - RNA, 14 nt, Human
aauauuuaauguug

SEQ ID NO: 3601553 - RNA, 11 nt, Human
aauauuuauaa

SEQ ID NO: 3601554 - RNA, 17 nt, Human
aauauuuauaacagcau

SEQ ID NO: 3601555 - RNA, 17 nt, Human
aauauuuauauauuuau

SEQ ID NO: 3601556 - RNA, 15 nt, Human
aauauuuaugaagaa

SEQ ID NO: 3601557 - RNA, 22 nt, Human
aauauuuaugaagaaaauacuu

SEQ ID NO: 3601558 - RNA, 17 nt, Human
aauauuuauuaaauaaa

SEQ ID NO: 3601559 - RNA, 18 nt, Human
aauauuuauuaaauaaaa

SEQ ID NO: 3601560 - RNA, 16 nt, Human
aauauuuauuaccucu

SEQ ID NO: 3601561 - RNA, 14 nt, Human
aauauuuauugcuu

SEQ ID NO: 3601562 - RNA, 18 nt, Human
aaguuauuuuuguacaug

SEQ ID NO: 3601563 - RNA, 13 nt, Human
aagcauugaaauu

SEQ ID NO: 3601564 - RNA, 22 nt, Human
aagcauuggguggguaaauuca

SEQ ID NO: 3601565 - RNA, 14 nt, Human
aagcauuguaaaau

SEQ ID NO: 3601566 - RNA, 13 nt, Human
aagcauuuaaagg

SEQ ID NO: 3601567 - RNA, 20 nt, Human
aagcauuuaauguagccaug

SEQ ID NO: 3601568 - RNA, 16 nt, Human
aagcauuuacuuugug

SEQ ID NO: 3601569 - RNA, 13 nt, Human
aagcauuucaaag

SEQ ID NO: 3601570 - RNA, 13 nt, Human
aagcauuugaaug

SEQ ID NO: 3601571 - RNA, 14 nt, Human
aagcauuugaaugc

SEQ ID NO: 3601572 - RNA, 16 nt, Human
aagcauuugaaugcau

SEQ ID NO: 3601573 - RNA, 20 nt, Human
aagcauuugguuuuucacau

SEQ ID NO: 3601574 - RNA, 18 nt, Human
aagcauuuguauuuugug

SEQ ID NO: 3601575 - RNA, 21 nt, Human
aagcauuuguauuuuguguga

SEQ ID NO: 3601576 - RNA, 14 nt, Human
aagcauuuuauaaa

SEQ ID NO: 3601577 - RNA, 13 nt, Human
aauaaaaaggcac

SEQ ID NO: 3601578 - RNA, 12 nt, Human
aauaaaaaggug

SEQ ID NO: 3601579 - RNA, 13 nt, Human
aauaaaaagguga

SEQ ID NO: 3601580 - RNA, 16 nt, Human
aauaaaaaggugacca

SEQ ID NO: 3601581 - RNA, 15 nt, Human
aauaaaaauaaauuc

SEQ ID NO: 3601582 - RNA, 14 nt, Human
aauaaaaauauauu

SEQ ID NO: 3601583 - RNA, 13 nt, Human
aauaaaaaugaua

SEQ ID NO: 3601584 - RNA, 14 nt, Human
aauaaaaauguuua

SEQ ID NO: 3601585 - RNA, 15 nt, Human
aauaaaaauguuuaa

SEQ ID NO: 3601586 - RNA, 19 nt, Human
aauaaaaauuaaggcaacu

SEQ ID NO: 3601587 - RNA, 13 nt, Human
aauaaaacaaagg

SEQ ID NO: 3601588 - RNA, 15 nt, Human
aauaaaacauagcaa

SEQ ID NO: 3601589 - RNA, 11 nt, Human
aauaaaacauu

SEQ ID NO: 3601590 - RNA, 12 nt, Human
aauaaaaccuuu

SEQ ID NO: 3601591 - RNA, 16 nt, Human
aauaaaaccuuucaaa

SEQ ID NO: 3601592 - RNA, 21 nt, Human
aauaaaaccuuucaaauuuca

SEQ ID NO: 3601593 - RNA, 23 nt, Human
aauaaaaccuuucaaauuucaca

SEQ ID NO: 3601594 - RNA, 15 nt, Human
aauaaaacuggcuuu

SEQ ID NO: 3601595 - RNA, 18 nt, Human
aauaaaacuuuuuaaaau

SEQ ID NO: 3601596 - RNA, 16 nt, Human
aauaaaagaaaauuac

SEQ ID NO: 3601597 - RNA, 14 nt, Human
aauaaaagcccagg

SEQ ID NO: 3601598 - RNA, 17 nt, Human
aauaaaaggaaaagcaa

SEQ ID NO: 3601599 - RNA, 16 nt, Human
aauaaaagugaccuuu

SEQ ID NO: 3601600 - RNA, 19 nt, Human
aauaaaaguuuuacaaagg

SEQ ID NO: 3601601 - RNA, 12 nt, Human
aauaaaauaacc

SEQ ID NO: 3601602 - RNA, 15 nt, Human
aauaaaauaauucua

SEQ ID NO: 3601603 - RNA, 21 nt, Human
aauaaaauauaauuguuuuuu

SEQ ID NO: 3601604 - RNA, 15 nt, Human
aauaaaauauaucuu

SEQ ID NO: 3601605 - RNA, 15 nt, Human
aauaaaauaucauuc

SEQ ID NO: 3601606 - RNA, 19 nt, Human
aauaaaauaucauucagca

SEQ ID NO: 3601607 - RNA, 21 nt, Human
aauaaaauaucauucagcaac

SEQ ID NO: 3601608 - RNA, 11 nt, Human
aauaaaauauu

SEQ ID NO: 3601609 - RNA, 12 nt, Human
aauaaaauauuu

SEQ ID NO: 3601610 - RNA, 20 nt, Human
aauaaaauauuuucugugug

SEQ ID NO: 3601611 - RNA, 11 nt, Human
aauaaaaucau

SEQ ID NO: 3601612 - RNA, 14 nt, Human
aauaaaaugaaaau

SEQ ID NO: 3601613 - RNA, 12 nt, Human
aauaaaauuaag

SEQ ID NO: 3601614 - RNA, 15 nt, Human
aauaaaauuauuuug

SEQ ID NO: 3601615 - RNA, 19 nt, Human
aauaaaauucaacaaacau

SEQ ID NO: 3601616 - RNA, 18 nt, Human
aauaaaauucccuaaagc

SEQ ID NO: 3601617 - RNA, 13 nt, Human
aauaaaauuuaaa

SEQ ID NO: 3601618 - RNA, 12 nt, Human
aauaaaauuuuu

SEQ ID NO: 3601619 - RNA, 13 nt, Human
aauaaacauccuu

SEQ ID NO: 3601620 - RNA, 18 nt, Human
aauaaaccaaaggaaaau

SEQ ID NO: 3601621 - RNA, 15 nt, Human
aauaaacgauuuaau

SEQ ID NO: 3601622 - RNA, 21 nt, Human
aauaaacgauuuaauucucuu

SEQ ID NO: 3601623 - RNA, 16 nt, Human
aauaaacgucuuaaau

SEQ ID NO: 3601624 - RNA, 13 nt, Human
aauaaacuaaaga

SEQ ID NO: 3601625 - RNA, 18 nt, Human
aauaaacuaauaauugca

SEQ ID NO: 3601626 - RNA, 19 nt, Human
aauaaacuauuuguaaagu

SEQ ID NO: 3601627 - RNA, 15 nt, Human
aauaaacucuaaaca

SEQ ID NO: 3601628 - RNA, 22 nt, Human
aauaaacuguccucuuucagaa

SEQ ID NO: 3601629 - RNA, 14 nt, Human
aauaaacuucagca

SEQ ID NO: 3601630 - RNA, 21 nt, Human
aauaaacuuggauucucuaac

SEQ ID NO: 3601631 - RNA, 12 nt, Human
aauaaacuuuuu

SEQ ID NO: 3601632 - RNA, 16 nt, Human
aauaaacuuuuuuuca

SEQ ID NO: 3601633 - RNA, 19 nt, Human
aauaaacuuuuuuucaaug

SEQ ID NO: 3601634 - RNA, 21 nt, Human
aauaaacuuuuuuucaaugug

SEQ ID NO: 3601635 - RNA, 14 nt, Human
aauaaagaaaagau

SEQ ID NO: 3601636 - RNA, 20 nt, Human
aauaaagaaguaugguaauc

SEQ ID NO: 3601637 - RNA, 12 nt, Human
aauaaagaaugg

SEQ ID NO: 3601638 - RNA, 11 nt, Human
aauaaagacag

SEQ ID NO: 3601639 - RNA, 15 nt, Human
aauaaagaguuagaa

SEQ ID NO: 3601640 - RNA, 20 nt, Human
aauaaagaucauguaaaagu

SEQ ID NO: 3601641 - RNA, 16 nt, Human
aauaaagcaauaagaa

SEQ ID NO: 3601642 - RNA, 16 nt, Human
aauaaagcaauuuucc

SEQ ID NO: 3601643 - RNA, 17 nt, Human
aauaaagcaauuuuccu

SEQ ID NO: 3601644 - RNA, 15 nt, Human
aauaaagccugcuuu

SEQ ID NO: 3601645 - RNA, 11 nt, Human
aauaaagcugu

SEQ ID NO: 3601646 - RNA, 12 nt, Human
aauaaagcuugu

SEQ ID NO: 3601647 - RNA, 12 nt, Human
aauaaaguauaa

SEQ ID NO: 3601648 - RNA, 15 nt, Human
aauaaaguauaaugu

SEQ ID NO: 3601649 - RNA, 16 nt, Human
aauaaaguaucuacau

SEQ ID NO: 3601650 - RNA, 11 nt, Human
aauaaaguauu

SEQ ID NO: 3601651 - RNA, 19 nt, Human
aauaaaguauuccaccuua

SEQ ID NO: 3601652 - RNA, 16 nt, Human
aauaaaguauuuaauu

SEQ ID NO: 3601653 - RNA, 21 nt, Human
aauaaaguauuuaauuagugc

SEQ ID NO: 3601654 - RNA, 22 nt, Human
aauaaaguauuuaauuagugcu

SEQ ID NO: 3601655 - RNA, 17 nt, Human
aauaaagucagauggaa

SEQ ID NO: 3601656 - RNA, 12 nt, Human
aauaaagugacc

SEQ ID NO: 3601657 - RNA, 17 nt, Human
aauaaaguguuuucaga

SEQ ID NO: 3601658 - RNA, 15 nt, Human
aauaaaguuaaaagu

SEQ ID NO: 3601659 - RNA, 12 nt, Human
aauaaaguuuga

SEQ ID NO: 3601660 - RNA, 18 nt, Human
aauaaaguuugaucuucc

SEQ ID NO: 3601661 - RNA, 14 nt, Human
aauaaauaaaagcc

SEQ ID NO: 3601662 - RNA, 16 nt, Human
aauaaauaauuuucau

SEQ ID NO: 3601663 - RNA, 14 nt, Human
aauaaauagagcaa

SEQ ID NO: 3601664 - RNA, 19 nt, Human
aauaaauagcuauauccau

SEQ ID NO: 3601665 - RNA, 15 nt, Human
aauaaauauauacau

SEQ ID NO: 3601666 - RNA, 13 nt, Human
aauaaauaugagu

SEQ ID NO: 3601667 - RNA, 13 nt, Human
aauaaauaugccu

SEQ ID NO: 3601668 - RNA, 16 nt, Human
aauaaauaugccucuc

SEQ ID NO: 3601669 - RNA, 16 nt, Human
aauaaauauugucuuu

SEQ ID NO: 3601670 - RNA, 23 nt, Human
aauaaauauugucuuuuuguaug

SEQ ID NO: 3601671 - RNA, 14 nt, Human
aauaaauauuuaug

SEQ ID NO: 3601672 - RNA, 15 nt, Human
aauaaaucauguuaa

SEQ ID NO: 3601673 - RNA, 19 nt, Human
aauaaauccacccauguua

SEQ ID NO: 3601674 - RNA, 20 nt, Human
aauaaaucugacccagugcc

SEQ ID NO: 3601675 - RNA, 11 nt, Human
aauaaaucuuu

SEQ ID NO: 3601676 - RNA, 16 nt, Human
aauaaaucuuuggaaa

SEQ ID NO: 3601677 - RNA, 18 nt, Human
aauaaaugagcuauguau

SEQ ID NO: 3601678 - RNA, 19 nt, Human
aauaaaugcaauauguauu

SEQ ID NO: 3601679 - RNA, 23 nt, Human
aauaaaugguauagcaaauguuu

SEQ ID NO: 3601680 - RNA, 21 nt, Human
aauaaaugucaccagguacuu

SEQ ID NO: 3601681 - RNA, 15 nt, Human
aauaaaugucacuuu

SEQ ID NO: 3601682 - RNA, 14 nt, Human
aauaaaugucuugc

SEQ ID NO: 3601683 - RNA, 20 nt, Human
aauaaaugugaaauucuguc

SEQ ID NO: 3601684 - RNA, 11 nt, Human
aauaaaugugu

SEQ ID NO: 3601685 - RNA, 12 nt, Human
aauaaauguguu

SEQ ID NO: 3601686 - RNA, 16 nt, Human
aauaaauuaguuguua

SEQ ID NO: 3601687 - RNA, 12 nt, Human
aauaaauuauuu

SEQ ID NO: 3601688 - RNA, 17 nt, Human
aauaaauuauuuauuau

SEQ ID NO: 3601689 - RNA, 21 nt, Human
aauaaauugcaugcugcuuua

SEQ ID NO: 3601690 - RNA, 16 nt, Human
aauaaauugcuccuug

SEQ ID NO: 3601691 - RNA, 20 nt, Human
aauaaauugcuccuugacau

SEQ ID NO: 3601692 - RNA, 18 nt, Human
aauaaauuguacagccgg

SEQ ID NO: 3601693 - RNA, 13 nt, Human
aauaaauuguaua

SEQ ID NO: 3601694 - RNA, 18 nt, Human
aauaaauuuauaugaaaa

SEQ ID NO: 3601695 - RNA, 15 nt, Human
aauaaauuuugaaaa

SEQ ID NO: 3601696 - RNA, 18 nt, Human
aauaacaaaugccaaauu

SEQ ID NO: 3601697 - RNA, 21 nt, Human
aauaacaaugaaaguugauaa

SEQ ID NO: 3601698 - RNA, 13 nt, Human
aauaacaauguua

SEQ ID NO: 3601699 - RNA, 14 nt, Human
aauaacaauguuaa

SEQ ID NO: 3601700 - RNA, 15 nt, Human
aauaacaauguuaag

SEQ ID NO: 3601701 - RNA, 20 nt, Human
aauaacaauguuaaggaaac

SEQ ID NO: 3601702 - RNA, 24 nt, Human
aauaacaauguuaaggaaacucuu

SEQ ID NO: 3601703 - RNA, 15 nt, Human
aauaacacacagcua

SEQ ID NO: 3601704 - RNA, 23 nt, Human
aauaacacagagagacagacuug

SEQ ID NO: 3601705 - RNA, 20 nt, Human
aauaacagccgcuccagagu

SEQ ID NO: 3601706 - RNA, 12 nt, Human
aauaacagcugc

SEQ ID NO: 3601707 - RNA, 14 nt, Human
aauaacagcugcaa

SEQ ID NO: 3601708 - RNA, 19 nt, Human
aauaacauguaauuaagua

SEQ ID NO: 3601709 - RNA, 13 nt, Human
aauaacauuaccu

SEQ ID NO: 3601710 - RNA, 13 nt, Human
aauaacauuugug

SEQ ID NO: 3601711 - RNA, 12 nt, Human
aaggaagaaaaa

SEQ ID NO: 3601712 - RNA, 11 nt, Human
aaggaagaaau

SEQ ID NO: 3601713 - RNA, 21 nt, Human
aaggaagacuucaucccucug

SEQ ID NO: 3601714 - RNA, 18 nt, Human
aaggaagauauacaugaa

SEQ ID NO: 3601715 - RNA, 16 nt, Human
aaggaagcacaugccu

SEQ ID NO: 3601716 - RNA, 18 nt, Human
aaggaagccaaauuuauc

SEQ ID NO: 3601717 - RNA, 19 nt, Human
aaggaagccaaauuuauca

SEQ ID NO: 3601718 - RNA, 19 nt, Human
aaggaagccggggaagaga

SEQ ID NO: 3601719 - RNA, 18 nt, Human
aaggaagcuccacuguca

SEQ ID NO: 3601720 - RNA, 17 nt, Human
aaggaaggcuccaucuc

SEQ ID NO: 3601721 - RNA, 14 nt, Human
aaggaagucuagga

SEQ ID NO: 3601722 - RNA, 14 nt, Human
aaggaagugaagag

SEQ ID NO: 3601723 - RNA, 20 nt, Human
aaggaauacaauauauagcu

SEQ ID NO: 3601724 - RNA, 18 nt, Human
aaggaauaccuguccccc

SEQ ID NO: 3601725 - RNA, 13 nt, Human
aaggaauauaugg

SEQ ID NO: 3601726 - RNA, 18 nt, Human
aaggaauauauggcagag

SEQ ID NO: 3601727 - RNA, 21 nt, Human
aaggaauaugggagaaauagu

SEQ ID NO: 3601728 - RNA, 20 nt, Human
aaggaauccacucccaggca

SEQ ID NO: 3601729 - RNA, 22 nt, Human
aaggaauccacucccaggcagc

SEQ ID NO: 3601730 - RNA, 18 nt, Human
aaggaaucuagccaguga

SEQ ID NO: 3601731 - RNA, 23 nt, Human
aaggaaucuagccagugaacaua

SEQ ID NO: 3601732 - RNA, 17 nt, Human
aaggaaucuccaguuuu

SEQ ID NO: 3601733 - RNA, 14 nt, Human
aaggaaucuuuaag

SEQ ID NO: 3601734 - RNA, 16 nt, Human
aaggaaugucuuuggu

SEQ ID NO: 3601735 - RNA, 21 nt, Human
aaggaauuaccaagaauaucc

SEQ ID NO: 3601736 - RNA, 18 nt, Human
aaggaauuauagaccucu

SEQ ID NO: 3601737 - RNA, 17 nt, Human
aaggaauuucuuaacuu

SEQ ID NO: 3601738 - RNA, 20 nt, Human
aaggaauuucuuaacuucuu

SEQ ID NO: 3601739 - RNA, 12 nt, Human
aaggaauuuuau

SEQ ID NO: 3601740 - RNA, 17 nt, Human
aaggacaaaaaugaacu

SEQ ID NO: 3601741 - RNA, 21 nt, Human
aaggacaaagucuccagccca

SEQ ID NO: 3601742 - RNA, 16 nt, Human
aaggacacuuccugcc

SEQ ID NO: 3601743 - RNA, 18 nt, Human
aaggacacuuccugccua

SEQ ID NO: 3601744 - RNA, 17 nt, Human
aaggacaggcagaaaga

SEQ ID NO: 3601745 - RNA, 13 nt, Human
aaggacaggcagg

SEQ ID NO: 3601746 - RNA, 18 nt, Human
aaggacaugaugcuuuua

SEQ ID NO: 3601747 - RNA, 17 nt, Human
aaggacauuaugugugc

SEQ ID NO: 3601748 - RNA, 14 nt, Human
aaggaccagcccuu

SEQ ID NO: 3601749 - RNA, 13 nt, Human
aaggaccccucac

SEQ ID NO: 3601750 - RNA, 15 nt, Human
aaggaccccucaccu

SEQ ID NO: 3601751 - RNA, 21 nt, Human
aaggacccggaggggccuggc

SEQ ID NO: 3601752 - RNA, 14 nt, Human
aaggacccugugag

SEQ ID NO: 3601753 - RNA, 16 nt, Human
aaggaccuauguuugc

SEQ ID NO: 3601754 - RNA, 18 nt, Human
aaggaccugaaauuccaa

SEQ ID NO: 3601755 - RNA, 20 nt, Human
aaggaccuucacucuaagau

SEQ ID NO: 3601756 - RNA, 23 nt, Human
aaggaccuucacucuaagauguu

SEQ ID NO: 3601757 - RNA, 24 nt, Human
aaggaccuucacucuaagauguua

SEQ ID NO: 3601758 - RNA, 21 nt, Human
aaggacggccuucaacugaaa

SEQ ID NO: 3601759 - RNA, 17 nt, Human
aaggacggguuggggcc

SEQ ID NO: 3601760 - RNA, 15 nt, Human
aaggacuaauagaaa

SEQ ID NO: 3601761 - RNA, 18 nt, Human
aaggacuaauagaaaagu

SEQ ID NO: 3601762 - RNA, 21 nt, Human
aaggacuaugaaaagcuagaa

SEQ ID NO: 3601763 - RNA, 15 nt, Human
aaggacuccugaaaa

SEQ ID NO: 3601764 - RNA, 23 nt, Human
aaggacucugguuucucauucuu

SEQ ID NO: 3601765 - RNA, 21 nt, Human
aaggacugagcacccucugga

SEQ ID NO: 3601766 - RNA, 17 nt, Human
aaggacugagggacucu

SEQ ID NO: 3601767 - RNA, 22 nt, Human
aaggacugcaugguaauuuaua

SEQ ID NO: 3601768 - RNA, 22 nt, Human
aaggacugccgaccgaggcugg

SEQ ID NO: 3601769 - RNA, 23 nt, Human
aaggacugcgggacuugggucuc

SEQ ID NO: 3601770 - RNA, 20 nt, Human
aaggacuuccuguccagcuc

SEQ ID NO: 3601771 - RNA, 21 nt, Human
aaggacuuccuguccagcucc

SEQ ID NO: 3601772 - RNA, 22 nt, Human
aaggacuuccuguccagcucca

SEQ ID NO: 3601773 - RNA, 23 nt, Human
aaggacuuccuguccagcuccaa

SEQ ID NO: 3601774 - RNA, 20 nt, Human
aaggacuucuuuaauuuugg

SEQ ID NO: 3601775 - RNA, 15 nt, Human
aaggacuuguuagau

SEQ ID NO: 3601776 - RNA, 14 nt, Human
aaggagaacaaaua

SEQ ID NO: 3601777 - RNA, 15 nt, Human
aaggagaacaaauau

SEQ ID NO: 3601778 - RNA, 16 nt, Human
aaggagaaucaucagg

SEQ ID NO: 3601779 - RNA, 23 nt, Human
aaggagaaucaucaggacccugg

SEQ ID NO: 3601780 - RNA, 19 nt, Human
aaggagaaucauguuucuu

SEQ ID NO: 3601781 - RNA, 19 nt, Human
aauggauauuauuagaaau

SEQ ID NO: 3601782 - RNA, 13 nt, Human
aauggaucacaag

SEQ ID NO: 3601783 - RNA, 22 nt, Human
aauggaugccuugaauaauaag

SEQ ID NO: 3601784 - RNA, 16 nt, Human
aauggauuggauuauu

SEQ ID NO: 3601785 - RNA, 20 nt, Human
aauggauuggauuauuuaau

SEQ ID NO: 3601786 - RNA, 23 nt, Human
aauggauuggauuauuuaauaac

SEQ ID NO: 3601787 - RNA, 12 nt, Human
aauggauuguua

SEQ ID NO: 3601788 - RNA, 14 nt, Human
aauggcaacaaacu

SEQ ID NO: 3601789 - RNA, 14 nt, Human
aauggcaaguuuuc

SEQ ID NO: 3601790 - RNA, 17 nt, Human
aauggcacagcccaaag

SEQ ID NO: 3601791 - RNA, 12 nt, Human
aauggcacugau

SEQ ID NO: 3601792 - RNA, 13 nt, Human
aauggcagcaggg

SEQ ID NO: 3601793 - RNA, 19 nt, Human
aauggcagcagggguuggg

SEQ ID NO: 3601794 - RNA, 16 nt, Human
aauggcagccuuggca

SEQ ID NO: 3601795 - RNA, 17 nt, Human
aauggcaguuauauuuu

SEQ ID NO: 3601796 - RNA, 20 nt, Human
aauggcaguuauauuuugca

SEQ ID NO: 3601797 - RNA, 15 nt, Human
aauggcauuugcaau

SEQ ID NO: 3601798 - RNA, 15 nt, Human
aauggccucaugugg

SEQ ID NO: 3601799 - RNA, 14 nt, Human
aauggccugccuug

SEQ ID NO: 3601800 - RNA, 17 nt, Human
aauggccuucauaucau

SEQ ID NO: 3601801 - RNA, 18 nt, Human
aauggcgugaucucggcu

SEQ ID NO: 3601802 - RNA, 16 nt, Human
aauggcuauguuuuua

SEQ ID NO: 3601803 - RNA, 12 nt, Human
aauggcucagau

SEQ ID NO: 3601804 - RNA, 15 nt, Human
aauggcucagaugcc

SEQ ID NO: 3601805 - RNA, 14 nt, Human
aauggcugaagcca

SEQ ID NO: 3601806 - RNA, 19 nt, Human
aauggcugauaauuuuaaa

SEQ ID NO: 3601807 - RNA, 17 nt, Human
aauggcuguaaucauuu

SEQ ID NO: 3601808 - RNA, 21 nt, Human
aauggcuuauccagcugguga

SEQ ID NO: 3601809 - RNA, 14 nt, Human
aauggcuuguucau

SEQ ID NO: 3601810 - RNA, 15 nt, Human
aauggcuuuguauag

SEQ ID NO: 3601811 - RNA, 14 nt, Human
aaugggaacauuua

SEQ ID NO: 3601812 - RNA, 16 nt, Human
aaugggaauauuuuau

SEQ ID NO: 3601813 - RNA, 18 nt, Human
aaugggacuucuuuucac

SEQ ID NO: 3601814 - RNA, 20 nt, Human
aaugggacuucuuuucacau

SEQ ID NO: 3601815 - RNA, 21 nt, Human
aaugggacuucuuuucacauu

SEQ ID NO: 3601816 - RNA, 14 nt, Human
aaugggagcucaug

SEQ ID NO: 3601817 - RNA, 21 nt, Human
aaugggaggggaaaugggaau

SEQ ID NO: 3601818 - RNA, 12 nt, Human
aaugggcacagc

SEQ ID NO: 3601819 - RNA, 14 nt, Human
aaugggcacuuaaa

SEQ ID NO: 3601820 - RNA, 17 nt, Human
aaugggcaguuacaugc

SEQ ID NO: 3601821 - RNA, 22 nt, Human
aaugggcaguuacaugcauacu

SEQ ID NO: 3601822 - RNA, 14 nt, Human
aaugggcucaaacu

SEQ ID NO: 3601823 - RNA, 19 nt, Human
aaugggcucuccggggcca

SEQ ID NO: 3601824 - RNA, 12 nt, Human
aauggggccaga

SEQ ID NO: 3601825 - RNA, 14 nt, Human
aauggggccagauc

SEQ ID NO: 3601826 - RNA, 19 nt, Human
aauggggguagcagcugga

SEQ ID NO: 3601827 - RNA, 12 nt, Human
aauggguaauau

SEQ ID NO: 3601828 - RNA, 15 nt, Human
aauggguuacuugau

SEQ ID NO: 3601829 - RNA, 20 nt, Human
aaugguaacauuuuucaaua

SEQ ID NO: 3601830 - RNA, 22 nt, Human
aaugguacaaaaccacagugua

SEQ ID NO: 3601831 - RNA, 16 nt, Human
aaugguaccagauaaa

SEQ ID NO: 3601832 - RNA, 18 nt, Human
aaugguaggcauuuccua

SEQ ID NO: 3601833 - RNA, 24 nt, Human
aaugguagucuaaccaaaugcauc

SEQ ID NO: 3601834 - RNA, 13 nt, Human
aaugguaguuucu

SEQ ID NO: 3601835 - RNA, 15 nt, Human
aaugguauagcaaau

SEQ ID NO: 3601836 - RNA, 16 nt, Human
aaugguaucaaaauua

SEQ ID NO: 3601837 - RNA, 18 nt, Human
aaugguaucaaaauuaca

SEQ ID NO: 3601838 - RNA, 12 nt, Human
aaugguaucuuu

SEQ ID NO: 3601839 - RNA, 18 nt, Human
aaugguaugagcugaggg

SEQ ID NO: 3601840 - RNA, 23 nt, Human
aauggucacguuuggugcuucuc

SEQ ID NO: 3601841 - RNA, 18 nt, Human
aauggucagcguugcaug

SEQ ID NO: 3601842 - RNA, 17 nt, Human
aauggucccauccaggc

SEQ ID NO: 3601843 - RNA, 12 nt, Human
aauggugauuuu

SEQ ID NO: 3601844 - RNA, 19 nt, Human
aauggugcauuguauagau

SEQ ID NO: 3601845 - RNA, 18 nt, Human
aauggugcucauuucaug

SEQ ID NO: 3601846 - RNA, 16 nt, Human
aaugguggcuucagcu

SEQ ID NO: 3601847 - RNA, 23 nt, Human
aaugguggcuucuuuucuuugua

SEQ ID NO: 3601848 - RNA, 19 nt, Human
aaugguguagaacacuaau

SEQ ID NO: 3601849 - RNA, 19 nt, Human
aaugguguuuuucuuguaa

SEQ ID NO: 3601850 - RNA, 17 nt, Human
aaugguguuuuuuuaau

SEQ ID NO: 3601851 - RNA, 16 nt, Human
aaugguuauaaaagug

SEQ ID NO: 3601852 - RNA, 22 nt, Human
aaugguucagaauuaaacuuuu

SEQ ID NO: 3601853 - RNA, 19 nt, Human
aaugguuccaugccugagg

SEQ ID NO: 3601854 - RNA, 21 nt, Human
aaugguuccaugccugagggu

SEQ ID NO: 3601855 - RNA, 17 nt, Human
aaugucuugcuguugac

SEQ ID NO: 3601856 - RNA, 17 nt, Human
aaugucuuugguccucu

SEQ ID NO: 3601857 - RNA, 13 nt, Human
aaugucuuuguaa

SEQ ID NO: 3601858 - RNA, 19 nt, Human
aaugucuuuguaagucagu

SEQ ID NO: 3601859 - RNA, 18 nt, Human
aaugucuuuguuggaaaa

SEQ ID NO: 3601860 - RNA, 20 nt, Human
aaugucuuuuuucaaacuuu

SEQ ID NO: 3601861 - RNA, 15 nt, Human
aaugugaaaaaucug

SEQ ID NO: 3601862 - RNA, 22 nt, Human
aaugugaaacuggauuaaacuu

SEQ ID NO: 3601863 - RNA, 16 nt, Human
aaugugaaauguaacu

SEQ ID NO: 3601864 - RNA, 19 nt, Human
aaugugaacagcggcugga

SEQ ID NO: 3601865 - RNA, 19 nt, Human
aaugugaacuagcuggaau

SEQ ID NO: 3601866 - RNA, 20 nt, Human
aaugugaacuuuauuaaaua

SEQ ID NO: 3601867 - RNA, 15 nt, Human
aaugugaagaugcau

SEQ ID NO: 3601868 - RNA, 13 nt, Human
aaugugaagccuu

SEQ ID NO: 3601869 - RNA, 14 nt, Human
aaugugaagccuuc

SEQ ID NO: 3601870 - RNA, 15 nt, Human
aaugugaagccuucc

SEQ ID NO: 3601871 - RNA, 17 nt, Human
aaugugaaguguuaaua

SEQ ID NO: 3601872 - RNA, 18 nt, Human
aaugugaauuuuuauugu

SEQ ID NO: 3601873 - RNA, 17 nt, Human
aaugugaccagggguga

SEQ ID NO: 3601874 - RNA, 15 nt, Human
aaugugacccuccaa

SEQ ID NO: 3601875 - RNA, 21 nt, Human
aaugugagaagccagccagag

SEQ ID NO: 3601876 - RNA, 21 nt, Human
aaugugaguuuggucuggacu

SEQ ID NO: 3601877 - RNA, 23 nt, Human
aaugugaguuuggucuggacuga

SEQ ID NO: 3601878 - RNA, 19 nt, Human
aaugugauauaaacagcuu

SEQ ID NO: 3601879 - RNA, 11 nt, Human
aaugugauaug

SEQ ID NO: 3601880 - RNA, 12 nt, Human
aaugugaugaau

SEQ ID NO: 3601881 - RNA, 16 nt, Human
aaugugaugaauacug

SEQ ID NO: 3601882 - RNA, 14 nt, Human
aaugugauguucua

SEQ ID NO: 3601883 - RNA, 17 nt, Human
aaugugauuacugcucu

SEQ ID NO: 3601884 - RNA, 22 nt, Human
aaugugauuccuuugaagagga

SEQ ID NO: 3601885 - RNA, 14 nt, Human
aaugugauucuaau

SEQ ID NO: 3601886 - RNA, 17 nt, Human
aaugugcaauagaaggu

SEQ ID NO: 3601887 - RNA, 17 nt, Human
aaugugcacuuuauccu

SEQ ID NO: 3601888 - RNA, 20 nt, Human
aaugugcagguuuguuacau

SEQ ID NO: 3601889 - RNA, 23 nt, Human
aaugugcauucuuuuaaaagaca

SEQ ID NO: 3601890 - RNA, 17 nt, Human
aaugugccuaguucuuu

SEQ ID NO: 3601891 - RNA, 12 nt, Human
aaugugccuauu

SEQ ID NO: 3601892 - RNA, 12 nt, Human
aaugugcugugu

SEQ ID NO: 3601893 - RNA, 17 nt, Human
aaugugcuguguaaagu

SEQ ID NO: 3601894 - RNA, 19 nt, Human
aauguggagaacuaaaggu

SEQ ID NO: 3601895 - RNA, 16 nt, Human
aauguggcagcugucu

SEQ ID NO: 3601896 - RNA, 12 nt, Human
aauguggcuuga

SEQ ID NO: 3601897 - RNA, 14 nt, Human
aaugugggauuaug

SEQ ID NO: 3601898 - RNA, 13 nt, Human
aaugugggcacug

SEQ ID NO: 3601899 - RNA, 23 nt, Human
aauguguaaagaucuacaugaau

SEQ ID NO: 3601900 - RNA, 21 nt, Human
aauguguaagaacaacuaccu

SEQ ID NO: 3601901 - RNA, 16 nt, Human
aauguguacaacuuaa

SEQ ID NO: 3601902 - RNA, 19 nt, Human
aauguguacaauguacaca

SEQ ID NO: 3601903 - RNA, 18 nt, Human
aauguguauaaauugucu

SEQ ID NO: 3601904 - RNA, 19 nt, Human
aauguguccuaucuaucuu

SEQ ID NO: 3601905 - RNA, 14 nt, Human
aaugugucuuuaga

SEQ ID NO: 3601906 - RNA, 15 nt, Human
aaugugucuuuagau

SEQ ID NO: 3601907 - RNA, 18 nt, Human
aaugugucuuucuaagaa

SEQ ID NO: 3601908 - RNA, 16 nt, Human
aaugugugcccagcuu

SEQ ID NO: 3601909 - RNA, 16 nt, Human
aauguguguauaugga

SEQ ID NO: 3601910 - RNA, 18 nt, Human
aauguguguauguguauu

SEQ ID NO: 3601911 - RNA, 23 nt, Human
aauguguguauucuuaaaaugca

SEQ ID NO: 3601912 - RNA, 12 nt, Human
aauguguucucg

SEQ ID NO: 3601913 - RNA, 19 nt, Human
aauguguucucggagugug

SEQ ID NO: 3601914 - RNA, 15 nt, Human
aauguguugaaacug

SEQ ID NO: 3601915 - RNA, 19 nt, Human
aauguguuggacaaaugug

SEQ ID NO: 3601916 - RNA, 21 nt, Human
aauguguuggacaaaugugaa

SEQ ID NO: 3601917 - RNA, 23 nt, Human
aauguguuucacaguuugaaaua

SEQ ID NO: 3601918 - RNA, 15 nt, Human
aauguguuuuggucc

SEQ ID NO: 3601919 - RNA, 22 nt, Human
aauguguuuuucuccagugcug

SEQ ID NO: 3601920 - RNA, 12 nt, Human
aauguuaaaaug

SEQ ID NO: 3601921 - RNA, 15 nt, Human
aauguuaaaauguau

SEQ ID NO: 3601922 - RNA, 16 nt, Human
aauguuaaaauguauu

SEQ ID NO: 3601923 - RNA, 13 nt, Human
aauguuaaagaug

SEQ ID NO: 3601924 - RNA, 19 nt, Human
aauguuaaagauguagcaa

SEQ ID NO: 3601925 - RNA, 20 nt, Human
aauguuaaagauguagcaaa

SEQ ID NO: 3601926 - RNA, 13 nt, Human
aauguuaaaggga

SEQ ID NO: 3601927 - RNA, 18 nt, Human
aauguuaaauaaauugua

SEQ ID NO: 3601928 - RNA, 12 nt, Human
aauguuaagaau

SEQ ID NO: 3601929 - RNA, 15 nt, Human
aauguuaagaauuga

SEQ ID NO: 3601930 - RNA, 22 nt, Human
aauguuaagcaucuaaggacaa

SEQ ID NO: 3601931 - RNA, 18 nt, Human
aauguuaaggaaacucuu

SEQ ID NO: 3601932 - RNA, 23 nt, Human
aauguuaauucagcacugauuuc

SEQ ID NO: 3601933 - RNA, 22 nt, Human
aauguuaauuuuuugguacaaa

SEQ ID NO: 3601934 - RNA, 16 nt, Human
aauguuacauagugua

SEQ ID NO: 3601935 - RNA, 17 nt, Human
aauguuacauaguguag

SEQ ID NO: 3601936 - RNA, 15 nt, Human
aauguuacauuauua

SEQ ID NO: 3601937 - RNA, 15 nt, Human
aauguuacauuguuu

SEQ ID NO: 3601938 - RNA, 20 nt, Human
aauguuacugaucaugcauu

SEQ ID NO: 3601939 - RNA, 13 nt, Human
aauguuacugccu

SEQ ID NO: 3601940 - RNA, 17 nt, Human
aauguuaguuaguguag

SEQ ID NO: 3601941 - RNA, 19 nt, Human
aauguuaucuuauacugua

SEQ ID NO: 3601942 - RNA, 16 nt, Human
aauguuaucuucucaa

SEQ ID NO: 3601943 - RNA, 17 nt, Human
aauguuaucuucucaag

SEQ ID NO: 3601944 - RNA, 22 nt, Human
aauguuaucuucucaaguucua

SEQ ID NO: 3601945 - RNA, 22 nt, Human
aauguuaugacuauguaaacua

SEQ ID NO: 3601946 - RNA, 21 nt, Human
aauguuauuuucuucuaagug

SEQ ID NO: 3601947 - RNA, 19 nt, Human
aauguuauuuuuuaauuau

SEQ ID NO: 3601948 - RNA, 20 nt, Human
aauguuauuuuuuaauuauu

SEQ ID NO: 3601949 - RNA, 21 nt, Human
aauguuauuuuuuaauuauua

SEQ ID NO: 3601950 - RNA, 19 nt, Human
aauguucacgcaacuugaa

SEQ ID NO: 3601951 - RNA, 16 nt, Human
aauguucaucaaugaa

SEQ ID NO: 3601952 - RNA, 20 nt, Human
aauguucaucaaugaaugaa

SEQ ID NO: 3601953 - RNA, 21 nt, Human
aauguucaucccaugauguag

SEQ ID NO: 3601954 - RNA, 22 nt, Human
aauguucauuguaauguuacug

SEQ ID NO: 3601955 - RNA, 24 nt, Human
aauguucauuguaauguuacugau

SEQ ID NO: 3601956 - RNA, 15 nt, Human
aauguuccuuuugcu

SEQ ID NO: 3601957 - RNA, 14 nt, Human
aauguucuaaguuu

SEQ ID NO: 3601958 - RNA, 20 nt, Human
aauguucuaaguuucuaaga

SEQ ID NO: 3601959 - RNA, 21 nt, Human
aauguucucucuucuccaccu

SEQ ID NO: 3601960 - RNA, 14 nt, Human
aauguucugacauu

SEQ ID NO: 3601961 - RNA, 20 nt, Human
aauguucugacauuaacagu

SEQ ID NO: 3601962 - RNA, 21 nt, Human
aauguucugugauacagaacu

SEQ ID NO: 3601963 - RNA, 22 nt, Human
aauguucuuaugcaaaauggaa

SEQ ID NO: 3601964 - RNA, 10 nt, Human
aauguucuuu

SEQ ID NO: 3601965 - RNA, 12 nt, Human
aauguucuuuau

SEQ ID NO: 3601966 - RNA, 16 nt, Human
aauguucuuuauauac

SEQ ID NO: 3601967 - RNA, 13 nt, Human
aauguugaaaagu

SEQ ID NO: 3601968 - RNA, 22 nt, Human
aauguugaaauaugauguuaaa

SEQ ID NO: 3601969 - RNA, 15 nt, Human
aauguugaacaaaau

SEQ ID NO: 3601970 - RNA, 19 nt, Human
aauguugaaccaaaccucc

SEQ ID NO: 3601971 - RNA, 19 nt, Human
aauguugauuacagugcag

SEQ ID NO: 3601972 - RNA, 13 nt, Human
aauguugauuucu

SEQ ID NO: 3601973 - RNA, 16 nt, Human
aauguugauuucuagu

SEQ ID NO: 3601974 - RNA, 22 nt, Human
aauguugauuucuaguuauuua

SEQ ID NO: 3601975 - RNA, 20 nt, Human
aauguugcuuaggaugugug

SEQ ID NO: 3601976 - RNA, 16 nt, Human
aauguuggauaaggaa

SEQ ID NO: 3601977 - RNA, 17 nt, Human
aauguuggauaaggaau

SEQ ID NO: 3601978 - RNA, 20 nt, Human
aauguuggcagaugcagcuc

SEQ ID NO: 3601979 - RNA, 23 nt, Human
aauguuggucauuuuauguuaag

SEQ ID NO: 3601980 - RNA, 15 nt, Human
aauguugguuuacuu

SEQ ID NO: 3601981 - RNA, 15 nt, Human
aauguuguuauuuaa

SEQ ID NO: 3601982 - RNA, 15 nt, Human
aauguuuaagcagaa

SEQ ID NO: 3601983 - RNA, 14 nt, Human
aauguuuaaugcug

SEQ ID NO: 3601984 - RNA, 22 nt, Human
aauguuuacagggagccuccug

SEQ ID NO: 3601985 - RNA, 22 nt, Human
aauguuuaugcaaggaaggaaa

SEQ ID NO: 3601986 - RNA, 12 nt, Human
aauguuuccuuu

SEQ ID NO: 3601987 - RNA, 20 nt, Human
aauguuuccuuuaauuuuuu

SEQ ID NO: 3601988 - RNA, 12 nt, Human
aauguuucuaag

SEQ ID NO: 3601989 - RNA, 16 nt, Human
aauguuucuggauuuc

SEQ ID NO: 3601990 - RNA, 20 nt, Human
aauguuugacacaauuggaa

SEQ ID NO: 3601991 - RNA, 18 nt, Human
aauguuugccucugccuc

SEQ ID NO: 3601992 - RNA, 18 nt, Human
aauguuugggcagaaggg

SEQ ID NO: 3601993 - RNA, 19 nt, Human
aauguuuguuaaaaauaaa

SEQ ID NO: 3601994 - RNA, 20 nt, Human
aauguuuuacugugaaacug

SEQ ID NO: 3601995 - RNA, 13 nt, Human
aauguuuucuuug

SEQ ID NO: 3601996 - RNA, 16 nt, Human
aauguuuucuuugcaa

SEQ ID NO: 3601997 - RNA, 17 nt, Human
aauguuuucuuugcaaa

SEQ ID NO: 3601998 - RNA, 12 nt, Human
aauguuuuguaa

SEQ ID NO: 3601999 - RNA, 18 nt, Human
aauguuuuguaaacauuu

SEQ ID NO: 3602000 - RNA, 23 nt, Human
augcgcaggcuggcccugcccug

SEQ ID NO: 3602001 - RNA, 15 nt, Human
augcgcaguugcugu

SEQ ID NO: 3602002 - RNA, 13 nt, Human
augcgcccccucc

SEQ ID NO: 3602003 - RNA, 18 nt, Human
augcggcaagaaggaauu

SEQ ID NO: 3602004 - RNA, 19 nt, Human
augcggccgcauucccuga

SEQ ID NO: 3602005 - RNA, 16 nt, Human
augcgggccagugcuc

SEQ ID NO: 3602006 - RNA, 16 nt, Human
augcguaaacgacacu

SEQ ID NO: 3602007 - RNA, 21 nt, Human
augcguauuauaccaaaaugu

SEQ ID NO: 3602008 - RNA, 13 nt, Human
augcgucccaaga

SEQ ID NO: 3602009 - RNA, 15 nt, Human
augcguucacuccaa

SEQ ID NO: 3602010 - RNA, 14 nt, Human
augcuaaaaccuga

SEQ ID NO: 3602011 - RNA, 23 nt, Human
augcuaaaccuuaguacugaguu

SEQ ID NO: 3602012 - RNA, 22 nt, Human
augcuaaagaaaaagucaucca

SEQ ID NO: 3602013 - RNA, 19 nt, Human
augcuaacaguucacuugc

SEQ ID NO: 3602014 - RNA, 14 nt, Human
augcuaacaucuaa

SEQ ID NO: 3602015 - RNA, 17 nt, Human
augcuaagagaaguaga

SEQ ID NO: 3602016 - RNA, 13 nt, Human
caccccuucccca

SEQ ID NO: 3602017 - RNA, 15 nt, Human
caccccuuccccacu

SEQ ID NO: 3602018 - RNA, 15 nt, Human
caccccuuccugggc

SEQ ID NO: 3602019 - RNA, 13 nt, Human
caccccuuccugu

SEQ ID NO: 3602020 - RNA, 16 nt, Human
caccccuuccuguccc

SEQ ID NO: 3602021 - RNA, 18 nt, Human
caccccuucucuccuccc

SEQ ID NO: 3602022 - RNA, 13 nt, Human
cacccgaccacac

SEQ ID NO: 3602023 - RNA, 15 nt, Human
cacccgacuccucaa

SEQ ID NO: 3602024 - RNA, 17 nt, Human
cacccgaggcugcccac

SEQ ID NO: 3602025 - RNA, 23 nt, Human
cacccgaugcugcuuuccccugu

SEQ ID NO: 3602026 - RNA, 15 nt, Human
cacccggcugcagag

SEQ ID NO: 3602027 - RNA, 13 nt, Human
cacccgggcucag

SEQ ID NO: 3602028 - RNA, 23 nt, Human
cacccgguccccacuuuauugcc

SEQ ID NO: 3602029 - RNA, 19 nt, Human
cacccggugaccucuagcc

SEQ ID NO: 3602030 - RNA, 21 nt, Human
cacccggugggacccccgugg

SEQ ID NO: 3602031 - RNA, 17 nt, Human
cacccgugagcgccugu

SEQ ID NO: 3602032 - RNA, 16 nt, Human
cacccguggagauggg

SEQ ID NO: 3602033 - RNA, 17 nt, Human
cacccgugguggcucaa

SEQ ID NO: 3602034 - RNA, 21 nt, Human
cacccguucugcuggccugga

SEQ ID NO: 3602035 - RNA, 20 nt, Human
cacccuaauguggcagcugu

SEQ ID NO: 3602036 - RNA, 16 nt, Human
cacccuaccugugccu

SEQ ID NO: 3602037 - RNA, 16 nt, Human
cacccuaccuguucag

SEQ ID NO: 3602038 - RNA, 16 nt, Human
cacccuagucccuucc

SEQ ID NO: 3602039 - RNA, 18 nt, Human
cacccuagucccuucccc

SEQ ID NO: 3602040 - RNA, 20 nt, Human
cacccuagucccuuccccuc

SEQ ID NO: 3602041 - RNA, 17 nt, Human
cacccuaguuucccuga

SEQ ID NO: 3602042 - RNA, 12 nt, Human
cacccucacacu

SEQ ID NO: 3602043 - RNA, 16 nt, Human
cacccucacucugcca

SEQ ID NO: 3602044 - RNA, 20 nt, Human
cacccucacuggcucuccug

SEQ ID NO: 3602045 - RNA, 21 nt, Human
cacccucacuggcucuccugg

SEQ ID NO: 3602046 - RNA, 19 nt, Human
cacccucagcaccccuucc

SEQ ID NO: 3602047 - RNA, 22 nt, Human
cacccucagcaccccuuccaug

SEQ ID NO: 3602048 - RNA, 14 nt, Human
cacccucaggcagg

SEQ ID NO: 3602049 - RNA, 17 nt, Human
cacccucauucuacuga

SEQ ID NO: 3602050 - RNA, 16 nt, Human
cacccuccacccuguc

SEQ ID NO: 3602051 - RNA, 17 nt, Human
cacccuccacccugucc

SEQ ID NO: 3602052 - RNA, 19 nt, Human
cacccucccagaccugccu

SEQ ID NO: 3602053 - RNA, 20 nt, Human
cacccucccccgccacuccu

SEQ ID NO: 3602054 - RNA, 11 nt, Human
cacccuccccu

SEQ ID NO: 3602055 - RNA, 19 nt, Human
cacccuccccucucuugca

SEQ ID NO: 3602056 - RNA, 23 nt, Human
cacccuccccucucuugcacccg

SEQ ID NO: 3602057 - RNA, 16 nt, Human
cacccuccccuuccca

SEQ ID NO: 3602058 - RNA, 20 nt, Human
cacccuccccuucccagggc

SEQ ID NO: 3602059 - RNA, 13 nt, Human
cacccucccugga

SEQ ID NO: 3602060 - RNA, 14 nt, Human
cacccucccuggag

SEQ ID NO: 3602061 - RNA, 12 nt, Human
cacccuccuggc

SEQ ID NO: 3602062 - RNA, 18 nt, Human
cacccuccuggccucaga

SEQ ID NO: 3602063 - RNA, 22 nt, Human
cacccuccuggccucagacugc

SEQ ID NO: 3602064 - RNA, 19 nt, Human
cacccuccugucuucccag

SEQ ID NO: 3602065 - RNA, 20 nt, Human
cacccuccugucuucccagg

SEQ ID NO: 3602066 - RNA, 21 nt, Human
cacccuccugucuucccaggg

SEQ ID NO: 3602067 - RNA, 22 nt, Human
cacccuccuucccacucuucuc

SEQ ID NO: 3602068 - RNA, 16 nt, Human
cacccucgaagcgcgc

SEQ ID NO: 3602069 - RNA, 23 nt, Human
cacccucgaagcgcgccacucgc

SEQ ID NO: 3602070 - RNA, 24 nt, Human
cacccucgaagcgcgccacucgcu

SEQ ID NO: 3602071 - RNA, 22 nt, Human
cacccucggggauguguccuga

SEQ ID NO: 3602072 - RNA, 15 nt, Human
cacccucucccagga

SEQ ID NO: 3602073 - RNA, 13 nt, Human
cacccucugagcu

SEQ ID NO: 3602074 - RNA, 22 nt, Human
cacccucugagcuuugcauguu

SEQ ID NO: 3602075 - RNA, 22 nt, Human
cacccucuggcugaggagcugu

SEQ ID NO: 3602076 - RNA, 11 nt, Human
cacccucuucc

SEQ ID NO: 3602077 - RNA, 14 nt, Human
cacccucuuccuac

SEQ ID NO: 3602078 - RNA, 16 nt, Human
cacccucuuccuacug

SEQ ID NO: 3602079 - RNA, 17 nt, Human
cacccucuuccuacugg

SEQ ID NO: 3602080 - RNA, 17 nt, Human
cacccugaaagcccuga

SEQ ID NO: 3602081 - RNA, 12 nt, Human
cacccugagccc

SEQ ID NO: 3602082 - RNA, 21 nt, Human
cacccugaggagucugagguc

SEQ ID NO: 3602083 - RNA, 17 nt, Human
cacccugaggucaggga

SEQ ID NO: 3602084 - RNA, 17 nt, Human
cacccugauaggaagag

SEQ ID NO: 3602085 - RNA, 17 nt, Human
cacccugccccucagag

SEQ ID NO: 3602086 - RNA, 12 nt, Human
cacccugccuua

SEQ ID NO: 3602087 - RNA, 13 nt, Human
cacccugccuuau

SEQ ID NO: 3602088 - RNA, 15 nt, Human
cacccugcugccuuc

SEQ ID NO: 3602089 - RNA, 17 nt, Human
cacccugcuuggcccag

SEQ ID NO: 3602090 - RNA, 21 nt, Human
cacccuggaggauuucaucuc

SEQ ID NO: 3602091 - RNA, 21 nt, Human
cacccuggauugaucggagcc

SEQ ID NO: 3602092 - RNA, 19 nt, Human
cacccuggccuagaccagc

SEQ ID NO: 3602093 - RNA, 23 nt, Human
cacccuggccuagaccagcagac

SEQ ID NO: 3602094 - RNA, 16 nt, Human
cacccugggcucugug

SEQ ID NO: 3602095 - RNA, 17 nt, Human
cacccugggcucugugg

SEQ ID NO: 3602096 - RNA, 17 nt, Human
cacccuguacuguucug

SEQ ID NO: 3602097 - RNA, 21 nt, Human
cacccuguacuguucuguguc

SEQ ID NO: 3602098 - RNA, 20 nt, Human
cacccuguccaaacugccua

SEQ ID NO: 3602099 - RNA, 23 nt, Human
cacccuguccaaacugccuaagc

SEQ ID NO: 3602100 - RNA, 16 nt, Human
cacccugucccccagc

SEQ ID NO: 3602101 - RNA, 20 nt, Human
cacccugucccccagcucug

SEQ ID NO: 3602102 - RNA, 19 nt, Human
cacccugucugccccgccc

SEQ ID NO: 3602103 - RNA, 11 nt, Human
cacccugugau

SEQ ID NO: 3602104 - RNA, 12 nt, Human
cacccugugaug

SEQ ID NO: 3602105 - RNA, 20 nt, Human
cacccugugauggggcccug

SEQ ID NO: 3602106 - RNA, 16 nt, Human
cacccuguggcccugg

SEQ ID NO: 3602107 - RNA, 14 nt, Human
cacccuguuccugc

SEQ ID NO: 3602108 - RNA, 20 nt, Human
cacccuguuuggauuuuuaa

SEQ ID NO: 3602109 - RNA, 22 nt, Human
cacccuguuuggauuuuuaauu

SEQ ID NO: 3602110 - RNA, 17 nt, Human
cacccuuaacccaagga

SEQ ID NO: 3602111 - RNA, 20 nt, Human
cacccuucacauacccuccc

SEQ ID NO: 3602112 - RNA, 19 nt, Human
cacccuuccaucugauucc

SEQ ID NO: 3602113 - RNA, 13 nt, Human
cacccuuccccuc

SEQ ID NO: 3602114 - RNA, 14 nt, Human
cacccuuccccucc

SEQ ID NO: 3602115 - RNA, 23 nt, Human
cacccuuccccuccuucucccuu

SEQ ID NO: 3602116 - RNA, 18 nt, Human
cacccuucucccacucuc

SEQ ID NO: 3602117 - RNA, 16 nt, Human
cacccuucuuuccucu

SEQ ID NO: 3602118 - RNA, 20 nt, Human
cacccuucuuuccucuuccc

SEQ ID NO: 3602119 - RNA, 14 nt, Human
cacccuucuuuucu

SEQ ID NO: 3602120 - RNA, 16 nt, Human
cacccuucuuuucuca

SEQ ID NO: 3602121 - RNA, 23 nt, Human
cacccuugcccaccccaccccca

SEQ ID NO: 3602122 - RNA, 13 nt, Human
cacccuuggacuu

SEQ ID NO: 3602123 - RNA, 16 nt, Human
cacccuuggacuugag

SEQ ID NO: 3602124 - RNA, 15 nt, Human
cacccuuggagcucu

SEQ ID NO: 3602125 - RNA, 23 nt, Human
cacccuuggccugucucaucccc

SEQ ID NO: 3602126 - RNA, 13 nt, Human
cacccuuguucca

SEQ ID NO: 3602127 - RNA, 20 nt, Human
cacccuuugcugugaggcug

SEQ ID NO: 3602128 - RNA, 17 nt, Human
cacccuuuuccagcugg

SEQ ID NO: 3602129 - RNA, 23 nt, Human
caccgaaguggacuggccccugg

SEQ ID NO: 3602130 - RNA, 17 nt, Human
caccgacgcgucuccug

SEQ ID NO: 3602131 - RNA, 19 nt, Human
caccgacgcgucuccuguu

SEQ ID NO: 3602132 - RNA, 13 nt, Human
caccgagaauguu

SEQ ID NO: 3602133 - RNA, 14 nt, Human
caccgaggggccuu

SEQ ID NO: 3602134 - RNA, 13 nt, Human
caccgcagacagg

SEQ ID NO: 3602135 - RNA, 15 nt, Human
caccgcagacaggac

SEQ ID NO: 3602136 - RNA, 13 nt, Human
caccgcagucguc

SEQ ID NO: 3602137 - RNA, 18 nt, Human
caccgcaugcccccucgu

SEQ ID NO: 3602138 - RNA, 23 nt, Human
caccgccauggcuuccaaggugg

SEQ ID NO: 3602139 - RNA, 19 nt, Human
caccgccgacuuuguaccc

SEQ ID NO: 3602140 - RNA, 19 nt, Human
caccgccggccagcuggga

SEQ ID NO: 3602141 - RNA, 19 nt, Human
caccgccuccccaccucca

SEQ ID NO: 3602142 - RNA, 22 nt, Human
caccgccuccccaccuccaggc

SEQ ID NO: 3602143 - RNA, 15 nt, Human
caccgccucuucccg

SEQ ID NO: 3602144 - RNA, 16 nt, Human
caccuaguggcugucc

SEQ ID NO: 3602145 - RNA, 18 nt, Human
caccuaguggcuguccag

SEQ ID NO: 3602146 - RNA, 22 nt, Human
caccuaguggcuguccagugcc

SEQ ID NO: 3602147 - RNA, 23 nt, Human
caccuaguggcuguccagugccc

SEQ ID NO: 3602148 - RNA, 16 nt, Human
caccuauaaaacaggu

SEQ ID NO: 3602149 - RNA, 20 nt, Human
caccuauaauaccagcuacu

SEQ ID NO: 3602150 - RNA, 16 nt, Human
caccuauagucccagc

SEQ ID NO: 3602151 - RNA, 18 nt, Human
caccuaucucgugggaga

SEQ ID NO: 3602152 - RNA, 19 nt, Human
caccuaugucauuucauuu

SEQ ID NO: 3602153 - RNA, 18 nt, Human
caccuauuaucccagcug

SEQ ID NO: 3602154 - RNA, 17 nt, Human
caccucacacuccuuua

SEQ ID NO: 3602155 - RNA, 11 nt, Human
caccucacccc

SEQ ID NO: 3602156 - RNA, 13 nt, Human
caccucacuccug

SEQ ID NO: 3602157 - RNA, 15 nt, Human
caccucacuccuguu

SEQ ID NO: 3602158 - RNA, 16 nt, Human
caccucacucugcuac

SEQ ID NO: 3602159 - RNA, 12 nt, Human
caccucagaugg

SEQ ID NO: 3602160 - RNA, 19 nt, Human
caccucagauggcagcuuu

SEQ ID NO: 3602161 - RNA, 11 nt, Human
caccucagccu

SEQ ID NO: 3602162 - RNA, 18 nt, Human
caccucagccuccugugu

SEQ ID NO: 3602163 - RNA, 12 nt, Human
caccucagccug

SEQ ID NO: 3602164 - RNA, 14 nt, Human
caccucagccugca

SEQ ID NO: 3602165 - RNA, 15 nt, Human
caccucagccuugga

SEQ ID NO: 3602166 - RNA, 15 nt, Human
caccucaggccaggu

SEQ ID NO: 3602167 - RNA, 23 nt, Human
caccucaggccaggugcaguggc

SEQ ID NO: 3602168 - RNA, 22 nt, Human
caccucaguucccuuggccuca

SEQ ID NO: 3602169 - RNA, 15 nt, Human
caccucaugcccacc

SEQ ID NO: 3602170 - RNA, 19 nt, Human
caccucaugcccacccccu

SEQ ID NO: 3602171 - RNA, 11 nt, Human
caccucaugga

SEQ ID NO: 3602172 - RNA, 12 nt, Human
caccucauggaa

SEQ ID NO: 3602173 - RNA, 14 nt, Human
caccuccagcccgg

SEQ ID NO: 3602174 - RNA, 16 nt, Human
caccuccagcccggga

SEQ ID NO: 3602175 - RNA, 21 nt, Human
caccuccagcccgggagccua

SEQ ID NO: 3602176 - RNA, 18 nt, Human
caccuccaggccuguugc

SEQ ID NO: 3602177 - RNA, 12 nt, Human
caccuccaggcu

SEQ ID NO: 3602178 - RNA, 22 nt, Human
caccuccagucccccuauccuu

SEQ ID NO: 3602179 - RNA, 15 nt, Human
caccuccaucccaga

SEQ ID NO: 3602180 - RNA, 13 nt, Human
caccuccccacgc

SEQ ID NO: 3602181 - RNA, 17 nt, Human
caccuccccacgcccuc

SEQ ID NO: 3602182 - RNA, 19 nt, Human
caccuccccacgcccuccc

SEQ ID NO: 3602183 - RNA, 21 nt, Human
caccucccccacucccaacca

SEQ ID NO: 3602184 - RNA, 14 nt, Human
caccuccccuugcc

SEQ ID NO: 3602185 - RNA, 15 nt, Human
caccuccccuugcca

SEQ ID NO: 3602186 - RNA, 16 nt, Human
caccuccccuugccag

SEQ ID NO: 3602187 - RNA, 22 nt, Human
caccuccccuugccagcugcug

SEQ ID NO: 3602188 - RNA, 15 nt, Human
caccucccucaaccu

SEQ ID NO: 3602189 - RNA, 19 nt, Human
caccucccugaaccauccc

SEQ ID NO: 3602190 - RNA, 17 nt, Human
caccucccugccuccag

SEQ ID NO: 3602191 - RNA, 18 nt, Human
caccuccuaaaaggccca

SEQ ID NO: 3602192 - RNA, 16 nt, Human
caccuccucccacugc

SEQ ID NO: 3602193 - RNA, 22 nt, Human
caccuccucggcuggcugucca

SEQ ID NO: 3602194 - RNA, 11 nt, Human
caccuccugcc

SEQ ID NO: 3602195 - RNA, 14 nt, Human
caccuccugccucg

SEQ ID NO: 3602196 - RNA, 22 nt, Human
caccuccuugucacuuuauuac

SEQ ID NO: 3602197 - RNA, 15 nt, Human
caccucgaauuuugu

SEQ ID NO: 3602198 - RNA, 21 nt, Human
caccucguuagggaagagaaa

SEQ ID NO: 3602199 - RNA, 16 nt, Human
caccucuaacagcacc

SEQ ID NO: 3602200 - RNA, 22 nt, Human
caccucuacccaaacccuaggu

SEQ ID NO: 3602201 - RNA, 13 nt, Human
caccucuccaagg

SEQ ID NO: 3602202 - RNA, 12 nt, Human
caccucucccuc

SEQ ID NO: 3602203 - RNA, 14 nt, Human
caccucucccucaa

SEQ ID NO: 3602204 - RNA, 19 nt, Human
caccucucccucaacaagg

SEQ ID NO: 3602205 - RNA, 16 nt, Human
caccucucuccuuugc

SEQ ID NO: 3602206 - RNA, 19 nt, Human
caccucugcacaagcugca

SEQ ID NO: 3602207 - RNA, 12 nt, Human
caccucugccag

SEQ ID NO: 3602208 - RNA, 13 nt, Human
caccucugccaga

SEQ ID NO: 3602209 - RNA, 13 nt, Human
caccucugccuca

SEQ ID NO: 3602210 - RNA, 19 nt, Human
caccucugcggaccccagc

SEQ ID NO: 3602211 - RNA, 22 nt, Human
caccucugcuacucaaguagca

SEQ ID NO: 3602212 - RNA, 12 nt, Human
caccucugcugc

SEQ ID NO: 3602213 - RNA, 19 nt, Human
caccucugucauuuguugu

SEQ ID NO: 3602214 - RNA, 18 nt, Human
caccucugugaccucagg

SEQ ID NO: 3602215 - RNA, 13 nt, Human
caccucuguggca

SEQ ID NO: 3602216 - RNA, 22 nt, Human
caccucuuaaagaaaacccacc

SEQ ID NO: 3602217 - RNA, 20 nt, Human
caccucuucaccccccacuc

SEQ ID NO: 3602218 - RNA, 15 nt, Human
caccucuuccuggcc

SEQ ID NO: 3602219 - RNA, 16 nt, Human
caccucuuccuggccg

SEQ ID NO: 3602220 - RNA, 17 nt, Human
caccucuucucuuccug

SEQ ID NO: 3602221 - RNA, 14 nt, Human
caccugaagacuca

SEQ ID NO: 3602222 - RNA, 23 nt, Human
caccugaagacucauucuucugu

SEQ ID NO: 3602223 - RNA, 16 nt, Human
caccugacacaccagg

SEQ ID NO: 3602224 - RNA, 23 nt, Human
caccugacucugaaaucugaaga

SEQ ID NO: 3602225 - RNA, 21 nt, Human
caccugagcccggaugcuucu

SEQ ID NO: 3602226 - RNA, 17 nt, Human
caccugaggugggccca

SEQ ID NO: 3602227 - RNA, 23 nt, Human
caccugagucacccuaccugugc

SEQ ID NO: 3602228 - RNA, 16 nt, Human
caccugauguguacau

SEQ ID NO: 3602229 - RNA, 19 nt, Human
caccugauucaacuaaaaa

SEQ ID NO: 3602230 - RNA, 20 nt, Human
caccugcaaagcucuguggc

SEQ ID NO: 3602231 - RNA, 13 nt, Human
caccugcaccucc

SEQ ID NO: 3602232 - RNA, 23 nt, Human
caccugcagauucuaggaccugu

SEQ ID NO: 3602233 - RNA, 15 nt, Human
cacuaccuccucagg

SEQ ID NO: 3602234 - RNA, 16 nt, Human
cacuaccuccucaggg

SEQ ID NO: 3602235 - RNA, 14 nt, Human
cacuacuccucugc

SEQ ID NO: 3602236 - RNA, 18 nt, Human
cacuacuccucugcagug

SEQ ID NO: 3602237 - RNA, 13 nt, Human
cacuacucugugc

SEQ ID NO: 3602238 - RNA, 13 nt, Human
cacuacugacaug

SEQ ID NO: 3602239 - RNA, 15 nt, Human
cacuacugacaugug

SEQ ID NO: 3602240 - RNA, 13 nt, Human
cacuacugcagca

SEQ ID NO: 3602241 - RNA, 16 nt, Human
cacuacugcagcaccu

SEQ ID NO: 3602242 - RNA, 15 nt, Human
cacuacuggguguca

SEQ ID NO: 3602243 - RNA, 12 nt, Human
cacuagaaaacu

SEQ ID NO: 3602244 - RNA, 17 nt, Human
cacuagaacucuccauc

SEQ ID NO: 3602245 - RNA, 13 nt, Human
cacuagaauggau

SEQ ID NO: 3602246 - RNA, 18 nt, Human
cacuagaauggauaaaau

SEQ ID NO: 3602247 - RNA, 21 nt, Human
cacuagacaagccagaacuug

SEQ ID NO: 3602248 - RNA, 22 nt, Human
cacuagccaaaccucaccaacu

SEQ ID NO: 3602249 - RNA, 18 nt, Human
cacuagccuuuggcucug

SEQ ID NO: 3602250 - RNA, 18 nt, Human
cacuaggacucugaggcu

SEQ ID NO: 3602251 - RNA, 20 nt, Human
cacuaggcacccagcugcca

SEQ ID NO: 3602252 - RNA, 17 nt, Human
cacuaggcccccacuug

SEQ ID NO: 3602253 - RNA, 21 nt, Human
cacuaggcccccacuugccuc

SEQ ID NO: 3602254 - RNA, 23 nt, Human
cacuaggcccccacuugccucuu

SEQ ID NO: 3602255 - RNA, 18 nt, Human
cacuaggcugggugccca

SEQ ID NO: 3602256 - RNA, 17 nt, Human
cacuagggccuuggaaa

SEQ ID NO: 3602257 - RNA, 21 nt, Human
cacuaguaaguaauuaugcac

SEQ ID NO: 3602258 - RNA, 19 nt, Human
cacuaguauuucuaugaaa

SEQ ID NO: 3602259 - RNA, 20 nt, Human
cacuagucugugugcugugg

SEQ ID NO: 3602260 - RNA, 21 nt, Human
cacuagucugugugcuguggu

SEQ ID NO: 3602261 - RNA, 21 nt, Human
cacuagugaccccuucccugu

SEQ ID NO: 3602262 - RNA, 19 nt, Human
cacuauaaaugguguuuuu

SEQ ID NO: 3602263 - RNA, 14 nt, Human
cacuauaauguaag

SEQ ID NO: 3602264 - RNA, 14 nt, Human
cacuauacagauuc

SEQ ID NO: 3602265 - RNA, 21 nt, Human
cacuauagccuaggugacaga

SEQ ID NO: 3602266 - RNA, 17 nt, Human
cacuauaguuuaaaaca

SEQ ID NO: 3602267 - RNA, 19 nt, Human
cacuaucauaguuaacaua

SEQ ID NO: 3602268 - RNA, 11 nt, Human
cacuaucuggg

SEQ ID NO: 3602269 - RNA, 17 nt, Human
cacuaucugggugcaug

SEQ ID NO: 3602270 - RNA, 18 nt, Human
cacuaucugggugcauga

SEQ ID NO: 3602271 - RNA, 14 nt, Human
cacuaugaagaugu

SEQ ID NO: 3602272 - RNA, 17 nt, Human
cacuaugguauuugagu

SEQ ID NO: 3602273 - RNA, 13 nt, Human
cacuauggugcca

SEQ ID NO: 3602274 - RNA, 15 nt, Human
cacuauggugccaau

SEQ ID NO: 3602275 - RNA, 17 nt, Human
cacuauguugcccaggc

SEQ ID NO: 3602276 - RNA, 18 nt, Human
cacuauuuauuuacaaau

SEQ ID NO: 3602277 - RNA, 14 nt, Human
cacuauuuccuuua

SEQ ID NO: 3602278 - RNA, 13 nt, Human
cacuauuuuaugc

SEQ ID NO: 3602279 - RNA, 13 nt, Human
cacuauuuucaga

SEQ ID NO: 3602280 - RNA, 20 nt, Human
cacuauuuucagaaucugaa

SEQ ID NO: 3602281 - RNA, 21 nt, Human
cacuauuuucagaaucugaau

SEQ ID NO: 3602282 - RNA, 19 nt, Human
cacucaaaagcugggcagg

SEQ ID NO: 3602283 - RNA, 12 nt, Human
cacucaaaggcc

SEQ ID NO: 3602284 - RNA, 15 nt, Human
cacucaaaggccaga

SEQ ID NO: 3602285 - RNA, 16 nt, Human
cacucaaaucaagaaa

SEQ ID NO: 3602286 - RNA, 17 nt, Human
cacucaaaucuuaagaa

SEQ ID NO: 3602287 - RNA, 19 nt, Human
cacucaaauuaaucuuucu

SEQ ID NO: 3602288 - RNA, 22 nt, Human
cacucaacaaaagugcuuugga

SEQ ID NO: 3602289 - RNA, 19 nt, Human
cacucaagaagcaggcuac

SEQ ID NO: 3602290 - RNA, 11 nt, Human
cacuccuugca

SEQ ID NO: 3602291 - RNA, 18 nt, Human
augugacauucuuaaaaa

SEQ ID NO: 3602292 - RNA, 13 nt, Human
augugacauuuau

SEQ ID NO: 3602293 - RNA, 14 nt, Human
augugacauuuaua

SEQ ID NO: 3602294 - RNA, 13 nt, Human
augugacauuugu

SEQ ID NO: 3602295 - RNA, 16 nt, Human
augugacauuuuacau

SEQ ID NO: 3602296 - RNA, 15 nt, Human
augugaccauaaugu

SEQ ID NO: 3602297 - RNA, 17 nt, Human
augugagagguuugacu

SEQ ID NO: 3602298 - RNA, 21 nt, Human
augugagauuuuuuauugcua

SEQ ID NO: 3602299 - RNA, 15 nt, Human
augugagcucuuccu

SEQ ID NO: 3602300 - RNA, 12 nt, Human
augugaggaugu

SEQ ID NO: 3602301 - RNA, 17 nt, Human
augugaguauucucauu

SEQ ID NO: 3602302 - RNA, 20 nt, Human
augugagugccuuuugcaga

SEQ ID NO: 3602303 - RNA, 22 nt, Human
augugagugguugaauaugauu

SEQ ID NO: 3602304 - RNA, 20 nt, Human
augugauaaggaucagaaca

SEQ ID NO: 3602305 - RNA, 21 nt, Human
augugauaaguucuuaugcca

SEQ ID NO: 3602306 - RNA, 21 nt, Human
augugauacauuuuuuaagcu

SEQ ID NO: 3602307 - RNA, 22 nt, Human
augugauacauuuuuuaagcuu

SEQ ID NO: 3602308 - RNA, 21 nt, Human
augugauacccauagcuucca

SEQ ID NO: 3602309 - RNA, 16 nt, Human
augugauauauaagug

SEQ ID NO: 3602310 - RNA, 19 nt, Human
augugaucauguguggaag

SEQ ID NO: 3602311 - RNA, 20 nt, Human
augugaucauguguggaagu

SEQ ID NO: 3602312 - RNA, 16 nt, Human
augugauccuuuuaug

SEQ ID NO: 3602313 - RNA, 18 nt, Human
augugauccuuuuauguu

SEQ ID NO: 3602314 - RNA, 18 nt, Human
augugauccuuuuggagu

SEQ ID NO: 3602315 - RNA, 21 nt, Human
augugaucuauguuucaucuu

SEQ ID NO: 3602316 - RNA, 16 nt, Human
augugaucucauuguu

SEQ ID NO: 3602317 - RNA, 19 nt, Human
augugaucugucuuguaau

SEQ ID NO: 3602318 - RNA, 17 nt, Human
augugaugaauacugua

SEQ ID NO: 3602319 - RNA, 17 nt, Human
augugaugauguaauug

SEQ ID NO: 3602320 - RNA, 18 nt, Human
augugauggacacuccag

SEQ ID NO: 3602321 - RNA, 17 nt, Human
augugauguucuaaggc

SEQ ID NO: 3602322 - RNA, 20 nt, Human
augugauguucuaaggcucu

SEQ ID NO: 3602323 - RNA, 21 nt, Human
augugauguucuaaggcucug

SEQ ID NO: 3602324 - RNA, 15 nt, Human
augugauucaaaaga

SEQ ID NO: 3602325 - RNA, 17 nt, Human
augugauuguggaaugg

SEQ ID NO: 3602326 - RNA, 22 nt, Human
augugauuguggaauggagauu

SEQ ID NO: 3602327 - RNA, 15 nt, Human
augugauuuaaacaa

SEQ ID NO: 3602328 - RNA, 13 nt, Human
augugauuuaaua

SEQ ID NO: 3602329 - RNA, 15 nt, Human
augugauuuuaacuc

SEQ ID NO: 3602330 - RNA, 14 nt, Human
augugauuuuucug

SEQ ID NO: 3602331 - RNA, 21 nt, Human
augugcaaacccacucagaga

SEQ ID NO: 3602332 - RNA, 16 nt, Human
augugcacccaugggc

SEQ ID NO: 3602333 - RNA, 22 nt, Human
augugcacccaugggcucugac

SEQ ID NO: 3602334 - RNA, 15 nt, Human
augugcacugucacu

SEQ ID NO: 3602335 - RNA, 17 nt, Human
augugcagcauuucacu

SEQ ID NO: 3602336 - RNA, 23 nt, Human
augugcaguguagcccacacuug

SEQ ID NO: 3602337 - RNA, 13 nt, Human
augugccaaggug

SEQ ID NO: 3602338 - RNA, 20 nt, Human
augugccagggcaaugauga

SEQ ID NO: 3602339 - RNA, 21 nt, Human
augugccagguuuuuggucug

SEQ ID NO: 3602340 - RNA, 22 nt, Human
augugccauuuuaaaaaaaaag

SEQ ID NO: 3602341 - RNA, 16 nt, Human
augugcccuccugagg

SEQ ID NO: 3602342 - RNA, 17 nt, Human
augugcccuccugaggg

SEQ ID NO: 3602343 - RNA, 18 nt, Human
augugccuaaauaaguua

SEQ ID NO: 3602344 - RNA, 11 nt, Human
augugccuauu

SEQ ID NO: 3602345 - RNA, 23 nt, Human
augugccuauugcuagagcuccu

SEQ ID NO: 3602346 - RNA, 17 nt, Human
augugccugcaccagga

SEQ ID NO: 3602347 - RNA, 14 nt, Human
augugcgugugugc

SEQ ID NO: 3602348 - RNA, 18 nt, Human
augugcgugugugcaagu

SEQ ID NO: 3602349 - RNA, 15 nt, Human
augugcuacaggggc

SEQ ID NO: 3602350 - RNA, 19 nt, Human
augugcuacaggggccaga

SEQ ID NO: 3602351 - RNA, 23 nt, Human
augugcuacaggggccagaagau

SEQ ID NO: 3602352 - RNA, 20 nt, Human
augugcuacugauuguuuca

SEQ ID NO: 3602353 - RNA, 20 nt, Human
augugcuaguaauuggaaag

SEQ ID NO: 3602354 - RNA, 21 nt, Human
augugcuaguaauuggaaagg

SEQ ID NO: 3602355 - RNA, 18 nt, Human
augugcuauacugcauac

SEQ ID NO: 3602356 - RNA, 19 nt, Human
augugcuauacugcauacu

SEQ ID NO: 3602357 - RNA, 16 nt, Human
augugcuauuaauauu

SEQ ID NO: 3602358 - RNA, 17 nt, Human
augugcuauuaauauuu

SEQ ID NO: 3602359 - RNA, 14 nt, Human
augugcugcuuuga

SEQ ID NO: 3602360 - RNA, 16 nt, Human
augugcugcuuugaua

SEQ ID NO: 3602361 - RNA, 20 nt, Human
augugcugcuuugauauaua

SEQ ID NO: 3602362 - RNA, 15 nt, Human
augugcuguguaaag

SEQ ID NO: 3602363 - RNA, 18 nt, Human
augugcuguguaaaguua

SEQ ID NO: 3602364 - RNA, 15 nt, Human
augugcuuuucucca

SEQ ID NO: 3602365 - RNA, 16 nt, Human
augugcuuuucuccaa

SEQ ID NO: 3602366 - RNA, 13 nt, Human
auguggaaaacag

SEQ ID NO: 3602367 - RNA, 15 nt, Human
auguggaaagugaau

SEQ ID NO: 3602368 - RNA, 17 nt, Human
auguggaacugcugcca

SEQ ID NO: 3602369 - RNA, 19 nt, Human
auguggaacugcugccacu

SEQ ID NO: 3602370 - RNA, 15 nt, Human
auguggaaguguggg

SEQ ID NO: 3602371 - RNA, 18 nt, Human
auguggaccuuagaauac

SEQ ID NO: 3602372 - RNA, 16 nt, Human
auguggacuuaggaag

SEQ ID NO: 3602373 - RNA, 17 nt, Human
auguggacuuaggaagg

SEQ ID NO: 3602374 - RNA, 12 nt, Human
auguggagccag

SEQ ID NO: 3602375 - RNA, 14 nt, Human
auguggagccaggc

SEQ ID NO: 3602376 - RNA, 20 nt, Human
auguggaguucaucuugaau

SEQ ID NO: 3602377 - RNA, 13 nt, Human
auguggcaggggu

SEQ ID NO: 3602378 - RNA, 18 nt, Human
auguggccccugaacaag

SEQ ID NO: 3602379 - RNA, 22 nt, Human
auguggccccugaacaagaauu

SEQ ID NO: 3602380 - RNA, 16 nt, Human
auguggcccuggccug

SEQ ID NO: 3602381 - RNA, 16 nt, Human
auguggccuuugaauu

SEQ ID NO: 3602382 - RNA, 14 nt, Human
auguggcuggaaga

SEQ ID NO: 3602383 - RNA, 21 nt, Human
auguggcuugagaaauaugga

SEQ ID NO: 3602384 - RNA, 22 nt, Human
auguggcuuuuuuaaaaaagca

SEQ ID NO: 3602385 - RNA, 18 nt, Human
augugggaagaaacaaac

SEQ ID NO: 3602386 - RNA, 20 nt, Human
augugggaauuaagcaaaau

SEQ ID NO: 3602387 - RNA, 11 nt, Human
augugggaggg

SEQ ID NO: 3602388 - RNA, 17 nt, Human
augugggauauugaaug

SEQ ID NO: 3602389 - RNA, 19 nt, Human
augugggauauugaauguu

SEQ ID NO: 3602390 - RNA, 13 nt, Human
augugggauuaug

SEQ ID NO: 3602391 - RNA, 14 nt, Human
augugggauuaugg

SEQ ID NO: 3602392 - RNA, 18 nt, Human
augugggauuauggguca

SEQ ID NO: 3602393 - RNA, 18 nt, Human
augugggcacuggcccag

SEQ ID NO: 3602394 - RNA, 16 nt, Human
auguggguuccacaga

SEQ ID NO: 3602395 - RNA, 19 nt, Human
auguggucguuagagacag

SEQ ID NO: 3602396 - RNA, 23 nt, Human
auguggucguuagagacagagcg

SEQ ID NO: 3602397 - RNA, 13 nt, Human
auguggucucagg

SEQ ID NO: 3602398 - RNA, 22 nt, Human
augugguggcacaggcccccuu

SEQ ID NO: 3602399 - RNA, 21 nt, Human
augugguuacacagugugaau

SEQ ID NO: 3602400 - RNA, 19 nt, Human
augugguuugguuccucuc

SEQ ID NO: 3602401 - RNA, 21 nt, Human
augugguuugguuccucucug

SEQ ID NO: 3602402 - RNA, 22 nt, Human
augugguuugguuccucucugg

SEQ ID NO: 3602403 - RNA, 13 nt, Human
auguguaauaaau

SEQ ID NO: 3602404 - RNA, 17 nt, Human
auguguaauaaauaugu

SEQ ID NO: 3602405 - RNA, 21 nt, Human
auguguaaucaauaaacgauu

SEQ ID NO: 3602406 - RNA, 12 nt, Human
auguguaauuuu

SEQ ID NO: 3602407 - RNA, 15 nt, Human
auguguaauuuuucu

SEQ ID NO: 3602408 - RNA, 19 nt, Human
auguguaauuuuucuguau

SEQ ID NO: 3602409 - RNA, 18 nt, Human
auguguacaauguacaca

SEQ ID NO: 3602410 - RNA, 20 nt, Human
auguguacaauguacacacu

SEQ ID NO: 3602411 - RNA, 16 nt, Human
auguguacgugugugu

SEQ ID NO: 3602412 - RNA, 15 nt, Human
auguguagccugugc

SEQ ID NO: 3602413 - RNA, 22 nt, Human
auguguaggcaguuuagugcau

SEQ ID NO: 3602414 - RNA, 16 nt, Human
auguguaguucaugua

SEQ ID NO: 3602415 - RNA, 19 nt, Human
auguguaguucauguaaau

SEQ ID NO: 3602416 - RNA, 20 nt, Human
auguguaguucauguaaaua

SEQ ID NO: 3602417 - RNA, 22 nt, Human
auguguaguugucucucuucag

SEQ ID NO: 3602418 - RNA, 13 nt, Human
auguguauaaaca

SEQ ID NO: 3602419 - RNA, 19 nt, Human
auguguauaaauugucuuu

SEQ ID NO: 3602420 - RNA, 22 nt, Human
auguguauauauaugugaggau

SEQ ID NO: 3602421 - RNA, 21 nt, Human
auguguaucaguguuuaugug

SEQ ID NO: 3602422 - RNA, 20 nt, Human
auguguaugcacaguaaaaa

SEQ ID NO: 3602423 - RNA, 20 nt, Human
auguguauguacguuuguau

SEQ ID NO: 3602424 - RNA, 12 nt, Human
auguguauguga

SEQ ID NO: 3602425 - RNA, 19 nt, Human
auguguaugugaguauucu

SEQ ID NO: 3602426 - RNA, 15 nt, Human
augugucaugcauga

SEQ ID NO: 3602427 - RNA, 15 nt, Human
auguguccauuuccu

SEQ ID NO: 3602428 - RNA, 18 nt, Human
auguguccuaucuaucuu

SEQ ID NO: 3602429 - RNA, 19 nt, Human
auguguccuaucuaucuuc

SEQ ID NO: 3602430 - RNA, 19 nt, Human
augugucugccacauuaac

SEQ ID NO: 3602431 - RNA, 13 nt, Human
augugucuucaau

SEQ ID NO: 3602432 - RNA, 14 nt, Human
augugucuuucuaa

SEQ ID NO: 3602433 - RNA, 19 nt, Human
augugucuuucuaagaaau

SEQ ID NO: 3602434 - RNA, 15 nt, Human
cagaaggucuguuuu

SEQ ID NO: 3602435 - RNA, 22 nt, Human
cagaaggugccacuuuacccac

SEQ ID NO: 3602436 - RNA, 23 nt, Human
cagaagguugcucuagauugaga

SEQ ID NO: 3602437 - RNA, 13 nt, Human
cagaaguaagccu

SEQ ID NO: 3602438 - RNA, 16 nt, Human
cagaaguaagccucau

SEQ ID NO: 3602439 - RNA, 20 nt, Human
cagaaguaccagacuagaug

SEQ ID NO: 3602440 - RNA, 13 nt, Human
cagaaguagggga

SEQ ID NO: 3602441 - RNA, 18 nt, Human
cagaaguaggggaagaau

SEQ ID NO: 3602442 - RNA, 20 nt, Human
cagaagucacacauuacaaa

SEQ ID NO: 3602443 - RNA, 22 nt, Human
cagaagucacacauuacaaagu

SEQ ID NO: 3602444 - RNA, 20 nt, Human
cagaagucaucuugcuacca

SEQ ID NO: 3602445 - RNA, 17 nt, Human
cagaagucaugaagccc

SEQ ID NO: 3602446 - RNA, 18 nt, Human
cagaagucaugaagccca

SEQ ID NO: 3602447 - RNA, 16 nt, Human
cagaaguccagagucu

SEQ ID NO: 3602448 - RNA, 21 nt, Human
cagaaguccuguaugucuguc

SEQ ID NO: 3602449 - RNA, 22 nt, Human
cagaaguccuguaugucuguca

SEQ ID NO: 3602450 - RNA, 13 nt, Human
cagaagugacuga

SEQ ID NO: 3602451 - RNA, 18 nt, Human
cagaagugagcuuugcug

SEQ ID NO: 3602452 - RNA, 22 nt, Human
cagaagugagcuuugcugcuac

SEQ ID NO: 3602453 - RNA, 11 nt, Human
cagaaguguga

SEQ ID NO: 3602454 - RNA, 13 nt, Human
cagaagugugacu

SEQ ID NO: 3602455 - RNA, 19 nt, Human
cacucgaggucgggcagca

SEQ ID NO: 3602456 - RNA, 16 nt, Human
cacucgcuagcagugg

SEQ ID NO: 3602457 - RNA, 22 nt, Human
cacucggcauuucaaaugugcu

SEQ ID NO: 3602458 - RNA, 14 nt, Human
cacucggcuuugga

SEQ ID NO: 3602459 - RNA, 18 nt, Human
cacucgggaggcugagac

SEQ ID NO: 3602460 - RNA, 21 nt, Human
cacucggguuucucuguggcu

SEQ ID NO: 3602461 - RNA, 12 nt, Human
cacucgguccca

SEQ ID NO: 3602462 - RNA, 20 nt, Human
cacucggucccaguuuuguu

SEQ ID NO: 3602463 - RNA, 14 nt, Human
cacucgucuccccc

SEQ ID NO: 3602464 - RNA, 16 nt, Human
cacucgucucccccaa

SEQ ID NO: 3602465 - RNA, 16 nt, Human
cacucguguguuucua

SEQ ID NO: 3602466 - RNA, 19 nt, Human
cacucuaaaagguucaggg

SEQ ID NO: 3602467 - RNA, 21 nt, Human
cacucuaaaggcgcugagacu

SEQ ID NO: 3602468 - RNA, 15 nt, Human
cacucuaagucaugu

SEQ ID NO: 3602469 - RNA, 16 nt, Human
cacucuaagucaugua

SEQ ID NO: 3602470 - RNA, 18 nt, Human
cacucuaccagugcaggc

SEQ ID NO: 3602471 - RNA, 16 nt, Human
cacucuacccucccac

SEQ ID NO: 3602472 - RNA, 17 nt, Human
cacucuacccucccacc

SEQ ID NO: 3602473 - RNA, 21 nt, Human
cacucuacccucccacccccu

SEQ ID NO: 3602474 - RNA, 14 nt, Human
cacucuagauucca

SEQ ID NO: 3602475 - RNA, 19 nt, Human
cacucuaggggucaggcuc

SEQ ID NO: 3602476 - RNA, 20 nt, Human
cacucuagucaaugacauga

SEQ ID NO: 3602477 - RNA, 13 nt, Human
cacucuauaacaa

SEQ ID NO: 3602478 - RNA, 13 nt, Human
cacucucagaggc

SEQ ID NO: 3602479 - RNA, 16 nt, Human
cacucucagaggcccc

SEQ ID NO: 3602480 - RNA, 17 nt, Human
cacucucauuccccagg

SEQ ID NO: 3602481 - RNA, 18 nt, Human
cacucucauuccccaggu

SEQ ID NO: 3602482 - RNA, 15 nt, Human
cacucuccauuuaau

SEQ ID NO: 3602483 - RNA, 15 nt, Human
cacucuccccacacu

SEQ ID NO: 3602484 - RNA, 16 nt, Human
cacucucccccacccc

SEQ ID NO: 3602485 - RNA, 18 nt, Human
cacucucccccacccccu

SEQ ID NO: 3602486 - RNA, 14 nt, Human
cacucuccugggcc

SEQ ID NO: 3602487 - RNA, 13 nt, Human
cacucuccuugca

SEQ ID NO: 3602488 - RNA, 17 nt, Human
cacucuccuugcaguuc

SEQ ID NO: 3602489 - RNA, 17 nt, Human
cacucuccuugcuaccc

SEQ ID NO: 3602490 - RNA, 19 nt, Human
cacucugacuggcacaguc

SEQ ID NO: 3602491 - RNA, 12 nt, Human
cacucugagacu

SEQ ID NO: 3602492 - RNA, 16 nt, Human
cacucugaguguuuua

SEQ ID NO: 3602493 - RNA, 18 nt, Human
cacucugcagacugcuag

SEQ ID NO: 3602494 - RNA, 16 nt, Human
cacucugccagcaaag

SEQ ID NO: 3602495 - RNA, 12 nt, Human
cacucugccagg

SEQ ID NO: 3602496 - RNA, 19 nt, Human
cacucugccagggcagugc

SEQ ID NO: 3602497 - RNA, 17 nt, Human
cacucugcucugaugca

SEQ ID NO: 3602498 - RNA, 16 nt, Human
cacucugcucugcccu

SEQ ID NO: 3602499 - RNA, 12 nt, Human
cacucugcuucu

SEQ ID NO: 3602500 - RNA, 14 nt, Human
cacucugcuucucu

SEQ ID NO: 3602501 - RNA, 18 nt, Human
cacucugcuucucugacu

SEQ ID NO: 3602502 - RNA, 18 nt, Human
cacucuggcagccacacu

SEQ ID NO: 3602503 - RNA, 13 nt, Human
cacucuggcagcu

SEQ ID NO: 3602504 - RNA, 14 nt, Human
cacucuggcagcuc

SEQ ID NO: 3602505 - RNA, 16 nt, Human
cacucuggcagcucag

SEQ ID NO: 3602506 - RNA, 20 nt, Human
cacucuggcagcucagagag

SEQ ID NO: 3602507 - RNA, 23 nt, Human
cacucuggcagcucagagagggu

SEQ ID NO: 3602508 - RNA, 13 nt, Human
cacucuggccuca

SEQ ID NO: 3602509 - RNA, 16 nt, Human
cacucugggcuccaga

SEQ ID NO: 3602510 - RNA, 15 nt, Human
cacucugucgcccag

SEQ ID NO: 3602511 - RNA, 20 nt, Human
cacucugucgcccagucugg

SEQ ID NO: 3602512 - RNA, 16 nt, Human
cacucugugcccaugg

SEQ ID NO: 3602513 - RNA, 21 nt, Human
cacucugugcccaugggcacu

SEQ ID NO: 3602514 - RNA, 17 nt, Human
cacucugugucugagug

SEQ ID NO: 3602515 - RNA, 13 nt, Human
cacucuguuauuu

SEQ ID NO: 3602516 - RNA, 19 nt, Human
cacucuguucauuccucca

SEQ ID NO: 3602517 - RNA, 21 nt, Human
cacucuguucauuccuccagg

SEQ ID NO: 3602518 - RNA, 14 nt, Human
cacucuuaaaugau

SEQ ID NO: 3602519 - RNA, 18 nt, Human
cacucuuaugcuguaccc

SEQ ID NO: 3602520 - RNA, 18 nt, Human
cacucuuauugcccacgc

SEQ ID NO: 3602521 - RNA, 22 nt, Human
cacucuuauugcccacgcugga

SEQ ID NO: 3602522 - RNA, 11 nt, Human
cacucuuccaa

SEQ ID NO: 3602523 - RNA, 14 nt, Human
cacucuucucagcc

SEQ ID NO: 3602524 - RNA, 17 nt, Human
cacucuucucagccacu

SEQ ID NO: 3602525 - RNA, 15 nt, Human
cacucuuggagccug

SEQ ID NO: 3602526 - RNA, 16 nt, Human
cacucuuggagccugc

SEQ ID NO: 3602527 - RNA, 17 nt, Human
cacucuuggagccugca

SEQ ID NO: 3602528 - RNA, 21 nt, Human
cacucuuggagccugcagagc

SEQ ID NO: 3602529 - RNA, 22 nt, Human
cacucuuggagccugcagagcu

SEQ ID NO: 3602530 - RNA, 23 nt, Human
cacucuuggagccugcagagcug

SEQ ID NO: 3602531 - RNA, 15 nt, Human
cacucuuuguaagag

SEQ ID NO: 3602532 - RNA, 15 nt, Human
cacucuuuugcuuua

SEQ ID NO: 3602533 - RNA, 23 nt, Human
cacucuuuugcuuuauuccagaa

SEQ ID NO: 3602534 - RNA, 14 nt, Human
cacugaaaaaauau

SEQ ID NO: 3602535 - RNA, 20 nt, Human
cacugaaaaaucuaagugau

SEQ ID NO: 3602536 - RNA, 18 nt, Human
cacugaaaacaucuggaa

SEQ ID NO: 3602537 - RNA, 22 nt, Human
cacugaaaugccuuacuuugua

SEQ ID NO: 3602538 - RNA, 19 nt, Human
cacugaagaaaccuucaga

SEQ ID NO: 3602539 - RNA, 15 nt, Human
cacugaagaggagga

SEQ ID NO: 3602540 - RNA, 16 nt, Human
cacugaagauagaaga

SEQ ID NO: 3602541 - RNA, 21 nt, Human
cacugaaggcuuucagggccu

SEQ ID NO: 3602542 - RNA, 17 nt, Human
cacugaagucaguucuc

SEQ ID NO: 3602543 - RNA, 19 nt, Human
cacugaaguuaacagagac

SEQ ID NO: 3602544 - RNA, 22 nt, Human
cacugaaguuaacagagacaga

SEQ ID NO: 3602545 - RNA, 15 nt, Human
cacugaaucccugua

SEQ ID NO: 3602546 - RNA, 13 nt, Human
cacugaaucugua

SEQ ID NO: 3602547 - RNA, 14 nt, Human
cacugaaucuguac

SEQ ID NO: 3602548 - RNA, 17 nt, Human
cacugaaucuguacaga

SEQ ID NO: 3602549 - RNA, 17 nt, Human
cacugaauuccauuuuu

SEQ ID NO: 3602550 - RNA, 13 nt, Human
cacugaauuuaua

SEQ ID NO: 3602551 - RNA, 14 nt, Human
cacugaauuuauaa

SEQ ID NO: 3602552 - RNA, 19 nt, Human
cacugaauuuauaaaguac

SEQ ID NO: 3602553 - RNA, 19 nt, Human
cacugacacaaaaaguaga

SEQ ID NO: 3602554 - RNA, 14 nt, Human
cacugacacaaagg

SEQ ID NO: 3602555 - RNA, 14 nt, Human
cacugacaccuuug

SEQ ID NO: 3602556 - RNA, 16 nt, Human
cacugacaccuuugca

SEQ ID NO: 3602557 - RNA, 13 nt, Human
cacugacacuggu

SEQ ID NO: 3602558 - RNA, 13 nt, Human
cacugacagauuu

SEQ ID NO: 3602559 - RNA, 16 nt, Human
cacugacagccuccca

SEQ ID NO: 3602560 - RNA, 17 nt, Human
cacugaccauccacucu

SEQ ID NO: 3602561 - RNA, 15 nt, Human
cacugacccuuccag

SEQ ID NO: 3602562 - RNA, 18 nt, Human
cacugaccugucaugccc

SEQ ID NO: 3602563 - RNA, 22 nt, Human
cacugaccugucaugccccccu

SEQ ID NO: 3602564 - RNA, 23 nt, Human
cacugaccugucaugccccccuc

SEQ ID NO: 3602565 - RNA, 20 nt, Human
cacugaccuuggagagacac

SEQ ID NO: 3602566 - RNA, 20 nt, Human
cacugacugaacuguaaugu

SEQ ID NO: 3602567 - RNA, 14 nt, Human
cacugacuucuaag

SEQ ID NO: 3602568 - RNA, 17 nt, Human
cacugagaagauuguga

SEQ ID NO: 3602569 - RNA, 21 nt, Human
cacugagaauguaagaacuac

SEQ ID NO: 3602570 - RNA, 12 nt, Human
cacugagacagc

SEQ ID NO: 3602571 - RNA, 13 nt, Human
cacugagacagcc

SEQ ID NO: 3602572 - RNA, 15 nt, Human
cacugagaccaaggc

SEQ ID NO: 3602573 - RNA, 17 nt, Human
cacugagaccaaggcuu

SEQ ID NO: 3602574 - RNA, 18 nt, Human
cacugagagagcgcagcc

SEQ ID NO: 3602575 - RNA, 21 nt, Human
cacugagagccuuuuugaaag

SEQ ID NO: 3602576 - RNA, 18 nt, Human
cacugagauaccagcgag

SEQ ID NO: 3602577 - RNA, 17 nt, Human
cacugagaucuguuuga

SEQ ID NO: 3602578 - RNA, 20 nt, Human
cacugagcaacgcuauucca

SEQ ID NO: 3602579 - RNA, 15 nt, Human
cacugagcacuguuu

SEQ ID NO: 3602580 - RNA, 23 nt, Human
auuggcuagagguucaaagauau

SEQ ID NO: 3602581 - RNA, 13 nt, Human
auuggcucacacu

SEQ ID NO: 3602582 - RNA, 17 nt, Human
auuggcuuguagaauug

SEQ ID NO: 3602583 - RNA, 19 nt, Human
auuggcuuguagaauuguu

SEQ ID NO: 3602584 - RNA, 22 nt, Human
auuggcuuguguguuucacuuu

SEQ ID NO: 3602585 - RNA, 14 nt, Human
auuggcuuuauccu

SEQ ID NO: 3602586 - RNA, 23 nt, Human
auuggcuuuggguugcaggaccu

SEQ ID NO: 3602587 - RNA, 20 nt, Human
auuggcuuuucugauccagu

SEQ ID NO: 3602588 - RNA, 17 nt, Human
auugggacuggggcuga

SEQ ID NO: 3602589 - RNA, 18 nt, Human
auugggagcuugggaaug

SEQ ID NO: 3602590 - RNA, 14 nt, Human
auugggcagcgccc

SEQ ID NO: 3602591 - RNA, 22 nt, Human
auugggcagcgcccuuccucuc

SEQ ID NO: 3602592 - RNA, 15 nt, Human
auugggccccugcca

SEQ ID NO: 3602593 - RNA, 18 nt, Human
auugggcggcucugaagc

SEQ ID NO: 3602594 - RNA, 16 nt, Human
auuggggaagagagcc

SEQ ID NO: 3602595 - RNA, 22 nt, Human
auuggggaagagagccugcagg

SEQ ID NO: 3602596 - RNA, 23 nt, Human
auuggggaagagagccugcagga

SEQ ID NO: 3602597 - RNA, 21 nt, Human
auuggggaggagggggccggg

SEQ ID NO: 3602598 - RNA, 14 nt, Human
auuggggauucuua

SEQ ID NO: 3602599 - RNA, 15 nt, Human
auuggggauucuuaa

SEQ ID NO: 3602600 - RNA, 21 nt, Human
auuggggauucuuaaaguuga

SEQ ID NO: 3602601 - RNA, 21 nt, Human
auuggggcucccagccaggcc

SEQ ID NO: 3602602 - RNA, 23 nt, Human
auugggggggccaaaaggaaaaa

SEQ ID NO: 3602603 - RNA, 21 nt, Human
auuggguaucaagacauagca

SEQ ID NO: 3602604 - RNA, 18 nt, Human
auugggucauagaaauuc

SEQ ID NO: 3602605 - RNA, 17 nt, Human
auugggucuauuccagc

SEQ ID NO: 3602606 - RNA, 14 nt, Human
auuggguucaugau

SEQ ID NO: 3602607 - RNA, 18 nt, Human
auuggguuccauucucac

SEQ ID NO: 3602608 - RNA, 22 nt, Human
auuggguuuuuggacuucuggg

SEQ ID NO: 3602609 - RNA, 16 nt, Human
auugguaacauccuuu

SEQ ID NO: 3602610 - RNA, 17 nt, Human
auugguaccuugcacac

SEQ ID NO: 3602611 - RNA, 18 nt, Human
auugguaucaagaaaguc

SEQ ID NO: 3602612 - RNA, 14 nt, Human
auuggucuaauuua

SEQ ID NO: 3602613 - RNA, 18 nt, Human
auuggucuaucuacuggc

SEQ ID NO: 3602614 - RNA, 14 nt, Human
auuggucuccucuc

SEQ ID NO: 3602615 - RNA, 17 nt, Human
auuggugaguuaggaac

SEQ ID NO: 3602616 - RNA, 18 nt, Human
auuggugggauuuuuugu

SEQ ID NO: 3602617 - RNA, 14 nt, Human
auugguguuguacu

SEQ ID NO: 3602618 - RNA, 22 nt, Human
auugguguuguacucaauuuua

SEQ ID NO: 3602619 - RNA, 17 nt, Human
auugguucccuuugcuc

SEQ ID NO: 3602620 - RNA, 16 nt, Human
auugguuucucuucuc

SEQ ID NO: 3602621 - RNA, 22 nt, Human
auugguuuuaauugaaggaaag

SEQ ID NO: 3602622 - RNA, 14 nt, Human
auugguuuuaugau

SEQ ID NO: 3602623 - RNA, 18 nt, Human
auugguuuuaugaugacg

SEQ ID NO: 3602624 - RNA, 17 nt, Human
auuguaaaaaaaaaugc

SEQ ID NO: 3602625 - RNA, 22 nt, Human
auuguaaaaaaaaaugccuuug

SEQ ID NO: 3602626 - RNA, 22 nt, Human
auuguaaaaaagguuuucuaua

SEQ ID NO: 3602627 - RNA, 13 nt, Human
auuguaaaagcau

SEQ ID NO: 3602628 - RNA, 13 nt, Human
auuguaaaauaau

SEQ ID NO: 3602629 - RNA, 15 nt, Human
auuguaaaauagcuu

SEQ ID NO: 3602630 - RNA, 21 nt, Human
auuguaaaauagcuuguauag

SEQ ID NO: 3602631 - RNA, 22 nt, Human
auuguaaaauagcuuguauagu

SEQ ID NO: 3602632 - RNA, 14 nt, Human
auuguaaacaaacu

SEQ ID NO: 3602633 - RNA, 15 nt, Human
auuguaaacaugugu

SEQ ID NO: 3602634 - RNA, 12 nt, Human
auuguaaacugu

SEQ ID NO: 3602635 - RNA, 15 nt, Human
auuguaaacuguacu

SEQ ID NO: 3602636 - RNA, 23 nt, Human
auacugcaauuaaagugauacug

SEQ ID NO: 3602637 - RNA, 19 nt, Human
auacugcagggccaggacu

SEQ ID NO: 3602638 - RNA, 21 nt, Human
auacugcauacuuuuuaaaug

SEQ ID NO: 3602639 - RNA, 17 nt, Human
auacugccacuaaccuu

SEQ ID NO: 3602640 - RNA, 16 nt, Human
auacugccagaugcug

SEQ ID NO: 3602641 - RNA, 19 nt, Human
auacugccagaugcugaug

SEQ ID NO: 3602642 - RNA, 20 nt, Human
auacugcgacuuucugccug

SEQ ID NO: 3602643 - RNA, 15 nt, Human
auacugcuacuguaa

SEQ ID NO: 3602644 - RNA, 22 nt, Human
auacugcuacuguaauuuuaua

SEQ ID NO: 3602645 - RNA, 12 nt, Human
auacugcugaga

SEQ ID NO: 3602646 - RNA, 22 nt, Human
auacugcugagauacauacaga

SEQ ID NO: 3602647 - RNA, 10 nt, Human
auacugcuug

SEQ ID NO: 3602648 - RNA, 13 nt, Human
auacuggaaguuu

SEQ ID NO: 3602649 - RNA, 15 nt, Human
auacuggaggaacac

SEQ ID NO: 3602650 - RNA, 15 nt, Human
auacuggcacagagg

SEQ ID NO: 3602651 - RNA, 22 nt, Human
auacuggccucgccuggccuga

SEQ ID NO: 3602652 - RNA, 23 nt, Human
auacuggcuucaccaucaauccu

SEQ ID NO: 3602653 - RNA, 12 nt, Human
auacuguaaaga

SEQ ID NO: 3602654 - RNA, 21 nt, Human
auacuguaaagaaagagagaa

SEQ ID NO: 3602655 - RNA, 20 nt, Human
auacuguacaauaaaaacau

SEQ ID NO: 3602656 - RNA, 17 nt, Human
auacuguacuuaauaaa

SEQ ID NO: 3602657 - RNA, 18 nt, Human
auacuguagauaauuaac

SEQ ID NO: 3602658 - RNA, 15 nt, Human
auacuguauuaagag

SEQ ID NO: 3602659 - RNA, 17 nt, Human
auacugugcuggagcca

SEQ ID NO: 3602660 - RNA, 20 nt, Human
auacugugcuggagccacua

SEQ ID NO: 3602661 - RNA, 13 nt, Human
auacuguguguga

SEQ ID NO: 3602662 - RNA, 21 nt, Human
auacugugugugagugugaau

SEQ ID NO: 3602663 - RNA, 16 nt, Human
auacuguuauucuuug

SEQ ID NO: 3602664 - RNA, 13 nt, Human
auacuguugcacg

SEQ ID NO: 3602665 - RNA, 15 nt, Human
auacuguugcacgug

SEQ ID NO: 3602666 - RNA, 15 nt, Human
auacuguugugcgca

SEQ ID NO: 3602667 - RNA, 20 nt, Human
auacuguuugagguuuuuaa

SEQ ID NO: 3602668 - RNA, 21 nt, Human
auacuguuuuucgucauucca

SEQ ID NO: 3602669 - RNA, 16 nt, Human
auacuuaagcaaaagu

SEQ ID NO: 3602670 - RNA, 13 nt, Human
auacuuacauucu

SEQ ID NO: 3602671 - RNA, 19 nt, Human
auacuuaccuagugaaacu

SEQ ID NO: 3602672 - RNA, 19 nt, Human
auacuuagcaaaaaguggg

SEQ ID NO: 3602673 - RNA, 15 nt, Human
auacuuauauuuccc

SEQ ID NO: 3602674 - RNA, 22 nt, Human
auacuuauauuuucguaugaaa

SEQ ID NO: 3602675 - RNA, 23 nt, Human
auacuuauauuuucguaugaaaa

SEQ ID NO: 3602676 - RNA, 21 nt, Human
auacuuauauuuuuaauaaaa

SEQ ID NO: 3602677 - RNA, 16 nt, Human
auacuuaucucucugu

SEQ ID NO: 3602678 - RNA, 15 nt, Human
auacuuauucauugu

SEQ ID NO: 3602679 - RNA, 16 nt, Human
auacuucacuacuuua

SEQ ID NO: 3602680 - RNA, 21 nt, Human
auacuuccuuaugcuucuuuc

SEQ ID NO: 3602681 - RNA, 16 nt, Human
auacuucuugugugua

SEQ ID NO: 3602682 - RNA, 13 nt, Human
auacuugaacaaa

SEQ ID NO: 3602683 - RNA, 15 nt, Human
auacuugaacaaaag

SEQ ID NO: 3602684 - RNA, 22 nt, Human
auacuugaacaaaagggucaga

SEQ ID NO: 3602685 - RNA, 18 nt, Human
auacuugaaccauaaaau

SEQ ID NO: 3602686 - RNA, 22 nt, Human
auacuugaaccauaaaaugucc

SEQ ID NO: 3602687 - RNA, 19 nt, Human
auacuugaacguuuucuaa

SEQ ID NO: 3602688 - RNA, 12 nt, Human
auacuugaacuu

SEQ ID NO: 3602689 - RNA, 13 nt, Human
auacuugaacuug

SEQ ID NO: 3602690 - RNA, 18 nt, Human
auacuugaagggccagag

SEQ ID NO: 3602691 - RNA, 23 nt, Human
auacuugaagggccagagccagg

SEQ ID NO: 3602692 - RNA, 13 nt, Human
auacuugagacug

SEQ ID NO: 3602693 - RNA, 13 nt, Human
auacuuggauuua

SEQ ID NO: 3602694 - RNA, 13 nt, Human
auacuuguggacu

SEQ ID NO: 3602695 - RNA, 20 nt, Human
auacuuguggacuaaaagau

SEQ ID NO: 3602696 - RNA, 21 nt, Human
auacuuguggacuaaaagaua

SEQ ID NO: 3602697 - RNA, 17 nt, Human
auacuugugguuuucaa

SEQ ID NO: 3602698 - RNA, 19 nt, Human
auacuugugguuuucaaau

SEQ ID NO: 3602699 - RNA, 15 nt, Human
auacuuuaaaggaaa

SEQ ID NO: 3602700 - RNA, 18 nt, Human
auacuuuaguagacauuu

SEQ ID NO: 3602701 - RNA, 15 nt, Human
auacuuuagugaacg

SEQ ID NO: 3602702 - RNA, 22 nt, Human
auacuuugaaaggagaugucuu

SEQ ID NO: 3602703 - RNA, 12 nt, Human
auacuuugaaug

SEQ ID NO: 3602704 - RNA, 17 nt, Human
auacuuugaauguguuu

SEQ ID NO: 3602705 - RNA, 19 nt, Human
auacuuugaauguguuuca

SEQ ID NO: 3602706 - RNA, 20 nt, Human
auacuuugaauguguuucac

SEQ ID NO: 3602707 - RNA, 23 nt, Human
auacuuugaauguguuucacagu

SEQ ID NO: 3602708 - RNA, 16 nt, Human
auacuuugaguuuuga

SEQ ID NO: 3602709 - RNA, 13 nt, Human
auacuuuguauuu

SEQ ID NO: 3602710 - RNA, 24 nt, Human
auacuuuguggaccaauuauugau

SEQ ID NO: 3602711 - RNA, 17 nt, Human
auacuuuuacucugccu

SEQ ID NO: 3602712 - RNA, 13 nt, Human
auacuuuuccuua

SEQ ID NO: 3602713 - RNA, 17 nt, Human
auacuuuuucuuuugua

SEQ ID NO: 3602714 - RNA, 21 nt, Human
auacuuuuucuuuuguaagug

SEQ ID NO: 3602715 - RNA, 14 nt, Human
auacuuuuuugaaa

SEQ ID NO: 3602716 - RNA, 21 nt, Human
auagaaaacaggaaaaaaacu

SEQ ID NO: 3602717 - RNA, 22 nt, Human
auagaaaacaggaaaaaaacuu

SEQ ID NO: 3602718 - RNA, 22 nt, Human
auagaaaaguauguucuaaccu

SEQ ID NO: 3602719 - RNA, 15 nt, Human
auagaaaaguuauua

SEQ ID NO: 3602720 - RNA, 13 nt, Human
auagaaacaugac

SEQ ID NO: 3602721 - RNA, 14 nt, Human
auagaaacaugaca

SEQ ID NO: 3602722 - RNA, 15 nt, Human
auagaaacaugacac

SEQ ID NO: 3602723 - RNA, 22 nt, Human
auagaaagccaaaucaaaauau

SEQ ID NO: 3602724 - RNA, 14 nt, Human
auagcccuguccug

SEQ ID NO: 3602725 - RNA, 18 nt, Human
auagcccuguccuggugg

SEQ ID NO: 3602726 - RNA, 15 nt, Human
auagccuaggugaca

SEQ ID NO: 3602727 - RNA, 11 nt, Human
auagccuggac

SEQ ID NO: 3602728 - RNA, 21 nt, Human
auagcgcuguuuuuguugugu

SEQ ID NO: 3602729 - RNA, 14 nt, Human
auagcguucuugua

SEQ ID NO: 3602730 - RNA, 13 nt, Human
auagcguuggaau

SEQ ID NO: 3602731 - RNA, 21 nt, Human
auagcguuggaauuaaaacaa

SEQ ID NO: 3602732 - RNA, 23 nt, Human
auagcuaacauuuuaaauaaaag

SEQ ID NO: 3602733 - RNA, 14 nt, Human
auagcuaacuguaa

SEQ ID NO: 3602734 - RNA, 15 nt, Human
auagcuaaguacaca

SEQ ID NO: 3602735 - RNA, 16 nt, Human
auagcuacaggaagca

SEQ ID NO: 3602736 - RNA, 14 nt, Human
auagcuacccaaaa

SEQ ID NO: 3602737 - RNA, 18 nt, Human
auagcuacuaauuuuaaa

SEQ ID NO: 3602738 - RNA, 14 nt, Human
auagcuagacuggu

SEQ ID NO: 3602739 - RNA, 23 nt, Human
auagcuagacuggugacugauuc

SEQ ID NO: 3602740 - RNA, 22 nt, Human
auagcuaggugacauauacaua

SEQ ID NO: 3602741 - RNA, 19 nt, Human
auagcuauauccauguacu

SEQ ID NO: 3602742 - RNA, 14 nt, Human
auagcuauuacugu

SEQ ID NO: 3602743 - RNA, 22 nt, Human
auagcuauuacugucugguuuu

SEQ ID NO: 3602744 - RNA, 15 nt, Human
auagcucaugugcau

SEQ ID NO: 3602745 - RNA, 16 nt, Human
auagcucuaauguuug

SEQ ID NO: 3602746 - RNA, 18 nt, Human
auagcucuaauguuugca

SEQ ID NO: 3602747 - RNA, 19 nt, Human
auagcucuaauguuugcau

SEQ ID NO: 3602748 - RNA, 15 nt, Human
auagcucuuucaggg

SEQ ID NO: 3602749 - RNA, 15 nt, Human
auagcugcuuccagu

SEQ ID NO: 3602750 - RNA, 12 nt, Human
auagcugggacu

SEQ ID NO: 3602751 - RNA, 17 nt, Human
auagcugggacuacagg

SEQ ID NO: 3602752 - RNA, 23 nt, Human
auagcuggucuuauuuguaaagc

SEQ ID NO: 3602753 - RNA, 17 nt, Human
auagcuguacaaauaua

SEQ ID NO: 3602754 - RNA, 18 nt, Human
auagcuguacaaauauaa

SEQ ID NO: 3602755 - RNA, 17 nt, Human
auagcuguauugaauca

SEQ ID NO: 3602756 - RNA, 22 nt, Human
auagcuguauugaaucauguag

SEQ ID NO: 3602757 - RNA, 18 nt, Human
auagcuguucuaauggau

SEQ ID NO: 3602758 - RNA, 18 nt, Human
auagcuuaugaaaagaau

SEQ ID NO: 3602759 - RNA, 17 nt, Human
auagcuugcagaacugu

SEQ ID NO: 3602760 - RNA, 23 nt, Human
auagcuugcgcauucucauggag

SEQ ID NO: 3602761 - RNA, 19 nt, Human
auagcuuuauuuuuuaagu

SEQ ID NO: 3602762 - RNA, 21 nt, Human
auagcuuuauuuuuuaaguau

SEQ ID NO: 3602763 - RNA, 14 nt, Human
auagcuuuuauugu

SEQ ID NO: 3602764 - RNA, 15 nt, Human
auagcuuuuauugua

SEQ ID NO: 3602765 - RNA, 18 nt, Human
auagcuuuuauuguauaa

SEQ ID NO: 3602766 - RNA, 22 nt, Human
auagcuuuucccuuuuuuuaag

SEQ ID NO: 3602767 - RNA, 17 nt, Human
auagcuuuugugucuua

SEQ ID NO: 3602768 - RNA, 16 nt, Human
auaggaaaaacugauu

SEQ ID NO: 3602769 - RNA, 16 nt, Human
auaggaacauaugaaa

SEQ ID NO: 3602770 - RNA, 18 nt, Human
auaggaaucauucagaaa

SEQ ID NO: 3602771 - RNA, 16 nt, Human
auaggaauugacccac

SEQ ID NO: 3602772 - RNA, 21 nt, Human
auaggaccaggauccagccuc

SEQ ID NO: 3602773 - RNA, 14 nt, Human
auaggaccuuucca

SEQ ID NO: 3602774 - RNA, 13 nt, Human
auaggacuuguuu

SEQ ID NO: 3602775 - RNA, 16 nt, Human
auaggacuuguuuuug

SEQ ID NO: 3602776 - RNA, 24 nt, Human
auaggagaggaugagagcccagag

SEQ ID NO: 3602777 - RNA, 12 nt, Human
auaggagccugc

SEQ ID NO: 3602778 - RNA, 13 nt, Human
auaggagccugcu

SEQ ID NO: 3602779 - RNA, 22 nt, Human
auaggauuuauuuaaaauagca

SEQ ID NO: 3602780 - RNA, 21 nt, Human
auaggcaccuaccaccacgcc

SEQ ID NO: 3602781 - RNA, 20 nt, Human
auaggcaccuuuuacuguga

SEQ ID NO: 3602782 - RNA, 13 nt, Human
auaggcaggaagc

SEQ ID NO: 3602783 - RNA, 17 nt, Human
auaggccuucuugugau

SEQ ID NO: 3602784 - RNA, 20 nt, Human
auaggcggggcuugccuucu

SEQ ID NO: 3602785 - RNA, 17 nt, Human
auaggcuauuuucuaaa

SEQ ID NO: 3602786 - RNA, 16 nt, Human
auaggcuggagaagcu

SEQ ID NO: 3602787 - RNA, 20 nt, Human
auagggcugggcaaggaaaa

SEQ ID NO: 3602788 - RNA, 18 nt, Human
auaggggauauuuaaggu

SEQ ID NO: 3602789 - RNA, 16 nt, Human
auagguaaucaaugaa

SEQ ID NO: 3602790 - RNA, 19 nt, Human
auagguagggagauauuua

SEQ ID NO: 3602791 - RNA, 21 nt, Human
auagguauaaguggugugugu

SEQ ID NO: 3602792 - RNA, 16 nt, Human
auaggucacuccuggg

SEQ ID NO: 3602793 - RNA, 15 nt, Human
auaggucacuggcuc

SEQ ID NO: 3602794 - RNA, 21 nt, Human
auaggucacuggcucuccaag

SEQ ID NO: 3602795 - RNA, 23 nt, Human
auaggucagugaggcccagggag

SEQ ID NO: 3602796 - RNA, 17 nt, Human
auuguaaacuguacuag

SEQ ID NO: 3602797 - RNA, 10 nt, Human
auuguaaaua

SEQ ID NO: 3602798 - RNA, 15 nt, Human
auuguaaauacaagu

SEQ ID NO: 3602799 - RNA, 14 nt, Human
auuguaaauaguau

SEQ ID NO: 3602800 - RNA, 21 nt, Human
auuguaaauuauauuugugcu

SEQ ID NO: 3602801 - RNA, 17 nt, Human
auuguaaauugaaucag

SEQ ID NO: 3602802 - RNA, 16 nt, Human
auuguaacagacauug

SEQ ID NO: 3602803 - RNA, 19 nt, Human
auuguaacagacauuguuu

SEQ ID NO: 3602804 - RNA, 18 nt, Human
auuguaacccugucugga

SEQ ID NO: 3602805 - RNA, 17 nt, Human
auuguaacguugcugug

SEQ ID NO: 3602806 - RNA, 21 nt, Human
auuguaacguugcugugggaa

SEQ ID NO: 3602807 - RNA, 13 nt, Human
auuguaacuguuc

SEQ ID NO: 3602808 - RNA, 19 nt, Human
auuguaacuguucuugaau

SEQ ID NO: 3602809 - RNA, 15 nt, Human
auuguaacuuggaug

SEQ ID NO: 3602810 - RNA, 23 nt, Human
auuguaacuuggauguagccaug

SEQ ID NO: 3602811 - RNA, 14 nt, Human
auuguaagaaauac

SEQ ID NO: 3602812 - RNA, 20 nt, Human
auuguaagaaauacuguaca

SEQ ID NO: 3602813 - RNA, 13 nt, Human
auuguaagauaaa

SEQ ID NO: 3602814 - RNA, 14 nt, Human
auuguaagauaaaa

SEQ ID NO: 3602815 - RNA, 18 nt, Human
auuguaagcaugcacaaa

SEQ ID NO: 3602816 - RNA, 17 nt, Human
auuguaagcguauggcu

SEQ ID NO: 3602817 - RNA, 18 nt, Human
auuguaagcguauggcuu

SEQ ID NO: 3602818 - RNA, 24 nt, Human
auuguaauguuacugaucaugcau

SEQ ID NO: 3602819 - RNA, 20 nt, Human
auuguaauguugugaauaau

SEQ ID NO: 3602820 - RNA, 18 nt, Human
auuguaauuaauaauaga

SEQ ID NO: 3602821 - RNA, 14 nt, Human
auuguaauuauauc

SEQ ID NO: 3602822 - RNA, 22 nt, Human
auuguacaaaauuaagcaaaug

SEQ ID NO: 3602823 - RNA, 19 nt, Human
auuguacaaaguauuaagc

SEQ ID NO: 3602824 - RNA, 16 nt, Human
auuguacagcuguuua

SEQ ID NO: 3602825 - RNA, 18 nt, Human
auuguacaguuuguuuac

SEQ ID NO: 3602826 - RNA, 14 nt, Human
auuguacaguuuuu

SEQ ID NO: 3602827 - RNA, 19 nt, Human
auuguacauagcauguuua

SEQ ID NO: 3602828 - RNA, 16 nt, Human
auuguaccuuuuaaca

SEQ ID NO: 3602829 - RNA, 17 nt, Human
auuguacgaagaguauu

SEQ ID NO: 3602830 - RNA, 22 nt, Human
auuguacucaauggauuugaug

SEQ ID NO: 3602831 - RNA, 15 nt, Human
auuguaggugcaagc

SEQ ID NO: 3602832 - RNA, 21 nt, Human
auuguauaaaaauagaagaau

SEQ ID NO: 3602833 - RNA, 13 nt, Human
auuguauaaacua

SEQ ID NO: 3602834 - RNA, 17 nt, Human
auuguauaaacuaucag

SEQ ID NO: 3602835 - RNA, 15 nt, Human
auuguauaacagguu

SEQ ID NO: 3602836 - RNA, 21 nt, Human
auuguauagagauaugcagaa

SEQ ID NO: 3602837 - RNA, 11 nt, Human
auuguauauau

SEQ ID NO: 3602838 - RNA, 15 nt, Human
auuguauauaugugu

SEQ ID NO: 3602839 - RNA, 20 nt, Human
auuguauauuacaaugauca

SEQ ID NO: 3602840 - RNA, 15 nt, Human
auuguauauucacuu

SEQ ID NO: 3602841 - RNA, 17 nt, Human
auuguaucagaggccua

SEQ ID NO: 3602842 - RNA, 19 nt, Human
auuguaucagaggccuaua

SEQ ID NO: 3602843 - RNA, 14 nt, Human
auuguauccugagg

SEQ ID NO: 3602844 - RNA, 16 nt, Human
auuguaucguauagcu

SEQ ID NO: 3602845 - RNA, 16 nt, Human
auuguaucugucuuuc

SEQ ID NO: 3602846 - RNA, 12 nt, Human
auuguaugaugu

SEQ ID NO: 3602847 - RNA, 21 nt, Human
auuguaugauguguugugaua

SEQ ID NO: 3602848 - RNA, 14 nt, Human
auuguauuacaaau

SEQ ID NO: 3602849 - RNA, 15 nt, Human
auuguauuacaaauc

SEQ ID NO: 3602850 - RNA, 23 nt, Human
auuguauuaggugucauuuccau

SEQ ID NO: 3602851 - RNA, 13 nt, Human
auuguauucagag

SEQ ID NO: 3602852 - RNA, 16 nt, Human
auugucaaagugguga

SEQ ID NO: 3602853 - RNA, 23 nt, Human
auugucaaaguggugagaggcau

SEQ ID NO: 3602854 - RNA, 16 nt, Human
auugucaccugcuucu

SEQ ID NO: 3602855 - RNA, 23 nt, Human
auugucauuccuguauucacccg

SEQ ID NO: 3602856 - RNA, 18 nt, Human
auuguccaauccuauguu

SEQ ID NO: 3602857 - RNA, 23 nt, Human
auuguccagagcugcuuccccgu

SEQ ID NO: 3602858 - RNA, 18 nt, Human
auuguccuauuaguguua

SEQ ID NO: 3602859 - RNA, 20 nt, Human
auuguccuauuaguguuaua

SEQ ID NO: 3602860 - RNA, 14 nt, Human
auugucuauuuauc

SEQ ID NO: 3602861 - RNA, 20 nt, Human
auugucuccuauauauuucu

SEQ ID NO: 3602862 - RNA, 18 nt, Human
auugucucguuugugauu

SEQ ID NO: 3602863 - RNA, 18 nt, Human
auugucucuaaauugugg

SEQ ID NO: 3602864 - RNA, 12 nt, Human
auugucuguaaa

SEQ ID NO: 3602865 - RNA, 13 nt, Human
auugucuguaaau

SEQ ID NO: 3602866 - RNA, 14 nt, Human
auugucuuaaugga

SEQ ID NO: 3602867 - RNA, 14 nt, Human
auugucuucaugua

SEQ ID NO: 3602868 - RNA, 19 nt, Human
auugucuuuaaaaacuguu

SEQ ID NO: 3602869 - RNA, 17 nt, Human
auauauuauacuuguaa

SEQ ID NO: 3602870 - RNA, 14 nt, Human
auauauuauaugga

SEQ ID NO: 3602871 - RNA, 15 nt, Human
auauauuauauggaa

SEQ ID NO: 3602872 - RNA, 13 nt, Human
auauauuaucuuu

SEQ ID NO: 3602873 - RNA, 21 nt, Human
auauauucugaagcaacauuu

SEQ ID NO: 3602874 - RNA, 14 nt, Human
auauauucuuauaa

SEQ ID NO: 3602875 - RNA, 18 nt, Human
auauauucuuucaaagga

SEQ ID NO: 3602876 - RNA, 13 nt, Human
auauauugaacuu

SEQ ID NO: 3602877 - RNA, 15 nt, Human
auauauugaacuuuu

SEQ ID NO: 3602878 - RNA, 17 nt, Human
auauauuggguuccauu

SEQ ID NO: 3602879 - RNA, 23 nt, Human
auauauuguguugacuuuauaaa

SEQ ID NO: 3602880 - RNA, 14 nt, Human
auauauuguuaauc

SEQ ID NO: 3602881 - RNA, 18 nt, Human
auauauuuaaaauauauu

SEQ ID NO: 3602882 - RNA, 14 nt, Human
auauauuuaaaggg

SEQ ID NO: 3602883 - RNA, 13 nt, Human
auauauuuaagca

SEQ ID NO: 3602884 - RNA, 20 nt, Human
auauauuuaagcaacaucuu

SEQ ID NO: 3602885 - RNA, 16 nt, Human
auauauuuaaugauaa

SEQ ID NO: 3602886 - RNA, 16 nt, Human
auauauuuauaacuca

SEQ ID NO: 3602887 - RNA, 21 nt, Human
auauauuuauaacucaucaua

SEQ ID NO: 3602888 - RNA, 23 nt, Human
auauauuuauggccgggcagggu

SEQ ID NO: 3602889 - RNA, 14 nt, Human
auauauuuauuuaa

SEQ ID NO: 3602890 - RNA, 13 nt, Human
auauauuucuauu

SEQ ID NO: 3602891 - RNA, 23 nt, Human
auauauuucuauuauuaauugca

SEQ ID NO: 3602892 - RNA, 13 nt, Human
auauauuuuaaga

SEQ ID NO: 3602893 - RNA, 14 nt, Human
auauauuuuaagac

SEQ ID NO: 3602894 - RNA, 13 nt, Human
auauauuuuaauu

SEQ ID NO: 3602895 - RNA, 21 nt, Human
auauauuuuaccauacauuua

SEQ ID NO: 3602896 - RNA, 11 nt, Human
auauauuuuag

SEQ ID NO: 3602897 - RNA, 13 nt, Human
auauauuuuguau

SEQ ID NO: 3602898 - RNA, 23 nt, Human
auauauuuuguaugcaagcaguu

SEQ ID NO: 3602899 - RNA, 22 nt, Human
auauauuuugugugaaauugca

SEQ ID NO: 3602900 - RNA, 22 nt, Human
auauauuuuuaaaaaaugaaau

SEQ ID NO: 3602901 - RNA, 13 nt, Human
auauauuuuuaua

SEQ ID NO: 3602902 - RNA, 15 nt, Human
auauauuuuucacag

SEQ ID NO: 3602903 - RNA, 18 nt, Human
auauauuuuuuaaaauaa

SEQ ID NO: 3602904 - RNA, 22 nt, Human
auauauuuuuuaaaauaagucu

SEQ ID NO: 3602905 - RNA, 23 nt, Human
auauauuuuuuaauuugaugaaa

SEQ ID NO: 3602906 - RNA, 18 nt, Human
auauauuuuuuucugaaa

SEQ ID NO: 3602907 - RNA, 23 nt, Human
auauauuuuuuuuuaagcucuga

SEQ ID NO: 3602908 - RNA, 14 nt, Human
auaucaaaaagacu

SEQ ID NO: 3602909 - RNA, 13 nt, Human
auaucaaaguauu

SEQ ID NO: 3602910 - RNA, 13 nt, Human
auaucaaauuaau

SEQ ID NO: 3602911 - RNA, 21 nt, Human
auaucaacagauaguuguguu

SEQ ID NO: 3602912 - RNA, 21 nt, Human
auaucaaucaagccauguaua

SEQ ID NO: 3602913 - RNA, 17 nt, Human
auaucaaucauuuuccu

SEQ ID NO: 3602914 - RNA, 22 nt, Human
auaucaccaaaaaccuauucca

SEQ ID NO: 3602915 - RNA, 14 nt, Human
auaucacccagaca

SEQ ID NO: 3602916 - RNA, 20 nt, Human
auaucacccagacauaaagg

SEQ ID NO: 3602917 - RNA, 21 nt, Human
auaucacccagacauaaagga

SEQ ID NO: 3602918 - RNA, 16 nt, Human
auaucacucauuaauu

SEQ ID NO: 3602919 - RNA, 17 nt, Human
auaucacucauuaauua

SEQ ID NO: 3602920 - RNA, 16 nt, Human
auaucagcacauauuu

SEQ ID NO: 3602921 - RNA, 12 nt, Human
auaucagccuga

SEQ ID NO: 3602922 - RNA, 22 nt, Human
auaucaguuacucagcccuggg

SEQ ID NO: 3602923 - RNA, 23 nt, Human
auaucaguuacucagcccugggc

SEQ ID NO: 3602924 - RNA, 21 nt, Human
auaucauaauggggguaaagu

SEQ ID NO: 3602925 - RNA, 13 nt, Human
auaucauacaaau

SEQ ID NO: 3602926 - RNA, 18 nt, Human
auaucaucacguauguua

SEQ ID NO: 3602927 - RNA, 20 nt, Human
auaucaucacguauguuaua

SEQ ID NO: 3602928 - RNA, 13 nt, Human
auaucaucaguau

SEQ ID NO: 3602929 - RNA, 22 nt, Human
auaucaucaguauugaagcauu

SEQ ID NO: 3602930 - RNA, 18 nt, Human
auaucauccacacaugaa

SEQ ID NO: 3602931 - RNA, 20 nt, Human
auaucaugcuuuaaagugua

SEQ ID NO: 3602932 - RNA, 13 nt, Human
auaucauguaaag

SEQ ID NO: 3602933 - RNA, 12 nt, Human
auauccauguac

SEQ ID NO: 3602934 - RNA, 14 nt, Human
auaucccaaacugu

SEQ ID NO: 3602935 - RNA, 16 nt, Human
auaucccaagugcacu

SEQ ID NO: 3602936 - RNA, 17 nt, Human
auaucccuacauguauu

SEQ ID NO: 3602937 - RNA, 23 nt, Human
auaucccuuggacauuuuauguc

SEQ ID NO: 3602938 - RNA, 15 nt, Human
auauccuaaacauca

SEQ ID NO: 3602939 - RNA, 18 nt, Human
auauccuaauaaaaaggu

SEQ ID NO: 3602940 - RNA, 16 nt, Human
auauccuacuucucca

SEQ ID NO: 3602941 - RNA, 14 nt, Human
auauccugagccau

SEQ ID NO: 3602942 - RNA, 11 nt, Human
auauccugccu

SEQ ID NO: 3602943 - RNA, 20 nt, Human
auauccugugacugucucac

SEQ ID NO: 3602944 - RNA, 17 nt, Human
auauccuuaucagagcu

SEQ ID NO: 3602945 - RNA, 16 nt, Human
auauccuuucuaacaa

SEQ ID NO: 3602946 - RNA, 14 nt, Human
auauccuuugccuc

SEQ ID NO: 3602947 - RNA, 19 nt, Human
auaucggcucacaaagaga

SEQ ID NO: 3602948 - RNA, 16 nt, Human
auaucuaaaguuauau

SEQ ID NO: 3602949 - RNA, 21 nt, Human
auaucuaaaguuauauuucag

SEQ ID NO: 3602950 - RNA, 22 nt, Human
auaucuaaauugaauaauggua

SEQ ID NO: 3602951 - RNA, 18 nt, Human
auaucuagguuuaugaca

SEQ ID NO: 3602952 - RNA, 21 nt, Human
auaucuagguuuaugacagua

SEQ ID NO: 3602953 - RNA, 22 nt, Human
auaucuaguaauauauuuaaag

SEQ ID NO: 3602954 - RNA, 15 nt, Human
auaucuaguaugaaa

SEQ ID NO: 3602955 - RNA, 14 nt, Human
auaucuauaaaaua

SEQ ID NO: 3602956 - RNA, 17 nt, Human
auaucuauaaaauagau

SEQ ID NO: 3602957 - RNA, 22 nt, Human
auaucuauaaaauagauauaaa

SEQ ID NO: 3602958 - RNA, 23 nt, Human
auaucuauaaaauagauauaaau

SEQ ID NO: 3602959 - RNA, 17 nt, Human
auaucuauauauauaau

SEQ ID NO: 3602960 - RNA, 17 nt, Human
auaucuauauguacuug

SEQ ID NO: 3602961 - RNA, 20 nt, Human
auaucuauauuuuacauaaa

SEQ ID NO: 3602962 - RNA, 17 nt, Human
auaucuaucuauuugag

SEQ ID NO: 3602963 - RNA, 16 nt, Human
auaucuauguuuuacc

SEQ ID NO: 3602964 - RNA, 19 nt, Human
auaucuccgucaacucaua

SEQ ID NO: 3602965 - RNA, 15 nt, Human
auaucuccugaaaag

SEQ ID NO: 3602966 - RNA, 11 nt, Human
auaucugaaaa

SEQ ID NO: 3602967 - RNA, 16 nt, Human
auaucugaaaacugga

SEQ ID NO: 3602968 - RNA, 16 nt, Human
auaucugaaaauguau

SEQ ID NO: 3602969 - RNA, 22 nt, Human
auaucugaaaauguauguguaa

SEQ ID NO: 3602970 - RNA, 20 nt, Human
auaucugaggaauucuguau

SEQ ID NO: 3602971 - RNA, 21 nt, Human
auaucugaggaauucuguaua

SEQ ID NO: 3602972 - RNA, 22 nt, Human
auaucugauuguugucaggcca

SEQ ID NO: 3602973 - RNA, 18 nt, Human
auaucugccuuuauugug

SEQ ID NO: 3602974 - RNA, 20 nt, Human
auaucugccuuuauuguguu

SEQ ID NO: 3602975 - RNA, 15 nt, Human
auaucugcuguaugu

SEQ ID NO: 3602976 - RNA, 16 nt, Human
auaucugcuguauguc

SEQ ID NO: 3602977 - RNA, 12 nt, Human
auaucugcuguc

SEQ ID NO: 3602978 - RNA, 21 nt, Human
auaucuggccuaaaaucuugg

SEQ ID NO: 3602979 - RNA, 21 nt, Human
auaucugggauucuacuuuaa

SEQ ID NO: 3602980 - RNA, 18 nt, Human
auaucuguauuuaauuuu

SEQ ID NO: 3602981 - RNA, 15 nt, Human
auaucugugaaauau

SEQ ID NO: 3602982 - RNA, 17 nt, Human
auaucugugaaauauca

SEQ ID NO: 3602983 - RNA, 15 nt, Human
auaucuguuagaugc

SEQ ID NO: 3602984 - RNA, 20 nt, Human
auaucuguuuuacugcuuuu

SEQ ID NO: 3602985 - RNA, 14 nt, Human
auaucuuaaagaaa

SEQ ID NO: 3602986 - RNA, 16 nt, Human
auaucuuaaagaaaca

SEQ ID NO: 3602987 - RNA, 20 nt, Human
auaucuucagcucuuuuugu

SEQ ID NO: 3602988 - RNA, 15 nt, Human
auaucuugaaaugaa

SEQ ID NO: 3602989 - RNA, 14 nt, Human
auaucuugcuugaa

SEQ ID NO: 3602990 - RNA, 22 nt, Human
auaucuuggcagguaggaauau

SEQ ID NO: 3602991 - RNA, 13 nt, Human
auaucuuguagcu

SEQ ID NO: 3602992 - RNA, 21 nt, Human
auaucuuugugauaauuuaag

SEQ ID NO: 3602993 - RNA, 17 nt, Human
auaucuuuuauguuuga

SEQ ID NO: 3602994 - RNA, 19 nt, Human
auaucuuuuauguuugaau

SEQ ID NO: 3602995 - RNA, 20 nt, Human
auaucuuuuauguuugaaua

SEQ ID NO: 3602996 - RNA, 14 nt, Human
auuucaguaagucu

SEQ ID NO: 3602997 - RNA, 17 nt, Human
auuucaguccuguaguu

SEQ ID NO: 3602998 - RNA, 21 nt, Human
auuucaguguaguuaauuuau

SEQ ID NO: 3602999 - RNA, 21 nt, Human
auuucaguuauugucccuggc

SEQ ID NO: 3603000 - RNA, 22 nt, Human
auuucaguuccgucagaaagug

SEQ ID NO: 3603001 - RNA, 16 nt, Human
auuucaguucuaggaa

SEQ ID NO: 3603002 - RNA, 17 nt, Human
auuucaguucuaggaaa

SEQ ID NO: 3603003 - RNA, 18 nt, Human
auuucauaaacaacuuaa

SEQ ID NO: 3603004 - RNA, 20 nt, Human
auuucauaauuuguuuccag

SEQ ID NO: 3603005 - RNA, 14 nt, Human
auuucauaguucag

SEQ ID NO: 3603006 - RNA, 15 nt, Human
auuucauaguucaga

SEQ ID NO: 3603007 - RNA, 17 nt, Human
auuucauaguucagaau

SEQ ID NO: 3603008 - RNA, 19 nt, Human
auuucauaguucagaauuu

SEQ ID NO: 3603009 - RNA, 14 nt, Human
auuucauaucuaca

SEQ ID NO: 3603010 - RNA, 20 nt, Human
auuucauaucuacagauaga

SEQ ID NO: 3603011 - RNA, 22 nt, Human
auuucauaucuacagauagaga

SEQ ID NO: 3603012 - RNA, 16 nt, Human
auuucauaugcuguau

SEQ ID NO: 3603013 - RNA, 20 nt, Human
auuuuuauacaaaccuacca

SEQ ID NO: 3603014 - RNA, 12 nt, Human
auuuuuauacag

SEQ ID NO: 3603015 - RNA, 16 nt, Human
auuuuuauaccuguuu

SEQ ID NO: 3603016 - RNA, 17 nt, Human
auuuuuauauaauaucu

SEQ ID NO: 3603017 - RNA, 19 nt, Human
auuuuuauaucaugcaaaa

SEQ ID NO: 3603018 - RNA, 22 nt, Human
auuuuuauaucuauauguacuu

SEQ ID NO: 3603019 - RNA, 23 nt, Human
auuuuuauauuaaccagauauau

SEQ ID NO: 3603020 - RNA, 16 nt, Human
auuuuuauauuuccuu

SEQ ID NO: 3603021 - RNA, 17 nt, Human
auuuuuauauuuccuuu

SEQ ID NO: 3603022 - RNA, 11 nt, Human
auuuuuaucag

SEQ ID NO: 3603023 - RNA, 12 nt, Human
auuuuuauccaa

SEQ ID NO: 3603024 - RNA, 15 nt, Human
auuuuuaucuauaua

SEQ ID NO: 3603025 - RNA, 12 nt, Human
auuuuuauggaa

SEQ ID NO: 3603026 - RNA, 17 nt, Human
auuuuuauuaauuuuag

SEQ ID NO: 3603027 - RNA, 17 nt, Human
auuuuuauuaugcauaa

SEQ ID NO: 3603028 - RNA, 13 nt, Human
auuuuuauucaua

SEQ ID NO: 3603029 - RNA, 14 nt, Human
auuuuuauuuauga

SEQ ID NO: 3603030 - RNA, 14 nt, Human
auuuuuauuucaaa

SEQ ID NO: 3603031 - RNA, 14 nt, Human
auuuuuauuucaga

SEQ ID NO: 3603032 - RNA, 16 nt, Human
auuuuuauuucagauu

SEQ ID NO: 3603033 - RNA, 17 nt, Human
auuuuuauuucagauuu

SEQ ID NO: 3603034 - RNA, 20 nt, Human
auuuuuauuucagauuuuga

SEQ ID NO: 3603035 - RNA, 21 nt, Human
auuuuuauuucagauuuugau

SEQ ID NO: 3603036 - RNA, 12 nt, Human
auuuuuauuucu

SEQ ID NO: 3603037 - RNA, 17 nt, Human
auuuuuauuucuuccua

SEQ ID NO: 3603038 - RNA, 21 nt, Human
auuuuucaacaaauaucuugu

SEQ ID NO: 3603039 - RNA, 18 nt, Human
auuuuucaacuuugaaua

SEQ ID NO: 3603040 - RNA, 17 nt, Human
auuuuucaauaauaaaa

SEQ ID NO: 3603041 - RNA, 12 nt, Human
auuuuucaauag

SEQ ID NO: 3603042 - RNA, 19 nt, Human
auuuuucaauagcgugugu

SEQ ID NO: 3603043 - RNA, 18 nt, Human
auuuuucaauauauugaa

SEQ ID NO: 3603044 - RNA, 16 nt, Human
auuuuucagauauaaa

SEQ ID NO: 3603045 - RNA, 15 nt, Human
auuuuucaguuccaa

SEQ ID NO: 3603046 - RNA, 18 nt, Human
auuuuucaguuccaagaa

SEQ ID NO: 3603047 - RNA, 22 nt, Human
auuuuucaguuccaagaaagau

SEQ ID NO: 3603048 - RNA, 13 nt, Human
auuuuucauauug

SEQ ID NO: 3603049 - RNA, 18 nt, Human
auuuuucauauugugcca

SEQ ID NO: 3603050 - RNA, 18 nt, Human
auuuuucaugauaaugaa

SEQ ID NO: 3603051 - RNA, 19 nt, Human
auuuuucuaacuacaaagg

SEQ ID NO: 3603052 - RNA, 17 nt, Human
auuuuucucaaaguuuu

SEQ ID NO: 3603053 - RNA, 21 nt, Human
auuuuucucaaaguuuugaaa

SEQ ID NO: 3603054 - RNA, 10 nt, Human
auuuuucucu

SEQ ID NO: 3603055 - RNA, 12 nt, Human
auuuuucucuuc

SEQ ID NO: 3603056 - RNA, 12 nt, Human
auuuuucugcac

SEQ ID NO: 3603057 - RNA, 14 nt, Human
auuuuucugcacug

SEQ ID NO: 3603058 - RNA, 22 nt, Human
auuuuucuggagguugauaacu

SEQ ID NO: 3603059 - RNA, 21 nt, Human
auuuuucuuagggaaggauac

SEQ ID NO: 3603060 - RNA, 16 nt, Human
auuuuucuuuaacugc

SEQ ID NO: 3603061 - RNA, 17 nt, Human
auuuuugaaaaaaguac

SEQ ID NO: 3603062 - RNA, 22 nt, Human
auuuuugaauguaguaaguaaa

SEQ ID NO: 3603063 - RNA, 15 nt, Human
auuuuugacagaaua

SEQ ID NO: 3603064 - RNA, 18 nt, Human
auuuuugacauggaaaug

SEQ ID NO: 3603065 - RNA, 23 nt, Human
auuuuugauacaguuuucagaaa

SEQ ID NO: 3603066 - RNA, 13 nt, Human
auuuuugauuuau

SEQ ID NO: 3603067 - RNA, 17 nt, Human
auuuuugcaauaaugca

SEQ ID NO: 3603068 - RNA, 22 nt, Human
auuuuugcccugaguccaagag

SEQ ID NO: 3603069 - RNA, 18 nt, Human
auuuuugccucuuccagu

SEQ ID NO: 3603070 - RNA, 10 nt, Human
auuuuugcuu

SEQ ID NO: 3603071 - RNA, 20 nt, Human
auuuuugcuuuuagaaaagg

SEQ ID NO: 3603072 - RNA, 15 nt, Human
auuuuugcuuuugau

SEQ ID NO: 3603073 - RNA, 18 nt, Human
auuuuuggauugacagua

SEQ ID NO: 3603074 - RNA, 19 nt, Human
auuuuuggauugacaguaa

SEQ ID NO: 3603075 - RNA, 14 nt, Human
auuuuuguaaaguu

SEQ ID NO: 3603076 - RNA, 17 nt, Human
auuuuuguaaaguuucc

SEQ ID NO: 3603077 - RNA, 13 nt, Human
auuuuuguaaaug

SEQ ID NO: 3603078 - RNA, 11 nt, Human
auuuuuguaca

SEQ ID NO: 3603079 - RNA, 12 nt, Human
auuuuuguacag

SEQ ID NO: 3603080 - RNA, 12 nt, Human
auuuuuguacau

SEQ ID NO: 3603081 - RNA, 21 nt, Human
auuuuuguagcacugacagau

SEQ ID NO: 3603082 - RNA, 21 nt, Human
auuuuuguaucuacaucuuuu

SEQ ID NO: 3603083 - RNA, 12 nt, Human
auuuuuguuguu

SEQ ID NO: 3603084 - RNA, 18 nt, Human
auuuuuuaaaaaagcuua

SEQ ID NO: 3603085 - RNA, 20 nt, Human
auuuuuuaaaaaagcuuaaa

SEQ ID NO: 3603086 - RNA, 23 nt, Human
auuuuuuaaaaaucuauauuuug

SEQ ID NO: 3603087 - RNA, 22 nt, Human
auuuuuuaaaacaagccaagaa

SEQ ID NO: 3603088 - RNA, 14 nt, Human
auuuuuuaaaagaa

SEQ ID NO: 3603089 - RNA, 17 nt, Human
auuuuuuaaaagaaauu

SEQ ID NO: 3603090 - RNA, 14 nt, Human
auuuuuuaaaauaa

SEQ ID NO: 3603091 - RNA, 13 nt, Human
auuuuuuaaauuc

SEQ ID NO: 3603092 - RNA, 21 nt, Human
auuuuuuaaccccgucaacaa

SEQ ID NO: 3603093 - RNA, 23 nt, Human
auuuuuuaaccuccuaaguauca

SEQ ID NO: 3603094 - RNA, 21 nt, Human
auuuuuuaagcuucaguugcu

SEQ ID NO: 3603095 - RNA, 16 nt, Human
auuuuuuaaggaaaca

SEQ ID NO: 3603096 - RNA, 11 nt, Human
auuuuuuaagu

SEQ ID NO: 3603097 - RNA, 16 nt, Human
auuuuuuaaguauuua

SEQ ID NO: 3603098 - RNA, 20 nt, Human
auuuuuuaaguauuuauaua

SEQ ID NO: 3603099 - RNA, 21 nt, Human
auuuuuuaagugaaaauauag

SEQ ID NO: 3603100 - RNA, 13 nt, Human
auuuuuuaauugu

SEQ ID NO: 3603101 - RNA, 21 nt, Human
auuuuuuaauuugaugaaagc

SEQ ID NO: 3603102 - RNA, 19 nt, Human
auuuuuuacagcugccugc

SEQ ID NO: 3603103 - RNA, 18 nt, Human
auuuuuuauauuucaagu

SEQ ID NO: 3603104 - RNA, 16 nt, Human
auuuuuuaucaugcau

SEQ ID NO: 3603105 - RNA, 15 nt, Human
auuuuuuauuuuacu

SEQ ID NO: 3603106 - RNA, 13 nt, Human
auuuuuucagaaa

SEQ ID NO: 3603107 - RNA, 13 nt, Human
auuuuuucagacc

SEQ ID NO: 3603108 - RNA, 16 nt, Human
auuuuuucagaccgaa

SEQ ID NO: 3603109 - RNA, 22 nt, Human
auuuuuucaguauuauauguac

SEQ ID NO: 3603110 - RNA, 14 nt, Human
auuuuuucauuuca

SEQ ID NO: 3603111 - RNA, 12 nt, Human
auuuuuuccaaa

SEQ ID NO: 3603112 - RNA, 23 nt, Human
auuuuuuccaaaaucucccauuu

SEQ ID NO: 3603113 - RNA, 11 nt, Human
auuuuuuccuu

SEQ ID NO: 3603114 - RNA, 21 nt, Human
auuuuuuccuucaaaguuuaa

SEQ ID NO: 3603115 - RNA, 23 nt, Human
auuuuuucucuaggaaauauuua

SEQ ID NO: 3603116 - RNA, 13 nt, Human
auuuuuucugaau

SEQ ID NO: 3603117 - RNA, 17 nt, Human
auuuuuucuugcauuga

SEQ ID NO: 3603118 - RNA, 16 nt, Human
auuuuuugaaaugcug

SEQ ID NO: 3603119 - RNA, 19 nt, Human
auuuuuugaaaugcugaaa

SEQ ID NO: 3603120 - RNA, 21 nt, Human
auuuuuugaaaugcugaaaau

SEQ ID NO: 3603121 - RNA, 22 nt, Human
auuuuuugggcagcaauuuaaa

SEQ ID NO: 3603122 - RNA, 17 nt, Human
auuuuuugguacaaaaa

SEQ ID NO: 3603123 - RNA, 16 nt, Human
auuuuuuguauaauug

SEQ ID NO: 3603124 - RNA, 18 nt, Human
auuuuuuguuaaaugauu

SEQ ID NO: 3603125 - RNA, 16 nt, Human
auuuuuuguugacauu

SEQ ID NO: 3603126 - RNA, 18 nt, Human
auuuuuuuaaaaucacua

SEQ ID NO: 3603127 - RNA, 15 nt, Human
auuuuuuuaaaauuu

SEQ ID NO: 3603128 - RNA, 21 nt, Human
auuuuuuuaaccaaaggugaa

SEQ ID NO: 3603129 - RNA, 15 nt, Human
auuuuuuuaagucuu

SEQ ID NO: 3603130 - RNA, 18 nt, Human
auuuuuuuaauuuacaaa

SEQ ID NO: 3603131 - RNA, 22 nt, Human
auuuuuuuauuguuuaaagcaa

SEQ ID NO: 3603132 - RNA, 21 nt, Human
auuuuuuucacuggaguuaca

SEQ ID NO: 3603133 - RNA, 12 nt, Human
auuuuuuuccuu

SEQ ID NO: 3603134 - RNA, 22 nt, Human
auuuuuuuccuuacauaaacau

SEQ ID NO: 3603135 - RNA, 15 nt, Human
auuuuuuucuaccua

SEQ ID NO: 3603136 - RNA, 13 nt, Human
auuuuuuucuauu

SEQ ID NO: 3603137 - RNA, 14 nt, Human
auuuuuuucugauu

SEQ ID NO: 3603138 - RNA, 22 nt, Human
auuuuuuugaacucuucucauu

SEQ ID NO: 3603139 - RNA, 14 nt, Human
auuuuuuugcaagu

SEQ ID NO: 3603140 - RNA, 22 nt, Human
auuuuuuugcaugcaugcaaau

SEQ ID NO: 3603141 - RNA, 14 nt, Human
auuuuuuuguaaua

SEQ ID NO: 3603142 - RNA, 15 nt, Human
auuuuuuuguaauug

SEQ ID NO: 3603143 - RNA, 13 nt, Human
auuuuuuuguaug

SEQ ID NO: 3603144 - RNA, 22 nt, Human
auuuuuuuuaauugaaaagaag

SEQ ID NO: 3603145 - RNA, 17 nt, Human
auuuuuuuuaauuguau

SEQ ID NO: 3603146 - RNA, 20 nt, Human
auuuuuuuuaauuguauuuu

SEQ ID NO: 3603147 - RNA, 14 nt, Human
auuuuuuuuaguau

SEQ ID NO: 3603148 - RNA, 18 nt, Human
auuuuuuuuaguauuuau

SEQ ID NO: 3603149 - RNA, 15 nt, Human
auuuuuuuuguuuca

SEQ ID NO: 3603150 - RNA, 23 nt, Human
auuuuuuuuuaaagaagaaaaaa

SEQ ID NO: 3603151 - RNA, 22 nt, Human
auaucuuuuauguuugaauaug

SEQ ID NO: 3603152 - RNA, 13 nt, Human
auaugaaaaauau

SEQ ID NO: 3603153 - RNA, 19 nt, Human
auaugaaaaauaugauauu

SEQ ID NO: 3603154 - RNA, 23 nt, Human
auaugaaaauacaacuuaaauaa

SEQ ID NO: 3603155 - RNA, 17 nt, Human
auaugaaagcugauuuu

SEQ ID NO: 3603156 - RNA, 12 nt, Human
auaugaacauag

SEQ ID NO: 3603157 - RNA, 15 nt, Human
auaugaacauauugu

SEQ ID NO: 3603158 - RNA, 19 nt, Human
auaugaacauauuguugaa

SEQ ID NO: 3603159 - RNA, 14 nt, Human
caaaagggucagag

SEQ ID NO: 3603160 - RNA, 13 nt, Human
caaaaggugccug

SEQ ID NO: 3603161 - RNA, 14 nt, Human
auuucuguuucuca

SEQ ID NO: 3603162 - RNA, 21 nt, Human
auuucuuaaacaaauguauga

SEQ ID NO: 3603163 - RNA, 14 nt, Human
auuucuuaaacacu

SEQ ID NO: 3603164 - RNA, 14 nt, Human
auuucuuaacuucu

SEQ ID NO: 3603165 - RNA, 17 nt, Human
auuucuuaacuucuugc

SEQ ID NO: 3603166 - RNA, 18 nt, Human
auuucuuaauuauuauaa

SEQ ID NO: 3603167 - RNA, 23 nt, Human
auuucuuaauuauuauaaaaaua

SEQ ID NO: 3603168 - RNA, 20 nt, Human
auuucuuacuaaacauuuug

SEQ ID NO: 3603169 - RNA, 11 nt, Human
auuucuuaggg

SEQ ID NO: 3603170 - RNA, 11 nt, Human
auuucuuauag

SEQ ID NO: 3603171 - RNA, 18 nt, Human
auuucuuaucaccacagu

SEQ ID NO: 3603172 - RNA, 13 nt, Human
auuucuuauguga

SEQ ID NO: 3603173 - RNA, 16 nt, Human
auuucuucaccagauu

SEQ ID NO: 3603174 - RNA, 13 nt, Human
auuucuucacugu

SEQ ID NO: 3603175 - RNA, 15 nt, Human
auuucuucagggcug

SEQ ID NO: 3603176 - RNA, 17 nt, Human
auuucuucagucagaaa

SEQ ID NO: 3603177 - RNA, 20 nt, Human
auuucuucagucagaaaacu

SEQ ID NO: 3603178 - RNA, 23 nt, Human
auuucuucagucagaaaacuuua

SEQ ID NO: 3603179 - RNA, 19 nt, Human
auuucuuccuaccaaguca

SEQ ID NO: 3603180 - RNA, 23 nt, Human
auuucuuccuaccaagucaaacu

SEQ ID NO: 3603181 - RNA, 14 nt, Human
auuucuucuuacca

SEQ ID NO: 3603182 - RNA, 20 nt, Human
auuucuugagguaaaagcau

SEQ ID NO: 3603183 - RNA, 14 nt, Human
auuucuugcgagcc

SEQ ID NO: 3603184 - RNA, 14 nt, Human
auuucuuguuuguu

SEQ ID NO: 3603185 - RNA, 15 nt, Human
auuucuuuauaaaau

SEQ ID NO: 3603186 - RNA, 21 nt, Human
auuucuuuauauuuauccacu

SEQ ID NO: 3603187 - RNA, 12 nt, Human
auuucuuugaaa

SEQ ID NO: 3603188 - RNA, 15 nt, Human
auuucuuugaaaaaa

SEQ ID NO: 3603189 - RNA, 20 nt, Human
auuucuuugccuguucaguu

SEQ ID NO: 3603190 - RNA, 19 nt, Human
auuucuuugugcuuuggcu

SEQ ID NO: 3603191 - RNA, 23 nt, Human
auuucuuuguuaucaaacuucag

SEQ ID NO: 3603192 - RNA, 20 nt, Human
auuucuuuucaccauucgua

SEQ ID NO: 3603193 - RNA, 16 nt, Human
auuucuuuucuuccug

SEQ ID NO: 3603194 - RNA, 20 nt, Human
auuucuuuugccguuauuaa

SEQ ID NO: 3603195 - RNA, 22 nt, Human
auuucuuuuguaauaaacuauu

SEQ ID NO: 3603196 - RNA, 20 nt, Human
auuucuuuuugggagagacu

SEQ ID NO: 3603197 - RNA, 21 nt, Human
auuucuuuuugggagagacuu

SEQ ID NO: 3603198 - RNA, 22 nt, Human
auuugaaaacauaaucugcaaa

SEQ ID NO: 3603199 - RNA, 18 nt, Human
auuugaaaauaauuguuc

SEQ ID NO: 3603200 - RNA, 14 nt, Human
auuugaaaauuuug

SEQ ID NO: 3603201 - RNA, 17 nt, Human
auuugaaacauugcuuu

SEQ ID NO: 3603202 - RNA, 14 nt, Human
auuugaaagugccu

SEQ ID NO: 3603203 - RNA, 16 nt, Human
auuugaaauaagaauu

SEQ ID NO: 3603204 - RNA, 16 nt, Human
auuugaagaacaugug

SEQ ID NO: 3603205 - RNA, 23 nt, Human
auuugaagcugcagugagcugug

SEQ ID NO: 3603206 - RNA, 23 nt, Human
auuugaagguagaauguuuucaa

SEQ ID NO: 3603207 - RNA, 13 nt, Human
auuugaaguguaa

SEQ ID NO: 3603208 - RNA, 16 nt, Human
auuugaaucucaauuu

SEQ ID NO: 3603209 - RNA, 18 nt, Human
auuugaaucucaauuuga

SEQ ID NO: 3603210 - RNA, 14 nt, Human
auuugaaucuuguc

SEQ ID NO: 3603211 - RNA, 18 nt, Human
auuugaaucuugucucaa

SEQ ID NO: 3603212 - RNA, 22 nt, Human
auuugaaucuugucucaaugcu

SEQ ID NO: 3603213 - RNA, 14 nt, Human
auuugaaugcauuu

SEQ ID NO: 3603214 - RNA, 21 nt, Human
auuugaauguaugcuucauac

SEQ ID NO: 3603215 - RNA, 20 nt, Human
auuugaauuaaaacuucuua

SEQ ID NO: 3603216 - RNA, 18 nt, Human
auuugaauuaucagcaaa

SEQ ID NO: 3603217 - RNA, 17 nt, Human
auuugaauuauuucugu

SEQ ID NO: 3603218 - RNA, 18 nt, Human
auuugaauuuuaaaucua

SEQ ID NO: 3603219 - RNA, 20 nt, Human
auuugaauuuuaaaucuaaa

SEQ ID NO: 3603220 - RNA, 13 nt, Human
auuugaauuuugu

SEQ ID NO: 3603221 - RNA, 15 nt, Human
auuugaauuuugugu

SEQ ID NO: 3603222 - RNA, 13 nt, Human
auuugaccuacaa

SEQ ID NO: 3603223 - RNA, 21 nt, Human
auuugaccuccucccuguuau

SEQ ID NO: 3603224 - RNA, 12 nt, Human
auuugacuaauu

SEQ ID NO: 3603225 - RNA, 14 nt, Human
auuugacugaagau

SEQ ID NO: 3603226 - RNA, 15 nt, Human
auuugacuguuauuu

SEQ ID NO: 3603227 - RNA, 15 nt, Human
auuugacuugugguu

SEQ ID NO: 3603228 - RNA, 16 nt, Human
auuugacuugugguug

SEQ ID NO: 3603229 - RNA, 14 nt, Human
auuugagaaaugca

SEQ ID NO: 3603230 - RNA, 16 nt, Human
auuugagaaaugcaua

SEQ ID NO: 3603231 - RNA, 15 nt, Human
auuugagacauucca

SEQ ID NO: 3603232 - RNA, 18 nt, Human
auuugagagaaauaugaa

SEQ ID NO: 3603233 - RNA, 15 nt, Human
auuugagcagggcuc

SEQ ID NO: 3603234 - RNA, 16 nt, Human
auuugagcagggcuca

SEQ ID NO: 3603235 - RNA, 17 nt, Human
auuugagcagggcucag

SEQ ID NO: 3603236 - RNA, 19 nt, Human
auuugaggagcagcuucag

SEQ ID NO: 3603237 - RNA, 23 nt, Human
auuugaggagcagcuucaguugu

SEQ ID NO: 3603238 - RNA, 20 nt, Human
auuugaggaguguuaagauu

SEQ ID NO: 3603239 - RNA, 14 nt, Human
auuugaggcucaga

SEQ ID NO: 3603240 - RNA, 18 nt, Human
auuugaggucuguucuuu

SEQ ID NO: 3603241 - RNA, 21 nt, Human
auuugaggucuguucuuucca

SEQ ID NO: 3603242 - RNA, 22 nt, Human
auuugaggucuguucuuuccaa

SEQ ID NO: 3603243 - RNA, 18 nt, Human
auuugagguuaagacaaa

SEQ ID NO: 3603244 - RNA, 21 nt, Human
auuugagucucuuaauagcca

SEQ ID NO: 3603245 - RNA, 16 nt, Human
auuugagugcucugau

SEQ ID NO: 3603246 - RNA, 16 nt, Human
auuugauaaugauaaa

SEQ ID NO: 3603247 - RNA, 19 nt, Human
auuugauaaugauaaaaca

SEQ ID NO: 3603248 - RNA, 14 nt, Human
auuugauacauaau

SEQ ID NO: 3603249 - RNA, 19 nt, Human
auuugauacauaauaaaaa

SEQ ID NO: 3603250 - RNA, 16 nt, Human
auuugauaccccuggg

SEQ ID NO: 3603251 - RNA, 14 nt, Human
auuugauacuuaua

SEQ ID NO: 3603252 - RNA, 17 nt, Human
auuugauauuuuuuaaa

SEQ ID NO: 3603253 - RNA, 23 nt, Human
auuugaucguuccaguucccacu

SEQ ID NO: 3603254 - RNA, 11 nt, Human
auuugaugaaa

SEQ ID NO: 3603255 - RNA, 16 nt, Human
auuugaugaaagcuga

SEQ ID NO: 3603256 - RNA, 19 nt, Human
auuugauuauuuaagacua

SEQ ID NO: 3603257 - RNA, 14 nt, Human
auuugauuuauuaa

SEQ ID NO: 3603258 - RNA, 15 nt, Human
auuugauuuauuaac

SEQ ID NO: 3603259 - RNA, 17 nt, Human
auuugauuucuauucaa

SEQ ID NO: 3603260 - RNA, 18 nt, Human
auuugauuuuugucucaa

SEQ ID NO: 3603261 - RNA, 11 nt, Human
auuugcaaagu

SEQ ID NO: 3603262 - RNA, 13 nt, Human
auuugcaaaguac

SEQ ID NO: 3603263 - RNA, 17 nt, Human
auuugcaaaguacugua

SEQ ID NO: 3603264 - RNA, 19 nt, Human
auuugcaagucauggcugu

SEQ ID NO: 3603265 - RNA, 15 nt, Human
auuugcacaaguuuu

SEQ ID NO: 3603266 - RNA, 17 nt, Human
auuugcacauuaaauga

SEQ ID NO: 3603267 - RNA, 20 nt, Human
auuugcacauuaaaugacuc

SEQ ID NO: 3603268 - RNA, 16 nt, Human
auuugcacccuccgcc

SEQ ID NO: 3603269 - RNA, 21 nt, Human
auuugcacuggaguucuaugc

SEQ ID NO: 3603270 - RNA, 15 nt, Human
auuugcagagacagg

SEQ ID NO: 3603271 - RNA, 22 nt, Human
auuugcagagacaggaccugac

SEQ ID NO: 3603272 - RNA, 21 nt, Human
auuugcagcugagagaaaaua

SEQ ID NO: 3603273 - RNA, 22 nt, Human
auuugcagcugagagaaaauaa

SEQ ID NO: 3603274 - RNA, 16 nt, Human
auuugcagcuuccaau

SEQ ID NO: 3603275 - RNA, 22 nt, Human
auuugcauaacaauuccucuac

SEQ ID NO: 3603276 - RNA, 13 nt, Human
auuugcauacuua

SEQ ID NO: 3603277 - RNA, 15 nt, Human
auuugcauacuuacc

SEQ ID NO: 3603278 - RNA, 22 nt, Human
auuugcauggcuccagaaaugu

SEQ ID NO: 3603279 - RNA, 12 nt, Human
auuugcauguua

SEQ ID NO: 3603280 - RNA, 13 nt, Human
auuugcauguuau

SEQ ID NO: 3603281 - RNA, 22 nt, Human
auuugcauguuauguuuaauaa

SEQ ID NO: 3603282 - RNA, 22 nt, Human
auuugcauugaacacaaacugu

SEQ ID NO: 3603283 - RNA, 16 nt, Human
auuugcauuuguuuau

SEQ ID NO: 3603284 - RNA, 20 nt, Human
auuugccacugauauucaga

SEQ ID NO: 3603285 - RNA, 22 nt, Human
auuugccacugauauucagaau

SEQ ID NO: 3603286 - RNA, 13 nt, Human
auuugccauagag

SEQ ID NO: 3603287 - RNA, 21 nt, Human
auuugcccauuuacacuuuug

SEQ ID NO: 3603288 - RNA, 22 nt, Human
auuugccuauucccacaccucc

SEQ ID NO: 3603289 - RNA, 15 nt, Human
auuugccugugccac

SEQ ID NO: 3603290 - RNA, 15 nt, Human
auuugccuugcagaa

SEQ ID NO: 3603291 - RNA, 15 nt, Human
auuugcgaaugguuc

SEQ ID NO: 3603292 - RNA, 18 nt, Human
auuugcuaaucaaagcca

SEQ ID NO: 3603293 - RNA, 16 nt, Human
auuugcuaauuuuuau

SEQ ID NO: 3603294 - RNA, 14 nt, Human
auuugcucauggaa

SEQ ID NO: 3603295 - RNA, 17 nt, Human
auuugcucauggaauug

SEQ ID NO: 3603296 - RNA, 19 nt, Human
auuugcugccaaaugcgua

SEQ ID NO: 3603297 - RNA, 14 nt, Human
auuugcugcucuuc

SEQ ID NO: 3603298 - RNA, 13 nt, Human
auuugcuggggaa

SEQ ID NO: 3603299 - RNA, 18 nt, Human
auuugcuuauuuaauaaa

SEQ ID NO: 3603300 - RNA, 20 nt, Human
auuugcuuucuuuucuccca

SEQ ID NO: 3603301 - RNA, 17 nt, Human
auuugcuuuuugugaua

SEQ ID NO: 3603302 - RNA, 19 nt, Human
auuuggaaacuaauaaaau

SEQ ID NO: 3603303 - RNA, 21 nt, Human
auuuggaaacuaauaaaauau

SEQ ID NO: 3603304 - RNA, 19 nt, Human
caaaugauugcuuuuaaaa

SEQ ID NO: 3603305 - RNA, 19 nt, Human
caaaugcaaaaacucuuug

SEQ ID NO: 3603306 - RNA, 18 nt, Human
caaaugcaguauauuucu

SEQ ID NO: 3603307 - RNA, 18 nt, Human
caaaugcaucaauccugu

SEQ ID NO: 3603308 - RNA, 15 nt, Human
caaaugcaucuuuga

SEQ ID NO: 3603309 - RNA, 16 nt, Human
caaaugcaugaacaag

SEQ ID NO: 3603310 - RNA, 20 nt, Human
caaaugcaugcuucuucuca

SEQ ID NO: 3603311 - RNA, 21 nt, Human
caaaugccaaauuaaaaaaga

SEQ ID NO: 3603312 - RNA, 14 nt, Human
caaaugccagggcc

SEQ ID NO: 3603313 - RNA, 19 nt, Human
caaaugcccaagggaaaga

SEQ ID NO: 3603314 - RNA, 17 nt, Human
caaaugccuuaaaaugg

SEQ ID NO: 3603315 - RNA, 19 nt, Human
caaaugccuuaaaauggaa

SEQ ID NO: 3603316 - RNA, 17 nt, Human
caaaugcuauuaaagug

SEQ ID NO: 3603317 - RNA, 22 nt, Human
caaaugcucucucaaauuguca

SEQ ID NO: 3603318 - RNA, 20 nt, Human
caaaugcugcgcccuucccc

SEQ ID NO: 3603319 - RNA, 21 nt, Human
caaaugcugcgcccuucccca

SEQ ID NO: 3603320 - RNA, 23 nt, Human
caaaugcuguaacuuucugaaau

SEQ ID NO: 3603321 - RNA, 15 nt, Human
caaaugcuguauucu

SEQ ID NO: 3603322 - RNA, 14 nt, Human
caaauggaaaggag

SEQ ID NO: 3603323 - RNA, 20 nt, Human
caaauggaaaugggcagagc

SEQ ID NO: 3603324 - RNA, 22 nt, Human
caaauggaaaugggcagagcag

SEQ ID NO: 3603325 - RNA, 15 nt, Human
caaauggaagacaca

SEQ ID NO: 3603326 - RNA, 17 nt, Human
caaauggagaagcugca

SEQ ID NO: 3603327 - RNA, 19 nt, Human
caaauggaguuggaguuca

SEQ ID NO: 3603328 - RNA, 22 nt, Human
caaauggauuuugggagugacu

SEQ ID NO: 3603329 - RNA, 18 nt, Human
caaauggcgucuggaagu

SEQ ID NO: 3603330 - RNA, 19 nt, Human
caaauggcgucuggaaguc

SEQ ID NO: 3603331 - RNA, 14 nt, Human
caaauggggccaga

SEQ ID NO: 3603332 - RNA, 15 nt, Human
caaauggggccagau

SEQ ID NO: 3603333 - RNA, 18 nt, Human
caaauggggccagaucca

SEQ ID NO: 3603334 - RNA, 20 nt, Human
caaauggggccagauccagc

SEQ ID NO: 3603335 - RNA, 23 nt, Human
caaauggggccagauccagccug

SEQ ID NO: 3603336 - RNA, 22 nt, Human
caaaugggugauauccugaaaa

SEQ ID NO: 3603337 - RNA, 13 nt, Human
caaaugguacaaa

SEQ ID NO: 3603338 - RNA, 22 nt, Human
caaauggugguuguuucuucca

SEQ ID NO: 3603339 - RNA, 23 nt, Human
caaaugguuaccuuguuauuuaa

SEQ ID NO: 3603340 - RNA, 23 nt, Human
caaaugguuuaacuucugccugu

SEQ ID NO: 3603341 - RNA, 17 nt, Human
caaauguaaacauuuuc

SEQ ID NO: 3603342 - RNA, 22 nt, Human
caaauguaauguggcuucugga

SEQ ID NO: 3603343 - RNA, 17 nt, Human
caaaugucaucagaacu

SEQ ID NO: 3603344 - RNA, 19 nt, Human
caaaugucaugcugccuua

SEQ ID NO: 3603345 - RNA, 18 nt, Human
caaauguccuccagaagc

SEQ ID NO: 3603346 - RNA, 19 nt, Human
caaauguccuccagaagcc

SEQ ID NO: 3603347 - RNA, 15 nt, Human
caaaugucuauaaac

SEQ ID NO: 3603348 - RNA, 18 nt, Human
caaaugugaagaugcauu

SEQ ID NO: 3603349 - RNA, 14 nt, Human
caaaugugcuuuga

SEQ ID NO: 3603350 - RNA, 18 nt, Human
caaaugugcuuugagaag

SEQ ID NO: 3603351 - RNA, 19 nt, Human
caaauguggcauuugugau

SEQ ID NO: 3603352 - RNA, 20 nt, Human
caaauguguaucggaugcuu

SEQ ID NO: 3603353 - RNA, 17 nt, Human
caaauguguuuuggucc

SEQ ID NO: 3603354 - RNA, 20 nt, Human
caaauguuaaaauguguugu

SEQ ID NO: 3603355 - RNA, 14 nt, Human
caaauguuacauag

SEQ ID NO: 3603356 - RNA, 19 nt, Human
caaauguucuaaguuucua

SEQ ID NO: 3603357 - RNA, 18 nt, Human
auuuugcuuugugauuuu

SEQ ID NO: 3603358 - RNA, 19 nt, Human
auuuuggaaaauaaauuau

SEQ ID NO: 3603359 - RNA, 23 nt, Human
auuuuggaaagcuccuagcagag

SEQ ID NO: 3603360 - RNA, 20 nt, Human
auuuuggaaguuuucaggac

SEQ ID NO: 3603361 - RNA, 11 nt, Human
auuuuggaauu

SEQ ID NO: 3603362 - RNA, 12 nt, Human
auuuuggaauuu

SEQ ID NO: 3603363 - RNA, 17 nt, Human
auuuuggagagauagga

SEQ ID NO: 3603364 - RNA, 22 nt, Human
auuuuggagaguuuccugaaac

SEQ ID NO: 3603365 - RNA, 19 nt, Human
auuuuggagauuauaauaa

SEQ ID NO: 3603366 - RNA, 20 nt, Human
auuuuggcgcuauuacaaau

SEQ ID NO: 3603367 - RNA, 18 nt, Human
auuuuggggauuuucaaa

SEQ ID NO: 3603368 - RNA, 23 nt, Human
auuuugggguacccacugcucug

SEQ ID NO: 3603369 - RNA, 11 nt, Human
auuuugggguc

SEQ ID NO: 3603370 - RNA, 13 nt, Human
auuuuggggucuc

SEQ ID NO: 3603371 - RNA, 16 nt, Human
auuuuggggucucuuu

SEQ ID NO: 3603372 - RNA, 17 nt, Human
auuuuggggucucuuuu

SEQ ID NO: 3603373 - RNA, 21 nt, Human
auuuuggucauagcauucacu

SEQ ID NO: 3603374 - RNA, 18 nt, Human
auuuugguccaaguugug

SEQ ID NO: 3603375 - RNA, 10 nt, Human
auuuuggucu

SEQ ID NO: 3603376 - RNA, 15 nt, Human
auuuuggugagaaau

SEQ ID NO: 3603377 - RNA, 16 nt, Human
auuuuggugagaaaug

SEQ ID NO: 3603378 - RNA, 21 nt, Human
auuuuggugagaaaugggacu

SEQ ID NO: 3603379 - RNA, 16 nt, Human
auuuugguucuucuca

SEQ ID NO: 3603380 - RNA, 15 nt, Human
auuuugguuguauuc

SEQ ID NO: 3603381 - RNA, 23 nt, Human
auuuugguuuuguuccccuccuc

SEQ ID NO: 3603382 - RNA, 10 nt, Human
auuuuguaaa

SEQ ID NO: 3603383 - RNA, 19 nt, Human
auuuuguaaaauguauuau

SEQ ID NO: 3603384 - RNA, 19 nt, Human
auuuuguaaacucaaaaua

SEQ ID NO: 3603385 - RNA, 17 nt, Human
auuuuguaaaggugaaa

SEQ ID NO: 3603386 - RNA, 17 nt, Human
auuuuguaacaaaugaa

SEQ ID NO: 3603387 - RNA, 17 nt, Human
auuuuguaacuuucucu

SEQ ID NO: 3603388 - RNA, 21 nt, Human
auuuuguaagaaggcaauauu

SEQ ID NO: 3603389 - RNA, 12 nt, Human
auuuuguaaguu

SEQ ID NO: 3603390 - RNA, 14 nt, Human
auuuuguaauaaua

SEQ ID NO: 3603391 - RNA, 12 nt, Human
auuuuguaauga

SEQ ID NO: 3603392 - RNA, 16 nt, Human
auuuuguaaugaauuc

SEQ ID NO: 3603393 - RNA, 22 nt, Human
auuuuguaauuauugugauuuc

SEQ ID NO: 3603394 - RNA, 23 nt, Human
auuuuguaucugcaggcagacac

SEQ ID NO: 3603395 - RNA, 16 nt, Human
auuuuguaucuugaug

SEQ ID NO: 3603396 - RNA, 16 nt, Human
auuuuguaugaaauau

SEQ ID NO: 3603397 - RNA, 21 nt, Human
auuuuguaugaaauauaugug

SEQ ID NO: 3603398 - RNA, 13 nt, Human
auuuuguaugcaa

SEQ ID NO: 3603399 - RNA, 17 nt, Human
auuuuguauuauugcug

SEQ ID NO: 3603400 - RNA, 23 nt, Human
auuuuguauuauugcuguugcuu

SEQ ID NO: 3603401 - RNA, 14 nt, Human
auuuuguauugugg

SEQ ID NO: 3603402 - RNA, 19 nt, Human
auuuuguauuguuucaauu

SEQ ID NO: 3603403 - RNA, 22 nt, Human
auuuuguauuuuccaagugugc

SEQ ID NO: 3603404 - RNA, 23 nt, Human
auuuugucauauaagauucauau

SEQ ID NO: 3603405 - RNA, 19 nt, Human
auuuugucauaucaaauaa

SEQ ID NO: 3603406 - RNA, 13 nt, Human
auuuugucuaaaa

SEQ ID NO: 3603407 - RNA, 21 nt, Human
auuuugucuaaaaugccucag

SEQ ID NO: 3603408 - RNA, 20 nt, Human
auuuugugaaacagacuugu

SEQ ID NO: 3603409 - RNA, 12 nt, Human
auuuugugaagc

SEQ ID NO: 3603410 - RNA, 18 nt, Human
auuuugugaagcccuguu

SEQ ID NO: 3603411 - RNA, 18 nt, Human
auuuugugaguuuguuuc

SEQ ID NO: 3603412 - RNA, 17 nt, Human
auuuugugaugcaaaua

SEQ ID NO: 3603413 - RNA, 18 nt, Human
auuuugugaugcaaauaa

SEQ ID NO: 3603414 - RNA, 16 nt, Human
auuuugugcucauuua

SEQ ID NO: 3603415 - RNA, 17 nt, Human
auuuuguguaagaaaua

SEQ ID NO: 3603416 - RNA, 12 nt, Human
auuuuguguccu

SEQ ID NO: 3603417 - RNA, 22 nt, Human
auuuugugugaccaacuguguu

SEQ ID NO: 3603418 - RNA, 23 nt, Human
auuuugugugaccaacuguguug

SEQ ID NO: 3603419 - RNA, 14 nt, Human
auuuuguucucugg

SEQ ID NO: 3603420 - RNA, 16 nt, Human
auuuuguucucuggga

SEQ ID NO: 3603421 - RNA, 21 nt, Human
auuuuguucucugggagaaaa

SEQ ID NO: 3603422 - RNA, 22 nt, Human
auuuuguucucugggagaaaau

SEQ ID NO: 3603423 - RNA, 18 nt, Human
auuuuguucuuacacaua

SEQ ID NO: 3603424 - RNA, 19 nt, Human
auuuuguugcuuuugugaa

SEQ ID NO: 3603425 - RNA, 13 nt, Human
auuuuguuguaaa

SEQ ID NO: 3603426 - RNA, 17 nt, Human
auuuuguuguaaaaaga

SEQ ID NO: 3603427 - RNA, 15 nt, Human
auuuuguuuaaauua

SEQ ID NO: 3603428 - RNA, 12 nt, Human
auuuuguuuaca

SEQ ID NO: 3603429 - RNA, 14 nt, Human
auuuuguuuauaag

SEQ ID NO: 3603430 - RNA, 11 nt, Human
auuuuguuucu

SEQ ID NO: 3603431 - RNA, 16 nt, Human
auuuuguuucuuuuaa

SEQ ID NO: 3603432 - RNA, 18 nt, Human
auuuuguuugguauugua

SEQ ID NO: 3603433 - RNA, 20 nt, Human
auuuuguuuuauuuugaaug

SEQ ID NO: 3603434 - RNA, 19 nt, Human
auuuuguuuugcuuuuucu

SEQ ID NO: 3603435 - RNA, 21 nt, Human
auuuuguuuugcuuuuucuga

SEQ ID NO: 3603436 - RNA, 22 nt, Human
auuuuguuuuugucuuaaaaag

SEQ ID NO: 3603437 - RNA, 20 nt, Human
auuuuuaaaaaauauuuucu

SEQ ID NO: 3603438 - RNA, 12 nt, Human
auuuuuaaaaac

SEQ ID NO: 3603439 - RNA, 17 nt, Human
auuuuuaaaaagaaauc

SEQ ID NO: 3603440 - RNA, 23 nt, Human
auuuuuaaaaagaaaucuggucu

SEQ ID NO: 3603441 - RNA, 16 nt, Human
auuuuuaaaacccauu

SEQ ID NO: 3603442 - RNA, 17 nt, Human
auuuuuaaaacccauuu

SEQ ID NO: 3603443 - RNA, 17 nt, Human
auuuuuaaaauauuuau

SEQ ID NO: 3603444 - RNA, 19 nt, Human
auuuuuaaaauuuuaauau

SEQ ID NO: 3603445 - RNA, 14 nt, Human
auuuuuaaaguaga

SEQ ID NO: 3603446 - RNA, 19 nt, Human
auuuuuaaaguagaagagg

SEQ ID NO: 3603447 - RNA, 13 nt, Human
auuuuuaagugcu

SEQ ID NO: 3603448 - RNA, 19 nt, Human
aucagacccuaccccacca

SEQ ID NO: 3603449 - RNA, 20 nt, Human
aucagacccuaccccaccac

SEQ ID NO: 3603450 - RNA, 19 nt, Human
aucagacuaagccagcacc

SEQ ID NO: 3603451 - RNA, 22 nt, Human
aucagacuagugacaagcuccu

SEQ ID NO: 3603452 - RNA, 17 nt, Human
aucagacugacaguuua

SEQ ID NO: 3603453 - RNA, 13 nt, Human
aucagagagcuca

SEQ ID NO: 3603454 - RNA, 17 nt, Human
aucagagcgcacaggga

SEQ ID NO: 3603455 - RNA, 15 nt, Human
aucagaggccuauaa

SEQ ID NO: 3603456 - RNA, 18 nt, Human
aucagaguagaaauaaaa

SEQ ID NO: 3603457 - RNA, 20 nt, Human
aucagagugacauccaggag

SEQ ID NO: 3603458 - RNA, 17 nt, Human
aucagaguugcugcaaa

SEQ ID NO: 3603459 - RNA, 22 nt, Human
aucagauaagacauaucucuaa

SEQ ID NO: 3603460 - RNA, 18 nt, Human
aucagaucauuucaaaac

SEQ ID NO: 3603461 - RNA, 21 nt, Human
aucagaucuggggcagcaccc

SEQ ID NO: 3603462 - RNA, 22 nt, Human
aucagaugaacucuuagaaaug

SEQ ID NO: 3603463 - RNA, 14 nt, Human
aucagauugcaugu

SEQ ID NO: 3603464 - RNA, 18 nt, Human
aucagauugcaugugacu

SEQ ID NO: 3603465 - RNA, 15 nt, Human
aucagauugcuuuug

SEQ ID NO: 3603466 - RNA, 18 nt, Human
aucagauugcuuuugugc

SEQ ID NO: 3603467 - RNA, 21 nt, Human
aucagcaagucucuuuauaug

SEQ ID NO: 3603468 - RNA, 15 nt, Human
aucagcacauauuuu

SEQ ID NO: 3603469 - RNA, 15 nt, Human
aucagcacgauuucu

SEQ ID NO: 3603470 - RNA, 19 nt, Human
aucagcacgauuucuguuu

SEQ ID NO: 3603471 - RNA, 14 nt, Human
aucagcacugaaaa

SEQ ID NO: 3603472 - RNA, 14 nt, Human
aucagccaauuaug

SEQ ID NO: 3603473 - RNA, 19 nt, Human
aucagccaauuauguuaaa

SEQ ID NO: 3603474 - RNA, 13 nt, Human
aucagccagcugc

SEQ ID NO: 3603475 - RNA, 15 nt, Human
aucagccccacccug

SEQ ID NO: 3603476 - RNA, 24 nt, Human
aucagcccugcccuucagcauccu

SEQ ID NO: 3603477 - RNA, 16 nt, Human
aucagcccuugggggu

SEQ ID NO: 3603478 - RNA, 19 nt, Human
aucagccugagucuccugu

SEQ ID NO: 3603479 - RNA, 20 nt, Human
aucagccugagucuccugug

SEQ ID NO: 3603480 - RNA, 19 nt, Human
aucagccugcuccagcugu

SEQ ID NO: 3603481 - RNA, 14 nt, Human
aucagccugugcca

SEQ ID NO: 3603482 - RNA, 16 nt, Human
aucagcguggccuugu

SEQ ID NO: 3603483 - RNA, 21 nt, Human
aucagcguggccuuguucugu

SEQ ID NO: 3603484 - RNA, 16 nt, Human
aucagcuagcaaaaga

SEQ ID NO: 3603485 - RNA, 23 nt, Human
aucagcuagcaaaagaaguaaca

SEQ ID NO: 3603486 - RNA, 17 nt, Human
aucagcuauuuugugaa

SEQ ID NO: 3603487 - RNA, 16 nt, Human
aucagcugcuuuguua

SEQ ID NO: 3603488 - RNA, 16 nt, Human
aucagcuguuugucau

SEQ ID NO: 3603489 - RNA, 18 nt, Human
aucagcuuucaaagcauu

SEQ ID NO: 3603490 - RNA, 23 nt, Human
aucaggaacguuuagcugacaaa

SEQ ID NO: 3603491 - RNA, 18 nt, Human
aucaggacccagaggaag

SEQ ID NO: 3603492 - RNA, 13 nt, Human
aucaggagaaaaa

SEQ ID NO: 3603493 - RNA, 22 nt, Human
aucaggagaaaaagccuccagu

SEQ ID NO: 3603494 - RNA, 19 nt, Human
aucaggaugaacccaggac

SEQ ID NO: 3603495 - RNA, 15 nt, Human
aucaggccaggcccu

SEQ ID NO: 3603496 - RNA, 16 nt, Human
aucaggccauuguccc

SEQ ID NO: 3603497 - RNA, 16 nt, Human
aucaggcuacuagaau

SEQ ID NO: 3603498 - RNA, 15 nt, Human
aucagggccuggggc

SEQ ID NO: 3603499 - RNA, 21 nt, Human
aucagggccuggggccugaga

SEQ ID NO: 3603500 - RNA, 18 nt, Human
aucagggggaagaagcag

SEQ ID NO: 3603501 - RNA, 23 nt, Human
aucagggggaagaagcagagaga

SEQ ID NO: 3603502 - RNA, 20 nt, Human
aucagggguaggaauggaaa

SEQ ID NO: 3603503 - RNA, 21 nt, Human
aucagguccugcucagcagug

SEQ ID NO: 3603504 - RNA, 20 nt, Human
aucaggugcccaucccugga

SEQ ID NO: 3603505 - RNA, 17 nt, Human
aucaggugcugccaucc

SEQ ID NO: 3603506 - RNA, 20 nt, Human
aucagguuuucuuuuaagaa

SEQ ID NO: 3603507 - RNA, 19 nt, Human
aucaguaaaauuauacugu

SEQ ID NO: 3603508 - RNA, 15 nt, Human
aucaguaaacacugu

SEQ ID NO: 3603509 - RNA, 14 nt, Human
aucaguaaauaacu

SEQ ID NO: 3603510 - RNA, 19 nt, Human
aucaguaagaaaaagaaga

SEQ ID NO: 3603511 - RNA, 17 nt, Human
aucaguagcuuaagaaa

SEQ ID NO: 3603512 - RNA, 18 nt, Human
aucaguaguuugcauuuc

SEQ ID NO: 3603513 - RNA, 16 nt, Human
aucaguauaauucugu

SEQ ID NO: 3603514 - RNA, 17 nt, Human
aucaguauuaauacuaa

SEQ ID NO: 3603515 - RNA, 22 nt, Human
aucaguauuaauacuaaaauau

SEQ ID NO: 3603516 - RNA, 12 nt, Human
auuuuucucaug

SEQ ID NO: 3603517 - RNA, 21 nt, Human
auuuuucuggagguugauaac

SEQ ID NO: 3603518 - RNA, 20 nt, Human
auuuuucuuaaaaaguaacu

SEQ ID NO: 3603519 - RNA, 11 nt, Human
auuuuucuucc

SEQ ID NO: 3603520 - RNA, 15 nt, Human
auuuuucuuuacaaa

SEQ ID NO: 3603521 - RNA, 16 nt, Human
auuuuucuuuacaaaa

SEQ ID NO: 3603522 - RNA, 17 nt, Human
auuuuugaauguaguaa

SEQ ID NO: 3603523 - RNA, 17 nt, Human
auuuuugaaugugauuu

SEQ ID NO: 3603524 - RNA, 22 nt, Human
auuuuugacagaauauguuuca

SEQ ID NO: 3603525 - RNA, 15 nt, Human
auuuuugacaguguu

SEQ ID NO: 3603526 - RNA, 21 nt, Human
auuuuugauacuaagcauuga

SEQ ID NO: 3603527 - RNA, 23 nt, Human
auuuuugauuuaugcauggaaac

SEQ ID NO: 3603528 - RNA, 12 nt, Human
auuuuugcaaua

SEQ ID NO: 3603529 - RNA, 20 nt, Human
auuuuugcaauaaugcagua

SEQ ID NO: 3603530 - RNA, 12 nt, Human
auuuuugccucu

SEQ ID NO: 3603531 - RNA, 14 nt, Human
auuuuugccuucau

SEQ ID NO: 3603532 - RNA, 16 nt, Human
auuuuugcuugacuuc

SEQ ID NO: 3603533 - RNA, 14 nt, Human
auuuuugcuuuuga

SEQ ID NO: 3603534 - RNA, 21 nt, Human
auuuuugcuuuugauaagaaa

SEQ ID NO: 3603535 - RNA, 23 nt, Human
auuuuuggaagaggacuccuuaa

SEQ ID NO: 3603536 - RNA, 18 nt, Human
auuuuuggagguuuauua

SEQ ID NO: 3603537 - RNA, 22 nt, Human
auuuuuggauugacaguaacuu

SEQ ID NO: 3603538 - RNA, 18 nt, Human
auuuuuggucauuguaau

SEQ ID NO: 3603539 - RNA, 17 nt, Human
auuuuugguugaauaaa

SEQ ID NO: 3603540 - RNA, 19 nt, Human
auuuuuguaaacuggaauu

SEQ ID NO: 3603541 - RNA, 13 nt, Human
auuuuuguaaagu

SEQ ID NO: 3603542 - RNA, 15 nt, Human
auuuuuguaaaguuu

SEQ ID NO: 3603543 - RNA, 13 nt, Human
auuuuuguacaug

SEQ ID NO: 3603544 - RNA, 19 nt, Human
auuuuuguagagccagggu

SEQ ID NO: 3603545 - RNA, 18 nt, Human
auuuuuguauucaauuaa

SEQ ID NO: 3603546 - RNA, 16 nt, Human
auuuuuguuacucucu

SEQ ID NO: 3603547 - RNA, 17 nt, Human
auuuuuguuucuuccaa

SEQ ID NO: 3603548 - RNA, 13 nt, Human
auuuuuguuuguu

SEQ ID NO: 3603549 - RNA, 14 nt, Human
auuuuuguuuguuu

SEQ ID NO: 3603550 - RNA, 21 nt, Human
auuuuuguuuuguuuuuacaa

SEQ ID NO: 3603551 - RNA, 19 nt, Human
auuuuuguuuuuauuaaaa

SEQ ID NO: 3603552 - RNA, 15 nt, Human
auuuuuuaaaaacua

SEQ ID NO: 3603553 - RNA, 12 nt, Human
auuuuuuaaagu

SEQ ID NO: 3603554 - RNA, 13 nt, Human
auuuuuuaaaugc

SEQ ID NO: 3603555 - RNA, 18 nt, Human
auuuuuuaaauugaauuc

SEQ ID NO: 3603556 - RNA, 22 nt, Human
auuuuuuaaccccgucaacaaa

SEQ ID NO: 3603557 - RNA, 23 nt, Human
auuuuuuaaccccgucaacaaau

SEQ ID NO: 3603558 - RNA, 18 nt, Human
auuuuuuaaguauuuaua

SEQ ID NO: 3603559 - RNA, 15 nt, Human
auuuuuuaauaaccc

SEQ ID NO: 3603560 - RNA, 16 nt, Human
auuuuuuaauuauugu

SEQ ID NO: 3603561 - RNA, 22 nt, Human
auuuuuuaauuugaugaaagcu

SEQ ID NO: 3603562 - RNA, 14 nt, Human
auuuuuuaggaaau

SEQ ID NO: 3603563 - RNA, 16 nt, Human
auuuuuuagugacuaa

SEQ ID NO: 3603564 - RNA, 18 nt, Human
auuuuuuauauauacagu

SEQ ID NO: 3603565 - RNA, 22 nt, Human
auuuuuuaugggcauugacaaa

SEQ ID NO: 3603566 - RNA, 16 nt, Human
auuuuuuauucuugug

SEQ ID NO: 3603567 - RNA, 17 nt, Human
auuuuuuauucuuguga

SEQ ID NO: 3603568 - RNA, 22 nt, Human
auuuuuucagaaauaugugguu

SEQ ID NO: 3603569 - RNA, 20 nt, Human
auuuuuucagacuugucaag

SEQ ID NO: 3603570 - RNA, 13 nt, Human
auuuuuuccaaaa

SEQ ID NO: 3603571 - RNA, 14 nt, Human
auuuuuucuugcau

SEQ ID NO: 3603572 - RNA, 14 nt, Human
auuuuuugaaaguu

SEQ ID NO: 3603573 - RNA, 15 nt, Human
auuuuuugaaaugcu

SEQ ID NO: 3603574 - RNA, 16 nt, Human
auuuuuuggcacuugc

SEQ ID NO: 3603575 - RNA, 18 nt, Human
auuuuuugguauuggcca

SEQ ID NO: 3603576 - RNA, 21 nt, Human
auuuuuugguuaagcuuugac

SEQ ID NO: 3603577 - RNA, 15 nt, Human
auuuuuuguauaauu

SEQ ID NO: 3603578 - RNA, 12 nt, Human
auuuuuuguuga

SEQ ID NO: 3603579 - RNA, 21 nt, Human
auuuuuuguugacauuagucu

SEQ ID NO: 3603580 - RNA, 15 nt, Human
auuuuuuuaaaauca

SEQ ID NO: 3603581 - RNA, 17 nt, Human
auuuuuuuaaaauuuug

SEQ ID NO: 3603582 - RNA, 16 nt, Human
auuuuuuuaaccaaag

SEQ ID NO: 3603583 - RNA, 19 nt, Human
auuuuuuuaaccaaaggug

SEQ ID NO: 3603584 - RNA, 17 nt, Human
auuuuuuuaauuuugua

SEQ ID NO: 3603585 - RNA, 18 nt, Human
auuuuuuuacuaauagac

SEQ ID NO: 3603586 - RNA, 23 nt, Human
auuuuuuuagaaagcauuugaau

SEQ ID NO: 3603587 - RNA, 21 nt, Human
auuuuuuuaucuugggacugg

SEQ ID NO: 3603588 - RNA, 16 nt, Human
auuuuuuuauuacuga

SEQ ID NO: 3603589 - RNA, 18 nt, Human
auuuuuuuauuguuuaaa

SEQ ID NO: 3603590 - RNA, 14 nt, Human
auuuuuuucaccuc

SEQ ID NO: 3603591 - RNA, 12 nt, Human
auuuuuuucuac

SEQ ID NO: 3603592 - RNA, 13 nt, Human
auuuuuuucucuc

SEQ ID NO: 3603593 - RNA, 21 nt, Human
auuuuuuucugauuguaacgu

SEQ ID NO: 3603594 - RNA, 21 nt, Human
auuuuuuugaacucuucucau

SEQ ID NO: 3603595 - RNA, 16 nt, Human
auuuuuuugagacaga

SEQ ID NO: 3603596 - RNA, 13 nt, Human
auuuuuuuguaau

SEQ ID NO: 3603597 - RNA, 15 nt, Human
auuuuuuuguaauaa

SEQ ID NO: 3603598 - RNA, 19 nt, Human
auuuuuuuguaauaagcaa

SEQ ID NO: 3603599 - RNA, 14 nt, Human
auuuuuuuguaauu

SEQ ID NO: 3603600 - RNA, 17 nt, Human
auuuuuuuguaugaaaa

SEQ ID NO: 3603601 - RNA, 13 nt, Human
auuuuuuugucuu

SEQ ID NO: 3603602 - RNA, 13 nt, Human
auuuuuuuguugu

SEQ ID NO: 3603603 - RNA, 14 nt, Human
auuuuuuuuaacau

SEQ ID NO: 3603604 - RNA, 18 nt, Human
auuuuuuuuaacauuccu

SEQ ID NO: 3603605 - RNA, 18 nt, Human
auuuuuuuuaaguauuua

SEQ ID NO: 3603606 - RNA, 16 nt, Human
auuuuuuuuauuagua

SEQ ID NO: 3603607 - RNA, 22 nt, Human
auuuuuuuucaugcuuuaucaa

SEQ ID NO: 3603608 - RNA, 14 nt, Human
auuuuuuuucaugu

SEQ ID NO: 3603609 - RNA, 20 nt, Human
auuuuuuuucauguuuuaac

SEQ ID NO: 3603610 - RNA, 23 nt, Human
auuuuuuuucccauuuagaaugg

SEQ ID NO: 3603611 - RNA, 15 nt, Human
auuuuuuuucuguua

SEQ ID NO: 3603612 - RNA, 16 nt, Human
auuuuuuuucuuugaa

SEQ ID NO: 3603613 - RNA, 15 nt, Human
auuuuuuuucuuuua

SEQ ID NO: 3603614 - RNA, 21 nt, Human
auuuuuuuuguuguuucagug

SEQ ID NO: 3603615 - RNA, 21 nt, Human
auuuuuuuuuagaacagaaaa

SEQ ID NO: 3603616 - RNA, 18 nt, Human
auuuuuuuuuccuucagu

SEQ ID NO: 3603617 - RNA, 15 nt, Human
auuuuuuuuucuaag

SEQ ID NO: 3603618 - RNA, 19 nt, Human
auuuuuuuuucuaagagaa

SEQ ID NO: 3603619 - RNA, 16 nt, Human
auuuuuuuuucuuuca

SEQ ID NO: 3603620 - RNA, 18 nt, Human
auuuuuuuuuuuaaucua

SEQ ID NO: 3603621 - RNA, 23 nt, Human
auuuuuuuuuuuguuucugagaa

SEQ ID NO: 3603622 - RNA, 20 nt, Human
auuuuuuuuuuuuuccuguc

SEQ ID NO: 3603623 - RNA, 23 nt, Human
auuuuuuuuuuuuuuuuuuuaag

SEQ ID NO: 3603624 - RNA, 19 nt, Human
caaaaaaaaaaaaaugcac

SEQ ID NO: 3603625 - RNA, 20 nt, Human
caaaaaaaaaguuuuauuuu

SEQ ID NO: 3603626 - RNA, 22 nt, Human
caaaaaaaaaguuuuauuuuuc

SEQ ID NO: 3603627 - RNA, 22 nt, Human
caaaaaaaaauuuuaaagaccc

SEQ ID NO: 3603628 - RNA, 15 nt, Human
caaaaaaaagucuau

SEQ ID NO: 3603629 - RNA, 13 nt, Human
caaaaaaaauuag

SEQ ID NO: 3603630 - RNA, 21 nt, Human
caaaaaaaauuuagccgggcg

SEQ ID NO: 3603631 - RNA, 13 nt, Human
caaaaaaacacua

SEQ ID NO: 3603632 - RNA, 20 nt, Human
caaaaaaaguugaaggccuu

SEQ ID NO: 3603633 - RNA, 21 nt, Human
caaaaaaaguuguaugaucug

SEQ ID NO: 3603634 - RNA, 15 nt, Human
caaaaaaauacugcc

SEQ ID NO: 3603635 - RNA, 23 nt, Human
caaaaaaauacugccagaugcug

SEQ ID NO: 3603636 - RNA, 17 nt, Human
caaaaaaaucugcagaa

SEQ ID NO: 3603637 - RNA, 18 nt, Human
caaaaaaaucuuccaauu

SEQ ID NO: 3603638 - RNA, 14 nt, Human
caaaaaaauuaaau

SEQ ID NO: 3603639 - RNA, 15 nt, Human
caaaaaacuacuucu

SEQ ID NO: 3603640 - RNA, 15 nt, Human
caaaaaacugcagug

SEQ ID NO: 3603641 - RNA, 13 nt, Human
caaaaaaucuuaa

SEQ ID NO: 3603642 - RNA, 19 nt, Human
caaaaaaucuuaauacugu

SEQ ID NO: 3603643 - RNA, 16 nt, Human
caaaaaauguuuuaaa

SEQ ID NO: 3603644 - RNA, 18 nt, Human
caaaaaauuagccgggcg

SEQ ID NO: 3603645 - RNA, 14 nt, Human
caaaaacaaaaaga

SEQ ID NO: 3603646 - RNA, 22 nt, Human
caaaaacagccucacagaagaa

SEQ ID NO: 3603647 - RNA, 14 nt, Human
caaaaacauggccu

SEQ ID NO: 3603648 - RNA, 22 nt, Human
caaaaacauguaugugcauuuc

SEQ ID NO: 3603649 - RNA, 15 nt, Human
caaaaaccaaauguu

SEQ ID NO: 3603650 - RNA, 19 nt, Human
caaaaaccaguauuguaca

SEQ ID NO: 3603651 - RNA, 17 nt, Human
caaaaaccuauuccacu

SEQ ID NO: 3603652 - RNA, 17 nt, Human
caaaaaccucacccgag

SEQ ID NO: 3603653 - RNA, 23 nt, Human
caaaaacuuuggaguccccucac

SEQ ID NO: 3603654 - RNA, 13 nt, Human
caaaaagaaauga

SEQ ID NO: 3603655 - RNA, 12 nt, Human
caaaaagaacaa

SEQ ID NO: 3603656 - RNA, 19 nt, Human
caaaaagaacaaaaaaauc

SEQ ID NO: 3603657 - RNA, 14 nt, Human
caaaaagaaccacu

SEQ ID NO: 3603658 - RNA, 13 nt, Human
caaaaagaccaga

SEQ ID NO: 3603659 - RNA, 14 nt, Human
caaaaagaccagac

SEQ ID NO: 3603660 - RNA, 20 nt, Human
caaaaagauaccuuaaaauu

SEQ ID NO: 3603661 - RNA, 18 nt, Human
caaaaagcuaauaccagu

SEQ ID NO: 3603662 - RNA, 13 nt, Human
caaaaagcuuccc

SEQ ID NO: 3603663 - RNA, 14 nt, Human
caaaaagcuucugu

SEQ ID NO: 3603664 - RNA, 20 nt, Human
caaaaagggaaacuauuguc

SEQ ID NO: 3603665 - RNA, 14 nt, Human
caaaaaguauauua

SEQ ID NO: 3603666 - RNA, 15 nt, Human
caacaguaaaccacu

SEQ ID NO: 3603667 - RNA, 22 nt, Human
caacaguaaaccacugaaaaaa

SEQ ID NO: 3603668 - RNA, 16 nt, Human
caacagugaagacaga

SEQ ID NO: 3603669 - RNA, 13 nt, Human
caacagugcuaaa

SEQ ID NO: 3603670 - RNA, 14 nt, Human
caacagugugaagu

SEQ ID NO: 3603671 - RNA, 16 nt, Human
caacagugugaaguua

SEQ ID NO: 3603672 - RNA, 22 nt, Human
caacagugugaaguuagaauuc

SEQ ID NO: 3603673 - RNA, 20 nt, Human
caacaguguuaggccuggca

SEQ ID NO: 3603674 - RNA, 22 nt, Human
caacaguguuaggccuggcaca

SEQ ID NO: 3603675 - RNA, 12 nt, Human
caacaguuuucc

SEQ ID NO: 3603676 - RNA, 13 nt, Human
caacaguuuuccu

SEQ ID NO: 3603677 - RNA, 20 nt, Human
caacaguuuuccuaugcuuu

SEQ ID NO: 3603678 - RNA, 16 nt, Human
caacauaacccacuug

SEQ ID NO: 3603679 - RNA, 17 nt, Human
caacauaacucaagucu

SEQ ID NO: 3603680 - RNA, 16 nt, Human
caacauacucccaucu

SEQ ID NO: 3603681 - RNA, 21 nt, Human
caacauaguauucaugacuau

SEQ ID NO: 3603682 - RNA, 23 nt, Human
caacauagugggacccugucucu

SEQ ID NO: 3603683 - RNA, 13 nt, Human
caacauauaaaau

SEQ ID NO: 3603684 - RNA, 13 nt, Human
caacaucaauguu

SEQ ID NO: 3603685 - RNA, 15 nt, Human
caacaucaauguuca

SEQ ID NO: 3603686 - RNA, 16 nt, Human
caacaucaauguucau

SEQ ID NO: 3603687 - RNA, 17 nt, Human
caacaucacagcccagc

SEQ ID NO: 3603688 - RNA, 12 nt, Human
caacaucagcuu

SEQ ID NO: 3603689 - RNA, 15 nt, Human
caacaucagcuugac

SEQ ID NO: 3603690 - RNA, 21 nt, Human
caacauccauguccuaugugu

SEQ ID NO: 3603691 - RNA, 23 nt, Human
caacauccauguccuauguguga

SEQ ID NO: 3603692 - RNA, 17 nt, Human
caacaucccauugcccu

SEQ ID NO: 3603693 - RNA, 20 nt, Human
caacaucccauugcccuggu

SEQ ID NO: 3603694 - RNA, 15 nt, Human
caacauccugccagc

SEQ ID NO: 3603695 - RNA, 18 nt, Human
caacauccugccagcccc

SEQ ID NO: 3603696 - RNA, 13 nt, Human
caacaucuagcaa

SEQ ID NO: 3603697 - RNA, 13 nt, Human
caacaucuuuuua

SEQ ID NO: 3603698 - RNA, 19 nt, Human
caacaugaggccacuggag

SEQ ID NO: 3603699 - RNA, 23 nt, Human
caacaugccagccacugugauag

SEQ ID NO: 3603700 - RNA, 20 nt, Human
caacaugccugcuuuagaau

SEQ ID NO: 3603701 - RNA, 13 nt, Human
caacauggcuuug

SEQ ID NO: 3603702 - RNA, 17 nt, Human
caacauguauaauauuu

SEQ ID NO: 3603703 - RNA, 18 nt, Human
caacauguauaauauuuu

SEQ ID NO: 3603704 - RNA, 17 nt, Human
caacauguuacugacca

SEQ ID NO: 3603705 - RNA, 19 nt, Human
caacauguugggaaacuug

SEQ ID NO: 3603706 - RNA, 15 nt, Human
caacauuaaacacaa

SEQ ID NO: 3603707 - RNA, 22 nt, Human
caacauucauugccaagggccc

SEQ ID NO: 3603708 - RNA, 14 nt, Human
caacauucuuugca

SEQ ID NO: 3603709 - RNA, 16 nt, Human
caacauuguagccuca

SEQ ID NO: 3603710 - RNA, 10 nt, Human
caacauugug

SEQ ID NO: 3603711 - RNA, 20 nt, Human
caacauuguucaccuuugua

SEQ ID NO: 3603712 - RNA, 23 nt, Human
caacauuguucaccuuuguagca

SEQ ID NO: 3603713 - RNA, 17 nt, Human
caacauuucucaauaau

SEQ ID NO: 3603714 - RNA, 22 nt, Human
caacauuucucauguugaaacu

SEQ ID NO: 3603715 - RNA, 20 nt, Human
caacauuuugagaacaaaga

SEQ ID NO: 3603716 - RNA, 12 nt, Human
caaccaaauggu

SEQ ID NO: 3603717 - RNA, 22 nt, Human
caaccaaguaugaaucuauuug

SEQ ID NO: 3603718 - RNA, 14 nt, Human
caaccaagugugcu

SEQ ID NO: 3603719 - RNA, 20 nt, Human
caaccaauuuacacugccau

SEQ ID NO: 3603720 - RNA, 14 nt, Human
caaccacacaccuc

SEQ ID NO: 3603721 - RNA, 22 nt, Human
caaccacauacaacacaaagag

SEQ ID NO: 3603722 - RNA, 14 nt, Human
caaccaccgcuccc

SEQ ID NO: 3603723 - RNA, 20 nt, Human
caaccaccgcuccccagccc

SEQ ID NO: 3603724 - RNA, 21 nt, Human
caaccacguugggacagggag

SEQ ID NO: 3603725 - RNA, 19 nt, Human
caaccacuguaaaaugaaa

SEQ ID NO: 3603726 - RNA, 18 nt, Human
caaccagacagaggguca

SEQ ID NO: 3603727 - RNA, 21 nt, Human
caaccagaccauugucucaga

SEQ ID NO: 3603728 - RNA, 18 nt, Human
caaccagagcacuguaua

SEQ ID NO: 3603729 - RNA, 20 nt, Human
caaccagagcacuguauacc

SEQ ID NO: 3603730 - RNA, 20 nt, Human
caaccagauaacauaccuuu

SEQ ID NO: 3603731 - RNA, 19 nt, Human
caaccagauugucagcucc

SEQ ID NO: 3603732 - RNA, 20 nt, Human
caaccagauugucagcuccu

SEQ ID NO: 3603733 - RNA, 16 nt, Human
caaccaggcaccucuu

SEQ ID NO: 3603734 - RNA, 19 nt, Human
caaccaggcaccucuuccu

SEQ ID NO: 3603735 - RNA, 16 nt, Human
caaccagugccaagga

SEQ ID NO: 3603736 - RNA, 23 nt, Human
caaccaugagaccacuguuauca

SEQ ID NO: 3603737 - RNA, 20 nt, Human
caaaguaauuuggaaauuag

SEQ ID NO: 3603738 - RNA, 21 nt, Human
caaaguacacuguuucaaacu

SEQ ID NO: 3603739 - RNA, 22 nt, Human
caaaguacacuguuucaaacuu

SEQ ID NO: 3603740 - RNA, 19 nt, Human
caaaguacagguacuuugu

SEQ ID NO: 3603741 - RNA, 17 nt, Human
caaaguacuguaagaau

SEQ ID NO: 3603742 - RNA, 22 nt, Human
caaaguacuguaagaauaauuu

SEQ ID NO: 3603743 - RNA, 20 nt, Human
caaaguagaucaugcauaga

SEQ ID NO: 3603744 - RNA, 21 nt, Human
caaaguaguacuucuucugua

SEQ ID NO: 3603745 - RNA, 14 nt, Human
caaaguauuguaaa

SEQ ID NO: 3603746 - RNA, 15 nt, Human
caaaguauuguaaau

SEQ ID NO: 3603747 - RNA, 19 nt, Human
caaaguauuguaaauuaua

SEQ ID NO: 3603748 - RNA, 23 nt, Human
caaaguauuuuuuuaucuuggga

SEQ ID NO: 3603749 - RNA, 22 nt, Human
caaagucaugauguuuuuaaaa

SEQ ID NO: 3603750 - RNA, 21 nt, Human
caaagucaugcaaaggcuggg

SEQ ID NO: 3603751 - RNA, 12 nt, Human
caaagucauuaa

SEQ ID NO: 3603752 - RNA, 17 nt, Human
caaagucauuaaagaca

SEQ ID NO: 3603753 - RNA, 19 nt, Human
caaaguccugggauuacag

SEQ ID NO: 3603754 - RNA, 19 nt, Human
caaaguccuuuuuuuccau

SEQ ID NO: 3603755 - RNA, 15 nt, Human
caaagucuaaaguuu

SEQ ID NO: 3603756 - RNA, 15 nt, Human
caaagucuagguugg

SEQ ID NO: 3603757 - RNA, 12 nt, Human
caaagucucuaa

SEQ ID NO: 3603758 - RNA, 14 nt, Human
caaagucucuaauu

SEQ ID NO: 3603759 - RNA, 15 nt, Human
caaagucucuaauuc

SEQ ID NO: 3603760 - RNA, 20 nt, Human
caaagucugauuugugauga

SEQ ID NO: 3603761 - RNA, 14 nt, Human
caaagugccaaaga

SEQ ID NO: 3603762 - RNA, 15 nt, Human
caaagugccaaagaa

SEQ ID NO: 3603763 - RNA, 16 nt, Human
caaagugccacucauu

SEQ ID NO: 3603764 - RNA, 23 nt, Human
caaagugcugggauuacaagcgu

SEQ ID NO: 3603765 - RNA, 14 nt, Human
caaaguggaacgaa

SEQ ID NO: 3603766 - RNA, 15 nt, Human
caaaguggaaggaaa

SEQ ID NO: 3603767 - RNA, 19 nt, Human
caaagugguauagaaaugc

SEQ ID NO: 3603768 - RNA, 17 nt, Human
caaaguggugagaggca

SEQ ID NO: 3603769 - RNA, 19 nt, Human
caaaguguauuuuauaaaa

SEQ ID NO: 3603770 - RNA, 19 nt, Human
caaaguguggucucuggaa

SEQ ID NO: 3603771 - RNA, 14 nt, Human
caaaguguguauua

SEQ ID NO: 3603772 - RNA, 17 nt, Human
caaaguuaaaauuguua

SEQ ID NO: 3603773 - RNA, 16 nt, Human
caaaguuaacagauuu

SEQ ID NO: 3603774 - RNA, 20 nt, Human
caaaguuaaccuaccuguaa

SEQ ID NO: 3603775 - RNA, 21 nt, Human
caaaguuaaccuaccuguaac

SEQ ID NO: 3603776 - RNA, 21 nt, Human
caaaguuacuagguaacuuca

SEQ ID NO: 3603777 - RNA, 14 nt, Human
caaaguuagagaac

SEQ ID NO: 3603778 - RNA, 13 nt, Human
caaaguuauccag

SEQ ID NO: 3603779 - RNA, 16 nt, Human
caaaguuccaaaaugc

SEQ ID NO: 3603780 - RNA, 18 nt, Human
caaaguuccaaaaugcca

SEQ ID NO: 3603781 - RNA, 20 nt, Human
caaaguucccuacuuccugu

SEQ ID NO: 3603782 - RNA, 22 nt, Human
caaaguucuaauaauuucuaau

SEQ ID NO: 3603783 - RNA, 15 nt, Human
caaaguucuguguuu

SEQ ID NO: 3603784 - RNA, 17 nt, Human
caaaguucuguguuuaa

SEQ ID NO: 3603785 - RNA, 20 nt, Human
caaaguucuguguuuaauuu

SEQ ID NO: 3603786 - RNA, 22 nt, Human
caaaguucuguguuuaauuucu

SEQ ID NO: 3603787 - RNA, 15 nt, Human
caaaguugccuaaau

SEQ ID NO: 3603788 - RNA, 17 nt, Human
caaaguugccuaaaucc

SEQ ID NO: 3603789 - RNA, 20 nt, Human
caaaguuuaauaaauuuauu

SEQ ID NO: 3603790 - RNA, 19 nt, Human
caaaguuuaccagaaagca

SEQ ID NO: 3603791 - RNA, 20 nt, Human
caaaguuucagaguauauug

SEQ ID NO: 3603792 - RNA, 17 nt, Human
caaaguuugacaggaac

SEQ ID NO: 3603793 - RNA, 20 nt, Human
caaaguuuucaugugcucag

SEQ ID NO: 3603794 - RNA, 13 nt, Human
caaaguuuugaaa

SEQ ID NO: 3603795 - RNA, 17 nt, Human
caaauaaaaacuaaauu

SEQ ID NO: 3603796 - RNA, 22 nt, Human
caaauaaaaacuaaauuguaaa

SEQ ID NO: 3603797 - RNA, 16 nt, Human
caaauaaaaauauugu

SEQ ID NO: 3603798 - RNA, 17 nt, Human
caaauaaaauucccuaa

SEQ ID NO: 3603799 - RNA, 20 nt, Human
caaauaaacacuguguaagc

SEQ ID NO: 3603800 - RNA, 17 nt, Human
caaauaaacucuaaaca

SEQ ID NO: 3603801 - RNA, 13 nt, Human
caaauaacaacuu

SEQ ID NO: 3603802 - RNA, 22 nt, Human
caaauaaccaacccuucccuga

SEQ ID NO: 3603803 - RNA, 16 nt, Human
caaauaacuucagucc

SEQ ID NO: 3603804 - RNA, 23 nt, Human
caaauaacuucaguccugcucca

SEQ ID NO: 3603805 - RNA, 17 nt, Human
caaauaaguguauuuug

SEQ ID NO: 3603806 - RNA, 22 nt, Human
caaauaaugaucgaaaaaauaa

SEQ ID NO: 3603807 - RNA, 13 nt, Human
caaauaaugucuc

SEQ ID NO: 3603808 - RNA, 20 nt, Human
caaauaauuuuucacuucaa

SEQ ID NO: 3603809 - RNA, 16 nt, Human
caaauacuaaaaagaa

SEQ ID NO: 3603810 - RNA, 16 nt, Human
caaauacuaaugaaaa

SEQ ID NO: 3603811 - RNA, 17 nt, Human
caaauacuaaugaaaac

SEQ ID NO: 3603812 - RNA, 15 nt, Human
caaauacucaugugu

SEQ ID NO: 3603813 - RNA, 18 nt, Human
caaauacucauguguaug

SEQ ID NO: 3603814 - RNA, 18 nt, Human
caaauacugaaauauuag

SEQ ID NO: 3603815 - RNA, 18 nt, Human
caaauacuguauauucag

SEQ ID NO: 3603816 - RNA, 19 nt, Human
caaauacuuagcaaaaagu

SEQ ID NO: 3603817 - RNA, 22 nt, Human
caaauacuuagcaaaaaguggg

SEQ ID NO: 3603818 - RNA, 16 nt, Human
caaauacuuuaaagga

SEQ ID NO: 3603819 - RNA, 12 nt, Human
caaauagaaaac

SEQ ID NO: 3603820 - RNA, 14 nt, Human
caaauagaaaacag

SEQ ID NO: 3603821 - RNA, 13 nt, Human
caaauauaaacau

SEQ ID NO: 3603822 - RNA, 19 nt, Human
caaauauagcguucccaac

SEQ ID NO: 3603823 - RNA, 17 nt, Human
caaauauauucucuuug

SEQ ID NO: 3603824 - RNA, 13 nt, Human
caaauauauuguu

SEQ ID NO: 3603825 - RNA, 16 nt, Human
caaauaucucuauuua

SEQ ID NO: 3603826 - RNA, 21 nt, Human
caaauaugaguacaaaugccu

SEQ ID NO: 3603827 - RNA, 14 nt, Human
caaauaugcaaagc

SEQ ID NO: 3603828 - RNA, 21 nt, Human
caaauaugcaaagcacugacu

SEQ ID NO: 3603829 - RNA, 13 nt, Human
caaauauguccug

SEQ ID NO: 3603830 - RNA, 19 nt, Human
caaauauuaaaaagucuuu

SEQ ID NO: 3603831 - RNA, 17 nt, Human
caaauauuagaugugau

SEQ ID NO: 3603832 - RNA, 20 nt, Human
caaauauuagaugugauuua

SEQ ID NO: 3603833 - RNA, 12 nt, Human
caaauauuauuu

SEQ ID NO: 3603834 - RNA, 13 nt, Human
caaauauuguuaa

SEQ ID NO: 3603835 - RNA, 22 nt, Human
caaauauuguugacaacuguga

SEQ ID NO: 3603836 - RNA, 15 nt, Human
caaauauuuauuuuc

SEQ ID NO: 3603837 - RNA, 20 nt, Human
caaauauuuauuuucuuucu

SEQ ID NO: 3603838 - RNA, 15 nt, Human
caaauauuuuuuugu

SEQ ID NO: 3603839 - RNA, 17 nt, Human
caaauauuuuuuuguag

SEQ ID NO: 3603840 - RNA, 18 nt, Human
caaaucaaaaucucucca

SEQ ID NO: 3603841 - RNA, 15 nt, Human
caaaucaagcuucag

SEQ ID NO: 3603842 - RNA, 24 nt, Human
caaaucaaguuuccaagcaaaugu

SEQ ID NO: 3603843 - RNA, 17 nt, Human
caaaucaauaagaaggu

SEQ ID NO: 3603844 - RNA, 17 nt, Human
caaaucaauacacuagu

SEQ ID NO: 3603845 - RNA, 19 nt, Human
caaaucaauucuagucaua

SEQ ID NO: 3603846 - RNA, 15 nt, Human
caaaucacauauuuu

SEQ ID NO: 3603847 - RNA, 18 nt, Human
caaaucacauauuuuaaa

SEQ ID NO: 3603848 - RNA, 19 nt, Human
caaaucaccacaaacugua

SEQ ID NO: 3603849 - RNA, 14 nt, Human
caaaucagaaguca

SEQ ID NO: 3603850 - RNA, 15 nt, Human
caaaucagaagucau

SEQ ID NO: 3603851 - RNA, 13 nt, Human
caaaucagucagu

SEQ ID NO: 3603852 - RNA, 13 nt, Human
caaaucauuuguu

SEQ ID NO: 3603853 - RNA, 16 nt, Human
caaaucauuuguuuaa

SEQ ID NO: 3603854 - RNA, 17 nt, Human
caaaucauuuguuuaaa

SEQ ID NO: 3603855 - RNA, 17 nt, Human
caaauccaggacccugc

SEQ ID NO: 3603856 - RNA, 21 nt, Human
caaauccgaaccuccucugug

SEQ ID NO: 3603857 - RNA, 21 nt, Human
caaauccgcucucuuccugcc

SEQ ID NO: 3603858 - RNA, 22 nt, Human
caaauccuaugugauuuuaacu

SEQ ID NO: 3603859 - RNA, 17 nt, Human
caaauccuuagaucugg

SEQ ID NO: 3603860 - RNA, 20 nt, Human
caaauccuuccaaaaauuau

SEQ ID NO: 3603861 - RNA, 20 nt, Human
caaauccuugugggaaaaga

SEQ ID NO: 3603862 - RNA, 16 nt, Human
auccuccucagaucuu

SEQ ID NO: 3603863 - RNA, 15 nt, Human
auccuccuccagggu

SEQ ID NO: 3603864 - RNA, 11 nt, Human
auccuccuccc

SEQ ID NO: 3603865 - RNA, 13 nt, Human
auccuccuccuuc

SEQ ID NO: 3603866 - RNA, 12 nt, Human
auccuccuggaa

SEQ ID NO: 3603867 - RNA, 23 nt, Human
auccuccuggaaccuugcugucc

SEQ ID NO: 3603868 - RNA, 14 nt, Human
auccucuccuuuga

SEQ ID NO: 3603869 - RNA, 19 nt, Human
auccucucuggggcugugu

SEQ ID NO: 3603870 - RNA, 16 nt, Human
auccucucuuccucuu

SEQ ID NO: 3603871 - RNA, 17 nt, Human
auccucuggagccagcc

SEQ ID NO: 3603872 - RNA, 17 nt, Human
auccucuguacagagcc

SEQ ID NO: 3603873 - RNA, 18 nt, Human
auccucuguacagagccc

SEQ ID NO: 3603874 - RNA, 13 nt, Human
auccucuuccucu

SEQ ID NO: 3603875 - RNA, 14 nt, Human
auccucuuccucug

SEQ ID NO: 3603876 - RNA, 22 nt, Human
auccucuucugcuuaggagaga

SEQ ID NO: 3603877 - RNA, 23 nt, Human
auccucuuuagaguuagacuguu

SEQ ID NO: 3603878 - RNA, 17 nt, Human
auccucuuugagugaag

SEQ ID NO: 3603879 - RNA, 14 nt, Human
auccucuuuuucca

SEQ ID NO: 3603880 - RNA, 14 nt, Human
auccugaaauuuca

SEQ ID NO: 3603881 - RNA, 17 nt, Human
auccugaaauuucagau

SEQ ID NO: 3603882 - RNA, 20 nt, Human
caaggaagggauguauuugu

SEQ ID NO: 3603883 - RNA, 12 nt, Human
caaggaagucaa

SEQ ID NO: 3603884 - RNA, 15 nt, Human
caaggaauuucuuaa

SEQ ID NO: 3603885 - RNA, 23 nt, Human
caaggaauuucuuaacuucuugc

SEQ ID NO: 3603886 - RNA, 18 nt, Human
caaggaccaacaagggca

SEQ ID NO: 3603887 - RNA, 21 nt, Human
caaggaccaacaagggcagug

SEQ ID NO: 3603888 - RNA, 15 nt, Human
caaggaccaggacuc

SEQ ID NO: 3603889 - RNA, 14 nt, Human
caaggaccccucac

SEQ ID NO: 3603890 - RNA, 21 nt, Human
caaggacuacguuaagggaag

SEQ ID NO: 3603891 - RNA, 14 nt, Human
caaggacuaggguc

SEQ ID NO: 3603892 - RNA, 18 nt, Human
caaggacuaggguccugg

SEQ ID NO: 3603893 - RNA, 15 nt, Human
caaggacugagggac

SEQ ID NO: 3603894 - RNA, 22 nt, Human
caaggacugagggacucugaag

SEQ ID NO: 3603895 - RNA, 15 nt, Human
caaggacugcaggga

SEQ ID NO: 3603896 - RNA, 22 nt, Human
caaggacugcagggacugccag

SEQ ID NO: 3603897 - RNA, 23 nt, Human
caaggacuuccuguccagcucca

SEQ ID NO: 3603898 - RNA, 16 nt, Human
caaggacuugaaagca

SEQ ID NO: 3603899 - RNA, 18 nt, Human
caaggagaaacagagaca

SEQ ID NO: 3603900 - RNA, 20 nt, Human
caaggagaaacagagacagg

SEQ ID NO: 3603901 - RNA, 13 nt, Human
caaggagaacaaa

SEQ ID NO: 3603902 - RNA, 14 nt, Human
caaggagaggaggc

SEQ ID NO: 3603903 - RNA, 18 nt, Human
caaggagaggaggcaacu

SEQ ID NO: 3603904 - RNA, 16 nt, Human
caaggagauuuacaac

SEQ ID NO: 3603905 - RNA, 17 nt, Human
caaggagcacagguccc

SEQ ID NO: 3603906 - RNA, 22 nt, Human
caaggagcacaggucccaccuc

SEQ ID NO: 3603907 - RNA, 23 nt, Human
caaggagcugagaauagaaggaa

SEQ ID NO: 3603908 - RNA, 11 nt, Human
caaggagcugc

SEQ ID NO: 3603909 - RNA, 12 nt, Human
caaggaggaaaa

SEQ ID NO: 3603910 - RNA, 18 nt, Human
caaggaggggcuguaaaa

SEQ ID NO: 3603911 - RNA, 18 nt, Human
caaggaguaugcagggag

SEQ ID NO: 3603912 - RNA, 16 nt, Human
caaggagucacugaga

SEQ ID NO: 3603913 - RNA, 21 nt, Human
caaggaguuccaugaagacca

SEQ ID NO: 3603914 - RNA, 22 nt, Human
caaggauagaugcuggcccagg

SEQ ID NO: 3603915 - RNA, 18 nt, Human
caaggauccugagccaga

SEQ ID NO: 3603916 - RNA, 14 nt, Human
caaggaucuuucac

SEQ ID NO: 3603917 - RNA, 21 nt, Human
caaggaugaucuaggaagacu

SEQ ID NO: 3603918 - RNA, 14 nt, Human
caaggcaaaaacaa

SEQ ID NO: 3603919 - RNA, 13 nt, Human
caaggcaaauguu

SEQ ID NO: 3603920 - RNA, 15 nt, Human
caaggcaaggcaggu

SEQ ID NO: 3603921 - RNA, 16 nt, Human
caaggcaaggcuguca

SEQ ID NO: 3603922 - RNA, 18 nt, Human
caaggcaaggcugucaau

SEQ ID NO: 3603923 - RNA, 18 nt, Human
caaggcaaggggugccug

SEQ ID NO: 3603924 - RNA, 21 nt, Human
caaggcaaggggugccuggga

SEQ ID NO: 3603925 - RNA, 14 nt, Human
caaggcacucuaga

SEQ ID NO: 3603926 - RNA, 15 nt, Human
caaggcacugccuga

SEQ ID NO: 3603927 - RNA, 15 nt, Human
caaggcacuguacua

SEQ ID NO: 3603928 - RNA, 14 nt, Human
caaggcagcaaggc

SEQ ID NO: 3603929 - RNA, 15 nt, Human
caaggcagcaaggcc

SEQ ID NO: 3603930 - RNA, 16 nt, Human
caaggcagcaaggccc

SEQ ID NO: 3603931 - RNA, 19 nt, Human
caaggcagcaaggcccgag

SEQ ID NO: 3603932 - RNA, 14 nt, Human
caaggcaggugccu

SEQ ID NO: 3603933 - RNA, 22 nt, Human
caaggcaggugccuccaggugu

SEQ ID NO: 3603934 - RNA, 19 nt, Human
caaggccaccucuuccugg

SEQ ID NO: 3603935 - RNA, 22 nt, Human
caaggccaccucuuccuggccg

SEQ ID NO: 3603936 - RNA, 14 nt, Human
caaggccagagugg

SEQ ID NO: 3603937 - RNA, 18 nt, Human
caaggccagaguggccug

SEQ ID NO: 3603938 - RNA, 20 nt, Human
caaggccagaguggccuggc

SEQ ID NO: 3603939 - RNA, 21 nt, Human
caaggccagcaagguggagug

SEQ ID NO: 3603940 - RNA, 23 nt, Human
caaggccagcaagguggagugga

SEQ ID NO: 3603941 - RNA, 17 nt, Human
caaggccauccuucccu

SEQ ID NO: 3603942 - RNA, 15 nt, Human
caaggccccagagac

SEQ ID NO: 3603943 - RNA, 17 nt, Human
caaggcccccugccugc

SEQ ID NO: 3603944 - RNA, 14 nt, Human
caaggccccugaca

SEQ ID NO: 3603945 - RNA, 12 nt, Human
caaggcccugcu

SEQ ID NO: 3603946 - RNA, 14 nt, Human
caaggcccugcugc

SEQ ID NO: 3603947 - RNA, 16 nt, Human
caaggcccugcugccc

SEQ ID NO: 3603948 - RNA, 23 nt, Human
caaggccgaagcucuggcugaac

SEQ ID NO: 3603949 - RNA, 17 nt, Human
caaggccucccacagug

SEQ ID NO: 3603950 - RNA, 21 nt, Human
caaggccugucagcuaaagaa

SEQ ID NO: 3603951 - RNA, 14 nt, Human
caaggccugucccu

SEQ ID NO: 3603952 - RNA, 14 nt, Human
caaggccuucuccu

SEQ ID NO: 3603953 - RNA, 18 nt, Human
caaggccuuucugugugu

SEQ ID NO: 3603954 - RNA, 22 nt, Human
caaggcgguggacuugaacuuu

SEQ ID NO: 3603955 - RNA, 18 nt, Human
caaggcugaccaagagag

SEQ ID NO: 3603956 - RNA, 22 nt, Human
caaggcugagacagugaauuug

SEQ ID NO: 3603957 - RNA, 12 nt, Human
caaggcugcagu

SEQ ID NO: 3603958 - RNA, 17 nt, Human
caaggcugcgucuggag

SEQ ID NO: 3603959 - RNA, 18 nt, Human
caaggcugcgucuggagg

SEQ ID NO: 3603960 - RNA, 21 nt, Human
caaggcugggggaagaagcuc

SEQ ID NO: 3603961 - RNA, 13 nt, Human
caaggcugucaau

SEQ ID NO: 3603962 - RNA, 14 nt, Human
caaggcugucaauu

SEQ ID NO: 3603963 - RNA, 23 nt, Human
caaggcugucaauuacaggaagu

SEQ ID NO: 3603964 - RNA, 20 nt, Human
caaggcuguggaccauggag

SEQ ID NO: 3603965 - RNA, 14 nt, Human
caaggcuuagaccc

SEQ ID NO: 3603966 - RNA, 16 nt, Human
caaggcuugcugcaga

SEQ ID NO: 3603967 - RNA, 20 nt, Human
caagggaaaauaaaaaaaga

SEQ ID NO: 3603968 - RNA, 21 nt, Human
caagggaaaauaaaaaaagaa

SEQ ID NO: 3603969 - RNA, 23 nt, Human
caagggaaaauaaaaaaagaaaa

SEQ ID NO: 3603970 - RNA, 14 nt, Human
caagggaaggacag

SEQ ID NO: 3603971 - RNA, 23 nt, Human
caagggaauuucuucaacucccu

SEQ ID NO: 3603972 - RNA, 17 nt, Human
caagggagagaccucau

SEQ ID NO: 3603973 - RNA, 16 nt, Human
caagggaggcugcugc

SEQ ID NO: 3603974 - RNA, 18 nt, Human
caagggagguaagggagg

SEQ ID NO: 3603975 - RNA, 20 nt, Human
caagggaucugguccuaccc

SEQ ID NO: 3603976 - RNA, 19 nt, Human
caagggcaaaauucccagg

SEQ ID NO: 3603977 - RNA, 20 nt, Human
caagggcagaacacuaaccu

SEQ ID NO: 3603978 - RNA, 11 nt, Human
caagggcagcu

SEQ ID NO: 3603979 - RNA, 14 nt, Human
caagggcagcuuug

SEQ ID NO: 3603980 - RNA, 17 nt, Human
caagggcaugagcauug

SEQ ID NO: 3603981 - RNA, 14 nt, Human
caagggccaugcug

SEQ ID NO: 3603982 - RNA, 21 nt, Human
caagggccaugcugaagggac

SEQ ID NO: 3603983 - RNA, 14 nt, Human
caagggccuggccu

SEQ ID NO: 3603984 - RNA, 16 nt, Human
caagggccuggccuga

SEQ ID NO: 3603985 - RNA, 16 nt, Human
caagggcggccuuucc

SEQ ID NO: 3603986 - RNA, 19 nt, Human
caagggcugcuucaaacuc

SEQ ID NO: 3603987 - RNA, 14 nt, Human
caagggcuguaggu

SEQ ID NO: 3603988 - RNA, 17 nt, Human
caagggcugucauugca

SEQ ID NO: 3603989 - RNA, 22 nt, Human
caagggcuuacacguggaggaa

SEQ ID NO: 3603990 - RNA, 21 nt, Human
caagggcuuuccugugccagg

SEQ ID NO: 3603991 - RNA, 22 nt, Human
caaggggaaucuggagguagcc

SEQ ID NO: 3603992 - RNA, 21 nt, Human
caaggggaauguuugccucug

SEQ ID NO: 3603993 - RNA, 21 nt, Human
caaggggauuuuuaugucugg

SEQ ID NO: 3603994 - RNA, 17 nt, Human
caaggggccauuuggca

SEQ ID NO: 3603995 - RNA, 15 nt, Human
caaggggccugagca

SEQ ID NO: 3603996 - RNA, 18 nt, Human
caaggggugccugggaac

SEQ ID NO: 3603997 - RNA, 15 nt, Human
caagggucaggccuu

SEQ ID NO: 3603998 - RNA, 17 nt, Human
caagggucuagggagag

SEQ ID NO: 3603999 - RNA, 14 nt, Human
caagguaaggaggg

SEQ ID NO: 3604000 - RNA, 15 nt, Human
caagguagccauccc

SEQ ID NO: 3604001 - RNA, 9 nt, Human
caagguaua

SEQ ID NO: 3604002 - RNA, 17 nt, Human
caagguauaauaaaauu

SEQ ID NO: 3604003 - RNA, 19 nt, Human
caaggucauggccacacug

SEQ ID NO: 3604004 - RNA, 14 nt, Human
caaggucauuuuuu

SEQ ID NO: 3604005 - RNA, 19 nt, Human
caaggucguuuuuuucauu

SEQ ID NO: 3604006 - RNA, 15 nt, Human
caaggucugagccac

SEQ ID NO: 3604007 - RNA, 13 nt, Human
caaggucuggccu

SEQ ID NO: 3604008 - RNA, 15 nt, Human
caaggugcaaaucaa

SEQ ID NO: 3604009 - RNA, 17 nt, Human
caaggugcaggcaggcu

SEQ ID NO: 3604010 - RNA, 19 nt, Human
caagguggccaaauuauuu

SEQ ID NO: 3604011 - RNA, 19 nt, Human
caagguggcuccagcacca

SEQ ID NO: 3604012 - RNA, 21 nt, Human
caaggugggcagggaggcacc

SEQ ID NO: 3604013 - RNA, 24 nt, Human
caaggugggcugagcccuggcagg

SEQ ID NO: 3604014 - RNA, 17 nt, Human
caagguggucaguaaau

SEQ ID NO: 3604015 - RNA, 13 nt, Human
caagguguccuac

SEQ ID NO: 3604016 - RNA, 15 nt, Human
caagguguccuacag

SEQ ID NO: 3604017 - RNA, 21 nt, Human
caagguguccuacagaaaaac

SEQ ID NO: 3604018 - RNA, 20 nt, Human
caagguuacuuaauucaacu

SEQ ID NO: 3604019 - RNA, 21 nt, Human
caagguuacuuaauucaacuu

SEQ ID NO: 3604020 - RNA, 17 nt, Human
caagguuauaauuuuuu

SEQ ID NO: 3604021 - RNA, 17 nt, Human
caagguuccacagagua

SEQ ID NO: 3604022 - RNA, 17 nt, Human
caagguucccucugaga

SEQ ID NO: 3604023 - RNA, 13 nt, Human
caacaagauuucc

SEQ ID NO: 3604024 - RNA, 15 nt, Human
caacaagggagagac

SEQ ID NO: 3604025 - RNA, 21 nt, Human
caacaagggagagaccucauc

SEQ ID NO: 3604026 - RNA, 20 nt, Human
caacaagguggugugaucuu

SEQ ID NO: 3604027 - RNA, 22 nt, Human
caacaauacaugcugcuaauuc

SEQ ID NO: 3604028 - RNA, 15 nt, Human
caacaauccuagugc

SEQ ID NO: 3604029 - RNA, 14 nt, Human
caacaauucagcau

SEQ ID NO: 3604030 - RNA, 13 nt, Human
caacaauucuaaa

SEQ ID NO: 3604031 - RNA, 14 nt, Human
caacaauuuaugaa

SEQ ID NO: 3604032 - RNA, 18 nt, Human
caacaauuuaugaauuga

SEQ ID NO: 3604033 - RNA, 13 nt, Human
caacaauuucuac

SEQ ID NO: 3604034 - RNA, 18 nt, Human
caacaauuuucagauuug

SEQ ID NO: 3604035 - RNA, 19 nt, Human
caacaauuuucagauuugc

SEQ ID NO: 3604036 - RNA, 15 nt, Human
caacacaaagagaaa

SEQ ID NO: 3604037 - RNA, 20 nt, Human
caacacaagcuggaagcaca

SEQ ID NO: 3604038 - RNA, 16 nt, Human
caacacaaggugggca

SEQ ID NO: 3604039 - RNA, 14 nt, Human
caacacagaggaau

SEQ ID NO: 3604040 - RNA, 17 nt, Human
caacaccaaaaaauauc

SEQ ID NO: 3604041 - RNA, 13 nt, Human
caacaccagcccc

SEQ ID NO: 3604042 - RNA, 22 nt, Human
caacaccaugauuccuuuaaca

SEQ ID NO: 3604043 - RNA, 16 nt, Human
caacacccaucuguuu

SEQ ID NO: 3604044 - RNA, 22 nt, Human
caacaccuucagaggcugaggu

SEQ ID NO: 3604045 - RNA, 23 nt, Human
caacacgagcaggcuacugucag

SEQ ID NO: 3604046 - RNA, 17 nt, Human
caacacgcaccugccuc

SEQ ID NO: 3604047 - RNA, 15 nt, Human
caacacgcaggagca

SEQ ID NO: 3604048 - RNA, 20 nt, Human
caacacgcauggucaacccu

SEQ ID NO: 3604049 - RNA, 14 nt, Human
caacacuaacauga

SEQ ID NO: 3604050 - RNA, 20 nt, Human
caacacucauugaccugagg

SEQ ID NO: 3604051 - RNA, 12 nt, Human
caacacugccag

SEQ ID NO: 3604052 - RNA, 18 nt, Human
caacacuggugugaccug

SEQ ID NO: 3604053 - RNA, 21 nt, Human
caacacugugggugugugacu

SEQ ID NO: 3604054 - RNA, 24 nt, Human
caacacuuccagcauuuagcuggc

SEQ ID NO: 3604055 - RNA, 22 nt, Human
caacagaaaccuauccucacug

SEQ ID NO: 3604056 - RNA, 17 nt, Human
caacagaagcauuugua

SEQ ID NO: 3604057 - RNA, 18 nt, Human
caacagaagcauuuguau

SEQ ID NO: 3604058 - RNA, 23 nt, Human
caacagaagcauuuguauuuugu

SEQ ID NO: 3604059 - RNA, 20 nt, Human
caacagaagucaugaagccc

SEQ ID NO: 3604060 - RNA, 23 nt, Human
caacagaagucaugaagcccaag

SEQ ID NO: 3604061 - RNA, 12 nt, Human
caacagaagugg

SEQ ID NO: 3604062 - RNA, 17 nt, Human
caacagaaugaaaaaug

SEQ ID NO: 3604063 - RNA, 18 nt, Human
caacagagaaggcaggaa

SEQ ID NO: 3604064 - RNA, 17 nt, Human
caacagauacuggaagu

SEQ ID NO: 3604065 - RNA, 14 nt, Human
caacagaucaguaa

SEQ ID NO: 3604066 - RNA, 14 nt, Human
caacagaucuggaa

SEQ ID NO: 3604067 - RNA, 17 nt, Human
caacagaucuggaaccu

SEQ ID NO: 3604068 - RNA, 23 nt, Human
caacagaugcuuuucugucucug

SEQ ID NO: 3604069 - RNA, 19 nt, Human
caacagauuugugaacuca

SEQ ID NO: 3604070 - RNA, 20 nt, Human
caacagauuugugaacucag

SEQ ID NO: 3604071 - RNA, 15 nt, Human
caacagcaaacaggu

SEQ ID NO: 3604072 - RNA, 14 nt, Human
caacagccucacuu

SEQ ID NO: 3604073 - RNA, 21 nt, Human
caacagcuacaacagccucac

SEQ ID NO: 3604074 - RNA, 15 nt, Human
caacagcucaagucu

SEQ ID NO: 3604075 - RNA, 23 nt, Human
caacagcuccccauuacccucag

SEQ ID NO: 3604076 - RNA, 14 nt, Human
caacagcugaagca

SEQ ID NO: 3604077 - RNA, 23 nt, Human
caacaggaaucaagagcugcccu

SEQ ID NO: 3604078 - RNA, 21 nt, Human
caacaggagcugggauccuaa

SEQ ID NO: 3604079 - RNA, 22 nt, Human
caacaggagcugggauccuaag

SEQ ID NO: 3604080 - RNA, 14 nt, Human
caacaggaggacaa

SEQ ID NO: 3604081 - RNA, 17 nt, Human
caacaggaggacaauuc

SEQ ID NO: 3604082 - RNA, 21 nt, Human
caacaggccauugugaaccaa

SEQ ID NO: 3604083 - RNA, 16 nt, Human
caacaggccucagggc

SEQ ID NO: 3604084 - RNA, 20 nt, Human
caacaggcugggcuucagug

SEQ ID NO: 3604085 - RNA, 23 nt, Human
caacaggcugggcuucaguggca

SEQ ID NO: 3604086 - RNA, 24 nt, Human
caacaggcugggcuucaguggcag

SEQ ID NO: 3604087 - RNA, 19 nt, Human
caacaggcuguucugcacu

SEQ ID NO: 3604088 - RNA, 21 nt, Human
caacaggcuguucugcacuga

SEQ ID NO: 3604089 - RNA, 23 nt, Human
caacagguaaaacagggccacau

SEQ ID NO: 3604090 - RNA, 18 nt, Human
caacagguggcaggacca

SEQ ID NO: 3604091 - RNA, 21 nt, Human
caacagguggcaggaccagga

SEQ ID NO: 3604092 - RNA, 15 nt, Human
caacagguuuuccug

SEQ ID NO: 3604093 - RNA, 12 nt, Human
caacagucaugu

SEQ ID NO: 3604094 - RNA, 14 nt, Human
caacagucauguuu

SEQ ID NO: 3604095 - RNA, 16 nt, Human
caacagucauguuuua

SEQ ID NO: 3604096 - RNA, 11 nt, Human
caacagugagu

SEQ ID NO: 3604097 - RNA, 12 nt, Human
caacagugcuaa

SEQ ID NO: 3604098 - RNA, 16 nt, Human
caacagugcuaaaaau

SEQ ID NO: 3604099 - RNA, 17 nt, Human
caacagugcuaaaaaug

SEQ ID NO: 3604100 - RNA, 21 nt, Human
caacagugugaaguuagaauu

SEQ ID NO: 3604101 - RNA, 23 nt, Human
caacaguguuaggccuggcacag

SEQ ID NO: 3604102 - RNA, 22 nt, Human
caacaguuuuuuaugcuaauca

SEQ ID NO: 3604103 - RNA, 17 nt, Human
caacauaacccacuugu

SEQ ID NO: 3604104 - RNA, 18 nt, Human
caacauaacccacuuguc

SEQ ID NO: 3604105 - RNA, 16 nt, Human
caacauaaucuaguuu

SEQ ID NO: 3604106 - RNA, 14 nt, Human
caacauacucccau

SEQ ID NO: 3604107 - RNA, 20 nt, Human
caacauacucccaucuguga

SEQ ID NO: 3604108 - RNA, 17 nt, Human
caacaucaauguucauu

SEQ ID NO: 3604109 - RNA, 14 nt, Human
caacauccacucuc

SEQ ID NO: 3604110 - RNA, 15 nt, Human
caacaucccauugcc

SEQ ID NO: 3604111 - RNA, 18 nt, Human
caacaucccauugcccug

SEQ ID NO: 3604112 - RNA, 19 nt, Human
caacaucccauugcccugg

SEQ ID NO: 3604113 - RNA, 16 nt, Human
caacauccugccagcc

SEQ ID NO: 3604114 - RNA, 15 nt, Human
caacaugaugaggua

SEQ ID NO: 3604115 - RNA, 23 nt, Human
caacaugccugccccaaacaaau

SEQ ID NO: 3604116 - RNA, 13 nt, Human
caacauggagaaa

SEQ ID NO: 3604117 - RNA, 22 nt, Human
caacauggagaaacccugucuc

SEQ ID NO: 3604118 - RNA, 21 nt, Human
caacauggcuacuugcuuuga

SEQ ID NO: 3604119 - RNA, 18 nt, Human
caacauggugaaaccccg

SEQ ID NO: 3604120 - RNA, 20 nt, Human
caacauguuacugaccagca

SEQ ID NO: 3604121 - RNA, 22 nt, Human
caacauguuauuuguaauagau

SEQ ID NO: 3604122 - RNA, 23 nt, Human
caacauguuauuuguaauagaug

SEQ ID NO: 3604123 - RNA, 20 nt, Human
caacauguuuccagcauucc

SEQ ID NO: 3604124 - RNA, 15 nt, Human
caacauugccuauuu

SEQ ID NO: 3604125 - RNA, 16 nt, Human
caacauugugauguau

SEQ ID NO: 3604126 - RNA, 23 nt, Human
caacauuuacaguccuucaaaau

SEQ ID NO: 3604127 - RNA, 16 nt, Human
caacauuucaaaauga

SEQ ID NO: 3604128 - RNA, 16 nt, Human
caaccaauguagaaag

SEQ ID NO: 3604129 - RNA, 20 nt, Human
caaccacacaccucaccaga

SEQ ID NO: 3604130 - RNA, 19 nt, Human
caaccaccgcuccccagcc

SEQ ID NO: 3604131 - RNA, 21 nt, Human
caaccaccgcuccccagccca

SEQ ID NO: 3604132 - RNA, 23 nt, Human
caaccacuggucuguagggauuu

SEQ ID NO: 3604133 - RNA, 14 nt, Human
caaccacuguaaaa

SEQ ID NO: 3604134 - RNA, 13 nt, Human
caaccagacagag

SEQ ID NO: 3604135 - RNA, 13 nt, Human
caaccagagcacu

SEQ ID NO: 3604136 - RNA, 18 nt, Human
caaccaggcuccugugau

SEQ ID NO: 3604137 - RNA, 19 nt, Human
caaccagggagcugcaggg

SEQ ID NO: 3604138 - RNA, 17 nt, Human
caaccagugccaaggac

SEQ ID NO: 3604139 - RNA, 19 nt, Human
caaccagugccaaggaccu

SEQ ID NO: 3604140 - RNA, 22 nt, Human
caaccauauggauauuagucau

SEQ ID NO: 3604141 - RNA, 12 nt, Human
caaccauauuua

SEQ ID NO: 3604142 - RNA, 15 nt, Human
caaccauauuuagca

SEQ ID NO: 3604143 - RNA, 18 nt, Human
caaccaugagaccacugu

SEQ ID NO: 3604144 - RNA, 13 nt, Human
caaccauggacuu

SEQ ID NO: 3604145 - RNA, 14 nt, Human
caaccauggacuuu

SEQ ID NO: 3604146 - RNA, 14 nt, Human
caaccauuaaaguc

SEQ ID NO: 3604147 - RNA, 18 nt, Human
caaccauuauaaccuuaa

SEQ ID NO: 3604148 - RNA, 17 nt, Human
caaccauuuccucagac

SEQ ID NO: 3604149 - RNA, 18 nt, Human
caacccaaaccuggagau

SEQ ID NO: 3604150 - RNA, 19 nt, Human
caacccaaauguucaucaa

SEQ ID NO: 3604151 - RNA, 18 nt, Human
caacccaaccucauccuc

SEQ ID NO: 3604152 - RNA, 15 nt, Human
caacccaaggacuga

SEQ ID NO: 3604153 - RNA, 15 nt, Human
caacccauuagccau

SEQ ID NO: 3604154 - RNA, 14 nt, Human
caaccccagccgcu

SEQ ID NO: 3604155 - RNA, 13 nt, Human
caaccccaguucu

SEQ ID NO: 3604156 - RNA, 17 nt, Human
caaccccaguucugcuc

SEQ ID NO: 3604157 - RNA, 13 nt, Human
caacccccacccc

SEQ ID NO: 3604158 - RNA, 23 nt, Human
caacccccaccccacacuuguuc

SEQ ID NO: 3604159 - RNA, 14 nt, Human
caacccccagcucc

SEQ ID NO: 3604160 - RNA, 21 nt, Human
caacccccauucucaucugca

SEQ ID NO: 3604161 - RNA, 18 nt, Human
caaccccccagcacugag

SEQ ID NO: 3604162 - RNA, 20 nt, Human
caaccccccagcacugagga

SEQ ID NO: 3604163 - RNA, 15 nt, Human
caaccccucgcccag

SEQ ID NO: 3604164 - RNA, 22 nt, Human
caaccccucgcccagucccagc

SEQ ID NO: 3604165 - RNA, 10 nt, Human
caaccccuga

SEQ ID NO: 3604166 - RNA, 16 nt, Human
caaccccugaggaaga

SEQ ID NO: 3604167 - RNA, 18 nt, Human
caaccccuggaccccagc

SEQ ID NO: 3604168 - RNA, 14 nt, Human
caaccccuguggag

SEQ ID NO: 3604169 - RNA, 16 nt, Human
caaccccuguggagcc

SEQ ID NO: 3604170 - RNA, 14 nt, Human
caaccccuucgcuc

SEQ ID NO: 3604171 - RNA, 24 nt, Human
augggagcuccucuccuggaggau

SEQ ID NO: 3604172 - RNA, 23 nt, Human
augggagcugaggccacacucag

SEQ ID NO: 3604173 - RNA, 21 nt, Human
augggagcugguuagaaaugc

SEQ ID NO: 3604174 - RNA, 22 nt, Human
augggagcugguuagaaaugca

SEQ ID NO: 3604175 - RNA, 22 nt, Human
augggagcugucaagcauguau

SEQ ID NO: 3604176 - RNA, 13 nt, Human
augggaggaaaga

SEQ ID NO: 3604177 - RNA, 13 nt, Human
augggagggagcu

SEQ ID NO: 3604178 - RNA, 21 nt, Human
augggagggauggcccuuccu

SEQ ID NO: 3604179 - RNA, 17 nt, Human
augggaggggaaauggg

SEQ ID NO: 3604180 - RNA, 22 nt, Human
augggagggggcuugaagccaa

SEQ ID NO: 3604181 - RNA, 16 nt, Human
augggauaaaugccau

SEQ ID NO: 3604182 - RNA, 14 nt, Human
augggaugagaaaa

SEQ ID NO: 3604183 - RNA, 17 nt, Human
augggaugauugaagaa

SEQ ID NO: 3604184 - RNA, 19 nt, Human
augggaugauugaagaaac

SEQ ID NO: 3604185 - RNA, 12 nt, Human
agguugcaggga

SEQ ID NO: 3604186 - RNA, 18 nt, Human
agguugcagggagccgag

SEQ ID NO: 3604187 - RNA, 18 nt, Human
agguugcagugagccaag

SEQ ID NO: 3604188 - RNA, 16 nt, Human
agguugcagugagcug

SEQ ID NO: 3604189 - RNA, 20 nt, Human
agguugcauugagcugagau

SEQ ID NO: 3604190 - RNA, 17 nt, Human
agguugcugguugcugu

SEQ ID NO: 3604191 - RNA, 16 nt, Human
agguugcuguuucaca

SEQ ID NO: 3604192 - RNA, 18 nt, Human
agguuggaagcuagcucc

SEQ ID NO: 3604193 - RNA, 19 nt, Human
agguuggaagcuagcuccc

SEQ ID NO: 3604194 - RNA, 16 nt, Human
agguuggaccccagag

SEQ ID NO: 3604195 - RNA, 17 nt, Human
agguuggaccccagaga

SEQ ID NO: 3604196 - RNA, 16 nt, Human
agguuggcucugccag

SEQ ID NO: 3604197 - RNA, 18 nt, Human
agguuggcucugccaguc

SEQ ID NO: 3604198 - RNA, 22 nt, Human
agguuggcucugccaguccugu

SEQ ID NO: 3604199 - RNA, 20 nt, Human
agguugggaaugaggcuugc

SEQ ID NO: 3604200 - RNA, 20 nt, Human
agguugggccauacuggccu

SEQ ID NO: 3604201 - RNA, 21 nt, Human
agguugggccauacuggccuc

SEQ ID NO: 3604202 - RNA, 22 nt, Human
agguugggccauacuggccucg

SEQ ID NO: 3604203 - RNA, 16 nt, Human
agguugggguguacua

SEQ ID NO: 3604204 - RNA, 19 nt, Human
agguugggguguacuaguu

SEQ ID NO: 3604205 - RNA, 18 nt, Human
agguugggugcugcuaau

SEQ ID NO: 3604206 - RNA, 14 nt, Human
agguuggugaauuu

SEQ ID NO: 3604207 - RNA, 17 nt, Human
agguuguaaauguguuu

SEQ ID NO: 3604208 - RNA, 17 nt, Human
agguugucacugagaag

SEQ ID NO: 3604209 - RNA, 20 nt, Human
agguugucugaagucacugc

SEQ ID NO: 3604210 - RNA, 16 nt, Human
agguuguuccuaaaau

SEQ ID NO: 3604211 - RNA, 13 nt, Human
agguuuaaaacua

SEQ ID NO: 3604212 - RNA, 14 nt, Human
agguuuaaagaguc

SEQ ID NO: 3604213 - RNA, 20 nt, Human
agguuuaaagagucuagauu

SEQ ID NO: 3604214 - RNA, 15 nt, Human
agguuuaacauaaag

SEQ ID NO: 3604215 - RNA, 17 nt, Human
agguuuaacauaaaggu

SEQ ID NO: 3604216 - RNA, 13 nt, Human
agguuuaacucag

SEQ ID NO: 3604217 - RNA, 20 nt, Human
agguuuaacucagaucacua

SEQ ID NO: 3604218 - RNA, 20 nt, Human
agguuuaaguagauuucaug

SEQ ID NO: 3604219 - RNA, 22 nt, Human
agguuuacaauaggagugguga

SEQ ID NO: 3604220 - RNA, 19 nt, Human
agguuuacuagcaccugcc

SEQ ID NO: 3604221 - RNA, 16 nt, Human
agguuuaugaaaaaga

SEQ ID NO: 3604222 - RNA, 13 nt, Human
agguuucaaagau

SEQ ID NO: 3604223 - RNA, 14 nt, Human
agguuucaaagaug

SEQ ID NO: 3604224 - RNA, 19 nt, Human
agguuucucaaagaaauuu

SEQ ID NO: 3604225 - RNA, 15 nt, Human
agguuucugaaaauu

SEQ ID NO: 3604226 - RNA, 14 nt, Human
agguuugaguagag

SEQ ID NO: 3604227 - RNA, 14 nt, Human
agguuuggaaggag

SEQ ID NO: 3604228 - RNA, 21 nt, Human
agguuuggaugggagugagac

SEQ ID NO: 3604229 - RNA, 16 nt, Human
agguuuggcuccugcc

SEQ ID NO: 3604230 - RNA, 18 nt, Human
agguuuggcuccugccca

SEQ ID NO: 3604231 - RNA, 13 nt, Human
agguuuguauauu

SEQ ID NO: 3604232 - RNA, 16 nt, Human
agguuugucaucagau

SEQ ID NO: 3604233 - RNA, 17 nt, Human
agguuugucaucagaug

SEQ ID NO: 3604234 - RNA, 22 nt, Human
agguuugugagagcgaggcuga

SEQ ID NO: 3604235 - RNA, 15 nt, Human
agguuuguguuuucu

SEQ ID NO: 3604236 - RNA, 15 nt, Human
agguuuuaaagugau

SEQ ID NO: 3604237 - RNA, 21 nt, Human
agguuuuaaagugauuaaacg

SEQ ID NO: 3604238 - RNA, 19 nt, Human
agguuuuaagugguuugau

SEQ ID NO: 3604239 - RNA, 14 nt, Human
agguuuuaaguugu

SEQ ID NO: 3604240 - RNA, 17 nt, Human
agguuuuagguucuaaa

SEQ ID NO: 3604241 - RNA, 23 nt, Human
agguuuuagguucuaaaguucua

SEQ ID NO: 3604242 - RNA, 15 nt, Human
agguuuuaugauauu

SEQ ID NO: 3604243 - RNA, 23 nt, Human
agguuuuaugauauuuuuuuaag

SEQ ID NO: 3604244 - RNA, 10 nt, Human
agguuuucag

SEQ ID NO: 3604245 - RNA, 13 nt, Human
agguuuucuccac

SEQ ID NO: 3604246 - RNA, 14 nt, Human
agguuuucuccccc

SEQ ID NO: 3604247 - RNA, 21 nt, Human
agguuuugcacucuuguuucu

SEQ ID NO: 3604248 - RNA, 15 nt, Human
agguuuuguaaagau

SEQ ID NO: 3604249 - RNA, 18 nt, Human
agguuuuguuugcuaucu

SEQ ID NO: 3604250 - RNA, 19 nt, Human
agguuuuguuugcuaucuu

SEQ ID NO: 3604251 - RNA, 12 nt, Human
agguuuuucaau

SEQ ID NO: 3604252 - RNA, 16 nt, Human
agguuuuucaauuaaa

SEQ ID NO: 3604253 - RNA, 20 nt, Human
agguuuuucaauuaaacgga

SEQ ID NO: 3604254 - RNA, 22 nt, Human
agguuuuucaauuaaacggauu

SEQ ID NO: 3604255 - RNA, 23 nt, Human
agguuuuugauagcauuguaagc

SEQ ID NO: 3604256 - RNA, 23 nt, Human
aguaaaaacaaagaaauuaugug

SEQ ID NO: 3604257 - RNA, 19 nt, Human
aguaaaaagaaaacaaaac

SEQ ID NO: 3604258 - RNA, 20 nt, Human
aguaaaacaaacaauaccug

SEQ ID NO: 3604259 - RNA, 12 nt, Human
aguaaaagcaaa

SEQ ID NO: 3604260 - RNA, 16 nt, Human
aguaaaagcaaaaaag

SEQ ID NO: 3604261 - RNA, 22 nt, Human
aguaaaauaaauauugucuuuu

SEQ ID NO: 3604262 - RNA, 12 nt, Human
aguaaaauucag

SEQ ID NO: 3604263 - RNA, 14 nt, Human
aguaaaauugccau

SEQ ID NO: 3604264 - RNA, 20 nt, Human
aguaaaauugccauauugca

SEQ ID NO: 3604265 - RNA, 23 nt, Human
aguaaaauugccauauugcacau

SEQ ID NO: 3604266 - RNA, 17 nt, Human
aguaaaccacugaaaaa

SEQ ID NO: 3604267 - RNA, 16 nt, Human
aguaaacgggaacaug

SEQ ID NO: 3604268 - RNA, 24 nt, Human
aguaaacuccccuuucccucgcua

SEQ ID NO: 3604269 - RNA, 14 nt, Human
aguaaacugcccug

SEQ ID NO: 3604270 - RNA, 12 nt, Human
aguaaagaaauu

SEQ ID NO: 3604271 - RNA, 13 nt, Human
aguaaagaaauuu

SEQ ID NO: 3604272 - RNA, 15 nt, Human
aguaaagaauuauuu

SEQ ID NO: 3604273 - RNA, 18 nt, Human
aguaaagagaaacuuugu

SEQ ID NO: 3604274 - RNA, 23 nt, Human
aguaaagccauuaaaugaauauu

SEQ ID NO: 3604275 - RNA, 18 nt, Human
aguaaagucaaggagaaa

SEQ ID NO: 3604276 - RNA, 18 nt, Human
aguaaagugauaauuucu

SEQ ID NO: 3604277 - RNA, 18 nt, Human
aguaaaguguucugccag

SEQ ID NO: 3604278 - RNA, 15 nt, Human
aguaaaguuaaaaga

SEQ ID NO: 3604279 - RNA, 22 nt, Human
aguaaauaucccaaacugugau

SEQ ID NO: 3604280 - RNA, 18 nt, Human
aguaaauauugaggcuuu

SEQ ID NO: 3604281 - RNA, 17 nt, Human
aguaaaucagauguuga

SEQ ID NO: 3604282 - RNA, 15 nt, Human
aguaaaucucuucug

SEQ ID NO: 3604283 - RNA, 18 nt, Human
aguaaaucucuucugugu

SEQ ID NO: 3604284 - RNA, 11 nt, Human
aguaaaugcua

SEQ ID NO: 3604285 - RNA, 21 nt, Human
aguaaaugggggugcauuuga

SEQ ID NO: 3604286 - RNA, 14 nt, Human
aguaaauguaguuc

SEQ ID NO: 3604287 - RNA, 19 nt, Human
aguaaauguaguucauacu

SEQ ID NO: 3604288 - RNA, 18 nt, Human
aguaaaugucuuuguaag

SEQ ID NO: 3604289 - RNA, 20 nt, Human
aguaaaugugauucaccucu

SEQ ID NO: 3604290 - RNA, 23 nt, Human
aguaaauguuaucuuauacugua

SEQ ID NO: 3604291 - RNA, 12 nt, Human
aguaacaaaaau

SEQ ID NO: 3604292 - RNA, 15 nt, Human
aguaacaagagugau

SEQ ID NO: 3604293 - RNA, 19 nt, Human
aguaacaaugaagauaaaa

SEQ ID NO: 3604294 - RNA, 12 nt, Human
aguaacacuaau

SEQ ID NO: 3604295 - RNA, 15 nt, Human
aguaacauuugcugu

SEQ ID NO: 3604296 - RNA, 18 nt, Human
aguaacccccacuggacu

SEQ ID NO: 3604297 - RNA, 20 nt, Human
aguaacccccacuggacuga

SEQ ID NO: 3604298 - RNA, 16 nt, Human
aguaacgcgucuuccu

SEQ ID NO: 3604299 - RNA, 22 nt, Human
aguaacgcgucuuccugagugg

SEQ ID NO: 3604300 - RNA, 12 nt, Human
aguaacucauuu

SEQ ID NO: 3604301 - RNA, 19 nt, Human
aguaacugccaucaagaug

SEQ ID NO: 3604302 - RNA, 17 nt, Human
aguaacugucaggcuga

SEQ ID NO: 3604303 - RNA, 23 nt, Human
aguaacuguuuuuuaagucucuc

SEQ ID NO: 3604304 - RNA, 14 nt, Human
aguaacuuaaguua

SEQ ID NO: 3604305 - RNA, 17 nt, Human
aguaacuuacuuaggug

SEQ ID NO: 3604306 - RNA, 14 nt, Human
aguaacuuggcuuu

SEQ ID NO: 3604307 - RNA, 15 nt, Human
aguaacuuggcuuuc

SEQ ID NO: 3604308 - RNA, 18 nt, Human
aguaacuuggcuuucauu

SEQ ID NO: 3604309 - RNA, 16 nt, Human
aguaacuugucuuaaa

SEQ ID NO: 3604310 - RNA, 23 nt, Human
aguaacuugucuuaaauaaaaga

SEQ ID NO: 3604311 - RNA, 20 nt, Human
aguaacuuuauguguaaaua

SEQ ID NO: 3604312 - RNA, 14 nt, Human
aguaagaaaauauu

SEQ ID NO: 3604313 - RNA, 16 nt, Human
aguaagaagacaugaa

SEQ ID NO: 3604314 - RNA, 21 nt, Human
aguaagaauaccacaucaaau

SEQ ID NO: 3604315 - RNA, 19 nt, Human
aguaagaccggaagcuccu

SEQ ID NO: 3604316 - RNA, 22 nt, Human
aguaagaccggaagcuccuggu

SEQ ID NO: 3604317 - RNA, 15 nt, Human
aguaagaucacuguu

SEQ ID NO: 3604318 - RNA, 18 nt, Human
aguaagaucucuuucuaa

SEQ ID NO: 3604319 - RNA, 23 nt, Human
aguaagauuuacccagaauguca

SEQ ID NO: 3604320 - RNA, 15 nt, Human
aguaagcauuucaaa

SEQ ID NO: 3604321 - RNA, 22 nt, Human
aguaagcccuugaagauaucuu

SEQ ID NO: 3604322 - RNA, 17 nt, Human
aguaagccucaucauca

SEQ ID NO: 3604323 - RNA, 20 nt, Human
aguaagcugcucuauuguag

SEQ ID NO: 3604324 - RNA, 13 nt, Human
aguaaggcugugu

SEQ ID NO: 3604325 - RNA, 19 nt, Human
aguaagggaagcagaagga

SEQ ID NO: 3604326 - RNA, 16 nt, Human
aguaagucucaaggua

SEQ ID NO: 3604327 - RNA, 22 nt, Human
aguaauaaaauucaacaaacau

SEQ ID NO: 3604328 - RNA, 14 nt, Human
aguaauaaagacuc

SEQ ID NO: 3604329 - RNA, 18 nt, Human
aguaauacaggauuauuu

SEQ ID NO: 3604330 - RNA, 23 nt, Human
aguaauaccucuaauaguauaaa

SEQ ID NO: 3604331 - RNA, 14 nt, Human
aguaauagccuggg

SEQ ID NO: 3604332 - RNA, 15 nt, Human
aguaauauauucuga

SEQ ID NO: 3604333 - RNA, 22 nt, Human
aguaauauauucugaagcaaca

SEQ ID NO: 3604334 - RNA, 21 nt, Human
augcauggugccccaggacca

SEQ ID NO: 3604335 - RNA, 16 nt, Human
augcaugguuucagca

SEQ ID NO: 3604336 - RNA, 20 nt, Human
augcaugguuucagcacuag

SEQ ID NO: 3604337 - RNA, 13 nt, Human
augcauguaauca

SEQ ID NO: 3604338 - RNA, 13 nt, Human
augcaugugaaga

SEQ ID NO: 3604339 - RNA, 15 nt, Human
augcauuaaaagaaa

SEQ ID NO: 3604340 - RNA, 16 nt, Human
augcauuaaaagaaaa

SEQ ID NO: 3604341 - RNA, 17 nt, Human
augcauuaaaccugucu

SEQ ID NO: 3604342 - RNA, 22 nt, Human
augcauuauaggaucauuuguu

SEQ ID NO: 3604343 - RNA, 16 nt, Human
augcauuauuaaauug

SEQ ID NO: 3604344 - RNA, 17 nt, Human
augcauucuucucuguu

SEQ ID NO: 3604345 - RNA, 21 nt, Human
augcauucuugguuggcuggc

SEQ ID NO: 3604346 - RNA, 17 nt, Human
augcauugcuaaaauau

SEQ ID NO: 3604347 - RNA, 21 nt, Human
augcauugcucuggaucuguu

SEQ ID NO: 3604348 - RNA, 14 nt, Human
augcauuguaguuu

SEQ ID NO: 3604349 - RNA, 13 nt, Human
augcauuuggaac

SEQ ID NO: 3604350 - RNA, 15 nt, Human
augcauuugggucca

SEQ ID NO: 3604351 - RNA, 20 nt, Human
augcauuuggguccaggagg

SEQ ID NO: 3604352 - RNA, 13 nt, Human
augcauuuugcag

SEQ ID NO: 3604353 - RNA, 20 nt, Human
augccaaagaucacuuguug

SEQ ID NO: 3604354 - RNA, 13 nt, Human
augccaaauuaaa

SEQ ID NO: 3604355 - RNA, 19 nt, Human
augccaaauuaaaaaagau

SEQ ID NO: 3604356 - RNA, 20 nt, Human
augccaacaagaaugcauug

SEQ ID NO: 3604357 - RNA, 22 nt, Human
augccaagaaaagggcugacau

SEQ ID NO: 3604358 - RNA, 20 nt, Human
augccaagagugcacccaug

SEQ ID NO: 3604359 - RNA, 16 nt, Human
augccaauuauuguua

SEQ ID NO: 3604360 - RNA, 15 nt, Human
augccacacaccuuu

SEQ ID NO: 3604361 - RNA, 18 nt, Human
augccacacagagugguc

SEQ ID NO: 3604362 - RNA, 16 nt, Human
augccacacaucaccc

SEQ ID NO: 3604363 - RNA, 17 nt, Human
augccacaccaagcugu

SEQ ID NO: 3604364 - RNA, 19 nt, Human
augccacagcccugucagc

SEQ ID NO: 3604365 - RNA, 18 nt, Human
augccacaucaaaccuuu

SEQ ID NO: 3604366 - RNA, 12 nt, Human
augccacauuca

SEQ ID NO: 3604367 - RNA, 20 nt, Human
augccaccaacuuacaaaaa

SEQ ID NO: 3604368 - RNA, 14 nt, Human
augccacccuagcc

SEQ ID NO: 3604369 - RNA, 19 nt, Human
augccacccuguuuucagc

SEQ ID NO: 3604370 - RNA, 20 nt, Human
augccacccuguuuucagcu

SEQ ID NO: 3604371 - RNA, 12 nt, Human
augccacuuccu

SEQ ID NO: 3604372 - RNA, 18 nt, Human
augccagccaagcucugc

SEQ ID NO: 3604373 - RNA, 19 nt, Human
augccagcucagucccauc

SEQ ID NO: 3604374 - RNA, 21 nt, Human
augccagggccaugucagaca

SEQ ID NO: 3604375 - RNA, 18 nt, Human
augccagggccgaccaga

SEQ ID NO: 3604376 - RNA, 23 nt, Human
augccaguaacgcgucuuccuga

SEQ ID NO: 3604377 - RNA, 20 nt, Human
augccaguaggcucaacuag

SEQ ID NO: 3604378 - RNA, 20 nt, Human
augccagugugcugaugggc

SEQ ID NO: 3604379 - RNA, 12 nt, Human
augccauaauac

SEQ ID NO: 3604380 - RNA, 23 nt, Human
augccauccucuuucucuuuucu

SEQ ID NO: 3604381 - RNA, 19 nt, Human
augccaucuguguccuggu

SEQ ID NO: 3604382 - RNA, 21 nt, Human
augccaugaggaacaaggcaa

SEQ ID NO: 3604383 - RNA, 17 nt, Human
augccauuuaaagcuua

SEQ ID NO: 3604384 - RNA, 21 nt, Human
augccauuuaaagcuuauuaa

SEQ ID NO: 3604385 - RNA, 23 nt, Human
augccauuugcacuuacacaaga

SEQ ID NO: 3604386 - RNA, 12 nt, Human
augccauuuguu

SEQ ID NO: 3604387 - RNA, 16 nt, Human
augccauuuguuuauu

SEQ ID NO: 3604388 - RNA, 21 nt, Human
augccauuuuaaggaaaacua

SEQ ID NO: 3604389 - RNA, 15 nt, Human
augcccaagggaaag

SEQ ID NO: 3604390 - RNA, 17 nt, Human
augcccaauuagggccu

SEQ ID NO: 3604391 - RNA, 12 nt, Human
augcccaccccc

SEQ ID NO: 3604392 - RNA, 15 nt, Human
augcccacccccugc

SEQ ID NO: 3604393 - RNA, 16 nt, Human
augcccacccccugcc

SEQ ID NO: 3604394 - RNA, 18 nt, Human
augcccacccccugcccu

SEQ ID NO: 3604395 - RNA, 20 nt, Human
augcccacccccugcccugc

SEQ ID NO: 3604396 - RNA, 15 nt, Human
augcccaccugccca

SEQ ID NO: 3604397 - RNA, 16 nt, Human
augcccaccugcccau

SEQ ID NO: 3604398 - RNA, 21 nt, Human
augcccaccugcccaucacag

SEQ ID NO: 3604399 - RNA, 21 nt, Human
augcccagagggcccaggcag

SEQ ID NO: 3604400 - RNA, 15 nt, Human
augcccagccccuuc

SEQ ID NO: 3604401 - RNA, 17 nt, Human
augcccagggccacucu

SEQ ID NO: 3604402 - RNA, 19 nt, Human
augcccaguuucugccucu

SEQ ID NO: 3604403 - RNA, 21 nt, Human
augcccauuugccuuuaaaaa

SEQ ID NO: 3604404 - RNA, 15 nt, Human
augcccccagcuggc

SEQ ID NO: 3604405 - RNA, 21 nt, Human
augccccccucaaaccuccuc

SEQ ID NO: 3604406 - RNA, 22 nt, Human
augcccccuaauccccuucucc

SEQ ID NO: 3604407 - RNA, 10 nt, Human
augcccccug

SEQ ID NO: 3604408 - RNA, 15 nt, Human
augcccccuguggau

SEQ ID NO: 3604409 - RNA, 19 nt, Human
augcccccuguggaugcug

SEQ ID NO: 3604410 - RNA, 18 nt, Human
augcccccuuucagaugu

SEQ ID NO: 3604411 - RNA, 16 nt, Human
augccccggccaccuc

SEQ ID NO: 3604412 - RNA, 20 nt, Human
augccccugaauuuaaauag

SEQ ID NO: 3604413 - RNA, 14 nt, Human
augcccucagggga

SEQ ID NO: 3604414 - RNA, 19 nt, Human
augcccucccuucucccug

SEQ ID NO: 3604415 - RNA, 22 nt, Human
augcccucccuucucccuggau

SEQ ID NO: 3604416 - RNA, 13 nt, Human
augcccuccucuc

SEQ ID NO: 3604417 - RNA, 15 nt, Human
augcccuggaggugg

SEQ ID NO: 3604418 - RNA, 16 nt, Human
augcccuggagguggc

SEQ ID NO: 3604419 - RNA, 13 nt, Human
augcccugugcaa

SEQ ID NO: 3604420 - RNA, 20 nt, Human
augccggugagaauaagaga

SEQ ID NO: 3604421 - RNA, 16 nt, Human
augccuaagaagauga

SEQ ID NO: 3604422 - RNA, 13 nt, Human
augccuaauaaac

SEQ ID NO: 3604423 - RNA, 23 nt, Human
augccuaccaauauuuaaucuuu

SEQ ID NO: 3604424 - RNA, 18 nt, Human
augccuaguuuuuaguaa

SEQ ID NO: 3604425 - RNA, 15 nt, Human
augccucacuaauuu

SEQ ID NO: 3604426 - RNA, 23 nt, Human
augccucacuaauuuuuguauua

SEQ ID NO: 3604427 - RNA, 15 nt, Human
augccucagaagugc

SEQ ID NO: 3604428 - RNA, 16 nt, Human
augccucagaagugca

SEQ ID NO: 3604429 - RNA, 24 nt, Human
augccucagcccugacccugugga

SEQ ID NO: 3604430 - RNA, 16 nt, Human
augccucagccuccug

SEQ ID NO: 3604431 - RNA, 20 nt, Human
augccuccaccccccagaac

SEQ ID NO: 3604432 - RNA, 17 nt, Human
augccuccaccgcugcc

SEQ ID NO: 3604433 - RNA, 21 nt, Human
augccuccaccgcugccuaag

SEQ ID NO: 3604434 - RNA, 20 nt, Human
augccucccccuagccauuu

SEQ ID NO: 3604435 - RNA, 18 nt, Human
augccucccugacccugc

SEQ ID NO: 3604436 - RNA, 13 nt, Human
augccuccucagg

SEQ ID NO: 3604437 - RNA, 18 nt, Human
augccuccucaggagccg

SEQ ID NO: 3604438 - RNA, 14 nt, Human
augccuccuguggg

SEQ ID NO: 3604439 - RNA, 15 nt, Human
augccuccugugggg

SEQ ID NO: 3604440 - RNA, 16 nt, Human
augccuccuuccucuu

SEQ ID NO: 3604441 - RNA, 16 nt, Human
augccucuccuuugua

SEQ ID NO: 3604442 - RNA, 15 nt, Human
augccucucucaggc

SEQ ID NO: 3604443 - RNA, 13 nt, Human
augccucugaggc

SEQ ID NO: 3604444 - RNA, 21 nt, Human
augccucugaggccagccugg

SEQ ID NO: 3604445 - RNA, 22 nt, Human
augccucugaggccagccuggc

SEQ ID NO: 3604446 - RNA, 19 nt, Human
augccucugucuucuggac

SEQ ID NO: 3604447 - RNA, 15 nt, Human
augccugaacuugaa

SEQ ID NO: 3604448 - RNA, 21 nt, Human
augccugagagacauggcuuu

SEQ ID NO: 3604449 - RNA, 12 nt, Human
augccugagggu

SEQ ID NO: 3604450 - RNA, 16 nt, Human
augccugagugccugg

SEQ ID NO: 3604451 - RNA, 19 nt, Human
augccugagugccuggcca

SEQ ID NO: 3604452 - RNA, 20 nt, Human
augccugagugccuggccaa

SEQ ID NO: 3604453 - RNA, 18 nt, Human
augccugcuuuuuggaaa

SEQ ID NO: 3604454 - RNA, 19 nt, Human
augccugcuuuuuggaaag

SEQ ID NO: 3604455 - RNA, 23 nt, Human
augccuggaagcuuuguccccug

SEQ ID NO: 3604456 - RNA, 13 nt, Human
augccuggcuucg

SEQ ID NO: 3604457 - RNA, 17 nt, Human
augccugguggcagcug

SEQ ID NO: 3604458 - RNA, 19 nt, Human
augccugguggcagcugcg

SEQ ID NO: 3604459 - RNA, 13 nt, Human
augccuuaaaaug

SEQ ID NO: 3604460 - RNA, 15 nt, Human
augccuuacuuugua

SEQ ID NO: 3604461 - RNA, 23 nt, Human
augccuuacuuuguaugauauuc

SEQ ID NO: 3604462 - RNA, 18 nt, Human
augccuuccagcacccug

SEQ ID NO: 3604463 - RNA, 14 nt, Human
augccuucuuauug

SEQ ID NO: 3604464 - RNA, 15 nt, Human
augccuugaauaaua

SEQ ID NO: 3604465 - RNA, 23 nt, Human
augccuugaauaauaagcaggau

SEQ ID NO: 3604466 - RNA, 24 nt, Human
augccuugguuuuuacugcucuga

SEQ ID NO: 3604467 - RNA, 19 nt, Human
augccuugugcuguuaaua

SEQ ID NO: 3604468 - RNA, 17 nt, Human
augccuuuaaaguauga

SEQ ID NO: 3604469 - RNA, 20 nt, Human
augccuuuaaaucugugaug

SEQ ID NO: 3604470 - RNA, 22 nt, Human
augccuuucuaguccuauucua

SEQ ID NO: 3604471 - RNA, 20 nt, Human
augccuuugagacaguuucu

SEQ ID NO: 3604472 - RNA, 23 nt, Human
augccuuugagacaguuucuuag

SEQ ID NO: 3604473 - RNA, 14 nt, Human
augccuuuuauuuc

SEQ ID NO: 3604474 - RNA, 14 nt, Human
augccuuuucccaa

SEQ ID NO: 3604475 - RNA, 23 nt, Human
augccuuuucccaaaauguugaa

SEQ ID NO: 3604476 - RNA, 19 nt, Human
augccuuuuuuucucugca

SEQ ID NO: 3604477 - RNA, 17 nt, Human
augcgaaugguagucua

SEQ ID NO: 3604478 - RNA, 19 nt, Human
augcgagugcucauuucag

SEQ ID NO: 3604479 - RNA, 18 nt, Human
augcgauuuuauuacugg

SEQ ID NO: 3604480 - RNA, 20 nt, Human
augcgauuuuauuacuggcg

SEQ ID NO: 3604481 - RNA, 23 nt, Human
augcgcagccccaucugugcauu

SEQ ID NO: 3604482 - RNA, 13 nt, Human
augcgcaggcugg

SEQ ID NO: 3604483 - RNA, 23 nt, Human
augggauucagugcuucuuaaag

SEQ ID NO: 3604484 - RNA, 21 nt, Human
augggcaacccccagccugcu

SEQ ID NO: 3604485 - RNA, 20 nt, Human
augggcacaaagggcccaga

SEQ ID NO: 3604486 - RNA, 23 nt, Human
augggcacugcuggguggcccau

SEQ ID NO: 3604487 - RNA, 12 nt, Human
augggcaggaga

SEQ ID NO: 3604488 - RNA, 17 nt, Human
augggcaucuuuuguau

SEQ ID NO: 3604489 - RNA, 14 nt, Human
augggcauugacaa

SEQ ID NO: 3604490 - RNA, 22 nt, Human
augggccaccgccuugcccagc

SEQ ID NO: 3604491 - RNA, 22 nt, Human
augggccagccccuccaucugu

SEQ ID NO: 3604492 - RNA, 16 nt, Human
augggccccuggcacu

SEQ ID NO: 3604493 - RNA, 15 nt, Human
augggccuccugugu

SEQ ID NO: 3604494 - RNA, 19 nt, Human
augggccugcuuccugucu

SEQ ID NO: 3604495 - RNA, 15 nt, Human
augggcucaggaucu

SEQ ID NO: 3604496 - RNA, 21 nt, Human
augggcucugacagaaagcag

SEQ ID NO: 3604497 - RNA, 14 nt, Human
augggcucuuccaa

SEQ ID NO: 3604498 - RNA, 19 nt, Human
augggcugcagcagaggca

SEQ ID NO: 3604499 - RNA, 23 nt, Human
augggcuggguucuacccaggug

SEQ ID NO: 3604500 - RNA, 15 nt, Human
augggcuuucucuuu

SEQ ID NO: 3604501 - RNA, 17 nt, Human
auggggaaaaaaaucau

SEQ ID NO: 3604502 - RNA, 17 nt, Human
auggggaggacaaaaug

SEQ ID NO: 3604503 - RNA, 17 nt, Human
auggggaggcaagugug

SEQ ID NO: 3604504 - RNA, 21 nt, Human
auggggaggcaaguguggggg

SEQ ID NO: 3604505 - RNA, 11 nt, Human
auggggaggga

SEQ ID NO: 3604506 - RNA, 19 nt, Human
auggggaucacagagacau

SEQ ID NO: 3604507 - RNA, 14 nt, Human
auggggcagaaauc

SEQ ID NO: 3604508 - RNA, 23 nt, Human
auggggcaggccaccuggcucuc

SEQ ID NO: 3604509 - RNA, 13 nt, Human
auggggccagauc

SEQ ID NO: 3604510 - RNA, 14 nt, Human
auggggcccugccu

SEQ ID NO: 3604511 - RNA, 12 nt, Human
auggggcugcac

SEQ ID NO: 3604512 - RNA, 11 nt, Human
augggggaaag

SEQ ID NO: 3604513 - RNA, 18 nt, Human
augggggagggggcagaa

SEQ ID NO: 3604514 - RNA, 20 nt, Human
augggggagucugaagcaga

SEQ ID NO: 3604515 - RNA, 14 nt, Human
augggggcaagaag

SEQ ID NO: 3604516 - RNA, 14 nt, Human
augggggcagggcu

SEQ ID NO: 3604517 - RNA, 20 nt, Human
auggggggagcacccugagg

SEQ ID NO: 3604518 - RNA, 21 nt, Human
auggggggagcacccugaggg

SEQ ID NO: 3604519 - RNA, 16 nt, Human
auggggggccaacacc

SEQ ID NO: 3604520 - RNA, 17 nt, Human
auggggguagcagcugg

SEQ ID NO: 3604521 - RNA, 14 nt, Human
augggggugcauuu

SEQ ID NO: 3604522 - RNA, 15 nt, Human
augggggugcauuug

SEQ ID NO: 3604523 - RNA, 16 nt, Human
auggggucucucacag

SEQ ID NO: 3604524 - RNA, 21 nt, Human
auggggucucucacagacagg

SEQ ID NO: 3604525 - RNA, 21 nt, Human
auggggugaugcugggcuggc

SEQ ID NO: 3604526 - RNA, 15 nt, Human
augggguggaaggca

SEQ ID NO: 3604527 - RNA, 16 nt, Human
auggggugggccucug

SEQ ID NO: 3604528 - RNA, 19 nt, Human
auggggugggccucugguu

SEQ ID NO: 3604529 - RNA, 18 nt, Human
augggguuggcugggccc

SEQ ID NO: 3604530 - RNA, 17 nt, Human
auggguagagaaacacu

SEQ ID NO: 3604531 - RNA, 23 nt, Human
auggguagcuucugaccucagca

SEQ ID NO: 3604532 - RNA, 23 nt, Human
auggguagggcucugacaaagcu

SEQ ID NO: 3604533 - RNA, 14 nt, Human
augggucacaggaa

SEQ ID NO: 3604534 - RNA, 21 nt, Human
auggguccaggauuccucuuu

SEQ ID NO: 3604535 - RNA, 22 nt, Human
augggucgcccaugagagcgca

SEQ ID NO: 3604536 - RNA, 19 nt, Human
augggucuggcugagcuga

SEQ ID NO: 3604537 - RNA, 16 nt, Human
augggugaaggcuggc

SEQ ID NO: 3604538 - RNA, 22 nt, Human
augggugaagggagagccagcu

SEQ ID NO: 3604539 - RNA, 16 nt, Human
augggugcaaggaaaa

SEQ ID NO: 3604540 - RNA, 21 nt, Human
auggguguuguauggggaggc

SEQ ID NO: 3604541 - RNA, 16 nt, Human
auggguuggugcuucu

SEQ ID NO: 3604542 - RNA, 13 nt, Human
augguaaaauugc

SEQ ID NO: 3604543 - RNA, 18 nt, Human
augguaaagauauuauuc

SEQ ID NO: 3604544 - RNA, 15 nt, Human
augguaagagaaaag

SEQ ID NO: 3604545 - RNA, 20 nt, Human
augguaauucuuauucuuuc

SEQ ID NO: 3604546 - RNA, 15 nt, Human
augguaccagcccug

SEQ ID NO: 3604547 - RNA, 20 nt, Human
augguaccagcccuggggcu

SEQ ID NO: 3604548 - RNA, 14 nt, Human
augguacccccuuc

SEQ ID NO: 3604549 - RNA, 17 nt, Human
augguacccccuucugg

SEQ ID NO: 3604550 - RNA, 13 nt, Human
augguacuauuua

SEQ ID NO: 3604551 - RNA, 13 nt, Human
augguagcauuuu

SEQ ID NO: 3604552 - RNA, 17 nt, Human
augguaggcauuuccua

SEQ ID NO: 3604553 - RNA, 18 nt, Human
augguaggcauuuccuau

SEQ ID NO: 3604554 - RNA, 19 nt, Human
augguagucuaaccaaaug

SEQ ID NO: 3604555 - RNA, 12 nt, Human
augguaguuucu

SEQ ID NO: 3604556 - RNA, 13 nt, Human
augguaguuucug

SEQ ID NO: 3604557 - RNA, 15 nt, Human
augguaguuucugug

SEQ ID NO: 3604558 - RNA, 22 nt, Human
augguaguuucugugguuggcu

SEQ ID NO: 3604559 - RNA, 23 nt, Human
augguaguuucugugguuggcug

SEQ ID NO: 3604560 - RNA, 17 nt, Human
augguauauauacauau

SEQ ID NO: 3604561 - RNA, 21 nt, Human
augguauauuugguacuguau

SEQ ID NO: 3604562 - RNA, 20 nt, Human
augguaugagcugagggggg

SEQ ID NO: 3604563 - RNA, 15 nt, Human
auggucacacacuga

SEQ ID NO: 3604564 - RNA, 19 nt, Human
auggucacacacugaugcu

SEQ ID NO: 3604565 - RNA, 19 nt, Human
auggucaccaaaucagcug

SEQ ID NO: 3604566 - RNA, 18 nt, Human
auggucagcccuagggug

SEQ ID NO: 3604567 - RNA, 18 nt, Human
auggucagcguugcaugu

SEQ ID NO: 3604568 - RNA, 13 nt, Human
auggucagcuccc

SEQ ID NO: 3604569 - RNA, 20 nt, Human
auggucagcucccuucucug

SEQ ID NO: 3604570 - RNA, 14 nt, Human
auggucaucuuuuu

SEQ ID NO: 3604571 - RNA, 17 nt, Human
auggucauugcaguuua

SEQ ID NO: 3604572 - RNA, 19 nt, Human
augguccaauuaguuuccu

SEQ ID NO: 3604573 - RNA, 22 nt, Human
auggucccacaucccugggccu

SEQ ID NO: 3604574 - RNA, 13 nt, Human
auggucccaucca

SEQ ID NO: 3604575 - RNA, 15 nt, Human
auggucccauccagg

SEQ ID NO: 3604576 - RNA, 15 nt, Human
augguccgugcuaag

SEQ ID NO: 3604577 - RNA, 18 nt, Human
augguccgugcuaaggac

SEQ ID NO: 3604578 - RNA, 20 nt, Human
augguccgugcuaaggacuu

SEQ ID NO: 3604579 - RNA, 15 nt, Human
auggucgcccaggag

SEQ ID NO: 3604580 - RNA, 14 nt, Human
auggucuaaaaaua

SEQ ID NO: 3604581 - RNA, 14 nt, Human
auggucuaauguuu

SEQ ID NO: 3604582 - RNA, 16 nt, Human
auggucuaauguuuaa

SEQ ID NO: 3604583 - RNA, 14 nt, Human
auggucuggucuau

SEQ ID NO: 3604584 - RNA, 16 nt, Human
auggucuggucuaugu

SEQ ID NO: 3604585 - RNA, 15 nt, Human
auggucuuacagcag

SEQ ID NO: 3604586 - RNA, 18 nt, Human
auggucuuauauuuacaa

SEQ ID NO: 3604587 - RNA, 15 nt, Human
auggucuucagccuc

SEQ ID NO: 3604588 - RNA, 12 nt, Human
auggugaaaaug

SEQ ID NO: 3604589 - RNA, 16 nt, Human
auggugaaaauguacu

SEQ ID NO: 3604590 - RNA, 20 nt, Human
auggugaaaccccaucucua

SEQ ID NO: 3604591 - RNA, 24 nt, Human
auggugaaaccccgucucuacuaa

SEQ ID NO: 3604592 - RNA, 16 nt, Human
auggugaugaaaugua

SEQ ID NO: 3604593 - RNA, 19 nt, Human
auggugaugcagucuuaga

SEQ ID NO: 3604594 - RNA, 20 nt, Human
auggugaugcagucuuagau

SEQ ID NO: 3604595 - RNA, 12 nt, Human
auggugauuuua

SEQ ID NO: 3604596 - RNA, 17 nt, Human
auggugauuuuaaaugu

SEQ ID NO: 3604597 - RNA, 15 nt, Human
auggugcaaugaccu

SEQ ID NO: 3604598 - RNA, 19 nt, Human
auggugcaaugaccuuuca

SEQ ID NO: 3604599 - RNA, 15 nt, Human
auggugccccaggac

SEQ ID NO: 3604600 - RNA, 19 nt, Human
auggugccuaguauugaca

SEQ ID NO: 3604601 - RNA, 21 nt, Human
auggugccuaguauugacaaa

SEQ ID NO: 3604602 - RNA, 15 nt, Human
auggugccucuggag

SEQ ID NO: 3604603 - RNA, 11 nt, Human
auggugccuga

SEQ ID NO: 3604604 - RNA, 16 nt, Human
auggugccugagaggc

SEQ ID NO: 3604605 - RNA, 17 nt, Human
auggugccugagaggca

SEQ ID NO: 3604606 - RNA, 23 nt, Human
auggugccugagaggcaggcaua

SEQ ID NO: 3604607 - RNA, 22 nt, Human
auggugccugauucggcugucu

SEQ ID NO: 3604608 - RNA, 22 nt, Human
auggugcucaccaugcuuccag

SEQ ID NO: 3604609 - RNA, 19 nt, Human
auggugcuuaaguuccagc

SEQ ID NO: 3604610 - RNA, 20 nt, Human
augguggacucgccuguaau

SEQ ID NO: 3604611 - RNA, 22 nt, Human
augguggcuucuuuucuuugua

SEQ ID NO: 3604612 - RNA, 23 nt, Human
augguggggucuccucaggacca

SEQ ID NO: 3604613 - RNA, 22 nt, Human
augguguaauaagacauaacgu

SEQ ID NO: 3604614 - RNA, 13 nt, Human
augguguacauaa

SEQ ID NO: 3604615 - RNA, 16 nt, Human
augguguagaacacua

SEQ ID NO: 3604616 - RNA, 18 nt, Human
augguguagaacacuaau

SEQ ID NO: 3604617 - RNA, 22 nt, Human
augguguagaacacuaauucau

SEQ ID NO: 3604618 - RNA, 22 nt, Human
auggugugaaagucagaugccc

SEQ ID NO: 3604619 - RNA, 17 nt, Human
auggugugccuuccaga

SEQ ID NO: 3604620 - RNA, 15 nt, Human
augguguggccugug

SEQ ID NO: 3604621 - RNA, 18 nt, Human
augguguggguguccugc

SEQ ID NO: 3604622 - RNA, 20 nt, Human
augguguggguguccugccu

SEQ ID NO: 3604623 - RNA, 14 nt, Human
augguguguuacac

SEQ ID NO: 3604624 - RNA, 18 nt, Human
augguguuacugcaguug

SEQ ID NO: 3604625 - RNA, 16 nt, Human
augguguuucucccuc

SEQ ID NO: 3604626 - RNA, 21 nt, Human
augguguuuucuuaugcagga

SEQ ID NO: 3604627 - RNA, 23 nt, Human
augguuaagaguccaagaaucca

SEQ ID NO: 3604628 - RNA, 19 nt, Human
augguuacaaucauugcug

SEQ ID NO: 3604629 - RNA, 16 nt, Human
augguuacacuguuag

SEQ ID NO: 3604630 - RNA, 18 nt, Human
augguuacuucuucucuu

SEQ ID NO: 3604631 - RNA, 16 nt, Human
augguuauaaaaguga

SEQ ID NO: 3604632 - RNA, 21 nt, Human
aguaauauauuuaaagggaaa

SEQ ID NO: 3604633 - RNA, 22 nt, Human
aguaauaugccugcuauuugaa

SEQ ID NO: 3604634 - RNA, 18 nt, Human
aguaauauuuauauauuu

SEQ ID NO: 3604635 - RNA, 15 nt, Human
aguaauauuuauuaa

SEQ ID NO: 3604636 - RNA, 15 nt, Human
aguaaucaauaaaga

SEQ ID NO: 3604637 - RNA, 20 nt, Human
aguaaucagauuacugcuuu

SEQ ID NO: 3604638 - RNA, 22 nt, Human
aguaaucagauuacugcuuuaa

SEQ ID NO: 3604639 - RNA, 14 nt, Human
aguaaucccgccac

SEQ ID NO: 3604640 - RNA, 19 nt, Human
aguaaucccgccaccuauc

SEQ ID NO: 3604641 - RNA, 19 nt, Human
aguaaucuaauauggccac

SEQ ID NO: 3604642 - RNA, 13 nt, Human
aguaaucugcauu

SEQ ID NO: 3604643 - RNA, 15 nt, Human
aguaaucuguacauu

SEQ ID NO: 3604644 - RNA, 19 nt, Human
aguaaucuguguacaaaga

SEQ ID NO: 3604645 - RNA, 21 nt, Human
aguaaucuguguacaaagaaa

SEQ ID NO: 3604646 - RNA, 21 nt, Human
aguaaugaauuuuuaugauau

SEQ ID NO: 3604647 - RNA, 17 nt, Human
aguaaugagcuuaagaa

SEQ ID NO: 3604648 - RNA, 21 nt, Human
aguaaugaguuuaaaaaucaa

SEQ ID NO: 3604649 - RNA, 18 nt, Human
aguaaugauaacuggaaa

SEQ ID NO: 3604650 - RNA, 20 nt, Human
aguaaugauaacuggaaacu

SEQ ID NO: 3604651 - RNA, 15 nt, Human
aguaaugaucucaaa

SEQ ID NO: 3604652 - RNA, 17 nt, Human
aguaaugcauacagaaa

SEQ ID NO: 3604653 - RNA, 20 nt, Human
aguaaugcauacagaaauau

SEQ ID NO: 3604654 - RNA, 13 nt, Human
aguaaugccucug

SEQ ID NO: 3604655 - RNA, 20 nt, Human
aguaaugccucugucuagca

SEQ ID NO: 3604656 - RNA, 22 nt, Human
aguaauggguuucauauuucuu

SEQ ID NO: 3604657 - RNA, 14 nt, Human
aguaaugguguaga

SEQ ID NO: 3604658 - RNA, 16 nt, Human
aguaaugguguagaac

SEQ ID NO: 3604659 - RNA, 19 nt, Human
aguaaugguguagaacacu

SEQ ID NO: 3604660 - RNA, 22 nt, Human
aguaaugguguagaacacuaau

SEQ ID NO: 3604661 - RNA, 21 nt, Human
aguaauguggaagaaaauggu

SEQ ID NO: 3604662 - RNA, 22 nt, Human
aguaauuaucgggaacaguguu

SEQ ID NO: 3604663 - RNA, 21 nt, Human
aguaauuaugcacuaaauaug

SEQ ID NO: 3604664 - RNA, 14 nt, Human
aguaauucucaggc

SEQ ID NO: 3604665 - RNA, 16 nt, Human
aguaauugcauuugcu

SEQ ID NO: 3604666 - RNA, 13 nt, Human
aguaauugugaaa

SEQ ID NO: 3604667 - RNA, 16 nt, Human
aguaauugugaaaaag

SEQ ID NO: 3604668 - RNA, 22 nt, Human
aguaauuguguuuacauuuuau

SEQ ID NO: 3604669 - RNA, 23 nt, Human
aguaauuguguuuacauuuuaug

SEQ ID NO: 3604670 - RNA, 18 nt, Human
aguaauuguuccagagac

SEQ ID NO: 3604671 - RNA, 12 nt, Human
aguaauuuagaa

SEQ ID NO: 3604672 - RNA, 22 nt, Human
aguaauuucaguguaaagugug

SEQ ID NO: 3604673 - RNA, 14 nt, Human
aguaauuuggaaau

SEQ ID NO: 3604674 - RNA, 14 nt, Human
aguaauuuguaaag

SEQ ID NO: 3604675 - RNA, 16 nt, Human
aguacaaaugccuuaa

SEQ ID NO: 3604676 - RNA, 14 nt, Human
aguacaauaaaagu

SEQ ID NO: 3604677 - RNA, 18 nt, Human
aguacaaugugacuuuga

SEQ ID NO: 3604678 - RNA, 13 nt, Human
aguacaauguguu

SEQ ID NO: 3604679 - RNA, 15 nt, Human
aguacacucugcugu

SEQ ID NO: 3604680 - RNA, 13 nt, Human
aguacacugagag

SEQ ID NO: 3604681 - RNA, 12 nt, Human
aguacacugccu

SEQ ID NO: 3604682 - RNA, 16 nt, Human
aguacacuguuucaaa

SEQ ID NO: 3604683 - RNA, 14 nt, Human
aguacagaauuuga

SEQ ID NO: 3604684 - RNA, 17 nt, Human
aguacagagaagccauc

SEQ ID NO: 3604685 - RNA, 16 nt, Human
aguacagcaugugccu

SEQ ID NO: 3604686 - RNA, 14 nt, Human
aguacaggcagcac

SEQ ID NO: 3604687 - RNA, 18 nt, Human
aguacaggcagcacagag

SEQ ID NO: 3604688 - RNA, 21 nt, Human
aguacagguaaggugagggaa

SEQ ID NO: 3604689 - RNA, 16 nt, Human
aguacagguacuuugu

SEQ ID NO: 3604690 - RNA, 17 nt, Human
aguacagguacuuuguc

SEQ ID NO: 3604691 - RNA, 19 nt, Human
aguacagugguucuacaau

SEQ ID NO: 3604692 - RNA, 22 nt, Human
aguacagugguucuacaaucua

SEQ ID NO: 3604693 - RNA, 19 nt, Human
aguacauauuuauuuucuu

SEQ ID NO: 3604694 - RNA, 22 nt, Human
aguacaugauaaaugauagaca

SEQ ID NO: 3604695 - RNA, 14 nt, Human
aguacauguuaaac

SEQ ID NO: 3604696 - RNA, 14 nt, Human
aguacauuguuacc

SEQ ID NO: 3604697 - RNA, 19 nt, Human
aguacauuguuaccucuau

SEQ ID NO: 3604698 - RNA, 21 nt, Human
aguacauuuaaauuuuuuggc

SEQ ID NO: 3604699 - RNA, 21 nt, Human
aguacauuuuuugaaaugcug

SEQ ID NO: 3604700 - RNA, 15 nt, Human
aguaccaaaguuuua

SEQ ID NO: 3604701 - RNA, 18 nt, Human
aguaccaaaguuuuauca

SEQ ID NO: 3604702 - RNA, 19 nt, Human
aguaccaaaguuuuaucaa

SEQ ID NO: 3604703 - RNA, 14 nt, Human
aguaccaaaugcuu

SEQ ID NO: 3604704 - RNA, 16 nt, Human
aguaccaaucauuuua

SEQ ID NO: 3604705 - RNA, 17 nt, Human
aguaccaccaaaaaagc

SEQ ID NO: 3604706 - RNA, 22 nt, Human
aguaccaccaaaaaagcuguau

SEQ ID NO: 3604707 - RNA, 23 nt, Human
aguaccauaguaccauuuauaca

SEQ ID NO: 3604708 - RNA, 21 nt, Human
aguaccauuuauacaaauuag

SEQ ID NO: 3604709 - RNA, 22 nt, Human
aguacccaaaagcucagccagc

SEQ ID NO: 3604710 - RNA, 15 nt, Human
aguaccuauaaagua

SEQ ID NO: 3604711 - RNA, 23 nt, Human
aguaccuauaaaguaaagcuaaa

SEQ ID NO: 3604712 - RNA, 15 nt, Human
aguaccugaaaagua

SEQ ID NO: 3604713 - RNA, 15 nt, Human
aguaccugagggucu

SEQ ID NO: 3604714 - RNA, 16 nt, Human
aguaccugagggucug

SEQ ID NO: 3604715 - RNA, 13 nt, Human
aguaccuggagga

SEQ ID NO: 3604716 - RNA, 21 nt, Human
aguaccuggguccccagcccu

SEQ ID NO: 3604717 - RNA, 12 nt, Human
aguaccuugcuu

SEQ ID NO: 3604718 - RNA, 14 nt, Human
aguaccuuugcucu

SEQ ID NO: 3604719 - RNA, 17 nt, Human
aguaccuuugcucuugc

SEQ ID NO: 3604720 - RNA, 13 nt, Human
aguaccuuuguca

SEQ ID NO: 3604721 - RNA, 14 nt, Human
aguaccuuugucac

SEQ ID NO: 3604722 - RNA, 19 nt, Human
aguaccuuuuauaucccau

SEQ ID NO: 3604723 - RNA, 16 nt, Human
aguacgaaccuacagu

SEQ ID NO: 3604724 - RNA, 13 nt, Human
aguacguuauugu

SEQ ID NO: 3604725 - RNA, 16 nt, Human
aguacguugugcauuu

SEQ ID NO: 3604726 - RNA, 17 nt, Human
aguacuaacacaaggac

SEQ ID NO: 3604727 - RNA, 18 nt, Human
aguacuaacacaaggaca

SEQ ID NO: 3604728 - RNA, 23 nt, Human
aguacuacacauuuuuaaauugu

SEQ ID NO: 3604729 - RNA, 14 nt, Human
aguacuagaaacug

SEQ ID NO: 3604730 - RNA, 13 nt, Human
aguacucauacau

SEQ ID NO: 3604731 - RNA, 16 nt, Human
aguacuccugcaaaau

SEQ ID NO: 3604732 - RNA, 21 nt, Human
aguacuccugcaaaauuuuau

SEQ ID NO: 3604733 - RNA, 15 nt, Human
aguacuccuuaagaa

SEQ ID NO: 3604734 - RNA, 23 nt, Human
aguacugagcagugauauucuuu

SEQ ID NO: 3604735 - RNA, 16 nt, Human
aguacugggauuacag

SEQ ID NO: 3604736 - RNA, 23 nt, Human
aguacuguaagaauaauuuauag

SEQ ID NO: 3604737 - RNA, 21 nt, Human
aguacuguaauaauaccucaa

SEQ ID NO: 3604738 - RNA, 17 nt, Human
aguacugugaauccagu

SEQ ID NO: 3604739 - RNA, 13 nt, Human
aguacugugggca

SEQ ID NO: 3604740 - RNA, 17 nt, Human
aguacugugggcaauuu

SEQ ID NO: 3604741 - RNA, 18 nt, Human
aguacugugggcaauuua

SEQ ID NO: 3604742 - RNA, 19 nt, Human
aguacugugggcaauuuag

SEQ ID NO: 3604743 - RNA, 20 nt, Human
aguacugugggcaauuuaga

SEQ ID NO: 3604744 - RNA, 15 nt, Human
aguacuguguacugu

SEQ ID NO: 3604745 - RNA, 23 nt, Human
aguacuuagcuaguuuuauucuu

SEQ ID NO: 3604746 - RNA, 19 nt, Human
aguacuucagcaagagaga

SEQ ID NO: 3604747 - RNA, 19 nt, Human
aguacuucuccacccugcu

SEQ ID NO: 3604748 - RNA, 14 nt, Human
aguacuucuucugu

SEQ ID NO: 3604749 - RNA, 19 nt, Human
aguacuucuucuguaauau

SEQ ID NO: 3604750 - RNA, 23 nt, Human
aguacuucuucuguaauauuuac

SEQ ID NO: 3604751 - RNA, 12 nt, Human
aguacuucuuuu

SEQ ID NO: 3604752 - RNA, 11 nt, Human
aguacuugaaa

SEQ ID NO: 3604753 - RNA, 16 nt, Human
aguacuugaaaaagua

SEQ ID NO: 3604754 - RNA, 18 nt, Human
aguacuugaguguaaugu

SEQ ID NO: 3604755 - RNA, 23 nt, Human
aguacuugggagaccuguaauca

SEQ ID NO: 3604756 - RNA, 13 nt, Human
aguacuuguaguu

SEQ ID NO: 3604757 - RNA, 14 nt, Human
aguacuuguaguuc

SEQ ID NO: 3604758 - RNA, 17 nt, Human
aguacuuuauagaagaa

SEQ ID NO: 3604759 - RNA, 14 nt, Human
aguagaaaauguga

SEQ ID NO: 3604760 - RNA, 18 nt, Human
aguagaaaaugugacccu

SEQ ID NO: 3604761 - RNA, 14 nt, Human
aguagaaaggccuu

SEQ ID NO: 3604762 - RNA, 16 nt, Human
aguagaaaggccuuua

SEQ ID NO: 3604763 - RNA, 17 nt, Human
aguagaaaggccuuuaa

SEQ ID NO: 3604764 - RNA, 14 nt, Human
aguagaaauuuuac

SEQ ID NO: 3604765 - RNA, 17 nt, Human
aguagaaauuuuacaau

SEQ ID NO: 3604766 - RNA, 16 nt, Human
aguagaacuuuguaua

SEQ ID NO: 3604767 - RNA, 19 nt, Human
aguagaagucuuagaugua

SEQ ID NO: 3604768 - RNA, 21 nt, Human
aguagaagucuuagauguaua

SEQ ID NO: 3604769 - RNA, 14 nt, Human
aguagacauuuaua

SEQ ID NO: 3604770 - RNA, 22 nt, Human
aguagacauuucucuuacugca

SEQ ID NO: 3604771 - RNA, 16 nt, Human
aguagacauuuuaaca

SEQ ID NO: 3604772 - RNA, 19 nt, Human
aguagacauuuuaacaaga

SEQ ID NO: 3604773 - RNA, 22 nt, Human
aguagagacgagguuucacugu

SEQ ID NO: 3604774 - RNA, 20 nt, Human
aguagagauggggaaagaau

SEQ ID NO: 3604775 - RNA, 15 nt, Human
aguagaggcuuagag

SEQ ID NO: 3604776 - RNA, 17 nt, Human
aguagagucaucuccau

SEQ ID NO: 3604777 - RNA, 16 nt, Human
aguagauauuacuuua

SEQ ID NO: 3604778 - RNA, 18 nt, Human
aguagauauuacuuuauc

SEQ ID NO: 3604779 - RNA, 21 nt, Human
aguagauauuacuuuaucacu

SEQ ID NO: 3604780 - RNA, 18 nt, Human
aguagaucaugcauagag

SEQ ID NO: 3604781 - RNA, 22 nt, Human
augcgcaggcuggcccugcccu

SEQ ID NO: 3604782 - RNA, 21 nt, Human
augcgcauucuaaccuggagg

SEQ ID NO: 3604783 - RNA, 12 nt, Human
augcggccaaga

SEQ ID NO: 3604784 - RNA, 13 nt, Human
augcggcccagcc

SEQ ID NO: 3604785 - RNA, 21 nt, Human
augcggcccagcccggcuccc

SEQ ID NO: 3604786 - RNA, 16 nt, Human
augcggcccaggaugg

SEQ ID NO: 3604787 - RNA, 18 nt, Human
augcgggcugggcagcug

SEQ ID NO: 3604788 - RNA, 15 nt, Human
augcgguagccagca

SEQ ID NO: 3604789 - RNA, 21 nt, Human
augcgguagccagcacacagg

SEQ ID NO: 3604790 - RNA, 19 nt, Human
augcgguuaauuuugaagu

SEQ ID NO: 3604791 - RNA, 21 nt, Human
augcgguuauaaaaaaugguu

SEQ ID NO: 3604792 - RNA, 14 nt, Human
augcguucacucca

SEQ ID NO: 3604793 - RNA, 14 nt, Human
augcuaaaccuuag

SEQ ID NO: 3604794 - RNA, 20 nt, Human
augcuaaaccuuaguacuga

SEQ ID NO: 3604795 - RNA, 23 nt, Human
augcuaacaaagacaaaagucug

SEQ ID NO: 3604796 - RNA, 22 nt, Human
augcuaacaguucacuugcagu

SEQ ID NO: 3604797 - RNA, 15 nt, Human
augcuaagagaagua

SEQ ID NO: 3604798 - RNA, 22 nt, Human
augcuaauagugaucaagaaga

SEQ ID NO: 3604799 - RNA, 21 nt, Human
augcuaauucucagaaaggca

SEQ ID NO: 3604800 - RNA, 18 nt, Human
augcuacacacugcaugu

SEQ ID NO: 3604801 - RNA, 23 nt, Human
augcuaccuugugacccagcacu

SEQ ID NO: 3604802 - RNA, 20 nt, Human
augcuacugucucacugaaa

SEQ ID NO: 3604803 - RNA, 22 nt, Human
augcuacuuuauuuauacacug

SEQ ID NO: 3604804 - RNA, 16 nt, Human
augcuagaacucccuu

SEQ ID NO: 3604805 - RNA, 20 nt, Human
augcuagaacucccuuucaa

SEQ ID NO: 3604806 - RNA, 15 nt, Human
augcuaggucucgga

SEQ ID NO: 3604807 - RNA, 18 nt, Human
augcuagguuaauuccaa

SEQ ID NO: 3604808 - RNA, 14 nt, Human
augcuagguucuac

SEQ ID NO: 3604809 - RNA, 13 nt, Human
augcuaucucugu

SEQ ID NO: 3604810 - RNA, 14 nt, Human
augcuaugucauuu

SEQ ID NO: 3604811 - RNA, 23 nt, Human
augcuauugacaauaaaauauua

SEQ ID NO: 3604812 - RNA, 11 nt, Human
augcuauuucu

SEQ ID NO: 3604813 - RNA, 15 nt, Human
augcuauuugaacaa

SEQ ID NO: 3604814 - RNA, 14 nt, Human
augcuauuugcaau

SEQ ID NO: 3604815 - RNA, 13 nt, Human
augcucaaagaaa

SEQ ID NO: 3604816 - RNA, 14 nt, Human
augcucaaguuuuu

SEQ ID NO: 3604817 - RNA, 20 nt, Human
augcucaaguuuuucagaaa

SEQ ID NO: 3604818 - RNA, 13 nt, Human
augcucacacucc

SEQ ID NO: 3604819 - RNA, 15 nt, Human
augcucacagucuca

SEQ ID NO: 3604820 - RNA, 12 nt, Human
augcucagacca

SEQ ID NO: 3604821 - RNA, 21 nt, Human
augcucaggggcccuggagca

SEQ ID NO: 3604822 - RNA, 21 nt, Human
augcucagguacagagaagga

SEQ ID NO: 3604823 - RNA, 21 nt, Human
augcucaguugcuaaacacug

SEQ ID NO: 3604824 - RNA, 21 nt, Human
augcucauaacggaucagaaa

SEQ ID NO: 3604825 - RNA, 16 nt, Human
augcucaucugcuggu

SEQ ID NO: 3604826 - RNA, 19 nt, Human
augcucaugguccccaugg

SEQ ID NO: 3604827 - RNA, 18 nt, Human
augcuccaagauucuaga

SEQ ID NO: 3604828 - RNA, 22 nt, Human
augcuccagauuagagccugua

SEQ ID NO: 3604829 - RNA, 21 nt, Human
augcuccagcaacacagccug

SEQ ID NO: 3604830 - RNA, 22 nt, Human
augcuccagcaacacagccugg

SEQ ID NO: 3604831 - RNA, 22 nt, Human
augcuccccacagcgucccugg

SEQ ID NO: 3604832 - RNA, 22 nt, Human
augcucccccauccuccccuuc

SEQ ID NO: 3604833 - RNA, 16 nt, Human
augcuccccugugcca

SEQ ID NO: 3604834 - RNA, 14 nt, Human
augcucccuccccu

SEQ ID NO: 3604835 - RNA, 16 nt, Human
augcucccuccccugc

SEQ ID NO: 3604836 - RNA, 22 nt, Human
augcucccuccccugcccuggu

SEQ ID NO: 3604837 - RNA, 16 nt, Human
augcuccucacugccc

SEQ ID NO: 3604838 - RNA, 18 nt, Human
augcuccucuuccccaga

SEQ ID NO: 3604839 - RNA, 20 nt, Human
augcuccucuuccccagacg

SEQ ID NO: 3604840 - RNA, 21 nt, Human
augcucuaucuugcucuguaa

SEQ ID NO: 3604841 - RNA, 18 nt, Human
augcucucucaaauuguc

SEQ ID NO: 3604842 - RNA, 21 nt, Human
augcucucugcagccagccca

SEQ ID NO: 3604843 - RNA, 23 nt, Human
augcucugagaagaggagcccuc

SEQ ID NO: 3604844 - RNA, 15 nt, Human
augcucugcauguua

SEQ ID NO: 3604845 - RNA, 23 nt, Human
augcucugugcgaggguuacuau

SEQ ID NO: 3604846 - RNA, 15 nt, Human
augcucuuaauugcc

SEQ ID NO: 3604847 - RNA, 19 nt, Human
augcucuuauuucaucauu

SEQ ID NO: 3604848 - RNA, 13 nt, Human
augcucuucugug

SEQ ID NO: 3604849 - RNA, 14 nt, Human
augcucuucugugg

SEQ ID NO: 3604850 - RNA, 16 nt, Human
augcucuuuacuucau

SEQ ID NO: 3604851 - RNA, 15 nt, Human
augcucuuuuuuacu

SEQ ID NO: 3604852 - RNA, 20 nt, Human
augcucuuuuuuacucauug

SEQ ID NO: 3604853 - RNA, 17 nt, Human
augcugaaaaaacaccu

SEQ ID NO: 3604854 - RNA, 23 nt, Human
augcugaaaauguccuugugaug

SEQ ID NO: 3604855 - RNA, 14 nt, Human
augcugaaaccaag

SEQ ID NO: 3604856 - RNA, 17 nt, Human
augcugacccaugggca

SEQ ID NO: 3604857 - RNA, 17 nt, Human
augcugaggccugggcc

SEQ ID NO: 3604858 - RNA, 18 nt, Human
augcugaggccugggccg

SEQ ID NO: 3604859 - RNA, 20 nt, Human
augcugaggguguuucuucc

SEQ ID NO: 3604860 - RNA, 22 nt, Human
augcugaguauguuaagcucuu

SEQ ID NO: 3604861 - RNA, 18 nt, Human
augcugaugaaucacugu

SEQ ID NO: 3604862 - RNA, 13 nt, Human
augcugauggagc

SEQ ID NO: 3604863 - RNA, 14 nt, Human
augcugauguccuc

SEQ ID NO: 3604864 - RNA, 16 nt, Human
augcugauguucagug

SEQ ID NO: 3604865 - RNA, 17 nt, Human
augcugauguucagugu

SEQ ID NO: 3604866 - RNA, 19 nt, Human
augcugauguucaguguaa

SEQ ID NO: 3604867 - RNA, 24 nt, Human
augcugauguucaguguaauuucu

SEQ ID NO: 3604868 - RNA, 22 nt, Human
augcugccaauauccuaauaaa

SEQ ID NO: 3604869 - RNA, 13 nt, Human
augcugccagugu

SEQ ID NO: 3604870 - RNA, 17 nt, Human
augcugcccaugccacc

SEQ ID NO: 3604871 - RNA, 15 nt, Human
augcugccccugccu

SEQ ID NO: 3604872 - RNA, 14 nt, Human
augcugcccuguga

SEQ ID NO: 3604873 - RNA, 15 nt, Human
augcugcccugugag

SEQ ID NO: 3604874 - RNA, 19 nt, Human
augcugccuaggcugaccu

SEQ ID NO: 3604875 - RNA, 16 nt, Human
augcugcgcccuuccc

SEQ ID NO: 3604876 - RNA, 21 nt, Human
augcugcugccccugcacagc

SEQ ID NO: 3604877 - RNA, 23 nt, Human
augcugcugccccugcacagcag

SEQ ID NO: 3604878 - RNA, 13 nt, Human
augcugcuggaca

SEQ ID NO: 3604879 - RNA, 21 nt, Human
augcugcuggggaagacagug

SEQ ID NO: 3604880 - RNA, 20 nt, Human
augcugcuuuaauugugaau

SEQ ID NO: 3604881 - RNA, 15 nt, Human
augcugcuuuuauau

SEQ ID NO: 3604882 - RNA, 20 nt, Human
augcugcuuuuauaucugua

SEQ ID NO: 3604883 - RNA, 23 nt, Human
augcuggacaggucugggagagg

SEQ ID NO: 3604884 - RNA, 20 nt, Human
augcuggacuggaggccccu

SEQ ID NO: 3604885 - RNA, 22 nt, Human
augcuggacuggaggccccugg

SEQ ID NO: 3604886 - RNA, 16 nt, Human
augcuggagaaaaaua

SEQ ID NO: 3604887 - RNA, 23 nt, Human
augcuggagaaaaauaucuguaa

SEQ ID NO: 3604888 - RNA, 19 nt, Human
augcuggagaagagaggag

SEQ ID NO: 3604889 - RNA, 12 nt, Human
augcuggagagg

SEQ ID NO: 3604890 - RNA, 13 nt, Human
augcuggagaggu

SEQ ID NO: 3604891 - RNA, 14 nt, Human
augcuggagagguu

SEQ ID NO: 3604892 - RNA, 22 nt, Human
augcuggccagccuggggccug

SEQ ID NO: 3604893 - RNA, 19 nt, Human
augcuggcccagggcccag

SEQ ID NO: 3604894 - RNA, 20 nt, Human
augcuggcccagggcccaga

SEQ ID NO: 3604895 - RNA, 21 nt, Human
augcuggcuauagaugucuuu

SEQ ID NO: 3604896 - RNA, 12 nt, Human
augcuggcuggc

SEQ ID NO: 3604897 - RNA, 22 nt, Human
augcuggcuguuggcugggggc

SEQ ID NO: 3604898 - RNA, 15 nt, Human
augcugggacucagc

SEQ ID NO: 3604899 - RNA, 16 nt, Human
augcugggacucagcc

SEQ ID NO: 3604900 - RNA, 16 nt, Human
augcugggcugacggu

SEQ ID NO: 3604901 - RNA, 14 nt, Human
augcugggcuggcu

SEQ ID NO: 3604902 - RNA, 16 nt, Human
augcugggcugggugc

SEQ ID NO: 3604903 - RNA, 22 nt, Human
augcugguuuuccuaaaugcag

SEQ ID NO: 3604904 - RNA, 22 nt, Human
augcuguaacuuucugaaauaa

SEQ ID NO: 3604905 - RNA, 12 nt, Human
augcuguacaua

SEQ ID NO: 3604906 - RNA, 14 nt, Human
augcuguaucugug

SEQ ID NO: 3604907 - RNA, 15 nt, Human
augcuguaucugugc

SEQ ID NO: 3604908 - RNA, 19 nt, Human
augcuguauucuucuuugg

SEQ ID NO: 3604909 - RNA, 23 nt, Human
augcugucccuuacgugaguccu

SEQ ID NO: 3604910 - RNA, 16 nt, Human
augcugucuggcacag

SEQ ID NO: 3604911 - RNA, 20 nt, Human
augcugucuuucuugcuccc

SEQ ID NO: 3604912 - RNA, 23 nt, Human
augcugucuuucuugcucccuga

SEQ ID NO: 3604913 - RNA, 23 nt, Human
augcugugacacauggccccucc

SEQ ID NO: 3604914 - RNA, 18 nt, Human
augcugugccccuggccu

SEQ ID NO: 3604915 - RNA, 19 nt, Human
augcugugcccuaaagugu

SEQ ID NO: 3604916 - RNA, 20 nt, Human
augcugugcgcccagggcug

SEQ ID NO: 3604917 - RNA, 18 nt, Human
augcugugcuaugaauuu

SEQ ID NO: 3604918 - RNA, 17 nt, Human
augcuguucaugaaaga

SEQ ID NO: 3604919 - RNA, 12 nt, Human
augcuguugauu

SEQ ID NO: 3604920 - RNA, 16 nt, Human
augcuguugauugcua

SEQ ID NO: 3604921 - RNA, 16 nt, Human
augcuguugccucauc

SEQ ID NO: 3604922 - RNA, 17 nt, Human
augcuguugccucaucu

SEQ ID NO: 3604923 - RNA, 11 nt, Human
augcuguuugu

SEQ ID NO: 3604924 - RNA, 22 nt, Human
augcuguuuguagugaaauaau

SEQ ID NO: 3604925 - RNA, 14 nt, Human
augcuuaaauuuua

SEQ ID NO: 3604926 - RNA, 13 nt, Human
augcuuaauuucu

SEQ ID NO: 3604927 - RNA, 16 nt, Human
augcuuaauuucuaaa

SEQ ID NO: 3604928 - RNA, 19 nt, Human
augcuuaauuucuaaagau

SEQ ID NO: 3604929 - RNA, 20 nt, Human
augguuaugaaagaauauau

SEQ ID NO: 3604930 - RNA, 18 nt, Human
augguucguucuguuuac

SEQ ID NO: 3604931 - RNA, 13 nt, Human
augguucugugcc

SEQ ID NO: 3604932 - RNA, 17 nt, Human
augguugaugauacuuc

SEQ ID NO: 3604933 - RNA, 21 nt, Human
augguuguauuagauguucuc

SEQ ID NO: 3604934 - RNA, 13 nt, Human
augguuucaaaga

SEQ ID NO: 3604935 - RNA, 22 nt, Human
augguuuggugcuuuuuauaaa

SEQ ID NO: 3604936 - RNA, 15 nt, Human
augguuuguccugau

SEQ ID NO: 3604937 - RNA, 15 nt, Human
augguuuucaaaaua

SEQ ID NO: 3604938 - RNA, 21 nt, Human
augguuuucuccaagagcuac

SEQ ID NO: 3604939 - RNA, 19 nt, Human
augguuuugugccaucugu

SEQ ID NO: 3604940 - RNA, 16 nt, Human
augguuuuuaaauuuu

SEQ ID NO: 3604941 - RNA, 11 nt, Human
auguaaaaaag

SEQ ID NO: 3604942 - RNA, 19 nt, Human
auguaaaaaagaaaaacac

SEQ ID NO: 3604943 - RNA, 11 nt, Human
auguaaaacaa

SEQ ID NO: 3604944 - RNA, 12 nt, Human
auguaaaacaaa

SEQ ID NO: 3604945 - RNA, 14 nt, Human
auguaaaacaaaaa

SEQ ID NO: 3604946 - RNA, 20 nt, Human
auguaaaacaaaaaacaaua

SEQ ID NO: 3604947 - RNA, 17 nt, Human
auguaaaacagaaaaaa

SEQ ID NO: 3604948 - RNA, 23 nt, Human
auguaaaagaacuuacugauuau

SEQ ID NO: 3604949 - RNA, 22 nt, Human
auguaaaaggccaaaccucugu

SEQ ID NO: 3604950 - RNA, 12 nt, Human
auguaaaaucuu

SEQ ID NO: 3604951 - RNA, 13 nt, Human
auguaaaaucuug

SEQ ID NO: 3604952 - RNA, 22 nt, Human
auguaaaaucuugucaugugua

SEQ ID NO: 3604953 - RNA, 23 nt, Human
auguaaaaucuugucauguguau

SEQ ID NO: 3604954 - RNA, 19 nt, Human
auguaaaauuuugccuaau

SEQ ID NO: 3604955 - RNA, 13 nt, Human
auguaaacaaauc

SEQ ID NO: 3604956 - RNA, 16 nt, Human
auguaaacaaaucuuu

SEQ ID NO: 3604957 - RNA, 17 nt, Human
auguaaacagugccugc

SEQ ID NO: 3604958 - RNA, 20 nt, Human
auguaaacagugccugcuga

SEQ ID NO: 3604959 - RNA, 22 nt, Human
auguaaacagugccugcugaau

SEQ ID NO: 3604960 - RNA, 18 nt, Human
auguaaacauaccaacau

SEQ ID NO: 3604961 - RNA, 12 nt, Human
auguaaacauuu

SEQ ID NO: 3604962 - RNA, 11 nt, Human
auguaaacugc

SEQ ID NO: 3604963 - RNA, 14 nt, Human
auguaaacugccau

SEQ ID NO: 3604964 - RNA, 22 nt, Human
auguaaacuguuucuuuaaaau

SEQ ID NO: 3604965 - RNA, 16 nt, Human
auguaaagaaaugucu

SEQ ID NO: 3604966 - RNA, 21 nt, Human
auguaaagcaaccaaaaagaa

SEQ ID NO: 3604967 - RNA, 14 nt, Human
auguaaagccaugc

SEQ ID NO: 3604968 - RNA, 20 nt, Human
auguaaaggagucaaaacua

SEQ ID NO: 3604969 - RNA, 21 nt, Human
auguaaauaaaggauuucuag

SEQ ID NO: 3604970 - RNA, 17 nt, Human
auguaaauaauacauua

SEQ ID NO: 3604971 - RNA, 18 nt, Human
auguaaauagguuucuaa

SEQ ID NO: 3604972 - RNA, 12 nt, Human
auguaaauagug

SEQ ID NO: 3604973 - RNA, 17 nt, Human
auguaaauagugcagaa

SEQ ID NO: 3604974 - RNA, 12 nt, Human
auguaaauauuc

SEQ ID NO: 3604975 - RNA, 15 nt, Human
auguaaauauucuau

SEQ ID NO: 3604976 - RNA, 15 nt, Human
auguaaauauuuuaa

SEQ ID NO: 3604977 - RNA, 20 nt, Human
auguaaauauuuuaaagaau

SEQ ID NO: 3604978 - RNA, 14 nt, Human
auguaaauccccac

SEQ ID NO: 3604979 - RNA, 12 nt, Human
auguaaaugaag

SEQ ID NO: 3604980 - RNA, 18 nt, Human
auguaaaugucucacuga

SEQ ID NO: 3604981 - RNA, 19 nt, Human
auguaaaugucucacugag

SEQ ID NO: 3604982 - RNA, 15 nt, Human
auguaaauuaccagu

SEQ ID NO: 3604983 - RNA, 15 nt, Human
auguaaauuuguacu

SEQ ID NO: 3604984 - RNA, 14 nt, Human
auguaacugcugaa

SEQ ID NO: 3604985 - RNA, 14 nt, Human
auguaacuguuacc

SEQ ID NO: 3604986 - RNA, 17 nt, Human
auguaacuguuaccauu

SEQ ID NO: 3604987 - RNA, 17 nt, Human
auguaacuuuuguaaga

SEQ ID NO: 3604988 - RNA, 19 nt, Human
auguaagaauucagaagac

SEQ ID NO: 3604989 - RNA, 20 nt, Human
auguaagagcuuuacaaaaa

SEQ ID NO: 3604990 - RNA, 23 nt, Human
auguaagagcuuuacaaaaagac

SEQ ID NO: 3604991 - RNA, 24 nt, Human
auguaagauuauagauucuaaaga

SEQ ID NO: 3604992 - RNA, 16 nt, Human
auguaagcauacuuug

SEQ ID NO: 3604993 - RNA, 22 nt, Human
auguaagcauacuuuguaaaua

SEQ ID NO: 3604994 - RNA, 17 nt, Human
auguaagcugaaaauau

SEQ ID NO: 3604995 - RNA, 14 nt, Human
auguaagcuguuua

SEQ ID NO: 3604996 - RNA, 18 nt, Human
auguaaguuuaccuaugu

SEQ ID NO: 3604997 - RNA, 19 nt, Human
auguaauaaaaaguauaug

SEQ ID NO: 3604998 - RNA, 16 nt, Human
auguaauaaacuuuaa

SEQ ID NO: 3604999 - RNA, 15 nt, Human
auguaaugcaacuac

SEQ ID NO: 3605000 - RNA, 14 nt, Human
auguaaugucccuu

SEQ ID NO: 3605001 - RNA, 21 nt, Human
auguaauguuuucuuugcaaa

SEQ ID NO: 3605002 - RNA, 18 nt, Human
auguaauuaaacuguuaa

SEQ ID NO: 3605003 - RNA, 15 nt, Human
auguaauuaaguacu

SEQ ID NO: 3605004 - RNA, 23 nt, Human
auguaauuaaguacuauguauca

SEQ ID NO: 3605005 - RNA, 17 nt, Human
auguaauuauuuaugua

SEQ ID NO: 3605006 - RNA, 23 nt, Human
auguaauuauuuauguauggugc

SEQ ID NO: 3605007 - RNA, 20 nt, Human
auguaauuguuugucuuuaa

SEQ ID NO: 3605008 - RNA, 16 nt, Human
auguaauuuaaaugaa

SEQ ID NO: 3605009 - RNA, 20 nt, Human
auguaauuuaaaugaaagaa

SEQ ID NO: 3605010 - RNA, 22 nt, Human
auguaauuuaggguacuaaauu

SEQ ID NO: 3605011 - RNA, 13 nt, Human
auguaauuugugu

SEQ ID NO: 3605012 - RNA, 20 nt, Human
auguaauuuuauuuuaaaau

SEQ ID NO: 3605013 - RNA, 12 nt, Human
auguaauuuugu

SEQ ID NO: 3605014 - RNA, 22 nt, Human
auguaauuuuguguaagaaaua

SEQ ID NO: 3605015 - RNA, 18 nt, Human
auguacagacauauuuaa

SEQ ID NO: 3605016 - RNA, 21 nt, Human
auguacagagaacuaacacua

SEQ ID NO: 3605017 - RNA, 14 nt, Human
auguacaggaugcu

SEQ ID NO: 3605018 - RNA, 13 nt, Human
auguacagucugu

SEQ ID NO: 3605019 - RNA, 14 nt, Human
auguacagucuguc

SEQ ID NO: 3605020 - RNA, 16 nt, Human
auguacaguugaaaua

SEQ ID NO: 3605021 - RNA, 18 nt, Human
auguacauagugcuaaca

SEQ ID NO: 3605022 - RNA, 17 nt, Human
auguacauguauuaaau

SEQ ID NO: 3605023 - RNA, 14 nt, Human
auguacauuaauua

SEQ ID NO: 3605024 - RNA, 18 nt, Human
auguaccaugaaacaaag

SEQ ID NO: 3605025 - RNA, 15 nt, Human
auguaccauuugcau

SEQ ID NO: 3605026 - RNA, 17 nt, Human
auguacccucugaaaua

SEQ ID NO: 3605027 - RNA, 14 nt, Human
auguaccucuuuua

SEQ ID NO: 3605028 - RNA, 22 nt, Human
auguaccuucuuucacucuguc

SEQ ID NO: 3605029 - RNA, 18 nt, Human
auguacuaguacugugua

SEQ ID NO: 3605030 - RNA, 21 nt, Human
auguacuaguacuguguacug

SEQ ID NO: 3605031 - RNA, 22 nt, Human
auguacuaguacuguguacugu

SEQ ID NO: 3605032 - RNA, 20 nt, Human
auguacuccucuuuacacug

SEQ ID NO: 3605033 - RNA, 22 nt, Human
auguacucuacugauaucuaaa

SEQ ID NO: 3605034 - RNA, 17 nt, Human
auguacugauuucagua

SEQ ID NO: 3605035 - RNA, 18 nt, Human
auguacugauuucaguaa

SEQ ID NO: 3605036 - RNA, 18 nt, Human
auguacuguacuaauucu

SEQ ID NO: 3605037 - RNA, 20 nt, Human
auguacuguacuaauucuua

SEQ ID NO: 3605038 - RNA, 16 nt, Human
auguacuguaguuuuu

SEQ ID NO: 3605039 - RNA, 19 nt, Human
auguacuguauauuacaga

SEQ ID NO: 3605040 - RNA, 22 nt, Human
auguacuuuuauuuuacacaga

SEQ ID NO: 3605041 - RNA, 12 nt, Human
auguagaaagcu

SEQ ID NO: 3605042 - RNA, 13 nt, Human
auguagaagcugc

SEQ ID NO: 3605043 - RNA, 20 nt, Human
auguagaauauucagacaaa

SEQ ID NO: 3605044 - RNA, 18 nt, Human
auguagacaguuggguuu

SEQ ID NO: 3605045 - RNA, 21 nt, Human
auguagacuauauacaugugu

SEQ ID NO: 3605046 - RNA, 13 nt, Human
auguagaggagaa

SEQ ID NO: 3605047 - RNA, 17 nt, Human
auguagaggagaaacug

SEQ ID NO: 3605048 - RNA, 18 nt, Human
auguagaggcuuguuuac

SEQ ID NO: 3605049 - RNA, 21 nt, Human
auguagauauuuggcuuaaau

SEQ ID NO: 3605050 - RNA, 17 nt, Human
auguagauguaugcaca

SEQ ID NO: 3605051 - RNA, 19 nt, Human
auguagauguaugcacaca

SEQ ID NO: 3605052 - RNA, 22 nt, Human
auguagauguaugcacacacau

SEQ ID NO: 3605053 - RNA, 19 nt, Human
auguagauuaaggugaugu

SEQ ID NO: 3605054 - RNA, 16 nt, Human
auguagauuuauuuca

SEQ ID NO: 3605055 - RNA, 17 nt, Human
auguagauuuauuucau

SEQ ID NO: 3605056 - RNA, 20 nt, Human
auguagauuuauuucaucau

SEQ ID NO: 3605057 - RNA, 20 nt, Human
auguagcaaaacgcauggag

SEQ ID NO: 3605058 - RNA, 21 nt, Human
auguagcaaucagauuuuccu

SEQ ID NO: 3605059 - RNA, 16 nt, Human
auguagcacauaaacu

SEQ ID NO: 3605060 - RNA, 18 nt, Human
auguagcauuaugcaauu

SEQ ID NO: 3605061 - RNA, 23 nt, Human
auguagccaugaccuuacauuuc

SEQ ID NO: 3605062 - RNA, 12 nt, Human
auguagccaugg

SEQ ID NO: 3605063 - RNA, 16 nt, Human
auguagccaugggacc

SEQ ID NO: 3605064 - RNA, 16 nt, Human
auguagcccauccuuc

SEQ ID NO: 3605065 - RNA, 18 nt, Human
auguagcccccuggccuc

SEQ ID NO: 3605066 - RNA, 21 nt, Human
auguagcccccuggccucugu

SEQ ID NO: 3605067 - RNA, 16 nt, Human
auguagccuucacaca

SEQ ID NO: 3605068 - RNA, 22 nt, Human
auguagccuucacacagauaga

SEQ ID NO: 3605069 - RNA, 22 nt, Human
auguagccuuuacuguuugaua

SEQ ID NO: 3605070 - RNA, 12 nt, Human
auguagcucuuu

SEQ ID NO: 3605071 - RNA, 15 nt, Human
auguagcugguuucc

SEQ ID NO: 3605072 - RNA, 21 nt, Human
auguaggaaaaaaauagucua

SEQ ID NO: 3605073 - RNA, 14 nt, Human
auguaggaaguagg

SEQ ID NO: 3605074 - RNA, 12 nt, Human
auguaggaggga

SEQ ID NO: 3605075 - RNA, 22 nt, Human
auguaggcuggcuuucagagua

SEQ ID NO: 3605076 - RNA, 21 nt, Human
auguaggugucugcacccagg

SEQ ID NO: 3605077 - RNA, 12 nt, Human
auguaguaacac

SEQ ID NO: 3605078 - RNA, 20 nt, Human
aguagaugcgcagccccauc

SEQ ID NO: 3605079 - RNA, 15 nt, Human
aguagauggugaaau

SEQ ID NO: 3605080 - RNA, 20 nt, Human
aguagauguggccuuugaau

SEQ ID NO: 3605081 - RNA, 21 nt, Human
aguagauguggccuuugaauu

SEQ ID NO: 3605082 - RNA, 17 nt, Human
aguagauguucuacuuu

SEQ ID NO: 3605083 - RNA, 22 nt, Human
aguagauucuggacagucagcu

SEQ ID NO: 3605084 - RNA, 20 nt, Human
aguagauugcagaaaauucu

SEQ ID NO: 3605085 - RNA, 21 nt, Human
aguagcaauuauggaaaaaaa

SEQ ID NO: 3605086 - RNA, 14 nt, Human
aguagcacaggcug

SEQ ID NO: 3605087 - RNA, 21 nt, Human
aguagcacaggcugagugcag

SEQ ID NO: 3605088 - RNA, 22 nt, Human
aguagcacaggcugagugcagg

SEQ ID NO: 3605089 - RNA, 20 nt, Human
aguagcaguagaugcaugua

SEQ ID NO: 3605090 - RNA, 22 nt, Human
aguagcagugauugucuuaaua

SEQ ID NO: 3605091 - RNA, 23 nt, Human
aguagcaugagagaauuguauca

SEQ ID NO: 3605092 - RNA, 20 nt, Human
aguagcauguugagccaggc

SEQ ID NO: 3605093 - RNA, 21 nt, Human
aguagccauguuaacaugaca

SEQ ID NO: 3605094 - RNA, 22 nt, Human
aguagccauguuaacaugacau

SEQ ID NO: 3605095 - RNA, 21 nt, Human
aguagcccuuucugugugcac

SEQ ID NO: 3605096 - RNA, 18 nt, Human
aguagccgagagccugcu

SEQ ID NO: 3605097 - RNA, 22 nt, Human
aguagccuaacacacuccaaga

SEQ ID NO: 3605098 - RNA, 15 nt, Human
aguagcucuccugac

SEQ ID NO: 3605099 - RNA, 22 nt, Human
aguagcugagcucacaaggcag

SEQ ID NO: 3605100 - RNA, 21 nt, Human
aguagcugggacuacaggcac

SEQ ID NO: 3605101 - RNA, 23 nt, Human
aguagcugggauuuuaaacuaga

SEQ ID NO: 3605102 - RNA, 16 nt, Human
aguagcuuaagaaaaa

SEQ ID NO: 3605103 - RNA, 17 nt, Human
aguagcuuaagaaaaaa

SEQ ID NO: 3605104 - RNA, 19 nt, Human
aguagcuugcucccugugu

SEQ ID NO: 3605105 - RNA, 18 nt, Human
aguaggaagacuuuggaa

SEQ ID NO: 3605106 - RNA, 22 nt, Human
aguaggaagacuuuggaaagac

SEQ ID NO: 3605107 - RNA, 22 nt, Human
aguaggauaugccugcucuuug

SEQ ID NO: 3605108 - RNA, 17 nt, Human
aguaggcauuuuuacca

SEQ ID NO: 3605109 - RNA, 21 nt, Human
aguagggaggaccacaggugu

SEQ ID NO: 3605110 - RNA, 18 nt, Human
aguaggggaagacaugca

SEQ ID NO: 3605111 - RNA, 13 nt, Human
aguagggggucua

SEQ ID NO: 3605112 - RNA, 18 nt, Human
aguaggggucugucuuuu

SEQ ID NO: 3605113 - RNA, 20 nt, Human
aguaggggucugucuuuuaa

SEQ ID NO: 3605114 - RNA, 20 nt, Human
aguaggucguuuuaaaaaca

SEQ ID NO: 3605115 - RNA, 18 nt, Human
aguaguaaaaauuaaaaa

SEQ ID NO: 3605116 - RNA, 22 nt, Human
aguaguaccaaaugcuuuaaaa

SEQ ID NO: 3605117 - RNA, 20 nt, Human
aguaguacuucuucuguaau

SEQ ID NO: 3605118 - RNA, 12 nt, Human
aguaguccugug

SEQ ID NO: 3605119 - RNA, 16 nt, Human
aguaguccuuggcaua

SEQ ID NO: 3605120 - RNA, 13 nt, Human
aguagucucugug

SEQ ID NO: 3605121 - RNA, 15 nt, Human
aguagugagaagaau

SEQ ID NO: 3605122 - RNA, 17 nt, Human
aguagugagaagaauau

SEQ ID NO: 3605123 - RNA, 14 nt, Human
aguagugucuggau

SEQ ID NO: 3605124 - RNA, 14 nt, Human
aguaguguuacaug

SEQ ID NO: 3605125 - RNA, 13 nt, Human
aguaguuaucaug

SEQ ID NO: 3605126 - RNA, 15 nt, Human
aguaguuaucauguu

SEQ ID NO: 3605127 - RNA, 12 nt, Human
aguaguucacau

SEQ ID NO: 3605128 - RNA, 19 nt, Human
aguaguucucuugguguua

SEQ ID NO: 3605129 - RNA, 14 nt, Human
aguaguucuguauu

SEQ ID NO: 3605130 - RNA, 15 nt, Human
aguaguucuguauuu

SEQ ID NO: 3605131 - RNA, 18 nt, Human
aguaguucuguauuugaa

SEQ ID NO: 3605132 - RNA, 18 nt, Human
aguaguucuguuuggugu

SEQ ID NO: 3605133 - RNA, 13 nt, Human
aguaguuugcauu

SEQ ID NO: 3605134 - RNA, 15 nt, Human
aguauaaaaacuuga

SEQ ID NO: 3605135 - RNA, 17 nt, Human
aguauaaaauacaacaa

SEQ ID NO: 3605136 - RNA, 16 nt, Human
aguauaaacaaaguua

SEQ ID NO: 3605137 - RNA, 19 nt, Human
aguauaaacaaaguuacua

SEQ ID NO: 3605138 - RNA, 23 nt, Human
aguauaaauuuguguaauauuac

SEQ ID NO: 3605139 - RNA, 14 nt, Human
aguauaauuaacau

SEQ ID NO: 3605140 - RNA, 23 nt, Human
aguauaauuaacauguuaaacca

SEQ ID NO: 3605141 - RNA, 18 nt, Human
aguauaauuuuuuguaau

SEQ ID NO: 3605142 - RNA, 14 nt, Human
aguauacaagauaa

SEQ ID NO: 3605143 - RNA, 18 nt, Human
aguauacaagauaagcuu

SEQ ID NO: 3605144 - RNA, 17 nt, Human
aguauacaauauauaaa

SEQ ID NO: 3605145 - RNA, 23 nt, Human
aguauacaauauauaaaaauaua

SEQ ID NO: 3605146 - RNA, 23 nt, Human
aguauacuagggagccauuugag

SEQ ID NO: 3605147 - RNA, 17 nt, Human
aguauacucuuaggcca

SEQ ID NO: 3605148 - RNA, 12 nt, Human
aguauagaauag

SEQ ID NO: 3605149 - RNA, 14 nt, Human
aguauagagagaag

SEQ ID NO: 3605150 - RNA, 17 nt, Human
aguauagccuauggcag

SEQ ID NO: 3605151 - RNA, 19 nt, Human
aguauauaaugguuucaaa

SEQ ID NO: 3605152 - RNA, 21 nt, Human
aguauaucauguaaagaaaug

SEQ ID NO: 3605153 - RNA, 18 nt, Human
aguauaucuggacaagcc

SEQ ID NO: 3605154 - RNA, 15 nt, Human
aguauauguucccuc

SEQ ID NO: 3605155 - RNA, 16 nt, Human
aguauauuaaaaaugg

SEQ ID NO: 3605156 - RNA, 15 nt, Human
aguauauuauguauu

SEQ ID NO: 3605157 - RNA, 17 nt, Human
aguauauuauguauuua

SEQ ID NO: 3605158 - RNA, 22 nt, Human
aguauauuguugaagagacaga

SEQ ID NO: 3605159 - RNA, 20 nt, Human
aguauauuuuauuucaaugu

SEQ ID NO: 3605160 - RNA, 19 nt, Human
aguaucaaauauuagaugu

SEQ ID NO: 3605161 - RNA, 23 nt, Human
aguaucaaauauuagaugugauu

SEQ ID NO: 3605162 - RNA, 22 nt, Human
aguaucacugucuuuccuagau

SEQ ID NO: 3605163 - RNA, 13 nt, Human
aguaucagaauug

SEQ ID NO: 3605164 - RNA, 18 nt, Human
aguaucagaauugaaaca

SEQ ID NO: 3605165 - RNA, 15 nt, Human
aguaucaggccugcc

SEQ ID NO: 3605166 - RNA, 21 nt, Human
aguaucaguguuuuaaauucu

SEQ ID NO: 3605167 - RNA, 15 nt, Human
aguauccuccagguu

SEQ ID NO: 3605168 - RNA, 17 nt, Human
aguauccuccagguuuu

SEQ ID NO: 3605169 - RNA, 20 nt, Human
aguauccuccagguuuuuca

SEQ ID NO: 3605170 - RNA, 14 nt, Human
aguauccugcuucu

SEQ ID NO: 3605171 - RNA, 16 nt, Human
aguaucuaacauguau

SEQ ID NO: 3605172 - RNA, 19 nt, Human
aguaucuauauauguguau

SEQ ID NO: 3605173 - RNA, 23 nt, Human
aguaucucggaccuuucagcugu

SEQ ID NO: 3605174 - RNA, 18 nt, Human
aguaucucuucagucucu

SEQ ID NO: 3605175 - RNA, 12 nt, Human
aguaucuugaag

SEQ ID NO: 3605176 - RNA, 15 nt, Human
aguaucuugaagacu

SEQ ID NO: 3605177 - RNA, 17 nt, Human
aguaucuuugcacucca

SEQ ID NO: 3605178 - RNA, 16 nt, Human
aguaucuuuuuauuca

SEQ ID NO: 3605179 - RNA, 17 nt, Human
aguaucuuuuuucaaaa

SEQ ID NO: 3605180 - RNA, 13 nt, Human
aguaugaaucuau

SEQ ID NO: 3605181 - RNA, 15 nt, Human
aguaugaaucuaugc

SEQ ID NO: 3605182 - RNA, 17 nt, Human
aguaugaauuauucaau

SEQ ID NO: 3605183 - RNA, 14 nt, Human
aguaugagcccuaa

SEQ ID NO: 3605184 - RNA, 15 nt, Human
aguaugaggcauuug

SEQ ID NO: 3605185 - RNA, 20 nt, Human
aguaugaggcauuuguuuga

SEQ ID NO: 3605186 - RNA, 23 nt, Human
aguaugcuugaaaagauaaauua

SEQ ID NO: 3605187 - RNA, 14 nt, Human
aguauggagcucag

SEQ ID NO: 3605188 - RNA, 16 nt, Human
aguauggccuguguca

SEQ ID NO: 3605189 - RNA, 23 nt, Human
aguaugguaaucuuuaccuguau

SEQ ID NO: 3605190 - RNA, 16 nt, Human
aguaugguacauuuuu

SEQ ID NO: 3605191 - RNA, 22 nt, Human
aguaugguacauuuuucaacuu

SEQ ID NO: 3605192 - RNA, 17 nt, Human
aguaugguggcuggguu

SEQ ID NO: 3605193 - RNA, 15 nt, Human
aguauguaaaguaug

SEQ ID NO: 3605194 - RNA, 14 nt, Human
aguaugucugaugg

SEQ ID NO: 3605195 - RNA, 14 nt, Human
aguaugugccagga

SEQ ID NO: 3605196 - RNA, 17 nt, Human
aguauguggaagugugg

SEQ ID NO: 3605197 - RNA, 23 nt, Human
aguaugugggcagauuuucagca

SEQ ID NO: 3605198 - RNA, 14 nt, Human
aguauguguaaaau

SEQ ID NO: 3605199 - RNA, 16 nt, Human
aguauguuaagcucuu

SEQ ID NO: 3605200 - RNA, 21 nt, Human
aguauguucuaaccuuuacau

SEQ ID NO: 3605201 - RNA, 14 nt, Human
aguauguuuuacuu

SEQ ID NO: 3605202 - RNA, 18 nt, Human
aguauguuuuagcaugug

SEQ ID NO: 3605203 - RNA, 14 nt, Human
aguauuaaaacauu

SEQ ID NO: 3605204 - RNA, 16 nt, Human
aguauuaaaacauugg

SEQ ID NO: 3605205 - RNA, 13 nt, Human
aguauuaaaaugu

SEQ ID NO: 3605206 - RNA, 14 nt, Human
aguauuaaaaugua

SEQ ID NO: 3605207 - RNA, 19 nt, Human
aguauuaaaauguaugcau

SEQ ID NO: 3605208 - RNA, 15 nt, Human
aguauuaaaauuugg

SEQ ID NO: 3605209 - RNA, 20 nt, Human
aguauuaaaggggggagggg

SEQ ID NO: 3605210 - RNA, 17 nt, Human
aguauuacuaaauugac

SEQ ID NO: 3605211 - RNA, 21 nt, Human
aguauuagaauaccacaggaa

SEQ ID NO: 3605212 - RNA, 20 nt, Human
aguauuagacuggaaguuca

SEQ ID NO: 3605213 - RNA, 14 nt, Human
aguauuauauguac

SEQ ID NO: 3605214 - RNA, 14 nt, Human
aguauuauuuucca

SEQ ID NO: 3605215 - RNA, 14 nt, Human
aguauuccaccuua

SEQ ID NO: 3605216 - RNA, 19 nt, Human
aguauucuuauuuaaugaa

SEQ ID NO: 3605217 - RNA, 18 nt, Human
aguauucuugucaaaaaa

SEQ ID NO: 3605218 - RNA, 14 nt, Human
aguauugaagcauu

SEQ ID NO: 3605219 - RNA, 13 nt, Human
aguauugacaaaa

SEQ ID NO: 3605220 - RNA, 19 nt, Human
aguauugacaaaauguuau

SEQ ID NO: 3605221 - RNA, 12 nt, Human
aguauugcaaag

SEQ ID NO: 3605222 - RNA, 16 nt, Human
aguauugcaaagucag

SEQ ID NO: 3605223 - RNA, 22 nt, Human
aguauugcaucuguauaaguaa

SEQ ID NO: 3605224 - RNA, 17 nt, Human
aguauugccaaacauua

SEQ ID NO: 3605225 - RNA, 18 nt, Human
aguauugccaaacauuaa

SEQ ID NO: 3605226 - RNA, 22 nt, Human
aguauugccaaacauuaauguu

SEQ ID NO: 3605227 - RNA, 13 nt, Human
augcuuacugaua

SEQ ID NO: 3605228 - RNA, 22 nt, Human
augcuuacugauauauuuuaca

SEQ ID NO: 3605229 - RNA, 17 nt, Human
augcuuagauguuccag

SEQ ID NO: 3605230 - RNA, 15 nt, Human
augcuuagucacugc

SEQ ID NO: 3605231 - RNA, 23 nt, Human
augcuuagucacugccugcagag

SEQ ID NO: 3605232 - RNA, 19 nt, Human
augcuuaucaucuaaagau

SEQ ID NO: 3605233 - RNA, 10 nt, Human
augcuucaua

SEQ ID NO: 3605234 - RNA, 11 nt, Human
augcuucauac

SEQ ID NO: 3605235 - RNA, 15 nt, Human
augcuucauacaggg

SEQ ID NO: 3605236 - RNA, 20 nt, Human
augcuucaucauucccucuc

SEQ ID NO: 3605237 - RNA, 22 nt, Human
augcuucaucauucccucucau

SEQ ID NO: 3605238 - RNA, 22 nt, Human
augcuuccagaaacacccacag

SEQ ID NO: 3605239 - RNA, 16 nt, Human
augcuuccuagaaguu

SEQ ID NO: 3605240 - RNA, 16 nt, Human
augcuuccugacaauc

SEQ ID NO: 3605241 - RNA, 20 nt, Human
augcuucuaaguaaauacaa

SEQ ID NO: 3605242 - RNA, 22 nt, Human
augcuucuaaguaaauacaauu

SEQ ID NO: 3605243 - RNA, 20 nt, Human
augcuucucacugccaugcc

SEQ ID NO: 3605244 - RNA, 15 nt, Human
augcuucuucucaaa

SEQ ID NO: 3605245 - RNA, 15 nt, Human
augcuugaaaaaugu

SEQ ID NO: 3605246 - RNA, 18 nt, Human
augcuugcauaagagcuu

SEQ ID NO: 3605247 - RNA, 19 nt, Human
augcuugcauauauuucau

SEQ ID NO: 3605248 - RNA, 22 nt, Human
augcuugcggcaaaaggaaagc

SEQ ID NO: 3605249 - RNA, 12 nt, Human
augcuugggaag

SEQ ID NO: 3605250 - RNA, 23 nt, Human
augcuugggaagacuccuagcug

SEQ ID NO: 3605251 - RNA, 12 nt, Human
augcuuguacau

SEQ ID NO: 3605252 - RNA, 13 nt, Human
augcuuguacaua

SEQ ID NO: 3605253 - RNA, 14 nt, Human
augcuuguacauaa

SEQ ID NO: 3605254 - RNA, 18 nt, Human
augcuuuaccaaacagca

SEQ ID NO: 3605255 - RNA, 18 nt, Human
augcuuuagaaagguuuu

SEQ ID NO: 3605256 - RNA, 15 nt, Human
augcuuuagcuuauu

SEQ ID NO: 3605257 - RNA, 18 nt, Human
augcuuuauuuguaaauu

SEQ ID NO: 3605258 - RNA, 15 nt, Human
augcuuuccaaaccu

SEQ ID NO: 3605259 - RNA, 16 nt, Human
augcuuuccauauuuu

SEQ ID NO: 3605260 - RNA, 12 nt, Human
augcuuuccuuc

SEQ ID NO: 3605261 - RNA, 18 nt, Human
augcuuugaaacagaaaa

SEQ ID NO: 3605262 - RNA, 16 nt, Human
augcuuugcuuugucu

SEQ ID NO: 3605263 - RNA, 22 nt, Human
augcuuugugugauugaaucug

SEQ ID NO: 3605264 - RNA, 13 nt, Human
augcuuuugucua

SEQ ID NO: 3605265 - RNA, 23 nt, Human
auggaaaaaaaaaaaagaggaaa

SEQ ID NO: 3605266 - RNA, 17 nt, Human
auggaaaaauaaaacug

SEQ ID NO: 3605267 - RNA, 21 nt, Human
auggaaaacgcucucuacucu

SEQ ID NO: 3605268 - RNA, 15 nt, Human
auggaaaacuuaguu

SEQ ID NO: 3605269 - RNA, 16 nt, Human
auggaaaacuuaguuu

SEQ ID NO: 3605270 - RNA, 14 nt, Human
auggaaaagagaua

SEQ ID NO: 3605271 - RNA, 23 nt, Human
auggaaacaaaguggaaggaaag

SEQ ID NO: 3605272 - RNA, 23 nt, Human
auggaaaccugaaaaaaaguuua

SEQ ID NO: 3605273 - RNA, 16 nt, Human
auggaaacugaaacua

SEQ ID NO: 3605274 - RNA, 14 nt, Human
auggaaacugaaug

SEQ ID NO: 3605275 - RNA, 20 nt, Human
auggaaacuguugccagaga

SEQ ID NO: 3605276 - RNA, 17 nt, Human
auggaaagaaucuaaua

SEQ ID NO: 3605277 - RNA, 22 nt, Human
auggaaaggagaggaaagaacu

SEQ ID NO: 3605278 - RNA, 13 nt, Human
auggaaaggaugg

SEQ ID NO: 3605279 - RNA, 16 nt, Human
auggaaauauauauua

SEQ ID NO: 3605280 - RNA, 20 nt, Human
auggaaaugggcagagcaga

SEQ ID NO: 3605281 - RNA, 13 nt, Human
auggaaauguuua

SEQ ID NO: 3605282 - RNA, 11 nt, Human
auggaacacuc

SEQ ID NO: 3605283 - RNA, 15 nt, Human
auggaacacucugag

SEQ ID NO: 3605284 - RNA, 17 nt, Human
auggaacacucugagac

SEQ ID NO: 3605285 - RNA, 14 nt, Human
auggaacacuucga

SEQ ID NO: 3605286 - RNA, 16 nt, Human
auggaacauaaaauac

SEQ ID NO: 3605287 - RNA, 16 nt, Human
auggaaccgcaggaag

SEQ ID NO: 3605288 - RNA, 17 nt, Human
auggaaccgcaggaagc

SEQ ID NO: 3605289 - RNA, 18 nt, Human
auggaaccgcaggaagcu

SEQ ID NO: 3605290 - RNA, 18 nt, Human
auggaaccugacguagcu

SEQ ID NO: 3605291 - RNA, 23 nt, Human
auggaacgcguugaaauuguaau

SEQ ID NO: 3605292 - RNA, 14 nt, Human
auggaacuuagcca

SEQ ID NO: 3605293 - RNA, 19 nt, Human
auggaacuucuaauauauu

SEQ ID NO: 3605294 - RNA, 19 nt, Human
auggaagacaaaauguuuu

SEQ ID NO: 3605295 - RNA, 16 nt, Human
auggaagacacauuga

SEQ ID NO: 3605296 - RNA, 16 nt, Human
auggaagacagcucuu

SEQ ID NO: 3605297 - RNA, 14 nt, Human
auggaagagagaaa

SEQ ID NO: 3605298 - RNA, 19 nt, Human
auggaagaggcuacagggc

SEQ ID NO: 3605299 - RNA, 16 nt, Human
auggaagauuuuaaau

SEQ ID NO: 3605300 - RNA, 15 nt, Human
auggaauaacaugua

SEQ ID NO: 3605301 - RNA, 15 nt, Human
auggaauacaguguu

SEQ ID NO: 3605302 - RNA, 16 nt, Human
auggaauacaguguua

SEQ ID NO: 3605303 - RNA, 22 nt, Human
auggaauacaguguuauuuucu

SEQ ID NO: 3605304 - RNA, 17 nt, Human
auggaauacucuuauau

SEQ ID NO: 3605305 - RNA, 20 nt, Human
auggaaucuaccaacuguuu

SEQ ID NO: 3605306 - RNA, 13 nt, Human
auggaaugagggu

SEQ ID NO: 3605307 - RNA, 21 nt, Human
auggaaugaugggucaguugu

SEQ ID NO: 3605308 - RNA, 16 nt, Human
auggaaugguuauaaa

SEQ ID NO: 3605309 - RNA, 18 nt, Human
auggaaugguuauaaaag

SEQ ID NO: 3605310 - RNA, 20 nt, Human
auggaaugguuauaaaagug

SEQ ID NO: 3605311 - RNA, 16 nt, Human
auggaauucacaaagu

SEQ ID NO: 3605312 - RNA, 20 nt, Human
auggaauucacaaaguaauu

SEQ ID NO: 3605313 - RNA, 16 nt, Human
auggaauugauuugca

SEQ ID NO: 3605314 - RNA, 19 nt, Human
auggaauugauuugcauug

SEQ ID NO: 3605315 - RNA, 12 nt, Human
auggaauuuaua

SEQ ID NO: 3605316 - RNA, 13 nt, Human
auggacaauggac

SEQ ID NO: 3605317 - RNA, 15 nt, Human
auggacaauggaccg

SEQ ID NO: 3605318 - RNA, 22 nt, Human
auggacaccccuuauccaggac

SEQ ID NO: 3605319 - RNA, 15 nt, Human
auggacacuacaccc

SEQ ID NO: 3605320 - RNA, 13 nt, Human
auggacacuccag

SEQ ID NO: 3605321 - RNA, 17 nt, Human
auggacacuccagugcc

SEQ ID NO: 3605322 - RNA, 14 nt, Human
auggacagauuaau

SEQ ID NO: 3605323 - RNA, 18 nt, Human
auggacagcauugccagu

SEQ ID NO: 3605324 - RNA, 13 nt, Human
auguaaacugcca

SEQ ID NO: 3605325 - RNA, 17 nt, Human
auguaaagaaaugucuu

SEQ ID NO: 3605326 - RNA, 13 nt, Human
auguaaagacaaa

SEQ ID NO: 3605327 - RNA, 21 nt, Human
auguaaagauauuuuuaucuu

SEQ ID NO: 3605328 - RNA, 16 nt, Human
auguaaagcuugucug

SEQ ID NO: 3605329 - RNA, 13 nt, Human
auguaaaguaugu

SEQ ID NO: 3605330 - RNA, 17 nt, Human
auguaaaguauguaaac

SEQ ID NO: 3605331 - RNA, 13 nt, Human
auguaaauaauuc

SEQ ID NO: 3605332 - RNA, 13 nt, Human
auguaaauauuuu

SEQ ID NO: 3605333 - RNA, 23 nt, Human
auguaaauauuuuaaagaauugu

SEQ ID NO: 3605334 - RNA, 14 nt, Human
auguaaaucccauu

SEQ ID NO: 3605335 - RNA, 13 nt, Human
auguaaaugugca

SEQ ID NO: 3605336 - RNA, 23 nt, Human
auguaaauuaccaguaaagugua

SEQ ID NO: 3605337 - RNA, 23 nt, Human
auguaaauuaucaggcaaauuug

SEQ ID NO: 3605338 - RNA, 14 nt, Human
auguaaauuaugua

SEQ ID NO: 3605339 - RNA, 17 nt, Human
auguaaauuuguacuau

SEQ ID NO: 3605340 - RNA, 21 nt, Human
auguaaauuuguacuauuuaa

SEQ ID NO: 3605341 - RNA, 20 nt, Human
auguaaauuuuguaugaaaa

SEQ ID NO: 3605342 - RNA, 13 nt, Human
auguaacagaaag

SEQ ID NO: 3605343 - RNA, 14 nt, Human
auguaacagaaagg

SEQ ID NO: 3605344 - RNA, 14 nt, Human
auguaacuagaauu

SEQ ID NO: 3605345 - RNA, 20 nt, Human
auguaacugcauugagaacu

SEQ ID NO: 3605346 - RNA, 15 nt, Human
auguaacugccuaga

SEQ ID NO: 3605347 - RNA, 13 nt, Human
auguaacugcuga

SEQ ID NO: 3605348 - RNA, 22 nt, Human
auguaacuguccguaguaucag

SEQ ID NO: 3605349 - RNA, 13 nt, Human
auguaacuguuac

SEQ ID NO: 3605350 - RNA, 18 nt, Human
auguaacuguuaccauug

SEQ ID NO: 3605351 - RNA, 23 nt, Human
auguaacuguuaccauuggaaau

SEQ ID NO: 3605352 - RNA, 20 nt, Human
auguaacuuugguuaaaauc

SEQ ID NO: 3605353 - RNA, 13 nt, Human
auguaagaaucau

SEQ ID NO: 3605354 - RNA, 20 nt, Human
auguaagagcaccuuccuca

SEQ ID NO: 3605355 - RNA, 19 nt, Human
auguaagauuauagauucu

SEQ ID NO: 3605356 - RNA, 20 nt, Human
auguaagauuauagauucua

SEQ ID NO: 3605357 - RNA, 19 nt, Human
auguaagcauacuuuguaa

SEQ ID NO: 3605358 - RNA, 16 nt, Human
auguaagcugaaaaua

SEQ ID NO: 3605359 - RNA, 15 nt, Human
auguaagcuguuuau

SEQ ID NO: 3605360 - RNA, 16 nt, Human
auguaagggaaacugc

SEQ ID NO: 3605361 - RNA, 19 nt, Human
auguaagggaaacugccag

SEQ ID NO: 3605362 - RNA, 21 nt, Human
auguaagggaaacugccagca

SEQ ID NO: 3605363 - RNA, 17 nt, Human
auguaaguaaaugucug

SEQ ID NO: 3605364 - RNA, 15 nt, Human
auguaagugggccca

SEQ ID NO: 3605365 - RNA, 18 nt, Human
auguaagugggcccaccc

SEQ ID NO: 3605366 - RNA, 17 nt, Human
auguaauaacugugaag

SEQ ID NO: 3605367 - RNA, 15 nt, Human
auguaaucaauguuu

SEQ ID NO: 3605368 - RNA, 16 nt, Human
auguaaucaauguuuc

SEQ ID NO: 3605369 - RNA, 20 nt, Human
auguaaucucucugcagcug

SEQ ID NO: 3605370 - RNA, 21 nt, Human
auguaaucucucugcagcugc

SEQ ID NO: 3605371 - RNA, 23 nt, Human
auguaaucucucugcagcugccg

SEQ ID NO: 3605372 - RNA, 23 nt, Human
auguaaucugauggcuucuccag

SEQ ID NO: 3605373 - RNA, 19 nt, Human
auguaaucuugaauuguaa

SEQ ID NO: 3605374 - RNA, 20 nt, Human
auguaaugugugguggccuc

SEQ ID NO: 3605375 - RNA, 12 nt, Human
auguaauguuuu

SEQ ID NO: 3605376 - RNA, 19 nt, Human
auguaauuaaacuguuaac

SEQ ID NO: 3605377 - RNA, 17 nt, Human
auguaauuaaguacuau

SEQ ID NO: 3605378 - RNA, 12 nt, Human
auguaauuuaaa

SEQ ID NO: 3605379 - RNA, 21 nt, Human
auguaauuuaggguacuaaau

SEQ ID NO: 3605380 - RNA, 17 nt, Human
auguaauuuguguaaua

SEQ ID NO: 3605381 - RNA, 15 nt, Human
auguaauuuugugua

SEQ ID NO: 3605382 - RNA, 20 nt, Human
auguacaaaaaaaaaacccu

SEQ ID NO: 3605383 - RNA, 21 nt, Human
auguacaaaaucgauuggcuu

SEQ ID NO: 3605384 - RNA, 14 nt, Human
auguacaagaugaa

SEQ ID NO: 3605385 - RNA, 23 nt, Human
auguacaauugugggcauaaacu

SEQ ID NO: 3605386 - RNA, 13 nt, Human
auguacagacaga

SEQ ID NO: 3605387 - RNA, 19 nt, Human
auguacagacauauuuaac

SEQ ID NO: 3605388 - RNA, 20 nt, Human
auguacaggaugcuuugguu

SEQ ID NO: 3605389 - RNA, 15 nt, Human
auguacagucuguca

SEQ ID NO: 3605390 - RNA, 17 nt, Human
auguacagucugucaug

SEQ ID NO: 3605391 - RNA, 11 nt, Human
auguacagugu

SEQ ID NO: 3605392 - RNA, 14 nt, Human
auguacaguguucu

SEQ ID NO: 3605393 - RNA, 20 nt, Human
auguacaguguucuguuuaa

SEQ ID NO: 3605394 - RNA, 17 nt, Human
auguacauguacugauu

SEQ ID NO: 3605395 - RNA, 14 nt, Human
auguacauguauua

SEQ ID NO: 3605396 - RNA, 20 nt, Human
auguacauuuccaaauucac

SEQ ID NO: 3605397 - RNA, 19 nt, Human
auguacauuucugaaauga

SEQ ID NO: 3605398 - RNA, 16 nt, Human
auguacauuuggaacu

SEQ ID NO: 3605399 - RNA, 19 nt, Human
auguaccauaugaucuguu

SEQ ID NO: 3605400 - RNA, 21 nt, Human
auguaccauguacaugaagaa

SEQ ID NO: 3605401 - RNA, 16 nt, Human
auguacccaccgggcc

SEQ ID NO: 3605402 - RNA, 21 nt, Human
auguacccaccgggccacucc

SEQ ID NO: 3605403 - RNA, 14 nt, Human
auguaccuccccug

SEQ ID NO: 3605404 - RNA, 18 nt, Human
auguaccuccccugccuu

SEQ ID NO: 3605405 - RNA, 23 nt, Human
auguaccuccccugccuugcugu

SEQ ID NO: 3605406 - RNA, 21 nt, Human
auguaccucuuuuagucauuu

SEQ ID NO: 3605407 - RNA, 17 nt, Human
auguacgacuugcauac

SEQ ID NO: 3605408 - RNA, 18 nt, Human
auguacggauuuucaguu

SEQ ID NO: 3605409 - RNA, 18 nt, Human
auguacguccagccugcc

SEQ ID NO: 3605410 - RNA, 20 nt, Human
auguacguccagccugcccc

SEQ ID NO: 3605411 - RNA, 14 nt, Human
auguacguuuguau

SEQ ID NO: 3605412 - RNA, 21 nt, Human
auguacguuuguaugugugua

SEQ ID NO: 3605413 - RNA, 15 nt, Human
auguacuaguacugu

SEQ ID NO: 3605414 - RNA, 19 nt, Human
auguacuaguacuguguac

SEQ ID NO: 3605415 - RNA, 18 nt, Human
auguacuaguguucuguu

SEQ ID NO: 3605416 - RNA, 20 nt, Human
auguacuaguguucuguuug

SEQ ID NO: 3605417 - RNA, 18 nt, Human
aguccugugaaugccacu

SEQ ID NO: 3605418 - RNA, 20 nt, Human
aguccugugaaugccacugc

SEQ ID NO: 3605419 - RNA, 21 nt, Human
aguccugugaaugccacugcc

SEQ ID NO: 3605420 - RNA, 13 nt, Human
aguccugugaauu

SEQ ID NO: 3605421 - RNA, 16 nt, Human
aguccugugaauuucu

SEQ ID NO: 3605422 - RNA, 16 nt, Human
aguccuuaccagcaga

SEQ ID NO: 3605423 - RNA, 18 nt, Human
aguccuuaccagcagagc

SEQ ID NO: 3605424 - RNA, 21 nt, Human
aguccuuaccucuuccggaga

SEQ ID NO: 3605425 - RNA, 23 nt, Human
aguccuuaccucuuccggagaug

SEQ ID NO: 3605426 - RNA, 17 nt, Human
aguccuuuauguggaaa

SEQ ID NO: 3605427 - RNA, 20 nt, Human
aguccuuuuacuacagcuau

SEQ ID NO: 3605428 - RNA, 23 nt, Human
aguccuuuuacuacagcuaugaa

SEQ ID NO: 3605429 - RNA, 23 nt, Human
aguccuuuuguaaagugaagaau

SEQ ID NO: 3605430 - RNA, 21 nt, Human
aguccuuuuuuuccaucuuua

SEQ ID NO: 3605431 - RNA, 21 nt, Human
agucgaauuaauagcuuuuau

SEQ ID NO: 3605432 - RNA, 23 nt, Human
agucgauuauuuccaguguucua

SEQ ID NO: 3605433 - RNA, 19 nt, Human
agucgcaucucagugcagg

SEQ ID NO: 3605434 - RNA, 14 nt, Human
agucgcgcugccug

SEQ ID NO: 3605435 - RNA, 18 nt, Human
agucgcgcugccugugug

SEQ ID NO: 3605436 - RNA, 16 nt, Human
agucgcugaggaaaaa

SEQ ID NO: 3605437 - RNA, 18 nt, Human
agucgcugugccacaggc

SEQ ID NO: 3605438 - RNA, 20 nt, Human
agucggaacggagaaaggug

SEQ ID NO: 3605439 - RNA, 12 nt, Human
agucggauuaga

SEQ ID NO: 3605440 - RNA, 15 nt, Human
agucgggggcuggcc

SEQ ID NO: 3605441 - RNA, 20 nt, Human
agucgggggcuggccuagga

SEQ ID NO: 3605442 - RNA, 17 nt, Human
agucguccuuacuccug

SEQ ID NO: 3605443 - RNA, 20 nt, Human
agucguccuuacuccugugg

SEQ ID NO: 3605444 - RNA, 18 nt, Human
agucgucgcacagucucu

SEQ ID NO: 3605445 - RNA, 17 nt, Human
agucgugaccugcuagg

SEQ ID NO: 3605446 - RNA, 18 nt, Human
agucgugagcucuuguga

SEQ ID NO: 3605447 - RNA, 15 nt, Human
agucgugccuguguc

SEQ ID NO: 3605448 - RNA, 18 nt, Human
agucguggagaugucuuc

SEQ ID NO: 3605449 - RNA, 18 nt, Human
agucguggggugugcugg

SEQ ID NO: 3605450 - RNA, 19 nt, Human
agucguggggugugcuggg

SEQ ID NO: 3605451 - RNA, 21 nt, Human
agucguggggugugcugggag

SEQ ID NO: 3605452 - RNA, 14 nt, Human
agucguuuuccaaa

SEQ ID NO: 3605453 - RNA, 20 nt, Human
agucuaaagauggaguuucu

SEQ ID NO: 3605454 - RNA, 21 nt, Human
agucuaaagauggaguuucua

SEQ ID NO: 3605455 - RNA, 22 nt, Human
agucuaaagauggaguuucuaa

SEQ ID NO: 3605456 - RNA, 23 nt, Human
agucuaaagauggaguuucuaag

SEQ ID NO: 3605457 - RNA, 21 nt, Human
agucuaaagcugguuuaaugu

SEQ ID NO: 3605458 - RNA, 13 nt, Human
agucuaaaguuua

SEQ ID NO: 3605459 - RNA, 16 nt, Human
agucuaaauauuuccu

SEQ ID NO: 3605460 - RNA, 20 nt, Human
agucuaaauuuauuauuuaa

SEQ ID NO: 3605461 - RNA, 13 nt, Human
agucuaaccaaau

SEQ ID NO: 3605462 - RNA, 14 nt, Human
agucuaaccaaaug

SEQ ID NO: 3605463 - RNA, 21 nt, Human
agucuaagaacccauggaaaa

SEQ ID NO: 3605464 - RNA, 14 nt, Human
agucuacgcucucc

SEQ ID NO: 3605465 - RNA, 21 nt, Human
agucuacucuuaagccaucuu

SEQ ID NO: 3605466 - RNA, 16 nt, Human
agucuagacuaaaaga

SEQ ID NO: 3605467 - RNA, 18 nt, Human
agucuagauucaaagguu

SEQ ID NO: 3605468 - RNA, 20 nt, Human
agucuagauucaaagguucu

SEQ ID NO: 3605469 - RNA, 23 nt, Human
agucuagcguagugcagcagggc

SEQ ID NO: 3605470 - RNA, 20 nt, Human
agucuaggagcugggaggaa

SEQ ID NO: 3605471 - RNA, 12 nt, Human
agucuaguguag

SEQ ID NO: 3605472 - RNA, 17 nt, Human
agucuaguuccugauga

SEQ ID NO: 3605473 - RNA, 22 nt, Human
agucuaguuccugaugacccag

SEQ ID NO: 3605474 - RNA, 18 nt, Human
agucuauaugaaaaacaa

SEQ ID NO: 3605475 - RNA, 18 nt, Human
agucuaucaaucaacuua

SEQ ID NO: 3605476 - RNA, 23 nt, Human
agucuaucugguauuaaaugcca

SEQ ID NO: 3605477 - RNA, 23 nt, Human
agucuauggccagguaugcaugg

SEQ ID NO: 3605478 - RNA, 14 nt, Human
agucuauucauuau

SEQ ID NO: 3605479 - RNA, 15 nt, Human
agucuauuuacggaa

SEQ ID NO: 3605480 - RNA, 20 nt, Human
agucuauuuacggaacucaa

SEQ ID NO: 3605481 - RNA, 21 nt, Human
agucucaccauuuccccaggg

SEQ ID NO: 3605482 - RNA, 23 nt, Human
agucucaccauuuccccagggca

SEQ ID NO: 3605483 - RNA, 18 nt, Human
agucucacugcuugaacu

SEQ ID NO: 3605484 - RNA, 23 nt, Human
agucucacuguugcccaggcugg

SEQ ID NO: 3605485 - RNA, 13 nt, Human
agucucagcuaag

SEQ ID NO: 3605486 - RNA, 16 nt, Human
agucucaggaaaucaa

SEQ ID NO: 3605487 - RNA, 19 nt, Human
agucucagugaagacuaug

SEQ ID NO: 3605488 - RNA, 19 nt, Human
agucucaguggcuucaucu

SEQ ID NO: 3605489 - RNA, 20 nt, Human
agucucauagguuaaaaaaa

SEQ ID NO: 3605490 - RNA, 19 nt, Human
agucucaugccuugagauc

SEQ ID NO: 3605491 - RNA, 17 nt, Human
agucucauuacuuuuga

SEQ ID NO: 3605492 - RNA, 18 nt, Human
agucucauuacuuuugaa

SEQ ID NO: 3605493 - RNA, 14 nt, Human
agucuccaccagga

SEQ ID NO: 3605494 - RNA, 16 nt, Human
agucuccggccucucc

SEQ ID NO: 3605495 - RNA, 21 nt, Human
agucuccucuuuaaaacaaaa

SEQ ID NO: 3605496 - RNA, 14 nt, Human
agucuccuuccccu

SEQ ID NO: 3605497 - RNA, 17 nt, Human
agucuccuuugcacuga

SEQ ID NO: 3605498 - RNA, 18 nt, Human
agucuccuuugcacugag

SEQ ID NO: 3605499 - RNA, 19 nt, Human
agucuccuuugcacugagg

SEQ ID NO: 3605500 - RNA, 23 nt, Human
agucuccuuugcacugagggcca

SEQ ID NO: 3605501 - RNA, 15 nt, Human
agucucgcucuguca

SEQ ID NO: 3605502 - RNA, 21 nt, Human
agucucgcucuguugcccagg

SEQ ID NO: 3605503 - RNA, 14 nt, Human
agucucuaauucua

SEQ ID NO: 3605504 - RNA, 20 nt, Human
agucucuauaccaauaaagu

SEQ ID NO: 3605505 - RNA, 22 nt, Human
agucucuauaccaauaaaguga

SEQ ID NO: 3605506 - RNA, 18 nt, Human
agucucuaucauuaaagu

SEQ ID NO: 3605507 - RNA, 20 nt, Human
agucucuaucauuaaaguuc

SEQ ID NO: 3605508 - RNA, 12 nt, Human
agucucuauuua

SEQ ID NO: 3605509 - RNA, 20 nt, Human
agucucuauuuaaauucuuu

SEQ ID NO: 3605510 - RNA, 22 nt, Human
agucucuccuguaagccaaaga

SEQ ID NO: 3605511 - RNA, 20 nt, Human
agucucucucucucucuccc

SEQ ID NO: 3605512 - RNA, 16 nt, Human
agucucucuucucucc

SEQ ID NO: 3605513 - RNA, 18 nt, Human
agucucugaagugaaacu

SEQ ID NO: 3605514 - RNA, 21 nt, Human
agucucugagggcuuccuuug

SEQ ID NO: 3605515 - RNA, 12 nt, Human
agucucugcucc

SEQ ID NO: 3605516 - RNA, 16 nt, Human
agucucugcuggccca

SEQ ID NO: 3605517 - RNA, 17 nt, Human
agucucugcuggcccag

SEQ ID NO: 3605518 - RNA, 12 nt, Human
agucucugugaa

SEQ ID NO: 3605519 - RNA, 13 nt, Human
agucucuucucca

SEQ ID NO: 3605520 - RNA, 19 nt, Human
agucucuucuccacuggau

SEQ ID NO: 3605521 - RNA, 21 nt, Human
agucucuucuccacuggaugg

SEQ ID NO: 3605522 - RNA, 17 nt, Human
agucucuuuaaucuuca

SEQ ID NO: 3605523 - RNA, 21 nt, Human
agucucuuuaaucuucaguuu

SEQ ID NO: 3605524 - RNA, 15 nt, Human
agucucuuuucuuua

SEQ ID NO: 3605525 - RNA, 18 nt, Human
agucucuuuuuuacaaag

SEQ ID NO: 3605526 - RNA, 20 nt, Human
agucucuuuuuuuggcccag

SEQ ID NO: 3605527 - RNA, 18 nt, Human
agucugaacagcuguaau

SEQ ID NO: 3605528 - RNA, 20 nt, Human
agucugaaccuauuucuuaa

SEQ ID NO: 3605529 - RNA, 21 nt, Human
agucugaagcagaugcaaaga

SEQ ID NO: 3605530 - RNA, 23 nt, Human
agucugacuuccccgcauuccag

SEQ ID NO: 3605531 - RNA, 23 nt, Human
agucugagagaggccauucuuuc

SEQ ID NO: 3605532 - RNA, 14 nt, Human
agucugagguccug

SEQ ID NO: 3605533 - RNA, 16 nt, Human
agucugagguccugag

SEQ ID NO: 3605534 - RNA, 18 nt, Human
agucugagguccugagca

SEQ ID NO: 3605535 - RNA, 20 nt, Human
agucugagguccugagcacu

SEQ ID NO: 3605536 - RNA, 22 nt, Human
agucugauucccaagcucugcu

SEQ ID NO: 3605537 - RNA, 22 nt, Human
agucugcaaaaugaggaaugua

SEQ ID NO: 3605538 - RNA, 23 nt, Human
agucugcacaugcagcugcaccc

SEQ ID NO: 3605539 - RNA, 14 nt, Human
agucugcauauauu

SEQ ID NO: 3605540 - RNA, 19 nt, Human
agucugccuauccuggcca

SEQ ID NO: 3605541 - RNA, 16 nt, Human
agucugcuauauuuuc

SEQ ID NO: 3605542 - RNA, 17 nt, Human
agucugcuauauuuuca

SEQ ID NO: 3605543 - RNA, 15 nt, Human
agucugcugcccucc

SEQ ID NO: 3605544 - RNA, 16 nt, Human
agucugcugcccucca

SEQ ID NO: 3605545 - RNA, 18 nt, Human
agucuggaaugcaguggu

SEQ ID NO: 3605546 - RNA, 13 nt, Human
agucuggaggggc

SEQ ID NO: 3605547 - RNA, 13 nt, Human
agucuggaguggg

SEQ ID NO: 3605548 - RNA, 20 nt, Human
agucuggauaacuuccacag

SEQ ID NO: 3605549 - RNA, 17 nt, Human
agucuggaucugggacc

SEQ ID NO: 3605550 - RNA, 15 nt, Human
agucuggccaacauc

SEQ ID NO: 3605551 - RNA, 17 nt, Human
agucuggcugagcccug

SEQ ID NO: 3605552 - RNA, 21 nt, Human
agucuguauuuuuaaagcaug

SEQ ID NO: 3605553 - RNA, 13 nt, Human
agucugucaugaa

SEQ ID NO: 3605554 - RNA, 12 nt, Human
agucuguccuug

SEQ ID NO: 3605555 - RNA, 14 nt, Human
agucugucucuguc

SEQ ID NO: 3605556 - RNA, 17 nt, Human
agucugucuucuguaua

SEQ ID NO: 3605557 - RNA, 18 nt, Human
agucugucuucuguauau

SEQ ID NO: 3605558 - RNA, 20 nt, Human
agucugucuucuguauauaa

SEQ ID NO: 3605559 - RNA, 22 nt, Human
agucugucuucuguauauaaau

SEQ ID NO: 3605560 - RNA, 14 nt, Human
agucuguggaucag

SEQ ID NO: 3605561 - RNA, 11 nt, Human
agucuguguga

SEQ ID NO: 3605562 - RNA, 15 nt, Human
agucugugugaaggu

SEQ ID NO: 3605563 - RNA, 18 nt, Human
agucugugugaugaacuu

SEQ ID NO: 3605564 - RNA, 22 nt, Human
agucugugugaugaacuuucuc

SEQ ID NO: 3605565 - RNA, 17 nt, Human
auguuaaagagaaugag

SEQ ID NO: 3605566 - RNA, 15 nt, Human
auguuaaagauguag

SEQ ID NO: 3605567 - RNA, 18 nt, Human
auguuaaagauguagcaa

SEQ ID NO: 3605568 - RNA, 20 nt, Human
auguuaaagauguagcaaac

SEQ ID NO: 3605569 - RNA, 13 nt, Human
auguuaaauaaau

SEQ ID NO: 3605570 - RNA, 14 nt, Human
auguuaaauaaauu

SEQ ID NO: 3605571 - RNA, 16 nt, Human
auguuaaauaaauugu

SEQ ID NO: 3605572 - RNA, 19 nt, Human
auguuaaauaaauuguaua

SEQ ID NO: 3605573 - RNA, 20 nt, Human
auguuaaaucccauucauaa

SEQ ID NO: 3605574 - RNA, 12 nt, Human
auguuaaauuug

SEQ ID NO: 3605575 - RNA, 15 nt, Human
auguuaaauuuguaa

SEQ ID NO: 3605576 - RNA, 17 nt, Human
auguuaaauuuguaagu

SEQ ID NO: 3605577 - RNA, 18 nt, Human
auguuaaauuuguaaguu

SEQ ID NO: 3605578 - RNA, 20 nt, Human
auguuaaauuuguaaguuuc

SEQ ID NO: 3605579 - RNA, 18 nt, Human
auguuaacaaugccuauu

SEQ ID NO: 3605580 - RNA, 12 nt, Human
auguuaacacau

SEQ ID NO: 3605581 - RNA, 16 nt, Human
auguuaacacauuuug

SEQ ID NO: 3605582 - RNA, 18 nt, Human
auguuaaccucaguguca

SEQ ID NO: 3605583 - RNA, 16 nt, Human
auguuaaccucugcuu

SEQ ID NO: 3605584 - RNA, 12 nt, Human
auguuaagcaga

SEQ ID NO: 3605585 - RNA, 13 nt, Human
auguuaagcucuu

SEQ ID NO: 3605586 - RNA, 18 nt, Human
auguuaaggaaacucuua

SEQ ID NO: 3605587 - RNA, 19 nt, Human
auguuaaggaaacucuuau

SEQ ID NO: 3605588 - RNA, 23 nt, Human
auguuaaggaaacucuuaucuca

SEQ ID NO: 3605589 - RNA, 20 nt, Human
auguuaagggaagaauucca

SEQ ID NO: 3605590 - RNA, 17 nt, Human
auguuaaguuacuucac

SEQ ID NO: 3605591 - RNA, 23 nt, Human
auguuaaguuacuucacuuuaau

SEQ ID NO: 3605592 - RNA, 13 nt, Human
auguuaauauuuu

SEQ ID NO: 3605593 - RNA, 23 nt, Human
auguuaauucagcacugauuuca

SEQ ID NO: 3605594 - RNA, 17 nt, Human
auguuaauuuuuuggua

SEQ ID NO: 3605595 - RNA, 20 nt, Human
auguuaauuuuuugguacaa

SEQ ID NO: 3605596 - RNA, 19 nt, Human
auguuacaaaaauaaacua

SEQ ID NO: 3605597 - RNA, 17 nt, Human
auguuacacuaagggug

SEQ ID NO: 3605598 - RNA, 20 nt, Human
auguuacagaaucuaacugg

SEQ ID NO: 3605599 - RNA, 20 nt, Human
auguuacauaagauaaaugu

SEQ ID NO: 3605600 - RNA, 14 nt, Human
auguuacauuguuu

SEQ ID NO: 3605601 - RNA, 21 nt, Human
auguuaccuccuauaaacuua

SEQ ID NO: 3605602 - RNA, 13 nt, Human
auguuacugacca

SEQ ID NO: 3605603 - RNA, 20 nt, Human
auguuacugaucaugcauug

SEQ ID NO: 3605604 - RNA, 14 nt, Human
auguuacugccuua

SEQ ID NO: 3605605 - RNA, 12 nt, Human
auguuagagcac

SEQ ID NO: 3605606 - RNA, 23 nt, Human
auguuagaggaucccucucugga

SEQ ID NO: 3605607 - RNA, 16 nt, Human
auguuagagguuuuaa

SEQ ID NO: 3605608 - RNA, 21 nt, Human
auguuagagguuuuaaaguga

SEQ ID NO: 3605609 - RNA, 15 nt, Human
auguuagcaaagagu

SEQ ID NO: 3605610 - RNA, 12 nt, Human
auguuagccagg

SEQ ID NO: 3605611 - RNA, 19 nt, Human
auguuaggaaaauuucaca

SEQ ID NO: 3605612 - RNA, 15 nt, Human
auguuaggcugggcc

SEQ ID NO: 3605613 - RNA, 15 nt, Human
auguuaguaauaccu

SEQ ID NO: 3605614 - RNA, 21 nt, Human
auguuaguaauaccucuaaua

SEQ ID NO: 3605615 - RNA, 15 nt, Human
auguuagucauuguu

SEQ ID NO: 3605616 - RNA, 18 nt, Human
auguuaguguuuuaagaa

SEQ ID NO: 3605617 - RNA, 22 nt, Human
auguuaguguuuuaagaaaugu

SEQ ID NO: 3605618 - RNA, 21 nt, Human
auguuaguuaccuuauaguua

SEQ ID NO: 3605619 - RNA, 22 nt, Human
auguuauacaaccuucauuuaa

SEQ ID NO: 3605620 - RNA, 15 nt, Human
auguuauagaacuuc

SEQ ID NO: 3605621 - RNA, 17 nt, Human
auguuauauauaaauau

SEQ ID NO: 3605622 - RNA, 18 nt, Human
auguuauauauaaauaua

SEQ ID NO: 3605623 - RNA, 13 nt, Human
auguuauauuuaa

SEQ ID NO: 3605624 - RNA, 22 nt, Human
auguuauauuuaaugcauuaaa

SEQ ID NO: 3605625 - RNA, 14 nt, Human
auguuauauuuuuc

SEQ ID NO: 3605626 - RNA, 16 nt, Human
auguuaucuucucaag

SEQ ID NO: 3605627 - RNA, 22 nt, Human
auguuaucuucucaaguucuaa

SEQ ID NO: 3605628 - RNA, 23 nt, Human
auguuaucuugguguguuaagag

SEQ ID NO: 3605629 - RNA, 24 nt, Human
auguuaugacuauguaaacuacuu

SEQ ID NO: 3605630 - RNA, 23 nt, Human
auguuaugauaaaaaauuuugua

SEQ ID NO: 3605631 - RNA, 18 nt, Human
auguuaugcccagcguuu

SEQ ID NO: 3605632 - RNA, 13 nt, Human
auguuauguauau

SEQ ID NO: 3605633 - RNA, 16 nt, Human
auguuauguauauggu

SEQ ID NO: 3605634 - RNA, 16 nt, Human
auguuauguuuaauaa

SEQ ID NO: 3605635 - RNA, 22 nt, Human
auguuauugaaaaaaauuggca

SEQ ID NO: 3605636 - RNA, 15 nt, Human
auguuauugcauaau

SEQ ID NO: 3605637 - RNA, 13 nt, Human
auguuauuuaaca

SEQ ID NO: 3605638 - RNA, 12 nt, Human
auguuauuuaua

SEQ ID NO: 3605639 - RNA, 20 nt, Human
auguuauuuguuauuuucag

SEQ ID NO: 3605640 - RNA, 18 nt, Human
auguuauuuucuguugaa

SEQ ID NO: 3605641 - RNA, 21 nt, Human
auguuauuuucuguugaaguu

SEQ ID NO: 3605642 - RNA, 19 nt, Human
auguuauuuucuucuaagu

SEQ ID NO: 3605643 - RNA, 17 nt, Human
auguuauuuuuuaauua

SEQ ID NO: 3605644 - RNA, 14 nt, Human
auguucaaagucaa

SEQ ID NO: 3605645 - RNA, 17 nt, Human
auguucacgcaacuuga

SEQ ID NO: 3605646 - RNA, 17 nt, Human
auguucagaagaaauuc

SEQ ID NO: 3605647 - RNA, 14 nt, Human
auguucaguguaau

SEQ ID NO: 3605648 - RNA, 21 nt, Human
auguucaguguaauuucuuug

SEQ ID NO: 3605649 - RNA, 18 nt, Human
auguucaucaaugaauga

SEQ ID NO: 3605650 - RNA, 19 nt, Human
auguucaucaaugaaugaa

SEQ ID NO: 3605651 - RNA, 19 nt, Human
auguucaucccaugaugua

SEQ ID NO: 3605652 - RNA, 21 nt, Human
auguucauuguaauguuacug

SEQ ID NO: 3605653 - RNA, 14 nt, Human
auguuccauuaaac

SEQ ID NO: 3605654 - RNA, 15 nt, Human
auguuccauuaaacg

SEQ ID NO: 3605655 - RNA, 15 nt, Human
auguucccacuucaa

SEQ ID NO: 3605656 - RNA, 15 nt, Human
auguuccuagugaaa

SEQ ID NO: 3605657 - RNA, 17 nt, Human
auguuccuagugaaaga

SEQ ID NO: 3605658 - RNA, 23 nt, Human
auguuccugaauucuauuugcug

SEQ ID NO: 3605659 - RNA, 21 nt, Human
auguucgguuuuuuuccuguu

SEQ ID NO: 3605660 - RNA, 18 nt, Human
auguucuaaggcucugag

SEQ ID NO: 3605661 - RNA, 12 nt, Human
auguucuaaguu

SEQ ID NO: 3605662 - RNA, 15 nt, Human
auguucuaaguuucu

SEQ ID NO: 3605663 - RNA, 16 nt, Human
auguucuaaguuucua

SEQ ID NO: 3605664 - RNA, 20 nt, Human
auguucuaaguuucuaagau

SEQ ID NO: 3605665 - RNA, 20 nt, Human
auguucucuaucauuuaaua

SEQ ID NO: 3605666 - RNA, 16 nt, Human
auguucucucuucucc

SEQ ID NO: 3605667 - RNA, 16 nt, Human
auguucugaauaauuu

SEQ ID NO: 3605668 - RNA, 15 nt, Human
auguucugacauuaa

SEQ ID NO: 3605669 - RNA, 19 nt, Human
auguucugacauuaacagu

SEQ ID NO: 3605670 - RNA, 16 nt, Human
auguucugcccccagc

SEQ ID NO: 3605671 - RNA, 20 nt, Human
auguucugcccccagcccaa

SEQ ID NO: 3605672 - RNA, 11 nt, Human
auguucuggga

SEQ ID NO: 3605673 - RNA, 14 nt, Human
auguucugucccuu

SEQ ID NO: 3605674 - RNA, 21 nt, Human
auguucugugccuguaaacau

SEQ ID NO: 3605675 - RNA, 13 nt, Human
auguucuguuugc

SEQ ID NO: 3605676 - RNA, 17 nt, Human
auguucuguuugcugug

SEQ ID NO: 3605677 - RNA, 14 nt, Human
auguucuuaauucu

SEQ ID NO: 3605678 - RNA, 20 nt, Human
auguucuuaguggauguucu

SEQ ID NO: 3605679 - RNA, 20 nt, Human
auguucuuaugcaaaaugga

SEQ ID NO: 3605680 - RNA, 19 nt, Human
auguucuugcagucaucag

SEQ ID NO: 3605681 - RNA, 12 nt, Human
auguugaaagau

SEQ ID NO: 3605682 - RNA, 18 nt, Human
auguugaaagaucaaaag

SEQ ID NO: 3605683 - RNA, 22 nt, Human
auguugaaauaugauguuaaaa

SEQ ID NO: 3605684 - RNA, 15 nt, Human
auguugaagccuuug

SEQ ID NO: 3605685 - RNA, 14 nt, Human
auguugaauacuuu

SEQ ID NO: 3605686 - RNA, 14 nt, Human
auguugaauucuuu

SEQ ID NO: 3605687 - RNA, 19 nt, Human
auguugacaucacuggcau

SEQ ID NO: 3605688 - RNA, 15 nt, Human
auguugacaugggac

SEQ ID NO: 3605689 - RNA, 16 nt, Human
auguugacauuuguuu

SEQ ID NO: 3605690 - RNA, 16 nt, Human
auguugaccaugucua

SEQ ID NO: 3605691 - RNA, 19 nt, Human
auguugaccaugucuauga

SEQ ID NO: 3605692 - RNA, 23 nt, Human
auguugauccauccagcuugcca

SEQ ID NO: 3605693 - RNA, 21 nt, Human
auguugaugcaauccuuacaa

SEQ ID NO: 3605694 - RNA, 22 nt, Human
auguugaugcaauccuuacaaa

SEQ ID NO: 3605695 - RNA, 18 nt, Human
auguugauuacagugcag

SEQ ID NO: 3605696 - RNA, 13 nt, Human
auguugauuucua

SEQ ID NO: 3605697 - RNA, 20 nt, Human
auguugauuuuuacuguguu

SEQ ID NO: 3605698 - RNA, 23 nt, Human
auguugauuuuuacuguguuuua

SEQ ID NO: 3605699 - RNA, 16 nt, Human
auguugccaaaauggu

SEQ ID NO: 3605700 - RNA, 22 nt, Human
auguugccaguuuaaucauugc

SEQ ID NO: 3605701 - RNA, 16 nt, Human
auguugcccaggcagg

SEQ ID NO: 3605702 - RNA, 17 nt, Human
auguugcuauaauaaag

SEQ ID NO: 3605703 - RNA, 19 nt, Human
auguugcucagucucccuu

SEQ ID NO: 3605704 - RNA, 15 nt, Human
auguugcuggacugu

SEQ ID NO: 3605705 - RNA, 15 nt, Human
auguugcuggaucag

SEQ ID NO: 3605706 - RNA, 20 nt, Human
auguugcugugcacggugga

SEQ ID NO: 3605707 - RNA, 17 nt, Human
auguuggacaccuuuag

SEQ ID NO: 3605708 - RNA, 22 nt, Human
auguuggacaccuuuagguucu

SEQ ID NO: 3605709 - RNA, 16 nt, Human
auguuggauuuauaaa

SEQ ID NO: 3605710 - RNA, 20 nt, Human
auguuggcagaugcagcucu

SEQ ID NO: 3605711 - RNA, 14 nt, Human
auguuggccaggcu

SEQ ID NO: 3605712 - RNA, 15 nt, Human
auguuggccaggcug

SEQ ID NO: 3605713 - RNA, 21 nt, Human
auguuggccaggcugcucuca

SEQ ID NO: 3605714 - RNA, 21 nt, Human
auguacuaguuuuaguuuucu

SEQ ID NO: 3605715 - RNA, 17 nt, Human
auguacuauaacauaga

SEQ ID NO: 3605716 - RNA, 15 nt, Human
auguacugcauuauu

SEQ ID NO: 3605717 - RNA, 20 nt, Human
auguacugcauuauuugaga

SEQ ID NO: 3605718 - RNA, 13 nt, Human
auguacuguacua

SEQ ID NO: 3605719 - RNA, 14 nt, Human
auguacuguacuaa

SEQ ID NO: 3605720 - RNA, 19 nt, Human
auguacuguaguuuuucuu

SEQ ID NO: 3605721 - RNA, 14 nt, Human
auguacuuuuuagu

SEQ ID NO: 3605722 - RNA, 15 nt, Human
auguagagaaaagca

SEQ ID NO: 3605723 - RNA, 19 nt, Human
auguagaggagaaacugga

SEQ ID NO: 3605724 - RNA, 19 nt, Human
auguagaggggaaaagaga

SEQ ID NO: 3605725 - RNA, 22 nt, Human
auguagauauugugaaguacau

SEQ ID NO: 3605726 - RNA, 16 nt, Human
auguagauauuuggcu

SEQ ID NO: 3605727 - RNA, 17 nt, Human
auguagaugugcauuuu

SEQ ID NO: 3605728 - RNA, 22 nt, Human
auguagauuaaggugaugugau

SEQ ID NO: 3605729 - RNA, 17 nt, Human
auguagcaaaacgcaug

SEQ ID NO: 3605730 - RNA, 15 nt, Human
auguagcacauaaac

SEQ ID NO: 3605731 - RNA, 14 nt, Human
auguagcagugagu

SEQ ID NO: 3605732 - RNA, 19 nt, Human
auguagcccccuggccucu

SEQ ID NO: 3605733 - RNA, 23 nt, Human
auguagcccccuggccucugugc

SEQ ID NO: 3605734 - RNA, 16 nt, Human
auguagccuuuacugu

SEQ ID NO: 3605735 - RNA, 19 nt, Human
auguagcgcuuugaauaug

SEQ ID NO: 3605736 - RNA, 13 nt, Human
auguagcguguuu

SEQ ID NO: 3605737 - RNA, 21 nt, Human
auguagcucuuugucagggag

SEQ ID NO: 3605738 - RNA, 19 nt, Human
auguagcuucagucauuaa

SEQ ID NO: 3605739 - RNA, 20 nt, Human
auguagcuucagucauuaaa

SEQ ID NO: 3605740 - RNA, 17 nt, Human
auguaggaaaaaaauag

SEQ ID NO: 3605741 - RNA, 22 nt, Human
auguaggaaagaccauuuuucc

SEQ ID NO: 3605742 - RNA, 17 nt, Human
auguaggcauucuggag

SEQ ID NO: 3605743 - RNA, 20 nt, Human
auguagggcauaaugaugau

SEQ ID NO: 3605744 - RNA, 18 nt, Human
auguagguaagacuguag

SEQ ID NO: 3605745 - RNA, 19 nt, Human
auguagguaagacuguaga

SEQ ID NO: 3605746 - RNA, 17 nt, Human
auguagguaugaauaag

SEQ ID NO: 3605747 - RNA, 15 nt, Human
auguaggugucugca

SEQ ID NO: 3605748 - RNA, 14 nt, Human
auguaguaacacua

SEQ ID NO: 3605749 - RNA, 16 nt, Human
auguaguaacacuaau

SEQ ID NO: 3605750 - RNA, 17 nt, Human
auguaguaauugacaug

SEQ ID NO: 3605751 - RNA, 16 nt, Human
auguaguauaaagaaa

SEQ ID NO: 3605752 - RNA, 17 nt, Human
auguaguauaaagaaaa

SEQ ID NO: 3605753 - RNA, 21 nt, Human
auguaguaucaaauauuagau

SEQ ID NO: 3605754 - RNA, 19 nt, Human
auguaguaucuauaugacu

SEQ ID NO: 3605755 - RNA, 18 nt, Human
auguagugccgcucuugg

SEQ ID NO: 3605756 - RNA, 14 nt, Human
auguaguucauacu

SEQ ID NO: 3605757 - RNA, 20 nt, Human
auguaguuugaggaaauuug

SEQ ID NO: 3605758 - RNA, 20 nt, Human
auguaguuuuuauauguugu

SEQ ID NO: 3605759 - RNA, 20 nt, Human
auguauaaaauacauaguga

SEQ ID NO: 3605760 - RNA, 14 nt, Human
auguauaaauauac

SEQ ID NO: 3605761 - RNA, 19 nt, Human
auguauacuauaguaccag

SEQ ID NO: 3605762 - RNA, 21 nt, Human
auguauacugccacuaaccuu

SEQ ID NO: 3605763 - RNA, 16 nt, Human
auguauaguauuugaa

SEQ ID NO: 3605764 - RNA, 16 nt, Human
auguauaguuuucccu

SEQ ID NO: 3605765 - RNA, 15 nt, Human
auguauauaaaaaug

SEQ ID NO: 3605766 - RNA, 13 nt, Human
auguauauacaca

SEQ ID NO: 3605767 - RNA, 19 nt, Human
auguauauauauauaugca

SEQ ID NO: 3605768 - RNA, 12 nt, Human
auguauauauuu

SEQ ID NO: 3605769 - RNA, 14 nt, Human
auguauauauuuag

SEQ ID NO: 3605770 - RNA, 17 nt, Human
auguauauauuuagugc

SEQ ID NO: 3605771 - RNA, 19 nt, Human
auguauauuuaaaagaaag

SEQ ID NO: 3605772 - RNA, 18 nt, Human
auguauauuuuauauaaa

SEQ ID NO: 3605773 - RNA, 19 nt, Human
auguauauuuuauaucaau

SEQ ID NO: 3605774 - RNA, 21 nt, Human
auguaucauaauuaccaagug

SEQ ID NO: 3605775 - RNA, 20 nt, Human
auguauccaugggggcaggg

SEQ ID NO: 3605776 - RNA, 19 nt, Human
auguaucgggaagauuucu

SEQ ID NO: 3605777 - RNA, 16 nt, Human
auguaucuaagaauaa

SEQ ID NO: 3605778 - RNA, 15 nt, Human
auguaucugagcagg

SEQ ID NO: 3605779 - RNA, 17 nt, Human
auguaucugaguugcca

SEQ ID NO: 3605780 - RNA, 14 nt, Human
auguaucugugaag

SEQ ID NO: 3605781 - RNA, 14 nt, Human
auguaugauuacau

SEQ ID NO: 3605782 - RNA, 14 nt, Human
auguaugcagcuau

SEQ ID NO: 3605783 - RNA, 17 nt, Human
auguaugcauaauaauc

SEQ ID NO: 3605784 - RNA, 14 nt, Human
auguaugcauucac

SEQ ID NO: 3605785 - RNA, 21 nt, Human
auguauggaauacaguguuau

SEQ ID NO: 3605786 - RNA, 16 nt, Human
auguaugugcacuguc

SEQ ID NO: 3605787 - RNA, 12 nt, Human
auguauguguaa

SEQ ID NO: 3605788 - RNA, 15 nt, Human
auguauguguguaug

SEQ ID NO: 3605789 - RNA, 14 nt, Human
auguauguguuuag

SEQ ID NO: 3605790 - RNA, 20 nt, Human
auguauguguuuagaauuga

SEQ ID NO: 3605791 - RNA, 20 nt, Human
auguauguuuacacugucaa

SEQ ID NO: 3605792 - RNA, 18 nt, Human
auguauguuuacauauca

SEQ ID NO: 3605793 - RNA, 16 nt, Human
auguauuaaauuacau

SEQ ID NO: 3605794 - RNA, 23 nt, Human
auguauuaacacuacucaaagca

SEQ ID NO: 3605795 - RNA, 21 nt, Human
auguauuaagcccacaguaua

SEQ ID NO: 3605796 - RNA, 23 nt, Human
auguauuaagcccacaguauauu

SEQ ID NO: 3605797 - RNA, 21 nt, Human
auguauuaauaaauagagcaa

SEQ ID NO: 3605798 - RNA, 16 nt, Human
auguauuaauauucau

SEQ ID NO: 3605799 - RNA, 19 nt, Human
auguauuagugauauuucu

SEQ ID NO: 3605800 - RNA, 21 nt, Human
auguauuagugauauuucucu

SEQ ID NO: 3605801 - RNA, 22 nt, Human
auguauuagugauauuucucua

SEQ ID NO: 3605802 - RNA, 13 nt, Human
auguauuauucug

SEQ ID NO: 3605803 - RNA, 16 nt, Human
auguauuauucugcag

SEQ ID NO: 3605804 - RNA, 17 nt, Human
auguauuauuuauaauu

SEQ ID NO: 3605805 - RNA, 15 nt, Human
auguauuauuucauu

SEQ ID NO: 3605806 - RNA, 22 nt, Human
auguauuauuucauuauguaaa

SEQ ID NO: 3605807 - RNA, 17 nt, Human
auguauugcacauugua

SEQ ID NO: 3605808 - RNA, 13 nt, Human
auguauuggccug

SEQ ID NO: 3605809 - RNA, 21 nt, Human
auguauuguaaacauguguuu

SEQ ID NO: 3605810 - RNA, 15 nt, Human
auguauuguaccuuu

SEQ ID NO: 3605811 - RNA, 21 nt, Human
auguauuuaccaaaaauuuug

SEQ ID NO: 3605812 - RNA, 17 nt, Human
auguauuuauaaauaua

SEQ ID NO: 3605813 - RNA, 13 nt, Human
auguauuuaugua

SEQ ID NO: 3605814 - RNA, 19 nt, Human
auguauuuauuuaaaagau

SEQ ID NO: 3605815 - RNA, 21 nt, Human
auguauuuauuuaaaagauuc

SEQ ID NO: 3605816 - RNA, 22 nt, Human
auguauuuauuuaaaagauuca

SEQ ID NO: 3605817 - RNA, 13 nt, Human
auguauuuguagu

SEQ ID NO: 3605818 - RNA, 19 nt, Human
auguauuuguaguguuauu

SEQ ID NO: 3605819 - RNA, 21 nt, Human
auguauuuguaguguuauugc

SEQ ID NO: 3605820 - RNA, 18 nt, Human
auguauuuguucauguuu

SEQ ID NO: 3605821 - RNA, 14 nt, Human
auguauuuguuugc

SEQ ID NO: 3605822 - RNA, 18 nt, Human
auguauuuuauguuauau

SEQ ID NO: 3605823 - RNA, 23 nt, Human
auguauuuucuucaccucugcua

SEQ ID NO: 3605824 - RNA, 14 nt, Human
auguauuuugugag

SEQ ID NO: 3605825 - RNA, 17 nt, Human
auguauuuugugaguuu

SEQ ID NO: 3605826 - RNA, 15 nt, Human
auguauuuuucuaca

SEQ ID NO: 3605827 - RNA, 17 nt, Human
auguauuuuuguacccu

SEQ ID NO: 3605828 - RNA, 15 nt, Human
augucaaaaguagaa

SEQ ID NO: 3605829 - RNA, 17 nt, Human
augucaaaaguagaacu

SEQ ID NO: 3605830 - RNA, 23 nt, Human
augucaaaaguagaacuuuguau

SEQ ID NO: 3605831 - RNA, 17 nt, Human
augucaaaauuguuuaa

SEQ ID NO: 3605832 - RNA, 20 nt, Human
augucaaagagaaaacuuau

SEQ ID NO: 3605833 - RNA, 23 nt, Human
augucaaauauuuagauguaauu

SEQ ID NO: 3605834 - RNA, 14 nt, Human
augucaaaugugaa

SEQ ID NO: 3605835 - RNA, 15 nt, Human
augucaagaggcuga

SEQ ID NO: 3605836 - RNA, 15 nt, Human
augucaagauucagc

SEQ ID NO: 3605837 - RNA, 16 nt, Human
augucaagauucagcu

SEQ ID NO: 3605838 - RNA, 23 nt, Human
augucaagggcagcuuugcucau

SEQ ID NO: 3605839 - RNA, 22 nt, Human
augucaaggguucaagauuguu

SEQ ID NO: 3605840 - RNA, 20 nt, Human
augucaaggugcuguuguca

SEQ ID NO: 3605841 - RNA, 21 nt, Human
augucaaggugcuguugucau

SEQ ID NO: 3605842 - RNA, 23 nt, Human
augucaauaaacaacagcugaag

SEQ ID NO: 3605843 - RNA, 21 nt, Human
augucaaucagccuaguugau

SEQ ID NO: 3605844 - RNA, 14 nt, Human
augucacaggcagg

SEQ ID NO: 3605845 - RNA, 16 nt, Human
augucacaggcagguc

SEQ ID NO: 3605846 - RNA, 17 nt, Human
augucacaggcaggucc

SEQ ID NO: 3605847 - RNA, 15 nt, Human
augucaccaccuucc

SEQ ID NO: 3605848 - RNA, 16 nt, Human
augucaccaccuuccc

SEQ ID NO: 3605849 - RNA, 16 nt, Human
augucacguacugucu

SEQ ID NO: 3605850 - RNA, 21 nt, Human
augucacguacugucugauug

SEQ ID NO: 3605851 - RNA, 22 nt, Human
augucacuaaagcaggccuuuu

SEQ ID NO: 3605852 - RNA, 18 nt, Human
augucacuucuggauaua

SEQ ID NO: 3605853 - RNA, 15 nt, Human
augucagacacagau

SEQ ID NO: 3605854 - RNA, 16 nt, Human
augucagauacaaugu

SEQ ID NO: 3605855 - RNA, 18 nt, Human
augucagauacaauguau

SEQ ID NO: 3605856 - RNA, 14 nt, Human
augucagauuccuu

SEQ ID NO: 3605857 - RNA, 15 nt, Human
augucagauuccuuu

SEQ ID NO: 3605858 - RNA, 16 nt, Human
augucagauuccuuuc

SEQ ID NO: 3605859 - RNA, 16 nt, Human
augucagcaaaaagca

SEQ ID NO: 3605860 - RNA, 16 nt, Human
augucagcaguugcug

SEQ ID NO: 3605861 - RNA, 23 nt, Human
augucagccgagccgggccuggg

SEQ ID NO: 3605862 - RNA, 17 nt, Human
augucaggaacagaagg

SEQ ID NO: 3605863 - RNA, 19 nt, Human
auguuggccaggcuggucu

SEQ ID NO: 3605864 - RNA, 15 nt, Human
auguugguauuuauc

SEQ ID NO: 3605865 - RNA, 16 nt, Human
auguuggucaggcugg

SEQ ID NO: 3605866 - RNA, 18 nt, Human
auguuggucauuuuaugu

SEQ ID NO: 3605867 - RNA, 14 nt, Human
auguugguuuacuu

SEQ ID NO: 3605868 - RNA, 16 nt, Human
auguugguuuacuuuc

SEQ ID NO: 3605869 - RNA, 22 nt, Human
auguuguaaauuaggaggcuca

SEQ ID NO: 3605870 - RNA, 11 nt, Human
auguuguacaa

SEQ ID NO: 3605871 - RNA, 15 nt, Human
auguuguacaaugua

SEQ ID NO: 3605872 - RNA, 21 nt, Human
auguuguagauacaaucagcu

SEQ ID NO: 3605873 - RNA, 13 nt, Human
auguugucaaaga

SEQ ID NO: 3605874 - RNA, 15 nt, Human
auguugucaaagaga

SEQ ID NO: 3605875 - RNA, 13 nt, Human
auguugucuaaga

SEQ ID NO: 3605876 - RNA, 16 nt, Human
auguugucuaagaaau

SEQ ID NO: 3605877 - RNA, 12 nt, Human
auguugugaaua

SEQ ID NO: 3605878 - RNA, 18 nt, Human
auguugugccucccuggu

SEQ ID NO: 3605879 - RNA, 16 nt, Human
auguuguguucuaaua

SEQ ID NO: 3605880 - RNA, 22 nt, Human
auguuguguuucuguucaccuu

SEQ ID NO: 3605881 - RNA, 15 nt, Human
auguuguguuuuuaa

SEQ ID NO: 3605882 - RNA, 23 nt, Human
auguuguuagagaaaaaugcuuu

SEQ ID NO: 3605883 - RNA, 16 nt, Human
auguuguuaugcuauu

SEQ ID NO: 3605884 - RNA, 16 nt, Human
auguuuaaaaaaguuu

SEQ ID NO: 3605885 - RNA, 14 nt, Human
auguuuaaaacacc

SEQ ID NO: 3605886 - RNA, 21 nt, Human
auguuuaaaacaccuucuaua

SEQ ID NO: 3605887 - RNA, 12 nt, Human
auguuuaaaaua

SEQ ID NO: 3605888 - RNA, 15 nt, Human
auguuuaaaauaaaa

SEQ ID NO: 3605889 - RNA, 14 nt, Human
auguuuaaaccuuu

SEQ ID NO: 3605890 - RNA, 14 nt, Human
auguuuaaaguaau

SEQ ID NO: 3605891 - RNA, 14 nt, Human
auguuuaagcagaa

SEQ ID NO: 3605892 - RNA, 16 nt, Human
auguuuacaaauggac

SEQ ID NO: 3605893 - RNA, 15 nt, Human
auguuuacagaggac

SEQ ID NO: 3605894 - RNA, 15 nt, Human
auguuuaccuuuuaa

SEQ ID NO: 3605895 - RNA, 18 nt, Human
auguuuaccuuuuaauua

SEQ ID NO: 3605896 - RNA, 17 nt, Human
auguuuaguaaucauau

SEQ ID NO: 3605897 - RNA, 15 nt, Human
auguuuauagcauuc

SEQ ID NO: 3605898 - RNA, 17 nt, Human
auguuuauauaaaugcu

SEQ ID NO: 3605899 - RNA, 21 nt, Human
auguuuauauaaaugcuuuua

SEQ ID NO: 3605900 - RNA, 15 nt, Human
auguuuaugaaaaua

SEQ ID NO: 3605901 - RNA, 20 nt, Human
auguuuaugagccagacaaa

SEQ ID NO: 3605902 - RNA, 22 nt, Human
auguuuaugcaaggaaggaaag

SEQ ID NO: 3605903 - RNA, 13 nt, Human
auguuuauguaaa

SEQ ID NO: 3605904 - RNA, 23 nt, Human
auguuuauguaaacaaaucuuuc

SEQ ID NO: 3605905 - RNA, 20 nt, Human
auguuuauuaaaugcuucau

SEQ ID NO: 3605906 - RNA, 22 nt, Human
auguuuauuacaguauaauuaa

SEQ ID NO: 3605907 - RNA, 23 nt, Human
auguuuauuacaguauaauuaac

SEQ ID NO: 3605908 - RNA, 18 nt, Human
auguuuauuccugauaau

SEQ ID NO: 3605909 - RNA, 12 nt, Human
auguuucaaacu

SEQ ID NO: 3605910 - RNA, 17 nt, Human
auguuucaaacuuugga

SEQ ID NO: 3605911 - RNA, 17 nt, Human
auguuucacaaggucuu

SEQ ID NO: 3605912 - RNA, 21 nt, Human
auguuucacauaaaaccucau

SEQ ID NO: 3605913 - RNA, 19 nt, Human
auguuucacgaaguuuguu

SEQ ID NO: 3605914 - RNA, 13 nt, Human
auguuuccagcag

SEQ ID NO: 3605915 - RNA, 20 nt, Human
auguuuccagcauucccagg

SEQ ID NO: 3605916 - RNA, 14 nt, Human
auguuuccucuagu

SEQ ID NO: 3605917 - RNA, 15 nt, Human
auguuuccuucccuc

SEQ ID NO: 3605918 - RNA, 20 nt, Human
auguuucgugaaguauacug

SEQ ID NO: 3605919 - RNA, 23 nt, Human
auguuucgugaaguauacuguau

SEQ ID NO: 3605920 - RNA, 13 nt, Human
auguuucuaucug

SEQ ID NO: 3605921 - RNA, 23 nt, Human
auguuucugcaguagucucugug

SEQ ID NO: 3605922 - RNA, 20 nt, Human
auguuucuggguccugaaga

SEQ ID NO: 3605923 - RNA, 18 nt, Human
auguuucuuaaaugggcu

SEQ ID NO: 3605924 - RNA, 14 nt, Human
auguuucuuaacua

SEQ ID NO: 3605925 - RNA, 13 nt, Human
auguuugaauaug

SEQ ID NO: 3605926 - RNA, 21 nt, Human
auguuugauagauuuucugcu

SEQ ID NO: 3605927 - RNA, 22 nt, Human
auguuugcaccuuucuaguuga

SEQ ID NO: 3605928 - RNA, 19 nt, Human
auguuugccucugccucug

SEQ ID NO: 3605929 - RNA, 16 nt, Human
auguuugcucagaaca

SEQ ID NO: 3605930 - RNA, 23 nt, Human
auguuugcucuuguuuuuauuaa

SEQ ID NO: 3605931 - RNA, 16 nt, Human
auguuuggcauguaaa

SEQ ID NO: 3605932 - RNA, 18 nt, Human
auguuuggugaacuauau

SEQ ID NO: 3605933 - RNA, 18 nt, Human
auguuuguacaagauugu

SEQ ID NO: 3605934 - RNA, 16 nt, Human
auguuuguggccucag

SEQ ID NO: 3605935 - RNA, 21 nt, Human
auguuuuaaacauagaaaguu

SEQ ID NO: 3605936 - RNA, 13 nt, Human
auguuuuaaagaa

SEQ ID NO: 3605937 - RNA, 14 nt, Human
auguuuuaaaugua

SEQ ID NO: 3605938 - RNA, 18 nt, Human
auguuuuaaauguacaga

SEQ ID NO: 3605939 - RNA, 16 nt, Human
auguuuuaacaaaaac

SEQ ID NO: 3605940 - RNA, 14 nt, Human
auguuuuaauucca

SEQ ID NO: 3605941 - RNA, 16 nt, Human
auguuuuaauuccaug

SEQ ID NO: 3605942 - RNA, 16 nt, Human
auguuuuacugugaaa

SEQ ID NO: 3605943 - RNA, 23 nt, Human
auguuuuagacaaauacucaugu

SEQ ID NO: 3605944 - RNA, 14 nt, Human
auguuuuagaguua

SEQ ID NO: 3605945 - RNA, 15 nt, Human
auguuuuauuucauu

SEQ ID NO: 3605946 - RNA, 18 nt, Human
auguuuucaaauguucuc

SEQ ID NO: 3605947 - RNA, 21 nt, Human
auguuuucaggcuagauguau

SEQ ID NO: 3605948 - RNA, 14 nt, Human
auguuuuccaugag

SEQ ID NO: 3605949 - RNA, 17 nt, Human
auguuuuccuugccaaa

SEQ ID NO: 3605950 - RNA, 18 nt, Human
auguuuucgaaaaucaaa

SEQ ID NO: 3605951 - RNA, 20 nt, Human
auguuuucgaaaaucaaaug

SEQ ID NO: 3605952 - RNA, 23 nt, Human
auguuuucgaaaaucaaauggua

SEQ ID NO: 3605953 - RNA, 17 nt, Human
auguuuucuuugcaaag

SEQ ID NO: 3605954 - RNA, 18 nt, Human
auguuuucuuugcaaagu

SEQ ID NO: 3605955 - RNA, 22 nt, Human
auguuuugauaaaguaguaaaa

SEQ ID NO: 3605956 - RNA, 23 nt, Human
auguuuugcauguaaaagccuag

SEQ ID NO: 3605957 - RNA, 17 nt, Human
auguuuugguaucuguu

SEQ ID NO: 3605958 - RNA, 22 nt, Human
auguuuugguccacuuuuccag

SEQ ID NO: 3605959 - RNA, 11 nt, Human
auguuuuggug

SEQ ID NO: 3605960 - RNA, 15 nt, Human
auguuuuguaaacau

SEQ ID NO: 3605961 - RNA, 16 nt, Human
auguuuuguaaacauu

SEQ ID NO: 3605962 - RNA, 17 nt, Human
auguuuuguaaacauuu

SEQ ID NO: 3605963 - RNA, 14 nt, Human
auguuuuguauaca

SEQ ID NO: 3605964 - RNA, 15 nt, Human
auguuuuguauacaa

SEQ ID NO: 3605965 - RNA, 22 nt, Human
auguuuuguauacaaauauauu

SEQ ID NO: 3605966 - RNA, 17 nt, Human
auguuuuguuucugaaa

SEQ ID NO: 3605967 - RNA, 21 nt, Human
auguuuuguuucugaaaauuc

SEQ ID NO: 3605968 - RNA, 13 nt, Human
auguuuuuaaaau

SEQ ID NO: 3605969 - RNA, 15 nt, Human
auguuuuuaaaaucu

SEQ ID NO: 3605970 - RNA, 23 nt, Human
auguuuuuaaaaucuuauuaaag

SEQ ID NO: 3605971 - RNA, 12 nt, Human
auguuuuuaaug

SEQ ID NO: 3605972 - RNA, 16 nt, Human
auguuuuuaauguaua

SEQ ID NO: 3605973 - RNA, 12 nt, Human
auguuuuuauac

SEQ ID NO: 3605974 - RNA, 15 nt, Human
auguuuuuauacaaa

SEQ ID NO: 3605975 - RNA, 16 nt, Human
auguuuuucuaaagga

SEQ ID NO: 3605976 - RNA, 21 nt, Human
auguuuuucugccagggagcu

SEQ ID NO: 3605977 - RNA, 19 nt, Human
auguuuuuguucaaagcca

SEQ ID NO: 3605978 - RNA, 22 nt, Human
auguuuuuuagaucaaauacuu

SEQ ID NO: 3605979 - RNA, 15 nt, Human
auguuuuuucaugug

SEQ ID NO: 3605980 - RNA, 19 nt, Human
auguuuuuugccacagcuu

SEQ ID NO: 3605981 - RNA, 21 nt, Human
auguuuuuugccacagcuuuu

SEQ ID NO: 3605982 - RNA, 15 nt, Human
auguuuuuuuuuaaa

SEQ ID NO: 3605983 - RNA, 20 nt, Human
auuaaaaaaaaagaucuguu

SEQ ID NO: 3605984 - RNA, 15 nt, Human
auuaaaaaaaacaaa

SEQ ID NO: 3605985 - RNA, 13 nt, Human
auuaaaaaagaga

SEQ ID NO: 3605986 - RNA, 16 nt, Human
auuaaaaaagagacau

SEQ ID NO: 3605987 - RNA, 15 nt, Human
auuaaaaaagauaaa

SEQ ID NO: 3605988 - RNA, 18 nt, Human
auuaaaaaagcauacuuc

SEQ ID NO: 3605989 - RNA, 19 nt, Human
auuaaaaaagcauacuucu

SEQ ID NO: 3605990 - RNA, 12 nt, Human
auuaaaaaauuu

SEQ ID NO: 3605991 - RNA, 17 nt, Human
auuaaaaacuaguaguu

SEQ ID NO: 3605992 - RNA, 14 nt, Human
auuaaaaacugagu

SEQ ID NO: 3605993 - RNA, 14 nt, Human
auuaaaaagucuuu

SEQ ID NO: 3605994 - RNA, 23 nt, Human
auuaaaaagucuuuuaaaaagua

SEQ ID NO: 3605995 - RNA, 17 nt, Human
auuaaaaaguuaaucuu

SEQ ID NO: 3605996 - RNA, 15 nt, Human
auuaaaaauauaaaa

SEQ ID NO: 3605997 - RNA, 16 nt, Human
auuaaaaauauaaaac

SEQ ID NO: 3605998 - RNA, 15 nt, Human
auuaaaaaucucaaa

SEQ ID NO: 3605999 - RNA, 19 nt, Human
auuaaaaaucucaaauuuc

SEQ ID NO: 3606000 - RNA, 14 nt, Human
auuaaaaaugguaa

SEQ ID NO: 3606001 - RNA, 23 nt, Human
auuaaaaaugguaaaauugcaug

SEQ ID NO: 3606002 - RNA, 13 nt, Human
auuaaaaauuaua

SEQ ID NO: 3606003 - RNA, 11 nt, Human
auuaaaacaau

SEQ ID NO: 3606004 - RNA, 19 nt, Human
auuaaaacacaacaucuuu

SEQ ID NO: 3606005 - RNA, 21 nt, Human
auuaaaaccugggauuauaua

SEQ ID NO: 3606006 - RNA, 16 nt, Human
auuaaaacuaaauuuc

SEQ ID NO: 3606007 - RNA, 19 nt, Human
auuaaaacugaagucugaa

SEQ ID NO: 3606008 - RNA, 12 nt, Human
auuaaaacugcu

SEQ ID NO: 3606009 - RNA, 14 nt, Human
auuaaaacugcuuu

SEQ ID NO: 3606010 - RNA, 20 nt, Human
auuaaaacuucuuaaauauc

SEQ ID NO: 3606011 - RNA, 14 nt, Human
auuaaaagaauauc

SEQ ID NO: 3606012 - RNA, 16 nt, Human
auuaaaagaauaucug

SEQ ID NO: 3606013 - RNA, 16 nt, Human
auuaaaagaauauuuu

SEQ ID NO: 3606014 - RNA, 21 nt, Human
agucuguguucaaaaauauau

SEQ ID NO: 3606015 - RNA, 16 nt, Human
agucuguugauuaaag

SEQ ID NO: 3606016 - RNA, 17 nt, Human
agucuguuuuaugacuu

SEQ ID NO: 3606017 - RNA, 18 nt, Human
agucuguuuuaugacuuc

SEQ ID NO: 3606018 - RNA, 16 nt, Human
agucuguuuuguaaag

SEQ ID NO: 3606019 - RNA, 13 nt, Human
agucuuaaaauaa

SEQ ID NO: 3606020 - RNA, 17 nt, Human
agucuuaaaauaacuua

SEQ ID NO: 3606021 - RNA, 23 nt, Human
agucuuaaaauaacuuauaucau

SEQ ID NO: 3606022 - RNA, 21 nt, Human
agucuuaaggacaaagugcca

SEQ ID NO: 3606023 - RNA, 22 nt, Human
agucuuaauauauauauccaga

SEQ ID NO: 3606024 - RNA, 18 nt, Human
agucuuacucuguugcca

SEQ ID NO: 3606025 - RNA, 24 nt, Human
agucuuagacuugaaauacuacuu

SEQ ID NO: 3606026 - RNA, 19 nt, Human
agucuuagaucauaguuuu

SEQ ID NO: 3606027 - RNA, 20 nt, Human
agucuuagaucauaguuuua

SEQ ID NO: 3606028 - RNA, 13 nt, Human
agucuuagaugua

SEQ ID NO: 3606029 - RNA, 14 nt, Human
agucuuagauguau

SEQ ID NO: 3606030 - RNA, 16 nt, Human
agucuuaucaagcagc

SEQ ID NO: 3606031 - RNA, 19 nt, Human
agucuucacucucugaaga

SEQ ID NO: 3606032 - RNA, 18 nt, Human
agucuucaguuugcagag

SEQ ID NO: 3606033 - RNA, 15 nt, Human
agucuucaugaaaug

SEQ ID NO: 3606034 - RNA, 17 nt, Human
agucuucaugaaaugcu

SEQ ID NO: 3606035 - RNA, 23 nt, Human
agucuucaugaaaugcuauguca

SEQ ID NO: 3606036 - RNA, 19 nt, Human
agucuucccuagggcuggg

SEQ ID NO: 3606037 - RNA, 15 nt, Human
agucuuccugacacu

SEQ ID NO: 3606038 - RNA, 18 nt, Human
agucuuccugacacuuua

SEQ ID NO: 3606039 - RNA, 12 nt, Human
agucuucucaua

SEQ ID NO: 3606040 - RNA, 18 nt, Human
agucuucucauagcauua

SEQ ID NO: 3606041 - RNA, 16 nt, Human
agucuugcagcaggau

SEQ ID NO: 3606042 - RNA, 14 nt, Human
agucuugcagcuga

SEQ ID NO: 3606043 - RNA, 15 nt, Human
agucuuggcggcagc

SEQ ID NO: 3606044 - RNA, 21 nt, Human
agucuuggcggcagcagccau

SEQ ID NO: 3606045 - RNA, 17 nt, Human
agucuugguuucucucu

SEQ ID NO: 3606046 - RNA, 10 nt, Human
agucuuguau

SEQ ID NO: 3606047 - RNA, 11 nt, Human
agucuuguaua

SEQ ID NO: 3606048 - RNA, 15 nt, Human
agucuuguauaacua

SEQ ID NO: 3606049 - RNA, 20 nt, Human
agucuugucucagauuuuau

SEQ ID NO: 3606050 - RNA, 21 nt, Human
agucuugucucagauuuuauu

SEQ ID NO: 3606051 - RNA, 22 nt, Human
agucuugugacuagugcugaag

SEQ ID NO: 3606052 - RNA, 12 nt, Human
agucuugugcuu

SEQ ID NO: 3606053 - RNA, 15 nt, Human
agucuugugcuuuuc

SEQ ID NO: 3606054 - RNA, 20 nt, Human
agucuuucacaguaccaucu

SEQ ID NO: 3606055 - RNA, 16 nt, Human
agucuuucacauuuaa

SEQ ID NO: 3606056 - RNA, 15 nt, Human
agucuuucaugugug

SEQ ID NO: 3606057 - RNA, 17 nt, Human
agucuuucaugugugcc

SEQ ID NO: 3606058 - RNA, 14 nt, Human
agucuuugaagcug

SEQ ID NO: 3606059 - RNA, 21 nt, Human
agucuuugaagcugaaaauau

SEQ ID NO: 3606060 - RNA, 17 nt, Human
agucuuugccagucauu

SEQ ID NO: 3606061 - RNA, 22 nt, Human
agucuuugccagucauucagca

SEQ ID NO: 3606062 - RNA, 17 nt, Human
agucuuuggaacccuaa

SEQ ID NO: 3606063 - RNA, 18 nt, Human
agucuuugguucuaagga

SEQ ID NO: 3606064 - RNA, 23 nt, Human
agucuuuguaaguaaacugcccu

SEQ ID NO: 3606065 - RNA, 18 nt, Human
agucuuuuaaaaaguauu

SEQ ID NO: 3606066 - RNA, 12 nt, Human
agucuuuugcuu

SEQ ID NO: 3606067 - RNA, 14 nt, Human
agucuuuugcuuuu

SEQ ID NO: 3606068 - RNA, 20 nt, Human
agucuuuugcuuuuggcaaa

SEQ ID NO: 3606069 - RNA, 17 nt, Human
agucuuuuucuguugua

SEQ ID NO: 3606070 - RNA, 16 nt, Human
agucuuuuuuuuccug

SEQ ID NO: 3606071 - RNA, 14 nt, Human
agugaaaaagaugu

SEQ ID NO: 3606072 - RNA, 15 nt, Human
agugaaaauugucuu

SEQ ID NO: 3606073 - RNA, 19 nt, Human
agugaaaccuuuagggcag

SEQ ID NO: 3606074 - RNA, 13 nt, Human
agugaaacugcuu

SEQ ID NO: 3606075 - RNA, 16 nt, Human
agugaaagaggcagcu

SEQ ID NO: 3606076 - RNA, 20 nt, Human
agugaaaggaagauaaacgu

SEQ ID NO: 3606077 - RNA, 19 nt, Human
agugaaagugaggaaauaa

SEQ ID NO: 3606078 - RNA, 19 nt, Human
agugaaauaacaaaaugga

SEQ ID NO: 3606079 - RNA, 14 nt, Human
agugaaauaauaga

SEQ ID NO: 3606080 - RNA, 18 nt, Human
agugaaauaccauuauua

SEQ ID NO: 3606081 - RNA, 17 nt, Human
agugaaauuauuuugga

SEQ ID NO: 3606082 - RNA, 13 nt, Human
agugaaauuuauu

SEQ ID NO: 3606083 - RNA, 16 nt, Human
agugaacacuagccag

SEQ ID NO: 3606084 - RNA, 20 nt, Human
agugaacauaauucuuauua

SEQ ID NO: 3606085 - RNA, 22 nt, Human
agugaaccaaagagacuggagc

SEQ ID NO: 3606086 - RNA, 23 nt, Human
agugaaccaaagagacuggagca

SEQ ID NO: 3606087 - RNA, 17 nt, Human
agugaaccuaccuucau

SEQ ID NO: 3606088 - RNA, 22 nt, Human
agugaagaauacuucucauuuu

SEQ ID NO: 3606089 - RNA, 17 nt, Human
agugaagaauccuuuug

SEQ ID NO: 3606090 - RNA, 12 nt, Human
agugaagacaga

SEQ ID NO: 3606091 - RNA, 21 nt, Human
agugaagacuagaaaauuaga

SEQ ID NO: 3606092 - RNA, 17 nt, Human
agugaagacuccagaaa

SEQ ID NO: 3606093 - RNA, 14 nt, Human
agugaagaggggca

SEQ ID NO: 3606094 - RNA, 15 nt, Human
agugaagaggggcag

SEQ ID NO: 3606095 - RNA, 22 nt, Human
agugaagccagcugcaggaauc

SEQ ID NO: 3606096 - RNA, 17 nt, Human
agugaagugagaaguuc

SEQ ID NO: 3606097 - RNA, 16 nt, Human
agugaaguugcugcuu

SEQ ID NO: 3606098 - RNA, 23 nt, Human
agugaaguugcugcuucucccag

SEQ ID NO: 3606099 - RNA, 12 nt, Human
agugaauaaacu

SEQ ID NO: 3606100 - RNA, 14 nt, Human
agugaauaaauguc

SEQ ID NO: 3606101 - RNA, 13 nt, Human
agugaaugauuca

SEQ ID NO: 3606102 - RNA, 17 nt, Human
agugaaugauucagugu

SEQ ID NO: 3606103 - RNA, 19 nt, Human
agugaaugauucaguguua

SEQ ID NO: 3606104 - RNA, 20 nt, Human
agugaauuaguuuuaaaaug

SEQ ID NO: 3606105 - RNA, 20 nt, Human
agugaauucuugaaggaaaa

SEQ ID NO: 3606106 - RNA, 21 nt, Human
agugaauugugaccaaguuau

SEQ ID NO: 3606107 - RNA, 19 nt, Human
agugaauuugggcugcugu

SEQ ID NO: 3606108 - RNA, 23 nt, Human
agugaauuuuucucuaacucaga

SEQ ID NO: 3606109 - RNA, 14 nt, Human
agugaauuuuugca

SEQ ID NO: 3606110 - RNA, 15 nt, Human
agugaauuuuugcaa

SEQ ID NO: 3606111 - RNA, 22 nt, Human
agugaauuuuugcaauaaugca

SEQ ID NO: 3606112 - RNA, 13 nt, Human
agugacaaaccau

SEQ ID NO: 3606113 - RNA, 23 nt, Human
agugacaaggccccagagacuca

SEQ ID NO: 3606114 - RNA, 13 nt, Human
agugacacagcag

SEQ ID NO: 3606115 - RNA, 17 nt, Human
agugacacagcagcuuc

SEQ ID NO: 3606116 - RNA, 23 nt, Human
agugacacuucagagagcuggua

SEQ ID NO: 3606117 - RNA, 14 nt, Human
agugacagaggcag

SEQ ID NO: 3606118 - RNA, 19 nt, Human
agugacagaggcagcccca

SEQ ID NO: 3606119 - RNA, 15 nt, Human
agugacagaguucac

SEQ ID NO: 3606120 - RNA, 12 nt, Human
agugacagcuag

SEQ ID NO: 3606121 - RNA, 20 nt, Human
agugacagcuaggaugugca

SEQ ID NO: 3606122 - RNA, 16 nt, Human
agugacagggaagcua

SEQ ID NO: 3606123 - RNA, 23 nt, Human
agugacagggaagcuacagguua

SEQ ID NO: 3606124 - RNA, 18 nt, Human
agugaccauugcaugccg

SEQ ID NO: 3606125 - RNA, 18 nt, Human
agugacccggaggccaca

SEQ ID NO: 3606126 - RNA, 19 nt, Human
agugacccggaggccacau

SEQ ID NO: 3606127 - RNA, 21 nt, Human
agugacccuucccaaucagca

SEQ ID NO: 3606128 - RNA, 17 nt, Human
agugaccucagcuuuga

SEQ ID NO: 3606129 - RNA, 13 nt, Human
agugaccucucuc

SEQ ID NO: 3606130 - RNA, 14 nt, Human
agugaccugaggaa

SEQ ID NO: 3606131 - RNA, 15 nt, Human
agugaccugaggaag

SEQ ID NO: 3606132 - RNA, 22 nt, Human
agugaccuggaaggcccagcac

SEQ ID NO: 3606133 - RNA, 14 nt, Human
agugacgguuccua

SEQ ID NO: 3606134 - RNA, 20 nt, Human
agugacgguuccuacacagg

SEQ ID NO: 3606135 - RNA, 23 nt, Human
agugacgguuccuacacaggaca

SEQ ID NO: 3606136 - RNA, 22 nt, Human
agugacuaaaccauugugcauu

SEQ ID NO: 3606137 - RNA, 15 nt, Human
agugacuaauggcau

SEQ ID NO: 3606138 - RNA, 17 nt, Human
agugacuaauggcauga

SEQ ID NO: 3606139 - RNA, 18 nt, Human
agugacucauccucuuga

SEQ ID NO: 3606140 - RNA, 14 nt, Human
agugacucgagggu

SEQ ID NO: 3606141 - RNA, 19 nt, Human
agugacucgggcuccugug

SEQ ID NO: 3606142 - RNA, 15 nt, Human
agugacucuccaggg

SEQ ID NO: 3606143 - RNA, 18 nt, Human
agugacuguaucugugua

SEQ ID NO: 3606144 - RNA, 12 nt, Human
agugacuucuga

SEQ ID NO: 3606145 - RNA, 15 nt, Human
agugacuucugagau

SEQ ID NO: 3606146 - RNA, 20 nt, Human
agugacuuuucaaguauuua

SEQ ID NO: 3606147 - RNA, 17 nt, Human
agugagaaaacugugac

SEQ ID NO: 3606148 - RNA, 16 nt, Human
agugagaaaaugaaca

SEQ ID NO: 3606149 - RNA, 17 nt, Human
agugagaagaauauugu

SEQ ID NO: 3606150 - RNA, 19 nt, Human
agugagaagaauauuguuc

SEQ ID NO: 3606151 - RNA, 16 nt, Human
agugagaagcuuugcc

SEQ ID NO: 3606152 - RNA, 17 nt, Human
agugagaauaggcagcc

SEQ ID NO: 3606153 - RNA, 19 nt, Human
agugagacaaaauuuuagu

SEQ ID NO: 3606154 - RNA, 18 nt, Human
agugagaccccugucucc

SEQ ID NO: 3606155 - RNA, 17 nt, Human
agugagacccugucucu

SEQ ID NO: 3606156 - RNA, 22 nt, Human
agugagacuggggccacuacau

SEQ ID NO: 3606157 - RNA, 12 nt, Human
agugagaggcug

SEQ ID NO: 3606158 - RNA, 13 nt, Human
agugagagggcau

SEQ ID NO: 3606159 - RNA, 17 nt, Human
agugagaggggaggcca

SEQ ID NO: 3606160 - RNA, 19 nt, Human
agugagaggggaggccaag

SEQ ID NO: 3606161 - RNA, 22 nt, Human
agugagauagcauugugaacug

SEQ ID NO: 3606162 - RNA, 14 nt, Human
agugagaugaggga

SEQ ID NO: 3606163 - RNA, 22 nt, Human
agugagcacuaaggugugcucu

SEQ ID NO: 3606164 - RNA, 19 nt, Human
augucaggaacagaaggau

SEQ ID NO: 3606165 - RNA, 23 nt, Human
augucaggggcggggagggugac

SEQ ID NO: 3606166 - RNA, 13 nt, Human
augucaguaugug

SEQ ID NO: 3606167 - RNA, 14 nt, Human
augucaguaugugg

SEQ ID NO: 3606168 - RNA, 13 nt, Human
augucaguauuuc

SEQ ID NO: 3606169 - RNA, 16 nt, Human
augucaguauuucaac

SEQ ID NO: 3606170 - RNA, 16 nt, Human
augucaguauuucagu

SEQ ID NO: 3606171 - RNA, 24 nt, Human
augucaguauuucaguguaguuaa

SEQ ID NO: 3606172 - RNA, 15 nt, Human
augucagugugacug

SEQ ID NO: 3606173 - RNA, 21 nt, Human
augucagugugacugaucucu

SEQ ID NO: 3606174 - RNA, 17 nt, Human
augucaguuguuauuua

SEQ ID NO: 3606175 - RNA, 14 nt, Human
augucauaaaguga

SEQ ID NO: 3606176 - RNA, 13 nt, Human
augucauacagag

SEQ ID NO: 3606177 - RNA, 17 nt, Human
augucauacagagaagu

SEQ ID NO: 3606178 - RNA, 18 nt, Human
augucauacagagaaguc

SEQ ID NO: 3606179 - RNA, 22 nt, Human
augucauauacugccauguacu

SEQ ID NO: 3606180 - RNA, 22 nt, Human
augucaucacucuagguuuuac

SEQ ID NO: 3606181 - RNA, 16 nt, Human
auguccaaagaggcug

SEQ ID NO: 3606182 - RNA, 22 nt, Human
auguccaaagaggcugccccuc

SEQ ID NO: 3606183 - RNA, 23 nt, Human
auguccaagaagcccaggaaagg

SEQ ID NO: 3606184 - RNA, 16 nt, Human
auguccacuguguaua

SEQ ID NO: 3606185 - RNA, 12 nt, Human
auguccagaaga

SEQ ID NO: 3606186 - RNA, 22 nt, Human
auguccagcaccuugugccugg

SEQ ID NO: 3606187 - RNA, 18 nt, Human
auguccaucagaugacaa

SEQ ID NO: 3606188 - RNA, 16 nt, Human
auguccccaaaccugc

SEQ ID NO: 3606189 - RNA, 18 nt, Human
auguccccaaaccugcaa

SEQ ID NO: 3606190 - RNA, 17 nt, Human
augucccugggccaggg

SEQ ID NO: 3606191 - RNA, 21 nt, Human
augucccuucacauaguuuuu

SEQ ID NO: 3606192 - RNA, 17 nt, Human
augucccuuucuucucc

SEQ ID NO: 3606193 - RNA, 19 nt, Human
auguccuauauuggcuaaa

SEQ ID NO: 3606194 - RNA, 16 nt, Human
auguccuccagaagcc

SEQ ID NO: 3606195 - RNA, 20 nt, Human
auguccugccuauuaucugu

SEQ ID NO: 3606196 - RNA, 22 nt, Human
auguccugccuauuaucuguca

SEQ ID NO: 3606197 - RNA, 20 nt, Human
auguccugugagauguguau

SEQ ID NO: 3606198 - RNA, 13 nt, Human
auguccuguguca

SEQ ID NO: 3606199 - RNA, 20 nt, Human
auguccugugucaguuuaug

SEQ ID NO: 3606200 - RNA, 19 nt, Human
augucguggacacacacag

SEQ ID NO: 3606201 - RNA, 12 nt, Human
augucuaaaauu

SEQ ID NO: 3606202 - RNA, 13 nt, Human
augucuaaagagc

SEQ ID NO: 3606203 - RNA, 17 nt, Human
augucuauuaaggugau

SEQ ID NO: 3606204 - RNA, 16 nt, Human
augucuauucagcuuc

SEQ ID NO: 3606205 - RNA, 15 nt, Human
augucuauuuaagcc

SEQ ID NO: 3606206 - RNA, 20 nt, Human
augucucaauaguaaaagau

SEQ ID NO: 3606207 - RNA, 18 nt, Human
augucucacugagcacug

SEQ ID NO: 3606208 - RNA, 18 nt, Human
augucuccuaagcaccug

SEQ ID NO: 3606209 - RNA, 15 nt, Human
augucucgcuaguga

SEQ ID NO: 3606210 - RNA, 17 nt, Human
augucucucagaauucu

SEQ ID NO: 3606211 - RNA, 13 nt, Human
augucugaacuuu

SEQ ID NO: 3606212 - RNA, 22 nt, Human
augucugagugaaccuguauaa

SEQ ID NO: 3606213 - RNA, 14 nt, Human
augucugcagcccu

SEQ ID NO: 3606214 - RNA, 19 nt, Human
augucugcagugugccccc

SEQ ID NO: 3606215 - RNA, 14 nt, Human
augucugcauuucg

SEQ ID NO: 3606216 - RNA, 13 nt, Human
augucugccaauu

SEQ ID NO: 3606217 - RNA, 21 nt, Human
augucugccaauuuuugccuu

SEQ ID NO: 3606218 - RNA, 15 nt, Human
augucugccauguug

SEQ ID NO: 3606219 - RNA, 20 nt, Human
augucugcugaauaauaaac

SEQ ID NO: 3606220 - RNA, 12 nt, Human
augucuggagac

SEQ ID NO: 3606221 - RNA, 13 nt, Human
augucuggagacc

SEQ ID NO: 3606222 - RNA, 18 nt, Human
augucuggagaccaccag

SEQ ID NO: 3606223 - RNA, 23 nt, Human
augucuggagaccaccagggcau

SEQ ID NO: 3606224 - RNA, 14 nt, Human
augucugguucuca

SEQ ID NO: 3606225 - RNA, 16 nt, Human
augucugguucucaau

SEQ ID NO: 3606226 - RNA, 17 nt, Human
augucugguucucaauu

SEQ ID NO: 3606227 - RNA, 19 nt, Human
augucugguucucaauucc

SEQ ID NO: 3606228 - RNA, 19 nt, Human
augucuguaucacucugug

SEQ ID NO: 3606229 - RNA, 11 nt, Human
augucugugcu

SEQ ID NO: 3606230 - RNA, 16 nt, Human
augucuguggccuugu

SEQ ID NO: 3606231 - RNA, 13 nt, Human
augucuguuacca

SEQ ID NO: 3606232 - RNA, 23 nt, Human
augucuguuaccaugucacugug

SEQ ID NO: 3606233 - RNA, 14 nt, Human
augucuguuuaaga

SEQ ID NO: 3606234 - RNA, 24 nt, Human
augucuguuugcugauggucuggu

SEQ ID NO: 3606235 - RNA, 18 nt, Human
augucuuaaugaaguuug

SEQ ID NO: 3606236 - RNA, 21 nt, Human
augucuuaaugaaguuugaau

SEQ ID NO: 3606237 - RNA, 17 nt, Human
augucuuaauuuuugaa

SEQ ID NO: 3606238 - RNA, 16 nt, Human
augucuucaaggcuuc

SEQ ID NO: 3606239 - RNA, 20 nt, Human
augucuucaaggcuucaguc

SEQ ID NO: 3606240 - RNA, 19 nt, Human
augucuucauaaaguacuu

SEQ ID NO: 3606241 - RNA, 20 nt, Human
augucuucguacaguucuuc

SEQ ID NO: 3606242 - RNA, 22 nt, Human
augucuucucacaagccagcca

SEQ ID NO: 3606243 - RNA, 12 nt, Human
augucuucugcc

SEQ ID NO: 3606244 - RNA, 19 nt, Human
augucuucugccuguuaua

SEQ ID NO: 3606245 - RNA, 20 nt, Human
augucuugcuguugacauau

SEQ ID NO: 3606246 - RNA, 20 nt, Human
augucuuggacacuguacaa

SEQ ID NO: 3606247 - RNA, 19 nt, Human
augucuuggguaggcggga

SEQ ID NO: 3606248 - RNA, 15 nt, Human
augucuugguacuug

SEQ ID NO: 3606249 - RNA, 18 nt, Human
augucuugguacuugcug

SEQ ID NO: 3606250 - RNA, 23 nt, Human
augucuugguacuugcugcuauu

SEQ ID NO: 3606251 - RNA, 14 nt, Human
augucuuguacaug

SEQ ID NO: 3606252 - RNA, 22 nt, Human
augucuuguacauguguagccu

SEQ ID NO: 3606253 - RNA, 18 nt, Human
augucuuguuaauauucu

SEQ ID NO: 3606254 - RNA, 21 nt, Human
augucuuguuaauauucuuuc

SEQ ID NO: 3606255 - RNA, 12 nt, Human
augucuuuguaa

SEQ ID NO: 3606256 - RNA, 13 nt, Human
augucuuuguaag

SEQ ID NO: 3606257 - RNA, 13 nt, Human
augucuuuuaaaa

SEQ ID NO: 3606258 - RNA, 14 nt, Human
augucuuuuaaaau

SEQ ID NO: 3606259 - RNA, 14 nt, Human
augucuuuuauagu

SEQ ID NO: 3606260 - RNA, 22 nt, Human
augucuuuuauauuuguaucga

SEQ ID NO: 3606261 - RNA, 15 nt, Human
augucuuuuuauuaa

SEQ ID NO: 3606262 - RNA, 22 nt, Human
augucuuuuuuuuaaugugcug

SEQ ID NO: 3606263 - RNA, 14 nt, Human
augugaaacauguu

SEQ ID NO: 3606264 - RNA, 13 nt, Human
augugaaaccuuu

SEQ ID NO: 3606265 - RNA, 18 nt, Human
augugaaaccuuuuuuaa

SEQ ID NO: 3606266 - RNA, 19 nt, Human
augugaaaccuuuuuuaag

SEQ ID NO: 3606267 - RNA, 20 nt, Human
augugaaaccuuuuuuaaga

SEQ ID NO: 3606268 - RNA, 21 nt, Human
augugaaaccuuuuuuaagau

SEQ ID NO: 3606269 - RNA, 22 nt, Human
augugaaacuggauuaaacuua

SEQ ID NO: 3606270 - RNA, 17 nt, Human
augugaaaucauucauu

SEQ ID NO: 3606271 - RNA, 23 nt, Human
augugaaauuuacaucauuucuu

SEQ ID NO: 3606272 - RNA, 16 nt, Human
augugaacccgggacg

SEQ ID NO: 3606273 - RNA, 13 nt, Human
augugaacuugua

SEQ ID NO: 3606274 - RNA, 23 nt, Human
augugaacuuguagcuguaaaac

SEQ ID NO: 3606275 - RNA, 21 nt, Human
augugaagccaauucagacag

SEQ ID NO: 3606276 - RNA, 13 nt, Human
augugaagccuuc

SEQ ID NO: 3606277 - RNA, 17 nt, Human
augugaagccuuccccu

SEQ ID NO: 3606278 - RNA, 21 nt, Human
augugaagucaccaguggccu

SEQ ID NO: 3606279 - RNA, 14 nt, Human
augugaaguguuaa

SEQ ID NO: 3606280 - RNA, 16 nt, Human
augugaaguguuaaua

SEQ ID NO: 3606281 - RNA, 12 nt, Human
augugaaucaga

SEQ ID NO: 3606282 - RNA, 21 nt, Human
augugaaucagacccuacccc

SEQ ID NO: 3606283 - RNA, 16 nt, Human
augugaauuacuaacu

SEQ ID NO: 3606284 - RNA, 21 nt, Human
augugaauuauugacacugaa

SEQ ID NO: 3606285 - RNA, 23 nt, Human
augugaauuguuaguuucugagu

SEQ ID NO: 3606286 - RNA, 14 nt, Human
augugaauuuuuaa

SEQ ID NO: 3606287 - RNA, 18 nt, Human
augugaauuuuuaagcug

SEQ ID NO: 3606288 - RNA, 19 nt, Human
augugaauuuuuaagcugc

SEQ ID NO: 3606289 - RNA, 14 nt, Human
augugacaguggcg

SEQ ID NO: 3606290 - RNA, 23 nt, Human
augugacauucuuaaaaaaagaa

SEQ ID NO: 3606291 - RNA, 11 nt, Human
augugacauuu

SEQ ID NO: 3606292 - RNA, 14 nt, Human
augugacauuuguc

SEQ ID NO: 3606293 - RNA, 15 nt, Human
augugacauuuguca

SEQ ID NO: 3606294 - RNA, 22 nt, Human
augugacauuugucauuuucau

SEQ ID NO: 3606295 - RNA, 19 nt, Human
augugaccacucugucuug

SEQ ID NO: 3606296 - RNA, 16 nt, Human
augugaccauaaugua

SEQ ID NO: 3606297 - RNA, 12 nt, Human
augugacccucc

SEQ ID NO: 3606298 - RNA, 14 nt, Human
augugacccuccaa

SEQ ID NO: 3606299 - RNA, 12 nt, Human
augugacucuga

SEQ ID NO: 3606300 - RNA, 13 nt, Human
augugacucugaa

SEQ ID NO: 3606301 - RNA, 14 nt, Human
augugacucuggcu

SEQ ID NO: 3606302 - RNA, 21 nt, Human
augugacucuuuccaaccggc

SEQ ID NO: 3606303 - RNA, 14 nt, Human
augugacuguauaa

SEQ ID NO: 3606304 - RNA, 21 nt, Human
augugacuuugaaaauauaua

SEQ ID NO: 3606305 - RNA, 13 nt, Human
augugagaccauu

SEQ ID NO: 3606306 - RNA, 23 nt, Human
augugagcugcugccaugaacug

SEQ ID NO: 3606307 - RNA, 20 nt, Human
augugagugacgaugaugua

SEQ ID NO: 3606308 - RNA, 16 nt, Human
augugagugguugaau

SEQ ID NO: 3606309 - RNA, 22 nt, Human
augugaguuuggucuggacuga

SEQ ID NO: 3606310 - RNA, 20 nt, Human
augugauaaggaaaucaacu

SEQ ID NO: 3606311 - RNA, 19 nt, Human
augugauauaaacagcuuc

SEQ ID NO: 3606312 - RNA, 17 nt, Human
augugauauauaagugu

SEQ ID NO: 3606313 - RNA, 22 nt, Human
augugauauauaaguguacaua

SEQ ID NO: 3606314 - RNA, 14 nt, Human
auuaaaagaauuuu

SEQ ID NO: 3606315 - RNA, 13 nt, Human
auuaaaagcaggc

SEQ ID NO: 3606316 - RNA, 16 nt, Human
auuaaaaggauaguau

SEQ ID NO: 3606317 - RNA, 22 nt, Human
auuaaaagggauuacccaagca

SEQ ID NO: 3606318 - RNA, 23 nt, Human
auuaaaagucacaauguucuuua

SEQ ID NO: 3606319 - RNA, 12 nt, Human
auuaaaauaugc

SEQ ID NO: 3606320 - RNA, 20 nt, Human
auuaaaauaugcacuaaguc

SEQ ID NO: 3606321 - RNA, 23 nt, Human
auuaaaauaugcacuaagucucu

SEQ ID NO: 3606322 - RNA, 14 nt, Human
auuaaaauccucaa

SEQ ID NO: 3606323 - RNA, 11 nt, Human
auuaaaaucuu

SEQ ID NO: 3606324 - RNA, 18 nt, Human
auuaaaaugauuguaaaa

SEQ ID NO: 3606325 - RNA, 21 nt, Human
auuaaaaugcuuacauuugaa

SEQ ID NO: 3606326 - RNA, 14 nt, Human
auuaaaaugcuucc

SEQ ID NO: 3606327 - RNA, 13 nt, Human
auuaaaauggaug

SEQ ID NO: 3606328 - RNA, 23 nt, Human
auuaaaauguaugcauguugucu

SEQ ID NO: 3606329 - RNA, 20 nt, Human
auuaaacaaaguuucagagu

SEQ ID NO: 3606330 - RNA, 12 nt, Human
auuaaacagaug

SEQ ID NO: 3606331 - RNA, 21 nt, Human
auuaaacagaugaugagaauu

SEQ ID NO: 3606332 - RNA, 23 nt, Human
auuaaacaugacuccauagaccu

SEQ ID NO: 3606333 - RNA, 22 nt, Human
auuaaaccugucuccacugugc

SEQ ID NO: 3606334 - RNA, 15 nt, Human
auuaaacgauuuuua

SEQ ID NO: 3606335 - RNA, 21 nt, Human
auuaaacguaugcaugugaag

SEQ ID NO: 3606336 - RNA, 23 nt, Human
auuaaacucuucacaaaaucugu

SEQ ID NO: 3606337 - RNA, 19 nt, Human
auuaaacugcgaagucaag

SEQ ID NO: 3606338 - RNA, 13 nt, Human
auuaaacuuauga

SEQ ID NO: 3606339 - RNA, 15 nt, Human
auuaaacuuaugaau

SEQ ID NO: 3606340 - RNA, 18 nt, Human
auuaaacuucauauguaa

SEQ ID NO: 3606341 - RNA, 17 nt, Human
auuaaacuuccaaagaa

SEQ ID NO: 3606342 - RNA, 15 nt, Human
auuaaacuuccuucu

SEQ ID NO: 3606343 - RNA, 16 nt, Human
auuaaagaagaccuga

SEQ ID NO: 3606344 - RNA, 21 nt, Human
auuaaagaagaccugagaaug

SEQ ID NO: 3606345 - RNA, 22 nt, Human
auuaaagaagaccugagaaugu

SEQ ID NO: 3606346 - RNA, 12 nt, Human
auuaaagaauau

SEQ ID NO: 3606347 - RNA, 22 nt, Human
auuaaagacaggagacaaaaga

SEQ ID NO: 3606348 - RNA, 15 nt, Human
auuaaagcauuuacu

SEQ ID NO: 3606349 - RNA, 11 nt, Human
auuaaagccau

SEQ ID NO: 3606350 - RNA, 21 nt, Human
auuaaagccauguuuauuaca

SEQ ID NO: 3606351 - RNA, 16 nt, Human
auuaaagccuuuagua

SEQ ID NO: 3606352 - RNA, 16 nt, Human
auuaaagucugaauca

SEQ ID NO: 3606353 - RNA, 13 nt, Human
auuaaagugccca

SEQ ID NO: 3606354 - RNA, 18 nt, Human
auuaaagugcuaagguuc

SEQ ID NO: 3606355 - RNA, 22 nt, Human
auuaaagugcuaagguucuaag

SEQ ID NO: 3606356 - RNA, 17 nt, Human
auuaaaguguccauuga

SEQ ID NO: 3606357 - RNA, 23 nt, Human
auuaaaguguccauugacaugua

SEQ ID NO: 3606358 - RNA, 13 nt, Human
auuaaaguuucaa

SEQ ID NO: 3606359 - RNA, 15 nt, Human
auuaaaguuucaaaa

SEQ ID NO: 3606360 - RNA, 19 nt, Human
auuaaaguuucaaaaaucu

SEQ ID NO: 3606361 - RNA, 13 nt, Human
auuaaauaaaauc

SEQ ID NO: 3606362 - RNA, 14 nt, Human
auuaaauaaaauca

SEQ ID NO: 3606363 - RNA, 21 nt, Human
auuaaauaaaaucaauuuuua

SEQ ID NO: 3606364 - RNA, 17 nt, Human
auuaaauaagauucuaa

SEQ ID NO: 3606365 - RNA, 19 nt, Human
auuaaauaagauucuaacg

SEQ ID NO: 3606366 - RNA, 19 nt, Human
auuaaauacaaaacuucca

SEQ ID NO: 3606367 - RNA, 12 nt, Human
auuaaauacaua

SEQ ID NO: 3606368 - RNA, 11 nt, Human
auuaaauagcu

SEQ ID NO: 3606369 - RNA, 15 nt, Human
auuaaauauaauaug

SEQ ID NO: 3606370 - RNA, 14 nt, Human
auuaaauauagauu

SEQ ID NO: 3606371 - RNA, 16 nt, Human
auuaaauauauguaug

SEQ ID NO: 3606372 - RNA, 17 nt, Human
auuaaauauauguaugu

SEQ ID NO: 3606373 - RNA, 18 nt, Human
auuaaauauauguaugua

SEQ ID NO: 3606374 - RNA, 21 nt, Human
auuaaauauauguauguaaaa

SEQ ID NO: 3606375 - RNA, 22 nt, Human
auuaaauauguuagcaaagagu

SEQ ID NO: 3606376 - RNA, 15 nt, Human
auuaaaugacacuca

SEQ ID NO: 3606377 - RNA, 12 nt, Human
auuaaaugacuc

SEQ ID NO: 3606378 - RNA, 13 nt, Human
auuaaaugacucu

SEQ ID NO: 3606379 - RNA, 14 nt, Human
auuaaaugacucuu

SEQ ID NO: 3606380 - RNA, 17 nt, Human
auuaaaugacucuuccc

SEQ ID NO: 3606381 - RNA, 14 nt, Human
auuaaaugcccagc

SEQ ID NO: 3606382 - RNA, 14 nt, Human
auuaaauguagcuu

SEQ ID NO: 3606383 - RNA, 22 nt, Human
auuaaauguagcuucagucauu

SEQ ID NO: 3606384 - RNA, 17 nt, Human
auuaaauuacauuugua

SEQ ID NO: 3606385 - RNA, 22 nt, Human
auuaaauuacuauagcaaagua

SEQ ID NO: 3606386 - RNA, 18 nt, Human
auuaaauuaggaauaaau

SEQ ID NO: 3606387 - RNA, 15 nt, Human
auuaaauuggaaagc

SEQ ID NO: 3606388 - RNA, 20 nt, Human
auuaaauuuuuuaaaaagca

SEQ ID NO: 3606389 - RNA, 17 nt, Human
auuaaauuuuuuguuga

SEQ ID NO: 3606390 - RNA, 18 nt, Human
auuaaauuuuuuuguaug

SEQ ID NO: 3606391 - RNA, 19 nt, Human
auuaaauuuuuuuguauga

SEQ ID NO: 3606392 - RNA, 18 nt, Human
auuaacaaaauguauguc

SEQ ID NO: 3606393 - RNA, 19 nt, Human
auuaacaaaauguaugucu

SEQ ID NO: 3606394 - RNA, 20 nt, Human
auuaacaaauaugcuaauuu

SEQ ID NO: 3606395 - RNA, 19 nt, Human
auuaacaauuaggcagacu

SEQ ID NO: 3606396 - RNA, 13 nt, Human
auuaacacaaagg

SEQ ID NO: 3606397 - RNA, 19 nt, Human
auuaacacuacucaaagca

SEQ ID NO: 3606398 - RNA, 21 nt, Human
auuaacaguuuuccaugaaaa

SEQ ID NO: 3606399 - RNA, 24 nt, Human
auuaacauaccuaagaaguacauu

SEQ ID NO: 3606400 - RNA, 14 nt, Human
auuaacauauaaua

SEQ ID NO: 3606401 - RNA, 18 nt, Human
auuaacauauaauauaug

SEQ ID NO: 3606402 - RNA, 20 nt, Human
auuaacauauaauauauguu

SEQ ID NO: 3606403 - RNA, 13 nt, Human
auuaacauguuaa

SEQ ID NO: 3606404 - RNA, 15 nt, Human
auuaacauguuaaac

SEQ ID NO: 3606405 - RNA, 22 nt, Human
auuaacauugggaaaucuuaua

SEQ ID NO: 3606406 - RNA, 17 nt, Human
auuaaccaaaaaaguua

SEQ ID NO: 3606407 - RNA, 18 nt, Human
auuaaccagaaauccagu

SEQ ID NO: 3606408 - RNA, 15 nt, Human
auuaaccauagaugu

SEQ ID NO: 3606409 - RNA, 21 nt, Human
auuaacccacuagcucuuguu

SEQ ID NO: 3606410 - RNA, 13 nt, Human
auuaaccucugca

SEQ ID NO: 3606411 - RNA, 16 nt, Human
auuaaccuggugcugg

SEQ ID NO: 3606412 - RNA, 17 nt, Human
auuaaccuggugcugga

SEQ ID NO: 3606413 - RNA, 17 nt, Human
auuaaccuuacuaauua

SEQ ID NO: 3606414 - RNA, 14 nt, Human
auuaacugaaacau

SEQ ID NO: 3606415 - RNA, 14 nt, Human
auuaacuuaauaau

SEQ ID NO: 3606416 - RNA, 19 nt, Human
auuaacuuacccuguauau

SEQ ID NO: 3606417 - RNA, 17 nt, Human
auuaacuuauuuagaga

SEQ ID NO: 3606418 - RNA, 12 nt, Human
auuaacuuuuau

SEQ ID NO: 3606419 - RNA, 20 nt, Human
auuaagaaaaucauauugcu

SEQ ID NO: 3606420 - RNA, 14 nt, Human
auuaagaaagacua

SEQ ID NO: 3606421 - RNA, 13 nt, Human
auuaagaaaggaa

SEQ ID NO: 3606422 - RNA, 15 nt, Human
auuaagaaggcaaaa

SEQ ID NO: 3606423 - RNA, 22 nt, Human
auuaagaaggcaaaaauguaaa

SEQ ID NO: 3606424 - RNA, 22 nt, Human
auuaagaaugaaauacuguuug

SEQ ID NO: 3606425 - RNA, 15 nt, Human
auuaagaaugaucug

SEQ ID NO: 3606426 - RNA, 23 nt, Human
auuaagaaugaucugauugaccg

SEQ ID NO: 3606427 - RNA, 21 nt, Human
auuaagaauguugguuuacuu

SEQ ID NO: 3606428 - RNA, 18 nt, Human
auuaagagguaagacuua

SEQ ID NO: 3606429 - RNA, 15 nt, Human
auuaagauacaaauu

SEQ ID NO: 3606430 - RNA, 16 nt, Human
auuaagauacaaauua

SEQ ID NO: 3606431 - RNA, 15 nt, Human
auuaagauuauaauu

SEQ ID NO: 3606432 - RNA, 17 nt, Human
auuaagauugaggccug

SEQ ID NO: 3606433 - RNA, 15 nt, Human
auuaagcaguaaaaa

SEQ ID NO: 3606434 - RNA, 19 nt, Human
auuaagcaguaaaaacugu

SEQ ID NO: 3606435 - RNA, 20 nt, Human
auuaagcccacaguauauuu

SEQ ID NO: 3606436 - RNA, 20 nt, Human
auuaagcccucuuccaucau

SEQ ID NO: 3606437 - RNA, 13 nt, Human
auuaaggaagaca

SEQ ID NO: 3606438 - RNA, 23 nt, Human
auuaaggauguagcuuuucaccu

SEQ ID NO: 3606439 - RNA, 20 nt, Human
auuaaggcaacugaacaaaa

SEQ ID NO: 3606440 - RNA, 17 nt, Human
auuaagguaguuauuca

SEQ ID NO: 3606441 - RNA, 16 nt, Human
auuaaggucucucuuu

SEQ ID NO: 3606442 - RNA, 21 nt, Human
auuaaggucucucuuuggacu

SEQ ID NO: 3606443 - RNA, 16 nt, Human
auuaaggugaugugau

SEQ ID NO: 3606444 - RNA, 15 nt, Human
auuaagguguuugaa

SEQ ID NO: 3606445 - RNA, 20 nt, Human
auuaagguguuugaaaauag

SEQ ID NO: 3606446 - RNA, 15 nt, Human
auuaaguaaugauaa

SEQ ID NO: 3606447 - RNA, 21 nt, Human
auuaaguaaugauaacuggaa

SEQ ID NO: 3606448 - RNA, 16 nt, Human
auuaagucaagaauau

SEQ ID NO: 3606449 - RNA, 21 nt, Human
auuaaguccuacuuuuaaaga

SEQ ID NO: 3606450 - RNA, 24 nt, Human
auuaagucugugagauucauucau

SEQ ID NO: 3606451 - RNA, 13 nt, Human
auuaaguuaucuu

SEQ ID NO: 3606452 - RNA, 13 nt, Human
auuaaguuguuaa

SEQ ID NO: 3606453 - RNA, 17 nt, Human
auuaauaaauagagcaa

SEQ ID NO: 3606454 - RNA, 16 nt, Human
auuaauaaucuuauua

SEQ ID NO: 3606455 - RNA, 21 nt, Human
auuaauacucuauuuuuacau

SEQ ID NO: 3606456 - RNA, 16 nt, Human
auuaauaguaauuugu

SEQ ID NO: 3606457 - RNA, 21 nt, Human
auuaauaguaauuuguaaagu

SEQ ID NO: 3606458 - RNA, 12 nt, Human
auuaauauauua

SEQ ID NO: 3606459 - RNA, 13 nt, Human
auuaauauauuaa

SEQ ID NO: 3606460 - RNA, 18 nt, Human
auuaauaucccuacaugu

SEQ ID NO: 3606461 - RNA, 19 nt, Human
auuaauaucccuacaugua

SEQ ID NO: 3606462 - RNA, 20 nt, Human
auuaauaucccuacauguau

SEQ ID NO: 3606463 - RNA, 14 nt, Human
auuaauaugaaaac

SEQ ID NO: 3606464 - RNA, 15 nt, Human
agugagcacucccaa

SEQ ID NO: 3606465 - RNA, 21 nt, Human
agugagcagucaggaaagaga

SEQ ID NO: 3606466 - RNA, 21 nt, Human
agugagcauggaacacuucga

SEQ ID NO: 3606467 - RNA, 21 nt, Human
agugagccugaauuuuguugc

SEQ ID NO: 3606468 - RNA, 15 nt, Human
agugagccuggcucu

SEQ ID NO: 3606469 - RNA, 14 nt, Human
agugagcuacagag

SEQ ID NO: 3606470 - RNA, 16 nt, Human
agugagcucuaugggc

SEQ ID NO: 3606471 - RNA, 23 nt, Human
agugagcugagaucgugccguua

SEQ ID NO: 3606472 - RNA, 16 nt, Human
agugagcuuugcugcu

SEQ ID NO: 3606473 - RNA, 19 nt, Human
agugagcuuugcugcuaca

SEQ ID NO: 3606474 - RNA, 14 nt, Human
agugaggaaaucaa

SEQ ID NO: 3606475 - RNA, 15 nt, Human
agugaggaaaucaaa

SEQ ID NO: 3606476 - RNA, 19 nt, Human
agugaggaagccaggucca

SEQ ID NO: 3606477 - RNA, 21 nt, Human
agugaggaauaguugagcccc

SEQ ID NO: 3606478 - RNA, 14 nt, Human
agugaggaugucug

SEQ ID NO: 3606479 - RNA, 21 nt, Human
agugucuuaauuaaaagaaua

SEQ ID NO: 3606480 - RNA, 14 nt, Human
agugucuuccauaa

SEQ ID NO: 3606481 - RNA, 16 nt, Human
agugucuuccuguggg

SEQ ID NO: 3606482 - RNA, 13 nt, Human
agugucuuuccac

SEQ ID NO: 3606483 - RNA, 22 nt, Human
agugucuuucuuuggugccuuu

SEQ ID NO: 3606484 - RNA, 16 nt, Human
agugugaaauauauua

SEQ ID NO: 3606485 - RNA, 22 nt, Human
agugugaacaaaagaugcucuu

SEQ ID NO: 3606486 - RNA, 20 nt, Human
agugugaagcuuccuuggcu

SEQ ID NO: 3606487 - RNA, 12 nt, Human
agugugaaguua

SEQ ID NO: 3606488 - RNA, 14 nt, Human
agugugaaguuaga

SEQ ID NO: 3606489 - RNA, 20 nt, Human
agugugaaguuagaauuccu

SEQ ID NO: 3606490 - RNA, 21 nt, Human
agugugaaguuagaauuccuu

SEQ ID NO: 3606491 - RNA, 18 nt, Human
agugugaauaaagugcug

SEQ ID NO: 3606492 - RNA, 23 nt, Human
agugugacaaggauugcuacugu

SEQ ID NO: 3606493 - RNA, 15 nt, Human
agugugacagggcca

SEQ ID NO: 3606494 - RNA, 17 nt, Human
agugugacagggccagu

SEQ ID NO: 3606495 - RNA, 17 nt, Human
agugugaccaaaaguua

SEQ ID NO: 3606496 - RNA, 22 nt, Human
agugugaccaaaaguuacaugu

SEQ ID NO: 3606497 - RNA, 14 nt, Human
agugugaccaggca

SEQ ID NO: 3606498 - RNA, 12 nt, Human
agugugaguaag

SEQ ID NO: 3606499 - RNA, 17 nt, Human
agugugaguaagagcug

SEQ ID NO: 3606500 - RNA, 18 nt, Human
agugugauugggaauaaa

SEQ ID NO: 3606501 - RNA, 21 nt, Human
agugugauugggaauaaauau

SEQ ID NO: 3606502 - RNA, 16 nt, Human
agugugcacgaguggg

SEQ ID NO: 3606503 - RNA, 19 nt, Human
agugugcacgagugggaag

SEQ ID NO: 3606504 - RNA, 16 nt, Human
auuaaagaaaaaaaug

SEQ ID NO: 3606505 - RNA, 13 nt, Human
auuaaagaaaaua

SEQ ID NO: 3606506 - RNA, 20 nt, Human
auuaaagaaggguugagcug

SEQ ID NO: 3606507 - RNA, 21 nt, Human
auuaaagaaggguugagcugg

SEQ ID NO: 3606508 - RNA, 13 nt, Human
auuaaagacagag

SEQ ID NO: 3606509 - RNA, 15 nt, Human
auuaaagacuccagu

SEQ ID NO: 3606510 - RNA, 17 nt, Human
auuaaagcuaaaguauc

SEQ ID NO: 3606511 - RNA, 16 nt, Human
auuaaaggcuucucuc

SEQ ID NO: 3606512 - RNA, 19 nt, Human
auuaaaggcuucucucuca

SEQ ID NO: 3606513 - RNA, 20 nt, Human
auuaaaggcuucucucucac

SEQ ID NO: 3606514 - RNA, 11 nt, Human
auuaaagucag

SEQ ID NO: 3606515 - RNA, 18 nt, Human
auuaaagugauacugaaa

SEQ ID NO: 3606516 - RNA, 21 nt, Human
auuaaagugcuaagguucuaa

SEQ ID NO: 3606517 - RNA, 15 nt, Human
auuaaaguguccauu

SEQ ID NO: 3606518 - RNA, 21 nt, Human
auuaaaguucuguaaaauaua

SEQ ID NO: 3606519 - RNA, 16 nt, Human
auuaaaguuucaaaaa

SEQ ID NO: 3606520 - RNA, 20 nt, Human
auuaaaguuucaaaaaucug

SEQ ID NO: 3606521 - RNA, 13 nt, Human
auuaaauaaaaug

SEQ ID NO: 3606522 - RNA, 16 nt, Human
auuaaauaagauucua

SEQ ID NO: 3606523 - RNA, 17 nt, Human
auuaaauacaaaacuuc

SEQ ID NO: 3606524 - RNA, 14 nt, Human
auuaaauacagaca

SEQ ID NO: 3606525 - RNA, 13 nt, Human
auuaaauacauau

SEQ ID NO: 3606526 - RNA, 17 nt, Human
auuaaauaguuauauaa

SEQ ID NO: 3606527 - RNA, 14 nt, Human
auuaaauauauuuu

SEQ ID NO: 3606528 - RNA, 18 nt, Human
auuaaaucuaugaaguau

SEQ ID NO: 3606529 - RNA, 11 nt, Human
auuaaaucugu

SEQ ID NO: 3606530 - RNA, 18 nt, Human
auuaaaugaacaucuaua

SEQ ID NO: 3606531 - RNA, 19 nt, Human
auuaaaugaauauuuugau

SEQ ID NO: 3606532 - RNA, 22 nt, Human
auuaaaugaauauuuugauaau

SEQ ID NO: 3606533 - RNA, 21 nt, Human
auuaaaugacucuucccucaa

SEQ ID NO: 3606534 - RNA, 15 nt, Human
auuaaaugcccagcc

SEQ ID NO: 3606535 - RNA, 19 nt, Human
auuaaaugcccagccccuu

SEQ ID NO: 3606536 - RNA, 16 nt, Human
auuaaaugcuucauuu

SEQ ID NO: 3606537 - RNA, 11 nt, Human
auuaaauguuu

SEQ ID NO: 3606538 - RNA, 13 nt, Human
auuaaauguuuga

SEQ ID NO: 3606539 - RNA, 13 nt, Human
auuaaauuacaga

SEQ ID NO: 3606540 - RNA, 13 nt, Human
auuaaauuaggaa

SEQ ID NO: 3606541 - RNA, 13 nt, Human
auuaaauucacaa

SEQ ID NO: 3606542 - RNA, 17 nt, Human
auuaaauucacaaacuu

SEQ ID NO: 3606543 - RNA, 13 nt, Human
auuaaauucuugc

SEQ ID NO: 3606544 - RNA, 12 nt, Human
auuaaauuuaau

SEQ ID NO: 3606545 - RNA, 13 nt, Human
auuaaauuuaauu

SEQ ID NO: 3606546 - RNA, 15 nt, Human
auuaaauuuaauuag

SEQ ID NO: 3606547 - RNA, 17 nt, Human
auuaaauuugcaacaau

SEQ ID NO: 3606548 - RNA, 20 nt, Human
auuaaauuuugaguucuaca

SEQ ID NO: 3606549 - RNA, 13 nt, Human
auuaaauuuuucc

SEQ ID NO: 3606550 - RNA, 19 nt, Human
auuaaauuuuuuguugaca

SEQ ID NO: 3606551 - RNA, 16 nt, Human
auuaaauuuuuuugua

SEQ ID NO: 3606552 - RNA, 21 nt, Human
auuaaauuuuuuuguaugaaa

SEQ ID NO: 3606553 - RNA, 22 nt, Human
auuaaauuuuuuuguaugaaaa

SEQ ID NO: 3606554 - RNA, 18 nt, Human
auuaaauuuuuuuuacau

SEQ ID NO: 3606555 - RNA, 12 nt, Human
auuaacaaaagu

SEQ ID NO: 3606556 - RNA, 16 nt, Human
auuaacaauuaauugu

SEQ ID NO: 3606557 - RNA, 21 nt, Human
auuaacacuacucaaagcaaa

SEQ ID NO: 3606558 - RNA, 11 nt, Human
auuaacacugc

SEQ ID NO: 3606559 - RNA, 14 nt, Human
auuaacaguuuucc

SEQ ID NO: 3606560 - RNA, 19 nt, Human
auuaacaguuuuccaugaa

SEQ ID NO: 3606561 - RNA, 23 nt, Human
auuaacaguuuuccaugaaaacg

SEQ ID NO: 3606562 - RNA, 12 nt, Human
auuaacauaccu

SEQ ID NO: 3606563 - RNA, 14 nt, Human
auuaacauguuaaa

SEQ ID NO: 3606564 - RNA, 19 nt, Human
auuaacauguuaaaccaug

SEQ ID NO: 3606565 - RNA, 21 nt, Human
auuaacauugggaaaucuuau

SEQ ID NO: 3606566 - RNA, 19 nt, Human
auuaaccaaaaaaguuaca

SEQ ID NO: 3606567 - RNA, 17 nt, Human
auuaaccacuucagcug

SEQ ID NO: 3606568 - RNA, 16 nt, Human
auuaaccgaugcuuua

SEQ ID NO: 3606569 - RNA, 17 nt, Human
auuaaccgaugcuuuac

SEQ ID NO: 3606570 - RNA, 21 nt, Human
auuaaccgaugcuuuaccaaa

SEQ ID NO: 3606571 - RNA, 13 nt, Human
auuaaccuagaga

SEQ ID NO: 3606572 - RNA, 14 nt, Human
auuaaccuggugcu

SEQ ID NO: 3606573 - RNA, 17 nt, Human
auuaacuaaucuauugg

SEQ ID NO: 3606574 - RNA, 14 nt, Human
auuaacuacauuua

SEQ ID NO: 3606575 - RNA, 17 nt, Human
auuaacuacauuuauga

SEQ ID NO: 3606576 - RNA, 21 nt, Human
auuaacuacauuuaugaguaa

SEQ ID NO: 3606577 - RNA, 17 nt, Human
auuaacucauuagacug

SEQ ID NO: 3606578 - RNA, 22 nt, Human
auuaacugaguagcucuccuga

SEQ ID NO: 3606579 - RNA, 17 nt, Human
auuaacugcuuccuaua

SEQ ID NO: 3606580 - RNA, 19 nt, Human
auuaacuuaauaaucaaga

SEQ ID NO: 3606581 - RNA, 12 nt, Human
auuaacuuauuu

SEQ ID NO: 3606582 - RNA, 18 nt, Human
auuaacuucucuggaaag

SEQ ID NO: 3606583 - RNA, 16 nt, Human
auuaacuuuuauaaac

SEQ ID NO: 3606584 - RNA, 17 nt, Human
auuaacuuuuauaaacu

SEQ ID NO: 3606585 - RNA, 23 nt, Human
auuaacuuuuauaaacuuuaccu

SEQ ID NO: 3606586 - RNA, 13 nt, Human
auuaagaaaauca

SEQ ID NO: 3606587 - RNA, 14 nt, Human
auuaagaaaaucau

SEQ ID NO: 3606588 - RNA, 15 nt, Human
auuaagaaaaucuau

SEQ ID NO: 3606589 - RNA, 14 nt, Human
auuaagaagaaaau

SEQ ID NO: 3606590 - RNA, 14 nt, Human
auuaagaagaaacu

SEQ ID NO: 3606591 - RNA, 19 nt, Human
auuaagaaggcaaaaaugu

SEQ ID NO: 3606592 - RNA, 20 nt, Human
auuaagaauauguuuccuug

SEQ ID NO: 3606593 - RNA, 16 nt, Human
auuaagaaugaaauac

SEQ ID NO: 3606594 - RNA, 14 nt, Human
auuaagaaugaucu

SEQ ID NO: 3606595 - RNA, 23 nt, Human
auuaagaauguugguuuacuuuc

SEQ ID NO: 3606596 - RNA, 17 nt, Human
auuaagaggcagaaaau

SEQ ID NO: 3606597 - RNA, 20 nt, Human
auuaagauggauucucagau

SEQ ID NO: 3606598 - RNA, 23 nt, Human
auuaagauggauucucagauauu

SEQ ID NO: 3606599 - RNA, 16 nt, Human
auuaagauuauaauug

SEQ ID NO: 3606600 - RNA, 17 nt, Human
auuaagauuauaauugu

SEQ ID NO: 3606601 - RNA, 13 nt, Human
auuaagauuucca

SEQ ID NO: 3606602 - RNA, 15 nt, Human
auuaagauuuuacaa

SEQ ID NO: 3606603 - RNA, 18 nt, Human
auuaagauuuuacaaaag

SEQ ID NO: 3606604 - RNA, 11 nt, Human
auuaagcaaau

SEQ ID NO: 3606605 - RNA, 17 nt, Human
auuaagcaaauguuaaa

SEQ ID NO: 3606606 - RNA, 14 nt, Human
auuaagcauauauu

SEQ ID NO: 3606607 - RNA, 15 nt, Human
auuaagcauauauuu

SEQ ID NO: 3606608 - RNA, 14 nt, Human
auuaagcaucagaa

SEQ ID NO: 3606609 - RNA, 20 nt, Human
auuaagcaugacagaaaaua

SEQ ID NO: 3606610 - RNA, 16 nt, Human
auuaagcccucuucca

SEQ ID NO: 3606611 - RNA, 17 nt, Human
auuaagcccucuuccau

SEQ ID NO: 3606612 - RNA, 18 nt, Human
auuaagcuuuuuggaauc

SEQ ID NO: 3606613 - RNA, 14 nt, Human
auuaaggauguagc

SEQ ID NO: 3606614 - RNA, 18 nt, Human
auuaaggauguagcuuuu

SEQ ID NO: 3606615 - RNA, 21 nt, Human
auuaaggauguagcuuuucac

SEQ ID NO: 3606616 - RNA, 17 nt, Human
auuaaggauuuuaugcu

SEQ ID NO: 3606617 - RNA, 20 nt, Human
auuaagggccgauuuaauua

SEQ ID NO: 3606618 - RNA, 18 nt, Human
auuaaggggaagaaugaa

SEQ ID NO: 3606619 - RNA, 15 nt, Human
auuaaggugauguga

SEQ ID NO: 3606620 - RNA, 17 nt, Human
auuaaggugaugugauu

SEQ ID NO: 3606621 - RNA, 18 nt, Human
auuaagguguuugaaaau

SEQ ID NO: 3606622 - RNA, 19 nt, Human
auuaaguaacuuauuuaug

SEQ ID NO: 3606623 - RNA, 19 nt, Human
auuaaguaagucucaaggu

SEQ ID NO: 3606624 - RNA, 23 nt, Human
auuaaguaaugauaacuggaaac

SEQ ID NO: 3606625 - RNA, 16 nt, Human
auuaaguacuauguau

SEQ ID NO: 3606626 - RNA, 19 nt, Human
auuaaguacuauguaucaa

SEQ ID NO: 3606627 - RNA, 17 nt, Human
auuaaguaucugacauc

SEQ ID NO: 3606628 - RNA, 19 nt, Human
auuaaguucucaaugugaa

SEQ ID NO: 3606629 - RNA, 15 nt, Human
auuaauaauaaauuc

SEQ ID NO: 3606630 - RNA, 12 nt, Human
auuaauaaucuu

SEQ ID NO: 3606631 - RNA, 13 nt, Human
auuaauaaucuua

SEQ ID NO: 3606632 - RNA, 18 nt, Human
auuaauagcagccuuucu

SEQ ID NO: 3606633 - RNA, 18 nt, Human
auuaauagcauucgaaga

SEQ ID NO: 3606634 - RNA, 20 nt, Human
auuaauauauguauuauuua

SEQ ID NO: 3606635 - RNA, 14 nt, Human
auuaauaucuuucu

SEQ ID NO: 3606636 - RNA, 17 nt, Human
auuaauaucuuucugca

SEQ ID NO: 3606637 - RNA, 19 nt, Human
auuaauaucuuucugcaca

SEQ ID NO: 3606638 - RNA, 12 nt, Human
auuaauaugaaa

SEQ ID NO: 3606639 - RNA, 19 nt, Human
auuaauauucauuguauaa

SEQ ID NO: 3606640 - RNA, 17 nt, Human
auuaauauuccucaguu

SEQ ID NO: 3606641 - RNA, 23 nt, Human
auuaauauuuaacauuauuuaua

SEQ ID NO: 3606642 - RNA, 23 nt, Human
auuaaucaaucaucugugugaaa

SEQ ID NO: 3606643 - RNA, 16 nt, Human
auuaaucacuguguau

SEQ ID NO: 3606644 - RNA, 17 nt, Human
auuaaucacuguguaua

SEQ ID NO: 3606645 - RNA, 18 nt, Human
auuaaucacuguguauau

SEQ ID NO: 3606646 - RNA, 19 nt, Human
auuaaucacuguguauauu

SEQ ID NO: 3606647 - RNA, 20 nt, Human
auuaaucacuguguauauuu

SEQ ID NO: 3606648 - RNA, 21 nt, Human
auuaaucacuguguauauuug

SEQ ID NO: 3606649 - RNA, 14 nt, Human
auuaaucaucuaua

SEQ ID NO: 3606650 - RNA, 15 nt, Human
auuaaucaugaaugu

SEQ ID NO: 3606651 - RNA, 19 nt, Human
auuaaucaugaauguguaa

SEQ ID NO: 3606652 - RNA, 18 nt, Human
auuaauccacauguuuca

SEQ ID NO: 3606653 - RNA, 14 nt, Human
auuaauccagaaua

SEQ ID NO: 3606654 - RNA, 16 nt, Human
auuaaucugccucccu

SEQ ID NO: 3606655 - RNA, 22 nt, Human
agugugcacgagugggaaggac

SEQ ID NO: 3606656 - RNA, 17 nt, Human
agugugcacuaaggggc

SEQ ID NO: 3606657 - RNA, 22 nt, Human
agugugcacuaaggggcccggc

SEQ ID NO: 3606658 - RNA, 15 nt, Human
agugugcauauugua

SEQ ID NO: 3606659 - RNA, 18 nt, Human
agugugcauggaggcccu

SEQ ID NO: 3606660 - RNA, 17 nt, Human
agugugccccccauccu

SEQ ID NO: 3606661 - RNA, 20 nt, Human
agugugccccccauccuggc

SEQ ID NO: 3606662 - RNA, 22 nt, Human
agugugccccccauccuggccc

SEQ ID NO: 3606663 - RNA, 20 nt, Human
agugugccugaagucccaga

SEQ ID NO: 3606664 - RNA, 21 nt, Human
agugugccugaagucccagau

SEQ ID NO: 3606665 - RNA, 20 nt, Human
agugugcgugguggucccug

SEQ ID NO: 3606666 - RNA, 16 nt, Human
agugugcuaaaaauga

SEQ ID NO: 3606667 - RNA, 20 nt, Human
agugugcugcuguaagaaau

SEQ ID NO: 3606668 - RNA, 19 nt, Human
aguguggaaauuaagaaga

SEQ ID NO: 3606669 - RNA, 18 nt, Human
aguguggagucauucuca

SEQ ID NO: 3606670 - RNA, 23 nt, Human
aguguggagucauucucauugaa

SEQ ID NO: 3606671 - RNA, 22 nt, Human
aguguggaguggguaauccagg

SEQ ID NO: 3606672 - RNA, 15 nt, Human
aguguggcaaaauaa

SEQ ID NO: 3606673 - RNA, 13 nt, Human
aguguggccaggc

SEQ ID NO: 3606674 - RNA, 16 nt, Human
aguguggcuccccucu

SEQ ID NO: 3606675 - RNA, 17 nt, Human
aguguggcuccccucua

SEQ ID NO: 3606676 - RNA, 14 nt, Human
agugugggaaugcg

SEQ ID NO: 3606677 - RNA, 16 nt, Human
agugugggucugugug

SEQ ID NO: 3606678 - RNA, 17 nt, Human
agugugggucugugugu

SEQ ID NO: 3606679 - RNA, 16 nt, Human
agugugguguuuccug

SEQ ID NO: 3606680 - RNA, 19 nt, Human
agugugguguuuccuggca

SEQ ID NO: 3606681 - RNA, 22 nt, Human
agugugguguuuccuggcacug

SEQ ID NO: 3606682 - RNA, 22 nt, Human
agugugguuaugaacuuuauag

SEQ ID NO: 3606683 - RNA, 9 nt, Human
aguguguaa

SEQ ID NO: 3606684 - RNA, 23 nt, Human
aguguguauauauuuugugugaa

SEQ ID NO: 3606685 - RNA, 16 nt, Human
aguguguaugccaaga

SEQ ID NO: 3606686 - RNA, 19 nt, Human
aguguguaugugcgugugu

SEQ ID NO: 3606687 - RNA, 20 nt, Human
aguguguaugugcgugugug

SEQ ID NO: 3606688 - RNA, 20 nt, Human
aguguguauuaaaaaaaaca

SEQ ID NO: 3606689 - RNA, 19 nt, Human
aguguguauuguucccagu

SEQ ID NO: 3606690 - RNA, 21 nt, Human
aguguguauuguucccaguga

SEQ ID NO: 3606691 - RNA, 21 nt, Human
aguguguccaagugugugugc

SEQ ID NO: 3606692 - RNA, 19 nt, Human
agugugucuccugcaugca

SEQ ID NO: 3606693 - RNA, 22 nt, Human
agugugugcacaugugugcgug

SEQ ID NO: 3606694 - RNA, 16 nt, Human
agugugugcaugugug

SEQ ID NO: 3606695 - RNA, 19 nt, Human
aguguguggucaacauuuc

SEQ ID NO: 3606696 - RNA, 16 nt, Human
agugugugguguuagg

SEQ ID NO: 3606697 - RNA, 20 nt, Human
aguguguguggcagcaggca

SEQ ID NO: 3606698 - RNA, 20 nt, Human
agugugugugugcaugugug

SEQ ID NO: 3606699 - RNA, 18 nt, Human
aguguguguuuuucauaa

SEQ ID NO: 3606700 - RNA, 12 nt, Human
aguguguucuga

SEQ ID NO: 3606701 - RNA, 15 nt, Human
aguguguuguugcuu

SEQ ID NO: 3606702 - RNA, 21 nt, Human
aguguuaaaaaauuuuugaaa

SEQ ID NO: 3606703 - RNA, 15 nt, Human
aguguuaauacuagu

SEQ ID NO: 3606704 - RNA, 15 nt, Human
aguguuaaucaauuu

SEQ ID NO: 3606705 - RNA, 15 nt, Human
aguguuaccugugug

SEQ ID NO: 3606706 - RNA, 17 nt, Human
aguguuaccugugugcu

SEQ ID NO: 3606707 - RNA, 21 nt, Human
aguguuagccuuuuuucccca

SEQ ID NO: 3606708 - RNA, 15 nt, Human
aguguuaggccuggc

SEQ ID NO: 3606709 - RNA, 16 nt, Human
aguguuaggccuggca

SEQ ID NO: 3606710 - RNA, 18 nt, Human
aguguuagggaagggccu

SEQ ID NO: 3606711 - RNA, 19 nt, Human
aguguuaugcggucuaggg

SEQ ID NO: 3606712 - RNA, 14 nt, Human
aguguuauguauuu

SEQ ID NO: 3606713 - RNA, 21 nt, Human
aguguucauaaauaaaguuug

SEQ ID NO: 3606714 - RNA, 16 nt, Human
aguguuccccuuccac

SEQ ID NO: 3606715 - RNA, 14 nt, Human
aguguucccuaucc

SEQ ID NO: 3606716 - RNA, 18 nt, Human
aguguucccuuuccuacu

SEQ ID NO: 3606717 - RNA, 16 nt, Human
aguguuccuauuuggg

SEQ ID NO: 3606718 - RNA, 13 nt, Human
aguguucugucua

SEQ ID NO: 3606719 - RNA, 15 nt, Human
aguguucuguuacaa

SEQ ID NO: 3606720 - RNA, 20 nt, Human
aguguucuguuacaaaaugu

SEQ ID NO: 3606721 - RNA, 16 nt, Human
aguguucuuucucuuu

SEQ ID NO: 3606722 - RNA, 17 nt, Human
aguguugaaaauguuca

SEQ ID NO: 3606723 - RNA, 20 nt, Human
aguguugagcaucugucccc

SEQ ID NO: 3606724 - RNA, 16 nt, Human
aguguugccuaaguau

SEQ ID NO: 3606725 - RNA, 17 nt, Human
aguguugccuaaguauu

SEQ ID NO: 3606726 - RNA, 23 nt, Human
aguguuggagaagaacugaaauc

SEQ ID NO: 3606727 - RNA, 23 nt, Human
aguguugguuuaauauuaccuaa

SEQ ID NO: 3606728 - RNA, 19 nt, Human
aguguuguggauuuaacag

SEQ ID NO: 3606729 - RNA, 22 nt, Human
aguguuguuuguaaauaagaga

SEQ ID NO: 3606730 - RNA, 18 nt, Human
aguguuuauguuguuuau

SEQ ID NO: 3606731 - RNA, 14 nt, Human
aguguuucaugggu

SEQ ID NO: 3606732 - RNA, 15 nt, Human
aguguuucccauaau

SEQ ID NO: 3606733 - RNA, 16 nt, Human
aguguuucccauaauu

SEQ ID NO: 3606734 - RNA, 19 nt, Human
aguguuucgacagcugauu

SEQ ID NO: 3606735 - RNA, 20 nt, Human
aguguuucuaugaguggaaa

SEQ ID NO: 3606736 - RNA, 15 nt, Human
aguguuucugugcau

SEQ ID NO: 3606737 - RNA, 13 nt, Human
aguguuucuguua

SEQ ID NO: 3606738 - RNA, 15 nt, Human
aguguuucuguuauu

SEQ ID NO: 3606739 - RNA, 22 nt, Human
aguguuugggggacguuucuca

SEQ ID NO: 3606740 - RNA, 19 nt, Human
aguguuuuaaauucugaga

SEQ ID NO: 3606741 - RNA, 18 nt, Human
aguguuuuaugagaaagc

SEQ ID NO: 3606742 - RNA, 18 nt, Human
aguguuuucagaagaaau

SEQ ID NO: 3606743 - RNA, 15 nt, Human
aguguuuucugggau

SEQ ID NO: 3606744 - RNA, 13 nt, Human
aguguuuugcaag

SEQ ID NO: 3606745 - RNA, 15 nt, Human
aguguuuuggacucc

SEQ ID NO: 3606746 - RNA, 16 nt, Human
aguguuuuguaccagu

SEQ ID NO: 3606747 - RNA, 17 nt, Human
aguguuuuuaccucugu

SEQ ID NO: 3606748 - RNA, 13 nt, Human
aguuaaaaaaaaa

SEQ ID NO: 3606749 - RNA, 23 nt, Human
aguuaaaaaaaaaaaaaggaaaa

SEQ ID NO: 3606750 - RNA, 14 nt, Human
aguuaaaaaaaaua

SEQ ID NO: 3606751 - RNA, 15 nt, Human
aguuaaaaaaaauaa

SEQ ID NO: 3606752 - RNA, 19 nt, Human
aguuaaaaaaaauaauaaa

SEQ ID NO: 3606753 - RNA, 18 nt, Human
aguuaaaagcacaaagga

SEQ ID NO: 3606754 - RNA, 19 nt, Human
aguuaaaagcacaaaggaa

SEQ ID NO: 3606755 - RNA, 20 nt, Human
aguuaaaauuguuaucaaaa

SEQ ID NO: 3606756 - RNA, 22 nt, Human
aguuaaaauuguuaucaaaaua

SEQ ID NO: 3606757 - RNA, 14 nt, Human
aguuaaagaaagga

SEQ ID NO: 3606758 - RNA, 14 nt, Human
aguuaaaucucaaa

SEQ ID NO: 3606759 - RNA, 12 nt, Human
aguuaaauguag

SEQ ID NO: 3606760 - RNA, 14 nt, Human
aguuaaauuuucau

SEQ ID NO: 3606761 - RNA, 12 nt, Human
aguuaacacacu

SEQ ID NO: 3606762 - RNA, 13 nt, Human
aguuaacacacua

SEQ ID NO: 3606763 - RNA, 16 nt, Human
aguuaacacacuaccg

SEQ ID NO: 3606764 - RNA, 22 nt, Human
aguuaacacacuaccgaaugug

SEQ ID NO: 3606765 - RNA, 19 nt, Human
aguuaacagacaacacguu

SEQ ID NO: 3606766 - RNA, 19 nt, Human
aguuaacaggcaaacauuu

SEQ ID NO: 3606767 - RNA, 15 nt, Human
aguuaacuauugcau

SEQ ID NO: 3606768 - RNA, 17 nt, Human
aguuaacuauugcauuu

SEQ ID NO: 3606769 - RNA, 15 nt, Human
aguuaagaagcuguu

SEQ ID NO: 3606770 - RNA, 22 nt, Human
aguuaagaagcuguuguacauu

SEQ ID NO: 3606771 - RNA, 19 nt, Human
aguuaagacaugauuuccu

SEQ ID NO: 3606772 - RNA, 17 nt, Human
aguuaagaccuggcagc

SEQ ID NO: 3606773 - RNA, 13 nt, Human
aguuaagagaaac

SEQ ID NO: 3606774 - RNA, 15 nt, Human
aguuaagagaaacuu

SEQ ID NO: 3606775 - RNA, 14 nt, Human
aguuaagccuuugg

SEQ ID NO: 3606776 - RNA, 18 nt, Human
aguuaaggagaaucaugu

SEQ ID NO: 3606777 - RNA, 16 nt, Human
aguuaaggugggcccg

SEQ ID NO: 3606778 - RNA, 20 nt, Human
aguuaauaagcaaaauccug

SEQ ID NO: 3606779 - RNA, 20 nt, Human
aguuaauguauauaaaaaug

SEQ ID NO: 3606780 - RNA, 14 nt, Human
aguuaauuagcauu

SEQ ID NO: 3606781 - RNA, 14 nt, Human
aguuaauuuaaagu

SEQ ID NO: 3606782 - RNA, 21 nt, Human
aguuacaaauuauaauguauu

SEQ ID NO: 3606783 - RNA, 22 nt, Human
aguuacaaauuauaauguauuc

SEQ ID NO: 3606784 - RNA, 21 nt, Human
aguuacacagaaaugcugcug

SEQ ID NO: 3606785 - RNA, 13 nt, Human
aguuacacauuuu

SEQ ID NO: 3606786 - RNA, 19 nt, Human
aguuacacauuuuucagau

SEQ ID NO: 3606787 - RNA, 16 nt, Human
aguuacagaaaguggu

SEQ ID NO: 3606788 - RNA, 19 nt, Human
aguuacagaaaugauuacu

SEQ ID NO: 3606789 - RNA, 16 nt, Human
aguuacagacaaagcg

SEQ ID NO: 3606790 - RNA, 18 nt, Human
aguuacagacaaagcgug

SEQ ID NO: 3606791 - RNA, 22 nt, Human
aguuacagccuguuaguaacau

SEQ ID NO: 3606792 - RNA, 23 nt, Human
aguuacagcgagaggcagagaaa

SEQ ID NO: 3606793 - RNA, 14 nt, Human
aguuacaguucugu

SEQ ID NO: 3606794 - RNA, 21 nt, Human
aguuacaugcauacuucaaaa

SEQ ID NO: 3606795 - RNA, 22 nt, Human
aguuacaugcauacuucaaaag

SEQ ID NO: 3606796 - RNA, 15 nt, Human
aguuaccagugccuu

SEQ ID NO: 3606797 - RNA, 17 nt, Human
aguuacccaaauuaaga

SEQ ID NO: 3606798 - RNA, 18 nt, Human
aguuacccaaauuaagag

SEQ ID NO: 3606799 - RNA, 23 nt, Human
aguuaccugagagauuuaacauu

SEQ ID NO: 3606800 - RNA, 22 nt, Human
aguuaccuuauaguuacugugu

SEQ ID NO: 3606801 - RNA, 18 nt, Human
aguuacuaagaagaaaau

SEQ ID NO: 3606802 - RNA, 23 nt, Human
aguuacuaagaagaaaauugcug

SEQ ID NO: 3606803 - RNA, 21 nt, Human
aguuacuaccuccucuccuga

SEQ ID NO: 3606804 - RNA, 21 nt, Human
auuaaucuuaguguaugauua

SEQ ID NO: 3606805 - RNA, 15 nt, Human
auuaaucuuggauag

SEQ ID NO: 3606806 - RNA, 23 nt, Human
auuaaucuuucuuuaccugagac

SEQ ID NO: 3606807 - RNA, 17 nt, Human
auuaaucuuuuauauug

SEQ ID NO: 3606808 - RNA, 12 nt, Human
auuaaugaaaua

SEQ ID NO: 3606809 - RNA, 18 nt, Human
auuaaugaaauaucugua

SEQ ID NO: 3606810 - RNA, 16 nt, Human
auuaaugacacuuguc

SEQ ID NO: 3606811 - RNA, 13 nt, Human
auuaaugcacuuu

SEQ ID NO: 3606812 - RNA, 14 nt, Human
auuaaugcacuuuc

SEQ ID NO: 3606813 - RNA, 20 nt, Human
auuaaugccauuaucccuga

SEQ ID NO: 3606814 - RNA, 17 nt, Human
auuaaugccuuuaaagu

SEQ ID NO: 3606815 - RNA, 14 nt, Human
auuaaugcuaaggg

SEQ ID NO: 3606816 - RNA, 12 nt, Human
auuaaugcuuug

SEQ ID NO: 3606817 - RNA, 15 nt, Human
auuaauggaaauguu

SEQ ID NO: 3606818 - RNA, 13 nt, Human
auuaauggcacug

SEQ ID NO: 3606819 - RNA, 14 nt, Human
auuaauggcacuga

SEQ ID NO: 3606820 - RNA, 15 nt, Human
auuaauggcacugau

SEQ ID NO: 3606821 - RNA, 15 nt, Human
auuaauggucuaaaa

SEQ ID NO: 3606822 - RNA, 12 nt, Human
auuaauguguug

SEQ ID NO: 3606823 - RNA, 13 nt, Human
auuaauguuaauu

SEQ ID NO: 3606824 - RNA, 15 nt, Human
auuaauguugauuuc

SEQ ID NO: 3606825 - RNA, 16 nt, Human
auuaauguugauuucu

SEQ ID NO: 3606826 - RNA, 12 nt, Human
auuaauguuucu

SEQ ID NO: 3606827 - RNA, 16 nt, Human
auuaauguuucuaucu

SEQ ID NO: 3606828 - RNA, 18 nt, Human
auuaauguuucuaucuga

SEQ ID NO: 3606829 - RNA, 20 nt, Human
auuaauguuucuaucugauu

SEQ ID NO: 3606830 - RNA, 15 nt, Human
auuaauguuuucaaa

SEQ ID NO: 3606831 - RNA, 16 nt, Human
auuaauuaauuuggag

SEQ ID NO: 3606832 - RNA, 19 nt, Human
auuaauucaccuuccagug

SEQ ID NO: 3606833 - RNA, 22 nt, Human
auuaauuccuucagcacuuuag

SEQ ID NO: 3606834 - RNA, 13 nt, Human
auuaauucuauaa

SEQ ID NO: 3606835 - RNA, 13 nt, Human
auuaauugcuuug

SEQ ID NO: 3606836 - RNA, 14 nt, Human
auuaauugcuuuga

SEQ ID NO: 3606837 - RNA, 17 nt, Human
auuaauuggcagcagau

SEQ ID NO: 3606838 - RNA, 20 nt, Human
auuaauuggcagcagauuuu

SEQ ID NO: 3606839 - RNA, 20 nt, Human
auuaauugugugaacuugga

SEQ ID NO: 3606840 - RNA, 15 nt, Human
auuaauuuaucagau

SEQ ID NO: 3606841 - RNA, 20 nt, Human
auuaauuugauuaacaaaua

SEQ ID NO: 3606842 - RNA, 18 nt, Human
auuaauuuuaguuuuuca

SEQ ID NO: 3606843 - RNA, 17 nt, Human
auuaauuuuuuuauugu

SEQ ID NO: 3606844 - RNA, 21 nt, Human
auuaauuuuuuuauuguuuaa

SEQ ID NO: 3606845 - RNA, 22 nt, Human
auuaauuuuuuuauuguuuaaa

SEQ ID NO: 3606846 - RNA, 16 nt, Human
auuaauuuuuuuucau

SEQ ID NO: 3606847 - RNA, 13 nt, Human
auuacaaaguuaa

SEQ ID NO: 3606848 - RNA, 22 nt, Human
auuacaaauauauagcacauca

SEQ ID NO: 3606849 - RNA, 14 nt, Human
auuacaaauugcuu

SEQ ID NO: 3606850 - RNA, 15 nt, Human
auuacaaauugcuua

SEQ ID NO: 3606851 - RNA, 15 nt, Human
auuacaacggaguca

SEQ ID NO: 3606852 - RNA, 20 nt, Human
auuacaagccuggaaaaaaa

SEQ ID NO: 3606853 - RNA, 12 nt, Human
auuacaauggaa

SEQ ID NO: 3606854 - RNA, 15 nt, Human
auuacaauggaaaca

SEQ ID NO: 3606855 - RNA, 14 nt, Human
auuacaauuuuauc

SEQ ID NO: 3606856 - RNA, 18 nt, Human
auuacacauuuguacaga

SEQ ID NO: 3606857 - RNA, 18 nt, Human
auuacacuguauuuguau

SEQ ID NO: 3606858 - RNA, 19 nt, Human
auuacacuguauuuguauc

SEQ ID NO: 3606859 - RNA, 20 nt, Human
auuacacuguauuuguaucu

SEQ ID NO: 3606860 - RNA, 12 nt, Human
auuacagagagg

SEQ ID NO: 3606861 - RNA, 15 nt, Human
auuacagagaggaga

SEQ ID NO: 3606862 - RNA, 22 nt, Human
auuacagagaggagaaacacau

SEQ ID NO: 3606863 - RNA, 17 nt, Human
auuacagaggaaguuau

SEQ ID NO: 3606864 - RNA, 21 nt, Human
auuacagagguauuaaaacua

SEQ ID NO: 3606865 - RNA, 15 nt, Human
auuacagcuggagaa

SEQ ID NO: 3606866 - RNA, 15 nt, Human
auuacaggcuccugc

SEQ ID NO: 3606867 - RNA, 16 nt, Human
auuacaggcuccugcc

SEQ ID NO: 3606868 - RNA, 16 nt, Human
auuacaggugugaacc

SEQ ID NO: 3606869 - RNA, 23 nt, Human
auuacagucucacucagaacugu

SEQ ID NO: 3606870 - RNA, 18 nt, Human
auuacagugccuaaaaua

SEQ ID NO: 3606871 - RNA, 19 nt, Human
auuacagugccuaaaauaa

SEQ ID NO: 3606872 - RNA, 15 nt, Human
auuacagugggugcc

SEQ ID NO: 3606873 - RNA, 22 nt, Human
auuacaguguuuauccuuucau

SEQ ID NO: 3606874 - RNA, 23 nt, Human
auuacaguuuuguuuaaaaggaa

SEQ ID NO: 3606875 - RNA, 22 nt, Human
auuacauaauuuaguuguuucu

SEQ ID NO: 3606876 - RNA, 15 nt, Human
auuacauccuugugg

SEQ ID NO: 3606877 - RNA, 18 nt, Human
auuacaucuuucacauug

SEQ ID NO: 3606878 - RNA, 22 nt, Human
auuacaucuuucacauuggcua

SEQ ID NO: 3606879 - RNA, 19 nt, Human
auuacauguaaaacauuau

SEQ ID NO: 3606880 - RNA, 22 nt, Human
auuacauuacugaaaacuucau

SEQ ID NO: 3606881 - RNA, 21 nt, Human
auuacauuccuugauaauguu

SEQ ID NO: 3606882 - RNA, 15 nt, Human
auuacauuuccaaau

SEQ ID NO: 3606883 - RNA, 13 nt, Human
auuacauuuguaa

SEQ ID NO: 3606884 - RNA, 14 nt, Human
auuacauuuguaau

SEQ ID NO: 3606885 - RNA, 19 nt, Human
auuacauuuguaauuuaag

SEQ ID NO: 3606886 - RNA, 23 nt, Human
auuacauuuuauuaagcuuuuug

SEQ ID NO: 3606887 - RNA, 18 nt, Human
auuaccaaaaaucuuggg

SEQ ID NO: 3606888 - RNA, 14 nt, Human
auuaccaaccuguu

SEQ ID NO: 3606889 - RNA, 22 nt, Human
auuaccaccaucccgugcuuuu

SEQ ID NO: 3606890 - RNA, 18 nt, Human
auuaccacugaagauaga

SEQ ID NO: 3606891 - RNA, 22 nt, Human
auuaccacugaagauagaagaa

SEQ ID NO: 3606892 - RNA, 23 nt, Human
auuaccagacgguucaccagccu

SEQ ID NO: 3606893 - RNA, 17 nt, Human
auuaccagaguuguucu

SEQ ID NO: 3606894 - RNA, 21 nt, Human
auuaccaguaaaguguaacau

SEQ ID NO: 3606895 - RNA, 14 nt, Human
auuaccauguaaug

SEQ ID NO: 3606896 - RNA, 19 nt, Human
auuaccauuuguuaauauc

SEQ ID NO: 3606897 - RNA, 22 nt, Human
auuacccccucauuguuuauua

SEQ ID NO: 3606898 - RNA, 13 nt, Human
auuacccccuccu

SEQ ID NO: 3606899 - RNA, 15 nt, Human
auuacccuucuuucc

SEQ ID NO: 3606900 - RNA, 15 nt, Human
auuaccuaaugaaag

SEQ ID NO: 3606901 - RNA, 21 nt, Human
auuaccuaguagucauuucau

SEQ ID NO: 3606902 - RNA, 12 nt, Human
auuaccuccuga

SEQ ID NO: 3606903 - RNA, 20 nt, Human
auuaccucuuuggaaaagga

SEQ ID NO: 3606904 - RNA, 22 nt, Human
auuaccugaauuuuggcugugu

SEQ ID NO: 3606905 - RNA, 14 nt, Human
auuaccuguggaua

SEQ ID NO: 3606906 - RNA, 15 nt, Human
auuaccuguggauau

SEQ ID NO: 3606907 - RNA, 13 nt, Human
auuaccuuacugu

SEQ ID NO: 3606908 - RNA, 21 nt, Human
auuaccuuagauuagcucugg

SEQ ID NO: 3606909 - RNA, 12 nt, Human
auuaccuucucc

SEQ ID NO: 3606910 - RNA, 22 nt, Human
auuacgaaguucaagaucaaaa

SEQ ID NO: 3606911 - RNA, 15 nt, Human
auuacggcuccucuc

SEQ ID NO: 3606912 - RNA, 12 nt, Human
auuacuaacuuc

SEQ ID NO: 3606913 - RNA, 15 nt, Human
auuacuaacuucuaa

SEQ ID NO: 3606914 - RNA, 15 nt, Human
auuacuaauuuuaca

SEQ ID NO: 3606915 - RNA, 15 nt, Human
auuacuacaaaauuu

SEQ ID NO: 3606916 - RNA, 14 nt, Human
auuacuagaguugg

SEQ ID NO: 3606917 - RNA, 14 nt, Human
auuacuccuauuuu

SEQ ID NO: 3606918 - RNA, 16 nt, Human
auuacuccuauuuuug

SEQ ID NO: 3606919 - RNA, 13 nt, Human
auuacucuuguaa

SEQ ID NO: 3606920 - RNA, 16 nt, Human
auuacucuuguaagau

SEQ ID NO: 3606921 - RNA, 21 nt, Human
auuacucuuguaagauuuuga

SEQ ID NO: 3606922 - RNA, 16 nt, Human
auuacugaaaacuuca

SEQ ID NO: 3606923 - RNA, 14 nt, Human
auuacugcaugcac

SEQ ID NO: 3606924 - RNA, 17 nt, Human
auuacugcaugcacuuc

SEQ ID NO: 3606925 - RNA, 14 nt, Human
auuacugccuugaa

SEQ ID NO: 3606926 - RNA, 12 nt, Human
auuacugcuaag

SEQ ID NO: 3606927 - RNA, 21 nt, Human
auuacugcuuuaaucagaaac

SEQ ID NO: 3606928 - RNA, 17 nt, Human
auuacuggccuuuuuca

SEQ ID NO: 3606929 - RNA, 18 nt, Human
auuacuguuuauuacuuc

SEQ ID NO: 3606930 - RNA, 18 nt, Human
auuacuuaguauugcaaa

SEQ ID NO: 3606931 - RNA, 22 nt, Human
auuacuuaguauugcaaaguca

SEQ ID NO: 3606932 - RNA, 18 nt, Human
auuacuuaucccugccca

SEQ ID NO: 3606933 - RNA, 22 nt, Human
auuacuuaucccugcccauuuc

SEQ ID NO: 3606934 - RNA, 18 nt, Human
auuacuuauuuuugacag

SEQ ID NO: 3606935 - RNA, 16 nt, Human
auuacuucucuauaaa

SEQ ID NO: 3606936 - RNA, 16 nt, Human
auuacuuguaaauaua

SEQ ID NO: 3606937 - RNA, 17 nt, Human
auuacuuguaaauauaa

SEQ ID NO: 3606938 - RNA, 20 nt, Human
auuacuuguugcaaaggucu

SEQ ID NO: 3606939 - RNA, 16 nt, Human
auuacuuuaacaugcc

SEQ ID NO: 3606940 - RNA, 12 nt, Human
auuacuuuacca

SEQ ID NO: 3606941 - RNA, 21 nt, Human
auuacuuuggggcuaauuuaa

SEQ ID NO: 3606942 - RNA, 15 nt, Human
auuacuuuuuuccaa

SEQ ID NO: 3606943 - RNA, 15 nt, Human
auuagaaaauauucu

SEQ ID NO: 3606944 - RNA, 17 nt, Human
auuagaaaauauucucu

SEQ ID NO: 3606945 - RNA, 18 nt, Human
auuagaaaauguuauuua

SEQ ID NO: 3606946 - RNA, 16 nt, Human
auuagaaauagacagu

SEQ ID NO: 3606947 - RNA, 15 nt, Human
auuagaaauauuuua

SEQ ID NO: 3606948 - RNA, 21 nt, Human
auuagaaauauuuuaaaauca

SEQ ID NO: 3606949 - RNA, 15 nt, Human
auuagaaauuagaaa

SEQ ID NO: 3606950 - RNA, 20 nt, Human
auuagaaauuagcuguguga

SEQ ID NO: 3606951 - RNA, 14 nt, Human
auuagaacccuugc

SEQ ID NO: 3606952 - RNA, 11 nt, Human
auuagaacuuc

SEQ ID NO: 3606953 - RNA, 21 nt, Human
auuagaagacaauugacaaca

SEQ ID NO: 3606954 - RNA, 19 nt, Human
auuagaaucaaacauuuug

SEQ ID NO: 3606955 - RNA, 15 nt, Human
aguuacuauccuggc

SEQ ID NO: 3606956 - RNA, 15 nt, Human
aguuacucugaaggg

SEQ ID NO: 3606957 - RNA, 14 nt, Human
aguuacugaaugca

SEQ ID NO: 3606958 - RNA, 15 nt, Human
aguuacuguaaaaug

SEQ ID NO: 3606959 - RNA, 13 nt, Human
aguuacugugcau

SEQ ID NO: 3606960 - RNA, 13 nt, Human
aguuacuugauaa

SEQ ID NO: 3606961 - RNA, 21 nt, Human
aguuacuuuagauggcaagca

SEQ ID NO: 3606962 - RNA, 20 nt, Human
aguuacuuuauguuugucuu

SEQ ID NO: 3606963 - RNA, 23 nt, Human
aguuacuuuccaauucuccuuua

SEQ ID NO: 3606964 - RNA, 21 nt, Human
aguuacuuuuccuugcauaca

SEQ ID NO: 3606965 - RNA, 18 nt, Human
aguuagagaugccucccu

SEQ ID NO: 3606966 - RNA, 22 nt, Human
aguuagauuauugaaauauuau

SEQ ID NO: 3606967 - RNA, 16 nt, Human
aguuagcucaggaggc

SEQ ID NO: 3606968 - RNA, 15 nt, Human
aguuagcuuuaacuu

SEQ ID NO: 3606969 - RNA, 14 nt, Human
aguuaggaaauaaa

SEQ ID NO: 3606970 - RNA, 18 nt, Human
aguuaggaaauaaaaccu

SEQ ID NO: 3606971 - RNA, 16 nt, Human
aguuaggaaugagaag

SEQ ID NO: 3606972 - RNA, 15 nt, Human
aguuaguuccacuga

SEQ ID NO: 3606973 - RNA, 19 nt, Human
aguuaguuccacugagacc

SEQ ID NO: 3606974 - RNA, 16 nt, Human
aguuaguuucuuuggg

SEQ ID NO: 3606975 - RNA, 17 nt, Human
aguuaguuucuuuggga

SEQ ID NO: 3606976 - RNA, 17 nt, Human
aguuaguuuuuagguca

SEQ ID NO: 3606977 - RNA, 19 nt, Human
aguuauaaaauuaaaaguu

SEQ ID NO: 3606978 - RNA, 12 nt, Human
aguuauaaauca

SEQ ID NO: 3606979 - RNA, 21 nt, Human
aguuauacaguuauaaaauua

SEQ ID NO: 3606980 - RNA, 20 nt, Human
aguuauacuuauuuguauau

SEQ ID NO: 3606981 - RNA, 14 nt, Human
aguuauagugaaua

SEQ ID NO: 3606982 - RNA, 20 nt, Human
aguuauagugaauacugcua

SEQ ID NO: 3606983 - RNA, 23 nt, Human
aguuauagugaauacugcuacag

SEQ ID NO: 3606984 - RNA, 13 nt, Human
aguuauaguuuca

SEQ ID NO: 3606985 - RNA, 15 nt, Human
aguuauaguuucaga

SEQ ID NO: 3606986 - RNA, 17 nt, Human
aguuauauaaagagaaa

SEQ ID NO: 3606987 - RNA, 20 nt, Human
aguuauauaaagagaaaauu

SEQ ID NO: 3606988 - RNA, 23 nt, Human
aguuauauagguuuuguuugcua

SEQ ID NO: 3606989 - RNA, 23 nt, Human
aguuauauuucagauguaauguu

SEQ ID NO: 3606990 - RNA, 16 nt, Human
aguuaucaaucucuag

SEQ ID NO: 3606991 - RNA, 21 nt, Human
aguuaucagacacucuggcug

SEQ ID NO: 3606992 - RNA, 20 nt, Human
aguuaucaugaauuuuaaag

SEQ ID NO: 3606993 - RNA, 22 nt, Human
aguuaucaugaauuuuaaagua

SEQ ID NO: 3606994 - RNA, 13 nt, Human
aguuaucauguua

SEQ ID NO: 3606995 - RNA, 16 nt, Human
aguuaucuaaaagaaa

SEQ ID NO: 3606996 - RNA, 15 nt, Human
aguuaucuaaguuaa

SEQ ID NO: 3606997 - RNA, 12 nt, Human
aguuaugaugua

SEQ ID NO: 3606998 - RNA, 18 nt, Human
aguuauggccuauacacu

SEQ ID NO: 3606999 - RNA, 15 nt, Human
aguuauggugccgaa

SEQ ID NO: 3607000 - RNA, 14 nt, Human
aguuauguaaauaa

SEQ ID NO: 3607001 - RNA, 17 nt, Human
aguuauguaaauaauuc

SEQ ID NO: 3607002 - RNA, 12 nt, Human
aguuauguguau

SEQ ID NO: 3607003 - RNA, 19 nt, Human
aguuauguguaugugagua

SEQ ID NO: 3607004 - RNA, 13 nt, Human
aguuauuaaaauu

SEQ ID NO: 3607005 - RNA, 15 nt, Human
aguuauuaaaauugu

SEQ ID NO: 3607006 - RNA, 16 nt, Human
aguuauuaaaauuguu

SEQ ID NO: 3607007 - RNA, 18 nt, Human
aguuauuaaaauuguugu

SEQ ID NO: 3607008 - RNA, 20 nt, Human
aguuauuaacuuuaauguuu

SEQ ID NO: 3607009 - RNA, 19 nt, Human
aguuauuaaguucuuuaaa

SEQ ID NO: 3607010 - RNA, 22 nt, Human
aguuauucauucugugaucauu

SEQ ID NO: 3607011 - RNA, 18 nt, Human
aguuauuccuugaucauu

SEQ ID NO: 3607012 - RNA, 23 nt, Human
aguuauugaagcagaguggcagu

SEQ ID NO: 3607013 - RNA, 17 nt, Human
aguuauugacaaacucu

SEQ ID NO: 3607014 - RNA, 17 nt, Human
aguuauugauaaguuca

SEQ ID NO: 3607015 - RNA, 13 nt, Human
aguuauugcaguu

SEQ ID NO: 3607016 - RNA, 19 nt, Human
aguuauugguggaaucuuu

SEQ ID NO: 3607017 - RNA, 22 nt, Human
aguuauuguacagcuguuuaag

SEQ ID NO: 3607018 - RNA, 23 nt, Human
aguuauuuucuacagugguuuua

SEQ ID NO: 3607019 - RNA, 15 nt, Human
aguuauuuuuguaca

SEQ ID NO: 3607020 - RNA, 13 nt, Human
aguucaaacaaga

SEQ ID NO: 3607021 - RNA, 22 nt, Human
aguucaaagucaugauguuuuu

SEQ ID NO: 3607022 - RNA, 18 nt, Human
aguucaaauucuucugaa

SEQ ID NO: 3607023 - RNA, 15 nt, Human
aguucaagaucaaaa

SEQ ID NO: 3607024 - RNA, 20 nt, Human
aguucaagaucaaaaaggcu

SEQ ID NO: 3607025 - RNA, 13 nt, Human
aguucaaggacca

SEQ ID NO: 3607026 - RNA, 13 nt, Human
aguucaauccuac

SEQ ID NO: 3607027 - RNA, 10 nt, Human
aguucaauga

SEQ ID NO: 3607028 - RNA, 21 nt, Human
aguucaaugaucuagguuuaa

SEQ ID NO: 3607029 - RNA, 16 nt, Human
aguucaauucucauuu

SEQ ID NO: 3607030 - RNA, 22 nt, Human
aguucacacccugcaaggccca

SEQ ID NO: 3607031 - RNA, 23 nt, Human
aguucacacccugcaaggcccac

SEQ ID NO: 3607032 - RNA, 14 nt, Human
aguucaccauuaaa

SEQ ID NO: 3607033 - RNA, 22 nt, Human
aguucacucuccauuuaauaau

SEQ ID NO: 3607034 - RNA, 14 nt, Human
aguucacuugcagu

SEQ ID NO: 3607035 - RNA, 17 nt, Human
aguucagagcugcccuc

SEQ ID NO: 3607036 - RNA, 20 nt, Human
aguucagagcugcccucucc

SEQ ID NO: 3607037 - RNA, 20 nt, Human
aguucagaguccuuaaaaug

SEQ ID NO: 3607038 - RNA, 17 nt, Human
aguucagaguuuucugg

SEQ ID NO: 3607039 - RNA, 15 nt, Human
aguucagcaccaccc

SEQ ID NO: 3607040 - RNA, 21 nt, Human
aguucagcacuugucucauuu

SEQ ID NO: 3607041 - RNA, 15 nt, Human
aguucagccacccug

SEQ ID NO: 3607042 - RNA, 21 nt, Human
aguucagcgcugucaggauug

SEQ ID NO: 3607043 - RNA, 16 nt, Human
aguucagcugcuucuc

SEQ ID NO: 3607044 - RNA, 13 nt, Human
aguucagcuuggg

SEQ ID NO: 3607045 - RNA, 14 nt, Human
aguucagcuugggg

SEQ ID NO: 3607046 - RNA, 19 nt, Human
aguucaggagucccaagga

SEQ ID NO: 3607047 - RNA, 22 nt, Human
aguucagggaagauaaguugga

SEQ ID NO: 3607048 - RNA, 18 nt, Human
aguucagguaacaggcag

SEQ ID NO: 3607049 - RNA, 17 nt, Human
aguucaguaccuggagg

SEQ ID NO: 3607050 - RNA, 20 nt, Human
aguucaguuccucuuugcau

SEQ ID NO: 3607051 - RNA, 18 nt, Human
aguucauaacagugccau

SEQ ID NO: 3607052 - RNA, 20 nt, Human
aguucauaacagugccauug

SEQ ID NO: 3607053 - RNA, 11 nt, Human
aguucauacau

SEQ ID NO: 3607054 - RNA, 21 nt, Human
aguucauaccuaaguacugua

SEQ ID NO: 3607055 - RNA, 22 nt, Human
aguucauaccuaaguacuguaa

SEQ ID NO: 3607056 - RNA, 20 nt, Human
aguucauauuccauauuuau

SEQ ID NO: 3607057 - RNA, 16 nt, Human
aguucauccaauccuc

SEQ ID NO: 3607058 - RNA, 17 nt, Human
aguucauccauucuauu

SEQ ID NO: 3607059 - RNA, 18 nt, Human
aguucaucccagccccaa

SEQ ID NO: 3607060 - RNA, 13 nt, Human
aguucaucccuuc

SEQ ID NO: 3607061 - RNA, 19 nt, Human
aguucaucccuucucuucc

SEQ ID NO: 3607062 - RNA, 17 nt, Human
aguucaucgauuuucua

SEQ ID NO: 3607063 - RNA, 13 nt, Human
aguucauguaaau

SEQ ID NO: 3607064 - RNA, 17 nt, Human
aguucauguaaauaaua

SEQ ID NO: 3607065 - RNA, 23 nt, Human
aguucauguuugcuucauaaaug

SEQ ID NO: 3607066 - RNA, 18 nt, Human
aguucauuagaaauauuu

SEQ ID NO: 3607067 - RNA, 17 nt, Human
aguucauucauauuaca

SEQ ID NO: 3607068 - RNA, 18 nt, Human
aguuccaaaaugccaaau

SEQ ID NO: 3607069 - RNA, 13 nt, Human
aguuccaagaguc

SEQ ID NO: 3607070 - RNA, 17 nt, Human
aguuccaaucaguagcu

SEQ ID NO: 3607071 - RNA, 18 nt, Human
aguuccacagauuguuuc

SEQ ID NO: 3607072 - RNA, 13 nt, Human
aguuccacugaga

SEQ ID NO: 3607073 - RNA, 14 nt, Human
aguuccacugagcu

SEQ ID NO: 3607074 - RNA, 15 nt, Human
aguuccacugagcuc

SEQ ID NO: 3607075 - RNA, 16 nt, Human
aguuccagaaaguaaa

SEQ ID NO: 3607076 - RNA, 19 nt, Human
aguucccacauuaaagaag

SEQ ID NO: 3607077 - RNA, 12 nt, Human
aguucccagaau

SEQ ID NO: 3607078 - RNA, 16 nt, Human
aguucccagaaucaaa

SEQ ID NO: 3607079 - RNA, 16 nt, Human
aguuccccaaauacaa

SEQ ID NO: 3607080 - RNA, 14 nt, Human
aguuccccaugcag

SEQ ID NO: 3607081 - RNA, 14 nt, Human
aguuccccuaugug

SEQ ID NO: 3607082 - RNA, 23 nt, Human
aguuccccuggaagcagugccca

SEQ ID NO: 3607083 - RNA, 15 nt, Human
aguucccuacuuccu

SEQ ID NO: 3607084 - RNA, 14 nt, Human
aguucccucugcuc

SEQ ID NO: 3607085 - RNA, 18 nt, Human
aguucccucugcucagcc

SEQ ID NO: 3607086 - RNA, 22 nt, Human
aguucccucugcucagccaagc

SEQ ID NO: 3607087 - RNA, 21 nt, Human
aguucccugucucuugaaaaa

SEQ ID NO: 3607088 - RNA, 22 nt, Human
aguucccuugaaacuuugggaa

SEQ ID NO: 3607089 - RNA, 15 nt, Human
aguucccuuggccuc

SEQ ID NO: 3607090 - RNA, 18 nt, Human
aguucccuuggccucaga

SEQ ID NO: 3607091 - RNA, 13 nt, Human
aguuccuaagaag

SEQ ID NO: 3607092 - RNA, 14 nt, Human
aguuccucgcccug

SEQ ID NO: 3607093 - RNA, 15 nt, Human
aguuccucgcccugg

SEQ ID NO: 3607094 - RNA, 16 nt, Human
aguuccucgcccuggg

SEQ ID NO: 3607095 - RNA, 19 nt, Human
aguuccucuaacuuggcuc

SEQ ID NO: 3607096 - RNA, 19 nt, Human
aguuccugaugacccaggc

SEQ ID NO: 3607097 - RNA, 21 nt, Human
aguuccugcggagugaagagg

SEQ ID NO: 3607098 - RNA, 16 nt, Human
aguuccuguaugaaag

SEQ ID NO: 3607099 - RNA, 14 nt, Human
aguuccugucccug

SEQ ID NO: 3607100 - RNA, 21 nt, Human
aguuccugucccuucucuuaa

SEQ ID NO: 3607101 - RNA, 15 nt, Human
aguuccuguggcucc

SEQ ID NO: 3607102 - RNA, 13 nt, Human
aguuccuuucaaa

SEQ ID NO: 3607103 - RNA, 16 nt, Human
aguuccuuugugugua

SEQ ID NO: 3607104 - RNA, 18 nt, Human
aguuccuuuguguguacu

SEQ ID NO: 3607105 - RNA, 17 nt, Human
auuagaaauauuuuaaa

SEQ ID NO: 3607106 - RNA, 24 nt, Human
auuagaaauauuuuaaaaucagcu

SEQ ID NO: 3607107 - RNA, 22 nt, Human
auuagaaauuaccuguggauau

SEQ ID NO: 3607108 - RNA, 15 nt, Human
auuagaaauuagcug

SEQ ID NO: 3607109 - RNA, 17 nt, Human
auuagaaauuggcugga

SEQ ID NO: 3607110 - RNA, 18 nt, Human
auuagaacaggcaaguga

SEQ ID NO: 3607111 - RNA, 19 nt, Human
auuagaacaggcaagugaa

SEQ ID NO: 3607112 - RNA, 20 nt, Human
auuagaaucaaacauuuuga

SEQ ID NO: 3607113 - RNA, 21 nt, Human
auuagaauuagugccagaauu

SEQ ID NO: 3607114 - RNA, 13 nt, Human
auuagaauucugu

SEQ ID NO: 3607115 - RNA, 14 nt, Human
auuagaauucugua

SEQ ID NO: 3607116 - RNA, 17 nt, Human
auuagaauucuguauag

SEQ ID NO: 3607117 - RNA, 16 nt, Human
auuagacuggacagcu

SEQ ID NO: 3607118 - RNA, 19 nt, Human
auuagacuggacagcuugu

SEQ ID NO: 3607119 - RNA, 14 nt, Human
auuagagaacaucc

SEQ ID NO: 3607120 - RNA, 13 nt, Human
auuagagaagaga

SEQ ID NO: 3607121 - RNA, 16 nt, Human
auuagagaguguugaa

SEQ ID NO: 3607122 - RNA, 18 nt, Human
auuagagaguguugaaac

SEQ ID NO: 3607123 - RNA, 21 nt, Human
auuagagggaggagaaugagc

SEQ ID NO: 3607124 - RNA, 13 nt, Human
auuagagggaggu

SEQ ID NO: 3607125 - RNA, 23 nt, Human
auuagagucaacuacacaaagca

SEQ ID NO: 3607126 - RNA, 15 nt, Human
auuagagucagccuu

SEQ ID NO: 3607127 - RNA, 23 nt, Human
auuagagugucuuuccacggagc

SEQ ID NO: 3607128 - RNA, 19 nt, Human
auuagauccuaagaugugu

SEQ ID NO: 3607129 - RNA, 23 nt, Human
auuagaugaauuauccuauuuca

SEQ ID NO: 3607130 - RNA, 15 nt, Human
auuagaugugauuua

SEQ ID NO: 3607131 - RNA, 22 nt, Human
auuagaugugauuuaauagugu

SEQ ID NO: 3607132 - RNA, 22 nt, Human
auuagauguuacaaguuuauau

SEQ ID NO: 3607133 - RNA, 18 nt, Human
auuagauuuuauuuuacu

SEQ ID NO: 3607134 - RNA, 17 nt, Human
auuagcaaaaaaaguug

SEQ ID NO: 3607135 - RNA, 22 nt, Human
auuagcaaaaaaaguuguauga

SEQ ID NO: 3607136 - RNA, 18 nt, Human
auuagcaaggucauuucu

SEQ ID NO: 3607137 - RNA, 14 nt, Human
auuagcacagauuu

SEQ ID NO: 3607138 - RNA, 16 nt, Human
auuagcacagauuuua

SEQ ID NO: 3607139 - RNA, 18 nt, Human
auuagcagucccuccaca

SEQ ID NO: 3607140 - RNA, 17 nt, Human
auuagccacaaaauugg

SEQ ID NO: 3607141 - RNA, 14 nt, Human
auuagccaggauca

SEQ ID NO: 3607142 - RNA, 15 nt, Human
auuagccagguaaug

SEQ ID NO: 3607143 - RNA, 12 nt, Human
auuagccaguaa

SEQ ID NO: 3607144 - RNA, 17 nt, Human
auuagccaguaauccug

SEQ ID NO: 3607145 - RNA, 18 nt, Human
auuagccaguaauccugu

SEQ ID NO: 3607146 - RNA, 19 nt, Human
auuagccaguaauccugua

SEQ ID NO: 3607147 - RNA, 15 nt, Human
auuagcccugcauuu

SEQ ID NO: 3607148 - RNA, 17 nt, Human
auuagcccugcauuuuc

SEQ ID NO: 3607149 - RNA, 16 nt, Human
auuagccugaguagaa

SEQ ID NO: 3607150 - RNA, 20 nt, Human
auuagcgacaacagauugga

SEQ ID NO: 3607151 - RNA, 19 nt, Human
auuagcucacuuggugaua

SEQ ID NO: 3607152 - RNA, 22 nt, Human
auuagcugugauuuuuguugau

SEQ ID NO: 3607153 - RNA, 21 nt, Human
auuagcuuuguguuugguuua

SEQ ID NO: 3607154 - RNA, 15 nt, Human
auuagcuuuuucauc

SEQ ID NO: 3607155 - RNA, 15 nt, Human
auuaggaaaauaugg

SEQ ID NO: 3607156 - RNA, 21 nt, Human
auuaggaaguguaacagcuga

SEQ ID NO: 3607157 - RNA, 13 nt, Human
auuaggaauaaau

SEQ ID NO: 3607158 - RNA, 23 nt, Human
auuaggacaaucaguccccuccc

SEQ ID NO: 3607159 - RNA, 17 nt, Human
auuaggaggcucaacaa

SEQ ID NO: 3607160 - RNA, 22 nt, Human
auuaggaggcucaacaauaaaa

SEQ ID NO: 3607161 - RNA, 16 nt, Human
auuaggauuucaugau

SEQ ID NO: 3607162 - RNA, 19 nt, Human
auuaggauuugccccuucc

SEQ ID NO: 3607163 - RNA, 14 nt, Human
auuaggauuuugau

SEQ ID NO: 3607164 - RNA, 20 nt, Human
auuaggcaaggcuaugugau

SEQ ID NO: 3607165 - RNA, 22 nt, Human
auuaggcuguaacuacuuuaua

SEQ ID NO: 3607166 - RNA, 23 nt, Human
auuaggcuguaacuacuuuauaa

SEQ ID NO: 3607167 - RNA, 16 nt, Human
auuagggagaaaauuc

SEQ ID NO: 3607168 - RNA, 18 nt, Human
auuagggcauuugagaaa

SEQ ID NO: 3607169 - RNA, 17 nt, Human
auuagggcucuaauuuc

SEQ ID NO: 3607170 - RNA, 18 nt, Human
auuagguuaacauuguug

SEQ ID NO: 3607171 - RNA, 16 nt, Human
auuagguugaaacaua

SEQ ID NO: 3607172 - RNA, 17 nt, Human
auuagguugaaacauau

SEQ ID NO: 3607173 - RNA, 15 nt, Human
auuagguuuuguaca

SEQ ID NO: 3607174 - RNA, 16 nt, Human
auuaguaaaugucuuu

SEQ ID NO: 3607175 - RNA, 20 nt, Human
auuaguaaaugucuuuguaa

SEQ ID NO: 3607176 - RNA, 19 nt, Human
auuaguacacagcaccaga

SEQ ID NO: 3607177 - RNA, 21 nt, Human
auuaguacuuuauagaagaau

SEQ ID NO: 3607178 - RNA, 18 nt, Human
auuaguauuuauuuaaug

SEQ ID NO: 3607179 - RNA, 13 nt, Human
auuaguccuugcu

SEQ ID NO: 3607180 - RNA, 20 nt, Human
auuagucucagugaagacua

SEQ ID NO: 3607181 - RNA, 16 nt, Human
auuagugccacuuaau

SEQ ID NO: 3607182 - RNA, 18 nt, Human
auuagugccacuuaaugu

SEQ ID NO: 3607183 - RNA, 19 nt, Human
auuagugccagaauuuuag

SEQ ID NO: 3607184 - RNA, 22 nt, Human
auuagugcuaagugugaacugg

SEQ ID NO: 3607185 - RNA, 12 nt, Human
auuaguuauaua

SEQ ID NO: 3607186 - RNA, 18 nt, Human
auuaguuccccaaauaca

SEQ ID NO: 3607187 - RNA, 12 nt, Human
auuaguuuagaa

SEQ ID NO: 3607188 - RNA, 12 nt, Human
auuaguuuccuu

SEQ ID NO: 3607189 - RNA, 13 nt, Human
auuaguuuugauu

SEQ ID NO: 3607190 - RNA, 18 nt, Human
auuauaaacaagaaugaa

SEQ ID NO: 3607191 - RNA, 16 nt, Human
auuauaaaguuuucua

SEQ ID NO: 3607192 - RNA, 22 nt, Human
auuauaaccuuaauuuauuauu

SEQ ID NO: 3607193 - RNA, 12 nt, Human
auuauaacugua

SEQ ID NO: 3607194 - RNA, 20 nt, Human
auuauaacuuaaaauauuuu

SEQ ID NO: 3607195 - RNA, 20 nt, Human
auuauaagaggcugauaauu

SEQ ID NO: 3607196 - RNA, 12 nt, Human
auuauaagcauu

SEQ ID NO: 3607197 - RNA, 17 nt, Human
auuauaagcauugaaau

SEQ ID NO: 3607198 - RNA, 12 nt, Human
auuauaaggacu

SEQ ID NO: 3607199 - RNA, 13 nt, Human
auuauaaggacug

SEQ ID NO: 3607200 - RNA, 15 nt, Human
auuauaauaaauaua

SEQ ID NO: 3607201 - RNA, 18 nt, Human
auuauaaucuuauaauug

SEQ ID NO: 3607202 - RNA, 13 nt, Human
auuauaauguauu

SEQ ID NO: 3607203 - RNA, 18 nt, Human
auuauaauuguugcauag

SEQ ID NO: 3607204 - RNA, 17 nt, Human
auuauaauuuaaugcau

SEQ ID NO: 3607205 - RNA, 21 nt, Human
auuauacauggguagcuucug

SEQ ID NO: 3607206 - RNA, 15 nt, Human
auuauacaugugaua

SEQ ID NO: 3607207 - RNA, 15 nt, Human
auuauaccaaaaugu

SEQ ID NO: 3607208 - RNA, 20 nt, Human
auuauaccaaaauguugcug

SEQ ID NO: 3607209 - RNA, 15 nt, Human
auuauacuaagaaaa

SEQ ID NO: 3607210 - RNA, 15 nt, Human
auuauacugugugug

SEQ ID NO: 3607211 - RNA, 14 nt, Human
auuauacuuguaau

SEQ ID NO: 3607212 - RNA, 18 nt, Human
auuauacuuguaauuaug

SEQ ID NO: 3607213 - RNA, 14 nt, Human
auuauagagcagaa

SEQ ID NO: 3607214 - RNA, 16 nt, Human
auuauagagcagaaau

SEQ ID NO: 3607215 - RNA, 13 nt, Human
auuauagauucua

SEQ ID NO: 3607216 - RNA, 13 nt, Human
auuauagcucuaa

SEQ ID NO: 3607217 - RNA, 16 nt, Human
auuauagcucuaaugu

SEQ ID NO: 3607218 - RNA, 19 nt, Human
auuauaguuucugaggcuu

SEQ ID NO: 3607219 - RNA, 17 nt, Human
auuauauaacuguauuu

SEQ ID NO: 3607220 - RNA, 19 nt, Human
auuauauaacuguauuuga

SEQ ID NO: 3607221 - RNA, 13 nt, Human
auuauauagguug

SEQ ID NO: 3607222 - RNA, 20 nt, Human
auuauauagguugugcaaau

SEQ ID NO: 3607223 - RNA, 15 nt, Human
auuauaucaaaguau

SEQ ID NO: 3607224 - RNA, 18 nt, Human
auuauaucagacugcuuu

SEQ ID NO: 3607225 - RNA, 22 nt, Human
auuauaucugaggaauucugua

SEQ ID NO: 3607226 - RNA, 16 nt, Human
auuauauggaaauaua

SEQ ID NO: 3607227 - RNA, 18 nt, Human
auuauauggaaauauaua

SEQ ID NO: 3607228 - RNA, 21 nt, Human
auuauauggaaauauauauua

SEQ ID NO: 3607229 - RNA, 17 nt, Human
auuauauguuguaagca

SEQ ID NO: 3607230 - RNA, 15 nt, Human
auuauauugcaauga

SEQ ID NO: 3607231 - RNA, 13 nt, Human
auuauauuggugg

SEQ ID NO: 3607232 - RNA, 19 nt, Human
auuauauuugugcuauagu

SEQ ID NO: 3607233 - RNA, 15 nt, Human
auuaucaagcuaaua

SEQ ID NO: 3607234 - RNA, 17 nt, Human
auuaucaagcuaauaaa

SEQ ID NO: 3607235 - RNA, 20 nt, Human
auuaucaggcaaauuugcau

SEQ ID NO: 3607236 - RNA, 15 nt, Human
auuaucaugcaaaug

SEQ ID NO: 3607237 - RNA, 17 nt, Human
auuaucaugcaaaugcu

SEQ ID NO: 3607238 - RNA, 16 nt, Human
auuaucauguguaauc

SEQ ID NO: 3607239 - RNA, 14 nt, Human
auuaucccagcugc

SEQ ID NO: 3607240 - RNA, 21 nt, Human
auuauccugaacucuucugca

SEQ ID NO: 3607241 - RNA, 21 nt, Human
auuauccuuuccucauuaaau

SEQ ID NO: 3607242 - RNA, 16 nt, Human
auuaucggaagcagug

SEQ ID NO: 3607243 - RNA, 17 nt, Human
auuaucggaagcagugc

SEQ ID NO: 3607244 - RNA, 17 nt, Human
auuaucgggaacagugu

SEQ ID NO: 3607245 - RNA, 20 nt, Human
auuaucgggaacaguguuuc

SEQ ID NO: 3607246 - RNA, 22 nt, Human
auuaucgggaacaguguuuccc

SEQ ID NO: 3607247 - RNA, 19 nt, Human
auuaucguuuucuuaaagu

SEQ ID NO: 3607248 - RNA, 13 nt, Human
auuaucuaauuua

SEQ ID NO: 3607249 - RNA, 18 nt, Human
auuaucuagauacuguau

SEQ ID NO: 3607250 - RNA, 14 nt, Human
auuaucuauacaua

SEQ ID NO: 3607251 - RNA, 19 nt, Human
auuaucuauacauaucuuu

SEQ ID NO: 3607252 - RNA, 19 nt, Human
auuaucuauagcuaaguac

SEQ ID NO: 3607253 - RNA, 15 nt, Human
auuaucuauuuguau

SEQ ID NO: 3607254 - RNA, 18 nt, Human
auuaucucaaaacugcac

SEQ ID NO: 3607255 - RNA, 14 nt, Human
auuagaaugaaaau

SEQ ID NO: 3607256 - RNA, 17 nt, Human
auuagaauuaccauuug

SEQ ID NO: 3607257 - RNA, 21 nt, Human
auuagaauuaccauuuguuaa

SEQ ID NO: 3607258 - RNA, 13 nt, Human
auuagaauuauuu

SEQ ID NO: 3607259 - RNA, 16 nt, Human
auuagaauucuguaua

SEQ ID NO: 3607260 - RNA, 18 nt, Human
auuagacacuuuggaaga

SEQ ID NO: 3607261 - RNA, 15 nt, Human
auuagacagaacacc

SEQ ID NO: 3607262 - RNA, 13 nt, Human
auuagacuccucc

SEQ ID NO: 3607263 - RNA, 15 nt, Human
auuagacuggaacuu

SEQ ID NO: 3607264 - RNA, 14 nt, Human
auuagacugugauu

SEQ ID NO: 3607265 - RNA, 19 nt, Human
auuagacuuuagaaauaaa

SEQ ID NO: 3607266 - RNA, 24 nt, Human
auuagagaaauauaguucacaaug

SEQ ID NO: 3607267 - RNA, 17 nt, Human
auuagagaguguugaaa

SEQ ID NO: 3607268 - RNA, 21 nt, Human
auuagagcagaugaccccucc

SEQ ID NO: 3607269 - RNA, 13 nt, Human
auuagagccugua

SEQ ID NO: 3607270 - RNA, 16 nt, Human
auuagagugucuuucc

SEQ ID NO: 3607271 - RNA, 17 nt, Human
auuagagugucuuucca

SEQ ID NO: 3607272 - RNA, 16 nt, Human
auuagaucaaauaguu

SEQ ID NO: 3607273 - RNA, 19 nt, Human
auuagaucaaauaguugca

SEQ ID NO: 3607274 - RNA, 20 nt, Human
auuagaucuucaaacagaau

SEQ ID NO: 3607275 - RNA, 14 nt, Human
auuagauguucucu

SEQ ID NO: 3607276 - RNA, 16 nt, Human
auuagauguucucuau

SEQ ID NO: 3607277 - RNA, 23 nt, Human
auuagauguucucuaucauuuaa

SEQ ID NO: 3607278 - RNA, 23 nt, Human
auuagauuucucauuugccaaua

SEQ ID NO: 3607279 - RNA, 20 nt, Human
auuagauuuuaaaacuucau

SEQ ID NO: 3607280 - RNA, 22 nt, Human
auuagauuuuauuuuacuauug

SEQ ID NO: 3607281 - RNA, 14 nt, Human
auuagcaaaaaaag

SEQ ID NO: 3607282 - RNA, 20 nt, Human
auuagcaaaaaaaguuguau

SEQ ID NO: 3607283 - RNA, 19 nt, Human
auuagcaaggucauuucuu

SEQ ID NO: 3607284 - RNA, 22 nt, Human
auuagcaauugacugucacugu

SEQ ID NO: 3607285 - RNA, 17 nt, Human
auuagcacagauuuuaa

SEQ ID NO: 3607286 - RNA, 17 nt, Human
auuagcauucuggcagu

SEQ ID NO: 3607287 - RNA, 12 nt, Human
auuagcucugga

SEQ ID NO: 3607288 - RNA, 13 nt, Human
auuagcugcuucu

SEQ ID NO: 3607289 - RNA, 20 nt, Human
auuagcugguuggagagcua

SEQ ID NO: 3607290 - RNA, 16 nt, Human
auuagcugugugaaau

SEQ ID NO: 3607291 - RNA, 13 nt, Human
auuagcuuauguu

SEQ ID NO: 3607292 - RNA, 12 nt, Human
auuagcuuugug

SEQ ID NO: 3607293 - RNA, 15 nt, Human
auuagcuuuguguuu

SEQ ID NO: 3607294 - RNA, 15 nt, Human
auuaggaaguguuua

SEQ ID NO: 3607295 - RNA, 22 nt, Human
auuaggacaaucaguccccucc

SEQ ID NO: 3607296 - RNA, 14 nt, Human
auuaggcagacucu

SEQ ID NO: 3607297 - RNA, 13 nt, Human
auuaggccagcaa

SEQ ID NO: 3607298 - RNA, 20 nt, Human
auuagggagaaaauucaauu

SEQ ID NO: 3607299 - RNA, 23 nt, Human
auuagggagaaaauucaauugua

SEQ ID NO: 3607300 - RNA, 18 nt, Human
auuagggcaauuggaaca

SEQ ID NO: 3607301 - RNA, 15 nt, Human
auuagggguugcuaa

SEQ ID NO: 3607302 - RNA, 22 nt, Human
auuagggguugcuaagaagcga

SEQ ID NO: 3607303 - RNA, 13 nt, Human
auuagguauuuug

SEQ ID NO: 3607304 - RNA, 23 nt, Human
auuaggugaucccguuuucccca

SEQ ID NO: 3607305 - RNA, 16 nt, Human
auuaggugugacugaa

SEQ ID NO: 3607306 - RNA, 23 nt, Human
auuagguugaaacauaucucuua

SEQ ID NO: 3607307 - RNA, 18 nt, Human
auuagguuucagcagagc

SEQ ID NO: 3607308 - RNA, 19 nt, Human
auuagguuucagcagagcu

SEQ ID NO: 3607309 - RNA, 14 nt, Human
auuaguaaagaaau

SEQ ID NO: 3607310 - RNA, 16 nt, Human
auuaguaaaugcuuau

SEQ ID NO: 3607311 - RNA, 15 nt, Human
auuaguaaaugucuu

SEQ ID NO: 3607312 - RNA, 23 nt, Human
auuaguaaaugucuuuguaaguc

SEQ ID NO: 3607313 - RNA, 23 nt, Human
auuaguaacauaauaaauuaaaa

SEQ ID NO: 3607314 - RNA, 18 nt, Human
auuaguaagcuagcaaau

SEQ ID NO: 3607315 - RNA, 22 nt, Human
auuaguaccauaguaccauuua

SEQ ID NO: 3607316 - RNA, 18 nt, Human
auuaguacuuuauagaag

SEQ ID NO: 3607317 - RNA, 21 nt, Human
auuaguauguauguguaccua

SEQ ID NO: 3607318 - RNA, 14 nt, Human
auuaguauuguugu

SEQ ID NO: 3607319 - RNA, 15 nt, Human
auuaguauuguuguc

SEQ ID NO: 3607320 - RNA, 13 nt, Human
auuagucauagaa

SEQ ID NO: 3607321 - RNA, 17 nt, Human
auuagucauagaagaac

SEQ ID NO: 3607322 - RNA, 19 nt, Human
auuagucauagaagaacua

SEQ ID NO: 3607323 - RNA, 14 nt, Human
auuaguccuugcuu

SEQ ID NO: 3607324 - RNA, 23 nt, Human
auuagugcagccaaguagccucu

SEQ ID NO: 3607325 - RNA, 19 nt, Human
auuagugccacuuaaugua

SEQ ID NO: 3607326 - RNA, 20 nt, Human
auuagugccacuuaauguau

SEQ ID NO: 3607327 - RNA, 16 nt, Human
auuagugccagaauuu

SEQ ID NO: 3607328 - RNA, 18 nt, Human
auuagugccagaauuuua

SEQ ID NO: 3607329 - RNA, 15 nt, Human
auuagugcuaagugu

SEQ ID NO: 3607330 - RNA, 17 nt, Human
auuagugcuaaguguga

SEQ ID NO: 3607331 - RNA, 18 nt, Human
auuagugcuaagugugaa

SEQ ID NO: 3607332 - RNA, 20 nt, Human
auuagugcuaagugugaacu

SEQ ID NO: 3607333 - RNA, 15 nt, Human
auuaguguuauauga

SEQ ID NO: 3607334 - RNA, 19 nt, Human
auuaguguuauaugaacau

SEQ ID NO: 3607335 - RNA, 21 nt, Human
auuaguguuauaugaacauac

SEQ ID NO: 3607336 - RNA, 14 nt, Human
auuaguuaauauau

SEQ ID NO: 3607337 - RNA, 18 nt, Human
auuaguucccugucucuu

SEQ ID NO: 3607338 - RNA, 21 nt, Human
auuaguucccugucucuugaa

SEQ ID NO: 3607339 - RNA, 14 nt, Human
auuaguugcuuugu

SEQ ID NO: 3607340 - RNA, 15 nt, Human
auuaguugcuuuguu

SEQ ID NO: 3607341 - RNA, 18 nt, Human
auuaguuuacaucauuuu

SEQ ID NO: 3607342 - RNA, 17 nt, Human
auuaguuuccuuuuuaa

SEQ ID NO: 3607343 - RNA, 11 nt, Human
auuaguuuuaa

SEQ ID NO: 3607344 - RNA, 16 nt, Human
auuaguuuuaaaauga

SEQ ID NO: 3607345 - RNA, 14 nt, Human
auuaguuuucuugu

SEQ ID NO: 3607346 - RNA, 19 nt, Human
auuaguuuucuuguugcuu

SEQ ID NO: 3607347 - RNA, 23 nt, Human
auuauaaaaagccacuagacucu

SEQ ID NO: 3607348 - RNA, 13 nt, Human
auuauaaaaauau

SEQ ID NO: 3607349 - RNA, 13 nt, Human
auuauaaacgcuu

SEQ ID NO: 3607350 - RNA, 17 nt, Human
auuauaaacucauuuug

SEQ ID NO: 3607351 - RNA, 19 nt, Human
auuauaaacucauuuugcu

SEQ ID NO: 3607352 - RNA, 22 nt, Human
auuauaaaggauaaagaaggau

SEQ ID NO: 3607353 - RNA, 20 nt, Human
auuauaaauauauauaaaga

SEQ ID NO: 3607354 - RNA, 17 nt, Human
auuauaaauaucauugu

SEQ ID NO: 3607355 - RNA, 17 nt, Human
auuauaacaaguguguc

SEQ ID NO: 3607356 - RNA, 21 nt, Human
auuauaacugaaggagaaggu

SEQ ID NO: 3607357 - RNA, 15 nt, Human
auuauaacuuaaaaa

SEQ ID NO: 3607358 - RNA, 22 nt, Human
auuauaacuuaaaaaaaugaca

SEQ ID NO: 3607359 - RNA, 10 nt, Human
auuauaagga

SEQ ID NO: 3607360 - RNA, 16 nt, Human
auuauaaggacugcau

SEQ ID NO: 3607361 - RNA, 17 nt, Human
auuauaagucuuacaua

SEQ ID NO: 3607362 - RNA, 19 nt, Human
auuauaagucuuacauaaa

SEQ ID NO: 3607363 - RNA, 12 nt, Human
auuauaauauuu

SEQ ID NO: 3607364 - RNA, 18 nt, Human
auuauaaucaccagggcc

SEQ ID NO: 3607365 - RNA, 14 nt, Human
auuauaaucuuaua

SEQ ID NO: 3607366 - RNA, 14 nt, Human
auuauaaugaauuu

SEQ ID NO: 3607367 - RNA, 13 nt, Human
auuauaauuguau

SEQ ID NO: 3607368 - RNA, 22 nt, Human
auuauaauuuuuuucaauauuu

SEQ ID NO: 3607369 - RNA, 18 nt, Human
auuauacaaauuaaaaag

SEQ ID NO: 3607370 - RNA, 20 nt, Human
auuauacaugugauacauuu

SEQ ID NO: 3607371 - RNA, 21 nt, Human
auuauacaugugauacauuuu

SEQ ID NO: 3607372 - RNA, 22 nt, Human
auuauacaugugauacauuuuu

SEQ ID NO: 3607373 - RNA, 18 nt, Human
auuauaccaaaauguugc

SEQ ID NO: 3607374 - RNA, 19 nt, Human
auuauacccccugcaaagc

SEQ ID NO: 3607375 - RNA, 17 nt, Human
auuauacuaagaaaaga

SEQ ID NO: 3607376 - RNA, 16 nt, Human
auuauacuguguguga

SEQ ID NO: 3607377 - RNA, 21 nt, Human
auuauacuuguaauuauggag

SEQ ID NO: 3607378 - RNA, 21 nt, Human
auuauagaugggaaugaagcu

SEQ ID NO: 3607379 - RNA, 19 nt, Human
auuauagauucuaaagauu

SEQ ID NO: 3607380 - RNA, 15 nt, Human
auuauagcucuaaug

SEQ ID NO: 3607381 - RNA, 17 nt, Human
auuauaggagccuuaau

SEQ ID NO: 3607382 - RNA, 23 nt, Human
auuauagugauguaaucuugaau

SEQ ID NO: 3607383 - RNA, 23 nt, Human
auuauauagguugugcaaauuaa

SEQ ID NO: 3607384 - RNA, 16 nt, Human
auuauauauauaauau

SEQ ID NO: 3607385 - RNA, 18 nt, Human
auuauaucaaaguauuug

SEQ ID NO: 3607386 - RNA, 23 nt, Human
auuauaucauuggaacaacugau

SEQ ID NO: 3607387 - RNA, 18 nt, Human
auuauaucugaggaauuc

SEQ ID NO: 3607388 - RNA, 19 nt, Human
auuauaucugaggaauucu

SEQ ID NO: 3607389 - RNA, 19 nt, Human
auuauaugcuauuucuaua

SEQ ID NO: 3607390 - RNA, 20 nt, Human
auuauauggaaauauauauu

SEQ ID NO: 3607391 - RNA, 22 nt, Human
auuauauguacccucugaaaua

SEQ ID NO: 3607392 - RNA, 14 nt, Human
auuauauuaugaag

SEQ ID NO: 3607393 - RNA, 20 nt, Human
auuauauuauuaguuuugau

SEQ ID NO: 3607394 - RNA, 20 nt, Human
auuauauuccucuugcauuu

SEQ ID NO: 3607395 - RNA, 14 nt, Human
auuauauugagaca

SEQ ID NO: 3607396 - RNA, 20 nt, Human
auuauauuggugguucucag

SEQ ID NO: 3607397 - RNA, 17 nt, Human
auuauauuuacaaaugg

SEQ ID NO: 3607398 - RNA, 15 nt, Human
auuauauuuggaugc

SEQ ID NO: 3607399 - RNA, 16 nt, Human
auuauauuuggaugca

SEQ ID NO: 3607400 - RNA, 17 nt, Human
auuauauuuggaugcag

SEQ ID NO: 3607401 - RNA, 22 nt, Human
auuaucaaagggauaaagaaaa

SEQ ID NO: 3607402 - RNA, 13 nt, Human
auuaucaagcuaa

SEQ ID NO: 3607403 - RNA, 14 nt, Human
auuaucaagcuaau

SEQ ID NO: 3607404 - RNA, 22 nt, Human
auuaucaagcuaauaaaauauc

SEQ ID NO: 3607405 - RNA, 23 nt, Human
auuaucaagcuaauaaaauauca

SEQ ID NO: 3607406 - RNA, 17 nt, Human
auuaucaauaucuaaua

SEQ ID NO: 3607407 - RNA, 19 nt, Human
auuaucaauaucuaauaua

SEQ ID NO: 3607408 - RNA, 13 nt, Human
auuaucagcaaag

SEQ ID NO: 3607409 - RNA, 15 nt, Human
auuaucagcaaagaa

SEQ ID NO: 3607410 - RNA, 21 nt, Human
auuaucaggcaaauuugcauu

SEQ ID NO: 3607411 - RNA, 13 nt, Human
auuaucaugugua

SEQ ID NO: 3607412 - RNA, 14 nt, Human
auuaucauguguaa

SEQ ID NO: 3607413 - RNA, 21 nt, Human
auuaucauguguaaucaauaa

SEQ ID NO: 3607414 - RNA, 23 nt, Human
auuaucauuuuagaagacucuac

SEQ ID NO: 3607415 - RNA, 17 nt, Human
auuauccagguaaucca

SEQ ID NO: 3607416 - RNA, 14 nt, Human
auuauccauauuga

SEQ ID NO: 3607417 - RNA, 17 nt, Human
auuauccauauugaguc

SEQ ID NO: 3607418 - RNA, 21 nt, Human
auuauccuagauuauaucaaa

SEQ ID NO: 3607419 - RNA, 16 nt, Human
auuauccuugcuauga

SEQ ID NO: 3607420 - RNA, 19 nt, Human
auuaucgggaacaguguuu

SEQ ID NO: 3607421 - RNA, 16 nt, Human
auuaucgggagcagug

SEQ ID NO: 3607422 - RNA, 17 nt, Human
auuaucgggagcagugu

SEQ ID NO: 3607423 - RNA, 19 nt, Human
auuaucgggagcagugucu

SEQ ID NO: 3607424 - RNA, 21 nt, Human
auuaucgggagcagugucuuc

SEQ ID NO: 3607425 - RNA, 23 nt, Human
auuaucucaaaacugcacuguca

SEQ ID NO: 3607426 - RNA, 17 nt, Human
auuaucucacuugugcc

SEQ ID NO: 3607427 - RNA, 12 nt, Human
auuaucuuaaaa

SEQ ID NO: 3607428 - RNA, 18 nt, Human
auuaucuuguucaggaaa

SEQ ID NO: 3607429 - RNA, 14 nt, Human
auuaugaaacuugu

SEQ ID NO: 3607430 - RNA, 15 nt, Human
auuaugaaacuugug

SEQ ID NO: 3607431 - RNA, 20 nt, Human
auuaugaaacuuguguaaau

SEQ ID NO: 3607432 - RNA, 20 nt, Human
auuaugaaagcaacaaagaa

SEQ ID NO: 3607433 - RNA, 22 nt, Human
auuaugaaagcaacaaagaaau

SEQ ID NO: 3607434 - RNA, 23 nt, Human
auuaugaaagcaacaaagaaauc

SEQ ID NO: 3607435 - RNA, 17 nt, Human
auuaugaauuacauuug

SEQ ID NO: 3607436 - RNA, 19 nt, Human
auuaugaauuacauuugua

SEQ ID NO: 3607437 - RNA, 12 nt, Human
auuaugacaguu

SEQ ID NO: 3607438 - RNA, 14 nt, Human
auuaugacaguuau

SEQ ID NO: 3607439 - RNA, 16 nt, Human
auuaugacaguuauac

SEQ ID NO: 3607440 - RNA, 19 nt, Human
auuaugacaguuauacugu

SEQ ID NO: 3607441 - RNA, 14 nt, Human
auuaugcaaauucc

SEQ ID NO: 3607442 - RNA, 18 nt, Human
auuaugcaauuuuuauau

SEQ ID NO: 3607443 - RNA, 22 nt, Human
auuaugcccaguuucugccucu

SEQ ID NO: 3607444 - RNA, 18 nt, Human
auuaugcggaaagguauu

SEQ ID NO: 3607445 - RNA, 18 nt, Human
auuaugcuguauuuucuu

SEQ ID NO: 3607446 - RNA, 12 nt, Human
auuaugcuucuu

SEQ ID NO: 3607447 - RNA, 18 nt, Human
auuauggaaaaaaaauau

SEQ ID NO: 3607448 - RNA, 15 nt, Human
auuauggaaaaauaa

SEQ ID NO: 3607449 - RNA, 19 nt, Human
auuauggaaaaauaaaacu

SEQ ID NO: 3607450 - RNA, 22 nt, Human
auuauggaaaaauaaaacuguc

SEQ ID NO: 3607451 - RNA, 20 nt, Human
auuauggaagauuuuaaauu

SEQ ID NO: 3607452 - RNA, 17 nt, Human
auuaugggucacaggaa

SEQ ID NO: 3607453 - RNA, 23 nt, Human
auuauggguuaggcauuaauguu

SEQ ID NO: 3607454 - RNA, 17 nt, Human
auuauguaaaucccauu

SEQ ID NO: 3607455 - RNA, 23 nt, Human
auuauguaaaucccauuauucaa

SEQ ID NO: 3607456 - RNA, 12 nt, Human
auuauguaaauu

SEQ ID NO: 3607457 - RNA, 14 nt, Human
auuauguaaugcaa

SEQ ID NO: 3607458 - RNA, 12 nt, Human
auuauguagcuc

SEQ ID NO: 3607459 - RNA, 16 nt, Human
auuauguauguuuaca

SEQ ID NO: 3607460 - RNA, 19 nt, Human
auuaugucuuuuauauuug

SEQ ID NO: 3607461 - RNA, 13 nt, Human
auuaugugacauu

SEQ ID NO: 3607462 - RNA, 20 nt, Human
auuaugugacauuuuacauu

SEQ ID NO: 3607463 - RNA, 21 nt, Human
auuaugugccagauuuaugca

SEQ ID NO: 3607464 - RNA, 14 nt, Human
auuaugugguuuua

SEQ ID NO: 3607465 - RNA, 21 nt, Human
auuaugugugcauguguguau

SEQ ID NO: 3607466 - RNA, 11 nt, Human
auuauguuaaa

SEQ ID NO: 3607467 - RNA, 14 nt, Human
auuauguuaaaaca

SEQ ID NO: 3607468 - RNA, 12 nt, Human
auuauguuaaac

SEQ ID NO: 3607469 - RNA, 13 nt, Human
auuauguuaauau

SEQ ID NO: 3607470 - RNA, 14 nt, Human
auuauguuaauauu

SEQ ID NO: 3607471 - RNA, 16 nt, Human
auuauguuaauauuuc

SEQ ID NO: 3607472 - RNA, 17 nt, Human
auuauguuaauauuucu

SEQ ID NO: 3607473 - RNA, 14 nt, Human
auuauguuauugaa

SEQ ID NO: 3607474 - RNA, 16 nt, Human
auuauguuauugaaaa

SEQ ID NO: 3607475 - RNA, 18 nt, Human
auuauguuauugaaaaaa

SEQ ID NO: 3607476 - RNA, 15 nt, Human
auuauuaacuacauu

SEQ ID NO: 3607477 - RNA, 18 nt, Human
auuauuaacuacauuuau

SEQ ID NO: 3607478 - RNA, 14 nt, Human
auuauuaaguaacu

SEQ ID NO: 3607479 - RNA, 18 nt, Human
auuauuaaguaacuuauu

SEQ ID NO: 3607480 - RNA, 14 nt, Human
auuauuaaugcuuu

SEQ ID NO: 3607481 - RNA, 16 nt, Human
auuauuaaugcuuugg

SEQ ID NO: 3607482 - RNA, 15 nt, Human
auuauuacaguguuu

SEQ ID NO: 3607483 - RNA, 15 nt, Human
auuauuacuguugau

SEQ ID NO: 3607484 - RNA, 15 nt, Human
auuauuaguacugcu

SEQ ID NO: 3607485 - RNA, 15 nt, Human
auuauuauaaaaggg

SEQ ID NO: 3607486 - RNA, 15 nt, Human
auuauuauauacaua

SEQ ID NO: 3607487 - RNA, 14 nt, Human
auuauuauucagaa

SEQ ID NO: 3607488 - RNA, 15 nt, Human
auuauuauucuucau

SEQ ID NO: 3607489 - RNA, 15 nt, Human
auuauuauuugcagu

SEQ ID NO: 3607490 - RNA, 15 nt, Human
auuauuauuuggccc

SEQ ID NO: 3607491 - RNA, 15 nt, Human
auuauucaaaguugc

SEQ ID NO: 3607492 - RNA, 22 nt, Human
auuauucaaaguugccuaaauc

SEQ ID NO: 3607493 - RNA, 24 nt, Human
auuauucaaaguugccuaaaucca

SEQ ID NO: 3607494 - RNA, 15 nt, Human
auuauucaccaugua

SEQ ID NO: 3607495 - RNA, 21 nt, Human
auuauucaccauguaaaacaa

SEQ ID NO: 3607496 - RNA, 14 nt, Human
auuauucacuagua

SEQ ID NO: 3607497 - RNA, 13 nt, Human
auuauucaguguc

SEQ ID NO: 3607498 - RNA, 18 nt, Human
auuauucaguuaagaaaa

SEQ ID NO: 3607499 - RNA, 21 nt, Human
auuauucaguuaagaaaaaaa

SEQ ID NO: 3607500 - RNA, 16 nt, Human
auuauucauuuaaaau

SEQ ID NO: 3607501 - RNA, 21 nt, Human
auuauucauuuaaaaugauua

SEQ ID NO: 3607502 - RNA, 15 nt, Human
auuauuccagaucug

SEQ ID NO: 3607503 - RNA, 17 nt, Human
auuauucccuguacaau

SEQ ID NO: 3607504 - RNA, 21 nt, Human
auuauucucuuuuaucuguuu

SEQ ID NO: 3607505 - RNA, 16 nt, Human
auuauucugauuccac

SEQ ID NO: 3607506 - RNA, 13 nt, Human
auuauucuuucuc

SEQ ID NO: 3607507 - RNA, 16 nt, Human
auuauugacacugaac

SEQ ID NO: 3607508 - RNA, 20 nt, Human
auuauugaguuccaguugaa

SEQ ID NO: 3607509 - RNA, 15 nt, Human
auuauugauaguacu

SEQ ID NO: 3607510 - RNA, 17 nt, Human
auuauugauaguacucu

SEQ ID NO: 3607511 - RNA, 16 nt, Human
auuauugcuguugcuu

SEQ ID NO: 3607512 - RNA, 19 nt, Human
auuauugcuguugcuugaa

SEQ ID NO: 3607513 - RNA, 15 nt, Human
auuauugcuuauugc

SEQ ID NO: 3607514 - RNA, 19 nt, Human
auuauugugauuucccgug

SEQ ID NO: 3607515 - RNA, 23 nt, Human
auuauugugguaggccuuuuaac

SEQ ID NO: 3607516 - RNA, 12 nt, Human
auuauuuaaaca

SEQ ID NO: 3607517 - RNA, 16 nt, Human
auuauuuauguauggu

SEQ ID NO: 3607518 - RNA, 19 nt, Human
auuauuuauguauggugca

SEQ ID NO: 3607519 - RNA, 15 nt, Human
auuauuuauguauug

SEQ ID NO: 3607520 - RNA, 15 nt, Human
auuauuuauuaaauu

SEQ ID NO: 3607521 - RNA, 13 nt, Human
auuauuuauuauu

SEQ ID NO: 3607522 - RNA, 23 nt, Human
auuauuuauucagcuucauuugu

SEQ ID NO: 3607523 - RNA, 18 nt, Human
auuauuucacuuuagaug

SEQ ID NO: 3607524 - RNA, 11 nt, Human
auuauuucaga

SEQ ID NO: 3607525 - RNA, 22 nt, Human
auuauuucugucacaguaaaaa

SEQ ID NO: 3607526 - RNA, 14 nt, Human
auuauuugaaaaca

SEQ ID NO: 3607527 - RNA, 16 nt, Human
auuauuugaaugacua

SEQ ID NO: 3607528 - RNA, 16 nt, Human
auuauuugauuauuua

SEQ ID NO: 3607529 - RNA, 17 nt, Human
auuauuugcauguuaug

SEQ ID NO: 3607530 - RNA, 15 nt, Human
auuauuuguguaaua

SEQ ID NO: 3607531 - RNA, 17 nt, Human
auuauuuguguaauaga

SEQ ID NO: 3607532 - RNA, 22 nt, Human
auuauuuguuauuuguacaguu

SEQ ID NO: 3607533 - RNA, 13 nt, Human
auuauuuuaaaaa

SEQ ID NO: 3607534 - RNA, 15 nt, Human
auuauuuuaauuagg

SEQ ID NO: 3607535 - RNA, 13 nt, Human
auuauuuucaagg

SEQ ID NO: 3607536 - RNA, 12 nt, Human
auuauuuucauc

SEQ ID NO: 3607537 - RNA, 15 nt, Human
auuauuuucugucag

SEQ ID NO: 3607538 - RNA, 21 nt, Human
auuauuuuggggucucuuuug

SEQ ID NO: 3607539 - RNA, 22 nt, Human
auuauuuuggggucucuuuugu

SEQ ID NO: 3607540 - RNA, 12 nt, Human
auuauuuuguga

SEQ ID NO: 3607541 - RNA, 21 nt, Human
auuauuuuguucauacauauu

SEQ ID NO: 3607542 - RNA, 19 nt, Human
auuauuuuuauaauuguac

SEQ ID NO: 3607543 - RNA, 14 nt, Human
auuauuuuuguaga

SEQ ID NO: 3607544 - RNA, 14 nt, Human
auuauuuuuuauga

SEQ ID NO: 3607545 - RNA, 16 nt, Human
auuauuuuuucagacc

SEQ ID NO: 3607546 - RNA, 17 nt, Human
auuauuuuuucagaccg

SEQ ID NO: 3607547 - RNA, 19 nt, Human
auuauuuuuuuaaaauuuu

SEQ ID NO: 3607548 - RNA, 21 nt, Human
auuauuuuuuuaaaauuuugu

SEQ ID NO: 3607549 - RNA, 12 nt, Human
auucaaaaaugu

SEQ ID NO: 3607550 - RNA, 14 nt, Human
auucaaaaauguac

SEQ ID NO: 3607551 - RNA, 16 nt, Human
auucaaaaauguacaa

SEQ ID NO: 3607552 - RNA, 15 nt, Human
auucaaaaauuucac

SEQ ID NO: 3607553 - RNA, 11 nt, Human
auucaaaacau

SEQ ID NO: 3607554 - RNA, 13 nt, Human
auucaaaaguucc

SEQ ID NO: 3607555 - RNA, 22 nt, Human
aguucgacucugugcuggccag

SEQ ID NO: 3607556 - RNA, 17 nt, Human
aguucgagaccagccug

SEQ ID NO: 3607557 - RNA, 19 nt, Human
aguucgagaccagccuggc

SEQ ID NO: 3607558 - RNA, 18 nt, Human
aguucgcagccacccuga

SEQ ID NO: 3607559 - RNA, 18 nt, Human
aguucgccuggagcccuc

SEQ ID NO: 3607560 - RNA, 19 nt, Human
aguucgccuggagcccucc

SEQ ID NO: 3607561 - RNA, 13 nt, Human
aguucgucuguug

SEQ ID NO: 3607562 - RNA, 15 nt, Human
aguucuaaauuuugu

SEQ ID NO: 3607563 - RNA, 13 nt, Human
aguucuaagauuc

SEQ ID NO: 3607564 - RNA, 14 nt, Human
aguucuaagauucu

SEQ ID NO: 3607565 - RNA, 15 nt, Human
aguucuaagauucua

SEQ ID NO: 3607566 - RNA, 18 nt, Human
aguucuaagauucuaaug

SEQ ID NO: 3607567 - RNA, 16 nt, Human
aguucuaagauucuga

SEQ ID NO: 3607568 - RNA, 17 nt, Human
aguucuaagauucugau

SEQ ID NO: 3607569 - RNA, 15 nt, Human
aguucuacauaagua

SEQ ID NO: 3607570 - RNA, 23 nt, Human
aguucuaccucaggcagcucaag

SEQ ID NO: 3607571 - RNA, 10 nt, Human
aguucuagac

SEQ ID NO: 3607572 - RNA, 17 nt, Human
aguucuagagaagaggc

SEQ ID NO: 3607573 - RNA, 10 nt, Human
aguucuaggc

SEQ ID NO: 3607574 - RNA, 17 nt, Human
aguucuagucucucugg

SEQ ID NO: 3607575 - RNA, 19 nt, Human
aguucuagucucucugggg

SEQ ID NO: 3607576 - RNA, 13 nt, Human
aguucuaguguuu

SEQ ID NO: 3607577 - RNA, 15 nt, Human
aguucuaguugcuug

SEQ ID NO: 3607578 - RNA, 14 nt, Human
aguucuauuucuau

SEQ ID NO: 3607579 - RNA, 22 nt, Human
aguucuauuucuaucccaaacu

SEQ ID NO: 3607580 - RNA, 20 nt, Human
aguucucacuguucccucug

SEQ ID NO: 3607581 - RNA, 17 nt, Human
aguucucagggcuccug

SEQ ID NO: 3607582 - RNA, 23 nt, Human
aguucucagggcuccugccuucu

SEQ ID NO: 3607583 - RNA, 13 nt, Human
aguucucccugua

SEQ ID NO: 3607584 - RNA, 22 nt, Human
aguucucccuguacaguguuac

SEQ ID NO: 3607585 - RNA, 17 nt, Human
aguucucucguaacugg

SEQ ID NO: 3607586 - RNA, 13 nt, Human
aguucugaagaau

SEQ ID NO: 3607587 - RNA, 14 nt, Human
aguucugacuugac

SEQ ID NO: 3607588 - RNA, 17 nt, Human
aguucugagcugccagu

SEQ ID NO: 3607589 - RNA, 14 nt, Human
aguucugaguguuu

SEQ ID NO: 3607590 - RNA, 22 nt, Human
aguucugaguguuuuuacuaca

SEQ ID NO: 3607591 - RNA, 14 nt, Human
aguucugccaggag

SEQ ID NO: 3607592 - RNA, 19 nt, Human
aguucugcuccagacaggg

SEQ ID NO: 3607593 - RNA, 16 nt, Human
aguucugcuccucucc

SEQ ID NO: 3607594 - RNA, 17 nt, Human
aguucugcuccucucca

SEQ ID NO: 3607595 - RNA, 20 nt, Human
aguucugcuccucuccaggc

SEQ ID NO: 3607596 - RNA, 12 nt, Human
aguucugcucua

SEQ ID NO: 3607597 - RNA, 19 nt, Human
aguucuggaaaagaacugu

SEQ ID NO: 3607598 - RNA, 22 nt, Human
aguucuggauggugugccuucc

SEQ ID NO: 3607599 - RNA, 11 nt, Human
aguucugggca

SEQ ID NO: 3607600 - RNA, 17 nt, Human
aguucugggugcucccu

SEQ ID NO: 3607601 - RNA, 16 nt, Human
aguucuggucaaagaa

SEQ ID NO: 3607602 - RNA, 14 nt, Human
aguucuguaaaaua

SEQ ID NO: 3607603 - RNA, 23 nt, Human
aguucuguacucaaauguagcca

SEQ ID NO: 3607604 - RNA, 21 nt, Human
aguucuguauuugaaagugcc

SEQ ID NO: 3607605 - RNA, 21 nt, Human
aguucugugacuaggaaaaaa

SEQ ID NO: 3607606 - RNA, 22 nt, Human
aguucugugguuucauguuagu

SEQ ID NO: 3607607 - RNA, 22 nt, Human
aguucuguguauuuaauuguaa

SEQ ID NO: 3607608 - RNA, 18 nt, Human
aguucuguguuuaauuuc

SEQ ID NO: 3607609 - RNA, 21 nt, Human
aguucuguuauauccccugcu

SEQ ID NO: 3607610 - RNA, 22 nt, Human
aguucuguuauauccccugcua

SEQ ID NO: 3607611 - RNA, 21 nt, Human
aguucuguuugguguguccca

SEQ ID NO: 3607612 - RNA, 14 nt, Human
aguucuuaacccag

SEQ ID NO: 3607613 - RNA, 22 nt, Human
aguucuuaaggauugugauauu

SEQ ID NO: 3607614 - RNA, 14 nt, Human
aguucuuagauauc

SEQ ID NO: 3607615 - RNA, 21 nt, Human
aguucuuaguugcuguauguc

SEQ ID NO: 3607616 - RNA, 15 nt, Human
aguucuuccuguaau

SEQ ID NO: 3607617 - RNA, 17 nt, Human
aguucuucgggaagaga

SEQ ID NO: 3607618 - RNA, 18 nt, Human
aguucuucgggaagagag

SEQ ID NO: 3607619 - RNA, 22 nt, Human
aguucuucgggaagagaggagu

SEQ ID NO: 3607620 - RNA, 14 nt, Human
aguucuugaacagu

SEQ ID NO: 3607621 - RNA, 22 nt, Human
aguucuugucugauuggcucac

SEQ ID NO: 3607622 - RNA, 19 nt, Human
aguucuuuccauaauaaaa

SEQ ID NO: 3607623 - RNA, 16 nt, Human
aguucuuugggccaga

SEQ ID NO: 3607624 - RNA, 19 nt, Human
aguucuuugggccagacau

SEQ ID NO: 3607625 - RNA, 17 nt, Human
aguugaaaaacagcuga

SEQ ID NO: 3607626 - RNA, 18 nt, Human
aguugaaaaacagcugag

SEQ ID NO: 3607627 - RNA, 20 nt, Human
aguugaaaagacuccaaaga

SEQ ID NO: 3607628 - RNA, 22 nt, Human
aguugaaaagacuccaaagaaa

SEQ ID NO: 3607629 - RNA, 23 nt, Human
aguugaaaaucuuauaauuuaaa

SEQ ID NO: 3607630 - RNA, 15 nt, Human
aguugaaagggcaau

SEQ ID NO: 3607631 - RNA, 19 nt, Human
aguugaaccuauuucucuu

SEQ ID NO: 3607632 - RNA, 17 nt, Human
aguugaagacuuuguuu

SEQ ID NO: 3607633 - RNA, 15 nt, Human
aguugaaguuuagga

SEQ ID NO: 3607634 - RNA, 15 nt, Human
aguugaauacuugaa

SEQ ID NO: 3607635 - RNA, 12 nt, Human
aguugaauauug

SEQ ID NO: 3607636 - RNA, 14 nt, Human
aguugaaucuauug

SEQ ID NO: 3607637 - RNA, 19 nt, Human
aguugaaugacaacagaag

SEQ ID NO: 3607638 - RNA, 22 nt, Human
aguugaauguugcaaugugaaa

SEQ ID NO: 3607639 - RNA, 19 nt, Human
auaaaagcugaaguuacuu

SEQ ID NO: 3607640 - RNA, 19 nt, Human
auaaaaggaagccaaagag

SEQ ID NO: 3607641 - RNA, 19 nt, Human
auaaaaggcaaauguguac

SEQ ID NO: 3607642 - RNA, 17 nt, Human
auaaaagggcaaaucug

SEQ ID NO: 3607643 - RNA, 18 nt, Human
auaaaagggcaaaucugc

SEQ ID NO: 3607644 - RNA, 21 nt, Human
auaaaaguacauguuaaacuu

SEQ ID NO: 3607645 - RNA, 19 nt, Human
auaaaagugaaugaaagau

SEQ ID NO: 3607646 - RNA, 21 nt, Human
auaaaagugaaugaaagauua

SEQ ID NO: 3607647 - RNA, 13 nt, Human
auaaaagugauca

SEQ ID NO: 3607648 - RNA, 19 nt, Human
auaaaaguuuuacaaaggg

SEQ ID NO: 3607649 - RNA, 14 nt, Human
auaaaauaaauaua

SEQ ID NO: 3607650 - RNA, 18 nt, Human
auaaaauaauucuaaagg

SEQ ID NO: 3607651 - RNA, 22 nt, Human
auaaaauaauuuuaucucuuuc

SEQ ID NO: 3607652 - RNA, 21 nt, Human
auaaaauaauuuuuauauuug

SEQ ID NO: 3607653 - RNA, 13 nt, Human
auaaaauaucauu

SEQ ID NO: 3607654 - RNA, 15 nt, Human
auaaaauaucauuca

SEQ ID NO: 3607655 - RNA, 16 nt, Human
auaaaauaucauucag

SEQ ID NO: 3607656 - RNA, 17 nt, Human
auaaaauaucauucagc

SEQ ID NO: 3607657 - RNA, 19 nt, Human
auaaaauaucauucagcaa

SEQ ID NO: 3607658 - RNA, 18 nt, Human
auaaaauauuauugaacu

SEQ ID NO: 3607659 - RNA, 16 nt, Human
auaaaauauuuucugu

SEQ ID NO: 3607660 - RNA, 20 nt, Human
auaaaauauuuucugugugu

SEQ ID NO: 3607661 - RNA, 16 nt, Human
auaaaaucagccaauu

SEQ ID NO: 3607662 - RNA, 16 nt, Human
auaaaaucauaaguau

SEQ ID NO: 3607663 - RNA, 18 nt, Human
auaaaaucauguacauuu

SEQ ID NO: 3607664 - RNA, 13 nt, Human
auaaaaugaaaau

SEQ ID NO: 3607665 - RNA, 19 nt, Human
auaaaaugaaaauuguauu

SEQ ID NO: 3607666 - RNA, 19 nt, Human
auaaaaugaggacauguuu

SEQ ID NO: 3607667 - RNA, 14 nt, Human
auaaaauggcaaca

SEQ ID NO: 3607668 - RNA, 23 nt, Human
auaaaauguaaacuguuucuuua

SEQ ID NO: 3607669 - RNA, 17 nt, Human
auaaaauguaauuacuu

SEQ ID NO: 3607670 - RNA, 19 nt, Human
auaaaauguccaguaagau

SEQ ID NO: 3607671 - RNA, 15 nt, Human
auaaaauuaaaaguu

SEQ ID NO: 3607672 - RNA, 15 nt, Human
auaaaauuaaagaaa

SEQ ID NO: 3607673 - RNA, 18 nt, Human
auaaaauuaaagaaaaua

SEQ ID NO: 3607674 - RNA, 16 nt, Human
auaaaauuaagaaugu

SEQ ID NO: 3607675 - RNA, 13 nt, Human
auaaaauuagaaa

SEQ ID NO: 3607676 - RNA, 13 nt, Human
auaaaauuauaga

SEQ ID NO: 3607677 - RNA, 17 nt, Human
auaaaauuauagcucua

SEQ ID NO: 3607678 - RNA, 15 nt, Human
auaaaauuauuugca

SEQ ID NO: 3607679 - RNA, 18 nt, Human
auaaaauuauuuuggauu

SEQ ID NO: 3607680 - RNA, 14 nt, Human
auaaaauuuugcuu

SEQ ID NO: 3607681 - RNA, 20 nt, Human
auaaaauuuuuaaucuuuaa

SEQ ID NO: 3607682 - RNA, 16 nt, Human
auaaacaacagcugaa

SEQ ID NO: 3607683 - RNA, 22 nt, Human
auaaacaagaaaaauaaagaaa

SEQ ID NO: 3607684 - RNA, 14 nt, Human
auaaacacauagau

SEQ ID NO: 3607685 - RNA, 20 nt, Human
auaaacacauagauucaccu

SEQ ID NO: 3607686 - RNA, 24 nt, Human
auaaacacauagauucaccuguaa

SEQ ID NO: 3607687 - RNA, 22 nt, Human
auaaacacaucacagaugaaua

SEQ ID NO: 3607688 - RNA, 14 nt, Human
auaaacacuacaga

SEQ ID NO: 3607689 - RNA, 18 nt, Human
auaaacacucuugaaaaa

SEQ ID NO: 3607690 - RNA, 14 nt, Human
auaaacacugugua

SEQ ID NO: 3607691 - RNA, 13 nt, Human
auaaacagaaaug

SEQ ID NO: 3607692 - RNA, 14 nt, Human
auaaacagacaaua

SEQ ID NO: 3607693 - RNA, 20 nt, Human
auaaacauacgugugcaugu

SEQ ID NO: 3607694 - RNA, 19 nt, Human
auaaacaucagguuaggca

SEQ ID NO: 3607695 - RNA, 22 nt, Human
auaaacaucagguuaggcagua

SEQ ID NO: 3607696 - RNA, 12 nt, Human
auaaacaugaaa

SEQ ID NO: 3607697 - RNA, 16 nt, Human
auaaacauuaaauguc

SEQ ID NO: 3607698 - RNA, 17 nt, Human
auaaacauuaaaugucu

SEQ ID NO: 3607699 - RNA, 21 nt, Human
auaaacauuaaaugucuuaua

SEQ ID NO: 3607700 - RNA, 13 nt, Human
auaaacauuguau

SEQ ID NO: 3607701 - RNA, 18 nt, Human
auaaaccuaaaaaagaua

SEQ ID NO: 3607702 - RNA, 19 nt, Human
auaaaccuaaaaaagauau

SEQ ID NO: 3607703 - RNA, 22 nt, Human
auaaaccuaaaaaagauauauu

SEQ ID NO: 3607704 - RNA, 14 nt, Human
auaaaccuccgcca

SEQ ID NO: 3607705 - RNA, 17 nt, Human
auaaaccuccgccaaug

SEQ ID NO: 3607706 - RNA, 19 nt, Human
auaaaccucuaauuuauuu

SEQ ID NO: 3607707 - RNA, 20 nt, Human
auaaaccucuaauuuauuuu

SEQ ID NO: 3607708 - RNA, 20 nt, Human
auaaacgugaugaucagcug

SEQ ID NO: 3607709 - RNA, 14 nt, Human
auaaacuaauaauu

SEQ ID NO: 3607710 - RNA, 17 nt, Human
auaaacuacucuuugau

SEQ ID NO: 3607711 - RNA, 15 nt, Human
auaaacucuaaacau

SEQ ID NO: 3607712 - RNA, 20 nt, Human
auaaacugacuuuauccuca

SEQ ID NO: 3607713 - RNA, 14 nt, Human
auaaacugugugca

SEQ ID NO: 3607714 - RNA, 14 nt, Human
auaaacuuagaaua

SEQ ID NO: 3607715 - RNA, 21 nt, Human
auaaacuuagaauaaaauugu

SEQ ID NO: 3607716 - RNA, 16 nt, Human
auaaacuucagcacca

SEQ ID NO: 3607717 - RNA, 20 nt, Human
auaaacuuuaauauaaagua

SEQ ID NO: 3607718 - RNA, 22 nt, Human
auaaacuuuaauauaaaguagu

SEQ ID NO: 3607719 - RNA, 17 nt, Human
auaaacuuuagaguaga

SEQ ID NO: 3607720 - RNA, 15 nt, Human
auaaacuuuuagaaa

SEQ ID NO: 3607721 - RNA, 17 nt, Human
auaaacuuuuuuucaau

SEQ ID NO: 3607722 - RNA, 18 nt, Human
auaaacuuuuuuucaaug

SEQ ID NO: 3607723 - RNA, 19 nt, Human
auaaacuuuuuuucaaugu

SEQ ID NO: 3607724 - RNA, 13 nt, Human
auaaagaaaagau

SEQ ID NO: 3607725 - RNA, 14 nt, Human
auaaagaaaagaug

SEQ ID NO: 3607726 - RNA, 16 nt, Human
auaaagaaaagaugca

SEQ ID NO: 3607727 - RNA, 19 nt, Human
auaaagaaaagaugcacuu

SEQ ID NO: 3607728 - RNA, 18 nt, Human
auaaagaaauagaacaag

SEQ ID NO: 3607729 - RNA, 19 nt, Human
auaaagaauacuugaacuu

SEQ ID NO: 3607730 - RNA, 14 nt, Human
auaaagacaaccau

SEQ ID NO: 3607731 - RNA, 22 nt, Human
auaaagacaaccauauuuagca

SEQ ID NO: 3607732 - RNA, 24 nt, Human
auaaagacguuuuauaagcaucau

SEQ ID NO: 3607733 - RNA, 18 nt, Human
auaaagagaaaauugaau

SEQ ID NO: 3607734 - RNA, 19 nt, Human
auaaagaugaucuacucag

SEQ ID NO: 3607735 - RNA, 20 nt, Human
auaaagaugaucuacucaga

SEQ ID NO: 3607736 - RNA, 23 nt, Human
auaaagaugaucuacucagaaau

SEQ ID NO: 3607737 - RNA, 15 nt, Human
auaaagauguuaaaa

SEQ ID NO: 3607738 - RNA, 20 nt, Human
auaaagauuauauaaagacc

SEQ ID NO: 3607739 - RNA, 18 nt, Human
auaaagcaaauagacaca

SEQ ID NO: 3607740 - RNA, 17 nt, Human
auaaagcaauuuuccuu

SEQ ID NO: 3607741 - RNA, 21 nt, Human
auaaagcaauuuuccuugaag

SEQ ID NO: 3607742 - RNA, 15 nt, Human
auaaagcaggcagaa

SEQ ID NO: 3607743 - RNA, 12 nt, Human
auaaagcauuua

SEQ ID NO: 3607744 - RNA, 14 nt, Human
auaaagcauuuaac

SEQ ID NO: 3607745 - RNA, 16 nt, Human
auaaagccacugaaaa

SEQ ID NO: 3607746 - RNA, 21 nt, Human
auucugcaguaaaucuuuuac

SEQ ID NO: 3607747 - RNA, 19 nt, Human
auucugcauugcuagauaa

SEQ ID NO: 3607748 - RNA, 16 nt, Human
auucugcccaaaaaua

SEQ ID NO: 3607749 - RNA, 19 nt, Human
auucugcccaaaaauaugg

SEQ ID NO: 3607750 - RNA, 14 nt, Human
auucugccugccca

SEQ ID NO: 3607751 - RNA, 16 nt, Human
auucugccugcccagg

SEQ ID NO: 3607752 - RNA, 17 nt, Human
auucugccugcccaggc

SEQ ID NO: 3607753 - RNA, 21 nt, Human
auucugccugcccaggccccu

SEQ ID NO: 3607754 - RNA, 21 nt, Human
auucugccuuugcagaaacag

SEQ ID NO: 3607755 - RNA, 17 nt, Human
auucugcucuauuauau

SEQ ID NO: 3607756 - RNA, 17 nt, Human
auucugcuugagaauau

SEQ ID NO: 3607757 - RNA, 21 nt, Human
auucuggauaaagccacugaa

SEQ ID NO: 3607758 - RNA, 19 nt, Human
auucuggcugauaaaagau

SEQ ID NO: 3607759 - RNA, 15 nt, Human
auucugggaauguau

SEQ ID NO: 3607760 - RNA, 22 nt, Human
auucugggaauguauaguauuu

SEQ ID NO: 3607761 - RNA, 22 nt, Human
auucugggcaccacaaaauaua

SEQ ID NO: 3607762 - RNA, 24 nt, Human
auucugggcaccacaaaauauaca

SEQ ID NO: 3607763 - RNA, 14 nt, Human
auucugguuacaug

SEQ ID NO: 3607764 - RNA, 16 nt, Human
auucugguuccagggu

SEQ ID NO: 3607765 - RNA, 19 nt, Human
auucugguuccaggguccc

SEQ ID NO: 3607766 - RNA, 15 nt, Human
auucuguaaaagaaa

SEQ ID NO: 3607767 - RNA, 14 nt, Human
auucuguacucuua

SEQ ID NO: 3607768 - RNA, 13 nt, Human
auucuguacugau

SEQ ID NO: 3607769 - RNA, 12 nt, Human
auucuguauaga

SEQ ID NO: 3607770 - RNA, 21 nt, Human
auucuguauagauuagaauuc

SEQ ID NO: 3607771 - RNA, 20 nt, Human
auucugugaucuuuuaaagu

SEQ ID NO: 3607772 - RNA, 18 nt, Human
auucuguguugcauuauu

SEQ ID NO: 3607773 - RNA, 12 nt, Human
auucuguuaaaa

SEQ ID NO: 3607774 - RNA, 15 nt, Human
auucuguuaaaaucu

SEQ ID NO: 3607775 - RNA, 13 nt, Human
auucuguucugau

SEQ ID NO: 3607776 - RNA, 19 nt, Human
auucuguuuuuaaaaauua

SEQ ID NO: 3607777 - RNA, 17 nt, Human
auucuuaaaaugcaaua

SEQ ID NO: 3607778 - RNA, 18 nt, Human
auucuuaaaguugaauuu

SEQ ID NO: 3607779 - RNA, 21 nt, Human
auucuuaaaguugaauuuauu

SEQ ID NO: 3607780 - RNA, 21 nt, Human
auucuuacaaacaugugguua

SEQ ID NO: 3607781 - RNA, 15 nt, Human
auucuuacacugccu

SEQ ID NO: 3607782 - RNA, 13 nt, Human
auucuuacuaaaa

SEQ ID NO: 3607783 - RNA, 20 nt, Human
auucuuagccuguggcagua

SEQ ID NO: 3607784 - RNA, 15 nt, Human
auucuuauaaauaug

SEQ ID NO: 3607785 - RNA, 14 nt, Human
auucuuaugcuuau

SEQ ID NO: 3607786 - RNA, 21 nt, Human
auucuuauuccauauuagaaa

SEQ ID NO: 3607787 - RNA, 22 nt, Human
auucuuauuccauauuagaaaa

SEQ ID NO: 3607788 - RNA, 14 nt, Human
auucuuauuuaaug

SEQ ID NO: 3607789 - RNA, 16 nt, Human
auucuuauuuuuccua

SEQ ID NO: 3607790 - RNA, 21 nt, Human
auucuucaagaucccauuuga

SEQ ID NO: 3607791 - RNA, 23 nt, Human
auucuucagcaaaaauauuuuau

SEQ ID NO: 3607792 - RNA, 22 nt, Human
auucuucaggcuuccugcaauu

SEQ ID NO: 3607793 - RNA, 23 nt, Human
auucuucaguugguugugucuuu

SEQ ID NO: 3607794 - RNA, 21 nt, Human
auucuuccaagcugagagucu

SEQ ID NO: 3607795 - RNA, 20 nt, Human
auucuucccaacuugccuuu

SEQ ID NO: 3607796 - RNA, 23 nt, Human
auucuucccaacuugccuuugaa

SEQ ID NO: 3607797 - RNA, 16 nt, Human
auucuucccauucucc

SEQ ID NO: 3607798 - RNA, 17 nt, Human
auucuucccauucucca

SEQ ID NO: 3607799 - RNA, 20 nt, Human
auucuucccuaucuuugcca

SEQ ID NO: 3607800 - RNA, 13 nt, Human
auucuuccucccu

SEQ ID NO: 3607801 - RNA, 21 nt, Human
auucuucucuuccuuuuauca

SEQ ID NO: 3607802 - RNA, 21 nt, Human
auucuucugaacucaaacuga

SEQ ID NO: 3607803 - RNA, 17 nt, Human
auucuucugagcacugu

SEQ ID NO: 3607804 - RNA, 14 nt, Human
auucuucugccuca

SEQ ID NO: 3607805 - RNA, 12 nt, Human
auucuucugcuu

SEQ ID NO: 3607806 - RNA, 20 nt, Human
auucuucugcuucagccucc

SEQ ID NO: 3607807 - RNA, 13 nt, Human
auucuucuguguu

SEQ ID NO: 3607808 - RNA, 17 nt, Human
auucuugaucaguaguu

SEQ ID NO: 3607809 - RNA, 14 nt, Human
auucuugauguaaa

SEQ ID NO: 3607810 - RNA, 16 nt, Human
auucuugauguaaaau

SEQ ID NO: 3607811 - RNA, 18 nt, Human
auucuugauguaaaaucu

SEQ ID NO: 3607812 - RNA, 20 nt, Human
auucuugauguaaaaucuug

SEQ ID NO: 3607813 - RNA, 15 nt, Human
auucuugcaaaguau

SEQ ID NO: 3607814 - RNA, 16 nt, Human
auucuugcaaaguauc

SEQ ID NO: 3607815 - RNA, 13 nt, Human
auucuugcauauu

SEQ ID NO: 3607816 - RNA, 22 nt, Human
auucuuggcccgcacagagcug

SEQ ID NO: 3607817 - RNA, 12 nt, Human
auucuugugaau

SEQ ID NO: 3607818 - RNA, 18 nt, Human
auucuuuauacaacagug

SEQ ID NO: 3607819 - RNA, 19 nt, Human
auucuuuauacaacagugc

SEQ ID NO: 3607820 - RNA, 23 nt, Human
auucuuuauacaacagugcuaaa

SEQ ID NO: 3607821 - RNA, 13 nt, Human
auucuuucaauac

SEQ ID NO: 3607822 - RNA, 16 nt, Human
auucuuucaauacaga

SEQ ID NO: 3607823 - RNA, 21 nt, Human
auucuuucaauacagauauau

SEQ ID NO: 3607824 - RNA, 14 nt, Human
auucuuucaauucu

SEQ ID NO: 3607825 - RNA, 20 nt, Human
auucuuucaauucuguaggu

SEQ ID NO: 3607826 - RNA, 12 nt, Human
auucuuucccag

SEQ ID NO: 3607827 - RNA, 22 nt, Human
auucuuuccugaggcugggcuc

SEQ ID NO: 3607828 - RNA, 15 nt, Human
auucuuugauguuaa

SEQ ID NO: 3607829 - RNA, 20 nt, Human
auucuuugcuugaacacagu

SEQ ID NO: 3607830 - RNA, 19 nt, Human
auucuuugggcguugguca

SEQ ID NO: 3607831 - RNA, 13 nt, Human
auucuuuuaaaag

SEQ ID NO: 3607832 - RNA, 14 nt, Human
auucuuuuaacuuc

SEQ ID NO: 3607833 - RNA, 17 nt, Human
auucuuuuaacuucuuu

SEQ ID NO: 3607834 - RNA, 22 nt, Human
auucuuuuaauuguuucagaau

SEQ ID NO: 3607835 - RNA, 22 nt, Human
auucuuuuauacucagcuuucu

SEQ ID NO: 3607836 - RNA, 15 nt, Human
auucuuuugaauugu

SEQ ID NO: 3607837 - RNA, 17 nt, Human
auucuuuuguaauuuaa

SEQ ID NO: 3607838 - RNA, 16 nt, Human
auucuuuuuaaaguau

SEQ ID NO: 3607839 - RNA, 14 nt, Human
auucuuuuugcucu

SEQ ID NO: 3607840 - RNA, 15 nt, Human
auucuuuuugcucua

SEQ ID NO: 3607841 - RNA, 19 nt, Human
auucuuuuugcucuaaaau

SEQ ID NO: 3607842 - RNA, 21 nt, Human
auucuuuuugcucuaaaauau

SEQ ID NO: 3607843 - RNA, 22 nt, Human
auucuuuuugcucuaaaauauu

SEQ ID NO: 3607844 - RNA, 16 nt, Human
auucuuuuuuauuaau

SEQ ID NO: 3607845 - RNA, 16 nt, Human
auugaaaaaaauuggc

SEQ ID NO: 3607846 - RNA, 19 nt, Human
auugaaaaaaauuggcauu

SEQ ID NO: 3607847 - RNA, 17 nt, Human
auugaaaaacucuuuau

SEQ ID NO: 3607848 - RNA, 15 nt, Human
auugaaaaaucacca

SEQ ID NO: 3607849 - RNA, 14 nt, Human
auugaaaaggaaga

SEQ ID NO: 3607850 - RNA, 17 nt, Human
auugaaaaggaagauca

SEQ ID NO: 3607851 - RNA, 16 nt, Human
auugaaaaguuuuugu

SEQ ID NO: 3607852 - RNA, 19 nt, Human
auugaaaaguuuuuguuug

SEQ ID NO: 3607853 - RNA, 22 nt, Human
auugaaaauaggagagagauca

SEQ ID NO: 3607854 - RNA, 21 nt, Human
auugaaaauaguaaaugcuuu

SEQ ID NO: 3607855 - RNA, 16 nt, Human
auugaaaauguaagua

SEQ ID NO: 3607856 - RNA, 22 nt, Human
auugaaaauguccaggaaagug

SEQ ID NO: 3607857 - RNA, 18 nt, Human
auugaaaauugaaaagua

SEQ ID NO: 3607858 - RNA, 18 nt, Human
auugaaagaauguaaagc

SEQ ID NO: 3607859 - RNA, 16 nt, Human
auugaaagaauuaucc

SEQ ID NO: 3607860 - RNA, 15 nt, Human
auugaaagagaacca

SEQ ID NO: 3607861 - RNA, 18 nt, Human
auugaaagagaaccaguu

SEQ ID NO: 3607862 - RNA, 12 nt, Human
auugaaaucuuu

SEQ ID NO: 3607863 - RNA, 17 nt, Human
auugaaaucuuuuugcu

SEQ ID NO: 3607864 - RNA, 14 nt, Human
auugaaauuuauac

SEQ ID NO: 3607865 - RNA, 18 nt, Human
auugaacacaaacuguaa

SEQ ID NO: 3607866 - RNA, 19 nt, Human
auugaacacaaacuguaaa

SEQ ID NO: 3607867 - RNA, 14 nt, Human
auugaacccaggag

SEQ ID NO: 3607868 - RNA, 15 nt, Human
auugaacucugagag

SEQ ID NO: 3607869 - RNA, 16 nt, Human
auugaacuuuuguacu

SEQ ID NO: 3607870 - RNA, 10 nt, Human
auugaagaau

SEQ ID NO: 3607871 - RNA, 16 nt, Human
auugaagaauguuaga

SEQ ID NO: 3607872 - RNA, 20 nt, Human
auugaagacaauuugauaca

SEQ ID NO: 3607873 - RNA, 14 nt, Human
auugaagcagagug

SEQ ID NO: 3607874 - RNA, 22 nt, Human
auugaagcauuuuauaaaucgc

SEQ ID NO: 3607875 - RNA, 15 nt, Human
auugaaggaaagauu

SEQ ID NO: 3607876 - RNA, 22 nt, Human
auugaaggugauaagggaaaag

SEQ ID NO: 3607877 - RNA, 16 nt, Human
auugaaguaaacuuuu

SEQ ID NO: 3607878 - RNA, 22 nt, Human
auugaaguaaacuuuuuguucu

SEQ ID NO: 3607879 - RNA, 14 nt, Human
auugaaguaaugaa

SEQ ID NO: 3607880 - RNA, 19 nt, Human
auugaaguauuuugcugga

SEQ ID NO: 3607881 - RNA, 22 nt, Human
auugaauaaugguaccagauaa

SEQ ID NO: 3607882 - RNA, 15 nt, Human
auugaauacuuugaa

SEQ ID NO: 3607883 - RNA, 18 nt, Human
auugaauacuuugaaugu

SEQ ID NO: 3607884 - RNA, 23 nt, Human
auugaauauaauauauuugugua

SEQ ID NO: 3607885 - RNA, 14 nt, Human
auugaauauugugu

SEQ ID NO: 3607886 - RNA, 15 nt, Human
auugaauauuguguu

SEQ ID NO: 3607887 - RNA, 23 nt, Human
auugaauauuguguuccuuuuua

SEQ ID NO: 3607888 - RNA, 21 nt, Human
auugaauggcuauguuuuuaa

SEQ ID NO: 3607889 - RNA, 23 nt, Human
auugaauggcuauguuuuuaaug

SEQ ID NO: 3607890 - RNA, 21 nt, Human
auugaauuaucuugguugaaa

SEQ ID NO: 3607891 - RNA, 13 nt, Human
auugaauuuaaca

SEQ ID NO: 3607892 - RNA, 16 nt, Human
auugaauuuaacaaug

SEQ ID NO: 3607893 - RNA, 23 nt, Human
auugaauuuuuccuaugcuauug

SEQ ID NO: 3607894 - RNA, 15 nt, Human
auugacaagucauuu

SEQ ID NO: 3607895 - RNA, 22 nt, Human
auaaagccucaagguuuuaggu

SEQ ID NO: 3607896 - RNA, 20 nt, Human
auaaagccuguuuugucuuu

SEQ ID NO: 3607897 - RNA, 20 nt, Human
auaaagccuucaaacucccu

SEQ ID NO: 3607898 - RNA, 17 nt, Human
auaaagcgauauacaga

SEQ ID NO: 3607899 - RNA, 22 nt, Human
auaaagcgauauacagaugaaa

SEQ ID NO: 3607900 - RNA, 21 nt, Human
auaaagcugccccaucugggg

SEQ ID NO: 3607901 - RNA, 13 nt, Human
auaaagcuuguug

SEQ ID NO: 3607902 - RNA, 12 nt, Human
auaaaggaaaag

SEQ ID NO: 3607903 - RNA, 17 nt, Human
auaaaggaugugauugu

SEQ ID NO: 3607904 - RNA, 21 nt, Human
auaaaggaugugauuguggaa

SEQ ID NO: 3607905 - RNA, 18 nt, Human
auaaaggauuaaugucaa

SEQ ID NO: 3607906 - RNA, 17 nt, Human
auaaaggcaguuuucua

SEQ ID NO: 3607907 - RNA, 14 nt, Human
auaaaggccuuuuu

SEQ ID NO: 3607908 - RNA, 16 nt, Human
auaaaggcuaacuaug

SEQ ID NO: 3607909 - RNA, 14 nt, Human
auaaagggaacaaa

SEQ ID NO: 3607910 - RNA, 17 nt, Human
auaaagggggagggaaa

SEQ ID NO: 3607911 - RNA, 16 nt, Human
auaaagguuauuuucu

SEQ ID NO: 3607912 - RNA, 13 nt, Human
auaaaguagaaau

SEQ ID NO: 3607913 - RNA, 16 nt, Human
auaaaguaguaaaaau

SEQ ID NO: 3607914 - RNA, 16 nt, Human
auaaaguaguaaaaga

SEQ ID NO: 3607915 - RNA, 14 nt, Human
auaaaguaucauca

SEQ ID NO: 3607916 - RNA, 15 nt, Human
auaaaguaucaugca

SEQ ID NO: 3607917 - RNA, 18 nt, Human
auaaaguauuccaccuua

SEQ ID NO: 3607918 - RNA, 19 nt, Human
auaaaguauuuaauuagug

SEQ ID NO: 3607919 - RNA, 22 nt, Human
auaaagugcugcggagcaagag

SEQ ID NO: 3607920 - RNA, 16 nt, Human
auaaagugcuuuaaaa

SEQ ID NO: 3607921 - RNA, 14 nt, Human
auaaaguguaacaa

SEQ ID NO: 3607922 - RNA, 22 nt, Human
auaaaguuagaaucuauuuucu

SEQ ID NO: 3607923 - RNA, 15 nt, Human
auaaaguucuguacu

SEQ ID NO: 3607924 - RNA, 21 nt, Human
auaaaguugauaaagauuuuu

SEQ ID NO: 3607925 - RNA, 16 nt, Human
auaaaguuggugacag

SEQ ID NO: 3607926 - RNA, 17 nt, Human
auaaaguuggugacaga

SEQ ID NO: 3607927 - RNA, 15 nt, Human
auaaaguuugaucuu

SEQ ID NO: 3607928 - RNA, 17 nt, Human
auaaaguuuuauauauu

SEQ ID NO: 3607929 - RNA, 21 nt, Human
auaaaguuuuauauauuauau

SEQ ID NO: 3607930 - RNA, 14 nt, Human
auaaauaaaaauaa

SEQ ID NO: 3607931 - RNA, 13 nt, Human
auaaauaaaacau

SEQ ID NO: 3607932 - RNA, 14 nt, Human
auaaauaaaagccu

SEQ ID NO: 3607933 - RNA, 15 nt, Human
auaaauaaaagccuc

SEQ ID NO: 3607934 - RNA, 13 nt, Human
auaaauaaaguuu

SEQ ID NO: 3607935 - RNA, 14 nt, Human
auaaauaaauauau

SEQ ID NO: 3607936 - RNA, 16 nt, Human
auaaauaaaugcaaua

SEQ ID NO: 3607937 - RNA, 12 nt, Human
auaaauaacuuu

SEQ ID NO: 3607938 - RNA, 12 nt, Human
auaaauaauuuu

SEQ ID NO: 3607939 - RNA, 12 nt, Human
auaaauacauac

SEQ ID NO: 3607940 - RNA, 19 nt, Human
auaaauacauacggucagg

SEQ ID NO: 3607941 - RNA, 22 nt, Human
auaaauacauacggucagguuu

SEQ ID NO: 3607942 - RNA, 14 nt, Human
auaaauaccucuua

SEQ ID NO: 3607943 - RNA, 18 nt, Human
auaaauagaaaaguagac

SEQ ID NO: 3607944 - RNA, 11 nt, Human
auaaauagcua

SEQ ID NO: 3607945 - RNA, 21 nt, Human
auaaauagcuagacuggugac

SEQ ID NO: 3607946 - RNA, 15 nt, Human
auaaauagcuauauc

SEQ ID NO: 3607947 - RNA, 16 nt, Human
auaaauauaagccuuu

SEQ ID NO: 3607948 - RNA, 14 nt, Human
auaaauauauauaa

SEQ ID NO: 3607949 - RNA, 16 nt, Human
auaaauauauauaaac

SEQ ID NO: 3607950 - RNA, 21 nt, Human
auaaauauauauaaaccuaaa

SEQ ID NO: 3607951 - RNA, 22 nt, Human
auaaauauauauaaaccuaaaa

SEQ ID NO: 3607952 - RNA, 17 nt, Human
auaaauauauauaaaga

SEQ ID NO: 3607953 - RNA, 12 nt, Human
auaaauauauua

SEQ ID NO: 3607954 - RNA, 14 nt, Human
auaaauauauuauu

SEQ ID NO: 3607955 - RNA, 14 nt, Human
auaaauauccuuua

SEQ ID NO: 3607956 - RNA, 14 nt, Human
auaaauaugaagcu

SEQ ID NO: 3607957 - RNA, 13 nt, Human
auaaauaugcagu

SEQ ID NO: 3607958 - RNA, 21 nt, Human
auaaauauugucuuuuuguau

SEQ ID NO: 3607959 - RNA, 11 nt, Human
auaaauauuua

SEQ ID NO: 3607960 - RNA, 14 nt, Human
auaaauauuuaugu

SEQ ID NO: 3607961 - RNA, 18 nt, Human
auaaauauuuuugccaua

SEQ ID NO: 3607962 - RNA, 15 nt, Human
auaaaucagucaagc

SEQ ID NO: 3607963 - RNA, 14 nt, Human
auaaaucauauuga

SEQ ID NO: 3607964 - RNA, 20 nt, Human
auaaaucauucuuacuaaaa

SEQ ID NO: 3607965 - RNA, 19 nt, Human
auaaaucauuuuaugucaa

SEQ ID NO: 3607966 - RNA, 18 nt, Human
auaaauccacccauguua

SEQ ID NO: 3607967 - RNA, 20 nt, Human
auaaauccacccauguuauc

SEQ ID NO: 3607968 - RNA, 20 nt, Human
auaaauccagugaccucucu

SEQ ID NO: 3607969 - RNA, 14 nt, Human
auaaaucgcuuuug

SEQ ID NO: 3607970 - RNA, 19 nt, Human
auaaaucgcuuuugauaau

SEQ ID NO: 3607971 - RNA, 18 nt, Human
auaaaucugacccagugc

SEQ ID NO: 3607972 - RNA, 22 nt, Human
auaaaucugugaacuugaaauu

SEQ ID NO: 3607973 - RNA, 18 nt, Human
auaaaucuuccaaaguuu

SEQ ID NO: 3607974 - RNA, 15 nt, Human
auaaaugaaugucac

SEQ ID NO: 3607975 - RNA, 20 nt, Human
auaaaugagcuauguauuaa

SEQ ID NO: 3607976 - RNA, 18 nt, Human
auaaaugauucuuaguga

SEQ ID NO: 3607977 - RNA, 17 nt, Human
auaaaugcaauauguau

SEQ ID NO: 3607978 - RNA, 18 nt, Human
auaaaugcaauauguauu

SEQ ID NO: 3607979 - RNA, 14 nt, Human
auaaaugcagccca

SEQ ID NO: 3607980 - RNA, 18 nt, Human
auaaaugccaucaauaaa

SEQ ID NO: 3607981 - RNA, 21 nt, Human
auaaaugcuuuuaaaaaucua

SEQ ID NO: 3607982 - RNA, 13 nt, Human
auaaauggaaauc

SEQ ID NO: 3607983 - RNA, 16 nt, Human
auaaauggcugguuuu

SEQ ID NO: 3607984 - RNA, 16 nt, Human
auaaaugguuaaaaga

SEQ ID NO: 3607985 - RNA, 16 nt, Human
auaaauguauauacac

SEQ ID NO: 3607986 - RNA, 13 nt, Human
auaaauguaucau

SEQ ID NO: 3607987 - RNA, 17 nt, Human
auaaauguaucauagaa

SEQ ID NO: 3607988 - RNA, 17 nt, Human
auaaaugucauuaaaau

SEQ ID NO: 3607989 - RNA, 12 nt, Human
auaaaugucugu

SEQ ID NO: 3607990 - RNA, 20 nt, Human
auaaaugucuuuuuuuuaau

SEQ ID NO: 3607991 - RNA, 15 nt, Human
auaaauguuaagaaa

SEQ ID NO: 3607992 - RNA, 14 nt, Human
auaaauuaggacca

SEQ ID NO: 3607993 - RNA, 11 nt, Human
auaaauuauuu

SEQ ID NO: 3607994 - RNA, 19 nt, Human
auaaauuauuugauuauuu

SEQ ID NO: 3607995 - RNA, 23 nt, Human
auaaauucacuuucauuuuugau

SEQ ID NO: 3607996 - RNA, 12 nt, Human
auaaauucagau

SEQ ID NO: 3607997 - RNA, 13 nt, Human
auaaauucagaua

SEQ ID NO: 3607998 - RNA, 22 nt, Human
auaaauucagauauauuuuuca

SEQ ID NO: 3607999 - RNA, 20 nt, Human
auaaauuccucuuugcuuug

SEQ ID NO: 3608000 - RNA, 21 nt, Human
auaaauuccucuuugcuuugc

SEQ ID NO: 3608001 - RNA, 21 nt, Human
auaaauucuauaggaacauau

SEQ ID NO: 3608002 - RNA, 14 nt, Human
auaaauugaaauau

SEQ ID NO: 3608003 - RNA, 13 nt, Human
auaaauugaaauu

SEQ ID NO: 3608004 - RNA, 17 nt, Human
auaaauugaaauuguga

SEQ ID NO: 3608005 - RNA, 21 nt, Human
auaaauugcacaccuuggaau

SEQ ID NO: 3608006 - RNA, 12 nt, Human
auaaauugcaug

SEQ ID NO: 3608007 - RNA, 20 nt, Human
auaaauugcaugcugcuuua

SEQ ID NO: 3608008 - RNA, 17 nt, Human
auaaauuguauauucac

SEQ ID NO: 3608009 - RNA, 19 nt, Human
auaaauuguauauucacuu

SEQ ID NO: 3608010 - RNA, 14 nt, Human
auaaauuguuuagu

SEQ ID NO: 3608011 - RNA, 22 nt, Human
auaaauuguuuaguggaaaaua

SEQ ID NO: 3608012 - RNA, 14 nt, Human
auaaauuuauuuac

SEQ ID NO: 3608013 - RNA, 17 nt, Human
auaaauuucgcuucuua

SEQ ID NO: 3608014 - RNA, 12 nt, Human
auaaauuugacu

SEQ ID NO: 3608015 - RNA, 15 nt, Human
auaaauuuguguaau

SEQ ID NO: 3608016 - RNA, 20 nt, Human
auaaauuuguguaauauuac

SEQ ID NO: 3608017 - RNA, 16 nt, Human
auaaauuuugaaaagu

SEQ ID NO: 3608018 - RNA, 21 nt, Human
auaacaaaaucacuuccauag

SEQ ID NO: 3608019 - RNA, 14 nt, Human
auaacaaaauggac

SEQ ID NO: 3608020 - RNA, 20 nt, Human
auaacaaagauaucuuuucu

SEQ ID NO: 3608021 - RNA, 21 nt, Human
auaacaaaggauacuuauuua

SEQ ID NO: 3608022 - RNA, 21 nt, Human
auaacaaaugccaaauuaaaa

SEQ ID NO: 3608023 - RNA, 16 nt, Human
auaacaaugugcucuc

SEQ ID NO: 3608024 - RNA, 14 nt, Human
auaacaauuccucu

SEQ ID NO: 3608025 - RNA, 13 nt, Human
auaacacacagcu

SEQ ID NO: 3608026 - RNA, 11 nt, Human
auaacacacau

SEQ ID NO: 3608027 - RNA, 16 nt, Human
auaacacacuuuuuau

SEQ ID NO: 3608028 - RNA, 22 nt, Human
auaacacagagagacagacuug

SEQ ID NO: 3608029 - RNA, 13 nt, Human
auaacacauuuuu

SEQ ID NO: 3608030 - RNA, 13 nt, Human
auaacaccugcca

SEQ ID NO: 3608031 - RNA, 21 nt, Human
auaacacucuaggauguauau

SEQ ID NO: 3608032 - RNA, 16 nt, Human
auaacacugugaagag

SEQ ID NO: 3608033 - RNA, 12 nt, Human
auaacagcacug

SEQ ID NO: 3608034 - RNA, 17 nt, Human
auaacagccgcuccaga

SEQ ID NO: 3608035 - RNA, 13 nt, Human
auaacagcugcaa

SEQ ID NO: 3608036 - RNA, 18 nt, Human
auaacaggcauuuguuca

SEQ ID NO: 3608037 - RNA, 18 nt, Human
auaacaggguaaauuauu

SEQ ID NO: 3608038 - RNA, 15 nt, Human
auaacaguaguguua

SEQ ID NO: 3608039 - RNA, 22 nt, Human
auaacauagaauugcaaucuau

SEQ ID NO: 3608040 - RNA, 11 nt, Human
auaacauauau

SEQ ID NO: 3608041 - RNA, 20 nt, Human
auaacauauauggaagagga

SEQ ID NO: 3608042 - RNA, 17 nt, Human
auaacauccagagcuuu

SEQ ID NO: 3608043 - RNA, 20 nt, Human
auaacaucuuuauugaaauu

SEQ ID NO: 3608044 - RNA, 21 nt, Human
auaacaucuuuauugaaauuc

SEQ ID NO: 3608045 - RNA, 14 nt, Human
auaacaugaaauga

SEQ ID NO: 3608046 - RNA, 20 nt, Human
auaacauuaccuuacugugg

SEQ ID NO: 3608047 - RNA, 16 nt, Human
auuccaacaguuuaau

SEQ ID NO: 3608048 - RNA, 17 nt, Human
auuccaacaguuuaaug

SEQ ID NO: 3608049 - RNA, 19 nt, Human
auuccaacucguauagcau

SEQ ID NO: 3608050 - RNA, 23 nt, Human
auuccaacucguauagcaugcau

SEQ ID NO: 3608051 - RNA, 14 nt, Human
auuccaagacagua

SEQ ID NO: 3608052 - RNA, 22 nt, Human
auuccaagacaugucuguucua

SEQ ID NO: 3608053 - RNA, 13 nt, Human
auuccacagcugc

SEQ ID NO: 3608054 - RNA, 16 nt, Human
auuccaccugcaauca

SEQ ID NO: 3608055 - RNA, 16 nt, Human
auuccaccuuaaauua

SEQ ID NO: 3608056 - RNA, 23 nt, Human
auuccaccuuaaauuaaacaauu

SEQ ID NO: 3608057 - RNA, 17 nt, Human
auuccacuacaccuggc

SEQ ID NO: 3608058 - RNA, 19 nt, Human
auuccacuacaccuggcug

SEQ ID NO: 3608059 - RNA, 12 nt, Human
auuccacuggac

SEQ ID NO: 3608060 - RNA, 18 nt, Human
auuccagaauaucuggga

SEQ ID NO: 3608061 - RNA, 18 nt, Human
auuccagaaugaagaauu

SEQ ID NO: 3608062 - RNA, 18 nt, Human
auuccagagaguggcucc

SEQ ID NO: 3608063 - RNA, 16 nt, Human
auuccagaucccaggc

SEQ ID NO: 3608064 - RNA, 14 nt, Human
auuccagccccucu

SEQ ID NO: 3608065 - RNA, 16 nt, Human
auuccagcucauucau

SEQ ID NO: 3608066 - RNA, 19 nt, Human
auuccagcucauucauuuu

SEQ ID NO: 3608067 - RNA, 20 nt, Human
auuccagucaggcucucugg

SEQ ID NO: 3608068 - RNA, 15 nt, Human
auuccauaauuccau

SEQ ID NO: 3608069 - RNA, 16 nt, Human
auuccauaguauauua

SEQ ID NO: 3608070 - RNA, 18 nt, Human
auuccauaguauauuaaa

SEQ ID NO: 3608071 - RNA, 21 nt, Human
auuccauaguauauuaaaaau

SEQ ID NO: 3608072 - RNA, 21 nt, Human
auuccauaucuugcgaaucca

SEQ ID NO: 3608073 - RNA, 15 nt, Human
auuccauauuagaaa

SEQ ID NO: 3608074 - RNA, 19 nt, Human
auuccauauuagaaaacuu

SEQ ID NO: 3608075 - RNA, 20 nt, Human
auuccauauuagaaaacuuu

SEQ ID NO: 3608076 - RNA, 16 nt, Human
auuccauauucaugua

SEQ ID NO: 3608077 - RNA, 13 nt, Human
auuccauauuuau

SEQ ID NO: 3608078 - RNA, 17 nt, Human
auuccauauuuauucaa

SEQ ID NO: 3608079 - RNA, 19 nt, Human
auuccaugaaucgcuucuc

SEQ ID NO: 3608080 - RNA, 15 nt, Human
auuccaugaauguau

SEQ ID NO: 3608081 - RNA, 16 nt, Human
auuccaugaauguauc

SEQ ID NO: 3608082 - RNA, 13 nt, Human
auuccaugacugc

SEQ ID NO: 3608083 - RNA, 20 nt, Human
auuccaugacugcuugcccu

SEQ ID NO: 3608084 - RNA, 14 nt, Human
auuccaugugccca

SEQ ID NO: 3608085 - RNA, 15 nt, Human
auuccaugugcccag

SEQ ID NO: 3608086 - RNA, 16 nt, Human
auuccaugugcccagu

SEQ ID NO: 3608087 - RNA, 23 nt, Human
auuccauugguccaagauuccgg

SEQ ID NO: 3608088 - RNA, 20 nt, Human
auuccauuuacugcauucuu

SEQ ID NO: 3608089 - RNA, 15 nt, Human
auuccauuuaucuuu

SEQ ID NO: 3608090 - RNA, 14 nt, Human
auucccaagaaaug

SEQ ID NO: 3608091 - RNA, 18 nt, Human
auucccacaccuccacag

SEQ ID NO: 3608092 - RNA, 19 nt, Human
auucccacaccuccacagu

SEQ ID NO: 3608093 - RNA, 22 nt, Human
auucccacccaauucaaaacau

SEQ ID NO: 3608094 - RNA, 19 nt, Human
auucccagagcaaaauaau

SEQ ID NO: 3608095 - RNA, 18 nt, Human
auucccagauuugaagac

SEQ ID NO: 3608096 - RNA, 18 nt, Human
auucccaggaguucugcu

SEQ ID NO: 3608097 - RNA, 20 nt, Human
auucccaggaguucugcuca

SEQ ID NO: 3608098 - RNA, 20 nt, Human
auucccagggaagugcucug

SEQ ID NO: 3608099 - RNA, 18 nt, Human
auucccauugaaaaugua

SEQ ID NO: 3608100 - RNA, 14 nt, Human
auuccccagccucu

SEQ ID NO: 3608101 - RNA, 20 nt, Human
auuccccaggaggccagccu

SEQ ID NO: 3608102 - RNA, 22 nt, Human
auuccccagguggcugacccag

SEQ ID NO: 3608103 - RNA, 18 nt, Human
auuccccaucucaggcca

SEQ ID NO: 3608104 - RNA, 14 nt, Human
auuccccauucuuc

SEQ ID NO: 3608105 - RNA, 13 nt, Human
auuccccauugcc

SEQ ID NO: 3608106 - RNA, 20 nt, Human
auuccccauugccuccuccu

SEQ ID NO: 3608107 - RNA, 20 nt, Human
auuccccggggcguuucuuu

SEQ ID NO: 3608108 - RNA, 23 nt, Human
auuccccgucucugguuccuccc

SEQ ID NO: 3608109 - RNA, 16 nt, Human
auucccguuuugucac

SEQ ID NO: 3608110 - RNA, 17 nt, Human
auucccuagaucuuucu

SEQ ID NO: 3608111 - RNA, 11 nt, Human
auucccucacu

SEQ ID NO: 3608112 - RNA, 21 nt, Human
auucccuccugcuacucuguu

SEQ ID NO: 3608113 - RNA, 17 nt, Human
auucccucgucuuuccc

SEQ ID NO: 3608114 - RNA, 18 nt, Human
auucccucucccaggccc

SEQ ID NO: 3608115 - RNA, 13 nt, Human
auucccucucucu

SEQ ID NO: 3608116 - RNA, 19 nt, Human
auucccucucucugacucu

SEQ ID NO: 3608117 - RNA, 20 nt, Human
auucccucucucugacucuc

SEQ ID NO: 3608118 - RNA, 20 nt, Human
auucccugagucaccaggaa

SEQ ID NO: 3608119 - RNA, 19 nt, Human
auucccuggaccagaugcu

SEQ ID NO: 3608120 - RNA, 21 nt, Human
auucccuggccuuucauauuu

SEQ ID NO: 3608121 - RNA, 16 nt, Human
auucccuucaucugga

SEQ ID NO: 3608122 - RNA, 23 nt, Human
auucccuuccugccagccccugc

SEQ ID NO: 3608123 - RNA, 14 nt, Human
auuccgcaucccua

SEQ ID NO: 3608124 - RNA, 23 nt, Human
auuccggaaacuaguguacauuu

SEQ ID NO: 3608125 - RNA, 13 nt, Human
auuccggauccua

SEQ ID NO: 3608126 - RNA, 16 nt, Human
auuccggauccuaagc

SEQ ID NO: 3608127 - RNA, 14 nt, Human
auuccguuuacauu

SEQ ID NO: 3608128 - RNA, 14 nt, Human
auuccuaaaauuau

SEQ ID NO: 3608129 - RNA, 17 nt, Human
auuccuaaacuaucuuu

SEQ ID NO: 3608130 - RNA, 19 nt, Human
auuccuaaacuaucuuuuu

SEQ ID NO: 3608131 - RNA, 20 nt, Human
auuccuaaacuaucuuuuuu

SEQ ID NO: 3608132 - RNA, 18 nt, Human
auuccuaaagaaaaauau

SEQ ID NO: 3608133 - RNA, 20 nt, Human
auuccuaacacagcaugugu

SEQ ID NO: 3608134 - RNA, 18 nt, Human
auuccuaacuuuucaaug

SEQ ID NO: 3608135 - RNA, 18 nt, Human
auuccuacaaagauguuu

SEQ ID NO: 3608136 - RNA, 17 nt, Human
auuccuacaauauauau

SEQ ID NO: 3608137 - RNA, 13 nt, Human
auuccuacagcac

SEQ ID NO: 3608138 - RNA, 16 nt, Human
auuccuagaauuaaac

SEQ ID NO: 3608139 - RNA, 21 nt, Human
auuccuagaauuaaaccagau

SEQ ID NO: 3608140 - RNA, 14 nt, Human
auuccuauugugau

SEQ ID NO: 3608141 - RNA, 17 nt, Human
auuccuauugugauuug

SEQ ID NO: 3608142 - RNA, 17 nt, Human
auuccucaacguauugu

SEQ ID NO: 3608143 - RNA, 18 nt, Human
auuccucaugaauguaaa

SEQ ID NO: 3608144 - RNA, 19 nt, Human
auuccucaugaauguaaau

SEQ ID NO: 3608145 - RNA, 13 nt, Human
auuccuccugcuc

SEQ ID NO: 3608146 - RNA, 16 nt, Human
auuccuccugcucaua

SEQ ID NO: 3608147 - RNA, 13 nt, Human
auuccucugggaa

SEQ ID NO: 3608148 - RNA, 22 nt, Human
auuccucugggaauguuacauu

SEQ ID NO: 3608149 - RNA, 18 nt, Human
auuccucuuugcuuugcu

SEQ ID NO: 3608150 - RNA, 12 nt, Human
auuccucuuuuc

SEQ ID NO: 3608151 - RNA, 17 nt, Human
auuccucuuuucucugc

SEQ ID NO: 3608152 - RNA, 13 nt, Human
auuccugaacagg

SEQ ID NO: 3608153 - RNA, 24 nt, Human
auuccugaacuauaacaccugcca

SEQ ID NO: 3608154 - RNA, 19 nt, Human
auuccugaagaaccagucc

SEQ ID NO: 3608155 - RNA, 11 nt, Human
auuccugaccc

SEQ ID NO: 3608156 - RNA, 12 nt, Human
auuccugaccca

SEQ ID NO: 3608157 - RNA, 15 nt, Human
auuccugacccaggc

SEQ ID NO: 3608158 - RNA, 16 nt, Human
auuccugacccaggcc

SEQ ID NO: 3608159 - RNA, 17 nt, Human
auuccugacccaggccg

SEQ ID NO: 3608160 - RNA, 16 nt, Human
auuccugauaugauuu

SEQ ID NO: 3608161 - RNA, 22 nt, Human
auuccugauaugauuuaaaaca

SEQ ID NO: 3608162 - RNA, 23 nt, Human
auuccugauaugauuuaaaacau

SEQ ID NO: 3608163 - RNA, 13 nt, Human
auuccugcagccu

SEQ ID NO: 3608164 - RNA, 14 nt, Human
auuccugcagccug

SEQ ID NO: 3608165 - RNA, 15 nt, Human
auuccugcagccugg

SEQ ID NO: 3608166 - RNA, 19 nt, Human
auuccugcagccuggaggc

SEQ ID NO: 3608167 - RNA, 18 nt, Human
auuccugcauuugugaaa

SEQ ID NO: 3608168 - RNA, 15 nt, Human
auuccuggagcccga

SEQ ID NO: 3608169 - RNA, 21 nt, Human
auuccuggagcccgaggcacc

SEQ ID NO: 3608170 - RNA, 16 nt, Human
auuccuguagcaucuu

SEQ ID NO: 3608171 - RNA, 17 nt, Human
auuccuguagcaucuuc

SEQ ID NO: 3608172 - RNA, 13 nt, Human
auuccuguauguu

SEQ ID NO: 3608173 - RNA, 22 nt, Human
auuccuuagacucuuuuccuuc

SEQ ID NO: 3608174 - RNA, 14 nt, Human
auuccuucagggug

SEQ ID NO: 3608175 - RNA, 15 nt, Human
auuccuucaggguga

SEQ ID NO: 3608176 - RNA, 12 nt, Human
auuccuuccugu

SEQ ID NO: 3608177 - RNA, 14 nt, Human
auuccuuccuguuc

SEQ ID NO: 3608178 - RNA, 23 nt, Human
auuccuucucccaucucuuccuu

SEQ ID NO: 3608179 - RNA, 11 nt, Human
auuccuucucu

SEQ ID NO: 3608180 - RNA, 15 nt, Human
auuccuucuuugaua

SEQ ID NO: 3608181 - RNA, 16 nt, Human
auuccuucuuugauaa

SEQ ID NO: 3608182 - RNA, 21 nt, Human
auuccuucuuugauaauguua

SEQ ID NO: 3608183 - RNA, 22 nt, Human
auuccuucuuugauaauguuaa

SEQ ID NO: 3608184 - RNA, 23 nt, Human
auuccuucuuugauaauguuaaa

SEQ ID NO: 3608185 - RNA, 21 nt, Human
auuccuuggcaugccuuccag

SEQ ID NO: 3608186 - RNA, 12 nt, Human
auuccuuuccag

SEQ ID NO: 3608187 - RNA, 11 nt, Human
auuccuuuccc

SEQ ID NO: 3608188 - RNA, 15 nt, Human
auuccuuucccuucc

SEQ ID NO: 3608189 - RNA, 17 nt, Human
auuccuuucccuuccuc

SEQ ID NO: 3608190 - RNA, 20 nt, Human
auuccuuucccuuccucuuc

SEQ ID NO: 3608191 - RNA, 16 nt, Human
auuccuuucuaucauu

SEQ ID NO: 3608192 - RNA, 17 nt, Human
auuccuuucuaucauuu

SEQ ID NO: 3608193 - RNA, 18 nt, Human
auuccuuuguguuucuau

SEQ ID NO: 3608194 - RNA, 19 nt, Human
auuccuuuucuuguuuauc

SEQ ID NO: 3608195 - RNA, 18 nt, Human
auuccuuuuuauuuauau

SEQ ID NO: 3608196 - RNA, 17 nt, Human
auucgagacagaaccuu

SEQ ID NO: 3608197 - RNA, 17 nt, Human
auugacaauaauuucag

SEQ ID NO: 3608198 - RNA, 18 nt, Human
auugacaauaauuucagg

SEQ ID NO: 3608199 - RNA, 17 nt, Human
auugacacagaaaaugu

SEQ ID NO: 3608200 - RNA, 12 nt, Human
auugacacugaa

SEQ ID NO: 3608201 - RNA, 20 nt, Human
auugacacuuaaaaaugguu

SEQ ID NO: 3608202 - RNA, 18 nt, Human
auugacagaucaagcugu

SEQ ID NO: 3608203 - RNA, 15 nt, Human
auugacagcuuugcu

SEQ ID NO: 3608204 - RNA, 17 nt, Human
auugacaggcgaaagaa

SEQ ID NO: 3608205 - RNA, 17 nt, Human
auugacaucagcaucac

SEQ ID NO: 3608206 - RNA, 15 nt, Human
auugacauguacaga

SEQ ID NO: 3608207 - RNA, 15 nt, Human
auugacauugaaauc

SEQ ID NO: 3608208 - RNA, 18 nt, Human
auugacauugaaaucuag

SEQ ID NO: 3608209 - RNA, 17 nt, Human
auugacauuuguaguug

SEQ ID NO: 3608210 - RNA, 18 nt, Human
auugacauuuguaguuga

SEQ ID NO: 3608211 - RNA, 15 nt, Human
auugaccaagaacug

SEQ ID NO: 3608212 - RNA, 13 nt, Human
auugaccauuuuu

SEQ ID NO: 3608213 - RNA, 21 nt, Human
auugaccguguuggucuguac

SEQ ID NO: 3608214 - RNA, 13 nt, Human
auugaccugaggc

SEQ ID NO: 3608215 - RNA, 14 nt, Human
auugaccuggaugg

SEQ ID NO: 3608216 - RNA, 20 nt, Human
auugaccuuuagguauuaca

SEQ ID NO: 3608217 - RNA, 16 nt, Human
auugacgauuccuucu

SEQ ID NO: 3608218 - RNA, 22 nt, Human
auugacuauuuucguucauuac

SEQ ID NO: 3608219 - RNA, 20 nt, Human
auugacucuggguccuuccu

SEQ ID NO: 3608220 - RNA, 21 nt, Human
auugacugguuuacaggcccu

SEQ ID NO: 3608221 - RNA, 21 nt, Human
auugacuuuagaaagcugaca

SEQ ID NO: 3608222 - RNA, 15 nt, Human
auugacuuucaguaa

SEQ ID NO: 3608223 - RNA, 13 nt, Human
auugacuuugucu

SEQ ID NO: 3608224 - RNA, 20 nt, Human
auugagaaaaauauauacua

SEQ ID NO: 3608225 - RNA, 22 nt, Human
auugagaaagagcacuuaagag

SEQ ID NO: 3608226 - RNA, 13 nt, Human
auugagaaaugug

SEQ ID NO: 3608227 - RNA, 16 nt, Human
auugagaaguucauug

SEQ ID NO: 3608228 - RNA, 13 nt, Human
auugagaauuuua

SEQ ID NO: 3608229 - RNA, 17 nt, Human
auugagaauuuuaaauu

SEQ ID NO: 3608230 - RNA, 19 nt, Human
auugagacaaaaauuaucu

SEQ ID NO: 3608231 - RNA, 20 nt, Human
auugagacaaaaauuaucua

SEQ ID NO: 3608232 - RNA, 19 nt, Human
auugagacagugcacauga

SEQ ID NO: 3608233 - RNA, 21 nt, Human
auugagaccgugaagauacuu

SEQ ID NO: 3608234 - RNA, 23 nt, Human
auugagaccgugaagauacuuug

SEQ ID NO: 3608235 - RNA, 21 nt, Human
auugagagagauguguaauuu

SEQ ID NO: 3608236 - RNA, 14 nt, Human
auugagaguuuugu

SEQ ID NO: 3608237 - RNA, 22 nt, Human
auugagauuguccucauuucuc

SEQ ID NO: 3608238 - RNA, 12 nt, Human
auugagauuucu

SEQ ID NO: 3608239 - RNA, 15 nt, Human
auugagcucucucau

SEQ ID NO: 3608240 - RNA, 20 nt, Human
auugagcucucugcccuuga

SEQ ID NO: 3608241 - RNA, 20 nt, Human
auugagcugauauaaauucu

SEQ ID NO: 3608242 - RNA, 19 nt, Human
auugagcugcagaaacgaa

SEQ ID NO: 3608243 - RNA, 22 nt, Human
auugagcugcuuuuuuugaaac

SEQ ID NO: 3608244 - RNA, 17 nt, Human
auugaggaaaaauaugu

SEQ ID NO: 3608245 - RNA, 21 nt, Human
auugaggaaaaauaugugaag

SEQ ID NO: 3608246 - RNA, 15 nt, Human
auugaggaagagucu

SEQ ID NO: 3608247 - RNA, 22 nt, Human
auugaggacacugauauggguc

SEQ ID NO: 3608248 - RNA, 18 nt, Human
auugaggccaagaauauu

SEQ ID NO: 3608249 - RNA, 14 nt, Human
auugaggcuuugug

SEQ ID NO: 3608250 - RNA, 15 nt, Human
auugaggcuuugugu

SEQ ID NO: 3608251 - RNA, 16 nt, Human
auugaggcuuuguguu

SEQ ID NO: 3608252 - RNA, 13 nt, Human
auugaguauuguu

SEQ ID NO: 3608253 - RNA, 16 nt, Human
auugaguauuguuuaa

SEQ ID NO: 3608254 - RNA, 20 nt, Human
auugaguauuguuuaaaaug

SEQ ID NO: 3608255 - RNA, 21 nt, Human
auugaguauuguuuaaaaugu

SEQ ID NO: 3608256 - RNA, 22 nt, Human
auugagucauuuuauauaugaa

SEQ ID NO: 3608257 - RNA, 14 nt, Human
auugaguuuguagg

SEQ ID NO: 3608258 - RNA, 21 nt, Human
auugaguuuguagguaaaaug

SEQ ID NO: 3608259 - RNA, 19 nt, Human
auugauaacagcacugacu

SEQ ID NO: 3608260 - RNA, 17 nt, Human
auugauaaccauagcau

SEQ ID NO: 3608261 - RNA, 17 nt, Human
auugauaagaucuuuua

SEQ ID NO: 3608262 - RNA, 17 nt, Human
auugauaaguucauaca

SEQ ID NO: 3608263 - RNA, 18 nt, Human
auugauaaugcuuucaca

SEQ ID NO: 3608264 - RNA, 21 nt, Human
auugauauacacggaugacuu

SEQ ID NO: 3608265 - RNA, 17 nt, Human
auugauaugaaaaauau

SEQ ID NO: 3608266 - RNA, 13 nt, Human
auugauauuugug

SEQ ID NO: 3608267 - RNA, 15 nt, Human
auugaucauaaacug

SEQ ID NO: 3608268 - RNA, 21 nt, Human
auugaucauuuuccccccacu

SEQ ID NO: 3608269 - RNA, 18 nt, Human
auugauccagaaagaaaa

SEQ ID NO: 3608270 - RNA, 21 nt, Human
auugaugaaaagauuuaagca

SEQ ID NO: 3608271 - RNA, 13 nt, Human
auugauggggaag

SEQ ID NO: 3608272 - RNA, 21 nt, Human
auugauguacagucugucaug

SEQ ID NO: 3608273 - RNA, 18 nt, Human
auugaugugcaaaaauuu

SEQ ID NO: 3608274 - RNA, 12 nt, Human
auugauguguuu

SEQ ID NO: 3608275 - RNA, 12 nt, Human
auugauguugau

SEQ ID NO: 3608276 - RNA, 14 nt, Human
auugauguuuccuu

SEQ ID NO: 3608277 - RNA, 16 nt, Human
auugauguuuucauag

SEQ ID NO: 3608278 - RNA, 22 nt, Human
auugauuccuuuuuucaaaauc

SEQ ID NO: 3608279 - RNA, 23 nt, Human
auugauugcuguguccaacucca

SEQ ID NO: 3608280 - RNA, 18 nt, Human
auugauugggaaaacauu

SEQ ID NO: 3608281 - RNA, 20 nt, Human
auugauugggaaaacauuug

SEQ ID NO: 3608282 - RNA, 22 nt, Human
auugauugggaaaacauuugcu

SEQ ID NO: 3608283 - RNA, 19 nt, Human
auugauugggcacaucauu

SEQ ID NO: 3608284 - RNA, 13 nt, Human
auugauuguauug

SEQ ID NO: 3608285 - RNA, 16 nt, Human
auugauuguauuguug

SEQ ID NO: 3608286 - RNA, 18 nt, Human
auugauuucccuucuucu

SEQ ID NO: 3608287 - RNA, 13 nt, Human
auugauuuccugu

SEQ ID NO: 3608288 - RNA, 16 nt, Human
auugauuuccuguguc

SEQ ID NO: 3608289 - RNA, 15 nt, Human
auugauuucugccuu

SEQ ID NO: 3608290 - RNA, 15 nt, Human
auugauuucuuuucu

SEQ ID NO: 3608291 - RNA, 14 nt, Human
auugauuugaagaa

SEQ ID NO: 3608292 - RNA, 16 nt, Human
auugauuugaagaaca

SEQ ID NO: 3608293 - RNA, 19 nt, Human
auugauuuuaaaauguaca

SEQ ID NO: 3608294 - RNA, 20 nt, Human
auugauuuuaaaauguacau

SEQ ID NO: 3608295 - RNA, 19 nt, Human
auugcaaaauacaugaagc

SEQ ID NO: 3608296 - RNA, 12 nt, Human
auugcaaaucuu

SEQ ID NO: 3608297 - RNA, 16 nt, Human
auugcaaaucuugaaa

SEQ ID NO: 3608298 - RNA, 17 nt, Human
auugcaacaaaauacau

SEQ ID NO: 3608299 - RNA, 22 nt, Human
auugcaacaaaauacauucuuu

SEQ ID NO: 3608300 - RNA, 19 nt, Human
auugcaacaggcugggcuu

SEQ ID NO: 3608301 - RNA, 14 nt, Human
auugcaauaaagua

SEQ ID NO: 3608302 - RNA, 14 nt, Human
auugcaauaucuga

SEQ ID NO: 3608303 - RNA, 17 nt, Human
auugcaauaucugaagc

SEQ ID NO: 3608304 - RNA, 17 nt, Human
auugcaauuuuaacaca

SEQ ID NO: 3608305 - RNA, 14 nt, Human
auugcacauuguuc

SEQ ID NO: 3608306 - RNA, 15 nt, Human
auugcacguggccuc

SEQ ID NO: 3608307 - RNA, 17 nt, Human
auugcagaaaauucugu

SEQ ID NO: 3608308 - RNA, 20 nt, Human
auugcagaacuaaacucauu

SEQ ID NO: 3608309 - RNA, 13 nt, Human
auugcagaauugu

SEQ ID NO: 3608310 - RNA, 19 nt, Human
auugcagcugggagaaggg

SEQ ID NO: 3608311 - RNA, 16 nt, Human
auugcagcuuuauguu

SEQ ID NO: 3608312 - RNA, 20 nt, Human
auugcagcuuuauguucauu

SEQ ID NO: 3608313 - RNA, 23 nt, Human
auugcaggagucccugccaucau

SEQ ID NO: 3608314 - RNA, 17 nt, Human
auugcaguuuaucauuc

SEQ ID NO: 3608315 - RNA, 18 nt, Human
auugcaguuuaucauuca

SEQ ID NO: 3608316 - RNA, 19 nt, Human
auugcaguuuaucauucaa

SEQ ID NO: 3608317 - RNA, 13 nt, Human
auugcauaaagca

SEQ ID NO: 3608318 - RNA, 15 nt, Human
auugcauaaagcaua

SEQ ID NO: 3608319 - RNA, 17 nt, Human
auugcauacuauuaaac

SEQ ID NO: 3608320 - RNA, 18 nt, Human
auugcauacuauuaaaca

SEQ ID NO: 3608321 - RNA, 21 nt, Human
auugcauacuuuguauuuuga

SEQ ID NO: 3608322 - RNA, 22 nt, Human
auugcaucaccucuguaauuuu

SEQ ID NO: 3608323 - RNA, 14 nt, Human
auugcaucacugua

SEQ ID NO: 3608324 - RNA, 15 nt, Human
auugcaucacuguau

SEQ ID NO: 3608325 - RNA, 16 nt, Human
auugcaucacuguauc

SEQ ID NO: 3608326 - RNA, 20 nt, Human
auugcaucuggguagcugua

SEQ ID NO: 3608327 - RNA, 22 nt, Human
auugcaucuggguagcuguaag

SEQ ID NO: 3608328 - RNA, 16 nt, Human
auugcaugcugcuuua

SEQ ID NO: 3608329 - RNA, 17 nt, Human
auugcaugcugcuuuaa

SEQ ID NO: 3608330 - RNA, 19 nt, Human
auugcauggguuuuguagg

SEQ ID NO: 3608331 - RNA, 14 nt, Human
auugcaugugacuc

SEQ ID NO: 3608332 - RNA, 23 nt, Human
auugcauuaaauauaauaugcac

SEQ ID NO: 3608333 - RNA, 13 nt, Human
auugcauucuauu

SEQ ID NO: 3608334 - RNA, 23 nt, Human
auugcauucuauugccuucuuug

SEQ ID NO: 3608335 - RNA, 16 nt, Human
auugcauuuccugaca

SEQ ID NO: 3608336 - RNA, 18 nt, Human
auugcauuuuuuaaaaca

SEQ ID NO: 3608337 - RNA, 20 nt, Human
auugcauuuuuuaaaacaag

SEQ ID NO: 3608338 - RNA, 21 nt, Human
auugcauuuuuuaaaacaaga

SEQ ID NO: 3608339 - RNA, 16 nt, Human
auugccaaaacccagc

SEQ ID NO: 3608340 - RNA, 20 nt, Human
auugccaaaacccagcugca

SEQ ID NO: 3608341 - RNA, 14 nt, Human
auugccaaacauua

SEQ ID NO: 3608342 - RNA, 19 nt, Human
auugccaaacauuaauguu

SEQ ID NO: 3608343 - RNA, 14 nt, Human
auugccaagggcuu

SEQ ID NO: 3608344 - RNA, 21 nt, Human
auugccaccucuaacagcacc

SEQ ID NO: 3608345 - RNA, 22 nt, Human
auugccaccucuaacagcacca

SEQ ID NO: 3608346 - RNA, 14 nt, Human
auugccagugacau

SEQ ID NO: 3608347 - RNA, 14 nt, Human
auugccagugucuu

SEQ ID NO: 3608348 - RNA, 15 nt, Human
auugccauauugcac

SEQ ID NO: 3608349 - RNA, 21 nt, Human
auugcccacgcuggagugcag

SEQ ID NO: 3608350 - RNA, 15 nt, Human
auugcccagucuuuc

SEQ ID NO: 3608351 - RNA, 18 nt, Human
auugccccaucuagacua

SEQ ID NO: 3608352 - RNA, 15 nt, Human
auugcccccagggca

SEQ ID NO: 3608353 - RNA, 11 nt, Human
auugcccuggu

SEQ ID NO: 3608354 - RNA, 14 nt, Human
auugccuauuucag

SEQ ID NO: 3608355 - RNA, 23 nt, Human
auugccucggcuggcuccccugc

SEQ ID NO: 3608356 - RNA, 18 nt, Human
auugccucugaaaagugu

SEQ ID NO: 3608357 - RNA, 14 nt, Human
auugccugcagaga

SEQ ID NO: 3608358 - RNA, 14 nt, Human
auugccuguuucug

SEQ ID NO: 3608359 - RNA, 21 nt, Human
auugccuguuucugauuugcu

SEQ ID NO: 3608360 - RNA, 18 nt, Human
auugccuuaacuggagcc

SEQ ID NO: 3608361 - RNA, 20 nt, Human
auugccuucauuuuaugaua

SEQ ID NO: 3608362 - RNA, 18 nt, Human
auugccuucuuugaagaa

SEQ ID NO: 3608363 - RNA, 13 nt, Human
auugccuuucugu

SEQ ID NO: 3608364 - RNA, 18 nt, Human
auugccuuugaauguuaa

SEQ ID NO: 3608365 - RNA, 19 nt, Human
auugccuuuuuauaacuuu

SEQ ID NO: 3608366 - RNA, 20 nt, Human
auugccuuuuuauaacuuuu

SEQ ID NO: 3608367 - RNA, 21 nt, Human
auugccuuuuuauaacuuuuu

SEQ ID NO: 3608368 - RNA, 17 nt, Human
auugccuuuuuucugua

SEQ ID NO: 3608369 - RNA, 23 nt, Human
auugccuuuuuucuguauaaaug

SEQ ID NO: 3608370 - RNA, 14 nt, Human
auugcgagagaugu

SEQ ID NO: 3608371 - RNA, 15 nt, Human
auugcgagagaugug

SEQ ID NO: 3608372 - RNA, 18 nt, Human
auugcgagagaugugugu

SEQ ID NO: 3608373 - RNA, 20 nt, Human
auugcgagagauguguguug

SEQ ID NO: 3608374 - RNA, 21 nt, Human
auugcgagagauguguguuga

SEQ ID NO: 3608375 - RNA, 13 nt, Human
auugcgcugcuac

SEQ ID NO: 3608376 - RNA, 16 nt, Human
auugcggacagccacg

SEQ ID NO: 3608377 - RNA, 20 nt, Human
auugcguuggucucugcauu

SEQ ID NO: 3608378 - RNA, 13 nt, Human
auugcuaaaugua

SEQ ID NO: 3608379 - RNA, 21 nt, Human
auugcuaaucaccaaaggcuc

SEQ ID NO: 3608380 - RNA, 16 nt, Human
auugcuaauguugcug

SEQ ID NO: 3608381 - RNA, 19 nt, Human
auugcuaauugcuguugaa

SEQ ID NO: 3608382 - RNA, 20 nt, Human
auugcuaauugcuguugaaa

SEQ ID NO: 3608383 - RNA, 14 nt, Human
auugcuacuguccu

SEQ ID NO: 3608384 - RNA, 15 nt, Human
auugcuacuguccua

SEQ ID NO: 3608385 - RNA, 15 nt, Human
auugcuagagcuccu

SEQ ID NO: 3608386 - RNA, 18 nt, Human
auugcuagagcuccuccc

SEQ ID NO: 3608387 - RNA, 19 nt, Human
auugcuagagcuccucccu

SEQ ID NO: 3608388 - RNA, 23 nt, Human
auugcuagagcuccucccucuca

SEQ ID NO: 3608389 - RNA, 17 nt, Human
auugcuagauaaaagcu

SEQ ID NO: 3608390 - RNA, 15 nt, Human
auugcuaguauuuga

SEQ ID NO: 3608391 - RNA, 17 nt, Human
auugcuaguauuugaau

SEQ ID NO: 3608392 - RNA, 21 nt, Human
auugcuaucuauugauaauuu

SEQ ID NO: 3608393 - RNA, 21 nt, Human
auugcucacaguuauuacaua

SEQ ID NO: 3608394 - RNA, 16 nt, Human
auugcucacccagugc

SEQ ID NO: 3608395 - RNA, 23 nt, Human
auugcucacccagugcccucucc

SEQ ID NO: 3608396 - RNA, 14 nt, Human
auugcucauuuuuu

SEQ ID NO: 3608397 - RNA, 16 nt, Human
auugcucccuaagacu

SEQ ID NO: 3608398 - RNA, 20 nt, Human
auugcuccugcucagaucuu

SEQ ID NO: 3608399 - RNA, 12 nt, Human
auugcuccuuga

SEQ ID NO: 3608400 - RNA, 16 nt, Human
auugcugaaauuuuau

SEQ ID NO: 3608401 - RNA, 21 nt, Human
auugcugaagggcauucuuuc

SEQ ID NO: 3608402 - RNA, 21 nt, Human
auugcugaauggaguuaaacu

SEQ ID NO: 3608403 - RNA, 16 nt, Human
auugcugacuguagcu

SEQ ID NO: 3608404 - RNA, 15 nt, Human
auugcugacugugua

SEQ ID NO: 3608405 - RNA, 21 nt, Human
auugcugagagaaauauggaa

SEQ ID NO: 3608406 - RNA, 12 nt, Human
auugcugauuuu

SEQ ID NO: 3608407 - RNA, 14 nt, Human
auugcugccacuuu

SEQ ID NO: 3608408 - RNA, 21 nt, Human
auugcugccacuuuuuaacua

SEQ ID NO: 3608409 - RNA, 20 nt, Human
auugcugcuugaggcaacuc

SEQ ID NO: 3608410 - RNA, 18 nt, Human
auugcuggcuggaaggga

SEQ ID NO: 3608411 - RNA, 15 nt, Human
auugcuggucuugua

SEQ ID NO: 3608412 - RNA, 17 nt, Human
auugcuggucuuguaag

SEQ ID NO: 3608413 - RNA, 21 nt, Human
auugcugguucuauuuaaugg

SEQ ID NO: 3608414 - RNA, 14 nt, Human
auugcuguccugga

SEQ ID NO: 3608415 - RNA, 19 nt, Human
auugcugugaauuagcuca

SEQ ID NO: 3608416 - RNA, 11 nt, Human
auugcugugcc

SEQ ID NO: 3608417 - RNA, 15 nt, Human
auugcuguguaucug

SEQ ID NO: 3608418 - RNA, 15 nt, Human
auugcuguugaaagc

SEQ ID NO: 3608419 - RNA, 17 nt, Human
auugcuguugcuugaau

SEQ ID NO: 3608420 - RNA, 17 nt, Human
auugcuguugucccucu

SEQ ID NO: 3608421 - RNA, 21 nt, Human
auugcuguugucccucugcua

SEQ ID NO: 3608422 - RNA, 17 nt, Human
auugcuuaaaauagcaa

SEQ ID NO: 3608423 - RNA, 20 nt, Human
auugcuuacauuuuuacaau

SEQ ID NO: 3608424 - RNA, 23 nt, Human
auugcuuaguaaaauuuauuuca

SEQ ID NO: 3608425 - RNA, 17 nt, Human
auugcuuauuuauugua

SEQ ID NO: 3608426 - RNA, 16 nt, Human
auugcuuccuccuccc

SEQ ID NO: 3608427 - RNA, 22 nt, Human
auugcuucuguaguacuccuua

SEQ ID NO: 3608428 - RNA, 17 nt, Human
auugcuucuucuccuau

SEQ ID NO: 3608429 - RNA, 17 nt, Human
auugcuugagcccagga

SEQ ID NO: 3608430 - RNA, 13 nt, Human
auugcuuuacugg

SEQ ID NO: 3608431 - RNA, 16 nt, Human
auugcuuuauaaauaa

SEQ ID NO: 3608432 - RNA, 17 nt, Human
auugcuuuauaaauaaa

SEQ ID NO: 3608433 - RNA, 18 nt, Human
auugcuuucguguaaauu

SEQ ID NO: 3608434 - RNA, 16 nt, Human
auugcuuucugaaauu

SEQ ID NO: 3608435 - RNA, 16 nt, Human
auugcuuugaaaaagu

SEQ ID NO: 3608436 - RNA, 17 nt, Human
auugcuuugaaaaaguu

SEQ ID NO: 3608437 - RNA, 21 nt, Human
auugcuuugaagcaguugugu

SEQ ID NO: 3608438 - RNA, 12 nt, Human
auugcuuugagc

SEQ ID NO: 3608439 - RNA, 21 nt, Human
auugcuuugauuaauccagaa

SEQ ID NO: 3608440 - RNA, 14 nt, Human
auugcuuuggucau

SEQ ID NO: 3608441 - RNA, 16 nt, Human
auugcuuuuaaaacua

SEQ ID NO: 3608442 - RNA, 19 nt, Human
auugcuuuuaaaauuuuaa

SEQ ID NO: 3608443 - RNA, 16 nt, Human
auugcuuuuauuuuga

SEQ ID NO: 3608444 - RNA, 18 nt, Human
auugcuuuuauuuugaaa

SEQ ID NO: 3608445 - RNA, 19 nt, Human
auugcuuuuauuuugaaaa

SEQ ID NO: 3608446 - RNA, 14 nt, Human
auugcuuuugugca

SEQ ID NO: 3608447 - RNA, 20 nt, Human
auugcuuuuucuaauguggu

SEQ ID NO: 3608448 - RNA, 14 nt, Human
auugcuuuuuuaaa

SEQ ID NO: 3608449 - RNA, 17 nt, Human
auugcuuuuuuaaauau

SEQ ID NO: 3608450 - RNA, 21 nt, Human
auugcuuuuuuccaaaacaaa

SEQ ID NO: 3608451 - RNA, 13 nt, Human
auuggaaacaagu

SEQ ID NO: 3608452 - RNA, 13 nt, Human
auuggaaauuuca

SEQ ID NO: 3608453 - RNA, 14 nt, Human
auuggaaauuucac

SEQ ID NO: 3608454 - RNA, 15 nt, Human
auuggaaauuucacg

SEQ ID NO: 3608455 - RNA, 16 nt, Human
auuggaacagaauguu

SEQ ID NO: 3608456 - RNA, 15 nt, Human
auuggaacagugaau

SEQ ID NO: 3608457 - RNA, 14 nt, Human
auuggaacuggagg

SEQ ID NO: 3608458 - RNA, 21 nt, Human
auuggaagagcagcaccuccu

SEQ ID NO: 3608459 - RNA, 12 nt, Human
auuggaagcagg

SEQ ID NO: 3608460 - RNA, 14 nt, Human
auuggaaggagaca

SEQ ID NO: 3608461 - RNA, 14 nt, Human
auuggaauuaaccu

SEQ ID NO: 3608462 - RNA, 16 nt, Human
auuggaauuaaccugg

SEQ ID NO: 3608463 - RNA, 20 nt, Human
auuggaauuaaccuggugcu

SEQ ID NO: 3608464 - RNA, 17 nt, Human
auuggacaaagaaccuu

SEQ ID NO: 3608465 - RNA, 19 nt, Human
auuggacaguaaaauccac

SEQ ID NO: 3608466 - RNA, 19 nt, Human
auuggacauuaagcaucac

SEQ ID NO: 3608467 - RNA, 15 nt, Human
auuggacccuuccau

SEQ ID NO: 3608468 - RNA, 15 nt, Human
auuggaggaaagcaa

SEQ ID NO: 3608469 - RNA, 22 nt, Human
auuggaggguaaaugauguggu

SEQ ID NO: 3608470 - RNA, 23 nt, Human
auuggagggugggagagcccagc

SEQ ID NO: 3608471 - RNA, 16 nt, Human
auuggauaaagcagcu

SEQ ID NO: 3608472 - RNA, 23 nt, Human
auuggauacagcaguagacauuu

SEQ ID NO: 3608473 - RNA, 22 nt, Human
auuggauauuuuuuacuuuaga

SEQ ID NO: 3608474 - RNA, 16 nt, Human
auuggauuauuuaaua

SEQ ID NO: 3608475 - RNA, 18 nt, Human
auuggauuuuauguugac

SEQ ID NO: 3608476 - RNA, 19 nt, Human
auuggcaccgaagcccaga

SEQ ID NO: 3608477 - RNA, 15 nt, Human
auuggcauggaaauu

SEQ ID NO: 3608478 - RNA, 21 nt, Human
auuggcauggaaauuuaaagc

SEQ ID NO: 3608479 - RNA, 22 nt, Human
auuggcauggaaauuuaaagca

SEQ ID NO: 3608480 - RNA, 21 nt, Human
auuggcauggauuucugucuu

SEQ ID NO: 3608481 - RNA, 17 nt, Human
auuggcauguguauguu

SEQ ID NO: 3608482 - RNA, 11 nt, Human
auuggccugga

SEQ ID NO: 3608483 - RNA, 21 nt, Human
auuggccuguagaguugcuga

SEQ ID NO: 3608484 - RNA, 19 nt, Human
auuggcuauuuaaagacaa

SEQ ID NO: 3608485 - RNA, 15 nt, Human
auuggcucacacuga

SEQ ID NO: 3608486 - RNA, 16 nt, Human
auuggcucacacugag

SEQ ID NO: 3608487 - RNA, 18 nt, Human
auuggcuuguagaauugu

SEQ ID NO: 3608488 - RNA, 22 nt, Human
auuggcuuguagaauuguuaua

SEQ ID NO: 3608489 - RNA, 17 nt, Human
auuggcuuguguguuuc

SEQ ID NO: 3608490 - RNA, 18 nt, Human
auuggcuuguguguuuca

SEQ ID NO: 3608491 - RNA, 17 nt, Human
auuggcuuuauccucuu

SEQ ID NO: 3608492 - RNA, 13 nt, Human
auuggcuuuucug

SEQ ID NO: 3608493 - RNA, 16 nt, Human
auuggcuuuucugauc

SEQ ID NO: 3608494 - RNA, 15 nt, Human
auugggaaaacauuu

SEQ ID NO: 3608495 - RNA, 21 nt, Human
auugggagcuugggaauggau

SEQ ID NO: 3608496 - RNA, 19 nt, Human
auaacauuuguguguuaua

SEQ ID NO: 3608497 - RNA, 16 nt, Human
auaaccaaucuacaau

SEQ ID NO: 3608498 - RNA, 15 nt, Human
auaaccaauguuuaa

SEQ ID NO: 3608499 - RNA, 14 nt, Human
auaaccagcuguaa

SEQ ID NO: 3608500 - RNA, 19 nt, Human
auaaccagcuguaacacag

SEQ ID NO: 3608501 - RNA, 20 nt, Human
auaaccaguguuguggauuu

SEQ ID NO: 3608502 - RNA, 16 nt, Human
auaaccaucugaaagu

SEQ ID NO: 3608503 - RNA, 15 nt, Human
auaacccacuuguca

SEQ ID NO: 3608504 - RNA, 12 nt, Human
auaacccacuuu

SEQ ID NO: 3608505 - RNA, 20 nt, Human
auaaccccagcucccuagga

SEQ ID NO: 3608506 - RNA, 16 nt, Human
auaaccccauucuuug

SEQ ID NO: 3608507 - RNA, 22 nt, Human
auaaccugucucaccuggacuu

SEQ ID NO: 3608508 - RNA, 14 nt, Human
auaaccuuaauuua

SEQ ID NO: 3608509 - RNA, 18 nt, Human
auaacgcuuaaaggaagu

SEQ ID NO: 3608510 - RNA, 20 nt, Human
auaacggaucagaaauacag

SEQ ID NO: 3608511 - RNA, 14 nt, Human
auaacguauaaaag

SEQ ID NO: 3608512 - RNA, 18 nt, Human
auaacguuuuuccuuuaa

SEQ ID NO: 3608513 - RNA, 14 nt, Human
auaacuaaauaaag

SEQ ID NO: 3608514 - RNA, 19 nt, Human
auaacuaaauuugauacuu

SEQ ID NO: 3608515 - RNA, 20 nt, Human
auaacuaaauuugauacuua

SEQ ID NO: 3608516 - RNA, 16 nt, Human
auaacuaagcauccuu

SEQ ID NO: 3608517 - RNA, 17 nt, Human
auaacuacauauugaau

SEQ ID NO: 3608518 - RNA, 16 nt, Human
auaacuacuguguucc

SEQ ID NO: 3608519 - RNA, 16 nt, Human
auaacuaguguugcuu

SEQ ID NO: 3608520 - RNA, 19 nt, Human
auaacuaguguugcuugga

SEQ ID NO: 3608521 - RNA, 12 nt, Human
auaacuccuccc

SEQ ID NO: 3608522 - RNA, 16 nt, Human
auaacuccucccaggg

SEQ ID NO: 3608523 - RNA, 12 nt, Human
auaacuccuucu

SEQ ID NO: 3608524 - RNA, 19 nt, Human
auaacucugcacuacuccu

SEQ ID NO: 3608525 - RNA, 21 nt, Human
auaacucugcacuacuccucu

SEQ ID NO: 3608526 - RNA, 13 nt, Human
auaacucuguaaa

SEQ ID NO: 3608527 - RNA, 13 nt, Human
auaacucuuugga

SEQ ID NO: 3608528 - RNA, 22 nt, Human
auaacucuuuggauagcauguc

SEQ ID NO: 3608529 - RNA, 21 nt, Human
auaacugaaaauuauuuaaac

SEQ ID NO: 3608530 - RNA, 14 nt, Human
auaacugaaggaga

SEQ ID NO: 3608531 - RNA, 15 nt, Human
auaacugaauuugga

SEQ ID NO: 3608532 - RNA, 15 nt, Human
auaacugacuuaguu

SEQ ID NO: 3608533 - RNA, 23 nt, Human
auaacugcccagcggacaguggc

SEQ ID NO: 3608534 - RNA, 23 nt, Human
auaacuggaaaacagaacacuua

SEQ ID NO: 3608535 - RNA, 16 nt, Human
auaacuggaacacucu

SEQ ID NO: 3608536 - RNA, 20 nt, Human
auaacuguaaaugugacauu

SEQ ID NO: 3608537 - RNA, 18 nt, Human
auaacuguaauuauuuga

SEQ ID NO: 3608538 - RNA, 22 nt, Human
auaacuguaauuauuugaauga

SEQ ID NO: 3608539 - RNA, 22 nt, Human
auaacuguuauuuauaaucacu

SEQ ID NO: 3608540 - RNA, 19 nt, Human
auaacuuaaaaaaaugaca

SEQ ID NO: 3608541 - RNA, 20 nt, Human
auaacuuaaaaauguaaaua

SEQ ID NO: 3608542 - RNA, 15 nt, Human
auaacuuaaugaaaa

SEQ ID NO: 3608543 - RNA, 20 nt, Human
auaacuuauauuguaagaaa

SEQ ID NO: 3608544 - RNA, 21 nt, Human
auaacuuauauuguaagaaau

SEQ ID NO: 3608545 - RNA, 22 nt, Human
auaacuuauauuguaagaaaua

SEQ ID NO: 3608546 - RNA, 23 nt, Human
auaacuuauauuguaagaaauac

SEQ ID NO: 3608547 - RNA, 14 nt, Human
auaacuuauugcug

SEQ ID NO: 3608548 - RNA, 15 nt, Human
auaacuuauugcuga

SEQ ID NO: 3608549 - RNA, 18 nt, Human
auaacuuauugcugauuu

SEQ ID NO: 3608550 - RNA, 16 nt, Human
auaacuucaaauuuuu

SEQ ID NO: 3608551 - RNA, 16 nt, Human
auaacuucaagcaaac

SEQ ID NO: 3608552 - RNA, 12 nt, Human
auaacuucaguc

SEQ ID NO: 3608553 - RNA, 14 nt, Human
auaacuucaguccu

SEQ ID NO: 3608554 - RNA, 20 nt, Human
auaacuucaguccugcucca

SEQ ID NO: 3608555 - RNA, 11 nt, Human
auaacuucuga

SEQ ID NO: 3608556 - RNA, 14 nt, Human
auaacuucugaccu

SEQ ID NO: 3608557 - RNA, 17 nt, Human
auaacuucuuaaaaguu

SEQ ID NO: 3608558 - RNA, 21 nt, Human
auaacuugagaccuaaucucu

SEQ ID NO: 3608559 - RNA, 11 nt, Human
auaacuugaug

SEQ ID NO: 3608560 - RNA, 13 nt, Human
auaacuugucuaa

SEQ ID NO: 3608561 - RNA, 17 nt, Human
auaacuuuaacuucugu

SEQ ID NO: 3608562 - RNA, 16 nt, Human
auaacuuuagaaauaa

SEQ ID NO: 3608563 - RNA, 18 nt, Human
auaacuuuuuuuuaaguu

SEQ ID NO: 3608564 - RNA, 12 nt, Human
auaagaaaaacu

SEQ ID NO: 3608565 - RNA, 16 nt, Human
auaagaaaauauauuc

SEQ ID NO: 3608566 - RNA, 14 nt, Human
auaagaaacuuuuu

SEQ ID NO: 3608567 - RNA, 13 nt, Human
auaagaaagccug

SEQ ID NO: 3608568 - RNA, 22 nt, Human
auaagaaccuuuugagugccuu

SEQ ID NO: 3608569 - RNA, 11 nt, Human
auaagaagaau

SEQ ID NO: 3608570 - RNA, 13 nt, Human
auaagaagaaugc

SEQ ID NO: 3608571 - RNA, 19 nt, Human
auaagaagaaugcuuaauc

SEQ ID NO: 3608572 - RNA, 20 nt, Human
auaagaagaaugcuuaauca

SEQ ID NO: 3608573 - RNA, 20 nt, Human
auaagaagggauggauucca

SEQ ID NO: 3608574 - RNA, 15 nt, Human
auaagaauaaaaugu

SEQ ID NO: 3608575 - RNA, 20 nt, Human
auaagaauagaacaacauau

SEQ ID NO: 3608576 - RNA, 16 nt, Human
auaagaaugcugguuu

SEQ ID NO: 3608577 - RNA, 19 nt, Human
auaagaaugcugguuuucc

SEQ ID NO: 3608578 - RNA, 21 nt, Human
auaagaaugcugguuuuccua

SEQ ID NO: 3608579 - RNA, 15 nt, Human
auaagaauuugcaua

SEQ ID NO: 3608580 - RNA, 23 nt, Human
auaagacaaauauuccuuugcau

SEQ ID NO: 3608581 - RNA, 14 nt, Human
auaagacauaacgu

SEQ ID NO: 3608582 - RNA, 18 nt, Human
auaagagaaagaaaauga

SEQ ID NO: 3608583 - RNA, 20 nt, Human
auaagagaccuguuuuaaaa

SEQ ID NO: 3608584 - RNA, 12 nt, Human
auaagagauuug

SEQ ID NO: 3608585 - RNA, 16 nt, Human
auaagaguuggcuggu

SEQ ID NO: 3608586 - RNA, 13 nt, Human
auaagauaaaugu

SEQ ID NO: 3608587 - RNA, 15 nt, Human
auaagauauuuuauu

SEQ ID NO: 3608588 - RNA, 16 nt, Human
auaagauauuuuucau

SEQ ID NO: 3608589 - RNA, 13 nt, Human
auaagaucuuuua

SEQ ID NO: 3608590 - RNA, 15 nt, Human
auaagaucuuuuauu

SEQ ID NO: 3608591 - RNA, 20 nt, Human
auaagaucuuuuauuuugcc

SEQ ID NO: 3608592 - RNA, 14 nt, Human
auaagauucauauu

SEQ ID NO: 3608593 - RNA, 21 nt, Human
auaagauucauauuuacuucu

SEQ ID NO: 3608594 - RNA, 19 nt, Human
auaagauuccaaaaagcac

SEQ ID NO: 3608595 - RNA, 21 nt, Human
auaagauuccaaaaagcacau

SEQ ID NO: 3608596 - RNA, 13 nt, Human
auaagauucuaac

SEQ ID NO: 3608597 - RNA, 23 nt, Human
auaagcaaagggagcacuggguu

SEQ ID NO: 3608598 - RNA, 15 nt, Human
auaagcaaauuucaa

SEQ ID NO: 3608599 - RNA, 17 nt, Human
auaagcaacaauuuuca

SEQ ID NO: 3608600 - RNA, 22 nt, Human
auaagcaacaauuuucagauuu

SEQ ID NO: 3608601 - RNA, 16 nt, Human
auaagcaagaaggcaa

SEQ ID NO: 3608602 - RNA, 21 nt, Human
auaagcaagaaggcaaaaaua

SEQ ID NO: 3608603 - RNA, 20 nt, Human
auaagcacugaaaaacaaca

SEQ ID NO: 3608604 - RNA, 13 nt, Human
auaagcaggugga

SEQ ID NO: 3608605 - RNA, 17 nt, Human
auaagcagguggaucua

SEQ ID NO: 3608606 - RNA, 17 nt, Human
auaagcaucaaacucuu

SEQ ID NO: 3608607 - RNA, 18 nt, Human
auaagcauugaaauuaua

SEQ ID NO: 3608608 - RNA, 19 nt, Human
auaagccaaaacugagcau

SEQ ID NO: 3608609 - RNA, 14 nt, Human
auaagccaaaauua

SEQ ID NO: 3608610 - RNA, 14 nt, Human
auaagccaauuuuu

SEQ ID NO: 3608611 - RNA, 23 nt, Human
auaagccaauuuuucugcacuga

SEQ ID NO: 3608612 - RNA, 21 nt, Human
auaagccagacaucaacagau

SEQ ID NO: 3608613 - RNA, 18 nt, Human
auaagccaugagaauguu

SEQ ID NO: 3608614 - RNA, 14 nt, Human
auaagcuaguugaa

SEQ ID NO: 3608615 - RNA, 22 nt, Human
auaagcuaguugaauacuugaa

SEQ ID NO: 3608616 - RNA, 20 nt, Human
auaagcuauccguguugcag

SEQ ID NO: 3608617 - RNA, 13 nt, Human
auaagcuauuuga

SEQ ID NO: 3608618 - RNA, 18 nt, Human
auaagcuauuuuucuaac

SEQ ID NO: 3608619 - RNA, 22 nt, Human
auaagcuuccauuuuaauuuua

SEQ ID NO: 3608620 - RNA, 13 nt, Human
auaagcuuuucuu

SEQ ID NO: 3608621 - RNA, 14 nt, Human
auaagcuuuucuuu

SEQ ID NO: 3608622 - RNA, 16 nt, Human
auaaggaaaaguuuaa

SEQ ID NO: 3608623 - RNA, 20 nt, Human
auaaggaaaucaacuugcuu

SEQ ID NO: 3608624 - RNA, 22 nt, Human
auaaggaaaucaacuugcuuau

SEQ ID NO: 3608625 - RNA, 12 nt, Human
auaaggaaauuu

SEQ ID NO: 3608626 - RNA, 13 nt, Human
auaaggaagaaac

SEQ ID NO: 3608627 - RNA, 14 nt, Human
auaaggacugcaug

SEQ ID NO: 3608628 - RNA, 15 nt, Human
auaaggacuuccuga

SEQ ID NO: 3608629 - RNA, 13 nt, Human
auaaggauuuuuc

SEQ ID NO: 3608630 - RNA, 11 nt, Human
auaaggcaggg

SEQ ID NO: 3608631 - RNA, 19 nt, Human
auaaggccauaaaacaggu

SEQ ID NO: 3608632 - RNA, 18 nt, Human
auaaggccuuaauauguu

SEQ ID NO: 3608633 - RNA, 15 nt, Human
auaagggaaaagaua

SEQ ID NO: 3608634 - RNA, 16 nt, Human
auaagggaaaagauaa

SEQ ID NO: 3608635 - RNA, 21 nt, Human
auaagggagcguagaaucugu

SEQ ID NO: 3608636 - RNA, 15 nt, Human
auaagggcagaguca

SEQ ID NO: 3608637 - RNA, 16 nt, Human
auaaggggagaguaac

SEQ ID NO: 3608638 - RNA, 20 nt, Human
auaagggguuugccauuuga

SEQ ID NO: 3608639 - RNA, 23 nt, Human
auaagggucccccacucuaaagc

SEQ ID NO: 3608640 - RNA, 21 nt, Human
auaagguguuuucuguguaac

SEQ ID NO: 3608641 - RNA, 17 nt, Human
auaagguuuaaaaagau

SEQ ID NO: 3608642 - RNA, 19 nt, Human
auaagguuuuaauuuagua

SEQ ID NO: 3608643 - RNA, 23 nt, Human
auaaguaaagugauuaaagugcu

SEQ ID NO: 3608644 - RNA, 13 nt, Human
auaaguaagaaaa

SEQ ID NO: 3608645 - RNA, 14 nt, Human
auaaguaagaaaau

SEQ ID NO: 3608646 - RNA, 17 nt, Human
auaaguaagaaaauauu

SEQ ID NO: 3608647 - RNA, 20 nt, Human
auucgagcuauauuuaagua

SEQ ID NO: 3608648 - RNA, 17 nt, Human
auucgcucccacauucu

SEQ ID NO: 3608649 - RNA, 20 nt, Human
auucggaacuguccuuuccu

SEQ ID NO: 3608650 - RNA, 21 nt, Human
auucggugugcaccaggguug

SEQ ID NO: 3608651 - RNA, 23 nt, Human
auucgguguggugcagugugaaa

SEQ ID NO: 3608652 - RNA, 19 nt, Human
auucgugaaaacacauuug

SEQ ID NO: 3608653 - RNA, 21 nt, Human
auucgugcagcauaugaggau

SEQ ID NO: 3608654 - RNA, 13 nt, Human
auucguucugugg

SEQ ID NO: 3608655 - RNA, 20 nt, Human
auucguuguguuuuuuaaga

SEQ ID NO: 3608656 - RNA, 20 nt, Human
auucuaaaaugugauguucu

SEQ ID NO: 3608657 - RNA, 22 nt, Human
auucuaaaaugugauguucuaa

SEQ ID NO: 3608658 - RNA, 17 nt, Human
auucuaaacagacucau

SEQ ID NO: 3608659 - RNA, 18 nt, Human
auucuaaagauucuauag

SEQ ID NO: 3608660 - RNA, 20 nt, Human
auucuaaagauucuauaguu

SEQ ID NO: 3608661 - RNA, 16 nt, Human
auucuaaauaaaauau

SEQ ID NO: 3608662 - RNA, 19 nt, Human
auucuaaauaaaauauaau

SEQ ID NO: 3608663 - RNA, 20 nt, Human
auucuaaauaaaauauaauu

SEQ ID NO: 3608664 - RNA, 21 nt, Human
auucuaaauaaaauauaauug

SEQ ID NO: 3608665 - RNA, 15 nt, Human
auucuaaaugaaugu

SEQ ID NO: 3608666 - RNA, 15 nt, Human
auucuaaccuggagg

SEQ ID NO: 3608667 - RNA, 18 nt, Human
auucuaacggucuguucu

SEQ ID NO: 3608668 - RNA, 20 nt, Human
auucuaagaaauaucuguga

SEQ ID NO: 3608669 - RNA, 21 nt, Human
auucuaagaaauaucugugaa

SEQ ID NO: 3608670 - RNA, 23 nt, Human
auucuaagaaauaucugugaaau

SEQ ID NO: 3608671 - RNA, 15 nt, Human
auucuaagugaaauu

SEQ ID NO: 3608672 - RNA, 16 nt, Human
auucuaauaagcuagu

SEQ ID NO: 3608673 - RNA, 20 nt, Human
auucuaauaagcuaguugaa

SEQ ID NO: 3608674 - RNA, 21 nt, Human
auucuaaugauggcccauucu

SEQ ID NO: 3608675 - RNA, 18 nt, Human
auucuaaugucuucauuu

SEQ ID NO: 3608676 - RNA, 13 nt, Human
auucuacuugcuc

SEQ ID NO: 3608677 - RNA, 17 nt, Human
auucuacuugcucugga

SEQ ID NO: 3608678 - RNA, 21 nt, Human
auucuacuugcucuggaccug

SEQ ID NO: 3608679 - RNA, 22 nt, Human
auucuacuugcucuggaccugc

SEQ ID NO: 3608680 - RNA, 16 nt, Human
auucuacuuugagugc

SEQ ID NO: 3608681 - RNA, 23 nt, Human
auucuagaucagaugcuccaaga

SEQ ID NO: 3608682 - RNA, 18 nt, Human
auucuagcuaauguaaua

SEQ ID NO: 3608683 - RNA, 16 nt, Human
auucuaggcaucccag

SEQ ID NO: 3608684 - RNA, 20 nt, Human
auucuaggccuccuggccca

SEQ ID NO: 3608685 - RNA, 14 nt, Human
auucuagugcugcu

SEQ ID NO: 3608686 - RNA, 15 nt, Human
auucuagugcugcug

SEQ ID NO: 3608687 - RNA, 16 nt, Human
auucuaguuuugucaa

SEQ ID NO: 3608688 - RNA, 15 nt, Human
auucuauaaggccau

SEQ ID NO: 3608689 - RNA, 12 nt, Human
auucuauaauuu

SEQ ID NO: 3608690 - RNA, 17 nt, Human
auucuauaugaauuuaa

SEQ ID NO: 3608691 - RNA, 19 nt, Human
auucuauaugaauuuaaau

SEQ ID NO: 3608692 - RNA, 15 nt, Human
auucuaucuacugau

SEQ ID NO: 3608693 - RNA, 17 nt, Human
auucuaucuacugauuu

SEQ ID NO: 3608694 - RNA, 15 nt, Human
auucuaucuauuccu

SEQ ID NO: 3608695 - RNA, 17 nt, Human
auucuauggagcuauuu

SEQ ID NO: 3608696 - RNA, 13 nt, Human
auucuauguguca

SEQ ID NO: 3608697 - RNA, 14 nt, Human
auucuaugugucau

SEQ ID NO: 3608698 - RNA, 15 nt, Human
auucuauguuaauau

SEQ ID NO: 3608699 - RNA, 18 nt, Human
auucuauguuaauauuuu

SEQ ID NO: 3608700 - RNA, 14 nt, Human
auucuauuaacuuu

SEQ ID NO: 3608701 - RNA, 18 nt, Human
auucuauuacauuuucag

SEQ ID NO: 3608702 - RNA, 22 nt, Human
auucuauugcaguuauagaaaa

SEQ ID NO: 3608703 - RNA, 22 nt, Human
auucuauugccuucuuugaaga

SEQ ID NO: 3608704 - RNA, 12 nt, Human
auucuauuucaa

SEQ ID NO: 3608705 - RNA, 15 nt, Human
auucucaaacacagu

SEQ ID NO: 3608706 - RNA, 13 nt, Human
auucucaaagcag

SEQ ID NO: 3608707 - RNA, 19 nt, Human
auucucaaaguuuccuaau

SEQ ID NO: 3608708 - RNA, 16 nt, Human
auucucaagcccugca

SEQ ID NO: 3608709 - RNA, 19 nt, Human
auucucaagccgcauccca

SEQ ID NO: 3608710 - RNA, 21 nt, Human
auucucaagggacguccucca

SEQ ID NO: 3608711 - RNA, 21 nt, Human
auucucacagcuccaagaauu

SEQ ID NO: 3608712 - RNA, 22 nt, Human
auucucacagcuccaagaauuu

SEQ ID NO: 3608713 - RNA, 18 nt, Human
auucucaccagcuguguc

SEQ ID NO: 3608714 - RNA, 14 nt, Human
auucucaccaggaa

SEQ ID NO: 3608715 - RNA, 16 nt, Human
auucucaccaggaagg

SEQ ID NO: 3608716 - RNA, 14 nt, Human
auucucacuccacc

SEQ ID NO: 3608717 - RNA, 16 nt, Human
auucucagauauuuau

SEQ ID NO: 3608718 - RNA, 14 nt, Human
auucucagcagagu

SEQ ID NO: 3608719 - RNA, 18 nt, Human
auucucagggucucugcu

SEQ ID NO: 3608720 - RNA, 19 nt, Human
auucucagggucucugcug

SEQ ID NO: 3608721 - RNA, 14 nt, Human
auucucaguuuuuc

SEQ ID NO: 3608722 - RNA, 16 nt, Human
auucucauaauuccua

SEQ ID NO: 3608723 - RNA, 22 nt, Human
auucucauaauuccuacagcac

SEQ ID NO: 3608724 - RNA, 13 nt, Human
auucucaucugca

SEQ ID NO: 3608725 - RNA, 21 nt, Human
auucucaugccucagccuccu

SEQ ID NO: 3608726 - RNA, 16 nt, Human
auucucauggagaagu

SEQ ID NO: 3608727 - RNA, 12 nt, Human
auucucauguga

SEQ ID NO: 3608728 - RNA, 16 nt, Human
auucuccacagcaacc

SEQ ID NO: 3608729 - RNA, 17 nt, Human
auucuccaccugccagg

SEQ ID NO: 3608730 - RNA, 23 nt, Human
auucucccgggacucugcauauu

SEQ ID NO: 3608731 - RNA, 17 nt, Human
auucuccuccucccucc

SEQ ID NO: 3608732 - RNA, 11 nt, Human
auucuccugcc

SEQ ID NO: 3608733 - RNA, 12 nt, Human
auucuccugccu

SEQ ID NO: 3608734 - RNA, 13 nt, Human
auucuccugccuc

SEQ ID NO: 3608735 - RNA, 14 nt, Human
auucuccugccuca

SEQ ID NO: 3608736 - RNA, 15 nt, Human
auucuccugccucag

SEQ ID NO: 3608737 - RNA, 17 nt, Human
auucuccugccucagcc

SEQ ID NO: 3608738 - RNA, 11 nt, Human
auucuccugga

SEQ ID NO: 3608739 - RNA, 13 nt, Human
auucuccugugcu

SEQ ID NO: 3608740 - RNA, 18 nt, Human
auucuccuucagcccuca

SEQ ID NO: 3608741 - RNA, 19 nt, Human
auucuccuuguguuacuaa

SEQ ID NO: 3608742 - RNA, 19 nt, Human
auucucgugagucauuuaa

SEQ ID NO: 3608743 - RNA, 14 nt, Human
auucucuccaaaaa

SEQ ID NO: 3608744 - RNA, 16 nt, Human
auucucuccucagacu

SEQ ID NO: 3608745 - RNA, 18 nt, Human
auucucuccucagacugc

SEQ ID NO: 3608746 - RNA, 10 nt, Human
auucucucuc

SEQ ID NO: 3608747 - RNA, 22 nt, Human
auucucuggcuguaaggcucua

SEQ ID NO: 3608748 - RNA, 13 nt, Human
auucucugucuca

SEQ ID NO: 3608749 - RNA, 15 nt, Human
auucucuuguauaag

SEQ ID NO: 3608750 - RNA, 18 nt, Human
auucucuuguauaagauc

SEQ ID NO: 3608751 - RNA, 22 nt, Human
auucucuuguauaagauccuag

SEQ ID NO: 3608752 - RNA, 12 nt, Human
auucucuuuggu

SEQ ID NO: 3608753 - RNA, 12 nt, Human
auucucuuuuca

SEQ ID NO: 3608754 - RNA, 19 nt, Human
auucugaagcaacauuuua

SEQ ID NO: 3608755 - RNA, 16 nt, Human
auucugaaggagcccc

SEQ ID NO: 3608756 - RNA, 15 nt, Human
auucugaaguuauau

SEQ ID NO: 3608757 - RNA, 18 nt, Human
auucugaaguuauauuuc

SEQ ID NO: 3608758 - RNA, 22 nt, Human
auucugaaguuauauuuccuau

SEQ ID NO: 3608759 - RNA, 14 nt, Human
auucugaaucucaa

SEQ ID NO: 3608760 - RNA, 10 nt, Human
auucugaaug

SEQ ID NO: 3608761 - RNA, 16 nt, Human
auucugaaugcuucua

SEQ ID NO: 3608762 - RNA, 17 nt, Human
auucugaaugcuucuaa

SEQ ID NO: 3608763 - RNA, 22 nt, Human
auucugaaugcuucuaaguaaa

SEQ ID NO: 3608764 - RNA, 23 nt, Human
auucugaauuaauuaauuuggag

SEQ ID NO: 3608765 - RNA, 20 nt, Human
auucugaccacccuucucau

SEQ ID NO: 3608766 - RNA, 18 nt, Human
auucugacucgguuucuc

SEQ ID NO: 3608767 - RNA, 14 nt, Human
auucugagaaaaca

SEQ ID NO: 3608768 - RNA, 17 nt, Human
auucugagccugauauu

SEQ ID NO: 3608769 - RNA, 18 nt, Human
auucugaggcccugccca

SEQ ID NO: 3608770 - RNA, 17 nt, Human
auucugaguuuuguguu

SEQ ID NO: 3608771 - RNA, 23 nt, Human
auucugauuauugaguuccaguu

SEQ ID NO: 3608772 - RNA, 13 nt, Human
auucugauuccac

SEQ ID NO: 3608773 - RNA, 22 nt, Human
auucugauucgaaugacacugu

SEQ ID NO: 3608774 - RNA, 21 nt, Human
auucugauucuggcuuuaagc

SEQ ID NO: 3608775 - RNA, 20 nt, Human
auucugauuucuuuucacca

SEQ ID NO: 3608776 - RNA, 15 nt, Human
auucugcagcaugac

SEQ ID NO: 3608777 - RNA, 18 nt, Human
auucugcaguaaaucuuu

SEQ ID NO: 3608778 - RNA, 23 nt, Human
auucugcaguaaaucuuuuacaa

SEQ ID NO: 3608779 - RNA, 18 nt, Human
auucugcccaaaaauaug

SEQ ID NO: 3608780 - RNA, 17 nt, Human
auucugcccuccuuaau

SEQ ID NO: 3608781 - RNA, 17 nt, Human
auucugccucucuagga

SEQ ID NO: 3608782 - RNA, 11 nt, Human
auucugccugc

SEQ ID NO: 3608783 - RNA, 20 nt, Human
auucugccugcccaggcccc

SEQ ID NO: 3608784 - RNA, 20 nt, Human
auucugccuuugcagaaaca

SEQ ID NO: 3608785 - RNA, 22 nt, Human
auucugccuuugcagaaacaga

SEQ ID NO: 3608786 - RNA, 19 nt, Human
auucugccuuugccaggug

SEQ ID NO: 3608787 - RNA, 13 nt, Human
auucugcuccuuc

SEQ ID NO: 3608788 - RNA, 22 nt, Human
auucuggacaggauguguuugc

SEQ ID NO: 3608789 - RNA, 16 nt, Human
auucuggaccucuggg

SEQ ID NO: 3608790 - RNA, 17 nt, Human
auucuggauaaagccac

SEQ ID NO: 3608791 - RNA, 22 nt, Human
auucuggauggauuugaagcaa

SEQ ID NO: 3608792 - RNA, 18 nt, Human
auucuggcugauaaaaga

SEQ ID NO: 3608793 - RNA, 16 nt, Human
auucuggcuuuaagcc

SEQ ID NO: 3608794 - RNA, 16 nt, Human
auucugggggcugcag

SEQ ID NO: 3608795 - RNA, 17 nt, Human
auucuguaaaagaaaaa

SEQ ID NO: 3608796 - RNA, 20 nt, Human
auucuguaaaaugucuguua

SEQ ID NO: 3608797 - RNA, 17 nt, Human
ccuugcuuuucccucuu

SEQ ID NO: 3608798 - RNA, 18 nt, Human
ccuugcuuuucccucuuu

SEQ ID NO: 3608799 - RNA, 15 nt, Human
ccuugcuuuugcuuc

SEQ ID NO: 3608800 - RNA, 17 nt, Human
ccuuggaaaccugcccu

SEQ ID NO: 3608801 - RNA, 18 nt, Human
ccuuggaaaccugcccug

SEQ ID NO: 3608802 - RNA, 13 nt, Human
ccuuggacuugag

SEQ ID NO: 3608803 - RNA, 19 nt, Human
ccuuggagagacacagcgu

SEQ ID NO: 3608804 - RNA, 22 nt, Human
ccuuggauaaugcuguugccuc

SEQ ID NO: 3608805 - RNA, 19 nt, Human
ccuuggauuguccccgacc

SEQ ID NO: 3608806 - RNA, 23 nt, Human
ccuuggcaccaaagaugcagccg

SEQ ID NO: 3608807 - RNA, 19 nt, Human
ccuuggcaucacagggcag

SEQ ID NO: 3608808 - RNA, 18 nt, Human
ccuuggcaucuagagcuu

SEQ ID NO: 3608809 - RNA, 18 nt, Human
ccuuggccagaagucaag

SEQ ID NO: 3608810 - RNA, 17 nt, Human
ccuuggccaugcagaaa

SEQ ID NO: 3608811 - RNA, 21 nt, Human
ccuuggcccccuuucccgggc

SEQ ID NO: 3608812 - RNA, 23 nt, Human
ccuuggccgcaccuaaagcagcc

SEQ ID NO: 3608813 - RNA, 16 nt, Human
ccuuggccggcugugc

SEQ ID NO: 3608814 - RNA, 22 nt, Human
ccuuggccuagcccacccugcu

SEQ ID NO: 3608815 - RNA, 23 nt, Human
ccuuggccugucucauccccagg

SEQ ID NO: 3608816 - RNA, 12 nt, Human
ccuuggcuggug

SEQ ID NO: 3608817 - RNA, 21 nt, Human
ccuuggcugugaggccccugg

SEQ ID NO: 3608818 - RNA, 18 nt, Human
ccuuggcuuaccugaccu

SEQ ID NO: 3608819 - RNA, 18 nt, Human
ccuuggcuuggcccuggc

SEQ ID NO: 3608820 - RNA, 19 nt, Human
ccuuggcuuggcccuggca

SEQ ID NO: 3608821 - RNA, 20 nt, Human
ccuuggcuuggcccuggcag

SEQ ID NO: 3608822 - RNA, 19 nt, Human
ccuuggcuuuaugcacauu

SEQ ID NO: 3608823 - RNA, 21 nt, Human
ccuuggcuuuuacugaagccu

SEQ ID NO: 3608824 - RNA, 12 nt, Human
ccuugggacccc

SEQ ID NO: 3608825 - RNA, 15 nt, Human
ccuugggaggaagca

SEQ ID NO: 3608826 - RNA, 20 nt, Human
ccuugggaggaagcagaaua

SEQ ID NO: 3608827 - RNA, 15 nt, Human
ccuugggaggcccca

SEQ ID NO: 3608828 - RNA, 23 nt, Human
ccuugggccagaaguaccagacu

SEQ ID NO: 3608829 - RNA, 23 nt, Human
ccuugggcccacaccuccuuccc

SEQ ID NO: 3608830 - RNA, 12 nt, Human
ccuugggcccuu

SEQ ID NO: 3608831 - RNA, 14 nt, Human
ccuugggcggcuga

SEQ ID NO: 3608832 - RNA, 12 nt, Human
ccuugggcuccc

SEQ ID NO: 3608833 - RNA, 21 nt, Human
ccuugggcuccgugugggaga

SEQ ID NO: 3608834 - RNA, 14 nt, Human
ccuugggcucugau

SEQ ID NO: 3608835 - RNA, 14 nt, Human
ccuugggcugcucc

SEQ ID NO: 3608836 - RNA, 18 nt, Human
ccuugggcugcuccucau

SEQ ID NO: 3608837 - RNA, 17 nt, Human
ccuuggggaauuuccuc

SEQ ID NO: 3608838 - RNA, 23 nt, Human
ccuuggggaggacaaaacuucuu

SEQ ID NO: 3608839 - RNA, 14 nt, Human
ccuuggggcaggca

SEQ ID NO: 3608840 - RNA, 16 nt, Human
ccuuggggcaggcagu

SEQ ID NO: 3608841 - RNA, 21 nt, Human
ccuuggguauuugcaauauuc

SEQ ID NO: 3608842 - RNA, 18 nt, Human
ccuuggguuagaccuaca

SEQ ID NO: 3608843 - RNA, 22 nt, Human
ccuuggguuagaccuacagggg

SEQ ID NO: 3608844 - RNA, 21 nt, Human
ccuuggucuuuguaucuucca

SEQ ID NO: 3608845 - RNA, 17 nt, Human
ccuugguggcaagagcc

SEQ ID NO: 3608846 - RNA, 18 nt, Human
ccuugguguaguugaacu

SEQ ID NO: 3608847 - RNA, 15 nt, Human
ccuugguguccaccu

SEQ ID NO: 3608848 - RNA, 19 nt, Human
ccuugguguccaccuggcc

SEQ ID NO: 3608849 - RNA, 21 nt, Human
ccuuggugucgggcaugacac

SEQ ID NO: 3608850 - RNA, 19 nt, Human
ccuuggugugacccucuga

SEQ ID NO: 3608851 - RNA, 18 nt, Human
ccuugguucaucaguguu

SEQ ID NO: 3608852 - RNA, 21 nt, Human
ccuugguuuuuacugcucuga

SEQ ID NO: 3608853 - RNA, 23 nt, Human
ccuugguuuuuacugcucugaga

SEQ ID NO: 3608854 - RNA, 16 nt, Human
ccuuguaauguaacug

SEQ ID NO: 3608855 - RNA, 19 nt, Human
ccuuguaauucuaaaugaa

SEQ ID NO: 3608856 - RNA, 14 nt, Human
ccuuguagcuccuc

SEQ ID NO: 3608857 - RNA, 15 nt, Human
ccuuguagcuccucc

SEQ ID NO: 3608858 - RNA, 17 nt, Human
ccuuguagcuccucccc

SEQ ID NO: 3608859 - RNA, 17 nt, Human
ccuuguauccccugcag

SEQ ID NO: 3608860 - RNA, 13 nt, Human
ccuuguauuuaaa

SEQ ID NO: 3608861 - RNA, 21 nt, Human
ccuuguauuuaaauauuaaau

SEQ ID NO: 3608862 - RNA, 13 nt, Human
ccuuguccccaca

SEQ ID NO: 3608863 - RNA, 16 nt, Human
ccuuguccccacacuc

SEQ ID NO: 3608864 - RNA, 17 nt, Human
ccuuguccccacacucc

SEQ ID NO: 3608865 - RNA, 15 nt, Human
ccuuguccccugccu

SEQ ID NO: 3608866 - RNA, 21 nt, Human
ccuugucggccccaccagugc

SEQ ID NO: 3608867 - RNA, 23 nt, Human
ccuugucggccccaccagugccu

SEQ ID NO: 3608868 - RNA, 21 nt, Human
ccuugucguugacuuuaggga

SEQ ID NO: 3608869 - RNA, 20 nt, Human
ccuugucuccuacuccugac

SEQ ID NO: 3608870 - RNA, 17 nt, Human
ccuugucugaacuggag

SEQ ID NO: 3608871 - RNA, 13 nt, Human
ccuugucugagau

SEQ ID NO: 3608872 - RNA, 18 nt, Human
ccuugugaucacuuucug

SEQ ID NO: 3608873 - RNA, 20 nt, Human
ccuugugaucacuuucugaa

SEQ ID NO: 3608874 - RNA, 17 nt, Human
ccuugugccuggcucag

SEQ ID NO: 3608875 - RNA, 15 nt, Human
ccuuguggcacauuu

SEQ ID NO: 3608876 - RNA, 14 nt, Human
cgcauuccaggcuc

SEQ ID NO: 3608877 - RNA, 13 nt, Human
cgcauucucaugg

SEQ ID NO: 3608878 - RNA, 19 nt, Human
cgccaagcaaccugggucc

SEQ ID NO: 3608879 - RNA, 16 nt, Human
cgccaauaaaccaaug

SEQ ID NO: 3608880 - RNA, 21 nt, Human
cgccacagcccagccacggac

SEQ ID NO: 3608881 - RNA, 20 nt, Human
cgccacagcccuuuugucuc

SEQ ID NO: 3608882 - RNA, 13 nt, Human
cgccacaggaccc

SEQ ID NO: 3608883 - RNA, 11 nt, Human
cgccacauccc

SEQ ID NO: 3608884 - RNA, 15 nt, Human
cgccacauggcuucc

SEQ ID NO: 3608885 - RNA, 17 nt, Human
cgccacauggcuuccuc

SEQ ID NO: 3608886 - RNA, 13 nt, Human
cgccaccauccug

SEQ ID NO: 3608887 - RNA, 23 nt, Human
cgccaccauccugcagccuccuc

SEQ ID NO: 3608888 - RNA, 13 nt, Human
cgccacugcacuc

SEQ ID NO: 3608889 - RNA, 20 nt, Human
cgccacugcacuccggccug

SEQ ID NO: 3608890 - RNA, 15 nt, Human
cgccacuggggcuca

SEQ ID NO: 3608891 - RNA, 23 nt, Human
cgccagaacugcuuuaucccacg

SEQ ID NO: 3608892 - RNA, 14 nt, Human
cgccagagggcuug

SEQ ID NO: 3608893 - RNA, 15 nt, Human
cgccagauggggccu

SEQ ID NO: 3608894 - RNA, 19 nt, Human
cgccagauucuuuccugag

SEQ ID NO: 3608895 - RNA, 21 nt, Human
cgccagauucuuuccugaggc

SEQ ID NO: 3608896 - RNA, 22 nt, Human
cgccagauucuuuccugaggcu

SEQ ID NO: 3608897 - RNA, 12 nt, Human
cgccagcagaca

SEQ ID NO: 3608898 - RNA, 12 nt, Human
cgccagcucugu

SEQ ID NO: 3608899 - RNA, 19 nt, Human
cgccagcucuguucuuccu

SEQ ID NO: 3608900 - RNA, 13 nt, Human
cgccagcugauga

SEQ ID NO: 3608901 - RNA, 16 nt, Human
cgccaggacuuggccu

SEQ ID NO: 3608902 - RNA, 23 nt, Human
cgccaggcugaccacagcacagc

SEQ ID NO: 3608903 - RNA, 18 nt, Human
cgccagggagaccuggac

SEQ ID NO: 3608904 - RNA, 14 nt, Human
cgccaguacuuguc

SEQ ID NO: 3608905 - RNA, 14 nt, Human
cgccauugccacca

SEQ ID NO: 3608906 - RNA, 18 nt, Human
cgccauugccaccaggag

SEQ ID NO: 3608907 - RNA, 17 nt, Human
cgcccaaagccagacag

SEQ ID NO: 3608908 - RNA, 18 nt, Human
cgcccaaaggacgcacug

SEQ ID NO: 3608909 - RNA, 16 nt, Human
cgcccaacccuucccc

SEQ ID NO: 3608910 - RNA, 18 nt, Human
cgcccaacuaauuuuugu

SEQ ID NO: 3608911 - RNA, 12 nt, Human
cgcccaaggccc

SEQ ID NO: 3608912 - RNA, 18 nt, Human
cgcccacaggaagccugc

SEQ ID NO: 3608913 - RNA, 20 nt, Human
cgcccacaggaagccugcag

SEQ ID NO: 3608914 - RNA, 22 nt, Human
cgcccacaggaagccugcaguc

SEQ ID NO: 3608915 - RNA, 21 nt, Human
cgcccaccgcaugcccccucg

SEQ ID NO: 3608916 - RNA, 12 nt, Human
cgcccacugucc

SEQ ID NO: 3608917 - RNA, 15 nt, Human
cgcccacuguccugg

SEQ ID NO: 3608918 - RNA, 16 nt, Human
cgcccacuguccuggg

SEQ ID NO: 3608919 - RNA, 19 nt, Human
cgcccacuguccugggcgc

SEQ ID NO: 3608920 - RNA, 12 nt, Human
cgcccacuuccc

SEQ ID NO: 3608921 - RNA, 13 nt, Human
cgcccacuucccu

SEQ ID NO: 3608922 - RNA, 22 nt, Human
cgcccagcuccugacacugcug

SEQ ID NO: 3608923 - RNA, 20 nt, Human
cgcccagcugcaccugccag

SEQ ID NO: 3608924 - RNA, 14 nt, Human
cgcccaggacccca

SEQ ID NO: 3608925 - RNA, 23 nt, Human
cgcccaggaucagauugcaugug

SEQ ID NO: 3608926 - RNA, 12 nt, Human
cgcccaggcugg

SEQ ID NO: 3608927 - RNA, 15 nt, Human
cgcccaggcuggcca

SEQ ID NO: 3608928 - RNA, 19 nt, Human
cgcccaggcuggccagccc

SEQ ID NO: 3608929 - RNA, 22 nt, Human
cgcccaggcuggccagccccac

SEQ ID NO: 3608930 - RNA, 22 nt, Human
cgcccaggcuuagucacugaga

SEQ ID NO: 3608931 - RNA, 14 nt, Human
cgcccagucccagc

SEQ ID NO: 3608932 - RNA, 16 nt, Human
cgcccagucccagcag

SEQ ID NO: 3608933 - RNA, 17 nt, Human
cgcccagucccagcagc

SEQ ID NO: 3608934 - RNA, 13 nt, Human
cgcccagucugga

SEQ ID NO: 3608935 - RNA, 21 nt, Human
cgcccagucuggaaugcagug

SEQ ID NO: 3608936 - RNA, 23 nt, Human
cgcccaguuggguggaugccugg

SEQ ID NO: 3608937 - RNA, 13 nt, Human
cgcccauguguga

SEQ ID NO: 3608938 - RNA, 12 nt, Human
cgccccacccag

SEQ ID NO: 3608939 - RNA, 19 nt, Human
cgccccagauaccagcccc

SEQ ID NO: 3608940 - RNA, 20 nt, Human
cgccccagauaccagccccu

SEQ ID NO: 3608941 - RNA, 14 nt, Human
cgggcucucugcug

SEQ ID NO: 3608942 - RNA, 16 nt, Human
cgggcugagggccugc

SEQ ID NO: 3608943 - RNA, 14 nt, Human
cgggcugccugggc

SEQ ID NO: 3608944 - RNA, 15 nt, Human
cgggcugggcagcug

SEQ ID NO: 3608945 - RNA, 14 nt, Human
cggggaacuccugg

SEQ ID NO: 3608946 - RNA, 15 nt, Human
cggggaacuccugga

SEQ ID NO: 3608947 - RNA, 16 nt, Human
cggggaacuccuggaa

SEQ ID NO: 3608948 - RNA, 22 nt, Human
cggggaacuggccaagcugagg

SEQ ID NO: 3608949 - RNA, 12 nt, Human
cggggaagagau

SEQ ID NO: 3608950 - RNA, 19 nt, Human
cggggaagagauccaaaga

SEQ ID NO: 3608951 - RNA, 20 nt, Human
cggggaagagauccaaagac

SEQ ID NO: 3608952 - RNA, 13 nt, Human
cggggaaggauuu

SEQ ID NO: 3608953 - RNA, 14 nt, Human
cggggacagaggcc

SEQ ID NO: 3608954 - RNA, 18 nt, Human
cggggacagaggccugcc

SEQ ID NO: 3608955 - RNA, 21 nt, Human
cggggacagaggccugcccgg

SEQ ID NO: 3608956 - RNA, 14 nt, Human
cggggacagcuccu

SEQ ID NO: 3608957 - RNA, 15 nt, Human
cggggacagcuccuu

SEQ ID NO: 3608958 - RNA, 22 nt, Human
cggggacagcuccuucuguccu

SEQ ID NO: 3608959 - RNA, 21 nt, Human
cggggaggccaagugcaggcu

SEQ ID NO: 3608960 - RNA, 23 nt, Human
cggggaggccaagugcaggcugg

SEQ ID NO: 3608961 - RNA, 18 nt, Human
cggggcagcagcagcccu

SEQ ID NO: 3608962 - RNA, 21 nt, Human
cggggcagcagcagcccugcc

SEQ ID NO: 3608963 - RNA, 12 nt, Human
cggggcagggca

SEQ ID NO: 3608964 - RNA, 17 nt, Human
cggggcaugcuggggca

SEQ ID NO: 3608965 - RNA, 14 nt, Human
cggggccagaggca

SEQ ID NO: 3608966 - RNA, 14 nt, Human
cggggcccagggca

SEQ ID NO: 3608967 - RNA, 19 nt, Human
cggggccugggcaggaggg

SEQ ID NO: 3608968 - RNA, 22 nt, Human
cggggccuugcgguauccgccc

SEQ ID NO: 3608969 - RNA, 16 nt, Human
cggggcucuucucauu

SEQ ID NO: 3608970 - RNA, 22 nt, Human
cggggcuucugugcaccugggc

SEQ ID NO: 3608971 - RNA, 16 nt, Human
cggggcuugccuucug

SEQ ID NO: 3608972 - RNA, 18 nt, Human
cggggcuugccuucuggu

SEQ ID NO: 3608973 - RNA, 15 nt, Human
cggggcuuggcugag

SEQ ID NO: 3608974 - RNA, 15 nt, Human
cgggggcagagaggg

SEQ ID NO: 3608975 - RNA, 13 nt, Human
cgggggcagcuga

SEQ ID NO: 3608976 - RNA, 18 nt, Human
cgggggcagucugagaga

SEQ ID NO: 3608977 - RNA, 13 nt, Human
cgggggcuggggc

SEQ ID NO: 3608978 - RNA, 22 nt, Human
cggggggaggguuggggagggg

SEQ ID NO: 3608979 - RNA, 15 nt, Human
cgggguauccugggg

SEQ ID NO: 3608980 - RNA, 15 nt, Human
cggggugcacaggag

SEQ ID NO: 3608981 - RNA, 16 nt, Human
cggggugcacaggagg

SEQ ID NO: 3608982 - RNA, 18 nt, Human
cggggugcacaggagggg

SEQ ID NO: 3608983 - RNA, 12 nt, Human
cgggguggagca

SEQ ID NO: 3608984 - RNA, 22 nt, Human
cggggugggguggcugcagccu

SEQ ID NO: 3608985 - RNA, 18 nt, Human
cgggguggugggaaccau

SEQ ID NO: 3608986 - RNA, 21 nt, Human
cggggugucugucuuccuuug

SEQ ID NO: 3608987 - RNA, 11 nt, Human
cgggucacagg

SEQ ID NO: 3608988 - RNA, 22 nt, Human
cgggucaucuguaccucugccu

SEQ ID NO: 3608989 - RNA, 17 nt, Human
cgggucccuucaccucc

SEQ ID NO: 3608990 - RNA, 13 nt, Human
cgggucugccucu

SEQ ID NO: 3608991 - RNA, 14 nt, Human
cgggucugcuccca

SEQ ID NO: 3608992 - RNA, 16 nt, Human
cgggucuuccuacucu

SEQ ID NO: 3608993 - RNA, 18 nt, Human
cgggugcucagggcugac

SEQ ID NO: 3608994 - RNA, 15 nt, Human
cggguggcaggugga

SEQ ID NO: 3608995 - RNA, 14 nt, Human
cggguggggaaagg

SEQ ID NO: 3608996 - RNA, 22 nt, Human
cgggugugcaaugucugaguga

SEQ ID NO: 3608997 - RNA, 15 nt, Human
cgggugugggaaagc

SEQ ID NO: 3608998 - RNA, 13 nt, Human
cgguacccaccac

SEQ ID NO: 3608999 - RNA, 12 nt, Human
cgguacucccau

SEQ ID NO: 3609000 - RNA, 16 nt, Human
cgguagggaggcagcc

SEQ ID NO: 3609001 - RNA, 16 nt, Human
cgguauuaugcuucuu

SEQ ID NO: 3609002 - RNA, 12 nt, Human
cggucacugaug

SEQ ID NO: 3609003 - RNA, 16 nt, Human
cggucagguuuaacau

SEQ ID NO: 3609004 - RNA, 18 nt, Human
cggucagguuuaacauuu

SEQ ID NO: 3609005 - RNA, 16 nt, Human
cgguccagcuggccug

SEQ ID NO: 3609006 - RNA, 21 nt, Human
cgguccagcuggccuggacag

SEQ ID NO: 3609007 - RNA, 12 nt, Human
cggucccagcuc

SEQ ID NO: 3609008 - RNA, 21 nt, Human
cggucccaguuuuguugcccc

SEQ ID NO: 3609009 - RNA, 18 nt, Human
cgguccccuccgccaggc

SEQ ID NO: 3609010 - RNA, 19 nt, Human
cggucccuugagaccucag

SEQ ID NO: 3609011 - RNA, 23 nt, Human
cggucccuugagaccucagccau

SEQ ID NO: 3609012 - RNA, 11 nt, Human
cgguccugucu

SEQ ID NO: 3609013 - RNA, 22 nt, Human
cggucggguuuuauuguuuaaa

SEQ ID NO: 3609014 - RNA, 22 nt, Human
cggucucggaucaggcucccag

SEQ ID NO: 3609015 - RNA, 14 nt, Human
cggucugugccccu

SEQ ID NO: 3609016 - RNA, 16 nt, Human
cggucuugacagcuca

SEQ ID NO: 3609017 - RNA, 13 nt, Human
cggugaauggcuu

SEQ ID NO: 3609018 - RNA, 14 nt, Human
cggugaauggcuuu

SEQ ID NO: 3609019 - RNA, 16 nt, Human
cggugagaacucugcc

SEQ ID NO: 3609020 - RNA, 21 nt, Human
cggugagaggggaacagacug

SEQ ID NO: 3609021 - RNA, 14 nt, Human
cggugcagucuggg

SEQ ID NO: 3609022 - RNA, 16 nt, Human
cggugcagucugggug

SEQ ID NO: 3609023 - RNA, 17 nt, Human
cggugccagguuuucug

SEQ ID NO: 3609024 - RNA, 14 nt, Human
cggugccaugucug

SEQ ID NO: 3609025 - RNA, 15 nt, Human
cggugcccaagccag

SEQ ID NO: 3609026 - RNA, 18 nt, Human
cggugcccaagccagagg

SEQ ID NO: 3609027 - RNA, 23 nt, Human
cggugcccaagccagaggcuggg

SEQ ID NO: 3609028 - RNA, 17 nt, Human
cggugcggcagggaaga

SEQ ID NO: 3609029 - RNA, 18 nt, Human
cggugcucggagaagagc

SEQ ID NO: 3609030 - RNA, 17 nt, Human
cggugcuguccucaggu

SEQ ID NO: 3609031 - RNA, 16 nt, Human
cggugcugugagggag

SEQ ID NO: 3609032 - RNA, 14 nt, Human
cgguggcccugucc

SEQ ID NO: 3609033 - RNA, 20 nt, Human
cgguggcuagucaagcuccu

SEQ ID NO: 3609034 - RNA, 22 nt, Human
cgguggcuagucaagcuccucc

SEQ ID NO: 3609035 - RNA, 11 nt, Human
cgguggcucac

SEQ ID NO: 3609036 - RNA, 20 nt, Human
cgguggcucacgccuguaau

SEQ ID NO: 3609037 - RNA, 23 nt, Human
cggugggcacccacccugggacc

SEQ ID NO: 3609038 - RNA, 21 nt, Human
cggugguaccaggucuccucc

SEQ ID NO: 3609039 - RNA, 15 nt, Human
cgguggugaggcagu

SEQ ID NO: 3609040 - RNA, 19 nt, Human
cgguguccccaccaucugc

SEQ ID NO: 3609041 - RNA, 17 nt, Human
cggugugccugcagccc

SEQ ID NO: 3609042 - RNA, 18 nt, Human
cgguguggagaagcggcu

SEQ ID NO: 3609043 - RNA, 18 nt, Human
cgguguuauuccaaggga

SEQ ID NO: 3609044 - RNA, 13 nt, Human
cgguguucuaaga

SEQ ID NO: 3609045 - RNA, 19 nt, Human
cgguucaguguuucugggg

SEQ ID NO: 3609046 - RNA, 21 nt, Human
cgguuccucguucucccuggg

SEQ ID NO: 3609047 - RNA, 16 nt, Human
cgguuccugucccugc

SEQ ID NO: 3609048 - RNA, 14 nt, Human
cgguugaaaccugu

SEQ ID NO: 3609049 - RNA, 15 nt, Human
cgguugcuucuggga

SEQ ID NO: 3609050 - RNA, 21 nt, Human
cgguuggagcgagcauccccc

SEQ ID NO: 3609051 - RNA, 20 nt, Human
cgguuuaucgcccuggcagg

SEQ ID NO: 3609052 - RNA, 17 nt, Human
cguaaaaacugaaguuc

SEQ ID NO: 3609053 - RNA, 13 nt, Human
cguaagcacuguu

SEQ ID NO: 3609054 - RNA, 15 nt, Human
cguaagcacuguuuu

SEQ ID NO: 3609055 - RNA, 13 nt, Human
cguaagcaguaua

SEQ ID NO: 3609056 - RNA, 23 nt, Human
cguaagcaguauauuaguauuau

SEQ ID NO: 3609057 - RNA, 16 nt, Human
cguaaguacagagaag

SEQ ID NO: 3609058 - RNA, 18 nt, Human
cguaaguacagagaagcc

SEQ ID NO: 3609059 - RNA, 20 nt, Human
cguaaguacagagaagccau

SEQ ID NO: 3609060 - RNA, 17 nt, Human
cguaauaauuauuauua

SEQ ID NO: 3609061 - RNA, 16 nt, Human
cguaauuaaaagaauu

SEQ ID NO: 3609062 - RNA, 19 nt, Human
cguacaaguaguucuguau

SEQ ID NO: 3609063 - RNA, 16 nt, Human
cguacacauuuuauuu

SEQ ID NO: 3609064 - RNA, 22 nt, Human
cguacacauuuuauuuuauuau

SEQ ID NO: 3609065 - RNA, 22 nt, Human
cguacaguucuucgggaagaga

SEQ ID NO: 3609066 - RNA, 15 nt, Human
cguacauaauacuga

SEQ ID NO: 3609067 - RNA, 14 nt, Human
cguacaugugaggc

SEQ ID NO: 3609068 - RNA, 13 nt, Human
cguacauguuuau

SEQ ID NO: 3609069 - RNA, 15 nt, Human
cguacauucaauguu

SEQ ID NO: 3609070 - RNA, 17 nt, Human
cguacucuuuggggcag

SEQ ID NO: 3609071 - RNA, 22 nt, Human
cguagauauuggacaaagaacc

SEQ ID NO: 3609072 - RNA, 18 nt, Human
cguagaucaccagaauaa

SEQ ID NO: 3609073 - RNA, 16 nt, Human
cguagccagcugcucc

SEQ ID NO: 3609074 - RNA, 22 nt, Human
cguagcuucuaccaugaacaga

SEQ ID NO: 3609075 - RNA, 21 nt, Human
cguaggaugaaaagauucuuc

SEQ ID NO: 3609076 - RNA, 14 nt, Human
cguaggcuacagag

SEQ ID NO: 3609077 - RNA, 16 nt, Human
cguaggcuacagagaa

SEQ ID NO: 3609078 - RNA, 19 nt, Human
cguaggcuacagagaagcc

SEQ ID NO: 3609079 - RNA, 23 nt, Human
cguaggcuacagagaagccuuca

SEQ ID NO: 3609080 - RNA, 18 nt, Human
cguagucggcacagccug

SEQ ID NO: 3609081 - RNA, 15 nt, Human
cguauagcuguauug

SEQ ID NO: 3609082 - RNA, 16 nt, Human
cguauaggcauguaaa

SEQ ID NO: 3609083 - RNA, 17 nt, Human
cguauauauaagaaaga

SEQ ID NO: 3609084 - RNA, 16 nt, Human
cguaucccgagucugg

SEQ ID NO: 3609085 - RNA, 12 nt, Human
cguaugaaaaug

SEQ ID NO: 3609086 - RNA, 20 nt, Human
cguaugcaguguagauuuua

SEQ ID NO: 3609087 - RNA, 17 nt, Human
cgugccguuacucucca

SEQ ID NO: 3609088 - RNA, 13 nt, Human
cgugccuucagcu

SEQ ID NO: 3609089 - RNA, 23 nt, Human
cgugcuacccccaugcuggaggu

SEQ ID NO: 3609090 - RNA, 16 nt, Human
cgugcugacagcugcu

SEQ ID NO: 3609091 - RNA, 13 nt, Human
cgugcugggcagc

SEQ ID NO: 3609092 - RNA, 19 nt, Human
cgugcugggcggcugugcu

SEQ ID NO: 3609093 - RNA, 18 nt, Human
cgugcuuagccuccugac

SEQ ID NO: 3609094 - RNA, 16 nt, Human
cguggaaccucugucu

SEQ ID NO: 3609095 - RNA, 18 nt, Human
cguggaaccucugucuca

SEQ ID NO: 3609096 - RNA, 15 nt, Human
cguggaacguuuuuc

SEQ ID NO: 3609097 - RNA, 14 nt, Human
cguggacaccugcc

SEQ ID NO: 3609098 - RNA, 20 nt, Human
cguggacuccagacucucug

SEQ ID NO: 3609099 - RNA, 22 nt, Human
cguggacuccagacucucugug

SEQ ID NO: 3609100 - RNA, 21 nt, Human
cguggacugagugggaagccc

SEQ ID NO: 3609101 - RNA, 22 nt, Human
cguggacuuggggucagagacu

SEQ ID NO: 3609102 - RNA, 17 nt, Human
cguggagaaucacaggc

SEQ ID NO: 3609103 - RNA, 18 nt, Human
cguggagagcuaggagca

SEQ ID NO: 3609104 - RNA, 13 nt, Human
cgccucccuccac

SEQ ID NO: 3609105 - RNA, 15 nt, Human
cgccucccuccaccc

SEQ ID NO: 3609106 - RNA, 22 nt, Human
cgccuccgggacccccaggaca

SEQ ID NO: 3609107 - RNA, 19 nt, Human
cgccucgcccaccgcaugc

SEQ ID NO: 3609108 - RNA, 22 nt, Human
cgccucugcaagggcagaacac

SEQ ID NO: 3609109 - RNA, 21 nt, Human
cgccugacaaccacuggucug

SEQ ID NO: 3609110 - RNA, 11 nt, Human
cgccugagccc

SEQ ID NO: 3609111 - RNA, 13 nt, Human
cgccugagcccag

SEQ ID NO: 3609112 - RNA, 19 nt, Human
cgccugagcccagggaggc

SEQ ID NO: 3609113 - RNA, 21 nt, Human
cgccugagcccagggaggccg

SEQ ID NO: 3609114 - RNA, 22 nt, Human
cgccugcaaacgcugccugccc

SEQ ID NO: 3609115 - RNA, 15 nt, Human
cgccugccaguccua

SEQ ID NO: 3609116 - RNA, 17 nt, Human
cgccugcccaccugccu

SEQ ID NO: 3609117 - RNA, 21 nt, Human
cgccugcccaccugccuggcc

SEQ ID NO: 3609118 - RNA, 23 nt, Human
cgccugcccgucucucucccaug

SEQ ID NO: 3609119 - RNA, 21 nt, Human
cgccuggcaguccgugggacg

SEQ ID NO: 3609120 - RNA, 13 nt, Human
cgccuggccagga

SEQ ID NO: 3609121 - RNA, 11 nt, Human
cgccuggccuc

SEQ ID NO: 3609122 - RNA, 13 nt, Human
cgccuggccucca

SEQ ID NO: 3609123 - RNA, 15 nt, Human
cgccuggccuccagg

SEQ ID NO: 3609124 - RNA, 16 nt, Human
cgccuggccuccaggc

SEQ ID NO: 3609125 - RNA, 17 nt, Human
cgccuggccuccaggcc

SEQ ID NO: 3609126 - RNA, 20 nt, Human
cgccuggccuccaggcccgu

SEQ ID NO: 3609127 - RNA, 17 nt, Human
cgccuggguccagggga

SEQ ID NO: 3609128 - RNA, 17 nt, Human
cgccuguaaucccagcu

SEQ ID NO: 3609129 - RNA, 20 nt, Human
cgccuguaaucccagcuacu

SEQ ID NO: 3609130 - RNA, 18 nt, Human
cgccuguagucccagcca

SEQ ID NO: 3609131 - RNA, 15 nt, Human
cgccugugaugcugg

SEQ ID NO: 3609132 - RNA, 13 nt, Human
cgccugugcacac

SEQ ID NO: 3609133 - RNA, 14 nt, Human
cgccugugcacaca

SEQ ID NO: 3609134 - RNA, 19 nt, Human
cgccuguggagcucagccc

SEQ ID NO: 3609135 - RNA, 13 nt, Human
cgccuucccuccu

SEQ ID NO: 3609136 - RNA, 22 nt, Human
cgccuuccgccccuucccuucc

SEQ ID NO: 3609137 - RNA, 13 nt, Human
cgccuucuccccc

SEQ ID NO: 3609138 - RNA, 21 nt, Human
cgccuucucccccccggggcu

SEQ ID NO: 3609139 - RNA, 16 nt, Human
cgccuuggccuguguu

SEQ ID NO: 3609140 - RNA, 21 nt, Human
cgccuugucuccuacuccuga

SEQ ID NO: 3609141 - RNA, 19 nt, Human
cgccuuuccucucuauauu

SEQ ID NO: 3609142 - RNA, 23 nt, Human
cgccuuuccuuuucgccuuuccu

SEQ ID NO: 3609143 - RNA, 13 nt, Human
cgccuuuuguaua

SEQ ID NO: 3609144 - RNA, 14 nt, Human
cgcgacaaugcaaa

SEQ ID NO: 3609145 - RNA, 16 nt, Human
cgcgaccauguggcca

SEQ ID NO: 3609146 - RNA, 14 nt, Human
cgcgaucucagcuc

SEQ ID NO: 3609147 - RNA, 20 nt, Human
cgcgauguggaacugcugcc

SEQ ID NO: 3609148 - RNA, 21 nt, Human
cgcgauguggaacugcugcca

SEQ ID NO: 3609149 - RNA, 23 nt, Human
cgcgauguggaacugcugccacu

SEQ ID NO: 3609150 - RNA, 18 nt, Human
cgcgcacacacacacaua

SEQ ID NO: 3609151 - RNA, 19 nt, Human
cgcgcagaugugcagcaga

SEQ ID NO: 3609152 - RNA, 23 nt, Human
cgcgccacuacacuccagccuga

SEQ ID NO: 3609153 - RNA, 15 nt, Human
cgcgccacucgcuuc

SEQ ID NO: 3609154 - RNA, 20 nt, Human
cgcgccacucgcuuccccca

SEQ ID NO: 3609155 - RNA, 18 nt, Human
cgcgccccccucccagag

SEQ ID NO: 3609156 - RNA, 19 nt, Human
cgcgccccccucccagagg

SEQ ID NO: 3609157 - RNA, 13 nt, Human
cgcgccccuagcc

SEQ ID NO: 3609158 - RNA, 17 nt, Human
cgcgcccgccccugcag

SEQ ID NO: 3609159 - RNA, 19 nt, Human
cgcgccuucucccccccgg

SEQ ID NO: 3609160 - RNA, 23 nt, Human
cgcgccuucucccccccggggcu

SEQ ID NO: 3609161 - RNA, 19 nt, Human
cgcgcgucccccugccggc

SEQ ID NO: 3609162 - RNA, 13 nt, Human
cgcgcucugcuca

SEQ ID NO: 3609163 - RNA, 17 nt, Human
cgcggacauccccugcu

SEQ ID NO: 3609164 - RNA, 15 nt, Human
cgcggcggagcuggc

SEQ ID NO: 3609165 - RNA, 19 nt, Human
cgcggcucccggggcaggg

SEQ ID NO: 3609166 - RNA, 11 nt, Human
cgcggcuggga

SEQ ID NO: 3609167 - RNA, 20 nt, Human
cgcggggcugucggcgcugc

SEQ ID NO: 3609168 - RNA, 17 nt, Human
cgcgguacaaaggaaaa

SEQ ID NO: 3609169 - RNA, 13 nt, Human
cgcgguggcucac

SEQ ID NO: 3609170 - RNA, 13 nt, Human
cgcgucuccuguu

SEQ ID NO: 3609171 - RNA, 13 nt, Human
cgcgucuuccuga

SEQ ID NO: 3609172 - RNA, 16 nt, Human
cgcgucuuccugagug

SEQ ID NO: 3609173 - RNA, 13 nt, Human
cgcguugaaauug

SEQ ID NO: 3609174 - RNA, 21 nt, Human
cgcguugaaauuguaauuaua

SEQ ID NO: 3609175 - RNA, 22 nt, Human
cgcguugaaauuguaauuauau

SEQ ID NO: 3609176 - RNA, 16 nt, Human
cgcguuguaaaauaua

SEQ ID NO: 3609177 - RNA, 17 nt, Human
cgcuaaacuuuucugau

SEQ ID NO: 3609178 - RNA, 22 nt, Human
cgcuaaagagcccuugccuccc

SEQ ID NO: 3609179 - RNA, 19 nt, Human
cgcuaacuugcuuaaaugu

SEQ ID NO: 3609180 - RNA, 20 nt, Human
cgcuaacuugcuuaaaugug

SEQ ID NO: 3609181 - RNA, 16 nt, Human
cgcuaagagggaggga

SEQ ID NO: 3609182 - RNA, 21 nt, Human
cgcuaagagggagggagggcu

SEQ ID NO: 3609183 - RNA, 20 nt, Human
cgcuacccgggaagggggcu

SEQ ID NO: 3609184 - RNA, 17 nt, Human
cgcuagagcagcccaaa

SEQ ID NO: 3609185 - RNA, 18 nt, Human
cgcuagaggaagcagcca

SEQ ID NO: 3609186 - RNA, 20 nt, Human
cgcuagaugggcauggggug

SEQ ID NO: 3609187 - RNA, 23 nt, Human
cgcuagaugggcauggggugggc

SEQ ID NO: 3609188 - RNA, 16 nt, Human
cgcuagcacagcuccc

SEQ ID NO: 3609189 - RNA, 15 nt, Human
cgcuaggcucgccuu

SEQ ID NO: 3609190 - RNA, 18 nt, Human
cgcuaggcucgccuuccc

SEQ ID NO: 3609191 - RNA, 22 nt, Human
cgcuaggcucgccuucccuccu

SEQ ID NO: 3609192 - RNA, 20 nt, Human
cgcuagguagagucugaggg

SEQ ID NO: 3609193 - RNA, 16 nt, Human
cgcuauuccagcuguc

SEQ ID NO: 3609194 - RNA, 17 nt, Human
cgcucaccuagagccag

SEQ ID NO: 3609195 - RNA, 18 nt, Human
cgcucaccuagagccaga

SEQ ID NO: 3609196 - RNA, 16 nt, Human
cgcucagcccucccug

SEQ ID NO: 3609197 - RNA, 20 nt, Human
cgcucagggccaugcugagg

SEQ ID NO: 3609198 - RNA, 21 nt, Human
cgcucagggccaugcugaggc

SEQ ID NO: 3609199 - RNA, 22 nt, Human
cgcucagggccaugcugaggcc

SEQ ID NO: 3609200 - RNA, 20 nt, Human
cgcucaugggccccucugac

SEQ ID NO: 3609201 - RNA, 17 nt, Human
cgcuccccgccuguucc

SEQ ID NO: 3609202 - RNA, 13 nt, Human
cgcucccgggacu

SEQ ID NO: 3609203 - RNA, 15 nt, Human
cgcucccucccagga

SEQ ID NO: 3609204 - RNA, 21 nt, Human
cgcucccucccaggacucuga

SEQ ID NO: 3609205 - RNA, 18 nt, Human
cgcuccugcagccccagc

SEQ ID NO: 3609206 - RNA, 18 nt, Human
cgcuccugccgcagagcu

SEQ ID NO: 3609207 - RNA, 19 nt, Human
cgcuccugccgcagagcug

SEQ ID NO: 3609208 - RNA, 22 nt, Human
cgcuccugcuaacggugcucag

SEQ ID NO: 3609209 - RNA, 23 nt, Human
cgcuccugcuaacggugcucagg

SEQ ID NO: 3609210 - RNA, 17 nt, Human
cgcuccuggcccagccu

SEQ ID NO: 3609211 - RNA, 15 nt, Human
cgcucgccccaccgg

SEQ ID NO: 3609212 - RNA, 14 nt, Human
cgcucggaggcccc

SEQ ID NO: 3609213 - RNA, 15 nt, Human
cgcucguguguucua

SEQ ID NO: 3609214 - RNA, 14 nt, Human
cgcucucuuccugc

SEQ ID NO: 3609215 - RNA, 23 nt, Human
cgcucucuuccugccccucuuuc

SEQ ID NO: 3609216 - RNA, 22 nt, Human
cgcucugcaugcggcccagccc

SEQ ID NO: 3609217 - RNA, 23 nt, Human
cgcucugcaugcggcccagcccg

SEQ ID NO: 3609218 - RNA, 16 nt, Human
cgcucugcuggccugg

SEQ ID NO: 3609219 - RNA, 18 nt, Human
cgcucugcuggccuggcc

SEQ ID NO: 3609220 - RNA, 21 nt, Human
cgcucugcuggccuggccggc

SEQ ID NO: 3609221 - RNA, 15 nt, Human
cgcucugucacccag

SEQ ID NO: 3609222 - RNA, 20 nt, Human
cgcucuguggaugccagggc

SEQ ID NO: 3609223 - RNA, 21 nt, Human
cgcucuguggaugccagggcc

SEQ ID NO: 3609224 - RNA, 19 nt, Human
cgcucuguugcccaggcug

SEQ ID NO: 3609225 - RNA, 21 nt, Human
cgcucuuggcagguacucagc

SEQ ID NO: 3609226 - RNA, 13 nt, Human
cgcucuuuuccua

SEQ ID NO: 3609227 - RNA, 14 nt, Human
cgcugaauaaaugu

SEQ ID NO: 3609228 - RNA, 15 nt, Human
cgcugaauaaauguc

SEQ ID NO: 3609229 - RNA, 16 nt, Human
cgcugacuucauggaa

SEQ ID NO: 3609230 - RNA, 17 nt, Human
cgcugagacugugcugu

SEQ ID NO: 3609231 - RNA, 16 nt, Human
cuaaguugggaucuag

SEQ ID NO: 3609232 - RNA, 13 nt, Human
cuaaguuucuaag

SEQ ID NO: 3609233 - RNA, 14 nt, Human
cuaaguuucuaaga

SEQ ID NO: 3609234 - RNA, 17 nt, Human
cuaaguuucuaagauuc

SEQ ID NO: 3609235 - RNA, 20 nt, Human
cuaaguuuuaggguacaugu

SEQ ID NO: 3609236 - RNA, 14 nt, Human
cuaaguuuuuaugg

SEQ ID NO: 3609237 - RNA, 11 nt, Human
cuaauaaaaag

SEQ ID NO: 3609238 - RNA, 18 nt, Human
cuaauaaaaagcuuuugu

SEQ ID NO: 3609239 - RNA, 10 nt, Human
cuaauaaaac

SEQ ID NO: 3609240 - RNA, 14 nt, Human
cuaauaaaacugau

SEQ ID NO: 3609241 - RNA, 18 nt, Human
cuaauaaaacugauguga

SEQ ID NO: 3609242 - RNA, 13 nt, Human
cuaauaaaauauc

SEQ ID NO: 3609243 - RNA, 15 nt, Human
cuaauaaaauaucau

SEQ ID NO: 3609244 - RNA, 19 nt, Human
cuaauaaaauaucauucag

SEQ ID NO: 3609245 - RNA, 22 nt, Human
cuaauaaaauaucauucagcaa

SEQ ID NO: 3609246 - RNA, 14 nt, Human
cuaauaaaauauuu

SEQ ID NO: 3609247 - RNA, 18 nt, Human
cuaauaaacuaauaauug

SEQ ID NO: 3609248 - RNA, 17 nt, Human
cuaauaaauuauacaaa

SEQ ID NO: 3609249 - RNA, 17 nt, Human
cuaauaacaugugaaaa

SEQ ID NO: 3609250 - RNA, 16 nt, Human
cuaauaauaaauaguu

SEQ ID NO: 3609251 - RNA, 15 nt, Human
cuaauaaucuuguuu

SEQ ID NO: 3609252 - RNA, 21 nt, Human
cuaauaaucuuguuucugaaa

SEQ ID NO: 3609253 - RNA, 22 nt, Human
cuaauaaugagcuauuaaaacu

SEQ ID NO: 3609254 - RNA, 15 nt, Human
cuaauaauuucuaau

SEQ ID NO: 3609255 - RNA, 17 nt, Human
cuaauaauuucuaaugu

SEQ ID NO: 3609256 - RNA, 18 nt, Human
cuaauaauuucuaauguu

SEQ ID NO: 3609257 - RNA, 19 nt, Human
cuaauacagcaacaauuua

SEQ ID NO: 3609258 - RNA, 23 nt, Human
cuaauacagcaacaauuuaugaa

SEQ ID NO: 3609259 - RNA, 17 nt, Human
cuaauacagcugagcua

SEQ ID NO: 3609260 - RNA, 18 nt, Human
cuaauacauuaaagcagu

SEQ ID NO: 3609261 - RNA, 15 nt, Human
cuaauaccucugugu

SEQ ID NO: 3609262 - RNA, 20 nt, Human
cuaauagaauaaaggcaguu

SEQ ID NO: 3609263 - RNA, 17 nt, Human
cuaauagacaauuuauu

SEQ ID NO: 3609264 - RNA, 19 nt, Human
cuaauagacaauuuauuau

SEQ ID NO: 3609265 - RNA, 23 nt, Human
cuaauagugaucaagaagacuuu

SEQ ID NO: 3609266 - RNA, 23 nt, Human
cuaauaguuuuauuaauaaacau

SEQ ID NO: 3609267 - RNA, 13 nt, Human
cuaauauauauga

SEQ ID NO: 3609268 - RNA, 15 nt, Human
cuaauauauaugaau

SEQ ID NO: 3609269 - RNA, 18 nt, Human
cuaauauauaugaauaaa

SEQ ID NO: 3609270 - RNA, 13 nt, Human
cuaauauauuuaa

SEQ ID NO: 3609271 - RNA, 14 nt, Human
cuaauauauuuaaa

SEQ ID NO: 3609272 - RNA, 12 nt, Human
cuaauauauuuu

SEQ ID NO: 3609273 - RNA, 21 nt, Human
cuaauauauuuuuauauuuag

SEQ ID NO: 3609274 - RNA, 16 nt, Human
cuaauauccacuuguc

SEQ ID NO: 3609275 - RNA, 17 nt, Human
cuaauauggcaaccauu

SEQ ID NO: 3609276 - RNA, 13 nt, Human
cuaauauuaaaaa

SEQ ID NO: 3609277 - RNA, 16 nt, Human
cuaauauuuauugcuu

SEQ ID NO: 3609278 - RNA, 14 nt, Human
cuaauauuuuaugu

SEQ ID NO: 3609279 - RNA, 17 nt, Human
cuaauauuuuccuccug

SEQ ID NO: 3609280 - RNA, 19 nt, Human
cuaaucaaagccagggucu

SEQ ID NO: 3609281 - RNA, 21 nt, Human
cuaaucacaguuuuuccugga

SEQ ID NO: 3609282 - RNA, 15 nt, Human
cuaaucaccauguaa

SEQ ID NO: 3609283 - RNA, 18 nt, Human
cuaaucaccauguaagca

SEQ ID NO: 3609284 - RNA, 17 nt, Human
cuaaucagcauucucac

SEQ ID NO: 3609285 - RNA, 20 nt, Human
cuaaucagggaggucauuuu

SEQ ID NO: 3609286 - RNA, 15 nt, Human
cuaaucagugucuca

SEQ ID NO: 3609287 - RNA, 20 nt, Human
cuaaucagugucucacacug

SEQ ID NO: 3609288 - RNA, 15 nt, Human
cuaauccaacccaug

SEQ ID NO: 3609289 - RNA, 23 nt, Human
cuaauccaggcagauccaggacu

SEQ ID NO: 3609290 - RNA, 20 nt, Human
cuaauccccuucuccccugc

SEQ ID NO: 3609291 - RNA, 23 nt, Human
cuaaucccugggcauugcuuucc

SEQ ID NO: 3609292 - RNA, 15 nt, Human
cuaaucgaacuauga

SEQ ID NO: 3609293 - RNA, 18 nt, Human
cuaaucuaacaauggaag

SEQ ID NO: 3609294 - RNA, 16 nt, Human
cuaaucuacuuucugu

SEQ ID NO: 3609295 - RNA, 19 nt, Human
cuaaucuauuggguucauu

SEQ ID NO: 3609296 - RNA, 20 nt, Human
cuaaucuauuggguucauua

SEQ ID NO: 3609297 - RNA, 21 nt, Human
cuaaucuguagggcuggaccu

SEQ ID NO: 3609298 - RNA, 19 nt, Human
cuaaucugugcuguuucaa

SEQ ID NO: 3609299 - RNA, 12 nt, Human
cgggcaugacac

SEQ ID NO: 3609300 - RNA, 15 nt, Human
cgggcaugacacgaa

SEQ ID NO: 3609301 - RNA, 16 nt, Human
cgggcauggcagcccu

SEQ ID NO: 3609302 - RNA, 12 nt, Human
cgggccaaggac

SEQ ID NO: 3609303 - RNA, 14 nt, Human
cgggccacagagaa

SEQ ID NO: 3609304 - RNA, 18 nt, Human
cgggccacuccuuccugc

SEQ ID NO: 3609305 - RNA, 14 nt, Human
cgggccagccaggc

SEQ ID NO: 3609306 - RNA, 18 nt, Human
cgggccagccaggcgggc

SEQ ID NO: 3609307 - RNA, 14 nt, Human
cgggccagugcucc

SEQ ID NO: 3609308 - RNA, 18 nt, Human
cgggccagugcuccagcc

SEQ ID NO: 3609309 - RNA, 15 nt, Human
cgggcccaccuggcc

SEQ ID NO: 3609310 - RNA, 18 nt, Human
cgggcccaccuggccacc

SEQ ID NO: 3609311 - RNA, 14 nt, Human
cgggcccagaggag

SEQ ID NO: 3609312 - RNA, 15 nt, Human
cgggcccagaggagc

SEQ ID NO: 3609313 - RNA, 17 nt, Human
cgggccccaccugcagc

SEQ ID NO: 3609314 - RNA, 17 nt, Human
cgggcccucccuuggaa

SEQ ID NO: 3609315 - RNA, 15 nt, Human
cgggcccuggguucc

SEQ ID NO: 3609316 - RNA, 19 nt, Human
cgggcccuucuugcugccc

SEQ ID NO: 3609317 - RNA, 21 nt, Human
cgggcccuucuugcugcccug

SEQ ID NO: 3609318 - RNA, 23 nt, Human
cgggcccuucuugcugcccugcc

SEQ ID NO: 3609319 - RNA, 16 nt, Human
cgggccuggagaacua

SEQ ID NO: 3609320 - RNA, 15 nt, Human
cgggccuguccacag

SEQ ID NO: 3609321 - RNA, 19 nt, Human
cgggcgagucacugccucu

SEQ ID NO: 3609322 - RNA, 17 nt, Human
cgggcgcacugccucuc

SEQ ID NO: 3609323 - RNA, 18 nt, Human
cgggcgcacugccucuca

SEQ ID NO: 3609324 - RNA, 17 nt, Human
cgggcgugguggcgggc

SEQ ID NO: 3609325 - RNA, 14 nt, Human
cgggcucagcucug

SEQ ID NO: 3609326 - RNA, 15 nt, Human
cgggcucagcucugg

SEQ ID NO: 3609327 - RNA, 22 nt, Human
cgggcuccgacuugugcacagg

SEQ ID NO: 3609328 - RNA, 14 nt, Human
cgggcuccugugcc

SEQ ID NO: 3609329 - RNA, 15 nt, Human
cgggcuccugugccc

SEQ ID NO: 3609330 - RNA, 15 nt, Human
cgggcucucugcugu

SEQ ID NO: 3609331 - RNA, 13 nt, Human
cgggcucugccuc

SEQ ID NO: 3609332 - RNA, 14 nt, Human
cgggcucugccucc

SEQ ID NO: 3609333 - RNA, 17 nt, Human
cgggcucugccucccau

SEQ ID NO: 3609334 - RNA, 14 nt, Human
cgggcugagggccu

SEQ ID NO: 3609335 - RNA, 14 nt, Human
cgggcugcccugcc

SEQ ID NO: 3609336 - RNA, 16 nt, Human
cgggcugggagcucug

SEQ ID NO: 3609337 - RNA, 20 nt, Human
cgggcugggagcucugcaga

SEQ ID NO: 3609338 - RNA, 16 nt, Human
cgggcugggcagcugu

SEQ ID NO: 3609339 - RNA, 12 nt, Human
cgggcugugccc

SEQ ID NO: 3609340 - RNA, 22 nt, Human
cgggcuuugugugaaggcagag

SEQ ID NO: 3609341 - RNA, 20 nt, Human
cggggaacuggccaagcuga

SEQ ID NO: 3609342 - RNA, 23 nt, Human
cggggacagcuccuucuguccua

SEQ ID NO: 3609343 - RNA, 12 nt, Human
cggggacccugu

SEQ ID NO: 3609344 - RNA, 14 nt, Human
cggggacccuguga

SEQ ID NO: 3609345 - RNA, 16 nt, Human
cggggagcccccgccc

SEQ ID NO: 3609346 - RNA, 15 nt, Human
cggggagggugacag

SEQ ID NO: 3609347 - RNA, 22 nt, Human
cggggagggugacaguggccgc

SEQ ID NO: 3609348 - RNA, 17 nt, Human
cggggaguuucuuuccu

SEQ ID NO: 3609349 - RNA, 14 nt, Human
cggggauguguccu

SEQ ID NO: 3609350 - RNA, 14 nt, Human
cggggcagcugcca

SEQ ID NO: 3609351 - RNA, 13 nt, Human
cggggccagaggc

SEQ ID NO: 3609352 - RNA, 17 nt, Human
cggggccucgggaccuc

SEQ ID NO: 3609353 - RNA, 18 nt, Human
cggggccucgggaccuca

SEQ ID NO: 3609354 - RNA, 15 nt, Human
cggggccugccuagc

SEQ ID NO: 3609355 - RNA, 21 nt, Human
cggggccuuaucgggcuccag

SEQ ID NO: 3609356 - RNA, 14 nt, Human
cggggcguuucuuu

SEQ ID NO: 3609357 - RNA, 19 nt, Human
cggggcuccccuucgcgua

SEQ ID NO: 3609358 - RNA, 17 nt, Human
cggggcucuucucauuu

SEQ ID NO: 3609359 - RNA, 23 nt, Human
cggggcucuucucauuucacccc

SEQ ID NO: 3609360 - RNA, 12 nt, Human
cggggcuggguu

SEQ ID NO: 3609361 - RNA, 21 nt, Human
cggggcuggguuggcgcaccc

SEQ ID NO: 3609362 - RNA, 14 nt, Human
cggggcugucggcg

SEQ ID NO: 3609363 - RNA, 21 nt, Human
cggggcugucggcgcugcccc

SEQ ID NO: 3609364 - RNA, 23 nt, Human
cggggcuucaaccuugagacagc

SEQ ID NO: 3609365 - RNA, 12 nt, Human
cggggcuugccu

SEQ ID NO: 3609366 - RNA, 14 nt, Human
cggggcuuggcuga

SEQ ID NO: 3609367 - RNA, 17 nt, Human
cgggggcagucugagag

SEQ ID NO: 3609368 - RNA, 14 nt, Human
cgggggcagugcuc

SEQ ID NO: 3609369 - RNA, 20 nt, Human
cgggggcugcccuugggcca

SEQ ID NO: 3609370 - RNA, 12 nt, Human
cgggggcuggcc

SEQ ID NO: 3609371 - RNA, 18 nt, Human
cgggggcuggccuaggag

SEQ ID NO: 3609372 - RNA, 11 nt, Human
cggggggaggg

SEQ ID NO: 3609373 - RNA, 20 nt, Human
cggggguuccguguccaccc

SEQ ID NO: 3609374 - RNA, 21 nt, Human
cgggguauccugggggaccca

SEQ ID NO: 3609375 - RNA, 16 nt, Human
cgggguauuuuaggca

SEQ ID NO: 3609376 - RNA, 17 nt, Human
cgggguccuguggcagg

SEQ ID NO: 3609377 - RNA, 22 nt, Human
cgucaagagugaauucccucac

SEQ ID NO: 3609378 - RNA, 13 nt, Human
cgucaccaccacc

SEQ ID NO: 3609379 - RNA, 16 nt, Human
cgucaccaucucaggc

SEQ ID NO: 3609380 - RNA, 20 nt, Human
cgucaccaucucaggccacc

SEQ ID NO: 3609381 - RNA, 21 nt, Human
cgucaccaucucaggccaccu

SEQ ID NO: 3609382 - RNA, 19 nt, Human
cgucacgugcgcugggcac

SEQ ID NO: 3609383 - RNA, 20 nt, Human
cgucacgugcgcugggcacu

SEQ ID NO: 3609384 - RNA, 17 nt, Human
cgucacuuuauuucauu

SEQ ID NO: 3609385 - RNA, 17 nt, Human
cgucagaagcacccagg

SEQ ID NO: 3609386 - RNA, 14 nt, Human
cgucagccuccagc

SEQ ID NO: 3609387 - RNA, 16 nt, Human
cgucagccuccagccu

SEQ ID NO: 3609388 - RNA, 17 nt, Human
cgucagccuccagccuc

SEQ ID NO: 3609389 - RNA, 19 nt, Human
cgucagcugggacaccccg

SEQ ID NO: 3609390 - RNA, 18 nt, Human
cgucaggguuggugugcu

SEQ ID NO: 3609391 - RNA, 19 nt, Human
cgucaggguuggugugcug

SEQ ID NO: 3609392 - RNA, 17 nt, Human
cgucaguaucaggccug

SEQ ID NO: 3609393 - RNA, 15 nt, Human
cgucaguauuuuccc

SEQ ID NO: 3609394 - RNA, 14 nt, Human
cgucauaacuagaa

SEQ ID NO: 3609395 - RNA, 15 nt, Human
cgucauguuccucaa

SEQ ID NO: 3609396 - RNA, 16 nt, Human
cguccacagcuuccug

SEQ ID NO: 3609397 - RNA, 22 nt, Human
cguccaccaugggguccuacca

SEQ ID NO: 3609398 - RNA, 22 nt, Human
cguccacggcucuagguggggc

SEQ ID NO: 3609399 - RNA, 13 nt, Human
cguccagccugcc

SEQ ID NO: 3609400 - RNA, 16 nt, Human
cguccagcugcccuuc

SEQ ID NO: 3609401 - RNA, 22 nt, Human
cguccaggccgcgcccuuuccc

SEQ ID NO: 3609402 - RNA, 11 nt, Human
cguccagggag

SEQ ID NO: 3609403 - RNA, 21 nt, Human
cguccagguucaacccacagc

SEQ ID NO: 3609404 - RNA, 20 nt, Human
cguccauaucagaacugugc

SEQ ID NO: 3609405 - RNA, 17 nt, Human
cgucccauauccugccu

SEQ ID NO: 3609406 - RNA, 17 nt, Human
cguccccccccaaccuu

SEQ ID NO: 3609407 - RNA, 22 nt, Human
cguccccucccccaccccugcu

SEQ ID NO: 3609408 - RNA, 14 nt, Human
cguccccugucccc

SEQ ID NO: 3609409 - RNA, 15 nt, Human
cgucccuagcaguga

SEQ ID NO: 3609410 - RNA, 14 nt, Human
cgucccugcccaug

SEQ ID NO: 3609411 - RNA, 11 nt, Human
cgucccuggcg

SEQ ID NO: 3609412 - RNA, 14 nt, Human
cgucccuggcgcag

SEQ ID NO: 3609413 - RNA, 22 nt, Human
cguccgcccugcuccucccugg

SEQ ID NO: 3609414 - RNA, 20 nt, Human
cguccguggguugcuaacug

SEQ ID NO: 3609415 - RNA, 17 nt, Human
cguccucaccccugucc

SEQ ID NO: 3609416 - RNA, 22 nt, Human
cguccucccccugccagugccu

SEQ ID NO: 3609417 - RNA, 17 nt, Human
cguccucccgggcccuc

SEQ ID NO: 3609418 - RNA, 16 nt, Human
cguccucgagcaacug

SEQ ID NO: 3609419 - RNA, 23 nt, Human
cguccugacggcgcccccagugu

SEQ ID NO: 3609420 - RNA, 13 nt, Human
cguccugccugug

SEQ ID NO: 3609421 - RNA, 14 nt, Human
cguccugccugugg

SEQ ID NO: 3609422 - RNA, 15 nt, Human
cguccugccuguggc

SEQ ID NO: 3609423 - RNA, 23 nt, Human
cguccuguccacacccagcucag

SEQ ID NO: 3609424 - RNA, 17 nt, Human
cguccuuacuccugugg

SEQ ID NO: 3609425 - RNA, 21 nt, Human
cguccuuacuccugugggagc

SEQ ID NO: 3609426 - RNA, 17 nt, Human
cgucgaggggcucucag

SEQ ID NO: 3609427 - RNA, 19 nt, Human
cgucgggggcugaggggca

SEQ ID NO: 3609428 - RNA, 21 nt, Human
cgucuaaccacagcuccuuuu

SEQ ID NO: 3609429 - RNA, 13 nt, Human
cgucuacagcucc

SEQ ID NO: 3609430 - RNA, 19 nt, Human
cgucuacauuucacauuau

SEQ ID NO: 3609431 - RNA, 21 nt, Human
cgucuacucauuccccggggc

SEQ ID NO: 3609432 - RNA, 14 nt, Human
cgucuauccugugu

SEQ ID NO: 3609433 - RNA, 23 nt, Human
cgucucaaaaaaaaaaaaaugca

SEQ ID NO: 3609434 - RNA, 16 nt, Human
cgucucauacucaccu

SEQ ID NO: 3609435 - RNA, 10 nt, Human
cgucuccccc

SEQ ID NO: 3609436 - RNA, 22 nt, Human
cgucucccccguguuccccucu

SEQ ID NO: 3609437 - RNA, 13 nt, Human
cgucucucuccca

SEQ ID NO: 3609438 - RNA, 18 nt, Human
cgucugaagcuugacucc

SEQ ID NO: 3609439 - RNA, 21 nt, Human
cgucugaagcuugacucccaa

SEQ ID NO: 3609440 - RNA, 13 nt, Human
cgucugacaggca

SEQ ID NO: 3609441 - RNA, 18 nt, Human
cgucugccggacccggag

SEQ ID NO: 3609442 - RNA, 17 nt, Human
cgucugcuccugcgagg

SEQ ID NO: 3609443 - RNA, 15 nt, Human
cgucuggaaguccaa

SEQ ID NO: 3609444 - RNA, 14 nt, Human
cgucuggaggggcc

SEQ ID NO: 3609445 - RNA, 17 nt, Human
cgucuggcccaccaggg

SEQ ID NO: 3609446 - RNA, 14 nt, Human
cgucugggagaaau

SEQ ID NO: 3609447 - RNA, 19 nt, Human
cgucugggguucagccccu

SEQ ID NO: 3609448 - RNA, 23 nt, Human
cgucugggguucagccccuccuc

SEQ ID NO: 3609449 - RNA, 22 nt, Human
cgucugugugugaccccuccug

SEQ ID NO: 3609450 - RNA, 14 nt, Human
cgucuucagccuag

SEQ ID NO: 3609451 - RNA, 15 nt, Human
cgucuucagccuagc

SEQ ID NO: 3609452 - RNA, 19 nt, Human
cgucuucuguauacugugg

SEQ ID NO: 3609453 - RNA, 17 nt, Human
cgucuugcuugggaagg

SEQ ID NO: 3609454 - RNA, 11 nt, Human
cgucuuuccca

SEQ ID NO: 3609455 - RNA, 19 nt, Human
cgugaaaacacauuugcuu

SEQ ID NO: 3609456 - RNA, 22 nt, Human
cgugaaacacaccaggcugugg

SEQ ID NO: 3609457 - RNA, 23 nt, Human
cgugaaagugcauuuuuguaaau

SEQ ID NO: 3609458 - RNA, 13 nt, Human
cgugaagcaucca

SEQ ID NO: 3609459 - RNA, 17 nt, Human
cgugaaguauacuguau

SEQ ID NO: 3609460 - RNA, 12 nt, Human
cgugacaacacu

SEQ ID NO: 3609461 - RNA, 17 nt, Human
cgugacaauguuuacaa

SEQ ID NO: 3609462 - RNA, 13 nt, Human
cgugacacaaaca

SEQ ID NO: 3609463 - RNA, 21 nt, Human
cgugacacucuccuugcaguu

SEQ ID NO: 3609464 - RNA, 16 nt, Human
cgugacagacuccuga

SEQ ID NO: 3609465 - RNA, 20 nt, Human
cgugacccucugcugaagac

SEQ ID NO: 3609466 - RNA, 15 nt, Human
cuacagcaaauuuau

SEQ ID NO: 3609467 - RNA, 20 nt, Human
cuacagcaaauuuauaauuu

SEQ ID NO: 3609468 - RNA, 20 nt, Human
cuacagcacuacuggguguc

SEQ ID NO: 3609469 - RNA, 22 nt, Human
cuacagcacuacugggugucau

SEQ ID NO: 3609470 - RNA, 23 nt, Human
cuacagcacuacugggugucauu

SEQ ID NO: 3609471 - RNA, 19 nt, Human
cuacagccuugucccccuc

SEQ ID NO: 3609472 - RNA, 19 nt, Human
cuacagcuaaucagcauuc

SEQ ID NO: 3609473 - RNA, 13 nt, Human
cuacagcuaugaa

SEQ ID NO: 3609474 - RNA, 19 nt, Human
cuacagcucccccagcucc

SEQ ID NO: 3609475 - RNA, 19 nt, Human
cuacagcucuuaaauguag

SEQ ID NO: 3609476 - RNA, 19 nt, Human
cuacagcuugaccgugagg

SEQ ID NO: 3609477 - RNA, 22 nt, Human
cuacaggaagcaccccaugcca

SEQ ID NO: 3609478 - RNA, 21 nt, Human
cuacaggagagggaagagugc

SEQ ID NO: 3609479 - RNA, 15 nt, Human
cuacaggagugagca

SEQ ID NO: 3609480 - RNA, 16 nt, Human
cuacaggccucacaca

SEQ ID NO: 3609481 - RNA, 20 nt, Human
cuacaggccucacacacaau

SEQ ID NO: 3609482 - RNA, 12 nt, Human
cuacagggccaa

SEQ ID NO: 3609483 - RNA, 13 nt, Human
cuacaggggccag

SEQ ID NO: 3609484 - RNA, 16 nt, Human
cuacaggggccagaag

SEQ ID NO: 3609485 - RNA, 21 nt, Human
cuacagggggucuggcuggug

SEQ ID NO: 3609486 - RNA, 16 nt, Human
cuacaggugugaguca

SEQ ID NO: 3609487 - RNA, 20 nt, Human
cuacagguuacaacagauuu

SEQ ID NO: 3609488 - RNA, 17 nt, Human
cuacagguuuggguaca

SEQ ID NO: 3609489 - RNA, 15 nt, Human
cuacagucaggaaag

SEQ ID NO: 3609490 - RNA, 16 nt, Human
cuacagucucgucucu

SEQ ID NO: 3609491 - RNA, 12 nt, Human
cuacagugccaa

SEQ ID NO: 3609492 - RNA, 19 nt, Human
cuacagugccaacuccuca

SEQ ID NO: 3609493 - RNA, 20 nt, Human
cuacagugccaacuccucac

SEQ ID NO: 3609494 - RNA, 21 nt, Human
cuacagugguuuuauacugaa

SEQ ID NO: 3609495 - RNA, 14 nt, Human
cuacaguguacagu

SEQ ID NO: 3609496 - RNA, 15 nt, Human
cuacaguguacaguc

SEQ ID NO: 3609497 - RNA, 16 nt, Human
cuacaguguacagucu

SEQ ID NO: 3609498 - RNA, 23 nt, Human
cuacaguuaggguugaguuacuu

SEQ ID NO: 3609499 - RNA, 21 nt, Human
cuacaguugaaaaacagcuga

SEQ ID NO: 3609500 - RNA, 22 nt, Human
cuacaguuggaaauccauccag

SEQ ID NO: 3609501 - RNA, 15 nt, Human
cuacauaaacugacu

SEQ ID NO: 3609502 - RNA, 22 nt, Human
cuacauaaguaauucaagaaaa

SEQ ID NO: 3609503 - RNA, 12 nt, Human
cuacauauugaa

SEQ ID NO: 3609504 - RNA, 15 nt, Human
cuacaucgcccucca

SEQ ID NO: 3609505 - RNA, 15 nt, Human
cuacaucuucugccu

SEQ ID NO: 3609506 - RNA, 18 nt, Human
cuacaucuuuuuucacaa

SEQ ID NO: 3609507 - RNA, 21 nt, Human
cuacaugacgacaaagcugcu

SEQ ID NO: 3609508 - RNA, 18 nt, Human
cuacaugagguacugaga

SEQ ID NO: 3609509 - RNA, 20 nt, Human
cuacaugagguacugagagu

SEQ ID NO: 3609510 - RNA, 17 nt, Human
cuacaugcagcccaugc

SEQ ID NO: 3609511 - RNA, 19 nt, Human
cuacaugcuuguugacaga

SEQ ID NO: 3609512 - RNA, 20 nt, Human
cuacauggaguauaugucaa

SEQ ID NO: 3609513 - RNA, 13 nt, Human
cuacaugugagug

SEQ ID NO: 3609514 - RNA, 23 nt, Human
cuacauuauugcuuauugcuuag

SEQ ID NO: 3609515 - RNA, 22 nt, Human
cuacauugaguagacacauuua

SEQ ID NO: 3609516 - RNA, 11 nt, Human
cuacauuuuaa

SEQ ID NO: 3609517 - RNA, 12 nt, Human
cuacauuuuaac

SEQ ID NO: 3609518 - RNA, 14 nt, Human
cuacauuuuuucau

SEQ ID NO: 3609519 - RNA, 14 nt, Human
cuaccaaagcaccu

SEQ ID NO: 3609520 - RNA, 15 nt, Human
cuaccaaagcaccuu

SEQ ID NO: 3609521 - RNA, 23 nt, Human
cuaggcuucagcauauuuauagc

SEQ ID NO: 3609522 - RNA, 17 nt, Human
cuagggaaacuucccgu

SEQ ID NO: 3609523 - RNA, 20 nt, Human
cuagggaaaugaucaguuuu

SEQ ID NO: 3609524 - RNA, 21 nt, Human
cuagggaaggccaccugcagg

SEQ ID NO: 3609525 - RNA, 14 nt, Human
cuagggaagggugg

SEQ ID NO: 3609526 - RNA, 15 nt, Human
cuagggagagacccu

SEQ ID NO: 3609527 - RNA, 15 nt, Human
cuagggauucaggcu

SEQ ID NO: 3609528 - RNA, 16 nt, Human
cuagggauucaggcug

SEQ ID NO: 3609529 - RNA, 16 nt, Human
cuagggccaagcccag

SEQ ID NO: 3609530 - RNA, 18 nt, Human
cuagggccaagcccagca

SEQ ID NO: 3609531 - RNA, 14 nt, Human
cuagggcugggaaa

SEQ ID NO: 3609532 - RNA, 13 nt, Human
cuaggggaaugag

SEQ ID NO: 3609533 - RNA, 19 nt, Human
cuaggggaaugagggggcu

SEQ ID NO: 3609534 - RNA, 17 nt, Human
cuaggggagcagggggc

SEQ ID NO: 3609535 - RNA, 19 nt, Human
cuaggguuaggagguccuu

SEQ ID NO: 3609536 - RNA, 19 nt, Human
cuaggguugcuggagccug

SEQ ID NO: 3609537 - RNA, 14 nt, Human
cuagguacgaugac

SEQ ID NO: 3609538 - RNA, 20 nt, Human
cuagguacgaugacaguguu

SEQ ID NO: 3609539 - RNA, 18 nt, Human
cuagguagaaaaaggguc

SEQ ID NO: 3609540 - RNA, 19 nt, Human
cuagguagaaaaaggguca

SEQ ID NO: 3609541 - RNA, 20 nt, Human
cuagguagcccccucuuccc

SEQ ID NO: 3609542 - RNA, 16 nt, Human
cuaggucaaggccugu

SEQ ID NO: 3609543 - RNA, 17 nt, Human
cuaggucagcuugcugc

SEQ ID NO: 3609544 - RNA, 12 nt, Human
cuaggucugaua

SEQ ID NO: 3609545 - RNA, 18 nt, Human
cuaggugcuauuugucau

SEQ ID NO: 3609546 - RNA, 15 nt, Human
cuagguggaaaagcc

SEQ ID NO: 3609547 - RNA, 19 nt, Human
cuagguggcaaggcugugc

SEQ ID NO: 3609548 - RNA, 23 nt, Human
cuaggugggccagccccucccac

SEQ ID NO: 3609549 - RNA, 18 nt, Human
cuagguggguugaaagcc

SEQ ID NO: 3609550 - RNA, 21 nt, Human
cuagguucccuguucuuccuc

SEQ ID NO: 3609551 - RNA, 14 nt, Human
cuagguuuaacuca

SEQ ID NO: 3609552 - RNA, 18 nt, Human
cuagguuuaacucagauc

SEQ ID NO: 3609553 - RNA, 20 nt, Human
cuagguuuaacucagaucac

SEQ ID NO: 3609554 - RNA, 22 nt, Human
cuaguaagaagacaaacugcuu

SEQ ID NO: 3609555 - RNA, 18 nt, Human
cuaguaagcaucuacuuc

SEQ ID NO: 3609556 - RNA, 16 nt, Human
cuaguaauaaagacuc

SEQ ID NO: 3609557 - RNA, 16 nt, Human
cuaguaauauauuuaa

SEQ ID NO: 3609558 - RNA, 20 nt, Human
cuaguaauauauuuaaaggg

SEQ ID NO: 3609559 - RNA, 22 nt, Human
cuaguacuguguacuguauaga

SEQ ID NO: 3609560 - RNA, 22 nt, Human
cuaguacuugggagaccuguaa

SEQ ID NO: 3609561 - RNA, 21 nt, Human
cuaguagggguaccacugaau

SEQ ID NO: 3609562 - RNA, 23 nt, Human
cuaguauuccagaccugaagaau

SEQ ID NO: 3609563 - RNA, 21 nt, Human
cuaguauuucaugcugggaau

SEQ ID NO: 3609564 - RNA, 18 nt, Human
cuaguauuugaauuaaaa

SEQ ID NO: 3609565 - RNA, 23 nt, Human
cuaguauuugaauuaaaacuucu

SEQ ID NO: 3609566 - RNA, 23 nt, Human
cuagucaagcuccuccucccugc

SEQ ID NO: 3609567 - RNA, 15 nt, Human
cuagucaaugacaug

SEQ ID NO: 3609568 - RNA, 17 nt, Human
cuagucaccccaaguag

SEQ ID NO: 3609569 - RNA, 13 nt, Human
cuagucagagaga

SEQ ID NO: 3609570 - RNA, 14 nt, Human
cuagucagccacau

SEQ ID NO: 3609571 - RNA, 13 nt, Human
cuagucauaaccu

SEQ ID NO: 3609572 - RNA, 14 nt, Human
cuagucauauauua

SEQ ID NO: 3609573 - RNA, 20 nt, Human
cuagucccuuccacaccccc

SEQ ID NO: 3609574 - RNA, 14 nt, Human
cuagucccuucccc

SEQ ID NO: 3609575 - RNA, 20 nt, Human
cuagucccuuccccucccug

SEQ ID NO: 3609576 - RNA, 21 nt, Human
cuagucccuuccccucccugg

SEQ ID NO: 3609577 - RNA, 14 nt, Human
cuaguccggaccca

SEQ ID NO: 3609578 - RNA, 21 nt, Human
cuaguccggacccaccucacc

SEQ ID NO: 3609579 - RNA, 23 nt, Human
cuaguccggacccaccucacccc

SEQ ID NO: 3609580 - RNA, 18 nt, Human
cuaguccuauucuauugc

SEQ ID NO: 3609581 - RNA, 19 nt, Human
cuagucuccuuugcacuga

SEQ ID NO: 3609582 - RNA, 20 nt, Human
cuagucuccuuugcacugag

SEQ ID NO: 3609583 - RNA, 12 nt, Human
cuagucucuccu

SEQ ID NO: 3609584 - RNA, 14 nt, Human
cuagucucucuggg

SEQ ID NO: 3609585 - RNA, 20 nt, Human
cuagucugugugggacugua

SEQ ID NO: 3609586 - RNA, 15 nt, Human
cuagucuuuugcuuu

SEQ ID NO: 3609587 - RNA, 16 nt, Human
cuagugacagcuugug

SEQ ID NO: 3609588 - RNA, 18 nt, Human
cuagugagcugggcaugg

SEQ ID NO: 3609589 - RNA, 17 nt, Human
cuagugauuucuggggc

SEQ ID NO: 3609590 - RNA, 16 nt, Human
cuagugcagcugaaau

SEQ ID NO: 3609591 - RNA, 14 nt, Human
cuagugcagcugau

SEQ ID NO: 3609592 - RNA, 19 nt, Human
cuagugcagcugauuuuaa

SEQ ID NO: 3609593 - RNA, 17 nt, Human
cuagugccuucuaaagg

SEQ ID NO: 3609594 - RNA, 16 nt, Human
cuagugcugaagcuua

SEQ ID NO: 3609595 - RNA, 17 nt, Human
cuagugcugaagcuuau

SEQ ID NO: 3609596 - RNA, 16 nt, Human
cuaguggcuguccagu

SEQ ID NO: 3609597 - RNA, 14 nt, Human
cuaguggcuugucc

SEQ ID NO: 3609598 - RNA, 13 nt, Human
cuagugggacagc

SEQ ID NO: 3609599 - RNA, 18 nt, Human
cuagugggacagcccaga

SEQ ID NO: 3609600 - RNA, 18 nt, Human
cuaguggggucucccucu

SEQ ID NO: 3609601 - RNA, 22 nt, Human
cuaguggggucucccucuccug

SEQ ID NO: 3609602 - RNA, 15 nt, Human
cuaguggucuuugua

SEQ ID NO: 3609603 - RNA, 16 nt, Human
cuaguggucuuuguaa

SEQ ID NO: 3609604 - RNA, 12 nt, Human
cuagugguggcu

SEQ ID NO: 3609605 - RNA, 19 nt, Human
cuagugguggcucugagaa

SEQ ID NO: 3609606 - RNA, 20 nt, Human
cuaguguagaauugugcaac

SEQ ID NO: 3609607 - RNA, 23 nt, Human
cuagugugguguuuccuggcacu

SEQ ID NO: 3609608 - RNA, 23 nt, Human
cuaguguucugucuaaaaaccag

SEQ ID NO: 3609609 - RNA, 23 nt, Human
cuaguuaccacauuacucugccu

SEQ ID NO: 3609610 - RNA, 22 nt, Human
cuaguuauuuacaggaacuuca

SEQ ID NO: 3609611 - RNA, 16 nt, Human
cuaguuauuuauucug

SEQ ID NO: 3609612 - RNA, 12 nt, Human
cuaguucacucu

SEQ ID NO: 3609613 - RNA, 24 nt, Human
cuaguucauccaauccucacuggg

SEQ ID NO: 3609614 - RNA, 18 nt, Human
cuaguucaucccuucucu

SEQ ID NO: 3609615 - RNA, 20 nt, Human
cuaguucaucccuucucuuc

SEQ ID NO: 3609616 - RNA, 22 nt, Human
cuaguuccaccaucaagccacc

SEQ ID NO: 3609617 - RNA, 20 nt, Human
cuaguucccucugcucagcc

SEQ ID NO: 3609618 - RNA, 21 nt, Human
cuaguucccucugcucagcca

SEQ ID NO: 3609619 - RNA, 15 nt, Human
cuaguuccuucaugu

SEQ ID NO: 3609620 - RNA, 16 nt, Human
cuaguucuagaaaaac

SEQ ID NO: 3609621 - RNA, 23 nt, Human
cuaguucuagaaaaacaggcacu

SEQ ID NO: 3609622 - RNA, 13 nt, Human
cuaguucugccag

SEQ ID NO: 3609623 - RNA, 14 nt, Human
cuaguucugccagg

SEQ ID NO: 3609624 - RNA, 15 nt, Human
cuaguucugccagga

SEQ ID NO: 3609625 - RNA, 23 nt, Human
cuaguucuguagaaaugguugua

SEQ ID NO: 3609626 - RNA, 17 nt, Human
cuaguugaauacuugaa

SEQ ID NO: 3609627 - RNA, 23 nt, Human
cuaguugaauacuugaaccauaa

SEQ ID NO: 3609628 - RNA, 22 nt, Human
cuaguuugaccucacagugacc

SEQ ID NO: 3609629 - RNA, 21 nt, Human
cuaguuugauuaaauucuugc

SEQ ID NO: 3609630 - RNA, 22 nt, Human
cuaguuugauuaaauucuugca

SEQ ID NO: 3609631 - RNA, 18 nt, Human
cuaguuugugagaaacau

SEQ ID NO: 3609632 - RNA, 20 nt, Human
cuaguuuucaguuuguauau

SEQ ID NO: 3609633 - RNA, 14 nt, Human
cuaguuuuuaguaa

SEQ ID NO: 3609634 - RNA, 19 nt, Human
cuaguuuuuucuuccuuuu

SEQ ID NO: 3609635 - RNA, 15 nt, Human
cuauaaaaaauaugu

SEQ ID NO: 3609636 - RNA, 13 nt, Human
cuauaaaacucug

SEQ ID NO: 3609637 - RNA, 12 nt, Human
cuauaaaagcuu

SEQ ID NO: 3609638 - RNA, 19 nt, Human
cuauaaaagcuuucugcca

SEQ ID NO: 3609639 - RNA, 16 nt, Human
cuauaaaauguaucaa

SEQ ID NO: 3609640 - RNA, 16 nt, Human
cuauaaaaugucuuca

SEQ ID NO: 3609641 - RNA, 14 nt, Human
cuauaaagcauuua

SEQ ID NO: 3609642 - RNA, 17 nt, Human
cuauaaauuccucuuug

SEQ ID NO: 3609643 - RNA, 22 nt, Human
cuauaaauuccucuuugcuuug

SEQ ID NO: 3609644 - RNA, 18 nt, Human
cuauaacaaaggauacuu

SEQ ID NO: 3609645 - RNA, 13 nt, Human
cuauaacacugug

SEQ ID NO: 3609646 - RNA, 17 nt, Human
cuauaaccaaaugaaau

SEQ ID NO: 3609647 - RNA, 19 nt, Human
cuauaaccaaaugaaauau

SEQ ID NO: 3609648 - RNA, 22 nt, Human
cuauaaccccagcucccuagga

SEQ ID NO: 3609649 - RNA, 22 nt, Human
cuauaacuugaugcaugugguu

SEQ ID NO: 3609650 - RNA, 23 nt, Human
cuauaagauuccaaaaagcacau

SEQ ID NO: 3609651 - RNA, 21 nt, Human
cuauaagcaaauugcuuuuuu

SEQ ID NO: 3609652 - RNA, 17 nt, Human
cuauaagccaaaauuaa

SEQ ID NO: 3609653 - RNA, 17 nt, Human
cuauaauaccagcuacu

SEQ ID NO: 3609654 - RNA, 13 nt, Human
cuauaaucuguca

SEQ ID NO: 3609655 - RNA, 22 nt, Human
cuauaaucugucaaaacacugu

SEQ ID NO: 3609656 - RNA, 21 nt, Human
cuauaauguaagcucuacuga

SEQ ID NO: 3609657 - RNA, 14 nt, Human
cuauaaugugaaau

SEQ ID NO: 3609658 - RNA, 17 nt, Human
cuauaaugugaaaugua

SEQ ID NO: 3609659 - RNA, 21 nt, Human
cuauaaugugaaauguaacug

SEQ ID NO: 3609660 - RNA, 18 nt, Human
cuauaauuauuauucaga

SEQ ID NO: 3609661 - RNA, 13 nt, Human
cuauaauuuaaau

SEQ ID NO: 3609662 - RNA, 19 nt, Human
cuauaauuuccauuuacuu

SEQ ID NO: 3609663 - RNA, 23 nt, Human
cuauaauuuugauagugggacca

SEQ ID NO: 3609664 - RNA, 15 nt, Human
cuaccgacccagggu

SEQ ID NO: 3609665 - RNA, 17 nt, Human
cuaccgagucucuucuc

SEQ ID NO: 3609666 - RNA, 22 nt, Human
cuaccgagucucuucuccacug

SEQ ID NO: 3609667 - RNA, 14 nt, Human
cuaccuaacccaga

SEQ ID NO: 3609668 - RNA, 15 nt, Human
cuaccucagccuaga

SEQ ID NO: 3609669 - RNA, 17 nt, Human
cuaccucagguugcugg

SEQ ID NO: 3609670 - RNA, 22 nt, Human
cuaccuccaaagcuucccacgg

SEQ ID NO: 3609671 - RNA, 13 nt, Human
cuaccucccuccc

SEQ ID NO: 3609672 - RNA, 15 nt, Human
cuaccuccucuccug

SEQ ID NO: 3609673 - RNA, 18 nt, Human
cuaccucgcaucauugca

SEQ ID NO: 3609674 - RNA, 16 nt, Human
cuaccucucugucccu

SEQ ID NO: 3609675 - RNA, 19 nt, Human
cuaccugacacucccuugg

SEQ ID NO: 3609676 - RNA, 19 nt, Human
cuaccugccacucacacag

SEQ ID NO: 3609677 - RNA, 20 nt, Human
cuaccuguauuuaaaaauag

SEQ ID NO: 3609678 - RNA, 21 nt, Human
cuaccuguauuuaaaaauaga

SEQ ID NO: 3609679 - RNA, 13 nt, Human
cuaccugugccug

SEQ ID NO: 3609680 - RNA, 18 nt, Human
cuaccugugugguacucu

SEQ ID NO: 3609681 - RNA, 21 nt, Human
cuaccuguucagugucccggg

SEQ ID NO: 3609682 - RNA, 22 nt, Human
cuaccuguucagugucccgggc

SEQ ID NO: 3609683 - RNA, 21 nt, Human
cuaccuguugagcaucacaga

SEQ ID NO: 3609684 - RNA, 19 nt, Human
cuaccuuaaaauguaaaac

SEQ ID NO: 3609685 - RNA, 19 nt, Human
cuaccuuccagucaggaug

SEQ ID NO: 3609686 - RNA, 21 nt, Human
cuaccuucuccccagcuccca

SEQ ID NO: 3609687 - RNA, 19 nt, Human
cuaccuugaaaauaagaau

SEQ ID NO: 3609688 - RNA, 17 nt, Human
cuaccuugcuuuugcuu

SEQ ID NO: 3609689 - RNA, 16 nt, Human
cuaccuugggggaacc

SEQ ID NO: 3609690 - RNA, 20 nt, Human
cuaccuuuggcuuaauucca

SEQ ID NO: 3609691 - RNA, 13 nt, Human
cuaugaaggcugu

SEQ ID NO: 3609692 - RNA, 15 nt, Human
cuaugaaugcuuugc

SEQ ID NO: 3609693 - RNA, 15 nt, Human
cuaugacugcucccc

SEQ ID NO: 3609694 - RNA, 18 nt, Human
cuaugagcauccugagcc

SEQ ID NO: 3609695 - RNA, 13 nt, Human
cuaugagggccuu

SEQ ID NO: 3609696 - RNA, 13 nt, Human
cuaugagucuaga

SEQ ID NO: 3609697 - RNA, 16 nt, Human
cuaugagucuagaugu

SEQ ID NO: 3609698 - RNA, 17 nt, Human
cuaugagucuagauguu

SEQ ID NO: 3609699 - RNA, 16 nt, Human
cuaugaguggaaaaag

SEQ ID NO: 3609700 - RNA, 17 nt, Human
cuaugaucucagguucu

SEQ ID NO: 3609701 - RNA, 20 nt, Human
cuaugauguauacugccacu

SEQ ID NO: 3609702 - RNA, 19 nt, Human
cuaugaugugaaacacuuu

SEQ ID NO: 3609703 - RNA, 20 nt, Human
cuaugauguuaguuuuccuu

SEQ ID NO: 3609704 - RNA, 14 nt, Human
cuaugauuauuaac

SEQ ID NO: 3609705 - RNA, 15 nt, Human
cuaugauuuggaaaa

SEQ ID NO: 3609706 - RNA, 13 nt, Human
cuaugcacauaug

SEQ ID NO: 3609707 - RNA, 21 nt, Human
cuaugcacauauggacucugc

SEQ ID NO: 3609708 - RNA, 22 nt, Human
cuaugcauggugccccaggacc

SEQ ID NO: 3609709 - RNA, 18 nt, Human
cuaugcaugguuucagca

SEQ ID NO: 3609710 - RNA, 19 nt, Human
cuaugcaugguuucagcac

SEQ ID NO: 3609711 - RNA, 23 nt, Human
cuaugcaugguuucagcacuagc

SEQ ID NO: 3609712 - RNA, 21 nt, Human
cuaugcauuugaaaauuuuga

SEQ ID NO: 3609713 - RNA, 17 nt, Human
cuaugccaaagaucacu

SEQ ID NO: 3609714 - RNA, 17 nt, Human
cuaugccccaaauauag

SEQ ID NO: 3609715 - RNA, 15 nt, Human
cuaugccucucuaca

SEQ ID NO: 3609716 - RNA, 14 nt, Human
cuaugccugugucu

SEQ ID NO: 3609717 - RNA, 13 nt, Human
cuaugcguuuuua

SEQ ID NO: 3609718 - RNA, 17 nt, Human
cuaugcuauugacaaua

SEQ ID NO: 3609719 - RNA, 22 nt, Human
cuaugcucaggggcccuggagc

SEQ ID NO: 3609720 - RNA, 13 nt, Human
cuaugcugaguuu

SEQ ID NO: 3609721 - RNA, 14 nt, Human
cuaugcugaguuug

SEQ ID NO: 3609722 - RNA, 14 nt, Human
cuaugcugccuagg

SEQ ID NO: 3609723 - RNA, 20 nt, Human
cuaugcugcuuuuauaucug

SEQ ID NO: 3609724 - RNA, 14 nt, Human
cuaugcuguaucug

SEQ ID NO: 3609725 - RNA, 13 nt, Human
cuaugcuguuugu

SEQ ID NO: 3609726 - RNA, 17 nt, Human
cuaugcuuuccaaaccu

SEQ ID NO: 3609727 - RNA, 19 nt, Human
cuaugcuuugaaacagaaa

SEQ ID NO: 3609728 - RNA, 15 nt, Human
cuauggaaagauggc

SEQ ID NO: 3609729 - RNA, 15 nt, Human
cuauggagagcccug

SEQ ID NO: 3609730 - RNA, 16 nt, Human
cuauggagagcccugg

SEQ ID NO: 3609731 - RNA, 23 nt, Human
cuauggagccuggcacaggacug

SEQ ID NO: 3609732 - RNA, 19 nt, Human
cuauggagugcaccaaaga

SEQ ID NO: 3609733 - RNA, 11 nt, Human
cuauggaugug

SEQ ID NO: 3609734 - RNA, 20 nt, Human
cuauggauuuucuaaggaag

SEQ ID NO: 3609735 - RNA, 14 nt, Human
cuauggcagaaaaa

SEQ ID NO: 3609736 - RNA, 13 nt, Human
cuaugggaacaau

SEQ ID NO: 3609737 - RNA, 18 nt, Human
cuaugggacucaaugcac

SEQ ID NO: 3609738 - RNA, 21 nt, Human
cuaugggagagugucaaccag

SEQ ID NO: 3609739 - RNA, 14 nt, Human
cuaugggagcccca

SEQ ID NO: 3609740 - RNA, 23 nt, Human
cuaugggccugccgggcugaggg

SEQ ID NO: 3609741 - RNA, 17 nt, Human
cuauggggagaaaagac

SEQ ID NO: 3609742 - RNA, 19 nt, Human
cuauggggauagaugugug

SEQ ID NO: 3609743 - RNA, 20 nt, Human
cuauggggauagaugugugg

SEQ ID NO: 3609744 - RNA, 21 nt, Human
cuauggggauagaugugugga

SEQ ID NO: 3609745 - RNA, 22 nt, Human
cuaugggguaaaagggguaggg

SEQ ID NO: 3609746 - RNA, 22 nt, Human
cuauggguaucaaacagcucag

SEQ ID NO: 3609747 - RNA, 13 nt, Human
cuaugguaaagau

SEQ ID NO: 3609748 - RNA, 11 nt, Human
cuauggucuua

SEQ ID NO: 3609749 - RNA, 22 nt, Human
cuauggucuuauauuuacaaca

SEQ ID NO: 3609750 - RNA, 19 nt, Human
cuauggugagaugcagcug

SEQ ID NO: 3609751 - RNA, 15 nt, Human
cuauggugccaaugg

SEQ ID NO: 3609752 - RNA, 14 nt, Human
cuauggugcucugu

SEQ ID NO: 3609753 - RNA, 14 nt, Human
cuaugguuaugaaa

SEQ ID NO: 3609754 - RNA, 18 nt, Human
cuauguacaauauuuuaa

SEQ ID NO: 3609755 - RNA, 22 nt, Human
cuauguacaauauuuuaagcau

SEQ ID NO: 3609756 - RNA, 20 nt, Human
cuauguacuaguacugugua

SEQ ID NO: 3609757 - RNA, 23 nt, Human
cuauguacuaguacuguguacug

SEQ ID NO: 3609758 - RNA, 22 nt, Human
cuauguaggaaagaccauuuuu

SEQ ID NO: 3609759 - RNA, 23 nt, Human
cuauguaggaaagaccauuuuuc

SEQ ID NO: 3609760 - RNA, 17 nt, Human
cuauguauaaaauacau

SEQ ID NO: 3609761 - RNA, 16 nt, Human
cuauguaucaaaugua

SEQ ID NO: 3609762 - RNA, 13 nt, Human
cuauguaucaaug

SEQ ID NO: 3609763 - RNA, 14 nt, Human
cuauguauggaaua

SEQ ID NO: 3609764 - RNA, 13 nt, Human
cuaugucauuuca

SEQ ID NO: 3609765 - RNA, 18 nt, Human
cuaugucauuucauuucc

SEQ ID NO: 3609766 - RNA, 18 nt, Human
cuauguccuaaggacaca

SEQ ID NO: 3609767 - RNA, 21 nt, Human
cuauguccuaaggacacacua

SEQ ID NO: 3609768 - RNA, 16 nt, Human
cuauguccuaauaaua

SEQ ID NO: 3609769 - RNA, 12 nt, Human
cuaugugacaau

SEQ ID NO: 3609770 - RNA, 17 nt, Human
cuaugugagcacaaagg

SEQ ID NO: 3609771 - RNA, 16 nt, Human
cuaugugauuuuaacu

SEQ ID NO: 3609772 - RNA, 17 nt, Human
cuaugugccuuauguug

SEQ ID NO: 3609773 - RNA, 17 nt, Human
cuauguguuuuucucau

SEQ ID NO: 3609774 - RNA, 13 nt, Human
cuauguuaauauu

SEQ ID NO: 3609775 - RNA, 17 nt, Human
cuauguuaauauuuuag

SEQ ID NO: 3609776 - RNA, 22 nt, Human
cuauguugauccauccagcuug

SEQ ID NO: 3609777 - RNA, 15 nt, Human
cuauguugcccaggc

SEQ ID NO: 3609778 - RNA, 17 nt, Human
cuauguugcccaggcag

SEQ ID NO: 3609779 - RNA, 19 nt, Human
cuauguugcccaggcaggu

SEQ ID NO: 3609780 - RNA, 21 nt, Human
cuauguugcccaggcaggucu

SEQ ID NO: 3609781 - RNA, 18 nt, Human
cuauguuuugacauuuuu

SEQ ID NO: 3609782 - RNA, 20 nt, Human
cuauguuuuuguucaaagcc

SEQ ID NO: 3609783 - RNA, 13 nt, Human
cuauuaaaaaagu

SEQ ID NO: 3609784 - RNA, 16 nt, Human
cuauuaaaagacucau

SEQ ID NO: 3609785 - RNA, 18 nt, Human
cuauuaaaagacucaucc

SEQ ID NO: 3609786 - RNA, 19 nt, Human
cuauuaaaagacucauccg

SEQ ID NO: 3609787 - RNA, 19 nt, Human
cuauuaaagugcuaagguu

SEQ ID NO: 3609788 - RNA, 22 nt, Human
cuauuaaagugcuaagguucua

SEQ ID NO: 3609789 - RNA, 23 nt, Human
cuauuaaaguggagaagcacacu

SEQ ID NO: 3609790 - RNA, 21 nt, Human
cuauuaacaauuaauugucuu

SEQ ID NO: 3609791 - RNA, 23 nt, Human
cuauuaagaggcagaaaauugca

SEQ ID NO: 3609792 - RNA, 23 nt, Human
cuauuaaggugauauauuuaaaa

SEQ ID NO: 3609793 - RNA, 11 nt, Human
cuauuaauaua

SEQ ID NO: 3609794 - RNA, 12 nt, Human
cuauuaauauau

SEQ ID NO: 3609795 - RNA, 15 nt, Human
cuauuaauauaugua

SEQ ID NO: 3609796 - RNA, 22 nt, Human
cuauuacgaaguucaagaucaa

SEQ ID NO: 3609797 - RNA, 22 nt, Human
cuauuagacuuuagaaauaaau

SEQ ID NO: 3609798 - RNA, 15 nt, Human
cuauuagagaagaga

SEQ ID NO: 3609799 - RNA, 21 nt, Human
cuauuagcuuacugauuaacu

SEQ ID NO: 3609800 - RNA, 15 nt, Human
cuauuaguguuauau

SEQ ID NO: 3609801 - RNA, 16 nt, Human
cuauuaguguuauaug

SEQ ID NO: 3609802 - RNA, 16 nt, Human
cuauuauaauuuaaug

SEQ ID NO: 3609803 - RNA, 16 nt, Human
cuauuauccccauuuc

SEQ ID NO: 3609804 - RNA, 17 nt, Human
cuauuauccccauuucu

SEQ ID NO: 3609805 - RNA, 21 nt, Human
cuauuaugaaugugaagccuu

SEQ ID NO: 3609806 - RNA, 20 nt, Human
cuauuauguuguuagagaaa

SEQ ID NO: 3609807 - RNA, 18 nt, Human
cuauucaaacagucucag

SEQ ID NO: 3609808 - RNA, 12 nt, Human
caggugcagugg

SEQ ID NO: 3609809 - RNA, 18 nt, Human
caggugccagccugaggc

SEQ ID NO: 3609810 - RNA, 19 nt, Human
caggugccaguuauggcua

SEQ ID NO: 3609811 - RNA, 20 nt, Human
caggugcccaucccuggaag

SEQ ID NO: 3609812 - RNA, 18 nt, Human
caggugccccucucucca

SEQ ID NO: 3609813 - RNA, 14 nt, Human
caggugcccgccac

SEQ ID NO: 3609814 - RNA, 18 nt, Human
caggugcccgccaccaca

SEQ ID NO: 3609815 - RNA, 19 nt, Human
caggugccuccaggugugc

SEQ ID NO: 3609816 - RNA, 21 nt, Human
caggugccuccaggugugcac

SEQ ID NO: 3609817 - RNA, 12 nt, Human
caggugccugga

SEQ ID NO: 3609818 - RNA, 15 nt, Human
caggugccuuucaaa

SEQ ID NO: 3609819 - RNA, 21 nt, Human
caggugccuuucaaauuuaga

SEQ ID NO: 3609820 - RNA, 14 nt, Human
caggugcgaaagga

SEQ ID NO: 3609821 - RNA, 20 nt, Human
caggugcuaggaacacuccu

SEQ ID NO: 3609822 - RNA, 18 nt, Human
caggugcuauuguuacuc

SEQ ID NO: 3609823 - RNA, 20 nt, Human
caggugcuauuguuacucuu

SEQ ID NO: 3609824 - RNA, 17 nt, Human
caggugcucaaaaugca

SEQ ID NO: 3609825 - RNA, 14 nt, Human
caggugcuccccug

SEQ ID NO: 3609826 - RNA, 20 nt, Human
caggugcugacuucaucucc

SEQ ID NO: 3609827 - RNA, 21 nt, Human
caggugcugacuucaucuccc

SEQ ID NO: 3609828 - RNA, 23 nt, Human
caggugcugacuucaucucccac

SEQ ID NO: 3609829 - RNA, 20 nt, Human
caggugcugcuacccucccu

SEQ ID NO: 3609830 - RNA, 17 nt, Human
caggugcuggggccugg

SEQ ID NO: 3609831 - RNA, 18 nt, Human
caggugcuggggccuggu

SEQ ID NO: 3609832 - RNA, 13 nt, Human
caggugcugucca

SEQ ID NO: 3609833 - RNA, 14 nt, Human
caggugcuguccau

SEQ ID NO: 3609834 - RNA, 19 nt, Human
cagguggaaggcagacagc

SEQ ID NO: 3609835 - RNA, 21 nt, Human
ccggccucuccagccucagcc

SEQ ID NO: 3609836 - RNA, 12 nt, Human
ccggccucucug

SEQ ID NO: 3609837 - RNA, 13 nt, Human
ccggccucucugg

SEQ ID NO: 3609838 - RNA, 21 nt, Human
ccggccucucuggccucccac

SEQ ID NO: 3609839 - RNA, 22 nt, Human
ccggccucucuggccucccacc

SEQ ID NO: 3609840 - RNA, 14 nt, Human
ccggcgcccucugu

SEQ ID NO: 3609841 - RNA, 17 nt, Human
ccggcgcccucuguccu

SEQ ID NO: 3609842 - RNA, 19 nt, Human
ccggcgcccucuguccuga

SEQ ID NO: 3609843 - RNA, 21 nt, Human
ccggcgcccucuguccugacu

SEQ ID NO: 3609844 - RNA, 19 nt, Human
ccggcgucagccuccagcc

SEQ ID NO: 3609845 - RNA, 21 nt, Human
ccggcuaagcaggcgcaaggg

SEQ ID NO: 3609846 - RNA, 19 nt, Human
ccggcuaauuuuuguauuu

SEQ ID NO: 3609847 - RNA, 17 nt, Human
ccggcuaugggggcacu

SEQ ID NO: 3609848 - RNA, 12 nt, Human
ccggcuccaggc

SEQ ID NO: 3609849 - RNA, 13 nt, Human
ccggcucccagcc

SEQ ID NO: 3609850 - RNA, 15 nt, Human
ccggcuccuggucac

SEQ ID NO: 3609851 - RNA, 17 nt, Human
ccggcucucaccuggcc

SEQ ID NO: 3609852 - RNA, 15 nt, Human
ccggcucugugggug

SEQ ID NO: 3609853 - RNA, 18 nt, Human
ccggcugcauacccgggc

SEQ ID NO: 3609854 - RNA, 22 nt, Human
ccggcugcauacccgggcaggg

SEQ ID NO: 3609855 - RNA, 15 nt, Human
ccggcuggccuggcc

SEQ ID NO: 3609856 - RNA, 17 nt, Human
ccggcugugcugggaga

SEQ ID NO: 3609857 - RNA, 19 nt, Human
ccggcuuccuuucccaagc

SEQ ID NO: 3609858 - RNA, 16 nt, Human
ccggcuuuguggcacu

SEQ ID NO: 3609859 - RNA, 22 nt, Human
ccgggaaccuccccagccugcg

SEQ ID NO: 3609860 - RNA, 21 nt, Human
ccgggaagugagggcucacuc

SEQ ID NO: 3609861 - RNA, 19 nt, Human
ccgggacaccuaggcuagg

SEQ ID NO: 3609862 - RNA, 20 nt, Human
ccgggaccacccugagccgg

SEQ ID NO: 3609863 - RNA, 14 nt, Human
ccgggaccccgagc

SEQ ID NO: 3609864 - RNA, 18 nt, Human
ccgggaccccgagccugg

SEQ ID NO: 3609865 - RNA, 19 nt, Human
ccgggacucacuggcagcc

SEQ ID NO: 3609866 - RNA, 12 nt, Human
ccgggacucugc

SEQ ID NO: 3609867 - RNA, 19 nt, Human
ccgggagccuaggaccacu

SEQ ID NO: 3609868 - RNA, 16 nt, Human
ccgggagccugaucac

SEQ ID NO: 3609869 - RNA, 13 nt, Human
ccgggagcucagg

SEQ ID NO: 3609870 - RNA, 16 nt, Human
ccgggaggggcccgcu

SEQ ID NO: 3609871 - RNA, 22 nt, Human
ccgggagggugcggcugugcag

SEQ ID NO: 3609872 - RNA, 18 nt, Human
ccgggcaaaugccagggc

SEQ ID NO: 3609873 - RNA, 19 nt, Human
ccgggcaaaugccagggcc

SEQ ID NO: 3609874 - RNA, 17 nt, Human
ccgggcacagcuguggu

SEQ ID NO: 3609875 - RNA, 20 nt, Human
ccgggcacucagaagacacu

SEQ ID NO: 3609876 - RNA, 15 nt, Human
ccgggcagaggggca

SEQ ID NO: 3609877 - RNA, 20 nt, Human
ccgggccacuccuuccugcc

SEQ ID NO: 3609878 - RNA, 10 nt, Human
ccgggcccag

SEQ ID NO: 3609879 - RNA, 20 nt, Human
ccgggcccagaggagcuggg

SEQ ID NO: 3609880 - RNA, 19 nt, Human
ccgggccccugggcuuggc

SEQ ID NO: 3609881 - RNA, 18 nt, Human
ccgggcccucccuuggaa

SEQ ID NO: 3609882 - RNA, 23 nt, Human
ccgggccgaauccccucccuguc

SEQ ID NO: 3609883 - RNA, 19 nt, Human
ccgggccuggagaacuaga

SEQ ID NO: 3609884 - RNA, 14 nt, Human
ccgggccuguacag

SEQ ID NO: 3609885 - RNA, 17 nt, Human
ccgggcgcggccagccc

SEQ ID NO: 3609886 - RNA, 20 nt, Human
ccgggcucagggaccacagc

SEQ ID NO: 3609887 - RNA, 13 nt, Human
ccgggcucucugc

SEQ ID NO: 3609888 - RNA, 16 nt, Human
ccgggcucucugcugu

SEQ ID NO: 3609889 - RNA, 14 nt, Human
ccgggcucugccuc

SEQ ID NO: 3609890 - RNA, 18 nt, Human
ccgggcucugccucccau

SEQ ID NO: 3609891 - RNA, 22 nt, Human
ccgggcucugccucccaucacc

SEQ ID NO: 3609892 - RNA, 12 nt, Human
ccgggcugccug

SEQ ID NO: 3609893 - RNA, 18 nt, Human
ccgggcugccugggcugu

SEQ ID NO: 3609894 - RNA, 20 nt, Human
ccggggaacuggccaagcug

SEQ ID NO: 3609895 - RNA, 15 nt, Human
ccggggacccuguga

SEQ ID NO: 3609896 - RNA, 23 nt, Human
ccggggaggagagagcagcuucu

SEQ ID NO: 3609897 - RNA, 15 nt, Human
ccggggaggggcgcu

SEQ ID NO: 3609898 - RNA, 22 nt, Human
ccggggaguuucuuuccugccu

SEQ ID NO: 3609899 - RNA, 19 nt, Human
ccggggcagcagcagcccu

SEQ ID NO: 3609900 - RNA, 15 nt, Human
ccggggccagcacuu

SEQ ID NO: 3609901 - RNA, 13 nt, Human
ccggggcuggguu

SEQ ID NO: 3609902 - RNA, 16 nt, Human
ccggggggucucuucu

SEQ ID NO: 3609903 - RNA, 21 nt, Human
ccggggugggguggcugcagc

SEQ ID NO: 3609904 - RNA, 14 nt, Human
ccgggucugccucu

SEQ ID NO: 3609905 - RNA, 14 nt, Human
ccgggugggcggca

SEQ ID NO: 3609906 - RNA, 22 nt, Human
ccggguguccccaacagcgccc

SEQ ID NO: 3609907 - RNA, 23 nt, Human
ccggguguccccaacagcgccca

SEQ ID NO: 3609908 - RNA, 12 nt, Human
ccggguuccagc

SEQ ID NO: 3609909 - RNA, 15 nt, Human
ccggguuccagcacc

SEQ ID NO: 3609910 - RNA, 19 nt, Human
ccggguuuggcgggccaag

SEQ ID NO: 3609911 - RNA, 18 nt, Human
ccgguaacuguccugucc

SEQ ID NO: 3609912 - RNA, 21 nt, Human
ccgguaacuguccuguccugc

SEQ ID NO: 3609913 - RNA, 23 nt, Human
ccggucaggcacacaaggggccc

SEQ ID NO: 3609914 - RNA, 20 nt, Human
ccggucccaccccucccucu

SEQ ID NO: 3609915 - RNA, 18 nt, Human
ccggucccuugagaccuc

SEQ ID NO: 3609916 - RNA, 18 nt, Human
ccggucgcccuuugcugc

SEQ ID NO: 3609917 - RNA, 20 nt, Human
ccggucugcaagucagagga

SEQ ID NO: 3609918 - RNA, 21 nt, Human
ccggucugcaagucagaggau

SEQ ID NO: 3609919 - RNA, 15 nt, Human
ccgguggaaggccuu

SEQ ID NO: 3609920 - RNA, 18 nt, Human
ccgguggcggccccagca

SEQ ID NO: 3609921 - RNA, 14 nt, Human
ccgguggcugggca

SEQ ID NO: 3609922 - RNA, 22 nt, Human
ccggugggacccccguggggca

SEQ ID NO: 3609923 - RNA, 16 nt, Human
ccggugggggggcaga

SEQ ID NO: 3609924 - RNA, 21 nt, Human
ccggugggggggcagagcccu

SEQ ID NO: 3609925 - RNA, 11 nt, Human
ccgguguccuu

SEQ ID NO: 3609926 - RNA, 15 nt, Human
ccggugugccugcag

SEQ ID NO: 3609927 - RNA, 17 nt, Human
ccggugugccugcagcc

SEQ ID NO: 3609928 - RNA, 12 nt, Human
ccgguguucuaa

SEQ ID NO: 3609929 - RNA, 17 nt, Human
ccgguuccugucccugc

SEQ ID NO: 3609930 - RNA, 19 nt, Human
ccgguuccugucccugcgc

SEQ ID NO: 3609931 - RNA, 20 nt, Human
ccgguucuuccagugguuug

SEQ ID NO: 3609932 - RNA, 20 nt, Human
ccgguuucgaaguugaugca

SEQ ID NO: 3609933 - RNA, 15 nt, Human
ccgguuucuuuuuaa

SEQ ID NO: 3609934 - RNA, 16 nt, Human
ccguaaaaacugaagu

SEQ ID NO: 3609935 - RNA, 18 nt, Human
ccguaaagugagcaugcu

SEQ ID NO: 3609936 - RNA, 23 nt, Human
ccguaaagugagcaugcuuucug

SEQ ID NO: 3609937 - RNA, 15 nt, Human
ccguaacccaacucu

SEQ ID NO: 3609938 - RNA, 20 nt, Human
ccguaauaacacccuuccuu

SEQ ID NO: 3609939 - RNA, 17 nt, Human
ccguaauaauuauuauu

SEQ ID NO: 3609940 - RNA, 13 nt, Human
ccguaauuuaacu

SEQ ID NO: 3609941 - RNA, 18 nt, Human
ccguacauucaauguuua

SEQ ID NO: 3609942 - RNA, 18 nt, Human
ccguagaaaucccccuuu

SEQ ID NO: 3609943 - RNA, 17 nt, Human
ccguaggacccaagcag

SEQ ID NO: 3609944 - RNA, 22 nt, Human
ccguaguagauguucuacuuug

SEQ ID NO: 3609945 - RNA, 22 nt, Human
ccguaguaucagagauguccau

SEQ ID NO: 3609946 - RNA, 14 nt, Human
ccguaguucccuga

SEQ ID NO: 3609947 - RNA, 15 nt, Human
ccguaguucccugaa

SEQ ID NO: 3609948 - RNA, 16 nt, Human
ccguaguucccugaaa

SEQ ID NO: 3609949 - RNA, 22 nt, Human
ccguaguucccugaaaacccag

SEQ ID NO: 3609950 - RNA, 20 nt, Human
ccguaucuccggcucccagc

SEQ ID NO: 3609951 - RNA, 22 nt, Human
ccgucaccaccaccccuaccac

SEQ ID NO: 3609952 - RNA, 19 nt, Human
ccgucaccacgacuggcca

SEQ ID NO: 3609953 - RNA, 20 nt, Human
ccgucaccacgacuggccag

SEQ ID NO: 3609954 - RNA, 17 nt, Human
ccgucagccaaauguaa

SEQ ID NO: 3609955 - RNA, 16 nt, Human
ccgucauguuccucaa

SEQ ID NO: 3609956 - RNA, 14 nt, Human
ccguccagaccuug

SEQ ID NO: 3609957 - RNA, 21 nt, Human
ccguccauaucagaacugugc

SEQ ID NO: 3609958 - RNA, 14 nt, Human
ccgucccccucugg

SEQ ID NO: 3609959 - RNA, 15 nt, Human
ccguccccuagaguc

SEQ ID NO: 3609960 - RNA, 15 nt, Human
ccguccccucccagg

SEQ ID NO: 3609961 - RNA, 13 nt, Human
ccguccgcccugc

SEQ ID NO: 3609962 - RNA, 14 nt, Human
ccguccgcccugcu

SEQ ID NO: 3609963 - RNA, 19 nt, Human
ccguccucaccccuguccu

SEQ ID NO: 3609964 - RNA, 24 nt, Human
ccguccucaccccuguccucacug

SEQ ID NO: 3609965 - RNA, 19 nt, Human
ccguccucccgggcccucc

SEQ ID NO: 3609966 - RNA, 15 nt, Human
ccguccugccugugg

SEQ ID NO: 3609967 - RNA, 22 nt, Human
ccgucgaggggcucucagcuca

SEQ ID NO: 3609968 - RNA, 11 nt, Human
ccgucuacauu

SEQ ID NO: 3609969 - RNA, 17 nt, Human
ccgucuaccugaggggc

SEQ ID NO: 3609970 - RNA, 19 nt, Human
ccgucuaguuaacauuuca

SEQ ID NO: 3609971 - RNA, 21 nt, Human
ccgucucaguguugagccuuu

SEQ ID NO: 3609972 - RNA, 15 nt, Human
ccgucuccagcugcu

SEQ ID NO: 3609973 - RNA, 20 nt, Human
ccgucuccaggggcugcuuc

SEQ ID NO: 3609974 - RNA, 14 nt, Human
ccgucucucuccca

SEQ ID NO: 3609975 - RNA, 22 nt, Human
ccgucucucucccauggagccc

SEQ ID NO: 3609976 - RNA, 16 nt, Human
ccgucuggcccaccag

SEQ ID NO: 3609977 - RNA, 18 nt, Human
ccgucuggcccaccaggg

SEQ ID NO: 3609978 - RNA, 22 nt, Human
ccgucugggguucagccccucc

SEQ ID NO: 3609979 - RNA, 13 nt, Human
ccgucuguccauc

SEQ ID NO: 3609980 - RNA, 22 nt, Human
ccgucuguccaucugcccgccu

SEQ ID NO: 3609981 - RNA, 22 nt, Human
ccgucuuagaaguggaccagga

SEQ ID NO: 3609982 - RNA, 18 nt, Human
ccgugaaaacggagcuga

SEQ ID NO: 3609983 - RNA, 16 nt, Human
ccgugaacugugcaua

SEQ ID NO: 3609984 - RNA, 21 nt, Human
ccuccaaggaggggcuguaaa

SEQ ID NO: 3609985 - RNA, 13 nt, Human
ccuccaaggccag

SEQ ID NO: 3609986 - RNA, 14 nt, Human
ccuccaaggccagg

SEQ ID NO: 3609987 - RNA, 18 nt, Human
ccuccaaguccacagugg

SEQ ID NO: 3609988 - RNA, 13 nt, Human
ccuccacaccugc

SEQ ID NO: 3609989 - RNA, 15 nt, Human
ccuccacaccugcgg

SEQ ID NO: 3609990 - RNA, 16 nt, Human
ccuccacagccgcagc

SEQ ID NO: 3609991 - RNA, 17 nt, Human
ccuccacagccgcagcc

SEQ ID NO: 3609992 - RNA, 11 nt, Human
ccuccacagcu

SEQ ID NO: 3609993 - RNA, 15 nt, Human
ccuccacauccucca

SEQ ID NO: 3609994 - RNA, 16 nt, Human
ccuccacauccuuucu

SEQ ID NO: 3609995 - RNA, 14 nt, Human
ccuccaccaccacu

SEQ ID NO: 3609996 - RNA, 17 nt, Human
ccuccaccaccacuggc

SEQ ID NO: 3609997 - RNA, 20 nt, Human
ccuccaccaccacuggccac

SEQ ID NO: 3609998 - RNA, 16 nt, Human
ccuccaccacccuuuc

SEQ ID NO: 3609999 - RNA, 14 nt, Human
ccuccaccaccgcc

SEQ ID NO: 3610000 - RNA, 14 nt, Human
ccuccacccucuga

SEQ ID NO: 3610001 - RNA, 15 nt, Human
ccuccacccucugag

SEQ ID NO: 3610002 - RNA, 16 nt, Human
ccuccacccucugagc

SEQ ID NO: 3610003 - RNA, 11 nt, Human
ccuccacccug

SEQ ID NO: 3610004 - RNA, 15 nt, Human
ccuccacccuguccc

SEQ ID NO: 3610005 - RNA, 19 nt, Human
ccuccacccugucccccag

SEQ ID NO: 3610006 - RNA, 19 nt, Human
ccuccaccgccauggcuuc

SEQ ID NO: 3610007 - RNA, 21 nt, Human
ccuccaccgccauggcuucca

SEQ ID NO: 3610008 - RNA, 13 nt, Human
ccuccaccgcugc

SEQ ID NO: 3610009 - RNA, 15 nt, Human
ccuccaccgcugccu

SEQ ID NO: 3610010 - RNA, 12 nt, Human
ccuccaccucaa

SEQ ID NO: 3610011 - RNA, 15 nt, Human
ccuccaccucccugc

SEQ ID NO: 3610012 - RNA, 14 nt, Human
ccuccaccucuuca

SEQ ID NO: 3610013 - RNA, 15 nt, Human
ccuccaccugccgug

SEQ ID NO: 3610014 - RNA, 18 nt, Human
ccuccacguucaccccuc

SEQ ID NO: 3610015 - RNA, 21 nt, Human
ccuccacguucugcucaucau

SEQ ID NO: 3610016 - RNA, 17 nt, Human
ccuccacucucccccac

SEQ ID NO: 3610017 - RNA, 14 nt, Human
ccuccacugcccuc

SEQ ID NO: 3610018 - RNA, 18 nt, Human
ccuccagaacucuuccuc

SEQ ID NO: 3610019 - RNA, 13 nt, Human
ccuccagaagccu

SEQ ID NO: 3610020 - RNA, 17 nt, Human
ccuccagaagccucugg

SEQ ID NO: 3610021 - RNA, 22 nt, Human
ccuccagagcugcggugucucc

SEQ ID NO: 3610022 - RNA, 20 nt, Human
ccuccagcacaaacacaagg

SEQ ID NO: 3610023 - RNA, 13 nt, Human
ccuccagccccug

SEQ ID NO: 3610024 - RNA, 12 nt, Human
ccuccagcccgg

SEQ ID NO: 3610025 - RNA, 14 nt, Human
ccuccagcccggga

SEQ ID NO: 3610026 - RNA, 15 nt, Human
ccuccagcccgggag

SEQ ID NO: 3610027 - RNA, 12 nt, Human
ccuccagccucu

SEQ ID NO: 3610028 - RNA, 13 nt, Human
ccuccagccucug

SEQ ID NO: 3610029 - RNA, 14 nt, Human
ccuccagccucugu

SEQ ID NO: 3610030 - RNA, 13 nt, Human
ccuccagcucagc

SEQ ID NO: 3610031 - RNA, 17 nt, Human
ccuccagcucuuuccuc

SEQ ID NO: 3610032 - RNA, 22 nt, Human
ccuccagcucuuuccuccuucc

SEQ ID NO: 3610033 - RNA, 20 nt, Human
ccuccagcugcaccagagca

SEQ ID NO: 3610034 - RNA, 12 nt, Human
ccuccagcuguu

SEQ ID NO: 3610035 - RNA, 12 nt, Human
ccuccagcuucu

SEQ ID NO: 3610036 - RNA, 21 nt, Human
ccuccagcuucugguacucuc

SEQ ID NO: 3610037 - RNA, 13 nt, Human
ccuccagcuuucc

SEQ ID NO: 3610038 - RNA, 14 nt, Human
ccuccagcuuuccu

SEQ ID NO: 3610039 - RNA, 16 nt, Human
ccuccaggcccgucug

SEQ ID NO: 3610040 - RNA, 15 nt, Human
ccuccaggccugccu

SEQ ID NO: 3610041 - RNA, 20 nt, Human
ccuccaggccugccucccac

SEQ ID NO: 3610042 - RNA, 13 nt, Human
ccuccagggacag

SEQ ID NO: 3610043 - RNA, 12 nt, Human
ccuccagggcca

SEQ ID NO: 3610044 - RNA, 17 nt, Human
ccuccagggccacgugc

SEQ ID NO: 3610045 - RNA, 18 nt, Human
ccuccagggccacgugcc

SEQ ID NO: 3610046 - RNA, 12 nt, Human
ccuccagggcug

SEQ ID NO: 3610047 - RNA, 13 nt, Human
ccuccagggcugg

SEQ ID NO: 3610048 - RNA, 16 nt, Human
ccuccagggcuggacu

SEQ ID NO: 3610049 - RNA, 20 nt, Human
ccuccagggcuggacugagg

SEQ ID NO: 3610050 - RNA, 17 nt, Human
ccuccagggugugugcu

SEQ ID NO: 3610051 - RNA, 19 nt, Human
ccuccaggugcacaagcuc

SEQ ID NO: 3610052 - RNA, 14 nt, Human
ccuccaggugcaga

SEQ ID NO: 3610053 - RNA, 17 nt, Human
ccuccaggugcagaggu

SEQ ID NO: 3610054 - RNA, 11 nt, Human
ccuccagguuu

SEQ ID NO: 3610055 - RNA, 23 nt, Human
ccuccaguccaaggaaaccacag

SEQ ID NO: 3610056 - RNA, 14 nt, Human
ccuccagucccccu

SEQ ID NO: 3610057 - RNA, 22 nt, Human
ccuccauccuacccccugugcc

SEQ ID NO: 3610058 - RNA, 23 nt, Human
ccuccauccuacccccugugccu

SEQ ID NO: 3610059 - RNA, 13 nt, Human
ccuccauccuagu

SEQ ID NO: 3610060 - RNA, 18 nt, Human
ccuccauccuccuccuuc

SEQ ID NO: 3610061 - RNA, 21 nt, Human
ccuccauccuccuccuuccua

SEQ ID NO: 3610062 - RNA, 14 nt, Human
ccuccauccugagg

SEQ ID NO: 3610063 - RNA, 14 nt, Human
ccuccaugcugccu

SEQ ID NO: 3610064 - RNA, 16 nt, Human
ccuccaugcugccucc

SEQ ID NO: 3610065 - RNA, 15 nt, Human
ccuccauggugccuc

SEQ ID NO: 3610066 - RNA, 15 nt, Human
ccuccaugugggcua

SEQ ID NO: 3610067 - RNA, 23 nt, Human
ccuccaugugggcuaguugggcu

SEQ ID NO: 3610068 - RNA, 20 nt, Human
ccuccauucuauuuuagaau

SEQ ID NO: 3610069 - RNA, 15 nt, Human
ccuccauucugacca

SEQ ID NO: 3610070 - RNA, 17 nt, Human
ccucccaaagugcuggg

SEQ ID NO: 3610071 - RNA, 14 nt, Human
ccucccaaggagaa

SEQ ID NO: 3610072 - RNA, 15 nt, Human
ccucccaaggagaac

SEQ ID NO: 3610073 - RNA, 21 nt, Human
ccucccaaggagaacaaauau

SEQ ID NO: 3610074 - RNA, 17 nt, Human
ccucccaaguggugccu

SEQ ID NO: 3610075 - RNA, 11 nt, Human
ccucccacaca

SEQ ID NO: 3610076 - RNA, 15 nt, Human
ccucccacacuccca

SEQ ID NO: 3610077 - RNA, 19 nt, Human
ccucccacacucccaaggu

SEQ ID NO: 3610078 - RNA, 12 nt, Human
ccucccacagug

SEQ ID NO: 3610079 - RNA, 23 nt, Human
ccucccacagugacucgggcucc

SEQ ID NO: 3610080 - RNA, 15 nt, Human
ccucccacagugcug

SEQ ID NO: 3610081 - RNA, 12 nt, Human
ccucccaccaca

SEQ ID NO: 3610082 - RNA, 14 nt, Human
ccucccaccacagc

SEQ ID NO: 3610083 - RNA, 13 nt, Human
ccucccacccacc

SEQ ID NO: 3610084 - RNA, 12 nt, Human
ccucccaccccc

SEQ ID NO: 3610085 - RNA, 14 nt, Human
ccucccacccccag

SEQ ID NO: 3610086 - RNA, 16 nt, Human
ccucccacccccagcc

SEQ ID NO: 3610087 - RNA, 17 nt, Human
ccucccacccccaucuc

SEQ ID NO: 3610088 - RNA, 21 nt, Human
ccucccacccccuucucugcu

SEQ ID NO: 3610089 - RNA, 19 nt, Human
ccucccacccgaugcugcu

SEQ ID NO: 3610090 - RNA, 17 nt, Human
ccucccaccucagccuc

SEQ ID NO: 3610091 - RNA, 15 nt, Human
ccucccaccuccagu

SEQ ID NO: 3610092 - RNA, 13 nt, Human
ccucccaccucug

SEQ ID NO: 3610093 - RNA, 15 nt, Human
ccucccacugcccac

SEQ ID NO: 3610094 - RNA, 19 nt, Human
ccucccacugcccacuggc

SEQ ID NO: 3610095 - RNA, 23 nt, Human
ccucccacugcccacuggccggc

SEQ ID NO: 3610096 - RNA, 20 nt, Human
ccucccagagcaccugcugu

SEQ ID NO: 3610097 - RNA, 23 nt, Human
ccucccagagcugguggacccag

SEQ ID NO: 3610098 - RNA, 20 nt, Human
ccucccagaggagccaccag

SEQ ID NO: 3610099 - RNA, 22 nt, Human
ccucccagagguccagcccauc

SEQ ID NO: 3610100 - RNA, 23 nt, Human
ccucccagagguccagcccaucu

SEQ ID NO: 3610101 - RNA, 15 nt, Human
ccucccagcccauaa

SEQ ID NO: 3610102 - RNA, 12 nt, Human
ccucccagccug

SEQ ID NO: 3610103 - RNA, 12 nt, Human
ccucccagcucc

SEQ ID NO: 3610104 - RNA, 12 nt, Human
ccucccagcucu

SEQ ID NO: 3610105 - RNA, 16 nt, Human
ccucccagcugacagu

SEQ ID NO: 3610106 - RNA, 16 nt, Human
ccucccaggaagccca

SEQ ID NO: 3610107 - RNA, 19 nt, Human
ccucccaggguuuuaacuu

SEQ ID NO: 3610108 - RNA, 12 nt, Human
ccucccaucacc

SEQ ID NO: 3610109 - RNA, 17 nt, Human
ccucccaucacccgcua

SEQ ID NO: 3610110 - RNA, 23 nt, Human
ccucccaucauuacccuucccug

SEQ ID NO: 3610111 - RNA, 15 nt, Human
ccucccauccagggc

SEQ ID NO: 3610112 - RNA, 13 nt, Human
ccucccaucucac

SEQ ID NO: 3610113 - RNA, 16 nt, Human
ccucccaucucacaca

SEQ ID NO: 3610114 - RNA, 16 nt, Human
ccucccaucugggagu

SEQ ID NO: 3610115 - RNA, 15 nt, Human
ccucccauggcaccu

SEQ ID NO: 3610116 - RNA, 15 nt, Human
ccucccaugucacug

SEQ ID NO: 3610117 - RNA, 20 nt, Human
ccuccccaaaucaauacacu

SEQ ID NO: 3610118 - RNA, 17 nt, Human
ccuccccacgcccuccc

SEQ ID NO: 3610119 - RNA, 22 nt, Human
ccuccccagcauuccagccccu

SEQ ID NO: 3610120 - RNA, 17 nt, Human
ccuccccagccccuagc

SEQ ID NO: 3610121 - RNA, 21 nt, Human
ccuccccagccugcgccugcu

SEQ ID NO: 3610122 - RNA, 22 nt, Human
ccuccccagccugcgccugcug

SEQ ID NO: 3610123 - RNA, 22 nt, Human
ccuccccaggggagagggucug

SEQ ID NO: 3610124 - RNA, 19 nt, Human
ccuccccagugcaaaugca

SEQ ID NO: 3610125 - RNA, 16 nt, Human
ccuccccauggagcca

SEQ ID NO: 3610126 - RNA, 21 nt, Human
ccuccccauuucccaucugca

SEQ ID NO: 3610127 - RNA, 13 nt, Human
ccucccccaaccc

SEQ ID NO: 3610128 - RNA, 18 nt, Human
ccucccccaacccccacc

SEQ ID NO: 3610129 - RNA, 15 nt, Human
ccucccccacugcca

SEQ ID NO: 3610130 - RNA, 18 nt, Human
ccucccccagccacuccc

SEQ ID NO: 3610131 - RNA, 16 nt, Human
ccuccccccacugcag

SEQ ID NO: 3610132 - RNA, 17 nt, Human
ccuccccccacugcagg

SEQ ID NO: 3610133 - RNA, 17 nt, Human
ccucccccccaugcacu

SEQ ID NO: 3610134 - RNA, 14 nt, Human
ccucccccuccuuc

SEQ ID NO: 3610135 - RNA, 21 nt, Human
ccuccccgcaccccccaagcu

SEQ ID NO: 3610136 - RNA, 14 nt, Human
ccuccccggcccua

SEQ ID NO: 3610137 - RNA, 23 nt, Human
cagguggaggugucaggcugcug

SEQ ID NO: 3610138 - RNA, 16 nt, Human
cagguggcaggaccag

SEQ ID NO: 3610139 - RNA, 17 nt, Human
cagguggcaggaccagg

SEQ ID NO: 3610140 - RNA, 17 nt, Human
cagguggccaaguuccu

SEQ ID NO: 3610141 - RNA, 20 nt, Human
cagguggccaaguuccucua

SEQ ID NO: 3610142 - RNA, 15 nt, Human
cagguggccacucca

SEQ ID NO: 3610143 - RNA, 16 nt, Human
cagguggccacuccag

SEQ ID NO: 3610144 - RNA, 19 nt, Human
cagguggccaugccucagc

SEQ ID NO: 3610145 - RNA, 14 nt, Human
cagguggcugaccc

SEQ ID NO: 3610146 - RNA, 15 nt, Human
cagguggcugaccca

SEQ ID NO: 3610147 - RNA, 14 nt, Human
caggugggaggugu

SEQ ID NO: 3610148 - RNA, 21 nt, Human
caggugggcgggcagcacagc

SEQ ID NO: 3610149 - RNA, 22 nt, Human
caggugggcgggcagcacagca

SEQ ID NO: 3610150 - RNA, 23 nt, Human
caggugggcguggucacugcugu

SEQ ID NO: 3610151 - RNA, 22 nt, Human
caggugggcuucccaguggcug

SEQ ID NO: 3610152 - RNA, 12 nt, Human
cagguggggagg

SEQ ID NO: 3610153 - RNA, 13 nt, Human
cagguggggcagc

SEQ ID NO: 3610154 - RNA, 14 nt, Human
cagguggggcagcu

SEQ ID NO: 3610155 - RNA, 13 nt, Human
caggugggucccg

SEQ ID NO: 3610156 - RNA, 20 nt, Human
caggugguccugagaccuga

SEQ ID NO: 3610157 - RNA, 21 nt, Human
caggugguggcacugagcccc

SEQ ID NO: 3610158 - RNA, 18 nt, Human
caggugguuauggagagg

SEQ ID NO: 3610159 - RNA, 14 nt, Human
caggugucagccau

SEQ ID NO: 3610160 - RNA, 21 nt, Human
caggugucauauauggggggc

SEQ ID NO: 3610161 - RNA, 14 nt, Human
cagguguccccagc

SEQ ID NO: 3610162 - RNA, 18 nt, Human
cagguguccccagcccac

SEQ ID NO: 3610163 - RNA, 20 nt, Human
cagguguccccagcccacug

SEQ ID NO: 3610164 - RNA, 16 nt, Human
caggugucccugcacu

SEQ ID NO: 3610165 - RNA, 12 nt, Human
caggugugaacc

SEQ ID NO: 3610166 - RNA, 19 nt, Human
caggugugaaccaccacac

SEQ ID NO: 3610167 - RNA, 13 nt, Human
caggugugcacgu

SEQ ID NO: 3610168 - RNA, 14 nt, Human
cagguguugccaaa

SEQ ID NO: 3610169 - RNA, 14 nt, Human
cagguuaaauguuu

SEQ ID NO: 3610170 - RNA, 16 nt, Human
cagguuaaauguuuug

SEQ ID NO: 3610171 - RNA, 19 nt, Human
cagguuacaacagauuugu

SEQ ID NO: 3610172 - RNA, 19 nt, Human
cagguuagaaccuagaagg

SEQ ID NO: 3610173 - RNA, 11 nt, Human
cagguuagaga

SEQ ID NO: 3610174 - RNA, 23 nt, Human
cagguuaucgaaauaacaauguu

SEQ ID NO: 3610175 - RNA, 17 nt, Human
cagguucaacccacagc

SEQ ID NO: 3610176 - RNA, 22 nt, Human
cagguucacaggcgaggccugg

SEQ ID NO: 3610177 - RNA, 12 nt, Human
cagguucagcuu

SEQ ID NO: 3610178 - RNA, 16 nt, Human
cagguucaguauuaug

SEQ ID NO: 3610179 - RNA, 19 nt, Human
cagguuccacagaggacac

SEQ ID NO: 3610180 - RNA, 23 nt, Human
cagguucccucccagaggagcca

SEQ ID NO: 3610181 - RNA, 17 nt, Human
cagguuccuauggcugg

SEQ ID NO: 3610182 - RNA, 15 nt, Human
cagguucuauuugga

SEQ ID NO: 3610183 - RNA, 17 nt, Human
cagguucuauuuggaau

SEQ ID NO: 3610184 - RNA, 24 nt, Human
cagguucuccguuagcuccugugg

SEQ ID NO: 3610185 - RNA, 17 nt, Human
cagguucucucucacug

SEQ ID NO: 3610186 - RNA, 14 nt, Human
cagguucugaaaga

SEQ ID NO: 3610187 - RNA, 23 nt, Human
cagguucugaaagagucuuucuu

SEQ ID NO: 3610188 - RNA, 15 nt, Human
cagguugaagaccua

SEQ ID NO: 3610189 - RNA, 18 nt, Human
cagguugaagccaugucu

SEQ ID NO: 3610190 - RNA, 21 nt, Human
cagguugaggggcuccuggaa

SEQ ID NO: 3610191 - RNA, 22 nt, Human
cagguugaggggcuccuggaaa

SEQ ID NO: 3610192 - RNA, 15 nt, Human
cagguugauaaauca

SEQ ID NO: 3610193 - RNA, 21 nt, Human
cagguuggcucugccaguccu

SEQ ID NO: 3610194 - RNA, 20 nt, Human
cagguugggaaugaggcuug

SEQ ID NO: 3610195 - RNA, 15 nt, Human
cagguugggauggga

SEQ ID NO: 3610196 - RNA, 21 nt, Human
cagguugggccauacuggccu

SEQ ID NO: 3610197 - RNA, 22 nt, Human
cagguugggccauacuggccuc

SEQ ID NO: 3610198 - RNA, 17 nt, Human
cagguuuaacauuugcc

SEQ ID NO: 3610199 - RNA, 18 nt, Human
cagguuuaagcuguuacu

SEQ ID NO: 3610200 - RNA, 17 nt, Human
cagguuucuggucucua

SEQ ID NO: 3610201 - RNA, 15 nt, Human
cagguuugggacccc

SEQ ID NO: 3610202 - RNA, 19 nt, Human
cagguuuucuuuuaagaau

SEQ ID NO: 3610203 - RNA, 20 nt, Human
cagguuuuguuuuuuuucag

SEQ ID NO: 3610204 - RNA, 23 nt, Human
cagguuuuguuuuuuuucagcca

SEQ ID NO: 3610205 - RNA, 14 nt, Human
cagguuuuucaauu

SEQ ID NO: 3610206 - RNA, 22 nt, Human
cagguuuuucaauuaaacggau

SEQ ID NO: 3610207 - RNA, 23 nt, Human
cagguuuuucaauuaaacggauu

SEQ ID NO: 3610208 - RNA, 14 nt, Human
caguaaaauagcug

SEQ ID NO: 3610209 - RNA, 18 nt, Human
caguaaaauugccauauu

SEQ ID NO: 3610210 - RNA, 10 nt, Human
caguaaacau

SEQ ID NO: 3610211 - RNA, 21 nt, Human
caguaaaccacugaaaaaaua

SEQ ID NO: 3610212 - RNA, 16 nt, Human
caguaaaccugucuga

SEQ ID NO: 3610213 - RNA, 21 nt, Human
caguaaacgggaacaugcccc

SEQ ID NO: 3610214 - RNA, 14 nt, Human
caguaaacuuuuaa

SEQ ID NO: 3610215 - RNA, 18 nt, Human
caguaaagagaaacuuug

SEQ ID NO: 3610216 - RNA, 23 nt, Human
caguaaagagaaacuuugugcua

SEQ ID NO: 3610217 - RNA, 14 nt, Human
caguaaauaaauug

SEQ ID NO: 3610218 - RNA, 17 nt, Human
caguaaauaaauuguuu

SEQ ID NO: 3610219 - RNA, 14 nt, Human
caguaaauaacagg

SEQ ID NO: 3610220 - RNA, 20 nt, Human
caguaaaucuuuuacaacug

SEQ ID NO: 3610221 - RNA, 20 nt, Human
caguaaaugggggugcauuu

SEQ ID NO: 3610222 - RNA, 12 nt, Human
caguaacacgcu

SEQ ID NO: 3610223 - RNA, 20 nt, Human
caguaacagggccuugcuaa

SEQ ID NO: 3610224 - RNA, 18 nt, Human
caguaacccccuuaaauu

SEQ ID NO: 3610225 - RNA, 18 nt, Human
caguaacgcgucuuccug

SEQ ID NO: 3610226 - RNA, 19 nt, Human
caguaacgcgucuuccuga

SEQ ID NO: 3610227 - RNA, 22 nt, Human
caguaacgggucguaaugacuu

SEQ ID NO: 3610228 - RNA, 16 nt, Human
caguaacucaucuguc

SEQ ID NO: 3610229 - RNA, 9 nt, Human
caguaacug

SEQ ID NO: 3610230 - RNA, 10 nt, Human
caguaacugu

SEQ ID NO: 3610231 - RNA, 19 nt, Human
caguaacuuuauguguaaa

SEQ ID NO: 3610232 - RNA, 20 nt, Human
caguaacuuuauguguaaau

SEQ ID NO: 3610233 - RNA, 16 nt, Human
caguaagaccggaagc

SEQ ID NO: 3610234 - RNA, 17 nt, Human
caguaagaccggaagcu

SEQ ID NO: 3610235 - RNA, 23 nt, Human
caguaagaccggaagcuccuggu

SEQ ID NO: 3610236 - RNA, 20 nt, Human
caguaagauaucucaaugaa

SEQ ID NO: 3610237 - RNA, 15 nt, Human
caguaagaucacugu

SEQ ID NO: 3610238 - RNA, 17 nt, Human
caguaagaucacuguuu

SEQ ID NO: 3610239 - RNA, 20 nt, Human
caguaagaucacuguuuaga

SEQ ID NO: 3610240 - RNA, 19 nt, Human
caguaagcugcucuauugu

SEQ ID NO: 3610241 - RNA, 13 nt, Human
caguaaggcaggg

SEQ ID NO: 3610242 - RNA, 18 nt, Human
caguaagggaaauagaaa

SEQ ID NO: 3610243 - RNA, 19 nt, Human
ccuccuaaaaggcccagag

SEQ ID NO: 3610244 - RNA, 15 nt, Human
ccuccuaagagagag

SEQ ID NO: 3610245 - RNA, 16 nt, Human
ccuccuacccugcgcc

SEQ ID NO: 3610246 - RNA, 19 nt, Human
ccuccuaucagaaguuucu

SEQ ID NO: 3610247 - RNA, 12 nt, Human
ccuccuauucua

SEQ ID NO: 3610248 - RNA, 12 nt, Human
ccuccucaccuc

SEQ ID NO: 3610249 - RNA, 14 nt, Human
ccuccucaccucau

SEQ ID NO: 3610250 - RNA, 17 nt, Human
ccuccucaccucaugcc

SEQ ID NO: 3610251 - RNA, 19 nt, Human
ccuccucaccucaugccca

SEQ ID NO: 3610252 - RNA, 16 nt, Human
ccuccucaccucugga

SEQ ID NO: 3610253 - RNA, 21 nt, Human
ccuccucaccucuggacuggc

SEQ ID NO: 3610254 - RNA, 14 nt, Human
ccuccucacucccu

SEQ ID NO: 3610255 - RNA, 17 nt, Human
ccuccucacuggccauc

SEQ ID NO: 3610256 - RNA, 11 nt, Human
ccuccucagau

SEQ ID NO: 3610257 - RNA, 12 nt, Human
ccuccucagccu

SEQ ID NO: 3610258 - RNA, 15 nt, Human
ccuccucagccugaa

SEQ ID NO: 3610259 - RNA, 22 nt, Human
ccuccucagccugaaccccagg

SEQ ID NO: 3610260 - RNA, 12 nt, Human
ccuccucaggga

SEQ ID NO: 3610261 - RNA, 13 nt, Human
ccuccucaucccg

SEQ ID NO: 3610262 - RNA, 16 nt, Human
ccuccuccagccccug

SEQ ID NO: 3610263 - RNA, 21 nt, Human
ccuccuccagccgccaugcuc

SEQ ID NO: 3610264 - RNA, 15 nt, Human
ccuccuccaggccug

SEQ ID NO: 3610265 - RNA, 16 nt, Human
ccuccuccagggacag

SEQ ID NO: 3610266 - RNA, 21 nt, Human
ccuccuccccaacuguggggg

SEQ ID NO: 3610267 - RNA, 13 nt, Human
ccuccucccuccc

SEQ ID NO: 3610268 - RNA, 15 nt, Human
ccuccucccuuagcu

SEQ ID NO: 3610269 - RNA, 14 nt, Human
ccuccuccuuccua

SEQ ID NO: 3610270 - RNA, 23 nt, Human
ccuccucggaaccgcucaccuag

SEQ ID NO: 3610271 - RNA, 21 nt, Human
ccuccucggcuggcuguccac

SEQ ID NO: 3610272 - RNA, 14 nt, Human
ccuccucucagugu

SEQ ID NO: 3610273 - RNA, 15 nt, Human
ccuccucucccaucc

SEQ ID NO: 3610274 - RNA, 19 nt, Human
ccuccucucccaucccccu

SEQ ID NO: 3610275 - RNA, 13 nt, Human
ccuccucugaaac

SEQ ID NO: 3610276 - RNA, 16 nt, Human
ccuccucugaaacagc

SEQ ID NO: 3610277 - RNA, 20 nt, Human
ccuccucugaaacagcugcc

SEQ ID NO: 3610278 - RNA, 18 nt, Human
ccuccucugcuugccauc

SEQ ID NO: 3610279 - RNA, 21 nt, Human
ccuccucuggacggcaggcuc

SEQ ID NO: 3610280 - RNA, 16 nt, Human
ccuccucuguccaggg

SEQ ID NO: 3610281 - RNA, 13 nt, Human
ccuccucugucug

SEQ ID NO: 3610282 - RNA, 16 nt, Human
ccuccucuucaccccg

SEQ ID NO: 3610283 - RNA, 19 nt, Human
ccuccucuucaccccggca

SEQ ID NO: 3610284 - RNA, 14 nt, Human
ccuccucuucugac

SEQ ID NO: 3610285 - RNA, 21 nt, Human
ccuccucuuucucuccccaac

SEQ ID NO: 3610286 - RNA, 19 nt, Human
ccuccugacacaccugcag

SEQ ID NO: 3610287 - RNA, 15 nt, Human
ccuccugaccuguca

SEQ ID NO: 3610288 - RNA, 12 nt, Human
ccuccugagaaa

SEQ ID NO: 3610289 - RNA, 16 nt, Human
ccuccugagggaggac

SEQ ID NO: 3610290 - RNA, 12 nt, Human
ccuccugcccac

SEQ ID NO: 3610291 - RNA, 14 nt, Human
ccuccugcccaccu

SEQ ID NO: 3610292 - RNA, 17 nt, Human
ccuccugcccaccuguc

SEQ ID NO: 3610293 - RNA, 23 nt, Human
caguagaggcuauggacagggca

SEQ ID NO: 3610294 - RNA, 17 nt, Human
caguagagucaucucca

SEQ ID NO: 3610295 - RNA, 16 nt, Human
caguagauuuuccaaa

SEQ ID NO: 3610296 - RNA, 19 nt, Human
caguagauuuucuuuaaaa

SEQ ID NO: 3610297 - RNA, 19 nt, Human
caguagcugggaccacagg

SEQ ID NO: 3610298 - RNA, 20 nt, Human
caguagcuguggugaggugg

SEQ ID NO: 3610299 - RNA, 13 nt, Human
caguaggccggug

SEQ ID NO: 3610300 - RNA, 18 nt, Human
caguaggcucaacuaggg

SEQ ID NO: 3610301 - RNA, 22 nt, Human
caguaggugacacuauaguuua

SEQ ID NO: 3610302 - RNA, 22 nt, Human
caguagguuauuuagcuuggga

SEQ ID NO: 3610303 - RNA, 14 nt, Human
caguaguaccaaau

SEQ ID NO: 3610304 - RNA, 22 nt, Human
caguaguagccuccagguuucc

SEQ ID NO: 3610305 - RNA, 17 nt, Human
caguagucucugugcuu

SEQ ID NO: 3610306 - RNA, 12 nt, Human
caguagugauag

SEQ ID NO: 3610307 - RNA, 20 nt, Human
caguaguuugcauuucagaa

SEQ ID NO: 3610308 - RNA, 13 nt, Human
caguauaaaauua

SEQ ID NO: 3610309 - RNA, 19 nt, Human
caguauaaacaaaguuacu

SEQ ID NO: 3610310 - RNA, 14 nt, Human
caguauaaagaaua

SEQ ID NO: 3610311 - RNA, 15 nt, Human
caguauaaagaauag

SEQ ID NO: 3610312 - RNA, 18 nt, Human
caguauaaagaauaggac

SEQ ID NO: 3610313 - RNA, 21 nt, Human
caguauaaagaauaggacuug

SEQ ID NO: 3610314 - RNA, 14 nt, Human
caguauaauuaaca

SEQ ID NO: 3610315 - RNA, 14 nt, Human
caguauaauucugu

SEQ ID NO: 3610316 - RNA, 20 nt, Human
caguauaauucuguacugau

SEQ ID NO: 3610317 - RNA, 17 nt, Human
caguauacaagauaagc

SEQ ID NO: 3610318 - RNA, 18 nt, Human
caguauagaauaggcacu

SEQ ID NO: 3610319 - RNA, 16 nt, Human
caguauauuaguauua

SEQ ID NO: 3610320 - RNA, 14 nt, Human
caguauauuuaaac

SEQ ID NO: 3610321 - RNA, 16 nt, Human
caguauauuuaaacuc

SEQ ID NO: 3610322 - RNA, 22 nt, Human
caguauauuuauagucacaaga

SEQ ID NO: 3610323 - RNA, 18 nt, Human
caguauauuuuauuucaa

SEQ ID NO: 3610324 - RNA, 14 nt, Human
caguaucacugucu

SEQ ID NO: 3610325 - RNA, 22 nt, Human
caguaucacugucuuuccuaga

SEQ ID NO: 3610326 - RNA, 17 nt, Human
caguaucaggccugcca

SEQ ID NO: 3610327 - RNA, 20 nt, Human
caguaucaggccugccagac

SEQ ID NO: 3610328 - RNA, 14 nt, Human
caguaucaugaagc

SEQ ID NO: 3610329 - RNA, 17 nt, Human
caguaucaugcccugug

SEQ ID NO: 3610330 - RNA, 19 nt, Human
caguaucaugcccugugca

SEQ ID NO: 3610331 - RNA, 13 nt, Human
caguaucccacau

SEQ ID NO: 3610332 - RNA, 14 nt, Human
caguaucccacauc

SEQ ID NO: 3610333 - RNA, 23 nt, Human
caguaucuauauauguguaugua

SEQ ID NO: 3610334 - RNA, 22 nt, Human
caguaucucuucagucucuaua

SEQ ID NO: 3610335 - RNA, 12 nt, Human
caguaucuugaa

SEQ ID NO: 3610336 - RNA, 18 nt, Human
caguaucuuugcacucca

SEQ ID NO: 3610337 - RNA, 16 nt, Human
caguaugcugccccug

SEQ ID NO: 3610338 - RNA, 12 nt, Human
caguauggcagc

SEQ ID NO: 3610339 - RNA, 18 nt, Human
caguauggggguuguaaa

SEQ ID NO: 3610340 - RNA, 19 nt, Human
caguauggggguuguaaau

SEQ ID NO: 3610341 - RNA, 16 nt, Human
caguauggguuaggga

SEQ ID NO: 3610342 - RNA, 23 nt, Human
caguauggguuagggaaaacauu

SEQ ID NO: 3610343 - RNA, 18 nt, Human
caguaugguacauuuuuc

SEQ ID NO: 3610344 - RNA, 15 nt, Human
caguaugugggauau

SEQ ID NO: 3610345 - RNA, 21 nt, Human
caguauuaaaggggggagggg

SEQ ID NO: 3610346 - RNA, 19 nt, Human
caguauuaauacuaaaaua

SEQ ID NO: 3610347 - RNA, 16 nt, Human
caguauuacuucugcu

SEQ ID NO: 3610348 - RNA, 14 nt, Human
caguauuauaugua

SEQ ID NO: 3610349 - RNA, 13 nt, Human
caguauucuuguc

SEQ ID NO: 3610350 - RNA, 16 nt, Human
caguauucuugucaaa

SEQ ID NO: 3610351 - RNA, 17 nt, Human
caguauugaagcauuuu

SEQ ID NO: 3610352 - RNA, 12 nt, Human
caguauuguaca

SEQ ID NO: 3610353 - RNA, 16 nt, Human
caguauuguacaaagu

SEQ ID NO: 3610354 - RNA, 16 nt, Human
caguauuuauuuugua

SEQ ID NO: 3610355 - RNA, 18 nt, Human
caguauuuauuuuguaau

SEQ ID NO: 3610356 - RNA, 22 nt, Human
caguauuuauuuuguaauuaug

SEQ ID NO: 3610357 - RNA, 21 nt, Human
caguauuuucccaauagcacu

SEQ ID NO: 3610358 - RNA, 16 nt, Human
caguauuuucccugcu

SEQ ID NO: 3610359 - RNA, 18 nt, Human
caguauuuuggagaaauu

SEQ ID NO: 3610360 - RNA, 20 nt, Human
caguauuuuggagaaauuau

SEQ ID NO: 3610361 - RNA, 21 nt, Human
caguauuuuggagaaauuauu

SEQ ID NO: 3610362 - RNA, 23 nt, Human
caguauuuuggagaaauuauuua

SEQ ID NO: 3610363 - RNA, 16 nt, Human
caguauuuuguguccu

SEQ ID NO: 3610364 - RNA, 17 nt, Human
caguauuuuguguccuc

SEQ ID NO: 3610365 - RNA, 15 nt, Human
cagucaacaagccug

SEQ ID NO: 3610366 - RNA, 14 nt, Human
cagucaaccugggc

SEQ ID NO: 3610367 - RNA, 20 nt, Human
cagucaagcuguugaagucu

SEQ ID NO: 3610368 - RNA, 15 nt, Human
cagucaaggaguggc

SEQ ID NO: 3610369 - RNA, 15 nt, Human
cagucaauauuuuua

SEQ ID NO: 3610370 - RNA, 14 nt, Human
cagucaauuaacaa

SEQ ID NO: 3610371 - RNA, 12 nt, Human
cagucacagcca

SEQ ID NO: 3610372 - RNA, 17 nt, Human
cagucacaugaccugau

SEQ ID NO: 3610373 - RNA, 17 nt, Human
cagucaccccaggacuc

SEQ ID NO: 3610374 - RNA, 16 nt, Human
cagucaccucauggaa

SEQ ID NO: 3610375 - RNA, 19 nt, Human
cagucaccucauggaauug

SEQ ID NO: 3610376 - RNA, 17 nt, Human
cagucaccugcccagau

SEQ ID NO: 3610377 - RNA, 23 nt, Human
cagucacguggaggagcagugca

SEQ ID NO: 3610378 - RNA, 22 nt, Human
cagucacugccacuuugcacau

SEQ ID NO: 3610379 - RNA, 22 nt, Human
cagucacugucccucaaaugac

SEQ ID NO: 3610380 - RNA, 20 nt, Human
cagucagauuuccagucucc

SEQ ID NO: 3610381 - RNA, 13 nt, Human
cagucagccucuc

SEQ ID NO: 3610382 - RNA, 21 nt, Human
cagucagccucucucccaguc

SEQ ID NO: 3610383 - RNA, 22 nt, Human
cagucagccucucucccagucu

SEQ ID NO: 3610384 - RNA, 16 nt, Human
cagucaggcucucugg

SEQ ID NO: 3610385 - RNA, 12 nt, Human
cagucaggggca

SEQ ID NO: 3610386 - RNA, 15 nt, Human
cagucagguugaaga

SEQ ID NO: 3610387 - RNA, 16 nt, Human
cagucaguaauugcca

SEQ ID NO: 3610388 - RNA, 15 nt, Human
cagucaguauuguuu

SEQ ID NO: 3610389 - RNA, 18 nt, Human
cagucagugcaaauguca

SEQ ID NO: 3610390 - RNA, 18 nt, Human
cagucaucaucagggccu

SEQ ID NO: 3610391 - RNA, 21 nt, Human
cagucaucuugaccaagcagg

SEQ ID NO: 3610392 - RNA, 22 nt, Human
cagucaucuugaccaagcagga

SEQ ID NO: 3610393 - RNA, 13 nt, Human
cagucaugcauaa

SEQ ID NO: 3610394 - RNA, 22 nt, Human
cagucauguuuuaaauguacag

SEQ ID NO: 3610395 - RNA, 18 nt, Human
cagucauuagacuccucc

SEQ ID NO: 3610396 - RNA, 23 nt, Human
cagucauuaugagaggcaaugau

SEQ ID NO: 3610397 - RNA, 17 nt, Human
cagucauucagauauga

SEQ ID NO: 3610398 - RNA, 12 nt, Human
cagucauuuaaa

SEQ ID NO: 3610399 - RNA, 17 nt, Human
caguccaaauguccucc

SEQ ID NO: 3610400 - RNA, 23 nt, Human
caguccaaauguccuccagaagc

SEQ ID NO: 3610401 - RNA, 19 nt, Human
caguccaaggaaaccacag

SEQ ID NO: 3610402 - RNA, 13 nt, Human
caguccacaaaau

SEQ ID NO: 3610403 - RNA, 18 nt, Human
caguccaccugagcugcc

SEQ ID NO: 3610404 - RNA, 21 nt, Human
caguccacuucugacagccuc

SEQ ID NO: 3610405 - RNA, 13 nt, Human
caguccagccugg

SEQ ID NO: 3610406 - RNA, 15 nt, Human
caguccaggcugccg

SEQ ID NO: 3610407 - RNA, 20 nt, Human
caguccaguccuaucugggc

SEQ ID NO: 3610408 - RNA, 13 nt, Human
caguccaugaaga

SEQ ID NO: 3610409 - RNA, 19 nt, Human
caguccaugcaugacagcc

SEQ ID NO: 3610410 - RNA, 23 nt, Human
caguccaugcaugacagccucua

SEQ ID NO: 3610411 - RNA, 15 nt, Human
cagucccacugugca

SEQ ID NO: 3610412 - RNA, 23 nt, Human
cagucccacugugcaggugcuau

SEQ ID NO: 3610413 - RNA, 17 nt, Human
cagucccagcagccagc

SEQ ID NO: 3610414 - RNA, 18 nt, Human
cagucccagcagccagcc

SEQ ID NO: 3610415 - RNA, 19 nt, Human
cagucccagcagccagcca

SEQ ID NO: 3610416 - RNA, 13 nt, Human
cagucccaggggc

SEQ ID NO: 3610417 - RNA, 13 nt, Human
caguccccacccc

SEQ ID NO: 3610418 - RNA, 13 nt, Human
caguccccagaac

SEQ ID NO: 3610419 - RNA, 15 nt, Human
caguccccagaacuc

SEQ ID NO: 3610420 - RNA, 19 nt, Human
caguccccagcccuucaca

SEQ ID NO: 3610421 - RNA, 23 nt, Human
caguccccgugaaggagagcccu

SEQ ID NO: 3610422 - RNA, 16 nt, Human
caguccccucccaucu

SEQ ID NO: 3610423 - RNA, 17 nt, Human
caguccccucccaucug

SEQ ID NO: 3610424 - RNA, 22 nt, Human
caguccccucccaucugggagu

SEQ ID NO: 3610425 - RNA, 14 nt, Human
cagucccuaaagaa

SEQ ID NO: 3610426 - RNA, 13 nt, Human
cagucccuccaca

SEQ ID NO: 3610427 - RNA, 17 nt, Human
cagucccugccaaugga

SEQ ID NO: 3610428 - RNA, 22 nt, Human
cagucccuuccccaugcuuccu

SEQ ID NO: 3610429 - RNA, 19 nt, Human
caguccgucaaaacagauu

SEQ ID NO: 3610430 - RNA, 20 nt, Human
caguccguguggauccaaug

SEQ ID NO: 3610431 - RNA, 19 nt, Human
caguccuaagaaagaggag

SEQ ID NO: 3610432 - RNA, 17 nt, Human
caguccuagaauguuuc

SEQ ID NO: 3610433 - RNA, 20 nt, Human
caguccuaucugggcuuccu

SEQ ID NO: 3610434 - RNA, 22 nt, Human
caguccuaucugggcuuccugg

SEQ ID NO: 3610435 - RNA, 17 nt, Human
caguccucccaucucac

SEQ ID NO: 3610436 - RNA, 15 nt, Human
caguccugcccgcca

SEQ ID NO: 3610437 - RNA, 14 nt, Human
caguccugccuggc

SEQ ID NO: 3610438 - RNA, 14 nt, Human
caguccugcucucu

SEQ ID NO: 3610439 - RNA, 17 nt, Human
caguccugcucucuacc

SEQ ID NO: 3610440 - RNA, 15 nt, Human
caguccuuaccagca

SEQ ID NO: 3610441 - RNA, 13 nt, Human
caguccuuggccu

SEQ ID NO: 3610442 - RNA, 16 nt, Human
caguccuuggccugcu

SEQ ID NO: 3610443 - RNA, 21 nt, Human
ccgugagcaggaaggccuggg

SEQ ID NO: 3610444 - RNA, 21 nt, Human
ccgugagcagugugucuccug

SEQ ID NO: 3610445 - RNA, 16 nt, Human
ccgugaggccagagac

SEQ ID NO: 3610446 - RNA, 14 nt, Human
ccgugaguucucag

SEQ ID NO: 3610447 - RNA, 23 nt, Human
ccgugauguaggguaaggugccu

SEQ ID NO: 3610448 - RNA, 14 nt, Human
ccgugcagacugga

SEQ ID NO: 3610449 - RNA, 17 nt, Human
ccgugcagacuggaggg

SEQ ID NO: 3610450 - RNA, 18 nt, Human
ccgugcauuagcacagau

SEQ ID NO: 3610451 - RNA, 22 nt, Human
ccgugcauuagcacagauuuua

SEQ ID NO: 3610452 - RNA, 21 nt, Human
ccgugccaaguccagguccug

SEQ ID NO: 3610453 - RNA, 17 nt, Human
ccgugccgccugcacuc

SEQ ID NO: 3610454 - RNA, 22 nt, Human
ccgugccuccaccaccacuggc

SEQ ID NO: 3610455 - RNA, 23 nt, Human
ccgugccuccaccaccacuggcc

SEQ ID NO: 3610456 - RNA, 14 nt, Human
ccgugccuucagcu

SEQ ID NO: 3610457 - RNA, 16 nt, Human
ccgugccuucagcucu

SEQ ID NO: 3610458 - RNA, 13 nt, Human
ccgugcuaaggac

SEQ ID NO: 3610459 - RNA, 16 nt, Human
ccgugcugacagcugc

SEQ ID NO: 3610460 - RNA, 17 nt, Human
ccgugcugacagcugcu

SEQ ID NO: 3610461 - RNA, 12 nt, Human
ccgugcugggca

SEQ ID NO: 3610462 - RNA, 14 nt, Human
ccgugcugggcagc

SEQ ID NO: 3610463 - RNA, 15 nt, Human
ccgugcugggcagcc

SEQ ID NO: 3610464 - RNA, 16 nt, Human
ccguggaccuuccugc

SEQ ID NO: 3610465 - RNA, 22 nt, Human
ccguggaggaggaaggcaagag

SEQ ID NO: 3610466 - RNA, 20 nt, Human
ccguggaggagguugggagg

SEQ ID NO: 3610467 - RNA, 22 nt, Human
ccguggaggcugcucggggugc

SEQ ID NO: 3610468 - RNA, 11 nt, Human
ccguggaugcg

SEQ ID NO: 3610469 - RNA, 20 nt, Human
ccguggauugcacguggccu

SEQ ID NO: 3610470 - RNA, 16 nt, Human
ccguggccccagccug

SEQ ID NO: 3610471 - RNA, 21 nt, Human
ccguggccccagccuggccca

SEQ ID NO: 3610472 - RNA, 23 nt, Human
ccguggccccagccuggcccagc

SEQ ID NO: 3610473 - RNA, 15 nt, Human
ccguggcccugcccu

SEQ ID NO: 3610474 - RNA, 20 nt, Human
ccguggcccugcccucuccu

SEQ ID NO: 3610475 - RNA, 16 nt, Human
ccguggcccuuccugg

SEQ ID NO: 3610476 - RNA, 14 nt, Human
ccguggcugcggca

SEQ ID NO: 3610477 - RNA, 23 nt, Human
ccguggcuguugacgcaccugug

SEQ ID NO: 3610478 - RNA, 11 nt, Human
ccguggcuucc

SEQ ID NO: 3610479 - RNA, 23 nt, Human
ccguggcuucccgcucagcccuc

SEQ ID NO: 3610480 - RNA, 14 nt, Human
ccgugggcucccug

SEQ ID NO: 3610481 - RNA, 14 nt, Human
ccguggggcaggga

SEQ ID NO: 3610482 - RNA, 23 nt, Human
ccguggggcagggagcugggccc

SEQ ID NO: 3610483 - RNA, 15 nt, Human
ccgugguaugucugc

SEQ ID NO: 3610484 - RNA, 18 nt, Human
ccgugguaugucugccau

SEQ ID NO: 3610485 - RNA, 15 nt, Human
ccguguccaccccca

SEQ ID NO: 3610486 - RNA, 17 nt, Human
ccguguccccugacagg

SEQ ID NO: 3610487 - RNA, 16 nt, Human
ccgugugcccucgggc

SEQ ID NO: 3610488 - RNA, 23 nt, Human
ccgugugguaagcaacauggcuu

SEQ ID NO: 3610489 - RNA, 18 nt, Human
ccguguuggucuguacug

SEQ ID NO: 3610490 - RNA, 14 nt, Human
ccguuacucuccaa

SEQ ID NO: 3610491 - RNA, 17 nt, Human
ccguuacucuccaaccu

SEQ ID NO: 3610492 - RNA, 14 nt, Human
ccguuagcuccugu

SEQ ID NO: 3610493 - RNA, 12 nt, Human
ccguuauuaaaa

SEQ ID NO: 3610494 - RNA, 14 nt, Human
ccguucacaugugu

SEQ ID NO: 3610495 - RNA, 14 nt, Human
ccguucacauuuuu

SEQ ID NO: 3610496 - RNA, 17 nt, Human
ccguuccaccccaagag

SEQ ID NO: 3610497 - RNA, 19 nt, Human
ccguuccugacaucacagc

SEQ ID NO: 3610498 - RNA, 22 nt, Human
ccguuccugacaucacagcagc

SEQ ID NO: 3610499 - RNA, 19 nt, Human
ccguugauguuggcuggga

SEQ ID NO: 3610500 - RNA, 12 nt, Human
ccguugcauuug

SEQ ID NO: 3610501 - RNA, 23 nt, Human
ccguuggaaacauaaccauuaca

SEQ ID NO: 3610502 - RNA, 18 nt, Human
ccguugucucccuggccc

SEQ ID NO: 3610503 - RNA, 19 nt, Human
ccguugucucccuggcccu

SEQ ID NO: 3610504 - RNA, 12 nt, Human
ccguuguuuacu

SEQ ID NO: 3610505 - RNA, 20 nt, Human
ccguuguuuacuuaaagauu

SEQ ID NO: 3610506 - RNA, 17 nt, Human
ccguuuaccuagaagaa

SEQ ID NO: 3610507 - RNA, 13 nt, Human
ccguuucuucccu

SEQ ID NO: 3610508 - RNA, 23 nt, Human
ccguuugauuugucacugcuuca

SEQ ID NO: 3610509 - RNA, 12 nt, Human
ccuaaaaauaaa

SEQ ID NO: 3610510 - RNA, 14 nt, Human
ccuaaaaauaaagc

SEQ ID NO: 3610511 - RNA, 15 nt, Human
ccuaaaaauaaagca

SEQ ID NO: 3610512 - RNA, 12 nt, Human
ccuaaaacaaau

SEQ ID NO: 3610513 - RNA, 16 nt, Human
ccuaaaacuggccuga

SEQ ID NO: 3610514 - RNA, 18 nt, Human
ccuaaaagaaacccugca

SEQ ID NO: 3610515 - RNA, 13 nt, Human
ccuaaaagcaaaa

SEQ ID NO: 3610516 - RNA, 22 nt, Human
ccuaaaagcaaaauaaaaacua

SEQ ID NO: 3610517 - RNA, 15 nt, Human
ccuaaaaguaaacau

SEQ ID NO: 3610518 - RNA, 23 nt, Human
ccuaaaauaacaguaugugggau

SEQ ID NO: 3610519 - RNA, 15 nt, Human
ccuaaaauaagaaua

SEQ ID NO: 3610520 - RNA, 15 nt, Human
ccuaaaauacauuua

SEQ ID NO: 3610521 - RNA, 23 nt, Human
ccuaaacagauauaaauggcugg

SEQ ID NO: 3610522 - RNA, 17 nt, Human
ccuaaaccccuguccca

SEQ ID NO: 3610523 - RNA, 16 nt, Human
ccuaaagaaaaacaaa

SEQ ID NO: 3610524 - RNA, 22 nt, Human
ccuaaagaaaaauaucuuggcc

SEQ ID NO: 3610525 - RNA, 19 nt, Human
ccuaaaguagacuucauuu

SEQ ID NO: 3610526 - RNA, 14 nt, Human
ccuaaaguguauuu

SEQ ID NO: 3610527 - RNA, 19 nt, Human
ccuaaauaaacacauagau

SEQ ID NO: 3610528 - RNA, 21 nt, Human
ccuaaauccacucugcaggaa

SEQ ID NO: 3610529 - RNA, 12 nt, Human
ccuaaauccauu

SEQ ID NO: 3610530 - RNA, 18 nt, Human
ccuaaauggccucaugug

SEQ ID NO: 3610531 - RNA, 20 nt, Human
ccuaaauuuaaugcugccuu

SEQ ID NO: 3610532 - RNA, 14 nt, Human
ccuaaauuuauuaa

SEQ ID NO: 3610533 - RNA, 19 nt, Human
ccuaacauaccuaagcaaa

SEQ ID NO: 3610534 - RNA, 14 nt, Human
ccucggagccucau

SEQ ID NO: 3610535 - RNA, 16 nt, Human
ccucggagccucaucc

SEQ ID NO: 3610536 - RNA, 17 nt, Human
ccucggaucaccgagag

SEQ ID NO: 3610537 - RNA, 16 nt, Human
ccucggcuccugcugc

SEQ ID NO: 3610538 - RNA, 17 nt, Human
ccucggcuccugcugca

SEQ ID NO: 3610539 - RNA, 20 nt, Human
ccucggcuccugcugcacca

SEQ ID NO: 3610540 - RNA, 22 nt, Human
ccucggcuccugcugcaccaac

SEQ ID NO: 3610541 - RNA, 17 nt, Human
ccucggcuggcuccccu

SEQ ID NO: 3610542 - RNA, 13 nt, Human
ccucgggcccacc

SEQ ID NO: 3610543 - RNA, 13 nt, Human
ccucgggcccagc

SEQ ID NO: 3610544 - RNA, 16 nt, Human
ccucgggcccagcccc

SEQ ID NO: 3610545 - RNA, 17 nt, Human
ccucgggcccagccccc

SEQ ID NO: 3610546 - RNA, 13 nt, Human
ccucgggccugcu

SEQ ID NO: 3610547 - RNA, 14 nt, Human
ccucgggucuccuc

SEQ ID NO: 3610548 - RNA, 18 nt, Human
ccucgggucuccucacuc

SEQ ID NO: 3610549 - RNA, 19 nt, Human
ccucguccucccccugcca

SEQ ID NO: 3610550 - RNA, 21 nt, Human
ccucguccucccccugccagu

SEQ ID NO: 3610551 - RNA, 14 nt, Human
ccucgucuuuccca

SEQ ID NO: 3610552 - RNA, 15 nt, Human
ccucguggacaccug

SEQ ID NO: 3610553 - RNA, 22 nt, Human
ccucguggacaccugcccugcc

SEQ ID NO: 3610554 - RNA, 14 nt, Human
ccucguggccagcc

SEQ ID NO: 3610555 - RNA, 18 nt, Human
ccucguggccagcccggc

SEQ ID NO: 3610556 - RNA, 23 nt, Human
ccucguuagggaagagaaacagg

SEQ ID NO: 3610557 - RNA, 21 nt, Human
ccucguuccuuucuccuguuu

SEQ ID NO: 3610558 - RNA, 16 nt, Human
ccucguucucccuggg

SEQ ID NO: 3610559 - RNA, 18 nt, Human
ccucguucucccugggag

SEQ ID NO: 3610560 - RNA, 20 nt, Human
ccucguucucccugggaggc

SEQ ID NO: 3610561 - RNA, 15 nt, Human
ccucguuggaagagg

SEQ ID NO: 3610562 - RNA, 20 nt, Human
ccucguuggaagaggaacag

SEQ ID NO: 3610563 - RNA, 13 nt, Human
ccucguuuguguu

SEQ ID NO: 3610564 - RNA, 18 nt, Human
ccucuaacaggggcuggu

SEQ ID NO: 3610565 - RNA, 16 nt, Human
ccucuaaccccaggcc

SEQ ID NO: 3610566 - RNA, 19 nt, Human
ccucuaagccacucuucca

SEQ ID NO: 3610567 - RNA, 16 nt, Human
ccucuacccaaacccu

SEQ ID NO: 3610568 - RNA, 17 nt, Human
ccucuacuaaaaagaag

SEQ ID NO: 3610569 - RNA, 18 nt, Human
ccucuacuuuccaggcua

SEQ ID NO: 3610570 - RNA, 22 nt, Human
ccucuagaaacgaguugguguc

SEQ ID NO: 3610571 - RNA, 17 nt, Human
ccucuagaaauuuuuca

SEQ ID NO: 3610572 - RNA, 15 nt, Human
ccucuagaagccaag

SEQ ID NO: 3610573 - RNA, 22 nt, Human
ccucuagagaaauaagaucuuu

SEQ ID NO: 3610574 - RNA, 14 nt, Human
ccucuagagccuuc

SEQ ID NO: 3610575 - RNA, 22 nt, Human
ccucuagagccuucagccuuaa

SEQ ID NO: 3610576 - RNA, 10 nt, Human
ccucuagcug

SEQ ID NO: 3610577 - RNA, 23 nt, Human
ccucuagcugaauugagccuaaa

SEQ ID NO: 3610578 - RNA, 19 nt, Human
ccucuaggcucugccuucg

SEQ ID NO: 3610579 - RNA, 22 nt, Human
ccucuagguccccauacuccua

SEQ ID NO: 3610580 - RNA, 21 nt, Human
ccucuagugaauguaggcugg

SEQ ID NO: 3610581 - RNA, 22 nt, Human
ccucuaguuuuuucuuccuuuu

SEQ ID NO: 3610582 - RNA, 20 nt, Human
ccucuauugauguacagucu

SEQ ID NO: 3610583 - RNA, 21 nt, Human
ccucuauuuauguuugcacuu

SEQ ID NO: 3610584 - RNA, 13 nt, Human
ccucucacacaca

SEQ ID NO: 3610585 - RNA, 16 nt, Human
ccucucaccucagccu

SEQ ID NO: 3610586 - RNA, 19 nt, Human
ccucucacugucugagagu

SEQ ID NO: 3610587 - RNA, 21 nt, Human
ccucucagagcuacuugggcc

SEQ ID NO: 3610588 - RNA, 23 nt, Human
ccucucaggauccaagcuaagca

SEQ ID NO: 3610589 - RNA, 14 nt, Human
ccucucaggcaugc

SEQ ID NO: 3610590 - RNA, 21 nt, Human
ccucucaggcaugccugugug

SEQ ID NO: 3610591 - RNA, 16 nt, Human
ccucucagugcccucc

SEQ ID NO: 3610592 - RNA, 13 nt, Human
ccucucaguguuu

SEQ ID NO: 3610593 - RNA, 23 nt, Human
ccucucauauauagacagcuuug

SEQ ID NO: 3610594 - RNA, 19 nt, Human
ccucucauuuagccugucc

SEQ ID NO: 3610595 - RNA, 12 nt, Human
ccucuccaaggg

SEQ ID NO: 3610596 - RNA, 13 nt, Human
ccucuccaagggc

SEQ ID NO: 3610597 - RNA, 12 nt, Human
ccuacagcauug

SEQ ID NO: 3610598 - RNA, 15 nt, Human
ccuacagcccaccug

SEQ ID NO: 3610599 - RNA, 19 nt, Human
ccuacagcuugaccgugag

SEQ ID NO: 3610600 - RNA, 20 nt, Human
ccuacagcuuugaucccuga

SEQ ID NO: 3610601 - RNA, 14 nt, Human
ccuacaggcugacg

SEQ ID NO: 3610602 - RNA, 21 nt, Human
ccuacaggcugacguuccggg

SEQ ID NO: 3610603 - RNA, 16 nt, Human
ccuacagggggucugg

SEQ ID NO: 3610604 - RNA, 22 nt, Human
ccuacaguuuuaacuguggaua

SEQ ID NO: 3610605 - RNA, 18 nt, Human
ccuacaugcuuugugaac

SEQ ID NO: 3610606 - RNA, 13 nt, Human
ccuaccaaccucu

SEQ ID NO: 3610607 - RNA, 18 nt, Human
ccuaccaauagauucccc

SEQ ID NO: 3610608 - RNA, 16 nt, Human
ccuaccaauauuaggu

SEQ ID NO: 3610609 - RNA, 22 nt, Human
ccuaccaaugcaugcagccacu

SEQ ID NO: 3610610 - RNA, 16 nt, Human
ccuaccacagugucug

SEQ ID NO: 3610611 - RNA, 23 nt, Human
ccuaccagcgcccgcugggcuga

SEQ ID NO: 3610612 - RNA, 16 nt, Human
ccuacccacaccucug

SEQ ID NO: 3610613 - RNA, 17 nt, Human
ccuacccacaccucugc

SEQ ID NO: 3610614 - RNA, 20 nt, Human
ccuacccacaccucugccag

SEQ ID NO: 3610615 - RNA, 13 nt, Human
ccuacccacccuc

SEQ ID NO: 3610616 - RNA, 12 nt, Human
ccuaccccacac
